United States Patent Application Publication US 2017/0009304 A1 - sequence listing, part 41

SEQ ID NO: 858559 - DNA, 137 bp, Homo sapiens
ggtggacagaatgaatcttttaagagatatgaagaagaattagagatcaatgacttcccacagcattttatagaaatcactgatgaccagtttgactttcatacatactgtatgaggaagattacccttagatcata

SEQ ID NO: 858560 - DNA, 100 bp, Homo sapiens
ctaagcaaaacgcacagcaagtcacccgaacaccattcacagtttgtaacagacgtggatgaagaatagctctgcagatctgactgcagccatgagcagc

SEQ ID NO: 858561 - DNA, 100 bp, Homo sapiens
ggttacagtgttgtgcttctttttcagtcatggagaggtgaatctggattgggaaagtcgacattaatcaactcattattcctcacagatttgtattctc

SEQ ID NO: 858562 - DNA, 100 bp, Homo sapiens
gcggacatttaggaactggatgaactccctgggtgttaaccctcgagtcaatcatttgtacagttgcatttgctggtctggcctttgcgtccttctacct

SEQ ID NO: 858563 - DNA, 100 bp, Homo sapiens
aatgcagttcatcacatcattcatgattttcagattccgttcagtgtggcctgaaaacaccatgtgtgccaagttccagttcacgccaacacatgtgggg

SEQ ID NO: 858564 - DNA, 99 bp, Homo sapiens
gagctcccattaggagccgctggctgcggcagcaggggactagcgtgagaggcgcctgtgtctggcagagctggtgtgagacgagacaatcctgccccg

SEQ ID NO: 858565 - DNA, 98 bp, Homo sapiens
atttcgaaggactctatccaacctattatataagagacggaggatgcaaatgaagaagccccattgagggaccgctcccacatcgagaagaccctcat

SEQ ID NO: 858566 - DNA, 100 bp, Homo sapiens
gttgagacagacgactgggatggaccagctggagctctcaaacactgctgtcctgcaccagatgcggcgggaccaggtgacagacacgtgccgagccaac

SEQ ID NO: 858567 - DNA, 99 bp, Homo sapiens
ttgtttcaaaagaaacatgttggaagatcaaaggcacaggtatctagaagagcagaagacagagaatggaaaagataaggaacagaaacaaacaaatac

SEQ ID NO: 858568 - DNA, 100 bp, Homo sapiens
tcttcattcgctacaaatacagccgggtggctgactacattgtgaagacctgatggccaaaagaaaggaagaaaatttttcctctcctaaaaatgccaaa

SEQ ID NO: 858569 - DNA, 100 bp, Homo sapiens
ggatacccaacaaacgcttccaagccctgagactccatgactcgctgggagtgtggaattggttggaccaatctgacactcctccagcactgccggagag

SEQ ID NO: 858570 - DNA, 100 bp, Homo sapiens
cggagagcagtgcagcgtgtgtggggtcgagcttcctgataacgaggctgtggagcagcacaggagttggcatcctttggaagagttcgtgaaagctttc

SEQ ID NO: 858571 - DNA, 98 bp, Homo sapiens
accatctcagaagccatgcccctcaggctggaacttgccctgtctcctcgcagatgagacaacagcagttctgtagagagtttaaatatgaaggaatg

SEQ ID NO: 858572 - DNA, 100 bp, Homo sapiens
cgaccaagagctgaagctgatcgattcacagtctgagaatgaggcttcaccagtaaaacggccacgactacttgagaatacggaacggtccgaggaaacc

SEQ ID NO: 858573 - DNA, 98 bp, Homo sapiens
acaacctgacacagccaattatacatcgtgacttgaacagataaagcttcaccaagaaggttgcccaggaaacgggcacagaagagatcagtgggatc

SEQ ID NO: 858574 - DNA, 100 bp, Homo sapiens
cttcaattttgatacacgtggagcagctggaaactgttctgagcaggaagggcagcaggctggatctccagaactgttctctggaggaccctggtccaaa

SEQ ID NO: 858575 - DNA, 98 bp, Homo sapiens
aagggaggcaacagcagcgtgaagttggaggctggcctggccaacaccatcaccagctttattgacaaagggcaagctctacctacaaggactccaac

SEQ ID NO: 858576 - DNA, 99 bp, Homo sapiens
cccagcaagatgcggaggctgcctcggcggagcagaggaaccacacgctgatcatggtgagcaggagccagctgtaagcagtgattctgacatttcctt

SEQ ID NO: 858577 - DNA, 100 bp, Homo sapiens
aaagtgaacgaaccccacaagaattccatattggagctgcccgctcactccagtagtcagcaagtccagcgcgggggctatggaggtgatggacgtgttc

SEQ ID NO: 858578 - DNA, 98 bp, Homo sapiens
agcgcgccggctccctatctgggaaacaaagtggtgagagcggctgaggaggctgcgtccacactggccagttccatccacccggagcagtgcatcaa

SEQ ID NO: 858579 - DNA, 100 bp, Homo sapiens
agatggaggactttcccgcgcaagggggacaggctggactgaaagaggacacgggaagaacaaagacttagactcgaacccttaggagaaatcttgagag

SEQ ID NO: 858580 - DNA, 100 bp, Homo sapiens
gacttgactactcgcatcgcgcactttttggatcggcatctagtctttccgcttcttgaatttctctctgtaaaggagatctggcagaggacggaaatta

SEQ ID NO: 858581 - DNA, 100 bp, Homo sapiens
caggcgcagcggccgcagcagcagcggcagtcacaggcacatcagcaaagaggaaacttccattttagaagaatacagtatcaattggactcagaagctg

SEQ ID NO: 858582 - DNA, 100 bp, Homo sapiens
gtgcggctccaccccttccacgtcatccgcatcaacaagatgttgtcctgtgctggggctgacaggagtcaaattgactttatcagctttaatcgatggg

SEQ ID NO: 858583 - DNA, 98 bp, Homo sapiens
ttcctgcatgaagacagtggctggcggtgcctggacgtacaagttgggagccacgtgtaccagtgtgtgttgatcttggcttgattcagtctgccttg

SEQ ID NO: 858584 - DNA, 100 bp, Homo sapiens
gccaagggctacattgaggtgatgagggtggatgtgaacactgaccggaagatcagtgccaaggagatgcagcgctggatcatggagaagacggccgagc

SEQ ID NO: 858585 - DNA, 98 bp, Homo sapiens
ggggtcgagcttcctgataacgaggctgtggagcagcacagagactctccaacatgtgccttctgaccatacaaatgaaacttccaacagtactgtga

SEQ ID NO: 858586 - DNA, 99 bp, Homo sapiens
ttgaaagcgacaagtggaggcgccgctctagcggccgggactctgaactatggcggcacattgcaagcaacccgtgccttgatggtggttggcatcctc

SEQ ID NO: 858587 - DNA, 98 bp, Homo sapiens
ttgctatgatcattgacaaactggaagaggtgccatgtttcagaacagagtaagacccctggtaaagaagaactgaagatattatacagataccagat

SEQ ID NO: 858588 - DNA, 100 bp, Homo sapiens
atctgtccaaaggctatgcgtacgtagagtttgagaatccagatgaagccgagaaggcgctgaagcacatggatggagacacctagctcccctgtttgac

SEQ ID NO: 858589 - DNA, 100 bp, Homo sapiens
aaagcagtgacggaggagcttgtaccaccgctctctattggaggcatcatcattctgaaggataccagtgaagacattgaggagctggtggaacctgtgg

SEQ ID NO: 858590 - DNA, 98 bp, Homo sapiens
tccgggatgctgtactccttgtctttgcaaacaaacagtttgggatatgagattgaaaatgacgactcggaattttcctgagagagaagtaccctgtg

SEQ ID NO: 858591 - DNA, 100 bp, Homo sapiens
aagacaaacagacccagcagaacagaggcttcgcatttgtgcagctgtcctctgcaatgtggtcctttggcgtgctcctctgggagctgatgacaagagg

SEQ ID NO: 858592 - DNA, 98 bp, Homo sapiens
accaacacattttctggtgatacccaagaaacatatatcccagatttctgtggcagaagatgatgatgaaagtgccctggtatgcgtccaccactagg

SEQ ID NO: 858593 - DNA, 100 bp, Homo sapiens
gcagtcccacaacattctggatctgcttcgaacctggaatatccggatggtcaccatcatgtccataatgctgtgaatgtccctcttccagtggaaagcc

SEQ ID NO: 858594 - DNA, 100 bp, Homo sapiens
cgagcgggagctgcagcgcctgcagcaggagaaggagtggctcctggctgaggagacggcagccacggcctcaggcagcggaggaggagaaagagatgga

SEQ ID NO: 858595 - DNA, 98 bp, Homo sapiens
gatgttcacagattcagctcccaggtgaggcaggcgactaatcagattgtgatgaattgtgctgatattgatattattacagcttcatatgcaccaga

SEQ ID NO: 858596 - DNA, 98 bp, Homo sapiens
agctgtggtgccacttctgatccgctgcctttcatccagatggtacattatatctccaccacttccctttggatctatcttgggatcccatggctttc

SEQ ID NO: 858597 - DNA, 120 bp, Homo sapiens
tcacttggagtgctgtcccttggaacaggaggagtaagattgaggggttcagctgttgcaaaaataattggtaataatgtcaagaaacttcagaaatttgcctccacagtcaagatgtgg

SEQ ID NO: 858598 - DNA, 99 bp, Homo sapiens
caggacatcttgaccatcttcaagcgcctccgctcggtgcccactaacaaggtccctttctagagataggagaagagagagatcgctgtctcgggagag

SEQ ID NO: 858599 - DNA, 99 bp, Homo sapiens
gaaaaacagtgctcggaaagcatctattgtgaaaaacctaaaggataccttaggacatccaggcagaaattgatgcccacaatgacatatttaaaagca

SEQ ID NO: 858600 - DNA, 98 bp, Homo sapiens
gaagatggcggccggcgaaaggagctggtgcctgtgcaagttgttgaggaaagatgaatgggagggctgattttcgagagccgaatgcagaggttcca

SEQ ID NO: 858601 - DNA, 98 bp, Homo sapiens
ctacctctggccccgagatcagaatgccggagatgttacagcccagatagctcttcagcctgcactgaagttcaatggtggtggtcatatcaatcata

SEQ ID NO: 858602 - DNA, 117 bp, Homo sapiens
aagacttgctagttaggattttattactggcagcatgtatatcttttggggagctgatcaccttctattactattggaagaagacccccgaagcagccagctcccgagcccatcgta

SEQ ID NO: 858603 - DNA, 100 bp, Homo sapiens
gaggcataaccatatatgctgatccagatgtaccagaagcaagacagctcagcagctcctcctcctatagtggggacatcagcaggcaccacaacagcac

SEQ ID NO: 858604 - DNA, 99 bp, Homo sapiens
aaaaacagaaaaatgcacaacagagggacaacaaaagcctcctacaagagtcctaccaaaagctccttctcctgaaaaagccgaggaggagagtgagag

SEQ ID NO: 858605 - DNA, 100 bp, Homo sapiens
tgcaagtggttgaagaaacattgtccgaatcagtatcagatctacagtgagtcattcaaacagcatgacataactgccacataaagaagatccctaatag

SEQ ID NO: 858606 - DNA, 101 bp, Homo sapiens
ctggcgggagcgcggttcggggccgcagaggtaacacaagtggcaagacagccgggaacccctaccccatccccttattcagcacatgaaataaacaaggg

SEQ ID NO: 858607 - DNA, 98 bp, Homo sapiens
cgagcgctcgccgcgcccggctgccgacaatgcagatcttcgtgaagactctgactggtaagaccatcaccctcgaggttgagcccagtgacaccatc

SEQ ID NO: 858608 - DNA, 100 bp, Homo sapiens
gagttatttctcttttgaaaaatgcatccattcagcatcttcaagagatggacagtggacagatgatgttgaatttgaagtatcatcggaccgacggact

SEQ ID NO: 858609 - DNA, 100 bp, Homo sapiens
cccgaaggcgtagacatcctgataacccatggaccaccactggatttcatgaacgtctactaccagatacgctccagccagctggaccgctccatcaaag

SEQ ID NO: 858610 - DNA, 98 bp, Homo sapiens
ctgtgtcaaggatgagaaacatgctcgacgagatactgcttttgcaaaaaataaagatgatggaaaatggtactattttgatgacagtagtgtctcca

SEQ ID NO: 858611 - DNA, 100 bp, Homo sapiens
ctccagggttctttggggcccgagagggtgctcgagaggaagacctcgatgctgtggaagcgcagattggctgcaagcttcctgacgattatcgatgttc

SEQ ID NO: 858612 - DNA, 100 bp, Homo sapiens
aaagccctgcaggatacatgccatattcccatccttcaagttacacaacacatccacagatgcaacaaggtcatgtggactttaccttggaggttgagcg

SEQ ID NO: 858613 - DNA, 118 bp, Homo sapiens
catccatggaggagggtgcattctgggtgatgacatgggacttggaaaaacagtacagcctgtggacatctctacagcaatgagtgaacgggcacttgctcagaaaagactcagtgag

SEQ ID NO: 858614 - DNA, 100 bp, Homo sapiens
ctatgtggaggagatgtactgtgcttggctggaaaaccccaaaagtgtacataaggggccatttgctacctttaagatgcagtatgatcgaacttgtgag

SEQ ID NO: 858615 - DNA, 99 bp, Homo sapiens
tctgattgagcaaaccacagctctcaacaagcgagtagaagccatgaaacagactctcctttccaattcctcggaaacaggcactgccagtggactggt

SEQ ID NO: 858616 - DNA, 100 bp, Homo sapiens
aggaggtggagttgctgcccttccggagtccgccccgtgaggagaatgattgtcttcgcagttttaccgacttagaagaacttgatgagacagagttata

SEQ ID NO: 858617 - DNA, 99 bp, Homo sapiens
ttattcccttcaattcaagtaacagacgaaatctcacaaaactgtcccttatcttcagtcacatgctggcagaaatcaaagcaatctttcccaatggtc

SEQ ID NO: 858618 - DNA, 98 bp, Homo sapiens
agcaaggtacccaccaggccgattatgtccattgttctcttggagcagctggtcatcatgatacagtacctggactccatgaacggggaggatctgct

SEQ ID NO: 858619 - DNA, 99 bp, Homo sapiens
ttctccaatgtgtcatctgctttcgaaaaatgtcacccttggacaaggctgggccctgtctcaggcccccaggctttccccaaactggtgcggatcctc

SEQ ID NO: 858620 - DNA, 98 bp, Homo sapiens
agactttcacaaattctaacagatttccccaaattggatggttccattcagagccgatacatcagcatgagtgtgtggacaagcccacggagacttgt

SEQ ID NO: 858621 - DNA, 98 bp, Homo sapiens
gaaggagactacccaaaagcaaatggtttgctcgattttgacatattctacaacgtcactggatgcctaagcatgcttgagagttcaaaccggcttga

SEQ ID NO: 858622 - DNA, 100 bp, Homo sapiens
gatgggaacttgtgtgttaaagtaacagatgatttagttgtagctacagcaagctgggtagcaggcagatccaaaggatatcatgaagtttccagggcct

SEQ ID NO: 858623 - DNA, 98 bp, Homo sapiens
tcacggccgagcagattctacaacacatggtggaatgtatccgggaggtcaacgaggtcatccagatgccagaagtgggtggagaactgtaggagagc

SEQ ID NO: 858624 - DNA, 100 bp, Homo sapiens
agagattgtgaagaagaatttcgatctccgccctggggtcattgtcaggatttggaatgccctgacagataattatgggaatgtgatgcctgtagactgg

SEQ ID NO: 858625 - DNA, 98 bp, Homo sapiens
ttgcggagaggtcagtaactaaattggagaaaagcattgatgacttagaaggtggtgcaattcaagcaacagtcccggcttgaggaaaagcgcaaaaa

SEQ ID NO: 858626 - DNA, 98 bp, Homo sapiens
gacacgtacacagcaggactgagtgaagaagaacagctcgagagagcattacaagccagcctctgggaccgagctgagtcatccaatggtggctattc

SEQ ID NO: 858627 - DNA, 100 bp, Homo sapiens
catggcccaggcagaccttgcagtcaaaaaactggcgatggaatatgagaggagccctctggaaagaaaaggacagaccctgtgctttcatgaaagtgaa

SEQ ID NO: 858628 - DNA, 100 bp, Homo sapiens
aagaaccatgcctggtggatccagacatgatcaaagccatcaaccagggcaactatggtctacccaccagatgtgatagctggtcaaactcagaccgttc

SEQ ID NO: 858629 - DNA, 99 bp, Homo sapiens
agcagtgaactgctccgcatcgagcagaaggacttcaaggcactatgggagtactaacattctgagagagcctgtgtgtttaggaggatgtgagcacat

SEQ ID NO: 858630 - DNA, 100 bp, Homo sapiens
gaatcaagacagttatagtcaacatggttgacgttgcaaaggcgcttaatcggcctccaacgtcttcagcccccggagctgcccccttgaccatctcttc

SEQ ID NO: 858631 - DNA, 99 bp, Homo sapiens
agaaactcctggttgagctcaaagttattttacatttctcaaaccatgaattatgtgggacagctggctgggcaggtgattgtcactgtgaaggaactc

SEQ ID NO: 858632 - DNA, 98 bp, Homo sapiens
ttagtctgtaatggtgtccaaaattgtgcatacccttgggatgaaaatcattgtaaagggattgtcaatgaggcagatcagattccgatttgacgggc

SEQ ID NO: 858633 - DNA, 100 bp, Homo sapiens
gagatatagttggcaacctcactgagttagaatcagagttaagtgggcagaccaacatccacctcagcaaaaacttcttcctgacgaatcgcgccaggga

SEQ ID NO: 858634 - DNA, 99 bp, Homo sapiens
cttggcccaggaagcctggaacgcaaggaccggagggcgtgggctgggacgcccctaccttggtctttcagggacacaggcctgtactaccaccggtac

SEQ ID NO: 858635 - DNA, 101 bp, Homo sapiens
ttggagtggacgtcattgccgggaacgagcgagtcgccgctgcagccctagtgactgcggcctgcatcccggaatctttgtgacattctctctcagcattc

SEQ ID NO: 858636 - DNA, 74 bp, Homo sapiens
ccacccagtgaccggacttctcacccccaggatgtcatcgaggtacatagtggaatgtcatgggatcacccttc

SEQ ID NO: 858637 - DNA, 99 bp, Homo sapiens
ccaagagctatcaggggaagatatgcatcagttccatcgagccattactacagctctttcgacgtgtagcagcagctttgccgggaatggaaagcacac

SEQ ID NO: 858638 - DNA, 75 bp, Homo sapiens
tctacaaatgctagaagctatcaaagcccttgaagtcagaagaagcgcacgctgaaggggtccattgagctctcc

SEQ ID NO: 858639 - DNA, 100 bp, Homo sapiens
aaaacatatgatgcaagtgatagaaccccagtttcaacgagacttcatttcattgctccctaaagagtccatcaataaagccatggagaaagaccatgaa

SEQ ID NO: 858640 - DNA, 100 bp, Homo sapiens
cttacaacatggcagacattgacaagggggacacagcgattgccacgcgccattggaatgtccctggccaaggagctcatattctctgcgcgagtcctcg

SEQ ID NO: 858641 - DNA, 100 bp, Homo sapiens
acagaaattaatgcgaacagacagacttgaggtggacccaagtggagagattgtggaactggcgaaaggtgcatgtccctggaaggagcatctctaccac

SEQ ID NO: 858642 - DNA, 100 bp, Homo sapiens
aacctgaaaacagctcttcagcatctacgggaggcaaacttgtaaaacctggaacagcagcatcattgtcaaagtggttctcaccattcaggaagccctt

SEQ ID NO: 858643 - DNA, 100 bp, Homo sapiens
agaaggtggatttgatccctgtgaatgtgtttgctctcatgaacatgcaatgagaagactgatcaatctggcgcatattaaatttcctattgactacccc

SEQ ID NO: 858644 - DNA, 50 bp, Homo sapiens
ctggggtctccagactgtttttgcctcaaggaataggttctcctagtgtc

SEQ ID NO: 858645 - DNA, 100 bp, Homo sapiens
gaaatgaaggtaccctagaatccatcaatgagaagactttttcagctactatcgtcattgaaactgtcccagtagggatggcacaatcagcgaggacacc

SEQ ID NO: 858646 - DNA, 99 bp, Homo sapiens
ccgagccgccaccgcaggtcgaggacggtcggactcccgcggcgggaggagcctgttcccctgagatgcacactgctggtgtattgcacggaccttcca

SEQ ID NO: 858647 - DNA, 99 bp, Homo sapiens
gaacaggaagttgtggctgaggttcagaatgagtccctggaacgccagatgcgtgaaatggaagagaactttgccgttgaagctgctaactaccaagac

SEQ ID NO: 858648 - DNA, 100 bp, Homo sapiens
ttcggcgacagcaggaagaagaaaggaaaaggcgagaggaagaagaacttgcccgaaggaaacaggatcaagaattggttaaaatagttggaatacgata

SEQ ID NO: 858649 - DNA, 99 bp, Homo sapiens
gcaactcctaggatttgtcacgaatgggaagccaagtgccatcttcaaaatttcaggtcttaaatctggtatggaacccttcagatcaaagcttaccaa

SEQ ID NO: 858650 - DNA, 100 bp, Homo sapiens
ctctgctcttcagtacaatcctgaatcactagatttgatctacttggcgactttggaaggtttaattggctgggaaatttctatattgtattatcctaca

SEQ ID NO: 858651 - DNA, 98 bp, Homo sapiens
agccaggaagggaggcagaagcatgctaagaacaacagtcaggccaagccttctgcctgtgatggagacaaggatgatgatgacgatgatgatgcaga

SEQ ID NO: 858652 - DNA, 99 bp, Homo sapiens
acaaagaaaattgctcactttgatctcaaggtaatactgcattgcatgattgtgcagaatctggaagtttggacatcatgaagatgcttcttatgtatt

SEQ ID NO: 858653 - DNA, 98 bp, Homo sapiens
gttcaactcttctagcaacaattcaggaacatggttaccccacgatcaacttgggtattgtaggagacaagtgattggcgaggacaacgtggcagtcc

SEQ ID NO: 858654 - DNA, 98 bp, Homo sapiens
gtttttcaacattcttagtgactcagtcttgacatgggccaaggatcagcgcccagtgggcgaggtgggcaggaggatcttcatcatctgggccatca

SEQ ID NO: 858655 - DNA, 98 bp, Homo sapiens
aacctgaccaaccattcttacttcaacctggcaggccagtcttattgccagcagttttgaagatgactcccgtgtagcctcaccgttagaccagaacg

SEQ ID NO: 858656 - DNA, 98 bp, Homo sapiens
ctgaagaagttgattatatgacggtatttgatgagagggcagctaactttgaaaaccattcaggaaagcttggtgctacggccgagaaggcggctgcg

SEQ ID NO: 858657 - DNA, 119 bp, Homo sapiens
aaataattgtcagtctaacagaatcctgtcggagttgtagccatgccctaggtgggcttggattttacaggatatcttggggattgctttctgtctgaatttaattaaaacactgaagt

SEQ ID NO: 858658 - DNA, 106 bp, Homo sapiens
aataataagtattttcaatgtggagttctatgcagggaaatcctcattgacgattcaatttgttgaaggccaatttgtggactcctacgatccaaccatagaaaac

SEQ ID NO: 858659 - DNA, 100 bp, Homo sapiens
gccgcttggccaactttgggggatcttctggtcgaccagaccatcgaaaaggtctccttttgtgctcctgaccgcaacctggacaaggctttctcctata

SEQ ID NO: 858660 - DNA, 100 bp, Homo sapiens
cttgcctggcgaacaaatacaggcccatcacaggagcttgcaacaacagtccagaacatacatgtgcagctggcaaggagagatgctgtgtttcacggtg

SEQ ID NO: 858661 - DNA, 100 bp, Homo sapiens
caatggctgaggaattgaatgctgtcattgtttccattgaaacaagttgaaatcatcgcagaaggataaagttcgtcagtttatgatcttcacacaatct

SEQ ID NO: 858662 - DNA, 99 bp, Homo sapiens
ctgaactcacctaacccaagtcctggaggttgttatgacacaaagcatgttcagctcttgacacaaatccaccttcttgccacctgcaaccccaatctc

SEQ ID NO: 858663 - DNA, 98 bp, Homo sapiens
gggagcaatgttgcaattactatgaatctgatgaacaagaaaagagtgcctatcaagagtatgacagtgacagtgatgttcctgaggaactcaaacga

SEQ ID NO: 858664 - DNA, 100 bp, Homo sapiens
atgaatattatcggatgaagaaggaggaacttcggtagttatgtgacacatgaaaccaaacacttcatctacttctacctgggccaagtggccattcttc

SEQ ID NO: 858665 - DNA, 100 bp, Homo sapiens
gtatggtggaagagtcggggaccctcgaatcccagcttgaagctaccaaaacagatacattgataactccatttgtgggtttaatagaccacaacttcca

SEQ ID NO: 858666 - DNA, 99 bp, Homo sapiens
tcctgccctctttaaggcaattggtgtgaagatcctccaggtcctattgacaatactaagattgcagtcactaaatgtggtaatgtgatgcttaggcaa

SEQ ID NO: 858667 - DNA, 128 bp, Homo sapiens
ccaagtgatttcttccaaagcacaggaatctcactctgttaaagctggtctgttctaactgaggcgttggagagaagttttcaacttgggaaccaaccaaacgggagcttgaactgctgaagcacaac

SEQ ID NO: 858668 - DNA, 100 bp, Homo sapiens
tcctcaggttgctgcatggacacatggacgagtgtctcactgtcccttcaggagaacatggtgaagagcagcggagattatggtgacaagctgaacatgg

SEQ ID NO: 858669 - DNA, 98 bp, Homo sapiens
tgttgttggctgacttccggtggtgccaaagccgtttccgtggaatcaggccggctggtgagggtacagaagagcttaaagcagcgcctgggtaagag

SEQ ID NO: 858670 - DNA, 100 bp, Homo sapiens
tcaccgcagtctcgactttcctgggctcagccaacatcccatgcaccatcgtggagactggctggatgccctgtgctctatcagggcatgtcagaccaac

SEQ ID NO: 858671 - DNA, 98 bp, Homo sapiens
ctctgagctcaacggaggattgtgcctgagaagaacccacagaggtgtatgtgctcaagaggccttatgtggatgagttcctgagacgcatgggggaa

SEQ ID NO: 858672 - DNA, 100 bp, Homo sapiens
gatctcttcacggaaatggatgaactgtgttacagagatggagaagaatatgaatggaaagaaactgctagcttcaagagatagaggaattcaaagagag

SEQ ID NO: 858673 - DNA, 100 bp, Homo sapiens
gagcttctttcttctggcatcattaacggaccttttaccatgaatagttctactccttctacagggtgtcaaattgagaaccaggtagatccccaccacc

SEQ ID NO: 858674 - DNA, 100 bp, Homo sapiens
gtgactgtagtccacatggagctctcagcataccgtgcaacaggactgaatttgctcttaaagaaatcatgtcctctggaggtgctgaagatgatatccc

SEQ ID NO: 858675 - DNA, 138 bp, Homo sapiens
gaaattacttcttcccgtaatacctttgctcaataccaatatcaacatcagaacagatctgagcaggtagttgaactaaaattcggtgggaaagacatccctgtcaccagcgccaaccggattgcgtacatccacttg

SEQ ID NO: 858676 - DNA, 100 bp, Homo sapiens
gcagatgattcaacagtatgaaatgtactgcaaagattcacgggaaatggtgttcacactggccctgaatcaagggaacaccagttttcacatgctggca

SEQ ID NO: 858677 - DNA, 100 bp, Homo sapiens
cgccagagacgcacttttaaattccatgacaagggcaaatttgagaagattgctcagcgattacggacaaagggaagtatggccacggctgcattaccgg

SEQ ID NO: 858678 - DNA, 100 bp, Homo sapiens
ttcaccacgcggctgcacaactgcaggaacaccgtcacgctgctggaggaggtgaagctcgtgtgtggagtgccacggtacaatcagacgacagatggac

SEQ ID NO: 858679 - DNA, 106 bp, Homo sapiens
atctgtggcaggagcttttcgtaaagggaagtcatttctactggacttcatgcttagatacatgtataacaagcggggatctgatgagcttctttcttctggcatc

SEQ ID NO: 858680 - DNA, 100 bp, Homo sapiens
gggctgcaagttcccatccataaatcaggtgttccaacgccaagccaagaaattctgcggcacacgctgaacacgctggtacgggagaggaagatctacc

SEQ ID NO: 858681 - DNA, 100 bp, Homo sapiens
ggccgagcaacagtgtagtggcgtattccacatagcaaacaggttccttgcattgactccatggagagtatatcacctgatttccgtcatgatacttggg

SEQ ID NO: 858682 - DNA, 100 bp, Homo sapiens
atgaaactgacactccagcacagactctgtttgctggctacacggacaacctggtgcgagtgtggcaggtgaccattggcacacgctagaagtttatggc

SEQ ID NO: 858683 - DNA, 100 bp, Homo sapiens
aaaagggaagggagagaaaaaggagagcctctgagctcaacggaggattgtgcctgagaagaacccacagagggtaatactgaacaacctgtccaaacta

SEQ ID NO: 858684 - DNA, 100 bp, Homo sapiens
aaatgattgataagacaaaggtggagaaatctgaagccaaagctgcagagctggaaaagaagcttggtgtttcacttagcagtttgggagctataccagc

SEQ ID NO: 858685 - DNA, 98 bp, Homo sapiens
tgcatttcaactctagaggaaaaaattgaaagagaaaaggaattagcagaagacattatgtcaggtataagaagctgctgtccctcttaacctttgct

SEQ ID NO: 858686 - DNA, 99 bp, Homo sapiens
gcgcgtcaggccgcgacgagggcgctgagaaagtatgctgaggccttggattaccaccgtcaggcactggtgttgattcctcagaacgcatccacctac

SEQ ID NO: 858687 - DNA, 51 bp, Homo sapiens
ggctggtgcgtcgtcgctctagactgaaacagcagagcttcctgcttctga

SEQ ID NO: 858688 - DNA, 100 bp, Homo sapiens
cagagcaaggggcttacgcagaaggacctggccacgatgctcagccagcattgggcagcccccgcttcctgctcccctacccccttcacatggcagtagt

SEQ ID NO: 858689 - DNA, 100 bp, Homo sapiens
aaaagattcagagttggataagcacttggaatcacgggttgaaggggccattgacatttagggatgtggccatagaattttctctggaggagtggcaatg

SEQ ID NO: 858690 - DNA, 99 bp, Homo sapiens
aagctgaaaccacagacatgactgagtcctccatgaagactttttcctgaaaccaagtacctctggtgacagtttacaaagtggaagcattccattggc

SEQ ID NO: 858691 - DNA, 99 bp, Homo sapiens
tcagccaggacccgggctccaaggccgtcgccgaccgctacgctgtctactggaacagcagcaaccccaggtatatgtctcgagtccacggtatgcacc

SEQ ID NO: 858692 - DNA, 100 bp, Homo sapiens
agtcggacctttcccgctggcgcgcagcctcagctaggtttttcttcccccagtccctcagctgctgctgctgctcaggaggtcagatctgccactgatg

SEQ ID NO: 858693 - DNA, 100 bp, Homo sapiens
tctacgtgtcccccgaggatctggaggcacagctgcagtctgacgagaggggcttctaaccctcctttatgtgactcagagaaaggagacctcattccaa

SEQ ID NO: 858694 - DNA, 100 bp, Homo sapiens
gccctggaggagtccctgaagatctatgctcctctgtacttgctacttcaccgagccgtggtgcctggccctgttccacgatcgttttattgatctcagg

SEQ ID NO: 858695 - DNA, 100 bp, Homo sapiens
gcgggacgcgcacagtccctccacgcggaaagaagtaccttcgccggtcaccggctcctgcaggactagacgcttgaagcaaagctgccatcccagaaga

SEQ ID NO: 858696 - DNA, 100 bp, Homo sapiens
ttacttccaagtcatcaccagaaagtggatccaaacttctacagcaaaaacttacttcttttaggaaagacatacttgaaactacacaacaaaaagcttg

SEQ ID NO: 858697 - DNA, 101 bp, Homo sapiens
atgagttcttccagtcccctgaggtgatggcagggtaaaagccagagcaaggaaccagagagaccacttcctcccttaggtcctgtggcagttgatcctaa

SEQ ID NO: 858698 - DNA, 100 bp, Homo sapiens
gttcagctgctgcaggaccacggggaaattgccaagattggaattaacgacctctggaaagatgccttttatgttaccaggacaacagggccaagctccg

SEQ ID NO: 858699 - DNA, 100 bp, Homo sapiens
gccgctgccgctgccgcacctccgtagctgactcggtccggcctctttggcctacccccgttggctccgctgccccaggtcgatgagtcccctgtcaacg

SEQ ID NO: 858700 - DNA, 100 bp, Homo sapiens
tcatggaacccaaacctcagaagagtccaggcaagaaataccgcccacgaatggatcaggaagtctctgaccaagccattagcagagaatgaagaaggag

SEQ ID NO: 858701 - DNA, 100 bp, Homo sapiens
cagagaagcttcatcaagccatgaaactgttaaacgtttaatgaaagaagcggcagaattgaaagatccaacagatcattaccatgcgcagcctttagag

SEQ ID NO: 858702 - DNA, 100 bp, Homo sapiens
tgcctggttggcagaatggccattaaacctgctgttctgaaagttgagacatttgggaaatgatgaagtgcacattgtttggtcagagcatactagagac

SEQ ID NO: 858703 - DNA, 99 bp, Homo sapiens
gacattgtcagctgcgtttccgcggtcgcgggagggaattgtcgagaatcttttcaaatgggcccgagaggccgatcaaccattgaggacatattctac

SEQ ID NO: 858704 - DNA, 98 bp, Homo sapiens
atcagtgtgacaattgccccttggaacacaatccggatcagtactatactggcaattgctggagaagattttgcaattgttgcttctgatactcgatt

SEQ ID NO: 858705 - DNA, 99 bp, Homo sapiens
tggacatggagaaagcagaaagcctgcaagtgacgagaggagacttccttgcttctttggagaatgatatcaaaccaagtcttgctatgttgcccaggc

SEQ ID NO: 858706 - DNA, 100 bp, Homo sapiens
cgggcccaggccccggcagcgcctgggacaagttcgggaccgagtgagatcgaagatggagagagacatcttggcagaagtgaatcaccccttcattgtg

SEQ ID NO: 858707 - DNA, 100 bp, Homo sapiens
ttgggaggagctgtgtaacagttgtgaaatggaaaatgaggtacttaaagtgctttccgaagctgctatttcagacctgtcatttactccatcctttata

SEQ ID NO: 858708 - DNA, 100 bp, Homo sapiens
gcctttaaatgcagcatctgcgatgtgaggaaaggcacctccaccaggtgtcagctgtgatgcatgtttaaaaggaaattttcgaggtcgcagatataag

SEQ ID NO: 858709 - DNA, 100 bp, Homo sapiens
ccgctgtcaatgccatcttcgagtggtccagtgttctgatttggcggaagatggagaaccgtgattaccgggatgcacaggagtttgctgctgatgtacg

SEQ ID NO: 858710 - DNA, 98 bp, Homo sapiens
acaacattgttcctggaacgccctctttttaaaaaaggcttctcgtcagtgcctcgcaggatggtaaacttatcatctgggacagctacaccaccaac

SEQ ID NO: 858711 - DNA, 98 bp, Homo sapiens
tgggagtcttctgctggaggttccttcactgtgcgtgctgaccatggaatgaggggagaatcatacttcatcggaatgaggagcccagggcagcaggg

SEQ ID NO: 858712 - DNA, 100 bp, Homo sapiens
ctcaaactgaatcctctaaaggccccatacaatgaagtagacattggtggaaacatttacacttttccagccattaactccaggctctcgagaatttgaa

SEQ ID NO: 858713 - DNA, 100 bp, Homo sapiens
caaaaagtaaaccacgatcgttatgctgagaacaagatcactcaaggtgaaggataatctactaataccagcactttgaatgaaaatttgtttctctgcc

SEQ ID NO: 858714 - DNA, 99 bp, Homo sapiens
gaagccgagtgctcctgcggctcccagactgcaaccaggcaagtatatcgcgtcaacacagcgacctgacgggacctggcgcaagcagcggagggtgaa

SEQ ID NO: 858715 - DNA, 100 bp, Homo sapiens
agaggaagggaagtactccctggtgatggagtacatggagaagggcaacctgatgcacgtgctgaaagccgagccaggactaaaagaagtggtagaatcc

SEQ ID NO: 858716 - DNA, 98 bp, Homo sapiens
cttagagcaggccgcttggttctgacccagctgagaccattactgggacttccacccccaccacgtgcacagcgagttcgagagcttcgccgagaaca

SEQ ID NO: 858717 - DNA, 100 bp, Homo sapiens
gctttgtgtgagcgcatgctcccagattactacaacaccagagttgtggctccaggtccagttcctgttccaggtcccaaaagccatccttctgcatcct

SEQ ID NO: 858718 - DNA, 100 bp, Homo sapiens
agacgtgattatgagggagtttcgttctggctctagcagagttttgattaccactgacctgctgggtggcgctccaaccccctttgaccggaactatggg

SEQ ID NO: 858719 - DNA, 116 bp, Homo sapiens
gaatttaagtcccatcagtggtttggagcatctgtgaggtcgaaacaggataaaattttgccttccttgaatccagaagctggcaaacagcatcagccatgcagacctattgggac

SEQ ID NO: 858720 - DNA, 98 bp, Homo sapiens
ccctgcctgaaatcctcattgagggcaagaactttatccccaggatctaaaccagtgctggacaatagatgctcaaacaaaatccagtctcatagcag

SEQ ID NO: 858721 - DNA, 98 bp, Homo sapiens
ggtagggaggccgactgagcaggagtcgtccgcttatagtggaggctgctaggagccggtcagaggaccagagtgaactccgagcaggaacacttcct

SEQ ID NO: 858722 - DNA, 98 bp, Homo sapiens
actgcagcgccagcggcgcagcgtctatggcaccgcggagttcaaggagcctacgccgagcctcaccggaaccctaaggactctgcaatatgaataat

SEQ ID NO: 858723 - DNA, 100 bp, Homo sapiens
attgggtggcaggagaagctctttagccaggaagttttattcagtgtatgggtctggtcaaagagcttttgatctattcaatccaaacttcaagtctacc

SEQ ID NO: 858724 - DNA, 100 bp, Homo sapiens
cgagatccagttcctgcgaactgtaattattcgaggtggaggacatattttaccctatgaccagcctctgagagcttttgacatgattaatcgattcatt

SEQ ID NO: 858725 - DNA, 115 bp, Homo sapiens
gggagaccctgtgcccctaaatcgcggtccactgcgcgcgtcagtgtgatccaggccaagccaccaagtacctatatgagctgctctacaacgaccctatcaagatcatccttat

SEQ ID NO: 858726 - DNA, 100 bp, Homo sapiens
catattggagactacaatatggatggctatccagacgctctggtcatactaaagaacacatctggaagggacattagtcatgagtgccgagtgtgcgggg

SEQ ID NO: 858727 - DNA, 99 bp, Homo sapiens
atttttgcaagaaaaggggccttctgtggattggggaaaaatccagagaccccctgaagattcgacttgtgtatgcggatacctgcttcagtaccatca

SEQ ID NO: 858728 - DNA, 100 bp, Homo sapiens
cgccgctggcagccggggagctgcaggaaccagactgggggcgagctgagcacctgtagtcaatcacacgcaggggagtcctcagcactgcctcttctat

SEQ ID NO: 858729 - DNA, 100 bp, Homo sapiens
ctggtgctgtctgggcttcatagcattcgcctactccgtgaaggaccaagttcctgagcgacaggtggatgctgcagaagggctttctgaaggaggagga

SEQ ID NO: 858730 - DNA, 100 bp, Homo sapiens
tgaatttccatgtcaacatagtccagatgaagcaaactttaattagatcccaatttgcttgtacttataaagatgactacatgataagcaaggataattg

SEQ ID NO: 858731 - DNA, 100 bp, Homo sapiens
gaaggagatgaggaaaatgatccagactatgacccaaagatttacactgactgggccaaccactacctagcaaaatcaggccacaagcggctgatcaagg

SEQ ID NO: 858732 - DNA, 98 bp, Homo sapiens
ggctgtgggcttccccatgatgatcctgccatgcaggcaggccctgagcacgctgctgtgtgagcagcaggttattgcagctgactgcaaaagggtca

SEQ ID NO: 858733 - DNA, 98 bp, Homo sapiens
aagaggcccaccctggagtaaccctcactggagaatccagaggttgtaggtgacgtggacaccagcctcccacggaccctagacgagcttggcatcca

SEQ ID NO: 858734 - DNA, 100 bp, Homo sapiens
gaggaggtccctacctgccacggataccagtcagtggaactgtcaccgctgttcccagacacacttattctgggtctggagatccgggtgaaggtctcag

SEQ ID NO: 858735 - DNA, 98 bp, Homo sapiens
gctgagaccgaggagaccagggcagaagaagtccccacgagaagaagaagaagaggcggtcccggtcgcggaccaagtccaaggccaggtctcagtcg

SEQ ID NO: 858736 - DNA, 100 bp, Homo sapiens
attcccttaaaaagacggacagcccatcgtgtgaactatagagtttgtggacagatttatattggttcgagaacttgtcttggacaattgcaaatcaaat

SEQ ID NO: 858737 - DNA, 100 bp, Homo sapiens
tgtgattgtggactacaacacaacagacccactgatacgctgggactcgtacgagaacctcagtgcagatggagaagagaggaagcagtgcattggtgaa

SEQ ID NO: 858738 - DNA, 100 bp, Homo sapiens
agtccctctatcacatatgacatcagtcagttgtttgatttcatcgatgatctggcagacctcagctgcctggtcgatgtgcattttgtaagcactttgg

SEQ ID NO: 858739 - DNA, 100 bp, Homo sapiens
tgtgattggcacaagtcaccccaagatgaagtggctgtaattgatgaaattcaaatgattagagatccagccagaggatgggcctggaccagagcacttc

SEQ ID NO: 858740 - DNA, 99 bp, Homo sapiens
gggagcaggattggtttaaaatccgggaagaggtgccaggtaggagcgatgcccagtgccgagatcggctgccttgccggcggggggagcccgaaacag

SEQ ID NO: 858741 - DNA, 100 bp, Homo sapiens
ggacgtggaggtgggaaggtgtgtccggaggtttgcaggggtgcagtgtgtctggtcttatgagaatcccctactttgaaactagtgctgccaatgggac

SEQ ID NO: 858742 - DNA, 100 bp, Homo sapiens
catccaggaaagacatggagattctcttaaaaaggttccatcaatggtgagcaccagcctgaatgcagaagcgctccagtatctccaagggtaccttcag

SEQ ID NO: 858743 - DNA, 99 bp, Homo sapiens
tctggtcttcgatgcacaggagtggccgttatggaacgcaggttaaagtattgcacaatcagctggtccttttccacaatgccattgccgcttactttg

SEQ ID NO: 858744 - DNA, 99 bp, Homo sapiens
accaccaagcgctttcccgagaccgtcctggcgcgatgcgtcaagtacactgaaattcatcctgagatgagtgctgctcacggccgtgaactgctacag

SEQ ID NO: 858745 - DNA, 100 bp, Homo sapiens
cttcctcgcagcgcgtactggcatcacatcactcgtcagaacagcgttggtgaaatctacagtttgcaagttgttgaaagtgatacactaacaattgagt

SEQ ID NO: 858746 - DNA, 100 bp, Homo sapiens
aaaaccagcgtggttctgagcacacggttaatttcaaagcttttcccatggagtgagtgatggattggaactgagaccgaaatataatggaattttacat

SEQ ID NO: 858747 - DNA, 100 bp, Homo sapiens
ctgcctcactgagcaaccaagatcaggccttgaaaagaggatagaccaggctgtggaggagtggaatattgagaaggctgaggaactcagcaaccagcta

SEQ ID NO: 858748 - DNA, 100 bp, Homo sapiens
caactaatagcccttgaacagctatgcatgctgcttttgatgtctgacaacgtggatcgttgttttgaaaccgaaatccgctcctgctcccaagaagggc

SEQ ID NO: 858749 - DNA, 100 bp, Homo sapiens
gcagctggctggcttcagtggaccaatattagttgccgctttgacattctttcttgggaaagatgaagatgaaaaacaggacagtgactccgaatctgag

SEQ ID NO: 858750 - DNA, 153 bp, Homo sapiens
ctcctgccgttcactggaagctgagggctttcaggtcacctacctcccagtgcagaagagtgggatcattgacctaaagctcagagtcaagatctccactgaagttggcatcacaaatgttgatctttccaccgtggataaggatcagagcat

SEQ ID NO: 858751 - DNA, 98 bp, Homo sapiens
gtgaggaccatcctgcccaagaacaacccacccaccatcgtgcatgacaaagtgctcaacctcatccaggcatgaatgctttacagttgcagaacctg

SEQ ID NO: 858752 - DNA, 100 bp, Homo sapiens
ctacacgttacgctattcgttgtggtccaaaacagtttacctcttatctaacagaaatcacctgctaagaagctgactaatgcattaagcaagtccctga

SEQ ID NO: 858753 - DNA, 119 bp, Homo sapiens
agagggcatcgtggccccactgcctggagagtggaaaccatgaagttccacctggtgccaagcatcaacaccatgagtggcagtcaggagctgcagtggatggtacagcctcatttcct

SEQ ID NO: 858754 - DNA, 98 bp, Homo sapiens
gcagcaaggtgggcccggacggcacaccctacgttaccgtgctcaagttcaggcttcagagagcccctgacgcctgcaggaacatggcagaggagaca

SEQ ID NO: 858755 - DNA, 100 bp, Homo sapiens
ctaaatcccctgaagatttgcctgccctcagtggttaacttttttgctgcaatcacaaaggaaaaagacctcgatgaagttctgcagacccactcagtgt

SEQ ID NO: 858756 - DNA, 100 bp, Homo sapiens
gttttcgtacgggcggccgtgcgcgaggcgaggttgacatcatggacatatgtgagtccatcctggagaggaagcggcatgacagcgaaaggtctacttg

SEQ ID NO: 858757 - DNA, 98 bp, Homo sapiens
cgcacctgtcggagacccgccagtccgccggccgcgggagtgaagagcaaggccagcctacccaactttcttgaccacatcattgcctcagtggtaga

SEQ ID NO: 858758 - DNA, 100 bp, Homo sapiens
ttttggaaccgcagcagggcagaggctgtggcagctcaggaagcggcccggggaactccatcacagcctgtaagaaggagaatgtactactcatcacctc

SEQ ID NO: 858759 - DNA, 98 bp, Homo sapiens
gggaagatgccgctggcgcagctggcggacccgtggcagaagatggctgtggagagcccgtccgacagcgctgaggggtgacagtccaaagattgact

SEQ ID NO: 858760 - DNA, 100 bp, Homo sapiens
ggccggcggtactatgtcaacacgaccaccaatgggcatccgcttcgatcctgaaattccgcaaacactacgactagagtttgctaaggcaaacacgaag

SEQ ID NO: 858761 - DNA, 100 bp, Homo sapiens
gctgatgaaacttgggactctgcaatagatacatggagcccatcagaatggcagatggcttatgaaccacagatcacaaatcgggacaaaccgctgtcat

SEQ ID NO: 858762 - DNA, 100 bp, Homo sapiens
aagcatcgaaagcgttggagaggtgttaccggaacggcggcgacaagggtgttcccgaactagagtggagttactgtgacaacaacatactttggccact

SEQ ID NO: 858763 - DNA, 98 bp, Homo sapiens
cgggatcagctctctgttttggaaaatggaaatcccagtgttccaatgcagaagttgcaggatatccagagagcaatggagctgctatccgcatgcca

SEQ ID NO: 858764 - DNA, 100 bp, Homo sapiens
atctcaggagtgtcattgctcatatagaagacccagaggacactaaccaaggtgacagagttagtccttgataattgcctgtgtgtcaatggggaaattg

SEQ ID NO: 858765 - DNA, 100 bp, Homo sapiens
ttggcatcactgcagctagtaatttgccttctggattaatatgacagatacctagcatctagcaaaataatggcagctgcttaccttgaccccaacttga

SEQ ID NO: 858766 - DNA, 98 bp, Homo sapiens
ctgtgccattaaaaacaacaaggaagctttcagtgtgtaccttgaaagacttttaacatacgcagagatagatatctgtccggccaactggaagcgga

SEQ ID NO: 858767 - DNA, 99 bp, Homo sapiens
tggaattgcatgggaaaatcatggaagttgattactcagtctctaaaaagctaaggtaagaatgattgatgttggctgatattggagtgctcattcaca

SEQ ID NO: 858768 - DNA, 98 bp, Homo sapiens
cagcccctctccagctcgaaatccgatgccctcctagctagccgtcacgggatggagggcttcatggactcagggacacagacggacgccgtggtggt

SEQ ID NO: 858769 - DNA, 100 bp, Homo sapiens
cagacagacaagacaaatgtgcccttggctgggatcaccaggagaaattgcagctgcatgaatcccaaaaagtcaagatcccacggcaagaggacttttg

SEQ ID NO: 858770 - DNA, 98 bp, Homo sapiens
agcagaggtcttcacactttcagtaccaaatatttcactcccagctccctcgcaattccagccttctgtaggatattaccttccaaatgatgatggag

SEQ ID NO: 858771 - DNA, 98 bp, Homo sapiens
cagccgaccttgagctccaggagttcgtctcttacgtctgcggaagtgcagctgcctcagttcttagcgcagagaatgcaagatggagattgaagaca

SEQ ID NO: 858772 - DNA, 100 bp, Homo sapiens
gcgagccgcgaaccgagcgggcggcgggcgcgcgcaccatgggggagaaacccgggaccagaaagttcaggagccctggaaaggagaaggaataagacgg

SEQ ID NO: 858773 - DNA, 100 bp, Homo sapiens
ccgcaggcgcaaggcttcaggcgacccgtactgggcctactctgcacttttccagccattaactccaggctctcgagaatttgaagatgttgtaaatatt

SEQ ID NO: 858774 - DNA, 98 bp, Homo sapiens
ctggtgcgggccctctggaccctggagtacaccccgcagcacagccgcgacttcaaggctggcagtgatggtgaaagcataggaaactgccccttttc

SEQ ID NO: 858775 - DNA, 100 bp, Homo sapiens
tccgttttacataatctgaaggatcgctactattcaggactaatctatgtggagccgccaccaaaatgcagattttcgtgaaaacccttacggggaagac

SEQ ID NO: 858776 - DNA, 98 bp, Homo sapiens
tacctccggatactcagtttgtaaaaacatggcggatccagaattctgataatgtatccagtgctgagggttggcatgtaaatgtgaccttgaatatt

SEQ ID NO: 858777 - DNA, 100 bp, Homo sapiens
ctcctagccaaattgctcaactaagaccaagtcctcgctggactgctcagggtgccagacctcatcatactccaagtatcacagctaaattaattagtga

SEQ ID NO: 858778 - DNA, 98 bp, Homo sapiens
gggagagctggggcggattggactgcctggtggcaaaggagatgatggctggccgggagctccgggcttaccaggcattgtgtccagatctggcaccc

SEQ ID NO: 858779 - DNA, 99 bp, Homo sapiens
cagagtcaaagaagaaaccgtgctcagaaactagccagattgaaggacctgagggcactcgctttgctcctgtcagtacacactcccaaacagttaaac

SEQ ID NO: 858780 - DNA, 100 bp, Homo sapiens
caacacagaatttctgcaagtaattgcatcgccctgagcaactggtggtttgtggcccacctgacagacctgctggaccactgcaagctcctccagtcac

SEQ ID NO: 858781 - DNA, 100 bp, Homo sapiens
tacaagtataattttcctcacacacagttacttgccaagacgattgaagtgatactgtgcttgtccaccgagttcacagttatttagagcgtcatggtct

SEQ ID NO: 858782 - DNA, 114 bp, Homo sapiens
tccactgactctctcttttcctgataacatggccagcaagaaagtaattacagtgtttggagcaacaggaattgaatgatctggcacgggaccctccagcacagtgttcagcag

SEQ ID NO: 858783 - DNA, 99 bp, Homo sapiens
gcatacatgccctacgtcaagaaggctcttgcagccaatgccggaacaggatttgctgttgctgagcctcaaatcgcaatgttttgtgggaagttaaat

SEQ ID NO: 858784 - DNA, 100 bp, Homo sapiens
tgcagaaataccagtccccagtgagggtgtacaaatacccctttgaattaattatggctattgtaaaccatggctgtgtggatacaagctcagcagctcc

SEQ ID NO: 858785 - DNA, 98 bp, Homo sapiens
ggagccggaggaggaggggagaggcctggaggacaccaacatgatcctgagactccagcaggatgtcttatcaacagcagcagtgcaagcagccctgc

SEQ ID NO: 858786 - DNA, 99 bp, Homo sapiens
cggacgtgagcgataatggcggatatggaggatctcttcgggagcgacgccgacagcgaagctgagcgtaaagattggaaagaagactgatgaagaaaa

SEQ ID NO: 858787 - DNA, 100 bp, Homo sapiens
ttctgggagctgaggaaccagatatcttgaaaagctgccagaaaggctctgtgtgctccgggatggagcaggtgtgcagagggtgagaacccagctctgg

SEQ ID NO: 858788 - DNA, 98 bp, Homo sapiens
atgacagcaaagcactgtgtggctgaataagcggcgcagttgtgtagcagttgagtaatgctggttagctgttaaggtggcgtgttgcagtgcagagt

SEQ ID NO: 858789 - DNA, 50 bp, Homo sapiens
ccatcaatcttgcaaagaatcttacagaaaaattggaagctccaccaccc

SEQ ID NO: 858790 - DNA, 98 bp, Homo sapiens
tgcctgctccacacgccaggccagcctccacggcgcagccaggtagctttggtgttcctgatgagtgtgctgttaaagaaagctgtcctcaccaattt

SEQ ID NO: 858791 - DNA, 100 bp, Homo sapiens
ccattcagatgggatctttccggatcaatccagatggcagccagtcagtggtggaggttgttcctcagatccctgtgaagagtggtggtccccatggggc

SEQ ID NO: 858792 - DNA, 126 bp, Homo sapiens
cacctctgacaaaattctggggacgctgggaacactgaatcaacatgggcaatgagaacagcacctcggacaaccaggctgaagccgacgtagcttctctgaacagacgcatccagctggttgagg

SEQ ID NO: 858793 - DNA, 100 bp, Homo sapiens
acctgtttccaggacaaccaagcattttcatgaaacaaccccaaataaaggaagtggaaccacttcagtgccgcaggttcttcaaagctgcacagcattc

SEQ ID NO: 858794 - DNA, 98 bp, Homo sapiens
tttgaggacacttgtggagagctcgaattccagaatgatgaaattgtgcattatattgtacttctagcaagtgcaccaacagaaaaacaacgcctgga

SEQ ID NO: 858795 - DNA, 99 bp, Homo sapiens
aaacagaaatgctctgcccttggagaactgctaacctagggctactgttgattttgactatcttcttagtggccgtctttaaaccagaggagttacgcc

SEQ ID NO: 858796 - DNA, 100 bp, Homo sapiens
catgagcgggagaagacgcccctggagcacatctttagagccatcctgatcaagaaaaccgacagacccaacatgagtgaagtttcctgcaagaaacggg

SEQ ID NO: 858797 - DNA, 98 bp, Homo sapiens
agatactctgactccacctttacttttacctacgttggcggccccagaaggctgctgacttgagtaaaccaatagataaaaggatatacaaaggaaca

SEQ ID NO: 858798 - DNA, 98 bp, Homo sapiens
gctgacgtcgcaaaaaaattggatagccaaatttgagtttcatcatggtgactatgaaaaacagtttctgcatgtactgagccgcaaggacaagactg

SEQ ID NO: 858799 - DNA, 100 bp, Homo sapiens
atccggaccctgagactcccctaaaggccagaaaggcaaaaatctccagccctacagagactgagcggtgcatcgagtccctgattgctgtcttccagaa

SEQ ID NO: 858800 - DNA, 98 bp, Homo sapiens
ctgacagcaacaagaaaatgtttccgacacatagccctcgattatgtgcttcagattagaaatgatatttgccaaatttgatgaagtgcaaagttcag

SEQ ID NO: 858801 - DNA, 99 bp, Homo sapiens
cataaacctatcttctttcattatggagggaggtttggcagatggagaacctgatcgaacttcgctttgttgacgaggaccttcactgaccatgtgatg

SEQ ID NO: 858802 - DNA, 100 bp, Homo sapiens
tcttgatccacttgctgataaaatacttatcagtatcttatatgttagcttgacctatgcagatcttattccaggacctgttactatgactagtgtacac

SEQ ID NO: 858803 - DNA, 100 bp, Homo sapiens
acaaggagaattacaagaaattctatgaggcattctctaaaaatctcaagggtaagatgataatgcaagataaattggaaaaagaaaggaatgatgctaa

SEQ ID NO: 858804 - DNA, 100 bp, Homo sapiens
ggtgatccgcgtggtcatccatgacctgcagcagacgtgtatgggtttcgacagaccatgatgaaattgagaatgtggccaaacaatttggtgcacaagt

SEQ ID NO: 858805 - DNA, 98 bp, Homo sapiens
tcatccactgatgattctaaaagcaatcttattagaggtggtgaagcagtattttccaatttgaagattcatttgaaggtggctcctgccacctgcta

SEQ ID NO: 858806 - DNA, 98 bp, Homo sapiens
aggaacccagcaacaattcttctgccagggtctccaactgaattccttgaagagaaaatggcctaccaggaatacccaaatagccagaactggccaga

SEQ ID NO: 858807 - DNA, 98 bp, Homo sapiens
ctgtcattcacaaccccctgaaagcgaggagatgaccgccgggttctgctatggcacatggaacaagccatccactccagggtcaagcccatacagct

SEQ ID NO: 858808 - DNA, 98 bp, Homo sapiens
ccgacccgacgccggagccgtcggctccgtccttaccgttgctctccagataacgaaggaggcccaacttcattcaataaggagcctgacggatttat

SEQ ID NO: 858809 - DNA, 100 bp, Homo sapiens
ggtgtatccttatcacggcgttctacacagcgactagaagagctgaaactggtcttcctgtccacttccaacgaagcggtctataagatctttgatgaca

SEQ ID NO: 858810 - DNA, 100 bp, Homo sapiens
gggcagaaaaatacaaagttggaagcaataccaaacagtggcatggaccacacccagcggaagtcatcatcagatttgaaatatttaaagtggatacaaa

SEQ ID NO: 858811 - DNA, 111 bp, Homo sapiens
cgtggacctaactgcaccagtagcttttctgagaatacttgctgaaaaggaagttttctggaatggtttcagattggagaactggcaaataccctgacaagtaaattcgag

SEQ ID NO: 858812 - DNA, 100 bp, Homo sapiens
tgctgtggtcacgtatactgcagaaagtaaaggagtcgtgaagtttggctggatcaagggtgtattattgatggagtttgcactgtagcaaattgcgttg

SEQ ID NO: 858813 - DNA, 98 bp, Homo sapiens
tcctcccgcacctgcggggcgaggaccgcgtctgccactgcaactgtggccggtaaaagcagctgttaagtatgcccttagcgtaggctaccgccaca

SEQ ID NO: 858814 - DNA, 99 bp, Homo sapiens
tggaggatgcctatgtattccctggggatggcgcatcacacaccaaagtctcacagaaagttctccgctcccagacatgggtccctcggcttcctgcct

SEQ ID NO: 858815 - DNA, 100 bp, Homo sapiens
tgcccgagaacatccagtttgatgtttactacaagccagagactgctgctactttgaaacgtacgatagaggccctgatggacagaggagcaatagtgag

SEQ ID NO: 858816 - DNA, 101 bp, Homo sapiens
cttgaattttctaaggtgtcattaggatctaaagaagtaccacttctactattggttttgctatcctgccctctgtcttccagagagtttacctctcattc

SEQ ID NO: 858817 - DNA, 100 bp, Homo sapiens
tccttgaaaagcatttaaatttgtccgcaaagaaaaaggagtctcatttacaagagtcatctctaggtatccatggaagattgcttccaggaccctcccc

SEQ ID NO: 858818 - DNA, 100 bp, Homo sapiens
acctggagaaggcagctgccatttagctgaagtgtggaggggaaatggcaacgcggtaaaaatattgcttcggtgggtgacgcggtacagctgcccaagg

SEQ ID NO: 858819 - DNA, 98 bp, Homo sapiens
ggtgacggaggaagggaagcgtcatccatacaagatgaatttagcctctgaaccccaggattctcagcaagttacagaagtatctttgacaactcttg

SEQ ID NO: 858820 - DNA, 101 bp, Homo sapiens
tgaaaaacaggcagccatgtctaaagcgctggtgaaaggtgtagcagtcactcggcctacacccacagcatcgaccttgtgaacccagcgacctgactgcc

SEQ ID NO: 858821 - DNA, 100 bp, Homo sapiens
gacctgcatgtactgggggattcgcagggaggatgtcgggacaccccggaagctgggaaatgggggattcccgaagtcttccgttttctgagaatgtgag

SEQ ID NO: 858822 - DNA, 98 bp, Homo sapiens
atcgcctccatctgtaatatgatttgaaggccatatagagatctgcccaccaggcatgagccattcagcttgttcagtaaacaagagtgttctagaag

SEQ ID NO: 858823 - DNA, 98 bp, Homo sapiens
tcacccggacatcaagtattcaccagttaatagcaccagctctttcgacgtgtagcagcagctttgccgggaatggaaagcacacaggacagaagcag

SEQ ID NO: 858824 - DNA, 98 bp, Homo sapiens
ctaacaaaaagtgagcggtatagctccagcgggtccccggcaaactccttccacttcaagccgactccacgggaacccactccctctacacgatgtac

SEQ ID NO: 858825 - DNA, 100 bp, Homo sapiens
ataagtcacaaagggaggagctggactccatcctcttcctttttgaaattgtgaagatggaaagggtccaacccctggaagagaatgtgggaaatgcagc

SEQ ID NO: 858826 - DNA, 100 bp, Homo sapiens
gtagcatggactcgaaagcaaatattgtacatgccacttcaaatccagttacacctaagccaccctattacaacatcctgctctattccttggtgccact

SEQ ID NO: 858827 - DNA, 111 bp, Homo sapiens
aactagcattctgaaagtgcattaacatttgtggccttgtgctctttcatcggacttctaatgaagttgattcaagtcagttgagacgccagttgtgtggaggaagtcagg

SEQ ID NO: 858828 - DNA, 106 bp, Homo sapiens
ttctttcaacgtacagaggctttgcctccactaaagaagtgctggaactactgctggacagatgcctaccttaatgcctctgaaacaaccactctgagcccttctg

SEQ ID NO: 858829 - DNA, 100 bp, Homo sapiens
tgctgaacagatacgccgtggagggacgagacctgaccttgcagtacaacatctacaatgttggctcaagctggggaccgctccttggcagatgtcatca

SEQ ID NO: 858830 - DNA, 98 bp, Homo sapiens
aagaggagcgtgctcaatgggaggtgtgatgaatgcagactctgctaccattttggctgtttggatcctcctttgaaaaagtctcctaaacagacagg

SEQ ID NO: 858831 - DNA, 98 bp, Homo sapiens
agaaaatactgcaacccaaactggctcctagtttctctgatgcacagaccctcagcaaagacccaaatatcgtcatagccaagatggatgccacagcc

SEQ ID NO: 858832 - DNA, 98 bp, Homo sapiens
atggagaacatgaagccagtcctgacaatgggcagaacgaattcagtgatatcattaagtccagatctgatctttaaatggatgagatggctaccact

SEQ ID NO: 858833 - DNA, 98 bp, Homo sapiens
ccttcccaaggaagtgctccagaagacatagggcctgattacattccaacagaggaagaaaggagagtcttcgcagaatgcaatgatgaaagcttctg

SEQ ID NO: 858834 - DNA, 100 bp, Homo sapiens
ctgggtggcgagactctcaaccccgtgtatgtgccctgcgtgaagaaaagtccaacctgatcgtggtccagagaggtcacagcccacccacatcatcctt

SEQ ID NO: 858835 - DNA, 100 bp, Homo sapiens
cgctactaccccgcagttcccggacatgatcctctccgcctctcgaggttgactatagtcaatggggccaatggagccaagtgtatggaaacccacaaca

SEQ ID NO: 858836 - DNA, 100 bp, Homo sapiens
gaacacatggaagaacatggcatcaagtttataagacagttcgtaccaattaaatatcctagaaggaaaacatcaccatggctacagaaattggttctcc

SEQ ID NO: 858837 - DNA, 98 bp, Homo sapiens
ctcccccttctttcgatcagagatcggcggagaccctcgaagtgcgcaaacttgacactcaccctgaccggagttcaaagaaggacgcagagccagcc

SEQ ID NO: 858838 - DNA, 98 bp, Homo sapiens
cagcgccagccgcaagagtcaggagaagccgcgggagatcatggacgcggcggaagtcagttcaccgggacctggaggcccagattgcgatcgtgacg

SEQ ID NO: 858839 - DNA, 105 bp, Homo sapiens
gcgtccgccgattcctcctccttggtcgccgcgtccttggctggcgtgatgatcggctgaatgtaacagaggaactaacgtccaacgacaagacgaggattctca

SEQ ID NO: 858840 - DNA, 99 bp, Homo sapiens
tttcctttatcttagccggaggacctgctgatctaagtggagagctcagaaaaggagatcgtattatatcgagcccacctgaatgaccttgaaaatatt

SEQ ID NO: 858841 - DNA, 100 bp, Homo sapiens
cggtgagcagtgacaattgctaggcggagacagtgcagggaagagagaccttagaaaggatcaggactggcggcttcacgaggctgacattgtggtccta

SEQ ID NO: 858842 - DNA, 98 bp, Homo sapiens
cgcgaccactggcacattcttgctgacaggaagaagatgaagtaccggacgatgagactctgaaccaaatgattgctcgacgagaagaagaatttgac

SEQ ID NO: 858843 - DNA, 99 bp, Homo sapiens
gtatacattcagtatcatggatgaatttcaggatctaagcctttcccacgttatggttataaaccctccccaccgaatggatgtggctctccactgttt

SEQ ID NO: 858844 - DNA, 100 bp, Homo sapiens
ctcctgcccggcctatgcctacgtgctcacggtcaacgagcggggcaaccactgcgagtactgcttcaccagatactgcttttgcaaaaaataaagatga

SEQ ID NO: 858845 - DNA, 100 bp, Homo sapiens
ggcttcttcagcgttttcggcatgtgtgtggacacgctcttcctctgcttccacatatgaagatccatgagaaggaccctaacagtgccacagccacagc

SEQ ID NO: 858846 - DNA, 100 bp, Homo sapiens
acctcgagcatcactttcaaaccagcatttttgaaacgttggggttgttggagtggttggattttccctggaattgagtgagaaattcagaagactgaag

SEQ ID NO: 858847 - DNA, 100 bp, Homo sapiens
gacagacaattgttcagttgcaaaaagaaactggagccaccatcaagctgtctaagtccaaagatttttacccagattcactgcgtgctgtcctcacttg

SEQ ID NO: 858848 - DNA, 114 bp, Homo sapiens
actagacctaacaaaacaagctccgaggcagtttaggagaaaggaggacggacttaaccaccaccatgtcgagcaaaagaacaaagaccaagaccaagaagcgccctcagcgtg

SEQ ID NO: 858849 - DNA, 130 bp, Homo sapiens
atgattgaaaacctgcggagacgccagtgtgacctggcgggagtggagacctgcaagtcattagagtcacagtggtggacacttcaaccctgcggtgtccctggcagccatgctgatcggaggcctcaac

SEQ ID NO: 858850 - DNA, 98 bp, Homo sapiens
ctgcccacatggggaaagcattcaaggttatgaatgaactgcggagcaatggcaccagcatgatatcattgatcattcctcccaaagaccagatttca

SEQ ID NO: 858851 - DNA, 100 bp, Homo sapiens
gcgcccgctccggccggccctgcgcctcccgccgcgcccgggatgtattcgtccccgctctgcctcacccagcagggagagcaacaagccccggccctca

SEQ ID NO: 858852 - DNA, 98 bp, Homo sapiens
cccagcccagctgcgtggtggtgactgtaccatgcggagaccatcaagaatgtgcgcacagccacggaaagctttgcttctgaccccatcctctaccg

SEQ ID NO: 858853 - DNA, 100 bp, Homo sapiens
agccagaactgctcaggcagctccgtagcatgaggaagagtcaggggcacagagagatggagagagacctagttaggtctggaacaaaaagaatgcaaat

SEQ ID NO: 858854 - DNA, 100 bp, Homo sapiens
gcatttgtcaatacgtggtcttctatgggtcaagaaacagttgaaaagttccggcagagaattctggctccctgtaagaacaaggcaaaggcaatctgca

SEQ ID NO: 858855 - DNA, 100 bp, Homo sapiens
acatctgaatttgatatccttgttattggaggaggagcaacaggaagtggctgtgcgctagatgctgtcaccagagctcaactgagaagtcatttccttg

SEQ ID NO: 858856 - DNA, 100 bp, Homo sapiens
gaagctgctaacccgacccggattggcgctgaggtggcccgtggggcaggcatttgcttcctgaatgatggtcccactcagccatccacctatactttct

SEQ ID NO: 858857 - DNA, 100 bp, Homo sapiens
aacagttccctgtcttgggaaaaggagaactcctgactgattagcattcacaccagacaatgtttctcatgctccagtgatgtttgagacagataagaat

SEQ ID NO: 858858 - DNA, 116 bp, Homo sapiens
tggatcagtgaaaaattgcaaacagcgagtgatgagtcgtacaaggatcccaccaacatccagggtaaagcccacagcttgaagccaagcataaaggagaagctggcaggcagccc

SEQ ID NO: 858859 - DNA, 98 bp, Homo sapiens
tcggcccgggccgctcaggtgcagatgtcatgggaacagacatgtcttggagaggtgcaccctgggatctgtccaggatcagaaactcttggagccag

SEQ ID NO: 858860 - DNA, 100 bp, Homo sapiens
acccaatggtggaatattgtatacctggaggtggggaagacagggctccagctaccacaggacgggctctgggtatagccgttccagtcagggacagccg

SEQ ID NO: 858861 - DNA, 100 bp, Homo sapiens
tgaagaaagcatcgtcctaggaatggatttctcctctaatgacagcaaagtggaagatgctttctacaaaggtgaactcaggctgaatgaggaaaaatta

SEQ ID NO: 858862 - DNA, 99 bp, Homo sapiens
ccacatgaaagttttcagcctcatccagcaggcggtgacccgctaccggaaggccatcgccaaggaatgtatcctgtcaggtataatgtcagtgaatgg

SEQ ID NO: 858863 - DNA, 98 bp, Homo sapiens
cccgaggatgacggcaagacagtggatgggccagcccgcctcgccgaggaggccttcttccgtggggttagccaggtaaaggtatcgggaagatatca

SEQ ID NO: 858864 - DNA, 100 bp, Homo sapiens
cccgggacgaggcactgccggactctcattctgcacaggacttctatgagaattatgagcccaaagagatcctgggcagaggcatttcatccttcatgaa

SEQ ID NO: 858865 - DNA, 98 bp, Homo sapiens
ccagcccccgcccgcagcctggacgacatcgacctgtccgccctgcggtgatcagggccaaagcggtcagtgagaaggaagtggactctggaaacgac

SEQ ID NO: 858866 - DNA, 98 bp, Homo sapiens
tatactggctcctcttgtgaaggtatgagtattatagaacaattagaccctgtatcttttagcaattacttgaagaaataccataatactatatgtgg

SEQ ID NO: 858867 - DNA, 98 bp, Homo sapiens
aagggaggagaagacaagctaaaaatgattcgggaatatcggcaaatgatgtataagcattccaataataaggccatgactacgggggcaattgctgc

SEQ ID NO: 858868 - DNA, 100 bp, Homo sapiens
tcacggtttgctcggttaaagcatcaagaaaagttccatctgggaactggaagaggaggcaacagtatttggggcaagaagtttgaggatgaatacagtg

SEQ ID NO: 858869 - DNA, 99 bp, Homo sapiens
ccccgaaaacgctacgtgagctgggccctgggccagaggcagaaaacggacggaagaaaaggtctggccgaaatggtggagtcaatgaagaaagtagca

SEQ ID NO: 858870 - DNA, 98 bp, Homo sapiens
gcgactcgcggaccggcgtccccggcgcgaagaggctggactcggattcgttgcctgagggatcgactacaagaccaccaccatcctgctggacggcc

SEQ ID NO: 858871 - DNA, 100 bp, Homo sapiens
ccagccccatggacctccgagcagggccaattcctgtccccccagcagcatggcatcgtgtgctgaaccctctgagccctctgccccactgcccgccggg

SEQ ID NO: 858872 - DNA, 98 bp, Homo sapiens
gagacttccttgcttctttggagaatgatatcaaaccagtgaccaagaatatggcccaggtgaccaaagccctggacaaggccctgagcaccatggac

SEQ ID NO: 858873 - DNA, 98 bp, Homo sapiens
aagtttgcctccttcatcgacaaggtcactctgtgagactgctgggtcagaaaaaggataatggaaggcggcttgggggagcacgattggatttgccg

SEQ ID NO: 858874 - DNA, 99 bp, Homo sapiens
acaatgagaagcaggcagaagattgcatcacacgggaagcagctcgagagtgtcgtagaaagaagaaagaatatgtgaaatgtttagaaaacagagtgg

SEQ ID NO: 858875 - DNA, 98 bp, Homo sapiens
ggcgccaggacaccgaggagaatatcttgctgggagtggacttttccagtaaggaaaggcatgggcaagaaggacgaccccaagctgatgcaggagtg

SEQ ID NO: 858876 - DNA, 98 bp, Homo sapiens
gaagctggtaggcacgggcggctccgcagtgaccggactcgggggagggaaggccgctcaaatgcccaaatcagagattaccaaagaatcggcgatgt

SEQ ID NO: 858877 - DNA, 98 bp, Homo sapiens
gccacccatgagcaagagatggaggaagccaaggagaattttaaaaatgccttaactgggattctcactcaataatctttctgtttgccctgaagatg

SEQ ID NO: 858878 - DNA, 99 bp, Homo sapiens
tctgatgtcttgtgggtaatacagtggagatgtgtgaaattcgtaaggacaccttgaaggccattctgttggagttagaatgtcattttacatggaatt

SEQ ID NO: 858879 - DNA, 99 bp, Homo sapiens
cgccgtcggcagcaagaacagagagagaggtggacagatctgagagatactgagacgcccactattgcttggttctacttcctttatcccgattggccg

SEQ ID NO: 858880 - DNA, 104 bp, Homo sapiens
cggccccagcactcccagctgcgcagggcctgccaggtggcgctcgtgtaaggcaaacattggtgggcaccgatcttcctgttcattctgcaagaacccaagag

SEQ ID NO: 858881 - DNA, 100 bp, Homo sapiens
aaactaacagggatcttgaaattaaagatcagggcgtctctggccgagcctctttttgtggaaaacgacagcagcagcagtggcctggaagacgccaccg

SEQ ID NO: 858882 - DNA, 98 bp, Homo sapiens
gatacagcaccacccctcaattattactgggttcctatactggtggccaagcaagaggagttcttcaacctgtcccactgccaactggtgaccctcat

SEQ ID NO: 858883 - DNA, 100 bp, Homo sapiens
gaggactttcttccagcttctgctgtccttctttgtggagagcaagatccgatcacataggacagtatgcaccttaagatcctgaagaaacggcacaaaa

SEQ ID NO: 858884 - DNA, 99 bp, Homo sapiens
atattccagtaatggtggatgaagttgttcattgtttgtcaccacaaaaaggacaggaagttaaatgaagttcgaaagagattgaatgagctaagagaa

SEQ ID NO: 858885 - DNA, 98 bp, Homo sapiens
aaagatttcagaattgtcagatttcgctttgatgaatcaggtcccgaaagtgctaaaaagtggcagctgaaatatcctaaactaattctccgagaagc

SEQ ID NO: 858886 - DNA, 98 bp, Homo sapiens
gagcgagaagaaaatcaagaagctgaatttccaggccttcgccgagctgtgcagcacttgcaaacattccatctggcaatctgagagaagctactgag

SEQ ID NO: 858887 - DNA, 100 bp, Homo sapiens
tgaaagcaaccaggaggcagtaaattcttcagctgctcggacagatgaagctccccaaggagctgcagaacaactctgctcatggtgattacatgcaaaa

SEQ ID NO: 858888 - DNA, 100 bp, Homo sapiens
agaacgtgttgaaacaaggaattgccccatagccttcacagttatacatgggaagctgttgataccaaaaataatgtactttataaaatcaacatctgtg

SEQ ID NO: 858889 - DNA, 100 bp, Homo sapiens
ttggcttgtcagatgaactggctaaactggatgcatttgtagaaggatttggagcaagaggtggtggtggccttcccccgaagaaatttggtaatcctgg

SEQ ID NO: 858890 - DNA, 100 bp, Homo sapiens
cggctctgggctacggactatgggcgaatagctctgaccacccggcgaagatgatgatgtgcctgcagatatggttgcagaagaatcaggtcctggtgca

SEQ ID NO: 858891 - DNA, 100 bp, Homo sapiens
gccgaagaagcatcgttaaagtctctcttcaccctgccgtcatgtctaagtcagagaatgcagtaatagtggccttgtcttcaaaatcatgggatgtaga

SEQ ID NO: 858892 - DNA, 99 bp, Homo sapiens
gcagaggcttgcccgatcctcggccatgtcactgctctgcgtgcgcggaatatgactggcgaaactatcagccaagccagatgagtgaatccgagttac

SEQ ID NO: 858893 - DNA, 100 bp, Homo sapiens
tctgtatagagcaactgttgaactcagctgcctgtaggggggacacagcgattgccacgcgccattggaatgtccctggccaaggagctcatattctctg

SEQ ID NO: 858894 - DNA, 98 bp, Homo sapiens
attcttcagctgctcggacagatgaagctccccaaggagctgcaggtctaagagtgtaaccagttccagtagcagtagcagtgacagttctgccagtg

SEQ ID NO: 858895 - DNA, 100 bp, Homo sapiens
cgagaaagtcctctcgggagaagcagcgcctgttcccggggcagatccaggttcaggctctttaagggtcacccagagactctggagaagtttgacaagt

SEQ ID NO: 858896 - DNA, 98 bp, Homo sapiens
ctttatcaacttttccataaaagccaaactggacttagtgcagtcaatgatggactgtctgtatgccaagttaccttccactggaagaatctcaaaca

SEQ ID NO: 858897 - DNA, 100 bp, Homo sapiens
acacgtttttatggtcccctatgcctgaacattatgtggaaggatcaacagtcaattgtgtactagcattccaagcttcagctttagctgcagctgcctc

SEQ ID NO: 858898 - DNA, 100 bp, Homo sapiens
aaaattatcaacaccaaaaagctttctgctaggggctggtggggtagcaggtgtttctgttgacttgatattatttcctctggataccattaaaaccagg

SEQ ID NO: 858899 - DNA, 99 bp, Homo sapiens
aatatcgagatatcctaaaatttcctgaagaactggaacacgtagaaagtgcaagcaaaggataccatacttgcagagctccttcagatacataaagaa

SEQ ID NO: 858900 - DNA, 98 bp, Homo sapiens
agaccatcctatactgtgacttcttctacttgtacattacaaaagccaccaaagtccttggcactgtcaaatggttcaacgtcagaaatggatatgga

SEQ ID NO: 858901 - DNA, 130 bp, Homo sapiens
acaactccgcaaacgaaaaagaacgacatgatgcaatcttcaggaaagtaagagggcttaattgggagccaatgctataaacaacgagccactgcaggtttttgtctcagagtttgccatgatcccagct

SEQ ID NO: 858902 - DNA, 138 bp, Homo sapiens
tgcttgtgagaaatccaattcagctttttgtgctgccagcaagaaatgatcagtagcaccagtgtttatggctgaagagatcactttaacaattggccaagcatttgacctggcatacaggaaatttctagaatcagg

SEQ ID NO: 858903 - DNA, 99 bp, Homo sapiens
acacgttggatcaaccagctgacgccggagcagctcctaacccaggctgcactccccgaaagtgcggcagaggtgtcaccgatgtcgtcatcaccaggg

SEQ ID NO: 858904 - DNA, 100 bp, Homo sapiens
taaaaataccagtagtgtgtgctttaactcaagaagaatcttcagcccagttatcaaatgaagagtgaagaatattttgtcgaacttatgatatccatga

SEQ ID NO: 858905 - DNA, 99 bp, Homo sapiens
gagcagccccggctctgggctacggactatgggcgaatagctctgaccacccggcgaaggtggataatattaatgcagctgtgatggatttgaaaaaaa

SEQ ID NO: 858906 - DNA, 98 bp, Homo sapiens
agcagatgaacgccttcttggagactgcatacgaggattggttcatcaccctctacaacgtgctgtacaccagcctgcccgtgctcctcatggggctg

SEQ ID NO: 858907 - DNA, 100 bp, Homo sapiens
actgccgacctccccgctgcatttgctcagccctgggactcctcgctccttggatggcagtggttctgagccaggcatagaatgtcaagctaaccaggcg

SEQ ID NO: 858908 - DNA, 98 bp, Homo sapiens
ttcagatgagaccagaggtgcggaaggaacagaaagggctaaggaatatgagagtttaatggaaaccaaaaattctggctctgattcaccttataaag

SEQ ID NO: 858909 - DNA, 100 bp, Homo sapiens
ctggtcaacaagaagaacgctctcatccggaggcaggaccagctgcagctgctattttgctggaggagcttgccaacagcgatcccaagttagccctcac

SEQ ID NO: 858910 - DNA, 100 bp, Homo sapiens
ttgtaaaacctggaacagcagcatcattgtcaaagattagaaatgatatttgccaaatttgatgaagtgcaaagttcaggcggtatgattttgagtgtct

SEQ ID NO: 858911 - DNA, 98 bp, Homo sapiens
tccggatgacccgggcttcggcccccaccagagactcgtgatgagttggaacaattcatggaaaatcaaggtgcatcgagcccaggtatcctcatttt

SEQ ID NO: 858912 - DNA, 100 bp, Homo sapiens
attgcactctacttccccgcttcctgatcctgcctcagcttctcctctccacagcaatggctgccatccggaagaaactggtgattgttggtgatggagc

SEQ ID NO: 858913 - DNA, 100 bp, Homo sapiens
atctcgctcggctgcgggaaatcgggctgaagcgactgagtccgcgatggagagtgtgtggcaggccccaacatcgccgccatcgtcgggggcaccgtgg

SEQ ID NO: 858914 - DNA, 100 bp, Homo sapiens
cggcgagtatacatgcaaagcttccaatgagtatggcagtgtcagctgtacagccacactaactgtgacagtcggtggtggggagcggcagctggcagag

SEQ ID NO: 858915 - DNA, 125 bp, Homo sapiens
gtggccaccaagcagggcaacgctgtgaccctgggagattactaccagggccggaggattaccatcaccggaagccagttctacgtcatgatgacgccccaggatgtgcttcagacaggaacaca

SEQ ID NO: 858916 - DNA, 100 bp, Homo sapiens
cgaccaccatgactgagatcactgctgaagtgccaggcttcccgtatccagcagccaccgccgcggccgcctaccgaggggcgcacctgcgaggccgcgg

SEQ ID NO: 858917 - DNA, 98 bp, Homo sapiens
aggccgacttcttgtatgcatactccacagcacctggcgcagttgtgtagcagttgagtaatgctggttagctgttaaggtggcgtgttgcagtgcag

SEQ ID NO: 858918 - DNA, 99 bp, Homo sapiens
ccaggcacggagaggcggcgagaccgcagctgcttttctaacccaaactgtatgtcttgatgacactacagtaaagtttgaaatatgggatacagctgg

SEQ ID NO: 858919 - DNA, 100 bp, Homo sapiens
gaccccctcatccgctgggactcctacgacaacttcagtgggcatcgagatgacggcatggagggtgctggagaatctggtaaaagcaccattgtgaagc

SEQ ID NO: 858920 - DNA, 100 bp, Homo sapiens
gtggctggtatcggtgttcccctggtttaactagcctgtttgattcactgcgtgctgtcctcacttgttctacaatgagtgccaaatctgctatcagcaa

SEQ ID NO: 858921 - DNA, 100 bp, Homo sapiens
atccgtggttccctgcagactggcaggagcagattccaaaggcacaggaagaagcttgcagacccggatgcagagtctacagcctgacccagctgcccgc

SEQ ID NO: 858922 - DNA, 100 bp, Homo sapiens
gggggacctactggatgatgatgataatgaagatcggggggatgaccaggtaaaacctggctgtgccctgttgaaatcaattctgttgcagtcatatgcg

SEQ ID NO: 858923 - DNA, 100 bp, Homo sapiens
ttctaggaaaggccggacaccaggaccaggactaaaacctccagaggaacggacaatagaatacctagaagaagttgcaattacttttgccaaaggacta

SEQ ID NO: 858924 - DNA, 100 bp, Homo sapiens
tttagctacaaacatttatctaaggtacatctccgttcatggatgcattaacagccaatgggacaaccaacatacagacatctgttacaggagtgactgc

SEQ ID NO: 858925 - DNA, 100 bp, Homo sapiens
gggctcggcgcccggcggggactgcaggctcacatgattcattcagctactgggtggatgaaaagtccccagtggggcctgaccaaacccaagctatcaa

SEQ ID NO: 858926 - DNA, 100 bp, Homo sapiens
tgatgaagaggatgatgatgaagaaaactcatcgcatacgggcacatcactggcaacgcccctgacagtggagcccctgggaagcggctgatcgacagaa

SEQ ID NO: 858927 - DNA, 100 bp, Homo sapiens
cacggcctcttgcgctacgccctggatgagatgtttgtgaagaaatatgggaacctttttagcttggagcttggtgacatatctgcagttcttattactg

SEQ ID NO: 858928 - DNA, 100 bp, Homo sapiens
accaacaatgcttcatcttcatgccagtcgacccccaggaaaggaaaaacccacaaacatgttcacaacgggcatggattgtcagtggcttcgccccgag

SEQ ID NO: 858929 - DNA, 100 bp, Homo sapiens
tggtgttggcaaaaccaccacagcttccctggtgtgtcagacagagggagttacaaagcgtttggcagaaaagaatgactttgtgatcttcctgtttaca

SEQ ID NO: 858930 - DNA, 100 bp, Homo sapiens
gaaatcaaaaatctggtgaaattgccggcaagagggagttaaggacattccaggcagaggcaaggtttttcgttggaatatacgttgcacatttatggcg

SEQ ID NO: 858931 - DNA, 100 bp, Homo sapiens
cagacacgggtgaatgctgctaaaaacaagactggggctgctcccatcattgatgtggtgcgatcgagctctgagctcttcaccctgacctatggtgccc

SEQ ID NO: 858932 - DNA, 100 bp, Homo sapiens
tatccagatattgcctcacccacatttcgaaggtggtttcaacaagtttcaaacagagtactctgagcactgcgagaccaacgtggacagctcttcctcg

SEQ ID NO: 858933 - DNA, 100 bp, Homo sapiens
cgacgagcctacttcaagagaaataagcttttgcgagaattgaagcaccctaatgtgattgcattgcagaaggtgttcctttctcacagtgacaggaagg

SEQ ID NO: 858934 - DNA, 98 bp, Homo sapiens
ataacccaagcaaaacttcagatgcacaaaaaggcattgggatgaacgagccgctggtggactgtgagggctacccccggtcagacgtggacctgtac

SEQ ID NO: 858935 - DNA, 51 bp, Homo sapiens
cgacagaagcgactttggtgagactctgccgaatttgccacatacctgaat

SEQ ID NO: 858936 - DNA, 98 bp, Homo sapiens
ttcgcaaacagcacaggccatcaaatgcagaattcacaagatccaatcccttgtccttaaaaggtgtactggcactccagtgctcacattcttgggga

SEQ ID NO: 858937 - DNA, 117 bp, Homo sapiens
cttcggaggcaagtttggtgtccagatggacagagttgatcaggttttcctttggaatatggataaatacaccatgatacggaaactagaaggacatcaccatgatgtggtagcttg

SEQ ID NO: 858938 - DNA, 100 bp, Homo sapiens
aatcgcgggatcgagactatgaccgcaagagggacagaggtttctgggtgtctctggggagcccctgggccagattttcctctagactccagcccatctc

SEQ ID NO: 858939 - DNA, 99 bp, Homo sapiens
gctgctgggtccgctgagcggggcgacccgagacaggtgatttggcttctgcacagttaggaggagcaccaaaccgatgggaggttttgtcagccacac

SEQ ID NO: 858940 - DNA, 98 bp, Homo sapiens
cgagagatcgagagcactgacacggcctgcatcgggcccacgctcagttgatgaggaatctggattaaaggattcagaaccagagcgaaaacgcaaga

SEQ ID NO: 858941 - DNA, 100 bp, Homo sapiens
gactatgaaacttcaggtgtttatagcacaactgcatctacagcaaacttggattcatgcttaacaagtctagcatcatcatcacttaaacaaattcttg

SEQ ID NO: 858942 - DNA, 98 bp, Homo sapiens
actgttcgtgatatttcatatgttttagctacaaacatttatctaagtggccataaaatgcagtaaaaacaaatccagttcccaagaagctgtacaaa

SEQ ID NO: 858943 - DNA, 99 bp, Homo sapiens
acctgagcaagtacctgtagacaccttcagctgggacctgcccatcaagacttattcgtctaatggaagagatcatgagtgagaaggagaataaaacca

SEQ ID NO: 858944 - DNA, 100 bp, Homo sapiens
ctgcacaggtggcctccgaacccgggaaaagaggaactaaggcggaggaactgagacgtttcgaattccagggacatctctacaccgttcccatccggga

SEQ ID NO: 858945 - DNA, 100 bp, Homo sapiens
atttcgaatcacttaaaggagtggacattgctagcaatgagctcccaaagccatccagaagaacatgagctgcctgtggacatggaaaccatcaacctgg

SEQ ID NO: 858946 - DNA, 100 bp, Homo sapiens
ccttgtgtttgatgaagcagatcgaatgtttgacatgggatttgcaatggccaatgtacatggtggactatgccggcctgaacgtgcagctcccgggacc

SEQ ID NO: 858947 - DNA, 100 bp, Homo sapiens
ctttatgaatgataaagatgtttccggaaagatgaacaggaagctttctttggaaaagatcttctagatacaagtagacaaagcaagataagtttagata

SEQ ID NO: 858948 - DNA, 100 bp, Homo sapiens
caggaggaagaaacctcagacagatcgccggggaggcagcgcgggatcccagcctcaggcgtgcgcggacggtgtgcggtttctcttcagcaacgggtag

SEQ ID NO: 858949 - DNA, 99 bp, Homo sapiens
gagcgtcctgagactaaggaaagagcctggaaaatggagcagacctggacgagccaacaaatggaattttcttgagcatgtttctaatcgttttgccat

SEQ ID NO: 858950 - DNA, 98 bp, Homo sapiens
gaggcaccgggatcgtgaccgagaccgtgaccgagagcgtgaccgagagcgcgaatatcgtcatcgttagaaggaggtcccaggtgattgaaaagttt

SEQ ID NO: 858951 - DNA, 98 bp, Homo sapiens
aatttcatactaattttctcaaggaaattgagcaacgacttgccctgtgagtctgcctgcaccagttccagtacatggggaagcgatacatagccagg

SEQ ID NO: 858952 - DNA, 100 bp, Homo sapiens
acctaaaatccccaaaattgagaccactcatccaccgttgcctccagcccacccacctccaggaggataagatcaatgccctcattaaagcagccggtgt

SEQ ID NO: 858953 - DNA, 100 bp, Homo sapiens
ggaggtacagtgtgcatcctacaacaacaagccattcatgggccggttttatgagtgggaaccatttgcagaagctggctgtcccaactccttgattaaa

SEQ ID NO: 858954 - DNA, 100 bp, Homo sapiens
ggagagaggtacctctccttttccctctccctttccctaaggctgaagccgacgtagcttctctgaacagacgcatccagctggttgaggaagagttgga

SEQ ID NO: 858955 - DNA, 100 bp, Homo sapiens
tgtgaccatcagctttaggatatacaagggtgtgatccaagctatccagaaatcagatgaaggccacccattcagagagaagaagaaggaggttcctgct

SEQ ID NO: 858956 - DNA, 100 bp, Homo sapiens
gcatcaacaatgctggcttggcccggcctgacaccctgctctcaggcagcaccagtggttggaaggacatgttcaatgttgcactccaggacttgcagac

SEQ ID NO: 858957 - DNA, 101 bp, Homo sapiens
ttttgacatcatcaagcgttacatggacggcatgaccgtggttctgacccagtgggtgatatatgccatccgaaaccttaccgaagacaacagccaaaacc

SEQ ID NO: 858958 - DNA, 99 bp, Homo sapiens
gcatgcccaccactgccacaaacgccgcaccaggtcttgtagcagcgcctcctcggatctcactggcatcgaatctatggatcagtgtcgccatacctt

SEQ ID NO: 858959 - DNA, 100 bp, Homo sapiens
gtccaggatacagaccccatcccccaggagggagacgtcatctttactactaacagatacctgcccactatgtctatccgcaggcttttgtgcagccggg

SEQ ID NO: 858960 - DNA, 100 bp, Homo sapiens
gccgcctccgaagatgggggatttctacgacccggagcacccgacccctgaaaacgttaatggacaccagaacggctactgcagagctgggctggacggc

SEQ ID NO: 858961 - DNA, 100 bp, Homo sapiens
aaagataaaaacttgcgccagagaaacacaaattaagtactgcttacaatattaccccggaagctttcgagaagctgggattccctgcagcaaaggaaat

SEQ ID NO: 858962 - DNA, 100 bp, Homo sapiens
ccgaggacctgaaggacgcgcaggagaagctggagctcacggagaagaaggcctccgacgaccaagaatcgccttcagccctgtctggtgcatccttggc

SEQ ID NO: 858963 - DNA, 100 bp, Homo sapiens
agctcagaagcacagacagcagtatgaagaaatggtggttcaggccaaaaagcgagagagcctatctctggcagaagtagccaacgagctggacacggag

SEQ ID NO: 858964 - DNA, 100 bp, Homo sapiens
ctcttcagcacccaaggctgctcaagctcaggaacctcagatagatgaggcttctcggaggatgctggatgatgaaatgacagtcagcctttccctgcca

SEQ ID NO: 858965 - DNA, 118 bp, Homo sapiens
ggacagggaagatgacaaaaatcaggactcagttgtaaatggcacagaggctgaagttaaagagacagcaatgattgcctaaactaagacttgccctgcatggtgccagctgtagcac

SEQ ID NO: 858966 - DNA, 100 bp, Homo sapiens
gccagggcttcctggcccgaaaggagagcctcccatcatcttcgtttcggacagagcaaacagcaacaaggagctgggtgtggaccaggagtcagaggag

SEQ ID NO: 858967 - DNA, 99 bp, Homo sapiens
tgggggacgcgcttcttcccacactgtgagcctcagcagctccagccagcggacccgacggctgagaggtgagacctggaaccccttcaaattacagta

SEQ ID NO: 858968 - DNA, 100 bp, Homo sapiens
ccagtggatacgttcagggtataaatgatctcgtcactcctttctttgtggtcttcatttgtgaatacatagttgattcgatgtcatcagtcccgtggtg

SEQ ID NO: 858969 - DNA, 100 bp, Homo sapiens
gggacttcttcgtactctaattgatccagagaacatgctggctacaactaatctgatgatgggagaaccagttactaccttctctaacacaggctccatc

SEQ ID NO: 858970 - DNA, 100 bp, Homo sapiens
gtcatgacagtgaattacaacacgcatggggagctgggcgagggcgccagagagaaaaggaacagttccgtaagctctttattggtggcttaagctttga

SEQ ID NO: 858971 - DNA, 100 bp, Homo sapiens
acggcccaggtggcaggatgtcctggtctggccttctccatggcctcaacacgtccctaacttgtgaaaacaccacagggatggcgagaagtatttgttg

SEQ ID NO: 858972 - DNA, 99 bp, Homo sapiens
cccgctccctggcggtgcagagaccagcatccttggagaaggtgaacgccaccgcctgtgctgtcccccgccttctcatcgcgctcctggagagtaacc

SEQ ID NO: 858973 - DNA, 98 bp, Homo sapiens
tggcttcatcagcactttgggtgacaatgtcagtgcctactgcctgcatattgctgaggatgatggggaggtggacaccgatttccccccgctggatt

SEQ ID NO: 858974 - DNA, 100 bp, Homo sapiens
tcgtagccatcgagaacatcctcagctttatgtcctacgacgaaattagccagctccgcctggaggcagttcccatgttatacgcagcagatacttacgg

SEQ ID NO: 858975 - DNA, 100 bp, Homo sapiens
accgagccgtcaagcaagaatctgtgggagcagatctgcaaggaattcctccctgtaagggtataactgaggaaacccaaaaggctctggaccgctctct

SEQ ID NO: 858976 - DNA, 98 bp, Homo sapiens
gtcctgctcacgagagaaaaaggaggaaagggcactggtgtcctgcaggaagagatgaaactctgcagctggtttaaacacctgccagcatccatcgt

SEQ ID NO: 858977 - DNA, 100 bp, Homo sapiens
gctccagtgctcttacgcagataatgatcattaacatcagcctctctgatcaaaggatatccgacatgaagccagtgacttcccatgtagagtggccaag

SEQ ID NO: 858978 - DNA, 98 bp, Homo sapiens
gcggagccaaatggtttagcaccgaatggagcatgcatgcagcagattggaataaatatgatgaccgattgatgaaagcagcagaaaggggggatgta

SEQ ID NO: 858979 - DNA, 100 bp, Homo sapiens
tttctgcattatccactatgccggcaagaaactggcgatggaatatgagaggagccctctggaaagaaaaggacagaccctgtgctttcatgaaagtgaa

SEQ ID NO: 858980 - DNA, 100 bp, Homo sapiens
ccaagcgggagcttggtgtccggcgtcccgggggcgcagggaaggagggcgtccgagtcaacaaccgcttcgagctggaatcttgtcgattggcctggct

SEQ ID NO: 858981 - DNA, 100 bp, Homo sapiens
aaacttacagcaagatggttcatcttttgccctagagcaattgaaggattggattcagcatcaaaatacatctactcatattgagagctgtcgacagtta

SEQ ID NO: 858982 - DNA, 99 bp, Homo sapiens
ggaagttgattactcagtctctaaaaagctaaggttcgatacaagaggctgttttcctagcgtggcttgctgcctttggtaagaacatgtcgtccatct

SEQ ID NO: 858983 - DNA, 98 bp, Homo sapiens
ttggcatcaggggcagctgatggaactgtggttttgtggaatgcacagtcatacaaattatataggcaggtgacaaacattaccaccccagctgtgca

SEQ ID NO: 858984 - DNA, 100 bp, Homo sapiens
cccagacaattgagtctatcaaccttctcaaatctaaaaaatgtcccttcattgttgcactcaataaggctgccaaacgagggattctttcatctggtcg

SEQ ID NO: 858985 - DNA, 100 bp, Homo sapiens
aacagttcctccacatcaaagcagaagaagaccgaagggaagacttccagtagctccaaggaggttaagcttccagatttgagtccagtagaaaacaaag

SEQ ID NO: 858986 - DNA, 100 bp, Homo sapiens
aggcaggaagattgctggctcagaggctctatgcaggttccactgtcaagtttctacagcagtataatcactacaaatccaatgtggagattttcaaatt

SEQ ID NO: 858987 - DNA, 100 bp, Homo sapiens
ctttcaggaacattgctgtggattcccaggccccttcacagatgtagtcactacaaatcttaaattgcgaaatccatcggatagaaaagtgtgtttcaaa

SEQ ID NO: 858988 - DNA, 98 bp, Homo sapiens
tgaaactgaagcacaagaagcccttggaactatcatcaggacataaggtggaggaaagttacaccattctttgccaaaggctggctggatcagccctc

SEQ ID NO: 858989 - DNA, 98 bp, Homo sapiens
tgtcctttctccattgtatgttctcggcacctttgtctaaacagaatcgaagccagaaattcaacttagtccctcctgccctctgattttctccagtc

SEQ ID NO: 858990 - DNA, 98 bp, Homo sapiens
tcctcttcaagtaagactacaaacaagtttgagggactatcccagcagtcgagctgaaaatgtgtgtctgacatgcaagctcagtggggcagagaccc

SEQ ID NO: 858991 - DNA, 101 bp, Homo sapiens
agctgagtggggcgctccgcttctacgacagatccgacatcgacgcagtctacgtgattgtagagaaggctccaaaagccagggtgcctgatctggacaag

SEQ ID NO: 858992 - DNA, 99 bp, Homo sapiens
agcatctttgtctagccccagtgcagacttaattcagtgcacaaatgagatgaatgtgaacatcccacagttggcagacagtttatttgaaagaactac

SEQ ID NO: 858993 - DNA, 99 bp, Homo sapiens
cagtatttaaagctattcaaccagatggtgatgaattagaagacaatggaaagaatttctacgaatctgatgatgatcagaaggaaaagactgacaaaa

SEQ ID NO: 858994 - DNA, 100 bp, Homo sapiens
gtccctaaaccacccctctcgcctcacaaactaagcatcgtcagagagaagatggcgaattagaagatggtgaaatagacgatgcaggatttgaagaaat

SEQ ID NO: 858995 - DNA, 100 bp, Homo sapiens
cctcaggtacagacccaggctcttcgagactttgagaaggatgcctttgtggaactgtacggccccagcatgcggcctctgtttgatttctcctggctgt

SEQ ID NO: 858996 - DNA, 98 bp, Homo sapiens
gccggagctctgatcgccgggaacccttgccgctgctgtcctgcgaccccaagcaggtccatctgggaagcgggatttgggttgatgaggagaaatgg

SEQ ID NO: 858997 - DNA, 100 bp, Homo sapiens
ctcatggtttctgatgtgaccaggctgcagcatgtcaccatcagccagctgttcgcgcccggagacttgcctgagcgaggaaatagccctgtccaggagt

SEQ ID NO: 858998 - DNA, 98 bp, Homo sapiens
tgacgtctctcaggatgcctgagccggggaagaagccagccaagaagtatgatgcgtttttggcctcagagtctctgatcaagcagattccacgaatc

SEQ ID NO: 858999 - DNA, 100 bp, Homo sapiens
gtgccacttcgacatcgagatcaaccgggagccggatggagatgggtgtcgtgagctggtggtgggctacacagaccgtgtggtgcgagctttccgctgg

SEQ ID NO: 859000 - DNA, 98 bp, Homo sapiens
catgaagatcaaagatgccaagaaaccctgaggaggaagccaagaatctggtgagcgaagccatcgcagctggcatcttcaacgacctgggctccgga

SEQ ID NO: 859001 - DNA, 98 bp, Homo sapiens
ttcatatgtggatcctcagttccttacctacatggcactagaagaacgcttagcccaggctatggagcatgacgtatcccagactttactcaaggcaa

SEQ ID NO: 859002 - DNA, 100 bp, Homo sapiens
ccgcgggagaggtaaacagaacaccaggacatcccagagtctgggaaatggaatagccaggccagaagaaggaaggcctgtggtgagtgggacaggaaat

SEQ ID NO: 859003 - DNA, 100 bp, Homo sapiens
cttgtctacaccatcatgtttctgggcagtagacagcagggactccctggccatggctctgtatgcgtgctgctttgagtgggtaatcaagaagatcaac

SEQ ID NO: 859004 - DNA, 98 bp, Homo sapiens
ggcggtgcgctgggggccggggcgcgtcgcaggtgtctgacttccagcaactgctggcctgtgccagggtgcaagctgagcactggagtggagttttc

SEQ ID NO: 859005 - DNA, 99 bp, Homo sapiens
gccatcttggatccgcgggacaagaaaattcatgcgaatggcttcctttgggtggaagaggaaaattggtgagaaggtctcaaaggtcacttcccagca

SEQ ID NO: 859006 - DNA, 101 bp, Homo sapiens
caaggacccacaggatttcctggaccaaagggcccccctggtgctgacggccaacctggtgctaaaggcgaacctggtgatgctggtgctaaaggcgatgc

SEQ ID NO: 859007 - DNA, 100 bp, Homo sapiens
tcaacttggccttatggatgatgctgcggagtgctttgtatgattttgtagaagttgaggaacccagtgatggaactatattagggcgctggtgtggttc

SEQ ID NO: 859008 - DNA, 100 bp, Homo sapiens
tgcaggccttgcttttatcgaacttgtcaatgaaggaagtttttcacagcatatggtcctgattatgtgctggaaatcacgccaagctgccggccagacc

SEQ ID NO: 859009 - DNA, 98 bp, Homo sapiens
agtcttctgggtctctctgcctgaggccctggagggagagaaggtcttctttgatgtgaggattggagacaaagatgttggcagaattgtgattggcc

SEQ ID NO: 859010 - DNA, 100 bp, Homo sapiens
ctcctgatggcatgcctgtaaagaacttgcagttgaaggagtataacacagcaattctgtggtgttcttggtcacacatttatggagtttctgaagggca

SEQ ID NO: 859011 - DNA, 100 bp, Homo sapiens
cctgttccaccttcagagcgtcacggcgtacgccctcatggggaaaatctccccggtgactttcagggtgccttcaaggagctggtatatgtgttattca

SEQ ID NO: 859012 - DNA, 98 bp, Homo sapiens
acaagccttcagaatcagatgaatggaggacctttttatagccagaatccaggagtatggatgtgtccaacagccaaaaactcaagaaagtaaattga

SEQ ID NO: 859013 - DNA, 100 bp, Homo sapiens
caaagaactggaaagtgtatcaagtttcaggtcctggaagcgcatccctgccgtcatctacagcctgagcggtgcatccccgttcctgggcgagaccaag

SEQ ID NO: 859014 - DNA, 100 bp, Homo sapiens
acggttccagtgaagattgacaaagtgcgcattttcttattaggactggctgataacgaagcagctattgtccagagaaagatgctggtttcgagttttg

SEQ ID NO: 859015 - DNA, 98 bp, Homo sapiens
cagaagtcattttaaactatggacgactccgaggaacattgagggttgccacaccatttggaggttttgaaaaagcatcaagaatggttaaatttaaa

SEQ ID NO: 859016 - DNA, 115 bp, Homo sapiens
cagtcctcgcccggttttaacaacctggatcttcgaacttttgacacggctttggaaacgacgtcatgtgttagttcgtcccactgattcaaatgtcagtcctgctatttctatc

SEQ ID NO: 859017 - DNA, 100 bp, Homo sapiens
atttccaaagtcccagagcggtactttccaggaacctggcttctgtatttaccatgtacctggagcattggtttggcagctgaaccaggttgttttccag

SEQ ID NO: 859018 - DNA, 100 bp, Homo sapiens
acaagttacaggaatgttctccaagcagcaatccaaaagagtctcaaggatccttcaaataacttcaggcgtcctccacgagctcttccacctgtgccaa

SEQ ID NO: 859019 - DNA, 98 bp, Homo sapiens
ttcttcagaagcttcaagtctcatctgcattaaagctctccattgaaccctctcacaaaagttgctatggtgacagactatggggcctttatcaaaat

SEQ ID NO: 859020 - DNA, 100 bp, Homo sapiens
acctcaccgcgcccgtggccgccgtgcaggcggccgtcagcaacctcgtccggatcttcagtgtctattggatttttccaagagaaagtttgtaaaattc

SEQ ID NO: 859021 - DNA, 98 bp, Homo sapiens
caagagggttcaaatgaaagccgagttgtaactatccataagcaagatggtaaaaatctggctcagcaacagcctcaccaaggactccatgaatatca

SEQ ID NO: 859022 - DNA, 100 bp, Homo sapiens
ctccgacagcagatgattgaagtggaaatatccaaacaggccctccagaatgagctggagagactgaaagaggtgcaaattgagcatgacccagaattag

SEQ ID NO: 859023 - DNA, 101 bp, Homo sapiens
gggatccagcagtccaaagcctcttacagcctggggagtgcgagagaaacccagccgaagcatttaaaaggtcccgttcaagaagttcttccagttcgcag

SEQ ID NO: 859024 - DNA, 50 bp, Homo sapiens
cgagaacttgaggaacgcagacagcagcattgctattggaaatacttaat

SEQ ID NO: 859025 - DNA, 99 bp, Homo sapiens
ccggaaatcagggagctcttaacccagtttgaaacgtaactggttccctgaccaggattttttatcaagcagaaatgcatcgaacaacgagaatcaaga

SEQ ID NO: 859026 - DNA, 98 bp, Homo sapiens
aattataactccttggagattaactagagaaagaagagaagcccctaggccctattcaaaacaaattgtagaaggcatgaaacaaaaaatgtggagta

SEQ ID NO: 859027 - DNA, 98 bp, Homo sapiens
tggaacacagttcccatcagcaaaggtagccgccccattgacacctcacgactcaccaagatcaccaagaggcatttcatccttcatgaagccattca

SEQ ID NO: 859028 - DNA, 99 bp, Homo sapiens
ctagggctggttcccgtcatcttcgggagccgtggagtcagcagataagcagagagccctagaagaaaccaaagcctacaccacccaatccttagcaag

SEQ ID NO: 859029 - DNA, 100 bp, Homo sapiens
tcagccccagaaaccagccaccctgccgcgtccgactgccagggatccctcacgccgcgagaggagaggagacgccgtgagcgggacgaccagatgtacc

SEQ ID NO: 859030 - DNA, 100 bp, Homo sapiens
ccggaaggaacagacccctgtagcgggtactaggttttgacaagcttgcatcatgcgtgagtataagctagtcgttcttggctcaggaggcgttggaaag

SEQ ID NO: 859031 - DNA, 100 bp, Homo sapiens
acagtacctgctgagaacggccaacaggctctttggagagaaaacttgtcagttcctctcaatttctggtgttcagcaaattcagttttcatgatctgaa

SEQ ID NO: 859032 - DNA, 100 bp, Homo sapiens
tgttaaaagaaggactgggggcatctgaagcagtggccgacatcaagttttcctctgcaggctaaaggttggtcttcaggttgtggcagtcaaggctcca

SEQ ID NO: 859033 - DNA, 98 bp, Homo sapiens
gcggccctggtggggaagaggccaccaacatctggacggcaggtgctggagaatctggtaaaagcaccattgtgaagcagatgaggatcctgcatgtt

SEQ ID NO: 859034 - DNA, 100 bp, Homo sapiens
cggtttcccttccagccattggaacaggtgagcctggcatttgctaggaaccagagtggaaccggcaaagtggccagcaacagagtcctgatccaaatgg

SEQ ID NO: 859035 - DNA, 98 bp, Homo sapiens
tcattgccttatagttaagtgtacagcagatattttggtatgatcctgtttaaggactggatttaggataactacttagaggttaaaagtcacaaggg

SEQ ID NO: 859036 - DNA, 100 bp, Homo sapiens
gcccgccctaccccccaagcagcggcagctgatccaaagatagcatcttctgtcactgctggagttgccagttcactctcagaaaaaatagccgacagca

SEQ ID NO: 859037 - DNA, 98 bp, Homo sapiens
tgtctcttatttagttctggggagcgcctcgtcgacatgagtgatgtggaggaaaacaacttcgagggcagagaggaaaaggcttctcttttacatcg

SEQ ID NO: 859038 - DNA, 100 bp, Homo sapiens
cgcgagacccacgaggcgctggcccggaggctccagaaacgggtcctgctgctcaccaaggttgcacgatgggaacacaagacccgcaagctgagcaggg

SEQ ID NO: 859039 - DNA, 100 bp, Homo sapiens
tgaaggagtctatgtctgtgtagcaaggaattaccttggagaggctgtgagccacaatgcatcgctggaagtagccaattctctttgtggccagatgggt

SEQ ID NO: 859040 - DNA, 98 bp, Homo sapiens
gagacttttacccctctccaagttcaccagctgctggaagtcgaacatggcacgaaagagatcaagacctttccaaagtgaaactgatgagatttgat

SEQ ID NO: 859041 - DNA, 100 bp, Homo sapiens
cacatgctttgtgttttttgacatgttcaatgcactaagttccagatcccagcctatgaaagagacaaccagcaccaagatgaagcagaaggagatccag

SEQ ID NO: 859042 - DNA, 98 bp, Homo sapiens
tacctctcattatttattgatgataagctgaaaaagggagtcaaagggctgcttcattgagagaatcagaccagcagagagagagagttatatgacaa

SEQ ID NO: 859043 - DNA, 100 bp, Homo sapiens
acacatctgtaccattcttgagtgatcgcttaggtctatgcctctcagcgaatgagagctggcaaaggcaaaatgagaaaccgtcgccgtatccagcgca

SEQ ID NO: 859044 - DNA, 75 bp, Homo sapiens
cctagaagaggtgatgatagctttggagacaaacagtgcaaccctgaaactcgtcctgttgagaaaaaaataaga

SEQ ID NO: 859045 - DNA, 100 bp, Homo sapiens
gtggtggaccccgaggtgccttcaccacagtccaaggatgcccagtacacagtgaccttctcccactgtaagccattgccgaaatctaaaaaaacttgta

SEQ ID NO: 859046 - DNA, 100 bp, Homo sapiens
tatgggagtcccggcgttcttccgctggctcagccgcaagtacccgtccatcatagtcaactgcgtggaagagaagatcacaggttttcagatccagaga

SEQ ID NO: 859047 - DNA, 100 bp, Homo sapiens
gacaacgccgcctgccagcactacggcgtgcgaacctgcgagggctgcaagggctttttcaagctgtacctcccacaaggattaccccttccatgaagag

SEQ ID NO: 859048 - DNA, 100 bp, Homo sapiens
gtgagacgtttggaatgaggaaaagtgaacttttcgaggcatttgacttgtttgatgttcgtgactttggaaagctcagccctctcttcctgctatagcc

SEQ ID NO: 859049 - DNA, 98 bp, Homo sapiens
acgctgctgggtccgctgagcggggcgacccgaggtgtctgatgatttgtgagcctcaagtgactactctgtggaatcatctgtccttgcctttgaat

SEQ ID NO: 859050 - DNA, 100 bp, Homo sapiens
gtggagctcaccccagttgcaatccaggcaggaagattgctggctcagaggctctatgcaggttccactgtcaagagacaatatggtttagataattctg

SEQ ID NO: 859051 - DNA, 99 bp, Homo sapiens
tgagcccccggccggcctccccaaaggcacagtggcctcagtctgaggatgaggggcccttgaacctcagtaataaagaggatgagttcaggatgcctt

SEQ ID NO: 859052 - DNA, 100 bp, Homo sapiens
aaggagggagatatgctccgtctgacctcagacgccaccgtgcattctatagtcattcaggatggagagcccaggacaaggcagctatgcagttgagtga

SEQ ID NO: 859053 - DNA, 100 bp, Homo sapiens
atgagaggaattctctactgctatatgcgtcaggccgataaggattccagacagcattggaaaagacatagaaaaggcttgccaatctatttatcctctc

SEQ ID NO: 859054 - DNA, 99 bp, Homo sapiens
aacagtgtagtggcgtattccacatagcaaacaggtctctgacattgacagagcctggacgttggaggaagccccaggacgttggaggggtaaagtaaa

SEQ ID NO: 859055 - DNA, 98 bp, Homo sapiens
tcccaagtagctggaactacaggcgcccactaccacgcccagttatagctgaggtggtaccagtttaagaagtgagaacttcttcactgactgaaatt

SEQ ID NO: 859056 - DNA, 98 bp, Homo sapiens
atggtcaggtctggagctcgaccgggccagtggtcagaatcgttgccagacttgtccgggggaggctggctggagaatgaagggaatgaatgaagtgt

SEQ ID NO: 859057 - DNA, 99 bp, Homo sapiens
gctcaccatcctcaacgaccggggcgtcggcatgctcacccgcctctacaacatcaagaagtccaacatgtttaccgtggctgatgtgttgagtcaaga

SEQ ID NO: 859058 - DNA, 100 bp, Homo sapiens
cttctttgatgatggcccaggaatttataccagctgtagcaaaagtgggaagccaagcctttcctcccgtttgggaaattatgcatcacttcatggacaa

SEQ ID NO: 859059 - DNA, 100 bp, Homo sapiens
ccccaaagttgcatttcctcgtcgagcgcaacccaaggatgaaggtttaaggctcagaaaggtagcacattcggataaacctggatcaacctcaactgca

SEQ ID NO: 859060 - DNA, 100 bp, Homo sapiens
gactttgtttcttggagtccacttccaattccaagtcagccataatggcaggtgaagaaattaatgaagactatccagtagaaattcacgagtatttgtc

SEQ ID NO: 859061 - DNA, 99 bp, Homo sapiens
ggagtccctctccgcccagttacaagataatgagtgtgtatatggcaactaccctgaaatacctttggaagaaatgccagatgcagatggagtagccag

SEQ ID NO: 859062 - DNA, 100 bp, Homo sapiens
aaggagactgtgatttccagctgttgaaactagatggcaagttttccgtggtatacgcaaaatgtgattccagtccagaacgatgccaacgggactgcaa

SEQ ID NO: 859063 - DNA, 100 bp, Homo sapiens
actgtgtcattccatctgtatatcaggctgacccagctggatgttgacagccacctggcccagtgcttggccgaaagcacagaagacgtgacgtggtgag

SEQ ID NO: 859064 - DNA, 99 bp, Homo sapiens
tgcagtatatgttgtcgggtacattgatatatgtaaattacggaagatcatttatatacacatgcttgacagagccaattcgctattaaaccagactca

SEQ ID NO: 859065 - DNA, 100 bp, Homo sapiens
cctgatccctggagcgacgacggccgctgcctaagctggaaagttgctcgtgggggccccgcgggcagaagcgcttccactgcagagagccaacagaacg

SEQ ID NO: 859066 - DNA, 100 bp, Homo sapiens
agcgaggaacagaagaagaagaaccggaagaaactgtccgagaagcccaaaaagaaacattcatggtgtctcaagagaaaaaatccaccgaatgaaagaa

SEQ ID NO: 859067 - DNA, 100 bp, Homo sapiens
actagacaaaataaaagatgaacctgacaatgctcaagaaagtacacaggaagatgctatgaaatttccatcttcccaatcttcccagccttccaggctt

SEQ ID NO: 859068 - DNA, 100 bp, Homo sapiens
cgccgccgcctggccctggagaactacatcaccgctctgcaggctgttcctcctcgggggcccagaagacacctgctttgagtttggtgtttttcctgcc

SEQ ID NO: 859069 - DNA, 98 bp, Homo sapiens
agaacttggatcccattcacctgaggcacccgaagaagagaccatccatatttccaggaaagaccacagcaagattctttcattcgtctcctcctagc

SEQ ID NO: 859070 - DNA, 99 bp, Homo sapiens
tcagaggggagtcatcatgagcgatgttaccattgtgaaagaaggttgggttcagaagaggggtgtggatgaggtcaccattgtcaacattttgaccaa

SEQ ID NO: 859071 - DNA, 98 bp, Homo sapiens
gaacacagtagtggaagatgtaaagcaatatttcgagcagtttggcaaggtatggtttccgaaagccaccacatgtggagctgaaagctcggccaaaa

SEQ ID NO: 859072 - DNA, 100 bp, Homo sapiens
gcagctatgtgtcttggattggctcacaggagtagatcccataatagatcacgttcaagacagaaagacagacgtagatctaagagcccacataaaaaac

SEQ ID NO: 859073 - DNA, 98 bp, Homo sapiens
gctctgtttactgtggattggatattctcaaggaaccacacatgtattaagatttgcaatgacaatgcagtttattagtcatcagttccctgattatc

SEQ ID NO: 859074 - DNA, 98 bp, Homo sapiens
tctgctcaaatctcctgctgtgaaccagcagaatttttgaacaggcccttaatctcacttgcaacgtgtggggagacccgcctccggaggtgtcgtgg

SEQ ID NO: 859075 - DNA, 99 bp, Homo sapiens
taatagatgtctgacaaactaaagaaagacttgtgttacggacatgagagatggctttagaagaaaaagtttctactcttcccattatgcgagagagcg

SEQ ID NO: 859076 - DNA, 100 bp, Homo sapiens
cggaacccttcttcgccctcgccaaggaactctatcctgggcagttcaagggaggctgccggcgtggaccgcgggaaggcggggctggggctcggcggga

SEQ ID NO: 859077 - DNA, 100 bp, Homo sapiens
atgccggggatcgacaagctgcccatcgaggagacgctggaggacagcccgcaggccatccggctgtccttagagcaagccctgcctcctgagccaaagg

SEQ ID NO: 859078 - DNA, 98 bp, Homo sapiens
tatcagatgttccacgtaataatgctgaagctgaacatggttatgcctccatgttaccatacaataacaaggacagagatgccttaaaacggaggaac

SEQ ID NO: 859079 - DNA, 99 bp, Homo sapiens
tcctctgaagagactttcctcattgactgccgaggccccatgaatcaatgtctggtagccaccggcactcacggattcactccttctccagttgcacag

SEQ ID NO: 859080 - DNA, 98 bp, Homo sapiens
tttctttctcgctgatcgcctaacttctactgacgaagcttggaagttgcagaagagtcctatcaatgatttagttccctagagaaaatcagaaagta

SEQ ID NO: 859081 - DNA, 99 bp, Homo sapiens
tcctctgtttctctgctgcaccgacctcgacgtcttgcctgtgtcccacttgttcgcggcctataggtgcagattcactttataggaacagcttcagct

SEQ ID NO: 859082 - DNA, 99 bp, Homo sapiens
atcatggggcccaagaaaaagcacctggactgccttctccacagtaggcactcctgactacattgctcctgaggtgttcatgcagaccgggtacaacaa

SEQ ID NO: 859083 - DNA, 100 bp, Homo sapiens
attacctaactgagaatgacatggaacggtggatcaaagagcacaggcacagagatactcctgagaataaccctgatactccatttgatttcacaccaga

SEQ ID NO: 859084 - DNA, 121 bp, Homo sapiens
cacatgccaagatgggtggatctatcctgacgctaagaagcgatcgctgatcaatgagctgtttttctgatcgaggctctctgaagagcataatgcagtccaacacattaaccaaagatga

SEQ ID NO: 859085 - DNA, 100 bp, Homo sapiens
gaggcaaaaagtatgctttagaaaaagtgccaaaagtgggtagaaagtttcataggataggactccctcctaagaagttgatggataggtttgattttgg

SEQ ID NO: 859086 - DNA, 100 bp, Homo sapiens
ccaacatgtggttcaagaaccttgacaagctcatccggctggtaaatgcgcagggtggctacggaccacaacatggataacacgtcaactgtgctgcggg

SEQ ID NO: 859087 - DNA, 100 bp, Homo sapiens
gccaaaattatcaacaccaaaaagctttctgctagggctccgacagttagttaatatgtgcatcaacccagatccagagaagcgaccagacgtcacctat

SEQ ID NO: 859088 - DNA, 100 bp, Homo sapiens
acaacgtttccagctgggaattatggatgatgctgcagagtgctttgtagctacagcaagctgggtagcaggcagatccaaaggatatcatgaagtttcc

SEQ ID NO: 859089 - DNA, 99 bp, Homo sapiens
cagctccgtgatttcaaggcatccttcccacccgttcgtttttagctcggctgccgaacttcattgcacagttgagaaaccgaaacttcattgcccctt

SEQ ID NO: 859090 - DNA, 98 bp, Homo sapiens
tgcggccagatagccagttacccgctggccctggtccggacccgcatgcaggcacaagacgcaaacatgcagatctttgtgaagaccctcactggcaa

SEQ ID NO: 859091 - DNA, 98 bp, Homo sapiens
tggtcctccatgagaagcaagatttggaaggcttgatcggaaccctctgtgaccagccacccggcccaagttgaagaagatgaagagccagacgggac

SEQ ID NO: 859092 - DNA, 143 bp, Homo sapiens
cagattgctgaccaggggcttgagagctgggttctattttccctcctcaaactgactttgcagccacggagagaattgctttagatttccaaagagggaatgatgttgccttccactttaacccacgcttcaatgagaacaac

SEQ ID NO: 859093 - DNA, 99 bp, Homo sapiens
cagacgacagttcaaacaaagaggccgcggaggagaagccggaggaggacaacgactaccaccgcagcgacgagcagaatggaacaaaagtgggacttt

SEQ ID NO: 859094 - DNA, 100 bp, Homo sapiens
cgaagatgggcgacccggatctcctggaagtgttggcggaggaagttgcagcatgagaaagccgaactagaacagcatcttgaacaagagcaggaatttc

SEQ ID NO: 859095 - DNA, 99 bp, Homo sapiens
ctaagcacacctggagcaacaacctggcggtgctcgagtgcctgcaggatgtgagggaggctggagcattggatttgctaaaggagcttaagaatattc

SEQ ID NO: 859096 - DNA, 128 bp, Homo sapiens
aaagaattggatctggatcatttggaacagtctacaagggaaagtggcatgagcccatggatttcagaaaattatctacattcagagaaagttttaagaaaagaggtaagagaaagctttaggaaaag

SEQ ID NO: 859097 - DNA, 100 bp, Homo sapiens
ctggccaatcctgctgactatgactctttgaggacactgagtcaccatgctagcactgtgcagattaacgtcttcaaggacccagttgctgatcccaaca

SEQ ID NO: 859098 - DNA, 139 bp, Homo sapiens
gcctgctgaggaccattgggaagggcaactttgccaaagtcaagctggctcggcacatcctcactggtcgggagcgccctcacaaagccaatgctgaggagatgaccaagtaccacagcgatgactacattaaattctt

SEQ ID NO: 859099 - DNA, 100 bp, Homo sapiens
gagcctgggaggagccctgactggtattgttgcagcatctggcagtgagactgaggatgaggacagcatggacattcccttggacctttcttcatccgct

SEQ ID NO: 859100 - DNA, 98 bp, Homo sapiens
taaaactgaacgacgaagtgatcatgaacaggcggtacacctacctggtgcgacttcatgatagcatatcagaagagggctttcactacttggtgttt

SEQ ID NO: 859101 - DNA, 100 bp, Homo sapiens
gtctttcctaccatctaaaatacgaaggtttctggctgggttgactacagacaaaaagctgctgcagcaggtagaattcccacaaactatctgagaagag

SEQ ID NO: 859102 - DNA, 100 bp, Homo sapiens
aaagatatgttaaagctctagcagaggaaaataagaacacagtggatgtcgagaacggtgcttctatggcaggatatgatgaagcccggggcaagaactg

SEQ ID NO: 859103 - DNA, 99 bp, Homo sapiens
atgaactgaatcatgattttcaagcacttgctctggagggaagagcgatgggagagcctcccaaagtgaaatgcctgaccaagatctggcaccccaaca

SEQ ID NO: 859104 - DNA, 100 bp, Homo sapiens
aaatctaaaccctcacaagagctgttatttatctgaaaggtgacttaagagattaaaattaatttggttgctgttggttctgaacaaataatgagttctt

SEQ ID NO: 859105 - DNA, 98 bp, Homo sapiens
cagacacggacctgagccgcgaggacacgggctgcaacctgcagcacatcagcgaccgggagaacatagacgacctgtcatttactccatcctttata

SEQ ID NO: 859106 - DNA, 98 bp, Homo sapiens
tggaccaatgcatcttcccaccaccttaaaccactggcggtggttatcatgggtgtggtgctacaaggtgccaacctgtatggttacatcaggtgtaa

SEQ ID NO: 859107 - DNA, 133 bp, Homo sapiens
agatgaagatgcacatgtctgggaggataattgggatgatgacaatgtagaggatgacttctctaatcagttacggaggagcttacaacgctaagacggaagctagaaaaatcagagaagttgcggaatgaac

SEQ ID NO: 859108 - DNA, 50 bp, Homo sapiens
ctgcaacctcagccttccacatttggtgaccaagaatatggcccaggtga

SEQ ID NO: 859109 - DNA, 99 bp, Homo sapiens
ctggataatgtccaccccgagccgattcaagaaggacaaagagatcatagccgagtatgaaagtcaagtcaaagcaccagcattggatgttgattggca

SEQ ID NO: 859110 - DNA, 100 bp, Homo sapiens
gtgaccgtaaaaggaattgatgcttctgattaccagacagtccagcgcaaatctgtccaaggctgcctggggagcattggagaagaatggcacccagctg

SEQ ID NO: 859111 - DNA, 98 bp, Homo sapiens
gaagaagcagctgaagacggaggcagctccacactgtgaactaataatctatgccagcaattatgacaatgttagcagaccatgcagctcgtcagctg

SEQ ID NO: 859112 - DNA, 100 bp, Homo sapiens
cactgaagggcaggtcgtccccgaccttctatgaggattgcccagctcaaggacatagttgacggcaaggaaaaagaaggacaagaacttggaactgcgg

SEQ ID NO: 859113 - DNA, 100 bp, Homo sapiens
cgaggtaccgctgaagaggaatcaattttggtatgcagataatcactgggctcatgggtcttgctctttacaaagagggccttggtgtaccttgttgtag

SEQ ID NO: 859114 - DNA, 98 bp, Homo sapiens
tgctaatggaacttagtgctggggctgcaaattttacggatcagaaggaattcagtctccaggacattgagattcactgcgtgctgtcctcacttgtt

SEQ ID NO: 859115 - DNA, 100 bp, Homo sapiens
gggttacagtgacagtggggaccctgtgctgctgcgcctcttctaccaagtggctgagtacaccttccgccagagtggcagcagacgcaccaggtacgag

SEQ ID NO: 859116 - DNA, 100 bp, Homo sapiens
ctggaaaacagagagatgcagcttgaagatggacgcttcctgatgtctgctgagcgttacgacaaacttctccgaatttgggccaggcttagtcatctat

SEQ ID NO: 859117 - DNA, 100 bp, Homo sapiens
ccaccaacaacaccacaataatccacagccaaggacctgctgaagctcacacccgtggaccacccagactgcctgccgctacaggatgccctccgcatct

SEQ ID NO: 859118 - DNA, 100 bp, Homo sapiens
agaaggctcactcaaggatcagttggctttagcaattggaaacggaggtggagctgtacaacgaatttcctgaacctatcaaactggacaagaatgaccg

SEQ ID NO: 859119 - DNA, 152 bp, Homo sapiens
ggccaatgatggctttgtacggcttagaggacttccctttggatgtagcaaggaagaaattgttcagttcttctcagatcgatgctatagaagacaaacaagggaaggttttttttccttttgcatcatggctcaatttggaggacagaaga

SEQ ID NO: 859120 - DNA, 99 bp, Homo sapiens
tctctctgctgcggcgcggggaccgctgtgctctcggtgctggaaacatgcatgaagagctgcggcaagcggttccacgacgaagtgggcaagttccgc

SEQ ID NO: 859121 - DNA, 99 bp, Homo sapiens
gctgcttaaaattcagggctaagcattttgggtgattttaaactagaaactatgttccaacttcctgtcaacaatcttggcagtttaagaaaagcccgg

SEQ ID NO: 859122 - DNA, 98 bp, Homo sapiens
gcacgcgccgtggctccggatctcttcgtctttgcagcgtagcccgagtcggtcagcgccggaggtttattacagaggtcagctgggaagagctacca

SEQ ID NO: 859123 - DNA, 98 bp, Homo sapiens
tggggtctagaagatgacgaagacatgacacttacaagatggacagggatgataattgggcctccaagattcgttactatcttggaaggagtgctggc

SEQ ID NO: 859124 - DNA, 99 bp, Homo sapiens
cttcctcctacatggaagttgttcaggctgccaatactagtgaatcctgaggttggcttgaagcctgtgtggtatagtcccaaagttttcattgaaggt

SEQ ID NO: 859125 - DNA, 99 bp, Homo sapiens
gtcaatggcctgcttgacgtgaactccaaagtcctcctggtgagcgacctgtgagagtttatgccgatggaatatttgacttatttcactctggtcacg

SEQ ID NO: 859126 - DNA, 98 bp, Homo sapiens
atcaagagcaagactcccaagcagctacgcagtaaaacgcaggactcttcccgcttggattcgcgaaggtcttgaaaaaatggaacgtgaaaagcaga

SEQ ID NO: 859127 - DNA, 99 bp, Homo sapiens
gaaaggagcattgtaagcacaaagaataagattcctcaatcctgagagagagaattaaagtctaactctccaaatttacttacacgccaagtcaatcat

SEQ ID NO: 859128 - DNA, 98 bp, Homo sapiens
gaaaacttgcaaggaaaggaacatgtttgaatttcagatgtgttcctcaatgaatcacgagctgggaatcccaagtgcaaaattgcaattgttttggg

SEQ ID NO: 859129 - DNA, 100 bp, Homo sapiens
cttcgccgccgccgccgcggccccgccagtttgagttcatgatcgagtccatcctgtatgcccgggatgcctggctgaaggaggacggggtcatttggcc

SEQ ID NO: 859130 - DNA, 99 bp, Homo sapiens
aagaatcggatcagagttcccaggggctcaagttacaatcgttcctgacaaagatgatggtgaattatgtaacctcattacgctggatgtagctcacaa

SEQ ID NO: 859131 - DNA, 98 bp, Homo sapiens
ccgtgatctccagcgccggcctcctcagtgcgaagaagctgcagccgcacctggccaagggagcctcgaccacacctctttggtcagatgttcgtccg

SEQ ID NO: 859132 - DNA, 100 bp, Homo sapiens
accaatcagcatgctgtgtctagctcaagatggcaagtttggggcctacatgcaggtgcacattcagaatgatgggcctgtgaccatagagctggaatcg

SEQ ID NO: 859133 - DNA, 100 bp, Homo sapiens
gagtcatgttctatgtgccaaatgtgtcatggcttcagcaagaggccacaagattggctctaccagtgcacctggacagggaggaatcctggctcagcgg

SEQ ID NO: 859134 - DNA, 99 bp, Homo sapiens
agccatcagcttcagctccagctccgctctcttcggctgccccaatccccggcagctctctcagataacggcaaaagcttctatcatttttgttactct

SEQ ID NO: 859135 - DNA, 99 bp, Homo sapiens
tactaccaaggacagcttttttcctgcaaggtcagctgttgccagcaaaccgcaatacaccaagtcccattgatcctgacaccatccaggtcccagtgg

SEQ ID NO: 859136 - DNA, 100 bp, Homo sapiens
ctgttgcttggcctggtgggcccagtcctcggtgcggcgcggccaggaaggaaaatcacctcggcagtgtttgaaggaaggatactgcaactctttgaag

SEQ ID NO: 859137 - DNA, 100 bp, Homo sapiens
ccacgtattcccggcagtggtggcggcggcggcggcggcgcccgcgggcagcacaaacgtgcagatatctgatagccctttccgttgcactcaagaggaa

SEQ ID NO: 859138 - DNA, 100 bp, Homo sapiens
ggcctgggtgtctgtcagctccaagcggaagatttccccagctttctaggttgatttagtgaatattggaagtactgacatcgtagatggaaatcataaa

SEQ ID NO: 859139 - DNA, 100 bp, Homo sapiens
gaaaagctgggaaccttggtggaggggtggtgaccatcgaaaggagcaagagcaagatcaccgtgacatccgaggtgccagatgtgacatccagatgacc

SEQ ID NO: 859140 - DNA, 99 bp, Homo sapiens
attgacttgctgcctcaacagatctgcaaaggacaaccagccagctcccattgctatcacatgttttaccagaggcttggacatcaggaaagagaaagc

SEQ ID NO: 859141 - DNA, 98 bp, Homo sapiens
ccgcctcggccgaccagggacctgcccgcctgcggctgctccgggatcttttgccagaaatgagggcatactggcctgacgtaattcactcgtttccc

SEQ ID NO: 859142 - DNA, 125 bp, Homo sapiens
ctctctgaggctcattttgcagttgttgaaattgtccccgcagttttcaatcatgtctgaagatgatgagaaactgaaaaagaggaaggagcgatttgggattgtcacaagttcagctggaactg

SEQ ID NO: 859143 - DNA, 98 bp, Homo sapiens
atatttgcatatggacaaacatcctctgggaagacacacacaatggaggttgcctgtgatttgcttcggaggattattcgtatcttgaatctcagtaa

SEQ ID NO: 859144 - DNA, 98 bp, Homo sapiens
tttctctgccatgttgctattgcaggacggagtccaaaagcttctttgcatgtgtccagtggatttccatgggatcttccagttagatgaaagacgga

SEQ ID NO: 859145 - DNA, 100 bp, Homo sapiens
cgcagccaggccctgggccagtcggcgccctcgctcaccgccagcctggatggacaaccggaaattttctacacattttggaattcagttactcaggcac

SEQ ID NO: 859146 - DNA, 100 bp, Homo sapiens
gataaactacctacatagaggacatacctttggttaaaggagctgccgtcagtagtattattgattccacagaatacagccaacctccaggtttcagtgg

SEQ ID NO: 859147 - DNA, 100 bp, Homo sapiens
cttggtaccgtgctgcccagaatgcccttcgggagggcagatgattctggaccagatgaagcctgaggagccttccagctctaagatagcaggataggag

SEQ ID NO: 859148 - DNA, 98 bp, Homo sapiens
cagctgacttacatggaggagacgtgtcgtcactatgtggcccatgtgaaggcctgtttaaagaagaaaacccgtatgctagatttgaaaacaactaa

SEQ ID NO: 859149 - DNA, 99 bp, Homo sapiens
ggaggctccaagacctcatcaacaattaagggcaagaaagactcctccccgtggacctgccccttccacccaccactccagctgttttttgttattcga

SEQ ID NO: 859150 - DNA, 100 bp, Homo sapiens
caccatgtcggctttcgacaccaaccccttcgcggacccagtggatgtaaaccccttccagatgatgctgtgtatctggacaatgagaaagaaagagaag

SEQ ID NO: 859151 - DNA, 99 bp, Homo sapiens
gaaactggacacgagtttcaagatcctggaccgtgtcaccatccaggaactcacaggcgttcaccttggtcgtcctgatgttttacctcagactccacc

SEQ ID NO: 859152 - DNA, 100 bp, Homo sapiens
actgacattgcagagctgtgggctgtgttccacaagttcaaaggtaaacctctttgtgctgctctctgtggtttgtgtcctcttaaatctagctggattt

SEQ ID NO: 859153 - DNA, 99 bp, Homo sapiens
caggacctcctggacatccgtcccacccaggacccgatggcttgagcaggtttgccattttcagcagaagattccgcacacatacaggaccattacacg

SEQ ID NO: 859154 - DNA, 99 bp, Homo sapiens
ctacagaagctgcaaaaccagctaaacctgatgagaaaggagagatgcagggtgacatccagcagctgctctttgtctcggaccaccgggcagcttatg

SEQ ID NO: 859155 - DNA, 98 bp, Homo sapiens
taggtctgttagaggaagacgacgagtttgaagagttccctgccgaaggtggcattgcagacagtgtagccaagtggatatttaaacaggacttcagc

SEQ ID NO: 859156 - DNA, 100 bp, Homo sapiens
caaagcaatcctgtttttaggagatacttaaataagattttaattgaagctggaaagcttggacttgtgcctgattattacaaaataattaaaaatccaa

SEQ ID NO: 859157 - DNA, 116 bp, Homo sapiens
aattttatgatggagtagttcagactgtcaaacatattcatgtcaaagctttttccaaagatcagatggcccactgcgtgaccttggttcagctgtccatttcctgtgaccatctc

SEQ ID NO: 859158 - DNA, 99 bp, Homo sapiens
ccgggtctgccagcgcgacgtcctctcgcggccctcagggcacagcccaaggctgtcagcctcccggcccagagcaaacgaggcccctgagagctccac

SEQ ID NO: 859159 - DNA, 98 bp, Homo sapiens
ggtcggatttcaccacaagaagggctgccagaatgattgaagatagtgggaaaagaggaaataccatggcagaaagaagacagctgtttgcagagatg

SEQ ID NO: 859160 - DNA, 100 bp, Homo sapiens
caaaacctattacgaactcaaaagtcaaccgctgaagagcagaatgccacccagaggatgtttgaaattgactatagccgggactccttcctcaaggatg

SEQ ID NO: 859161 - DNA, 100 bp, Homo sapiens
cctccagctgttgttgctgctggtgcaccgggtataatttcttcaccatatgcaggggctgctggatttgccccagccattggatttcctcaagctacag

SEQ ID NO: 859162 - DNA, 99 bp, Homo sapiens
tggctgtcatccgccacttccgcgagcccatccgtctcaagactgtgaaaccaggaggagagacttcagcatgcaaaccttcatctgttcggcttgcac

SEQ ID NO: 859163 - DNA, 98 bp, Homo sapiens
tgctgagccagcggagctgcttgagccagccccagtgcctgctgagccgtttgacaacactacctacaagaacctgcagcatcatgactacagcacgt

SEQ ID NO: 859164 - DNA, 98 bp, Homo sapiens
gagtacctgaaccggcacctgcacacctggatccaggataacggaggctggtatccggagtgtgatgcagaagtaccttgcagagagaaatgaaataa

SEQ ID NO: 859165 - DNA, 98 bp, Homo sapiens
agtttctagagggcccgtccccagcccgggccgtccatcctcgcattgctgttgaatggtgaaaggtgtagcagtcactcggcctacacccacagcat

SEQ ID NO: 859166 - DNA, 100 bp, Homo sapiens
agcctgcggatccaggagcaggtgcagcagaccctcgcccggaagggccgcagctccgtgggcaacgacatgtgcattgccattgcgatttctcttctca

SEQ ID NO: 859167 - DNA, 98 bp, Homo sapiens
caagaagaaattcccacctgtcaaagagacgttccatcctcagagcagcctgaactgttcctaaagaaacttcagcagtgctgtgtcatttttgactt

SEQ ID NO: 859168 - DNA, 99 bp, Homo sapiens
gagagtctacagcgtgagaaggccgggctcctcaagcagctggatttcctaaggcgaaaattttgaccagagtcctttgagaagaacattcaaatccaa

SEQ ID NO: 859169 - DNA, 100 bp, Homo sapiens
atgggttttagctgccgccggagtcgaggatttttttcccaggaagccatcccgtcagaggggttcaagtgatgaaagttggcaaactgcagctacatca

SEQ ID NO: 859170 - DNA, 100 bp, Homo sapiens
atttccgggactacctcatgagctttgaagattatgaaacagatgaacctgcctctccctctgaatttggaaacaaaagcaataaaatattaagtgcaag

SEQ ID NO: 859171 - DNA, 100 bp, Homo sapiens
atcccatcagccccatgcagtgggtgggcactgtgcttgtgttcctggaatggccacatctgttgctcagtggatccacagtgccttcaggaactgtgaa

SEQ ID NO: 859172 - DNA, 100 bp, Homo sapiens
tgctgccatcaatgatatgaaaaagtctccagagattatcagtgggcggatgacatttgagttatggtgaatggttgcatggatttgaaaaaaaggcaaa

SEQ ID NO: 859173 - DNA, 99 bp, Homo sapiens
ttccagcagtcgagcaccgccaagtcggccacctggacggcatcgtcatgtgatcatcacctaagaactagaacatcagcaggccctagaagcctcact

SEQ ID NO: 859174 - DNA, 100 bp, Homo sapiens
ctattggaaggaggagattctgaagataaggaggagtctcgctctcagtcaaaatctccaacgggaactcctgctcgtgtaaaatcggagagcaggtcag

SEQ ID NO: 859175 - DNA, 99 bp, Homo sapiens
gtagatctagaagtcactttggaagaagtatatgcaggaaattttgtggaagtaattaataatgcttgtgctactcaagccatagtgagtgtgttactg

SEQ ID NO: 859176 - DNA, 100 bp, Homo sapiens
aactttggacttcaagaacttggattaaagaacttgacagcggctgcggcagcagacatggcttaccaccacatcagacctcccattggctattccattc

SEQ ID NO: 859177 - DNA, 100 bp, Homo sapiens
tttccttctggagtttccccggcgggtgtgctggagaatctggtaaaagcaccattgtgaagcagatgaggatcctgcatgttaatgggtttaatggaga

SEQ ID NO: 859178 - DNA, 100 bp, Homo sapiens
cccactcaactgatgaatttaaagatgtttctgcaacagaaccactcctcaaccactgaagaagaagcttgatgcttggctgtcagaagacatgaattac

SEQ ID NO: 859179 - DNA, 100 bp, Homo sapiens
gagtggcagccaaaagattgaaggaaggtgatacaatgatggggcagcaagtggccaattacagcaattggaacttgcacagatacagcatagagacgct

SEQ ID NO: 859180 - DNA, 99 bp, Homo sapiens
ttacattaacattcttagcagaatggggtgatcgctctcaactaactacaattgtattggcagctagagagaaatacaggtatcaggatgaagatacac

SEQ ID NO: 859181 - DNA, 100 bp, Homo sapiens
gagaagacccagagaatgaaacagccaccagcaaccactcctcctttcaaaacacactgccaggaccctgatgctcccataagacagaaaatgccccttg

SEQ ID NO: 859182 - DNA, 98 bp, Homo sapiens
tggggacaagtggttagatgaactggattctgggctccaaggagcaccttctgctccatcattgctcagctcacagaggagacccagccgctatttga

SEQ ID NO: 859183 - DNA, 100 bp, Homo sapiens
ggtggtctaccggcgcttcaccgagatctacgagttccatatgatgatgccaattcctacgagaatgtgctcatttgcaagcagaaaaccacagagacag

SEQ ID NO: 859184 - DNA, 98 bp, Homo sapiens
gccggcagtcctggtgaagatcgctcctgacctcaccagccaggataaggaggacattgccagtgtggtcaaagagtgccctgggagctgtcattgcc

SEQ ID NO: 859185 - DNA, 100 bp, Homo sapiens
gttgtttgtcttctctcaagaaatggtgttcttctctgacctgaaatacgaatgtagagccacagatgaagatatccttgctaaaggaaaacagtccatc

SEQ ID NO: 859186 - DNA, 100 bp, Homo sapiens
ccagtactaccaaggacagcttttttcctgcaaggttcaaggtaaagacccatcagtggaagtcacacaggacctcattgatgaatctgaagaagaacga

SEQ ID NO: 859187 - DNA, 100 bp, Homo sapiens
catttaagagagctctggacaagctggaatgcatccaagagaatccctcaacatgctggatcacgcagatttgcgaagccatttcttcacagttgggatg

SEQ ID NO: 859188 - DNA, 100 bp, Homo sapiens
ctcctgttgggccatttccgagaactcccatcagtttctgtatagtgtaaaaggctgaagccgacgtagcttctctgaacagacgcatccagctggttga

SEQ ID NO: 859189 - DNA, 100 bp, Homo sapiens
tgatgtcttttgccaagatatatctggatggactgcagaagactacgctgttgcttctaagtttcaagcgtttgtggtaaatatgccagctctagaacac

SEQ ID NO: 859190 - DNA, 100 bp, Homo sapiens
gctggagcgactgctggatgcagtgaaacaggtgaggtgccccaggccagccaagtaccccctcccagtggattcactgtccacggcctcccaacatctc

SEQ ID NO: 859191 - DNA, 100 bp, Homo sapiens
gactgcactcgagtgtccagacctgctcgatggctgctggtggtctacccttggacccagaggttctttgagtcctttggggatctgtccactcctgatg

SEQ ID NO: 859192 - DNA, 99 bp, Homo sapiens
taggatgatcgaggttgtttgcaacgaccgtctggggaagaaggtccgcgttaaatattcatcacaagagagctacaagagcctggaagaagctgaaga

SEQ ID NO: 859193 - DNA, 98 bp, Homo sapiens
cggagagactccttgggggtcgagcacataacggggttcgggtgtctcgtgtgtgaacatcacagaaccactcacgaattcttgtttggtgcccttgc

SEQ ID NO: 859194 - DNA, 98 bp, Homo sapiens
agacctcctgtcctatgaggccctccccatggctttagacgaagttatacggaagcgtctcctcattgatggagatggtgctggagatgatcggagaa

SEQ ID NO: 859195 - DNA, 100 bp, Homo sapiens
agcagctgtcgccgccgctctcagctcttgaatgtcgtctctcaactagccaaacggaatctgcgactgctggtcctaggccggaagcacatgctaagac

SEQ ID NO: 859196 - DNA, 99 bp, Homo sapiens
cgagccagtggcaatgacccagacccggacgacccccattgctgagccagcggagctgcttgttccaaaagctgagacaagatcttgaaatggtactgt

SEQ ID NO: 859197 - DNA, 100 bp, Homo sapiens
acacatggggattatgggaactacaagtcaagatgagatttgggtggagacacagccaaacgatatcagtgcaaggatggcttgaaaggatttacatttt

SEQ ID NO: 859198 - DNA, 99 bp, Homo sapiens
cagcgcctgggctggaggacagagaagccttttccgttgccggtgccggcctagcgtcctggaattacttcaatcaagcaagctgtggattttctgagc

SEQ ID NO: 859199 - DNA, 131 bp, Homo sapiens
ccggaatgggaatcgctgaggctctgatccacttctaagacaggaaggaaagtgaaggcagagtgagcaggtatgctgaccgcaccaagcaaatccgctgcaatgccatcatcaacgaggaccctaatgcc

SEQ ID NO: 859200 - DNA, 99 bp, Homo sapiens
agaagacctggaagaaccatcctataaacgggaaagattgactagtttcacagattatttgcatgggtgcaaaagaaaatggtttgccgctggagtatc

SEQ ID NO: 859201 - DNA, 100 bp, Homo sapiens
gtttttatgacccatttggagttcctcttcacggacagtgggttctacatggtcagctattatgagcggaatcacagaatagcagttggagctcgccatg

SEQ ID NO: 859202 - DNA, 100 bp, Homo sapiens
gggagcagggagcattgcagcagccactggctttgtcaaaaaggaccagttgggcaagtcttctgagttgacagagcagaagcttcgtgcctgtttagag

SEQ ID NO: 859203 - DNA, 100 bp, Homo sapiens
ggttaatagtggcatggaagatccatttgaattctgcttggtcagaatcgtgatggcattgtgttcagcactgatgactattttcaccatcaagatgggt

SEQ ID NO: 859204 - DNA, 100 bp, Homo sapiens
cagagaggatatcttgggcgggggatgtgagcgctgagcccttggcagtgacagaaatgttggtaaatgttctgagtatttgctctgatgatgaactaat

SEQ ID NO: 859205 - DNA, 100 bp, Homo sapiens
agctaaagatggctgaatttctagatgaccaggaaactcgactgtgtgacaactgttgagccccatatgggggttggcaggcagcagagaggcccctttc

SEQ ID NO: 859206 - DNA, 100 bp, Homo sapiens
ggctttcaaggactttgatgttggcgatgactttcttgtctgcacagaaagtcccagtacaacttccattgctgagaaaatcctcagaggactttcccac

SEQ ID NO: 859207 - DNA, 98 bp, Homo sapiens
caaatcttcgacaagagctagaagataattccaatcatcttacaaaactggaaactgaggcatctaatatgaagaatcgagagctccagatcatgaga

SEQ ID NO: 859208 - DNA, 98 bp, Homo sapiens
cgcagcgagggcccgggccctggggatcccaggttgtggaaaggaggagaacccctgctgaaattcgagaggagtttgagcggctgcagagagagaga

SEQ ID NO: 859209 - DNA, 98 bp, Homo sapiens
tctggagccagtcttgaggtcctacatctccgaaagcaagctcttctagaagttggtgcctggaatacttattaagaaacgatgcaaatccagggatc

SEQ ID NO: 859210 - DNA, 100 bp, Homo sapiens
taaagaaagagcaggacatctatacccatctggtcaaatctctgcaggaatcagacagatggtgtcggacggcatgacaggcagcaatcctgtgtcccct

SEQ ID NO: 859211 - DNA, 100 bp, Homo sapiens
tcaaagataaatccaaatactgcatatcagaaacaacagcctcttctgaaacagtctccctggagcaaccatcagagcagtggctggggcactggaagta

SEQ ID NO: 859212 - DNA, 99 bp, Homo sapiens
agtttccagtgtgatccattattgaccttcaagaactaaggtcatagaaggttatgaaatagcctgcagaaaagctcatgagattcttcctaatttggt

SEQ ID NO: 859213 - DNA, 100 bp, Homo sapiens
aggagggacccacagggctgaaggaagctgccttgtacccacatctcccgccaggtgatggcatcagctgagaagggaaggaagcccatgtgaggacact

SEQ ID NO: 859214 - DNA, 99 bp, Homo sapiens
gtcttccgtgggcaacgtggccgacagcacaggaagatgagaatgtgcctactgctcctgatcctccaagtcaacatttacgtgggcatgggacaggct

SEQ ID NO: 859215 - DNA, 99 bp, Homo sapiens
tgctgggacagccatggtttcagacgagttgaagtattgataacaccaaggaactctatcacaatttgaaaagataagcaaaagtttgatttccagaca

SEQ ID NO: 859216 - DNA, 100 bp, Homo sapiens
acaagctggggcaacctggacgagctggggcaacctgatctcggctgtcggagtgggtgtcctcaagaaagtctgcagatctccaggggagcccaccagc

SEQ ID NO: 859217 - DNA, 100 bp, Homo sapiens
cagggagtggagcttggtttcgggatctcggtgctgcagacggcgagacctcctgcacaggtgaaagaacttgtcctggacaacagtcggtcgaatgaag

SEQ ID NO: 859218 - DNA, 99 bp, Homo sapiens
ttcactgaagtttatgccatcaacagacagaggctgcagaatctggagtttgctctgaatctcctcagacagggggaaactcggccgatatcctccttg

SEQ ID NO: 859219 - DNA, 100 bp, Homo sapiens
gagcacagatgaccacgccatcgtccagtatgagtgggcactgctgcagggggacccgtcagtggacatgaaggctcagctggaagctcagaaagccacg

SEQ ID NO: 859220 - DNA, 100 bp, Homo sapiens
ctcatgttctgcacctcaggagggaattcagcctcagtgatgtccatgaggtaagaatgattgatgttggctgatattggagtgctcattcacatgaagt

SEQ ID NO: 859221 - DNA, 100 bp, Homo sapiens
taccgtcaagctggccaagcacaaagagcttgctccctacgatgagaactggttctacacgcgagctggttctttggcatggacacaagttcagtgggag

SEQ ID NO: 859222 - DNA, 98 bp, Homo sapiens
cgcggtgtggcagagcgaagctgaggagtccagcgctcgccgacaggggcctgggctgtcccgagccgggctctgccagcagacagccttggcacaca

SEQ ID NO: 859223 - DNA, 100 bp, Homo sapiens
atatgccttcaagtatggatgagtatgtccatcagccttcaaatgtttatctggtgtgactgtattatgccctcagagagtactgtatgttgcccaggct

SEQ ID NO: 859224 - DNA, 100 bp, Homo sapiens
ggcggctcaagcgcccagaaacccctactcatgatccggaccctgagactcccctaaaggccagaaagaaaccagactgtgatgactgggagagcgggct

SEQ ID NO: 859225 - DNA, 118 bp, Homo sapiens
atacatcgctgcaggccacagagcagcttgggttggaagagagaagatgaagggacatccttggggctgtgccgaggcatacacggaatacctgaggagcatccactatatctcccag

SEQ ID NO: 859226 - DNA, 100 bp, Homo sapiens
gagcagagatcttcgttggtggaataagacgagttggaagaagacctgatcaacaacttcagggtgaagggaaaataattgatagaagaccagaaaggcg

SEQ ID NO: 859227 - DNA, 98 bp, Homo sapiens
agaggacggtttgtctgcccagtaatcctgttcaagggcaagggtgaaaatcctatttataagagtgccgtaacaactgtggtcaatccgaagtatga

SEQ ID NO: 859228 - DNA, 100 bp, Homo sapiens
atgagggaaatcgtgcacttgcaggccgggcagtgcggcaaccaaatcggcgccaagaagttccacctggtgccaagcatcaacaccatgagtggcagtc

SEQ ID NO: 859229 - DNA, 100 bp, Homo sapiens
ctctggagttgatcgttactatgtgtcaaaggaggcatgtgagcgcagcctggcagagatggagtcctcgcaccagcaggtgatggaggagctgcagcgg

SEQ ID NO: 859230 - DNA, 100 bp, Homo sapiens
agggagagagtagggacagcgactgggagacgcgctccacagaaacccggactgagaggcagcgagaggtgagtgttgcagagagctgctggacacagtg

SEQ ID NO: 859231 - DNA, 98 bp, Homo sapiens
agaagcaaaatgctgagaagcagctgctggtggccaaggaggggataattctaacatctttgtcatcagtgttgacatctcttgattgtatcctgtca

SEQ ID NO: 859232 - DNA, 100 bp, Homo sapiens
ctgcagctcccagcgtgatcgacgcagaagacaggtgatttctgcatttccgactgagagcttcccgtgagcttcagccgcccgctgcaggacgtggtga

SEQ ID NO: 859233 - DNA, 100 bp, Homo sapiens
catgggcgccccgcgccgcccgggtcatgaggacggaggcggaggcagcggggccgccgctcgagcccggcaatgagtttgtgcagcacaatacttggca

SEQ ID NO: 859234 - DNA, 100 bp, Homo sapiens
aaactgaaagaagcagtggaagctattcagaatagtacttcaattaagtacaatttagaagaactctaccaggctgacgttcctcagggagtgattcgag

SEQ ID NO: 859235 - DNA, 99 bp, Homo sapiens
tttaacacttcaggtgatgccaccaatccagacagaatgtacgaccttgttgctgttgtggttcactgtggaagaaaaacacaccttgactttagtcag

SEQ ID NO: 859236 - DNA, 98 bp, Homo sapiens
gggaacagctgcggtgctctgccatattgtgtcttccccggccggtccctcgcctcccggccgagctgacgaacctttcagctcttggggcattggtg

SEQ ID NO: 859237 - DNA, 100 bp, Homo sapiens
gccaattccactgatcctgtgaaggctgcccaatttgagtatgaatgacccatattaaatcgcccttggtgaaagaaaattcttggaatactaaaaatca

SEQ ID NO: 859238 - DNA, 100 bp, Homo sapiens
gccgccgccgccatcatgagggaaatcgtgcacttgcaggccgggcagtgcggcaaccaaatcggcgccaagggaagacatgtaaggaatttgcataaga

SEQ ID NO: 859239 - DNA, 100 bp, Homo sapiens
ggcacagagaccccatcctacaagcaaatggttatgagccttagagtttctgaactccaagtactgttgggctacgccgggagaaacaagcacggacgca

SEQ ID NO: 859240 - DNA, 101 bp, Homo sapiens
cagtgtgaccaagaaccatgcctggtggatccagacatgatcaaagccatcaaccagggcaactatggggcaagctgcctgtcctgctgcttggccgctcc

SEQ ID NO: 859241 - DNA, 98 bp, Homo sapiens
cctcctcaggtgagctggagctgcccggctcggcagcgggaaggttcgagaacttgtcttggacaattgcaaatcaaatgatggaaaaattgagggct

SEQ ID NO: 859242 - DNA, 99 bp, Homo sapiens
agagttctgcatgttgattcgaattacatgaacgacagccttcgcaccgacgtcttcgtgcggttccagccagagagcatcgcctgtgcctgcatttat

SEQ ID NO: 859243 - DNA, 100 bp, Homo sapiens
catgactttgctccagcctggcttaatttccctactccaccatcatcaacaaaggtctcaacatatgcactagtggaagtgccacctcatgtgaagaatg

SEQ ID NO: 859244 - DNA, 98 bp, Homo sapiens
cgctgcgctaggggaagcgggcagatttgaaaaatgtgtgagtgctaaggaagctttggagactgatctttataagcggtttattctggtgttgaatg

SEQ ID NO: 859245 - DNA, 98 bp, Homo sapiens
tctaagaagttgggtgcagattttcatgatggatagctcccagttgatccattgtcgggagcttgtggcacatcacctttctactctgcagtcttccc

SEQ ID NO: 859246 - DNA, 100 bp, Homo sapiens
acaaatgctccttctcctggagacgcaactcaaggtggaagaacaattgccctttttcggcagatgaaaattatcgtcctttagccaagacaaggcaaca

SEQ ID NO: 859247 - DNA, 100 bp, Homo sapiens
gttggggtcccagggaaccacgccagctgcctgtcaacacctagctccggctatggtgaactaaacggtaatgctggagaaagagaaatatctttaaaga

SEQ ID NO: 859248 - DNA, 100 bp, Homo sapiens
ggaaagtatttgtggtaataacccttaccgggagtttcactgaaggcagccatgttgttcagttctggagtcttttggatgggcttgttattcatccctg

SEQ ID NO: 859249 - DNA, 100 bp, Homo sapiens
tgcatagagaaatgggggaaaattacttctctccccagggggaaatttgcagtggtgagaaaatgtataaagaaagattctgggaaagaatttgctgcaa

SEQ ID NO: 859250 - DNA, 98 bp, Homo sapiens
ggaggagttgcggatgatagtgccatttctaatctgctttggttgtcggacaagtaaccgcaagagcttgattgtgacctctagcacatcacctacac

SEQ ID NO: 859251 - DNA, 98 bp, Homo sapiens
tccaataaatctacatctgcaaagaatgcaggtacacagccctcacttgaaagcttatttgcactaatcttgatgaactcagggaattaatcacaaaa

SEQ ID NO: 859252 - DNA, 134 bp, Homo sapiens
cacagtggccgctatgaagagctggctcggatgctgatggggctggacctgctggtgttcgcccacgaccatggtactaggttttgacaagcttgcatcatgcgtgagtataagctagtcgttcttggctcagg

SEQ ID NO: 859253 - DNA, 98 bp, Homo sapiens
caggctgccaataaaggagcaagatggctagggggacctggtggccttagtctttcaggtggaacggtgtgcgacatgggaaagaaaaccaagcggac

SEQ ID NO: 859254 - DNA, 99 bp, Homo sapiens
actcctcttactgatcttcgttctgacttctccaagtttcaggaaatgatagaaacaactttagatatggatcaggtgagtggtgtcattgagcaaaca

SEQ ID NO: 859255 - DNA, 100 bp, Homo sapiens
agaagactatctcctcactgaagactatgacgaaatctgaaatagagtactatgctatgttggctaaaactggtgtccatcactacagtggcaataatat

SEQ ID NO: 859256 - DNA, 99 bp, Homo sapiens
gaagcccggaccttgccaacctcacgctccgaggtcttgactctcagctcatctccctcaagcgccaggcagcctggcatcctcgctacaacctcattg

SEQ ID NO: 859257 - DNA, 100 bp, Homo sapiens
tgacccgccttctccccgcaccgccggacagggacccaggctcttgttgatgctgcgtctcagctccggactgaagattttgagggtaataaatgaaccc

SEQ ID NO: 859258 - DNA, 100 bp, Homo sapiens
ggaggagccttttagatgagccccgaaaggccgggcaggcgatatgaaaggtgaggtctatccatttggcatcgttgggatggccaacaaaggggattgc

SEQ ID NO: 859259 - DNA, 100 bp, Homo sapiens
gcagtacctgcagaaggtctctggagacatcttcagcagtgccctctggtggtcagaagatgctgtgctgtctcgttaggatgaatggattaaaatgtac

SEQ ID NO: 859260 - DNA, 100 bp, Homo sapiens
ggcgcaggcccacggtagcgcagccgctctgaggtacatctccgttcatggatgcattaacagccaatgggacaaccaacatacagacatctgttacagg

SEQ ID NO: 859261 - DNA, 98 bp, Homo sapiens
cggacgcgagcccgctcccctgagttactataacaacagtaccaaggtggctgtgaaaaccctgaagccaggaactatgtctgtgcaagccttcctgg

SEQ ID NO: 859262 - DNA, 99 bp, Homo sapiens
gctggggttgccggcaccatggagtcaccttttagcccgggactctttcacaggctggatgaagattggggttggtcaaagaaaaagtgatgtatgaaa

SEQ ID NO: 859263 - DNA, 100 bp, Homo sapiens
atccttccgaggactgagatgaggacggaaaatgaaccatcggccaataagcaagaaatccttcctgcaacatgttgaagagctttgcacaaacaacaac

SEQ ID NO: 859264 - DNA, 98 bp, Homo sapiens
agaacagatacaaggacatactgccatgaaaggcagactacaagttactgagcacctccctgagaaaattgaaagtagtttacaggaagatgaacctg

SEQ ID NO: 859265 - DNA, 99 bp, Homo sapiens
agtgttccttccgctagtgatcctttgcaccctgcttggagacggacttgcttccggctcgggttatgtatgattttgctgctgaacctggaaataatg

SEQ ID NO: 859266 - DNA, 100 bp, Homo sapiens
ggctgcggcccgggaactggtgttgcgggctgggacctcagatatggaggaggaagagggcccgctgctattatcgctgaccctggatggactgactggt

SEQ ID NO: 859267 - DNA, 50 bp, Homo sapiens
cgcgccgcggccgttagtcatgtcggttcttcctgtccaagatccggtcc

SEQ ID NO: 859268 - DNA, 98 bp, Homo sapiens
catctacttcctggaggagcgcatgcaacagaagtatgaggccagccgggaggacatctacaagcgggttaaatcacccagaggttccatacagtagt

SEQ ID NO: 859269 - DNA, 98 bp, Homo sapiens
atatgtggaggagagagagctcaccatgctcagtttcagactctctggctcaatctgtagttcagcatctaagatggataatgcagaaggatcttttg

SEQ ID NO: 859270 - DNA, 98 bp, Homo sapiens
acacaatgcagattcttttccgacatctcagaagttggatcgactggttgtggatgcagcaaaggagaaaagagaaatggagcaaaaacattccacca

SEQ ID NO: 859271 - DNA, 98 bp, Homo sapiens
atgtacaccatcaccaaggggcccagcaagctggtcgcgcagcgccgcacaggagaagatggggagccccgaggatgacctgattgggattccattcc

SEQ ID NO: 859272 - DNA, 125 bp, Homo sapiens
gacctcattatggatttacttttgggatacactcatcattccagaggagggtaaaaggctgagaagcttaaggaagtgtttggattgtgagctatttcagaactgttctcaggactcattatttt

SEQ ID NO: 859273 - DNA, 98 bp, Homo sapiens
cgggggttgctcggctcctgtgtgcagctaatggtcgtcgtcggcatcctcctggcctacctggcagttgccagtagtcatcagagtaccaaaactga

SEQ ID NO: 859274 - DNA, 100 bp, Homo sapiens
gctacttcaaagggtactttttagaaccaaagccgattacacctcaacaagaaggcaactgacaaacagccttatagcaagctcccaggtgtctctcttc

SEQ ID NO: 859275 - DNA, 100 bp, Homo sapiens
actttggtcttgacttgaaagcagatgacaaaatatattttggtggcctgccaacgctgagaaacttgaggatgtgatggagctgcttgaagaagatctc

SEQ ID NO: 859276 - DNA, 98 bp, Homo sapiens
agagcaaacaactgaccagcctttgggagatgttacagcccagatagctcttcagcctgcactgaagttcaatggtggtggtcatatcaatcatagca

SEQ ID NO: 859277 - DNA, 98 bp, Homo sapiens
cctgcagccaaggaaggaggcctgcaaattcatgacaggattattgaggagcagtatagcatcaagttctagaggaattgggagccattgcaaatctg

SEQ ID NO: 859278 - DNA, 133 bp, Homo sapiens
gcgacacatccgcacccacacgggcgagaagccctacgagtgcaacatctgcaaggtccgcttcaccaggttacagcacggtcaccttcgacgggacgcccagctacggtcacacgccctcgcaccatgcggc

SEQ ID NO: 859279 - DNA, 98 bp, Homo sapiens
aaagggcagactggtcgcgaagagaagatccaggcctcagaggaggagaaaggccggagccagccgagcctcctgacaaggtgatccgggcgggcccc

SEQ ID NO: 859280 - DNA, 100 bp, Homo sapiens
cctaactgaaaggaagagggagcagagcaagaaaaaaaggaagacgatgacttcagacttgaaactgcatctgcagagcactgattatggtaacttcctg

SEQ ID NO: 859281 - DNA, 98 bp, Homo sapiens
ctataaaggggtccaccctcacatcgtggagatggacaggagacctggaatcattgttgaaaccaatagagccatggcgactccctctgctgccttcg

SEQ ID NO: 859282 - DNA, 100 bp, Homo sapiens
ggcggcggcgggtgttgtgagcgggaagaatgaagaaggagccccacaggaaggaattctggaagatatgcctgtggatcctgacaatgaggcttatgaa

SEQ ID NO: 859283 - DNA, 100 bp, Homo sapiens
atgaactcagtgctcatggggatgaagaaccagctcggagcttgaagaaatccgcaaatgtgggatgaaaaacttccgtaacatccaggttgatgaagct

SEQ ID NO: 859284 - DNA, 98 bp, Homo sapiens
ttgtgtggccttagcgatctatattccctttccagaagatgattccaacgccaccaattccaacctgaattgtcaacatcacactgctggtgacttct

SEQ ID NO: 859285 - DNA, 100 bp, Homo sapiens
aagaagacagcggaagctggaggagtgacaggtacctgaatctctctcatccatggagtgtcaccattttctgaggctgaaagttcttccactagcaccg

SEQ ID NO: 859286 - DNA, 100 bp, Homo sapiens
ctgatccgcaaagtgtctacctcggggcagatccggaccaaggacaacagctttgagcagttcattattaattattgtaacgaaaagctgcaacaaatct

SEQ ID NO: 859287 - DNA, 99 bp, Homo sapiens
ttctactgtgggtctggactgatctccatgtcctgttgtggggcttttacagcctttggagcacttggagctaccttctgtttctttgctgtagaagcc

SEQ ID NO: 859288 - DNA, 100 bp, Homo sapiens
cgacaccaggggcaccgcgtgcagccggtgaaggacactgcccacgactttcggagaattcggtcaacagtggatgaaaaagaacaaaaacaacttctta

SEQ ID NO: 859289 - DNA, 100 bp, Homo sapiens
acacctagactgatgcttattagtcatcaccgttattcctactaacgtcctgtgtcactgaggcacacaagactgtatctctgcttacacaagtctggcc

SEQ ID NO: 859290 - DNA, 100 bp, Homo sapiens
ggtctactctgatgtcaatcttgagggctaggctcttgcagccaatgccggaacaggatttgctgttgctgagcctcaaatcgcaatgttttgtgggaag

SEQ ID NO: 859291 - DNA, 129 bp, Homo sapiens
gtcggtcttcttgatctctgccttgaaggcctccgcctcgccattctggtcgtccttggccagcaggtccatgaggtaaaaatgtctccatcgtatcatcagtccaaaggggatcccactgctaaaaag

SEQ ID NO: 859292 - DNA, 100 bp, Homo sapiens
tacgacactgaattcaaccaggagtaatgtgtgtggctggtattggacttgttgtattattcttcagttggatgctctctatttttagatctaaatatca

SEQ ID NO: 859293 - DNA, 136 bp, Homo sapiens
gaatttagcaaactagttgcagaagaatatctgaagttttttgattttacaggaatgacgctggatcagtcactcaggattaaactgcaaatatctcatgaagctgctgcctgtatcactggtctccgggcagcca

SEQ ID NO: 859294 - DNA, 98 bp, Homo sapiens
gattctttgtagcagacactgcaaatgaagctctcgaggctgctaagagactaaatggttggaatccattttcgtacccatacaaaaaactggattat

SEQ ID NO: 859295 - DNA, 98 bp, Homo sapiens
tgaatctctgttccaaatgctttgctgagatcatgatgcagccgtccttttggatttctttttaataatgtgtgacccttcacctttgatcccctgac

SEQ ID NO: 859296 - DNA, 100 bp, Homo sapiens
cctgttcatcaccaatgagtcgggctactacctggacatcagcctctacaaagaagtgactgactccagatctggaaatcaatactggagtaaccgcttc

SEQ ID NO: 859297 - DNA, 100 bp, Homo sapiens
aggacaactacacctttgcccaacctgggattcaaatgaaagtgaaaatgttagaagaactcgtgagccggattgatgatgatgctggagggtcttgaaa

SEQ ID NO: 859298 - DNA, 98 bp, Homo sapiens
gcctcacacacctcacttgttcttttgggcgaagtgctgcattggaagaagtgagcaatggtggaacaaagcggcaaaagatatcccatcaaaattat

SEQ ID NO: 859299 - DNA, 101 bp, Homo sapiens
tgtcgtgactccagagaagccgatccccatttttattgaaagatgtattgagtacattgaagccacagggtctcagtccgtcggcccagactgaagtgcag

SEQ ID NO: 859300 - DNA, 98 bp, Homo sapiens
gagctccgtgcgggtggctgtcaggaaaatgtttataggaggccttagctgggacactacaaagaaagatctgaaggactacttttccaaatttggtg

SEQ ID NO: 859301 - DNA, 100 bp, Homo sapiens
tttcagaagggccaggtgacccgagacggcttcaaggtggctgaatccacagaggagcctgctggttctaatcggggacagtatcctgaggattcctcaa

SEQ ID NO: 859302 - DNA, 100 bp, Homo sapiens
ccgtctgcaccagcgacttcgcgtgagtgcatctccatccacgttggccaggctggtgtccagattggcaatgcctgctgggagctctactgcctggaac

SEQ ID NO: 859303 - DNA, 100 bp, Homo sapiens
cccacccggatgtgagaggctccaggcctagcctgtttgctgtgaggacactgaggaatagtgaggagatgacctgatcagagccatcaagaaactaaag

SEQ ID NO: 859304 - DNA, 98 bp, Homo sapiens
agaacttctgaggattggcctgtcagtttcagagactggcattgctcgggtaccacttgctggagctgctggaggccctggggttggtagggcagctg

SEQ ID NO: 859305 - DNA, 100 bp, Homo sapiens
cgagagttttgctgggacgcctactccaaagcggccgggagtcgcgcttcttccccactcccgagacagtctattgcgtctgcagacatggatttcaacc

SEQ ID NO: 859306 - DNA, 100 bp, Homo sapiens
acaggaagaattaagacgcatggaagaacttcacaatcaagaaatgcagaaacgtaaagaaatgcaattgagcatctggaatcaagagacccatggcatc

SEQ ID NO: 859307 - DNA, 99 bp, Homo sapiens
aggacttgaaaagctgagatatgatgattttgaagtcatttcacatcgaagccatgatttaaatatcggcgttaagtttgacaagtatgcgcccaagct

SEQ ID NO: 859308 - DNA, 98 bp, Homo sapiens
tgttctcctggcacccggtgcttatgtctttggctgagccagcaccgctctttgaccttgccatgcttgccttagatagtccagagagtggctggaca

SEQ ID NO: 859309 - DNA, 99 bp, Homo sapiens
ggtgacaacagcagtatggacgaccttcataagaaagatgctggaatgtttcaggctcaaggacacaactcagatgggaagttcatcgcccgggcacag

SEQ ID NO: 859310 - DNA, 98 bp, Homo sapiens
tcttgtctcacatgctagcaacataccagatcactggcgatacatctacccactggtgtgtgctttctttgtggccctgctgcctgtctgggtggtgc

SEQ ID NO: 859311 - DNA, 98 bp, Homo sapiens
acagctgagccgtctgggaagggatgcatctagaaagcttcttgctatctacctccaccatgatgaaagtgtgttaaccaacgtgttctgctcacaaa

SEQ ID NO: 859312 - DNA, 100 bp, Homo sapiens
caacagtgacgtgttctccaaataccagctcgacaaagatggggttgtcctctttaagaagcatggaggagcaggacttggagcgaaggttcgagctgct

SEQ ID NO: 859313 - DNA, 99 bp, Homo sapiens
ctgcgccgaggcgccctactcagagggaatctggaaaaattgcaatcaaaacatcatttctctaagaaaattttgggtaaccgaagttctggacaacag

SEQ ID NO: 859314 - DNA, 100 bp, Homo sapiens
gaacctacagctttctccttcacagcattgcaggagaaactgaggcttcttgaagagcttgaagacacttggctcccttatctgacccccaaagatgatg

SEQ ID NO: 859315 - DNA, 100 bp, Homo sapiens
ttgagtcatctgattccaggcctatctctggcacacgtcttagtccactagagctggtgcctcaatcaggaaccctgaagctgtcccacctacaggaggg

SEQ ID NO: 859316 - DNA, 100 bp, Homo sapiens
cgactccctcaccgagtacgaagcgggcgtttgcgaaggtgaattatgtaacctcattacgctggatgtagctcacaatcaacttgaacaccttccaaag

SEQ ID NO: 859317 - DNA, 98 bp, Homo sapiens
tccgaagatgggggatttctacgacccggagcacccgacccctgatctgcagcccctctttcctggagtaaatgaactggaccaaatctcaaaaatcc

SEQ ID NO: 859318 - DNA, 100 bp, Homo sapiens
agcgagatgaatactgctgaggactggggcctcattttggatatctgtgataaagttggtcagtctcgcactgggccgttgatgctcactgccatcagct

SEQ ID NO: 859319 - DNA, 98 bp, Homo sapiens
ggattacaggccaaattagcaagtgtgaagatatgtgacgtgtataacgctgtcatggacgtggttaaaaagcagaagccagaactgctgaacaaaat

SEQ ID NO: 859320 - DNA, 100 bp, Homo sapiens
gaaagaagttgcaaaacactggatggtgcgtgagcagtacactacagccacagaaggcatctgcatagagaggccagagaatcagtatgtctacaaaatt

SEQ ID NO: 859321 - DNA, 100 bp, Homo sapiens
gaatgagccagagggacacgctggtgcatctgtttgccggaggtttgctggaacattatcagatggcttagggaagacgatggacaatcggcatcagtca

SEQ ID NO: 859322 - DNA, 121 bp, Homo sapiens
gccatttctagtcgttttcaaagcgcctcgcgctgattctcacgggcccggctgccggcccccgctctgccctggttcttcagatagatcctgaagttacagatgaagaaataaaaaagag

SEQ ID NO: 859323 - DNA, 99 bp, Homo sapiens
cttttactgaaaattccttatggatctctgagaaggcgcagcgttgaaaggacatcccagttaccagtgtccttgaattgatagtggcttctgtttgtc

SEQ ID NO: 859324 - DNA, 100 bp, Homo sapiens
tgtgaaacacaagaatggaaggcatcctgtggtatttagcatggaggatgaaaaggaagatagtaaagttatacctacagaatgtgccatcaaggtattt

SEQ ID NO: 859325 - DNA, 99 bp, Homo sapiens
gggactcttggcctgtccctcacatccgatgcaccctttttgtcagattatcaggatgagggaagaaggtagataatgactataatgcccttcgagaaa

SEQ ID NO: 859326 - DNA, 100 bp, Homo sapiens
cccattcagtgcaccaagagcagcctcacatggtgtgggccgacatgaagagctgccagatccaacagcccatgactgaagagttgctgaaacaacaaaa

SEQ ID NO: 859327 - DNA, 98 bp, Homo sapiens
tggaggatgcctatgtattccctggggatggcgcatcacacaccaaagtttcctagaggaagttctggcttctggactgcacagccgaagcaaggaga

SEQ ID NO: 859328 - DNA, 99 bp, Homo sapiens
tgatgatcacgcagctggctggcttcagtggaccagaagatctcagtgagcacgtagttcagggtgatgcccttcctggacatgtgggtacagcttgtc

SEQ ID NO: 859329 - DNA, 100 bp, Homo sapiens
gacccggagcgcgatcacttccgcaagatctgtgaggaatatatcacctctcctgccacagctcctcaccccctgaaaatgttcgcctgctccaagtttg

SEQ ID NO: 859330 - DNA, 100 bp, Homo sapiens
tagattagtaactggcatagacaactatgggcagggaatgaaagctactggttgattttaaagtgcctgggcctcacaggtttggagatgtcccagaata

SEQ ID NO: 859331 - DNA, 100 bp, Homo sapiens
tgcgggatcacggatgactcagacagttatgcctgaaggctttggtgaagcacgtgcagtctaaaggatacccaaatgaacgttttgaacttctcaccaa

SEQ ID NO: 859332 - DNA, 98 bp, Homo sapiens
gaagaacaaaggaaggggagcccgggacccccgggggcgcagcaccaatgttgttatgaattattcagagatcgagtctaaggttcgagaggcaacga

SEQ ID NO: 859333 - DNA, 98 bp, Homo sapiens
gggcagagaccatgtttgacaagacgcggctgccgtacgtggccctcgatgtgctctgcgtgttgctggctggccctgaaggaccctgttcatacagt

SEQ ID NO: 859334 - DNA, 100 bp, Homo sapiens
gcagtgaacatgggagtacatacatctgtttgagtctgtaggtatattgttagagccatgcagtgaccgtggtgatagtgaagatggctgtcttgagagg

SEQ ID NO: 859335 - DNA, 100 bp, Homo sapiens
acatgcgggagagagaatgagccagagggacacgctggtgcatctgtttgccggaggacggtcctaaaatctctacacttgccaaaaaacaacagtcttt

SEQ ID NO: 859336 - DNA, 100 bp, Homo sapiens
tcctgtggcattatgcatgccccctcccagtgaccccaggctttttatggctgtgagacacgttaaaatttcagggtgtactggtccgttagcaaattct

SEQ ID NO: 859337 - DNA, 100 bp, Homo sapiens
accacttaacctctcagaactgaacaaagacaacattgttcctggaacgccctctttttaaaaaaggaaattcgcccccgtctgcagcatctgtgaaaat

SEQ ID NO: 859338 - DNA, 98 bp, Homo sapiens
cgagctcaacgccaggcgccgctcctttacaggtcattacacctactctgagaatcgtgtggaaaaagacggcctgattcttacaagccgggggcctg

SEQ ID NO: 859339 - DNA, 100 bp, Homo sapiens
aatggatgaatgtagaccatcccattcatctaggaggcacaactacaagagcggaatgaccctcagcaactgctattagatgccaagcacatgtttcctg

SEQ ID NO: 859340 - DNA, 99 bp, Homo sapiens
gaatcccgtggcctcgagggcaaagccgatacaccagtgccccgactcggcttgcaagcaggacctgctggcctacctgcaacgcatcgccctctactg

SEQ ID NO: 859341 - DNA, 98 bp, Homo sapiens
acacattttcagtccttcctggagattgccagcaacgactgcttttactactcccagaggtagatcgacaggatagagggaggaatcagcagcttgga

SEQ ID NO: 859342 - DNA, 100 bp, Homo sapiens
ctttaagggctacgggaagatcctggaggtggatctgaagaacgggtcagtttaggggctggtgcaaaggatgagttgcacattgttgaagcagaggcaa

SEQ ID NO: 859343 - DNA, 98 bp, Homo sapiens
ggaggttcggttgtcgcccgttggccgcgcggcgccgcgctcggcggccgccattgcagtgagaaagatcagtctaaagaaaaggagaagaaagtgaa

SEQ ID NO: 859344 - DNA, 100 bp, Homo sapiens
aggaagtcctggaagagcagagtgaggacgaggacagagaagccaagaggaagaaggaggaggaaggttgatgcccagctacaggtagtaaggaaactgg

SEQ ID NO: 859345 - DNA, 99 bp, Homo sapiens
tttttttaggtaccagcatcaagatgatttatggtaataagggtgtcagatgcctgatacattcaattcatggtttcttataaccctactccacgtctg

SEQ ID NO: 859346 - DNA, 105 bp, Homo sapiens
tgggatcttttttcacatccagcccatgcggactgagcagccaaagcttgacagagattgtggccaagaaataccgcaactatgatatcccggctgagatgacag

SEQ ID NO: 859347 - DNA, 100 bp, Homo sapiens
caaaaagataaaagcccggatgaacttcaggcactggtgaggtggattgatgatgaatcttctggcacacctggagcaactccagaacacagtcgtgagg

SEQ ID NO: 859348 - DNA, 100 bp, Homo sapiens
gactcgagggtgacgctcgctccgctcgtcccgctcgtcatggcctacccgggatacggaggaggggatgcagcccatgagactgttcccattatgctgg

SEQ ID NO: 859349 - DNA, 98 bp, Homo sapiens
gtagccgctccgagtggaggcgactgggggctgaagagcgcgccgccctctcgtcccactttccagagttcaaagaggccttttcattgtttgaccgg

SEQ ID NO: 859350 - DNA, 100 bp, Homo sapiens
ggaatctttgctgcagctcttcaggtccatcaatgacatgatgagcagcatgtcagaccagaccgtccgggtgaagttgtcgagatgtccacagaaggag

SEQ ID NO: 859351 - DNA, 98 bp, Homo sapiens
gtggatgcctctcatcgggagaatgctcttcaggatagtatcttggccagggaactcaaacagcagatgcaggcagaaggagaagacagcctgaagaa

SEQ ID NO: 859352 - DNA, 100 bp, Homo sapiens
ggcaagtggcagtaaaattgagcctgaagccaaccttaactgaggagtcagtgaagcgcgagcttcggcctcggctctgtaccatgaagaagggccccag

SEQ ID NO: 859353 - DNA, 118 bp, Homo sapiens
aaattccgaccctactgagccgtgagagccgcagtggatggctggaggtgcagggccaggaggaacatgagtcctgcatgaccccttgttcactatcaaactgacttccacatacagg

SEQ ID NO: 859354 - DNA, 123 bp, Homo sapiens
gaagccaatgggcacagaagcaccaattctcccacaatagtttcacctgctattgtttcccccacccagggtgtcaccctaacagaccttcaagaagcagaaaggacattcagccggtcgagg

SEQ ID NO: 859355 - DNA, 100 bp, Homo sapiens
tactgtcaacatctgggactgtagttactattacaatcatgcctgcttttatctttgaacatattattaagcggtcaccatgtacttgacaagatttcat

SEQ ID NO: 859356 - DNA, 100 bp, Homo sapiens
cctgctaattgaggacgaggtggatgttatctggtggatgttatagaatcaattctgtttatgggaagagtgacaaatcctgacacccaggagataaaag

SEQ ID NO: 859357 - DNA, 100 bp, Homo sapiens
ctgcaggtattgggagatccacagctaagacgccaggacccactggaagcctagaaatggtcacttcatcctggcccaggtactgcagctccaaatcgtg

SEQ ID NO: 859358 - DNA, 100 bp, Homo sapiens
ggtagaaagtttcataggataggactccctcctaagtgccccttctttgttgatgccacttcctggaactaaagcattgccttcaatggacaaatatgct

SEQ ID NO: 859359 - DNA, 100 bp, Homo sapiens
atggacgatttattccacttgctcgcccggaggtgaaatggacgtctattgagaacctgcccagtgtatttggaagcaaccctaaagcccatattgcagc

SEQ ID NO: 859360 - DNA, 100 bp, Homo sapiens
gaaagacctgtcttgagaaaaggccagtgttgtccctactgcatagatgttcctcctgctgatcaagagaagctttttatccagaagttacgtcagtgtt

SEQ ID NO: 859361 - DNA, 100 bp, Homo sapiens
cccttccccacgcaaccccagatccatttacactttacactgctgcacaatatgtctgatcatgaacaacatgtgtttcagagatgctcatcctctttct

SEQ ID NO: 859362 - DNA, 100 bp, Homo sapiens
ctgactatgaccccaccattgaagactcctacctgaaacatacggagattgacaatcaatgggccatcttggacggtgacgcatccaaagaagacattga

SEQ ID NO: 859363 - DNA, 100 bp, Homo sapiens
cagataccattccccgaagatgtccatttgtgccacagatgggtgatgagaaatgacagactttttcattgaatgatgaggacacagcagccatattatg

SEQ ID NO: 859364 - DNA, 98 bp, Homo sapiens
aaggcggaagaggaagcacagagcttgtttgttacagagatccacagaccagcatggctgccactgctgctgtgagtcccagtgactacctgcagcct

SEQ ID NO: 859365 - DNA, 100 bp, Homo sapiens
ggcgcggaaccatggccgatgggggcgagggcgaagacgagatccagttcctgcgaactaatgccgggtctaagttgtagattttatcaacacaaatttc

SEQ ID NO: 859366 - DNA, 100 bp, Homo sapiens
ggaactggcccaatgcaatgatttttgcagcgaccgtcattaccaccattggacaggcatgttgttgggactggcggccatggagctgaaggtgtgggtg

SEQ ID NO: 859367 - DNA, 100 bp, Homo sapiens
ctcattctgtcggaaatgaaattcacacaactataccttttggggaggttccagttgattgaagaagaggagttgtacgcatgtcagagaggttgcaggc

SEQ ID NO: 859368 - DNA, 100 bp, Homo sapiens
ggcttcagtgcagacgcagtggtggccctggagcagtatgccagcaagccagcgtcccatgctcggtggccccagaaaagtcagtgtgtaggcctcagcc

SEQ ID NO: 859369 - DNA, 98 bp, Homo sapiens
aggaagtggcggcggcggcggcggtttgaagaaaacaggtctgaaacaaggtcttacccccagctgcttctgaacacagtgactgccagatctccaaa

SEQ ID NO: 859370 - DNA, 100 bp, Homo sapiens
gctccagcgcgggtcggagtctgggggttcgcgcccgccgacccgcgccctgctccctctcagcacctgggcggacgtagagacgggggttcaccatgtt

SEQ ID NO: 859371 - DNA, 100 bp, Homo sapiens
cctatctatgtgcctcctggatatgccccacagatacggatataatgcaggagaagctacccaccatgcggtggattctgcggtcaatgttggcgtaact

SEQ ID NO: 859372 - DNA, 100 bp, Homo sapiens
cgtggtctttaccgtttgttggagaaaaaggtatacttgggtgacaggacgagagcctcttacttactatgacatgaatctctctgcccaagaccaccag

SEQ ID NO: 859373 - DNA, 100 bp, Homo sapiens
gattttagaaggtgttcactttttacacactcgtgatgtagttcatcttgatttgaaggacccagccgccgcctccatctctgacggagactgtgacgcc

SEQ ID NO: 859374 - DNA, 98 bp, Homo sapiens
ttgttgagcagagggaaagggataggagaaggatgtggactgcagtgctgcagtgccaggtattgcgcagcgatgcacggccatcaagtaccactttt

SEQ ID NO: 859375 - DNA, 98 bp, Homo sapiens
acttggaaggagcatcagtttgacagcaaaaatgaagatttaaccgagttacttaatggcatggatgaagggctatgtttgaagtaaacatgaaagaa

SEQ ID NO: 859376 - DNA, 98 bp, Homo sapiens
gactttggagagaccatacacaatgtgagaacccagagaagaatgaggcctttctggttccttgcattgactccatggagagtatatcacctgatttc

SEQ ID NO: 859377 - DNA, 100 bp, Homo sapiens
tcttgttattacatccaaagcaggtccgaaaggctcttcggagtgcagaagcctacgaaaatttcctacgctgtcttgttatttttaaccaggaggtgat

SEQ ID NO: 859378 - DNA, 98 bp, Homo sapiens
cggctcaacccaccgctgccgaaatgaagtataaggtgcccttgctcgtgtgaatgaacagaggccagagaattgcagaaacccacctgtaatatgcc

SEQ ID NO: 859379 - DNA, 100 bp, Homo sapiens
tacttgcaatcaagggttcaggtgcaagcagatgctgactcagcctgttccattaagcattagtgccagcagtagttcccaagggctgtctcagccatcc

SEQ ID NO: 859380 - DNA, 100 bp, Homo sapiens
cgtggctgtgaccaacacttctaaacttggattccggatctgggatgtggcggattatgtgataccagctcaggtggctccgctgccggatgggagtgcc

SEQ ID NO: 859381 - DNA, 100 bp, Homo sapiens
agaagctatgcttggcagcagaaggatttggcaacagactttgtttcttggagtccacttccaattccaaggtaagaagtttgatagctgtaggactggg

SEQ ID NO: 859382 - DNA, 100 bp, Homo sapiens
gtcattgcaggaagtggatgagttccacctcattttagagtatcaagcagatcagcttgaacgggtctttttacgacttggccatgctgaaacagatgaa

SEQ ID NO: 859383 - DNA, 100 bp, Homo sapiens
ttcaaactgccctgatgggcagtcaacagctaaaaccttcctcaccgtgtactgtacaggtttgcagattccgccagcagcacagcaagctctacagatg

SEQ ID NO: 859384 - DNA, 124 bp, Homo sapiens
aaaaagattcctttcttggcaactggaggtcaaggcgaatatttaacttatatctgcctgtcagagagcatcagtgatgtcacgtttggagcaggggtcagttacatcgggacaccacggactc

SEQ ID NO: 859385 - DNA, 100 bp, Homo sapiens
ggctttgatgtcctctaccataatatgaaacatggacagatatcaacaaaagaactagcagattttgtaagggaacgacatgcaagaaagcacttcagcc

SEQ ID NO: 859386 - DNA, 100 bp, Homo sapiens
caagcagcaccagcgtgcctttgggtgataagggggactgttgacatttagggatgtggccatagaattctctctggaggagtggcaacacctggacatt

SEQ ID NO: 859387 - DNA, 100 bp, Homo sapiens
ttaatggtgaatggggaagacgttcgtaatgccacccaagaagcggttgccgctttgctaaagcttgacagagccaattcgctattaaaccagactcaac

SEQ ID NO: 859388 - DNA, 100 bp, Homo sapiens
gtgctcatggcacgtgccgcagcgtgggcaccagctacaaatgcctctgtgatccagatgctgcacaacaaacatgtcatggtccgtgtgggaggaggct

SEQ ID NO: 859389 - DNA, 98 bp, Homo sapiens
ggaagccatggatgtaaccacaacctccaccaggattggcaagtttgaggccagtatctcaacatcaaactaactgacatcagtgtcacagaccctga

SEQ ID NO: 859390 - DNA, 100 bp, Homo sapiens
ttgtgtttgtgaaacagagaaagataggcggccatggtccaaccttgaagacttcacagagaatgcagttgtcttgacttcaggtctgtctgttctgttg

SEQ ID NO: 859391 - DNA, 118 bp, Homo sapiens
tcatcgatggcaccccctgtgaccagaacggcacggccatctgtgtgtctgggcagtgcaaggttgctgaaaagccaggagtcaaaatgactgagcgctttgactgccaccattgcaa

SEQ ID NO: 859392 - DNA, 50 bp, Homo sapiens
cattcgtgtctacctcatgcaaacttcagctgactggaaataccggcatg

SEQ ID NO: 859393 - DNA, 100 bp, Homo sapiens
agaaaagggctatgaacgattaaaagaagaactcgcaaaagctcagagggggtccgaggagcaaacagttgtctatgtggtggggaaggcgggccgccag

SEQ ID NO: 859394 - DNA, 100 bp, Homo sapiens
tattactgtaccgttagaagtttttgagaaaagtgaaactgcttctgaaggaactctggctctgtgtaaacacaacacacagactacctggtgaaggcag

SEQ ID NO: 859395 - DNA, 100 bp, Homo sapiens
tgctcaagccgctcttccccagctgcccggtgcccgaggaggcagccaagctcatggcctgccactgcgtgcataacagcgacttgattgcatgtacagt

SEQ ID NO: 859396 - DNA, 98 bp, Homo sapiens
tgggatcggttcctccaggagaagttagcttcagagttctttgtggatggacttgattctgatgagaggcagaagcaacaaattacccacctgcatga

SEQ ID NO: 859397 - DNA, 98 bp, Homo sapiens
agcagctcccctcccactgtggctcccgcatctgcctccctgccccagcccatcctctctaaccaagggtttggtaaaggctccagtgtggtggccta

SEQ ID NO: 859398 - DNA, 100 bp, Homo sapiens
aaatgcggttaaaaaggtgatgggtatctttaagagcagcttattccaagctttgctagatattgatgatgttaagaagttcaaaccgggttacctggaa

SEQ ID NO: 859399 - DNA, 100 bp, Homo sapiens
gctctcaactaactacaattgtattggcagctagagaggaaaattgcctaagaattatgacccaaaagttaccccagatccagaaagatggctgccaatg

SEQ ID NO: 859400 - DNA, 99 bp, Homo sapiens
agagagcaagcagggaaagagagcgccaggtgcttagcagatgaggagactgtccttcctgtttcgcagatgaggaaactgaggcttagagaagtttgg

SEQ ID NO: 859401 - DNA, 50 bp, Homo sapiens
tcctgagcttgttcctccatctttcagcctctacaaccccacgtcagagt

SEQ ID NO: 859402 - DNA, 100 bp, Homo sapiens
ccgagtttatctggagtgtagagtcactggaaaccccactcctcgagtcaggagactcctggatacagaggatgagctcagtgacattcagtcagatgct

SEQ ID NO: 859403 - DNA, 100 bp, Homo sapiens
ttccgagtcctgtactggactgcatcaggccgcgtctcctcaggccgagaccgacccgcccgcccgcggccccgcagcagctccaagaaggaaccaagag

SEQ ID NO: 859404 - DNA, 104 bp, Homo sapiens
acgcctacctgcagagcctggccaagaagatctgctcccattcggccccggaacagcaggcgcgcacgcgggggtgaggacgcttgagcggaagttagaagcaa

SEQ ID NO: 859405 - DNA, 100 bp, Homo sapiens
tattaacaaaagatatacaagaaggagatacattaaatgcaatagcccttcagtactgttgtacggggaaagacgcctcagccttcgccgccaagatgag

SEQ ID NO: 859406 - DNA, 100 bp, Homo sapiens
atcacttcctgaaaacaactgctggtaaaaatgttgtacatcagctctcagtaaccctagaagacttatataatggtgcaacaagaaaactggctctgca

SEQ ID NO: 859407 - DNA, 100 bp, Homo sapiens
ttgtagataagcaactggattttttaactgaagatagtgcctttcagccctaccagcttcctgcagatttcacaaaactgcatcttactgacagtctcca

SEQ ID NO: 859408 - DNA, 98 bp, Homo sapiens
ccgaagcactcgttccgggggtgaagcctcctgcgccggccttgcctcggggggcttgtacatgacagctggaatagcctccagttgaggggcttggt

SEQ ID NO: 859409 - DNA, 100 bp, Homo sapiens
gatcgatgtttcaatattggaagcgctttgatttacagcagctgcaggtgcaagttcttcagtctgactgagacaccagaggattacactatcattgtcg

SEQ ID NO: 859410 - DNA, 99 bp, Homo sapiens
tataattaagagtgtgctgcctaattttcttccatacaatgtcatgctctacagggctgcagagagtacagcaacttgcgaaaaacacaagatacttca

SEQ ID NO: 859411 - DNA, 100 bp, Homo sapiens
ctgctctgcctccggggacaagaaactagagcaaataaccgttttgaaattgcttgcttccggcgtcatggctcaaagggccttcccgaatccttatgct

SEQ ID NO: 859412 - DNA, 99 bp, Homo sapiens
ttcaacaccctcttcatgaacacctgctgcctgggcttcatagcattcgcgtactccgtgaaggcatacttctccgccttcccaccacccggattcata

SEQ ID NO: 859413 - DNA, 98 bp, Homo sapiens
ctcaggtacagacccaggctcttcgagactttgagaaggcacccagtcagtcagagtcagagccagagaaggctccattgtgcagtgtgcccccaccc

SEQ ID NO: 859414 - DNA, 98 bp, Homo sapiens
attagtgagatatggtttgaatatgaaggcacaccactgaaatggtggacaatcagctcattggtaccacgcagcccttcatgctctatgtgactccc

SEQ ID NO: 859415 - DNA, 98 bp, Homo sapiens
gctagagctggagcatttgccgggttggtggctcctgcacatttttacagttctccagtccttctctttcggtggagtattgctcctggaaaatccaa

SEQ ID NO: 859416 - DNA, 100 bp, Homo sapiens
gccgagggctctgggcgccgagatggagccttacagaatgtctgaaggggacagtgtgggagaatccgtccatgggaaaccttcggtggtgtacagattt

SEQ ID NO: 859417 - DNA, 98 bp, Homo sapiens
atcgatcgggggatctaggcgacatggagccattgaagggaacaacacccttgatgcgttatacgcagagcaatgggcgcaggccgtttggcatctct

SEQ ID NO: 859418 - DNA, 98 bp, Homo sapiens
gcctggtgggtccctccctgctgcgggacagcagctgtgcctgagattgtgagggagacccaggacctaattgaacaaggggcactcctgcaagccca

SEQ ID NO: 859419 - DNA, 100 bp, Homo sapiens
gaggccttccccgggcggagagcccctctccagcctcctgacaaggtgatccgggcgggccccgcaggaattttatcccctcaccggcctcacactagta

SEQ ID NO: 859420 - DNA, 98 bp, Homo sapiens
cttgctgataaaatacttatcagtatcttatatgttagcttgacctatgcagatcttattccagtgtgggcgaaatgctgaaaacttcgaccgatttt

SEQ ID NO: 859421 - DNA, 98 bp, Homo sapiens
ccactccgattgaccacgattacgtcaaatgtaaaaaaccccaccagcaggcaacgccggacggtggagcagttctggaggttttatagccacatggt

SEQ ID NO: 859422 - DNA, 100 bp, Homo sapiens
caactcacctcttgggatgaagatgcctgggccagcaagatgaaatcagacatcactgaaggagttgatattccaaagaaacctagattggagaaaccag

SEQ ID NO: 859423 - DNA, 100 bp, Homo sapiens
cagacaccccgtggctctgccagtccgcagagcccggcgacgaagaggcgccaagcccatctttgtgtgcttgcatccaactgtgatgagcctatgtatg

SEQ ID NO: 859424 - DNA, 99 bp, Homo sapiens
ggacagaggatgcacttgtccaatcctcaatcctggttatcctgaatacatgtctaacaattttccttgcaacgttagctgttgtttttcactgtttcc

SEQ ID NO: 859425 - DNA, 98 bp, Homo sapiens
gaaaccactttgcagtcgacatactcggataccagcgctcagcccacctgtgattatggttcttgggtgtctctggggagtccctgggccagaccttc

SEQ ID NO: 859426 - DNA, 100 bp, Homo sapiens
cttcaggaggatgtgcaggaaatgaatgccgtgaggaaaggaagaaatgttggctatttggcgatgagaggtggtgaacagtgaccatactggtatacaa

SEQ ID NO: 859427 - DNA, 100 bp, Homo sapiens
aaccagcctccccctgaagattctgccgctgattgctatcacttctgcagaatccagtggggccacaacacacagtgatcttgttctaagagcaacaaag

SEQ ID NO: 859428 - DNA, 98 bp, Homo sapiens
cttggacagcatacaaatgattctgcatctccaggtgagctacatggaaatttactgtgaaagagtacgagatttgctgaatccaaaaaacaagggta

SEQ ID NO: 859429 - DNA, 98 bp, Homo sapiens
atgccaggagcaggatctgcagaagacgcagggctcaagatgcgctggctccctccctccgaggctacttctcagggctggaagtcccgtcagttctg

SEQ ID NO: 859430 - DNA, 100 bp, Homo sapiens
cgaaccaaccgagtcggatcctgaccctaaaacctaacaggtgatttggcttctgcacagttaggaggagcaccaaaccgatgggaggttttgtcagcca

SEQ ID NO: 859431 - DNA, 100 bp, Homo sapiens
gcaactgtgggactttttgactacaattctcaacaacagcccatttggaagccctttcctaatcaagacagtgactcggtggtactaagtggcacagact

SEQ ID NO: 859432 - DNA, 98 bp, Homo sapiens
agagatacccagacaacaggatcgtctcgtccaagcactggcagcagtttgagccccagctgaccctgtgggatgtgtttggagcgaacaaggaggtg

SEQ ID NO: 859433 - DNA, 100 bp, Homo sapiens
aaatggtttcttgatgctttggaaaaaattaaagcaattgggaacgaggatttcttcaagaagttcttatatgagccattgccagtagaatctcacctgg

SEQ ID NO: 859434 - DNA, 100 bp, Homo sapiens
cgagaggctgcaccggccgccggtcatcgtcctgcagcgcggagcctgcggccaaggatgtggttctgagacagtccctgtccctgatggcccacggagc

SEQ ID NO: 859435 - DNA, 99 bp, Homo sapiens
tgtgcatacaggacgggtccatccatcgcataagagcaaagaatactattgttgccacagggaagccgacggtttagttctgataaatattgatcatgg

SEQ ID NO: 859436 - DNA, 100 bp, Homo sapiens
aaaaaaaattcaatggagatagcaaaggtactctgtacgtgtgtcacctcagatggcgaaccggattgtggattctgcaaggagcatcctcaacaagttc

SEQ ID NO: 859437 - DNA, 100 bp, Homo sapiens
tcagaggcaactaacactgcggcttcctgaggtctccatcatcaccagttccagtagtgaaaaacagaacccaacaaactcaaaatacattacatttacc

SEQ ID NO: 859438 - DNA, 100 bp, Homo sapiens
ctatcacagagcaattaaagttacagtagatggacctcgggaacccagaagttatttggaaatagcggtgcttgcagcgcttgcggacagtcgattcctg

SEQ ID NO: 859439 - DNA, 100 bp, Homo sapiens
ggcaagtggattgatgcttccatcttgtttgtggtttcgtggtactggtttgatctggtgggttacagtcattgaaattatgagactatcattcaaatgg

SEQ ID NO: 859440 - DNA, 100 bp, Homo sapiens
gaatttagatcaccacctcaagaacaggctgaagccgacgtagcttctctgaacagacgcatccagctggttgaggaagagttggatcgtgcccaggagc

SEQ ID NO: 859441 - DNA, 100 bp, Homo sapiens
attgatactcagcagctggaccggcaaattaaagcaattatgaaagaagtcattccttttttgaaggtgactattatatggttaaaaagattttggagga

SEQ ID NO: 859442 - DNA, 100 bp, Homo sapiens
gaagctgctggataattttatcccagggtggctgaatcacggaatggtattactcagcacagaaattcaggagacacagacaagttcttccacgatgtcg

SEQ ID NO: 859443 - DNA, 100 bp, Homo sapiens
taataataattccagcttctacacagcagcaacaactccaggcccagcatttatcacatggacatggtctccccgtacctctgactccacacccttcagg

SEQ ID NO: 859444 - DNA, 100 bp, Homo sapiens
gatgatcaagaccatcgagacacgggatggggaggcctgtgtcacttgtgaaaatgaagattcagctgatggtgcggccacatcctgtggtcaggttctg

SEQ ID NO: 859445 - DNA, 99 bp, Homo sapiens
ccagcactgatgatattataaagcggatgtagctgttttagttgtagatgccagcaggggagagtttgaagctggatttgagactggaggacaaacacg

SEQ ID NO: 859446 - DNA, 122 bp, Homo sapiens
gtcacgtgctctgtttttatcatggttgggagcctgcagagcaatgtgatttgaagatattaaagctagaaattggaactagaaaatcaaaagaattcaaggcatcttaacgtgacagttga

SEQ ID NO: 859447 - DNA, 100 bp, Homo sapiens
acatggagtgttccttccgctagtgatcctttgcaccctgcttggagacggacttgcttccgattccaactccacagagtgaccagagagaggacgtggc

SEQ ID NO: 859448 - DNA, 100 bp, Homo sapiens
gcaaatgctgcaggaactggtgaacgcaggatgcgaccagaaaccaccatcatgggttcgggtcccatagaccccaaagaacttctcaagggcctggaca

SEQ ID NO: 859449 - DNA, 100 bp, Homo sapiens
gttaaaatgcagctatagacaattaataaaagaaatgaattctgccaaagagaaatataaagaagctttagctaaaggtgtttgatcagtatgtaaagac

SEQ ID NO: 859450 - DNA, 99 bp, Homo sapiens
tcatcccgtccagtctctgatcgaaggggagtttccacagtgattgatgctgcctcaggtcacaaggcacttaaagcattgttgaggtcattggtaggt

SEQ ID NO: 859451 - DNA, 100 bp, Homo sapiens
cctgtatgaactttgacggtggatttggttgcagaccaggttctgaatcccatgctgggcagcaaagtgatttcccaaaagagacctttgaaggccctaa

SEQ ID NO: 859452 - DNA, 119 bp, Homo sapiens
gtgaagtagatgataaagatgatgatatccttctcaaccttgtgggatgtgaaaactctgttactgaagattttaagtaaccaagaggagtggtttaaggcggagcttgggagccagga

SEQ ID NO: 859453 - DNA, 99 bp, Homo sapiens
cctcgggaagagatgcgaggatgacaagctggaggaaagcaggaatgttcagaggcaaatgaagattctgcagaataagcaagctcagattgtcaaaga

SEQ ID NO: 859454 - DNA, 100 bp, Homo sapiens
gacctcaccaagaatttggcatttcaagcattatgccagtacatacaggcttctaaagccagggatggtgccagccctttcatttcaagtacgactgaag

SEQ ID NO: 859455 - DNA, 100 bp, Homo sapiens
ctgcgtgttgtccacccaagatggagttcctcctggggaacccgttcagcacaccagtggggcagtgcctcgataccatgtttgtgtggaagtgccccgt

SEQ ID NO: 859456 - DNA, 99 bp, Homo sapiens
tcaacgcctccaaaaagccaaactacagcgaactggacacacatacaggaatcctacggcccctgaatattttggcatcttcaacctaccgcaactgtg

SEQ ID NO: 859457 - DNA, 100 bp, Homo sapiens
acaggagcatcccaggaaggggttcccagaagtcagaatccaagatggtgctgtaaactgcaaaccataatcctgtcttaatactgcaaacaaatcatag

SEQ ID NO: 859458 - DNA, 51 bp, Homo sapiens
attgtgatgaaagcacatggtacagggtgcaaatagctatgggcaacttgg

SEQ ID NO: 859459 - DNA, 100 bp, Homo sapiens
tctagggagccgggttgatttttaaagcttcaaaatcctaagactcagcactgttgcggggaaagtggagaatgaggacatgaataaagaccagatcttg

SEQ ID NO: 859460 - DNA, 98 bp, Homo sapiens
cagtggtctgtatgatgaagcaatacggcatttttcaacaatgcttcagtctcaaatatctatcagtgtagaagagtgggaagacaccaaagactcca

SEQ ID NO: 859461 - DNA, 100 bp, Homo sapiens
tgttctggaagggctcattgtacagtcaaggcggcaggtgtactggcactccagtgctcacattcttggggaggccatggagctttactatggaggccac

SEQ ID NO: 859462 - DNA, 100 bp, Homo sapiens
cggaggacaattcaccatagttttctttaagatcagtcgcatcgaatacattcattcaaagaacttcatccaccgggatgtgaagccagacaacttcctc

SEQ ID NO: 859463 - DNA, 99 bp, Homo sapiens
gaaaatcgtcttatagttgagaatttatcctcaagagtcagctggcagtggcagtgaccctggacccagacacagcacatcccaaactcatcctttctg

SEQ ID NO: 859464 - DNA, 98 bp, Homo sapiens
ccggagaccccgaaaacggaagcgcagggagaaggaagaggtgtttgaaaagttccgagactactgtgctatctgcttaagatgggagtggcctgggt

SEQ ID NO: 859465 - DNA, 98 bp, Homo sapiens
gaagacgagatccagttcctgcgaactagccagccccagtgcctgctgagccgtttgacaacactacctacaagaacctgcagcatcatgactacagc

SEQ ID NO: 859466 - DNA, 100 bp, Homo sapiens
atgtccctgatccctggagcgacgacggccgctgcctaagctggaaagtatctctgcattagccagattggacatatgtaaagggacatcagtatatctg

SEQ ID NO: 859467 - DNA, 100 bp, Homo sapiens
gtctcaccgttacccggggcaacagctgagccgtctgggaagggatgcatcttggccatcaacctcatcgtgcagcacatccaggacatcctgaatggag

SEQ ID NO: 859468 - DNA, 100 bp, Homo sapiens
gctggccgtggctctcttggcagccttcctgatttctgcagctctgtgtgaaggcaaaacctatgtgggtctaaaaattgttcaggccctcctaaccaac

SEQ ID NO: 859469 - DNA, 98 bp, Homo sapiens
ctctggaagcgattaatgataaaatttcatggagaagaaggccttgactacggaggggttgccagtttggtgccctggttgtcagatgttggaaagca

SEQ ID NO: 859470 - DNA, 100 bp, Homo sapiens
catttttcatggggagaaactcagaagtggagagaacgtctgaggctacatagccagtacaaaataaggaagccattaaggtcactccactgccatgtat

SEQ ID NO: 859471 - DNA, 100 bp, Homo sapiens
ggagaccccgaaaacggaagcgcagggagaaggaagaggtgtttgaaaaggtggatctcgagccagaggggaaagtatttgtggtaataacccttaccgg

SEQ ID NO: 859472 - DNA, 100 bp, Homo sapiens
cctcatcccactctggaagctgagccggcggcgggaggagctagggctggagcctctccagcctcccgcgaagtcaggtagcattggtgctgcagatagt

SEQ ID NO: 859473 - DNA, 98 bp, Homo sapiens
cgtcccacagcctgtgccggcacaaccggatcaagcacaaaggcatcaggaaagtgtacgcctgctcacttcacagagaatgcagttgtcttgacttc

SEQ ID NO: 859474 - DNA, 98 bp, Homo sapiens
ttagatcttgggtttatctatgctttaacagaccttatgacagaagctgaggtgactgaaaatacagagcgatgaggcttcctctttgaagatcacag

SEQ ID NO: 859475 - DNA, 51 bp, Homo sapiens
agtcactgtcctggtacaaggatgaggagaatcctcactatggatgggctc

SEQ ID NO: 859476 - DNA, 100 bp, Homo sapiens
cttcactgtttaacaaagatgatgagcagcatctcctggaaagatgtaaatctcccaagtccaaaggtgatctcagtgaaaaccaaattcaggcaatccc

SEQ ID NO: 859477 - DNA, 99 bp, Homo sapiens
gaggcaaaacttcggacatagaggccaaccaacctttggagtcccttaagctcctaggatttttagatgttgaaaatactccctgcgcccggcattcaa

SEQ ID NO: 859478 - DNA, 100 bp, Homo sapiens
gggtaacccagatcgctactaccccgcagttcccggacatgatcctctccgcctctcgagatcttcctgaaaaaggccgactaagctgcgggcttctgag

SEQ ID NO: 859479 - DNA, 98 bp, Homo sapiens
gaagccggacaggagtgaggagaaggccatgcgtgagcgggaggagaggtggcccgtaagctggtcatcattgagagcgacctggaacgtgcagagga

SEQ ID NO: 859480 - DNA, 100 bp, Homo sapiens
agtagctgggactacaagcgcccgccaccacgcccggctaatttgcaatacggaaattttaataggaaggaagacttcaagaagtcattgaaacccttct

SEQ ID NO: 859481 - DNA, 99 bp, Homo sapiens
ctctgcgacggaaacaatcgccagagatgccggggctagccttccccaccagtggaagatagatgataagcctgtaaaaattgacaagtgggatggatc

SEQ ID NO: 859482 - DNA, 98 bp, Homo sapiens
aggcctggattggaaatggcgagatcaggatggcagcccacagggagaaggcactgtcacaggagaactacacaatgaaagtgaagtggaagattctt

SEQ ID NO: 859483 - DNA, 98 bp, Homo sapiens
ttgcagactttggttggtggaggctgtggcaatggaacaggcttgagaaacagttatttcttccactgacatcttgaacccctcagtcatccatgagg

SEQ ID NO: 859484 - DNA, 99 bp, Homo sapiens
ttctggagcgttatttcaaaggccacaaagctgcgatcacctccttggacctcagccccaacggcaagcaacttgggttttggccaaattgggcgaggg

SEQ ID NO: 859485 - DNA, 98 bp, Homo sapiens
ggacacagcaatatctctgggctttcacagggcatacataatcttgctgctatgcttcgaagctgtagtctgaatcaacctaagttttaaacagaagg

SEQ ID NO: 859486 - DNA, 100 bp, Homo sapiens
ctgcagaaaatcaacctatcctccttcaggaccaacctgccttcctatttcaaggaaagacgccaaggtaattttgacccagaggagcaatgatgtagcc

SEQ ID NO: 859487 - DNA, 100 bp, Homo sapiens
atggcgacagattatgactgctggaaggagcacgaggaagcagataaaagaatcagagtgtctcaacccttgacaagaggaccaagtgcctttattccag

SEQ ID NO: 859488 - DNA, 100 bp, Homo sapiens
cagctgcctgacaacaccgatcacagaccaacaagaccaggagctgcattatctattctagacaaatttcttgaagaatcctccaaactgcagtctgatt

SEQ ID NO: 859489 - DNA, 100 bp, Homo sapiens
atcaagacttttttgaagccatccgcagaaggggagacacattttatgttgtgtcatttcgaagggtgacttaagagattaaaattaatttggttgctgt

SEQ ID NO: 859490 - DNA, 100 bp, Homo sapiens
cgcagggcaaaaggcaactgcagctttcagcaacgttggaacggccatcagcaagaagttcggagacatgaggaagattgttgatcgaatcgacaatgat

SEQ ID NO: 859491 - DNA, 100 bp, Homo sapiens
cgcttttttccttcctaggagaaatcgaggagctgcggctctaccccccggagaaacctgtgatctggggaagataaaacctgaggccagacgatacttg

SEQ ID NO: 859492 - DNA, 145 bp, Homo sapiens
tcgaattcaaccaatcatagcagtggctgatgaagggtggcacattttacagaataagtcagatgactttctgtgtcctgaatctgtgcctccttcccttcttaaagtagtgatgaaacccatagcaactgttggagaaagctac

SEQ ID NO: 859493 - DNA, 100 bp, Homo sapiens
tgctgcctctggtggggaagtggaagctcaaatcccagccttctatatggacacaagtcatttattcaatacccaacatgcacgattggctccgccatcc

SEQ ID NO: 859494 - DNA, 100 bp, Homo sapiens
tccagctcatcgctcgcatcgctgccgccaacgggtttcagtcattcagtcagtaccgctgtaagactgccaagaagtcagaggaggagattgactttct

SEQ ID NO: 859495 - DNA, 100 bp, Homo sapiens
gtccagggcttcgagtcggccaccttcctaggctacttcaagtctggcctgaagtacaagggtgtggtaactgcagccacaagtctgatcaccactttag

SEQ ID NO: 859496 - DNA, 100 bp, Homo sapiens
taaagaggaggtggaaatgaattgggacatggtacaggtccttaaaattctagtcagggcagtgattgatgggatgactgatcgaagtggagatgttgca

SEQ ID NO: 859497 - DNA, 100 bp, Homo sapiens
tatgtggaggagatgtactgtgcttggctggaaaaccccaaaagtgtacataagcaattctgtggtgttcttggtcacacatttatggagtttctgaagg

SEQ ID NO: 859498 - DNA, 100 bp, Homo sapiens
tgacacaactgtccgcctcagcccagagcgcccatcagatgaggactccaagagcacagagtccatcttcctgacccagaaaaggtactttgtggactat

SEQ ID NO: 859499 - DNA, 100 bp, Homo sapiens
cccggaaccgcgattcggcgtgtcaggaagaaggtagataatgactataatgcccttcgagaaagactcagcaccttgcctgataaattgtcttataata

SEQ ID NO: 859500 - DNA, 100 bp, Homo sapiens
gaagacttatgaacgccttgttgcccagttccccagttctggcagattctggaaactgtacattgaagcagaggtatggcctcacaagtcttggtctacc

SEQ ID NO: 859501 - DNA, 100 bp, Homo sapiens
cttccatcactgggacagaaaggagtaaagccaatcccagctgaaggaatcaagtcaaatccttccaagcggcatagagaccgacttaatacagagttgg

SEQ ID NO: 859502 - DNA, 99 bp, Homo sapiens
agaagttggagcgggagactcaagccttggaaaatgatcttagggaagaaaacagctgtaccgatgggagatgtaccaatggatggtatctctgttgct

SEQ ID NO: 859503 - DNA, 98 bp, Homo sapiens
tattatacagtgcgacagctagaattggaaaaccttacagttccatgcctctgcagcggtgcctcatgtttgctgtgtagttgctgtcctaacagtaa

SEQ ID NO: 859504 - DNA, 98 bp, Homo sapiens
tcgaacgatgttggactcatagtcactgccagaaagtcttgtctcaagaagaaaacgaactgggaaaatttcttcgatcccaaggtttccaagataaa

SEQ ID NO: 859505 - DNA, 98 bp, Homo sapiens
tggaagcaccagatcaagatcatgggttgccacaccatttggaggttttgaaaaagcatcaagaatggttaaatttaaagttccagattttgagctac

SEQ ID NO: 859506 - DNA, 98 bp, Homo sapiens
ttgatgaaggttttgggagcctgcaagttgttgctccgcttgttggactgctgctgcaaaacttttctatgtgtcgtggaggccgaatgtttgcacca

SEQ ID NO: 859507 - DNA, 100 bp, Homo sapiens
tcaaactcctctcctccgggcttcggctctgcgcctctgcccgcggatctggggcaacctggtacaagtcacagttgcagattatatttctagagctgag

SEQ ID NO: 859508 - DNA, 100 bp, Homo sapiens
cgctcctaaagcaaacgccaccattgaagtgaaagatgggacgcctatgcctgacagctacccaacaaccccatcttcaactgatgcagctacatctgag

SEQ ID NO: 859509 - DNA, 98 bp, Homo sapiens
ggagaagccgcactccactctgactcccaggacgggcaccagcccaataggggcacaaaacgtccccgggatgatgaagaggaggagcagaagatgcg

SEQ ID NO: 859510 - DNA, 100 bp, Homo sapiens
tccgctcgattggttctactgtgggtctggactgatctccatgtcctgttgtggggcttttacagcctttggaattaaacaaccaccatgtcgagcaaaa

SEQ ID NO: 859511 - DNA, 98 bp, Homo sapiens
ccagctggtagaaattgcagccagggatattgagaaacttctgagcaacagatctaaagccctggtgattcgaaatcagagcaaagcctctgggtctg

SEQ ID NO: 859512 - DNA, 100 bp, Homo sapiens
ccaggttatggattcctttcagaaaacaaagaatttgccagatgtttgcaagttgtcctcgaagaaggtacaattgcttttaaaaattgggttaaaacag

SEQ ID NO: 859513 - DNA, 98 bp, Homo sapiens
gggatcggccaggaactgggtgctggtgcctatagcatgagcacgcactcctggctttaaagtttatacttgcatttgccatacctgataagccacgg

SEQ ID NO: 859514 - DNA, 100 bp, Homo sapiens
tgccttcctcaatgagttgcccaaaacccagcacgacgtcaattccttcgtggtagacataagcgcccagacagttcagaattttcacagctgtattcag

SEQ ID NO: 859515 - DNA, 98 bp, Homo sapiens
atgtgcgagaactgcgcagacctggtggaggtgttaaatgaaaatctgctgatttgggtcctactttaatgacaagacctggacaaccagcacttacc

SEQ ID NO: 859516 - DNA, 99 bp, Homo sapiens
caagcgcggccagacctgcgtggtgcactacaccgagataattgacgaccttgccaacctagtggagaacacagatgaaaaacttcgcaatgaaaccag

SEQ ID NO: 859517 - DNA, 100 bp, Homo sapiens
agagacccgttcagagtcctacagtggcaggaaccagtgacctttgaagatgtaacactgggttttaccccggaagagtggggactgctggacctcaaac

SEQ ID NO: 859518 - DNA, 99 bp, Homo sapiens
gcactacaagggtcctgaagtcagttgttgcatcaaatacttcatatttggcttcaatgtcatattttggtaagactttgaccccgacgcaggcttcag

SEQ ID NO: 859519 - DNA, 98 bp, Homo sapiens
ctcactccacagcagttaatagatctccggcataagctcaatcttcggaatgaagacaatgagggtactgtaaaagaattgttgcaaagaggagacaa

SEQ ID NO: 859520 - DNA, 100 bp, Homo sapiens
gatgacactattgatgatgagaaattaaggaaagaattttctccttttggatcaattaccagtgctaaggtaatgggtaaagtgccaaccatatccatca

SEQ ID NO: 859521 - DNA, 100 bp, Homo sapiens
gcggcggcggtggacgagtacctggagtaccggagggccatgtttatgagtggactaagtgaaagcaaacaaacccatgtacacctgaggaatgtcgatg

SEQ ID NO: 859522 - DNA, 98 bp, Homo sapiens
caggtcaggaagcagaatattccttatatggtatgtgacgcattcccagactcttcagccaactgagcatcagcttcttcacagcaattgggtcctga

SEQ ID NO: 859523 - DNA, 99 bp, Homo sapiens
ttaggttctgctggtcacacaaccctcgggatcacacttatgattgatttgaaaacaatttgtagccaacttcagtatgaatcaaagcattgttttaaa

SEQ ID NO: 859524 - DNA, 100 bp, Homo sapiens
ttaaatgggacccttcgggaagacgataacaggaaaacaagttgaagtttgctgcctacctagagagggaatacaaagtccacatcaaccccaactcact

SEQ ID NO: 859525 - DNA, 100 bp, Homo sapiens
tgaattctgcggctaacaacgtgtatcagtatggacgagaatggataactcacaagtcttactactttgaccgcgatgatgtggctttgaagaactttgc

SEQ ID NO: 859526 - DNA, 99 bp, Homo sapiens
gtatttggagctccagttccaaaacagtgtctgatcttaggggaacaaatagagtactgatgaaatctccatctccagcattacacccacctcagaagt

SEQ ID NO: 859527 - DNA, 98 bp, Homo sapiens
tctacaagaaaatccacaagaacgcactttcctcccagtttgatgaaggccggaacaactttgaaggggaggtcaccaaggagaacctgctggacttt

SEQ ID NO: 859528 - DNA, 100 bp, Homo sapiens
gctgcctgcaccatgtccgccagagcatcctccaggacaaatagcaaggaaatacagttcctgctccaccattttcctagatgatagcacagtcagtcaa

SEQ ID NO: 859529 - DNA, 100 bp, Homo sapiens
cctgcattggacccagctattgctgcagcatttgccaaggagacatccctcttagaaatattctacatcattggagctgtggtatttgtggtcatcatcc

SEQ ID NO: 859530 - DNA, 109 bp, Homo sapiens
tagcagcttagatgccatttctcctgttcaggtgcagattcactttataggaacagcttcagcttcagtgatgaaaaactgaattctccaacagactctaccccagctc

SEQ ID NO: 859531 - DNA, 98 bp, Homo sapiens
ctgtgacgaaggtgctaccatcgtgagagtaaggtcttaaagaaagtgcagaagagatggtcaaaaacaaattggaaggaaaggataaactgacccct

SEQ ID NO: 859532 - DNA, 100 bp, Homo sapiens
agcaatccagacctctctggagacgagaatacaatgtatttcaaaggcattgaagcagggaaggttccctattttcctcatgcagatactatcatctatt

SEQ ID NO: 859533 - DNA, 100 bp, Homo sapiens
caatgccaagtccagagcggttagataaggtttcatcagagcaagaaaaagaacaagagactttaataagccagaaaagcatccctgagcctctcccagc

SEQ ID NO: 859534 - DNA, 100 bp, Homo sapiens
ccggaagcccccacgggctctacctgaccctgcagatatggacatttctggaattacagagccccctctacattgagcacaagacagtgacgaatccaca

SEQ ID NO: 859535 - DNA, 98 bp, Homo sapiens
gactctttctgttcaggccagaccctctgggagcttctcagccattttccacagatcaggcatccgtgtcattctggaccttactcccaactaccggg

SEQ ID NO: 859536 - DNA, 100 bp, Homo sapiens
ctgcaatgtcaccttgaactctgcacagcaagcccaggctcattatcagatgtggtggtacagtgggagctattctgacatgtccactggaagttgtaaa

SEQ ID NO: 859537 - DNA, 101 bp, Homo sapiens
aataagatatccgagctgaagaatggctcattttctgggttaagtctccttgaaagattggaagctatgcgaaattatttaaaagagcgaggggatcaaac

SEQ ID NO: 859538 - DNA, 51 bp, Homo sapiens
cctgtgcacctctctggctgtgtccagtgaagcccaagagccaaaggaatc

SEQ ID NO: 859539 - DNA, 100 bp, Homo sapiens
aaggagagacacttgtgaacattcaagtgaagcaaaagcctttcatgattattctaagccagaaatccagtacgcaccacatttggagcaggagcctaca

SEQ ID NO: 859540 - DNA, 98 bp, Homo sapiens
ttcggttaatggctcaggattaccctgaagtactttatcaccaggaaagaccacagcaagattctttcattcgtctcctcctagcctgggggaccagg

SEQ ID NO: 859541 - DNA, 100 bp, Homo sapiens
agatttcggaaaattaactataaaggagagcgccaaaccattactgatgatgtggaggttaacagctatctttctattctacctttgtcacccaggcggg

SEQ ID NO: 859542 - DNA, 98 bp, Homo sapiens
ttcttcttcgagtatttgtagaagggggtgcacagagcgttttgtatgtagtccagatgaagttatggataccatagatgaaggaaaatccaacagac

SEQ ID NO: 859543 - DNA, 98 bp, Homo sapiens
ccatccataaaatactcattcccctctcagtgaataccagggcctggtgaagcacacaggaggctgccactgtggagcagttcgttttgaagtttggg

SEQ ID NO: 859544 - DNA, 100 bp, Homo sapiens
agtggcgtcctggagccctcctcaggtgagctggagctgcccggctcggcagcgggaagcaagagtgagccatggagctacgtgtggggaacaagtaccg

SEQ ID NO: 859545 - DNA, 98 bp, Homo sapiens
agtccgatggggccgcagcggcggctgtcccctgccggggccgccctactctggggcttcctgctccagctgcaagagcctcctgatctagcagccaa

SEQ ID NO: 859546 - DNA, 98 bp, Homo sapiens
agacatgacacttacaagatggacagggatgataattgggcctccaagagctgaagccgacgtagcttctctgaacagacgcatccagctggttgagg

SEQ ID NO: 859547 - DNA, 100 bp, Homo sapiens
catttcaaagaatatagatggttttgaaaagttcatgctgtcccttcattgaattttaggatggcgtaggggtagatgagaagctatctttacgacgggt

SEQ ID NO: 859548 - DNA, 98 bp, Homo sapiens
cagctagaaaaccacgaaccggaggaggaagaggaagaggagatggagacagaagagaaagaagctgggggctcagatggcccaatggaggagtccaa

SEQ ID NO: 859549 - DNA, 99 bp, Homo sapiens
gatagggagacaggagttcctgctggcgggccccggagggctggtgaaaaccttgttcaatccagcccctgccattgctgacctggatccccagttcta

SEQ ID NO: 859550 - DNA, 98 bp, Homo sapiens
ggggacaagtcggcgccccagagcggacgagacacagataatgtacaagtggatagagcccaaaatctgccgggaggatctcacagatgctattagat

SEQ ID NO: 859551 - DNA, 100 bp, Homo sapiens
cgcctcttcctttttcgacgcctccgccgccgcctgaggaggcgagctagccgggagttacaccgccaccgccagatgttctcagtgcagctgagtcttg

SEQ ID NO: 859552 - DNA, 98 bp, Homo sapiens
acttgtataaaataggctgagatatagtgactgtaagctgtgatctcagtatacaaagtctccagagaatacagagggcaaagatggatccaaagtaa

SEQ ID NO: 859553 - DNA, 99 bp, Homo sapiens
ggcacagaaaccgctgcgcctattgtggtggtgccatgcagcaagaatcagagagatgcagagttagagccagaaggcctgacatggcactttatgtac

SEQ ID NO: 859554 - DNA, 99 bp, Homo sapiens
tcctcgaagtggagctgggcctgcctgactcacccattcatcagatggagatgggtgtcgtgagctggtggtgggctacacagaccgtgtggtgcgagc

SEQ ID NO: 859555 - DNA, 100 bp, Homo sapiens
ccgggacatgcatcgtcccctggactctctcaagacttaaccaccaccatgtcgagcaaaagaacaaagaccaagaccaagaagcgccctcagcgtgcaa

SEQ ID NO: 859556 - DNA, 109 bp, Homo sapiens
cagagaaaggaaatactgtgttagaatttttagtaggactctttaaaccttttgtggaaagctatcaggtgagccaatggtagcagcagatgcaggagtttgggataat

SEQ ID NO: 859557 - DNA, 100 bp, Homo sapiens
ccagatgacatctctcatgaccatcatggaggattattttgcttttcggaacttcctttacctacgccttgatggtaaacgccctgcagaagatatggaa

SEQ ID NO: 859558 - DNA, 100 bp, Homo sapiens
agaagaatggatcagcttggcctatagaccattccttgatgcttctagcgatcatagaagccattgagatcccgcagtttatcggccgcagttacctgac

SEQ ID NO: 859559 - DNA, 100 bp, Homo sapiens
gagcctacaactgcgctatcttccctggatttttcttcaccttttccttactcatgagccagttgtcgagatgtccacagaaggaggatttggtggtact

SEQ ID NO: 859560 - DNA, 98 bp, Homo sapiens
tcaatgaaatgcagaaaaaagatcacaagcaactctggatgggattgcaaaatggctggctacagcaaacatcattcaagatgtccagcaaagggagc

SEQ ID NO: 859561 - DNA, 99 bp, Homo sapiens
ctcagtgacctgttttggaccgccagagtcctggtggaggacgatgagatcatgcagggattcatcagggctttcaggcccctgcccaggcacctatgg

SEQ ID NO: 859562 - DNA, 100 bp, Homo sapiens
cacagttcaaggcagtgctaaagccacctaggtgatcagcccatgacctaaacctccagacaaaataaaacggaaaatttgctagaatcaagaatgatgg

SEQ ID NO: 859563 - DNA, 100 bp, Homo sapiens
tggggttaattttccactctcctttccaaacctttgcagctgccctttgttaaaggttcagcaaaaggatgtcactgaaattgatattttagttaagaac

SEQ ID NO: 859564 - DNA, 100 bp, Homo sapiens
actcctggaatgccacaaatgcaaatacttgtgcactgggagaggataaaagaatcagagtgtctcaacccttgacaagaggaccaagtgcctttattcc

SEQ ID NO: 859565 - DNA, 100 bp, Homo sapiens
gtgaagaatcagcatcatgtttggcagctgagtattggagccaggagcctgccatgagattgaagaattagggtctgaaggaaaagtagaagaagcccag

SEQ ID NO: 859566 - DNA, 98 bp, Homo sapiens
agcgacctccgccgcagagtcccaccgccacagaataccctctaccatctgctttggtcagggtgccgctcgaggatttaaaagcaacaagaagaaaa

SEQ ID NO: 859567 - DNA, 100 bp, Homo sapiens
tagcaatttaaagatcctctccaagttggtagctggcagtgttgtgatggcttttgaagaagtatgcccggacagaatagatctgattcataaaaattac

SEQ ID NO: 859568 - DNA, 99 bp, Homo sapiens
tgagggccgagcaacagtgtagtggcgtattccacatagcaaacagttcacagaagaaaagcttggccaggctgagaagacagaattggatgctcactt

SEQ ID NO: 859569 - DNA, 99 bp, Homo sapiens
gtacctcttcgacaacagcgtcatcttgagcggaggaaaggagcagtggcttccggttgaagccaccaacgctgatccacggccaagcccccagcgcag

SEQ ID NO: 859570 - DNA, 100 bp, Homo sapiens
cctatgtgggcgccgtccctcaccgcggcatcaagcaggtccggacccactggctgctggagcttgtcaccaccaggattatatctgtccaagatgcgag

SEQ ID NO: 859571 - DNA, 100 bp, Homo sapiens
cccgaccccgacccggcccggtcaggccccatactcagggaagcagagactttcaaggaacaaggaaatgcatactatgccaagaaagattacaatgaag

SEQ ID NO: 859572 - DNA, 100 bp, Homo sapiens
gaaagtgaaactcgatcctccggatattacctgtggagaccctcctgagacgttctgtgcaatgtgcctccacttctcattcagagaattcagtgcatac

SEQ ID NO: 859573 - DNA, 100 bp, Homo sapiens
actgttgcgggccccgggacctgggctgggaacccgcggtggagcgggacacgaacgtggagcttactccacgggaacagcctctagataatctgagttg

SEQ ID NO: 859574 - DNA, 98 bp, Homo sapiens
gcaatcctaccatgtcagccttcccagtagctggaactacaggacactgcccatctctaagataagaacctggaaaggggactctgttggccattgga

SEQ ID NO: 859575 - DNA, 100 bp, Homo sapiens
ggttcgagtgttgcagagcctgcggggcaagatctgggaatcccggaggcaagacacttgaggagaggcgctccagcctggacgctgagattgactcctt

SEQ ID NO: 859576 - DNA, 100 bp, Homo sapiens
tcacagtgaacatactcacaatgggctactggccaacatacacgcccatggaagtgcacttaaccccagaaatttgtgaagctgggaatcatttcatcaa

SEQ ID NO: 859577 - DNA, 99 bp, Homo sapiens
ctaaaggcagttccttcccaatggcaactatgtttggatgttggatctacactttctcaagcactgtgatcttcaaatagtgatcagcagctggactgt

SEQ ID NO: 859578 - DNA, 118 bp, Homo sapiens
ctctcagaaacccccgatagcagcaacatggcagagaagaaggtggcatctgagctcccccaggatgtgccaggactggttgccataaaggaagcccacgacatagagaccaggctta

SEQ ID NO: 859579 - DNA, 98 bp, Homo sapiens
ggatgatcagaaggggacccccagcccttggaggagagacggcagcctcagctcttggagtttgacaaggagttgtctgtctttaaggacagactgta

SEQ ID NO: 859580 - DNA, 100 bp, Homo sapiens
ccgtgctgctgttgatgctggctttgttcccaatgacatgcaagttggacagacgggaaaaatagtagcaccagccaactacacagacccccagagcaaa

SEQ ID NO: 859581 - DNA, 98 bp, Homo sapiens
tcagatatgcaagtctgtgaattggtggagagattcaaccagttagcgtgaaagttggagataaagttcttctcccagaatatggaggcaccaaagta

SEQ ID NO: 859582 - DNA, 101 bp, Homo sapiens
aaagaagataattacaagcggacacgggaatatatccgaagcctgaagatggttccaagtattccctatctagcacctgtggaatcctctcaagaggaaca

SEQ ID NO: 859583 - DNA, 98 bp, Homo sapiens
gggtctcggagtgggagacgtggagtgcagattgtaaaccatggctgtgtggatacaagctcagcagctccaaggagaagcccttcatcagatgcaag

SEQ ID NO: 859584 - DNA, 99 bp, Homo sapiens
gaagaagtcacaagacaagggtcctaaaacaggatcagtaaagaaggaaaaagcagtaaagccagaggaaggtgctggaaagtccctggttggtgtgac

SEQ ID NO: 859585 - DNA, 100 bp, Homo sapiens
atatcttggctgctgtacatgacgtgcttaatgaaagtcaaggatgctatctaaatgggccttttaattcaaatctactgactatcccgaagcaaaggtc

SEQ ID NO: 859586 - DNA, 100 bp, Homo sapiens
ggtgtcagaggcaatcgtcagcatccgaagaatccagcacatggattaattgatgtatgttgagtttatggagctgccttttggtggcttgctttatctg

SEQ ID NO: 859587 - DNA, 109 bp, Homo sapiens
cccagcccgggtccccgcgttcacagccccagcgcagaatcctgttacacctgggatttaggcactttcaatctgaaaaaatacatatcctttcagcactctggacgga

SEQ ID NO: 859588 - DNA, 101 bp, Homo sapiens
cggggcgagcctggaggattgtcactccaacctcttttcgctggccgcacttggtgagagtcttcacggaccacagtgttgcacgaggtgattgtgtttgc

SEQ ID NO: 859589 - DNA, 104 bp, Homo sapiens
cgtgagggaggcccagggcctcatggcagggacctgtgcacaccgatatgaggcaaggcagcgagtggaccagatcctggagacgcgggatatgattggtcgct

SEQ ID NO: 859590 - DNA, 100 bp, Homo sapiens
cccgaatggacaatctttccttctgtcaacggcaggggcaggcctagtttgactctgacagtcctcccactaaggacttcgagtaagaaggtgatttaca

SEQ ID NO: 859591 - DNA, 100 bp, Homo sapiens
cacaattcgaatgagacttgttaatcgattttacagtatcctgtggagcacccagacaaattcctgaagtttggcatgacaccttccaagggagttctgt

SEQ ID NO: 859592 - DNA, 124 bp, Homo sapiens
gagcattgcagcagccactggctttgtcaaaaaggaccagttgggcaaggtggaatacatgttggtatcttttgatcatgaaaataaaaaagtccggttggtcctgtctggggagaaagttctt

SEQ ID NO: 859593 - DNA, 100 bp, Homo sapiens
gctcggacgaagagaagcagctgcagctcattaccagtctgaaggagcaagcccatcatcttcgtttcggacagagcaaacagcaacaaggagctgggtg

SEQ ID NO: 859594 - DNA, 100 bp, Homo sapiens
accgattttagacttgagtgaaagtggtctgtgccgtttggaggaggtctttagaatccccagccttcaaaaaataatgttgagtttccatgaagaacag

SEQ ID NO: 859595 - DNA, 98 bp, Homo sapiens
acactccatttttgtttcctttatatggccaaggagaactcccccagtgtttctgcaggagtttcataatagaagagcagagtttcttactatgtgaa

SEQ ID NO: 859596 - DNA, 100 bp, Homo sapiens
tgtgaggacgcggcagcccgtggagtcggctgagggaaaagcgaggcaaggcaggcggaatgttatggaacagttcaatcctgggctgcgaaatttaata

SEQ ID NO: 859597 - DNA, 98 bp, Homo sapiens
ttgtcttctgattatgtggagattcactacgaaaatgggaaaccacagtactctaaggctgaagccgacgtagcttctctgaacagacgcatccagct

SEQ ID NO: 859598 - DNA, 100 bp, Homo sapiens
tcctcacgtctacctgcctatacacctttatggacaactagtacaccataaaacaggctgccatttgttggaagtacagatgcggaaaacgccatgcggt

SEQ ID NO: 859599 - DNA, 98 bp, Homo sapiens
aactccataaaccttggctcccctgagcagatgcccattccaaagaactactggttcagattttagctcttcccaagttgtgaaaatagtgaaggatg

SEQ ID NO: 859600 - DNA, 98 bp, Homo sapiens
ttcctgctcgacctgcggcagtacttggaacccttaggagaaatcttgagagtggacagcaattgtgaagatcgccagagagttctgtgtttcatcac

SEQ ID NO: 859601 - DNA, 100 bp, Homo sapiens
ctcctctccgtctccctggaccgctgtgtaggcacctgagttaacggacgctaagcggggtaggggaagtcggtggtggggagcggcagctggcagagag

SEQ ID NO: 859602 - DNA, 100 bp, Homo sapiens
ccgaccccaaaagagtattcttggatcttgcacaggaaggaattaaaggtcgtgataaactgtgccattcctaaagggttgaagtacaatcaagctacac

SEQ ID NO: 859603 - DNA, 100 bp, Homo sapiens
tgattcagatgtggaggagaatatatcctctaaatctgatactgttaccaatgctgtggtcacagtgccagcttactttaatgactctcagcgtcaggct

SEQ ID NO: 859604 - DNA, 100 bp, Homo sapiens
ggcggcgggaacgattgggctgagcagaggacgacatgttgcttttcgtggaggttggggacattgtcatggttaaggaggacgagacctttccctgcga

SEQ ID NO: 859605 - DNA, 99 bp, Homo sapiens
ggaggcgttcagctgcttcaagatgaaggacacagcattgttggttttgccatgtactattttacctatgacccgtggattggcaagttattgtatctt

SEQ ID NO: 859606 - DNA, 99 bp, Homo sapiens
ttcgagatcaccttcgagtgcatcgaggacctgtctgaagttcctccgtgtcacaaagcagtacctgccccacgtggcgcgcctctgtctgatcagcac

SEQ ID NO: 859607 - DNA, 100 bp, Homo sapiens
atctgtgcttgtgaaaggctccatggtcttgcctccttgcaggttacaagaggacccacctgtgggtgtcagtggcgcaccatctgaaaacaacatcatg

SEQ ID NO: 859608 - DNA, 98 bp, Homo sapiens
gcctcttcggctgcggaccctgccattccggaggaggcatcctctggtatcacgattccaaaacccccaaagccaccagataagccgctgatgcccta

SEQ ID NO: 859609 - DNA, 99 bp, Homo sapiens
ggggacaccacgaacagaagtaatgaaatcccttccacagacgtcactgataaaaccggtcgggaacatctctcggagtagaggtttaccactcttagg

SEQ ID NO: 859610 - DNA, 98 bp, Homo sapiens
gtcccggggtcacccgctacgggaagcaggcctcgccacagctgtgtcagcgtgttatgatgccgtcccgtaccaacctggctactggaatccccagt

SEQ ID NO: 859611 - DNA, 101 bp, Homo sapiens
ggaactgtggccaaagaccttaggagagacgagcagccttcagggagcgtggagacagacttcgacccccaccacttctggcagtggagcagcttctcgga

SEQ ID NO: 859612 - DNA, 99 bp, Homo sapiens
tggaatatgaaggcttccccgtcccggaatcctatccatcttcttcaccgatatggtttgtggattctgaagacccaaatctgacatcagttctggaac

SEQ ID NO: 859613 - DNA, 100 bp, Homo sapiens
ggggaagcagcgtgtgtcagtattccacatttagatctgaagaatgtttctgatggtgataaatgggaaggacgagcaatgggaagagcaccgtgatcaa

SEQ ID NO: 859614 - DNA, 100 bp, Homo sapiens
gggtccacaggctgcgcaggcaagggactgctgagatgtcctctattcttgaagagcgtattcttggagctgatacctctgttgatcttgaagaaactgg

SEQ ID NO: 859615 - DNA, 100 bp, Homo sapiens
cgttcgaagaatgacagcaagccctactgagcgtgctcccctctgagactggagtgagagggtcttctggtggataagattgtggaccagctgcagcagt

SEQ ID NO: 859616 - DNA, 100 bp, Homo sapiens
gcatcgaccaaaccagaggatggcctagccgcccgtgactctcacactgtctcctgcatgacgggtggcgcctcccgcagcttcccttctctctccagtg

SEQ ID NO: 859617 - DNA, 98 bp, Homo sapiens
tctgattacgaggttcatgtacgacagcttcgacaacacataccagagagaactcgatgccaccgcaacggtattggcgaaccggcaggatgaaagtg

SEQ ID NO: 859618 - DNA, 98 bp, Homo sapiens
aagaaaacattcacaaaatgggtaaatgcacaattttctaagggcaaatcataccccttcagggggccattcccacctgtatggaatccaattaccta

SEQ ID NO: 859619 - DNA, 100 bp, Homo sapiens
attgccctctacacagcccttgttctcatcaatgccctctggctcttgctgattgaattcctttggtgcagtttagcatgttcctctgtgttctgcatct

SEQ ID NO: 859620 - DNA, 100 bp, Homo sapiens
accaccccgctgtcttccacacggggcactgggcttcctgccatcaccgatgtgcctaggcgcatttcagcaatcagccatgactgcctttgcactgtcc

SEQ ID NO: 859621 - DNA, 98 bp, Homo sapiens
gacagggcagcacgccgtcattgacatcaatgccttcccagggagagcaacaagccccggccctcagagctcagccggatgagcgcagcccagagaca

SEQ ID NO: 859622 - DNA, 51 bp, Homo sapiens
ggcggacaggcgacagcgacctgcggcagggcagtcagggcgacagcaaga

SEQ ID NO: 859623 - DNA, 100 bp, Homo sapiens
agccgggcagagctgctggtcactgagaggattccggtcactgtgctgccacctgaggccatcacgatcctggaggcagagcccatacggatgctggaga

SEQ ID NO: 859624 - DNA, 100 bp, Homo sapiens
tgatgtgccgtgtggaggaagagattgcagtgggggctgccagtgctaccctgagaaaggtggacgtgttttacagaaggcgacacatgttgttcagagt

SEQ ID NO: 859625 - DNA, 99 bp, Homo sapiens
ttcttggtttcaggcccgcactcgacagccaccgccgcccccaacgtccatgcctgagatgtggagagcatcttgtgcgcaccatactggctagagaat

SEQ ID NO: 859626 - DNA, 100 bp, Homo sapiens
cttcttccagatccttatgaatcagaaagtaagtacaaggtggactgtgcatgcctcaaagaaaacccagagtgccctgttctaaaacgtagttctgaat

SEQ ID NO: 859627 - DNA, 99 bp, Homo sapiens
taaagttcaccttgaattaaaactgaatgaactgataacggagaatggaactgtatgccagcagcttgttgtacatttccctgctcctcctaaacaatt

SEQ ID NO: 859628 - DNA, 100 bp, Homo sapiens
agagaccatccccagcttcctgctcaccagggcagggcgagagtcgcaatggaagaagagatcgccgcgctggtcattgacaatggctccggcatgtgca

SEQ ID NO: 859629 - DNA, 99 bp, Homo sapiens
tcagaaaaacagaatggactaggactcagtgtcacccctcctaatttctcagtgtcacaagtgcccaacatgcccagctgtccccaggcctattctgaa

SEQ ID NO: 859630 - DNA, 98 bp, Homo sapiens
aagaccgttggttctgacgaggcacagcgtttcttgcaagaatgggaggtctgttgccacagttattgggagttgccccagagaaggccataaaactt

SEQ ID NO: 859631 - DNA, 100 bp, Homo sapiens
tcactggggatactacacctggccaaaacatatggaaagttgatcatgtgctggagcgcttgcagagtgaaagcctggtgaacagaaggaaaccatgtca

SEQ ID NO: 859632 - DNA, 100 bp, Homo sapiens
ttttccaggcatctgcgaatgcattgtcaactctcttagaacaaaatgcatttcaaaaggtttgaactacctaaccattatggcaccaggaaacctctgg

SEQ ID NO: 859633 - DNA, 99 bp, Homo sapiens
atttacaggtttctgcaaagattgggtttttgaaagtcccctttacttggtaaatcacggcgagagtggaccagtcagatgcaacaggtgcaaggccta

SEQ ID NO: 859634 - DNA, 100 bp, Homo sapiens
tatgaaaacttctaccagcagcaggagggcatggagatggagcccggactcctgggggatgcagggggagaagcgagcggacatccagctgaacagcttc

SEQ ID NO: 859635 - DNA, 100 bp, Homo sapiens
tcttttgaagaggccatgaaagatactaggggcaaacgagacagagaaaaggactcaagagaagaacgagaatatgaacaggatcagagctcttctagag

SEQ ID NO: 859636 - DNA, 100 bp, Homo sapiens
agtgattccccggaatcgtgtgctgggctggtcccccttgctttcaccaacaatcaccagtggtttacacaacattgcaaggagcattgaaactcgaaac

SEQ ID NO: 859637 - DNA, 99 bp, Homo sapiens
gaaatcctgcgtttcccctgtgaaaggtatagagaaagcaggggtttgcccagctgacaacgtacgctgcttcaagtccgatcctccccagtgtcacac

SEQ ID NO: 859638 - DNA, 98 bp, Homo sapiens
aacccatctaatcacagactcctatttgaagtatttgacgaaaatagactggacacagcattgttggttttgccatgtactattttacctatgacccg

SEQ ID NO: 859639 - DNA, 130 bp, Homo sapiens
cactttgttattggagaaacatgcagattatatcgcatcctatggctcaaagaaagatgattatgcctgtgtcacttgtgaaaatgaagattcagctgatggtgcggccacatcctgtggtcaggttctg

SEQ ID NO: 859640 - DNA, 98 bp, Homo sapiens
ctggactcatggaggctgagcatttattcagatgccatggacaatattaccaggcagaaccaattctacgatacccaagtcatcaaacaagaaaacga

SEQ ID NO: 859641 - DNA, 141 bp, Homo sapiens
cctttgccactgttattatttttaaagggcagaaatgcctgaaggtgaagactttggaccaggcaaaaggccgaatacatcaagcaatggtaacatctttaaatgaagataatgaaagtgtaactgttgaatggatagaaa

SEQ ID NO: 859642 - DNA, 98 bp, Homo sapiens
gattaaaaagtgaacttttctctggacttccccagaagaagattgtggttgaattcaggagttccgattctgaagaggcatttgagaccccggagtca

SEQ ID NO: 859643 - DNA, 100 bp, Homo sapiens
tattgctgatattcttaatcaggatgcaaagaattatcatgcctggcagcatcgacaatgggttattcagggcaagtgtccagagaatggctgggatgaa

SEQ ID NO: 859644 - DNA, 100 bp, Homo sapiens
aaggatcaaatggatcctatcgaaaaggattggtgcgactgggccatgattagcaggttacaaccgaatgtggacactcggcagaagcagctggccgcct

SEQ ID NO: 859645 - DNA, 100 bp, Homo sapiens
ccaaccgtgatgacgtccagggctatgccgccaagaccgtctttgaggtcctggtccagtggcgggaagctgtgtcagtgcagatgtattaccgacagca

SEQ ID NO: 859646 - DNA, 98 bp, Homo sapiens
agaattgtggctcagttttcttggaaactacttcacactattacggaaagaagaaaaataaaagaattgggaggccacctggtgggcatagtaactta

SEQ ID NO: 859647 - DNA, 100 bp, Homo sapiens
ccatcttagtctagggactgaggagtcgccgccgccccgagtcccgaatttctagaatttggaatcgagtgcattttctgacatttgagtacagtaccca

SEQ ID NO: 859648 - DNA, 98 bp, Homo sapiens
cttaatgagacaactggtcccaaggcaaatgtggagttcatggatgtcagagagcttcaaactcgactacagagcgtgcaggccacaggtccctccag

SEQ ID NO: 859649 - DNA, 100 bp, Homo sapiens
cccatgacccactgtactggaaaggaaaaccactgcgtctccttatctggacacgtgcaggctgggtcatctttctgaaggattggttactaaatggtac

SEQ ID NO: 859650 - DNA, 100 bp, Homo sapiens
tggaaggagcacgaggaagcagaagtggtcagcaggcagaaaggaaatgagctacaaggaaatggcacttgagtatgaaagatcaacacgttgggtcaag

SEQ ID NO: 859651 - DNA, 50 bp, Homo sapiens
gtctacaaggcgaggcggaaagatgggcggtatatattgcacccctaaaa

SEQ ID NO: 859652 - DNA, 100 bp, Homo sapiens
ctagtacgcgaattggagaaaaagttcagtgggaagcatgtcgtctttatcgctcagaattgcggcgagcagtaagaagcagcgtgtggaaaagggagac

SEQ ID NO: 859653 - DNA, 100 bp, Homo sapiens
cctggctccccatactagtcgccggtatttcagtgtctgtagacaagatggaatcatctccatttaatagacggcaatggacctcactatcattgagggt

SEQ ID NO: 859654 - DNA, 99 bp, Homo sapiens
aacaccacttcttacacagcctggccctgttaggggtgccccattgcagaaagccactctgggggggcatgtgctctgtgtacctgaaggacagtgaga

SEQ ID NO: 859655 - DNA, 98 bp, Homo sapiens
acgacccccattgctgagccagcggagctgcttggaagcatagtgagtgtgggcgatcctaagaagaaatatacacggtttgagaagattggacaagg

SEQ ID NO: 859656 - DNA, 99 bp, Homo sapiens
gctcaccagggccaccaactctccaccctagacgaagcctttgaagaattaagagtgaaaggtgtagcagtcactcggcctacacccacagcatcgacc

SEQ ID NO: 859657 - DNA, 98 bp, Homo sapiens
ctgatggagaaggagggagtgctcaccagggaggaccggcctgggggccacatccccacagagcaggtgttgccaatgctgcggttcgtgcagaagcg

SEQ ID NO: 859658 - DNA, 98 bp, Homo sapiens
tccctcagtagtcagtttgaagcgggtatgcacaaagatagctggcttctggggtggcagtgaaagctggttcacagatagcaacaatgccattgcct

SEQ ID NO: 859659 - DNA, 100 bp, Homo sapiens
cttaaatctgtcgtttgaatttaggaccacctcggttctgaatgatgactgacgcgggtttgggtgatacccctcacagcccctgtcattccggagtcat

SEQ ID NO: 859660 - DNA, 100 bp, Homo sapiens
caaagcagaataaatctgtactcgtgcctcatggatccaaattaaagatacactctgtgcagttttagagagagacacactcagtattcgagaaagtcga

SEQ ID NO: 859661 - DNA, 100 bp, Homo sapiens
gtagccttagtaataaccctcttttccagtataagtatttggctcttaatatgcattatgtagaacaagttgaaatcatcgcagaaggataaagttcgtc

SEQ ID NO: 859662 - DNA, 100 bp, Homo sapiens
cgactacacacacgtgcgcacccccttcgagatctccctctggatccttctggcctgcctcatgaagataggtcacggagctgctggacgtctccatgga

SEQ ID NO: 859663 - DNA, 98 bp, Homo sapiens
agaaaccaacagacaatgccaatttacgtgtcattatggaactacttatgaggttaactgtaatggcttcacaattgaagatgaagaactttctcatt

SEQ ID NO: 859664 - DNA, 99 bp, Homo sapiens
gacaagctatgccttgagctcctcaatgtgggtgtagagtctaaactcatccttaaaggggtcatactgctggaaaatctcttttgtgagccacataaa

SEQ ID NO: 859665 - DNA, 100 bp, Homo sapiens
aagaaataacttgatgaggttatcacagagcattccatttacacctgtgcctccaagaggagttggtccaggtagcaatgatgagacccttttatctgct

SEQ ID NO: 859666 - DNA, 100 bp, Homo sapiens
tatcatggaaccagcagcaaagaagtgctatctggaaagagaggatgtgatcttcgtggtggaaagctaaattttaaaaccaccccaatggatgcagaca

SEQ ID NO: 859667 - DNA, 99 bp, Homo sapiens
gtagtgtagtcctggcgccccgctggaggagctccccagctggtggctggagcgaccccttgttctttggtggcgctgcttgctgcccttgaatttcct

SEQ ID NO: 859668 - DNA, 100 bp, Homo sapiens
tgatcctagggagccaaagcctaatccgcctgttcttcatatcattgaaccacatgagaaaatgtatggagatctagatgtcttattcctgacagatgaa

SEQ ID NO: 859669 - DNA, 100 bp, Homo sapiens
aatcaactcagtgatcctgattatattaatcagtatgtcatatggatggcagttgtgaaaaacttcaggacaaaaatgtttcatttaaggacttgtgctg

SEQ ID NO: 859670 - DNA, 98 bp, Homo sapiens
ctgagcaagatttcctgggtcaacaggttacatttggccaaaatcggactccgattgtctgtgagatgggccatgccctcgtgggaaccacctccggg

SEQ ID NO: 859671 - DNA, 102 bp, Homo sapiens
ttgagcaaataaaagagccctggaatgtgaagagacatgagacagtagtcagcttctcagcccatcaccacgggaggggtcacttaccgggagcagccctgg

SEQ ID NO: 859672 - DNA, 98 bp, Homo sapiens
aaaagagaaacagagtgttacgctgacttgtgaagtgacagattgtcttcgcagttttaccgacttagaagaacttgatgagacagagttatatatgt

SEQ ID NO: 859673 - DNA, 98 bp, Homo sapiens
gaggcccaaattgaggcgcaatgatgagaggatgtggtggtctactctgatgtcaatcttgagggctagggtctccctcttttgtccaaggctggagt

SEQ ID NO: 859674 - DNA, 100 bp, Homo sapiens
tgattgcctgcctgcttcagggctgctatcaacgaagagatatcacgttatggataaatatggagagttctacggccgagacagaatcagtgaattactt

SEQ ID NO: 859675 - DNA, 100 bp, Homo sapiens
ttgacattcaaccgtacccgccaagctgtcatcacaaaagagttgattgaaattatctctggtgctgcagctctgaaagttgactcatactggtgtccag

SEQ ID NO: 859676 - DNA, 98 bp, Homo sapiens
acaaaattggcgattattcctggtggagatgttcagcctgttgcctatgaagagcctaaacattggtgttcaatagtctactatgaattaaacaatcg

SEQ ID NO: 859677 - DNA, 99 bp, Homo sapiens
ttggtttcactggtgttgctttgctgttgtatgccttgttccacaagatatcagatcctgtggtattgtggaaattcccagaggactttggagaccagg

SEQ ID NO: 859678 - DNA, 98 bp, Homo sapiens
agaagtcagagttgagagacagaggcaccccggacagagacgtgaagcactgaatagggcacatctgctcgataacacagagaggctggaaaggtcat

SEQ ID NO: 859679 - DNA, 100 bp, Homo sapiens
cagacagtgtgtactctggcgtgcaacctggaattggaacggaggaggatgaaaaggcagctgctgagatttatgaggagtttcttgctgcttttgaagg

SEQ ID NO: 859680 - DNA, 100 bp, Homo sapiens
caaatattccacactacctacagtgaaatagcatggatttcatccattatgctggctgttatgtacgcaggaggtcacgagaagagaatgccttctagat

SEQ ID NO: 859681 - DNA, 99 bp, Homo sapiens
tgtggacatctgctgccggaaggggtcccgaagccccctgcaggaactctacaacccaatccagaaactctgtgaaggcatatttaaagtccttataaa

SEQ ID NO: 859682 - DNA, 100 bp, Homo sapiens
acttgtgtctcccagagctggctgtgtgatggggaccctgactgccctgatgattcagacgagtctttagataccttggatgttgatgtagaagattatt

SEQ ID NO: 859683 - DNA, 99 bp, Homo sapiens
gggcatgccagatgcctggaagatcagaggctcacattccaggtgagaacccagaagaaaggcggggacaggttctaatccttttagtggagcaggcac

SEQ ID NO: 859684 - DNA, 98 bp, Homo sapiens
cagttcataaactttcctatttatgtatggagcagcaaggttttccagaagagattcaatggctcagtaagtttcttccgcggctggaatgactacaa

SEQ ID NO: 859685 - DNA, 100 bp, Homo sapiens
atcgctgccccagtaacagtgccagtggttggaaagaaagcagataagctgtcattggaaggaatagtggtacaaagagctgaatgccgaccagctgcca

SEQ ID NO: 859686 - DNA, 99 bp, Homo sapiens
tgggagggagcctctgacggcgtctggaaagtaatggtccaacagacagttatgcagctatttcacaagtggatcgattgcagtcagagcctgaaagta

SEQ ID NO: 859687 - DNA, 100 bp, Homo sapiens
cgcctctactcagaaaatgaccgactgagaatcagcatgatgccttcttctgtagagtgggcgctttgcagaatacgtgttgaatgaaatcactgatcta

SEQ ID NO: 859688 - DNA, 100 bp, Homo sapiens
ccccagtacacttactactatcctcattatctccaaaccaaggtctgatgttgtggtcctctgtttttcgattgctaatcccaattccctaaatcatgtg

SEQ ID NO: 859689 - DNA, 143 bp, Homo sapiens
atctctttagtgtgttacatatgcaaaattacaaaaatgtcatcagctaatgtctacctcgaatcaaaggtgtttttggggaaaaaaatcacaatctggacgtgagaaaggacatgaggagactaaagacctgggattttgtc

SEQ ID NO: 859690 - DNA, 98 bp, Homo sapiens
tccggaggcctcgggggcgtacaggcgcagcggccgcagcagcagcggcagtcacaggcacatcagcaaagaggaatagccaggccagaagaaggaag

SEQ ID NO: 859691 - DNA, 98 bp, Homo sapiens
gaagcagagtaaataaagctcatggcccaccagctagaaaggcctttttgcaaatgtgtaacttgcctatcaaagtagtttgtagggcaaatgcagaa

SEQ ID NO: 859692 - DNA, 98 bp, Homo sapiens
cttaacaggtatctgctcctcatggcgcaggagcatctggagttccgcctgccggaaaaccagtagattcccagacatcgcgaagtgaatctgaaatt

SEQ ID NO: 859693 - DNA, 99 bp, Homo sapiens
agcactctgtgctagtgatgtgagcaaatgcctcattcaggtgaggaattttaaattggaacaagagcaagaaaaaaacaaaatcttgtcagaagcact

SEQ ID NO: 859694 - DNA, 100 bp, Homo sapiens
accagaccctggagtgaactggattccatgtagagacccctggaggtactgtccacaccatccttgccagctgggcctaattttgccctaggtctggcca

SEQ ID NO: 859695 - DNA, 98 bp, Homo sapiens
aacgttgtccacgaggacttccaggtcacggaggaggtgaaagtctctaattaacagaagatggcaaagcccagccacagcagctatgtccttcagca

SEQ ID NO: 859696 - DNA, 99 bp, Homo sapiens
ggccgtcggtcgccgccatgacagcgagcgaggcggagccagagagatgacacgggggaaattcctcaatattctagagaagcccaagaagtagcagct

SEQ ID NO: 859697 - DNA, 98 bp, Homo sapiens
aggcttcaggcgacccgtactgggcctactctggattatagctggacagacatccgctgcccctttgaaaaacgaagagatgcagcatgcgtgttttg

SEQ ID NO: 859698 - DNA, 99 bp, Homo sapiens
tccagcccaggaaaatggagagttgcagttgccaatacctatgcctgtaaggggctagacaggattgaggagagactgcctattctgaatcagccatca

SEQ ID NO: 859699 - DNA, 100 bp, Homo sapiens
ccggggaagtgtctgtagcgtccctccctctcaaccacaataacaggcggagggtcggcgtaggttctgatctacaatggccaactggacatcatcgtgg

SEQ ID NO: 859700 - DNA, 100 bp, Homo sapiens
tagaagattctgcagccacacacattctgccttcacttgaggtcaactgccttcaccaagggtgaaatagtggtgaaaaataacccaaatgaatctgtaa

SEQ ID NO: 859701 - DNA, 99 bp, Homo sapiens
gatgagatattctgctgagtggaaggatgataaggatgccttctatgtggcagacctgggagacattctaaagaaacatctgaggtggttaaaagctct

SEQ ID NO: 859702 - DNA, 102 bp, Homo sapiens
gtactggggtcccttactgaggtgtccctcccaagcaggcgtcctggaacatgagcatgctgcagacccaagacctcgtgaagtcggtccaggccacgactg

SEQ ID NO: 859703 - DNA, 135 bp, Homo sapiens
tgcctcttgccatgtctgcccggttccgcctggccatgagcctggctcaggcctgcatggtacagcaacatctttcatgtcttcatccgcatctcgagagaagaggggctgaagactctctaccatggatttatg

SEQ ID NO: 859704 - DNA, 98 bp, Homo sapiens
cttccccacttccctgcactctcatcgctctcggcctcggcctcggcctccgacacgggcacacacatgcttcaaccgactggatcttccaccgtatc

SEQ ID NO: 859705 - DNA, 100 bp, Homo sapiens
gtcaaaaggaagcaaaacgttggggtacagctcatggcagtatcgttccttaccaggttgaagccatccttgtcaatatatttggtggtatcgtcaactg

SEQ ID NO: 859706 - DNA, 100 bp, Homo sapiens
taataagttggtggacgctggggaagagtgtgactgtggtactccaaagggttctccaaaaaatgtggaatcctttgcatctatgctgagacattctcct

SEQ ID NO: 859707 - DNA, 101 bp, Homo sapiens
tcccctgcgcactcccctcgctgcccgggcccggagcgcagcgcggccgcacagactcatggagagatttctcatggatggcttgtatccttcaaggtttg

SEQ ID NO: 859708 - DNA, 100 bp, Homo sapiens
tacaactttcggggcatgtacaatcagagggtaatccaaatctatttctggaaccatgaaaattttgctagtttttgactttgacaatacaatcatagat

SEQ ID NO: 859709 - DNA, 99 bp, Homo sapiens
gctgcctctgtgccattgacattcacaacaagacattgcaaaagttgagaagctcaaaccattagaggtagagctgcgacgcctagaagacctttcaga

SEQ ID NO: 859710 - DNA, 100 bp, Homo sapiens
aaaaaccctataaatgtgatgtatgcaacttacagtttgcaacttctagcaatctcaagattcatgcaaggagatttatggttacaatttgagtcgctgg

SEQ ID NO: 859711 - DNA, 100 bp, Homo sapiens
cagctcctgctggaaaccctggggccacagggcccccactgaagcctgcagttacactgacctctacacctacccagatctacggaatccagaggcagca

SEQ ID NO: 859712 - DNA, 98 bp, Homo sapiens
accttcagagcgtcacggcgtacgccctcatggggaaaatctccccggtgactttcagtctctgcgatatgataccagctattttgtggagtattttg

SEQ ID NO: 859713 - DNA, 98 bp, Homo sapiens
catctccaagcaatgttcattttactccgcccagaagacaacatcaggctgtgcagctgtctgcttcagaaagtgagggctccaggaatgaggagaat

SEQ ID NO: 859714 - DNA, 98 bp, Homo sapiens
ccaagttctgagcttgatgctgtggagaaccagctcaagtgggcatcctgggagctccattccctaaggcactgtggaatagccaggccagaagaagg

SEQ ID NO: 859715 - DNA, 100 bp, Homo sapiens
cccacacatttgactcttccagttgaagtgtcattctacagtgtttcagatgacaatgctccctctccttatatgagatcatgatgcagccgtccttttg

SEQ ID NO: 859716 - DNA, 99 bp, Homo sapiens
cggtgtcacgtcctgaacatgagcctcctcctctccttctacctgctggggttgcttgtcagtagcgggcaaggtctaccctgaactgcagatcaccaa

SEQ ID NO: 859717 - DNA, 100 bp, Homo sapiens
acattcaggggaaccgcctcaccgttctgcccccagaactaggtatcactggacaggccatggctccacggtcccggcgacgaaggcacaagaaacctcc

SEQ ID NO: 859718 - DNA, 100 bp, Homo sapiens
gagttcctgaagacgctgaacttgttctgccagagtttcttactcatcagctctatatccagccagatgatgaagaacgagagcttcaaatggatcctgc

SEQ ID NO: 859719 - DNA, 100 bp, Homo sapiens
caaggatgcgaattgtgaatcgcttctccaaacaggaagacatgtaaggaatttgcataagacagttatgcaaaatggagctggaggagctttatttgtg

SEQ ID NO: 859720 - DNA, 100 bp, Homo sapiens
acacgtagaaagtgcaagcaaaggtgccggagcaattcttattcctcgtttagacattgtgatttccttcgttggagctgtgagcagcagcacattggcc

SEQ ID NO: 859721 - DNA, 98 bp, Homo sapiens
cctttctgtggaaatagatgacatcaataccagtgataaggaggcccagaagattaacaatggctcaagccaggcggatggcactctcaaaccagtgg

SEQ ID NO: 859722 - DNA, 98 bp, Homo sapiens
tcagctatgtgcattagctatcaacagtgaattactggaactgaaacggcagcagcaagagcaagaaagagccaaaatccaccagactgaacacagga

SEQ ID NO: 859723 - DNA, 100 bp, Homo sapiens
tcgagtgcctgcaggatgtgagggagggactttcagttaccttgatgatgtcccatttaagacaggagacaaattcaaaacaccagctaaagttggtcta

SEQ ID NO: 859724 - DNA, 100 bp, Homo sapiens
ataccaagtcttctcatttaaaagctcacctgaggactcacactgggtgataaaagaaaatgtggctgaagttacccgaagttcagcttgcagtgtaatt

SEQ ID NO: 859725 - DNA, 99 bp, Homo sapiens
ccggacgtgtccgcgaagatggcgggccgggaggcaggtggaagtcatcataaagtttctgtttcacccgtcgtccatgttcgaggactctgtgaatct

SEQ ID NO: 859726 - DNA, 99 bp, Homo sapiens
tcagcttcacattctcaggaactctccttctttgggtgcattcatttgatggtaccaaggaagcagcagctgctttgattgacttggatctttatatag

SEQ ID NO: 859727 - DNA, 100 bp, Homo sapiens
cagcaacaaggagggaaaaaagagcaggtggaaaaggaaagaaaccgaccagagggcaaagtgttggagacagttggtgtgtttgaggtgccaaaacaga

SEQ ID NO: 859728 - DNA, 100 bp, Homo sapiens
gcccggccctccttcagtttagttgaggataccacattagagccagaagaaaccaccatcatgggttcgggtcccatagaccccaaagaacttctcaagg

SEQ ID NO: 859729 - DNA, 100 bp, Homo sapiens
cttggaatggttaaaccatcagtacatatccgaactgaaagaagtacatttttggagaatgagctagataatgtctccacccttctggaagaagcagaga

SEQ ID NO: 859730 - DNA, 100 bp, Homo sapiens
gcagaacctgcggcagtactttgaagaggcttttgagttcattgattttgtatcagattgtaccatctcataaattgatgttggaattccatacattact

SEQ ID NO: 859731 - DNA, 100 bp, Homo sapiens
gggtaaatttcttcacaccaaaaataaggtggtttgttggaaatgctccgactacaaagctcaacttgaatatgatggtggtaaattgagcaaagtttgt

SEQ ID NO: 859732 - DNA, 98 bp, Homo sapiens
gacaccgacatggaacagggactcactgggggatctcactggcatcgaatctatggatcagtgtcgccataccttggaacagcataactggaacatag

SEQ ID NO: 859733 - DNA, 51 bp, Homo sapiens
actggattccatgtagagacccctggagttctgtggctcctgatggatctg

SEQ ID NO: 859734 - DNA, 113 bp, Homo sapiens
agatgatacaaatgaatttgttagtgctgtgtgctggagggcactaccagatggggtgaatcaaacatcccttctggaacaatacagagtaggaaaggtttgcagaataagag

SEQ ID NO: 859735 - DNA, 100 bp, Homo sapiens
cccagcagaatttgtatagagatgtgatgttggagaactacagaaacctggtctccctagtggaagctgttgctgccctggggaacaaagtcgtggaaag

SEQ ID NO: 859736 - DNA, 135 bp, Homo sapiens
tggagatgagcctagtcctgctgttcctgatccgcactgccctttttgcaccccagggagctgctgctgttgactatattgtggagtatgactatgatgctgtacatgatgatgaattaactattcgagttggag

SEQ ID NO: 859737 - DNA, 100 bp, Homo sapiens
cacctgcaaggtctctggaggaattcaatgatgtgtctctaattaacagaagatggcaaagcccagccacagcagctatgtccttcagcagctaaacaac

SEQ ID NO: 859738 - DNA, 98 bp, Homo sapiens
actccagaattcctaatagaacaagtctccacagcctattggctcacttggacatgatgctgacttgaggcggcagcagcaggatacctgtaactccg

SEQ ID NO: 859739 - DNA, 100 bp, Homo sapiens
ctaatagcccttgaacagctatgcatgctgcttttgatgtctgacaacgtggatcgttgttttgaaacctatttccttcgtgctaccatcagccgccgcc

SEQ ID NO: 859740 - DNA, 100 bp, Homo sapiens
ctgttccacttccagcagaagttcttgctggaggctgtgctgcatcccatatctatcaaaatcaatttgttcaaatgatcctcaattcacttattaacaa

SEQ ID NO: 859741 - DNA, 98 bp, Homo sapiens
gtgtgtccagcatgggagagtacatgagacgatgaagcaaagatacgtaggtaacctttccagagatgtgacagaagtccttatacttcagttgttca

SEQ ID NO: 859742 - DNA, 100 bp, Homo sapiens
gaagcgatggcttcagacagcatatttgagtcatttccttcgtacccacagtgcttcatgagaggttacgactatggctatgtctgcgtggagttttcac

SEQ ID NO: 859743 - DNA, 100 bp, Homo sapiens
gctgagagctgggaagaggcggcagacagcgggtgttaaagaacccagtatgtaaattatatagatttcccacatctgacaataagtggatgcgaattcg

SEQ ID NO: 859744 - DNA, 99 bp, Homo sapiens
tttgttttgagctaaatattgagggctacagattgcaacccaattaatatcaaagtatcctgcaagtttacctaactgtgagctgtctccattactgat

SEQ ID NO: 859745 - DNA, 98 bp, Homo sapiens
tccaccaaaggcggtcagagatcatacagattactactggctccaaagagcttgacaaactacttcaagaggatcaagctcctccttcctccctttta

SEQ ID NO: 859746 - DNA, 98 bp, Homo sapiens
ggcgggggaacgcggccaccctgagtctggtgagcctgaatttaaatacattgggaatatgcatgggaatgaggctgttggacgagaactgctcattt

SEQ ID NO: 859747 - DNA, 100 bp, Homo sapiens
gagaatgaagacacgctgctgctctgggaggatttcaccaactgcaatccgaccatcgacctgcagggcgaggttgcccccaagtttcctggcagtgtgt

SEQ ID NO: 859748 - DNA, 98 bp, Homo sapiens
gagatccagttcctgcgaactggggatgaccccgggagaagcagaaatccacttcttagagaatgccaagaagctttccatgtacggagtagacctgc

SEQ ID NO: 859749 - DNA, 98 bp, Homo sapiens
cgggttcagttcgtcatggggctgtttggaaagacccaggagaagccgcccaaagaactgaccctcagtgcagacgcaagcgtgaacacccttcctgt

SEQ ID NO: 859750 - DNA, 100 bp, Homo sapiens
ccatctaatcacagactcctatttgaagtatttgacgaaaatagactggttcaaaccttgtactactcagctgatcacaagctgcttgatgggaacctac

SEQ ID NO: 859751 - DNA, 99 bp, Homo sapiens
gggcagcagcaatttctgtgtgaagaacatcaagcaggcagaatttggacgccgggagattgagattgcagagcaagcagatataatttctacagtaga

SEQ ID NO: 859752 - DNA, 98 bp, Homo sapiens
aagaagaaatgctaatgtcaacctcaaaaaccaggtcacggtctagatcacattctcgatccagaggaaggcgatactctcgctcacgcagcaggagc

SEQ ID NO: 859753 - DNA, 100 bp, Homo sapiens
caggagcaggcgcctacatcctaactcgatttgcttgaaagtaagtgaacacagtctcctgccccttatgctggagcagtttccgtttctttatgtttct

SEQ ID NO: 859754 - DNA, 100 bp, Homo sapiens
gacccgtacttgaagccctacgccgtggacttccagcgcagaggacaagaattttgggcagatttgaatgccatgaacgtgtatgaaacaactgaatttg

SEQ ID NO: 859755 - DNA, 98 bp, Homo sapiens
aggatgtgccatacaaagaactcttaaagcagctgacttcccagcagcatgcgattcttattgaccttgtcttgttggcctaggcacaggcgagttaa

SEQ ID NO: 859756 - DNA, 100 bp, Homo sapiens
cgtcaggtccagagggaagatgacatggacgggaaccacagctgacccataatggacattaagggaagccccacccaccagaagccaagatgtccagcaa

SEQ ID NO: 859757 - DNA, 98 bp, Homo sapiens
cccactctgcggagttagcagtcacgacctccagcacagggtgaaggttgccgaactgtccccctggctggacatgtggggtttgacagcttgcctga

SEQ ID NO: 859758 - DNA, 98 bp, Homo sapiens
ctcctgaagcaataattaaagaacctattgatattgaagaaggcatcaaaaaggaacaagctctccaggtgcggctggaagtatttcgggcagaggag

SEQ ID NO: 859759 - DNA, 98 bp, Homo sapiens
gagtttgcgactcgcggaccggcgtccccggcgcgaagaggctggactcggattcgttgcctgagtctgaagatgatgagaaactgaaaaagaggaag

SEQ ID NO: 859760 - DNA, 100 bp, Homo sapiens
ccttctacatctgcagataaagtggagaggctaactatatgtcagaaagcatcagcttttctcgatggacccattcatctaatgaaatatgcctgtacta

SEQ ID NO: 859761 - DNA, 98 bp, Homo sapiens
cactcaagcctgaacagaaggatcagtggagccaacattgctgcatttgatacagttcttgggataaatgttgcagtcaagaaactaagccgtccttt

SEQ ID NO: 859762 - DNA, 100 bp, Homo sapiens
ctaactttgcaaccattggtctgcaggacatcactttagatgatgctccagagtttcctattttggagaagcagaactggttgattcatcttcattatat

SEQ ID NO: 859763 - DNA, 98 bp, Homo sapiens
tgggaccaaccttgatgaatatgtggctttggtggatggggtattcttgaaccaggtcatgctccaaataacagtccactttggaaagtgaagaatgg

SEQ ID NO: 859764 - DNA, 98 bp, Homo sapiens
ccaagtagctgggactacaaagacttgggtcatgaccgcgttcttgttgaaggcattgtctgcatttccaagaagcacctagataaatacattcctta

SEQ ID NO: 859765 - DNA, 100 bp, Homo sapiens
ggttctcgtctcaaactctatttgccaaaggaaacttgccttatcaccttcttgcttgcagatctctggcttcctgctctgtttgttctggttgccctgg

SEQ ID NO: 859766 - DNA, 99 bp, Homo sapiens
ggagacacttctctatggagcttcagtagcaaataaggacatcatctgctataacctacaagcagttggacagcgaacacttgccaagtatttcaatcc

SEQ ID NO: 859767 - DNA, 98 bp, Homo sapiens
tgcaacagaagtatgaggccagccgggaggacatctacaagcgggtatccacccactttggtgtaccagaatggcagcattggctgtgttgaaaacgt

SEQ ID NO: 859768 - DNA, 98 bp, Homo sapiens
aggacgacgaggagcagggcctgactgcgcagatttgctgctgcttccaggagaagtggagcaggatgtaagcaccagcattccttcctgtatccctt

SEQ ID NO: 859769 - DNA, 98 bp, Homo sapiens
agtatgggagccgccacctcgagacgtcttcccgccgtccccggctccaggagaccccacggacaatagccggaggcagaagcagttgttaaaccaga

SEQ ID NO: 859770 - DNA, 100 bp, Homo sapiens
ttttctcatggatgttcttcttcgagtatttgtagaaggtgctgtgttaaatgagaataatgtgcccctccccaaagagtctcttgagactctgatgctt

SEQ ID NO: 859771 - DNA, 100 bp, Homo sapiens
ccatttgtttttaactaccgggaagatttacacagatggaaccagaaaagatacgaggctctaggagagagtgctgcagcagctcccagtccagtgctag

SEQ ID NO: 859772 - DNA, 100 bp, Homo sapiens
gaatgtggtgacctcacctatccatctccctcaaggcagcttttgtatttgcaaccacgtggcttcacgagtccgccaaaccatcaggtgaataaacggg

SEQ ID NO: 859773 - DNA, 98 bp, Homo sapiens
ggacggacggtgatggtggtcgccgcggcggcgtgtgcgcccctcaggtgaagcaactcgtgcccatccgcgatcaatccctgcaggaggagctggct

SEQ ID NO: 859774 - DNA, 99 bp, Homo sapiens
gctctcctttcccctaattcacagggtgaagccagatttgctaaacaaccctgagatggtggagggccttgtccttatcaacgtgaacccttgtgcgga

SEQ ID NO: 859775 - DNA, 100 bp, Homo sapiens
attggagtccactagaaatatggtcaagttggcagaggcaactagaactaacattggaattcagcaaattatgcgcacagccatgaagtataacctggga

SEQ ID NO: 859776 - DNA, 99 bp, Homo sapiens
agagtatgaatttctctatgatgagcactaacactgtgggacttggtttgcctatgtcaagatcacaggatgactgtcttaggtcattgacgagatttg

SEQ ID NO: 859777 - DNA, 98 bp, Homo sapiens
ctggaccacctggagaatgtcatcaagcagcacattcaaggaggagacatcacagctttcccagatcgggaggaaaaatatggaatgtgttttaccgc

SEQ ID NO: 859778 - DNA, 100 bp, Homo sapiens
ctatcactgtcctggctgtgctggccttagtgccccaggatcagggaggactggagctgcgggaacgggtactgaggggaaaataccgtattccattcta

SEQ ID NO: 859779 - DNA, 99 bp, Homo sapiens
gatgaggtagcagacacacaattgaagccatgtggacacagtatgtaaaatgaatgtgcatattcgatgtcaagcgaacgtggcccctaactgtggggt

SEQ ID NO: 859780 - DNA, 100 bp, Homo sapiens
gtagataggaaagccagcaaaggcaggaaacttcgtacttccagcggcaatgtaagcaacagaaaggatgagacaaatgctcgagatacttatgtttcat

SEQ ID NO: 859781 - DNA, 99 bp, Homo sapiens
gaagttggaagtgtctcttagcagcgcgcggagaagaacggggagccagtcaccaggagactaaagtccatcaaaaacatccagaaaattaccaagtct

SEQ ID NO: 859782 - DNA, 100 bp, Homo sapiens
gtttttctgttttgcctgaatacatgatttaaacaagagatttccacagaaggtctaactcatcttattactatggatttacaccagaaggaaattcagg

SEQ ID NO: 859783 - DNA, 98 bp, Homo sapiens
gactgtcctcggcggttggtcagtgtgaatttgtgacagctgcagttgctccccgcccccgagcagccgaggcatggaagaggagatggttcgtgtta

SEQ ID NO: 859784 - DNA, 100 bp, Homo sapiens
cttattcctgtaaactactcaacatcacaaatccaggggaatgcacatagtcttttacagacaaaaaattattcagaagtatgcaaaaactgccgtgaag

SEQ ID NO: 859785 - DNA, 100 bp, Homo sapiens
ggatttagaaatcttcaagaatttctgaggacgagctcacatctggaagacagaggaccccagtaagtgcagtcctcggttttgggaggagctctttctc

SEQ ID NO: 859786 - DNA, 100 bp, Homo sapiens
gaacaaataaatcaacaagctcagcttcaggagtttggtcaaagcaaccgaaaaggagagtttcctgaactgttgggaatcaaagagctttccaaacctg

SEQ ID NO: 859787 - DNA, 100 bp, Homo sapiens
tgtaatgcgactagcaaccaaggaacaagagatgcaagagtgtactaattggaggcatatgctggagttatcagtgcacttcgggcacagggggatctca

SEQ ID NO: 859788 - DNA, 100 bp, Homo sapiens
ttacggccatcacggcggccgcagtggcgtcctggagccctcctcaggtgtggcccacagagcttttgaaaatgatgttgatgccttgtgtaatctccgg

SEQ ID NO: 859789 - DNA, 100 bp, Homo sapiens
ggccttggtggaacatgtcaaggaggagtgtgaccgcctgggccctggcatggccgacataatactaatggaccatactaccaaggaccagtccacctga

SEQ ID NO: 859790 - DNA, 100 bp, Homo sapiens
tgatataacctaccctgctggattcatggatatgtgaaagaggccaaagaagcaactaagaatggagacctggaagaagcatttaaacttttcaatttgg

SEQ ID NO: 859791 - DNA, 100 bp, Homo sapiens
cacctcttatgtcagcatttcgcaagtcattatttagaagcaaggtccttgaatgagcgagattatcgggaccggagatacgttgacgaatacaggaatg

SEQ ID NO: 859792 - DNA, 100 bp, Homo sapiens
tcttgctctggggctcttatgctcagaagaagggcagtgccattgatagggatttgaagccacagacatttagaaatgcttatgacataccaagacgaaa

SEQ ID NO: 859793 - DNA, 100 bp, Homo sapiens
acaaattgcctccttatgtctccaacatggaccgcctgggggactcggaactccatggaatgtcttacccaatttcaggtttagtgaagatgtataaagc

SEQ ID NO: 859794 - DNA, 100 bp, Homo sapiens
ggcaagatggagttgaggactattttacactgtatgcagataacgctttggataaacaagaagaattgacacctcttggagtccacttggcacgattacc

SEQ ID NO: 859795 - DNA, 100 bp, Homo sapiens
caccctggctcagttccaggagcagttcccagtgacctgacagcagaggagcgtcaagaactggagaacatccgacggagaaaacaggagctgctggctg

SEQ ID NO: 859796 - DNA, 100 bp, Homo sapiens
gctggagaacgcggctaaagttctgatgggacccgagtgtatagccctccagagtggatccgctaccatcgctaccatggcaggtcggcggcagtctggt

SEQ ID NO: 859797 - DNA, 98 bp, Homo sapiens
gaattttgaacaagacctctggccaaatggaagtatatgatgctgaattgttcaacatgcagccactattttcagcatttgatgaatacagaaatatc

SEQ ID NO: 859798 - DNA, 100 bp, Homo sapiens
gatgacttgcttgggtaaggacatgaagacagttcctgtcataccttttaaaggaggcaagtgaggcctatctggttggcctttttgaagacaccaacct

SEQ ID NO: 859799 - DNA, 100 bp, Homo sapiens
gtgcttagaggtgtacgagaagccggtacaggtgccctgcggacacgtggatcagagaaggctgaagaaggtggagaaactgaggcacaaaaagagggca

SEQ ID NO: 859800 - DNA, 100 bp, Homo sapiens
tcggtcaaccgggacctcaagttgattcttcaccacactgaaaccattaggaaaaatccttgtggttaacagcagaggcttcagagtgtaacctgtactc

SEQ ID NO: 859801 - DNA, 99 bp, Homo sapiens
gggctccacctacctgcacccgctcagcgagctcctgggcatcccgctggaccagaccagcatctcagacatgtcgaaaaagatgttttgatccctaaa

SEQ ID NO: 859802 - DNA, 101 bp, Homo sapiens
aaaatggcggatttcgaagagttgagggttgctgaaaagccaggagtcaaaatgactgagcgctttgactgccaccattgcaacgaatctctctttggcaa

SEQ ID NO: 859803 - DNA, 100 bp, Homo sapiens
cagcagtagctatggcagtggcagaagattttaattaggtgggtttgctgagttctctcgttgtttccctggcctctgtgaaggaaaatccactctagtc

SEQ ID NO: 859804 - DNA, 98 bp, Homo sapiens
caacttgtggatgcaggcaaggtggatgatgccagagctctcctacagttcactgattaccaaagctatgtcatccatggctgcctggagaataatcc

SEQ ID NO: 859805 - DNA, 100 bp, Homo sapiens
tggctgcactctttgtgaattcgatacagtcgacttgtctgcagtagatagattaaccattccaagcagttgccccagaagttttgctgaactgttacat

SEQ ID NO: 859806 - DNA, 100 bp, Homo sapiens
caggcctatctggctccagattgccgagtctgcttacagattcactctgggctcagttgctggaggtgccgtgagcgatgtggagatgcaggaacactat

SEQ ID NO: 859807 - DNA, 98 bp, Homo sapiens
gccgtctaccagatcaacgtcctccgggaccggagtcagaaccctccgcagagtaaaggatccttcaaaccaaaaatgtggtggaagaaagaaaaccg

SEQ ID NO: 859808 - DNA, 98 bp, Homo sapiens
acagctttgcagaagctggaggaagctgagaaggcagcagatgagagtgagagaggatcataaaacaggagttggggcagtcatttgggcagaaggga

SEQ ID NO: 859809 - DNA, 100 bp, Homo sapiens
tgcagcagagtgacagcagtggagattgagagaaaaggattaaagcaaggagagccaatcatgactggcaaaacacagaccagcaacgtcaccaataaga

SEQ ID NO: 859810 - DNA, 100 bp, Homo sapiens
tggcaggatactcgtgatgatccctacagaccagattgtggacaaagccctagaagagccaaagtatagctcactgtatgctcagctatgtctgcgattg

SEQ ID NO: 859811 - DNA, 99 bp, Homo sapiens
taatttctgaccagaagccctccctctaccctaaggtatgagagtgtgattgccacactgtgtgagaatctggactccctggatgagcctgaggcccgg

SEQ ID NO: 859812 - DNA, 100 bp, Homo sapiens
gcagagagagtgcgcagaaggattccgggagcacagttccgccgagatatggaccctccacatcccttccccaaggagatcccacacaacgagaagctcc

SEQ ID NO: 859813 - DNA, 100 bp, Homo sapiens
aaaagagcaggaagtcattacatgggatcttatgaccatgacctggctaccttgagtctgtggggctacacagccttcagcctgcatctccagggctctg

SEQ ID NO: 859814 - DNA, 98 bp, Homo sapiens
tacctgcccgaactcatggccgagaaggactcgctcgacccgtccttcactcacgccatgcagctgctgacggcagctttccgcttggccctcatcca

SEQ ID NO: 859815 - DNA, 121 bp, Homo sapiens
agtcccccaggatacagggtcaaaggagagcacaaccatcgcagttggaagcccatggggcaggaagccagttgagggaagttctccatgaatgtacgtcacaatgatgatgaccgaccaa

SEQ ID NO: 859816 - DNA, 100 bp, Homo sapiens
gttctggggctgggattggaactgtgtttgggagcctcatcattggttatgccagatcattgagcgcttgaagctggtgcccctgaatcaggaaagtgtg

SEQ ID NO: 859817 - DNA, 100 bp, Homo sapiens
gttggtacattagtgggggaagacaaatatggaaacaaatactatgaagacaacaagcaattttttgttcaaggagcagggacaagttacaggaatgttc

SEQ ID NO: 859818 - DNA, 129 bp, Homo sapiens
tgcaaacaaggttattcttaatcctgtaaatacgaatctttccaaaggagatgcccggtccaaactgctttgcaggaacgacgataattccagctggcattgaagtgaaagtggacgaatgtaacatct

SEQ ID NO: 859819 - DNA, 100 bp, Homo sapiens
cttcgattaacatgctgaggattgtagagccatatattgcatgggggctaaaactggacaaagaccgcaaaaagatcctcgaacggaaagccaaatctcg

SEQ ID NO: 859820 - DNA, 98 bp, Homo sapiens
tgaaaagtgatgaggaactggcaagaaagctaagcattgatattaatccagcaactatcacaagaatactccttagccacttcaattgggataaagag

SEQ ID NO: 859821 - DNA, 100 bp, Homo sapiens
ctctgtgctttcctggctctgccgctgtccatgaccttcataggtgtgtacattctcacgaccggcctgatccctgtgctggagaaagaacacgaccccc

SEQ ID NO: 859822 - DNA, 100 bp, Homo sapiens
ttgctagctgacctggagatgctgcctggtggggatcagacagagattggagagaagctgtgccagcaggagaagctgagggatgagatttactgccagg

SEQ ID NO: 859823 - DNA, 99 bp, Homo sapiens
atagatcagctgcctgacctcatgggcctaaaggctacaaatgttcatcgagtgattgttcaagcagtaaatcccaggatcagcaatcttactgctgca

SEQ ID NO: 859824 - DNA, 100 bp, Homo sapiens
tggagagaggaattcctcaagacaccattccagtgatgatggccaaagagaagccaccgataactgtagttggagatgttggaggccgcatcgcaatcat

SEQ ID NO: 859825 - DNA, 50 bp, Homo sapiens
ctcgggtccgcggaggctgcgctctgcggctaatggtcgatttgaagtgg

SEQ ID NO: 859826 - DNA, 100 bp, Homo sapiens
ggagcagctaccacttcgagcgggctaccagaaaacctcagacaccatagccccctggttccatgaagagacggtccagcagacaggtgaagagaaagcg

SEQ ID NO: 859827 - DNA, 100 bp, Homo sapiens
agaaagcaggcgaacccgcggcgcaataacgttggttgaatctggcgatgtggaacccatggatatggagggctgactatatacaccatgttttttcctg

SEQ ID NO: 859828 - DNA, 99 bp, Homo sapiens
gtcggatagtagagagctagtcgagggggaaatgaaagagcttccggagcagcttcaggaacatgctgacctgcgcgaagtctggctcaattatcctct

SEQ ID NO: 859829 - DNA, 100 bp, Homo sapiens
atcgagcagctgaacgagtgcaagcagctgtccgagtcccaggtcaagagcctctgcgagaagctgcgcagttggacagcattggcttcagcataatcag

SEQ ID NO: 859830 - DNA, 98 bp, Homo sapiens
gcagattatggctttgtccccacccagcactgatgatattataaaatgctgagatgaatcgtcacctgtgtgtttggctttttagacatccatctctt

SEQ ID NO: 859831 - DNA, 98 bp, Homo sapiens
ctgagcctacaactgcgctatcttccctggatttttcttcaccttttccttactcatgagccaggctttctcctgtttctcagaggatttatcaatta

SEQ ID NO: 859832 - DNA, 98 bp, Homo sapiens
acactttgttattggagaaacatgcagattatatcgcatcctatggctcaaagaaagatgattatgtaatgactccacagggaagaggcactgtagca

SEQ ID NO: 859833 - DNA, 99 bp, Homo sapiens
tccgctccccatacggcggccccagacttaattcagtgcacaaatgagatgaatgtgaacatcccacagttggcagacagtttatttgaaagaactact

SEQ ID NO: 859834 - DNA, 100 bp, Homo sapiens
cagtaaaattaaagaaggaatttacagtctttgagcatatagatatcaacactccttcattactggaggaattccgattacatttcaagaatatctcccg

SEQ ID NO: 859835 - DNA, 99 bp, Homo sapiens
accaattttacccaagaccaggaactcctgctgcaaaaatggaacaagttccagcacaagtggtgagtataggtgcttggagaggataaggaaatcacc

SEQ ID NO: 859836 - DNA, 100 bp, Homo sapiens
ccaaaactacagttctgtcactcacttacacagtattgggaaatctgtgaaagatcctaattatctcatggctaatgaacgcatgaacctcatgaacatg

SEQ ID NO: 859837 - DNA, 100 bp, Homo sapiens
atcttaagcatgtcatgtctgatagctctttggatttaccaacagttagtggccagcatcctcctgctgcagaaactggcgatggaatatgagaggagcc

SEQ ID NO: 859838 - DNA, 98 bp, Homo sapiens
aagctatccaagtggcaaaacaagtctttaacactcttacagagtatattcaggatatggtgcctgtcatagttgattactgccttctgctgcagcga

SEQ ID NO: 859839 - DNA, 99 bp, Homo sapiens
gtcggccgagatcgagctgccggacgtggagcccgcagccttcctggcgctgctgagacaacgccattattgacgagatcactcccaagcggattggag

SEQ ID NO: 859840 - DNA, 98 bp, Homo sapiens
actaaacatagttttggaactagcagatgctggcgacctatccagaatgatcaaggagggtgcatctgcccggaagactcagactcctgcagcccagc

SEQ ID NO: 859841 - DNA, 98 bp, Homo sapiens
cgactctgcttaaaaccacgtggttcgatggctgccgcggctacgctgaggctctccgctcaggttttaatggtacggttcgcatcattatttgatgc

SEQ ID NO: 859842 - DNA, 98 bp, Homo sapiens
cgacaccatccgctgcgtctacatcctggacccctggttcgccggctcctccaatgtgggcatcaacaggtggcggaaaatcctgccttgcttcgttg

SEQ ID NO: 859843 - DNA, 100 bp, Homo sapiens
gtgaagaagaatttcgatctccgccctggggtcattgtcaggcatatcacacctgaaaaattttatgtggaagcttgtgatgatggagcagatgacgtac

SEQ ID NO: 859844 - DNA, 100 bp, Homo sapiens
tagcctcaaactcccaggctcaagcaatcctaccatgtcagccttcccagtagctggaactacagaacaacctccctcctagcatgatgacccgcagaaa

SEQ ID NO: 859845 - DNA, 99 bp, Homo sapiens
ccgtggccatgctgaagcggaggcggccgctgctcgagatgtccagaaggcttcttgggggaatattgtcaacatcgagacccctgtgagaagaaccgc

SEQ ID NO: 859846 - DNA, 99 bp, Homo sapiens
ggaggcaaagttccgaatagggatgaggcatacgtggaattgaatgatctggcacgggaccctccagcacagtgttcagcaggtcctgttggagatgat

SEQ ID NO: 859847 - DNA, 100 bp, Homo sapiens
cttactctaaacttcacaaatggttctgaagagtatggagcctacgtagattcataaggcactagatgaaccagccaagactgaaagtgtctccaaggac

SEQ ID NO: 859848 - DNA, 100 bp, Homo sapiens
gcacagttcctgggaaggtggagccaccagcctctccctgaatcgaattctctgggttgatgagaacaatttgacagctcatgtagaggctggcataaca

SEQ ID NO: 859849 - DNA, 147 bp, Homo sapiens
ggaatgcagtggcatgatcttggttcactgaaacctctgcctttctggttcaagcaattctcatgtttcagcctcccagttattttaccaagaaaatggtttgcacgactttgaacatatactatccatgctgatgggacaggatcc

SEQ ID NO: 859850 - DNA, 100 bp, Homo sapiens
ctcagaatcgaatctcttctccctccccttcttgggcaccagaactagcacctctgaaaagtaaaatgatctatgcaagctccaaggatgcaattaaaaa

SEQ ID NO: 859851 - DNA, 99 bp, Homo sapiens
tcaaggaaccacacatgtattaagatttggtgatggtgtttgtacatgctcgaaatgccactgtaagaacagctatgtctctaatagaaagagcaaaaa

SEQ ID NO: 859852 - DNA, 98 bp, Homo sapiens
atttgggttttgaaacttaccaggttatctctcaggctgctgtggttcatgccacagccaaaggaatctgcagcttataaagctgtgaatgcacttca

SEQ ID NO: 859853 - DNA, 100 bp, Homo sapiens
gaatctgaatgctgacccagctctgaatgagcttctggtgtactatttaaagcttgataaagatgacatggtatacatggaagcatatgataaattgttg

SEQ ID NO: 859854 - DNA, 100 bp, Homo sapiens
gccgcgaggccacggagagctcgccttggagagcccaggagcaggggagacatggagcgtgaggatcatccccggagaggacgggaggatcggcagcaca

SEQ ID NO: 859855 - DNA, 100 bp, Homo sapiens
gaagaagaggaagtagccaaagagcaactaactgatgctgacaccaaaggggaggtaactccaggactatctcaggtggaatatgcacttcgcagacaca

SEQ ID NO: 859856 - DNA, 118 bp, Homo sapiens
gagtgtctgtccccagagcctcagtttgtgcaggacaccgacatggaacagggactcactggggaattgcctctgcctcgctttatgatgtcaaagaatgatggtgagatacgatttg

SEQ ID NO: 859857 - DNA, 100 bp, Homo sapiens
caaaggtgctaatccagtggaaatcaggagagttctttattggtgaaaacatgaatccagatggcatggttgctctattggactaccgtgaggatggtgt

SEQ ID NO: 859858 - DNA, 98 bp, Homo sapiens
caagatggaggtggactacagcgccacggtggatcagcgcctacccgagtgtgcgaagctagccaagctggctctgaagcaccgacaaggcaagaatc

SEQ ID NO: 859859 - DNA, 100 bp, Homo sapiens
tttgtgtggagcacacattgaatgggccaaggaaaaatcgagcagaaagaatgtctttcaggaaaatggctttgtaaagaagtttgaacctaaatctggc

SEQ ID NO: 859860 - DNA, 98 bp, Homo sapiens
aaggcaagaccgaattcagaaggatatcgacgtcgtgatccagaagtccagagctgaggactgcctgtttgcagggaaattcctcgctgccggactgc

SEQ ID NO: 859861 - DNA, 100 bp, Homo sapiens
actcaggggttggaaagtcttgccttcttcttaggtttgcagccctggccaacgtcaacattgggagcctcatctgcaatgtaggggccggtggacctgc

SEQ ID NO: 859862 - DNA, 98 bp, Homo sapiens
cagggaggcatagcgcctctctgatcttcctgcatggctcaggtattaatgactgtgacttgacacagctgggaatccctgctgcagaggagtatttc

SEQ ID NO: 859863 - DNA, 100 bp, Homo sapiens
cggccaacttccattgaacttcccagcactcgaaagggaccgaaatggagagcaaaggtggcgctcaggcacgaggatggcgatgagaccacggagccac

SEQ ID NO: 859864 - DNA, 98 bp, Homo sapiens
gtggactgtaagcatgagtgaattctggttgtgtttcaactgctgtattgcagaacagcctcagcctgggcagttatcatgggacacccgccatatgc

SEQ ID NO: 859865 - DNA, 100 bp, Homo sapiens
gacactgtcactggagtggccttcaacccatcagcgccccaggcccaaggatgtgaccttctcttggattttcctgattattatgagaggcaagtcgtta

SEQ ID NO: 859866 - DNA, 100 bp, Homo sapiens
tactgtacaccccatcccagacgaagacagtccctggatcaccgacagcacagacagaatccctgctaccagtcctcttcctgatggatgggaacaagcc

SEQ ID NO: 859867 - DNA, 100 bp, Homo sapiens
gggactacgacgtccctcaaaccttgcttctaggagataaaaagaattaaacaaccaccatgtcgagcaaaaaggcaaagaccaagaccaccaagaagcg

SEQ ID NO: 859868 - DNA, 100 bp, Homo sapiens
gattacaggcttgagccaccactcccagccaacagaattcttttcaacagagtacaagatcctcagcatgagagaattattactgtgtctactaatggaa

SEQ ID NO: 859869 - DNA, 100 bp, Homo sapiens
aatggtcggctctatctattggacagctgtgacttatggagcagtgacagtgatgcaggaaacagagcaaatgcagcgttacaatcaaagacttattgag

SEQ ID NO: 859870 - DNA, 100 bp, Homo sapiens
ttgctaaatttgaaaaggagaaaatgaatgccaaatgggacacgattaatgctgaactgttgtttcggccaactgctctttcaactccaagcttttcttc

SEQ ID NO: 859871 - DNA, 100 bp, Homo sapiens
tcatcttacaggagcagactagcaaatggttatgagccttagagtttctgaactccaagtactgttgggctacgccgggagaaacaagcacggacgcaaa

SEQ ID NO: 859872 - DNA, 100 bp, Homo sapiens
tgcagaagtgccgaaagagcactggactccggaaggtcatcatcagatttgaaatatttaaagtggatacaaaactatttcagcaatgcagacaattaag

SEQ ID NO: 859873 - DNA, 111 bp, Homo sapiens
tggaagaagaggaagaggaaagaaaaggagtcagggatggcccttactcagaaagatcaactgaaatcggcaaacttctgagttcctacttgcaaaagaaaagtgacgtgg

SEQ ID NO: 859874 - DNA, 98 bp, Homo sapiens
ataattgaggatgaagatgatgaagccgaggtagaagaagatgaacccacagatttggtcactctgtgagactgctgggtcagaaaaaggataatgga

SEQ ID NO: 859875 - DNA, 98 bp, Homo sapiens
agaggaggaaaaccttgagaccctgagactttcagaaacttattcacagttaccaaagctgctatatgttctcctttcagccaagacctttcaccagt

SEQ ID NO: 859876 - DNA, 100 bp, Homo sapiens
aaaagaggaggaagtctatgaacccaaccctttcagtaaatacttggaagataacagcgacctcttttctgaacaggcaaggcaggctgaggtaaagcgg

SEQ ID NO: 859877 - DNA, 99 bp, Homo sapiens
acaagatggcgaccgagacggtggagctccataagctaaagaataccctctaccatctgctttggtcagggtgccgctcgaggatttaaaagcaacaag

SEQ ID NO: 859878 - DNA, 100 bp, Homo sapiens
gatggccgaggaagaagccctcaggggcaattctgacccatggagctcaggccccggggcctccagcggcaccagcggagaccacggtgagctcgtcgtc

SEQ ID NO: 859879 - DNA, 99 bp, Homo sapiens
aggcctgcctgagctcagctgctccaaagacatccagtatctcaagctgatgactatcagccagttcgtctgctcagtaaacctggggaactgagaaga

SEQ ID NO: 859880 - DNA, 98 bp, Homo sapiens
caggatgaagttcgccgagcacctctccgcgcacatcactcccgagtggaggaagcaatacatccagtatgaggtagcagttttacaacatcatcagg

SEQ ID NO: 859881 - DNA, 100 bp, Homo sapiens
aattcccagaggactttggagaccagatggctgcattacaaagtcctttctatggtgacaaaatgaatttatactcactgtgtaagaagatagaacagtg

SEQ ID NO: 859882 - DNA, 100 bp, Homo sapiens
cctcacctccttcgtggggctcatcgtgatcccggcgacatactacctctggccccgagatcagaatgccggttctgactcctcaggagcaaaaaacata

SEQ ID NO: 859883 - DNA, 100 bp, Homo sapiens
ctgagtacctgaaccggcacctgcacacctggatccaggataacggaggctggcagactgagaactatgagcagagaatacgtgaacaacaggaacagct

SEQ ID NO: 859884 - DNA, 100 bp, Homo sapiens
gcactgtggaagaccacctgagtcaccagttaactatggtagcccacccagcattgatttggagcaagaggtggtggtggccttcccccgaagaaatttg

SEQ ID NO: 859885 - DNA, 100 bp, Homo sapiens
ccacaaccaaagtcccggagatccgtgatgtaacaaggattgagcgaatcggtgtgggcccatcgctggatggatctgtcagaacacggctttgggctgg

SEQ ID NO: 859886 - DNA, 100 bp, Homo sapiens
cagatgagcaactggattatactgtactgcccatgaaaaaggatgttgaccggacagagtgatagattcgtgtggcctttcaaatgattgtgaagtggtg

SEQ ID NO: 859887 - DNA, 99 bp, Homo sapiens
cattatgaacgaattctcaacccctacaacttattcctgtccggagacagcctaaggcatcaacaacagcaacttgtgattggcggtgaccggatattc

SEQ ID NO: 859888 - DNA, 98 bp, Homo sapiens
ccttttcgagtcatgcccgcctgtctgctgatggaatgacagttagtgctaataaagatggcttggggatgatcgttcgaagcattattcatggaggt

SEQ ID NO: 859889 - DNA, 98 bp, Homo sapiens
ttctctgaagttcttgactggaagaggctaaggcagctggataagcacagccaggccacagcccagcagctggtgcagctcctcagcaagcagaacca

SEQ ID NO: 859890 - DNA, 98 bp, Homo sapiens
gcaaggaggtagacatccttatcagcacagcacttattccaggtcctcagaatggttggaatgaccctccagctttgaacagagtacccaaaaagaag

SEQ ID NO: 859891 - DNA, 98 bp, Homo sapiens
catgagagggaaggaaacaagccaggtgattgtagagaaggctccaaaagccagggtgcctgatctggacaagaggaagtacctagtgccctctgacc

SEQ ID NO: 859892 - DNA, 98 bp, Homo sapiens
agtgggctcggttcgagatggagcgggcgcactgggaggtggaacgggccgaactgcaggttcctgatgttattagcagcataaggcaattatctaaa

SEQ ID NO: 859893 - DNA, 98 bp, Homo sapiens
ttaaatgatgtgttaatgtgtgccaccgtcagctcacgctgaaagtccgtattgccttttggcttctcatagaacttggagcagccttaggaggtgtt

SEQ ID NO: 859894 - DNA, 98 bp, Homo sapiens
tgtaatgtgactagacggccagccagtcatcaaacaatttacatagtacatgacgaagttaaggataaagcttttgaactagaactcagctgggttgg

SEQ ID NO: 859895 - DNA, 100 bp, Homo sapiens
ccctgtccacagtgggctctgccatcagcaggaagcttggagacatgagacttgtgtatgcggatacctgcttcagtaccatcaagttaaaagcagaaga

SEQ ID NO: 859896 - DNA, 98 bp, Homo sapiens
aacgcgcttatcagcgctatgagaaatgagagtccggagtgttgtcatgtgaagcctgccatccaggaacctccaatagttattagtgatgatgacaa

SEQ ID NO: 859897 - DNA, 99 bp, Homo sapiens
aaaaatcttcaggtccctggaataaaacagctccagtacaagcacctcctgctccagtaattgactatgaagaaatcgggagtgcactttttgactgta

SEQ ID NO: 859898 - DNA, 100 bp, Homo sapiens
gttcttgtttgtggatcgctgtgatcgtcacttgaccttcacggcatggtgcaactcccacctgcggaaggcaggcacacagatcgagaacattgatgag

SEQ ID NO: 859899 - DNA, 100 bp, Homo sapiens
gagaactacagaaacctggtctccctagatgacagcatattaaagtgagtgaccctgcgacccactctttggaccagcagcggatgaataaagcttcctg

SEQ ID NO: 859900 - DNA, 100 bp, Homo sapiens
gcctttccagcccgtggtccttctccatattcgagccagagactgctgctactttgaaacgtacgatagaggccctgatggacagaggagcaatagtgag

SEQ ID NO: 859901 - DNA, 100 bp, Homo sapiens
gagactctccttgcttggaattctgcccactctgcggagttagcagtcacgacctccagcacagtgctattaccacagctactggcactccatggtctat

SEQ ID NO: 859902 - DNA, 98 bp, Homo sapiens
ggcggtggcatctgcggccatggcggcgactactgccaaccccgaaatccttattggagaagccctcagagctcatgtcacattcatcctctttcctg

SEQ ID NO: 859903 - DNA, 98 bp, Homo sapiens
tggggcctccgcgccgcggccgttagtcatgtcgggactatctcaagcaggtgctggacattgatcttcatgctcagatccattttggcagggttttt

SEQ ID NO: 859904 - DNA, 100 bp, Homo sapiens
gaagatgtttacagtgcagtcttatcgaaggatgtgcatgaaggacagcctcttctcaatggtgaaagatgtcatgaaggatgtcatgtcggacctgcag

SEQ ID NO: 859905 - DNA, 100 bp, Homo sapiens
cctcgggggcgtacaggcgcagcggccgcagcagcagcggcagtcacaggcacatcagcaaagagagtttgccagatccggcccggtgcctgggttccag

SEQ ID NO: 859906 - DNA, 99 bp, Homo sapiens
tcagcagcttcacatgtttgcaccacgacatgtcaatctatctagccttgttcctagcctttgtgtgaccaagaatatggcccaggtgaccaaagccct

SEQ ID NO: 859907 - DNA, 98 bp, Homo sapiens
gcgcccggcccggagcccccagcgcagcggccgcgcgggtcacagaaagtcgagagagccaaatgacgattgaggagaggaagcagctcatcactgtg

SEQ ID NO: 859908 - DNA, 100 bp, Homo sapiens
cctgtccccatctctgatcctgtgcttaggttctgtacgtaactctcaggagccttctccgcagttggcttcctcggtagcttccacacggagcatgccc

SEQ ID NO: 859909 - DNA, 100 bp, Homo sapiens
accccggagtgttggtcaagagcggaggtagagggaagagctcttcagtatccccatcagccagtttccgaggtgctgagaagcacagaaactccgcaga

SEQ ID NO: 859910 - DNA, 100 bp, Homo sapiens
gccagtcggagcctcatggccttttcggctctgcagatggcatggggaggaggttgcactcagcccatgatcctggtctctcaaagacttcaacagcaga

SEQ ID NO: 859911 - DNA, 98 bp, Homo sapiens
tcagtggaactggcaatcggcccagaagaaggaatcagttacctaacggacaagggctgcaatgagtggagtcaacatatcaatggagcaagtcacag

SEQ ID NO: 859912 - DNA, 98 bp, Homo sapiens
ggagatggagcccggactcctgggggatgcagatatggctcgtggacagcagaaaattcagtctcagcagaaaaatgccaaaaagcaagctggacaaa

SEQ ID NO: 859913 - DNA, 98 bp, Homo sapiens
tttggcattcagtgggttactgaaacagcattagtgaattcatctagagaactctttcatttattcagtggtgggggaaaagtagctccagctcaacc

SEQ ID NO: 859914 - DNA, 100 bp, Homo sapiens
atctgatgaaaattctcttcattctcttggactgaacttaaatactgataggactacaggaatatgtggaagctgtctcttttcaacacttcatcaaaac

SEQ ID NO: 859915 - DNA, 98 bp, Homo sapiens
ctcctgtgagcagtgggaaaaatggaccaacttctttggcaagtggacattttactggctcaagagacgcaggtcagaatggaaatgggctgcagacc

SEQ ID NO: 859916 - DNA, 100 bp, Homo sapiens
tgcaggtattggttggaagagaatctgagtacaaacaggtaacagttaacctcttccacatgcagcatctgcaggctgcttcccttgcagacagtttaca

SEQ ID NO: 859917 - DNA, 98 bp, Homo sapiens
gtgttaaatctccttggtgtgatgtttttgacatagatgatgcaaaggaactgcaagcacatgttgaccagataactgaaatggcagcagtaatgagg

SEQ ID NO: 859918 - DNA, 100 bp, Homo sapiens
ccggagcccaaacccggggcaggcgggcagctgtgcccgggcggcacggccaggtgcagaggccaagaccgttttgcccaagaaggagaaaatgaagctg

SEQ ID NO: 859919 - DNA, 50 bp, Homo sapiens
cgggagtttgcggattttgaatataggatttctgactacatgatgctgcc

SEQ ID NO: 859920 - DNA, 98 bp, Homo sapiens
agagtggatggaggccattcaccaagccaggatcatccatgaagatggcttctccggagaagacgtgaaacagtacaagcctgttgtctacagcaaca

SEQ ID NO: 859921 - DNA, 100 bp, Homo sapiens
tatattcccctgaacagcattctatcatggaaggaggagatgaagggcaagggccaaaatgatgttgagccccatatgggggttggcaggcagcagagag

SEQ ID NO: 859922 - DNA, 100 bp, Homo sapiens
tgcattttattggtctacaaagacagcaccaaggccacctttgatgccatttctaagacctacagctacctgacccccgacctctggaaggagactgtat

SEQ ID NO: 859923 - DNA, 50 bp, Homo sapiens
tggctgccgtccccgctgctgtgcattggcaatggcaccagcatgatatc

SEQ ID NO: 859924 - DNA, 98 bp, Homo sapiens
cccacttcgacctgagctgggaggccactagcagccagttccggcccgaggacaccgactaccagcagggccaattcctgtccccccagcagcatggc

SEQ ID NO: 859925 - DNA, 100 bp, Homo sapiens
atcgagatgtagttcctgagcatgaggctcccagcagtgaggaatcatgggtaaagaaggaagacaggctgcaagaaacagtgactatgcaatagccaga

SEQ ID NO: 859926 - DNA, 100 bp, Homo sapiens
gacctcagcttccccattatttcgaggaaggaacttctagaattcctctccagagctactctcaagttatatccaggggacaggcccctttggctccaac

SEQ ID NO: 859927 - DNA, 100 bp, Homo sapiens
ttttaaatgctcccactgtgacagaagtactatgggcgtaaatccccagttgggagagatgtttgtcgtctacgaaaggcctattacaatgcccggcatg

SEQ ID NO: 859928 - DNA, 98 bp, Homo sapiens
gcagcgccccgcagggcgatggacggccgaaccccgcgcccgcaggacgccccagccagatctgcaaagcccctgagcccaaaacagtctcctactgc

SEQ ID NO: 859929 - DNA, 98 bp, Homo sapiens
cggtttgtggctggagtaggagcaaacagcaagtctaacttcaaacttgtggctgttaattcaaaactctatgccatcggagggcaggccgtttctaa

SEQ ID NO: 859930 - DNA, 98 bp, Homo sapiens
cctgagggcatcatggtcaagacttttgaagatagaatggtcaaaatgcagatcttcgtgaaaacccttaccggcaagaccatcacccttgaggtgga

SEQ ID NO: 859931 - DNA, 100 bp, Homo sapiens
ctaccaccctctcctgcgcccctgagagaggctgcttatgttcctgaggaagaattgaaggcagcagaaatagatgaagagcacgtggaggatgacgggc

SEQ ID NO: 859932 - DNA, 100 bp, Homo sapiens
gagcaactttgcagttggctacaagactgatgaattccagcttcacactaatgtatgtgatgctgatccttcagccttagccaactatgttgtagcactg

SEQ ID NO: 859933 - DNA, 98 bp, Homo sapiens
gcatgccaccaagcacaagatccccgtgaagtacctggagttaaaagcatattggcagaggaagagccctggcattccagcaggagctaacaggaaaa

SEQ ID NO: 859934 - DNA, 100 bp, Homo sapiens
cagcagtgaagatgctgcccacctttgtgaggtccactccagatgggacagagcctccattatggcatgctgaatttaccaaagaagaattggttcagaa

SEQ ID NO: 859935 - DNA, 100 bp, Homo sapiens
gaaaaaagaggagagaagaaaactgcttgggcacacgtgtaaggaatgtgaaattacacagcaggatgccaatgcctcttccctcttagacatctatagc

SEQ ID NO: 859936 - DNA, 100 bp, Homo sapiens
gagttttcatcatggataactgtgaggagctaatccctgaatatctgagaactagaagatcttctgccatctagaccggaagttcctaacataattggag

SEQ ID NO: 859937 - DNA, 100 bp, Homo sapiens
gcaaagagaggcgacggagccgctcaagaagtcgagatcgaagatttagaggccgctacagaagtccttattccgcagctctctgtacttgctcatggag

SEQ ID NO: 859938 - DNA, 100 bp, Homo sapiens
ctgacaggtccagttgcagatacaaacttggattttttccagtctgatccttttgttggcagtgaagaacaaattggttttgagctagtggagaaattat

SEQ ID NO: 859939 - DNA, 128 bp, Homo sapiens
tttgttaaagagaggatagaaattgaacagaactatgcgaaacaattgaggaatctgagaaaaaggggttgattgaaagaatctatatggtacaggatattgtttcaactgttcaaaacgtcttggag

SEQ ID NO: 859940 - DNA, 100 bp, Homo sapiens
ccacaaggactgtgaggtggccccactgcccaccatttacaaacgccagaagcaagataaagccgatcttatccgaccgaaacggaaatatgaaaagaag

SEQ ID NO: 859941 - DNA, 100 bp, Homo sapiens
atgatcggcgtgtttggatgtactttacagacaaatgctgtgcttcatgaagttaaaagagaggggctccccgtggaacaaaggaatgaaatcttgactg

SEQ ID NO: 859942 - DNA, 100 bp, Homo sapiens
acgcccagatcgcgggcgcgtttgaaatctcgccgtcggagctccagggcccacaacggcagtgtcctacatgtcggtgaaatgtgtggatgcccgtaag

SEQ ID NO: 859943 - DNA, 100 bp, Homo sapiens
gtaatggtggatgaagttgttcattgtttgtcaccacaaaaaggacagctcataccccagacaacagctttctggggtttgtggttgagcagcacctgaa

SEQ ID NO: 859944 - DNA, 112 bp, Homo sapiens
taaagaatctcctgatatgactaaaaacttccaacagtgacagagaatacccacgccttggccagatgattgtggattatgaaaaccctttaaagaagatgatggaagaatt

SEQ ID NO: 859945 - DNA, 100 bp, Homo sapiens
agtcggacaagtaagtggatcacacgcgccggctgctgctactactaccactttgggctgatggcaactgagtgtgaacatggctacgcctcttcattcc

SEQ ID NO: 859946 - DNA, 100 bp, Homo sapiens
accttttaatcccctggccgaaagtcatcctttaatagacgaggagttcaaagaaggacgcagagccagccacacagccccacaggtcctctttagccac

SEQ ID NO: 859947 - DNA, 98 bp, Homo sapiens
ggaacctattattttacagagtatttcaatattccttatgattgggaaagaatgccaagatggagttattcctgatgaagctaaagctttgtctctgt

SEQ ID NO: 859948 - DNA, 100 bp, Homo sapiens
ctgggatgcagaacatgagtattcatacgaagaccaccagcggctatgcagatcctgaacccgccgccctccccggccacggacccctccctgtacaaca

SEQ ID NO: 859949 - DNA, 99 bp, Homo sapiens
tcacaggagctgtagagaggaccccggtacatctgaaagccgggaaatgctgtctgcgagcctggctgtggtgcacatggaacctgccatgaacccaac

SEQ ID NO: 859950 - DNA, 100 bp, Homo sapiens
cgctccagaggacatgagcaaggagcagcaattttccagattattcaaagtatcaggatgggcatgtgaagtgactgaccttaagatgtttccattctcc

SEQ ID NO: 859951 - DNA, 98 bp, Homo sapiens
agaagcgggcggcgcgggggagatgcccagatgacttactcaatgccttgaatgagggtatcagtcgtgctgatgtcatcatcacatcagggggtgta

SEQ ID NO: 859952 - DNA, 98 bp, Homo sapiens
gggaaccgaggggagcctgatcctatcgttttgacgccaggtggttattaacttggtgatgcttttggctgaaatgaaaatacaggaccgcgctgttc

SEQ ID NO: 859953 - DNA, 100 bp, Homo sapiens
tgattcccgtgattgcgttacaagctttgtctccttcgacttggagtctttgtccaggacgctgtgagccgtgagctttgaggcggtgggatgtgtcagc

SEQ ID NO: 859954 - DNA, 100 bp, Homo sapiens
aaaggtcagcagtaccatgagattggcagatccatggccaccatcatgacagatgaggatgaatctggttatagatggacaagagacgatcattctgcaa

SEQ ID NO: 859955 - DNA, 100 bp, Homo sapiens
attttgacagtcgtagatacaaatttttggatgatgatggatccatttctcctattgaggagtcaacattgaccctgctacgggaatggttatgaatctg

SEQ ID NO: 859956 - DNA, 99 bp, Homo sapiens
aagctcagatttgtgttgaaaccagcctcaagtttcacctatcctcactgatccgtggacttctgtatgatcagtagagatggggtttcatcatgttgg

SEQ ID NO: 859957 - DNA, 100 bp, Homo sapiens
gtatgaccacaaacagccatcaaggccaagacccatgttcttgacattgagcagcgactacaaggtgtaatcaagactcgaaatagagtgacaggactgc

SEQ ID NO: 859958 - DNA, 100 bp, Homo sapiens
ctagaggaccgcgcggaggcagcggggtcatttaggaaatcgtaaatcatgtgaagatgggactcttggtatttgtgcgcaatctgctgctagccctctg

SEQ ID NO: 859959 - DNA, 98 bp, Homo sapiens
acaagacaacaccctgatctggcatggacatgattcctagatgaggttatgaagaagtatggcagtttggttccactcagtgaaaaagaagtccttgg

SEQ ID NO: 859960 - DNA, 100 bp, Homo sapiens
cctgagtcactgcctgcgcagctccggccgcctggctccccatactagtcgccgagataatcattcaggtcttcgtgagctaaggccaaacaaacaaaaa

SEQ ID NO: 859961 - DNA, 98 bp, Homo sapiens
gaacaaagaaaacagttacaggacatagcaactctggctgatcaaagaagagcagcccatgaacagcacattagttccagaagaaagatggaaattct

SEQ ID NO: 859962 - DNA, 98 bp, Homo sapiens
gtcagcctggcatttgacaaatgtacagcttgttcttccaaagtgctgactgggttacttttttaaacactaggaatggtaatttctactcttctgga

SEQ ID NO: 859963 - DNA, 100 bp, Homo sapiens
acaaagagaaagctgatgtaaaatcaacagcatttaccttccggtcttccaaggaatgttacgttcataacttactaaggattagtgtatattttccaac

SEQ ID NO: 859964 - DNA, 100 bp, Homo sapiens
cgagcttgtggcactgctgctacagggaacgtgtgaaagaagaattgtggggaaaaaaaagcaagcataaccaaagatcatcagcagtgaagaatctagg

SEQ ID NO: 859965 - DNA, 100 bp, Homo sapiens
taacaatccacctaagaaattcagagtcattgaagtcaacaagagagacatagtcttcctggtggatggctcatctgcactgggactggccaacttcaat

SEQ ID NO: 859966 - DNA, 100 bp, Homo sapiens
tgatatgggctacaatgggaataaaactccaagaagccaggtgttcaaggaaggatttgatgccctggatccctttattcccatcctggtttccaactat

SEQ ID NO: 859967 - DNA, 102 bp, Homo sapiens
ttttcatgcggcgtacctttggtggcaataaactctactgggctgtattctctgaatatgtaaaaactatgttacggattatgtttgagaccttcaacaccc

SEQ ID NO: 859968 - DNA, 100 bp, Homo sapiens
gagcatatgcctgccatgcagaacatgagaatgacagtgatgatgatgatgaagctgaagatgatgatgaaaccgtagagacgggatttcaccatgttgg

SEQ ID NO: 859969 - DNA, 98 bp, Homo sapiens
ttctttgttgcttcattcctcaggacagtgtcgtcgtagaaagagaacgtattggaatgaaaaaagcagagagatcttgctaagatgagaaaatgtct

SEQ ID NO: 859970 - DNA, 100 bp, Homo sapiens
agccatcgccaaatatgacttcaaagctactgcagacgacgagctgagcttcaaaaggggggacatcctcaaggagagaacattgaaagtattctctaag

SEQ ID NO: 859971 - DNA, 100 bp, Homo sapiens
gaggcctccccagccacgtgaaactgaagaagaccagctacaaggaaatacttctgaaaaatcactctgaaccccaagctggagtgaatcttctcctgag

SEQ ID NO: 859972 - DNA, 100 bp, Homo sapiens
caaaacttcaagccaaacatcaagcagaatgtgatttgcttgaagatatgagtactatactggcaattgctggagaagattttgcaattgttgcttctga

SEQ ID NO: 859973 - DNA, 100 bp, Homo sapiens
catcaaggtccagaatcttccagtacgctctacagaattatatccagatcgagagacagaagattctgaaagggttcaatgaaatgagagtcatcttgga

SEQ ID NO: 859974 - DNA, 98 bp, Homo sapiens
tggagaaccacacagcaatattgtatccgtgccatggctggggaccacagttgacgaaggatcagagattggtgtattcgggcagactgcttcccgat

SEQ ID NO: 859975 - DNA, 100 bp, Homo sapiens
ttctcaaagtcatgaacttcacaattggaaagtgtggagagcctgattcaaaagcattcctatgcacgctcacccatccgtacctacggaggagaagaag

SEQ ID NO: 859976 - DNA, 99 bp, Homo sapiens
aaatggagagtggagaattcatggggtgaagaccatggccacaaaggttgactctgccagaacaaacgttcatgggctactggacaattggtcaggcaa

SEQ ID NO: 859977 - DNA, 100 bp, Homo sapiens
tccgccagagctgcggccgccaagataacctttttcatgctgctttctgcagtgtgtgtaatgctgaatttggctggttcaattctctcttgtcagaatg

SEQ ID NO: 859978 - DNA, 99 bp, Homo sapiens
gaaaaacaacattgctacacatgctaaaagatgacagacttggacaacatgtcccaacattacatcccatgtgtttcctgtaacaaatcgttcaagaaa

SEQ ID NO: 859979 - DNA, 110 bp, Homo sapiens
tcgacagatgaaacgcatgtcaaccaaacatcagaggaataatgtggggaggccagccagtcggtctaatttgaaagagctggtgatgctgctggagtggtggtcgggca

SEQ ID NO: 859980 - DNA, 100 bp, Homo sapiens
gcaggctcagagagagcaagatcattttgtgaaagaaaagaataatttaataatgatgttgcaaagaaatatgagttggaagtaaagagggtgcaagaca

SEQ ID NO: 859981 - DNA, 99 bp, Homo sapiens
ggtcctgcagggggacagtgaggaaagggccgcctcgtctccgctcctgggggaccgcaggcaacctgtgaaaagctgaacaggtccaattctgaactt

SEQ ID NO: 859982 - DNA, 135 bp, Homo sapiens
ttcaaagttcagcaacacctgttaaagtccttgctcctggtgaattcggtaaccatagaccaaaaggaatagccaggccagaagaaggaaggcctgtggtgagtgggacaggaaatgacatcaccaccccaccga

SEQ ID NO: 859983 - DNA, 100 bp, Homo sapiens
gatggcttcttcagacccaaaggggtgcttgtgagtgaggattctgacagtgatggcattgtggcccacttccctgcccatgagaagccagtgtgctgca

SEQ ID NO: 859984 - DNA, 98 bp, Homo sapiens
ccctgtggtatggcacaagacggtaagagggagaccaaagttatcaaggaaatggtataggacgttcccaattagaggctttcagatttatgatgggc

SEQ ID NO: 859985 - DNA, 95 bp, Homo sapiens
catatttcttaaggatgttctgaagacccatgaatgtctggtcaagtctgggctgaacttcctgtactgatgctgggaagatcatctgaccttcg

SEQ ID NO: 859986 - DNA, 99 bp, Homo sapiens
tgcttttgaaccactggaaagtgaggaattttgaagtacaccgtggtgacattgtatcattggtaatgtcgtactctcaggaggctccaccatgttcag

SEQ ID NO: 859987 - DNA, 100 bp, Homo sapiens
atggaacgaaagatcctgttccaggctattctgttccagcagcagaacacagatgaacacagtatagagcatgaatttttttcatcttctctggcgacag

SEQ ID NO: 859988 - DNA, 100 bp, Homo sapiens
ttgccaaattctttggaaaagatattagcacaacactcaatgcagatgaagcagtagccagaggatgtgcattacagactcttgttcatctgatagtgaa

SEQ ID NO: 859989 - DNA, 98 bp, Homo sapiens
ggacacccaggctaactgcctcctctggtatatggacaacccccagggcagactttgacgacactgcgacatactcagcagtggccaccaatgcccac

SEQ ID NO: 859990 - DNA, 100 bp, Homo sapiens
gcaggatcaagtgatgctttttctggaagtgaggttggcaaacatgaattgactgggcataaagtagctgtgaagatactcaatcgacagaagattcgga

SEQ ID NO: 859991 - DNA, 100 bp, Homo sapiens
cagaagccactggagaaaaacggccaagaggcagacctaggaaatggctgcactgacaccctggtcctgacttccctggaggagaagtattcctgttgct

SEQ ID NO: 859992 - DNA, 101 bp, Homo sapiens
caaggatccaagcatggaatgctgccgtcgggcaactcctggcacactgctcctctttctggctttcctgctcctgggtgtggatgaatggaacatagctc

SEQ ID NO: 859993 - DNA, 100 bp, Homo sapiens
atgtgatgtcagggcctgcgtggtagctacagcaagctgggtagcaggcagatccaaaggatatcatgaagtttccagggcctttggaaaaccagagatt

SEQ ID NO: 859994 - DNA, 98 bp, Homo sapiens
tcagcatagaaagaaagccttgtaaccatcaggtagatacagcaccaacgggcaatgacatcattgcagcagccaagcgcatggctctgctgatggct

SEQ ID NO: 859995 - DNA, 98 bp, Homo sapiens
cccgccccacccgcatgctctttgtcactccccggcggcagcacgaaagtaccatacccagattgatcactatgttggcatcgcccgagatcagacca

SEQ ID NO: 859996 - DNA, 98 bp, Homo sapiens
ctcccaaagtgctgggatgacaggtcatcatcctgaaccacccggggcagattagcgccggctactccccggtcatcgactgccacacagcccacatc

SEQ ID NO: 859997 - DNA, 98 bp, Homo sapiens
gagtgcctacgcctgctcaatgagatcattgccgacttcgacgagggccttcctccggatgctcttccccgagaagctggatggagacaagaaggggc

SEQ ID NO: 859998 - DNA, 98 bp, Homo sapiens
cttcacctttgtacatcctggccgtgtttgacatctttacggaaaattctgtttgaagatttccggtcctggctttctgatatttctaaaattgacct

SEQ ID NO: 859999 - DNA, 100 bp, Homo sapiens
tatgttgacagagggtacttcagtattgaagattcagcagaaggactctccatgtttaccggagaagaggaaatctttgcatttcagcgcacaatttccc

SEQ ID NO: 860000 - DNA, 100 bp, Homo sapiens
tggaggggactatgagaggtttggactgccaggctgggctgtggcttcaagctaggtcttgactccactaacggggacttctcatacggctttgaacttg

SEQ ID NO: 860001 - DNA, 98 bp, Homo sapiens
ggatcaagtcctgttgcagatttctctgctattaaggaactagatactcttaacaatgaaatagttgacctacagagtgatcgaactgtgagaatttg

SEQ ID NO: 860002 - DNA, 99 bp, Homo sapiens
cagatcagatggtgactgaatagaagctgccccagtcctgggttcatgatgtacgctactatactggcaattgctggagaagattttgcaattgttgct

SEQ ID NO: 860003 - DNA, 100 bp, Homo sapiens
gcaaatactcctgtaaatttgagtgtgaataatgccggacttgaagattttgaaaggaaaaaaacccttggaacaggttcatttggaagagtcatgttgg

SEQ ID NO: 860004 - DNA, 99 bp, Homo sapiens
caggagctggcgtctctggagaaagtttttcagaagaagtgaagtcaagatgaagaaccatttgcttttctggggagtcctggcggtttttattaaggc

SEQ ID NO: 860005 - DNA, 98 bp, Homo sapiens
gaagacttcagcttgacctcaacactacaacaacaggagtgcaaacttctctacagccgaaaagagggtcaaaggcaagaaaacaaaaacaaaaatag

SEQ ID NO: 860006 - DNA, 98 bp, Homo sapiens
ttagtggctgctaaacttgaaccgaaaagtgaacagcagagaatttcaaaggaccttgctaatatctgtaagacggcagctacagcaggcatcattgg

SEQ ID NO: 860007 - DNA, 100 bp, Homo sapiens
gctgtagattttgtttcaaggaaagcatcttcatcttctctagtttcatcatgtatagatggagattccgatgcagatgatgattattccccaccttcta

SEQ ID NO: 860008 - DNA, 99 bp, Homo sapiens
ggcaaaggagcagccatgagggccgggcccagtcaccgaccgtgaagatcatgacggagaaggaactcctggccgtggcttgtgagcagtttctgggta

SEQ ID NO: 860009 - DNA, 100 bp, Homo sapiens
tccttttagacagttccagatgaatgaccaagacggagttgtggaaagtaaaaatgtagccctaccaaaaggaactattgtactggcttctccaggctgg

SEQ ID NO: 860010 - DNA, 98 bp, Homo sapiens
aatgaatatttgagctcattcaaagtggcccagtatgtggtacgggaagaagaaatggggcttggattccttagcaccaccacagctcagccagaaca

SEQ ID NO: 860011 - DNA, 99 bp, Homo sapiens
tataattgaaaaacagtaaagatggaaaaccagttattgaatatcaagaggaggagttgttggtgaatctttgtagcccctacttgttactgagaagag

SEQ ID NO: 860012 - DNA, 98 bp, Homo sapiens
atatctttgaaattctacaggagcgtcaacctgatcttaccaggaatcactcactcaggatcacagaagaactgcagcttcctggggagcagtttcac

SEQ ID NO: 860013 - DNA, 99 bp, Homo sapiens
ggcgctcgagggtctttgatctgcagttcagcactgactcacctcgcttattggcctccccctccagcaggtggtgttcccactgatgaagagcaggcg

SEQ ID NO: 860014 - DNA, 98 bp, Homo sapiens
gcgtacgcctatctcttcaagtacatcataatcggcgacacagaccactttacctgcattgtgaaggtactttttaccctactgtacacacaggctct

SEQ ID NO: 860015 - DNA, 100 bp, Homo sapiens
ttgtagctcaaaagatctgcagagctcccagggcggacagcagcctcgggtgcaatcctggagccccccagtgaggaaggggtagaagagccatccaaaa

SEQ ID NO: 860016 - DNA, 99 bp, Homo sapiens
tacgaggagggctgtcagagcctcatggagtacggcttgaccatttgtggacataattgcctcctgacggcagaatggatgtctgcaagtaaaatagta

SEQ ID NO: 860017 - DNA, 98 bp, Homo sapiens
gtgtttgaaggagaagagagcaagtgtaagacgaatggaatgcaagccttttctcaaggtcttaatgagcaacagcaacagcagtctccagttaagaa

SEQ ID NO: 860018 - DNA, 98 bp, Homo sapiens
cgatgatgagtggatgggggtgagcctggcccgacagcccaaggctgatggccgtgtgttggagcatccccccggtccttcagaatccaaacacgctt

SEQ ID NO: 860019 - DNA, 99 bp, Homo sapiens
ggaccattaatggacaaaaacatgagtcaatatgtattgtggcattcaaatcctagcactctgggagagagatcacttagatgatccactggatgatac

SEQ ID NO: 860020 - DNA, 98 bp, Homo sapiens
actgggaacatgcggcaagaggccattgaccgcttcaatggcaggtcccttatgatgaaatctctgctgttcatcagcatagttatcatccgtcagga

SEQ ID NO: 860021 - DNA, 102 bp, Homo sapiens
cgggacaccgcacagccgggaaatgcaggtagttccaatttgccagcagaatgagtacagaaagagactcagaaacgacatttgacgaggattctcagccta

SEQ ID NO: 860022 - DNA, 100 bp, Homo sapiens
gtcagtatttgaggagaaagcatttggacaaacatgctttattagatgtaacaccaaatgcagttgatcgtcttaactatgcccagtggtatccaattgt

SEQ ID NO: 860023 - DNA, 98 bp, Homo sapiens
gacgactgcctggcgcgatacaaaaatcttgagtctactgaaagcatcctgcaggaagctacatcatccatgtctttgatgacccagtttgagcagga

SEQ ID NO: 860024 - DNA, 98 bp, Homo sapiens
tggagaaattgtcagaaacttacagcaacagggtcagctccatttcccctggctctgcaacgcttctcagtagtgacctgaaacatatcacgaagctg

SEQ ID NO: 860025 - DNA, 99 bp, Homo sapiens
aaacttcccctggggaccgaagaaagatcagccctttttggaaacatacaggatatctaccacttcaataggggcatatgatattttcctgaatgcaaa

SEQ ID NO: 860026 - DNA, 101 bp, Homo sapiens
ctattcaatacttctcctctcagatgatagtaaagatcaaaagaattcgaagggagttggtaaacgctggctcccagccaacctctgataaaccctcccag

SEQ ID NO: 860027 - DNA, 98 bp, Homo sapiens
accttcgcgattacactggatcagaaacaggccatggagggacaggatccggaggcgccagctcaacctgcatgcaagatatgggaaatactaaagca

SEQ ID NO: 860028 - DNA, 98 bp, Homo sapiens
tcttgggactttcttggccatcccctgaagaatcataattcacttattccaaggaaagatacaggtttgttggagactgaaccgttgcaaggaacaga

SEQ ID NO: 860029 - DNA, 101 bp, Homo sapiens
cctggtccaaggctgagaacgacttcggtctggatgtgatggagctgcttgaagaagatctcacatgccctatttgttgtagtctgtttgatgatccacgg

SEQ ID NO: 860030 - DNA, 100 bp, Homo sapiens
ttggactgtgggcatggaatgaaaaatcaagagaatccatcccattaaatgacctgaagtcagaagtatcaccacggatttcagcagaggacctgattga

SEQ ID NO: 860031 - DNA, 115 bp, Homo sapiens
acgctgccccccgacgagatcttccgcaacctggagaacgccaagcgcttcgccatcgacatagggactttgaacatgtcggggatcgccctcagcagactcgcccaggagagga

SEQ ID NO: 860032 - DNA, 99 bp, Homo sapiens
ctgctctgaggactacgacagtcaccgcaggttcgaagctggagaagaagcaggcgctccctccattccagccacagatcacagacgactacggtctgg

SEQ ID NO: 860033 - DNA, 98 bp, Homo sapiens
aaaacggaagcgcagggagaaggaagaggtgtttgaaaaggtggtactgtgaaggcaaggagcttgaaaattccccagatattcacatcgtccaggca

SEQ ID NO: 860034 - DNA, 99 bp, Homo sapiens
aaggaaattattagatgaattgtcagacccagaatcttcactgagatctgtatctgtggacctgaatgttgatccctcgcttcagattgacatacctga

SEQ ID NO: 860035 - DNA, 100 bp, Homo sapiens
tgtgagtgccgcctggaggtgcgaggttttcttctggaggcaaaaaattaaaccaaccatctcaggacaccctgactccaagaaacactcattgaagaag

SEQ ID NO: 860036 - DNA, 100 bp, Homo sapiens
ctcctttaccttgtggaaatgatttcctcaggactccagattatctacaacactgatgagcctctcttctagatcaagtcatgtgacaagttcttgccaa

SEQ ID NO: 860037 - DNA, 100 bp, Homo sapiens
ccggaccggctggttccccagcaactacgtgcgcgaggtcaaggccagcggttcactttgatggctggaacaattgctatgattactggatagatgcaga

SEQ ID NO: 860038 - DNA, 98 bp, Homo sapiens
tggagtatactccaggagagcatgaatatggattatttccagcgcccattcatgttggaaaatttgagaatggtgttgcagaaggaatggtggatcca

SEQ ID NO: 860039 - DNA, 100 bp, Homo sapiens
tcattccatccaaggcagtgaaaaactatcacattaacaattgcaggcctatggcatgtctgcgttacctttaaatctgataaaaggcactagaagcgct

SEQ ID NO: 860040 - DNA, 100 bp, Homo sapiens
ttaattcttccactgatatctcaaaaggtgatctggacaaaggaacaggtatctcagaagctaaaccagccccagaaatatttgaaaatgaagtcatggc

SEQ ID NO: 860041 - DNA, 100 bp, Homo sapiens
accctctcaggaaagtctaagttcatcaaaatcggatacagatacaggggatgcctcattgatggacatgaactccttcagccctatgatgccaacatcc

SEQ ID NO: 860042 - DNA, 99 bp, Homo sapiens
ttgaaaataccatctccgtggatcggccagtgatctccttgtcacacacatcctgcaaatcacagtcttgtggagatgactctcattcgtcctcgtctt

SEQ ID NO: 860043 - DNA, 100 bp, Homo sapiens
atttaatccagaagtatttcaaccacagatggcactgccaacagattgtagaaggcatgaaacaaaaaatgtggagtattgaaaatattgccttcggttc

SEQ ID NO: 860044 - DNA, 98 bp, Homo sapiens
gcagatcgagaccgggcccttcctcgaggcggtgtcccacctgccgcccttcttcggtgtacaacccgagaataagagcaaactcgctcgtcatgcag

SEQ ID NO: 860045 - DNA, 99 bp, Homo sapiens
aagaactgtgaagagaggagttgagaacatctctgttgacattcattgtgcttccagataagacaattgcaagccttgtaaaatattactattcttgga

SEQ ID NO: 860046 - DNA, 100 bp, Homo sapiens
tattctaactgtagcccttcctgtgttcctggttatcctcttctgctgttctggaaagggcttctcaaatttaataactatggaatcttatcagaaagtc

SEQ ID NO: 860047 - DNA, 100 bp, Homo sapiens
ctcaccgccctcaccacccctatccagacggctgcccttcaagtaccaagaatggatcttggagaatgtctgaaagtccatgacctggctttaagagcgg

SEQ ID NO: 860048 - DNA, 99 bp, Homo sapiens
atacgctttgttggtggactactctcagcctactatctgtctggagaagaggaaaaccagtagattcccagacatcgcgaagtgaatctgaaattgtgc

SEQ ID NO: 860049 - DNA, 100 bp, Homo sapiens
ggaaatatggcctcaatatgtgccgccagtgtttccgtcagtacgcgaaggatatcggtttcattaagagtctgaaaagtgtcgaagagacagttttcag

SEQ ID NO: 860050 - DNA, 101 bp, Homo sapiens
tccttatccaatcccttaccggtgtccaggaggctgtggtgagctgcttgaacaaacagactcgggagcctgctgaggagaacctgtgcgtgaccagccgc

SEQ ID NO: 860051 - DNA, 100 bp, Homo sapiens
aaacttttgcccttatcagtaacacctgagacattccactgcccttctcccaaaaagatgtcttttcgaaaaatggatcccagctgtacaataggatttt

SEQ ID NO: 860052 - DNA, 100 bp, Homo sapiens
cttccggtggctgatcttcaggatcatgcttggagcacgtttgcctcagcatggagggcggggccgcggcagccacccccacagcactgccttactacgt

SEQ ID NO: 860053 - DNA, 100 bp, Homo sapiens
cgagcagtcgcacctggaggttcagctggtattcgatggtctcagatgcagaaacagaaagcattttcatggaacccattcacctctcctcagccattgc

SEQ ID NO: 860054 - DNA, 98 bp, Homo sapiens
ccgagatcatcctgggcctggagcacatgcacaaccgcttcgtggtctaccgggacctgaagcctgagaatttgcttttagctagcaaatccaaggga

SEQ ID NO: 860055 - DNA, 100 bp, Homo sapiens
cttcgagaaatctcgtctcgaccaagagctgaagctgatcggtatgacaacgaatttggctacagcaacagggtggtggacctcatggcccacatggcct

SEQ ID NO: 860056 - DNA, 100 bp, Homo sapiens
agagaggccatcaagcagatcgaggtgctgcagcacgtggccaccaacctggggcgcatcccatgaagctgaggtcttgaagcagctggctgagaaacga

SEQ ID NO: 860057 - DNA, 100 bp, Homo sapiens
tccgatctcaaagactttctggagagcatccgcaaacattcagacaaaattggagagactgccatgaagcaaatctgggacataggaggacaaccccgat

SEQ ID NO: 860058 - DNA, 100 bp, Homo sapiens
atgtactggtgtgtggggccggaggagtcagctgtgtgtccagaacgtgccatggagacgcttaacgggatcatagacggtatttctatgtaaacgaaca

SEQ ID NO: 860059 - DNA, 98 bp, Homo sapiens
cgatgaaattgccacgtatatgggtgaaatcaaaattgctgtttctattgaagatgaagccaacaaggacctgcctccggccgctctgctctataggc

SEQ ID NO: 860060 - DNA, 98 bp, Homo sapiens
ttgcgggatactgcagttacctcctggcagggggctgccagaaacgctccttctcgattattggtgcagattcactttataggaacagcttcagcttc

SEQ ID NO: 860061 - DNA, 100 bp, Homo sapiens
atttttctacaccaccgccacactcatcatagccttcacctctgcagggagaaaactggttgtcctggatgtttgaaaagttggtcgttgtcatggtgtg

SEQ ID NO: 860062 - DNA, 116 bp, Homo sapiens
cacctcctcgccagcagccgtccggagccagccaacgagcggctgacaaacgggctcatcataatgcactggaacgaaaacgtagggaccacatcaaagacagctttcacagtttg

SEQ ID NO: 860063 - DNA, 100 bp, Homo sapiens
actatagtgcacaactgtttaattggctctggaaacctcctacctccgttgaaaggagagccagttactaacttcaaagaatggctcaagaagtactgac

SEQ ID NO: 860064 - DNA, 100 bp, Homo sapiens
atttgaaaattcatgctgaaaaactgagtgaatatgatcagatttctccaccaaattctcagcctgataaggatgagaactggactgatgaccaactgct

SEQ ID NO: 860065 - DNA, 99 bp, Homo sapiens
ccacagcagcctcccaaggagtctgcaagttggaagaggcagaaatccaggcagaacttgaacgtttggaaagagtcagaaatcttcacatacgtgagc

SEQ ID NO: 860066 - DNA, 100 bp, Homo sapiens
agcaacagtagtcgctgttggatcgggttctaaaggaaagaattctgtagcaaagccaatacaaaaatcagctaaagctgccacagaagaggcatcttca

SEQ ID NO: 860067 - DNA, 100 bp, Homo sapiens
cgacgacgacgaggaagaggaggtttctgaggagtccaaaactacttacctggaagaccttccaccaccccctgagtatgaattggccccgtccaagtta

SEQ ID NO: 860068 - DNA, 100 bp, Homo sapiens
cccactttggctgcaccattggcctgaaagattctgtgactgcagtcgtgttcgtcgcacttggaacatcagtgccagtaacagggggtatcacagaaga

SEQ ID NO: 860069 - DNA, 98 bp, Homo sapiens
tcaaggatatgctgtattcagctcaggaccaggcaccttctgtggaaggacatgaaagatcagatgtcaacttcatctgtgcaggcattagctgaaag

SEQ ID NO: 860070 - DNA, 117 bp, Homo sapiens
caactttggaggtggaaacactgcctgggaggaagagaatttgtccaaatacaaagacaggtggtctgtttttctggggggccaccaacacctcccgtgaatctaccatgtacccaa

SEQ ID NO: 860071 - DNA, 100 bp, Homo sapiens
catgatacagttgataaaattgttgagttaatgttctcctcagaggtggaagaatatcctgataaagagaaagaaatcaaagcctcttcataataccagc

SEQ ID NO: 860072 - DNA, 98 bp, Homo sapiens
ccagaatcttcccaacctcatgaatctcatcgccaccatctttgtctttgcagtggtcatctatttccagggatgaattgtaaaagcaacatcagctt

SEQ ID NO: 860073 - DNA, 144 bp, Homo sapiens
gtagaacagctatctcgggagaaacaacaactgctacatctgttggaggagccaactagcatggaagtgcagggaagtcgagataacatgagtattgtactagtttgcttttcaaatgctcccaaggtctcagatgaagcggtg

SEQ ID NO: 860074 - DNA, 98 bp, Homo sapiens
gcacccgaatgctgcccgggtgaggtgaacacacaggatttcagaggattagtgcgggaggatgccgttctctacctgttagaaatccctaaaggtga

SEQ ID NO: 860075 - DNA, 60 bp, Homo sapiens
atggactgtattctggccctacctcggttctaccaggagcatggggaagtgattgactgt

SEQ ID NO: 860076 - DNA, 99 bp, Homo sapiens
atttttggatgatgatggatccatttctcctattgaggagtcaacatggaacagatttggagttgaggctggtcaatggagacggtccctgctctggga

SEQ ID NO: 860077 - DNA, 99 bp, Homo sapiens
aatatttagaatgcaggatggagagggccatgaagcccccaggaggagaatcgagcaatctttttggaagtccagaagaagctactccttccagcaggc

SEQ ID NO: 860078 - DNA, 98 bp, Homo sapiens
gagactatgcaaaacaagtttatcacctcacgattttgatgaatgtcgatttgatattagtgtaaatgatagtgtttggtatcttcgtgctcaggatc

SEQ ID NO: 860079 - DNA, 100 bp, Homo sapiens
ggctgaattggagctcgtactgagaaaatacaaggagctggacatcgagcctgagggaggggaaaggcgcagggcaggtgacagcagggacatgtctcgg

SEQ ID NO: 860080 - DNA, 98 bp, Homo sapiens
atggcaagaggatctcctcctatgatgacagcaaattcaacacccaacagcttccttaatagcaaaggtagcaacagcccaggatgatataactggtg

SEQ ID NO: 860081 - DNA, 100 bp, Homo sapiens
caagtgatgggcagaaggagagaaggtgttttggatgcattctagaacacaggcaaagcaagttctccttgaaaacagcctgcattgtgagttggggcct

SEQ ID NO: 860082 - DNA, 100 bp, Homo sapiens
attattatgcagcatctccaagaatatttccacatttgtgttctctgtgtaacgtagaatgtagtcatttgaagcattcgttcagtcagagagcataata

SEQ ID NO: 860083 - DNA, 98 bp, Homo sapiens
gtctgctcgccctccgacgctgctcaggcctcattgctacgatttcagagtaccctggtaatagctgagcatgcaaatgattccctagcacccattac

SEQ ID NO: 860084 - DNA, 100 bp, Homo sapiens
agctttaccatccctggaggagacctggcagcaggaaccaaagaggttgttgtaaatgtggatgatgatggagtcatttcattgaacttcgagtgtgata

SEQ ID NO: 860085 - DNA, 100 bp, Homo sapiens
ttatgtatggagaggatccaagcaatgccatgccggtacccactgatggtaatgctggcctgctggctgaaccccagattgccatgttctgtggcagact

SEQ ID NO: 860086 - DNA, 100 bp, Homo sapiens
gaaattaaagcagaaagaaagctgcggcctgtatcaccagaggagattagacgtagcagattagaatgcctctctgtatggaacataaaatttcaaacac

SEQ ID NO: 860087 - DNA, 100 bp, Homo sapiens
agactatgacactatggggccagaagccacgatccagaccgcaattaacaatggtacagccaagaaggatcaagaaggtggagaagaaaagaaatctgtg

SEQ ID NO: 860088 - DNA, 100 bp, Homo sapiens
acctttcggcttctgagacggcggcagcagcggcattcaggattttttatcaagcagaaatgcatcgaacaacgagaatcaagatcactgagctaaatcc

SEQ ID NO: 860089 - DNA, 100 bp, Homo sapiens
aaaggatgctctctgctcgtgcctcaaacgcttggattctacagcaacatattgacgttccatcctcagagcagcctgaactgttcctaaagaaacttca

SEQ ID NO: 860090 - DNA, 105 bp, Homo sapiens
ggagctacagctgcgggagagccgggtaccggccgtggaagcggccaccgactactgtcagcagctgtgccaggcttgcagccaatttactggagcagggatgac

SEQ ID NO: 860091 - DNA, 98 bp, Homo sapiens
tggcaagactgtttgtgttgcgggggccggacttcaagacaaatggacacctaccagggaacggagatgtgtatcaagaaaggctggcacgtttagaa

SEQ ID NO: 860092 - DNA, 100 bp, Homo sapiens
cacaaagctgctagcagaaaatcaaaacgctgattaaaagaagcacggtgattgtagagaaggctccaaaagccagggtgcctgatctggacaagaggaa

SEQ ID NO: 860093 - DNA, 100 bp, Homo sapiens
agatcactcttaaggaaaccttcctgacgtcaccagaggagctctatagagtgtttaccacccaagaggacaaggagactggctttcacagaggtttggg

SEQ ID NO: 860094 - DNA, 100 bp, Homo sapiens
gagcgcatcgaggatttggcgctgcagaaccagatccgggagcacgtcatctccatcgagggtcatgttggcagcttcctattggtctcttctggcccca

SEQ ID NO: 860095 - DNA, 100 bp, Homo sapiens
tgtctgggataatttcagttcatctcctttgtgcagtttctgagaaaggtgccaacctggattcactggagcaagatgtactgagaatgtgcccatgaaa

SEQ ID NO: 860096 - DNA, 100 bp, Homo sapiens
tgagagctttattaccagacatgatctttcaggaagagagaagggcacagttacctaagtatcaacgtaatcttcctcggccaggacaggcccccatcgg

SEQ ID NO: 860097 - DNA, 100 bp, Homo sapiens
ttccggatcaatccagatggcagccagtcagtggtggagagtgaagacatttccacctggacacctgaccatgtgcctgccctgagcagcgaggcccacc

SEQ ID NO: 860098 - DNA, 133 bp, Homo sapiens
ctgaggctctcaaagatgcccaggagaagctggagctggcagagaaaaaggccaccgatgtgtggactggaccctgggcacctcacatgaacagtgtgcatatgaaccagcttggctgatgaggatcagcttg

SEQ ID NO: 860099 - DNA, 99 bp, Homo sapiens
tttctctctgcctgatttctccaaaatttggaaactatttattgccttctctcagcacagcaattttatggacctggtacagttcttcgtgactttctt

SEQ ID NO: 860100 - DNA, 99 bp, Homo sapiens
cgggaccgggaccgccgccgccgccgccaccatgatttataatcgcttagatacaaattgctgtggattcagacctcgcaaggaagatgcctgtgtaca

SEQ ID NO: 860101 - DNA, 100 bp, Homo sapiens
aagctgaaactgaggatgcagaaggcgctgaacaggcagtggctgtgggacagatgatgtctaccatgttctacccactggtcacctttgtcctcctcct

SEQ ID NO: 860102 - DNA, 100 bp, Homo sapiens
aggaaaagtgtttggggaattggctattctttacaactgtacccggacagcgaccgtcaagatgctcatcatcactgtaggggacctttgaaagagctgc

SEQ ID NO: 860103 - DNA, 98 bp, Homo sapiens
attatgtgaagaattgcttccggatgactgaccaagaggtcctcagtttgcagaagacccctcccagttgccttcaactcagttaccttcctcacctt

SEQ ID NO: 860104 - DNA, 100 bp, Homo sapiens
aaggaagaagggcagcaggagaatgggcccattttcttggataccaaggacctactctatactctcagtggcttaggctggagtgtagtggcacaatctc

SEQ ID NO: 860105 - DNA, 100 bp, Homo sapiens
tcaacgcacgtctgctcggagatcatttgggagatccaagagattcagtatcactcgctcccttgatgatcttgagattcaaccctatgaaaagataaag

SEQ ID NO: 860106 - DNA, 100 bp, Homo sapiens
cgcgccttggaccccgcctccctcccgcgcgtgctgcgggtctgctcgggggtctacttcgaggacacaactcatgtacaaatgggccaagccgaaaatc

SEQ ID NO: 860107 - DNA, 100 bp, Homo sapiens
tatttgacaagctgttatctaaggctggacgtaaagaaagaagtgatgcactcaattctgcaatagataaaatgaccaagaagaccagggacttgcgtag

SEQ ID NO: 860108 - DNA, 100 bp, Homo sapiens
ggacatcgtgtaccggcagctgaatgcagtagaagactcagaaagtggtgtttacatgcgattcatgaggtcacacaagtgttatgacatcgttccaacc

SEQ ID NO: 860109 - DNA, 100 bp, Homo sapiens
agagggtgatagaagaggccaagactgcgttcctgctcaacatccagttttacatgtggcacccataaaagatgaggctgagaacacggaaagcttctca

SEQ ID NO: 860110 - DNA, 100 bp, Homo sapiens
ttccctgtcttgggaaaaggagaactcctgactgattagcattcacaccaggttggaaaagagactgttcaaaccactgaggatcagattttgaagagag

SEQ ID NO: 860111 - DNA, 99 bp, Homo sapiens
ggcggaggcagcggagccctgggccatcgacatatgtagagtgtgtcggtcagaaggaacacctgagaaaccgctttatcatccttgtgtatgtactgg

SEQ ID NO: 860112 - DNA, 100 bp, Homo sapiens
cgggcgggagaacggaaaactcccaacttcctgcctgtgggccaaagctgaccaactcccccaccgtcatcgtcatggtgggcctccccgcccggggcaa

SEQ ID NO: 860113 - DNA, 98 bp, Homo sapiens
actgctactgcaagcgtctggtgacaggacagcattgtgaccagtgcctgggtctaaaattcccaggactccacagctttgcaccagataagcctgga

SEQ ID NO: 860114 - DNA, 98 bp, Homo sapiens
cggcgggactgcggcccgtggcggcgtgcgcggggacctgcgctgactaggtccggggaagagttgtgccttttactggggatttacttcttggattg

SEQ ID NO: 860115 - DNA, 100 bp, Homo sapiens
gtcaaaccggagagaatgacatgaacaaacggagacggaagggcttcaccaacctggacgagattatgtttgagaccttcaacaccccggccatgtacgt

SEQ ID NO: 860116 - DNA, 98 bp, Homo sapiens
tttgcaactctcatgttctgtgcattgcaagtgtgccagcggaaaccctttctgtgagtgggattccaaatgctaggaagctaggggagcctatccga

SEQ ID NO: 860117 - DNA, 125 bp, Homo sapiens
cttggcagcagaaggatttggcaacagactttgtttcttggagtccacttccaattccaaggtgaaagaccttttatgtgtgaaacatgtggcaagagttttgcttctaaggagtacttaaaaca

SEQ ID NO: 860118 - DNA, 100 bp, Homo sapiens
attgccaaccggagttccccaagcagacaagaagctacagtggatggaaactctgtgagaattgtggagaggtcttcagtgaacagttttgccttaagac

SEQ ID NO: 860119 - DNA, 100 bp, Homo sapiens
cacctacagccccgacgaacatttctgggtgacactcaacaggattcccgatctccaagaggtttgtctcattctccttgggctgtaaaaaagattaatc

SEQ ID NO: 860120 - DNA, 100 bp, Homo sapiens
acaaattcatcccagaaatctaagaggtctcggccttgaaaaataaactgaagaagcagtctacagctacgggtgatggagtagctagggcctttcttag

SEQ ID NO: 860121 - DNA, 98 bp, Homo sapiens
gctgctgctgctgcccgcgtccgaggctcgcgggcggcgggcccgggtggccctggtacagtggacggaaagtgtgggcttaaccctggtgggccgag

SEQ ID NO: 860122 - DNA, 100 bp, Homo sapiens
agttactctgaagggcatcatgcatcttactgaagcctacgctcactccccaacccatcccaacattgacatgctatctgtggacaaatagcagttctca

SEQ ID NO: 860123 - DNA, 100 bp, Homo sapiens
gagccaccacgcccagcccggccagtttgtgaagaaatatgggaacctttttagcttggagcttggtgacatatctgcagttcttattactggcttgccc

SEQ ID NO: 860124 - DNA, 98 bp, Homo sapiens
gcttgctcagtgagggtagctggtgcagaagccattttttaaacttaggtatttaagtactgaaagtaggagagaagtttgctgaggaatgccttcaa

SEQ ID NO: 860125 - DNA, 95 bp, Homo sapiens
ccgggaatccgcaaggacgctttcgccgacgccgtgcagcgggcccgccagtgcaccgtccaggtgaggttagagctggggcatcgcgcccaact

SEQ ID NO: 860126 - DNA, 101 bp, Homo sapiens
caagaacctggcttttagctgaactaaggagaaagtcctacaacagtttggcgtgcaacatggggcttgagaaaggcttaagatctccttcagcgagacag

SEQ ID NO: 860127 - DNA, 100 bp, Homo sapiens
acggtgcaggtggtggatgggatggtgcatccttacaaagacatcacggctgcagccctggctacgggtgcctgcatcgtaggaatcctctgcctccccc

SEQ ID NO: 860128 - DNA, 98 bp, Homo sapiens
ctgcccagatccggccaaggacctcagcagtggagggaaacagcgatgagctcgatgagccgatcaagactgtgtttgccgatgtggcttttgtcaag

SEQ ID NO: 860129 - DNA, 100 bp, Homo sapiens
tgaactggcgggtgtggacgccactacagttcatcaacatcaactacgtccctctgaagatgcatagctctcttaggtcccttcgtaatagtgcagctaa

SEQ ID NO: 860130 - DNA, 99 bp, Homo sapiens
gaaatggccgctgtgtggttgcaacggagataaattcccggaaccgcgattcggcgtgtcaggataaaagaatcagagtgtctcaacccttgacaagag

SEQ ID NO: 860131 - DNA, 98 bp, Homo sapiens
aggatcgttgatcagcattactcccacaaggggaaggtgtggctcattgactttaatccatttggtgaagtcacagattcactgctgttcacctggga

SEQ ID NO: 860132 - DNA, 100 bp, Homo sapiens
catgcatttattgatctgactgaagattttacagcaggattcactccttctccagttgcacagccacacccttcagctggccttaatgttgactttgaat

SEQ ID NO: 860133 - DNA, 100 bp, Homo sapiens
cctgccaatgttgccaccactcttcccatcaggaataaaggctatggtgaactaaacggtaatgctggagaaagagaaatatctttaaagaacctgagtt

SEQ ID NO: 860134 - DNA, 99 bp, Homo sapiens
tgcaaacgcggcaatggtctcatcaaggtgaacgggcggcccctggagatgattgagccgcgcacgctacagtacaagaaagtggatctcttcagcctg

SEQ ID NO: 860135 - DNA, 101 bp, Homo sapiens
gcgatgagagagtctcggtcctgatacttcttagcgctggtgtgcaggtactaccgctgtgaccgaaacctggtgtggaacgcaggcgcgctgcactacag

SEQ ID NO: 860136 - DNA, 99 bp, Homo sapiens
tatgtggaccctgcggaatccaccggcgcagtttcatctagcgactgggagagataatgcatgtgagaaaacttcatatatgtttctacgaaaggaact

SEQ ID NO: 860137 - DNA, 100 bp, Homo sapiens
ctctgtggtgggtccctcagcccttctgagctctgtgctgaacaaggcatgaattgctggaggaagcccggagacaaggtttaccttttgcccaatggga

SEQ ID NO: 860138 - DNA, 100 bp, Homo sapiens
aagtacaattctattgcacatcaatgatatcatcccagaaaatatttacaccagcagctccagttcataccaataaagaagatcctgctacccaaactaa

SEQ ID NO: 860139 - DNA, 100 bp, Homo sapiens
cctctttgccgccgtctcctcctcttgcccgcgcaggcacccctctggctgctcagtcctgcctcaggattcactccttctccagttgcacagccacacc

SEQ ID NO: 860140 - DNA, 99 bp, Homo sapiens
gctgctcctgtacgtagtcacggtcttgtgctctaagctgactcctgagttctcacaacgcttgaccaataagattcgggagcttcttcagcaaatgga

SEQ ID NO: 860141 - DNA, 100 bp, Homo sapiens
attaatgttacctcaactgacagtgaagtggagattgtaacagttggagaaagctatcgggctcgtgcaatccgcttcagacaggatggtaacgaagccg

SEQ ID NO: 860142 - DNA, 100 bp, Homo sapiens
tggatttaccttatcccctcaacaacttttcagtggcaaaattctgcttggtcagaatcgtgatggcattgtgttcagcactgatgactattttcaccat

SEQ ID NO: 860143 - DNA, 99 bp, Homo sapiens
agactttgaacgcactcctcagagtccgactctcccacctgctaaggctggactctgtgaagctgagcaggagcagatgcggaagatcctctaccagaa

SEQ ID NO: 860144 - DNA, 100 bp, Homo sapiens
tttttataaagatgaaaagatctccaaagaaccaaaaggatcaatatttctggattcctgtatgggtgtcgttcagaacactcgtgaaactgctcaggcc

SEQ ID NO: 860145 - DNA, 100 bp, Homo sapiens
aagatgactgtacaaaggataataaactagttgagaagcagaacccagctgaaggactgcagtagaagactcagaaagtggtgtttacatgcgattcatg

SEQ ID NO: 860146 - DNA, 98 bp, Homo sapiens
gacttgctctttcaaaactgcagagttgtgatctctttgatgagtttgacaactacaggccaaatttgagcaccttaagagacttcaccaagaagaga

SEQ ID NO: 860147 - DNA, 100 bp, Homo sapiens
aacgaatgggacaagatcccgtccatgaatcagagccaaatctcctcagccacctgttgaagaagaagatgaacacttcgatgacacagtggtttgtctt

SEQ ID NO: 860148 - DNA, 100 bp, Homo sapiens
agaggccagctgtttttgaggatcctgctccacagagaatgctctgcacccgttgattgtaaacaggaacatcgataagtagtgtaaaaacttgcacaat

SEQ ID NO: 860149 - DNA, 98 bp, Homo sapiens
gctctcgtctggtttgatcacaagacgggcaagtcaggtgacacacagtcttttgcacagaagctccagctccgggtgccctccgtggagtctttgtt

SEQ ID NO: 860150 - DNA, 99 bp, Homo sapiens
cccagtcctcggtgcggcgcggccaggaaagaccacagcaagattctttcattcgtctcctcctagcctgggggaccaggctcgaactgaccctggaca

SEQ ID NO: 860151 - DNA, 98 bp, Homo sapiens
cagcatcatcctaaggacgcagctgtctgtgagggtccatgcctgcatcgatgagtataggatcaaaccagtggaagaggtcaaatacatgaaaaatg

SEQ ID NO: 860152 - DNA, 100 bp, Homo sapiens
tacctgtcggaagcttgcagccctgtgccttgacaagagcctcatccacaccgtgttgctgcaaaaggactatcagggtgctgttggcccaaaggttgcc

SEQ ID NO: 860153 - DNA, 100 bp, Homo sapiens
aagactctcaggcatgccatcatcattgggctttgtgatcacaaccactttctctgctaccaggtgcacttacagagtgctacgatgaactggggaacag

SEQ ID NO: 860154 - DNA, 98 bp, Homo sapiens
gatccgctggagcggagccggccgtacgcggtgctgcgagggcagaacctgggtacaggtttgcagattccgccagcagcacagcaagctctacagat

SEQ ID NO: 860155 - DNA, 100 bp, Homo sapiens
cctgaaagctcaccagtctcactctgcagatggaggaagccttgtaggagaagtaaatgaagatggggagatgactggagagaagatagcctatgtgtac

SEQ ID NO: 860156 - DNA, 100 bp, Homo sapiens
caaagaaggagacgtggggtcactggtgtatgtcatggaaggtttcaagtgccccatttgctccaagtctgtggcttctgacgagatggaaatgcacttt

SEQ ID NO: 860157 - DNA, 100 bp, Homo sapiens
ccatgataataacataattcacagggatgtgaaggatttgtactgtgttcgcagtgacctggggaacctgctcaaagccctgggtcgcttggaagaagcc

SEQ ID NO: 860158 - DNA, 98 bp, Homo sapiens
cccgggagctcttcttcatcaacatgtggcagaaggttgtaaagctctctgaaatagtgaccttagcgaagcaagcacatgtggatgtgaaatttcag

SEQ ID NO: 860159 - DNA, 100 bp, Homo sapiens
aaaagacaaggaagatgagctgtcctttcaggaaggagccattatttatgtcatcaagaagaatgacgatggtgagaagccttataagtgctcatgggag

SEQ ID NO: 860160 - DNA, 98 bp, Homo sapiens
agaaaattatcaacattctcacagacaagcatggagcctggggaaattctgcagtgagatcattgagactgaaaatatgatggaccgaattgtgactg

SEQ ID NO: 860161 - DNA, 98 bp, Homo sapiens
agaagcatgtgtcttccccagctctgcagccacatactatccgtttgttcaggaaccaccagtgacagagaattgaatgatctggcacgggaccctcc

SEQ ID NO: 860162 - DNA, 100 bp, Homo sapiens
ggcacagccttttacattgatcaggttgatggaagtagttccacattaagcatgagcactcattttaaaatgcttaaaaagctggtagaagaagcaacat

SEQ ID NO: 860163 - DNA, 100 bp, Homo sapiens
tcgatgccaatactgtcgactccagaagtgctttgaagtgggaatgtccaaagaattatgattcatccagccttccagctctgttatttaaagcaagaac

SEQ ID NO: 860164 - DNA, 99 bp, Homo sapiens
gtgacgtcaccccgctgtgacgcgcacgctgtaggaaaactgttcttctttgcggtccagttggtccaaagctacatgagcttcttgatgacaatgtct

SEQ ID NO: 860165 - DNA, 100 bp, Homo sapiens
cttcataaagcaggactctaaaagctttggaatgtcgtactctcaggaggctccaccatgttcagggatttcggacgccgactgcagagggatttgaaga

SEQ ID NO: 860166 - DNA, 100 bp, Homo sapiens
ctgatcctgatcttgttctggagctgaagaatcttactgtaatatttgcagatactttacaggtatggcatttcaaatatagatacaaccattgaaggaa

SEQ ID NO: 860167 - DNA, 99 bp, Homo sapiens
tggaaactgcagacatgcttcaggctcctctctttactgctgaagctttacttcgagctcatgggttcaactccaccagtaactgttttcaaaggttca

SEQ ID NO: 860168 - DNA, 100 bp, Homo sapiens
gaaagaccgagtgaagaaaggtggatcctacatgtgccataggcatgattccacctttccactgatagactcaagttcccagaaccagattagaaaacgc

SEQ ID NO: 860169 - DNA, 100 bp, Homo sapiens
agtccttggaacaagcaactggctattgaaaagtccgcttccggacaacaacagggcttgattctgcagtagatcctgtccagatgaaaaatgtcacctt

SEQ ID NO: 860170 - DNA, 98 bp, Homo sapiens
tcaccaacgccaaaaccagagaaaatcacttagtctccactttttcctccagggaggacctcattaagccaacaaatggaattttcttgagcatgttt

SEQ ID NO: 860171 - DNA, 98 bp, Homo sapiens
atatactcaattacacttcgactctcaaagcaataccaggatagctgttgtttcagagaaagattacaccaccaccttcactgtcagatccacttaaa

SEQ ID NO: 860172 - DNA, 100 bp, Homo sapiens
cttggcggccgcgcccgctggcgtcctcttgttctcttccaggtgctggagaatctggtaaaagcaccattgtgaagcagatgaggatcctgcatgttaa

SEQ ID NO: 860173 - DNA, 98 bp, Homo sapiens
cttattcacagacaactccaccaattgtacagctcattgctatggacagtgctatcaccctgtggcagttccttcttcagctcctgcagaagcctcag

SEQ ID NO: 860174 - DNA, 98 bp, Homo sapiens
cgtacaaattccctgaacttcctgaaatccagcaaacttccgaaggttttcctttggaatatggataaatacaccatgatacggaaactagaaggaca

SEQ ID NO: 860175 - DNA, 100 bp, Homo sapiens
cagatgatgtcttggcagatgttgttgaagataaagacaaggaagcgagcagctgcaaagcatctaatagaacgctactaccaccagttaactgagggct

SEQ ID NO: 860176 - DNA, 109 bp, Homo sapiens
tagtgtgcaagtattttcagcgagggtactgtatttatggagaccgctgcaggtgccctacgagacgctgaacaaacgctttcgcgccgctcagaagaacattgaccgg

SEQ ID NO: 860177 - DNA, 100 bp, Homo sapiens
agacggctcacctgtgcgggatggaacaaaaggagaaatttgcactgatggctcagaaggcttacgtcatggagagtatgacctacctcacagcagggat

SEQ ID NO: 860178 - DNA, 99 bp, Homo sapiens
gacgcatcaggggtccagctcaaggctcctgacagagtgtgtcccggcatggatatccggaacaacctcactaggttgcatgagctggagaattgctct

SEQ ID NO: 860179 - DNA, 100 bp, Homo sapiens
agtatttgcgaaaagtgctttttgagtatatgatgggtcgtgagactaagaatttcagtatgattgtaggcaatgccactgaggcagctgtgtcatcctt

SEQ ID NO: 860180 - DNA, 100 bp, Homo sapiens
tccagtaattgcaaagaagacgaacagaggaaggagatcttctcttcctgttccggcttcccatctacacttttcaataaagcatccacatacactgtcc

SEQ ID NO: 860181 - DNA, 98 bp, Homo sapiens
aaccagtctcgatctggcccaatctctcctgcaagtatcccaggttacggcctccgctgccacagggccatcatcaccatctgccggctcattggcat

SEQ ID NO: 860182 - DNA, 110 bp, Homo sapiens
gttcccgtcctcttccgcttggccccagaaagtttcggttctgcccggcggtggacccacgagcgcaatcatttgctgtttcaaatagagaactgtgcgatgatgagaaa

SEQ ID NO: 860183 - DNA, 100 bp, Homo sapiens
ctacctggcattgccttttgttgaggaaagaaggtggaaagtttggttttgcagagtctatagcaaatcaaaggatcacagcatttaaaatggaaaaggc

SEQ ID NO: 860184 - DNA, 100 bp, Homo sapiens
cttgctgaaaaggaagttttctggaatgggctgtattcatcaccaaagaaaaaacttacaccaatgcagaaatcggttagtccattagtttggtgcaggc

SEQ ID NO: 860185 - DNA, 99 bp, Homo sapiens
ggggacacttcagaaagatcggacctcctgccccccgaggtctgcagtctcctgaacccagcagccatctacgccaacaacgagatcagcctgcgtgac

SEQ ID NO: 860186 - DNA, 100 bp, Homo sapiens
ttttgaagatgatttgtcattgggagctgaagaccttaatgaatcctccattcccagatggttattggaaattggtgttatttatctccatggttatgac

SEQ ID NO: 860187 - DNA, 98 bp, Homo sapiens
gacgtacccgccgccgccgttggctggagatcgcccaggaccacaccgcagcgtaactgcaggcctctcagcgaaaaagggggaaagcaaagacccgg

SEQ ID NO: 860188 - DNA, 100 bp, Homo sapiens
ggaaagcctatatggaaaatggaagaaagctaggaatagagttcatttcagaagatacaatgttgaatggcccttcagctcatttaagaaaaactactga

SEQ ID NO: 860189 - DNA, 98 bp, Homo sapiens
ctcgattttccccacagcacacaatccaggtccagagagcatcgcagacatcgatctcgctccatgtcacgtgaacgcaagaggagaactcgatccaa

SEQ ID NO: 860190 - DNA, 100 bp, Homo sapiens
gtgaaaaccaccaaaacaatccagctgttccctcaggaacaggaaatatagtggtcattatgattagctatccaaaaggaagagaaattttggagctggt

SEQ ID NO: 860191 - DNA, 100 bp, Homo sapiens
gtggactatgaggctatccgcagcgagatggagcagctcaaggagatggggacattggttttggacctttacaacagaggatgtctgaagaagtttcttt

SEQ ID NO: 860192 - DNA, 98 bp, Homo sapiens
tgaaagacattttcgaaaaactggacagagtgtatacatgcacctgaaaagacatgtgcgagaggcctactgaacttgacgcactggtatttggccat

SEQ ID NO: 860193 - DNA, 98 bp, Homo sapiens
tggacccctcagtatatggatacggagtacaaaaacggcccttggatgatggaggaaaaccagcattggaatcagctgattcaggatgctcagaagcg

SEQ ID NO: 860194 - DNA, 99 bp, Homo sapiens
gacatcgcctgcagccgagcgggcccgttccgccggagctgaggaccaggtcaactttgtagtgtgccaactctttgccttgctagcagccatttggtt

SEQ ID NO: 860195 - DNA, 99 bp, Homo sapiens
ttgaattccgggaagtgggagcttcaggctcgctccgtgcgggtttctttacctccagaaagaagaatattggccccttgaattctggaagttcattga

SEQ ID NO: 860196 - DNA, 100 bp, Homo sapiens
ggtccagggagagcctggggacgacttttacatcatcacggagaactcttaaaacgcctagatgacgtgtccaacgatgtgaggatggcagccgcctcca

SEQ ID NO: 860197 - DNA, 98 bp, Homo sapiens
ccaagagttcagaccgtggcgaagtggagagtgacatgcagttggatggcggtgactgcgtggaatagccaggccagaagaaggaaggcctgtggtga

SEQ ID NO: 860198 - DNA, 99 bp, Homo sapiens
tacagcactttgtggagaaagtcgtcttccacttgcacgaaagctttcctaggccaaaaagagagacaaagcatggaggacacaagaatgggaggaaag

SEQ ID NO: 860199 - DNA, 98 bp, Homo sapiens
tccatctggatgttgctgtgatcagtctgaaatacaggatttgcaacagttcttgctgaagcagttacgtccctggatctgcctgtggccattattaa

SEQ ID NO: 860200 - DNA, 98 bp, Homo sapiens
caccgagacctatgctgatggagatgatgaggccgttgtggaagttaacattcctggaagtgaaagcagcgaagccattgtccgtaaaaggacagcgg

SEQ ID NO: 860201 - DNA, 100 bp, Homo sapiens
aaaaacttgatgattcatattctgaagcagtaagacagaatgaagagctaaatttgatgagtctggaagtgttagttgcaaagatatgcatttacttctc

SEQ ID NO: 860202 - DNA, 100 bp, Homo sapiens
gacaggctcagccaaagtaaatccatgatcctcaccgatgtcgggaaggtcactgaacctattcgcttcaagctcagcttatcaatatgggtgttattcc

SEQ ID NO: 860203 - DNA, 98 bp, Homo sapiens
cggaggaggatgctcctgcctcccagagaggggagccggcgaggatcaaaatcttcgaaggaggattatcaagaatgatctgtgggttaaccctctac

SEQ ID NO: 860204 - DNA, 99 bp, Homo sapiens
tctgagaccatgcagtcagctacgggaattcagtactctgtaacacccagctaccaggagaaattgtcgtaaatgaagtcaattttgtgagaaaatgca

SEQ ID NO: 860205 - DNA, 100 bp, Homo sapiens
agcccttgagtttgtgcccgcccacgggtggacagcagaggcgattgcagaaggagcccaggacttggagaaccagatgcatatagcggagcagcggagg

SEQ ID NO: 860206 - DNA, 98 bp, Homo sapiens
aggacgacgtgtacctggacatcaccgttgacatcacttgttagaagagcaactctgaaagaaaacgagcaaattccaaaatatgaaaagattcacaa

SEQ ID NO: 860207 - DNA, 100 bp, Homo sapiens
caaatgtgcaatcttaaaagaaactgtgaagcaaattcgtcagatcaaagaacaaggttactataacaacagtaccaaggtggctgtgaaaaccctgaag

SEQ ID NO: 860208 - DNA, 98 bp, Homo sapiens
ttgaccacaacaccaggaggaccagctggatcgacccccgggacaggcaccacagtgatgcggatgacagcctttgatgcagatgacccagccaccga

SEQ ID NO: 860209 - DNA, 100 bp, Homo sapiens
agaggaaatgttctcttcacggtggaaaacacagatccagagtgttactggcttacaaattggattgaggtgggaagtctgaagctcagagagcctgggc

SEQ ID NO: 860210 - DNA, 99 bp, Homo sapiens
ggcactcggcgagtccgggactgcgctggaacaatggataacttcttcaccgagatttccatgaggacaacttacaaggacctgtatggcctcatttta

SEQ ID NO: 860211 - DNA, 99 bp, Homo sapiens
tcttgataaaaagagatgtggggggattctcgacctgctaacagaactggaccttttcgtgctgaagctgctgaaagatggcagaagaagtggtggtag

SEQ ID NO: 860212 - DNA, 103 bp, Homo sapiens
cttgattctcttatacgctacttttactcagagtttgaaggttgtgaccaaaagaggctccgtatgcaccaggacacaacagggtatgcctgccttctcattc

SEQ ID NO: 860213 - DNA, 99 bp, Homo sapiens
ttggaaggggacttgattattttaagaaaccacaggtctcggtccagctcgacttccagctcaggctccagcaccagcactggctcaagcagtggctcc

SEQ ID NO: 860214 - DNA, 99 bp, Homo sapiens
gaagcattaatactcatcttgtccagaactctgtcaaatgaagaacactttcaagaaccagaaatgcacagcggtattgatgagtagatccttggattc

SEQ ID NO: 860215 - DNA, 98 bp, Homo sapiens
cgggagaagttgcccctgatgatctttgccaactggagggggttctccggtggcatgaaagcgcaatgtccctgctcttctctcgatgcaactctatc

SEQ ID NO: 860216 - DNA, 98 bp, Homo sapiens
cagccttcccagtagctgggaccacagatccagaatgaagagagtgtggtgctttttctggtcgcgtggactgtgacagagatcactcgctattcctt

SEQ ID NO: 860217 - DNA, 100 bp, Homo sapiens
gtggttggagagctcatctggaattttgccgatttcatgactaaccagtgtgaaatgacaatggatgctctgttggctcgattgaaacttctgaatccag

SEQ ID NO: 860218 - DNA, 99 bp, Homo sapiens
gagactcagctgaaagcatgtgcctcttttatacgaaccagatacgtaggtaacctttccagagatgtgacagaagtccttatacttcagttgttcagt

SEQ ID NO: 860219 - DNA, 100 bp, Homo sapiens
gacgtggctcccaactttgaggccaataccaccgtcggccgcatccgtttccacgactttctgggagactcgggatcctgctaaagcggagcggcaagtc

SEQ ID NO: 860220 - DNA, 99 bp, Homo sapiens
ccaaatgatggacaatgtcacctggaaaataatatgtacacaatgagccattattatgtgctagcagatcccttggtctccagttggccaaggtgagga

SEQ ID NO: 860221 - DNA, 100 bp, Homo sapiens
ccacctgctcccggggagctattggattcatgcccgaaaccaaaatgaaataatttttgggctgaatgatggatactatggtgctccatttgaacataag

SEQ ID NO: 860222 - DNA, 99 bp, Homo sapiens
ttggatccttctttgactcatacaatatttaatccagaagtatttcaaccacagatggcactgccaacaggttgctgcatctacctttatccctgactg

SEQ ID NO: 860223 - DNA, 99 bp, Homo sapiens
atggattagctccagttcgctctagcagacaagatcagatccacagaagctccaccatgaggcgaggtggatggaggaagcgagctgaaaatgatggct

SEQ ID NO: 860224 - DNA, 100 bp, Homo sapiens
cttgtcggggacggtaaccgggacccggtgtctgctcctgtcgccttcgcctcctaatccctagccactatgactaaatgtgttaaatgggcttgccaac

SEQ ID NO: 860225 - DNA, 100 bp, Homo sapiens
cggagcgccaaagagctcctgagaagattctggaagccctgtctttttctatgagttccagcatcgacccagttcttttgcgaagatcaaacctgcctgg

SEQ ID NO: 860226 - DNA, 98 bp, Homo sapiens
ggacgaggccgccctcagttgctgctccgacgcggaccccagtaccaaggagttgggctgttcctacacagatgttgctgctcaggatggtgaagcca

SEQ ID NO: 860227 - DNA, 99 bp, Homo sapiens
tggaatgaaatgaaagtgaagaaaaatacagaatatcctctaaatttgccagttgaagatatacaatcaatgaactgagccatgttcaaatccctgtta

SEQ ID NO: 860228 - DNA, 98 bp, Homo sapiens
aaacttttcaagcctgaaggaaaggcagaactgcctgattacaggagctttaacagaacaaagaactttgagtctggcaaggcttataagacaacatg

SEQ ID NO: 860229 - DNA, 98 bp, Homo sapiens
gctttctctgacttcctgatgggcagctccaaggacctggccaagcacatccgagtggtgcagtggccaatttcttctcgggcagctgtgccccttgt

SEQ ID NO: 860230 - DNA, 98 bp, Homo sapiens
ggacctactggattatgggcctttcagagatgtgcctgcctatagtcagggaatcttttaactgagccagtcggctacttggaatcttgtttctcggc

SEQ ID NO: 860231 - DNA, 99 bp, Homo sapiens
agatttgaaactggacaatgtattactggactctgaaggccacattaaactcactgactacggcatgtgtaagctcgatgcattctatttctcatcatt

SEQ ID NO: 860232 - DNA, 98 bp, Homo sapiens
tgggggccttgcttccattttccattattatgtggactaccggagcgacagcgcagtccaagaccttgcagggttttggccaaattgggcgagggcac

SEQ ID NO: 860233 - DNA, 99 bp, Homo sapiens
gctattcttatagaaaatatggatctttacatgttgaatccttgcagcactaaaatttggagggtgcatctgcccggaagactcagactcctgcagccc

SEQ ID NO: 860234 - DNA, 100 bp, Homo sapiens
agtatctgaagatgggaaagcccatcctttcaaaatcaacttagaatcagaaccacaggcgcctgtgtctggcagagctggtgtgagacgagacaatcct

SEQ ID NO: 860235 - DNA, 98 bp, Homo sapiens
cagattcaaaagggaatttagttttctagatattcttcgattatgggagatcacaacaactttccccaaggatccagtttacactttttctatttcgc

SEQ ID NO: 860236 - DNA, 100 bp, Homo sapiens
gagggtccgagccagccgctgttttgccggaggagcccctcaggccgttctgaccacatccgtgagaaagatggactgtgggctgtccttgcctggctct

SEQ ID NO: 860237 - DNA, 100 bp, Homo sapiens
agtgggaaacctgtagggtatggtccagctgtgccgcaccgaggcgagcaggagcagggaacagaaggaagaggcccagcagaagggactcgctgagcca

SEQ ID NO: 860238 - DNA, 98 bp, Homo sapiens
gtaaaaactgtgctcaattttctggctccctcgactggttgatcagcagattggaaagactggaagcttcttcaggacgctgtgcagagctgcaagtc

SEQ ID NO: 860239 - DNA, 51 bp, Homo sapiens
cggcctggatgccatcatcacacagctcctgggcaacgtgctggtctgtgt

SEQ ID NO: 860240 - DNA, 98 bp, Homo sapiens
gaacagttggatcttgctcagtctctgtcagaggaagatcccttgctcagtttgcaggggaagacccagtggtagctttggaagctgctttgcagttt

SEQ ID NO: 860241 - DNA, 100 bp, Homo sapiens
aaaaaaagagaaacctgggtgaactttcacggacaacctcagaggacaacgaagtgttcgataagaccatcatcatgtggaaactgaccagggatgagac

SEQ ID NO: 860242 - DNA, 98 bp, Homo sapiens
agttccgggccgcgctgcgagactacgagacgattgtcagaagcttcagttctggtaaaagagaaggtggggactttgtttgctgtgccctctctccc

SEQ ID NO: 860243 - DNA, 100 bp, Homo sapiens
cagaggcttaaggtcttcagcggggcgctccaggaggcactcacagaatgctggaagccaagcttgcacattctaggcagccatttggaagattcttctc

SEQ ID NO: 860244 - DNA, 99 bp, Homo sapiens
ggagaaggttctgtctatcagtgctgcgagaaaggaaagaaacaagtttgctctcagcggaaacaaatcattgtggaccccttgagcttcagcgaggag

SEQ ID NO: 860245 - DNA, 99 bp, Homo sapiens
gaccactatcatcaccatggaaaaagtgacttgagcagaacactcctatgccaccttcaccagctgtacaagtgcagggccagcctaacagttctcagc

SEQ ID NO: 860246 - DNA, 100 bp, Homo sapiens
ccccgcgcgagtcggcgcccggccgaggggctgcgtaggccccgcccggccaggcccagccgggccctggacagactcaccccacacagaccgcgtttct

SEQ ID NO: 860247 - DNA, 100 bp, Homo sapiens
atgttcacactgaatggtgaaatccttcttgatgattcaggctcagaactggctttcaaggactttgatgttggcgatgcaatcatcctcttccagtggt

SEQ ID NO: 860248 - DNA, 100 bp, Homo sapiens
ggaaatcacagcacctgattcccaaggcaagacagatgagacgtgcaggtaccatcaggaagcagcgggataagctgataaaggaaggaaagtacacccc

SEQ ID NO: 860249 - DNA, 98 bp, Homo sapiens
tccgctgtcctgagacactcttccagccctccttcattgtatctccaaagaagagctggtgcatagctgcctctctcctgcccttcactgctgatctt

SEQ ID NO: 860250 - DNA, 98 bp, Homo sapiens
gagagactgcaatgttgccatccgatggctgatgcttcatacagcagactcagctgctgtgacttactcgaagcctcgattggccacattttggtact

SEQ ID NO: 860251 - DNA, 100 bp, Homo sapiens
agggcatcgccgcctcagccgccgccgccgccgttttcgcctgcagctgctcaccggcaaatatcaatattccaatgggagcctttcggccaggagcagg

SEQ ID NO: 860252 - DNA, 100 bp, Homo sapiens
acggcactcattttttgaccatggatacaatcacctcgtggaccagaattttaacccattaccagtggagccgccaccaaaatgcagattttcgtgaaaa

SEQ ID NO: 860253 - DNA, 100 bp, Homo sapiens
gatgccttcaatactacctttatttccaccatagaacaatcaaccatgacgaccgaatctggatcagactcggaatccaagccggaccaggaggccgagc

SEQ ID NO: 860254 - DNA, 98 bp, Homo sapiens
cattgatggatacgaatatgcctacctgaaggcaatagtactcttcagtccagattgaagataaaactttccaagtccttggtaatctttacagcgag

SEQ ID NO: 860255 - DNA, 101 bp, Homo sapiens
gagatgagtttgtttacagctgttgtcctggtatctgcaggtttctgctttgggacaaccatacatctaattccttaaagtagttttatatgtaaaacttg

SEQ ID NO: 860256 - DNA, 100 bp, Homo sapiens
gaaacttgctcaacttcctgatagatgtacactgaaaactggacattataacattaagaaaatcctgccttgcttcgttgggcctatgcaagaacaataa

SEQ ID NO: 860257 - DNA, 98 bp, Homo sapiens
ggacccctcccaggagggacccacagggctgaaggaagctgccttgtacccacatctcccgccaggaagaagaatttggtgttgatgattcttattct

SEQ ID NO: 860258 - DNA, 136 bp, Homo sapiens
gcacccgagtgtcctttcccccctaagctggcacataggagcaaaagttcactaaccctgcagtggaagaaatatgaacagggattcatcacagaccctgtggtcctcagccccaaggatcgcgtgcgggatgttt

SEQ ID NO: 860259 - DNA, 98 bp, Homo sapiens
ttcatgagagaagaaatacaggatgcctctcagctgccacctgcctttgacctttttgaagcctttgcaaaattccctgtattgaacactgatataca

SEQ ID NO: 860260 - DNA, 100 bp, Homo sapiens
gaagaagatgtgtctggtgaacctgaagcttcaccgagtgcagatacaactatactgtttgtaaaaggagaaggtgccgtgagcgatgtggagatgcagg

SEQ ID NO: 860261 - DNA, 99 bp, Homo sapiens
tgactttcgaagataattccaaatactgggtcctatggaaggacatacagcatggtggtgctagaaaagccaaatggctttagtcagagtcccacagcc

SEQ ID NO: 860262 - DNA, 98 bp, Homo sapiens
cgggacgcgcggcggcaccgggaggccgggccgagcggtgacttaagagattaaaattaatttggttgctgttggttctgaacaaataatgagttctt

SEQ ID NO: 860263 - DNA, 98 bp, Homo sapiens
cctaatagtgtggaaggtcttctaaatgctctcaggttaaagatcgaggtccggaagccactaggagattttttaattggttttattggagcattaac

SEQ ID NO: 860264 - DNA, 99 bp, Homo sapiens
aggtggagcacctgaagagatgccagcagaaaaagcttgtggtgaaggggggcaaaaaaaagaagcaagttctgaagttcactcttgattgcacccacc

SEQ ID NO: 860265 - DNA, 98 bp, Homo sapiens
tctctccaggaggacccagccacccaagttaagtgggcagaccaacatccacctcagcaaaaacttcttcctgacgaatcgcgccagggagcgctcag

SEQ ID NO: 860266 - DNA, 100 bp, Homo sapiens
cgcagaacccgggagtaggagactcagaatcgaatctcttctccctccccttcttgagacaaattgatttatgcctggggcaccatcaccaaaagaagag

SEQ ID NO: 860267 - DNA, 98 bp, Homo sapiens
ccactgtggctcccgcatctgcctccctgccccagcccatcctctctaaccaagatcaatgtccgagttaccaccatggatgcagagctggagtttgc

SEQ ID NO: 860268 - DNA, 139 bp, Homo sapiens
aatgagacaagtcaagaatccttttggcttagagatcactaatccatcttcagcttcaattacaagtgttggtgtctgtccagtcccttatattagtagctgagccttattttaatgaaccgggatatgaacggtctag

SEQ ID NO: 860269 - DNA, 98 bp, Homo sapiens
ccaggacagccgtacggcatttcctcatatgaatcagtatttcaagcatccaaaatgtgtaggagaatatggacccaagaacggagcagagagacaaa

SEQ ID NO: 860270 - DNA, 100 bp, Homo sapiens
ttaataaccatgcttaatgcaaaagaccttctacaggacctgaaggaagaaacccttttttcttggagccagcaataattatcacaattactgatgggag

SEQ ID NO: 860271 - DNA, 100 bp, Homo sapiens
agatgtggtacacactcagttaattaatctgtgccaaacccaagtctgaaatccacgtgtctatggccactccggtcactgtgtccatggagactgtatc

SEQ ID NO: 860272 - DNA, 100 bp, Homo sapiens
gtctggctccagtacggtcaagcaggcaagatcagattcacaggagagtgcgtagaagggctgcgggaaaatgactatctgctgattcattcctgccgcc

SEQ ID NO: 860273 - DNA, 98 bp, Homo sapiens
gcatgctgagaatttgaaaaatgaagatgatgtagacactggactattaggtcccttcaccgatgttgtcaccaccaacctaaagcttggcaacccga

SEQ ID NO: 860274 - DNA, 98 bp, Homo sapiens
gatcccttgctcccatccctgcagcatgaacaaggaatctgcaagcagaatatgaccgtctaaagcagcagcacgaacataaaggcctgtccccactg

SEQ ID NO: 860275 - DNA, 100 bp, Homo sapiens
tattgaaggtggagtagcaaccgggcattatattatctcttggaaaagtgttatctacaaacttctggcatcgaaaagtgaaggaatcagggtacaagct

SEQ ID NO: 860276 - DNA, 98 bp, Homo sapiens
aagatccattggtaaattgatcaggatttttggcctaccctccaaagaaaaggtccactgtcccacgagcagaagctgtcacaaagcttggaaattgc

SEQ ID NO: 860277 - DNA, 100 bp, Homo sapiens
ccgcagctgcacctggagtaccggttctacaagcagctcagcgccacaggttgctggtggtaggaatgttccacccgcagtacagaaagtatcacaggct

SEQ ID NO: 860278 - DNA, 98 bp, Homo sapiens
aacaacattgctacacatgctaaaagatgacagacttggacaacatgtcccaacattacatcccagtgaaagaaaatggcccgaaccaagcagactgc

SEQ ID NO: 860279 - DNA, 100 bp, Homo sapiens
gccacacagtgccattgccaaaaatttacctgagaattggagatggctatttcgaaaacagcccactgatgtcccagccagtgtgggagaggtatcgccc

SEQ ID NO: 860280 - DNA, 100 bp, Homo sapiens
gcgaatatcgtcatcgttagaagggacatgagagatggctttagaagaaaaagtttctactcttcccattatgcgagagagcggtctccttataaaaggg

SEQ ID NO: 860281 - DNA, 100 bp, Homo sapiens
taaaaggatgaaaagcttatgcaacatgctcagcaggagcttcatcaacgatatatgtcagatctaaaggtacttttaggttgaaatacgcccctccagc

SEQ ID NO: 860282 - DNA, 99 bp, Homo sapiens
cttcttagtcagtgtatctaccgtcatcgtaaagattatgacaaatcacaacttgtagaggtcggatccgcacaagacggcaaagctctgggagtgcca

SEQ ID NO: 860283 - DNA, 100 bp, Homo sapiens
gttatgtacacttcgggaccatcagagacaaccttggagtgtacactgaagccaggcttggtttacaacaaggtgaatcccatctttcaccactggagcc

SEQ ID NO: 860284 - DNA, 100 bp, Homo sapiens
ggaaagcagcgtggtcaggaggggttaaacttcggctgaagcacaggttgtctaccttcataacaacaatatctctgtagttggatcaagtgacttctgc

SEQ ID NO: 860285 - DNA, 100 bp, Homo sapiens
acgtggagaaggcgtgtaaataccgggaagccacatgcagccactgcaagagtcaggttccgatgatcgcgctgcagcaattctgtggtgttcttggtca

SEQ ID NO: 860286 - DNA, 98 bp, Homo sapiens
cgtggcttgtgttgggaggctatgatggtcagcctagcaacaaagaagatgtggatgatcttgtgagtcagctaagacagacagaagagcaggtgaat

SEQ ID NO: 860287 - DNA, 99 bp, Homo sapiens
acttgtgcagcaaagtggcccaaatccatggcattgagatacaactcgtcaacgaatcaaattcagtgatgacagagtatgcaagagtcaccttctcaa

SEQ ID NO: 860288 - DNA, 99 bp, Homo sapiens
acagaaacctggtcttcctgggtcattttgagtgccccccttataattcatctacaatcaggagtatatatcatgtgagaaatattgaagtctataaat

SEQ ID NO: 860289 - DNA, 105 bp, Homo sapiens
ggaggaggagcaggatccgggttcagcagcagtcagagctggcgagagccctctccacctcggaagagctttctgatacaacaccccttttaaatggatcaagcc

SEQ ID NO: 860290 - DNA, 100 bp, Homo sapiens
tgtgatattagtgaagggactgttgttccagaggatcgctgcaaatctccaacctctgggatgaattgtaaaagcaacatcagcttgaccagtataaaat

SEQ ID NO: 860291 - DNA, 100 bp, Homo sapiens
cttctaactacggtccaatgaagagtggaaactttggtggtagcaggaacatggggggaccatatggtggaggccacacgtgtctacacttagcctctat

SEQ ID NO: 860292 - DNA, 98 bp, Homo sapiens
tttgggtgggtggagaaccaccacaacaaataaccagcctggcagtcaattcttcctatggacttatgatgggggatgatgaagatgcctgtagtgac

SEQ ID NO: 860293 - DNA, 98 bp, Homo sapiens
ttgacagggacatcagtggagccttctcagacccacaggaatagccaggccagaagaaggaaggcctgtggtgagtgggacaggaaatgacatcacca

SEQ ID NO: 860294 - DNA, 100 bp, Homo sapiens
caagctgaagaagagcaaaaggcggagctgtagccactgtagcagcaagtaactaatggcacgagccattctcctacagccttgaatggcgccccctcac

SEQ ID NO: 860295 - DNA, 98 bp, Homo sapiens
ggcctatgacagcagtgccgactggttctccctgggctgcatgcttttcaaacttctgagagggaatagccaggccagaagaaggaaggcctgtggtg

SEQ ID NO: 860296 - DNA, 98 bp, Homo sapiens
cttctccaagggggacataatctactctcatcagccagttttcagatacctgtgtcattcaaagatgtggttgtgggcttcacccaagaggagtggca

SEQ ID NO: 860297 - DNA, 100 bp, Homo sapiens
tcagcgcaggaggaccggctgccgccgccgccgccgccagaacctccgttggatggctcctgaggtgttcacgcagtgcactcggtacaccatcaaagca

SEQ ID NO: 860298 - DNA, 100 bp, Homo sapiens
cacatgaggaaaaaattgtatgaaaatggtgtgactgattctctgaagagtaactttgccctcctcctaaagggcgtctctggccgagcctctttttgtg

SEQ ID NO: 860299 - DNA, 98 bp, Homo sapiens
tggctgtacagctcgatctaggttctgcggcacgggatggcggaggcgcctcctgtctcaggcgcatattaaatttcctattgactacccctattcac

SEQ ID NO: 860300 - DNA, 98 bp, Homo sapiens
aggtgaagtctggagcaggacttctgaggctttctatcctccatgctgctcactagaaaaggggctgtgaacttatctcccaaaattgtagagatttc

SEQ ID NO: 860301 - DNA, 98 bp, Homo sapiens
tccagtttcctgctaatttgcagcttcctccaggacatgaaatctgctgtgatcacgccttgcagtcattttttccatgcaggctgtcttaagaaatg

SEQ ID NO: 860302 - DNA, 98 bp, Homo sapiens
ccgaggctcgcgggcggcgggcccggtgaactggactatcacgacgctgtgaatgtcaatgatcggtgccagaaaatttgtgaccagtgggaccgact

SEQ ID NO: 860303 - DNA, 98 bp, Homo sapiens
aattccctttctttgaagccatatgttggtttgtagccaaaaacttgctggaaaccctgaaagaaacatctgccaaagaaggtctgctgctttggtgt

SEQ ID NO: 860304 - DNA, 99 bp, Homo sapiens
actggtagcccccacccctctccgtccatggccccagatgacacttcagaatgcaagtgtgggagataaagttctctacggtctctatggcatagtgga

SEQ ID NO: 860305 - DNA, 98 bp, Homo sapiens
gaggaccatgtgagtgggctccggagcctcagcgccgcgcaggatgaagaacaagctgtggtactttgaatttggcacctcggagacttttgcagcga

SEQ ID NO: 860306 - DNA, 100 bp, Homo sapiens
ctcttgaagcagtcagtcaaaatcaactgcaagcagccatcatcagtttggaagaagctttgggaagtggtggtgaccgcggtggcttcaaaaattttgg

SEQ ID NO: 860307 - DNA, 100 bp, Homo sapiens
ggccagaattaagactttcaggcagcaacatggcaagacggtggtgggccaaatcactgtggacatgcaagaagacagtttcgtggtgggcacagccgag

SEQ ID NO: 860308 - DNA, 98 bp, Homo sapiens
acacgcttgaatgtgttcaagaatgatcaggatacttgggactacacaaaccccaatctcagtggacaagggtggctttgcaaaatgttacgagatga

SEQ ID NO: 860309 - DNA, 100 bp, Homo sapiens
tctggacaaaggaacaggtatctcagcttggattccttagcaccaccacagctcagccagaacagaaggcctcgaatctcattggcacataccgccatgt

SEQ ID NO: 860310 - DNA, 100 bp, Homo sapiens
tcgagagaagaaaattttagaagttcatattgacaaagttttaaacccaatgaaggagttatcataataggagccacaaacttcccagaggcattagata

SEQ ID NO: 860311 - DNA, 100 bp, Homo sapiens
ggccctcccgcgactacagccactactacacgaccatccaggacctgcgggacaagatcgtcacagctacctgtctctggggatccctagtataacacat

SEQ ID NO: 860312 - DNA, 100 bp, Homo sapiens
cacccgtgtagatgggtacatcacggcttctctcccacgttaagacttaataaaggtgtctgtgacctttgaggatgtggctgtgacattcacccaggag

SEQ ID NO: 860313 - DNA, 100 bp, Homo sapiens
gaatacaccttggcccgaggctgaagccattgctccacaggttggcaatggtgtaccttgaaagacttttaacatacgcagagatagatatctgtccggc

SEQ ID NO: 860314 - DNA, 100 bp, Homo sapiens
ggcgatggtgatggcagcagttactcgcacaaccccagttaagctgcgctccgggagatggaccacacatccccgacctacatgcttgctaacttaaccc

SEQ ID NO: 860315 - DNA, 100 bp, Homo sapiens
agtattttgcagagcatcccccaaagacagattgaagaaatgcagagacagctcattgctatggacagtgctatcaccctgtggcagttccttcttcagc

SEQ ID NO: 860316 - DNA, 100 bp, Homo sapiens
ctgctatagaaaaacgaaaacgaagaaatcctcttttactgcctgtggacaaaatccatccttcgttgaaggtcatcctgtacagttctacagcatgaat

SEQ ID NO: 860317 - DNA, 98 bp, Homo sapiens
cggaaaccggtagcgcttgcagcatggtcctcagccctcgctctcgctggcggagcagcacctggagtcgcccgtgcccagcgccccgggggctctgg

SEQ ID NO: 860318 - DNA, 98 bp, Homo sapiens
gaagggcaactttgccaaagtcaagctggctcggcacatcctcactggtcgggagggtggatgtgaacactgaccggaagatcagtgccaaggagatg

SEQ ID NO: 860319 - DNA, 99 bp, Homo sapiens
tggatcggtgggtttatctcaaggcctgagtagccggtaacaaacgagggttcccgggattggaccgacgcagccatgaacagtccacaggaagaggtt

SEQ ID NO: 860320 - DNA, 100 bp, Homo sapiens
ctaaagaggctgcccagaaagcagttaacagtgccaccggtgttccaactgtttaaaggttctccaaaaaatgtggaatcctttgcatctatgctgagac

SEQ ID NO: 860321 - DNA, 100 bp, Homo sapiens
gaaattcatcacctctctggagtcttcaaactgaccaagcattgaaaaggacttgtcttacaaggaccggcactggcatgaagcctgtttccactgctcg

SEQ ID NO: 860322 - DNA, 98 bp, Homo sapiens
gctggcactgctgctctgctgggacccgaggctgagccaagcagaaatgactgctgtccatgcaggcaacataaacttcaagtgggatcctaaaagtc

SEQ ID NO: 860323 - DNA, 100 bp, Homo sapiens
ggacctcatggatgggctgcctccaggtgacagcaatcagctggcctggtttgatactgacctgtaaatcatcctttagaagatgctgtggacaattatc

SEQ ID NO: 860324 - DNA, 100 bp, Homo sapiens
tacctcccaaagtctctcacattacttttgctcacgaagttggacataactttggatccccaggctctctaaatacgtacagattctgcgataatgtgtg

SEQ ID NO: 860325 - DNA, 100 bp, Homo sapiens
acggatgactttgttttggtgccacacaacatctcgtcagaccactcatgtcaaagtcctaaaattttaagactcaaaccccatggtttagagcgaactg

SEQ ID NO: 860326 - DNA, 100 bp, Homo sapiens
aacgtaatgaggatgaagattcaccaaataagctatatactttggttacctatgtacctgttaccactttcaaaaaatttaagaagtgcaacatggccag

SEQ ID NO: 860327 - DNA, 99 bp, Homo sapiens
ccggcttcaggatttacacagacgtggggcgatgcttgtgaccctgcagctcctcaaagtgacatgtacagccatgatgggaatactgatgagccagaa

SEQ ID NO: 860328 - DNA, 100 bp, Homo sapiens
ccaccttgtggccctgggctttaccatctttgtggctgtgcttgccaggcctggctccagtactccaaagattcaggtttactcacgtcatccagcagag

SEQ ID NO: 860329 - DNA, 100 bp, Homo sapiens
gacatatcaagcattggtgcacgatgtactgagagaaaaggaacagttccgtaagctctttattggtggcttaagctttgaaaccacagaagaaagtttg

SEQ ID NO: 860330 - DNA, 100 bp, Homo sapiens
tgatggagccacacagaccagaacggcagggattgaggaatgatttgaaagcagccttggataagattgatcagcagtacctcaatgaaatcgtcggcgg

SEQ ID NO: 860331 - DNA, 100 bp, Homo sapiens
cccccgacaggcacgcacacccaccccacagtgcccggctcggctgcgaagtcacctgcaccggtgcccgtgacgtacgagctgcccacactgtatagga

SEQ ID NO: 860332 - DNA, 99 bp, Homo sapiens
aagcctgtccctggacatattatgtatatggtttgttgccactgccaatatggtatgcggttctaagagaaaatcgagctatagcagattatcttcgtt

SEQ ID NO: 860333 - DNA, 98 bp, Homo sapiens
tttttgctctccctcgagaagctccagatggcgtcttccgtgggcaacgtggccgacagcacagctgttgaaggaggatgttcccatcttggtcagtc

SEQ ID NO: 860334 - DNA, 98 bp, Homo sapiens
caggaactgtgtgtctagatgtaattaatcaaacttggacagctctctatgtacgaggatgtcgtccaggaaagattgtgcagatgactgaagcagaa

SEQ ID NO: 860335 - DNA, 98 bp, Homo sapiens
gcacactggcttcacgccggctccgcctcaccagcaagcgcattcccaggatctagtgaaaagccatttgatgtatgcggtcagagaagaagtggagg

SEQ ID NO: 860336 - DNA, 100 bp, Homo sapiens
tggcaacagactttgtttcttggagtccacttccaattccaaggcaattcgaagttttcaagtagcccttcacatctatccaatgaaccctgaaatatgg

SEQ ID NO: 860337 - DNA, 98 bp, Homo sapiens
tctatctgaaaatgaagggtgattacttccggtaccttgctgaagttgcgtgtggtgatgatcgaaaacagcttgttcatcgagtgaaaagaagagct

SEQ ID NO: 860338 - DNA, 98 bp, Homo sapiens
gattccaggaggaagtactggcgaagtgctccatggagtttcataatagaagagcagagtttcttactatgtgaagatcttctctatggaagaatgtc

SEQ ID NO: 860339 - DNA, 98 bp, Homo sapiens
ctgggttcgccttgcataaatggaggtcacgcaatatttaaactcacgtatctaagcaatcacgactataaacacctctactttgaatcggacgctgc

SEQ ID NO: 860340 - DNA, 100 bp, Homo sapiens
caagatggtgtggaatcgaaccacccacctttgaaaggcctaaagaatgtatttgacgaagcaatattggctgccctggagcctccagaaccgaagaaga

SEQ ID NO: 860341 - DNA, 140 bp, Homo sapiens
atgtggctgcaagatacggtcatgagcttttgattaacaccttaataaccagcggagctgacacagccaacgagtaaccagctcataaatcacatcgaacagtttttggatactaatgaaacaccgtattttatgaagag

SEQ ID NO: 860342 - DNA, 100 bp, Homo sapiens
atccagaagagcaaaggcgatgatgccacattacctgaggacatgaaccttaacgaagagaaaaaagctcctttacgaaacaaagactttaccaccaaac

SEQ ID NO: 860343 - DNA, 100 bp, Homo sapiens
gttggacacagaccattgcaatggaaatgatacaaaagttgggactacaagcaagtgacataaaaagcttctcagctctcgcagagcttgttgctgctgc

SEQ ID NO: 860344 - DNA, 98 bp, Homo sapiens
atggagcatatattatggaacacagcaaactctgtttgctagtgctgacactgcttatgtcctagcgtattcaattattatgctgactacagacttgc

SEQ ID NO: 860345 - DNA, 98 bp, Homo sapiens
acgaaggcatggatgaggagaagccccgaaacaaagaagagccgtaacgagacatatggcgaaggcagcggcgtggagatcctggagaaccggccgta

SEQ ID NO: 860346 - DNA, 100 bp, Homo sapiens
gggcactcgtctccgtgggtgtggcggagcgcgcggtgcatggtagtaatgaaggtggtgcagctgctacccgatgggcaccgtgtgaagaaggaggtgg

SEQ ID NO: 860347 - DNA, 98 bp, Homo sapiens
cgaacagcatgacgtccgctttggagaactacatcaaccatgggaagttattgctaattacatgaacatacattcttcctctggagtcaaaagaactg

SEQ ID NO: 860348 - DNA, 100 bp, Homo sapiens
cctcccaagtggctgggattacaggaatgggatgtttctggggagctgaaaggaaattctgggtcttgaaaggagtgtattcaactcaagttggttttgc

SEQ ID NO: 860349 - DNA, 99 bp, Homo sapiens
ttgctgtactggttagggcgattgttcctgacaaccaaggggaaactggactgctacacaaggagggggaccccattcccgaggagctttatgagatgc

SEQ ID NO: 860350 - DNA, 100 bp, Homo sapiens
gggttggttcccgtcgtcgtacacgaagttgctggaagaaaatgagacagaagcagtgaccgtgcccacgccaaggctttcctcggagacgggtggcatg

SEQ ID NO: 860351 - DNA, 100 bp, Homo sapiens
gagagactggaccagaccatgggcctgagcatcaggtcagtaacagatccaagagatggaaagagagtagcgctcaaaaagatgcccaacgtcttccaga

SEQ ID NO: 860352 - DNA, 100 bp, Homo sapiens
ggagaacaaacactcgccctctaccagaatgacagtccctatcagggtggagtatttttcttgacaattcatttcccaacagattaccccttcaaaccac

SEQ ID NO: 860353 - DNA, 100 bp, Homo sapiens
atcacgagactagaaaataccttcaagagcaggcctaccgcctgcagcagggtattgtcaccagcaccacccagcagattacctgctatgccatggcctg

SEQ ID NO: 860354 - DNA, 135 bp, Homo sapiens
caagatcgccggagtcatattatcgacgtagttaaagcccactagcctaaagccgggcggactgcggtcaaaatgcagatcttcgtgaaaacccttaccggcaagaccatcacccttgaggtggagcccagtgac

SEQ ID NO: 860355 - DNA, 98 bp, Homo sapiens
ttgaaacctcgtcattaattggacacagtgccagagtgtatgcactttactacaaagatggacttctctgtacaggacaaaccaattcttgctcccga

SEQ ID NO: 860356 - DNA, 99 bp, Homo sapiens
ctccgcaagaagtaccgagaagtggatccttcaggttccagggatttcaccagtagcagtgaaagcctacttctgctaattttgactgttcctcagcat

SEQ ID NO: 860357 - DNA, 100 bp, Homo sapiens
acaagaagatgtccttgccaagggaactgctcgcagaaagaagaaggtggttcatagaacagccacagcagatgacaaaaaacttcagttctccttaaag

SEQ ID NO: 860358 - DNA, 100 bp, Homo sapiens
tagagacaacaatgtcaaaggaacgacacttcccaggtctaggctgtatagaagacaatgaaatatttgacaatgcaatggctggagtctggattaagac

SEQ ID NO: 860359 - DNA, 123 bp, Homo sapiens
tcacacagagagagactccagatctcagagagcagtgctcaagattccaagacagaaccctgggattttctacttggccacagatgtctttaattccaaaaacctggccgttcaggcacaaaa

SEQ ID NO: 860360 - DNA, 100 bp, Homo sapiens
tccgggtgcggctccaccccttccacgtcatccgcatcaacaagatgttgtcctgtgctggggctgacaggggtgtcttcatgacaagaacagcgaccag

SEQ ID NO: 860361 - DNA, 100 bp, Homo sapiens
gaggctttcaaaagtgcgagatcaacttggacaggaattggaagaactcacagctagtctatttgagaaactcatcgcatacgggcacatcactggcaac

SEQ ID NO: 860362 - DNA, 98 bp, Homo sapiens
ctgatcagaactatcagaactacatcttaagggagtcataaacattctaagtgcatacggccatttcttccttatttcaatgtgtcacaacaatttgc

SEQ ID NO: 860363 - DNA, 98 bp, Homo sapiens
gataatgaagctaaatggaaaagagaaatatatggtcgaggtcttccagaaagatgagaactggactgatgaccaactgcttggttttaaaccatgca

SEQ ID NO: 860364 - DNA, 100 bp, Homo sapiens
caagtgcggcaagcgcatgagacaagcaggaggacatgaagactattttggagggcatagatccggccaagcatcaggtgagggtggcctttgatgcttg

SEQ ID NO: 860365 - DNA, 141 bp, Homo sapiens
agtgcctctgtcttggctgtggcctgccagagctgcattcttatctggaccctggaccctacctccttgtctacccggaggaagttcactatggctccagtcccctggccatgctgacggcagcgtgcagcaaatttggtg

SEQ ID NO: 860366 - DNA, 100 bp, Homo sapiens
ttgttcatcgtgatttaaaagctgaaaatttacttctggatgccaatctgaatatcaaaatagcagacttaattcagtgcacaaatgagatgaatgtgaa

SEQ ID NO: 860367 - DNA, 100 bp, Homo sapiens
agtgcctataacaccaggacaatagtgcattattctccaaatctagttttttcaggaattgaggacccagatgatgtggtaccagttggccaaagaagag

SEQ ID NO: 860368 - DNA, 99 bp, Homo sapiens
agacctactgttttgatgcattcccaaagtttgtcaagggctatttaatgagttactagaaaatgggatttctgtgtggcctggttatttggaaactat

SEQ ID NO: 860369 - DNA, 99 bp, Homo sapiens
tggaaaaccccaaaagtgtacataaggttttgcactgattgcaaaaataaagtcctccgagcatacaatatccttattggtgaacttgactgcagcaaa

SEQ ID NO: 860370 - DNA, 100 bp, Homo sapiens
tcagcacaggcagctcgcggtcatgggcggctcagcctccagccagctggacgagggcaagtgcgcttacatccgaggaaatttggtgagcggcctccac

SEQ ID NO: 860371 - DNA, 99 bp, Homo sapiens
tttttggttgggacgcagtctcttaaatatgataatcagagctgcagaaactggagggcagcagtggacctgtgcggacgtctcctcacagcccacggc

SEQ ID NO: 860372 - DNA, 100 bp, Homo sapiens
tcagaggacgccttcaacaccaccttcatctccaccatcggtttattcttcagtccaaggaagcaattcacagtcagctgttagagaagcagaaaatagc

SEQ ID NO: 860373 - DNA, 100 bp, Homo sapiens
catgctggcaagtctgaaggtcaaatttctccacccaggtgaactcctccctcacctccccgacggggcgaggctccatggctgccccctcgctgcaccc

SEQ ID NO: 860374 - DNA, 100 bp, Homo sapiens
agcgagccaatgatgccatgcacctcagcatgctggaaggtacttcgacctggtgtcctgtggtttctaaggaatttgaatgatccagatttcaatccag

SEQ ID NO: 860375 - DNA, 100 bp, Homo sapiens
tagcacgtggaattcgcgaagctgccaaagccttagacaagaagatgagaatgtgcctactgctcctgatcctccaagtcaacatttacgtgggcatggg

SEQ ID NO: 860376 - DNA, 100 bp, Homo sapiens
cctggagcccagcctgccccgaggaggccccggctcagagccatgccaggttctgcggggagtgtctccagccctgcctgcaggtgccatccccgctgtg

SEQ ID NO: 860377 - DNA, 100 bp, Homo sapiens
actctgaacttccctggtcgaacagttttttctaatggctattcaaggcccagaaggagttattagatactgaactggacctccacaagaggctgtcctc

SEQ ID NO: 860378 - DNA, 100 bp, Homo sapiens
cactggagacgaggatgagaacagcccgtgtgcccatgaggccctcttggacgaggacaccctcttttgccaatggtttatgggagaaatattagccagt

SEQ ID NO: 860379 - DNA, 98 bp, Homo sapiens
gccgggaggacatctacaagcggaaatgcatcttctgcagacaccgggttaagagggtctctggagcctgcatccagtgttcctacggtcgctgcccg

SEQ ID NO: 860380 - DNA, 100 bp, Homo sapiens
ggatgccctgcagtacctgcagaaggtctctggagacatcttcagcagttttccccattttaaaaagaaaagcaaacaaagaaacaaaagtttttcctaa

SEQ ID NO: 860381 - DNA, 98 bp, Homo sapiens
tgctggccgcgctgctgctggccgcacgcggggctgctgcccaaggtaaatattgggaagatggattcacccattgaaaagtggaacctaataattgg

SEQ ID NO: 860382 - DNA, 100 bp, Homo sapiens
ccacaatatctttaagagagatggctctgatgtcatttatcctgccaggatcagcctccgggaggacctgaaggagaagaaggagaaggtggaggagaag

SEQ ID NO: 860383 - DNA, 99 bp, Homo sapiens
tttaatggaaaatcgcttggttaaaacctgacacttttaacagggaaatcctcattgacgattcaatttgttgaaggccaatttgtggactcctacgat

SEQ ID NO: 860384 - DNA, 100 bp, Homo sapiens
gaaggccttgactacggaggggttgccagccgtgttgccgcccgctgtgctatgagcagtcagagcgccgtctccacaagagtttacaaatgaaaatgga

SEQ ID NO: 860385 - DNA, 100 bp, Homo sapiens
ttaggagagacgagcagccttcagggagcgtggagacaggtggatggaagcatgcctaggggaagatctgcctcccaccacagaactggaggaggggctt

SEQ ID NO: 860386 - DNA, 100 bp, Homo sapiens
ccccgctctgggaggaccgcgaggatgaaaactttcggaagagaaagttgcctgtggtaagttcagttgttaaagtaaaaaaattcaatcatgatggaga

SEQ ID NO: 860387 - DNA, 100 bp, Homo sapiens
ccagcacaggcggcgttttctccttcggaacgggagcgtctaggcactcgaagactccagcttcctgaaaagaagtggcagggacagtggctacggtgac

SEQ ID NO: 860388 - DNA, 99 bp, Homo sapiens
tgaaaaaaaagacctgctttgccctgggaaatagtaaccctgccaaatacatcagcttgtaggagacagaggtggataagattgtggaccagctgcagc

SEQ ID NO: 860389 - DNA, 100 bp, Homo sapiens
gtttgctaaatttgaaaaggagaaaatgaatgccaaatgggacacgcgagttgcagacctggagcaagaaaatgctctcttgaaagatgagaaagaacag

SEQ ID NO: 860390 - DNA, 98 bp, Homo sapiens
gcatatgatggatgctttgtatgcccaagtcaagaagccgcggaattccaaaccctcacctgtagacaggtatggtgtggtggactttctttgagtac

SEQ ID NO: 860391 - DNA, 100 bp, Homo sapiens
ggagatcgagggaaagggatccttcacttactttgcaccgagtaatgaggcttgggacaacttggattctctcggcttgcccttcccctgcttgtgccgt

SEQ ID NO: 860392 - DNA, 137 bp, Homo sapiens
ggaactgacggatacaaacaacattgcctacttatttctctcagctgccaacagatggctggaggtcaggacggtacaagggatttaaaggcaactgttccatgaccttcattgatcagtttaaagcactacaccag

SEQ ID NO: 860393 - DNA, 100 bp, Homo sapiens
ggatgatccagttggaccttttggacaggaaagtgtaacatcagttacagaatggctctgagagattcctctgcgaatctgtttttagctatcaagtggc

SEQ ID NO: 860394 - DNA, 100 bp, Homo sapiens
ggcggacatcactttagaccctccacctaattgcaggacatggatttgattgacatactttggaggcaagatatagatcttggagtaagtcgagaagtat

SEQ ID NO: 860395 - DNA, 99 bp, Homo sapiens
acgagggcgcgctcgagacgctcctgaggtactaggttttgacaagcttgcatcatgcgtgagtataagctagtcgttcttggctcaggaggcgttgga

SEQ ID NO: 860396 - DNA, 100 bp, Homo sapiens
gggtccagccgtccccagaacgcagatcagaggtagtcggacctttcccgctggcgcgcagcctcagctagggaaaacttcagatgtgggtggatgtttt

SEQ ID NO: 860397 - DNA, 98 bp, Homo sapiens
gtctacactgtacatgctttttattacaagactacggagcataggaggaaaattcatcatctgcaggaggccactgtctgcagctcccgtgaagatgt

SEQ ID NO: 860398 - DNA, 100 bp, Homo sapiens
aattttttgatcatgcggcacatcttgggggagctctttttggaattccaagtggtaagaagttcagaagcaagcctcagttggcaaggtacctgggaaa

SEQ ID NO: 860399 - DNA, 100 bp, Homo sapiens
ccaggccggcctgtctgccgcgatggatgacagtaaggatttcgaactcaacaatgaactaaagatgaatgtcctaaatttgctagaagaagttttgcga

SEQ ID NO: 860400 - DNA, 98 bp, Homo sapiens
gcctcgatagctctgatagcatggagaccagcatctctgcttgctcaccagacaacatctctaggaaaggcagcaacaggtggaagctgttgagttgg

SEQ ID NO: 860401 - DNA, 100 bp, Homo sapiens
ttcctaaggccgccgcttaccccggggtctatggaagtaatggaaggacccctcaacctggacgacatagacagcctaaacccagttctcagggacaacc

SEQ ID NO: 860402 - DNA, 99 bp, Homo sapiens
gggccttcaatgccattcatcaaagagggagctcacaatgtctctctgcaccaagctccatgactcaggatttgcctggagttcctgggaaagaccagt

SEQ ID NO: 860403 - DNA, 100 bp, Homo sapiens
accaaagtcacaaatcatcctagtaataaagtgaaatcagacccacaacgaatgaatgaacagccacgtcaggctaaatttattgtgaagaaatcagaag

SEQ ID NO: 860404 - DNA, 99 bp, Homo sapiens
gccgcgccgcgcctcagctctgatggagaaactgaggcccagaaattgatgtccagaatgctttgctcttagccactgtactattatggcatattttat

SEQ ID NO: 860405 - DNA, 100 bp, Homo sapiens
ggtgggcttcgcagcgagcccctgtgcaggccaagattgacagacacctaatattcatgacttgagaatattctgcagctataaattttgaaccattgat

SEQ ID NO: 860406 - DNA, 100 bp, Homo sapiens
cggcgcaggacgagaacggagacacggacgtgtcctcggagtcggacaataacatcagacagatcaaccaggaggcagcacaccggcgcttccgctcccg

SEQ ID NO: 860407 - DNA, 99 bp, Homo sapiens
ctgcttctcgggctgctggtgctgtgcgcgaggctcctcactgcagcgaaggacaaaactgtgtggagttttatcctatattcataattacattgtgga

SEQ ID NO: 860408 - DNA, 98 bp, Homo sapiens
ggactgaaacggggggagagaacaatgataaagaagaagaagagaagaaagatgaaacttcgagctcctctggatctctctaggagctgacactcgaa

SEQ ID NO: 860409 - DNA, 100 bp, Homo sapiens
agagagcggcggccgctcacaacatgcacagcctggcgacggctgcggatgatgatgctgaagctatccttgctgcagacttcgaaattggtcacttttt

SEQ ID NO: 860410 - DNA, 98 bp, Homo sapiens
acaaccacttccacatcagatgcttcacctgtcaagctttaccgatttgttacaactcaagcaagggccagcagaaattctcttttgacagatataat

SEQ ID NO: 860411 - DNA, 100 bp, Homo sapiens
ctggcagaagttttggtgataaagattttcggacaggtttagaaaatggaatcctcctctgcgagggcaaaggaccactaaagcatacaactgatgtgat

SEQ ID NO: 860412 - DNA, 100 bp, Homo sapiens
gaggatgaagattcaccaaataagctatatactttggttacctatgtacctgttaccactttcaaaagttgatgacaacaagaaactaggagaatgggta

SEQ ID NO: 860413 - DNA, 100 bp, Homo sapiens
cgctgtacgccgagcacccaggcgactgcctcatcttcaaggtggtgcctttggaagtccagagaaattaaatgctttttccaagagcagagaagactct

SEQ ID NO: 860414 - DNA, 98 bp, Homo sapiens
ttccggccaacttccattgaacttcccagcactcgaaagggaccgaaatggagagcaaaggcagagatcctacaagaatccaggatgatgatcccaga

SEQ ID NO: 860415 - DNA, 100 bp, Homo sapiens
tctgatgatgagaactgtgacagccctacaaagaaaatgagagtcgatgaatcagctatctttcagatcattcagagcataaggatgggcatgtgagaaa

SEQ ID NO: 860416 - DNA, 99 bp, Homo sapiens
ttatgttccagttgaaaatgtacctattgaacagattccacttgtgaaggcccggtggttctgggaagcgtacttccagtcaattaaagccattgccct

SEQ ID NO: 860417 - DNA, 100 bp, Homo sapiens
cttgacactgcagaaacagagcgccttcctgcaggagcacaacaccacactgcagacccagaccgccaagctgcagaatgcaagttctagccggtttttc

SEQ ID NO: 860418 - DNA, 100 bp, Homo sapiens
tctgaatgggtcactgactgacaagaaattggagaataacatgcgtggagtggttctacgtgtagtaactgttctgaatcatgtcaaccctgccatggac

SEQ ID NO: 860419 - DNA, 100 bp, Homo sapiens
ggttgtttctggtgggatcgttggctatgtaaaaacagacacttctgagaaattcatcaggctgtgaagcgcgccgtgatgaatatcgaacagagtttac

SEQ ID NO: 860420 - DNA, 99 bp, Homo sapiens
tctcgcttctgcaagaccacgaacacaggtgtgatgaatgcagactctgctaccattttggctgtttggatcctcctttgaaaaagtctcctaaacaga

SEQ ID NO: 860421 - DNA, 50 bp, Homo sapiens
gtaactacctggcattgccttttgttgagaaatgcactcggtgatggaaa

SEQ ID NO: 860422 - DNA, 98 bp, Homo sapiens
gctcatcaactcctacgaggacaaaagcaacgacttcgtatgctctttgccgagggcgtgtggtgagagtccccacagcgaccctggttcgagtggtg

SEQ ID NO: 860423 - DNA, 101 bp, Homo sapiens
agatctccctgacatgcaagaacagggtccagacttttttgtataacgagctctatgtctacaataccagaaaggacacctggaccaaagttgacatcccc

SEQ ID NO: 860424 - DNA, 99 bp, Homo sapiens
gaacgcttcactggggcagtctctgcatatcatggggagatagacgctgctgcctgaaaagaattccatggcaacatcattaaagtgtcctttgccact

SEQ ID NO: 860425 - DNA, 99 bp, Homo sapiens
ctaaactgcattacaagcagcagtggggacgagctttgaaagaacttgccagacttaaacaggtcattcctgtcccaatcagctgctctactactgatg

SEQ ID NO: 860426 - DNA, 100 bp, Homo sapiens
ttaactgaagatagtgcctttcagccctaccaggcacattgcaagcaacccgtgccttgatggtggttggcatcctcctgggagtgatagcaatctttgt

SEQ ID NO: 860427 - DNA, 98 bp, Homo sapiens
cccacagcagaggagcacctgtcagcgagttggaagactttgttgaagacttgaagaaggactccacggcagccagccgattggttactctgaaagac

SEQ ID NO: 860428 - DNA, 100 bp, Homo sapiens
acctcaagtacgatgcggagcgcgacctgcgggacatcgaagccacgggcatcgcggtgcacgcgctcagcaagatttcaggtatgctgctgaaagtggg

SEQ ID NO: 860429 - DNA, 99 bp, Homo sapiens
gatatagttgctgctatacaacacaattataaaatgtcagcttttaaggagttttaagaggaaacctgggcaggctgacaatgaacgttccatgggtga

SEQ ID NO: 860430 - DNA, 98 bp, Homo sapiens
gattctgtgggtgtaaagcaaagaacaaaatgaagtgtgattcaaggtgggaaatagccgcttcagatttgtgaagctgggaatcatttcatcaatgt

SEQ ID NO: 860431 - DNA, 99 bp, Homo sapiens
cgagaactgcgcagacctggtggaggtgttaaatgaaaaacacggagagttcctggctctggatcttggagggaccaacttccgtgtgctttgggtgaa

SEQ ID NO: 860432 - DNA, 98 bp, Homo sapiens
accattgctgcctatgcccacgtgtgtgcccagcatggcaaggtggtgacctggaggacggccacattgtgccgcaccaacagccacgggatcctcag

SEQ ID NO: 860433 - DNA, 100 bp, Homo sapiens
tctctggaagcgattaatgataaaatttcatggagaagaaggccttgactacggaggggttgccagatcttcagctttgagatcaatgtgagcgttgcca

SEQ ID NO: 860434 - DNA, 99 bp, Homo sapiens
gcggatcccacacctccggaccgagggacgcggaacgatatcgcattcagagtgaacaatttgaagatctttggctcataaccaatgagcttattcttc

SEQ ID NO: 860435 - DNA, 98 bp, Homo sapiens
gttgagagaacgaggaggaaggagagaaaatggcgtccacgggcaggtgacaaacattaccaccccagctgtgcacgatgcagcagatgcaaccagat

SEQ ID NO: 860436 - DNA, 100 bp, Homo sapiens
aagtgcggaggtcaaactggcaatatttgggagagcaggcgtgggcaagtcaggaattgaatgatctggcacgggaccctccagcacagtgttcagcagg

SEQ ID NO: 860437 - DNA, 99 bp, Homo sapiens
tcaaactaagaccaaggtcaattgaagtagaaaatgactttctgccggtagaaaagagccctaatttgtttagaactgtaatatgcacagttaaaacaa

SEQ ID NO: 860438 - DNA, 99 bp, Homo sapiens
ggcggacacctccacatcgccttttgccacctttccctttatttccggaggaaacctcgacctgtctcccagttggttgcacagcaggttactcagcag

SEQ ID NO: 860439 - DNA, 100 bp, Homo sapiens
aatcaggaaggcttgtgtctcatatatgagggaaaatcaacaaacttttgagtctgaaatctatacctttggaagaatattgggaaaagggagctttgga

SEQ ID NO: 860440 - DNA, 98 bp, Homo sapiens
aacgtgctggagagaccccgcggctgggcgttcatctaccacgctttcgtgcccgatgagagaaagggaaagttaaggatgctggagcagaacaatgg

SEQ ID NO: 860441 - DNA, 100 bp, Homo sapiens
gcacatcagaattttggtttgaaacttttgtcttggctgggaagtattattggatattcaggtggctgaatccacagaggagcctgctggttctaatcgg

SEQ ID NO: 860442 - DNA, 99 bp, Homo sapiens
gaatcatggaaactctcttctggagaagataacactttagtacagtcgccaactgatgtctacaggatcctaagcacttcaagtcagagaagacaggac

SEQ ID NO: 860443 - DNA, 99 bp, Homo sapiens
tgtgaaggaaaatgatcagaaaaagaaagaagccaaagagaaaggtacctgggttcaactaaagcgccagtcaatgcaaaatcatgctgccgtgttccg

SEQ ID NO: 860444 - DNA, 100 bp, Homo sapiens
tgcgctactgcgcgcgcttctcctacctctggctcaagttttcacttatcatctattccaccgtgttctgggttggaaaagagactgttcaaaccactga

SEQ ID NO: 860445 - DNA, 100 bp, Homo sapiens
aattaccttggagaggctgtgagccacaatgcatcgctggaagtagccagacatggatttgattgacatactttggaggcaagatatagatcttggagta

SEQ ID NO: 860446 - DNA, 100 bp, Homo sapiens
tcttaaagtcacacaagatgctacaccggactggtggagcagtacagagaacagagctggatgactatggccaatttggagaaagagctccaggagatgg

SEQ ID NO: 860447 - DNA, 100 bp, Homo sapiens
tgcagctgccccgagctggatcagctggtggacatctgtcggactttccgtgacatttctgaagatctgaaatcttcagtaggttgatgtggtttcctct

SEQ ID NO: 860448 - DNA, 99 bp, Homo sapiens
acgctctgaactgactgccccgcatcaccggagcgtcccagctgcgaggaggacctcagcagccatgtcgaagccccatagtgaagccgggactgcctt

SEQ ID NO: 860449 - DNA, 100 bp, Homo sapiens
ggatgtggtgctgcccgagaaggtggacgtgctggtgtctgagtggatggggacctgcctgctggctgatatccccaataggtttgaaatgaaacttcac

SEQ ID NO: 860450 - DNA, 100 bp, Homo sapiens
cattaaacgtatttctactaaggaatgggctaaatcaactggatatgatccagttaaactttttaccaagggtgattgtgttgttacagtgctgcttgct

SEQ ID NO: 860451 - DNA, 98 bp, Homo sapiens
atgagtttatatatcttgttcgtgattgtggcatcaggacaaggatacagaacagttttggaatgaacattgccagtgctacaattgcactagtgggg

SEQ ID NO: 860452 - DNA, 100 bp, Homo sapiens
caggagggagaagtggttatattgccattgatgacatccaagtactgagttatccttgtggttcttctgctggtgatgcagtgtggtcagggcattcccc

SEQ ID NO: 860453 - DNA, 99 bp, Homo sapiens
cgggagtacattgagataatcaccagcagcatcaagaaaatcgcagactttctcaactcgttcgcaatggctgccatccggaagaaactggtgattgtt

SEQ ID NO: 860454 - DNA, 100 bp, Homo sapiens
ctgcaagtgctggagaacatcatggaaaacaacactcagtggctaatgaaggacctgggaggaaggcaaggtgctcatctttgatgactcctttgagcac

SEQ ID NO: 860455 - DNA, 100 bp, Homo sapiens
ggccaagtacgagcgacaggagttcatctacccggagaagcaggagccctactcggcaggccaccagcccctcgggttccaagatgcagctactggagac

SEQ ID NO: 860456 - DNA, 100 bp, Homo sapiens
ggcagctgcaaggagggcggcgggactgcactcgagtgtccagacctgctcgatggttatatgtcaccacacccatctccattaggagccccagagcacg

SEQ ID NO: 860457 - DNA, 100 bp, Homo sapiens
acggacagaagatgacctgagttttcacaaaggagaaaaatttcaaatattgaacagctcgtgcacacatcttgaccaactcagcagcaaggtggatttt

SEQ ID NO: 860458 - DNA, 98 bp, Homo sapiens
gagaccgagaagtaggaatccctccagaacaatccttggaaactgctaaggcagtaaaggcaaggggctcaaatagtttacctctgctgagatctgtc

SEQ ID NO: 860459 - DNA, 129 bp, Homo sapiens
tatgaattctgcatttcaactctagaggaaaaaattgaaagagaaaaggaattagcagaagacattatgtcagtttccacctagttatgctggtatatctgaactgaatcagcctgctgaacttttacc

SEQ ID NO: 860460 - DNA, 100 bp, Homo sapiens
tggacgccggcggagacgcgggcgagactgcttttcaggaagccttggacgctgcaggtgataaacttgtagtagttgacttctcagccacgtggtgtgg

SEQ ID NO: 860461 - DNA, 98 bp, Homo sapiens
ttctgtcagaatgccaatacaagcagttgtgtctgcgagattaatctctcatggccgctgcacaagaacctggcttttagctgaactaaggagaaagt

SEQ ID NO: 860462 - DNA, 98 bp, Homo sapiens
ctgtgtggtctttgtgggaggaataacccagactaggaatgccagcatctgccaagcagacccatgccccctttgtgatgaagccaaggaagtactca

SEQ ID NO: 860463 - DNA, 98 bp, Homo sapiens
gggattgtcgggcggtcagcggacttcgtggtagaatccattggctctgaagtggggtctctggttccatgccattgcagtgtcaactaggcctcagt

SEQ ID NO: 860464 - DNA, 98 bp, Homo sapiens
cgatatcacagaacacaagattaatcaatgtcaactgacagggatatggttttaagcctaaatatgatggagaagatcttgcttacacagtgaaaaat

SEQ ID NO: 860465 - DNA, 121 bp, Homo sapiens
tcacttccctcggtctgggcttctctgaggcggcgagagatggtcaggtctggagctcgaccgggccaggataaagatggtgatagagcagttcaccatgcagcttttggagatgaaggcg

SEQ ID NO: 860466 - DNA, 99 bp, Homo sapiens
tgcaggatgggggactccaaagtgaaagtggcggtgcggatacgacccatgaaccggcgagatccagacatttaatgtggatgcaccatgccagaccgt

SEQ ID NO: 860467 - DNA, 98 bp, Homo sapiens
ggacttccttgagggcaggcctgtcttgcatctgtttctccaccacctagcctggaatatagtgttggtggaaataacccagatgaagaaaagaatag

SEQ ID NO: 860468 - DNA, 98 bp, Homo sapiens
gggccggagcagccgcgggcgcccgaggggccgagcgagattcaaccctatgaaaagataaaggccaggggcttgcctgataatatatcttccgtgtt

SEQ ID NO: 860469 - DNA, 100 bp, Homo sapiens
ttcctagagttgttcagaatcctccaaaaccagtcatgaccactagacccacagctgttaaagcaacagccttgggagaccatttcagaggaagtgaata

SEQ ID NO: 860470 - DNA, 98 bp, Homo sapiens
tggcgcacctggtgcgggccctctggaccctggagtacaccccgcagcacagccgcgacttcaagaatttcgctaaggagtttgtgatcagtgatcgg

SEQ ID NO: 860471 - DNA, 100 bp, Homo sapiens
ttcaccacactcacagaccgtgagctggaggagtaccgcagggaggtggagaggaagcagaagggctctgaaggtcggcacagacgcaacccagtctcct

SEQ ID NO: 860472 - DNA, 100 bp, Homo sapiens
atttctcttgtcaatggccaacagagggaaggatacaaatggttcacagttcttcatcatgtttgtgtcattagtgaaactggaaaagcaaaatacaaag

SEQ ID NO: 860473 - DNA, 100 bp, Homo sapiens
atgtccagaatgttatctagctgcttgccaaaaacgagataactggttttgtgagccttgtgtgcggtcttgctctgttgcctaggctggagtacagtgg

SEQ ID NO: 860474 - DNA, 100 bp, Homo sapiens
aggaccacaaagtggaagagtcctgtgccattaaaaacaacaaggaagctttcagtgatgagcaattcttaggttttggctcagatgaagaagtcagagt

SEQ ID NO: 860475 - DNA, 100 bp, Homo sapiens
tgtggaattacaagagatttcgactgtggaagagcaacttatgactctcatctctgctgcacgagaatatgagatagagttcatctatgcgatctcacct

SEQ ID NO: 860476 - DNA, 98 bp, Homo sapiens
aggccccagctgggggctccttgccaccagtgctgtgtcttaagagctgccatcccggctggattggactactagagtgaagcaaattgccaaattgt

SEQ ID NO: 860477 - DNA, 98 bp, Homo sapiens
ggtggctctacccagaattcaattaaagtggctcagtttggcctgtcactgctcctcatcctcctgagccgtggtgaagacctacagagttcagaccc

SEQ ID NO: 860478 - DNA, 100 bp, Homo sapiens
acgacgacgaggaagaggaggtttctgagatcctcagtttgtggtctgccagctaaaggtgaagatatattcctccaattcaggacccacacgacgggaa

SEQ ID NO: 860479 - DNA, 100 bp, Homo sapiens
atgaacccaacctagtgggtgtaatacatcatgaactgcagggaattttggagagtaaaaggctgaaccttgttaaagagaaaaccattaatcagaccat

SEQ ID NO: 860480 - DNA, 100 bp, Homo sapiens
gaagatcaagtgtttcatgtcaatgcctttggatttccacccactgagccctctagtactactaggtgtttggagaagagggattgaccctgaatcttga

SEQ ID NO: 860481 - DNA, 98 bp, Homo sapiens
cagcgggctgcagcgcgccaaaaccgggacggacaagaccctggtgaaggaggtcgtacagacacattcctgaaggcgctaaaagacgaaaagttaca

SEQ ID NO: 860482 - DNA, 100 bp, Homo sapiens
tcagaaattaagattctaagcataggcggaggtgcagccatcactggtgcaagctatatttaacggagatcctgatgaagttcgagcactaatatttaag

SEQ ID NO: 860483 - DNA, 98 bp, Homo sapiens
cctcttataattaatgcaataaaacgcttccatctttatccagaggattctcaaagttggattggtggaaacaatgaaccattgacaggctttacatg

SEQ ID NO: 860484 - DNA, 98 bp, Homo sapiens
aggaaatgaagcgtgctaaagtgtctcaagcactgtttgcaaaggttgcagcaaccaaaagccaggtggtgaagaaggtgaagtccatgcagatgttc

SEQ ID NO: 860485 - DNA, 98 bp, Homo sapiens
ggacgcccgtgcactgggccgcgcatttcggcaagggatcgcttacacctgagacgaactacagaacagcacgtaccagaggtggaagtccaagtcaa

SEQ ID NO: 860486 - DNA, 100 bp, Homo sapiens
agcttcctggaggaggcgggatttaaactggtcaatgaggtgccaatgttaacagggctacagccaataatgatcatacagtagtgtcgctggcatgtgc

SEQ ID NO: 860487 - DNA, 98 bp, Homo sapiens
cgtggcttatgagtacctttgtcatttggaagaagcgaagagcttttgaggaacttgaaaaagctttgagtacagcccaaaaaacagaggaagcacgg

SEQ ID NO: 860488 - DNA, 100 bp, Homo sapiens
gccacagttaccaagaagacttatgagatctggcatcgacggcatgactactggctgctagccggcattataaaaatgtccctcttccagtggaaagccc

SEQ ID NO: 860489 - DNA, 100 bp, Homo sapiens
gagaggggagccggaggaggatgctcctgcctcccagagaggggagccggcgaggatcaaaatcttcgaaggagggttttgagcaaaattttggactgtg

SEQ ID NO: 860490 - DNA, 100 bp, Homo sapiens
cgaataccaagctcggatccctgaatttgatccaggtacaggtttgcagattccgccagcagcacagcaagctctacagatgagtggctctttggcattt

SEQ ID NO: 860491 - DNA, 99 bp, Homo sapiens
ggcgtggaggaagaggcattgaggactttccttacctgtttttccagctcacccactgccagcagaggatggatatcagcagaatttcaagcgaggctc

SEQ ID NO: 860492 - DNA, 100 bp, Homo sapiens
gataccaatgatcctgaaaacagaaggaaattgaaggaacttggagttaatggtctaatttatgataggtcacagaacagaaagtgctggtggacatctc

SEQ ID NO: 860493 - DNA, 99 bp, Homo sapiens
gcagacacagtggctatcattttctgttctacacacaaatcccttacattgggtgcaacagctgcagcccggaaagaggtgataaggaacaagatccga

SEQ ID NO: 860494 - DNA, 100 bp, Homo sapiens
ggatttcttaaaggatagccaattgcagtttgaggctaatggagatttacagacagtcatctgggtggaggacacccttttgggatcagcactgaaagtg

SEQ ID NO: 860495 - DNA, 100 bp, Homo sapiens
ccattatgagaatgttgagttcggcagcatacaggtatgcagtggaactgatgaagaccctgatgataaaaacgcaccctttcggcaacggccattttgc

SEQ ID NO: 860496 - DNA, 50 bp, Homo sapiens
cagaaatacaacagctgctgaagaggacagacatggtggttctgattgcc

SEQ ID NO: 860497 - DNA, 98 bp, Homo sapiens
cagtttctgtgtcccacttcatctttaataagctgttcgggggtcttgtctggattttggttgcctcctccaatgttcctctacctctactacaagga

SEQ ID NO: 860498 - DNA, 100 bp, Homo sapiens
ccttcccacggagcagcactcttcaccctgcacagccttgttaggatgaaatactggagctgttgtagaagaaaaacttctgattttaatacattcttag

SEQ ID NO: 860499 - DNA, 100 bp, Homo sapiens
gaatcaactgagagagatgcttaaaaatcaccagttactttaatgacttgccagcaaagcacggacagagaaggaggagaagctgagccaggcctatgca

SEQ ID NO: 860500 - DNA, 99 bp, Homo sapiens
ttaggtgaaatttcagacatacacaccaaattgttgagacggcagtacatacctgtgaaaatgaagagcaaagccttctggatcttttcttgggagtat

SEQ ID NO: 860501 - DNA, 100 bp, Homo sapiens
tgtcattgtcattactgacataaggattgaaagaaggtggcaagaggaagaagcagaagcagagagaggagtcgaagaagaagaagtcgaccaaaggcaa

SEQ ID NO: 860502 - DNA, 100 bp, Homo sapiens
gcagcactctcaggcccctcaggggaggagggcctcagccctggaggcaagcgaaggagaggctgcaactctgaacagcacctgtgagaatatgaacttc

SEQ ID NO: 860503 - DNA, 98 bp, Homo sapiens
ttaatctgccaggcggagggggctttgctggtctttcttggactattccagagagcaacagcggcgggagcgggagcagcggaagctgcaggagaagg

SEQ ID NO: 860504 - DNA, 100 bp, Homo sapiens
tcctactccataaagacttcaactgagaaagcgagatggactccatttggctccttcctttgcaagacatcaagggctccttacccacccccttcctcaa

SEQ ID NO: 860505 - DNA, 100 bp, Homo sapiens
ttctggccttggagagaaaacttgcaaggaaaggaacatgtttgaatttcagatgtgttcctcaatgaatcacgaactctaatgaatcattgattgacca

SEQ ID NO: 860506 - DNA, 98 bp, Homo sapiens
gggtcgggggacacgcaggatgagccccgcgaccactggcacattcttgctgacaggtttgacagtgctctggaagacctacctaagagtggacctca

SEQ ID NO: 860507 - DNA, 100 bp, Homo sapiens
cggggcgccctgcgcttcgccaagctcggctttgagatcttcctcagctccttccaggacatgggcaagttttgcctcacatacgaggcctccatgaccc

SEQ ID NO: 860508 - DNA, 98 bp, Homo sapiens
gaaagcagtgacggaggagcttgtaccaccgctttcagaaggagttctcactcgaagataaagaacagctcgctaaccacgaaagaggaatcgatgct

SEQ ID NO: 860509 - DNA, 99 bp, Homo sapiens
ggggtgattcacgccggggaccccaaggaggtagtaaacctattgatggcaattttgctgactgtggaagtgactcatccaaactccatgccagctgtc

SEQ ID NO: 860510 - DNA, 100 bp, Homo sapiens
tttctctagccttaggtaatgcatgaaagcacatgtttcagtgccactcacataagaagtgcccgaagctccaccatgaggcgaggtggatggaggaagc

SEQ ID NO: 860511 - DNA, 99 bp, Homo sapiens
agctcccgccctggtccttcgcccccaagactgcgactctaaacggactcatgtactttgtcagaagctccaccatgaggcgaggtggatggaggaagc

SEQ ID NO: 860512 - DNA, 98 bp, Homo sapiens
cacacctagcagtttcacagcctttgacagaaatgtttaccagttccttctgtaagtggcaccctgtgctgcgcacactaaagaaccgcattgaagag

SEQ ID NO: 860513 - DNA, 100 bp, Homo sapiens
cgcaaacaagccaatcccaggaggaaaaacgagtaacctgatccactacctgggactgagccatcacctgctggcactgaattttatcattgtttctttt

SEQ ID NO: 860514 - DNA, 100 bp, Homo sapiens
caagcaagtttaatcagacctgctcacacttcagaatagagaaggtgtgggaattaacagctaacaatgtaatcatggtttctgctattggcaatgacgg

SEQ ID NO: 860515 - DNA, 98 bp, Homo sapiens
gtgctagaggaggaccacaaagtggaagagtcctgtgccattaaaaacaacaaggaagctttcagtcttaacagagcgttccaaaaagaggactctcc

SEQ ID NO: 860516 - DNA, 100 bp, Homo sapiens
acagctaagatgtcaggacatcctggaagctgggaaaggatatttggtttccaggcaggactgacgtctttggattgcagtggatcttactgcttacctg

SEQ ID NO: 860517 - DNA, 100 bp, Homo sapiens
actggagtgaagaagcaagtgggatcacctatgaagataaagaagatagtggtgagctggcaaagccaaagattggttttccagagacaacagaagagga

SEQ ID NO: 860518 - DNA, 99 bp, Homo sapiens
ttgacatcatgaatgatctctccaacagggtctggagtatcagccaggagcccgatcctgtccagaggcttcaggcatctggagagaccagtgggctgc

SEQ ID NO: 860519 - DNA, 98 bp, Homo sapiens
gactgctccagaattagtaaccagctttcaagacagactgctaactgcagatcagactaagtatagtaatatctgttgaagactgggatagtttccaa

SEQ ID NO: 860520 - DNA, 98 bp, Homo sapiens
gtcgtccagtccgaaagaaaccaccttctccagcacctgtcctgggggaacagagaggccctgcggtggctacgggcagtgtgaaggagaagggacac

SEQ ID NO: 860521 - DNA, 99 bp, Homo sapiens
aaccttcaaaggcacttcgtggggtcacaggttcagaaaatggtcttgcacagaagcatcgaacacctcgccgacgatgtcagcagcccaaaatgctga

SEQ ID NO: 860522 - DNA, 100 bp, Homo sapiens
tgccaccatcgccatcgcctacatcatgaagaccatgggcatgtcctccgacgacgcctacagccacgacgtttttccaccacatcaacctgcagtatag

SEQ ID NO: 860523 - DNA, 100 bp, Homo sapiens
tccacactccgctgctcgacagcctacctattggtcagaatgtggaaaaaatacagaatctgttgggcagttatggttgggccttcttcgtttctacaca

SEQ ID NO: 860524 - DNA, 98 bp, Homo sapiens
aacttagcagtcacagacaagttgaagatgaccttgcaagaaggacctcaccagatgctgcccctcaatcttggatttcctggcctccagaactgtga

SEQ ID NO: 860525 - DNA, 100 bp, Homo sapiens
aggcttcaaaattgacactatgggaacctaccatggtatgacactgaaatctgtaacgaatacttcagagagtcagagttgtgccagaagtctcttaatg

SEQ ID NO: 860526 - DNA, 100 bp, Homo sapiens
cgacaagaccatgctggcaagtctgaaggtcaaccttgaaaagatcttttgaggtcgaggaggtcgagacacccaactccaccccaccccggagggtcca

SEQ ID NO: 860527 - DNA, 100 bp, Homo sapiens
gacagctccatgatgaagctcgcaaatggtccagcaagatttcaacactacacttgcacaatgtctttgaaaccaagagtagtagattttgatgaaacat

SEQ ID NO: 860528 - DNA, 100 bp, Homo sapiens
gttccactggacgctcatcagagggaagatctttttcctcaattggttttgcgtgggaggcggtcccgggatttcaagggtctacgcgcttttctatggc

SEQ ID NO: 860529 - DNA, 100 bp, Homo sapiens
agaagccatttcaggagtacctggaggctcaacggcagaagcttcaccacaaaagcgaaatgggcacaccacagggtaacaagatgctcaactatagtgc

SEQ ID NO: 860530 - DNA, 98 bp, Homo sapiens
tccctcccccttctttcgatcagagatcggcggagaccctcgaagtgcgcaaacttgacactcaccctgaccgatagaagcagatttgggatatcctg

SEQ ID NO: 860531 - DNA, 100 bp, Homo sapiens
ggagataaaattctcggagatctgagctacagaagtgcagatattaccaaatctctcttggtgactgagttgggctcttccagaacaccagagactgtga

SEQ ID NO: 860532 - DNA, 99 bp, Homo sapiens
ggagtgcctgggattggcatcacttcctgatagcaagttcatctgcatggaatgtaaaactggatattattgctggattcctatataccattttaatct

SEQ ID NO: 860533 - DNA, 126 bp, Homo sapiens
gcagatgcccagcccagaattgttcagtggaagcccctgcttggatgcctgtccaccactgtactgactcagcccaaaaccatgtttgcccaagttgaatctgatgatgaggaagcaaagaatgag

SEQ ID NO: 860534 - DNA, 100 bp, Homo sapiens
ctttccctcccccttctttcgatcagagatcggcggagaccctcgaagtgcgcaaacttgacactcaccctgaccgtttgcgtgtgaacttggacatggg

SEQ ID NO: 860535 - DNA, 99 bp, Homo sapiens
gtcagaaagtgcagaaggttatggtgcagcccatcatcttttggagaaatctcgtgctatccgccaagccaaggaagaacggaccttccacatcttcta

SEQ ID NO: 860536 - DNA, 100 bp, Homo sapiens
gtactgctccccaagaagactgagagtcaccacaaggccaaggttggtgggttactacaatcaaaatttacaagtggagcttttctttcaccaagtgtct

SEQ ID NO: 860537 - DNA, 99 bp, Homo sapiens
aagtgcaagagcagaggccttctctagaccttgccaagatggcacaggtgcggattgatgagtacgattactccaagcccatccaggggcaacagaaga

SEQ ID NO: 860538 - DNA, 100 bp, Homo sapiens
gaaatttggaattgtatgaattcatctttgccagggtactgccagggggatggttaccgcatcggctttggccagtgtgctggaaaagtgctgcctgctc

SEQ ID NO: 860539 - DNA, 100 bp, Homo sapiens
tgacagaagagtttcacagaacagccttggggagatgacaaaacttggtagcaagacagccctcaatagacggctataatggatttccagttcttaggaa

SEQ ID NO: 860540 - DNA, 98 bp, Homo sapiens
aaaaggaaagaagtgcattgttttggtgactgaacttatgacgtctggaacacttaaaacgtacaaagctgtcacagatgcctgttctcttcagccag

SEQ ID NO: 860541 - DNA, 100 bp, Homo sapiens
agcgggaagactcatcggagcgtgtggatttgagccgccgcattttttaaccctagatctcggtatacatccccagatttcctctatattcgttcttggc

SEQ ID NO: 860542 - DNA, 98 bp, Homo sapiens
gaacgcgtgatgatggagtttgtgagggaaacctgctcccaggagttgaagaagctcttcgtgtggtgaagatcttacagaaccttgatccgccattt

SEQ ID NO: 860543 - DNA, 100 bp, Homo sapiens
ccccatcctgggaaaaatggggaagctgattatgtttgagaccttcaacaccccggccatgtacgtggccatccaggccgtgctgtccctctacgcctct

SEQ ID NO: 860544 - DNA, 100 bp, Homo sapiens
catttgctattgattctagtcatccctggcttcatgagtgtatgattcgtctctttaatactgtaccttccactggaagaatctcaaacagcgctactta

SEQ ID NO: 860545 - DNA, 99 bp, Homo sapiens
tatcctctgtttctctgctgcaccgacctcgacgtcttgcctgtgtcccacttgttcgcggcctataggacatggatttgattgacatactttggaggc

SEQ ID NO: 860546 - DNA, 100 bp, Homo sapiens
ctacaatgtgaagatacataagatcgtagccagacccccaggtctctaattaacagaagatggcaaagcccagccacagcagctatgtccttcagcagct

SEQ ID NO: 860547 - DNA, 100 bp, Homo sapiens
gccccagtgcactagccattgaagtatttgaagcacatttgggaagccacattttgcagagggtgaaggggaaccagagcgcacaagggaactgactcag

SEQ ID NO: 860548 - DNA, 147 bp, Homo sapiens
atccaaagttctcgcccactatcctcagaatatagaatggaacccttttgatcaagatgcggtgaacatgcctggaagctccgaccccaggagccagcccatcaacctgaaccattacgccaccaagaagagcgtggcggagagcat

SEQ ID NO: 860549 - DNA, 99 bp, Homo sapiens
ttgaagattttgctagagctgaaggctgtgataatgaggaagatcttcaaatgggcattcacaagagtgaagtcaccctgctgagaaatgaagtggcac

SEQ ID NO: 860550 - DNA, 100 bp, Homo sapiens
ctgcaaaggccccagcggcccagaatgtgaaagatgttgcagaagtgttccagaagtggctgaagatagaaggaaaaaagtgccactgcctatcagaaaa

SEQ ID NO: 860551 - DNA, 98 bp, Homo sapiens
ttgatttgccctatgggatgagaacatcaggatgaccccataggaaatattaacctggccatggaaatcgctgagaagcacctggatattcctaaaat

SEQ ID NO: 860552 - DNA, 100 bp, Homo sapiens
acgacctgctggtggacctggaccaccagcgccagagcgcgtgcaacctggagaagaagcagaagaagtttgaccaggtccatgagctggagaagtccaa

SEQ ID NO: 860553 - DNA, 100 bp, Homo sapiens
aaacacaagagccgaaaacgccggttggtgacagcgtcccaagctggtgacagacccactctgtaactttcagctagattcagccaccagatcccagaaa

SEQ ID NO: 860554 - DNA, 99 bp, Homo sapiens
cctggctaaggaaaccctattacctccagaatggcttattcagaagagcataaaggtatgccctgtggtttcatccgccagaattccggcaactccatt

SEQ ID NO: 860555 - DNA, 100 bp, Homo sapiens
gtcatttcatccaccacattacttaggagccacacaggacagttgacccaacacttctgccacctgaagaacgacacctgcattcctccatctctgggac

SEQ ID NO: 860556 - DNA, 100 bp, Homo sapiens
tccacaagaaaacttgagggaacccaaaagaaaacgaggcagacccccttccatagctcctactgatgctgggctcttgcactgtttggtggaaatggtg

SEQ ID NO: 860557 - DNA, 98 bp, Homo sapiens
gccgtcccacgagctcacagagctatgaacagaatatcaaacagattggcacctttgcctctgcccggattgcatttctacaaggcgaaagaaaaggt

SEQ ID NO: 860558 - DNA, 100 bp, Homo sapiens
tttgctgtcggaaagatgttttaatgattcttccatatgtggcaattgtccaagaaaaggtcaatgagctgaaggagaaaggcaacaaggccctgagcgt

SEQ ID NO: 860559 - DNA, 100 bp, Homo sapiens
gtatctcaagggacttgcaggaactgcagaagaagctgtctctgctgatagactccttccagaataactcaaaggccagtacttgaatcttgataaagat

SEQ ID NO: 860560 - DNA, 100 bp, Homo sapiens
agttcaagtacagatcacacgcccactaaagcccagaagaatgtggctaccagcgaagcttcctgcagatttcacaaaactgcatcttactgacagtctc

SEQ ID NO: 860561 - DNA, 100 bp, Homo sapiens
ggacaagtcctgcgcttggggatcctctgtacgcccgttcactgccagagactgctgctactttgaaacgtacgatagaggccctgatggacagaggagc

SEQ ID NO: 860562 - DNA, 98 bp, Homo sapiens
caagttcccgggggccgtggacgtccggaccctatttgtcagtggccttcctctggatatcaaacctcgggagctctatctgcttttcagaccattta

SEQ ID NO: 860563 - DNA, 98 bp, Homo sapiens
aaaggtgtggagagaggagaaagaatcacaaccacagctgcctgcatgatggacctaaggaggtacccactggatgaacaaaactgcaccttggaaat

SEQ ID NO: 860564 - DNA, 99 bp, Homo sapiens
ttccttgtagataagcaactggattttttaactgaagatagtgcctttcagccctaccaggtttttggattcaaagcataaaaaccattacaagatata

SEQ ID NO: 860565 - DNA, 98 bp, Homo sapiens
agagaatgacgatgacgtctaccgcagcctggaggagctggccgaatattaataaggcagcggaaagaagaaatatgaatacggctccatcaagaccc

SEQ ID NO: 860566 - DNA, 100 bp, Homo sapiens
ccgcagtctggccacccgcttccatgcggttcgggtccaagatgatgccggtttcctgggagaaggtggcttaaggctgagacacttatgccctgggcca

SEQ ID NO: 860567 - DNA, 100 bp, Homo sapiens
cgtttaccactactacagtcgaatggccaactatcggaacacgagcgagattcctctggttctggtgggaacccagggtttcagagcagcgatggagaaa

SEQ ID NO: 860568 - DNA, 98 bp, Homo sapiens
tcaaaggagacaagtgtcacagcctggttggaaaacccaagatatttatcattcaggagtcttttagtcctgctatacagctgcaccttgtacatcaa

SEQ ID NO: 860569 - DNA, 100 bp, Homo sapiens
tgtgaactcattgttaagcacaagttcacgaaagcctacaaaagtgtggagaggttccttcaggaggatcagatatgtcttctccgactactatgaagaa

SEQ ID NO: 860570 - DNA, 100 bp, Homo sapiens
ctctgaactttctccggggcgcagcgtgacggctggcatcatcattgttggagatgagatccttaagcccaaagagtcgattgatccaattaaagaaaga

SEQ ID NO: 860571 - DNA, 99 bp, Homo sapiens
cttcatcaaaaatagtgatagctttgataagtgtcattccacacatccacaaatctctgattgggaagaaaggacaacagaagactgtctaaaggatgc

SEQ ID NO: 860572 - DNA, 100 bp, Homo sapiens
ttcccatcgaagctctagaaatgaatgtttccatctcttcagagatgaaccagattctgaaaaagagttccacgtcctcccttatcgagtctttgttccc

SEQ ID NO: 860573 - DNA, 99 bp, Homo sapiens
tagcgcgaccctgagccggcgcccgtggtccggccatggacgacctcggtatcgtcagatcctggaaaaagccattcagttatctggagcagaacaact

SEQ ID NO: 860574 - DNA, 99 bp, Homo sapiens
ggaacagctccggtctacagctcccagcgtgagcgacgcagaagacaggactgaatgtgggcccagttggcgtcattctgctttgacctaaacattccc

SEQ ID NO: 860575 - DNA, 100 bp, Homo sapiens
gcctcctggctcggggctgtggcctggacttcctcaacagatggctgagagctagcaaggaaaactcaggaccatgatggctcagtttcccacagctatg

SEQ ID NO: 860576 - DNA, 99 bp, Homo sapiens
gagtatcttaaaatgtatccagttttatgctgatgagagctataacttaatggtacaggtttgcagattccgccagcagcacagcaagctctacagatg

SEQ ID NO: 860577 - DNA, 100 bp, Homo sapiens
ttccctaaggcccaaccaaacagaagagtatgggattgtgctggatgcgggttcttctcacacaagtttatacatctataagtggccagcagaaaaggag

SEQ ID NO: 860578 - DNA, 100 bp, Homo sapiens
tggtaaccagccgcagcttccgtactgccagtgtcagcatcaaccagacagcggttggattgcagccctgtctacactggataatcattccctggccata

SEQ ID NO: 860579 - DNA, 100 bp, Homo sapiens
ctggcctccatcttcggcaccgagaaagacaacaaaatgatgcttcaacacccaggccaggtctctgcctcggaagtgagtgcttctgccatcgtcccct

SEQ ID NO: 860580 - DNA, 100 bp, Homo sapiens
accgtggttggcgggggcgtccagccctacctatagaagggccgagcacagcaatgcaaagtgtttcctttgagctctgctccaaccctggtgttcttct

SEQ ID NO: 860581 - DNA, 50 bp, Homo sapiens
aggcgctcaccatgttccctggagtgatgatgatgatgattttgatgatg

SEQ ID NO: 860582 - DNA, 98 bp, Homo sapiens
tcaaccctcacttcgatttggaggacagagactgcaagtgttggagcgggccggagagaagtagagtgggctgcgaggagaaggaaacaggcctttcg

SEQ ID NO: 860583 - DNA, 98 bp, Homo sapiens
aggcctcatctcagagctgggtgccaggctgaaggatcactgaggaaggggaagtgggcaaagcagggcccatttggaggccagcgctgagaagtgga

SEQ ID NO: 860584 - DNA, 100 bp, Homo sapiens
ggccaatgtgggatcgatgtttcaatattggaagcgctttgatttacagcagctgcaggatctcatagatcagaacatactggagcctgtaacccgtgca

SEQ ID NO: 860585 - DNA, 99 bp, Homo sapiens
ctgcccaaggggccggacacgctctgcttcgacaaggacgagttcatgaaggtgtctgcttttggggcagagttttcatcggaggcatgcagagagtta

SEQ ID NO: 860586 - DNA, 99 bp, Homo sapiens
tgttagcacctcagcccatcccaggccgcaatgtttaccgaatgctttttaagagcaaagcatatgagcggaatgagttgttcctgccgggccgcatgg

SEQ ID NO: 860587 - DNA, 99 bp, Homo sapiens
gtttccccgcaaatgactggtcacgcgggactgaacaccgcacaggcaggaggcatggccaagaaggagcgatatatagttatcagcaaagtagatgaa

SEQ ID NO: 860588 - DNA, 99 bp, Homo sapiens
taaaagctggtgttattgctgttattgtggttgtggtgatagcagttgttgctggaattgttgtgctggagtctactcttcatcttgtgttgagacttc

SEQ ID NO: 860589 - DNA, 98 bp, Homo sapiens
atggggctaactccagaatcccccattgaaagcatcatcattcaccagttacgaatgaactccagatgaaatggtaaaccaagcacatactgggtgtg

SEQ ID NO: 860590 - DNA, 99 bp, Homo sapiens
atcaagcgggtgaaatctggcatattagcgctagccctgcagacagaggtgtgctgacgacctgctacaacagaaagtcttctgaagaggagtctgatg

SEQ ID NO: 860591 - DNA, 50 bp, Homo sapiens
aagaaagtggacaaagagaggagtcagtctgaaccggacggcttttctca

SEQ ID NO: 860592 - DNA, 98 bp, Homo sapiens
caccgcagatgttgtcaaggtggcctaccaggaggccaggggtgtcgccatgcaaatcagccggcaccaggagcagttcatccagatgctgaacgagc

SEQ ID NO: 860593 - DNA, 100 bp, Homo sapiens
ctggaccgtggggaaactaaaaacgcatctatctaacgtttaccctagcaaaccagtgctgtaaaatacctggagtgctcggcgctcacacagcgaggcc

SEQ ID NO: 860594 - DNA, 98 bp, Homo sapiens
ccggcggggctgcggagggccagtggactcagtgtggacaacagtgagtatatgcggaatggagacttcttacccaccaggctgcaggcccagcagga

SEQ ID NO: 860595 - DNA, 99 bp, Homo sapiens
catctggagtaaaaactgagtcagctgtgctgatgacatcagataaggaggccagagcaagctcattttcaaaccagatctcactttggaagaggtaca

SEQ ID NO: 860596 - DNA, 100 bp, Homo sapiens
tgggaaaccacgcaggcaaacgagaattaaatgccgagaaggccagtacgggatttgtcttggctgttactatgacacgggaagcaattgatgaatttcg

SEQ ID NO: 860597 - DNA, 98 bp, Homo sapiens
gcggcccccggacctgcaagtgccgcctccctccggaggtgcgcggaggcttggtgtgccagcggtcttgcgagtggctggttccctgcagaagagca

SEQ ID NO: 860598 - DNA, 98 bp, Homo sapiens
aaagattgcaaggtgaataaagaagtggagcgtgtcctgaaggagttccaccaggccgggaagcccatcggacaccattcgcttttcacccaagatga

SEQ ID NO: 860599 - DNA, 99 bp, Homo sapiens
ggaatatgtggatcctacagttactctagaattattagatgaaagaaaagtttgctgaagcttcagaggaggcagtctctgttcagagaagtatgcaag

SEQ ID NO: 860600 - DNA, 100 bp, Homo sapiens
gataaggccaagctgaagaaaacggagacgcaggagaagaacaccctgccgaccaaagagagcttgagtttgaagaaacagaagaacctgattttactgc

SEQ ID NO: 860601 - DNA, 98 bp, Homo sapiens
actcctggtcgctgtgcttgtggcctctcagggaatagcatcagctcagccgggggagtgcagttggcagagtctctcgttctttgcaggcgcctgga

SEQ ID NO: 860602 - DNA, 100 bp, Homo sapiens
gagcctgcccaggtggtctgccatgccccagggagctcccaggacttcctcccagctgacatccaggctcagtttgccatcagccgggagctgatccgga

SEQ ID NO: 860603 - DNA, 100 bp, Homo sapiens
ggccgccattgtcggctactgcgacgccaaatacgtctgggcagccacggccgggggcgtctttcagagcattacggacctgaaggagaagaaggagaag

SEQ ID NO: 860604 - DNA, 100 bp, Homo sapiens
acgagaaagaggtgatagatgccctcagagtgaacaacaaccagcagaatgccgcggtgggtcatgataactgggtacgtggagttctgttccattctgg

SEQ ID NO: 860605 - DNA, 99 bp, Homo sapiens
gcagagttcctgtcaagggatcaagtcttccaacagaatggttatgatgtgattgctcaagcccaatctgggactgggaaaacggccacatttgccata

SEQ ID NO: 860606 - DNA, 50 bp, Homo sapiens
tccagcggcggcggcggccagcagactggtgaattttcagctcgtttcct

SEQ ID NO: 860607 - DNA, 99 bp, Homo sapiens
gaaagtgaaagcgatgtggtccttcttagtcccaaggaccctgacagcccttcagggtttctcgctctctgctcctcgctggacagaaaagatcctggc

SEQ ID NO: 860608 - DNA, 100 bp, Homo sapiens
aatgggacaagatcccgtccatgaatcagacttaattcagtgcacaaatgagatgaatgtgaacatcccacagttggcagacagtttatttgaaagaact

SEQ ID NO: 860609 - DNA, 132 bp, Homo sapiens
ttatttcaaacatcattttactttggatatatggcggtatttagcacagccttggggataatgtgtggcggtcaagaagcagatcgagacggcggtcacattctaagtctaggagtcggcgacgatccaaaa

SEQ ID NO: 860610 - DNA, 100 bp, Homo sapiens
gtgcagggcaagcactccacctccatgttcttccgggtggtaggccagaagcctgtcttagatgttcatgcagaactagacagaattacacgaaaaccag

SEQ ID NO: 860611 - DNA, 100 bp, Homo sapiens
cagaggaccaggcagggccagaggaaagtgagattcccacagaccccagtgaaggggaaagcgcgaatgcagtcccccactacaacaaattatgcagtcg

SEQ ID NO: 860612 - DNA, 98 bp, Homo sapiens
ctcagaacagagcagaaatcaaattgaagagagcagttgaagaagtgaagaaattattggtacctgcattgcgctacaagtcagacctgatcggcatg

SEQ ID NO: 860613 - DNA, 74 bp, Homo sapiens
gaggaggcgagctagccgggagttacaccgccaccgccaggttagtctgaatgattcccacaatcagatggtgg

SEQ ID NO: 860614 - DNA, 98 bp, Homo sapiens
cttgatcagcctttacagtaaaaatgacccatctatggctgcttaatgctggagcattggatttgctaaaggagcttaagaatattcctatgaccctg

SEQ ID NO: 860615 - DNA, 100 bp, Homo sapiens
atcaactgccatttcaaagaatatagatggttttgaaaagttcatgctgtcccttcattgaattttagcggtttccaacctagatgaggaaagccgatgg

SEQ ID NO: 860616 - DNA, 100 bp, Homo sapiens
ctcccgagtggctgggactacaggcatgcctttataggtattgatttaaatcttacaccaaccctgtggattggtacaattattgtgcccacttcgctga

SEQ ID NO: 860617 - DNA, 99 bp, Homo sapiens
ctgctgctggaggaggataacaagttttgtgcagattgccagtctaaaggttcacctttccttgccagtgaagatggcgtgcttggcggagtgattgtc

SEQ ID NO: 860618 - DNA, 99 bp, Homo sapiens
ggaaacaaagttattttgctcgatacactgaagagatggtgccttggcacccttgcctggaactcgttagcaactgcgagcagaagctttccagtcaca

SEQ ID NO: 860619 - DNA, 98 bp, Homo sapiens
aacaggatattcctcatgacattgctgtctgagctagccaacatggaagaagatgccagatcagctggagtcgctacctttgttctccaagaagaatt

SEQ ID NO: 860620 - DNA, 98 bp, Homo sapiens
agcatggtcattctgcttcccgatgacaacacggacctcgccgtgagagcagagctgacatctgataaagacatgtaccttgacaacagctccattga

SEQ ID NO: 860621 - DNA, 100 bp, Homo sapiens
aagataagttccatgaattgatgagccagctccagaatcctaaaggcttattgcagtatattatatctaaagccaagaatgcagatcatcctacgtggac

SEQ ID NO: 860622 - DNA, 98 bp, Homo sapiens
gaactgtgaaaaatcttttaggagggttcttgagtattttaacacaggatgattctgattttcaagggcaatgacatcattgcagcagccaagcgcat

SEQ ID NO: 860623 - DNA, 100 bp, Homo sapiens
ggttggtttcagcatgtatctgcttgatattggcggtggctttcctggatctgaggatgtgaaacttaaatttgaagagcttatcacaccacatgggctt

SEQ ID NO: 860624 - DNA, 100 bp, Homo sapiens
aacacaagtggatccttcagctcatgcacagttgcaaagagggctacgtgaaagatctgaaagaatagcctaacatggcagaccagagacagcgctcact

SEQ ID NO: 860625 - DNA, 100 bp, Homo sapiens
catgatggtcgactacaagaagagggcggagcggagacgggagtattatgaaaagatcgaggactcagagagagtaatgataattaccggaccaaacatg

SEQ ID NO: 860626 - DNA, 100 bp, Homo sapiens
ctgcaatatctggcaagccgggtgacaagaccatggcaaaagttataaccaccgtactgaagttccctgatgatcagactcagaaaattttggaaagaga

SEQ ID NO: 860627 - DNA, 98 bp, Homo sapiens
tgatactgcagctcttcttgcagaactggaaaaaattaaaaaagaaagagctgaagagcaggccaggaagcaaatcctgaaggaacccaaagtggctg

SEQ ID NO: 860628 - DNA, 98 bp, Homo sapiens
aacaaaatgatttcacacatccaagatgtggagtccaaaatacaggagcatttgaaaaggaatggtgaggttctggagaattgatgaggattatccag

SEQ ID NO: 860629 - DNA, 99 bp, Homo sapiens
gtgggctcccgctccgggcccggggccaccggctgtcccagcagaccgggttatcccagtccgaggtccagcgaaggattttatcccagcccacagcac

SEQ ID NO: 860630 - DNA, 100 bp, Homo sapiens
attgtctgtactgatagcatctaatgtttactcctggcttgggggcattaggaagcactggaggctcttcgggaactaatggatctaacgccacacctag

SEQ ID NO: 860631 - DNA, 98 bp, Homo sapiens
agagtgtgcagcggattaaagctaaagacatagttcctggtgatattgtagaaattgctgagtgtgaacatggctacgcctcttcattcccgtccatg

SEQ ID NO: 860632 - DNA, 99 bp, Homo sapiens
accagccagcacccatcgctcagttgtctccagctgttagccagaagcctcccttccagtcagggatctcacattcttgaaggtggcattgaagagcac

SEQ ID NO: 860633 - DNA, 118 bp, Homo sapiens
cttggagcaaagggcagtcggcggagcttcgccaaggctggcgcagtcggaacagatgttgttattgtaaagaatggaagaagaatatgtggaacaggaggttgtttagccagcgcac

SEQ ID NO: 860634 - DNA, 100 bp, Homo sapiens
ggacagtctcagggacaccatgtagagaattttggtctcgattcagtgcctatgaagtcatcaagctaaaaggatataccaactgggctattggattaag

SEQ ID NO: 860635 - DNA, 133 bp, Homo sapiens
gaaagacctggatgacatcagcaccaaaacaggcatcaccctcaagagctgccggagacagaaaagtccaacctgatcgtggtccagagaggtcacagcccacccacatcatccttggttcagccccaatccc

SEQ ID NO: 860636 - DNA, 50 bp, Homo sapiens
ggtttctttaaccagcaatccggtcaggagcatggggaagtgattgactg

SEQ ID NO: 860637 - DNA, 100 bp, Homo sapiens
tagtaatgactgggatatttactactgggccacagggaaattggattccaagatccatcaaggagcaaagaaggggttaatgaagcagaataaagctgtc

SEQ ID NO: 860638 - DNA, 50 bp, Homo sapiens
ggaaaatctccccggtgactttcagatggagtgaaggtacctgagcgcag

SEQ ID NO: 860639 - DNA, 99 bp, Homo sapiens
tcttcggaagcggcggcggcgcgatgaccacgctacgggcctttacctgcgacgacctgttccgcttcaacaacatggtcccttgccagctccatcttt

SEQ ID NO: 860640 - DNA, 100 bp, Homo sapiens
cctaacgctggccgacaacagcctggcgtccgccacggtccaagggtggggaaggacttctccagctgcctgcatctggccgaggaagataccaaaaaag

SEQ ID NO: 860641 - DNA, 98 bp, Homo sapiens
caaagctcctcaagtctctctttcccgtccgcgatgagaagaggggcaagcggccgtctcccctcgcacaccaggagagcaagccctggaggttcact

SEQ ID NO: 860642 - DNA, 133 bp, Homo sapiens
cgcgtttgtcaagttttctactcttacaaaggaactgtccacactgctgaaaaatctggaggaggcaaaacagattcagaatctgcagaaagcaggcactcgtacagactcaagggaggatgagatttctcct

SEQ ID NO: 860643 - DNA, 101 bp, Homo sapiens
ggattgctggctacagcttcagaagaccgaagcgttcgtatctggaagacgcatcttctctccagactgccgatcccagaaagccaggtgatcaccattaa

SEQ ID NO: 860644 - DNA, 99 bp, Homo sapiens
gctgctgggatggcgcgggccgggccggcgtggctgctgctggcaatctgggttctgatctacaatggccaactggacatcatcgtggcagctgccctg

SEQ ID NO: 860645 - DNA, 98 bp, Homo sapiens
agaagccccaacagcacggcgtggcctctcagcctcggtcagtcttcactgtttccaatggaagatggattcttggatgatggccgtggggatcagcc

SEQ ID NO: 860646 - DNA, 100 bp, Homo sapiens
cctctgtgcagctgtggagctgttgcatgaagctgacgccctcctcttctggctcagcaggttgcccccaagtttcctggcagtgtgtgatactgaggag

SEQ ID NO: 860647 - DNA, 100 bp, Homo sapiens
ccggtgctcttcatcaccttcgtggtcgtctggtcctactacgcgtacgtggtggagctctgcgtgtctcagagtcaagatctccactgaagttggcatc

SEQ ID NO: 860648 - DNA, 100 bp, Homo sapiens
acagtgatgccaaaattgaagaatgtaaagacttgaacatatttggatctacttcccacatcacaaactttgaggttgatcaatctgtgtttgaaattcc

SEQ ID NO: 860649 - DNA, 100 bp, Homo sapiens
gaacccccaggagcgcccaggcttgggcagcaacccctgcatccccattttttactgagctcaggagagcaagatgaagttgaggaaacgtgtgaagctt

SEQ ID NO: 860650 - DNA, 100 bp, Homo sapiens
gttctccaaacatgatcgtttactgcaaagttgctgaaaagccaggagtcaaaatgactgagcgctttgactgccaccattgcaacgaatctctctttgg

SEQ ID NO: 860651 - DNA, 100 bp, Homo sapiens
cgtaaatgactatattttatactatggtggcaaaaaagaagacttcaagcgtttgggaggcatttcatccttcatgaagccattcaggattttgaattgc

SEQ ID NO: 860652 - DNA, 101 bp, Homo sapiens
aaagaatgtcctaccttctctatcagatgctgtgtggaatcaagcaccttcattctgctggaattattcatcggatggatggagtggaaccctggcttccc

SEQ ID NO: 860653 - DNA, 100 bp, Homo sapiens
atacaatgaagtagacattggtggaaacatttagttgtttacattcagagctctatcaataagaggaatacatattacagtgaattcgacaaccgcacaa

SEQ ID NO: 860654 - DNA, 100 bp, Homo sapiens
atattagtaaaagtggcagacccacggttcattggattttgcattcagaaaggagcagactgtggagcaaagggaatgaaagctactggttgattttaaa

SEQ ID NO: 860655 - DNA, 100 bp, Homo sapiens
ctatatctgaagctaaaattaagaaacgtcaggctcctgatccgaatttgggactgagcagggggaggaacatttaagctgatggaagtggaagtggaag

SEQ ID NO: 860656 - DNA, 100 bp, Homo sapiens
ctgcgcgggctcgagagctcgccccgaacgggggtcttcctcctccgccgttgacagctcctctggtgcaagtgtggtagctattgacaacaaaatcgag

SEQ ID NO: 860657 - DNA, 98 bp, Homo sapiens
gaaggccaggatacttccccaaggcaagcaccggaagcaccccggcggccgcggtaatgctggtggtctgcatcaccaccggatcaacttcgacaaat

SEQ ID NO: 860658 - DNA, 98 bp, Homo sapiens
gtttaatacagcatgtgttaccaagctgtttcctaccaggtcacacactgttgcagcacagagagcccgagcccagcacattgtgccctgtactatat

SEQ ID NO: 860659 - DNA, 98 bp, Homo sapiens
tgaacccagaggtcgtggaggtggccgtggaggcagaggtggcatgggtgtcaacagcatctccaccctggagcctgtgagccggtgccagcgcctga

SEQ ID NO: 860660 - DNA, 98 bp, Homo sapiens
aatttaccctttagctttacaaagctacagcaattgacagctatgtggctctcagataatcagaaactggcagacctttcacttcgtatccaacaaat

SEQ ID NO: 860661 - DNA, 100 bp, Homo sapiens
ctgcaccaccagcgatggcagacagaccacatataccacgaggatccatctcgtctgctccaggggcaggctgctctctattggaggcatcatcattctg

SEQ ID NO: 860662 - DNA, 98 bp, Homo sapiens
gtcccgctgccataagagaagctggcttgatgaaaaggctctccagtttgggatctctctaggagctgacactcgaaccttcacgacccattcggatt

SEQ ID NO: 860663 - DNA, 100 bp, Homo sapiens
gcatcacctgccaattcctttgtgggaacgccgtattggtcctggacccaagccagaagcctctgcaaagcttccttccagacctgcagataactatgac

SEQ ID NO: 860664 - DNA, 100 bp, Homo sapiens
caggtccgccacttctactaccgcacctggcacaagatcaccaagtacatcgactttgatcatgtctgctgtaggctttgaataccaggggaagactgag

SEQ ID NO: 860665 - DNA, 98 bp, Homo sapiens
gcagaaaaggaaactcacttgactaatcttcgggcagagagaaggaaacacttagaggaagttctggagatgaagcttcgggagcaggaaagaaaaga

SEQ ID NO: 860666 - DNA, 100 bp, Homo sapiens
cagcagggccccgcggagctccccccgctgccccctaccaccccttcactgttatctaccttgcctgctcctatgccacagtgtacctgatctacctgaa

SEQ ID NO: 860667 - DNA, 100 bp, Homo sapiens
ttaatggtactagtcaagacaagaaaatcaacaggctttcagccttgaggcaacattggatattattgaggccggaaggtggtggtcgtacgctgtgaag

SEQ ID NO: 860668 - DNA, 100 bp, Homo sapiens
ctctgatcaagcggatccaagccatgattcccaagactccaaccgggaagactttgacccagcacctgtaaagagcaaatttgattctcttgactttgac

SEQ ID NO: 860669 - DNA, 99 bp, Homo sapiens
aacgaggggctggaacacctcgccaaagcagagaaatagcccgacaacaagctcaaatacgtcaccaaatggcagaggacagcaaagcagattactcat

SEQ ID NO: 860670 - DNA, 99 bp, Homo sapiens
gaaccacaagaaaatcaaaagaaacttttgcccttatcagtaacacctgagtggtcatctccatcagaggcaactgaaagtttcttatcaaaagaaatt

SEQ ID NO: 860671 - DNA, 98 bp, Homo sapiens
tgttagaacgactttccaagtttgaagttggagatgctgaaaatgttgcttcatatgagtcctttctgaaagatctgctactgaagtagacaacaatt

SEQ ID NO: 860672 - DNA, 100 bp, Homo sapiens
gctggaacaggagttccgatcgacccggtaccaagaaggggagtgcccgcggcaggacccagatgatgtggtaccagttggccaaagaagagcctggtgt

SEQ ID NO: 860673 - DNA, 98 bp, Homo sapiens
attggaaggaagtgcataagatggtggttgaaaggctatctacaaaatggtaggcactgtgatcatgatgaaaatgaatgaggatggcctgacgcctg

SEQ ID NO: 860674 - DNA, 100 bp, Homo sapiens
aagaaattcgtgaccaactattggatttccatgaagatttgatgacacattgtgttgatttatgaagactctatggatctaatcgcaaagctaccttgtg

SEQ ID NO: 860675 - DNA, 100 bp, Homo sapiens
aaaagcaggaggcaagaaaggggcccggaaatccaaggaattgaaagatgttggccatcgtgatcagatggctgcagctagaggaatcctgcagaagaac

SEQ ID NO: 860676 - DNA, 100 bp, Homo sapiens
agcatataagccaggcatgtctcccgaggagtgcaggcgcttcaccacagacggtcagaatggcggcagcggagcatcgtcattcttcaggattgccctg

SEQ ID NO: 860677 - DNA, 98 bp, Homo sapiens
gactgatttgcaacccttccgggaagccatagctctgcatgtgacttttttgaacgaaccattctgtgcaacagccttgtgtggagttgtgctgtgac

SEQ ID NO: 860678 - DNA, 98 bp, Homo sapiens
aaagcagatatgcgcgtcagcatactttggcggcttcatattctccaattcagcctcattctctaataaaacatcagcagattcctcttcattcacca

SEQ ID NO: 860679 - DNA, 99 bp, Homo sapiens
agagctgccgcggggatgggaaatgaaacatgatcaccagggcaagatattgaagcacagattcgagaaattcaaggcaagaaggcagctcttgatgaa

SEQ ID NO: 860680 - DNA, 99 bp, Homo sapiens
cggagctgacggtggaggttcgcggctctaacggggctttctacaagactgcttttggcttctggatgccctcctccagtacacatcgtatggggtgac

SEQ ID NO: 860681 - DNA, 98 bp, Homo sapiens
agctacgggcccggtgcgtccgcggaccagcagcgcgggagagcggactcccctcgccaccgcccgagcccaggtggaatatgtgatcaagtgtgaca

SEQ ID NO: 860682 - DNA, 100 bp, Homo sapiens
gctctgcggctggtccaggccttccagtacacagacgagcatggggaagacgccacaggtcatcatctggatcatcccattctggttcccgttcaagttc

SEQ ID NO: 860683 - DNA, 100 bp, Homo sapiens
caagtcacctgctctcaccaaaaagaagcagcatccaacgtacaaaggagcagagcccctggtgcctgcgcaggatgcgtcctcccaggtgaagcgtgag

SEQ ID NO: 860684 - DNA, 100 bp, Homo sapiens
gatgggtcccgactgctctgttggttttttgaggaacaggcgttattttgttttcatgacatcaccccattctcccacccctggtccctgacaactgcca

SEQ ID NO: 860685 - DNA, 100 bp, Homo sapiens
cctccgccgcagagtcccaccgccacaggacctgaaggagaagaaggagaaggtggaggagaaggcaagccggaaagagcgaaagaaagaagtggtggag

SEQ ID NO: 860686 - DNA, 100 bp, Homo sapiens
gtgctcaaaggccggccatgtaagatcgtcgagatgtctacttcgaagactggcaagcacggccacgccaaggttttgtagtgcatccctgagcatgagc

SEQ ID NO: 860687 - DNA, 99 bp, Homo sapiens
ttattaataggaataccactattccaaccaagaagagccagcttcgccgacacgaggtgaccatctgcaattacgaagcatctgccaacccagcagacc

SEQ ID NO: 860688 - DNA, 100 bp, Homo sapiens
gaatacagtgtccataagatcacctctacctttcatcaaggtgatgcagacagaaagcattgtaaatttaagcctgatcccaatatccctccaaccttca

SEQ ID NO: 860689 - DNA, 100 bp, Homo sapiens
tgctggtatatccttctttctggttccgtgttcatcaaggaatccatgtttcttccaagaagcagtgatgagttggaacaattcatggaaaatcaaggtg

SEQ ID NO: 860690 - DNA, 100 bp, Homo sapiens
ggaaacatcctgcacagctttaacgtgcccatgcagctgcggatctacgagatcgaggacaggacgcgggaggagccgaggaaggtctgcttcacctacg

SEQ ID NO: 860691 - DNA, 113 bp, Homo sapiens
ttttaatgataattcatgacagaagggagtttgctaaatttgaaaaggagaaaatgaatgccaaatgggacacggtgatgaagccaacccttgcaagtttcaggcctgtaatg

SEQ ID NO: 860692 - DNA, 99 bp, Homo sapiens
ggacttcatctacaatttttagtggagttgccatctatgttaatggatacacagctcttcagagaagtaagaataatgaagattttaaatcatcccaat

SEQ ID NO: 860693 - DNA, 60 bp, Homo sapiens
ccacccctcctgtaacccagcctgtttcacttcttgcttatgttcctgaggaagaattga

SEQ ID NO: 860694 - DNA, 98 bp, Homo sapiens
attaagcacccaaggaaagcacttaaaagtggaaagatgacggatgaaaagaatgaacactgtccttcaaaacgatctatgactttgaaagaagccat

SEQ ID NO: 860695 - DNA, 100 bp, Homo sapiens
gcggcagcggctctagaagtagatcctccagtagtgattcaatcagcagcagcagtagtaccagcagtgacagccttcatcacggcggcttggattgtcc

SEQ ID NO: 860696 - DNA, 127 bp, Homo sapiens
gaaatccagcctattgggaactgtgaaaagaatgggggtatgctacagccacctcttgaatttaagaagaggattacctcaggttccttacttcagtctctatggagaccaagaaggtgcttatgaa

SEQ ID NO: 860697 - DNA, 98 bp, Homo sapiens
tccacaaagtgacagtgaatgatggagggggagttctcagagtcattacaaccttcactgcctggtgtaactcccacctaaggaaagccggcacccag

SEQ ID NO: 860698 - DNA, 100 bp, Homo sapiens
ccgagacaagttcaccccgaagtctgccggaagtcctggctgagcaaggttggaagccctagttctcgcattgaccgcacaaacttttctaatgaaaaaa

SEQ ID NO: 860699 - DNA, 100 bp, Homo sapiens
agcaggtataactacctgagtctggattcggccaaagtgaatggagtggatgatgcagcaaattttagaaccgtgcggctgtgctccattgaagtgactt

SEQ ID NO: 860700 - DNA, 100 bp, Homo sapiens
accccctgggacagcgccacattcgccgggtgtgatccctcacatccacaaatctctgattggaaagaagggacagcagaaaactgcttagagggatgct

SEQ ID NO: 860701 - DNA, 100 bp, Homo sapiens
ccgagaccgtgaccgagagcgtgaccgagagcgcgaatatcgtcatcgttagaaggcgaccgtggcaaaattggggcctctccctcgtgttcttgctgat

SEQ ID NO: 860702 - DNA, 99 bp, Homo sapiens
ttcctattcaccgtgggcagcagagggatggctgctcagctgctgactgatgaggcactgggctttgtggagtggtcaaaagctccacaacaaacaacc

SEQ ID NO: 860703 - DNA, 99 bp, Homo sapiens
tttctgcggaggtggagggagatcaggaaacggcttcttcctcacttcgccgcctggttatcaatactctggctgaccatcatcatcgtgggactgact

SEQ ID NO: 860704 - DNA, 100 bp, Homo sapiens
ttattgagatggcctgtctgataactgactctgatctcaacattttggctgaagataaaagaatcagagtgtctcaacccttgacaagaggaccaagtgc

SEQ ID NO: 860705 - DNA, 100 bp, Homo sapiens
gaagatacaagcactgagttcactgacagtattgaggaggaggctgcacaccatagtcaccagcaaacctcaaaggaagaccttctgcaggctgattttg

SEQ ID NO: 860706 - DNA, 99 bp, Homo sapiens
gaaggagctgaaggagctgatccagaaggagctcaccattggctcggtaaagtcagtgataaatcttttgtttgctgcatatactggagatgtgtctgc

SEQ ID NO: 860707 - DNA, 100 bp, Homo sapiens
ccagttggtggcctgggcagcctgctggaccctgccaagaagtcgcccatcgcagcagctcgatgccatggacaatattaccaggcagaaccaattctac

SEQ ID NO: 860708 - DNA, 145 bp, Homo sapiens
tctaatctcttccctcctcctgttgctgccactaatgctgatgtccatggtctctagcagcctgaatccaggtggcgacatgtctaagaatgtgagccagtcacagatggcaaaattgaaccaacaaatggccaaaatgatggat

SEQ ID NO: 860709 - DNA, 98 bp, Homo sapiens
gctcctgcaagactctggagccagtcttgaggtcctacatctccgaaagcaagctcttctagaagttgcaaaatgggaagccacatttttatgataag

SEQ ID NO: 860710 - DNA, 101 bp, Homo sapiens
cagaagagttggaggggtactgcattcaactcaagtggtccttcggggtgacaatgtgggagattgccacaagaggccaaaccccatatccgggcgtggag

SEQ ID NO: 860711 - DNA, 142 bp, Homo sapiens
cttttagaggctttatatcctaaacttttcaagcctgaaggaaaggcagaactgcctgattacaggagctttaacagatatttagcttcctgtggtatactgatgagcagaactcttccactacatacctcaattttgccta

SEQ ID NO: 860712 - DNA, 98 bp, Homo sapiens
gctgtcagaccacacccgctccgagcagtgctacagagacgtgtctgatctaaaggttcttagcatgataatcaacgcagcctacaagcctggaaggg

SEQ ID NO: 860713 - DNA, 100 bp, Homo sapiens
ggctgagatcaccaatatccgacctagctttggacaggcgacactaacaggtgaagatctcgggagaccatgactaagaaaagaattgctgtgattgggg

SEQ ID NO: 860714 - DNA, 99 bp, Homo sapiens
gaaaacacctgggatgctccagtgctcttacgcagataatgatcattaacatcagcctctctgatcaaaggtgatgggcagaatctgtttacgaaagac

SEQ ID NO: 860715 - DNA, 100 bp, Homo sapiens
cgctaaccagtcccccagttcagtagactggagcccagagcctgcttacttgtcagaaagatgtgtcatggcaatgctgagaaggaggatcagggatgag

SEQ ID NO: 860716 - DNA, 100 bp, Homo sapiens
tcaacaacaagtttgcctccttcatagacaaggcttattgcagtatattatatctaaagccaagaatgcagatcatcctacgtggacagaaagtgaagac

SEQ ID NO: 860717 - DNA, 98 bp, Homo sapiens
aaatgctccttctcctggagacgcaactcaagaaaccggcgagagtttggcaagcgagttcctgttctccgatgtgtgtagggtggagagtggggaga

SEQ ID NO: 860718 - DNA, 100 bp, Homo sapiens
catatgtaaccaaatattatggatcctatctgaaggagtctgatgacttttcacagtaccaactcaaaggcttgcttaaaaagaactatctgaaccagca

SEQ ID NO: 860719 - DNA, 100 bp, Homo sapiens
cacttatccagacccaatggaacatcagcaatgcttctggagtgtcagcagctatagtgaagtttcaagaagggggaatgctgtcgggactgagcaggca

SEQ ID NO: 860720 - DNA, 100 bp, Homo sapiens
agcttctcgagattattttccaccaggggatttcccaggtccaccacctgctccatttgcaagggctttgttatgcacctaaagccatattggaagctcc

SEQ ID NO: 860721 - DNA, 100 bp, Homo sapiens
ctggagccaccatcaagctgtctaagtccaaagatttttacccagttttcggctttgtgagaaaccttaccatcaaacacgatggccagcaacgttacca

SEQ ID NO: 860722 - DNA, 100 bp, Homo sapiens
ggctctccagtttttcgtcgagagattcactatggaatcgtttccaggaatatggatctactggaacagcccatgctgatagtgaatatgaaagaagaat

SEQ ID NO: 860723 - DNA, 98 bp, Homo sapiens
acagagatccaagcaggagaggctgcaacaggctggagatatgcagagtcttcatgggggagaaaaggaacggctgtagtagatctctctgggaatgg

SEQ ID NO: 860724 - DNA, 53 bp, Homo sapiens
ttcgcgtctgcttcggagaccgtaaggcctgatgttcaccaaggtgaagctgg

SEQ ID NO: 860725 - DNA, 100 bp, Homo sapiens
tgagactgagcagacgcctccaggatctgtcggcagctgctgttctgagattggagaaatgaaggcagaggtcaccaaactacataaaaaattgtttgaa

SEQ ID NO: 860726 - DNA, 98 bp, Homo sapiens
gtaactaaattggagaaaagcattgatgacttagaagttttgacacatgatgaactctagcactggtgtatatgagaaggaaggcgaaagcatgacag

SEQ ID NO: 860727 - DNA, 100 bp, Homo sapiens
ctggatgccgtgttgggtttggttcggtgcttctccactctgcagtggctcttccgcttggacatcagattcgacggaggcgccttgcacgacttgctgg

SEQ ID NO: 860728 - DNA, 124 bp, Homo sapiens
catttatgaatgtgtggcctcaaataatgtgggagaaataagtgtatccaccagactcacagttttgcgggaatggaagcttcttgcctagagctggccttggaaggggaacgtctatgtaaat

SEQ ID NO: 860729 - DNA, 98 bp, Homo sapiens
ggggaatcaagagacccggtttctaatccctgctctgtcactaacaagctgcgtgatcttcgctaaaacagcggaagaggtgatttattatatggttg

SEQ ID NO: 860730 - DNA, 100 bp, Homo sapiens
ccatgatttctggagagcttgacattctcaaagactggtgctatgaagctgacagagcgggatgccaccagcttgtccaaagggaagttccaggagctcc

SEQ ID NO: 860731 - DNA, 100 bp, Homo sapiens
tggccaaagcctgcccagacggctcacctgtgcgggatggaacaaaaggccaaacatggtgatccatgtgtgtgatgaagcaaaaaacttgaaagaagat

SEQ ID NO: 860732 - DNA, 100 bp, Homo sapiens
gaactcagagccaagggctgaaccaactcagaatgcattgccattttcacatagagaagttgtcacattcaaccatttcctggaagcggcagctgagaag

SEQ ID NO: 860733 - DNA, 100 bp, Homo sapiens
aatttctcaccaaacatcttagggcagataatgcctttatgttacttactcaggtgcagaccatgaattacgtggggcagttagccggccaggtgtttgt

SEQ ID NO: 860734 - DNA, 100 bp, Homo sapiens
gtatttggagaagaatggaaagagaagactgatagagacttcgttaagacctgtgttgcgtggtgggtctgctgccgccacttctaatcctcatcatgac

SEQ ID NO: 860735 - DNA, 98 bp, Homo sapiens
ttggagacagtgcgaggccgaggggtagtgggcaggcaacccaaggagatctgtgcgctggttgggttctgtgatgaggtgaaagagatgcccatgca

SEQ ID NO: 860736 - DNA, 100 bp, Homo sapiens
tggttcctctggaggatgtccacatcaaagggagaatcatagacactgtagcccagcgtgagtgcatctccatccacgttggccaggctggtgtccagat

SEQ ID NO: 860737 - DNA, 117 bp, Homo sapiens
gggtccccggcagcggggtaggatggcgctaaagcggatccagaagcttgagaattacattgtggaaaacatgaagtcggagatggcccagatacagcagaatgcagttcagaacca

SEQ ID NO: 860738 - DNA, 100 bp, Homo sapiens
agcctccggtgaaatctgaactcattgaacaggtgatgaaggaggagcacaagggatttatcaaagatgttcatgaagactcccttacagttgtttttga

SEQ ID NO: 860739 - DNA, 100 bp, Homo sapiens
tatacaacaaaacaggtcatcactaagaaatcaggtgtagttctgctgaatcctattcctaagtgctacagttgaaactccagcagcgccggacccggga

SEQ ID NO: 860740 - DNA, 98 bp, Homo sapiens
gtttgaaataataacaagctccaggaccttctacgtacagagagctattgcttaccttttcccaagtggtttgtttgagaaacgagccaggccagtaa

SEQ ID NO: 860741 - DNA, 98 bp, Homo sapiens
aggataaccaaatgtgccgtgatgtatgtgaacaggtccaaactgctttgcagaaaccgcggtgatccctgctggcagagaagtgaagactgacgagt

SEQ ID NO: 860742 - DNA, 100 bp, Homo sapiens
caggcatctgcttcagcaccgcctctctggtgctaagggccacggatgtccatcccctccagagcttccatacaatgactactttgaatactttggacca

SEQ ID NO: 860743 - DNA, 101 bp, Homo sapiens
gctgtgtcttggggccctttgggacgagtgctgtgactgtgttggtgctaaaatgatgtattttctggacaagtcaaggcaggagaaagcaattgctatag

SEQ ID NO: 860744 - DNA, 98 bp, Homo sapiens
gaaatgtattatggaaattgaaaagagaggctgtcagcgaggaagaaaggacccggtttcaggagctgctggccagtccggcctacagagccagcccc

SEQ ID NO: 860745 - DNA, 98 bp, Homo sapiens
agccgggagttcaagaagaacactccagaggctttactgcagatggtgcgtgacgagagccaccagatcctggcgctgtcagaaggccttgcaccccc

SEQ ID NO: 860746 - DNA, 98 bp, Homo sapiens
cctatcgacccagctggatcgtgtaaccagtctatgggaagtgaggtcaaagagttagtggaagcagagttatttgcccgttatgaccgccttctcct

SEQ ID NO: 860747 - DNA, 100 bp, Homo sapiens
agcagtcctaccatgtcagccttcccagtagctgggaccacaggccactctctttgaccctcagcttcacgatggctcgtgcatctgtgaacgagtggcc

SEQ ID NO: 860748 - DNA, 122 bp, Homo sapiens
caaagatgagagggagatatcagtggatgaaaagcatgactttaaggatggtatatgtaccctgcttataacagaggcccagcagcaaagaaacctggataacatcgtcttgcaacaaccca

SEQ ID NO: 860749 - DNA, 100 bp, Homo sapiens
ctacggcgcctcggccggggcgctcacggccacggcgctggtcaccggggtctgcctgggtttacccaaggtccagcctagcccctaggcaccatgtcgg

SEQ ID NO: 860750 - DNA, 100 bp, Homo sapiens
tgtgcttggctggaaaaccccaaaagtgtacataaggatgttcacttctccacaatgaatgagtgtcactatgacaagcacatggactttttttataata

SEQ ID NO: 860751 - DNA, 103 bp, Homo sapiens
gaacaatcttttgttggattgaaacagctaatcgagagtagttatcttgatggaattagaagttttgaagtcagctgaagcagttggagtgaagattggcaat

SEQ ID NO: 860752 - DNA, 98 bp, Homo sapiens
actctctagcaaaaccactgctaagttatccactagtgctaaaaggttcaggagtccttgcaggctatggggagtagtgctgatagttgtgacagtga

SEQ ID NO: 860753 - DNA, 100 bp, Homo sapiens
ctgggattccttgggcaatggtgaatttgaaaaggtgattttacaacgagatgctgctctccatagggatgctcatgctgtcagccacacaagtctacac

SEQ ID NO: 860754 - DNA, 98 bp, Homo sapiens
agcactaaaccactatgcttaccgagatgcggttttcctcgcagaacgcctttatgcagaaggcgccaagcccatctttgtgtgcttgcatccaactg

SEQ ID NO: 860755 - DNA, 98 bp, Homo sapiens
gcattgttcaagtacccactggaccgtggttttgcaggaaatgtgaatctcaggagagagcagccagagtgattcttagatatggcagaggtattgcc

SEQ ID NO: 860756 - DNA, 98 bp, Homo sapiens
acctccgttaccgcgctctatgacctgtcatcagtatccatatattcctgcacatattacaaagcctaaggaacataagaagttgtttctggttcagc

SEQ ID NO: 860757 - DNA, 99 bp, Homo sapiens
catggcataaggaactctatcccaggaatacagctttgcattaggtatttctgggaaaagccagcttctgtttgcactggtcttcacaactcgttacct

SEQ ID NO: 860758 - DNA, 100 bp, Homo sapiens
gcgcacagtggagggtgcattgaaggaacgcagaaaggcagtagatgaagctgccgatgcccttctcaaagccaagagctatgaagacatgattggtgag

SEQ ID NO: 860759 - DNA, 99 bp, Homo sapiens
atcaccaaactggaggatgcctatgtattccctggggatggcgcatcacacaccaaagtgctacagttgaaactccagcagcgccggacccgggaagaa

SEQ ID NO: 860760 - DNA, 98 bp, Homo sapiens
atggagaccctcacggagctgggcgacgagctgaccctgggagacatcgacggtcagagatgtcatcatcgctgcaagcgttgcaggaatgggcttgg

SEQ ID NO: 860761 - DNA, 100 bp, Homo sapiens
cggcgtctggctgctgcggaccccgccgagtcctagcgcctggcctgcgcgccgctgcccgcgccacagctccaaaaggaattcttcatttgtctcctga

SEQ ID NO: 860762 - DNA, 100 bp, Homo sapiens
taattctgaaagaaagaaaacaaagaaaaacatactccagaattcctaatagaacatgcttagatgagtacgaagatgatgaagcagggcagaaagagcg

SEQ ID NO: 860763 - DNA, 100 bp, Homo sapiens
agcatcgccagactccgcatcgcaaaggggggcgtcaatgacaatttccaggtttgaagatgccgcatttggattggatgaattccaaattctgcttgct

SEQ ID NO: 860764 - DNA, 99 bp, Homo sapiens
gcgaggctagggaggacctcacttccccggggtgtaataatgttaactgaggaactctttccagttaacagacagagtgtggatcattttgctaaatac

SEQ ID NO: 860765 - DNA, 100 bp, Homo sapiens
agaaccagtcagtaaagcaaaacagagtcggagtgaaaagaaggcacggaagaacaatgtctcccttttgcagagctgtattgacttgttcaagaataac

SEQ ID NO: 860766 - DNA, 100 bp, Homo sapiens
ccgcgctgagcaggtcatctttgtccgagccaccctgaagggtcccttcccaagcccttagggaccgcagaggacttggggaccagcaagcaacccccag

SEQ ID NO: 860767 - DNA, 100 bp, Homo sapiens
accagcaagaggatggggccctggatgagggggaagggcctcaaagccagaaggttaatggtgcaatgtaagaaacctttaaaagtttctgatgaattag

SEQ ID NO: 860768 - DNA, 98 bp, Homo sapiens
tccgcgctggaccagctcaagcagttcaccaccgtggtggccgacacgggcgacttccacgtcatcagtgagttctgcctcagtcagctcccaagtga

SEQ ID NO: 860769 - DNA, 100 bp, Homo sapiens
caagggcaaacgtgtgagatgtgtcagacctgccttggtgtctgtgctgagcataagcgcagttgtgtagcagttgagtaatgctggttagctgttaagg

SEQ ID NO: 860770 - DNA, 100 bp, Homo sapiens
agcagtgttccaagttctaaagagattgctgtgctaaggagacagcaacgtatgataaaaaatcgagaatccgcttgtcagtctcgcaagaagaagaaag

SEQ ID NO: 860771 - DNA, 98 bp, Homo sapiens
tttcttggcaatacagtctgtcagtggcataatgacccttcctgcagacctggcccagggagccaggggcctgagtctgccacctggaagacactggg

SEQ ID NO: 860772 - DNA, 98 bp, Homo sapiens
ggattggtcagctatccagaatttctgtgagcaggtgaacactgaccccaatgggatcaatctccccatccagacctactctgccctcaacttccgag

SEQ ID NO: 860773 - DNA, 98 bp, Homo sapiens
agcatgctcgaggacagtggttccaaaaagaaatttaaagaggacctaaaaggacttgaaaatgtctccgcaggggacttaggagccattgatgaaaa

SEQ ID NO: 860774 - DNA, 98 bp, Homo sapiens
gtgtatcgacggataacagagttcacatattcaaacctgtatctgtgcaggcaatgtgctgaaccaataacgtttccatctggaggaggcaagtcatt

SEQ ID NO: 860775 - DNA, 112 bp, Homo sapiens
gaagattagcaaaggtgctaatccagtggaaatcaggagaggagggaatcctatggctgtggtcagcaaacaagtaaatatggaactggccaagatcaagcaaaaatgccca

SEQ ID NO: 860776 - DNA, 98 bp, Homo sapiens
ttttagcatctctggcaagatatgggtttattacagaggtcagctgggaagagctaccactttaagtgtaactcctgaaatggaaagagtgaagaaga

SEQ ID NO: 860777 - DNA, 112 bp, Homo sapiens
aatggcacttcattggccacctacagaaacaaaatgtcaacaaattgatgggtaaaatatacccaggaccataaacagatgaaaggtagaccaagtctgattttagatacac

SEQ ID NO: 860778 - DNA, 98 bp, Homo sapiens
gcgcattgctacctaccggctagccggtggagctcacgtttattcaacagaattgagttcttctcagactttatcacatgatggaggattcttcaata

SEQ ID NO: 860779 - DNA, 100 bp, Homo sapiens
gctttcaaatcaaatgactcacagcaggccaaatgtgtgtggaaacacccacctggtgatgagatatatcgcaaaggttcaatctctgtgtttgaagtgg

SEQ ID NO: 860780 - DNA, 100 bp, Homo sapiens
gttcttgtttgtggatcgctgtgatcgtcacttgattggtttatcttggaagctaaagggcattgctcatcctgaagatcagctgaccattgacaatcag

SEQ ID NO: 860781 - DNA, 100 bp, Homo sapiens
tgttacttctctgaccttcaatcctactacagaaatcttggcaattgcttcagaaaaaatgaaagaagcagtcagattgatggagggagcgaggaaccac

SEQ ID NO: 860782 - DNA, 100 bp, Homo sapiens
gcagctgagatgatggcatctttactaaaagaccttgcagaaataggaattgctgtgggaaataatgatgtaaagcttttagtttggatgctgaacagcc

SEQ ID NO: 860783 - DNA, 98 bp, Homo sapiens
gcacatactggtgaagccaagcaacagtttccttttcattcaggtggagccgccaccaaaatgcagattttcgtgaaaacccttacggggaagaccat

SEQ ID NO: 860784 - DNA, 98 bp, Homo sapiens
aaacctaaccatgaagacttgaacttaatacagcaagaaagaccatcaagtttaccactgaaccttagccggccgatcgaggagcagggccccctgga

SEQ ID NO: 860785 - DNA, 100 bp, Homo sapiens
tccagagggcattcagactaaaatctacaaccttctcattcagacacacgatatggtccggaaaaagaacccccctctgagaaacgttgcaagtgaaggc

SEQ ID NO: 860786 - DNA, 100 bp, Homo sapiens
gattctcccacctcagtctccctgggactacagatcgatgccttccagcacatgcagcattttgtccagaccatgcagcaacaggcccagcatgccatcg

SEQ ID NO: 860787 - DNA, 100 bp, Homo sapiens
tcagtctggtgaactgctcgtttgggacctccttggagcaaaaatcagtgagagaatacagggccacacaggactagaaggctgggaaaaaaggcttatt

SEQ ID NO: 860788 - DNA, 99 bp, Homo sapiens
acaacaccgtggccctgttctgggatgagcaaggtgtaaagagtttccaggatggcttctgcatcaacttctaaatataattcacactccttggagaat

SEQ ID NO: 860789 - DNA, 99 bp, Homo sapiens
tagggaggcgaggttcccgcaccggatagggtgaccctaagaatgactcctggatctttgccctggctgtgctcctgtgcagcacctttgtctacaaca

SEQ ID NO: 860790 - DNA, 100 bp, Homo sapiens
cagcctgacgccatctcacgcctgctggaggctatgagctcttatttcagccagaggtggttcggatatacatctcacttcttaaggagagcaagactcc

SEQ ID NO: 860791 - DNA, 100 bp, Homo sapiens
gatgtcatgaaagattttgaggagatgaggaaggctggtatctttcagagtgtaaagtaatcttggaatataaaggtgctgctacccccgtatgatgatg

SEQ ID NO: 860792 - DNA, 98 bp, Homo sapiens
gccaatgttggtgctggcaaaaagcgcatggatttaggagaatgtaccaaaatccacgacttggccctccgagcagattatgagattgcaagtaaaga

SEQ ID NO: 860793 - DNA, 98 bp, Homo sapiens
acagatgcagctagcaaaccgtttgcggaggtacggatactcagttgtggagagctgattcccaaatctaaagctttaatcgccttgacttacctcca

SEQ ID NO: 860794 - DNA, 100 bp, Homo sapiens
gatgtccactgcctgtggaactccaggctatgtcggttcttgggtgtctctggggagtccctgggccagaccttcctccagactccagcccacctcttcg

SEQ ID NO: 860795 - DNA, 100 bp, Homo sapiens
ccaaggaaccaaggcggccctggctgggggaaccactatgatcagaattctcacactcaagaaagcaaatgaacttcttctgagcacaggcatgcccggc

SEQ ID NO: 860796 - DNA, 99 bp, Homo sapiens
tcactgactgagatttgccaaccagacctctatggggccacctacagatgctcctgcagtggacacagcagaacaagtctatatctcttccctggcact

SEQ ID NO: 860797 - DNA, 100 bp, Homo sapiens
aagcagacattgacctcaccaagagggcgggagaactcactgaggatgaggtggaatacatgttggtatcttttgatcatgaaaataaaaaagtccggtt

SEQ ID NO: 860798 - DNA, 98 bp, Homo sapiens
caaggcaagcctattgagttaacacctctgccgctgctaaaaggtaccacaagagccaggccatctatctggagtcaaaggacaaccagaaactgagc

SEQ ID NO: 860799 - DNA, 99 bp, Homo sapiens
gactgcaacccagcgagggacgcgggcagccatggccgaagcggcgcctgcccgggtagccctggtttaccccaacaatgatccagtcatgtttatggt

SEQ ID NO: 860800 - DNA, 98 bp, Homo sapiens
tccaccgtgttgcagatatatctgggagtgactcctctttcttcccagagtgtggtgattcaccatggccagacccaggaatacgtgctcaagcccaa

SEQ ID NO: 860801 - DNA, 98 bp, Homo sapiens
aatagcacacttttactctacgcaactgttgctttttcatgcattagtgccagcagtagttcccaagggctgtctcagccatccacccagacgactca

SEQ ID NO: 860802 - DNA, 99 bp, Homo sapiens
ctgcctcctccacccctgtatttcacttggctctccaaattgactcaactccagtggattcgagaagtgacaggctatgtcctcgtggccatgaatgaa

SEQ ID NO: 860803 - DNA, 50 bp, Homo sapiens
gatcatcgagcatttcaaacgtttggaaattttagcattcaggtgccagg

SEQ ID NO: 860804 - DNA, 100 bp, Homo sapiens
gtgctatgagaaattctttgcccctgaatgtggtcgatgccaaaggaagatccttggaacattccattattgttccattgacctttccctcatcactgag

SEQ ID NO: 860805 - DNA, 100 bp, Homo sapiens
aaatgacagcaaagcactgtgtggctgaataagcggctgcagagactgcaagtctggaagaacagctgcaaggatggggagaagtgatgctgatggctga

SEQ ID NO: 860806 - DNA, 99 bp, Homo sapiens
tctttgccaccctcagctgtctgcacatctgcacgtagacagactatgctcttttctgccacccaaactcgaaaagttgaagacctggcaaggatttct

SEQ ID NO: 860807 - DNA, 100 bp, Homo sapiens
tctctgctgtagtggacaaagatttccttgataacaccgtaagacctacagtacggaggagtaccaccacaggctgcagacgtttgccagcaactggagg

SEQ ID NO: 860808 - DNA, 98 bp, Homo sapiens
taaagctttggaagatgcagatgagaaggttcagttggcaaaccagatatatgacttgatgggggactcaaggagatttcaccaccacccatcctcgg

SEQ ID NO: 860809 - DNA, 108 bp, Homo sapiens
aaaaaaccaaagagagagaaaaaatgaattcatctaaatcatctgaaacacaatgcacaggagctcagtctgaatattcttggagaaagatgctgagtggcattgcag

SEQ ID NO: 860810 - DNA, 98 bp, Homo sapiens
ggaagctgctaagaagcaggccatgaaacaggttgcatctggaggtggtggggttggagatggtgttcaagaaccaaccacaggcaactggagaggaa

SEQ ID NO: 860811 - DNA, 98 bp, Homo sapiens
aacggagtgagagttcaaagattctttgtagcagacactgcaaatgaagctctcgaggctgctaagagactaagtatgtgactggtgtaagcacataa

SEQ ID NO: 860812 - DNA, 100 bp, Homo sapiens
gggcgccgcagcctcccggggccctacggccgcccgccaccaggggtctgttgcaaataaattctatgttcacaatgatatcttcagataccaagatgag

SEQ ID NO: 860813 - DNA, 100 bp, Homo sapiens
ccaatcataaaagatgctgctgctaaaggtatccaggaaattgctgactctgtaaaggtattacatttatgcactgtctgctgccaaagatctgaaacca

SEQ ID NO: 860814 - DNA, 98 bp, Homo sapiens
tcaaggtgaacgggcggcccctggagatgattgagccgcgcacgctacagtacaagtggacgtgactctggacccagacacggcctaccccagcctga

SEQ ID NO: 860815 - DNA, 103 bp, Homo sapiens
gaaacagtatctcacctccctaaactggttaatagtggcatggaagatccatttggtcaaggtgaagatgttcttaaagggtcccagattacgtatgttacag

SEQ ID NO: 860816 - DNA, 100 bp, Homo sapiens
cagagggaagaaaatgcaaactgaaacctgggaaacagtgcagcacccagtcagcttgaagagtttcaaatggaccctaccactgagaaatcaagatggc

SEQ ID NO: 860817 - DNA, 100 bp, Homo sapiens
gaaagcagaatacaagatgggaagaatgagaagtcatggaatgacagatggagtgaaggtacctgagcgcaggaaccatggtcttcattgctgcctcagc

SEQ ID NO: 860818 - DNA, 100 bp, Homo sapiens
gatgattctttagatctcagccctcaaggtgggttggcagctggagaagataatggacagagaggttatttgctgacctatgttattgcatacattcgag

SEQ ID NO: 860819 - DNA, 100 bp, Homo sapiens
ctccttttgtggaggagaacttagtttcagagttttttgagaaccctgcttttcgtcccgatgggctgaaactctatcctaccctggtgattcgtgggac

SEQ ID NO: 860820 - DNA, 100 bp, Homo sapiens
taagttatatatcatgtgcatggcgaatttggaggaggccaacagagcacttatggcaaggcatctcgagggggtggcaatcaccaaaacaattaccagc

SEQ ID NO: 860821 - DNA, 100 bp, Homo sapiens
ctccagaactacctgtaaattatgtgaaacctccaaatgtgggtttttcccactcggctttcacgtttgggattgagagccacatcagccagtccaacat

SEQ ID NO: 860822 - DNA, 100 bp, Homo sapiens
taagcatgccctgaaaaagtatcgtcgagaagcctatcatcggcctccccatggccacccatggaccagtcggcattcacttcctcccttctgcggccca

SEQ ID NO: 860823 - DNA, 57 bp, Homo sapiens
gtgttgaatgcaaactagcactcttaaagctctgggagggtctcacggaactagtga

SEQ ID NO: 860824 - DNA, 100 bp, Homo sapiens
agcacttccagtgttctcactgttccaagagatttgccacagagcggctattgcgggaccacatgcgcaaccatggcgggagacactatattcaatcgtg

SEQ ID NO: 860825 - DNA, 100 bp, Homo sapiens
gcaggcctgcaggatttggtttcagcatgtccttctctgaatgatgaatacttttactactgtgacaacattaacgaccgagacaacacttggactcagt

SEQ ID NO: 860826 - DNA, 98 bp, Homo sapiens
ctcggtgctgtggtgcagagctagttcctctccagctcagccgcgtagcggagattctggagctggctggcaatgcagcgagagacaacaagaaggga

SEQ ID NO: 860827 - DNA, 100 bp, Homo sapiens
agaattaagacgcatggaagaacttcacaatcaagaaatgcagaaacgtaaagaaatgcaattgagcccagcagttgaacccaggctttcagctttcttt

SEQ ID NO: 860828 - DNA, 98 bp, Homo sapiens
cggagagtgacggagtcggcgagcccccgcggcgacagttacaggtcggttcacccagaagccagggggcatctcagtgaagcgctcactgaagacac

SEQ ID NO: 860829 - DNA, 100 bp, Homo sapiens
cttctgagcaacagatctaaagccctggtgtgatcgaactgtgagaatttggaaggctcgcaatttgcaagatggtcagatctctgacacaggagatctg

SEQ ID NO: 860830 - DNA, 100 bp, Homo sapiens
aaaaacaaaaatgaatgaatcaagagtgatttgttaatgatagctagcggccaggagaaatacagtggaaaatgcaaaacaacgaaattataaagcctgc

SEQ ID NO: 860831 - DNA, 99 bp, Homo sapiens
ctgaagcctcaaggcctgatggaaaccatccacagccactctacggaatggccaaagactatgacgggtcttcctagcacatcagggacaactgccagt

SEQ ID NO: 860832 - DNA, 98 bp, Homo sapiens
acatcacgttggtgagccttgaagctcaacatcgtattgcacctggctacaactaacaatcaaccatgacgaccgaatctggatcagactcggaatcc

SEQ ID NO: 860833 - DNA, 99 bp, Homo sapiens
ttcctcgacatgtttctccagtgacacctcccagagaagttggtcctgggaagcctcctttctgctcacagaataataactgactccaagcagcccttt

SEQ ID NO: 860834 - DNA, 98 bp, Homo sapiens
ggattcccagtgtccccacgagctgtgtggtccatgatgagggaaggtattcatgtaaatcaagaattactgcaaatatctccttgtatcacagagca

SEQ ID NO: 860835 - DNA, 98 bp, Homo sapiens
gaatttccatgtcaacatagtccagcatatcgcacggatgactgccatccctgggttttgccagtagtgaagaaagtggagcagaagattgctaatga

SEQ ID NO: 860836 - DNA, 100 bp, Homo sapiens
attgaccacatcgtgctgcaccgagtgctcatcatcactgtaggggacctttgaaagagctgccggagaaggtgaggaagaaagccctgcctggaaagca

SEQ ID NO: 860837 - DNA, 100 bp, Homo sapiens
tgttaacagactgcttttacacctacggcagctgcaatgactctccgcacggtattattgtcattgcaagcactattggcagctgcagagccagatgatc

SEQ ID NO: 860838 - DNA, 100 bp, Homo sapiens
tcccgctggcggcgggcatcttcttcgtgaggctgctcttcgagcgatggtagtgaaaacctttatggatatggatcaggactcagaagatgaaaaacag

SEQ ID NO: 860839 - DNA, 100 bp, Homo sapiens
actcccaccttcaggcaggattgggtagtacatgtttgtaactacctggcattgccttttgttgagatccagctccaggtcccacaggggctcttcttcc

SEQ ID NO: 860840 - DNA, 100 bp, Homo sapiens
tcaagtatgtggagtgttctgcacttacacaggtgacggtgacgttgtaaataatatgtatgagcccaaccgggacctgctggccagccacagcgcggag

SEQ ID NO: 860841 - DNA, 98 bp, Homo sapiens
ccgggatgctgtactccttgtctttgcaaacaaacaggacctcgactggattttgatcctgacattgttgcagctcttgatgatgattttgactttga

SEQ ID NO: 860842 - DNA, 100 bp, Homo sapiens
agtgactaccatgacgaaaacatgtactacagccagtcttctatgtttccacatcggtcagaaaaagattctggcagccagatatgcaactcagtctaat

SEQ ID NO: 860843 - DNA, 100 bp, Homo sapiens
gcaagaggaaaggaaagatgtgttcgggtttttctagaacacggaggtgtatcaaaccgaatgataaaaaagcagcacacatcttcaacgaggctctagt

SEQ ID NO: 860844 - DNA, 100 bp, Homo sapiens
cttcaccacaaaagcgaaatgggcacaccacagctctggaacaattacttccatttggcagttgcatttctcacccatgagtcccttcagcttgaaacct

SEQ ID NO: 860845 - DNA, 100 bp, Homo sapiens
gctccgttgcctgctcccggagggagacgcgctgccgaggagaacccagcgggtgtgaccatgaagctcatggatgaggtcgccgggatcgtggctgcac

SEQ ID NO: 860846 - DNA, 99 bp, Homo sapiens
taatagccgagctcaagattcagctgcctatgccattcaggttttcctttggaatatggataaatacaccatgatacggaaactagaaggacatcacca

SEQ ID NO: 860847 - DNA, 100 bp, Homo sapiens
ctggcctggtttgatactgacctgtaaatcatcctttagagcaaggaagccacgagcggctgtgccggaacgcggccgtctgcccttactgcagcctcag

SEQ ID NO: 860848 - DNA, 100 bp, Homo sapiens
aaagagcccaagagcaaagtccccggaagcggggtcggcccccaaaggatgagaaggaaattccacttacttggatgaccatggaccacctcctagtaag

SEQ ID NO: 860849 - DNA, 130 bp, Homo sapiens
gcatgctagcaaaagcacagaaagaccacttaagcaaacttaatataccagacactgcaactgtctatgcatggaacattgaaaagtattgaagggcctccaaacttgggtataaacttgcctttgagca

SEQ ID NO: 860850 - DNA, 100 bp, Homo sapiens
tcaagacgagagacaaggagtaccaggaaacgataggtcagatcgaggccttgaaggacctgaagggccggatggaagccatcccatgcgtggtggggga

SEQ ID NO: 860851 - DNA, 99 bp, Homo sapiens
acgaggcaaggagctaaagcagcgtgcgttcagccctgggggtcaaggtggaaggtccaaggactgagaaagaccctcgaaggcatccactttagtcct

SEQ ID NO: 860852 - DNA, 100 bp, Homo sapiens
cacaaacccactggacaccttcgtcccctttgatccctgtgtgctgaagagggactttgaacatgtcggggatcgccctcagcagactcgcccaggagag

SEQ ID NO: 860853 - DNA, 100 bp, Homo sapiens
ttctaaagcagaggagatcacttcagatgctgcctatgttattcaggtagctacagcaagctgggtagcaggcagatccaaaggatatcatgaagtttcc

SEQ ID NO: 860854 - DNA, 99 bp, Homo sapiens
gcagttcagaagagccaaggaataaacatgcaatgaacccaaaaggaaacctccacagctgttgagaaaaaggagaaacctcttccaagacttaatatc

SEQ ID NO: 860855 - DNA, 100 bp, Homo sapiens
cacggcagacgcagagccccccaaggtctgtgcttttaataggactgtctccaaagttgatgatttcttggccaatgaggcaaagggaaccaaagtggtg

SEQ ID NO: 860856 - DNA, 100 bp, Homo sapiens
taaaggaagaggtcagtcacctaaaaagtcagaacaaggacaaggaccaccagctggaagcccttggctctagagaatccatcaacagcatcaagtccag

SEQ ID NO: 860857 - DNA, 98 bp, Homo sapiens
gttaccaccctcctccctagcataaagccaaactgttttcagatagtagttcagcactttagtgaagaacattacatcttttactttgcaggagaaac

SEQ ID NO: 860858 - DNA, 142 bp, Homo sapiens
attttaaatcgtttctccaaagacattggacacttggatgatttgctgccgctgacgtttttagatttcatccaggtgtgcaactgaggaacatggctcaagaaactaatcacagccaagtgcctatgctttgttccactgg

SEQ ID NO: 860859 - DNA, 74 bp, Homo sapiens
taaaatggcggacctggcgaacgaagatcgtcagtatttaaacagatcacatcatgcgtgagtacaagctagtg

SEQ ID NO: 860860 - DNA, 100 bp, Homo sapiens
ctcaaagatgcccaggagaagctggagctggcagagaaaaaggccaccgatgctggaggctctcaggtcatttttaccaacccattggagatagtgaaga

SEQ ID NO: 860861 - DNA, 98 bp, Homo sapiens
gatgataaagatgatgatatccttctcaaccttgtgggatgtgaaaactctgttactgaagttgattgcttatgcgtcaactgcagatggatattcag

SEQ ID NO: 860862 - DNA, 98 bp, Homo sapiens
ggaatggtgaacactgcaccattggtaggcaaacggcaggcaccgaaacaggtttccaatacttatctacaggaatcgccatgaccccagctctgagg

SEQ ID NO: 860863 - DNA, 98 bp, Homo sapiens
gggtaaatgagggtgttgatttctccaaggatctgctgaaaggggagctgatcaccttctattactattggaagaagacccccgaagcagccagctcc

SEQ ID NO: 860864 - DNA, 98 bp, Homo sapiens
aatgcagacggacagtacctcttctgcaggtactggaaacccacaggcacacccaagtgataacccccgtgaggacaggccatggctacgtatacgag

SEQ ID NO: 860865 - DNA, 100 bp, Homo sapiens
gcgactagtaagcctatgtcatttcatccaccacattacttaggttccagtgggatgggagcttatcacggaaaacatagttttgatactttttctcatc

SEQ ID NO: 860866 - DNA, 100 bp, Homo sapiens
tgctattcagtctaccccatccggaggccctgctggctcagcaacccccagacatctccagttacagcccgaacactggaaactctgattcgactggcca

SEQ ID NO: 860867 - DNA, 98 bp, Homo sapiens
ccagagagctatggctgcagaagcagaagcgtcccgcgaggcccgcgccaaggctgaccggttccctgatgtgttacctgcttctgctactgatccaa

SEQ ID NO: 860868 - DNA, 100 bp, Homo sapiens
agcatatattatggaacacagtgcaatgaagggcgtgttggtagacattgtgaatgcagcacagatgaagttaacagtgaagacatggatgcttactgca

SEQ ID NO: 860869 - DNA, 98 bp, Homo sapiens
aggaagaaaagaaggcgtttgctgaagcaaggagaaatatgagcttacaagaccctatgaaaaaattagttgagaaagaagagaagaagaaaatcaac

SEQ ID NO: 860870 - DNA, 100 bp, Homo sapiens
agtgcaagttgcacctttgagcaatggtctttgctgtgccttctctactgatggcagtgttttagctgctggctttcaagatgttagaaagttcaagcca

SEQ ID NO: 860871 - DNA, 98 bp, Homo sapiens
cccttattgtatctggggcagatgatcgtcaagtgaagatctggcgcatgaatgtcttcaggaaccagtattactgtggacatcgccgtcatgggcga

SEQ ID NO: 860872 - DNA, 104 bp, Homo sapiens
tccatgaagatgccacagggatcctaaaatcttaggataagttctgaacgtcgaaaagaaaagtctcgagatgcagccagatctcggcgaagtaaagaatctga

SEQ ID NO: 860873 - DNA, 99 bp, Homo sapiens
ttcgagttgattaaccacgacgtggtggagcccctctacatcgagggaatcaacagtgagacaattatgaaaccagcttcaatttcagaggaagaattg

SEQ ID NO: 860874 - DNA, 98 bp, Homo sapiens
gagggagacccgcggcaaccccggcaacccagggctcggcgtcgctgccaccatgacgggaaggaaccctaaggactctgcaatatgaataattccct

SEQ ID NO: 860875 - DNA, 134 bp, Homo sapiens
gggaagacgtcgctggtgctgcgctactgcgagaacaagtttaacgacaagcacatcaccactctgcagggaataaaggctcagggaccggcagttctactctagagcccaccagcctctcagagcctccggtg

SEQ ID NO: 860876 - DNA, 100 bp, Homo sapiens
ttgtgcagtgtgtattgaaaatttcaaagtaaaggatattattagaattctgccatgcaacttgtatggcagtctcccaccctcatgtgttcaatctgat

SEQ ID NO: 860877 - DNA, 99 bp, Homo sapiens
gaacagcaagtaaatggacagttaatagagcctctgcagatatttccaagagatgtatcggcaagcagtgtaaacggaggacttggggaaaaaggacca

SEQ ID NO: 860878 - DNA, 100 bp, Homo sapiens
caagatacaccccttagaaaatggagaggactactcaccaggggattctccaccagggacaccgccagcgtccccaccgtcctcagcttggcaaacgttt

SEQ ID NO: 860879 - DNA, 98 bp, Homo sapiens
ttggataaagtaaataatccagatcattccacttaccatgatttcgatgatgatgatcctgagattgggactttaaccaggacatctgacagtgaggt

SEQ ID NO: 860880 - DNA, 99 bp, Homo sapiens
tcctccagttaccaccctcctccctagcataaaaagctcattcacacagaagacccatttaatgatgaacatcaggagaggcaagaggtggaaatgttg

SEQ ID NO: 860881 - DNA, 99 bp, Homo sapiens
tgcgaaggtgtcctcccatactggacccctacagatgtgttttcgcattataacaaggacctgttgacagagcactgcacagaagcttcattccaaaaa

SEQ ID NO: 860882 - DNA, 100 bp, Homo sapiens
atggatctccaacatggcagccttttccttagaacaccaaagattgtctctggcaaaggacagaagttgttatttatgttgttgagcgttcgccaaatgg

SEQ ID NO: 860883 - DNA, 99 bp, Homo sapiens
gttaaggattccaagtaactcttatttgcaggatacagacgtccctcaccagtgccagcttggggtctgcagatgagaactccgtggcccaggctgacg

SEQ ID NO: 860884 - DNA, 100 bp, Homo sapiens
cgctcccagtgcgggactgacactctgcaccgggaggccaagggccaccatcgtcttgctggcattctttgtggaccacaactcccgcaccaccactttc

SEQ ID NO: 860885 - DNA, 98 bp, Homo sapiens
gtccttccagcgctgcgcccggacagacaaggtcattcccaaaagcaagttcgtcttggtgaagttcgacacccagtacccctacggtgagaagcagg

SEQ ID NO: 860886 - DNA, 100 bp, Homo sapiens
cgctggtgcatctgtttgccggaggggcaggctgtccctgcaggatcccacgtacggctgaatcttcagactggggaaagagaggcaaaactccaatatg

SEQ ID NO: 860887 - DNA, 100 bp, Homo sapiens
gaaagttgaagttccacagccactgagttgtgattcgcctttgccagtctcatctcgtgtctgctttgttaagttccatgatccagactcagcagttgtg

SEQ ID NO: 860888 - DNA, 100 bp, Homo sapiens
cagctgattaaggactatcgggagaaagtggagtccgagctgagatccatctgcaccacggtgctgttctgaatgacatcatctccaccatgttcaatag

SEQ ID NO: 860889 - DNA, 99 bp, Homo sapiens
cgctttaagccggagcgaggccaccgaggagggcgggtgaaaggtgtagcagtcactcggcctacacccacagcatcgaccttgtgaacccagcgacct

SEQ ID NO: 860890 - DNA, 100 bp, Homo sapiens
ctcaaacatcaccaatattccacagatacaagtgacactgctgaaaaataaagctccaggattagggaaagtcaatgcattgatctggtagccttgctcc

SEQ ID NO: 860891 - DNA, 98 bp, Homo sapiens
gggtcctcctgctcacagtgtgaataacagatacattccaccgttgatctgggggaaaagtggacacatccagacagccttgtatgggaagatgggaa

SEQ ID NO: 860892 - DNA, 99 bp, Homo sapiens
ccagccctttggaataagaaagtctggtgcatgaaagctttagctgtggtcgccaggacccccccagagccaagaccttctccagaaggtgacccttcc

SEQ ID NO: 860893 - DNA, 100 bp, Homo sapiens
agccctgcgtgaggccgcggagcgccagctcaatgaacctcccgcgacgatgcccctcaacgttagcttcaccaacaggaactatgacctcgactacgac

SEQ ID NO: 860894 - DNA, 100 bp, Homo sapiens
aatttgttactttttcttgtccgggtgcggataagggacccgacactgatagatggaattcctccttatcgtgtgggcagtaagaaacagctccagagag

SEQ ID NO: 860895 - DNA, 100 bp, Homo sapiens
agtggttcttatagccctggagtgacctactcgcccgtcagtggttataataagtctatccagaagttaaaggagagattgctcgtaaagatgaaaagct

SEQ ID NO: 860896 - DNA, 99 bp, Homo sapiens
aagaagcaataatccactttcgggaggccatacggctcgcaccttgtcgcttagattgttatgaagatttggtgcttccagatgtgagttatcaggtgg

SEQ ID NO: 860897 - DNA, 100 bp, Homo sapiens
taagtttccaggagaagtaaccctgctctgtggaattgcaagaatctatgagatgaggaaaatgaggcccaaagaagtgatgccacttggttaaggtccc

SEQ ID NO: 860898 - DNA, 98 bp, Homo sapiens
atgcccggcgacgcgttgtcttggttaacaacattctacagaatgctcagtgaacagagtatctgtcaggcaagagctgctgtgatggtttatgatga

SEQ ID NO: 860899 - DNA, 100 bp, Homo sapiens
tgatgaagctgcagaaccaacgaggtggccgaatcttccttcaggatatcaagggggccgaaggccagagaccaggatttggctacggaggcagagcgtc

SEQ ID NO: 860900 - DNA, 98 bp, Homo sapiens
gagaactggaagccttgcaccaagacttgccaaggtgacattaattaccaagaatttgctaaaagactctggggtgacatctacttcaaccctaagac

SEQ ID NO: 860901 - DNA, 100 bp, Homo sapiens
aaagatgctgtccgtgcgcgttgctgcggccgtggtccgcgcccttcctcggcgggccggactgctttccagagtgttgaatcttccaccagaaaacttg

SEQ ID NO: 860902 - DNA, 100 bp, Homo sapiens
gcaagatcctgatgaaattggcatcgagttagaagccaccagcaagaagtcagccaagagatgtgttaaagttcacagacaatggccagatcatcttccc

SEQ ID NO: 860903 - DNA, 100 bp, Homo sapiens
aggctacagtccactccagcatgatttctctatgaatcatcatcaagaactctgggagaacttttgaattcataaccaagccaacatctccagacatgta

SEQ ID NO: 860904 - DNA, 100 bp, Homo sapiens
cgacggaattgcagttgaagactgatattttaaggggaaaatgtgtgaatcttcagtcaattactgtgaatgcaacccctgctttaatggtggttcctgc

SEQ ID NO: 860905 - DNA, 100 bp, Homo sapiens
ggttcccgcccgccgccgttccagtcctcagccgcgccagggcgggggccaggttatgaagacagtatggagtttccagaccatagtagacatttgctac

SEQ ID NO: 860906 - DNA, 98 bp, Homo sapiens
cctgaaagctggtggaatggaacagtgaagaagcattggttacagatgaggacacagtaaagaggtattttgccaagtttgaagagaagtttttccaa

SEQ ID NO: 860907 - DNA, 50 bp, Homo sapiens
gcagttcccaggatctgcataaagtgtggataaatcttggaaggagctca

SEQ ID NO: 860908 - DNA, 100 bp, Homo sapiens
ccaaaacaaacgctattcctctcactgcaagaagaaacacacgctgctgtgccccgactttgcccgcaggggggcgtgtccccgcggcgcccagtgccag

SEQ ID NO: 860909 - DNA, 99 bp, Homo sapiens
tcccttccacctcgacctctggttctacttcacactgcagaactgggttctggactttgggcgtcccattgccatggttgatccaaggattagttttgg

SEQ ID NO: 860910 - DNA, 100 bp, Homo sapiens
aaaacaactttcccatgtttccctctcctaaagcctggaatttcagagggtatgaaaagacacagactgtactctcagaactgaagttgaagtttgaaat

SEQ ID NO: 860911 - DNA, 99 bp, Homo sapiens
gctctttggtccacttacggtgcaatgattccaacacagctaatgagtccctggaacgccagatgcgtgaaatggaagagaactttgccgttgaagctg

SEQ ID NO: 860912 - DNA, 100 bp, Homo sapiens
ggaatgtagctgaactggctctgaaagctactctgattgtggtatctgaacgggaactatttggttctgttggtgtcattggtggtcattcttcctttgt

SEQ ID NO: 860913 - DNA, 98 bp, Homo sapiens
cacatccttcgaaaagctgccaagttgaaaatggacgagtaatcgcctgctttgattcattgaaactgttcgggggtcttgtctggattttggttgcc

SEQ ID NO: 860914 - DNA, 100 bp, Homo sapiens
agtgactcacaaatcagcaacacagaatttctgcaagtaattggaacaagtacttgttactcaacaaccaggagctgaatgaactcagtgccatctctct

SEQ ID NO: 860915 - DNA, 100 bp, Homo sapiens
acgcagctggctggcttcagtggaccaaaaaagcttgtggtgaaggggggcaaaaaaaagaagcaagttctgaagttcactcttgattgcacccaccctg

SEQ ID NO: 860916 - DNA, 98 bp, Homo sapiens
gacttcactgcccaaacaggaagtctatgatgagtacaaggaaatatcggctcatcaaattggggtctcaatttgctacaggaagaaaacgtgattcc

SEQ ID NO: 860917 - DNA, 100 bp, Homo sapiens
ccgcagtccgggccgaggagggacagtccacgccgaggataacaaagccattgacctttgccgattgtgttggggacgaacttcctttaggatgggaaac

SEQ ID NO: 860918 - DNA, 100 bp, Homo sapiens
gaatttcaacgtggcccatgggctggcatggtcatattacatcggatatctgcggctgatcctgccagccaaggccacctttgatgccatttctaagacc

SEQ ID NO: 860919 - DNA, 100 bp, Homo sapiens
cgagaagcgagtcaaggcctcccactccttcctccgagggctgtttgggagctacagggagctggccgactgcacctggcacatggcggagaagctgggc

SEQ ID NO: 860920 - DNA, 100 bp, Homo sapiens
gaaacctgggtgaactttcacggacaacctcagaggacaacgaagtgttcgtgacttttttgaacgaaccattctgtgcaacagccttgtgtggagttgt

SEQ ID NO: 860921 - DNA, 100 bp, Homo sapiens
accaggtgtaaagtgcaagagtaatatgctatgactgagtgtatgttttaactggaaaaagtcttccatgaaaacgtcacttttaaaaaataagtaatgc

SEQ ID NO: 860922 - DNA, 104 bp, Homo sapiens
acaggcgcctctgccctgcacgtggctgctgccaagggctacattgaggtgatgagataacgaaggaggcccaacttcattcaataaggagcctgacggattta

SEQ ID NO: 860923 - DNA, 99 bp, Homo sapiens
ggcgagccaagttccgcagcctggcatggcttctggggacctttacgagaattccttgatctatgaacttttctctgttatggttcattctgggagcgc

SEQ ID NO: 860924 - DNA, 98 bp, Homo sapiens
ctacacaaatctggaacgggtggccgattactgcgagaacaactacatacagagccgagactgtctgaagctgggcccacctgctgagggagaagtcg

SEQ ID NO: 860925 - DNA, 98 bp, Homo sapiens
caatttaagcctgatctaacccctagaaacagcccatatgttgtaaagtactatggcagttattttaagaatacagacctctggattgttatggagta

SEQ ID NO: 860926 - DNA, 98 bp, Homo sapiens
ggacggcgtggaccacatagacatttacgcggatgtcggcgaagagttcaaccaggaatagccaggccagaagaaggaaggcctgtggtgagtgggac

SEQ ID NO: 860927 - DNA, 100 bp, Homo sapiens
tgtgattgttagtggaacttctacccgacacttacatgccatggccttctacgttgtgaaaatgacccagcctcgcctttaaggatggcaaacagtgccc

SEQ ID NO: 860928 - DNA, 99 bp, Homo sapiens
agagctgtgtggacgcggtgcgcaaatccctgcaaggggtggcaggttttagctaaagaagatactgaggcagctattcaatcaatattatacaaagaa

SEQ ID NO: 860929 - DNA, 104 bp, Homo sapiens
gaagatgattccaacgccaccaattccaacctggccttcaagagggaattgaaaactaaagaacctgtaatcatgagtactcttgagactgtacgaatatttct

SEQ ID NO: 860930 - DNA, 119 bp, Homo sapiens
aagaaaacaccccgtactggcaggcatggagccaacaaggagaacctggagctcaacggcagcatcctgagtggaccatcagcacgtgcccatcgacatccagaccagcaagctgctcg

SEQ ID NO: 860931 - DNA, 98 bp, Homo sapiens
gacgaggactacgtgccgtcggtaagactttgaccccgacgcaggcttcagtgattgccgcggatcagaagcctgagcactttggctcgagacaatta

SEQ ID NO: 860932 - DNA, 99 bp, Homo sapiens
tgatgatcacgcagctggctggcttcagtggaccaatcctctggaccttctccatctacctggagtcagtggccatcttgccgcagctgttcatggtga

SEQ ID NO: 860933 - DNA, 120 bp, Homo sapiens
cggcgctcgagggaccatggccgatcctcgcgtgagacagatcaagatcaagaccggcgtggtgaagcggtgggcaccatgtccttgaagcttcaggcaagcaatgtaaccaacaagaat

SEQ ID NO: 860934 - DNA, 100 bp, Homo sapiens
ggagtcacctcccatggcctgtcctgcgaagtctgtccatgtgaatgtgctgtgtggaagagttaaagggcccaactaaatgttccagtgattccaatag

SEQ ID NO: 860935 - DNA, 100 bp, Homo sapiens
ctctctctcgttcaaggaagcgcaggctgagatggatgatgctgaccctgaggaaagaaactatgacaacatgctgaaaatgctgtcagatctgaataag

SEQ ID NO: 860936 - DNA, 100 bp, Homo sapiens
acttggcgaagcgctgcgctcgcgcccggatccctcagtttggaaattttagcattcaggtgccaggaatgcagatgggacagccagtgccagaaacagg

SEQ ID NO: 860937 - DNA, 98 bp, Homo sapiens
caaatcaaccatgatctgcatgaacggctatgtgtgtcgatgagcaaactcattggtaaccatcctgatgtcctcccttcctggtccagaactttaca

SEQ ID NO: 860938 - DNA, 100 bp, Homo sapiens
tccttgacagaattgactataacgttgaacagtcctgtatcaaaactgaagatggtttgaaacagcttcacaagttggcctttaccagagtttgatccaa

SEQ ID NO: 860939 - DNA, 98 bp, Homo sapiens
cttcggaacgttcggaatcccgtttttgctgaggatacaccaggtcaccaaaaaggaggcgatctagatctggttctagatctcgaaggtctcggcat

SEQ ID NO: 860940 - DNA, 100 bp, Homo sapiens
atgaattggatgaacaaaatgaacattctagtatgccagtagaaaaaaatatcactttagaaaggccttctaatgtaaatctcacatgccagttcacaac

SEQ ID NO: 860941 - DNA, 99 bp, Homo sapiens
ctcaactcggagaacctaaacaacaacagcaagaggagctgtcccaacggcatggaggtaaccaatggtcaaggtgaaaataagatgaaaaatttacct

SEQ ID NO: 860942 - DNA, 51 bp, Homo sapiens
gaactaaaggctgactttccagacaacatgccacttcaaatgaacaacaag

SEQ ID NO: 860943 - DNA, 99 bp, Homo sapiens
agtgccgggccagacatggcggaaggaagatgatccctatgatcttgaagatgtttctgcacagaaatgagggaaatacaaagaaccaaatacagttct

SEQ ID NO: 860944 - DNA, 100 bp, Homo sapiens
cgctgctcttcaaagcgatccacaatctgttagaaaggcaatgtgcagaatatacacaaggaagataaacctttaagtctgagtatgcctgtaattacag

SEQ ID NO: 860945 - DNA, 100 bp, Homo sapiens
gtcgacaggggatgggaccctagcttccctctgtgtgttgcagtcctgtggcattatgcatgccccctcccagtgaccccaggctttttatggctgtgag

SEQ ID NO: 860946 - DNA, 100 bp, Homo sapiens
agactggcaaaagcacaaggattctcgctgtgacagagacaacaccgagtatgagaagtggatgaaaatactaggaaaagtttatttaagttacgttcta

SEQ ID NO: 860947 - DNA, 100 bp, Homo sapiens
ctcagctctcacaggagagggcgttcagcgtggagattggtgaaagcgtgagaggggaagatgtctacatcatccagagcggctgcggggaaattaacga

SEQ ID NO: 860948 - DNA, 100 bp, Homo sapiens
cgcgggccctttgcagctgcgattttcgccctacgttttcaacggagggtgttagctactggcgggtgcctcatgagctgatagagtgttggactctaga

SEQ ID NO: 860949 - DNA, 100 bp, Homo sapiens
gccccggagcgcccggcggcggtttcggcgcgcggccgggctggcgatggaagatggaaggaaggagcgcagcggttgattgacttatgtgcaatttggg

SEQ ID NO: 860950 - DNA, 100 bp, Homo sapiens
tggcagtgaatctactcatcctttatgtcttgagcaaccagccacccaggacagagcgggatgccaccagcttgtccaaagggaagttccaggagctcct

SEQ ID NO: 860951 - DNA, 98 bp, Homo sapiens
gcgctagtcagggctcagcagtgccccagcatggggcagagcctctcggtgccagccagtactatactggcaattgctggagaagattttgcaattgt

SEQ ID NO: 860952 - DNA, 100 bp, Homo sapiens
agggccaggagcagactgtcccatgtactgctggtatctgagtcaggcactggtgaggtggattgatgatgaatcttctggcacacctggagcaactcca

SEQ ID NO: 860953 - DNA, 99 bp, Homo sapiens
acaaatatgttttgtggaatattactgctgccctgatgaagaagttcctgaatctgagtcttgagctcccttctgttgccacatttgggccaaggaatg

SEQ ID NO: 860954 - DNA, 100 bp, Homo sapiens
ctcttcgtaacagctgtactgaaccagcacctatgacagaagatctgctagaagagcagtctgaagttttagctaaattaggtacatcggcagagggggc

SEQ ID NO: 860955 - DNA, 98 bp, Homo sapiens
ctccggcagatcctggactggtgtggggaggccttcgagggcgtcctctgtgacctgcctgctgcctccctcaacgaccagttgccccaacatacatt

SEQ ID NO: 860956 - DNA, 100 bp, Homo sapiens
tctggcaattaattggctccattaaaaattaggtccctttctagagataggagaagagagagatcgctgtctcgggagagaaatcacaagccgtcccgat

SEQ ID NO: 860957 - DNA, 100 bp, Homo sapiens
cgacctcccggctgacctattcacctcctgcctcaccacccccatcaagatcgccctgcgctgatgtgccacagcagaagcaagttgtgttggcagtagg

SEQ ID NO: 860958 - DNA, 98 bp, Homo sapiens
acggtcctgtcactggcccgctccctggcggtgcagagaccagcatccttggagaaggattcgcccgtccttccagttggagagttctcggagccatt

SEQ ID NO: 860959 - DNA, 100 bp, Homo sapiens
agccagtaggacacgaaggtggccgaatccgggtgcatggtattggcgggggccacaagcaacgttatcgaatgattgactttctgcgtttccggcctga

SEQ ID NO: 860960 - DNA, 99 bp, Homo sapiens
aagtggctgccccggctgcatgctcttgtcgtaggacctggcttgggtagagatgatgcgcttctcagaaatgtccagattcatgatgttgctatcaaa

SEQ ID NO: 860961 - DNA, 98 bp, Homo sapiens
tgattgagccgcgcacgctacagtacaagaatcatgtccctaaggaggaagctggagctccacgaggggaggggccggccatcccaggagacacccca

SEQ ID NO: 860962 - DNA, 98 bp, Homo sapiens
ttttacgtctagatttccatgcccatggaagctggactgtgctgctgccatctcggctcactgcaacctccctgcctgattctcctgactcagcctgt

SEQ ID NO: 860963 - DNA, 100 bp, Homo sapiens
cttttaaaagagagagcttgtgaaactgagggaatagaacccagcttagactagaaagtctagaagacacacacataatgaagggggaagatgatgcttt

SEQ ID NO: 860964 - DNA, 98 bp, Homo sapiens
cgggggcatcaggtttttctcccgctccagaaaaaggcccggcaggaagatgggctcccgtggacagggactcttgctggcgtactgcctgctccttg

SEQ ID NO: 860965 - DNA, 100 bp, Homo sapiens
atggtgacctggctaactggatgatacctaaagcatgtacctacatcagatctaaccttgatcccagcaatgtggattccctcttctacgctgcccaggc

SEQ ID NO: 860966 - DNA, 99 bp, Homo sapiens
aggacgggacgggatgggcaaacaagcaggatcagcaagacccaaagaggtatgacgattactactattatggtccacctcatatgccccctccaacaa

SEQ ID NO: 860967 - DNA, 131 bp, Homo sapiens
gccactagaaattcagagagtctccatcaggaaaacaagcctggttcagttaaacctactcaaactattgacgttggaacttgccaggaatccagcaatgatgcaggagatgatgaggaaccaggaccgag

SEQ ID NO: 860968 - DNA, 98 bp, Homo sapiens
gtaaaagtcttggttacaaatggagccaatgtcaatgcacaatctcaggtgagcaggagccagctgtaagcagtgattctgacatttccttgatcatg

SEQ ID NO: 860969 - DNA, 100 bp, Homo sapiens
tcttaccccttttgaatttcagaagctcctaaacaacttgacctctatcaagatacgtgggacatacagtgagagaagtcgttccaggggtagaggaggc

SEQ ID NO: 860970 - DNA, 98 bp, Homo sapiens
gcgctgcaaggatgctcctgggatttcggagaggccgcaggagtcatttccaatggccaatgtacatggtggactatgccggcctgaacgtgcagctc

SEQ ID NO: 860971 - DNA, 100 bp, Homo sapiens
gcaccatgtttgttatgcagcctgcagaaccgcttggtggcatgcatgtttagtcccagctacacagcagggaggctgaggctgaaggaatacttgagcc

SEQ ID NO: 860972 - DNA, 99 bp, Homo sapiens
gctctcgtctggtttgatcacaagacgggcaagtactatactggcaattgctggagaagattttgcaattgttgcttctgatactcgattgagtgaagg

SEQ ID NO: 860973 - DNA, 100 bp, Homo sapiens
ctcatacaggatgcccactttcatcaacttctctgtctgctcaacagtcagtgccctcggctagcatgacccgcctgatgcggtcccgcacagcctctgg

SEQ ID NO: 860974 - DNA, 100 bp, Homo sapiens
aacccacaatagttcagtgacatctgctgcttcatcagtaacaagtgagccgttctccaaccctttggcccccgatggccacgatgtggatgatcctcac

SEQ ID NO: 860975 - DNA, 99 bp, Homo sapiens
ttcatggagcctgcggttattgtttgcctgggtggaattttaccttttggttcaatctttattgaaatgcttgggaacaatgggccgaggcattgtcat

SEQ ID NO: 860976 - DNA, 100 bp, Homo sapiens
ggaggctgtgaggaggcacatacggcacggggatgtcatcgcctgcgacgtggaggctgactttgccgtcattgctgcagctgctcagccaggaactgag

SEQ ID NO: 860977 - DNA, 98 bp, Homo sapiens
ggacctgcccgcctgcggctgctccggctggtaatgccgctgtcatcaaatatgaggagaaacctccaaaaccagcatttcagaatggttcctcagga

SEQ ID NO: 860978 - DNA, 98 bp, Homo sapiens
aaaacaaagcattaaaatcagaagttcagaagctacagactcttgtttctgaacagaacgtgctggccaaagcgctctatgacaatgtggccgagtcc

SEQ ID NO: 860979 - DNA, 100 bp, Homo sapiens
ctcccccaagtgcaaggggtgcttcaaggccattgtggcagattatgtttgagaccttcaacaccccggccatgtacgtggccatccaggccgtgctgtc

SEQ ID NO: 860980 - DNA, 100 bp, Homo sapiens
gatcggcgtgtttggatgtactttacagaatacagattctgttcatcttgctctgaaattaaataattctgaactcatggggagaaaactcagagtcatg

SEQ ID NO: 860981 - DNA, 100 bp, Homo sapiens
gctctattgattgggcctgcctcatcgtggatgaagcccatcggctgaagaacaatcagtctaagctggtttaccatgcattgcaattgttagcatatac

SEQ ID NO: 860982 - DNA, 100 bp, Homo sapiens
gtcacagacctgcccaatgcctttgatggaccaattaccataattcatgtgggtgtatgatgaagatgtaggaatgaattgcagggaggttacctttgtg

SEQ ID NO: 860983 - DNA, 100 bp, Homo sapiens
cacagcccggaacactggcatcatctgtaccattgaaactggcgatggaatatgagaggagccctctggaaagaaaaggacagaccctgtgctttcatga

SEQ ID NO: 860984 - DNA, 98 bp, Homo sapiens
tgggcctggatgcttgtgcgaaactgagtttttaaatcggaagtacctatcgaaactaccttgtaggtcctctccatctgtcccaaggacatgagagc

SEQ ID NO: 860985 - DNA, 98 bp, Homo sapiens
ctcacctcaagcacacccaatggacagcatgcctcaccaagtcacatgacaagcaagttttccgtctgatgaaggttggccatttgcaaagtatcttg

SEQ ID NO: 860986 - DNA, 116 bp, Homo sapiens
ctgaggagagtgagcgtcccctatccaagtagcctgctgtcgcccagccgcggtgcaggctgccccatggatgccacacgtggcagcggggagaaaagaagtgattcggtccctgc

SEQ ID NO: 860987 - DNA, 98 bp, Homo sapiens
ccggccttggtccctgcggcgcggacgtccggcgcgggagagaaagcaagtaactggcagaagttttggtgataaagattttcggacaggtttagaaa

SEQ ID NO: 860988 - DNA, 100 bp, Homo sapiens
tggtcggaatcagatttgaaaatgaaagtggaaagaatatggcaaagctgatgcaagatgggtttattttgatccaaccattgtgtctgtggaaattctg

SEQ ID NO: 860989 - DNA, 100 bp, Homo sapiens
ttggaggactgcaccggatcgctgtcattaaaaattaagcgtggcttttgaggaagatgtgacaactaccggagatttcagatgcagaactccaggaagt

SEQ ID NO: 860990 - DNA, 100 bp, Homo sapiens
atgggggcaaagacctacccagatactgattccttcaacactgtagcagagatcactgggagcaaatatccagaacagggttctccaaaaaatgtggaat

SEQ ID NO: 860991 - DNA, 98 bp, Homo sapiens
aggaggtggcaggcctcggcgtgctttgccaaagatcattaaggctgggtttgcagcactccaactagaatactttttcactgcaggcccagatgaag

SEQ ID NO: 860992 - DNA, 100 bp, Homo sapiens
aagacttttgagaatcatcaaccttcttgtgaatgtacctgaacttccggacactacagagcattctagaacggacctgtcccgtgatttagcagcattg

SEQ ID NO: 860993 - DNA, 99 bp, Homo sapiens
tccggagcagccactaagagggatgaacaggcctgcgtggaaattgaatgagatttggactgcccctgatggtgattattcataaatcctggtgtggag

SEQ ID NO: 860994 - DNA, 100 bp, Homo sapiens
gtggaagtcatttctttacccaagaatgacctgctgcagagacttgatggtttggcagttctctaccagtggaccaatcttttcatccccgtgtacctca

SEQ ID NO: 860995 - DNA, 98 bp, Homo sapiens
gtacccgaaaaactgattgactgggctggcgttaactgtgcggaggcaggaagtggttctgaaagatggaagaattgaaagactaaagttagagcttg

SEQ ID NO: 860996 - DNA, 128 bp, Homo sapiens
aaaacaggtcccgatcccgaccccaaaagagtattcttggatcttgcacaggaaggaattaaagctctgtgcagtgtgcctagaagacttcaagcctcgagatgagttggggatttgcccatgtaagc

SEQ ID NO: 860997 - DNA, 104 bp, Homo sapiens
aaatttgagtgaagtcagtcaagtgaaagagactttggaaaaagaacttcagattttgtatttgtgtggaagtaatcgaaaagacaacatatttattgatcctg

SEQ ID NO: 860998 - DNA, 100 bp, Homo sapiens
ctccgcccagagtccgatggcggcggcactgagggccccgacccagtgtggacgaatgtggaacctcgctctgtggctgtgttcccttggcactccttag

SEQ ID NO: 860999 - DNA, 100 bp, Homo sapiens
ggaacaagagagcttctttgaagggaagaacatggcacttttcgagtgaccatctttccaccgtagaaaaggacacaaatggagaagttctgtgggtgtg

SEQ ID NO: 861000 - DNA, 100 bp, Homo sapiens
ggaggtggcaattcaccgaattcgaatcaccctaacaagccgcaacgtaaaatccttggaaaaggaacgtgctggccaaagcgctctatgacaatgtggc

SEQ ID NO: 861001 - DNA, 98 bp, Homo sapiens
tgattgatcgaatgaaggaatcctctccatctggttcgaagtctcagcggtattctggtgcttatggtgcctcagggcccggcaggaagatgggctcc

SEQ ID NO: 861002 - DNA, 100 bp, Homo sapiens
gagtcctcagaagcatgtgtcttccccagctctgcagccacatactatccgtttgttcaggaaccaccagtgacagagtctttgatttgcgtcagtgtca

SEQ ID NO: 861003 - DNA, 100 bp, Homo sapiens
ggcggaaaggataagcctcgacttagaagctaccgagttaccctaagaaaggtgactgtggaagaggtcatgaccacaactgcatatctggaccttttcc

SEQ ID NO: 861004 - DNA, 100 bp, Homo sapiens
cctatctcgtacacttcttggcagtcatggacaagagctattgatagaagccttccatacagcaaagtgcgagaaactacaaaaggagaaggaggagctg

SEQ ID NO: 861005 - DNA, 100 bp, Homo sapiens
atgtctcgctccgtggccttagctgtgctcgcgctactctctctttctggcctggaggctatccagcgaatatattaaaggaatctgtgaacctgaacta

SEQ ID NO: 861006 - DNA, 100 bp, Homo sapiens
cttcttcagaaagcctccggaatctaaaaagccctcagtaccagagacagaagcagatggattcgtccttttaggtctccaattgagaaacatggcactg

SEQ ID NO: 861007 - DNA, 100 bp, Homo sapiens
gaatccctacgcgtccctttgggtttagcacgatgagctcaatcggcactgggacaaaacttacctggggtccctacttatggttttacatgcttcgggc

SEQ ID NO: 861008 - DNA, 98 bp, Homo sapiens
cgagcgaggccaaccttcaggaggaggaggaatgttgcatagaacgaccgcctcttcggctgcgtggcttcggagcagctttgactacaactcccaga

SEQ ID NO: 861009 - DNA, 99 bp, Homo sapiens
ggcgacgtctaatctgttaaagatccaatggatttgaacagaagcgctttgccaggcttgccagcaagaaggcagtggaggaacttgcctacaaatgga

SEQ ID NO: 861010 - DNA, 99 bp, Homo sapiens
agaggatccgcaaagtgctgaacagggactttataattgatggcttatcagtggagagaaatcatgttcttgttagaataaatcttgttggtgggccat

SEQ ID NO: 861011 - DNA, 99 bp, Homo sapiens
agaggactaaccaggttcaagaagaaaatgaagttctgcgtcagaaggtggtggttgtccaggccatcagtgccctgtgtcagaaatatcctcgcaaac

SEQ ID NO: 861012 - DNA, 100 bp, Homo sapiens
ccagctctgcagccacatactatccgtttgttcaggaaccaccagtgacagaaaatcgagctatagcagattatcttcgttcaaatggctatgaagaggc

SEQ ID NO: 861013 - DNA, 98 bp, Homo sapiens
gaggggctccggctggtctgtggtgaggtagagctacagtgtgaatgtggacgaagaaaagagatggtgatttgctctgaagcatctagtacttatca

SEQ ID NO: 861014 - DNA, 100 bp, Homo sapiens
ggctgccctcaccttggcagatttcatctacaagagcatggcaccatgaggatcatgctgctattcacagccatcctggccttcagcctagctcagagct

SEQ ID NO: 861015 - DNA, 100 bp, Homo sapiens
gttgtttgcgtgcaatgttcaccagtcagtgtttgaaggagaagagagcaaggaatcctatgaggatggttgtgaggattatcctactctatcagaatat

SEQ ID NO: 861016 - DNA, 98 bp, Homo sapiens
gaaagccgtggccccgagggcggatccgagattgcttccaagtatgatcatcaggcagaagaagatcttcgcaattggatagaagaggtgacaggcat

SEQ ID NO: 861017 - DNA, 100 bp, Homo sapiens
tcccatgccatcagtatgagcgcctatctgcgagaacagagaagggagctctatagtcggagtggagaactgcaaggtatctcagatgaagacatcatca

SEQ ID NO: 861018 - DNA, 100 bp, Homo sapiens
gcgcgccatggcttctggagccgaggcactccacagaaggatgttattatcaagtcagatgcaccggacactttgttattggagaaacatgcagattata

SEQ ID NO: 861019 - DNA, 100 bp, Homo sapiens
atgctttggtatatgatttggattttcctgccttaagaaaaaacaaaaatattgacaactttttaagcagatgcacaactacaagagcggaatgaccctc

SEQ ID NO: 861020 - DNA, 98 bp, Homo sapiens
ctgtgaggagagagcaaggcagttcttcaggggagactctggctcctcctcctcctcagaagatgaacgacccaagagatcccatgtgaagaatggtg

SEQ ID NO: 861021 - DNA, 98 bp, Homo sapiens
gggaccgggtgctggaggagctgcacaaggcggaggacagcctcctggccgccgaagaggccgccgccaagtttgcagatggcgtgtacctggttctg

SEQ ID NO: 861022 - DNA, 99 bp, Homo sapiens
agagacaacaaagcgctattatcctaaggtcacggtctagatcacattctcgatccagaggaaggcgatactctcgctcacgcagcaggagcaggggac

SEQ ID NO: 861023 - DNA, 100 bp, Homo sapiens
gagtcttctgaagactgtggtcattgtgcttgaccaggatgaaagagcagctgagctcagcagggagcagaacgagaaaaccatccggagcacgcagacc

SEQ ID NO: 861024 - DNA, 100 bp, Homo sapiens
ataccaactagagataaaaataccagaaacatacccatttaatccccctaagtttgtgaagcctggagctgagaattcaagagactaccctgacttggca

SEQ ID NO: 861025 - DNA, 101 bp, Homo sapiens
aaccagtacaatccagtcacttgcggaaagcactttgcaattgaggtatcataggaagaaaaaatgctgggcatcttggtgcagcacaaagtccggagtgg

SEQ ID NO: 861026 - DNA, 100 bp, Homo sapiens
agaagagggtggctaatgattaaggaatctttgtctgaagtggaagaaaaatacaagaaagccatggtttccaatgcacagttagacaatgagaagaaca

SEQ ID NO: 861027 - DNA, 100 bp, Homo sapiens
acaaaatctacagcctatgctttctggactatctgtcgatcattcctgaagagagggatcaatgttgagtctattatcctcccagtccacaacgctgaac

SEQ ID NO: 861028 - DNA, 102 bp, Homo sapiens
tgcaacctacggggtgtacttgggaacgaggggtgaagcggcccaggtgagggcctgcacagctgaccacagttgggaaacgttgctgtctttggattcagg

SEQ ID NO: 861029 - DNA, 98 bp, Homo sapiens
gagctcgcctgcatctactcggccctcattctgcacgacgatgaggtgacagtcacgctgttggagctgatagcaaagtcacagctcacatccctgag

SEQ ID NO: 861030 - DNA, 99 bp, Homo sapiens
atcaaaatatgcagtctcttttaccagcaagatgaggatgacatcaatgatgtgacttctatggcaggggtcaaccttaatgaagaaaatgcctgcatc

SEQ ID NO: 861031 - DNA, 100 bp, Homo sapiens
aaatacgtggttggagagctcatctggaattttgccgatttcatgactaaccagtatatccgtgggcttcaaagctttctggaccaggcctcgcggctgg

SEQ ID NO: 861032 - DNA, 100 bp, Homo sapiens
gaagttatgcggcttgcccaaggccacacagctgctctccggtgtcatgaggagcttcaaaagagtcaactttgggactctgctaagcagccagaaggag

SEQ ID NO: 861033 - DNA, 100 bp, Homo sapiens
cgggcctcccattgcagcatctgtgacaactgtgtgggatttctctctgatcaaacggacagttcaggactcagaatctaaggatgaatgttcaccgtgg

SEQ ID NO: 861034 - DNA, 100 bp, Homo sapiens
ggtgaggtcgctgagggcccgccggagatgttttccttgtcgagcacggtgcaaccccagatccgatcacataggacagtatgcaccttaagatcctgaa

SEQ ID NO: 861035 - DNA, 100 bp, Homo sapiens
atttgctgtcagccatgaacggatggatgtgatgcctgctagccaaaaggtcaggtcaattcagtgaagatatgatacccacagtgggcttcaacatgag

SEQ ID NO: 861036 - DNA, 100 bp, Homo sapiens
agcttgatttgtttttggcatactacgtgcaggagcaagatgacacaggctgtcctagcagccagtcagtgtctcctgtgaagacaccctcagatgctgg

SEQ ID NO: 861037 - DNA, 100 bp, Homo sapiens
cctgatcaagaggaactcattcagagtgctacagaaacaatagtgatggccaaaaaatgagcaaacggaaaaagaattatccagatccagtttccatcat

SEQ ID NO: 861038 - DNA, 100 bp, Homo sapiens
tgatagcctagaagaaagcaggctgttcctgttccagctgctccgtggcctggcctactgccaccggcagaaggtgctacaccgagacctcaagccccag

SEQ ID NO: 861039 - DNA, 99 bp, Homo sapiens
tcccgagtagctgggattagaggggtgggaaccgccaaacctctcccttctttttgacttcacccttggataccatcaaggccagaggatggaaccaag

SEQ ID NO: 861040 - DNA, 99 bp, Homo sapiens
cagccgatcatggcggatggcccccggtgcaagaggcgcaaacaagccaatcccaggaggaaaaacggtgctgtacttctttgcagtatacaaggacta

SEQ ID NO: 861041 - DNA, 98 bp, Homo sapiens
ggaggaacatgatcaggcatctccatcaggatttcaaccagagatgggtttggcacctggatcctgtcattgcaaaactggttttggaggtgtgagct

SEQ ID NO: 861042 - DNA, 99 bp, Homo sapiens
gggttctggactttgggcgtcccattgccatgttgccctcaaattggctgtagccacacggatataagaaagtcagatcttatccaggatgaagcactt

SEQ ID NO: 861043 - DNA, 98 bp, Homo sapiens
aatgacatgcaagttggacagacgggaaaaatagtagcaccatccatggcagaagtccttgctaaaaaagaagagctagcagatcgtctagaaaaggc

SEQ ID NO: 861044 - DNA, 98 bp, Homo sapiens
gaatgagccagagggacacgctggtgcatctgtttgccggagggggttaagcatctgaaaggccagaatgaatcagcattccctgaagaagaagaagg

SEQ ID NO: 861045 - DNA, 100 bp, Homo sapiens
ttagccggacccaggatgaagaggttggagatgggaccacatcagtaattattcttgggaattgcaacccagtgaagaagttacctggaagtaaagactg

SEQ ID NO: 861046 - DNA, 98 bp, Homo sapiens
aggaagcaattctggaagcgcagcaacagcaagctcccgggcaggttacaacctgccatattcattcatccagtgatgatgaaattgactttaaagaa

SEQ ID NO: 861047 - DNA, 99 bp, Homo sapiens
ttgtgttttacattgaagctgcatataaaactgctgagtccaggcatgataaagaaaagatagaaaagaaagagaaacgggacagttcaggaggaaagg

SEQ ID NO: 861048 - DNA, 100 bp, Homo sapiens
atggctctcgccttccagcaattccccggcatttccggagagttcttttgaagtcacttcagaaggatctacatgaggaaatgaactacatcactgcaat

SEQ ID NO: 861049 - DNA, 100 bp, Homo sapiens
ggtgaatttaaaggagcagccctggtgtcacctatcagtaaaagtaccttctccaggcaaattccgttcccctgcagcaccatctcctttggctcttcgg

SEQ ID NO: 861050 - DNA, 116 bp, Homo sapiens
gcctcagcggccggaggacatgcgggagagagaatgagccagagggacacgctggtgcatctgtttgccggagggacatggtccggcgaggagagatcatcgacaatgacaccgag

SEQ ID NO: 861051 - DNA, 100 bp, Homo sapiens
cagcccgggccacctccaggagggaagctttaccgatttgttacaactcaagcaagggccagcagaaattctcttttgacagatataattgctgcttatc

SEQ ID NO: 861052 - DNA, 98 bp, Homo sapiens
attttgaggacacttgtggagagctcgaattccagaatgatgaaattgtgctgctgatactttggctgtgaggcaaaaaaggagaatttatgatatca

SEQ ID NO: 861053 - DNA, 100 bp, Homo sapiens
aacaaggagttgatgagggaggtgtttccaaagaattttttcagctggttgtggaggaaatcttcaatccagatattgtactgccaaatctgtcgaaagg

SEQ ID NO: 861054 - DNA, 99 bp, Homo sapiens
cgatatcttcgccatcgccagcatcgccaacccggactggatcaacaccggggagtctgcggaacccttaggagaaatcttgagagtggacagcaattg

SEQ ID NO: 861055 - DNA, 100 bp, Homo sapiens
ctggactcggagacgtcggccagcaccgagagcctgctggaggagcgggccgggcggggggcctcggaaggctcttgcagccaatgccggaacaggattt

SEQ ID NO: 861056 - DNA, 98 bp, Homo sapiens
ttcctctctatcgtgtctcagccgactttcatcaacagcgttcttccaatctcagcagatggaatggggcgagtccttgctcaagatgtatatgcaaa

SEQ ID NO: 861057 - DNA, 100 bp, Homo sapiens
gtcagtgcccaccagggtatactggctcctcttgtgaaggaggtaccttcttccaaacccggtggcgggacaggcctggccggcctctgcagagacgtcc

SEQ ID NO: 861058 - DNA, 99 bp, Homo sapiens
aagtatttgtggtaataacccttaccgggagtttcactgaaggtccccatcctcatcccgtgccacagagtggtctgcagcagcggagccgtgggcaac

SEQ ID NO: 861059 - DNA, 100 bp, Homo sapiens
atctttatgaaatttttaaaagacagattattagaagataagaaaatcactgtgttactggatgaagttgcagaaggtaccagcagacaggtgttaggtg

SEQ ID NO: 861060 - DNA, 100 bp, Homo sapiens
ctggtccattgctatcagcccattactcaggcttaagcaggtaaagcagtcactgtgaagaaaataacattttaagaaacttttctgtcacaattgatag

SEQ ID NO: 861061 - DNA, 100 bp, Homo sapiens
ttcacaagacttcatcacctctttgtacatcttctgcaattactcgacatggctccttactatgaagccttgtgcaaatccctcgactggcagatagacg

SEQ ID NO: 861062 - DNA, 98 bp, Homo sapiens
cagcttctgcagtgcattgttgatgaggcagctgtttctgatcaggaaaggaagaaaatgaagcgcaaaggagatcggtattccatgcagacctctct

SEQ ID NO: 861063 - DNA, 98 bp, Homo sapiens
tgctggacgaggtggaattgctggatctggagagcgtagccgcctggcgggacgaggacgactacacctggctgctgatactttggctgtgaggcaaa

SEQ ID NO: 861064 - DNA, 98 bp, Homo sapiens
ccggggggctatgggcccatcgactacaaacggaacttgccgcgtcgaggactgtcgggatcagtttgtgtgtggagaaacagtcccagccccttcag

SEQ ID NO: 861065 - DNA, 100 bp, Homo sapiens
attgcatgggttaatgacatagtatctttaaactacacaaaagtggaacagctttgttcagcaagatgagtatcatatggttcatctagtatgtacttct

SEQ ID NO: 861066 - DNA, 100 bp, Homo sapiens
ttggaggaatctgtcgatgccctcagtgaagaactagtccagcttcgagcacaagcccagccatctaatcagtctccgatgtctttaacatctgatgcgt

SEQ ID NO: 861067 - DNA, 98 bp, Homo sapiens
tgatgccactcatcatcaggagctctaaggccccaggagtaaactacaaattcttgtgagtcctaattcctccttatccacaaaacagtcaatgttcc

SEQ ID NO: 861068 - DNA, 98 bp, Homo sapiens
aatgagctcccaaagccatccagtttctctgcaggtggatattgttcccagccagggggagatcagcgttggagagtccaaattcttcttatgccaag

SEQ ID NO: 861069 - DNA, 100 bp, Homo sapiens
ggaccgggacctgctgctggacccggcctgggagaagcagcagcgcaagctcatgatggagcagtccaagaagtcctccctcatggtggcccgcagtatt

SEQ ID NO: 861070 - DNA, 100 bp, Homo sapiens
attatccttagcaaagtaacgcaggaacagaaaaccaaacaccacatgttgtctcttagaagtgggagctgaacgaacaagttgaaatcatcgcagaagg

SEQ ID NO: 861071 - DNA, 100 bp, Homo sapiens
ctgctatccccaacaagaggaaagacacacctaccaagaagccagtcaagcggccagatgtttgaacagaatcttcaagttgctgctcagataagtgaag

SEQ ID NO: 861072 - DNA, 98 bp, Homo sapiens
ctctacgaccggaaccacgtcacaggggcctcgtccagcagctcgtccagcacgaaggccacgctgtacccgccggcaactttgtccctaacaaaatg

SEQ ID NO: 861073 - DNA, 98 bp, Homo sapiens
agcgctgtatcgtgtcgccggcagggaggcatagcgcctctctgatcttcctgcatggctcaggtcactctgactgctgagacctcatgtagctacat

SEQ ID NO: 861074 - DNA, 98 bp, Homo sapiens
ttaaagaatgaaccttggtataaattcttttcggaattggagtttgggaaaccgtgtcagagccccaccaattacttgcagggattggatggaaaacc

SEQ ID NO: 861075 - DNA, 100 bp, Homo sapiens
gactggtgatctacgtgtgctttttcaagggagctgataaagaacttcttcccaaaatgggaagcagtcaattatagatttcttcaaaccagcttcaaaa

SEQ ID NO: 861076 - DNA, 99 bp, Homo sapiens
cctcatccagcaggcggtgacccgctaccggaaggccatcgccaaggggtgacagaggccgtggtcgtggtgggcgctttggttccagaggaggcccag

SEQ ID NO: 861077 - DNA, 100 bp, Homo sapiens
ccatacaccaggatccacccgatgaatgtgggaagactgagtctggctcttgctgattgaattcctttggtgcagtttagcatgttcctctgtgttctgc

SEQ ID NO: 861078 - DNA, 100 bp, Homo sapiens
ccgtcctgtgtatggtggtggcaggggccatcgctgccgtctttcacacactgatagtatttggaaaccatgttcacactactttttcagttactgcagc

SEQ ID NO: 861079 - DNA, 98 bp, Homo sapiens
tcagttttgattaccagccgaatcctgaagagacacatgctgcagttggagaagaaacttgaacgtgaacttgaggatgatgcacgagttattgcttg

SEQ ID NO: 861080 - DNA, 100 bp, Homo sapiens
ccgtgcggctgctggacgacagcgagtacacctgcaccatccagggcttcaagcagcaagctcttacagtatccacagatcctgagcatcgttttgagct

SEQ ID NO: 861081 - DNA, 98 bp, Homo sapiens
ttaacattagaaagacatcaactcactgaagtagttggtgcttcccgtgctgctgttgatgctggctttgttcccaatgacatgcaagttggacagac

SEQ ID NO: 861082 - DNA, 99 bp, Homo sapiens
agcatggccaacaacatcatcctctactgtgatactaactcggactctctgcagtcactgaaggccattgaacacccagttcgaaccaatcagattcca

SEQ ID NO: 861083 - DNA, 100 bp, Homo sapiens
cagttgttgaaattgtccccgcagttttcaatcatggctgaagccgacgtagcttctctgaacagacgcatccagctggttgaggaagagttggatcgtg

SEQ ID NO: 861084 - DNA, 100 bp, Homo sapiens
tgtacacagcaagacgttgagttacatgttcagaagtttgctggaacattatcagatggcttagggaagacgatggacaatcggcatcagtcagagcggg

SEQ ID NO: 861085 - DNA, 98 bp, Homo sapiens
tcgggatctcggtgctgcagacggcgagacctcctgcacagacgaatatgatgacaagcagccactgaccagcaaagaggaagaggagaggcgcattg

SEQ ID NO: 861086 - DNA, 99 bp, Homo sapiens
ctgcggagaattggagatggggaccgccctggacatcaagattaaaagagcgaataaagtttatcacgccgggttggatgaaaaatctgacaaacagta

SEQ ID NO: 861087 - DNA, 99 bp, Homo sapiens
ctgaattcactagagaatttgaatctgtccttgtggatgctttttctcatgttgccagaaatgcactcggtgatggaaagagagccactattctgaaga

SEQ ID NO: 861088 - DNA, 101 bp, Homo sapiens
gtcatcctgatcttcactgggatcagagatcggaagaattaaaaaatctggatccgtttttactgtttgatgaatttaaaggaggtagaccaggaggattt

SEQ ID NO: 861089 - DNA, 100 bp, Homo sapiens
agttactcaggcactttcttctcaatttcatatggcaacaaactattacctctctagtgacccttcagctgttaaccctggttggccatgacgatcagct

SEQ ID NO: 861090 - DNA, 100 bp, Homo sapiens
cgttgtgccagtgccccaagtgtgccccagctcagaagatgctctctgtgtgggtatgtgtgtagccatcctccttctttgaagtctcatatgtggaaac

SEQ ID NO: 861091 - DNA, 100 bp, Homo sapiens
ccctcaggggctctcagcaagtcagctcctgggtccttctggcacattcaggcagatcatgcataccaggttttcctttggaatatggataaatacacca

SEQ ID NO: 861092 - DNA, 119 bp, Homo sapiens
aagataaaaatttcagtgaagaagaaagtaaagttggaagttaagggagacaaagttgaaaacaaagtgctgtaggttgtgacagttggaagtgtcatgtacaacatgcggcgattaag

SEQ ID NO: 861093 - DNA, 100 bp, Homo sapiens
gctcatcccaacaataatctgattaataatgcagctgcaggctcacagatatgccctgcgtccaagcccaatatagcccttcccctccaggttccagtta

SEQ ID NO: 861094 - DNA, 100 bp, Homo sapiens
acgcagctgactttgtcttctccgcacgactgttacagaggtctccagagccttctctctcctgccctgtatgatgagattcgtcagtttcgcaaggcct

SEQ ID NO: 861095 - DNA, 98 bp, Homo sapiens
aaactttcagctttggctttgctctctcttctgccatctgataataggatgtcacatgtacttcagtttgaggataaaagcagaaaagtgaaagatgc

SEQ ID NO: 861096 - DNA, 100 bp, Homo sapiens
aatgtttcttaatttacttcctcattttggcagaggatgtcctccagttgttttctgggaatggcactcgaagactccagcttcctgaaaagaagtggca

SEQ ID NO: 861097 - DNA, 100 bp, Homo sapiens
cccagcagctggcagaagaagcaacacgcaaacgagagctgaggctaatgaaaaacaggtttctagagaggaaggatctccccagctgtcttcagcaagg

SEQ ID NO: 861098 - DNA, 98 bp, Homo sapiens
gggcgcctggggcactgaccactactgcctggagctgctgcggaaaggcagactacaagttactgagcacctccctgagaaaattgaaagtagtttac

SEQ ID NO: 861099 - DNA, 99 bp, Homo sapiens
cggacctgtttaagaggcagcaggcgatgccctccacaggtatggcaggccactgctgaagccaacaacttagcagctgcagcctctgccaaggacatt

SEQ ID NO: 861100 - DNA, 100 bp, Homo sapiens
ccctcttcacagacctctttgaaaagaaaggctacacctttgactatgcctatgattgggttgggagacctattgctgccttcgaccagcgcatgaagac

SEQ ID NO: 861101 - DNA, 100 bp, Homo sapiens
ccagtgaagaagccaaagaggagctggccaagaaatgcagcatcacagtgtcacagattgccccagtggaaaatgacaatagctacgatgaactgaaaag

SEQ ID NO: 861102 - DNA, 98 bp, Homo sapiens
ggggaccttaacaatccacctaagaaattcagagtgccggaactgtgattaccagcaggaggccgacaacagctgcatctatgtcaacaagatcacgc

SEQ ID NO: 861103 - DNA, 100 bp, Homo sapiens
tcagcgggctctgaacacagcatcaatggcaggaggtttcctgttgagtttgctggaacattatcagatggcttagggaagacgatggacaatcggcatc

SEQ ID NO: 861104 - DNA, 98 bp, Homo sapiens
cccttctggaactacaagcatatgctgatgttcaggcagtcttagcaaagtatgatgatgatggtggtgctaccccagtacaggatgaacgggattca

SEQ ID NO: 861105 - DNA, 100 bp, Homo sapiens
gaagagaaaaataggctgccagcaaacagtcttccgcaggaaggagatgtgtgtaacacagccagcctcgaagacttccctctgagttggaatgataatg

SEQ ID NO: 861106 - DNA, 60 bp, Homo sapiens
aaggagttctccagcatctccagggcagaaagcttagaaaggcagctggactctggcgcc

SEQ ID NO: 861107 - DNA, 100 bp, Homo sapiens
atgaacccaacaacagcctcgccagaaaaggcagacaccacccatcctttaaccaagcacagaaaaatagcctcttcttttcgcgattcatcattatttg

SEQ ID NO: 861108 - DNA, 100 bp, Homo sapiens
gcggcagatgagagcatccaacgaattcaattcgtcataatctgtccctacacagcaagttcattcgtgtgcagaatgaaggaactggaaaaagttcttg

SEQ ID NO: 861109 - DNA, 100 bp, Homo sapiens
cggcgattatggacccggccgaggcggtgctgcaagagaaggcactcaagtttatggtcccgacatctgtggccctggcaccaagaaggttcatgtcatc

SEQ ID NO: 861110 - DNA, 99 bp, Homo sapiens
gtaaaagttgtttctggaattgatctcgccaaaaaggacatctttggagccaggttaaacccatccagagtaatggctgcggccttacccaggaccctg

SEQ ID NO: 861111 - DNA, 100 bp, Homo sapiens
tttcttcgaattccttctcaccagaggtatttgtgctgcctgttgatgtagaaaagattctgacaatggagatattaattatgattatgttcatgaattg

SEQ ID NO: 861112 - DNA, 98 bp, Homo sapiens
gagatgtccggctgcagcagcaagtcccatcggaggacctccctgccctgtataccgagggaacagagaagctgatcgtcgaagggcatctaaccaaa

SEQ ID NO: 861113 - DNA, 99 bp, Homo sapiens
tgaccgagagcgcgaatatcgtcatcgttagaagatacgggaatatgaatggattcattcccaaaccaaaagattgaagttcaacgcacttataacaac

SEQ ID NO: 861114 - DNA, 100 bp, Homo sapiens
cttatgctttctaagaggtgtcccttcaaagatgtgagagagaaaagtgagtttattctgaagagcatccagatacagatccacgggttttagaaaaaca

SEQ ID NO: 861115 - DNA, 100 bp, Homo sapiens
taatgaggatgaagattcaccaaataagctatatactttggttacctatgtacctgttaccactttcaaaagctgctcccggcagatcggcttctccttt

SEQ ID NO: 861116 - DNA, 98 bp, Homo sapiens
atcgaccacctggccttgcgggcccggaactacgagtacctgatccgcctcttccaggagtgggagaaatacccgcagcccaaagggcagaagaagaa

SEQ ID NO: 861117 - DNA, 100 bp, Homo sapiens
tggcccccggtgcaagaggcgcaaacaagccaatcccaggaggaaaaacgatcataacagaatccatgccactgatgttttacatgctgtttggtatctt

SEQ ID NO: 861118 - DNA, 100 bp, Homo sapiens
gtcgagaagggcgactactacgaggcgcaccagatgtaccggaccctgttcttcagatcctgcaaaagttccaggtgcccacactggaaacttggagatc

SEQ ID NO: 861119 - DNA, 100 bp, Homo sapiens
gtgaatgctgctaaaaacaagactggggctgctcccatcattgatgtggtgcgatcggggtggcaaaatatgcctgacggatcatttcaaacctttgtgg

SEQ ID NO: 861120 - DNA, 99 bp, Homo sapiens
gaagtgacagcagatttgctggatacgtgacatcaattgctgcaactgaacttgaagattctgatcatcggatatcatggagtctggcaagacggcttc

SEQ ID NO: 861121 - DNA, 98 bp, Homo sapiens
catatcttcacttggcaaactcaacaaggtcttctttggcaatgtggattcatctgggataaaacacaatatttttaaccctccaattattgctcgat

SEQ ID NO: 861122 - DNA, 99 bp, Homo sapiens
ccagataagaaaaagcgcaaggcaaatacacagggtttatgttgctgaatctcttatttccagtgctggagaaggacttttttcaaaggtagctgtggg

SEQ ID NO: 861123 - DNA, 100 bp, Homo sapiens
aaccagccctgcaggtactttaggagaaaagccagtcaactcctagtaataacagcacccagtttcatgtatttgaatcgacaagacagctccctcgatt

SEQ ID NO: 861124 - DNA, 98 bp, Homo sapiens
catcccagaacccgaggtcagcacacagccacccccggaagaaccagagcctgtgtggtgcccctatctccttgttccaagggcctctcttgccttga

SEQ ID NO: 861125 - DNA, 98 bp, Homo sapiens
agaacttgcaagaagatgggcattaagacagttgccatccacagtgatgttgatgctagttctgaatatgatgaagaatgggctaagaaaattcagag

SEQ ID NO: 861126 - DNA, 99 bp, Homo sapiens
gtaaatgtaagcctattagagctacacagaagacctatttccggaacaattacaactatgttgaagactgggatagtttccaagctattttggatcata

SEQ ID NO: 861127 - DNA, 98 bp, Homo sapiens
actttggttacctatgtacctgttaccactttcaaaagccagaagcggactcctagaagaggggagcagcaaggatggaatgacagccgtgggccgga

SEQ ID NO: 861128 - DNA, 100 bp, Homo sapiens
ttcaaacttctgcagtctcagcttcaggtgaagaaggcagctctcactcaggcaaaggtccagcgtcggaagtggaagctgaacctgattgcagagttgg

SEQ ID NO: 861129 - DNA, 100 bp, Homo sapiens
ctgggctcccgagcctcgctggcggatgctctacctctgcacatcgcacccaggtggttcagctcgcatagtgcacctgttcttcccggagcctatcagc

SEQ ID NO: 861130 - DNA, 100 bp, Homo sapiens
ttctggatgtccttgagttcaaccaggtttcctatcctgggagcaggagagtgtgcctatttgaatgacaaaggtgccagtagtgccaggcactacacag

SEQ ID NO: 861131 - DNA, 100 bp, Homo sapiens
acagcggcgtttcacggtggcacatacatgggattgcttggcattttgtacagaaccagtttttgccagtttagccaatgttcttggtaactgggaaaat

SEQ ID NO: 861132 - DNA, 100 bp, Homo sapiens
cggccaccgcctcagcgggagaggagtctccaccaggactgaccgctgccgcccagcacgtccaggtactttagattgattgccgagcggggcagttttg

SEQ ID NO: 861133 - DNA, 100 bp, Homo sapiens
tctagcccagcaagcagctaagctaacctctgaccccactgatattcctgtggtgtgtctagaatcagataatgggctgcccaaggaagcctgcatggag

SEQ ID NO: 861134 - DNA, 98 bp, Homo sapiens
ctgcggcgagtatacatgcaaagcttccaatgagtatggcagtgtcagctgtacagccacactaactgtgacagggaatgctggcctgctggccttgg

SEQ ID NO: 861135 - DNA, 100 bp, Homo sapiens
tgtggcatgaggaagctgggggcatcttctccccaggggagcttttggaagagtcccagatggaagcgaccaggctccggcagaaggcagaggagctagt

SEQ ID NO: 861136 - DNA, 98 bp, Homo sapiens
gcaaacgagaattaaatgccgagaaggccagtacggacctgagagtcagtatactaagactgcccaggagattgtgaacgtctgttaccagacattga

SEQ ID NO: 861137 - DNA, 99 bp, Homo sapiens
ttcctccacgcaggggctccggaatcgcccgaccgcacacgttgccaccctgagtggagatggctatttcgaaaacagcccactgatgtcccagccagt

SEQ ID NO: 861138 - DNA, 100 bp, Homo sapiens
aaaaattttgaggacatctgcattagaagatatgagagtgattcagaccagaggtcttcagaactactagcagataatttggggggacttcatattcaga

SEQ ID NO: 861139 - DNA, 100 bp, Homo sapiens
aggatgatgttgacttggggatccaaaggcacaggttctggagatatatcttcagattctattgaccacagcccagccaaaaagagggtcagaacagtat

SEQ ID NO: 861140 - DNA, 100 bp, Homo sapiens
agtattttgcagagcatcccccaaagacagattgaagaaatgcagagacagaaccagcttcttgcaaaaggactgttctttgtggaggagaagatcaagc

SEQ ID NO: 861141 - DNA, 100 bp, Homo sapiens
taccatctaaaatacgaaggtttctggctggcctcggtgtctggatgcccagcctaaccaagtcagcttcccatctttggctgagacaaggagaaccctg

SEQ ID NO: 861142 - DNA, 100 bp, Homo sapiens
cgagcggggaatggtgaagccgatgatcagagtagaacagcagccagattatcgcaggcaagaaagcagagttttccgtctgatgaaggttggccatttg

SEQ ID NO: 861143 - DNA, 100 bp, Homo sapiens
ccacagccatgagccactcctcagttgttggtgtggagtggaagatgaggcggcaccttctaagcagagtatttatatacaaagagagactcaggtcagg

SEQ ID NO: 861144 - DNA, 98 bp, Homo sapiens
cccaccatggacagcttcgacttagccctgctccaggaatgggacctcgagtcactgtggcttgggcactgtttaaaggaaagttccgagaaggcatc

SEQ ID NO: 861145 - DNA, 50 bp, Homo sapiens
agaagctgctctctgagaaaaagctgagacgagttgtactgctgtcacag

SEQ ID NO: 861146 - DNA, 100 bp, Homo sapiens
gagaaaaagagacgtgaccggattaacgagtgcatcgcccagctgaaggatctcctacccgaacatctcaaacttacaaaatcttcccaaggctgcagac

SEQ ID NO: 861147 - DNA, 98 bp, Homo sapiens
gtgccgcgggtgggcaacgggaccctgtgccccaactctacttccctctgctccttcccaggcatttggctttatgtcccgagttgccctacaagcag

SEQ ID NO: 861148 - DNA, 100 bp, Homo sapiens
tgatatcctgacagagatacacttgtttgtgcatagaggacacaactcagatgggaagttcatcgcccgggcacagcggatagagtacgactgtgaacta

SEQ ID NO: 861149 - DNA, 99 bp, Homo sapiens
ggatccagctgttagtcgggtaggcatagtgaaagatgtcatgtatatctgcccatttatgggagcagtgagtggaaccctgacagtgacggactttaa

SEQ ID NO: 861150 - DNA, 99 bp, Homo sapiens
catttacaataagaagagaagatggacagtttcagtgcattacagatgcagacaatctctttgaacatgaattgggggctctcaatatggctgcattac

SEQ ID NO: 861151 - DNA, 98 bp, Homo sapiens
agaggttcagctgtcctaatcctcactgccgaaaggatttacttaaatccattgtttcaagaatgaaaaaggcagtagaagatgatgtttttattcct

SEQ ID NO: 861152 - DNA, 100 bp, Homo sapiens
aatgcctgtttattcaccatcaacaaagaagaccacacactgggaaacatcattaaatcacctaagtcagtgttagtctaccactgtacatctggtaacc

SEQ ID NO: 861153 - DNA, 100 bp, Homo sapiens
attatttcaagtggaatatgccattgaggctatcaaggatgtggacaacaaagtagagaggatttggggtgattgtacagtcaggaagaagtactctcat

SEQ ID NO: 861154 - DNA, 98 bp, Homo sapiens
ccttcgagcaggacgaggagatcctccgaggccgcctgctcttccggaggagggtctctccagttactccacaggatccgctgaacataggatgttgc

SEQ ID NO: 861155 - DNA, 99 bp, Homo sapiens
cgaagctggccaaagcctgcccagacggctcacctgtgcgggatggaacaaaaggtgaccattgtgaggtagatattttgttctaattttccagatgag

SEQ ID NO: 861156 - DNA, 100 bp, Homo sapiens
gactcgcctttgccctggcaaacactggaatcctactttttctaagttgattcaagtcagttgagacgccagttgtgtggaggaagtcaggccgccatag

SEQ ID NO: 861157 - DNA, 100 bp, Homo sapiens
aaaaactccaacagcttcatatggacagatggacttcaaatgctgtttgtattccagagactagagatagaatctcactatgttgaccaggctggtcttg

SEQ ID NO: 861158 - DNA, 98 bp, Homo sapiens
tgaatgtggtggaataagtgctagtatcggacatgatcctcatcttttatacactcttagtgctgtccagttctctgtggacattgactcggagctgg

SEQ ID NO: 861159 - DNA, 100 bp, Homo sapiens
cacgctgcggatgttactcaggccatgcactgttacttaaaggaacctaagacttcagtgaagttccttatgacttcccctgaaattgcttccttatcat

SEQ ID NO: 861160 - DNA, 100 bp, Homo sapiens
ttgatgattataccgtcagagtgattgatgtgtttgctatgccacagtcaggaacaccttatgattctgcagatgactggtctgagcatattagctcttc

SEQ ID NO: 861161 - DNA, 129 bp, Homo sapiens
gccgccccagcctggcgggagaaggaggaggagcagcaggcctccgggcccggcgccgccgcccgcaggttttgtgatgaaggaacctgtacagataaagccaatattctgtatgcctgggcgagaaat

SEQ ID NO: 861162 - DNA, 134 bp, Homo sapiens
cgacagtgactaccatgacgaaaacatgtactacagccagtcttctatgtttccacatcggtcagaaaaagatgtcacggtctagatcacattctcgatccagaggaaggcgatactctcgctcacgcagcagg

SEQ ID NO: 861163 - DNA, 100 bp, Homo sapiens
ttcttcccctaccgcctggtggggcttgccgtggacaggtgcagttcaggagcagatgagatccaagggaaaccgagataggccatggagcaattctagg

SEQ ID NO: 861164 - DNA, 98 bp, Homo sapiens
aagagactccaaggacaactgcaagggggaagtagagagataacaaaagctgctcagagtctcaatgaacttgaggatgaggaagatgaggaaatggt

SEQ ID NO: 861165 - DNA, 98 bp, Homo sapiens
ccccgtccgcgtgacgctcctgcctgcgcgcggccaagccatgctcggccccaggaaatggagttgttttttccttcaagtggaggttgtgggccggc

SEQ ID NO: 861166 - DNA, 100 bp, Homo sapiens
atgtggaggaaaacaacttcgagggcagaggaccgcctgactcacaatgacatcgtggctaccacctacctgagtatgtcgaaaatctctgcccctggag

SEQ ID NO: 861167 - DNA, 98 bp, Homo sapiens
gaataatcgagaatttatcacaatggttgtatacaagactgatgggaaaaaagtttattacccagtggaagaaacactggtttgtcctcgccgatcaa

SEQ ID NO: 861168 - DNA, 100 bp, Homo sapiens
ttgtaaatgtgagtggaagccatgaggccaaaggcagttgtattgtacaaggcgagtggataattccaacacaagactggcagtccaaattgaaagagat

SEQ ID NO: 861169 - DNA, 100 bp, Homo sapiens
gcaacagactttgtttcttggagtccacttccaattccaagtttgcccgaccatctgtaagtcacacggctgcaccgccgaaggcctctgttgccacagc

SEQ ID NO: 861170 - DNA, 98 bp, Homo sapiens
agttttgctcctggatgaatccaagttaacccttaccacccagcagcagggcatcaaggaaaagcaggtgatattctcagtggagaccaggacaagga

SEQ ID NO: 861171 - DNA, 98 bp, Homo sapiens
ggggggggtccgctgcccgagaatgggaattctcttcactagaatatggagactgttcaatcaccaggtttctgatgaagaattgaaaagaagagtag

SEQ ID NO: 861172 - DNA, 98 bp, Homo sapiens
gtggatcagttggtagaaataatcaaggaagaaggtagataatgactataatgcccttcgagaaagactcagcaccttgcctgataaattgtcttata

SEQ ID NO: 861173 - DNA, 99 bp, Homo sapiens
tggcacatagttgatgaccagtctttcccatatcagagcatcacttttcctgagttaagcaataaattaccaattggtgaagccaaaactttcaaagga

SEQ ID NO: 861174 - DNA, 100 bp, Homo sapiens
tcttatgctgggatgtgccttagaggattatggtacagggaaacccaaacatgagtggtttctccagaaagattccgaaggggacacaccttcacttatc

SEQ ID NO: 861175 - DNA, 100 bp, Homo sapiens
gatagatttaaagaatgaaccttggtataaattcttttcggaattggagtttgggaaaccgacctcccagtgccaagtgtataagcgtgtccagaattgg

SEQ ID NO: 861176 - DNA, 99 bp, Homo sapiens
cttgcgaggatgagagcgacgaagccaactgtccaggtgtggtgtcagcacagcggcaggtcaccgttcaggaaggacccttgtaccgcacggagggct

SEQ ID NO: 861177 - DNA, 100 bp, Homo sapiens
ggctgttcttgatccaaaggaaaagcagaaatacacagacatggccaaggaggatcagctcagctactatttaataaaacaaaatctgtagaattcacgt

SEQ ID NO: 861178 - DNA, 98 bp, Homo sapiens
atgaaaatcaagtagtgtttgccagagttgattgtgatcagcactgttgctgatcagctctgtgccaagtatagcaaggaatatggcaagctatgtag

SEQ ID NO: 861179 - DNA, 98 bp, Homo sapiens
ccattgaagcttgagagaaaagcccccaaaagcagctattcagcacctgttcttcccggagcctatcagcaaagccattcccaaggctatggctacat

SEQ ID NO: 861180 - DNA, 100 bp, Homo sapiens
ttaccttggagaggctgtgagccacaatgcatcgctggaagtagccagtgccagcgagatttcagattcctgtaaacctctaaagaaaaggagtcgcgcc

SEQ ID NO: 861181 - DNA, 98 bp, Homo sapiens
caacacagcgggcatcgacatcttttccaagttttctgcctacatcaaaaataccaagcagcagaacaatgctggaaaaatttgagggactgtttcgg

SEQ ID NO: 861182 - DNA, 100 bp, Homo sapiens
ggaggtgggcaaggtgatccagcaaggtcggcagagcaaggggcttacgcagaaggacctggccacgatgatgtctttctacctaaagatattgacctag

SEQ ID NO: 861183 - DNA, 98 bp, Homo sapiens
aagatttcgtaggagagaagttgggctctggtgaaccgtcacattcagttaaagttcacacagttcctaagccagggaaaagttaaccattggatgcc

SEQ ID NO: 861184 - DNA, 99 bp, Homo sapiens
gagaacagatgatccctacagcagatatgccaaagtcacccttcaaaagacgacggtatcatctttatcagaaagtgaggagtcccaggactcatccga

SEQ ID NO: 861185 - DNA, 98 bp, Homo sapiens
tcatgcagtggaatgcagttatatttggatagatggctccccaataccagaagtgagttcggcaaagagaaggccacggagaatgaccccattttgga

SEQ ID NO: 861186 - DNA, 113 bp, Homo sapiens
cagggcggacacggccaccgcctcagcgggagaggagtctccaccaggactgaccgctgccgcccagcacgtccagatataagagttcggaccgcccagcacacaaggtcagc

SEQ ID NO: 861187 - DNA, 100 bp, Homo sapiens
gatatcttcgccatcgccagcatcgccaacccggactggatcaacaccggggagtctgcggaggatcttcaaatgcttccttgaaagaagaagaatgtaa

SEQ ID NO: 861188 - DNA, 98 bp, Homo sapiens
ttatttcccaaaagaaggtcgtaaaattttgacaccaataattttcaaggaagaaaatcttaggcccctgcctgacttctcacgagtccctggtctga

SEQ ID NO: 861189 - DNA, 100 bp, Homo sapiens
tggtggcataggttatgaagctaatcctggcgttccaccagcaaccatgagtggttccatgatgggaagtgacatgtaccacaaagcctgctccacacct

SEQ ID NO: 861190 - DNA, 100 bp, Homo sapiens
gagcgtgaccgagagcgcgaatatcgtcatcgttagaagatgttcaggcggttgcttatgaggaaccaaaacactggtgctctattgtctactatgagct

SEQ ID NO: 861191 - DNA, 100 bp, Homo sapiens
ggccaacttccattgaacttcccagcactcgaaagggaccgaaatggagagcaaaggaatttagataatgggctgtgtgcaatgtaaggataaagaagca

SEQ ID NO: 861192 - DNA, 100 bp, Homo sapiens
catgtggaccggagaagttccgttaccaggatgatttcttgctagatgaaagtgttgccgaacaagcaaccggaaaagcttaataggcaatgggcagtca

SEQ ID NO: 861193 - DNA, 98 bp, Homo sapiens
ggactctgccgacaccggagagaggcagttgcagtggtgcagaatggctgacctcagtcttgcagatgcattaacagaaccatctccagacattgagg

SEQ ID NO: 861194 - DNA, 100 bp, Homo sapiens
ttcgagttacctcatgggatggcaggaaatggggagaactggagggggacacctatgaccggaaggattcatgaaccagcgtggagccagggtgtcttct

SEQ ID NO: 861195 - DNA, 100 bp, Homo sapiens
tgttccagcaacagcagcaactgccgcacccttgaaaggaggcccctgccgtgtggacccgtaaaataaaatggacccaacatgagtgaagtttcctgca

SEQ ID NO: 861196 - DNA, 98 bp, Homo sapiens
ttccatctaattatgacctccttcgccacttacagtatgcaacacattttcctatacctctgggacactggcccagggagagctgaatgagatgagga

SEQ ID NO: 861197 - DNA, 100 bp, Homo sapiens
aacagacaagacacttttcagaaagacagtatcaccttttgccatgatagcatttctttcattggacagttccttacaagggctccactcagtgtctgtc

SEQ ID NO: 861198 - DNA, 100 bp, Homo sapiens
ggatggtgctggccacttgcttgggatcctttatcctggtcatcttctatttccaaatgagtgtgtccgcttgaaaccaactgacatacagcccgacatc

SEQ ID NO: 861199 - DNA, 100 bp, Homo sapiens
gtggagaagacccccaatttgatcagttggacaactagtggtttgaagagccagggccgtctgtcagtaggaagtaatcgtgatcgagagatcagcatgt

SEQ ID NO: 861200 - DNA, 98 bp, Homo sapiens
agttcatcaaggagctcattaaggacggctctctgctcattggggcgttgaggaatgttctcagtgcagctgagtcttggtgagcagacatgggaatc

SEQ ID NO: 861201 - DNA, 100 bp, Homo sapiens
atatcagaagcagcccaagattggctaccacctgctctactacctgagggccagagccacccctgagtgacgacctgcagccttcctcagctgtgtccag

SEQ ID NO: 861202 - DNA, 100 bp, Homo sapiens
tccctctgacacatccaacttcgacgtggatgacgacgtgctgagaaacacggtgagtggtttaccgcccccggagctgacatggctactcaatggccaa

SEQ ID NO: 861203 - DNA, 98 bp, Homo sapiens
caaggaggccttccagctgtttgaccgaacaggtggctattatcatggaaaactaatttttcccagagaatttcctttcaaacctcccagtatctata

SEQ ID NO: 861204 - DNA, 98 bp, Homo sapiens
tgttttttcctgtatgaagcggttggcaccactgaagtgaccgaatgagttcacagacattgggaccttcgagacagtgtggcaagtcaagttctaca

SEQ ID NO: 861205 - DNA, 98 bp, Homo sapiens
cggggctccggggacggcgagatgggcaagcccaggaacgtggcgctcatcaccggtatcacaggccagagctggagataagatgggtagactgctac

SEQ ID NO: 861206 - DNA, 100 bp, Homo sapiens
ctctttctgggtgactatgtggacagaggctatttcagtatagagattgctctggaagcagccaaagcactggatgacaagaactgctgggaaaagctgg

SEQ ID NO: 861207 - DNA, 100 bp, Homo sapiens
accatctccatcacccaccaacaacaccacaataatccacagccaaggactccaagccccctgatccttgatcagaactacattaacaccaaaaatcaag

SEQ ID NO: 861208 - DNA, 99 bp, Homo sapiens
accgggcggccacgttcccgctgcaggtgcaatggatgagcttcatagtctggatccaagaaggcaagagttattggaagctagatttactggagttgc

SEQ ID NO: 861209 - DNA, 98 bp, Homo sapiens
gccaatgggcacagaagcaccaattctcccacaatagtttcacctgctattgtttcccccacccagtgtatgccaattaaaggcctaggattcgttct

SEQ ID NO: 861210 - DNA, 99 bp, Homo sapiens
agagcaacatgggagaaactgagaaaagaattgaaacccatagaataagatgtctttccaagttgaagatcctttgcacatggcctgctatcaacaatc

SEQ ID NO: 861211 - DNA, 100 bp, Homo sapiens
atctgctacaacatcacattttcatgcatcattttttcaaaatagggaaggaaaatcacctcggcagtgtttgaaggaaggatactgcaactctttgaag

SEQ ID NO: 861212 - DNA, 50 bp, Homo sapiens
atacagatctgggaccgaaatttgacttgggacacagcaggccaggaaag

SEQ ID NO: 861213 - DNA, 100 bp, Homo sapiens
gcaaatccccacaggagaaggaggaagtttaattagcattgacagcacctgtacagagatgggcaattttgacaatgctaatgtcactggagaaatagaa

SEQ ID NO: 861214 - DNA, 99 bp, Homo sapiens
atgaccgtgtgttagccatcaatggacatgatcttcgatatggcagcccagaaagtgcggctcatctgattcagttgcctttccccatcttcctggttc

SEQ ID NO: 861215 - DNA, 98 bp, Homo sapiens
cacaccaaggagatcgacctggtcaaccgcgaccctaaacacctcaacgatgacgtggtcaagacacttctgagaaattcatcaggctgtgaagcgcg

SEQ ID NO: 861216 - DNA, 121 bp, Homo sapiens
gtgaacctgtcagacaaatgaaagctctttatttcatcactccgacatcaaagatgtgtcttgctgaatcagggctctcttatccctgccatcgacttacagtgggaagaagatcttcacc

SEQ ID NO: 861217 - DNA, 99 bp, Homo sapiens
ctggacaagaagtcgtagggggtgagggtggaagctgggaaacccacaggaggcaaccacactagtttagctgttggagacacagttgcagaagatgaa

SEQ ID NO: 861218 - DNA, 123 bp, Homo sapiens
cagacaaattgaaggcctgaaattgcttcaaaaaaccagaaaacccaagcaagatgatgataagaggattgtggtatctgaacgggaactatttggttctgttggtgtcattggtggtcattc

SEQ ID NO: 861219 - DNA, 100 bp, Homo sapiens
tgaagttctaggcgtgcagagacatgcctcacccgaggatattaaaaaggcgtgctcctgacctctgataaagctgcagccaatttctcagatcgttctt

SEQ ID NO: 861220 - DNA, 99 bp, Homo sapiens
ctgcagaccaggaacaagagagaaagagtggatttcagcctgcacggatggtcttgaaacacaaatggtttttgggatcctgaaactccgccacatctg

SEQ ID NO: 861221 - DNA, 100 bp, Homo sapiens
tgctatgaaggctgtggaaaatagtaggtgacaactgttgatagatttcaaggtcaacagaatgactatattcttctttctctggtacgaaccagggcag

SEQ ID NO: 861222 - DNA, 99 bp, Homo sapiens
ggaggaggaccaggtggtggccgtgttcgtggtcaccttcgacccccgctcggcttccttcaaaatgtctactgttcacgaaatcctgtgcaagctcag

SEQ ID NO: 861223 - DNA, 100 bp, Homo sapiens
gggataccaggtcctccgggaataaaagattcaggggtcagtttacttcataaaaaatcattagaaaaggaagaattatgccaaagacttaaagaacagt

SEQ ID NO: 861224 - DNA, 100 bp, Homo sapiens
ttcaattcttatagccattcttatagttgtaaggtgagatgctgcagtgtgtgtcactttattcacttgaatcagaattcagctttgtatattgaatccc

SEQ ID NO: 861225 - DNA, 100 bp, Homo sapiens
gtcccggggagcccctaggcccgggtcccggatccccgcgcacccggccagggtctggccctcactgcaggacaggttcagctcactgaaaggggtccca

SEQ ID NO: 861226 - DNA, 98 bp, Homo sapiens
tcatgactactgaggattctgtggcagtgcccagtaactctcaggagccttctccgcagttggcttcctcggtagcttccacacggagcatgcccgag

SEQ ID NO: 861227 - DNA, 100 bp, Homo sapiens
atagctgaagaagaagaggaagtagccaaagagcaactaactgatgctgacaccaaagatgccagtatggacagaatagcttatgatgcttatccccacc

SEQ ID NO: 861228 - DNA, 100 bp, Homo sapiens
ttcactaaaaccatgtgtctgaactgaagaagcttgggctcacttccacaaattacttcctcctgtgctggttccaagacacagcgaatataatcctcag

SEQ ID NO: 861229 - DNA, 98 bp, Homo sapiens
gcccccctcccgcccggaaagctgcccagccaccagcaaccccccaggacactttcttcatgagcaacaaaccccaaagatacaaagacaagctacca

SEQ ID NO: 861230 - DNA, 101 bp, Homo sapiens
acaaatttatcattttccctggcaagtggattaaagtctggtatgatcgactgaccttgctggcattacttgatcggtttctaagcatgaattgaggaaca

SEQ ID NO: 861231 - DNA, 100 bp, Homo sapiens
gcggacagcgaggcgggcctcctggaggcagcacgggcgaccccccggcgcagcagcatcatcaaggaagcaaaatgtggattcagcaaacaaattctgg

SEQ ID NO: 861232 - DNA, 74 bp, Homo sapiens
tgtggggggattctcgacctgctaacagaactggaccttttcggaccttgctaagcagtactctgacagactag

SEQ ID NO: 861233 - DNA, 98 bp, Homo sapiens
atgatacctttgatccagaacttgcagcaacaataggtaatcacaagtgaagaagctgaaagacgaggacagttctatgacaacaagggaatcacgta

SEQ ID NO: 861234 - DNA, 98 bp, Homo sapiens
aaagatgaagatgaaaccaagcccttgaaaaaagcttggccagaccacaagcgggaatgcaaatgccttaaaagctgcaaacccagatatcctccaga

SEQ ID NO: 861235 - DNA, 98 bp, Homo sapiens
aaaatcggtgaagagaggttttgaattcacgcttatggtagtggtgtatgtggtagaagaccaaagaagagatgagctaggaccatccacctgcctca

SEQ ID NO: 861236 - DNA, 100 bp, Homo sapiens
tggaaaaacctcaaaatatgatggtggttggacagtcagcatttgcagactttgacaaagcacagttgcttctagaccaagaggctgaatcagcatccca

SEQ ID NO: 861237 - DNA, 100 bp, Homo sapiens
tccgctcccccgatcctattcccagtcgtatgaatatagcagcagtgaaactactggtgaaaagccagagcagaacgatgatgacaccataaaatctcag

SEQ ID NO: 861238 - DNA, 99 bp, Homo sapiens
tctgggaccgaaatttgactgccgaatacatcaagcaatggtaacatctttaaatgaagataatgaaagtgtaactgttgaatggatagaaaatggaga

SEQ ID NO: 861239 - DNA, 100 bp, Homo sapiens
agaaactttatgtgcctgtaaaagaatacccagatgacactcatgaggaccatgatacttccactgagaatacagacgagtccaaccatgaccctcagtt

SEQ ID NO: 861240 - DNA, 100 bp, Homo sapiens
acagaaaaacaaagaatatgtgagtattgccagtggaggatttatgggaaaactcaatgtgagtagtgacactgtccagcatggtgtggaaggattaacg

SEQ ID NO: 861241 - DNA, 107 bp, Homo sapiens
aacggggtctgcagcctggctgaggagctgcgccacatccactccaggcgggcagggctgggcagcggcctgagtctcagcggacttgtccacccggagttgagtcg

SEQ ID NO: 861242 - DNA, 100 bp, Homo sapiens
cccagccgatgggttgtccgactgggagcagaggaagccttgaggacctactcacagataggaattgaaggtgtggatgaggtcaccattgtcaacattt

SEQ ID NO: 861243 - DNA, 100 bp, Homo sapiens
gtgaggcgccgcccgggtgtccccgcggcgcaggaggcggtggagcgcagagcgggcgagcgcggtagctgtagccatacctaatagacctcctgatgct

SEQ ID NO: 861244 - DNA, 100 bp, Homo sapiens
acacctcaaactaacacagtccctatcaaacctttgatcagtactcctcctgtttcatcacagccaaagtggtatcctgaggtgcggcaccactgtccca

SEQ ID NO: 861245 - DNA, 99 bp, Homo sapiens
agaaacctgaagttagaaaggctcaacgagaacaagctatcagttaatccaggaagatattcttgatactggaaatgacaaaaatggaaaggaagaagt

SEQ ID NO: 861246 - DNA, 100 bp, Homo sapiens
aggtggatgccctgaatgatgagatcaacttcctcaggaccctcaatgagacgatattgtcagcatgtgctttgtgaaactgttcgaactgccaaactga

SEQ ID NO: 861247 - DNA, 99 bp, Homo sapiens
ggagaacacagcagagaccagccctcaggtcctccccagctccaagaggaggcgcgttgaaggcaagtatatcgcgtcaacacagcgacctgacgggac

SEQ ID NO: 861248 - DNA, 100 bp, Homo sapiens
cctaagaacatggcctacacgggcataccatgaagttccctacacaacgtcctttaccttggccaaacagttgtccttttataagatccgtaccattgcc

SEQ ID NO: 861249 - DNA, 99 bp, Homo sapiens
gggaccctgtcatcaaggttcctgatggtggacggtgacaaagtggccactggatcttacagcctgcttagacgcctggtgactctcatttcgcagcag

SEQ ID NO: 861250 - DNA, 99 bp, Homo sapiens
tggccgttgctgtggagacgcctggtactccaaagattcaggtttactcacgtcatccagcagagaatggaaagtcaaatttcctgaattgctatgtgt

SEQ ID NO: 861251 - DNA, 98 bp, Homo sapiens
tcatttgcaccagcttctttctccaggaaagatcaaaacgatgcactgcaagtaagtacaaggtggactgtgcatgcctcaaagaaaacccagagtgc

SEQ ID NO: 861252 - DNA, 98 bp, Homo sapiens
agggatgcacatcatcacaccatcagcttcagagaatggcagccatttatttgtcccgtgaaatggttcaccaaaccaccagccagagccaccccctc

SEQ ID NO: 861253 - DNA, 99 bp, Homo sapiens
gagagactcagctctgggatcctgggggcaattgggtttggccggaagtcgcctttgtctaacagttgaggagctcaagcttgggaaaatggtgtgcat

SEQ ID NO: 861254 - DNA, 98 bp, Homo sapiens
tgacatccgaggtgcctttctccaaaaggacagagcgggatgccaccagcttgtccaaagggaagttccaggagctcctggtgggcatcgttgtggag

SEQ ID NO: 861255 - DNA, 99 bp, Homo sapiens
ggacatctgctttatatttctctcagaccattcccatcagtgagcattacagagctggactggccattatggaggaggagctgcagcattcccattgtg

SEQ ID NO: 861256 - DNA, 100 bp, Homo sapiens
ggagctcctagagcaagaccagcagtgtggcaaaggagcagagaactttgacaagttcttcacacgaggacagcccgtcttaacaccacctgatcagctg

SEQ ID NO: 861257 - DNA, 98 bp, Homo sapiens
aacactttacacaaatacgggatacctatcggagcaaagcctaccagtgtgcagctggcaaaggagtggagccgccaccaaaatgcagattttcgtga

SEQ ID NO: 861258 - DNA, 99 bp, Homo sapiens
ttgttccctgacaactttgtaagaacctgaaggaaaagattatgcccttcattggctagtgctggggactcatacgtctgatgagcagaatcatctggt

SEQ ID NO: 861259 - DNA, 100 bp, Homo sapiens
atttaaccgctctctgcctcccaggtctcagccttagatccaaggacagtccaaggaagtcctaagaccatggagttggtgatctgggatctgggtttgc

SEQ ID NO: 861260 - DNA, 100 bp, Homo sapiens
caagacccagcgagtgcagcggcggccgccgaggaggtgctggagaatctggtaaaagcaccattgtgaagcagatgaggatcctgcatgttaatgggtt

SEQ ID NO: 861261 - DNA, 98 bp, Homo sapiens
agaagatcgccaagctgtacgagctgcacgtcttcaccttcggcagccggctgtacgcacacaccatcgcaggtcagaagccaatgacctggccctga

SEQ ID NO: 861262 - DNA, 100 bp, Homo sapiens
ccgcgaggtgtgcagagtgctgagaccgaggctggcggattgcaggaggaatcttggtccttatcatctgttccatcaatatgtactttgtagtggttta

SEQ ID NO: 861263 - DNA, 120 bp, Homo sapiens
cctggccatggaaatcgctgagaagcacctggatattcctaaaatgttggatgctgaaggtgccctcgctaaaatttcacctctttcatcgccctgctcctcacctctccaagggactcc

SEQ ID NO: 861264 - DNA, 100 bp, Homo sapiens
gaaacctcagcttgatgatgtatctcagctggagccgagatggtcataaactcgtgagtgcttccactgataacatagtgtcacagtgggatgttctttc

SEQ ID NO: 861265 - DNA, 98 bp, Homo sapiens
gccttctcccgcttctctcctcctcctctccacgctggggggatcctggagatgctaagatctcatccagtgagcatatgagaatcggggggagtgaa

SEQ ID NO: 861266 - DNA, 100 bp, Homo sapiens
cgccgaagcagcccgggactgcgcagcgccccgcgtgccggataattctggcctcatagaacaagttgggaagtgttccctcctcccctattttctgaaa

SEQ ID NO: 861267 - DNA, 101 bp, Homo sapiens
cgtcctgaccgggccctgggcggaagggatgtctgcgttttgcacactagggaccaagaagccctcggggacactgctgagaaaagactgccgaagggaag

SEQ ID NO: 861268 - DNA, 100 bp, Homo sapiens
ggttctttccctttaagatatgtgcaggatcaagttgcggcaccttttcagctgtttgctttcacaaccaaagttctgggccattcagacatcagccttg

SEQ ID NO: 861269 - DNA, 100 bp, Homo sapiens
ccgatcccggcctgagcaagcggccgcgcactgaggaggcggcggccgacggtggcggcgggatgcaggaatggaagttggatacactttgtgacttgta

SEQ ID NO: 861270 - DNA, 98 bp, Homo sapiens
aaggagctaaagcagcgtgcgttcagccctggggactttccgtgacatttctgaagatctgaaatcttcagtaggttgatgtggtttcctctgcagtg

SEQ ID NO: 861271 - DNA, 100 bp, Homo sapiens
tgggcctggtacaagatcactgactctgaggacaaggtgattctgaattgctgtgagggcagaacacccaaggagacaatagaaaatttgttgcacagaa

SEQ ID NO: 861272 - DNA, 98 bp, Homo sapiens
aataaagcaaagaaacaaaagacaactctgcttttccagaaactgtgccaggatcacggtggaatgaatcttacttgttgaatatcttctggttacta

SEQ ID NO: 861273 - DNA, 100 bp, Homo sapiens
caacgaccggggcgtcggcatgctcacccgcctctacaacatcaagaaggtaaagtcagtgataaatcttttgtttgctgcatatactggagatgtgtct

SEQ ID NO: 861274 - DNA, 100 bp, Homo sapiens
tgaccccatgagctgtcgctgcatctttctcatgaagcacggggaacgggtcggatggcctgatcttttggccagaaggagattaaaaagatgcccctca

SEQ ID NO: 861275 - DNA, 98 bp, Homo sapiens
gagtccctacctcgagttcccggggactgtccacctggggcgtctctggccgagcctctttttgtggaaaacgacagcagcagcagtggcctggaaga

SEQ ID NO: 861276 - DNA, 100 bp, Homo sapiens
tcaagattccaagacagaaccctgggattttctactacatatgtagagtgtgtcggtcagaaggaacacctgagaaaccgctttatcatccttgtgtatg

SEQ ID NO: 861277 - DNA, 100 bp, Homo sapiens
ccacagtgtgatcccagctttaaaggagatgcaggagaaaatacggcattgctagactcaagaatgaacaatccgtcagaaaccagtaaaccatctatgg

SEQ ID NO: 861278 - DNA, 99 bp, Homo sapiens
ggggctggacgcagcaagcggggcgctgtgtccccaagctccccgtcctcgggtgaagctcgtgtgtggagtgccacggtacaatcagacgacagatgg

SEQ ID NO: 861279 - DNA, 99 bp, Homo sapiens
ggtctgactatttctgaacaacaagcagagttgattcttcaaagaaatgttgctgaagtgctgctgaaagggccagagatgcaaggatttgggatacat

SEQ ID NO: 861280 - DNA, 98 bp, Homo sapiens
gtcacaaacaagaggtccctggatctacagaatggtgaggttctggagaattgatgaggattatccagtgcaagttgcacctttgagcaatggtcttt

SEQ ID NO: 861281 - DNA, 100 bp, Homo sapiens
gagcaaagctacttccattccagaaagatggcatcatttttgccctcaaaagaaatggcagatgtctctgcccacccacgcaacccagactatgaagagt

SEQ ID NO: 861282 - DNA, 100 bp, Homo sapiens
tccactctatggccttggagaactgccccaaggatttgcaagtacaaaactttttaccaacaaaaaaaagcaagtagttatactcaggaagaacttcaag

SEQ ID NO: 861283 - DNA, 100 bp, Homo sapiens
ctcagggtgtttgctggagtaccagtacatagaagtggctcatagttccctccagattgtcctcgcatgggtaattccagaattgattggccataccatt

SEQ ID NO: 861284 - DNA, 100 bp, Homo sapiens
caaatgagcgagaggaacatttggctaaaatatttgcctaaatgcgatggccaggtattactgacacaagtgtggaagcgtttaaacctggtagaatgtg

SEQ ID NO: 861285 - DNA, 100 bp, Homo sapiens
ctccccagtggtggtgttcagatttttccaggaattaccaggctcaggcttgggaacaatgggccgaggcattgtcatttcttttgcaagggccaggatt

SEQ ID NO: 861286 - DNA, 98 bp, Homo sapiens
caaatgtttccttaaagtgcctcgatctaaggatgaccctggaaagtcaagtccatcatctccagaaccagctagtcttcctgcagaagatattagtg

SEQ ID NO: 861287 - DNA, 100 bp, Homo sapiens
tcctggtgccactcccaaaaaactatcaagttgggatcaggcagaggatttgaagccacagacatttagaaatgcttatgacataccaagacgaaatctt

SEQ ID NO: 861288 - DNA, 99 bp, Homo sapiens
tgggaccagaagtttacactggaactggacagggtgaccgggttattgatgtgggatctgaatggcgaactttcagcaatgacaaagcaacaaaagatc

SEQ ID NO: 861289 - DNA, 98 bp, Homo sapiens
gaagcttactttgctgacctgataatgaagaattattttgcaccactggatgttgtttactgctatgtgatgatgatgccatttaaacgacaggctct

SEQ ID NO: 861290 - DNA, 100 bp, Homo sapiens
tctgatctacgaaagtcatgttacccaacaccgggctgaagtggaggcacagctggcccgacagaaggaggaggaatcccaacagcaagcagttctggag

SEQ ID NO: 861291 - DNA, 99 bp, Homo sapiens
acttgggctgagtaccgcggcgggcgcgagcgaggcgccctagacatcttctccctcccttgcctcagaaatctcctgcaaagaagctgagccatgcaa

SEQ ID NO: 861292 - DNA, 98 bp, Homo sapiens
ttttatgaaacattaccagtggcaattaatggaaatggacccaccaagtggtcatatgcattagaaaaacccaacactggcagcatatttaatattgc

SEQ ID NO: 861293 - DNA, 98 bp, Homo sapiens
agatgcagagccccagctcctgtctggtctgtgagatgtcctcactgtttcaggagataacgaaggaggcccaacttcattcaataaggagcctgacg

SEQ ID NO: 861294 - DNA, 100 bp, Homo sapiens
cttcctgcccgatcagatgcagccgcaagtcccgccgctccattaccaaggtgccacgtgtgccaacgcatacacttgccatggttgtacctccccagga

SEQ ID NO: 861295 - DNA, 100 bp, Homo sapiens
ggaaggattcctgagattccaggaggaagtactggcgaagtgctccatggtggagctgatcagaataatgttcagcatcaaccccctggagaacctgaag

SEQ ID NO: 861296 - DNA, 100 bp, Homo sapiens
gcagtgaagtggacatgttgaaaattaggtctgaattcaagagaaagtacggcaagtccctgtactattatatccagcaacatggccaatctttcctaag

SEQ ID NO: 861297 - DNA, 101 bp, Homo sapiens
caaccacaaggcagacatcagctcctggttcaacgaggccattgacttcatagggctgggtataagtaagcaagaagagggcctgggagaagagtctgacg

SEQ ID NO: 861298 - DNA, 100 bp, Homo sapiens
ggaacacagcagagggtgtgtaataaaatacaggacccagatgatgtggtaccagttggccaaagaagagcctggtgttggtgcatgtgctttggactag

SEQ ID NO: 861299 - DNA, 100 bp, Homo sapiens
tttcatccattatgctggctgttatgtacgcaggagcaaaaaatcgtggaattgccattccagtggatttggacagccaagttaatactcttttcatgaa

SEQ ID NO: 861300 - DNA, 98 bp, Homo sapiens
cccttctgtcagcaggacaatttccctgaactaagcgagataaagcatatgatggctttcattgaacaagaagccaatgagaaagcagaagaaataga

SEQ ID NO: 861301 - DNA, 100 bp, Homo sapiens
cagattttggtttaatatctgattgggacaacattcagacccatttccagtcatgaccagagactgctgctactttgaaacgtacgatagaggccctgat

SEQ ID NO: 861302 - DNA, 137 bp, Homo sapiens
tggattatttcagtggaactggcaatcggcccagaagaaggaatcagttacctaacggacaagggctgcaatgttctgaagaaagtctccaaatacattcaagagcagaatgagaagatctatgctccacaaggcct

SEQ ID NO: 861303 - DNA, 98 bp, Homo sapiens
ggggtccgcaaggccggagaaggccgccgggcccgggcatggtggtctggggcaacgcggaagtatgacttctctttggaaaagaaaaccattgagtg

SEQ ID NO: 861304 - DNA, 98 bp, Homo sapiens
accttcgcctcaagcaacagagtgagctccagagtcagtctattatgtcctataacggaggggccgtcatggccatgaaggggaagaactgtgtggcc

SEQ ID NO: 861305 - DNA, 98 bp, Homo sapiens
ctcctctctgttagttttgaggacactgaagccacccaggtgtaccccaagctgtacttgtcacctcgaattgagcacaggagcgagaacccgagcag

SEQ ID NO: 861306 - DNA, 100 bp, Homo sapiens
ttatgctgatatacatccaatgaggcaaaacttagagagtaacctcaccaaccttattaagaggaacacagaactggagacccttttggctaaactcatc

SEQ ID NO: 861307 - DNA, 100 bp, Homo sapiens
aaactgccaactgaacttcatcgctcctgacaagcatgaggggagactatttacgatgctgcaagatctgttatccgctctgtggttttgtcatccttgc

SEQ ID NO: 861308 - DNA, 100 bp, Homo sapiens
agtaaggcaggctagtggatcagccagacagacctcaaaggaagaccttctgcaggctgattttgaaggtgctttaaagttctttagagttcagcttcca

SEQ ID NO: 861309 - DNA, 115 bp, Homo sapiens
agtaacaggagcaaatactgggaaaatatttgccatgaaggtgcttaaaaagaattagactttcttgtacctaaggctggattcttctgtccaatttgttccctcttctactcag

SEQ ID NO: 861310 - DNA, 99 bp, Homo sapiens
attcatcaatcaggacaacaatacattaaaggctgataataacacagttattaatggactgcttggaaatataggtcgggtcacaaatcttcgaagagt

SEQ ID NO: 861311 - DNA, 98 bp, Homo sapiens
aacactgaatcaacatgggcaatgagaacagcacctcggacaaccaggcctgtggaaatcgaatcaagggtttctggagtggagtgattccagctgct

SEQ ID NO: 861312 - DNA, 100 bp, Homo sapiens
ctccctctggatgtggaattctccgtccctttccagggagggaacaaagcccacagcaccggcttcatatggggagaaattaaacagatgtgggatggcg

SEQ ID NO: 861313 - DNA, 100 bp, Homo sapiens
gctgcttcaggcaattcagagcttcgagaagaaagtgcgagtgatctatacgcagctcagaaaagcagcatctgttatagcaaaatacccacacaaaata

SEQ ID NO: 861314 - DNA, 106 bp, Homo sapiens
ggtgcgcaacagtgagaccagcaagaatgacttctccctctccctcaagttatggctttcaaatcacagcctatttcctcaagagagggatacgccttcgctgcat

SEQ ID NO: 861315 - DNA, 99 bp, Homo sapiens
tggatattgagccggatagacctattggatatggagcctttggtgttgtctgtgttcctttctgccgaaattctccattcatatagaaaccaagtatga

SEQ ID NO: 861316 - DNA, 100 bp, Homo sapiens
gaccatgatcctgtggataaaatcgtatacctagaggatcaagacataatgggagcatttttagacaagccaaagatggaaaagcataatgcccaggggc

SEQ ID NO: 861317 - DNA, 98 bp, Homo sapiens
gtggcttttgaggaagatgtgacaactaccggaggccttcactatcatggaccagaacagggatggcttcattgacaagaacgatctgagagacacct

SEQ ID NO: 861318 - DNA, 100 bp, Homo sapiens
gtcccacaggtatgggctctacgtgtgcttcttgggcgtcgttgtcaccatcgtctccgccttccagttcggagagacctacctggtggttctgtgcctt

SEQ ID NO: 861319 - DNA, 100 bp, Homo sapiens
ttgataagatggaggtgtgggcggttggagacccctcagaggagcagttgattggctcacagtggttgattgatcaaccccattggacgttggttctgtg

SEQ ID NO: 861320 - DNA, 98 bp, Homo sapiens
cccttgtggataagcacaaagtcaagagacagcgattggacagaatttgtgaaggtattgttgcagcatctggcagtgagactgaggatgaggacagc

SEQ ID NO: 861321 - DNA, 100 bp, Homo sapiens
ctgaataagacagttgctgcccagaagatgttcatactttggtagaaatggtagactttgtgtggaactttatattgctgttggaatatctggagccatc

SEQ ID NO: 861322 - DNA, 100 bp, Homo sapiens
ctttggaagatgcagatgagaaggttcagttggcaaaccagatatatgacttgcatgacgacagagatgatggtgtggattattgggccaaaagaggaag

SEQ ID NO: 861323 - DNA, 100 bp, Homo sapiens
cgccatcttcgaacttagacttccggaaggactttggcgaggatgtcatctgggtgattctcagtgtggaggtgggtggacttttaggagtaacgcagca

SEQ ID NO: 861324 - DNA, 99 bp, Homo sapiens
cgtcatcgagtgtgacgtggtgaaagtttatgcaactactgctgccaaccccagagagtcgtcctacgcctgttactatgatgagaagaggtccacgta

SEQ ID NO: 861325 - DNA, 100 bp, Homo sapiens
ttcaactttggaaacctccatatacagatgaaaataaaaaagttggtttggcattaaaggatgaatattctatctttcctcagacatactccatagatat

SEQ ID NO: 861326 - DNA, 100 bp, Homo sapiens
cccaggcttctgcgcagaatgcttctcagcagcaacatccccaaacagcggcgtttcacggtggcacatacatgaatggacagcaaattatggatgaacc

SEQ ID NO: 861327 - DNA, 98 bp, Homo sapiens
cagaactgcctgattacaggagctttaacaggactactgttcgaagatttttggaagaatactgagaacggcataaagtgaagatcgacatttaaaaa

SEQ ID NO: 861328 - DNA, 100 bp, Homo sapiens
cccggaggcgcgcgcgaccggcggctctttggcgcggattagggggtctcggcgaggtcacagtaatgaaaggcagtaatagaaataaggatcattcagc

SEQ ID NO: 861329 - DNA, 100 bp, Homo sapiens
ctcttcgccttgccctcttttattaaggagcctcaaacaaagccttccaggaagaggagcaggacttggatggtgagaaggggccatcatcggaagggcc

SEQ ID NO: 861330 - DNA, 100 bp, Homo sapiens
ttcaagcctgaaggaaaggcagaactgcctgattacaggagctttaacagatatgaagagcattttaagaggtgcagcctctggaagtggatcaaactag

SEQ ID NO: 861331 - DNA, 100 bp, Homo sapiens
ttaaagataccagatcatgtcagagagagagcttggttaacttgggagaaagtttcatctgtggatggagtattgccatcctccgttacctgaagaacga

SEQ ID NO: 861332 - DNA, 100 bp, Homo sapiens
ctggccgtggctctcttggcagccttcctgatttctgcagctctgtgtgaagatttaatccagagactgacttcactatagaacccacagttgtatcaat

SEQ ID NO: 861333 - DNA, 100 bp, Homo sapiens
attgactatgctgaattggtgtttatgatgaacaagagaactgggcaacccatgatccacatctacctggacaaggaaacaggaaagcccaaaggcgatg

SEQ ID NO: 861334 - DNA, 100 bp, Homo sapiens
atatgctgccatctcctatgaagaatggaatgaccctcctgctgtgacacctctcattgaacctcacgttcctcttcgtcctgctaacaccattaccaag

SEQ ID NO: 861335 - DNA, 100 bp, Homo sapiens
gagcaactagcaggtgtctcagcagagcaagaagttacatgtatcgatggaggcaagaccctccccaaacaggtttcagaggagcgtgctcgacctttct

SEQ ID NO: 861336 - DNA, 98 bp, Homo sapiens
tgcttccaaggcctcaccttctgtctccacagcaggacagccgaactggaatctggatgagcagctcaagcagaattcaaagaagctttttcactatt

SEQ ID NO: 861337 - DNA, 100 bp, Homo sapiens
ctcgccacagcggcctcggcctccccttggattcagacgccgattcgcccagtttaaaaggatgcttaatcgggagctcacccatctctctgaaatgagt

SEQ ID NO: 861338 - DNA, 75 bp, Homo sapiens
agggagctttggagactgggcatccactatgccgccagatcccacccttggacccccatgaaaatggaaacaatg

SEQ ID NO: 861339 - DNA, 100 bp, Homo sapiens
caatgatcctgccaagaatcctccaggacactggggttgggaaatcaagcatcgtgtgtcgatttgtccaggatcactttgaccacaacatcagccctac

SEQ ID NO: 861340 - DNA, 101 bp, Homo sapiens
caacatcatgacattgctgttccagtgcatgcagtggaggaaggccctgtcttcgccatgtgcatggcgggtgctcatgaccaggcgacgatggctaagtg

SEQ ID NO: 861341 - DNA, 100 bp, Homo sapiens
accctacgcgagatgttcaccatccatgcctacgtgggcttcaccatggacaagctggtgcagaacattgcgcggcagatgtaaacaggttacccagctg

SEQ ID NO: 861342 - DNA, 100 bp, Homo sapiens
aatcaaaagaaaatctctaaatgcagattccagaaaaattacagcacatctcagtgaatttgcaagtgtgatatctctgagtctctgcttgataagtgcc

SEQ ID NO: 861343 - DNA, 110 bp, Homo sapiens
ggttcttttgacctgagggctgctattgtatatcacactaaaggtttcaaccgcagcggaggtggtggctatagccagaaccgctggggtaacaacaaccgggataacaa

SEQ ID NO: 861344 - DNA, 100 bp, Homo sapiens
cagaggctgaagttaaagagacagcaatgattgcgttgacactggaacaaaaggaactttgccgttgtagacggaagttattaacctacttagatcgact

SEQ ID NO: 861345 - DNA, 100 bp, Homo sapiens
ctgccatggcctgtgccttggatggaggtgacacgagcagtgatgaggataaagaagaacatgaaactcctgtggaagtagaactcatgactcaggttga

SEQ ID NO: 861346 - DNA, 98 bp, Homo sapiens
tctttggcacatcaatttgtggaaggcgagttctcggaaggctacgatcctacagtggagaatagatcaagtcttccataccagggaccaggccaaaa

SEQ ID NO: 861347 - DNA, 100 bp, Homo sapiens
cccaaattatagagctaattacaactttcggggcatgtacaatcagaggatttatgaccagaggaaaattgatgagaatgagaacaatggagtactcaag

SEQ ID NO: 861348 - DNA, 100 bp, Homo sapiens
tattaccagaccaactacctggtggtggctgccatgatgatttccattgtgggcttttctgggagaagaggctacaaggacttagtgcatcagatgtaac

SEQ ID NO: 861349 - DNA, 98 bp, Homo sapiens
tgaccagggaagatatgaatgtgtggctcggaattcttttggccttgctgtgaccaacatgtttcttacagtcacggcagcacaagccagcgaggagg

SEQ ID NO: 861350 - DNA, 100 bp, Homo sapiens
gatgagatttatgactgcaaggtggagcactggggcctggaccagcctcttctgaaacactggggaggagatgttaaagtaacccatcttgcaggacgac

SEQ ID NO: 861351 - DNA, 100 bp, Homo sapiens
tcaacatgccatgttaggacattatgtaaattgtgaggattcttatgtggctagtttgcaggagtacgagacccaatctagtgcagaagccaaatttgtg

SEQ ID NO: 861352 - DNA, 100 bp, Homo sapiens
gctcatgattttctctctgctgtttgtggcttgccaaggagctccagaaacagctgccactggtgacatgccaacttaccagatccgagctcctactgct

SEQ ID NO: 861353 - DNA, 99 bp, Homo sapiens
tgaaaatggggcggaagaaaatacaaatcacacgcataatggatgaaaggaaccgacagtctcttgcatggcaccaagaatgttaccaattcaagcagt

SEQ ID NO: 861354 - DNA, 100 bp, Homo sapiens
acttcagaaggccagggaggacatctttatggagaccctgaaagacatcgtggagtattacaacgacagtaacgacgaagggaacgtcatcgtttggaaa

SEQ ID NO: 861355 - DNA, 99 bp, Homo sapiens
cgtcggcagcaagaacagagagagaggtggacagatctgagagatactgaggtggaagtttagctgatgctataagtgaaaactacagaatcatgagtt

SEQ ID NO: 861356 - DNA, 100 bp, Homo sapiens
ctccgaggccaggaacgctccgtctggaacggcgcaggtgccgctacctggctgttcagctgtctcctgccatccctgtatttgctgccatgctcttcct

SEQ ID NO: 861357 - DNA, 100 bp, Homo sapiens
gtgtctggagcatttcagataaatacctttgatctaagggttcagcctttcaatgtgacacaaggaaagtattctacagactacaaggcttttgaagaag

SEQ ID NO: 861358 - DNA, 100 bp, Homo sapiens
cctgagacagcagcctgccactcggacacagcagtctaacatctgggtgaatatggaaaactatgtgcaagctgtggaggagttccagtcctgccttaac

SEQ ID NO: 861359 - DNA, 100 bp, Homo sapiens
ctcccgagacatcttccctgtgggctggtgttccttgactggagacaacctgcagcctcctggcaccaaaggtaagaatgattgatgttggctgatattg

SEQ ID NO: 861360 - DNA, 98 bp, Homo sapiens
tggctccccatactagtcgccgggcatccgcttcgatcctgaaattccgcaaacactacgactagagtttgctaaggcaaacacgaagatggccaaga

SEQ ID NO: 861361 - DNA, 100 bp, Homo sapiens
cttggctgagggacatgaagtgacagcagcctgtttaggaccacaccacattttggacctcttgctgtgcagttcagtccaaggccattggtttgctaga

SEQ ID NO: 861362 - DNA, 100 bp, Homo sapiens
tggctcatattctacttcattcagaagatcaggtacacaaatgcacgcgacaggaaccagggtatttgaagtataccatacaactgttttgaaaatccag

SEQ ID NO: 861363 - DNA, 98 bp, Homo sapiens
tcgatgaagaggatgatgtttttggtgaagtactatactggcaattgctggagaagattttgcaattgttgcttctgatactcgattgagtgaagggt

SEQ ID NO: 861364 - DNA, 98 bp, Homo sapiens
cgaagtgcgcaaacttgacactcaccctgaccgttgctgattgttggaggttcttttggtcttcgtgagttttctcaaatccgatatgatgctgtgaa

SEQ ID NO: 861365 - DNA, 98 bp, Homo sapiens
tggcagtctggagtgaagatggacagcaccttttgatgtcccagcagaccctgaggaatgtgccaccgatagtgtttgttcaagacaagggaaatgca

SEQ ID NO: 861366 - DNA, 100 bp, Homo sapiens
ggctgcggtccagaacccggccctcaccgccctcaccacccctatccagacggctgcccttcaagtaccaaattcctagaggacctgtgcaacaacctct

SEQ ID NO: 861367 - DNA, 100 bp, Homo sapiens
gtgttggagaggctggagacactgtacagtttgcagaatatattcagaaaaacgtgcaactttataagatgcgaaatgatgctgagagtgtaaatctaga

SEQ ID NO: 861368 - DNA, 98 bp, Homo sapiens
tcgtcataccgggcttccttgccctgtccgggcttttctgggagaagaggctacaaggacttagtgcatcagatgtaacagaacaaattataaaaacc

SEQ ID NO: 861369 - DNA, 100 bp, Homo sapiens
ccagggctcatcgccacggccaagcatactccggaagaaacctgccacagatgggaacagcttgagaactatgacttcaccaaattccactcgctgaagc

SEQ ID NO: 861370 - DNA, 100 bp, Homo sapiens
gccggccgctagcgtcagcgccagccaggccacggaaaggtatgatatatttgatccaagacagtccattccagtccgggaatctacagtggtgacaagg

SEQ ID NO: 861371 - DNA, 100 bp, Homo sapiens
agtggaaacaacaattatgaaacaacctggcccatgagatgatagctgtggaagcaggtgcagggtgcccagaagcagttcaagaactttcagatcgagg

SEQ ID NO: 861372 - DNA, 100 bp, Homo sapiens
gaaagacaaggaaaaggcctgctctgagatggaggtgctcaacagacagcctgggttactaggtgtctttcagaagctgattgcatccaaagcaaatgac

SEQ ID NO: 861373 - DNA, 100 bp, Homo sapiens
cctcatccgctgggactcctacgacaacttcagtgggcatcgagatgacggcatggaggtggcccggtaccatgtgactgtgtgcacaggtgaacttgaa

SEQ ID NO: 861374 - DNA, 100 bp, Homo sapiens
gacacagttgctgatatagaaagtgaaccagtggtagaaagcacagaaactgaggggacataatcatcactcagtaggtttccacttgagcggcacagtg

SEQ ID NO: 861375 - DNA, 100 bp, Homo sapiens
atgacgactatgttgagcttgcattcaatgcacggaaattggatgacaaggttgcacgttttcaaaaaatacctaatggtgaaaatgagacaatgattcc

SEQ ID NO: 861376 - DNA, 100 bp, Homo sapiens
aacgaccgtggccacagtaccacaaagtctctggctgaagccgacgtagcttctctgaacagacgcatccagctggttgaggaagagttggatcgtgccc

SEQ ID NO: 861377 - DNA, 100 bp, Homo sapiens
ctggtacatcagcaagaaccccaaggacaagaggcatgtctggttcggcgagagcatgaccgatggattccagtttaagggcatgtgctacttcaccaac

SEQ ID NO: 861378 - DNA, 98 bp, Homo sapiens
gaagattaaaaagtatggagctgctatggtggtcatggcttttgatgaagaaggacaggtagtaaacctattgatggcaattttgctgactgtggaag

SEQ ID NO: 861379 - DNA, 100 bp, Homo sapiens
tgtgcggtgctgctcagtgcagttcaggagccaggtgagaatttcaaggattatcgacttcatattgcacattaaagttacaaattaaagtggcttggtc

SEQ ID NO: 861380 - DNA, 100 bp, Homo sapiens
agcgacagaaaacttggaactaagctggaggacaccgagtactcttatgcagtccccatgaatgatatggaacctagcaaagctgttccactgaatgcat

SEQ ID NO: 861381 - DNA, 100 bp, Homo sapiens
ttctcctgataatgtaaattgccgcgatacccaaggcagacattcaacacctttacatttagcaggacgactgggtttggattcagaagaggattattat

SEQ ID NO: 861382 - DNA, 98 bp, Homo sapiens
cataggcagtggtaatactggaacaacctcttctccaagattctcaggcaatcaaaggaattgaatgatctggcacgggaccctccagcacagtgttc

SEQ ID NO: 861383 - DNA, 100 bp, Homo sapiens
acgagaaccagagcttgaagatttgactagatacgatgttgggcgccaatgcttcggcattagagaaagagattggtccagaacagtttccggtcaatga

SEQ ID NO: 861384 - DNA, 100 bp, Homo sapiens
atctggattgtagccataagtggactttgccatttttgtgacaaggcctttatgaaccaagcttttctacaaagtcacattcaacgccgccacactgaag

SEQ ID NO: 861385 - DNA, 100 bp, Homo sapiens
ctttgaccttctgccatgattgtgaggcctccccagccacgtgaaactccaaactggcaagacgcagtcaagaacgggacaatcttggcatgttggtctg

SEQ ID NO: 861386 - DNA, 133 bp, Homo sapiens
gtgattatgtcagccaaagctactcctactcatctattttgaataaatcagaaactgctattactactgaactatttcacaaacccattttgaaagtcaaaaaccgagcactgagtctttctctgtaatccag

SEQ ID NO: 861387 - DNA, 50 bp, Homo sapiens
ctagaccttgccaagatggcacaggtatccgcccccagatcatgaacggc

SEQ ID NO: 861388 - DNA, 99 bp, Homo sapiens
ttaaggagcctcaaacaaagccttccagctgctcagatggaagataaaaagccctttatcctgtcttccatgaggcttcctctcctggacaccaacagc

SEQ ID NO: 861389 - DNA, 98 bp, Homo sapiens
ctggcgcgagagggcatcgtggccccactgcctggagagtggaaaccatggtgacgggggaagtgacagatccatcaggaaaagtccactttgctctt

SEQ ID NO: 861390 - DNA, 98 bp, Homo sapiens
gcgaggacgagatccagtttctgaggactgtggcacaagatctctgtaaagtagcaggcatagcaaaagttctggtggctcagcatgatgtgtacaaa

SEQ ID NO: 861391 - DNA, 100 bp, Homo sapiens
ctacatcccacagagatacccagacaacaggatcgtctcgtccaaggtcacccaacctgcctgcagtttaccctgaacatgaccgaggctgtcaagacct

SEQ ID NO: 861392 - DNA, 99 bp, Homo sapiens
aactgtccgcctcagcccagagcgcccatcagatgaggactccaagagcacagagtccatcttcctgacccaggttgcagatgaatacatgttttccct

SEQ ID NO: 861393 - DNA, 99 bp, Homo sapiens
ttcaactcttttctctcgggcttcatctcttgtgtggggagtttcatcctagcggttccgccatggagtcatagttgcagctgactccagggctacagc

SEQ ID NO: 861394 - DNA, 100 bp, Homo sapiens
agcaaatgacagaaatgagcatttcaagagaggacaaaataactaccccgaaaacagaggtgtcagagccaggaaactcttatcactactattgattcta

SEQ ID NO: 861395 - DNA, 99 bp, Homo sapiens
tcaccctcggggagcaacatgggtaaagtaccttttattcatgtgggaaatcaagtagtatcagaacttggtccaatagtccaatttgttaaagccaag

SEQ ID NO: 861396 - DNA, 99 bp, Homo sapiens
ggcagcggacgcatcacttgcacttctagaagctctactacccgaaggatagtgcccgaagttgctgcttggcatagatgagcctcagcttccagggca

SEQ ID NO: 861397 - DNA, 99 bp, Homo sapiens
ttgaactaccccaatatgagaagaattttagagacaacaatgtcaaaggaacgacacttcccagatgctgagctttttataccaccaaagatcaacaga

SEQ ID NO: 861398 - DNA, 99 bp, Homo sapiens
acagccggccaggagaaattcggtggactgagagatggctattatatccaagacagcatcgatggcagcaacgtgacggtcaccccagggcctggagag

SEQ ID NO: 861399 - DNA, 100 bp, Homo sapiens
gacctcatctccaggacagtgggaagagtggctggaggaattcagtttcttggggattacatgaagcagatgacatttgaagcccaagcctttttagaag

SEQ ID NO: 861400 - DNA, 98 bp, Homo sapiens
ggccagcggttcaaaactcggaaaagggggagaggtgatatccagcctcagttggacagtgctctccaagatgtcaatgataagtatctcttattgga

SEQ ID NO: 861401 - DNA, 100 bp, Homo sapiens
gtagttgatgcaactgaagtttatataagaagtttacattaactcttacctaaggaagatgtggaagatgtgaaatttgtcatcaattatgactacccta

SEQ ID NO: 861402 - DNA, 108 bp, Homo sapiens
ttcacatatttatctaaacggttaggaaggagtatagatgacataggtcacctcattcatgaaggcctacagaaggcattaagcagtcacactgcttttaccaaacac

SEQ ID NO: 861403 - DNA, 98 bp, Homo sapiens
ttgatgccaactccttcttcccacgctgctactgcctgggggctgaggatgacaaaaaagccttcatagattccctcccaggctgtccctcgccgcct

SEQ ID NO: 861404 - DNA, 100 bp, Homo sapiens
atcgatgctacgctaacctatcgggttctctctccgcgcgttcagtttctggcccccaaagacaaaccaagtggagacacagcagctgtatttgaagaag

SEQ ID NO: 861405 - DNA, 100 bp, Homo sapiens
atcacacgtgtaactactacctgcagccagaggaagacgtgaccattggagtctggcggaattctccacgagttttgagcagcctcgggtttcccaccac

SEQ ID NO: 861406 - DNA, 100 bp, Homo sapiens
tattttggaaagcagtttttaagacaaagtgacatgatgagggagcaactgcagctgtcagaggcgacaggaacgtgtctaggcgaacgactaaagcacc

SEQ ID NO: 861407 - DNA, 98 bp, Homo sapiens
gccgacccgccgagcaaaatgcatgctggactatgatacagagaacctgaactctgaagaaatctatagttctctacgtggagttacagaagccattg

SEQ ID NO: 861408 - DNA, 100 bp, Homo sapiens
agcaccttcattctgctggaattattcatcggcgttttaccaacgaggatcatttggctgtccataaacataaacatgagatgacactgaaatttggtcc

SEQ ID NO: 861409 - DNA, 100 bp, Homo sapiens
tctgtggaagggactttcttttggccctaggccccttcctgcccctgtcgtcagcagcaacagcttgcacaactacagaaagaaaaatcagagattctga

SEQ ID NO: 861410 - DNA, 100 bp, Homo sapiens
ggatttcatgcaagattacaggaatttcagaattttgaacaaatctttgaggctgaaatgccacagcttcctcaagatttgaaaggagaaactttttctc

SEQ ID NO: 861411 - DNA, 99 bp, Homo sapiens
tttcctgctgtcttcagccattttcaaaaccttgttctataatactttgtgctgggcaagagggatctaaggacagagcgggatgccaccagcttgtcc

SEQ ID NO: 861412 - DNA, 100 bp, Homo sapiens
aggcccatatggtatgaagtttctaagtgaaagccttatgtggcatatttcatcacaagttgctgaacttaaggtatggcatttcaaatatagatacaac

SEQ ID NO: 861413 - DNA, 100 bp, Homo sapiens
ctgcagctgcctgaacagagacagcgttccagacaaccaccccaccaagttcaagctgcaaggcacaatcctgcagtacgtgaagacgctgatggaggtg

SEQ ID NO: 861414 - DNA, 100 bp, Homo sapiens
attggagagcactctatttattgtactgtgaataatgatgaaggagagtggagtggcccaccacctgaatgcagaggtttatggttggctgtgggagatg

SEQ ID NO: 861415 - DNA, 100 bp, Homo sapiens
aagagagctgctcctaaagaagaggcagaggccatgaatcaaaaagaccctctggctgtggacaaaataatgaaggacctggaccagtgtagagatggca

SEQ ID NO: 861416 - DNA, 98 bp, Homo sapiens
aagcaatgctgttacaacttggttataaagcatccactaatcttcaggatcaacttgagaagatcacaaaatttgtccaggatagacatagagctaga

SEQ ID NO: 861417 - DNA, 100 bp, Homo sapiens
cctgcttcatccttgtttaatgactttggtgccctcaacatctctcagagacgaaagagacggggttttgccacattggccaagctgatctcgaactcct

SEQ ID NO: 861418 - DNA, 100 bp, Homo sapiens
aagccgcctcttggtttgcgtcctgcactgaaaggaaatgacggattttgcctatatgaacccaatagcaatggcgagatcaaggggtccaatccagtct

SEQ ID NO: 861419 - DNA, 98 bp, Homo sapiens
aggtctacagatgaaggcagaagactatgatgttgtaaaagttattggaagaggtgcttttggtgaagtgcagttgcgggtcacagaaagtcgagaga

SEQ ID NO: 861420 - DNA, 118 bp, Homo sapiens
gcggggagccgcagcggttccgagcggggcccaacatggcggagagagaggtggagtccggcccccgaaagaggttgttcaggggatgaaggaagctcaggaaaggctgacgggtgat

SEQ ID NO: 861421 - DNA, 100 bp, Homo sapiens
cagctgttttccaaagttactgcatcattttgtatcccaccagcaatgaatgagcgttccagcttctccatcgtgttcgacgagtgtcacaaagccaaga

SEQ ID NO: 861422 - DNA, 51 bp, Homo sapiens
tcccggccaccagcaattgtccggcaaagccacatcaggagtgactcaggg

SEQ ID NO: 861423 - DNA, 98 bp, Homo sapiens
atgaagatggaacctctgaataacctccagggtttcccaaactctcgattgcctcttgcaagcagatgacctgggagcaaatgttatggcagaacgat

SEQ ID NO: 861424 - DNA, 100 bp, Homo sapiens
cgaacgggttgcttcccccgctgcgaggtcgcaatggaagaagagatcgccgcgctggtcattgacaatggctccggcatgtgcaaagctggttttgctg

SEQ ID NO: 861425 - DNA, 100 bp, Homo sapiens
ccctctccgccccccaggaggggcgagagggagccgcagctgatgtcagaggttgaaggctgcattgactcaccaccctgctgccatgtcaaatgggaac

SEQ ID NO: 861426 - DNA, 100 bp, Homo sapiens
tcagaaacagctcagcagaagaacttttcttacaagttaccccaacaagccgaagcttactaaggcagccagatatttcctgcattcttggaacaggagg

SEQ ID NO: 861427 - DNA, 100 bp, Homo sapiens
agaaatagggggcacggcagacgcggtcctggatatacttcagtctaacagaagctttggaaagggcaaagcttcaagaaaagccatcccatgttagagc

SEQ ID NO: 861428 - DNA, 99 bp, Homo sapiens
tcgtctctccccgaggccccactgaagcccccgggcccactggtgccacctgaccagcaggacaaagtccagtcaagactcccagaaagcagggggagc

SEQ ID NO: 861429 - DNA, 100 bp, Homo sapiens
atgggtttctagtaatcaaaaatcttgtacctgatgccgatattcaacgctttcgtatggtggtgatattacccgaaaaatgaagcttttgaagagacaa

SEQ ID NO: 861430 - DNA, 100 bp, Homo sapiens
taacttcttatccatcccatctcttggacagatgatgccagttaattactttgaatattacgtccctattggccctcgattttcaaatcttgtattacag

SEQ ID NO: 861431 - DNA, 98 bp, Homo sapiens
gctgaaggagcggcagcgcaggccggacgaggtgaaccaggtcatttaaccgccttcagacactcgcctatggggacatgaaccacgagtggatcggc

SEQ ID NO: 861432 - DNA, 99 bp, Homo sapiens
aaacaactggctggaatattgcaggtgcctttagagaggcaagaatctgcatcaaagagccctggaagcaatcatggctcaactgtgatgcctttagaa

SEQ ID NO: 861433 - DNA, 101 bp, Homo sapiens
gccacagcagagacgcgaaggagaggccctagaaccggctccagcggggccccacagacgagcaggatgcctgtccccatgagtgccaagaacagacccgg

SEQ ID NO: 861434 - DNA, 100 bp, Homo sapiens
gggaaaccttttaaacacccaagcaacttggagcttcacaaacggtctcatacagcaagtgccggggatcctgaacccgaatcagaggcagaaccggaag

SEQ ID NO: 861435 - DNA, 98 bp, Homo sapiens
tgtctaaccccggaggccggaggaacgggcccgtcaagctgcgcctgacagatggtgatggaatttcctgataatgtgttaaatctcgatggacatca

SEQ ID NO: 861436 - DNA, 98 bp, Homo sapiens
gggggttcgcgcccgccgacccgcgccctgctccctctcagcacctgggcggacgaatcatattctaagaactcagccactcaggtatccaccatggt

SEQ ID NO: 861437 - DNA, 100 bp, Homo sapiens
ggacggagagaacacgagcccatcaggacttggatgttgtgggtgatggtatgcagtgtcctccttcacctttgctttttgatccttcactaacccttga

SEQ ID NO: 861438 - DNA, 99 bp, Homo sapiens
gagactctctgaagaccagcaggaaagcagtgagcccttacagttagagatgtttatgattacttccgagctgtcctgcagcgtgatgaaagaagtgaa

SEQ ID NO: 861439 - DNA, 100 bp, Homo sapiens
tgacttcaagaatgaagccgcggaccctcgcggtacctttgacaggagcgtgaccctgctggaggtgtgcgggagctggcctgagggcttcgggctgcgg

SEQ ID NO: 861440 - DNA, 100 bp, Homo sapiens
tagtccagcaagaccttgctcttttgaagaggccatgaaagggtctaaaattcccaggactccacagctttgcaccagataagcctggaggaatactaat

SEQ ID NO: 861441 - DNA, 100 bp, Homo sapiens
cagagtttgcctacgtcccagctgacccagctcagcttgctgctcagatgttaggtattgttgcagcatctggcagtgagactgaggatgaggacagcat

SEQ ID NO: 861442 - DNA, 100 bp, Homo sapiens
gatgaagagtgacttgtttctggatgattctaagaggctacccacctttctgttctgagacccctcaagagacatataagaaggtgatgaactggaaaga

SEQ ID NO: 861443 - DNA, 98 bp, Homo sapiens
acagcaccatccgcatcggggacgtctatggcttcctggtggagcactacgtgcggaaggaggaataccagacgtagagatggggtttcaccgtgtta

SEQ ID NO: 861444 - DNA, 100 bp, Homo sapiens
ttgctgctttgacactagtcttgaatacaaagtatggacttcactaacagggaacagtcaaggcatacatctattaataaactgcaatatgagaatgaaa

SEQ ID NO: 861445 - DNA, 100 bp, Homo sapiens
ttagtctgctgaactcaattcatgagaacttctcacaaaattccgggatttctttaatcaaaatgaaaccagtgatccagcaagggatacatgtgtgatc

SEQ ID NO: 861446 - DNA, 98 bp, Homo sapiens
ggtgtccccactgagctcttggaagagagttcactgagacttttttgacggagagggacaaacaatccaagtggagtggaattcctcagctgctcctc

SEQ ID NO: 861447 - DNA, 99 bp, Homo sapiens
tcgacgacgaagacagcggagaggagagcggtgcggaggactgagggaacctcaggacctgacccaaccactgtctacgtggacatgagagccctgaga

SEQ ID NO: 861448 - DNA, 144 bp, Homo sapiens
tggtcccaggaggggccagtaaagtctccagcagagtgccgggaagagcacagcaagacccctgaggagagaacccaaaacccagctcggaggagatctccatgattgcagagcagttgtccatggagaaggaggtggtgaggg

SEQ ID NO: 861449 - DNA, 100 bp, Homo sapiens
gtgtttttactgacattttatgttatttctcaagtatttgaaataaaaatggatgcaagtttaggaaatctatttgatttgtgaagctgggaatcatttc

SEQ ID NO: 861450 - DNA, 100 bp, Homo sapiens
caggatctgtatgatgactttgaatgggtgcatgttagtgctcaagagcctcattatctaccacccgagatgccccaagtatgaaaagacacagactgta

SEQ ID NO: 861451 - DNA, 104 bp, Homo sapiens
gagtatacatgcaaagcttccaatgagtatggcagtgtcagctgtacagccacactaactgtgacagttcgatcctttggtacagaagacagaccgacagatcg

SEQ ID NO: 861452 - DNA, 100 bp, Homo sapiens
gctggtagttccatgctgtctgttcagacttcagcttggtgatctgtctggctccattgatgacctccccacgggaacggaagcaactttgagctcagca

SEQ ID NO: 861453 - DNA, 99 bp, Homo sapiens
gaggagagcatcgactggaccaagatcgagcccagcgtcaacttcctcaagtcgcccaaagatgacgtccggttgtttgccttcgtgcgcttcaccacc

SEQ ID NO: 861454 - DNA, 99 bp, Homo sapiens
cctgttgccaacattgggccaacccgaattcttcccaatctttatcttggctgccagcgagatgtcctcaacaagactacagtgactatggtgggaagc

SEQ ID NO: 861455 - DNA, 100 bp, Homo sapiens
gggacctgctgaatcggaacctgcaatttaccaagacctgtacacacattacattactatactggcaattgctggagaagattttgcaattgttgcttct

SEQ ID NO: 861456 - DNA, 98 bp, Homo sapiens
caaggtgcaagagtccacaaagggacctgatgaagcgaagatcaaggactccctggcactggggaaaacagaggaggaggcactgaagcacttccgag

SEQ ID NO: 861457 - DNA, 100 bp, Homo sapiens
tcatctctctagaccataaaaataaaaaacatatccgagggtgtcctgttacttccaagtcatcaccagaaagtagccggatcgagctgggagatgtgac

SEQ ID NO: 861458 - DNA, 100 bp, Homo sapiens
aggacccgtgaaggcaatgatttataccatgaaatgattgaatctggtgttatcaacttaaaagatgccacctctaagcaacgcgcagcctggatcatcc

SEQ ID NO: 861459 - DNA, 100 bp, Homo sapiens
aaacaaataagttatgctatgaggatgacaaactctggagtaattggagccaagaaatgagtataggtctccatgtagtggaggtgacatatgatgacgt

SEQ ID NO: 861460 - DNA, 50 bp, Homo sapiens
tggggcttaagatgtcctgcctgaaaggtgctggagaatctggtaaaagc

SEQ ID NO: 861461 - DNA, 100 bp, Homo sapiens
tctgacatcgcgacgctgctcaaaacctcgctccggaaaggggacacctgacttaattcagtgcacaaatgagatgaatgtgaacatcccacagttggca

SEQ ID NO: 861462 - DNA, 100 bp, Homo sapiens
ggccatttaggagctctgctcaaagccagacgagagcgcatcctctctggaaagctggtgcgcagagctgagaagcggcttaaagaggtggtgctccagg

SEQ ID NO: 861463 - DNA, 100 bp, Homo sapiens
ctcctggttacgttgtgcctgaccgaggaactggcagcagcggaagttgaagatttgtccaggagcagatagctgaagagagagagagagaagagagaac

SEQ ID NO: 861464 - DNA, 99 bp, Homo sapiens
ccatgatgagcattaatggtgatgaggacagtgctgctgccctcggcctgctctatgactactacaaggaacgtcaaggtcgtgggaaataaaaggcag

SEQ ID NO: 861465 - DNA, 101 bp, Homo sapiens
ggggctggccacattgcttcagactgtaaattccaaaggtgtctgctttttcaacgtgggagaaggagttgcacaagatagtttttgatccccggtactta

SEQ ID NO: 861466 - DNA, 100 bp, Homo sapiens
ccttcaacccgtggctgatagctgaaaggtccagcctgatgagtgaagaggctaagcgaggagcacccaacccttggctctttgaggagccagaggagac

SEQ ID NO: 861467 - DNA, 99 bp, Homo sapiens
cgacagccaggcccgggagaaggcctgggatacaacagtgatgagataaggcctcggactttactgatcgaacatctaatggaaggtggaagaagagac

SEQ ID NO: 861468 - DNA, 100 bp, Homo sapiens
attatttccaactatgaattctttgagaatcagtatattcatgtgttacatctctcttggtaccaagccagctgcctccattgacccatggggggtgccc

SEQ ID NO: 861469 - DNA, 100 bp, Homo sapiens
ggaaagatggaagactaccaggctgcggaggagagaaaggtctggacatctatctcatcattggcatatgtggaggaggcagcctcttgatggtctttgt

SEQ ID NO: 861470 - DNA, 100 bp, Homo sapiens
ttgcctcaaagcgagtctcaaaggtgttcctggatttggtggataagattgtggaccagctgcagcagttaatgcaggtgtatgacttggctgcccttcg

SEQ ID NO: 861471 - DNA, 100 bp, Homo sapiens
tgtggctgcagaacttgggctggactttcagagattcctgaccttgaaccggaccttgctagtggctgcccgattatgtttgagaccttcaacaccccgg

SEQ ID NO: 861472 - DNA, 99 bp, Homo sapiens
tttccgccctaatggaggtctccagtttcgaatgccagaggattcaacatgagcatacctatgcctgggcatccagtgaacttctccagtgtcactctg

SEQ ID NO: 861473 - DNA, 98 bp, Homo sapiens
gaggaggcggctataataatagcaaacatcgatggcctactggggataacattcatgcagaacatcaggcccttgatgagcctccctatttgacagtg

SEQ ID NO: 861474 - DNA, 51 bp, Homo sapiens
gaagaaagcacagctcggaaaggcagagggctgggaggatggaatgctggg

SEQ ID NO: 861475 - DNA, 100 bp, Homo sapiens
tcaaaacgtcagcaaccaaaggcaccggccttgatgaggcaatggaatggaaatcagggatcctcttatgcagtggcttgggaaacatgtggactccgag

SEQ ID NO: 861476 - DNA, 98 bp, Homo sapiens
ttggaagcgctttgatttacagcagctgcaggcctccggaatgccccccgctgctgggcagtgatccagcccctgctgtgtgccgtatacatgcccaa

SEQ ID NO: 861477 - DNA, 98 bp, Homo sapiens
tgacccacctgcatgtgaagtctacagaacccaaagccgcccctcagccccttcttccagaccagctggtcttgcttctggagcatctcttggagcag

SEQ ID NO: 861478 - DNA, 100 bp, Homo sapiens
cagtaacaacagcgaggaagaagaggacgacgacgacgaggaagaggaggtttctgaggttttcctcctccaccaggcgctccacctccatctcttatac

SEQ ID NO: 861479 - DNA, 99 bp, Homo sapiens
ccggatcctgaggaggcagctgcggtggcagctgctgagttctcggtgaaggagactacctaggtggagaagcgtactgggccggcggcctgcacctct

SEQ ID NO: 861480 - DNA, 100 bp, Homo sapiens
gctcacctgtgcgggatggaacaaaagctgtcggcagcatccagcccctccagtcacagtcctcacagagcttcaggaaaggacccctttgcagagctct

SEQ ID NO: 861481 - DNA, 100 bp, Homo sapiens
ccacttaagagaaactgttttatccccaaaaggcctattcctaccatcaaggttttactgcaatcacagcaaccaaccccatttggcttataaagactcg

SEQ ID NO: 861482 - DNA, 98 bp, Homo sapiens
tgtcgcttcaaaaagtgtctgtctgttggaatgtcaagagatggtctgtgcagacttttgcagacaaatcaaaacaagaagctctgaagaatgacctg

SEQ ID NO: 861483 - DNA, 100 bp, Homo sapiens
gaaacatatacagattatgtgattccatgctttgatagtgtaaactcagcacgagccattttgcagtacctgtttgaaaatggtagaatagataacattt

SEQ ID NO: 861484 - DNA, 100 bp, Homo sapiens
gaggacttgcttttgttgaactgttcttcaggagagaataccatgggtaccacctgaatgcattgaaaatcctaaaaatttaaatttggcaacagacaaa

SEQ ID NO: 861485 - DNA, 98 bp, Homo sapiens
aaaaggaatgaccctagccagactcagggatcaaagagcaaacagattcagtggcctgcattggggactcattctcacagttccggtttgctgaggag

SEQ ID NO: 861486 - DNA, 100 bp, Homo sapiens
aagcctggagagcttcgtggagttgatgaaaaccatctatgagcaggtattgttgcagcatctggcagtgagactgaggatgaggacagcatggacattc

SEQ ID NO: 861487 - DNA, 100 bp, Homo sapiens
agtcaatggagcagagaatgatccctttgttagaccaaatttaccacaactgaaagatcctacaggaatggatcctgatgatatttggcagctgtcctcc

SEQ ID NO: 861488 - DNA, 100 bp, Homo sapiens
tccctgtgttctgcttttttcattgttccactggacgctcatcagagggaagatctttttcctcaattgttggatgaaaaatctgacaaacagtatgctg

SEQ ID NO: 861489 - DNA, 98 bp, Homo sapiens
gtggaggtctgcgttgctcttgcttttcctcgctggggtgtacggaacagcatatgccatatatgagctggctgtggcttcatttcccaagaagcagg

SEQ ID NO: 861490 - DNA, 98 bp, Homo sapiens
gaggcagggtcttgctggttctgatgttcatgaccctccttcactttgacgccagcttcttttctgatcagctgctgctctctgaaaagccacagttg

SEQ ID NO: 861491 - DNA, 99 bp, Homo sapiens
gggctgaagcgactgagtccgcgatggaggaacgtgttgtgggctttcacgtactgggtccaaatgctggagaagttacacaaggctttgcagctgcgc

SEQ ID NO: 861492 - DNA, 98 bp, Homo sapiens
tggggacgcgtcctcagacgcagcgtctagtccctggccatagctccgccgctgcccgccatggctctaaaaggacaagaagattatatttatctttt

SEQ ID NO: 861493 - DNA, 99 bp, Homo sapiens
ctggaccaccgggcgctggtctgctcccagccggccttcacagagcttcaagccaaagttattgacactcaacagaaggtgaagctcgcagacatacag

SEQ ID NO: 861494 - DNA, 100 bp, Homo sapiens
cagacccctcccctgaccggagcgccaacacctcccccgagagcagcagccgcctcagctccaatgagtggccatcgtggtgggcgccccgcggaccctg

SEQ ID NO: 861495 - DNA, 100 bp, Homo sapiens
cctcggtcgagcatgttcaccagggcccagatgtattcttggggaactattcacaaagaagcctatttttcaagccaatctggaactggctcagctagaa

SEQ ID NO: 861496 - DNA, 101 bp, Homo sapiens
cgaagatggggagaaggaagcgagactcatacgcaacctcaatggccctgaaaaggagcctttaaaagtcaattctactccatttggcaaagagggaactg

SEQ ID NO: 861497 - DNA, 98 bp, Homo sapiens
cttggatgaggtgaaagactatgtggccaaggaacggaaaacagttcttccttcaaagcatgcagtacctgaagtaatagaagactttctctgcaatt

SEQ ID NO: 861498 - DNA, 101 bp, Homo sapiens
gcggccgccgcggagatgtgacccggcagtacggcaaatatggcggagtagtattattgattccacagaatacagccaacctccaggtttcagtggcagtt

SEQ ID NO: 861499 - DNA, 99 bp, Homo sapiens
ggacacctacagccccgacgaacatttctgggtgacactcaacaggattcccgttggtacgccttattacatgtctccagagagaatacatgaaaatgg

SEQ ID NO: 861500 - DNA, 100 bp, Homo sapiens
tttcccacgtggcagtcgacgtggtgcagggcagagaagcgctcgtccacatcatctatttggccacaggcttgaagccacagtgcatggccagaaccag

SEQ ID NO: 861501 - DNA, 123 bp, Homo sapiens
gccgctgaccgccgcgcgcccgaaccgggtgtccacatgagtgcctctcccagcagatccaggagcttgaagaaatccgcaaatgtgggatgaaaaacttccgtaacatccaggttgatgaag

SEQ ID NO: 861502 - DNA, 100 bp, Homo sapiens
attgattatatacaacaaaaaatagttatggcgactttcagaaacaatcacatgaagactaaagcatctgtcagaaaagagtccttcaataatgttaaac

SEQ ID NO: 861503 - DNA, 100 bp, Homo sapiens
aagagaggctgtttgagcctctgagccagttgtccgaacagacagcctgaaggggcggcggggccggctaccttcaaaacccaagcagcccccagatgcc

SEQ ID NO: 861504 - DNA, 100 bp, Homo sapiens
aggacccgggctccaaggccgtcgccgaccgctacgctgtctactggaacagcagcaaccccagaacatgtatcgattcgagggcactgggttttcaaac

SEQ ID NO: 861505 - DNA, 100 bp, Homo sapiens
aaaatgaccaatgtgtgatttcagtggaataaatggcgtccaaagtcacagatgctatagtctggtatcaaaagaaggaccttaaaggctttgatccagg

SEQ ID NO: 861506 - DNA, 100 bp, Homo sapiens
tgctgcagcaacgcgagtgggagcaccaggatctcgggctcggaacgagactgcacgaaaacgcccactcctggatcttcacattgaactcaatggctac

SEQ ID NO: 861507 - DNA, 98 bp, Homo sapiens
tgctgtcgtggtccatgcagctctggatgacagtgacttcttcaccagctattacactttggggaatatatatgcaggctcaggaggagtgaaagcct

SEQ ID NO: 861508 - DNA, 100 bp, Homo sapiens
acactttctctgaaacgttttgcaaattttaccggtggaaaaattgctaagtacgaattggagcaatgttggcttatacacctctggatgagaagagcct

SEQ ID NO: 861509 - DNA, 157 bp, Homo sapiens
agaattcgggtggattattctataaccaagagagcgcacacaccaacaccaggcatctacatgggcagaccaactcagttggatggcaagcatgtggtgtttggcaaagtgaaagaaggcatgaatattgtggaggccatggagcgctttgggtcca

SEQ ID NO: 861510 - DNA, 100 bp, Homo sapiens
ggagactttagctgtaaggaggagccagaaattgacagcccagggggtctgagagtcactggagctaccagaagcatcatggggccctggggagagccag

SEQ ID NO: 861511 - DNA, 100 bp, Homo sapiens
agggcgaaggtcgtattgaatggtgttgtagactgggctggcttagatgaagatgaagatgcacatgtctgggaggataattgggatgatgacaatgtag

SEQ ID NO: 861512 - DNA, 98 bp, Homo sapiens
cctcttagtgcttggcagattagtactcttgcaggagggaacaggcaggcctgtggcttccaacaaggccattacctgtgcggagctcgttttggatg

SEQ ID NO: 861513 - DNA, 100 bp, Homo sapiens
ctttggtcataatcgctgaagatgttgatggagaagctctaagtacactcgtcttgaatagttttccaagagataacttcaccaagatgtccagtgatag

SEQ ID NO: 861514 - DNA, 100 bp, Homo sapiens
tcctcttgccacgcatcagtctgaagcatgtacagaagcatattcccaatctgatgagcaatatgcttgccatcttggttgccagaatcagctgccattc

SEQ ID NO: 861515 - DNA, 99 bp, Homo sapiens
agagagatgcttaaaaatcaccagttactttaatgaggacatgagagatggctttagaagaaaaagtttctactcttcccattatgcgagagagcggtc

SEQ ID NO: 861516 - DNA, 98 bp, Homo sapiens
aaacctgtccagtgaagacccatttacagctgaccttgaccagtttgatcagttactgcccacgctggagaaggcagcacagttgccaggcttatgtg

SEQ ID NO: 861517 - DNA, 98 bp, Homo sapiens
tttccaggcttcctgtgctgtcttggggacctgctcagaggctggaccgcgtcatgctcagaagggcagcagtgaggatgccagagttcatgggtttc

SEQ ID NO: 861518 - DNA, 100 bp, Homo sapiens
cgggatcctggagcactcggtcatgtacccggtggactcggtgaaggactcaggacacccctgcacggcggccgaccctgacagctgcttcacgcctgtg

SEQ ID NO: 861519 - DNA, 98 bp, Homo sapiens
aagctgcctgaacaggagcgcaattacaacttacaaatgtcgcttgagaccctgaagtctgccatcatggatgttctcgcagaagcaaatggcacctt

SEQ ID NO: 861520 - DNA, 99 bp, Homo sapiens
gataatttccccagagcgtcttgatccttttgcagatggcatttggctttatgtcccgagttgccctacaagcagagaagatgaatcatcacccagaat

SEQ ID NO: 861521 - DNA, 98 bp, Homo sapiens
ctcctgaagaaaacccttatttccctacgtacaaattccctgaacttcctgaaatccagcaaacttccgaagattatgtttgagaccttcaacacccc

SEQ ID NO: 861522 - DNA, 138 bp, Homo sapiens
ggaaaacctaaccatgaagacttgaacttaatacagcaagaaagaccatcaagtttaccagtgttacagaacatcctggacactgaaaaagaatatgctaaagaacttcagtctcttcttgttacttacttaagaccc

SEQ ID NO: 861523 - DNA, 100 bp, Homo sapiens
cagggctccctctggatgtggaattctccgtccctttccagggagggaacaaagcccacagcaccggtgttggagcgggccggagagaagtagagtgggc

SEQ ID NO: 861524 - DNA, 100 bp, Homo sapiens
tagatgccgattacccacttcgagtcctttattgtggagattcataagctgccctgaggcgatcttggcatcaagaaagacagcattgaggcacatctca

SEQ ID NO: 861525 - DNA, 117 bp, Homo sapiens
catgtgaccatgaggaaatgagagaaatgcttacacacagaaatggctaaaacagctcttggagaacatttgctgaatgttggtgtgaatcgagacaatgtttccgagattttacag

SEQ ID NO: 861526 - DNA, 100 bp, Homo sapiens
tttctgcagtgcctctgagaacttacgcagatcagccgaccctttctaaggcacaaaatgatgtgatggaaatgaagatgcagtcagagagactttcgaa

SEQ ID NO: 861527 - DNA, 99 bp, Homo sapiens
gataatactcagaatcaggagaaggaaatgctgcttagattaaatgcgttgttgctcgagctgtaaaagccaaaggtccggtgatgatcccataccctt

SEQ ID NO: 861528 - DNA, 99 bp, Homo sapiens
gggacttgaaccagctgagcgctgccatcccggccacgcgggtggaggtgtccgtgtcctgcagtactatactggcaattgctggagaagattttgcaa

SEQ ID NO: 861529 - DNA, 100 bp, Homo sapiens
ctgtttggagaaaatcagaagtacagttttatctagccacatcttggaggttcatatccagctttcagagtggcaccgtgcaatttttcttccacaggcc

SEQ ID NO: 861530 - DNA, 100 bp, Homo sapiens
aaaacaacatcatgcagtggaatgcagttatatttggtgattcagtgtgagcctctatcagcaccagatttggggatcatgaactgtagccatcccctgg

SEQ ID NO: 861531 - DNA, 100 bp, Homo sapiens
aagcagagctttgtgctttcacccttttctactcaagaagtactatactggcaattgctggagaagattttgcaattgttgcttctgatactcgattgag

SEQ ID NO: 861532 - DNA, 98 bp, Homo sapiens
agggcatatgtctgcacgctgaggccgaggcggagaaggggcttcctgagcgtcccagtacactgacagagggtgttactgtgttgcccaggctggtc

SEQ ID NO: 861533 - DNA, 99 bp, Homo sapiens
ttggatgtggcaattttggagaattacgattagagacctcagtatgaacaacatcagtcagctgctcccgaatcccctgcccagtctccgcttcctgga

SEQ ID NO: 861534 - DNA, 100 bp, Homo sapiens
aggcatcaccaaaccctatacttgcagtgtttgtgggaaaggcttctcaagatcctgataacttaagtgactctctcttttccggtgatgaagaaaatgc

SEQ ID NO: 861535 - DNA, 100 bp, Homo sapiens
ggacataccactatatcagataagcttgacattacagccaagatggtgctgtcccagagacaacgagatgaactagataattgacgaccttgccaaccta

SEQ ID NO: 861536 - DNA, 100 bp, Homo sapiens
gatgatatgattttggcaatgagtagagtctgtgctccgacagttagttaatatgtgcatcaacccagatccagagaagcgaccagacgtcacctatgtt

SEQ ID NO: 861537 - DNA, 100 bp, Homo sapiens
gattccaagtaactcttatttgtatgctcaggcttcagaagaggctcgcctctagtgtcctccgctgtggcaagaagaaggtctggttagaccccaatga

SEQ ID NO: 861538 - DNA, 100 bp, Homo sapiens
caatgtttatgatgtggataataagacataccttattcgtcttcaaaaatcaacaacccctccccgtcgtaaacgctgaggaatgatgtggcaagaatgc

SEQ ID NO: 861539 - DNA, 100 bp, Homo sapiens
aggaagaaattttcaaacttagactaggacatctcaaaaagctcgagctgagctttcgcttgccgtccaccactgcccaccactgtcgtttgctgccatc

SEQ ID NO: 861540 - DNA, 98 bp, Homo sapiens
ggcggagccggagccgggggagggggcagcggctgtctcacggaccacggcggcgcccgcagctcctcaccggagacgttcggagcccaggacatgtc

SEQ ID NO: 861541 - DNA, 100 bp, Homo sapiens
gttatgtctaccatcacggaccctgcagcaatgcttggaccagaggttgaaaattggtgtcctcatttaccttggagagcaaaaaatccctacgaagaag

SEQ ID NO: 861542 - DNA, 100 bp, Homo sapiens
cttccatcagctgcagaaaattttctagttttggggagacaattacaaacatgttttatcaatgcagctaagcccaccttgggacaccttgactccaagc

SEQ ID NO: 861543 - DNA, 51 bp, Homo sapiens
ggctgccggagaccggccgcatgggctggagtgcaatggcgccatctcggc

SEQ ID NO: 861544 - DNA, 98 bp, Homo sapiens
ggagccagtcttgaggtcctacatctccgaaagcaagctcttctagaagttggctcacattctacttgactgtggtgaagacaatgtctgtaaaccca

SEQ ID NO: 861545 - DNA, 100 bp, Homo sapiens
gacagccaagggtcggagcacctcctcaatggacaggccttctctggggagctcttcttcatgcatctcctccccaattttgccgagtgctggtgggatc

SEQ ID NO: 861546 - DNA, 98 bp, Homo sapiens
cggaagctacacaactcctacacagacgtgatgtgcaaccccttctacaacccgggggaccgcatccagtccagcaggcagagagctttttgatgatc

SEQ ID NO: 861547 - DNA, 100 bp, Homo sapiens
ttgagagtggaccacactgcgccaacacagaaattatgtacaccaggggttggaaaaaccacactaggcaaagaacttgcgtcaaaatcaggactgaaat

SEQ ID NO: 861548 - DNA, 98 bp, Homo sapiens
aatatattccctttgatgaaatgaaggaaagaatactgaaaattgtcactggatttaatgggttttgctgatttgggaaaataaagactatggatcaa

SEQ ID NO: 861549 - DNA, 100 bp, Homo sapiens
tcacgttcggtttggaaagctgggagtcctgagatccaaagagaaagtgaaacacagtgctctgtgcctatacagtgtacggataaaacagataaacaag

SEQ ID NO: 861550 - DNA, 100 bp, Homo sapiens
agagctggaattaggcaaatatggacaggtgatgatgaacagtctacacagatggctgcaagttgggaagatgataaagttacagaagcatcttcaaaca

SEQ ID NO: 861551 - DNA, 99 bp, Homo sapiens
gaagggcctataccgggatgtgatgctggagaactttgcactcgttagctcactggagtatcctgagctccagctggaccctaaattggatcctcttcc

SEQ ID NO: 861552 - DNA, 100 bp, Homo sapiens
gcccgaagggcttttcagaaatcggtttgaagttagaaatgcgttggtgggacgggagggtggtctgcccggggctgcgagctcctgtccaggaaccgga

SEQ ID NO: 861553 - DNA, 99 bp, Homo sapiens
gaggaggcatctacccctggccttgacgctatctcccatcacctctgctatccagacaggactcaccgagatgctgagatgaatcgtcacctgtgtgtt

SEQ ID NO: 861554 - DNA, 99 bp, Homo sapiens
tcatgtccctcatcatcaataccttctattccaacaaggagattttccttcgggagttgatctctaatgcttctgatatttatgatattcagactggca

SEQ ID NO: 861555 - DNA, 98 bp, Homo sapiens
gagaaattcctttggaagttattccgtagcataagagctgaaacttcagagcaagttttcattgggcaaaatggggttatggccacaccgtgcccttg

SEQ ID NO: 861556 - DNA, 100 bp, Homo sapiens
tcaggaatttatggtcgcctttttgaatgagacatccaaccctatcgatgtcgctgctcggcctgggacagtcccacacactttactccaaaaggacccg

SEQ ID NO: 861557 - DNA, 98 bp, Homo sapiens
gcaaatctacttttgggttacaaaaatccagaccaggaacccaagccagaccgtctccttgtattgaaagtactatggaatgatttcctgatgtgcta

SEQ ID NO: 861558 - DNA, 100 bp, Homo sapiens
gccagcgctgcaagaggcctacgtgcgggtggtcaccgagaagtccccgaccgactgctccgaagcgacacatgttgtgatggaagagacctcagcagag

SEQ ID NO: 861559 - DNA, 98 bp, Homo sapiens
aaagattctgccagaagaagagcataagcttaaatcgtctcagaaggacaaggtccgccagtttatggcgtgcactcaggctggcgagagaactgcta

SEQ ID NO: 861560 - DNA, 100 bp, Homo sapiens
agaatttccaaatgaaaatcaagtagtgtttgccagagttgattgtgatcagcactgaggaacatatgcagcagaaaaaagaggaggaagaagttcttaa

SEQ ID NO: 861561 - DNA, 98 bp, Homo sapiens
tggccacttgcttgggatcctttatcctggtcatcttctatttccaaagtcttgatttcccagttaaagatgttcttcacccgaatgcagtctttcct

SEQ ID NO: 861562 - DNA, 98 bp, Homo sapiens
gcgcgcgactcgccccgggacccggcacagtttctggaacattcaaattcagtgtttctacagccagttagtctacaaaccattgcagcagcaccatc

SEQ ID NO: 861563 - DNA, 100 bp, Homo sapiens
ttgtggtagaccgtctaagagaagccagcagccagcttcgggtgtagcctattctcatccaactacagttgctagctacactgtccatcaggctccagta

SEQ ID NO: 861564 - DNA, 100 bp, Homo sapiens
tgagggcgtggctgttccagcatctaacaatcctacatggctttccaccaacctgggcatcctgacctgcatcgagtgttccggaatccaccgagagctg

SEQ ID NO: 861565 - DNA, 100 bp, Homo sapiens
ccgggattcctccaggctcactgacattgagagcttagaccatgctcagcctccaagcagccttgtcatcgacaaagaatctgaagtttacaagatgctt

SEQ ID NO: 861566 - DNA, 100 bp, Homo sapiens
agctcttgcccttaaggaacaatgggcctttacaacaactaaacggacaggcattccagccccacgggaattttcagtaactgtctcaagagagaggtct

SEQ ID NO: 861567 - DNA, 100 bp, Homo sapiens
catgatgtttgttcatacttgcagagttggacaggagagattcacccaggatacacaacctcactatatctattcaccccgtgaaatgactaggtgggtg

SEQ ID NO: 861568 - DNA, 100 bp, Homo sapiens
tgcagaaggagatcactgccctggcacccagcacaatgaagatcaaggatatgatgatgcctatagatttgggggaaaagacaatatatttagtttcatt

SEQ ID NO: 861569 - DNA, 119 bp, Homo sapiens
ttaactgtctggcctatgatgaagccatcatggctcagcaggaccgaattcagcaagaggtttctcattaaccttgtgaagcaaaagccacaaataacagaggaacaacttgaggctgt

SEQ ID NO: 861570 - DNA, 100 bp, Homo sapiens
caatatttgagtatcactgcgagggatggcctaattagtaaagatgaaatgatggcttacttcctgagagctaaatcccaactacactgtaaaatgggac

SEQ ID NO: 861571 - DNA, 50 bp, Homo sapiens
tttgacaatacaggaaatgtttataggaccatctagtctcaggaaaacaa

SEQ ID NO: 861572 - DNA, 99 bp, Homo sapiens
atgcttttgacatggaggatttgggagataaagctgtgtactgccgttgttggaggtccaaaaagaatgaacttcatgagcttgaaaaagaaatagcag

SEQ ID NO: 861573 - DNA, 98 bp, Homo sapiens
actttctaaagtaattcgagcaatagagaaagacttccgagtgcaggaactcccactggctcgtattaagaagattatgaaactggatgaagatgtga

SEQ ID NO: 861574 - DNA, 99 bp, Homo sapiens
agacggtcgtagctgcggtcgcgccgagaaagccacataaagaagatccctaatagtcatttctcaacaattatatagtcaactgatgtaacaatggta

SEQ ID NO: 861575 - DNA, 100 bp, Homo sapiens
ctttcaaggatatgctgtattcagctcaggaccaggcaccttctgtggaaggtgtgggccatgtttgaggattgccccagcattcagttctatgagtaat

SEQ ID NO: 861576 - DNA, 100 bp, Homo sapiens
caaagatcgtgcagctcttggcaggagtagctgatcaaaccaaggatggaccaaactagagtcagaacgaatactagcatcagtggggaagaaacctccc

SEQ ID NO: 861577 - DNA, 100 bp, Homo sapiens
attgtgagctatttcagaactgttctcaggactcattattttaacatttgggagaaacacagccagaagggagacataagacatcagtcagtacatgtga

SEQ ID NO: 861578 - DNA, 100 bp, Homo sapiens
tttgccgcttctttcacttcaggaggcctcttcttaggaattccctggatgatcttgttgggccaccttccaacctggaaggccagagtgacgaaagagc

SEQ ID NO: 861579 - DNA, 98 bp, Homo sapiens
aaacttcagacagctgtcctaaagaaacagattatgtttgagaccttcaacaccccggccatgtacgtggccatccaggccgtgctgtccctctacgc

SEQ ID NO: 861580 - DNA, 98 bp, Homo sapiens
ctcaatttgctggatttaagcactgctgcactttatgagggttaccttcccgccaatgtagaccggagaccagccactctccagagaaaacaaaaaga

SEQ ID NO: 861581 - DNA, 99 bp, Homo sapiens
tgcaacccgtgcttatgcagatagttactattatgaagatggagtttgtggggacattcatggacaattctttgatttgatgaagctctttgaagtcgg

SEQ ID NO: 861582 - DNA, 98 bp, Homo sapiens
agtaccagagacagaagcagatggattcgtccttttagcttccacagcgcggcacctgtacctccggggtggcgctggggttggctccatgaccaaga

SEQ ID NO: 861583 - DNA, 98 bp, Homo sapiens
gccaccgactgggggcaacttggcacttagaaccgcagcagggacgtcggtttgctatcgggactcggcgaggacggacggacatataatgatctgaa

SEQ ID NO: 861584 - DNA, 100 bp, Homo sapiens
tgtgtcctatgaataccgcttcctggagttcacgactctgagtgctggtggggaccaaggcatactgaacacattttttagcagctgggcaacaacagat

SEQ ID NO: 861585 - DNA, 100 bp, Homo sapiens
tccaagaaaaaaaccacaaatgtttttctgttttgcctgaatacatgatttaaacaagagatttccacagaagctgtccctttccccccaacacatcgct

SEQ ID NO: 861586 - DNA, 100 bp, Homo sapiens
cctggggcccaagatttggtggatttctctccagtttatcgatgtctacatatatattctgtcctggaaggaaaatcacctcggcagtgtttgaaggaag

SEQ ID NO: 861587 - DNA, 120 bp, Homo sapiens
gctcagaatcaggagttacagaggaaagtcttgcatctcgagaagcaaaacctacagcatagaggctgaggctggggccaggacccagacagagacacacggtcactgcagctgaagccg

SEQ ID NO: 861588 - DNA, 99 bp, Homo sapiens
gtaccgcgagcaaggagcgcggaatcggggagcgtccggagctagctggatcctctaggcaggccagaagcggactcctagaagaggggagcagcaagg

SEQ ID NO: 861589 - DNA, 98 bp, Homo sapiens
ttacaaccgcagcagtggtggctatgaacccagaggtcgtggaggtggccgtggaggcagaggtggcatgggtaagcctgatactgtgattgcaaatg

SEQ ID NO: 861590 - DNA, 98 bp, Homo sapiens
gacatccctaccccagtgctcagcctttccatgctctccatcacctatcacagcagcatccgctctctggaggtactgggcctaatcgctacgtgcct

SEQ ID NO: 861591 - DNA, 100 bp, Homo sapiens
tcagcccccgcaaggatggcctttcctaccagagggagaaccgaagattacaggaggccagcatgaggttggaacaagagaatgatgaccttgcccatga

SEQ ID NO: 861592 - DNA, 98 bp, Homo sapiens
gatcttcaatctatggagcagattcggcgaattatgcgaccaactgatgtaccagatcaaggtccttccatagtgacgccccccaaggacatctggaa

SEQ ID NO: 861593 - DNA, 99 bp, Homo sapiens
ccaggagttggtggtgaccccgcccagttggcccagaggatctcttctaacatccagaagatcacacagtgttgacagctgggaagtggtggaaggact

SEQ ID NO: 861594 - DNA, 100 bp, Homo sapiens
gctacatgctctgatgacggcactgttagaatctgggactttcttcgttgccatgaggaaagaattctccgagatactagagtaaaaggatggtttcttc

SEQ ID NO: 861595 - DNA, 98 bp, Homo sapiens
gccagcatgttgggcgccccggacgagagctccgtgcgggtggctgtcagatgatgctggagggtcttgaaatctttacagtaaaacctgcaacttga

SEQ ID NO: 861596 - DNA, 100 bp, Homo sapiens
gttggcaagcgagcaatttccacctctgtgtgtgtacgagctcatgagtttgccagatccggcccggtgcctgggttccaggaggacacgctgcagttgg

SEQ ID NO: 861597 - DNA, 98 bp, Homo sapiens
gccttcaaaagcccacttggcgatgggttacagtaagagctgcatccagtggaactaaagccgttccaggattatcaaaaactgagcagcaaccttgg

SEQ ID NO: 861598 - DNA, 98 bp, Homo sapiens
cgccccgctccacccgtgaggacaccagttggcgctccgaggcaacctttcagttcactgtggagcgcttcagcagactgagtgagtcggtccttagc

SEQ ID NO: 861599 - DNA, 101 bp, Homo sapiens
ctttgcagcggggacttcggcggcggcgcctcaggcacctcggcccggatgccatggacaatattaccaggcagaaccaattctacgatacccaagtcatc

SEQ ID NO: 861600 - DNA, 98 bp, Homo sapiens
caggatggcagaggcggaattgcacaaggaaaggctgcaagccatagcactccttgccttctcccctctcagactctgcggtggtgtttgaacctggg

SEQ ID NO: 861601 - DNA, 99 bp, Homo sapiens
gtatcaactctggtatggacacagcttctagtgttgctttggatcttgtggaaagtcagaggaaatcctcattgacgattcaatttgttgaaggccaat

SEQ ID NO: 861602 - DNA, 98 bp, Homo sapiens
ggaactgatattccaacagtaaaacctctcaaaccgaggagtgagctcagcgatggcatcgcgatgctggtggcaggcaatgaccgcgtgcaagcagt

SEQ ID NO: 861603 - DNA, 98 bp, Homo sapiens
ctctggagccagtcttgaggtcctacatctccgaaagcaagctcttctagaagttggaactcgaatcatttatgacagaaagtttctgttggatcgtc

SEQ ID NO: 861604 - DNA, 98 bp, Homo sapiens
tctattttcattgcacacagattgtcaacagtggttgatgcagatgaaatcattgtcttggatcaggcacccaggcatgtggaatatgctcatagtgg

SEQ ID NO: 861605 - DNA, 100 bp, Homo sapiens
ctgccccggtgcgcagacagagctattccagcaccagcagaggtgcgcttcccttcccacttcagctctgacttgaaggacctgctgcggaacctcctgc

SEQ ID NO: 861606 - DNA, 100 bp, Homo sapiens
gatggccactcacgctgggggaccttcagcaacctctgggaacacaaccaagcaatcatcaagcacctcctcggctgaagccgacgtagcttctctgaac

SEQ ID NO: 861607 - DNA, 99 bp, Homo sapiens
tatcagatgttccacgtaataatgctggttgctgaaaagccaggagtcaaaatgactgagcgctttgactgccaccattgcaacgaatctctctttggc

SEQ ID NO: 861608 - DNA, 98 bp, Homo sapiens
atggctcacgccttcccccaggacgagctcaaccccatccactgccgcggccgtgggcccgaccgcggggacccgctaacaataaatgcccttgccca

SEQ ID NO: 861609 - DNA, 100 bp, Homo sapiens
caacacgtggaggcggagctgtcagctcagatccgctacctcacccaggaccctgctgggatctttgagcttgtggaggtggtcggcaatggaacctacg

SEQ ID NO: 861610 - DNA, 100 bp, Homo sapiens
gagggattgctactgcacggtgaacctggaccaggaggaggttttcaggaccaaaattgtggaaaagtcactctgctgtttgcagacaaggtcccaaaga

SEQ ID NO: 861611 - DNA, 100 bp, Homo sapiens
agagaatggtcaggacagattctctgtggagaggcctggcagaacgaagaggatgcttcctggacaagatcgacgtgatcaagcaggctgactatgtgcc

SEQ ID NO: 861612 - DNA, 98 bp, Homo sapiens
ggagcttctcagaagacagagggttttcttttgaggctaacctctgctttgtggacattgacaaccacttcattgagttgccagaggacttgccacag

SEQ ID NO: 861613 - DNA, 98 bp, Homo sapiens
caaaaattggcctccgaccacaaagacatccacagcagtgtttctcgggttggaaaagccattgataagtgcaatgatgcaaacacgactcactgccg

SEQ ID NO: 861614 - DNA, 98 bp, Homo sapiens
ccgggccacccagcccgcccaactcccagcggagagcaaggattgaaccagctgccctttgaccctgctaacaacaacgagcccctgcagtttggtag

SEQ ID NO: 861615 - DNA, 98 bp, Homo sapiens
cattgaacttactcatcacgtctctatagtgtcttctggtagctacagcaagctgggtagcaggcagatccaaaggatatcatgaagtttccagggcc

SEQ ID NO: 861616 - DNA, 98 bp, Homo sapiens
gcctgctgatgggaactggatggggattgtggacccttttgccagacctcgaggtcatggcaggaaaggactagcccgagccaagtcagttcccacaa

SEQ ID NO: 861617 - DNA, 137 bp, Homo sapiens
gcgagtccagcgtcgccgcagccccccaatgcggccgcgagaagcagcgggggggcaggcgatcgaagaattcaaggaagccttctccctatttgataaagatggcgatggcaccatcacaacaaaggaacttggaa

SEQ ID NO: 861618 - DNA, 100 bp, Homo sapiens
tcacttgtcactcactgccatagagtacagccacagccacgacaggtacctaccaggtctgccatgtgaatctggaggggcagccgttctactccaagaa

SEQ ID NO: 861619 - DNA, 98 bp, Homo sapiens
ccaagtcggggaccctggagaaagggcagttccggcgaggggggagcctcagcaggattgctgtgtgaaaaccgagctgctgggagaaggtgagggcg

SEQ ID NO: 861620 - DNA, 98 bp, Homo sapiens
tccctccggaactcacactccagggagacgatatgcctgaaatacccccagaaacagtcacagaagaagaatacattgatgagcatggacacaccgtg

SEQ ID NO: 861621 - DNA, 98 bp, Homo sapiens
tatggcgctttaagagctgtgcgtgttttgggggagcagacggttgacagtgttgagtttgattgaaggtatggcgtcatcattgtgggcaacccgaa

SEQ ID NO: 861622 - DNA, 100 bp, Homo sapiens
aggattccaagtaactcttatttgattaaatctcttgatgaacagtgtgtggttggcaaaatttccaagcactggactggaattttgagagaggcattta

SEQ ID NO: 861623 - DNA, 99 bp, Homo sapiens
ccgcgcagccctcggagcacggggcttctttcctgtcgttgttggctttattagaagagtgccagtccttggatccctcctaaatttacctggaattag

SEQ ID NO: 861624 - DNA, 98 bp, Homo sapiens
atctcggaaggagaagaagcaaacaggatcagggccattaggaaacaggctccccaaaaaggccacaaagacagccccacctgccctgcctacaggtt

SEQ ID NO: 861625 - DNA, 98 bp, Homo sapiens
tcggccgcgcggactgaaggagactgaaggttatgaagacagtatggagtttccagaccatagtagacatttgctacagtgtctgagcgagcagagac

SEQ ID NO: 861626 - DNA, 100 bp, Homo sapiens
ggaaaacggggatttccaccatctgtcccaggtggtgaagcagtattttccaatttgaagattcatttgaaggtggctcctgccacctgctaatagcagt

SEQ ID NO: 861627 - DNA, 98 bp, Homo sapiens
gatcaccatgcccaaccagatggtccgcatctacaaggatggcaaggtgttgtacacaattagatactgggctaacctaaagctgtggttcaagcaga

SEQ ID NO: 861628 - DNA, 98 bp, Homo sapiens
cggttgggggctcccagtaaagcgatcctcagcttcttcagcagccagtggccagtgaggtatcgaaggatgatcgcagtgatgtggagagcagctca

SEQ ID NO: 861629 - DNA, 98 bp, Homo sapiens
agtgtatgtgtgtgatgcccatgatgcccagagctctgcctccgtgaaggtacaagggaccagtccaacgtcaggcggatgcacacggctgtgaagct

SEQ ID NO: 861630 - DNA, 99 bp, Homo sapiens
agtatcccatctatgaggagaccaaaataaaactaacagtctatgatgtcaaggataagtctcatgacaccagtttatgcgaattccatgtgtggatgc

SEQ ID NO: 861631 - DNA, 99 bp, Homo sapiens
ccctgcccccatggcatgcatgatccattagggaggaccgtctgcacaaaggtgggaaactacctccgtatgttccgaggttctctgtacaagagatac

SEQ ID NO: 861632 - DNA, 100 bp, Homo sapiens
gcgcggcccctagctttctccttctggtgtggggcccgaggtccggcgggcggtggcctccgtggtgggcggctggctgctgtgtctgcgtgaccgttac

SEQ ID NO: 861633 - DNA, 100 bp, Homo sapiens
tggtacaaaagagtctttggaggatgcggctttgatgggctgaaagtcacaacatgaaaaaccaacagatggatccctttactcggcggcagtgcaagcc

SEQ ID NO: 861634 - DNA, 100 bp, Homo sapiens
aaatattccgaggacctgaaggacgcgcaggagaagctggagctcacggagaagaaggcctccgacatgagcagcaccagcagtaagagggctccgacca

SEQ ID NO: 861635 - DNA, 100 bp, Homo sapiens
gccagcgcccggagcaagcggagctcccccaagagccggaaaggatctcaaagatttcatgagacaagctggggaagtaacgtttgcggatgcacaccga

SEQ ID NO: 861636 - DNA, 98 bp, Homo sapiens
ggaacttttcaactgacttttacttttgacgaccaccatgactgagatcactgctgaaggttaatgactccagagagtaagatcagattcgtccacaa

SEQ ID NO: 861637 - DNA, 99 bp, Homo sapiens
ttcgacattgccgtcgacggcgagcccttgggccgcgtctcctttgagtgagttattctccccacctcagaagtaccagcttttggtgtatcatgcaga

SEQ ID NO: 861638 - DNA, 98 bp, Homo sapiens
gctgtaaatggtaaacccatgctaggagttatacataagccattttccgaatatacaggtgaggggaagtggcttcgaaacattgactattaccgttt

SEQ ID NO: 861639 - DNA, 98 bp, Homo sapiens
atggaggcaggcatttcagtaacactggactggatcggaacaggctgaaagacacacagaagtcttcatggatatagttgatacatttaatcatttaa

SEQ ID NO: 861640 - DNA, 99 bp, Homo sapiens
aagaagagaaccttgaagcaagtgatggtgacaaatatcccatggaaagtgataattcatttgatctgtttgattcctcccaggcagtgacaccaaaat

SEQ ID NO: 861641 - DNA, 98 bp, Homo sapiens
gtgccacgcagcctttcttccatctgtcagacttctgaaggtgcgtcctggctgagagttggagctctccagcaacatgcctgagcagagtaacgatt

SEQ ID NO: 861642 - DNA, 99 bp, Homo sapiens
tacccccagcaccacctccagcccctgcgcctcggaagtgtttggattgtgagctatttcagaactgttctcaggactcattattttaacatttgggag

SEQ ID NO: 861643 - DNA, 100 bp, Homo sapiens
taaagtctgagagagggaagtcgcctctgtgctcgtgagtgcatggggtataagatggcagttgaattcctgcatgaactgaatgttccatttttcaaag

SEQ ID NO: 861644 - DNA, 100 bp, Homo sapiens
cggaaggcgccttgttctcggagagggtgagttgaaacgctgcctggaaaggaagtaccaggacttgcacaggtctggaacaaaaagaatgcaaatgaaa

SEQ ID NO: 861645 - DNA, 100 bp, Homo sapiens
gagagcgtgaccgagagcgcgaatatcgtcatcgttagaagggacaatgactcattcttcccaggacactggttcttgtggcattcaggaagatggaaag

SEQ ID NO: 861646 - DNA, 129 bp, Homo sapiens
ggagctgagaccgggcggccacagtccgcagggatgaacctcgagttgctggtaactctcaggagccttctccgcagttggcttcctcggtagcttccacacggagcatgcccgagagcctggacagcc

SEQ ID NO: 861647 - DNA, 100 bp, Homo sapiens
attggcagccctcatgcccagaccatcaaagtggactataaacagcgctattacaccattgaaaatctgggtgtggatgaggtcaccattgtcaacattt

SEQ ID NO: 861648 - DNA, 100 bp, Homo sapiens
aaaaagtctacagggtgatccagcagcagctctgcttgaggagcggacaggggtgaagatggtcatgatccaggatggcccattgcccacgggagcagac

SEQ ID NO: 861649 - DNA, 98 bp, Homo sapiens
aggactgtgaggtggccccactgcccaccatttacaaacgccagaaggtgcagcggaactgctgcctgacgctctgcaacttcagcatccccgaggag

SEQ ID NO: 861650 - DNA, 100 bp, Homo sapiens
gtcttttgcctctttctctcaggctttcctacaactcatgcccagcagcagcaagcagcattgcagtgtcgagatggctatgaaccctgtgtaaatgaag

SEQ ID NO: 861651 - DNA, 98 bp, Homo sapiens
tatgtcagggatgccgaagacatgaacagggccacagcagccaggcagcgggaccatgagctcttgaggatgacgattgccaaacaaaggctcggaga

SEQ ID NO: 861652 - DNA, 100 bp, Homo sapiens
gagaggcgagctcgcgatgagtggtctcggcaggctcttcgggaaggatgtcctcctcgcactttcttaccagccctttgcaaaatttttcttgatgaaa

SEQ ID NO: 861653 - DNA, 100 bp, Homo sapiens
agacagcgattggacagaatttgtgaagagtcatcttagtgggatttggggaagcaacagggctgtgtggggtaacctgccacctttaagtggaaatcag

SEQ ID NO: 861654 - DNA, 148 bp, Homo sapiens
cactggttggcccagctccttggggtttccggctgcagggcggtaaggatttcaacatgcctctgacaatctctagtaaagtggaatctcaagaacgagaagatgttctggctggaatgtctggaaaagcaattaaaggtaaagttgg

SEQ ID NO: 861655 - DNA, 100 bp, Homo sapiens
gcccctagctttctccttctggtgtggggcccgaggtttggaattcacccagttgcaggccgaatgcctggtcagcttaatgtgctgctggctgaggctg

SEQ ID NO: 861656 - DNA, 100 bp, Homo sapiens
acacaatttgctcaacaatccaaagttcgatgaagaaacagccaacaataaaggtggcaaaggacctgtcagaaaggattctgcagattgggaaaaagaa

SEQ ID NO: 861657 - DNA, 98 bp, Homo sapiens
agcagactgaaaaggaatgtctcaatcagcttgccagggtgactcacatggcagcaagaataactgaagtgaagtgatggactccgatttggagagta

SEQ ID NO: 861658 - DNA, 98 bp, Homo sapiens
tggcggttgcaattaaaacatgtaaaaactgtacttcggacagcgtgagagagaaatttcttcaagaagcctccaaaattgcctggaaaagagcagtg

SEQ ID NO: 861659 - DNA, 100 bp, Homo sapiens
ggatctgatgatgctgcctacacacaaggtgggagacctacctgatgcagatattaaacctccagaaaatgtactgtttgtgtgtaaattgaacccagtg

SEQ ID NO: 861660 - DNA, 110 bp, Homo sapiens
ggccccttggcactcgcctcggatttgggggcttcctcactcgtggctttccgaaggctgctgataaccagttcaggatgtccatcctggaacgactggagcagatggag

SEQ ID NO: 861661 - DNA, 100 bp, Homo sapiens
tagccccagtgccctgtacaaccctgccaatggagatcttcgtggatgatgagacgaagttgacgctgcatgggttgcagcagtactacgtgaaactgaa

SEQ ID NO: 861662 - DNA, 100 bp, Homo sapiens
ccgagccgcagccgagcggccgtgggcccgggcggcgggcggagacgtgggcgccctccccgccaaggcccgtgcgaggaggaggaagccaagaatctgg

SEQ ID NO: 861663 - DNA, 100 bp, Homo sapiens
aagagctggttacccagcagttgccccatctgctcaaggcttttgacctttatgaacaaagatatgctgctgtgaagatacatcagcttaataaaagctg

SEQ ID NO: 861664 - DNA, 100 bp, Homo sapiens
gctgaagccatgagtattcttaaacaatgtggacaagaagcagcactgctgatagaatatgatgtctcagtaatgggtgacttcaggtggaacattcatt

SEQ ID NO: 861665 - DNA, 100 bp, Homo sapiens
caaaaagtaaaccacgatcgttatgctgatgttatagttttgccgctggactcttccctcccttcccccaccccatcaggatgatatgagacttgaaaga

SEQ ID NO: 861666 - DNA, 98 bp, Homo sapiens
ataaaccgcaatgaaaccattcagtggctgtacactctcattgggtcaaagatgttctcagtgcagctgagtcttggtgagcagacatgggaatccga

SEQ ID NO: 861667 - DNA, 99 bp, Homo sapiens
ttaaacttaggtatttaagtactgaaaggccaagaataaggagacgggtgctttggctgcggccaaagtcattgaaaccaagagtgaggaggagctgga

SEQ ID NO: 861668 - DNA, 98 bp, Homo sapiens
gaatgcagggcaaaacgctacatttcagtgcattgccacagggagagatgctgtgcataacaagttatggctccagtctacatcagcatcagcatctg

SEQ ID NO: 861669 - DNA, 100 bp, Homo sapiens
aaggtgcctaccaaggtcaaaggctatgacaacctctttgctatggctggcctgccactcctcctgctatgatgcctgggcagatcccggacccttcggt

SEQ ID NO: 861670 - DNA, 98 bp, Homo sapiens
ggagatcaaagagattgtcaaaaggttgcaggtcatgaatgtccataaaatgctaggcattcctatttccaatattttgatggttggaaattatgctt

SEQ ID NO: 861671 - DNA, 100 bp, Homo sapiens
agccccggccacctcggcctcttcctgttgcaccaggttcttcgaaaactgaagcagatgttgaacaacaaggatttctctctgatcaaacggacagttc

SEQ ID NO: 861672 - DNA, 101 bp, Homo sapiens
tcttgtcatagagtttatcactgaaatggttttgcacactagggaccaagaagccctcggggacactgctgagaaaagactgccgaagggaagaccagcgg

SEQ ID NO: 861673 - DNA, 100 bp, Homo sapiens
gacttataaaggaccagacaaatcaaattagtggttttggttatcaatactctggctgaccatcatcatcgtgggactgactttggtggaagtccttggt

SEQ ID NO: 861674 - DNA, 100 bp, Homo sapiens
cattgatggcccaagaacagaagttgccagaggaagtggccacacccactacagatgagctttggacatcagacagtgcaggagaagaatgtgatgcggc

SEQ ID NO: 861675 - DNA, 100 bp, Homo sapiens
ttaaaaatcaacaccaggactacagtaaggctgaaatcattgaagtgcttggagtgcagaactgaaagagggagactcatgcatctgtatgccgtgtgcg

SEQ ID NO: 861676 - DNA, 100 bp, Homo sapiens
ggagctggcacctgactttgtgggtgacattctctgggaacatctggagcaaatgatcaaaggaacaagatcactcaaggtgaaggataatctactaata

SEQ ID NO: 861677 - DNA, 100 bp, Homo sapiens
ttttactggctctgatcagagaaaacaagcaaatgctgccttccttgttggatgctacatggtgagaggctgacagaagacgaagtggagaagttgatgg

SEQ ID NO: 861678 - DNA, 98 bp, Homo sapiens
tgatagcagctctgatgacgatttggatgaatatacccttagaaaaaatgtggcagtgaagcaagatttccagatgtagcaaatgggtttattgagga

SEQ ID NO: 861679 - DNA, 100 bp, Homo sapiens
tacttgttggggccctcttgataaaaagagatgtggggggattctcgacctgctaacagaactggaccttttcggatgttccagatgaccttgatggtgc

SEQ ID NO: 861680 - DNA, 74 bp, Homo sapiens
tccgctagcgcggcctgggatgcgcttgggctccctggttcgaagtcaacaataccattcttcacccagagatc

SEQ ID NO: 861681 - DNA, 98 bp, Homo sapiens
atcaccgttgatgacaagatgtccctccggctccactaccggatgaggaaacctcgacctgtctcccagttggttgcacagcaggttactcagcagtt

SEQ ID NO: 861682 - DNA, 111 bp, Homo sapiens
tgaaagtgcattaacatttgtggccttgtgctctttcatcggacttctaatggcttgagaaagagatccaagatcttgaaaaagctgaactgcaaatctcaacgaaggaag

SEQ ID NO: 861683 - DNA, 100 bp, Homo sapiens
atttttaagggtatatttgttcatagataccggtcttctctgttggttgaaatgtctatgattttatctgcctcagtcattcgtgtcagagatggactgc

SEQ ID NO: 861684 - DNA, 98 bp, Homo sapiens
gatcatgaacttcttttggccaagctcaagtgagccaaggaggtgttgcattggtctctgacatgtgtccagatcctgggattccagaaaatggtaga

SEQ ID NO: 861685 - DNA, 100 bp, Homo sapiens
agataggcggccatggtccaaccttgaaggtgcagtctttgcaagccacatttggaacttttgagtccatcttgagaagctcccaacataaacaagacct

SEQ ID NO: 861686 - DNA, 100 bp, Homo sapiens
aactggaaaataaagattacagagaaaaaaccaacaccttcctgtgcagtcctgttggaatttgtaccactgatgaaattatgaccaggtgggcccgagt

SEQ ID NO: 861687 - DNA, 54 bp, Homo sapiens
gtcggaatcagatttgaaaatgaaagtgaaaaaggtcactggtcagaacagcaa

SEQ ID NO: 861688 - DNA, 99 bp, Homo sapiens
ccaggacgtcgggaggacctgtggccataaaatgcagtaaaaacaaatccagttcccaagaagctgtacaaatgctttcttctgttcgactcaatttac

SEQ ID NO: 861689 - DNA, 100 bp, Homo sapiens
atgaatcaaaccttggggacctcttactgggctttcttaaatattatgctacagaatttgacatgcaatgatgctacctgttctgacccatcatatccgc

SEQ ID NO: 861690 - DNA, 100 bp, Homo sapiens
gggatggaccatcttggaggctactcacagcccttaagttgttatgtctggaagctgagaaattccagagactgctgctactttgaaacgtacgatagag

SEQ ID NO: 861691 - DNA, 100 bp, Homo sapiens
ggaagatgctcagaacagagcagaaatcaaattgaagagagcagttgaagaagtgaagaaattattggtacctgcacataagctgtggccatgactactg

SEQ ID NO: 861692 - DNA, 98 bp, Homo sapiens
ccagacaggtggcgaaggcagaggaggccaattcctgtccccccagcagcatggcatcgtgtgctgaaccctctgagccctctgccccactgcccgcc

SEQ ID NO: 861693 - DNA, 98 bp, Homo sapiens
ggcaactggaactgggacttcacctccgcgctcttcttcgccagcaccgtgctctccaccacagggcttgctctcaattttgcgcaagttgaaaagtg

SEQ ID NO: 861694 - DNA, 100 bp, Homo sapiens
ccgtggtggccgacacgggcgacttccacgtcttaggaaaagtcctcagtgctgtgggcagtgcccagctactgatgtcccagaaattccagcagttccg

SEQ ID NO: 861695 - DNA, 98 bp, Homo sapiens
ttgttcagtggggagaacttccgctttggaaaccctctgcacattgcccagaagcttttccgaggtgggtcatgataactgggtacgtggagttctgt

SEQ ID NO: 861696 - DNA, 100 bp, Homo sapiens
gaagaagataagatgacacctgaacagctggcaataaagaatgttggcaagcaggaccccgcaacgccccgggtcagcccggcacactcccctcctgaaa

SEQ ID NO: 861697 - DNA, 99 bp, Homo sapiens
attcatctgggcatgcctgcagtactcttggcccatggacctgaaggagaagcacctggaacctagtgctgaagacagtaaaaagggtccattgacagt

SEQ ID NO: 861698 - DNA, 100 bp, Homo sapiens
ttcccttcgggcaggagtgttcgtgtcctctatggcgctgtcaataaagaacggcagtttgaatcggtgctgaacagcagcgatggattttgggtgggga

SEQ ID NO: 861699 - DNA, 98 bp, Homo sapiens
gttgcagaaatacccgtctacatcagaagcagtgttaagggaagaaagtcggaggctggctttggctgcgaaaagagaaaaaagaaaagagaagagaa

SEQ ID NO: 861700 - DNA, 98 bp, Homo sapiens
ggctgcagcagagcgagtacttcgttccaacatggacatcctgaagccaatcctgtggatcctcacaaagctacaagaagcaagagaaccttctccga

SEQ ID NO: 861701 - DNA, 99 bp, Homo sapiens
atagtttcacctgctattgtttcccccacccaggtggtgctagaaaagccaaatggctttagtcagagtcccacagccctgtacagcagcccacctgag

SEQ ID NO: 861702 - DNA, 100 bp, Homo sapiens
cacgccttggccaagatgacccaactccctcgagggcttccagggcagcgattgaggagaccttaccaaggagcaccacacagtagatgctgagacatcg

SEQ ID NO: 861703 - DNA, 100 bp, Homo sapiens
gaaatacaggatgcctctcagctgccacctgcctttgacctttttgaagcctttgcaaaagagtccatagaggccactgtattctattgaagaacatgtc

SEQ ID NO: 861704 - DNA, 100 bp, Homo sapiens
aggatacagggtcaaaggagagcacaaccatcgcagttggaagcccatggggcagctatcagttgagggatttgcagttgataaaatggctggagaggtt

SEQ ID NO: 861705 - DNA, 100 bp, Homo sapiens
ggtcaagttcctgctgcttttctacctgaagaaggtggagcagctcctgtacgaaagccctgagcggtactcccgctcagtgcttctcatcacccagcac

SEQ ID NO: 861706 - DNA, 100 bp, Homo sapiens
cacagctgcagtctaatagtaacacagagatctcacattcttgaaggtggcattgaagagcactaagatcggaagatgagtgagcttgaccagttacggc

SEQ ID NO: 861707 - DNA, 99 bp, Homo sapiens
agaggtgtcacaggaaggcaccagcaaggacattggtctttgatttgattcagcagtcctgtcaagtataaatgtcttatcgaatgttacttagcctcc

SEQ ID NO: 861708 - DNA, 100 bp, Homo sapiens
gcaagaataaatgaaagtctgagccagctgaaaacactgattttggatgctctgaagaaagattttccccctttctagggtgaggatggttctacacagc

SEQ ID NO: 861709 - DNA, 99 bp, Homo sapiens
tgtgttggtcggtgcctgcgttctgaagcccgagaggagccacaatggagacgccgccgctgcctcccgctcactcagcctctgaagaagcttcgggtt

SEQ ID NO: 861710 - DNA, 98 bp, Homo sapiens
tgtaatccatgtactttgtccaatgctgaaagttagggaaagtttctcctgaagatgtagaatatttcaattgccaacaggagctggcttcagagttg

SEQ ID NO: 861711 - DNA, 100 bp, Homo sapiens
aagaggaaagagaagcttgattctgtgattgaattcagcatcccagactctctgctgatccgaagaatcacaggaagtctgcgctcctcagaccaccggc

SEQ ID NO: 861712 - DNA, 99 bp, Homo sapiens
gacaacttccagtgtccccgcacttccgggttcctctgcaatgaggagaaaggcggattggtatctgatgcctatggggaggatgacttttctcgtcta

SEQ ID NO: 861713 - DNA, 98 bp, Homo sapiens
gagaaaatgcagaatttgaacgacagtacttatctggtgaattagaagtggagctgacaccacaggcaatgaatcgctccctggctaatgtgattctt

SEQ ID NO: 861714 - DNA, 100 bp, Homo sapiens
acggaggcaacggtggacacgtcattctgagagatctgactgcagccatgagcagcaatgagtgcttcaagtgtggacgatctggccactgggcccggga

SEQ ID NO: 861715 - DNA, 98 bp, Homo sapiens
gtgatgcaccttgtgttgtaaaagtggttgacatgatgaaagaagcattagaaaaacttcagctcaatatagtagagatgaaagatgaaaatgcaact

SEQ ID NO: 861716 - DNA, 99 bp, Homo sapiens
ttgagttggtcgggggcagcggcaggtactgggaacagcttttgatcctttcttaggaggaaaaaacttcgatgaaaagttagtggaacatttttgtgc

SEQ ID NO: 861717 - DNA, 100 bp, Homo sapiens
ctgcaagaagagtctttaaattgcagatgcctggacacgtcaagttcttgaggagctgactgagttgcctgtgatggtggaactagcaagtgacttcctg

SEQ ID NO: 861718 - DNA, 100 bp, Homo sapiens
gttggtgagggagatcgcgcaggatttcaaaaccgacctgaggtttcagagcgcagccatcggtgcgctgcagaatttcccatgtcctactttgcaatgt

SEQ ID NO: 861719 - DNA, 98 bp, Homo sapiens
tcctcctgcctcatcctctggagtaactgggactgcaagtatacataccgtgcctgacgaaatatcacaatatttgggttggttctggacattacaca

SEQ ID NO: 861720 - DNA, 99 bp, Homo sapiens
gaccattaaacaggagcagaacttggaccagacctacttggatgatggcgagcgacggaggcgccggtgccaggtggcattcagctacctgccccagaa

SEQ ID NO: 861721 - DNA, 100 bp, Homo sapiens
tggcctggcgacccggtggactcggcccgcggcggcgcgctcacccgccccgttcagactgcctgcgctgctgacttaaggccccaacaccaaacacaga

SEQ ID NO: 861722 - DNA, 98 bp, Homo sapiens
aaggaacttggttccccctccctcagcttccgccccaaaaggagaacgacacattggatacagaagggaggtgatcatgcaccatggcactggccccc

SEQ ID NO: 861723 - DNA, 100 bp, Homo sapiens
gcgaaggagcagtacggagacacactgcatttctgtcggcactgcagcattctcttttggaaggttcagggagcaagtttccgaggttggaaagaagtga

SEQ ID NO: 861724 - DNA, 100 bp, Homo sapiens
gccggaggagacccccgggggccagagccgtgccctccagaagcagccgcgtgtctgctgggtggctccaagcccgtgaacctcggcagggtaagggacg

SEQ ID NO: 861725 - DNA, 99 bp, Homo sapiens
cacaataaaggtgctaagaaagagaatgtaagacaggaaaataattaaatattcttaccgaggaccagcaacggagcgaggagctggctcgaatcatgg

SEQ ID NO: 861726 - DNA, 74 bp, Homo sapiens
gggcgtccggggctggagtcgcgcagaaggacagaataacgggctcccagattcacaagccccaccaagaggat

SEQ ID NO: 861727 - DNA, 98 bp, Homo sapiens
ctggctccccatactagtcgccgccaagaaggatcaagaaggtggagaagaaaagaaatctgtgcaaaagaaaaaagtaaaagagttaaaggtgttgg

SEQ ID NO: 861728 - DNA, 98 bp, Homo sapiens
ctcctgtgttttttcagactccttggaaattaaggaatgcaattctgccaccatgatggaagagtgctccaagctcccgaagccgaagtctcactttg

SEQ ID NO: 861729 - DNA, 100 bp, Homo sapiens
ggcttaaacttagagtcaagttcttcgtggagcctcatctcatcttacaggagcagactagcttggcagcagcatgatgtacaagaactatgcagagtca

SEQ ID NO: 861730 - DNA, 100 bp, Homo sapiens
gatctgggccgcactggcatttgcagctattcaggtggcacaagatctctgtaaagtagcaggcatagcaaaagttctggtggctcagcatgatgtgtac

SEQ ID NO: 861731 - DNA, 100 bp, Homo sapiens
gagaaagtcatcgatggcaccccctgtgaccagaacggcacggccatctgtgtgtctgggcagtgcaagtatatcctttcgggctctgatgacttcaacc

SEQ ID NO: 861732 - DNA, 100 bp, Homo sapiens
atagagatgtgatgttggagaactacagaaacctggtctccctaggtcaatgaatacatttttgataatttatctagtaattcttatatctgaagctgtc

SEQ ID NO: 861733 - DNA, 98 bp, Homo sapiens
gagacttgtcacatgcatcaggaccagaggcagaaatactcagtgtcctcagtcacagaaacatcatccagttttatggagtaattcttgaacctccc

SEQ ID NO: 861734 - DNA, 100 bp, Homo sapiens
cagccctgctcgcagaattaccgcctcttctttagtaaaaaagctccagttttatttaataaagaaatgattgagtcaatgaaggaaggttcagttgttg

SEQ ID NO: 861735 - DNA, 98 bp, Homo sapiens
accttaaggatgtgcaggatcttgatggtggcaaggaggccccgtggttatgaatgtgcttcagtttcataatgcctcctgctatggcagacatcctt

SEQ ID NO: 861736 - DNA, 100 bp, Homo sapiens
ctggataattttatcccagggtggctgaatcacggaatggaaaatcctgccttgcttcgttgggcctatgcaagaacaataaatgtctatcctaatttca

SEQ ID NO: 861737 - DNA, 100 bp, Homo sapiens
catagctattcctgttgatggtgatgaagacaggagaccagttttgattttaaatgttctcaatccagactaaagacaaccaagtattcttctcagaaag

SEQ ID NO: 861738 - DNA, 100 bp, Homo sapiens
ccggcggcggtcaaccctccgggcaatgaatcgctccctggctaatgtgattcttggaggctatggcaccacttcaacagctggtggaaaacccatggaa

SEQ ID NO: 861739 - DNA, 100 bp, Homo sapiens
tgtacatcaaaaggatggattaaacgatgatgattttgaaccttacttgagtccacaggcaaggcccctcttagaacaagctctggtgattgaggaacag

SEQ ID NO: 861740 - DNA, 131 bp, Homo sapiens
cgaggtcctcacgggcatccctgcaatggataacaaccgaagcccggtttacctggtgacaaaaggtgagacactcacctagaacagtgccgtgctgctgctgggaagttgctttacacaacacaggccac

SEQ ID NO: 861741 - DNA, 100 bp, Homo sapiens
tgcaaccaagcacctgaaacagcagctctacattaatcatactcctccaccactgtccaagagtaaggagagagaaatggacaagaaagatttggacaag

SEQ ID NO: 861742 - DNA, 98 bp, Homo sapiens
gcaaagcttccaatgagtatggcagtgtcagctgtacagccacactaactgtgacagactacacttgctgctttgaaggatgaagttgtatctgttga

SEQ ID NO: 861743 - DNA, 100 bp, Homo sapiens
ttcagttttcttcagaagaaggacttcggaatgcactacaacaggaaaatcatattatagatggagtaaagcaatctgcagagcgctgtgtaagcacatt

SEQ ID NO: 861744 - DNA, 100 bp, Homo sapiens
tggtgaagatgtttggctccagcgtggatctgggcaacctcgggcagtagagcatcctggccagaacaagccaaggagccaagacgagagggacacacgg

SEQ ID NO: 861745 - DNA, 100 bp, Homo sapiens
cccactctgccctgttgctgtcgcgccgctgctggttgctgtccctggaactctgcgaccttcaagtcgtttgaggaccgagttgggaccataaaggtaa

SEQ ID NO: 861746 - DNA, 100 bp, Homo sapiens
gggacctggcagcgagaaactgcatggtcgcccatgattttactgtcaaaattggagggtgcctctgacagctgctgcaggaaacatggccaagtttgcc

SEQ ID NO: 861747 - DNA, 100 bp, Homo sapiens
acctgggcagagactccaagacaagctcagccgaggtcaccatccagggcaagtactttgagatccagttcagccgaggtggggagccagatgggggcaa

SEQ ID NO: 861748 - DNA, 100 bp, Homo sapiens
ctaactaacacggtttttattgacagagctctgatagttgttccttgtgcagaagaaatcctgcaggacggactggactggtgggccgggggcttttggg

SEQ ID NO: 861749 - DNA, 100 bp, Homo sapiens
ctaaggcaacacttccttgaagaaacaagcttacaggaattcttgtgaaatcatgggcacaaatctttgccacttctaaagcccaaaaattactattccg

SEQ ID NO: 861750 - DNA, 98 bp, Homo sapiens
ctgccactctcaccgtgaaggctggagaagaagcaggcgctccctccattccagccacagatcacagacgactacggtctggacaactttgacacaca

SEQ ID NO: 861751 - DNA, 100 bp, Homo sapiens
gcccgggacgcgcggcggcaccgggaggccgggccgagcggtggtagaaggacagcccccctgccctgagacaacactcggaggcctgtattccagcgag

SEQ ID NO: 861752 - DNA, 100 bp, Homo sapiens
catcagcaatgaaatcctgctttcttttcctcagaactactatattcagtggctaaatggctccctgattcatggtagctacagcaagctgggtagcagg

SEQ ID NO: 861753 - DNA, 99 bp, Homo sapiens
aacagcgcctcgggatgcccagctgatcaaggagctggggctgcggctgctctatgctggtgcagcttcaagcttaggaccacccaccatgcctatcca

SEQ ID NO: 861754 - DNA, 98 bp, Homo sapiens
acggaggtggtagagctgatcctgaagggcaccagccgaccatcccattactatgttctttgggatgacaaccgtttcacagcagatgagctccagat

SEQ ID NO: 861755 - DNA, 100 bp, Homo sapiens
ttagcaggcatttatctttctttgagtctaaagaatcccttgaagaaagtattggcaaggtcagaagagatcaattctacagaaatttccagtggttctg

SEQ ID NO: 861756 - DNA, 99 bp, Homo sapiens
ggggttatggtgggaggagccgatactgagcttcttcctatttgccatggttttgcctgcactctccctggatgctggaggctggaggcagtgacgcag

SEQ ID NO: 861757 - DNA, 125 bp, Homo sapiens
cagcattactttgctgtgaatgtgaagaatcagaaatctttactgattccaataaagacttccgagtgcaggaactcccactggctcgtattaagaagattatgaaactggatgaagatgtgaag

SEQ ID NO: 861758 - DNA, 98 bp, Homo sapiens
tctgctccagctgttcgaaggtgatccaggggaagatggtgaaaggaatgggaggtgctatggatttagtgtccagtgcgaaaaccaaagtggtggtc

SEQ ID NO: 861759 - DNA, 100 bp, Homo sapiens
ctttttgagccttacggagccgtctaccagatcaacgtcctccgggaccggagtcagaaccctccgcagagtaaagaggaagtatcattctgcaaaggag

SEQ ID NO: 861760 - DNA, 100 bp, Homo sapiens
cctgggcatccctctgggccaggacgccgaggagcatgttggaacaggattccaggagaatgaaccctagtgtgagccctgcaaatcaaaggaggcacct

SEQ ID NO: 861761 - DNA, 98 bp, Homo sapiens
cgcccccagcctgtggacgcctggcccaccctgagtgacagagcgggatgccaccagcttgtccaaagggaagttccaggagctcctggtgggcatcg

SEQ ID NO: 861762 - DNA, 100 bp, Homo sapiens
agctcagccctgaagaaaagggaaaacttgctgcggttgctcaagatccaagttgatgaagtcagaaggctggtatattttgaaggcaccaaagactccc

SEQ ID NO: 861763 - DNA, 99 bp, Homo sapiens
aaaactacagttctgtcactcacttacacagtattgggaaatctgtgaaagaggatggatcagttctgaaacagtttctttctgaaacagagaaaatgt

SEQ ID NO: 861764 - DNA, 100 bp, Homo sapiens
tactcatctgcctttatgatgaatgcaataattctccattgagaagagagaagaacattctcgaatacctagaatggggcatgcatgtagggaataccgg

SEQ ID NO: 861765 - DNA, 98 bp, Homo sapiens
aaagccaagctcaccaaactgaagatgccttctcagtcagttgaggtggaaaacgaagctcattcccaacgtgcaaagccaaggcagcgaccccagga

SEQ ID NO: 861766 - DNA, 100 bp, Homo sapiens
gtcctttacaaatcttcagggaatggccaagtgacaaagatgatcacagtcgtgttaaactgcaaaatgctgagaatgattatattaatgccagtttagt

SEQ ID NO: 861767 - DNA, 98 bp, Homo sapiens
acaacctgccttatgtccagatcttgaagcaaaacctggaaatccaccggaagataaaacagtctgagcaggagctagcctatctggaaaggagagaa

SEQ ID NO: 861768 - DNA, 100 bp, Homo sapiens
actgcctgattacaggagctttaacagtgcagtcattggagaaatcgatgaagaaacagattctgcgcttgatttggggaatattcgagcagaaccttta

SEQ ID NO: 861769 - DNA, 100 bp, Homo sapiens
cgggccgctgcgtgttgtccacccaagatggagttcctcctggggaacccgttcagcacaccagtggggcagtgcctcgatcttcagtttagatcttgga

SEQ ID NO: 861770 - DNA, 98 bp, Homo sapiens
gggggacgtctaccagggccatcacctgcttccaggtggtgaagcagtattttccaatttgaagattcatttgaaggtggctcctgccacctgctaat

SEQ ID NO: 861771 - DNA, 100 bp, Homo sapiens
ctatgaatttatacaaggagaagcactggatccaaagcatgtctgcaacccagccattttcaggcatcaagcatgatggaaccatgtgtgatacctgccg

SEQ ID NO: 861772 - DNA, 99 bp, Homo sapiens
ctggggccaggaggagcgaacacctgccgcggtcctcccgccggcgctgggctcaaactgtccaggttgctgaagttgaaccacagtcacagccacagc

SEQ ID NO: 861773 - DNA, 99 bp, Homo sapiens
cggggactaaggcgagccggagaccgagcccgaacagcagggtttgccttcccggattgggcctacaagccagagtcgtcccctggctcaaggcagatc

SEQ ID NO: 861774 - DNA, 98 bp, Homo sapiens
catcgcatctgggttttacagcacttggccaagctagatgtcaagaaaccaagccatctcctgccttgtagttttgtagctattggcattttagtagc

SEQ ID NO: 861775 - DNA, 100 bp, Homo sapiens
ttggaggcgtgatgcttaagctggtggagaaactcgcctaaattatacagatctgtgattgaagatgtcattaatgatgtgagagacatctttctggatg

SEQ ID NO: 861776 - DNA, 98 bp, Homo sapiens
ggttcgccggctcctccaatgtgggcatcaacaggtggcggtgaatcaggtctaggaaaatcgactctcataaacagcctattcctaactgatctgta

SEQ ID NO: 861777 - DNA, 100 bp, Homo sapiens
tttggagctgttagcaaacattgaccctagtccaggtatcttctcaacctgtcccatgggacttttatatcaacctcaagttaaaggaacgtttaaatga

SEQ ID NO: 861778 - DNA, 98 bp, Homo sapiens
agacgcctttggtccctcggtgtctgcactggctgctggtcaaggcttcagtgtggagtaattgacactttcgagccacagcgtcctgtgtttactca

SEQ ID NO: 861779 - DNA, 98 bp, Homo sapiens
gtcctacaagtacaatgagctccggcagcatgagatcacagtgtcttccaactccaacttctcagaagtcaccctggcgggtttagccagtaaagaaa

SEQ ID NO: 861780 - DNA, 98 bp, Homo sapiens
agtgttaatggaagtgaaccaagcattcctcagggctatggcatttcctctgtgccatctgcttccaattctaaatccataaaagagaatagtaatgc

SEQ ID NO: 861781 - DNA, 100 bp, Homo sapiens
agtgctttctggagaatcagggcctggaagtttcttgcagaacataaattattaggaaacattaaaaatgtggccaagacagctaacaaggaccacttgg

SEQ ID NO: 861782 - DNA, 100 bp, Homo sapiens
cagaatccaagagatgagagaggacccaacatggggcagaagcttgaaatcctcattaaagatactctcgtcacttcttcacgaacgatcctggatgcaa

SEQ ID NO: 861783 - DNA, 100 bp, Homo sapiens
ttctctatcagatgctgtgtggaatcaagcaccttcattctgctggaattattcatcgggttgtcccagttttggtgcatctcctgtctgctatcagcag

SEQ ID NO: 861784 - DNA, 100 bp, Homo sapiens
aaaagaagaaatgctcatctgaaattcatcacctctctggagtcttcaaactgaccaagcattgaaaagggagtaactattcccagtcagaggcgctatg

SEQ ID NO: 861785 - DNA, 100 bp, Homo sapiens
aaagttgaaataagaaacaagagtattacttttcctacaacagaacctggtgaaacttcagaaccacccgttcctattgccccacctcagctcgcctctg

SEQ ID NO: 861786 - DNA, 98 bp, Homo sapiens
cagctgtgagctgcctgcagccagaaggagatgaggagaataagccaatgcatggcaagcactaaatcttagatcctgaagactcagccctcgagcaa

SEQ ID NO: 861787 - DNA, 100 bp, Homo sapiens
aggaatatggcaccaaggcattcttgcaggcatgttatgttacccagagaactttccaaacaagtacctaaaactcatctgatgtctgaagaggagtgga

SEQ ID NO: 861788 - DNA, 98 bp, Homo sapiens
aagagctcaacaagtacgcctccttaaaggcagtcggtgctggagaatctggtaaaagcaccattgtgaagcagatgaggatcctgcatgttaatggg

SEQ ID NO: 861789 - DNA, 98 bp, Homo sapiens
cacatcttccggccaacttccattgaacttcccagcactcgaaagggaccgaaatggagagcaaaggtacttaaatcgattcagcagtgagctggagc

SEQ ID NO: 861790 - DNA, 98 bp, Homo sapiens
caaaataagagactggatttggatgctgcaaaaacgagactaaaaaaggcaaaagctgcagaaactagaaattcactcaatcttggagccacttttgg

SEQ ID NO: 861791 - DNA, 143 bp, Homo sapiens
ccacgacccagatcccagcggaaaggagcgcgcctctttttggcttggggagctgcagcgttcgcttagcagtgtctgcaaaaacgaatcttttcctacaacctgttaactgactggactgttggtaacaaagtaattgtgag

SEQ ID NO: 861792 - DNA, 100 bp, Homo sapiens
gcagcagctgcctcaagaggagcaggtggtggaggtggatacagcagtcggagaacatctggcagagacaaatacggaccacctgttcgtacagaataca

SEQ ID NO: 861793 - DNA, 98 bp, Homo sapiens
tcaaggagttctcctgcatccttatggcgtgcctatgattgtaccggcagctccttaccttcctggactgattcagaattctgcttggtcagaatcgt

SEQ ID NO: 861794 - DNA, 100 bp, Homo sapiens
acttgaatgtgtaaccaatagtactcttgccgctatcatacgccagctgagcagtctgactgacatgggctttgcccgattatttaattcacctttgaag

SEQ ID NO: 861795 - DNA, 100 bp, Homo sapiens
caaacctcctttgcctagaggctatcacacgaaattgcatctgatggtctcaagggtcgtgtgtttgaagtgagtcttgctgatttgcagaatgatgaag

SEQ ID NO: 861796 - DNA, 100 bp, Homo sapiens
tggatcatggattagtttcacagtcatgacacaaacactgccaggaaaatatgagagccacacccgtgttcacacaggtgagaagccctttgagtgtgat

SEQ ID NO: 861797 - DNA, 100 bp, Homo sapiens
aatcccatctgatggtcaccagtcaatctttgagcattagtgaccagaaggatcccaaggatcgaatggttcaggttgtgaaatggtacctctcagcctt

SEQ ID NO: 861798 - DNA, 98 bp, Homo sapiens
gcaacattgcgattgtgttaggccctaacttgttatgggccagaaatgaaggggactaaataggaatagtttgccaactccacagctgaggagaagct

SEQ ID NO: 861799 - DNA, 100 bp, Homo sapiens
ggctgaagcgactgagtccgcgatggaggatcagttcagtgatatgagaatcagcataaaccagacgcctgggaagagtcttgactttgggtttacaata

SEQ ID NO: 861800 - DNA, 99 bp, Homo sapiens
aaaagtttataccaagtcttctcatttaaaagctcacctgaggactcacactgtaggtacaagtagtcaagtttcttcattaaggagacctgaagagga

SEQ ID NO: 861801 - DNA, 127 bp, Homo sapiens
agtaatctgtatgtttttcagccgtctctagcagtatttaaaggacaaggaaccaaagaatatgaaattcatcatggaactcttggtgtaataacagaagctacaataaaaatcagaccagtccctg

SEQ ID NO: 861802 - DNA, 100 bp, Homo sapiens
gaagaatgaactctgagaatgtttggagcacttaaatatagatccggtggtatggatgagaaaacaattgctttacttgttgctggactagtgatcactg

SEQ ID NO: 861803 - DNA, 100 bp, Homo sapiens
ggacatcctggaagctgggaaatgaaatttggagagcttgtaatgaccaaagaatcaaaggccttgatgggactctaccatggtcaggtcctgtgcaaga

SEQ ID NO: 861804 - DNA, 100 bp, Homo sapiens
cggctggcgccgggggccggggagcgccagattggccatctgcaagcttcccttctccgtggagagcaggaagacagtcatgggacctcagggagccagg

SEQ ID NO: 861805 - DNA, 99 bp, Homo sapiens
agccatgaggccaaaggcagttgtattgaaggggacgaactggtagtacctgaaacatcagataatagtcggaaacaaatggttagaaacattaacaat

SEQ ID NO: 861806 - DNA, 98 bp, Homo sapiens
aaaagcgaaaagttcaaacacacgtcagcagatacagtttatgtaacttgatggaagaaaatggaattactccaaaaagacaagtgctcaagcagcaa

SEQ ID NO: 861807 - DNA, 99 bp, Homo sapiens
aggggaccagaggaactcagccctgattgcggtgaccttgaggaaccctgggagctcaggaaggaaggagcgcccagaagcagggacagggagctggtt

SEQ ID NO: 861808 - DNA, 100 bp, Homo sapiens
agtcggcactgctactgcgaagacagctggcaggactatcctattaagtgtaatctcactgcttaatgagcccaacaccttctccccagccaatgtcgat

SEQ ID NO: 861809 - DNA, 100 bp, Homo sapiens
ctcctcttcctcctcctcttcctcttcgcttgcagatacccccgagatcgacgcaaaatgatttcatggttatctgcaatgttgcaaaaatcctagagct

SEQ ID NO: 861810 - DNA, 100 bp, Homo sapiens
tgaatacgggtccatcaatcacacgtaccacctggatgttgtggcatcctgaggttagcattacacttctcccagtggagcccatgacttctgatcagga

SEQ ID NO: 861811 - DNA, 98 bp, Homo sapiens
tgcatggacacatggacgagtgtctcactgtcccttcaggagaacatggtgaagagcagcggagaatcaaagaatcttcaggatggcagcaagtgttt

SEQ ID NO: 861812 - DNA, 100 bp, Homo sapiens
gtctagagatgtgggcatggcagacaaatctgtaggtttttagaacttcagccataaaaatgggcagaattttccttgatcatatcggtggtacccgtct

SEQ ID NO: 861813 - DNA, 99 bp, Homo sapiens
aaagccttcagagggaagctgctaagaagcaggccatgaaacaggttacctgtgcatgacagatgagtggttctctgagtatgtctacgaagtggtggt

SEQ ID NO: 861814 - DNA, 99 bp, Homo sapiens
tctgacaacgtggatcgttgttttgaaacagtgatgatgcgggtgtgctggttggtgagacaggacagccggcaccagcgaatcagacttccacatttg

SEQ ID NO: 861815 - DNA, 98 bp, Homo sapiens
gaagagagaaggaggaaaagaagcagttcctgatgttacaaatgaacaaggatctcccaggatctagtttgaagcactaagaagaataagacatcagt

SEQ ID NO: 861816 - DNA, 101 bp, Homo sapiens
gagctggtcgccgccgcggccgcctggaattgtgggagttgtgtctgccactcggctgccggaggccgaagagagcagagctgacatctgataaagacatg

SEQ ID NO: 861817 - DNA, 98 bp, Homo sapiens
agtccaagagccggcggcatgacgagacgagcctgtggagtgggagacacctgacctttctcaagctgagattgagcagaagatcaaggagtacaatg

SEQ ID NO: 861818 - DNA, 99 bp, Homo sapiens
agaatttatatagagatgtgatgttggagaactacagaaacctcgtctccctgggatttaggtcctgaatatgaaggtatatttaacacttcattgcag

SEQ ID NO: 861819 - DNA, 100 bp, Homo sapiens
agctatgctcagcattcctactttgggtccttctctagcctccaccaatccgtgcccaacaatggctcagatgctggagaatcagatggaagtgcggaag

SEQ ID NO: 861820 - DNA, 98 bp, Homo sapiens
cgcgccccgaggtctccgcggcccgaggtctccgcccgcaccatgcggctgggcagtaaaatgtttattggaggcttgagctgggatacaagcaaaaa

SEQ ID NO: 861821 - DNA, 100 bp, Homo sapiens
acaataccaggcatacatttggcagaataaatgaaccaggttcagcttgttggtttagatgaggagagttcagagtttatttgcagaaacacctttgacc

SEQ ID NO: 861822 - DNA, 100 bp, Homo sapiens
gctggggtctgcagtgcagcattaatgggccgctgacatgaatatggagtagttttctctagcaaagtgaattttgtggcgaaaatctaagcaagcagaa

SEQ ID NO: 861823 - DNA, 100 bp, Homo sapiens
gccgagtcgcgcggaggcggaggcttgggtgaagcgtgacattcaggaaaacgatgaagaggcagtgcaagtcaaagagcagagcatcctggaactggga

SEQ ID NO: 861824 - DNA, 98 bp, Homo sapiens
ttccagagaagcctgtgaacaaagtgacagaccatgccaccactgccctgctccactatcagctgccccagatgccggatgtcgtggtccgatccttc

SEQ ID NO: 861825 - DNA, 99 bp, Homo sapiens
gatattaagccatcaaatgtggaacctatggaaaagggaggaaagatccctatccgttggacagcccctgaagccattgcccatcggatcttcaccaca

SEQ ID NO: 861826 - DNA, 100 bp, Homo sapiens
atcatatctcatgaggctgtaggctccttcaacccgtggctgatagctgaaaggttatcctgaatacatgtctaacaattttccttgcaacgttagctgt

SEQ ID NO: 861827 - DNA, 100 bp, Homo sapiens
ctcctgtcgatgatattccacaggaagaaacagaggaggaggaagtttctacagtaaatattgctcttaaacttggtgtgactgctaatgatgtaaagaa

SEQ ID NO: 861828 - DNA, 99 bp, Homo sapiens
caaggaggtagacatccttatcagcacagcacttattccaggcttccagcatagagaacaagcaggactggataaagcatatccgcgaagtcatccagg

SEQ ID NO: 861829 - DNA, 98 bp, Homo sapiens
gccaggcccagccgggccctggacagacaatgtggagctcatactgaaaaccatcaataaccagcacagcgttgagagtcaagacaacgatcagcccg

SEQ ID NO: 861830 - DNA, 98 bp, Homo sapiens
atttctaagcaggaactccccagaatgatttaaggctacagatggaagcccaacgcatttgcctctctctggtttattcaactcatgtggatcaggtt

SEQ ID NO: 861831 - DNA, 100 bp, Homo sapiens
aggagcagcgaggcactcatcctgcacgccggcgagtgccagcgatcagacctattgtgaccgcctggtgcaggacacgcctttcctgacaggccatggg

SEQ ID NO: 861832 - DNA, 100 bp, Homo sapiens
agtggaggaggcggctataataatagcaaacatcgatggcctactggggataacattcatgcagaacatcaggccaaatttgagtttcatcatggtgact

SEQ ID NO: 861833 - DNA, 100 bp, Homo sapiens
cctggggaatttaagatgccaaagcagctcattcacatacagcgatcttagaaatgaagttgaaaaattacgcaatgaagtgaatgaaagagagaaagca

SEQ ID NO: 861834 - DNA, 100 bp, Homo sapiens
cggtgatcatgtccattgaggagaagatggaggctgatgcccgttccatctatgttggcaatatggattaccgggccttggtgcatgagcgagatgaggc

SEQ ID NO: 861835 - DNA, 100 bp, Homo sapiens
aggttgccgctggtgatgacaagaaaggtactttacaaccttggaacagtgactccaccctgaacagcaggcagctggagccaagaactgagacagacag

SEQ ID NO: 861836 - DNA, 98 bp, Homo sapiens
gaagctatgcctcgtgggctccttaaaaaagttttatgaggtatgaaagatgggcaaaagatactatttcatggagaaggagatcaggagcctgagct

SEQ ID NO: 861837 - DNA, 101 bp, Homo sapiens
gagctgtagagaggaccccggtacatctgaaagccgggaaatgcactggagaggggtctcctgaaaaccctgcagaaactggatgaatatctgaattctcc

SEQ ID NO: 861838 - DNA, 98 bp, Homo sapiens
cctgccgcccctgcgccgccgagccagctgccaggtggaatggctcaagaatgaggatgtcatcgaccccacccaggacaccaacttcctgctcacca

SEQ ID NO: 861839 - DNA, 99 bp, Homo sapiens
atcactactcttggaatcaaagataaatccaaatactgcatatcagaaacaacaggtgtgtgatctgtatgatggactttgtttatggggacccaattc

SEQ ID NO: 861840 - DNA, 98 bp, Homo sapiens
acctggtgcgcttccggatcgggggcaagcggaaggtgatgcccaagatggaccagaaaaattgtatggcgacttcttgagctggaagctagaggaaa

SEQ ID NO: 861841 - DNA, 100 bp, Homo sapiens
gagaaaatatccaaagaacccaaaggatgcatctttttggattcctgtacaggagtggtgcaggaacaatcagtggattatagacataagttctccttgc

SEQ ID NO: 861842 - DNA, 100 bp, Homo sapiens
cacagagtggagaactgccttctgaaaggtggaatcctactcagaatgtgagttggatcatcatcgctgccacagtggtttccattatcattgtctttga

SEQ ID NO: 861843 - DNA, 100 bp, Homo sapiens
tgacgaagaggaagaccctcctgccaaaaggaaatgcatctttatgtcagaaacacaaagcagcccaaccaaaggatatatagatcaaggtcgaaatccc

SEQ ID NO: 861844 - DNA, 100 bp, Homo sapiens
aataagcccttaacatcgtttggatcagctccttcatcagagggtgaaaatcctatttataagagtgccgtaacaactgtggtcaatccgaagtatgagg

SEQ ID NO: 861845 - DNA, 99 bp, Homo sapiens
ttccttcgctaacgcctcccggctctcgtcagcctcccgccggccgtctccttaacaccgaacaccgtgccagaaccctgtggagcatcatgaactggg

SEQ ID NO: 861846 - DNA, 99 bp, Homo sapiens
cgagaaggagggaggggaaacacaaagccggctacgcgctgcgaggtcctggatgcctcatcccttagtttcaacaccagattgaaatggtttgccatc

SEQ ID NO: 861847 - DNA, 100 bp, Homo sapiens
aacaccgtgctcctcgaccccccactgatcgcgctggataaagatgcgcctctgcgatttgcaggtaagaatgattgatgttggctgatattggagtgct

SEQ ID NO: 861848 - DNA, 98 bp, Homo sapiens
tgggcgagaacgtccactgcgggccggcgaaagctgatgaaggatttgggggcagagcacttggcaggtcatgaaggggtccaacttctcgggttgtt

SEQ ID NO: 861849 - DNA, 100 bp, Homo sapiens
tggccttctacgttgtgaaaatgggattttgtcagggagaaaaagtatcggacagaagctgagatgtttggatggagctttgtctttgaggactttgtct

SEQ ID NO: 861850 - DNA, 99 bp, Homo sapiens
aaaaacctcagcgacctgatcgacctggttcagcttgttggtttagatgaggagagttcagagtttatttgcagaaacacctttgaccacccatacccc

SEQ ID NO: 861851 - DNA, 100 bp, Homo sapiens
acaaactgaccaagcacagagtcaccagtttccatatgtaatgcaaggagggaaatgataaagattttaccttgaatgattttggcttcatgatctttca

SEQ ID NO: 861852 - DNA, 99 bp, Homo sapiens
agagctgctgaagtacatgcttcatagtccttgcgtctctctgttcgtgctggccgtgggcagcgccgtctttgatgccatgttcaacgggggaatggc

SEQ ID NO: 861853 - DNA, 98 bp, Homo sapiens
cggcgaagctttacgttcatgtaaacagcatgacgtgaggccgtggatgcaggcattaagaactgataaatttcaaacggaagagagtggcagcattt

SEQ ID NO: 861854 - DNA, 100 bp, Homo sapiens
gaaactgcagcgagctgcaattgcccagaaaaagatgatggacctagccaaagtgagtctgctactgagactgccatgacactaccaagtgaatccagag

SEQ ID NO: 861855 - DNA, 98 bp, Homo sapiens
tcctgagtaactgggactacagataacatccctgaggacctcagagaccctttctacgttgaccagtatgagcaggagcacattaagccgcctgttat

SEQ ID NO: 861856 - DNA, 100 bp, Homo sapiens
cgagagcagatcacctttggaggatgagactgacaacacgtggatgttcaaagactcaacggatcaacctctccacttctcctacacctgcacagttaat

SEQ ID NO: 861857 - DNA, 100 bp, Homo sapiens
gagtggggtatttatctataccacaagcaaccacatcaaatatgctgtcaccactgggttgctccttgagggcaggacagttcttatggctttatccgtt

SEQ ID NO: 861858 - DNA, 100 bp, Homo sapiens
aacaactgctacatctgttggaggagccaactagcatggaagtgcaggctggtgcctctgccgagatcacccttttattccttatttggtagactcctac

SEQ ID NO: 861859 - DNA, 100 bp, Homo sapiens
gacgagatccagttcctgcgaactggctgcccctgatggggcctggcaatgactgagcaggcccagccccagaggacaaggaagagaaggcatattgagg

SEQ ID NO: 861860 - DNA, 100 bp, Homo sapiens
cgccatccgggagaagctggcctgggccaaggttgtacatcctggagacctgaagaattctgttgaagtcgcactgaacaagttgctggatccaatccgg

SEQ ID NO: 861861 - DNA, 100 bp, Homo sapiens
tgtcaggcaggacttcaggaagagaggaactccgcaccgtttgatcaggattcccaggtgtgactttgcagaagtaaaatgcccattcccatcaagacca

SEQ ID NO: 861862 - DNA, 99 bp, Homo sapiens
tgccaggccagctcgaagaaggcgagcagggtgcgggagagccccttgcagaagacgccgtacgagaacctcagaggatccagaacggcagctggtcct

SEQ ID NO: 861863 - DNA, 100 bp, Homo sapiens
tcgggacccagcggaggatggggtcaccgccctcagtgtctacctcacccccaagaccacaggtgaaccaggatgtgagccggcagctgcttcaggatgg

SEQ ID NO: 861864 - DNA, 100 bp, Homo sapiens
tcaaaaatgctgttgatgatgaggtcctgctgtactagccaccaaagcagctgctggtactaagaaatatgatcttagtaaatggaaatatgcagaacta

SEQ ID NO: 861865 - DNA, 98 bp, Homo sapiens
tccctggatatgcccgttcagtttacagttcattttttgcttggtttggaaaaatttcattagaggtgagtgttgtgcaagattctgtcaacatttct

SEQ ID NO: 861866 - DNA, 100 bp, Homo sapiens
gagccctggaagcagcagctcaccgaggacggggactccaaccatgtccaagggacctgcagttggtattgatcttggcaccacctactcttgtgtgggt

SEQ ID NO: 861867 - DNA, 100 bp, Homo sapiens
agtttgatggtgataagaaatcattcctggaggacattcggaagggaactcctttgaaaaaagatggtgaagaatgtactaacgaaggcaaaggaatagc

SEQ ID NO: 861868 - DNA, 98 bp, Homo sapiens
ttcaaggaaagcacattgcaatgcattatagcaatcccagacctaagtttgaagattggctttgtaacaagggaaatgtttcaacgtgcgcaagcgtt

SEQ ID NO: 861869 - DNA, 100 bp, Homo sapiens
catgacttggatatgctgacgactgtgcaggaagaaaacgagccagtgatttacaatagagcaagaacccagtgacttgattgtaaaaatttacagagcg

SEQ ID NO: 861870 - DNA, 115 bp, Homo sapiens
ccacgcctctgcaatcatgggtcaccaagagaggctgagagaccagggaagaggaagaacgtctgagaaataaaattcgagctgatcatgagaaggccttggaagaagcaaaaga

SEQ ID NO: 861871 - DNA, 100 bp, Homo sapiens
agctgaaagacgcctttcagaacgcctatttggagctggggggcctcggagaacgagtcctaggcattggaggtgatccttttaatggaacagattttat

SEQ ID NO: 861872 - DNA, 100 bp, Homo sapiens
gtggatttattaacacctcttgccactcagctgacatatgaaggactcattgatgaaatttatggcattcagaacataccaaatatgccccaacagcggc

SEQ ID NO: 861873 - DNA, 101 bp, Homo sapiens
ccgccagatcaacctggagctctacgcctcctacgtttacctgtccatggtacactgaggaggggacggctccgtcttcacattgtgcacagatctgagga

SEQ ID NO: 861874 - DNA, 98 bp, Homo sapiens
caagccgccggaggacgagccggacgccgacggctacgagtcggacgactgcaaaatggtggagtcaatgaagaaagtagcagggatggatgtggagc

SEQ ID NO: 861875 - DNA, 98 bp, Homo sapiens
gaggccgtgaagaccttcaatagcgaggcttgagaaagagatccaagatcttgaaaaagctgaactgcaaatctcaacgaaggaagaggccattttaa

SEQ ID NO: 861876 - DNA, 98 bp, Homo sapiens
tttatgatgtccttgatgttctcatcaagcccacgagtttagaaagcggcctcttacactgaggaagatgaaaatcacacagccaaagattgccttct

SEQ ID NO: 861877 - DNA, 98 bp, Homo sapiens
gccgccatcctcggcgcgactcgcttctttcggttctacctgggagaatccaccgccatccgccaccatgctcctgtccaaatatgacccccagaagg

SEQ ID NO: 861878 - DNA, 100 bp, Homo sapiens
ttcaatcacttggcgtgacttcactacttttaagcaaaagagttcctatatgatagtggactcttcagatcacgaccctggagaaaaagccagacttcag

SEQ ID NO: 861879 - DNA, 100 bp, Homo sapiens
atttgcgacagcaagggggttgtccacgaggaacaaattgtacatttgcccattctcaggaagagcttgaaaaatgactgtccacaacctgtacctgttt

SEQ ID NO: 861880 - DNA, 98 bp, Homo sapiens
cctcctgcttcccatcgaagctctagaaatgaatgtttccatctcttcagagatgaaccagatgactatgctcagctgtgtaacatccccgtgacggg

SEQ ID NO: 861881 - DNA, 100 bp, Homo sapiens
gaccgcccaagtctgcccttgtttgaggccttcacagcatgtggttttgtgcagggttgtgggaagaaaatgtattcctttttgagaggaaccaaacaac

SEQ ID NO: 861882 - DNA, 99 bp, Homo sapiens
gagccgcggcggggggaaaatggagcccttcaccaatggtgactgccaacagccagcccaatgtcgaatccagaaatgcaccacggacttcgtgtccct

SEQ ID NO: 861883 - DNA, 99 bp, Homo sapiens
aagaccacaaatttattcaagtcaattaccatcctttaccaggttggagtcattcgttgcccagtttgcagccaagaatgtgcagagagacacatcata

SEQ ID NO: 861884 - DNA, 99 bp, Homo sapiens
gcaagttaaacatacagtcgcctctgacaagccagattgattttgtagcccatgatgatattccttattcatctgctggcagtgatgatgtttataagc

SEQ ID NO: 861885 - DNA, 100 bp, Homo sapiens
agatcagaactgaggaacaaaaacccccatcctgggaaaaatggggaagctggttctaatagaagactgtatcccggtactgaagaggtacgccaaagaa

SEQ ID NO: 861886 - DNA, 99 bp, Homo sapiens
gcaggtcctcaagaagacaggcaaggaggtggtgctggaggttcgaacaactgccacagcagcaagcaacttgattgaagtatttgttgatggtcagtc

SEQ ID NO: 861887 - DNA, 99 bp, Homo sapiens
gctgggattggagattccacccaaacttgctggtcactgggagggcttccttcctcggctccaccctgtggatgtaatggcggcccctgctctgtcctg

SEQ ID NO: 861888 - DNA, 100 bp, Homo sapiens
ctttgtgcccttcaatgtttggaaaagctatatggagataaatggaattcttttaccatcttattaattcactctgttgcagcaatatcagtactacagt

SEQ ID NO: 861889 - DNA, 99 bp, Homo sapiens
gcagctggctggcttcagtggaccagtccagatggctgtggaggccaagtttgtccaggacaccctgaaaggagacggtgtgacagaaatccggatgag

SEQ ID NO: 861890 - DNA, 155 bp, Homo sapiens
ggacctttgagcatacaccgagagagtgaggagccagacgacaagcacacactatggcgctgaaacggattaataagccatgttatgatgctgcaagaagcccattgccagatgctggtgccttgacactggacttctcagcctccagaactgtg

SEQ ID NO: 861891 - DNA, 100 bp, Homo sapiens
aaggcacaggaatatccatgtcggcttgtagagagattgcaggtgctggaaatgtaaacaagaatagactgttcattcctgatggcttttagtctatact

SEQ ID NO: 861892 - DNA, 100 bp, Homo sapiens
gggcacccggttggagcccctgaagccacttaagagccagcagccacccccgcccagccaacacctccccaggcccaagggggacgcggccctgaagatg

SEQ ID NO: 861893 - DNA, 100 bp, Homo sapiens
agaagggggagctggatgacaatggagacctcaagaaggagatcaatgagcggctgcttactgctcgacagaacccagtgacttgattgtaaaaatttac

SEQ ID NO: 861894 - DNA, 98 bp, Homo sapiens
ttgcttatacgtatgataatctggctcctagtgagaaagatcagtctaaagaaaaggagaagaaagtgaaaaaaacaattccttcctgggctaccctt

SEQ ID NO: 861895 - DNA, 98 bp, Homo sapiens
acgatgctcttgcaggatgcctttccttttgggtcttagacagggtgtttgtgaaccgaagtttagcaatggaaaagataaagtgttttggttttgat

SEQ ID NO: 861896 - DNA, 100 bp, Homo sapiens
cgaagaagagaccatccatatttccagatcccgtaccagctttggatctcggacagcaactccagctcaaagtgcagcgcctgcacgatattgaaacaga

SEQ ID NO: 861897 - DNA, 100 bp, Homo sapiens
tgctagacaccggaccaaaatgaggcgtaagaaacgctttgcaaagcaaggagctggaggagggaatgatattcagtggtgtttttctcaggtgaaagga

SEQ ID NO: 861898 - DNA, 100 bp, Homo sapiens
gggacttggtgttcgctaagatgaagggctaccctcactggcctgccaggattttctggcatccttaaatcttgtgtcaaggattggttataatataacc

SEQ ID NO: 861899 - DNA, 104 bp, Homo sapiens
gtaaggtgcgcagcagaaagcatttaaccagcatggctacttcatattttggaaagcagtttttaagacaagtttctaccatgaatgaaatgaagagttattct

SEQ ID NO: 861900 - DNA, 100 bp, Homo sapiens
tgatgtactgaagcagcatatcaatcccaataagacatgtactaggttttgacaagcttgcatcatgcgtgagtataagctagtcgttcttggctcagga

SEQ ID NO: 861901 - DNA, 98 bp, Homo sapiens
agcaacatccgcgagttcctgcgcggctgcggggcttccctgcggctggaggtctggcttaccacacgctcctccccattcccagtgagccgcttttt

SEQ ID NO: 861902 - DNA, 98 bp, Homo sapiens
tgggaatagacacccgaaacattatacaaagccagcctgcgtatttaacaatgtggaatattatgatggagacatgtttcgaatggacaactgtcggt

SEQ ID NO: 861903 - DNA, 99 bp, Homo sapiens
aaattcttaaaaaggctcagaaagatggatttttgcatgagacgcttctggacagtattaattttaaagacccacagtttgctgaagattacattttta

SEQ ID NO: 861904 - DNA, 100 bp, Homo sapiens
cacagaatttctgcaagtaattggtgaggaagaaaatgcttcccgttcttctggatgggcatcctatcttcatagttggtctggacttcgataggttgat

SEQ ID NO: 861905 - DNA, 98 bp, Homo sapiens
atcctaagactcgaaggcagcacaggacctggaaaaattacattgatggaatggggagaagatattaaagcagtttcaaaagatgaagcagtgatgtt

SEQ ID NO: 861906 - DNA, 74 bp, Homo sapiens
gtgcctccattcccgggaggggggagcggcgttggaggccaccgtttccagagatcgagatggtgatcatggag

SEQ ID NO: 861907 - DNA, 100 bp, Homo sapiens
agccagcaatgcctccatgaacaatctcacccaattactctgctcagttcctgaagaattcttgtacaaccctttgaccagagtttatggagaacctcac

SEQ ID NO: 861908 - DNA, 98 bp, Homo sapiens
aagacagtcctcgtcagcactgactttcagctatggaatcggttggaaaagagactgttcaaaccactgaggatcagattttgaagagagatatgcca

SEQ ID NO: 861909 - DNA, 100 bp, Homo sapiens
cggccttcctggagctcttcatcctccgcctggcgtacagccactatcgaaaacgatcggcatcccggggtcgctctggaagtcggtctagaagtcgctc

SEQ ID NO: 861910 - DNA, 100 bp, Homo sapiens
agcatcaaccctgatgaagctgttgcttatggtgcagatctcttttcgagcacatataccgccattgggactgaaagtgtataagattttggaatcagca

SEQ ID NO: 861911 - DNA, 99 bp, Homo sapiens
tgaaggcagtccccatccactagtaggaagctgctttgaagacttagcagagaattcaaagaagctttttcactatttgacaaagatggtgatggaact

SEQ ID NO: 861912 - DNA, 100 bp, Homo sapiens
cgttcaatggcttccagaggccgacgatctactatgtgatgtcagggcctgcgtggtgaggaagaggatggagatgaagatgaggaagctgagtcagcta

SEQ ID NO: 861913 - DNA, 100 bp, Homo sapiens
gccgcctcggccgaccagggacctgcccgcctgcggctgctccggaaactctataaaacaggtcgggagatgcaggagaggatcatggacctgcttgtgg

SEQ ID NO: 861914 - DNA, 98 bp, Homo sapiens
aaagaaccagcagaatcagcagcctgggcagtctccccaaggcatgcggcccatgagcaacatgatgaacaaggggagaagaattgccttcagctcca

SEQ ID NO: 861915 - DNA, 100 bp, Homo sapiens
ggcactgtgagaaaattgaaggctccaaatccttagctcagagctggaggatgaaggatcggaaacgcttcgttaagggactcaggcagtacgggaagaa

SEQ ID NO: 861916 - DNA, 112 bp, Homo sapiens
tcatcttgtccagaactctgtcaaatgaagaacactttcaagaaccaggagcagcatttctttctattactactatctatgctgagactggttcaggttttgtagtaccaag

SEQ ID NO: 861917 - DNA, 100 bp, Homo sapiens
aagataaatccaaatactgcatatcagaaacaacaggattggattcagcatcaaaatacatctactcatattgagagctgtcgacagttacgtcaacagt

SEQ ID NO: 861918 - DNA, 100 bp, Homo sapiens
ctcccaacgtgtggcggctcgcgacccccggcaacccggagaaggtctacagagcggcctgcgccagcgaatatgttccatttaaggctctgaagatggg

SEQ ID NO: 861919 - DNA, 98 bp, Homo sapiens
aaagagacccgttcagagtcctacagtggcagcctctctacatatgacatcgtgatcactacctatagcctcgtggccaaggagattcccacaaacaa

SEQ ID NO: 861920 - DNA, 100 bp, Homo sapiens
cagacgaagacagtccctggatcaccgacagcacagacagaatccctgctaccagagtccaatgtgctgattgctgctaacagtcagggtacaattaagg

SEQ ID NO: 861921 - DNA, 98 bp, Homo sapiens
aatggctttacagaatcttaaatagaatacagtttgacatgacggcaaaaaatgttaccccacagcctatccagcagctgcccctgcctacaatccca

SEQ ID NO: 861922 - DNA, 99 bp, Homo sapiens
actttggaagaagtatatgcaggaaattttgtggaagttcctaaaagtaaagctttagaggccaccaaattggcaattgaagctggcttccgccatatt

SEQ ID NO: 861923 - DNA, 98 bp, Homo sapiens
agacatacaaaaggaaaaacatagagcctactcacgcgcctttcatagagaaatcccgcagcggaggcattctggacatggcaagacatgtgccactc

SEQ ID NO: 861924 - DNA, 99 bp, Homo sapiens
tgcgaaggccgggacccggttccccggcccacagtgggggtgtgcaaacccgagagaactgggaatgaatctgaagtctgctgcagtaaaacacagaag

SEQ ID NO: 861925 - DNA, 100 bp, Homo sapiens
catgtttgaatttcagatgtgttcctcaatgaatcactgcctggaggtgaaaagaaagttcgcaaattacttccggaacgtaaacctgaaccaaaggaag

SEQ ID NO: 861926 - DNA, 100 bp, Homo sapiens
attgaaaaaatcgtctgtctcctgttttctaggtggaaagaatctgatgagccttttaggcctgttcagtatttgtgtggaagtaatcgaaaagacaaca

SEQ ID NO: 861927 - DNA, 99 bp, Homo sapiens
gaacgcacagaggaacgagctgagctggcagagtcagcccacaggcggttttgtgagctgcttccccaggagcagcggagcgtggagtcgtcacttcgg

SEQ ID NO: 861928 - DNA, 100 bp, Homo sapiens
gcattgtccattcgaagtgttggcagtcacaggcatccaagagtaaggtatgcagcctgtaatgccgtgggacagatggctacagattttgcacctggtt

SEQ ID NO: 861929 - DNA, 98 bp, Homo sapiens
caaggacagcagttgaatccatatttgagactcaaagttagacgtgaccatatcatagatgatgcacttgtccgggccaaccaagccctcgagcagtt

SEQ ID NO: 861930 - DNA, 101 bp, Homo sapiens
cgcggggcggactaagaagggagccgcctgctgcgaggccgccgggctcccgcagacaactaaactggtaggtggcagcagaggaaggaattcttcagatt

SEQ ID NO: 861931 - DNA, 100 bp, Homo sapiens
aaggaggttgccgacgccatcaggctcaacgaggaactcaaagtggatgaggaaactgctggagccagttctgcttctcggcaaggagcgatttgctggt

SEQ ID NO: 861932 - DNA, 99 bp, Homo sapiens
tgtggcccaggcaatcttttaccaagacctccaggtgattataatgcaagcacccagtgccccaccccaaggtgtaactgtatccaagaatgatggaaa

SEQ ID NO: 861933 - DNA, 100 bp, Homo sapiens
atgaataaactggaggataagcaggaccagatgataccatgaagagaagtttacaggccctctattgccaactgttaaacaccagagaagcctatgatga

SEQ ID NO: 861934 - DNA, 100 bp, Homo sapiens
gaaccatcacctgcattggttccatccttgactgttactacagaaaaatctcttgcatggcaccaagaatgttaccaattcaagcagtttaagattgcca

SEQ ID NO: 861935 - DNA, 99 bp, Homo sapiens
tggatagggatggccacattaagctcacggactttgggttcgccaagaagctggtagacaggaattctgaagtgtaaaaaggacaaagcttatgaaggc

SEQ ID NO: 861936 - DNA, 100 bp, Homo sapiens
gtcagctgtacagccacactaactgtgacagggagttatggtgggtatgggtcagaaggactcctacgtaggtgatgaagcccagagcaagagaggcatc

SEQ ID NO: 861937 - DNA, 100 bp, Homo sapiens
acttcggctgcaccgttggcctcaaggactctgtcaatgctgttgtcttcgttgccctgggcacctccatccctgtatgatgagctgccgcactacccag

SEQ ID NO: 861938 - DNA, 100 bp, Homo sapiens
ttaagaggttatttcaagtatggagagaaatacgttttcaatggattgccacagtaaggaggagagacttcagcatgcaaaccttcatctgttcggcttg

SEQ ID NO: 861939 - DNA, 100 bp, Homo sapiens
cgccgctaagggacaccccagaagttagcatcagtgggactcggaagctccgatctcaacaaattcttgagtatcagaacaccaccttctttggtggaac

SEQ ID NO: 861940 - DNA, 100 bp, Homo sapiens
cctggccacctgcgaccacccctacattgtgaagctcctgggagcctactatcacgacgggaagctgtggaaaaggcgacggcggattgacagaagtatg

SEQ ID NO: 861941 - DNA, 99 bp, Homo sapiens
tcctttcttgttttctcaacattcacaatgtccatatatagaatttgaatcatttgacaagaattggcagagggggtcgatttgggaggaaaggtgtgg

SEQ ID NO: 861942 - DNA, 50 bp, Homo sapiens
cggagatggtgcagaagatggaggaggagatcttcgggcctgtactgtct

SEQ ID NO: 861943 - DNA, 98 bp, Homo sapiens
ggacactgcatcgtcaaactgatcccctggccgttggaggagcagttacctttccagctcacccccagggccttatggtcaagaaatgtatgcgtttc

SEQ ID NO: 861944 - DNA, 98 bp, Homo sapiens
ttgaagtctgggatgtagtagacaaagggcaactccaacaacattgccaccgtggacatctccgcaggcttcgtgggcttagacacctacgtggaaat

SEQ ID NO: 861945 - DNA, 100 bp, Homo sapiens
cggaaagcggcggactatgtccgaagcaaggatttccgggactacctcatgaggcctgctgaattagccaccaagtacgcaaacttttcagagggagctt

SEQ ID NO: 861946 - DNA, 99 bp, Homo sapiens
tctgggaaactcagcctgtgaccccagcgtgggtgaagataggatcaagatggccatgtggcagggctatcagctgtactctgaactgtagttgccaaa

SEQ ID NO: 861947 - DNA, 99 bp, Homo sapiens
ctgcaactggcgccgccctgaccccaagattccagatgttcctgtggaccccagtccagaaccttctgataacttaagagagattctccaaaatgtggc

SEQ ID NO: 861948 - DNA, 100 bp, Homo sapiens
gtgaaggcccccaggatcaagaccaagaacctggtcagtctctgctggatgaaccgaatcctaacagtccagccaatagccaggcagcacagctttatca

SEQ ID NO: 861949 - DNA, 100 bp, Homo sapiens
ggaatcctctccatctggttcgaagtctcagcggtattctggtgcttatggtgcctcagtttcatcaggctggggagaaatgcctaatgttcactcaaag

SEQ ID NO: 861950 - DNA, 100 bp, Homo sapiens
tctcccatgtctactcgcaggcgtcatgttgggaatcggaattggcagagggggtcgatttgggaggaaaggtgtggctataaactttgttactgaagaa

SEQ ID NO: 861951 - DNA, 100 bp, Homo sapiens
aagctgaacggatgccagagcaaatcaggctgaaatatcctgtggagcacccagacaaattcctgaagtttggcatgacaccttccaagggagttctgtt

SEQ ID NO: 861952 - DNA, 100 bp, Homo sapiens
ggatgaatactttgaggaaatcatggaagaatatgaagatattagacaggaccattatgagtctctcaagagtctgatcactgcgcatgagcagttcaag

SEQ ID NO: 861953 - DNA, 98 bp, Homo sapiens
aagccaaagatcttgcacatgaagctacaaaactgcaacagccaactcagtttataaatccagaaacacctggctatgttggatttgcaaacctcccc

SEQ ID NO: 861954 - DNA, 100 bp, Homo sapiens
ctgcagcgtgcagccctgggagagcctttcctccaacagccacaccaggtaagtcagtaatgttgtatgcagcagaaatgatacctaaactaaaaacaag

SEQ ID NO: 861955 - DNA, 100 bp, Homo sapiens
aaaaagtgtgacttggcagctggtcatcatcagatttgaaatatttaaagtggatacaaaactatttcagcaatgcagacaattaagtgtgttgttgtgg

SEQ ID NO: 861956 - DNA, 100 bp, Homo sapiens
agcctcccgagcagctgggactacagggctgcaagtggaattcatcaaccccatcttcgagttctccagggccatgaatgagctgcaactcaatgatgcc

SEQ ID NO: 861957 - DNA, 99 bp, Homo sapiens
acatggactccaataaatacattgagcatctgctgactcagcttgaggagcaacacaggagtctctggagaatagagacattgaagtttgggacaagat

SEQ ID NO: 861958 - DNA, 99 bp, Homo sapiens
cacaaccttcaagaaattcgggaaaatgtttataggaggccttagctgggacactacaaagaaagatctgaaggactacttttccaaatttggtgaagt

SEQ ID NO: 861959 - DNA, 100 bp, Homo sapiens
atggagccctgcatatgattggctctttagctgaaatacttctgaaggtgaggccgcagcgtttgatgacgagtggcggcgggagacctcccgattccgg

SEQ ID NO: 861960 - DNA, 129 bp, Homo sapiens
gggatttctttcacggtttgataatgtccttcccgtcagcctggcatttgacaaatgtacagcttgttcttccaaaagcatgcaagcggcaagatgtcctacagatgaattatctttaaccaattgtgc

SEQ ID NO: 861961 - DNA, 100 bp, Homo sapiens
acgagctgcaggagaccctgggcaaaggcacctacggcaaagtcaagcgggccaccgagaggttttctggccgagtgaattcctcagagagagaagactg

SEQ ID NO: 861962 - DNA, 98 bp, Homo sapiens
actcctctctgttaatggagtgaacttggagcgtgatgcccagaagtgtgtgaactggtctgtgaccacaaagatgagaaccgcatgctgagattggt

SEQ ID NO: 861963 - DNA, 100 bp, Homo sapiens
gtgaacaacctcaaatactgctgggctgttgataatcaggtgtatgtggccacagcctctcctgcccgggatgacaaagcctcctatgttgcctggggac

SEQ ID NO: 861964 - DNA, 134 bp, Homo sapiens
gggtccggatagggctgacgctgctgctgtgtgcggtgctgctgagcttggcctcggcgtcctcgggggtcaggcccagccccaggcccagtggtattactgaattcactgaatgtggatgcagtatgtgagaa

SEQ ID NO: 861965 - DNA, 100 bp, Homo sapiens
gtgctaagtggatcctctggccagctgactgcacttcttttttgagaaaggaaggaatatatcctgactgattgtgtttatctcagtggatgatctggaa

SEQ ID NO: 861966 - DNA, 98 bp, Homo sapiens
agatggctcgagaatacagagagaaaattgagacggagctaagagatatctgcaatgatgtactgttggattggatgctgctggcaagacaaccattc

SEQ ID NO: 861967 - DNA, 99 bp, Homo sapiens
atctgtgtactgtgtaacttttgatcgaactggcagacggatatttactttatctgatgatggccgctatgtcttgttatcaataagggaaggatgtga

SEQ ID NO: 861968 - DNA, 100 bp, Homo sapiens
gctagagaagcagatggccttgtttttggacaaaaggattgccatggaaagcataactgtgtatcagacagttgcacacccaggaatccaagggaacctg

SEQ ID NO: 861969 - DNA, 100 bp, Homo sapiens
cagaagagccaggaatcgaaatgcttcatggaacaaccaccctggccttcaaggctcaacagtcactggagcttatccagtcaaaaatagtaaaagctgc

SEQ ID NO: 861970 - DNA, 123 bp, Homo sapiens
tgacatacatttttgggaaggtagaagcatttggcacagaagtgctgccaggagaaactaagttgctgaacgggtttaccaagaagctcactgagaggcgacacaaacggccaagaacatgaa

SEQ ID NO: 861971 - DNA, 99 bp, Homo sapiens
ggaagtggagcaacagtcagcctgcagatttggcacatatggggcggtcaagagaagaccccgctgggatggatgaggtttcgcataagctcttggaga

SEQ ID NO: 861972 - DNA, 98 bp, Homo sapiens
agtccagccctagccaccaggaacctggaaccctgcagacgtgccagacgcacctgcggcccccaagatcagcaacgtgggagaggactcctgcacag

SEQ ID NO: 861973 - DNA, 100 bp, Homo sapiens
tgtgtccggaggtttgcaggggtgcagtgtgtctggtcttatgagaaaccaccatcatgggttcgggtcccatagaccccaaagaacttctcaagggcct

SEQ ID NO: 861974 - DNA, 100 bp, Homo sapiens
agagctgaaccagtaccggcgtgccaaggagggcagcagccgcggccgagggccaagaccagcttcaagtctccatggtaccagaaaacaacaacctcac

SEQ ID NO: 861975 - DNA, 100 bp, Homo sapiens
gaatggtatctcaaagggaagaaactagagcccagcgataagattgatgaactcccagagggcgctgtgaagcctccagcaaacaagtatcctatcttct

SEQ ID NO: 861976 - DNA, 100 bp, Homo sapiens
tcgaccagtccaagctgcctggagtcaaggaagagcgtttcccaaagtgtattctgcggaactagcacctactgtgttctcaacaccgtgccacctatag

SEQ ID NO: 861977 - DNA, 98 bp, Homo sapiens
cggaacgcgcttgcttttaggagacagccactttctgtgtggtacgctggattcaaggatgcctggtctctgctggtggttctgaagccaaacctctg

SEQ ID NO: 861978 - DNA, 99 bp, Homo sapiens
cttgatccagtatgcttatacagactggtgtcgttcagtatttctacattgaagactggcaattcgttaatgattatcgacatcctgtcagtgtgaaaa

SEQ ID NO: 861979 - DNA, 100 bp, Homo sapiens
atccctatgtccagtttgaaatccttggcactacctatagtgagacttttggcaaagacatgcgcaaggattacatcccagtagaccaagaagagttaag

SEQ ID NO: 861980 - DNA, 98 bp, Homo sapiens
atggtgaaaatctgagaccaatagttattgatggcagcaatgtggcaatgaggttccagttacagctatatcagagaatgagttaatctcctcagaaa

SEQ ID NO: 861981 - DNA, 100 bp, Homo sapiens
aagaaacttctttactggaagattcgtcagtgacttttcctgtggtaataatagatggatcctgagcttgaaaaaaaactgaaagagaataaaatatctt

SEQ ID NO: 861982 - DNA, 98 bp, Homo sapiens
gactccctgcctcctgagtcccagcagccatttggcagttctccagatgacttgctatgtccacatcctgcagctgagtctccgagtgatgagggagc

SEQ ID NO: 861983 - DNA, 100 bp, Homo sapiens
tgctgccgccggcgaaggaggaggcgttgccggccctgtatgatgagattcgtcagtttcgcaaggcctgtggggaggctcatcttaaaactatattagc

SEQ ID NO: 861984 - DNA, 98 bp, Homo sapiens
acacttgttacatgaatgccacagttcagtgtattcgttctgtgcctgaactcaaagatgcccttaaaagagtccgcttagtggaaagaggatcccct

SEQ ID NO: 861985 - DNA, 100 bp, Homo sapiens
aaacgggcccgggtggcagagttgccaaccccagagctgccgagcaaggatgcctgagaaatgttggctaccagggtatttagcctagttggcaagcgag

SEQ ID NO: 861986 - DNA, 100 bp, Homo sapiens
tgccacttcttggagtagaagccgacagagagctgtttggaaacttctccttcacacaccaggaaattgtagtgatgatgctgtttctcaccattctggg

SEQ ID NO: 861987 - DNA, 100 bp, Homo sapiens
tctgcttcctggtcatgcactacagaggacagactgtgaaagacagggcgagtggataagaactacccactggtcactgggcacactgcccctgtgctgg

SEQ ID NO: 861988 - DNA, 100 bp, Homo sapiens
cggcggcggagtgtaggaagaggcactgctgagggggcgcgaggggaacggaggccagagctgcggctgttgcaaatgagtccggactaaattttatatc

SEQ ID NO: 861989 - DNA, 98 bp, Homo sapiens
tactgctgaggactggggcctcattttggatatctgtgataaagttggtcagtctcgcactggctgccactggtgacatgccaacttaccagatccga

SEQ ID NO: 861990 - DNA, 99 bp, Homo sapiens
gcctggaaggtgcgtgtggggctgggtctcggagtgggagacgtggagtgcagggtgtcaaattgagaaccaggtagatccccaccacctacagtaaaa

SEQ ID NO: 861991 - DNA, 100 bp, Homo sapiens
aatcttgactgatatgaaagagttcaccaagcgcagaagaacattatttgaagcaatgccagaggttgtaaagctctctgaaatagtgaccttagcgaag

SEQ ID NO: 861992 - DNA, 114 bp, Homo sapiens
atatatcacccataatcggaatgtgatcacagagcctatttacccagaagtagtccatatggatttgaagcattcattaccatctggacttggtctctcagaaacccaaattac

SEQ ID NO: 861993 - DNA, 118 bp, Homo sapiens
agatcttcaacctgccaaaaaagtctcaccatgcaaactcccccacagcagaaacatctgccaaagaaggtctgctgctttggtgtcagaggaaaactgctccttatagaaatgtgaa

SEQ ID NO: 861994 - DNA, 99 bp, Homo sapiens
gaaaaacagaacgttgcaaactctggaaaaaaacttggcacttcaaatgcttcaccttcagaaggcgcaccactagcaggaagttatggatgtactcct

SEQ ID NO: 861995 - DNA, 100 bp, Homo sapiens
caagagaaagcagcggtcagttttcagagatgtcctgagggcagtggagatttgataatgggctgcattaaaagtaaagaaaacaaaagtccagccatta

SEQ ID NO: 861996 - DNA, 100 bp, Homo sapiens
agaataatctgcttccatcccgccagtttggagaagtatatcagagaattccctggtagcaatggacttctcaggccagaaaagcagagttatagaaaat

SEQ ID NO: 861997 - DNA, 100 bp, Homo sapiens
cccactctttccgccctaatggaggtctccagtttcggtatgatctcgtgaaatcttgagagaaactgaatgacgaatgaaactattgttcctgtttcac

SEQ ID NO: 861998 - DNA, 98 bp, Homo sapiens
tagatcttgtggccaagagttcagaccgtggcgaagtggagagtgacatgcagttggatggcggtgactgcgtgagacatattgatgtctttgactgt

SEQ ID NO: 861999 - DNA, 100 bp, Homo sapiens
gttagacttgtttcttatatgtgatgccattccagcactggactcatggaggctgagcatttattcaggtctcttgcagctgaatggggtaaatatggaa

SEQ ID NO: 862000 - DNA, 100 bp, Homo sapiens
cccagagcgcgctgcacgagcagaagactctgcccggggggtacaagcaattttccagtcttgaccctttatctgttgaccaagctaaggcagaaaccag

SEQ ID NO: 862001 - DNA, 100 bp, Homo sapiens
gagagctattagagattgtgaagaagaatttcgatctccgccctggggtcattgtcagggcatttgtttacctgagcaatctgctgtatcccgtgcccct

SEQ ID NO: 862002 - DNA, 98 bp, Homo sapiens
cgggggatgactgattctcctccgccagaacccagcgggtgccgcttctccacccgaggcttccacctccaacgagccatgttccaggctgcaggagc

SEQ ID NO: 862003 - DNA, 100 bp, Homo sapiens
tctctctcatcgaggcccaaaccgccaaggccgtggagaagtgtaaagatgcaggattggccaagtccatcggggtgtccaacttcaaccgcaggcagct

SEQ ID NO: 862004 - DNA, 100 bp, Homo sapiens
cgcagaggccgactgggagagtgtctccagcatcctgcaagtggaacagatggagtcggataactgttcaggaggagatgatgactggacccatctgtct

SEQ ID NO: 862005 - DNA, 99 bp, Homo sapiens
tggttaatagtggcatggaagatccatttgttcacctgtggcagatgatatcatccagcccgctgcccccgcagacctggaaagcccaaccttagctgc

SEQ ID NO: 862006 - DNA, 98 bp, Homo sapiens
ggatgaaaagaatgaacactgtccttcaaaacgaattctgaaggaagatttccattaggtaatttgtttaatcagtgcaagcgaaattaagggaaaat

SEQ ID NO: 862007 - DNA, 100 bp, Homo sapiens
ctactgcaacttcaagtagtggaaggagtacagggaagtctataagctttgcaacagaattacagagtatgattttataggcaagcaataaacagcaaga

SEQ ID NO: 862008 - DNA, 100 bp, Homo sapiens
aattgacagagaggggaaaccccgtaaagtggttggttgcagttgtgtagtagttaagttgagccccatatgggggttggcaggcagcagagaggcccct

SEQ ID NO: 862009 - DNA, 100 bp, Homo sapiens
ggcatgtttaaaagttcccgaagcaaattcttcttggatggacacagttataagacatgtaaggcaaacattggtgggcaccgatcttcctgttcattct

SEQ ID NO: 862010 - DNA, 98 bp, Homo sapiens
ataacgcagatcatctctggaaaggatattgatccgcctcatgtaaagtatgcttagttcctttccagtggtatattgatgatgttaagaagttcaaa

SEQ ID NO: 862011 - DNA, 99 bp, Homo sapiens
ttgactactggggccagggaaccctggtcaccgtctcctcagggaatgctggcctgctggccttggcagatgttttctcagaggattcatcctcctctc

SEQ ID NO: 862012 - DNA, 100 bp, Homo sapiens
gccaccctgacctgcgatgctcgcagcaacccagagcccacaggctataattggagcacggaccttacacatcccgtcctcggtcccctgagataccttg

SEQ ID NO: 862013 - DNA, 51 bp, Homo sapiens
gcctcctgagtaactgggattacaggaggaaaactccctcttcgtcatgac

SEQ ID NO: 862014 - DNA, 131 bp, Homo sapiens
gagagttgtgggctggtatcattcccatcctcatataactgtttggccttcacatgttggattttctgccgtctcttggcaaaaatggcaaataatgatgctgttctgaagagactggagcagaagggtgc

SEQ ID NO: 862015 - DNA, 100 bp, Homo sapiens
ttgcgcaagcaggtagcgccgctgctgaagagtttccaaggagagggatcgtgggactttaccagatcggtttgtaataacacctcgaagacgctatccg

SEQ ID NO: 862016 - DNA, 99 bp, Homo sapiens
cggcaaatgctgcaggaactggtgaacgcaggatgcgaccaggctcatccattctttagacacattaactgggaagaacttctggctcgaaaggtggag

SEQ ID NO: 862017 - DNA, 100 bp, Homo sapiens
ccttttaaaggtctgatcatcaattgtctctctgggcggccacctatgagacttcatctgtgtgtccttgcctgcattaattgaacaaggagagggattt

SEQ ID NO: 862018 - DNA, 98 bp, Homo sapiens
gcatcctgggcaccatcaactccatcgtgatggcctttttaggagttcagaccataaatactgtatcagaagttattcgaggctgccaagtaaaccaa

SEQ ID NO: 862019 - DNA, 101 bp, Homo sapiens
gaaaaacttctttcacatggtacaaatattgaagaatgcagcaagtctccggagtagagatgaagagagaatttctaaacctggggctgtctcaactcctg

SEQ ID NO: 862020 - DNA, 100 bp, Homo sapiens
attcggccttcttggctccttccctgggctcttttatattgctggcaaaatagtgggaagtcgagacaacatgagtgtgattttgatctgttttccaaat

SEQ ID NO: 862021 - DNA, 100 bp, Homo sapiens
actacttataggggccctgagaccaacccccggccaggcagtatcatgtttcactccttcggcaacaagcaagggccccagcacgggatgctgatcaata

SEQ ID NO: 862022 - DNA, 100 bp, Homo sapiens
gttaaaacgggtcagttggcagccatcaaagttatggatgtcactgagacaaatgctgtgcttcatgaagttaaaagagaggggctccccgtggaacaaa

SEQ ID NO: 862023 - DNA, 100 bp, Homo sapiens
gcctaagctgcccctgtgcgacagcctcatgatctggaacttgagagagatttgctgggataaggcgggacatttctttgatctcccggacttcttatcg

SEQ ID NO: 862024 - DNA, 100 bp, Homo sapiens
agcgacagcggcgagcagaactacggcgagcggggacttcagtactagtgctaataacatccagattgataaaaccaagcctttgtggcacaactatttc

SEQ ID NO: 862025 - DNA, 98 bp, Homo sapiens
cagcccgtttgtgaatcagcgtgccggtggtggtgtgcacattgagccccggtatagacagttcccccagctgaccagatcccaggtgttccagagcg

SEQ ID NO: 862026 - DNA, 99 bp, Homo sapiens
gaaaaaacaaaacaaatatgaactatgataagctgagcagagccctgcgatactattatgacaagtccgtggtggatgactggattgaatcatataaac

SEQ ID NO: 862027 - DNA, 100 bp, Homo sapiens
atgaatcaagaatcaatgcgtggaattctcctacacttcctatttatgagagcaatatactttgctgcttattcaaactgcaaggaaaagttgaatgatg

SEQ ID NO: 862028 - DNA, 98 bp, Homo sapiens
tgaggaggaggcgcgtggtgagaggagaggtgctgtgcccggccctgggctggatgctgggaacccagagtgaattcgaagtggcccggcccagggga

SEQ ID NO: 862029 - DNA, 99 bp, Homo sapiens
ctgcgcaaggttgttggggagttcaagagtcttgctgtgtcgcccaggctggagtacaatggcatcatctcacctcacctcaacctccgcctcctgggt

SEQ ID NO: 862030 - DNA, 99 bp, Homo sapiens
gagaaaaggccaaagagaggtgttctgaacaagttcaagatctttccctagatcattctgacctagttgcagagttgttgaaggagctgtctaaccata

SEQ ID NO: 862031 - DNA, 100 bp, Homo sapiens
tcctgcggaaaacagagaggttccagaaatggctgcaggccaagcgcctcacgccggacctggtgcagttgacgaaggatcagagattggtgtattcggg

SEQ ID NO: 862032 - DNA, 100 bp, Homo sapiens
aaagaggtcccatcaaaaccaaacagcatgttggagacttgggcaatgtgactgctgacaaagatggtgtggccgatgtgtctattgaagattctgtgat

SEQ ID NO: 862033 - DNA, 98 bp, Homo sapiens
caacagtggcaatgagaccagtggaagcagcaccatcggggagacaagcaactcatgggcctcctgagtgacccagaattaggtccagcagcagctga

SEQ ID NO: 862034 - DNA, 99 bp, Homo sapiens
gaaagttgtcctccttgttagaactgataagcgaagtgattctcttataaggtacattttacatactttgggaaaaaaaaacgttgctgaagttactag

SEQ ID NO: 862035 - DNA, 99 bp, Homo sapiens
atggatgaagcaccgaacaaactggagcccgcaagcttagaccatgctcagcctccaagcagccttgtcatcgacaaagaatctgaagtttacaagatg

SEQ ID NO: 862036 - DNA, 100 bp, Homo sapiens
agatgctcagaacagagcagaaatcaaattgaagagagcagttgaagaagtgaagaaattattggtacctgcaactccagggattagagctcgatctgca

SEQ ID NO: 862037 - DNA, 100 bp, Homo sapiens
ctcccaagtggctgggattacagtacttccagcggcaatgtaagcaacagaaaggatgagacaaatgctcgagatacttatgtttcatcctttcctcggg

SEQ ID NO: 862038 - DNA, 100 bp, Homo sapiens
ttcagaatgttggctaccagggtatttagcctagttggcaagcgagcaatttccacctctgtgtgtgtacgagctcatgttctagggtacatgtgcacaa

SEQ ID NO: 862039 - DNA, 100 bp, Homo sapiens
cttcaactgcacccactgtgggccaatagcttcaccgtctcctctgtcgccgccccttcctggcttcaccgtttcatcattggcaagaaagggcagaacc

SEQ ID NO: 862040 - DNA, 100 bp, Homo sapiens
agcctcggctttgtgcggcggtggaggtatataaacaggttccgccaggctcagcccaccagtcgagaggagcgccagcctgcaggcccaaccccagctg

SEQ ID NO: 862041 - DNA, 100 bp, Homo sapiens
atccttgctctgcgatggactattccctggctgcagccctcactcttcatggtcactgttctggacttcagtgaccccttcagcactgaagtgaagccga

SEQ ID NO: 862042 - DNA, 100 bp, Homo sapiens
gggtcaggtcacagagaagctgcagctgacttacatggaggagacgtgtcgtcactatgtggcccatgtgaagtgtgaggatgatttggctgagaagagg

SEQ ID NO: 862043 - DNA, 100 bp, Homo sapiens
tagtgtgctgcagcataagatggaagaacttaaagaaggcctgcggcaaagagatgagcttattgaggtgagcgagtgctgtgctttcatgggcctcttc

SEQ ID NO: 862044 - DNA, 100 bp, Homo sapiens
cttagaagaggaggtgtatcccctgttaaaaccatatgaaagcgtgatgaagtgacgagtagcacagcccctctatggtttagatggcagtgctgcaaag

SEQ ID NO: 862045 - DNA, 98 bp, Homo sapiens
aagacctccaccgtgagaacaccgtctaccgcaccaatgttgttatgaattattcagagatcgagtctaaggttcgagaggcaacgaacgatgatcct

SEQ ID NO: 862046 - DNA, 109 bp, Homo sapiens
ggaggacgtttattagagtatgctgagctgctgtggaatgacagaagattggattcagcatcaaaatacatctactcatattgagagctgtcgacagttacgtcaacag

SEQ ID NO: 862047 - DNA, 100 bp, Homo sapiens
ctccggaaatttcttcagagactcctggatagagtctccccaggacagtgctatcacccgggatattaaccgaacattcccagcccatgactactttaag

SEQ ID NO: 862048 - DNA, 100 bp, Homo sapiens
acatttgctacagcatcccacattaagtcaacggccagcgttaatgactgccattgatggaagacatgatgtttgtatccgtgtagaatcaaagctgata

SEQ ID NO: 862049 - DNA, 99 bp, Homo sapiens
aaaagaagaccacttaaaagtttggaagctacacttggcaggcttcgaagagctacagaatatgctccaaagaagaggagccgggtgtgggctgagccc

SEQ ID NO: 862050 - DNA, 100 bp, Homo sapiens
cgctacaacacgaaagatagagctgagatgacttggccagtgcattatgaagaaaagaactggtgtgaggagcagtactctgggggctgctacacaactt

SEQ ID NO: 862051 - DNA, 50 bp, Homo sapiens
gggctacccgcactggccggcccggagcctgccttctggtacaagatgcc

SEQ ID NO: 862052 - DNA, 100 bp, Homo sapiens
aacggcgatccaaaaattcagtggaagggattaaagcctgtggtttccacagaagcaccacctatcatatttgccacaccaactaaactgacctccgatt

SEQ ID NO: 862053 - DNA, 98 bp, Homo sapiens
caaatgcccctttgggtccgtcagaagcgaatgtctgtgacggagggtggcatcaaatacccagagacgactgagggaggccgccccaagcttggggg

SEQ ID NO: 862054 - DNA, 99 bp, Homo sapiens
tggaatagaagagaatgacctagcaaaagttgatgatcttccccctgaatacaaatcatattcccctgaagccctctggagatacctcacagctcgcca

SEQ ID NO: 862055 - DNA, 124 bp, Homo sapiens
ttttgctacaaatggaggaggaggaggacgacgacgatggggatatcggtttaccgacaagactgtgaaactttcgggatggtggtgaaaatgctgattgaaaaagatccttcattagaaaagt

SEQ ID NO: 862056 - DNA, 100 bp, Homo sapiens
ctgctgctgaaccaatgccaacaggagtttaccgtgaagaagctgactgctatgaacagcatgtgaaggtggaggaattccagcccagtgaggagctccc

SEQ ID NO: 862057 - DNA, 100 bp, Homo sapiens
accggcccacccgccagccagccagcgccttcatcctggggctgcgatgcgcgcagggaccatgtcggcggagaccgcgagcggccccacagaggaccag

SEQ ID NO: 862058 - DNA, 98 bp, Homo sapiens
acgtggggcacaacatctacatattagcccatcagatattggtgaatgaactttgctaagtatggattcaggcggtggaagtcttggattgcacacgc

SEQ ID NO: 862059 - DNA, 100 bp, Homo sapiens
agattgacagtcgatgaagacctcagtgatattgaaagggctgtttatctgctcaggaaattcacagtatggccaacagcaagatgcataccagggacca

SEQ ID NO: 862060 - DNA, 100 bp, Homo sapiens
aagccgggagcgagcccaggcggcagatgcaccagcaaggaatactgaagaccgatgatctcataacaaggttctttcgtctgtgtactgaaatgtgtgt

SEQ ID NO: 862061 - DNA, 99 bp, Homo sapiens
attacggcttgcttattcccccaccatgggactctacctggggatatacatgcatgcaccaaaacgaggacagattgaatacctgcttaagaagcttac

SEQ ID NO: 862062 - DNA, 100 bp, Homo sapiens
ggcgaaaattggatgtgaaaatgaagccagaccgaggttggtactaagaagtgcctttcctgacgtctctgctgcttggaaccgcttctagagcagtctc

SEQ ID NO: 862063 - DNA, 100 bp, Homo sapiens
cgcggagcccgggacgcgcgtacgccctgctgcttctcctgtgaagtttagcaactgcaatggaaaaagaaaagtacaatatgagagcagtgagcctgca

SEQ ID NO: 862064 - DNA, 98 bp, Homo sapiens
cttcctgtccagcatcaatgaggagatcacaccccgacggcagtccatgacggtgaagaagggagaggctgctctttggcgtaaattgcaatcgatta

SEQ ID NO: 862065 - DNA, 100 bp, Homo sapiens
atggtgggaggagccgatactgagcttcttcctatttgccatggattgtgttcacctattgaaaattaaaaagacattttgtttatgtaaaagattaaca

SEQ ID NO: 862066 - DNA, 139 bp, Homo sapiens
tcagttcctgcggggaacttcaccagtgacccagtcagtgcccttcagttaaagaccaccaggagcacacttggacatcaaagacgtcagactggatggcgagtcccagtgaggcgatgtgggcagaggagctccgagc

SEQ ID NO: 862067 - DNA, 100 bp, Homo sapiens
aaaataaggaccaagcagatccagagagatgctgtcctggactttgtcaaagcgcagttgtgtagcagttgagtaatgctggttagctgttaaggtggcg

SEQ ID NO: 862068 - DNA, 98 bp, Homo sapiens
tgcttttctaggaaacctaccctatgatgttacagaagagtcaattaaggaattctttcgaggattaaatgaggaagaacgtgcaaaacgtgaggagc

SEQ ID NO: 862069 - DNA, 145 bp, Homo sapiens
ttacaaaggaggatgttaaaagttacctgtttcggaatgcttttgtgctgctcacagtcaccgctgtcattgtggggttcatgcttgaaccagatccggaacatagacctgatatatttcaagtgtcatattttgcatttaaatt

SEQ ID NO: 862070 - DNA, 99 bp, Homo sapiens
gcggccgaggtagaggcagtggcgcttgagttggtcgggggcagcggcagggatccatatggctttggagacagtcgagattcaaggcgtgatcgatcc

SEQ ID NO: 862071 - DNA, 98 bp, Homo sapiens
tgtcatgtatgagagactgagacaagagcttcttggacacttaatgattgttggcaagaaatgtgctgctgatctgggcctgaataagggttatcgaa

SEQ ID NO: 862072 - DNA, 101 bp, Homo sapiens
ctgttccaaagcctcctggaccgtccaagaagtagctttggtgttcctgatgagtgtgctgttaaagaaagctgtcctcaccaatttggttgtgtttctcc

SEQ ID NO: 862073 - DNA, 98 bp, Homo sapiens
cctggttatcagggagacggcttccgttgcgtgcccggagataccagcgggcaagcagaaaacaagaggctcaagaggggcagcccccgcatagagga

SEQ ID NO: 862074 - DNA, 100 bp, Homo sapiens
gggatggttccatcatggcgtcaatgcaggctgcagatcaaattacgaagctgtataatctcttcctgaaaattgatgctactcaggtggaagtgaatcc

SEQ ID NO: 862075 - DNA, 99 bp, Homo sapiens
agatcagaaatttgtattacagtgatgctacaggacgaagaggaatggataaaaacattggcgagcaactcaataaagcgtatgaagccttccggcagg

SEQ ID NO: 862076 - DNA, 100 bp, Homo sapiens
tgcagtcccccaggatacagggtcaaaggagagcacaaccatcgcagttggaagcccatggggcagatgtttttctacctacaccggatagtttacttgt

SEQ ID NO: 862077 - DNA, 100 bp, Homo sapiens
ctggagaaggccatcaccacgcagaacgtcaacaccaagtgcatcaccatccccagccgcttacaaacacgcagatggcaagaagattgatggcaggagg

SEQ ID NO: 862078 - DNA, 100 bp, Homo sapiens
accacggatgagcatggccttgtacagttctctatcaacaccaccaatgttatgggtacctctcttactgttagggctaaagaattacctccaaagccat

SEQ ID NO: 862079 - DNA, 100 bp, Homo sapiens
ctgtatgaataccagccactgcagatagagacatatggaccacatgttcctgagcttgagatgctaggaagacttggtaatttgcctagtgggattgggc

SEQ ID NO: 862080 - DNA, 100 bp, Homo sapiens
gataaaacttcagaaattagatgaccaaattctacaacttctaaatgaagagcagcatttctttctattactactatctatgctgagactggttcaggtt

SEQ ID NO: 862081 - DNA, 99 bp, Homo sapiens
accgtggacagcaacatttcccacaggacacgaagtttgtcggcccttgccttggcagagctgaggcaaccactgagaaaacggaaccgaatagtcaag

SEQ ID NO: 862082 - DNA, 100 bp, Homo sapiens
acaccctcttcatgaacacctgctgcctgggcttcatagcattcgcgtactccgtgaagttttaagaagaggagaggtcactcaattgggggagcccctg

SEQ ID NO: 862083 - DNA, 99 bp, Homo sapiens
tctttgactccttgctgaatctgagcaaaagcataacccctactgtagaactaaatgcactgtgcatgaaacttggaaaaaaaccaatgtataagcctg

SEQ ID NO: 862084 - DNA, 100 bp, Homo sapiens
tatcccatgggcaaacctcctttgcctagaggctatcacacgtggaagcatcagttcacagcagtaatgcacactgtacagataagacaattgaagctgc

SEQ ID NO: 862085 - DNA, 100 bp, Homo sapiens
tgttataaaatttgaatttgatggtattgaagaatttttgagagatatcttcaatctcctgtttttgttgccaagtctaaaggaccgacaacagccaaag

SEQ ID NO: 862086 - DNA, 100 bp, Homo sapiens
ttccctttcacctatgaaagcaaacgtatgggcatcatcgtgcggtgccttgctttccatgacatttcccctcaagcaccaacacattttctggtgatac

SEQ ID NO: 862087 - DNA, 100 bp, Homo sapiens
ccttttggccagggttgaaccacctttaaaagcagtaatggaacaagctatgaatattacttcagtgtagaaaatttggaacgagacttctttcttcggg

SEQ ID NO: 862088 - DNA, 99 bp, Homo sapiens
ggggactatgtggagaacctgaacaagtcccagctgaagctgggcatctggggcgtgaagctgtggtctaccaatctagacaactcagtggcaagcatt

SEQ ID NO: 862089 - DNA, 98 bp, Homo sapiens
acatgataagcttaatgaggaaatatcaagaacatgaagatgttcctatttgtattcattgcaggtggcccacaaactctttaacaacttgaaataaa

SEQ ID NO: 862090 - DNA, 100 bp, Homo sapiens
gtgaacaacccgttcttgcctcaggccagtcgcctccaggccaagagggatccttcacccgtgtctggaattgggatggggatgacagtccctatttcct

SEQ ID NO: 862091 - DNA, 100 bp, Homo sapiens
gttctctcaatacataaagaacagcgtaactccagacatgttaaacacagtgggaatatcacttttgatgagattgtcaacattgctcgacagatgcggc

SEQ ID NO: 862092 - DNA, 98 bp, Homo sapiens
acaaccccatcattttgtggtggatggggagctgagcagactttaccccagtgaggcaaagtcccactcatcagacaaagcacagttgcttctagacc

SEQ ID NO: 862093 - DNA, 100 bp, Homo sapiens
atatggtatgaagtttctaagtgaaagccttatgtggcatatttcatcacaagttgctgaacttaagggatatgatgatacatacgcagaacaaagttac

SEQ ID NO: 862094 - DNA, 99 bp, Homo sapiens
tcgggacggaggacgcgctagttaatgctacagccctttgactatgatccgaatgaaaagagtaaacacaagtttatggtacagacaatttttgctcca

SEQ ID NO: 862095 - DNA, 100 bp, Homo sapiens
gatcctgcacaggcagacgcgggccagcctcagcaccgacagccgacgcgcagatagcagagccatccttgggcgttgacagaaggctacgttggggccc

SEQ ID NO: 862096 - DNA, 98 bp, Homo sapiens
gctgagcagctcctggaagacctccgcaacgtcaccaggagactaaagtccatcaaaaacatccagaaaattaccaagtctatgaaaatggtagcggc

SEQ ID NO: 862097 - DNA, 100 bp, Homo sapiens
ctaccatgagtggaagcagcctgaggtcctcaccacatgcagatgcctgatcttgaactttccagccatcagaattgctggagtgcaatggcgcgatctc

SEQ ID NO: 862098 - DNA, 98 bp, Homo sapiens
tacgagctagagttgccatttcgctgggatttttgggtggtgcaaagctcatcctgccccacgtggacatccagctaaagtattttgacctcgggctc

SEQ ID NO: 862099 - DNA, 50 bp, Homo sapiens
gttggccttcgtacccgtcttgattgaggcaggaaactgcatatcttctg

SEQ ID NO: 862100 - DNA, 100 bp, Homo sapiens
tggtgccagcgagcccaagtactattctcagcccattctcgtgaaggaaatcatagacctctttattgtgcaaagctgccatccatgcaggaataattgc

SEQ ID NO: 862101 - DNA, 100 bp, Homo sapiens
agctgcttactatggaagatgaaggaaattctgacatgttagtggtgaccacaaaagcaggccttcttgagagagaaaaggaacagttccgtaagctctt

SEQ ID NO: 862102 - DNA, 100 bp, Homo sapiens
gctggacgagctggagaaggccatcaccacgcagaacgtcaacaccaagtgcatcaccatccccagtgcctacaccaactaatgttacaattgaatccta

SEQ ID NO: 862103 - DNA, 100 bp, Homo sapiens
ggctcggcggttcctctgcggtgtggtggaagccgaacgaccctgtcaccaacatttgccaagcagccgacaaacagcttttcaccctggtggagtgggc

SEQ ID NO: 862104 - DNA, 99 bp, Homo sapiens
tagaatctgtagaccttccacactgccacctgattaaaggaattgtcccttgactttaataccctcgtggataacatatctgtggatcctgagacagga

SEQ ID NO: 862105 - DNA, 100 bp, Homo sapiens
ttcatcggggatgtacactcactgattcttaaggctctgttccttagagatccaaagggcttgctttcagaaatcctccgaaaggaagaggaccccaaga

SEQ ID NO: 862106 - DNA, 99 bp, Homo sapiens
ttcagttcgccgatgggaaacccggagaccaaatccttgggagcatgataaagatccagaaagcttttttaaggtattaatgcatcttaaagacttagg

SEQ ID NO: 862107 - DNA, 99 bp, Homo sapiens
gtcacacaacactgggtcttatgtgactggcttctatcaaagtttgcaaggttcatttatgttcatggcggcaaagatctgcaacaacatgctgttagc

SEQ ID NO: 862108 - DNA, 99 bp, Homo sapiens
gcatgtcgtcatggagacaggtgctctcggttgcacaataaaccgacgtttagccaggagttgttcctttggccacatatatgcgaatctataagaaag

SEQ ID NO: 862109 - DNA, 100 bp, Homo sapiens
ccatgagcgacgtggctattgtgaaggagggttggctgcacaaacgagtgtaaacaggaacatcgataagtagtgtaaaaacttgcacaatgaaatccga

SEQ ID NO: 862110 - DNA, 98 bp, Homo sapiens
ggagctggtgaaactcctcaatgagctcttcggcaagttcgatgaattagccacgtgctacacacgcagggccctgtcgatggcagcctttacgcgaa

SEQ ID NO: 862111 - DNA, 98 bp, Homo sapiens
gcgagacttcgggaccgtgtcctgagcgctctccatgcgcccggcgcgaggaccgcagctgaatgcacagctagaaggttggctttcacaagtacagt

SEQ ID NO: 862112 - DNA, 100 bp, Homo sapiens
cattgagctgggggagaagctaaagaagctcatcgaacagtacgcactgagggaagaggttatatatgatgctctgcaaaacctggataagaagattgat

SEQ ID NO: 862113 - DNA, 99 bp, Homo sapiens
acaacccggccatcgaggccctgctgcacgacctcagctcccagaggatcaccagcgtggagacacctatggctgccgatgaaggctcagcagagaaac

SEQ ID NO: 862114 - DNA, 100 bp, Homo sapiens
gtccggggtcgcgcgggaattaagaacgctttggataaacaagaagaattgacacctcttggagtccacttggcacgattacccgttgagccacatattg

SEQ ID NO: 862115 - DNA, 98 bp, Homo sapiens
agctcttcagtgtcgtcaactgtgaccccagaaaatgggacaactaatggatacaaatcaggattcactcagacagggaggtggggaagacagggctc

SEQ ID NO: 862116 - DNA, 50 bp, Homo sapiens
cgggccatcccctatctccccgggcgggcagactgccagattcacttaca

SEQ ID NO: 862117 - DNA, 100 bp, Homo sapiens
gttgccaccaccgcctatgtggcgcaggtctcccccacggatgaggagaaggtaccgggtgtctggtccgagccgtggagatggccgcccagcgccaggc

SEQ ID NO: 862118 - DNA, 99 bp, Homo sapiens
gagatcctactacagttactacactacgatataccaacagatgttttaaagattgtgtattctgtgggtgctcagacaacagcaggatggaattacctt

SEQ ID NO: 862119 - DNA, 100 bp, Homo sapiens
gtaaagtgaccaattcccttggtcaaagaagtgaccaaaaagtcatctacatttcagtcaagttcagcagctgtgtggggaccaaggggacacaatatga

SEQ ID NO: 862120 - DNA, 100 bp, Homo sapiens
ggctactttgacgccctggtgaagatgggggagctggccagcgagagccagggctccaaagaactcgcaaatactgacggacgtggaagtgtcgccccag

SEQ ID NO: 862121 - DNA, 111 bp, Homo sapiens
tcaaggcaagaccgaattcagaaggatatcgacgtcgtgatccagaagtccagagctgaggactgcctgtttgcaggcagcgagtatgacgaggaggaggtggactatgag

SEQ ID NO: 862122 - DNA, 98 bp, Homo sapiens
tggatccatttctcctattgaggagtcaacgttttcttccacccctgagatggcaagaccagccccttgtcttcctcagcctgctcaacgtgaagatg

SEQ ID NO: 862123 - DNA, 100 bp, Homo sapiens
cagccgcctcatcataacgcaagttaggcgggattatttgaaagtatgctattgcggcagcacctcccgagatgtgttatgtggaaccgatgtaggaaag

SEQ ID NO: 862124 - DNA, 99 bp, Homo sapiens
gctacttcacaatctggctgaacctggaactgctgctgcctgtcatcattgactgctggattgacaatatcagcctaatcacacggatgctacagagag

SEQ ID NO: 862125 - DNA, 100 bp, Homo sapiens
tttgaaaaggcatttctcctagctgttgacgttggtgctcgtgacctctttatgtccactggggatcaggcattagaagttctacagtacctcttctcca

SEQ ID NO: 862126 - DNA, 98 bp, Homo sapiens
ccaataaccacggagccggcagcggcgcgggaggccgtgcggtgtctttggtgcaacactaacaaggcttgtctggactacccagttacaagcgtctt

SEQ ID NO: 862127 - DNA, 100 bp, Homo sapiens
cggccatggggtgctgctacagcagcgagaacgaggactcggaccagctgcaagctttcttcctggtggcagatgacatcatggattcatcccttacccg

SEQ ID NO: 862128 - DNA, 100 bp, Homo sapiens
gacaccttgcagctgccgccgccgccaccgagccgccgcgcttgttgattggtgctggctgtgccctctaccccttgggctgggacagtgaggaagtccg

SEQ ID NO: 862129 - DNA, 100 bp, Homo sapiens
gtggtggtgtatgtgcgcttcccagggatcttgagagtgaagatctcgaaggatttcatagacggcggagactggctgagtggaaagcaactaaactgaa

SEQ ID NO: 862130 - DNA, 118 bp, Homo sapiens
ttggcacctctgttatcttagcagcaagcacctgcctcagctgacccttgagccataacccatgcctagccgcccgtgactctcacactgtctcctgcatgacgggtggcgcctcccg

SEQ ID NO: 862131 - DNA, 100 bp, Homo sapiens
tcagatcaaccaccaaagtgggaaacattgaaatcaaggttcaagattatctaagaagatttgaaagtataccagatatgcttgaattggatcacctcac

SEQ ID NO: 862132 - DNA, 100 bp, Homo sapiens
tgcagctgcttagacgctggatttttttcgggtagtggaaaaccaggtgatcatggaggaagcactttactcccaccaaatgtcacaaatgaatttccag

SEQ ID NO: 862133 - DNA, 100 bp, Homo sapiens
ggaccatttcagaggttcaccgccatcattggacccaatggctctgatcccagcatggtgagtgcctacatgtacccagcaggggccactggggcgcagg

SEQ ID NO: 862134 - DNA, 98 bp, Homo sapiens
cttatgattgttaatgatcacaaaacggaacgtcaaggtcgtgggaaataaaaggcagttctacacagactgcagcaacggttgcatctgcatatcct

SEQ ID NO: 862135 - DNA, 98 bp, Homo sapiens
gtgcttcagccaagtgaaaggcactatcgagattggaaccacagaagtgttctaagaacggaagcatctgggctggatggaatttagcatcaagcaga

SEQ ID NO: 862136 - DNA, 99 bp, Homo sapiens
tgatgggtatctttaagagcagcttattccaagctttgctaggtcaatggctgtctgcttgaccctgtgcctcctgtcctggtgcggaagggatgccag

SEQ ID NO: 862137 - DNA, 100 bp, Homo sapiens
tgccgctgaatgggctgaaggaggaggacaaagagcccctcatcgagctcttcgtcaaggctgaaggggatgctaagggagataaagcaaaggtgaagga

SEQ ID NO: 862138 - DNA, 100 bp, Homo sapiens
gaaaaaccccttggaaatagtcagcatacctgccctggtacctgacagtgtaaagaaggagctcctacaaagaataagaacattccttgctcagcatgcc

SEQ ID NO: 862139 - DNA, 100 bp, Homo sapiens
atcaggaccccagatgtctgacagccctgtgtgacaccaagataagtaacgttcagcaagcatttgaaagtccggaggcaacagtccaaatgcccaccat

SEQ ID NO: 862140 - DNA, 132 bp, Homo sapiens
atctgtctagattgtttacgaaataatgggcaatcaggggacaatgtagtaaaggtttaccgacaagactgtgaaactttcgggatggtggtgaaaatgctgattgaaaaagatccttcattagaaaagtct

SEQ ID NO: 862141 - DNA, 50 bp, Homo sapiens
catcattgatgtggtgcgatcgatggtttgtgtagagtggaggatgagag

SEQ ID NO: 862142 - DNA, 100 bp, Homo sapiens
ccaaactggaacttatgctgtagacatttctttgtggtttatctaaaaaccaaaggtggctgcaaaattcgggttcagggggactggatcagagagcgcc

SEQ ID NO: 862143 - DNA, 98 bp, Homo sapiens
cgtgcagcccaacttccagcaggacaagctgcctgtggaggaaccgattgtgtccacagatgaggtcatcttcccactcaccgtttcactggatagac

SEQ ID NO: 862144 - DNA, 100 bp, Homo sapiens
cacaatgctagtgatttgctgattaaacccttggaaaatttccggaaggaacaaataggcttcaccaagatgtgcagagcagcccacacaaccagttcac

SEQ ID NO: 862145 - DNA, 100 bp, Homo sapiens
aaggaagcaaaggaccttctggtgaagctgctcctggaacacctggagtgcctggtgtccaggcacgagaggtcactgcgcatgaccgtggtgaagcgcc

SEQ ID NO: 862146 - DNA, 101 bp, Homo sapiens
cccgtgtgggacgaagagcccttcgacttccccaagatgcaccgtggcctggcggcgagcccccggtcaccttcctccgcacggaagaggggccggacgcc

SEQ ID NO: 862147 - DNA, 98 bp, Homo sapiens
gcgaacaagaggctcgctttgcagcaggtcttgtccagaaggctaaaaaagcaaaggacaggttgttgaaacgagaaggggatgatcgagcagagtca

SEQ ID NO: 862148 - DNA, 100 bp, Homo sapiens
caagaccccattgatgctctctcaggagatctggacagctgtccctccactacagaaacctcacagaacacagcaaaggagccagatgaccaagatgctc

SEQ ID NO: 862149 - DNA, 100 bp, Homo sapiens
caaaaacttggcagtggaagttttggaactgtctatctggtttcagacaagaaagccaaacgaggagaggaattggaagatttaggattcagatttatat

SEQ ID NO: 862150 - DNA, 100 bp, Homo sapiens
ccattggccagccatcccaaagaagtgatgctattgctgagattagagccatttgtattgaagaaattggagtatggatgaaaatgtatagtgatgcctt

SEQ ID NO: 862151 - DNA, 100 bp, Homo sapiens
actgcacttcttttttgagaaaggaaggaatatatcctgactgattaagaaactgcttttcagacaccaaaatctagccagatgcctcggccttcagtgc

SEQ ID NO: 862152 - DNA, 100 bp, Homo sapiens
gaaaattcctactggacaagaatatgctgccaaaattatcaacaccaaaaagctttctgctaggggtcctttctgaaatggtatctatgattcagctatt

SEQ ID NO: 862153 - DNA, 50 bp, Homo sapiens
cacctcatacggctgcttctggagaaggtcagcaatctgaagatggtctt

SEQ ID NO: 862154 - DNA, 98 bp, Homo sapiens
cgtccaggctcggagcgcgacacggagactaggtggcaggttcttatgcaacagggatatgatgctgcttgtgatatctggagtttaggagtcctttt

SEQ ID NO: 862155 - DNA, 98 bp, Homo sapiens
ggggagctgggctggatctcttatccatcacatggggcacttcaggtggcaagacagctccttcttcagcagcaacagcagcagcaagttagtggatt

SEQ ID NO: 862156 - DNA, 100 bp, Homo sapiens
agaaaagaaagtaccggtgcctcctgccaaaaagccagaagctccacctcctaaagtgcaattacgttgtccctgccacactggtcattatcatcttcat

SEQ ID NO: 862157 - DNA, 100 bp, Homo sapiens
aagatggagccctgcatatgattggctctttagctgaaatacttctgaaggccctggccaacgtcaacattgggagcctcatctgcaatgtaggggccgg

SEQ ID NO: 862158 - DNA, 100 bp, Homo sapiens
ttgttggactttgtgaagccagaatttctcttgcttagggttctgtgtaatctgttagcagtagatggtgtaaatgagcctgatgtcctagcaattaatg

SEQ ID NO: 862159 - DNA, 98 bp, Homo sapiens
gaacttgaattgattcatcgaggaggcaatttgtgttcaggtggtgcaagcacagctggcaaaaggtcttgtttaagcttcctgtttgggctgaaagg

SEQ ID NO: 862160 - DNA, 100 bp, Homo sapiens
atctcgctcggctgcgggaaatcgggctgaagcgactgagtccgcgatggagaatgtatgacaacatgtccacaatggtgtacataaaggaagacaagtt

SEQ ID NO: 862161 - DNA, 100 bp, Homo sapiens
tcttcagcaagtttgccagctccatcgtggggccctatgatgaggtggtcctcccaccacagagccaggtgccgggcagcctacaacattgtgacacggc

SEQ ID NO: 862162 - DNA, 100 bp, Homo sapiens
agtttgtaaaaacatggcggatccagaattctggtgctactcgtgagcagtagtcgccatccagacagatggattgtccctggaggaggcatggagcccg

SEQ ID NO: 862163 - DNA, 100 bp, Homo sapiens
agccattcgggttggagtaattggtgatggctcagtgttccgagacttggttattaagtacggtgcagttgacccactgttggctctccttgcagttcct

SEQ ID NO: 862164 - DNA, 100 bp, Homo sapiens
ctgttcttcacagatttcatgggccaggtgctctgtggatgtgtatagttttaaacccccactgcaagttggagcaaaaggccagttggctaaaacagct

SEQ ID NO: 862165 - DNA, 100 bp, Homo sapiens
caaggaagtgactcaaactgtgagaacttcaggtatgagcggcttggtgaagtggtcgagctcctcttcccacctgtggcccgtggccccagcacagacc

SEQ ID NO: 862166 - DNA, 100 bp, Homo sapiens
ccccattactactcttgcggggattgctagtctcacagaccacatcgctattgcggttccgaggcagtgggaagagatgcggcccctggacatcgtcgag

SEQ ID NO: 862167 - DNA, 100 bp, Homo sapiens
cttggtgaagtcggccagcctgagcaagcggaggacctacgccggcctggttgtggaagatatcaataagcgcagagagccgctccccagcctggaggct

SEQ ID NO: 862168 - DNA, 100 bp, Homo sapiens
aagcaatgaagaatctgagactgatctgactgcagccatgagcagcaatgagtgcttcaagtgtggacgatctggccactgggcccgggaatgtcctact

SEQ ID NO: 862169 - DNA, 100 bp, Homo sapiens
gttagaaaggagacccgactgcaactgctggattgctgcaaggctgagggacgagaacgagacctctgtgagtgaaagccttcagagggaagctgctaag

SEQ ID NO: 862170 - DNA, 100 bp, Homo sapiens
attgacatttaattttagggtcctttatatagaagggagagtagatgaggaagaaaatccttcccgttcttctggatgagcatcctatcttcgtagttgg

SEQ ID NO: 862171 - DNA, 100 bp, Homo sapiens
gatgccctgcagtacctgcagaaggtctctggagacatcttcagcaggtgctgggcgtcctcttctttgccatagcctgcttcttatacaagcccctgtc

SEQ ID NO: 862172 - DNA, 100 bp, Homo sapiens
aatacagaactgccccatcgatgtgcggcgcccgctgtataagaaccagtgctgtggcgcatatggccctgaagactgggacctcaacgtctacttcaat

SEQ ID NO: 862173 - DNA, 100 bp, Homo sapiens
gacttccagcttccttatgatatcctttggcagtggaaacacaatcaggttacagaatacctatatgctaataaaatggctttccgatacccagaacctg

SEQ ID NO: 862174 - DNA, 100 bp, Homo sapiens
ctcgggtggctctgaggtcgcctggggaccccagaagcactggatgtgtgtgagaagtggggagaaatgccaccactacaacccaaacatatgagggaag

SEQ ID NO: 862175 - DNA, 100 bp, Homo sapiens
cctgaccattttctactgtccctgcgcgaggacctgctgaagttcccatgatgtcacccaatggatccattcctcccattcatgtgcctccaggttatat

SEQ ID NO: 862176 - DNA, 98 bp, Homo sapiens
gcccgctgtgccacctggtttcaagaccctacccgcttcactggcaccatggtgtgggcccatcgctggatggatctgtcagaacacggctttgggct

SEQ ID NO: 862177 - DNA, 100 bp, Homo sapiens
ctcatcagcccagagttcttcaccgtgctgcattctaaccctattaaagagtctattgttggggaaatcagacgggaaattgtaagtggacttttggcag

SEQ ID NO: 862178 - DNA, 98 bp, Homo sapiens
tgggacggctaaagattgactttggggaagctgccagggcagattcctgccagctcccaggggctttggttatagaagtgaagtggactaaatacgga

SEQ ID NO: 862179 - DNA, 100 bp, Homo sapiens
ggagtcgaagcgagggtctgaagttcacgactactagaaggggaggggagtggaaaggctctcagtgaaaaagtttcctggtacatagccgctaaaaccc

SEQ ID NO: 862180 - DNA, 129 bp, Homo sapiens
acaggtgctccagctgaaggtgcgagaagaagtcagaaatctacagttactcacacaaggaaatgctgagacgctcaagcatgagccaagaaagaataatattgatacacatgctagattgagagaatt

SEQ ID NO: 862181 - DNA, 100 bp, Homo sapiens
tgctggctggggaaatctggtgtatgttgtcaactatccaaaagcgtttgctgccaattgatggggcaaatgatctcttttttcagccacctccactgac

SEQ ID NO: 862182 - DNA, 100 bp, Homo sapiens
tcagcctttcaatgtgacacaaggaaagtattctacagaatcagtatttcaagcatccaaaatgtgtaggagaatatggacccaagaacggagcagagag

SEQ ID NO: 862183 - DNA, 98 bp, Homo sapiens
ccttttccacagggaattgagttgggcagctgcaatgactctccgcacggtattattgtcattgcaagcactattggcagctgcagagccagatgatc

SEQ ID NO: 862184 - DNA, 98 bp, Homo sapiens
tgccgcctcctccgccgcccgaaaacccggagtgccccgcacagccgccgccatgatcctgctggaggtgaacaaccgcatcatcgaggagacgctcg

SEQ ID NO: 862185 - DNA, 100 bp, Homo sapiens
acttgcttctagagaaaaacctgtccttcctaggaaccctaaggactctgcaatatgaataattccctagagaacaccatctcctttgaagagtacatcc

SEQ ID NO: 862186 - DNA, 98 bp, Homo sapiens
gattctgacgcagtacaccaccttcgtgaagccggccttcgaggagttctgcctgccgattatgtttgagaccttcaacaccccggccatgtacgtgg

SEQ ID NO: 862187 - DNA, 99 bp, Homo sapiens
gtgaagcctgcctacagttttcacaaatctattttgaacacagcacgaaaacattttggagctggtggaaatcagcggattcgcttcacactgccacct

SEQ ID NO: 862188 - DNA, 100 bp, Homo sapiens
tctcaaatattgaagaatctctaaccagtaccttccactggaagaatctcaaacagcgctacttactcaggatcagtggcaccagccaactcagctttgg

SEQ ID NO: 862189 - DNA, 107 bp, Homo sapiens
cgcacctgcagcgagtgccaggaactcttctggggagaccccgacgtggagtgccgagaaatgtttgacctagaaacaaatgaacatgtcaagaaggccataaatga

SEQ ID NO: 862190 - DNA, 100 bp, Homo sapiens
aagactttgccagctcactcggatccagtctcggccgtcacgaacgagatcacgccggtgctgtcgtactcctacctggccgtgctggtgcccgtgttcc

SEQ ID NO: 862191 - DNA, 98 bp, Homo sapiens
tgtctacaaaagattgattgacgtcccagtatggtttgaagtggtgaacatggatttttctcggcttcacatgtacagtcctccccagtgtgtgccgg

SEQ ID NO: 862192 - DNA, 100 bp, Homo sapiens
atgttatcaacacttcactcttttatctttttcaataaggtagagattgttggcatgttgcagggttcaacttcactggcatttattatgtggtcagcct

SEQ ID NO: 862193 - DNA, 100 bp, Homo sapiens
tgccccggcgcaccgactggaccgggaaggagcatcccaggacctaccagaatctgatctgcgagtgaagagggacgagggaaaagaaacaaagccacag

SEQ ID NO: 862194 - DNA, 100 bp, Homo sapiens
ggcccaggtcggcgggaaccccctgaaccggagtaccctagatgaaccatgggaggtcctggctacacagccattctgtctgagagagtctgaggactct

SEQ ID NO: 862195 - DNA, 100 bp, Homo sapiens
atctaccgtcatcgtaaagattatgacaaatcacaacttgtagaggagggccaaacatgtgggctattacctctgaagaacgtactaagcatgacaggca

SEQ ID NO: 862196 - DNA, 100 bp, Homo sapiens
cgagaatcaaggcgttgagcctcaagacttaattcagtgcacaaatgagatgaatgtgaacatcccacagttggcagacagtttatttgaaagaactact

SEQ ID NO: 862197 - DNA, 100 bp, Homo sapiens
acggagtgtatgaccacaaacagccatcaagttacccagcatgccacaatctgattgctgacctggatggaacagagtgaaataaatgatttacaaagag

SEQ ID NO: 862198 - DNA, 99 bp, Homo sapiens
aaaattccaggctatgaccccgagcccgtggagaagctgaggaaactgcagagagctttggctatgactttgcagccgtcctggagtggttcgcggagc

SEQ ID NO: 862199 - DNA, 99 bp, Homo sapiens
actgctcctgctggccgcctggacggctcgggcgctggagggtatgaaagtgccagtatgtctagcacatgtgaaccttgcaaaagtaggaacagacat

SEQ ID NO: 862200 - DNA, 50 bp, Homo sapiens
cgaggcctgaggcggcggcgcgaggcagggcgaagctgtgctcaggcccg

SEQ ID NO: 862201 - DNA, 100 bp, Homo sapiens
gctgcaggaaccagactgggggcgagctgagcacctgtagtcaatcacacgcaggaaggatcgagatcgagaccgggatcgtgaagatcggtctaaagat

SEQ ID NO: 862202 - DNA, 100 bp, Homo sapiens
cggatccccttgcacaacgaggacgccttccagcacggcatctgctttgaggccaaggtttacaggtacatacattacacccctatttctacaaagcttg

SEQ ID NO: 862203 - DNA, 98 bp, Homo sapiens
gacggctcacctgtgcgggatggaacaaaaggttctgtggatggagttataaaggaagtgaatgtgagcccatgccccacccaaccctgccagctgag

SEQ ID NO: 862204 - DNA, 101 bp, Homo sapiens
ccaagtacattctcaggtggagacctgtgacaaacagcatgtttggtgcttcaagaaagaagtttgtagagggggtcgacagtgactaccatgacgaaaac

SEQ ID NO: 862205 - DNA, 98 bp, Homo sapiens
aagattcagaaaaggaagactattcagacagaacaatcagtgatgaagatgaatcgattttgccgattgaggattttcaaacacagttcaatctgact

SEQ ID NO: 862206 - DNA, 98 bp, Homo sapiens
ctgacctcattcgaagctgccattgaatatattcggcaaggaagcctctctgctaaacccccttggtcatctccatcagaggcaactgaaagtttctt

SEQ ID NO: 862207 - DNA, 124 bp, Homo sapiens
cggcgtgctactgtgcgctcgatccagcaccatggggaagcgggacaatcgggtgtggcttttcatggcctgccactgaaaatcaagaaagaaccccacagtccatgttcagaaatcagctctg

SEQ ID NO: 862208 - DNA, 113 bp, Homo sapiens
gccaaaccaaactggagctggtgcagcaggaattgggatcgtgtcgctgcggagttgatccccctcatattgtgtacagcatgtctacatcctgagcctaaagagcgagatca

SEQ ID NO: 862209 - DNA, 100 bp, Homo sapiens
ctgcgggatgctggggcccaagtctccatcatgacctacgatgaaacccgatgaaggcaatgtatccaggcacattctacttccaatttaaaaacctatg

SEQ ID NO: 862210 - DNA, 100 bp, Homo sapiens
atgacgtcatgatgccccagcgggtgaggctgcaacacgaggctgccgttcagcacccgtcgagcaaatgagccgtcagactgctacagcattacctacc

SEQ ID NO: 862211 - DNA, 100 bp, Homo sapiens
aaggtgggcaacctagaaagccagttgatgccacttgctattggagttgtgggtttcattgaaaacagatcctgcaaaagttccaggtgcccacactgga

SEQ ID NO: 862212 - DNA, 98 bp, Homo sapiens
gaggccgagccgggatctcaggtcctcgggggcggcggccacgccaaggacgggttgctgaaaagccaggagtcaaaatgactgagcgctttgactgc

SEQ ID NO: 862213 - DNA, 100 bp, Homo sapiens
ccaggaagcccctctgaagcctcctcgccgccgtttctgagaagtgaagaaaaaatgactgctgcccgcattagaaaatgccacaagtgtgggactggcc

SEQ ID NO: 862214 - DNA, 100 bp, Homo sapiens
ctggtcctgctgctcggggtccgcgcggcctccgcggagccaggctctgtgtgctccgggatggagcaggtgtgcagagggtgagaacccagctctggga

SEQ ID NO: 862215 - DNA, 100 bp, Homo sapiens
aacataaaagtcaagtaatcaatgaaatgcagaaaaaagatcacaagcaactctggatgggattgcaaaatgtacagaccttgaagattgaaaaaagcac

SEQ ID NO: 862216 - DNA, 100 bp, Homo sapiens
aagactctcaggcttactgtggatctggattctaaggcaacacttccttgaagaaacaagcttacaggagatcatgaatcagacagataaaaatcaacaa

SEQ ID NO: 862217 - DNA, 98 bp, Homo sapiens
cctcttgaaaagaagcattagtgcttcaattaatccagaagatagtactttccctgacaagttggatggcttgaggactggtactaaaaggaaacgtg

SEQ ID NO: 862218 - DNA, 100 bp, Homo sapiens
cccttgtggataagcacaaagtcaagagacagcgattggacagaatttgtgaaggctgaagtacagtggtgtgatctcggctcacggcaacctctgtctc

SEQ ID NO: 862219 - DNA, 98 bp, Homo sapiens
aatacatggtttcaatcaagtccccagagaacacatttgtcttctgagctgctggcagttttgagggtgacagagaagcagagctggggctgcctttt

SEQ ID NO: 862220 - DNA, 100 bp, Homo sapiens
gtgtctcttctcgccctggcggggaaggtatttgacaacaccccagcagccttggacggcacagtggcagctggcgatgagatcaccggtgtcaatggca

SEQ ID NO: 862221 - DNA, 99 bp, Homo sapiens
cggcttcggagcgggagtgttcgttgtgccagcgactaaaaagaggatgatcacggacgtgcagctcgccatcttcgccaacatgctgggcgtgtcgct

SEQ ID NO: 862222 - DNA, 99 bp, Homo sapiens
ggctcggagaggtgctcggattctcgtagctgtgccggatacatactgccatgaaagaaagctcacctttatttgatgatgggcagccttggggagaag

SEQ ID NO: 862223 - DNA, 99 bp, Homo sapiens
tgatcaccaagcagaatgtccagcgggtcctggaggctgctaacctcttccaggtcttgatgcagaactttattatgtgagaaatgaccttattagtca

SEQ ID NO: 862224 - DNA, 99 bp, Homo sapiens
acctccctaaactggttaatagtggcatggaagatccatttgtgggtaaaggaagaagccccagatatactgtgccttcaagagaccaaatgttcagag

SEQ ID NO: 862225 - DNA, 100 bp, Homo sapiens
ccaaggggcaactgggccatgagagggaaggaaacaagccagccaagagtcgaagctaaaccagaagttcaatctcagccacctcgtgtgcgtgaacaac

SEQ ID NO: 862226 - DNA, 100 bp, Homo sapiens
ttctgggtgacactcaacaggattcccggcatctaataggattcaggaatcaaagaatcagtgtactcaggtggtacaggaaagagagagccttctggtg

SEQ ID NO: 862227 - DNA, 100 bp, Homo sapiens
acagacccctcggggtgtccatcacaaaagccgagtgaagcgtgacattcaggaaaacgatgaagaggcagtgcaagtcaaagagcagagcatcctggaa

SEQ ID NO: 862228 - DNA, 100 bp, Homo sapiens
ggttaccagaaggacttctttgcagggccagtggtttctgtcagattttcgccggctgctgatactttggctgtgaggcaaaaaaggagaatttatgata

SEQ ID NO: 862229 - DNA, 143 bp, Homo sapiens
agcggtatccaattggcatccagggtcggactcccggggccatggccggaatgcagtaccctcagcagcagctttcagcttatgtggagaagtcgctgtgaagccacctataaatccatttactgaatttatggagaaggctg

SEQ ID NO: 862230 - DNA, 100 bp, Homo sapiens
gagcaactcctcaacaacctgtgtgctcggtacgatgaaaacctgatcacagatctctatagttggtcatgttcggagtttgacctgaatgagattcgcc

SEQ ID NO: 862231 - DNA, 100 bp, Homo sapiens
attgggttggaccgtgtgggacgccggcggcagatgagagcatccaacggctatgtatgtcaaaaaggatgttcctttgtggcaaaaacatggacggaac

SEQ ID NO: 862232 - DNA, 99 bp, Homo sapiens
gcagatgctggcgacctatccagaatgatcaagctttatagcaggccaaatcgactcttgtctggtgtgccactgtacaaaggggacgtgccaacccaa

SEQ ID NO: 862233 - DNA, 99 bp, Homo sapiens
atcgacattgttctttggtatcgaagtgccttccattctacagagaccatagtaggtattgttgcagcatctggcagtgagactgaggatgaggacagc

SEQ ID NO: 862234 - DNA, 99 bp, Homo sapiens
ccaagctgtacttgtcacctcgaattgagcagcaagaagttatgaaatggaatggatggggatataatgattctaaattcatcttcaataagaagggcc

SEQ ID NO: 862235 - DNA, 100 bp, Homo sapiens
attctctctccactcttcgagattggcacacccagacctgatggccaaaagaaaggaagaaaatttttcctctcctaaaaatgccaaaaggccaagacaa

SEQ ID NO: 862236 - DNA, 100 bp, Homo sapiens
cggcggcccaggcacggagaggcggcgagaccgcaggaatgggatgtttctggggagctgaaaggaaattctgggtcttgaaaggagtgtattcaactca

SEQ ID NO: 862237 - DNA, 100 bp, Homo sapiens
accctgaccgatgggaccctggtcctttccagtctcagaaaaagaacttattccacaaaattgtcagcaaatataagcacaaaaaggagaagcccaatgt

SEQ ID NO: 862238 - DNA, 98 bp, Homo sapiens
gggggccgacatcatcctggacatggccaccctgaccggggctcaggccattctgcccttccactgcagtgccatcctggctacagccctggacacag

SEQ ID NO: 862239 - DNA, 100 bp, Homo sapiens
gtgaccgggatagagaaaggagctcagatcgtaataaggatcgcagtcgatcaagacctaatctgggagcctgcaagtgacaacagcctttgcggtcctt

SEQ ID NO: 862240 - DNA, 98 bp, Homo sapiens
ttactacttctacagactccagcaagtcagcagaagccaatcttaaatctagttgccagagtctgccctccgagacctcatcgtagccaccattgctg

SEQ ID NO: 862241 - DNA, 100 bp, Homo sapiens
atttgtggcttaaactcttggcatttggctttgcctttctggacacagaagtatttgtgacaggtgcactttacaggtccccgatgaaccaagagaaccc

SEQ ID NO: 862242 - DNA, 98 bp, Homo sapiens
attcagcagctgagctgttgaagcagggggcagggctgtttaacgacccccaactccccatccatgcactcacgttctcttacgctgggtccatccct

SEQ ID NO: 862243 - DNA, 100 bp, Homo sapiens
cccccatctcaccccccaagcggatactggtcttctcgtcggattgcccatgcacttgttgcagaaacagccaaggtaagaatgattgatgttggctgat

SEQ ID NO: 862244 - DNA, 125 bp, Homo sapiens
caaggggcagatcgagaagaggaagctgcgggagaagcggcgctccaccggcgtggtcaacatccctgccgcagagggtgcttttcaggaaacaatgatcattttttggcaattaatcagaagaa

SEQ ID NO: 862245 - DNA, 100 bp, Homo sapiens
cgcgaacttggtggccagcgccgcgcccggggccgtgcgctctcgggccactcggccgcagttcctctttagagagcaaagaccacctacaggcaccaga

SEQ ID NO: 862246 - DNA, 100 bp, Homo sapiens
tttttgtattattctgcgtggaagctacacttactccagtgggaggaggactccatcttactgttctgatccaaaccttgtgttagatttgaagaacctc

SEQ ID NO: 862247 - DNA, 100 bp, Homo sapiens
ggggatcccggcaagtaacatgactaaaaagaagcgggagaatctgggcgtcgctctagaggttttaaaatcaaagatgggaaaatcggagaaaattgcc

SEQ ID NO: 862248 - DNA, 100 bp, Homo sapiens
tctctgatttggggatctctagcctacaggatggcttggccttgcacataagactgatggtgcatctgcaatgttaatcatggcggaggaaaaggctctg

SEQ ID NO: 862249 - DNA, 100 bp, Homo sapiens
aagagctgagcacattccagcagggaaacgaactccgatgtgcgcccattgtaaccaggtcatcagttcacaaagatgtccaaaactaatggcttatcag

SEQ ID NO: 862250 - DNA, 98 bp, Homo sapiens
cagtgctctgtctgtcgtgcgggacctggggttttttgggatctacaagtttccgttactatggcaatgacggcagggactacaacaacctttcctat

SEQ ID NO: 862251 - DNA, 98 bp, Homo sapiens
agacaggtggcgacggcagaggaaacccttaggagaaatcttgagagtggacagcaattgtgaagatcgccagagagttctgtgtttcatcaccgccg

SEQ ID NO: 862252 - DNA, 98 bp, Homo sapiens
gagaaatccccactcctccaagaaccaacccccaaattggctgggacagccgatggatgcactgactggtctatcgatatcaagaaatatcaagtttt

SEQ ID NO: 862253 - DNA, 50 bp, Homo sapiens
ggaaaatcatattatagatggagtaaagggcggcgactggcggcgcgatg

SEQ ID NO: 862254 - DNA, 100 bp, Homo sapiens
aatgctgtttgtattccagagactagatgtgactccctgcatgtctcctctgccacatgacagtcctttaatagagaagccaggcttggggcagatagag

SEQ ID NO: 862255 - DNA, 98 bp, Homo sapiens
agacatggaccagggctacggagatgctatctgtgagcagcagttgataatgtgcataaaatctgggaacaggccagatgtggatgacatcactgagt

SEQ ID NO: 862256 - DNA, 98 bp, Homo sapiens
tgagctgtggccaagaaaattcttccaccggacctgcaagtgcacaggctccctgactggcagtcctcacctttccgagctgtctgtgaactcgcagg

SEQ ID NO: 862257 - DNA, 102 bp, Homo sapiens
tgcgggactctgaggaaaagctcgcaccagatgaatgatttcggaatcaagaatatggaccaggtagcccctgtggctaacagttacagagggacactcaag

SEQ ID NO: 862258 - DNA, 98 bp, Homo sapiens
gcacagggcaaggcggcggacggctgcgtcgcccgaggcgaggaggagcgctggcgagcatgcttgagaagggaggataaaaactttcagaatgagca

SEQ ID NO: 862259 - DNA, 100 bp, Homo sapiens
aaaagatttcgcaaggaatatgtccaaccagtacaacttagaactcccccactggaaaggattctgaaagaaatgaagtcagccctcagaaatgaagttg

SEQ ID NO: 862260 - DNA, 99 bp, Homo sapiens
agttttgtaaagcaccgctcaagcgtgatgaaacagttcctggaaactgccattaacctccagctttttaagcagtttcgatactccgattggcaggat

SEQ ID NO: 862261 - DNA, 100 bp, Homo sapiens
acagttgacacacctcatggtatatttgcagccagtactctatatgaacaatccgtctggatcacggatgtaggaagtgtagagacggggtttcaccatg

SEQ ID NO: 862262 - DNA, 99 bp, Homo sapiens
ttttcatgcctgtagaaatgagaatgacagctgtgataaaaaaaaaattcatctgggcggtatctggaacttggtggggtggaagacaacccgtgagta

SEQ ID NO: 862263 - DNA, 109 bp, Homo sapiens
tggaatatgccaaggaaaaactggagagcttcatcaaaaatagtgatagctttgataaaaattgcaggtgctgcagtgtctgaaatttccgggcctttctcaacagagg

SEQ ID NO: 862264 - DNA, 100 bp, Homo sapiens
aaaaacttaaaatggatatgaaaagtgaagaaagtgatcataggagaaaaccatttcagctggaaaggaggagaacatgaaacattgcttgaagacaatg

SEQ ID NO: 862265 - DNA, 101 bp, Homo sapiens
ctctgtcgagcagcggacgccggtctctgttccgcaggatgaacacagaatgttcttggtgagaagggccggcggattcgggaactgactgctgtagttca

SEQ ID NO: 862266 - DNA, 98 bp, Homo sapiens
cccctcaggacccctgctacgtggagaaaacctcggataagggtgatcttgatactgcagcagtaaaagtggaatttgatgaagaattcagtggagca

SEQ ID NO: 862267 - DNA, 99 bp, Homo sapiens
ctaaagtggagctctcagaccacgtgtgtgatgtggtgtttgcactctttgactgtgatggaactcgaatcatttatgacagaaagtttctgttggatc

SEQ ID NO: 862268 - DNA, 98 bp, Homo sapiens
ctggccttggtctggattcaaaggtgatgcaggcccagtgtgtcaaaacagaaactgaattctaccgccgtagtcgcagcgagatagtggatcagcaa

SEQ ID NO: 862269 - DNA, 100 bp, Homo sapiens
gagccggcccagcttctgaagggagatgtcatggagatctattgggaaactgattataaccactcgggcaccatcgatgcccacgagatgaggacagccc

SEQ ID NO: 862270 - DNA, 98 bp, Homo sapiens
cccgtgctgaatttgcagagagaacggttgcaaaactggaaaagacaattgatgacctggaagatcggcgcctacttcggggcctccctctgctccgt

SEQ ID NO: 862271 - DNA, 100 bp, Homo sapiens
attgcatagtggtaggaattccaccacctcaagtaagttggcttcctgaggctcaggtagtccaaagagccctgaattctgcggctaacaacgtgtatca

SEQ ID NO: 862272 - DNA, 100 bp, Homo sapiens
gccgctccgactccaggggagccgtggcctcctctccgccctagcgctgagtcggtggtggggagcggcagctggcagagagtcaacgcccagacggctg

SEQ ID NO: 862273 - DNA, 98 bp, Homo sapiens
gggtcaagtcgtgttctgatcactactgacttgttggagaacctccatttctaccagaatcctttgaccgaattcttctggatgcaccctgtagtgga

SEQ ID NO: 862274 - DNA, 98 bp, Homo sapiens
acgttgtcagccaagaatgaagccggcatcgtgtcgtgcactgccaggctggatatatacgactatcttgctaatcatggccggttaaatgagtctga

SEQ ID NO: 862275 - DNA, 100 bp, Homo sapiens
tgacctgtcccagagaatgatctgcagctctggattaatcgaattacagctgctagccaggaacatggactgaagtatccagcgctcattgggaatttag

SEQ ID NO: 862276 - DNA, 99 bp, Homo sapiens
tttgacctggacctcggctacagactgctggctgtgtgtgctgcaaaccgagacaagttcaccccgaagtctgccggaggaggtctgatggccgggagg

SEQ ID NO: 862277 - DNA, 100 bp, Homo sapiens
agagaagacctcagatgtgaagtccattaaaggtggcacaagaatggctcaactctccaaatagagagaatttctatcagttgcaagtacgaaaatttcc

SEQ ID NO: 862278 - DNA, 100 bp, Homo sapiens
tcacaaacaacaggagttgccattccattacatggtacaacagaatatctcgggaatggactcagaagtatgccatgtgatgctaccttaaagtcagaat

SEQ ID NO: 862279 - DNA, 100 bp, Homo sapiens
ttcagagaaagggaacacagaaatctggtatgctggtaaaaaggctctgaacagcaacatggggtgcaaagtcctgctcaacattgggcagcagatgctg

SEQ ID NO: 862280 - DNA, 99 bp, Homo sapiens
aggcaccattcgtacccgttgggtcgtgctgcggcagcctggcgcccgacatgtgaaggggaacctgccaggggattactgtgagctcacagcaggata

SEQ ID NO: 862281 - DNA, 98 bp, Homo sapiens
tgaagaggacccaccgtgggctccacgttcttacttggaaaaggctgggggctctcttccctatagcatccagacagctgaaaaacagaattggctgc

SEQ ID NO: 862282 - DNA, 98 bp, Homo sapiens
taacttctactgacgaagcttggaagttgcagaagttaatcagctgtgttcagcgaatacttatgaacagaaggctccagcagcagtacaatcagcag

SEQ ID NO: 862283 - DNA, 98 bp, Homo sapiens
acacctcccggctgcctggggccacccctgggctcaccacggtggagatagtgacaatgtctcaccaagagcacgaacttccaggagccggtgcagcc

SEQ ID NO: 862284 - DNA, 100 bp, Homo sapiens
tttgctctcccaggcccaacatcctccacctggattggctgctacaccaaatcgttggacaccagccgcttcatctgtgccaaatgcaaggggtctctgg

SEQ ID NO: 862285 - DNA, 99 bp, Homo sapiens
aagaagctaactattggaaagatctggcgatgacctacaaacagaggttatttcttatgagggtcatggatatcccctatctaaacttggaaggaccag

SEQ ID NO: 862286 - DNA, 100 bp, Homo sapiens
ccacttcgttcaagacaggtgtttaagccctcttagcaatgcataccacgagttagcacaagtgtattcaaccaacaacccctcagaactccgaaacctg

SEQ ID NO: 862287 - DNA, 99 bp, Homo sapiens
gtccctttgcctcatcccaggttgccttggaaaatgccaacgccgtgtctgaaggaattgaatgatctggcacgggaccctccagcacagtgttcagca

SEQ ID NO: 862288 - DNA, 98 bp, Homo sapiens
tcagaaaaagcatccccgaggaggaagacgaatcgttaaacatctgaaagggtcaggaccttgcctcatagtattcgatcagattcagaagatatctg

SEQ ID NO: 862289 - DNA, 100 bp, Homo sapiens
ctgcccagcccagcagcagcaccgaccctagcatcatggagcccacagcatcctcaggctgcacatggtccgtctaatgctgttggagagattactgcag

SEQ ID NO: 862290 - DNA, 100 bp, Homo sapiens
gagacgcttgttgcagaggaatctgcccaagcacaattccaggaagggtaccttctggatacctccacatggtccgagtgcactgaacccaagcacattg

SEQ ID NO: 862291 - DNA, 101 bp, Homo sapiens
cgggacgcgggcgccaggaccggccgaacgcagagcttgccttgcgccatggactggcagccagacgagcagggcctgcagcaggtcctgcagctgctcaa

SEQ ID NO: 862292 - DNA, 100 bp, Homo sapiens
gaaagtgcagaagactcggaagtatatgaatgacctaaaggtacaaataaagacggagagagaacagtgccaactgggagcagggcaagaatgccaattc

SEQ ID NO: 862293 - DNA, 100 bp, Homo sapiens
atggagctgagagtcgggaacaggtaccggctgggccggaagatcggcagcggctccttcggagacatctatctcggtactaggttttgacaagcttgca

SEQ ID NO: 862294 - DNA, 98 bp, Homo sapiens
acgtgagttcaagtacagatcacacgcccactaaagcccagaagaatgtggctaccagcgaagatcatgcaacagatgagtgaccaccgctacgacaa

SEQ ID NO: 862295 - DNA, 100 bp, Homo sapiens
gaaagggaaggaacacgctgcattactgcgtgaaattcttgatgagggagatactgactcgaacacagaccaggatgctgggagtagtgaagaggacgag

SEQ ID NO: 862296 - DNA, 100 bp, Homo sapiens
aaccagtgacatcaccgagtacctcaggaagctcagcaagactggagtccctgatggaattatgcagtttattaaggtgctggaggcgctgctgccgctg

SEQ ID NO: 862297 - DNA, 100 bp, Homo sapiens
ccttgcaacaacatgaaacagcatctcagacttctttcccagatgtttataatgagggcacacagttaaagaagagtgtaagagtcctaaagctgagtgt

SEQ ID NO: 862298 - DNA, 99 bp, Homo sapiens
ctcggacaagcacagataatgaagactttccatcaagtatcaccttttgccatgatagcatttctttcattggacagttccttacaagggctccactca

SEQ ID NO: 862299 - DNA, 98 bp, Homo sapiens
ggacgcgacctcagcctgcggcggctaactgccgggcgatttgatgaaactgttatcgaagagagaagacaatgtgctgaagacctgctacagttctc

SEQ ID NO: 862300 - DNA, 100 bp, Homo sapiens
cctgccaatgcaacagccacggaagattaagcaggtgtctgtgacctttgatgatgtggctgtgactttcacccaggaggagtggggccagctggaccta

SEQ ID NO: 862301 - DNA, 100 bp, Homo sapiens
gctgacgcttgatgagaaggacccacggcgtctgttcgaagtggatatcaaagtattgcagagtgccttagcagccatccgacatgcccgctggttcgag

SEQ ID NO: 862302 - DNA, 100 bp, Homo sapiens
gtggttgccactcacctgaggattgtcttgggacaaggtgcgcattcctggtgtgctgcagcgattgggagtgacatactttgtggttgctgtgttggag

SEQ ID NO: 862303 - DNA, 99 bp, Homo sapiens
tcgcccgaggcgaggaggagcgctggcggaatctggccaactgtgagcgcctcatcgaagtggaggacatgatggtgatgggccgcaagccggacccca

SEQ ID NO: 862304 - DNA, 100 bp, Homo sapiens
cttgatgcccaccttcagcaggatcctgatgccaaagtagcttgtggtattttggagataacggcagtggaggtgggcattgtggccatcaggggtctct

SEQ ID NO: 862305 - DNA, 100 bp, Homo sapiens
ggaagacccacgtccacacctactcctcctcagggcagactttgacgacactgcgacatactcagcagtggccaccaatgcccacggacaagtgtccacc

SEQ ID NO: 862306 - DNA, 100 bp, Homo sapiens
tgtggatgctacagtcaatcaggttctggcctcccgatacggggagtctactcttcatcttgtgttgagacttcgtggtggtgctaagaaaaggaagaag

SEQ ID NO: 862307 - DNA, 100 bp, Homo sapiens
tctcgacctgctctataaagcctatgggatgccaccttcagcctctgcaggaaagcttagatatgccaacaacagcaattacaaaaatgatgtcatgatc

SEQ ID NO: 862308 - DNA, 118 bp, Homo sapiens
gcggcggccgcgcgggtctggcgggaccggtttggaagactttgccggcctgcagaacgaggtcactcggacactatggtgttcttttacctgtggattgtcttttatatcatcagtt

SEQ ID NO: 862309 - DNA, 99 bp, Homo sapiens
tctagtctcgtgagactttgccccatggcagaactctgctggaatcctattgagaaggtgaaatgcacatctgaacagagacaggcatgggaaggaggc

SEQ ID NO: 862310 - DNA, 98 bp, Homo sapiens
gctaccaaagacgtagaaagaaatcttagcagacaccattcgcttttcacccaagatgatttgatgtcttataaaactctgatgaaccatgatggcta

SEQ ID NO: 862311 - DNA, 101 bp, Homo sapiens
ttgagagaaaaaagaaacattttgaagaacacaattccatgaatgaactgaaggtggtcagaatggcttcaacattcctcaagtcaccccatgcccagaag

SEQ ID NO: 862312 - DNA, 98 bp, Homo sapiens
tacttctacgccaatgaggccaagtgcgacagccacatggagacattcttgcgctgcatcgaagcctcaggagagaagatgactgaggaggaggtgga

SEQ ID NO: 862313 - DNA, 98 bp, Homo sapiens
agaactccaccccggcgcccgcgccatgcggcgggagagattgaccgactcatcagtcacggggccgacatcctgaagcctgtaatgctcaggcaggg

SEQ ID NO: 862314 - DNA, 98 bp, Homo sapiens
tgcagtcgggcctgcccggcatgcagtttgtttcgacgccggaccgcgtaagagacgatgatgttgggcacggaaggtggagagggattcgtggtgaa

SEQ ID NO: 862315 - DNA, 98 bp, Homo sapiens
gcatcattgatggcgatgacagaacatacatatgatagttgagaaagacacatattctgatcatgaagaaataaacacaagttaaatatgactaagca

SEQ ID NO: 862316 - DNA, 121 bp, Homo sapiens
gtccaggggcagagtccacgtctggcttctttgtctggagttgaaagccagatcaccaccttctgccctagggtggtcccaaccatgtgatgtctggagcataggatgcattcttattgaa

SEQ ID NO: 862317 - DNA, 100 bp, Homo sapiens
gtcgcgtacgggcttcccgagctgacgtggcttgaattgggaggggggcagctggagcctcaggcggcagcgcttctagattccattggccgtgacatcc

SEQ ID NO: 862318 - DNA, 100 bp, Homo sapiens
gcccgggctgcggcgtgtgcgcgcccgccagctgctccggagatacgggccttattggaaggagaaagtaatccagagatagtgatctgggctgagcacg

SEQ ID NO: 862319 - DNA, 100 bp, Homo sapiens
ctgcagaaggtctctggagacatcttcagcagcattgctattggaaatacttaatagtagatgaaggacacaggattaagaatatgaagtgccgtctaat

SEQ ID NO: 862320 - DNA, 100 bp, Homo sapiens
tgttagtcaccgcggagccgccgaaacctgcaggttccatcttagcccacatccagaagcaaaagcacttcaatgagcgagaagccagccgagtggtgcg

SEQ ID NO: 862321 - DNA, 99 bp, Homo sapiens
gtggatggacttgattctgatgagagatactagagtaaaaggatggtttcttctggacaattatatacccacatttatctgctctgtcatatatttact

SEQ ID NO: 862322 - DNA, 99 bp, Homo sapiens
tgagggtagcttttgtggacatgctgttgaagatcaaagctgtgagggctgctaagatggaacagatttggagttgaggctggtcaatggagacggtcc

SEQ ID NO: 862323 - DNA, 98 bp, Homo sapiens
tttctggtctgaccgtcgcaaccctcatgaagtacaaccagcatatgctacaagagtacccaaaggcaagtggaacagctctaatggggttgaagaaa

SEQ ID NO: 862324 - DNA, 100 bp, Homo sapiens
gagggtttcacagtcaaagccatgatgaaaaactcagtcgagatctgcccaaggagaatccatatgaggatgtggacttaaagagccgaagagcaggacg

SEQ ID NO: 862325 - DNA, 144 bp, Homo sapiens
gagccgcgcagcgctgcgggggaggcgcccgcgccgacgcggggcccatggccaggaccaccagccagctggtgtctcccagtctgctaaagccctaaggccatcaccatggacttccagcatcgccccgggggcaagaccggg

SEQ ID NO: 862326 - DNA, 100 bp, Homo sapiens
agtcatgtacagaacatgatcaagggtgttacactggtacgagtggctgctttacagaatctggtgaagataatgtccttatattatcagtacatggaga

SEQ ID NO: 862327 - DNA, 100 bp, Homo sapiens
cagaaacaagagcctcctaagaagcccatcatcttcgtttcggacagagcaaacagcaacaaggagctgggtgtggaccaggagtcagaggagggcaaag

SEQ ID NO: 862328 - DNA, 98 bp, Homo sapiens
tttatatcctaaacttttcaagcctgaaggaaaggcagaactgcctgattacaggagctttaacaggaaatgggtcctgatgaatatgaagagatgga

SEQ ID NO: 862329 - DNA, 99 bp, Homo sapiens
tggacgccgctttgttgcctgagctataaggaagaccagatggatgagaaactaatggaacctctgaaatatgctgaacaacttcctgtagctcagata

SEQ ID NO: 862330 - DNA, 100 bp, Homo sapiens
tctcctgcctcagcctccggagtagctgggattacaggatggtggatgctgtggaggagatgggaataatccaaattgctgcatgaaccagaagaaagac

SEQ ID NO: 862331 - DNA, 99 bp, Homo sapiens
tggtttcactaaagaacagcaacgactggggatcccaaaagtgttctaagaacggaagcatctgggctggatggaatttagcatcaagcagagtcccct

SEQ ID NO: 862332 - DNA, 99 bp, Homo sapiens
tgaaagggaagcagaaccatactataaaatgcttggacagaagagatgagtactatttccactaaggcctagaattgcctactgtacaaatagtcctga

SEQ ID NO: 862333 - DNA, 100 bp, Homo sapiens
aaccagctcctgtaactgtacatattgatcatcttgtggtagagagaagtgacgatggctcttttcatatcagagatccagacatttaatgtggatgcac

SEQ ID NO: 862334 - DNA, 98 bp, Homo sapiens
ctggactggctccccgtgtggatcaggagaagtgggcccagcgttcattcaggaattacatgaacgacagccttcgcaccgacgtcttcgtgcggttc

SEQ ID NO: 862335 - DNA, 100 bp, Homo sapiens
gcttgctggtctgattgtcgtttttacccggccaaagtcactgctgttaacaaggatggccaagacccatgttcttgacattgagcagcgactacaaggt

SEQ ID NO: 862336 - DNA, 100 bp, Homo sapiens
aagaaaatcacagcctttgtacccaatgacggttgcttgaactttattgagtatgccaccacgggctgttccctgaccctgcaccatacggagaaaccag

SEQ ID NO: 862337 - DNA, 100 bp, Homo sapiens
gacactacgtgctgggcgacacgctgggcgtcggcaccttcggcaaagtgaagaaggctgacccgcggctgattgagtccctctcccagatgctgtccat

SEQ ID NO: 862338 - DNA, 98 bp, Homo sapiens
gacagcctcatgatcacaaacatttaatgccaacccaaattatacctggttctggtgtttgacaacgacatctcctacattgagggtggaacagccag

SEQ ID NO: 862339 - DNA, 98 bp, Homo sapiens
tcgtggccaccacatactcggtttctgctcagagctcgatgtcaggcatcagatgactgaagacttcctgtggaatttttgtgattcacttttacaga

SEQ ID NO: 862340 - DNA, 99 bp, Homo sapiens
ccctggaaagtttgcagaagtggaaggagcagaacgtgagggtgtaacttacaaaaaggcaaagcgaaggctggagctaggagaaagcggtcatcagta

SEQ ID NO: 862341 - DNA, 100 bp, Homo sapiens
tcgatggcttcgccatcgccagcttcgccaccctcgaggccttgcagatttaatccagagactgacttcactatagaacccacagttgtatcaatggttg

SEQ ID NO: 862342 - DNA, 100 bp, Homo sapiens
aatattccacagatacaagtgacactgctgaaaaataaagctccaggattagggaaagtcaatgtcaccaggagactaaagtccatcaaaaacatccaga

SEQ ID NO: 862343 - DNA, 100 bp, Homo sapiens
acttaaagaaacagcttcatgaactccaagccaaaatcacagctttgagtgagaaacagggttcttgaagcttttgagattaacaatggcaggaaaatca

SEQ ID NO: 862344 - DNA, 99 bp, Homo sapiens
cacaaatgtttttctgttttgcctgaatacatgatttaaacaagagatttccacagaagacttgggaagatccccatgaaaaagataagagcacgaact

SEQ ID NO: 862345 - DNA, 98 bp, Homo sapiens
attttctggctccctcgactggttgatcagcagattggaaagactggaagcttcttcagtggaatgcagtagccctctgggcctgggatattgtggtt

SEQ ID NO: 862346 - DNA, 100 bp, Homo sapiens
cttccggccaacttccattgaacttcccagcactcgaaagggaccgaaatggagagcaaaggttctgactcagaagatcttttggaagaattgctgtgct

SEQ ID NO: 862347 - DNA, 100 bp, Homo sapiens
gaaaatgcaagaagactgatggagcaggcttgcaatattaaatagccggatcgagctgggagatgtgacaccacacaatattaaacagttgaaaagattg

SEQ ID NO: 862348 - DNA, 98 bp, Homo sapiens
gaccgctccaagtcctatgagctcatccggaagattgaggcctacatggaagctgtcaataccagcaaatatgcagaaagctatcggatccaaaccta

SEQ ID NO: 862349 - DNA, 100 bp, Homo sapiens
ttagaggaagaggttgatgatttcccaacttttggagactcccagagtgactatgatacggctgcacggttaggtattttacctgtgggtcgaggaaaga

SEQ ID NO: 862350 - DNA, 100 bp, Homo sapiens
tcctgtgctgtcttggggacctgctcagaggctggaccgcgtcatgctcagaagggcctggatgaatgaaaagtttgcccctgagctgctggagagcaag

SEQ ID NO: 862351 - DNA, 99 bp, Homo sapiens
tcaagatggcggccaatgtgggatcgatgtttcaatattggaagcgctttgatttacagcagctgcaggatttaagtgccctgtatgctcaaaatttgt

SEQ ID NO: 862352 - DNA, 100 bp, Homo sapiens
agcacccctgcggacatctggagcacggcgtgtatggcagttgtgaaaaacttcaggacaaaaatgtttcatttaaggacttgtgctgctaagttgaggc

SEQ ID NO: 862353 - DNA, 100 bp, Homo sapiens
catactatcctcctagccaaattgctcaactaagaccaagtcctcgctggactgctcagggtgccagacctcatcgttcaactactcaatttcatgctgg

SEQ ID NO: 862354 - DNA, 100 bp, Homo sapiens
cagaaggagaatagaggaagaaaagaaggcgtttgctgaagcaaggagaaatatggattggatagctttagtcaaagcagctgctgcagctgcagccaag

SEQ ID NO: 862355 - DNA, 100 bp, Homo sapiens
ggatttctttttaataatgtgtgacccttcacctttgatcccctgacctgcattaccttggggacatcacccagaagggctatgaaaagaaaaggtccaa

SEQ ID NO: 862356 - DNA, 100 bp, Homo sapiens
agagcttttggaatctgaacaaggggcatcgttggcttcacagtatgactgatgatcctccaacaacaaaaccacttactgctcgtaaattcatttggac

SEQ ID NO: 862357 - DNA, 98 bp, Homo sapiens
cagtggtcgcttcttctccttgattgctgatggtatggcatatattgaaagaatgaactatattcaccgagatcttcgggctgctaatattcttgtag

SEQ ID NO: 862358 - DNA, 100 bp, Homo sapiens
aaacagacattcaacatgattgcatttgaactgcgttcctttgcctgcaacaggggtcaagatgagttttgcctgacttctttgatgtcctgaactttcc

SEQ ID NO: 862359 - DNA, 98 bp, Homo sapiens
tgtatggacaggcttgtccatctgtaacttcattaagggagaagatgagcgtgggctgcccagagcctgagccgccccgctccctgacctgctgtggg

SEQ ID NO: 862360 - DNA, 100 bp, Homo sapiens
ggtggactccttcggcagtccacccaccgccgccgcctcccagtaataaaagactagtggccttagtgcccatgcccagtgaccctccattcaatacccg

SEQ ID NO: 862361 - DNA, 100 bp, Homo sapiens
tggtcagaaatgttgcaccttccagcactgggtgtaccagaaaacaagtggctgcctcctggtgacggacatgcaagttgcatccttaatgtccagtcaa

SEQ ID NO: 862362 - DNA, 99 bp, Homo sapiens
tgacatggaggatgatttcatgtgcgatgatgaggaggactacgacctgctttatcttcaagccaggatgaagggagactgggcaagactcttacgccc

SEQ ID NO: 862363 - DNA, 100 bp, Homo sapiens
gtaattacagtgtttggagcaacaggaactgatgacgcttgataatgtggctggggacttcagggaagagtgggttacctggacactgcttagagaatcc

SEQ ID NO: 862364 - DNA, 100 bp, Homo sapiens
gggtctggagggctgagcagtcaactcaaatgcaagtccaagaggaggaggaggcggaggtccaagcggaaaggtcctttcccataacctgtgcacggtg

SEQ ID NO: 862365 - DNA, 100 bp, Homo sapiens
ggctctatatacagcttgcggagggatgaatcctcaagaatgtctgcctgtcattctggatgtgggaaccgaaaatgagtccatttataggcttgagaac

SEQ ID NO: 862366 - DNA, 100 bp, Homo sapiens
cacaaatgcacaatttcctgcggaaatcagtgaatggtagtgtctagaaagggtatgtcccttcaagagagaggtgccaatgtccaaccggcctaataac

SEQ ID NO: 862367 - DNA, 113 bp, Homo sapiens
ggaagtgtaacgttgaggcccttcttgtgtatctggagaaaatagagggtctgcggaagagggagctgctgaaggagctgctaccagtcatcgggcagaacctccgattccag

SEQ ID NO: 862368 - DNA, 98 bp, Homo sapiens
gatcagtgctgtcccatctgcaaaaatgaggcctttgaaattgttgttcgccatgccaagaactacaccaatgccatgttcaagaacaactacccaag

SEQ ID NO: 862369 - DNA, 119 bp, Homo sapiens
tggaatcaaagataaatccaaatactgcatatcagaaacaacaggaatcccttggcaccatgtcctgtgtgcattataaattttcctctaaactcaactatgataccgtcacctttgat

SEQ ID NO: 862370 - DNA, 100 bp, Homo sapiens
atggctattttgggctctattgattgggcctgcctcatcgtggatgaagcccatcggctgaagaacaatcagtctaaggaatggaagttggatacacttt

SEQ ID NO: 862371 - DNA, 100 bp, Homo sapiens
agactggggaatgaccgccccatccggagagagcaaggtccgtggtcctgtcagtggaagcccggatagcatgaatgcctctcgacttagccagcctggg

SEQ ID NO: 862372 - DNA, 99 bp, Homo sapiens
acaaagtcaagagacagcgattggacagaatttgtgaagactttatattcagagcaccaatcaaattaagcaagcctggggaacttcgtgaggaatatg

SEQ ID NO: 862373 - DNA, 100 bp, Homo sapiens
agagctcaacagctacccccgcttcagcgactggctgtacactttcaacgtgaggccggaggtggtgcagggaatgaaagctactggttgattttaaagt

SEQ ID NO: 862374 - DNA, 98 bp, Homo sapiens
gcgtattgggcatcacagcccctgctgactggaaataccggcatgcaggattgatggccttatctgccattggtgaagggtgccaccagcaaatggaa

SEQ ID NO: 862375 - DNA, 100 bp, Homo sapiens
attatagagctggaattaggcaaatatggacagttgaaacattgtagtcggtatatacatgacttatttccttcactcatcaagaatttggatcccgtac

SEQ ID NO: 862376 - DNA, 99 bp, Homo sapiens
agagatggaaaagtcattgccgatccgaaggaaaacccgctctctgcctgaccggacacccttccatacctgtaagaatgattgatgttggctgatatt

SEQ ID NO: 862377 - DNA, 100 bp, Homo sapiens
ctgcattggacccagctattgctgcagcatttgccaaggagacatccctcttagatttgatgaggcgccaagaagaacttcggaggatggaagagctgca

SEQ ID NO: 862378 - DNA, 100 bp, Homo sapiens
gcaagcgaaattaagggaaaatggatgtagaaaatgagcagatactgaatgtaaaccctgcagatgggacaccaggtccaataccacctccaagccgagt

SEQ ID NO: 862379 - DNA, 100 bp, Homo sapiens
accccatccctgacgacaaaggctgtgctcttggtgaggaagttaacaccttccaccatgaccacctcagcaagttcccacttaaataaaggcatcaagc

SEQ ID NO: 862380 - DNA, 100 bp, Homo sapiens
gagcaagccgggcggcctgccccgccggagcagcatcatcaaggtccaaattaactgtgctacagatgacacacaacaagcttcttcaagaacataataa

SEQ ID NO: 862381 - DNA, 99 bp, Homo sapiens
gtggtactcagcaagctcgagttaaagttggatgtgctggaacagatcactttgggaagcagtgacatccaacctgtatcaagtcttctaatctgtgaa

SEQ ID NO: 862382 - DNA, 100 bp, Homo sapiens
acaaccctggccaccccttcataaagactgtgggcatggtggctggtgacgaggagtcctatgaggtggaacgtgtgatcaccattatgcagaatccacg

SEQ ID NO: 862383 - DNA, 51 bp, Homo sapiens
gtcgttgccttgtatttccagagaacaggcttactcaattccagatatggc

SEQ ID NO: 862384 - DNA, 98 bp, Homo sapiens
acagaagctaaaattgctgaaaagacagcaggcacattgcaagcaacccgtgccttgatggtggttggcatcctcctgggagtgatagcaatctttgt

SEQ ID NO: 862385 - DNA, 98 bp, Homo sapiens
agaatggcctttacacacctcagaaatttatagataacaggatcatttcatctaagattgaagataaaactttccaagtccttggtaatctttacagc

SEQ ID NO: 862386 - DNA, 100 bp, Homo sapiens
gagatgttacccagtatcttggtgttgctgaagaggccaaggcagaggcttcctcaggagaccatcccactgacacagagatgaaggaggagcagaagag

SEQ ID NO: 862387 - DNA, 100 bp, Homo sapiens
gtgaacgcatcaatcagctcatccgtcagctgaactagacccaggtatgatctcgtgaaaccttgagagaaactgaatgacgaatgaaactattgttcct

SEQ ID NO: 862388 - DNA, 100 bp, Homo sapiens
tggcaagcaagtttaatcagacctgctcacacttcagaatagagaagaatttacatagtacatgacgaagttaaggataaagcttttgaactagaactca

SEQ ID NO: 862389 - DNA, 100 bp, Homo sapiens
cgggggctttcgcccgggtcctcctagaaattccccccgaagaagactcccccacatctgggtatgatctcgtgaaatcttgagagaaactgaatgacga

SEQ ID NO: 862390 - DNA, 100 bp, Homo sapiens
ttcaccaaataatagctgtttgtattttggctgctgcaggagccattttagtacaaaattggacagctgtacatgatcagcaaacacagccatgaacaga

SEQ ID NO: 862391 - DNA, 51 bp, Homo sapiens
ctgttacttccaagtcatcaccagaaagttaccttccctggtttgaagtgt

SEQ ID NO: 862392 - DNA, 98 bp, Homo sapiens
gaatgtctggcgcttcccctatcgagcgtacaccaatggaggaggtcacggtctagatcacattctcgatccagaggaaggcgatactctcgctcacg

SEQ ID NO: 862393 - DNA, 100 bp, Homo sapiens
ggagtagaccatcttcaccagaaggttgtctaccttcataacaacaatatctctgtagttggatcaagtgacttctgcccacctggacacaacaccaaaa

SEQ ID NO: 862394 - DNA, 100 bp, Homo sapiens
gtgagccatgaaatggatggacttatttttcagcctactggaaacaacatagacgtttgtcctgaatgtggtcacctgaaacagaaacatgtcctttgtg

SEQ ID NO: 862395 - DNA, 100 bp, Homo sapiens
cccgctcccccgagttcacccatgagaaccccctggagacccgcaatatctgtttcttctccaccaactgtgttgaagctattgagaagggcaaaggcaa

SEQ ID NO: 862396 - DNA, 98 bp, Homo sapiens
ttccctccacacagatgagcggtgcttggaagctcgaagtctggctgtggccatgggagatacagtagtggagcctgcccccttgaagccaacttctg

SEQ ID NO: 862397 - DNA, 98 bp, Homo sapiens
ccatctttttctggatgaacctgggcggatgtcagaccagagaagagcacagaatgtaccagagaggtatgatctcgtgaaaccttgagagaaactga

SEQ ID NO: 862398 - DNA, 100 bp, Homo sapiens
accaagtgacggaacccaaaaggtgacatacctggtacataactttgaaggaatgcttccggatcccaagaacactcacatcgtcatcagctggatgatc

SEQ ID NO: 862399 - DNA, 100 bp, Homo sapiens
gtgaaccatggatttgagacagtctatgagcttacaaaaatgtgtactatacgtatgagctttgtgaaggtgcagagcattgtagaccaaggagccatgg

SEQ ID NO: 862400 - DNA, 98 bp, Homo sapiens
gaatttgatgggagcagtaaacactttgtccctcatatcacagatgcaatccaggagtgggtgatgagacaggcgttaatacctgtagatgaagatgg

SEQ ID NO: 862401 - DNA, 100 bp, Homo sapiens
cacagacaacatgcggattgccaaagaggaggagtcagtggatcggtggggaaaatgctgcttaccctgggccctgggctgtagaaagaagacaccaaag

SEQ ID NO: 862402 - DNA, 99 bp, Homo sapiens
tacgagctcctcagcgctctgcagaactgataaatttcaaacggaagagagtggcagcatttagaaagaatctaattgaaatgtctgaactggaaataa

SEQ ID NO: 862403 - DNA, 98 bp, Homo sapiens
caggagcttttcgtaaagggaagtcatttctactggacttcatgcttagatacatgtataacaagtttaaggaagaaatctctaaacgttttaaatca

SEQ ID NO: 862404 - DNA, 98 bp, Homo sapiens
ggagcccttccacgcccaggtgggctccctgtacatcgtcctcggggagctccagcatcagcagggagcgcctggaccatgctgctgagcgcctactg

SEQ ID NO: 862405 - DNA, 98 bp, Homo sapiens
ccattttttaaacttaggtatttaagtactgaaaggtccagtgcacgtgccaacattacactgtcagggaagaagcgcagaaaactcctccagcagat

SEQ ID NO: 862406 - DNA, 98 bp, Homo sapiens
gggcgacgagctgaccctgggagacatcgacgagcttggggcttccttggtcgcacccaccacctgcctgcccactggtcagccttcagggaccctga

SEQ ID NO: 862407 - DNA, 98 bp, Homo sapiens
tatccgtgcgagaacagctattccacgagaggatccgcgagtgtattgcaacagcattattgagaaaagcccttacagaagagtgtggccgtaggtca

SEQ ID NO: 862408 - DNA, 100 bp, Homo sapiens
agagcgccccagggcaagccccgctccggccaacaatgatgtcttggcattgcccattttcaagcaggaagattccagccttccattggatggtgaaaca

SEQ ID NO: 862409 - DNA, 99 bp, Homo sapiens
agcaacttgttcctgagctgtgcaaccaatcagagtccagtggagaaggtgattttacaacgagatgctgctctccatagggatgctcatgctgtcagc

SEQ ID NO: 862410 - DNA, 100 bp, Homo sapiens
gcagcgggacccctacctcaaggagatgaacatccgcacctacctggtcatcgacccccgggatgatcggctgaatgtaacagaggaactaacgtccaac

SEQ ID NO: 862411 - DNA, 100 bp, Homo sapiens
tctgaagaaaagtagaaggaaaaacagaacgttgcaaactctggaaaaaaacttgggggcctgaattaatgaataaatatgttggtgaatctgaaagagc

SEQ ID NO: 862412 - DNA, 98 bp, Homo sapiens
ctgcggtgtgagaatggagtgggcaggaaagcagcgggactttcagccccagcatgagaccagatgtaagctctcctccatccagctcctcaacagca

SEQ ID NO: 862413 - DNA, 100 bp, Homo sapiens
gcccgtagtgtggaagcagcttcagagctggtggagttgagatctataatggagatcgtaaaataaaggtttccaacaccctggaaagccggctggatct

SEQ ID NO: 862414 - DNA, 100 bp, Homo sapiens
aagattactggatgcacgtacagaatacattcagccgtcaggttatcaatactctggctgaccatcatcatcgtgggactgactttggtggaagtccttg

SEQ ID NO: 862415 - DNA, 100 bp, Homo sapiens
ggaggagatgtactgtgcttggctggaaaaccccaaaagtgtacataaggactcgctgattcttgagaagagtcaaaactggagctctcaaaaaatggac

SEQ ID NO: 862416 - DNA, 100 bp, Homo sapiens
tgttattgattctggtaaggtgaaagagcatcatctgactgctacatatatgattctgctactggctactattatgaccccttggcaggaacttattatg

SEQ ID NO: 862417 - DNA, 98 bp, Homo sapiens
ggcactggcccgccacagcgacgccggcgccgagggacaccgcagtatgaggcagaggtatcgagaaccttccctgcgaacttcagaggaacttccag

SEQ ID NO: 862418 - DNA, 100 bp, Homo sapiens
gttctcctgcatccttatggcgtgcctatgattgtaccggcagctccttaccttcctggactgattcagtcacctctgacaaaattctggggacgctggg

SEQ ID NO: 862419 - DNA, 99 bp, Homo sapiens
tcttctgtgaggctgtggccatctacggcatcatcatggcaattgtcattagcaacatggctgaggcccagtttgatatctctgtggccagtgaaatta

SEQ ID NO: 862420 - DNA, 100 bp, Homo sapiens
agcactgtgtgtctccccggacgcgagcccgctcccctgaaactctaagaaggagctgatgtggaggagcagctgagacagttcaagatgacgaccacag

SEQ ID NO: 862421 - DNA, 100 bp, Homo sapiens
ggaagtgttggaaaagtccagtactttaaatgtgcccccaagtatggtttttagaacttcagccataaaaatgggcagaattttccttgatcatatcggt

SEQ ID NO: 862422 - DNA, 100 bp, Homo sapiens
gagaaccaagtttaccctcagaaaaagtaagaactgaagaggcagactttgagaatcactacaagaaaaactccttgtggtgaaggttctaagacgtggg

SEQ ID NO: 862423 - DNA, 100 bp, Homo sapiens
tgattactgctactggtcagtcaacccagaggatccccagtatgcatctcaagatgtggtatcatgatattagctggtttgacatcaagtcatttgtgag

SEQ ID NO: 862424 - DNA, 99 bp, Homo sapiens
cctcctaaacgtgtaccatttccacttgatgtcatcacgcagaaggggtgaaagagactcggtgacagatacagggaaatttacctaaatattctcata

SEQ ID NO: 862425 - DNA, 100 bp, Homo sapiens
cagagctctgccaggcagaaggcctctctcctgatacagcaggcgctcaccatgttccctggagtatggaagctccaaaaggaaagataccagattgatc

SEQ ID NO: 862426 - DNA, 99 bp, Homo sapiens
tcctcagtcctcagtcatcttgttcaaaaggtgatgacctatcaacagccattctcaaacagaagaaccgtcccaatcggttaattgttgatgaagcca

SEQ ID NO: 862427 - DNA, 98 bp, Homo sapiens
cgctgccacggtctgcgtagctccagaggtttaaccataggatagagaaaccagacatatgtagagtgtgtcggtcagaaggaacacctgagaaaccg

SEQ ID NO: 862428 - DNA, 98 bp, Homo sapiens
tgagctgttcctcccagctacgagctgccccagtgttgctaacaaccacaagcagaatttgatgacggtggcaaaccttggtgtggtgtttggaccca

SEQ ID NO: 862429 - DNA, 98 bp, Homo sapiens
ctcctgatggcctgcctgaggagcagccacagaccaccaagctgaagggcaaaatgcagagcaggttggacgcgtgtatccccaagcggtctactttc

SEQ ID NO: 862430 - DNA, 98 bp, Homo sapiens
acactcttattgaaacaacagactatgctgggcttattcaacagccaactcagtttataaatccagaaacacctggctatgttggatttgcaaacctc

SEQ ID NO: 862431 - DNA, 100 bp, Homo sapiens
agggctgctcaagacgccctggagggcggcctcggccatgcagttcttcaccaagggctaccaggagaccatctcaggtttggttgggatgttccagtaa

SEQ ID NO: 862432 - DNA, 50 bp, Homo sapiens
ctcagacatgttctcaccacccttgcttcgtgctgcctgatgacagccag

SEQ ID NO: 862433 - DNA, 100 bp, Homo sapiens
gatctgcccgttgtgtttgtgaaacagagaaagataggcggccatggtccaaccttgaaggtaaagtcagtgataaatcttttgtttgctgcatatactg

SEQ ID NO: 862434 - DNA, 100 bp, Homo sapiens
tggaagatgatgttgtcaagaagggcgctatttgtacttctaaatactccagtccttttccatgcactggaggagaggtttattacagaggtcagctggg

SEQ ID NO: 862435 - DNA, 100 bp, Homo sapiens
gtcaagcgcgctccgccgggaaacttctgcgggcgccgggctgaagctccgggcagggctgggaaggaaagctttatcttcaagccaggatgaagggaga

SEQ ID NO: 862436 - DNA, 51 bp, Homo sapiens
atgaatggaaatcggctccgcagatggtgatggaatttcctgataatgtgt

SEQ ID NO: 862437 - DNA, 98 bp, Homo sapiens
cacgcggctgcacaactgcaggaacaccgtcacgctgctggaggagcagggagaaggttttaaggtgaaaacgaagaaagaaatccggcatgtggaaa

SEQ ID NO: 862438 - DNA, 100 bp, Homo sapiens
tttacagcagcaaacaagtggattgaaatctcctaagagcagtgataaacagagaccactgcagctgccactgcagagccccgccatggaagacacgccg

SEQ ID NO: 862439 - DNA, 100 bp, Homo sapiens
acccagatgaagctgtagcgtatggtgctgctgtccaggctggtgtgctctctggtgatcaagatacaggctgctgagaaactaggtgaaactgagaaac

SEQ ID NO: 862440 - DNA, 100 bp, Homo sapiens
ctggcgaagtgagcatcttgattagaagcaggctgtctctctggatcaatgagaagatgctcacagcccaggacatgtcttacgatgaagccagaaatct

SEQ ID NO: 862441 - DNA, 98 bp, Homo sapiens
tgaaataacccttgatcctcctcctaattgcaggaaatagttgacaaacagggacataccaaagtattgagttttacgattccatctttatccaaacc

SEQ ID NO: 862442 - DNA, 100 bp, Homo sapiens
gttggagaactacagaaacctggtctccctaggaattcctcctgatcagcagagactgatctttgctggcaagcagctggaagatggacgtactttgtct

SEQ ID NO: 862443 - DNA, 98 bp, Homo sapiens
gatacttgccgcaaagcaaatgccattccagatggtccccgaggcatgtccctgcatttaggcaatgaagtgtttgatgtgtacaaagccccactgca

SEQ ID NO: 862444 - DNA, 100 bp, Homo sapiens
ctatggcaacatcaggtgactgtcccagaagtgaatcgcaggcttcaacggaccacaccaaaatgccatctcaaatggaacacgccatggaaaccatgat

SEQ ID NO: 862445 - DNA, 100 bp, Homo sapiens
ccgcccgcatcagcggcctcggggaatggaagcggagaacgcgggcagatcgaagcaaagctgagatggatttgaaggagctgagcgagtcggtccagca

SEQ ID NO: 862446 - DNA, 100 bp, Homo sapiens
atttatataagaagatgcaggctggagaagaagtcactgaacttaggagaaagtatacagaattacagctggaagttcaaaccttgtactactcagctga

SEQ ID NO: 862447 - DNA, 98 bp, Homo sapiens
tgcaggactccaaggtcattttcgtggagaaagccccaggatgggagctacagtttttgtccagcccctggacctggtgaagaaccggatgcagttga

SEQ ID NO: 862448 - DNA, 100 bp, Homo sapiens
gagaaaacactttcgagtgccagaacccaaggaggtgcaaatggacagagccatactgcgttatagcggccgtgagttacaggaaatacaggaggcagag

SEQ ID NO: 862449 - DNA, 100 bp, Homo sapiens
ccgctcgtcccgctcgtcatggcctacccgggatacggaggagggatttttggaagtaccagcacagtgacgcttcctgaaaccttgttgtttgtgtcaa

SEQ ID NO: 862450 - DNA, 100 bp, Homo sapiens
tcagcagacagttccaggaagtgaacaagtccaagaggaccttctgattagtccacagtcttcctctatagaaataagcgggttttgaaaacaaaaaaaa

SEQ ID NO: 862451 - DNA, 98 bp, Homo sapiens
atgaaggcagaagactatgatgttgtaaaagttattggaagaggtgcttttggtgaagtgcagttggttatcccatcatcaggtagcaagttgaaacg

SEQ ID NO: 862452 - DNA, 100 bp, Homo sapiens
gcttcaccatcgtcagcctcatgtacttcgcctttaccagattcaatgccatccccatcaagctaccaatgactttcttcacagaattggaaaaaactac

SEQ ID NO: 862453 - DNA, 100 bp, Homo sapiens
atagaagaagaaaggcttcggttggagcagcaaaagcctggtactgtggcgctccgtgaaattagacgttatcagaagtccactgaacttctgattcgca

SEQ ID NO: 862454 - DNA, 119 bp, Homo sapiens
agcaagctgggcctgctggacaaccactcctcggagttcaagttgaaggggcccggccaggactcggggaagggtggcctgagagcagcgatgacctctggggtcactgtcccaggagg

SEQ ID NO: 862455 - DNA, 100 bp, Homo sapiens
gggttccgcccggggctgggatcccatcaccctccacggccgtccgtccagcctctaaagagagcaatcactacacttatggctgggattttgcgcttag

SEQ ID NO: 862456 - DNA, 99 bp, Homo sapiens
aagaacttaacttttgtggcacctatctatggtgcagatattaatgggagcatatatgatgagaacaagttgaaatcatcgcagaaggataaagttcgt

SEQ ID NO: 862457 - DNA, 100 bp, Homo sapiens
gaaggattcgaactgcacttctggagtcaagtaagggagaattgactacgcttatacatcagcttcaagaaaaggacaagttactcgctgctgtgaagga

SEQ ID NO: 862458 - DNA, 98 bp, Homo sapiens
gaggggcatccagcatactcccatcagcatcaagaatgcccgcgtgtctcagcctggtgaactcaaggactggtttgtgggtcgaagcaatgcccagg

SEQ ID NO: 862459 - DNA, 100 bp, Homo sapiens
ctggatggatacctgaagacttcagccttgtcaggaacacagcctattggatccctaggctcaatatgtcctaatagttatggaagtgtgaaagatgtgt

SEQ ID NO: 862460 - DNA, 100 bp, Homo sapiens
ttcagggtgtgatgaatgtcctggagcacttccacaagtatatggggattccgcagatccggcagctttccgaaaggtgtcatggagaaactccagctgg

SEQ ID NO: 862461 - DNA, 100 bp, Homo sapiens
agggtgtctggtccacgacctatcctaggcgccatggtgcaattaaaaactagcatttctagtcagtatgtaattcggatgcagccgactaatagatgcc

SEQ ID NO: 862462 - DNA, 137 bp, Homo sapiens
gaaaaacttccaaatctcacacatctaaacttaagtggaaataaactgaaagatatcagcaccttggaacctttggtgatctgcctcaacatcttcaggtgatgatcaaccttctgcgttgcgaagacagaatcaag

SEQ ID NO: 862463 - DNA, 99 bp, Homo sapiens
agcaggaggctcctgggacccaatggcctctggatgaaacgtcaggaatttactacacagacatagggcctgattacattccaacagaggaagaaagga

SEQ ID NO: 862464 - DNA, 98 bp, Homo sapiens
aacactgtaattctgtgggatatgtccttggggaaaccagcagctagcctcgctgtacacacagacaaggtcccgcctgactccgctctggaaagtcc

SEQ ID NO: 862465 - DNA, 98 bp, Homo sapiens
agaattatggagagaacccagaagcctacaatgaagaactgaagaagctggagttgctcagacaggtggctggtcattgaccgcaaggtttacaacat

SEQ ID NO: 862466 - DNA, 98 bp, Homo sapiens
gcgcgccctcactgcagcccctgcgtcgccgggaccctcgcgcgcgaccgccgaatcgctcctgcagcagagctacgagttccagggagctctgtcct

SEQ ID NO: 862467 - DNA, 100 bp, Homo sapiens
cgcggctacggcgtcatggaggagatccggcggcagggcaagctgtgcgacgtgaccctcaagaacaagttgaaatcatcgcagaaggataaagttcgtc

SEQ ID NO: 862468 - DNA, 100 bp, Homo sapiens
tctccctagtcaccctcatcgattcctacgagtcttctagcttcatgttcctggtgtttgacctaacacagatatgtagaactcttcttgaattctacag

SEQ ID NO: 862469 - DNA, 98 bp, Homo sapiens
ctgtcctgcgcgcgcagattctcgcaaatctggaagcggatcgcgtggagtgacggtcacaccgcggcgggaggagctgtgcagtgagaagcaaagca

SEQ ID NO: 862470 - DNA, 110 bp, Homo sapiens
gacataatatcagatggcaccaagaaagactctgggatggcttgaacatgcgaaagtgacacagacagagttgatgcgtgagtcatttagacagaaacaagaagcaacag

SEQ ID NO: 862471 - DNA, 98 bp, Homo sapiens
agctctgcgaggccatctgccccgcccagatggagtttcactcttgttgcccaggctggagtgcaatggcgtgacctcggctggctgcaaccttcacc

SEQ ID NO: 862472 - DNA, 100 bp, Homo sapiens
ttggaagttattccgtagcataagagctgaaacttcagagcaagttttcattgggcaaaatggggatcttctccatactgtcttcaagaatggcaaggtg

SEQ ID NO: 862473 - DNA, 100 bp, Homo sapiens
ctcgggctcgcccggcaccgcggggcttgatcagggagctatgacagtgaaggtcgtctgacaaatgttacgtttccaactggagtggtcacaaacctgc

SEQ ID NO: 862474 - DNA, 100 bp, Homo sapiens
gttgcacttattcatggaattacaatgggtggggtgacatctgttcccgagctgttcctgactgcagtgaagctcacccatgatgacacaggagccaggt

SEQ ID NO: 862475 - DNA, 100 bp, Homo sapiens
gacaacataggttccaacaccgagggaaaaccagtagattcccagacatcgcgaagtgaatctgaaattgtgccaaaagttgctaaaatgactgtatctg

SEQ ID NO: 862476 - DNA, 100 bp, Homo sapiens
gaattaatctgcccactcccctggcatatgtggagacgctcctagaggttttaggtggattttatccaaagccaagaaagacgataccgatgatgaaatt

SEQ ID NO: 862477 - DNA, 100 bp, Homo sapiens
tccagacccctgtggaccagctcctgcaggacgggctccagctgcgctcctgcacattccaggtaccgtacagagtggatttgcagggcagtggcatgga

SEQ ID NO: 862478 - DNA, 100 bp, Homo sapiens
tacagagactgaagaggactcaggagcaaatcagtaatgttcaaaccttgtactactcagctgatcacaagctgcttgatgggaacctactagatggaca

SEQ ID NO: 862479 - DNA, 99 bp, Homo sapiens
cgcagcgatgatcttccccagcagcagtggcaaccccgggggcagcagcaactgccggacgccctatcgcaagcagatttcagagacaactgtctgaac

SEQ ID NO: 862480 - DNA, 100 bp, Homo sapiens
tcctcagcattattaatgacctcttggagcagctgggttctcagctgctgcgggagttgaaaaagatggacgacaaagctcttttggtggaagtacagct

SEQ ID NO: 862481 - DNA, 100 bp, Homo sapiens
aacaggccagcggttcaaaactcggaaaagggatcgtgatgcttgtaaatgagaatcctctgctgacagaagaagcagccctgaataaatgctacagagt

SEQ ID NO: 862482 - DNA, 100 bp, Homo sapiens
gcgggcagagcgcggcggcgcggactccctcgagcccacttatcagcagcttcagaaaatgaaactggacaagagtccctttgtggtcgtgtctgtggtt

SEQ ID NO: 862483 - DNA, 100 bp, Homo sapiens
gatggaggaggaggataccaagagagaggtgcccaaggaagatggagttggtgatgtgcaacatttcgggtgaagttgaacaaattgctatgatgaaacc

SEQ ID NO: 862484 - DNA, 99 bp, Homo sapiens
ggaagatgactgtcaagttttagaagagttccgccatggagtcatagttgcagctgactccagggctacagcgggtgcttacattgcctcccagacggt

SEQ ID NO: 862485 - DNA, 98 bp, Homo sapiens
cagtgccagagtgtatgcactttactacaaagatggacttctctgtacagcatctctggaagttgatggtagaagaatccgatttactgggtcagctg

SEQ ID NO: 862486 - DNA, 98 bp, Homo sapiens
gctgaagacctgctacagttctctgccaatattcctgctctttacaatagtaaacagcttgaagactttttcaaggtatgcaggtgccttgagagctt

SEQ ID NO: 862487 - DNA, 112 bp, Homo sapiens
cgacgcctccgccgccgcctgaggaggcgagctagccgggagttacaccgccaccgccagcaaattgaagaagttcgacaggtgggatcctataaaaaggggacaatgacta

SEQ ID NO: 862488 - DNA, 100 bp, Homo sapiens
actttggcaatatacctgctccaatgacagtaggaaatattcaggcatctcaacagtagagaaatggtcagaaggaacgacaccacagaagaaattagaa

SEQ ID NO: 862489 - DNA, 98 bp, Homo sapiens
ctctgctgaagctgtctgggggagatgatgagttcagaatttaacattacgcagccagaagttgggtgtattatctagctcacagaatggtccaccaa

SEQ ID NO: 862490 - DNA, 100 bp, Homo sapiens
tggacagtgatgtgaagaggttcagctgtcctaatcctcactgccgaaagataaacaagctggaggcacgcctgaggcaggcagggtgtacagatgttag

SEQ ID NO: 862491 - DNA, 98 bp, Homo sapiens
gtgccggctcgccacaccgctggccaagaacctggagcccgtatcctggagctccctcaaccccaacgtccgtctccaagagagtatgaagagagtgc

SEQ ID NO: 862492 - DNA, 100 bp, Homo sapiens
tcattctcgctaacaactgcccagctttgagggaacagatgctgcttgtgttgctcagagtcacggaatctgtactgaagatgccatcacaagcttttct

SEQ ID NO: 862493 - DNA, 98 bp, Homo sapiens
gtgcctggtgtgacgtctctcaggatgcctgagccggggaagaagccagggtttggtaaaggctccagtgtggtggcctatgaaggacaatcctggca

SEQ ID NO: 862494 - DNA, 100 bp, Homo sapiens
tctcagaggacgccttcaacaccaccttcatctccaccatcggtcttatatccagatggccaggctcagatgattcaccccaagcctgcagacttccgga

SEQ ID NO: 862495 - DNA, 99 bp, Homo sapiens
tcccactaaaccctatacatcatcttctcctatcctaagtgacatcaaggtggactattccataatagcatcacaagccggagccaccctcaacaacct

SEQ ID NO: 862496 - DNA, 101 bp, Homo sapiens
ggacatgtctaaccccggaggccggaggaacgggcccgtcaagctgcgcctgacagaatgtcatacccaggctatcccccaacaggctacccacctttccc

SEQ ID NO: 862497 - DNA, 145 bp, Homo sapiens
agacaaacatgaggataacagaagaagttgggcaagcccggtttatacagaagcagatggaacattttcaaggtatttaccttgctgtggattgctgactggatggtccatcacttctggaggaaaggaaaggacccggatagtt

SEQ ID NO: 862498 - DNA, 137 bp, Homo sapiens
gtacctgaacgccgccttggacctcctgggaggcgaggacggtctctgccagtataaatgcagtgacggttctgggttgaatgatggacagtggcacgaggttcgcttcctagccaaggaaaattttgctattctca

SEQ ID NO: 862499 - DNA, 99 bp, Homo sapiens
tacatcccacagagatacccagacaacaggatcgtctcgtccaaggtgatctgcaactctttcaccatctgtaatgcggagatgcaggaagttggtgtt

SEQ ID NO: 862500 - DNA, 134 bp, Homo sapiens
aaacagtatttacttacaagattcggaggtaacagtgaagggattcaggatatacggtgcaccttgcttggctttgaattggtggagacgccgaaaagctcggacaaactctgagaagctgtatagtcgatggg

SEQ ID NO: 862501 - DNA, 100 bp, Homo sapiens
gaaaacctttgggcttcatggagtcgtcttagatgttgattcaacaaatgtagtaggacattctttaggatgtacttggcattccttgaggaattctcct

SEQ ID NO: 862502 - DNA, 148 bp, Homo sapiens
gtcaatcccagatttgttgccataatcatagaggcaagtgggggaggagcgttccttgtcctccctctgcacaagaccttcactgcctggtgtaactcccacctaaggaaagccggcacccagattgagaacatcgaggaagacttca

SEQ ID NO: 862503 - DNA, 99 bp, Homo sapiens
tgctggaagggaaggaaaaacctgtatgtggaaccacctatgttcgtgagcagcagtggattgccaccaagtccagttcccagtccaagacgattttca

SEQ ID NO: 862504 - DNA, 100 bp, Homo sapiens
cacagattccaatgcaagtcgagagcgatgtggcgttccattctcctgctgcactaaagatcccgcatgacaaatggcctacagctgtgagagcaaatgg

SEQ ID NO: 862505 - DNA, 100 bp, Homo sapiens
aattcctcaaacagaatttcacacagggtattccatggagaatgagccacattgctgtgaggaagcctgggctacatggagaagcccacatgaagaggcc

SEQ ID NO: 862506 - DNA, 98 bp, Homo sapiens
cagaggaagaggaaagcgaactgggagttcccattagacttgaagttgggccacgtgatatgaagagctgtcagtttgtagccgtcagacgagatact

SEQ ID NO: 862507 - DNA, 100 bp, Homo sapiens
attgttacaattttttttcaagaactgccgtcttctttgcctgcactaatggacagttcgtgtttggttaaagagagacagtggacagtattggccaagc

SEQ ID NO: 862508 - DNA, 100 bp, Homo sapiens
ccaacaaccccccgtatttgccccccgagatccgagggaagggcttcgactggccgctgctggtgaaggacttcaacctgcttcgctggcttggtgccaa

SEQ ID NO: 862509 - DNA, 113 bp, Homo sapiens
tgagaagaccaccatcaacaatgagtacaactaccgctgctggaccacaaaccgctgccagaaaaaacactggaactattttggggctgatgagaatcttggtccagtggctg

SEQ ID NO: 862510 - DNA, 98 bp, Homo sapiens
gcagtgtgcaggggcagagcagtggagaacgtcagctgcctcaacaccagcctggtgatcctgatgctggcccgacggaaagagcggctgcccctgta

SEQ ID NO: 862511 - DNA, 100 bp, Homo sapiens
ttgggcattgctgaatatgaaaagttcctaaggacggtctgaagagccaagagctatttgatgaaattagaatgacctacatcaaagagctaggaaaagc

SEQ ID NO: 862512 - DNA, 99 bp, Homo sapiens
tcagcctttcagccttaccaagcaacaagtgaaattgaggtcacaccttcagtccttcgagcaaatcacaaacaacatcgacccagtgggaagaatcca

SEQ ID NO: 862513 - DNA, 98 bp, Homo sapiens
ttggagagaaaacttgcaaggaaaggaacatgtttgaatttcagatgtgttcctcaatgaatcaccactcactgaaaatgaccgagacagccagtcgc

SEQ ID NO: 862514 - DNA, 100 bp, Homo sapiens
gtgatgattccctgcctgcagagggttacatgggctttagtctcggagcgcgttctgccaggtgatcgaggaaacatctcaacatcttctaaaccagcct

SEQ ID NO: 862515 - DNA, 98 bp, Homo sapiens
gatattcagttgcacatccccacatcaatgcactgccaatgctcaatgtcaattgctgcaagcttagtgagtgaagatacaaagaccaagtttttgaa

SEQ ID NO: 862516 - DNA, 100 bp, Homo sapiens
agaagctattattacaagaataaaggcaggaatcaatccattcaatggtgtgtcaaggatgccacaatgccatcgacccagaagtgcagcgggtgaccta

SEQ ID NO: 862517 - DNA, 98 bp, Homo sapiens
gggaaccactatgccatgaagatcctcgacaaacagaagcaaagagagcaggatgaatggacagtaccagcagcccacggacagtctcaacaatgaca

SEQ ID NO: 862518 - DNA, 99 bp, Homo sapiens
tacattaacatgatctggtcagcccccctgcaagtcatccttgctctctacctcctgtggctggttgtggcagcactgcctgaaggtatgagaccagat

SEQ ID NO: 862519 - DNA, 100 bp, Homo sapiens
gagcgacgagctcagcaacatcgctatgcaggtgcggaagctggtgggcactcagcaccctctgcttaccacagccaggaaaaacaagaatggtggtggc

SEQ ID NO: 862520 - DNA, 100 bp, Homo sapiens
tgacttctctggggactctgaacttccctggtcgaacagttttttctaatggctattcaagtgagacggtttaagcggaagcatcttactgccattgact

SEQ ID NO: 862521 - DNA, 100 bp, Homo sapiens
gaaggcgctgcgcaagcacgctgaggagaaatgttcttttggggccagagtctgggcatatatgaatgcaaatccgtgtttgttcacaactaagcccagc

SEQ ID NO: 862522 - DNA, 98 bp, Homo sapiens
gtaatattcttctgggtgaggatggttcagtacaaatagcagttggattggatgctgctggcaagacaaccattctgtataaactgaagttaggggag

SEQ ID NO: 862523 - DNA, 98 bp, Homo sapiens
ggcgatggagctgttatttttagatacttttaaacacccgagcgctgagcaattctgtggtgttcttggtcacacatttatggagtttctgaagggca

SEQ ID NO: 862524 - DNA, 100 bp, Homo sapiens
tgattcccggaccctggaagagaagagggtggctaatgattaagatgtggtcaaaggtgaaaagattcttccggtatttgatgagccaccaaatccaacc

SEQ ID NO: 862525 - DNA, 100 bp, Homo sapiens
gggaagaatggccagatgggaaaccattggaaaggaaactcatcttggttcagaaaacgggagcagccagaccctagcacaaagaagcaacacaccatct

SEQ ID NO: 862526 - DNA, 100 bp, Homo sapiens
tcctataaatctcgcccaaacaggaaagggtacagctctgccggggggggaaaaagtggtaccattttgggcgttcttgagcttcagaatgcaaccagac

SEQ ID NO: 862527 - DNA, 100 bp, Homo sapiens
gaaaacctaaccatgaagacttgaacttaatacagcaagaaagaccatcaagtttaccagtaactgtgacatttgatgatgtggccttatatttttcgga

SEQ ID NO: 862528 - DNA, 98 bp, Homo sapiens
ggacctgcatgtgtgtgcgcgcgaaggagcggaagaatggcagtgctcaaactcaccgaccagaacccagcgggtgccgcttctccacccgaggcttc

SEQ ID NO: 862529 - DNA, 98 bp, Homo sapiens
gatgagaagagcagaaccatgagccgttcaggctcattccgggatgggtttgaagaagatgatgattcagatctgtactctcccagatactcattttc

SEQ ID NO: 862530 - DNA, 128 bp, Homo sapiens
cacacacaggtgaatttaaaggagcagccctggtgtcacctatcagtaaaaggttttggcacaaataccagtgggaatagtatttttggaagtaaaccagcacctgggactcttggaactgggcttgg

SEQ ID NO: 862531 - DNA, 98 bp, Homo sapiens
aaaccttctcatctttgtggtcgtgtttttaaagtaggagagcctacatattcttgcagggtcagtatagaccttctgatttgctgtgccctgagaca

SEQ ID NO: 862532 - DNA, 100 bp, Homo sapiens
tgcttaatgatataccacagtcaacagaacagtgtcctgctatagactatactagacacacacttgatggtgctgcatgtcttctgaatagcaataaata

SEQ ID NO: 862533 - DNA, 100 bp, Homo sapiens
tcctgcctcagcctcttgagtagcctgagtagctgggactaaaggcccaagtctgttttggtggtctgagaggaaaaaagatgagcttctaaagttttgg

SEQ ID NO: 862534 - DNA, 100 bp, Homo sapiens
gctcgcgggcggcgggcccgggtgcttccatacaaaggggacagaagagatgatggaaggcctcagtactgcaggaggggagacggatgtcatctacaat

SEQ ID NO: 862535 - DNA, 100 bp, Homo sapiens
tcctgagaagctgggattacaggatgaaacaggcgcctatttaatcgacagagaccccacctactttgggcctgtgctgaactacctgagacacggcaag

SEQ ID NO: 862536 - DNA, 100 bp, Homo sapiens
tggtgatgagcctcggaaagtgctcctgcggctgtatggagcgattttgcagatggatatcactactttaactggagttccagaagagcatataaaaact

SEQ ID NO: 862537 - DNA, 100 bp, Homo sapiens
cgtcctgttcctgatgcatgtgtgtggcaccaaccgcattccaggcagtggccattcaccaccgagtagcagtctcacttctccaagccacgtgaacttg

SEQ ID NO: 862538 - DNA, 100 bp, Homo sapiens
ttgagagtccaactggcactgagctatgaagacatgattggtgaggaggtgccatcggatcaatactactgggctcctttggcccagcatgagcgaggaa

SEQ ID NO: 862539 - DNA, 99 bp, Homo sapiens
aaaaattggatgtggcaattttggagaattacgattaggttgtgaagatgagaaaagaagtgaagagaattcgagttttagttatccgaaaacttgtca

SEQ ID NO: 862540 - DNA, 100 bp, Homo sapiens
gggtaaagttcaccttgaattaaaactgaatgaactgataacggagaatggaactgtatgccagcagcttgttgtacacaactccgatccaatatccgag

SEQ ID NO: 862541 - DNA, 100 bp, Homo sapiens
tatccttcaggagtctgtcaaagagaaagtaacaagaatcattcttgcagcatttcgtcacatggattaattgatgtatgttgagtttatggagctgcct

SEQ ID NO: 862542 - DNA, 100 bp, Homo sapiens
tgtgaagatacataagatcgtagccagacccccagtctattatcctcccagtccacaacgctgaaccgtggctggacgaatgtttgaggtctgttttgca

SEQ ID NO: 862543 - DNA, 100 bp, Homo sapiens
accacccatgaggacgtggaggtgggaaggtgtgtccggaggtttgcaggggtgcagtgtgtctggtcttatgaggtgtaccttgaaagacttttaacat

SEQ ID NO: 862544 - DNA, 98 bp, Homo sapiens
cccattcacctgaggcacccgaagaagagaccatccatatttccaggacacattcagctaacgtattttagcaggtggagtgaggttgaagattcctg

SEQ ID NO: 862545 - DNA, 143 bp, Homo sapiens
aaaagatcgagaagcagctgcagaaggacaagcaggtctaccgggccacgcaccgcctgctgctgctggagtgtatccagaagctactgtcaggaggacactgtaagagaaccttggcacctctgggcccaaagggaaagaca

SEQ ID NO: 862546 - DNA, 100 bp, Homo sapiens
gtctgacaaatttaagacttcaaaacatgaaaagtgatacttttcaagaggtattaatgctccctggaaatgctttctacgtcgatagctcagctcctag

SEQ ID NO: 862547 - DNA, 100 bp, Homo sapiens
agcttcaagatcaatgactcggtcacactcaatctggcagttcagcagcctcttctccaaaatcaagagctgggagtttaatgaagtcacctccatgtct

SEQ ID NO: 862548 - DNA, 100 bp, Homo sapiens
catcccagccatgtcatcttatctacgaaatgattcagcttttactggaccctgttgatttcaaaactactcatctgatgtttcatactgttacaaaatg

SEQ ID NO: 862549 - DNA, 100 bp, Homo sapiens
ctgtcaaccaagataaaaagaacatgctgttttcttttggaccccaatgaccagaagtctctagaggggatgcagaagatggagaaggaggagagtccca

SEQ ID NO: 862550 - DNA, 100 bp, Homo sapiens
ccagggagccaagcgtcctgcccggccgaatggatataaatttctctactgttctgcccgtgccatcgggatggcggacatgacgcggggctacctgcac

SEQ ID NO: 862551 - DNA, 98 bp, Homo sapiens
tcctttcccgatgatgaactggatgacctctactcggggtcgggctcgggctgttgactatagtcaatggggccaatggagccaagtgtatggaaacc

SEQ ID NO: 862552 - DNA, 100 bp, Homo sapiens
accacgcagaacgtcaacaccaagtgcatcaccatccccagatatatttttgccatcatggatcagtttggagatatattagaaggtgaagtggaccatt

SEQ ID NO: 862553 - DNA, 100 bp, Homo sapiens
tgctttcccaggaaattcaaactctcaagaggtctagtaccggcagttatgaagagattggagtcacttctccaattgtggctcacactgagcctgaatt

SEQ ID NO: 862554 - DNA, 99 bp, Homo sapiens
aagagtcaggggcacagagagatggagagagacctagttagcactgctcagcacgcaggcatgtgaggaagctgggcttaaaggagactccagcaaatg

SEQ ID NO: 862555 - DNA, 98 bp, Homo sapiens
cagcccccgcgctggtgcagccaccctcgctccctctgctcttcctcccttcgctcgcaccatgtgcttgatgaagccaccagtgccctgacagagga

SEQ ID NO: 862556 - DNA, 99 bp, Homo sapiens
ttcacgcacgccctgcgcctggtgaaccaagtgttcctttctgccgaaattctccattcatatagaaaccaagtatgaggacaacaaaggaagcaatga

SEQ ID NO: 862557 - DNA, 99 bp, Homo sapiens
tgtccgtcagtccctaggtatccgcactgctcaggggttattcagcttctcaaggctggaaaagcgaaggaagtttcctacaatgcactagcctcacac

SEQ ID NO: 862558 - DNA, 98 bp, Homo sapiens
ggaaccctggtcaccgtctcctcaggtttaactatagatcaacacatcatcttgcatctcatgggttctatgaatttttaaattggtttgatgaaaga

SEQ ID NO: 862559 - DNA, 129 bp, Homo sapiens
tgcaagtcctgggagacgcacagctaagatgcccggacatcctggaagctgggaaatgctaccagatggcctaacaaattcaaactcagggaagaaatgagacgagacctgatgcctggttggagttag

SEQ ID NO: 862560 - DNA, 99 bp, Homo sapiens
attcggaaagacacctggccagcggtccagagctgatgcaggtgcagattcactttataggaacagcttcagcttcagtgatgaaaaactgaattctcc

SEQ ID NO: 862561 - DNA, 98 bp, Homo sapiens
tgcaaaggccaatgttggtgctggcaaaaagaatgcccagtgtttacatggggacattgcacagtcacaaagagaaattacactaaaaggcttcagag

SEQ ID NO: 862562 - DNA, 100 bp, Homo sapiens
tattctgggcagatcaccctgctgaagcttgaacagaacacgtgttcagtcatcacaaccctcaaaggacatgaaggtttttgccaatccagaagactgt

SEQ ID NO: 862563 - DNA, 100 bp, Homo sapiens
gaagaggaatgttccctgacaatttcgttaaggactatcctattaagtgtaatctcactgcttaatgagcccaacaccttctccccagccaatgtcgatg

SEQ ID NO: 862564 - DNA, 50 bp, Homo sapiens
gtcccccgtgtcaactgaactggccaaaactggacaagccaaggcatctg

SEQ ID NO: 862565 - DNA, 98 bp, Homo sapiens
tgggagaatgtaactgaaagatacatggcttgcaaaaagtaaaccacgatcgttatgctgacaactggtgatgatgatgactgggatgaagactggga

SEQ ID NO: 862566 - DNA, 99 bp, Homo sapiens
gttgtcattgcagactcctatattttgcctttctctgaagttcttgactggaagagctattgaaaccaatttcagggaaattgagggcccagtgggaaa

SEQ ID NO: 862567 - DNA, 100 bp, Homo sapiens
ttgtccctgtttcgccacagttcctaccttatgagctcggttttcttatgcttataagagtggaacaggttgattattctagaccttcagcaaaacacag

SEQ ID NO: 862568 - DNA, 98 bp, Homo sapiens
cctcttggctattttgctggcgtatttcataggtatgggctacgtgagttcgtggtgattgcccctgctgcacacagtgacgctgttctcagcgaatc

SEQ ID NO: 862569 - DNA, 100 bp, Homo sapiens
agggtgggcttcgcagcgagcccctgtgcaggcatgtgagcagcagtgacagagtgggcaagccttaccgtggcgtaaagcctgttttcagcattgggga

SEQ ID NO: 862570 - DNA, 100 bp, Homo sapiens
tattctggtgtaactgtggacatcaccattcaggaagagtgatggctgttttagtacttcaggtggaattcgtccttttcatcttcagaactggaagcag

SEQ ID NO: 862571 - DNA, 145 bp, Homo sapiens
gaagctatcatgaaggtgttgaacttggctctcatgtttgcagacggttggcaggcaggcctgggcacttggcgcttgcattcacaagagatgggctctgtggtctgtggaatgaaatggttaaagatggagaaattgtatacac

SEQ ID NO: 862572 - DNA, 99 bp, Homo sapiens
tgagacttggtgggaacggaccttcctcttagtgagccaagccccccgagaggcccctgctcgtcgggccccatcctcagcgcagtacctggaagaaaa

SEQ ID NO: 862573 - DNA, 100 bp, Homo sapiens
agttaatcctcaatttaagcctgatctaacccctagaaacagaaatagagctgaggtcaaaggctggaaagtcatcaggagaaaaaattggttgtggaag

SEQ ID NO: 862574 - DNA, 131 bp, Homo sapiens
cgccgcccacgcgcgaggtgaatgaaggacacggcctcttgacactcccaggcagcacagatagacggatccctgggctcaaaatgcagagaactcaaagatattcatttcggccagtgttacaagatctc

SEQ ID NO: 862575 - DNA, 98 bp, Homo sapiens
agaaccaactggtcccgaaagaggtgacaggaactccctcgaaaggctttgatgagaaggcctacctgtcggccaagcagctgaaggctggagaggac

SEQ ID NO: 862576 - DNA, 99 bp, Homo sapiens
aagctcagaactgagaagctgtcaccacaggatggaggtttgcttctgaataacccttcggcattagctatgcatgagtgtaaatgtctttggccagat

SEQ ID NO: 862577 - DNA, 98 bp, Homo sapiens
caacagcggcaacgccatcaagcccgtctccttcatccgagacctgaaaacagcccatgacccatcgagaaactgcacctgtttcccagcctgaaaac

SEQ ID NO: 862578 - DNA, 100 bp, Homo sapiens
atgtcccagaaaggacacaaatagatgtaggcagaatacctttacagaggttaaaattgcccacatatgacagtggacatagaggacaacgcagatatag

SEQ ID NO: 862579 - DNA, 98 bp, Homo sapiens
ctcgctgcagctctgggacactgccaaagctgcagggccactgcaagtctataaagaacacgctcaggagaccctgtattcagtggatcagctggcac

SEQ ID NO: 862580 - DNA, 100 bp, Homo sapiens
tatcacaattactgatgggagcaagttgactaccaccagtggagtccaggatgagcaattctgtggtgttcttggtcacacatttatggagtttctgaag

SEQ ID NO: 862581 - DNA, 100 bp, Homo sapiens
gagtgtgcagcggattaaagctaaagacatagttcctggtgatattgtagaaattgctgaagcccttcagcggccagtagcatctgactttgagcctcag

SEQ ID NO: 862582 - DNA, 100 bp, Homo sapiens
tagctattttggttacccttcttttcgtcgttcatcactttccaggctaggctcatctcgaggctttctccagtctggctgaagctgcttatgaagctgc

SEQ ID NO: 862583 - DNA, 99 bp, Homo sapiens
ttcaagataaagtgattttttgcctttgttgattaactggacaaattcaggttcagggagcaagtttccgaggttggaaagaagtgacttcactgttta

SEQ ID NO: 862584 - DNA, 100 bp, Homo sapiens
acaacccttatgctgccctttccatagagcagcagaggcagaagctgccggtattcaaggtggtgttcccactgatgaagagcaggcgactgggttggag

SEQ ID NO: 862585 - DNA, 100 bp, Homo sapiens
catagaggctgccataaatcgaaattcatctaatcttcctcttccattaccaccaaagaaaacacgaattatttctgtacaaagctgtcacagatgcctg

SEQ ID NO: 862586 - DNA, 98 bp, Homo sapiens
gagaaaggcccacctgtgtcctggttgagggtctccagggttctttggggcccgagtctcatataagaactacagctcatcaggaggagatcgcagca

SEQ ID NO: 862587 - DNA, 100 bp, Homo sapiens
gaggatgtctcctgacactgtgccaaaggctcctaaacatttaaaagcagccgggggccatcaagtataagaccacaggaccacgtgattcataaagaac

SEQ ID NO: 862588 - DNA, 98 bp, Homo sapiens
acaatgaagattatttacaatgctaccctgctttttctggtgtcctgaacctggaagttgtgctttttaaggtttttctattgggaaagctactgatc

SEQ ID NO: 862589 - DNA, 98 bp, Homo sapiens
tacaaatgcaggttgtacagcagttagagctacaggacgcagggagccagcagataggtttcttgcttggaagctgtggagttactgtagccttgact

SEQ ID NO: 862590 - DNA, 98 bp, Homo sapiens
ggctctcaaagatgcccaggagaagctggagctggcagagaaaaaggccaccgattctgaaggaattcctgcccaaagaatatatcaagcagagagga

SEQ ID NO: 862591 - DNA, 98 bp, Homo sapiens
aattcgtgaagaatcagcatcatgtttggcagctgagtattggagccaggagcctgccatgaggaatatttcactgctacatggagtactcccgactg

SEQ ID NO: 862592 - DNA, 98 bp, Homo sapiens
agccacaccaccagaatgtgtctgtccccagcaataatgttcacgcgccttattccagtgacaaaggctgatttaaactgcaatattcaagatgatgc

SEQ ID NO: 862593 - DNA, 98 bp, Homo sapiens
cagcagaagaaacacttcctataaatctcgcccaaacaggaaagaatgagtccctggaacgccagatgcgtgaaatggaagagaactttgccgttgaa

SEQ ID NO: 862594 - DNA, 100 bp, Homo sapiens
tttgcctcatcccaggttgccttggaaaatgccaacgccgtgtctgaagttctgcacggagctaaaccagccgaccctgcccaacatccgcaagtggaag

SEQ ID NO: 862595 - DNA, 100 bp, Homo sapiens
cgaaccccttcatgcccaaatcccggaaactccagcgtgtctccagccgtggatgggagtcccagcttctggagacggggttcctggggatcttcctgtg

SEQ ID NO: 862596 - DNA, 100 bp, Homo sapiens
taaaaacaatagctcaaggaaacctttccaacacagatgtccaagctgccaagaaaacctattgtcaccggcgactgaactttctggaatccaagttcag

SEQ ID NO: 862597 - DNA, 100 bp, Homo sapiens
atgctcttcttggaaaaccagatccagaaactggaggagtcccgctcgaagctaggaatttatcaaagagctgctttctcggataagaggcatgaggaaa

SEQ ID NO: 862598 - DNA, 100 bp, Homo sapiens
gcgagcagcccccgggaggccgagtgcatctgttggaccgtgcgaggtgctccaacgagaagggctactttgcagtgactgagaaatgctccgacttttg

SEQ ID NO: 862599 - DNA, 100 bp, Homo sapiens
tttgatcaaggtgggagctgaggctgatcagaactatcagaactacatcttaagggagtatgtatgtaactgctctgtggttggaagcctgaatgtgaat

SEQ ID NO: 862600 - DNA, 100 bp, Homo sapiens
ccagatgtggtatctcagttagaggaggcagaagatttctggccagtggagagaggaattcctcaagacaccattccagatcacaacaactttccccaag

SEQ ID NO: 862601 - DNA, 100 bp, Homo sapiens
ggtactgcttcctgagcaccgccagccaccggcaccaagaccggccacatcccagcactgcccacctctggttctaaatggcttctaagaagttgggtgc

SEQ ID NO: 862602 - DNA, 100 bp, Homo sapiens
ccccgccagctccagagccacgtacgtctcaacagatcaccccccaacttgcccttcaagttctacttcagtttgataaggctataaatgcagcactggc

SEQ ID NO: 862603 - DNA, 99 bp, Homo sapiens
cagcaagaaagtaattacagtgtttggagcaacagaaaacttggaatataacgtggagcctcaagaaatctcacaccctgacgtgggacgctatttctc

SEQ ID NO: 862604 - DNA, 100 bp, Homo sapiens
ggaaaggaaacaaaattcgatttgcaaatcattcagtgaatcccaactgttatgccaaaggtgtctttcctgaagactatcttcccgtctcaaaatggac

SEQ ID NO: 862605 - DNA, 100 bp, Homo sapiens
ttttgtctctggcatcttcttcatactatcggggcctggattccttctgaaaacattcaagatatcacagtcaacattcatcggctgcacgtgaagcgca

SEQ ID NO: 862606 - DNA, 98 bp, Homo sapiens
ccgaccttgagctccaggagttcgtctcttacgtctgcggaagtgcagctgcctcagttcttagcgcaggacaatgaaggccaaacagctctacatta

SEQ ID NO: 862607 - DNA, 100 bp, Homo sapiens
ccgggggaggtgaaggaccggatcctggagaacatctcgctgtcggtgaagaaggcctcccgaggagcccagacagctgcagccacagctccccgtatca

SEQ ID NO: 862608 - DNA, 130 bp, Homo sapiens
tggggtctggagacgagcgagcgtgggtcgtagagatttgggggttagccagcacgcgtcgtgcgggccatctggggttttacatgtggcacccataaaagatgaggctgagaacacggaaagcttctca

SEQ ID NO: 862609 - DNA, 99 bp, Homo sapiens
cgcaactctcagttcgagagtaaagggacgagtgatccatatgtgaagtttaaaatcggaggaaaagaagtttttagaagtaagataatacacaagaac

SEQ ID NO: 862610 - DNA, 99 bp, Homo sapiens
ggaggccctggccatctacccgccctgcggccggcggaagatcatcctgtcagacgagggcaagatgtacgtcatcttagtctactgtgctgaatacat

SEQ ID NO: 862611 - DNA, 100 bp, Homo sapiens
tgacgagtatcatagtggtcatattgatagagcttttgatgcttcacaggctgctcaagaagccgagatcaatgccagaaaagccaaaaactctgttact

SEQ ID NO: 862612 - DNA, 100 bp, Homo sapiens
tggcgtccaacatggaccgggagatgatcctggcggattttcaggaacttcgtttagaggattatcaggctaacaggaagggcccacagaaccaggtggg

SEQ ID NO: 862613 - DNA, 99 bp, Homo sapiens
tgtgatctgcgatcgagcctcggtcaaggaggacccccagtcatcgtggtgccccccaagaacagcacagtcaatgcctcccaggatgtttcattggcc

SEQ ID NO: 862614 - DNA, 100 bp, Homo sapiens
ccgcccgcccggcgaccagcaaggggatcccaacaagccctcaggattcagaagtgttaaagctcctgtcactaaagtggctgcgtcgattggaaatgct

SEQ ID NO: 862615 - DNA, 98 bp, Homo sapiens
tctcctatagatccacagcctctcaggtggttgtgagacaacttcaacaagaagtggctgattcccttaaaaaattaactatgttagagtctccactg

SEQ ID NO: 862616 - DNA, 100 bp, Homo sapiens
cgggccccctctccagccggccccccacctccccccggagccaggctggtttcggaaatgcccttacagcagcaggtagctttggatatgttaaatcctc

SEQ ID NO: 862617 - DNA, 98 bp, Homo sapiens
ctcattccccatgtttagcaagattgcagtcaccggtactggtgcccatcctgccttcaagtacctggcccttgtcgagatgtccacagaaggaggat

SEQ ID NO: 862618 - DNA, 100 bp, Homo sapiens
ttttgtcctccttgggaatagacacccgaaacattcttcaaggttactgactttttatgatgtttggtggctatgagactatagaagcatacgaagatga

SEQ ID NO: 862619 - DNA, 100 bp, Homo sapiens
tgaatttaaaggagcagccctggtgtcacctatcagtaaaagttctccgggagatgttgcataaccactccttcgtgggctgtgtgaatcctcagtgggc

SEQ ID NO: 862620 - DNA, 99 bp, Homo sapiens
gcagctatagacattctgcgtcaggtccgggctcctggacttcgcctttcccgagccctggaggtggggagaaaaggtttcctatcctgggagcaggag

SEQ ID NO: 862621 - DNA, 98 bp, Homo sapiens
cccaacatgcctcaccctcatctatatcctttggcagctcacagaaatttcagcagatttcaaggagccgccatccctgccagggaaggagaagccat

SEQ ID NO: 862622 - DNA, 100 bp, Homo sapiens
gaagagctgaatgactcaagtctggacctgggacccactgcaggtggcattggctgtgtaggtcaagacaagggccaggttcgaaaatgccttgacgtgg

SEQ ID NO: 862623 - DNA, 98 bp, Homo sapiens
gtagagtcactggaaaccccactcctcgagtcagatcgccatgaggttatctccaaagaaatattggaactggacccatgggaaaaccagtggaatgt

SEQ ID NO: 862624 - DNA, 100 bp, Homo sapiens
ttcgagtgaccgagaccgcggccgggaccgagggtgaaaggaaagcaagccaggatggatatttacgacactcaaaccttgggggttgtggtctttggag

SEQ ID NO: 862625 - DNA, 100 bp, Homo sapiens
tttcctgtgtgaaattgcttctgtcaaaggaagccagcaggctatgaattcaggaaaaactaaaagccatttccaattagatcctgaaagccagtgttcc

SEQ ID NO: 862626 - DNA, 100 bp, Homo sapiens
aatgagacgcattaacttccagactccagaaatcttcccaaggctgcagacaccgacggatttgctttgggagccagagtagctgccgccaccagagtcc

SEQ ID NO: 862627 - DNA, 116 bp, Homo sapiens
gcttccctgtgtgcctgcagtttttcaccctcacgctgatgaacttgtacttcacgcagaccttcactgcctggtgtaactcccacctaaggaaagccggcacccagattgagaac

SEQ ID NO: 862628 - DNA, 100 bp, Homo sapiens
tgagacaaaggaaaagaattgctcaggcaaagagagggacagaagaacggacgatctccttgaacttacagagttttgcagaacactgaaatctatggac

SEQ ID NO: 862629 - DNA, 100 bp, Homo sapiens
tcaagtacgagagtggccctgacggaggggaggaaaaggaagaatcctgctcaaaaatgaggtgaattaatacttgggcgctcaggaaccctggacagct

SEQ ID NO: 862630 - DNA, 100 bp, Homo sapiens
ccttattatcggaccccgaggatcaggaaaaactatgggttcagtttggcaaagacttggtgcagatgtgacagcagttgaatttttaggtcatgtaggt

SEQ ID NO: 862631 - DNA, 98 bp, Homo sapiens
agtgccaaccctgagactctgctgggggagatggaggcgaagacaagagagctcattgtaattcctgaatttgtaacacaagtgaatgttgccttgga

SEQ ID NO: 862632 - DNA, 145 bp, Homo sapiens
cgcttcgatatctcatccaagactccagtattctccagaaggtgctaaaattgaaagtggactatttaatagctagaagcatcaagtgtacctgatttgtgaacctatcttgcttcagttggtttcctcctaaatattaggcaga

SEQ ID NO: 862633 - DNA, 100 bp, Homo sapiens
ctctcagttgcacttctcaaagggaatgtggtgagcaacttgggacattccttcttcagtcaaagtttccttggcagtaaagaacatggtggattcttat

SEQ ID NO: 862634 - DNA, 98 bp, Homo sapiens
cactgcgtgtgtgtggtgggcttcgacctggagctgggccaggccgtggagattacatgaagcagatgacatttgaagcccaagcctttttagaagct

SEQ ID NO: 862635 - DNA, 99 bp, Homo sapiens
gctttcagcaacttggcagagagaatcaagaattttccagttcatatgaagaggtgatctctcaaataaatacgtcattacctgctccccacagttggc

SEQ ID NO: 862636 - DNA, 51 bp, Homo sapiens
ccaggccccggcagcgcctgggacaagcacccaccaaggctccggatgtgt

SEQ ID NO: 862637 - DNA, 99 bp, Homo sapiens
ggacgcacagagaccgtgaagattccaagttcaggagaactcgaccgatcaattctctccattttcgtctagcagtggaagaagactgaatatctcgta

SEQ ID NO: 862638 - DNA, 100 bp, Homo sapiens
catcgatctgcggggcatcgtgtctcgaccgcgtcttctgagtcaggaaacccagcgtttgctggcagaaccagttcctggcatcaaagccgaaccagat

SEQ ID NO: 862639 - DNA, 98 bp, Homo sapiens
tgcagaagatgacccgggggcaggttgaagaaattgtggatattggagcatttgctccagaagacatccatattcctcagatttatgtacatcgcctt

SEQ ID NO: 862640 - DNA, 98 bp, Homo sapiens
cgctggcagctgagcggcggaacccttcgctggcgggagcgcggttcggggccgcagaggtaagaatgattgatgttggctgatattggagtgctcat

SEQ ID NO: 862641 - DNA, 100 bp, Homo sapiens
cgccgaagaagcatcgttaaagtctctcttcaccctgccgtcatgtctaagtcagagctgcagaaccttggcctgaaaatgctacattatatcagcaatt

SEQ ID NO: 862642 - DNA, 100 bp, Homo sapiens
cactgcgcaacctggagaatgagcagcccgttcacctgctgcggcccgggccgggccctgagggggcaaaatgtttagaaagtgagaaggatggagtgct

SEQ ID NO: 862643 - DNA, 100 bp, Homo sapiens
agtcatcagtcgcctgttaattaatgctgatcccttcaactctgaaccagaaaccctcctgactggcagccctatttgccacagaacggagacaacattg

SEQ ID NO: 862644 - DNA, 138 bp, Homo sapiens
cgctcccagggctcgtcgcagtttcgcagccagggcagccaggcagagctgcacccgctgccccagctcaaagcctaccgtatgtgaacgggagctgtgtgtgtttgcttttcaaaccctgggagtaatgaatgaagc

SEQ ID NO: 862645 - DNA, 98 bp, Homo sapiens
cttgctgctgatgaagatgatgacgatgatgatgaagaggatgatgatgaagactcctacagaagaagggaaaaaagagctgctgttcctaagtaacg

SEQ ID NO: 862646 - DNA, 100 bp, Homo sapiens
gaggccggccgcctggtcatggcgcagccgggcccggcttcccagcctgacggaggacaaagacactgattctaccaaagagcctctggatgaccttttc

SEQ ID NO: 862647 - DNA, 100 bp, Homo sapiens
tcccatgctgcgttcacctacccaactgccactgccgctgccgccgccctccacgctcaggattcattattcctaatgagcttggtggcgtagcttcaat

SEQ ID NO: 862648 - DNA, 100 bp, Homo sapiens
cagcttgtgaggacacagcagccccatttccgctcctgacatcactggccataaacggagtgagaacaagaatgaagggcaggatgccactatgtattgc

SEQ ID NO: 862649 - DNA, 100 bp, Homo sapiens
ggagcttctgtccacctgtcctgcagaggagtcgtttccagcccggctgtttctgtgctgtgggaagaagtctcctttcagccgtctggggagcacagag

SEQ ID NO: 862650 - DNA, 100 bp, Homo sapiens
cggatggccgtaaccccgaaggaaatgactccctggaggaaaagcggaagcggcagcggtctgaacgcctggaacggattttccaacttagtgaggctca

SEQ ID NO: 862651 - DNA, 100 bp, Homo sapiens
ctttttctccaaacaccatttcaagctgtctgtgatcctggaaacatacgtgtgactgaagctcccaaacacccaatctctgaagaactggaaactccca

SEQ ID NO: 862652 - DNA, 99 bp, Homo sapiens
cattgatcaccataagaaggaacatttgtgaaggtactccagtgccagaaagagattgggaaaatgaggtacgttagtgttcgcgattttaaaggcaaa

SEQ ID NO: 862653 - DNA, 100 bp, Homo sapiens
acttgggaatgaaatgatgtccccaaggactaggccacgcagaattggcagagggggtcgatttgggaggaaaggtgtggctataaactttgttactgaa

SEQ ID NO: 862654 - DNA, 100 bp, Homo sapiens
gaaaaacctcaaaatatgatggtggttggacagtcagcatttgcagactttgggcacacgtgtttcacgttgacaggtttgcttgggacgctagtaacca

SEQ ID NO: 862655 - DNA, 100 bp, Homo sapiens
cttcgttccaacatggacatcctgaagccaatcctggttgatgaggtaatgctgactctgaaacaggccttcagtacggcggctgccctgcagagtgcca

SEQ ID NO: 862656 - DNA, 100 bp, Homo sapiens
cttcgaaggccctcagcctgcggatgtgaggctgatgaagaggaaaacagacaggtgcagttcaggagcagatgagatccaagggaaaccgagataggcc

SEQ ID NO: 862657 - DNA, 98 bp, Homo sapiens
ccacgctgcagtgctgctgctgtttggaggtctgtgcatgcatgttcaggctcagccggagatgggccctgacgtgctggtgcagacgatgggggccc

SEQ ID NO: 862658 - DNA, 100 bp, Homo sapiens
tgttgaacttgtaaaatcttggaataattctcttcttatgaagattgatttcctaaattcagtaatagtggaccttcaaaggaagaatcaagacctcaag

SEQ ID NO: 862659 - DNA, 98 bp, Homo sapiens
atgtattccctggggatggcgcatcacacaccaaagggcagccgatgaagtgcaaccttcacatgaatgggaatgttatcacctcagaccagcccatc

SEQ ID NO: 862660 - DNA, 100 bp, Homo sapiens
aggtttgctgagctggttggccctgtgatccctcaagactggtccacggagtgtatgaccacaaacagccatcaagttgtgaagttatccgagactggaa

SEQ ID NO: 862661 - DNA, 100 bp, Homo sapiens
acaacagaagctatgcttggcagcagaaggatttggcaacagactttgtttcttggagtccacttccaattccaaggccctggccaacgtcaacattggg

SEQ ID NO: 862662 - DNA, 99 bp, Homo sapiens
ggtgctaccgctgacgacacccctggtggatggcgaggatgagagaattggagcgttattcagtatattaatgtcttattgataatggcagaacatcca

SEQ ID NO: 862663 - DNA, 100 bp, Homo sapiens
agactctgtggctctgtgacctgcaggtattgggagatccacagctaagactccaggaccctctggaagcctagaaatgagttacactgttagaccttat

SEQ ID NO: 862664 - DNA, 98 bp, Homo sapiens
caactggttgaaggggaccaggaggttggacacagaccattgcaatggaaatgggagagatcatctctcaaaaagctcccatcagagcaaccattctg

SEQ ID NO: 862665 - DNA, 99 bp, Homo sapiens
tgtcataaagaaaattgcccttcgggaaatccgaatgctcaagctctggtagctgaagaacatctcacagtggacgccagggtctattcctacgctcta

SEQ ID NO: 862666 - DNA, 98 bp, Homo sapiens
ctctgccctaaatttcccctttgcccggaggggcccagaggacacagcccagttggcccacgccgtcctggccaagctgaacgccttcaaggcagaca

SEQ ID NO: 862667 - DNA, 98 bp, Homo sapiens
gctcatcagagggtaaagttcacaaaagaccacactgtcagacagaaagaggaagtatctccaggcatggaagaggagatggttcgtgttacgcagtg

SEQ ID NO: 862668 - DNA, 100 bp, Homo sapiens
agctgaaccatatgaaactagccaagagttaaggagattggcagcaccatgtctggcagaaaggggactgatgattccatgaccctgcagtcgcagaagt

SEQ ID NO: 862669 - DNA, 99 bp, Homo sapiens
cagaatgtgatttgcttgaagatatgaggccaccaccacctatcatgacagatggtgaagatgcggattacactcattttacaaaccagcagagttcca

SEQ ID NO: 862670 - DNA, 100 bp, Homo sapiens
gttttccaaattgagagtctcctgtggatatataggtgataattgtaagggtctaaaattcccaggactccacagctttgcaccagataagcctggagga

SEQ ID NO: 862671 - DNA, 100 bp, Homo sapiens
atatggactcctgacgaccaacaggcccagattattcatcagcatggctacctgctaatgaatcattgtggcaggccacaactgttccatctaaccatcg

SEQ ID NO: 862672 - DNA, 100 bp, Homo sapiens
tcgaggcatgcttgacacacatcataaactctgcacattcattctcaaaaacccacctggattccatgataaagacagttcaggttggagttgcagcaaa

SEQ ID NO: 862673 - DNA, 99 bp, Homo sapiens
tgcgcgagcggagggaggcggtctatccagaagttaaaggagagattgctcgtaaagatgaaaagctgctgtcgtttctaaaagatgtgtatgttgatt

SEQ ID NO: 862674 - DNA, 100 bp, Homo sapiens
gggcagggctcgggagagcgggatctcatggtccggaatgacaccccctgtggaaccaccattggacctatcttggcttctcggctggggctgcgggtgc

SEQ ID NO: 862675 - DNA, 99 bp, Homo sapiens
ggaaactggaagaaaaaagaaaagaaactgacaaaaacatttctgagcaaaactggttgaacagcggatgaagatatggaattcaaagctctaatggac

SEQ ID NO: 862676 - DNA, 99 bp, Homo sapiens
tggacactgttcccataaggagtacatgaagggacttgggatatttaattggataatagaagattgaaggggattcgcagaggcatttttggaacatct

SEQ ID NO: 862677 - DNA, 100 bp, Homo sapiens
ccactgctaagttatccactagtgctaaaaggaagtgtttggattgtgagctatttcagaactgttctcaggactcattattttaacatttgggagaaac

SEQ ID NO: 862678 - DNA, 100 bp, Homo sapiens
tcagtgcccagctctactgagaagaatgctgtgcttgaggaatccaaagccctcgtgcgctgcaacatgaagatggagctggagcaggccaacgagaggg

SEQ ID NO: 862679 - DNA, 100 bp, Homo sapiens
cctctgcgacctggggccctgggtgaagtgctccgccgcccttgcctccagttatgatatgactctgacaaatgcttgtattgccttaagtcaaagatgg

SEQ ID NO: 862680 - DNA, 100 bp, Homo sapiens
gaaaaaaataactttcagtgatgtcagaccaaaccagcagatcaccatgtgggatttggccagtggaaaacttctaagatcaataacagatgctcatcct

SEQ ID NO: 862681 - DNA, 100 bp, Homo sapiens
ggcgagctgggcgacggcgccttcggcaaggtttacaaggtctggagcacgagcacctgtgaatttgttcgtactctcaatgggcacaagcggggcattg

SEQ ID NO: 862682 - DNA, 100 bp, Homo sapiens
gaacaagtaccgcctgggacggaagatcgggagcgggtccttcggagatatctacctgggtggcttgtggtccggttggccaccaagtggtgtcagcgga

SEQ ID NO: 862683 - DNA, 100 bp, Homo sapiens
tttgctgtcccgcaagatgcggatgctgctggcgctcctggccctctccgcggcgcggccatcggccagtgcaggacagtcattttgtttactcattcag

SEQ ID NO: 862684 - DNA, 98 bp, Homo sapiens
ctctcttcctttctcatgttttggctttggggctaggggaattattggaatgccgcctctttcccaaacccatcctcctacctgcacttctctacttt

SEQ ID NO: 862685 - DNA, 100 bp, Homo sapiens
cccggagcggagctcggggcgcgctgctgctggcactgctgctctgctgggacccgaggctgagccaagcaggaaaaactgaagcctcagtacttggaag

SEQ ID NO: 862686 - DNA, 100 bp, Homo sapiens
gcagagacaccaggacagaaaagacagtgttctgctttcatggagttcacagaagagtcgaggagggatgcttgaagatggaaagaaatttgattcctcc

SEQ ID NO: 862687 - DNA, 100 bp, Homo sapiens
caggattgaatacttggaccccagaggaggaagaaggtgggaaaggtgaaaagaggaagagagaaacagatgatgaaggagaagatgattaagaccccag

SEQ ID NO: 862688 - DNA, 100 bp, Homo sapiens
gcgagggcgaagacgagatccagttcctgcgaactatgtgaatcccgatggagcggcccgaggaaggcaagcagtcgccgccgccgcagccctggggacg

SEQ ID NO: 862689 - DNA, 100 bp, Homo sapiens
cggagcccgagtggatcggggacggagagaacacgagcccatcagatctcacattcttgaaggtggcattgaagagcactaagatcggaagatgagtgag

SEQ ID NO: 862690 - DNA, 100 bp, Homo sapiens
tcacgtgactgtggatctcaagtactaccggccaactgaagtgactgctgagaagtcaggccagattgaaagatcaaagaatgtaaggcaaagacaaaat

SEQ ID NO: 862691 - DNA, 100 bp, Homo sapiens
caagacattgtacagaacattgtagaagaaatggtgaacattgttgttggagatttacattggtgcagaagcatacagtggaatttaaccaagtggcgat

SEQ ID NO: 862692 - DNA, 100 bp, Homo sapiens
tgaagggcattcagaagtttcctggcatcaactacccagtcctgaccccaaatttgaaaggcttcgaggcagcgagcaatggtggaacaaagcggcaaaa

SEQ ID NO: 862693 - DNA, 100 bp, Homo sapiens
tggaaaacggacatcagacaaagtcaaggtggcaattttggaggtagccccggttatggaggaggaagaggaggatatggtggtggaggacctggatatg

SEQ ID NO: 862694 - DNA, 98 bp, Homo sapiens
gcttccagtgtctctgcgcggacccctacgagttaggagacgatgggagaacctgcgtagagccccacagtcttcgttataacctcacggtgctgtcc

SEQ ID NO: 862695 - DNA, 111 bp, Homo sapiens
aaaactgtttcagttgcagactttaggcctgaaagttgctgatcatctgggctgtgatccacaaacccggttctttgtccctcctaatatcaaacagtggattgccttgct

SEQ ID NO: 862696 - DNA, 100 bp, Homo sapiens
ccttatcagtgcaggagaggattgtgtctgcttggtgtggagccatgaagccctgggcgctgcctatggcacagccaagagcggtaccggcattgcggcc

SEQ ID NO: 862697 - DNA, 101 bp, Homo sapiens
cctcatggggaaaatctccccggtgactttcagggcctgggatacaacagtgatgagataaggcctcggactttactgatcgaacatctaatggaaggtgg

SEQ ID NO: 862698 - DNA, 100 bp, Homo sapiens
cagggagttcccgttacaatcactagtgttgcagatgtcctaaacgatgctatatttgatgaagatcatgatgagatggtgattgtgaaggacatagaca

SEQ ID NO: 862699 - DNA, 100 bp, Homo sapiens
ccggagaagacatactggcagcaggtgagaagctcttcatggagatggcagagctcatggtctcagaaggctggaaggatgcaggttatgagtacctctg

SEQ ID NO: 862700 - DNA, 100 bp, Homo sapiens
gctgctcttcagccagatgctggaccaagatcactccatggatgaaatgacagctgtggtgaaaattgaaaaaggagttggtggcaataatgggggcaat

SEQ ID NO: 862701 - DNA, 98 bp, Homo sapiens
aggtgttctgaacaagttcaagtggcccaccctcaggaccctcaccacccatcagagaagcctgtcattcactgccataaatgtggggagccttgcaa

SEQ ID NO: 862702 - DNA, 99 bp, Homo sapiens
ccacagagacagtgcctgccttttcagagcgtacctgtgccactgtcaccattggaggaattttaatgagtggtgttaagaataatgttggaagaggga

SEQ ID NO: 862703 - DNA, 100 bp, Homo sapiens
caaaaaggaagcatgttggacgatatctaatattacagctggaaatagggcacagatccagaagatgggtgtgaacctgacacgcagcaacaaggagacg

SEQ ID NO: 862704 - DNA, 99 bp, Homo sapiens
gccgcattccaaagaagcttctacaaaaagtttttaatgatacctgccgctcaggtggattctcaatatcctcctgttcagagacttatgaccccaaag

SEQ ID NO: 862705 - DNA, 100 bp, Homo sapiens
aagaagctactggacctcgttcagcagtcatgtaactataagcagcttcggaaaggagccaatgaggagacgtctcagagaggctgtgcagctgctggag

SEQ ID NO: 862706 - DNA, 98 bp, Homo sapiens
agggttgatgacctgttcaacagcttgaaacgttgattccctgtcacaatggatgacatttggcgtctctggccgagcctctttttgtggaaaacgac

SEQ ID NO: 862707 - DNA, 98 bp, Homo sapiens
cctcccaacaccattatggaatacaaaactcacaccgacagcatcaaccacagcgtcctgtgtttactcatgaaaatattcaaggtgggggggaaccg

SEQ ID NO: 862708 - DNA, 100 bp, Homo sapiens
atcctcacctcgaaattcctgaggcgctgggagccgcaccacctaacgctggccgacaacagcctggcgtccgccacggatgaccagtgtcccagtgaag

SEQ ID NO: 862709 - DNA, 119 bp, Homo sapiens
cgcaagggtcatttcgtcgctgggaagggacggccctcgcccgcggtgatggtggctgggtggagaaggagacatactactgaccccattggaagaagaaccaggcatggaaagatggg

SEQ ID NO: 862710 - DNA, 98 bp, Homo sapiens
tctgtgagcctagggacccatttctcctcctttgacagggacatcagtggagccttctcagacccacagttttacagctcccagcacagtaggaaaga

SEQ ID NO: 862711 - DNA, 98 bp, Homo sapiens
agctttttgcttagcactgaaaattctggataatggtgaatggaagtctgggccaacggtcacaaaagttgtcactgttgtgacaaccaaaaaagcag

SEQ ID NO: 862712 - DNA, 122 bp, Homo sapiens
cccatctaatcacagactcctatttgaagtatttgacgaaaatagactgagagcctacgactagatttgcatctttacgtcctgcgcggaggctgctacacacatgcagaagtcatgctggt

SEQ ID NO: 862713 - DNA, 100 bp, Homo sapiens
agcaaccaaaatgcatgctccacccattaatatggaaagatgcagaggccaggatgtgggcccagccctgtgccaggaggctggctggaataaaggtaca

SEQ ID NO: 862714 - DNA, 100 bp, Homo sapiens
gattacttgatgacttgggttcaggaccagttggatgatgagacgttatttccatcaaaaattggtgggatagtaacatctttttgagggaagaattggc

SEQ ID NO: 862715 - DNA, 50 bp, Homo sapiens
attatcatatcagggatctccaaggatctagatttctcatcacatccacg

SEQ ID NO: 862716 - DNA, 98 bp, Homo sapiens
gggacggccgccggagccgcgaggccaaactacatgaggaaataattgacttttataacttcatgtccccttgtcctgaagaagcagctatgagaaga

SEQ ID NO: 862717 - DNA, 127 bp, Homo sapiens
acttaaagaaacagcttcatgaactccaagccaaaatcacagctttgagtgagaaacagaatatttctcttagaagatgacatccatgtttcctgatgcttgttttattcatacaagattggatttg

SEQ ID NO: 862718 - DNA, 99 bp, Homo sapiens
tcggcgcgggagcagcacttccacagccaagtgcgggagtccacgtttggcagtcttgaacagaagctggctttggcagaacggattcgaggccacgtc

SEQ ID NO: 862719 - DNA, 100 bp, Homo sapiens
gtgctacttaaaatatgctggggaccatcaccatcacagctctttagtcaagagacggtgatgaagtttgtgccgcggtacagcctcgtcctagaactca

SEQ ID NO: 862720 - DNA, 100 bp, Homo sapiens
cgctattgcacgaagttcagcccagaggagaaactcgctcgccttcagaagacagatttcgatggggtcctctatcatatttcaaatcctaatggagaca

SEQ ID NO: 862721 - DNA, 98 bp, Homo sapiens
aagaccaaaggaggggatttgatgttggtccactatgaaggctacttagaaaaggacggctccttatttcactccacattcatgacagatgctgcccg

SEQ ID NO: 862722 - DNA, 100 bp, Homo sapiens
cggaagacgcgaccaactccaggcacagcggagccggcgcggggtccacaaaggagaattcctgcactcaggccacaaaagttaaagaggagccatctgt

SEQ ID NO: 862723 - DNA, 98 bp, Homo sapiens
gcgcctgtgggcacagacaaggagctcagtgacctcctggacttcagcatgacgcaaacatgcagatctttgtgaagaccctcactggcaaaaccatc

SEQ ID NO: 862724 - DNA, 100 bp, Homo sapiens
aaaagttggcagaggagagacggcggcagactgaaggagcattaggttatgcgtattgggtctgcacaacattgcaagataaaagcaacagagaaacaga

SEQ ID NO: 862725 - DNA, 98 bp, Homo sapiens
ggggggcgcctgctgccaaggaaagtgaagtcactgcttttgctgtcttggatcaagaccagaaagaaattattgataccaatggagctggagatgca

SEQ ID NO: 862726 - DNA, 98 bp, Homo sapiens
gcacggcaggggcgcgagccaggctgcacggactcagcccaggagagtgttattactcgagatattcatcgtacatttcccgcacatgattactttaa

SEQ ID NO: 862727 - DNA, 100 bp, Homo sapiens
gcgggcttcagggcaacttcacccggccggctgcggcgtgggattaacacagattcctcagatccagaagactgaaatttcctttcgtcctaatgatccc

SEQ ID NO: 862728 - DNA, 100 bp, Homo sapiens
ctgtaccagtccgccattttgctaccaagaaagccaaaggtggagctggtctcttgggcagcctgacatctggtccactcctctgtcctatgccgggatc

SEQ ID NO: 862729 - DNA, 100 bp, Homo sapiens
agtctgagagggccaagcaaagggagaggcagaggcagaaggcaattgtgctggtacagggctgcctcttggacccttcccagcgggaggtgttcctgca

SEQ ID NO: 862730 - DNA, 100 bp, Homo sapiens
aaattcagttccagtaattattgctgctgttggtaccagacaaaatggttacaagcctgatgaagggaaacgaggggatgcctgtgaaggtgacagtggg

SEQ ID NO: 862731 - DNA, 100 bp, Homo sapiens
acggcgtcgggagagcgcgcctagccggctcgcgagtgattttacaacgagatgctgctctccatagggatgctcatgctgtcagccacacaagtctaca

SEQ ID NO: 862732 - DNA, 98 bp, Homo sapiens
aagaagaagcggaaacaacgttctcccgcaaaaatcgtaaagctgaaaattgaaatcatgaaagtagacaggactaaactgaagaagacacctactga

SEQ ID NO: 862733 - DNA, 99 bp, Homo sapiens
cgctgcctgctgatctgagggccaaagtttggaagcgatctagggcagccctgcagaggtacctgttctactgtaatcgctatatgaaccacatgcaga

SEQ ID NO: 862734 - DNA, 99 bp, Homo sapiens
agccatgaggccaaaggcagttgtattggtattaatctctggagaagacacatccacagttagcactttcttcagatgctgacgctcggtgaacagttg

SEQ ID NO: 862735 - DNA, 98 bp, Homo sapiens
cagaaggcgtctcatggcgttggaataccggctctcagcggctgttttgtacagtgttagaatactgtgaaggcaatgacttggatttctatctgaag

SEQ ID NO: 862736 - DNA, 100 bp, Homo sapiens
ctcggtgaggtagaccactaccagctggcactgggcaagttctcagagggcactgcaggtacaggtttgcagattccgccagcagcacagcaagctctac

SEQ ID NO: 862737 - DNA, 100 bp, Homo sapiens
atgctgtcccagatgaacgtcacagcccccaccagtccaccagtgcagcagaatatgatgaactcggcttcaggctatcaagtactagctccaactgcct

SEQ ID NO: 862738 - DNA, 99 bp, Homo sapiens
gggagtttgctaaatttgaaaaggagaaaatgaatgccaaatgggacacggtattgttgcagcatctggcagtgagactgaggatgaggacagcatgga

SEQ ID NO: 862739 - DNA, 100 bp, Homo sapiens
ctggaaactattcttagctccgtcactgactccaagttcatcccctctgtctttcagtttgggaacgaagagctctagaaagaagaatatctgaaatgga

SEQ ID NO: 862740 - DNA, 100 bp, Homo sapiens
ctgctgctgctgtagctgccgctgcccaacctcagccttctgttgctgaaacttactatcagacagagcccccctccatgcgcctgaaggcccgacccag

SEQ ID NO: 862741 - DNA, 98 bp, Homo sapiens
aatacctggggccacagcattaccactggttgtaagaaagaagattggcccatgcacaagctggaatgttctcccatggttgtttttggggaaaactg

SEQ ID NO: 862742 - DNA, 100 bp, Homo sapiens
cagtggatggctggaggtgcagggccaggaggaacatgagacagctgaggagaagatgccggtgtggtatatcatggacgagttcggttcgcggatccag

SEQ ID NO: 862743 - DNA, 100 bp, Homo sapiens
cgaccaacgaaagtggccatgggccgccttggaatcttttcggtatcatcgtttcatgccctggtttaactatagatcaacacatcatcttgcatctcat

SEQ ID NO: 862744 - DNA, 100 bp, Homo sapiens
cacgtacagggtttcagggcagaaagcagtcaacgtgggagactacatcgaggcggtcctggaccggaacttggctgagaacatctccagggtcctgtat

SEQ ID NO: 862745 - DNA, 99 bp, Homo sapiens
tgtgaccgatttaaactgcacataccatatgctggagagacattaaagtagccccggagctatgtggagtctgtggcacggacagcggtggctggaccc

SEQ ID NO: 862746 - DNA, 100 bp, Homo sapiens
cgtctggtggccttttgtccctttgcctcatcccaggttgccttggaaaatgccaacgccgtgtctgaaggttcagcagactgtacaggatctttttggc

SEQ ID NO: 862747 - DNA, 100 bp, Homo sapiens
tcggttccagtgccgccttccaggacaccttctggaaaatcccaactttaaacgaatctgcacagctgaaccaataacgtttccatctggaggaggcaag

SEQ ID NO: 862748 - DNA, 100 bp, Homo sapiens
gattaaaacgagagctgacccagatgaagcaggaactgcagtacaaagaaaagggggtggagaccctgcaagaggctggtggactaggcctcaattttgt

SEQ ID NO: 862749 - DNA, 100 bp, Homo sapiens
catccatggagggaaagagacagcttgagaaaagggactttggaaaaaggctgtctctagacagcagtcttgtgggtatgagtattatagaacaattaga

SEQ ID NO: 862750 - DNA, 100 bp, Homo sapiens
gaacttggttccccctccctcagcttccgccccaaaagaacccagaagtaccatggcttctgacctagagagtagcctcacctccatagactggctcccc

SEQ ID NO: 862751 - DNA, 100 bp, Homo sapiens
agagctccagcagccttgttagggcgtggcctgaggcttggataagtggggttatggccattgcaccaacccattatatctggcaaagagaacgttctgt

SEQ ID NO: 862752 - DNA, 100 bp, Homo sapiens
gccaaaagaagaccctagacaagaaagatggaagacgaatgtcttttcagaaacctaaagggactattgagtatactgatatccattaccaaaacttgac

SEQ ID NO: 862753 - DNA, 98 bp, Homo sapiens
atgtggcagtattcggcttggagaaaagtatacgctcaacggcaagaaagtggaagttgccgtcaaacagatcatcgctggaaaagccgtggagcaag

SEQ ID NO: 862754 - DNA, 100 bp, Homo sapiens
cgagggatcgagacctgaacatgtggtggtggttgcacagtcgccttttccagtttggagagacgttacttatgaaaatatgcatcagtttaatactgtc

SEQ ID NO: 862755 - DNA, 98 bp, Homo sapiens
gcggcggctgcggaggcgcaggcagcaactgaggcagcggcaggctcaggtgcagccgctgatatcgcaaacggcaccagttcaggggggtaccgccc

SEQ ID NO: 862756 - DNA, 100 bp, Homo sapiens
cttcaccaaggagaccacccagaagaatttcaacaatctctatggcaccaaaggatgaaatctgtaagtacagacctgagaattctgttgctaatgacac

SEQ ID NO: 862757 - DNA, 99 bp, Homo sapiens
ccgcaagtacccgtccatcatagtcaactgcgtggaagagaaggaggctgaaccgtctgagcccagaagtgctgaggtgacgaggaagcccaaggctgc

SEQ ID NO: 862758 - DNA, 100 bp, Homo sapiens
tctactggacaaacatttcctccaaggatcagtacaagttctgctacgaggtggccctggaatacttgaattctggctgatggtgtaaacagctctgcaa

SEQ ID NO: 862759 - DNA, 131 bp, Homo sapiens
ttggttctgtcatccaggggagcttcttggagagctatggcgaggctcaggccgccgagcagggagttatggtgggtatgggtcagaaggactcctacgtaggtgatgaagcccagagcaagagaggcatc

SEQ ID NO: 862760 - DNA, 98 bp, Homo sapiens
tgagcttcccaccgaagatgaacagggttcctggggcatcgacgatctccatatttcattgcaagccaatggtaatgatagtaaaaaatttaaaggag

SEQ ID NO: 862761 - DNA, 99 bp, Homo sapiens
tctactattgcatttagaagctgcctggcacctgtgtttgctctgtttgtaccattttactgctccataccaagagtccaagtggcacaaattctgggt

SEQ ID NO: 862762 - DNA, 99 bp, Homo sapiens
ttcgccagtatctactccatgacggctgtggcctttgataggtcttgggcgtctttggtactggcttttttaggggtctgcctggggattacccttgct

SEQ ID NO: 862763 - DNA, 98 bp, Homo sapiens
gcataacagaagaagatttaaagcagaagaaagaacagcttgagtctgaaaagtggtggtcaccaatacaattccacatgaagtccagaagctccagt

SEQ ID NO: 862764 - DNA, 101 bp, Homo sapiens
aggccaccccagacctgcagaattttgcctgacctggtaccccagctggggacactctaccagttaatggaaagcagagtcaaaacttttcagaaactttc

SEQ ID NO: 862765 - DNA, 98 bp, Homo sapiens
gctggagaagtccccttatgaccaggactttgtgtcattgtatcaagattttgaaaacttttatacaaggaatctgtacatgaggataagagacaact

SEQ ID NO: 862766 - DNA, 98 bp, Homo sapiens
cccaataccattggagagaaatgttctaaatgtgcacccaatacctggggccacagcattaccactggttgtaagacactaatatctggagctgtggt

SEQ ID NO: 862767 - DNA, 100 bp, Homo sapiens
ccacaggtgcatttcacagcactctgggcgaaaattggatgtgaaaatgaagccagaccgagcaaaatgatgcttcaacacccaggccaggtctctgcct

SEQ ID NO: 862768 - DNA, 110 bp, Homo sapiens
ctgccaatttaccagagataattgataacaccctgtaacagctgaaagctgaacatggttatgcctccatgttaccatacaataacaaggacagagatgccttaaaacgg

SEQ ID NO: 862769 - DNA, 99 bp, Homo sapiens
tgcgcccccgggagcgggcgcccagaggcacctgcggaactcgagtcatgcaggagcttttgtgatcgtgacggaagaagccattgccaagggtatccg

SEQ ID NO: 862770 - DNA, 98 bp, Homo sapiens
ccgagaggccggccaaggaagctcactgccatgtcctcctgcagccggcgctccaagctcaagtatggtttgaagtggtgaacatggatttttctcgg

SEQ ID NO: 862771 - DNA, 100 bp, Homo sapiens
cttgattacccgttaagtcccccaaagatgagatttacctgtgagatgtttcatcccaacaaatgtgacagtgatgataacatgggtgccaaaaatactt

SEQ ID NO: 862772 - DNA, 100 bp, Homo sapiens
gtgatcgcggactatgagagcggacgggccatacccaataaccaggtgcttggcaaaatcgagcgggccattggcattttctctgtatgaagatgaaatc

SEQ ID NO: 862773 - DNA, 100 bp, Homo sapiens
gaatctgtctcctgatcatcattcagggtatatttcagaaatcgctgggtaaagactgtccacccagttgtgcatcagtactgtttgatctcaagcgcac

SEQ ID NO: 862774 - DNA, 98 bp, Homo sapiens
gttttctgagcgagccttgaaagagataaaagcggaagtttgccacacggctttgaacttggcctactccagcatttacggcagctaccggaacttcg

SEQ ID NO: 862775 - DNA, 100 bp, Homo sapiens
gcatatggacaaacatcctctgggaagacacacacaatggagcttgtcgtcacgcagctgggctatgacacacgtgtgaccatcctcgggcacgtgcaga

SEQ ID NO: 862776 - DNA, 100 bp, Homo sapiens
tgttgcatcaaatacttcatatttggcttcaatgtcatattttgggttgcacagagcattgaggatcaccatcaggaagtgattggtttctgcagagaga

SEQ ID NO: 862777 - DNA, 100 bp, Homo sapiens
gctggtttgtgctcaagggggatcagctctattatttcaaagatgaagatgaaaccaagcccttggttgttggaagaggagcctttggagttgtttgcaa

SEQ ID NO: 862778 - DNA, 100 bp, Homo sapiens
tctgcaattcataatggagctactgtactggctattggaaggaggagattctgaagataaggaggctggaaagacagaccgaaaagaatttgtgaggaag

SEQ ID NO: 862779 - DNA, 100 bp, Homo sapiens
aagattggggccttctgattattttgtctggggagcagggaggagccctgtgccctgtcccaggatccatgggtaggaacaccatggacagggagagcaa

SEQ ID NO: 862780 - DNA, 98 bp, Homo sapiens
aggactctagtaacccgcgaaatgatgggatagcgttgcaaatccttaaaagagtcttaacgtgttgctaacaaccacaagcagaatttgatgacggt

SEQ ID NO: 862781 - DNA, 101 bp, Homo sapiens
ggagaggggcttcgggggcattacccacctttgtggcttcccacccttctactccaacacgggccaggccatctccccggggatgaagaggaggattcgcc

SEQ ID NO: 862782 - DNA, 100 bp, Homo sapiens
tggttccgcccgcatccgctgggcctccgaccggaagagtgcgatggagactgtgctccagtactgcaaaggcctagttccccgagagcgttcagacagt

SEQ ID NO: 862783 - DNA, 123 bp, Homo sapiens
cggcagtttgttcacgaccctcaacttggctactccctgccttgtgtgggtcgcagaaccctagctgtaatcactaaacttgatctcatggatgcgggtactgatgccatggatgtattgatg

SEQ ID NO: 862784 - DNA, 98 bp, Homo sapiens
gcactggcccaggacctgcacaagacctacattgccccaccagctgccattttttacccatcgggtgctcatgacacgtcgaatgccactttgaacaa

SEQ ID NO: 862785 - DNA, 100 bp, Homo sapiens
agcagaacgtgagggtgtaacttacaaaaaggtggccaaggtggaatacgtcaggaagaagccaaaattaaaagaagtccaggtgaggttagaggagcat

SEQ ID NO: 862786 - DNA, 100 bp, Homo sapiens
ccgggatagccccggcggagcccgcagcttccctgccggatttcagatgcatgccaggtttccactgattgccagaactcgagatcactacacatggatc

SEQ ID NO: 862787 - DNA, 100 bp, Homo sapiens
gtcttcctcatccttccttttctcggggctcccgtgggacacattcagctaacgtattttagcaggtggagtgaggttgaagattcctgtgacagcgatg

SEQ ID NO: 862788 - DNA, 100 bp, Homo sapiens
aatgcccaggaggcagaagcagcaatccggtgtctcctggaagccagaggaggcccctggatcctcctggaatccccgatccctcttgctccctggcaga

SEQ ID NO: 862789 - DNA, 98 bp, Homo sapiens
cgagcggcgagccggagcgcggagcccggctcccgcaccatggaggaggacgacagctacgggcagatgattctggaccagatgaagcctgaggagcc

SEQ ID NO: 862790 - DNA, 98 bp, Homo sapiens
tactttaacaaaaaatgatcttgacaaagcaaataaagacaaagccaaccgatacttttctccaaattttaagcaactttcatcctttgaaacgtgtg

SEQ ID NO: 862791 - DNA, 99 bp, Homo sapiens
acctctgcagccttgctgttcattgccaccgtcgacaatcatataggttgctgtagatgaatgttcttagctgtcatgtttaaaaatacttctgcttcg

SEQ ID NO: 862792 - DNA, 100 bp, Homo sapiens
cttcaatggtggcgggtcgccggagctctgatcgccgggaacccttgccgctgctgtcctgcgaccccaagcaggctatgcccactggaagggccaagtg

SEQ ID NO: 862793 - DNA, 98 bp, Homo sapiens
agcactcttcaccctgcacagccttgttagcggagattctggagctggctggcaatgcagcgagagacaacaagaagggacgggtcacaccccggcac

SEQ ID NO: 862794 - DNA, 100 bp, Homo sapiens
cttatctcttctttaacttatcgtggaaataaaacagctgttttgcagattggactacaagagccatgggaccacaccaccaccaccacaaccaataggc

SEQ ID NO: 862795 - DNA, 98 bp, Homo sapiens
atcgcctgcaatctggcctggctggtggccaaagcctttgggacaggtactataggatacaaccagcgaaacagaattgatactctcatgtatctact

SEQ ID NO: 862796 - DNA, 100 bp, Homo sapiens
ctgcgtcgcccgaggcgaggaggagcgctggcggaactcgatcaaaatgccactgaaaaagtccagacaatgttcacagccattgatgaactcttgtatg

SEQ ID NO: 862797 - DNA, 98 bp, Homo sapiens
cggctctcgtcagcctcccgccggccgtctccttaacaccgaacacctgagatggaagattttcgaggtatagcagaagaatcatttccaagctttct

SEQ ID NO: 862798 - DNA, 100 bp, Homo sapiens
ctacagcctcctcaacgaatacggcgacgacatgtatgggccagaaaagtgcagtcattggagaaatcgatgaagaaacagattctgcgcttgatttggg

SEQ ID NO: 862799 - DNA, 98 bp, Homo sapiens
ttcactcccgctgtctcagcagtctacagcacggctactgcagcactggggtgtcagttgttggtccgacccagaacgcttcagttctgctctgcaag

SEQ ID NO: 862800 - DNA, 99 bp, Homo sapiens
gacgagatcgccccgatagtttgagagtaaatgggttaccagaggaagagctaagattgtgttcacctattgaaaattaaaaagacattttgtttatgt

SEQ ID NO: 862801 - DNA, 98 bp, Homo sapiens
tgcaagttttcacttatctcgaaagcctatcagcatagttaagatatctatcatcatcaactcttctgctccaccccacactatactgaatgaactga

SEQ ID NO: 862802 - DNA, 98 bp, Homo sapiens
atcctcctgctctgtatctttcattttaacgggaacgtgaagcaggccactccttacatcgctgtcctctctgatccctcaatttggtctgttttcaa

SEQ ID NO: 862803 - DNA, 99 bp, Homo sapiens
acagattacgccccctatcctatccgcaaacagcaatgagaagagctatctccaggaacactgccatgctcgtctgttctaccccacagtttcctcatg

SEQ ID NO: 862804 - DNA, 99 bp, Homo sapiens
gggattttgaagacaactttttcagacagaatggaagcactgttgcaagaattcaattccgtcttcctgatggttcttcctttacaaatcagttccctt

SEQ ID NO: 862805 - DNA, 100 bp, Homo sapiens
gtccatcttggttttgagctctgctctgcctgtgatgtcgagaacactgggactctccttcagcaactccagaagcttcagactttggtgatgggcaagg

SEQ ID NO: 862806 - DNA, 100 bp, Homo sapiens
aacggaatttacactgacagaagcagtggtcgaatccagtagaaaactggtcaaggaagctattatttgcaggtgtcttccctcgaatggcagccatcag

SEQ ID NO: 862807 - DNA, 100 bp, Homo sapiens
ctggagacactgtacagtttgcagaatatattcagaaaaacgtgcaactttataagatgcgaaatgggttttatatgactggaaagaaagattgaaacag

SEQ ID NO: 862808 - DNA, 98 bp, Homo sapiens
gtggctatggcggttccagcagcagcagtagctatggcagtggcagaagattttaattagtgccttgctttccatgacatttcccctcaagcaccaac

SEQ ID NO: 862809 - DNA, 100 bp, Homo sapiens
ctcccgagcctcgctggcggatgctctacctctgcacatcgcacccaggtggttcagctcgcatagtgttcaaagcagtattcagcgatttcaagagaag

SEQ ID NO: 862810 - DNA, 100 bp, Homo sapiens
aatctcctaaagatagacagctcaaatgaattgggacattccagctacatcacacaccttgactggtccccagacaacaagtatataatgtctaactcgg

SEQ ID NO: 862811 - DNA, 100 bp, Homo sapiens
tggcgctatggatttcaatccctccgtatgcacatgtgggtagaggacgtgttagacaagttcatgagaggtcctgctgtactagccaccaaagcagctg

SEQ ID NO: 862812 - DNA, 100 bp, Homo sapiens
gggaggctgtgaagaggaggaaggccttgtgcaaacgcaagtcgtggatgagtaagatgaggaagtgctggctgatgtccgcaccatcgtgaaccagatc

SEQ ID NO: 862813 - DNA, 98 bp, Homo sapiens
tgctctatgactgtatgccgtggacaagagatgcctgggcgtcaccatgccacagctacccacttgttgccaccagccagtgccaatatctgcaatgt

SEQ ID NO: 862814 - DNA, 99 bp, Homo sapiens
agtctcaggatgttctgagattgcatcaggatattaatgattataaccggagattctcagggcaacccagatctgatgaagatgagctggattcccaca

SEQ ID NO: 862815 - DNA, 100 bp, Homo sapiens
ctgcaggctgagaaactggaccaccatcctgaatggtttaacgtgtacaacaagctggatgctgacaaatatgagaatgatccagaattagaaaagatcc

SEQ ID NO: 862816 - DNA, 100 bp, Homo sapiens
ccggcgtgccccaccatgtcagacgcagccgtagacaccagctccgaaatcaccaccaaggtgttgacttcaaaatcaaaactgtagagctaagaggaaa

SEQ ID NO: 862817 - DNA, 100 bp, Homo sapiens
gtatttggccatggtcttactgggagccactcacggattaatatttctccctgtcttactcagttacatagtattcctgtgcacacaatatttgacagct

SEQ ID NO: 862818 - DNA, 100 bp, Homo sapiens
aaagattggaccaattctagataccaaaccggagaagagcagaaccaacttacaggaagaattgaaaatcctggtactggatggctgtgataagctgttc

SEQ ID NO: 862819 - DNA, 98 bp, Homo sapiens
tggagagggagacgcaggaagcgatgaaagagatgtctgcaagttccacctggtgccaagcatcaacaccatgagtggcagtcaggagctgcagtgga

SEQ ID NO: 862820 - DNA, 100 bp, Homo sapiens
gccgcttatcttcaggagcgaagagctgcttctgtatcttaaggatgtgatggtggcaggtgggatggagagcatgtccaatgttccatatgtaatgaac

SEQ ID NO: 862821 - DNA, 99 bp, Homo sapiens
agacatctgattgctgacctaatggatgatgaacttgttgttggacatagtgcaagatcagacatctccagcttcccttgtacatctggcttttaaatt

SEQ ID NO: 862822 - DNA, 101 bp, Homo sapiens
cgggtccggatagggctgacgctgctgctgtgtgcggtgctgctgagcttggcctcggcgtcctcggatcctgataacttaagtgactctctcttttccgg

SEQ ID NO: 862823 - DNA, 98 bp, Homo sapiens
aatttgttgaaaatttcaagcaggaacataaactccatgttctgataatcacagctggcttatcaatattgctgtttgatgcgatcctgaccagtgca

SEQ ID NO: 862824 - DNA, 98 bp, Homo sapiens
tatcaccagccagcacccatcgctcagttgtctccagctgttagccagaagcctcccttccagtcagggaggaactgtgagagtgacactgaggagga

SEQ ID NO: 862825 - DNA, 100 bp, Homo sapiens
gacaagattgaaagcaaattattagctaagaaagcagaggttaatacaatccctggctttgatggagtagtcaagtctccagagaatacagagggcaaag

SEQ ID NO: 862826 - DNA, 100 bp, Homo sapiens
gcactcactgaggatttttccgctaagttcttaagagacaccaagatgagagctattgttcacataactcaacagttagtgattgtcaagtggggaacac

SEQ ID NO: 862827 - DNA, 100 bp, Homo sapiens
caaaaaagactgagtcgcagttaccaccaaacccaggaggagactctccctggaaaacttcccttccctttcgactccaagaactttcccctcagagcac

SEQ ID NO: 862828 - DNA, 98 bp, Homo sapiens
gctgctggcgtaccctgtgcgttagtcaccagctgctcctccgtcttctcaggagaccagctggtccaacgaagatgagaatgtgcctactgctcctg

SEQ ID NO: 862829 - DNA, 98 bp, Homo sapiens
cagaaggaacttgcagaaatcacattggaccctcctcccaactgtagctctcttcaatctaattcccgtgggcctgcgtgtagtggccatccaaggag

SEQ ID NO: 862830 - DNA, 98 bp, Homo sapiens
caaggcaagcctattgagttaacacctctgccgctgctaaaagtggcaccactgcaagtggaggtgagaacgagcgtgaggacctggagcaggagtgg

SEQ ID NO: 862831 - DNA, 51 bp, Homo sapiens
ctgaagaagacacctactgaggctgaggcaagtgaggcctatctggttggc

SEQ ID NO: 862832 - DNA, 101 bp, Homo sapiens
ttcattcagtggtgttaaggattccaacaacaattccgatggcaaagccgttgccaaggaactcgaatcatttatgacagaaagtttctgttggatcgtcg

SEQ ID NO: 862833 - DNA, 100 bp, Homo sapiens
tggtgaaattgccggcaagagggagttaaggacattccaggcagaggcaaggagatgttaaacatgtctaagaaaacagtttcttgttttgtgaacttca

SEQ ID NO: 862834 - DNA, 100 bp, Homo sapiens
caagctctgccggacatggtggtgtcccacctttttgggaagatgagagctattgttcacataactcaacagttagtgattgtcaagtggggaacacgac

SEQ ID NO: 862835 - DNA, 100 bp, Homo sapiens
gaggtttgcccggagcgcgcacgaggcatggaagaggagatggttcgtgttacgcagtggccgtttaactggagatccagatgttttggaatattacaaa

SEQ ID NO: 862836 - DNA, 100 bp, Homo sapiens
tgttgatgaagatgaaagagactgcagaaatgactgctgtccatgcaggcaacataaacttcaagtgggatcctaaaagtctagagatcaggactctggc

SEQ ID NO: 862837 - DNA, 99 bp, Homo sapiens
ccatcatctccaaggtggcacgcgtggcggcggccgaggagagcaccgggaaagcctctgctaaagaattacctccaaagccattgtcaagaccacagc

SEQ ID NO: 862838 - DNA, 98 bp, Homo sapiens
agaaggattgctttctcattatttgccagatctgcagagatcaaaacaagccctccaggaactcacgtgtacattccaagcagagtggccctcatcct

SEQ ID NO: 862839 - DNA, 98 bp, Homo sapiens
tttgcttccccttttgccacgaccgaccgaccataagtttcctgaggccaccccagacctgcagaattgtatgattatcgggaaatgctgcacaatgc

SEQ ID NO: 862840 - DNA, 100 bp, Homo sapiens
gacaactgccggcttgtgttcaacccagaccaggaggacttggacgggaaaacaaagtgcatgatgaagtcttcagactgtgtcataaagcatgctggtg

SEQ ID NO: 862841 - DNA, 98 bp, Homo sapiens
gattgtggcccggtgcctgtgggaagaatcacgccttctacagactgcagccactgcggcccaggaacacagtggttccactgtaccttccattttga

SEQ ID NO: 862842 - DNA, 99 bp, Homo sapiens
ttcatctccagagcctttgccaccatgggggagaccgtaatgagcgtcaaaattatccgaaaccgcctcactggaaacagtatctcacctccctaaact

SEQ ID NO: 862843 - DNA, 98 bp, Homo sapiens
accatctacaagagccaaatcaagattgcgtttctcaaagtcctacagaatgatatggaacctagcaaagctgttccactgaatgcatctaagcaaga

SEQ ID NO: 862844 - DNA, 100 bp, Homo sapiens
ccgggatgtttttggcaaggacttaatttatacactttattattggaaatcttcaagttcaggaaagggtgacatccagcagctgctctttgtctcggac

SEQ ID NO: 862845 - DNA, 98 bp, Homo sapiens
ccctgtctggtgcatccttggcagaaagtgaggaggaaaacacccccattgttgatatctgtgcagaagaattggggaataatgtaaagcccgctgtt

SEQ ID NO: 862846 - DNA, 100 bp, Homo sapiens
ctgcacaccatagtcaccagcaaagacggtctcgccacattgcccagactggtctgaaagtcttgggctcaagagatcctcccgcttccgccttccaaag

SEQ ID NO: 862847 - DNA, 98 bp, Homo sapiens
tgaaggtgcatgactccaacatctacattaaaccattcctgtcttcagctccagagatctttctcctggcctgccctccatgtcggggagctatcgtc

SEQ ID NO: 862848 - DNA, 100 bp, Homo sapiens
cgacggcgtgcagctcccgcccggggactacagcacgacccccggcggcacgctcttcagcaccaccccgggagaacccagtgacttgattgtaaaaatt

SEQ ID NO: 862849 - DNA, 98 bp, Homo sapiens
gccggccggtgccagcacctttcggcttctgagacggcggcagcagcggcattcagaccccagagtcagaaggagtgagaaccctgacccctaatccc

SEQ ID NO: 862850 - DNA, 98 bp, Homo sapiens
tggagcactacgtgcggaaggaggaataccagacgcaagatggaaagttgccttttgttcctccggaggaagaatttattatgggagtttccaagtat

SEQ ID NO: 862851 - DNA, 100 bp, Homo sapiens
cgagaaggaagttgtaggaatagcacataaattctttggagctgaaaatagcgtgaacttgaagactaagcctggagtaattcgcccagtacctgtaaaa

SEQ ID NO: 862852 - DNA, 98 bp, Homo sapiens
tgatgaaagcagtcctcatcccttagctggcagctgttttgaagatttggcagaaaatttctacaagtgtgaaagaattagaaaacttcaggaacttg

SEQ ID NO: 862853 - DNA, 131 bp, Homo sapiens
cgggtgaagatcggacactacgtgctgggcgacacgctgggcgtcggcaccttcggcaaagtgaagagttgatgagaaagctctgaagcacataacggaaatgggcttcagtaaggaagcatcgaggcaag

SEQ ID NO: 862854 - DNA, 101 bp, Homo sapiens
tcaccaactgcgggcacgtgtactgcgacgcctgcctcggcaaaggtagctacagcaagctgggtagcaggcagatccaaaggatatcatgaagtttccag

SEQ ID NO: 862855 - DNA, 98 bp, Homo sapiens
agatggctcaaaatatggattaaaaagtgaacttttctctggacttccccagaagaagattgtggttgaattcagcatgtggagagggccaaatgtga

SEQ ID NO: 862856 - DNA, 100 bp, Homo sapiens
agagcagtgccctggcctgtaccctgcccacactcccagattgcagttgctctacggtgagcccgggcgtgctggcagggatcgtgatgggagacctggt

SEQ ID NO: 862857 - DNA, 98 bp, Homo sapiens
agcagagggaaagggataggagaaggatgtggactgcagtgctgcagtgccagctcttttgaaacagatggtcaccatgtttagatattagcagtccc

SEQ ID NO: 862858 - DNA, 99 bp, Homo sapiens
tgagaggatggaaatcagcgcggagttaccccagacccctcagcgtctggcatctactttttgaaaaggcctttagagagttatgtgaaaaaactaaaa

SEQ ID NO: 862859 - DNA, 100 bp, Homo sapiens
caccacgaggaaagaggcagagcagctttgccaccggcttatggagcatggcatcatccagcatgccgggggccatcaagtataagaccacaggaccacg

SEQ ID NO: 862860 - DNA, 150 bp, Homo sapiens
cagattcaacaaattccagtgacaacatctacacaatgattaatccagtgccgcctggaggcagccggtccaacattggagcatctctgatgtccagcaatgtgggcagtggcttgttcatcggcctggctgggacaggggctgccggag

SEQ ID NO: 862861 - DNA, 100 bp, Homo sapiens
tctttgggacaacaaacttcgctccaggattgtcaccagacctgcaatctatggagcagattcggagaattatgagacctactgatgtccctgatacagg

SEQ ID NO: 862862 - DNA, 100 bp, Homo sapiens
ctgccaggacaaatcatcagggtaccactatggggtcagcgcctgtgagggatgtaaggaaaaccgtcttcagatacagtccctaagcccaagagagccc

SEQ ID NO: 862863 - DNA, 99 bp, Homo sapiens
cttaatccagttctgtggccactcttggatatttacaaatatgacagtcagattcttttcatttggaaaaggagaccaagacacattccaccccagtgg

SEQ ID NO: 862864 - DNA, 100 bp, Homo sapiens
ccattttggaacgcccgtgccgcgtctccgcgttcccagcccgggtccccgcgttcacagccccagcgcaggtggccattaagcagatgaatcttcagca

SEQ ID NO: 862865 - DNA, 98 bp, Homo sapiens
ccgtccatcatagtcaactgcgtggaagagaagcaagtctggaaaagtttgaaattccagtaaaaattcgtttgagtcctgaaccgtggacccctgaa

SEQ ID NO: 862866 - DNA, 99 bp, Homo sapiens
gggagtttgcggattttgaatatagggactggttcgttgtaaacccaacaacaaccaaaagctttgaaaagctgatgaagataaagcagcggcagcaag

SEQ ID NO: 862867 - DNA, 100 bp, Homo sapiens
attccctgcggtgtgcaagtccgactggaacagtttcaccagtgatcattaaagaatgggcagcttacaaaggaaagtctcctcaaaccccggaactggt

SEQ ID NO: 862868 - DNA, 100 bp, Homo sapiens
cttcaacaagaggacccaggagaaattcgccctcaaagacccggctgcccagtccctcatgatcatgaacaagatgaagaactttaagcgccgtttctcc

SEQ ID NO: 862869 - DNA, 100 bp, Homo sapiens
aacggaaggcttcaaaattgacactatgggaacctaccatggtatgacactgaaatctgtaacgactgtggatattcataaggagaaagtggcacgaaga

SEQ ID NO: 862870 - DNA, 100 bp, Homo sapiens
caggctggggccggcgggagcgcgaacgagcgacggcggaacccgtgggcctgtggactgcagcctcggcggtcagcagcctgacatttaccccggtaac

SEQ ID NO: 862871 - DNA, 103 bp, Homo sapiens
cggagtctgacagcagtggggagaccaaggtggagctgatcagaataatgttcagcatcaaccccctggagaacctgaaggtgtacatcagcagtcggcctcc

SEQ ID NO: 862872 - DNA, 100 bp, Homo sapiens
aaagaagaagctcaggctgaaattgaacagtaccgcctgcagagggagaaagaattcaaggccaaggaagctgcggatgatgactttgagttcactggca

SEQ ID NO: 862873 - DNA, 100 bp, Homo sapiens
gcttcagacagcatatttgagtcatttccttcgtacccacagtgcttcatgagagtatgggaagactctctatgataactaccagcgggctgtggcaaag

SEQ ID NO: 862874 - DNA, 134 bp, Homo sapiens
tggacaacatcgccctgtggatgactgagtacctgaaccggcacctgcacacctggatccaggataacggaggctgggaactctaatgaatcattgattgaccagcactattttaccagttggaatgaatgatc

SEQ ID NO: 862875 - DNA, 100 bp, Homo sapiens
ctgatcaagccaacaacagtgacggaatgcctccatacatgtgcagaagtctacttcagacatcgtgtgacacagatcaacctaagagatgacaaatggg

SEQ ID NO: 862876 - DNA, 100 bp, Homo sapiens
ctctggggctccgagcccggcgggaccatgttcaccagcaccggctccagtgggctctgcccatctgcccctaggacagagtaacagctgtggaagtgtg

SEQ ID NO: 862877 - DNA, 100 bp, Homo sapiens
ggaagatggaccttctaataatgcgagctgcttccgaaggctgaccgagtgcttcctgagccccagccatttcataattctgaatcatgtctgataacgg

SEQ ID NO: 862878 - DNA, 98 bp, Homo sapiens
atgggtcatgaggatgtaagtgcgtttgaaggcttccacaccctctactccaggtcgggaagacgtctctgattacgaggttcatgtacgacagcttc

SEQ ID NO: 862879 - DNA, 51 bp, Homo sapiens
tctagctgcagttttgatgcacagagtatcttctcacaggtatgaaacacc

SEQ ID NO: 862880 - DNA, 113 bp, Homo sapiens
ccccccttccccacgcaaccccagatccatttacactttacatgaacagagtatctgtcaggcaagagctgctgtgatggtttatgatgatgccaataagaagtgggtgccag

SEQ ID NO: 862881 - DNA, 100 bp, Homo sapiens
actccactgaggtcacacagccggcaaggcactgacgtttcttctgctacagcctccaagccccaaacttcctccacacagcactatccgaagaacagcc

SEQ ID NO: 862882 - DNA, 100 bp, Homo sapiens
tcaaaagagtccagattcaacaggctgccaataaaggagcaagatggctaggggtttaccgacaagactgtgaaactttcgggatggtggtgaaaatgct

SEQ ID NO: 862883 - DNA, 100 bp, Homo sapiens
ctgctggccgcctggacggctcgggcgctggaggtcaaaatgcagatcttcgtgaaaacccttaccggcaagaccatcacccttgaggtggagcccagtg

SEQ ID NO: 862884 - DNA, 99 bp, Homo sapiens
tctaacatcacctgcttcatccttgtttaatgactttggtgccctcaacatctctcagagacgaaaggaactttcagaaaatgaagtggttggatctta

SEQ ID NO: 862885 - DNA, 98 bp, Homo sapiens
ccctcaacatctctcagagacgaaagaacactgagctgaaggttgaagtggagagcttgaaacgagaactccaggacaagaaacagcatctggataaa

SEQ ID NO: 862886 - DNA, 100 bp, Homo sapiens
aagcggcgagcccatccccctgaggatccacgactttccttcccatctattaagccagtcaccctcatcgattcctacgagtcttctagcttcatgttcc

SEQ ID NO: 862887 - DNA, 98 bp, Homo sapiens
aaacatgctagaattacctggaacttcatcatcatctacttcacaggaattgccatttagattatggagaagtctggcgaggaaggaatgcctgatct

SEQ ID NO: 862888 - DNA, 100 bp, Homo sapiens
gctcaccgcatgtctgcagggccagcaaggggcagaggctgacaagcgctcctagcttccctctgtgtgaggaaaggatagaaatgttcaggacatcatc

SEQ ID NO: 862889 - DNA, 98 bp, Homo sapiens
aggtttgaaccgtttaactgagatccgcctctgcaggctatccatggacttttaaattataaatcatcctcatcctttgataactgtgcttgaacaca

SEQ ID NO: 862890 - DNA, 100 bp, Homo sapiens
gcagaacctggccgagatggggttggctgtggaccccaacagggcggtgcccctccgtaagagaaagccttaaagaaggagaggatcagaaagagataaa

SEQ ID NO: 862891 - DNA, 99 bp, Homo sapiens
cagactttcttctgtggcaacgtggctcatcagcagcttatccaggctcttgcagccaatgccggaacaggatttgctgttgctgagcctcaaatcgca

SEQ ID NO: 862892 - DNA, 100 bp, Homo sapiens
gtgcagacctgcatcaacctgatcaccagccaggagtacgccgtcaagggcaaacctggtggacctgcagaagaagctggaggagctggaacttgacgag

SEQ ID NO: 862893 - DNA, 98 bp, Homo sapiens
aacagaccctccactgagtgttacagaatctacccttgacacccaaccttctccagccagcagtgtatctcctgcaatcagtggaacctagtgaagtg

SEQ ID NO: 862894 - DNA, 98 bp, Homo sapiens
ctcacgcgcgaggcggtggccgtggacgtggctgtgcccaagagggagcaaatggaatgatgactttgaaaaccactggcttacgcccaccatttccg

SEQ ID NO: 862895 - DNA, 98 bp, Homo sapiens
caagctcagccccgaagtgcttcagatgtagagtttgcagatgctgaaggttactttgctgcttgcacaacagatacaactatgaatagttctttggt

SEQ ID NO: 862896 - DNA, 99 bp, Homo sapiens
ggatgagtacgataccgaagcgggctgtgtgccccttctccacccagagtcaatcctttcccatggtaccgtggcagactgtgctgttgttggcaagga

SEQ ID NO: 862897 - DNA, 100 bp, Homo sapiens
ggagccggtgagtccgggtggatgaggtcagagcgccccatggtgtggtgctgcctctttgtccgttcgcagctgtttggggcaacttcgttaatatgag

SEQ ID NO: 862898 - DNA, 100 bp, Homo sapiens
ccttatttaggccccagcacactcagagacagcacccagtcagcttgaagagtttcaaatggaccctaccactgagaaatcaagatggcagtctactatg

SEQ ID NO: 862899 - DNA, 99 bp, Homo sapiens
gggcggagtagcggccgagctgcgaaagaggaattacatgaacgacagccttcgcaccgacgtcttcgtgcggttccagccagagagcatcgcctgtgc

SEQ ID NO: 862900 - DNA, 98 bp, Homo sapiens
gagatccctggagctccatgaaaaggagaaaaagaatgccgtgtttcctggatctatggagatgacctgagaattaatttatggcacttagaaatcac

SEQ ID NO: 862901 - DNA, 98 bp, Homo sapiens
cgaacaatggcaaacagtacggcagtgaggctgggaagttatcaattccaaaccagatgaaagacccaggctcagccactgtattgcagaatcatgga

SEQ ID NO: 862902 - DNA, 98 bp, Homo sapiens
actacagatgtgttaacacccagcatgttccggtaggagactttctggatggggaagatttccagagggctacttctccaggagaacagcaggtttgc

SEQ ID NO: 862903 - DNA, 98 bp, Homo sapiens
tgatgaactggaggctgagtacgacagcctcaaacaggagctggagcagctcaaagagggtgggccaggaggcagattctcatcagatttggaaggaa

SEQ ID NO: 862904 - DNA, 100 bp, Homo sapiens
attgctggaaatgatcaacaaaagaagaagtatttggggagaatgactgaggagccattgatgtgttccagggaccttgacccagcccctctcagcagac

SEQ ID NO: 862905 - DNA, 98 bp, Homo sapiens
gcagcggaccccgaattctgtcacccgttgtgccagtgccccaagtgtgccccagctcagaaggttaatacaatctgttggaatgacactggagaata

SEQ ID NO: 862906 - DNA, 116 bp, Homo sapiens
cggctctgagggcactggcctagttcccgacttgtttctcaggaccgggactttgtagccaagcagaaggaggacctggagctggccatgaagaggctcaccaccgacaacaggcg

SEQ ID NO: 862907 - DNA, 98 bp, Homo sapiens
gagaaggagaacaccccgagcgaggccaaccttcaggaggaggaggaccagctactcttctgcgatgactgtgaccgaggctatcacatgtactgttt

SEQ ID NO: 862908 - DNA, 99 bp, Homo sapiens
gacagggcacaccaaactccatctggctccttcgagagcagtggatccgggccaagtacgagcgacaggagttcatctacccggagaagcaggagccct

SEQ ID NO: 862909 - DNA, 100 bp, Homo sapiens
attgaagagctggggaaggagatcagacccacgtacgcagggagcaagagtgccatggagaggctgaagcgcggtgaggtccagagatatatccagagag

SEQ ID NO: 862910 - DNA, 99 bp, Homo sapiens
tcctgtgacctgcatgtactgggggattcgcagggaggatgtcgggacaccccggaagctgggaaatgggactttgaacatgtcggggatcgccctcag

SEQ ID NO: 862911 - DNA, 99 bp, Homo sapiens
tggccattaaacctgctgttctgaaaggtaatgactttacatgagtttggaactggtctctagtgggaagttgtgggaggatgaacacagaagagctgg

SEQ ID NO: 862912 - DNA, 100 bp, Homo sapiens
cggagacaactggaaattcattggacctgatcaacatcgtaatttctattacttcagctttagctgcagctgcctctgttcagccacttgcaacacaatg

SEQ ID NO: 862913 - DNA, 100 bp, Homo sapiens
tgcacccagtcctgcagcgccagcagctggactatggcatctatgttatcaaccagctttggggccatttggatcacacgatgttttttcaagattttag

SEQ ID NO: 862914 - DNA, 100 bp, Homo sapiens
tcagctcatccaggaggcccttgtctttgacaacaagcacacgaactacacgatggagaatgtcaagctgtcagctgaggtggagccatttattccccag

SEQ ID NO: 862915 - DNA, 98 bp, Homo sapiens
atctgtgtcgccgccgcccgcggcgtccccggtttggtgttgcggcgcccaccttcgggaggatcagggcagctcagttctggcaccaaaccaaatcc

SEQ ID NO: 862916 - DNA, 100 bp, Homo sapiens
caagcataatctaatgacagttgaacagaataatgggagatacttcaggggattaccggaagattctgctgaagatctgtggtggcaatgactgaacagt

SEQ ID NO: 862917 - DNA, 100 bp, Homo sapiens
ctctgccgtgccacctgctgcacccacgaatctgcccacccctcctgtaacccagcctgtttcacttcttgactatcaagaaatccaagtggtaatgggc

SEQ ID NO: 862918 - DNA, 100 bp, Homo sapiens
tcccttcctgatactagaagtgaggagcaatttacagcaatgagggatttatacatgaaaaatggacaaggatttgcattagtttattccatcacagcac

SEQ ID NO: 862919 - DNA, 100 bp, Homo sapiens
cctggtcctctgccctcgcgccccgctagggccagagccccccaagatgaacccagtggtggagccactgtcctggatgctgggcacctggctgtcggac

SEQ ID NO: 862920 - DNA, 100 bp, Homo sapiens
tccaccatcagacagggccagtttacaaaaggtacatcaggaacgtctctatcaagaatacaatttcagcaaggctgagggccatctgaaacagatggag

SEQ ID NO: 862921 - DNA, 98 bp, Homo sapiens
atcttcttcgtgaggctgctcttcgagcgaatcttgacaaaacttttggaagtgtcagatgatccccaagtcttagctgttgctgctcacgatgttgg

SEQ ID NO: 862922 - DNA, 100 bp, Homo sapiens
attcctcacgtctaccccgtggctgctaagacacagcttggccggtgcttccaggaaaccattgggtcacaggcacgtgccttaacacctcaaactgcag

SEQ ID NO: 862923 - DNA, 114 bp, Homo sapiens
aaagatatgaattgctcaatgtcttggagtttaccagggcaattcatgatgttaaagccacagatctgggattaggtaaagtaagatttaaggcagaagtagattttgatgggc

SEQ ID NO: 862924 - DNA, 99 bp, Homo sapiens
ttcttccttatacgtcaatgagcactatccacacgacaggcctacactctattcaaacagaattgatagatgtcacatgtaccctgctgcttctaaacc

SEQ ID NO: 862925 - DNA, 98 bp, Homo sapiens
cgagctggagaaggccatcaccacgcagaacgtcaacaccaagtgcatcaccatccccagaatctccgccacctccctactctcggctgtctcctcgc

SEQ ID NO: 862926 - DNA, 98 bp, Homo sapiens
gagtggattctgaggaccggaggagccgccactgcccgtacctggacaccattaacagctgtcggaaaaggtaacagaagatggaactcgaaatccca

SEQ ID NO: 862927 - DNA, 100 bp, Homo sapiens
cgcggtccctgtattggtctcctgctcctagagttgcctgaaacccaccaactcctacagttgagacgatttgctcatggaacagcaggtctggtgttcc

SEQ ID NO: 862928 - DNA, 100 bp, Homo sapiens
atctcgagcaaattaagcactaacatacatatgatagttgagaaagacacatattctgatcatgaagaaataaacacaagttaaatatgactaagcagaa

SEQ ID NO: 862929 - DNA, 100 bp, Homo sapiens
gttaaattcattgactacggaaactatgaagaggtgctactgagcaatatcaagcccattcaaacagaggcatggaagcggccagcttgatgtccgggag

SEQ ID NO: 862930 - DNA, 100 bp, Homo sapiens
tctgctctactcattccctgttgtaatcaaggtatgttcgcaattcgtgctgatcatgattttgtagtacaggaagacttcatgaaagcagtcagaaaag

SEQ ID NO: 862931 - DNA, 98 bp, Homo sapiens
ggggattcgcagggaggatgtcgggacaccccggaagctgggaaatggggcataaggaaatggtggcaggcacttcctcctaacaagaaggaagtagt

SEQ ID NO: 862932 - DNA, 100 bp, Homo sapiens
ggactggctccccgtgtggatcaggagaagtgggcccagcgttcattcaggtactttaattatcggactaccaggttcctggctgaggaggggttttata

SEQ ID NO: 862933 - DNA, 112 bp, Homo sapiens
ggggcagtgcttacacaccatccagactgaagaccgagtctggtccattgctatcagcccattactcagctcctctggtgcaagtgtggtagctattgacaacaaaatcgag

SEQ ID NO: 862934 - DNA, 99 bp, Homo sapiens
tttcatgaaggagctcatgcagtggtacaaggaccagaagaaactgcaccggaaatgtgcctaccagatttgtccaatatgtgcagcgttacctggagg

SEQ ID NO: 862935 - DNA, 100 bp, Homo sapiens
tccgttggcccaaccagtcccagcgctgtcgtgctcctctactcggtactaggttttgacaagcttgcatcatgcgtgagtataagctagtcgttcttgg

SEQ ID NO: 862936 - DNA, 100 bp, Homo sapiens
acagaagctgatgggccagatacatcagctcagatccgaattacaggactatatttctaaaatggacccagcctctaccctgggactaagcactgagtcc

SEQ ID NO: 862937 - DNA, 99 bp, Homo sapiens
gctttcaaggatatgctgtattcagctcaggaccaggcaccttctgtggaagattgtcagaagcttcagttctggtaaaagagaaggtggggactttgt

SEQ ID NO: 862938 - DNA, 101 bp, Homo sapiens
cttgggaaaaggccggagaaggtgaaattctgtgtgctccctccggcgagagactttgtcagctcccgcacagtaacctttgccctttcggatgaagcata

SEQ ID NO: 862939 - DNA, 100 bp, Homo sapiens
cgaatatctttgcctatgcctgtgatttttctccaagagccattgaatatgttaaggtatctactgagcgtttcagtcaacaatacagctcgtgttcgac

SEQ ID NO: 862940 - DNA, 100 bp, Homo sapiens
acttctcagctttaccatccctggaggagacctggcagcagctgtgagtaccagagtgcccactggttccaacagttcttctcagaccacagagtgtctt

SEQ ID NO: 862941 - DNA, 101 bp, Homo sapiens
ccgggggtcgctggctctgctgctgccgccggcgaaggaggaggcgttgccgggcatctgcatctgggaccgacctcctgggctggctgatcaaagaggaa

SEQ ID NO: 862942 - DNA, 98 bp, Homo sapiens
agtacagccgccaggagctactcaggaaggtgatgagatttccatccatgctgactttgagaatacatgttcccgaattgtggtccccaaagctgcca

SEQ ID NO: 862943 - DNA, 99 bp, Homo sapiens
ggccgcctgtccgtcgatgcaccgaaaagactatctgttatagtccctgggtcaagacaacaatttttataccttcgtcgtggttcagaaaggagtctc

SEQ ID NO: 862944 - DNA, 98 bp, Homo sapiens
acacttgtggagagctcgaattccagaatgatgaaattgtgttgacgccgctgtcaccccagaggagcgccacctgtccaagatgcagcagaacggct

SEQ ID NO: 862945 - DNA, 100 bp, Homo sapiens
tcgttgtttgcgtgcaatgttcaccagtcagtgtttgaaggagaagagagcaaggtcagtgctgacagttgcttgtgaacaaactgaagttctgcttttt

SEQ ID NO: 862946 - DNA, 100 bp, Homo sapiens
gggagtttgaccgcgttgacgacggctcgcagagaacccaagccagaccgtctccttgtattgaaagtactatggaatgatttcctgatgtgctactcct

SEQ ID NO: 862947 - DNA, 100 bp, Homo sapiens
cctggaatggcaagcgcagcaacaacagagagcacgtggaaccaaccggtgagccctctcctaagagacccaggggaagacccaaaggcagcaaaaacaa

SEQ ID NO: 862948 - DNA, 98 bp, Homo sapiens
atcagctaccctctgcacttccccctgtcatgaaacagcaaccagttgctatttctagcgcaccagcatttgggatcgcttacacctgagacgaacta

SEQ ID NO: 862949 - DNA, 100 bp, Homo sapiens
gggaatccactgagaaaattcaagttggtgttcttgggggagcagagcggatgagcagcagcaagagatggccgcttctgccgccttcatagaccggcat

SEQ ID NO: 862950 - DNA, 98 bp, Homo sapiens
aaatccaattcagctttttgtgctgccagcaagaaatgatcagtagcaccagtgtttatgagctgcagaaactggagggcagcagtggacctgtgcgg

SEQ ID NO: 862951 - DNA, 100 bp, Homo sapiens
atgacttccaagctggccgtggctctcttggcagccttcctgatttctgcagctctgtgtgaaggcaaggccctcacgtttatcaaggagaaagtcttga

SEQ ID NO: 862952 - DNA, 103 bp, Homo sapiens
aatttcgatctccgccctggggtcattgtcaggacacagcattgttggttttgccatgtactattttacctatgacccgtggattggcaagttattgtatctt

SEQ ID NO: 862953 - DNA, 100 bp, Homo sapiens
gcgtgggccccgtatgctgccgtggatctgatcagctgaggcctgagacacaggaccaggatctcatagatcagaacatactggagcctgtaacccgtgc

SEQ ID NO: 862954 - DNA, 100 bp, Homo sapiens
cggccccagtagccgcgggccttgggcccgtaatctcacgacctccgcctgcggcctcctcgcaaaacaaggacctgcgcgaagtctggctcaattatcc

SEQ ID NO: 862955 - DNA, 100 bp, Homo sapiens
ggaaccctggtcaccgtctcctcagagaaagatgctggtttcgagttttggagatccttgttttttatggaacacagttctgtaaaattttcataagatt

SEQ ID NO: 862956 - DNA, 100 bp, Homo sapiens
ctggctagaagcagagacaccaggacagaaaagacagtgttctgctttcatggagttcacagaagagtcgaggagatgtagatgaatgctcagaaaacag

SEQ ID NO: 862957 - DNA, 100 bp, Homo sapiens
ctgtactctccactctttcctcacctccttccttttttctatgcctggcgggagctggacagtttcatctcttgcatatggagtctcactctgtcgtcca

SEQ ID NO: 862958 - DNA, 100 bp, Homo sapiens
gaaaaccattgtgctgcatgtcagcccggaagagcctcgaaaggttccctataaaagagaagaggaagccttagaggagaggagactctcccgtggtgag

SEQ ID NO: 862959 - DNA, 100 bp, Homo sapiens
cgagctgatgctcaactccagcctcatgcggatcaccctgcggaacctggaggaggtggagttctgtgtggaagaagttccacctggtgccaagcatcaa

SEQ ID NO: 862960 - DNA, 100 bp, Homo sapiens
cctcgctccttcaagcctccaccacctcgcagccggggaggcaactggagcgaaaccagcgacaggggaattgactttagaagaatttatcaatggcatg

SEQ ID NO: 862961 - DNA, 100 bp, Homo sapiens
actccaagccaaaatcacagctttgagtgagaaacagcaagaaaagcctaggcttctcgagcctttggattatgagactgtcattgaagaacttgaaaag

SEQ ID NO: 862962 - DNA, 99 bp, Homo sapiens
ggaattccagtttaaagctcataggaatgtgctggcctcctttaaggctactacttgagaagaggcaaaggaaaaagcgccttgagccatttatggtgc

SEQ ID NO: 862963 - DNA, 100 bp, Homo sapiens
ggacagcataaggaagccaagttggaccgttctgatgtgactgagagagaagctgcagaaccttggcctgaaaatgctacattatatcagcaattgaaag

SEQ ID NO: 862964 - DNA, 98 bp, Homo sapiens
gctacaagtaggatggcagatctgatgcaggagacctttctgcatcatgccacggatgaatgctatcaagtaagacaagtgtttgcccagaaacttca

SEQ ID NO: 862965 - DNA, 100 bp, Homo sapiens
gacaggctggttaaagcagcaaaggagcagtatgtgtttatccacgatgcgatcctggaagcctgtctttgtggggacacctctgtgcctgcttcccaag

SEQ ID NO: 862966 - DNA, 98 bp, Homo sapiens
atctgtccagcatgactcatccccgggagtgttgagctcgtggtcccaagaagcatctgaagcgggtggcagctccaaagcattggatgctggataaa

SEQ ID NO: 862967 - DNA, 99 bp, Homo sapiens
cccagtacacttactactatcctcattatctccaaaccaaggtaagaaacggttgaactggatgcaatttttatcacagcttgtgtaagactgcctctg

SEQ ID NO: 862968 - DNA, 99 bp, Homo sapiens
gctaccctgcgtatctggacacctttaaggattctcgcctcaggcaagctaatgaagaatatcaaatactggcgaactcctggcgctattcatctgctt

SEQ ID NO: 862969 - DNA, 51 bp, Homo sapiens
cctacatttagcgcatcatgtgatccggttgaggctgtgaagctgggcagg

SEQ ID NO: 862970 - DNA, 100 bp, Homo sapiens
agtggctttaagatcctcaactgccaaaaggcaatgggactggaatgtcacgtggaataccagcaaccccgacttcaccaagtgctttcagaacacggtc

SEQ ID NO: 862971 - DNA, 100 bp, Homo sapiens
cttcctggtggactgcagcaaagctgactcctgaggaagaagagattttaaacaaaaaacgatctaaaaaaattcagaagaaatatgatgaaaggaaaaa

SEQ ID NO: 862972 - DNA, 100 bp, Homo sapiens
gtgtgcttcaccaggcatgagcccattggtgtctgtggggccatcactccagccacagaaacactattcagaatgggtgtagcaagaggaaccatcacaa

SEQ ID NO: 862973 - DNA, 100 bp, Homo sapiens
ctccatttcttccacctcctccgactgtcagcactgctccacctctgattccaccaccgggctccttcctcagagaagcttcctgttatgtaccttatgg

SEQ ID NO: 862974 - DNA, 98 bp, Homo sapiens
tgtacttgtattgagtcagcacaaatttgcaaggtcattcttaactgttcagccctaccttgccttctccacttgttgagcagtcccaaggagtcaat

SEQ ID NO: 862975 - DNA, 98 bp, Homo sapiens
ggccgccgggggcctgctgcgcccggtgggtaattccagaattgattggccataccattgtcactgtattactgctcatgtcattgcactggttcatc

SEQ ID NO: 862976 - DNA, 100 bp, Homo sapiens
aagaccatgctggcaagtctgaaggtcaaggcacagtcttttgctgagcgcctgcgcctgggaattgcagtgattcatggagaggcgcaggatgccgagt

SEQ ID NO: 862977 - DNA, 98 bp, Homo sapiens
caggtggtcaggtggaacccatgcctggagcctcaccgcttcaatgacacagaggaattgaatgatctggcacgggaccctccagcacagtgttcagc

SEQ ID NO: 862978 - DNA, 98 bp, Homo sapiens
gatgtatctaaacttggcaccaagtatgctggatgctagtgattccagttctagcagcaatctttcacttgctaaggttaggccgagcagtgatctca

SEQ ID NO: 862979 - DNA, 98 bp, Homo sapiens
tccggccgcctggctccccatactagtcgccggagacggtggctcagggagtaaaggaaggccagttgagcaaacagaagtgttcctctgcatttcaa

SEQ ID NO: 862980 - DNA, 99 bp, Homo sapiens
gtccatcttctttgaatctatgccctacaaggggcccatcctgatggagctgcagacttaccgttaccacggacacagtatgagtgaccctggagtcag

SEQ ID NO: 862981 - DNA, 100 bp, Homo sapiens
aggacctgcttccaatcttttacaaagcatgggagtgcagctgcctgacaacaccgatcacagaccaacaaaccaagatcactccatggatgaaatgaca

SEQ ID NO: 862982 - DNA, 98 bp, Homo sapiens
cagaaggagaagcctgacattcctcccgcagtccctgccaaagatctctactaagaatgtcactctggccgggcgcagtggctcactcctgtaatccc

SEQ ID NO: 862983 - DNA, 100 bp, Homo sapiens
cacaaacggcgcacattggtatgatgtggaaggaagtgcattttcagctgagcacctcaaacttcaactccagaaggaatccctaaatgagctgaggaag

SEQ ID NO: 862984 - DNA, 98 bp, Homo sapiens
ggcaaacgcctggatcagccacaaatgtacccccagtacacttactactatcctcattatctccaaaccaaggaacaagactgccaatggagactgcc

SEQ ID NO: 862985 - DNA, 98 bp, Homo sapiens
ccactcaagaatcgtaggccaggctgatggagagctgaacattactcttccagaagagtttaaggaagaaatctctaaacgttttaaatcacatactg

SEQ ID NO: 862986 - DNA, 100 bp, Homo sapiens
tggtgatgcaagaagtttctaggaaaggccggacaccaggaaactactttgcttcgcactttttcatgggaggagagaaattcgacaccccccaccctga

SEQ ID NO: 862987 - DNA, 99 bp, Homo sapiens
ctggctaaaggagcagaggaaatggagacggtcatccctgtagatgtcatgaggcgagctggggctttctgtctctggtcgtgatgagaacagtgtgga

SEQ ID NO: 862988 - DNA, 100 bp, Homo sapiens
gtgaaggcaatgatttataccatgaaatgattgaatctggtgttatcaacttaaaagatgccacctctaaggtattgatgaagatgaagtggcagcagag

SEQ ID NO: 862989 - DNA, 99 bp, Homo sapiens
gagactcagaatcgaatctcttctccctccccttcttggtatcctgtggtctgaggccatcttcctcgaggcaaggccccagaggaggaccaagagcgt

SEQ ID NO: 862990 - DNA, 100 bp, Homo sapiens
gcggagctgacggtggaggttcgcggctctaacggggctttctacaagggcaagaggattatgacagattacgaccgctgagttatccacaaacagatgt

SEQ ID NO: 862991 - DNA, 98 bp, Homo sapiens
tgaatcctgcggcagaagccgagttcaacatcctcctggccaccgactcctacaagttccgatgaagttaaattccgtcaagatttaatgaatattgc

SEQ ID NO: 862992 - DNA, 98 bp, Homo sapiens
aaattggagagactgccatgaagcaacagggagaaggttttaaggtgaaaacgaagaaagaaatccggcatgtggaaaagaagagccactcgtaacag

SEQ ID NO: 862993 - DNA, 100 bp, Homo sapiens
caaagacctgacgggagaggtggaggctattcaagatctctggcagtggaggaagtctctttaagaaaatagtttaaacaatttgttaaaaaattttccg

SEQ ID NO: 862994 - DNA, 100 bp, Homo sapiens
cctcccgccgcttagcctgatgctggaaggacgaaggggctgatggaactccacatggtattgccagcacctgatactgatgagaagaatggcctgaacc

SEQ ID NO: 862995 - DNA, 98 bp, Homo sapiens
tgcacttaaacagaaaatggaaggtggaattgaagaattcaaacctcctgagatttctgacttacacaagagcctagaacagaaagaaagtaaaatcc

SEQ ID NO: 862996 - DNA, 98 bp, Homo sapiens
gtcacggatcggattcctcagctacgaggaggcgctgaggagagaccccatatcatgtgaacctcctcctggctggctatgatgagcatgaagggcca

SEQ ID NO: 862997 - DNA, 100 bp, Homo sapiens
ctctgactccacctttacttttacctacgttggcggccccagaagtgctgaagctgctgaaagatggcagaagaagtggtggtagtagccaaatttgatt

SEQ ID NO: 862998 - DNA, 100 bp, Homo sapiens
gacttgtttcttatatgtgatgccattccagcactggactcatggaggctgagcatttattcagcttgcgcgatctctggcctcttcaactgcatcacca

SEQ ID NO: 862999 - DNA, 99 bp, Homo sapiens
gaaatgttatgcagctcagcaaggtgaaggactaccgaccagactcccggaaatcatgttggtaggatcccagtctttttcgcctggagggcccaatgg

SEQ ID NO: 863000 - DNA, 98 bp, Homo sapiens
ccgagagcgcgaatatcgtcatcgttagaaggaagaggatcacctagcccgggtagaagaggcaatcacccgtatgcttgtgtgtgccctgaaaactg

SEQ ID NO: 863001 - DNA, 100 bp, Homo sapiens
gcatgtgtcttccccagctctgcagccacatactatccgtttgttcaggaaccaccagtgacagactctgagagagaccgaactctgcaggtggaactgg

SEQ ID NO: 863002 - DNA, 98 bp, Homo sapiens
ttgatccccggccgcggggccaggaagtcggagtttgagccccggaggcagagcggctgccatggtatatgagtagaccagtgatgagtggcccagga

SEQ ID NO: 863003 - DNA, 100 bp, Homo sapiens
cagttcgcccgtccccctgccccgttcacaatggcgagtgaacgtgaaaaatgaagaaattgatgaaatgatcaaggaggctccgggtccaattaacttt

SEQ ID NO: 863004 - DNA, 100 bp, Homo sapiens
tgcccggcctggcgcccgtcaacttctgcgacgaagaaaaaaagagcgacgagtgcaagtatcaccttttgccatgatagcatttctttcattggacagt

SEQ ID NO: 863005 - DNA, 99 bp, Homo sapiens
ggcagcagcggcagcgaggcggcgccgcaggatgattcttcagaggaggcccctccagccactcagaacttcatcattccaaaaaaggagatccacaca

SEQ ID NO: 863006 - DNA, 100 bp, Homo sapiens
caccagctccgaaatcaccaccaagctgcatcttcctcccgtgaggctggccgagctccacgctgatctgaagatacaggagagggacgaactcgcctgg

SEQ ID NO: 863007 - DNA, 98 bp, Homo sapiens
caaaattgagtcctacgctgctgtgaatcacatatcccaactgtcagaggagcagtttaaactcatatcccaggcatatgaagtgctttcagatccaa

SEQ ID NO: 863008 - DNA, 105 bp, Homo sapiens
aaagttagcagattgtgaacagttccagatgccggatctgtgtgctgaagagatcgctattattcttggaatctggtttaatagactacaacttccactgtttcc

SEQ ID NO: 863009 - DNA, 100 bp, Homo sapiens
ttctacctcacggtcaagagagcgaactgcagcctggagctacccccggccagcggtccggccaaggacgctgaggctgaccggttccctgatgtgttac

SEQ ID NO: 863010 - DNA, 99 bp, Homo sapiens
agaaagacagtctccatttcatggcaaccatgcagctattaaccagtgtcaggaatggaagttggatacactttgtgacttgtacgagacactgaccat

SEQ ID NO: 863011 - DNA, 101 bp, Homo sapiens
gtgccagggaagctcggatctgccttgctctgggaggggaaatgctagtgagtcggaggaagaccgcagcgccggcagtgtggagagcccgtccgtctcca

SEQ ID NO: 863012 - DNA, 98 bp, Homo sapiens
caaataaaccagctgaacttataggccgctttgaagaggaatttatcaaaatgcgcatggagagacttcaggcctggatgaccaggatgtgtcgccat

SEQ ID NO: 863013 - DNA, 98 bp, Homo sapiens
cacaaagagcacatttttttgcagacaccttcactgcctggtgtaactcccacctaaggaaagccggcacccagattgagaacatcgaggaagacttc

SEQ ID NO: 863014 - DNA, 100 bp, Homo sapiens
ttgaaaatggacgagtaatcgcctgctttgattcattgaaaattcgcttcaagctcagcttatcaatatgggtgttattcctaccttagtgaaattactg

SEQ ID NO: 863015 - DNA, 98 bp, Homo sapiens
aagtcccccaaagatgagatttacctgtgagatgtttcatcccaacactcaaatctaatccaagtgaaaatgaagaaaaggaagcacagtctcaactt

SEQ ID NO: 863016 - DNA, 100 bp, Homo sapiens
aaaagccaacctggccctgaagaactacagtgtggaatatacagatgttgccacaggaatctaatctgaaatcgtacaaatggaaatgacgctacaggag

SEQ ID NO: 863017 - DNA, 100 bp, Homo sapiens
gcattgatgaaattaaagatgcatgctgatggcgataagtcattaccacaggtagttggcaaaaaaggagaaagccactaaggtacaaaagacactggac

SEQ ID NO: 863018 - DNA, 98 bp, Homo sapiens
cgtctgcggaagtgcagctgcctcagttcttagcgcaggacatttttattccttccccaagtctggaagaacaatcaaatgatgggaagaaagatgga

SEQ ID NO: 863019 - DNA, 100 bp, Homo sapiens
atcgaccgcaccatcggcaagggcaacttcgcggtggtcaagcgggccacgcacctcgtcaccaaggccaagtcgtttccacttgttccatgtgacacag

SEQ ID NO: 863020 - DNA, 101 bp, Homo sapiens
ccgcttgggcgcccggacggcgaatggagcaggggcgcgcagaaagcaagggcggaccatggtttgattccagatgtgaagttagaaaaaacagtcccccg

SEQ ID NO: 863021 - DNA, 100 bp, Homo sapiens
tacaggcctccaggaatggctaaaaatgtttcagcaacttgagttggtggaaccaagtggctggattcatgttcccttaactgacaatcataagaagcca

SEQ ID NO: 863022 - DNA, 51 bp, Homo sapiens
cttcttcgctccctagcttagaagagaatagcattgaagaacttgatggtg

SEQ ID NO: 863023 - DNA, 100 bp, Homo sapiens
gaagatggcggatctggaggagcagttgtctgatgaagagaaggaagaccccaggactgatgtcaaggcatacgatgtgacacggatggtgtccatgccc

SEQ ID NO: 863024 - DNA, 100 bp, Homo sapiens
tgacagaggaagaagtagagatgctggtggcagggcatgaggacagcaatggttgtatcaactatgaaggaggctggtggcatgttgtcctcaatctcga

SEQ ID NO: 863025 - DNA, 104 bp, Homo sapiens
agtggaagttttggaactgtctatctggtttcagacaagaaagccaaacgaggagaggaatttgctgaagctgctgaaagatggcagaagaagtggtggtagta

SEQ ID NO: 863026 - DNA, 99 bp, Homo sapiens
tgctgttggaatatctggagccatccaacatttagctgggatgaaagacagcaaggaacagcatatgccatatatgagctggctgtggcttcatttccc

SEQ ID NO: 863027 - DNA, 100 bp, Homo sapiens
gccagcggcactggctccgccgcccaaggttgaatgcctttgagaacttgatgcataaaatttgcatgactcctcactcctttctggatctctcattgga

SEQ ID NO: 863028 - DNA, 99 bp, Homo sapiens
agcgcgagccacctccctccctccctccgccatggatcccagcaactggagcagcttcatcttccagtgaccaaagacttgaccactcaaagtccagct

SEQ ID NO: 863029 - DNA, 100 bp, Homo sapiens
gcgccacttccgcaaacaggtgcagggggaaatttgcagtggtgagaaaatgtataaagaaagattctgggaaagaatttgctgcaaagttcatgagaaa

SEQ ID NO: 863030 - DNA, 99 bp, Homo sapiens
ctgcggcatctccctgtacaaggacagcaacccctttgatgccactgcagggtatcgtagtctgacctatgaagaggttctacaggagctggtgaaaca

SEQ ID NO: 863031 - DNA, 98 bp, Homo sapiens
cgaaggattttgcaacaaattcgagctgtccgactctgagaatggaaacccttttccaaagagaaatgaagaagaaaactgtatgtaccctaaatatg

SEQ ID NO: 863032 - DNA, 100 bp, Homo sapiens
aatactttctactcgaacaaagagatctttctgagagagctcatttcaaattcatcagatcaaccatgtccaagggacctgcagttggtattgatcttgg

SEQ ID NO: 863033 - DNA, 100 bp, Homo sapiens
attccttttcgaccttcaatccagttccaaggactccacgggcgaaatttgacacacatgcaagatgaagtaaatgtgaagtcacatcagagggagcatc

SEQ ID NO: 863034 - DNA, 100 bp, Homo sapiens
gcaaacccgtcacacagaccaaggccacttcttgcaaaccacatacacagcacaaagaatgtcagacaggtataattgaaatcctcaaaggaatgcaaga

SEQ ID NO: 863035 - DNA, 100 bp, Homo sapiens
ctgtgtgctcggtacgatgaaaacctgatcacagatctctatagctatgacagagactccactttcaatgtgtttgtgggaaaaggacagctgatcacag

SEQ ID NO: 863036 - DNA, 100 bp, Homo sapiens
ggagaaaatggatttaaaaacaagtagagaattatgtagccgtttaggcgcatcccggggaaatggtgggggctctggctgcgcagtcccttggagaacc

SEQ ID NO: 863037 - DNA, 99 bp, Homo sapiens
gaaaacggcaatggattaataacaagaaattaatggtgaagtggtgacgaaaattctacattgcttagaaagcaattgaagactgggatagtttccaag

SEQ ID NO: 863038 - DNA, 100 bp, Homo sapiens
gctcagaggggagtcatcatgagcgatgttaccattgtgaaagaaggttgggttcagaagagggttaaagccttccatctgaagtatgatgaagttcgtc

SEQ ID NO: 863039 - DNA, 100 bp, Homo sapiens
aagaggccttggtccaacacaaattgcctccttatgtctccaacatggaccgcctgggggactcggaactggactttgaacatgtcggggatcgccctca

SEQ ID NO: 863040 - DNA, 100 bp, Homo sapiens
ctcggatgctggcgcggtggaagggattactcagcaggagatactcggtgtagagacaaggcctattatgcaatactcctcaacaggggccgtctggaag

SEQ ID NO: 863041 - DNA, 100 bp, Homo sapiens
ccacctatgatctcaggtcctcagaccaaccagcccaaggaacatcttgccaatttcaaatcggtctgaccagtgcacaggacttcagggcttcctggtg

SEQ ID NO: 863042 - DNA, 98 bp, Homo sapiens
aagaaattcaagtgtcctgagtgcacagccatagatgggctttcactagaccaaacacacatggtggagaggtatctagaagagcagaagacagagaa

SEQ ID NO: 863043 - DNA, 98 bp, Homo sapiens
ttcaagcttaggaccacccaccatgcctatccaggtacaatgccagggagtactacgaccacctgcccgagctgaagcaggccgtggaccagatcagc

SEQ ID NO: 863044 - DNA, 98 bp, Homo sapiens
tatatgagtcctgaggctctgaaacaccaaggctatgacacaaagtcggacatctggtgttgctgcctatgttggctggcaaagctcctcaattctca

SEQ ID NO: 863045 - DNA, 100 bp, Homo sapiens
ggagatccagccaccattcaagcccaaagtggttgaaatcacaaagattagacacctttttagataggtgttcttcagcaccactgacaacacggttctg

SEQ ID NO: 863046 - DNA, 100 bp, Homo sapiens
ccatttgccttggtttagctggaaaacctgctttcatgggacgagcagataagatgaccttgcagcaggtctatgccagtgtgaacaaaattaaaaatct

SEQ ID NO: 863047 - DNA, 100 bp, Homo sapiens
tttacctgatgacgtcccaccaggtgccagctgacgaggtatgcgggtgcccccttgtacgtgatgtctttgagctcacgggtgacttctgccgcctgcc

SEQ ID NO: 863048 - DNA, 100 bp, Homo sapiens
gctcagtgaaagatagaacacagcaaggctttcctacagtaaaggtctgccatcatggatgttctcgcagaagcaaatggcacctttgccttaaaccttt

SEQ ID NO: 863049 - DNA, 100 bp, Homo sapiens
gcccgagtggatcggggacggagagaacacgagcccatcagttcgatcctttggtacagaagacagaccgacagatcgtccaataccacctcgagatgaa

SEQ ID NO: 863050 - DNA, 99 bp, Homo sapiens
aaggacacagcagaggacagcagcactgctgacagatgggacgacgaagactggggcagcctggagcttctccaggcagccaccaactaccacaacggg

SEQ ID NO: 863051 - DNA, 100 bp, Homo sapiens
ctacccgctctttgccgtgacaacaccgttcccccagccgggctgattcaagtccagcatccagcggccaagtccatgatcgaaattagccggacccagg

SEQ ID NO: 863052 - DNA, 98 bp, Homo sapiens
aggcctgcgtccgagtctccgccgctgcgggcccgctccgacgcggaaggtggggaccaaggcatactgaacacattttttagcagctgggcaacaac

SEQ ID NO: 863053 - DNA, 100 bp, Homo sapiens
tcaatgccgctgccctgcgcttctcccagctgcaggttttaacttctagtcatggcgaatgatcgcaggagagcacagactggaccctgctacgatctct

SEQ ID NO: 863054 - DNA, 100 bp, Homo sapiens
aagaatcgctctacagccagcattcaggtcatggaaaatggaagatttgcaaaatacaaatattttacccatgtcatgatcaataagacagatatgctaa

SEQ ID NO: 863055 - DNA, 98 bp, Homo sapiens
gtagcccccccagtcagtggagacttaaccaaagagatacaaggcagatccaaccatccccaccgtggtcctacgatcagtcctaccaatacctggga

SEQ ID NO: 863056 - DNA, 99 bp, Homo sapiens
ggcacccagcctcctggacagaaataaaactggttcaaaagaatgctgaaccgggagctgacacacctctcagagatgagccgatcagggaaccaggtg

SEQ ID NO: 863057 - DNA, 98 bp, Homo sapiens
tgaacttaatacagcaagaaagaccatcaagtttaccaatgctattaactgagtacttggatatgaaaaatactcgtacggcctctgaaccatcagct

SEQ ID NO: 863058 - DNA, 100 bp, Homo sapiens
gcaagcccagacaatgccggtggaggaatttgtggctggctggatctctgggtaaagcccacagcttgaagccaagcataaaggagaagctggcaggcag

SEQ ID NO: 863059 - DNA, 100 bp, Homo sapiens
tgctattagttctctcacctatttgccaagaatcaaagaatatctggatcaactaaagaatggttgagaccggtgatgagaaaagagaagcaagtgttag

SEQ ID NO: 863060 - DNA, 98 bp, Homo sapiens
ccggtgaagaagtcgaaaatggagcacgtccaggctgaccacgagcttttcctccaggcctttgagaagaacgccagatcaagtgtcccaagtgtgat

SEQ ID NO: 863061 - DNA, 99 bp, Homo sapiens
gtttcctccaggacagcacctagtcgtggccggaggagtctcagagctgtcagaaagctttaatgaagcaccagttgagattcccagtccttctgaaac

SEQ ID NO: 863062 - DNA, 99 bp, Homo sapiens
tggcggacctgcggggctaagctggcacgtcacttccgactagtggagtttttagccttttaacattcaaggattagcttcggggagttttgcctggct

SEQ ID NO: 863063 - DNA, 98 bp, Homo sapiens
ggcagcgccatggcggagcagacctactcgtggacccagccgccgcctccatctctgacggagactgtgacgcccgggagggtgagtcagtagccatg

SEQ ID NO: 863064 - DNA, 100 bp, Homo sapiens
ctcaatcgttgctgaatcctttcatatcctaataggaattaacctccaaataaaacatgactggtggagccgccaccaaaatgcagattttcgtgaaaac

SEQ ID NO: 863065 - DNA, 100 bp, Homo sapiens
ctcatcttcattcccatcggcattggcatttttgtcacctccaacaacatccgcgagatcgagaaccgccaagacccattgctcctcctcagcttcttgg

SEQ ID NO: 863066 - DNA, 99 bp, Homo sapiens
tacaacacagacaccaaataaaatagccatctcacctttgaaatcgccaaataaggctaacagagaccctgatgctggaattgatgaagctcaagttga

SEQ ID NO: 863067 - DNA, 99 bp, Homo sapiens
atggactccctggctgctggagagttgaatgccagccaccagccatggattcttggatctcccagtcagcttcatttccccgtaatcagaaacaaccag

SEQ ID NO: 863068 - DNA, 116 bp, Homo sapiens
aatgcctgagcgggacatggactcaacagatctgtctgcctgcaatctacaagttgttgggcaacaattctagaagagttccaattctcatcaggagaatggacaaggtggagaag

SEQ ID NO: 863069 - DNA, 100 bp, Homo sapiens
tccagaatgcacagatgtctgaggacaaccacctgagcaatactgtacgtagccagctggcagagatggaggaggagctacgttatgcacccctgtcttt

SEQ ID NO: 863070 - DNA, 100 bp, Homo sapiens
gccgcagggctattgcttatgccactcacagagacagctattctggaggcgttgtcaatagggaggatactgaggcacacagaggggagtcaccagccag

SEQ ID NO: 863071 - DNA, 100 bp, Homo sapiens
gccagtcagcagtttttgaactccatcaaaaagggggttagtcagcaacataaaatcaacctaatgacagcagacaacttatccatctgtttttggccaa

SEQ ID NO: 863072 - DNA, 100 bp, Homo sapiens
cctccggaatctaaaaagccctcagtaccagagacagaagcagatggattcgtccttttaggttgtttgatgtgtgcacagtgtcacgaacagacagaga

SEQ ID NO: 863073 - DNA, 98 bp, Homo sapiens
cgctgagaagcacctggatattcctaaaatgttggatgctgaagctgaagtctgggatcaagagtttgaccccgtcatggtcattcttcgaacagttt

SEQ ID NO: 863074 - DNA, 132 bp, Homo sapiens
tcaaaaacactatcccagggagtgcaagcttagagcgtctggccaagaatcagaggaagtgggtcacagtgctgtcgatatcaccaaggtggctagaagacatcgcatgtctccttttcctctgacatctat

SEQ ID NO: 863075 - DNA, 98 bp, Homo sapiens
gagtcctgcatgccaaaatcattgcagctataacattgatgggtcctcagtggtggttgaaaactgtaattgaacagatatgaagcaacagcatgtca

SEQ ID NO: 863076 - DNA, 100 bp, Homo sapiens
gaactggcttcgggaattttaccagaaatttcagctagaaagggttaatctgcaggaagtgaaacggtcaacttatgatcatacaaggaaatgtacagac

SEQ ID NO: 863077 - DNA, 98 bp, Homo sapiens
gctccctttttggaatgggctacaccccagattacatagtgtatcacgagttggtcatgaccaccaagattatgtttgagaccttcaacaccccggcc

SEQ ID NO: 863078 - DNA, 99 bp, Homo sapiens
cttcatctaccatggctcagccgggaactctgaacctcaataacgagcctatttgatggctttgcagatggactaggagttgctgaagctatttcatat

SEQ ID NO: 863079 - DNA, 99 bp, Homo sapiens
gaacctctacttccccaccaaaaagtggcacacactggagagatatcattgtattccctgaatgactataaaccacccatttcgaaagcgaaaatgacc

SEQ ID NO: 863080 - DNA, 100 bp, Homo sapiens
ccaggcctgggccccgggtccccaagacccttgtgctcgttgtcgccgcggtcctgctgttgctccctggggacaaagagtttgtatcatggcagcagga

SEQ ID NO: 863081 - DNA, 111 bp, Homo sapiens
cctttggcctcacgctcacctggctttacttctggtgggaagtccacaatgactatgatgaattcaactggtggaaactaattctaagccagactgctggagatcaccctg

SEQ ID NO: 863082 - DNA, 100 bp, Homo sapiens
cctggaactgctgctgcctgtcatcattgactgctggattgacaatatcagagtgcctggtgaagaatgtgatgggatcactagcatgtctgcggagagc

SEQ ID NO: 863083 - DNA, 129 bp, Homo sapiens
gtccgttgcctcaaaccagtcagagatggagttctcttcacttcaggacatggctgaagagattctgcagacatacttgaaatccaaggagtctgtgaccgatgcaattctacagacagaccagattct

SEQ ID NO: 863084 - DNA, 100 bp, Homo sapiens
ctacgaggaggtgcgcgagaagtacaaagccctgggcgctgcctatggcacagccaagagcggtaccggcattgcggccatgtctgtcatgcggccggag

SEQ ID NO: 863085 - DNA, 99 bp, Homo sapiens
cgggacccggttccccggcccacagtgggggtgtgcaaacccgagagaactgggctgagtcatcactagagagtgggaagggcagcagcagcagagaat

SEQ ID NO: 863086 - DNA, 100 bp, Homo sapiens
caaggtgtcggtgttccacgtgaagctcaccgacagtgccctgagggccttcgagagctaccgcgccagacaggcccagctgagagccagcctggaggtt

SEQ ID NO: 863087 - DNA, 140 bp, Homo sapiens
acttcatcacccctctcttccaaatcctgtagccataaatgtctggctaatggcatttacaggaggtgttcatcagtaatgggtcattaagtgatgttgtgattgtagttgcggtcacaaatcatgaagctccctcccct

SEQ ID NO: 863088 - DNA, 100 bp, Homo sapiens
tggtaaagttggatttattacaccagtgtcaagtagatttactgcagagtgagcatgtttttgaacacattaacaccgaagttctacgtggccctaacag

SEQ ID NO: 863089 - DNA, 100 bp, Homo sapiens
cagattgtcccccggccttcttcccgctggccgccatctgctgcagactggagcctgagagcaggtatgacttgctcttcatgccaccgtcctttccatt

SEQ ID NO: 863090 - DNA, 100 bp, Homo sapiens
caacagactggacttctcaactgccattctggattccagaagatttaactacgtggtccgggtaaaataccatgaagattttgaaaaaacaaaggggaga

SEQ ID NO: 863091 - DNA, 98 bp, Homo sapiens
gccagctcagcgtgcccatcccggggggcagcaacggcgacatccagcaagcaataccaagtttccaggcccgaagagcatcccagactattgggact

SEQ ID NO: 863092 - DNA, 100 bp, Homo sapiens
gccggaccggggcgggtccagtcccgggcgggccgtcgcgggagagatgcttttactgactctgctatcagtgctaaagtgaatggcgaacacaaagaga

SEQ ID NO: 863093 - DNA, 100 bp, Homo sapiens
cagggaggaagatgtcgtaatgagcggatgaccagtgtcccagtgaaggaacgagtgaaggtgtctcagaactggagactggggcgctgccgagagggga

SEQ ID NO: 863094 - DNA, 100 bp, Homo sapiens
aggctccactgcaacatcacgatacactctgtgcagttttagagagagacacactcagtattcgagaaagtcgactttttggagctgttgtacgctgggc

SEQ ID NO: 863095 - DNA, 104 bp, Homo sapiens
aaaaagcagggaggttatgaggcttaataaagaaggtccccaaagccggcacgctcagttaccaccagcaacccttccaaattcactgcgaagtttggagagtc

SEQ ID NO: 863096 - DNA, 98 bp, Homo sapiens
ggcggccaaggacctggccgacatcgcggccttcttccgatccgaaattatggatccggatgagcaattggaaacccttcatgaagcactgaaactac

SEQ ID NO: 863097 - DNA, 98 bp, Homo sapiens
ggacctctgccactctcaccgtgaaggatcatgtttcactccttcggcaacaagcaagggccccagcacgggatgctgatcaatactccctacgtcac

SEQ ID NO: 863098 - DNA, 100 bp, Homo sapiens
agcctggaagcttgacgcgcacctgtgcaagcacacgggggaggtgcagattcactttataggaacagcttcagcttcagtgatgaaaaactgaattctc

SEQ ID NO: 863099 - DNA, 100 bp, Homo sapiens
catttgttcagaacagccagccagtggcagtgcgaggtggaggaggcaaacaagtgtaatcgtttatacatacccacagcctcaagtactacagccttcc

SEQ ID NO: 863100 - DNA, 98 bp, Homo sapiens
tttgctctgcaacctcaccagacatctatatgtgtcacaaagatgtctacacggaactgccagggaatggactcagtgatcaaacccctggacacaat

SEQ ID NO: 863101 - DNA, 98 bp, Homo sapiens
ggagagaaatgctgacaccctccctgatcaagaggaactcattcagagtgctacagaaacaataggtacacagcttctcctagcatgacttcgatctg

SEQ ID NO: 863102 - DNA, 100 bp, Homo sapiens
cgcaacgccaccagcgtggacagcggcgctcccggcggggcggccccggggggacccggcttccgcgcctctggatggctggatccatgagaagatgctg

SEQ ID NO: 863103 - DNA, 120 bp, Homo sapiens
agggaggacctggtccagcttcccttcctcaaataaggaaattgacacctggcgtgttgtctgatatctctccaattggacgggatccctctgagtccagtttcagcagtgccaccctca

SEQ ID NO: 863104 - DNA, 100 bp, Homo sapiens
gcaagctctcgagagtctcacggagacgcagatcccagccatcatgtccatagagaagatctgggcccgggagatcctggactcccgcgggaaccccaca

SEQ ID NO: 863105 - DNA, 100 bp, Homo sapiens
agatgatgagaaataaggacaaaagccaagaggaggacagttcgctacacagcaatgcatcgagccttttcaggagccaaaaaaacaaatacaaacaaac

SEQ ID NO: 863106 - DNA, 98 bp, Homo sapiens
cagattgtcaacagtggttgatgcagatgaaatcattgtcttggatcagattcttgtagacactgtttgggctctgtcatacttgacagatggaggta

SEQ ID NO: 863107 - DNA, 100 bp, Homo sapiens
taccccacgcctggccacgttcaccgtgggcagctgcagctggtggaggtacctaaaacagatccaggacctgcccccaactggcctccctgagatgaac

SEQ ID NO: 863108 - DNA, 140 bp, Homo sapiens
tgttgttgactaagctgaaggaaactgctgaaaacagcctcaagaaaccagtaacagattgtgttatttcagtttcctatcctgggagcaggagagtgtgcctatttgaatgacaaaggtgccagtagtgccaggcacta

SEQ ID NO: 863109 - DNA, 98 bp, Homo sapiens
aaaaccggagaagagaaactaaaaggacagtagaaaaggcttttccagtttgcataatgtgaatcagctcccggccgactttaggattcttctggatt

SEQ ID NO: 863110 - DNA, 100 bp, Homo sapiens
tcctgcctactacgtgctgccctgcgcccgcagccatgtgccgcaccctggccgccttccccaccacctgcctggagagactagacgcttgaagcaaagc

SEQ ID NO: 863111 - DNA, 98 bp, Homo sapiens
tgttgtctaccaagtgcagtttaaataattattcagagctgggagagcttcccccacgatctcctttagaaccagtttgtgaagatgggccctttggc

SEQ ID NO: 863112 - DNA, 100 bp, Homo sapiens
gaactggggcaacagcctgcagatcctggaccaggttgagctgcgcgcaggctcagtgctgatctgggacgatgcccgggagggcaaggactccaaggag

SEQ ID NO: 863113 - DNA, 100 bp, Homo sapiens
aagaatatgctgccaaaattatcaacaccaaaaagctttctgctagggagtaacagattccctggataccctttcagaaatttcttcaaataaacagaac

SEQ ID NO: 863114 - DNA, 100 bp, Homo sapiens
tctgacagaatcttctgacatcactgaatacagcccaacccaaggagtgagacaaccaggattggagttgctgttaatggggtccgcaagcactgctcag

SEQ ID NO: 863115 - DNA, 101 bp, Homo sapiens
aaggactgataggcgttggcctgataaatgtagaagatcgctcgggaattcttactctcgataaagactggggactccactgtgagaccacttacaccaag

SEQ ID NO: 863116 - DNA, 50 bp, Homo sapiens
aggaattcagcaacctggaagagctaaacctattcgtcccgggcaacatc

SEQ ID NO: 863117 - DNA, 100 bp, Homo sapiens
cagatttatcttttggatcacaaatagaattcagctgttcagaaggggaactctaatgatccaggacaaagaagttaccctggagtatgtatcaagcctg

SEQ ID NO: 863118 - DNA, 100 bp, Homo sapiens
caacatctgctacaatgtactggatcgaaatgtccatgagaaaaagcttggagataaagttgctttttactggtacaagcctcgagagaagctgaaggtg

SEQ ID NO: 863119 - DNA, 107 bp, Homo sapiens
cggaaagtggaaattacaacagagactattaaattgcaacaggattcagaaatcatggaaagcagacctctgctcttccaggcaagtgaacatgtagccagtagtcc

SEQ ID NO: 863120 - DNA, 100 bp, Homo sapiens
cagttggccttcatcgacttgagacaaccatcactggtgcaagctatatttaacggagatcctgatgaagttcgagcactaatatttaagaaagaagatg

SEQ ID NO: 863121 - DNA, 100 bp, Homo sapiens
gaatcaaagataaatccaaatactgcatatcagaaacaacagattctcagagagagttcaacagcaggccaggtacaggatacgtacctgtggagttttg

SEQ ID NO: 863122 - DNA, 99 bp, Homo sapiens
caacattcaggccaatggaccacaaattgctccgcccaatgccattctggaaaaggtcttcactgcaattacaaagaaaaagttggtgattcaaggaaa

SEQ ID NO: 863123 - DNA, 100 bp, Homo sapiens
agaaaatgatattgatgaagaaactatctccgggaagcagtttgttcgctatataaacatgttgataaacgacacgacgtttttgctcgatgaaagtctg

SEQ ID NO: 863124 - DNA, 100 bp, Homo sapiens
gctgatcgcctaacttctactgacgaagcttggaagttgcagaaggacctaatccggagagacatcctgtactacaaaggccgcattgacatggataaat

SEQ ID NO: 863125 - DNA, 98 bp, Homo sapiens
gcgagctacgtgcagttgctggagggtccaaattccaagcctgtagtgtccttcattgctggtttaactgctcctcctgggagaagaatgggtcatgc

SEQ ID NO: 863126 - DNA, 98 bp, Homo sapiens
ggaatctaaggagtggtttgtgcagctctattaccacgggaagctctgtggctgtgggctgctgggagtgggcatctggctctccgtgtcccaaggca

SEQ ID NO: 863127 - DNA, 98 bp, Homo sapiens
cagacccagcttatgctagctggaggacagataactgggctttcagtgaaaggttacaatgacaagcagccaattttactaaagaagattattgagaa

SEQ ID NO: 863128 - DNA, 99 bp, Homo sapiens
aaccagtcactcctactagtggagggggtccaatgtcaccccaggatgatgaagcagaagagggaagccctcctatgacactgaaacagatcctagtga

SEQ ID NO: 863129 - DNA, 110 bp, Homo sapiens
tctacatcctgcgggtgcctttgaaaatcaacgacaacttgagcacaggttatcctgaatacatgtctaacaattttccttgcaacgttagctgttgtttttcactgttt

SEQ ID NO: 863130 - DNA, 100 bp, Homo sapiens
tttcactgtttgcaactctcatgttctgtgcattgcaagtgtgccagggagaaaactggttgtcctggatgtttgaaaagttggtcgttgtcatggtgtg

SEQ ID NO: 863131 - DNA, 100 bp, Homo sapiens
aaggcaattgctcctgctgtaaggagtgcatgctgtgtcttggggccctttgggacgagtgctgtgactgtgttggggtcaggcccagccccaggcccag

SEQ ID NO: 863132 - DNA, 100 bp, Homo sapiens
tcagccccataactctggcaaaagctctcacaagcaaaagccttggagaggaggagaatgtatcaaggaccaagtggaccacttgctaaccctaaaggta

SEQ ID NO: 863133 - DNA, 100 bp, Homo sapiens
cctcgggatggcaccggttacactggctgggcaggccataaaattttgagtagaaaaatccagaaatttgaaaatcagtatcgtggtagagagctgccag

SEQ ID NO: 863134 - DNA, 99 bp, Homo sapiens
agcacctcatgcaagcgagggacctgggactgctcacagccagctctcttcaatctaattcccgtgggcctgcgtgtagtggccatccaaggagtgaag

SEQ ID NO: 863135 - DNA, 100 bp, Homo sapiens
agtgaagatatatcaagtgtgtgacatccctcagccccagggctcgatcattaacccaggtcgaagaattccatccactgacgccaacctgccatctggc

SEQ ID NO: 863136 - DNA, 99 bp, Homo sapiens
ttaatgtttacggcgaagtctactcaacgtttccaagatgccttcaattaagttgcagagttctgatggagagatatttgaagttgatgtggaaattgc

SEQ ID NO: 863137 - DNA, 100 bp, Homo sapiens
gatcgtcaggctctaaacaaaattctgagacgaggtctcactatattgaccaggctggtcttgaactcctggccttaagcgatcctcctgccttggcctc

SEQ ID NO: 863138 - DNA, 99 bp, Homo sapiens
gcctctccaccgtgcctgacctgctgctgccactgacttaattcagtgcacaaatgagatgaatgtgaacatcccacagttggcagacagtttatttga

SEQ ID NO: 863139 - DNA, 99 bp, Homo sapiens
gcgggaagatggcggcgccgctcatccccctctcccagcagggaaagcaggcaggatgggagagtcgccgatagaaccacctcttccctgcctcctggg

SEQ ID NO: 863140 - DNA, 100 bp, Homo sapiens
attgcttttggcgtggccatgccggcggccctcacagcaaccagcaccagatgaaggagcattcctcttgggaatgggtaccacagaccatgtcatcgtc

SEQ ID NO: 863141 - DNA, 100 bp, Homo sapiens
ctgaaaatcgtcgtgctgggggacggcgcctccgggaaggaggaagagttcatcgattggtggagcaaattctttgcctccataggggagagggaaaagt

SEQ ID NO: 863142 - DNA, 139 bp, Homo sapiens
agaacatgtttttctaagccctttttgtgccaggtgtcccgttaacgtctctgttagttcagagaaaatggacccaagtggggtcaaagtgctggaaacagcagaggacatccaggagaggcggcagcaggtcctagac

SEQ ID NO: 863143 - DNA, 100 bp, Homo sapiens
gaaaagaaaattaataggaggaagtctcaagaaacaaagtgtacaaagagagcacttcctaagaagagtcagaaacatgattcccgtgacagaattccgg

SEQ ID NO: 863144 - DNA, 106 bp, Homo sapiens
atgataaaacatttagaacgatgtgaacatcgaatcatggaatcccttgcatggctctcagtttggtgcacctcgatttggaggaagtagggcagggcccttatct

SEQ ID NO: 863145 - DNA, 105 bp, Homo sapiens
tgcacatccttcgaaaagctgccaagttgaaaatggacgagtaatcgcctgctttgattcattgaaaatgttcccaacactttgcttcccactactatcatcccc

SEQ ID NO: 863146 - DNA, 100 bp, Homo sapiens
catctccaagcaatgttcattttactccgcccagaagacaacatcaggctgcccattgcagatgcaaaggctcctgagaagcgggcctcaccatccaagc

SEQ ID NO: 863147 - DNA, 98 bp, Homo sapiens
ggttttaaaggctatggaatacagatagagcagggagggaaaagtaaagatgcaccttcatgggatcctgttgctctgaaactcccagagcggaatac

SEQ ID NO: 863148 - DNA, 137 bp, Homo sapiens
gcgccgccgctccgcccccggtcgggtgtgtggctgcgcgcgccgggagagatgctgaggaacttaagagatttgagaacttcataaaatctcgtcctccttttgatgttgtcattgatggtctcaatgttgccaaa

SEQ ID NO: 863149 - DNA, 99 bp, Homo sapiens
gctgttttggaactgtcaggtacctcaaagcgtcgttccaggggtagaggaggcatgaaggatgaccgtcgggacagatactctgcgggcaaaaggggt

SEQ ID NO: 863150 - DNA, 100 bp, Homo sapiens
aagcagctttcaactgcttcgcccaggcttcttctccagccgcctccactgtagggacatcgaacctcaaagagatgaggatgacatcaatgatgtgact

SEQ ID NO: 863151 - DNA, 100 bp, Homo sapiens
cccaacagcacggcgtggcctctcagcctcgatgcgagtgtctctctggcttatgtggtttccccgtgtgtgaggtgggatccactccccgcatagtctc

SEQ ID NO: 863152 - DNA, 99 bp, Homo sapiens
acatctgaaagccgggaaatgatgatgaataaggtatttggaggtactgtgcacaaaaaaagtgtcagagaagatggagttttcaacattagtgtggat

SEQ ID NO: 863153 - DNA, 100 bp, Homo sapiens
gaatacaaagaagctttgaaacactgtaagacctttccaaagtgaaactgatgagatttgatgatccactgttggggcctcgacgagttcctgtcctggg

SEQ ID NO: 863154 - DNA, 99 bp, Homo sapiens
ggaagtcctcacaccgggtcagctcttccttatgttcctgaaggaagctctatgcagaactgtgccaaggcatcgtggacatagccatttccagtgtct

SEQ ID NO: 863155 - DNA, 100 bp, Homo sapiens
ctcaagtgaagcaaaagccttccatgattacgtggcatggaatattcacatgggagagccgcatgaggccgcccaccacgcttcctgaaggatgcccgtg

SEQ ID NO: 863156 - DNA, 100 bp, Homo sapiens
cgagtggaggaagcaatacatccagtatgaggcactgctgggagacagtggcagccagaactggagcactggaacaacagataaatatgggcgtctggac

SEQ ID NO: 863157 - DNA, 99 bp, Homo sapiens
gtggataccgtcaagctggccaagcacaaagagcttgctccctacgatgagaactggttctacacgcgagctgctcctccaggaataggacgtcttcct

SEQ ID NO: 863158 - DNA, 98 bp, Homo sapiens
acgctgccccccgacgagatcttccgcaacctggagaacgccaagcgcttcgccatcgacataggtcaaaatgcagatcttcgtgaaaacccttaccg

SEQ ID NO: 863159 - DNA, 99 bp, Homo sapiens
tgctgagagaggagctgggaggagcactgcaaatttcactttggacacgtgagtcagagaactgataaatttcaaacggaagagagtggcagcatttag

SEQ ID NO: 863160 - DNA, 99 bp, Homo sapiens
cctttgcctgatcatgcagacatctccaactgtgggaactctttccagcttgtgtctgtgagaaagatcagtctaaagaaaaggagaagaaagtgaaaa

SEQ ID NO: 863161 - DNA, 100 bp, Homo sapiens
atgaaggatgtgagagaataaactgccaccattcaagtgtttcaagagaagcttaaaggtggatctccttacgtagcagccaaaataaatgaagcaaaag

SEQ ID NO: 863162 - DNA, 100 bp, Homo sapiens
gaagaacgggatcctctgctgcatagtttcggtcatctaaaggaggttttaaacagtataacagttttcatacagtctcggggttttaaaactttgaaat

SEQ ID NO: 863163 - DNA, 100 bp, Homo sapiens
tttgtggtaataacccttaccgggagtttcactgaagctcattgctatggacagtgctatcaccctgtggcagttccttcttcagctcctgcagaagcct

SEQ ID NO: 863164 - DNA, 99 bp, Homo sapiens
tcagacagatcgccggggaggcagcgcgggatcccagcctcaggcgtgcgcggacggtgtgcggatactagagtaaaaggatggtttcttctggacaat

SEQ ID NO: 863165 - DNA, 98 bp, Homo sapiens
gacgaccggatcctgaggaggcagctgcggtggcagctgctgagttctcggtgaaggcagtggcttgcaatccagaagttacgaagcaaaatccacaa

SEQ ID NO: 863166 - DNA, 100 bp, Homo sapiens
atgaagcagctggtggggctctactgcgacaaggcgcgggtttaagtggacgccaggtgcaccggacacaggctgtgtttaaccacaccgaggactatgt

SEQ ID NO: 863167 - DNA, 98 bp, Homo sapiens
accatggccgatgggggcgagggcgaagacgagatccagttcctgcgaactctgcagaaccttggcctgaaaatgctacattatatcagcaattgaaa

SEQ ID NO: 863168 - DNA, 98 bp, Homo sapiens
gggaaggagagtctgtgccgacaagatggcggacggggagctgaacgtggacagcctcatcacccggctgctggaggaccttcactgcctggtgtaac

SEQ ID NO: 863169 - DNA, 100 bp, Homo sapiens
ctggacacactgtctctctaccagggcctgctctccaacttccctgacatcatccatctacaaaaagggagaaagagagagcgcgaaagagagaggatgt

SEQ ID NO: 863170 - DNA, 100 bp, Homo sapiens
agactctgcggcgcatggaggaggaggagctctccctgtccagccgcctgcagctgaccctgtaccagtacaagacgtgtcccttctgcagcaaggtccg

SEQ ID NO: 863171 - DNA, 98 bp, Homo sapiens
caagcacatgttcgtacacacagttttgagtatccgaggagcccaggaggaggaacccacagacccccagctgatgcggctggacaacatgctgttag

SEQ ID NO: 863172 - DNA, 98 bp, Homo sapiens
ggtggcctcactgccctccatattgctacaatagctggccacctagagtgattcgcctttgccagtctcatctcgtgtctgctttgttaagttccatg

SEQ ID NO: 863173 - DNA, 99 bp, Homo sapiens
gggagcccctgctggacaatgagtccacacgaggggatgagcggatcatatggtaaaggaaccagtggaagacacagaccctagcactttatcctttaa

SEQ ID NO: 863174 - DNA, 130 bp, Homo sapiens
agaaatgttttgtttgactccagtgttaagagaagaaatgaggacatatcagtatcgacctcaaaggaagaccttctgcaggctgattttgaaggtgctttaaagttctttagagttcagcttccaaaga

SEQ ID NO: 863175 - DNA, 100 bp, Homo sapiens
caacgcttaaaacgatgaagatttctcgtttcgaaaggatgagctctctccggaacagcacaacctttctttatactccatggagctcgtgctgaagaaa

SEQ ID NO: 863176 - DNA, 100 bp, Homo sapiens
gatatgatctgtcctgaatgtggcttggttgtagcctcttctgaaacagtctccctggagcaaccatcagagcagtggctggggcactggaagtatgtcc

SEQ ID NO: 863177 - DNA, 100 bp, Homo sapiens
gctgcgcggccttcccatcaccatcacagagagcgattatctttttgaaaatggaagggtagatgacattttctccgatctttattatgttcggttcacg

SEQ ID NO: 863178 - DNA, 100 bp, Homo sapiens
agagaagttacagactctcctgggcgaccccgagagcttaccattcctcagacttcttcacatggtgctaacagatttctttggtgcaattcccatcgac

SEQ ID NO: 863179 - DNA, 100 bp, Homo sapiens
gaagatcctgggcagcctccagcagggacctgtgacagcttccaaacagtttcataatgaggtcctgaaggcccacaatgagtaccggcagaagcacggc

SEQ ID NO: 863180 - DNA, 50 bp, Homo sapiens
tccttctcctggagacgcaactcaagagacggggtctcactatgttgccc

SEQ ID NO: 863181 - DNA, 99 bp, Homo sapiens
tcatctggtttccagcgccaagacttctgcaggagagcctccgctgggctttcaagttgggtgcaaatagctatgggcaacttggcctcggccataagg

SEQ ID NO: 863182 - DNA, 95 bp, Homo sapiens
gcgcgtgtgcacctctcccggcgtgcgtgttcgggcatgcgcgctgccgccgcactgccctcgcttcctgcccggcccgggcccctcgggagcag

SEQ ID NO: 863183 - DNA, 98 bp, Homo sapiens
ggcggaacccgtgggcctgtggactgcagcctcggcggtcagcaggcatctgcatctgggaccgacctcctgggctggctgatcaaagaggaagcagc

SEQ ID NO: 863184 - DNA, 101 bp, Homo sapiens
tgggcttctgtcagcttgggaaagaaatcctggcttcccaaacccagctttcacagagcatttcactttccctgaaggtgctggagaatctggtaaaagca

SEQ ID NO: 863185 - DNA, 100 bp, Homo sapiens
cacagatgtccaagctgccaagtttcaccaaaactcatgccaatgcagcagatcgcaaattgaaatatggatatttgtaccaggctgcgtgtttttcatt

SEQ ID NO: 863186 - DNA, 100 bp, Homo sapiens
ggagagaataaaactccagcgagatccgggccgtgaacgaaagcagtgacggaggagcttgtaccaccgaaactgccagaggcatgcagcattggtgatg

SEQ ID NO: 863187 - DNA, 100 bp, Homo sapiens
gtgtgaactggcttcggatggcgtcccgcgtagacgcagtggcctccaaggtgcagacagctgtgactatgaaggggtgtccccagttgtcctcatccag

SEQ ID NO: 863188 - DNA, 98 bp, Homo sapiens
gtgttcccctggtttaactagcctgtttgctataaggaagaccagatggatgagaaactaatggaacctctgaaatatgctgaacaacttcctgtagc

SEQ ID NO: 863189 - DNA, 99 bp, Homo sapiens
ttgagtagcctgagtagctgggactaaagtgattcgcctttgccagtctcatctcgtgtctgctttgttaagttccatgatccagactcagcagttgtg

SEQ ID NO: 863190 - DNA, 98 bp, Homo sapiens
agtcctagagtggctgtttatttcccaagagcagccaaaaatcaccaagtcctgggtataagtgtgctagcggagtgtctagattgtcctgaattgaa

SEQ ID NO: 863191 - DNA, 100 bp, Homo sapiens
gtcggtggcggggctgaagaagcagttctacaaggcgagccagaaatgacatcagatgtaccatcactgggtccagccattgcctctggaaactctggac

SEQ ID NO: 863192 - DNA, 100 bp, Homo sapiens
cagaaatgcgttcttccattaaatgaggatagtccgttgatgtatcagccacaaaaaatggacttgactatgcactcagtcggatacgctaaaaatcaag

SEQ ID NO: 863193 - DNA, 98 bp, Homo sapiens
gacaagatcccgtccatgaatcaggacactcatgaggaccatgatacttccactgagaatacagacgagtccaaccatgaccctcagtttgagccaat

SEQ ID NO: 863194 - DNA, 98 bp, Homo sapiens
cacgcggcgatatggaagaggagggcaagaagggcaagaaggagccctctggcacaaatggaagaagaaagaagggagcaagtagctaaaattaagaa

SEQ ID NO: 863195 - DNA, 100 bp, Homo sapiens
ctgggtgccctgcccaacattgaattgacctcgccacgcatgttcacctatggtattggcatactccacacatctgtaccattcttgagtgatcgcttag

SEQ ID NO: 863196 - DNA, 98 bp, Homo sapiens
gtcccttggaacaggaggagtaagattgagtcggtggtggggagcggcagctggcagagagtcaacgcccagacggctgtgagatccccgagatatgc

SEQ ID NO: 863197 - DNA, 100 bp, Homo sapiens
atgaacacagcggccaatgagcaaacagaaccagaggagctacaggaaaatgaggcagaggggcaggctgctggtggtctacccttggacccagaggttc

SEQ ID NO: 863198 - DNA, 100 bp, Homo sapiens
gctgaagcagtgcctggtggccgaccttgtccacacagtccatgttgacctgacagttcaagaaaaggagaaatatcttaatgtgtctcgctggttttgt

SEQ ID NO: 863199 - DNA, 100 bp, Homo sapiens
ctccactgcctttaaccctcagcctcagagtcagatgcaggatgtgctggtggacggacagccatgtgaccgcgaggctgtggcggcctgccaggtgggc

SEQ ID NO: 863200 - DNA, 99 bp, Homo sapiens
gcacttgtgcgaacaaagcttttctgatatgatgggaaatacaaatgaaccaagcacacgtgtccgagaaattatggaagtggaaattacaatgatttt

SEQ ID NO: 863201 - DNA, 99 bp, Homo sapiens
ccagcacctttcggcttctgagacggcggcagcagcggcattcaggctatcgagactcatttgatccgcaagtctagcagcggactaacttatatcgca

SEQ ID NO: 863202 - DNA, 100 bp, Homo sapiens
aggccggagaaggccgccgggcccgggcatggtggtctggggcaacgcggaaggactcagcccaaaaccatgtttgcccaagttgaatctgatgatgagg

SEQ ID NO: 863203 - DNA, 99 bp, Homo sapiens
gcggagctcccccaagagccggaaaggcaatactgaacactgcgcagcttgcagaggtctcctggcagccctcattaggaattctgtctggccccgatc

SEQ ID NO: 863204 - DNA, 100 bp, Homo sapiens
atctgacagatgccagcgtagctgaatccagtaccaaaaacgtcaacaacagttttacgcttgttgcagatccttgtgccagcaacccttgtcaccatgg

SEQ ID NO: 863205 - DNA, 98 bp, Homo sapiens
aggttcttccaggttggaaagagaatatgctggagagctgtctcccacgtgcattttcccaaggctgaagccgacgtagcttctctgaacagacgcat

SEQ ID NO: 863206 - DNA, 99 bp, Homo sapiens
ttggatcttgctcagtctctgtcagaggaagatcccttgtgccctggtggaaccttcacgccatctatgaagtccaccaaggattatcctgatgaggtg

SEQ ID NO: 863207 - DNA, 98 bp, Homo sapiens
agacgatcattctgcaagcaggcaacctgaatacagactctcaaagatgaagacttttgtaaacgtgtatctttggctactgtggataaaacagttga

SEQ ID NO: 863208 - DNA, 100 bp, Homo sapiens
cggaaagaagtaccttcgccggtcaccggctcctgcaggcgtctcgctcgaaccgggatcatagtgaccacgagtgaggctgttctgcttcagctggtag

SEQ ID NO: 863209 - DNA, 98 bp, Homo sapiens
cacgctgaggccgaggcggagaaggggcttcctgagcgtcccagtacactgacagagatcatgaatcggttcagtggtgttatgacaacttcattaac

SEQ ID NO: 863210 - DNA, 156 bp, Homo sapiens
gcttctgcacttcaagaacacaagttgaatcactcagacctgaaaaacagtctgaaaccagtatccatcaatacttgatggagatctctgtgttgccaaggctggtctcgaactcctgccctcaagtgatcttcctattttggcctccagaaatgc

SEQ ID NO: 863211 - DNA, 99 bp, Homo sapiens
ccggacaagggcagcttcccgctggatcacttagcatgtacagaagcatattcccaatctgatgagcaatatgcttgccatcttggttgccagaatcag

SEQ ID NO: 863212 - DNA, 100 bp, Homo sapiens
ttctcgtcctaatctcaatcttactgtactggaaacgtcaccggaatcaggaccgaggtgaaagtctggttccaaaacaggcggatgaagtggaagaggg

SEQ ID NO: 863213 - DNA, 100 bp, Homo sapiens
ctgaatcagaaaagatgaaaatagagctgaaaaagactcatgctgctgagacagagatgacactggaaaagacactggcttcatgtcctattgaccgtaa

SEQ ID NO: 863214 - DNA, 98 bp, Homo sapiens
atttgggccaggggaccaagtcagagcatctgcccaaagttcagctatatgttctcctttcagccaagacctttcaccagtgcaggggatagaagatt

SEQ ID NO: 863215 - DNA, 98 bp, Homo sapiens
ccctcaaaagaagatgacagcccgcagagagttaacttctgtttacatggaactcagacatctgcaaatcatgctgtctccgttatgaggtacagcgc

SEQ ID NO: 863216 - DNA, 100 bp, Homo sapiens
gcttatccaacgccaaccaaagatttgcatcagccatctcttagtccagcaagtcctcatagccaggggctgatcccttatccaacatggttctaacctt

SEQ ID NO: 863217 - DNA, 98 bp, Homo sapiens
aggctattcaatatgaacttcagtcattgggggaatccaatgcacaaatggagatgagtatgatgtatgtgccatttgtttggatgagtatgaagatg

SEQ ID NO: 863218 - DNA, 100 bp, Homo sapiens
agcagattgccaacattgaccgtattacaaacactggatgtgtgtgagaagtggggagaaatgccaccactacaacccaaacatatgagggaagccgtta

SEQ ID NO: 863219 - DNA, 99 bp, Homo sapiens
agcaatcagcgagactccgtgggcgtaggaccctccgagccagtgtggtggaaaaggaagagagagctgaggcagacgatgtaagatctgctgttactt

SEQ ID NO: 863220 - DNA, 100 bp, Homo sapiens
agctcatcctgactttctcctatcgattacacccttttcaggagccaaaaaaacaaatacaaacaaacaaaaaaatacccagagaaaaaactttccttct

SEQ ID NO: 863221 - DNA, 100 bp, Homo sapiens
cattgcaccatgggaaagagagagaaggagtattgggaaagggtcgttgtggtgcatagacccagagtatagacaaaatctaattcaggctttgaaaaag

SEQ ID NO: 863222 - DNA, 99 bp, Homo sapiens
agtgagagagatgccatctacaaagaattctccttccacaattttaatcagtctcacagaaagttctccgctcccagacatgggtccctcggcttcctg

SEQ ID NO: 863223 - DNA, 100 bp, Homo sapiens
tgaaattaatataatctgtgacattgctacatcacatgtttttggctgaagattatacactattggatgttctctactatgttacacgtgatgacttaaa

SEQ ID NO: 863224 - DNA, 51 bp, Homo sapiens
gctgcggcggcccagctctctctgacacagaagaggcaattcggacataaa

SEQ ID NO: 863225 - DNA, 100 bp, Homo sapiens
gtgaagtatggcagtgtgatccagggactccctgctgctagagactggcttcctggccgtgctggtggccccgctgaggccagcctcccaccgcaaggag

SEQ ID NO: 863226 - DNA, 100 bp, Homo sapiens
cttcagtttgaggtacctcccataattttaaggggcctagaatatcctgcagtggtagagtttgctccattccagaagatagccaaaaagaagctgagaa

SEQ ID NO: 863227 - DNA, 100 bp, Homo sapiens
ccattggaaagatgttcgtgaactggtggtagctccgggaagcagtttgttcgctatataaacatgttgataaacgacacgacgtttttgctcgatgaaa

SEQ ID NO: 863228 - DNA, 74 bp, Homo sapiens
gacaccaagaagcagggaaatggaaaatcctgccttgcttcgttgggcctatgcaagaacaataaatgtctatc

SEQ ID NO: 863229 - DNA, 100 bp, Homo sapiens
gtcatgtgattcagcctaatatctcaatggggaaattgaggcagagaagccaagacatgtgctaaaggtcatgcaggctatgaatggagctggaatgtga

SEQ ID NO: 863230 - DNA, 100 bp, Homo sapiens
tggatccagggataaatcccaaacttcttaacccctagaccggtttttagtccattgactatgcagcctaatggcatgtgagcagcagtgacagagtggg

SEQ ID NO: 863231 - DNA, 98 bp, Homo sapiens
tgtggatactcatcctggttctggtaaagaagtgagggtaccagctactgccttgtgtgtcttcaccgagacatgggtgcccggcaccgcgcccgagc

SEQ ID NO: 863232 - DNA, 101 bp, Homo sapiens
atgatgaaaaagtacggcaagtcctttagaaaattactttcactgtgtcttcagaaagatccttccaaaaggctgttcacggaagaccaggatgtagatga

SEQ ID NO: 863233 - DNA, 120 bp, Homo sapiens
tctaccaaaaaataagaaacgttcacgacagaaaactgcagttcatgtgctaaacttttggtgcttaaatccagctgtgctctggaaaggaagagaaatggaagtgagaaagttgagcat

SEQ ID NO: 863234 - DNA, 99 bp, Homo sapiens
taccatgttccctccgaaggacccagaaaagctgcaggccatgcacctggagcgatggtgcttctggcccagtgtgtggtctactttgccagagcccca

SEQ ID NO: 863235 - DNA, 98 bp, Homo sapiens
actacaaacggaacttgccgcgtcgaggactgtcgggtaagaaccttgatgctgtccatgatatcactgtggcgtatcctcacaacattcctcaatca

SEQ ID NO: 863236 - DNA, 100 bp, Homo sapiens
tctgtacgcctagaacagtgccctctgcagctgaataacccttttaacgagtattccaaatttgatggcaagtgttgttacagatcttataacagtcggt

SEQ ID NO: 863237 - DNA, 99 bp, Homo sapiens
ctgcttctgttggctcagatacactctctgatttggggatctctagcctacaggatggcttggccttgcacataagccagatgaaaactcgctggattt

SEQ ID NO: 863238 - DNA, 100 bp, Homo sapiens
tccggaggcctcgggggcgtacaggcgcagcggccgcagcagcagcggcagtcacaggcacatcagcaaagaggctgaagccgacgtagcttctctgaac

SEQ ID NO: 863239 - DNA, 98 bp, Homo sapiens
gatctgagagccatgtcggccagcagcctcttggagcaggtgtgaatgacagaggtggtgccatccagcgcgctcagcgaggtcagcctgcgcctcct

SEQ ID NO: 863240 - DNA, 98 bp, Homo sapiens
tttggcacctcctctccgcgcgttcttggggtggaagttgatgggtcgaaactaaatgtgaccagcacgtggaacctggcttcgcccttattgtctgt

SEQ ID NO: 863241 - DNA, 128 bp, Homo sapiens
gaagaacaccaaagggaacacactcaaagaagactggatcgcttacatctccagagaaatcctgaggacaaatcttcctattttcaagctgaaagaatctactgttagaagaagatacagtgactttg

SEQ ID NO: 863242 - DNA, 100 bp, Homo sapiens
cgtcccccgggggcccgtactgcacatcgtggtggtcggatttcaccacaagaagggctgccagaagaaccttgaaggctatgtgggatttgccaatctc

SEQ ID NO: 863243 - DNA, 100 bp, Homo sapiens
cgcgtagcaggtggaaggagggagggagccgcaggcgcagacccacccgccatgaagccccccgcaggtttgtccagaggggttgcgtttatccggtttg

SEQ ID NO: 863244 - DNA, 98 bp, Homo sapiens
ttcgtcaagatgcagtaaaaggagttcccattagacttgaagttgggccacgtgatatgaagagctgtcagtttgtagccgtcagacgagatactgga

SEQ ID NO: 863245 - DNA, 98 bp, Homo sapiens
acgcccttcttcatctactgccccatggtttggattcaggatttgttcctagtgtccaagattttgataagaaacttacagaagctgatgcttaccta

SEQ ID NO: 863246 - DNA, 100 bp, Homo sapiens
gacatgccccgagtgcggaagaggatttacaaggagctattgccgaagaaatggctctcacgcccacaaacctaaataacaaaatgtctctgcagatgaa

SEQ ID NO: 863247 - DNA, 100 bp, Homo sapiens
actggagttaaggaaattcttaacttcttccaaggttaccagaaggagaacttatggattgtgatggaaaatcagaatctagtcctgagcgggaagctgt

SEQ ID NO: 863248 - DNA, 100 bp, Homo sapiens
ttttacctacctacaacgagcgcgagaacctgccgctcatcgtgtggctgctggtgaaaagcttctccgagagacagccagctaaaggtgtggatgagca

SEQ ID NO: 863249 - DNA, 100 bp, Homo sapiens
tttgggctgtctgctttatgaaatgttttcaggggtatagaacaggctatgcttacaggcatcctctcattcgagagaagcctaggcacaagagtgatgt

SEQ ID NO: 863250 - DNA, 98 bp, Homo sapiens
agccatgatttaaatatcggcgttaagaagtcctggagggtatttgggagccaaaaagaaaaagaagaaacagaagagaaaaaaggagaaaccaaatt

SEQ ID NO: 863251 - DNA, 100 bp, Homo sapiens
gatgtgacctgttcacgcaggggaaacttgaacattcgcagcagaagatggctgtgccacccacgtatgccgatcttggcaaatctgccagggatgtctt

SEQ ID NO: 863252 - DNA, 99 bp, Homo sapiens
ggcggcggctgctgctgcctgtggcccgggcggctgggagaagcggagtgttggttgcagtgtaggattttggaagtcctccctccatcacatcaaaat

SEQ ID NO: 863253 - DNA, 100 bp, Homo sapiens
ccactcaactgatgaatttaaagatgtttctgcaacagaaccacgtcctcagaatggttggaatgaccctccagctttgaacagagtacccaaaaagaag

SEQ ID NO: 863254 - DNA, 98 bp, Homo sapiens
ggcattgacatttaattttagggtcctttatatagaagggagagtaggccagaagcggactcctagaagaggggagcagcaaggatggaatgacagcc

SEQ ID NO: 863255 - DNA, 51 bp, Homo sapiens
agaggatccaggaggaggagttgcagagtaatctatgccagcaattatgac

SEQ ID NO: 863256 - DNA, 100 bp, Homo sapiens
gctcacgcagcaggagcaggggacgaaggaactcatgtcgtgtcccattttgtaaactgggagacacctcaaggatgtggacttgggttccagaactcag

SEQ ID NO: 863257 - DNA, 100 bp, Homo sapiens
ctctgtcgacggctatgacagttctggatgtgatcttcgtggtggaaagctaaattttaaaaccaccccaatggatgcagacagtgatgttgcattggac

SEQ ID NO: 863258 - DNA, 98 bp, Homo sapiens
tgaaccagaagatcgagagcctaactttgcaaccattggtctgcaggacatcactttagatgatgagtattgggaaagggtcgttgtggtgcatagac

SEQ ID NO: 863259 - DNA, 100 bp, Homo sapiens
acgattaattgatgcacttgtagaagagaaactactttctgaagaaacagagtgtctgctacgagctcaattttcagagtcaccatcatgtctcttctca

SEQ ID NO: 863260 - DNA, 100 bp, Homo sapiens
cttcccgtccgctgtcctctgctgccagtcccctgccccgggcaaagcccatctggtccgccgagcagattctcactctgttgcccaggctggagtacag

SEQ ID NO: 863261 - DNA, 100 bp, Homo sapiens
ccgaagagttgaaaaacactggcgcttcttggacacttaatgattgttggcaagaaatgtgctgctgatctgggcctgaataagggttatcgaatggtgg

SEQ ID NO: 863262 - DNA, 98 bp, Homo sapiens
attgagtcctacgctgctgtgaatcacatatcccaactgtcagaggagcaggactgtacaagaaatctggaaaacttgtattcttaggtttggataat

SEQ ID NO: 863263 - DNA, 100 bp, Homo sapiens
acaaggcacacaacatcttcccccacatcacactctgccagttctttatggaaactgatgactatagatattttgatcccaaaatgctgcggggcaatga

SEQ ID NO: 863264 - DNA, 100 bp, Homo sapiens
aaattaaagaaggaatttacagtctttgagcatatagatatcaacactccttcattactgattctacaagggggttgctcctctctggatgagacagata

SEQ ID NO: 863265 - DNA, 98 bp, Homo sapiens
ggaattgtaggtattgaaaggaaactggaagaaaaaagaaaagaaactgacaaaaacatttctgagattggcacttctctgtttgatgaagagggagc

SEQ ID NO: 863266 - DNA, 98 bp, Homo sapiens
ccttccgagaccagtccacctacatcaggtcagctccgatccttccatgtacattgaggtggagaatgaagtgacagtggtggggggcgtgaagctga

SEQ ID NO: 863267 - DNA, 100 bp, Homo sapiens
aactgaatttctcaaacaaattcttaatggtgtttactacctgcactcccttcaaatcgcccactttgatcttaaggaggagatgttaaagtaacccatc

SEQ ID NO: 863268 - DNA, 98 bp, Homo sapiens
atttatttcctttatcttagccggaggacctgctgatctaagtggagagctcagaaaaggagatcgtattatatcgattgtgttcacctattgaaaat

SEQ ID NO: 863269 - DNA, 100 bp, Homo sapiens
ggaagcgcagggagaaggaagaggtgtttgaaaaggttccacttccaaacatgagttccaggccgagacaaagaagcttttggacattgttgcccggtcc

SEQ ID NO: 863270 - DNA, 100 bp, Homo sapiens
tggtgcagagccccaattcctacttcatggatgtgaaatgcccaggcacccgacaggaggatcctttattcgtccgaacaaggtaaattttggaacagac

SEQ ID NO: 863271 - DNA, 100 bp, Homo sapiens
acagagcagacttaccctgaagtagttagaatggggttgtagaaggtgatttagctgccatagaagcatacaagtcatcaggaggagacattgcacgtca

SEQ ID NO: 863272 - DNA, 100 bp, Homo sapiens
cccactgaagacgtctgcgtgagaatagagaccaccgagatgccagcacgagccgccgcttcacgccgccttccaccgcgctgagcccaggcaagatgag

SEQ ID NO: 863273 - DNA, 100 bp, Homo sapiens
gcaggtgacgacagggacagtggcggccccgttctccagaagttccacctggtgccaagcatcaacaccatgagtggcagtcaggagctgcagtggatgg

SEQ ID NO: 863274 - DNA, 100 bp, Homo sapiens
cctcacctctttgggcctttttgtaagtgaagatcttcgttatccatcacgccacagcttatcggtgaggagtaagaggagcaggctcctgcacagtgac

SEQ ID NO: 863275 - DNA, 99 bp, Homo sapiens
tacaggccattagatccaaagccattcccaaattatagagctaattacaactttcggggcatgtacaatcagagtggatccaaacttctacagcaaaaa

SEQ ID NO: 863276 - DNA, 98 bp, Homo sapiens
ctgcgcgaccacagctatgcgaccgaagtggttggcacttaccatggttccccagaccagtcccatcaagtgactggtaaccaccagcagcctcctca

SEQ ID NO: 863277 - DNA, 100 bp, Homo sapiens
ctgtgctgtcaaaccatgtcaatctagttatggtgaatggttgcatggatttgaaaaaaaggcaaaagaatgtatggctggaacttcagggtcagaggag

SEQ ID NO: 863278 - DNA, 98 bp, Homo sapiens
gaagatctttttcctcaattggaggaagttggccgaatatggaagatggagctgctcaaagaatcggatgggctgggaattcaggttagtggaggccg

SEQ ID NO: 863279 - DNA, 136 bp, Homo sapiens
ggcgggccgggcgggccgcgggagccgcacgcggcgatatggaagaggagggcaagaagggcaagaaggtattctgagagaagcctcacaaagtgtattggaattactattgaaaccagaccagattactgcatga

SEQ ID NO: 863280 - DNA, 98 bp, Homo sapiens
actgagccttccattgggagagctagtctacatggtggagagccaaccaccatcattagacaaggtggcaatttgtaccatacggatgtctcactctt

SEQ ID NO: 863281 - DNA, 100 bp, Homo sapiens
cacttgtggattgtaagaagagaccggttggagggtgacagatcagaaggctctggtcaagagaatgaaaatgaggatgaggaataataaactctttttg

SEQ ID NO: 863282 - DNA, 99 bp, Homo sapiens
gaaccaaagcggatcagagagggctaccttgtgaagaagagcaaatttttcagaacataaaacaagaatatagtcgttatcagaggtggagacatttag

SEQ ID NO: 863283 - DNA, 98 bp, Homo sapiens
gccccggcgaggaggcgcggaaccatggccgatgggggcgagggcgaagacgagatccagttcctgcgaactgggatcccaacaagccctcaggattc

SEQ ID NO: 863284 - DNA, 98 bp, Homo sapiens
agggtaggaccttccaatcagccatctacatcagctcgtgcccgtcttattgatcctggctttggaatatataagtctgaacaggaattaagaataac

SEQ ID NO: 863285 - DNA, 100 bp, Homo sapiens
ccgcgacctgctcctggacccagcctgggagaagcagcagaggaaggtcctggaatgccagacaaccacggctcctaccatgtcggccagcagcagctct

SEQ ID NO: 863286 - DNA, 101 bp, Homo sapiens
ctgctcaaggacacggtctacaccgacttcgacgtgccctctggtggtcagaagatgctgtgctgtctcgttaggatgaatggattaaaatgtacttttcc

SEQ ID NO: 863287 - DNA, 100 bp, Homo sapiens
cggagagtcaggggccttgtgtcctaccatggtatttgctaacgtttagagagtgcttccccttgccgagcactgggtggagggagcaaagtcctgcaca

SEQ ID NO: 863288 - DNA, 100 bp, Homo sapiens
ccagaggttacccagcagaccatagagctgaaggaagagtgcaaagactttgtggacaacttaattcagtgcacaaatgagatgaatgtgaacatcccac

SEQ ID NO: 863289 - DNA, 99 bp, Homo sapiens
agttactggcatggcactcccaagattgcaagagaaggcagctgctgtggatttgactaaccacttagaatacactctgaagacctatatagataccag

SEQ ID NO: 863290 - DNA, 98 bp, Homo sapiens
aaaggttgcattgatgaaattaaagatgcatgctgatggcgataagtcattaccacaggttcaaaccttgtactactcagctgatcacaagctgcttg

SEQ ID NO: 863291 - DNA, 100 bp, Homo sapiens
gaaccaactggtcccgaaagagtcgtcattgaattttgagaagcattctgaaaactttgcatggacagagaatcgttatgatgtgaaccgtcgacgacac

SEQ ID NO: 863292 - DNA, 100 bp, Homo sapiens
cctccctgcgtggtggactgtggcaccgggaggcactggctacaattaggcttctcgacgtcctgtgcgaaatgactgtgaatactgagctgctcggcta

SEQ ID NO: 863293 - DNA, 99 bp, Homo sapiens
gcctgctgctggctcctcactgagataattgacgaccttgccaacctagtggagaacacagatgaaaaacttcgcaatgaaaccaggcgggtaaacatg

SEQ ID NO: 863294 - DNA, 98 bp, Homo sapiens
agctgaaggaaactgctgaaaacagcctcaagaaaccagtaacagattgtgttatttcagcgctttgacttccgtccaaaacctgatccttattgtca

SEQ ID NO: 863295 - DNA, 100 bp, Homo sapiens
ctcgtcggaccctttggggctcagtggaggtatggacctgtctgccaatcaggacgaggagaccgaccaggagaccttccagctggagatcgaccgcgac

SEQ ID NO: 863296 - DNA, 99 bp, Homo sapiens
agtgggcaggaagaacccatcgggcagctacacatcttgaaagagaagctcttcctgtgagcttttgtctggccctctgagccccaatgagagtttcct

SEQ ID NO: 863297 - DNA, 98 bp, Homo sapiens
atcagaacacagtggagaccttacagagaatgcacactacatttgagcatgacatccaggctctgggcacacaggaaagtggagaatgaggacatgaa

SEQ ID NO: 863298 - DNA, 100 bp, Homo sapiens
gagctgtgccggcagatccaggaggaggaggacgagaagcagcggctgcagaatgaggaagggcctgtcccagtcggctttaccctatcgacgcagcgtc

SEQ ID NO: 863299 - DNA, 100 bp, Homo sapiens
ggctctggatggtcatcagctgttggcaggtgggatagtaacatctttttgagggaagaattggcttcctttcttgaaagtggtgaaggtacagcatata

SEQ ID NO: 863300 - DNA, 100 bp, Homo sapiens
gagatcttgagcgccctctactcagcatggatatccaggtgctgagccaggagcagcagcctttcttgactgccagccccccaggatctctcagagcctc

SEQ ID NO: 863301 - DNA, 100 bp, Homo sapiens
ccgcttcctcaacggctgcgtgcccctctcgcatcaggtggccgggcacatgtacgggaaggacaaagtgggttgcttttaactttgacagaggaagaat

SEQ ID NO: 863302 - DNA, 99 bp, Homo sapiens
gcacatatgtgatctatgtgcgcttcggtggtgttgatattcctaacagccccttcactgtcatgcctgattttccctacaaagatgacctcctggcct

SEQ ID NO: 863303 - DNA, 100 bp, Homo sapiens
agcaatggatagatgccattgaacagcacaagacaccaactctacaacattacctgtcatatactgaagaatctcttcttccagttatgcagcacctggc

SEQ ID NO: 863304 - DNA, 98 bp, Homo sapiens
tccaacccatagaagtgcctcctcttcaacatcctcccaaagggacagtaggcagtgttcactcatcttaaacatcctcagttgaaatccgtatgctc

SEQ ID NO: 863305 - DNA, 98 bp, Homo sapiens
ctgcctgcctctgtgcatgccctcacaggcgtggacctgtctaaggtgcagcggaactgctgcctgacgctctgcaacttcagcatccccgaggagct

SEQ ID NO: 863306 - DNA, 98 bp, Homo sapiens
gtttaaccttatggccagtgatttgattgcccttaatagaagtctgccagatgtaagattagaaggactaagatgcttggtgaagcagctggaaagag

SEQ ID NO: 863307 - DNA, 100 bp, Homo sapiens
catttacgctgagaatagtttgaaatcagaaaatttttactactggagatgtcaacaaagatgggaagctggattttgaagaatttatgaagtaccttaa

SEQ ID NO: 863308 - DNA, 98 bp, Homo sapiens
ctacccggagaagcaggagccctactcggcaggccgccatggcatcagatgaaggcaaactttttgttggagggctgagttttgacaccaatgagcag

SEQ ID NO: 863309 - DNA, 100 bp, Homo sapiens
taatcacgatttctctcctcttgaggagagcgacttgcagttgtggaggtacagtgtgaacggctgaggatgctctaccgggactgtgctcggcccccac

SEQ ID NO: 863310 - DNA, 98 bp, Homo sapiens
agcaccaatgcaaaccctctctctaccacgagcagcgccctgggagccctcacgagtcccgaaagaagattggcccatgcacaagctggaatgttctc

SEQ ID NO: 863311 - DNA, 98 bp, Homo sapiens
cgcgcggggcccggttctccatcgcgcgcacggcagcctagcgcaatgaggcgggcagcactgcggtgctggagaatctggtaaaagcaccattgtga

SEQ ID NO: 863312 - DNA, 99 bp, Homo sapiens
gacaacctctttgaaattgtaacaacgtctcgaactttctatgtgcagatctttaatctcatgaagtacgacagctacagccgcttcttaaagtctgac

SEQ ID NO: 863313 - DNA, 100 bp, Homo sapiens
ggaaggaacctgggatggttgtgagggaagggacaagaagatactgccctggtgcgtcctggctgagagttggagctctccagcaacatgcctgagcaga

SEQ ID NO: 863314 - DNA, 99 bp, Homo sapiens
gtaaatgcaccaatcagcatgctgtgtctagctcaaggcaatggatataccaaatgaaactttgacctttgaggatggcatgaagtttaaggaatatga

SEQ ID NO: 863315 - DNA, 98 bp, Homo sapiens
cgggagttcaagaagaacactccagaggccagaggcattgatgtgcagcaggtttctttagtcatcaactatgaccttcccaccaacagggaaaacta

SEQ ID NO: 863316 - DNA, 51 bp, Homo sapiens
tgtaagtgcagatggaacacaacagctccctgtgctgtcaggaatctacag

SEQ ID NO: 863317 - DNA, 101 bp, Homo sapiens
ggggaagtcatgctcgcttcacggaggcaatagctagccggaaacctgtccagtttaagtcgtcttggtctgagatataacagactgtcagcaatacccag

SEQ ID NO: 863318 - DNA, 99 bp, Homo sapiens
gaggaaatgagagaaatgcttacacacagaaatggttaccaacttggcaagcctgtccgagctctaaatatcaacaggatgaataatgtcacgacttta

SEQ ID NO: 863319 - DNA, 100 bp, Homo sapiens
caaagtgccagcagattcagtgtcatgtgaggacgtgcttcctgcttcatagataagaggctcggtctggggttcttgcagctggcaccagccctcccgg

SEQ ID NO: 863320 - DNA, 101 bp, Homo sapiens
gaggagcgcctgcctgaggagagcaggcagcacacttctgcttttgttccttcatcaggacgaatttactcttttgggcttggtggtaatgggcagctggg

SEQ ID NO: 863321 - DNA, 98 bp, Homo sapiens
tagccagactcagggatcaaagagcaaacagattcagtggcctgcattgcatgcaagacgacagcatagaagcttctacttccatatctcagcttcta

SEQ ID NO: 863322 - DNA, 99 bp, Homo sapiens
tctgcctcagccttactgtgagtctgagtacccagtactatgacatgcgctggtcatgtgagcacctcattatggtgtggatcaatgcttttgtcatgc

SEQ ID NO: 863323 - DNA, 100 bp, Homo sapiens
ttctccaccaacgccagtgaccatgccttgctgagcgaggtaagctgaaacctatcaacactcttcaaaatgcaatggaatgtaccacggactgtatctc

SEQ ID NO: 863324 - DNA, 98 bp, Homo sapiens
tgggtcaggtcacagagaagctgcagctgacttacatggaggagacgtgtcgtcactatgtggcccatgtgaaggaaatggaagttccagtattaccg

SEQ ID NO: 863325 - DNA, 100 bp, Homo sapiens
gcacttcctattccactggattgggaaagaccatggcagagcaaaggcacaacaccacttgctccaccacctaaacctgttcgaagaagattaaaatcag

SEQ ID NO: 863326 - DNA, 99 bp, Homo sapiens
catggtgttaccttcgcgattacactggatcagaaacaggccatggagggacaggatccggaggcgccagctcaaccatgcctaccttaatgcctctga

SEQ ID NO: 863327 - DNA, 100 bp, Homo sapiens
ggggacggagagaacacgagcccatcagttcttccccaatggagaggccatctgcacgggctcggatgacgcttcctgccgcttgtttgacctgcgggca

SEQ ID NO: 863328 - DNA, 100 bp, Homo sapiens
gcgcatctacttcctggaggagcgcatgcaacagaagtatgaggccagccgggaggacatctacaagcggggtttaatgaagaaattcattcgatgttct

SEQ ID NO: 863329 - DNA, 100 bp, Homo sapiens
atgtcaacgtttattatggccaggactatcggaacaaatacaaagcacctacagactattgtctggtgctgaaggaatctttgcctacatgaactacaga

SEQ ID NO: 863330 - DNA, 98 bp, Homo sapiens
caccgtcgcctcccactgcaaaaaggcctgggcgggcgctaatattgacacctgctcagaagaccagaggaccccgttgatggaagcagccgaaaaca

SEQ ID NO: 863331 - DNA, 100 bp, Homo sapiens
tccaactacgtggagcggaagaacagcctgaagaagggctccctcgtgaagaacctgaaggacacactagtccttcagtgaatctacagacctattttct

SEQ ID NO: 863332 - DNA, 98 bp, Homo sapiens
gctcgcgggcggcgggcccgggcctggaagaaacgctggtttatcctgcggagtggccggatgagcggtgacccagatgttctggaatactacaagaa

SEQ ID NO: 863333 - DNA, 98 bp, Homo sapiens
acttgggctgagtaccgcggcgggcgcgagcgaggcgccctagacatcttctccctcccttgcctcagcacccttacccttctgaagaacagaaaaag

SEQ ID NO: 863334 - DNA, 100 bp, Homo sapiens
aagaatttcatattttacttttattggtactccagtccaggcaacaaatatgaatgacttcaaacgagtgccgacgccaccgccgagcccatgatcctgg

SEQ ID NO: 863335 - DNA, 100 bp, Homo sapiens
agatcttccagcagctcacggaaaggaccaagcgggagctggagaacttcagacactacgagcaggccgtggagcagatggagtctcgttctgtcgtcca

SEQ ID NO: 863336 - DNA, 101 bp, Homo sapiens
ctctggctgactttggcagggcccatctggcacggcctccgcggcgcgcagtggaaagaggccagaagatcagtgagcagattgtcattggcacccctggg

SEQ ID NO: 863337 - DNA, 100 bp, Homo sapiens
cgtatatgtgactacccatactcccagaaacgccagggatgagggcgctacaggcctcaggctggaagggaagaggtttctagagctgggcaaagaggaa

SEQ ID NO: 863338 - DNA, 98 bp, Homo sapiens
actagcctcttgcaggtgcaactggaatgcagtttacataataaagtgtgtcagcaattaaaggtagttcagcagccttcaggaggcaatgaaaaaca

SEQ ID NO: 863339 - DNA, 100 bp, Homo sapiens
aatcattgcagctataacattgatgggtcctcagtggtggttgaaaactgtaattgaacagattaaagagactggtgctaacctagcaatttgtcagtgg

SEQ ID NO: 863340 - DNA, 100 bp, Homo sapiens
gcttttatctgcttattccgccattgatcccagagtgaagtatttgtgctataccatgaaagtatttacaaaggttgtatctcccacttcacccttctag

SEQ ID NO: 863341 - DNA, 100 bp, Homo sapiens
ggaattgaagaattcaaacctcctgagtgtttgcatgccatggagatccaagtcatgatacagtttctacctgtaattcttatgcaactcttccgagttc

SEQ ID NO: 863342 - DNA, 100 bp, Homo sapiens
gagagagaaaagtgagtttattctgaagagcatccagcaaaagcacctggaaattgaaagaactaccaaatggctgaaaatgctgaaaggatgggaaaaa

SEQ ID NO: 863343 - DNA, 99 bp, Homo sapiens
ttgtcatagccttagctcaagcaatagggctctggaacttcatccattctctatgaaacctcttctgaggcgggcgatggcctatgaaactctagagca

SEQ ID NO: 863344 - DNA, 100 bp, Homo sapiens
cgggtggctctgaggtcgcctggggaccccagaaggcgaatctttctgcattgaatttgaagatttctgaacagaaggaaatattaataaaagaattaga

SEQ ID NO: 863345 - DNA, 100 bp, Homo sapiens
gcttccggatcgagggcatcaaggttgggacagcgtcttcgctgctgctggatagtcgtgttttcggggatcgaggatactcaccagaaaccgaaaatgc

SEQ ID NO: 863346 - DNA, 100 bp, Homo sapiens
aaaacatcatcgttttgaagagttctgcgttttgccagtcacctctcaactgtgtgccaaaggcagggcaagaatcctttcgttccatcacaaggtcgta

SEQ ID NO: 863347 - DNA, 100 bp, Homo sapiens
tcagttggcaaaccagatatatgacttgattggtgctgaagacatggacggcttccaggcagacacggaggaggaggaagaggaggagggcgactgtatg

SEQ ID NO: 863348 - DNA, 100 bp, Homo sapiens
gggaatctgtacacactcagaagccaccagagcaccccctgggacagcgccacattcgccggactattgcagatatcatccgaacatgtttgggacccaa

SEQ ID NO: 863349 - DNA, 98 bp, Homo sapiens
agcctggcgggccggcacggtgcgggccatgagcggggcggtgccccaggacctagcggtgctgctacccccgtatgatgatgccactgtgaatggtg

SEQ ID NO: 863350 - DNA, 134 bp, Homo sapiens
gactgaggatgccaatgaggacaccattggggtcctggtgcgcttgatcacagagaagaaaggtacttaaacttcacccttgtttagcccctattaaggttgctttggatgtaggaagaggccccacattggaa

SEQ ID NO: 863351 - DNA, 137 bp, Homo sapiens
ggtcccaacactggcaatatgcatattgtggcagacctgtatgcagaagtcattggagtgttggcacaagccaacttctcagatgaccaagatggtgctgcagatggtgctgaggatggagaacccaccaagccccg

SEQ ID NO: 863352 - DNA, 51 bp, Homo sapiens
catggagttggcaccccaaaagaaagaattctctggtggttgagatcccgc

SEQ ID NO: 863353 - DNA, 98 bp, Homo sapiens
cgtgctgtactcactgcagatatgcaaagccatggcctacctggagagcatcaactgcgtgcacagggaggagtgagatgtggatgttgcttttgcac

SEQ ID NO: 863354 - DNA, 98 bp, Homo sapiens
cgggctgaagattgcttctcttctctcctccaaggtacaggtttgcagattccgccagcagcacagcaagctctacagatgagtggctctttggcatt

SEQ ID NO: 863355 - DNA, 100 bp, Homo sapiens
acctcggtttcctggacccattccgactcagatatgatgcttcctggtgtgtttagtggttggtgccattccaattttctgtgctgaaatcattctgaaa

SEQ ID NO: 863356 - DNA, 98 bp, Homo sapiens
taggcaagacctgcctcctgttccgcttctcagaggacgccttcaacaccaccttcatctccaccatcggattcagtggtcccaatttaaaggctatt

SEQ ID NO: 863357 - DNA, 99 bp, Homo sapiens
ggaaagatggaagactaccaggctgcggaggaggtcccgaagatggcatattcataaagacatcttctgatgattgtgaacatctttacctctgggtgc

SEQ ID NO: 863358 - DNA, 100 bp, Homo sapiens
atggcctaatgaacaacttccagttgagccccatatgggggttggcaggcagcagagaggcccctttcaaggtgttcgggtaaagaactcagtgaaggaa

SEQ ID NO: 863359 - DNA, 98 bp, Homo sapiens
tctcctcggcactgtattctttacctgcttcccaatcccactgatgaggatcagcccatgtgctgaagctgctgaaagatggcagaagaagtggtggt

SEQ ID NO: 863360 - DNA, 100 bp, Homo sapiens
ggaaaaagaagaatttattcactcaagactaaaaactaaaggcctgggcctgagaactgaatcaggctactgcagcactggggtgtcagttgttggtccg

SEQ ID NO: 863361 - DNA, 142 bp, Homo sapiens
aatgtatcattttgatgcagatgctgtggaacatctgcaccataaaggcaatgccgtcctccaaagtcagtttttccagaaaggaggagtcaaggaagcccttagtgaacgagaactcttcaatgctgtttcaggcttaaac

SEQ ID NO: 863362 - DNA, 98 bp, Homo sapiens
ctcggaaacaagccaattctattgtgaagaggtctcttgaagtttggggtagtcaagaagcattagaagaagcaaaggaagtccgacaggaaaaccga

SEQ ID NO: 863363 - DNA, 100 bp, Homo sapiens
gaagacgagatccagttcctgcgaactgctgaagccgacgtagcttctctgaacagacgcatccagctggttgaggaagagttggatcgtgcccaggagc

SEQ ID NO: 863364 - DNA, 100 bp, Homo sapiens
ttcggtgccgagcactccggactctacgccaacatagccgaggtagaggtctccatccctgccaagctgcacaactccctcattggcaccaagggccgtc

SEQ ID NO: 863365 - DNA, 100 bp, Homo sapiens
aggtcacagtaaggccaaaaatgtgcatactcacagagttagagagagggatggtgcgatcatctcagtccacattggaacgatctgaacagcagatcag

SEQ ID NO: 863366 - DNA, 100 bp, Homo sapiens
gccgcgggcaacctcggagcttatactcctcccagtgacgggtctggagtgcgtgggggaccggctgttggcgggagcgcctggaccatgctgctgagcg

SEQ ID NO: 863367 - DNA, 98 bp, Homo sapiens
tcttcctcaatgcttgtgtggggtacccagtgtgttgaacaaattcaagagttggttctacgcttctgtgagaagaactgtgaaaagagcatggttga

SEQ ID NO: 863368 - DNA, 100 bp, Homo sapiens
agctatatttggtgtcctgtaaaatcacagattatggtggaggcctgaattttgatctatgttctacctacatccagctggctgaaagtacttgaggatc

SEQ ID NO: 863369 - DNA, 98 bp, Homo sapiens
caaccagctctagacataatagtgaaagtgaatctgtgccatcgaggatggaggactaaagagagcaaaggtgaaggacatctttaaggaagagcagc

SEQ ID NO: 863370 - DNA, 98 bp, Homo sapiens
agaaccaagtgcggacgctgtgcgagaagaaacattatatgctatgtgtactattagaagctggaggttgcgcatccaaagctattgggagtcctgga

SEQ ID NO: 863371 - DNA, 100 bp, Homo sapiens
agacataacctatgcacttgtggaatgagagaaccgaggaacgaagaaacagacattcaacatgattgcatttgaaggtgtttgtgaaccgaagtttagc

SEQ ID NO: 863372 - DNA, 131 bp, Homo sapiens
gggcgctggggcccgaggagttcaaggcctgcctcatcagcctgggctacgacgtggagaacgaccggcaggtgcgcgtggaattcatggacgacacgagccgatccatcatccgcaatgtaaaaggcccc

SEQ ID NO: 863373 - DNA, 100 bp, Homo sapiens
ctgaccttgagtgcagctccccctataagcctcggcctccacagggacagagcagaatgggctgatatagatccggtgccgcagaatgatggccccaatc

SEQ ID NO: 863374 - DNA, 98 bp, Homo sapiens
catgcctgtgcaattgaacaaagaggaagaatgttccaccacagaccatccctataagaagccctacatggagacatcacccagtgaagaagattcct

SEQ ID NO: 863375 - DNA, 99 bp, Homo sapiens
tccgagtttgcgactcgcggaccggcgtccccggcgcgaagaggctggactcggattcgttgcctgagctaaacatgaattcagctccaactttcatca

SEQ ID NO: 863376 - DNA, 99 bp, Homo sapiens
cgccttggagtccggagtaacttggccaggctggccccgagcggaactggagaaagctgaggaatgagtccctggaacgccagatgcgtgaaatggaag

SEQ ID NO: 863377 - DNA, 100 bp, Homo sapiens
tacgcacttaaaataattgggcagaagagaagcagtgaaggagtgcagaggcatcacctgaaagcttatgtccctgatgccaaaaatgcacctactcttt

SEQ ID NO: 863378 - DNA, 100 bp, Homo sapiens
agctcaacacggcacttccacagcacccgacagctacaaagtgcaagataagaaaaatgcctccagccgccctgcctctgcaatttcaggacaaaataac

SEQ ID NO: 863379 - DNA, 100 bp, Homo sapiens
agcaactggctgagggactcacagctgatgacctgctgctcgtgctgatctcagaaagacctggtggaagaggaggctgaggaggctggagtggctttga

SEQ ID NO: 863380 - DNA, 98 bp, Homo sapiens
ctcagagtcaaagaagaaaccgtgctcagaaactagccagattgaaggtttcagcaagcagatggtggaaattcttcacaaacataatattcagttta

SEQ ID NO: 863381 - DNA, 103 bp, Homo sapiens
atttggtactggagtgatgagtttggttcttggcaggaatatggaagacagaatgtgaaagatgttgcagaagtgttccagaagtggctgaagatagaaggaa

SEQ ID NO: 863382 - DNA, 99 bp, Homo sapiens
aggaagtgagagcagcggcagccggcggtgcagcagccggccgacccagagtgaagatcattaccattagaatatttgaccgtgaggaatatgagaaag

SEQ ID NO: 863383 - DNA, 100 bp, Homo sapiens
gtgtcttcaagaagaggctgagctgcggtgcttgtaagagcggttctggtgaggttggaaggatgcagccacccggttgtcatgaaaggcctgtgtgctg

SEQ ID NO: 863384 - DNA, 98 bp, Homo sapiens
tttctcctgctctgcagcttctgttcaggagacctttgagaaggcaagtttgagtagcagcagcagtggagcagccagcctgaaaagtgaactttcag

SEQ ID NO: 863385 - DNA, 100 bp, Homo sapiens
agactcaacatgaagctaccggccagggttttctttactctggggtcccggctgccctgtggcctcgctcctcggaggagaatggggagaaggaaccccc

SEQ ID NO: 863386 - DNA, 100 bp, Homo sapiens
tatgctggaagaatttaagaaagaatcctgcaggaaaaattagaccagcccgtctctgctccaccatcgcctagagatatctccatggagattgattctc

SEQ ID NO: 863387 - DNA, 90 bp, Homo sapiens
gctcagggttccggtcacacacacagtgtgggcaccgtctgctgctctagggcctgcggtccaatgtcctcttgtcttttgatgacaccc

SEQ ID NO: 863388 - DNA, 142 bp, Homo sapiens
gccctcttgataaaaagagatgtggggggattctcgacctgctaacagaactggaccttttcgtggccataaaatgcagtaaaaacaaatccagttcccaagaagctgtacaaatgctttcttctgttcgactcaatttacg

SEQ ID NO: 863389 - DNA, 98 bp, Homo sapiens
agtggatggtcaagagcgtgccctacttcaaggataagggtgacagcaacagctcggcgggctggaagtgtctttctcgagaagcaggtggaaacatg

SEQ ID NO: 863390 - DNA, 101 bp, Homo sapiens
ctcctcctgaggcaccacgtctctaccgagcacaaactccacgaagccaacgcccaggtgcaatggatgagcttcatagtctggatccaagaaggcaagag

SEQ ID NO: 863391 - DNA, 113 bp, Homo sapiens
gagactcgtggggctggatgggaatcgtagtcttcctaggagttgacatcggcagaaactagatgatcagaccaagcccgggagcttgtccttttccgagcggctcagtgaac

SEQ ID NO: 863392 - DNA, 100 bp, Homo sapiens
tatctctgtatgaaaaccttactgcttctctcttcagttcacccatctcaggagcctggctggttggaggggactctgaacggaaagactggcctcatcc

SEQ ID NO: 863393 - DNA, 100 bp, Homo sapiens
ggattagtgataactcaagtttcatcaccttcttcctccagacaggcacgccatacaaccgactacacttgggctcactgaatgaatcacattcttctgc

SEQ ID NO: 863394 - DNA, 100 bp, Homo sapiens
cgtccaagcaaaccgggaaaggagaggatcccggagccggcagaggtgtccaggacctgcctgctcacggttcgtgtcctgcaggcccatcgcctaccct

SEQ ID NO: 863395 - DNA, 100 bp, Homo sapiens
aattgtagctcaaaagatctgcagagctcccagggcggacagcagcctcgggtgcaatcctggagccccccagtgagggagtctcgctctcagtcaaaat

SEQ ID NO: 863396 - DNA, 98 bp, Homo sapiens
tctgtgcagtgtatagcatttcagtactccactgttcttactaagatactagagtaaaaggatggtttcttctggacaattatatacccacatttatc

SEQ ID NO: 863397 - DNA, 98 bp, Homo sapiens
cgtaagaagttacaagagtttgcaggtagagatcgtgatgtccctgcttggaatgttttgtccccctctgtttgaaaccatcgctgccctggagaatt

SEQ ID NO: 863398 - DNA, 98 bp, Homo sapiens
cacccaccaactgttcccatgggggtctgtctccaagatgtatcggaacagtacaacatctaaagagtaaatttggaaaaggctactttttggaaatt

SEQ ID NO: 863399 - DNA, 100 bp, Homo sapiens
ttcctggaaaaagaagtccaagaagcaaaaaagggactgctaagaagataccaccaggatgaaggtttaaggctcagaaaggtagcacattcggataaac

SEQ ID NO: 863400 - DNA, 100 bp, Homo sapiens
gaaaacggaagcgcagggagaaggaagaggtgtttgaaaaggcactggctcaggcgatcagggaagccagagagcagcaccctgacatgtcggtcacaag

SEQ ID NO: 863401 - DNA, 99 bp, Homo sapiens
acagagccatggtccatccgagagaagctatgtttagcatcttctgtcatgagaagtggcgatcaaaattggctgagagcacagacaaaacaacaactc

SEQ ID NO: 863402 - DNA, 100 bp, Homo sapiens
tagaaaggagctgcttcccaataaggaaacaatgctgatgcagagattgaaggagccccagctgctcccttggatgtgaagtgcttggaggccaacaaag

SEQ ID NO: 863403 - DNA, 99 bp, Homo sapiens
gtgtggcacgtgagcataaaaacattgttcaccaacaacgggaatcacctcctcatgtagaaaattactgtctaccagaagctatttcatttattcaga

SEQ ID NO: 863404 - DNA, 50 bp, Homo sapiens
caccgctctgcaggctgttcctcctcggggaccacttaatagtgagtctt

SEQ ID NO: 863405 - DNA, 99 bp, Homo sapiens
caccaatgactgccactggtgcaatgaccattgtgtccccaggaaccacagctgctcagaaggccagtggaatttcccgctcctgatgcaagcatggaa

SEQ ID NO: 863406 - DNA, 100 bp, Homo sapiens
ccgcgctccctccgccgccgccgccttgctgctgctcaaagctgctgccgccccttgggctaaaagaatctttggaagaactaccagaaacgagtgggaa

SEQ ID NO: 863407 - DNA, 98 bp, Homo sapiens
ttcgaaagaatcacagcagtgcccagtttaattggcagagggggtcgatttgggaggaaaggtgtggctataaactttgttactgaagaagacaagag

SEQ ID NO: 863408 - DNA, 100 bp, Homo sapiens
gcgcttcatttactgaacaatggacagatggttttgcatttcagaatcttgtgaaactagatttagaactcaaagaccacgagggcagcacggctctgtg

SEQ ID NO: 863409 - DNA, 99 bp, Homo sapiens
ccggggtgtcccgggctcgcgcaggacgcagaagggcagtggagccaggcgcatcccggggaaatggtgggggctctggctgcgcagtcccttggagaa

SEQ ID NO: 863410 - DNA, 100 bp, Homo sapiens
gactctttggggtgaaatgtgaggcgtgtcaccagtttatcacagggaaagtcctggagaaaacgttgtgtgacgtgatcctcatggtccaggaaagaaa

SEQ ID NO: 863411 - DNA, 98 bp, Homo sapiens
agccaagtgtggcagcagttcgtgaagtctgtgaggaggtctatgttaacaatgaatgggcaaccagtgttggggaaggagggagctttggagaactt

SEQ ID NO: 863412 - DNA, 100 bp, Homo sapiens
gagaaggagttggaccagtcaacatctccatccagtccaatggatcagatgggcaagatgagacctcagccatatggcgggactaacccatactcgcagc

SEQ ID NO: 863413 - DNA, 100 bp, Homo sapiens
tcatcataccattcaacagatgcagacttcacaggctatggtttctaagcatgaattgaggaacagaagaagcagagcagatgatcggagcagcatttgt

SEQ ID NO: 863414 - DNA, 99 bp, Homo sapiens
taaacccaaggaaagtttttgaacttatgggaagcattgtcactgagattgcttgtggacgctcttttggtacaccagaaggccagaatggaacgactt

SEQ ID NO: 863415 - DNA, 100 bp, Homo sapiens
aagctgccatcagctgagcaagtccaccaacagtttctgtgtcccacttcatctttaataaggccctggattattgtcacagcatgggaattatgcacag

SEQ ID NO: 863416 - DNA, 100 bp, Homo sapiens
tgaaccagcagaatttttgaacagatgaatggctatcaaagaaggatcaaaaatgcaactgagaaaatgatggctcttgttgctgagctgtccatgaaac

SEQ ID NO: 863417 - DNA, 99 bp, Homo sapiens
gtttcgaactcctgacctcaagcaatcctcccaccttggcctcccacggtgctgggattacagtgctatatcggaaaggccctccattttaccatgcaa

SEQ ID NO: 863418 - DNA, 100 bp, Homo sapiens
cggaccatggcgctctccgggctcttctctagctctcagcggctgcgaagtctgtaaacctggtggccaactgaagaaatcaggggagaaacccctgctt

SEQ ID NO: 863419 - DNA, 99 bp, Homo sapiens
ctcgattggttctactgtgggtctggactgatctccatgtcctgttgtggggcttttacagcctttgggtactggttttggattaggaattgttttctc

SEQ ID NO: 863420 - DNA, 100 bp, Homo sapiens
aaagcagtcaacaataaaggatctgcagctagtacctgtattcttaccattgaaagacaaaagactgtgttgtcaaatgttcaggaagaactggatagaa

SEQ ID NO: 863421 - DNA, 98 bp, Homo sapiens
ctgcctgctccacaagcggcgccgcgccctcggcctgcacgggttgcttcaaagatggtcaacattatgaagagggatcagtaattaaagaaaactgc

SEQ ID NO: 863422 - DNA, 100 bp, Homo sapiens
tgcaatatgctgctccaggcggtcttattgttttagaaagagcgttttcgctacgtaaagcacattcgataaaggatatggaaaatactttgcagctggt

SEQ ID NO: 863423 - DNA, 100 bp, Homo sapiens
ggcggatctggaggagcagttgtctgatgaagagaagatggcccctgagttctgcagcctcgaggaaggcctgccctatctggacatggtgattgcagag

SEQ ID NO: 863424 - DNA, 114 bp, Homo sapiens
gaaccatggccgatgggggcgagggcgaagacgagatccagttcctgcgaactgcagaaatactcagtgtcctcagtcacagaaacatcatccagttttatggagtaattcttg

SEQ ID NO: 863425 - DNA, 98 bp, Homo sapiens
gtggtccttgatccagtatgcttatacagcagaaaacaacagccttgacacagatgatcactttaaaccatcacctcggccaaggagtatgttgaaaa

SEQ ID NO: 863426 - DNA, 100 bp, Homo sapiens
gaagagagtcagcatcatgtcttacgcgttgcaagtcataccctaatgatcccagcaagataatgtcctgtcttctaagatgtgcatcaagcctggtaca

SEQ ID NO: 863427 - DNA, 99 bp, Homo sapiens
tataacccaatgccgtttgaacttcgagttgaaaacatggggctgcttgctctcggtgactacatgaatgtccagtgccatgcctgcattggaggcacc

SEQ ID NO: 863428 - DNA, 100 bp, Homo sapiens
tactcaacagatttggacacaacggaaagatacagctggctgaaataacatcagagaagcacaaaatccacgagcacctgaaaacctctgcggaacagca

SEQ ID NO: 863429 - DNA, 100 bp, Homo sapiens
gcggggcgaggtcgccgccatggcccgctggatcccgaccaagaggcagaagtacggggttgggccgcgatgggcctcttggaacattggtgtgttcatc

SEQ ID NO: 863430 - DNA, 100 bp, Homo sapiens
agctgattttcttctatgagtggaacatcaaactgggctggaaagaagcccatggaaacaaggcgatgacggcgcttgagggtgaccagacctcctcaat

SEQ ID NO: 863431 - DNA, 99 bp, Homo sapiens
ttggagatggctttacaagaaaaccacctaaatatgaaagattcatcaggccaatggacagtcattttgtttactcattcagccctgttgcaggtccca

SEQ ID NO: 863432 - DNA, 99 bp, Homo sapiens
gctgatgtctgtgctgtcctccggctctctggtccactcaaggaacagtatgctcagctggtcctggactcccagaagcgagtcttctcctggggcttt

SEQ ID NO: 863433 - DNA, 98 bp, Homo sapiens
gtcctgtcctcctggggccaccacttttagacccttctcaggtgcagccagagagacactagcccactgatggacggacagacgtgggcagggtccgt

SEQ ID NO: 863434 - DNA, 100 bp, Homo sapiens
cttaaaggagaaatgatggatctgcagcatgggagcttatttcttcagacacctaaaattgtggcagataaagattattcaggacagggagttgaccaac

SEQ ID NO: 863435 - DNA, 100 bp, Homo sapiens
gctgaatcgctggaaacggttcacaaggaagccgagtcccaagatttgggaatggatgatgaaggagatgatgacccagttcctctaccaaatgtgaatg

SEQ ID NO: 863436 - DNA, 100 bp, Homo sapiens
acttcgaaacgtgataagaagcacctggatgagacatttgctacagcatcccacattaagtcaacggaacctactgccagcagagggaggtagaagccat

SEQ ID NO: 863437 - DNA, 99 bp, Homo sapiens
tcatcacaaaagagttgattgaaattatctctggtgctgcagctctgtttgagaaatttctgtggttcattagctcagagaactatctaattataggtg

SEQ ID NO: 863438 - DNA, 100 bp, Homo sapiens
agaagccgagttcaacatcctcctggccaccgactcctacaaggtgctggagaatctggtaaaagcaccattgtgaagcagatgaggatcctgcatgtta

SEQ ID NO: 863439 - DNA, 100 bp, Homo sapiens
tcctttgttactcactgtgttcggggcgatgagggtggagagcgggtgctacagcagcgctggacctccttcctcaaggcccagctgctgtgctcacggc

SEQ ID NO: 863440 - DNA, 100 bp, Homo sapiens
gctctgactgatgacagtgatgaaaatgaagaagaagatgcctttaccgaccaccaactgccagagttttctctgggtgttaacagcggttggactacag

SEQ ID NO: 863441 - DNA, 98 bp, Homo sapiens
agtaatggcccggaaccgtgaagaagatgaatttgctgtcatgttttgtggaatgagggaccgttgagctcactaccacctggagtttgagttgaagc

SEQ ID NO: 863442 - DNA, 100 bp, Homo sapiens
ggaccttgtctcgctcgggagcggaaacagcggcagccagagacctgatggccaaaagaaaggaagaaaatttttcctctcctaaaaatgccaaaaggcc

SEQ ID NO: 863443 - DNA, 101 bp, Homo sapiens
cgcctaatgatgtccgagttggagaacaggcgtggccagcactggctccttgatggtatctctcctctttgtcacaacctctttgccctgtatgacgagaa

SEQ ID NO: 863444 - DNA, 98 bp, Homo sapiens
ctcttcctcagggctcccgtgtctgctcgccctccgacgctgctcagacgtgaagccctccaatatgctagtaaacacaagaggacaggttaagctgt

SEQ ID NO: 863445 - DNA, 99 bp, Homo sapiens
caagctgacagaatccatgagtgcacttagaactacctcccagctccaacatagtgcaaactccagaagattttaacttgctcaagtcaagcaatttta

SEQ ID NO: 863446 - DNA, 100 bp, Homo sapiens
gggcgccgtgggtgccagagaggcggaagaggaggcctgatgggaagaatggctacgtgactgtcagtgagatcaaagccagtcttaaatgggagaccga

SEQ ID NO: 863447 - DNA, 148 bp, Homo sapiens
tgaaatgtaaaaccctcagcgacatctttctgcttttcaagagttccgatttcatcactcgtgacttcactcagccaatggtcttcagcagagaagccgtcaggagacttctcgccagtaaatgtcgatgctacagcaatgatgctcc

SEQ ID NO: 863448 - DNA, 100 bp, Homo sapiens
ccagtcagagaagtttggcatataatcgaatagttgatgccctaaatgaattcaggtggacgaaaaggaatgcccctgcccagtggaggcggaaagatcg

SEQ ID NO: 863449 - DNA, 100 bp, Homo sapiens
gccacccattgatttgatgcataaaggcagctttgaaacagtgagcgacctgtgagagtttatgccgatggaatatttgacttatttcactctggtcacg

SEQ ID NO: 863450 - DNA, 100 bp, Homo sapiens
cagcaatccaagccaagctccattcagaagatatagaacttgggggcacacgtgtttcacgttgacaggtttgcttgggacgctagtaaccatgggcttg

SEQ ID NO: 863451 - DNA, 100 bp, Homo sapiens
gaacagaacaggccctatggggcatacctatggctttattgacctcgactcccatgcggtgctggagaatctggtaaaagcaccattgtgaagcagatga

SEQ ID NO: 863452 - DNA, 98 bp, Homo sapiens
tcaaactatactaaaacacctacagaatctttttgtaccaagtttaccgtggtttctgggcagtcctgatgctcctgggggtagttgctgtagtcatc

SEQ ID NO: 863453 - DNA, 98 bp, Homo sapiens
gtgaattttcagctcgtttccttttgaagctgcccgtagatttcagcaatatccccacataccttctcaagattggtggaacgagaatgcctacacgc

SEQ ID NO: 863454 - DNA, 100 bp, Homo sapiens
ttgcttgtgatgacttggatgaagctgctagaatgatggagtcgggtggtacagttttgagtaccaactggtctgatgtaggtaaaaggaaagttgaaat

SEQ ID NO: 863455 - DNA, 100 bp, Homo sapiens
cttgagaatttataatggaattggagtcagcagaactgaaatagcttcatattctccaattcagcctcattctctaataaaacatcagcagattcctctt

SEQ ID NO: 863456 - DNA, 100 bp, Homo sapiens
aaccgcatcaggaatgaccctgacgacccagaggctaccaagcgcctgaagctcgccatgatccagcagtacctgaagctgtttgatgaagacaatccag

SEQ ID NO: 863457 - DNA, 98 bp, Homo sapiens
gcgggctgacgggccggagcccgcacggagcggccgggcgggacagaaagtgttgtgaagagcgaagacttttcgctcccagcttatatggatcggcg

SEQ ID NO: 863458 - DNA, 98 bp, Homo sapiens
atttctcctttcactgctgtcaatgacctgggacatctgcttgggagagctggctttaatactctgactgtggagttgtatcccgcattttgtattca

SEQ ID NO: 863459 - DNA, 100 bp, Homo sapiens
agaaaaacttcctgaaagcttaatgcccaaactgattgatttggaagattcagcagtgggtcggaagcagttcatgaggtttgagtgggcaaactacgca

SEQ ID NO: 863460 - DNA, 100 bp, Homo sapiens
gaggcgacatggggcacccggtgtaccgcggcgagaagccccagctgcactacgcgctctgtcaggattgccacaattccagcctttggcactattatgg

SEQ ID NO: 863461 - DNA, 100 bp, Homo sapiens
tgggaatgcaagtaatcctaataaggcggatattcctgaacgcaagaaaagctccactgtccctagtgaagaagaggaaaggctatgaagatgatgatta

SEQ ID NO: 863462 - DNA, 98 bp, Homo sapiens
ccagtacctgcccaggaaactggcaagccaaaattccttccggatagaatatgatacctttggtgaactaaaggtgccaaatgataagtattatggcg

SEQ ID NO: 863463 - DNA, 100 bp, Homo sapiens
actggagtccggctttaactatttctaaagttctcctctccatctgctcacttcttacagattgcaaccctgtttccagagatgaatgatatgctgagag

SEQ ID NO: 863464 - DNA, 99 bp, Homo sapiens
ctggatcgggtctgtcatacacggaggaagcggctgttctacataagagtgcccaggagtggaatctggaaatagagtctacatttgatgttgtcagct

SEQ ID NO: 863465 - DNA, 100 bp, Homo sapiens
ttggatcccggctcctcgggctcccacgtggagatctcagaatcaagtctcgagtcagattctgaagcaggtcgggtcacaaatcttcgaagagtgacat

SEQ ID NO: 863466 - DNA, 100 bp, Homo sapiens
ctcagaaacaccacagaaatcgtgacaacgtctgcagatgatgataattccgaagaaggcttccacactattcattcaggaaggcatgaatatgcattca

SEQ ID NO: 863467 - DNA, 100 bp, Homo sapiens
caaaggcagcgcaaaaaacagccaccgattttgctatgtctctgagctgcgaggctccttttctgggcagtggagggactatagctccatcatctttttc

SEQ ID NO: 863468 - DNA, 100 bp, Homo sapiens
tttgaatttgaaaacggtaacatcgcagtgctgctcgcgggtctggctagtcaggcgaagtttgcagcaaaaccatattcctgctgctgtcagttttgat

SEQ ID NO: 863469 - DNA, 100 bp, Homo sapiens
ccaaacctgtgataacctgtctcaaaaccctcctcatcatctactccttcgtcttctggatttttaaagagcgagaagaagatttgaggcgtttgtctcg

SEQ ID NO: 863470 - DNA, 100 bp, Homo sapiens
agcgtgtgtggggtcgagcttcctgataacgaggctgtggagcagcacagagctgccaaatgctgttaaatcaactgagagaaatcacaggcattcagga

SEQ ID NO: 863471 - DNA, 100 bp, Homo sapiens
ctcctcctgagcactgtcgtatcctatatcatgcagagaaaagagatggaaacttacttgaagaaggtctgtagcatctctgtctgttggagaaggcaca

SEQ ID NO: 863472 - DNA, 100 bp, Homo sapiens
gtgaaggcaatgatttataccatgaaatgattgaatctggtgttatcaacttaaaagatgccacctctaaggaaccttccctgtatactgtcaaagccat

SEQ ID NO: 863473 - DNA, 98 bp, Homo sapiens
cgagcaggctgagcgatacgacggtgggaatggaagtggccccacatctcaaagaaaccctaaataagaacttttttgacttcctccttacgttcaaa

SEQ ID NO: 863474 - DNA, 100 bp, Homo sapiens
tgaaagccctacactgctgtagaggtcatgctggaagtgtagattctatagctgttgatggctcaggaactaaagtagctgctggtgctgttggattagc

SEQ ID NO: 863475 - DNA, 98 bp, Homo sapiens
gccgggatagaaaactacacgtcccaatttgggcctgagccccccaagatgaacccagtggtggagccactgtcctggatgctgggcacctggctgtc

SEQ ID NO: 863476 - DNA, 100 bp, Homo sapiens
tgctagtgactggcgcgtacgagatctccgaccagtctgggggcgctggcggcctgcgcagccacctcaaggcaatggtggcttgctatccgggaaatgg

SEQ ID NO: 863477 - DNA, 100 bp, Homo sapiens
agcgcgtcggctgcggttctctctcgaccccttctgcccggcgcttcggcccgggccgctcaggtgcagagaagagcaagttagtaccttgtaccaaaac

SEQ ID NO: 863478 - DNA, 100 bp, Homo sapiens
aaacattcaggactactttaatccagctactctacctctaacacagtacctgttaacaacttttttgctccactcaagcctgttagaatcaccatggaat

SEQ ID NO: 863479 - DNA, 100 bp, Homo sapiens
caagctgactccaactgtgggttcgcagaggaatacgaaggtctgcggaagagggagctgctgaaggagctgctaccagtcatcgggcagaacctccgat

SEQ ID NO: 863480 - DNA, 100 bp, Homo sapiens
gcttcagtgtggagtaattgacactttcgagctagccgatggcggagtctcttctcttcaactgcctcactggcttttccttatagtcctgttgcaagac

SEQ ID NO: 863481 - DNA, 118 bp, Homo sapiens
cagcatgcactactacctgaacaacatctggcccgcccacaccaacattagtgaccagaaggatcccaaggatcgaatggttcaggttgtgaaatggtacctctcagcctttcatgcg

SEQ ID NO: 863482 - DNA, 98 bp, Homo sapiens
cgggagcggcgccgagaggccgtgcgggacgcgggcgccaggaccggccgaacgcagagggccatgaagcccccaggaggagaatcgagcaatctttt

SEQ ID NO: 863483 - DNA, 100 bp, Homo sapiens
ggaatttgcagacttctatgattttagggagaaaactggttgtcctggatgtttgaaaagttggtcgttgtcatggtgtgttacttcatcctatctatca

SEQ ID NO: 863484 - DNA, 100 bp, Homo sapiens
ccaaaatgtggccagattgcagggagtatcaaatatgagaaagctaggccatctgaataactttactaaggccttgaaccggggcattgctgctgtcaag

SEQ ID NO: 863485 - DNA, 98 bp, Homo sapiens
tcgatgatcgtgtgtcggatgaggagaagcaagttgtcctcgaagaaggtacaattgcttttaaaaattgggttaaaacaggcacagaagtttacaga

SEQ ID NO: 863486 - DNA, 98 bp, Homo sapiens
atatcttcacttggcaaactcaacaaggttaacacagaaatctgcctcctgggccatgccgcttctaaggcctgtttcttctcatgagccccagcaca

SEQ ID NO: 863487 - DNA, 101 bp, Homo sapiens
gagtacctggtgggctggcagagcataagtacatccaggttaatttggagtggcccctggagtcagtttcctacaccatccgaggccccacccagcacgag

SEQ ID NO: 863488 - DNA, 100 bp, Homo sapiens
tttctaacaccactggctacaatgatcgtgctgtattggagagagaagtccaacttacagattccagtctgctgttagatgattattcatccaagttgag

SEQ ID NO: 863489 - DNA, 100 bp, Homo sapiens
tgactgaaggtgaagaccagtttgatgctgttgttggcctactgtacccctgtatcgacagtcacctcggagaaccccacaaatttaagagagaatgggc

SEQ ID NO: 863490 - DNA, 100 bp, Homo sapiens
gtgtattgtgggatgactccaaaactttgaggtggtatcaacatcctacagaagaagaattaagaattcttgcagggaaacaacaaaaagggaaaaccaa

SEQ ID NO: 863491 - DNA, 100 bp, Homo sapiens
cgagtatacatgcaaagcttccaatgagtatggcagtgtcagctgtacagccacactaactgtgacaggtacccgcaagatggagtacaagggcagcagc

SEQ ID NO: 863492 - DNA, 100 bp, Homo sapiens
aagtaaagcccacagagatctacaaccttggagcccagagccacgtcaaaagcacagcaatggaggaaacagctatatgggaacaacatacagtgacgct

SEQ ID NO: 863493 - DNA, 99 bp, Homo sapiens
gtctttctcagcaccttggcgaagccttgggtttctttcttaaaggactgatttttagaactccacatttgaggtgtggatgaggtcaccattgtcaac

SEQ ID NO: 863494 - DNA, 98 bp, Homo sapiens
tggccaagaagatcatcattaaggacggaggcacgggcgtctctggccgagcctctttttgtggaaaacgacagcagcagcagtggcctggaagacgc

SEQ ID NO: 863495 - DNA, 100 bp, Homo sapiens
atttttgggaaggtgcaaggggtgtttttccgtaagcatactcaggttcgaaaacatggccaaaagaaatgccgagaaggaactgacagataggaattgg

SEQ ID NO: 863496 - DNA, 98 bp, Homo sapiens
ttactgctgcacacctaaagtcaaggatgctgtctttgcaggtgccatgcctacaatggcaagcatcaagctgtctacacttcatcccattgtgaatc

SEQ ID NO: 863497 - DNA, 98 bp, Homo sapiens
tacctggcattgacctctcagatcccaaacaactggcagaatttgctagttggtagctggcagtgttgtgatggcttttgaagaagtatgcccggaca

SEQ ID NO: 863498 - DNA, 100 bp, Homo sapiens
gctttgcttttgttgaatttgaagatccccgagatgcagctgatgcagtccgagagctagatggaaggcgtaatagattggaactcagtgaagacacaga

SEQ ID NO: 863499 - DNA, 98 bp, Homo sapiens
aatctgttgcttcttgcatggactcaatgatgaggcacggcggctcattgctgatttggggagcacatctattactaatcttggttttagagacaact

SEQ ID NO: 863500 - DNA, 100 bp, Homo sapiens
gtggagcaagatgagttgcagcaagtcatacgggagaaactgtgcatgaagtggccctgaaggacaaggagcctgacactcaggatgcagatgaagtgaa

SEQ ID NO: 863501 - DNA, 100 bp, Homo sapiens
agaaagctggtaatagatgtctgacaaactaaagaaagacttgtgttacaggaattccagggaagaaatgtggtacaatcatacttacagcagaggaatt

SEQ ID NO: 863502 - DNA, 99 bp, Homo sapiens
actagtttcccaaacagatgttaagacattcttggaagccttaccgatacggtactgaagtttctactaagaacacaccatgctcagagaacaaacttg

SEQ ID NO: 863503 - DNA, 98 bp, Homo sapiens
aaaagccatgaagagattaatggcagagtgcctcaaaaagaaaagagatgagagaccactctttccccaagaatgtatcctgtcaggtataatgtcag

SEQ ID NO: 863504 - DNA, 100 bp, Homo sapiens
tttccttttgtatgctactggccttttctacacttgtcagaacactatgtggctgccgtgtaagagtggaactgtcgaatggtgaaaaaagaagtagaaa

SEQ ID NO: 863505 - DNA, 100 bp, Homo sapiens
cggagattgacaatcaatgggccatcttggacgctacctgcttcagcctagatcctgccatgaagcggactgctgctccctggctcccactctgatctgc

SEQ ID NO: 863506 - DNA, 98 bp, Homo sapiens
ttttaaggagaaaatatttattgctttagcatggatgcccaaagctacagtacagagtgaattactggaactgaaacggcagcagcaagagcaagaaa

SEQ ID NO: 863507 - DNA, 100 bp, Homo sapiens
atggagaataactcatcagaatcatcttttgcagattcttctgtagtttcaggtctagatgttgatggaatatatcgagttagtggcaatctggcaacaa

SEQ ID NO: 863508 - DNA, 100 bp, Homo sapiens
aacttggcattttagatctaattcaagtgactctgacatcattagaagcatgccagaacagactggtgaaaagtaaaccttttcacctacaaaatttcac

SEQ ID NO: 863509 - DNA, 100 bp, Homo sapiens
ctctgcagtggaccacagcattcctgaaatacatccaggaaagacatggagattctcttaaaaagattttacatcctgaagtccaaactctagatctacg

SEQ ID NO: 863510 - DNA, 100 bp, Homo sapiens
actccagggctggcgttgtgaagaccatgacaggaggccgagcgcagagcattggcaggaggggcaaggtggaacaggctggcctgccactcctcctgct

SEQ ID NO: 863511 - DNA, 100 bp, Homo sapiens
gccccctcacatctatgccatcacagacaccgcctacaggagtatgatgcaagttcaaagcagtattcagcgatttcaagagaagttttttatttttgct

SEQ ID NO: 863512 - DNA, 100 bp, Homo sapiens
gtacgatgatgaaaaaattatcagtggcctacgagataattctattaaggatcttagaaatgaagttgaaaaattacgcaatgaagtgaatgaaagagag

SEQ ID NO: 863513 - DNA, 98 bp, Homo sapiens
cgcatatggtatccctcaacctacaatcaagtggttctggcacccctgtaaccataatcattccgaagcaagagatagaatctcactatgttgaccag

SEQ ID NO: 863514 - DNA, 99 bp, Homo sapiens
agcacgtgctgggcacggtggggatgtgcatcctcatcatgcaggaggaaacaccaattggaagcctccgctcaactgtaagatttataactacctgaa

SEQ ID NO: 863515 - DNA, 98 bp, Homo sapiens
cggcacaaggacgttctcaagtggggcgatgagatcctggtgtatagcctggaagcaggacgccgcctcttgaagctgggtaacgttctccgtgactt

SEQ ID NO: 863516 - DNA, 99 bp, Homo sapiens
ggattgtggccctgaatgcccacaccttcctgcgtaatggaggacactttgtgatttccattaaggtgataacgtggtgctggaccagacctacctgtg

SEQ ID NO: 863517 - DNA, 100 bp, Homo sapiens
gggcgagcgcgagaagtacaactacgagttccagggagctctgtcctggtgaccgtgcccgggttatgacgactaatcccaaaccgaataaggcattaaa

SEQ ID NO: 863518 - DNA, 100 bp, Homo sapiens
gatggtgccaagcagcacaatctaacagcagtcaatgtccgaaacatccttcatgactagtcaaggatgtgtccacatcatagtggctcagaccaaagac

SEQ ID NO: 863519 - DNA, 100 bp, Homo sapiens
ggtggtgacaagaacggcggtacccgggtggttaaacttcgcaaaatggtgggaacatccagttgcaggaaaacaagcttaacacgcccactgattctac

SEQ ID NO: 863520 - DNA, 100 bp, Homo sapiens
caatatagtttggtgtttcggaagccaaggattccttaggatactgtggtgagaacaaggagaagaaattacttatgtttaaaagagttcaggaagcaga

SEQ ID NO: 863521 - DNA, 100 bp, Homo sapiens
gctaagatgccaggaccacctggaagcctagaaatggttgcttctagaactgctggagttactgtttgacaagtttaatgctgtagccgctgcacactct

SEQ ID NO: 863522 - DNA, 98 bp, Homo sapiens
aacgtggacaaagctgttgtctcagggagcacagaaaaatacaggtatcaggatgaagatacacctcctcaagagcatatttccccacaaatcacaaa

SEQ ID NO: 863523 - DNA, 100 bp, Homo sapiens
cgccaagatgccgcagtccaagtcccggaagatcgcgatcctgggctaccggtctgtgggttaaaaaggccttctttgctttggtagccaacggtgtccg

SEQ ID NO: 863524 - DNA, 98 bp, Homo sapiens
agtttgatgatgccgtcagtatcactgtgttccatgccattgcagtgtcaactaggcctcagttacttttcagtttgcccaaattgagcccatctcaa

SEQ ID NO: 863525 - DNA, 98 bp, Homo sapiens
gcagtccagaaagcggcttatcgaacagagccgggagttcaagaagaacactccagagcaatgaggtcttactgtgtagcccaggctgctctggaact

SEQ ID NO: 863526 - DNA, 100 bp, Homo sapiens
gatagagccaaacaatcttttcaagcggagctccctgggtcctcagcagtgaggctggcctccctgcgtgacctgcccgcccagctcctggagctgtacc

SEQ ID NO: 863527 - DNA, 98 bp, Homo sapiens
ttagatgcaagtgatgatggaatcttggccaaaatcgtggaaatctatacctttggaagaatattgggaaaagggagctttggaatagtcattgaagc

SEQ ID NO: 863528 - DNA, 99 bp, Homo sapiens
gcgtagacagtggcctcgagaccctgcctgcctgaggaggcctcggttggatgcgaaggagctgcagcatccagattctccgggcccaaagccgaagtg

SEQ ID NO: 863529 - DNA, 100 bp, Homo sapiens
gtttggggcacgtccagcctctttggagcggacaaggcaaaatctcagcaagttcggacctctagtacaataaggcgaacctcctctttggatacaataa

SEQ ID NO: 863530 - DNA, 100 bp, Homo sapiens
cagcaaaatttcagtggagagcattccatccctacggggctctatcactcaggtataacccggaaaaatcccagaacacctctttctgatctccagggca

SEQ ID NO: 863531 - DNA, 98 bp, Homo sapiens
atcgccccagacatggggaacgcggcgaccgccaagaaaggcagcgaggtggagagcgaatgattgaagatagtgggaaaagaggaaataccatggca

SEQ ID NO: 863532 - DNA, 99 bp, Homo sapiens
atggatgctgaccggggagtcaatgctgaggtccactactccctcctgaaagataccaaagaggatccctcattgaaggatgttgaagatactatggtg

SEQ ID NO: 863533 - DNA, 100 bp, Homo sapiens
agatgacggatgaaaagaatgaacactgtccttcaaaacgagaatctatcttctggatttaatctacattgattctgcatatcctgcctcaggcagtatc

SEQ ID NO: 863534 - DNA, 100 bp, Homo sapiens
caaatagccatggacgtgatggaacgctgcatccacttgttgtcagataaaaatctgcaaatccgcctgaaggtctcagccttagatccaaggacagtcc

SEQ ID NO: 863535 - DNA, 100 bp, Homo sapiens
agagtactcctttctggactatgtgatgggaggctgtcagatcaacttcactgataccaagggtttggtggacttccgagatgtggcccttgcactagca

SEQ ID NO: 863536 - DNA, 99 bp, Homo sapiens
taaaagacctttaaatcctttggcttctggtcaagtgctacagttgaaactccagcagcgccggacccgggaagaactggtgagccaagggatcatgcc

SEQ ID NO: 863537 - DNA, 100 bp, Homo sapiens
tggaccaggagatcaacaggatcctcttggagcagaagaagcaggaccgcggggagctgaagctgctgcttttgggtttggctcagaagaaggcggcccc

SEQ ID NO: 863538 - DNA, 100 bp, Homo sapiens
tggatacaactcagatcttaagtagtgatatttctcttttgtctgcccctattgtaagtgcagatggaacacaacagccccttcatgaataagttttttc

SEQ ID NO: 863539 - DNA, 98 bp, Homo sapiens
cggggccccccagcctccgccaacccagggattggagtttggaatcctgccttcgatgtcaccccccacgacctcatcactggtggcatcatcacaga

SEQ ID NO: 863540 - DNA, 98 bp, Homo sapiens
tgtgttcttcactgcatgatttcaaaagagttgaagtattgataacaccaaggaactctatcacaatttgaaaagataagcaaaagtttgatttccag

SEQ ID NO: 863541 - DNA, 98 bp, Homo sapiens
ctgagtttacttctcctccttctttgttcaagactgggcttccaccgagcagcttgcctttctcacttggcaaggaagatggaagtggggacagagga

SEQ ID NO: 863542 - DNA, 98 bp, Homo sapiens
atcaaaggataaacttgaccaggtttccagtgaaataagtttcaccaaaactcatgccaatgcagcagatcgcaaattgaaatatggatatttgtacc

SEQ ID NO: 863543 - DNA, 100 bp, Homo sapiens
ctgcttttggtttccctggcaggggttgaactgtggagtgtgtggattgagaaaatcatgagttctattggagaagggattgacttttctcaggaacggc

SEQ ID NO: 863544 - DNA, 100 bp, Homo sapiens
cgatgccccatgaagtggagatcgcacacaccaagaagctgttccgcaggaggagaaatgatcgaagggaaagcaggcaggatgggagagtcgccgatag

SEQ ID NO: 863545 - DNA, 99 bp, Homo sapiens
accgagagagtgaggagccagacgacaagcacacactatggcgctgaaacggattaataagaagctatgtggaagcagtgacctgaatgcttctatgac

SEQ ID NO: 863546 - DNA, 100 bp, Homo sapiens
tcggggatcggtcgcctgagagctccagtggctgttggataattatgaaacagcggaaggtgtgagtctccccagaagttctctttacaaccactacctt

SEQ ID NO: 863547 - DNA, 100 bp, Homo sapiens
aacagagtcctggcgggagactcttctggacagcagagttatggagcttttcttcacacagagagagatcatcattgcctgaatttagctttgtgactgc

SEQ ID NO: 863548 - DNA, 100 bp, Homo sapiens
tttcctcaacttggccctgcctttctttggtttctctgaaccccttgccgcaccacgtcaccaggacagagcgggatgccaccagcttgtccaaagggaa

SEQ ID NO: 863549 - DNA, 100 bp, Homo sapiens
ctggagctgtctttatcctctgtgatgtgactcaggaagatgatgtgaaggtaagccaagatgggtgcatacaagtacatccaggagctatggagaaaga

SEQ ID NO: 863550 - DNA, 98 bp, Homo sapiens
ttgctgagtacttgcactgggatgtcacggaagaatgtgaagttcgacttgtttgcaagatgcagtcatcatttacatcttcagaacaagagctagag

SEQ ID NO: 863551 - DNA, 100 bp, Homo sapiens
gatcgtcttcagctgttcatagcattgaagagggcagtaaagccgcggcggtcgacaagttactggctggagatgagatcgtcggcatcaatgacattgg

SEQ ID NO: 863552 - DNA, 100 bp, Homo sapiens
ttttaggaagaaggaatggaggctttgaagtttggaagaggacagttgccctttattctggcggcagatagcagcaggtgaaaaagtgctacacaagttt

SEQ ID NO: 863553 - DNA, 100 bp, Homo sapiens
acgggacccaaatgtcaaactaccaaatgggcgagacacacctgcactcttcaacttcaccactcaagttgtatatgaacacagatcaagattagagaaa

SEQ ID NO: 863554 - DNA, 98 bp, Homo sapiens
gagtcagcagctgcagtgtggaaggtcgcaatggaagaagagatcgccgcgctggtcattgacaatggctccggcatgtgcaaagctggttttgctgg

SEQ ID NO: 863555 - DNA, 98 bp, Homo sapiens
cggagcttctcagaagacagagggttttcttttgaggtgttaacagaactgaaatccgacaaccagaggctgaaagatgaaaatggtgccctcatcag

SEQ ID NO: 863556 - DNA, 100 bp, Homo sapiens
tcctcaagaagacaggcaaggaggtggtgctggagggtttcacagatggcagtgttacattgaacaaaggagacatcacccgggaccggcatagcaagac

SEQ ID NO: 863557 - DNA, 100 bp, Homo sapiens
atgtctcagagaagaacttatcagagattgagaatgtccatggatttgtttctcattctcatatttcaccaataaaggtgacatctgttcccgagctgtt

SEQ ID NO: 863558 - DNA, 100 bp, Homo sapiens
ccctggcagaagtgttccaccagttgcacgatcctcaccgcaacattccttatccaatcccttaccgaccatggcaaaagttataaccaccgtactgaag

SEQ ID NO: 863559 - DNA, 100 bp, Homo sapiens
tcaatgcacgcaagatgaaatttgctctgctaaaaggctccttcagtgagcaaggcatcaacgagtttctcagatctacacagactgggccaatcattac

SEQ ID NO: 863560 - DNA, 100 bp, Homo sapiens
agaaactagaatctttctacattcaaaacttacaaaacactacacagcaaaataatgatctgctagactgctaacccgagcatccagcttccacaatgcc

SEQ ID NO: 863561 - DNA, 100 bp, Homo sapiens
gcaatgatgatgtgaaaacagaagctgtggctgacactggggttgggaaatcaagcatcgtgtgtcgatttgtccaggatcactttgaccacaacatcag

SEQ ID NO: 863562 - DNA, 100 bp, Homo sapiens
tttttccaaacctgtgaaaaagaacttgccaaaatcaacacattttattcaggctggctacagcaaacatcattcaagatgtccagcaaagggagcagca

SEQ ID NO: 863563 - DNA, 98 bp, Homo sapiens
gatgcttctgtggaagatgatgcttttatcaagctatcagaggactcctgaaacctggagagctacctgctgtataaaggctggcctgagggcatttg

SEQ ID NO: 863564 - DNA, 100 bp, Homo sapiens
ttgataacactggagatcagcaccaaatcccacagaggcatctgagtggctgccttttctctatcctctttcctttattcattatcagcgccaatgaagc

SEQ ID NO: 863565 - DNA, 98 bp, Homo sapiens
acctgcctttcgccttctgccatgattgggaggcctccccagccacatggaacttgatgatggccaaagagaagccaccgataactgtagttggagat

SEQ ID NO: 863566 - DNA, 100 bp, Homo sapiens
gtccggacccactggctgctggagcttgtcaccaccagccctgccaggagcccggaagtgggtccgcacgagacagaatagactacactcaaactccagg

SEQ ID NO: 863567 - DNA, 98 bp, Homo sapiens
ctgaagagcccagagttccaccaactaaagaatgtgcccccagacctctccatctgcacctttgtgctggagcagtccctctctgtccgggcgctgca

SEQ ID NO: 863568 - DNA, 100 bp, Homo sapiens
cccttcctgctctccagcaagtacggtaacacaagtggcaagacagccgggaacccctaccccatccccttattcagcacatgaaataaacaaggggcat

SEQ ID NO: 863569 - DNA, 100 bp, Homo sapiens
gatggatcttttcaggaagctattatcagcaagttgacagatgctagttggtataccgtgggttgttttggaaaccgaaataacaaataagtccgctttg

SEQ ID NO: 863570 - DNA, 99 bp, Homo sapiens
acgagagaacccccgcatcctgtttttcctgagcaaccagagaaaccacttgaccttgcacatatagtgtacatgatgatgagggactgttggcatgca

SEQ ID NO: 863571 - DNA, 100 bp, Homo sapiens
aagggagctttgaaaggtccaagcactttgccatcacagtctgtgacggtctggacatcagccccgagaggcatgatggaagtggttcattgcatgatat

SEQ ID NO: 863572 - DNA, 100 bp, Homo sapiens
agagaagctgcagctgacttacatggaggagacgtgtcgtcactatgtggcccatgtgaagtgtttagccctccaggcccaaatcacagctctcaccaag

SEQ ID NO: 863573 - DNA, 100 bp, Homo sapiens
agtgttgtacaacttgtgtcgtccagtaaagaagataacctcaatcatggccataccgagcagtttgtcccatgaggagcacccccatagccatcctctc

SEQ ID NO: 863574 - DNA, 109 bp, Homo sapiens
tgaaagagttattgcgtatcttcttttccaaccatgcagtagaagtcggattaaaccttatgattctgcagatgactggtctgagcatattagctcttctgggaaaaag

SEQ ID NO: 863575 - DNA, 98 bp, Homo sapiens
cagctccttggggtttccggctgcagggcggtaaggatttcaacatgcctctgacaatctctagtggtgaaaatcctatttataagagtgccgtaaca

SEQ ID NO: 863576 - DNA, 98 bp, Homo sapiens
gacacaacaggggagcagttcctcacttatcgctatgatgaccagagttcacatgagactctgaatatagtggaggagaagaagcgggcagaggttgg

SEQ ID NO: 863577 - DNA, 99 bp, Homo sapiens
gagactcctgctcagtgtagcattaaggaaacccagcgtttgctggcagaaccagttcctggcatcaaagccgaaccagatgagagcaacgcccgttat

SEQ ID NO: 863578 - DNA, 100 bp, Homo sapiens
cggcagctccaaccatgggaggccgcgtctttctcggctaaatgctcattttgaagtaaatccagattgttctgtttctcgagcagaaatgtattctgaa

SEQ ID NO: 863579 - DNA, 100 bp, Homo sapiens
gaaaagtcgcagcgagctggagccgccggaggttaaaaaagctccttgaacaagaaaaggcttatcaagcccgcaaagaaaaggaaaatgctaaacgact

SEQ ID NO: 863580 - DNA, 98 bp, Homo sapiens
ctgcaagactctggagccagtcttgaggtcctacatctccgaaagcaagctcttctagaagttggctctactacccgaaggatagtgcccgaagttgc

SEQ ID NO: 863581 - DNA, 98 bp, Homo sapiens
gaattgcactctaatgaagcaatacattgagtttgtggcagacagacttatgctggaactgggttttagcaagttggtgttggtattaggagatctgc

SEQ ID NO: 863582 - DNA, 100 bp, Homo sapiens
gagaccattgctgaggtataccccatcagagtacaaccagctcgtattctcagccacatttattccagcctagggaatctgaagcatgtggtctagttga

SEQ ID NO: 863583 - DNA, 100 bp, Homo sapiens
caaccacgttctccaatgcaatgctgtttgccctgaacatcatgaattcccaagaaggagatttcctttcctggatgaaaatgttgtctcctttctaaat

SEQ ID NO: 863584 - DNA, 100 bp, Homo sapiens
cagaagcaacgggagcacccagctctgaacaagaaggaacacagagggtgcgacagcccagaccctgatacttcatatgtgctaactccacatacagaag

SEQ ID NO: 863585 - DNA, 98 bp, Homo sapiens
gggcctcggacacctcggcctggagtccctgcaggaagcatcacccaggctggcagatcatggtagcagcagcgggggtggctgggaagtgaaacgga

SEQ ID NO: 863586 - DNA, 100 bp, Homo sapiens
tctgatgatgctgcctacacacaaggttatgggagaagatatcccagaaaaaataaaagatgaagttcacccagaggtgaagtgtgttggctccgtagcc

SEQ ID NO: 863587 - DNA, 98 bp, Homo sapiens
attaaaaggaccatacgagtcctagatgtcaataaccagtccttcagagaacaagaggacttctgcacggacctggccgtctccagtgccaacttcat

SEQ ID NO: 863588 - DNA, 98 bp, Homo sapiens
ccaacgttgagcaagatgcagaaaccaacagacaatgccaatttacgtgtcattatggaactacttatgaggctgtggatctttccattgatgagtcc

SEQ ID NO: 863589 - DNA, 100 bp, Homo sapiens
tcaccagtcacatctcttactactgctagtcgctgcaacactcctctacagtttgaggttggatggcaagcatgtggtgtttggcaaagtgaaagaaggc

SEQ ID NO: 863590 - DNA, 100 bp, Homo sapiens
taggatcatggcttactgcagtctggaactcctgggctcaaaccatcctcccacctcagccttgagttcattttgaatcaggattggaatgaccccaaat

SEQ ID NO: 863591 - DNA, 100 bp, Homo sapiens
ggaaaactgggccaaagcagtgaaacgctccatgaattgtatgctcaggcttcagaagaggctcgcctctagtgtcctccgctgtggcaagaagaaggtc

SEQ ID NO: 863592 - DNA, 99 bp, Homo sapiens
gagaacagagaagggagctctatagtcggagtggagaactgcaagctggttcgatgcccagaactgaatgctgtgctccagctgtggcctcaccggtgc

SEQ ID NO: 863593 - DNA, 132 bp, Homo sapiens
ttgctgccaccttatcttagagttattcaaggggatggagtagatattaataccttacaagagattgcccgtgaggcagaggctgccatctaccacttgcaattatttgaggaactccgccgcctggcgccc

SEQ ID NO: 863594 - DNA, 100 bp, Homo sapiens
ggtggtaaagacacttgtgggaaactggcgatggaatatgagaggagccctctggaaagaaaaggacagaccctgtgctttcatgaaagtgaagatctgg

SEQ ID NO: 863595 - DNA, 99 bp, Homo sapiens
cgctgccggttcaggtgtttaacttgcaggttggacgtgataagtatgagcctgcagctgtttcagaacaaggtgataaaaagggcaaaaagggcaaaa

SEQ ID NO: 863596 - DNA, 100 bp, Homo sapiens
caacagtggagatattcaataagctcaaccttgaacagctttcctggggtttgatgtatgctggcttcatccttatcatggccactttaatggctcttat

SEQ ID NO: 863597 - DNA, 100 bp, Homo sapiens
gaggagcggctgctgctgctgctgctgctgctggtggcccctttgcagcccgaccattttgttcaggaccctgcagtgctgagagagaaggcagaagcca

SEQ ID NO: 863598 - DNA, 100 bp, Homo sapiens
tggtaatgtcggccattgagaaattgttgaggcaggcaatgaatcgctccctggctaatgtgattcttggaggctatggcaccacttcaacagctggtgg

SEQ ID NO: 863599 - DNA, 99 bp, Homo sapiens
ttggagggagagatgcaaataccagcccttgccctgttggatgaataggcacctctggaagagccaactgtgtgagatggtgcagcccagtggtggccc

SEQ ID NO: 863600 - DNA, 100 bp, Homo sapiens
aacttcttcagaattagaaaggagctgcttcccaataaggaaacagagcccctcaatagtgaagatgatgtgagtgatgaggaaggacaggaactctttg

SEQ ID NO: 863601 - DNA, 100 bp, Homo sapiens
agatcagattccgatttgacgggcaaccaatcaatgaaacagacacacctgcacaggtgagtcgttcctctttgctaatagaacagcctgtgaaaaaacg

SEQ ID NO: 863602 - DNA, 100 bp, Homo sapiens
tttgtgacagcacagtcattcattgccatgtggagaaaaatctctttggcagtaacagtcttgatggaggaagcagccctatgatcaagcccaaaggaga

SEQ ID NO: 863603 - DNA, 100 bp, Homo sapiens
agacaaaattggagagactgccatgaagcaagagaagtttcggtgtccgacatccctgtctgttgttaaagacagaaacctaactgagaaccaagaagag

SEQ ID NO: 863604 - DNA, 98 bp, Homo sapiens
atgcgcaggctcaacatacccgtactacaggatgatggctttctcttcctctgggtcacaggcagacacctagctcccctgtttgacaaccctaagtt

SEQ ID NO: 863605 - DNA, 100 bp, Homo sapiens
cgggaacttttcaactgacttttacttttgacgaccaccatgactgagatcactgctgaaggactatgatttaatctccaaagaaccaaagccttttgta

SEQ ID NO: 863606 - DNA, 100 bp, Homo sapiens
ctgtgggcaagtgccgaagcgcaggcatcaagggtcactgaaatgggacgacatgaactcaaggaggctatttatgaccatgtcatttgcaacatgaaga

SEQ ID NO: 863607 - DNA, 100 bp, Homo sapiens
ttccatggcagcaagcatcactcagtgcctatttctatctatcgttcccctgtttcccttcgaggaggacacgcctaaattatacagatctgtgattgaa

SEQ ID NO: 863608 - DNA, 100 bp, Homo sapiens
cttgcacaacgaggacgccttccagcacggcatctgctttgaggccaagggttctccaaaaaatgtggaatcctttgcatctatgctgagacattctcct

SEQ ID NO: 863609 - DNA, 100 bp, Homo sapiens
tcaaagcctctgtcaccacaccaaaatacaaatggggatctgtgactcatcagagtgtgggggttgtgaaagacagccagctaaaggtgtggatgagcaa

SEQ ID NO: 863610 - DNA, 99 bp, Homo sapiens
gcaaaacagactttttcattggaggagaagaagggatggcagagaaggacaaggagagcatccagcgagtcctgcaggctgtggataaagccaatggat

SEQ ID NO: 863611 - DNA, 99 bp, Homo sapiens
gccaccgcaggtcgaggacggtcggactcccgcggcgggaggagcctgttcccctgagtcaggtcaattcagtgaagatatgatacccacagtgggctt

SEQ ID NO: 863612 - DNA, 98 bp, Homo sapiens
aggaacaggccaacaatgacttcttcctccttgctgagctcctgagtgactacattcgcctcctggccatagtccgccagcagtgttgtactgctact

SEQ ID NO: 863613 - DNA, 100 bp, Homo sapiens
agagagaacgcaaacagtttgaagctgaggattttgttctctgggagatgctaacaagggaggtcccctttaaaggtttggaaggattacaagtagcttg

SEQ ID NO: 863614 - DNA, 98 bp, Homo sapiens
taggagctggcggcgacggccacaggggcggcgacggcgcagtgcgaagcgaaacaggccgagtacagatgctgccccaggcggtgtgcctgctgcat

SEQ ID NO: 863615 - DNA, 99 bp, Homo sapiens
tcatctccaaaccttccaaaaagaagcagtcattgaaaaatgctgactgatcgaagtagaatgtatgacagtttgaatatgcactctttggaaaattcc

SEQ ID NO: 863616 - DNA, 98 bp, Homo sapiens
gtattcagcatagctattcctgttgatggtgatgaagacagaaactaattctgaagcaagcccttatagttgtgctgcagtggtgtttcaatcacaat

SEQ ID NO: 863617 - DNA, 100 bp, Homo sapiens
cgtccgcggcccgcgcgcccgcgcggcggaggagaggattgttcaagtttagaagaatacaacattgccgcagcattactccctttgaccagtgctttct

SEQ ID NO: 863618 - DNA, 98 bp, Homo sapiens
aacaggatcctcttggagcagaagaagcaggaccgcggggagctgaagctgctgcttttggatggtcatcatgggccagtgctactacaacgagacca

SEQ ID NO: 863619 - DNA, 99 bp, Homo sapiens
gccattatgggcagtgggattttgggactcgcctttgccctggcaaacactggaatcctactttttctaacatgatgagtgtatcacaaatcagcacaa

SEQ ID NO: 863620 - DNA, 100 bp, Homo sapiens
gagtccataccggagcgcaatggcgtccaaccccgaacggggggagattctgctcacggaactgcaggtttgatgaacttgtgaaaaaattcaaagtcga

SEQ ID NO: 863621 - DNA, 98 bp, Homo sapiens
gtgaggggccctgttagtctgactttgaagaagaccagccttccagactcgcttggtgccctgacaggtcatctattgggcgcagatacccacgtaag

SEQ ID NO: 863622 - DNA, 98 bp, Homo sapiens
atggaccagcctgaaatgatcttgaaggaagccattgaaaaccatcagaacatgattaagcagtttaaagatccggagttaggtgttggcacgctacc

SEQ ID NO: 863623 - DNA, 100 bp, Homo sapiens
cgcgtttggatgatttcacctgtgaaaaaatagggtctggcttcttttctgaagtgttcaagtactaaggctcgtacgtctgcatcgattatcttacgtg

SEQ ID NO: 863624 - DNA, 100 bp, Homo sapiens
tttttcactaattgtggcattcacaatatgaattgagaattcgttatttgccaaaaggatttctaaaccagtttactgaagataagccaactttgaattt

SEQ ID NO: 863625 - DNA, 98 bp, Homo sapiens
cagctctcctaatacggttgaccagtgagtccctctgtcgtgaaatcaagcaacgacgtcgaggagttgcctccattctgcgactatgccagcatctt

SEQ ID NO: 863626 - DNA, 100 bp, Homo sapiens
ccagtgcctcgagcgctcaggatggaggaagactcgatccgcctgcctgcgcacctgcagctggggtggaaaggagaatggctttggacttgcagaatgt

SEQ ID NO: 863627 - DNA, 100 bp, Homo sapiens
ccgctgaggtggacgtgtacaacccgacgaggaacgaatgggacaagatcccgtccatgaatcagtgtcttgggacaaggtgcgcattcctggtgtgctg

SEQ ID NO: 863628 - DNA, 100 bp, Homo sapiens
ttcaattcaagaatcaatgaatgaaattctatttgaagaataccagtttcaagcagtattaagagtaaatgggtgtactctgtgtgaccgcgcctatccc

SEQ ID NO: 863629 - DNA, 100 bp, Homo sapiens
aaatgggagttcactagctggggttcgaacctctgacatgggtggctatgctacttgccatgacttcactgaggctgtcattgctgccttgccccaccca

SEQ ID NO: 863630 - DNA, 100 bp, Homo sapiens
agacgttctcgtaaggacaaaacgggactggctagttaaacaaagaggctgggtggaatgaatcttacttgttgaatatcttctggttactagttggatt

SEQ ID NO: 863631 - DNA, 100 bp, Homo sapiens
aagatttccaatcatttctaaagttgaccccctgtttacagtgccagcgccaccaccgccgatttccagcagtctcacgcctcagattctaccctcctac

SEQ ID NO: 863632 - DNA, 100 bp, Homo sapiens
tacacagacgagcatggggaagatccacacaacttaaagatctgctgccgagtgaatggggaagtggtccagagcggcaacaccaaccagatggtattca

SEQ ID NO: 863633 - DNA, 98 bp, Homo sapiens
acagtcctcgtcagcactgactttcagctatggaatcggacctgaaggagaagaaggagaaggtggaggagaaggcaagccggaaagagcgaaagaaa

SEQ ID NO: 863634 - DNA, 105 bp, Homo sapiens
agaaccctacttgcctaaatgaggaatgtctttcctaccatctaaaatacgaaggtttctggctgggagccaggtgagaatttcaaggattatcgacttcatatt

SEQ ID NO: 863635 - DNA, 98 bp, Homo sapiens
tggcgggctccgtggaagcgtggccggcagcgtcccggacgaggaggtgtctactatgaaccatcctgtactcagaatgtgaatcatggtgtacttgt

SEQ ID NO: 863636 - DNA, 100 bp, Homo sapiens
agcagcgcctgttcccggggcagatccaggttcagatggctcagcgacttcttctgaggaggttcctggcctctgtcatctccaggaagccctctcaggg

SEQ ID NO: 863637 - DNA, 100 bp, Homo sapiens
ggatgttttgtccagggcagcatctctggtgcatgctgatgacgaaaaacacgagcatggtatctgtggagggcctcacaaagctggtggacccctccca

SEQ ID NO: 863638 - DNA, 98 bp, Homo sapiens
acgtcagcgggctgcagcgcgccaaaaccgggacggacaagaccctggtgaaggaggtcgtacaggatgagttccacccgttcatcgaggccctgctg

SEQ ID NO: 863639 - DNA, 99 bp, Homo sapiens
tggaatagtgctgtcttccttgttactaaaagatgtaactgaactgcagatccttggtgaaatatctttcaacaaatctctatatgagggactgaatgc

SEQ ID NO: 863640 - DNA, 100 bp, Homo sapiens
tacccacaccggaatttccaggaagaaatagagtttcttaatgcaattttcccaaggcattgacactgagaggcccattctgcaagtggacagctgtgtc

SEQ ID NO: 863641 - DNA, 100 bp, Homo sapiens
gacttggccatgtgagatacaaggctacacagagacagatcaaagcagctcatcgtattcacctagaaggcggccaagcccaagaaggcggccatctcct

SEQ ID NO: 863642 - DNA, 100 bp, Homo sapiens
caggaagactatgacaaggatggaattggtgatgcctgtgatgatgacgatgacaatgataaaattccagatgacagggagtactagatattcccatgat

SEQ ID NO: 863643 - DNA, 98 bp, Homo sapiens
tcacggtggccactaaggagaccgagggattccgtcgcttcaagcgctcagctcagttcttcaactacaagatccagcttcctgcctgacacagctca

SEQ ID NO: 863644 - DNA, 99 bp, Homo sapiens
ctcgaggttgcaggactctttctgttcaggccagaccctctgggagcttctcagccattttccacagatcagtgacaccaggtgaaagcagcaaaacct

SEQ ID NO: 863645 - DNA, 75 bp, Homo sapiens
ccagagaggcccgcccaccagttcgcccgtccccctgccccgttcacaatgggaaggcaaagaggaaattgtgaa

SEQ ID NO: 863646 - DNA, 98 bp, Homo sapiens
agtcatgatattatggtttgttttaggaattcatgatttgttcctgtagctgaaacatacattgaatgacaagcaaagtggatcagcaaaggctgcag

SEQ ID NO: 863647 - DNA, 98 bp, Homo sapiens
gaaatcatgctgtgttaactgctaacttttctgtaaccaacctgaatcaagattagaaggatggctttcattgcctgtacgaaacaacactaagaaat

SEQ ID NO: 863648 - DNA, 100 bp, Homo sapiens
agtgtatccacagccccgacctttgatgagaactcagctgtccagggtgaggacgcttgagcggaagttagaagcaaaaatgatcaaggaggaaagcgac

SEQ ID NO: 863649 - DNA, 98 bp, Homo sapiens
agacagtggtgattgttggtgaaacaggatgtgggaagagcacacagattcctcagaaacttgtggtggagaatgttgatgtgttaacacaaatgagg

SEQ ID NO: 863650 - DNA, 101 bp, Homo sapiens
aagctgcagatttgtttgtcatccttgtacagcaatctcctcctccactgccactacagggaagtgcatcacatgtcagccaactcagcctggttaagaac

SEQ ID NO: 863651 - DNA, 99 bp, Homo sapiens
cgaaagaggaaattccatgtcattgtagcagagtgtgctcctttctgccaggcccgaaagaatgaacttgccattgaagatatggatggcggtaccttc

SEQ ID NO: 863652 - DNA, 100 bp, Homo sapiens
tgtgcaagacatcatcacaaggaatcagaaggctggtgtgtttaagacccagaaaatatcaagctgacaagcaaagtggatcagcaaaggctgcagtcac

SEQ ID NO: 863653 - DNA, 100 bp, Homo sapiens
gacacaatcatctactattcatgatgttaagcaaaagtttcacaaagcatgtcctgtaagtagtgttttggtgaataaatacggcagccggccggtggtg

SEQ ID NO: 863654 - DNA, 100 bp, Homo sapiens
cctcggtgctgtggtgcagagctagttcctctccagctcagccgcgtagggtcaaagaattgactgtagatccaactgctgctggtgatgttcgtccaat

SEQ ID NO: 863655 - DNA, 99 bp, Homo sapiens
aacaccatggctgggtagttcgaggggtttttgcggtccttgaatgggcaagagggcacatgaagtacggcgtcctccacattcacggcctctacacgg

SEQ ID NO: 863656 - DNA, 141 bp, Homo sapiens
tgcaaaccatatatccaacactgcaaagcatttttatggacaacgaccacaggaatctggaattttattaaacatgcactctacacccccaagtgcatatgggtctgtcaaagcctatactaactttgatgctgagcggga

SEQ ID NO: 863657 - DNA, 98 bp, Homo sapiens
tcggaggaggagccggactccagatgttgatggcatggacctgggcaaaaaggtcagcatccccagagacatcatgttggaagaattatcccatctca

SEQ ID NO: 863658 - DNA, 98 bp, Homo sapiens
tggagctgttcaacagcatcgccacacaaggggagctcgtaaggtccctcaaagcgggaaatgcgtcaaaggcaggaatgggccacttgtgtgtaaca

SEQ ID NO: 863659 - DNA, 100 bp, Homo sapiens
tctgcattagaaaatcatccatttaccctcacaatgtcattgaagtcaacaagagagacatagtcttcctggtggatggctcatctgcactgggactggc

SEQ ID NO: 863660 - DNA, 100 bp, Homo sapiens
gcgtggtcaacatccctgccgcagaggtgcagtctttgcaagccacatttggaacttttgagtccatcttgagaagctcccaacataaacaagacctcac

SEQ ID NO: 863661 - DNA, 100 bp, Homo sapiens
tgatcacgcagctggctggcttcagtggaccagacacattcagctaacgtattttagcaggtggagtgaggttgaagattcctgtgacagcgatgccata

SEQ ID NO: 863662 - DNA, 100 bp, Homo sapiens
ctggggccagggaaccctggtcaccgtctcctcagttgactagataacgaaggacaatgcatatatacaaaattgctgtattgcctggtgatatgcagct

SEQ ID NO: 863663 - DNA, 100 bp, Homo sapiens
ctggattctttggggcccactgcagctcccgctgaaggtgatgtggccgccctcaaccgacgcatccagctcgttgaggaggagttggacagggctcagg

SEQ ID NO: 863664 - DNA, 100 bp, Homo sapiens
ataagttatgctatgaggatgacaaactctggagtaattggagccaagaaatgagtatagctcctgaaactctgatgagagccctggaacttttgaatta

SEQ ID NO: 863665 - DNA, 100 bp, Homo sapiens
ttcgagcccaggccaccataagcgtccttcagaacctagaggatcaagacataatgggagcatttttagacaagccaaagatggaaaagcataatgccca

SEQ ID NO: 863666 - DNA, 100 bp, Homo sapiens
ggaagtatgttaatttcatggtacatgagtggctatcatactggctattatatggtaacagactgggttgacccatcatttgatgattttctagagtgta

SEQ ID NO: 863667 - DNA, 98 bp, Homo sapiens
gaggagctgtgcagccgcgaggaggcgcgggaggtgttcgagaacgaccccgagacggcaaatgttgaacatctggtgcaaaagatgaaaacaactgt

SEQ ID NO: 863668 - DNA, 98 bp, Homo sapiens
agaagctctcactcaacattgccactgactgggagaagtctggcaagttgatgagcagatagatcactacaaggaaagccaagacaaacttccttggc

SEQ ID NO: 863669 - DNA, 100 bp, Homo sapiens
atgatttccatactattgattgggtgcgagaaaaatgtaaagacagagaaaggcatagacggatacctttgtctggatatggaggaacaagcaatcttat

SEQ ID NO: 863670 - DNA, 100 bp, Homo sapiens
ggctcaggcggggggagcggaccctgacaagttccagttatcccagatcactgaagctgagatggctgatgaagtaatttgcagtgaaattttaagcgac

SEQ ID NO: 863671 - DNA, 98 bp, Homo sapiens
ggaggagcgcatgcaacagaagtatgaggccagccgggaggacatctacaagcggattgctgacttgacctctgaccttgccgatgagcgcttcaaag

SEQ ID NO: 863672 - DNA, 100 bp, Homo sapiens
cccgggcttccagccctgagggtcgccacctcccttccccacagctaggaaccaaggaacttgctactaccagcaccatgccctaccaatatccagcact

SEQ ID NO: 863673 - DNA, 100 bp, Homo sapiens
gtttccccatctgtaaaatagaagcgatctaccctcacagattttctggcatccttaaatcttgtgtcaaggattggttataatataaccagaaaccatg

SEQ ID NO: 863674 - DNA, 100 bp, Homo sapiens
tggtccaggccttccagtacacagacgagcatggggaaggagctgaagaagaagctgttcaaacgccggcgggtgttgaatcgggagcggcgtctgaggc

SEQ ID NO: 863675 - DNA, 100 bp, Homo sapiens
gttggaacacagcagagggtgtgtaataaaatacaggtctgccatcatggatgttctcgcagaagcaaatggcacctttgccttaaaccttttgaaaacg

SEQ ID NO: 863676 - DNA, 100 bp, Homo sapiens
ggtgacacaggaccataagccagaacttcccaaggaaagagaacgaatcgaaggacttggtgggaggctgaccggttccctgatgtgttacctgcttctg

SEQ ID NO: 863677 - DNA, 98 bp, Homo sapiens
gctgtccttctttgtggagagcaagacgcccctgtcctggcaagagctagaaggtgagcgtgccagttcctgtgcacacaagcgctcagcatcctggg

SEQ ID NO: 863678 - DNA, 100 bp, Homo sapiens
agtggaaaaaacctgagaacttcctgatctctctcgctgtgagacatgtctgagactcctgctcagtgtagcattaagatggaaatcctgtatgaatgtg

SEQ ID NO: 863679 - DNA, 100 bp, Homo sapiens
tggcccggaaacaggaggacgccgtaagttcatcatcgccaacgctcgggtggagaactgcgccgtcatctactgcaacgacggcttctgcgagctgtgc

SEQ ID NO: 863680 - DNA, 100 bp, Homo sapiens
atgaaagtggtagagaatctccaggatgactttgatttcaactataaaaccctcaagagtcaaggaggctattttggacatgacatattttgaggagaac

SEQ ID NO: 863681 - DNA, 98 bp, Homo sapiens
ctctgtcagatcagaaagaggcctccctcgtgagttgggcttggtaccgtgctgcccagaatgcccttcgggagctgctgtgatattaaccgtggagt

SEQ ID NO: 863682 - DNA, 100 bp, Homo sapiens
tttttcctctgattgaagccaagaaaaaggatcaagtgactgctcaggaaattttccaagacaagtgtgggccatgtttgaggattgccccagcattcag

SEQ ID NO: 863683 - DNA, 100 bp, Homo sapiens
cacatttgggaagccacattttgcagcaacttgagttggtggaaccaagtggctggattcatgttcccttaactgacaatcataagaagccaactcgtac

SEQ ID NO: 863684 - DNA, 100 bp, Homo sapiens
tggaaaaccagttattgaatatcaagaggaggagttgttggatggcacaacagcattattgaaagcagccaacaaagggtataatgatgtcataaaagag

SEQ ID NO: 863685 - DNA, 100 bp, Homo sapiens
ttcaactacgaatactaagaacccagagccagcccctgggcaacaaagtggaaatggagattgtgagcatgttggaaaaaaacgcaacacttctcaaatt

SEQ ID NO: 863686 - DNA, 100 bp, Homo sapiens
ggagcaagagggaccccagaaactgatccgcaaagtgtctacctcggggcagatccggaccaagacaccaaatggattgcttctgactccgagtccactg

SEQ ID NO: 863687 - DNA, 100 bp, Homo sapiens
gggcttggcgcggcggccagaggaaccccgagagcccataggcagcatgtcatccatggaagtgaacgtggacatgctggagcagatggacctgatggac

SEQ ID NO: 863688 - DNA, 98 bp, Homo sapiens
aatcagacagaacagttaatcctcaatttaagcctgatctaacccctagaaacaggaatactcccccagttgcaagaggcgcaggaccgtggaagact

SEQ ID NO: 863689 - DNA, 98 bp, Homo sapiens
ggcggagccggaggaagctgatggtcatcttttccaaatgatatcatcaagttgaatcgaaaggaagggaagaagcagaattttccaagactaaatag

SEQ ID NO: 863690 - DNA, 100 bp, Homo sapiens
ccccagccgaccttgagctccaggagttcgtctcttacgtctgcggaagtgcagctgcctcagttcttagcgcagagtttgccagatccggcccggtgcc

SEQ ID NO: 863691 - DNA, 100 bp, Homo sapiens
gagactctgcgtcaggtcacccagcagagatcagcaatccttggctcactgaggaggtttgactgtggatattcataaggagaaagtggcacgaagagag

SEQ ID NO: 863692 - DNA, 98 bp, Homo sapiens
ttgcctgacagactaagagcaaagctacttccattccagaaagatggcatcatttttgccctcaaaagaaatggcagataacaacgaacttgatgcaa

SEQ ID NO: 863693 - DNA, 100 bp, Homo sapiens
atggtctttagaattgggtcactggatttctgaggagccgttcgaactgtctcaccacttccctgcagctcccatcaggatcctcatgaccagccaaaga

SEQ ID NO: 863694 - DNA, 100 bp, Homo sapiens
atgaatcctgcggcagaagccgagttcaacatcctcctggccaccgactcctacaagtaattcgccaaaatgacgaacacaaagggaaagaggagaggca

SEQ ID NO: 863695 - DNA, 99 bp, Homo sapiens
ccaagtccagaatccgcgcgcaccgcggggaaggggaggagttacagcccggccagttggagttgtagtaccacgagggacgccaactcccagaggagt

SEQ ID NO: 863696 - DNA, 100 bp, Homo sapiens
tctctcaactgattgattgtccagagtttgtaccaggccaagccttttgctcacatacaggtgtcattccacacatccacaaatctctgattgggaagaa

SEQ ID NO: 863697 - DNA, 100 bp, Homo sapiens
ctggctgtgtgtgctgcaaaccgagacaagttcaccccgaagtctgccggccaagatatcaagtcagatggcttcagcatcgagacatgcaaaattatgg

SEQ ID NO: 863698 - DNA, 98 bp, Homo sapiens
tgagtttcccacttgattacccgttaagtcccccaaagatgagatttacctgtgagatgtttcatcccaacaatgacagaacttaccactttcaagct

SEQ ID NO: 863699 - DNA, 100 bp, Homo sapiens
caagaatttaatcaaaagagagcaaaatttaaggagttatatttggctaaagaggggcgcaaaccagaagaagagggtgtggaagataacgggctggagg

SEQ ID NO: 863700 - DNA, 98 bp, Homo sapiens
cagctcgcggtcatgggcggctcagcctccagccagctggacgagggcaagtgcgcttacatccgaggttcaagttctttcttcaaagagtcatcaga

SEQ ID NO: 863701 - DNA, 100 bp, Homo sapiens
gaagaggaagaccctcctgccaaaaggaaatgcatctttatgtcagaaacacaaagcagcccaaccaaaggactcagattgatggacaacttttcttaat

SEQ ID NO: 863702 - DNA, 100 bp, Homo sapiens
gttcatcaaggaatccatgtttcttccaagaagcaggaacaggaaatatagtggtcattatgattagctatccaaaaggaagagaaattttggagctggt

SEQ ID NO: 863703 - DNA, 100 bp, Homo sapiens
ctctttactgtggtctaatggagacagcactcgactgaaagtgaaggacccagactctagttagacgagttgtactgctgtcacaggaaatggacgctgg

SEQ ID NO: 863704 - DNA, 98 bp, Homo sapiens
gcaggtgaatggagagtagcagccggggcccagggccgcttgaagatgccattgaagatgaggaagaagaatgtccatcagaggaaacagacatcatc

SEQ ID NO: 863705 - DNA, 99 bp, Homo sapiens
taagacaagaggaaacgtttagcatcagtgactcacaaatcagcaacacagaatttctgcaagtaattgtctatcaggtgtttgaaagtgtggctaaga

SEQ ID NO: 863706 - DNA, 100 bp, Homo sapiens
gtgattaagaaagcagtacctgaagcacctactcctgttcctaaaaaagtggaggcaccaccagctaaagcctatatatgcaaacagatttgcagtacca

SEQ ID NO: 863707 - DNA, 100 bp, Homo sapiens
acttgaggaatggctggaatgtcatggactttgtggtggtgctaacgggatgtgactctgaaaatcgctatgttggtaatccacttagaggaacatgtta

SEQ ID NO: 863708 - DNA, 100 bp, Homo sapiens
aacacaaaccccaagtcctccttgccaggccttcaaccactatctcagtgcaatgggacctgctgaagctcacacccgtggaccacccagactgcctgcc

SEQ ID NO: 863709 - DNA, 98 bp, Homo sapiens
cgcggacctgcggcccgacgaggaagttttctactgtaaagtcaccaacgagatcttccgccactacgagtttacccaaggtccagcctagcccctag

SEQ ID NO: 863710 - DNA, 98 bp, Homo sapiens
cttttgacaacgaacagctcttcaccatgaaatggatagatgaggaagactgggctggcttagatgaagatgaagatgcacatgtctgggaggataat

SEQ ID NO: 863711 - DNA, 100 bp, Homo sapiens
gccaagtccataaaacaaaagaacagtttggccaagatggacccatttcagtccattgcagagtaaccagagagcacagagaaatgctggtgaaactggc

SEQ ID NO: 863712 - DNA, 100 bp, Homo sapiens
agaaacaggccatggagggacaggatccggaggcgccagctcaaccgtgaccattgtgaggtagatattttgttctaattttccagatgaggaagctgag

SEQ ID NO: 863713 - DNA, 99 bp, Homo sapiens
gaagatgcctttgggaagcatgtcaccaacccggccttcaccaaactccctgttatcaatactctggctgaccatcatcatcgtgggactgactttggt

SEQ ID NO: 863714 - DNA, 100 bp, Homo sapiens
gtttcgaactgagatctaagaaggtatggcatttcaaatatagatacaaccattgaaggaacgtcagatgacctgactgttgtagatgcagcttcactaa

SEQ ID NO: 863715 - DNA, 101 bp, Homo sapiens
actgaccctgcgctccaagtccatgacagctgagctcgaggaacttgccctcaaaactgggttgaggtgagcaaggaggcagctcagggacaaatttctac

SEQ ID NO: 863716 - DNA, 98 bp, Homo sapiens
ccagatggcactcatgagctcatcgtgcataagccttctttgaatcctggggggagccagtcatctgatgtggtgcttttgaaccactggaaagtgag

SEQ ID NO: 863717 - DNA, 100 bp, Homo sapiens
gacatcaaaacctggaccttctggattacaggccaaattagcaataaacctatgatggacttgttgatattcctttgtgcacagtatcacttaaatccat

SEQ ID NO: 863718 - DNA, 139 bp, Homo sapiens
cagaaatgaaaactgaagatggcaaagtagaaaaacactatctcttctatgacggagaatccgtttcaggaaaggccgaggagtgaccttcctatttcctatacaagcaaagacattccatcatgtttacagcgggaag

SEQ ID NO: 863719 - DNA, 98 bp, Homo sapiens
ggggccccagcagcccccgaaggccctatcaggacatggagtatgaaagacgggccccccaggatctgaaggcctcccaggccccccaggcccagcgg

SEQ ID NO: 863720 - DNA, 98 bp, Homo sapiens
cgcgtcggcgagctcacccagcaggcgctgcagcggtacctgaagacccgggagaagagctcttcagtatccccatcagccagtttccgaggtgctga

SEQ ID NO: 863721 - DNA, 98 bp, Homo sapiens
tcactgccaaccttaacctttctaattccatgacctcacttgcaacttcccagcattccccagggcaccagtgtcttgtcacctggactccacatagg

SEQ ID NO: 863722 - DNA, 98 bp, Homo sapiens
ggagaatgactgaggagccattgatgtgtacagagcctgcagccaatgccccaggagccctcggttccaaccaactgatgcccctgtgcccactggcc

SEQ ID NO: 863723 - DNA, 99 bp, Homo sapiens
tttggtccctcggggcgtctgggcagcctacgctttccgatgatgttgaatttgaagtatcatcggaccgacggactgggaaacccattgctgttaaac

SEQ ID NO: 863724 - DNA, 99 bp, Homo sapiens
aaagggtgtgttactgaagtgaaatatcaaagaccttgtacacagacagacggctagtgcagtggtacagcacatgtcacttggggtttatggatttgg

SEQ ID NO: 863725 - DNA, 98 bp, Homo sapiens
gcagctccacgcagcaagacccgcgccgccgggacccccaggacgacgtgtacctggacatcaccgctgtttgagatggagaacgtttttactgtgtc

SEQ ID NO: 863726 - DNA, 100 bp, Homo sapiens
tttttagaccctctgtgccagagaggatgggtttgtggagttcttccatgtagaggacctagaaggtggcatcaggaatgtgctgctggcttttgcaggt

SEQ ID NO: 863727 - DNA, 100 bp, Homo sapiens
agttttagctggatccgctgactttaaaactgaactaagtcaatctgatatgtttgatcagactccaaccgggaagactttgacccagcacctgtaaaga

SEQ ID NO: 863728 - DNA, 106 bp, Homo sapiens
aactggagtgtgcggcccgataagcgctttcgcttggcgctgggcagcttcgtggaggagtacaacaacaagacttaattgtaggagcttttggtgtagatcgagc

SEQ ID NO: 863729 - DNA, 98 bp, Homo sapiens
tgcaaggtctgtcctcaggtggcagtggttcttatagccctggagtgacctactcgcccgtcagtggttataataagccaatggagatcttcgtggat

SEQ ID NO: 863730 - DNA, 100 bp, Homo sapiens
aaaacggtgaaggtcggaaccgacagcctcctccgagaagggtaccgaagtggcatccgaggccacatgaaggctgtggtgatggatctgctccggcagt

SEQ ID NO: 863731 - DNA, 100 bp, Homo sapiens
atcaaggctgcctataatcaagtaaaaacaatagctcaaggaaacctttccaacacagatgtccaagctgccaagaatgcccagaaagaggatcgtgttc

SEQ ID NO: 863732 - DNA, 100 bp, Homo sapiens
ataatggcggatatggaggatctcttcgggagcgacgccgacagcgaagctgagcgtaaagctccagtcagcccggtcaagcatgacagcaactcaaact

SEQ ID NO: 863733 - DNA, 100 bp, Homo sapiens
tgccatctacaggcaagacagcaataagctatccaatgatgacatgctcaagttacttgcagactttcggaagtgtgactgaagaaatatcaaatgtttc

SEQ ID NO: 863734 - DNA, 100 bp, Homo sapiens
ggaaaatactacagagtgtgcacactggctatcattgatccagaaatggatgaaaagaggctgctggatccagggttgaaggttcataaaggcctctggg

SEQ ID NO: 863735 - DNA, 100 bp, Homo sapiens
agcctacacagaatggtcaggaagagttgttcctagacaatgagatgagtcttcctctggaaaacacaagagtctactcttcatcttgtgttgagacttc

SEQ ID NO: 863736 - DNA, 100 bp, Homo sapiens
tgtgaacagtgtgctaagggctattaccgcccttatggggttccagtggatgcccctgatggctgcatccaaggcggtcaccttctccttactatagtcg

SEQ ID NO: 863737 - DNA, 100 bp, Homo sapiens
gacggctcacctgtgcgggatggaacaaaagatagtagttcctcagggaagaacagaaaagaggaaagttatatatttgagtcaaagggtgatggaggag

SEQ ID NO: 863738 - DNA, 100 bp, Homo sapiens
aaaggaaaatcttatctcttcaatatcatggacactccagtagtttatgccaacgtgacttcattcatacagatgaaccaaggatcgggatagcagtata

SEQ ID NO: 863739 - DNA, 99 bp, Homo sapiens
ttgattacagcggcctcagggttcaggcaatgcaaataagtgggcctttggagtgacgctgtgggaactcatgactctgggccagactccctacgtgga

SEQ ID NO: 863740 - DNA, 99 bp, Homo sapiens
tgaatacatgatttaaacaagagatttccacagaagttccaaaagctgagacaagatcttgaaatggtactgtccactaaggagtcaaagaatgaaaag

SEQ ID NO: 863741 - DNA, 100 bp, Homo sapiens
ctgctatgtactcctctgacacaagggggagcctgccagctgagcatggagttgagccccatatgggggttggcaggcagcagagaggcccctttcaagg

SEQ ID NO: 863742 - DNA, 100 bp, Homo sapiens
atgctgggcatgcgttggctcccaaagacaagaagattcttacaacatcagaggtaaacctattgatggcaattttgctgactgtggaagtgactcatcc

SEQ ID NO: 863743 - DNA, 100 bp, Homo sapiens
gcgcaccggtcccccagcggcagccgagcccgcccgcgcgccgctatctcccctggttcgaggtattttataagctgcttaacatcctggcagattacac

SEQ ID NO: 863744 - DNA, 100 bp, Homo sapiens
gtttaaagaattaaaaggaagaacaacttaagagcttcttcaaaggaggtctcttttccactggagcctactttgaaatcagctgaggagccaccaaatc

SEQ ID NO: 863745 - DNA, 100 bp, Homo sapiens
taacaaagcctattgctacaacggcatgtgccagtattatgatgctcaatgtcaagtcatctttggctcaactattgacctgaaaagtggttctggaaaa

SEQ ID NO: 863746 - DNA, 100 bp, Homo sapiens
ttcccctgccgatcctaaatcaacatcaggaaatgtaccttctccgaatgcacctttaaagcgggtattagcctatacaggctgttttagtcgaatgcag

SEQ ID NO: 863747 - DNA, 100 bp, Homo sapiens
atgggaggcaatactgtcattgagggtgtgaatgatcgagctgaaatggtagagactcaaaagaccttcacgcttctggcacttttccagccattaactc

SEQ ID NO: 863748 - DNA, 100 bp, Homo sapiens
cgaggaaacagtgaccctgagcgaagccaagccgggcggcagaattctgcttggtcagaatcgtgatggcattgtgttcagcactgatgactattttcac

SEQ ID NO: 863749 - DNA, 100 bp, Homo sapiens
cgggaccccagcttttcagaactgcagggaaacagccatcatgaggattaaagcaaggagagccaatcatgactggcaaaacacagaccagcaacgtcac

SEQ ID NO: 863750 - DNA, 100 bp, Homo sapiens
cggcttagaggacttccctttggatgtagcaaggaagaaattgttcagttcttctcaggtggaatgaatcttacttgttgaatatcttctggttactagt

SEQ ID NO: 863751 - DNA, 100 bp, Homo sapiens
gcagcggcagtcacaggcacatcagcaaagaggtggaatatgtgatcaagtgtgacatgtcagctctgcagaagattctgtatcgccatatgcaagccaa

SEQ ID NO: 863752 - DNA, 100 bp, Homo sapiens
aagcatccaaatattgtccagtatagagaatcatttgaaggatcaaaaccattcaagtgcaagatatgccattttgcaacagctcagcttggagatgcca

SEQ ID NO: 863753 - DNA, 98 bp, Homo sapiens
gccaagatggcggaagcggaggagtctccaggagacccggggacagcatcgcccaggcccctggttcacaataaaggtgctaagaaagagaatgtaag

SEQ ID NO: 863754 - DNA, 100 bp, Homo sapiens
gaagggagcagatgtggtcatggctggcattgtgcagtacaatgactggttggaggaagagtctttctgcccccgataacagaaaatctctttttcgtct

SEQ ID NO: 863755 - DNA, 100 bp, Homo sapiens
gcggtgcagggtaacatggcggatgcggaagcaggggaaatgctgtctgtagctgagcacttcctggagcagcagatgcacccaacagtggtgatcagtg

SEQ ID NO: 863756 - DNA, 100 bp, Homo sapiens
gcgctgccgaggagaacccagcggcggaaaccctttctgtgagtgggattccaaatgctaggaagctaggggagcctatccgagcagctattcctttaca

SEQ ID NO: 863757 - DNA, 100 bp, Homo sapiens
gcggagccagcctgagttgggagaagagctccagagaatggccgccaagaacgagtcatgtttgacaaaattacatctcgaatccagaagctttgttatg

SEQ ID NO: 863758 - DNA, 100 bp, Homo sapiens
gtagaagaagtgtcttccaaaggagaaattcatggcggaagtaatgggatctataaagatagctgatcagcttccttgggttttgctgatgacacaagag

SEQ ID NO: 863759 - DNA, 100 bp, Homo sapiens
atgtaaggtgcgcggagggactgcaccttctccatcaggtgcagaagacaggggcaagtgtccgagtggtgaatcagctacttacagagatggatggtct

SEQ ID NO: 863760 - DNA, 101 bp, Homo sapiens
cctactattacccccagtatctgcaagccaagtcattgaagtcaacaagagagacatagtcttcctggtggatggctcatctgcactgggactggccaact

SEQ ID NO: 863761 - DNA, 100 bp, Homo sapiens
acgggacactggctggtggaagatcatgttcgaatatgggaagttttaaagacagaggaggcctactctgtgtatgatgaagacattgggtactgtcaag

SEQ ID NO: 863762 - DNA, 100 bp, Homo sapiens
catataccatctctggctccagggaatgtgagggtatggctctctcggcatgatgaccagcgtgctggtttgtccagatggcaagacagtagaagcagag

SEQ ID NO: 863763 - DNA, 100 bp, Homo sapiens
tgccgccctgagtcactgcctgcgcagctccggccgcctggctccccatactagtcgccggttgccatgtcaaatcttagcgaggctgtgcaggatgcag

SEQ ID NO: 863764 - DNA, 98 bp, Homo sapiens
agcatggtgctcttcttcttcgagaattacaccggggtccaggactcacaccacccggcaagaactgctcactacggctccctgccccagaagtcaca

SEQ ID NO: 863765 - DNA, 100 bp, Homo sapiens
tttcaaatgtcaccaagcaagataattataatgaagaagtggctgacttaaagtgtctgtgcttgtggtcggtaacttttgctgctgttgttctgctgct

SEQ ID NO: 863766 - DNA, 100 bp, Homo sapiens
tggagcgtacaaatttgagcaggattttctcacacttgctcatcagtttggaaggaatttggctccgtgggacgttgtaatgtgcacagacatttccaag

SEQ ID NO: 863767 - DNA, 100 bp, Homo sapiens
tcgacttagaagctaccgagttaccctaagaaaggtggtactgtgaaggcaaggagcttgaaaattccccagatattcacatcgtccaggcaggaaatct

SEQ ID NO: 863768 - DNA, 50 bp, Homo sapiens
gctctcgggagcgcaacactgcaggtcctactgctctgttggctcatgaa

SEQ ID NO: 863769 - DNA, 99 bp, Homo sapiens
ccagctatccgggttcatcctacatttttgtgcaagaggcaaaatcctgacagatgactttgcagacaaggagggtctggaaatgggtgatgagtactt

SEQ ID NO: 863770 - DNA, 99 bp, Homo sapiens
ttgagttttgtgaaaaaccggagaagagaaactaaaaggacagtagaaaaggcttttccagtttgcataatccaacaacatctgcttctacggcgagtg

SEQ ID NO: 863771 - DNA, 99 bp, Homo sapiens
tcttctgtgtggcagttcagaatgatggatcaagctagatcagcattctctaacttggctaaagtaaataatgccagcctgattggactgggttatact

SEQ ID NO: 863772 - DNA, 100 bp, Homo sapiens
gcgcggttggggccactgcgaggccgttttagctaactgccttctatgaaagcagtcattattcaaggtgatcgtattcttccagtgaaaacaagactga

SEQ ID NO: 863773 - DNA, 100 bp, Homo sapiens
ctttttgatcatctgtgcagcccccttcgccagccattttctctacaaagctgggggaggctcatatattgctgcagctgcagaaccttggcctgaaaat

SEQ ID NO: 863774 - DNA, 107 bp, Homo sapiens
gaaggcccactttattatggatgatccagcaggaaacagttacttgcagttaccgaagtgcatgtttgggattttgttgaagaaagctggatacagtaaacggaaag

SEQ ID NO: 863775 - DNA, 100 bp, Homo sapiens
tgtcatcccacctgagaaccatgctcaccgaccctgtgtgaggtgggcacagatagctggtcgcagtgcaatgacacacctgtgaagtttgctcgttttc

SEQ ID NO: 863776 - DNA, 100 bp, Homo sapiens
agcaactagttcaggagctggtgtttttaagatgggacgatttcagcggagcgtgctttggacaccatgaattttgatgttataaagggcaagccagtac

SEQ ID NO: 863777 - DNA, 99 bp, Homo sapiens
tcgacctctggttctacttcacactgcagaactgggttctggactttgggcgtcccattgccatgatcatggagctttgtggtgcaacaagacttggtt

SEQ ID NO: 863778 - DNA, 74 bp, Homo sapiens
aagtaatggttattatcactgtgaatcttccattgtgattggaatttagataatgggctgtgtgcaatgtaagg

SEQ ID NO: 863779 - DNA, 98 bp, Homo sapiens
gcaccctggggcttcacccttaaggggggtctggaacactgtgagccgctcacagtgtctaagcttgaattagagtctgtcaaagcccagtctttggc

SEQ ID NO: 863780 - DNA, 100 bp, Homo sapiens
ccagtggtcatcgatgggagcaacgtggccatgaggatgagctttctgatgttagccaaggcggatctaaagctaccactccagcatcaacagctaattc

SEQ ID NO: 863781 - DNA, 121 bp, Homo sapiens
cgtttctgcagtcccggggagaggtcatccgaatcagagccacagccttgtcttcaactcccttttcctcgccgaccttgaaccacgccttttcctgcaacaaccccagcacccttccccg

SEQ ID NO: 863782 - DNA, 133 bp, Homo sapiens
gacaagtgcagacagcagcttcatgatattactgtaccgttagaagtttttgactatatcgagaagtttactgactttcttcggctctttgtgagtgttcacctaagaagaatcgagtcttactcccagttcc

SEQ ID NO: 863783 - DNA, 98 bp, Homo sapiens
ggatttaactatcagaatgaagatgaaaaagtcaccttgtctttccctagtactctgcaaacagcacagagatactcctgagaataaccctgatactc

SEQ ID NO: 863784 - DNA, 98 bp, Homo sapiens
cagcctggcgccggagctgaaacacgacgtgaaggcattaagtgtaactgaaaccctgattaaacccttggaaaaattcagaaaagagcaacttggag

SEQ ID NO: 863785 - DNA, 98 bp, Homo sapiens
ccctgtatatgactgcttggtatggcatgatggcgaagtctggagatttctacctggacaaggactggtactatacccacagataggagacaaattgg

SEQ ID NO: 863786 - DNA, 100 bp, Homo sapiens
atttctcctattgaggagtcaacgcttccgatatggtatcgacatcccgtatcttagttgcagtagtgaagatgtgctatgaggctaaagaatgggattt

SEQ ID NO: 863787 - DNA, 100 bp, Homo sapiens
agaatgataacgacatctcaggaaaattgtgaaaataatcagcaaccgggcatatgatattttcctgaatgcaaaagagcaaaacattgtgtttaatgct

SEQ ID NO: 863788 - DNA, 100 bp, Homo sapiens
aggacagtcgcgaggttcgagtgttgcagagcctgcggggcaagatctgccaacactggacaaattgatgacccccaggagcagcacagagtcatcagca

SEQ ID NO: 863789 - DNA, 99 bp, Homo sapiens
ccggctgcgcgtggctggggaggcgaggccggacgcacctctgtttgggggtcctcagatgagtcagatgaagccccatgtgtatgatctgccagtaga

SEQ ID NO: 863790 - DNA, 100 bp, Homo sapiens
gaaaggattcgttacagccagagattggtcctggcacaatgtttattgtgtcataaataaccaagaaatgggtttctacaaagatgcaaagactgctgct

SEQ ID NO: 863791 - DNA, 120 bp, Homo sapiens
agacttcaaagaaacattaagaacttggatcccattcacctgaggcacccgaagaagagaccatccatatttccagctgcgactgatagattggggtctggcagaattctatcatcctgc

SEQ ID NO: 863792 - DNA, 100 bp, Homo sapiens
ccggggcggagcacgcgagctatgcgctgataaagcagtttgtgtccgacgtggcctggggggagctggactacctggtggtggacacgcccccggggac

SEQ ID NO: 863793 - DNA, 99 bp, Homo sapiens
aaaccttataccctcatgagcatggtggccaacctcttgtatgagaaacggatgtacagttacccagcacgtgtacctcctcctcctcctattgctcgg

SEQ ID NO: 863794 - DNA, 100 bp, Homo sapiens
cgggatactgctcagcaaggtgttgtgaatttcccatatgatgatgatttaagcgagagcctcactggttcccaggacatcaacctgaactggatcctcc

SEQ ID NO: 863795 - DNA, 118 bp, Homo sapiens
aaaaagtacgagttggagatgacctcatcttagttagcgtgtcctctgaaaggtacttgacatttctcttgggaagttgtgcatctgacaggaatatagtactgtacgatatgaggca

SEQ ID NO: 863796 - DNA, 100 bp, Homo sapiens
aagtagataggaaagccagcaaaggcaggaaacttcggttttcaattcaaaaacagctgaactacttagtcatcatcaagtagaaataaaacaagagttc

SEQ ID NO: 863797 - DNA, 100 bp, Homo sapiens
ctcctgggtagctgggaccacagagtttcttggaccttgtggttgagttggagaaactaaatctggttgccccagatcaactggatttattagaaaaatg

SEQ ID NO: 863798 - DNA, 129 bp, Homo sapiens
ctgacttcaatgacctccccaactcgttgtttgcgtgcaatgttcaccagtcagtgtttgaaggagaagagagcaagccttatgattctgcagatgactggtctgagcatattagctcttctgggaaaa

SEQ ID NO: 863799 - DNA, 100 bp, Homo sapiens
ttggggttttcttcccagcggctacagggtaaaccagacttgaatacaacattgccaattagacaaacagcatcaattttcaaacaaccggtaaccaaag

SEQ ID NO: 863800 - DNA, 100 bp, Homo sapiens
ttggagcagaggtttgaatcctattacaactactgcaatctcttcaactacattcttactcgagagctagccttgcagcaggaggaagggaagaccgtga

SEQ ID NO: 863801 - DNA, 100 bp, Homo sapiens
gcctctctcgcccacattttccccaagcactctcaggaacctggcaacaggtctcacgctgttgcatgtgtcaatcagtttatcatcagtaggactcaag

SEQ ID NO: 863802 - DNA, 101 bp, Homo sapiens
gtgttgtaatcattcaaaggataaccaaatgtgccgtgatgtatgtgaacagggaagaaggagaaagggccaacccctgaagaagcaatacagaaactgaa

SEQ ID NO: 863803 - DNA, 100 bp, Homo sapiens
gctgccgctatggatgatcgagaggatctggtgtaccaggcgaagctggccgagcaggctgagcgatacgacggctatgaaaggagaaaagggaattggt

SEQ ID NO: 863804 - DNA, 100 bp, Homo sapiens
cagcagactcaggagtacttcatcatccagtaccaggagagcctgaggatccaagagctggagaagcagttggtggctctcattccctatggggaccaga

SEQ ID NO: 863805 - DNA, 100 bp, Homo sapiens
gctagcagtggcttgtcagcaatcctgacacagctctccctgaggagcagccacattccagctcccagtgcgcccctctccactgtctctccaagcctcc

SEQ ID NO: 863806 - DNA, 100 bp, Homo sapiens
tagagaaagagaaaggatttctaagcaggaactccccagggaagacaaaggcgctttggctaagctggtggaagctatcaggaccaattacaatgacaga

SEQ ID NO: 863807 - DNA, 98 bp, Homo sapiens
cgccgagtcctagcgcctggcctgcgcgccgctgcccgcgccacagaatggactgctgaattatgaagtatttcagacccagtagtagaacatcactc

SEQ ID NO: 863808 - DNA, 98 bp, Homo sapiens
actcgcgcagcgccatggcccccattggcctcaaagctgttgtcggagagagtgacgcatccaaagaagacattgacactgctatgaaattaggagcc

SEQ ID NO: 863809 - DNA, 100 bp, Homo sapiens
gataaagttggtcagtctcgcactggagttgctggagaatgtaaccctaatccataaaccagtgtcgttgcaaccccgtgggctgatcaataaagggaac

SEQ ID NO: 863810 - DNA, 100 bp, Homo sapiens
aacaccatggctgcggcggcccagctctctctgacacaggactcgctcagcagcagcctgaaaacttgctacaagtatctcaatcagaccagtcgcagtt

SEQ ID NO: 863811 - DNA, 98 bp, Homo sapiens
ggagcagccttagtccagttgctccgctgagtcctgccaggctgcaagggccaagcacgctgttccaggtgaaatgtgaggccaggtcagccttgacc

SEQ ID NO: 863812 - DNA, 129 bp, Homo sapiens
gggattcgaagatggctgcacagtcagcgccgaaagttgtgctaaaaagcaccaccaagatgtctctaaatgagcgcatttgcaagtgaggaagcagcacaaccctgggttttagataatttctaacag

SEQ ID NO: 863813 - DNA, 100 bp, Homo sapiens
ctggaggagcgcatgcaacagaagtatgaggccagccgggaggacatctacaagcggatgacagacaaccttctgtgccttcatcaagctggttgtgtac

SEQ ID NO: 863814 - DNA, 100 bp, Homo sapiens
gaggagattctgaagataaggagcactgaacctaccagatgtatttgggttggtcgtcctcccattggaactgaaactacggatcttccgacttctggat

SEQ ID NO: 863815 - DNA, 100 bp, Homo sapiens
tgaaagttttccttcttacagagatgtgactctgtttgaggttatcaatactctggctgaccatcatcatcgtgggactgactttggtggaagtccttgg

SEQ ID NO: 863816 - DNA, 100 bp, Homo sapiens
gtgaataaagccaagagagaccttggagtaattcgtcgacaggttatcaatactctggctgaccatcatcatcgtgggactgactttggtggaagtcctt

SEQ ID NO: 863817 - DNA, 100 bp, Homo sapiens
ccaatccctaaggacagcttttgatttattaaatttaaatagattagtaactggcatagacaactatgggcagggtatttgaagtataccatacaactgt

SEQ ID NO: 863818 - DNA, 100 bp, Homo sapiens
ctgatgttagtgtggacttgccagtttctgctttgggacaaccatacatctaattccttaaagtagttttatatgtaaaacttgcaaagaatcagaacaa

SEQ ID NO: 863819 - DNA, 100 bp, Homo sapiens
gaagaaaaagaaggccctgagtcaaagaagatgcctcgaactaaacaaattcatcccagaaatctaagagacttaattcagtgcacaaatgagatgaatg

SEQ ID NO: 863820 - DNA, 99 bp, Homo sapiens
cagagttttgcacaaaatctgttcccatgcaaaccaatgagggagaagtatcggaagaaagcagttccaaggttgtaaagctctctgaaatagtgacct

SEQ ID NO: 863821 - DNA, 98 bp, Homo sapiens
agctcattgcaacctctgcttcctgggctcaagcactctgcccacctcagcctccagagtagctggaaatacaggtgaagatcccggatctgttttgt

SEQ ID NO: 863822 - DNA, 98 bp, Homo sapiens
gcgactggcccaagttctttgaaaagaccgccagccctggaccgacaaacacccagatctgttgacctgcggccgctgcctgcagaccttcccgttgg

SEQ ID NO: 863823 - DNA, 100 bp, Homo sapiens
cggaagcccccacgggctctacctgaccctgcaggtctgttgcggttctcccacttttccataagcagaacaagaaccaaatcaaacgtcttaacgcgta

SEQ ID NO: 863824 - DNA, 100 bp, Homo sapiens
tgagaaactcggcaagcgcgcagtgtcgactccccggtctatgccaggcgcatctcaggtgattaaagtatacagtgaagatgaaaccagcagggcttta

SEQ ID NO: 863825 - DNA, 100 bp, Homo sapiens
aaacctaaagtatttgccgttggtgattcaagggtcggatccgcacaagacggcaaagctctgggagtgccaccaacgtcgcctctacacctgataaccg

SEQ ID NO: 863826 - DNA, 100 bp, Homo sapiens
gaaagtataaaaaaattccgtgacgaggccagaaggctagaagaatcagacgtgctccaggaggccagaaggaaatacgccctcagtctccgaggaggat

SEQ ID NO: 863827 - DNA, 98 bp, Homo sapiens
tgtgtacagagggtgcccagcagggtcttctacagtggctgttgaagaggctgaagagagcagagctgacatctgataaagacatgtaccttgacaac

SEQ ID NO: 863828 - DNA, 100 bp, Homo sapiens
aaagtagtttaggtgacatgttctcacctatcagagatggggagaagcctttttcttgccctcactgcaacagagcatttgcagacaggtcaaatctgag

SEQ ID NO: 863829 - DNA, 100 bp, Homo sapiens
tacagtattatgaagaaaaccatggtcaagctacaacttcaagcagaagagagaggagttgtgtctatcaaaggagtgtgtgctaaccgttacctggcta

SEQ ID NO: 863830 - DNA, 98 bp, Homo sapiens
atcagtctcaggatgttctgagattgcatcaggatattaatgattataaccggagattctcagggcaacccagatcttttacagacaaggatcagcag

SEQ ID NO: 863831 - DNA, 98 bp, Homo sapiens
atgaacgctctcgctctgggtccctcagaatatgactctctgcctgaaaatagcgagacagagtccgcttagtggaaagaggatcccctcatagtctg

SEQ ID NO: 863832 - DNA, 100 bp, Homo sapiens
gtattcttgaaccaggtcatgctccaaatgtttggaatttcagctgggcagcttcgatcccaccacctgtagccactgaggttcacaggctctgtttgag

SEQ ID NO: 863833 - DNA, 100 bp, Homo sapiens
tctccttcacagtaaagtggctgtggactaaagaggatggacatagaacttccacctctgctgtccctaacctgtttgttccattgaacactaacccaaa

SEQ ID NO: 863834 - DNA, 100 bp, Homo sapiens
ggactttcaaacatctgaagatgacaatttattagatggtgacactgcagttgattgttcctcatgtggttaatttggttcattctttcaaaaatgatgg

SEQ ID NO: 863835 - DNA, 100 bp, Homo sapiens
cagctgcagggcctgagtgccagcgcagggcttctggagcagatgaggcacatggagacccaggccaaggacctgagggagtatgccaaaatggtccagg

SEQ ID NO: 863836 - DNA, 100 bp, Homo sapiens
cgccgggcgccgcgcctttggtgccaggcttcccgtatccagcagccaccgccgcggccgcctaccgaggggcgcacctgcgaggccgcggtcgcaccgt

SEQ ID NO: 863837 - DNA, 100 bp, Homo sapiens
ataaccacctttatctcttccatttgatcaccatggcacacatgcttcagatactacttacagtagacacaggtacttgtcttgggccttagacacaaat

SEQ ID NO: 863838 - DNA, 98 bp, Homo sapiens
acaccctcccccacctggggtcagaggtctgctgtgacagatggcaccaccttaaccacccctgcggccactcatgttgcgggacaaaggcaaagtga

SEQ ID NO: 863839 - DNA, 98 bp, Homo sapiens
gagcgtgaccgagagcgcgaatatcgtcatcgttagaagggaaatcctcattgacgattcaatttgttgaaggccaatttgtggactcctacgatcca

SEQ ID NO: 863840 - DNA, 98 bp, Homo sapiens
tcaaaggattccagcagattttggcagattcgggcaagtccaccactactggccatctgatctataaatgcggtggcatcgacaaaagaaccattgaa

SEQ ID NO: 863841 - DNA, 100 bp, Homo sapiens
aggcaccgctggaacactaatgagacacggaatcgatttgaaggaacaaggtcagaagtggaagagctcatgaacaaaatcagacagaatcccaaggacc

SEQ ID NO: 863842 - DNA, 100 bp, Homo sapiens
ttaagaagaaatgctaatgtcaacctcaaaaaccagtatatttaaagttggagttcgttgctaaagatggcagacccagatgtcctcactgaagttccag

SEQ ID NO: 863843 - DNA, 100 bp, Homo sapiens
tgggtccagagcattgtccagactgagaaagtggctcatgccaaagaagaaaaccttagtatgcatcagatgctggatcagactttactggagttaaaca

SEQ ID NO: 863844 - DNA, 100 bp, Homo sapiens
gtatctgtttttctcagaagagaattccacaagttgatcagatgttttgggaggttatgcagttgagaaaagagatgtcattggcaaagctgggttattt

SEQ ID NO: 863845 - DNA, 100 bp, Homo sapiens
cttcgccggtcaccggctcctgcagggagtaagtccatgagtgatgtcagcgcagaagatgttcaaaacttgcgtcagctgcgttacgaggagatgcaga

SEQ ID NO: 863846 - DNA, 100 bp, Homo sapiens
gtctttctgtgcctggcttatttcagttaacatcgtgacctccagttccatccatgttgctgcaaatgttaaacttgtggttccgtgggttgatatccag

SEQ ID NO: 863847 - DNA, 133 bp, Homo sapiens
acaagtgaatgcagtctttccagaatcaaaagcagacctcattttgattgtagtagcagtggaggacttgtcttacaaggaccggcactggcatgaagcctgtttccactgctcgcagtgcagaaactcactg

SEQ ID NO: 863848 - DNA, 99 bp, Homo sapiens
ggaactcttggttgggataaaatttacaacgggaatgattttaccaacgaaagctatggcaacccaggaattgactgtcaaaagaaaactgagtgggaa

SEQ ID NO: 863849 - DNA, 100 bp, Homo sapiens
aacagattattattgcaacaaaggagccctctggcacaaatggaagaagaaagaagggagcaagtagctaaaattaagaagatggagatggagatggagc

SEQ ID NO: 863850 - DNA, 98 bp, Homo sapiens
cttaccttcctggactgattcagaagttttcatgggctgagctgctgagttcagcctgggaactgaggccaacaagggagtctcctcggcacacaagt

SEQ ID NO: 863851 - DNA, 100 bp, Homo sapiens
cccgggagaaggagtatcaggagaccattgaccagatagaggcaaatcttggacacggaggacgagctgcaggagctgcggtcagatgccgtgccttcgg

SEQ ID NO: 863852 - DNA, 98 bp, Homo sapiens
ggggcgagcctggaggattgtcactccaacctcttttcgctgatgcttttactgactctgctatcagtgctaaagtgaatggcgaacacaaagagaag

SEQ ID NO: 863853 - DNA, 100 bp, Homo sapiens
cagatcttcactgtattagtgaatccgataagatgaatatttcccccgcttccctcgccagtctttatgaggaagacttcaagcaggacatggcagccct

SEQ ID NO: 863854 - DNA, 100 bp, Homo sapiens
aatgggccatgagctcttcaaattggcccagatctttttcaacgggtgtgggattatgagactggagattttgaacgaactcttaaaggacatacagact

SEQ ID NO: 863855 - DNA, 101 bp, Homo sapiens
cttacataatgcattggaacatgacatgagattaagtgattcgcctttgccagtctcatctcgtgtctgctttgttaagttccatgatccagactcagcag

SEQ ID NO: 863856 - DNA, 74 bp, Homo sapiens
aacgaccagaacctaggcaacggtcatggcaaagaacatttccccagaggagctcaaaatggagttgccggaga

SEQ ID NO: 863857 - DNA, 100 bp, Homo sapiens
tgtgacttttcagccatcacaattgtaatgattacggacctgaagccaaagaacaagatgcgctagtggacagattgctgaccaggggcttgagagctgg

SEQ ID NO: 863858 - DNA, 99 bp, Homo sapiens
gcacaaaatgtcggcccggacgccattgccgacggtgaacgagcgggacacggaaaatttgtcgagatgtccacagaaggaggatttggtggtactagc

SEQ ID NO: 863859 - DNA, 100 bp, Homo sapiens
cagcggcaacagtaacgaaaaacagggctcactttgagtatatcatcccactgtctcctggagggcaagattcagccttaagggggttcccttgtatgtg

SEQ ID NO: 863860 - DNA, 98 bp, Homo sapiens
ttatttcaacactacaagctatacgagtttatgttctactctgccagggaagaaattgtgataggaactgagcagggagaaggttttaaggtgaaaac

SEQ ID NO: 863861 - DNA, 98 bp, Homo sapiens
gaggtcttattttgttgagtcgaaagtgaaattttcctttggccaacgtgacagacagctatgactatctccaaaatgcacctcctggattttttccg

SEQ ID NO: 863862 - DNA, 100 bp, Homo sapiens
cgcatgcctgtgtttccgcagcgagagcgaggaggagatgtgaatgaactgaaggagtgtctttctgtgctggttaaagagcagcaggccctggccgtcc

SEQ ID NO: 863863 - DNA, 100 bp, Homo sapiens
ccaaggccctaaactggacctgggcttcaaggagggccagaccatcaagctcaacatcgcagtcatgtccaaagtaatggagatgttccagcctagtgcg

SEQ ID NO: 863864 - DNA, 100 bp, Homo sapiens
gggaaaccttttggattacaactgttcatcctcacctatgcaaagaaagggaagctattgctgggattttgaggaggaccaagttttcatgattgactcc

SEQ ID NO: 863865 - DNA, 100 bp, Homo sapiens
gccttgatcctctgtctcctggtggtgagatttgatccagacggagtctcagtctgtttcccaggctggagtgtagtggcacgatctcggttcactgcaa

SEQ ID NO: 863866 - DNA, 99 bp, Homo sapiens
tgtattctccgagtcagattggagcatttgtgttgatgaagatgaaagagactgcaggtcctgcgttcaatttcctggatgctcctgctgttcgtgtca

SEQ ID NO: 863867 - DNA, 99 bp, Homo sapiens
gctacttcagttgcgcagacagtatcaaacctttccaaagtgaaactgatgagatttgatgatccactgttggggcctcgacgagttcctgtcctggga

SEQ ID NO: 863868 - DNA, 100 bp, Homo sapiens
ggaaacacttagaggaagttctggagatgaagtatctgaaaaggtttaaagtgatgaagatcaaagttctaagaagctggtgccgtcagatccttaaagg

SEQ ID NO: 863869 - DNA, 98 bp, Homo sapiens
cgcaggagcggccgcgtttcggcctcagaaacagttgcatctataaaaaggtttgcccctttaatggtggctcttttttggttcaaccttctgcgtca

SEQ ID NO: 863870 - DNA, 98 bp, Homo sapiens
gatcaacatcgaccacaagttccacaggcacctcattgggaagagcggtgccaacaaataccctctaccatctgctttggtcagggtgccgctcgagg

SEQ ID NO: 863871 - DNA, 100 bp, Homo sapiens
ttcagagcaggataatccagcttcattttcgccttacattcttacgaggctgccaaacgagggattctttcatctggtcggggcagaggaattcattcaa

SEQ ID NO: 863872 - DNA, 99 bp, Homo sapiens
tcctcgccagcagccgtccggagccagccaacgagcgagctaaagttgcagacaagatccagctcatcaataatatgctggacaaagtcaatgagatga

SEQ ID NO: 863873 - DNA, 98 bp, Homo sapiens
gaggtggagaagatcctggacatgaagaccgagggggattttttatcaagcagaaatgcatcgaacaacgagaatcaagatcactgagctaaatcccc

SEQ ID NO: 863874 - DNA, 99 bp, Homo sapiens
tttctaggaaaggccggacaccaggtgctatgggcataaacaacagaggtgccatgccccctgctcctgtgccagctggtaccccagctcctccaggac

SEQ ID NO: 863875 - DNA, 100 bp, Homo sapiens
gccctctcgctgttgctggtctctggctccctcctcccagggccaggcgccgctcagaacgtttctcttcagcaacgggtagcagaattggaaaaaatta

SEQ ID NO: 863876 - DNA, 98 bp, Homo sapiens
gggagtcaatacctccggatactcagtttgtaaaaacatggcggatccagaattctggttaatccctatatcctgaagaagaacatgatcctcatgac

SEQ ID NO: 863877 - DNA, 99 bp, Homo sapiens
caagaccgaattcagaaggatatcgacgtcgtgatccagaagtccagagctgaggactgcctgtttgcaggcaagccaaaattccttccggatagaata

SEQ ID NO: 863878 - DNA, 99 bp, Homo sapiens
cagcacttccggtcacgccatcgttgctgccttcttcgtcaagatgtgattgatctcactggagatgataaagatgatcttcagagagcaattgccttg

SEQ ID NO: 863879 - DNA, 100 bp, Homo sapiens
gtttttctgttttgcctgaatacatgatttaaacaagagatttccacagaagtcttactactttgaccgcgatgatgtggctttgaagaactttgccaaa

SEQ ID NO: 863880 - DNA, 125 bp, Homo sapiens
acagacacgtacgtctactacccttgttagaaggaagctttggatcttcggtggacttatgaaaatatgcatcagtttaatactgtcttggaattcatgagatggaagcataggtcaaagctgtt

SEQ ID NO: 863881 - DNA, 98 bp, Homo sapiens
cgtggttcctgtgatctgtgtcctctttgcagaaggtcctggctataagtcaccatggcacagcaagctgccgataagtatctctatgtggataaaaa

SEQ ID NO: 863882 - DNA, 98 bp, Homo sapiens
agagatttcctgttagacaagacaaattagagttttcctactgacttaacttgtccagttacaacacagggatcacaacaaacacaaccgccacagaa

SEQ ID NO: 863883 - DNA, 100 bp, Homo sapiens
agacaatccaaaacaaacgctattcctctcacattgttttcagagggaggcaacttttctcctaaagaaatcaattcactgtgttcccgactggagaagg

SEQ ID NO: 863884 - DNA, 98 bp, Homo sapiens
tctttcacacttcctgtcattggcttatacccctacctgtgtcattggccttaacaaggacttaaaggttggaagcgaagtggaagcactgaacctcc

SEQ ID NO: 863885 - DNA, 100 bp, Homo sapiens
agtgctatgagtggcagtcatcaggacctcagtgtgatacagccaattgtaaaagactgcaaagagttggatgaaaaatctgacaaacagtatgctgaaa

SEQ ID NO: 863886 - DNA, 100 bp, Homo sapiens
ggggaaatgcagaaaacagaaacacttcttttattttcctgtaatatatctgtatcatcggagcttgactgtagtagactctgatggagctaccaactct

SEQ ID NO: 863887 - DNA, 100 bp, Homo sapiens
tacattgagtttgatgcattcctgtggcatgtatgacttctcagggcagtttgctttccatgaaatcatggatcggatctacaaaaatgtcatgaataaa

SEQ ID NO: 863888 - DNA, 100 bp, Homo sapiens
cctctgggaggcttaccgagagtttgaaagtgcgattgtggaagctgctcgggaacagatggagtcggataactgttcaggaggagatgatgactggacc

SEQ ID NO: 863889 - DNA, 100 bp, Homo sapiens
cagcttgcagaaagcctattgtggaaccttgtgatcatatcagtgtgcgtgtgaccaccatggatgcagagctggagtttgccatccagcccaacaccac

SEQ ID NO: 863890 - DNA, 148 bp, Homo sapiens
gagacggcaccacagctcacgctggtgctggccatcatgctgcagagtggccgggctgagtactaccagtctgcagaagaacatgcaaatagccaaccacaccctgaagtacggcacccaggccaggaagtttgatgtgaaccagttg

SEQ ID NO: 863891 - DNA, 99 bp, Homo sapiens
cggagccgaaacaccggtaggagcggggaggtccctgtgcgttttattgcgacctgccggtgggaactttgtctccgagtcggagcagcatggagcggc

SEQ ID NO: 863892 - DNA, 98 bp, Homo sapiens
gcaaggtggcagagaaggaaggatggcctctggacatccgagtggatgtggaagatgtcaagtttgtgatcaactatgactatccaaacagctcagag

SEQ ID NO: 863893 - DNA, 100 bp, Homo sapiens
ccaaggagatggtctcattaagctctggttgaagaagtgtattttgcgcagaaggaacgtgatgaagctgttatgtctagactgcaattagccattgagg

SEQ ID NO: 863894 - DNA, 98 bp, Homo sapiens
agactttaacatgggctcttcctctagcagccagtatactttctgtcagccagaaactgagtgaccctccacgaaaaggagaatcttatgaatgcaga

SEQ ID NO: 863895 - DNA, 100 bp, Homo sapiens
ttgatgtgaactcagaagtccatgttcaggaaatggctgaagttcgtaaagatgatgttgtaacagtgactgtttgtggggacattcatggacaattctt

SEQ ID NO: 863896 - DNA, 100 bp, Homo sapiens
cggaattaagaaaacagagcgacgagcaagaagcagcccaaagtcgaatgattcagacttgcaaggttcaaagtcaagtgttttctgaagcaaactgtgc

SEQ ID NO: 863897 - DNA, 100 bp, Homo sapiens
tagatccccagatcacctcgctcgacgtgttgcagcacatcctcatccgagcctttgatttgagtgggccccagggccctgtgtgcaggtgagctacaaa

SEQ ID NO: 863898 - DNA, 100 bp, Homo sapiens
ccggctccgtggggccgtcttcccggcgagtccgcgacggtcgccgcccacggcgagatgctctacccatggtaccccaggaccagaaggcaaccatatt

SEQ ID NO: 863899 - DNA, 100 bp, Homo sapiens
catgatattttccaccatggaaccagaggcacctgacttggacttagtagaaatgtaactcacgtagtgctccacctacacgagggcccccgccatctta

SEQ ID NO: 863900 - DNA, 98 bp, Homo sapiens
tgaagcagaagaataaggagaaggataagtcgaaggggaaggcgcctgaagaggacgaaggaatagccaggccagaagaaggaaggcctgtggtgagt

SEQ ID NO: 863901 - DNA, 100 bp, Homo sapiens
taccgctcaggtgctgcaggcacagcccgagaaaccgcagcactacacgctcagcaacagcctcaccaaggactccatgaatatcaaagcccatatccac

SEQ ID NO: 863902 - DNA, 100 bp, Homo sapiens
gagggagagaaccagcacttctgggacgcacagagaccgtgaagattccaagttcaggagaactcgaccgatggccgccctgctcccccaatgaaaggcc

SEQ ID NO: 863903 - DNA, 100 bp, Homo sapiens
accaagtcgattaagaagaaatcgacagctgtccatcaacattttaccacaaacagctcttttcacaaaaaggtggcagcaaatgcacacattcctccag

SEQ ID NO: 863904 - DNA, 100 bp, Homo sapiens
aatgcacgccagctggtagaaattgcagccagggatattgagaaacttctgagcaacagatctaaagccctggtggtaatggattaggaattagaattgt

SEQ ID NO: 863905 - DNA, 100 bp, Homo sapiens
aaaaatggtagattccttggtggaaatgttggtggaaacatcagatctctccatattttgactttaagaaagaaaggccttaatggttgtgagagccctg

SEQ ID NO: 863906 - DNA, 98 bp, Homo sapiens
tattaccctttgtgtcatcctccacagctccagggaaggcactcaaaagtggggggcaggaaagaccacacctgtgacaatgcaggttggagaaggtc

SEQ ID NO: 863907 - DNA, 50 bp, Homo sapiens
ggtggaggtgttaaatgaaagtttatcttgcagattatggactttcctac

SEQ ID NO: 863908 - DNA, 100 bp, Homo sapiens
acaggaactggatgccaactctgcccttatggaattggacaaagagccctatgagtttgtctctctggaatggctgcaaaagtggttggatgaatcaaca

SEQ ID NO: 863909 - DNA, 100 bp, Homo sapiens
atgccaaggaaaaactggagagcttcatcaaaaatagtgatagctttgataagacacaactcagatgggaagttcatcgcccgggcacagcggatagagt

SEQ ID NO: 863910 - DNA, 98 bp, Homo sapiens
ggaacctcaggatcttgagctagagggaccaaagcggatgttggatgctcaagtgcaaacagacccagtatccatcggaccagttggcaaatccaagt

SEQ ID NO: 863911 - DNA, 100 bp, Homo sapiens
acgccttcccacctagctctcctctctttgcagagccatacaaagttgtactgatgctttgggttggaaaaaattgtacacagaattttctcagccaagt

SEQ ID NO: 863912 - DNA, 100 bp, Homo sapiens
gtggggacctaatgatgcacattcatactgatgtcttttctgaaccaagagctgtgctcctaacagtattggctttggaaaagagagtgaaagatctatg

SEQ ID NO: 863913 - DNA, 99 bp, Homo sapiens
acggctccaacagggatgcgctgagcgatttcttcgaggtggagtcggagctgggacggaggaaagccaagtatctgtgacttcagcagatccagtttt

SEQ ID NO: 863914 - DNA, 100 bp, Homo sapiens
gcgcgggcgcgcaggccgcggggagcacctgggtcttaggagggaatgattccccagtaatattccctgccctgacccaaagtgctggttggcctccctc

SEQ ID NO: 863915 - DNA, 98 bp, Homo sapiens
catcagccacgcccagaagttgtggacggcttgacggaaggctcactctacgagttcaaaatcgccgccgtcaacctggccggcatcggggagccctc

SEQ ID NO: 863916 - DNA, 98 bp, Homo sapiens
cgaagagcccgccctgtcccagtaccaggaacaggagtacagctgtgtagtaaagatgccttctggtgaatttgcacgtatatgccgagatctcagcc

SEQ ID NO: 863917 - DNA, 99 bp, Homo sapiens
tcagcacggggtgtccagctctggatgctgccttggtccggcacctgtaccactgcagtcgcctcctgctggtggaacctgaaaatgctgcagtgccgg

SEQ ID NO: 863918 - DNA, 99 bp, Homo sapiens
aaagctctgctgctgggggccctcgctctgaccaccgtgatgagcccctgtggaggtgaagacattgtggcattccaaaatatgcccggtgctatccgc

SEQ ID NO: 863919 - DNA, 98 bp, Homo sapiens
gactacccacctcttccttcagatcactattcagaagaagtatgagttaatacagaaaggagtgactgaacttagaactgttgggaatgttccagatg

SEQ ID NO: 863920 - DNA, 100 bp, Homo sapiens
cagaagctatgcttggcagcagaaggatttggcaacagactttgtttcttggagtccacttccaattccaaggcaggaataccaatgggaccaatgccag

SEQ ID NO: 863921 - DNA, 100 bp, Homo sapiens
cttggtgccttattaccgtcaaatcctccctgtcctgaacatctttaagaatatgaatgaggatgaggaagatgaggaaatggtggaatctaaagttggc

SEQ ID NO: 863922 - DNA, 98 bp, Homo sapiens
cctggggaacccgttcagcacaccagtggggcagtgcctcggtgaagagcgattatatgttagagatagctgatcaagtggaccaggaaattgctttg

SEQ ID NO: 863923 - DNA, 98 bp, Homo sapiens
agattcaccaaataagctatatactttggttacctatgtacctgttaccactttcaaaaatctgaagaagacacttgaatcatgggtgacgttaaaaa

SEQ ID NO: 863924 - DNA, 99 bp, Homo sapiens
ttttgagtcctcgagtgaatgggcggatctcatatcttcacttggcaaactcaacaagttatgagaaacaaggtcgtgtccgcaaagttgtaaaagctc

SEQ ID NO: 863925 - DNA, 111 bp, Homo sapiens
caggtcacattcttggagctcaaggtgacaggccagagcccaggtccccaggacagtgcagtgtttcacctgtctcggaaagtaacatctctggtccctgagagctgcctg

SEQ ID NO: 863926 - DNA, 100 bp, Homo sapiens
taagagtttggcgagtcagtgactgaagcgcccgtccattccaagagactggatctccaattactgcgtcatgtgttggattaggcaattctaaaacacc

SEQ ID NO: 863927 - DNA, 100 bp, Homo sapiens
ggtttaacccgcggtggcggcggcgacggcggccctggcaggagtgtgaggaagaggctgtctgtgtcattatgtgtgcgtcggtcaagtataatatccg

SEQ ID NO: 863928 - DNA, 99 bp, Homo sapiens
tgatgtgatggcccggggaattgatattcctgaagtcaactgggttttgcagtatgaccctcccagcaatgcaagaattggcagagggggtcgatttgg

SEQ ID NO: 863929 - DNA, 100 bp, Homo sapiens
aatacgtgcaaatgtggccgtggtttctggtgcaccacttcaggggagtttatgtggccgaggcagacaagtggaattaggccttgctgcaggggacttc

SEQ ID NO: 863930 - DNA, 98 bp, Homo sapiens
agcagcagccattggaaccgggagaagccgcactccactctgactcccaggacgggcaccaggatgggttgacaccacttcactgtgctgcacgaagt

SEQ ID NO: 863931 - DNA, 98 bp, Homo sapiens
tatacaaaaaggagaaggaagaagcagatcttcttttggagcagcagagactgggacaccaatgagttgtgtcttccctctgtccactctcagcacct

SEQ ID NO: 863932 - DNA, 98 bp, Homo sapiens
atggggaaccttgagattgtgctcacgggacacaatgccgacctctccttcctgcagattcctggattttgtgaagggggatttaaaatccatgaggc

SEQ ID NO: 863933 - DNA, 101 bp, Homo sapiens
ctttctcttacaattgaactgcttcagaaagcacagtgataccaagaagaagcaggggatgaagaagaggagcaacagtgaagtggaagacgtgggaccaa

SEQ ID NO: 863934 - DNA, 100 bp, Homo sapiens
ccaacagtatggaagagactctgatgcaaatagatttggagtccaggaatgagactaagcatttatctgtaggaaaagatattattcaaaacactggttc

SEQ ID NO: 863935 - DNA, 100 bp, Homo sapiens
gagatgattatcgtaggaggagtcctccacctcgtcgcagatgcggaaaacgccatgcggtacataaatgggacgcgtctggatgaccgaatcattcgca

SEQ ID NO: 863936 - DNA, 100 bp, Homo sapiens
ccgacatcagcgatgcctactgctccgcggtgtttgcaggcagtcgatgatgtgaagaaaggttacatcaaagcagaagaaaagtcctatcaattacaga

SEQ ID NO: 863937 - DNA, 100 bp, Homo sapiens
ccgggacacgcaggaacggctccagcatcaagatccgtctgacagaactccatccggcacaacctgtcactgcatagtcgattcatgcgggtccagaatg

SEQ ID NO: 863938 - DNA, 98 bp, Homo sapiens
agctgctagccaggaacatggactgaagtatccagcgctcattgggaatttagttaagatccccctagctcagtcggaggcgttcctaacggatcttt

SEQ ID NO: 863939 - DNA, 100 bp, Homo sapiens
catttgttgctgctgctggtccttctgtggcatcttctacaaacccatttcagaccaatgccagaggagcaacagaatatgacagatacctagcatctag

SEQ ID NO: 863940 - DNA, 100 bp, Homo sapiens
ctgggcacgatgcttcatccaggtctcctactaccactgcatctgtgtcagcaacagcagctccaaggtcgaactggaaggtacacccttatagagaaat

SEQ ID NO: 863941 - DNA, 100 bp, Homo sapiens
tgcagaattcacaagatccaatcccttgtccttaaaagctttgggccagattatgttgtatgtggatggaatgaatggagtaataaaccgcaatgaaacc

SEQ ID NO: 863942 - DNA, 137 bp, Homo sapiens
catctggtcccttggcattacttctatagaaatggctgaaggaaaacctccttatgctgatatacatccaatgaggcattatgtggaggagatgttagagggcctagtggaacaatcttatcacctggttacccgga

SEQ ID NO: 863943 - DNA, 100 bp, Homo sapiens
tgtctcctggtgaccgagcacccgcctccgggcatcttcaactgttgcttatcaagtgtcccacaaatgaaaaaaatttctacatcttacgaggaaagac

SEQ ID NO: 863944 - DNA, 101 bp, Homo sapiens
ggacagtgagccagaggccgttggacagtccaggggacgaagacagaagaagtagagaggcagggccgtgaatccacattcatctcaatggaaggatcctg

SEQ ID NO: 863945 - DNA, 98 bp, Homo sapiens
gcctgttcctggcccgcagccgccacctacccagtgaccatgatagaggaagtatcattctgcaaaggaggcatatgaacaacttttgcagacagaaa

SEQ ID NO: 863946 - DNA, 100 bp, Homo sapiens
cagtccgatgtgaaatgccagaacttgttcagcacaaactggatgacatttttgagccagtccttattcctgaacccaacatggagatatggaccaaaag

SEQ ID NO: 863947 - DNA, 100 bp, Homo sapiens
ttttggctgttcgactccatacctttcttacaacttcccttccagcctatcgagctcaactccttcaccaaggctgtcattttagaaaatgaagaacttc

SEQ ID NO: 863948 - DNA, 100 bp, Homo sapiens
gaggctctatgcaggttccactgtcaagaaactaagaatttggaggatgaagagaaaaacaatcctgtggaagaatgggattctgaaatgagagctgcag

SEQ ID NO: 863949 - DNA, 99 bp, Homo sapiens
cgacctgatgggcacggccgaggacttcgccgaccaggcaaagtgtttcatggatttcaaagctggaggcgccttatgtcacattcttggggctgctta

SEQ ID NO: 863950 - DNA, 100 bp, Homo sapiens
ttggaaaaggagaaagagacacatctaagatgagggttttagaatcaggattatgttgacaaagagaaggcaattgccaaagccttggaagacctcagag

SEQ ID NO: 863951 - DNA, 100 bp, Homo sapiens
ggttctctcggggttcttggccagcgaagagatctacattaaccagctggaagccctgttgctggacttgagaccaggagacgtatccagcaagcggaac

SEQ ID NO: 863952 - DNA, 100 bp, Homo sapiens
ggcagtccgtaacatccacaaactgatggacgatgatgccaatggtgatgtggatgtggaagaaagtgatgagtccacctggaaggccgctgtggtggaa

SEQ ID NO: 863953 - DNA, 98 bp, Homo sapiens
aattcctttggaagttattccgtagcataagagctgaaacttcagagcaagttttcattgggcaaaatgggccagtcggatgatgattctgggtcagc

SEQ ID NO: 863954 - DNA, 100 bp, Homo sapiens
cgtgacatggcattgtctgatgttacagaagaatctgaaatcatttcgtgcttgtaatacaacaggaagcgggttttggaattcttcacacgtagacaat

SEQ ID NO: 863955 - DNA, 99 bp, Homo sapiens
agaatgttgaggatgtctcctgacactgtgccaaaggctcctaaacatttaaaagcagagacgtctcagagaggctgtgcagctgctggaggactataa

SEQ ID NO: 863956 - DNA, 98 bp, Homo sapiens
gcttttctctccagtcattctgcttgctgatcaagaacacttaacagcttcaggctttcctggccaagttgatagaatttagtcctctgagggcaacc

SEQ ID NO: 863957 - DNA, 101 bp, Homo sapiens
gagatcatcgaaggggaggtggtggagatccagattgatcgaccagcaacagggacggtagacaagggcgtggtccccctggcagggacaaatggcgagac

SEQ ID NO: 863958 - DNA, 100 bp, Homo sapiens
gcgctactcaggcgctggagaaatacaacatagagaaggacattgcggctcatatcaagaaggtattgtggtcaataagcccaaagatggaatgtcctgg

SEQ ID NO: 863959 - DNA, 100 bp, Homo sapiens
gagagaagtggatccatgccttagaagaaacaattcttcgacatactctccagcttcaagtgatctgggctcttgggatctgctcatttgcctgtcttct

SEQ ID NO: 863960 - DNA, 100 bp, Homo sapiens
cggcttgcaaaactttcagatggagtggctgtgctgaaggtcactgaactgatgcaggagcagtcatacctgaagtctgaattgggcctgggacttggag

SEQ ID NO: 863961 - DNA, 100 bp, Homo sapiens
acaaccacatgatggagaaaattaagagttatgtgaattatgtgctaagtgaaaaatcatcaacctttctaatgaagcttctgcagaaagccgtcattac

SEQ ID NO: 863962 - DNA, 100 bp, Homo sapiens
ctggtgtccgagtgcgccctgatgctggcgcagggcacggtgggcgcctacctggtgacttaagagattaaaattaatttggttgctgttggttctgaac

SEQ ID NO: 863963 - DNA, 98 bp, Homo sapiens
gaatctcaggaaggctggggaagggcttgatcaggcccttaatctcacttgcaacgtgtggggagacccgcctccggaggtgtcgtggttgaagaacg

SEQ ID NO: 863964 - DNA, 98 bp, Homo sapiens
gagtttgtggacagatttatattgtacaacaatactgcagatggagtttataaagttttcaatggaaaagataacataagtaaagttgccataatcga

SEQ ID NO: 863965 - DNA, 100 bp, Homo sapiens
gggccctggcccagccccggcctccaaggaccgcgccgaaggaggtgcccactggagggaggaggcggttcgacccaagcctgtggcccagaataacatt

SEQ ID NO: 863966 - DNA, 100 bp, Homo sapiens
ctgaccgatcagggaccatttgcagtagtgaactcccaggtgcctttgaggcagcaggttggatcgtcaaacgcaggctactaccttggtccatcaaatt

SEQ ID NO: 863967 - DNA, 100 bp, Homo sapiens
aactatgagggtggatgtgtgcagcacagaaactctcaaatgcttaaaaggagttccaggaagcgctcgcccctggccgaggatatgtccttgcaaaaca

SEQ ID NO: 863968 - DNA, 100 bp, Homo sapiens
gtgaactttgtcgcttatggactgaaagtttattgcattccaacagctcattttatgttggttaccttttcgacaaaatgattcatctagtcattgccag

SEQ ID NO: 863969 - DNA, 100 bp, Homo sapiens
gatgtccaaagtcgtcactttccacaaactgaaactcaccaacaacatttcagacaaacatggatttcccttaggtatcatctaattgaatgcctgccca

SEQ ID NO: 863970 - DNA, 100 bp, Homo sapiens
ctcagagccaagggctgaaccaactcagaatgcattgccattttcacataggtttggaattcacccagttgcaggccgaatgcctggtcagcttaatgtg

SEQ ID NO: 863971 - DNA, 98 bp, Homo sapiens
ggaatgggtccaggccgtggtcagccgcttcgacgagcaggaactctaatgaatcattgattgaccagcactattttaccagttggaatgaatgatca

SEQ ID NO: 863972 - DNA, 51 bp, Homo sapiens
gagcgtggttgctgaccagttgaaagatgggaataactgggaacacaagtc

SEQ ID NO: 863973 - DNA, 100 bp, Homo sapiens
ggactgtaaccccagtgaagctgccagtgaagaaagtaacagtgagatagagcagcctgctgttcatgtacaaggtcaggaacctttgactgcttccatg

SEQ ID NO: 863974 - DNA, 100 bp, Homo sapiens
gcgtcccgctcgctgggagagaggtacctctccttttccctctccctttccctaaggcatcaacttctaactcatctcgccaggagaggcctccagtgaa

SEQ ID NO: 863975 - DNA, 98 bp, Homo sapiens
ggacccagtggatgtaaaccccttccagacaaaagcaagccgggaggctggctgcctctcctcctgctgtctctgctggtggccacatgggtgctggt

SEQ ID NO: 863976 - DNA, 121 bp, Homo sapiens
atggcctgtctgataactgactctgatctcaacattttggctgaaatttgccacttgacactgacctggaaaatgaaaaaacatctactgtcccattggctgagatgcttggagacatgat

SEQ ID NO: 863977 - DNA, 100 bp, Homo sapiens
tacacacacagccggaggtcatactgcatcagaaccatgaagaaggtataatgggtctctcccaaatggcgatagaggaaggaggaaaagtaggtttgct

SEQ ID NO: 863978 - DNA, 98 bp, Homo sapiens
aggctaaagaccagcaagctgcagaagcaaataagaatgcgagtattcttttaaaggaacttgatctggaaaagggagaaaactggttgtcctggatg

SEQ ID NO: 863979 - DNA, 98 bp, Homo sapiens
gtgcccatcccggggggcagcaacggcgacatccagcaagttaaagccttccatctgaagtatgatgaagttcgtctggatccaaatgttcagaaatg

SEQ ID NO: 863980 - DNA, 100 bp, Homo sapiens
attattttccaccaggggatttcccaggtccaccacctgctccatttgcaagccccttcacagatgtagtcactacaaatcttaaattgcgaaatccatc

SEQ ID NO: 863981 - DNA, 98 bp, Homo sapiens
gtcgcaagagaaaacttgactgtatacagaatcttgaatcagaaattgagaagctggtagctacagcaagctgggtagcaggcagatccaaaggatat

SEQ ID NO: 863982 - DNA, 98 bp, Homo sapiens
agttgggcttggtaccgtgctgcccagaatgcccttcgggaggtatgagcattctccagggaaaggatgacatatttttggacctgaaacagaaattc

SEQ ID NO: 863983 - DNA, 100 bp, Homo sapiens
caccgagtacctcaggaagctcagcaagactggagtccctgatggaattatgcagtttattaagtttggaaattttagcattcaggtgccaggaatgcag

SEQ ID NO: 863984 - DNA, 98 bp, Homo sapiens
ggagaaggaactgcccctgtatgcgcgccccatcttcctgcgcctcctgcctgagctgcacaaaacagagttgaagtattgataacaccaaggaactc

SEQ ID NO: 863985 - DNA, 98 bp, Homo sapiens
tcaatcttactggtgggaaatataattccaccttcctgggagtccctttcgtcatgctagctgatggtgagaccattctaaaaggcctccagtccatt

SEQ ID NO: 863986 - DNA, 98 bp, Homo sapiens
gaccgccctggacatcaagattaaaagagcgaataaagtttatcacgccgggatgctgttagagaaatttgttgaagaatgcaagttccctccagtgc

SEQ ID NO: 863987 - DNA, 51 bp, Homo sapiens
tctgactcctgcttcccgggtgttgctcgttttgaaggatgacctctagga

SEQ ID NO: 863988 - DNA, 100 bp, Homo sapiens
ctccagagagacgtgaaacatgtgaacactcaagtgaagcaaaagccttccatgattacgttacttgtctgcaagacttttttggtgatgacgatgtttt

SEQ ID NO: 863989 - DNA, 98 bp, Homo sapiens
tgtcccctccccctccgcctccgccggagccgcctcgtgcactcaagaccactgatgcagaccctgcctttaagaaccacggtcaacaatggcactgt

SEQ ID NO: 863990 - DNA, 100 bp, Homo sapiens
gagctatctctacctgctggaaaaaattcccctgggtggaaatggatattgttgaaaaactggtgaaaatgataccttgtgagcatgaagacctgctgaa

SEQ ID NO: 863991 - DNA, 98 bp, Homo sapiens
gaataggtgtatcaagtaatggtgcaaagcctgaagtggtggacataatgcgagttaacgtggacaaggttctggaaagagaccagaagctctctgag

SEQ ID NO: 863992 - DNA, 100 bp, Homo sapiens
gctagtgatgtgagcaaatgcctcattcagattagtgatgatgaaccaggttatgaccttgatttattttgcatacctaatcattatgctgaggatttgg

SEQ ID NO: 863993 - DNA, 99 bp, Homo sapiens
tgctttcccgaatctcagaatgccggtgttaaataccacattatttgaaagctgggagatcgttggaccttacccttcctggtgggtttttaacctact

SEQ ID NO: 863994 - DNA, 98 bp, Homo sapiens
catgatggcgagcatgcgagtggtgaagagcccacccacctttgggttcctgttggacatcgatggagtgcttgtgcggggccacagagtgatccctg

SEQ ID NO: 863995 - DNA, 100 bp, Homo sapiens
tggtctaggattgcctcattgctgcatagaaaatcagcaaagcagtgcaaagccagatggtcatcatcagatttgaaatatttaaagtggatacaaaact

SEQ ID NO: 863996 - DNA, 99 bp, Homo sapiens
aaaagaagaagcggaaacaacgttctcccgcaaaacatttaaatcaaacggtattgagatggattgggttatgaaacataatggtccaaatgacgctag

SEQ ID NO: 863997 - DNA, 98 bp, Homo sapiens
ttccatgggcgcgtcacacaggcctccgtgaagaacttccagatcatccatggcaatgaccgcagaggagatgctgaagaagaaacctcgggccacca

SEQ ID NO: 863998 - DNA, 50 bp, Homo sapiens
gagcagttgtctgatgaagagaaggtattgatgaagatgaccctactgct

SEQ ID NO: 863999 - DNA, 98 bp, Homo sapiens
aggttctgcagaaggttgtgactttagtatacaactacacttgctgctttgaaggatgaagttgtatctgttgaaaatgaactctcagaattgcaaga

SEQ ID NO: 864000 - DNA, 99 bp, Homo sapiens
cgacgaacatttctgggtgacactcaacaggattcccgttgactatattgtggagtatgactatgatgctgtacatgatgatgaattaactattcgagt

SEQ ID NO: 864001 - DNA, 100 bp, Homo sapiens
aagatttttgctgtctctggcctcatttctgatcgggaagcctcatctagcccagaggatcggaatgacagatttttttacaggagtgggacaacgctgg

SEQ ID NO: 864002 - DNA, 99 bp, Homo sapiens
gcaaagttcctcacagtttaggtctcaaggcaagcctattgagttaacacctctgccgctgctaaaagattatctttctcaaggaatagatctttctgg

SEQ ID NO: 864003 - DNA, 145 bp, Homo sapiens
ccggcttccgctccgcccaccccctagtacttccgttctccagcgctgggcaccgcggccggagctgtgggctggccaagctataacatcagaaatggtgaatgaatacaagaaaattcttttgctgaaaggatttgagctcatg

SEQ ID NO: 864004 - DNA, 98 bp, Homo sapiens
gtaaagatatttcaaggaaatgtgcacaactttgaaaaggaatcctgtactatgtctacatggggctgctggcagtgttctgtaccaatgccatcaat

SEQ ID NO: 864005 - DNA, 98 bp, Homo sapiens
ggagcccgagcagccgccgccatggcaagaaggtgggagtcaatcattttgacaagtctcctgaaaggaacagctagcaggaactgaaacctttttcc

SEQ ID NO: 864006 - DNA, 100 bp, Homo sapiens
ctttctaaaactgaaggagaagcccatgaagagatggtggattctcactgagttttgactagcggaagaaaagatggagtctgcacgcaaagcatgggag

SEQ ID NO: 864007 - DNA, 100 bp, Homo sapiens
aatggtctcttttcggacttttgaagattttgtcagatggtgatggaacaaggagattggctgattggaggagatcttcaagtcttggatcgagtttatt

SEQ ID NO: 864008 - DNA, 98 bp, Homo sapiens
actagaaaaattgtggagtgtcggtttattttaggacagtggaacttatagaagagcctataaaagggtctcctggtttgagtttctatttcaaaatt

SEQ ID NO: 864009 - DNA, 100 bp, Homo sapiens
tcctgagctgcattgcactcaacctgcagggaacaagaattgcaactgcatccgagaaaaaaactctctgcagaggaattagagcgaaaacggcaagaga

SEQ ID NO: 864010 - DNA, 98 bp, Homo sapiens
ccacacctctagtggacccctcagtatatggatacggagtacaaaaacggcccttggatgatggagctgagtcatccaatggtggctattcctgaaca

SEQ ID NO: 864011 - DNA, 100 bp, Homo sapiens
gggactctgctctgctgagatcaagcagattgtgtccgagtatgcagagaagccaaaacctattgatgtacaagtcattacacaccacatgcagcgatat

SEQ ID NO: 864012 - DNA, 100 bp, Homo sapiens
aaggggcagtacaagcttacgtctctgctcttcagtacaatccttgaagcgtgacattcaggaaaacgatgaagaggcagtgcaagtcaaagagcagagc

SEQ ID NO: 864013 - DNA, 98 bp, Homo sapiens
cggaacttcctgtggtcatctccctgacaacccagataacagacagagtctctgttgcccaggctggagtacagtcgcacgatcttggctcactgcaa

SEQ ID NO: 864014 - DNA, 98 bp, Homo sapiens
tggggtcccggctgccctgtggcctcgctcctcggaggatggagaacatcattgcaacagtaagagattccaacctcaagctgacccttgctttcggg

SEQ ID NO: 864015 - DNA, 98 bp, Homo sapiens
aagattaacgatgaggacaaacagaagattctggacaagtgtaatgaaattatcaactggcttgataagaatcagattctgaacacaaactcgagacg

SEQ ID NO: 864016 - DNA, 100 bp, Homo sapiens
tgatcacgcagctggctggcttcagtggaccagttgtaaagctctctgaaatagtgaccttagcgaagcaagcacatgtggatgtgaaatttcagttgcc

SEQ ID NO: 864017 - DNA, 98 bp, Homo sapiens
gtgaaacctcctagtagaaaaagttcttgggacaaacttcatttgagccatcatcaaccactttaaccccaaaattgagtcctacgctgctgtgaatc

SEQ ID NO: 864018 - DNA, 100 bp, Homo sapiens
agccagcccgccagcatgccccagtccaaagtgggacctgatgcagaacatcatgaatgacatgccgatctacatgtactccgtgtgcaacgtgatgtct

SEQ ID NO: 864019 - DNA, 98 bp, Homo sapiens
catcaaccgccagatcaacctggagctctacgcctcctacgtttacctgtccatggtcaaggtcagcatctcctcgacgatcaagatctatctctctt

SEQ ID NO: 864020 - DNA, 100 bp, Homo sapiens
tacagaagcagatggaacattttcaagagagaagaagaaggaggttcctgctgtgccagaaacccttaagaaaaagcgaaggaatttcgcagagctgaag

SEQ ID NO: 864021 - DNA, 100 bp, Homo sapiens
accatgcagccaaaaccctggggattggcaaagccattgctgtcttaacctctggtggagatgcccaagggaggagtctgctactagtcttatcagctct

SEQ ID NO: 864022 - DNA, 100 bp, Homo sapiens
atgatctctaccgatgggaagtccttattattggccctccagatacactttagttcatctcagaagaagttgttggcacctgatatgtttacagaatctg

SEQ ID NO: 864023 - DNA, 100 bp, Homo sapiens
agtggactcaacttcaaagacgttctcaaggagaaggcagacctggatttgaaaaatgtgtgagtgctaaggaagctttggagactgatctttataagcg

SEQ ID NO: 864024 - DNA, 98 bp, Homo sapiens
agcaccccactcctgaacctgaatgagcccctgggcaaccacgagacagacaacatgaaccagatctacggtttcgagggtgaggtgaaggccaagta

SEQ ID NO: 864025 - DNA, 100 bp, Homo sapiens
agctccagggcgggctgcgcaccaaggccctgattgtggcggccgaggagactggcaggcgggaccgctcaagcagtgtgaggcggacccaggccattcg

SEQ ID NO: 864026 - DNA, 124 bp, Homo sapiens
gcctggccttgagggtccacaccgcgagggaagatgcgtgcgcccattgcaaagattgaaaatgtgcagaaaacaggtttcatcaaaggaccaatgttcaaaggtgttgcttctagtcgatttt

SEQ ID NO: 864027 - DNA, 100 bp, Homo sapiens
ccagatttgatggccttcacaatccaagttccacaatatattgactactgccacaattccgtaacaaatgtggcaattattttggatctatcacctgtca

SEQ ID NO: 864028 - DNA, 98 bp, Homo sapiens
ctttctcttccggatgtcccggagcaagggaagacgcttccctcctggggccaggccctgctgtcacaggacttcgagctgctgtgccgggatggtag

SEQ ID NO: 864029 - DNA, 100 bp, Homo sapiens
atttatggagcatatattatggaacacactgacacttcctccatggcccatctatcgccggcatcctctcaagtggttacctgttcaagaatcaagcaca

SEQ ID NO: 864030 - DNA, 98 bp, Homo sapiens
agaacggtgaatttcccccgcagcgttgggccggagcactagcctcacggagaaggatctgaaagaagccaaggcgcggagccagcagattgcagccc

SEQ ID NO: 864031 - DNA, 98 bp, Homo sapiens
gcctccagccagctggacgagggcaagtgcgcttacatccgaggaagcgagcagctgcaaagcatctaatagaacgctactaccaccagttaactgag

SEQ ID NO: 864032 - DNA, 101 bp, Homo sapiens
ccaagcctgctacacgcttgatgtggaaatcccagtatgttccatatgatggaatcccatttgttaatgcaggaggtgaagctgtcatagctctaagtaag

SEQ ID NO: 864033 - DNA, 100 bp, Homo sapiens
ctacgtgaacaacctgaacgtcaccgaggagaagtaccaggaggcgttggccaaggcattatgccagtacatacaggcttctaaagccagggatggtgcc

SEQ ID NO: 864034 - DNA, 100 bp, Homo sapiens
agtgcagctttgtagttttgcgtgtgttgaaagtacaattctattgcacatcaatgatatcatcccaggtgatgggcagaatctgtttacgaaagacgtg

SEQ ID NO: 864035 - DNA, 99 bp, Homo sapiens
gtgatcccggcgacatactacctctggccccgagatcagaatgccgtcaccttcaggccattcagaggaggaaagagaggggaatatgaagtcagccaa

SEQ ID NO: 864036 - DNA, 98 bp, Homo sapiens
aactataaaagacttctacatgacagctgatgttcacaaggaatagagtcacgtgatgtatgaagggaaacatatacacttctctgaggttgacaata

SEQ ID NO: 864037 - DNA, 98 bp, Homo sapiens
tgaaaatgggctttgtcctgcatgtagaaagggaatgaaagctactggttgattttaaagtgcctgggcctcacaggtttggagatgtcccagaataa

SEQ ID NO: 864038 - DNA, 99 bp, Homo sapiens
gtagacaatggttagagaagaattttccaaatgaatttgcaaaacttactgtaggacgactgggtttggattcagaagaggattattatacaccacaaa

SEQ ID NO: 864039 - DNA, 98 bp, Homo sapiens
cgccctgctctccgccgcggcgctcacgctggcggcccggcccgcgcctagccccggcctcggccccggacccgatgatgattattctccaccgtcta

SEQ ID NO: 864040 - DNA, 100 bp, Homo sapiens
ccacagtagaccctaatgatgaagagatccaggaggctgcaagccagggcctgaaattcgttggtgttatacctcagtaccattcctctgtgaactcggc

SEQ ID NO: 864041 - DNA, 100 bp, Homo sapiens
tcatcgaccaggagcatgatgtggtgtggaccgaagcttacattgacagcactgatgcctccattgcacacagattccacatcatgagagaaaaacaccc

SEQ ID NO: 864042 - DNA, 98 bp, Homo sapiens
actcatccacaatgatttctccagtgctcatcttgttctcgagttttctctgccatgttgctattgcaggacggagcttaacagcattgcgcagtgat

SEQ ID NO: 864043 - DNA, 100 bp, Homo sapiens
gctgcggtggcagctgctgagttctcggtgaagacttcgattttcagaattcctcctgggaatgctgactccttgcttggtgccctgatgcttctctgag

SEQ ID NO: 864044 - DNA, 99 bp, Homo sapiens
actcctcaacaagttgctgcaatgtctgtgtctaatctatcatgctcaaggaatacgaggcccagcaccggcagtcggctgccctggaccctgctgact

SEQ ID NO: 864045 - DNA, 100 bp, Homo sapiens
ctctgtttcaggagtggtgacgcctaagctatcactggacatatcaaggacttcactaaattagcaggaggctctgtcggtggtgagcgacgaccagtcc

SEQ ID NO: 864046 - DNA, 99 bp, Homo sapiens
attccaacacataaaaattatttatccaacagctcctcccaggtgaagctttgttctaagaatatttgtttcatctagtttatgagtccaaatgatata

SEQ ID NO: 864047 - DNA, 60 bp, Homo sapiens
aagctttggatgaaggagcttcaaacccaaagagggacacttgacattcagggacgtggc

SEQ ID NO: 864048 - DNA, 99 bp, Homo sapiens
ggccggcgagcagatgagaccgctactcacccggagcgtcctcttcactacaaggaaaatgtactggagcaggtgcttcggtggagttcattagctgaa

SEQ ID NO: 864049 - DNA, 98 bp, Homo sapiens
ttggaatttgtgcaatgtttagccaacccaaattaccttaattgaatcctgggcattcccttgccccggaaacgccgtgtccaggccgacctaagcca

SEQ ID NO: 864050 - DNA, 98 bp, Homo sapiens
acgagctgaccctgggagacatcgacggcgacgttgtggacgtttaccagcgggagttcctggcgctgcgcgatcggttgcacgcagctgagcaggag

SEQ ID NO: 864051 - DNA, 100 bp, Homo sapiens
gcccgactcggtgattgaggacaagaccatcgagctcatggttgtacgcctgaggagtgatgtacccagagttccagagaaggcttggaaaatagttaag

SEQ ID NO: 864052 - DNA, 99 bp, Homo sapiens
tcagcggggcgttctcccacctgtagcgactcagccccttggatctcccttcgtggagacgacaccggggtcctcctgcccaccccaggggaggcccag

SEQ ID NO: 864053 - DNA, 100 bp, Homo sapiens
ttccctccaaactagatgccgagaaacttgttggtagagcaatcccacagagtattgatgaggaaactgaagtttggagcgatcacatcattttcccaag

SEQ ID NO: 864054 - DNA, 98 bp, Homo sapiens
gggtcctcgccgggaccctcctgtgggcccaggggagaactgcaacatgtttctgttttccaacagagcagtcttccctgtttctctgttctcatggt

SEQ ID NO: 864055 - DNA, 100 bp, Homo sapiens
tgatttggacattgaagaagaggaggaggaggaggaagaggaggaagaaaaatctgaggttatcaatgacgagggcaccctcatccagcatctgaaggag

SEQ ID NO: 864056 - DNA, 100 bp, Homo sapiens
gtcagtttaatctggaaaatgtcactgttttcaatacaaatgagcaggaaagcaccctgggtcagaagattggtccagaaaagggcgtggtgcacctggc

SEQ ID NO: 864057 - DNA, 98 bp, Homo sapiens
ggctactccacccctctggaggccatgaaagaagtgtctgatacaaacttgtacagcccatttaaaccaagaaattaccaattagagcttgctttgcc

SEQ ID NO: 864058 - DNA, 99 bp, Homo sapiens
gaatatgcattgaagcaaattgaaggcacaggaatatccatgtcggcttgtagagagattgcaataaatttgcgcctcattttggtaagcggaaaaaca

SEQ ID NO: 864059 - DNA, 100 bp, Homo sapiens
ggataagggctcagaatagcaccattgctgaatcagcttaaaatggctcgtttcaccattgtggatgggaagatggggaaaggagtcagcttcaaagacg

SEQ ID NO: 864060 - DNA, 99 bp, Homo sapiens
tcatgaccacttcctgagcaatttgctggctcaatcctttatcctattgaaacctgtaacagagattcaaaggtaccttcagaaggaaagaaatctctc

SEQ ID NO: 864061 - DNA, 98 bp, Homo sapiens
gactactacgccaaggaggtcacccgcgtgctaatggtggaaacccacaacgataaggatgacattcggctgctgccgtcagcattgggtgtgaagaa

SEQ ID NO: 864062 - DNA, 98 bp, Homo sapiens
tgattgcagcccaagcagacgtgggggccagagataaatgggggagccagcgccggcagccaccatggcgtcacgcatagggttgcgcatgcagctca

SEQ ID NO: 864063 - DNA, 100 bp, Homo sapiens
gccatccccggctccagcttcctgggtgtgggccgaagatatgctcatgtggtgttgaggaaagcagacattgacctcaccaagagggcgggagaactca

SEQ ID NO: 864064 - DNA, 98 bp, Homo sapiens
gggctatgagcgcttctcaggcacgtaccactttctccggacccagaagatcatctggatgcctcagactgtttgtctgtgggatataaacgcaggac

SEQ ID NO: 864065 - DNA, 51 bp, Homo sapiens
cgcggggctgccggagaccggccgcatgggaatgttctcagagagccaaca

SEQ ID NO: 864066 - DNA, 100 bp, Homo sapiens
tgcaaggaactgatagcttatggttctccattgtgatgaaagcacatggtacaggatcaactcactatcctgaaggtccattctcccaagaagaggggac

SEQ ID NO: 864067 - DNA, 100 bp, Homo sapiens
ctccaacctttcagaggctggctcaatcaagaaaggagaaagagagctcaaaatcggagacagagtattggtactaggttttgacaagcttgcatcatgc

SEQ ID NO: 864068 - DNA, 98 bp, Homo sapiens
tggtacacttacaacaaaccagatgtcagtctgcagggtggcagtagagaagagcatcacagaagttgctcaggagctgacagagctggtggaacatc

SEQ ID NO: 864069 - DNA, 98 bp, Homo sapiens
tcttccaaagcacaggaatctcactctgttaaagctggtctgttctaactgaggactgttatgaacactatccaacaattaatgatgattttaaattc

SEQ ID NO: 864070 - DNA, 98 bp, Homo sapiens
ctttgccacctttgacaaagggtttctcaagtcaaagaaggccctgtcctagcaactagttcaggagctggtgtttttaagatgggacgatttcaggt

SEQ ID NO: 864071 - DNA, 100 bp, Homo sapiens
cgccgattcctcctccttggtcgccgcgtccttggctggcgtccaacacaagccatcagccccatgctcagctcccagcaggcagagcgttcagaagcgc

SEQ ID NO: 864072 - DNA, 116 bp, Homo sapiens
tcgggtagaggctcccgggacctgcgtgctgccgagagaggaagcgaagggcaccatctttgtgtctttgcaagatataacaatgaggaaagctttccgaagttctacaattcaag

SEQ ID NO: 864073 - DNA, 99 bp, Homo sapiens
ctccactaaagaagtgctggaactactgctggacagctgactcttttggtgatcccttcttcccccggactacacagatactattagaatatcagctag

SEQ ID NO: 864074 - DNA, 99 bp, Homo sapiens
atgaccacatccggatgcacaaggtgctgcgggaatcaggcctgaagtacgtggctgtgatgccgccacacatagcttgccttgcgccatggactggca

SEQ ID NO: 864075 - DNA, 103 bp, Homo sapiens
gcttccgtgcccgctggcattgctaaacacgtggaaagaatcaatttggggtgtttaagatagaagtgctaatgaatggaagaaaacattttgttgaaaagag

SEQ ID NO: 864076 - DNA, 98 bp, Homo sapiens
atgcgggagagagaatgagccagagggacacgctggtgcatctgtttgccggagggtctcaaaactgagctggattgagaaaaaaatggctgctactc

SEQ ID NO: 864077 - DNA, 100 bp, Homo sapiens
ggcttcagtggaggaagtaatgctgagcctgcgaggcctgacatcacttaccaggaagatgatccctatgatcttgaagatgtttctgcacagaaatgag

SEQ ID NO: 864078 - DNA, 100 bp, Homo sapiens
ccaggcgggcctcccgtttctggctccgggctgagcttcctggagaagaggaaggttcatctcagaagaagttgttggcacctgatatgtttacagaatc

SEQ ID NO: 864079 - DNA, 106 bp, Homo sapiens
gcagcccgacgcaaaccaaggatctggggatcttcgcactatcccaaggctgaccggttccctgatgtgttacctgcttctgctactgatccaaactgcagaactt

SEQ ID NO: 864080 - DNA, 100 bp, Homo sapiens
atgaacccagaggtcgtggaggtggccgtggaggcagaggtggcatgggttgcaggtttcagagattagaccgtatatatctaaatgctgggatcatgcc

SEQ ID NO: 864081 - DNA, 98 bp, Homo sapiens
aagagcgagaagctgaaaattttcatgaggtggacaaaatggccagtctttacaacatccacctgcgaactggctgcttctgtaacactggggcctgc

SEQ ID NO: 864082 - DNA, 99 bp, Homo sapiens
gaaaatcgactctcataaacagcctattcctaactgatctgtacccagaaagagtcatacctggagcagcagttgaagactgggatagtttccaagcta

SEQ ID NO: 864083 - DNA, 100 bp, Homo sapiens
aagtatttgagcccagctgcctggatgccttcccaaacctgaaggacttcatctcccgatttgagctgccctacctcctggatgggaagaacaagatcac

SEQ ID NO: 864084 - DNA, 118 bp, Homo sapiens
gtcagttctctgtagtgtttgccaatgttggagccgtctgcaaagtgtccccggcaagaagatcaatatgcttctcaattttaaggatgacaaaagtgaatgtccatgtccagaagaa

SEQ ID NO: 864085 - DNA, 106 bp, Homo sapiens
cctgtgtatgtaggagtgaatataaaaggacttcatctcctcaacatggaaactaagcctctaggaaacgacataaaaaagatgatgataaagcttgggaatatga

SEQ ID NO: 864086 - DNA, 98 bp, Homo sapiens
ggtgtggggcaccaagagcagccccggtctctcggacaccattttctgccgctggacgcaagagactggatctccaattactgcgtcatgtgttggat

SEQ ID NO: 864087 - DNA, 99 bp, Homo sapiens
ctccttggggtttccggctgcagggcggtaaggatttcaacatgcctctgacaatctctagtgttcgatacaagaggctgttttcctagcgtggcttgc

SEQ ID NO: 864088 - DNA, 98 bp, Homo sapiens
caccacaaagtaatcactctcccatctctgcttggtacctttgtgctggcctacatgcagttgctggaggactactcggagccgcagccctctatgtt

SEQ ID NO: 864089 - DNA, 100 bp, Homo sapiens
tgggctggctgaagagcaactgcaggcacgagagagacgctggtgtggtctgcaccaatgctcgggttcatgacgctctcgatattcctgtgcagaaacc

SEQ ID NO: 864090 - DNA, 100 bp, Homo sapiens
gttgctgacccagaggagagttctccaaacatgatcgtttactgcaaaggctgtactatgggaccacactgtgctgagaagcttcctgaggcccctcaac

SEQ ID NO: 864091 - DNA, 100 bp, Homo sapiens
attcctgtccggagacagcctaaggtgttaccgggacttagctctggtgagtcgtgatggcatgaatattgtcctgaataaaatcaaccagatacttatg

SEQ ID NO: 864092 - DNA, 99 bp, Homo sapiens
cctgggcaggctgaaagatggcggcggcgtctgtctctgcggcttctggttctcacttgtcgggggctgaacggaggtgtttcacaagtagcaaatgag

SEQ ID NO: 864093 - DNA, 100 bp, Homo sapiens
agcatgtgtcttccccagctctgcagccacatactatccgtttgttcaggaaccaccagtgacagaatgcagggacaaagtccacctgctccaaccagag

SEQ ID NO: 864094 - DNA, 100 bp, Homo sapiens
gtcgatggtcggcggcgcccggatgggcagctgaggcaatggacctcatcatgaccgttgctgtacttacaatgaaaacaacttggtggatggtgtgtat

SEQ ID NO: 864095 - DNA, 100 bp, Homo sapiens
cgagtcttcggagcgaccccggcaggttccttgcattgactccatggagagtatatcacctgatttccgtcatgatacttgggcgtgttattatgcaaat

SEQ ID NO: 864096 - DNA, 100 bp, Homo sapiens
tcaacttcacgctggcgcgagccccgtcctccttcgccgccgcgcacaaccgcacgtgcaggtgagcgagtgctgtgctttcatgggcctcttctttatg

SEQ ID NO: 864097 - DNA, 100 bp, Homo sapiens
gtccgagatgggaaaatcaaactctcacctgaggaagaggggtgagcccctccagactccgaataggagatcaagagtttgattcattgcctgctttact

SEQ ID NO: 864098 - DNA, 98 bp, Homo sapiens
cacttgctgaaggatttcatgcaagattacaggaatttcagaattttgaacaaatctttgagagacatgcgctggaacaagggaaccatcttaaaagc

SEQ ID NO: 864099 - DNA, 98 bp, Homo sapiens
ttggcaactgtggtcactcaactgctagtatataatggtgtttaccaatggattttggtatttggaaagggcatttggatgccctaactgctgatgtg

SEQ ID NO: 864100 - DNA, 100 bp, Homo sapiens
cgcctcggcgccctttcttggcccttgttcccccaaatgtctgactctgactctcggactgagaaacgcaagctcattgctatggacagtgctatcaccc

SEQ ID NO: 864101 - DNA, 100 bp, Homo sapiens
agctcagcagtacctgctcttccgtgtggacatgtctgatatgacccctgcagcactaaccaaagtcactcagcctctgaagaagcttcgggttcagact

SEQ ID NO: 864102 - DNA, 100 bp, Homo sapiens
gatgtccaatgagcagcaaggagattgtgaccctcgtggaagattttcacagagcatccaagaaaccaaagcagtggcacctggaatggataaaagtggc

SEQ ID NO: 864103 - DNA, 100 bp, Homo sapiens
aaaaagtggtgcagtttttgatgaaattgtagagaactcgggtattcccctacatctcagccatggtgaacaacggctccctcagctatgatcatgagcg

SEQ ID NO: 864104 - DNA, 100 bp, Homo sapiens
aatgggcctggttgaaacaaaattggcgattattcctggtggaggtgaagctgtacttcacaaaaacagtagaggagccgtcaaatccagaggctagcag

SEQ ID NO: 864105 - DNA, 100 bp, Homo sapiens
ttcaggaagcagaggatattattctagtgctttcgcaagcatactaaataagcttactcctgaaaagtttgacaagctatgccttgagctcctcaatgtg

SEQ ID NO: 864106 - DNA, 98 bp, Homo sapiens
gcttggcagcagaaggatttggcaacagactttgtttcttggagtccacttccaattccaaggcgggcgctaatattgacacctgctcagaagaccag

SEQ ID NO: 864107 - DNA, 101 bp, Homo sapiens
agccaactggacagcggagcacgatgattgataggtcaaaatgcagatcttcgtgaaaacccttaccggcaagaccatcacccttgaggtggagcccagtg

SEQ ID NO: 864108 - DNA, 100 bp, Homo sapiens
aggccattcagtgtgttgacaataatcagtctgttctagtatctgcacatacctcagcgggaaaaacagtatgcgccgaacacattcctgaaggcgctaa

SEQ ID NO: 864109 - DNA, 100 bp, Homo sapiens
aagctcttttgggctgattcagatctccggcgaattgaaagcagtgatctctcagatgggaatttcttagccataggctcacatgacaactgcatctata

SEQ ID NO: 864110 - DNA, 100 bp, Homo sapiens
gggagttagtactgggctagtggccacgctgcaagggctgatagttcaggaccattcagaccccatgttcagttcatatgcctataagtcccactaccta

SEQ ID NO: 864111 - DNA, 98 bp, Homo sapiens
cggaatcgggagattcgggaccatggcacctgtgcacggcgacgactgtgagataggggcgagtgaagcctaaagaaactgttccaactcttgctcca

SEQ ID NO: 864112 - DNA, 99 bp, Homo sapiens
ggaccttttaccatgaatagttctactccttctacagtttcaaccacaccacgggcttttgaccacacaaaacagaaccaggactggacccagtggaac

SEQ ID NO: 864113 - DNA, 99 bp, Homo sapiens
acctcctttgcggagagctgcaagccggtgcagcagccttcagcttttggcagcatgaaagttagcagaatgtctgatcacagatacggggatggtggc

SEQ ID NO: 864114 - DNA, 100 bp, Homo sapiens
ccgctgctgctggtgttagcgctcagtcaaggttatcaatactctggctgaccatcatcatcgtgggactgactttggtggaagtccttggttacatgtc

SEQ ID NO: 864115 - DNA, 100 bp, Homo sapiens
gaaacagcttcatgaactccaagccaaaatcacagctttgagtgagaaacaggacccagatgatgtggtaccagttggccaaagaagagcctggtgttgg

SEQ ID NO: 864116 - DNA, 100 bp, Homo sapiens
ggatgtggtacagctccatgctcctcgatatcagtctatgagaagggtagctacagcaagctgggtagcaggcagatccaaaggatatcatgaagtttcc

SEQ ID NO: 864117 - DNA, 98 bp, Homo sapiens
aaatggttatgatggagaattgtatggatcacagtccctgaatagaagatctggcagggtgctacgcatgatggtcggagtaaatatctcagatgagc

SEQ ID NO: 864118 - DNA, 100 bp, Homo sapiens
gaaaactaagcagtgatgaagacctcgaaataattgttgatcaaaagcaggctatatcgtcttcagcgggccacgtcgagctaatggcatacagggcttg

SEQ ID NO: 864119 - DNA, 100 bp, Homo sapiens
caacatcctttcgagccccaggccttggtgtaccttgttgtagtgtttgaaaacatctgaggctgcatccatctccagcaccccataaagcaacagcttg

SEQ ID NO: 864120 - DNA, 124 bp, Homo sapiens
ggaagtgccaaggtcatccggtccctccacgggcggctgcagggtggaggtgccactcccgggagagccaggcagccatggcgggtcaggaggagacgtctcaggatgagacctatgaagtgaa

SEQ ID NO: 864121 - DNA, 100 bp, Homo sapiens
gtggcttaatttatcttggactggcaatagaggcttcatctctgttgcaggatttagcaggcccaggctgcaagcacaaaggaagtttgctcagtctcag

SEQ ID NO: 864122 - DNA, 98 bp, Homo sapiens
tcttcagagattctgcaaatgcgacaagcctcccagccatacacactgctgctatggatatgctgggaggacctggtatcgaaagccagtgtagaaaa

SEQ ID NO: 864123 - DNA, 100 bp, Homo sapiens
tactcagtctctaaaaagctaagtcctgtgcctcctgattgctgagtgttcacctggaccttctgactaccttccctgtgctattccatcagcctacaga

SEQ ID NO: 864124 - DNA, 100 bp, Homo sapiens
cagttcaaagcttgttgtctttgatactacattacaagccatcatgcacggacgaggcagaggagtggccggtcccatgggccgggggcgcctgatgcca

SEQ ID NO: 864125 - DNA, 99 bp, Homo sapiens
agccaccccgtccgggagggaggtggggggggtcagccccccgcccggccagccgccccgtccgggagattctcgctgaagtctgttaattctactttt

SEQ ID NO: 864126 - DNA, 99 bp, Homo sapiens
gtccatcgtgtgcctgatgatcacgcagctggctggcttcagtggaccaggaggacatgtatgcccaggactctatagagctactaacaacatctggta

SEQ ID NO: 864127 - DNA, 99 bp, Homo sapiens
gaaacattagcaaaagttccacctaatcatgtgggaaagcctttactgaagaagccaatgggaccagcccactgggcctttggcacaaaccaagaagat

SEQ ID NO: 864128 - DNA, 100 bp, Homo sapiens
accaagtaccaagtgaagactttgaacgcactcctcagagtccgactctcccacctgctaagggtgcaaatagctatgggcaacttggcctcggccataa

SEQ ID NO: 864129 - DNA, 99 bp, Homo sapiens
ccaactgctcaaaaattagcagatgaaattctttcccaaaattcagaaatcaaccaagttcatgataatacatatgtgtcaagttcagagaatgatgaa

SEQ ID NO: 864130 - DNA, 98 bp, Homo sapiens
ccgggccgggccgggaccggggccgaggcgaaccgaggggcctgtgcggccgcccggcccggccgcggatcagcaagagtgagccatggagctacgtg

SEQ ID NO: 864131 - DNA, 98 bp, Homo sapiens
tgtgctgtttttgattggcgcctttctcattattataggctccctcctgctgtcaggctacatcagcaaagggtctggcaagttctccggcagttctc

SEQ ID NO: 864132 - DNA, 100 bp, Homo sapiens
ccgcctttccagcatgcaggggctgctcagaggaccattcttagtggcactggggaaatcttggcacccagaagaattcaactgcgctcactgcaaaaat

SEQ ID NO: 864133 - DNA, 98 bp, Homo sapiens
tggacatggaacagaggaacatgttcgttatccaaaactcttagaaggcttgcaagttttagcctcatctggcatagattatgacataaagatctggt

SEQ ID NO: 864134 - DNA, 51 bp, Homo sapiens
tgactgcactgtagcaacccaggcctcaggaacgatggcactgaatttgga

SEQ ID NO: 864135 - DNA, 98 bp, Homo sapiens
gattttcatggttctcttcttcgattttatgaaaatggagaactctgtgatgtcacactcaaggttgggacagcgtcttcgctgctgctggatagtcg

SEQ ID NO: 864136 - DNA, 98 bp, Homo sapiens
ttcgacttccttcagggtttaggagaagcactgttgttttccacacaggaactagaacagtctttggctagctggactcagaacttgaaagaacttca

SEQ ID NO: 864137 - DNA, 100 bp, Homo sapiens
ggcgattacaagacgattcacctgtccagcatccgaccaccgaggctggagggggagaacacccagcaaagctacccattttgaggtttagctttgctct

SEQ ID NO: 864138 - DNA, 100 bp, Homo sapiens
gcagatcttcaccatccgcaggtgcccctccacggacccagttttcggctttgtgagaaaccttaccatcaaacacgatggccagcaacgttaccaacaa

SEQ ID NO: 864139 - DNA, 98 bp, Homo sapiens
tttggttctgctagtcacgtttccaaagctgtgtgctcaacctacttacagtcacgttactacagctcaaattgaaattattccatgcaagatctgtg

SEQ ID NO: 864140 - DNA, 100 bp, Homo sapiens
caactgttgaactcagctgcctgtagttcatttgatgaatacagttcagaacttaaatctggaaggttggaatggagtcctgtgcacaaatctgagaaat

SEQ ID NO: 864141 - DNA, 98 bp, Homo sapiens
gcagcgggcagtgtcggaggccagcggggccggaagcggcggcgcagacttcagattttcctgtccttgatcccagctggactgctcaagaagaaatg

SEQ ID NO: 864142 - DNA, 100 bp, Homo sapiens
gaagcgcttcaaaggaccggacccagagaagaggaaaactctaccggtgcaggtttaagaaaatctacgaagaaacgcagtgagtctccacctgctgagc

SEQ ID NO: 864143 - DNA, 98 bp, Homo sapiens
ggaccggagtcagaaccctccgcagagtaaagctcttgaaagaggcctaaccaaggctctaaagaaattggatgactacctgaacacccctctaccag

SEQ ID NO: 864144 - DNA, 100 bp, Homo sapiens
accagtaacagattgtgttatttcacaaaatgatgcttcaacacccaggccaggtctctgcctcggaagtgagtgcttctgccatcgtcccctgcctgtc

SEQ ID NO: 864145 - DNA, 100 bp, Homo sapiens
ctcgtgttcgtattctctagtggacagccttatgatctcctcattgcgtccccctctgcccactggacttggacttcagatctgaccccagacctgccgg

SEQ ID NO: 864146 - DNA, 99 bp, Homo sapiens
tcatctctggcaccttccaccagtggagagagggcaccaccaaaagtgaggtcttctacccaggcagagaacatttataatgatgaagaccctgaagga

SEQ ID NO: 864147 - DNA, 100 bp, Homo sapiens
ggaatgcttaatggacctttccagcaccgaaattcaagaattatgactcatcggtcagcagaaaaaacctttcagctcttggggcattggtgagtctcag

SEQ ID NO: 864148 - DNA, 100 bp, Homo sapiens
ccctttgctgttggattgttattttgagcaatatgttttggaaaggttggttttcatcatgagtgcctcaagtactacagccttccagcagccttcccag

SEQ ID NO: 864149 - DNA, 100 bp, Homo sapiens
aaggctttctcgcttgtcaccttgccatgtggaagaaactggcctcctcgattgatcagtgtgcaaacaatgcaaagaggcaacatgaactgtggagctt

SEQ ID NO: 864150 - DNA, 100 bp, Homo sapiens
gcgcagcaaagcgcccagcctgccgcctcgctgtccctgcggcttctggggcttggattccttagcaccaccacagctcagccagaacagaaggcctcga

SEQ ID NO: 864151 - DNA, 100 bp, Homo sapiens
gttccccccgcagaccccgcttgttcagcagcagaatgatgcacccacctgcccaaagcagtgccgccggacaggcaccttgcagagcaacttctgtgcc

SEQ ID NO: 864152 - DNA, 100 bp, Homo sapiens
gggatcgctacggaccttaaaatacccgcaacagccccttcgtcccaattgctgattgttggaggttcttttggtcttcgtgagttttctcaaatccgat

SEQ ID NO: 864153 - DNA, 100 bp, Homo sapiens
acacctcttcctcgacaatcacaaattacaatgcccatggaaaccctgtgtcacctgaggaccaagtcagcctcgctcagcagatttcagatgtggtgaa

SEQ ID NO: 864154 - DNA, 100 bp, Homo sapiens
ttagaagaactcgtgagccggattgatgaacccttaggagaaatcttgagagtggacagcaattgtgaagatcgccagagagttctgtgtttcatcaccg

SEQ ID NO: 864155 - DNA, 100 bp, Homo sapiens
aagaaccagcggacctgagtcttcaatgaaagacgtgaagccctccaatatgctagtaaacacaagaggacaggttaagctgtgtgattttggagttagc

SEQ ID NO: 864156 - DNA, 99 bp, Homo sapiens
ctagaagcctgaggagccggagagggtgctggctgccgcgcggccgagtacttcctcgcgtattgctaaaggaggagttgaccacaccaaaatgagtct

SEQ ID NO: 864157 - DNA, 100 bp, Homo sapiens
ggcactaccattaccgaatcgagaattttaccttcaatgatgacttcagtcccagcagtaccagttcagcagacctcagcggcttaggagcagaacctaa

SEQ ID NO: 864158 - DNA, 100 bp, Homo sapiens
ggcgatcctaatcttcaacaaccacgggaagccgcggctctccaagttctaccagccctacagcatctgctgcacccaagcctgagccggttcctgttca

SEQ ID NO: 864159 - DNA, 100 bp, Homo sapiens
cacagagaaatttgaagaattcctagctatcttaaagaaattaggcggggtttcaccatgttgcccagactggtcttgaactcctgagcttaagcaatcc

SEQ ID NO: 864160 - DNA, 142 bp, Homo sapiens
cgagcatccaaacgtgggacggggtgctgcaaggggagcggctgctcaccatgtcctgcagtgacaagattgcacgatacgtaggtaacctttccagagatgtgacagaagtccttatacttcagttgttcagtcagattgg

SEQ ID NO: 864161 - DNA, 100 bp, Homo sapiens
gccttctccaaggaccacgagcaactctacatcatgtcagagaggcagagtgaacacttcccttttcttggcatcagtgacaatcatagtctcagcgact

SEQ ID NO: 864162 - DNA, 98 bp, Homo sapiens
ggtctcttctgagacgtgactcagtggagcgaaagacgggcattgaaggagatgtttcacaaagcagaagaattattttctaaaacaacaaacaatga

SEQ ID NO: 864163 - DNA, 98 bp, Homo sapiens
aggattctcaccacgtactggctagacttatacttctcaaatcttaatttcctaaaggtagctacagcaagctgggtagcaggcagatccaaaggata

SEQ ID NO: 864164 - DNA, 100 bp, Homo sapiens
caaccgtttccgcctcctgctagagcggcgaaccgtgggcagtgagtccgtgcactggagaaggcgaggtcaagtgcccaactgcagaccaactacccct

SEQ ID NO: 864165 - DNA, 100 bp, Homo sapiens
agacgcggatgatggggccttgcagtaagcaggcgagatggaaagaaagtatcaaggagtgagctgaagccactgcccttgagaaccctctcgaggagtc

SEQ ID NO: 864166 - DNA, 98 bp, Homo sapiens
agagttctgcatgttgattcacttgggaagatccccatgaaaaagataagagcacgaactgctttggagataatgatcctattgatgtttgcgaaata

SEQ ID NO: 864167 - DNA, 98 bp, Homo sapiens
aagttcaaatatgacgacgcagaaaggagattctacgagcagatgaacgggacgaacttcggacccagaccagtgccctgaatcgccagctggccgag

SEQ ID NO: 864168 - DNA, 99 bp, Homo sapiens
ccaagaagaccattcagatgggatctttccggatcaatccagatggcagccagtcagtggtggaggatagaagttttactgtggctgtttacatgctgg

SEQ ID NO: 864169 - DNA, 100 bp, Homo sapiens
ttgccggctcccctctcaggacaacccagatgtgcaacaaagtgcgatgatcatggaagggaagtggttgctgtgtatgttactggtgcttggaactgct

SEQ ID NO: 864170 - DNA, 100 bp, Homo sapiens
ctgaagatgtttacagtgcagtcttatcgaaggatgtgcatgaaggacagcctcttctcaatgacatgcacatgatggtgtccaagccagaacagtgggt

SEQ ID NO: 864171 - DNA, 102 bp, Homo sapiens
acagatggtgtgaatacattatgtatcgagggctgatcagggtttggaaatcccttgtctccaggttgctgggattgacttcttgctcaattgaaacactca

SEQ ID NO: 864172 - DNA, 99 bp, Homo sapiens
ccgcggcgcaggaggcggtggagcgcagagcgggcgagcgcgatcaatgaactgagccatgttcaaatccctgttatgttgatgccagatgacttcaaa

SEQ ID NO: 864173 - DNA, 100 bp, Homo sapiens
cgacaagccgctggcagccgcggatctcaccgccgctcagggaatcccttggcaccatgtcctgtgtgcattataaattttcctctaaactcaactatga

SEQ ID NO: 864174 - DNA, 100 bp, Homo sapiens
cttggagtccacttccaattccaagttgcagataataatgaagatgttgatggtgatggtgttcatgaaataacaagccgagatagcccggtttatccca

SEQ ID NO: 864175 - DNA, 98 bp, Homo sapiens
gcaagggctattcctgaccaagaagatctaaagagaacgtctctgaaatcaagtccggatgaaggtgtcgtgaaaactacccctaaaagccaaaatgg

SEQ ID NO: 864176 - DNA, 99 bp, Homo sapiens
gaaaatgtggacagtggagaaggcccagccaatgaagatgaagacataggagctcaggtgcctaaaaggccagaggggcttctcaggccaacctccttt

SEQ ID NO: 864177 - DNA, 100 bp, Homo sapiens
agagcactgacacggcctgcatcgggcccacgctcaggtggagtctttcattttggatcaggatgatttggaaaatccaatgctggaaacagcttccaag

SEQ ID NO: 864178 - DNA, 100 bp, Homo sapiens
ctgcgacgttcacagaggaacactgccggggcccaaccacaagacgactcaataggaggaagacaagttggatggcttgaggactggtactaaaaggaaa

SEQ ID NO: 864179 - DNA, 100 bp, Homo sapiens
actcaagccttattgaagagataggaactcttggttgggataagcttcaggtgagaccacaggagttgacatcactaaaattcaagtcaagagatgtgag

SEQ ID NO: 864180 - DNA, 98 bp, Homo sapiens
accgagaccgcggccgggaccgagggttaaccccaaagattggctttccttggagtgaaatcaggaacatctctttcaatgacaaaaagtttgtcatt

SEQ ID NO: 864181 - DNA, 98 bp, Homo sapiens
aagactttgacttggacatgactgaagaggaggtgcagatggcactttccaaagtggatgcctccggggaggtgtctttcctgaagactatcttcccg

SEQ ID NO: 864182 - DNA, 98 bp, Homo sapiens
ccagtacagtttcaattcacagcgttttgctgagctcctttctacgaagttcaagtatagatttgctgctgcttccaggagaagtggagcaggatgta

SEQ ID NO: 864183 - DNA, 100 bp, Homo sapiens
agagagaaagggagagagagagggggactctgtgtgagggaaagaaaacaatttctcctgctctgcagcttctgttcagagtttcgctcttgttgcccag

SEQ ID NO: 864184 - DNA, 100 bp, Homo sapiens
ggccccgacatgattccttacttctccgccaacgcggtcatctcgcagaacgccatcaaccagctgcaatgaatcgctccctggctaatgtgattcttgg

SEQ ID NO: 864185 - DNA, 100 bp, Homo sapiens
cttatcgaacagagccgggagttcaagaagaacactccagaggtaagtaaggaggtctctgtaccatggctcgtacaaagcagactgcccgcaaatcgac

SEQ ID NO: 864186 - DNA, 100 bp, Homo sapiens
cttagagcaggccgcttggttctgacccagctgagggtccaaattccaagcctgtagtgtccttcattgctggtttaactgctcctcctgggagaagaat

SEQ ID NO: 864187 - DNA, 100 bp, Homo sapiens
tcttggaatactgcagtagaagggtggcacaagaatggctcaactctccaaatagagagaatttctatcagttgcaagtacgaaaatttcctgccgatta

SEQ ID NO: 864188 - DNA, 99 bp, Homo sapiens
ttgctcccgcctgagcccagcccccagaaaggattgtgacatatcgttggacccagaattgaggacttggaccactctataggaactcagtatagtgcc

SEQ ID NO: 864189 - DNA, 100 bp, Homo sapiens
tggaagggcatggcaagactccacctcctggtgaagaaagcaaacaaatatcctccgaatcctaaatctagagctccaaggatgctggtcattaagaaag

SEQ ID NO: 864190 - DNA, 100 bp, Homo sapiens
gcgaggattaagtttaagacttcgcgagaacagaatttcttttggcacctcctctccgcgcgttcttgggtggttttcccggattgtgtgtaggtgtgag

SEQ ID NO: 864191 - DNA, 100 bp, Homo sapiens
cctgagtgactgcgtcaggcatctcaatcatggaaaccatttctggacggctaaagacctcaccgaggagattagatcattaacatcagagagagaaggg

SEQ ID NO: 864192 - DNA, 98 bp, Homo sapiens
aggtgcaagcagatgctgactcagcctgttccattaaggcttgagaaagagatccaagatcttgaaaaagctgaactgcaaatctcaacgaaggaaga

SEQ ID NO: 864193 - DNA, 99 bp, Homo sapiens
ccaaaggctattggatcagctcagcagggtcctcagccagcagagccacgttccttatgagcaccgtgggtttatttcattttcctacaccactgaccc

SEQ ID NO: 864194 - DNA, 98 bp, Homo sapiens
atctgtgggatctgtaatagaaatgtggaccctgatcaggacgcctctcgaagtaggttgcggaatgcccaagaaaagatggtatactccctggtctc

SEQ ID NO: 864195 - DNA, 100 bp, Homo sapiens
gaggatcttctgcggattgttggaatctaccgtgaaaggtgtagcagtcactcggcctacacccacagcatcgaccttgtgaacccagcgacctgactgc

SEQ ID NO: 864196 - DNA, 99 bp, Homo sapiens
gctgaatggcgaaggcgttggacaagtcaacatctccccaactggaccctaggcaaaagtgagtggcactcctctgccaggactccaggcaagccccgg

SEQ ID NO: 864197 - DNA, 100 bp, Homo sapiens
tgatctacgtcatctcagggcagttcctacagatgaagcaagagcttttgcagtgcctacaccaactaatgttacaattgaatcctataacatgaaccct

SEQ ID NO: 864198 - DNA, 100 bp, Homo sapiens
ctgataaataccctttcaaatctccatctataggtggagtctttcattttggatcaggatgatttggaaaatccaatgctggaaacagcttccaagttgc

SEQ ID NO: 864199 - DNA, 100 bp, Homo sapiens
gcattccctttactgcctggggaaaatgtatacggataaccctctgtgccagtgctgtctttttctggttttttgctccactcaagcctgttagaatcac

SEQ ID NO: 864200 - DNA, 100 bp, Homo sapiens
atatgttaaaacaaactcaagatacgaaatgagacttttgaagtgcctttgatttctgggtgatggaatatgagaataggattcgagcctactccacgcc

SEQ ID NO: 864201 - DNA, 99 bp, Homo sapiens
agggcctaagggtgaaaacggtgttgttggtcccacaggccccgttggagctgctggcccagctgggtggcaaaatatgcctgacggatcatttcaaac

SEQ ID NO: 864202 - DNA, 100 bp, Homo sapiens
cttcatcacctctttgtacatcttctgcaattactcggtgaaaagtagtgatgaggcagtgatcctgtgtaaaacagcaattggagctctaaaattaaac

SEQ ID NO: 864203 - DNA, 100 bp, Homo sapiens
agcccagcagccccgcagcggcgccgaggacagtgcagccgagttgcgtctccctcgcgcgagcgcccgggggctggagaaggccaggcagcagctgcag

SEQ ID NO: 864204 - DNA, 98 bp, Homo sapiens
accaacgccatcaccgacctcatcagtgagctgtccctgctggaggagcgcttccggggcgccaatgcttcggcattagagaaagagattggtccaga

SEQ ID NO: 864205 - DNA, 99 bp, Homo sapiens
cgctgtcctcacggcccaccagccgctgcaccaccacctgctccaaggcatgcttccagaagagtggtgcatcagtggttgctattcgaaaatacatca

SEQ ID NO: 864206 - DNA, 100 bp, Homo sapiens
gaagaaaacagtgaccattgaaaatcaccctcatctgccaccacctcccatgtgttcagttcacccatgcagggaaagaatcatgtgatgtacagcttta

SEQ ID NO: 864207 - DNA, 100 bp, Homo sapiens
aattagcagatgaaattctttcccaaaattcagaaatcaaccaagttcatgatgccttcaattaagttgcagagttctgatggagagatatttgaagttg

SEQ ID NO: 864208 - DNA, 98 bp, Homo sapiens
tggggatgagaagaaggaattaccaggtgtgatcaacacctgcacggtacctgcacggcatttattaatacagcaaaagaaatttatgaaaaaattca

SEQ ID NO: 864209 - DNA, 100 bp, Homo sapiens
ccgagagctgctacgagaagtcttcatttctgtgtaaaagaagagccgacacccgcactgccaggatccaagatgcagggctggtgttggcagacacgct

SEQ ID NO: 864210 - DNA, 110 bp, Homo sapiens
gggaatatatccgaagcctgaagatggttccaagtattccctatctagcctggatttgtggtatcatttctatcactgtcattagcctgctttccttgctaggcgtgatc

SEQ ID NO: 864211 - DNA, 99 bp, Homo sapiens
ttgtatatgaccagcagtctaggcgttcaagaggatttgcctttgtatattttgaaaatgtagatgatgccaaggaagagcaggaaaattcagattcga

SEQ ID NO: 864212 - DNA, 100 bp, Homo sapiens
gccagactttaatgaagactatctagttattttcagacagagtggtatatactccagaaagcctctacaaggaactcttctcacaacataaaggactcag

SEQ ID NO: 864213 - DNA, 98 bp, Homo sapiens
aatcggcactctcaaaacatctggcacggtgttcactaccctaataagacctcagcttccctcgggaggggccatttcataattctgaatcatgtctg

SEQ ID NO: 864214 - DNA, 100 bp, Homo sapiens
cgaacttttgacacggctttggaaacgacgtcatgtgttaggaatgtgttccagaagatctagaactgaagaagaagatttttgctcagttagattccat

SEQ ID NO: 864215 - DNA, 100 bp, Homo sapiens
ggcaccaagcggtttggcatgtgtttatctgctgagcacgcgggagagagctatccaaaatcacgaatgcctagggctcagagctacccagataatcatc

SEQ ID NO: 864216 - DNA, 98 bp, Homo sapiens
cgggtggcgcctccctgcgactcctggaccaccgggcgctggtctgctcccagccggaatcctttgtgcattgaagactttagattcctctctgcggt

SEQ ID NO: 864217 - DNA, 103 bp, Homo sapiens
gcagacatctgcttcaccaaggagctacactcccacttcttcagcttgggcaagtgtgtgcctgtgtgccgaggtccaggttcacactagaaggccaaaactt

SEQ ID NO: 864218 - DNA, 100 bp, Homo sapiens
tggcggatgatctgggaacaaaacacagccaccatcgtcatggttaccaacctgaaggagagaaaggaggaaagaccacagcaagattctttcattcgtc

SEQ ID NO: 864219 - DNA, 100 bp, Homo sapiens
attgaagccgcctctgtattacttaccagctggagaagaagcaggcgctccctccattccagccacagatcacagacgactacggtctggacaactttga

SEQ ID NO: 864220 - DNA, 100 bp, Homo sapiens
ctcccaggagggacccacagggctgaaggaagctgccttgtacccacatctcccgccagacctctgactatgtgaagatacggtgggaagatgactgacc

SEQ ID NO: 864221 - DNA, 98 bp, Homo sapiens
ctgtaacccaaaggaggaaacagctggctaagctcatcattgttactggagttggaaaaacaacattgatccataaagccagtgaggttttaaaatcc

SEQ ID NO: 864222 - DNA, 100 bp, Homo sapiens
tggcttaaactcttggcatttggctttgcctttctggacacagaagtatttgtgacagagagcacagtccctggaggacccattggagggcaaaccagag

SEQ ID NO: 864223 - DNA, 100 bp, Homo sapiens
atcttgggcttggcagcaaggaagaggacaggtagtggagatcctgcaatctgaaaagcagactgaaaggagccgtgtaaagccagtggaatatagtcag

SEQ ID NO: 864224 - DNA, 100 bp, Homo sapiens
accctcgtcagcggctccctgcccttcgacgggcacaacctcaaggccatctggctgctgtgcacaggcgctcgtgaggctgccttccggaacattaaga

SEQ ID NO: 864225 - DNA, 110 bp, Homo sapiens
tcgggtctcgggggccgctctgggatcccggccaccagcaattgtccgaagagaagccagattgctccaaggcccgctgtgaagtccagttctctccacgttgtcctgaa

SEQ ID NO: 864226 - DNA, 100 bp, Homo sapiens
ggaacttcatggtcttatgttcttccagtcaggtcaattcagtgaagatatgatacccacagtgggcttcaacatgaggaaggtaactaaaggtaacgtc

SEQ ID NO: 864227 - DNA, 99 bp, Homo sapiens
gccgggcgggagcccctcggccaggtacaagaatattccacagatgtcctttgatgatacagaaagggagccagatcagacctttagtctgaaccggga

SEQ ID NO: 864228 - DNA, 100 bp, Homo sapiens
cagaggtcaaacctgaaagaccccagttatggatgggagatatggaagaaagtagcagtgttgccatgttggtgccagatattggggaacaggaagctat

SEQ ID NO: 864229 - DNA, 100 bp, Homo sapiens
gataaagggctctgaaagctagaagaaaaggtgtacttgcaagaaacctcaggacttgagtaacagcaacatgtttccagccagagacgacactcttcca

SEQ ID NO: 864230 - DNA, 100 bp, Homo sapiens
cccggctcgaagcctggatgaaatagatctctcggctctgaggctgccaaggggccaagggatgagctggggccctccttcccaatggcatctccccctg

SEQ ID NO: 864231 - DNA, 107 bp, Homo sapiens
ttcctagtgttgcgtcctattctgagactcctaaactgaaagaagactcaagctgagacctgtttggcctccctggagcacgaggagggcaagatcctccgggccca

SEQ ID NO: 864232 - DNA, 99 bp, Homo sapiens
aacaagaggaaaggcttcaatgaagggctgtgggagatccagaacaacccccacgccagctacagcgcccctccgagtttatgtggccgaggcagacaa

SEQ ID NO: 864233 - DNA, 98 bp, Homo sapiens
aactccaaatattagagcttagagaaaaccagttaaaaatgttgcctaagacaagaaggggctttccgggaaacagaataatttcgagcgcaaagctg

SEQ ID NO: 864234 - DNA, 98 bp, Homo sapiens
agcgtttctcccatgttgccatgatcttggatttaagtgccctgtatgctcaaaatttgtatcctcagatgaaatggatttgcatcttgtaatgtgtt

SEQ ID NO: 864235 - DNA, 100 bp, Homo sapiens
ctacttccatccctgtaatttcacagccccaggtccagtggcattgcagagcacggatggttgcaggagccaacttttacattgttggacgagaccctgc

SEQ ID NO: 864236 - DNA, 103 bp, Homo sapiens
cagatatgtctatgacaacctgatcacaccagccatgatctgtgccggcttcctgcaggggaacgtcgattcttgccagtctcaggtatgtctttatcagcag

SEQ ID NO: 864237 - DNA, 100 bp, Homo sapiens
cttgcccccccgtcactgggaccccagagctgggactcagtggcctctgaggatgtggctgtgaacttcacacttgaggagtgggctttgctggatcctt

SEQ ID NO: 864238 - DNA, 98 bp, Homo sapiens
atattccttgagagcatttgagaaaccccctcaggtacagacccaggctcttcgagactttgagaaggaagatgagaatgtgcctactgctcctgatc

SEQ ID NO: 864239 - DNA, 100 bp, Homo sapiens
aggcccatgagtgatgaagatcccgaggatgaagacgccttgccagccagccatgtgaagacgtgcctgcctccctgttaccttccaccatgattgtaag

SEQ ID NO: 864240 - DNA, 100 bp, Homo sapiens
attgacaaacctaatctacagtttgatacagatgcagttaggtggtactttggaaaacttggccgaaaagatgctgagcgacagctattgtcctttggaa

SEQ ID NO: 864241 - DNA, 98 bp, Homo sapiens
aggcagagttatttggtcatggaagaacaactgacttgtccaaggaaagaccacagcaagattctttcattcgtctcctcctagcctgggggaccagg

SEQ ID NO: 864242 - DNA, 100 bp, Homo sapiens
tgaagacgttccttgaggaggtttgaaaaactattacaatttgggtgatgtgagccatgattctgtgaacaagtttctgtcccatctgattgagaagtcc

SEQ ID NO: 864243 - DNA, 98 bp, Homo sapiens
aagtctgtggtttatcattgtaatcagcttcttaccaaatacagaaggtccttccatagtgacgccccccaaggacatctggaatgtcactggtgccc

SEQ ID NO: 864244 - DNA, 99 bp, Homo sapiens
tggtgaagtataggctgaggctacctgtgaacagtacgcagtgaatgttctcttttatcttcctgccaagaagaatgtggattccattcttgaggatta

SEQ ID NO: 864245 - DNA, 98 bp, Homo sapiens
ggaagtgtacaacttccccgcaggcggcgtgggcatgggcatgtacaacaccgacgaggcggagttcgccatgttcagcgggacccacgtggagcggg

SEQ ID NO: 864246 - DNA, 100 bp, Homo sapiens
cctagagggcctgagagttgctattggaccatgtagaatgttgcaatattgtttacaggttcttcattagaagctgtaaccacctgtgaactatgtaaag

SEQ ID NO: 864247 - DNA, 98 bp, Homo sapiens
tcctagaggacctgtgcaacaacctcttgaggatcgaatcttcactcccgctgtctcagcagtctacagcacgggcaagcaggaggacttcaagacga

SEQ ID NO: 864248 - DNA, 100 bp, Homo sapiens
caacggccaggaggttgcagtattggagaccctgtattcagtggatcagctggcaccacccaaatagataaattggcccatctggtcttgtggcccccac

SEQ ID NO: 864249 - DNA, 98 bp, Homo sapiens
cgctgcagctctgggacactgccaaagctgcagggccactgcaagtctataaagaacacgctcaggagtgtaatgttcaagctcagaaatgccttatg

SEQ ID NO: 864250 - DNA, 99 bp, Homo sapiens
ggaaacctcaccaagacagattagatcccagtgatgcgcagtttgttgatgtcatccattccgacactgatggacccagccttgatgcccacttgggag

SEQ ID NO: 864251 - DNA, 98 bp, Homo sapiens
ctgggcacccacggagcctccggggctgagacacctatggctgccgatgaaggctcagcagagaaacaggcaggagaggcccacatggctgcggacgg

SEQ ID NO: 864252 - DNA, 100 bp, Homo sapiens
aaagatgcatgctgatggcgataagtcattaccacaggcagtttggtggttatgccaaggaagcagactacgtagcacaagccacccgtctgcgtgctgc

SEQ ID NO: 864253 - DNA, 116 bp, Homo sapiens
ctggctctgctgctgccgccggcgaaggaggaggcgttgccggatgcaccagcaaggaatactgaagaccgatgatctcataacaaggttctttcgtctgtgtactgaaatgtgtg

SEQ ID NO: 864254 - DNA, 100 bp, Homo sapiens
ggccggttcgtgcggaaccgccatggccgagccggcttcggtttgcctgcaatgagatttcattctctacatttaaaggacatcctttctgagctgctgt

SEQ ID NO: 864255 - DNA, 99 bp, Homo sapiens
cctggccgacgtggacaccaagatacgaggaatgtctattgaccaggctttggctcagttggaattcaatgacaaaaaaggggccaaaataattaaaga

SEQ ID NO: 864256 - DNA, 100 bp, Homo sapiens
tctccagtgatggataaaccaccagggcttcgtgggacacatatgcaacatgcctatgatttttacaagcctgatatgctatctgaatatcctatagtag

SEQ ID NO: 864257 - DNA, 100 bp, Homo sapiens
ccgggctgcggcgtgtgcgcgcccgccagctgctccggagatacgggcgaagctgtgctcaggcccgggctggacgcagagccagagctgtccccagagg

SEQ ID NO: 864258 - DNA, 100 bp, Homo sapiens
agtgaagagaaaatagcaaacgatccagacggcagggagtgcatcaaaggtgtgaacacaggtggcagatatctacctagcatctcagtacacatcctat

SEQ ID NO: 864259 - DNA, 74 bp, Homo sapiens
catttgttgctgccaaggaatgtctccaatgggatccaacctacgtgaaggtggacattgaagtggacctaatt

SEQ ID NO: 864260 - DNA, 98 bp, Homo sapiens
gttgctacaggcccatggaggtaccctgcctggatctataacgagtccaggcatgataaagaaaagatagaaaagaaagagaaacgggacagttcagg

SEQ ID NO: 864261 - DNA, 98 bp, Homo sapiens
ggcggccttcgaggaggtcatgaaggacctgagcctgacgcgggccgcgcggacgcatcttctctccagactgccgatcccagaaagccaggtgatca

SEQ ID NO: 864262 - DNA, 100 bp, Homo sapiens
agtcactttggaagaagtatatgcaggaaattttgtggaagacatagagacactgcatattttaccaaggctttgactggaatggcatgctttcaaatat

SEQ ID NO: 864263 - DNA, 98 bp, Homo sapiens
ctattcagcatcagcaaggagaagcggtttgggtctctgaaggaaagtgctggacaatattcctctcaaggtctgtctttggaggagatgaaaagaag

SEQ ID NO: 864264 - DNA, 100 bp, Homo sapiens
atgtgcaacaagtgtctttggttataaattatgatctacctaccaatcgtgaaaactatattcacaggtgctgttgggaacacagaggaagtgactggct

SEQ ID NO: 864265 - DNA, 100 bp, Homo sapiens
aagcctataggaatgggaggtactttcataattcagaagggaaaagtgaagtctcacattatggaacaggcctttgagagcagccagaagtacaaagagg

SEQ ID NO: 864266 - DNA, 98 bp, Homo sapiens
gtgatcttgttgacatagatgcagctgttgtcggcctcctgctggtaaacaaagctccgtcctaaactggcaggactgtgaggtgccaagtcctcagt

SEQ ID NO: 864267 - DNA, 98 bp, Homo sapiens
caggaggccctggctatctatccaccatgtgggaggaggaaaatcatcttatcagacgaaggcaaaatgtatggtcgatgaaacaggtgtagaagtta

SEQ ID NO: 864268 - DNA, 99 bp, Homo sapiens
tgaggatcaggagatctgatcctgattgcagaaccttccctgattacagaatcttggagtgcctggaagagctgggatgtctggttgagtcctatggca

SEQ ID NO: 864269 - DNA, 100 bp, Homo sapiens
agtgacccagaccctctcctttccctttgagaccgtgaagagaaagatgcagttatatcagagatggacataaagcaacagaagaagatgttcaagaaaa

SEQ ID NO: 864270 - DNA, 99 bp, Homo sapiens
ctagatatcaagcagacattccagaaatgctgttagaagttcctaaggacggtctgaagagccaagagctatttgatgaaattagaatgacctacatca

SEQ ID NO: 864271 - DNA, 98 bp, Homo sapiens
agggatgtcatgctggagaactacaggaacctggtctcactgggaatagccaggccagaagaaggaaggcctgtggtgagtgggacaggaaatgacat

SEQ ID NO: 864272 - DNA, 100 bp, Homo sapiens
gttggttcgacctacaggcgtaatagattggaactcagtgaagacacagatgttcctgttcagagcaaccagctaatagatccagttgtcatcggtatcc

SEQ ID NO: 864273 - DNA, 100 bp, Homo sapiens
gtgtcccggaggagcggcctgcgccgccgcgcgagaggaactttcctgctctgggaccctaccaaggtgcccccacgactgcaggctgtgactgatgacc

SEQ ID NO: 864274 - DNA, 100 bp, Homo sapiens
ttaggcctgaaggaattctcagtcaaagaggacatggatttgattgacatactttggaggcaagatatagatcttggagtaagtcgagaagtatttgact

SEQ ID NO: 864275 - DNA, 99 bp, Homo sapiens
ctaagtccccagattggaggaggctggctctggtcttcgatgcacaggagtggccgttatggaacgcagataaccacctgcctcaaagataatctgctc

SEQ ID NO: 864276 - DNA, 99 bp, Homo sapiens
taatgcagttcatcacatcattcatgattttcagacagtgtttaagaatgaaagcctcaacgcagaatcaaaatctggctgcaaacttcaggagcttaa

SEQ ID NO: 864277 - DNA, 100 bp, Homo sapiens
cttagctgtgctcgcgctactctctctttctggcctggaggctatccagcggaacctcagaacctgttctggatccacagcaaatccaagcatttgatca

SEQ ID NO: 864278 - DNA, 100 bp, Homo sapiens
ccctatggcagatttgaaaattcacccttgtagagtcattcctgcctttgagcggactcccttttaagatatgggtcacctccaggtagattacagagat

SEQ ID NO: 864279 - DNA, 51 bp, Homo sapiens
cggaggcacccgaatgctgcccgggtgagtggccaatccgccatggtatag

SEQ ID NO: 864280 - DNA, 98 bp, Homo sapiens
cagaacagcacgtaccagaggtggaagtccaagtcaaacgcagaaggactgcctcactgagcaaccaagaataagctgtcattggaaggaatagtggt

SEQ ID NO: 864281 - DNA, 146 bp, Homo sapiens
cgacgagctgccactgcccccgggctgggagatgaccttcacggccactggccagaggtacttcctcaagctgaagaaaatcttggtatggtgatgatttttactctagtgacagctgtgcaagaaaaattaaatgaaatagtaga

SEQ ID NO: 864282 - DNA, 100 bp, Homo sapiens
cgtgggcctctgcttctacctgggcactacctttgcaggagccatgtacatcctgggcaccatcgaaatcctgctgagtctccctctgttgcccaggctg

SEQ ID NO: 864283 - DNA, 100 bp, Homo sapiens
agtttcctgaggcctccccagccacgctttctgtacagcctgcagaactgtgaccttatatccagctgtgaaaagtctgctgcaggagggcatttacctc

SEQ ID NO: 864284 - DNA, 100 bp, Homo sapiens
ggtaaggatttcaacatgcctctgacaatctctagtttgcctttccccatcttcctggttctgctccttcgtggcctagtcttgtggacaccagcaagca

SEQ ID NO: 864285 - DNA, 98 bp, Homo sapiens
tccagcccgtggtccttctccatattcgagttgcattaaaatcctcccctactgaaagaaacggaggccaggataactgtagagcagcaaatttcaga

SEQ ID NO: 864286 - DNA, 100 bp, Homo sapiens
ctctgctggctgtagctggatctagaggcataattaggataataaatcctataacaatgcagtgtataaaggtgtgttttatggcccagaacatggtctg

SEQ ID NO: 864287 - DNA, 100 bp, Homo sapiens
gtcacctgtctggagcaaataaaagagccctgcaatttgaagatacatgagacagcagccaaacccccaggttctaagctggtctatgtccatcaccttc

SEQ ID NO: 864288 - DNA, 98 bp, Homo sapiens
aaaattctatgagcgaggtgacttcccaattgcccttgagcatgattcgaaaggaaacaaaatcgcctggaagttccggtacaaagaggctttcctgc

SEQ ID NO: 864289 - DNA, 100 bp, Homo sapiens
aaattcggagtcatttatcaaaaagccaggcagaggctgacccgcggctgattgagtccctctcccagatgctgtccatgggcttctctgatgaaggcgg

SEQ ID NO: 864290 - DNA, 51 bp, Homo sapiens
actgatcctgtgaaggctgcccaatttgagacagttcagtttgttcaggga

SEQ ID NO: 864291 - DNA, 99 bp, Homo sapiens
aaacagccaaaggggactatcctctggaggctgtgcgcatgcagcacctgggcaccctcatccagcatctgaaggagcacctgctgcacggcaacatga

SEQ ID NO: 864292 - DNA, 100 bp, Homo sapiens
caagccgactgatgactggagaggatggctactatttcaccaatctgatgtgccagtaaatatgaattggttggatttgacttctcaatgatacacaatg

SEQ ID NO: 864293 - DNA, 100 bp, Homo sapiens
ctgcacgcgccgtggctccggatctcttcgtctttgcagcgtagcccgagtcggtcagcgccggagagtgatcagcagctggactgtgccttggacctaa

SEQ ID NO: 864294 - DNA, 98 bp, Homo sapiens
gcagactcactaacttatgattgtaaaattctggaacaacgattagaacaaggaatggtattcacagaatatgaaagaattcttaagaaacggctagt

SEQ ID NO: 864295 - DNA, 99 bp, Homo sapiens
ttgaaagcgacaagtggaggcgccgctctagcggccgggactctgaactatggcgacaacatctggggaagatgtacgagacttcacaaaggtacttaa

SEQ ID NO: 864296 - DNA, 99 bp, Homo sapiens
ctatagtgacacagcattctaaagtgaatgactccaacgaattaggtggtctgactaccagtggctctgcagagagtaatcaagtcagaggattatatg

SEQ ID NO: 864297 - DNA, 116 bp, Homo sapiens
tttggggtagtgtctgggatccagtacgagttgaatcattgttcaaataagttcttggcacagctgaagatcatggactacagcctgctggtgggcatccacgacgtggaccgggc

SEQ ID NO: 864298 - DNA, 100 bp, Homo sapiens
aatcgtgaaaactatattcacaggaaatggtgttcacactggccctgaatcaagggaacaccagttttcacatgctggcagaagcaatggccggggactt

SEQ ID NO: 864299 - DNA, 100 bp, Homo sapiens
caataacctgttggccttgggcacagaccggaagctggatgactgtctaccatcagagggagatctctgccccctggggctgagagaccccaacctttcc

SEQ ID NO: 864300 - DNA, 98 bp, Homo sapiens
tgggagcgagcgcagcaaagcgcccagcctgccgcctcgctgtccctgcggcttctggggttcccatggagaatgttgcaacaattgctgattgtgcc

SEQ ID NO: 864301 - DNA, 51 bp, Homo sapiens
caacggggctccgggccctaaggggtgatggtaatgcccgaaggagcagac

SEQ ID NO: 864302 - DNA, 100 bp, Homo sapiens
tacagcaataccaccttcagtacttggcaagatttgatgctcttgtgctcagtgacatcattcagcaaaccagtccagctacgggggcccagccagccag

SEQ ID NO: 864303 - DNA, 99 bp, Homo sapiens
tccgcgtcccgctcgctgggagagaggtacctctccttttccctctccctttccctaagggtatgttagagcccaccaaggaaccactgaaaccacttt

SEQ ID NO: 864304 - DNA, 119 bp, Homo sapiens
gaagcgtgggacatggaccgttcactgggatggcaagggaattctgtccctgaggacaggactgaagctgggggggccgaaggccagagaccaggatttggctacggaggcagagcgtc

SEQ ID NO: 864305 - DNA, 100 bp, Homo sapiens
tggcaagtggttcttttgacaaatgtgtacacatctggaacacgcagtctttacttcaggaaggtgagggacgtttggggaaatgttctgctcgagtgtt

SEQ ID NO: 864306 - DNA, 100 bp, Homo sapiens
agtaccaacacaaagtggccaggaaaattctaaaggcaccagttagaagacaaatgaaagctaagcaactcagtgcacaatcttacggtgtgaccagttc

SEQ ID NO: 864307 - DNA, 98 bp, Homo sapiens
ggggtgtgcccatcagaacagtcaagagctttctctccaaaatccccagtgtcgtcacaggtgtgagtcatcctgttctaaagcaagttgctgaacag

SEQ ID NO: 864308 - DNA, 99 bp, Homo sapiens
acaacttcattgctgggaaaagatggcccactgcgtgaccttggttcagctgtccatttcctgtgaccatctcattgacaaggacatcggctccaagtc

SEQ ID NO: 864309 - DNA, 100 bp, Homo sapiens
ctccaaccatgtcatccattgaagaggtttaaggattaccgagagccgccatgggccccgaacccttatgagttttcgaaacagtactggtttattctgt

SEQ ID NO: 864310 - DNA, 100 bp, Homo sapiens
gaggaggagcaacaggaagtggctgtgcgctagatgctgtcaccagagccatgccttgtgttcaggcgcagtatgggtcctcgcctcaaggagccagccc

SEQ ID NO: 864311 - DNA, 98 bp, Homo sapiens
cccagtattctaccaggcctggtgctggcctcctgtgatgggccttcgcactcccagactttaccagaatgcaggacatcccggaggagacggagagc

SEQ ID NO: 864312 - DNA, 100 bp, Homo sapiens
gaatgtcgtgtctgtggagataaagcttctggatttcactatggagttcatgcttgtgaaggatgcaagatgctggcatatatgttctattctgttcctt

SEQ ID NO: 864313 - DNA, 51 bp, Homo sapiens
cttcctcatgaagagactccagaaaggggtgtccttgaatggccattttgg

SEQ ID NO: 864314 - DNA, 100 bp, Homo sapiens
atcttccaccagaaaacttgatcacatcaatatctgcagttccaatttcccaaaaagagcactggtgaggtggattgatgatgaatcttctggcacacct

SEQ ID NO: 864315 - DNA, 98 bp, Homo sapiens
tggactctgagtcgtcttggtcccaggagccagtagtgaaggcaacagtctgcccacctgtggacaccagtggaccatagcaaaatatgctcccaggt

SEQ ID NO: 864316 - DNA, 98 bp, Homo sapiens
aaggcagtctgttgaggcatctggacaccacacacatcatcagtctggtgttacacataatattgcattacttcgagaggtgataatcaactcacgct

SEQ ID NO: 864317 - DNA, 98 bp, Homo sapiens
tttcactgaggccatctatccgatttcaaggaagccaagggctgctgtgacttactcgaagcctcgattggccacattttggtactacgccaaggttg

SEQ ID NO: 864318 - DNA, 99 bp, Homo sapiens
gaaggccctgagtcaaagaagatgcctcgaactaaacaaattcatcccagaaatctaagaggttcttgggtgtctctggggagtccctgggccagacct

SEQ ID NO: 864319 - DNA, 98 bp, Homo sapiens
ctgcagaccttcccaggaagccagagccacacacaccatcatggtcctggaatttgagagcgtattttgcggtaaaactggccgaaggctaaagctga

SEQ ID NO: 864320 - DNA, 99 bp, Homo sapiens
tttttctggaatgtcattatcagacacaatggtagttgatgtcacttggcgatattcctgcaaacatgaagaggtgattgccagaagaactaaggttaa

SEQ ID NO: 864321 - DNA, 100 bp, Homo sapiens
gcacctctgcacgtactgcgggaagggcttcaatgacaccttcgacctcaagagacacgtccgaactcacactggcctccggtgtggctgtctctgatgg

SEQ ID NO: 864322 - DNA, 98 bp, Homo sapiens
acccggtgtgtggcgcgcccagagccccgcgtttcagccctagggaaggttgttagcgacatgagtacagggtctggatcttacccattcaagagtgt

SEQ ID NO: 864323 - DNA, 100 bp, Homo sapiens
gcattaaatcacagaacaacctacaggaaaagctggttcaggagaaatctaaagttgctgatgcagaggaaaagcaaaatgatgcttcaacacccaggcc

SEQ ID NO: 864324 - DNA, 98 bp, Homo sapiens
gaacttggaaactacagaccgacaggctgaccggttccctgatgtgttacctgcttctgctactgatccaaactgcagaacttctcattcatccccaa

SEQ ID NO: 864325 - DNA, 100 bp, Homo sapiens
actccagagactgctgaaaagctggcccgtgacctgaaggctgtcaagtatgtggagtgttctgcacttacacaggttggacgtgataagtatgagcctg

SEQ ID NO: 864326 - DNA, 99 bp, Homo sapiens
ggaagctagggacccactatcagatcactaagaacagactgtaccgggaaaatgactgcatgttcccctcaagctggtgccagctttttcatcaaaacc

SEQ ID NO: 864327 - DNA, 100 bp, Homo sapiens
catgagcgatgttaccattgtgaaagaaggttgggttcagaagagggatgccttcaattaagttgcagagttctgatggagagatatttgaagttgatgt

SEQ ID NO: 864328 - DNA, 113 bp, Homo sapiens
tcaactcccctgtgtacagccgccacagctacactccaaccacgtcccgctctccccagcatttccacagacctgtctgcagatgcctccaaggagtccgaaaccaagtccga

SEQ ID NO: 864329 - DNA, 100 bp, Homo sapiens
tgtaagaagaggaaagacttgtctcagataacgaaggaggcccaacttcattcaataaggagcctgacggatttatcccagacggtagaacaaaaggaag

SEQ ID NO: 864330 - DNA, 100 bp, Homo sapiens
caggcccaggtattggaggggatgctcattttgatgaagatgaaaggtggaccaacaatttcagaggtatgatctcgtgaaaccttgagagaaactgaat

SEQ ID NO: 864331 - DNA, 98 bp, Homo sapiens
aggaggcgagctagccgggagttacaccgccaccgccaggttcaccatcattaatagcaaacaaatgggaagttattcttgtttctttcgagaggaaa

SEQ ID NO: 864332 - DNA, 100 bp, Homo sapiens
cggccacagcgtgctgccgctcgaggaggcggtggagggcttcaaggccttggacaagattcgctatgagagcctgacagacccttcgaagttggacagt

SEQ ID NO: 864333 - DNA, 100 bp, Homo sapiens
gaaagagccacagagttggcagaactgtttgaaaatgctgctcaaagtctaactccccaggactataatctgaggtggtcaggccttttggtgacagtgg

SEQ ID NO: 864334 - DNA, 98 bp, Homo sapiens
gtgatgccattccagcactggactcatggaggctgagcatttattcagatggagtcttactcttgttgcccaggctggaatgcaatggcgtgatctcg

SEQ ID NO: 864335 - DNA, 98 bp, Homo sapiens
gatggcccaatggaggagtccaaaccaaagcccaggcttgccgtatcccaaacaaacacctcttctcactaaatgcaggagaacgaggatgtttttgt

SEQ ID NO: 864336 - DNA, 98 bp, Homo sapiens
actacccctttgccaggttcaataaggacttgtttacactgggcatgtaaacgaaaccatggtcaggtggtctcttacctgttaaaatcaggagctga

SEQ ID NO: 864337 - DNA, 136 bp, Homo sapiens
cgtttctgctgttgtagcacagatttatgtaatgtcaactttactgagaattttccacctcctgacacaacaccactcatacttacagatcatcagtatttggagaggacaccactatgtgccattttgaaacaaa

SEQ ID NO: 864338 - DNA, 100 bp, Homo sapiens
gaaatgctgtcccaaccttactggcttcttggacacttaatgattgttggcaagaaatgtgctgctgatctgggcctgaataagggttatcgaatggtgg

SEQ ID NO: 864339 - DNA, 100 bp, Homo sapiens
aaagcatggagaccctccctccagtgatttgccttcaaggaaactggggagtcagaaaattgggaactcatatcaacatggcaaacctattgaaaacagt

SEQ ID NO: 864340 - DNA, 50 bp, Homo sapiens
gggagaacctgcggcggccggagcgccatgaagatggacctacagctaaa

SEQ ID NO: 864341 - DNA, 100 bp, Homo sapiens
gcgagcctgcaggatggcgcggccgagtccccgtacggccacccggcgggggcagggtggacaggaagcagctcagcccagcctgggagaggccaagggc

SEQ ID NO: 864342 - DNA, 100 bp, Homo sapiens
acggagaccaccccagctacgaacagattcaggtgccgacgccaccgccgagcccatgatcctggaacagtacgtggtggtgtccaactataagaagcag

SEQ ID NO: 864343 - DNA, 100 bp, Homo sapiens
atgaacaagctggctgggaagaaaaacggctctcgaacagtgtggcctgatgaaactatgggaccctttggacctcaagatcagaggttccagcttcctg

SEQ ID NO: 864344 - DNA, 100 bp, Homo sapiens
gaggccacagtcagcggcaagatggttcatcatgcctagtggcgtataagaagaccccgccaccggtccctccacgcaccacttcaaagccgttcatctc

SEQ ID NO: 864345 - DNA, 99 bp, Homo sapiens
ttcaatgtgcccttcatcccagtcacccaggcctccgcttctccggcctccctgctcttaccgggagtgagaaagatcagtctaaagaaaaggagaaga

SEQ ID NO: 864346 - DNA, 100 bp, Homo sapiens
aaatcctccaggatttgcctttgtggaattcgaagatcctagagatgcagaagatgcagtacgaggactggatggaaagaagccagttgagggaagttct

SEQ ID NO: 864347 - DNA, 100 bp, Homo sapiens
caatatataggcatctccgaagatttattttgtcagtgccttcatcacggcggcttggattgtcctgtgccaactgtcacaccacaactaccaccttatg

SEQ ID NO: 864348 - DNA, 100 bp, Homo sapiens
cgctggaagaaccacggctgccagcgcgtcaagtatggccagtgctgggtcttcgccgccgtggcctgcacaggtttttctattgggaaagctactgatc

SEQ ID NO: 864349 - DNA, 120 bp, Homo sapiens
ctgctatctcagctctgtcatgcaggccatcttcagcatcccagaattccagagagcggccaaggagatctgttgaagaatgccaagaatgaagctatagaaaacatgaagcagatccag

SEQ ID NO: 864350 - DNA, 131 bp, Homo sapiens
ccacctccgggcgcagaggcctacatcccacagagatacccagacaacaggatcgtctcgtccaaggattacagtttaaagacaatttctgtgatcaagttgtcatttggaagattaaacccatttcacga

SEQ ID NO: 864351 - DNA, 99 bp, Homo sapiens
ttcaaacttctgcagtctcagcttcaggtgaagaaggcagctctcactcaggcaaagattgctcgctgtaagcagctcatctgtgaccccagctacgta

SEQ ID NO: 864352 - DNA, 100 bp, Homo sapiens
tgaggacacacccaggaaaagactcaggacggacaagcacagtcttcggaaggaattttctacttctggtcatgcttacactgatacagggaaagcatca

SEQ ID NO: 864353 - DNA, 100 bp, Homo sapiens
ggatgctggaccaacctggctttcccgactgctccatcgaggcagccatggtgaagatccttacaataaatgaggatggatcacttggtttgaaaacccc

SEQ ID NO: 864354 - DNA, 98 bp, Homo sapiens
aaattgtatacactggaacagaatcaacccagaacggatagctccctcctggaaaaggtgcatgctattatgatgctaatcagtctatgtatgtgttt

SEQ ID NO: 864355 - DNA, 100 bp, Homo sapiens
atcaaaataaaggaaacacatttcatatactgcaggagtctactcttcatcttgtgttgagacttcgtggtggtgctaagaaaaggaagaagaagtctta

SEQ ID NO: 864356 - DNA, 100 bp, Homo sapiens
aagggtatatttcctgcttcatatattcatcttaaagaagcgatagttgaaggaaaaggctcccattgttgcaccaaattttactgttgaggatacttct

SEQ ID NO: 864357 - DNA, 100 bp, Homo sapiens
agagatgtattcagtggaggaagctggctcctggatttggatttggaattgcaatatctggtggacgagataatcctcattttcagagtggggaaacgtc

SEQ ID NO: 864358 - DNA, 98 bp, Homo sapiens
gagatccagttcctgcgaactagtggccaaatcaatgaaggtccctgtatatgagaccccagctggatggagattcttctcaaatctgatggactcag

SEQ ID NO: 864359 - DNA, 100 bp, Homo sapiens
cagaggccagctgtttttgaggatcctgctccacagagaatgctctgcacccgttgattgttcacaataatgtttcgacccaaagtaatggctcccaaca

SEQ ID NO: 864360 - DNA, 100 bp, Homo sapiens
taaagtaacccaagccatacaaagcttctgtttggagaagggttggggtctgctaggtccccggaatgagttgtttgacgcagccaaataccgagtgcta

SEQ ID NO: 864361 - DNA, 100 bp, Homo sapiens
tccgcctccagttttaactcttcaggatccccaaaacgctggtgccccattactgtgagctggtgggagcaaaccccaaggtgcgtcccaacccagcccg

SEQ ID NO: 864362 - DNA, 111 bp, Homo sapiens
tggaaccttcttttgtttgtcagcagccaaggtgtttccaggaagttcagagagaacagaaaatgtgccagaggaacttcaagaaccattttacacagatcagtatgacca

SEQ ID NO: 864363 - DNA, 98 bp, Homo sapiens
gatgacatggtgcattgccagcagaagaaagtcaagcagatggtcgaggagatgaagaagagagaagtccctgcaccacgaccaggaacacagcatgt

SEQ ID NO: 864364 - DNA, 98 bp, Homo sapiens
cctagcttcactcaatgttagtaagctgtgagtaccagagtgcccactggttccaacagttcttctcagaccacagagtgtcttacacctgaatcctg

SEQ ID NO: 864365 - DNA, 100 bp, Homo sapiens
gcctgcggctccgtcagggaagcgatgctgtgggagaggtggatccttttcataccttatttggaattgctggattgtcacttttgggagaagaacagat

SEQ ID NO: 864366 - DNA, 100 bp, Homo sapiens
aaagaggagacgcagccgcccgtggcgcttaagaaagaaggctctaaaatccatccagttggccctgattggagtccttcaaatgcagatcttttcccaa

SEQ ID NO: 864367 - DNA, 99 bp, Homo sapiens
tctgggttgatgagaacaatttgacagctcatgtagaggctggcataacaggacaagagttggaaagacagatcttagcaaagcaatgtctcaagatgg

SEQ ID NO: 864368 - DNA, 100 bp, Homo sapiens
acagactcctatttgaagtatttgacgaaaatagactgttgttgacctcctgtactggagagacattaagaagactggagtggtgtttggtgccagccta

SEQ ID NO: 864369 - DNA, 98 bp, Homo sapiens
tggctgtggcagatgctggggagtactcctgtgtgtgtggggaggagaggacctctgccactctcaccgtgaagggtgttagtaaaatggcctttcgc

SEQ ID NO: 864370 - DNA, 99 bp, Homo sapiens
ccgatctgccatgtattccagaaaggccatgtacaagaggaagtactcagccgctaaatccaaggttggattgcctcctttggagaagtttaataactg

SEQ ID NO: 864371 - DNA, 100 bp, Homo sapiens
gccgacgtgctgggggatgacggctccctgctgttcgagtacctgcccagaggggcccactcgctgtccctgaacttcgaccacttccagatccttcggg

SEQ ID NO: 864372 - DNA, 100 bp, Homo sapiens
tctaccctgccattgatattgatgcacaggttattaatgctgcactggctttagcagcaaaaccacagagtaaactggcccaagagaacatggatctttt

SEQ ID NO: 864373 - DNA, 100 bp, Homo sapiens
cattgtagcaaactactatgcttctgcaggtcttctaaaagtttctgagggggaagtcataaaatggtatgtctttttaatatccttttggggagagcag

SEQ ID NO: 864374 - DNA, 98 bp, Homo sapiens
atgtttcatgtccaggaaatggtggtagttacttttggtgacgctgtccagttcccacaatgtatcattccttatctgaaactagacatcctctgcag

SEQ ID NO: 864375 - DNA, 100 bp, Homo sapiens
ccgcagatgttgtcaaggtggcctaccaggaggccaggggtgtcgccatgaacatgttcttcaagtatacatggaataactttttgcatacacaagtgga

SEQ ID NO: 864376 - DNA, 98 bp, Homo sapiens
gaccctaacgcaggtttccccgcaaatgactggtcacgcgggactgaacaccgcacaggcaggaggcatggccaagacagttgaaccaactggaaaac

SEQ ID NO: 864377 - DNA, 101 bp, Homo sapiens
caacgtgatgcgggagagcggaacccctgaacagtgcccaagtgttgtctctttgttgtcagagagttacaaccctcatgtgcgctacggagctgcaatgg

SEQ ID NO: 864378 - DNA, 100 bp, Homo sapiens
gaaagaaagaagagtaggaactcctcaaagatgggaaggccattgtgactatgtggtgattacagttgtcttactactgagtttcctactgaaatcatgg

SEQ ID NO: 864379 - DNA, 98 bp, Homo sapiens
gatggcggacggggagctgaacgtggacagcctcatcacccggctgctggagggcgaagtcctcggctccggcacgaaatccgaaagccacgccactc

SEQ ID NO: 864380 - DNA, 100 bp, Homo sapiens
ccccatccaggttcccatggttgccggctcccctctcaggacaacccagatgtgcaacaaagtgcgatggctgcatggctgagaggttgaaggaggagat

SEQ ID NO: 864381 - DNA, 100 bp, Homo sapiens
ccgtctgcagccctggatctattaaagggagcattccgatcatctgaggaacagcagcgggtgccaaagcctttgtctgtgatcagtgcggtgcacagtt

SEQ ID NO: 864382 - DNA, 100 bp, Homo sapiens
ctttgctggaagatttggagagggagcttgatgaacctagacagcaggctgcagaagatgtcaatgttactttcgaagatcaacaaaagataaacaaatt

SEQ ID NO: 864383 - DNA, 100 bp, Homo sapiens
ggagaggccaacagatgagggaagccatttttctgcaatggaattaaatggccaagtgtggccgacgacgatgccctcgctgaggagcgcatgcggagag

SEQ ID NO: 864384 - DNA, 100 bp, Homo sapiens
acctttccaccccaaatttatcaaagaactgagagtgattgagagtggaccacactgcgccaacacagaaattatgctctattccgttcgctggttcgcc

SEQ ID NO: 864385 - DNA, 98 bp, Homo sapiens
gggcaccagcaggacccgaggccaggagccaggggcccagaaggctcttgcagccaatgccggaacaggatttgctgttgctgagcctcaaatcgcaa

SEQ ID NO: 864386 - DNA, 75 bp, Homo sapiens
ttcgcccgtccccctgccccgttcacaatgtagacgttacatccaagaggaaataatccaggcaaggaagcacaa

SEQ ID NO: 864387 - DNA, 99 bp, Homo sapiens
cggagagatgctgggcgtggcggccgggatgacccacagagtctctccgaggcaaagatggagctgagaagaaaagatcaatctctgcgtcagctcaat

SEQ ID NO: 864388 - DNA, 100 bp, Homo sapiens
ttcgcgttggtggaggatggatggccttggatgaatttttagtgaaaaatgatccctgccgaggttttaaaatcaaagatgggaaaatcggagaaaattg

SEQ ID NO: 864389 - DNA, 100 bp, Homo sapiens
tggagaggctgtgagccacaatgcatcgctggaagtagccagttcccgtgtcagtggctatgatgacacctcaagttatcactccccagcaaatgcagca

SEQ ID NO: 864390 - DNA, 100 bp, Homo sapiens
ctttgaccatgaagagaaatgagatgatagccaaaccctcagaggcggggtttcaccatgttgcccagactggtcttgaactcctgagcttaagcaatcc

SEQ ID NO: 864391 - DNA, 100 bp, Homo sapiens
gagcaagccgggcggcctgccccgccggagcagcatcatcaaggaggcactggctacaattaggcttctcgacgtcctgtgcgaaatgactgtgaatact

SEQ ID NO: 864392 - DNA, 115 bp, Homo sapiens
gagccaaagggcctaagggtgaaaacggtgttgttggtcccacaggccccgttggagctgctggcccagctaacaatgctaaagtagctgtgctaggggcctctggaggcatcgg

SEQ ID NO: 864393 - DNA, 100 bp, Homo sapiens
gtttaagggtactttggtgcatgaagctcaactcaactatttctacatctctcctggagacgaaagtaggcggtacgaaccctaatggaggcagttttga

SEQ ID NO: 864394 - DNA, 100 bp, Homo sapiens
gtggctggaagacatggccactccagtcggtgttgagcacggcgagcagtctcaggcctttagtgatgatggagagtcgcggttgctgatcgtggtgctt

SEQ ID NO: 864395 - DNA, 100 bp, Homo sapiens
ttcaccgtgtaccgcatgcagcagtacgacctgcagggccagccctacgacgagctggagccggtggtgcaggatgggcagaggcgcatacgggcccgac

SEQ ID NO: 864396 - DNA, 98 bp, Homo sapiens
tttcgaccttcaatccagttccaaggactccacgggcctgaagcaggacattctaaatgaaaagactgaattggaagcaacacttaaggaagcggagt

SEQ ID NO: 864397 - DNA, 98 bp, Homo sapiens
aggacctagactgtgacaacgaccacgtctccaaaatgagtcgcatcttcaacccccatctacaaaaggatgccacggagaaagaaaaaagttaaaga

SEQ ID NO: 864398 - DNA, 98 bp, Homo sapiens
cggcttctgctgttgctcttctccgccgcggcactgatccccacagatttgtcttcagcgaagcggaagtttgcagattccttaaatgaatttaaatt

SEQ ID NO: 864399 - DNA, 100 bp, Homo sapiens
gctgtcgctgagagcctcacgagtcgaggtcctgcaggtggagctccggcagccgccctggatgttaaagtctttagtgaagatgggacaagcaaagtgg

SEQ ID NO: 864400 - DNA, 50 bp, Homo sapiens
cattatgcaaatgcttcaaaatccagtttaagtatagtgtgcctgggccg

SEQ ID NO: 864401 - DNA, 99 bp, Homo sapiens
tcaacccctgtgagaacgagtggaagatggagaaactcaaaaagcaggcgcccgagctcctcaaggtcttgatggtcctttggaaagccatcccttgtt

SEQ ID NO: 864402 - DNA, 98 bp, Homo sapiens
tacctttgatccagaacttgcagcaacaataggagaaaaggttctgcaggacgatgagttcacctgtgacctcttccgattcctgcaactactctgtg

SEQ ID NO: 864403 - DNA, 120 bp, Homo sapiens
tgaatgggtgcatgttagtgctcaagagcctcattatctaccacccgagatgccccaagatttgttcagctggggcagagtcaacataaacaagacaagaatagccagcagccctgttct

SEQ ID NO: 864404 - DNA, 99 bp, Homo sapiens
aggactatgagcggcgcctgcttcgccagatcgtcatccagaatgagaacacgatgccacgcgtaggagcaacggtgggaatgccctctgaggaatgca

SEQ ID NO: 864405 - DNA, 98 bp, Homo sapiens
cggcgcagccccaaagcgagcgaagctagggtcgccgccactgccgcaggaggcgtgagcccattgcagatgcaaaggctcctgagaagcgggcctca

SEQ ID NO: 864406 - DNA, 100 bp, Homo sapiens
gttgtgtttgtgaaacagagaaagataggcggccatggtccaaccttgaagatttccatggtgtcagtgattcatattcctgataggacttataaactat

SEQ ID NO: 864407 - DNA, 100 bp, Homo sapiens
atgtcttggaacgaattcatcctttggaaactgaacaggcaggattagaatcgtgtgactgcacagaaaagttacaaaacaaatttgactttttgcgctc

SEQ ID NO: 864408 - DNA, 99 bp, Homo sapiens
ccttccccacgcaaccccagatccatttacactttacagtcttagaaaaataccccaatacacccatgagtcataaagaaattcttcaagttatccaga

SEQ ID NO: 864409 - DNA, 100 bp, Homo sapiens
ggatacctacaatttggatacagataccatctcaaagggtaatcttccaggtcggatccgcacaagacggcaaagctctgggagtgccaccaacgtcgcc

SEQ ID NO: 864410 - DNA, 100 bp, Homo sapiens
aatgggaaaacctcggattatctgctactgggaaactttgtgtacacttttaagttctgggcatgggacccagaagaggagcgcaggcgacaggaaaaat

SEQ ID NO: 864411 - DNA, 100 bp, Homo sapiens
agtaactggcatagacaactatgggcagaccagtattaaagagggacagctattgaagcaaaccagttctttccaaaggtggaaaaagcgatacttcaaa

SEQ ID NO: 864412 - DNA, 99 bp, Homo sapiens
aggacatagtatctttgacttcactcatccctgcgaccatgaggagattcgtgagaacctgagtctcaaaaatggaggtaggaaaagtaattggaattg

SEQ ID NO: 864413 - DNA, 98 bp, Homo sapiens
cgacgtgtacctggacatcaccgtgcacttggaggctcctcagctcttcatatcccagcttttccaggaggaggatgtctcattgattacgttcctca

SEQ ID NO: 864414 - DNA, 100 bp, Homo sapiens
cttctgagagataatcgagctgaaagaggacacaagaaaaattgttctgtgagaacagccagcaggaatgaaatggaaaggcattttctggagcttcttc

SEQ ID NO: 864415 - DNA, 99 bp, Homo sapiens
tttaatggaaaatcgcttggttaaaacctgacacttttaacaggtatgataagtattatcagcaacataatagttctgggcatcttcattaagtacaag

SEQ ID NO: 864416 - DNA, 98 bp, Homo sapiens
gcaccccctgtgaccagaacggcacggccatctgtgtgtctgggcagtgcaaggtagtgaaatcaaagttatccaaagaatataactttattaaaatg

SEQ ID NO: 864417 - DNA, 98 bp, Homo sapiens
cggttccaggtgcccaccgcgcactcggagatgcagccgctgctgcctgtggaggaaccgattgtgtccacagatgaggtcatcttcccactcaccgt

SEQ ID NO: 864418 - DNA, 100 bp, Homo sapiens
gcaattcgagaatcaaagggccgggagcgatggtgggagatgccatcccagcagtggaggtgtttgaaggggagccagggaacaaggtgaacctggcaga

SEQ ID NO: 864419 - DNA, 100 bp, Homo sapiens
gaattggccgcggaaaccgatctgcccgttgtgtttgtgaaacagagaaagataggcggccatggtccaaccttgaaggaacaactttgaatatacccta

SEQ ID NO: 864420 - DNA, 100 bp, Homo sapiens
ctgaagactgtggtcattgtgcttggtgtcttcagtgccctgggtttgcctgtgacccaatgcccactgggactgaatgccaaaggactccctttaggca

SEQ ID NO: 864421 - DNA, 98 bp, Homo sapiens
gcatggtgcccgaacaccgcgccttcggaagcccgttcggcctggaggagccgcagtgggtcccggacaaggagtttgaaggccggaagtactgcgaa

SEQ ID NO: 864422 - DNA, 98 bp, Homo sapiens
agacgagaagcctgaaaagtcgcagcgagctggagccgccggagggcacagtcagtggtgtgctgctagttacaccaaataatataatgtttgatcca

SEQ ID NO: 864423 - DNA, 100 bp, Homo sapiens
agtgaaaacaacgaccagagacagcaggtattctctactgccgctgatggtcaaacgcaagtggaaattaaagtgtgtcagggtgaaagagagatggctg

SEQ ID NO: 864424 - DNA, 100 bp, Homo sapiens
atggcgagcgactccccggctcgaagcctggatgaaatagatctctcggctctgagggtcatgattgttgtgaaacagtgaaggtgcagctctgtgcttc

SEQ ID NO: 864425 - DNA, 98 bp, Homo sapiens
aatgatccacttccacttgatgaataatccagctccaggtcccacaggggctcttcttccccacgaaaaagatcttattcaagttcatcatcttctcc

SEQ ID NO: 864426 - DNA, 98 bp, Homo sapiens
agaagcccgactgcaacattgacgcttttgaagaggatctacataaaatgcttatggtagctcagtggcatttctgagcaggggccaccctgacttca

SEQ ID NO: 864427 - DNA, 99 bp, Homo sapiens
tttatttctcttgacaaccaagggcctccgtctggatttccaaggaagaatttcctctgaagcaccgctgatccagtgtctctttgggccacttcaggc

SEQ ID NO: 864428 - DNA, 100 bp, Homo sapiens
gcccctccattatggactgcaagatgggcagcagttctttattggtgaaaacatgaatccagatggcatggttgctctattggactaccgtgaggatggt

SEQ ID NO: 864429 - DNA, 100 bp, Homo sapiens
gacgaagaggaggagaaaaaccagctggagattgagagactggaggagcaggacctaatccggagagacatcctgtactacaaaggccgcattgacatgg

SEQ ID NO: 864430 - DNA, 133 bp, Homo sapiens
gaaacatccaagaaaaatgtccttaaagcaattgagcaggctgatctactgcaggagttgccaccttccagagaagaggtacgagatgacaagacaaccataaagtgtgaaacctccccgccttcctccccga

SEQ ID NO: 864431 - DNA, 99 bp, Homo sapiens
gcatgtcatgaagttgcgccaggcagccctgaaatcagctcgagacatgtgggctgattacatcctgggacacactcaggacaccaacaccttctttct

SEQ ID NO: 864432 - DNA, 100 bp, Homo sapiens
gagaaatcttagagtttcccgcaagggatgtttatgttccaaacactacttacagccatgaagatggacctacagctaaaaaattaaagactgagcaagg

SEQ ID NO: 864433 - DNA, 100 bp, Homo sapiens
gagaccttccggaggatgtggaagtggctgcaggagccggagttccagcgcatgtccgcgctccgcttagcagaccatggtgaatccgggcagcagctcg

SEQ ID NO: 864434 - DNA, 100 bp, Homo sapiens
tttccacatcggtcagaaaaagattgctcctatatccctccctgtaagagagaaaatcagaagaatttggaaagtgtcatgaattggcaacagtactgga

SEQ ID NO: 864435 - DNA, 100 bp, Homo sapiens
ctttctccttcaagtacttggcagatcactctcttagcagaaagcgtggatacccatcaacgaagttttgatattggaattcagattggctatcagcgac

SEQ ID NO: 864436 - DNA, 99 bp, Homo sapiens
ggacacataacaagcagcagtgaggacaccaaaggggccattgcaatttagagatgtggccatagaattctctctggaggagtggcattgcctggacat

SEQ ID NO: 864437 - DNA, 101 bp, Homo sapiens
gccatgtctggctgtgatgctcgggagggagactgttgttcccggagatgcggcgcgcagataaagagaggcctgtccagtctttgaaaacatcaagagat

SEQ ID NO: 864438 - DNA, 98 bp, Homo sapiens
tgcaagggggaagtagagagataacaaaagctgctcagagtctcaatgaacttgatggagtcgggtggtacagttttgagtaccaactggtctgatgt

SEQ ID NO: 864439 - DNA, 100 bp, Homo sapiens
taagtgggaataaagatgagtataagcagtgatgaggtcaacttcttggtatatagatacttgcaagagtcaggactccaagccccctgatccttgatca

SEQ ID NO: 864440 - DNA, 99 bp, Homo sapiens
cacctcgctagcgttcccctgtcttccccaacgccccggagccgccggccgctagcgtcagcgccagccaggcagtacatgccacactactacccttcc

SEQ ID NO: 864441 - DNA, 100 bp, Homo sapiens
ggaaggaaaccaaggggcagacccaaaaaactgacctattcaacgaattgcttgaaaactgaacaggcttttcccctgcaaaacaaaatcagaccagaac

SEQ ID NO: 864442 - DNA, 98 bp, Homo sapiens
agacatggcattaagtgacttggaggctgcagattttgcagaactgggccgttgctccagggagaactgcaaatatcttcatccacccccacatttaa

SEQ ID NO: 864443 - DNA, 100 bp, Homo sapiens
agacccaggggaagacccaaaggcagcaaaaacaagagtccctctaaagcagctcaaaaggacatggtctgctatacagctcagactctcgtccgaatcc

SEQ ID NO: 864444 - DNA, 100 bp, Homo sapiens
ggaactgaattgggatgattataagaagcaggtctctaattaacagaagatggcaaagcccagccacagcagctatgtccttcagcagctaaacaaccaa

SEQ ID NO: 864445 - DNA, 99 bp, Homo sapiens
gaaggttctggagaaaaagttccatactgtcagtggaagcaaggcaatggtggcttgctatccgggaaatggaacaggttatgttcgccacgtggacaa

SEQ ID NO: 864446 - DNA, 100 bp, Homo sapiens
tatgatgccaacgtgtccttcaatgtttcccgggagctcttcttcatcaacatgtggcagaagaatacagttgagttttgccaaatttgacagttcacgc

SEQ ID NO: 864447 - DNA, 100 bp, Homo sapiens
aggatcacgtgataaggcactagcagatgtggttggaatccttgctgtgctgaatcctggctgtgtgaccccaagacgccaggaaagcatgtgcagatgc

SEQ ID NO: 864448 - DNA, 98 bp, Homo sapiens
atcacgttaatgaaatcttagaatcacccaagaaggcaaagtcgcgtttaataacgttatatgtcaccacacccatctccattaggagccccagagca

SEQ ID NO: 864449 - DNA, 98 bp, Homo sapiens
ggactcctctctcaagagaagctgcaagagcaacatctttcctcaccccaagattaaagaagctaattgatcaagaaatcaagtctcaggaggagaag

SEQ ID NO: 864450 - DNA, 100 bp, Homo sapiens
cgactacctgatgaagatcctcactgagcgtggctactccttcgtgaccacagctgcccaaaaggtgtcccatctcttgggtatcaatgtgaccgatttc

SEQ ID NO: 864451 - DNA, 99 bp, Homo sapiens
ttcagcctgccgggcaggggacgtgaacatggatgaccctaagaaggaaggtgtctgacttccagcaactgctggcctgtgccagggtgcaagctgagc

SEQ ID NO: 864452 - DNA, 98 bp, Homo sapiens
ttaaggaagtaaaatggcggacctggcgaacgaaggtgactgctggctgctggcagccattgcctccctcaccttgaatgaagaaatcctggctcgag

SEQ ID NO: 864453 - DNA, 100 bp, Homo sapiens
aaggcaagtagcggcggcgcttcaaggcagaccatgtggaccctggtgagctgggtggccttaacagcagggctggtggctggaacgcggtgcccagatg

SEQ ID NO: 864454 - DNA, 100 bp, Homo sapiens
ccgacggctgctcaaacatcaggaatgagtctgcaggtcttaaacgacaaaaatgtcagcaatgaaaaaaatacagaaaattgcgacttcctgttttcgc

SEQ ID NO: 864455 - DNA, 100 bp, Homo sapiens
gtagccaaggagcgcgcccgcctgcagctggagctgagcaaagtgcgtgaggagtttaaggagctgaaagcgcgactccagggattagagctcgatctgc

SEQ ID NO: 864456 - DNA, 100 bp, Homo sapiens
tcaagcccaaactccagatcagcaaccaaataggaccaatggagatgttttgagagattacagaagaggaggcctgcttcacttgcagataagtttatta

SEQ ID NO: 864457 - DNA, 100 bp, Homo sapiens
cggagggcagaactagaaccaggttcccggccgtttccgaccacacggatggggcggacccatgtgcgcttcccttcccacttcagctctgacttgaagg

SEQ ID NO: 864458 - DNA, 98 bp, Homo sapiens
tactaacaggatattcctcatgacattgctgtctgtagccggatcgagctgggagatgtgacaccacacaatattaaacagttgaaaagattgaatca

SEQ ID NO: 864459 - DNA, 100 bp, Homo sapiens
tgatgctatgacagctgccctcaaacgcagggttcatgacctggaggaagagagaagctagtgaagatgctggtggagctgctgaccaaccaggtgggag

SEQ ID NO: 864460 - DNA, 98 bp, Homo sapiens
gccacctgctgcacccacgaatctgcccacccctcctgtaacccagcctgtttcacttcttggtctcctctgagcctccggcctccataagacccaaa

SEQ ID NO: 864461 - DNA, 95 bp, Homo sapiens
tccaggtggaattgctgatagacatgggggcctcaaacgtggagatcaactcctctctgttaatggagtggtccagaggtgtccttctaaagctg

SEQ ID NO: 864462 - DNA, 98 bp, Homo sapiens
gaattcacgcttatggtagtggaaacctgtgaaggtcgaaacagctgcgtttcctgttttaatgttagcgttgttaatactacctgcttttggataga

SEQ ID NO: 864463 - DNA, 143 bp, Homo sapiens
agcgatgatcttccccagcagcagtggcaaccccgggggcagcagcaactgccggacgccctatcgcaagcaggagatacaactcgtcaacgaatcaaattcagtgatgacagagtatgcaagagtcaccttctcaactgttg

SEQ ID NO: 864464 - DNA, 100 bp, Homo sapiens
gacacgaggcggcgggctggagacatggaccgcggcgagcaagtgctgtgatcttggctaccatgcaagtctgaacagagccctaagaacatatctgtct

SEQ ID NO: 864465 - DNA, 100 bp, Homo sapiens
aggagtcagaaactcagccactggttgccttggtaggcaataaaaatttacactctagacatccacagacctgaggattgttggaataaatttatctcca

SEQ ID NO: 864466 - DNA, 98 bp, Homo sapiens
ccctagccagactcagggatcaaagagcaaacagattcagtggcctgcattggatccactagttcctggactatgggaactgatgactcgcccaatgt

SEQ ID NO: 864467 - DNA, 125 bp, Homo sapiens
ccgcgcgcagggcctgcagcgggagctggacggcgagcgcgagcggcgcgagaaagttggcgctgtacgtttatgagtacctgctgcacatcggtgcccagaagtcagcccagaccttcctgtct

SEQ ID NO: 864468 - DNA, 100 bp, Homo sapiens
gaagagaagctcatgattcgtggattaggttggctagagatttactacatccgtccttggaagaggaaaagaaaaaacataaaaagaaacgcctagtaca

SEQ ID NO: 864469 - DNA, 98 bp, Homo sapiens
ggtctagaagatgacgaagacatgacacttacaagatggacagggatgataattgggcctccaagagcaaccactgagaaaacggaaccgaatagtca

SEQ ID NO: 864470 - DNA, 99 bp, Homo sapiens
ttcggtttcagttggagttggaatttgtgcaatgtttagccaacccaaattaccttaattgggaagacaggaagacccccagcgaatcaaatagcccct

SEQ ID NO: 864471 - DNA, 99 bp, Homo sapiens
ccccggccgcgcccaagcgcaggggctcctcgggctcagtggacttgtgtatgcggatacctgcttcagtaccatcaagttaaaagcagaagatgcttc

SEQ ID NO: 864472 - DNA, 100 bp, Homo sapiens
gcccctcctccaccagaggactgggaggagcatgtcaacagtcacagttgcagattatatttctagagctgagtctcagagcagacaaagaaacctccca

SEQ ID NO: 864473 - DNA, 100 bp, Homo sapiens
tgtcctgtgtttccttctgctgcttggattccagttcgtctgcccacagccctccactcaacacaggaagagagatgtggataatttgccctgcctccaa

SEQ ID NO: 864474 - DNA, 98 bp, Homo sapiens
tacaggcgcagcggccgcagcagcagcggcagtcacaggcacatcagcaaagagcctaccaggacatcctcggaaagtatttattctaggccaggctc

SEQ ID NO: 864475 - DNA, 74 bp, Homo sapiens
gctctccagtgggacagcgcatcgctgtccagaccaaaacgaagaagacgttagccaaacccaatataaggaat

SEQ ID NO: 864476 - DNA, 100 bp, Homo sapiens
agcctttcagccttaccaagcaacaagtgaaattgaggtcacaccttcagtccttcgagcaaaacatccagtcatggataaaaatgagctggttcagaag

SEQ ID NO: 864477 - DNA, 100 bp, Homo sapiens
agagtaacagcagcgccgtcccgtccgacagccaggcccgggagaaagttgctggagaatgtaaccctaatccataaaccagtgtcgttgcaaccccgtg

SEQ ID NO: 864478 - DNA, 128 bp, Homo sapiens
ggagcgtgtgtttttgtgtccacgcgcgtctgcgggccccaaattgcgtaactccaaggacttttcggagacttttgagtcacatgccataggaaaaaagcctgaaaattcagcagacatgattgaag

SEQ ID NO: 864479 - DNA, 98 bp, Homo sapiens
tcattatacttggtgcagagtttgcctggcatctctcgctggtttgaagtggaaaagcgtgaagtgttggtagctggcagtgttgtgatggcttttga

SEQ ID NO: 864480 - DNA, 100 bp, Homo sapiens
tctccatgaagacaagaacctggtccatgttgcccatgaccttatccagaaactctctcctatgaggtttatataactttccaagacaaggaagttgtgc

SEQ ID NO: 864481 - DNA, 101 bp, Homo sapiens
ctatgacattccaggaaaccttcactgctaagaggaactaagatctagagtatctcctcgaggaagtacaactgaactgccattggatgtccagaatcccc

SEQ ID NO: 864482 - DNA, 98 bp, Homo sapiens
cgaggcccctatggcagatttgaaaattcacccttgtagagtcattcctgcctttgagcggactcccttttaagagtggagactgctgcacggactct

SEQ ID NO: 864483 - DNA, 99 bp, Homo sapiens
tcagtgtcatgtgaggacgtgcttcctgcttcatagataagagagtttcactctatcacccaggctgtagtgcagtggtgccatctcagctcactgcaa

SEQ ID NO: 864484 - DNA, 98 bp, Homo sapiens
ccgcccgcccaaggtctctcgcgggcgggagaacggaaaactcccaacttcctggagcatattaatgaaaagtgccataaactgaaaaaccaaacatg

SEQ ID NO: 864485 - DNA, 100 bp, Homo sapiens
ttcgtctgtgcggcctgcaagaagccttttgggaacagcctcttccacatggaagacggggagccctactgcgagaaagcgtcatgccctatcacttttc

SEQ ID NO: 864486 - DNA, 100 bp, Homo sapiens
aaagccatctggcacgccttcaccgcactcgaccaggaccacagcggcaaggtctccaagtcccagctcaagcattatgccagtacatacaggcttctaa

SEQ ID NO: 864487 - DNA, 100 bp, Homo sapiens
ccacggagagcacgagagacccgagttcatcgcctacccccatctccgcatcaggaccaaggttggaagcgaagtggaagcactgaacctccaggtgaca

SEQ ID NO: 864488 - DNA, 99 bp, Homo sapiens
gagaacaaaaatttaaagaaagatttgaagcactacaaacaagcagctgagcaggaagatgtccaagccccgcgcggtggaggcggcggcggcggcggc

SEQ ID NO: 864489 - DNA, 100 bp, Homo sapiens
gacctgctaacagaactggaccttttcgttgctgatatgtgttcaagatgagtgggatgggagaaaatacctctgacccctccagggcagagacaagaaa

SEQ ID NO: 864490 - DNA, 98 bp, Homo sapiens
gtgtcccggcctgaggtgtcggccggatccctccttctcccggcgcctcaagcggaaggcttgtgcagacataagagccagttcagtgttttggcagc

SEQ ID NO: 864491 - DNA, 99 bp, Homo sapiens
gaactcggagctgagcctccaggccggggaggtggtggatgtcatcgagaagaacgagagcgccacccagagcttcacggccccacggacaaaccagga

SEQ ID NO: 864492 - DNA, 100 bp, Homo sapiens
gccgaagcccacccagggagttgatgacaattgcagcatgactttcccagggccctgattttcagcacggatgattttttcttcagggaagatggtgcct

SEQ ID NO: 864493 - DNA, 99 bp, Homo sapiens
cgacggctgtaatgttccaggacacctgccatcatggagggttatccagcacctggaggatacctgctacctgaacggaaaacagttcttccttcaaag

SEQ ID NO: 864494 - DNA, 101 bp, Homo sapiens
cagcgtcttccctttccacctccctgaccctgtcggattcggatgagcccattgcaaggagaagacgcagccgtcagtatccggctgctttgatgaacctg

SEQ ID NO: 864495 - DNA, 100 bp, Homo sapiens
aacgacaccctgttctcccactctgttccctcctcaggaagtccttttattaccaggagatcatgtttcactccttcggcaacaagcaagggccccagca

SEQ ID NO: 864496 - DNA, 100 bp, Homo sapiens
ccagctcccccgcctcggggagggcaccagttgtgtgacttcattgagacacattacctgaatgagcaggtgaaagccatcaaagaattgggtgaccacg

SEQ ID NO: 864497 - DNA, 98 bp, Homo sapiens
gaaaattcaaacggacagacaatggaaacgaactgaatactgtccgagaaattataggtgatgaactagtccagacggagtctcactctgtcaccagg

SEQ ID NO: 864498 - DNA, 99 bp, Homo sapiens
ttcaaccaccatgagcagtcctccgaggacatctgggctgcgtgctgtgttgtcacaaaggatttttttcccaggaagccatcccgtcagaggggttca

SEQ ID NO: 864499 - DNA, 98 bp, Homo sapiens
actgggggaacaagatcggcaagccccacactgtcccttgcaaggcaaacctggagaaagtgtctcggacgctggaggaccaggccaatgagtaccgc

SEQ ID NO: 864500 - DNA, 105 bp, Homo sapiens
tttgagggaagaaggaggaaaattacccggtatcgttagaggtaaagagaaatgtgtatgaccttacaagtatccccgttcgccaccaattatgggagggctggc

SEQ ID NO: 864501 - DNA, 100 bp, Homo sapiens
cattactgtgacggctatcaaacagatgaaatcatgcaccaggacatcgtcccgctctgtgctgccgacatccaggaccagctaaagaagcgctttgctt

SEQ ID NO: 864502 - DNA, 98 bp, Homo sapiens
agcactggactcatggaggctgagcatttattcagtgggtcggaagcagttcatgaggtttgagtgggcaaactacgcagctgaggccctgggctgcg

SEQ ID NO: 864503 - DNA, 98 bp, Homo sapiens
gaggcgcagcgcttccagtggtagcagcagtaccaggttctgtacagagtaatgagatgtgtgacggctgcaaaccaggtgtttttttctgaggctgt

SEQ ID NO: 864504 - DNA, 99 bp, Homo sapiens
gtgttccgaatattgatacgcccggagatgtttccaaaggactggactgttatgcgcttggttgctaacaaattttccatctttgaccagaaatttgcc

SEQ ID NO: 864505 - DNA, 100 bp, Homo sapiens
gaggagatcctcaacgtggacccggtgcagcacacgtactcctgcaagaaaatgcttggacagaagagatgagtactatttccactaaggcctagaattg

SEQ ID NO: 864506 - DNA, 120 bp, Homo sapiens
ggacgccaagcacttcctgccgcgggcggcgcgccgcagctgcccaggccggaccgggccgggcgcccgcaggcctgtttaaagaagaaaacccgtatgctagatttgaaaacaactaaa

SEQ ID NO: 864507 - DNA, 100 bp, Homo sapiens
ccttgagctcctcaatgtgggtgtagagtctaaactcatccttaaaggggtcatactgctgaaacgatactggagtatttgtgtcagacattgtcaaagg

SEQ ID NO: 864508 - DNA, 100 bp, Homo sapiens
cacacgcttcagcatcagtctgattcgacgtcaagcaattaaagaactgcctcaatttgccactggagaaaatcttcctcgagtggcagatatactaacg

SEQ ID NO: 864509 - DNA, 100 bp, Homo sapiens
cccagcctctcgaatgggcacacctgtgtagcagtagaagactcagaaagtggtgtttacatgcgattcatgaggtcacacaagtgttatgacatcgttc

SEQ ID NO: 864510 - DNA, 100 bp, Homo sapiens
caagctgaaaagaaaattgaagttgtaatggccgaacccttgtgcacctatgatatgtgttttagaaatagccgttaaactttggtttgaatgaagaatg

SEQ ID NO: 864511 - DNA, 100 bp, Homo sapiens
ggggccgcggccggaccgagcgcctcgacctcggtctgagagccagtcttggtgctctgtgttcacctggttcatctgaggagctgcatctaccctgccc

SEQ ID NO: 864512 - DNA, 100 bp, Homo sapiens
tggcgttccaccagcaaccatgagtggttccatgatgggaagtgacatggatcttcaagatgaagttcaaagggagaatactaatctgcaaaaactacag

SEQ ID NO: 864513 - DNA, 100 bp, Homo sapiens
aattacctccacgggaaggcttcctagagagcttcaaaaaaggtgtgatgttagctgttgatgctgtaattgctgaacttaaaaagcagtctaaacctgt

SEQ ID NO: 864514 - DNA, 98 bp, Homo sapiens
tgaaccggttcttgggggactatgtggtggacttggacacgtcccagctctctctgggcatctggaaaggcattgaagttgatatcgatgtggagcac

SEQ ID NO: 864515 - DNA, 100 bp, Homo sapiens
gaccttggctgacatatgttgcgtggggtagagcagcggctgccatgctcttctgtggcttcatcatcctggtgatctgtttcatcctctccttcttcgc

SEQ ID NO: 864516 - DNA, 100 bp, Homo sapiens
agcatttctgggtgacacttaatagggtttcaggctgctgatgtgctgttgcaacatggagctaatgtcaatattcaagatgcagtttttttcactccat

SEQ ID NO: 864517 - DNA, 99 bp, Homo sapiens
ttacttcctgttcctcctcattctgcaggcctcgtgggctgtgcggctatcctggagacagatgacagctctcccttggatggctttgctggttccgca

SEQ ID NO: 864518 - DNA, 98 bp, Homo sapiens
tcacaaaagagttgattgaaattatctctggtgctgcagctctctcttttgtgacagggacggcttgttgcgggcacttctcacccctgagaatctgg

SEQ ID NO: 864519 - DNA, 98 bp, Homo sapiens
ctactccatggctctggtgctctgggaaatgacatctcgctgtaatgcagtgggagttttgagtatccgaggagcccaggaggaggaacccacagacc

SEQ ID NO: 864520 - DNA, 51 bp, Homo sapiens
cagctttcttactcagacaatcaggagttcaaagaaggacgcagagccagc

SEQ ID NO: 864521 - DNA, 100 bp, Homo sapiens
tacaagaactgatgggctgcctgggcgtggcgaaagaggacggcaaagcggacaccaagaaacgccacagtgctggagaatctggtaaaagcaccattgt

SEQ ID NO: 864522 - DNA, 100 bp, Homo sapiens
cggaaatctggaaccgggatggcgacgtctacactgagtcggaggcgaagctggatgactgtactctgcagctctctcacaatggcgcctacctggattt

SEQ ID NO: 864523 - DNA, 98 bp, Homo sapiens
cagcagcattactttgctgtgaatgtgaagaatcagaaatctttactgattccaatgctttggttggagagaaggcttgttatcaatccatcagtagc

SEQ ID NO: 864524 - DNA, 101 bp, Homo sapiens
gtcctgtactggctgctgctgccctgcgcgctgctggctggccaagactaaggggctgcagagcggggtggacattggcgtcaagtactcggagaagcagg

SEQ ID NO: 864525 - DNA, 100 bp, Homo sapiens
gccaggaacacaacctcaccttgatcaggtttatggttggctgtgggagatgtgatgactggtttcatggtgattgtgttgggttaagtctttctcaagc

SEQ ID NO: 864526 - DNA, 100 bp, Homo sapiens
gtagatatggccagtagtaccttccaaggcattcagagcgcattttggaggaccaggaggaaaacccgctgcccgccgccctggtccagccccacaccgg

SEQ ID NO: 864527 - DNA, 99 bp, Homo sapiens
ccatggcctcagtcctgggggcctctccaatgggagccgtgaggaatgctactggggccacgtcttctgggaccaggagaacggcctcaaggaagacta

SEQ ID NO: 864528 - DNA, 100 bp, Homo sapiens
tcctaacagctgaagaaaaaatcattttgccaagtatcctctacttctactcctccctgagcagattcctcatggtcatgggggccaccgttgttatgta

SEQ ID NO: 864529 - DNA, 100 bp, Homo sapiens
cgttaaggaccgttacgtttcccggaaaatggacccaagtggggtcaaagtgctggaaacagcagaggacatccaggagaggcggcagcaggtcctagac

SEQ ID NO: 864530 - DNA, 100 bp, Homo sapiens
cgcctccgcccagggccacctaaggagcggaccccgcatcttcgccgtctggaaagtaggtggtcttggcacaggcagcctgactggtataggaactggt

SEQ ID NO: 864531 - DNA, 100 bp, Homo sapiens
ctatggtggctccgggccactttacacttgtgtgcctgctggtagtccagcatccagctcgacgttagaaggcatgaaagatggccagaagataacattc

SEQ ID NO: 864532 - DNA, 100 bp, Homo sapiens
tacactgctgagtcacacacaacgcttgttatgttttcatcacttctctccagaagaaatcaatgtggactgaacataaatcacctgatggaaggactta

SEQ ID NO: 864533 - DNA, 100 bp, Homo sapiens
ggatcatgtctgcgagccaggattcccggatagctagcggccaggagaaatacagtggaaaatgcaaaacaacgaaattataaagcctgccaaatacttc

SEQ ID NO: 864534 - DNA, 99 bp, Homo sapiens
aaactctcagtccagaaatgcagagctttgtgagataccacccacttctgatacaaagtcagatactgcaacagccttggcaaatgcaacattatgtat

SEQ ID NO: 864535 - DNA, 99 bp, Homo sapiens
aacgacctggcggtggggctgcggcgcctgggactgcaccgcaccgagggcgagctccagatgccttccaggatgtcaaatttgtcagcaactcgtcag

SEQ ID NO: 864536 - DNA, 100 bp, Homo sapiens
aggtgctttgaagaagatttcaagactcaagatggatagctcccagttgatccattgtcgggagcttgtggcacatcacctttctactctgcagtcttcc

SEQ ID NO: 864537 - DNA, 100 bp, Homo sapiens
ctcgctcgtcaccagcaagcttgcgggatatgattctataacagactcttccagaaatgatatgaagaggaaatttgccctgacaatggaatttgttgaa

SEQ ID NO: 864538 - DNA, 99 bp, Homo sapiens
gagagttccccatctgaggcgtttgttgcagctacctgcacttctagatgtttttcttcccccagtccctcagctgctgctgctgctcaggaggtcaga

SEQ ID NO: 864539 - DNA, 100 bp, Homo sapiens
gcacaaggctgactctttggactgctccagatttcttgtggaggccccccatgactgggatttagaggaggtgtatgtggaatttgatgatcttgaatgg

SEQ ID NO: 864540 - DNA, 98 bp, Homo sapiens
ctggacctagtggcttcacatttcaacctgaaagaaaaggagtattttggaataacattcatagatgacacgagtagctcggagaggaggaaggagaa

SEQ ID NO: 864541 - DNA, 99 bp, Homo sapiens
ccggagcacccgacccctgagtatgtctccctgcaacacagctgttgtacctcaggggtggtctgtggaagccttaaactctccacactcagagtcctt

SEQ ID NO: 864542 - DNA, 98 bp, Homo sapiens
tggaaatctgctctgagcctgtggcagcctcccctgcaccggcaggtgagaggcggatctacagacatagggatgtttcagcagcccctgagaaggaa

SEQ ID NO: 864543 - DNA, 99 bp, Homo sapiens
cttcgtctcagttctttcctcggccaccaccaggaaagccacccacgaggcctggagtagaagccaggctatcaagaattttaatggagctggatggac

SEQ ID NO: 864544 - DNA, 98 bp, Homo sapiens
ttcagccggagaagcgagtttcagctgcatgatgccttcttctgtagagtgggcgctttgcagaatacgtgttgaatgaaatcactgatctaggaaaa

SEQ ID NO: 864545 - DNA, 100 bp, Homo sapiens
tccagctgccattgtgactattgatggatttagcctttttcaatctcttcgtgcttgtcgaaatcaggtagcaaaagttgagccccatatgggggttggc

SEQ ID NO: 864546 - DNA, 100 bp, Homo sapiens
gtgggcgatgggcccgtggacatgcgcacctcacacagctattactataacaagcgcattctgcacaagaccaaggggaaacggttcacctacaagttca

SEQ ID NO: 864547 - DNA, 100 bp, Homo sapiens
tgtgaaccgaagtttagcaatggaaaagataaagtgttttggttttgatatggattatacccttgctggcattggaatggatacttgtgtcattcctttg

SEQ ID NO: 864548 - DNA, 100 bp, Homo sapiens
ccatggctgatgcagcaggcatcatccgctatgcaattgggctccttgctcggattgaacgtatggaaaggcggatgcagctggtaaagaaggataacga

SEQ ID NO: 864549 - DNA, 98 bp, Homo sapiens
tttgatccagaacttgcagcaacaataggtgtttgatcagtatgtaaagaccagggcagaggaagaacgcagggaaaagaaaaataaaataatgcaag

SEQ ID NO: 864550 - DNA, 100 bp, Homo sapiens
ttaaaaatcatcgattccgcttcttgcatgaaactggaggagcaatggtgtatggttgtctgaaatgtatttcaattatgagacaaaaagtgcgttagaa

SEQ ID NO: 864551 - DNA, 99 bp, Homo sapiens
aaggggctaaagactatacttaaagatgccaccctcactgcgctagaccgaggacagcaacaagtgttcaaagggtcaatatccaacacagccaaccta

SEQ ID NO: 864552 - DNA, 100 bp, Homo sapiens
aaaactgatctgataagacctcagatcagacagagaacatccatgatagcagtcttctgtaaatcgaacttttcaagaattctctgaaggaaccaagtag

SEQ ID NO: 864553 - DNA, 100 bp, Homo sapiens
gaaaactattacctggaggtcaatcaacttgagagttgtctaccttcataacaacaatatctctgtagttggatcaagtgacttctgcccacctggacac

SEQ ID NO: 864554 - DNA, 100 bp, Homo sapiens
cgatatatgccatttgtttgacaaagataagaagcagtatcactgtgaaaactgtggaatttgtaggctggaatgataaaaagtgataatgaagagtatt

SEQ ID NO: 864555 - DNA, 100 bp, Homo sapiens
tgaaggccagaggccggctctgctcatctgcacagctgcagcaggacccacgcagggagttaagacttcacagagaatgcagttgtcttgacttcaggtc

SEQ ID NO: 864556 - DNA, 98 bp, Homo sapiens
gccggggacccgtgaggtttgtgtggaccccgaggtcaacattggcatcctcatcgctgtgaccagagtcatctcacagatcagcgccgacaactaca

SEQ ID NO: 864557 - DNA, 98 bp, Homo sapiens
ttaatcaaacagaaggagtcttccattgtggccaccacagctgggaatggtcatcaccgagtggtcttctcacatcatccttcaggcagcaccaagag

SEQ ID NO: 864558 - DNA, 100 bp, Homo sapiens
ggggtgggcgtcttcacccccaccattgaggcccgcacagcccagtccatttgaccttgtctgtgtcaatgcgtggatgctggacctcacccaagccatc

SEQ ID NO: 864559 - DNA, 99 bp, Homo sapiens
gtgcgccctgatgctggcgcagggcacggtgggcgcctacctggtggcacaagatctctgtaaagtagcaggcatagcaaaagttctggtggctcagca

SEQ ID NO: 864560 - DNA, 148 bp, Homo sapiens
aaagctacaggaggaagggtggctggaaggagaactaaatgggagaagaggaatgttccctgacaatttcgttaaggcctatatgaacccaatagcaatggcgagatcaaggggtccaatccagtcttcagggccaacaatacaggat

SEQ ID NO: 864561 - DNA, 100 bp, Homo sapiens
cgacggccaaatggagagaattatgcacctgacagcatctattacctttgccttggaatacaggagttggcagatatccctgttacaatctgtacatatc

SEQ ID NO: 864562 - DNA, 100 bp, Homo sapiens
accatgaagagaaatgagatgatagccaaaccctcagtgtggcaaaggagcagagaactttgacaagttcttcacacgaggacagcccgtcttaacacca

SEQ ID NO: 864563 - DNA, 100 bp, Homo sapiens
agccagcgagccacgggagcgagccaggagctgacatggacccaaatcctcgggccgccctggagcgccagcagctccgccttcgggagcggcaaaaatt

SEQ ID NO: 864564 - DNA, 100 bp, Homo sapiens
ctttggaggagcaatcggactgatgtttttgatgcttggatgtgcccttccaatatacaagaccacagaatactggccatggtgcaacttctggttttgg

SEQ ID NO: 864565 - DNA, 100 bp, Homo sapiens
ccgatcatggcggatggcccccggtgcaagaggcgcaaacaagccaatcccaggaggaaaaacgctcctgttatgcagtgttccccttccagcaggtgtc

SEQ ID NO: 864566 - DNA, 99 bp, Homo sapiens
tcaccgttacccggggcaacagctgagccgtctgggaagggatgcatctgtgagccaatccaaggagcaccagcagtttatcaccttcttacagagact

SEQ ID NO: 864567 - DNA, 100 bp, Homo sapiens
ctggggaacccacaggagtcgctggatagactgcacaaggtgaagactgtctgcagcaaggccccgagaagctgccatcactggagcaccgggactcccc

SEQ ID NO: 864568 - DNA, 100 bp, Homo sapiens
ggacaggggccgcgccgctgccgctgctgctggtgttagcgctcagtcaaggcaaccactgagaaaacggaaccgaatagtcaagaggacaagaatgatg

SEQ ID NO: 864569 - DNA, 100 bp, Homo sapiens
gaaattcgactatggcaacaagtacaagcggcgggtgccccgggaagaggagttgtacgcatgtcagagaggttgcaggctgttttcaatttgtcagttt

SEQ ID NO: 864570 - DNA, 99 bp, Homo sapiens
gaacaggagcagctgcgccgggaggcagagcggctcagccagcggcagacagaacgggacctgtgtcaggaatgtatcctgtcaggtataatgtcagtg

SEQ ID NO: 864571 - DNA, 99 bp, Homo sapiens
cgactccaccctggctggaggaactgggtgctcctgcccgctggcccctcgcgcgtgaggatctatctcaggaggaatgccagctcctgagcaggcctc

SEQ ID NO: 864572 - DNA, 98 bp, Homo sapiens
gaaattattgatgagctcaaggctggcaaaatcccaaaaccagggccaaggaacgtcaaggtcgtgggaaataaaaggcagttctacacagactgcag

SEQ ID NO: 864573 - DNA, 50 bp, Homo sapiens
ctaagatgttactcaggctcccggcgcagttgtgtagcagttgagtaatg

SEQ ID NO: 864574 - DNA, 100 bp, Homo sapiens
ggaagaagtttatcgtacccaagttgtggaaaaatctttaagaattgatgaattgcaagtttgtgccccatagctgcacaggtatgtatatgaattacct

SEQ ID NO: 864575 - DNA, 98 bp, Homo sapiens
ttcctgaccccagtttctcacctctagttggagagactttgcaaatgctaactacaagggaccagttactctccacaagaaaattcacacaaccacag

SEQ ID NO: 864576 - DNA, 100 bp, Homo sapiens
ctgctttcggagtacatgggcaatgccttattccactgctggggattgatgtgtgggagcacgcttactaccttcagtataaaaatgtcaggcctgatta

SEQ ID NO: 864577 - DNA, 100 bp, Homo sapiens
ccggtcggctggcgtccctcttcagttctctggagccccagattcaacccgtgtacgtgcctgtgcctaaagacccagatgatgtggtaccagttggcca

SEQ ID NO: 864578 - DNA, 100 bp, Homo sapiens
ggagaaatggatctactactgcaatggccatgggctcaatcaagacatcacagatgtgtgtttttcccctgagaaagaccacagctccaagtctgcgacc

SEQ ID NO: 864579 - DNA, 141 bp, Homo sapiens
ggcggtccaacggagagacgccggccgtggacatcggggcagctgacctcgcccacgcccagcagcagcagcaacagggagtaactattcccagtcagaggcgctatgtgtattattatagctacctgttaaagaatcatc

SEQ ID NO: 864580 - DNA, 99 bp, Homo sapiens
gtttctcggtttatgtgctcttccaggccaaagaccgggttccagatgtggttagaagaaaatagaagtaatattttgtctgacaatcctgacttttca

SEQ ID NO: 864581 - DNA, 100 bp, Homo sapiens
acaagatgaccacactccaggaatgccagtgcatcttttgcacagctgaatcttgcctccacaccacgagtcccatgccaaggtgatgatgtatcgtaag

SEQ ID NO: 864582 - DNA, 99 bp, Homo sapiens
agaattcaattaaagtggctcagtcataccctatggtactgcagtatcgaccaagaattgatttcggttagaccaaggggcccagacctcactgagatg

SEQ ID NO: 864583 - DNA, 100 bp, Homo sapiens
gctcacatcttcaggtgcctcattcacatacgtcaaggaaattgagacgcatcttctctccagactgccgatcccagaaagccaggtgatcaccattaac

SEQ ID NO: 864584 - DNA, 98 bp, Homo sapiens
agaccagcaagcgtggcggcaagatcatcgtgggcgacgccacagagaaagcggcaaccagttctttttcttctccaaatgtatcctccatggagtcc

SEQ ID NO: 864585 - DNA, 100 bp, Homo sapiens
gagcccattatgaaactgaaggtagccgaggggcagtaaaagcatctactgggggacatcctgttgtgaaggttactggtaaaaagctactagaaagggg

SEQ ID NO: 864586 - DNA, 98 bp, Homo sapiens
aactttgtcctgttaagtcaaatttcagcatcttgcaacttcatgtgaaggttgctatccttaaatacatagaaactctggccaaacagatggatcca

SEQ ID NO: 864587 - DNA, 100 bp, Homo sapiens
tggtgcagtggaagcagaggcacccacgctcctacaatgaggaagaaggcacctacgatcaaactctggagttccgtaggggaggtgatggccagccaag

SEQ ID NO: 864588 - DNA, 99 bp, Homo sapiens
gagaattcatcagagtccatcgtgaggtgttgaagtgccatcaaaagactctttgccaaagaagaggccaatttatgaagataaaaagaggaaaaaaat

SEQ ID NO: 864589 - DNA, 99 bp, Homo sapiens
agcaggaccagatgataccatgaagagaagtttacaggccctctattgccaactgttaaagagaagaagaaggaggttcctgctgtgccagaaaccctt

SEQ ID NO: 864590 - DNA, 99 bp, Homo sapiens
gcgttctgagccgtctgtcctgcgccaagagattaatgattcatcaagggatagttgtacttgtctcgtgggaatcacttcatcatgcgaaatctgaaa

SEQ ID NO: 864591 - DNA, 100 bp, Homo sapiens
aaacagagaaagataggcggccatggtccaaccttgaaggaaaatgtttataggaggccttagctgggacactacaaagaaagatctgaaggactacttt

SEQ ID NO: 864592 - DNA, 98 bp, Homo sapiens
aaggaggaggaataatatttatggagcatatattatggaacacagttggtgaaaattgcccctcaatattatgacatgagcaatttcccacagtgtga

SEQ ID NO: 864593 - DNA, 100 bp, Homo sapiens
ggagtcctccacttgccactgggagtctactcttcatcttgtgttgagacttcgtggtggtgctaagaaaaggaagaagaagtcttacaccactcccaag

SEQ ID NO: 864594 - DNA, 100 bp, Homo sapiens
gtccttcaatagtgctgaaggctttgccgacttcagccagatgtccaagatcatggaagggaagtggttgctgtgtatgttactggtgcttggaactgct

SEQ ID NO: 864595 - DNA, 98 bp, Homo sapiens
cttcggcggcggcagcgtccaccatcttcctcttgctgccagtggtagcgctcgtctggcggagctggtgtatgtggtagaagaccaaagaagagatg

SEQ ID NO: 864596 - DNA, 100 bp, Homo sapiens
aacaagaaaaccttgggaaagaacaaatacaatgaatggcagcaagtcacctgttatctccagtgacagctatattgtgcgtgtcaaggctgtggttatg

SEQ ID NO: 864597 - DNA, 100 bp, Homo sapiens
aacctgcatgactcagcagaggcagccataatcctggagagccccggtttaagatctccaggtgaagtagatttttattcttagtcatccagtggagatt

SEQ ID NO: 864598 - DNA, 98 bp, Homo sapiens
gagaaactcaaaaagcaggcgcccgagctcctcaagtggactaaagaggatggacatagaacttccacctctgctgtccctaacctgtttgttccatt

SEQ ID NO: 864599 - DNA, 100 bp, Homo sapiens
ccctgctgacactctacctgctcctcttctggctctcagtgacaaccatgagtggaaaaaactaattatggttcagcactggcctgagacagtatgcgag

SEQ ID NO: 864600 - DNA, 98 bp, Homo sapiens
tgccattcagagaagtagccaagccaacagagcctgatgagcatggttccctctcccagcctgtgctgactcagccatcttcccattctgcatcttct

SEQ ID NO: 864601 - DNA, 128 bp, Homo sapiens
ggaggcgcggctggcgccgctgcgcgcatgggcctgttcctggcccgcagccgccacctacccagtgaccatgatagattttaccaaatgttgcaagaactctggagttcttatggtagtaaaatgcc

SEQ ID NO: 864602 - DNA, 100 bp, Homo sapiens
agatggctgcctccatagtgcggcgcgggatgctcctggcgcggcaagtggttcttcctcagctctctcctgcagaagtcaacgaaaggttccgttgtcc

SEQ ID NO: 864603 - DNA, 100 bp, Homo sapiens
aagacttgtcctctgctacccatgatgaggcggtgcaggtcctcaagaagacaggcaaggaggtggtgctggaggcctgtcacagccagggtctggtgga

SEQ ID NO: 864604 - DNA, 100 bp, Homo sapiens
ctggaagagagggccttctcccgcttctctcctcctcctctccacgctggggggatcctgggactcagtggcctctgaggatgtggctgtgaacttcaca

SEQ ID NO: 864605 - DNA, 100 bp, Homo sapiens
cagccatcagccctactccggaaatttcttcagagactcctggatagtcactcctggaagcaaggcggctctagctaatttatgtattggagatgtaatc

SEQ ID NO: 864606 - DNA, 99 bp, Homo sapiens
tcttccatctctacgtgagcacctccccctgtggagacgcaagactccactctccctacgagatcaccacagaccctgagtcagtgctgattctctcaa

SEQ ID NO: 864607 - DNA, 99 bp, Homo sapiens
tcgtatgcaacctcaggcttcagccagtgacttaagagattaaaattaatttggttgctgttggttctgaacaaataatgagttcttttatttgaggta

SEQ ID NO: 864608 - DNA, 100 bp, Homo sapiens
cgagtcacctagccgggacgtcgtgggatccggaacagagaaccatggagtctggcagtaccgccgccagtgaggaggcacgcagccttcgagaatgtga

SEQ ID NO: 864609 - DNA, 100 bp, Homo sapiens
ctgagttcaagttcatgccaccaccgacttatactgaggtggtttgtgatgaaaatggttccaagggctatggatttgtacactttgagacgcaggaagc

SEQ ID NO: 864610 - DNA, 100 bp, Homo sapiens
acccttccccgtgctcagacagtgcaccgctgtcccatctaaagaaacctgtcaggaatacgagcttctgggggcactggccggattaatagacattgct

SEQ ID NO: 864611 - DNA, 98 bp, Homo sapiens
atgtagagaaatggcgtgtgaagaggtgggaatgagatctcgaaaccaaggtggtgaaagtgcatctgatgggcatatctcctgtcccaagccctcca

SEQ ID NO: 864612 - DNA, 100 bp, Homo sapiens
gaaggggttcctggtcatacaccagtactaccaaggacagcttttttcctgcaaggtactccaaagattcaggtttactcacgtcatccagcagagaatg

SEQ ID NO: 864613 - DNA, 101 bp, Homo sapiens
cccagacagaggggagcacagagaaagagaatgatgaagagaaaggcccggagactaacagccaccccatcttttctctcaactgggagtgtgtggtcagt

SEQ ID NO: 864614 - DNA, 100 bp, Homo sapiens
tttgcttcctctccacttcgtgtcctggaaaaccatgccagggtctcagcttcttggaagtgaaagaccagctgctgctcatgtaccttatggatttgac

SEQ ID NO: 864615 - DNA, 98 bp, Homo sapiens
attgattcatcagattttgcattggatattcgcatgcctggggttacacctaaacagacagaaacagtctccgccagtcaagaaaccctcaaaagtat

SEQ ID NO: 864616 - DNA, 100 bp, Homo sapiens
agtgctgctcatgctgcggaagatgggatcaaacttaacaagcacaagccctggctggagcccacctaccacggcatagtcacagagaacgacaacaccg

SEQ ID NO: 864617 - DNA, 101 bp, Homo sapiens
aaagaagggcccaatcatcagctgatttcctatcagggcagaattccatatcctcgccctggaactgtgaaatccttaaccctgtttgtcacccattatcc

SEQ ID NO: 864618 - DNA, 100 bp, Homo sapiens
gagcggtgactccccgccgctcccgggggccgtgacggtcgcttatgatgaagctacagatgaatttgcttcttacttcaacaaacagacttctcccaag

SEQ ID NO: 864619 - DNA, 100 bp, Homo sapiens
ccgggcgccaccgctgccacctccgcgagctgtcaataccagcaaatatgcagaaagctatcggatccaaacctatgctgaatatatggggagaaaacag

SEQ ID NO: 864620 - DNA, 98 bp, Homo sapiens
ctgaatgaagtgctcgctggactggaactgaatgagtccctggaacgccagatgcgtgaaatggaagagaactttgccgttgaagctgctaactacca

SEQ ID NO: 864621 - DNA, 98 bp, Homo sapiens
cagggctggtgtcctacccctttgacactgttcgtcgtagaatgatgatgcagtccggccggaaaggggaacaagcggaccaacttgaagaagcccaa

SEQ ID NO: 864622 - DNA, 100 bp, Homo sapiens
gcttccactccctcctgcccagatccggccaaggacctcagcagcggtctctctgtgctgatccgcgtgcgcctggagctgcggcggcaccagcgtgccg

SEQ ID NO: 864623 - DNA, 100 bp, Homo sapiens
cactcggcctgagaaactcggcaagcgcgcagtgtcgactccccggtctatgccaggcgcatctcaggataagttctgaacgtcgaaaagaaaagtctcg

SEQ ID NO: 864624 - DNA, 99 bp, Homo sapiens
ggttctggaccttgagaaagaggctgtggaactagagatagcgatgctttttaggggctgctggtcaacctctccctcatcccagtcatgggcgggctg

SEQ ID NO: 864625 - DNA, 100 bp, Homo sapiens
cgcagctggctggcttcagtggaccagatcagttcttaagagcagccccggtaactggaggaatgggagccgttttgatgagaaaaatgggctggagaga

SEQ ID NO: 864626 - DNA, 116 bp, Homo sapiens
tctcctgcatccttatggcgtgcctatgattgtaccggcagctccttaccttcctggactgattcaggctttgaacttggcctactccagcatttacggcagctaccggaacttcg

SEQ ID NO: 864627 - DNA, 98 bp, Homo sapiens
aatagatgtctgacaaactaaagaaagacttgtgttacgttccagttacagccatcccttgtcataacttttgaactgtatttggaaaaatactggcc

SEQ ID NO: 864628 - DNA, 100 bp, Homo sapiens
tttcccaagatgccactggtgaagaagatgcagccgctctctgctccctgccccaatgaacatctgcactaggcccaagccttggagtaatttacctgaa

SEQ ID NO: 864629 - DNA, 100 bp, Homo sapiens
ccaagatacaccccttagaaaatggagagatatttgatcctgatgacctttattcaggggtcaatttctccaaggtactgagtactcttttagctgtcaa

SEQ ID NO: 864630 - DNA, 99 bp, Homo sapiens
gatggcgcttgacggaccagagcagcacctgaactcctggggggaccgtcagtcttcctcttccccccaaaacccaaggacaccctcatgatctcccgg

SEQ ID NO: 864631 - DNA, 98 bp, Homo sapiens
gacccgcatcaagaaaatctccatcgaagggaacatcggggacactacacagaaaatgagaactgctcactatcctaccccagccgaattggatgcgt

SEQ ID NO: 864632 - DNA, 98 bp, Homo sapiens
ttttgaggatcctgctccacagagaatgctctgcacccgttgatgaaatggagttgttttttccttcaagtggaggttgtgggccggcaaacactgct

SEQ ID NO: 864633 - DNA, 98 bp, Homo sapiens
tgaagatgtttacagtgcagtcttatcgaaggatgtgcatgaaggacagcctcttctcaatggtatgaacgctgccgtccgtgccgtggtgcgcatgg

SEQ ID NO: 864634 - DNA, 98 bp, Homo sapiens
gtccttggtcaaatgatgcaaccctgcagcatgttttaatgagtgactgttccaagatgagatgggattctccaacatggaagatgatggcccagaag

SEQ ID NO: 864635 - DNA, 98 bp, Homo sapiens
tcgtggctccacgacttactctctacccttggcaggaggataagatcaatgccctcattaaagcagccggtgtaaatgttgagcctttttggcctggc

SEQ ID NO: 864636 - DNA, 99 bp, Homo sapiens
cagactttattaaaagtgaatgtttaaataatattggtgactcctctcctctgattagagccactgttgatgatgttgaatttgaagtatcatcggacc

SEQ ID NO: 864637 - DNA, 100 bp, Homo sapiens
aaaacttgcaaggaaaggaacatgtttgaatttcagatgtgttcctcaatgaatcacttttcggctttgtgagaaaccttaccatcaaacacgatggcca

SEQ ID NO: 864638 - DNA, 100 bp, Homo sapiens
gccgccaagagtgagcgagcggacccgcgatgggctgacttcaaaatttctgaggagtgcatcgcacagtggaagcaaaccaacttcatgaccaagctgg

SEQ ID NO: 864639 - DNA, 101 bp, Homo sapiens
gagtacgaagcgggcgtttgcgaagagagcaagcgagacattctgttcctctttgacggctcagccaatcttgtgggccagttccctgttgtccgtgactt

SEQ ID NO: 864640 - DNA, 99 bp, Homo sapiens
gagaagtccagcgggagtacaacctgaacttctcaggaagcagtactattcaagagggacagcaatcagacctattgctttgagagctgtgacctccat

SEQ ID NO: 864641 - DNA, 100 bp, Homo sapiens
ccctggctggggaaaagggaagtgaaaagagatctgttttcagacataagggtcttgctatttgcccaagctggtcttcaactcctgatctcaagtgatc

SEQ ID NO: 864642 - DNA, 99 bp, Homo sapiens
gatattttgctaatgaatgattttaaacttgtcattaataaaatagcatatgatgtgcagtgtccaaagagagtatctagtcctcagactattgtggag

SEQ ID NO: 864643 - DNA, 100 bp, Homo sapiens
ccaggagagaatgctgacagtcctgcagcttttggaaagaacaaacagtggatttgaagaatcagattctggtgctactaagagtccactccacttagct

SEQ ID NO: 864644 - DNA, 100 bp, Homo sapiens
agtggtgaaacagttggatctggagccacgaaggaagacaggaggtccgaggagaaagcggcagccatggcagcctcaaagaaaacagcccctccaggct

SEQ ID NO: 864645 - DNA, 100 bp, Homo sapiens
atagaaactttggaatctgtacccattattggtggtttttgggagactatctttggcaacaggttttatggcaattggatatattccgacgaagcttgcg

SEQ ID NO: 864646 - DNA, 98 bp, Homo sapiens
accatgcccttgcccctgccgctagctatggagttggcgctgtgctgaactcgtttgagcagctgtgcatcaattacaccaatgagaagctgcagcag

SEQ ID NO: 864647 - DNA, 98 bp, Homo sapiens
ttcctgccaaggcatctccagtagcagaaagcccaaaagtcatggacgagaagagcagtcttggagtcctccagcggttgtggggcacccaggatgta

SEQ ID NO: 864648 - DNA, 100 bp, Homo sapiens
atagaggataccccattggttccaaaacgaaatcctgaagttcgacatgtagatttggagatactgtgagtttgatggaatgaatcacctgggtggggac

SEQ ID NO: 864649 - DNA, 112 bp, Homo sapiens
gaatatgccaaggaaaaactggagagcttcatcaaaaatagtgatagctttgataagtcatctctgaatttgagcaatggtgaaacggaatctgtgaaaaccatgattgtcc

SEQ ID NO: 864650 - DNA, 100 bp, Homo sapiens
agaagaatttcgatctccgccctggggtcattgtcaggtggatgccctaaacccacccaaattattgctggtgataggcctgataatcattggttgcatt

SEQ ID NO: 864651 - DNA, 100 bp, Homo sapiens
aagaacagtacagtattaccttgtcggatggcagttcctgatctatgtgaacaaaatccagtctcatagcagaggagaatataatgtttacagcaccttc

SEQ ID NO: 864652 - DNA, 100 bp, Homo sapiens
ccggaagagtttgaccccatgactggacgctgtgttcccccacgaacttctgctgggactgctgagatgtcctctattcttgaagagcgtattcttggag

SEQ ID NO: 864653 - DNA, 100 bp, Homo sapiens
gagtgcagcggcctctcctacagtatgcaaccgaggatggacttatacacacaaatgaccaggccaggactctacccaaagaatgggtttgtatttaagg

SEQ ID NO: 864654 - DNA, 98 bp, Homo sapiens
accaatagccatgatggactggatggttttttcagttatgggacaaaaatattatatcaaaacactgaagctttgcaatctaaattcttttcacctct

SEQ ID NO: 864655 - DNA, 143 bp, Homo sapiens
gctatgcagcagcagctcctgcctattctcctaacatgtatcctggagcgaatcctaccttccaaacaggatgtaacagtccctcccaagcctgtctcgctccatcctttatatcagactaaactctatcctcctgctaagtc

SEQ ID NO: 864656 - DNA, 100 bp, Homo sapiens
aacgcttcgctggccatttaggagctctgctcaaagccagacggagcatctttccttgaagaagtacattattgacattgtggttgaaagtacagctcca

SEQ ID NO: 864657 - DNA, 100 bp, Homo sapiens
gggagcggcgttggaggccaccgtttccagatgccctgtacagacttttggggaactgggtactgatgaacccgaacaggagttgcttctggttttaatt

SEQ ID NO: 864658 - DNA, 98 bp, Homo sapiens
agggttttctttactctggggtcccggctgccctgtggcctcgctcctcggaggggccacccgttcatcgtgcagttcaatgatggaaatgccgccgt

SEQ ID NO: 864659 - DNA, 98 bp, Homo sapiens
agtactcgcagaaggaagacagatatgaggaagagatcaaggtcctttccgacaagctgaaggaggccgagcagaagcgcaacgcagagtcggtgaag

SEQ ID NO: 864660 - DNA, 98 bp, Homo sapiens
gtggtgcggcctcaccatacaggaacagggcagacgttagcgtgagtgatcactctcaatcccgggcaaccactgagaaaacggaaccgaatagtcaa

SEQ ID NO: 864661 - DNA, 100 bp, Homo sapiens
ctgccagttaagattattcttaaaactctgcttaacagagcgttccaaaaagaggactctccagctactttttattgcatcagtatgcagtggtttagag

SEQ ID NO: 864662 - DNA, 100 bp, Homo sapiens
agcacgctcctgtcttctgtttgcagcggtctgtggagtcagcctcttcctcttccgtgagaaacgcttcgttaagggactcaggcagtacgggaagaac

SEQ ID NO: 864663 - DNA, 100 bp, Homo sapiens
gaacaacctgaacgtcaccgaggagaagtaccaggaggcgttggccaagggttctgggaacactttttatttatgtcttatttatggttgaggaattcag

SEQ ID NO: 864664 - DNA, 100 bp, Homo sapiens
cgcgactcggcgcccgcccgcggtcagttgaacataccgatggtcagagtgtcctaacagactcactatggcggcgatatagtgaatttgagttgttgag

SEQ ID NO: 864665 - DNA, 100 bp, Homo sapiens
catcatttggaaatggtaatccagctcctggcgataatgtgtgtctcctgtatttgttggagcccatttctggttcattttccagacactgaaagagcag

SEQ ID NO: 864666 - DNA, 98 bp, Homo sapiens
tgcagacagggcaaagaaaatgggactggttgaccaactggtggaacccctggaccactttacctgcattgtgaaggtactttttaccctactgtaca

SEQ ID NO: 864667 - DNA, 100 bp, Homo sapiens
cagcgctgtatcgtgtcgccggcagggaggcatagcgcctctctgatcttcctgcatggctcaggaatataaatagtttctggaaaggacactgacaact

SEQ ID NO: 864668 - DNA, 98 bp, Homo sapiens
gatcaaagccatcaaccagggcaactatggcccgtgggtgctggctgccaagtcttcgaaggccgacccaagctggccacatggcggcagcgcgtgga

SEQ ID NO: 864669 - DNA, 98 bp, Homo sapiens
ttagctgtgctcgcgctactctctctttctggcctggaggctatccagcgaagagagagaaaatccttcaaaacggagtagaattgaacgtgatatag

SEQ ID NO: 864670 - DNA, 100 bp, Homo sapiens
agaaatcattcccctcgggaatcaggagtgacctggagcactgtggtactaaggtctacatcgaccccttcacttatgaagaccctaatgaggctgtgag

SEQ ID NO: 864671 - DNA, 98 bp, Homo sapiens
gctgaatggaaagccagtaggacacgaaggtggagccaccttcctcgtcacgtttggaaactcagagaaacctgaaactatgacttgtcgtctttcca

SEQ ID NO: 864672 - DNA, 100 bp, Homo sapiens
aggaaaaacagaacgttgcaaactctggaaaaaaacttggtcccagttgatccaagcctcattatagtggttcaagccaaagaagatgcctatattccac

SEQ ID NO: 864673 - DNA, 98 bp, Homo sapiens
aggcggtgacagagtggagccatggctagagataaactcatcctgaaagtcgctgttgttctcctgctgagcaagaatggaggccccactggtgagtc

SEQ ID NO: 864674 - DNA, 99 bp, Homo sapiens
aatggcagacgatattgatattgaagcaatgcttgaggctccttacaagaaggaagaagaaatctcaatgctaggggaaataacccaccttcagaccat

SEQ ID NO: 864675 - DNA, 99 bp, Homo sapiens
acatttgaagatgataactgtttcagctctggaaaggatgatatggattttgctggcctgagacagctgcctgtgtgggactgagatgcaggatttctt

SEQ ID NO: 864676 - DNA, 100 bp, Homo sapiens
agtttcctggcagtgtgtgatactgaggagggaacgctgtgaggagctccgtgttgaattgttatctatccatcagaagaaggtgtgtgaggagcggaaa

SEQ ID NO: 864677 - DNA, 98 bp, Homo sapiens
cctaccggcctctcaccgtcctgactttcaggtagaacacctgaaggagaagctcattagccaggcccaggaagtgagccgactgcgatctgagctgg

SEQ ID NO: 864678 - DNA, 100 bp, Homo sapiens
aggttgcaacaaggacagtgtcagagcaggctgtaaaaaatgtggctaccttgccgaacaagcaaccggaaaagcttaataggcaatgggcagtcaccag

SEQ ID NO: 864679 - DNA, 98 bp, Homo sapiens
gtctgtttgatatcaccaaactggaggatgcctatgtattccctggggatggcgcatcacacaccaaaggtcagctggttaagatgctgctttataca

SEQ ID NO: 864680 - DNA, 100 bp, Homo sapiens
atttcaacatgcctctgacaatctctagtatggccctgctgtggcaccagtgaccaacgggaacacaacggtgccacccctgaacgatgatctggacatc

SEQ ID NO: 864681 - DNA, 100 bp, Homo sapiens
caaacattcagacaaaattggagagactgccatgaagcaaaatcttgcctcctggaatccttcaaatcctgaatgtctcttacttgtggtgaaggaactt

SEQ ID NO: 864682 - DNA, 100 bp, Homo sapiens
caagatggagccaggaggagagcccacaggtgctaaagagagcagtaccctgatggagtcccttgcagcatgaatgtcagcatcatcattcaaagaacaa

SEQ ID NO: 864683 - DNA, 100 bp, Homo sapiens
acacgaaaaaacttccagaacatctgggagaatatttaatggaaaatcgcttggttaaaacctgacacttttaacagatggtcagtaggacagaaggtaa

SEQ ID NO: 864684 - DNA, 100 bp, Homo sapiens
aggggcagatggcaagtggagacagcaatctcaacttcagatgtccagaaggcttcttgggggaatattgtcaacatcgagacccctgtgagaagaaccg

SEQ ID NO: 864685 - DNA, 98 bp, Homo sapiens
tgaagtcaacaagaataattccttccatatcaacatgaggggacctgtgcttcagtaaaagtttacaaattgggtatcttttctgttgtgtcttgttt

SEQ ID NO: 864686 - DNA, 100 bp, Homo sapiens
agcatttgagaaaccccctcaggtacagacccaggctcttcgagactttgagaaggagcagattctggccagatttctgaagaaacatggaattttctgc

SEQ ID NO: 864687 - DNA, 100 bp, Homo sapiens
ggagctggtggagccaaggaaacaggatgctgatagtctccagcgggcctggactgtgggctggtgtgtggaactggatgggcaacactccagattcagc

SEQ ID NO: 864688 - DNA, 51 bp, Homo sapiens
tgactatgtacttgcagaaaaacaggttgaagatgacagcgatgcagagac

SEQ ID NO: 864689 - DNA, 99 bp, Homo sapiens
tgaaactggatgtgaaaacaaagtcttgcagtggcgtggacctctttgtttttagacatgaattggccataatgagactagcagcctttatgggcatta

SEQ ID NO: 864690 - DNA, 100 bp, Homo sapiens
caagatgattttgttgtccaagaaatgagtcagaaataccatcagaggaggggtactgtgactttaatagtaggccaaatgagaactcttattgctatca

SEQ ID NO: 864691 - DNA, 98 bp, Homo sapiens
tggtccatgtggggttaccttgaagtccttggcttggcacaccgcactaaacaggtgttgtctacatctactggcctaacaaaaacagtgtataatcc

SEQ ID NO: 864692 - DNA, 99 bp, Homo sapiens
gcccagaaccacctcctttgcggagagctgcaagccggtgcagcagccttcagcttttggcagcatgaaagttagcaatattgatgagtgtgggaccgg

SEQ ID NO: 864693 - DNA, 98 bp, Homo sapiens
gcagcccccaccacggccggaccgaaggtgcggcggcggaggggagccagggcgccccagcagcttcttccagaccagctggtcttgcttctggagca

SEQ ID NO: 864694 - DNA, 100 bp, Homo sapiens
ctccaattcaaaattgttttcagctaatctttctaaaaccaatttttccaacaacaacgatttccgtgctcttctgcagtctttgtatgctactttcaag

SEQ ID NO: 864695 - DNA, 100 bp, Homo sapiens
tttgcagccctagtgtttgccggagccatggaatttgctgaagttgaacaagagatttttcaatcaagactttggaactacgaagatggaagagatttga

SEQ ID NO: 864696 - DNA, 100 bp, Homo sapiens
gccaggcagctctcttgggagtcctcctaccatccccgccttatgtttgatcatcggccaaggtcctggcgagaactgcctctgcggctagctgattttg

SEQ ID NO: 864697 - DNA, 99 bp, Homo sapiens
gagcagccctggtgtcacctatcagtaaaagtatgagcccagaggacctggtcggcccttgtaccaaagaagaatctcatctagctcagttcaaccttg

SEQ ID NO: 864698 - DNA, 100 bp, Homo sapiens
cgggacactgttctcaagctgctactgaatggagcccgccatctgggttataccctttgtaaacaaatagactacagtggtagtggaggccgaagcggcg

SEQ ID NO: 864699 - DNA, 100 bp, Homo sapiens
gtcgtcgtctgccttcgcttcacggcgccgagccgcggtccgagtattcgatggtctcagatgcagaaacagaaagcattttcatggaacccattcacct

SEQ ID NO: 864700 - DNA, 98 bp, Homo sapiens
gcaagggccacctgttcctcagttccaaccacaggctaacctggagaagatgtgccggaccttggaagaccagatgaatgagcaccggagcaaggcgg

SEQ ID NO: 864701 - DNA, 102 bp, Homo sapiens
acagtgtcagaattacaaggtgagatcagccgcccggccaagctatcttctcgctagcagaaatgctccacctgtaagaacagaaaatcgtcttatagttga

SEQ ID NO: 864702 - DNA, 50 bp, Homo sapiens
ggaaaatgagccatgaaccaaccaatatgatttgtcattaattcggaaga

SEQ ID NO: 864703 - DNA, 100 bp, Homo sapiens
cttccctgcccccttcccccacccccgactcgggcttggcgcggcggccagaggaaccccgaggcagttgtgaaaaacttcaggacaaaaatgtttcatt

SEQ ID NO: 864704 - DNA, 100 bp, Homo sapiens
ttcccagaagatgctaagaaacgtgcccggcggatcctgcaggcttgtggcgggaacagcctggggtctaccaggagagcgtggtatggctgggcctgaa

SEQ ID NO: 864705 - DNA, 98 bp, Homo sapiens
agcctgggctatacatggcgcagacagggggccttgtgtgccgggctctgctttctgtcatggatgatcacaacgtggattctttcatctccctctcc

SEQ ID NO: 864706 - DNA, 98 bp, Homo sapiens
tgaagcatactgccggggaagtgtggggcacatgaaagtgctttctaagcagtcgtggaagtatgggcagggagaagaatgacaagccccttccatct

SEQ ID NO: 864707 - DNA, 100 bp, Homo sapiens
gcattgcccgactccgtaggagcgcgggggcggctcctgctcttcctggactcctgagcagaggaccagctctcagctgatatgtacagttttgtggcca

SEQ ID NO: 864708 - DNA, 100 bp, Homo sapiens
ctcgtggggttggccaagctctcggaggagatctcggctccagtttcggagcggatgggaaatcctcattgacgattcaatttgttgaaggccaatttgt

SEQ ID NO: 864709 - DNA, 100 bp, Homo sapiens
atggccaagtatggagaacatgaagccagtcctgacaatgggcagaacgaattcagtgatatcattaagtccagatctgagcaacttttagtgaatttgc

SEQ ID NO: 864710 - DNA, 100 bp, Homo sapiens
ggcgaacccgcggcgcaataacgtgggaatgtaagacggacttagatattgcatacaaatttggaaaaactgtggtgagctgtgaaggctatgagtcctc

SEQ ID NO: 864711 - DNA, 100 bp, Homo sapiens
ctttgcccccctcgataccaacggcaaaaatctcaagaaagaggtgggcaagatcctgtgcactgactgcgtgggtcggaagcagttcatgaggtttgag

SEQ ID NO: 864712 - DNA, 100 bp, Homo sapiens
agccatggtggcctggcgctcggcgttccttgtctgcctcgctttctccttggccaccctggtccagcgaggtgctggagaatctggtaaaagcaccatt

SEQ ID NO: 864713 - DNA, 98 bp, Homo sapiens
agcctgggaggccggccggtgccagcacctttcggcttctgagacggcggcagcagcggcattcagctttgtgacaacaaactgtgctctgcagtttt

SEQ ID NO: 864714 - DNA, 98 bp, Homo sapiens
aagtaaccagttctgtttgcctgttttggatagcaatgatcccaatttccagatgccttgttcaacaggaattacatgaacgacagccttcgcaccga

SEQ ID NO: 864715 - DNA, 100 bp, Homo sapiens
attcgctccaactccctcctgaattgcatccgcgcctgtgggcccagagccctagtggtgggcgcagatttgcatctgctggtgatgatggaattgtagt

SEQ ID NO: 864716 - DNA, 98 bp, Homo sapiens
acagctgatcagactcctggtgccactcccaaaaaactatcaagttgggatcaggcagaggtggaataacactcccatggatgaagcactgcactttg

SEQ ID NO: 864717 - DNA, 100 bp, Homo sapiens
ttaccccagaacctcctttacacagtatcagaacatttaacagaggctttggatgaagatgcagaccccacaaaatctgcactgtctgcagttgcatctt

SEQ ID NO: 864718 - DNA, 100 bp, Homo sapiens
aaagcttccaatgagtatggcagtgtcagctgtacagccacactaactgtgacaggtagtgttggtgtaaaaggcaaacccgtgtcatgagggatggtca

SEQ ID NO: 864719 - DNA, 100 bp, Homo sapiens
atcaggctgtatggaatgtggactactgccagatcctcaaggacattacagttgaggacataaagcgtggatacccatcaacgaagttttgatattggaa

SEQ ID NO: 864720 - DNA, 98 bp, Homo sapiens
ttggctgatggcaaccctccaccacacttcagcatcagcaagcagaaccccagaatatcgaagatgaagcaaaagaacaaattcagtcccttctccat

SEQ ID NO: 864721 - DNA, 100 bp, Homo sapiens
cggcgagctgggtggtctggagaccatggagaccctcacggagctgggcgacgagctgaccctgggagacatcgacggcagttgcagtggtgcagaatgg

SEQ ID NO: 864722 - DNA, 122 bp, Homo sapiens
atgcctgtcactgggggcaccattaacatgatggagtacctgttgcaggccctagggtggtcccaaccatgtgatgtctggagcataggatgcattcttattgaatactatcttgggtttac

SEQ ID NO: 864723 - DNA, 106 bp, Homo sapiens
gcggcctccaggcctcaggccccctcaccatcctagaggtcaagatcagctctggctaggagatgaagaaggcacagagatagatactctacagtttcgtctccag

SEQ ID NO: 864724 - DNA, 100 bp, Homo sapiens
cagagcttttggagtccctgttcgtacttacacccatgaggtgttcgaaatccgcaccactgatgacctcactgaggcctggctccaagaaaagttgtct

SEQ ID NO: 864725 - DNA, 100 bp, Homo sapiens
cccggccacctctgagaagggagacgacgctgctgggtccgctgagcggggcgacccgaggatagtgacaacctctggtgggacgcctttgccactgaat

SEQ ID NO: 864726 - DNA, 100 bp, Homo sapiens
tctaatggattggggtccatagatgacatcgaaacaggtcggattgtttgtgctgaacgaactgtcctcttgcttcagaagccccttttgagtgtggtct

SEQ ID NO: 864727 - DNA, 99 bp, Homo sapiens
tcagttgccaatttgcaaattaccattgaaattgccaaagtgatatcagtatcaagataaaagtttggaatgggagaaaaattctcaaagcctgaaaga

SEQ ID NO: 864728 - DNA, 100 bp, Homo sapiens
agaacgtggtcctgtatattattgaggacccagatgatgtggtaccagttggccaaagaagagcctggtgttggtgcatgtgctttggactagcatttat

SEQ ID NO: 864729 - DNA, 100 bp, Homo sapiens
ccccttctttcgatcagagatcggcggagaccctcgaagtgcgcaaacttgacactcaccctgaccgctacaaagagccatccaggagcatcctgttgtt

SEQ ID NO: 864730 - DNA, 100 bp, Homo sapiens
ggctttatatcctaaacttttcaagcctgaaggaaaggcagaactgcctgattacaggagctttaacaggcgatttgacagatctgttgagaaatggcgg

SEQ ID NO: 864731 - DNA, 100 bp, Homo sapiens
gttttcatcccccactgcagcaggcacaccaaataagatatctaacagtgatacgccttcaccaccacctggtttgtcaaaatccaatccagtcatcccc

SEQ ID NO: 864732 - DNA, 100 bp, Homo sapiens
gcgctcaggagggatcccaaccttcccgtgcacatccgaggctggcttcataagcagatatttggcatgatcttcagtatgatcttgtgctgtgctatcc

SEQ ID NO: 864733 - DNA, 98 bp, Homo sapiens
caaagatgatgaatctgaaaggaaatccggaattatcacagactccgacagttagttaatatgtgcatcaacccagatccagagaagcgaccagacgt

SEQ ID NO: 864734 - DNA, 100 bp, Homo sapiens
cctgagcctgttaaagaagaaaaactttcgcctgagcctattttgggaagaacagtgattattgagcagagttggggaagtcccaaagtaacaaaagatg

SEQ ID NO: 864735 - DNA, 100 bp, Homo sapiens
ctgatattaacattgctccacgttcaaacagcagtgttagcaagacctgggggagaggtgagaattatgaagatgatgacctagtaaattctgatgaggt

SEQ ID NO: 864736 - DNA, 100 bp, Homo sapiens
cagggcaagccccgctccggccaacaacttcttccagaccagctggtcttgcttctggagcatctcttggagcagaagactctgagcccccgaactctgc

SEQ ID NO: 864737 - DNA, 98 bp, Homo sapiens
cgatatgttggaaaagagccgagtggactaagattcaacaaactatttttgaatgaagatgatccagaatgaagagagtgtggtgctttttctggtcg

SEQ ID NO: 864738 - DNA, 98 bp, Homo sapiens
gcgaagacgagatccagttcctgcgaactgcgggtgccccggtgatgactggtgcgggagagagcaccaatcccgagaacagcgagctcaagtattcg

SEQ ID NO: 864739 - DNA, 98 bp, Homo sapiens
gactagcggcggcgggagcggcgccgagaggccgtgcgggacgcgggcgccaggaccggccgaacgcagaggagttatggtacagcacctgtaaatct

SEQ ID NO: 864740 - DNA, 100 bp, Homo sapiens
cttattccgacattcagagttgtttcctccatttgctaaaggaatagtgtttggaatagccaggccagaagaaggaaggcctgtggtgagtgggacagga

SEQ ID NO: 864741 - DNA, 100 bp, Homo sapiens
agggaccccagaaactgatccgcaaagtgtctacctcggggcagatccggaccaaggtgttccagatcgcgtatgtgattgtgaaggcagctaactcccc

SEQ ID NO: 864742 - DNA, 98 bp, Homo sapiens
gagactttcacaataagagcagaggatggaacacttcagtgcattcaaggggttgtagaaggtgatttagctgccatagaagcatacaagtcatcagg

SEQ ID NO: 864743 - DNA, 98 bp, Homo sapiens
ctttcgaagagccgccctatgctatcaaggtatgactggtatcaaacagaatctcaagtagtcattacacttatgatcaagaatgttcagaagaatga

SEQ ID NO: 864744 - DNA, 99 bp, Homo sapiens
gacaagaacagtgggccacaggggccccgaagaactcccacaatgccacaggaggaggcagcaggatctgccagagcatcttttggagatcgaaaggta

SEQ ID NO: 864745 - DNA, 100 bp, Homo sapiens
cacgggcatccttgactccatcgggcgcttctttggcggtgacaggggtgcgcccaagcggggctctggcaagggagactgccagactcgggaggaggca

SEQ ID NO: 864746 - DNA, 50 bp, Homo sapiens
cttgagttggtcgggggcagcggcaggacttagagattcgcaacaacgcg

SEQ ID NO: 864747 - DNA, 98 bp, Homo sapiens
agaggcctactgtacatggcacatgcttcctgtgcttcccagaattccatcatctgactgccatcctagaaggcattctcatgaggaccaagaatttc

SEQ ID NO: 864748 - DNA, 99 bp, Homo sapiens
atctcgccaaaaaggacatctttggagccagggattttatattggaagacatggatcttgctgccaacgagatcagcatttatgacaaactttcagaga

SEQ ID NO: 864749 - DNA, 98 bp, Homo sapiens
gatgattcaggctcagaactggctttcaaggactttgatgttggcgatgtgcaccaattccagctggacatcactgtgaaaatgggacgggataaagt

SEQ ID NO: 864750 - DNA, 100 bp, Homo sapiens
catttttgcttatctgccttatgggcttgcagaaggaatctcactctcaggtgatgcttttccttggacgatcagcttgcataatttcagcatatatacc

SEQ ID NO: 864751 - DNA, 100 bp, Homo sapiens
ctttaggcagcttacaactcacaagtgcatgggagattcctgcatcttttgcgctctcaagctgttgttggcctactgtacccctgtatcgacagtcacc

SEQ ID NO: 864752 - DNA, 100 bp, Homo sapiens
acagactcggcgacagctaacggggacgacagggaccccgagatcgagctctttgtgaagaccttcactgcctggtgtaactcccacctaaggaaagccg

SEQ ID NO: 864753 - DNA, 100 bp, Homo sapiens
agggagagaagtctacactgagatctaaagatttaatccagagactgacttcactatagaacccacagttgtatcaatggttggggaaagatagtggcaa

SEQ ID NO: 864754 - DNA, 98 bp, Homo sapiens
ttccccagcctgcaggccctggctggctccctgactggcagtcctcacctttccgagctgtctgtgaactcgcaggggggagtggcccctgccaacgt

SEQ ID NO: 864755 - DNA, 98 bp, Homo sapiens
ggactgcatcaggccgcgtctcctcagggctggcgcccatgcggctctacacgctctccaagcgccactttgtcctcgtgtttgtcgtcttcttcatc

SEQ ID NO: 864756 - DNA, 100 bp, Homo sapiens
gtcaactattacaatcgcttgtacaaaggagagtttaaacagccaaaacagttcattcatattcagcggcaaagtatgtttagtccagcaagtatcggtc

SEQ ID NO: 864757 - DNA, 100 bp, Homo sapiens
aatatccagtttgagccatcggatctaagatccaaaaggtacatggactatatcgcacaacaggtgctagttttgagaaggcccaacaggagtttgcaac

SEQ ID NO: 864758 - DNA, 98 bp, Homo sapiens
tggagcgcagagcgggcgagcgcggctggaatcgatggagaaagcatcggcaactgtcctttctctcagcgcctcttcatgatcctctggctgaaagg

SEQ ID NO: 864759 - DNA, 100 bp, Homo sapiens
ggcactgaagggggactacaggttcgagagccaagaagcttgagagaagaaaaatttcagaaaaattgtctcaatttgactagaatatcaatgaaccagg

SEQ ID NO: 864760 - DNA, 100 bp, Homo sapiens
attgcctacagcattttatgggacttgaagtttttgatgagtttggaagagacttttggatgtgggtacctgaatgacttcaacactgcttgtttacaag

SEQ ID NO: 864761 - DNA, 100 bp, Homo sapiens
ctgaaatcattcacaatccaaatttcacagtcagagacaaccgagatttggtgcttccagatgtgagttatcaggtggaatccagtgaggaggatcagtc

SEQ ID NO: 864762 - DNA, 132 bp, Homo sapiens
cagaagtcgcgtgtctaggtgagtcgcggtgggtcctcgcttgcagttcagcgaccacggtttggaagaggacagttgccctttattctggcggcagatagcagcaggtgaaaaagtgctacacaagtttga

SEQ ID NO: 864763 - DNA, 98 bp, Homo sapiens
ttagacagtcgtggttcctgtgatctgtgtcctctttgcagaaggcctatggcatgtctgcgttacctttaaatctgataaaaggcactagaagcgct

SEQ ID NO: 864764 - DNA, 98 bp, Homo sapiens
ctgaagacatcaagaagatcttcgagttcaaagagaccctcggaacatgaagttggagcccttgtttttgacattggatcctatactgtgagagctgg

SEQ ID NO: 864765 - DNA, 100 bp, Homo sapiens
aggaggtcatacagctgatactacccacccccggttacgcctgtcacataaagactatgtcttcagcagtggtgcagttatatgcagcagatcggaactg

SEQ ID NO: 864766 - DNA, 98 bp, Homo sapiens
ggaagtgaagaaggcgcatcactcccagctgcgcaaagcttgcgaggtggcgttaggcccacagcagcagaacttttaaaatgcaaattcttccagaa

SEQ ID NO: 864767 - DNA, 100 bp, Homo sapiens
gtttcctccaggacagcacctagtcgtggccggaggagtctcagagctgtcagaaaggccatggtaggggaggagtgtgtaggtgccatcgtttgcaagt

SEQ ID NO: 864768 - DNA, 100 bp, Homo sapiens
agcgctgcccaccaggcatctggccatcccacaaaaggaaaagacatcgctcccgggaaaggtcacctagccggtcccgggagagcagcaggaggcaccg

SEQ ID NO: 864769 - DNA, 100 bp, Homo sapiens
ggcgttccaccagcaaccatgagtggttccatgatgggaagtgacatggctttcaaggatatgctgtattcagctcaggaccaggcaccttctgtggaag

SEQ ID NO: 864770 - DNA, 100 bp, Homo sapiens
ccatgacaccaagttggatgccatgctggaggagttcaagaagggcaaagagcagatcttgctgcagaaggattacgagtcggcgtcgctgacagaggtg

SEQ ID NO: 864771 - DNA, 98 bp, Homo sapiens
tctgccttattacgccgtctccaagatgtagctaatgaccgtggttcccactgagtttgaaattggcacaatggaagaagctggaatttgtgggctag

SEQ ID NO: 864772 - DNA, 99 bp, Homo sapiens
gcggctcccagtccctgaaagcattaccgggttcgctaggctcacagcttaacattggtatcccttccctgacaaagtgttgcaaccaacacgacaggt

SEQ ID NO: 864773 - DNA, 99 bp, Homo sapiens
tttggaagagggagtcaccactggacctccaaggaagccacgtgcagacatctacaaccttcgatctcctgacgaatgaggagctctatgctggtgtgt

SEQ ID NO: 864774 - DNA, 100 bp, Homo sapiens
ccaggatggtgatccgtgtatatattgcatcttcctctggctctacagcgatataaggtctcactatgttgcccatgctggtttcaaactcctgggctca

SEQ ID NO: 864775 - DNA, 100 bp, Homo sapiens
gaaaagaacatggaactgctttatatcaagtagatttgctagtgaagatctcttctgaaaagggccaagaccagcttcaagtctccatggtaccagaaaa

SEQ ID NO: 864776 - DNA, 100 bp, Homo sapiens
gagaacactggatagacttcgaacatttaaacaggtatgcactccagaaagctaataatagacttttgaagatcctcttagaagttgtaaagacaacagc

SEQ ID NO: 864777 - DNA, 100 bp, Homo sapiens
cgtggctattgtgaaggagggttggctgcacaaacgaggccgagaggtgagcccagcgcatcagtatgctctggctggaggcatctccttccccttcttc

SEQ ID NO: 864778 - DNA, 100 bp, Homo sapiens
gtgattgcgttacaagctttgtctccttcgacttggagtctttgtccaggacggtctcctctgagcctccggcctccataagacccaaaacagatgacac

SEQ ID NO: 864779 - DNA, 100 bp, Homo sapiens
aatgccaaaggatattttgaagatgtggcaaatgcaatggaagaggcaaatgaagagatttttatcacagactggtggtctttagtggccttgtcattaa

SEQ ID NO: 864780 - DNA, 98 bp, Homo sapiens
gagctggggcacggagctgtggatctacacagactgggccaatcattacctagccaaatccggccacaagcgtctcatcagggatctccagcaagatg

SEQ ID NO: 864781 - DNA, 100 bp, Homo sapiens
agcaatgcaagagtcgctttgttacacctttcaagtgtctcggtgctggagaatctggtaaaagcaccattgtgaagcagatgaggatcctgcatgttaa

SEQ ID NO: 864782 - DNA, 100 bp, Homo sapiens
atttcccagctgctaaaggaagaggaaggaccaggactaaaacctccagaggaacggacaatagaatacctagaagaagttgcaattacttttgccaaag

SEQ ID NO: 864783 - DNA, 98 bp, Homo sapiens
cgatcaagaactaggttttttcctagaaacaggacttcagagagcccatgtcctctatttcaaaaatggcttgatcatgatttaaaacatgctcacga

SEQ ID NO: 864784 - DNA, 136 bp, Homo sapiens
cactctctgcaacaagactttcaccgccaaacagaactacgtcaagcacatgttcgtacacacagtcctgacacagctctccctgaggagcagccacattccagctcccagtgcgcccctctccactgtctctcca

SEQ ID NO: 864785 - DNA, 100 bp, Homo sapiens
catcctccgatttcaagaggtacaagagatactggacagtgatcgaggacaggaggtgtagatgcccctgatccaggtgcagacccgctggctagcagtg

SEQ ID NO: 864786 - DNA, 98 bp, Homo sapiens
agcagaccacaatgtagatttatgtgactgtagctaccagagtcactagcaaggaaatactcttcaaatagattcagctactagtgactcaacaaaat

SEQ ID NO: 864787 - DNA, 98 bp, Homo sapiens
ttgaccccttgtccagttactctaacaagtctggagatctaaatgagtgtggcctgaagccccggccctgtaagcacaggtgcatgaacacttacggc

SEQ ID NO: 864788 - DNA, 100 bp, Homo sapiens
actgcgagctctcctacgaagatatcccagtggaatggtatctcaaagggaagaaactagagcccagcgataagataagctgttgccaggtgatgcagga

SEQ ID NO: 864789 - DNA, 100 bp, Homo sapiens
cagatcccaccttcagtcctggctctgacaagccctccagtttataggcaagcaataaacagcaagatgtttgaggtggatatgaaaattgctgcaatgc

SEQ ID NO: 864790 - DNA, 100 bp, Homo sapiens
ctttactgtgcagctcctgaaaggagagacacttgtgaacattcaagtgaagcaaaagcctttcatgattatattgaagatctcaaacagacaaatcatg

SEQ ID NO: 864791 - DNA, 99 bp, Homo sapiens
ctgggcctaggtctgcgccctggtctgaatctgcaagaggagccatcttgtgccacctcagaatcacctccttgttgtgggaaggaagagaagaaggaa

SEQ ID NO: 864792 - DNA, 100 bp, Homo sapiens
cggcagagcagggcggcggcgactcgaaatcatgaccaccccaggaaaagagaactttcgcctgaaaagttacaagaacaaatctctgaatcccgatgag

SEQ ID NO: 864793 - DNA, 100 bp, Homo sapiens
gccaactgtaagtctccaatacagaagaatgaaggctgcaatcacatgcagtgtgctaagtctcttcaagaaaatgaggaggaggagattgggaacctag

SEQ ID NO: 864794 - DNA, 98 bp, Homo sapiens
acaacgtcccgataacttgcagactgtggcgcaactggtcttggtagcggaggcacccgaatgctgcccgggtgagagtggccaaatcaatgaaggtc

SEQ ID NO: 864795 - DNA, 100 bp, Homo sapiens
atggagataaacccccagattttcttggaaaagttgccattcccttgctgtccgacccagatgatgtggtaccagttggccaaagaagagcctggtgttg

SEQ ID NO: 864796 - DNA, 100 bp, Homo sapiens
atctgtcattgaacaaatgtttccttaaagtgcctcgatctaaggatgaccctggaaaggagtctatgggtaaaacatcagggaagctgtttgatagcag

SEQ ID NO: 864797 - DNA, 98 bp, Homo sapiens
ttctttatccttgtggatgaatgtaatgaggccctaaaaagcaccttggggtttcctttgatacggtttgaagacgctgtgattaatctagatccatt

SEQ ID NO: 864798 - DNA, 100 bp, Homo sapiens
ggactgaagattggaatgaagatattttcctggaaacatgaactgccaagagaggaatgggacacaaaaccaaacactgttttatatttatggtttgcaa

SEQ ID NO: 864799 - DNA, 100 bp, Homo sapiens
tttcttggaattggactgtgggcatggaatgaaaaacagataatctcagtgataccttgaagaagctgaagataacagctgttgacaagactgaggatag

SEQ ID NO: 864800 - DNA, 99 bp, Homo sapiens
cgatggggaagggccgaagccccgccagcccagctaaagcagacggctcgcactgcgacccgaagattggtgtgcccgtttaataaaagaatatggaaa

SEQ ID NO: 864801 - DNA, 100 bp, Homo sapiens
gcagcgctgccatggagcccagcagcaaggaaaatcctgccttgcttcgttgggcctatgcaagaacaataaatgtctatcctaatttcagacccactcc

SEQ ID NO: 864802 - DNA, 100 bp, Homo sapiens
ggggagatgaacccaacctagtgggtgtaatacatcatgaactgcaggtggatgaggatcgcagtacggaacctgaccgattgcaggtgtttcacaagag

SEQ ID NO: 864803 - DNA, 98 bp, Homo sapiens
agcgagatcgtgtggtccatcaagtccttcccggatgatcctttcaaaaataaagccttgttatttagcaacaacacgcaagagttgcatccggatcc

SEQ ID NO: 864804 - DNA, 98 bp, Homo sapiens
ggaacgtggcgggcggcgtgcgggaggaccggctgaccctggatggcattgaatgccccagaggagcccgaaacctcccaggcttggtgcaggaagga

SEQ ID NO: 864805 - DNA, 98 bp, Homo sapiens
tacaggagctcatctcagagctagatcgaaggtgccacagctcagcactggaactgctgcagcaagacttcaaggactgcattcgtaggcaaaggttg

SEQ ID NO: 864806 - DNA, 100 bp, Homo sapiens
ttctcatgtagttcgatatttctctgcgtgggcagaagatgatcatatgcttatacagaatgaatattgtaatggagctgttttggcccacaaaggatat

SEQ ID NO: 864807 - DNA, 100 bp, Homo sapiens
gagcagcagccgcccgcttcaaccccaggggaccagaggaactcagccctgattgcgagcatgtttgtcaacagacccgccctcggaatcctgcctccgg

SEQ ID NO: 864808 - DNA, 100 bp, Homo sapiens
aacagaccacagtggaccacttctgggccgctcctctggaagagctaacaatgggaacctcctgcctccctgatacgttcaccaagctgataaaccccca

SEQ ID NO: 864809 - DNA, 100 bp, Homo sapiens
cgggagaaccatagaagaggaagggccgtgtcttccgtggacagctgggcagacgatcacgactcaaaagagctgtttggatagactgtggtattcatgc

SEQ ID NO: 864810 - DNA, 100 bp, Homo sapiens
gactagacctgaagtttcaaagatcttcagtcgtgctggtgaagcctgcaaaaaggtgatacttaatgtaccttctaaactagaggcagacaaaataatt

SEQ ID NO: 864811 - DNA, 100 bp, Homo sapiens
tcatcgcgcttacatttctccacctcatttgaagaacgagcttcgtagcccacggagctgagaaaaagcttgtggtgaaggggggcaaaaaaaagaagca

SEQ ID NO: 864812 - DNA, 100 bp, Homo sapiens
cccggaggaccctccgtgggcacctggcaaagatctatgccatgcactgggggaccgactcaaggctcctggttgtctacccatggacccagaggttctt

SEQ ID NO: 864813 - DNA, 100 bp, Homo sapiens
cagtgctgcctgggccagaagcagctggccatcctcctgagcttggtggggcgacccgcagggctgttcagcctcagtagagacggggtttcgccatgtt

SEQ ID NO: 864814 - DNA, 98 bp, Homo sapiens
gcacccgagcaaaccccagcaagatgcggaggctgcctcggcggagcagaggaaccacacgctgatcatgctctgcctgcagttgaacacaaagacct

SEQ ID NO: 864815 - DNA, 100 bp, Homo sapiens
caaagggtatcatactttttgtcttcaaccagttatgaaatcagtaccaaccaatggctggaaatgcaaatggcagatgcctggagagccctcaagaatc

SEQ ID NO: 864816 - DNA, 100 bp, Homo sapiens
ttgggacttgcctggcgactttggccggacttttgctaactgcggcgggcgagacgttctcaggagcccagtttcctccaattgcagcacaagaccttcc

SEQ ID NO: 864817 - DNA, 100 bp, Homo sapiens
aaccaaaaccagatcctttcaaagcatcttcatgatacagttaagaggaatcttgacagcgccacttcccctcagaatggcgatcaacagaatggctacg

SEQ ID NO: 864818 - DNA, 98 bp, Homo sapiens
actgcctggagaacctcggagaccagcagtaaggcacctatatatctgtgattttcacaaaaatttcatccagagtgtccgaaataaaaggaagagga

SEQ ID NO: 864819 - DNA, 98 bp, Homo sapiens
caatacagtgccactagtggagttactactaatgcttcacaccattcaggaggtctttcaatgcacacttttcacggtaacttctttgtccgttctac

SEQ ID NO: 864820 - DNA, 100 bp, Homo sapiens
ttttgagtgcaactgccttccagaaagcataacccctactgtagaactaaatgcactgtgcatgaaacttggaaaaaaaccaatgtataagcctgttgac

SEQ ID NO: 864821 - DNA, 123 bp, Homo sapiens
cttccggccaacttccattgaacttcccagcactcgaaagggaccgaaatggagagcaaaggttctgccattactgcaatagccacatctgtgtgtcacggcccaccctgtcgccagcttcat

SEQ ID NO: 864822 - DNA, 98 bp, Homo sapiens
gaagaagaggtgaagctcaaggcacaggtggcccgatcccagcaggacattgaaaggtcgttcatgcccaacttggtgcctcccaagatccccgatgg

SEQ ID NO: 864823 - DNA, 101 bp, Homo sapiens
ggaatgcagaaagagttaaggaaggcaggttttacacacgctggaaagattgggaatcatggtattctcagagctttggtttacatttttccttgagagaa

SEQ ID NO: 864824 - DNA, 99 bp, Homo sapiens
atgactccaggtcttcagcacccacccaccgtggtacaggaattgcgaaaagccttgcagcagctacaagaagaattgcagaataagagccaacagctt

SEQ ID NO: 864825 - DNA, 99 bp, Homo sapiens
acaagaattcacaaggtccgacagagatggacagagacgtatgtgcgttggtctcctaagggcacctacctggctacctttcatcaaagaggcattgct

SEQ ID NO: 864826 - DNA, 98 bp, Homo sapiens
taagaatgattcagattttgaagctaaagttaagcaggacgggctctacgagtgcattctctgtgcctgctgtagcaccagctgccccagctactggt

SEQ ID NO: 864827 - DNA, 100 bp, Homo sapiens
aattctgggataagaaagtaacgcatttttgtttttggaaggagaaggatagacttggctttgagaagcaagaaccagttcacagaagtgtgagtttatt

SEQ ID NO: 864828 - DNA, 100 bp, Homo sapiens
gagaagatggacaagagaaagctcgggcgacggccatcttcatccgatgacgtccggttgtttgccttcgtgcgcttcaccaccggggatgccatgagca

SEQ ID NO: 864829 - DNA, 99 bp, Homo sapiens
agaacacaaaaagctacagaaggtccaggctactgaaaagcatcaagaccaagctgttgagaagctaaaacttacttatgaggaaaagtgtgaaattga

SEQ ID NO: 864830 - DNA, 100 bp, Homo sapiens
tttgattttcaagttggagaagacccacctttgtttcctagtgagaaccgagtcagtgctcttacccagtgtaacgaaacctcattcttttttgaagctc

SEQ ID NO: 864831 - DNA, 100 bp, Homo sapiens
aggtgtatcaagtaatggtgcaaagcctgaagtcctaaacatgcagctttcggatggaggacaaggagatgtccctgttgatgaaaacaaactccatggt

SEQ ID NO: 864832 - DNA, 100 bp, Homo sapiens
gaaattccacccagtatttcaagagtcacttctttacttggtgcaggaaggcagtctttgctacgtacagcaaaaggagctcaaaaaggaggagcagctg

SEQ ID NO: 864833 - DNA, 98 bp, Homo sapiens
tcgctgattttaaaagatctggaacatcgaaaggaccaagtaacacagctttcacaagagagttgtgccttttactggggatttacttcttggattgc

SEQ ID NO: 864834 - DNA, 98 bp, Homo sapiens
gggaccgggacctgctgctggacccggcctgggagaagcagcagcgcaagagtgatcagcagctggactgtgccttggacctaatgaggcgcctgcct

SEQ ID NO: 864835 - DNA, 98 bp, Homo sapiens
aaagaagttgaatcccagcttcccgaaaaagagtcgttcacgcctactgaggagcatgtgttggtggtgcgcctgctgctgaagcacctgcacgcctt

SEQ ID NO: 864836 - DNA, 100 bp, Homo sapiens
accgcagtgcttaatgctgtcttaactagtgtaggaaaacggctcaacccaccgctgccgaaatgaagtataagcaatggctgccatccggaagaaactg

SEQ ID NO: 864837 - DNA, 110 bp, Homo sapiens
gtttcgtcccgtcggcgctggggacccgcgagcagccataggaaaaggatacagagtagagtttcatgaacctgaaacttggtggaaatttgatcctgaagaattagaaa

SEQ ID NO: 864838 - DNA, 99 bp, Homo sapiens
gatgcgcgccgctgccgctgcgtgggggtgaggggatcagtgctatgctggaaaatgagaagaagaagcgtgaaatggcagagaaggagaaagagaaga

SEQ ID NO: 864839 - DNA, 99 bp, Homo sapiens
tttgggactgggaccagattacaagtctttccaatttgcctgagaatacagatcaacccacagaacaaagcggatttccaaggcatctccccagagcga

SEQ ID NO: 864840 - DNA, 100 bp, Homo sapiens
cctggaggcccagaatggtactcgggatgactccgacatcaacacctctaagactggagaagtattgtgtatggatgcaaagatcaattttgactctaat

SEQ ID NO: 864841 - DNA, 100 bp, Homo sapiens
ccaacaccttcctgtgcagtcctgttggaatttatccctaaagaagtggctgacatctttaacgcccccagtgatgatgaagagtttgttggcttccgag

SEQ ID NO: 864842 - DNA, 98 bp, Homo sapiens
cttggaaaaccagatccagaaactggaggagtcccgctcgaagctaggacactgatgacattgaaagtcctaaacgcagtatccgagacagtggctac

SEQ ID NO: 864843 - DNA, 100 bp, Homo sapiens
ggaagatcctggaggtggatctgaagaacggtgtgtatgtacagagaaccatcgctacatgaaattggagaaaaacaagggcgttcaaggaaaagttctg

SEQ ID NO: 864844 - DNA, 99 bp, Homo sapiens
ttccctaacactgaaaccaatggtgaatttgggatggtcttttagtaagaacaaaaactgaagatatggtatctcagcttcatactaacctcttgggtt

SEQ ID NO: 864845 - DNA, 100 bp, Homo sapiens
tggggttgagggaagactggtctaggtgctgctcctgaacttggtctctgagccatggcttcccatagacactcagcggaagatccatccaaaagctatg

SEQ ID NO: 864846 - DNA, 50 bp, Homo sapiens
cccatcagtcgcaccatgctcaacgcatctagatgtagtgaacaacccag

SEQ ID NO: 864847 - DNA, 99 bp, Homo sapiens
gacattcctcccggcatggtgtcagagcccctggaggacttggacccctactatgcagacaaaaagcttaaagaaagtggttattgtacaggtcatgaa

SEQ ID NO: 864848 - DNA, 100 bp, Homo sapiens
gtatttgtggcttaaactcttggcatttggctttgcctttctggacacagaagtatttgtgacagctccgacagttagttaatatgtgcatcaacccaga

SEQ ID NO: 864849 - DNA, 100 bp, Homo sapiens
agccagcctaatcttagaaccacagtaaaatggtgttggagagcacaatggctgaacaagtccttcctcaggctttgtatttgagcaatatgcggaaagc

SEQ ID NO: 864850 - DNA, 98 bp, Homo sapiens
atgtctgtacctactgatggtgctgtaaccacctcacagattccagcttcggaacaagagaccctgagtgcctggtgaagaatgtgatgggatcacta

SEQ ID NO: 864851 - DNA, 100 bp, Homo sapiens
tggacaggagattccagcttcaagaagtcatgatggagttccagatcatagaagaagatgctgctcttgtagaaataggacctcgttttgtcttaaatct

SEQ ID NO: 864852 - DNA, 100 bp, Homo sapiens
gagccagccgctgttttgccggaggagcccctcaggccgctcaagaccacctttaatcctacaatctcagtctctaccttgttcatcacctcgagatgtt

SEQ ID NO: 864853 - DNA, 98 bp, Homo sapiens
tttaagagcagcttattccaagctttgctagcaagatggattctggatatactctgagtattgtaacaaccacctggatgcttgcatggagctctcca

SEQ ID NO: 864854 - DNA, 100 bp, Homo sapiens
tctcatctctcccttcgcccagttccctgcatcctaagactcgaaggcagcacaggacctggaaaaattacatattacccagcagttagagaatatctgt

SEQ ID NO: 864855 - DNA, 100 bp, Homo sapiens
tcttttccctttccaacaagcaagacaagtcgaaactggccaagaagcggaaagagaccatgagcagcacccgacaggagatgactgtgatggtgaactc

SEQ ID NO: 864856 - DNA, 100 bp, Homo sapiens
gctgctcaaatatggaccacaacagcagagaaggtttgtttctgcgtcacatgatcttggcctacagtaagctttctttcagccaagtgtttaaactgta

SEQ ID NO: 864857 - DNA, 50 bp, Homo sapiens
cacacctgtgtggccttcgcctggcacttttccttgttgacaatcaccac

SEQ ID NO: 864858 - DNA, 98 bp, Homo sapiens
agcacctggatattcctaaaatgttggatgctgaagaaaataaagcagttggagtgatgaagtcgggccatgtatttacaattgagccaatgatttgt

SEQ ID NO: 864859 - DNA, 100 bp, Homo sapiens
gaatcttcaatcaatcatatttcacaaattgctggaatgactcttccatatgatactctggatcaagtaaggaacagattggaagaagtctctcctaatc

SEQ ID NO: 864860 - DNA, 100 bp, Homo sapiens
ttttgtccagggcagcatctctggtgcatgctgatgacgaaaaacgtggaggtggaggaagcgtccctgggatcgagaggatgggtcctggcattgaccg

SEQ ID NO: 864861 - DNA, 98 bp, Homo sapiens
ggagaacccaccaagccccgctaggagccacctagactggatgcagagcatggagccaagttacaccctgtttaaccctgccttcaaagggacgactc

SEQ ID NO: 864862 - DNA, 98 bp, Homo sapiens
ctatagtctagtgataatcctgctgttcagattcagaacaagaaagtggacatctctaaggtctcctccaagtgtgggtctaaggctaacatcaagca

SEQ ID NO: 864863 - DNA, 100 bp, Homo sapiens
gctgaggtgaagcctttggtggagaaaggggaggcttctgaattcccttctgagttaatgtcaaatgacagcaaagcactgtgtggctgaataagcggtg

SEQ ID NO: 864864 - DNA, 100 bp, Homo sapiens
agcggctcctcaacacccctcgaagatctttctctggaatcaaaggactccagctgaaagttaacctccaacccaatgataactactttttctatgtgag

SEQ ID NO: 864865 - DNA, 133 bp, Homo sapiens
taattaccaaggcatcacatgagcatgaagataaaagtcctgaaacagttttgcagtcgaaataatagtgtaatccttgctgatgaaatgggcctaggaaagaccatccagaccatatcattcctctcctacc

SEQ ID NO: 864866 - DNA, 115 bp, Homo sapiens
gaggcgaaaggaagcaagcagttcagaagagccaaggaataaacatgcaatgaacccaaaaggctcattcttggaatcccagaacaggccttaagtcttctccacatggccatcg

SEQ ID NO: 864867 - DNA, 98 bp, Homo sapiens
ctgatcttagaaacctctgcacagaaaataatcatgggccagactgggaagaaatctgagaagggaccagtttgttggcggaagcgtgtaaaatcaga

SEQ ID NO: 864868 - DNA, 101 bp, Homo sapiens
cctcccttctctttgctgggttgtcagctgttcctcaaagcttctcgccatctctgagaatacctaaaggggcaggacctggatgctatcttgcaggatcc

SEQ ID NO: 864869 - DNA, 123 bp, Homo sapiens
agaggctttatatcctaaacttttcaagcctgaaggaaaggcagaactgcctgattacaggagctttaacagtactaaggctcgtacgtctgcatcgattatcttacgtggggcaaatgattt

SEQ ID NO: 864870 - DNA, 100 bp, Homo sapiens
cctttccagcccgtggtccttctccatattcgagacttcattagaggggtggtagactcggaggatctccctctaaacatatcccgtgagatgttgcaac

SEQ ID NO: 864871 - DNA, 100 bp, Homo sapiens
tgcagaagaatcccccagggcccagaggccgccatggcatcagatgaaggcaaactttttgttggagggctgagttttgacaccaatgagcagtcgctgg

SEQ ID NO: 864872 - DNA, 98 bp, Homo sapiens
ttgtggaccgtctgccaggcaccacaaccattcccggagtaataaatccagttggagcagcagtgatgagaagaggggatcgacacgttccgatcaca

SEQ ID NO: 864873 - DNA, 100 bp, Homo sapiens
aaggctcccctgttcctttttgctgacgtgtcatttctaagtactttctcctactccataaagacttcaaggcacacgtgtttcacgttgacaggtttgc

SEQ ID NO: 864874 - DNA, 100 bp, Homo sapiens
aagagttggatactcagcgtcgctggcagccgctgtacttggctgaactccagtgcacccagttagacttggagcggaaactcaagttgaatgaaaatgc

SEQ ID NO: 864875 - DNA, 100 bp, Homo sapiens
tcaatggatcccatcacgggagtcggggtggtggcttctcggaaccgagccccgacaggctatgacgtagtaaatgagctggatggtatcccgttgatcc

SEQ ID NO: 864876 - DNA, 100 bp, Homo sapiens
agctgaagaccactttagaaactcaattaatgtggaaaagccactggcagtgattcaagtggtgtcattgatctcacaatggatgatgaagagagtggag

SEQ ID NO: 864877 - DNA, 98 bp, Homo sapiens
tgaacttcccagcactcgaaagggaccgaaatggagagcaaaggttaaatggaaaccacccttgggaactggatgcctgtgtagctgttctaccatat

SEQ ID NO: 864878 - DNA, 100 bp, Homo sapiens
tacttcgttccaacatggacatcctgaagccaatcctgcttcttccagaccagctggtcttgcttctggagcatctcttggagcagaagactctgagccc

SEQ ID NO: 864879 - DNA, 98 bp, Homo sapiens
cactgttggcttgcgagacaaatatggatgctgacctgttggatgttgaaagcaaacactttgaagacctggagttccagcagcttgaacatgagagc

SEQ ID NO: 864880 - DNA, 98 bp, Homo sapiens
tacgtctctgctcttcagtacaatcctgtgccccctgataagtgccgatgtgccgtgggcagcatcctgagtgaaggtgaggaatcgccctcccctga

SEQ ID NO: 864881 - DNA, 100 bp, Homo sapiens
tgcaccatgagctggggcaccgagctctggatgcttttactgactctgctatcagtgctaaagtgaatggcgaacacaaagagaaggacctggagccctg

SEQ ID NO: 864882 - DNA, 99 bp, Homo sapiens
aaagctgcttccctgttgctggagatcctgggcctcctgtgcaaaagcatggcaaaatactggagcactaatgcccatgagattgaaggcacagtgttt

SEQ ID NO: 864883 - DNA, 98 bp, Homo sapiens
caaagtcatttcccaggctggcggagactgtccagaccaaaacgaagaagacgttagccaaacccaatataaggaatgttgtggtggtggatggtgtt

SEQ ID NO: 864884 - DNA, 98 bp, Homo sapiens
gtgcgtcatcctctacctgagaaatggtcgcttgcccctagtctagacacgcctcaagtactacagccttccagcagccttcccagacccacagatca

SEQ ID NO: 864885 - DNA, 98 bp, Homo sapiens
tggcttgacaacattctggcttgtcaagatttacgaaattctgcttggtcagaatcgtgatggcattgtgttcagcactgatgactattttcaccatc

SEQ ID NO: 864886 - DNA, 98 bp, Homo sapiens
agaaagacaccagcatgaaggacatgcgcaaagttctgagaacattacagcagatcaagaaatccagctcaaatatttcacattttcaggaacaaaat

SEQ ID NO: 864887 - DNA, 100 bp, Homo sapiens
cttggtggccactggcggccgaggtagaggcagtggcgcttgagttggtcgggggcagcggcaggacaatgccgtcttctgtctcgtggggcatcctcct

SEQ ID NO: 864888 - DNA, 98 bp, Homo sapiens
cgccacaagaacatgtctgtacacctgtccccctgcttcaggtaccctcacctgagtcccaagtacaaggagtcttttgatgtgggctgtaacctctt

SEQ ID NO: 864889 - DNA, 100 bp, Homo sapiens
aactctcagatcactgtataaccacccagtaccaaaggcaaatactcctgtaaatttgagtgtggctgctcccggcagatcggcttctcctttgtacgac

SEQ ID NO: 864890 - DNA, 98 bp, Homo sapiens
ccgaaccgccggcgggccatggccactctgccgagcgcagagcgccgcgcgttcgcgctcaagatcaacaggccgccagatcccacccttggaccccc

SEQ ID NO: 864891 - DNA, 100 bp, Homo sapiens
agagaaggaaacgggactaaactggcgggctccgtggaagcgtggccggcagcgtcccggacgaggagcattttgaaagcgaagcagaagccgtagaatc

SEQ ID NO: 864892 - DNA, 101 bp, Homo sapiens
cccgccggaacccgcaggaggacttcgagctgattcagcgcatcggcagcggcacctacggcgacgtctacaagctgtctgtggaagcccgtaaagagatg

SEQ ID NO: 864893 - DNA, 101 bp, Homo sapiens
ctcgggcggagctggagacgtgtggagctgttcgaggactcgcgggtgtgcagtcaccgttacttcatccccaatccgaggagcaggagatggaatggaaa

SEQ ID NO: 864894 - DNA, 100 bp, Homo sapiens
aggcatgcttctgacggccaatgaaacccccaagatgggcatctattacattccactggtggagctgtctaaggctcaagatatagaagcaggagatggc

SEQ ID NO: 864895 - DNA, 100 bp, Homo sapiens
agcagtggatccgggccaagtacgagcgacaggagttcatctacccggagaagcaggagccctactcggcagaggctgggaggcggcagaatgcagccag

SEQ ID NO: 864896 - DNA, 100 bp, Homo sapiens
gagcgatacctctcaagtcaaagcagcaggaagataccacaatcagaccctccgtggtcatggtgaatggagaccatcggattgggatctttgccaagag

SEQ ID NO: 864897 - DNA, 98 bp, Homo sapiens
acgatcatcctggggacctggtacatgggacattagtcatgagtgccgagtgtgcggggtcacagaagtgggtctttctgcatatgcaaagcacattt

SEQ ID NO: 864898 - DNA, 100 bp, Homo sapiens
gcgctgtgaggaggagcaggatggtaaagagtggatggaggccattcaccaagccagagctaccatagaggaggcatactccaggtcaatgacaaaacta

SEQ ID NO: 864899 - DNA, 98 bp, Homo sapiens
aacactgtagcagagatcactgggagcaaatatccagaacaggttgtaaaggcatatgatcgtgtggagcaagaatgggttgccattaaaataataaa

SEQ ID NO: 864900 - DNA, 100 bp, Homo sapiens
tcgatcgggggatctaggcgacatggagccattgaagggaacaacacccttgatggatgacccatctgcaatggattttgtcacctctgctgcaaacctc

SEQ ID NO: 864901 - DNA, 100 bp, Homo sapiens
ccaggtggaccccaagaagaccattcagatgggatctttccggatcaatccagatggcagccagtcagtggtggagattgcgcagtctctttgtggagag

SEQ ID NO: 864902 - DNA, 98 bp, Homo sapiens
ctggcccactcctctgaccctgtggagatgcggaggctcaactaccagaccccagagcccttcgaagatgctcttcgcgtgcctccacctccccagtc

SEQ ID NO: 864903 - DNA, 101 bp, Homo sapiens
ttgaaaaaaaaattgccttcttcaaacaagatgagaactggactgatgaccaactgcttggttttaaaccatgcaatgaaaaccttattgctggctgcaat

SEQ ID NO: 864904 - DNA, 100 bp, Homo sapiens
ccaacaggctctagccaacatgcagttacaacagcatacagcatttctcccaccaggaacattagttatccaggtgacagcaagtgatgctgacgatccc

SEQ ID NO: 864905 - DNA, 100 bp, Homo sapiens
ggacgagctggagaaggccatcaccacgcagaacgtcaacaccaagtgcatcaccatccccagatttaagtaagtcttccccaacaccgaatgggattcc

SEQ ID NO: 864906 - DNA, 98 bp, Homo sapiens
cggggaggctcttccaaccaggggctgagcttctgcgctgtggagaagccagaattcagcttagagaactatcaacacaggacaatgcaagcccatga

SEQ ID NO: 864907 - DNA, 100 bp, Homo sapiens
agccgggagttcaagaagaacactccagaggagccaagccgccatggcctaccacagcttcctggtggagcccatcagctgccacgcctggaacaaggac

SEQ ID NO: 864908 - DNA, 100 bp, Homo sapiens
tgccactgacagctgtcccgccctacaggctgcgggtgatcgcagaagcctacgctaccaaaggaccagaggagcgagagcagcaagaaccacacccagc

SEQ ID NO: 864909 - DNA, 100 bp, Homo sapiens
caggatgcaggtggagcagaatttatcagatcatatcaaactctcagaacacacgcaggacttgaaagatgttactaataatgtccactacgagaactat

SEQ ID NO: 864910 - DNA, 100 bp, Homo sapiens
ctggattgctgcaaggctgagggacgagaacgaggttttgacaagcttgcatcatgcgtgagtataagctagtcgttcttggctcaggaggcgttggaaa

SEQ ID NO: 864911 - DNA, 98 bp, Homo sapiens
accgccgcgcccccgcctagcccttccggatcctgcgcgcagagacatggatttgattgacatactttggaggcaagatatagatcttggagtaagtc

SEQ ID NO: 864912 - DNA, 98 bp, Homo sapiens
caggactgcgccgcgtcttcctcaaggtggggttcggggggccaccgaatcgctgtcacgccggcaggaggaagaacgtgcaaaacgtgaggagctag

SEQ ID NO: 864913 - DNA, 99 bp, Homo sapiens
caaccttgatgaatatgtggctttggtggatggggtattcttgaaccaggtcatgctccaaatgtatgggctacgtgagttcgtggtgattgcccctgc

SEQ ID NO: 864914 - DNA, 100 bp, Homo sapiens
ccaagggctcctccgtgggtacaggaaccaacttgcacagcccgccaagctgccccctgtgtgctattctttgatgagctggattcgattgccaaggctc

SEQ ID NO: 864915 - DNA, 100 bp, Homo sapiens
cataatttcatcaagtgatgactcttcggatgaggataaacttaaaattgctgatgaaggggtggctttgcaaaatgttacgagatgacagatttgacaa

SEQ ID NO: 864916 - DNA, 100 bp, Homo sapiens
cggggcgacgctggctgcagggacccggtgacagcgtgagagaaacttgtggtggagaatgttgatgtgttaacacaaatgaggaccagctttgacaaac

SEQ ID NO: 864917 - DNA, 100 bp, Homo sapiens
ctgtatgcataatatggaatgttcttaacccagaagtagctgaatgtgttactccattgctgaggagtggctatggagttactagtagagaaagcaatca

SEQ ID NO: 864918 - DNA, 105 bp, Homo sapiens
agaacatggactcatcttcatggaaacgtctgctaagactgcttccaatgtagaagagagcatacctgaagagagatacaagatgaagagcaagcccctaggaat

SEQ ID NO: 864919 - DNA, 99 bp, Homo sapiens
ccagtcccacttcaaacattcgtctcggaaaccccgcctcttacagtcacgaggaggcgatcgagatcggatgacagcaaatcatgaaagctacctcct

SEQ ID NO: 864920 - DNA, 98 bp, Homo sapiens
ccacatcttccggccaacttccattgaacttcccagcactcgaaagggaccgaaatggagagcaaaggttgaaatcacaaagattagacaccttttta

SEQ ID NO: 864921 - DNA, 98 bp, Homo sapiens
cgcggccctgctgagagggaaaaggacgccgcggtcttcccaggcgtcgcggagagcaggttcatctctaacaagtatttagtgaaacgacagagcag

SEQ ID NO: 864922 - DNA, 100 bp, Homo sapiens
cagaggtactacagtttacagtctgactactggaaggtgctgctacccccgtatgatgatgccactgtgaatggtgctgccaaggagccaccgccacctt

SEQ ID NO: 864923 - DNA, 100 bp, Homo sapiens
aatgatctgtacatagattttggtggaaagtttcattgtgtatgtagaagaccagaagtggatggagaaactgttcgtcagttggcacaggagcagttct

SEQ ID NO: 864924 - DNA, 98 bp, Homo sapiens
gaaggacgcgcaggagaagctggagctcacggagaagaaggcctccgacataacgaaggaggcccaacttcattcaataaggagcctgacggatttat

SEQ ID NO: 864925 - DNA, 100 bp, Homo sapiens
ttagaagaagaggtcatcatcagctggtcggaaaaggttatttgttatcaaagcgtgaaggccaagcagggtctccagagaaaccgttatctgatctggg

SEQ ID NO: 864926 - DNA, 100 bp, Homo sapiens
tcggcttgaaattaccaactgctttcctttccctcagcacacagaggatgatgctgactttgatgaagtggtgctgattactatgattacggacatggac

SEQ ID NO: 864927 - DNA, 98 bp, Homo sapiens
cacccgctccgagcagtgctacagagacgtgtctgatctaaagggtatatttacttctggcacatgggaagagaaatcagatgaaatttcctttgctg

SEQ ID NO: 864928 - DNA, 98 bp, Homo sapiens
ccgtgggccgcagccactcaggactgtcaaagcttccacagcgcggcacctgtacctccggggtggcgctggggttggctccatgaccaagatctatg

SEQ ID NO: 864929 - DNA, 117 bp, Homo sapiens
gaattctgaagctaagattcgttctttattcaactatgaacaatcacatatctttggtctaagctaatttcttgagatagaggacagagaagatgactcgttcccatagatttgaag

SEQ ID NO: 864930 - DNA, 100 bp, Homo sapiens
agttccatcccacctttgagtcaggtgggaactttgaggctcagagacagagcagaagacagaacctggtcttctgattccctgtgttctgcttttttca

SEQ ID NO: 864931 - DNA, 98 bp, Homo sapiens
tcgagcagcctctcgccatttcccggatttagctatcaagcattatatagctatataccacagaatgatgatgagttggaactccgcgatggagatat

SEQ ID NO: 864932 - DNA, 100 bp, Homo sapiens
tggttccattgaaaaatggtggagttggaataaagtgggtaattccagaattgattggccataccattgtcactgtattactgctcatgtcattgcactg

SEQ ID NO: 864933 - DNA, 98 bp, Homo sapiens
tatttaggaggctgcagctgttcacgcacctgcggcaggacctggagaggggacagcacttgtcctagcccgattacctttggataagattaccgaat

SEQ ID NO: 864934 - DNA, 100 bp, Homo sapiens
ccaagaagcatgtgtgtacaatggagacttacatcacctataggatcaccaccaaaaccattgacttcctgaacgacaacattcgaagaggaattgagaa

SEQ ID NO: 864935 - DNA, 100 bp, Homo sapiens
aagaaggagagcaattgaccttgaaattaaagagcgagaagctgaaaattttcatgagggactgtggagtttattatggactcaaaacataatttctgtt

SEQ ID NO: 864936 - DNA, 50 bp, Homo sapiens
gacagagtcttgctctgttgcccaggcggaggttgcagggagccaagatt

SEQ ID NO: 864937 - DNA, 106 bp, Homo sapiens
tcaccagctatggcattagcccacaggccaagtttcttgcagaacataaattattaggaaacattaaaaatgtggccaagacagctaacaaggaccacttggttac

SEQ ID NO: 864938 - DNA, 100 bp, Homo sapiens
agaatacctaatagaactggaaaaaaacatgtcggatgaagagaaacaggcctatgaaaggaggttccctacatgtcctttgattccgatgttcgtgggc

SEQ ID NO: 864939 - DNA, 124 bp, Homo sapiens
ctagggctgcccgccgcgctgcctgcgccggaccggggcgggtccagtcccgggcgggccgtcgcgggagagggtctctcattcatcacttttatctgctatgtggcgtcctcagcatctgcct

SEQ ID NO: 864940 - DNA, 98 bp, Homo sapiens
tttccccgtaccgcagcccccgggcacgacctctcggacacggtgcaggcaggtaaggctggcctctctgcagtcagaggtctgagctctgccatggg

SEQ ID NO: 864941 - DNA, 99 bp, Homo sapiens
atagttcagaggaagcagaaagtgaaggagggtttgtcctggttgtggtcaagactggatgatgtaactggctctctaggaagcctcacttggccgtaa

SEQ ID NO: 864942 - DNA, 100 bp, Homo sapiens
gagaggatgcggagcccgcagaacctccacagtcaagaggacgagtgttgcggagataggaacatgggagagaaacaatctgggtaacatgaaagtgatg

SEQ ID NO: 864943 - DNA, 98 bp, Homo sapiens
cgtccccggagcacggggtggtgtgtgggggaagccgcccccggcagcaggagtaagtccatgagtgatgtcagcgcagaagatgttcaaaacttgcg

SEQ ID NO: 864944 - DNA, 99 bp, Homo sapiens
gtgaagccaagcaacagtttccttttcattcagcaatggctgccatccggaagaaactggtgattgttggtgatggagcctgtggaaagacatgcttgc

SEQ ID NO: 864945 - DNA, 121 bp, Homo sapiens
ggacctcccagtctgcggccatgaacgcgagcagcgagggcgagagcttcgcgggctcggtgcaaagtctcctctgagcctccggcctccataagacccaaaacagatgacacctcttccc

SEQ ID NO: 864946 - DNA, 98 bp, Homo sapiens
agttggctgtcatcagctctagaaagggtgtggccgttttacattggctgttttcctcacattcctcaagcaggtaatcaaatgcaaagcagctgtgc

SEQ ID NO: 864947 - DNA, 100 bp, Homo sapiens
ttcatttaatgtcatagagtttccttataagaatcttccaattgaggatatcaccaactccacattggggcaagattcttgccaagagaattaatgtgcg

SEQ ID NO: 864948 - DNA, 98 bp, Homo sapiens
tctgcttaggattcactgcacatcgaattaagagagcagaaggatgggaggaaggtcctcctacaggttctcgactggaccgggttggtggcctgaat

SEQ ID NO: 864949 - DNA, 106 bp, Homo sapiens
gaaaagacaaacagaggaagaggaaggaaaagacaatcattgcttcaagaatgctgacccttgtagaaatggtttcacccaaatatcactggtgtggaggcagaaa

SEQ ID NO: 864950 - DNA, 98 bp, Homo sapiens
tgagatcgatgacaagctcaacaaaattaacgatcgttggcaacatctttttgatgtcatcggatcaaggccgccaggctaccccaatatgaatcaag

SEQ ID NO: 864951 - DNA, 100 bp, Homo sapiens
cagaaattggtcgtctgagagctttacgtcatcttcgattagctaataaccaactgcaattcctacctccagggccttattggaaggagaaagtaatcca

SEQ ID NO: 864952 - DNA, 98 bp, Homo sapiens
cttggagaatggaaaagaaccattgaagcttgagagaaaagcccccaaaagcagctattcagagatttaccgcattgtttctcagaagcaaatgtcag

SEQ ID NO: 864953 - DNA, 100 bp, Homo sapiens
gtgttccatggcagggaacttttggcagagctcccactaagctacagagacttctgaagtggagagtctgcgacctcctcggttcttcaatgaagatgga

SEQ ID NO: 864954 - DNA, 114 bp, Homo sapiens
gatcccggcgacatactacctctggccccgagatcagaatgccggcattatccaattggtttgctatttgatcttcttgcatcaagttcagctcttccttggaacatcacagta

SEQ ID NO: 864955 - DNA, 100 bp, Homo sapiens
cgccgggaacccttgccgctgctgtcctgcgaccccaagcaggtccaagacaagctgctgctatctgcgtgccacttactggtctcactggccaccaccg

SEQ ID NO: 864956 - DNA, 100 bp, Homo sapiens
gggtgtcctgttacttccaagtcatcaccagaaaggggtgacagtccaaagattgacttggccggcagttcgctatctggcatcctggacaaagatctct

SEQ ID NO: 864957 - DNA, 100 bp, Homo sapiens
caaggttccttccactgaagcagaagccctggcatctaatgacatggaagccattcctgtcaaacagtttgtcaaacacatcggtgagctctattctaat

SEQ ID NO: 864958 - DNA, 98 bp, Homo sapiens
ggctttgtcaaaaaggaccagttgggcaaggagccgacacccgcactgccaggatccaagatgcagggctggtgttggcagacacgctccggaaattc

SEQ ID NO: 864959 - DNA, 50 bp, Homo sapiens
tgattactcagtctctaaaaagctaagtgtttcctgaggttataggcggg

SEQ ID NO: 864960 - DNA, 100 bp, Homo sapiens
agctatatttgcccatgttattcaagatgtcatacttgtaacaccacagatcgaaatgccatatgtgtgaactgcattaagaagtgccatcagggacatg

SEQ ID NO: 864961 - DNA, 98 bp, Homo sapiens
gaatctatgcaaatatgaggatggttcatatacttacatcagttgttgtacgtctgcacatgatgtgtgccacacacccaaacatagttcagattatt

SEQ ID NO: 864962 - DNA, 98 bp, Homo sapiens
taacctgccgccgcccctcaccagacagatcgctgtcaaaaccctaggtgaaaggtgtagcagtcactcggcctacacccacagcatcgaccttgtga

SEQ ID NO: 864963 - DNA, 100 bp, Homo sapiens
gatcgcgtggagtgacggtcccacggcagcgcaacttacgctggaaaaactccaacagcttcatatggacagatggacttcaaatgctgtttgtattcca

SEQ ID NO: 864964 - DNA, 99 bp, Homo sapiens
agcttattccaagctttgctagcttcatcactggtccagctgtaataccagggtacttctccgttgatgtgaataatgtggtactcattttaaatggaa

SEQ ID NO: 864965 - DNA, 135 bp, Homo sapiens
ccacggccatggccatgggcagaggcgaagggctggtgggcgatgggcccgtggacatgcgcacctcacacagattgcaaatagaagagtcttccaaaccagtgaggctatcacaacagctggacaaagttgtaa

SEQ ID NO: 864966 - DNA, 100 bp, Homo sapiens
tcgaattacagctgctagccaggaacatggactgaagtatccagcgctcattgggaatttagttaagggctcttggtggtatcgctcaatacgctatagt

SEQ ID NO: 864967 - DNA, 100 bp, Homo sapiens
ttcttggcacaaatactattatggataagatgatggaattacatgaatgacagtcttcgaaccaatgtgtttgttcgatttcaaccagagactatagcat

SEQ ID NO: 864968 - DNA, 110 bp, Homo sapiens
ccggaagccctgagggcagctgttcccactggctctgctgaccttgtgccttgggctgggttacgacccctacaaccctgagctgcccaagccccccgcgcagagggaga

SEQ ID NO: 864969 - DNA, 98 bp, Homo sapiens
atatggcgcaactgcggcgcgtgctggctgccagctgctgcgccccccatgtagaaggtgcacctcctgggagcaggcacgtcttttggctcttctga

SEQ ID NO: 864970 - DNA, 115 bp, Homo sapiens
gcaagaacaacatcgtcctcagtgccggcatcctcttcgtggctgcagagtacagcatctcggcagccgccatcgccatcttcagccttggcttcatcatcctgggcagcctctg

SEQ ID NO: 864971 - DNA, 98 bp, Homo sapiens
catgatcaaagccatcaaccagggcaactatggatggcttgctggggatgttcctgaaacgcctctcgtctcagcttatcctgctgcaagcatggact

SEQ ID NO: 864972 - DNA, 100 bp, Homo sapiens
ggagcttatactcctcccagtgacgggtctggagtgcgtgggggaccggctgttggcggggatcgcttacacctgagacgaactacagaacagcacgtac

SEQ ID NO: 864973 - DNA, 100 bp, Homo sapiens
gaccattgcacttcgtgcccgaaacgccgaatataatcccaagaatgtaattgaccggaaaccataccctgatgatgaaaatttagtggaagtgaagttt

SEQ ID NO: 864974 - DNA, 100 bp, Homo sapiens
tgggtgtaatacatcatgaactgcagggaacccaagccagaccgtctccttgtattgaaagtactatggaatgatttcctgatgtgctactcctctcgcc

SEQ ID NO: 864975 - DNA, 100 bp, Homo sapiens
gtggtcagaacatgggtgatatggatccacatatctttgcagtagctgaagaagcttacaagcaaatggccagagcataaccttcggtggcaggacaaat

SEQ ID NO: 864976 - DNA, 100 bp, Homo sapiens
caactgctgaccccggggtcagctcaaatctaatccaagtgaaaatgaagaaaaggaagcacagtctcaacttataaaatctgatgaaatgcagcgtttg

SEQ ID NO: 864977 - DNA, 98 bp, Homo sapiens
tgcttgtgtctatcaggattccttgttggcgatggcccactgcgtgaccttggttcagctgtccatttcctgtgaccatctcattgacaaggacatcg

SEQ ID NO: 864978 - DNA, 100 bp, Homo sapiens
ttttccgtgaacatgccaacaaattgattgaggtgcagcggaactgctgcctgacgctctgcaacttcagcatccccgaggagctggaattccagtaccg

SEQ ID NO: 864979 - DNA, 100 bp, Homo sapiens
gttgatgatttagttgattctctgaagccagagactgctgctactttgaaacgtacgatagaggccctgatggacagaggagcaatagtgagggacttgg

SEQ ID NO: 864980 - DNA, 100 bp, Homo sapiens
ttatttatgaaacagagcatcataatggcatagcagagttactggaaatattgggaagggcgtctctggccgagcctctttttgtggaaaacgacagcag

SEQ ID NO: 864981 - DNA, 98 bp, Homo sapiens
tgctacatctgttggaggagccaactagcatggaagtgcagcacaggttggagctgaaggagtgcccaggctgcggatggaggaaggacgtgctcggg

SEQ ID NO: 864982 - DNA, 117 bp, Homo sapiens
ttggttcggagggacgtccgcttctggtggacagattgagcaaagaagttccacctggtgccaagcatcaacaccatgagtggcagtcaggagctgcagtggatggtacagcctcat

SEQ ID NO: 864983 - DNA, 112 bp, Homo sapiens
ggcacgcacacccaccccacagtgcccggctcggctgcgagtgtatccagaagctactgtcaggaggacactgtaagagaaccttggcacctctgggcccaaagggaaagac

SEQ ID NO: 864984 - DNA, 98 bp, Homo sapiens
gcaaagaggttgagagcttccagcagctgctcaatgctcggacacaggtccttctggcactcctctggtggaccgcccccatcggccacacttgccct

SEQ ID NO: 864985 - DNA, 100 bp, Homo sapiens
aaataatcagctctttcaaaaacaaggatgaaagatatgatcatctggatcctactgaaatggaaaaggttgaaaaatgtatcagtgatgccatgagttg

SEQ ID NO: 864986 - DNA, 100 bp, Homo sapiens
gctcagaacagagcagaaatcaaattgaagagagcagttgaagaagtgaagaaattattggtacctgcaaattaaacaaccaccatgtcgagcaaaaagg

SEQ ID NO: 864987 - DNA, 100 bp, Homo sapiens
ataatgagtctgctgtattagagaacattctagtatgccagtagaaaaaaatatcactttagaaaggccttctaatgtaaatctcacatgccagttcaca

SEQ ID NO: 864988 - DNA, 98 bp, Homo sapiens
aggagggggtcggcgggagaggagatagcccctggaggaacgcgcatagatgatggtgacaagaccaagatgaccaaccactgtgtgttttcagcaaa

SEQ ID NO: 864989 - DNA, 100 bp, Homo sapiens
tgtcattaaacccatcgacaagaaggcacctggcactccacagaaggatgttattatcaagtcagatgcaccggacactttgttattggagaaacatgca

SEQ ID NO: 864990 - DNA, 98 bp, Homo sapiens
gacagagacaacaccgagtatgagaagttaccattgccacctggggctttttcaggactctggaagaatcaggaagcattcaagcatttatactttga

SEQ ID NO: 864991 - DNA, 100 bp, Homo sapiens
ggatcaagcaggttttaaatcaagatttaacattccaacacataaaaattatttatccaacagctcctcccaggacctgctgaagttcccatgatgtcac

SEQ ID NO: 864992 - DNA, 100 bp, Homo sapiens
aactcaacaaaacattagtgcggctgaagccgacgtagcttctctgaacagacgcatccagctggttgaggaagagttggatcgtgcccaggagcgtctg

SEQ ID NO: 864993 - DNA, 147 bp, Homo sapiens
ggaggtctcctacctattaaaaggaccatacgagtcctagatgtcaataaccagtccttcagagaacaagagagagaaaaggaacagttccgtaagctctttattggtggcttaagctttgaaaccacagaagaaagtttgaggaac

SEQ ID NO: 864994 - DNA, 100 bp, Homo sapiens
gagaactatagcaatctggttttcttgggcaaatgttctgaaaaagactctgcatgggaatggcctgccttacgatgacagaaatggagggaacatccac

SEQ ID NO: 864995 - DNA, 100 bp, Homo sapiens
gaagtcaatttcatacagaaccttgtgttttacattgaagctgcatataaaactgctgaagaaatgcagagtaacgtggaagtggtccacacctaccgcc

SEQ ID NO: 864996 - DNA, 99 bp, Homo sapiens
tgcagtgcagcattaatgggccgctgacatgaatatggagtagttttctctagcaaaggcccagatggtacaggaagacttggagaagacccgtgctga

SEQ ID NO: 864997 - DNA, 100 bp, Homo sapiens
tgctcattaacagaaaagaagaggagaatgctaagcagagacttcctcgttctgcccatcttcctaacaaggctatggctgataacagcagtgatgagtg

SEQ ID NO: 864998 - DNA, 98 bp, Homo sapiens
ggagggcgccgcggggcagccgccgctcctccgggaaaaatggctacaaacttcctagcacatgagaagatctggttcgacaagttcaaatatgacga

SEQ ID NO: 864999 - DNA, 99 bp, Homo sapiens
ttaattccaattccaggtgatacagccgtcagtctcccactagctgtaggatggtgtgctgcagttcacagcatacgtgagaaggctgttcgagagctg

SEQ ID NO: 865000 - DNA, 100 bp, Homo sapiens
ctgctctgtcactaacaagctgcgtgatcttcggtccacaaggagaatccagaacaggtccaccagggtccacaggttcaagaggtccccctggcccccc

SEQ ID NO: 865001 - DNA, 100 bp, Homo sapiens
cagaaacaagaaaagacctctgaccgatcatcagtgctggagatggagaaacggaatgggtgagaaatcttgaaagcaaagcattgatcccagcacagag

SEQ ID NO: 865002 - DNA, 100 bp, Homo sapiens
ctgaccgagtgcttcctgagccccagtatgtcctctaccctctggatctgtacaacgacagcgcctactatgctctgaccaagtttaaaaagcagttcct

SEQ ID NO: 865003 - DNA, 100 bp, Homo sapiens
catcagcgacgccgcgcagctacctcatgactattgcaccacgcccggggggacgctcttctccaccacaccgggagatatcaatgatgtcaaacggctg

SEQ ID NO: 865004 - DNA, 100 bp, Homo sapiens
aggagaaagctctcaaagcatgcttcagtggattgacccaaaccgaatggcagcatcggcacactgctcaattctcggccacctgtgaccacctccaatg

SEQ ID NO: 865005 - DNA, 99 bp, Homo sapiens
tacaattctcctgagtatgaggcctcgtttccacgaatggaaggaatgttatttctccctgttgaaggagacccgatatatctgagatagaagaggcca

SEQ ID NO: 865006 - DNA, 98 bp, Homo sapiens
aaaccatgtccaaaccaggaaatggacagggggcaatggcggcttcctgtgttctactgcacactgggcagaagatgcctctgattggtctgggtacc

SEQ ID NO: 865007 - DNA, 100 bp, Homo sapiens
ccagctttaaaggagatgcaggagaaaatacggcattgctaggtcctatctgactcctgtacgggatgaggaagcagagtctttacggaaagcacgctcc

SEQ ID NO: 865008 - DNA, 99 bp, Homo sapiens
aaagaagcagaaatgagcagaaaggagttggggcttgatgaaggcgtggatagcctgaaggcagccattcagtgagattttatgagggtgtggtggaac

SEQ ID NO: 865009 - DNA, 99 bp, Homo sapiens
ttggctttcattcatgaatgagttgctgatgtatattcaagatgagtggattaggagaaaacttggatccactggccagtgattcacgaaaacgcaaat

SEQ ID NO: 865010 - DNA, 100 bp, Homo sapiens
tttaatcctgaaagccatgcagcgggccaagtcctgtatctgccatgtctgtggcgtccacctcaacaggctgcattcctgcctctactgtgtcttcttc

SEQ ID NO: 865011 - DNA, 98 bp, Homo sapiens
gggaaacaagtcagacctcaaacagctaagacagaagaaattgcttcagagaattcagattgcatctttccttcagctcctgatgttaaggcctgagc

SEQ ID NO: 865012 - DNA, 98 bp, Homo sapiens
tgtcccgagactgtgccctggccatcaagcagaggggagcctgttgtgaacagtgcaaagtggcttttcatggcctgccactgaaaatcaagaaagaa

SEQ ID NO: 865013 - DNA, 100 bp, Homo sapiens
cggtgaacctggaccaggaggaggttttcaggaccaaaattgtggaaaagtcactctggtttacccaaggtccagcctagcccctaggcaccatgtcgga

SEQ ID NO: 865014 - DNA, 98 bp, Homo sapiens
ctccaggcaatgagatttaccgcaagggcaccatctccttctttgagattgatggacgtaagaacaaggattcagagactgtttttgatattcagaat

SEQ ID NO: 865015 - DNA, 101 bp, Homo sapiens
gagggcaccaaggcggtcaccaagtacaccagctcgaagtgactattatatggttaaaaagattttggaggaaaacagttcaggtgacttgaacataaatt

SEQ ID NO: 865016 - DNA, 98 bp, Homo sapiens
cgacaagatggcggacggggagctgaacgtggacagcctcatcacccggctgctggaggggtgaggtggctttgaccccgggttgcccggccagcacg

SEQ ID NO: 865017 - DNA, 100 bp, Homo sapiens
gtgggctatttggactgtgctgttaattcaattagtgataatgtatgggaagtccttatcttaatggaatattgtcgagaataactgaagtgaagtgatg

SEQ ID NO: 865018 - DNA, 98 bp, Homo sapiens
agcagatgacttcctccaggactatactttattgatcaacatccttcataggataccgttaaccctggataaagagaatggaggttacctctgtccgt

SEQ ID NO: 865019 - DNA, 100 bp, Homo sapiens
ggaacactgaatcaacatgggcaatgagaacagcacctcggacaaccagtctgaaggaattcctgcccaaagaatatatcaagcagagaggagctgaaaa

SEQ ID NO: 865020 - DNA, 51 bp, Homo sapiens
gccggaatgcagtaccctcagcagcagattgttcctgcctgattcataaac

SEQ ID NO: 865021 - DNA, 100 bp, Homo sapiens
cactgtattctttacctgcttcccaatcccactgatgaggatcagcccatgggaggaggacctggttgatagaagaatttatctcgtagtcttaacatcc

SEQ ID NO: 865022 - DNA, 98 bp, Homo sapiens
ccgtgttggcagcagtgctgttaccactctgggtgatccagccaaaggactccatctcccttgaggatgtggctgtgaacttcaccctggaggagtgg

SEQ ID NO: 865023 - DNA, 98 bp, Homo sapiens
ctgacccggcgtgtgcaaaaggcagctcggagacaggccaagcaggaggagcttaagcggctgcatcgagcccaggcaggtgacagcagggacatgtc

SEQ ID NO: 865024 - DNA, 100 bp, Homo sapiens
accagaacggcacggccatctgtgtgtctgggcagtgcaagatgcgctggctccctccctccgaggctacttctcagggctggaagtcccgtcagttctg

SEQ ID NO: 865025 - DNA, 107 bp, Homo sapiens
gtggcttccggaagttcctggtccacaacgtcaaggagctggaagtgctgctgatgtgcaacaagttgctccttgagggcaggacagttcttatggctttatccgtt

SEQ ID NO: 865026 - DNA, 100 bp, Homo sapiens
atggtgaagtcactattatatcagatcctagatggtattcactacctgcatgctaactgggtgttgcacagagatttggctgtattcatcaccaaagaaa

SEQ ID NO: 865027 - DNA, 50 bp, Homo sapiens
ggaggtgtggaagagccgggtagttaacaagcacaagccctggctggagc

SEQ ID NO: 865028 - DNA, 100 bp, Homo sapiens
aggttatgaagctaatcctggcgttccaccagcaaccatgagtggttccatgatgggaagtgacatgtcgtgagatggagaataaagaaactctcaaagg

SEQ ID NO: 865029 - DNA, 120 bp, Homo sapiens
tgagagagatgttcaccattcatgcctacattgcctttaccatggacaaactgatccagagcattgtcagacagtgaaggagaacgacctgctcagaatgagaagaggaaggagaaaaac

SEQ ID NO: 865030 - DNA, 100 bp, Homo sapiens
ttaacctatgtcttacaaaggcccaagataccagaaggccctattgatcaggggccagctataggaagagtacgcgttttagaagagcagcttgttaagg

SEQ ID NO: 865031 - DNA, 99 bp, Homo sapiens
gattttgccttttggtaatgctgtttctgcttaagttggcaagacactccaagtttggcatgaaagtttaaggaagaaatctctaaacgttttaaatca

SEQ ID NO: 865032 - DNA, 100 bp, Homo sapiens
gtggagcagccaacgtggtgggacccaaaatctgcctggaagataatgtgactgtgctaaagaataatgatttaagatcgagacaagagttaactgccca

SEQ ID NO: 865033 - DNA, 100 bp, Homo sapiens
aaaaggaagccaaggaatgtcgacttcgaacggaagaatgggtaagatgataatgcaagataaattggaaaaagaaaggaatgatgctaaaaatgcagtt

SEQ ID NO: 865034 - DNA, 100 bp, Homo sapiens
ggaaatcgacttcggtttcagttggagttggaatttgtgcaatgtttagccaacccaaattaccttaatttttctccagcatttggctctaggtgccaag

SEQ ID NO: 865035 - DNA, 100 bp, Homo sapiens
gtggggagatgaacccaacctagtgggtgtaatacatcatgaactgcaggatgatggaccatttggattgtgcaacaaatgaagaaaaccctgtgatatc

SEQ ID NO: 865036 - DNA, 100 bp, Homo sapiens
catctttgtgatcgactgaatccaggctgtttctatcgtttacgagtttactgcatcagtgatggaggacagagtgcggagcctagtaataaacgggtca

SEQ ID NO: 865037 - DNA, 100 bp, Homo sapiens
ggagggctgcagcggtttgctggaggaggtcttcctggacctggaggaaggaatcgtgtctcctagtgacctggaccttgtcatgtcagaagggttgggc

SEQ ID NO: 865038 - DNA, 100 bp, Homo sapiens
ttgtgtttgtgaaacagagaaagataggcggccatggtccaaccttgaagtcattgaaattatgagactatcattcaaatggaagcattatagttcttcg

SEQ ID NO: 865039 - DNA, 100 bp, Homo sapiens
tcttccagagccaaggaggaagggttgtccgggtttagcatgagctttaacagacataatctgaaatactatgtattaccgaaaaagcctaaaaaggtgg

SEQ ID NO: 865040 - DNA, 99 bp, Homo sapiens
acaagctcagcctggacagcaacaggttatcaatactctggctgaccatcatcatcgtgggactgactttggtggaagtccttggttacatgtcattat

SEQ ID NO: 865041 - DNA, 100 bp, Homo sapiens
atgcagattatatcgcatcctatggctcaaagaaagatgattattactaaggctcgtacgtctgcatcgattatcttacgtggggcaaatgatttcatgt

SEQ ID NO: 865042 - DNA, 99 bp, Homo sapiens
tttcagcaagcctatatcacatgtttatgttctatgctccctaatgaagatgctattaaggagggcagatgattctggaccagatgaagcctgaggagc

SEQ ID NO: 865043 - DNA, 98 bp, Homo sapiens
agcctgcaggatggcgcggccgagtccccgtacggccacccggcggccctggcctcccacgactacatcctgaagattgtgcccacggtttatgagga

SEQ ID NO: 865044 - DNA, 100 bp, Homo sapiens
gcggtgctggcatccgaacaccgggtggctggtgcagccgaggtcttcgggaattccagcgagggtgctgactgggttacttttttaaacactaggaatg

SEQ ID NO: 865045 - DNA, 100 bp, Homo sapiens
ttaacaacgttaccagcatccattgcaaaccttattaatctcagggaactggatgtcagcaagaatgcttgcaagcaatactttgagaagtatccaggag

SEQ ID NO: 865046 - DNA, 100 bp, Homo sapiens
agatgcagaaaccaacagacaatgccaatttacgtgtcattatggaactacttatgagcaatgtctcaggctgtgcagacaaacggaactcaaccattaa

SEQ ID NO: 865047 - DNA, 100 bp, Homo sapiens
aaaactaggaatctatgatgctgatggtgatggagattttgatgtggatgatgccaaagttttattagtggaggtgaagccggtgctgccaagagccatg

SEQ ID NO: 865048 - DNA, 150 bp, Homo sapiens
gggggctcttgccatgaggtgccgtccggcttcgaatgccactgcccatcgggctggagcgggcccacctgtgcccttgatcgccacatcacagaatcgtatctatctcacagctgacaaccttgtgctgaacctacaggatgaaagttt

SEQ ID NO: 865049 - DNA, 100 bp, Homo sapiens
tgctgtccagtgtcttcgatctgcttctgatgaatacaaaattggacagctgtacatgatcagcaaacacagccatgaacagagtgaccggggagaaggg

SEQ ID NO: 865050 - DNA, 100 bp, Homo sapiens
cactctgtggttcacgacagacttcgctgtgagtgcccaaggtttcaaagcattatatgaaggtatcacagatgtcgtaagaatctgaatcctccaaaag

SEQ ID NO: 865051 - DNA, 98 bp, Homo sapiens
gtcggcaccttcggcaaagtgaaggatgctgtctttgcaggtgccatgcctacaatggcaagcatcaagctgtctacacttcatcccattgtgaatca

SEQ ID NO: 865052 - DNA, 99 bp, Homo sapiens
gcagcaaagcgcccagcctgccgcctcgctgtccctgcggcttctggggctagaacaacagaggcagcagttgcttactgaacgccaaaacttccacat

SEQ ID NO: 865053 - DNA, 100 bp, Homo sapiens
cctattggctccttcacattgattgacagtgaagtgtcacaacttttgacctgtgaagatatacaggacatgaaagatcagatgtcaacttcatctgtgc

SEQ ID NO: 865054 - DNA, 99 bp, Homo sapiens
gagttccgccccaccatctacagcaacgtgatcaaagaaatgaaagctcattagcatctacactgaagacgctcctgttcttcacagctttaatgatca

SEQ ID NO: 865055 - DNA, 98 bp, Homo sapiens
cgatgcacttaatgaccctaaaaatggcgattctgcaaccaagcacctgaaacagcaggtgacaaacagcatgtttggtgcttcaagaaagaagtttg

SEQ ID NO: 865056 - DNA, 99 bp, Homo sapiens
ggataagaaggaaggtgaatatattaaactcaaagtcattggacagcctgtctcgatatagattgaagtttagcgctgataaagtagacacaatgattg

SEQ ID NO: 865057 - DNA, 100 bp, Homo sapiens
gctgggtcagatgctgctgatgggtcaagtaaggagctatgaattatgtctccctttgcttagaccaaggttgttgaaaaccagacatatgatgagcgtc

SEQ ID NO: 865058 - DNA, 98 bp, Homo sapiens
ctcatgaaagaaatcttagataagaaggttgagaaggattattgcatcgagcttttagtgtcttcttattcaacaccgaaaataagcttctgctacag

SEQ ID NO: 865059 - DNA, 99 bp, Homo sapiens
tcacttggaacaattgtcagcagagaagccaaacttcagtttgcctcccccagtgagcctttgctgtgcaaattcgctgatggaggacaaaagaagcga

SEQ ID NO: 865060 - DNA, 100 bp, Homo sapiens
gatttctctccagtttatcgatgtctacatatatattctgtcctgactatatcatcatgtacatagaaaaatccaaaggattctgcaaaaaagctactag

SEQ ID NO: 865061 - DNA, 100 bp, Homo sapiens
caattataaaatgtcagcttttaaggcatttaaatcaaacggtattgagatggattgggttatgaaacataatggtccaaatgacgctagtgatgggaca

SEQ ID NO: 865062 - DNA, 98 bp, Homo sapiens
gtctccagcgagcggcgcggagctggacgccgcgatcgtggggcccgcgaggcgggcagccggggcgtccaggtgatggaatatgagaataggattcg

SEQ ID NO: 865063 - DNA, 100 bp, Homo sapiens
acacatggcaccacctcacacagggaaacggcacagaaaactgaatctgtagataacgagggagaatgaattgtcatgaaaaattggggttgattttatg

SEQ ID NO: 865064 - DNA, 100 bp, Homo sapiens
ttcccttggctgttaatttctcagagttttcggctttgtgagaaaccttaccatcaaacacgatggccagcaacgttaccaacaagacagatcctcgctc

SEQ ID NO: 865065 - DNA, 98 bp, Homo sapiens
aatggtggaatattgtataccttcagaagaagaagttgtagaaggagagaaggaagtcgaggctttgaagaaaagtgcggactgggtatcagactggt

SEQ ID NO: 865066 - DNA, 100 bp, Homo sapiens
gcgatcccgggtcatctccagatgctagggttatggtcttggtcctttagtgagtaaagtgaaagaataccaagtagagacaattgtagataccctctgc

SEQ ID NO: 865067 - DNA, 98 bp, Homo sapiens
ccaggtcctcaactttgaagagatcgactacaaggagatcgaggtggaagagggccggtgcataaacttctcccgagttccatctcagtaaaagggaa

SEQ ID NO: 865068 - DNA, 100 bp, Homo sapiens
atggcgtctaatgagcgcagttgattcgagaaagcgtggatacccatcaacgaagttttgatattggaattcagattggctatcagcgacgcaataagga

SEQ ID NO: 865069 - DNA, 100 bp, Homo sapiens
aaaattgttgcctgaagaataccaaggaggatcttttaggcggcatgcgttcctgcggacgatcgcatcttgtgtcgctgaagcgcctcccccagggacc

SEQ ID NO: 865070 - DNA, 98 bp, Homo sapiens
tctcgtcggcagtgaagctcaagttgctactcgggacgctgcacctcccgcgccgcacggtggacgagtgcagctctccggctgggatcctggttgac

SEQ ID NO: 865071 - DNA, 100 bp, Homo sapiens
gaaaacaagaggccccagagggaaaagaagcccaaagttttaaaggtctgtgtgaaaatgtgtgaccctgccaaaggagcagctggccagagaaccatcg

SEQ ID NO: 865072 - DNA, 100 bp, Homo sapiens
agcagtaccaccctgttgtacatccactggacctaaaatatgaccctgatccagagatttttgctgtgagaattaattaccagtaacagttcaatatggg

SEQ ID NO: 865073 - DNA, 100 bp, Homo sapiens
ctgagcaaaaccaacctatacatccgaggattgcaaccaggcactactgaccaagatcttgtcaagctgtgtcagccagattattttgcagaggatgatg

SEQ ID NO: 865074 - DNA, 100 bp, Homo sapiens
ttacaggtataagccactgtgcctggccaaactctctatcaatatcagctcacatcattgaaaagataattttgaagacatgttttgctgaaaagacact

SEQ ID NO: 865075 - DNA, 98 bp, Homo sapiens
atctactctgaagatccctgtggtagagagaaaaatcctggatctgtatgctttgagcaagctttcaccaacaatcaccagtggtttacacaacattg

SEQ ID NO: 865076 - DNA, 100 bp, Homo sapiens
cgataagtgggttgacctgaccatggacgacattcgaaggatggaagaagagacgaagagacagctggatgaagaacctcggagagctgatagatcggtt

SEQ ID NO: 865077 - DNA, 100 bp, Homo sapiens
tggtcgcaagggaaacaactcctgagtatgttcacgatcggggtcagataccccatgtttccccatcactcgaggagtctgggcagagactggactacac

SEQ ID NO: 865078 - DNA, 100 bp, Homo sapiens
ggcaaaggcactggaggattgagctaggtgggcagaaaagagcaaggaggaacccgttttcactagacaagacagcaatcgcagtgaaaaggaagccaca

SEQ ID NO: 865079 - DNA, 98 bp, Homo sapiens
gaggagtggctggcacaagggtcagctgtccaacggggaaccagggctggctcggtgggacagggcctcagaggtgaaggtgacgaggcagaagatga

SEQ ID NO: 865080 - DNA, 100 bp, Homo sapiens
aagcctttcgcggagaaaaggctgacatgcccgtcctatatgacaggtgacttaagagattaaaattaatttggttgctgttggttctgaacaaataatg

SEQ ID NO: 865081 - DNA, 98 bp, Homo sapiens
tgcaaggaaaagttgaatgatgtatttgatcctgattctacccaagtacatatgatttcagctgcaatggcagaatttaagaagtgcaacatggccag

SEQ ID NO: 865082 - DNA, 100 bp, Homo sapiens
gaaggagccccagagctcaatgggggaccacagcatgcacttccttccagcagctacacaggagagaagcttcttgaagggcaggtgatccagctcgagg

SEQ ID NO: 865083 - DNA, 99 bp, Homo sapiens
ttcagttttcttcagaagaaggacttcggaatgcactacaacaggaaaatcatattatagatggagtaaaggcatgttatttgaaagcaattgagacgc

SEQ ID NO: 865084 - DNA, 100 bp, Homo sapiens
ccctggccatcaccatctggagggtgttgaaagcagcaggggcctagaagacattaaaccgataccacagaaatacaaaggatcattagagactattatg

SEQ ID NO: 865085 - DNA, 100 bp, Homo sapiens
ccaggagtttctgaccacgcgcaccaacgagaaggtgctggctgctgtctacaaggctctgagtgaccaccacatctacctggaaggcaccttgctgaag

SEQ ID NO: 865086 - DNA, 98 bp, Homo sapiens
ctgtgaagcagtgtgcgaagatttccaatcatttctaaaacctggaatggccaaatatcaaggtgaagttcaaagtttgaaactggatgatgattcag

SEQ ID NO: 865087 - DNA, 100 bp, Homo sapiens
cctttcagccaaatgccagactgattgtcatgctcagggaccctgtggagagggcacacgtgtttcacgttgacaggtttgcttgggacgctagtaacca

SEQ ID NO: 865088 - DNA, 100 bp, Homo sapiens
atgattttctttaaggatggtttagaaatggaaaaatgtgttttaaatgatacctgggtttccttcccttcgtggtctgaggactctacctttgtgagtt

SEQ ID NO: 865089 - DNA, 98 bp, Homo sapiens
ccatcgttgctgccttcttcgtcaaggtatatttggcccgaaaggaaggatcatcttttgcttatatttcctggaagtttgagtgtgggtcagttggc

SEQ ID NO: 865090 - DNA, 98 bp, Homo sapiens
catgacgacgctgctggccagggtccaggtatccagctcacatagaagacattgactacgaggaaggaaaagtactcatccatttcaagcgttggaac

SEQ ID NO: 865091 - DNA, 98 bp, Homo sapiens
gcagacttgaccgagtacctcagcacacattacaaggcccctcgaatggtgctggcagcagctggaggtgagggtcccgatgtcctggtgtacagctt

SEQ ID NO: 865092 - DNA, 100 bp, Homo sapiens
agccgctgccgctatggatgatcgagaggatctggtgtaccaggcgaagctggccgagcaggctgagcgatacgacgggttcagccgactcctacaccag

SEQ ID NO: 865093 - DNA, 100 bp, Homo sapiens
atggctgagagctagcaaggaaaactcaggaccatgatggctcagtttcccacagctatgaatggtcatcctgtacagttctacagcatgaataggcctg

SEQ ID NO: 865094 - DNA, 100 bp, Homo sapiens
ctacagagactgaagaggactcaggagcaaatcagtaatgtgccaatgggtcatgtttggttagaaggtgacaatctacagaattctacagattccaggt

SEQ ID NO: 865095 - DNA, 99 bp, Homo sapiens
tgccgacaacttttctcctgatttgaggggtcagtatagaccttctgatttgctgtgccctgagacatatgtttgggtacccattgagcaatgcctgcc

SEQ ID NO: 865096 - DNA, 99 bp, Homo sapiens
ccagccaacaggagattgctactctagacaacaaggtactagatgacaagaatgtgcgtcgtcgctttcgggcaagtaactaccagagcaccacccggg

SEQ ID NO: 865097 - DNA, 102 bp, Homo sapiens
gcagcgaagaggtggattctcattgcaaaaaggccctgagtcataaagagctatatgtgggcatccccaccatcagatggtgcggggcagagggggactaca

SEQ ID NO: 865098 - DNA, 100 bp, Homo sapiens
ggatactatggaattgtcaagggattgccaaatgactgtcagcaatgtgcctgccctctgatttcttccagtaacaagaatttatcaaagagctgctttc

SEQ ID NO: 865099 - DNA, 100 bp, Homo sapiens
ctcagcaccaacactgcagaagacttctatttctctctggagccctctcagttaccgtgcagacggtctacgtgcagcaccccatcacctttttggaccg

SEQ ID NO: 865100 - DNA, 98 bp, Homo sapiens
aacattcaaaaacgactcactttgagattgaaatatttgatgctcaaacaaggaaacagatatgtattctggataagcttctggtagatgaattgaga

SEQ ID NO: 865101 - DNA, 100 bp, Homo sapiens
tgcatgttggggaccacacggaatttgtcaaaaacctgctgccaaagtctatagcaattaccagctctggctgggtcgccacaacttgtttgacgacgaa

SEQ ID NO: 865102 - DNA, 100 bp, Homo sapiens
aaagcccttaagaaaaacgtcaaataaggagggttcctgcccccaggtgaacattaactttccccagctcggcctctgtcgggaccagtgccaggtggac

SEQ ID NO: 865103 - DNA, 99 bp, Homo sapiens
cagcggcgcgtgagcggcactgatttgtccctggggcggcagcgcggacccgcccggagatgagtttgcagaaaaaacttcagcatgtgccaggaacac

SEQ ID NO: 865104 - DNA, 98 bp, Homo sapiens
ctaagctttttccagagaagagaagctttactggtgttccagccctaagggggattttggcactcaaaaagaagctgcttgggccataagtaacttaa

SEQ ID NO: 865105 - DNA, 100 bp, Homo sapiens
aatattagttccgtcacaggggctatttgtttggatatcctgaaagatcaatgggcagctggtggaatttttgaagaaaatggaatctcgaggccccctt

SEQ ID NO: 865106 - DNA, 100 bp, Homo sapiens
cgccaagaagcacggcaccaaaaacaagcgcggacatggtccggcgaggagagatcatcgacaatgacaccgaggaggagttctacctccggcgcctgga

SEQ ID NO: 865107 - DNA, 100 bp, Homo sapiens
gaagattaaaaaactggagccagtccttttgccagatacattccaccgttgatctgggggaaaagtggacacatccagacagccttgtatgggaagatgg

SEQ ID NO: 865108 - DNA, 100 bp, Homo sapiens
aactccatcgccaagatcttggcccagcagacaggccgtagggtgttggagagcacaatggctgaacaagtccttcctcaggctttgtatttgagcaata

SEQ ID NO: 865109 - DNA, 100 bp, Homo sapiens
actttcctcaccccaaatatgtggacctgtacaagttgcttttgaaatcagaaagtcagtgcagggttgtagtgttgatgggctctacttctgatcttgg

SEQ ID NO: 865110 - DNA, 100 bp, Homo sapiens
tcccccttcttcaagacccacgagacttacctcaacacttcactccatggcagttcccgagacccgccctaaccacactatttatatcaacaacctcaat

SEQ ID NO: 865111 - DNA, 100 bp, Homo sapiens
tatctgtgataaagttggtcagtctcgcactgggtatttacttatgggatgtagaaggcagaaaatattttgacttcctgagttcttacagtgctgtcaa

SEQ ID NO: 865112 - DNA, 100 bp, Homo sapiens
aagcggtttcagatcagttgaagaaacatggatttaaattgggtcctgcaccaaaaaactaccaaaaggaagcgtggctacattaaaaataagctggttt

SEQ ID NO: 865113 - DNA, 98 bp, Homo sapiens
ggcgattcgtgttcgtgagggccttttctgttttcggctttgtgagaaaccttaccatcaaacacgatggccagcaacgttaccaacaagacagatcc

SEQ ID NO: 865114 - DNA, 100 bp, Homo sapiens
accagtggtcagcagcactgtttcctatgatcctaggaaacccactgtgaagagtgtcagttgtacccgaggcgttctcagcagcagcaagtacctgtgg

SEQ ID NO: 865115 - DNA, 98 bp, Homo sapiens
aaccttggatgaagaggatgaggaagcagacagcgatactgatgacattgaccacagagctcaggcatttgaaaggatgatgagtccaactggttcta

SEQ ID NO: 865116 - DNA, 99 bp, Homo sapiens
ggaagtatgttaatttcatggtacatgagtggctatcatactggctattatatggtcgttccaggggtagaggaggcatgaaggatgaccgtcgggaca

SEQ ID NO: 865117 - DNA, 100 bp, Homo sapiens
atgccaaggaaaaactggagagcttcatcaaaaatagtgatagctttgataagtgcgccaagttgctgctggaagcaggagcgacggtgaacctggcagc

SEQ ID NO: 865118 - DNA, 100 bp, Homo sapiens
ttgatggccatggcataaggaactctatcccaggaatacagctttgcattaggatgtaacagtccctcccaagcctgtctcgctccatcctttatatcag

SEQ ID NO: 865119 - DNA, 99 bp, Homo sapiens
ttcacttacgatcaggacggcgagcctattcagacgtttcactttcagctcctgacccctgaggattaccagcgatttctagacctgggcatctccatt

SEQ ID NO: 865120 - DNA, 100 bp, Homo sapiens
tgtatgcataatatggaatgttcttaacccagaagtagctgaatgtgttactccattgctgaggagtggcacctgaatggacagaagaggacctcagcca

SEQ ID NO: 865121 - DNA, 100 bp, Homo sapiens
aatgctgaaggtttacgtgagctttgcaccgagcgcctccgaaccactgcctctgggctcaacagaacacagggactactggtgcctggatgatctgtac

SEQ ID NO: 865122 - DNA, 98 bp, Homo sapiens
cctctgaaatatgctgaacaacttcctgtagctcagataatacaccaggcatgtggagaccccaaggcaaaaccatcctatcttatcgacaaaaacct

SEQ ID NO: 865123 - DNA, 100 bp, Homo sapiens
cttttcctggtgcatgtgaagttatcaaaaacagagaatcacattttggaagatgtgaacaaatgtgtcattgctctccaagagaaggatgtggatggcc

SEQ ID NO: 865124 - DNA, 98 bp, Homo sapiens
cggtgccgagaccccatcaacgtggagggcctgctgggtcagtatagaccttctgatttgctgtgccctgagacatatgtttgggtacccattgagca

SEQ ID NO: 865125 - DNA, 100 bp, Homo sapiens
ctcgaagtatctcaaaaagtcgctcccgcgttacagtgtttctgccacctctgtacaaaagacaattttacttgtgtgacagatgggctctgctttgtct

SEQ ID NO: 865126 - DNA, 100 bp, Homo sapiens
gcagttaaatggactgtcagtcagtgaaggtcatgattctgaagatattttgatttctgctcaggcatttatattctgagagaggcctcgcctgattcct

SEQ ID NO: 865127 - DNA, 100 bp, Homo sapiens
aatcttcagaagagccaaatccaggggaagtagcaggcttgcaatcttcagttgggagctgaaagtgccgacagcattggtgccgtgttaaatagcaaag

SEQ ID NO: 865128 - DNA, 100 bp, Homo sapiens
gacttgtggctacacttctggccagtttgacctggaccaatgccaggattcagagactgggacgttttatcaaattggagattcatgggagaagtatgtg

SEQ ID NO: 865129 - DNA, 98 bp, Homo sapiens
caccaaggagcagtttcaccaattcctggaagccaaagggcaggagaagacttgccgggaaaccgagtaagcactatcctttgtactccctcaacgtg

SEQ ID NO: 865130 - DNA, 100 bp, Homo sapiens
gggtccttgcggcgaataggagtctggtcaggcgtcaggctagtccgacgaagagtgggctatgtatgtcaaaaaggatgttcctttgtggcaaaaacat

SEQ ID NO: 865131 - DNA, 100 bp, Homo sapiens
ctccatcttcgcggtagctgggaccgccgttcaggttgagagcaccattggatgcttactttcaggtgagcaggacccagcctgacttgccagctaccac

SEQ ID NO: 865132 - DNA, 98 bp, Homo sapiens
gacaacgagcagctcatcacccagtacgagcgggagaaggcgctgcgcaagcacgctgaggaggaagaggagcaggacttggatggtgagaaggggcc

SEQ ID NO: 865133 - DNA, 98 bp, Homo sapiens
tgtgctggccgcgggagaggtaaacagaacaccaggacatcccagagtctgggaaatgtggtggtcctgctccatgatgtccgtgatgtgagcgtgga

SEQ ID NO: 865134 - DNA, 99 bp, Homo sapiens
tctggggccttaaagccccttcgtctccccagcacccactctctgggggcaggtgggcccggtgacaggttgctccgactgtgtgttccaggagtggtg

SEQ ID NO: 865135 - DNA, 98 bp, Homo sapiens
ttctccgtccctttccagggagggaacaaagcccacagcaccgttccttcagtgatccttaaagagtggtctgcctataaagggaagtcacctcaaac

SEQ ID NO: 865136 - DNA, 100 bp, Homo sapiens
ttgtcattgatggtctcaatgttgccaaaatgtttcctaaagttcgtgaatctcaactttgtgtgacttccttggagagaagattgcatctgttttgggt

SEQ ID NO: 865137 - DNA, 100 bp, Homo sapiens
ccacagcccccgccattccctatggagcctacaatggcccagtaccaggctatcagcaaacacctccccaagcttcacatattccatcatctaaaactgc

SEQ ID NO: 865138 - DNA, 100 bp, Homo sapiens
tccctgacctggtcctcatgctgccgaggctgttgctgttgatctgtggacaaggtgcaacgctggttgatagaggagataatacatatggaggaaagtg

SEQ ID NO: 865139 - DNA, 99 bp, Homo sapiens
ttccttgcaaagggcacgtatagcattggtaaagaacgatcgtccagtggaggtatgatctcgtgaaaccttgagagaaactgaatgacgaatgaaact

SEQ ID NO: 865140 - DNA, 100 bp, Homo sapiens
cgctcggccgccttctaccaggagcctgatccgtgccgcccgccgcccggatgggaccaccagagtgctataaccatgatgactacacagacttctacta

SEQ ID NO: 865141 - DNA, 99 bp, Homo sapiens
agcaaacagagattcgggttctgccgcttatcttcaggagcgaagagctgcttctgtatcttaaggtgccagcgagatttcagattcctgtaaacctct

SEQ ID NO: 865142 - DNA, 98 bp, Homo sapiens
ccaactcgttgtttgcgtgcaatgttcaccagtcagtgtttgaaggagaagagagcaaggggctgattcaggagatcaatgatttgaggttaaaagtt

SEQ ID NO: 865143 - DNA, 100 bp, Homo sapiens
atgtgtactgagcagctaccatgttcaagacttcacagagaatgcagttgtcttgacttcaggtctgtctgttctgttggcaagtaaatgcagtactgtt

SEQ ID NO: 865144 - DNA, 100 bp, Homo sapiens
cgaacaattggaggagacctggtggaaaaggttgatctcatagacaagtttgtacatccaaaggaccttctgatgaaacccctcatgactatgttctgat

SEQ ID NO: 865145 - DNA, 99 bp, Homo sapiens
tgaaaatggccatactgcccaagatgtaaagaacctatatccatcatcatctccttatacaagaaattgggataaattggttggtgagatcaaagaaga

SEQ ID NO: 865146 - DNA, 100 bp, Homo sapiens
agttgaaaccgatgaatcgcaaggtatttttgttgaaaagaacatgattcacaactgctccttgattgcaaggttatggaggttttgatgactatggtgg

SEQ ID NO: 865147 - DNA, 98 bp, Homo sapiens
gggctcagcctctgccaggactctgccacggcaagctcattcggacaaacgcctgtggacccgtgcatctcttccgactctcgggcaagtgcttcagc

SEQ ID NO: 865148 - DNA, 100 bp, Homo sapiens
cgcgaaggcagtaccgtttcctcagcggcgggaaagtgatgaagcattgggcccaacaatgatgagttggaatgcagttgaaaagttatgcgcaaaatct

SEQ ID NO: 865149 - DNA, 100 bp, Homo sapiens
caagagtcataggattagatgatccaagtcaccaagaaattactgtctcaagtgatacgacgtttggaacagaacacaatcaaagtcatccctcctggag

SEQ ID NO: 865150 - DNA, 99 bp, Homo sapiens
tccagctccgctctcttcggctgccccaatccccggcagctctctcagcgatgccctcctagctagccgtcacgggatggagggcttcatggactcagg

SEQ ID NO: 865151 - DNA, 128 bp, Homo sapiens
gatcattcacaatatctgtgtcgttcttggcagaaattatattttccagcccgtgtctgcaggtgtttcaggcctcacctgaagatcatgaaaaatacggtggggatccacagaaccctcataaactg

SEQ ID NO: 865152 - DNA, 100 bp, Homo sapiens
ggagactcagtgcagacctgcacaaacccactggacaccttcgtcccctttgatccctgtgtgctgaagagtctaacaaagtgccagtggtgcagcaccc

SEQ ID NO: 865153 - DNA, 99 bp, Homo sapiens
tttctcctcagcattctgcagtagacccgttactccctgccacagatcctcatccaaagatcaatggtacagccaaagaccggagctttggagagatga

SEQ ID NO: 865154 - DNA, 100 bp, Homo sapiens
tatctgaggccaaacccgccactccagaaatccaggagattgttgataaggaaaatcctgccttgcttcgttgggcctatgcaagaacaataaatgtcta

SEQ ID NO: 865155 - DNA, 100 bp, Homo sapiens
acagtctgaactcttctgctcaggagcgcctaataccacttggctgcaagatgaacaacgttaatgtggtatatacgccgtggtctaacctgaagaaaac

SEQ ID NO: 865156 - DNA, 99 bp, Homo sapiens
ggctggccaggagcggtttcggattcagcaccatggcggaagacatggagaccaaaatcaagaactacaagaccgccccttttgacagccgcttcccca

SEQ ID NO: 865157 - DNA, 100 bp, Homo sapiens
aggatcctgtctctggcccgcaatcaccccttcctcactcagttgttctgctgctttcagacccccgtctggtccgagagcaggaggctgggctgctgca

SEQ ID NO: 865158 - DNA, 101 bp, Homo sapiens
gggcagcaacgtgactctggtctgcatggccaatggccgtcctgaacctgttatcacctggagacaccttacaccaactgttggccacggacagagcgaag

SEQ ID NO: 865159 - DNA, 100 bp, Homo sapiens
ctcttccaaaagcgcagaccacagttacatgtatggagaatggctggtctcctactcccagatgcatccgtgtcaaacgaaaagggtcttggtcagagag

SEQ ID NO: 865160 - DNA, 100 bp, Homo sapiens
caaatgcaagtccaagaggaggaggaggcggaggtccaagcggaaagccagagactgctgctactttgaaacgtacgatagaggccctgatggacagagg

SEQ ID NO: 865161 - DNA, 98 bp, Homo sapiens
gcaaagagccccgaagctaagagcccccttcagtcgcagcctcactctagtttcaatagtcatgggcattcccacagtgaagagagaagttaaatctt

SEQ ID NO: 865162 - DNA, 132 bp, Homo sapiens
gcacagaaactttcgcaagtggattttctacgtgtttctctgctttggcgtcctgtacgtgaagctcgggtgtgaccatgaagctcatggatgaggtcgccgggatcgtggctgcacgccactgcaagacca

SEQ ID NO: 865163 - DNA, 100 bp, Homo sapiens
gtgttattcagaccaaagtgaaacatcgtactccaatggatgatgatgctgaagctatccttgctgcagacttcgaaattggtcactttttacgtgagcg

SEQ ID NO: 865164 - DNA, 99 bp, Homo sapiens
accagtgagagcattttggaagaggaaccacaagaaaatcaaaagaaacttttgcccttatcagtaacacctgagggacatggatgaagctggaaacca

SEQ ID NO: 865165 - DNA, 99 bp, Homo sapiens
cctggtgctctgcgtcctcatcgggcttatgttcgaggtacaggattatcatggtcataaaatttgtgacccttacgcctggcttgaagaccccgacag

SEQ ID NO: 865166 - DNA, 100 bp, Homo sapiens
tttggacctccgcttgacatacagatactgcaccagtttttccagaaaggaggagtcaaggaagcccttagtgaacgagaactcttcaatgctgtttcag

SEQ ID NO: 865167 - DNA, 100 bp, Homo sapiens
gaaagaaagcaccccagagccaaggcaaagaggtctgtgtgtcatgattgcggcctccatttatacagacaggcgtgaagacattcacgacaaaaacgcg

SEQ ID NO: 865168 - DNA, 100 bp, Homo sapiens
cagctgctcagcttcacctgagggatccagtggcaaaagaagattggcccatgcacaagctggaatgttctcccatggttgtttttggggaaaactggaa

SEQ ID NO: 865169 - DNA, 147 bp, Homo sapiens
aatgggaacaaattgtcatccgtggttccaagtgtctataagaacctggttcctaagcctgtaccacctccttccaagctgaagaaatcaggggagaaacccctgcttggtggaagcctgatggaatatgcaatcttgtctgccatt

SEQ ID NO: 865170 - DNA, 99 bp, Homo sapiens
aaaatattattgcaatctatgagaaagccattctggcaggggctcagctgggatctagcaattgggaggcagcagacttgggtaatgaagagagaaaac

SEQ ID NO: 865171 - DNA, 140 bp, Homo sapiens
cggggaggagtttcatgaagagcccaaaacctattacgaactcaaaagtcaaccgctgaagagcagtgggaaagaagcctaaggaataaagtcatctctctagaccataaaaataaaaaacatatccgagggtgtcctgt

SEQ ID NO: 865172 - DNA, 104 bp, Homo sapiens
gagggtaaaaggctgagaagcttaagatgtgaatttcttcggagtaagaaatcctcagaggaaattacccagtatattcaaagctacaagggatttgttgacat

SEQ ID NO: 865173 - DNA, 98 bp, Homo sapiens
aacttgtgtgttaaagtaacagatgatttagttcaatcaggcaggaactgagcaagtcaaatactgcatagaggaacagactaaggagagataggact

SEQ ID NO: 865174 - DNA, 98 bp, Homo sapiens
gcccgccttccgccgtctcttcgagttcttcgtgctgctcaagctacagagggccggagctggagatgtggtctctgggagtcactctgtacacgctg

SEQ ID NO: 865175 - DNA, 100 bp, Homo sapiens
tgaccccattcagctttgagaactttcagtcccaagttactcaggtgatagaggtaactgactatactactggcagagttggagcacctcttatttgctg

SEQ ID NO: 865176 - DNA, 98 bp, Homo sapiens
ctctctcagaagatcagatgagccgtcttgccaagtacactgtgtggaattttgttccaaaaaatttatttgaacagttcagaagagtggcaaacttt

SEQ ID NO: 865177 - DNA, 100 bp, Homo sapiens
atcgggagcaacgtcacgctcatcaccctgaactcggaagaattctgcttggtcagaatcgtgatggcattgtgttcagcactgatgactattttcacca

SEQ ID NO: 865178 - DNA, 100 bp, Homo sapiens
atctcctggaaagatgtaaatctcccaagtccaaaggatcagcttgaacgggtctttttacgacttggccatgctgaaacagatgaacaattacagaata

SEQ ID NO: 865179 - DNA, 98 bp, Homo sapiens
gcagctcttcaaactcacagacaacatacaggacgaattgatgccccagtgaagttgtgtgactttggatttgccaagattgaccaaggtgacttgat

SEQ ID NO: 865180 - DNA, 100 bp, Homo sapiens
ccatatacttcccatgataaacttaagattgatgcactgagtaaaagaagcaaggaagctgaagcagctttcttgaatgtctacaaaagattgattgacg

SEQ ID NO: 865181 - DNA, 99 bp, Homo sapiens
gcctggacaagcggaccccggcccaggcggccttcgagaaaatgcaggagaagcggagtgcctggtgaagaatgtgatgggatcactagcatgtctgcg

SEQ ID NO: 865182 - DNA, 100 bp, Homo sapiens
gctccgtcaatggcttcatcagcactttgggatgtcatctgggtgattctcagtgtggaggtgggtggacttttaggagtaacgcagcagctgtcatctt

SEQ ID NO: 865183 - DNA, 100 bp, Homo sapiens
ctaccacctgggggctgcgggagccaccaaaggttaatttggagtggcccctggagtcagtttcctacaccatccgaggccccacccagcacgagctaca

SEQ ID NO: 865184 - DNA, 100 bp, Homo sapiens
aaagattacagagaaaaaaccaacaccttcctgtgcagtcctgttggaatttcaaatgaagaaacacccctgccgccagtgtgacaagtctttcagctcg

SEQ ID NO: 865185 - DNA, 99 bp, Homo sapiens
tacaaatcacacgcataatggatgaaaggaaccgacagatatgagatcctgactccaaactccattcccaagggtttcatggacgggaagcaggcgtgc

SEQ ID NO: 865186 - DNA, 98 bp, Homo sapiens
ttgggttgtactcatagattgtgtaggcgttggtcttctgatagcaactttaatgtgggtgtatgccatgtacaattccgtaaagggatcctgctccg

SEQ ID NO: 865187 - DNA, 100 bp, Homo sapiens
gaggcaccacgtctctaccgagcacaaactccacgaagccaacgcccagggagtagattctgctatcttggcctcacagcccttcctgttgattacaaag

SEQ ID NO: 865188 - DNA, 101 bp, Homo sapiens
cctgatgaaaacatcaccaaatgatgaacccacgagcaaaaagggatttctactatttagtacctcaagacaaactcttatgtggattccagattcttttt

SEQ ID NO: 865189 - DNA, 100 bp, Homo sapiens
tgcatggttggaaggatgttcaaaacagtgacatcacttcagtgcataacatgccaccttcgcacacggacagaccgctgtagaagaggctttggtgtct

SEQ ID NO: 865190 - DNA, 100 bp, Homo sapiens
accggggcgtcggcatgctcacccgcctctacaacatcaagaaggatttgaatttgttgaaatgagcagtcgtaaatcaaagagtaacagcttaattcac

SEQ ID NO: 865191 - DNA, 100 bp, Homo sapiens
ccaggagaagaaccagcaggctctgtggttcaggactcccgacttgacacgatattttttgctaagcaggttgccacattcatcctccagaagatcttgt

SEQ ID NO: 865192 - DNA, 100 bp, Homo sapiens
gttggccactcactacctacaggaccttaaaggttactggagttggctataatcaatttggggaagtgattgttgatggtgatgttgttcatggattcta

SEQ ID NO: 865193 - DNA, 98 bp, Homo sapiens
aatggcagaataatctgcttccatcccgccagtttggcccacggccgccaatcccactctcgctcctgctgacagaagaggaagcagccctctacatt

SEQ ID NO: 865194 - DNA, 137 bp, Homo sapiens
agcaatgctgccagagactttgttaactatttggttcgaataaatgaaataaagagtgaagaagttccagcttttgggatgagacaaggggccttcctggtgaacacagcccggggtggcctggtggatgagaaggc

SEQ ID NO: 865195 - DNA, 98 bp, Homo sapiens
ctttgtacgttgtatcatccctaatgagacaaagtctccagggcccccatccatgcaggtaaccatcgaggatgtgcaggcacagacaggcggaacgg

SEQ ID NO: 865196 - DNA, 100 bp, Homo sapiens
ctcgaaatctcctgacagtgttaatggaagtgaaccaagcattcctcaggagccagcaccgctctttgaccttgccatgcttgccttagatagtccagag

SEQ ID NO: 865197 - DNA, 99 bp, Homo sapiens
agtgcagtatgagctacatgtttgagtacccggagtatcaggaaatgcttccagactgcacacttttacttagaggacagtacatcccctagagttata

SEQ ID NO: 865198 - DNA, 98 bp, Homo sapiens
gcgagttcgcggagcgcggcgccagaaagggaactgtctgggacctttgctcatctgtgtcagcaagttgacgtcacccgggagaacctggagcagga

SEQ ID NO: 865199 - DNA, 100 bp, Homo sapiens
tactctttcctcgtggaatttgaagattctacagataaatcagcaaaagagtgcattgagaagagtcttctattactaaaatttctgcccacgggcataa

SEQ ID NO: 865200 - DNA, 99 bp, Homo sapiens
ccaaaggatattttgaagatgtggcaaatgcaatggaagaggcaaatgaagagatttttatcacagactggtggatcagaattcaggctataaatgaaa

SEQ ID NO: 865201 - DNA, 100 bp, Homo sapiens
ggcttagaggacttccctttggatgtagcaaggaagaaattgttcagttcttctcagttgagccccatatgggggttggcaggcagcagagaggcccctt

SEQ ID NO: 865202 - DNA, 100 bp, Homo sapiens
accgagtctgtgcaaagcctcctgcttggaactctaatgatccaggacaaagaagttaccctggagtatgtatcaagcctggatttttggtactgcaaac

SEQ ID NO: 865203 - DNA, 98 bp, Homo sapiens
ccgaatccagaagcaaatggctgcttttaaagagggaagaaatgatttcccttggggatggagacatcaggaccatgtgcccccttctgtctatgaaa

SEQ ID NO: 865204 - DNA, 100 bp, Homo sapiens
agagcggcagtttcgtgagcgacctcagcaggaattactctcacttccaccacccgatgtatggaaactgctatactttcaatgacaagaacaactccaa

SEQ ID NO: 865205 - DNA, 99 bp, Homo sapiens
tcaccaataaattttcatcctgagtctagatcttcagatagttctgttattgttcagcctttttctaaacctgttggaactcagtttatccgtggtgtg

SEQ ID NO: 865206 - DNA, 100 bp, Homo sapiens
ttagaaagatctatagcactctggctggcaccaggaaagatgttgaagtgactaagggcagagtggcatgattccgactggatactctcagtgccagcca

SEQ ID NO: 865207 - DNA, 98 bp, Homo sapiens
agacatccctgaatcttggtgtttggacataggaggttcttgattattacagacctctttctgaaaagcccggaattggtacaagccatgtttcccaa

SEQ ID NO: 865208 - DNA, 100 bp, Homo sapiens
tcctccctcttctcccgactatttggcaagaagcagatgcgcattttgatgggatgttgagaaagaactggagatgcagatcagcatgaggcaggagatg

SEQ ID NO: 865209 - DNA, 98 bp, Homo sapiens
tatcctgatggtggagatcaggaaactgcaaagactgggaagttcttaaaaaggtatgaaccctctcgtgagatgaaaagtcagtggacagctgtctg

SEQ ID NO: 865210 - DNA, 98 bp, Homo sapiens
gggacgcccgcggagagagccactcccgcccacgtcccatttcgcccctcgcgtccggagtccccgtggccaggtttctgagtcccttcaacatgatc

SEQ ID NO: 865211 - DNA, 100 bp, Homo sapiens
taccaagggcccagcagggacccagaccagaaaggcaaggctgaatccacctccacaatgccgctctcaggaaccccggcccctaataagaagaggaaat

SEQ ID NO: 865212 - DNA, 100 bp, Homo sapiens
accatacagctgtgagactgaacaaatgagtttaaatattatacagtagaaaagaaaactgactttggaacttaagggaaaaagacctcgatgaagttct

SEQ ID NO: 865213 - DNA, 99 bp, Homo sapiens
agagttggagccaattaaaccagaatcaaaaagaccctctggctgtggacaaaataatgaaggacctggaccagtgtagagatggcaaagtgggcttcc

SEQ ID NO: 865214 - DNA, 100 bp, Homo sapiens
caggttattctcgttcaagttaatccaggtgagactttcacaataagagcagaggatggaacacttcagtgcattcaagcaatggctgccatccggaaga

SEQ ID NO: 865215 - DNA, 100 bp, Homo sapiens
actgagatgaggaggcgtcgcgcgcgcctgtagctcgcgggcctcgcaggctatttttatgattcccacaaatccaccaccaacattcagaaagccagaa

SEQ ID NO: 865216 - DNA, 98 bp, Homo sapiens
aaggatagcactaaagacagctttcagattgccaccctcatctgctccacaaagctcacccagaatggtatgactgattttcccaaaatattttgtga

SEQ ID NO: 865217 - DNA, 100 bp, Homo sapiens
ttgaccaatacattggacacacctaccaagagattggatctgatgatgaacgtgaacaccagaggcacctaccttgcgttgcaaaagcttctcatttcag

SEQ ID NO: 865218 - DNA, 100 bp, Homo sapiens
taaccagccgcagcttccgtactgccagtgtcagcatcaaccagacaggaaagcagctggcccttctcaagaccaattcggctgtccggacctgcggttt

SEQ ID NO: 865219 - DNA, 98 bp, Homo sapiens
gagctggtgccgagcagcggcgccaggagcccgtgcgcggcccgggcagccgcgctttcccaggaactctaatgatccaggacaaagaagttaccctg

SEQ ID NO: 865220 - DNA, 100 bp, Homo sapiens
gaggacccccaggcactcctggagggtgtgaagccacagcaattgtctgctattttaaaagcactgtgatgcttaaatattccagctgctacatcggaca

SEQ ID NO: 865221 - DNA, 100 bp, Homo sapiens
agcacagagactgcatcctcatgaagtgatgcagaggatggaagttcaaaggaggaggatgatgcagcatccaacgcgggatcgctttgttggtcaaagt

SEQ ID NO: 865222 - DNA, 100 bp, Homo sapiens
gcgccgccgcgtcttcccggtctcctttcccggccgcacaggaacattctagtatgccagtagaaaaaaatatcactttagaaaggccttctaatgtaaa

SEQ ID NO: 865223 - DNA, 98 bp, Homo sapiens
gccagcacagtggttttggcccccagcccaaccctgagaaagttcagaaccacagaggtggtttgtgctccccctactgcctatatcgacttcgcccg

SEQ ID NO: 865224 - DNA, 99 bp, Homo sapiens
agaaaatgctttcagctgggtgtcaagaacttttcaagagtggcagctgttgaaatcaaaagagtggccacagaaggtctacttccccagcaggacagc

SEQ ID NO: 865225 - DNA, 100 bp, Homo sapiens
caatgccattgaattctccaacaatggaggccagtggctggtctcagggatttagtgcaagaagaagaacagttgatggaagaaaagaaaaagaaaaaag

SEQ ID NO: 865226 - DNA, 100 bp, Homo sapiens
aagcaagagtttgttatatagcatttgtcccatgaggagcacccccatagccatcctctctatggacatggtgtatgcaagtggccaggctgtgaagcag

SEQ ID NO: 865227 - DNA, 98 bp, Homo sapiens
gagtatgcagtcacagtccaggctgtcctgcacgacctcactagtgaacctgtcactgttcgggaagtcacctatgaggatgggtggcgtgcggaaca

SEQ ID NO: 865228 - DNA, 98 bp, Homo sapiens
ctgaaacagaaaccacctctgccatcctcgcctcagtcaaagaacaggctccatggtccccttctcgatgcgcatcttgcacgcggagcttcagcagt

SEQ ID NO: 865229 - DNA, 100 bp, Homo sapiens
caactacctgcagccgcagctggactggcaggcccgagggcgaggcgggcaaaactgttccgatttgcctctgagaacgatctcccagaatggaaggagc

SEQ ID NO: 865230 - DNA, 98 bp, Homo sapiens
tatcccatgggcaaacctcctttgcctagaggctatcacacgggagtcctcttggtatatgatattacaaattatcaaagctttgagaatttagaaga

SEQ ID NO: 865231 - DNA, 100 bp, Homo sapiens
cctctgctctccgggctcaagcaattctcccacctcagcctggcactgcaggaaaggaaaaggaaaattttggacgaagctgtggaattaagtcaagatc

SEQ ID NO: 865232 - DNA, 98 bp, Homo sapiens
cagaattcgtcagggtcagatcatatgaatcccaaatggttatccgtccccacaagtcatttgatgaggttcctgtgagaacaacatctcgctcccct

SEQ ID NO: 865233 - DNA, 100 bp, Homo sapiens
aaagcgtgaaaaaagaagcttattaaacaagaatttagaggagaaactgacggtgtgatgaatgcagactctgctaccattttggctgtttggatcctcc

SEQ ID NO: 865234 - DNA, 98 bp, Homo sapiens
ctaccaatcgtgaaaactatattcacaggtggctttggtggcagccgtggtggtggtggatatggtggcagtggggatggctataatggatttggtaa

SEQ ID NO: 865235 - DNA, 106 bp, Homo sapiens
aattgttgaagagttcaactttcccagaagttgttctaacgctgcctttgctttaaaacagtattacttgcgggacatgagagatggctttagaagaaaaagtttc

SEQ ID NO: 865236 - DNA, 100 bp, Homo sapiens
gttgctgaatgctataaagccaggacttgttaaaaagatcaatagattgcctacccccattgcaggactgctccaaaaggaattcttcatttgtctcctg

SEQ ID NO: 865237 - DNA, 100 bp, Homo sapiens
ggaatgcttttttatctcatattagtgcctgtgatggcatctttcatctaacactccctcctcctatgtctccatcctccaaatctgtgagcactccaag

SEQ ID NO: 865238 - DNA, 99 bp, Homo sapiens
cagacccatttccagtcatgagagtgggaatagctttgcgaaaaatgggcgcaatggccaagccagattgtatcatcacttgtgatggtaaaaacctca

SEQ ID NO: 865239 - DNA, 100 bp, Homo sapiens
tcaccgccaggacctccttcttcaggagagcgccccagggcaagccccgctccggccaacaaggggggccctcagcctcttggccttgaacgggctgttc

SEQ ID NO: 865240 - DNA, 100 bp, Homo sapiens
gcaactctcagttcgagagtaaaggccttgctattttggaagctacaagaaaaaaatagaggaaggaaggtttggtctttttagtggacatggctcagat

SEQ ID NO: 865241 - DNA, 100 bp, Homo sapiens
tgagatcagagtcacgcccttgggaaggagctgacagccgaggcccgcgagctgaagggtgagctctactgcctgccctgccatgacaagatgggcgtcc

SEQ ID NO: 865242 - DNA, 100 bp, Homo sapiens
caggttgcatggtcaataaaagagagctcacagaagatggacttgaaaaaaactttgctgccaatactctgggatgctggatgagtactttgaggagcag

SEQ ID NO: 865243 - DNA, 100 bp, Homo sapiens
ttttgaacatgccgtggaagcttctaaactttctagtcaatctctggctgatgaacttgctcttgtggatgttttggaagataagcttaaaggagaaatg

SEQ ID NO: 865244 - DNA, 100 bp, Homo sapiens
ggaaagcccaaaggcgatgccacagtgtcctatgaagacccacccactgccaaggctgccgtggaatggtttgatgcccgtgttcccaagaaaatcctca

SEQ ID NO: 865245 - DNA, 98 bp, Homo sapiens
ggaaccatccttggaaatcctgccgcggacttctctgcacagcatccctgtgacagtggagaacatgcagctgaccctgaacctgcagacggagaaca

SEQ ID NO: 865246 - DNA, 98 bp, Homo sapiens
tggatgccctcaagtcctggctggccaagttactggagccgatggaattagaatcatggagatgctgctaaaggaacagtgtggtgcccccttagctg

SEQ ID NO: 865247 - DNA, 100 bp, Homo sapiens
gtcatctttctgaaatggtgatgaaattggaattgggtttacatgagggaaggtattcatgtaaatcaagaattactgcaaatatctccttgtatcacag

SEQ ID NO: 865248 - DNA, 98 bp, Homo sapiens
ttagttagcgtgtcctctgaaaggtacttggtaccaaagcagtcagactcacagcctaattctgataacctaagtcgccatggtgaatgtgggaaaaa

SEQ ID NO: 865249 - DNA, 98 bp, Homo sapiens
gccgccgcttgtgctgcagccatggtccagggagtcggtagtaagggatggcgggacgtcaccacctttttttcggggaaagcagagggccccttgga

SEQ ID NO: 865250 - DNA, 100 bp, Homo sapiens
caggggttatcaccatgcaagctttgtcggaagaggaccggaggctctggatggaagccatggatggccgggaacctgaacttcctgtagaaaagccccc

SEQ ID NO: 865251 - DNA, 100 bp, Homo sapiens
gcccagcattaccaagacacgctgattagagcgaagagagagaaagcccaggttcaagaagacgtggaagctgcgggctctgaaggaaggcaagacaagc

SEQ ID NO: 865252 - DNA, 141 bp, Homo sapiens
cggatcagacacctagatgacatggtgcattgccagcagaagaaagtcaagcagatggtcgaggagtttgtgaagaaatatgggaacctttttagcttggagcttggtgacatatctgcagttcttattactggcttgccc

SEQ ID NO: 865253 - DNA, 100 bp, Homo sapiens
tgttctgtatcagaagacaatatcatgcaagtgtggcaaatggttaggaattttagacccagttctgctactgactttctgtgtggacacaaactcactg

SEQ ID NO: 865254 - DNA, 99 bp, Homo sapiens
cagcttcctgaccaatgacatccttcacgagatggagcactacggcgggactgccaccttctacctctctcaagcagccgatggagccaaggtgctgtg

SEQ ID NO: 865255 - DNA, 100 bp, Homo sapiens
cgggtggaggcgcgtctccggcacggtagctacagcaagctgggtagcaggcagatccaaaggatatcatgaagtttccagggcctttggaaaaccagag

SEQ ID NO: 865256 - DNA, 100 bp, Homo sapiens
tgaaacatgtgaacactcaagtgaagcaaaagccttccatgattacgttgcagcatgcagagatactggatatgactggtttgagcaactgcttcaaaac

SEQ ID NO: 865257 - DNA, 100 bp, Homo sapiens
tcagcagcagcaactgtgggactttttgactacaattctcaacaacaggtcatcatggtcacaggagaccatccaatcacagctaaagctattgccaaag

SEQ ID NO: 865258 - DNA, 99 bp, Homo sapiens
gctgatcggaccggccactcaatattgcacacctcatatgggaggtgtctttggtgcaacactaacaaggcttgtctggactacccagttacaagcgtc

SEQ ID NO: 865259 - DNA, 98 bp, Homo sapiens
agcaaatgtaactcagcgaattgtaatggaaagcatatggacaggtctacgccacatcacttaggaaaggcagcaacaggtggaagctgttgagttgg

SEQ ID NO: 865260 - DNA, 100 bp, Homo sapiens
aaccacctcacagattccagcttcggaacaagagaccctggtatgcctgtgtcaagatgaggtcacggacgattacatcggagacaacaccacagtggac

SEQ ID NO: 865261 - DNA, 98 bp, Homo sapiens
cagagcgaagaatgctgtggatttctcgcagttaacatttgacccaggacagaaagaacttgttgtaggagcaagaaaacagctccttgaacacagtg

SEQ ID NO: 865262 - DNA, 100 bp, Homo sapiens
aaggaaaggaaaggaaaggatgccagagccctgatgaatcttcacaacaacagagctggcaggaaggtggtgcccaggcaacatgggtgactggagcgcc

SEQ ID NO: 865263 - DNA, 100 bp, Homo sapiens
ctacagactgctggctgtgtgtgctgcaaaccgagacaagttcaccccgaagtctgccggatggaatggccgtatgcatgttcatgcaaaacaccttaac

SEQ ID NO: 865264 - DNA, 99 bp, Homo sapiens
tgaggaagaagaggaggaagtaaatcgagttagtcaggtttccacttgagcggcacagtgacagaacctgcaatacaatcggagccagaaactgtttgc

SEQ ID NO: 865265 - DNA, 101 bp, Homo sapiens
tccagaggccccggcgacccctgctccccagtcctccgccccctcgcgtcgcggccctgggcgggcgccgcgagccgggaatgctgtctctgcaatttgag

SEQ ID NO: 865266 - DNA, 99 bp, Homo sapiens
gaaagtggactgtccggggccgggctcaggagcagagtatgtgggtgccccggtggcttatgtccagcagatatttgtgaagtcctcagtgtttccctg

SEQ ID NO: 865267 - DNA, 100 bp, Homo sapiens
acttgaacaacctaccaagtgatgtgaaagggctattgcaagacacgaagtccgagaaattgagcagcgacatacaatggatggccctcggcaagatgcc

SEQ ID NO: 865268 - DNA, 119 bp, Homo sapiens
ggcacttccggtctcgtgccgccttcccaggaccctcagggagagcgggcagccttccaggtggacaggatggggaagcagaatagcaaactggcccctgaagtgatggaggacctggt

SEQ ID NO: 865269 - DNA, 98 bp, Homo sapiens
aaactactatgcatgtaaacaaatgaagcagcgctttgaaagcttgactgtagtagactctgatggagctaccaactctactactgcaaacctgacag

SEQ ID NO: 865270 - DNA, 99 bp, Homo sapiens
tctctcttagctccagatttgatggccttcacaatccaagttccacaatatattgactactgccacaattccgcttgagaatgccagactgtcatcaga

SEQ ID NO: 865271 - DNA, 98 bp, Homo sapiens
ccagagctgaggactgcctgtttgcaggtggtgattctagatgtccgggttccctgcacacctgtcgccaggttaaacaaccatcgagcatgtgtcaa

SEQ ID NO: 865272 - DNA, 100 bp, Homo sapiens
gtgaagctgtttctcaagaaaccatcagaaacacaggagctagtccagcaggtcttgagtttggcaacacaggttgtacgtggacactataaaggtcagc

SEQ ID NO: 865273 - DNA, 100 bp, Homo sapiens
atcggcggagaccctcgaagtgcgcaaacttgacactcaccctgaccggaaagctccaaccatggccatggggctcttccgcgtgtgtctggtggtggtg

SEQ ID NO: 865274 - DNA, 98 bp, Homo sapiens
gcgggagcctcgtggctgcgtcaccgccgcccccccagacaagatggacaccgcggaggaagaaggaagaatcctgctcaaaaatgaggtgaattaat

SEQ ID NO: 865275 - DNA, 98 bp, Homo sapiens
gagatccaagtgcgcgccctggcgggtccggaccaagggcagactttgacgacactgcgacatactcagcagtggccaccaatgcccacggacaagtg

SEQ ID NO: 865276 - DNA, 150 bp, Homo sapiens
gggtgatcctggaaccgttgattggagatatgcccttagttggagctttgtctatcttcttccttaggaaaccaaatgtgcccccagacctctccatctgcacctttgtgctggagcagtccctctctgtccgggcgctgcaggagatgc

SEQ ID NO: 865277 - DNA, 100 bp, Homo sapiens
cgtggaggagctgtgcagccgcgaggaggcgcgggaggtgttcgagaacgaccccgagacggtgaccttggagaaggtgctgggaattacagtgtctgga

SEQ ID NO: 865278 - DNA, 100 bp, Homo sapiens
aggcgcaatgatgagaggatgtggtggtctactctgatgtcaatcttgagggctaggactgtgaagatcctaatcctttgattcgagccttggcagtcag

SEQ ID NO: 865279 - DNA, 98 bp, Homo sapiens
aaacatccttggagaggtcggagatgggtttaaggtactgggcctaatcgctacgtgcctctttggctatgatgcctatgtcaccttccccgttcggc

SEQ ID NO: 865280 - DNA, 100 bp, Homo sapiens
ttctactaagagaacatttcacacctgaagcaacccaattagcatctgaacaattgcaagcaaacaagttgaaatcatcgcagaaggataaagttcgtca

SEQ ID NO: 865281 - DNA, 100 bp, Homo sapiens
atgagaaccctacttgcctaaatgaggaatgtctttcctaccatctaaaatacgaaggtttctggctggatatgattgacaatctgctgtccccagatct

SEQ ID NO: 865282 - DNA, 100 bp, Homo sapiens
gtgttggaccttccggagcttctcagaagacagagggttttcttttgagcagaagatttagcaccactatctccgttccatctgggcttatatgtacttt

SEQ ID NO: 865283 - DNA, 100 bp, Homo sapiens
aacaagaaatcacagtgctgagtcagtgtgacagtccatatgtaaccaaatattatggatcctatctgaaggctaataataagccagagatcgaagcggc

SEQ ID NO: 865284 - DNA, 100 bp, Homo sapiens
acaaggagattttccttcgggagttgatctctaatgcttctgatagtccagcctctgatgaagcaggagagaaagaagccaagtctgattaataaccata

SEQ ID NO: 865285 - DNA, 100 bp, Homo sapiens
ccagtatgtcaaggagaacggaggcctggactctgaggaatcctatccatatgtagcagtgactggaaatagcaaaggctatgcatttgtggagtttgag

SEQ ID NO: 865286 - DNA, 98 bp, Homo sapiens
aacaggatgatgataataatagtgcagggaaacagtgcttcttagtcctacgtcagcagcagtttaatgtccaggctcttgtggcggtgggagaccat

SEQ ID NO: 865287 - DNA, 99 bp, Homo sapiens
ttggtgctcaggtgccagatgcaaaggttcttttagagcaagatatatttcatcgttccttgatggcttgttgtttggaaattgtgctctttgcctata

SEQ ID NO: 865288 - DNA, 99 bp, Homo sapiens
gttgattgtgggtggcacagtcaagaacagcactggaaaactcgtcagaacatggttggtgcgggagaggtggatgaagacttggaagttgaaaccaag

SEQ ID NO: 865289 - DNA, 100 bp, Homo sapiens
tctgcgtcaggtcacccagcagagatcagcaatccttggctcactgaggaggtttggttcactactgtgatagacaaagtggcaaagagtgtgtgacctg

SEQ ID NO: 865290 - DNA, 100 bp, Homo sapiens
gaggaggccggggaatggccgcggtgtggcagcaagtcttagcagtggacgcgaggaagctggagaagcttcgagagaaggagcgtaagaaggaagccaa

SEQ ID NO: 865291 - DNA, 100 bp, Homo sapiens
tcctgaaaggagagacacttgtgaacattcaagtgaagcaaaagcctttcatgattatatacgtaggtaacctttccagagatgtgacagaagtccttat

SEQ ID NO: 865292 - DNA, 105 bp, Homo sapiens
tgggttctattttccctcctcaaactgactttgcagccacggagaggactcagcccaaaaccatgtttgcccaagttgaatctgatgatgaggaagcaaagaatg

SEQ ID NO: 865293 - DNA, 100 bp, Homo sapiens
gttaaggattccaagtaactcttatttgatgagaccaacaggagttgcacaggtacgatctactggaattcctaatgggccaacagctgactcatcactg

SEQ ID NO: 865294 - DNA, 99 bp, Homo sapiens
tgggatccacacagctcagaacagttggatcttgctcagtctctgtcagaggaagatcccttggctatggagttactagtagagaaagcaatcagcagt

SEQ ID NO: 865295 - DNA, 127 bp, Homo sapiens
atgatattcttctcctggttaatcaagaattctctatttctgctccgtcatccatgccactggtttgaaagtattcttgaagggctgtttggacctgcattattaaaagatctcagtttatttaaag

SEQ ID NO: 865296 - DNA, 98 bp, Homo sapiens
ggacggctgcgtcgcccgaggcgaggaggagcgctggcggtccagctgggagctccccgacctccaggagggcaagatccaagccatcagcgactcgg

SEQ ID NO: 865297 - DNA, 98 bp, Homo sapiens
agaaagttccgccatgagctggggcacggagctgtggttcgatcctttggtacagaagacagaccgacagatcgtccaataccacctcgagatgaagt

SEQ ID NO: 865298 - DNA, 98 bp, Homo sapiens
tgagccatgcccatcgcagccgccccgaaggagccaggctcagcagggagctgctggatgagaaagggcctgaagtcttgcaggactcactggataga

SEQ ID NO: 865299 - DNA, 99 bp, Homo sapiens
aggaaccacacgctgatcatggaatgtgttccagaagatctagaactgaagaagaagatttttgctcagttagattccatcattgatgatcgagtgatc

SEQ ID NO: 865300 - DNA, 98 bp, Homo sapiens
gtgattttctttccccctttaacttagaggaacgaggattatacagaaatttgaagcaaccactgagaaaacggaaccgaatagtcaagaggacaaga

SEQ ID NO: 865301 - DNA, 100 bp, Homo sapiens
ccgacatgtctctagtggcggaagccttcgtctcccagattgcaggtgcatacattcagagggccacactggtgtgaatactgtgccaactttatgtggg

SEQ ID NO: 865302 - DNA, 99 bp, Homo sapiens
ttggctgatcccggaatgtaccagctggacattacattaagaaggggtcaaagtttagctgctcgagatcgaggagtcaagtccatcatctccagaacc

SEQ ID NO: 865303 - DNA, 100 bp, Homo sapiens
ccaactgcgcccggtgcggcaagatcgtgtatcccacggagaaggtgaactgtctggataagaacatcgggtcagaagttgagatttccactatcgagaa

SEQ ID NO: 865304 - DNA, 100 bp, Homo sapiens
aaaaaaccttcgcctcatcctaggagaggagcagctagaaggagtgaaggctgcacagactgagttaggacagcaaatcctggcagattttgaagaagcg

SEQ ID NO: 865305 - DNA, 99 bp, Homo sapiens
aacgtggacgtggtcaagtacgagagtggccctgacggaggggaggaattgaccaagctgcaccagttggcaatgcaacagtctcattttcccatgacg

SEQ ID NO: 865306 - DNA, 100 bp, Homo sapiens
agcatctcctttcactgttgatggagaaaaaaattcccaagctgagatatctaggttcagaggtccaaagaggtgacattttatggatagccatggcagg

SEQ ID NO: 865307 - DNA, 100 bp, Homo sapiens
ctggcctggcctaacacctggcgctgtggtgcagatgaaggatttgggggcagagcacttggcaggtcatgaaggggtccaacttctcgggttgttgaac

SEQ ID NO: 865308 - DNA, 74 bp, Homo sapiens
tgctggccgggctgctgtgcggcggcggggtctgggccgcgcgagccatggactttccccagcacagccagcat

SEQ ID NO: 865309 - DNA, 98 bp, Homo sapiens
ttagccggctgcccagattcctttttgcaccatccgtactaccagtgcccagcatgcagtttgccaaggatttgctcctagtgaaggagaaggagggt

SEQ ID NO: 865310 - DNA, 100 bp, Homo sapiens
ctcaaagctggaggaagctgagcataaggttcagagcctacaaacagggttatgtaccgaaggactctaccgtgtcagcgggaataaaactgaccaagac

SEQ ID NO: 865311 - DNA, 100 bp, Homo sapiens
tgcggctgccctacgagcagtggaaggcgctcaatgagatcgacgcgatattttatgacctggtcagacagataaataggaaaacaccagtggaaaagaa

SEQ ID NO: 865312 - DNA, 98 bp, Homo sapiens
catttcaggagtacctggaggctcaacggcagaagcttcaccacaaaagcgaaatgggcacaccacagtgatgtcttggcattgcccattttcaagca

SEQ ID NO: 865313 - DNA, 100 bp, Homo sapiens
atgcttctcaagatgtggagctctccttgcagatcggtgacacagttcacatcctggagatgtacgagggtgggccatgcacagacacagctcatgtctc

SEQ ID NO: 865314 - DNA, 100 bp, Homo sapiens
gcatattttgtaatgacacgccaggtgatggaatatgagaataggattcgagcctactccacgccagacaaaatcttccgatattttgccaccttgaaag

SEQ ID NO: 865315 - DNA, 138 bp, Homo sapiens
gaattttgcattctttaattgggaagaaaaggaaggtgaatccatgttgagctgagctaaatggaacaaaagtgggacttttaaaatgttgccctgtaagaagagaagaactacagtgacagagtccctacagcataa

SEQ ID NO: 865316 - DNA, 100 bp, Homo sapiens
cgttttcgagaaatgcataaaacattgaagttaaagtatgcagaggcacatggccacccactcagcccagaaaccccaccagtgtatgtactgtgataag

SEQ ID NO: 865317 - DNA, 99 bp, Homo sapiens
accacagctgactattttgccgtcggtaacagatccaactgtttcctggttataaggaatcctatccatcttcttcaccgatatggtttgtggattctg

SEQ ID NO: 865318 - DNA, 99 bp, Homo sapiens
tcggaggaaccggctccttgcgtcccgcctccctgggagctccgcacgggtcctacaacgtgactttaaaaagacagcagaaagcaaaaatgtcccatt

SEQ ID NO: 865319 - DNA, 100 bp, Homo sapiens
gagatggaacaggcccagaaggccaagaacccccaggagcagaagtccttcttcgccaaatacgatctgtacccagctctgaaaggtgtaaacacagttt

SEQ ID NO: 865320 - DNA, 100 bp, Homo sapiens
ggcttcatagcattcgcctactccgtgaagataacgaaggaggcccaacttcattcaataaggagcctgacggatttatcccagacggtagaacaaaagg

SEQ ID NO: 865321 - DNA, 100 bp, Homo sapiens
tggctgggcgagactctccacctgctccctgggaccatcgcccaccatggctgtggcccagcagctgcgggccgagaggccctgtgcaccaaggtgccgg

SEQ ID NO: 865322 - DNA, 100 bp, Homo sapiens
attggctatgtcggggagcatggagaaacggtcaacattcctgatgcctaccagacagagagtgcatgggctgaagaatactctgaaaagaagaaagggt

SEQ ID NO: 865323 - DNA, 100 bp, Homo sapiens
agataaaagagaaagatagatgccctctctcttcatcttcacttgaaataccggatgattttggagcctgaaagaatagacccaagcgcatcacgacaag

SEQ ID NO: 865324 - DNA, 99 bp, Homo sapiens
tcaccgacagcacagacagaatccctgctaccagagtgacagttcatttagattctttgtattcttcttcgtctatatttgtcagtttgctgtacatgt

SEQ ID NO: 865325 - DNA, 100 bp, Homo sapiens
aataaaataaaagatcttcaaaaggagcagaaaactttacagcaaggggaagtcaggctgaagtgtttgaaagctctgcagagtctatataccaatagag

SEQ ID NO: 865326 - DNA, 111 bp, Homo sapiens
atgatagtcttcctatcacgggcactagtgtggctctcctgttccagcaattgggtgcagattcactttataggaacagcttcagcttcagtgatgaaaaactgaattctc

SEQ ID NO: 865327 - DNA, 98 bp, Homo sapiens
cccaggccgctcccggggctcacgacactgtgcatcttagccaacatagcggatgggacaacagcaaaagatcttattatgaccaatgatgatatcct

SEQ ID NO: 865328 - DNA, 100 bp, Homo sapiens
cagcggaagaagctcctcagagccccaactctggccgaactggacagctctgagtctgagatatgggataaaaccagcctggaatgtttgaaagtgttaa

SEQ ID NO: 865329 - DNA, 100 bp, Homo sapiens
agaaggggagacacattttatgttgtgtcatttcgaaggagatggtgaccttgctctgtggcccaggctggtctcgaactcctggactcaagcgatcctc

SEQ ID NO: 865330 - DNA, 100 bp, Homo sapiens
agaaggttcaagatgtaaagaagactattcagaaaaagatgattgacgctcttgcaagccaggctgggattccttcaggtgtatacaatgttattccctg

SEQ ID NO: 865331 - DNA, 100 bp, Homo sapiens
tactaagagaaaattttctcctggtagacctcggtccaaacaggcggcgctggcggcggccctgggacccgcggaagccggcatgctggagaagctggag

SEQ ID NO: 865332 - DNA, 99 bp, Homo sapiens
ggactgcaaaccgagctcccgtctgccttgcagcttctgggctggctggctgagaaactacctactcttcgttccacccctacagaccttatcctttgt

SEQ ID NO: 865333 - DNA, 100 bp, Homo sapiens
tcctgagtagccgggattacagttggcaggatcttgtggccagtggggtagtggagtatattgataccctggaagaagaaacagtgatgcttgcaatgac

SEQ ID NO: 865334 - DNA, 100 bp, Homo sapiens
ctgagaatgagtttgtgatgctgaagaagctgaataccactagaaacatacctgtaaccagagacagctgattatagctttctgcagcaaggaagcccac

SEQ ID NO: 865335 - DNA, 100 bp, Homo sapiens
ctttgtgtcaaaaagaaataactcagctgaagcatcaggcaacaggtcctcggggtttattaaaggaagatgccaaaggctgtcttcagaaaagcttcag

SEQ ID NO: 865336 - DNA, 99 bp, Homo sapiens
aggagcatgtggccagtcgcctcacctctcctatcgtctccacccacctggacactcgtaatgtggcctttgagagatggagtctcactctgttgccca

SEQ ID NO: 865337 - DNA, 98 bp, Homo sapiens
cggaatagcagccaagtatcagattgaccctgacgcctgcttctcggcccttggactggacagtgccaatgagaaaggcttgtataggaggggtgaag

SEQ ID NO: 865338 - DNA, 99 bp, Homo sapiens
tcaggggtgagagctggaatctctgcacgggccttggaaaaatgccagctgtgggacaaggagtgcaggccgcacaacctcggcaggcaccggggggat

SEQ ID NO: 865339 - DNA, 100 bp, Homo sapiens
atacctgacaatgaaaccgggaggaaagaagacaagagagaacgcaaacagtttgaagctgaggattttggacacggccaacacggtgaaggaaaagttc

SEQ ID NO: 865340 - DNA, 143 bp, Homo sapiens
cttctcctttgcttctggcaccttccagcttgtcgtcctctaccttttcagcatcatcacctccttccaagcccagggcagtgttgctgcatattgcatggatgaaaggctgaaggctgcctcctcttgcaggctggcttctg

SEQ ID NO: 865341 - DNA, 98 bp, Homo sapiens
ttcagcatcgatggctacagcttcaccatagcaagagcctcctgatctagcagccaagactccccctgacctttggccatgtaccccaaccctctcat

SEQ ID NO: 865342 - DNA, 100 bp, Homo sapiens
actaaaatctacaaccttctcattcagacacacgagctgatagacacacaccttagctggatacaaaacatattatgaaacagaatgactgtgatctttg

SEQ ID NO: 865343 - DNA, 100 bp, Homo sapiens
atttccaaagtttgcagaaaagaatatgagatgaagaaaacctgcttgatatcacacagtcaggagtcaactgagttggggctttgaacttaggtttatc

SEQ ID NO: 865344 - DNA, 128 bp, Homo sapiens
ggcaggatgaagttcgccgagcacctctccgcgcacatcactcccgagtggaggaagcaatacatccagtatgagaggacttctgaatgatgctttccagaaagggggaccagagggtgccactaccc

SEQ ID NO: 865345 - DNA, 98 bp, Homo sapiens
ccggcatgcttctggactatttccaggcagttatacttaagcatgaacattgacgacaaactggaaggattgtttcttaaatgtggcggcatagacga

SEQ ID NO: 865346 - DNA, 99 bp, Homo sapiens
tgagggagagaaccagcacttctgggacgcacagagaccgtgaagattccaagttcaggagaactcgaccggagatacaactcgtcaacgaatcaaatt

SEQ ID NO: 865347 - DNA, 100 bp, Homo sapiens
cggcgcgggagccgcgggctggagctgcccgggcccagcttccacttcaccatcggatgtttgccactcagactgagggggagctcagagtgacccaaat

SEQ ID NO: 865348 - DNA, 98 bp, Homo sapiens
aggaagcaagatcattagttgaatcgattcaattagcagagcctcacagacaatggccaaatgtgtcaaagctgtcacagagggtgcccaggcagtag

SEQ ID NO: 865349 - DNA, 100 bp, Homo sapiens
gcacttttcaatacaatttcccagggatccactagttcctggactatgggaactgatgactcgcccaatgtcacagatgatgcagctgatgagatcatgg

SEQ ID NO: 865350 - DNA, 100 bp, Homo sapiens
gggaattactactgcacagctgacaatggctttggtccccagcgcagtgaagtggtgagcctttttgtcactggtggaaccgtcccaaaatgtcccttgc

SEQ ID NO: 865351 - DNA, 100 bp, Homo sapiens
gaagaagaaagaagacgccacagacagcagcgcagtaccaccttccagagatttaataaaggtatccatggagaacactgaaaactcagtggattcaaaa

SEQ ID NO: 865352 - DNA, 100 bp, Homo sapiens
tttgctttagctggactaacagatttggcctttccccctggtgctcttcatcctttaccaaagagacaagcacttgaaaaaagcaatggtaccagcgcgg

SEQ ID NO: 865353 - DNA, 100 bp, Homo sapiens
aggaaaaatcgagcagaaagaatgtctttcagatatccttctttccagagtcaggacagccagagtgcttaaaggagatgaacctagagtcaaagagtgg

SEQ ID NO: 865354 - DNA, 100 bp, Homo sapiens
tcggctcggcccaaagcagcagcttcagccccgaacctcctgacaaggtgatccgggcgggccccgcaggaattttatcccctcaccggcctcacactag

SEQ ID NO: 865355 - DNA, 100 bp, Homo sapiens
tactgctactggtcagtcaacccagaggatccccagtatgcatctcaagatgtgtgatggaatggggagaagatattaaagcagtttcaaaagatgaagc

SEQ ID NO: 865356 - DNA, 98 bp, Homo sapiens
gagatgaatactgctgaggactggggcctcattttggatatctgtgataaagttggtcagtctcgcactgggacatgtattcctctgagaaaccttgg

SEQ ID NO: 865357 - DNA, 99 bp, Homo sapiens
ctctacatctggcatgctattttggacacagacaagtggtccaggatctgttgaagagtataaatggcattcgcacagaggaggtggctgtcgtgacaa

SEQ ID NO: 865358 - DNA, 100 bp, Homo sapiens
acagcagcgactagggctcgggcgccggcgagatgcctttgttcaccgccaaccccttcgagcaagacgtgggacccagatgatgtggtaccagttggcc

SEQ ID NO: 865359 - DNA, 100 bp, Homo sapiens
caacgaactgggcaacatctacacgcacgcaattctgtggtgttcttggtcacacatttatggagtttctgaagggcagtggagattactgccaggcaca

SEQ ID NO: 865360 - DNA, 100 bp, Homo sapiens
cccgtccatcatagtcaactgcgtggaagagaagctgagatgagtgaactgagtgtggcacagaaaccagaaaaacttttggagcgctgcaagtactggc

SEQ ID NO: 865361 - DNA, 100 bp, Homo sapiens
gtacaggcagtaattgatgccaatcttgtaccaatgataatacaccttttggataagactccaagaatgaaaaggctctgggccgcaaaataaactcctg

SEQ ID NO: 865362 - DNA, 99 bp, Homo sapiens
gagctgcaggtccagcttcttccccatgccagcaagatacctttgtctggatatggaggaacaagcaatcttattttggaaggcgttaaaaaattatct

SEQ ID NO: 865363 - DNA, 100 bp, Homo sapiens
gagctgaccctgggagacatcgacggagcgagaacccgagcagcgccatgagcaacactaccgtcgtccccagcactgcaggtccgggccccagcggcgg

SEQ ID NO: 865364 - DNA, 98 bp, Homo sapiens
aatgaagactggtggtatggcagcataggaaagggacaggaaggttattttccagctaatcatgtggctagtgaaaatggcccactgcgtgaccttgg

SEQ ID NO: 865365 - DNA, 98 bp, Homo sapiens
tcgaattccagaatgatgaaattgtgttgctaggaagaggctcaatgtttgtgttttcaccagatcagtttcagagactgcttaaaattaatccagac

SEQ ID NO: 865366 - DNA, 50 bp, Homo sapiens
tgccatgaaagtcctaaggaaggaccctgatgctcccataagacagaaaa

SEQ ID NO: 865367 - DNA, 100 bp, Homo sapiens
taaaaatcaacaccaggactacagtaaggctgaaatcattgaagtgcttggagtgcagaactgaaagagttaattggccttggtcctcacagctccaaaa

SEQ ID NO: 865368 - DNA, 100 bp, Homo sapiens
cagaattctgctgtttgggccattcttaatgagaactgttcattatgaaggtggcgctgtgtctgttcatgcacgttccctttggagactagagacgcta

SEQ ID NO: 865369 - DNA, 50 bp, Homo sapiens
cggcgcacatccccgtcccagcgcagagccacgtgaaaggcctgcacttg

SEQ ID NO: 865370 - DNA, 100 bp, Homo sapiens
tgggagcaagttgactaccaccagtggagtccaggatgaggaacatccaatacttgggcaacccttttttgtacttcatccctgcaagacgaatgaattc

SEQ ID NO: 865371 - DNA, 98 bp, Homo sapiens
gggaccgtgtgggaggcaggacttacactcttaggaggaaatatcattctgcaaaagaagcttatgaacaacttttgcagacagagaatctttctgca

SEQ ID NO: 865372 - DNA, 100 bp, Homo sapiens
agtctttccaaaaggtcaaggttcacaagcatttaaatcaaacggtattgagatggattgggttatgaaacataatggtccaaatgacgctagtgatggg

SEQ ID NO: 865373 - DNA, 100 bp, Homo sapiens
ggacaaggtcgagatagaagctcgcttttagatgataccactgtgacattgtcgttatgccagctaagaaatctcaatggagactctcaggcaaaagttc

SEQ ID NO: 865374 - DNA, 100 bp, Homo sapiens
tgcaggaagcaacacgttgctgcttttattctacagataatggtgcagattcactttataggaacagcttcagcttcagtgatgaaaaactgaattctcc

SEQ ID NO: 865375 - DNA, 100 bp, Homo sapiens
ttgggtttagcaaaagttcatctccttctgcatccttaactgagaatgaggaggatttgttggtattgaggaaaacggtgaaatcctttttggctgtttg

SEQ ID NO: 865376 - DNA, 99 bp, Homo sapiens
ctctttgaactttggatgctttattgtacaaagagtgcctggaagagctgggatgtctggttgagtcctatggcatgaatgtttgccaaccaaccccag

SEQ ID NO: 865377 - DNA, 100 bp, Homo sapiens
gaacacaaaccatcacaaagttacctacgtgttagaaataaatctgatattgcaccttcacagcaacaaggttcacctttccttgccagtgaagatggcg

SEQ ID NO: 865378 - DNA, 100 bp, Homo sapiens
tcctcttttacaaatcttctgttgaactgcattgtgtttacagtttcacgtctgtgaaaagggcatccgcttcgatcctgaaattccgcaaacactacga

SEQ ID NO: 865379 - DNA, 99 bp, Homo sapiens
aggtggttgcggagctggtaagagtgatcagcagctggactgtgccttggacctaatgaggcgcctgcctccccagcaaatcgagaaaaacctcagcga

SEQ ID NO: 865380 - DNA, 100 bp, Homo sapiens
aggatgtcaaatttgtcagcaactcgtcagatttgaagggaagactgatggcctctttcatgctacaaatagttgaagaatgaattagtttgtatttaca

SEQ ID NO: 865381 - DNA, 100 bp, Homo sapiens
ggaggtgcccacgcagctgcctggacaagatgcgtattggatagcaatgaatagttctctgaaatgtaaaaccctcagcgacatctttctgcttttcaag

SEQ ID NO: 865382 - DNA, 98 bp, Homo sapiens
agctgcgccgggaggcagagcggctcagccagcggcagacagaacgggacctgtgtcagttgatattcactgatggactccaaagaatcattaactcc

SEQ ID NO: 865383 - DNA, 100 bp, Homo sapiens
caaagcagtccttcactacagtggcagacagacctgaaaattttcatctgaagcagcagagtgaactgcagagtcaggaggaatgccagctcctgagcag

SEQ ID NO: 865384 - DNA, 98 bp, Homo sapiens
ttctcccacctcttccatccctgacacactcaccaagctcggtgccaatgtgctgctgttcctctgcaccaacgtcattggcatctgcacacactatc

SEQ ID NO: 865385 - DNA, 99 bp, Homo sapiens
ggggccggggcgccgctggcaggagcgcttggggatcctccaaggatacaatgtctctttgctatatgaccttgaaaatcttccggcatccaaggattc

SEQ ID NO: 865386 - DNA, 100 bp, Homo sapiens
aagatggctgtggagagcccgtccgacagcgctgaggccaggtcagagcagcccaccatgggatggggagggggtggaggctgcaccccgcgcccaccca

SEQ ID NO: 865387 - DNA, 98 bp, Homo sapiens
gtcaccattggagctcatcagactgaccgtgtcttacatcagttcagagagaacggtggtcatgccgatcgccagcgagtttgccccggatgtggtgc

SEQ ID NO: 865388 - DNA, 100 bp, Homo sapiens
cacaggtggcccgatcccagcaggacattgaaaggcctctgtgtcctttgtcccaatagtaacaactccctcctggcctttccgggcacgcacacgggcc

SEQ ID NO: 865389 - DNA, 100 bp, Homo sapiens
tgaaatttctgtctttgaagtaaatatacgctttgttggtggactactctcagcctactatctgtctggagaagagaaatgcatcgtgattcctgtccat

SEQ ID NO: 865390 - DNA, 100 bp, Homo sapiens
gaagtttcttgggctatgccagttttaaagtgggagagctgctgaagtcaaaggagcaattgctggtcctgagcctgagatttggactgagcaacaaatt

SEQ ID NO: 865391 - DNA, 100 bp, Homo sapiens
ccggagcccagcagctgtgggagccccgagaacgcctccagcggggatgacacagaaggtgaccaagaatatggcccaggtgaccaaagccctggacaag

SEQ ID NO: 865392 - DNA, 99 bp, Homo sapiens
gttgactgaaaatggggcggaagaaaatacaaatcacacgcataatggatgaaaggaaccgacagattcctgtcttggtcacacagataagttcaacca

SEQ ID NO: 865393 - DNA, 100 bp, Homo sapiens
cgtcgaattcgtcggcacaagaactatctacgtgtggttggaaacatggaggccaggctgctgctcctgctgccctgtgggctgtgccaagtgtgcccag

SEQ ID NO: 865394 - DNA, 51 bp, Homo sapiens
tacagaactacgatataagccaggtcctggacccaagccagaagcctctgc

SEQ ID NO: 865395 - DNA, 100 bp, Homo sapiens
aagggtgttcccgaactagagtggaaacatgagttctgctggcgctgatgggagaaaagcgatgagaagatgtgacggactcattgactcactggtccat

SEQ ID NO: 865396 - DNA, 99 bp, Homo sapiens
ttcatcaaagagctcattaaggacgggaagaacctcatcgctgcgacgaaaaaacgactagtggtcgtggctgaacattgtgaacgtagtctggaagac

SEQ ID NO: 865397 - DNA, 98 bp, Homo sapiens
cgtttagagcaacagatcgtggatctgaaagtgacaagcattttagaaaggatgaagatgagctggattcccacaccatggtgaagactagtgtggag

SEQ ID NO: 865398 - DNA, 128 bp, Homo sapiens
cagatcggcgcccagcaatcacagaagccgacaaggcgttcaagcgaaaacatgaccgctgagcccatgagagttatggtgaatggttgcatggatttgaaaaaaaggcaaaagaatgtatggctgga

SEQ ID NO: 865399 - DNA, 100 bp, Homo sapiens
tcctgtaatcgctattgacagctttaggcatatgtatgtgtttggagacttcaaagatgtattgaggagactgcaagcatcgggatgcccaggccccaag

SEQ ID NO: 865400 - DNA, 100 bp, Homo sapiens
cagatgcttgtttcttcaccatcaaccggacctacctccatcatcacatgaccaaagcattcctcttctatgaaaaattgtatggcgacttcttgagctg

SEQ ID NO: 865401 - DNA, 100 bp, Homo sapiens
ttcgactatgcagagacatgagatggtagccaacccctcagggaaaaaatgcatttttcaaagacctaacttcaattcagttattacctagtggggaaat

SEQ ID NO: 865402 - DNA, 100 bp, Homo sapiens
gattggtccagaacagtttccggtcaatgagcactattttggattagtcaatcttccaattgaagacttgtgcagtttaacatcccagtcactgcccatt

SEQ ID NO: 865403 - DNA, 99 bp, Homo sapiens
gtttgtgcaggacaccgacatggaacagggactcactggggattatttgcatgggtgcaaaagaaaatggtttgccgctggagtatcaagagaagttaa

SEQ ID NO: 865404 - DNA, 100 bp, Homo sapiens
tgtacagctgctttacagtagagttggtcgttccaggggtagaggaggcatgaaggatgaccgtcgggacagatactctgcgggcaaaaggggtggattt

SEQ ID NO: 865405 - DNA, 125 bp, Homo sapiens
tgttggactagcaggatttgaagacaaaagtgttcattctagttattttttctaacttactgaactttgacaggggcaagtgtccgagtggtgaatcagctacttacagagatggatggtctgga

SEQ ID NO: 865406 - DNA, 99 bp, Homo sapiens
gagaagcctgaaaagtcgcagcgagctggagccgccggaggttaaagctgaagctcaacaaagatatagtgatctctgtgggcatttataatctggtcc

SEQ ID NO: 865407 - DNA, 100 bp, Homo sapiens
aaatataagaaaacgtcccagaggtccaagacaactttgacaagattgaattcaataggatgtgttggaccctctgtgtcaaaaaaaacctcacaaagaa

SEQ ID NO: 865408 - DNA, 100 bp, Homo sapiens
atcaaacggcaagatgtccagtaatgtcccggcggatatgggaagaaacccttttttcttggagccagcaataattatcacaattactgatgggagcaag

SEQ ID NO: 865409 - DNA, 99 bp, Homo sapiens
ggaacctcaggatctggcatcagcccctcccatagccaggagcttgaagaaatccgcaaatgtgggatgaaaaacttccgtaacatccaggttgatgaa

SEQ ID NO: 865410 - DNA, 99 bp, Homo sapiens
atgggaaggtggatcccgccgggaggtactttgctggccttatgacctatagaagccaggcggtgcaggaacatgccagcaccaacatggggctggagg

SEQ ID NO: 865411 - DNA, 100 bp, Homo sapiens
cagagaaagataggcggccatggtccaaccttgaagggtttctatgttgcactgagactggtggcctgtgcacagagtggccatgaagttaccttgagca

SEQ ID NO: 865412 - DNA, 100 bp, Homo sapiens
attccctgtgttctgcttttttcattgttccactggacgctcatcagagggaagatctttttcctcaattggtcactttagacaactgtgttgaagttgg

SEQ ID NO: 865413 - DNA, 100 bp, Homo sapiens
caggaaaggggccgtcggtcgccgccatgacagcgagcgaggcggaggtacagcagggaagaactggaaactcagagaaagaaactgcccttccatctac

SEQ ID NO: 865414 - DNA, 98 bp, Homo sapiens
atgttccacgtgtcaaccctgcttccctacatgcccaacaacagacaacagattgttctctggggccggactgagaaatgcctgaaggagacgacgga

SEQ ID NO: 865415 - DNA, 100 bp, Homo sapiens
cgttgcagctgccgagagcccggccaccatggcacaggagcctccctattaaggaccttgccgtagacagcgcctctcccgtctaccaggctgtgattaa

SEQ ID NO: 865416 - DNA, 99 bp, Homo sapiens
gacagtgagtgctaaaggcccccctgaaaaacggatgagacttcataggataagttctgaacgtcgaaaagaaaagtctcgagatgcagccagatctcg

SEQ ID NO: 865417 - DNA, 100 bp, Homo sapiens
caactactattacaaatattccaatgaagatgcaatcttcttaccgcgaagaagccaggggaataggtagccacatcttgtttgcagataagaaaggaag

SEQ ID NO: 865418 - DNA, 100 bp, Homo sapiens
cagctcccctcacccaacgtcgtgtattgctgtctctaagccagacctgatcacctgtctggaacaagggaaagagccctggaatatgaagcgacatgag

SEQ ID NO: 865419 - DNA, 100 bp, Homo sapiens
ctttgctaagtgctgctgttgcttcccgtgtagagcagaaaggacccaggagcgataacagtaaatcaaataagatatttgtcggtggaattcctcacaa

SEQ ID NO: 865420 - DNA, 99 bp, Homo sapiens
aatggttccctggtttggtgccagaatcacaagcaatgttctaaggttcacaaaaaggattctggcttttggcgagattttggctttggaatgacttgt

SEQ ID NO: 865421 - DNA, 100 bp, Homo sapiens
atccgcactgccctttttgcaccccagggagctgctgctggtcatatgcaaacacagagctctccttttgctcggggaaatgtatttggtgagcctccaa

SEQ ID NO: 865422 - DNA, 98 bp, Homo sapiens
tcatcgtactggagtagagggccgactcttcccatgaagacacttctgagaaattcatcaggctgtgaagcgcgccgtgatgaatatcgaacagagtt

SEQ ID NO: 865423 - DNA, 112 bp, Homo sapiens
gtcccgacccgcgggcgaggccgggtacctgggctgggatccggagcaagcgggcgagggcagcgccctaagcagctcaccatggatgatgatatcgccgcgctcgtcgtcg

SEQ ID NO: 865424 - DNA, 100 bp, Homo sapiens
gggagcgcggggcgacgctggctgcagggacccggtgacagcgtgagaggttcgcagagtgatgaccccacaaggaagaggtactgttgcagccgctgca

SEQ ID NO: 865425 - DNA, 100 bp, Homo sapiens
aggactgggctaatgctaatgtcagcagacagattgaggacactgtattatacggttactataaatataacaccagcaatcctgacttgttgctagtcat

SEQ ID NO: 865426 - DNA, 98 bp, Homo sapiens
gcgagctgagtggttgtgtggtcgcgtctcggaaaccggtagcgcttgcagcatgcctggagcattggtaagcgtcacactgccaaagtgagagctgc

SEQ ID NO: 865427 - DNA, 100 bp, Homo sapiens
acgccctttacctgcgtttcctggatgctcttaaaggcagaagactgatttttggaaatatgtatttgggagacagtcacgtcctattgaataccttgtg

SEQ ID NO: 865428 - DNA, 141 bp, Homo sapiens
taggccggtcatgcccaacatggtcttcattggaggtatcaactgtaagaagaggaaagacttgtctcagtgattacccaaagaaggaggactacatcgtctacctgggtcgctcaaggcttaactccaacacgcaagggg

SEQ ID NO: 865429 - DNA, 100 bp, Homo sapiens
ccatctctccctctccaggaagtccatgtaagcaaagaaaccatcgggaagatttcagctgccagcaaaagtgacatctgttcccgagctgttcctgact

SEQ ID NO: 865430 - DNA, 99 bp, Homo sapiens
acaggacagaaagagtgtgcagcggattaaagctaaagacatagttcctggtgatattgtagaaattgctgggccagatattcgaagcttacaacatgg

SEQ ID NO: 865431 - DNA, 100 bp, Homo sapiens
cagcaacagggacatcgtggagacggtgctcaacctggccaactggaacagagcagaagaagaaaatgaattccaaatccctggaagaactagaccctcc

SEQ ID NO: 865432 - DNA, 98 bp, Homo sapiens
gaatgaagaccccattcggaaagacacctggccagcggtccagagctgatgcaggagtcagagtattcatcgaaaagaaagcacagctaacactttta

SEQ ID NO: 865433 - DNA, 98 bp, Homo sapiens
ggaatctcactctgttaaagctggtctgttctaactgagatattaaggctaagacatactgcatttgtaataccaaagaaaaacgttcctacctcaaa

SEQ ID NO: 865434 - DNA, 51 bp, Homo sapiens
ctagaggtcaagatcagctctggctaggtgggtttgcaagcacatcaagaa

SEQ ID NO: 865435 - DNA, 98 bp, Homo sapiens
caaccttccttctgacaagtcccagtcttatctgcagatatgtacagaccacatcctaagattgacttctgcctcaacagaaatacatgagccagtgc

SEQ ID NO: 865436 - DNA, 98 bp, Homo sapiens
agtggggacccagcaggtggctgaggttcaaaccttgtactactcagctgatcacaagctgcttgatgggaacctactagatggacaggctgaggtgt

SEQ ID NO: 865437 - DNA, 100 bp, Homo sapiens
ccaaactttgatctacgacgccctggagagaccgcggggctgggcgctgctttaccacgcgttggtgatgtgaagagctggcaaaacttgacctgactgt

SEQ ID NO: 865438 - DNA, 100 bp, Homo sapiens
tacgtggttggagagctcatctggaattttgccgatttcatgactaaccagtgccctcctgtcggtccttcgagaaagccatcgttcaagaacagttttt

SEQ ID NO: 865439 - DNA, 100 bp, Homo sapiens
caggcttcaggtatcttatgaagagtatctctgtatgaaaaccttactgcttctctcttcaggtcgtttaggccaattgggtttgaaagaaggatttcca

SEQ ID NO: 865440 - DNA, 100 bp, Homo sapiens
ccaagtgacttctacactgttgaactctgcttacccattcataggacccttttttatggagtctcccaggcgggaatgcaatggtgcgatctcgacttca

SEQ ID NO: 865441 - DNA, 100 bp, Homo sapiens
gggaaatatttgtagatgagctacacttggcacgctacttttacgcgatctcagacataaaggtgcgaggaaggtattgaagcccctgggtgataatttg

SEQ ID NO: 865442 - DNA, 100 bp, Homo sapiens
aagtctgaaaagcccagaacttttcctctgttataagagagggagagataaaccaccgcttacagatattggagagaagaagaaggaggttcctgctgtg

SEQ ID NO: 865443 - DNA, 100 bp, Homo sapiens
cagtgtcagctgtacagccacactaactgtgacaggataaatgctgtatccaatgctcaggtgagaggtgatagctatgaaagcggctgtttaggaagaa

SEQ ID NO: 865444 - DNA, 100 bp, Homo sapiens
gggtcagttttgcagatactccaccaaccagtactcttttaaccatgcatcctgcttctgtccagccaaatttgtatcctactgtggggcttcaaacacc

SEQ ID NO: 865445 - DNA, 98 bp, Homo sapiens
gccggggacctcgtccgagcccacccgcctttggaggtgtgggattatgagactggagattttgaacgaactcttaaaggacatacagactctgtaca

SEQ ID NO: 865446 - DNA, 100 bp, Homo sapiens
acccatttctcgtctctcatctacatcgccttcatcctgggcaggccatggcccaaaaggaagatatggaagagagaatcactactcttgaaaaacgcta

SEQ ID NO: 865447 - DNA, 100 bp, Homo sapiens
gatattttgtcgaagaaactgtggaagtcattaggaacaatggtgcaagggaatgaaagctactggttgattttaaagtgcctgggcctcacaggtttgg

SEQ ID NO: 865448 - DNA, 100 bp, Homo sapiens
ccgggagctgggcggccatttaccagtactatactggcaattgctggagaagattttgcaattgttgcttctgatactcgattgagtgaagggttttcaa

SEQ ID NO: 865449 - DNA, 98 bp, Homo sapiens
cgcaccagatctgcaaactgcgaaaatgtgaggtgctgaagaaaaaagtagggcttctcaaggaggctctttattgagaaactaccaaaacatcgaga

SEQ ID NO: 865450 - DNA, 100 bp, Homo sapiens
atgagcccaaccacgtggagctgggacgtaaggatgacgcaaaagttcacaagatgttccttgaccatactgggtaccttctcgctcatcatcgaagctt

SEQ ID NO: 865451 - DNA, 100 bp, Homo sapiens
ggtttacatatgaccaaaggactcgccctctgggaggcttaccgagagtttgaaagtgcgattgtggaagctgctcggaaattacaggggacatcagggc

SEQ ID NO: 865452 - DNA, 98 bp, Homo sapiens
gacgcctccaggatctgtcggcagctgctgttctgagatttatgtgatcagtttggctgaaccccgtctgcccctgcagctggatgatgctgttcggc

SEQ ID NO: 865453 - DNA, 100 bp, Homo sapiens
aatgaccgccgccgcctggccctggagaactacatcaccgctctgcaggctgttcctcctcggatctctgtggtaagaagtgctactttagagacaaaac

SEQ ID NO: 865454 - DNA, 98 bp, Homo sapiens
tcttttggttcagcatgaaagcagtaatcagatgtttgccatgaaagaaataaggcttcccaaggaggtcacaagccccaaagtggacgtgttcaatg

SEQ ID NO: 865455 - DNA, 98 bp, Homo sapiens
ccatcgtgtgcctgatgatcacgcagctggctggcttcagtggaccaatgccttcaattaagttgcagagttctgatggagagatatttgaagttgat

SEQ ID NO: 865456 - DNA, 98 bp, Homo sapiens
atacaaggcaaccttgaaagatgacagaggccaagatgtgtccatccttgaaatagctggcaaagatgttgatggcatggacctgggcaaaaaggtca

SEQ ID NO: 865457 - DNA, 100 bp, Homo sapiens
ttggctgcgagggcgctgcacaacctggcccagcaggcacccgagttcagcgccacgcaaggaacccaagacagaccaggatgaggagcattgccggaaa

SEQ ID NO: 865458 - DNA, 100 bp, Homo sapiens
ccagaaattatgttgaattccaaggagtctcgctctcagtcaaaatctccaacgggaactcctgctcgtgtaaaatcggagagcaggtcaggatctcgta

SEQ ID NO: 865459 - DNA, 99 bp, Homo sapiens
ggcgccatggcagggcttgcagggtgataaaagaaaatgtggctgaagttacccgaagttcagcttgcagtgtaattcagaagagttaagaccagaagt

SEQ ID NO: 865460 - DNA, 98 bp, Homo sapiens
tgggctgagcggccggcggcgcgggcccggcggcggcggcagcggggtccgggtccggagcgccacaagggaagtcttgccggaccatcacctttgag

SEQ ID NO: 865461 - DNA, 100 bp, Homo sapiens
gcttgaaatgctacatttccaaggtggaacgtgtgatcaccattatgcagaatccacgccagtacaagatcccagactggttcttgaacagacagaagga

SEQ ID NO: 865462 - DNA, 100 bp, Homo sapiens
ggggaagtttggggagttctgtcatgggtgctccctgctgatgacagggccttttatggtacggagaccacaagcagtagctccttcgaattggagatgg

SEQ ID NO: 865463 - DNA, 99 bp, Homo sapiens
acaaacttgccaaagctacaagagacaggcagaaaacctgctcttggatgctgatatgaacatcaagattgcagactttggcttcagcaatgaattcac

SEQ ID NO: 865464 - DNA, 100 bp, Homo sapiens
tccttactggagcaagggaaagagtcctgcatggtttcaagggacgtaccaggaggatggtgcccaggaacagtggaggccatgtgtcttttggcagtca

SEQ ID NO: 865465 - DNA, 100 bp, Homo sapiens
aaatacaggagaaatggcattggttcacgcaaagaatctgctccacaagttttgcttccagaagaagagaaaattatagtggaagaaactaaaagtaatg

SEQ ID NO: 865466 - DNA, 98 bp, Homo sapiens
cgggacccggcgaagacgcgaccgcggcgcgagtcaccatgggtgattgtgttgttacagtgctgcttgctgaagaggacaaagctgaagatgatgta

SEQ ID NO: 865467 - DNA, 100 bp, Homo sapiens
gcccaactcggccatgagtccttctactggcagctgccggagacataccagggagacaagattatgtttgagaccttcaacaccccggccatgtacgtgg

SEQ ID NO: 865468 - DNA, 100 bp, Homo sapiens
gtttgttcaacatatctacaatctcggtactacagtggctgcttcaacccccaactccactgctggtgcagccatgaactccttgacctctctcgggact

SEQ ID NO: 865469 - DNA, 98 bp, Homo sapiens
aaggagactacccaaaagcaaatggtttgctcgattttgacatattctacaacgtcactggatgcctaagccctaccacttatgtcttggatgaagat

SEQ ID NO: 865470 - DNA, 51 bp, Homo sapiens
cccccggcgcgatgcccttcaggaaaggctcttgcagaccaatttgaagat

SEQ ID NO: 865471 - DNA, 98 bp, Homo sapiens
gttttgcctttggtgttcaacaacttcatccagcccttatacaaagacctttcggagatgagtatgaagaagatggattctgtcagccatacagaggg

SEQ ID NO: 865472 - DNA, 100 bp, Homo sapiens
tggtcctctgccctcgcgccccgctagggccaggaccccaaaatgtatgtacagacagtgcttgatgttcataaaaaatacaatgccctggtaatgtctg

SEQ ID NO: 865473 - DNA, 98 bp, Homo sapiens
aatatgacccaagcattggtatctacggcctggacttctatgtggaattgaatgatctggcacgggaccctccagcacagtgttcagcaggtcctgtt

SEQ ID NO: 865474 - DNA, 98 bp, Homo sapiens
gccgcggcggggggaaaatggagcccttcaccaatggaggaagaaggcacctacgatcaaactctggagttccgtaggggaggtgatggccagccaag

SEQ ID NO: 865475 - DNA, 99 bp, Homo sapiens
atacgcggcaggaccaagcaacagaaagaccacagcaagattctttcattcgtctcctcctagcctgggggaccaggctcgaactgaccctggacatca

SEQ ID NO: 865476 - DNA, 100 bp, Homo sapiens
taggtgtctgtgttcactccaggctgaagttacaggctgtctgtccccagaccccagagcacgtccggcaccaccatgactgggctgttgaagaggaaat

SEQ ID NO: 865477 - DNA, 100 bp, Homo sapiens
cggagaccccgaaaacggaagcgcagggagaaggaagaggtgtttgaaaaggaggaacatatgcagcagaaaaaagaggaggaagaagttcttaaagaag

SEQ ID NO: 865478 - DNA, 100 bp, Homo sapiens
ttactcgtgttccctgccactgtcttgttccgaggcggccccagagggacatgagagatggctttagaagaaaaagtttctactcttcccattatgcgag

SEQ ID NO: 865479 - DNA, 100 bp, Homo sapiens
cagcataaaatctgaagagtcatccatatgtgatccttcttctgaaaattcagtggctgggttagtctgaatgattcccacaatcagatggtggtgcact

SEQ ID NO: 865480 - DNA, 99 bp, Homo sapiens
aggaatctcagtagggacaacaggcaggagaattatgggagcgcatttccccagggaaagatgaatgggagggctgattttcgagagccgaatgcagag

SEQ ID NO: 865481 - DNA, 98 bp, Homo sapiens
tccatagttggaagattccagacctcagcatggatccctatgatggctacggagtaccagacgtggctggacctccgagagctggaggggaagatggg

SEQ ID NO: 865482 - DNA, 99 bp, Homo sapiens
gactccaaaatggcgtcagttggtgagtgtccggccccaggtggtgaaaacaggaatgagaacgaggagtcaacctcaaaggctgaaacctcggaagat

SEQ ID NO: 865483 - DNA, 100 bp, Homo sapiens
ggtgatgagcatgacgcacacaggagagccaggattcatgctctacatccccatagaggtgaccaaaagccagccccactgtgagttgaactctttcgtg

SEQ ID NO: 865484 - DNA, 100 bp, Homo sapiens
aaatttatgctgggagtggtaccaggaagttccttgttttaatgtaaatgctcagctgaaaccaatggagtggcagagcatttctataacactggttgag

SEQ ID NO: 865485 - DNA, 100 bp, Homo sapiens
gttgcagcctatggcctgttatttgtctcaacaaaagacctgccacagtgactcaggtcactcaaggaactatccgaccagctgccaacttcgatgctat

SEQ ID NO: 865486 - DNA, 128 bp, Homo sapiens
ggctttgaactccgagaggaggtggaccagaacttttggaactagtgccggcggctctccaccccccaggcactactgcagtcttcagttaagcaacaagtagaagctattgaaaaacagtacatttc

SEQ ID NO: 865487 - DNA, 98 bp, Homo sapiens
tttccacccctccaggccggctctccatgatgtccttcatcctcaacgccctcacctgataaggagggttcctgcccccaggtgaacattaactttcc

SEQ ID NO: 865488 - DNA, 102 bp, Homo sapiens
aatcctctgcttgacatctctgctgtagtggacaaagatttccttgataagtggaaccgtcccaaaatgtcccttgctcagaagaaggatcgggtagctcaa

SEQ ID NO: 865489 - DNA, 100 bp, Homo sapiens
ctcgccctctgggaggcttaccgagagtttgaaagtgcgattgtggaagctgctcgggaggagagggcagtgagagataggaatctcctccaggttcatg

SEQ ID NO: 865490 - DNA, 98 bp, Homo sapiens
tgcctttgggctgcctgaggatgagttcctggtggtgctgcgctgtgtggtggtctgcaagaagaatctggacagtaccactgtggccgtgcatggtg

SEQ ID NO: 865491 - DNA, 100 bp, Homo sapiens
tgcgcatctacttcctggaggagcgcatgcaacagaagtatgaggccagccgggaggacatctacaagcggaccttttaaaaatggaactgtcggctgcg

SEQ ID NO: 865492 - DNA, 98 bp, Homo sapiens
gaagggcggacacctccacatcgccttttgccacctttccctttatttccggaggtatcaaattgtagtggaaataatccaggcgactacaattagca

SEQ ID NO: 865493 - DNA, 100 bp, Homo sapiens
gaagagtcctgaccacaatggggaggacaacttcgcccgggacttcatggggccagtgtcattcaaagatgtggctgtggatttcacccaggaggagtgg

SEQ ID NO: 865494 - DNA, 100 bp, Homo sapiens
gcctagccctaccggactacgagtatctggctgagtcagtgctgattctctcaaatagagcttgaaggataaatcttcatttttgtttcaacaaaacttc

SEQ ID NO: 865495 - DNA, 134 bp, Homo sapiens
atgtcttccctgccggcaaggccatctgggtcacgggctggggacacacccagtatggaggtgactctgacatcattagaagcatgccagaacagactggtgaaaagtaaaccttttcacctacaaaatttcac

SEQ ID NO: 865496 - DNA, 98 bp, Homo sapiens
gggatcctctgtacgcccgttcactgttgcatttgctggtctggcctttgcgtccttctacctggcagggaagttacactgcttcacaccacaaggcc

SEQ ID NO: 865497 - DNA, 102 bp, Homo sapiens
acttcaaaaattaccattttatgatttactggatgaactgataaaacccaccagtctaggctcctggatttggatttggaattgcaatatctggtggacgag

SEQ ID NO: 865498 - DNA, 100 bp, Homo sapiens
atcaaaaagtgattaagcagagaatggagaagaaggttgattccagatgaagtggaaagggaaggacctctttgatttggtgtgccggactctggggctc

SEQ ID NO: 865499 - DNA, 98 bp, Homo sapiens
caccccaccttgtatgcaacgccccccttcacacacagtaaggttaatgttgaagaaggaaaatgcggaagtcgtcatttgacaagttttataaatga

SEQ ID NO: 865500 - DNA, 100 bp, Homo sapiens
caatggtccaagggggtttcccaggtttcaggctctgtataactatactcccaggaatgaagatgagctggagctcagagaaagtgatgtcattgatgtc

SEQ ID NO: 865501 - DNA, 100 bp, Homo sapiens
tacagacacaagcgggccaacaaataggtagtggatgttgaactccatcgccattctctcggagaagactgtatctatcctcagtcctcggagtctgaca

SEQ ID NO: 865502 - DNA, 100 bp, Homo sapiens
cccaaatcccggaaactccagcgtgtctccagccgtggtctcatagatgatggtgaaaccccagaagcagctgctctccgggagcttgaagaagaaactg

SEQ ID NO: 865503 - DNA, 100 bp, Homo sapiens
acagatctctgcagttacaggaacatcgtctgcttcatgattgtggtggtgccatgcagcaagaatcagagagatgcagagttagagccagaaggcctga

SEQ ID NO: 865504 - DNA, 100 bp, Homo sapiens
ctgcctcttgatgtcctgggcagggtactctgtggatatccccttggacaaaactgtcgtcaataaggatgtcttcagagatcctgctcttaaacgcaag

SEQ ID NO: 865505 - DNA, 100 bp, Homo sapiens
gacagcccgtggatctggcctacgcctctcgggcctctgtggcctcagagcgtctgggccacactgtctgggaagagacccaacatgagtgaagtttcct

SEQ ID NO: 865506 - DNA, 100 bp, Homo sapiens
ctgcggtcccgcgggacggcgcggcagcagctgacctcgcagctcagagagtggcaacagtgtgaaaagactgaaaccggaccctgagccagatgacaag

SEQ ID NO: 865507 - DNA, 100 bp, Homo sapiens
cgaagtcctggaggtgttccacccgacgcatgagtggcaggcccttcagccagagatagatgattttccctcttatttccaccagtttggcttttcaggg

SEQ ID NO: 865508 - DNA, 100 bp, Homo sapiens
cagtgacaggaggagaccataacccccgacagcgccatggcccagattctgccaattcgttttcaggagcatctccagattcgaactcgagccatctctg

SEQ ID NO: 865509 - DNA, 127 bp, Homo sapiens
gaagggcaggacgaggtgtcggcgcgggagcagcacttccacagccaagtgcgggagtccacggtaaagaaactgcggcaatgaaagctgatctcctgagggccaggaacatgaagaggtacatcaa

SEQ ID NO: 865510 - DNA, 98 bp, Homo sapiens
cttaactgttccaaaagagaataaaatacccactgtctcaaagcaggaggagcaatctcagaactgttatgaagaccttcgaagttcttcattctttc

SEQ ID NO: 865511 - DNA, 100 bp, Homo sapiens
gatccttggagcctcaaatatactttggataatgtttgcagctttttaagctatgaagaaggacatccctcacactctgaaacagatctccttcagagac

SEQ ID NO: 865512 - DNA, 98 bp, Homo sapiens
ggctccctgcctccgcgtcgcagcccccgccgtagccgcctccgagcccgccgccacatcctctgagccctcccaggcccaatacttcaaagcatcct

SEQ ID NO: 865513 - DNA, 122 bp, Homo sapiens
gacaaggaagatggggagccaaagaccaagcatctcagagaagaggaggaagaaggcgagaagcacagacgcatcttctctccagactgccgatcccagaaagccaggtgatcaccattaac

SEQ ID NO: 865514 - DNA, 100 bp, Homo sapiens
ctaactcctgccaggcagtgcccttcccggagcgtgccctcgccgctggtcagcccaaggccaaccccactgtcactctgttcccgccctcctctgagga

SEQ ID NO: 865515 - DNA, 98 bp, Homo sapiens
cggacgacaaaggcgcgggcccgggcagccgaggtttggaaggtttgcagttgctgctcttcagtccaaagtagaacagtatgagcgtgaaaccaatc

SEQ ID NO: 865516 - DNA, 100 bp, Homo sapiens
tgcagctgctgccactgctcagcacagtgctgagccctgggccaggatgggaggcaagaggaccaagaagtactacgagatgtcctacggcttgaacatc

SEQ ID NO: 865517 - DNA, 100 bp, Homo sapiens
tttggattacaactgttcatcctcacctatgcaaagaaagggaagctattgctgggattttgaggagggtcgtgtagggataaaaagaactgtaaggtgg

SEQ ID NO: 865518 - DNA, 98 bp, Homo sapiens
ctggtccaggccttccagtacacagacgagcatggggaaggctcactcagtaacttgatggattttgtgaagaaaacaggcatttgcgcttcaaagtg

SEQ ID NO: 865519 - DNA, 98 bp, Homo sapiens
tgaccctgggtctgatctggaccattattttgcatttccagatgtcagtattgaatatggtggtgaggcgtgaccctggcaacactgaacctgtgaaa

SEQ ID NO: 865520 - DNA, 100 bp, Homo sapiens
gttctgacccctggaaagacaccaattggcacaccagccatgaacatggctacccctactccaggtcacgcatgaagggagcaccgtggagaagacagtg

SEQ ID NO: 865521 - DNA, 100 bp, Homo sapiens
tgtatcttctgatgggaagggaactggaatatctagaggaggtacctccaggaaatgtgctagttcatgaccaagaaccccaccatgcgcttgggcagcc

SEQ ID NO: 865522 - DNA, 99 bp, Homo sapiens
tgaaatcgagtacatgatggagctcctagacccatcgctgttacatggagaagaacctgatgatttggaaacagaaattctacaagagccaagtggaac

SEQ ID NO: 865523 - DNA, 100 bp, Homo sapiens
atgtggatgaatatgaacattatgagcaatttcctgatcaaattgtaggatttgttcctagaaagcacgtctctacttcatcaggtatctacagttatgg

SEQ ID NO: 865524 - DNA, 111 bp, Homo sapiens
cagaatttttaccattcttgtggaatttttatgtattgagcatattgattatgctttggaaacaggacttgctggtggaagcagggaaaggcctggagatgaggaagctgg

SEQ ID NO: 865525 - DNA, 100 bp, Homo sapiens
gccgcacccacaccgcgctgcgcagttttgttctgctccagctgttcgaaggtgatccaggttcctcagtggtgtgctgaatattgtctttccatccact

SEQ ID NO: 865526 - DNA, 100 bp, Homo sapiens
catgtgtctcttctaagctgaataaagctgttttggaactgtcaggtacctcaaagcgcacattgcaagcaacccgtgccttgatggtggttggcatcct

SEQ ID NO: 865527 - DNA, 100 bp, Homo sapiens
tcaagtcctggctgaagccacggctgggacaggaagccacagtgccttatgcccgctcagaggcccacctcacagagctgctggaggagatatgtgaccg

SEQ ID NO: 865528 - DNA, 145 bp, Homo sapiens
gtcgcttcgccgactactttgtcatctgcggactggacacggagaccgggctggagccggacgagctgtcggatgtagatgagtgtgcccaagggctagatgactgccatgccgacgccctgtgtcagaacacacccacctccta

SEQ ID NO: 865529 - DNA, 100 bp, Homo sapiens
agacagaaaagaattatagtctaattgataaacatttgaatttatcagcaaaaaagaaagactcacatttacaagagtgtggcttcctgttgtggtgcat

SEQ ID NO: 865530 - DNA, 100 bp, Homo sapiens
ggaagaattcgtccactcccttgacctcaggaccctacccagggttctagaaatccaggcaggcatctatcttgaagttgactatattgtggagtatgac

SEQ ID NO: 865531 - DNA, 98 bp, Homo sapiens
agaagtgggagcagaagcaggtgcagatcaagaccctggagggcgagttctcggtcaccatgtggtcctcagcgggagatacagatgacccaccaaga

SEQ ID NO: 865532 - DNA, 98 bp, Homo sapiens
cctggaatatgaagcaacatgagatggtggatgaacccacaggtgaaaggtgtagcagtcactcggcctacacccacagcatcgaccttgtgaaccca

SEQ ID NO: 865533 - DNA, 100 bp, Homo sapiens
gcaaactccgcttccgattgggctaccacgccattccgagtatgagcctgcctagggtagttaaaagacgagtgaatgctctcaaaaacctgcaagttaa

SEQ ID NO: 865534 - DNA, 98 bp, Homo sapiens
aaggctgctggcaaaggggacgtcccaacgaagagaccacctgtccttcgagcaggtattgatgaagatgaccctactgctgatgataccagtgctgc

SEQ ID NO: 865535 - DNA, 100 bp, Homo sapiens
ccgtgaccgagagcgtgaccgagagcgcgaatatcgtcatcgttagaagggcaggattatttgttgcctgaagcagaagaaattactatgattagtattc

SEQ ID NO: 865536 - DNA, 50 bp, Homo sapiens
tggacttcagacatgcagggtgacgttggatcacaaggacgagtcataag

SEQ ID NO: 865537 - DNA, 100 bp, Homo sapiens
acagaattagcccaagcagattcctcccagtagtcatcctagaggatataggtgatctttcactgtgctttggatttatatttactggcttagatttgta

SEQ ID NO: 865538 - DNA, 100 bp, Homo sapiens
aaggcggctcaagcgcccagaaacccctactcatgatccggaccctgagactcccctaaaggccagaaagattggcctggggtacatcatctaaagatcc

SEQ ID NO: 865539 - DNA, 100 bp, Homo sapiens
agtcaaacgcagaaggactgcctcactgagcaaccaagagcctgttgcagtctccaaggcaccatgaatgccatcgtggctctctgccacttctgcgagc

SEQ ID NO: 865540 - DNA, 98 bp, Homo sapiens
atgctggagaactttgcacatgtaacatccctggcttcatcgcagtaggaatggcagccccatctatgaaggaaagacaggtctgctggggggcccgg

SEQ ID NO: 865541 - DNA, 98 bp, Homo sapiens
tttatagctaagactccaggacacccctgaagccgagaaatggtatgagaaagtgccagtcatcttggttgggaacaaagtggacctggaaagtgaga

SEQ ID NO: 865542 - DNA, 99 bp, Homo sapiens
cctggtcgaacagttttttctaatggctattcaaggggcataaggaaatggtggcaggcacttcctcctaacaagaaggaagtagttaaagaaaatata

SEQ ID NO: 865543 - DNA, 100 bp, Homo sapiens
tgcggcagagtctccgcagatttgcaaatacacacactgctccagccacagtggttcttgtgtcaaggcaagatcacctgttgcctgaagcagaagaaat

SEQ ID NO: 865544 - DNA, 100 bp, Homo sapiens
ccggcttcggagcgggagtgttcgttgtgccagcgactaaaaagagatgccgacatcagtggctcagacagttgtccagaaggaaagtggcctgcagcac

SEQ ID NO: 865545 - DNA, 99 bp, Homo sapiens
tgcaagccagttagaagccctctgtcctcaggaatacctgaacagtattttgcaacatgcaaaagattttaaggaatatcatcggtctgtggccggaaa

SEQ ID NO: 865546 - DNA, 98 bp, Homo sapiens
ccctgcggtctgagggcttcgacacctaccgctgcgaccgcaacctggccatgggcgtgaacctcaccagacttctgaacgagagcgagaagcggccc

SEQ ID NO: 865547 - DNA, 100 bp, Homo sapiens
cggggaaccatggctgccccgagaggatgaacgtgaagccagagaaaatgtgaagagagagcaagatgaggcctatcgcctttcacttgaggctgacaga

SEQ ID NO: 865548 - DNA, 99 bp, Homo sapiens
gagttcagaaatgagtggaaaaatacccatggtgggcaggaagagatgtcatttgtcagagtgaaccgctgtggtccccgagttggtgtaagaaagaca

SEQ ID NO: 865549 - DNA, 100 bp, Homo sapiens
aagaagggccttactccttcacagatcggttcacaatatgtgcctaaatcttttcagaggacaactttgactttcaagaggagattccaagtgacatctt

SEQ ID NO: 865550 - DNA, 99 bp, Homo sapiens
cctgccctgatcggggatttcctgattggtgctggcatcagcacagacaccgctttgccgataggtaaaggacatggcctgtctatcacacctctgcca

SEQ ID NO: 865551 - DNA, 100 bp, Homo sapiens
tctgattcagaatcctgaaaatgtgatctcccttaaaaaggcagttgcagtggtgcagaatggctgacctcagtcttgcagatgcattaacagaaccatc

SEQ ID NO: 865552 - DNA, 100 bp, Homo sapiens
atcatccagggagatggcctataatgagagcctacaacatgtcagatggacttcagcagaaatctttatgatattggggaacaactggacagtgaagatc

SEQ ID NO: 865553 - DNA, 100 bp, Homo sapiens
ttattatgctgcttctggcttctgcagtcatcagtgttttaatgcatcagtttgatgatgccgtcagtatcactgtgggtggactgaaagtggaaatgcc

SEQ ID NO: 865554 - DNA, 100 bp, Homo sapiens
atttaaagtttgatatggaacaactgaagtgtaaacaggaacatcgataagtagtgtaaaaacttgcacaatgaaatccgaagccaaggatggagaggag

SEQ ID NO: 865555 - DNA, 100 bp, Homo sapiens
tttgacaagagtggaaatggagaggtgacatttggtaaatcttacaaaccattgtggttttatgggaggactacaaaaaaacaaaagcactggattgacc

SEQ ID NO: 865556 - DNA, 98 bp, Homo sapiens
tggcgtgtcataaaataccagtggaggccgacttcttgtatgcatactccacagcacctgatttgaagaccttgcttctcatcacccactggattatg

SEQ ID NO: 865557 - DNA, 99 bp, Homo sapiens
ttgcccttagtggccgtcttttgcctctttctctcaggctttcctacaactcatgcccagcagcagcaagcagaatcagacacaagtttggcagaagga

SEQ ID NO: 865558 - DNA, 100 bp, Homo sapiens
aaataatccagagatttccacagaaggactgggatgatacaccttttccacagggaattgagttgtattgtacctggaaggctcggctcttgtgtttgag

SEQ ID NO: 865559 - DNA, 99 bp, Homo sapiens
gagctttcacaattgcagcagatgaagatccattggtaaattgatcaggatttttggcctaccctccaaagaaaagcatcctgaggttagcattacact

SEQ ID NO: 865560 - DNA, 100 bp, Homo sapiens
ccgatctgcccgttgtgtttgtgaaacagagaaagataggcggccatggtccaaccttgaaggattggccatttgatgatggagctccaccccctaatca

SEQ ID NO: 865561 - DNA, 100 bp, Homo sapiens
gtgtccttgacctaaatgcatttgagcgacaaaacaaagctgaaggtcttgggatggtgacagaggaaggatcagaaacccgggatggacgtggccgacg

SEQ ID NO: 865562 - DNA, 100 bp, Homo sapiens
ctatttgatgaagatgtcttttgaaaggtgtactgcaaggaacaaaatgtttgtaaattctccttttaccaaggtctctcaggcagctgcagagcttcaa

SEQ ID NO: 865563 - DNA, 100 bp, Homo sapiens
agagagcgagctgagtggttgtgtggtcgcgtctcggaaaccggtagcgcttgcagcatgatgaggaaactgaggcttggtgaagttacgaaacttgtcc

SEQ ID NO: 865564 - DNA, 100 bp, Homo sapiens
gagcgcgctcgctccggcgccggcctcgcctcctcgcagcagcgccatgccgctgtacaaccagccctccgacacccggcagtatcatgagaacatcaaa

SEQ ID NO: 865565 - DNA, 99 bp, Homo sapiens
acttctctacgaatgccaagacagagcatgggtggtgctcgcacacagcaggatttaagagctgggaaaactcttcagatttttaacattgaaatgaaa

SEQ ID NO: 865566 - DNA, 99 bp, Homo sapiens
ctcccgagaagctgggattacaggtgaatttccagggccatccagagaagctgatcagactcaggaatccatggggtgaagtggagtggtcgggagcct

SEQ ID NO: 865567 - DNA, 100 bp, Homo sapiens
tggcaaaagctgtgtccattttttctcaaatcatgaatccagaaagcatagcctgcattaatttaaatactatctgtcaaaaaacacctaaggactctcc

SEQ ID NO: 865568 - DNA, 100 bp, Homo sapiens
agcaatatgcattagcagcagctcagcagccacatatagttgtccagtgtacagaagcttactggaaggagtggccaactagttaaaggtttgacacctc

SEQ ID NO: 865569 - DNA, 98 bp, Homo sapiens
cacctgcacccgcctctgggagatgtcaagccctccaacatcctagtcaactcccgtggggagatcaagctctgtgactttggggtcagcgggcagct

SEQ ID NO: 865570 - DNA, 100 bp, Homo sapiens
ggaggctgtgaagcagtacagctcctacaacttcttccgccccgacaatgaggaagccatgaaagtccggaagaggaagagcaagcaggccctgagggac

SEQ ID NO: 865571 - DNA, 108 bp, Homo sapiens
caatttatcattgaataagtgttttaagaaagtggacaaagagaggagtcagttcctccgtgtcacaaagcagtacctgccccacgtggcgcgcctctgtctgatcag

SEQ ID NO: 865572 - DNA, 98 bp, Homo sapiens
aagcagcaagcctcggcagcagtcaatcctccagaacctatgctggtggaacagcctcggccaccaaggaatgtaacaacccctgctgcaatgcctct

SEQ ID NO: 865573 - DNA, 50 bp, Homo sapiens
cgggagccgccacttcgaggactgggcctataacattcacgtgaatggag

SEQ ID NO: 865574 - DNA, 100 bp, Homo sapiens
ctacaggagtaaagcgaattgtccaagccctgaatgccaatgtgtggtccaatgtagtgatgaagaatgactataatgtaactgcaaactccaagctggt

SEQ ID NO: 865575 - DNA, 100 bp, Homo sapiens
attcgcttaaattttgcagagaaagtgccctgtactctgtggggatgacggcagtgggcctggccatcctgtggtatgttttccgtctggccgggatgac

SEQ ID NO: 865576 - DNA, 100 bp, Homo sapiens
ggccgggagaagcatgggaaggaggccgagccgggatctcaggtcctcgggggcggcggccacgccaaggacgggttctaaatggcttctaagaagttgg

SEQ ID NO: 865577 - DNA, 98 bp, Homo sapiens
agccgaaaataaaacatcgccccttctgcttcagtgtgaaaggccacgtgaagatgctgcggctggcccttgcttgtgattggtggttcctctgaaag

SEQ ID NO: 865578 - DNA, 98 bp, Homo sapiens
aaggcggaggagacccagcgttctgtcaacgacctcaccagccagcgggccaagttgcaaaccgagaatgatggcccaatggaggagtccaaaccaaa

SEQ ID NO: 865579 - DNA, 100 bp, Homo sapiens
gaggagcagaaacggcaggtgggaagagagcaagggcagcagattcacttgtcatggattagtgactggtcagagttatattttccgggtcagagcagtc

SEQ ID NO: 865580 - DNA, 100 bp, Homo sapiens
gggaattctcttcactagaatatggagactgttcaatcaccagggtctggccgtgggcctgggcttcggggcactggcagaggtcgccaagaagagcctg

SEQ ID NO: 865581 - DNA, 98 bp, Homo sapiens
aggacgctccccagccaggggaacatggcagtgcctgtgagttccaaagaactactggttcagattttagctcttcccaagttgtgaaaatagtgaag

SEQ ID NO: 865582 - DNA, 125 bp, Homo sapiens
aaataagttatgctatgaggatgacaaactctggagtaattggagccaagaaatgagtataggacgtgtgtccccatcaccctctcaggaaagtctaagttcatcaaaatcggatacagatacag

SEQ ID NO: 865583 - DNA, 100 bp, Homo sapiens
attcttctctttaaatatttgatgaaattcaccagtgaagccgtgacatcctgggatattctttgttgagaggtgcaacattagaggaaatcaatcagca

SEQ ID NO: 865584 - DNA, 100 bp, Homo sapiens
cgtgggcaacgtacgtcagacggcagtggtggaaaagatccatgccaagggttatcaatgccgggaagagcacacacaatgaagaccaagccagctgtga

SEQ ID NO: 865585 - DNA, 50 bp, Homo sapiens
gcggacgagcacgaacacacggatgaatgctatcaagtaagacaagtgtt

SEQ ID NO: 865586 - DNA, 125 bp, Homo sapiens
ttcaaagaaacattaagaacttggatcccattcacctgaggcacccgaagaagagaccatccatatttccagaaacttgtggtggagaatgttgatgtgttaacacaaatgaggaccagctttga

SEQ ID NO: 865587 - DNA, 98 bp, Homo sapiens
ttctggtgctcctggaactggaaaaactgcctgcttaagccggattctgcaagacctcaagaatgaacccggcccactctggcccttgggccagacct

SEQ ID NO: 865588 - DNA, 118 bp, Homo sapiens
gtacgacaagatctgcaaggccgccaggcactgagctggagcccgcctggagagacagacacgttctagtgagatgcccaaattaacagaacaattagcaggaccacttcgtcaaatg

SEQ ID NO: 865589 - DNA, 100 bp, Homo sapiens
ccgacctgtctttgggatctgcctgggacaccagctattggccttagccattggggccaagacttacaagatgaggtggaacggcacatgtgtgatgggg

SEQ ID NO: 865590 - DNA, 100 bp, Homo sapiens
gccgggatctcaggtcctcgggggcggcggccacgccaaggacggatgcctgaaaacttcatgcctcctgttcccatcacatcaccaatcatgaacccgt

SEQ ID NO: 865591 - DNA, 100 bp, Homo sapiens
agaatgagcccctgccagagaggctggaggttgaactcccaccacctgatcttggaccaagttctgcactaaatcagacactcatgttgctgcgtgaagt

SEQ ID NO: 865592 - DNA, 100 bp, Homo sapiens
atcatctttattatctcattgaagcttggaattacatagctggaaaggatcttacaggatatgtgacgcagccacaattcactgtcttttggagcaagaa

SEQ ID NO: 865593 - DNA, 99 bp, Homo sapiens
ttgaagacacctgtactgttgttcttttagaactcatcaaattgaagctgttccaaccagctctgcaagtgatggatttaaggcaaatcttgtttttaa

SEQ ID NO: 865594 - DNA, 100 bp, Homo sapiens
tcaacgtcagaaatggatatggatttataaatcggaatcctttgtgcattgaagactttagattcctctctgcggtagacgtgcacttataagtatttga

SEQ ID NO: 865595 - DNA, 100 bp, Homo sapiens
tgggtactgtgtaaaggactccacagccatcaacttcccttcatccttgccgtgtctttgaaaggaggagccattggatgaaagctcagtgaagaaaatg

SEQ ID NO: 865596 - DNA, 100 bp, Homo sapiens
gagaaaagttttaggaagaccaaattttttatgtgctgaaagagttggccagatgactaagacatataatgacatagatgctgtcactcggcttcttgag

SEQ ID NO: 865597 - DNA, 100 bp, Homo sapiens
tcaagcacacccaatggacagcatgcctcaccaagtcacatgacaagcagtattcatcaaagtaatagacacaaatgaccatcgtcctcagttttctaca

SEQ ID NO: 865598 - DNA, 100 bp, Homo sapiens
ctccacctgcctgccaccggagcctgacagccttctggggtgcagcagtagccagagagcagcctctctggtgttccttgcctgtatctccccttggttc

SEQ ID NO: 865599 - DNA, 100 bp, Homo sapiens
gagagagatgttatcatgagggaattccggtcagggtcaagtcgtgttctgatcactactgacttgttggtatgatctcgtgaaaccttgagagaaactg

SEQ ID NO: 865600 - DNA, 99 bp, Homo sapiens
gggaccaggcctacgccatcaacctggccgctgtgggcaccgtggccttcggctgcacaggtatggacctgtctgccaatcaggacgaggagaccgacc

SEQ ID NO: 865601 - DNA, 100 bp, Homo sapiens
aggtacaaacccgtagtgctgatgaaccaatgacaacatttgttgtctgtaatgaatgtggaaatcgatggaaggtggatgaaaatactaggaaaagttt

SEQ ID NO: 865602 - DNA, 100 bp, Homo sapiens
ggccaatgatggctttgtacggcttagaggacttccctttggatgtagcaaggaagaaattgttcagttcttctcagccatccagtccaatggatcagat

SEQ ID NO: 865603 - DNA, 100 bp, Homo sapiens
aaatctttcgctccctacacaccctggttggacaggtttctctgtcattcacagaaaaatgaatcatttaaacctttggaggactcagttatcacaatac

SEQ ID NO: 865604 - DNA, 99 bp, Homo sapiens
tatgcaggaaattttgtggaaatgtgttcagagcaacattgttttgttgacacaagcatttagaagaaagtttgtgattcctgactttatgtcttttac

SEQ ID NO: 865605 - DNA, 100 bp, Homo sapiens
tcttcagctcactgaccatctgcctacctcccgttaatggaaccgcgactcacagacaccattcgcttttcacccaagatgatttgatgtcttataaaac

SEQ ID NO: 865606 - DNA, 100 bp, Homo sapiens
gtaaattcttcagctgctcggacagatgaagctccccaaggagctgcagatgctcagccagcattgggcagcccccgcttcctgctcccctacccccttc

SEQ ID NO: 865607 - DNA, 100 bp, Homo sapiens
cttgacctttaggtgcttttatattcatctcaaaaacaaaattctgaactcaggacttggcaagctaccacatactgttgattgtgatgaaatgccagtt

SEQ ID NO: 865608 - DNA, 99 bp, Homo sapiens
caacatcacccacccatttgagtttgacttctatctgtgcagccacgcaggcatccagatggagtttgacgagaaggacttacgacgggagatcagcta

SEQ ID NO: 865609 - DNA, 100 bp, Homo sapiens
gaggaacctacttccctcctggcaaagaacccaaggaaggcgagcggaagatttacttggcaattgaaaaaattatggatccggatgagcaattggaaac

SEQ ID NO: 865610 - DNA, 98 bp, Homo sapiens
acatcccacagagatacccagacaacaggatcgtctcgtccaagttgcgctacaagtcagacctgatcggcatgaagggcataggatggctggcgctg

SEQ ID NO: 865611 - DNA, 99 bp, Homo sapiens
atgaatcgaaaatgctttgaggaggacttccggatccatgttgcacatcctaaagtttgaagagtctaaataacggggcttccctcagcatgttccctc

SEQ ID NO: 865612 - DNA, 99 bp, Homo sapiens
aaactcctggagttccagctggcactcaaggtacagagcatgaagcagacgaacagcagcctgcgccaagccctggagggcggtattgatccactacgc

SEQ ID NO: 865613 - DNA, 100 bp, Homo sapiens
gctactgtactggctattggaaggaggagattctgaagataaggagagctggctttatgtgctggggcagaagagatccgatagctatgttctgctggag

SEQ ID NO: 865614 - DNA, 99 bp, Homo sapiens
tcctgcgggtgcctttgaaaatcaacgacaacttgagcacaggaccatcaaatgttttcaaaattgtgaagatgattatggaaagaaatttccaacctg

SEQ ID NO: 865615 - DNA, 100 bp, Homo sapiens
gtttttataagaataaaattccattcaagccagatgagcttgtcaggaagatcggaggtgccaagtagcagagaaagcatcccccagctctgacagggag

SEQ ID NO: 865616 - DNA, 100 bp, Homo sapiens
aaaggccccaggatgcctctgggcttcacgttctcatttccctgccagcagacgagtctggacgcgttgccaaccatcatagctgacaatgcaggctatg

SEQ ID NO: 865617 - DNA, 51 bp, Homo sapiens
agccagtgatatgctatacatggccatttgtgtaggaccagaaaacatgca

SEQ ID NO: 865618 - DNA, 98 bp, Homo sapiens
tgcaagttggacagacgggaaaaatagtagcaccagtatccgttacagcactgatgtgagtgtagatgaagtaaaagctttggcttctctgatgacat

SEQ ID NO: 865619 - DNA, 98 bp, Homo sapiens
aggagagactggaagtaaatactttgtactacaggtacactatggggatattagtgcttttagaggccagtcctgctcctataattgtcaacacagat

SEQ ID NO: 865620 - DNA, 99 bp, Homo sapiens
gcgcattggaaagaagcgaccgcggcggctgttatttgaaggattgaaggcatttcgaggagtagataataaaattcgactgtttcagccaaacctcaa

SEQ ID NO: 865621 - DNA, 100 bp, Homo sapiens
aaaggaatgatagctggggttcttttgacctgagggctgctattgtatatcacactaaaggatgttgacaatgcgtctctggcacgtcttgaccttgaac

SEQ ID NO: 865622 - DNA, 100 bp, Homo sapiens
atagcctcaaactcccaggctcaagcaatcctaccatgtcagccttcccagtagctggaactacagcatgccagtgtgaaggaaaagataaccgaattcc

SEQ ID NO: 865623 - DNA, 100 bp, Homo sapiens
gttcaagacccgacatgagggaaaagggacgtaggaagaagggcaggacctgggcggaggccgccaagacgatccatatcatagattttgacgatgaaaa

SEQ ID NO: 865624 - DNA, 100 bp, Homo sapiens
cgagtttcatctccgaatgaaagaatgattacggacctgaagccaaagaacaagatgcgctagtggacagattgctgaccaggggcttgagagctgggtt

SEQ ID NO: 865625 - DNA, 100 bp, Homo sapiens
cataaagaacaggagtaaagctgttgaagagctcattcttcaggacctggaagatactgatattttaagtatcactggacaggccatggctccacggtcc

SEQ ID NO: 865626 - DNA, 98 bp, Homo sapiens
ggtgggggtgtttgtccagcgactccggggcctgatgaatgacatcgggctgatcccttatccaacatggttctaaccttcagtactaaagaagatgc

SEQ ID NO: 865627 - DNA, 100 bp, Homo sapiens
atcggagaaggcatgttcaaagcaccatctttttcagttgctttccaacctcatgatattcaaggttcatgcaaatattgaaaactcttggaatgaggaa

SEQ ID NO: 865628 - DNA, 113 bp, Homo sapiens
caagactagagtgtcagaagataacattacagaatctcaacacatgctagtggctgaaatcatggtgtcagctggtaatgccgctgtcatcaaatatgaggagaaacctccaa

SEQ ID NO: 865629 - DNA, 98 bp, Homo sapiens
ggatcgcttacatctccagagaaatcctgaggcttatttccagtgatgctgatggagccatccaaagggctggaagattcagagtggaaaatggctct

SEQ ID NO: 865630 - DNA, 100 bp, Homo sapiens
tgaaaagaagaatccgtaagattcctggagttcctatcatgtacatttctaaccataggaacagcagcagtattggtatcgacagcacttgcttagtttg

SEQ ID NO: 865631 - DNA, 98 bp, Homo sapiens
tactgattttatcagggatctggcaacgtagaagggagcttagtgatgctgactgtgatggagccctgaccctgcctgagttctgtgctgcgtttcat

SEQ ID NO: 865632 - DNA, 100 bp, Homo sapiens
cgatggagtccaacatatgatgtatcttctatcttaacatcaattcagatccacatctcaaagaagtggggcttcaccaagttcaatgctgatgaatttg

SEQ ID NO: 865633 - DNA, 100 bp, Homo sapiens
gggtcgtcgccctcgagatgattatcgtaggaggagtcctccacctcgtcgcagggaaatcctcattgacgattcaatttgttgaaggccaatttgtgga

SEQ ID NO: 865634 - DNA, 100 bp, Homo sapiens
gggatgattataggcgtgatgatagaggacagtcattttgtttactcattcagccctgttgcaggtcccaataaactcttcataaggttgacagaagcac

SEQ ID NO: 865635 - DNA, 99 bp, Homo sapiens
ggacccaagctctgccggacatggtggtgtcccacctttttgggaagtattcatccacaatgcgatacctttcatagggtttggctttttggataatgc

SEQ ID NO: 865636 - DNA, 100 bp, Homo sapiens
gccaacaagacgcacccgtccatcttcgggatcttcgacgggcacgggggagagtgctcgccagaaacccagagctaattatttagaagaccgaaaaaat

SEQ ID NO: 865637 - DNA, 98 bp, Homo sapiens
gcagaagaagagcagaaaatagcagccaggaaccaagaaaacttggaaaagcttttgacatcacctatgtgcgtctcaagttccacaccagccgcccg

SEQ ID NO: 865638 - DNA, 100 bp, Homo sapiens
tatcaatggcaaatcgagggaaacataccaatggttcccagtttttcatctcctggctaaatacaaaagcttgcaatgggacaaagtactgaggctggag

SEQ ID NO: 865639 - DNA, 99 bp, Homo sapiens
ctttttctaactatttcaagatgatatttattcaccaaacaagcttttcctccgcaaccatgtctgacaaacccgatatggctgagatcgagaaattcg

SEQ ID NO: 865640 - DNA, 100 bp, Homo sapiens
ggctacatgcaggacttggaggtggagcaggccctgactccaggtgtcagctgtgatgcatgtttaaaaggaaattttcgaggtcgcagatataagtgtt

SEQ ID NO: 865641 - DNA, 100 bp, Homo sapiens
agccattgctcttagcaggaaggacaaaactattcaacatgtggaagtattttgttatgccagagctaaagttgcagacaagatccagctcatcaataat

SEQ ID NO: 865642 - DNA, 109 bp, Homo sapiens
cgacgtccctcaaaccttgcttctaggagataaaaagcctttcgattaccaggcattggtattagatactgtgatgtgtgcagttacttcttgcagtccttcccttgac

SEQ ID NO: 865643 - DNA, 100 bp, Homo sapiens
tctcattccttctccagggagagtcgctgcagctttcctgctctgggaccctaccaaggtgcccccacgactgcaggctgtgactgatgaccacatccgg

SEQ ID NO: 865644 - DNA, 100 bp, Homo sapiens
ctggggagcgcctcgtcgacatgagtgatgtggaggaaaacaacttcgagggcagataggtacaagtagtcaagtttcttcattaaggagacctgaagag

SEQ ID NO: 865645 - DNA, 100 bp, Homo sapiens
caacccccatcgctgccccagtaacagtgccagtggttggaaagaaagcaggttcttggagtgtcaatgttttaataccagtacacaattaaatctgtgg

SEQ ID NO: 865646 - DNA, 99 bp, Homo sapiens
tgacttggatcaatcaaatgtgactgaggaaacacctgaaggtgaagaacatcatccagtggcagacactgaaaataatgccaggtggagctcaacagg

SEQ ID NO: 865647 - DNA, 100 bp, Homo sapiens
ttacagtctgttccgcatgatcgttataataagacatacaatctttgccagcaacacttcctccttgcagattacaagcatagctaatgccaccaccaga

SEQ ID NO: 865648 - DNA, 100 bp, Homo sapiens
acttgcttttgcttcagcgttctgtggttgtcaacaggtcactttggaacttcttgggtgaagcactactgtacatatcaacgggattccaaacaaatca

SEQ ID NO: 865649 - DNA, 99 bp, Homo sapiens
acctccgcagagaccgtgcttatcacccagcagagccacgaggagctgaagaaggttctagatgctaacaagagacgagttgtactgctgtcacaggaa

SEQ ID NO: 865650 - DNA, 99 bp, Homo sapiens
acatatttggtagcctttgcatacaagaatgtgaaatttgttctcaagcacaagaagccctcctatgacactgaaacagatcctagtgagggattgatg

SEQ ID NO: 865651 - DNA, 98 bp, Homo sapiens
accatggtctacaagactctcttcgctctttgcatcttaactgcaggaaaccacccctactcctaatcccccgactacagaagaggagaaaacggaat

SEQ ID NO: 865652 - DNA, 98 bp, Homo sapiens
ctgcgacctggggccctgggtgaagtgctccgccgcccttgcctccagtggaagcatcagttcacagcagtaatgcacactgtacagataagacaatt

SEQ ID NO: 865653 - DNA, 100 bp, Homo sapiens
agaagaaggctgttgccatctccttgcccaagggtgtggtggaggtgacccatgacctgcagggtgattctgggggtccacttgtctgtaatggtgtgct

SEQ ID NO: 865654 - DNA, 98 bp, Homo sapiens
agcgcgccgccctctcgtcccactttccagatacaggctagttccaaaggtttattttcctgagcaaattcatgatgttgtacgggccacaaagtatt

SEQ ID NO: 865655 - DNA, 100 bp, Homo sapiens
tcaccacaaaaacctatcgttagagtcttcctgcccaacaaacagaggacagtgcgacaaggtgctggggcaaccaatggaaaagacaagacatctggtg

SEQ ID NO: 865656 - DNA, 100 bp, Homo sapiens
ctgagatccaaagagaaagtggtggcaaatattaagaaggagactcatattgtgtggtacaaagatgagagggagatatcagtggatgaaaagcatgact

SEQ ID NO: 865657 - DNA, 100 bp, Homo sapiens
tatttttaaactacagaaaagatggaaactttggacttcaagaacttggattaaagaacttgacagagcagcccgacggccatggaggctgaagagacga

SEQ ID NO: 865658 - DNA, 100 bp, Homo sapiens
gtgttcaccatcctggccccggaagctccgctctgcaccgaaggggatgggtccgacccagcctggcatcatcacagcctcgagtggcgtccagcctgcc

SEQ ID NO: 865659 - DNA, 98 bp, Homo sapiens
agagcctgtggtggttgatctgactcacaatgactctgttgtggatatgttcggttcatgaatgagcgtcgagaacaacttcgagcaaagagaccaga

SEQ ID NO: 865660 - DNA, 100 bp, Homo sapiens
ggcggcaagaaaaatgccagccagaagaggcgttcgctgcgcgtgcacattccgacaatgcagatcttcgtgaagactctgactggtaagaccatcaccc

SEQ ID NO: 865661 - DNA, 100 bp, Homo sapiens
aatatggtgtgaaggttggcctgacaaattatgctgcagcatattgtactggcctgctgctggcccgcagggggtacacatctttctggaatgactgcat

SEQ ID NO: 865662 - DNA, 98 bp, Homo sapiens
aacatcatgcagtggaatgcagttatatttggaattcaaagaagctttttcactatttgacaaagatggtgatggaactataacaacaaaggaattgg

SEQ ID NO: 865663 - DNA, 98 bp, Homo sapiens
tacgagacgtgtgctacatacgggctgaatgtggagagggtcttccaggacgagaacaccttctgcagtggggaccatgtgtcctggcacagcccttt

SEQ ID NO: 865664 - DNA, 51 bp, Homo sapiens
ctggacgagaactatgtggccaggcgagagaggctggctgaggatcgtgac

SEQ ID NO: 865665 - DNA, 100 bp, Homo sapiens
atctatgaggagaccaaaataaaactaacagtctatgatgtcaaggataagtctcatgacaccattaccacccatagtgcgaggaggagccatcgacaga

SEQ ID NO: 865666 - DNA, 98 bp, Homo sapiens
cagcaccagccgccccgtcgccgccgccgccgccgccgcccggaccccggcgcgctgaatgcaggtggattctccacagttttcctcgtgcgtactca

SEQ ID NO: 865667 - DNA, 100 bp, Homo sapiens
caccagaaatctaagggacactgtgttcctgaaagtacagtctgaaaatacagcctgttgagaaaatgcatctagctgtagttgcctgtggtgaaagact

SEQ ID NO: 865668 - DNA, 98 bp, Homo sapiens
gcctttcgagagaccattactgcccctgtccccattagtgaccagaaggatcccaaggatcgaatggttcaggttgtgaaatggtacctctcagcctt

SEQ ID NO: 865669 - DNA, 100 bp, Homo sapiens
tcttgcaacaggaagcataattctgtgcctcttcaggtctcttgcagctgaatggggtaaatatggaatgcgattcaatgtgattcaaccagggcctata

SEQ ID NO: 865670 - DNA, 100 bp, Homo sapiens
gaaaccctgcattttgggaaactcgactttggagaaaccaccgtgctggaccgcttttacaatgcaggaatccgcaggcggggatcttcagtctccttta

SEQ ID NO: 865671 - DNA, 98 bp, Homo sapiens
aagctcatgagcagcctgcccaacttctgcgggatcttcaaccacctcgagcggctgctggacgaagatgctcagccagcattgggcagcccccgctt

SEQ ID NO: 865672 - DNA, 99 bp, Homo sapiens
aaggacagcggcaccgccagacggccagaaagttccgccatgagctggggcacggagctgtggccttagattgtaagcaaaagaaatcaaggtcaagat

SEQ ID NO: 865673 - DNA, 100 bp, Homo sapiens
aatgatggggcagcaagtggccaaaattgtggtggttttggactccatgattaaggtgttcacattcacacacaatccccatcagttgcacgtcttcgaa

SEQ ID NO: 865674 - DNA, 100 bp, Homo sapiens
ccaccccaagctctacgacgagggcgacccctctgagaagctggagctggtgacagatatgagggaaggcaccattggagatatggctatcctgggtata

SEQ ID NO: 865675 - DNA, 100 bp, Homo sapiens
gtttccacggccactccagtgccaacagccaattctacaggcccagcagtgagaaactttcacaatctgtaatagatggtgtgactgttctaggaggtca

SEQ ID NO: 865676 - DNA, 100 bp, Homo sapiens
gcaagaggcacctcgtcccaagagaatcatttgtcctcgggagaaataacatctgctttgctgccgagctcagaggagaccccagacccctcccgcagcc

SEQ ID NO: 865677 - DNA, 100 bp, Homo sapiens
ggtttcatgggcgtcatgaataacatgcggaaacaggtcagtatttccagaaattgggacgatgttcagtgagagtttctgtgaacacagccaatgtgac

SEQ ID NO: 865678 - DNA, 98 bp, Homo sapiens
ttttttaactgaagatagtgcctttcagccctaccaggaccaccgcacagtctcaagtgtagtgaagtcaggaaagactcactggttctccagtggaa

SEQ ID NO: 865679 - DNA, 100 bp, Homo sapiens
cagtgacggaggagcttgtaccaccggtttggagagaagatggcttttatccctcagaacctgtttttgttccagcaccaggaaccaatgaagaagatgg

SEQ ID NO: 865680 - DNA, 98 bp, Homo sapiens
agaatcttaaggtatacagattttgatactttaatatatacctgtgctcccgaatttgacttcatggaaaaagcggagtcttttagtcctgctataca

SEQ ID NO: 865681 - DNA, 98 bp, Homo sapiens
cgatgacatagacactgtgaagcacctgtgtggcgactggttccccatcgaggagactgcattgcttattgatccaaaaaattcctgttcttcatccc

SEQ ID NO: 865682 - DNA, 100 bp, Homo sapiens
aacggacaaaacctccaccaccggcagcatcctgaatcttaacctgggatcaaaatacttgctggatggtggactcagagaccaataaaaataaactgct

SEQ ID NO: 865683 - DNA, 98 bp, Homo sapiens
acttcggacatagaggccaaccaacctttggaggaaatgggtcctgatgaatatgaagagatggaagaagaggaggaggaggaagaggaggaagacga

SEQ ID NO: 865684 - DNA, 100 bp, Homo sapiens
tcctcttctgcaaggtccggctgctggatggaggggattttgtcagcttgtcgtcaagcatcttcacaactatttcacagtgactcttggaattcctgct

SEQ ID NO: 865685 - DNA, 114 bp, Homo sapiens
cacgggttgacctaaggaagaagacagagactttctccacaagaagggttaagtctgggctgtgcagccagccaggactggacctcactgtgggaacaacaagatcaacaagag

SEQ ID NO: 865686 - DNA, 100 bp, Homo sapiens
aggaacagatgtcagcaatgtcgcttcaaaaagtgtctgtctgttggaatgtcaagagatgtcataccctaatgatcccagcaagataatgtcctgtctt

SEQ ID NO: 865687 - DNA, 98 bp, Homo sapiens
aatattctactttctgtctctatgaatgtgactaccctggttacctcatatattatatctgggtgttggcacccagccactattctgccaatgaagta

SEQ ID NO: 865688 - DNA, 100 bp, Homo sapiens
ggcagggcaaggaaactggccacaaaaactgttttggctgggcctacttcacctataccttctctgggaaatgtgagtgaaactgcatctggatcagtta

SEQ ID NO: 865689 - DNA, 99 bp, Homo sapiens
tcgcattttggcattgacatttaattttagggtcctttatatagaagggagagtagctgcaaaggaaaagccaagtgagacgggctctgggaccatggt

SEQ ID NO: 865690 - DNA, 100 bp, Homo sapiens
cccttaccgggagtttcactgaagggtggttgagtttgcctcttatggtgacttaaagaatgctattgaaaaactttctggaaaggaaataaatgggaga

SEQ ID NO: 865691 - DNA, 99 bp, Homo sapiens
ctacgtcctgatcgacatggttctcaacaagatggccaaaggcgtggtgtccctcgtggccgttcacccctccaccgtcaacccgctcgggaagcagct

SEQ ID NO: 865692 - DNA, 98 bp, Homo sapiens
cagcctcccgagtggctgggactacagatgcttttactgactctgctatcagtgctaaagtgaatggcgaacacaaagagaaggacctggagccctgg

SEQ ID NO: 865693 - DNA, 98 bp, Homo sapiens
tcatcagctatgaagtctatgaatcctgggagaatcaagaagtcgttgtagctctgctatgttatgccatcatccagtgcaagatgtgctcagtttcc

SEQ ID NO: 865694 - DNA, 100 bp, Homo sapiens
tgtacaacccgacgaggaacgaatgggacaagatcccgtccatgaatcaggcctcttctgaagagctgaaagctgcctaccggaggctctgtatgctcta

SEQ ID NO: 865695 - DNA, 99 bp, Homo sapiens
gaaaaatgcaatcatattccgtgaatcatttgctgatgtacttcctgaagcagctgctctagtgaaggatggtgctccgtactgtgaaaaggactacca

SEQ ID NO: 865696 - DNA, 98 bp, Homo sapiens
ctctgcaaggtcttcggtgcccacaaggactgtgaggtggccccactgcccaccatttacaaacgccagaaggcagctgaactctccatcaagtttct

SEQ ID NO: 865697 - DNA, 100 bp, Homo sapiens
ctggaatcgcccaagtccctctactcgcgaggagaagtacgtggaggaacttgcagcagtgaggcaaaccctccagacagacctggagacatccattcgg

SEQ ID NO: 865698 - DNA, 98 bp, Homo sapiens
cgtaccccttcatgagaggcgagcacaactcgacctcctatgactctgcagttactcttttggaagaagaaagaaaagcctatcgaaatcaagttgag

SEQ ID NO: 865699 - DNA, 100 bp, Homo sapiens
gagcatggctatgggagaaggaaggcaggcagcaggcaggtagtgggcagcagtcagtgacaggtgtaacctctgtggatgacagcaacagttactggag

SEQ ID NO: 865700 - DNA, 100 bp, Homo sapiens
acctgcactgtgacctacactagtcgcgggagccacgcagaggacgccggaacaccctggaagccgagaaatggatgaaaactttcggaagagaaagttg

SEQ ID NO: 865701 - DNA, 100 bp, Homo sapiens
aggggcggacgcgcggcggggcagaccgctggggactgcgggcggcgctgtgtccgtcgccatgacaggtgacctcaaagcagaagctctgaattcacct

SEQ ID NO: 865702 - DNA, 100 bp, Homo sapiens
agcataggagtgtgtgcagaaaaacaggatggatatgactctctgcagcgggatcaagctgtgtgcattagtacaaatgagtctcgctctgttgcccagg

SEQ ID NO: 865703 - DNA, 100 bp, Homo sapiens
agctgataggctgcgctaccggaatgtcatccagcgagtgattagcgcccgctatgggcactggcataagaacaaggccccaggcgagtaccgcagtggc

SEQ ID NO: 865704 - DNA, 100 bp, Homo sapiens
ttgagcccaacgagtacatccattatgacctgctagagaagaacattaacattgttcgcaaacgcttagcagtgtctgcaaaaacgaatcttttcctaca

SEQ ID NO: 865705 - DNA, 100 bp, Homo sapiens
gatccttttgccacttcaagcactgaccctttcagtgcagccaacaatagcagtattacatcgttcctgagactggcccagacgctgcggcactatggct

SEQ ID NO: 865706 - DNA, 137 bp, Homo sapiens
ccatgacttggatatgctgacgactgtgcaggaagaaaacgagccagtgatttacaatagagcaagcctaaattatacagatctgtgattgaagatgtcattaatgatgtgagagacatctttctggatgatggagt

SEQ ID NO: 865707 - DNA, 98 bp, Homo sapiens
gaggatgacgaggaggatgacgtgcagaacaccaactctgcccttagcttttgaaatgacattaacagaaggaagtaagttggagaagaaactctttt

SEQ ID NO: 865708 - DNA, 100 bp, Homo sapiens
aaaacctaaccatgaagacttgaacttaatacagcaagaaagaccatcaagtttaccaggttggatgactgcctgcaacaatatgtccacaagtttgaac

SEQ ID NO: 865709 - DNA, 98 bp, Homo sapiens
aagcctccagaggacataccacctccaggatcaggatgcagagttttaccgatccttgaacatccggattgctctcgtgggcttggaagtgtggaccc

SEQ ID NO: 865710 - DNA, 100 bp, Homo sapiens
acctgcctcagcaagcgtacctgagaatacttttaaaggaacctgttgataaatgcaaaacagtggctgttgcaggataccatggccaagcggaatacag

SEQ ID NO: 865711 - DNA, 100 bp, Homo sapiens
ggaagaagattgctaccatccagcagaccactgaggtcttcacttcgctcgccgcctgcagctcagcccatgggagagcagcgttgttaacagactcctg

SEQ ID NO: 865712 - DNA, 100 bp, Homo sapiens
ggatttgcttttgtaacttttgatgatcatgatacagttgataaaattgttgatgaggccagaccatggacactacacccagcaatagagacgggactgc

SEQ ID NO: 865713 - DNA, 100 bp, Homo sapiens
tgctggctttgttcccaatgacatgcaagttggacagacgggaaaaatagtagcaccaaatcccacgtggcgaagtctcgattttggaattatgccagac

SEQ ID NO: 865714 - DNA, 100 bp, Homo sapiens
caggtgccagacaaacctctccaccctcagtgacccggtgcagctagaagtccatatcgacgaaggggaggaccaggctggcgatgaagatgaagatgat

SEQ ID NO: 865715 - DNA, 100 bp, Homo sapiens
cgacttagaagctaccgagttaccctaagaaaggcagaaaccactaatactagcctcttgcaggtgcaactggaatgcagtttacataataaagtgtgtc

SEQ ID NO: 865716 - DNA, 100 bp, Homo sapiens
gtggctctcttggcagccttcctgatttctgcagctctgtgtgaagtcaagctacaacttcaagcagaagagagaggagttgtgtctatcaaaggagtgt

SEQ ID NO: 865717 - DNA, 74 bp, Homo sapiens
aggtgctagcggccccttcgccctgcaggcctcatgcattgtgcgtcagcagcaatgtttatggtgaaaaatgg

SEQ ID NO: 865718 - DNA, 98 bp, Homo sapiens
ttagaggatgtagaccagtgctgtcaagctctctctcaaagactgggaacacaaccgtatttcttcaataagcaggcagacagtttacagaagaatca

SEQ ID NO: 865719 - DNA, 100 bp, Homo sapiens
gttaatcgtaattcgacaattgaaaacactaggcgacatattggaaaagaaaaacacaccttgactttagtcagatacatcactgtctgttaaaggaaac

SEQ ID NO: 865720 - DNA, 98 bp, Homo sapiens
gcctcccgaagtgctgggattacaggatgttggcaaaggatgaactgatgaccatacttgagaaatgtttcaaggtttttaagtcttattgtgaaaac

SEQ ID NO: 865721 - DNA, 100 bp, Homo sapiens
gaaactgatgagacgacaactgtaggtgatgctctgatgctgctgcctcttatgaattgacgacaggtgcagagagagaataaactgtgtctaagactgg

SEQ ID NO: 865722 - DNA, 100 bp, Homo sapiens
tataaccacccagtaccaaaggcaaatactcctgtaaatttgagtgtgacaaagaaacagccttggtataatagcacgttagcatcaagacgaaaacgac

SEQ ID NO: 865723 - DNA, 100 bp, Homo sapiens
ggatgctgaaaacctttgggcttcatggagtcgtcttagatgttgattcaatgctgagtttgtgtgtgaacggacactgaaatattttctaggaattgcg

SEQ ID NO: 865724 - DNA, 99 bp, Homo sapiens
gagccgggagttcaagaagaacactccagagaaaccaatagagccatggcgactccctctgctgccttcgaggcccttatgaatggtgtgacaagctgg

SEQ ID NO: 865725 - DNA, 100 bp, Homo sapiens
gctgctatggcatctataagacttcagggattacataaacctgtgtaccatgcactgagtgctgtgtatgggagccatgggcgccgaggccgccagacct

SEQ ID NO: 865726 - DNA, 100 bp, Homo sapiens
agctacctgcaagctctatttttaccagatgctcttggctgtgcagacattgctattttgggagaagtacaagcggaaaaagctgacgacactgaaaggc

SEQ ID NO: 865727 - DNA, 99 bp, Homo sapiens
tggatgttcgccagcatggtcatccccagttaagtgggcagaccaacatccacctcagcaaaaacttcttcctgacgaatcgcgccagggagcgctcag

SEQ ID NO: 865728 - DNA, 100 bp, Homo sapiens
ggcccagaacaactgctacatctggatggagaagaggcaccgaggcccaggtacaaagaggatggtgaagctttgctaattttgctaccctcagaaaaag

SEQ ID NO: 865729 - DNA, 98 bp, Homo sapiens
ataaaggtgaatgtggagccaaggactctggaagtaagacaaagctctgatggcaccaaatcttgactcctttggacgcgatcgggcactgtatcaag

SEQ ID NO: 865730 - DNA, 100 bp, Homo sapiens
gtaatacctctacgcttgctgcaagaattaaatttctacaggttttcctttggaatatggataaatacaccatgatacggaaactagaaggacatcacca

SEQ ID NO: 865731 - DNA, 100 bp, Homo sapiens
gtacgacagcctcaaacaggagctggagcagctcaaagaggtgactgaaaactcctgaggcatttcctggactagaatgggtagtgaagacccatgtcag

SEQ ID NO: 865732 - DNA, 100 bp, Homo sapiens
ggtgtacaaatacccctttgaattaattatggctatttggaggccaatcactgccaccttttatttccctgtgggtccaggaactggatttctttatttg

SEQ ID NO: 865733 - DNA, 74 bp, Homo sapiens
gatgtgttgcccgagttcaagaacgtggggaaagtgattcagttcaagtgggctcgggatgagtttgaaggcct

SEQ ID NO: 865734 - DNA, 100 bp, Homo sapiens
ggaaattacagttagaggtcacaactgcccgaagccagttctaaatttttatgaagccaatttccctggaggcaagtgaggcctatctggttggcctttt

SEQ ID NO: 865735 - DNA, 100 bp, Homo sapiens
ggagcacctgcgtcttgccatggccgccctccaggagaaggagtcgatgcgcaacagcctggctgagtagagggatcatggcccaagttgcaatgtccac

SEQ ID NO: 865736 - DNA, 98 bp, Homo sapiens
ggcgccgctgtagccgcccaccggtttttctgccacttttgcaagggcgaggtcagccccaaactaccgaattaaacaaccaccatgtcgagcaaaaa

SEQ ID NO: 865737 - DNA, 100 bp, Homo sapiens
aacaatgcagcaaatactcagaaacatccttccagaaggagcgaactgaagaggttctacacaattgacgggtggacttcccgctggatcgaatccaaac

SEQ ID NO: 865738 - DNA, 100 bp, Homo sapiens
caggctctgtgcggggtggagatgaagtttatctgctttgtgacaaggtgcagaaagatgtgaacatggaatcatcaaggaatgcacactcaccagcaac

SEQ ID NO: 865739 - DNA, 98 bp, Homo sapiens
cgtatctcctcagaggatcaggcgtgtgtccagttctgctattgacctgaaaagtggttctggaaaagtgtaccaaggccctgcaaaaggtgctgctg

SEQ ID NO: 865740 - DNA, 100 bp, Homo sapiens
tcgctgttagaaatgtccaagttttactctcagctaatagagcccgaacccagccctcaccttctgcgtaaagacccatgaccggctgtactacatggtg

SEQ ID NO: 865741 - DNA, 100 bp, Homo sapiens
gcctcaagaacacgctggttcatagaatgtctacatattcaactttccccgccggggtgcctgtctcagaaaggagtcttgctcgtgctggtttttatta

SEQ ID NO: 865742 - DNA, 98 bp, Homo sapiens
ctggcttccgtgcccgctggcattgctaaacacgtggaaagaatcaatttggggtttgaagaagaactgaccagcaagtggttatatctttttgaagg

SEQ ID NO: 865743 - DNA, 100 bp, Homo sapiens
gagggaattccggtcagggtcaagtcgtgttctgatcactactgacttgttggctgtcccttactccagagaatttaagcagaaatatgactacttcagg

SEQ ID NO: 865744 - DNA, 100 bp, Homo sapiens
cctgaaagtttatcgcatacttgtactgggttaggtttcttcggctacgtttcagtcacttgttcctgatattcccggtcacatcgagagcccagtcttc

SEQ ID NO: 865745 - DNA, 98 bp, Homo sapiens
ctgagcggccgcggccatggcgtacgcctatctcttcaagtacatcataatcggcgacacaggtgatgatgaacagtctacacagatggctgcaagtt

SEQ ID NO: 865746 - DNA, 99 bp, Homo sapiens
agtggagaactgccttctgaaaggtggaatcctactcagaatgtgaggcctcgaaaaagcccaagacagcagaagcagacacctccagtgaactagcaa

SEQ ID NO: 865747 - DNA, 100 bp, Homo sapiens
cgccacttcatgttccagtgcctcgagcgctcaggatggaggaagactcgatccgcctgcctgcgcacctgcatgtgaactatgaagactttactttcac

SEQ ID NO: 865748 - DNA, 100 bp, Homo sapiens
gaaattcagaaatccccctggaggagacaacctggaagaacgatttaaagagatacaatcttgcttgaccgtttgggacatcaatcttccacatgaagtg

SEQ ID NO: 865749 - DNA, 99 bp, Homo sapiens
ttctctacaatccgctcaacaaacagatagactgggagaggcacgtcgtcaaggcgcctgaggagatgaatgatttcggaatcaagaatatggaccagg

SEQ ID NO: 865750 - DNA, 98 bp, Homo sapiens
tggaaatggcacctatggacaagtctataaggtaacacgtacacagacctctcggccggaatctccagggatgaccagcccctccccacgcatccaga

SEQ ID NO: 865751 - DNA, 98 bp, Homo sapiens
ccagccacacaggtggttcctgtccagccccctcacctcatatctcagccatacatattgtccttgtgaacttccttgaagatggcagcatgtctgtg

SEQ ID NO: 865752 - DNA, 100 bp, Homo sapiens
gagacaaatatgaatgagattgttacacaaattgatgcacaaaataagctggaaaaatctgaggttcttgagttcatgtaagaggacagtcttaaaacgg

SEQ ID NO: 865753 - DNA, 98 bp, Homo sapiens
gtcctgccagtccctgctgagaatactgtcatcctacccaccataccacagctccctgtgctgtcaggaatctacaggacttggctcgtatttacatt

SEQ ID NO: 865754 - DNA, 123 bp, Homo sapiens
aaagccccctcaggaagttcccgctgctccagtgcagagagagaagcatcctgaagcccctctgcaggaattgaaagatgttggccatcgtgatcagatggctgcagctagaggaatcctgca

SEQ ID NO: 865755 - DNA, 100 bp, Homo sapiens
cccaggctgagacccgagcagagtttgccgagaggtctgtggcaaagttggagaaaaccatcgatgacctagaagttgtgagacaaactcccacacagca

SEQ ID NO: 865756 - DNA, 100 bp, Homo sapiens
gatggagcataggcacagtgcaaacattccatatctcgaatttcgaggatgtcagatgtaaatgtatctgccctccctataaagaaaattctgggcatat

SEQ ID NO: 865757 - DNA, 100 bp, Homo sapiens
attcctactggacaagaatatgctgccaaaattatcaacaccaaaaagctttctgctaggggcaggcaatccatggaccttgtggaacttgtgtctcttt

SEQ ID NO: 865758 - DNA, 98 bp, Homo sapiens
ccctcccccgcgtccctgcgaccgccgcggcgaagatgctattgacctgaaaagtggttctggaaaagtgtaccaaggccctgcaaaaggtgctgctg

SEQ ID NO: 865759 - DNA, 98 bp, Homo sapiens
taccaaggcgaggagctcagcatggtcatcctgctgccggatgacattgaggacgagtccacgggcctgaagaaggctgaagaactatgccctggtta

SEQ ID NO: 865760 - DNA, 98 bp, Homo sapiens
gacagtgaagatgtttggatggttgagttctatgctccttggtgtggacactgcaaaaagtatagccgagaccatgtggtggaaggggaaccgtatgc

SEQ ID NO: 865761 - DNA, 100 bp, Homo sapiens
ctgacaattcatcctggcacctccacaactatgatttctgcctgtgtctcaagatgcgtgcaaaaggctgctctttggcgtaaattgcaatcgattaggg

SEQ ID NO: 865762 - DNA, 99 bp, Homo sapiens
tgcgttttgccagtcacctctcaactgtgtgccaaaggctaccaagcagtttctcgaagagattaacaagtggacagttcagtacaatgtttccccgct

SEQ ID NO: 865763 - DNA, 100 bp, Homo sapiens
tgaagaccctcctactgttggcagtgatcatgatctttgaagctgaacatggttatgcctccatgttaccatacaataacaaggacagagatgccttaaa

SEQ ID NO: 865764 - DNA, 99 bp, Homo sapiens
ctactcctggggcacctaacagtggacacttatgaggatcccagaccccagccacctccccttggtggccccttggaagacctaccctctcttctttgg

SEQ ID NO: 865765 - DNA, 99 bp, Homo sapiens
tcccaacacttaggcaggaggatcactcgagcccagaagatcaagactagtgtgagcaacaaaggatgctgagaacttgctggagtcacagccactggg

SEQ ID NO: 865766 - DNA, 100 bp, Homo sapiens
tggcttggtttcaataaggaacggggacacttacaaattgctgcttgtccaaatcaggatccactgcaaggaacaacagaggcgcaggaattggtgggct

SEQ ID NO: 865767 - DNA, 98 bp, Homo sapiens
ggaagcggcggcggcggctccagcgtcctaagaggaaactggtggtgacaaaagagaaagagaagaaagtggggctgtatacgatctatgtgaatcct

SEQ ID NO: 865768 - DNA, 98 bp, Homo sapiens
ggatttgttaaggattccaagtaactcttatttggatactgctattgttcatccagttcccattcgtatgactccaagcaaaatccacatgcaggaaa

SEQ ID NO: 865769 - DNA, 99 bp, Homo sapiens
tcactgcctgcgcagctccggccgcctggctccccatactagtcgccggactagcccgagccaagtcagttcccacaaagacctactcaaatgaagttg

SEQ ID NO: 865770 - DNA, 100 bp, Homo sapiens
gcaagctttgtcggaagaggaccggaggctctggatggaagccatggatggccgggaaccttcaagttcatccgagaagtaacaccatatatcaagaagc

SEQ ID NO: 865771 - DNA, 98 bp, Homo sapiens
caagccactgggttcttcaaaggataaactacctacatagaggacatacctttggttaaaggagctgccgtcagggcaacgtgtttatgtattatgga

SEQ ID NO: 865772 - DNA, 100 bp, Homo sapiens
aacgatccagacggcagggagtgcatcaaaggtgtgaacacagcccttagagatttgtttgattccatggataaaacttcttccagtattccacctatta

SEQ ID NO: 865773 - DNA, 100 bp, Homo sapiens
gtgtgtactaaatgaaggcatgccaatttatcgtagaccatatgaaaagggtcgcctaatcatcgaatttaaggtcctaacgccagccccgatggtctca

SEQ ID NO: 865774 - DNA, 99 bp, Homo sapiens
gaggtgcgggcggctgctgaagaacagattaaggtgctggaggtgacggagggtagctttgcagtttggggagggctgttttccatgattgactgtagt

SEQ ID NO: 865775 - DNA, 100 bp, Homo sapiens
gaaagagctattgaaaaaatgaatggaatgctcctaaatgatcgcaaagtcagaaagactattctagttttctatcaagaaaaagcaagattaagatagc

SEQ ID NO: 865776 - DNA, 100 bp, Homo sapiens
gagaaaagcaatacaaactgggtggacattacccaagattttgaagaagcttgtcgagctagagatgatcgctatggaaaatcctgcagacttgaagaag

SEQ ID NO: 865777 - DNA, 100 bp, Homo sapiens
gtcaacaatcctgagcaagcagatgatagcctctgtacctggagaggaagttaacatccctaataggagggttctggttactggtgccactgggcttctt

SEQ ID NO: 865778 - DNA, 99 bp, Homo sapiens
ccagagcctggagtctgcgaaggccgggacccggttccccggcccacagtgggggtgtgcaaacccgagagaactggacactctaaatgatcaagattc

SEQ ID NO: 865779 - DNA, 98 bp, Homo sapiens
gagcgtgaccgagagcgcgaatatcgtcatcgttagaagtatgtccgtggttcagaccctgtattaaagcttttggacgacaatgggaacattgctga

SEQ ID NO: 865780 - DNA, 100 bp, Homo sapiens
gcacctacagagcggtgattttcgacatgggcggagttctcattccttctccagggagagtcgctgcaggcctactgaacttgacgcactggtatttggc

SEQ ID NO: 865781 - DNA, 100 bp, Homo sapiens
gaaaatatggtgggcaaagctgaagcatctgctactctgactgttcaagatcttcctcagaactgtgatcctaacattcccctagttgctcaggaattaa

SEQ ID NO: 865782 - DNA, 100 bp, Homo sapiens
atcatcttgggagtgatttgcgccatcatcctcatcatcatcatagatgacagtcgtctagaggagctcaaagccactctgcccagcccagacaagctcc

SEQ ID NO: 865783 - DNA, 100 bp, Homo sapiens
agaccagcaacggggtggccgatgaatcacccaacatgctggtgtacagaaagattgtagggaatggaagtgaacagcagctgcaaaaagagctagcaga

SEQ ID NO: 865784 - DNA, 98 bp, Homo sapiens
acggcatatccagatgaaactagccagactggaatttgagtctttggaggcactcaagcagcaggaaacatgccctgaactgtcacagaatgaaacca

SEQ ID NO: 865785 - DNA, 99 bp, Homo sapiens
cagccggcagctccggagctgcccgcgccatgtccgcgcacaatcggggcaccgagctcggagtctactatgcaactgcatactggatgcctgctgaaa

SEQ ID NO: 865786 - DNA, 98 bp, Homo sapiens
tgggagatgtaggcaatgattcattattgcgactgcctgtttctcgagaaactaagattctggcatccacgtgagcccagtgatcccaatgagcgctg

SEQ ID NO: 865787 - DNA, 100 bp, Homo sapiens
ctgccgctgccgctgcagcaactaattcagctaatcaacagaccaccccacaggctcagcaaggacagcagcaggaaatctggcattttttaaagtttgc

SEQ ID NO: 865788 - DNA, 99 bp, Homo sapiens
atcatatgtgcaagaccagagcgaagactgcctatatttaaatatatatgtcccgactgaggatgttgaaagatgcatgagtgtgatgcagtccgggac

SEQ ID NO: 865789 - DNA, 98 bp, Homo sapiens
accatggtatttgctaacgtttagagagtgcttccccttgccgagcactggataaccatgatgactacacagacttctactatgacatttgctccttt

SEQ ID NO: 865790 - DNA, 100 bp, Homo sapiens
gactgttttattgcatgtggatgcaggacaagccactcctccaggccatccggctgtccttagagcaagccctgcctcctgagccaaaggaagaaaatgc

SEQ ID NO: 865791 - DNA, 101 bp, Homo sapiens
tttctggatgaacctgggcggatgtcagaccagagaagagcacagaatgtaccagagagttccatacgttttgaagagctgtgcagaatttatagagactc

SEQ ID NO: 865792 - DNA, 100 bp, Homo sapiens
ttcccatcgacggtcagtgcgcacgttgtaatcagctgaggccatgtcaggagacggagccacggagcaggatttgcaaagaaattgcagacaagctatt

SEQ ID NO: 865793 - DNA, 99 bp, Homo sapiens
ttcaagctcttctggcagtgattctgacagtgaggttgacaaaaaggaagaaaaaatgctgggcatcttggtgcagcacaaagtccggagtggcgtctc

SEQ ID NO: 865794 - DNA, 110 bp, Homo sapiens
tgatgacatcctcattgatgttaatgaatggtgctatacttgaattttctaaggtgtcattaggtaggtttagatcactcctttattgtacagatcaggaaaaaggattt

SEQ ID NO: 865795 - DNA, 98 bp, Homo sapiens
tatcaaatcgagtcactgtcaagcttgtaatgagccagtgctgcgccgtgttgctgtggacaagtgtgcaaggagagtgcggcaggctctggcaagtg

SEQ ID NO: 865796 - DNA, 98 bp, Homo sapiens
gcggctggcgcttcctgcgcatcgtctgcaagaccgcgaggcgagacctcttgagccagatgatgaagtgtttcttgccatagctaaagccatggagg

SEQ ID NO: 865797 - DNA, 100 bp, Homo sapiens
cttaaattcaagaaggagccctgtcccagataacgaaggaggcccaacttcattcaataaggagcctgacggatttatcccagacggtagaacaaaagga

SEQ ID NO: 865798 - DNA, 98 bp, Homo sapiens
tggaactgctagatgaacccatcccccagatagtggctacagaattcgaaatcagagcaaagcctctgggtctgggctctgtgagggagatgaagtgg

SEQ ID NO: 865799 - DNA, 98 bp, Homo sapiens
tgaagtgaaggaccccagtgacaggaaggtgaggcctcgtcccacctgccggttcttcatgaaaggatttgttaaggattccaagtaactcttatttg

SEQ ID NO: 865800 - DNA, 98 bp, Homo sapiens
gtgggattgtcgggcggtcagcggacttcgtggtagaatccattggctctgaagtggggtctctgggggtagtaaaaagaatcattcctgcagtagct

SEQ ID NO: 865801 - DNA, 100 bp, Homo sapiens
atagtcaacatggttgacgttgcaaaggcgcttaatcggcctccaacgtattcttcacggaaaaatccagcaaagcctactccttctggatgaagttcag

SEQ ID NO: 865802 - DNA, 100 bp, Homo sapiens
cgaaaccatgcctcactgtcctaggcaaggaaagcaagcaagtggagaccaagacagatgccaagaatggagaggaaaggggcagagatgccagcaaaaa

SEQ ID NO: 865803 - DNA, 100 bp, Homo sapiens
gaatcaacccaagatgcttgtgcaaaaatgcggattgaaaaggaagatcaggccaaccccaaagaagaagtgaccaaggaggagtttaaactgaatgaac

SEQ ID NO: 865804 - DNA, 98 bp, Homo sapiens
tcagtaactccagtatacaaggtgccagctggtgcccagccatgtcctctgccacagcacaacaaatggctgatgttttctggcaaaggccttcctgc

SEQ ID NO: 865805 - DNA, 121 bp, Homo sapiens
cggtgcaagcgaggacacgacacatgcagtggcttctggactgcgcgatgactggacgcctaccaggacatcctcggaaagtatttattctaggccaggctccagtattcctggctcacca

SEQ ID NO: 865806 - DNA, 100 bp, Homo sapiens
caaaagccaaaaatactggacagagaggcctgaaaatgtgacaggatcatgaatgtcaaagtgatgatgaaaacacatttaaaatattagttgcaacaga

SEQ ID NO: 865807 - DNA, 100 bp, Homo sapiens
aggcagccgtcaacagcctggtcaatttgtacctgcaggcctcctacacctacctctctctggtggtctacatagcctgctccttcaccacggtctggtt

SEQ ID NO: 865808 - DNA, 134 bp, Homo sapiens
ggggtccctctccatagtgatagccatgaggacactgggattctggacttcagctcactgctgaaaaagagattatgtttgagaccttcaacaccccggccatgtacgtggccatccaggccgtgctgtccctc

SEQ ID NO: 865809 - DNA, 146 bp, Homo sapiens
aagcttgaatgtgtcaaaaccaaacaccctcagctccacattgagagcaaaatctacaagatgatgcagggaggagaattcaattcgccacaatctctctctgaatcgttatttcatcaaagtgccgcgttcccaggaagaaccag

SEQ ID NO: 865810 - DNA, 100 bp, Homo sapiens
taccattcgcctgatgaactctcagaatttcttcaggttgaattacctagaagtttgtcactgacttgtgttcctgaactatgacacatgaatatgtggg

SEQ ID NO: 865811 - DNA, 98 bp, Homo sapiens
ttctctcgtggccaggctcattatccattttcgagacattcgaccacctcagaaaatagtatcacctaaacaagaacatgaagataggaaacatgaca

SEQ ID NO: 865812 - DNA, 100 bp, Homo sapiens
gaaatgttagagaagaaagacagctttgtggaagagcaattttacctgctcaagaatggaaacctcctcttccagcttatgattttctaagtatgataga

SEQ ID NO: 865813 - DNA, 100 bp, Homo sapiens
gggacggatgtgcacagtgatcaagaggcagaagcagagtttggagtatttggagcaaggaagcaattttggaggtggtggaagctacaatgattttggg

SEQ ID NO: 865814 - DNA, 100 bp, Homo sapiens
cgatctcaaagactttctggagagcatccgcaaacattcagacaaaattggagagactgccatgaagcaagtacaggtttgcagattccgccagcagcac

SEQ ID NO: 865815 - DNA, 98 bp, Homo sapiens
agagacggccacagagttagctgggagtctaccaagagccataagtgtgatccttggtgacaggtggaagaaaatgaagaatgaagagagaagaatgt

SEQ ID NO: 865816 - DNA, 100 bp, Homo sapiens
agcccccaagcacgctgggcagaagaaaacctaccgagcggtgatgcagcatcctaatgaaggcgcactggtgcttggcctacacagcaacgtgaaggat

SEQ ID NO: 865817 - DNA, 100 bp, Homo sapiens
gctgctgctgctgctgctgctgcatgtctaccaggagaggagggaactgcggagcgggtgacagattgactgggatcccctcgcacatcctcaacagctc

SEQ ID NO: 865818 - DNA, 100 bp, Homo sapiens
gaaactctttgggaaagccactcgaaaagcaagccaaaaaggggctcctcaccctcaccgtgagaacccgcctgacggcgcctccttccctgtgcagcca

SEQ ID NO: 865819 - DNA, 100 bp, Homo sapiens
ggaagttacacagaggacaatgcttcccaggctcgagttgatgcccacagttttaatccaggtgctggtttgccaactgacaaaaagaaaggtgggccat

SEQ ID NO: 865820 - DNA, 100 bp, Homo sapiens
gctgcaacctgcagcacatcagcgaccgggagaacatagacggtagcacaggcggagtgcagcggaggcccctgccgctgccgtcatgccgttcccgttt

SEQ ID NO: 865821 - DNA, 100 bp, Homo sapiens
tggaacagtacgggaaattgggtcacaagctgtttggtcactctcatcttgcaaaccagtatttttccagaacagatcgtgtattgaaacataaacgtat

SEQ ID NO: 865822 - DNA, 98 bp, Homo sapiens
tacggacgcactgaaccgcggctgggacagacacttcgggaacccgaggcggaccgggcgacgagacgcactactttggcctttggtttctcagcaag

SEQ ID NO: 865823 - DNA, 100 bp, Homo sapiens
cgccgctgcactgggcttgttacaatgtgagaaagatcagtctaaagaaaaggagaagaaagtgaaaaaaacaattccttcctgggctaccctttctgcc

SEQ ID NO: 865824 - DNA, 99 bp, Homo sapiens
cactgtgtggctgaataagcggaggacgaatccatgaaccaaccaggaccaatcaaaaccagactggctattagtcagtcacatttaatgactgcactt

SEQ ID NO: 865825 - DNA, 99 bp, Homo sapiens
ctgcaggcacagttgccgattacagtagccggatcgagctgggagatgtgacaccacacaatattaaacagttgaaaagattgaatcaggtcatctttc

SEQ ID NO: 865826 - DNA, 98 bp, Homo sapiens
caaacgtagaccaaaggctcagcccacaactcttgtcctaccacctcagtgtgtgtatgtgggagatactgatgcatggtgtgaagccttttcaagga

SEQ ID NO: 865827 - DNA, 99 bp, Homo sapiens
aattcatatttgcatatggtgaagatctggtcatgctgtggggaagacgtatccgaataccgagctttcttgctgtcgacagcgggagagaggctgagg

SEQ ID NO: 865828 - DNA, 100 bp, Homo sapiens
ctgacagacgcaagatggcggacagtgcggaactaaagtactatactggcaattgctggagaagattttgcaattgttgcttctgatactcgattgagtg

SEQ ID NO: 865829 - DNA, 98 bp, Homo sapiens
tgcggggaggcagcggaaggcggcaggccatttcataattctgaatcatgtctgataacggagaactggaagataagcctccagcacctcctgtgcga

SEQ ID NO: 865830 - DNA, 98 bp, Homo sapiens
ggacctgtcccacctggcggccatcgtcatcctgctgctgaagatctggaagacgcgctcctgcgccgcttttcctccgcaaccatgtctgacaaacc

SEQ ID NO: 865831 - DNA, 99 bp, Homo sapiens
ctggaagccatctgccctcactatcagcagccagagcgatatctgaagtggctctgatgcctttgccacactcctcgcatctctgggacatcccttccg

SEQ ID NO: 865832 - DNA, 100 bp, Homo sapiens
tcatttgtgcatggggtcacagtgaaaaatcgaatgattcgactgcatcctgatggaacagttctctatggactccgattcatgcccaagcacaaaacaa

SEQ ID NO: 865833 - DNA, 100 bp, Homo sapiens
gtaaattgggatattcacaatgtatggaaacagagtattccatccaaagaagtgcatttgatcgctgtgctaccttgtcacagtccgggggcgcttttcc

SEQ ID NO: 865834 - DNA, 98 bp, Homo sapiens
agtagtgtttgccagagttgattgtgatcagcactgtatgcaaccactcatgtattcggttcaggaagcattaaatgccagaccatggtggattcgta

SEQ ID NO: 865835 - DNA, 100 bp, Homo sapiens
gggtcggagctgggcgcggagcccctcacagtgcagaacccctgaacagtgcccaagtgttgtctctttgttgtcagagagttacaaccctcatgtgcgc

SEQ ID NO: 865836 - DNA, 98 bp, Homo sapiens
ggatgcctacgtgggaagggacctcgaatgtgggaccccagcccctctccagctcgaaatcaaatatgaacagggattcatcacagaccctgtggtcc

SEQ ID NO: 865837 - DNA, 98 bp, Homo sapiens
ccccatttattcgatcaccacggagctagaaaagctaggccttggcgacagcgtggacctgcatgtgtacgagattccggttgagtaccaaacagtcc

SEQ ID NO: 865838 - DNA, 99 bp, Homo sapiens
atggcactagctggagccagtataacggggagtctgtcaggaagtgccatggtaaactgttttaacaggatttaaatgtggatgaatttgaggaaatat

SEQ ID NO: 865839 - DNA, 100 bp, Homo sapiens
gcccaggaagcccctctgaagcctcctcgccgccgtttctgagaagaatgaagtggagctgggggagctgcttctgtcactgaattatctcccaagtgct

SEQ ID NO: 865840 - DNA, 100 bp, Homo sapiens
cgcattcacaccagaatcccaaagacgatccagagtctccaaaaagcctagggaaatgaaaggaaagaaaagcaaaaagatttctctgaaatatacagca

SEQ ID NO: 865841 - DNA, 98 bp, Homo sapiens
caagtttatctgttaagcttgaacaagctatgaagaagattctggctgagaggaggaaggtgctggccattgaccacctgaatgaagatcagctgagg

SEQ ID NO: 865842 - DNA, 101 bp, Homo sapiens
aggaagatgccaaaggctgtcttcagaaaagcttcaggattcttaacgaagccaagaagttagcaaatgatgtaaaaggccatcatctgtgcgatctctgc

SEQ ID NO: 865843 - DNA, 100 bp, Homo sapiens
gttcagcccacctgagcccccgctgagcagcccagccagtcagcacaaaggaggacgtggtactccaaagattcaggtttactcacgtcatccagcagag

SEQ ID NO: 865844 - DNA, 98 bp, Homo sapiens
cagatttttaggtctttcgtggtcagtaaattccgggaaattcaacaggagctttccaggaactttatattgctgttggaatatctggagccatccaa

SEQ ID NO: 865845 - DNA, 100 bp, Homo sapiens
gatcctagtcctgagcgtgtctgtgtgcgagtggggacttccttccccgcggttcaggaatcgtcacccggcggcctctcattctgcagctcatcttctc

SEQ ID NO: 865846 - DNA, 100 bp, Homo sapiens
tcaaaaccaaacaccctcagctccacattgagagcaaaatctacaagatgatgcagggaggagatggagtcccctgtttccacaccagcagtgctgccaa

SEQ ID NO: 865847 - DNA, 98 bp, Homo sapiens
aataaggaggaagattgccactctccaacttctaaacctcccaaacctgatcagcccctaaaggcgaaggaggtggaggagaccatcgagggcatgct

SEQ ID NO: 865848 - DNA, 98 bp, Homo sapiens
attttgcatcagaaacagcccaggcggtgagagacacagccacactcagcggccccagtgatgccaattggtggaaaggagaaaatcacagaggaata

SEQ ID NO: 865849 - DNA, 98 bp, Homo sapiens
ttttcttcttgaaattaggcagactcttcaaaacgcactcattcagtttgctactagggaagctatgcgaaattatttaaaagagcgaggggatcaaa

SEQ ID NO: 865850 - DNA, 101 bp, Homo sapiens
actactgggacgtcagagcttctccgtgaaagacccaagaggaaggaacagagccacagagaaaaatgacttgctcacaacagaagagccagtagtaaaac

SEQ ID NO: 865851 - DNA, 141 bp, Homo sapiens
caatgatttataccatgaaatgattgaatctggtgttatcaacttaaaagatgccacctctaagatgtacctgtgtggtctaagctggaatctggtcaccttccatccatgcaacaacttgttcaaattcttgacaatgaa

SEQ ID NO: 865852 - DNA, 100 bp, Homo sapiens
gacatgttgcctgcgccggatagcaacactggctccagttctgaaaataaaggtccttccatagtgacgccccccaaggacatctggaatgtcactggtg

SEQ ID NO: 865853 - DNA, 98 bp, Homo sapiens
atctggggaaccaaagactctgggactcttggtgccaacagagttactctgaatctgcaagcagaatatgaccgtctaaagcagcagcacgaacataa

SEQ ID NO: 865854 - DNA, 98 bp, Homo sapiens
agctacggtaacgatcagtggctgcagatcaggcacaacctctcagaagtgcttcttgccaccatgaacatcttgttcacacagtttaagaggctcaa

SEQ ID NO: 865855 - DNA, 100 bp, Homo sapiens
tgagaaggacgacaagcccatccgaggccggagcctcaacagaaagctcctttagttcctcctcctccaccgccaccaccaccaccaccgccacctttgc

SEQ ID NO: 865856 - DNA, 100 bp, Homo sapiens
tgctttcctgagcggtggttcccatttccttatccatgggacccgagtgtatagccctccagagtggatccgctaccatcgctaccatggcaggtcggcg

SEQ ID NO: 865857 - DNA, 100 bp, Homo sapiens
catcatgactacgcccgcctcccgcagaccatgttccatggcatttggttgccaagctccagctttgaagaaccaaattaagctaccatgaaaagaagag

SEQ ID NO: 865858 - DNA, 98 bp, Homo sapiens
aaaacatcctggaatatccctcagcctggtgagggtgatgttcgggaggaggccttgtccacagggccacccgttcatcgtgcagttcaatgatggaa

SEQ ID NO: 865859 - DNA, 98 bp, Homo sapiens
tcccacctactcctggaataaggagtcaaagcccggataggcgcaggtgctggagaatctggtaaaagcaccattgtgaagcagatgaggatcctgca

SEQ ID NO: 865860 - DNA, 100 bp, Homo sapiens
agggattggagagtctacaaggaaaggatgactatggcttttcaggttctcaggtttggagagaagatggcttttatccctcagaacctgtttttgttcc

SEQ ID NO: 865861 - DNA, 100 bp, Homo sapiens
gggatctcctgccaacactcgctacctcttcttaggggactatgttgacagagggtacttcagtattgaagtttgcctgcaatgagatttcattctctac

SEQ ID NO: 865862 - DNA, 100 bp, Homo sapiens
ctgagcttttcatgatggttcctgctgacctggaaacatcttaaatggaagatgctgggctcttgcactgtttggtggaaatggtgagacaggatttgag

SEQ ID NO: 865863 - DNA, 100 bp, Homo sapiens
tggagtacaccccgcagcacagccgcgacttcaaggagaaatggcttccctgaggcaagtgtaacctacattcccagcccaccagcctgacgcccagcca

SEQ ID NO: 865864 - DNA, 98 bp, Homo sapiens
agaatcagatctatgccatccctgaggacatcatgcgaggcagtggcacccaggaaactctgatgaggaagaaagtgcttcagaatctgaactttgga

SEQ ID NO: 865865 - DNA, 100 bp, Homo sapiens
gaagcagaattatacctagaagtctactaatggacagttagtcacccacctacatgttgaggaatctcggccaagaagacagggacaagctcccaactct

SEQ ID NO: 865866 - DNA, 98 bp, Homo sapiens
ataggaccagcgtgtcccccacatcctcccctgagtccggagctaccaaaaccatcctcctgatggcttgttcaatcagtatatcagtcaacaggaat

SEQ ID NO: 865867 - DNA, 98 bp, Homo sapiens
acgtggatcgttgttttgaaacgctcagtttatgaacctcttaaaagcattaatcttccaagacctgataatgaaactctctgggataagttggacca

SEQ ID NO: 865868 - DNA, 100 bp, Homo sapiens
cggttccccggcccacagtgggggtgtgcaaacccgagagaactgggcagtgcaaagccctaccctgtagagggtagtccaaggaagcgtgggaccctgc

SEQ ID NO: 865869 - DNA, 100 bp, Homo sapiens
tggaatctgaaccctcagcagttttataccatgttccacgaagttatacggaagcgtctcctcattgatggagatggtgctggagatgatcggagaatta

SEQ ID NO: 865870 - DNA, 118 bp, Homo sapiens
catcatatgggcacgactggcattacaagaagagccagatcattctaaagagaatattgctatcatctcagaagctgccagctcgggtatttcattacaagcagataggagagctaaa

SEQ ID NO: 865871 - DNA, 100 bp, Homo sapiens
ctgcctgctctacgccctcaatctgctcttttggactatgtcttcagcagtggtgcagttatatgcagcagatcggaactgtatgtggtcaaagaagtgc

SEQ ID NO: 865872 - DNA, 99 bp, Homo sapiens
cccaccaaaactttctactataaatcccggttttggctgcttaaactgctgtccgtggtggatgactggattgaatcatataaacaagacagggacatc

SEQ ID NO: 865873 - DNA, 98 bp, Homo sapiens
tgtgccggcgccgcacccgaggctctcgccagcccggcgccccggtgctgaggtgatctttagacagtgactgagtatggatcatttgaacgaggcaa

SEQ ID NO: 865874 - DNA, 99 bp, Homo sapiens
cctgtatgagctgctgacgcactgtgactccagccagagcccccccacgtcaccaggagactaaagtccatcaaaaacatccagaaaattaccaagtct

SEQ ID NO: 865875 - DNA, 98 bp, Homo sapiens
tgatcttctgaggtcactcttctccatggcaccagcttgctgcaggaggtggtctacttggtgagccagggcgctgaccccgatgagatcggcttgat

SEQ ID NO: 865876 - DNA, 136 bp, Homo sapiens
caaggaggaaccagtcactcctactagtggagggggtccaatgtcaccccaggatgatgaagcagaagaggtttcttcactagttgaagaaggagaaaaacagaacaaacgttttaggccgtcaaaaatgtcttgc

SEQ ID NO: 865877 - DNA, 99 bp, Homo sapiens
tgagcccgtgcctgtcttcagatcttcacagcacagttcctgggaaggtggagccaccagcctctccttgttagtgtgactctggatccagatacagct

SEQ ID NO: 865878 - DNA, 127 bp, Homo sapiens
caagccgggtgctggcacatccgaggcgttctcccgactctggaccgacgtgatgggtatcctggatgaagcctgctgggagcgtgaatgacatggccctggatgccttcgacttggaccggatgaa

SEQ ID NO: 865879 - DNA, 98 bp, Homo sapiens
gcaatatgacctatggatcatttggtggtgtaaaaggtaactgcgtcattgattggctggtatccaaccagtctgttaggaatcgccaggaaggcctc

SEQ ID NO: 865880 - DNA, 98 bp, Homo sapiens
cagatatgaccattaaactatgggattttcagggctttgaatgcatcagaaccatgcacgacttcattagaggggtggtagactcggaggatctccct

SEQ ID NO: 865881 - DNA, 98 bp, Homo sapiens
gaaagggaactgaacgcggttctgggagcagcaagcccacgggtagcagccgaggccccagaatgcaaatggttatgagccttagagtttctgaactc

SEQ ID NO: 865882 - DNA, 98 bp, Homo sapiens
cagaggtatggcagttattggcaggctgccatgacaaccaggcaatgctggatagataccgaattcttatcacaaagtgcacagccagaggacaacac

SEQ ID NO: 865883 - DNA, 98 bp, Homo sapiens
ttggataaggtggccaatgggctggcagtcatggccatccagagcctgcacccttgccccctattctgcaaacttggagttcttgtcaggcataggat

SEQ ID NO: 865884 - DNA, 100 bp, Homo sapiens
acctaccagggaacggagatgtgtatcaagaaaggctggcacgtttagaaaatgataaagaatccctcgttcttcagcacaaacatttcactgaagatat

SEQ ID NO: 865885 - DNA, 100 bp, Homo sapiens
aagctgacccccaggctcagcaaggatgcctacagtgagatgtgaacacctacctcttcatgatgcaagcccaaggcattctgatccgggacaacgtgag

SEQ ID NO: 865886 - DNA, 98 bp, Homo sapiens
aaaattggatgtgaaaatgaagccagaccgagtataacactgcctttaaattcagatgtccccaaggtatttgcagcgttgcctgagttttatgtaga

SEQ ID NO: 865887 - DNA, 98 bp, Homo sapiens
ctgggcacccacggagcctccggggctgggaaacactactatgaagtatcctgtcatgaccaagggttatgcagggtcgggtggtctaccatgcaggc

SEQ ID NO: 865888 - DNA, 98 bp, Homo sapiens
atttactgactctcatggtggtggagatggattttttcctagtgtgcctgtgtgtggatgacttgcagggtgcacagtcagaaattgaggcaaagcaa

SEQ ID NO: 865889 - DNA, 100 bp, Homo sapiens
atcatcccattcagatgaaacctgcagatagtgaaaagtccaacgggattttgcttgcccaaagaatttatggaagattcagctggagagggagcaactg

SEQ ID NO: 865890 - DNA, 100 bp, Homo sapiens
gctgtggcttccaggtctcaaaggcagaaggccctttcatcggcttgttcattaacacctgtgggtgccgccagactgcgatcattggagggctcgtcaa

SEQ ID NO: 865891 - DNA, 100 bp, Homo sapiens
ttatttagttctggggagcgcctcgtcgacatgagtgatgtggaggaaaacaacttcgagggcagagtggcccgacgttggggcattcagaaaaacaggc

SEQ ID NO: 865892 - DNA, 100 bp, Homo sapiens
tgcccatggatgcagcccttaacaaagttcaatctcatccctcccagcagctccccttccaccccccggggaactgaagattgtcctggccgcgacctga

SEQ ID NO: 865893 - DNA, 99 bp, Homo sapiens
ctcaggcagccccggccgggccgcccgggtccccggcagcggggtaggatggcgctaaagcggatccagaagctgaactaccagcagaaagtaggcatc

SEQ ID NO: 865894 - DNA, 101 bp, Homo sapiens
tcttagccagaaaatagacgttttggataaattaaagtggttttacagattcagattgcatttgcacacgattcaactcgtgtgatccagtgttacattca

SEQ ID NO: 865895 - DNA, 100 bp, Homo sapiens
caagtgaaatacttcatacattacagtggttggaataaaaattatgactcaaaacttgagataaaggaaatctgcttgtgaaaaataagagaactttttt

SEQ ID NO: 865896 - DNA, 100 bp, Homo sapiens
ttttggaacgcccgtgccgcgtctccgcgttcccagcccgggtccccgcgttcacagccccagcgcagagaaacagcacccaggactatcttccaaagag

SEQ ID NO: 865897 - DNA, 100 bp, Homo sapiens
gcaaaggagactgcaccatccgtatcaatgtccgagttaccaccatggatgcagagctggagtttgcaatccagccaaatacaactggaaaacagctttt

SEQ ID NO: 865898 - DNA, 98 bp, Homo sapiens
ttgtatgcaccatcccataaaaactatggagaagaccagtccaatgatttattcctgacgacattgaatgccaccactagtaccttccagtttgaaat

SEQ ID NO: 865899 - DNA, 100 bp, Homo sapiens
ggattcggtggcatcacgatgctcttcacaggatacttcgtcctgtgttgtagctggagtttcagacgtctgaatggttaacataacagacaccaagaaa

SEQ ID NO: 865900 - DNA, 100 bp, Homo sapiens
caagataacatcgctgatgctgtagcttgtgcaaagagggttgtccgtgatccacaaggcattagagcatgctgtggccatttgtatcactcattctgcc

SEQ ID NO: 865901 - DNA, 99 bp, Homo sapiens
gtcaagaaggtttggttcttccttcatcctagctataaaccaaatgaccttgtggaagttaggtattatagctgcaaatgtccttgtattctgtttatg

SEQ ID NO: 865902 - DNA, 99 bp, Homo sapiens
gcagtttggcatctgtggccgagttgctgttgccgggtgatagttggagcggagactctgtaccgatgggagatgtaccaatggatggtatctctgttg

SEQ ID NO: 865903 - DNA, 102 bp, Homo sapiens
ttaaatatcatccagataaaggaggtgatgaggttatgttcatgaggatagcaaaagcttatgctgcatacccagaaagcggtactctagaaatgaatgtca

SEQ ID NO: 865904 - DNA, 100 bp, Homo sapiens
ttcagataaaactggaacactgacgaagaatgaaatgactgttactcacatatttacttcagatggtctgcatgctgagacactgtgcatcttagccaac

SEQ ID NO: 865905 - DNA, 100 bp, Homo sapiens
cctgcctccacgtctggaataatgggtactctttcctcgtggaatttgaagattctacagataaatcaggcttgcttccggcgtcatggctcaaagggcc

SEQ ID NO: 865906 - DNA, 100 bp, Homo sapiens
tcagagaactgctgcaaagatctgacccctcagtccccaagattgtggcatttgaaactgtccattcaatggatggtggaaaggagggaagaggccctcg

SEQ ID NO: 865907 - DNA, 101 bp, Homo sapiens
tgccggtgctcttcatcaccttcgtggtcgtctggtcctactacgcgtacgtggtggagctctgcgtgtaattcctagaggacctgtgcaacaacctcttg

SEQ ID NO: 865908 - DNA, 100 bp, Homo sapiens
tcgggatcttcgacgggcacgggggagagatgcagagcaaagcggcagtccccggacagggatgggctctgaccaggaggacagcaagcccatcacgctg

SEQ ID NO: 865909 - DNA, 100 bp, Homo sapiens
tgatcgaaagaacatgccaagatgtatctactgtatccatgcactcaggcccgacaacaagctcaaatacgtcaccaaatggcagaggacagcaaagcag

SEQ ID NO: 865910 - DNA, 99 bp, Homo sapiens
tcccggaccccccggatctgacggggcgggacctggcgccaccttgcaggtgctggagaatctggtaaaagcaccattgtgaagcagatgaggatcctg

SEQ ID NO: 865911 - DNA, 100 bp, Homo sapiens
gcaccttgactttaagtgagagcacgatgaatacagttgtggaaagtaaaaatgtagccctaccaaaaggaactattgtactggcttctccaggctggac

SEQ ID NO: 865912 - DNA, 100 bp, Homo sapiens
tgtggatgaagcccatcagtatatcctggagtttgagtttgccagatccggcccggtgcctgggttccaggaggacacgctgcagttggccttcatcgac

SEQ ID NO: 865913 - DNA, 100 bp, Homo sapiens
cccggcggcgggagcgcccccgatccggacaaagaaacgagcgctcggtacggctcctcactggcattggaaggtacaacgagatgacatacatatttga

SEQ ID NO: 865914 - DNA, 98 bp, Homo sapiens
gcggagttcatcaagaattacatgaaggaaacctcgacctgtctcccagttggttgcacagcaggttactcagcagtttgtgcctcctacacagtcaa

SEQ ID NO: 865915 - DNA, 100 bp, Homo sapiens
tttatagtcctggatcttctggggttccctatgcaaatgccaaaggaattggttatccagttacggctagatgaggctcaagaagcagaatgccaggcct

SEQ ID NO: 865916 - DNA, 100 bp, Homo sapiens
gccattgccctcagcctcgtgttttgtagtgcatccctgagcatgagcacagaatgaagcggcgtttggatgaccaggagtcaccggtgtatgcagccca

SEQ ID NO: 865917 - DNA, 98 bp, Homo sapiens
cagccgctccatccagggccaccatgtctgcctcctggtgaaaaagctgataaatgagagcgtggacgaagccgacatggagaatgctggacacccca

SEQ ID NO: 865918 - DNA, 115 bp, Homo sapiens
tgaatggagttctgacaccgcagagggcaggccatgcccttatccgcactgccaggtgctgtcggcccagcctggattctcaaagttggattggtggaaacaatgaaccattgac

SEQ ID NO: 865919 - DNA, 98 bp, Homo sapiens
aaaacggaagcgcagggagaaggaagaggtgtttgaaaagttaattgcacttaagcggaagatatttcccagaaggaggatacacaaagaagctagtc

SEQ ID NO: 865920 - DNA, 102 bp, Homo sapiens
ttctaaaccaacactcctagccaatggtggtcatggagtagaagggagcgatactacagagcgcttcgaccatcactgcccctgggtggggaattgtgttgg

SEQ ID NO: 865921 - DNA, 99 bp, Homo sapiens
tttacgagtttactgcatcagtgatggaggacagagtgcgaatgcgctgcagttcattaaacaatattggaaaatgcatggacgtccacttttccttgt

SEQ ID NO: 865922 - DNA, 101 bp, Homo sapiens
ggcggcggtcgacatgttccaggtcccggatagcgagggcggccgcgccggctccaggatgtgtgcccctgtgatggtggagctggagggggagacagatc

SEQ ID NO: 865923 - DNA, 100 bp, Homo sapiens
actgtgattcactagtgtgcctctgcgaatttaaagctcatgaaaacaggtattgatgtcaagctgaaccatcgtaggaagttgaaagccttagaaagag

SEQ ID NO: 865924 - DNA, 100 bp, Homo sapiens
tcaacaagctgaaccccaaacccaaattcttcgttctgtgcggcgacctcatccacgccatgccagtggagcagcgtgacttcattggagtggacagcac

SEQ ID NO: 865925 - DNA, 100 bp, Homo sapiens
cgtccccgaccttgcctgaacaagattcatagtgaccacttagtagctagtgagaaacagcatatgctccagtgggacaacttcatgaaggagcaaccca

SEQ ID NO: 865926 - DNA, 98 bp, Homo sapiens
tctgggcggcgaggaaggcgtctcccgggccgccgctgcccagcagatcccgatctcccttcacacatctctgcaggcacaagctcagcttggactga

SEQ ID NO: 865927 - DNA, 101 bp, Homo sapiens
ctcaattggagatgtttgggatttcaatcttgatcctatagcattaaagtacaatggtcagttccgttcaaggaaacacatatcccagccaggcgccagta

SEQ ID NO: 865928 - DNA, 100 bp, Homo sapiens
gttctccgctggaaaaagggacaaaagattgcccaaaagaatcaggtattatagctgcaaatgtccttgtattctgtttatggagagtaccttctctgca

SEQ ID NO: 865929 - DNA, 100 bp, Homo sapiens
cgtggtccatgcagctctggatgacagtgacttcttcaccagctattacactttggggaatatatatgcaatgcatgttcctggtcattcgggatttata

SEQ ID NO: 865930 - DNA, 98 bp, Homo sapiens
tggcccagctgcgggaggaccggcaagtgcgtgtcctgctcttcagaagtggagtgaagggcgtgttctgtgcagggaatcaaagccgtcctggccga

SEQ ID NO: 865931 - DNA, 99 bp, Homo sapiens
tcttgatgatgctgatgctttgggaagtatgttaatttcatggtacatgagtggctatcatactggctattatatgatttatgtgatcagtttggctga

SEQ ID NO: 865932 - DNA, 100 bp, Homo sapiens
gtttgatatcaccaaactggaggatgcctatgtattccctggggatggcgcatcacacaccaaagctggatctaccatgaaagacttgtgaatccaggaa

SEQ ID NO: 865933 - DNA, 99 bp, Homo sapiens
tagcggactcttcttcgccttcgactggaacgtggtgggcatccagggatccctgctcagcattttcgtggagcccatttacttctcgagcatcatcct

SEQ ID NO: 865934 - DNA, 98 bp, Homo sapiens
caaagagccctggatggtggagagagtggtgtctggaggcctgtgtccaggatactggtatcagtgtcaggaaaagagtaataaagattctcagagac

SEQ ID NO: 865935 - DNA, 100 bp, Homo sapiens
agaacacgaccatctcagtgactgtgaaaggtgcagtagacattgttgcaatcatgatcggcaatctgaaaggcacaaaaattctgcaatctattcaaag

SEQ ID NO: 865936 - DNA, 100 bp, Homo sapiens
aaaacatcacgttgggagaaccgcctgggtttttgcactcgtggtggtggtgggaggaggagctcgccaagcgcatgaaccttcagaccatggtggacac

SEQ ID NO: 865937 - DNA, 100 bp, Homo sapiens
aggctcttcgagactttgagaagagtacccaaaggcaagtggaacagctctaatggggttgaagaaaaggagacttgggtggaagaggatgaactgtttc

SEQ ID NO: 865938 - DNA, 100 bp, Homo sapiens
aagcactgagtgaccaagtgacatacctgccaggcccattgtgtccatcgctctcagagcagctggggattgtgctgttccatttcctccaagtcaccgg

SEQ ID NO: 865939 - DNA, 98 bp, Homo sapiens
atgctctaatctccctcctggctgacagtacgggctccccaggtgaccaagaatatggcccaggtgaccaaagccctggacaaggccctgagcaccat

SEQ ID NO: 865940 - DNA, 100 bp, Homo sapiens
ccccttgtgtgtctggagctccggcgtgggatcccggatataggacaaagtattttggacagatatcatcaacgaagccattttcagtgccaaccgcctc

SEQ ID NO: 865941 - DNA, 99 bp, Homo sapiens
gagaggcgtccgagccccgggccctggggcaggagcacgacatcaccctcttcgtcaaggctaaaagagatgctaagagaatgcctgcaaaagaagtca

SEQ ID NO: 865942 - DNA, 98 bp, Homo sapiens
cactagccccgtcggcgcggacgcttgtcgagaatgcagattcctgggtactgccagatacggtctgccatcatggatgttctcgcagaagcaaatgg

SEQ ID NO: 865943 - DNA, 100 bp, Homo sapiens
cagcatgaccgctcgcggcctggcccttggcctcctcctgctgctactgtgtccagcgcaggagtctccccaggacagtgctatcacccgggatattaac

SEQ ID NO: 865944 - DNA, 99 bp, Homo sapiens
gtgacttcacttttgagtgcaactgccttccaggtcaacaggacatactgctgtggcacctaccgagcaggtcctatgcggcagataagtctcgttgga

SEQ ID NO: 865945 - DNA, 98 bp, Homo sapiens
ctcatggatgttcttcttcgagtatttgtagaaggagaacggagaccaacctgggctgaagaaagaagattaaatgctgaaacatttggaatcccact

SEQ ID NO: 865946 - DNA, 141 bp, Homo sapiens
gcagtggcagcatggagaaacgcaagtccatgtacacgcgagattataagaagcttgggttcattaggaaaggccatgtgaggacacagtgagaaggtggccgtctgcaaccctggaagagagccctcaccagaaaccaac

SEQ ID NO: 865947 - DNA, 99 bp, Homo sapiens
ttggctcctgtgcatcacaagtctttgctattcgactgcatttgcctccagacttgtcagacacagtgagccgctcaagcaaaatggatctggcagaat

SEQ ID NO: 865948 - DNA, 100 bp, Homo sapiens
ttccaggtgacagtacacgtgggcaacgtacgtcagacggcagtggtggaaaagatccatgccaagggttaccttggctttcattgggatcagtttgctg

SEQ ID NO: 865949 - DNA, 100 bp, Homo sapiens
atgctgactaaggaacaaggtgatgtaataggaataccatttaatgtggatatgcctgaggaagtgcaccatggagaggaggaggtggagacttttgcct

SEQ ID NO: 865950 - DNA, 98 bp, Homo sapiens
acattgttcatgactttaacaaggaggtggaatcaaattctcctgcagcactggcaggtcttagaccacacagtgattatataattggagcagataca

SEQ ID NO: 865951 - DNA, 100 bp, Homo sapiens
ctcttttaaagtatatgtatgacttttaaaagagagagcttgtgaaactgagggaatagagtcctgtgaagataaatcagattagcttggatgaaagtgg

SEQ ID NO: 865952 - DNA, 100 bp, Homo sapiens
gaaacattaagaacttggatcccattcacctgaggcacccgaagaagagaccatccatatttccagctgcccagccaggtccccgagcacagccctgtgg

SEQ ID NO: 865953 - DNA, 100 bp, Homo sapiens
ggcgactgggggctgaagagcgcgccgccctctcgtcccactttccagcgatctagggcagccctgcagaggtacctgttctactgtaatcgctatatga

SEQ ID NO: 865954 - DNA, 100 bp, Homo sapiens
gcgggcgcggacgcgcagcatggcggtggaggacgaggggctccgggtcttccagagcgtgaagatcaagatcgagtcattcaggagagcaggaaagaaa

SEQ ID NO: 865955 - DNA, 100 bp, Homo sapiens
tgtggggcagtctaaggagttcctgcaaatctctgatgctgtccatttcttcacggtggggtccggacatcataccagccctcgtctcctggccgcttca

SEQ ID NO: 865956 - DNA, 100 bp, Homo sapiens
actgttgcctatcagaagtcaattcaaaggacctgcccccagagagatggatagtctgctgaaatacactggctatgggaatgctgcaggactgttggcg

SEQ ID NO: 865957 - DNA, 98 bp, Homo sapiens
tggatatttagaggacattatcatggacttaaaaggaattgtattcgtcatccagagtcaaagtaattcttttcatgcaaagagagcagagcagttaa

SEQ ID NO: 865958 - DNA, 98 bp, Homo sapiens
gcatcttgctgttcgtgattatatttcttggagttgtgttggtaatgaagaaaaggtggggacccaaactgtatgcattgttccagatgcgctcttgc

SEQ ID NO: 865959 - DNA, 100 bp, Homo sapiens
gacagcaatcagctggcctggtttgatactgacctgtaaatcatcctttagtgttaagtccaaaagtgctgggcattgccatcgctcggtatgacttctg

SEQ ID NO: 865960 - DNA, 98 bp, Homo sapiens
ccatcccgtcaagctccatccctttgggcagacagcccatggcacagtggaatgcagtagccctctgggcctgggatattgtggttgataactgtgcc

SEQ ID NO: 865961 - DNA, 100 bp, Homo sapiens
atgatacaattaccaatgaaaaggcacacagtattctaaattttttgaagtcaacacaggaaatgtatttttatgacgaaatgcaaactaatcccccagc

SEQ ID NO: 865962 - DNA, 100 bp, Homo sapiens
ttcactccggtcgtcccaggcgacgtccaagccaggttcaaagtcacgtttaagaacccccagtgccccacgggttgtactgaacgctttgtgtccagcc

SEQ ID NO: 865963 - DNA, 98 bp, Homo sapiens
gactgccagaggtggaggggaggattttgaggacacttgtggagagctcgaattccagaatgatgaaattgtcacgtcagctaactgttcagatgatg

SEQ ID NO: 865964 - DNA, 100 bp, Homo sapiens
gtctgagtgtctgtccccagagcctcagtttgtgcaggacaccgacatggaacagggactcactggggaccttcacggcatggtgcaactcccacctgcg

SEQ ID NO: 865965 - DNA, 100 bp, Homo sapiens
cggaccccagcgttaccatgcatcctgccgtcttcctatccttacccgacctcagatgctcccttctgctcctgtgccggtggtggtgtgcacattgagc

SEQ ID NO: 865966 - DNA, 100 bp, Homo sapiens
atgacatttctagcccaggacttggatcaacacctttaacttcaagaagacagccactttttactactaaactgaggatccatgatacatgtggggtcca

SEQ ID NO: 865967 - DNA, 99 bp, Homo sapiens
gtagattgtgcagtgctcgactgtgaggatggagtggctgcaaacaaaaaggtcaaaatgcagatcttcgtgaaaacccttaccggcaagaccatcacc

SEQ ID NO: 865968 - DNA, 100 bp, Homo sapiens
caaccacagacgcagcaacaacagcagccggcccttgttaactacaacagaccatctgatcacccggaagttcaggctgaattctgaaggcaaacttgag

SEQ ID NO: 865969 - DNA, 100 bp, Homo sapiens
cgcgaggacacgggctgcaacctgcagcacatcagcgaccgggagaacatagacgaaagcggcagcccagaatctcgtgttaatgcgatccatttcttgg

SEQ ID NO: 865970 - DNA, 100 bp, Homo sapiens
gagacactcagctacagctactgctacgtgggaatcatgacagtacagcaaacacctgtttgtgcacatcggccagacgaaccccgccttctcagaccca

SEQ ID NO: 865971 - DNA, 98 bp, Homo sapiens
gaaatttatggcattcagaacatgtatgctgatggtagcatatgtttagatatccttcagaatcgatggagtccaacatatgatgtatcttctatctt

SEQ ID NO: 865972 - DNA, 100 bp, Homo sapiens
gaacagtgggccacaggggccccgaagaactcccacaatgccacaggaggaggcagcaggagtcgtaagaaagcagtgggagttgaagtcattgtcaagt

SEQ ID NO: 865973 - DNA, 100 bp, Homo sapiens
ccaagtctaatagacctaaagccacagtcttcaagagcccacggacaccacctcaacgattggcgctgttccactggctgctttgggggctcctactctt

SEQ ID NO: 865974 - DNA, 100 bp, Homo sapiens
atcagcacttcctctgcgggagatcatccgtcggctggaggtgctgtacctggtggagaagggagccgtgatcgagcatgtggaccacagcgggatgcgg

SEQ ID NO: 865975 - DNA, 100 bp, Homo sapiens
gctgcagcagcaagtcccatcggaggacctccctgccctgtataccgagggaacagaattttgattctgacattagcagtgtgggaatagatggctgctg

SEQ ID NO: 865976 - DNA, 100 bp, Homo sapiens
aacgagtgtgatattactgaatattgtactggagactctggtcaggatgaccccataggaaatattaacctggccatggaaatcgctgagaagcacctgg

SEQ ID NO: 865977 - DNA, 100 bp, Homo sapiens
tcacagtgatggggcccagtatgttaagagatacaagggccacagaaataatgccacagatctccagatcacactaagtttgtgggaagcttcaaaacca

SEQ ID NO: 865978 - DNA, 99 bp, Homo sapiens
tgagactgatcacaaacagaaggaaagaaaacaactgaatgatactctggatgcaattgaggtgttaatgttgactttgcaaaatgatccacccacttt

SEQ ID NO: 865979 - DNA, 100 bp, Homo sapiens
acacatcccagccggtgactgcagtgagcagatccagtttgctgaccagaagcaagaattcaacaaacgtcccaccaaaattggacgtcgctctttgtct

SEQ ID NO: 865980 - DNA, 100 bp, Homo sapiens
gccactgaattttttgaagatgacgccacattaaccctttcattttgtttggaagatggaccaaagcgatacaatcatcaaagtagaaatttgaaatatg

SEQ ID NO: 865981 - DNA, 98 bp, Homo sapiens
gatccgccgcccgtccacacccgccgccagtggccagagcccccttcccaggcagagatttccagtacctgacagtgtgctgaacatgttcccgggca

SEQ ID NO: 865982 - DNA, 98 bp, Homo sapiens
cgaacgcgaggccaacagccccggaaaaatttgagggactgtttcggacttatgatgactgtgtgacgttccagctatttaagagtttcagacgtgtc

SEQ ID NO: 865983 - DNA, 100 bp, Homo sapiens
cctaaatgagcctcttgccaaagtgtcccttttaaaaggtggaaccaagctcacaaatcctcaggaaccaactttcaggggcttccatcaaaaatagata

SEQ ID NO: 865984 - DNA, 99 bp, Homo sapiens
gggccatcatggcccacatgactgtggagttcgcctacgacggcaaggattatctcaccctgaatgaggacctgcgctcctggaccgcggtggacacgg

SEQ ID NO: 865985 - DNA, 100 bp, Homo sapiens
ctcgtgccgttacggccatcacggcggccgcagtggcgtcctggagccctcctcagatgagattgtggggaacctgggtgaaggcacctttggcaaggtg

SEQ ID NO: 865986 - DNA, 99 bp, Homo sapiens
ttccagccataagacctctgagctgttcctcccagctacgagctgccccagctgcagaagcagaaccacagactatgacttggtcggaggcgatcagct

SEQ ID NO: 865987 - DNA, 98 bp, Homo sapiens
atggctcctgaggagatcctgcaggaacagcagcggttgctggcccagcttggaacaggcctttgagagcagccagaagtacaaagaggggaagtaca

SEQ ID NO: 865988 - DNA, 100 bp, Homo sapiens
caaggacctttagcaaatacagtaatagatttttggaggatgatatgggagtataatgttgtgaaaccagcaaatatcctagtaatgggagaaggtcctg

SEQ ID NO: 865989 - DNA, 100 bp, Homo sapiens
tcaagctccatccctttgggcagacagcccatggcacaggacttggaccctctgtggaacacccgagtacctagcccccgaagtcattcagagcaagggc

SEQ ID NO: 865990 - DNA, 100 bp, Homo sapiens
cacagagctgtaccagtacacggcccacgttgccagaaatcatgaccaccccaggaaaagagaactttcgcctgaaaagttacaagaacaaatctctgaa

SEQ ID NO: 865991 - DNA, 100 bp, Homo sapiens
gggagcccactccttcatcaacgaggaatcaaacattttaagtccagtgcaggatggaacaaagaaacctcagattgacagcaacaagagcaataactac

SEQ ID NO: 865992 - DNA, 99 bp, Homo sapiens
gaaaaagcaccattgtgaagcagatgaaacatgggaaagcggaaccaccaaaaggagtgatgatcaacgatctcatgataaatctggatgctagttctc

SEQ ID NO: 865993 - DNA, 100 bp, Homo sapiens
tgcaaactgtggatgatcatcacctccattttcctaggtgtcattacagtgatcatcataggcttatgtcttgctgcagatctaaatcggaaggtagcac

SEQ ID NO: 865994 - DNA, 74 bp, Homo sapiens
gaagaaggcgagcagggtgcgggagagccccttgcagaagacgccgtacgaggccggagcctcaacagaaagct

SEQ ID NO: 865995 - DNA, 100 bp, Homo sapiens
tcccgggtccataacagtcgtgaaattccactggacagacactggattacatctactacaacgacgtgtatgcctttaatctggacaccttcacatggag

SEQ ID NO: 865996 - DNA, 100 bp, Homo sapiens
agcagccttgttagggcgtggcctgaggcttggataagtgggatctctcgtggaagaggaagaccaacacatgaaattgtcccttggaggcagcgaaatg

SEQ ID NO: 865997 - DNA, 98 bp, Homo sapiens
tcatcgtgggcctgggtgaccaggagcccacagtgggcgaggctcttgtcaggatggtgaagctgttcatcggaaacctgccccgggaggctacagag

SEQ ID NO: 865998 - DNA, 130 bp, Homo sapiens
cggaggaccacaggcttccagtacgagctggttaggaggcacagggcgtcggacctgcacgagctgtctggacccttgaacatctgtgaagaaatgactattctgcatggaggcttcttgctggccgagc

SEQ ID NO: 865999 - DNA, 100 bp, Homo sapiens
ttgaaggtgctaccgctgacgacacccctggtggatggcgaggatgagagaaagatgtgtcatggcaatgctgagaaggaggatcagggatgagaagacc

SEQ ID NO: 866000 - DNA, 98 bp, Homo sapiens
tccagaattacgggcaagcgctgttcaaacccatgaaagtgcctggtgaagaatgtgatgggatcactagcatgtctgcggagagcggccctgggacg

SEQ ID NO: 866001 - DNA, 100 bp, Homo sapiens
caaagactgttgagtatgctccatgtagatcacgttcatccacataaaacttatttcacagtagctgaaaaagggagttttccagatattatcatctatg

SEQ ID NO: 866002 - DNA, 100 bp, Homo sapiens
ctcacttccctgaagagtgtcccttatggctcagaggagtacttgcagctgagatctaagggtatcagcatggaagccatgagtgagaataaaatggtgc

SEQ ID NO: 866003 - DNA, 98 bp, Homo sapiens
gcaagcttagagcgtctggccaagaatcagaggaagtgggcatcttttgaagtatcattggaggcccgaagctgtcccagcagacacacggagcatgt

SEQ ID NO: 866004 - DNA, 100 bp, Homo sapiens
ggggacttcacctttgtctcctcagcagacgcggaagtcggcgtggcacaagcctaatggaagatgatgaagagccaattgtggaagatgttatgatgtc

SEQ ID NO: 866005 - DNA, 100 bp, Homo sapiens
cctgatttctgcagctctgtgtgaagaggcgacaggaagaagggtattacagccgcctggaagccgagaggcgcagacagcacgacgaggcggcgcgcag

SEQ ID NO: 866006 - DNA, 100 bp, Homo sapiens
gtccccgaccttgcctgaacaagattctgtgctgaacgcctccggtccctgctgcatactctggagatcaccgaccttgctgacttctccccgctcaccc

SEQ ID NO: 866007 - DNA, 98 bp, Homo sapiens
accaccccagctacgaacagattcagatcactttgggaagcagtgacatccaacctgtatcaagtcttctaatctgtgaacatggtatgcctcttcat

SEQ ID NO: 866008 - DNA, 98 bp, Homo sapiens
agccgcacaccatcctgcgcgtcgtgtcttgggctgatcccaaagaactaatcaagatggtcaccaggcatgtgactcgacatgagcacgaagcctgg

SEQ ID NO: 866009 - DNA, 98 bp, Homo sapiens
ggatgctgtccccagtggaaatgaagtttcggaaaacatggaggaggaggctgagactcgggctgagtttgcggagaggtcagtaactaaattggaga

SEQ ID NO: 866010 - DNA, 100 bp, Homo sapiens
ccaaatcacctgtacttggtcatgcagctgatgaccagtgtcccagtgaaggaacgagtgaaggtgtctcagaactggagactggggcgctgccgagagg

SEQ ID NO: 866011 - DNA, 100 bp, Homo sapiens
tggacaagagaaagcagcggtcagttttcagagatgtcctgagggcagtggagaccttctctgatggatgacctctgtgaagcaaatggcacttttgcca

SEQ ID NO: 866012 - DNA, 98 bp, Homo sapiens
tttttggtacccctttttatccactcattggcagagaagctcagcagccgctcttctaaaacattcaaaccaaagaagaatatccctgaaggatctca

SEQ ID NO: 866013 - DNA, 98 bp, Homo sapiens
ggaagctgactgaagccttcaaatacttcctgcaaggcatgggctacaggaacccttccaccatcatgtgaagaagcctggtctagcctgctggagga

SEQ ID NO: 866014 - DNA, 99 bp, Homo sapiens
tccgggcacgtcaaccccttcctcccgtatatcaggtaactgaatgtgagatatttctgtcacttctggtgaaatttctggatgcagataaaccacagt

SEQ ID NO: 866015 - DNA, 100 bp, Homo sapiens
gctcccggcactgctacctctgacccaaagcagggctgcagagagtacagcaacttgcgaaaaacacaagatacttcagacaaagactgcaggaaatggg

SEQ ID NO: 866016 - DNA, 99 bp, Homo sapiens
caagatggcggacggggagctgaacgtggacagcctcatcacccggctgctggaggaaaactctcccaccatgtcgcagaatggatacttcgaggattc

SEQ ID NO: 866017 - DNA, 100 bp, Homo sapiens
gcctggactgttgcgggccccgggacctgggctgggaacccgcggtggagcgggacacgaacgtgaacccagcgggtgccgcttctccacccgaggcttc

SEQ ID NO: 866018 - DNA, 100 bp, Homo sapiens
aatcccggggcgatttacagatgcaggatcggaaagaatcccggccagacgtgcgaacagctccagctggttggtgagtttgtaagtgatgcccttctcg

SEQ ID NO: 866019 - DNA, 100 bp, Homo sapiens
tctgacccagtctctaattatgattcagcctatcctgtatgcgtattcttttagtggaccaccagagtacgaatgtaaagttatcgcagaaaaatctcat

SEQ ID NO: 866020 - DNA, 100 bp, Homo sapiens
cgggacggaggacgcgctagtgacactcatgaggaccatgatacttccactgagaatacagacgagtccaaccatgaccctcagtttgagccaatagttt

SEQ ID NO: 866021 - DNA, 100 bp, Homo sapiens
ataattaccgtatgcagtcccccaggatacagggtcaaaggagagcacaaccatcgcagttggaagcccatggggcagatctgactgcagccatgagcag

SEQ ID NO: 866022 - DNA, 98 bp, Homo sapiens
gtatcaagaaaccccgatcacaaagatacgaatctcttaaggggaaaggcctaaagaatgtatttgacgaagcaatattggctgccctggagcctcca

SEQ ID NO: 866023 - DNA, 98 bp, Homo sapiens
ctgttggaacatgctttcttcaagatggaacaaagactgttgagtatgctccatgtagatcactatctagcagataggaggtactgtgtcacacagct

SEQ ID NO: 866024 - DNA, 98 bp, Homo sapiens
tcagttctctggccaagaggagcaattttcgtgccatcagcaaaaagctgaatttgccttgagaaggaaaattatgacgtttgggctaaagtggtgag

SEQ ID NO: 866025 - DNA, 98 bp, Homo sapiens
gaggaaagccaaagagctgaatgttatgtttattgaaactagtgcaaaagctggatacaatgtaaagcaggtttattacagaggtcagctgggaagag

SEQ ID NO: 866026 - DNA, 100 bp, Homo sapiens
accaatgcaggggcagtggatgggaaactctatgtctgcgggggattccatggagcaggctagatgaactgcagaagcaactacaagaagacataaggca

SEQ ID NO: 866027 - DNA, 100 bp, Homo sapiens
aaaattccatgagttttaagggcttgtctcattatagaggcacattgtggctgtctggttgtcttcttgcctgccctgtgtcgtaaaatgggggtccctt

SEQ ID NO: 866028 - DNA, 100 bp, Homo sapiens
gtaaagatgcagaggaaagaaaagaatacattcctgattacctgccacccattgtgtcttctcaagaaggagtggcatcaggattataggaaattcaggg

SEQ ID NO: 866029 - DNA, 100 bp, Homo sapiens
cttgacacttatatcctccctgggaaatgggtcctgatgaatatgaagagatggaagaagaggaggaggaggaagaggaggaagacgaggatgatgattc

SEQ ID NO: 866030 - DNA, 100 bp, Homo sapiens
atcatcagctgatttcctatcagggcagaattccatatcctcgccctggaactgtgatgactgaaaaagggaaactgtgccactatttgtaccatcattt

SEQ ID NO: 866031 - DNA, 98 bp, Homo sapiens
tcaagccaaacatcaagcagaatgtgatttgcttgaagatatgagcttcaggatgagttagagaaaggtgaacgggacaatgcagaactgcaggagtt

SEQ ID NO: 866032 - DNA, 100 bp, Homo sapiens
tttacaatcaacaatgagactggtgacatcatcacagtggcagctggacttgatcgagaaagagctattgcttaccttttcccaagtggtttgtttgaga

SEQ ID NO: 866033 - DNA, 98 bp, Homo sapiens
gagacatgttagaaggacaacctctacggcagacacatgcaggccaacccagaaccaccgaagaagaataatgacaaatcgaaaaagatcagccggaa

SEQ ID NO: 866034 - DNA, 100 bp, Homo sapiens
ttgatgaagtgatgtttccaaagaacgtgaggtgctctacttgtgatttaaggaaaccagctcgatccaagcactgcaggtctcactccattgcccaggc

SEQ ID NO: 866035 - DNA, 101 bp, Homo sapiens
tctggacaagtcttttcatgtggtttttctacgcattgattccatgtttgctcacaggatgtggtggatacccaccctggtctcacgttcctgaaagatgc

SEQ ID NO: 866036 - DNA, 100 bp, Homo sapiens
gctgcgcaaagcttgcgaggtggcgttagttgctgatatgtgttcaagatgagtgggatgggagaaaatacctctgacccctccagggcagagacaagaa

SEQ ID NO: 866037 - DNA, 100 bp, Homo sapiens
agagtgagtcttcaaatgcagcagaaggcaatgaacagaggcatgaagatgaggagccctctggcacaaatggaagaagaaagaagggagcaagtagcta

SEQ ID NO: 866038 - DNA, 122 bp, Homo sapiens
tggctgagtgtttctcatggtgctattccacgaaatattctctacagtgattgacataaaactggaaaagcctcaggagcaaccagtcagtgaaggaggctgttcctgctaatctcccatgt

SEQ ID NO: 866039 - DNA, 100 bp, Homo sapiens
tttgaaggagggatgagggagcctgccctcgcatggtggccagggcacgtcactgcaggccaggccacggcagagacaacgtgtgtaccccaagtgcaca

SEQ ID NO: 866040 - DNA, 99 bp, Homo sapiens
caacacttggactcagttcatatcagcagaaaaggaaggaaaatcacctcggcagtgtttgaaggaaggatactgcaactctttgaagtacgcattttt

SEQ ID NO: 866041 - DNA, 98 bp, Homo sapiens
ccatggtttccagtgcagcgcggagtgggcgatgccagcgtgccagtatggaggggctcccggagggcctgcgtttcccggacaaactcaggatccgc

SEQ ID NO: 866042 - DNA, 100 bp, Homo sapiens
gcaaaatcctcagattcttgcagcccttcaagaaagacttgatggtctggtagaaacaccaacaggatacattgaaagtcacaatattcttctctatgag

SEQ ID NO: 866043 - DNA, 98 bp, Homo sapiens
tggatgtcagcgaggagatcattcagaggcagagccccggatgtggacatatgtttatcctgccaagtactcagacatcaagtcagaggatgagcggt

SEQ ID NO: 866044 - DNA, 100 bp, Homo sapiens
aattggcaaaagctgctaagaagaaacttcaatctgtttttgccaatccagaagactgtgtagcatttggcaaaggagaaaatgccaagaagtatcttcg

SEQ ID NO: 866045 - DNA, 99 bp, Homo sapiens
caagaaatcctaaatcagaacttttcagatcaacagtacaaattctgaagtttgtaaacttgctgatggtggtggtaagccatggcagatgataaagtt

SEQ ID NO: 866046 - DNA, 100 bp, Homo sapiens
gggtgctggcgctgccagcggtgttcggcgtcctcggccgcacggaggaggccctggcgctgcccaggttcttgattattacagacctctttctgaaaag

SEQ ID NO: 866047 - DNA, 100 bp, Homo sapiens
ctgcagctgaataacccttttaacgagtattccaaatttgatggcaaggtccttctcatgaggaggaagacaccttttcctcagtgtttcatactcaaat

SEQ ID NO: 866048 - DNA, 100 bp, Homo sapiens
aagagacacataccaaattggatctatccaggagcgagtagaaaattattctaatgtaagtattcatttgaagaatcctgaaaactgttcctgccaggct

SEQ ID NO: 866049 - DNA, 100 bp, Homo sapiens
tggaagtgcggggctccaatggcgctttctacaaggaaattcgaaatgagtcccatgactatcctcatagagtggccaagtttccagaaaacagaaatcg

SEQ ID NO: 866050 - DNA, 100 bp, Homo sapiens
gaagtagttcttgcattggatgcaatccattccatgggttttattcacagacattcagtcccctgaagctgaatatgtagatttgcttcttaatcctgag

SEQ ID NO: 866051 - DNA, 100 bp, Homo sapiens
tcgggtcatggaagaaatccggaatttaacagtgttctgaaagtgtgaagcaaaggaatgatgtgttttaccttcaacctgagcgctcctgtgtcccgaa

SEQ ID NO: 866052 - DNA, 100 bp, Homo sapiens
aagaaatctgccaggagggtgcctcccgccagtatctgatgaaggtaagagtgctgtccccggcataggtccatctctgcagaagccatttcaggagtac

SEQ ID NO: 866053 - DNA, 98 bp, Homo sapiens
agcgcggacctagacctggaatcgcccaagtccctctactcgcgaggtccatattcaagcctttcatctttgttgatgacgtaaaacttgtccccaaa

SEQ ID NO: 866054 - DNA, 100 bp, Homo sapiens
gacatcgccgtgtccgagatctttgtcagccagaaggacctggtgggcatcgttcccttggctatgattctgaaaaagagttccacgtcctcccttatcg

SEQ ID NO: 866055 - DNA, 101 bp, Homo sapiens
attccatcacgtaaaccttgtggagatagattattttgggctacgttactgtgacagaagccatcagacgcgaagaaagctaccgtgaatttactgggtga

SEQ ID NO: 866056 - DNA, 131 bp, Homo sapiens
aagacgtcgctggtgctgcgctactgcgagaacaagtttaacgacaagcacatcaccactctgcaggatatgttcaaggaatgagtgatttactttcccctcttttatatgtgatggaaaatgaagtggat

SEQ ID NO: 866057 - DNA, 100 bp, Homo sapiens
cttattttttctcatggatgttcttcttcgagtatttgtagaagggtaaaatatacccaggaccataaacagatgaaaggtagaccaagtctgattttag

SEQ ID NO: 866058 - DNA, 109 bp, Homo sapiens
gttgaggttcaggaaggattcctgagattccaggaggaagtactggcgaagtgctccatgctatgaaacccacgtagtcgaacaccgtgatgcttctcctgcagggcgt

SEQ ID NO: 866059 - DNA, 99 bp, Homo sapiens
aatatggacagacttcttagacttggaggaggtatgcctggactgggccagggctgtcacatggtgactgaagaacttcattccataacgtttgaaaca

SEQ ID NO: 866060 - DNA, 100 bp, Homo sapiens
aaaatgtccacccccatcgaagtgttgtgtaaaggctacccttgtgtgggcccatcgctggatggatctgtcagaacacggctttgggctggccctgctc

SEQ ID NO: 866061 - DNA, 99 bp, Homo sapiens
atcctcttgggaagccaagattcaaagatggagatcttataacaatttttgatagttctgacctttcctttgcaattcagtgcagtaggatactgaaac

SEQ ID NO: 866062 - DNA, 100 bp, Homo sapiens
ggaggcggctataataatagcaaacatcgatggcctactggggataacattcatgcagaacatcagaaacgggctgtaaaggcagaaaaccacgtcgtga

SEQ ID NO: 866063 - DNA, 100 bp, Homo sapiens
ctatcttcaagactgcctcgatgccatccagcaagacttcgtgatttttaacagagaaaactacccgtacagtgaggacgcccgccagggtgagcagtac

SEQ ID NO: 866064 - DNA, 99 bp, Homo sapiens
ttctttgagaaaaacctgaaagatgtctcagccagatggggactgtgcatcttcccttaatggtggaaatattaaaggcattgaaggacattcacctgg

SEQ ID NO: 866065 - DNA, 100 bp, Homo sapiens
ggataacattcatgcagaacatcaggtgtttactacaatctggaggcaagatctttcctcagtatgtgctgatgtttgggttgcttgtggaatcacagac

SEQ ID NO: 866066 - DNA, 99 bp, Homo sapiens
caaactcctggacagtatcactttctttgtttcaacaccagttttcagctatgatgccatttcgtactacaaaatatttagtgacaaggatggctacaa

SEQ ID NO: 866067 - DNA, 100 bp, Homo sapiens
aaaagctgcttgaatgtctgccgaaatgttcaagtttaccaaaagagaggcaccgctggaacactaatgagaaagagaatgcgaacttcctaaaatagat

SEQ ID NO: 866068 - DNA, 102 bp, Homo sapiens
cggggagatgaaggacccataggccaccaggggccgattggccaagaagaagtcattgtattcaaagaagaataagcaagaaagaaaagaaggaaggaagag

SEQ ID NO: 866069 - DNA, 99 bp, Homo sapiens
ttgaaaaccagctgcttcaaattggacttaagtctgaatttcggcagaatttaggaaaatgtttcaacgtgcgcaagagttgcggtggcgggcagagga

SEQ ID NO: 866070 - DNA, 100 bp, Homo sapiens
cgatagccggaacaagcatgagatcattcgctgcttgaaagcttttatgaacaacaagattcgggaactggagcctctcctctgtcacagtgacaatcca

SEQ ID NO: 866071 - DNA, 100 bp, Homo sapiens
catggccctggtgctgatcctccagctgctgaccctctgctgaagaggtgccgcatctccagctcagcctgcgaggacctctctgcagctctcatagcca

SEQ ID NO: 866072 - DNA, 100 bp, Homo sapiens
agcctggctgagggctcttgctcagcaatctttgtggtagtgtgccagtatttgaaaaatcccaatgtatctgattcactgctgctgcagaatattttcc

SEQ ID NO: 866073 - DNA, 100 bp, Homo sapiens
ttaaacccagctgggaggtgacacctgaagtcgtaaggatggagcaggaacatcatttacagcgagcaatttcagcacagcaagtgtttagagaaaaaaa

SEQ ID NO: 866074 - DNA, 51 bp, Homo sapiens
ccagcaatctgtgtttcgcaaaccctccagaggcctgagtcaaggttattg

SEQ ID NO: 866075 - DNA, 100 bp, Homo sapiens
cacagcagcactgttgaagacaaggactgtttcagaaaagagaaaattcagatccagttaacacaatcatttgagaaagaagagaagccctcaaaagatg

SEQ ID NO: 866076 - DNA, 51 bp, Homo sapiens
tcccaaagtgctgggactacagtttgaaattggcacaatggaagaagctgg

SEQ ID NO: 866077 - DNA, 100 bp, Homo sapiens
ccatcgaggtcctctgcaaaggctatcccttgggacctgatgcagaacatcatgaatgacatgccgatctacatgtactccgtgtgcaacgtgatgtctg

SEQ ID NO: 866078 - DNA, 98 bp, Homo sapiens
atggatccatttctcctattgaggagtcaacaaaccagctttttctaaagatgacattcttccgatggacctggggaccttctatcgggagtttcaga

SEQ ID NO: 866079 - DNA, 100 bp, Homo sapiens
gacttgcagattatgtggctgcaactttcgacatctggaagttcagaaaagaaatgaatggggtgctgaaaggaatgctctcagaatggttttcctccgg

SEQ ID NO: 866080 - DNA, 100 bp, Homo sapiens
tcagaacaccatggagccacccctgaccccgcccagcccagcaggcctccggtgtggctgtctctgatggtgtcatcaaggtgttcaacgacatgaaggt

SEQ ID NO: 866081 - DNA, 100 bp, Homo sapiens
aatgagcaacactccggatcagacactggaagtgtagaacgtcattcagagaaagcataacccctactgtagaactaaatgcactgtgcatgaaacttgg

SEQ ID NO: 866082 - DNA, 99 bp, Homo sapiens
ggagattgctgcacactgcggggcccgggaaatgttcaggctggagactatgtgctaatccatgcaggactgagtggtgtgggcacagctgctatccaa

SEQ ID NO: 866083 - DNA, 98 bp, Homo sapiens
ttttggctgctgcaggagccattttaggtcttgctcagtgtgcagaactctgctggcagctgagaggggaagccggaaagaggcaagttcctggtgca

SEQ ID NO: 866084 - DNA, 100 bp, Homo sapiens
agacacgccaggatggagagagcaaaactatatgttctcctttcagccaagacctttcaccagtgcaggggatagaagattcattccacaaacttatact

SEQ ID NO: 866085 - DNA, 98 bp, Homo sapiens
tttttctgccacttttgcaagggcgaggtcagccccaaactaccggtgaagatggagctggaaaaacaagcttaataagaaaaattcagggaatagag

SEQ ID NO: 866086 - DNA, 98 bp, Homo sapiens
atagattgtgtaggcgttggtcttctgatagcaactttaatgtgaatccaattctcagttttgaactacctatgaatttggcaaactggtttcctcca

SEQ ID NO: 866087 - DNA, 100 bp, Homo sapiens
tcaagtgtccattttctttcaactatatttgagcatacccaggcctcaactccatatagcatagattcagattctttgggaatggagtgtattatttcgg

SEQ ID NO: 866088 - DNA, 98 bp, Homo sapiens
gcgctctcgggccactcggccgcaggaatgaattcttccaaaacaaaactagaactgcaaaagcacctgacgacattaaccaatcaggagcaggcgac

SEQ ID NO: 866089 - DNA, 98 bp, Homo sapiens
cgccggaaccgtggctcacgagctgcagggagtgcaccagtttgtgaagaaatatgggaacctttttagcttggagcttggtgacatatctgcagttc

SEQ ID NO: 866090 - DNA, 100 bp, Homo sapiens
cacactcacctctctctgctcatgcagctacatctacatccaccactgggacaagccatcttgtaaaatgtgcggagaaggagaaaactttctgtgtgaa

SEQ ID NO: 866091 - DNA, 100 bp, Homo sapiens
aaacatggcggtggactcggcgatggagctgttatttttagatacttttaaacacccgagcgctgagaaaccgaaacttcattgccccttcaatgtggga

SEQ ID NO: 866092 - DNA, 71 bp, Homo sapiens
gaaaggagaagacttggactctcaggcatgaaagaattactgatgtccttgatcaaaaaaattatgtggaa

SEQ ID NO: 866093 - DNA, 99 bp, Homo sapiens
acagtgccacccaaggagaagaagggtggttctcttcccaaagtggaagccaaattcatcaattatgtgaagaattgcttccggatgactgaccaagag

SEQ ID NO: 866094 - DNA, 101 bp, Homo sapiens
cccaaatgccccaaggatgaagaacggagacgggcttttttccagacttcaagctcccattccaacagtaagagcttcttccacatcacagcccttggatc

SEQ ID NO: 866095 - DNA, 100 bp, Homo sapiens
tacctacatcctgagctacatggccccctggtttagggaggcgtcttcctccacttgatgaaggtggacccagactccacctggttcctcctgaacgagc

SEQ ID NO: 866096 - DNA, 100 bp, Homo sapiens
cagaaagcaggcgaacccgcggcgcaataacgtgtggcaaagcgctccctggcctttcaaagcaagaggactgctgtggaactgtgggtacctcctgggg

SEQ ID NO: 866097 - DNA, 100 bp, Homo sapiens
ccagtgcttcgtgtggagcggcacggctgaggcccgcaagcgcaagttgggacccctgattttagcaggatggcccaatggaatcagctacagcagcttg

SEQ ID NO: 866098 - DNA, 100 bp, Homo sapiens
aaaaacaggctgctgtccagtgtcttcgatctgcttctgatgaaatttaacattgttgggccatttaaaatgtgcatattggagcagaacattaaatctg

SEQ ID NO: 866099 - DNA, 98 bp, Homo sapiens
gcccactcctcgcctgcatcatcggtacccagttcaggaagctccgggatggtgatcgagaccccaagtttgtggagcgaacactgcggctggcaggc

SEQ ID NO: 866100 - DNA, 98 bp, Homo sapiens
ggaacgcaggagacacaagaagcggatccagggacccgagtgtatagccctccagagtggatccgctaccatcgctaccatggcaggtcggcggcagt

SEQ ID NO: 866101 - DNA, 126 bp, Homo sapiens
tgagcccagtatgggaaagatctaccttctggaagctactactacgtggtgcttggaaaggtctcggcgcggaagatggccggcggcgtggacggccccatcgggatcccgttccccgaccacagc

SEQ ID NO: 866102 - DNA, 98 bp, Homo sapiens
ccacctgggcctgccccagtggcaatatgccttcaccagctatggcattagcccacaggccaaggtaaagaagcagctttgaatctgagcttcatatc

SEQ ID NO: 866103 - DNA, 98 bp, Homo sapiens
ttgggaataacatttcttggaattggactgtgggcatggaatgaaaaagaatgttttaaaggaagttgggctactcacaagttactacataagaaagc

SEQ ID NO: 866104 - DNA, 100 bp, Homo sapiens
ctggcaatgaagctgcaattttgagttcactagaacgaacactgctatcattgaaagctggtcacctgacttttgaatgccgcaattttctccgagtaga

SEQ ID NO: 866105 - DNA, 98 bp, Homo sapiens
actcgcctctacagccggttcaccagcctggacaaaggagagaatgggactctcaggtttttcgttggaatatacgttgcacatttatggcgattctg

SEQ ID NO: 866106 - DNA, 100 bp, Homo sapiens
ctggctgctgcggaccccgccgagtcctagcgcctggcctgcgcgccgctgcccgcgccacagctctttcagtctcacatggcaacgaaaacaacttgta

SEQ ID NO: 866107 - DNA, 100 bp, Homo sapiens
tctacctcctgtggtttttgattcaagtcctgttctacctactgccaattggaaagtgaacagagtatctgtcaggcaagagctgctgtgatggtttatg

SEQ ID NO: 866108 - DNA, 100 bp, Homo sapiens
aagcagtgcttcgtggtgactgaaaaagatgctttttcacggatgcctctcatgaatggccttattggatccagtcctcatctcccacataattctttgc

SEQ ID NO: 866109 - DNA, 99 bp, Homo sapiens
agatggctgcgggtggagccgaccaggttctgccggagacttccatttggcctcaatgtgaaattaaagtagaaaatcacatctacatgcatgttgcta

SEQ ID NO: 866110 - DNA, 98 bp, Homo sapiens
ccagtatgagatgctgtcagagggtcttactgaagtaacacaaagcttaaaaatggaaaatgaagagtttaagaagaggttcagtgatgctacatcca

SEQ ID NO: 866111 - DNA, 100 bp, Homo sapiens
ggagcttgaaaatattgtaggagtagatctgaagaaaacccttgctgtgttattagataacattttgcagcgcattggcaagttggagtcgaaggtggac

SEQ ID NO: 866112 - DNA, 148 bp, Homo sapiens
gacaggccaaactaggagcccatcacctaaaaaagaggtctaccaaaggcgacatgctcccggatacaccagatcaatgagctgagcaatgttcctgttcctgtcatgctaatgccagatgacttcaaagcctacagcaagatcaagg

SEQ ID NO: 866113 - DNA, 98 bp, Homo sapiens
catcagtgatgaggcccaggccgacctggcgctgcggaggctcacagaacatttcctgcctgttgctcacactctgttgtccacagcatacccgcacc

SEQ ID NO: 866114 - DNA, 122 bp, Homo sapiens
ccctccaggacccgttcgccttgtcatcggccggcaccctaatccaaaggatccactagttcctggactatgggaactgatgactcgcccaatgtcacagatgatgcagctgatgagatcat

SEQ ID NO: 866115 - DNA, 98 bp, Homo sapiens
tttatcacattgtaaagttaggaatgctcctgagttctccattgttgtcctccacgcctgtgcacacaacccaactgggattgacccaactccggagc

SEQ ID NO: 866116 - DNA, 98 bp, Homo sapiens
agattatcaaagcagagatgatggggaatatggtattacaagtggataaataatgtgcactgctctgagcccaaaggtacgcagtggacctggcctct

SEQ ID NO: 866117 - DNA, 104 bp, Homo sapiens
cgaggccagtgtccttcactcctactgcatgaagcccccaagctgtaccctgccattcccgcagcccgaaggcggcccattcgagtcctgtcattgtttgatgg

SEQ ID NO: 866118 - DNA, 100 bp, Homo sapiens
tgacttggaagcaatgtttgaacaaactcgaagaacagctgtggaaagaagttgcaaaacactgggctgcaagatcaaggccctgcgggccaagacaaac

SEQ ID NO: 866119 - DNA, 100 bp, Homo sapiens
atatgttgtcgggtacattgatatatgtaaattacggaagatcatttatatacacatgattattcttggagaaaccctgtctgtttactgtaaccttttg

SEQ ID NO: 866120 - DNA, 100 bp, Homo sapiens
aagcaccacagtctcatcgcaccagctccgccgcatgcaagagatgattgcaaggatgcaggcgcagatgcagatgcagatgcagggcggggatggcgat

SEQ ID NO: 866121 - DNA, 98 bp, Homo sapiens
tgacgccgtcacccttcctgcgattctacttaggtgtttgtggccagtcctcacaaaacacagcctattgtggagatcctgttaaaaaatcagcccaa

SEQ ID NO: 866122 - DNA, 100 bp, Homo sapiens
ccgcttcgtgcaactctccgggcggccgcacctgccagagagagtctacaaggagattgaacaggtggttggcccacatcgccctccagcgcttgatgac

SEQ ID NO: 866123 - DNA, 99 bp, Homo sapiens
ggggaaggttctgaccagtagagcactcataacagatggtttttgccaatccagaagactgtgtagcatttggcaaaggagaaaatgccaagaagtatc

SEQ ID NO: 866124 - DNA, 98 bp, Homo sapiens
gatactcttgccttggcctcctaaagtgctggaattataggcgtaagctactgtgcccaggaacgtgttgtgggctttcacgtactgggtccaaatgc

SEQ ID NO: 866125 - DNA, 100 bp, Homo sapiens
gcgggcgagcgaggggctaacttcagcggtggcaccgggatcggttgccttgagcctggatgaagtggcacacactctaactgaaagcagagtattaaag

SEQ ID NO: 866126 - DNA, 100 bp, Homo sapiens
ctgctcactttcgtccaggacagtatgtggatgtcacagccaaaacggagttctgggaaatcgttcattcatttacagatgaacagaaaagactcttctt

SEQ ID NO: 866127 - DNA, 100 bp, Homo sapiens
attccctaagcatggctatgcagactctaaagttaaaaatgtgtctgcaggcacacaggacgtgccttcacccccatctgactatgtggaaagagttgac

SEQ ID NO: 866128 - DNA, 99 bp, Homo sapiens
ttacaaccgcagcagtggtggctatgaacccagaggtcgtggaggtggccgtggaggcagaggtggcatggggaaatgggtcctgatgaatatgaagag

SEQ ID NO: 866129 - DNA, 100 bp, Homo sapiens
caattgatgccagacatcatgagggccgttaccattacgatccatctccgattcctccattgcatattcacagaagatcttattagacggaatgctgaac

SEQ ID NO: 866130 - DNA, 100 bp, Homo sapiens
ccatggaggagatcggcctcagcccccgcaaggatggcctttcctaccagctactccctcttgatgccctcccctttgcccctcactcaggatgctccag

SEQ ID NO: 866131 - DNA, 100 bp, Homo sapiens
ttacagagaatgcaggagctccaggaagcacagaatgcaaggaacatacatatgatagttgagaaagacacatattctgatcatgaagaaataaacacaa

SEQ ID NO: 866132 - DNA, 98 bp, Homo sapiens
gagcccggcggagcccgggcggcccgcggacgccaggagcctcctcgggcagcgagattgctttttttccgaacggggcgaatgatgtgaaacaccat

SEQ ID NO: 866133 - DNA, 100 bp, Homo sapiens
gaaggaaccaattccggacacataacaagcagcagtgaggacaccaaagcctccaagtctattataaatagtatgctacgggacccttctcagattccag

SEQ ID NO: 866134 - DNA, 100 bp, Homo sapiens
ctcctgcagcgggcggccccctgcagcctcctgcccaggctccggttggaaaagagactgttcaaaccactgaggatcagattttgaagagagatatgcc

SEQ ID NO: 866135 - DNA, 100 bp, Homo sapiens
tggttgagctggaattccaaccctgtctgaaggactgtggagctctcggatatgagggaaggcaccattggagatatggctatcctgggtataacagaaa

SEQ ID NO: 866136 - DNA, 100 bp, Homo sapiens
tctgcacgtttgcactcagcaccggggacccaagccagcccgtgcgcctgttcaggggccggacctcggtatcactcctccttgcttcaatctctttgcc

SEQ ID NO: 866137 - DNA, 100 bp, Homo sapiens
atctgcgatgtgaggaaaggcacctccaccaggtgtggtcactcacctgtctaccactcccgtgaaatggcagctcgtgccttggtcccatttgttatga

SEQ ID NO: 866138 - DNA, 100 bp, Homo sapiens
agaagaggagaatgctaagcagattttcagcattgcaaataacaatctcagctactgggatgcccccctgggaagttcttatatgtgcaacaaagagcag

SEQ ID NO: 866139 - DNA, 100 bp, Homo sapiens
ggctgggcctgcccaacaacgccgagagagtcctccttaccacacaggatgaggtttcgcataagctcttggagatgtacaggaaggagctgctcctgaa

SEQ ID NO: 866140 - DNA, 100 bp, Homo sapiens
gcagccggaacgatgccggccgtgagcctcccgcccaaggagaatgcgctcttcaagcggatcttgatgccttcaattaagttgcagagttctgatggag

SEQ ID NO: 866141 - DNA, 100 bp, Homo sapiens
gagacgagaagcctgaaaagtcgcagcgagctggagccgccggagttctccgggagatgttgcataaccactccttcgtgggctgtgtgaatcctcagtg

SEQ ID NO: 866142 - DNA, 100 bp, Homo sapiens
cttgctgaaatgggtcttagagccacacctgcatgctgtggcgggcgctggcggtggagcctcgcctagctgcccaggtcctggggctgctgctggagaa

SEQ ID NO: 866143 - DNA, 100 bp, Homo sapiens
cctattaaagcaattttccccagcccaacttcactgattgggaaaatgaggtacgttagtgttcgcgattttaaaggcaaagtgctaattgatattagag

SEQ ID NO: 866144 - DNA, 99 bp, Homo sapiens
tggctgggaccatggagacacccagagtatccagcccatcatcttcgtttcggacagagcaaacagcaacaaggagctgggtgtggaccaggagtcaga

SEQ ID NO: 866145 - DNA, 101 bp, Homo sapiens
aaaagaccagaagaaaccagaaaatgaaatgagtggaaaggtggagttggtgctgtcacaaaagatgggatgtaatgaccgaatttccccaagaaagaagc

SEQ ID NO: 866146 - DNA, 100 bp, Homo sapiens
tcataactgatggggcggtggacacctatgatacaatctttgcaaaatacaattggccagatcgaaaggcaacagagatgcttatttttggaaagaagtt

SEQ ID NO: 866147 - DNA, 100 bp, Homo sapiens
ctgatgacggcactgttagaatctgggactttcttcgttgccatgaggaaagaattctccgagagcacaaagttatcattgttgggctggataatgcagg

SEQ ID NO: 866148 - DNA, 100 bp, Homo sapiens
ttacccacttcgagtcctttattgtggaggaaactggagcacccatcctaactgatgatgttagcctgcaggtgttcatggaccatttgaagaagctggc

SEQ ID NO: 866149 - DNA, 99 bp, Homo sapiens
ggagctgtaaagccacccacaaacaaactacccattttcttttttggaactcatgagactttgtacctgttcaagctaggcctggcccctcagattcaa

SEQ ID NO: 866150 - DNA, 98 bp, Homo sapiens
tggaggctccgggcgcggggaagtcatgctcgcttcacggaggcaatagctagccggggaagatggtgaaaggaatgggaggtgctatggatttagtg

SEQ ID NO: 866151 - DNA, 98 bp, Homo sapiens
cagagatcagctcatgagaatctcatggaagcaattcggggaagcagcataaaacagctaaagcggatttagatgtagatgtagatcaacccaaagaa

SEQ ID NO: 866152 - DNA, 100 bp, Homo sapiens
ctggaccatcatccttcgctttgctattcaggatatttcggttgaagagcaggaggaggcagcggaagaggatgctgaagcagaggctgagaccgaggag

SEQ ID NO: 866153 - DNA, 100 bp, Homo sapiens
tgaagtgcagtctctgagctccttccagtccgaatcgtgcgatgacaatggagatacaactcgtcaacgaatcaaattcagtgatgacagagtatgcaag

SEQ ID NO: 866154 - DNA, 99 bp, Homo sapiens
agaagcgtaagctggcagacaaaacagcatctagcctgattccaactcaaacaacgataacagctggaatgggcatgttaccattctttccaaatcagc

SEQ ID NO: 866155 - DNA, 99 bp, Homo sapiens
ccgtgggcatctcctacattagcgtctacgaccaccaagtttctccagagccaaaaacagaaatgaagaccctgagatgggcaatttcacaatttgctt

SEQ ID NO: 866156 - DNA, 99 bp, Homo sapiens
ctctcagcagacttgagtcctggtccttctgcagaggcctgagcagaacatccagtcatggataaaaatgagctggttcagaaggccaaactggccgag

SEQ ID NO: 866157 - DNA, 99 bp, Homo sapiens
gagaaggagcagtccgtgctcaaggaggtatatcatacaaagagaatgcaacatgttatctgtgtaaaatggacttctgacagcaagtatattatgtgt

SEQ ID NO: 866158 - DNA, 98 bp, Homo sapiens
ttcacatccatgtgaaaggccagccaccagttcaggagcacttgggagtgatctagccatcaagccagtgtgcaggtagagtcattgcaagaacagtt

SEQ ID NO: 866159 - DNA, 100 bp, Homo sapiens
cgccagagcagcagctcacttgacagtcattgaaaaggtggacaagtcctattttcaagagaagatgacttttaacagttttgaaggatctaaaacttgt

SEQ ID NO: 866160 - DNA, 100 bp, Homo sapiens
tcctgttctgatagcgtggaaggagatgttacagcccagatagctcttcagcctgcactgaagttcaatggtggtggtcatatcaatcatagcattttct

SEQ ID NO: 866161 - DNA, 100 bp, Homo sapiens
cagaggtcaacaaggttctggacaagatgaagtctttctgccagggctcctcgcacctaccccagcaactcaaattcaccacctcggactcctgcgaccg

SEQ ID NO: 866162 - DNA, 99 bp, Homo sapiens
tactggccgagatggctaagaagtccatgccaggaggtcgtctgcagtcagacagccagctaaaggtgtggatgagcaaatacggctggagtgccgacg

SEQ ID NO: 866163 - DNA, 100 bp, Homo sapiens
cagacgggcgtcttctacctgacgctcgtcctcatcctggtcactagcggactcttcttcgccttcgatggtggtgaccgcggtggcttcaaaaattttg

SEQ ID NO: 866164 - DNA, 100 bp, Homo sapiens
ctgctagtactgaaggctcatcatgatattgtacgatttctggtacagttagatgactacagccgctgcagagggagcgtcgcgccggggcggagtgcgg

SEQ ID NO: 866165 - DNA, 100 bp, Homo sapiens
ctacccttgcagatctattccggccacccattgatttgatgcataaaggcagctttgaaacatgcagtcattggagaaatcgatgaagaaacagattctg

SEQ ID NO: 866166 - DNA, 100 bp, Homo sapiens
ccgaggcggtgctgcaagagaaggcactcaagtttatggcaaaaagggcagctagctgtagaaagagctaaacaagtagaagagttcctgcagcgaaaac

SEQ ID NO: 866167 - DNA, 99 bp, Homo sapiens
tcaggttcacgccaacagtacctcattgctctttggcgactcttattgatggagtcccctgtttccacaccagcagtgctgccaatacaccttttggtg

SEQ ID NO: 866168 - DNA, 100 bp, Homo sapiens
aagcagggggatgacagctctgaatgggggaactccttcttctgaatggactgctgaattatgaagtatttcagacccagtagtagaacatcactctgcc

SEQ ID NO: 866169 - DNA, 100 bp, Homo sapiens
gggaagaaggagaacctgaaggctgcgcaggaggagtatgtcaagcgagccctggccaacatagccgaggtagaggtctccatccctgccaagctgcaca

SEQ ID NO: 866170 - DNA, 98 bp, Homo sapiens
atattgaagttggtaatcgagtaaacaacaatgttttaacaatagatcaagctagtgacttgctcaaagttatgaagtttcaggatgaattggaatct

SEQ ID NO: 866171 - DNA, 100 bp, Homo sapiens
gctcagggccttccggagccgacccagatagtggatgagaccctgtccctacctgaaggacgccgttcagaagatgatgaaatctttgacatggtaaaac

SEQ ID NO: 866172 - DNA, 100 bp, Homo sapiens
atgtacgccaagatcgacccctcgttaggaataattgcaaaaatcaatcggactctggaaacggcggactgtgcagagtgtggggccttcaggactggcc

SEQ ID NO: 866173 - DNA, 99 bp, Homo sapiens
aggttcacgccaacagtacctcattgctctttggcgactcttattggtgtcagctgtgatgcatgtttaaaaggaaattttcgaggtcgcagatataag

SEQ ID NO: 866174 - DNA, 51 bp, Homo sapiens
cgagggttcttgggaatagcaggcctcccagtgcaacgtcagcttaaagaa

SEQ ID NO: 866175 - DNA, 99 bp, Homo sapiens
gccaggcggtgatgaagaatccccccgaaaggaccccccagagtcccctttacttggtaaatcacggcgagagtggaccagtcagatgcaacaggtgca

SEQ ID NO: 866176 - DNA, 100 bp, Homo sapiens
gcagtgagggggccacggctcaaggtgtacgaagccatcgacagcagagatggagcatcttgtgcagagttggtgtcttttaaacatcctcatgttgcaa

SEQ ID NO: 866177 - DNA, 100 bp, Homo sapiens
ggaggagcagccgctgccgcccaggactgggcccttaggaggagagacttcagcatgcaaaccttcatctgttcggcttgcaccgtcattttcattccat

SEQ ID NO: 866178 - DNA, 98 bp, Homo sapiens
ggacccgctcagtgaggccattgttgagaaactgatccagtccatccagaaggttttcaatggtgagctaaagagtcttgctatggagatacacttca

SEQ ID NO: 866179 - DNA, 98 bp, Homo sapiens
acgggtcgctccatttcgaattctgcttcaagttcccggctcccaggtttattctcccatagcatgtggtcacccaacctgcctgcagtttaccctga

SEQ ID NO: 866180 - DNA, 98 bp, Homo sapiens
aatcagcttcttaccaaatacagaaggtggaatgaggtaccatctactgtctccagaggaccgagaagaacttgtagatggcacaagacctagaagaa

SEQ ID NO: 866181 - DNA, 98 bp, Homo sapiens
cgcgcagctggctggcggagcatgagcgccccagaggacaaaagcatgtcttcccttcctgggtgcattggtttggatgcagcaacagctacagtgga

SEQ ID NO: 866182 - DNA, 100 bp, Homo sapiens
cagcagatggcggatgccctgcagtacctgcagaaggtctctggagacatcttcagcaggcgaacctcttcccggccgctctggtgcacttgggagccga

SEQ ID NO: 866183 - DNA, 100 bp, Homo sapiens
gaaagggaccgaaatggagagcaaaggactatgatgatggatatggcactgcttatgatgaacagagttatgattcctatgataacagctatagcacccc

SEQ ID NO: 866184 - DNA, 100 bp, Homo sapiens
ggagtccatgatggaggcagaggagccggtgaaacctgaagaaggcagagatatggcaaacaggattggcgcttttgggtacatggagtgttcagcaaag

SEQ ID NO: 866185 - DNA, 100 bp, Homo sapiens
ccagagtccagacccaccacacaaagtgtgggatgctgtctcaggagatgaattgatgaccctggctcataaacacattgtcaagactgtggatttcacg

SEQ ID NO: 866186 - DNA, 98 bp, Homo sapiens
ctcttaccaatggtaactgcaggaccagctgcagggaagagcagttcctcaacctcgtgggatactgtgctggttgtagatgagcatgagagtgtgga

SEQ ID NO: 866187 - DNA, 100 bp, Homo sapiens
actatttggcaagaagcagatgcgcattttgatggggattaaagcctgtggtttccacagaagcaccacctatcatatttgccacaccaactaaactgac

SEQ ID NO: 866188 - DNA, 98 bp, Homo sapiens
gcgctcaaccagatcgcgcgggaggctgaagccgacgtagcttctctgaacagacgcatccagctggttgaggaagagttggatcgtgcccaggagcg

SEQ ID NO: 866189 - DNA, 98 bp, Homo sapiens
tcgagaaaaacctcagcgacctgatcgacctggactcgggcagccgcaagtagctcctccagcgccagcagccagcccagcagcaagcagcaggcccc

SEQ ID NO: 866190 - DNA, 100 bp, Homo sapiens
atgatgacaatgtagaggatgacttctctaatcagttacggacacattcagctaacgtattttagcaggtggagtgaggttgaagattcctgtgacagcg

SEQ ID NO: 866191 - DNA, 100 bp, Homo sapiens
tcgagactcatgactcccagagaggatggcatctagaagtgcacattcagatgttgcttcaggtatgagtgatggcaatgagaacgtcccatcttccagt

SEQ ID NO: 866192 - DNA, 99 bp, Homo sapiens
ccgcggtgaggagagccatgggacgggcagtcaagggccgttgctccagggagaactgcaaatatcttcatccacccccacatttaaaaacgcagttgg

SEQ ID NO: 866193 - DNA, 109 bp, Homo sapiens
gccggcgcagcagggaaaggcaaaggcaaaggcggctcgggagattcagccgtgaagcaagtgcagatagatggccttacctgaagattatcggctataagagaataag

SEQ ID NO: 866194 - DNA, 100 bp, Homo sapiens
cctcaacaacgccatcctgcgtgccaacctgcccaagagcaagggcaacccggcggcttacgcagtaccatcccactgatatcacgggcccgctcaacct

SEQ ID NO: 866195 - DNA, 74 bp, Homo sapiens
ttctggaagcaagaatttatcaaaggaaagatggatccagacaagatcagtgtactgttacccggacataccta

SEQ ID NO: 866196 - DNA, 100 bp, Homo sapiens
gatgcccgaatttgtgctccaagttcttccctcttctctgggctcagccaactacaatcttctcacaagactttcaggattaagcgattcctggccaaga

SEQ ID NO: 866197 - DNA, 99 bp, Homo sapiens
acttccaacagtgacgtgttctccaaataccagctcgacaaagatggggttgtcctctttaagaagaacctgtctccagagaagattttccacgtcatt

SEQ ID NO: 866198 - DNA, 100 bp, Homo sapiens
ggatggcagaggcggaattgcacaaggaaaggctgcaagccatagcatattgaaatggctgatggcaagtgcaggaagatccttttctacagcagttaca

SEQ ID NO: 866199 - DNA, 100 bp, Homo sapiens
gaacgtgcaaggatgcgaattgtgaatcgcttctccaaacaccatgaatcatcttaatggacagaaaatgtatggaaaaattattcgtgttactctgtct

SEQ ID NO: 866200 - DNA, 99 bp, Homo sapiens
gaaagattccccactggcaactagacaccgcgaaatgctgaagcgctgtaaaactcagcttaaggaactggttcagacagtaagtttgggaggcaacta

SEQ ID NO: 866201 - DNA, 100 bp, Homo sapiens
aagcttttgcacgagaacatggactcatcttcatggaaacgtctgctaagactgcttccaatgtagaagaggtaaaataccatgaagattttgaaaaaac

SEQ ID NO: 866202 - DNA, 100 bp, Homo sapiens
gagtgggaggcgatccaggccttgacgtctctgctggatgaaccgaatcctaacagtccagccaatagccaggcagcacagctttatcaggaaaacaaac

SEQ ID NO: 866203 - DNA, 98 bp, Homo sapiens
aactgaaaatgacattgctaatgatggccgggctggtgtggttgcaaatgatgccggtgaccgagttactccagctgttgttgcttactcagaaaatg

SEQ ID NO: 866204 - DNA, 100 bp, Homo sapiens
tcttggtggagttcctcttggatgtttggagagaagatggcttttatccctcagaacctgtttttgttccagcaccaggaaccaatgaagaagatggtgg

SEQ ID NO: 866205 - DNA, 100 bp, Homo sapiens
cattcagatgtggtggaatatgccaaggaaaaactggagagcttcatcaaaaatagtgatagctttgataagtgctgtgattctcttgggaagaaccaat

SEQ ID NO: 866206 - DNA, 125 bp, Homo sapiens
tcactacatttccccctttcatgatattcctctgaaggtgaactctaaagagatgttctcagtgcagctgagtcttggtgagcagacatgggaatccgaaggcagcagtataaagaaggctcagc

SEQ ID NO: 866207 - DNA, 100 bp, Homo sapiens
ggaggcagtggcgctcggcgtgggtctgtgcaacaatggcttcatgcaccacgaatgaccaggttcttcagggcttctcggtggacaaaggagaattcac

SEQ ID NO: 866208 - DNA, 100 bp, Homo sapiens
caagacacctcctgggggctgcaggggcggccaagtctccccagcgccaggtgcccccggccacacgtcgaggggagctgcagcgggagtcagacttcat

SEQ ID NO: 866209 - DNA, 100 bp, Homo sapiens
ttcttggctgcctcgttgagtcttctctgcatcccagccatcacctggatttacctgttttctgggagcttcgaaggattgctttgtagcggaaatggag

SEQ ID NO: 866210 - DNA, 99 bp, Homo sapiens
gaatctgaaaaaaagagaaacctgggtgaactttcacggacaacctcagaggacaacgaagtgttcggttcagcagctggacatggagaaccaacgctc

SEQ ID NO: 866211 - DNA, 100 bp, Homo sapiens
cgcgggcgggagaacggaaaactcccaacttcctggggggacacagcgattgccacgcgccattggaatgtccctggccaaggagctcatattctctgcg

SEQ ID NO: 866212 - DNA, 100 bp, Homo sapiens
gttgctaatggagttgtgaagcagctacattttcaggaaaagcaggctgaagccgacgtagcttctctgaacagacgcatccagctggttgaggaagagt

SEQ ID NO: 866213 - DNA, 100 bp, Homo sapiens
tcccatcttgggcaaagacaacaccatcgagcacctcttgcccctcttcctggctcagctgaaggatgagggtattacttatgaccatgtcgaattaaat

SEQ ID NO: 866214 - DNA, 100 bp, Homo sapiens
gaaacttggatgaataattttcatactctcttaacattggataataagcttttacaaactgatggacaacgaggtgcacatggtatgcctggaaaacctg

SEQ ID NO: 866215 - DNA, 99 bp, Homo sapiens
tgctgccaacgccccggtggagaagctgagacaatctccgggaaggggcagagcagaaggtggtattcatcacaggacgagtccacccaggggaaacac

SEQ ID NO: 866216 - DNA, 100 bp, Homo sapiens
gggcagctccccaaagacaggagcacagctcaaagtgtggatctatcccgagggtactcgcaacgacaatggggacctgctgccttttaagaagggcgcc

SEQ ID NO: 866217 - DNA, 98 bp, Homo sapiens
tttgtggcaagacaagctcagaactgagaagctgtcaccacaggggagccttagcatcatcaaatctaaaattccaacatactgctccatatgctgtt

SEQ ID NO: 866218 - DNA, 100 bp, Homo sapiens
tgggcgagagatcatccagcccaccgtagtggatcccgtcagcttcatgttctggaagcaatatggtgaaattgaagattgtcagattgatgattcctca

SEQ ID NO: 866219 - DNA, 100 bp, Homo sapiens
agttgctactcgggacgctgcacctcccgcgccgcacggtggacgaggtggtgttcccactgatgaagagcaggcgactgggttggagagggagatcatg

SEQ ID NO: 866220 - DNA, 99 bp, Homo sapiens
agaagaagccgcaccaagaaccaaccctgccagcacctggaccttggacattcagacttcagaatggtggtttgacaaatccttcactctcatttcctt

SEQ ID NO: 866221 - DNA, 100 bp, Homo sapiens
aatgcattgagcttgggtcaggacaattccatttggggaccagagatggacggtcactcagcctatggaggtctggacaaagtgccaaaggatcttcccc

SEQ ID NO: 866222 - DNA, 98 bp, Homo sapiens
tgagatgggcaccgcggatctggggccgtcctcagcgtgagtgcatctccatccacgttggccaggctggtgtccagattggcaatgcctgctgggag

SEQ ID NO: 866223 - DNA, 98 bp, Homo sapiens
tgattctgtcctaaacaagacagtgactccaggatttctgaagactattgtggaagaagcatccattaagtccccaaagctccagagatagatccagt

SEQ ID NO: 866224 - DNA, 100 bp, Homo sapiens
ccgctgtgctgcctggaagccctgccgctaaagaagggtcccttgctgtgggagacaggatcgttgcgctgtgccctcctggctgaagaagccccaagac

SEQ ID NO: 866225 - DNA, 100 bp, Homo sapiens
cattggagctcatcagactgaccgtgtcttacatcagttcagagagcaatcatcctcttccagtggtagcgtgtttgggtctggaaacactggaagaggg

SEQ ID NO: 866226 - DNA, 99 bp, Homo sapiens
gaaaataagagatgctcatcgacgaattatgcttttaaatcatcctgacaaagacagagtttcactcctgttacccaggctggaggacaatgatgtgat

SEQ ID NO: 866227 - DNA, 100 bp, Homo sapiens
gagtctccgcgtcccgctcgctgggagagaggtacctctccttttccctctccctttccctaagtgtctttctcgagaagcaggtggaaacatgagcatt

SEQ ID NO: 866228 - DNA, 100 bp, Homo sapiens
cttcaggagtttggtcaaagcaaccgaaaaggagagtttcctgctgttgacagtgtcttgaagaggatgacaataattggtgtaattttatccttccgat

SEQ ID NO: 866229 - DNA, 98 bp, Homo sapiens
ccggagcaagcgggcgagggcagcgccctaagcagactgttcgccatggatttccctatcaaccctcagccctggcctttgatcctgtacagaagatc

SEQ ID NO: 866230 - DNA, 98 bp, Homo sapiens
atgctctctgccggtggcatcacagccaccacagcatctttctgaagccgggagagggcctgtagggagtcaagggtccagagaaggaggagaagttg

SEQ ID NO: 866231 - DNA, 100 bp, Homo sapiens
gatgtatctgcaaagtctttttacaccaggacaattcacaaatgaagctttatgtaaggctttacagatgaacaggaagcggtgcaggaggttcctagag

SEQ ID NO: 866232 - DNA, 99 bp, Homo sapiens
caagctggacgctgtcctggaggaattcaagcgagatggaattgtcagccacttgaagaagcaggcaggaccagcttcagtgcctctcaggactgagga

SEQ ID NO: 866233 - DNA, 100 bp, Homo sapiens
agcaggcatcatccgctatgcaattggggccctgtctctgcccctggtggtcatcgtccatggcaaccaagacaacaatgccaaagccactatcctgtgg

SEQ ID NO: 866234 - DNA, 100 bp, Homo sapiens
tgggcgtaggaccctctgagccaggcaactatggagaaagtgggatggaagccttcaaagatatgtcagcgaaggaagggatttgcatcgcccactctta

SEQ ID NO: 866235 - DNA, 98 bp, Homo sapiens
ttcactcctcagcgcgacgtcgtgtcgagttcccaaaaagctccgcaggggctgtagggagggaacgggtatggcaatccccgaaactcaccaggtct

SEQ ID NO: 866236 - DNA, 100 bp, Homo sapiens
ctttctagtggaaaaattattctggcctccgctgcatacaaatcaggcaaccagaattctacatatataaggttatccagaatctgaatccatcatgatg

SEQ ID NO: 866237 - DNA, 98 bp, Homo sapiens
cggatttccagccagagctgagcggcgcgggctccagactcgccgtggtcaagttcaccatgagaggggagagtcccgtattctcagagtaaaagttg

SEQ ID NO: 866238 - DNA, 100 bp, Homo sapiens
ggcgccaggcatgagaggaccagaaggagccatggggctccctggaatgagaggcccctcaggaccagacatgtcatgctgcccaaggacatagccaagc

SEQ ID NO: 866239 - DNA, 100 bp, Homo sapiens
tttatgaaagcccaaatcacctgtacttggtcatgcagctgcaatggtggcttgctatccgggaaatggaacaggttatgttcgccacgtggacaacccc

SEQ ID NO: 866240 - DNA, 100 bp, Homo sapiens
aacagaaaatgatcatgttcttctgttttggaaaagcctggctttaaaggaaaagcattttaatgaaagcaggtgataactcttctgatagcagcttatt

SEQ ID NO: 866241 - DNA, 100 bp, Homo sapiens
attgggagactgactgcctatgaatttgctaaacttaaaagcaagctggttctctgggatataaataagggttcttccggagatactgcaaatccttttc

SEQ ID NO: 866242 - DNA, 98 bp, Homo sapiens
accgtaccctagagttggcatcttgtttaccagaggggagcggtgtagaagacatcgtggccataatgattcctgagccaaaagggaaggagatagta

SEQ ID NO: 866243 - DNA, 100 bp, Homo sapiens
gggaagaactggtgagccaagggatcatgccgcgtggtcaccatgggccttttccgcactattgctttgttttaccttggaagttttgacagcatagttc

SEQ ID NO: 866244 - DNA, 98 bp, Homo sapiens
aaggacctacaggtttgtctcttccagatcagaactgaggaacaaaaacccccatcctgggaaaaatggggaagctgaccccctggttgtggaatacg

SEQ ID NO: 866245 - DNA, 100 bp, Homo sapiens
actatggaacaacaacttgcagctcatctctattgatgacatatgtagagtgtgtcggtcagaaggaacacctgagaaaccgctttatcatccttgtgta

SEQ ID NO: 866246 - DNA, 98 bp, Homo sapiens
gactgttttggtggtaccattcaatggccaatgaaaaggtattccggaaggacctcatcagtgccatgaaacttccagattctcaccacattaatcct

SEQ ID NO: 866247 - DNA, 101 bp, Homo sapiens
agaggaagtttcacttcgaagagttattggtgccaaaaaggatcagtatttcttagacaagaagatggtcacataagaaaggaggtattcgaacttctgga

SEQ ID NO: 866248 - DNA, 100 bp, Homo sapiens
ccggccgcgcccgcggaaccagaccagagttgtctgctggttctcagcttgaagaagattctgcagtccttattgatcctttttcttggcgttaccattt

SEQ ID NO: 866249 - DNA, 99 bp, Homo sapiens
aaactccagaagcagaaagtacagtctatgaatgagatagtccagagcaacctctttaaaaagcaaggatccgagccagagacaacaacggctcctacg

SEQ ID NO: 866250 - DNA, 100 bp, Homo sapiens
ctgacttttacttttgacgaccaccatgactgagatcactgctgaagattgttaaaggaaatgggctggcaggaagacagtgaaaatgatgaaacatgtg

SEQ ID NO: 866251 - DNA, 100 bp, Homo sapiens
ggcatccctgcccacgggcgaaggcagcatcagccatgaggagcagaagtcagtccggctgtatgagtttaaagccaagaacatcaagaagaagaaagtg

SEQ ID NO: 866252 - DNA, 98 bp, Homo sapiens
tgcctactggctgggaagaagcatatacttttgaaggtgcaagatactatataaatacgaggatgtcgtccaggaaagattgtgcagatgactgaagc

SEQ ID NO: 866253 - DNA, 140 bp, Homo sapiens
ctagtccaaagcgaagagttgtctgtgtgatgatagtattggcatttataatactgaactatggacctatgagatgtgggacctaggaaaaggcctgaagattccccagctataccagtctggagtggttgtcctggttc

SEQ ID NO: 866254 - DNA, 98 bp, Homo sapiens
acacacttcctgctaatgaaaaaaagccaaattgtgattgccgcctggtacaggagatatgcgattgtgttcacctattgaaaattaaaaagacattt

SEQ ID NO: 866255 - DNA, 99 bp, Homo sapiens
tatagtcggagtggagaactgcaaggtctgcgcaggcatggcactaagtgtcccatggcacatttggccctcatggaggcctcaaaagggcaggaccag

SEQ ID NO: 866256 - DNA, 100 bp, Homo sapiens
tgccagcaaacgtctacactgtacatgctttttattacaagactacggagcataggaggaaaattcatcatctggttcctggtagagttacacagttgtg

SEQ ID NO: 866257 - DNA, 51 bp, Homo sapiens
cgtctccgccttccagttcggagagttcccagtgacctgacagcagaggag

SEQ ID NO: 866258 - DNA, 114 bp, Homo sapiens
gtctgggatgcagaacatgagtattcatacgaagaccaccagcggctatgcagtaccaggaacttcaggtgtctgcccagcttcatggggacaggatgcaggaaacgaaagtcc

SEQ ID NO: 866259 - DNA, 100 bp, Homo sapiens
taaaaatgtggagcaagatgagttgcagcaagtcatacgggagaactttgaaagtgatgaagtagaactctcgtatgctaagaatggacaagatcttggc

SEQ ID NO: 866260 - DNA, 98 bp, Homo sapiens
catttagtgaacatccaattcagtcactcagcctctgaagaagcttcgggttcagactcaggcagtcagtcggaaagtgagcagggaagtgatccagg

SEQ ID NO: 866261 - DNA, 99 bp, Homo sapiens
gtggagacacgtttagcttaaaaacagctcattctcctaatgttttccttcagcaaggacaaaggttctgctccagacgagcccttaccacgttgactc

SEQ ID NO: 866262 - DNA, 99 bp, Homo sapiens
aggaactgtcggaacagaaccaaaggctattggatcagctcagcagggttctctattctcatgaaaaggtgaaaatggaaggcactatttctcaacaaa

SEQ ID NO: 866263 - DNA, 101 bp, Homo sapiens
gtccgcgggcggctcggcggccggcggggctggggagcctcccgtgttctaagaacggaagcatctgggctggatggaatttagcatcaagcagagtcccc

SEQ ID NO: 866264 - DNA, 100 bp, Homo sapiens
aagaggaagcccagaaagggaaaaactaccagaacggagatgtgtttggcgcttgatcagttactggcagtcgcagactttggaccccgggatgaaagag

SEQ ID NO: 866265 - DNA, 101 bp, Homo sapiens
ggattcctggttcattcttgttctgctcggcagtggtctgatatgtgtcagtgccaacaatgctaccacaggttgctgaaaagccaggagtcaaaatgact

SEQ ID NO: 866266 - DNA, 100 bp, Homo sapiens
gctggaccctgcagagcgtgctgtggtcagagtcgctgcacctcaatgacctgaagaaggagaacttcagcctcaagctgcgcatctacttcctggagga

SEQ ID NO: 866267 - DNA, 100 bp, Homo sapiens
cccagatcttcaatgaggagcagtactgtggggcctatgaagaatacaccagcaagctagatgcactccaacaaagagaacaacagttattggaatctct

SEQ ID NO: 866268 - DNA, 100 bp, Homo sapiens
gggagcgaaggctgaggtggcagcggcaggagagtccggccgcgacaggacgcaccagtatgcatgagcgggtgaaccgaacagaaagacagtttcgatc

SEQ ID NO: 866269 - DNA, 98 bp, Homo sapiens
gactccagattatctacaacactgatgaggacacttgggttgaattcagtaagtttcctctgaagcaccctgaagggtgccatccttacagagctaag

SEQ ID NO: 866270 - DNA, 99 bp, Homo sapiens
gcggccggacgacccaagcccgctgagcaggatgaggggagtgaactactttatgtccaagggtatcctggatgattcgccaaaggaaatagcaaagtt

SEQ ID NO: 866271 - DNA, 99 bp, Homo sapiens
tgaaaagaaggtggcagacccggtttgctgatcgccccagggatcaggaggcaattaagttggaatatgcaaggttggttaagttggcccaagaagaca

SEQ ID NO: 866272 - DNA, 100 bp, Homo sapiens
aagacgatctgcacttcgcattttggcattgacatttaattttagggtcctttatatagaagggagagtagctatcatggtgaacttacttcagattgtg

SEQ ID NO: 866273 - DNA, 98 bp, Homo sapiens
agaatcttgaatcagaaattgagaagctgcccgttatttactacctggtgaaatggtgctctctgccctatgaggatagcacatgggagctaaaagaa

SEQ ID NO: 866274 - DNA, 100 bp, Homo sapiens
acttgctaatgatccaattttgtggtagcaatgaatcgagcccaagtttgtttgatatccagttccaagtctggagagaggcatctttatcttattaaag

SEQ ID NO: 866275 - DNA, 50 bp, Homo sapiens
ggtcgataagctggaactgatggtgtggatgaggtcaccattgtcaacat

SEQ ID NO: 866276 - DNA, 100 bp, Homo sapiens
cttataatgttccattgccaaagaaatcgggccgttgctccagggagaactgcaaatatcttcatccacccccacatttaaaaacgcagttggagataaa

SEQ ID NO: 866277 - DNA, 98 bp, Homo sapiens
ctgctttaaacttaaagacctctttggacccgaaattgtaaggcaagatacaaagagtcctggcgtaatcttcgtgctcaaggctacaagctgacaat

SEQ ID NO: 866278 - DNA, 98 bp, Homo sapiens
cgcgctcctcacctgctccctggtttcttaaacaattaggtctacatcctaactggcaattcgttgatgtatatggaatggatcctgaactccttagc

SEQ ID NO: 866279 - DNA, 98 bp, Homo sapiens
gaagacttgaacttaatacagcaagaaagaccatcaagtttaccagttttaaaatcaaagatgggaaaatcggagaaaattgcccttccccatggcca

SEQ ID NO: 866280 - DNA, 100 bp, Homo sapiens
tctgagtggatggggacctgcctgctggggaacgcccttttgcttgtgactggcagggctgcgacaagaagttcgcccgctccgacgagctggcccgcca

SEQ ID NO: 866281 - DNA, 133 bp, Homo sapiens
ggcggctgatggcggatcaggatcggaagcctgcgtaactttctcccttgatccgggagtctttccactggttcaaagaggaaatctcccggaggtttaaggctcagcaggatcagctggtcctgatcttcgc

SEQ ID NO: 866282 - DNA, 100 bp, Homo sapiens
aggtgtgctgacgacctgctacaacagaaatgtgaggtgaggatgagccgcagccctttcctgggacatggatgtacatggcgtgttacattcctgaacc

SEQ ID NO: 866283 - DNA, 99 bp, Homo sapiens
gcggagcccggctcccgcaccatggaggaggacgacagctacggcattcaaaagtgcggcagaagagtgaggtggacattgttgttagcgaagacttga

SEQ ID NO: 866284 - DNA, 100 bp, Homo sapiens
aggagagcagtccactgaaggttctttccctttaagatatgtgcaggatcaagttgcggcaccttttcagcatggctgcattacaaagtcctttctatgg

SEQ ID NO: 866285 - DNA, 99 bp, Homo sapiens
tcgtcagcactgactttcagctatggaatcggagcttactccacgggaacagcctctagataatctgagttgttgaaaatacgaagcctgttactcgtg

SEQ ID NO: 866286 - DNA, 100 bp, Homo sapiens
tcagaccgtgcagaatgttacattgtcgctcactctgcccatcacgtgccacatttgcttggggaaggttcctaaatatttgtcacagcaatgggctaaa

SEQ ID NO: 866287 - DNA, 100 bp, Homo sapiens
acaagcaccagaggggatttcagaggtcacacggggtgcaggagagctttggaggtgatgcttcagacacagataaagtgactgagaccgaagatgatag

SEQ ID NO: 866288 - DNA, 100 bp, Homo sapiens
ggccatcttcggaccccccaacaccctctacgaaggcggctacttcaaggatatcaatgcttacaattgtgaagagcccacagaaaagttaccttttccc

SEQ ID NO: 866289 - DNA, 100 bp, Homo sapiens
aggaagtgcgccgcgcgggacccggaggaccgtatccccagcccactgggctacgcagaccgagaaggacatcctgctgcgacctgagctggaggaactc

SEQ ID NO: 866290 - DNA, 98 bp, Homo sapiens
caccacttactcggacgtctggattgactcagtcagcattgacacccttatcttcactttggagtttactaattggaagacacttgcaccagctgttg

SEQ ID NO: 866291 - DNA, 100 bp, Homo sapiens
ttggcttcgggctgagctagcagtgagcaccttttggcccaatgaatatcaggccaacatagccgaggtagaggtctccatccctgccaagctgcacaac

SEQ ID NO: 866292 - DNA, 100 bp, Homo sapiens
aatcaactcagtgatcctgattatattaatcagtatgtcatatggatgaccacctggtggcccatggtagaatggcagaaaaggaggcacgtcggaagtt

SEQ ID NO: 866293 - DNA, 100 bp, Homo sapiens
cactttttggatgaatggctttataagttcagtgctgatgaattcttcataccccgggtgagacacagtaacctggttgaactctgcatctggaaagctg

SEQ ID NO: 866294 - DNA, 100 bp, Homo sapiens
acgctgcctttgctttaaaacagtattacttgcggtaattgctctagcagatgcagtggaggaaaaccaaggcaatctgttccagtcattcaccaggctg

SEQ ID NO: 866295 - DNA, 100 bp, Homo sapiens
aaggcagagaaaaagaaacgaggaccaaagccttcatggtgaagttcatggatgtctatcagcgcagctactgccatccaatcgagaccctggtggacat

SEQ ID NO: 866296 - DNA, 100 bp, Homo sapiens
agattctgaatctggtgatgaacttagcagcagctccactgaacagataagggctgcacatggtccgtctaatgctgttggagagattactgcagaccct

SEQ ID NO: 866297 - DNA, 100 bp, Homo sapiens
cacggtcactgcagctgaagccgctgcccctgctacaggcctccctccacttcaatgtctataccaattgctggtgaatctgaatctttgcaagaagata

SEQ ID NO: 866298 - DNA, 99 bp, Homo sapiens
tgcatctgcccctcggccttccgacgtgggcggtgggccccagccccacagaccagcccagcattcaggagcaatttacagcaatgagggatttataca

SEQ ID NO: 866299 - DNA, 98 bp, Homo sapiens
gaagacatttcagatcctatggacccgaacccttgtagtgcaacatacagcaacttagtactaacattctgagagagcctgtgtgtttaggaggatgt

SEQ ID NO: 866300 - DNA, 100 bp, Homo sapiens
cgacccgaagttgcggattgcagccgagaacgagctcaaccaggcatgaaaccagatttaaacaacgtatgctggaactgacggatacaaacaacattgc

SEQ ID NO: 866301 - DNA, 100 bp, Homo sapiens
caaaggaattgggcagaagtgtttggagagggaaatatgtttgctgtttcacctgtatcgactttccaaaaggttatggataaatatggagagttctacg

SEQ ID NO: 866302 - DNA, 98 bp, Homo sapiens
ggactgacttttcttatgctgggatgtgccttagaggattatggagatgctaagatctcatccagtgagcatatgagaatcggggggagtgaagagat

SEQ ID NO: 866303 - DNA, 100 bp, Homo sapiens
cctgtgggaagccgcacttacctatgaggccagcaagcggaggtgctgggagcgagttggctgattggaaccaaccagatggctgtgtgtgccaaagcac

SEQ ID NO: 866304 - DNA, 98 bp, Homo sapiens
ccttctgtggattggggaaaaatccagagaccccctgaagattcggaacacagcctattggatccctaggctcaatatgtcctaatagttatggaagt

SEQ ID NO: 866305 - DNA, 98 bp, Homo sapiens
tctgagtgcgttggtcggcggcagtcgggccagacccaggactctgcgactttacgtgaagctcgtgtgtggagtgccacggtacaatcagacgacag

SEQ ID NO: 866306 - DNA, 100 bp, Homo sapiens
gaagaaactgaggttcagagaggttaagagactccactgaggtcacacagccggaacagctggaggaaatggaagaacgccagaggcagttaagaaatgg

SEQ ID NO: 866307 - DNA, 100 bp, Homo sapiens
acccccaagctcccgagaatcactccagctctcctggaagcagatcttatgccttcattcatccggcatggtccaacaattccaagacgaactgatatct

SEQ ID NO: 866308 - DNA, 100 bp, Homo sapiens
caactgttgaactcagctgcctgtagggcaataaactttcttcggtgagaccaaccaatgtattagagatgatgaaggaatggaaaaataacccagaaag

SEQ ID NO: 866309 - DNA, 100 bp, Homo sapiens
tggaggattgtcactccaacctcttttcgctggtgcagtggcttatgcctgttatcccagaactttgggaggctgagtcaggaggatcacttgaggccag

SEQ ID NO: 866310 - DNA, 100 bp, Homo sapiens
cgccctggcgcccagcaccatgaagatcaagatcttactgtgccgagatcgctcacaatgtttcctccaagaaccgcaaagccatcgtggaaagagctgc

SEQ ID NO: 866311 - DNA, 98 bp, Homo sapiens
gcactcgaaagggaccgaaatggagagcaaagccctgagaagtcgttctggacgctccatcatcaatgggaactgggcaattgatcgaccaggaaaat

SEQ ID NO: 866312 - DNA, 100 bp, Homo sapiens
agcaaagtaacgcaggaacagaaaaccaaacaccacatgttgtctcttagaagtgggagctgaacgagaaggacactgaggcttggaagctttgcaaggc

SEQ ID NO: 866313 - DNA, 98 bp, Homo sapiens
aaattcgcagaatatggggaaattaaaaacattcatctcaacctcgacaggcgaacaggatatctgaaggggctgcaggcaccccgaggcctgctgga

SEQ ID NO: 866314 - DNA, 98 bp, Homo sapiens
aaggcgcccgagggcaacggagcggccgagcgccggaaccggagcaggaaggatgcctgtggccctcggagagcacagtgtcaggcaacggaatccca

SEQ ID NO: 866315 - DNA, 100 bp, Homo sapiens
aagaacatgtctgtacacctgtccccctgcttcagacatgcacaccacagagcgtggcgatggaacagtaaccgggcttgtgagagggctctgcagtata

SEQ ID NO: 866316 - DNA, 100 bp, Homo sapiens
caggggggaagggacagtcggccgcagaccgcgctgggttgccgctgccgctgccgccatcgtgccagcccctcgggatgaaaactttcggaagagaaag

SEQ ID NO: 866317 - DNA, 98 bp, Homo sapiens
tgaaagacattttcgaaaaactggacagagtgtatacatgcacctgaaaagacatgtgcgagagcacaacattctgaaattttttggttattgtaatg

SEQ ID NO: 866318 - DNA, 98 bp, Homo sapiens
aagtacctaagcaaacagataacaaccctacggagccagagacttcaattgatgaattcctaggacttccgaaatatgccgagcgccagtccagcaaa

SEQ ID NO: 866319 - DNA, 134 bp, Homo sapiens
cggcgaggaggcgcggaaccatggccgatgggggcgagggcgaagacgagatccagttcctgcgaactatgtgactggagtgatttgcacccggatgcctagactcgccatctgctcaaagactgctcagaaag

SEQ ID NO: 866320 - DNA, 99 bp, Homo sapiens
tcatctcaacccacaacgccttcccagtcatcagctgcctccaccccagcccccaaccttcccaggggtagaaatatttctgtcatggctcattcaaag

SEQ ID NO: 866321 - DNA, 100 bp, Homo sapiens
ccaagaaggttgcccaggaaacgggcacagaagagatcagtgggatctgatgagctaaagtgaacaactccagcctgataggtttaggatacactcagac

SEQ ID NO: 866322 - DNA, 100 bp, Homo sapiens
ggctcagaactggctttcaaggactttgatgttggcgatgatttattgctaaacatgggtgcatttttggataaacccaaaactgaaaaacataatgctc

SEQ ID NO: 866323 - DNA, 100 bp, Homo sapiens
ggaggcggcggtcgccccggggctccggcggcggaagtttgcctgcaatggtactgtaattgagcatccggaatatggagaagtaattcagctacagggt

SEQ ID NO: 866324 - DNA, 100 bp, Homo sapiens
agacatctttgctgcaagatcgaggctgtcctctggtgagaaggtggtgaggcttcccgtcatattccagaatgaaagtgcccttgtgaaagaaaaagag

SEQ ID NO: 866325 - DNA, 100 bp, Homo sapiens
ttttgccaggaaaagaaagcttaggatattttgttggtgtggacatgacatatctgaagagatggattaagaatgctttggattaaggattgtggagcac

SEQ ID NO: 866326 - DNA, 99 bp, Homo sapiens
ccggcacaaggacgttctcaagtggggcgatgagctatgaatttgtgaaatacctcaggcagcatataggcaacactttgggttctatgattgaagaag

SEQ ID NO: 866327 - DNA, 51 bp, Homo sapiens
gcttcaccgagctggtgtgcagcctcagcaaagccaacccaagtctgccag

SEQ ID NO: 866328 - DNA, 100 bp, Homo sapiens
gcagaaaatacctcaggaaaggccaacatcagcagaactattaagggtcagtggctttgtatgactgccgaagtccagatgaaagccatcgaatgtggcg

SEQ ID NO: 866329 - DNA, 100 bp, Homo sapiens
tgaccttgctgttacctacttctttcatcagggaactctaatgatccaggacaaagaagttaccctggagtatgtatcaagcctggatttttggtactgc

SEQ ID NO: 866330 - DNA, 98 bp, Homo sapiens
gacagaattatgcagttgctcgatgtgcctcctggtgaagacaaggggggatatgtgatcaaagcatcagaagggcaactgtactcctgatgatattg

SEQ ID NO: 866331 - DNA, 100 bp, Homo sapiens
ttgttgaagccacacaaagaacaaattgcagttgtttgagaaaatgaaactgaagccgtggtcacgtgacaggacatgtagtatatagcaggctgccagc

SEQ ID NO: 866332 - DNA, 100 bp, Homo sapiens
ctgtatgcatggtgtggggttggtgtgattagcttcgcagtctggaaagctttaggagttcacagttattattttggcgacttcaatttgccacgggaca

SEQ ID NO: 866333 - DNA, 100 bp, Homo sapiens
aagagcctagcacctcttatactgataatcgagagctccagatcatgagaaagctagatcactgtaacatagtccgattgcgttatttcttctactccag

SEQ ID NO: 866334 - DNA, 100 bp, Homo sapiens
cagtgttttatgttggtggagtgccttccaacttcaagattcgcaggctgaggatcgagatagagaagctccagtggctgcaccagcaagagctctccga

SEQ ID NO: 866335 - DNA, 100 bp, Homo sapiens
tcctccatgcgcagtcatgagtcgcttcaagtttatcgaaccaacaccgagcagtagatcaagtaattaaagctgtaagaaaaatctgtagtgctttaga

SEQ ID NO: 866336 - DNA, 75 bp, Homo sapiens
ctttgggtttagcacgatgagctcaatcggcactggggtagtatttatgaagattcatgtgctagtcatggtcca

SEQ ID NO: 866337 - DNA, 100 bp, Homo sapiens
gaactgttctcaggactcattattttaacatttgggagaaacacagccagaagggccacagccatctctgggagttagttttggaacgccattcggctca

SEQ ID NO: 866338 - DNA, 98 bp, Homo sapiens
tgagtcaacagactgagcgcgtccaggcctgacagctctgcggctcgggccctgagactttaacccatgagatcggacacatatttggactgcgacac

SEQ ID NO: 866339 - DNA, 99 bp, Homo sapiens
taataactcggtgtcaaagccaagacataaactcaaccccttctcttccaaaaggtactccaaagattcaggtttactcacgtcatccagcagagaatg

SEQ ID NO: 866340 - DNA, 99 bp, Homo sapiens
agaagttgggcattctcatcaaagctcgtaacttcctcgttttccaggatccctccccgcggcggcgatggcccgagccatgagagtgaggactttccg

SEQ ID NO: 866341 - DNA, 100 bp, Homo sapiens
ctgctactgctgtttctggtgtcttgacaaatacctgctccatctcaaccagtggtgaaatagggccttctaaacctgtggagaagtgagagatctgaat

SEQ ID NO: 866342 - DNA, 100 bp, Homo sapiens
gaggttcaggaaggattcctgagattccaggaggaagtactggcgaagtgctccatgggtgtttgccagcttcccagtaaaaatgatgaaaaagaatatc

SEQ ID NO: 866343 - DNA, 100 bp, Homo sapiens
acgccgagcggtgactccccgccgctcccgggggccgtgacgatcggcgccaatggtgtgccatagccatcctctttgcagtcctgttggttgtgctcat

SEQ ID NO: 866344 - DNA, 98 bp, Homo sapiens
acttcctcagcagcaccttcaagcagatcttagcaaagcaatgtctcaagatggtgcttctcagttccaagaagtcattcggcaagagctagaattat

SEQ ID NO: 866345 - DNA, 100 bp, Homo sapiens
ctcattgctctttggcgactcttattgtacagggaaacccaaacatgagtggtttctccagaaagattccgaaggggacacaccttcacttatcaactgg

SEQ ID NO: 866346 - DNA, 99 bp, Homo sapiens
ccaccgccgccatggtaggaaaaggtgccaaagggatgctgcctgattcggactccaccaaacactcaactccatcgaatagctccaaccccagcggcc

SEQ ID NO: 866347 - DNA, 100 bp, Homo sapiens
ttcatcctcacctatgcaaagaaagggaagctattgctgggattttgaggagatatgggacacagcaggacaggaacggttccagtctctcggtgtggcc

SEQ ID NO: 866348 - DNA, 99 bp, Homo sapiens
agcagttatttgcagctatcatgtgagccaagaaaaccatgtgggaaaggctgacagcccctgaagatgtatttagcaaattacagcgagaaaacatag

SEQ ID NO: 866349 - DNA, 100 bp, Homo sapiens
atcacattgatacatgctggaggtctggctcaggacaggcgacactaacaggtgaagatctcgggagaccatgactaagaaaagaattgctgtgattggg

SEQ ID NO: 866350 - DNA, 98 bp, Homo sapiens
cgtctgcaccttcagaaacagtgctgaagcctttaaatgcagcatctgcgatgtgaggaaaggcacctccaccaggagagaagtatgagctccatgca

SEQ ID NO: 866351 - DNA, 100 bp, Homo sapiens
gatatgctgacgactgtgcaggaagaaaacgagccagtgatttacaatagagcaagatgatatcatcaagttgaatcgaaaggaagggaagaagcagaat

SEQ ID NO: 866352 - DNA, 100 bp, Homo sapiens
ccatgtacagtgaactgcctgaagagttctcacctccagtgtgtgctcctgcgacgtgagcgtgttaatgatgcggatgctccgggtcttggcagacagc

SEQ ID NO: 866353 - DNA, 98 bp, Homo sapiens
gcaagactctggagccagtcttgaggtcctacatctccgaaagcaagctcttctagaagttggcagacagtccagaagacatgcacagctggattaag

SEQ ID NO: 866354 - DNA, 100 bp, Homo sapiens
ggacagagtccttattgttgatgtgcagtcccaaaaagttgttcaggttcaaaccttgtactactcagctgatcacaagctgcttgatgggaacctacta

SEQ ID NO: 866355 - DNA, 100 bp, Homo sapiens
acaagagactgcagtctcgcacagaggtggatcatccatgccatggagtatgaacttcagatccgtggcggagacaagccagccttggacttgtatcagc

SEQ ID NO: 866356 - DNA, 99 bp, Homo sapiens
gacctggaacgcgcgggcctgcggcagcgggagatcctgtgccggtatcagaatatctggaacatcaacctgcagttgcggcccagcctcataacaggg

SEQ ID NO: 866357 - DNA, 100 bp, Homo sapiens
caaaggagactgcaccatccgttgattcgcctttgccagtctcatctcgtgtctgctttgttaagttccatgatccagactcagcagttgtggcacagca

SEQ ID NO: 866358 - DNA, 98 bp, Homo sapiens
ggcactgctgctctgctgggacccgaggctgagccaagcaggtgtcgtgaaaactacccctaaaagccaaaatgggaaaggaaaagactcatatcaac

SEQ ID NO: 866359 - DNA, 100 bp, Homo sapiens
aatgcattgagcttgggtcaggacaattccatttggggaccagagatggacggtcactcagcctatggaggttaccccacagcctatccagcagctgccc

SEQ ID NO: 866360 - DNA, 100 bp, Homo sapiens
gaagaccgagtctggtccattgctatcagcccattactcagttgggatgaatgggttccggagagcagagtactcaaatacgtggacaccaatttgcaga

SEQ ID NO: 866361 - DNA, 98 bp, Homo sapiens
cggccttcgttcctcccagaaagtgtgtgcttgctgctgatgaagtagtatttaatcagaaggaactggaggttaaggaactgaagaatcaagtgcag

SEQ ID NO: 866362 - DNA, 98 bp, Homo sapiens
agaggttaaagagacccgttcagagtcctacagtggcaggaagatggatgttttgaaagctaccgcagaacaaatttcttctcaaactggaaataagg

SEQ ID NO: 866363 - DNA, 100 bp, Homo sapiens
gttcatttatcaaagctacccaaagatactgccttgcttttggacccaaacatatacaggaaatggtgttcacactggccctgaatcaagggaacaccag

SEQ ID NO: 866364 - DNA, 145 bp, Homo sapiens
ggggcagagccagggtcagccatcctcaagtagcttaacaggggtttcatcttcccaacccatacaacatcctcagcagattttaaagaatgtggagtcttccagaactgttcagccacatttcctagaatttttgctttccctt

SEQ ID NO: 866365 - DNA, 100 bp, Homo sapiens
acatgcctacatcgtcgtgcaggtcgagaccccaggcacagagaccccatcctacaaggccatctggacccgcttctttcctgcctccgaggctctgagg

SEQ ID NO: 866366 - DNA, 100 bp, Homo sapiens
tgcaaaacaggactggctgatactacatattccagatgtccccgcatcagagacttctcctgggcctcccccaatggggcctccacctccttcaagtaag

SEQ ID NO: 866367 - DNA, 99 bp, Homo sapiens
aggtcctcgggggcggcggccacgccaaggacggactctttttgatcagaacaatgctgcaaaaaaagaagagtcagaaactgccaacaaaaatgattc

SEQ ID NO: 866368 - DNA, 98 bp, Homo sapiens
acgggcaggtcgatgcccgattctttggacaacatgacaggcgcagttgtgtagcagttgagtaatgctggttagctgttaaggtggcgtgttgcagt

SEQ ID NO: 866369 - DNA, 125 bp, Homo sapiens
ctcacagccaggaagacaaaggaatttagatcaccacctcaagaacaggtgtgccaaaaggttgaggcctctgggtttgaattcaccagcttggtattttcagtctccttcccaccacaactatc

SEQ ID NO: 866370 - DNA, 98 bp, Homo sapiens
ggaggaagaggcattgaggactttccttacctgtttttccagctcacccactgccagcagaggttccgctgtgtggcagctgattgcttccttcctga

SEQ ID NO: 866371 - DNA, 100 bp, Homo sapiens
ttaaaagttacctgtttcggaatgcttttgtgctgctcacagtcaccgctgtcattgtgggtttgcacagatgaagaatgaagcctagtagaatatggac

SEQ ID NO: 866372 - DNA, 98 bp, Homo sapiens
gcgacaagggtgttcccgaactagagtgggtgctgaccttaaggaaagagccaaaatgagttccagtgaagttggtccttttgtctccaaaataagag

SEQ ID NO: 866373 - DNA, 98 bp, Homo sapiens
cagttcttcttaaaattctgtctcaacagccagtagaaacggaggaaggttttacactcgtcatttgcccattgatctctcttatggaagaccaatta

SEQ ID NO: 866374 - DNA, 99 bp, Homo sapiens
catagtcaactgcgtggaagagaagttgccaccttccagagaagaggtacgagatgacaagacaaccataaagtgtgaaacctccccgccttcctcccc

SEQ ID NO: 866375 - DNA, 100 bp, Homo sapiens
ccatagccgagcagactggcatctgtaaggtgcggccgccgccggacatggatttgattgacatactttggaggcaagatatagatcttggagtaagtcg

SEQ ID NO: 866376 - DNA, 100 bp, Homo sapiens
actgtccaagggatcgctgatgattacgataaaaagaaactagtgaaggcgtttaagaaagttgaaagcagataaggaattggtaaaagatgtttattct

SEQ ID NO: 866377 - DNA, 117 bp, Homo sapiens
gagtgcttatgccaagaggaacagcagtgtaaatgactcagagtcatttgatgtggtcacaaaatgtgtgagtttcacactaactgagcagttcatggagaaatttgttgatcccgg

SEQ ID NO: 866378 - DNA, 99 bp, Homo sapiens
taaatttgcacatccttcgaaaagctgccaagttgaaaatggacgagtaatcgcctgctttgattcattgaaacgttttaccaacgaggatcatttggc

SEQ ID NO: 866379 - DNA, 101 bp, Homo sapiens
ggaaaactaggaatctatgatgctgatggtgatggagattttgatgtggatgatgccaaagttttattaggccgaggagtgaccttcctatttcctataca

SEQ ID NO: 866380 - DNA, 98 bp, Homo sapiens
gtcgccgtgcacatggctggaggagcgtctctccgccactgcgcacattttgcagcctgcaccggccaacgaggttggaaagaaccatgactgtattc

SEQ ID NO: 866381 - DNA, 100 bp, Homo sapiens
cagcgggctgcagcgcgccaaaaccgggacggacaagaccctggtgaaggaggtcgtacaggttggtgttcgaggaagagacattgttgttcttggtgtg

SEQ ID NO: 866382 - DNA, 100 bp, Homo sapiens
ggacgagggcggagccgccgccgcgcctgcgcagaaggccggggccggccagaagcgggcggcgcgggggagatgcgcaaatctgtccaaggctgcctgg

SEQ ID NO: 866383 - DNA, 100 bp, Homo sapiens
ggaagattggggccttctgattattttgatcatagcaatggatcatttaacttgaaagctttgtcaggaagctctggatataagtttggtgttcttgcta

SEQ ID NO: 866384 - DNA, 99 bp, Homo sapiens
agcgagccgtgagatgcgtggtccaccatcggtgacctcaccgcctcggttcgccctcagccgccccggttcgagaacttgtcttggacaattgcaaat

SEQ ID NO: 866385 - DNA, 100 bp, Homo sapiens
gttttggagagcaccccttttaccactgcctggttgcagaagtgccgaaagagcactggactccggaagtggtaaaatgttcaagcctggcagttccggg

SEQ ID NO: 866386 - DNA, 98 bp, Homo sapiens
agagggaaacctggataagcagctgagctttaagtgcaatgtttcaaatacattttcgagtctggcactaaaggtacagcagggaagaactggaaact

SEQ ID NO: 866387 - DNA, 98 bp, Homo sapiens
tgcaacctgtcccgactctagccgcctcttcagctcgccatggatcccaactgctcctgcgccgccggaactctaatgaatcattgattgaccagcac

SEQ ID NO: 866388 - DNA, 99 bp, Homo sapiens
tccatcttcctgcacctggagcatgtgcaagatggagtctcgttctgtcgtccaggctggagtgcggtggcgtgatctcagctcactccagcctccact

SEQ ID NO: 866389 - DNA, 100 bp, Homo sapiens
taaggacaaaagccaagaggaggacagttcgctacacagcaatgcatcgaggaaggaaaatcacctcggcagtgtttgaaggaaggatactgcaactctt

SEQ ID NO: 866390 - DNA, 98 bp, Homo sapiens
aaagcaagtacaagatcctggatgccacggatcaggaaagcctggagctgaagccaacctcccgagcagctgaggtggcaggcagcaaggttgtccct

SEQ ID NO: 866391 - DNA, 98 bp, Homo sapiens
ggaaggatgaaaactctacataggaacacgatgtgaatggaagaaacctgtcattttcctaatgtggatctaccacccctgtgttcatcgagattccg

SEQ ID NO: 866392 - DNA, 98 bp, Homo sapiens
tctgatcaagcggatccaagccatgattcccaaggtaatctttagatggtggaagatctctctaaggagtgagtatcgatcaacaaaacctggagaag

SEQ ID NO: 866393 - DNA, 100 bp, Homo sapiens
cgggaccggcggttgtctgtggccggaggctgatcagattctttcttgtggagaagttattcatgtgaagatccttggaattttggctcttattgatgaa

SEQ ID NO: 866394 - DNA, 101 bp, Homo sapiens
cctccgtctggatttccaaggaagaatttcctctgaagcaccgagagaagaagaaggaggttcctgctgtgccagaaacccttaagaaaaagcgaaggaat

SEQ ID NO: 866395 - DNA, 100 bp, Homo sapiens
cagaaagtgtggatttgtgtggagcacacattgaatgggccaaggaaaaatcgagcagaaagaatgtctttcaggtttggtgcacctcgatttggaggaa

SEQ ID NO: 866396 - DNA, 98 bp, Homo sapiens
cccaacgcgaagacggtaacccgtgtgactttgactgggttgatctcctatcaagagtttttggcatttgaatctgttttatgtgctccagattccat

SEQ ID NO: 866397 - DNA, 99 bp, Homo sapiens
catttctacagtaacagaactaagaaaccggcatgcccagggagaaaaaactgcaggcattaatgtccgaaaggttgcttgggagaccctacaagaaga

SEQ ID NO: 866398 - DNA, 98 bp, Homo sapiens
aaacttttcaagcctgaaggaaaggcagaactgcctgattacaggagctttaacagagcatctgctgcacccaagcctgagccggttcctgttcaaaa

SEQ ID NO: 866399 - DNA, 98 bp, Homo sapiens
aaaataaaagataatgacaaagaagatggctgcttctatttcagacttacagattccagtctgctgttagatgattattcatccaagttgagccccaa

SEQ ID NO: 866400 - DNA, 98 bp, Homo sapiens
gacgagatagcccagtgcctagtgtctgtgccgcctaccaggcagagcctgaggaagctgaagcagaggtttcccagtgccctggctggtgctcagcg

SEQ ID NO: 866401 - DNA, 98 bp, Homo sapiens
actcagatgagagtgaggatgaagaagatgactaccagttatccatcttggtgcatcctgacaaaaatcaagatgatgctgacagagcacaaaaggct

SEQ ID NO: 866402 - DNA, 100 bp, Homo sapiens
tggaaggtggaattgaagaattcaaacctcctgagacatcacttagtgctcttacccagctgatgaaaaagatgccccatttccgaaaacagattactaa

SEQ ID NO: 866403 - DNA, 100 bp, Homo sapiens
gagcacaaaagagtctccgcggtggaggtctgcgttgctcttgcttttcctcgctggggtgtacggagagctggaggtgtttcagaaagatggggaacga

SEQ ID NO: 866404 - DNA, 98 bp, Homo sapiens
acactcggtcccgacatgatggcgagcatgcgagtggtgaaggagctatgaagacatgattggtgaggaggtgccatcggatcaatactactgggctc

SEQ ID NO: 866405 - DNA, 99 bp, Homo sapiens
ctgtcttcatctttacagaggaatagtctacaaaggaagacttgtaacctggagaagagggaaacactactatgaagtatcctgtcatgaccaagggtt

SEQ ID NO: 866406 - DNA, 100 bp, Homo sapiens
tggggctctgtgagacgtgctcctggcaccgccagctgctacttggccctcgccggtggcccaccaggtgctggcatcggccccaccattcagattgggg

SEQ ID NO: 866407 - DNA, 100 bp, Homo sapiens
ttctgttccgcacaggcctgctgaactgggtgctttatataggcatgattccacctttccactgatagactcaagttcccagaaccagattagaaaacgc

SEQ ID NO: 866408 - DNA, 98 bp, Homo sapiens
aaggagtgggaagtgtacaacttccccgcaggcggcgtgggcatgggcatgtacaacaccgacgagggggcaatggcggcttcctgtgttctactgca

SEQ ID NO: 866409 - DNA, 98 bp, Homo sapiens
gcaagcatcactcagtgcctatttctatctatcgttcccctgtttcccttcgaggaggacacgatctactggaagagacccaaagaaaagatgaagaa

SEQ ID NO: 866410 - DNA, 99 bp, Homo sapiens
gcgccagcctgcgaaggtggcggcgctgctgctcgggctgctcttggagtaatctatgccagcaattatgacaatgttagcagaccatgcagctcgtca

SEQ ID NO: 866411 - DNA, 101 bp, Homo sapiens
cccgctttcctcaccggggcttgctgttggatacatctcgccattacctgccactctctagcatcctggacactctgaggcaccttccactagcaacagtc

SEQ ID NO: 866412 - DNA, 99 bp, Homo sapiens
gggtcgagtttcttgcgcgatggtgaagtttgccagagattctggctctgatggtcacagtgttagttcccgcgattctgcagctccgtctcccatccc

SEQ ID NO: 866413 - DNA, 100 bp, Homo sapiens
cggcattccagaacctccagagcccaagcgcaagaagcagtttgatgccggcactgtatttgttggacgatttaagtctcgtaaagaacgagaagctgaa

SEQ ID NO: 866414 - DNA, 98 bp, Homo sapiens
atcttccaagtctaatagacctaaagccacagtcttcaagagcccacggacaccacctcaacgtctgaattggagaagcctagaggcaggaaaaaaac

SEQ ID NO: 866415 - DNA, 100 bp, Homo sapiens
tacagaaacatgatcattgacagagagaaccagtgcgtcattatcagcactccacactgtcccggaagttcgtggaggtaatgaccgaatataacgcgac

SEQ ID NO: 866416 - DNA, 100 bp, Homo sapiens
gctggaaaagaatgatgttgtccttaaacaacctacagaatatcatctataacccgcctactttggggataaaggattatttggtcttctggatttggag

SEQ ID NO: 866417 - DNA, 100 bp, Homo sapiens
aagagaggcctcccggctcgacaagttcaagcagctgcttgccggccccaacacggaccttgtgagtgacctgcaggaagaaggcaagaatgccatcaac

SEQ ID NO: 866418 - DNA, 101 bp, Homo sapiens
tcctcaatccaacagcccagtgcttctgtctcgactgcactttgagaaggttgcacgttttcaaaaaatacctaatggtgaaaatgagacaatgattcctg

SEQ ID NO: 866419 - DNA, 98 bp, Homo sapiens
cacagcatcatcctaaggacgcagctgtctgtgagggtccatgcctgcatcgagttgctgggagcctgagcacctttcgtttttcggctcagagaaag

SEQ ID NO: 866420 - DNA, 98 bp, Homo sapiens
gcgggccaggaagcgcatccaggagacagctttattaaaccgcctggagcgaattttcgaagcatgttttccttccatacttgtccctgatgctgaag

SEQ ID NO: 866421 - DNA, 98 bp, Homo sapiens
aacctgccttatgtccagatcttgaagagagaggctgctcacccaacagacgtctccatctccaaaacagccttgtactcccgcatcgggaccgctga

SEQ ID NO: 866422 - DNA, 100 bp, Homo sapiens
ctgcttatggcggcgctggagagggggcgctgagctgttggggactgttgggaaagatcctgatggctatccgagatgcaggttttgaaatctcagctat

SEQ ID NO: 866423 - DNA, 99 bp, Homo sapiens
agacattcttgcgctgcatcgaagcctcagccagagcagctgagttccagataaaaactgtcagacccggcctgtaggctgctccattgccaatgaact

SEQ ID NO: 866424 - DNA, 99 bp, Homo sapiens
ttgcctaaacctctgcacatccattcttcgactgggagagggacccaatcctgtagctggaagctgggagcctccgaaggcccatccatacttccctga

SEQ ID NO: 866425 - DNA, 100 bp, Homo sapiens
agcaggactacgaactcgtccagagggtcggcagcggcacctacggggacgtctataagatggcccactgcgtgaccttggttcagctgtccatttcctg

SEQ ID NO: 866426 - DNA, 100 bp, Homo sapiens
agtgtcatgtgaggacgtgcttcctgcttcatagataagagggggagcagcctctgggagtgacagtgctgacaagaaggctcaaggtcccaaaggtggt

SEQ ID NO: 866427 - DNA, 100 bp, Homo sapiens
tgggatgtcagcgtggccaagacacagccagtggtgctcgggactgcatcagccgatacttgccagaactaatacagctgatgaaatacctgaccttttc

SEQ ID NO: 866428 - DNA, 100 bp, Homo sapiens
agatctgcagagctcccagggcggacagcagcctcgggtgcaatcctggagccccccagtgaggaaaaaggtagcagcactgcctaaacaagaggttata

SEQ ID NO: 866429 - DNA, 100 bp, Homo sapiens
caagtatacagaatataatgaacctcatgaaagcagaaccaactcggatattgttgagctctccctgtgcaggccccagccaacgactcctggaggaaag

SEQ ID NO: 866430 - DNA, 116 bp, Homo sapiens
gcaggtcccggatgttgcggacagtatgaggcaagcgcagggggacggggaccagcagctgtcgccgccgctctcagtcgtttccacttgttccatgtgacacagaccagcctcaa

SEQ ID NO: 866431 - DNA, 100 bp, Homo sapiens
tttttggagccgtgagggatacagcagtttggtcaatattgtcttaacatgcttcaaataaatcaggcctcaggagtgcaagtagctgatgaagtatgtc

SEQ ID NO: 866432 - DNA, 100 bp, Homo sapiens
gtccgttggccttcgtacccgtcttgattgaggacactcatgaggaccatgatacttccactgagaatacagacgagtccaaccatgaccctcagtttga

SEQ ID NO: 866433 - DNA, 100 bp, Homo sapiens
cataaattgattattcctcgcccacatctgtgccaggcttgagaaagagatccaagatcttgaaaaagctgaactgcaaatctcaacgaaggaagaggcc

SEQ ID NO: 866434 - DNA, 98 bp, Homo sapiens
acatgattgaccagaaccgtgatggcttcattgacaaggaggacctgcacgacatgctggcctcgctggctctcaacagcctgacgggcgagttcaaa

SEQ ID NO: 866435 - DNA, 100 bp, Homo sapiens
agtcatctgatgtggtgcttttgaaccactggaaagtgaggaattttgaagtacaccgtggtgacattgtatcattggtctggagaatgctggaggagac

SEQ ID NO: 866436 - DNA, 98 bp, Homo sapiens
gaagatccggaaggacgaggacaactctgtgttctacgcagaaatagaagagctgaaactggtgtatccttatcacggcgttctacacagcgactaga

SEQ ID NO: 866437 - DNA, 101 bp, Homo sapiens
cgccggccaggacgcccccgagggtgtagaccgcgcccctggaggagctaacgttcatgcaacaacagcaacaggggatacagcactaacatatgcctgtg

SEQ ID NO: 866438 - DNA, 100 bp, Homo sapiens
gaaagcaggatggactatcattactcctccaacaccaatcatcccagacggtcctccatcactttgattcttctagtcaagagtcagtgccaaaaaggag

SEQ ID NO: 866439 - DNA, 98 bp, Homo sapiens
tggtctacgagctgtttctcatctttatactcttccagatctctggaaacatggctacagaacatgttaatggaaatggtactgaagagcccatggat

SEQ ID NO: 866440 - DNA, 100 bp, Homo sapiens
aaagatcacaagcaactctggatgggattgcaaaatgcttgataactatggacagcaagaacttgcggatctttttgtgaactataatgtaaaatctccc

SEQ ID NO: 866441 - DNA, 99 bp, Homo sapiens
tcccttagcctccctcctgcctcagcctcccaagtacctgggactacagcccaattttgacatgctttataaccatgtgaagcaactcctctccaatga

SEQ ID NO: 866442 - DNA, 119 bp, Homo sapiens
gccagcaagcggaagctgcccttcaccgcgggcgccaatggggagcagaaggactcggacacaggtgggagcaggtgctccgtgtcggcagttaacctgcccaaacacgtggactctat

SEQ ID NO: 866443 - DNA, 100 bp, Homo sapiens
ttggagcattggacttaatagcaacaacacaagaggttctacagcaggaacttcagggcattcacagtttccgatgatagtatttctgctgcaagtactt

SEQ ID NO: 866444 - DNA, 99 bp, Homo sapiens
actgaggagcgcggccagccctgctcgcagaattaccgcctcttctttagtccttccatagtgacgccccccaaggacatctggaatgtcactggtgcc

SEQ ID NO: 866445 - DNA, 100 bp, Homo sapiens
caccattcttcagagggcaatgaaggcacagaaatggaagtaccagcagaaggaggagacatcacagctttcccagatcgggaggaaaaatatggaatgt

SEQ ID NO: 866446 - DNA, 99 bp, Homo sapiens
gaccatggctgcctccgagcgccgcgccttcgcgcacaagatcaacagctcctgtccaaatatgacccccagaaggaggcagagctccgcacctggatc

SEQ ID NO: 866447 - DNA, 100 bp, Homo sapiens
ccgatcttctcagcaccaaggatgaagagattaccaagacatttgaggtcaacatcctaggacatttttgggatgaagatgagctggattcccacaccat

SEQ ID NO: 866448 - DNA, 100 bp, Homo sapiens
tttcgtcgagagattcactatggaatcgaatggagatgtatgcatttcgattcttcatccgcctgtagatgacccacagagtggagaactgccttctgaa

SEQ ID NO: 866449 - DNA, 98 bp, Homo sapiens
tattcagctcttcacagggggtagaacaagtggtactaggattatacattgtaagaggtgacaacgtttttaacttctagtcatggcgaatgatcgca

SEQ ID NO: 866450 - DNA, 98 bp, Homo sapiens
taagaagaatacacctgttcaaagtccagtatctctaggagaagatttgcagtggtggcctgataaggtctcaagattctgccctccaagaaagtctt

SEQ ID NO: 866451 - DNA, 100 bp, Homo sapiens
aaagttcttctcaagtatacagaatataatgaacctcatgaaagcagaaccaactcggatattgttgagctacagactgcaatacatagagtgacactag

SEQ ID NO: 866452 - DNA, 98 bp, Homo sapiens
ttcagcttcttttatcacatgtatggacaacatatagatttggtgcttccagatgtgagttatcaggtggaatccagtgaggaggatcagtctcagac

SEQ ID NO: 866453 - DNA, 100 bp, Homo sapiens
tctcccattcaagcagagcaggagctggaggaccttgttgcggttgacttgcagtggtctaagcccacctcagagatgcccgagtggtaaaagacatggc

SEQ ID NO: 866454 - DNA, 99 bp, Homo sapiens
ccagccgctgttttgccggaggagcccctcaggcctgatggatgtaacagatataataaatggaaaagtagatgatgaagataagcagcatttcattcc

SEQ ID NO: 866455 - DNA, 100 bp, Homo sapiens
ctgttcatcattctgttgaagaaacgcttaacccactcttgagaaagtctattttacaaagaggaaaacctgtggttgaaggctctttggaaaagaaacc

SEQ ID NO: 866456 - DNA, 50 bp, Homo sapiens
tgtcgctcggcggcgggagtcggaatagcgggttttgcagcaattgttgc

SEQ ID NO: 866457 - DNA, 100 bp, Homo sapiens
gtacccgcaccctcgcagccaaccggtgcacccaccccttcgcctgcaccccagcagtacatcgtggtcactgtctctgcagtgagttcctcctcctaac

SEQ ID NO: 866458 - DNA, 98 bp, Homo sapiens
caagcagctggaagatggacgtactttgtctgactacaatattcaaaagagatggacagagacgtatgtgcgttggtctcctaagggcacctacctgg

SEQ ID NO: 866459 - DNA, 98 bp, Homo sapiens
agccatctcttagtccagcaagtcctcatagccaggactatttggagttttcctcgtcttactggatgtcactctcgtccttgccgacctaattttca

SEQ ID NO: 866460 - DNA, 118 bp, Homo sapiens
tctctgtcgagcagcggacgccggtctctgttccgcaggatgggagtaactattcccagtcagaggcgctatgtgtattattatagctacctgttaaagaatcatctggattatagac

SEQ ID NO: 866461 - DNA, 100 bp, Homo sapiens
acaccgcacaggcaggaggcatggccaaggaaggatgtgcccgtggaacaggtgacacacgcagacagagagcaaaccaagaaggtggtgtacgcggtgg

SEQ ID NO: 866462 - DNA, 98 bp, Homo sapiens
ccgttttcgcgtggttcttttgcaagaaaaagattgcctcaatctggataaaaacctgatcaaatatgatttgcaaaatttaaaaccttatacgaaat

SEQ ID NO: 866463 - DNA, 100 bp, Homo sapiens
aaatctcttggtacagaatgtttttgtagaaacacacaacaggaattttccattggtggcattcttcaccaacaggcaacatcagatgctgacctgaaag

SEQ ID NO: 866464 - DNA, 100 bp, Homo sapiens
agtctcacaaatctcatatgcagtccattattgacaagcccattccagatgatgggatttattggcaggccaaccttgacagattccaccaacacttccg

SEQ ID NO: 866465 - DNA, 101 bp, Homo sapiens
tgcagaacttcgagattgccaaggacttcgtcgtcaaggtcatcgaccggctgagccgggacgagctggtcaagcaagccgacttccagatctactcggag

SEQ ID NO: 866466 - DNA, 98 bp, Homo sapiens
cggtccagcggtcacctacccccagcaccacctccagcccctgcgcctcggcttgcattgatgacaatgttgatatggtgaagtttctggtagaaaat

SEQ ID NO: 866467 - DNA, 99 bp, Homo sapiens
cgcggacctgcggactagcgaacccggagaactgataaatttcaaacggaagagagtggcagcatttagaaagaatctaattgaaatgtctgaactgga

SEQ ID NO: 866468 - DNA, 100 bp, Homo sapiens
tgtggataacgggaggtgaatttccatgtcaacatagtcctgaacttgagagagatttgctgggataaggcgggacatttctttgatctcccggacttct

SEQ ID NO: 866469 - DNA, 100 bp, Homo sapiens
gtgacttaccttaacatgttcttgaagtaccatggcgtggattaaaagggcgccaatgcttcggcattagagaaagagattggtccagaacagtttccgg

SEQ ID NO: 866470 - DNA, 100 bp, Homo sapiens
gaagcactggtgggatttgaataagaagatttgccttcctttacacatgttcgtgtcttcttaggatgaggaaagtatgcctcagactcctcccttttca

SEQ ID NO: 866471 - DNA, 100 bp, Homo sapiens
ctcctcgccagcagccgtccggagccagccaacgagcgctgacctgaataatgtcagattctcagcttataggactgccatgaaactccgaagactgcag

SEQ ID NO: 866472 - DNA, 98 bp, Homo sapiens
tgtgacctgccccttctctttaccctggattctttcctgtatggcctccatgtcctcttcaaaggtgacttcagaataacagcacgtgacgagtgggt

SEQ ID NO: 866473 - DNA, 99 bp, Homo sapiens
acacatcaaacagctggcgagattcgccggagcctctatcaaggaaacctgtaggaagtgtcagggactctggaaagaacataatggcctcacctgtga

SEQ ID NO: 866474 - DNA, 99 bp, Homo sapiens
tgtacaggtcgcgggagtcgtagggaggacgccgggacacctggaagccgagaaatgattcttctaaggagcctaaattcaccaagtgccgttcacctg

SEQ ID NO: 866475 - DNA, 100 bp, Homo sapiens
aggagatcaagaaggcctatcggaagctggcgctcaagtaccacccggacaagaacccggatgagggcgagaagagccccggagctatgtggagtctgtg

SEQ ID NO: 866476 - DNA, 100 bp, Homo sapiens
gaaagttacgtggagcgtgggcgtttcgcagactcctaaggcctttagcacctgctaccacttgtctgctacgaagtaccagaaaatgacaaaaacctcg

SEQ ID NO: 866477 - DNA, 99 bp, Homo sapiens
gataacaagttttgtgcagattgccagtctaaagaatgtggaggctgtggacccacgaggtcgaacattattgcatcttgctgtttccttgggacattt

SEQ ID NO: 866478 - DNA, 100 bp, Homo sapiens
gctctgctacttcaagtaccaggtcctggcgatcagcaccaagaacccactgcagggtcatgtaaaagttgttcaatatttggtaaaggaagtaaatcag

SEQ ID NO: 866479 - protein, 437 aa, Homo sapiens
MAAMAPALTDAAAEAHHIRFKLAPPSSTLSPGSAENNGNANILIAANGTKRKAIAAEDPSLDFRNNPTKEDLGKLQPLVASYLCSDVTSVPSKESLKLQGVFSKQTVLKSHPLLSQSYELRAELLGRQPVLEFSLENLRTMNTSGQTALPQAPVNGLAKKLTKSSTHSDHDNSTSLNGGKRALTSSALHGGEMGGSESGDLKGGMTNCTLPHRSLDVEHTTLYSNNSTANKSSVNSMEQPALQGSSRLSPGTDSSSNLGGVKLEGKKSPLSSILFSALDSDTRITALLRRQADIESRARRLQKRLQVVQAKQVERHIQHQLGGFLEKTLSKLPNLESLRPRSQLMLTRKAEAALRKAASETTTSEGLSNFLKSNSISEELERFTASGIANLRCSEQAFDSDVTDSSSGGESDIEEEELTRADPEQRHVPLFLCGDSR

SEQ ID NO: 866480 - protein, 483 aa, Homo sapiens [sequence omitted]

SEQ ID NO: 866481 - protein, 496 aa, Homo sapiens
MAAMAPALTDAAAEAHHIRFKLAPPSSTLSPGSAENNGNANILIAANGTKRKAIAAEDPSLDFRNNPTKEDLGKLQPLVASYLCSDVTSVPSKESLKLQGVFSKQTVLKSHPLLSQSYELRAELLGRQPVLEFSLENLRTMNTSGQTALPQAPVNGLAKKLTKSSTHSDHDNSTSLNGGKRALTSSALHGGEMGGSESGDLKGGMTNCTLPHRSLDVEHTTLYSNNSTANKSSVNSMEQPALQGSSRLSPGTDSSSNLGGVKLEGKKSPLSSILFSALDSDTRITALLRRQADIESRARRLQKRLQVVQAKQVERHIQHQLGGFLEKTLSKLPNLESLRPRSQLMLTRKAEAALRKAASETTTSEGLSNFLKSNSISEELERFTASGIANLRCSEQAFDSDVTDSSSGGESDIEEEELTRADPEQRHVPLRRRSEWKWAADRAAIVSRWNWLQAHVSDLEYRIRQQTDIYKQIRANKVPEAQEAHIKAHLPAGCCQ

SEQ ID NO: 866482 - protein, 505 aa, Homo sapiens
MAAMAPALTDAAAEAHHIRFKLAPPSSTLSPGSAENNGNANILIAANGTKRKAIAAEDPSLDFRNNPTKEDLGKLQPLVASYLCSDVTSVPSKESLKLQGVFSKQTVLKSHPLLSQSYELRAELLGRQPVLEFSLENLRTMNTSGQTALPQAPVNGLAKKLTKSSTHSDHDNSTSLNGGKRALTSSALHGGEMGGSESGDLKGGMTNCTLPHRSLDVEHTTLYSNNSTANKSSVNSMEQPALQGSSRLSPGTDSSSNLGGVKLEGKKSPLSSILFSALDSDTRITALLRRQADIESRARRLQKRLQVVQAKQVERHIQHQLGGFLEKTLSKLPNLESLRPRSQLMLTRKAEAALRKAASETTTSEGLSNFLKSNSISEELERFTASGIANLRCSEQAFDSDVTDSSSGGESDIEEEELTRADPEQRHVPLRRRSEWKWAADRAAIVSRWNWLQAHVSDLEYRIRQQTDIYKQIRANKSYQLPSLHNSSRNYAGSPAQMMRHLLEA

SEQ ID NO: 866483 - protein, 450 aa, Homo sapiens
MAAMAPALTDAAAEAHHIRFKLAPPSSTLSPGSAENNGNANILIAANGTKRKAIAAEDPSLDFRNNPTKEDLGKLQPLVASYLCSDVTSVPSKESLKLQGVFSKQTVLKSHPLLSQSYELRAELLGRQPVLEFSLENLRTMNTSGQTALPQAPVNGLAKKLTKSSTHSDHDNSTSLNGGKRALTSSALHGGEMGGSESGDLKGGMTNCTLPHRSLDVEHTTLYSNNSTANKSSVNSMEQPALQGSSRLSPGTDSSSNLGGVKLEGKKSPLSSILFSALDSDTRITALLRRQADIESRARRLQKRLQVVQAKQVERHIQHQLGGFLEKTLSKLPNLESLRPRSQLMLTRKAEAALRKAASETTTSEGLSNFLKSNSISEELERFTASGIANLRCSEQAFDSDVTDSSSGGESDIEEEELTRADPEQRHVPLAISFPVCTIHQEIMRGHRHK

SEQ ID NO: 866484 - protein, 637 aa, Homo sapiens
MAAMAPALTDAAAEAHHIRFKLAPPSSTLSPGSAENNGNANILIAANGTKRKAIAAEDPSLDFRNNPTKEDLGKLQPLVASYLCSDVTSVPSKESLKLQGVFSKQTVLKSHPLLSQSYELRAELLGRQPVLEFSLENLRTMNTSGQTALPQAPVNGLAKKLTKSSTHSDHDNSTSLNGGKRALTSSALHGGEMGGSESGDLKGGMTNCTLPHRSLDVEHTTLYSNNSTANKSSVNSMEQPALQGSSRLSPGTDSSSNLGGVKLEGKKSPLSSILFSALDSDTRITALLRRQADIESRARRLQKRLQVVQAKQVERHIQHQLGGFLEKTLSKLPNLESLRPRSQLMLTRKAEAALRKAASETTTSEGLSNFLKSNSISEELERFTASGIANLRCSEQAFDSDVTDSSSGGESDIEEEELTRADPEQRHVPLRRRSEWKWAADRAAIVSRWNWLQAHVSDLEYRIRQQTDIYKQIRANKGLIVLGEVPPPEHTTDLFLPLSSEVKTDHGTDKLIESVSQPLENHGARIIGHISESLSTKSCGALRPVNGVINTLQPVLADHIPGDSSDAEEQLHKKQRLNLVSSSSDGTCVAARTRPVLSCKKRRLVRPNSIVPLSKKVREPHISPHQAPPYKTSDCIT

SEQ ID NO: 866485 - DNA, 19 bp, Homo sapiens
caagccaagcaggttgaga

SEQ ID NO: 866486 - DNA, 22 bp, Homo sapiens
tctccacacagaaacaggggta

SEQ ID NO: 866487 - DNA, 20 bp, Homo sapiens
ttgtgcaagccaagcaggtt

SEQ ID NO: 866488 - DNA, 22 bp, Homo sapiens
tgggaagctgatagctaggggt

SEQ ID NO: 866489 - DNA, 21 bp, Homo sapiens
tcagaatggaaatgggctgca

SEQ ID NO: 866490 - DNA, 21 bp, Homo sapiens
ttcctgggcttctggcacctt

SEQ ID NO: 866491 - DNA, 22 bp, Homo sapiens
agacgcaggtcagaatggaaat

SEQ ID NO: 866492 - DNA, 22 bp, Homo sapiens
aaactgggaagctgatagctct

SEQ ID NO: 866493 - DNA, 20 bp, Homo sapiens
tgtcttggcagaccacattc

SEQ ID NO: 866494 - DNA, 21 bp, Homo sapiens
ggaaaaaggctcaccatttca

SEQ ID NO: 866495 - DNA, 20 bp, Homo sapiens
gccttgagaaaagctgccag

SEQ ID NO: 866496 - DNA, 20 bp, Homo sapiens
aacatcccagacagcgaagg

SEQ ID NO: 866497 - DNA, 20 bp, Homo sapiens
gagacgcaggtcagaatgga

SEQ ID NO: 866498 - DNA, 20 bp, Homo sapiens
aaatgctgccacagaggtct

SEQ ID NO: 866499 - DNA, 23 bp, Homo sapiens
caaggtcatccatgacaactttg

SEQ ID NO: 866500 - DNA, 22 bp, Homo sapiens
gtccaccaccctgttgctgtag

SEQ ID NO: 866501 - DNA, 23 bp, Homo sapiens
gcgacacccactcctccaccttt

SEQ ID NO: 866502 - DNA, 25 bp, Homo sapiens
tgctgtagccaaattcgttgtcata

SEQ ID NO: 866503 - DNA, 1569 bp, Homo sapiens
atggctgcgatggcgcccgctctcactgacgcagcagctgaagcacaccatatccggttcaaactggctcccccatcctctaccttgtcccctggcagtgccgaaaataacggcaacgccaacatccttattgctgccaacggaaccaaaagaaaagccattgctgcagaggatcccagcctagatttccgaaataatcctaccaaggaagacttgggaaagctgcaaccactggtggcatcttatctctgctctgatgtaacatctgttccctcaaaggagtctttgaagttgcaaggggtcttcagcaagcagacagtccttaaatctcatcctctcttatctcagtcctatgaactccgagctgagctgttggggagacagccagttttggagttttccttagaaaatcttagaaccatgaatacgagtggtcagacagctctgccacaagcacctgtaaatgggttggctaagaaattgactaaaagttcaacacattctgatcatgacaattccacttccctcaatgggggaaaacgggctctcacttcatctgctcttcatgggggtgaaatgggaggatctgaatctggggacttgaaggggggtatgaccaattgcactcttccacatagaagccttgatgtagaacacacaactttgtatagcaataatagcactgcaaacaaatcctctgtcaattccatggaacagccggcacttcaaggaagcagtagattatcacctggtacagactccagctctaacttggggggtgtcaaattggagggtaaaaagtctcccctgtcttccattcttttcagtgctttagattctgacacaaggataacagctttactgcggcgacaggctgacattgagagccgtgcccgcagattacaaaagcgcttacaggttgtgcaagccaagcaggttgagaggcatatacaacatcagcggagccagttgatgctgactcgaaaggctgaagctgccttgagaaaagctgccagtgagaccaccacttcagagggacttagcaactttctgaaaagcaattcaatttcagaagaattggagagatttacagctagtggcatagccaacttgaggtgcagtgaacaggcatttgattcagatgtcactgacagtagttcaggaggggagtctgatattgaagaggaagaactgaccagagctgatcccgagcagcgtcatgtacccctgtttctgtgtggagacagtagaatataaaaataacaccttcgctgtctgggatgttggcagccacttcaaaatcagacctctgtggcagcattttttccagaacacaaaaggtgccagaagcccaggaagcacacatcaaggctcacttgccagcggggtgctgccaataaaatgtagtcacgtggaatttggaatgtggaaaggaggtagaagtcatcctttcctcccccatagcagcaggtgtgcaggctctggtggtcagctggactccatactcccccaccagtcaccagcctggggaccgtggggctgcaaggacctcagcagcggtttcccaag

SEQ ID NO: 866504 - DNA, 2371 bp, Homo sapiens
atggctgcgatggcgcccgctctcactgacgcagcagctgaagcacaccatatccggttcaaactggctcccccatcctctaccttgtcccctggcagtgccgaaaataacggcaacgccaacatccttattgctgccaacggaaccaaaagaaaagccattgctgcagaggatcccagcctagatttccgaaataatcctaccaaggaagacttgggaaagctgcaaccactggtggcatcttatctctgctctgatgtaacatctgttccctcaaaggagtctttgaagttgcaaggggtcttcagcaagcagacagtccttaaatctcatcctctcttatctcagtcctatgaactccgagctgagctgttggggagacagccagttttggagttttccttagaaaatcttagaaccatgaatacgagtggtcagacagctctgccacaagcacctgtaaatgggttggctaagaaattgactaaaagttcaacacattctgatcatgacaattccacttccctcaatgggggaaaacgggctctcacttcatctgctcttcatgggggtgaaatgggaggatctgaatctggggacttgaaggggggtatgaccaattgcactcttccacatagaagccttgatgtagaacacacaactttgtatagcaataatagcactgcaaacaaatcctctgtcaattccatggaacagccggcacttcaaggaagcagtagattatcacctggtacagactccagctctaacttggggggtgtcaaattggagggtaaaaagtctcccctgtcttccattcttttcagtgctttagattctgacacaaggataacagctttactgcggcgacaggctgacattgagagccgtgcccgcagattacaaaagcgcttacaggttgtgcaagccaagcaggttgagaggcatatacaacatcagctgggtggatttttggagaagactttgagcaaactgccaaacttggaatccttgagaccacggagccagttgatgctgactcgaaaggctgaagctgccttgagaaaagctgccagtgagaccaccacttcagagggacttagcaactttctgaaaagcaattcaatttcagaagaattggagagatttacagctagtggcatagccaacttgaggtgcagtgaacaggcatttgattcagatgtcactgacagtagttcaggaggggagtctgatattgaagaggaagaactgaccagagctgatcccgagcagcgtcatgtacccctgagacgcaggtcagaatggaaatgggctgcagaccgggcagctattgtcagccgctggaactggcttcaggctcatgtttctgacttggaatatcgaattcgtcagcaaacagacatttacaaacagatacgtgctaataaggtttctgtgtggagacagtagaatataaaaataacaccttcgctgtctgggatgttggcagccacttcaaaatcagacctctgtggcagcattttttccagaacacaaaaggtgccagaagcccaggaagcacacatcaaggctcacttgccagcggggtgctgccaataaaatgtagtcacgtggaatttggaatgtggaaaggaggtagaagtcatcctttcctcccccatagcagcaggtgtgcaggctctggtggtcagctggactccatactcccccaccagtcaccagcctggggaccgtggggctgcaaggacctcagcagcggtttcccaagtttcctgacttcttccatcctctggaaatcagctgtgagctatcagcttcccagtttgcacaattcatcaagaaattatgcggggtcaccggcacaaatgatgaggcatctcctggaagcttaacttcttatccatcccatctcttggacagatgatgccagttaattactttgaatgcaagtttgaaaaccactgctttaaagaaaatggatactccccttaccaagcagaaagtaggattttggaaactgatgcaagggaagcaaaaagatgcctcaggaggcacgattacaacaggattgatgcaaacggaagctgaagcttaaccaaagacattaatatacgcccacaaaagaaaatgctaaggaagtcaagtggtctgcatgaattctgaagaaaaatggagaaccaaagaacaaaatttgtcaatgaacttccagcacagtctaggttaagggagtgaatttcttgactgaatggcacagactctgtaccacctgattggctgttaccttaatggaggaattatattacaatgtataggtactttaattagaatgacctggcagttactgaggcaaaattttccgctcctttgt

SEQ ID NO: 866505 - DNA, 2420 bp, Homo sapiens
atggctgcgatggcgcccgctctcactgacgcagcagctgaagcacaccatatccggttcaaactggctcccccatcctctaccttgtcccctggcagtgccgaaaataacggcaacgccaacatccttattgctgccaacggaaccaaaagaaaagccattgctgcagaggatcccagcctagatttccgaaataatcctaccaaggaagacttgggaaagctgcaaccactggtggcatcttatctctgctctgatgtaacatctgttccctcaaaggagtctttgaagttgcaaggggtcttcagcaagcagacagtccttaaatctcatcctctcttatctcagtcctatgaactccgagctgagctgttggggagacagccagttttggagttttccttagaaaatcttagaaccatgaatacgagtggtcagacagctctgccacaagcacctgtaaatgggttggctaagaaattgactaaaagttcaacacattctgatcatgacaattccacttccctcaatgggggaaaacgggctctcacttcatctgctcttcatgggggtgaaatgggaggatctgaatctggggacttgaaggggggtatgaccaattgcactcttccacatagaagccttgatgtagaacacacaactttgtatagcaataatagcactgcaaacaaatcctctgtcaattccatggaacagccggcacttcaaggaagcagtagattatcacctggtacagactccagctctaacttggggggtgtcaaattggagggtaaaaagtctcccctgtcttccattcttttcagtgctttagattctgacacaaggataacagctttactgcggcgacaggctgacattgagagccgtgcccgcagattacaaaagcgcttacaggttgtgcaagccaagcaggttgagaggcatatacaacatcagctgggtggatttttggagaagactttgagcaaactgccaaacttggaatccttgagaccacggagccagttgatgctgactcgaaaggctgaagctgccttgagaaaagctgccagtgagaccaccacttcagagggacttagcaactttctgaaaagcaattcaatttcagaagaattggagagatttacagctagtggcatagccaacttgaggtgcagtgaacaggcatttgattcagatgtcactgacagtagttcaggaggggagtctgatattgaagaggaagaactgaccagagctgatcccgagcagcgtcatgtacccctgagacgcaggtcagaatggaaatgggctgcagaccgggcagctattgtcagccgctggaactggcttcaggctcatgtttctgacttggaatatcgaattcgtcagcaaacagacatttacaaacagatacgtgctaataaggtgccagaagcccaggaagcacacatcaaggctcacttgccagcggggtgctgccaataaaatgtagtcacgtggaatttggaatgtggaaaggaggtagaagtcatcctttcctcccccatagcagcaggtgtgcaggctctggtggtcagctggactccatactcccccaccagtcaccagcctggggaccgtggggctgcaaggacctcagcagcggtttcccaagtttcctgacttcttccatcctctggaaatcagctgtgagctatcagcttcccagtttgcacaattcatcaagaaattatgcggggtcaccggcacaaatgatgaggcatctcctggaagcttaacttcttatccatcccatctcttggacagatgatgccagttaattactttgaatgcaagtttgaaaaccactgctttaaagaaaatggatactccccttaccaagcagaaagtaggattttggaaactgatgcaagggaagcaaaaagatgcctcaggaggcacgattacaacaggattgatgcaaacggaagctgaagcttaaccaaagacattaatatacgcccacaaaagaaaatgctaaggaagtcaagtggtctgcatgaattctgaagaaaaatggagaaccaaagaacaaaatttgtcaatgaacttccagcacagtctaggttaagggagtgaatttcttgactgaatggcacagactctgtaccacctgattggctgttaccttaatggaggaattatattacaatgtataggtactttaattagaatgacctggcagttactgaggcaaaattttccgctcctttgtattctgtaatacaagaaggatctacatggatgttctgttctctgaactgtctggatgaaccggtcaacggcactcatcataccttagtttttaaatctgcattgtggtcataatctgttatttaattaatttctcgtatttttataaaaactttgcctat

SEQ ID NO: 866506 - DNA, 1778 bp, Homo sapiens
atggctgcgatggcgcccgctctcactgacgcagcagctgaagcacaccatatccggttcaaactggctcccccatcctctaccttgtcccctggcagtgccgaaaataacggcaacgccaacatccttattgctgccaacggaaccaaaagaaaagccattgctgcagaggatcccagcctagatttccgaaataatcctaccaaggaagacttgggaaagctgcaaccactggtggcatcttatctctgctctgatgtaacatctgttccctcaaaggagtctttgaagttgcaaggggtcttcagcaagcagacagtccttaaatctcatcctctcttatctcagtcctatgaactccgagctgagctgttggggagacagccagttttggagttttccttagaaaatcttagaaccatgaatacgagtggtcagacagctctgccacaagcacctgtaaatgggttggctaagaaattgactaaaagttcaacacattctgatcatgacaattccacttccctcaatgggggaaaacgggctctcacttcatctgctcttcatgggggtgaaatgggaggatctgaatctggggacttgaaggggggtatgaccaattgcactcttccacatagaagccttgatgtagaacacacaactttgtatagcaataatagcactgcaaacaaatcctctgtcaattccatggaacagccggcacttcaaggaagcagtagattatcacctggtacagactccagctctaacttggggggtgtcaaattggagggtaaaaagtctcccctgtcttccattcttttcagtgctttagattctgacacaaggataacagctttactgcggcgacaggctgacattgagagccgtgcccgcagattacaaaagcgcttacaggttgtgcaagccaagcaggttgagaggcatatacaacatcagctgggtggatttttggagaagactttgagcaaactgccaaacttggaatccttgagaccacggagccagttgatgctgactcgaaaggctgaagctgccttgagaaaagctgccagtgagaccaccacttcagagggacttagcaactttctgaaaagcaattcaatttcagaagaattggagagatttacagctagtggcatagccaacttgaggtgcagtgaacaggcatttgattcagatgtcactgacagtagttcaggaggggagtctgatattgaagaggaagaactgaccagagctgatcccgagcagcgtcatgtacccctgagacgcaggtcagaatggaaatgggctgcagaccgggcagctattgtcagccgctggaactggcttcaggctcatgtttctgacttggaatatcgaattcgtcagcaaacagacatttacaaacagatacgtgctaataagagctatcagcttcccagtttgcacaattcatcaagaaattatgcggggtcaccggcacaaatgatgaggcatctcctggaagcttaacttcttatccatcccatctcttggacagatgatgccagttaattactttgaatgctggtctcgaactcctggcttgaagtgatccttctgtcttggcctcccgaaatgctgagatttcaagcgtgagtcatcatgtctggtctcacagctcagtttttaacatatgtatgaaatatcaactgtgtttggttcaaaggactttatgatcttacagataggaactaaggaataataacgtaagaaataaaaaatgtggaaat

SEQ ID NO: 866507 - DNA, 1636 bp, Homo sapiens
atggctgcgatggcgcccgctctcactgacgcagcagctgaagcacaccatatccggttcaaactggctcccccatcctctaccttgtcccctggcagtgccgaaaataacggcaacgccaacatccttattgctgccaacggaaccaaaagaaaagccattgctgcagaggatcccagcctagatttccgaaataatcctaccaaggaagacttgggaaagctgcaaccactggtggcatcttatctctgctctgatgtaacatctgttccctcaaaggagtctttgaagttgcaaggggtcttcagcaagcagacagtccttaaatctcatcctctcttatctcagtcctatgaactccgagctgagctgttggggagacagccagttttggagttttccttagaaaatcttagaaccatgaatacgagtggtcagacagctctgccacaagcacctgtaaatgggttggctaagaaattgactaaaagttcaacacattctgatcatgacaattccacttccctcaatgggggaaaacgggctctcacttcatctgctcttcatgggggtgaaatgggaggatctgaatctggggacttgaaggggggtatgaccaattgcactcttccacatagaagccttgatgtagaacacacaactttgtatagcaataatagcactgcaaacaaatcctctgtcaattccatggaacagccggcacttcaaggaagcagtagattatcacctggtacagactccagctctaacttggggggtgtcaaattggagggtaaaaagtctcccctgtcttccattcttttcagtgctttagattctgacacaaggataacagctttactgcggcgacaggctgacattgagagccgtgcccgcagattacaaaagcgcttacaggttgtgcaagccaagcaggttgagaggcatatacaacatcagctgggtggatttttggagaagactttgagcaaactgccaaacttggaatccttgagaccacggagccagttgatgctgactcgaaaggctgaagctgccttgagaaaagctgccagtgagaccaccacttcagagggacttagcaactttctgaaaagcaattcaatttcagaagaattggagagatttacagctagtggcatagccaacttgaggtgcagtgaacaggcatttgattcagatgtcactgacagtagttcaggaggggagtctgatattgaagaggaagaactgaccagagctgatcccgagcagcgtcatgtacccctagctatcagcttcccagtttgcacaattcatcaagaaattatgcggggtcaccggcacaaatgatgaggcatctcctggaagcttaacttcttatccatcccatctcttggacagatgatgccagttaattactttgaatgctggtctcgaactcctggcttgaagtgatccttctgtcttggcctcccgaaatgctgagatttcaagcgtgagtcatcatgtctggtctcacagctcagtttttaacatatgtatgaaatatcaactgtgtttggttcaaaggactttatgatcttacagataggaactaaggaataataacgtaagaaataaaaaatgtggaaat

SEQ ID NO: 866508 - DNA, 1968 bp, Homo sapiens
atggctgcgatggcgcccgctctcactgacgcagcagctgaagcacaccatatccggttcaaactggctcccccatcctctaccttgtcccctggcagtgccgaaaataacggcaacgccaacatccttattgctgccaacggaaccaaaagaaaagccattgctgcagaggatcccagcctagatttccgaaataatcctaccaaggaagacttgggaaagctgcaaccactggtggcatcttatctctgctctgatgtaacatctgttccctcaaaggagtctttgaagttgcaaggggtcttcagcaagcagacagtccttaaatctcatcctctcttatctcagtcctatgaactccgagctgagctgttggggagacagccagttttggagttttccttagaaaatcttagaaccatgaatacgagtggtcagacagctctgccacaagcacctgtaaatgggttggctaagaaattgactaaaagttcaacacattctgatcatgacaattccacttccctcaatgggggaaaacgggctctcacttcatctgctcttcatgggggtgaaatgggaggatctgaatctggggacttgaaggggggtatgaccaattgcactcttccacatagaagccttgatgtagaacacacaactttgtatagcaataatagcactgcaaacaaatcctctgtcaattccatggaacagccggcacttcaaggaagcagtagattatcacctggtacagactccagctctaacttggggggtgtcaaattggagggtaaaaagtctcccctgtcttccattcttttcagtgctttagattctgacacaaggataacagctttactgcggcgacaggctgacattgagagccgtgcccgcagattacaaaagcgcttacaggttgtgcaagccaagcaggttgagaggcatatacaacatcagctgggtggatttttggagaagactttgagcaaactgccaaacttggaatccttgagaccacggagccagttgatgctgactcgaaaggctgaagctgccttgagaaaagctgccagtgagaccaccacttcagagggacttagcaactttctgaaaagcaattcaatttcagaagaattggagagatttacagctagtggcatagccaacttgaggtgcagtgaacaggcatttgattcagatgtcactgacagtagttcaggaggggagtctgatattgaagaggaagaactgaccagagctgatcccgagcagcgtcatgtacccctgagacgcaggtcagaatggaaatgggctgcagaccgggcagctattgtcagccgctggaactggcttcaggctcatgtttctgacttggaatatcgaattcgtcagcaaacagacatttacaaacagatacgtgctaataaggggttgatagttcttggggaggtacctcccccagagcatacaacagacttatttcttccacttagttctgaggtgaagacagatcatgggactgataaattgattgagtctgtttctcagccattggaaaaccatggtgcccgtattattggtcatatttcagagtcactgtctaccaaatcatgtggagcactcagacctgtcaatggagttattaacactcttcagcctgtcttggcagaccacattccaggtgacagctctgatgctgaggaacaattacataagaagcaacgactgaatctcgtctcttcatcatctgatggcacctgtgtggcagcccggacacgtcctgtactgagctgtaagaagcggaggcttgttcgacccaacagcatcgttcctctttccaagaaggttcgtgagccacacatctccccacaccaagctcctccatacaagacctcggactgcatcacgtaaatgctttttcaggggcaaaatctagagaatctgaaatggtgagcctttttcctt

SEQ ID NO: 866509 - DNA, 99 bp, Homo sapiens
cttacatctgtgccgagcccctcccttcgaatattctcgagtgtactaaggctcgtacgtctgcatcgattatcttacgtggggcaaatgatttcatgt

SEQ ID NO: 866510 - DNA, 99 bp, Homo sapiens
ttctggagagcttgacattctcaaagactggtgctatgaagctggtggctttgagtataagcgcgctatcgtggactgcatcatcagcatcattgaaga

SEQ ID NO: 866511 - DNA, 99 bp, Homo sapiens
tcgtgggcacaaggtcctacatgtcgatgttggtgcatgtagacaatgaagcatcaatcaaccaaacaaccctggagctgagcacaaagagtcatgtga

SEQ ID NO: 866512 - DNA, 99 bp, Homo sapiens
tggcgctgacaagggtccagcctccgatagcctgagcccttgtgaagccggcaatgacaagtctgtatggtcgccatgccgagaaaaccactgacatgc

SEQ ID NO: 866513 - DNA, 99 bp, Homo sapiens
tgcttcttgaactggaccgtggggaaactaaaaacgcatctatctaacgtttaccctagcaaaccagcagagggtaccagacttcagcgagaactccga

SEQ ID NO: 866514 - DNA, 99 bp, Homo sapiens
tcactgaccagttctgcaatgcttcaggaaaaaacaccccagagcgctcggggttaccgaagggctgtcttctgtacaaaaccctccaggtgcagatgt

SEQ ID NO: 866515 - DNA, 99 bp, Homo sapiens
aaatgttaaagagtatctgcagacacattgggaagaagaggagtgccagcaggatgtcagtcttttgaggaaacagtgtaaacaggaacatcgataagt

SEQ ID NO: 866516 - DNA, 99 bp, Homo sapiens
gcaatctcggcactttgggaggccaagtttgactgcaaccctggagtacgtggaagagaagacaaatgtggactctgtgtttgtgaacttccagaatga

SEQ ID NO: 866517 - DNA, 99 bp, Homo sapiens
ggtgcgccgccccgggtgggcctgggggcgcgccctaattaaacaaccaccatgtcgagcaaaaaggcaaagaccaagaccaccaagaagcgccctcag

SEQ ID NO: 866518 - DNA, 99 bp, Homo sapiens
ttccagcgctgcgcccggacagacaagtccctggctatcttcttcagtgactgctccatccatggtagccccagtcacttttgcatctattgtagaaga

SEQ ID NO: 866519 - DNA, 99 bp, Homo sapiens
gaagctgaaacgaaagggagccgccagcgcgtttggctgtgacctgacggagtatctggaaagctcgggacaggatgagtctcactgtgttgcccaggc

SEQ ID NO: 866520 - DNA, 99 bp, Homo sapiens
gccggggctgttttccagagctttgccaagttcagcaaatttggagatgccatccgggtgacctgcataggttcctgcggggtctccaacaaggctaat

SEQ ID NO: 866521 - DNA, 100 bp, Homo sapiens
cgccacctcatgcacctggaattggaccccacaaatcgcctcgtggtggtgcccctgattttggagtccgagatgtccaattccaggtgcatgaggtggc

SEQ ID NO: 866522 - DNA, 99 bp, Homo sapiens
ctctgatgacccatttggattctctgatttcactgccaagattctcactatttgtcgtagatgtccagacaagccagatcaccaagatccccattctga

SEQ ID NO: 866523 - DNA, 99 bp, Homo sapiens
tccctgccccggcgccgtccgtgcccgcgggacctgacagccgggtcagagggaaatcctcattgacgattcaatttgttgaaggccaatttgtggact

SEQ ID NO: 866524 - DNA, 98 bp, Homo sapiens
tgagctgcggaggctgcggcccccaggttcctaaatatttgtcacagcaatgggctaaagcctctggaagaggtgaagttgggaaactgcggattgcc

SEQ ID NO: 866525 - DNA, 98 bp, Homo sapiens
gccatcttggatccgcgggacaagaaaattcatgcggatcccggctactcaacagaaatgaaggaggaatctgtaaagaaacaccagtatccagatgg

SEQ ID NO: 866526 - DNA, 99 bp, Homo sapiens
gccagtggatcaccgcgctgcactacgcctttcaggacgagaaccacctggtggacatcgagcagctggatccccgcggccggactcccctgcacctgg

SEQ ID NO: 866527 - DNA, 99 bp, Homo sapiens
tgagggagcccttcggaagctggagttgatccctgaattttattatctccctgagatgtttgtcaacttcaataattataatcttggagtgatggatga

SEQ ID NO: 866528 - DNA, 99 bp, Homo sapiens
cacaaattggagaattaatcctcaaaaggttaattcttaattttcgaaaaggctatcgaagaaatgacaaggttactttccgcaccagaatctatcact

SEQ ID NO: 866529 - DNA, 99 bp, Homo sapiens
tccactggagttgcttcacttagctctacaatcaacccatgtggaaatgagtggcttatactctcctgtcagtgaggatagcacagtgcctcaatttga

SEQ ID NO: 866530 - DNA, 99 bp, Homo sapiens
atttagattggattctgaatatcaggcaagaagttatgaaatggaatggatggggatataatgattctaaattcatcttcaataagaagggccaaattg

SEQ ID NO: 866531 - DNA, 99 bp, Homo sapiens
cgagggcgcccgacccgggactagaggacggaagggtctggaagaagaagcctgagaagatgatgcacagatagagaggcaccaggacttgagaggcac

SEQ ID NO: 866532 - DNA, 99 bp, Homo sapiens
ggggaccagagatggacggtcactcagcctatggaggtctttcagagccttgaagaccaccatttggaagtggtggcgtttttcagggaaaatggcttc

SEQ ID NO: 866533 - DNA, 99 bp, Homo sapiens
gcctcccgaagtgctgggattacagatgttgaaatttacactgctttgaaagaaagaagatatgttttcagcattgaaatatcatgcaatagactattt

SEQ ID NO: 866534 - DNA, 98 bp, Homo sapiens
gttacagactctcctgggcgaccccgagagcttaccattcctcagacttcttcacatggtgctaacagatttctttggtgcaattcccatcgaccaga

SEQ ID NO: 866535 - DNA, 99 bp, Homo sapiens
ggaaatggagtattactactgccccagcctgctgaagctcttgcgctacctctgggttgctatcaagatcatagataagacccagctggatgaagaaaa

SEQ ID NO: 866536 - DNA, 99 bp, Homo sapiens
gagcttcttcctatttgccatggtgcacagccagagaacaacacatcacacacaggaaacagttgtgctcatgtgatgggggcctcagcactaggaagg

SEQ ID NO: 866537 - DNA, 98 bp, Homo sapiens
tcggtcagtgcgagatccgctgctgctgaggagaggagcgtcaacagcagcaccatggctatgacagagactccactttcaatgtgtttgtgggaaaa

SEQ ID NO: 866538 - DNA, 99 bp, Homo sapiens
gccgggggccggggagcgccagagcttcctgcggctgagggagggatgaaacaagtacccatgtgaccaccaccactgggactgcgctggattagacct

SEQ ID NO: 866539 - DNA, 99 bp, Homo sapiens
ctcaagaactggttatacttgaaaccataatgctacaaactctagtgccttctgctgaatatccccaaagacccaagcagttggaagaactggacgcat

SEQ ID NO: 866540 - DNA, 98 bp, Homo sapiens
tgctcatacagaattacgcatttccacttctaatgaatgtccagaggaggtttatgaccctcgatctctatatgaaaggctacaggaacagaaggaca

SEQ ID NO: 866541 - DNA, 100 bp, Homo sapiens
gctgcaggaggcaggatggtctggaggctggtcctgctggctctgtgccacacccacagagccagcaggaccagcctccagaccatcctgcctcctgcag

SEQ ID NO: 866542 - DNA, 99 bp, Homo sapiens
aaatggagcccagaccagatgtgcctaggctcggaagcacgttcagtctggatacctccatgattggaaccaaccagatggctgtgtgtgccaaagcac

SEQ ID NO: 866543 - DNA, 99 bp, Homo sapiens
gagattgacgcagagtgggcggcggtggtggtatgataagtattatcagcaacataatagttctgggcatcttcattaagtacaaggaacttcggacac

SEQ ID NO: 866544 - DNA, 98 bp, Homo sapiens
ccacagcatgaccgctcgcggcctggcccttggcctcctcctgctgctactgtgtccagcgcagagtcaagaaattggagcatggctatgagcaatgg

SEQ ID NO: 866545 - DNA, 99 bp, Homo sapiens
ttatgtgaaacctccaaatgtggggtcggtgtacccgagagaactgcaagtaccttcaccctcctccacacttaaaaacgcagctggagattaatgggc

SEQ ID NO: 866546 - DNA, 99 bp, Homo sapiens
gtcccagtgccttcagaacttctgataccccaatgtccttctttgactttgtggttgatcctcattctttcccccgtacagtggaaaacatctttcatg

SEQ ID NO: 866547 - DNA, 99 bp, Homo sapiens
agtcagcattccgatagcagtggttttgctgaagattctacagactgcctatcccttaatcatcttcaggtaatcaaatgcaaagcagctgtgctatgg

SEQ ID NO: 866548 - DNA, 99 bp, Homo sapiens
agggaactacttccgggggagcggcgcggcggcgcgggaggtaccgggaagccagtgttgaagtgatggagataatgtctcgttttgctgtgattgaac

SEQ ID NO: 866549 - DNA, 99 bp, Homo sapiens
aggacttgggcgaggtctgccatctctactaccctaagggcttcgtgctgtgtcactccatcgctgggggtacgggttctggcctgggctcctacctcc

SEQ ID NO: 866550 - DNA, 99 bp, Homo sapiens
cacgacgttccttctcagacagccgggtcaaatcgacttccttccacacaaccagtgagtcatccttctaacgatgacgatattcgcgctctcggtcac

SEQ ID NO: 866551 - DNA, 99 bp, Homo sapiens
cctggatctattaaagggagcattccgatcatctgaggaacagcagttgcacactgacaagaaacagatcagtgttgggttcattggctatccaaatgt

SEQ ID NO: 866552 - DNA, 99 bp, Homo sapiens
attgctatcaatgcgaatgatcctgaagcctcaaagtttcatgccagcaatagaacatcagatagccaatatgatgctttaattactagcaatttggta

SEQ ID NO: 866553 - DNA, 99 bp, Homo sapiens
agtgggctagaaggggaccacctgtctgacacctccacaacgtcgctggagctcgattcacgcttaccacagtgcggagactcctttctgaaaaggcca

SEQ ID NO: 866554 - DNA, 99 bp, Homo sapiens
atgaacccatcaaagagtgcggggcctgtgaagcctccctggcctgctccacctgccatgtgtatgtgagtgaagaccacctggatctcctgcctcctc

SEQ ID NO: 866555 - DNA, 99 bp, Homo sapiens
ctccagctagtgagcatgatccggtattcaagtcaaacaacgttgaaatggattgggtgttgaagcatactggtccaaatagtcctgacacggccaatg

SEQ ID NO: 866556 - DNA, 99 bp, Homo sapiens
gactgctctcagcctcttgggtttaggagaagaaaccaatgaggaggatgaggaggaaagtgacaaccagttccagtctcatcagattttccatgtcct

SEQ ID NO: 866557 - DNA, 99 bp, Homo sapiens
ggaagacctattatcagatcaaccaccaaagtgggaaacattgaaatcaagaattaaggaagttcactggagtaaaatggaggcctcagtaatattacc

SEQ ID NO: 866558 - DNA, 75 bp, Homo sapiens
tctcgaatcattctttgtacagaaattgaaaggcttcaaagctagcaggtattgaaaaccttccctttgaattac

SEQ ID NO: 866559 - DNA, 149 bp, Homo sapiens
ttcaaatccaaagttctcgcccactatcctcagaatatagaatggaacccttttgatcaagatgcggtgaacatgcctggaagctccgaccccaggagccagcccatcaacctgaaccattacgccaccaagaagagcgtggcggagag

SEQ ID NO: 866560 - DNA, 99 bp, Homo sapiens
tcatacaaaattatagtagaaaaggccatgagacccctcaggtcatacttacctggttgcttgcgcatctagtaatgttggatcatattctggatgttt

SEQ ID NO: 866561 - DNA, 99 bp, Homo sapiens
tgatcgcctaacttctactgacgaagcttggaagttgcagaagtgcctgatttgagatggggtcccaggtctcggtggaatcgggagctctgcacgtgg

SEQ ID NO: 866562 - DNA, 99 bp, Homo sapiens
gaatacccggctgatcctccagtaccttgattcagagagaagacagagcgatcgtcttctgatcaaaggaggtaaaattgttaatgatgaccagtcgtt

SEQ ID NO: 866563 - DNA, 99 bp, Homo sapiens
aagcggcgccgcgccctcggcctgcacggattgtaaaccatggctgtgtggatacaagctcagcagctccaaggagaagcccttcatcagatgcaagcg

SEQ ID NO: 866564 - DNA, 131 bp, Homo sapiens
caggccaagaaagtcagcattgttttcttctacttcattgcttgcaaggaggagtttttacaagaagtggcaggtgaggaggagctacagatgattcagcctgagaagctcctgttggtcacagttggaaa

SEQ ID NO: 866565 - DNA, 99 bp, Homo sapiens
ggcccctctctacaacctgcccagaacaccaatcagggtcttcaggcctggaagattgaagacattccagccaacaaaatgtccattgcgtggcagcta

SEQ ID NO: 866566 - DNA, 98 bp, Homo sapiens
gcgcagaaggattccgggagcacagttccgccgaggtctccgtctctccaccgggggcttcatccttccagggaggagaagagggactccagaatggc

SEQ ID NO: 866567 - DNA, 99 bp, Homo sapiens
tgttagaattgaagcctataatatttgtcacctgaactacttcacattttccccaatatatggtggagtgcaactcaaaattggacccaacaaagacca

SEQ ID NO: 866568 - DNA, 99 bp, Homo sapiens
cgggatttgcgacgctgtcacaggttccagggtataccccgcgaatgaaggtcatcatcagatttgaaatatttaaagtggatacaaaactatttcagc

SEQ ID NO: 866569 - DNA, 98 bp, Homo sapiens
gtgctgaaagatggtcccgcagctcaggatgggaaaattgcaccagaattctgcttggtcagaatcgtgatggcattgtgttcagcactgatgactat

SEQ ID NO: 866570 - DNA, 99 bp, Homo sapiens
ggcataacctgatgtggcaacaacctcagggacagtctcattgccatctctctcaggaacaatgaggccactcaaacaactgcaatttgttctttgtgt

SEQ ID NO: 866571 - DNA, 98 bp, Homo sapiens
ccgaatgaggaccagggagggaaatatgtcatgtatcccatagctgtgagtggcgatcacgagaacaataagggtggtgattccactgaagcaactgc

SEQ ID NO: 866572 - DNA, 99 bp, Homo sapiens
tgcaaaagaagagaagcagaattatacctagaagtctactaatggacagttagtcacccacctacatgttgagtttcaccagtgatcattaaagaatgg

SEQ ID NO: 866573 - DNA, 98 bp, Homo sapiens
aggctgttcaaggtgaaggattcatgagtctatataaaggctttttaccatcttggctgagaatggtatttagaagtggaatgggaagttaaaaaagg

SEQ ID NO: 866574 - DNA, 99 bp, Homo sapiens
gaaagtcccagatttttgctcattaacagaaaagaagaggagaatgctaagcagagatttaccgaggagcattatggatcctgggagaatactgtagta

SEQ ID NO: 866575 - DNA, 98 bp, Homo sapiens
gccaaatacatcagcttgtaggagacagagccacgaggccccctggtggctgccacactgatgagttccagtgccggctggatggactatgcatcccc

SEQ ID NO: 866576 - DNA, 99 bp, Homo sapiens
gtctcgagtcctgggaaaagcggtgctgcgggatagcaatggaaagagaaatgagccgtcagactgctacagcattacctaccggtacctcgaagtgtc

SEQ ID NO: 866577 - DNA, 99 bp, Homo sapiens
gaagtgcgagtccgggccctgtatgactatgaggggcaggagcatgatgagctgagcttcaaggctgagaacgtttgtctgcctgatgagagccacttg

SEQ ID NO: 866578 - DNA, 99 bp, Homo sapiens
ggcttctctacgcagaacccgggagtaggagactcagaatcgaatctcttctccctccccttcttgtttgggaaaggaatctactttgctgacatgtct

SEQ ID NO: 866579 - DNA, 99 bp, Homo sapiens
caaaggcacgcaaaacggaaaagcgtgtgtaggggagcggaaaaggaagtcaccaccgtggcctgcgacggaaaaacgtggtcttcgagaaatgcgagt

SEQ ID NO: 866580 - DNA, 99 bp, Homo sapiens
cccacttcttcacagtttttcaagaatcttgttggtgttggggtctgatctgaggcgtattatcgctggcaaaacgcgatggggagttcccggctgggc

SEQ ID NO: 866581 - DNA, 99 bp, Homo sapiens
gtgagtgaggcaactgaaaactgttcttggacctgcggtgctatagagcagttaattggccttggtcctcacagctccaaaaagaaacaggatctcgat

SEQ ID NO: 866582 - DNA, 99 bp, Homo sapiens
ctacaaaggctatgtcaataccaactccgagcacacggccgtcatcagcctctgctcaggaatggtgaaaaaccttttgaatgtccaaattgtcatgaa

SEQ ID NO: 866583 - DNA, 100 bp, Homo sapiens
gtgaagcctccgtttctcctcctgaagacttccaggaggttaacaaggttgggatgcttgagttgttcacaggggctcgtgcgtaaacctgaagccagtc

SEQ ID NO: 866584 - DNA, 99 bp, Homo sapiens
gcatgacagctatgactacgacctgcaggaacagatcgcagacctcggccttgcctcctttaagatgtggagcaaactgaataatgaagagcacaatga

SEQ ID NO: 866585 - DNA, 99 bp, Homo sapiens
atatcataagtggaattttggagatattcaaaggtaccctcacctgagtcccaagtacaaggagtcttttgatgtgggctgtaacctctttgccaagtt

SEQ ID NO: 866586 - DNA, 99 bp, Homo sapiens
ggatacgatagaaaatgtaaaggccaagatccaggataaggaagggggagcagcctctgggagtgacagtgctgacaagaaggctcaaggtcccaaagg

SEQ ID NO: 866587 - DNA, 99 bp, Homo sapiens
tcgacctaaagcctgactggggcaagaacatgttcttcaagtatacatggaataactttttgcatacacaagtggaaatttgtattgcactgattcttg

SEQ ID NO: 866588 - DNA, 99 bp, Homo sapiens
taaagcaggtggagcaccctttgctgagtggcctcttataccccggactgcagcgcgagcccagcattgacctgctgcaggccttcgtggagcactgga

SEQ ID NO: 866589 - DNA, 99 bp, Homo sapiens
cccgagcatcttctgaaccgggttctggagcggcttgctggaggggctaccagggacagcgccgcctcaggtgcccccacttgactctcgccccagctc

SEQ ID NO: 866590 - DNA, 99 bp, Homo sapiens
atcatgtcaagcgaagccttgaaaaagctgccctgagacggtgtcccgccgaaagttctggagagtcttggcttctgggaggaagtcagagggattatc

SEQ ID NO: 866591 - DNA, 98 bp, Homo sapiens
aggtgggctgtgtcacagctcaatctcgaggctcaaggagacaagttcgcatgtcccacatgaaatcaataaggtctacaaggaagtcttcacgagga

SEQ ID NO: 866592 - DNA, 99 bp, Homo sapiens
ctgagtgactacattcgcctcctggccatagtccgcctttcaccaacaatcaccagtggtttacacaacattgcaaggagcattgaaactcgaaactac

SEQ ID NO: 866593 - DNA, 99 bp, Homo sapiens
tgccaaggatttgctccagatgcagaacttcacattttcagggtctttaccaataatcagcagatataatttctacagtagaatttaatcattctggag

SEQ ID NO: 866594 - DNA, 98 bp, Homo sapiens
ttttcctttagtcaggaaggacgttggtgttgagaacatccatgatagcagtcttctgtaaatcgaacttttcaagaattctctgaaggaaccaagta

SEQ ID NO: 866595 - DNA, 99 bp, Homo sapiens
agagacaggaggcagtagccaaacacccagggcaaacttgaagataaatcttttgactccagctctttagaggatctaaagtgaccttgatggacagtg

SEQ ID NO: 866596 - DNA, 99 bp, Homo sapiens
cgattgcgttatttcttctactccagtggtgagaagccggatcgagctgggagatgtgacaccacacaatattaaacagttgaaaagattgaatcaggt

SEQ ID NO: 866597 - DNA, 99 bp, Homo sapiens
atgcttctcttctgtcagcctgcaactgagccaggattgaatacttggaccccagctggatctaccatgaaagacttgtgaatccaggaagagagactg

SEQ ID NO: 866598 - DNA, 99 bp, Homo sapiens
gaagacaaatatggaaacaaatactatgaagacaacaagcaattttttgcactggttgccaccaacattctcttggttgatgagatcatgcgagctgga

SEQ ID NO: 866599 - DNA, 100 bp, Homo sapiens
aggagaaaaaagatcagaacagaaattctattgagaacatagccaatgagactgtgtggctatgttctcaatagaatttctgttctgatcttttttctcc

SEQ ID NO: 866600 - DNA, 99 bp, Homo sapiens
atggatagccgcttgcaggagatccgggagcggcagaagttacggcgacagctcctcgcgcagcagagtctaactagttatgatgtctgtagcatactt

SEQ ID NO: 866601 - DNA, 99 bp, Homo sapiens
cagaaagccagatggctgaacatcaggaacagggtctgttccacaaaaaagacagtgccaatcaaggctgtgttcgaaaagtttacctgaaggacaccg

SEQ ID NO: 866602 - DNA, 150 bp, Homo sapiens
ttttgccaagaatacttgaaccagtgttgccatttcactctggaagatatgctctatgctgcttcatccataaagccggagaccacccccatcaccaactcgtcccactataatccgcccactagaatcctccctgttagactaaacgaa

SEQ ID NO: 866603 - DNA, 99 bp, Homo sapiens
tgctgtttctgcttaagttggcaagacactccaagtttggcatgaaagatgccacttcaaatgaacaacaagagcttttctgtcagaagttgcagcagt

SEQ ID NO: 866604 - DNA, 99 bp, Homo sapiens
caaccgccagatcaacctggagctctacgcctcctacgtttacctgtccatgggctgtgggacagatgatgtctaccatgttctacccactggtcacct

SEQ ID NO: 866605 - DNA, 99 bp, Homo sapiens
taaaatctacaaccttctcattcagacacacgaactaaaattccagatggcaaactcaatgaatggcagaaaccctggtggtcgaggaggaaatccccg

SEQ ID NO: 866606 - DNA, 99 bp, Homo sapiens
agcgtggccctgctggaggcctcgctgaggaacgacgccgaggaaggtataagtgtgctagcggagtgtctagattgtcctgaattgaaagcaactgca

SEQ ID NO: 866607 - DNA, 99 bp, Homo sapiens
tcccagtgaccccaggctttttatggctgtgagacacgttaaaatttcaggggtatttgaagtataccatacaactgttttgaaaatccagcgtggaca

SEQ ID NO: 866608 - DNA, 99 bp, Homo sapiens
gccggcctgttgctggtactgttggtacatctgaccagaaagatccaccacagcctcatgactggaaacagctcctttctcaataaaaagatctcgaaa

SEQ ID NO: 866609 - DNA, 108 bp, Homo sapiens
cgtcgccatcttggatccgcgggacaagaaaattcatgcgggatgtgtttggccaaatgggagagtggttacaacacacgagctacaaactacaatgctggagacaga

SEQ ID NO: 866610 - DNA, 98 bp, Homo sapiens
gagctttaccgcaattatggcatcctggccgatgccacggagcaagtgggccagatttttgcactgagtggccagccgcactggacagtgacgagaaa

SEQ ID NO: 866611 - DNA, 98 bp, Homo sapiens
ttcagttcactcatacacagatagaagccatccgtgctggaatgcagcctgggctgactatggagtccttcaataatgttaaacagtggctgcaggaa

SEQ ID NO: 866612 - DNA, 99 bp, Homo sapiens
agcgcgagagagcgcggccctcaggagcaaggcgattcaagaaatccatggtgaaaggtttggattcctatgaagaaaaggaggataaagtgatcaagg

SEQ ID NO: 866613 - DNA, 99 bp, Homo sapiens
atgaagaggatgatgtttttggtgaagagctgaaatatgctaataccgtgatgcgctttgattacgtctggcttcgagaccactgccgctcagcatcgt

SEQ ID NO: 866614 - DNA, 125 bp, Homo sapiens
cgggagctcgcggcgagcgccccagccaggcctgcgccggcatcctccgagacccgtgaccaaggtgtagactaagaagtggagtcatgcttcacacggccatatcatgctggcagccattcctg

SEQ ID NO: 866615 - DNA, 99 bp, Homo sapiens
cctgctccgagacccaccgattatctctcctgggggacagcgtctccgtacagtgaacagagtatctgccaagcccgggcttccgtgatggtctacgat

SEQ ID NO: 866616 - DNA, 98 bp, Homo sapiens
tttgatctgccgtgatcaatatcaggaaaggccccatcttcccttcacacctggtgctggagaatctggtaaaagcaccattgtgaagcagatgagga

SEQ ID NO: 866617 - DNA, 99 bp, Homo sapiens
caggttacttcttcctcaacaccagcaccgcagatgttgtcaaggtggcctaccaggaggccaggggtgtcgccatgaaaactacccctgagtgtggtc

SEQ ID NO: 866618 - DNA, 99 bp, Homo sapiens
tgaacaggaggagcggcagggcatgaaggtccaggcgctggccagccctggcaggtgcccggcccgccccccaccctccggctcccagggcctgctgga

SEQ ID NO: 866619 - DNA, 98 bp, Homo sapiens
gacatcttcatttacagagcaacttgatgaaggtacacccaatagagaggcagttcaattaacctccagaagatggctgaacctgcaggaataccaga

SEQ ID NO: 866620 - DNA, 100 bp, Homo sapiens
aggaggggccccagcagcccccgaaggccctatcaggaaaatttccgtctttcatactccatgtcctgatagggccttcgggggctgctggggcccctcc

SEQ ID NO: 866621 - DNA, 99 bp, Homo sapiens
ctcccaagtagctgagattacaggcgaggaaacgagacctctttcgttccttctagaaggtctggaggacgtagagttattgaaaatgcagatggttct

SEQ ID NO: 866622 - DNA, 99 bp, Homo sapiens
ctttcccaacgagcctgctgcagtcattgccctcaacaccattaaggaatggcttgccaagaatcaccatgagactcacatttcaagacttcctcctgg

SEQ ID NO: 866623 - DNA, 99 bp, Homo sapiens
agggagtgaggctgctgaggggtccagaaacccgagacaagctgcccagcacagcctgaagcaggacattctaaatgaaaagactgaattggaagcaac

SEQ ID NO: 866624 - DNA, 99 bp, Homo sapiens
aaacccttgctgtaaattatgagaaagaagaagaattcctcactaatgagctctccagaaaattgatgcaggttggcaagttgatcaaagaagctgccg

SEQ ID NO: 866625 - DNA, 75 bp, Homo sapiens
gccctggacacagcaatatctctgggctttcacagggtgataaaagaaaatgtggctgaagttacccgaagttca

SEQ ID NO: 866626 - DNA, 99 bp, Homo sapiens
gacgcgccggggccgcctcctcccgcacggacccatgaaccagccgggcggcgcggcggctccgcaggatctaagcctttcccacgttatggttataaa

SEQ ID NO: 866627 - DNA, 99 bp, Homo sapiens
cacagccccgacctttgatgagaactcagctgtccagggtgagcgagccacaggcttcggtgtggccctcctgctggcgctcttcggccgtgcctctga

SEQ ID NO: 866628 - DNA, 99 bp, Homo sapiens
ggctccaacatgaacaagaagagtgggcggcctgaagagctggtgtcctgcgcagactgtggacgctctgatggacccgattcagaaagctgtaataaa

SEQ ID NO: 866629 - DNA, 98 bp, Homo sapiens
gagatccggatgctcatccataaaactgaagatgtgaatactctgggagactcatgcatctgtatgccgtgtgcgtggactgcctggaaggggttcac

SEQ ID NO: 866630 - DNA, 98 bp, Homo sapiens
cggacatccctttggaaggctacctgttgtctccgatccagaggatctgcaagtacccgctcctccttaaggacatggtccggcgaggagagatcatc

SEQ ID NO: 866631 - DNA, 99 bp, Homo sapiens
caaaaatagtgatagctttgataagcacagaccccacaggctcctcggacactgggtccatcacctcctgccccatcatccactccaacaccaacagcc

SEQ ID NO: 866632 - DNA, 99 bp, Homo sapiens
ccaactgcaagttaaagtctactggaagaagacagaaggtttattcttcagtccaaggaagcaattcacagtcagctgttagagaagcagaaaatagca

SEQ ID NO: 866633 - DNA, 99 bp, Homo sapiens
ccaggtgacgaggacctagactgtgacaacgaccacgtctccaaaatgagtcgcatcttcaacccccatctgtgtgactgcacagaaaagttacaaaac

SEQ ID NO: 866634 - DNA, 99 bp, Homo sapiens
ctcaagggacttgcaggaactgcagaagaagctgtctctgctgatagactccttccagaataactcaaagaactccatccggcacaacctgtcactgca

SEQ ID NO: 866635 - DNA, 99 bp, Homo sapiens
accatgagcgtcccggccttcatcgacatcagtgaagaagatcagtcggattcagtggttttggtatcacagtctagacaaaggacatgtaggcgtaaa

SEQ ID NO: 866636 - DNA, 98 bp, Homo sapiens
ccatgtaaaacaccagttaactgtaaaatttgtgatctttccaacagatttggagatatataagaggctactacttgagaagaggcaaaggaaaaagc

SEQ ID NO: 866637 - DNA, 99 bp, Homo sapiens
ccacttcaaacattcgtctcggaaaccccgcctcttacagtcacgagaataatgcatatactgccatgtcagattcctacttacccagttactacagtc

SEQ ID NO: 866638 - DNA, 100 bp, Homo sapiens
gaaagtctaagttcatcaatgcacccttctgattttgaaaagcttcttccaaaaactgatacccctgtatctgtatccgattttgatgaacttagacttt

SEQ ID NO: 866639 - DNA, 99 bp, Homo sapiens
ctgctgtggctgcgggaaagcctctctcttgcccaaaccacgatgggaattcagcagtcagcagaggaccttgcccgagtacctgccaactccactagc

SEQ ID NO: 866640 - DNA, 98 bp, Homo sapiens
cggaggcggcgggacagagcgcctgcgaccccagtcggtgctccggggaggtcacctgacgaggaggaacttccactacatcaccatcctccgagacc

SEQ ID NO: 866641 - DNA, 99 bp, Homo sapiens
tcctgcccctcgttgatgagagcattcgaagtgacctcagcagggcatccagagctgaaaccaccaatgggtgaggtcgtcacccctacggccccccag

SEQ ID NO: 866642 - DNA, 99 bp, Homo sapiens
gacagcaacatttcccacaggacacgaagtttgtcggcccttgccttggcagagctgaggcaggtgacagcagggacatgtctcgggagatgcaggatg

SEQ ID NO: 866643 - DNA, 99 bp, Homo sapiens
cgcaagttcacctaccgcggcgtggacctcgaccagctgctggacatgtcctagtcctctccacccggatcctggccatgaaggcctcgctctgcaagc

SEQ ID NO: 866644 - DNA, 99 bp, Homo sapiens
gagaacaagttacaactccagaaaatatcaatttggatttaacttactcagttagaaaatggatttctgactggaatctcaccactgaaaaaaagcaca

SEQ ID NO: 866645 - DNA, 99 bp, Homo sapiens
accgagtccggaccggagactttggggcctaactagagggaagtgtaacatctcccatttttctgacatatttgctgctagagagtttaaagcccgagt

SEQ ID NO: 866646 - DNA, 99 bp, Homo sapiens
ctgggcgacagagactccatctgggcagggcttcttggccgactgagcagggacagaagccagaggaccagcttctgcagctccagctgcgtgcactcc

SEQ ID NO: 866647 - DNA, 99 bp, Homo sapiens
cccaaagtgctaggattacagatgatcgttgccagcccaacagaaaatggacaggtacttcgtgtaattccacctacccagacaggaatggcacaagtg

SEQ ID NO: 866648 - DNA, 99 bp, Homo sapiens
gcagagcgccgaggaggctttcctgctggtggcaaccgcctacgagacactcaagtttttaatgttgaagatcagaaaagagacaccataaatttactt

SEQ ID NO: 866649 - DNA, 98 bp, Homo sapiens
ccggacggactacgagtaccagcactccaatttgtatgccatatcagaaatgcatcttctgcagacaccgggttaagagggtctctggagcctgcatc

SEQ ID NO: 866650 - DNA, 99 bp, Homo sapiens
ggctactgcgattccaaggagggcaaagcgtcctgcggtgactattatatggttaaaaagattttggaggaaaacagttcaggtgacttgaacataaat

SEQ ID NO: 866651 - DNA, 98 bp, Homo sapiens
ccctgggctgcatgcttttcaaacttctgagagggttacacggtgtgggcacacaacctcattgccattgctcgtcttcggggctctgatctgaaagt

SEQ ID NO: 866652 - DNA, 98 bp, Homo sapiens
acttacatgcttatttcagataaaaagattgatgagcctctgttgcagatccagaaagctatcacactctgccccatgaaattgtggtcaatcttgct

SEQ ID NO: 866653 - DNA, 99 bp, Homo sapiens
gccagttaggatgtagacctaattgtttaagaaaagtcaaatttcggtcccagatctgtatgcttccattctggcaggcagctgctatgaggtttccat

SEQ ID NO: 866654 - DNA, 75 bp, Homo sapiens
tagggacaacaggcaggagaattatgggagcgcatttccccagggaatacaaacaagtgatcctaatgctgtggt

SEQ ID NO: 866655 - DNA, 99 bp, Homo sapiens
aaggaaacacatttcatatactgcaggtggaaaaccatgaattccttgtaaaaccttcatttgatcctaatctcagtgaattaagagaaataatgaatg

SEQ ID NO: 866656 - DNA, 99 bp, Homo sapiens
aagttttgaagatgaacaccaagatgaaagcagcagttttcatcatctaagtgaaagccactgttccatccctgacccatctttgtcgtttggaaattc

SEQ ID NO: 866657 - DNA, 99 bp, Homo sapiens
ctttgacctttttgaagcctttgcaaaaaaaggcctaaagaatgtatttgacgaagcaatattggctgccctggagcctccagaaccgaagaagagccg

SEQ ID NO: 866658 - DNA, 99 bp, Homo sapiens
ccatactatttgtgatcggaatcatacatggctacctgtctcagatgacgcctgttataaatacagattctgttcatcttgctctgaaattaaataatt

SEQ ID NO: 866659 - DNA, 99 bp, Homo sapiens
tttatacctgagtaaagcagaaaggtttaaggttggaagtacaagcagatgtacagaaagaacggtacagtctaagtggagaatctggcacagtcagct

SEQ ID NO: 866660 - DNA, 99 bp, Homo sapiens
aactgccaccatcatcagtgagaacttgaacaatgaggtcatgatgaagatccgggacccgaagacccttcttcccatgcctggagtgatggttggcga

SEQ ID NO: 866661 - DNA, 99 bp, Homo sapiens
gagagctggcctgcggcacgcggcctaatgccagatgcagcttttggataagtttcccattgaaggtggccagaaggaccccaagcaaaggatcatccc

SEQ ID NO: 866662 - DNA, 99 bp, Homo sapiens
actgcaccttaaaaacaaaagattgagctgcactgtattcctgtggatcttcttgttccaaccaaagtgactggcatcattacacaaggagctaaagat

SEQ ID NO: 866663 - DNA, 99 bp, Homo sapiens
acctgccgctctggtttctactcattccctatttgccaagagcaccccaagatctggctacctcgggccctgaggcagacctacatccggaaggttggg

SEQ ID NO: 866664 - DNA, 98 bp, Homo sapiens
atgaaacctgctgacagtgagaagaacaatgatttagcatgtagactgctggggcaatcaatggatgaaagtggattaccacagctgaccagttatga

SEQ ID NO: 866665 - DNA, 98 bp, Homo sapiens
ggccgggcccagtcaccgaccgctaccaagcagtttctcgaagagattaacaagtggacagttcagtacaatgtttccccgctgtcttggaatgtggc

SEQ ID NO: 866666 - DNA, 98 bp, Homo sapiens
aaaaatcccatctaccgcaactctcagttcgagagtaaagatggcccactgcgtgaccttggttcagctgtccatttcctgtgaccatctcattgaca

SEQ ID NO: 866667 - DNA, 99 bp, Homo sapiens
tgtgccaccatgccccgttggccaggctggtctcgaacaccttacctcaggtgatcctcccacctttgggattacagtgttctacgcagaaatagaaga

SEQ ID NO: 866668 - DNA, 101 bp, Homo sapiens
gggcgacagagcgagactccacccgacgaggagtcggatgattttagagcaaaagacagaccaaccgtcaggagtcatggacgcacagtgtggtaagcgca

SEQ ID NO: 866669 - DNA, 99 bp, Homo sapiens
gcaaaggcaagagtaacagcagcgccgtcccgtccgacagccaggcccgggagaaactcggtgaaatacctggagtgctcagctctcacccagagaggc

SEQ ID NO: 866670 - DNA, 99 bp, Homo sapiens
agcctcctaagtagctgggattacagggacttcatctgcagcatcctcaccattaaaaaaagaacagcccttatttactctacggcaggttgggatgat

SEQ ID NO: 866671 - DNA, 99 bp, Homo sapiens
caagttgctgtgcgaccaggtggtcggtgcgcccatcgcggtctcggccttctacgccgtggaagccgtgaggtggtggatgaaggcttgatccctgga

SEQ ID NO: 866672 - DNA, 99 bp, Homo sapiens
ctacagcctactggtgactcggctgcaggatcaagtcttccataccagggaccaggccaaaaccagactgccactgcccctacttgggccccactgtcc

SEQ ID NO: 866673 - DNA, 99 bp, Homo sapiens
tgcctccgtggcctttcgtacagtgggcaagttgggcaggactcatcttaaaaatcatgtgaagagagaagggcacagttacctaagtatcaacgtaat

SEQ ID NO: 866674 - DNA, 98 bp, Homo sapiens
ttcggcccggccatggcagcggcgcccctgaaagtgtgcatcgtgggctcggggaactgaattcagaaggagctggcggacatcactttagaccctcc

SEQ ID NO: 866675 - DNA, 99 bp, Homo sapiens
ctttaggtttcccattctcaaatacttccttgaaagtaagccgttgggttggaggaaaggggacagcatatcagccagagaaatatacaagaacattcc

SEQ ID NO: 866676 - DNA, 99 bp, Homo sapiens
atgaatataatccattctcggattctagaacaccctgtatgatgagattcgtcagtttcgcaaggcctgtggggaggctcatcttaaaactatattagc

SEQ ID NO: 866677 - DNA, 99 bp, Homo sapiens
aagacgggaagattcgcaactgcagaagaaatagccatgctctgcgtgtatttggcttctgatgaagctatcgccccattccagcggagacttatgtag

SEQ ID NO: 866678 - DNA, 99 bp, Homo sapiens
gccctgaagaggcccatggggcccgtacattatgaagacattcgggaaaatgattgtcacagaccagcagacaggacagaaaatccagatagtcaccgc

SEQ ID NO: 866679 - DNA, 100 bp, Homo sapiens
tatcacatgtttatgttctatgctccctatttgcttttccaaccctcagcatctccttaatagcatcttcattagggagcatagaacataaacatgtgat

SEQ ID NO: 866680 - DNA, 99 bp, Homo sapiens
ctgaaacgcctaagattttagatgtcagaaatttcaaaatgattgttccacaccaccaggcactaccttgaattagctctccatggttgaaaaagaagc

SEQ ID NO: 866681 - DNA, 99 bp, Homo sapiens
cattggagaagcactgcttgtggtagaagagctgtcaacaccatcaaacttcttgtaacgtgaagcaaagacagcttgcaaatgattgcactgttcgct

SEQ ID NO: 866682 - DNA, 99 bp, Homo sapiens; identical to SEQ ID NO: 799033

SEQ ID NO: 866683 - DNA, 98 bp, Homo sapiens
caaacagatctggcaaaatttggggatgtcactgattttatcagtcatttgttcatgcagctgggaactgtggggatatatgatttgccacatctgag

SEQ ID NO: 866684 - DNA, 98 bp, Homo sapiens
cagcgggctgcagcgcgccaaaaccgggacggacaagaccctggtgaaggaggtcgtacagagatgtatctctaaagaacgaatgattgcagagacct

SEQ ID NO: 866685 - DNA, 99 bp, Homo sapiens
gctgaggtcaagcgtcactgatgccagcagactagaaatagctgtaattgctactcaggaggctgaggcgggagaatcgcttgaacctgggagacggag

SEQ ID NO: 866686 - DNA, 98 bp, Homo sapiens
tcctggcggcgctgcggatccagggggtcggctgccaggtacaggatgaagatgagctggattcccacaccatggtgaagactagtgtggagagtgtg

SEQ ID NO: 866687 - DNA, 99 bp, Homo sapiens
tcggggaaatcatgaatgcaggcatcttacagactatttcaccttcaaacaggaatcaaacttagtgctacatcagactgtggagcgtattcatgtggg

SEQ ID NO: 866688 - DNA, 99 bp, Homo sapiens
cttcgagaagattagcaaaggtgctaatccagtggaaatcaggagagatttcttcggtgcagaaaaaaaatgaagatttaggacaggaggaaattgttc

SEQ ID NO: 866689 - DNA, 99 bp, Homo sapiens
tgcccctgattctcttcctgtgccagatgattagtgcactggaagtacctcttgatcaaacctccacagctgttgagaaaaaggagaaacctcttccaa

SEQ ID NO: 866690 - DNA, 150 bp, Homo sapiens
agcttcgtcaccccttgatggggcagcctcttcccctcatcacagactatgctgtaggccccggaacaggccccattcactcagcacagacattatcttttcccgggccacaaaccggtgaagaccccgtgcccacatgtggctgaacag

SEQ ID NO: 866691 - DNA, 99 bp, Homo sapiens
ctctccgtgggagccagcgagcctctctccctgatcttacgtgctcaaggtgctggagaatctggtaaaagcaccattgtgaagcagatgaggatcctg

SEQ ID NO: 866692 - DNA, 98 bp, Homo sapiens
ctcgtgagaaaagctttacgtctcattcaagaaaccgaagtgatttccagaggatttacactgtttatggctacaaatgatttgatgacggaactgca

SEQ ID NO: 866693 - DNA, 99 bp, Homo sapiens
aaacctgtagtgtatcacggagtgaatttggaccaaactgtaaaggaatttatcgtatttctaaagcaaggttttgctgttactgctcagtgtagtcac

SEQ ID NO: 866694 - DNA, 99 bp, Homo sapiens
tgaaagccccgataacgtcgtgtcgaccacagcttaacagagcgttccaaaaagaggactctccagctactttttattgcatcagtatgcagtggttta

SEQ ID NO: 866695 - DNA, 99 bp, Homo sapiens
ctcttcctcacttccctgtactctcatcgctctcggcctccgacacgggactgcccatgaattcaagaagcattttgaattgccaattttgaagggtcg

SEQ ID NO: 866696 - DNA, 98 bp, Homo sapiens
agccccagcaccagtcacctccagacttcatctgcagagagaaagagacgattacctgtgtggtttgccaaaggaagtgataccagcaagaaattaat

SEQ ID NO: 866697 - DNA, 99 bp, Homo sapiens
tcattaagttggagcagggagaggagctgtggataacgggaggtgaatttccatgtcaacatagtcctggccctccaggccctccaggtggtctgagaa

SEQ ID NO: 866698 - DNA, 99 bp, Homo sapiens
ctgaactacttcctcggtggctgcgccggaggcctgactctgggagcacgcaatgacagcgacacaccctcagatagcttggatagctcctgcagttcg

SEQ ID NO: 866699 - DNA, 99 bp, Homo sapiens
aaaattcctattgttgtgggaggaaccaattattacattgaatctctgctctggaaagttcttgtcaataccaaggaaacatgatgaaagtattgaggg

SEQ ID NO: 866700 - DNA, 99 bp, Homo sapiens
gagagagcagaggtgtttgtcagggcagggctgaacacaggtctaccagttgctgggcaaacctcagaatttgttaaccaagtgttagagaagactgca

SEQ ID NO: 866701 - DNA, 99 bp, Homo sapiens
ggctggtgggcggcttggggcgggagttgggagtgggggcactttcccccaacgcccggctgtgggagccgttcgagtcttctccgccagggcgctcct

SEQ ID NO: 866702 - DNA, 98 bp, Homo sapiens
tgggactttcttcgttgccatgaggaaagaattctccgagataacaacgaacttgatgcaagtgataggtttgccaaggtcagacctctcatcatccg

SEQ ID NO: 866703 - DNA, 99 bp, Homo sapiens
cgctggcgctctggccggtcagcaagcagctctaccgccgcctcaactgccgcctcgcctactcactctggagccttggaattaacgacctctggaaag

SEQ ID NO: 866704 - DNA, 99 bp, Homo sapiens
tcctgtccttcatgcagtctctcattggcttctttgagactgaaatggcagaactggatgctcccactaacctccagtttgtcaatgaaactgattcta

SEQ ID NO: 866705 - DNA, 98 bp, Homo sapiens
tggggttcggcgctatggaggagctcgatggcgagccaacagtcactaatctgggcccttccgtcctggctggagtggcggtgatggtcctcatggtg

SEQ ID NO: 866706 - DNA, 98 bp, Homo sapiens
aggactcgcctcctcagggttccctgtgctgccacttttcagccatggccacaaggtggattacaaagctgacgagtggctgatgaagaacatggatc

SEQ ID NO: 866707 - DNA, 98 bp, Homo sapiens
acgtgctcaacttggtttaggagagataatcctgggtaggagtcaatgaagacatcttagtcttaacaagttacagataatctctgactggcatgttt

SEQ ID NO: 866708 - DNA, 98 bp, Homo sapiens
attgcagccagcatcaacccagccacaggtggttgaccagattgacaccctgacctctgacctacagctggaggatgagatgactgacagctccaaaa

SEQ ID NO: 866709 - DNA, 99 bp, Homo sapiens
tcaaggacagctcgaagctggaggagttcatcaagaaccagaaggaccctggtgtccttgaccgcatgatgaagaaactggacaccaacagtgatggtc

SEQ ID NO: 866710 - DNA, 99 bp, Homo sapiens
atccagttttagacatagatcacgtaagcgtacacttgccaaatgatagacctttgcatctggcacctgagcaccaaggctgctgagtcccacgatgga

SEQ ID NO: 866711 - DNA, 98 bp, Homo sapiens
atcagaagaccaacatttgtgcctcagtggtatgtgcagcagatgaagagagggccagactgattggcatccaggatgggtacctatcactgctccag

SEQ ID NO: 866712 - DNA, 99 bp, Homo sapiens
tacaggaacctgctttctctcgatgaggataacatccctccagaagatgggagagtcccgtattctcagagtaaaagttgtttctggaattgatctcgc

SEQ ID NO: 866713 - DNA, 99 bp, Homo sapiens
aacactgccggggcccaaccacaagacgactcaataggaggaagatggtattgcatcgcttgactcttagagaaggctctggatgattgacagattatc

SEQ ID NO: 866714 - DNA, 99 bp, Homo sapiens
tagatgatccaagtcaccaagaaattactgtctcaagtgatacgatatttcagcagttgaatcagttgaattcacttcatcaagaaactatcatgaaat

SEQ ID NO: 866715 - DNA, 99 bp, Homo sapiens
caggcgaagctggccgagcaggctgagcgatacgacggacctctttgtttttagacatgaattggccataatgagactagcagcctttatgggcattac

SEQ ID NO: 866716 - DNA, 99 bp, Homo sapiens
atgacgtgatccttggtcccgagggcctgcacattttgttctggtgattagtggaggtcctgggagccccgttccaccttcaccaggtcttgtaagtag

SEQ ID NO: 866717 - DNA, 99 bp, Homo sapiens
gacatcagaaccacattttgggtttgaagaatcttctacatgtcactcagcctctgaagaagcttcgggttcagactcaggcagtcagtcggaaagtga

SEQ ID NO: 866718 - DNA, 99 bp, Homo sapiens
gaagaagagaccatccatatttccagaacctaaatcacagccacagcagcttcatcagggacaatacagatcatcaaatactgagcaaaatggagtaaa

SEQ ID NO: 866719 - DNA, 98 bp, Homo sapiens
tgaggctgcaacacgaggctgccgttcagcacccgtcgagctaagagttccctatttcattgatttgaaaaaaccacaggatcaaggtttgaatcaca

SEQ ID NO: 866720 - DNA, 99 bp, Homo sapiens
taggtcgatggtcggcggcgcccggatgggcagctgaggtacttcgtactggatttcgaggctggcatcctgcagtattttgtgaatgagcaaagcaaa

SEQ ID NO: 866721 - DNA, 98 bp, Homo sapiens
tgtacttctgtttctcagtttatctggatgttatcagatcacagaccatggtctcaggtacaaagggaatttcttgcagagctgtgttcagctgagag

SEQ ID NO: 866722 - DNA, 99 bp, Homo sapiens
gttaactgtggggtgctgaatggcaatggcacaaagttctctcgatcagggcatacatctttcttcgacaaagggttgcacagacagcagatggtgtgg

SEQ ID NO: 866723 - DNA, 99 bp, Homo sapiens
gggatcagaggtccctggagtttctgcttcctccagagccaggttatgatgtgattgctcaagcccaatctgggactgggaaaacggccacatttgcca

SEQ ID NO: 866724 - DNA, 99 bp, Homo sapiens
gtcaaacgctggaccattctgagtgctggtccactgaagccagccagctgcgtgatcatcaggcacacgatggacaggatgagcctggtgcggcagaag

SEQ ID NO: 866725 - DNA, 99 bp, Homo sapiens
ggggagcgcctcgtcgacatgagtgatgtggaggaaaacaacttcgagggcagaagtgaagggaatattttgattgcccaaagaaatgaaatgcagcag

SEQ ID NO: 866726 - DNA, 98 bp, Homo sapiens
tgacgccgggaccgggaccgccgccgccgccgccaccatggtcaccttccgcaaccctgtcattgagaggattcctcggctccgacggcagaagaaaa

SEQ ID NO: 866727 - DNA, 99 bp, Homo sapiens
actttatatcatcgcaaaactcctgggtcttgtcaacggaaaggggtccctatccagaccccaagagagcattcttggatctcttgcaagaaagaattt

SEQ ID NO: 866728 - DNA, 99 bp, Homo sapiens
tggatcctgctactcttcgttttcctttgaaaggccttttgccatatgataagattatggacgaagaactctgtttcgagaagctgaagaagccttaag

SEQ ID NO: 866729 - DNA, 101 bp, Homo sapiens
gcctccattgctgagaccagaaggcagctgaaggtagaggtagagtttctctaggtctgtaaacttctcaacttcttgctgtaatcccagctactctggag

SEQ ID NO: 866730 - DNA, 99 bp, Homo sapiens
gggaaatgtagtgaccagttacattctctgcactggggctagacaaagatgctgtggccactggtttccgcttcctcttgatgtcacgtgaacatggtg

SEQ ID NO: 866731 - DNA, 99 bp, Homo sapiens
cagagtggatggtataactataggatgcagtatgtcattccaatggtaactaaggacttctcatctgcatgtgctaaggccagactctccatgtatatc

SEQ ID NO: 866732 - DNA, 98 bp, Homo sapiens
aaattttatatttcagatttgtggaagctgagatctgtatctgtggacctgaatgttgatccctcgcttcagattgacatacctgatgcgctcagtga

SEQ ID NO: 866733 - DNA, 99 bp, Homo sapiens; identical to SEQ ID NO: 835211

SEQ ID NO: 866734 - DNA, 99 bp, Homo sapiens
gccgaggggcccagggaggacgcgaactgtagtgaaatgtagtattgccaagtcccaagccctctacagtgcccaaagagggctgaagacaaacaatgc

SEQ ID NO: 866735 - DNA, 99 bp, Homo sapiens
cctgctcctctacagaggtttccactggattctgcagaagtgatagcaatcagcggcagaatcttcagggggaggctggttggtcgttgaatgttctct

SEQ ID NO: 866736 - DNA, 99 bp, Homo sapiens
tcaggtaggctgcgttgaggatctttgctcttccatccgcctttgatcgtcttcctcttcagccatccaggccgtgtccaacaggagatcgacgacgtg

SEQ ID NO: 866737 - DNA, 98 bp, Homo sapiens
ctcccgcgggaggcccggcgagagaaggacccggtcaaaatgcagatcttcgtgaaaacccttaccggcaagaccatcacccttgaggtggagcccag

SEQ ID NO: 866738 - DNA, 99 bp, Homo sapiens
tttcctatagaggataccccattggttccagaaagaccacagcaagattctttcattcgtctcctcctagcctgggggaccaggctcgaactgaccctg

SEQ ID NO: 866739 - DNA, 98 bp, Homo sapiens
ccagatcggaggaccggtaccggaatcccaaagatttggtgcttccagatgtgagttatcaggtggaatccagtgaggaggatcagtctcagactatg

SEQ ID NO: 866740 - DNA, 99 bp, Homo sapiens
tgtcaaacggctcagcaggcactggggctggctactggttagtcatgaaatcggcaaaattccagatgagctctccaaccacgtattttctgagttttt

SEQ ID NO: 866741 - DNA, 99 bp, Homo sapiens
ccgccttctctgtcagctctttccccgtcagcatcccagccgtgctcacggatccaaggattctgtagctacaatgttgtcaagactttttcgaatgca

SEQ ID NO: 866742 - DNA, 99 bp, Homo sapiens
agtcggcttctctacgcagaacccgggagtaggagactcagaatcgaatctcttctccctccccttcttggtgttggggatgtcctttgcactgaccct

SEQ ID NO: 866743 - DNA, 99 bp, Homo sapiens
tttggaaacagtgaaaaacaacagctaacgttgcaaggaaaattgttagacatgtattcaggataacctgaggcgtattatcgctggcaaaacgcgatg

SEQ ID NO: 866744 - DNA, 99 bp, Homo sapiens
actaaactttctgagcttcatgacaatcaggacggtcttgtgaaggccttacgaccggatatgggctataatacattagccaactttcgaatagaaaag

SEQ ID NO: 866745 - DNA, 99 bp, Homo sapiens
tctgacattttgccttctgattctaactgcaaaggaactagaggctgctatccagccagatactagcctggtgtcagtcatgactgtgaacaatgagat

SEQ ID NO: 866746 - DNA, 99 bp, Homo sapiens
cggggccaggcttggaaggcttcgaagaggacggagctgcgctggggccggaggcgggcgaggaaggagcatcagatccatgctgctgctgactcggag

SEQ ID NO: 866747 - DNA, 99 bp, Homo sapiens
tggagaccagcatctctgcttgctcaccagacaacatctctagtatgaagtgctcctttgtgtacaagatcatgatgatccagccattgatgtatgtaa

SEQ ID NO: 866748 - DNA, 99 bp, Homo sapiens
gtcaggatccttggaagtcatccaggatgatgaggtggtggctattttaggcctggagctgctgaagactgctattgggaaagctggctacactgataa

SEQ ID NO: 866749 - DNA, 98 bp, Homo sapiens
gaggtgccagcccgcgaatccggccggagccattggaaaagaagtttgttcgagtttcaggagaagcaactattggacatgtagaaaaattcctcaga

SEQ ID NO: 866750 - DNA, 99 bp, Homo sapiens
agaaagtgagaatgagaatgagttggataactctctaaactctcagtctaacacgaatacagacagaagcggagggtgctgctcaaccaaacaactcat

SEQ ID NO: 866751 - DNA, 99 bp, Homo sapiens
tggatgtgaaagatcctaactatgatgatgaccagccttacccctcgtgaattcaactcttacggagctcgaagaggtaatgatgctgtaatgacaaga

SEQ ID NO: 866752 - DNA, 98 bp, Homo sapiens
cgtggcagctgccatgcatgattatgatcacccagggaggacaaatgcatttctagtggctacaaatgcccctcagggtctcactgtgccacccagct

SEQ ID NO: 866753 - DNA, 100 bp, Homo sapiens
gggtcccgccagcgccgtgacgtggactacagtgacgccctcagccactgcttctccgtgagggcgtcactgtagtccacgtcacggcgctggcgggacc

SEQ ID NO: 866754 - DNA, 99 bp, Homo sapiens
aaggagtccaaggaaatgcagagcataatttgtgagcagagcaaaatccaattaggaagaaaaagtggcttttgttaactggataaacaaagccctgga

SEQ ID NO: 866755 - DNA, 99 bp, Homo sapiens
ttgtctatcttcagacacaaaagggttgccatagtttctaaatcttttgaaggaaaaactgatcgcacagaagagtggtatggaacccagtacaaacaa

SEQ ID NO: 866756 - DNA, 98 bp, Homo sapiens
ggcggcggcagcagcggcagcggcaagcacccgattattggagccggaattggtggcacttcagcagcctattacctgcggcagaaatttgggaaaga

SEQ ID NO: 866757 - DNA, 98 bp, Homo sapiens
gggaataataagtcacaaagggaggagctggactccatcctcttcctttttgaagctttcctcggagacgggtggcatggggagcagctagaacaatg

SEQ ID NO: 866758 - DNA, 99 bp, Homo sapiens
ggtattgctgcggctggtgcgtcgtcgctctagtggtggtatctccatcaaggcttctgcaaatatggacctcatgagggctgacatgggaggagctgc

SEQ ID NO: 866759 - DNA, 99 bp, Homo sapiens
gcagaggaggagcgcagcccggcctcggaggagttggatttgtcttctagttctcagatgtctcccctttccttatatggtgaaaactctaatagtctc

SEQ ID NO: 866760 - DNA, 101 bp, Homo sapiens
ccgtgggcgtaggaccctccgagccagacacttctgagaaattcatcaggctgtgaagcgcgccgtgatgaatatcgaacagagtttaccacagctttgca

SEQ ID NO: 866761 - DNA, 98 bp, Homo sapiens
gagagtgtgctggtgcctgtcggagaacatcgccaagcagcaacagctggcagcatcacccccggacagcaagttacagaatgtctgaaggggacagt

SEQ ID NO: 866762 - DNA, 99 bp, Homo sapiens
gatgataatcacagcgggactcttggcctgtccctcacatccgatgcaccctttttgtcagattatcaggatgaggggcctattccctggtggattcca

SEQ ID NO: 866763 - DNA, 99 bp, Homo sapiens
ctgtgaagcaaattcgtcagatcaaagaacaaggtatgcgccaggggaacgaccatggcactcagtaccgctcggccatctacccgacctctgccaagc

SEQ ID NO: 866764 - DNA, 108 bp, Homo sapiens
cgtcgccatcttggatccgcgggacaagaaaattcatgcggagctctttctgagatgaagagaattctcaatgtcaagatttgaacaagaagagaatggaatacacaa

SEQ ID NO: 866765 - DNA, 99 bp, Homo sapiens
gctcttgcaggttattcaagaaaaagaaaagaaaggcaaagaaaatgatatggaaatggaaattaaatgggttccagctttaccgatttgttacaactc

SEQ ID NO: 866766 - DNA, 99 bp, Homo sapiens
acaccgccctctgcagaggcccactgggctgtgaggacaatgtatttcaaaggcattgaagcagggaaggttccctattttcctcatgcagatactatc

SEQ ID NO: 866767 - DNA, 99 bp, Homo sapiens
acagccaccccagcagaggccttatggatatgaccagcatcaaggcatgccatgggttgcctctcataaatggccaaagctgtgacccttatgcaacag

SEQ ID NO: 866768 - DNA, 99 bp, Homo sapiens
gtgagtgctaaatacagaggagccttttgtgaagccaagatcaagacagcaaaaagacttgtcaaagtcaaggtataatgggtctctcccaaatggcga

SEQ ID NO: 866769 - DNA, 99 bp, Homo sapiens
atggatggagtcacgaccaggaccttctgtgggactccagattatatcgccccagagagaaccatggagtctggcagtaccgccgccagtgaggaggca

SEQ ID NO: 866770 - DNA, 98 bp, Homo sapiens
gtgagccatgttcaggcaccctttacaagtgcaacacatttggagcatgtgaggcccatgtttaaggtgggctggatgacactttgcacacaattatt

SEQ ID NO: 866771 - DNA, 99 bp, Homo sapiens
ttactttgtgaaggatcctaagagggtcttatcgaatgttacttagcctccaacagtattcgagaagcaatggtaatggctaacaacgtttacaaaact

SEQ ID NO: 866772 - DNA, 99 bp, Homo sapiens
ccagcccagcttctatggggctcttctctccgcagctgctcctcttttcccctggaaacctctagcagtgatgctggactccacagatgtcaacctctg

SEQ ID NO: 866773 - DNA, 99 bp, Homo sapiens
gcagggagtaaccctacccctcctacattgctcatcggatcacccctaaggaaatgggaagacatgatgacctttggtccttattctacatgttggtgg

SEQ ID NO: 866774 - DNA, 99 bp, Homo sapiens
tgaggcctccccagccatgtggaactacaggaattatttccctctatgattgtatttttaagaggcgcctagattatgatcagaagttgcaccgagatg

SEQ ID NO: 866775 - DNA, 99 bp, Homo sapiens
ggatagtgaaagccaatgaccgtgaatataatgaaaagttccagtatgcggtcagactatgatgactggagaccgtctctggccagtttgcttcaaccc

SEQ ID NO: 866776 - DNA, 99 bp, Homo sapiens
gaaaaactggagagcttcatcaaaaatagtgatagctttgataagatctccccaataatatgatttaccaagtcgccattaagtctcttcctcaagact

SEQ ID NO: 866777 - DNA, 99 bp, Homo sapiens
ctcctgcctcagcctcccgagtaggtacgaggtctgcagcacttccgtggatggctcggaatgtgtcacgcttccagtctacttcagggagaggaagtc

SEQ ID NO: 866778 - DNA, 98 bp, Homo sapiens
ccccatcccggaggtctccgccggctcccggacaacgactgaaagacctttcattcagaagctgtttcgtcctgtggctgcagatggacagttgcaca

SEQ ID NO: 866779 - DNA, 99 bp, Homo sapiens
ggaaccaaaaattgagcatgtaatgcaacccttgcttcatcaaccatcagataaccagaaaatttaccaggatttattgacagagtctcactctgtcac

SEQ ID NO: 866780 - DNA, 99 bp, Homo sapiens
gtcaatcaagtctacactgttcaaataagacatatctgaagagatggattaagaatgctttggattaaggattgtggagcacatttcaatcattttagg

SEQ ID NO: 866781 - DNA, 99 bp, Homo sapiens
aacttttccaagaacagtgaggtcccatgaagctgaggtcttgaagcagctggctgagaaacgagagcacgagaaagaagtgcttcagaaggcaataga

SEQ ID NO: 866782 - DNA, 99 bp, Homo sapiens
gccggctgcggtgtgagaatggagtgggcaggaaagcagcgggactttcagggattaaaatatccaggcatgccaaactttgcgccagatgaaccagga

SEQ ID NO: 866783 - DNA, 99 bp, Homo sapiens
ggagccatggactgcagcctcgtgcggacgctcgtgcacagatacgtcttcagaactactagcagataatttggggggacttcatattcagaagtctat

SEQ ID NO: 866784 - DNA, 99 bp, Homo sapiens
ttcttggacctgcggtgctatagagcaggcatctaataggattcaggaatcaaagaatcagtgtactcaggtggtacaggaaagagagagccttctggt

SEQ ID NO: 866785 - DNA, 99 bp, Homo sapiens
tgaactgtcaggcgggaaaacagtattccactgaactgaagaaactctactgccaaattgcaaagacatgccccatccagatcaaggtgatgaccccac

SEQ ID NO: 866786 - DNA, 99 bp, Homo sapiens
ctcctactcccagatgcatccgtgtcaaagagtcaagtaccattggccaggatcaaacgcttatggaacgtgatacagagggtggtgcagcagaaatta

SEQ ID NO: 866787 - DNA, 99 bp, Homo sapiens
cctttttgtcagattatcaggatgagggaatacaaacagaagcttgcacgagtaacccaggtccgcaaggaactgaaatcccatattcagagcttgcca

SEQ ID NO: 866788 - DNA, 98 bp, Homo sapiens
ggaccttccggagcttctcagaagacagagggttttcttttgaggttaaagccgagccagccaaaatagaagctttccgagcttcactttccaagcta

SEQ ID NO: 866789 - DNA, 99 bp, Homo sapiens
tttatggtggtggagtctgcccaggctgtgtggttggaataaaaacagggttgaatgagttccagaaagcagggttctcaacctcgtggacagcaatct

SEQ ID NO: 866790 - DNA, 98 bp, Homo sapiens
gtgacctgtatcctaatggtgtatttcccaaaggacaagaatgcgaatacccacccacacaagatggcaaaaaagaaattcctgtgtttaactttacc

SEQ ID NO: 866791 - DNA, 98 bp, Homo sapiens
taaccaccatcttgcaaacctatatcagaagaaagccctcagaatccattctgtggaaggtgacctcaggagaaaatcagctggacaggaggaatgga

SEQ ID NO: 866792 - DNA, 99 bp, Homo sapiens
cgtgagatacaagccatccccagaaaggtttccttaatgacaacaaaaaagggagtaatcctacccactgtaagagtcatgactcttgattgcagctga

SEQ ID NO: 866793 - DNA, 98 bp, Homo sapiens
tccatgcgcagtcatgagtcgcttcaagtttatcgggattatcttgaacacataacctccattggccccaggactacaggaagtccagaaaatgaaat

SEQ ID NO: 866794 - DNA, 99 bp, Homo sapiens
ttaccaacgccatcaccgacctcatcagtgagctgtccctgctggaggagcgcttccggacctgcgaccgcatcaagcagtccgccagcggaaccaagc

SEQ ID NO: 866795 - DNA, 99 bp, Homo sapiens
tcacctcctcccctacctgaaagaactcctgaatcgtttgtgttagcaagtgaacatagtttttatgtgatagtcaaaaggagctggatgagttgctaa

SEQ ID NO: 866796 - DNA, 99 bp, Homo sapiens
tgcattgagcttgggtcaggacaattccatttggggaccagagatggacggtcactcagcctatggagattttcagctgaactctcatctctcaacact

SEQ ID NO: 866797 - DNA, 99 bp, Homo sapiens
atgaagatggcccttccatgtctgtgaatttcacctcaccagggagaagtgagtcatctcattcccctccgtggatcagaggacttggactagatagaa

SEQ ID NO: 866798 - DNA, 99 bp, Homo sapiens
acaaagatggcggcagggaccagcagttactgggaagggattccagcagaagttcaccttccacagcaaggagattgtggccatcagctgctcgtggtg

SEQ ID NO: 866799 - DNA, 131 bp, Homo sapiens
ctggaagcaattcaccatctccatgaggagtggctcatcaaaggcagccttttccccatggcagcccctgttctgttgaagagggggaggcctcagacttctcgctggcctgggattcctccgtgacagca

SEQ ID NO: 866800 - DNA, 99 bp, Homo sapiens
cagaagtccaggttcccatgcagggagaaatgcctgctgcctctccagttggctttggaatccaagaatgtgaagctggcccaacatgctttggcaggg

SEQ ID NO: 866801 - DNA, 99 bp, Homo sapiens
gggagtgaggaggagagtgaaaaatgcgccatttccaatccagaggaagaccttctagaagaagtgatgggtgggagagtgctgacatactatgcaaag

SEQ ID NO: 866802 - DNA, 152 bp, Homo sapiens
ggcaggtcctagaagtgccttgaggttaaagaggctgaagaatccgtaggtttcggattcttcagcctctttaacctcaaggcacttctaggacctgcctcttctcaccaagatgaactcactggtttcttggcagctactgcttttcctct

SEQ ID NO: 866803 - DNA, 99 bp, Homo sapiens
ccgaagaccaccattcttaaatccctgaaaatgggcagctggggctcccacagtgatgacatcgtagagagcatctgtaatctcagctactggggaggc

SEQ ID NO: 866804 - DNA, 99 bp, Homo sapiens
tgctcctctcctgggcggcggggatgggaggtttttagaacttcagccataaaaatgggcagaattttccttgatcatatcggtggtacccgtctgttt

SEQ ID NO: 866805 - DNA, 99 bp, Homo sapiens
cttgacgaggctgcggtgtctgctgctattctccgagcttcgcaatgttgctggatttgtgcgactcggtgaaggatgatgcccggagggtgatctcga

SEQ ID NO: 866806 - DNA, 99 bp, Homo sapiens
caaggcaagactggcacccagcacagcaggttaagacatcagaattttatagatactcccgacagctccgttacgaagttgaccaagcattgaattact

SEQ ID NO: 866807 - DNA, 99 bp, Homo sapiens
ttttaactgaagatagtgcctttcagccctaccagtatatgactgctgctgctcctatgcaagggacctacattcctcagtacacgcctgtgcctccga

SEQ ID NO: 866808 - DNA, 98 bp, Homo sapiens
gaggaaggccccgagatcccaggcactgagtgactgcatactgttgaaatcacaaagattagacacctttttagataggtgttcttcagcaccactga

SEQ ID NO: 866809 - DNA, 99 bp, Homo sapiens
gtgatatcagctttagggtttggattctctgctgctgctgcccttcccactctctagtgatgactcagccagagtgaattaataagatggtaaaagaat

SEQ ID NO: 866810 - DNA, 99 bp, Homo sapiens
ctatcactgtattccgcttggccatggtatctgctggttcaacttgacttctatctgcaatatctatatggacaatttcaacagttttccatgtgtttg

SEQ ID NO: 866811 - DNA, 99 bp, Homo sapiens
ctgagctagagggtgaagctggcggagcaggaggatgggcgtgacaatgtcagtgcctactgcctgcatattgctgaggatgatggggaggtggacacc

SEQ ID NO: 866812 - DNA, 99 bp, Homo sapiens
gaaattacactgtcatccttaccaatcccatttcaaaggagaagcagagccatgtggtctctctggttgtgtatgcttctgcagagatctgcccgagct

SEQ ID NO: 866813 - DNA, 99 bp, Homo sapiens
aaaaatgcacaattctatctcttgggcaatcttcacggggctggctgctctgtgtctcttccaagagtgtgaacatggctacgcctcttcattcccgtc

SEQ ID NO: 866814 - DNA, 99 bp, Homo sapiens
aacttcctgttctgatagcgtggaagtcaaagaagtttggcagagatcacggagctaattcatattgctctccttgtacatcgtgggatagtaaattta

SEQ ID NO: 866815 - DNA, 99 bp, Homo sapiens
gcaacgccaaatggagatgttttgatccgagaccttaattttgaataggagagaagtttgctgaggaatgccttcaagcacaaagtgatgaatgactgc

SEQ ID NO: 866816 - DNA, 99 bp, Homo sapiens
ttgcagactacaagtggcagaagcatagaaataaaagatgaactaaagaaaaagaagaatctcaaccgatctggtgccgacgccaccgccgagcccatg

SEQ ID NO: 866817 - DNA, 140 bp, Homo sapiens
catggatgggctgcctccaggtgacagcaatcagctggcctggtttgatactgtggatccacagacatcttggcttattttgctatgttgttttcagtcgtgaaaaacctaaaggatgatttacaggtcagtatcaaacc

SEQ ID NO: 866818 - DNA, 99 bp, Homo sapiens
cggagagaggatcaggtgttttcaggttaaccgtcagatgatagtatttctgctgcaagtacttctgatgttcaagatcgcctgtcagctcttgagtca

SEQ ID NO: 866819 - DNA, 99 bp, Homo sapiens
acccgaagaagaaaggattcgttacagccagagattgacttttttgtataacgagctctatgtctacaataccagaaaggacacctggaccaaagttga

SEQ ID NO: 866820 - DNA, 99 bp, Homo sapiens
cggcgccaatgtgaagaagtggcccgggcgctgggcaaggaaagcctccgggaggtacaactggaagagctagagggcctctactacgtggacagtgaa

SEQ ID NO: 866821 - DNA, 99 bp, Homo sapiens
acttacaagaggcaaggcaagcaaaaggatatgacaatccgtccttccttagaaagctgaaagctgataagcttgaaatccatggcccaaaatgactct

SEQ ID NO: 866822 - DNA, 98 bp, Homo sapiens
aaaaaaccttttctgggttgagcctagatgcaccatactggacataccttttatgtgcactgggactttttatttaccagtcactggatgctattgat

SEQ ID NO: 866823 - DNA, 98 bp, Homo sapiens
aaaaaatctgaaagtgataaaataatatgggaaaaacatcaaattcttgaccaatctaggattgcaggcctaagtctacctcttcctcccaaaaaatt

SEQ ID NO: 866824 - DNA, 99 bp, Homo sapiens
ttcagcttcgggacaagtacatgtttgctacaaaggtggtgaatacagattctgttcatcttgctctgaaattaaataattctgaactcatggggagaa

SEQ ID NO: 866825 - DNA, 99 bp, Homo sapiens
gggggcggcagccagctcgcaggtcttaaaatccttgcacgtttgatgactgccaaattcttgcatacagaaattcgagaaaaaggcggtgcttatggt

SEQ ID NO: 866826 - DNA, 99 bp, Homo sapiens
cagagtgggacctagatatcaagcagacattccagaaatgctgttagaaggttcggctttccagtttggcagcagcactacaaatttcaacttcacaaa

SEQ ID NO: 866827 - DNA, 99 bp, Homo sapiens
ctgcagaaatcatttcggctctcatgttcctccatgataaaggaatcatctatagagatttaccgcattgtttctcagaagcaaatgtcagacagacgc

SEQ ID NO: 866828 - DNA, 99 bp, Homo sapiens
cttacaccgcccagcccactcaaggatatgcacagaccacccagcttgaactcagtgaaaatagaatctttggaggtctggacatgttagctgaaaaac

SEQ ID NO: 866829 - DNA, 99 bp, Homo sapiens
ggtcttcaagctcactgccgacttcagggaggatccggacccccgcaaggtcaacctgggagtgggagaggtcctgctgtactagccaccaaagcagct

SEQ ID NO: 866830 - DNA, 99 bp, Homo sapiens
ggcccaggtgcgccacgagttccaggagaccaaggaccagctcaccacggagaacatcatccttgatgtggaagatgtgaaatttgtcatcaattatga

SEQ ID NO: 866831 - DNA, 99 bp, Homo sapiens
aagaaccatggagactggaggaagaattcccaagccagagctttccagcctgagagacactctcgtaagttacatgcaaactaaagaaagtgaaattct

SEQ ID NO: 866832 - DNA, 98 bp, Homo sapiens
agcagagggcgtcgccaagcaaagccaggctcaaggaggccaaggcagaggcttcctcaggagaccatcccactgacacagagatgaaggaggagcag

SEQ ID NO: 866833 - DNA, 99 bp, Homo sapiens
ctgtccgagggccaccaggccgccgggggcctgctgcgcccgggtgacctgagcatctctgcagaccgcctgagtgagaagcgctctcccaacgacttt

SEQ ID NO: 866834 - DNA, 99 bp, Homo sapiens
acgggatattctcttctgtgctgtcaaggagtgaagtcaccctgctgagaaatgaagtggcacagctgaaacagcttcttctggctcataaagattgcc

SEQ ID NO: 866835 - DNA, 99 bp, Homo sapiens
ctgggcgacagagtgaaactccatcccaacagtggcagcccgggcatgctgcctcaccaatccatggtgcttcttcctgctccagtctgaggatcacat

SEQ ID NO: 866836 - DNA, 99 bp, Homo sapiens
ggggtatgtgactaaggtgctggggacaggagagaatgggacagacttctctcacacattgtgtcctgcctccctggctcggagggtcctacgcccacg

SEQ ID NO: 866837 - DNA, 98 bp, Homo sapiens
ggattcatacctgctgatgtggggactgctcacgttcatcatggtgcctggctgccaggcagacagcccacctgaggatattgaccataaggactcat

SEQ ID NO: 866838 - DNA, 99 bp, Homo sapiens
tgacgaccttagtgctggataatggagcttacaacgccaaaatcggttacagccatgaaaatgtgtcgtgttgctctcttgccattcgtggatgagcga

SEQ ID NO: 866839 - DNA, 99 bp, Homo sapiens
aaaatgatggcctttttggaaaagagtcaggaacaagaaaatcatgctacattagagccctttttgattatgacaagactaaagacagtgggcttccca

SEQ ID NO: 866840 - DNA, 99 bp, Homo sapiens
tgtacagagggtgcccagcagggtcttctacagtggctgttgaagaggctgaagagttatggtgaatggttgcatggatttgaaaaaaaggcaaaagaa

SEQ ID NO: 866841 - DNA, 99 bp, Homo sapiens
gccatttagaaccacagttgatatgcctccaagatctaaactgaagatttatctatgcagaaaactacaagaacagccacttgcttccaaggactttgt

SEQ ID NO: 866842 - DNA, 99 bp, Homo sapiens
cgctatgccctgctgtagtcacaggagctgtagagaggaccccggtacatctgaaagccgggaaatgtttctccttggaccaagatgactgatggaaaa

SEQ ID NO: 866843 - DNA, 99 bp, Homo sapiens
tctaccctggaggagattctggggcagtatcaacggagtctccgggatatttgatttaatggatgccaaagcacgtgctgattgcatcaaagaaataga

SEQ ID NO: 866844 - DNA, 115 bp, Homo sapiens
gggagcggcgcgtcatgtacaccatcaccaaggggcccagcaagctgccttctggtttggggtgactgtgcggcgctgcgcgaccagcttgctgggccccttggtgatggtgtac

SEQ ID NO: 866845 - DNA, 99 bp, Homo sapiens
ggactgatttcaaagggacacccactaggcgctacaggatcagtgaatgcttgtgaaaagacctcatttatgtttctgcggcaagagttgcctgtcaga

SEQ ID NO: 866846 - DNA, 99 bp, Homo sapiens
ttgggttcagccagcaattgcccaaacccaaagtgtggaggtctgcaattaaggccttacgtcctggagggatacttgtatactctacatgcacgcttt

SEQ ID NO: 866847 - DNA, 99 bp, Homo sapiens
ccagcatgcgggattccctcattgacagctctgtgacttcctggagactcacttcctagatgaggaagtgaagcttatcaagaagatgggtgaccacct

SEQ ID NO: 866848 - DNA, 99 bp, Homo sapiens
ggggtgtcttccggggagcccgagccacgccgggagtcattcatccatgttgtgaatgtctttgaccgttcagcccgatatctgagctcaaaccgtagt

SEQ ID NO: 866849 - DNA, 99 bp, Homo sapiens
agtgggagttcttcaaagagagagtttgaccatgaaatggaggctcagggggtgaagggactgatcaagatcattcagcaataaatgctggaaccagga

SEQ ID NO: 866850 - DNA, 99 bp, Homo sapiens
tgcacaggctacatcaaggcctggcccccagcagcctcggaatgctgctcgaataagtgaaaagagaaaagagtatatggatgcctgtggagaagcaaa

SEQ ID NO: 866851 - DNA, 99 bp, Homo sapiens
gtgaagaagcaggtgcttatgatggacctaggactgctgcaaaatgcattgatcactacaccaaacaatgtgtggaaaatgcagatttgcctgaaggag

SEQ ID NO: 866852 - DNA, 99 bp, Homo sapiens
acaaaggaggatttagttcaaatttgtggtgcagccgatggaattcggctctataattcactgaagtcaaggtggtaagttttcttcatacagttcttt

SEQ ID NO: 866853 - DNA, 99 bp, Homo sapiens
ggaagtgtctgtagcgtccctccctctcaaccacaataacaggcggagggtcggcgtagttggttaccacagagaagcgcttcctcaaagacagtttgt

SEQ ID NO: 866854 - DNA, 99 bp, Homo sapiens
gctcctctcatattccatcgccagtttcagcaatttctacaatatcaccaggaactatgtctttagctttaatccgctgcacactctttctgtcctgtc

SEQ ID NO: 866855 - DNA, 99 bp, Homo sapiens
ccaggagaaacagaacaccgtgtgcacctgccatgcaggtttctttctaagagaaaacgagtgtgtctcctgtagtaaactaagaaaaatggctttgtc

SEQ ID NO: 866856 - DNA, 99 bp, Homo sapiens
agattctgctggtatacagctacatccaggagagaatgctgacagtcctgcaggagttccatctggaatatgacaaattagaagaacggcctcacctgc

SEQ ID NO: 866857 - DNA, 99 bp, Homo sapiens
cataccaattcttgaatgacatccgagcgaaagagaaagagaatgtgaaagatgttgcagaagtgttccagaagtggctgaagatagaaggaaaaaagt

SEQ ID NO: 866858 - DNA, 99 bp, Homo sapiens
ttcgaaaaagtgcctgaagtgacacaacacatgttttcttctggtatctggctaaaacaaatttacatgtattggagaccagaccagaagcccttctga

SEQ ID NO: 866859 - DNA, 99 bp, Homo sapiens
aagagcctttgcggattctcagtaaataccaccggttcatttcctttactctctatctaataggggagagaatgtagaagatgccttccttgaggctgc

SEQ ID NO: 866860 - DNA, 99 bp, Homo sapiens
tgacttggtttagagaagggcacaagattattccaagcaacagaatccactgtagtctgcagatcaaagctctggcgaaaatccatgcctttgttcaag

SEQ ID NO: 866861 - DNA, 99 bp, Homo sapiens
atcaactacctgcactttggggagcctaagtcctggattctttctactaatccagatacttgttgaagtgctgactagtttcttggggaaagatgtcaa

SEQ ID NO: 866862 - DNA, 98 bp, Homo sapiens
cctggcggacgcaggagcgatggcagcgaccgatatagctcgccaggtggctggtccctgcagacggcttcccatttttatgaccggatgctgggaag

SEQ ID NO: 866863 - DNA, 102 bp, Homo sapiens
gtgggggccaggactgcagtgggagctgtcagtgttttcctgagaaaggagcgagagcatttgtaaaggatgttcatgaagattcaataacagttgcatttg

SEQ ID NO: 866864 - DNA, 99 bp, Homo sapiens
tgtggcacccgaaaatccaaccttctgttgaattttcagggcggatttgtgaatctcacatttaccaagattgcagcaggagagaagattcctttgagc

SEQ ID NO: 866865 - DNA, 99 bp, Homo sapiens
aggcatctctgggtgggcaacttacccgagaacgtgcgggaagagaagatcatcgagcatttcaaacgacgaaggccttcatccaccacgagctgctgg

SEQ ID NO: 866866 - DNA, 99 bp, Homo sapiens
gagtcatttccttcgtacccacagtgcttcatgagaggtctggacaaagtgccaaaggatcttccccctgacacaactctgctagacctgcaaaacaac

SEQ ID NO: 866867 - DNA, 100 bp, Homo sapiens
gtgtggagcacacattgaatgggccaaggaaaaatcgagaaacctgaaagacattctttctgctcgatttttccttggcccattcaatgtgtgctccaca

SEQ ID NO: 866868 - DNA, 100 bp, Homo sapiens
aagaggggatgcacctgtgcgccctgcagaactataacaccactcacaacaggtgcgtaggtcctggcttgaggaacctgagacaagtctttcctcttct

SEQ ID NO: 866869 - DNA, 98 bp, Homo sapiens
ttttggggaggctgctgcgacgaagagttccctcagcctccggccttgtgtgtccgactcggcagcagtgattatcctcttgacttgaaccacagtga

SEQ ID NO: 866870 - DNA, 98 bp, Homo sapiens
gggatcgtgaccgagaccgtgaccgagagcgtgaccgagagcgcgaatatcgtcatcgttagaagacctttttggcatctaacatggtgaagaaagga

SEQ ID NO: 866871 - DNA, 99 bp, Homo sapiens
ctatgaataccgcttcctggagttcacgactctgagtgctggccataggaaaaggatacagagtagagtttcatgaacctgaaacttggtggaaatttg

SEQ ID NO: 866872 - DNA, 99 bp, Homo sapiens
gccgagagccagagagatgtcggatttcgacagtaacccgtttgccgacccggatctcaacaatcccttcaagatgtgtcttgctgaatcagggctctc

SEQ ID NO: 866873 - DNA, 99 bp, Homo sapiens
cacaggttttccagtcgcactgcgggggagaagcactacacctaatcctcttacctgctacaggcaatgtggcagagaattctccacctgggacttcag

SEQ ID NO: 866874 - DNA, 98 bp, Homo sapiens
tcgtggattgctttgtctgaagatcctctgggtgatcatggttcagcgctttagcctcaggaggcagctatccaaggatggtttgctccagcacctgc

SEQ ID NO: 866875 - DNA, 98 bp, Homo sapiens
gcaaagataagaagagaaaaagagaagatgaagaaacccagcttgatatgttgatatgaatgccacaatacgaaggattgaccagttaaccaacatct

SEQ ID NO: 866876 - DNA, 98 bp, Homo sapiens
agctccgagggcagccattctatgctgtggaaaagaaagcatactgcgagccctgctacattggcactgtgtttagtcttgagtcagaggaggaggaa

SEQ ID NO: 866877 - DNA, 99 bp, Homo sapiens
gcgagattccgtgggcgtaggaccctctgagccagtatttggcatgatcattactatcggccagtctatcgtgtatgtgatgaccgggatgtatgggga

SEQ ID NO: 866878 - DNA, 99 bp, Homo sapiens
caaaccgtggctgctcgataaatcagacagaacagttaatcctcaatttaagcctgatctaacccctagaaacagagtgttgcggagataggaacatgg

SEQ ID NO: 866879 - DNA, 99 bp, Homo sapiens
ggcaagggcaacttcgcggtggtcaagcgggccacgcacctcgtcaccaaggccaagcacaacagatttgttttggactgtaaagacaaagagcctgat

SEQ ID NO: 866880 - DNA, 99 bp, Homo sapiens
attaaggaaggaatggagatccccaatttgagagattccttggttaaaattctgcaagactacaatttgcaaggaacttaggctgcggaactatgtccc

SEQ ID NO: 866881 - DNA, 99 bp, Homo sapiens
ccagaccagcctggccaatatggacttagcactcaggcctgtgaatcaggagatacaaagacctccaaaaaaggaccagttcctcggatgtgccccctc

SEQ ID NO: 866882 - DNA, 99 bp, Homo sapiens
aaagagtctccgcggtggaggtctgcgttgctcttgcttttcctcgctggggtgtacggagagctggaggtgtttcagaaagatggggaacgaaaaatt

SEQ ID NO: 866883 - DNA, 98 bp, Homo sapiens
tcaagtcctggctcagcaagactctcgagcccatgccgaaatagaactatttgtgaacagacttgattcagtggaatcagttcttccttatgaataca

SEQ ID NO: 866884 - DNA, 99 bp, Homo sapiens
gttcaaaccggcttgatgaagaacacaggctaattgccaggtatgcggcaaggctggcagcagagtcctcttcgtctaaaacatcggttgtgaagagaa

SEQ ID NO: 866885 - DNA, 99 bp, Homo sapiens
ggaagaacatgcatatttgggtccaactgtgaagccagatgataagctggttgtcttcttgcctgccctgtgtcgtaaaatgggggtcccttactgcat

SEQ ID NO: 866886 - DNA, 98 bp, Homo sapiens
gctgacggcggagctgatcgagcaggcggcgcagtacaccaacgcggtgcgcgaccgggagctggacctccgggtaccttccactggaagaatctcaa

SEQ ID NO: 866887 - DNA, 99 bp, Homo sapiens
gcggggctggtgctggtgggcctgggcgtggccaccgtcaaggccaacatcacgcccttcggcgccgaccagaggctaagaatattgtacacaaagatt

SEQ ID NO: 866888 - DNA, 99 bp, Homo sapiens
cgccctggagctgctagagatccggaagcacagccccgaggtgtgcgaagccaccaagttggcgtgcagtggtgtgatctcagctcattgcaacctctg

SEQ ID NO: 866889 - DNA, 98 bp, Homo sapiens
agctgtggagggtgcaggaggaaggcatggactcggagattggctgcctcatccgcttctatgcagctgttccaggagctctgagtcctttggccatt

SEQ ID NO: 866890 - DNA, 99 bp, Homo sapiens
caccagcgatggcagacagaccacatataccacgaggatccatctcgtctgctccaggggcaggctgtttctccacagacactacccaaagcagtcctt

SEQ ID NO: 866891 - DNA, 99 bp, Homo sapiens
ggcaagacgggttcagttcgtcatggggctgtttggaaagacccaggagaagccgcccaaagaactgcaatgccaagtgagtacacctatgtgaaactg

SEQ ID NO: 866892 - DNA, 98 bp, Homo sapiens
catcaagcaaagggactaccaccagcaggattccaatgagagagccatccccctcctcagatctgacatcgtgcgcattctctcagccgccacccaga

SEQ ID NO: 866893 - DNA, 99 bp, Homo sapiens
ctagccgacaaggaggtgaagcggccccagcactcccagctgcgcagggcctgccaggtggcgctcgatgggagacctttaactctgaaggacatatgg

SEQ ID NO: 866894 - DNA, 99 bp, Homo sapiens
tttacaactgtgtaactgtcttcatctttacagaggaatagtctacaaaggaagacttgtaacctggagaagagattcgttttgtaatgaaggcccact

SEQ ID NO: 866895 - DNA, 99 bp, Homo sapiens
tcgggctttgctcaaccagggagaggaggatgaactgaatgaaatatgactgaggactctcagagaaactttcgttcagtatattatgagaaagtgggg

SEQ ID NO: 866896 - DNA, 99 bp, Homo sapiens
tccaacattccagagccttcctgaagagatcctcagcaagcttgctgatgtccttgaagaggaaggacttttgactagatctgctcaggaaacagtcaa

SEQ ID NO: 866897 - DNA, 98 bp, Homo sapiens
acaaaaccaagcgaggccaggccgctctggaccgtctcaaggtgtttgacggcatcccaccgccctacgacaaggaaacttggatttaactggccaga

SEQ ID NO: 866898 - DNA, 99 bp, Homo sapiens
tcaaaggagacctggcctacagacgacaagagtatcagtattattttggcgacttcaatttgccacgggacaagtttctaaaggaacagataaaactgg

SEQ ID NO: 866899 - DNA, 99 bp, Homo sapiens
agatggaaccagaaaagatacgaggctctaggagaggaagatgagaatgtgcctactgctcctgatcctccaagtcaacatttacgtgggcatgggaca

SEQ ID NO: 866900 - DNA, 99 bp, Homo sapiens
agaatccctaaggcggggaaccgcagcgcagtgacagtgcagaaccccggcgcggcccttggtccatggaaataaaaggcacatgaacaagtgcattct

SEQ ID NO: 866901 - DNA, 99 bp, Homo sapiens
gtcagccatctgtggctcagacccgaagtctttcatcttttgaagctgttctttctgttccctaaaggatgatttacaggtcagtatcaaaccaggcca

SEQ ID NO: 866902 - DNA, 99 bp, Homo sapiens
atcaagacaagccagcagctcgctcagtacaagagcgaagaatagccagaattcagcaaatcgaaaaggacatacttcgtatacgacagcttttacagt

SEQ ID NO: 866903 - DNA, 99 bp, Homo sapiens
ctcctgagtacctgggattacaggaccgtagcatcctgagacattttgaattgacacttctcaagatttgactggatcagagttcatcatgtcaaagtt

SEQ ID NO: 866904 - DNA, 100 bp, Homo sapiens
gatactggacatgcaaaaatcacatgtggacatattcaattctactgatcatattttgcaggaaggtcatagccacatgtgatttttgcatgtccagtat

SEQ ID NO: 866905 - DNA, 98 bp, Homo sapiens
atctggctctgctacgacgcgctggtgcacttcgcgctgatgaaaggttgtatcaaagttcttaaggaccaacctcctaatagtgtggaaggtcttct

SEQ ID NO: 866906 - DNA, 99 bp, Homo sapiens
aacccgtagtgctgatgaaccaatgacaacatttgttgtctgtaatgaatgtggaaatcgatggaagaaacgcttcgttaagggactcaggcagtacgg

SEQ ID NO: 866907 - DNA, 99 bp, Homo sapiens
agaaactttcagctcatgagggacctagaccaaagaacagaggctcttagaacaagctctggtgattgaggaacagctgcgccgggctgcttacttgaa

SEQ ID NO: 866908 - DNA, 99 bp, Homo sapiens
agcttattaagggtgtggtagatcttatgaatatttgccagtgttgagagatgagagttcagctgaaaatctttgcaaacttgaagaatggtcttggat

SEQ ID NO: 866909 - DNA, 99 bp, Homo sapiens
gtaaaacgctttcaggtcggcgtctcgtttcatcctcacaacagccagatcatggaagggaagtggttgctgtgtatgttactggtgcttggaactgct

SEQ ID NO: 866910 - DNA, 99 bp, Homo sapiens
tgaggccgactactacgccaaggaggtcacccgcgtgctaatggtggaaacccacaacgcatttcagcaggaacttgatgcaaggcatgacaaatatga

SEQ ID NO: 866911 - DNA, 98 bp, Homo sapiens
agctgtgacccgggtgcatcagtggatatagttgtgtctccccatggggcttcttggacacttaatgattgttggcaagaaatgtgctgctgatctgg

SEQ ID NO: 866912 - DNA, 98 bp, Homo sapiens
cccacctgcccggtgcccgaggaggcagccaagctcgtagcctgccactccgtgcgaaaaggaccagcgcagcctagacataaacactgccaagtgca

SEQ ID NO: 866913 - DNA, 99 bp, Homo sapiens
agagatatagcccacttagaaatcacagccaaagaggtgctgaaaaaatatttggagtccaaggaggatgtggctgatgcacttctacagactgatcag

SEQ ID NO: 866914 - DNA, 98 bp, Homo sapiens
ccagcttcagcaagaggatccagaagagcatctcccagaagaaggtgaagatcgagctggataagagcatgtctggccgtgctggaagaagaggtcaa

SEQ ID NO: 866915 - DNA, 99 bp, Homo sapiens
aactgcaccggaaatgtgcctaccaggataccatggccaagcggaatacagtgataggaacaccattttggatggctccagaagtgattcaggaaattg

SEQ ID NO: 866916 - DNA, 98 bp, Homo sapiens
ttcacagagtggcccttgcagaagcctgtagaaaacaggaagaatttgatgttgccaacaacggctcttctcaaactgcttttcaggaagccttggac

SEQ ID NO: 866917 - DNA, 99 bp, Homo sapiens
atgggtcaccaagagaggctgagagaccaggagtcttttagtcctgctatacagctgcaccttgtacatcaagctccatgtaatgttcctccttacctc

SEQ ID NO: 866918 - DNA, 98 bp, Homo sapiens
taaaggctggcagcctccccgggtgcctccgcgcccaaagaaactgtggtgtctcgttggcgtgctgatccctgggctcggggctcttattcctatgt

SEQ ID NO: 866919 - DNA, 99 bp, Homo sapiens
agtggaggaagtacagccagcagtggacccaagagccatatcagtgctagcaaaatggcagaattcatatagcatcaaagttgtcctgcaagagcttcg

SEQ ID NO: 866920 - DNA, 99 bp, Homo sapiens
ctgaatgcactaaacatgaagagcttgaaagcgaagttcaggaagagtgacataaaaatctggataatgccgcagaagcagctgaacaatttaaattaa

SEQ ID NO: 866921 - DNA, 99 bp, Homo sapiens
ctggcaacttcttccatcttttcacaagcaggacacaggcattgcagatgtctcctgaacgagtctcatgcaatctgtagtcccagctactcgagaggc

SEQ ID NO: 866922 - DNA, 99 bp, Homo sapiens
tactttgtctgactacaatattcaaaaggggttatggttttgtgaaattcacagatgaactggaacagaagcgagccctgacggagtgccagggagcag

SEQ ID NO: 866923 - DNA, 98 bp, Homo sapiens
catgtactgcgcatacacaatcccgggcatgggcggcaactctttgatgtactactataatgggaaagcgtttgaacaatttgaaagcaccattgggt

SEQ ID NO: 866924 - DNA, 99 bp, Homo sapiens
gctccgcattgcagactgcggagtcagacggcgctatgtacgccctcttcctcctggccagcctcctgggcgcgggtgaaatgacaatggatgctctgt

SEQ ID NO: 866925 - DNA, 98 bp, Homo sapiens
agatgttcctgtggaccccagtccagaataatcatgggccagactgggaagaaatctgagaagggaccagtttgttggcggaagcgtgtaaaatcaga

SEQ ID NO: 866926 - DNA, 99 bp, Homo sapiens
ttggtgtcagaaaccacaggcgaatccataactctgataagccgtacagcaacgtgaaatcctgcatgagattcagagaaggaaagaagagataaaaga

SEQ ID NO: 866927 - DNA, 99 bp, Homo sapiens
tgctgaactatttgcttgataatttgtcaggtactgcaaaaagaagtagcaaaagatatggcagcggcagcagttagatgcatcagaaaggagatccgg

SEQ ID NO: 866928 - DNA, 99 bp, Homo sapiens
cccagcactttgggaggccaagggtctgggattcgatatttgcatgaaaacaaaattatacatcgagatctaaaacctgaaaacatagttcttcaggat

SEQ ID NO: 866929 - DNA, 99 bp, Homo sapiens
ccttgggattctataaaattgacttttgaagcaacagggcgaaatgaccctgaatgtgacctgtgtggtggagacccagaaaagaaatgtcattcttgc

SEQ ID NO: 866930 - DNA, 99 bp, Homo sapiens
tcctcagcctctccagcctcttgcgaccacagccagagcctcagcaggagcctgttctcatcaccatggcaacaggctggagtgcaatggcacaatctc

SEQ ID NO: 866931 - DNA, 99 bp, Homo sapiens
cggcacatcctctcggtgttcccgctggcggcgggcatcttcttcgtgaggctgctcttcgagcggtgtggagggcgcagctttccagagccgacttcc

SEQ ID NO: 866932 - DNA, 98 bp, Homo sapiens
atccaagtcgccggacccggtgtggagagcggtgctgaggctacgcgggctggagactcaggagtttattaaccacttaacctctcagaactgaacaa

SEQ ID NO: 866933 - DNA, 99 bp, Homo sapiens
gtaggttggtccgaagtttgaaccggacagaagcgctggtcggcgtctggcgatatgggcacggttatgaaatattttgtgttacttgtaacagttcaa

SEQ ID NO: 866934 - DNA, 99 bp, Homo sapiens
tcggtccgaggccgtcccaggagcagctgcccgtgcggtgtgatcagtttgtggcagagtacgagcccgtgctgatcgagatcctggtggaggtgatgg

SEQ ID NO: 866935 - DNA, 99 bp, Homo sapiens
gaaatttgcatttcagaaaggccacctgatactgtatggaggatggcctagagggctgaactgatgcttgaagacctgatggccaaaagaaaggaagaa

SEQ ID NO: 866936 - DNA, 99 bp, Homo sapiens
gaatttaaacctggagaaagggagatagtgatcaccttgctagcaagattggatgggataccagagaattggcagagggggtcgatttgggaggaaagg

SEQ ID NO: 866937 - DNA, 99 bp, Homo sapiens
gactgtcttggcaactgtgttgctcttgtccttcggcagcgtggccgctagtcatatcgaggaggctgtaaaagaattcattgagcctgaaatagacga

SEQ ID NO: 866938 - DNA, 99 bp, Homo sapiens
ccccggcacacgcgcagccccggcctctcggcctctgccggagaaacaggccaagtcctgtatctgccatgtctgtggcgtccacctcaacaggctgca

SEQ ID NO: 866939 - DNA, 99 bp, Homo sapiens
gggattttgggactcgcctttgccctggcaaacactggaatcctactttttctgaggcaagtgaggcctatctggttggcctttttgaagacaccaacc

SEQ ID NO: 866940 - DNA, 98 bp, Homo sapiens
ggaagaggaccccggctggaggtgacgctgaggcggcgaggatacctgatcagagaagcagtttgatgtactaaaggcttctcgattgggagacagga

SEQ ID NO: 866941 - DNA, 98 bp, Homo sapiens
ataagaccaaggatgaatacttgatcaacaggattaaactgcaaatatctcatgaagctgctgcctgtatcactggtctccgggcagccatggaggct

SEQ ID NO: 866942 - DNA, 98 bp, Homo sapiens
tttaactgcacgccaatagaaggattgctgcatatggttctactcagcatccccttcttcagcattcctgttgtctggaccctgaccaacgtcatcca

SEQ ID NO: 866943 - DNA, 99 bp, Homo sapiens
gtgtagctgaagcaagcacgaaaaatgctaacaacagcttcacgaaaggacaactgggcagaccaattttggatgtgccatattggaatgcaaagccag

SEQ ID NO: 866944 - DNA, 99 bp, Homo sapiens
ttgaaatctcctctgcaagttcttgctggtcagcaatgtcctgcattaactcatcaactttatcgatgtcccagtaacaatgatgagcttagccagctg

SEQ ID NO: 866945 - DNA, 98 bp, Homo sapiens
tcgcgtctgcttcggagaccgtaaggacggatttcaatgagctggacttggagacactggcaccctatatccccatggacggggaagacttccagcta

SEQ ID NO: 866946 - DNA, 99 bp, Homo sapiens
tctactgtccaattctgtttactctgaattaccatcagctgaagggaaaatgaaggattcgctaaatattgtaatggatcaaggagatacacctacact

SEQ ID NO: 866947 - DNA, 99 bp, Homo sapiens
ccgaggatgacatatcctcctctacatggtcccatgagattcccaccttctttatctgaaacaaacaaattctgaaaaagagttccacgtcctccctta

SEQ ID NO: 866948 - DNA, 99 bp, Homo sapiens
gttctcaatgcatcatgtcaggcagcttatgatgccaatttgtcccatggcaattaagttggaatatgcaaggttggttaagttggcccaagaagacac

SEQ ID NO: 866949 - DNA, 99 bp, Homo sapiens
tctgagcctgccgatgacactggcacagaaaactgaatctgtagataacgagggagaatgaattgtcatgaaaaattggggttgattttatgtatctct

SEQ ID NO: 866950 - DNA, 99 bp, Homo sapiens
cggcacacagagcgggactgaagcaagtcattattcctcggagaaatgaaaaagaccttgagggaatcccaggcaacaaatgagccgtcagactgctac

SEQ ID NO: 866951 - DNA, 98 bp, Homo sapiens
agagaacttgaaaaaactattaatcagcaaagaattcatgctaaaatcatatggtggacagattctgtacacataatgaaggtaatcaatatggagaa

SEQ ID NO: 866952 - DNA, 98 bp, Homo sapiens
ccgtgttcaggcaggaaaacgtggatgattactacgacaccggcgaggaacttggcagaagctccaccatgaggcgaggtggatggaggaagcgagct

SEQ ID NO: 866953 - DNA, 153 bp, Homo sapiens
gggaacatggcgccggggcccccgtcgttgctgccgggattttggaggccggggccgcgctgagggcgcccagctggcctcgggatgtctctggcagatgagctcttagctgatctcgaagaggcagcagaagaggaggaaggaggaagctat

SEQ ID NO: 866954 - DNA, 99 bp, Homo sapiens
ctcaaggctggttatttcaacttcacctcggcaacaattacttacctggcccaggaggatgggcccgttgtgactattgcagatatcatccgaacatgt

SEQ ID NO: 866955 - DNA, 99 bp, Homo sapiens
caaagattggcactgatgttctatcaactcgatatgaaacccgctacatctatggcccaatagaatcaacaatttgtgcggtggctactaaagttcgaa

SEQ ID NO: 866956 - DNA, 99 bp, Homo sapiens
ctcataaggaacgtggctctgctggctgaggacttcctcaagagtccagtgtgcgctgcctgggtccggatccagaaagtcctaagtgagcagtgctgg

SEQ ID NO: 866957 - DNA, 99 bp, Homo sapiens
ctcccaaagtgctaggattacagatcccgtaccagctttggatctcggacagcaactccagctcaaagtgcagcgcctgcacgatattgaaacagagaa

SEQ ID NO: 866958 - DNA, 99 bp, Homo sapiens
agacacagtatggtagccacacccccagatggggacccagagcctgctcttgggaacagccagagtaagattggaacccagacttgcagtccagcgctg

SEQ ID NO: 866959 - DNA, 113 bp, Homo sapiens
tggacttaatgtgttcttattggatatgtgtaggaaaaggacacagcattgttggttttgccatgtactattttacctatgacccgtggattggcaagttattgtatcttgag

SEQ ID NO: 866960 - DNA, 98 bp, Homo sapiens
ctcaaaaaaaaaaaaagcaagaaaaaagaaaaactttaagattgctgtgaaaataatagtgtgttaacagggcacaaccattatgtgatgtgtgctca

SEQ ID NO: 866961 - DNA, 98 bp, Homo sapiens
tgggaagtggaatcgtctccaacttgctaaaaatgggtcacacagtgactgtctggaaccgcactgcagagaaagttcttgatcaatatgaacgagaa

SEQ ID NO: 866962 - DNA, 99 bp, Homo sapiens
gggcggacggccggcgggggcggcgtgcggcctagcgtctcaggactatcctattaagtgtaatctcactgcttaatgagcccaacaccttctccccag

SEQ ID NO: 866963 - DNA, 99 bp, Homo sapiens
gatgtgcggcggatgaacaagcggcaggttgtggcagcactgcctgaaggtatgagaccagattctaatctttatggttttccatgggaattggtgata

SEQ ID NO: 866964 - DNA, 99 bp, Homo sapiens
aaaaacacagctcgacagtacgcctacttctataaagtcatccagatgtgtcttgctgaatcagggctctcttatccctgccatcgacttacagtggga

SEQ ID NO: 866965 - DNA, 98 bp, Homo sapiens
atttatgaacctacggaagaagaatgtgaatggaaaccagatgaagaagatgagatttcgaacatcgggtcagaagttgagatttccactatcgagaa

SEQ ID NO: 866966 - DNA, 99 bp, Homo sapiens
ggctggaggtgacttggagaaagagcttgtcaacaaggaaatcattcgatccaaaccacctatctgcacactccccaaggacatggatgaaattggaaa

SEQ ID NO: 866967 - DNA, 98 bp, Homo sapiens
tgggctaccataaacacatcaccttgatttttaatcccacggtcacagagatgcggcggaccctgacgcctgccagctccccagtgtcctcgcccagc

SEQ ID NO: 866968 - DNA, 99 bp, Homo sapiens
gaagatgaagtagttgaagtagaaaataggagccatgtgttcacatgtcatgtggaccagtatttaactgtggaaaccgcgggtggcatggagaaggag

SEQ ID NO: 866969 - DNA, 99 bp, Homo sapiens
tatcctcctgtgttttttcagactccttggaaattaaggaatgcaattctgccaccatgatggaagagtaaacatcagtctccaaagataactacatcc

SEQ ID NO: 866970 - DNA, 99 bp, Homo sapiens
ctctcatgttcctccatgataaaggaatcatctatagaaaggcctaaagaatgtatttgacgaagcaatattggctgccctggagcctccagaaccgaa

SEQ ID NO: 866971 - DNA, 98 bp, Homo sapiens
ttcagacagattttgaagatggaatccgtagcgcccagctcattgcctcagctaatcactctgagaggagtgataccaatgaaaaaaggtcagttgat

SEQ ID NO: 866972 - DNA, 99 bp, Homo sapiens
tagtaaccttggtgaaacctcatttagtaaaggtcttggtatggtgactcctgtgaacgatcttagaggatctgattctattgcgtatgacaaaggaga

SEQ ID NO: 866973 - DNA, 99 bp, Homo sapiens
tgaagaccaatttttacgtctagatttccatgcccatggaagtgtgcctgacgaggaggccaagacaaccaccacaaacactcaagtggaaggggatga

SEQ ID NO: 866974 - DNA, 99 bp, Homo sapiens
caaaggggacgagattctggcagccaccatgaaggccccggagaagaagaaagtggacaagctgaacgctgcacagaaaactgaatctgtagataacga

SEQ ID NO: 866975 - DNA, 99 bp, Homo sapiens
aagatttgtttgtttctgccagtgaaaaccaccaaaacaatccagctgttccctcagagttgatcaagaacttaatggaaaacaagatgaaccgaaaaa

SEQ ID NO: 866976 - DNA, 99 bp, Homo sapiens
cgtcatctgcaaaaccttccactccatggcctacgggcacatagggcggaagtatgttgagtctaaaaaggacagagtcacagtagtcttcagcacagt

SEQ ID NO: 866977 - DNA, 99 bp, Homo sapiens
aatcagcttggtgggtgtgacacagaattttgcagcaacagttctcagaaacaccaagggcaacgtcagcgtttatgtcatggttggtgcagatgtccc

SEQ ID NO: 866978 - DNA, 99 bp, Homo sapiens
aggaaagagcggggctggcggacggtgtttccctcccgtgagttctggcacaggccgctttgaagaggaatttatcaaaatgcgcatggagagacttca

SEQ ID NO: 866979 - DNA, 99 bp, Homo sapiens
ctgctattgaaggttgtcctattccttcgctgctttctcttctttttttcttctgagttcagctggtcatcggtcagggtgagtgtcaagtttgcgcac

SEQ ID NO: 866980 - DNA, 99 bp, Homo sapiens
gtcggataatactggaggggcttgaagaaggctgtcgtgttttgtcacctttgtacaataaagcatccaaagttcaaagagcctctctctggatgccat

SEQ ID NO: 866981 - DNA, 99 bp, Homo sapiens
ccagagcattgatgtctccctgcctctcaataccttgggcccagtcatgaagatggaacctctgaataacctccagagacggggtttcgccatgttggc

SEQ ID NO: 866982 - DNA, 98 bp, Homo sapiens
ccaaactgctgtggtctgagtggacaggtggtattggaaggaactggccctgggcctctggaggcagcagtattctggcagaatttggaaccctgcat

SEQ ID NO: 866983 - DNA, 99 bp, Homo sapiens
gctcatgcatatttgagacaacatctggatggttggggagaacggcctttttgcaaatgtgtaacttgcctatcaaagtagtttgtagggcaaatgcag

SEQ ID NO: 866984 - DNA, 137 bp, Homo sapiens
ccggtctacagctcccagcgtgagcgacgcagaagacgggtgatttctgcatttccatctgagaagatgcagatgcctccagctattacgagtcccatggcaacaaggatcagaggcagagctgctttccatgccgt

SEQ ID NO: 866985 - DNA, 99 bp, Homo sapiens
caagatttcgttcggcgtgttgagcagcgaaagatcctactggacatgtcagtgtcctttcacacccatgtgaaagagattccaggagggcttcgtgta

SEQ ID NO: 866986 - DNA, 99 bp, Homo sapiens
gatagaagtcaagttgaaccagcagcatacttccgacagggtgttgccctccagtaccttggacgtcatgccgatgccctggcagcctttgcatctgga

SEQ ID NO: 866987 - DNA, 99 bp, Homo sapiens
aagagctcgcagctttacctgcgcctggtggagacctcgctgaaagctgatgtagcccagcagttccagtatgctgtgcgggtgattggcagcaacttc

SEQ ID NO: 866988 - DNA, 99 bp, Homo sapiens
catgttttttgctcccacagtgctaggcttggcccgcctaaggcactgggtgtacctgctttgcttctctgcaggagcagcagccaagctggacagatg

SEQ ID NO: 866989 - DNA, 99 bp, Homo sapiens
aaaaggtgccaagagcttagttgaactccttcaaattgaagagttttctgatgttaatgaaggagagaaagaagtgatgaaactctggaatctccatgt

SEQ ID NO: 866990 - DNA, 99 bp, Homo sapiens
gttcaagaccagcctgggcaacataacttggattcacttgctggtcatcattggtagcatcttgtcttattttttatttgccatagtttttggagccat

SEQ ID NO: 866991 - DNA, 99 bp, Homo sapiens
cgcctcacaaaaagcaggtgctcccgggctgaactagccatcccgtctgcttctctgggattggctgcctacaaagctcagatggaaatgcagaaatca

SEQ ID NO: 866992 - DNA, 99 bp, Homo sapiens
gcctcccaagtagctgggaccacaggactactttggtgagtgttcagaggctgcaattaaggataatgtggtcatagtatatgaactcttagaagaaat

SEQ ID NO: 866993 - DNA, 99 bp, Homo sapiens
ctcagaagcatgtgtcttccccagctctgcagccacatactatccgtttgttcaggaaccaccagtgacagaaatgcaaggccagaaactgtcactaat

SEQ ID NO: 866994 - DNA, 98 bp, Homo sapiens
tcccgagtagctgagactacaggttcatcagaatgcaaagtagaaagtgtcttaaaagagactgtgatcagcaggcagacggcctgtgtcggtttggt

SEQ ID NO: 866995 - DNA, 99 bp, Homo sapiens
tgttagaagaactcgtgagccggattgatgatgacgtccggttgtttgccttcgtgcgcttcaccaccggggatgccatgagcaagaggtccaagtttg

SEQ ID NO: 866996 - DNA, 99 bp, Homo sapiens
ctgcatgggctctatcaaggaaaacaagtgtctgcttatgtcggtcctacgggaagtgaaggtgctggcaggtcttcagcaccccaatattgttggcta

SEQ ID NO: 866997 - DNA, 99 bp, Homo sapiens
ttgagggattcaagaagtcctgagcaacaagatatggatttggatatagaatttgatgtacaccttggaatagctcatacccgttgggcaacacatgga

SEQ ID NO: 866998 - DNA, 99 bp, Homo sapiens
cgctgcgggcccgggccatggccgccgccgatgccgaggtatgaatctccagaaatagctctaaattgtggaataatgttaagagaatgcatcagacat

SEQ ID NO: 866999 - DNA, 98 bp, Homo sapiens
ttacaggaaagctcgagccaggctgtgcctcataaggagaatggctcagagcgtggtggaagtcatggaggactcaaaggggaaggtccaggagcacc

SEQ ID NO: 867000 - DNA, 98 bp, Homo sapiens
ttccccaaggagctcctgtgcctttaatgctgtctccatggaggtaacagaggttggtcctgatgaacatgccagtagctgaggacatgacggtccac

SEQ ID NO: 867001 - DNA, 99 bp, Homo sapiens
caccatcacccggaagtaggcccaaactgtgtcttcccaggtgtcacagacaggaagcagctttcacagatttcccaatactgtgtaagtgagtgacag

SEQ ID NO: 867002 - DNA, 99 bp, Homo sapiens
tctggaggctgcggaggcgacgccggagagaacgaagcctcggctgggagcggtctgccatcatggatgttctcgcagaagcaaatggcacctttgcct

SEQ ID NO: 867003 - DNA, 99 bp, Homo sapiens
actcgcctgtccccgccggcttcggcttcagcgccgcggatcatagaagaagatgctgctcttgtagaaataggacctcgttttgtcttaaatctcata

SEQ ID NO: 867004 - DNA, 99 bp, Homo sapiens
ttgatggaagatgaagaaatggacattggtccgtacatggacacaccacttctgcagaaagccgtcattacacctgattttgaaaaaaaccactgtgtt

SEQ ID NO: 867005 - DNA, 99 bp, Homo sapiens
acgtggtggacctgtacctcaacacccccgacaagatggtttctgacagatgtgactacgtctttgtcaatgggaaagaaatgaaaggcaaggtcaacg

SEQ ID NO: 867006 - DNA, 99 bp, Homo sapiens
ggaggaggtggatgtgaaagatcctaactatgatgatgaccaggtgtggatccggagttgtatgagttaacaacttctaagctggaaatctccacctca

SEQ ID NO: 867007 - DNA, 99 bp, Homo sapiens
ggatgttgcagtgaaccttctccagaccattttgaagacagctaagcaagacgtggatgatgaatacagcatgcagtacagtgccaggggctcccagtc

SEQ ID NO: 867008 - DNA, 98 bp, Homo sapiens
aatcatacaggaatattttgagcatggagatactaatgaagttgcgagcctaaaaccattggccaaccgtcacgcaactgccagtaaaaatattttcc

SEQ ID NO: 867009 - DNA, 98 bp, Homo sapiens
agcaggcgaagccgcggaggacggggtgaagatggcggccttctccgctgtctgtggaagcccgtaaagagatgactagaaaggctattaagacagtc

SEQ ID NO: 867010 - DNA, 99 bp, Homo sapiens
cctaaattacacttctgggctctgtcagccatgtgactgtagtccacatggagctctcagcataccgtgcaacaggtcctaggcctacttacaagcctc

SEQ ID NO: 867011 - DNA, 99 bp, Homo sapiens
agcgtgacggctggcatcatcattgttggagatgagatccttaagttcactagagaaaaaatccttattgcgagataacgtggacctattgggaagctt

SEQ ID NO: 867012 - DNA, 98 bp, Homo sapiens
tcctacctgtcagagccccaagagtgtgaaccggttggcaatggagacaagaaaagtaatgaaaggaaatcattccagaaagacagctgcatttgtcc

SEQ ID NO: 867013 - DNA, 99 bp, Homo sapiens
cactggatgcctggattgggccagagaccatgcacctggtgtcagagcgttttgctgctgacatcatctccgttttggccatgaccatgagtggggagc

SEQ ID NO: 867014 - DNA, 99 bp, Homo sapiens
ttcgctatgaagagagcgacctggagcggggatacacggaaaatgtttataggaggccttagctgggacactacaaagaaagatctgaaggactacttt

SEQ ID NO: 867015 - DNA, 150 bp, Homo sapiens
ttcttccacaagggggtcttcacaccttgtgtgtggtggctgtagttttcccttttcccttcctcttgctccgcgtcctcggcccggagctcttccgtttccttcttccacaagggggtcttcacaccttgtgtgtggtggctgtagttt

SEQ ID NO: 867016 - DNA, 99 bp, Homo sapiens
atctatttgtaaaggccagcagcttgtgatgatgccaaacaagatctgtccacctcaacttctagagagggaacaccgcttaacaacagtaattcttcc

SEQ ID NO: 867017 - DNA, 99 bp, Homo sapiens
caagcccgctgagcaggatgagggcttgcagatgggtcaagggttgtggagagtggtcagaaaccagcagctgcaacaagaaggctacagtgagcaagg

SEQ ID NO: 867018 - DNA, 100 bp, Homo sapiens
acacgttggatcaaccagctgacgcgacttgcgtatgcagacgccagaaacagaatctgggttaggagctgctccggcgtcagctggttgatccaacgtg

SEQ ID NO: 867019 - DNA, 99 bp, Homo sapiens
gaagaggttggagatgggaccacatcagtaattattcttgacccagctcatccagatggtggtgtggatgctgcagcgccggcttctcatccagctgca

SEQ ID NO: 867020 - DNA, 99 bp, Homo sapiens
gctcagggaggcagcagtggcagtccatcgaggggaccaaactctccatcacccaggggcaagttaaagtcttcagagccctgtatacgtttgaaccca

SEQ ID NO: 867021 - DNA, 99 bp, Homo sapiens
attgactttctagagaacaggagccgtacgtctctatggaggtagatctttccagatttagaactctggaacctgagacgcagagctgtcagaactccc

SEQ ID NO: 867022 - DNA, 99 bp, Homo sapiens
cacaatatattgactactgccacaattccgtgaagtacatgcgagaagccacgccctatgtgaagaaaggatccccagtatccgagattgggtgggaaa

SEQ ID NO: 867023 - DNA, 99 bp, Homo sapiens
ggcgctcggcgatggtaggcgtccctggagcggccgccttccagcgagaccaagacacattccaccccagtggggggtcccataccactcatggatctg

SEQ ID NO: 867024 - DNA, 98 bp, Homo sapiens
gaatgccatgtcaactttgttcggaaggtcacagtgtccatgtaactaactcctggttaagaggatatggatagaaggcacatgttcaacttctggct

SEQ ID NO: 867025 - DNA, 98 bp, Homo sapiens
tccggagccgcacaaaccagggctcgccatgaagccagctcctgatgataattcattattgctgctgcgggcggagttatatttgaccatgaagaact

SEQ ID NO: 867026 - DNA, 99 bp, Homo sapiens
tgaaagctgccatggccctggagaaaaagctgaaccaggtaaactttcctgagaatggctttctctctcctgataaactgtctttgctggaaaaactcc

SEQ ID NO: 867027 - DNA, 99 bp, Homo sapiens
taccagaaaacttacatggacatatgcagcaaatgttggggaacatgatctgttaaaggtaaattggcaggatgaggagcagcaaatcaaaagaggtgc

SEQ ID NO: 867028 - DNA, 99 bp, Homo sapiens
ggaatatatcctgactgattacagctcagcagctcctcctcctatagtggggacatcagcaggcaccacaacagcaccgcagaactgcagaaagctgag

SEQ ID NO: 867029 - DNA, 99 bp, Homo sapiens
tcaacttgctgggccggtgcaactattcgcagtccgagcgtactatactggcaattgctggagaagattttgcaattgttgcttctgatactcgattga

SEQ ID NO: 867030 - DNA, 99 bp, Homo sapiens
ccccatcattgggagaaatccccactcctccaagaaccaacccccaaattggctgggacaggtgatgatgaacagtctacacagatggctgcaagttgg

SEQ ID NO: 867031 - DNA, 99 bp, Homo sapiens
aattgcctgccgctgtcaagccgcataacagaccaatttttattccacgaggaggagtacctggaaattagggttcatcatttacaacccaacagcctc

SEQ ID NO: 867032 - DNA, 99 bp, Homo sapiens
ctgggtgacagagtgagactccatcttaactatttcttcaatgaaacaaatgtgagaaacaggatctctcttcttggccaatactttttgtagatgttg

SEQ ID NO: 867033 - DNA, 99 bp, Homo sapiens
ccgccatacgcgctctccctgtttaggtgacagagctgaatgaacctctctccaatgaagatcgaaatctcctctctgtggcctacaagaatgtggttg

SEQ ID NO: 867034 - DNA, 99 bp, Homo sapiens
gtttgttgaactaccccaatatgagaagaattttagagacaacaatgtcaaaggaacgacacttcccagattggctcaagctacccaggaaagaacgga

SEQ ID NO: 867035 - DNA, 98 bp, Homo sapiens
tgggaaccctggaggggccttcctcatccgggagagccagaccaggagaggttagctaaccatgcagcaggtgcttgagtttcacctttctccagtcc

SEQ ID NO: 867036 - DNA, 99 bp, Homo sapiens
gcagaaagcaggcgaacccgcggcgcaataacgaaaaggcgacggcggattgacagaagtatgattggagagcccacaaactttgtgcatacagctcat

SEQ ID NO: 867037 - DNA, 99 bp, Homo sapiens
gaagtgaaggagcacgtgggcacggaccaattcgggaacaaatactactacatcccgcagtacaagaactggagagacatatgtagagtgtgtcggtca

SEQ ID NO: 867038 - DNA, 99 bp, Homo sapiens
aaaggattgtgacatatcgttggacccagaattgagcctctgcagtccttgtccctggctgactcgaaactcaagactgaggtcaccatcatcatcaat

SEQ ID NO: 867039 - DNA, 99 bp, Homo sapiens
ggagtgttgactgctgcaaggaccaagaatctgtcactgcgaaggggatgaagagagccccctcatcacaccctgtcgctgcactgggacactgcgctt

SEQ ID NO: 867040 - DNA, 99 bp, Homo sapiens
ccttctttcctgcaaccacgggaacttcgagagcagttgaagacatctcttcatcgaggactaacccctacagttatgcaatgagtactgaagaagcca

SEQ ID NO: 867041 - DNA, 99 bp, Homo sapiens
tccactggggaactgggcatcatcgacagtgccttcggccagagcggcaagttcaagatccacatcccaggagacaaggacggcagcaaggtgacaaca

SEQ ID NO: 867042 - DNA, 99 bp, Homo sapiens
ctctatagccaaggaaggcttcgagaagattagcaaaggtgctaatccagtggaaatcaggagagggagtaatgtggtcattgcatcccgtaagttgga

SEQ ID NO: 867043 - DNA, 99 bp, Homo sapiens
tctgcctgccgcctgcctgcctgccactgagggttacacatcattttggaatgactgtatatcatctggattacgtggctgtatgttaattgaattagc

SEQ ID NO: 867044 - DNA, 99 bp, Homo sapiens
gaaggggaagaggcccaccctggagtaaccctcactggagaatccagaggtgaagaagctaagtctcagaaagataactcacccaagaggacacaagga

SEQ ID NO: 867045 - DNA, 99 bp, Homo sapiens
ctgaggcttcccagagtttactgttgtacatattgggagagagcacctccgtgaagtcccgtttgtgatattcctcctgtaatcccagctactcaggag

SEQ ID NO: 867046 - DNA, 98 bp, Homo sapiens
aggcagccatggagggcgatggctcagattcgccgtgtggcttcctgttgtggtgcatggccccgagcccttctaatggggctgaactgctctacaag

SEQ ID NO: 867047 - DNA, 98 bp, Homo sapiens
tgcatcattccttggggcaaaatgtggacaagggatggacaaccggaaattttctacacattttggaattcagttactcaggcactttcttctcaatt

SEQ ID NO: 867048 - DNA, 99 bp, Homo sapiens
gtttccgggaattaagtccagtttcttttcaatataggaattttcctgcatggagtgctacatcctcttgttccagtctcagctggctgctccgtgggc

SEQ ID NO: 867049 - DNA, 98 bp, Homo sapiens
acgagacggtggagactctcatggctggggaagttagtgccatggttggttatttgttatcaaagcgtgaaggccaagcagggtctccagagaaaccg

SEQ ID NO: 867050 - DNA, 99 bp, Homo sapiens
ggtgagtactattgctgttatgtaaattaaatgagtcgtcatccatagcaactttggcttcataatcattggaaatctggatacaaacttcttcagctc

SEQ ID NO: 867051 - DNA, 99 bp, Homo sapiens
gaaaatctgcaaagaactttcctgcttacaacctcaagtaaagcatgttatttgaaagcaattgagacgcaaccgaactttgcagtagcttggagtaat

SEQ ID NO: 867052 - DNA, 100 bp, Homo sapiens
agagggttgtccccaaaaagcctccatctttgctttatcctcctcattcaatgtttctgtaggttggggtgatgggggaggctttttggggacaaccctc

SEQ ID NO: 867053 - DNA, 99 bp, Homo sapiens
cggattggcgctgaggtggcccgtggggcagctagagacatgacctaacaccctgatgaccactctcagggaccttgagtgactggccggtgcaccatg

SEQ ID NO: 867054 - DNA, 99 bp, Homo sapiens
aaatccgacactactgattctagtcaagtgtttacgaaaatggggttacagaagatgtgaagatatttgttggattaaaaccaataaaaacaatcctgg

SEQ ID NO: 867055 - DNA, 99 bp, Homo sapiens
tttgatggaccaattaccataaccatattttctgctcttaagaatcttcaagataagattcgacgcttggaacttgagaggattcaggcagaagaaagt

SEQ ID NO: 867056 - DNA, 99 bp, Homo sapiens
ctgggcgacacagcgagactctgtcggatcaacttgccatatgataactgttgtatcttttgatcctgttgctagtttagtgccatcattagagaattt

SEQ ID NO: 867057 - DNA, 98 bp, Homo sapiens
gcagtcctttgccagtggaaggagttcctgctaaggggaggtgcaggagacaatgcagatcttcgtgaagactctgactggtaagaccatcaccctcg

SEQ ID NO: 867058 - DNA, 99 bp, Homo sapiens
ctgtcaccatttctttcacaaaccttgtgtctcaatttggctacaaaagctcatgttttttggctagacctatgaccattttcgctagacttcactgca

SEQ ID NO: 867059 - DNA, 98 bp, Homo sapiens
agcaatggagaagagaaagcacaaagcatggagaccctccctccagtgtcttgggacaaggtgcgcattcctggtgtgctgcagcgattgggagtgac

SEQ ID NO: 867060 - DNA, 99 bp, Homo sapiens
gcatttagcccagagtccttattttatgttgtttggaagattatgccaaactttaggaaaatgtttataggaggccttagctgggacactacaaagaaa

SEQ ID NO: 867061 - DNA, 144 bp, Homo sapiens
ctggtacatggaggccgtcttcccagggcagttcggcgtgcctcagccctggtacttcttcatcatgtggtaagcatccgtggcattcaagacgaagatccccctgacgcccagctcctgaggctggataacatgctgctggct

SEQ ID NO: 867062 - DNA, 99 bp, Homo sapiens
cgaagcggagagcaccggggggaggagatgggcagtctgggcactgggaaacatagctggagatagctctgtttgccgagattacgtcttgaactgttc

SEQ ID NO: 867063 - DNA, 99 bp, Homo sapiens
ctggccagatttgcagatggctctgctgtagtacaggagcaatttacagcaatgagggatttatacatgaaaaatggacaaggatttgcattagtttat

SEQ ID NO: 867064 - DNA, 99 bp, Homo sapiens
acagaaacaaaatgtcaacaaattgatggggaagcccctagggggctcagtggccgtccagctcccaggaaagctgttcactgactttgagacctggga

SEQ ID NO: 867065 - DNA, 98 bp, Homo sapiens
taacatcacctgcttcatccttgtttaatgactttggtgccctcaacatctctcagagacgaaaggtcagtaacagatccaagagatggaaagagagt

SEQ ID NO: 867066 - DNA, 99 bp, Homo sapiens
accgattttctgaagacagcagatttatcactgttaatccagtgaatggtgctgggctcgccatggctacttgtgatatcattttccttaatggtggga

SEQ ID NO: 867067 - DNA, 99 bp, Homo sapiens
aactggtcatggtttcagttgcgatgcatgcaagtcggaggaaacgctagtgcagttacccatgcagttgttactgtaccagcctattttaatgatgcc

SEQ ID NO: 867068 - DNA, 98 bp, Homo sapiens
tgacaactgggatgagagctatgactattggctattcatgctcttatggaaaatgctgtgcaacccttactcacttctgtgggagatgctatagaggc

SEQ ID NO: 867069 - DNA, 99 bp, Homo sapiens
cttcctggctgggaggacattgagtcaaaaatccctctaaatatggaggagcctcccgtggaggaaccgtgtctttctcgagaagcaggtggaaacatg

SEQ ID NO: 867070 - DNA, 99 bp, Homo sapiens
cgggagaaggagggccaagatggcggaagcggaggagtctccaggagacccggggacagcatcgcccaggcccctggctggagtgcaatggcgtgatct

SEQ ID NO: 867071 - DNA, 99 bp, Homo sapiens
ggccctgcctatgaccagcaagaggatggggccctggatgagggggaagggcctcaaagccagaagatttcctttgacctcgctgagtacactgcggac

SEQ ID NO: 867072 - DNA, 99 bp, Homo sapiens
tgctactgtgcgctcgatccagcaccatggggaagcgggacaatcgggtgattttctccaaaggaacatccggtgcttgccctgccaggagccccagcc

SEQ ID NO: 867073 - DNA, 99 bp, Homo sapiens
tcaactctggggatgcggtggatctggagaggctccccgtgcacctcctcgctgtggtctttaaggacagagcgggatgccaccagcttgtccaaaggg

SEQ ID NO: 867074 - DNA, 99 bp, Homo sapiens
agctggaatgcagtggctcttctcaggtatcccagatttaatccagagactgacttcactatagaacccacagttgtatcaatggttggggaaagatag

SEQ ID NO: 867075 - DNA, 99 bp, Homo sapiens
aaggagcagccctggtgtcacctatcagtaaaagtgagcagtagccaacatgtcagggtgggagtcatattacaaaaccgagggcgatgaagaagcaga

SEQ ID NO: 867076 - DNA, 99 bp, Homo sapiens
acctgaggaccattattttttaatgggggcttggagtacccataatacagtgagcccaccttcctggtccccagacatttcagaaggtcgggaaatttt

SEQ ID NO: 867077 - DNA, 99 bp, Homo sapiens
gtgcattctgtcttctcaggctccaccgtttggcatcccgactgtaagcaatctacgaagaccgaggaaaagctgcggagaaaaaatgatccctatgct

SEQ ID NO: 867078 - DNA, 99 bp, Homo sapiens
ggggtcattgcccagcgcctccggcagatctttccttctcctccaccacaggaggaggaggcacagcagtcccaaaatgacagttttgagcacagcgac

SEQ ID NO: 867079 - DNA, 98 bp, Homo sapiens
ttgctaaacttaaaagcaagctggttctctgggatataaataagcacccccaaattcagaaggagtcccagtatatcaagtatctctgctgtgatgac

SEQ ID NO: 867080 - DNA, 98 bp, Homo sapiens
atttctagctttgtaggagcatggcttggagcacttcctattccactggattgggaaagaccatggcaggttgcagcatgcagagatactggatatga

SEQ ID NO: 867081 - DNA, 99 bp, Homo sapiens
cgacaagaagctcacccaggaacaagtatctgacaggttgcatcataaatacaaaggactgaagttataaaagagaaaagagaagtttgctgctaaaat

SEQ ID NO: 867082 - DNA, 98 bp, Homo sapiens
aaaattatttatccaacagctcctcccagacaacgactgaaagacctttcattcagaagctgtttcgtcctgtggctgcagatggacagttgcacaca

SEQ ID NO: 867083 - DNA, 99 bp, Homo sapiens
tcttggcagtgggaagatggctccattctctcacccaacctattgacaagtatctctatgccatgcggctctccgatgaaactctcatagatatcatga

SEQ ID NO: 867084 - DNA, 99 bp, Homo sapiens
acgtggcgagcggccaccccggcttggcctgccgaccccgggagtgccaggaggaattctaaggaaaggtgcaaagctgttcttccgccggcggcatca

SEQ ID NO: 867085 - DNA, 98 bp, Homo sapiens
tcatgaagattcaataacagttgcatttgaaaacaattgtgaaagattttcaagactatatggaacctgaagaaggttgtcaaggttccccacagaga

SEQ ID NO: 867086 - DNA, 99 bp, Homo sapiens
cttcggattcactaacttcttcactaactcctgattcctgaaaatcagaatcttctgaatcttcactgctcactgtggtcccagctacttgggaggctg

SEQ ID NO: 867087 - DNA, 99 bp, Homo sapiens
gccagttttgaaatcgacacacaaagaatagagttgagcctgtgggacacttcgggtacagagtgaagacagtgtcctcctgtttgttattgcatggac

SEQ ID NO: 867088 - DNA, 99 bp, Homo sapiens
ctcggttttcctctcagattcgctgtaagtgccaaacgtctggctttgagcagagctcctaaatggccagcgaagcgttcgccttcagagccagaaatg

SEQ ID NO: 867089 - DNA, 99 bp, Homo sapiens
agagagattgaaagctctagaggaaacttttgagaagaactttgaaagagaaacccataaaataagtgagcaaaatgatgctgataatgctagtgtcct

SEQ ID NO: 867090 - DNA, 99 bp, Homo sapiens
tccggggcgcagcgtgacggctggcatcatcattgttggagatgagatccttaagattctgaaaaagagttccacgtcctcccttatcgagtctttgtt

SEQ ID NO: 867091 - DNA, 99 bp, Homo sapiens
cccagccaggccctggtgttgaggtcaggacctttaccaggagaagtcaatacctaccagatccagaagattcccagagacagagtctcactctgtcgc

SEQ ID NO: 867092 - DNA, 99 bp, Homo sapiens
gccgatgaagtgcagaggtttttttctgatcgaatttcaaaagaatccggcaaagtttttgaagatgtccttgaaagtttctattcaattgactgtatt

SEQ ID NO: 867093 - DNA, 99 bp, Homo sapiens
cttctcaggcgatccagataagaggaaatgagagccgggttttctgacttccaactcattagggaccagtttgcagaaaaaacttcagcatgtgccagg

SEQ ID NO: 867094 - DNA, 99 bp, Homo sapiens
caatacacgggcttcaatgaccacaagccactggacccagagacaattgctcaggtcttcgccttgatcgtgttctcctgcatctatggtgagggctac

SEQ ID NO: 867095 - DNA, 98 bp, Homo sapiens
ggagacccgactgcaactgctggattgctgcaaggctgagggacgagaacgagctatgacagagactccactttcaatgtgtttgtgggaaaaggaca

SEQ ID NO: 867096 - DNA, 99 bp, Homo sapiens
ccacacacctcccgaatcatgtcccgcacgaacttggtgtgtttggtcagacgcttgttggccaccgtgtactggtaggagtaccgctgcttgccactc

SEQ ID NO: 867097 - DNA, 101 bp, Homo sapiens
cctccccaaagtgctggaattacagactggtggagcagtacagagaacagagctggatgactatggccaatttggagaaagagctccaggagatggaggca

SEQ ID NO: 867098 - DNA, 99 bp, Homo sapiens
agatttggatctacgagatgacagtctgctaaaaaatttagatataagatgtataagaagtcttaacggtaattgttgatgaacagcacttggatttcc

SEQ ID NO: 867099 - DNA, 113 bp, Homo sapiens
acatcgtgggatgcactttctcaaaccaaggctgctaggttggtcctgatgaacatgccagtagctgaggacatgacggtccacttcacctccacacttatggctctgatccg

SEQ ID NO: 867100 - DNA, 99 bp, Homo sapiens
atgtggaagtccgagacagagtcaagtgcataagtggggttgaagaatctttagaacacgatgttcttgatgataatacagagcagacagatgacaaaa

SEQ ID NO: 867101 - DNA, 98 bp, Homo sapiens
gcctttgggactctgaaggctgaaggtgcgttgtagaagacaagaactcaaaggtggcctggttgaaccgttctggcatcatttttgctggacatgac

SEQ ID NO: 867102 - DNA, 99 bp, Homo sapiens
gtgcttccagtgccaaaccaaactggagctggtgcagcaggaattgggatcgtgtcgctgcgctttgttagaggcaaggggtcttccccctcacctatt

SEQ ID NO: 867103 - DNA, 99 bp, Homo sapiens
ggggtcttcatcgtgtgggctctgactgtccagctccaccctgtcctcagactgtgtgtccttcacggcagcatctgctggggcagagcaaggggttcg

SEQ ID NO: 867104 - DNA, 99 bp, Homo sapiens
cttagcagtagacttcattttttgtttagttttagttgaagttctaaagcagttggcagatatccctgttacaatctgtacatatccatttgtatttga

SEQ ID NO: 867105 - DNA, 99 bp, Homo sapiens
atgctcatccataaaactgaagatgtgaatactctggatccttcaaaccaaaaatgtggtggaagaaagaaaaccgtgtctttcagcagcatgccatcg

SEQ ID NO: 867106 - DNA, 99 bp, Homo sapiens
tcctgttccaccttcagagcgtcacggcgtacgccctcatggggaaaatctccccggtgactttcaggacgagattgaggagctgcgggccgagatgct

SEQ ID NO: 867107 - DNA, 99 bp, Homo sapiens
gtgtaatgaagtcttccaggacgagacatcactggctacacatttccagcaggctgcagatacgagtggacaaggggtcctgatgacaacttaattgaa

SEQ ID NO: 867108 - DNA, 98 bp, Homo sapiens
agtcgatatagatcacgatcaagatctcgttcctacagcccaaatgctgcacttaaaaggatgcttgttttgatgtcctgctcattgttttccctatg

SEQ ID NO: 867109 - DNA, 99 bp, Homo sapiens
tatagactacttctactccaccaggaaggtgaataagtctgatgacacagcagaacatcttctggagttgggctggtttaccatgaacaacctcctccc

SEQ ID NO: 867110 - DNA, 99 bp, Homo sapiens
ctggttaccagtggccttccaggttgttatctgcaggtgtggcaggttgcagaggacagtggtacaacagaatagctcgggaatggactcagaagtatg

SEQ ID NO: 867111 - DNA, 99 bp, Homo sapiens
aactcagatcttaagtagtgatatttctcttttgtctgcccctattgtaagtgcagatggaacacaacagctgtattcttcaggacttgtggaatgtga

SEQ ID NO: 867112 - DNA, 99 bp, Homo sapiens
aggatccgagcctgtggccgcccatcagggggaagaggcgtcctgttcttcctgggggactggcagaatgcaatgagagccactatggaacaccatgcc

SEQ ID NO: 867113 - DNA, 99 bp, Homo sapiens
gtcggcgccgctgcccatggagggagtggacatcagccccaaacaggacgaaggcgtgctgaaggttatcttatgatgaggcttttgctatggctaatg

SEQ ID NO: 867114 - DNA, 99 bp, Homo sapiens
aaagatgaaaaggaatatgcattgaagcaaattgaaggcacaggaatatccatgtcggcttgtagagagattgcagaatacaggagtttccagaaaata

SEQ ID NO: 867115 - DNA, 99 bp, Homo sapiens
gtcaggtatttcatcagctgtattagttctggcaagtatctgggcaggagcggagtcctcggtgcccgcgggagaggaggaggcggaggaggccatgtt

SEQ ID NO: 867116 - DNA, 99 bp, Homo sapiens
tcgaaatggagttgcactcactgccctggatcaggatcacgtcgcagtcctaggaagtccactagcagcttctaaggtgcttccaggggatccacgttc

SEQ ID NO: 867117 - DNA, 99 bp, Homo sapiens
aacaagccaatcccaggaggaaaaacgatgtacggagcgcaagaggacggcagcgtcggcgaaggtgacctgtcctgcatcctcaagacggccctgggg

SEQ ID NO: 867118 - DNA, 98 bp, Homo sapiens
tattgaaaaacagtacatttctgcaattgagaaacaggcacacaagtgtgaggagttgctaaatgctcagaattggcagagggggtcgatttgggagg

SEQ ID NO: 867119 - DNA, 99 bp, Homo sapiens
acgcacgcggtgcagggtaacatggcggatgcggaaggcagtatttggcagtcgtattcagagataaacccctggagctatgggatgttaggacttgta

SEQ ID NO: 867120 - DNA, 99 bp, Homo sapiens
ctcccgagtagctggaattacagggaaatctaagttaatttcaaggcattcgaaatggggaaagactattattgcattttgggaattgagaaaggagct

SEQ ID NO: 867121 - DNA, 99 bp, Homo sapiens
agctaccggccagggttttctttactctggggtcccggctgccctgtggcctcgctcctcggagggtgactattatatggttaaaaagattttggagga

SEQ ID NO: 867122 - DNA, 99 bp, Homo sapiens
gggtgctcgccctggtcttcgggctgtcgctcgtctacttcctcagcagcaccttcaagcagggtgaggatccacgacctccgcagtggtaacatcgcc

SEQ ID NO: 867123 - DNA, 98 bp, Homo sapiens
gagtccgcttgggggaaaacttcaaagagccggatcgcaggctccctgcctactcccccaccggggatttcaggtgctggagaatctggtaaaagcac

SEQ ID NO: 867124 - DNA, 99 bp, Homo sapiens
tccagataagacgtgtatttcattcagttctggatcaatagttgctctctgtgtaaatcctgtcattggaatcagctgttacagggtgttatcaattat

SEQ ID NO: 867125 - DNA, 99 bp, Homo sapiens
gacggcaaagtgctgggtgatctcctgcatgtcctcgtagttgaagagggggttgtagcaggttttgtcatgtatagcatatcactggctgttggtttc

SEQ ID NO: 867126 - DNA, 99 bp, Homo sapiens
gtgatggcccaggttcttcaaaagatgtggcagtagagaagagcatcacagaagttgctcaggagctgacagagctggtggaacatcttgtagacattg

SEQ ID NO: 867127 - DNA, 99 bp, Homo sapiens
ggaagggtgatgtggctgcggcatcgccggcctcgctatgggctgggaagaaacggtggatgccgccatttcccacctgttgaagacttgcctgtcgaa

SEQ ID NO: 867128 - DNA, 99 bp, Homo sapiens
atgagcattctccagggaaaggatgacatatttttggacctgaaacagaaattctggaacacctatatggcatgttatttgaaagcaattgagacgcaa

SEQ ID NO: 867129 - DNA, 99 bp, Homo sapiens
ctcaggccctaaactgccagaattttcaaaccggccaccagatctgcgtgagttctgaagaagaacaagatggttttatcagagtcctcagtggaaaaa

SEQ ID NO: 867130 - DNA, 98 bp, Homo sapiens
tcatccaagactccagtattctccagaaggtgctaaaattgaaagtggactatttaatagctagtagacccaaatgatttgtacattgtagaacccct

SEQ ID NO: 867131 - DNA, 99 bp, Homo sapiens
atctacaaccgctcagaggcatgtccagcaggagccgaggacggcatgtcccaggccccgggagcacagccgagcccacccaccgtgtaccacgaacgg

SEQ ID NO: 867132 - DNA, 99 bp, Homo sapiens
gagcgagccagcgcccggagcaagcggagctcccccaagagccggaaagataatgtggatgcaaatgatcttaagcagttttttgagaccaactattct

SEQ ID NO: 867133 - DNA, 99 bp, Homo sapiens
cagccgggaactccccatcgcgttttgccagcgataatacgcctcaggaaactaaatatattttgccaactttggaaaaagaattattcttggcagagc

SEQ ID NO: 867134 - DNA, 98 bp, Homo sapiens
tgtacgtgaaactgtcaatgttattactctatacaaagatctcaaacctgttttggattcatatgatatgctgtgatagcatttggatgtgccagctg

SEQ ID NO: 867135 - DNA, 98 bp, Homo sapiens
tttggttctgctagtcacgtttccaaagctgtgtgctcaacctacttacagtcacgttactacagagttttccgtctgatgaaggttggccatttgca

SEQ ID NO: 867136 - DNA, 98 bp, Homo sapiens
gggcttgagagctgggttctattttccctcctcaaactgactttgcagccacggagagtccacctggaaggccgctgtggtggaaggatgtttgactg

SEQ ID NO: 867137 - DNA, 99 bp, Homo sapiens
ggagaggatccggcgccgaatcactgactggcacaggtgttgggagcattagtttggatgaattcaagtcattttgccattttacaacccacttggaag

SEQ ID NO: 867138 - DNA, 98 bp, Homo sapiens
agatactggaagctctacgctactgccatgataataacataattcacagggatgtgaagaacatccatgatagcagtcttctgtaaatcgaacttttc

SEQ ID NO: 867139 - DNA, 99 bp, Homo sapiens
cacctcctcagtcaacacccttgagcccacctccactcactcccaaagccaccaggaccctaagccacgtgctgtacgccgacatcaagatggagaatg

SEQ ID NO: 867140 - DNA, 99 bp, Homo sapiens
cccatcagaggcaccccagacacaagtgtgaacatggctacgcctcttcattcccgtccatgccgagcccccgactgcagcattcaaagcccccacgga

SEQ ID NO: 867141 - DNA, 99 bp, Homo sapiens
aatgggaactgacaatgatagtgaaaattggaaggaagtgcataagatggtggttgaaaggtgtggcatgcagcattttggaaggaaaattgaagacgt

SEQ ID NO: 867142 - DNA, 99 bp, Homo sapiens
caactagcggcgggtcgtgggcacctccaggtttttcgttggaatatacgttgcacatttatggcgattctgagtgtgagggcagacttctgccaggct

SEQ ID NO: 867143 - DNA, 99 bp, Homo sapiens
ttcccctctgggatcattttctttctatctgaagtatatttttagaagttcttcagaaaagaactgttgataatggcatcagctgctaaggaatttaaa

SEQ ID NO: 867144 - DNA, 99 bp, Homo sapiens
gttatttttcttcatcagtcttctttccaatctgcagagcgcagaaggcctgggtgaagggtggcatccggaccaggtaggaggccacgatgatggccg

SEQ ID NO: 867145 - DNA, 98 bp, Homo sapiens
caagtttacggtagtggtgttacgtgccaccaaagtgacaaagggggcctttggtgacatgcgtaattaataatgcttgtgctactcaagccatagtg

SEQ ID NO: 867146 - DNA, 99 bp, Homo sapiens
aaggactcgccctctgggaggcttaccgagagtttgaaagtgcgattgtggaagctgctcggatatgagggaaggcaccattggagatatggctatcct

SEQ ID NO: 867147 - DNA, 99 bp, Homo sapiens
agggcttcctggcccgaaaggagagcctaccccaccaacaactgaacgctttggtcaggctgctacaatggaaggaattggggcaattggtggaactcc

SEQ ID NO: 867148 - DNA, 99 bp, Homo sapiens
ctttaagaatgagggtgccgaaccagatctaatcaggcaaatgttctctagttacccaactaccactgtacttcccacacgtcgggcacagactcctcc

SEQ ID NO: 867149 - DNA, 100 bp, Homo sapiens
cagggaagcagaaggtagaccactgagtcctagtccattctgtttttctgatttgcatataagcaaaggtctaagttctggagccaacccttcagaggtc

SEQ ID NO: 867150 - DNA, 99 bp, Homo sapiens
gaagctgcgctgcattctgcgggacgaaccctgctccgcgcgagatatgagtaaaattagcctaatcagaatgttagttcctgaaaacattgacacgta

SEQ ID NO: 867151 - DNA, 98 bp, Homo sapiens
gactgcgttccagccccagttccccggcagcgggacccggcgaagacgcgaccgcggcgcgagtcaccatggtgcaatggatgagcttcatagtctgg

SEQ ID NO: 867152 - DNA, 99 bp, Homo sapiens
cagatcagaggtagtcggacctttcccgctggcgcgcagcctcagctagctgccactgcagagccccgccatggaagacacgccgttggtgatatcgaa

SEQ ID NO: 867153 - DNA, 99 bp, Homo sapiens
agaaggacccacggcgtctgttcgaagtgcctttcttcctgacgtggagtgtggtgaactcagtgcattgggccaatggttcgacacaggctctgccag

SEQ ID NO: 867154 - DNA, 99 bp, Homo sapiens
ctgtctccctggagttcttgcaagtcggccaggatgtctcaggtacaggtttgcagattccgccagcagcacagcaagctctacagatgagtggctctt

SEQ ID NO: 867155 - DNA, 99 bp, Homo sapiens
ctcatttcgggtttggaagaggatcagtatggcatgcccctggccatcttcacaaagggagatcttgtgcgaaaactcaaagaagataaagcaccccaa

SEQ ID NO: 867156 - DNA, 99 bp, Homo sapiens
tctcaaaaggtgatctggacaaaggaacaggtatctcagatcactggggtgatcctgctggctgttggagtctggggcaaacttactctgggcacctat

SEQ ID NO: 867157 - DNA, 102 bp, Homo sapiens
agaaggttctgctcagtaccgggaaaggctagaaatggcagagaattacttccagctctcagtagactggccagaaagtagagacggggtttcactgtgtta

SEQ ID NO: 867158 - DNA, 99 bp, Homo sapiens
tctgtcagagaatgaaacactcatcgcatgcaccagtatgcatgagcgggtgaaccgaacagaaagacagtttcgatcacttccagctaaccaacagaa

SEQ ID NO: 867159 - DNA, 99 bp, Homo sapiens
ggagccgcaccacctaacgctggccgacaacagcctggcgtccgccacgagagtgataatgaactctcaagtggaacaggtgatgtgtctaaggattgt

SEQ ID NO: 867160 - DNA, 99 bp, Homo sapiens
ctcaggcgattacaagacgattcacctgtccagcatccgaccaccgaggctggagggggagaacacccagaatgcaggctcaacagtaccagcagcagc

SEQ ID NO: 867161 - DNA, 112 bp, Homo sapiens
aacagagtgctgttttagagctggcagcagcatctcagcccaagagaagagatggagtctccctatgttgcccaggctggtctcaaacttcctgtgctcaagttatcctcct

SEQ ID NO: 867162 - DNA, 99 bp, Homo sapiens
gggaggccgagaaccgcagggactggccgaggatttgaactcagaggatcaaaaagccttcagtgttgaacatacaagctgcaatgaggaagaaaattt

SEQ ID NO: 867163 - DNA, 98 bp, Homo sapiens
cggcagtgaccgtgtgtcagaacaatcttgaatcatgaagctactaaccagagccggctctttctcgactccaagaatgaaaaggctctgggccgcaa

SEQ ID NO: 867164 - DNA, 99 bp, Homo sapiens
gttttcagggagaaaagcatgcagaacagatatgtacaaagtgccgtgctggtatagaggactctaagaagtggggcatgctgtttctggtgaaccagc

SEQ ID NO: 867165 - DNA, 99 bp, Homo sapiens
tgaaaactctacataggaacacgatgtgaatggaagaaacctgtcattgttctcttacatctgatggaaaaaatttgtctcaggaaaaagaattgctga

SEQ ID NO: 867166 - DNA, 99 bp, Homo sapiens
tcagtactaaagaagatgcagtttcctttgcagaaaaaaatggggctgataacatccggaaatactggagccgctactaccaaggatctcaaggggtaa

SEQ ID NO: 867167 - DNA, 122 bp, Homo sapiens
gggacacggtgctgctgcgtaaggaatctcggaagctcattgttcagcccaacactcgccttgaaggtaatgagagacgaccttaagtggacagagattctagaacaggagaaataaaacag

SEQ ID NO: 867168 - DNA, 99 bp, Homo sapiens
ctggcggcctgcgcagccacctcaaggctactgatgcccgaagggcttttccttgctgggatgagcctgctatcaaagcaacttttgatatctcattgg

SEQ ID NO: 867169 - DNA, 99 bp, Homo sapiens
cttcctcaacaccagcaccgcagatgttgtcaaggtggcctaccaggaggccaggggtgtcgccatggtacggacattgctgcaggagaagaggttgcc

SEQ ID NO: 867170 - DNA, 99 bp, Homo sapiens
tgctgcccaaaaaccacatagcaacaccagaaaactgggaagcattttgaatgaatttggacatcacaaggtctctacagcggaacaatgtcgttcttc

SEQ ID NO: 867171 - DNA, 99 bp, Homo sapiens
ggctgagacccgtgctgaatttgcagagagaacggttgcaaaactggaaaagacaattgatgacctggaagacagtgatctgacacaaacacagctgaa

SEQ ID NO: 867172 - DNA, 98 bp, Homo sapiens
ggaggtgtttcacaagtagcaaatgagatgaaccatcttcctgcacacagccaaagtctgcaaaggaagccattaatttgctagaaccaatgacaaac

SEQ ID NO: 867173 - DNA, 98 bp, Homo sapiens
ggataagatgaccttcagtgtgctgctcaaaaacagagcccattgaggatatttcacaacctgaaagatgtgggatttctccaggtgaaagtcatcag

SEQ ID NO: 867174 - DNA, 99 bp, Homo sapiens
tcagcttggcggagaacacccaagatgtgcgggacgacgacatctttatcatcacctaccccaagtcagggcagagcggcttgggtaaatccaccttaa

SEQ ID NO: 867175 - DNA, 99 bp, Homo sapiens
attaaggatgatatagcaacagagttgccctgtcaccatttctttcacaaaccttgtgtctcaatttggctacaaaagcttaagagttggacagtggag

SEQ ID NO: 867176 - DNA, 99 bp, Homo sapiens
agcttaccaggctggcttgctctgagctgcggttactgtgtccaggccccgggttctcaggttccccacattggcagacaaaattagaagcggcacaga

SEQ ID NO: 867177 - DNA, 99 bp, Homo sapiens
cctcactgcccagaccaaccccttcctcagcctgtcgggagcagagggcagtggcggtggccccaaaggaggggacctgaacccgcggcgggacatctc

SEQ ID NO: 867178 - DNA, 99 bp, Homo sapiens
cagcctcgtgttctatatcttgagccccttgaacctgaacagcatcccagacattgagacttaattcagtgcacaaatgagatgaatgtgaacatccca

SEQ ID NO: 867179 - DNA, 99 bp, Homo sapiens
ttgctgtagccgtagtatcacctcatacttttcatttgcgacctcatcatccagattcctagatgaggttatgaagaagtatggcagtttggttccact

SEQ ID NO: 867180 - DNA, 99 bp, Homo sapiens
ctggcgggttgacctcagtctcctggagcttccagccagagggggccgacactactgtgtcggtttctgaaggattgtcattcttgcatagcagtgtga

SEQ ID NO: 867181 - DNA, 99 bp, Homo sapiens
gtcctcctggcctcagcaacctgacaattctgtcgtgtcccggtcagccaccatccgcctatctctgcgtgtcatgctgagtctagaaattttgttttc

SEQ ID NO: 867182 - DNA, 99 bp, Homo sapiens
ttgaaggcctaatcacaaccatagttgggtatatacttttagcaataacactgataatttgtcatccctgaaaagcaaaggcctcatctccatggcaca

SEQ ID NO: 867183 - DNA, 98 bp, Homo sapiens
tcactgcctgcgcagctccggccgcctggctccccatactagtcgccggtctgctggagtttgctggaggtccactccagaccctgtttgcctgggta

SEQ ID NO: 867184 - DNA, 99 bp, Homo sapiens
atcaacaaacggcgggaacccattcccagtctggaggccatttatttgctgagccccacggagaaggtccccatcccggccttggcaatgaccctggcg

SEQ ID NO: 867185 - DNA, 99 bp, Homo sapiens
tgacacctgaaatgattcttcacatccctgagaaagcctctcactagaggatgaaaatcgttctgcataaaggcctgggctttatgaaaaatatattca

SEQ ID NO: 867186 - DNA, 99 bp, Homo sapiens
gagcaatttccaggtattgaaccatggcttaatcaaatcatgcctaagaaagatcctgtcaaaatagtccgatggtgctgactgggttacttttttaaa

SEQ ID NO: 867187 - DNA, 99 bp, Homo sapiens
aggccgtccagcagatggcggatgccctgcagtacctgcagaaggtctctggagacatcttcagcaggtcaatgagctgaaggagaaaggcaacaaggc

SEQ ID NO: 867188 - DNA, 98 bp, Homo sapiens
caagcatggcaaagactggcaaaagcacaaggattctcgctgtgacagagacaacaccgagtatgagaaatcatgcatgccccgcggtccagggacag

SEQ ID NO: 867189 - DNA, 99 bp, Homo sapiens
ctctcagcacctgggcggacggtgaagaagaattttcttatgggtattctctaaaaggaataaaaacatgcaactgtgagactgaagattatggagaaa

SEQ ID NO: 867190 - DNA, 99 bp, Homo sapiens
ttttgatagagctcctacattgactggcttgattacttggtctgtagatctctccactctgcttcagcctgtcatagtcaagtccttccgtctggactc

SEQ ID NO: 867191 - DNA, 99 bp, Homo sapiens
tgccagtcaaacacagcaagatgcaaaagccttcttgtggaatagttgttgacctcctgtactggagagacattaagaagactggagtggtgtttggtg

SEQ ID NO: 867192 - DNA, 99 bp, Homo sapiens
ggatcgggccccaaggaggcctccattactgtgtctgtgctccacggcacccattctggccccagctacaccccagtagagacggggtttcaccgtgtt

SEQ ID NO: 867193 - DNA, 98 bp, Homo sapiens
ggcgagctggacctggctgtgatcatttataatccttgactcctccgctccgccacttgtcaagatgacaggattcatttcggaatgaaaggcttcat

SEQ ID NO: 867194 - DNA, 99 bp, Homo sapiens
ccaagacagagcgctactcctggcagtgcgtcaatcagagcgtcctgtgcggcgttggagaccagggccagccctggccacaccccaggctgtgtcacc

SEQ ID NO: 867195 - DNA, 99 bp, Homo sapiens
gtcatttttcaccgcttgcccaaatacatgccgaaacttgctctgtcgtaccactcgcctcatcgtgtcttgcatccaagatgccttcatactcagaca

SEQ ID NO: 867196 - DNA, 99 bp, Homo sapiens
gttatttcagacatatttgatggaacaatcattagttcagtgcagtgtctgacttgtgacagggtgacttcatggtcatgacgattttcttcaatgtga

SEQ ID NO: 867197 - DNA, 98 bp, Homo sapiens
tcccatgcaaaccaatgagggagaagtatcggaagaaagcagttccaaggcctgcacagctgaccacagttgggaaacgttgctgtctttggattcag

SEQ ID NO: 867198 - DNA, 99 bp, Homo sapiens
ggcagggctcaatatacctcttcagcagtagcatagtttctgattgagtgtggcatcaccttctgcaacttccaagcttcgtcagtagaagttaggcga

SEQ ID NO: 867199 - DNA, 99 bp, Homo sapiens
gcgaggtagagttggggtcgcagggtccgagtgattggaagctccacattggcactctgccacctggcctcaggggccgcggatgcctattaccagttt

SEQ ID NO: 867200 - DNA, 99 bp, Homo sapiens
cagtgtgaggagctgctatggtgctgagtttcctggtagagccggccgagctgaggcggtcgcggccatgaaggtactaggttttgacaagcttgcatc

SEQ ID NO: 867201 - DNA, 99 bp, Homo sapiens
gactgcggggcgggccggagtccgtccgagggctcccgcacctcgggctgcgggtgccagatgcaattaaaaagtgtcagagggctggaattactgtgc

SEQ ID NO: 867202 - DNA, 99 bp, Homo sapiens
gtttgatctgtggatgaaatgaatcatgattttcaagctcttgcattagaatctcggggaatgggagaggtagacatagctgacattgagaatgaagag

SEQ ID NO: 867203 - DNA, 99 bp, Homo sapiens
attccagggtcaacaaaaggagtttctgggagaaaatatttacaccagcagctccagttcataccaataaagaagatcctgctacccaaactaatttgg

SEQ ID NO: 867204 - DNA, 99 bp, Homo sapiens
tgaagcacatttgggaagccacattttgcaggggattctgcttttgcatcttcctcgttttctcttgccgctgccaagtaagaagtgcctttcacctca

SEQ ID NO: 867205 - DNA, 134 bp, Homo sapiens
tcggggagtccaactaccacttcggggtcacatatgtggggacaaagcagctgagtcccacagaggagttcattgccgttagccagctccgcggctccacccagggcaagatcctctgcttctatggcccccct

SEQ ID NO: 867206 - DNA, 49 bp, Homo sapiens
ggagacgctgcagcgcgcggacccccccaagacacacgtgacccaccac

SEQ ID NO: 867207 - DNA, 99 bp, Homo sapiens
agatgataaagatgatgatatccttctcaaccttgtgggatgtgaaaactctgttactgaagaatctgtctatgatcttctcccaaaggagttacagtt

SEQ ID NO: 867208 - DNA, 99 bp, Homo sapiens
agagactccactgaggtcacacagccgtataagatcatccccaccccgggtacccaccccctgctggtcttggtgaaccccaagagtggagggagacaa

SEQ ID NO: 867209 - DNA, 99 bp, Homo sapiens
cctcggccccctgagtgagtccggtctcccggcgaaagtgagcgaggtttgcccggagcgcgcacgaggacttcagaaatgggcttgggaaccagctga

SEQ ID NO: 867210 - DNA, 99 bp, Homo sapiens
tactgtactggctattggaaggaggagattctgaagataaggagataaatttgcgcctcattttggtaagcggaaaaacaaaagagttcctgttttctc

SEQ ID NO: 867211 - DNA, 99 bp, Homo sapiens
caggcgcggcgcggctgcggctgaggttcctaaaagtaaagctctagaggccgtcaaattggcaatagaagccgggttccaccatattgattctgcaca

SEQ ID NO: 867212 - DNA, 99 bp, Homo sapiens
ctgcgatcctcggggaaaccgagggcatccgtttccgaggctttagtatccctgaatgccagaaactgctacccaaggctaagggtggggaagaacccc

SEQ ID NO: 867213 - DNA, 99 bp, Homo sapiens
tggtgatggagattttgatgtggatgatgccaaagttttattagatagcattacaactctgccagatctaactccacttttcatcagcattgacccaga

SEQ ID NO: 867214 - DNA, 99 bp, Homo sapiens
attcatttttctacatattaggatataaccctgagacaagagacattttaaatcctaaggatgtgatcacaactcgctttgagaattcctatcctagca

SEQ ID NO: 867215 - DNA, 75 bp, Homo sapiens
tcggacttgcagctggagcggatcagcgtctactacaacgaggcctcttggcggcagggtcaggccatcacgctg

SEQ ID NO: 867216 - DNA, 99 bp, Homo sapiens
gcctcctgagtagctgggattacagcaggaagctaggaaacctggcagtgccagctgatgagaagtggaaagcggtgtttgacgaatgttggcgccaac

SEQ ID NO: 867217 - DNA, 99 bp, Homo sapiens
tcctgtcggcctgtaggaatggtgccttgtggcctctttgtggccaattgtgctcttctgctggcatttcctgttgacgactctcacagcaacagtaga

SEQ ID NO: 867218 - DNA, 98 bp, Homo sapiens
aggaattggagaatgatgcagcttttcagcaagctgtgaggactagtcatggcagaagacctccagaagaggatcacctagcccgggtagaagaggca

SEQ ID NO: 867219 - DNA, 98 bp, Homo sapiens
ttgcaaagagggctacgtgaaagatctgaaaggtgttgatatatttaaggagtgcaaattgggatacccggattgcagcaggacaagctgttgaagct

SEQ ID NO: 867220 - DNA, 99 bp, Homo sapiens
aaatccaactatcaaggcctcccagtacgttgtgtgaagagtatcattcgacaggtcaatgagtggtcattgaagataagaaaggaaatgagagttgtt

SEQ ID NO: 867221 - DNA, 98 bp, Homo sapiens
atcccccatctcagcacctgggaccagcggaagaaacagcttctgggctgcctgatagacagtggaggtgatgcagaagatggggaagaatatgatga

SEQ ID NO: 867222 - DNA, 99 bp, Homo sapiens
acttatgctatttttttgtggagacttgctgagcaggcgcaacgtgctgagcttgtcccctggaatcgaccacccaggctctctgaaatgggacctcgc

SEQ ID NO: 867223 - DNA, 99 bp, Homo sapiens
tgatgttggattctgttgcctgggtaccaccagagggaaagctggggcggcaaccttcaaaagatcctgtcccatgatcatcctccagagtattcagct

SEQ ID NO: 867224 - DNA, 99 bp, Homo sapiens
agcgagcggccggcaggttgggaggagcggccgaaggtcagtggcttcaaagactccagttggattcattggactgggcaacatggggaatccaatggc

SEQ ID NO: 867225 - DNA, 101 bp, Homo sapiens
tccactcgaacagatgtgagcgagaaagccgttgcctccagcaccacttctaatggaagaatccccagcacaagatagaatatagacataatacgcttcca

SEQ ID NO: 867226 - DNA, 99 bp, Homo sapiens
cgcagtcttctaccttggaatagtgaatgaagtaaaagattatgagcctccatttggttccaaggtgcgggagcacccctgtgtcgaaagcatgaagga

SEQ ID NO: 867227 - DNA, 99 bp, Homo sapiens
ctcgacttctagtttttgtcttatttcaggcagctctgtccagtggagtgacccgttgccagagtgcagaggaaagcagatggtggagctgaatatgcc

SEQ ID NO: 867228 - DNA, 99 bp, Homo sapiens
gttcacagaaaacactccaagtgtggaccctgcaaatataaagctgagtgtgatgaagatgcagaaaatgttgggtttttctatatgagtggagaagac

SEQ ID NO: 867229 - DNA, 99 bp, Homo sapiens
gcccaggctgacagcagcgatcataagtcctctacatgcctgtatataaccttcatggactgtaatgccacaattgtcacactgaattatttcatcagc

SEQ ID NO: 867230 - DNA, 117 bp, Homo sapiens
agactgctgtgctagcaatcagcgagactccgtgggcgtaggaccctccgagccaggccccaggcagtccttgaaagagaagcttgaaaagtcaagtttgggtcttctgcagctcgg

SEQ ID NO: 867231 - DNA, 98 bp, Homo sapiens
tttcgtggctcactccctttcctctgctgccgctcggtcacgcttggacaacttgcctttgatgattttcaagagagttgtgctatgatgtggcaaaa

SEQ ID NO: 867232 - DNA, 98 bp, Homo sapiens
aaagatgaaatcttgtcccttatccatgttttcaggcccgatatctctccctattttggcctattctatgaggtgaaacctaaacatttgtcttgcat

SEQ ID NO: 867233 - DNA, 99 bp, Homo sapiens
gctatcccaccatcaagttcttcaggaatggagacacggcttcccccaaggaatatacagccgcttacaaacacgcagatggcaagaagattgatggca

SEQ ID NO: 867234 - DNA, 99 bp, Homo sapiens
tcctccaagaaccaacccccaaattggctgggacagagatgggcagtagcgaaccccttcccatcgcagatggtgacaggaggaggaagaagaagcgga

SEQ ID NO: 867235 - DNA, 98 bp, Homo sapiens
aggagagagatgttatcatgagggaattccggtcagggtcaagtcgtgttctgatcactactgacttgttgcttcgcagaatcaagaacggctatgtg

SEQ ID NO: 867236 - DNA, 99 bp, Homo sapiens
tgaaagatcgagcagaggcctatttgatagaggaaatgtatgatgaaggttcaccaggctggtttaacctgcgattattcagaacttcctcaccatatc

SEQ ID NO: 867237 - DNA, 98 bp, Homo sapiens
tattctaacagacatgagttcttatgctgaagcacttcgagaggaaatggtggaagcagcaggggaggatgagcgggagctggccgcagagatggcag

SEQ ID NO: 867238 - DNA, 99 bp, Homo sapiens
aactacctagtgcgatggggcagccggggcttccctaaggagattgagatgctcaacaatctgaaggtggtcttcacgaattggaacatcgatcagtta

SEQ ID NO: 867239 - DNA, 98 bp, Homo sapiens
tcgccgcttttctacatcgcggtggtctttacctgcttcatcgtgaccaccggcctggtattgggatgccaccaattaccctagttatgggcccatca

SEQ ID NO: 867240 - DNA, 98 bp, Homo sapiens
cgggatcgtgaccgagaccgtgaccgagagcgtgaccgagagcgcgaatatcgtcatcgttagaagtgtcagagatggctttggattccccgttctgt

SEQ ID NO: 867241 - DNA, 100 bp, Homo sapiens
ggcttgggaaataggagtgaagctgttatcgcccagttctaccacaccgcagggctgtggtagaactgggcgataacagcttcactcctatttcccaagc

SEQ ID NO: 867242 - DNA, 99 bp, Homo sapiens
tataatgaagaatgtcctactcccactcccactttccatcatggcctgaactagtttctcaggttttgagagattacctgaagttgcactcaaaagcaa

SEQ ID NO: 867243 - DNA, 98 bp, Homo sapiens
tgtggaccgggcggcacgcacgcggtgcagggtaacatggcggatgcggaaggcatccgtgtcattctggaccttactcccaactaccggggtgagaa

SEQ ID NO: 867244 - DNA, 99 bp, Homo sapiens
tgatcacttgtctggagcaagggaaagaggcctggagtatgaagagacatgagatcatggtggccaaacccacaggaaagctgtgtgaagagacaaagg

SEQ ID NO: 867245 - DNA, 99 bp, Homo sapiens
aatttggggaaagagttgtcaaacgaaacccatgtttctaatgaccagcagggaatgaaagctactggttgattttaaagtgcctgggcctcacaggtt

SEQ ID NO: 867246 - DNA, 98 bp, Homo sapiens
cggtggactcggcgatggagctgttatttttagatacttttaaacacccgagcgctgaggccaacagagattttgagaaacacattgaaggatctgtt

SEQ ID NO: 867247 - DNA, 99 bp, Homo sapiens
cggattgacaaacttgttctccatgtacctctttctacacctccctcctgccaggacctccgttctctcaaagatgttgctgccctgcacagtgctgga

SEQ ID NO: 867248 - DNA, 98 bp, Homo sapiens
tcctcggtcagtggactcttattcttcaactcagcatgttccttatatgccgacggctgcagctatgcaaggagcttacatctcccagtacacccctg

SEQ ID NO: 867249 - DNA, 99 bp, Homo sapiens
tttctcagaggatagcctttcacttattcatctgtccagcatgactcatccccgggagtgttgaggcgaactttctgaccaagtatacaactacccaga

SEQ ID NO: 867250 - DNA, 99 bp, Homo sapiens
cagagtttctacaaatgctagaagctatcaaagcccttgaagtcagtgattcgcctttgccagtctcatctcgtgtctgctttgttaagttccatgatc

SEQ ID NO: 867251 - DNA, 99 bp, Homo sapiens
ttgtggaagagaagggcacattaaaaaggaatgcccacagtttaaaggctcttcaggagtcctaagcagacttaaagccaagaaaataagaagaggaaa

SEQ ID NO: 867252 - DNA, 98 bp, Homo sapiens
atgtacacgataattaaagagtaaagttgtgctcaacgagcaagtgcaccggcacctggaccaacacgaagtgagatacctgcagtttgccttccgct

SEQ ID NO: 867253 - DNA, 100 bp, Homo sapiens
acctccgagggaaacaagaaaacacgcaaatgactttcatggaactgctgtaccattgctttgctagacctctttgatgttttcttgtttccctcggagg

SEQ ID NO: 867254 - DNA, 99 bp, Homo sapiens
cgtggggaatttctcctggggctcagagtactggggcagcacctactccgtgtcagtggtggagaccgactacgaccagtacgcgctgctgtacagcca

SEQ ID NO: 867255 - DNA, 98 bp, Homo sapiens
caccgcgcactgcacgcccaaggaaagaccacagcaagattctttcattcgtctcctcctagcctgggggaccaggctcgaactgaccctggacatca

SEQ ID NO: 867256 - DNA, 99 bp, Homo sapiens
agggaaggggcggctctcgagaggagcccgtgggctgctggaccggaccggacagcaccaggaagcccggcaggagtcttgctctgtcacccaggctgg

SEQ ID NO: 867257 - DNA, 98 bp, Homo sapiens
cggttctgcaccatcttcaggtcctactccaggggcgctcagtttgcagatggcgtgtacctggttctgctcatgggccttctggaagactactttgt

SEQ ID NO: 867258 - DNA, 99 bp, Homo sapiens
gctaacgatgaaaatcggcggacttaccagaatcttgtcattgagaaggatggttcaaatgaagtgagttctctggtgatgttgatagcctggaactgg

SEQ ID NO: 867259 - DNA, 99 bp, Homo sapiens
cagaatgcttctcagcagcaacatccccaaacagcggcgtttcacggtggcacatacatgcttagaccatgctcagcctccaagcagccttgtcatcga

SEQ ID NO: 867260 - DNA, 98 bp, Homo sapiens
tttggttcactgatgtctgctacagatccagatagtagttcctcagggaagaacagaaaagaggaaagttatatatttgagtcaaagggtgatggagg

SEQ ID NO: 867261 - DNA, 98 bp, Homo sapiens
atcctgccatgcaggcaggccctgagcacgctgctgtgtgagcagcaggttgcatctgcactggagaaatggaagacagcaatccgggaagctcagac

SEQ ID NO: 867262 - DNA, 99 bp, Homo sapiens
tctgacagaactcattctcaccaataatagtctcgtggaactggtgttggcagagctgaaagagtacgcaacagaagtggatgtggactttgtacggaa

SEQ ID NO: 867263 - DNA, 101 bp, Homo sapiens
ggcaacatagtgagaccccatctcttttgccgttgaataagcgttcccacgagcaacgcttattcaacggcaaaagagatggggtctcactatgttgccca

SEQ ID NO: 867264 - DNA, 99 bp, Homo sapiens
caagtactcggaacttggagaacgaacagccagtgcatttggttcccgatggccctgtgggagaacagtaaatggcatggggaaaatctgattgccaca

SEQ ID NO: 867265 - DNA, 99 bp, Homo sapiens
cttggatgaatttttagtgaaaaatgatccctgccgagcgggtatttctgtgggacttggatgaaaccatcatcatcttccactcacttcttactggat

SEQ ID NO: 867266 - DNA, 99 bp, Homo sapiens
gcaatgaaatcctgctttcttttcctcagaactactatattcagtggctaaatggctccctgattcatgaaataaactatcaatcttgcccagactgga

SEQ ID NO: 867267 - DNA, 98 bp, Homo sapiens
tgcggagctccgaacacgtgcgcggcttcgtgggacacatatgcaacatgcctatgatttttacaagcctgatatgctatctgaatatcctatagtag

SEQ ID NO: 867268 - DNA, 98 bp, Homo sapiens
ggagttaaggacattccaggcagaggcaaggacaggctgcgggaggagctgcaggactgaggtacagaggccaggggcccagggcaggacccagcctg

SEQ ID NO: 867269 - DNA, 99 bp, Homo sapiens
ggcaagtagcggcggcgcttcaagtattcacaggcctccactgggctctcagtaggtgggatttgtcagcagttctcattgcctgagaacatccagctc

SEQ ID NO: 867270 - DNA, 98 bp, Homo sapiens
atactttggttacctatgtacctgttaccactttcaaaaggcttcataaacttcacttaccaaatacttcaagggattcagaaacagccaagccttct

SEQ ID NO: 867271 - DNA, 99 bp, Homo sapiens
ttttattggaagaggatctaggagaaatcccaagaggaattacaagagtactgcagacatcatgaaatcacctatgtggcccttgtctcggataaagaa

SEQ ID NO: 867272 - DNA, 98 bp, Homo sapiens
caaaccctgcttcgtctgccaggacaaatcatcagggtaccactatggggtcagcgcctgtgagggatgtaagtatctccagatgaaatggccactgc

SEQ ID NO: 867273 - DNA, 99 bp, Homo sapiens
ttcgaacttagacttccggaaggactttggcgaggattgtcactgctgttccaagggcacacgcagagggatttggaattcctggagagttgcctttgt

SEQ ID NO: 867274 - DNA, 99 bp, Homo sapiens
cctgtggccaccgctctagatactgctgttgatgtctttctgtgtagctacattatcgaccccttggagtatggatgtgtccaacagccaaaaactcaa

SEQ ID NO: 867275 - DNA, 99 bp, Homo sapiens
cagcacatgagccaagcctgcctcctgtccctgctgcccgtgccccgggacgtcctggagacagaggatgaaaactggcgatggaatatgagaggagcc

SEQ ID NO: 867276 - DNA, 99 bp, Homo sapiens
tgggggtcaccaatgccagcctagtccttttcagcgtcttcactcgaggacagctgggcctgatagacatcatcttccagtacattcactgtgatgaga

SEQ ID NO: 867277 - DNA, 99 bp, Homo sapiens
ggggcatgtatttgtcaagaaacttcttatcttcatgaactgaatttcctgctattttgatattcagattggcatccagaagtaaattttcagctttta

SEQ ID NO: 867278 - DNA, 99 bp, Homo sapiens
cggcgctccgtgcgcggagccgtctgcctgcatctgctgctgaccctcgtgacaatgcagatcttcgtgaagactctgactggtaagaccatcaccctc

SEQ ID NO: 867279 - DNA, 98 bp, Homo sapiens
gtagctcttcactcctcagcgcgacgtcgtgtcgagttcccaaaaagctccgcaggggctgtagggagagccaaagaaatgtctgaggaccaggaatg

SEQ ID NO: 867280 - DNA, 99 bp, Homo sapiens
aagaactgaaggagagggaagaagcagctatgctcgagagcctcacttcggcaaacgtggtccttgcaacaaacacagatggagtctcgctctatcgcc

SEQ ID NO: 867281 - DNA, 99 bp, Homo sapiens
cctgaaccaaggaccactagcttgtactcacgcatgatgtgatctgtttaaatactgacgatctatatggtcaatagttgatcatttttcgaagggcat

SEQ ID NO: 867282 - DNA, 99 bp, Homo sapiens
gccacctcctctggttccccgagcagacttgcctgcatgatccacacggatctgacgaccatccagagactcataaactgggtcagagagttttgtctg

SEQ ID NO: 867283 - DNA, 99 bp, Homo sapiens; identical to SEQ ID NO: 820130

SEQ ID NO: 867284 - DNA, 99 bp, Homo sapiens
atttgcttgatggcttagaactctccacagccatcactcatgtccataaggaggtatcgaaggatgatcgcagtgatgtggagagcagctcagaggaag

SEQ ID NO: 867285 - DNA, 99 bp, Homo sapiens
taagcttcgaatggacagagccatccctgacacccggcatgaccagatttgtacacacagatatgacgaaagacttgaaagaagaacatttaaagaaaa

SEQ ID NO: 867286 - DNA, 99 bp, Homo sapiens
gcatctctcctgagtgtccttctggcccctgtcagacccccccacagacggattgctgtacttgtgttccaggacactttacttcggccgaagacttaa

SEQ ID NO: 867287 - DNA, 99 bp, Homo sapiens
cagcttacagactggcctggggccggagtgaagctgcgcatggagtacctctccctgatgcatgctatagtccgcaccacaccctacctgcagcaccgc

SEQ ID NO: 867288 - DNA, 99 bp, Homo sapiens
acagctttttatcctccgttgcagacatggttcaaaggatgctcgtcagaagttccgctctgttctggttgaagcaacggtgaaactggatgaactggt

SEQ ID NO: 867289 - DNA, 75 bp, Homo sapiens
gacactctggcagttataggaacacaaagctgagctgcccctcctggacctgatgaagctgtacgaaggcgcctt

SEQ ID NO: 867290 - DNA, 99 bp, Homo sapiens
gaacaggatttgcaccacgagatgtcactccagagaatgatatggaacctagcaaagctgttccactgaatgcatctaagcaagatggacctatgccaa

SEQ ID NO: 867291 - DNA, 98 bp, Homo sapiens
ccgtaggccacaccgaggaacagggcggagtagcggccgagctgcgaaagaggagatgcagaaactaccagaggccgttcagctaattgagaaggcca

SEQ ID NO: 867292 - DNA, 99 bp, Homo sapiens
tggaggaggatcgcactgctcatcttggccatcactatacacaacgttccagccgggggccattgagactgccatggaagacttgaaaggtcacgtagc

SEQ ID NO: 867293 - DNA, 99 bp, Homo sapiens
tccacattcattacagacaacaaatgttgtcattggttcatcagcactacgggtttgtacctgcgctaagaactgaggcagctgcacttccgcagacgt

SEQ ID NO: 867294 - DNA, 99 bp, Homo sapiens
agagattcctctgccatggagtcctacgatgtgatcgccaaccagcctgtcgtgatcgacaacgaatggaagttggatacactttgtgacttgtacgag

SEQ ID NO: 867295 - DNA, 99 bp, Homo sapiens
ccctggatggttgtgagggaagagacaggaagatggtgcccagtttgtgaagtgtggatatgcaggctctaactttccagaacacatcttcccagcttt

SEQ ID NO: 867296 - DNA, 99 bp, Homo sapiens
tcggaccatttcagaggttcaccgccatcattggacccaatggctctgtatacgctcaacggcaagaaagtggaagttgccgtcaaacagatcatcgct

SEQ ID NO: 867297 - DNA, 129 bp, Homo sapiens
gaaactgtacacagataaccaaccttgacttgcagcacaatgaactgctagacctcccagatactataggcctctgaggaaacactacattccagtaatgaagaggaagaccctttccgcggaatggaa

SEQ ID NO: 867298 - DNA, 99 bp, Homo sapiens
gtctgggagcccgcggccggagaagggctgcgggttagggggccggcgcccgcggttcagattgtggtatctgaacgggaactatttggttctgttggt

SEQ ID NO: 867299 - DNA, 99 bp, Homo sapiens
tccgcctctcccagatcagtgaggatgtcatcagactcttcaaaaagcatttaaatcaaacggtattgagatggattgggttatgaaacataatggtcc

SEQ ID NO: 867300 - DNA, 98 bp, Homo sapiens
tccccaagccattcagggcctttgcctttgttacatttgcagatgatcagattgcatgagactcgttcaggagacatctgcaatgcctgtgtcctgct

SEQ ID NO: 867301 - DNA, 99 bp, Homo sapiens
ggctttcctggtcagcagcgacttggtccttgaatgggcaagagggcacatgaagtacggcgtcctccacattcacggcctctacacggacccctgcgg

SEQ ID NO: 867302 - DNA, 99 bp, Homo sapiens
tcttttaattattaaaacagagcttcctgctgctattgcagaatttttgactggagactatagtagggctccattggcctccagaggactgggagcctg

SEQ ID NO: 867303 - DNA, 99 bp, Homo sapiens
ctccgaagaaagcagtgatgaaattcttgtgcgtctaacatctgcgtgactgtgaagtgctgaccacactcaccccagacactggccgtatcctgtcca

SEQ ID NO: 867304 - DNA, 99 bp, Homo sapiens
agtgcctctgtcttggctgtggcctgccagagctgcattcttatctggaccctggaccctacctccttgtctacccgtagagaaggggtttcaccatgt

SEQ ID NO: 867305 - DNA, 98 bp, Homo sapiens
ctaaacagtggactcaacttcaaagacgttctcaaggagaaggcagacctgggatagcactataatatgcagaaatctacaaattctgatacttccgt

SEQ ID NO: 867306 - DNA, 99 bp, Homo sapiens
tcaatcttacagctaacatgttgtacctggaaaacaatgcccagactcaatttagtgaggagacaaggagaaggccttaggatctactgggggagtccg

SEQ ID NO: 867307 - DNA, 99 bp, Homo sapiens
ctgaaatgtaaacaagaagccagaaacttacaggggataaagcaatacgagaattggagacccaaccagccagacagcttcttttctgctggagaagac

SEQ ID NO: 867308 - DNA, 99 bp, Homo sapiens
gtcgacggcggcttactccaaatctaccttctcctctgggtaggtgctctccgtgtttttcgaaggtggcagtaggtgagcctgtaatcccagcacttt

SEQ ID NO: 867309 - DNA, 98 bp, Homo sapiens
tagagacacctggtttggcgataccccttcaccaaggagactgctatttcatgcttggggccacctggtcctccaggcccaagaggccctcaaggtcc

SEQ ID NO: 867310 - DNA, 99 bp, Homo sapiens
cccacagccccagcaacaggctgctctacccccggcagtctctgctggatgaaccgaatcctaacagtccagccaatagccaggcagcacagctttatc

SEQ ID NO: 867311 - DNA, 99 bp, Homo sapiens
caagcagaatgtgatttgcttgaagatatgagcatcagaggctccttgaaatgctagatacagagaaggaactgttaaaagaaaaaataaaggaagctt

SEQ ID NO: 867312 - DNA, 99 bp, Homo sapiens
gtcaggcaagagagatgcctgcaaagctaacaaggaaagcccctggagctcctgtaataagaatgtggttggaagatgcaaactgtggatgatcatcac

SEQ ID NO: 867313 - DNA, 98 bp, Homo sapiens
gagagaccaaatttttaagaatacatttcagggcatctactctgatcagaagatctgtaaagactgtcctcacagaggggtgtttgatgcttccctca

SEQ ID NO: 867314 - DNA, 99 bp, Homo sapiens
gcagtacttggagagactctatatgaaaaggaactccctgacatccttggtccccttcccctgagcccatctacaatagcgaggggaagcggcttaaca

SEQ ID NO: 867315 - DNA, 98 bp, Homo sapiens
ggagcggcggcaagaaaaatgccagccagaagaggcgttcgctgcgcgtgcacattccggtgcacatcctcatgggctcctgttacaagaccaaaaaa

SEQ ID NO: 867316 - DNA, 99 bp, Homo sapiens
tctctgggataatttgcacaacagatatcatcctctcgcggcccttctcagcattcctggctttgttgagcggctttgcaaactggcgactcgaaaggt

SEQ ID NO: 867317 - DNA, 99 bp, Homo sapiens
cttgggctgctacaacaaaggctgctccttccgataccattacccgtgtgccattgatgcaggtgacagagctgaatgaacctctctccaatgaagatc

SEQ ID NO: 867318 - DNA, 99 bp, Homo sapiens
aggcgatccttataatcctccagtttgagctgggcgtgctggcggtgcccactggagctggaactggtcctacagatgtcctgagccagcagagccctc

SEQ ID NO: 867319 - DNA, 99 bp, Homo sapiens
gttggaacgatgtcataacacttgtgtgacctcatgaatcgcatgtaaacaccactttctgagtcttctactgctgtaattccagcactttgggaggcc

SEQ ID NO: 867320 - DNA, 98 bp, Homo sapiens
gaatctggaaagatgttagaattgaagcctataatatttgtcacctgaactacttcacattttccccaatatatgctaataaggcagtggattttaca

SEQ ID NO: 867321 - DNA, 99 bp, Homo sapiens
ggtcaccagctgcccaccaatgtagaggattcccactttcagcagcatacctgaaatattgcctttgccatagcaggggttggagaagcccccaggaca

SEQ ID NO: 867322 - DNA, 101 bp, Homo sapiens
caaggtcaaggcccagaaaaagtgaagaaaacaactcaggtcaaagactacagctttgtcactgaaggagaaagtggatgaggaggggctgaagaagctga

SEQ ID NO: 867323 - DNA, 99 bp, Homo sapiens
atatcatcctgatggggtgggggaagggagggaagagtccagcggcaaaactataacactgtttctcactcaaagctgtgattttggcttggagttcat

SEQ ID NO: 867324 - DNA, 98 bp, Homo sapiens
tggagactggaggaagaattcccaagccagagctttccagccatgtgacatgcctgctcctactctgccttccatcatgaataaaagcttcttgaggc

SEQ ID NO: 867325 - DNA, 99 bp, Homo sapiens
ataccatcaacatcctgctgtatgatgacaacagcatcatgaccttcaacctcagtcagaatgtcatacccaggctatcccccaacaggctacccacct

SEQ ID NO: 867326 - DNA, 98 bp, Homo sapiens
cgctgttgcaagggatcacagagaccatattctacggggctttcagcaaatcaaagccagcctcatgggaccagaatcgcatgggacaggactcctat

SEQ ID NO: 867327 - DNA, 99 bp, Homo sapiens
ctgtgtgacaccaagataagtaacgttattaatgctgcactggctttagcagcaaaaccacagagtaaactggcccaagagaacatggatctttttaaa

SEQ ID NO: 867328 - DNA, 99 bp, Homo sapiens
tcaaggaaacctttccaacacagatgtccaagctgccaagtactgcccttcctgcaagcagcaccagctggcaaccaagaagctggacctgtggatgct

SEQ ID NO: 867329 - DNA, 99 bp, Homo sapiens
ccaatgtcaaagttgtgtccaattttatggattttgatgaaactgacagtcattttgtttactcattcagccctgttgcaggtcccaataaactcttca

SEQ ID NO: 867330 - DNA, 144 bp, Homo sapiens
gagtcgtatcaaggagaggaagaactagtttcccaaacagatgttaagacattcttggaagccttaccgggtaatagatggtctggaaactctagatgagttggagaagttgccagtaaatgagaagacataccgacctcttaa

SEQ ID NO: 867331 - DNA, 99 bp, Homo sapiens
ctccccatcctcttcttggcttctcatgtgggcagcctggcatcctcgctacaacctcattgttgtgggccgatacccagatcctaatttcaaaagttg

SEQ ID NO: 867332 - DNA, 98 bp, Homo sapiens
gacaggaaagtgtaacatcagttacagatccaagccttatgcatttgatcgggtgttccagtcaagcacatctcaagagcaagtgtataatgactgtg

SEQ ID NO: 867333 - DNA, 99 bp, Homo sapiens
cagcaattgcccttaaaacatcatccctgccctggatcggcctggagccagtgcccaagtacggtttggtcccagaggagagcggctgccacaccacca

SEQ ID NO: 867334 - DNA, 99 bp, Homo sapiens
aagaactcacagctagtctatttgaggactcgggacctggttcgggccggggtgctgaaggagaagcccctgtggtttgacgtatatgacgcctttccc

SEQ ID NO: 867335 - DNA, 99 bp, Homo sapiens
gctgtatggcagctaccctgaggatcattgaagagaacatccctgagatggcagaaacggtggacacaagcgaaatggtcaacggcgctacagaacaaa

SEQ ID NO: 867336 - DNA, 99 bp, Homo sapiens
atctcttcatggcttgcttccttgcttcctttgggtttctgctaacttgtcttcaggagaatcaatacgcccaatggatggctgcctgcatgttggcat

SEQ ID NO: 867337 - DNA, 98 bp, Homo sapiens
cccgaccttggcaccgcgtttgtcaagttttctactcttacaaaggaactgtccacactgctgaaaaatctgtcgtcctcttgagttctggcgccttg

SEQ ID NO: 867338 - DNA, 99 bp, Homo sapiens
acacgggtgatctccatggagaagggtggtaacatgaagagagtgtttgaaagattctgccgaggcctcaaagaggactgcatcaaaacatgtaaacaa

SEQ ID NO: 867339 - DNA, 99 bp, Homo sapiens
cgggagaagaaactgttaggctaggttaatttcacctaccagtttttgaaaaagaagttctatatatttagccaatttatgtatgatgaacacatcaaa

SEQ ID NO: 867340 - DNA, 99 bp, Homo sapiens
atttctttggcatcactgcagctagtaatttgccttctggatttgctgacggggcccttggtgtgagtatcagtgcgccaggaggagccattgcttctg

SEQ ID NO: 867341 - DNA, 99 bp, Homo sapiens
gaatatctttccaccatcagccactctgcatctttccaacattcctgcatactccttccacgttactgcagacggtcagatgcagcctgtcccttttcc

SEQ ID NO: 867342 - DNA, 98 bp, Homo sapiens
cattgctgggcgtctggacatctgtagctgtcgtttggtttgatcttgttgactatgaggaagttctagggaatgggtactgttcaaaaaggaatgcc

SEQ ID NO: 867343 - DNA, 99 bp, Homo sapiens
gtagcttggttggtggtaccctaaaattagggcatgattaagagtattgggaaagggtcgttgtggtgcatagacccagagtatagacaaaatctaatt

SEQ ID NO: 867344 - DNA, 99 bp, Homo sapiens
caatcccccactctttccgccctaatggaggtctccagtttcgtataaccccgttttcacacgaatggccccttcacatatttgaagactaccgtcgtg

SEQ ID NO: 867345 - DNA, 98 bp, Homo sapiens
ttctggggagaccccgacgtggagtgccgagctctccacacaaggagatgcaagtcaggtgattgggcctcttactgaaggacagagaagaaatgtgg

SEQ ID NO: 867346 - DNA, 99 bp, Homo sapiens
gggaagccctgctactgctggattagcgccagagagtgtgacgcaggaaaggaggcctcccaaacttgcctttatgtcaagaggtgttggggacaaagg

SEQ ID NO: 867347 - DNA, 99 bp, Homo sapiens
ataaatttgccatctccctctgcacaacttacctttgtaaggtccagcttaaaaaatgtgtccgacctttttgtgatgggaggagctcttgttttagaa

SEQ ID NO: 867348 - DNA, 99 bp, Homo sapiens
ggccgatgaagtgcagaggtttttttctggctgcagagagactaagggcacttcctgaggttcattaccacctggggcagaaggacagggagacagcaa

SEQ ID NO: 867349 - DNA, 100 bp, Homo sapiens
ttgccttattttttctcatggatgttcttctcatttgtgcactgaattaagtccttctacaaatactcgaagaagaacatccatgagaaaaaataaggca

SEQ ID NO: 867350 - DNA, 98 bp, Homo sapiens
accagcctgcgggtttatcctgggctctttctgtaccaaaatctacgtggatgcggtcttcattgacacaaggggacttgatctcatcttcatgccag

SEQ ID NO: 867351 - DNA, 99 bp, Homo sapiens
ctcggtgaggtagaccactaccagctggcactgggcaagttctcagagggcactgcaggtacaggtttgcagattccgccagcagcacagcaagctcta

SEQ ID NO: 867352 - DNA, 99 bp, Homo sapiens
gcccgagcatgcaatattcatcataacaactcccgggcaaatgtgagaaacgagtacaggatgtaattgaacgattttgggatttcattgaccagctga

SEQ ID NO: 867353 - DNA, 99 bp, Homo sapiens
caggaggcaccttggataagctggagtctattcctggattcaatgtcatccagagcccagagcagtctctggcatctctatcccctatgaggcaccacg

SEQ ID NO: 867354 - DNA, 99 bp, Homo sapiens
cgacacggcgggcaggaaatccaccccgctgcacttcgccgcaggttgtaggtcataaagaaggtctggatgttatggagagagctgatcctttattcc

SEQ ID NO: 867355 - DNA, 99 bp, Homo sapiens
ctgggccctgggccagaggcagaaaacggacggaagaaaaggtctggccggacaagtacatggcggacatggacgagcttttttctcaggtggatgaga

SEQ ID NO: 867356 - DNA, 99 bp, Homo sapiens
tgcgtaccctcaacatcagtggaaacgagatccagagattgccgcagatgctggctcacgttcgaaccctggaggaatccctgaggactccaaggtaga

SEQ ID NO: 867357 - DNA, 100 bp, Homo sapiens
accaaaagtgttaaatgtgatcagcttctcgcaatacttcatataccacaaacttctttgtatctgaaaattcaaggctgatcacatttaacacttttgg

SEQ ID NO: 867358 - DNA, 123 bp, Homo sapiens
ggagacgaatgaaagaatcttgctgtggtctttcctgtgaaagccatatctctgggctttcacaggaaagaccacagcaagattctttcattcgtctcctcctagcctgggggaccaggctcg

SEQ ID NO: 867359 - DNA, 98 bp, Homo sapiens
gtagatcctgacactaaggaaatgctgaagcttttgggttacatggaacatgaagtgtacaatatcctgctgcaaatccttagcatggaagaggagtg

SEQ ID NO: 867360 - DNA, 143 bp, Homo sapiens
gacagtgactaccatgacgaaaacatgtactacagccagtcttctatgtttccacatcggtcagaaaaagattgctcctatatccctccctgtaagagagaaaatcagaagaatttggaaagtgtcatgaattggcaacagta

SEQ ID NO: 867361 - DNA, 99 bp, Homo sapiens
cagatccgggagcacgtcatcgccatcgaagggaaaacaaagtgcatgatgaagtcttcagactgtgtcataaagcatgctggtgtatacagtactggc

SEQ ID NO: 867362 - DNA, 98 bp, Homo sapiens
tttaaagctgagctgcgaggaaaatggcggcgggagattattcttggagaaaccctgtctgtttactgtaaccttttgcactcaaattcctttatcag

SEQ ID NO: 867363 - DNA, 99 bp, Homo sapiens
gaaatgcatctttatgtcagaaacacaaagcagcccaaccaaagggcttttgcagacatgctgaaagtaaacaagaccttgacaagtctaaacatagaa

SEQ ID NO: 867364 - DNA, 98 bp, Homo sapiens
attcctcaactggccaaattcagtcccgatttgtggggtgtgtctgtttgtacagtagatggacagagatttggataagtgaagacagtaataacatt

SEQ ID NO: 867365 - DNA, 99 bp, Homo sapiens
gtagctgaatgtgttactccattgctgaggagtgctctacgtggccacggaggccatcctcattgcactggttggggccacgccatcctaccactggga

SEQ ID NO: 867366 - DNA, 98 bp, Homo sapiens
ggcgtccagggcagctagggcctgggccgcggttcggccgcgccggccggaaaaacgtggtcttcgagaaatgcgagttcttgaaaatttgaagaaca

SEQ ID NO: 867367 - DNA, 98 bp, Homo sapiens
tcttcggtccgcgacgatcctctagagcactgtgtgtctccccggacgcgagcccgctcccctgatagagacggggttttaccgtgttagccaggatg

SEQ ID NO: 867368 - DNA, 99 bp, Homo sapiens
tgagacgtgcctttgaccttctgccatgattgtgaggcctccccagccacgtgaaactgtccttccatagtgacgccccccaaggacatctggaatgtc

SEQ ID NO: 867369 - DNA, 99 bp, Homo sapiens
ggacataatgggcttggaaaggacttaggtaaccctcagatgtcccagcagacttcatgtgcctccttggattctccaggaagaataaaacggaaagtg

SEQ ID NO: 867370 - DNA, 99 bp, Homo sapiens
caattggataaaaactcagctgagttcacaggcctgtttaaagaagaaaacccgtatgctagatttgaaaacaactaaagcgctccagcacatcagtcc

SEQ ID NO: 867371 - DNA, 99 bp, Homo sapiens
cctcagaagcatgtgtcttccccagctctgcagccacatactatccgtttgttcaggaaccaccagtgacagaatgattcacctccagcagaaagggaa

SEQ ID NO: 867372 - DNA, 98 bp, Homo sapiens
agaattcagaagaaacaaaagtgccaccgaagaggtgagaacaaaatcatgatctacaactcttgaaaaagaagttcctgtcatcttcatccaccctt

SEQ ID NO: 867373 - DNA, 98 bp, Homo sapiens
accatgatgcgcaaggccatccgagggcacctggaaaacaacccagctctggagaagagtgatgcttccccctctgtgaatgtggctttgggtatggc

SEQ ID NO: 867374 - DNA, 98 bp, Homo sapiens
agaggtggggactgttgttggaggaacactttccagggtggagagattcaaccagttagcgtgaaagttggagataaagttcttctcccagaatatgg

SEQ ID NO: 867375 - DNA, 98 bp, Homo sapiens
cgggagtcgcggaacagcaggcccgagcccaccgcgccgggccccggacgccgcgcggaaaaggaacatcatcttcagcgggctatttcagcacagca

SEQ ID NO: 867376 - DNA, 100 bp, Homo sapiens
cctacaaggaatctgagggtgccctcaatgagcacatgaccataggacagaagctaagctggtcatgtgctcattgagggcaccctcagattccttgtag

SEQ ID NO: 867377 - DNA, 99 bp, Homo sapiens
ctttcacagctggctgtagctggccaaggagttctcgattaaagaggaaggggcagtgctcacatttctgggcagagttagcacgacatcagtatgagc

SEQ ID NO: 867378 - DNA, 101 bp, Homo sapiens
cctcccaaagtgctaggattacagagcaggctcatatgaatcaaccaactgggtgaaaagataagttgcaatctgagatttaagacttgatcagataccat

SEQ ID NO: 867379 - DNA, 98 bp, Homo sapiens
tggcgtctccccgactccacctgagggactggctcctggggatgaagcctgctgggagcgtgaatgacatggccctggatgccttcgacttggaccgg

SEQ ID NO: 867380 - DNA, 99 bp, Homo sapiens
cactgcattttggcatgatttgttatgcagtcgtagataaccagaaaacatcggatttacattttaaggaggagcagcccccacaacatcgatccaaga

SEQ ID NO: 867381 - DNA, 99 bp, Homo sapiens
atcgatgtgcatgcacttacggatttactggaccccagtgtgaaagagcattcgttcagtcagagagcataatagaagtactgcgttttgatgatggag

SEQ ID NO: 867382 - DNA, 99 bp, Homo sapiens
ctcggattggcaggacctggggccaaaagccaagaaatgaatactgcattgagggacggacttctggtcttcttcttcctaattgttccccttattgtc

SEQ ID NO: 867383 - DNA, 99 bp, Homo sapiens
tgataatgtgcataaaattcaacccagctttcaaagtccagtcaaaatatcagggactttgaacatgtcggggatcgccctcagcagactcgcccagga

SEQ ID NO: 867384 - DNA, 98 bp, Homo sapiens
ggggatctaggcgacatggagccattgaagggaacaacacccttgatgtctcactctgtcgcccaggctggagtacagtggagcagtctgagttcact

SEQ ID NO: 867385 - DNA, 99 bp, Homo sapiens
ctcgattctccatcagcttcccctgacactggggagaagaggctgacggtcctgccacaggccgactcatggcaccgcctggtgacattggtgatcttc

SEQ ID NO: 867386 - DNA, 98 bp, Homo sapiens
atcgatggtgttcctaccttggtcaagaaatggaacatggatctgagaacgctgtctgggcttggtaccaagagctggtatttcacagcagcgaccgc

SEQ ID NO: 867387 - DNA, 99 bp, Homo sapiens
cttttaagccaatagctccgtcaggtcagaacgccacttgcacaagatacagtgatcgaactgtgagaatttggaaggctcgcaatttgcaagatggtc

SEQ ID NO: 867388 - DNA, 99 bp, Homo sapiens
accagaggtgcttaacagcttagaagaaacgtatagtccgttctttagaaacaactcggagaaaatgagtatggaggctggagtgcagtggcatgatct

SEQ ID NO: 867389 - DNA, 99 bp, Homo sapiens
caggccccgcggctagccccttcccacaggctctctccgctcgattttgtcaccgttatgtgggaagcgaatccagagaagaggatgaggaggagccag

SEQ ID NO: 867390 - DNA, 99 bp, Homo sapiens
ttcaaagagaccctcggaacggaccagttactctccacaagaaaattcacacaaccacagtgctcttcatagttcaaattcacattcttctaatccaag

SEQ ID NO: 867391 - DNA, 99 bp, Homo sapiens
tttgtctttctcagcaccttggcgaagccttgggtttctttcttaaaggactgatttttagaactccacatttgagacttaattcagtgcacaaatgag

SEQ ID NO: 867392 - DNA, 99 bp, Homo sapiens
ggtcttgctcggccgatgaagtgcagaggtttttttctggtagacgttacatccaagaggaaataatccaggcaaggaagcacaagctgatcaagatgt

SEQ ID NO: 867393 - DNA, 129 bp, Homo sapiens
ctcatcctagttcttcccagggcagtgctaaaggatgatttacaggtcagtagtcaatacctcatcctagttcttcccagggcagtgctaaaggatgatttacaggtcagtatcaaaccaggccagctg

SEQ ID NO: 867394 - DNA, 99 bp, Homo sapiens
ggatcgtgaccgagaccgtgaccgagagcgtgaccgagagcgcgaatatcgtcatcgttagaaggattggggtgcccaacagaagaaagcaaatagatc

SEQ ID NO: 867395 - DNA, 100 bp, Homo sapiens
ggatttggtttcagcatgtccttctctgaatgatgaatacttttatgtcacagtagtaaaagtattcatcattcagagaaggacatgctgaaaccaaatc

SEQ ID NO: 867396 - DNA, 99 bp, Homo sapiens
tagacatgggggcctcaaacgtggagatcaactcctctctgttaatggagtggtcactgaactgatgcaggagcagtcatacctgaagtctgaattggg

SEQ ID NO: 867397 - DNA, 99 bp, Homo sapiens
tgccactagtgagatgaccacggctgaaggtgatgtggccgccctcaaccgacgcatccagctcgttgaggaggagttggacagggctcaggaacgact

SEQ ID NO: 867398 - DNA, 98 bp, Homo sapiens
ctcctgagacgtcacacagctgggaactgatccgcaatacagcaaagttacgatatcagaagtgcttggtagccaggccgccttctcagaaagttcga

SEQ ID NO: 867399 - DNA, 99 bp, Homo sapiens
tcattgtactgaatattacccttgtgcttgccggttcctagaagccaaaccaaactgacaataatgcttgaaaaattaggaatggattatgatgggcgg

SEQ ID NO: 867400 - DNA, 99 bp, Homo sapiens
aagttcgccaccaagaccgtcatctacctgctcaacccctgtcacctggtcaccatgatgcatgctggttggaaggaaaatcatgcaacattcatgagc

SEQ ID NO: 867401 - DNA, 99 bp, Homo sapiens
tcacgggatggatagccggcctgccatggccatctttgaactcctggactatattgtgaacgagccgaggcctgcctggagccccagatcaccccttcc

SEQ ID NO: 867402 - DNA, 99 bp, Homo sapiens
cagcggatgattctggaactgggagaagatggctttaaagaatacacttcaagtcagctcaactaccaggcagcctctcccgatgaaggtgccctggta

SEQ ID NO: 867403 - DNA, 99 bp, Homo sapiens
cagccttccaaagtgctgggattacagcaaagtgaaaaggagagcttgttgaaggaaagagatcacattttgtcaactctgggtgagacaaagcagaac

SEQ ID NO: 867404 - DNA, 99 bp, Homo sapiens
tttattggaggcctacttgcagcatattacctatcaggagaggagataacaacgaacttgatgcaagtgataggtttgccaaggtcagacctctcatca

SEQ ID NO: 867405 - DNA, 99 bp, Homo sapiens
cgcccgccgacccgcgccctgctccctctcagcacctgggcggacggtctgaagaactgttgcccaattcaacagtgccagcattccaactttgttaaa

SEQ ID NO: 867406 - DNA, 99 bp, Homo sapiens
agcgtcgccgcagccccccaatgcggccgcgagaagcagcgggggggcaggcgatcgaaggtaccttaacatggggaatcttcttaaagttttgacatg

SEQ ID NO: 867407 - DNA, 99 bp, Homo sapiens
aggattgactgctgctggggctgggctcgccagtcttggggacagtgtcagcgtgagacaggcattggcaaatccacgttaatggacactttgttcaac

SEQ ID NO: 867408 - DNA, 99 bp, Homo sapiens
ccagttccaaagtgtcttaaagaaaaactaagacgcagtcttccaaacctgtcccgaacatctaatacacaagttgactcagtgaaaagcagcagaagt

SEQ ID NO: 867409 - DNA, 99 bp, Homo sapiens
gcctccacccaccggcccaccctacatttagcgcatcatgtgatccgggttcctgatgttattagcagcataaggcaattatctaaagcggccatgaaa

SEQ ID NO: 867410 - DNA, 98 bp, Homo sapiens
aacagctgtggaaagaagttgcaaaacactggagtcttttattcaaaacttcagcgttctctatagtcccttgaaaaggcatctcattggaagtggct

SEQ ID NO: 867411 - DNA, 99 bp, Homo sapiens
aggaaaaactggagagcttcatcaaaaatagtgatagctttgataaagtctcccccccctccttactccagatacccgatggattttctcaaaccaact

SEQ ID NO: 867412 - DNA, 99 bp, Homo sapiens
aaatttgctggatattgatgcgccagtcactggatatgacatgtctacatttattaggcggtatagtagatatttaaatgagaaagcagtttcatacag

SEQ ID NO: 867413 - DNA, 98 bp, Homo sapiens
tgtatgatgccatcaaacatcagatggaatatcagaatgaaggcattgatgctgtacccgtggaatatgaggacaaccgcccgctcttggacatgttc

SEQ ID NO: 867414 - DNA, 99 bp, Homo sapiens
catctgaagcatctgcttacaagctgtaaacaggaacatcgataagtagtgtaaaaacttgcacaatgaaatccgaagccaaggatggagaggaggaga

SEQ ID NO: 867415 - DNA, 99 bp, Homo sapiens
cggcagcgcgcggtcgacgcgggcctgagctccctccaggccatttcataattctgaatcatgtctgataacggagaactggaagataagcctccagca

SEQ ID NO: 867416 - DNA, 99 bp, Homo sapiens
ctggcacgctctatagccaaggaaggcttcgagaagattagcaaaggtgctaatccagtggaaatcaggagagatctttaggttcctgaaactggtggc

SEQ ID NO: 867417 - DNA, 99 bp, Homo sapiens
caatggacagcatgcctcaccaagtcacatgacaagcagcattttgttcccaacatcacctttggtcaccctgtggtagaaagccttcgaaagcagcta

SEQ ID NO: 867418 - DNA, 99 bp, Homo sapiens
cacagggctcgattttcaataacagcctcctttggggctggtcttccacagcaggccctgaatgaacgtagacttcatcagcaggacagaaatgaaatc

SEQ ID NO: 867419 - DNA, 99 bp, Homo sapiens
ctcctaaggaagaagcctagaagaggaggaagaggaaagaaaaggagtcaggaatgcctcttagagaggtgagagacttcagaggctgccctttctttt

SEQ ID NO: 867420 - DNA, 99 bp, Homo sapiens
taagcagttgctttctaaccaaccactcaccaaataatgttaattcaagactctcgaagagaagcttcagtgcagatggatttgagatgctacaaaacc

SEQ ID NO: 867421 - DNA, 107 bp, Homo sapiens
cgcgagcaccgcgctgcagacgaagcccgcgcgtgatcccgctccgggatgggtttgtggagttcttccatgtagaggacctagaaggtggcatcaggaatgtgctg

SEQ ID NO: 867422 - DNA, 99 bp, Homo sapiens
attctgcaagcaggcaacctgaatacagaacaactctgctcatggtgattacatgcaaaataacgagagcagcttaatagagcaagctccaatacctca

SEQ ID NO: 867423 - DNA, 99 bp, Homo sapiens
ccagctgcggggcaagatggaggcgctgattttgtctcctaaagagcccgaacagctgaggaagctcttcattggagggttgagctttgaaacaactga

SEQ ID NO: 867424 - DNA, 99 bp, Homo sapiens
ccagaagatgattttccagataattatgaaaagtttatggagactaaaaaagtttttgatgatgaagaagaaagcaaattgacctatacagagattcat

SEQ ID NO: 867425 - DNA, 99 bp, Homo sapiens
gtccttcgactgcgccgtgtgccttgaggtgttacaccagcctgtccggacccgctgtggccacgtatcaatggtggagagaagcggcctgcctctgat

SEQ ID NO: 867426 - DNA, 99 bp, Homo sapiens
ctggatcctttgataatgaaggcattgctatttttgcacttcagttcacatactatttatggattggagaaatgaaggcagaggtcaccaaactacata

SEQ ID NO: 867427 - DNA, 99 bp, Homo sapiens
ctgcctatgcaacgctgggcatgaggagcggagcggagaatgccaaggatttgaatttgttgaaatgagcagtcgtaaatcaaagagtaacagcttaat

SEQ ID NO: 867428 - DNA, 99 bp, Homo sapiens
tcatccgcatcaacaagatgttgtcctgtgctggggctgacaggactgcgggaagcccctgtcgattgaggcagatgacaatggctgcttccccctgga

SEQ ID NO: 867429 - DNA, 99 bp, Homo sapiens
gacgagccgtgttgaaacttcttttgtcttgggcgtctttggtactggcttttttaggggtctgcctggggattacccttgctgtggatagaagcaact

SEQ ID NO: 867430 - DNA, 99 bp, Homo sapiens
gaagaaacacttcctataaatctcgcccaaacaggaaagggcaaagtgcaattgctggggaagaacatcccagaggttcaattctgcgggaagtgcacc

SEQ ID NO: 867431 - DNA, 99 bp, Homo sapiens
acagaaggactgggatgatacaccttttccacagggaattgagttggcatttgggcagtccttctccatccaccggaaggttgctgaagatggagagac

SEQ ID NO: 867432 - DNA, 99 bp, Homo sapiens
ggaacccaagcagtggcgaagggaatcgcaaggctcttccctgaccattttctactgtccctgcgcgaggtagctacagcaagctgggtagcaggcaga

SEQ ID NO: 867433 - DNA, 99 bp, Homo sapiens
agctgatagagaagattcttctcaacatttctgcagactgcctcaacagagtgataggggttataatgagaagaaactaacagacaatattcagtgtga

SEQ ID NO: 867434 - DNA, 99 bp, Homo sapiens
aatagcaaacgatccagacggcagggagtgcatcaaaggtgtgaacacagtcagacacagtcttctgcaccatggatgggaccaaattatggagtgcaa

SEQ ID NO: 867435 - DNA, 99 bp, Homo sapiens
tctactctggaggcagattccattttacaggcattaacaaatacatctcctacatgatttcaaatatgcgtgcattagagaatgattttttcaattctc

SEQ ID NO: 867436 - DNA, 99 bp, Homo sapiens
aaaaaatttgctgttgaagttcatgatccacgaaggtagtaagcattaataatgtctttcatctttgagtggatctacaatggcttcagcagtgtgctc

SEQ ID NO: 867437 - DNA, 99 bp, Homo sapiens
ctgttcactcagtacaacatccagaaaaaagcgatgactgtgaaggagttcaggcagctggccaacagtggcaatttgcagaaaaaacttcagcatgtg

SEQ ID NO: 867438 - DNA, 99 bp, Homo sapiens
cagcagcaatgaccttccctcgggaattccacctctgcgtttttccctccagtttccaaggcaggaaaggtaaagagacaaagaaagtgccttgtacag

SEQ ID NO: 867439 - DNA, 99 bp, Homo sapiens
gaaccgccggggacgaaacaataaagaccggaagctgagtttttatccaaaaatatgtcgtaactgcaagtgtggccaagaagagcatgatgtcctctt

SEQ ID NO: 867440 - DNA, 99 bp, Homo sapiens
ctaacccagatatttttagttgagcttccactgctaccactagtactacttgtacttcctgaagttcatccgggcttttatctttttggcttttttttt

SEQ ID NO: 867441 - DNA, 98 bp, Homo sapiens
gactagccactttgcattgactggaaacaatggcatttacagaaagagtcaacagcagtggcaacagacggaatcagtccccaatgcctggaaattcc

SEQ ID NO: 867442 - DNA, 99 bp, Homo sapiens
cggaggccagcggggccggaagcggcggcgcagcggttaagaagattgtctaccaaatatagaacagaaaagatatatcccacagccactggagaaaaa

SEQ ID NO: 867443 - DNA, 99 bp, Homo sapiens
agcctcacagacccagccatcgttaagggccatccaggagagcctcctcaccagcacagaaggcctgtgccccagcgccctgagcgagacaagccgttt

SEQ ID NO: 867444 - DNA, 98 bp, Homo sapiens
ggaaataatgttctggtgattgatggtcaacagaaaagattttgctgtcaaagttgtgtcagtgaatacaaacaggagaagctaaaacttacttatga

SEQ ID NO: 867445 - DNA, 98 bp, Homo sapiens
tgtagaacagctttatgaaacagcttgcttcctacagaaaatatttacaccagcagctccagttcataccaataaagaagatcctgctacccaaacta

SEQ ID NO: 867446 - DNA, 99 bp, Homo sapiens
gagctgcgctgctacagatgttaccacttctgtggctgctaccccactcctgggccgtccctgaagaagataccatcccacgaacacagatagaaagaa

SEQ ID NO: 867447 - DNA, 99 bp, Homo sapiens
attcaaaagaactgctgcccagtgactccgtgctgcacggaagaatatcagctccaggatttggagtggatcagttacgagatgacaatctagaaactt

SEQ ID NO: 867448 - DNA, 99 bp, Homo sapiens
gtccttgtagcctcttctcccagaaaagcttgaaggtctccaatcatctcagaatcatgacctctgtctcttcgttcagcttctaatatagcttgcagc

SEQ ID NO: 867449 - DNA, 99 bp, Homo sapiens
agactgcctttcagaagcaagctgggaacctgttgataagaaagagactgagagattgctttgcataaatccacccctgtttgaaatctatcaagtctt

SEQ ID NO: 867450 - DNA, 103 bp, Homo sapiens
cagcctccctagtagctgggactacagaagggagaattccacaagttggctgatgccaagatatttttgagcgactgcctggcatgtgacagctgtatgactg

SEQ ID NO: 867451 - DNA, 99 bp, Homo sapiens
tcgtacccacagtgcttcatgagaggacatgaaatctgctgtgatcacgccttgcagtcattttttccatgcaggctgtcttaagaaatggctgtatgt

SEQ ID NO: 867452 - DNA, 98 bp, Homo sapiens
gcgctcaacccaaccggctccagggcactggtaattcgtgcctttctgctctttccaacaattgaacgaatgtctgagtcacccaatggcagaattgc

SEQ ID NO: 867453 - DNA, 99 bp, Homo sapiens
agtggccttccttatccaagagtttgtcatagtaagagtggagaagtaaattctactaaagtggcaaatctggttaaagcctatgtagacaaatacaaa

SEQ ID NO: 867454 - DNA, 99 bp, Homo sapiens
cggggctgacatcagcggctctttgtatgatgacttccgctgctgtggcgtctccaactacactgactggttcgaggtgtacaacgccacgcgggtacc

SEQ ID NO: 867455 - DNA, 98 bp, Homo sapiens
agagatggtcaggtctggagctcgaccgggccaggtggaagttgatgggtcgaaactaaatgtgaccagcacgtggaacctggcttcgcccttattgt

SEQ ID NO: 867456 - DNA, 99 bp, Homo sapiens
ggacaaaccaaatgaccaatcttcaagatggtcttcagagagcaactatcctccccaggtcacggtctagatcacattctcgatccagaggaaggcgat

SEQ ID NO: 867457 - DNA, 98 bp, Homo sapiens
ccgaattcagaaggatatcgacgtcgtgatccagaagtccagagctgaggactgcctgtttgcagttggttgaatctggcgatgtggaacccatggat

SEQ ID NO: 867458 - DNA, 99 bp, Homo sapiens
cgtctcaaactctatttgccaaaggaaacttgccttatcaccttcttgcttgcaggaaacctaacgaagcatatgaaatctaaagcacacatgaaaaaa

SEQ ID NO: 867459 - DNA, 99 bp, Homo sapiens
gaccccctgctgtagagcaagcctaaggagtcccctcttcatttagttgttatcaacaaccacatcacggttgtaaacagtttattaagtgcacagcat

SEQ ID NO: 867460 - DNA, 99 bp, Homo sapiens
gtctcctgctgcaggtgttccacctgcacaaatttgggtggaaatttttgtctgaggtctaaaagtaaagcatccacacgttgtctctgaaaaatagag

SEQ ID NO: 867461 - DNA, 99 bp, Homo sapiens
gcagcagtcagagctggcgagagccctctccacctcggaagagctacattgtggatatcaagcctgccaatatggaagagctaacagaggtgattacag

SEQ ID NO: 867462 - DNA, 99 bp, Homo sapiens
cacgagaagccattcaagtgttccatgtgcgattacgccagtgtagaagtgaatttccagggccatccagagaagctgatcagactcaggaatccatgg

SEQ ID NO: 867463 - DNA, 99 bp, Homo sapiens
ttggacattgaccccaaactgcaagaatacctcggcaaattccgacgtcttgaagacttccgagtagatgtaagaatgattgatgttggctgatattgg

SEQ ID NO: 867464 - DNA, 99 bp, Homo sapiens
gtcctttgcaaaattcctgcaagctgctaatttggattctaaagcaacttatgtaaaaactgcattccgtgccaggcctgaaatgttccaaagctgagt

SEQ ID NO: 867465 - DNA, 137 bp, Homo sapiens
ccagaggaagatccagtaccacatctctggtaaatgagattccatgaccatgaacaaacagagaagagaagagagcccagaggaagatccagtaccacatctctggtaaatgagattccatgaccatgaacgtggtt

SEQ ID NO: 867466 - DNA, 99 bp, Homo sapiens
cgggtttcggtggtggagaacgtagtacctttcggggacattggacactactctaggaccggagtgatcagcagctggactgtgccttggacctaatga

SEQ ID NO: 867467 - DNA, 99 bp, Homo sapiens
atggatccatttctcctattgaggagtcaacgtttgccaaagagcgcaggctgagaatatggagagactatgtggctcccacagctaatttggaccaaa

SEQ ID NO: 867468 - DNA, 99 bp, Homo sapiens
gcggctgagaccccgcagcctggaggagggctgtccggggctttgggtgctggagaatctggtaaaagcaccattgtgaagcagatgaggatcctgcat

SEQ ID NO: 867469 - DNA, 98 bp, Homo sapiens
tgcagggctctgatcaagcggatccaagccatgattcccaaggacaagtacatggcggacatggacgagcttttttctcaggtggatgagaagaggaa

SEQ ID NO: 867470 - DNA, 75 bp, Homo sapiens
gattgcccctgtggtgccaagagaatattggaattccagccgtgttgaaatccttgtctcctgtagacccagtgg

SEQ ID NO: 867471 - DNA, 99 bp, Homo sapiens
catgataatttccccagagcgtcttgatccttttgcagatgttttctggatatgccgcagaaggatccgtgccagaagcaagcctgtgagatacagaaa

SEQ ID NO: 867472 - DNA, 99 bp, Homo sapiens
gtggctccttctagactaactccattgacagctaggacgcgatcaccttcttacagtagatgagctggtggtcaaagagaaagaacattcgctgctggc

SEQ ID NO: 867473 - DNA, 99 bp, Homo sapiens
cgcttctatgctgcagaaatcatttcggctctcatgttcctccatgataaaggaatcatctatagatcctgaggtgcagaggcaattcccggaggacta

SEQ ID NO: 867474 - DNA, 99 bp, Homo sapiens
gaggctccgtgtctgcagctagtgtgtcaactcagcgtttctcctctcgtccctgggtatacagggagctaccctgtgtttctgagaccctttgtgaca

SEQ ID NO: 867475 - DNA, 98 bp, Homo sapiens
gtaccagtacattaggaaacatgctagaattacctggaacttcatcatcatctacttcacaggaattgccattttccgggaccatgtctggagaacta

SEQ ID NO: 867476 - DNA, 99 bp, Homo sapiens
agcaccaagactcacagcattctttcttggcatttttgaatacgcctaccgatgctctggatcaatttgaagaaattcacagtatggccaacagcaaga

SEQ ID NO: 867477 - DNA, 99 bp, Homo sapiens
atctttaactgcttggccgtgcttgccctgtcatcccacctgagaaccatgctcaccgaccctgtgaatttccagggccatccagagaagctgatcaga

SEQ ID NO: 867478 - DNA, 99 bp, Homo sapiens
atatggcaaaagcccatacctttatccactctatggccttggagaactgccccaaggatttgcaagagtattgggaaagggtcgttgtggtgcatagac

SEQ ID NO: 867479 - DNA, 99 bp, Homo sapiens
caaggggattcaaacttcaacagaatgtggcaaccagatttcaaaaatatcactgcatcctatagaagataatcctattgaagagatttcggttctaag

SEQ ID NO: 867480 - DNA, 99 bp, Homo sapiens
gtaagtttggcaggcacttaggatcctggcatctctctgaaatgagaagcttttgcaaccttgacaagcacagcggctacaatacccaggaaagtgagc

SEQ ID NO: 867481 - DNA, 99 bp, Homo sapiens
gtgaaccggagaccccgaaaacggaagcgcagggagaaggaagaggtgtttgaaaagaattggaggcatatgctggagttatcagtgcacttcgggcac

SEQ ID NO: 867482 - DNA, 99 bp, Homo sapiens
cggaagtctctggctcttgacattgtggatgaggatgtgaagctgatgatgtccacactgcccaagtctctatccttggctggagtgcaatggtgccat

SEQ ID NO: 867483 - DNA, 98 bp, Homo sapiens
tgttggagcgatatacatcagtagtaaccttggtgaaacctcatttagtaaaggtgctgcatgccatggggacctcacagagaagctcaaactcctgt

SEQ ID NO: 867484 - DNA, 101 bp, Homo sapiens
agcgtgctggaacttctctgctggactcctggactcccacaatgctctgcctcctcctccatctcccttcagggaccagcgtcaccctccaccatgcaaga

SEQ ID NO: 867485 - DNA, 99 bp, Homo sapiens
gatatcattatgctgacctctgacgagctgcaatttggttatgagggtctcgctctgttactcaggctggagtgcagtggcacactgcagcctcaacct

SEQ ID NO: 867486 - DNA, 99 bp, Homo sapiens
tgagagttacgtggcagaaatgatcaaggagtctgcactatggaaacaacctgtcaatccagctcaaggcacacatagcccagacacccatgagaccct

SEQ ID NO: 867487 - DNA, 99 bp, Homo sapiens
ctgggagcggcctacatccagcacaagtgctacagcgatgcagccgccaagaagcaggtattgaagcccctgggtgataatttgatggaggaaaacata

SEQ ID NO: 867488 - DNA, 99 bp, Homo sapiens
ggcgactcagcggggtgtcgttcggccggcgtgacgcagccggatcggcgccagacggaaacctagcgccagatctactgcatagagaatgcccacgga

SEQ ID NO: 867489 - DNA, 98 bp, Homo sapiens
cagaaaattgtctatcactccatgattccgtgcaagaagaactggcagtgcctcttccaacagcttcctgaaatgactcatgttcaaacacaacgacc

SEQ ID NO: 867490 - DNA, 99 bp, Homo sapiens
ccataaccataaaggctgagaagttcatgaattggcatgtcgccttcctcagctcgacctccatctccagatccttctttgttcttctttttgcctcct

SEQ ID NO: 867491 - DNA, 99 bp, Homo sapiens
ccccttgtggctgagggcagagctctttgcgttggtccacggtgtgctcctctgcccgggccaccattaaatgcaaccctggtgatcacttttgaaatc

SEQ ID NO: 867492 - DNA, 99 bp, Homo sapiens
cgtgccaagcttcgagcctggaatgatgtagatgccctattcaccacaaaggtgatcattggcacgaagaccatcctggccaatggggccctgagagct

SEQ ID NO: 867493 - DNA, 99 bp, Homo sapiens
aaaagatgaaattgaagaaatggttttacgtttacagaaagaagcaatgggtgacttcatggtcatgacgattttcttcaatgtgagcaggcggtttgg

SEQ ID NO: 867494 - DNA, 99 bp, Homo sapiens
tcccccatcaaaggaaaggggaaaatgtctcagtcgaaaggtgggcaccatgtccttgaagcttcaggcaagcaatgtaaccaacaagaatgaccccaa

SEQ ID NO: 867495 - DNA, 99 bp, Homo sapiens
agaacagtacagagcccgaccccctgcttgccactctagaaaaagccccacagtcttcgttataacctcacggtgctgtcctgggatggatctgtgcag

SEQ ID NO: 867496 - DNA, 99 bp, Homo sapiens
cagattcgcagtggtcgcttcttctccttgggtggtgttggtatccaactatacacaaaccttgaacattttacaagaagtatgtaagcgtcatggata

SEQ ID NO: 867497 - DNA, 99 bp, Homo sapiens
aagacttattgatctccatacaaatgttgccactgctgttttagaacatataaagagtaatcaagtcagaggattatatgacttttatctgcctagaga

SEQ ID NO: 867498 - DNA, 98 bp, Homo sapiens
gtaaaggtccacctggtggggcttggcatattactgatctctcattacccaactatctgatggcatcttcggttggactgcttcctacccagcttctg

SEQ ID NO: 867499 - DNA, 98 bp, Homo sapiens
caccatgaaatggatagatgaggaaggtacaatgttagctgttctaaaaaatttgcacttagtcgttggaatcgtaagcctgataatcaaagtcttgg

SEQ ID NO: 867500 - DNA, 99 bp, Homo sapiens
ctcttgtgaaacacctgcaatcggtcaggttccgtactgcgatcctcatccactgaggcgtattatcgctggcaaaacgcgatggggagttcccggctg

SEQ ID NO: 867501 - DNA, 99 bp, Homo sapiens
tgtggcgaaaagggacattatgcttatgattgtcatcgttacagccggcgaagaagaagcagatcgaacggttggaagtaagcagccttgcccaaacat

SEQ ID NO: 867502 - DNA, 98 bp, Homo sapiens
ccaagagcagagcgccagcatgaacttgggggtcagcatgctgaggatcctcttcctcctgggtactccaaagattcaggtttactcacgtcatccag

SEQ ID NO: 867503 - DNA, 98 bp, Homo sapiens
ccaattcatatacacaggaagtctccacttccaagatctaggaagacggctacaaatgatgtctggttggtttccaatacggtagatgcatcagtagg

SEQ ID NO: 867504 - DNA, 99 bp, Homo sapiens
ctccagctccagtgctttggtctgttgtgctggcttggtgacgctcacagtgctgggaaggaatctatccaaggctcaacgagaacctttgacaagagc

SEQ ID NO: 867505 - DNA, 99 bp, Homo sapiens
ccagcctgggcaacagagtgagactcatggtttctataatagctcatactcatagtcatccttccatctcaatatccagctgatgtctccccgtgatga

SEQ ID NO: 867506 - DNA, 98 bp, Homo sapiens
tcggcggcagtcgggccagacccaggactctgcgactttacaatacagtcgctttgaatcgaagatacatgacttacgagaacaaatgatgaacagca

SEQ ID NO: 867507 - DNA, 98 bp, Homo sapiens
cgaggcgggtggatcacttgagtttcttgcagaacataaattattaggaaacattaaaaatgtggccaagacagctaacaaggaccacttggttacag

SEQ ID NO: 867508 - DNA, 98 bp, Homo sapiens
tttgaatggtgctggtgacccactcactccaggctatccagcaaaagaacagctttgctgagccatcaaggtctaatggaagcatggttcggcattct

SEQ ID NO: 867509 - DNA, 99 bp, Homo sapiens
ggctggttgttccgttgcgagctgcagctgcgatctctgtggtaggcccaggtagagtacagagagatggatgaaagcttggccaacctctcagaagat

SEQ ID NO: 867510 - DNA, 99 bp, Homo sapiens
ttcagaagtttgcagagataaatggtcatagcaaatgacagaagtcccttggtgggcaaaattcactgggagaaaatggttaaaaaggtgtcaagattt

SEQ ID NO: 867511 - DNA, 99 bp, Homo sapiens
cacccctggtggatggcgaggatgagaggaagatgagaagtttttgtctgaagtttttgcacaattaacagatgaggctacagatgatgataaacggcg

SEQ ID NO: 867512 - DNA, 99 bp, Homo sapiens
attggtgtccattttcttatctgcagcttttgttatgtttttggtatataaaaattttcctcagcttagtgagggaaaagagtttctttttacaaacga

SEQ ID NO: 867513 - DNA, 99 bp, Homo sapiens
cggcttagagcaggccgcttggttctgacccagctgagagtttgctctccaaagctcggggaattgattccagctctgttaaactccggggtagttctc

SEQ ID NO: 867514 - DNA, 99 bp, Homo sapiens
gttcagtcaggtggggccggtgaagcagtgcttcgtggtgactgaaaaagggtctccatctgttgtccaaggctggagtgtagtagtgctatcacagct

SEQ ID NO: 867515 - DNA, 98 bp, Homo sapiens
aacaagttcagggctcccactgattctacattatgtttggaaattttagcattcaggtgccaggaatgcagatgggacagccagtgccagaaacaggc

SEQ ID NO: 867516 - DNA, 99 bp, Homo sapiens
agatctgtgttttgaaatcgtaaagcgagctgacgctggttttgtgtacagtgaagctgtagccaggatgaccagtgtcccagtgaaggaacgagtgaa

SEQ ID NO: 867517 - DNA, 99 bp, Homo sapiens
agaaattcagaacctcaagcttttcaggcatcctcatataattaaactcatccagccatgccctgatgtgaagtacggcaaacgtatccatgtgctgcc

SEQ ID NO: 867518 - DNA, 99 bp, Homo sapiens
gaggagctggcattggagcaagccaagaaagaatccgaagatcagaaacggtgtgatgaatgcagactctgctaccattttggctgtttggatcctcct

SEQ ID NO: 867519 - DNA, 99 bp, Homo sapiens
cgaagattgacgccagtaagaacgaggaggatgaaggaaatgagccgtcagactgctacagcattacctaccggtacctcgaagtgtccaccatcccag

SEQ ID NO: 867520 - DNA, 99 bp, Homo sapiens
gcaggctcagccccataactctggcaaaagctctcacaagcaaaagccttggagaggaggagaatgtatcaagctgctacggaagaggcacataggaaa

SEQ ID NO: 867521 - DNA, 99 bp, Homo sapiens
agcgcatcaaagttgatctttcgatcaaatatgttcatggttccagagtccgtgcagcagtctccactaggaatacagtgcagctcaatcttttgtttt

SEQ ID NO: 867522 - DNA, 99 bp, Homo sapiens
gacgatttggatgaatatacccttagaaaaaatgtggcagttgtggcaaaggagcagagaactttgacaagttcttcacacgaggacagcccgtcttaa

SEQ ID NO: 867523 - DNA, 99 bp, Homo sapiens
tctgagctcagacctgccaatttaccagagataattgataacaccctgtaacagctgaaaaacctcggatcaattctcagctggtggcacaacaagtgg

SEQ ID NO: 867524 - DNA, 99 bp, Homo sapiens
agcaggatgatcagctggctgtgaccagaagtatcaaggagggtgaggagttcaaagaaggacgcagagccagccacacagccccacaggtcctcttta

SEQ ID NO: 867525 - DNA, 99 bp, Homo sapiens
gcttcgaaataggaggccttcagacggcccagctgagagccagcctggaggttacccagcagcaggccacccaggccgaaggccagctactagagctgc

SEQ ID NO: 867526 - DNA, 99 bp, Homo sapiens
ctgagcggccgcggccatggcgtacgcctatctcttcaagtacatcataatcggcgacacagctctaagcgaaagacatgaggcctcagcctgaaatga

SEQ ID NO: 867527 - DNA, 99 bp, Homo sapiens
ccaacacatcccaactgctggtctcatcattcaactgaactccacagacatctcttaaaacactgtgccagccctcaggaaatatcgctgatcccaaat

SEQ ID NO: 867528 - DNA, 99 bp, Homo sapiens
ccaaaaagcggcggccgttggaggtggctgcggcagctgacttcctctgctaaattacctcgctgccgacagggaggctgggcaggtgattccgtgaag

SEQ ID NO: 867529 - DNA, 99 bp, Homo sapiens
tgggcctgaccaacccgaaaacattgctaggtttatggagccgtacatctttgggagccgcctggaccacgacatcatcgacctggaacagacagccac

SEQ ID NO: 867530 - DNA, 99 bp, Homo sapiens
tgcagtgtctttgacctgctaggcatacctctgtaccatggctggcttgttgatccacagctttgcttgtgccatctgcccccatcgaccggtactgga

SEQ ID NO: 867531 - DNA, 98 bp, Homo sapiens
atgattctggctgtcctctatagaaggaaaaactctaaacgggattacactgggggctcccacaggatcagaggctggggccaactggaaccattggc

SEQ ID NO: 867532 - DNA, 99 bp, Homo sapiens
gagcattgagcagcagaagcccaactggattgaacgtcaattgttgaaagcaaggaaactgagcactgaatgcgtggtaccatgcgacgacgctatgaa

SEQ ID NO: 867533 - DNA, 99 bp, Homo sapiens
tgagctagaaacatgccaagctgtgcagaacacattccagtttttattagaaaactccagcaagcaattggtgctgaaaattcagaaaaaatagatgag

SEQ ID NO: 867534 - DNA, 152 bp, Homo sapiens
ctcctgggctcaagtggttctctcacttcagtctcccaagtagctgggactacagacatgtgccaccatgtccagaaacaggaccttgccctgtcactcaggatggagttcagtggtcctatcatggctcattatagcctcaaactcccagg

SEQ ID NO: 867535 - DNA, 99 bp, Homo sapiens
taaagaaaagaagaaaaagaaatctgcactggatgaaatcatggagggagagaagtcttttttcctccagccaggagagcagctggaacaaggcatcca

SEQ ID NO: 867536 - DNA, 100 bp, Homo sapiens
gaaaccttttcctcaccaccccggatggagaagatggaatttcatggaagacgtagatgaaattccatcttctccatccggggtggtgaggaaaaggttt

SEQ ID NO: 867537 - DNA, 100 bp, Homo sapiens
cccctcacctctttatccaggggaccggctgtctcttcctccttcatccccagcctctgtcagggcagggtagttcctcagttctgcaggctgtacagga

SEQ ID NO: 867538 - DNA, 98 bp, Homo sapiens
ctttgttcaccgccaaccccttcgagcaagacgtggaatgtttcatccatttgtggaccaaaagatggagttggtttttatttttaaaaagataatgt

SEQ ID NO: 867539 - DNA, 98 bp, Homo sapiens
agcaagacctctcctcattcttattgttttattagggcaatttgtctcaataaaagcccaggaagaagacgaggatgtttcttggcagtacagaagtg

SEQ ID NO: 867540 - DNA, 99 bp, Homo sapiens
ggcggccggcgaaaggagctggtgcctgtgcaagttgttgagtttggaaattttagcattcaggtgccaggaatgcagatgggacagccagtgccagaa

SEQ ID NO: 867541 - DNA, 99 bp, Homo sapiens
cggagccaaggtccgctcggaggcatggctattgcaccttgggagaagcctttaatcggttagacttctcaagtgcaattcaagatatccgaaggttca

SEQ ID NO: 867542 - DNA, 98 bp, Homo sapiens
aactacttagtgactacattcgtcttattgctgcagtgaaagcctgtttaaagaagaaaacccgtatgctagatttgaaaacaactaaagcgctccag

SEQ ID NO: 867543 - DNA, 99 bp, Homo sapiens
caggaatcctgcaatatggcgaacataagagaatattatgagagagctttgagagagtttggatccgcagattctgcccgtggaacacagagcattcct

SEQ ID NO: 867544 - DNA, 99 bp, Homo sapiens
ccttccgctattcagcagagagctattattccctgtattaaagagtggagactgctgcacggactctggaaccatgaacatatttgatcgaaagatcaa

SEQ ID NO: 867545 - DNA, 99 bp, Homo sapiens
gtcacgtttccttttagtaccagtcctcaagccatccaacttgtctctttctggaaagatgttgtttttggtgagtttgacgcttttgggccttgggtg

SEQ ID NO: 867546 - DNA, 102 bp, Homo sapiens
ttaatcagaagattgctggatgttatgaaaagaatcttttatggggggctagcttgtcaggaagatcggaggtgccaagtagcagagaaagcatcccccagc

SEQ ID NO: 867547 - DNA, 99 bp, Homo sapiens
acccttcacccctcacctcgatgcagccagtagcttggatccttgtgggcatgatccataatcggtttcaaggctggcttcctgtcaggcgagctggcc

SEQ ID NO: 867548 - DNA, 99 bp, Homo sapiens
tctcattcgtcatcccgtgtccagaccggccggcgtcacagcgaatgtggaggatagactacagtgccgctgaacatcagctttccaaaccagatgtgg

SEQ ID NO: 867549 - DNA, 99 bp, Homo sapiens
caagactcagtataaccaagtaccaagtgaagactttgaacgcactcctcagagtccgactctcccacctgctaaggaccctaaagtaaattggttgaa

SEQ ID NO: 867550 - DNA, 99 bp, Homo sapiens
tctgctatcatggatttgttgctcaggctcctgacgtgtatcgaacctccacagcccaggcaagatgtgctgaatgagccgaggaggtgctgctgctgg

SEQ ID NO: 867551 - DNA, 99 bp, Homo sapiens
cagaagttgttctaacgctgcctttgctttaaaacagtattacttgcggtgcaccctttgctcccgggctcatccaccatcatgatccatgacttgtgc

SEQ ID NO: 867552 - DNA, 99 bp, Homo sapiens
cctgtccacctgcaaggattcaaagaaggtacggctcctacctggtctggaaagagctgggaggcttcacagagaaggctgtggttcccctgggcctct

SEQ ID NO: 867553 - DNA, 99 bp, Homo sapiens
gctagtggtataccaggaaattctgttctactcgtcacaaatctcaatcctgatgaaggattacggccaggagatacaaccagcactttctgtggtact

SEQ ID NO: 867554 - DNA, 99 bp, Homo sapiens
tttaaaatcgcgaacactaacgtacctcattttcccaatttgaattagatctaaaatgccaagttcactttctgaagaatccacacagaagacaaaata

SEQ ID NO: 867555 - DNA, 99 bp, Homo sapiens
cttttctatgtcttttccaatgctgtctggaatcataatcatctttctttgagccataggatgcgatataatctgcatgtttctccaataacaaagtgt

SEQ ID NO: 867556 - DNA, 99 bp, Homo sapiens
ggttggaaacttgtcaaatttcatcaggtaaacctgaagaggccgtgtcctttctggaatgacatcagccagtgtggaagaagggactgtgctgtcaaa

SEQ ID NO: 867557 - DNA, 99 bp, Homo sapiens
tttcaaggatatgctgtattcagctcaggaccaggcaccttctgtggaagaatactacaacacatctttgcaggattctttgcaaattctgccattcct

SEQ ID NO: 867558 - DNA, 99 bp, Homo sapiens
ctcctgaatagctgggactacagtgtgtgctgtatttatggagtttaaagattaatcatcccaaaacattgtttctgcttcggggaaatcatgaatgca

SEQ ID NO: 867559 - DNA, 75 bp, Homo sapiens
agccatgatggactgcatgttgcaagccttgctgatgataagcacttaaggaaagcttcataaaagccattggtg

SEQ ID NO: 867560 - DNA, 99 bp, Homo sapiens
gaagaactcgtcatgctctttgtagcgtggtgcttctgttgctcacagtgcctgaagacctctcattagaagagagagaagaacttctagacattcgtc

SEQ ID NO: 867561 - DNA, 99 bp, Homo sapiens
ggagccgtgagagcctcaacgtggacgtggtcaagtacgagagtggccctgacggaggggaggaactatccccttttccagggcacagtgaggccagca

SEQ ID NO: 867562 - DNA, 99 bp, Homo sapiens
ctccagtcaggccgatccgctccgctcacgacagccgctcaggaagcaatcttgcatgcgtctggaaatggcacaaccaaggactactgcatgctttat

SEQ ID NO: 867563 - DNA, 99 bp, Homo sapiens
agccggttcaccagcctggacaaaggagagaatgggactctcagagagtttcattctgtcgcccaggctggagtgcaatggcgcgatctcggctcactg

SEQ ID NO: 867564 - DNA, 99 bp, Homo sapiens
gacgagccagtggcaatgacccagacccggacgacccccattgctgagccagcggagctgcttgatacctgactgaatcctatggaacaggtcaagata

SEQ ID NO: 867565 - DNA, 99 bp, Homo sapiens
cgtggccttcgcgtctgcccggccaagaggcaaaggggaggttacgcagcaaaccatccagaaggagcagatccggggtagagggaaaagagctccggg

SEQ ID NO: 867566 - DNA, 99 bp, Homo sapiens
aggacagagaagccttttccgttgccggtgccggcctagcgtcctggaattacttcaatcaaaagaagcacagcgtgctgatgtctgtgattgccgggg

SEQ ID NO: 867567 - DNA, 99 bp, Homo sapiens
gcctgtgtgttgcttagccgaaagaggcatcgttttctctttagttaaaagatgttgatactcggaaaatcataaaagcaatgctttcttatgtgtggc

SEQ ID NO: 867568 - DNA, 99 bp, Homo sapiens
tatgcaccagcacgcctggctaaggaagatcagttttcctgccatccaggctgctccctccttcagcaactcattcccacagatcttccgagacaggac

SEQ ID NO: 867569 - DNA, 99 bp, Homo sapiens
cttcgccatcgccagcatcgccaacccggactggatcaacaccggggagtctgcggatgacaacggcaacacgacaagaagtccttggcctctaccgca

SEQ ID NO: 867570 - DNA, 99 bp, Homo sapiens
aaccaccgcatcaagagcttcaagaacaagggccgcgatgtggaagccccttcacagatgtagtcactacaaatcttaaattgcgaaatccatcggata

SEQ ID NO: 867571 - DNA, 99 bp, Homo sapiens
ggcatcaattcttggatgcaactgccacgggagggacaacaccagcaaaacgtactgttgcatgttctccattaacttcaactcttcgaccaatgacat

SEQ ID NO: 867572 - DNA, 99 bp, Homo sapiens
ctaacacgatgaaaccccgtctctactttcagtatggggcagatcttccagacaccagcggccccttccctgttgaactggccgagggccagctccatg

SEQ ID NO: 867573 - DNA, 99 bp, Homo sapiens
gtccagtgagcggccaagcccctccaacaccatgatggcaaacacaatggaggcaaagttgctctcaagctttacctgtaatcccagttacttgggagg

SEQ ID NO: 867574 - DNA, 99 bp, Homo sapiens
ttcccacgctggcgcccggcgaccgggtggggctgcgatgaggaagtgctggctgatgtccgcaccatcgtgaaccagatcagctacaccccccaggat

SEQ ID NO: 867575 - DNA, 99 bp, Homo sapiens
ccaccgggcaggatgaaggcagagcgtgtggcatctccacctcaagggcactaagtgaccgcttcagcggtgagatccccgatgaccagatggcgcaca

SEQ ID NO: 867576 - DNA, 99 bp, Homo sapiens
gcaacagatgcagataaaaggcaggagactgaacagcaaaaacttggttctggaaaaagactagttgcagttgtgaaaaacttcaggacaaaaatgttt

SEQ ID NO: 867577 - DNA, 99 bp, Homo sapiens
ccataaatgtgcaacgtatattccaacgaaaaacaacactgtgtgatcttctggatgttagaagagatcctctgggccaactgggcggggtcaccacca

SEQ ID NO: 867578 - DNA, 99 bp, Homo sapiens
gaaagagagatttgtaaaactgctggaccagctacacaactcactgaggatcgacctctctacatacagggatgacctatgccaagagtgtgaggacat

SEQ ID NO: 867579 - DNA, 99 bp, Homo sapiens
cgcggatctacgtgggcaacgcgtctgtgcagacttttgcagacaaatcaaaacaagaagctctgaagaatgacctggtggaggctttgaagagaaagc

SEQ ID NO: 867580 - DNA, 98 bp, Homo sapiens
ggaagtggaagtggtccccgaaggctatttcgccgctggcgtcaggactattttcacgttttaatgccgagagctctattaccaggttttaaacttcg

SEQ ID NO: 867581 - DNA, 98 bp, Homo sapiens
ccgagtggcggctcaaaactcagacattgatgagtgtggcacagagggagccaactgtggagctgaccaattctgcgtgaacactgagggctcctatg

SEQ ID NO: 867582 - DNA, 99 bp, Homo sapiens
gagaaccagccgactggagcaggcagcagcccagctgccttcctatttcaaggaaagacgccaaggtaattttgacccagaggagcaatgatgtagcca

SEQ ID NO: 867583 - DNA, 99 bp, Homo sapiens
ggagatgtttcaatcattatttacccaatgaagaatcacatgttcttcatcgcgataacgaagaaacctgaggcagaagctcctcctggggtagagaca

SEQ ID NO: 867584 - DNA, 99 bp, Homo sapiens
acggggcgagcctggaggattgtcactccaacctcttttcgctggttcagtaccttgaaatagttccagaaaccagaaggtaccctgtggcagtagccg

SEQ ID NO: 867585 - DNA, 98 bp, Homo sapiens
ttcttgctgctgccatgattgctgtagttcctggatatatctcccgatctgtggctggctcctatgataatgaagacccatctctgacagttagagcc

SEQ ID NO: 867586 - DNA, 99 bp, Homo sapiens
ggggtgggcccttcagattccactgagcttgtctagaaggctttgctgaaagtcaccggggagattttccccatgagggcgtacgccgtgacgctctga

SEQ ID NO: 867587 - DNA, 99 bp, Homo sapiens
ccccagccagcagggtagagtatcaaaccgaggataaggaatagacctgtagaaaagatgaacaccgtgttgttccagagcccactgctttttaaagct

SEQ ID NO: 867588 - DNA, 99 bp, Homo sapiens
caaaaccattcccgcggagaatcaactctgaacggaaagctggcagctgtcagcaaggttcttcagaagagtgtgatcattggagtgattgaaggtgga

SEQ ID NO: 867589 - DNA, 99 bp, Homo sapiens
cgagaagctgtgcatctacaccgacaactccatccggcccgaggagctgctggctggtgcagacatctccatgattgggcagtttggtgttggctttta

SEQ ID NO: 867590 - DNA, 152 bp, Homo sapiens
tgagctggacagggaggattttgagcacgtgaagaacagcacgtacacagccctaatcatagctacagacaatggtactcgtcctcacaagtgcccagactgcgacatggcctttgtgaccagtggagaattggttcggcatcgtcgttaca

SEQ ID NO: 867591 - DNA, 98 bp, Homo sapiens
tttggtgtggacatctgctgccggaaggggtcccgaagccccctgcaggaactctacaacccaatccaggaaatggcagcagtgtctgcttttcttca

SEQ ID NO: 867592 - DNA, 99 bp, Homo sapiens
ttcatcatacccaggctcctaaactgcttaaacgattatttctgttttcctatgcgactgctgcacaaaacaatacagactgaacattcttcacgatct

SEQ ID NO: 867593 - DNA, 99 bp, Homo sapiens
aatccttggaatgaacataaaccagtaaagatcggacgtgatggacagcaactgaacgaggaagggatgctgttggcttcagagatcaaacacctgccc

SEQ ID NO: 867594 - DNA, 99 bp, Homo sapiens
aagaaatcaatgatctctgattcgtgtattcacatctgtgagagctgccacaaactgaaggtactttttcatcaaagtggtctggtcaaccaccgtggc

SEQ ID NO: 867595 - DNA, 99 bp, Homo sapiens
gtttgcccaacatatagtgaccattgttcaccatgttaaaggaagagagaagggcacagttacctaagtatcaacgtaatcttcctcggccaggacagg

SEQ ID NO: 867596 - DNA, 99 bp, Homo sapiens
aatgcctgagcgggacatggactcaacagatctgtctgcctgcaatctacaagggacttacccttttgtaacctcttcaaattgtactgttggaggtgt

SEQ ID NO: 867597 - DNA, 98 bp, Homo sapiens
tgagacagtgcgcagggcacttgtgatcaacatgcgaggggtacttcggtccttggtggaagcatctagctcaggtgtgtcggtactgagcctgtgtg

SEQ ID NO: 867598 - DNA, 99 bp, Homo sapiens
ccagattcaacaggctgccaataaaggagcaagatggctagggatacctttgtctggatatggaggaacaagcaatcttattttggaaggcgttaaaaa

SEQ ID NO: 867599 - DNA, 99 bp, Homo sapiens
aatactttctcttcaggatctgatctgaatgctgtgaaatcactaggaactccagagctggaatagtcaaatgatttcagttcgtgaagccaaagccat

SEQ ID NO: 867600 - DNA, 99 bp, Homo sapiens
caagaatctccagtttttgacgggggccattcagcaactgggtgggacttcccaagtaagaagcggaagaggagccgctggaaccaagacacaatggaa

SEQ ID NO: 867601 - DNA, 99 bp, Homo sapiens
atcggcatctagtctttccgcttcttgaatttctctctgtaaaggaggtctgctgagaacagacccagtccctgaggaaggagaagatgttgctgccac

SEQ ID NO: 867602 - DNA, 99 bp, Homo sapiens
gctccacttgcccgcttccacccggaaagccccccaggctgagtgcggcatgatctccatcaccgaatggcagagagccatgtggctagaaatcctcct

SEQ ID NO: 867603 - DNA, 99 bp, Homo sapiens
atctgcaaaagaagagaagcagaattatacctagaagtctactaatggacagttagtcacccacctacatgttgaggttgtacctacaacagatcatat

SEQ ID NO: 867604 - DNA, 99 bp, Homo sapiens
tggcattggagcaagccaagaaagaatccgaagatcagaaacgatcagtgtactgttacccggacatacctattccttcacaagttctggttcttcagt

SEQ ID NO: 867605 - DNA, 99 bp, Homo sapiens
ctcctctgtccatcagggcctctatcgtacgtttcaaagtagcagcagtctctggcttctcaaagtctcgaagagcctgggtctgtacctgagggggtt

SEQ ID NO: 867606 - DNA, 99 bp, Homo sapiens
ttcagatccgagagaagcttgatcagttgagggccctggccaacgtcaacattgggagcctcatctgcaatgtaggggccggtggacctgctccagcag

SEQ ID NO: 867607 - DNA, 99 bp, Homo sapiens
cctcgaagtgcgcaaacttgacactcaccctgaccgtgatggaatggggagaagatattaaagcagtttcaaaagatgaagcagtgatgttggtgaatc

SEQ ID NO: 867608 - DNA, 99 bp, Homo sapiens
ggaagccagacagattcaagtattgaaggacgtggccgctttggagagtcagcctttattaggattcactgttattcaagttaaagatgagaattccga

SEQ ID NO: 867609 - DNA, 98 bp, Homo sapiens
tgaggacaatggacctgcctgggcatagacttccttaagtttcttgcagaacataaattattaggaaacattaaaaatgtggccaagacagctaacaa

SEQ ID NO: 867610 - DNA, 99 bp, Homo sapiens
ccaggtttatacaagatctttgatgaaattttggaacatcgatatattgaactcttcttgaattctactcctggaggcggctctggcatgggaggttct

SEQ ID NO: 867611 - DNA, 98 bp, Homo sapiens
ctagctaaacttcgccaactccgctgcctttgccgccaccatgcccaaaacgggccaaaacactcattgactcagatctctcaatccatgctggatct

SEQ ID NO: 867612 - DNA, 99 bp, Homo sapiens
cctccttgtcattattcgatgtccctttttggttctttcagctaccataaataacccaaatcttctcaccaacactgccagtgaaagatgtagaagata

SEQ ID NO: 867613 - DNA, 99 bp, Homo sapiens
gggcaggcgggctagaggagcagtttttgagagtggatcaagataaagacaaggattgtagcttggactgtgcgggttcgccccagaaacctctctgcg

SEQ ID NO: 867614 - DNA, 99 bp, Homo sapiens
gggagaatgtccaggatgtgctgccggccctgccgaatccagatgactattttctcctgcgttggctccgagagttgatctctctaatgtattagatct

SEQ ID NO: 867615 - DNA, 99 bp, Homo sapiens
cacataacgtgactgaaaatgactcttgcagacctcactattttattttcaactcacaggccttggagaccctggacaatggcaagccctatgtcatct

SEQ ID NO: 867616 - DNA, 98 bp, Homo sapiens
tctgagggagggtccgagccagccgctgttttgccggaggagcccctcaggccggaggccacggagaagatggtatctatgaagccaccaggtttcca

SEQ ID NO: 867617 - DNA, 99 bp, Homo sapiens
cctgagtagctgggactacagctagctcacctcaggaaattcctattagagatgatggatttcccattaaaggttgtgatgacaccttggtggttggac

SEQ ID NO: 867618 - DNA, 99 bp, Homo sapiens
atggggtactgatgcaacagttgggtagccaatctgcagacagacactggcaacattgcggacacccaaaggccaaaggtaagcgactccacttgagat

SEQ ID NO: 867619 - DNA, 100 bp, Homo sapiens
catgacgtatttgagttgaagcagttttctcagctgcctgctaacaaaacagctatgttagcaggcagctgagaaaactgcttcaactcaaatacgtcat

SEQ ID NO: 867620 - DNA, 99 bp, Homo sapiens
cttgacttttacatctgaaatcaacattaggtgatcaaaattctgaagtgtctaattaaacttgaataccggcagcttctgcctctgctgctctatgga

SEQ ID NO: 867621 - DNA, 100 bp, Homo sapiens
tggggactcagaggagtacttcgccacttactttaatgagaagatcaggaatggagatcttctcattaaagtaagtggcgaagtactcctctgagtcccc

SEQ ID NO: 867622 - DNA, 98 bp, Homo sapiens
cttgtttaatgactttggtgccctcaacatctctcagagacgaaaggtatgatctcgtgaaatcttgagagaaactgaatgacgaatgaaactattgt

SEQ ID NO: 867623 - DNA, 99 bp, Homo sapiens
gacctcacctcaagcacacccaatggacagcatgcctcaccaagtcacatgacaagcaatcatgacaactggcccaagggagcaggggacctttctgtt

SEQ ID NO: 867624 - DNA, 99 bp, Homo sapiens
ctatacgactggggacacatgtcttagaagcacactcattagataaagtgtcgcatactctttgataagacacgatgaggcgagtggtacgacagagca

SEQ ID NO: 867625 - DNA, 99 bp, Homo sapiens
ggaaatgatgggtgcccttgtggccagtaggcaatcacctgaaggatctgacttccagaagtgacttctgacagctctctccatggaaggaggcggcgg

SEQ ID NO: 867626 - DNA, 99 bp, Homo sapiens
agaccttgaaaagcggcacgacaacattaaaccatcagatgaggtgtacgaagccatcgacagcagagatggagcatcttgtgcagagttggtgtcttt

SEQ ID NO: 867627 - DNA, 98 bp, Homo sapiens
ggacctctatctcgcttttcccctggccttctgtatcttcatggtgcggctcatcttcgagagagcctgtgtcatcttgggggtgatattccttctgt

SEQ ID NO: 867628 - DNA, 99 bp, Homo sapiens
tggctttatacaagaagattatgccattgccgaaatctaaaaaaacttgtagcaaaggcagtaaaaaggaacggaacagttctggaatggcaaggaagg

SEQ ID NO: 867629 - DNA, 99 bp, Homo sapiens
agaccaccgcagggcggccgaggcagcctgcttctgcaaagtggtacgatcgaagggactatgtcttcattgaattttgtgttgaagacagtaaggatg

SEQ ID NO: 867630 - DNA, 99 bp, Homo sapiens
atcaagaagactgctaggggccgatgctgatcaggtaccaggtgaggaggccagacccgggaacggaaaggctgctgtcctagctgccgttgtaggtcc

SEQ ID NO: 867631 - DNA, 99 bp, Homo sapiens
tttaccctttttaatattggccaatcatcaagacaagccagcagctcgctcagtacaagaggttcggagagtaccaggttccagtgggcgtcttcataa

SEQ ID NO: 867632 - DNA, 98 bp, Homo sapiens
tcaaaagaaggctagcaatgtgtgccagaagactcgggaggaccagggaagcagtgaaaatgatgagagatgctggagtgcggtggcgtgatcttggc

SEQ ID NO: 867633 - DNA, 99 bp, Homo sapiens
ggggactctgcctcgtgccgctgagcctggcgcagatcgcatgactatatgaaggaagaggaaggttttcctgaagatgaggcgactgaatcggaaaaa

SEQ ID NO: 867634 - DNA, 99 bp, Homo sapiens; identical to SEQ ID NO: 839188

SEQ ID NO: 867635 - DNA, 99 bp, Homo sapiens
agacctccatgatgagccatctccacttaatgactgtctcacattggccggcaacttgttccagctgccgctcagctttgatggaacaacgcttatttt

SEQ ID NO: 867636 - DNA, 99 bp, Homo sapiens
cttccaggtcaagctggagacgcgccagatcacgtggagccggggcgccgacaagatcgagggggccacttcttaatgaagaggataactcagaatcat

SEQ ID NO: 867637 - DNA, 99 bp, Homo sapiens
ttgctcacacaaagcctgtttggtggtctcttcccacggacgcgcgagacaatgaggagggcttttttccagacttcaagctcccattccaacagtaag

SEQ ID NO: 867638 - DNA, 98 bp, Homo sapiens
gagacaggaggcagtagccaaacacccagggaaactgaacagccaagactcctataacaattttaccaacaacaaccctggcaaccctcggctctctc

SEQ ID NO: 867639 - DNA, 100 bp, Homo sapiens
gaaccagctcgggggccaactcgtggctgagaggatatcttccaagcatcagaagcagcctgctgcagtggactcctcagagttggcccccgagctggtt

SEQ ID NO: 867640 - DNA, 99 bp, Homo sapiens
acagctatgcatgctgcttttgatgtctgacaacgtggatcgttgttttgaaacgcacttctggatccagctgtgtgatagccgcactaggaaatacct

SEQ ID NO: 867641 - DNA, 99 bp, Homo sapiens
cgggctggagcctgacgagctggcgggtacctagtcgatagtcgctggttcaaacagtggaaaaaatatgttggctttgacagttgggacaaataccag

SEQ ID NO: 867642 - DNA, 99 bp, Homo sapiens
tcaactttactgagaattttccacctcctgacacaacaccactcaacagagatttgggattagaatctaccttaatatcgtcaaaacctcagtctcatt

SEQ ID NO: 867643 - DNA, 99 bp, Homo sapiens
agaaagataaaaatttcagtgaagaagaaagtaaagttggaagttaagggagacaaagttgaaaacaaagtgctgattactcttgtctctgctgctcct

SEQ ID NO: 867644 - DNA, 99 bp, Homo sapiens
tcaaggcctgagtagccggtaacaaacgagggttcccgggattggaccgacgcagccatgattttacatcctgaagtccaaactctagatctacggagc

SEQ ID NO: 867645 - DNA, 99 bp, Homo sapiens
aacagggaagcagaggagaaccgggagccattcagaaaagcttgtactcccagagtacctcatccacgctttcttctgtgtcatgtttctttgtgcagc

SEQ ID NO: 867646 - DNA, 99 bp, Homo sapiens
catggacattctgcagaatccactcatgatcaaaatcaaccaggatcccttaggcatccagggacgcaggattcacaagtagagacagggtttcaccat

SEQ ID NO: 867647 - DNA, 99 bp, Homo sapiens
gtgccatttactttgggctaaaaaatgattctactggaatccagaacaggttcgagaaagtgatcccagtgacccaaacaaagacatggtggtccagct

SEQ ID NO: 867648 - DNA, 99 bp, Homo sapiens
gtcagcagttagagagatatatgggccacatgcagtttctctcagcctccaacttgaaactctcctcgaggcccccagccaccagtcatctcatcagga

SEQ ID NO: 867649 - DNA, 98 bp, Homo sapiens
aagaatctctcatgtttcagggtataactatggaatccctcattcttgtatcagcattgatctggtagccttgctccagaagcctgttcctcacagtc

SEQ ID NO: 867650 - DNA, 99 bp, Homo sapiens
ggacatttgcgttctaccatcataggttttggcacaaataccagtgggaatagtatttttggaagtaaaccagcacctgggactcttggaactgggctt

SEQ ID NO: 867651 - DNA, 100 bp, Homo sapiens
caactcgatgtctctggatataatcatgaaatgcgctttcagcaaggagggtctccttgctgaaagcgcatttcatgattatatccagagacatcgagtt

SEQ ID NO: 867652 - DNA, 98 bp, Homo sapiens
gcagaaagtgacccgggctttaagcggaccaagacgctcatggagagaactgtttccttgtctcaggtacagcagattctcttctatgaagactcggt

SEQ ID NO: 867653 - DNA, 99 bp, Homo sapiens
agcaattacacccagaagattacctttgactcttgtcccaggtggaagtttagctgatgctataagtgaaaactacagaatcatgagttactttaaaga

SEQ ID NO: 867654 - DNA, 99 bp, Homo sapiens
ttttcatggatgcccctgtttctggtgttaccgagctgatacccagacataccagccttataacaaagactggattaaagagaagatctacgtgctcct

SEQ ID NO: 867655 - DNA, 99 bp, Homo sapiens
cgatggccgccgctgggccccggcgctccgtgcgcggagccgtctgcctgcatctgctgctgaccctcgtggaaaatgtttataggaggccttagctgg

SEQ ID NO: 867656 - DNA, 99 bp, Homo sapiens
acactttacaactgtgtaactgtcttcatctttacagaggaatagtctacaaaggaagacttgtaacctggagaagagatactttcattcagaaaacca

SEQ ID NO: 867657 - DNA, 99 bp, Homo sapiens
gggctgtggggtggtcggtgtgcttgtgaccctgcctttgtgtggctgtcaccggtgggactggcggggagctgtgttagagacggggtttcaccgtgt

SEQ ID NO: 867658 - DNA, 99 bp, Homo sapiens
cctcctcctctaccgtcaccgaagacttcagcgaggattccgagctcagttcctacccccggttgcgagaggagacagagcgaatcgtcaccacttaca

SEQ ID NO: 867659 - DNA, 99 bp, Homo sapiens
ggcgctggagctgggtcagtccgccgctcaccccgcggccgcaccttcccgccttctcagacccagccgatgcccaatcctgtggcgtactacctgcac

SEQ ID NO: 867660 - DNA, 99 bp, Homo sapiens
tgagcctcagctccacgtccgatgatgaacctccctcctctgtcagtcatggagcaaaagattgagaggatccagaatccagatctctggaatagctac

SEQ ID NO: 867661 - DNA, 99 bp, Homo sapiens
gcctcctgttgcactaacacggtgggcccataattccagttgactcggacaccatatggactttcatccagggccaaagctttggtcatggctgttact

SEQ ID NO: 867662 - DNA, 99 bp, Homo sapiens
ggcccttcagcggcagcagcgcctccagcaccatctccgtgtgtttctggctcatgtggagacccatgagcagggctcccacaatcaccacgacgatga

SEQ ID NO: 867663 - DNA, 99 bp, Homo sapiens
tggagttctcagcaggagtgccaaagaaagaagtaaactgaagttgcaaagcaacagtaatagatgctgggcagttttatgctaaatataaagaaacaa

SEQ ID NO: 867664 - DNA, 99 bp, Homo sapiens
cagcaacagaagcctcagattatccagctgtatcagaactttccatagaaaaaccaaggacagcatctacagtgctcaaagatccagacagcaatccat

SEQ ID NO: 867665 - DNA, 99 bp, Homo sapiens
cttcaaacgggcagggctctaggaaacatatgttacgatagccgtaagagcttctgttcgtgtgcagggaaagcagctcacagacgccgttaaaaccag

SEQ ID NO: 867666 - DNA, 98 bp, Homo sapiens
aaaaatgaatcaaaagaaaatctctaaatgcagattccagaaaaattacagcacatctcagtgaatttgcaagtggttgtttgcattcgctccacttg

SEQ ID NO: 867667 - DNA, 99 bp, Homo sapiens
aaaagaacaagaagtcttaccctcaggtcaaaaatgtctacacaaggaagtacaggatttggcttttctagatgtcgtatccaaacttcgcagtcatga

SEQ ID NO: 867668 - DNA, 98 bp, Homo sapiens
ttgagccaaagcacattggagttggaatgtatcagctgcagcaaaaaattattcctgatcaggaccaactgatggcaatagcactagagtgcatctat

SEQ ID NO: 867669 - DNA, 99 bp, Homo sapiens
ccaccgtcaacccgctcgggaagcagctcttgccaaaaacctttggacagtccaatgtcaacattgcccagcaagtgttttttgtagcatcagatccaa

SEQ ID NO: 867670 - DNA, 99 bp, Homo sapiens
gccttacaacgtggcagtgccttcagatgtatctcatgcccgcttttatttattcaagcggagaaatgttgctacagcagaagaagaaacagaagaaga

SEQ ID NO: 867671 - DNA, 98 bp, Homo sapiens
cgtcatacttggaaatggctgcaggttcagagcccagtgacgagcaccatccggaagtgaaggctgatgggtacgtggacaacctcgcagaggcagtg

SEQ ID NO: 867672 - DNA, 99 bp, Homo sapiens
ggctggtctcgaactcccaacctcaggcattgaacctggccacatcccaggtaccgtgaacatccccttcacagacttcctgagccaggaggggctgga

SEQ ID NO: 867673 - DNA, 98 bp, Homo sapiens
ggacggcagccacagcgtccgactcgactcggagggtttctgtgagagacaaattgcttgttaaaggtcttagtggtgcaatggctagtataagcgtg

SEQ ID NO: 867674 - DNA, 99 bp, Homo sapiens
gcctccatgcagaatagtcatttcttcacagatgttcaagggtcctgtctcgctattttcaggcagagagtcatattctgagggacccagagcgagagc

SEQ ID NO: 867675 - DNA, 99 bp, Homo sapiens
gcgtgaccgagagcgcgaatatcgtcatcgttagaagagtcattcttatagaagagcatcagaggaagataaaaaagaatcctcaatgtcaggcccctg

SEQ ID NO: 867676 - DNA, 99 bp, Homo sapiens
ctctcccatcacggacaccggagccggagaatgacatcttcctgggctgggaaaaaggagcttataagaaatggggaaagagtaagaaaaaatgttcag

SEQ ID NO: 867677 - DNA, 99 bp, Homo sapiens
ctgcggggaattgtgaggcggactgcgagggaaagggggccttgttgagtccgccaggaaataagatatgtggaacggagttatgtatcaaaacccact

SEQ ID NO: 867678 - DNA, 100 bp, Homo sapiens
ggagtcagaccagagagaaccactcaagtagcaatgtcaataaatccttggggaagcccatctgctgatcaaacatcctatgttctctctggtctgactc

SEQ ID NO: 867679 - DNA, 99 bp, Homo sapiens
cttattgctatgggggaggagattggtgcagagatggcattacgaacctttggccacttgatttatgacctgtgtgttgatgccttgagtccaaccttc

SEQ ID NO: 867680 - DNA, 99 bp, Homo sapiens
tgaatatgatcagatttctccaccaaattctcagcctgataaggatattctatattgagcgcattataccaataatcagaaaacattgctgaatcattt

SEQ ID NO: 867681 - DNA, 98 bp, Homo sapiens
atagagtggcaggtgcccaaatccaaggggcaaaggaagtgctggcttctgatttggtggtcaaagatcttcgaaatcaactatatgaatcatattat

SEQ ID NO: 867682 - DNA, 99 bp, Homo sapiens
gatgtcttttgaaaggtgtactgcaaggaacaaaatgtttgtaaattctccttttaccaagctgccactgcagagccccgccatggaagacacgccgtt

SEQ ID NO: 867683 - DNA, 99 bp, Homo sapiens
acgtgaaaaaccatggtatcctcagtggacgggacctgcagttccttcttcgagaaaccaaggcattaccacaggagtcttggttcgagaacacagcaa

SEQ ID NO: 867684 - DNA, 98 bp, Homo sapiens
aggcaaaacttcggacatagaggccaaccaacctttggaggaggctctgtcggtggtgagcgacgaccagtccctctttgactcagcgtacggagcgg

SEQ ID NO: 867685 - DNA, 99 bp, Homo sapiens
gagcagtctcacatgaagaccaatttttacgtctagatttccatgcccatggaagtggaagtgaagaagctctttccaatgaagactgtgaaaatgttt

SEQ ID NO: 867686 - DNA, 99 bp, Homo sapiens
aagccctcaaggatgcccggtccccatcaccggcacacattgtctttcagctcctggcatcagctctattcaaatctggttcagattttacagctctgg

SEQ ID NO: 867687 - DNA, 98 bp, Homo sapiens
tgacagtagcccagcccgccggccagctttacgagatcctcggttttactcctgtcccatctataagaagccagttcgaacggacttgaactacattg

SEQ ID NO: 867688 - DNA, 99 bp, Homo sapiens
tggtctttcttggactattccagagagggaaggtggccatccagaaggaggacttgcagaagtaccacaacagggacacctggttccagctgcagcacg

SEQ ID NO: 867689 - DNA, 98 bp, Homo sapiens
agtggtgatgcaagaagtttctaggaaaggccggacaccaggtcatgtttactggtgaaaatattcctgttcatcctcatgtttatagcaatggtcat

SEQ ID NO: 867690 - DNA, 98 bp, Homo sapiens
attgttcagcccaacactcgccttgaagatgtatcggcaagcagtgtaaacggaggacttggggaaaaaggaccacatagtccatcgaagaagagtcc

SEQ ID NO: 867691 - DNA, 98 bp, Homo sapiens
aggaccaaaggatcacccacatcctccacgtgtcctgtgcagtggctactggggaagacccaaccagtgtggctattgccagcatccagtcagctgcc

SEQ ID NO: 867692 - DNA, 98 bp, Homo sapiens
cagggaggagaccggcacccagacaggtggcgaaggcagaggacgatctataactacaatgcttctcaagatgtggagctctccttgcagatcggtga

SEQ ID NO: 867693 - DNA, 99 bp, Homo sapiens
agaatctagacagacaggcctttctaggtacctgtgtgacaaggtcgtccctgggaacagggttaccatcatgggcatctactccatcaagaagtttgg

SEQ ID NO: 867694 - DNA, 99 bp, Homo sapiens
attgatttccgggagtccgcaccaggggccctcagggaagagaccctgcaaagatcctgggagaccaagtggtatcctgaggtgcggcaccactgtccc

SEQ ID NO: 867695 - DNA, 99 bp, Homo sapiens
ttctaatagaggctggtaacaatttctagcagaagttaagtctgatgaacctggcaaataaggggaattttgtgcaacagcatctcaaataccttggga

SEQ ID NO: 867696 - DNA, 98 bp, Homo sapiens
ttgtccaaagtgcaacattcatttcaatcttttggatcctttgaaaaatcacatgaagcaccgaacaagatttgtgatgaaatggagcctggaacaaa

SEQ ID NO: 867697 - DNA, 98 bp, Homo sapiens
gcagtcaagccttgcccatgtggtacattttcatcctggggtcttgctgtgggggctagaccgtccctctcaggctagatcattcctaaagatggtaa

SEQ ID NO: 867698 - DNA, 99 bp, Homo sapiens
ctccaggaatgccagtgcatcttttgcacagctgttagcatggcctcattgaaagaactagatcaaagactctttgaaaattacatcgagttgaaagca

SEQ ID NO: 867699 - DNA, 98 bp, Homo sapiens
tgaaagccaacgcaatgttcggtgcgggggacgaggacgacaccgatttcctctcgccgagcggcgggggggacacagcgattgccacgcgccattgg

SEQ ID NO: 867700 - DNA, 99 bp, Homo sapiens
ttgtgaagtcattgatctgaggactataataccttgggatgtggacacaatttgtaagatctcagagagcaacattgcgtacgagaaacgcaaagcaaa

SEQ ID NO: 867701 - DNA, 99 bp, Homo sapiens
tcacatcaacttctaccagctgggtggagtggttggcatcaccatcgactggcactgtgacctggactggcacgtacggcactgcagacccatctatga

SEQ ID NO: 867702 - DNA, 99 bp, Homo sapiens
atgtgaactgcacgataaaggaactcaggcgcctcttcttagttgatgatttagttgattctctgaagcaaagtgaaaaggagagcttgttgaaggaaa

SEQ ID NO: 867703 - DNA, 99 bp, Homo sapiens
tccacccagcgctaccggctggaagccctcaagccttgttatcagctacagctctgaattatctgctgtctttagttgctatcgtcctgttctttgtct

SEQ ID NO: 867704 - DNA, 98 bp, Homo sapiens
ttgttggtctgaattctcctaactccattttgaaagctgctaaaggcggcgactggcggcgcgatggacctgaccgggctcctgctggacgaagaagg

SEQ ID NO: 867705 - DNA, 99 bp, Homo sapiens
agcgcctgaggaccggcaacatggtgcggtcggggaataaggaaccacagaggacacattaataactggaagtaaaactgctgccccagtcacctcaac

SEQ ID NO: 867706 - DNA, 98 bp, Homo sapiens
tccgcgctggcggtgtggacgcggaactcagcggagaaacgcgattgaggaattgaatgatctggcacgggaccctccagcacagtgttcagcaggtc

SEQ ID NO: 867707 - DNA, 99 bp, Homo sapiens
gcctggaagaactcgtcatgctctttgtagcgtggtgcttctgttgctcacaggaggttgtggctcactggattgctgaaagccgcattgccattgaga

SEQ ID NO: 867708 - DNA, 98 bp, Homo sapiens
gacgctgctggtggccaagaccaaggcctctccagacacgatgaggcgagtggtacgacagagcaagtttcggcatgtatttgggcaagcggtgaaaa

SEQ ID NO: 867709 - DNA, 99 bp, Homo sapiens
cgggtaactctcacagtggaaggtgacattcccagaacctggaggccaggctatgacacagagtcaatcaataaccagggagatctgtgatatagccca

SEQ ID NO: 867710 - DNA, 99 bp, Homo sapiens
ctctgggtcctcggtcggtacagtctctgcacctcgcgccccagcaggctgaagaaatgtcaacaattgggagttttgaaggattccaggctgtgtctc

SEQ ID NO: 867711 - DNA, 99 bp, Homo sapiens
agtcagtgacttccgggagtggatcttccaggccataaagtccttcagtgaatctacagacctattttctcaggagctcagcctggccttacttcagtg

SEQ ID NO: 867712 - DNA, 99 bp, Homo sapiens
tgaggagatgctgttcatctatggccactacaaacaagcaactgtgggcgacataaatacagttccaaagcccaagaggagaaatggggtgaacttctc

SEQ ID NO: 867713 - DNA, 98 bp, Homo sapiens
ggttatagatggacaagagacgatcattctgcaagcaggcaacctgaatacagtctgtgtctgtgtggagtgttgcaggacgagtggaaatgactgtt

SEQ ID NO: 867714 - DNA, 99 bp, Homo sapiens
agattttgaccaagcattttgtaagaatgttgtaccatctttgggtaggcagacttccctgacgacatcagtgatacccaaagctgagcagagcgtggc

SEQ ID NO: 867715 - DNA, 99 bp, Homo sapiens
gtgggtctgaaattaggatagacatttattgttcttgcataggcccaacgaagcaaggcaggattttccaaaaaccatttgtgtttcaagaccatccgt

SEQ ID NO: 867716 - DNA, 112 bp, Homo sapiens
gactggatgccaattctgtaccagcagaaagagtggcagagacgctaatgaactgaagacgatccttcgagagctaaagtacagaattggcatccagtcggccaagttactt

SEQ ID NO: 867717 - DNA, 99 bp, Homo sapiens
tgttgaaagaacccacaggtgcatttcacagcactctgggcgaaaattggatgtgaaaatgaagccagaccgaggtgtcagttgtacccgaggcgttct

SEQ ID NO: 867718 - DNA, 99 bp, Homo sapiens
gctcattgacgccctggagtcccatcatgacacgtggcccccagcctgtcccccactggagcctgccaagagtgaaagctggacattgaagaagccaaa

SEQ ID NO: 867719 - DNA, 99 bp, Homo sapiens
atggttccttgcaaagggcacgtatagcattggtaaagaacgatcgtccagtggagagctccttaataagcatttatagtcagtttttggcagcaatag

SEQ ID NO: 867720 - DNA, 98 bp, Homo sapiens
ttagttggagctttgtctatcttcttccttaggaaaccatatctgatgaaaaggataccacagaacccaagataccagcatatcaaatcaagactgga

SEQ ID NO: 867721 - DNA, 99 bp, Homo sapiens
agcaaaatgttctttactactaagcaccgttggtatcctcatggacggtggtttcagacaccctcacaggttttctaccatgcagcaactgaacatgga

SEQ ID NO: 867722 - DNA, 99 bp, Homo sapiens
tccttttcgagcttttccaccaggatttggagttccatggagtgatgagattttattttcaagataaagctgctggaaactttgcaacaaaatgtattc

SEQ ID NO: 867723 - DNA, 99 bp, Homo sapiens
attgtgtgtccatcttggttttgagctctgctctgcctgtgatgtcgagaacactgggaaaaatgaggaagctgtgagtaccagtggaaggaacgagcc

SEQ ID NO: 867724 - DNA, 99 bp, Homo sapiens
gcgagccggagcgcggagcccggctcccgcaccatggaggaggacgacagctacggtgttgacttcaaaatcaaaactgtagagctaagaggaaagaaa

SEQ ID NO: 867725 - DNA, 99 bp, Homo sapiens
cacttcttgaacatgcagctgcaatgatggattcaggcaaacggtagtggggctccatgtaaccattcctggggtccatggcaaacaccgtcccgcggt

SEQ ID NO: 867726 - DNA, 99 bp, Homo sapiens
tgggatcctaccaacatgatttccgggagtctggtcggtagtccttgggcctcttggactttccaagtaactacttctaggaggatctggaagcaggcc

SEQ ID NO: 867727 - DNA, 98 bp, Homo sapiens
ccgtgtcctgcaggtattgggagatccacagctaagacaccgggacctcctggaagccaaaaatggatgaagaccctgagaccagttggattctcctt

SEQ ID NO: 867728 - DNA, 99 bp, Homo sapiens
cggaggagacatcggcctctgcaggcttgccgaagaagggaggtgatgtgtccaatctagatcccaacttctcatttgaaggcaccaaactggatgtgg

SEQ ID NO: 867729 - DNA, 99 bp, Homo sapiens
cagccatttcagatctggtcatgatttcctcgatgggatccacgtcgtgtgcaatcaccaccagctgagctttcttgttctccaccaaggtggtgacgg

SEQ ID NO: 867730 - DNA, 99 bp, Homo sapiens
cttggggctctacctctttttcaaaaggcattcgacttacagcagtgtgcggccagccagcagaggggtgactcaacgcttggaccttcctgaccttcc

SEQ ID NO: 867731 - DNA, 125 bp, Homo sapiens
gggaaatctggatgccaaacgagattggggccatgccaaggactatgtggaggtaggataattgcggactgaaccctcgggctgcggtcatatatgagaacttgctccgcgcggtcccctttgcc

SEQ ID NO: 867732 - DNA, 99 bp, Homo sapiens; identical to SEQ ID NO: 802566

SEQ ID NO: 867733 - DNA, 98 bp, Homo sapiens
gctggtggaagaaagccaaacgaagttaaaggaagtgttccccacggctgcgctcatgccagatacatatgaaccagatggttacaacccagaagctc

SEQ ID NO: 867734 - DNA, 99 bp, Homo sapiens
cgcctttgctactaccgcgactggctgctgcggcgcgagatgcacgaaggagagagagtgagaagtctctagaaaatgaaacactcaataaggaggaag

SEQ ID NO: 867735 - DNA, 99 bp, Homo sapiens
ttcccgttaaccttagccacaaagtcaaaggaatactcccccagttgcaagaggcgcaggaccgtggaagacttcaacaaattctgcacctttgtcttg

SEQ ID NO: 867736 - DNA, 99 bp, Homo sapiens
taaacagtacattagttaaagttacctggtcaacagttccaaaggacagagtacatggacgtctgaaaggctatcagacttgatgagaatggaaaagat

SEQ ID NO: 867737 - DNA, 99 bp, Homo sapiens
ctccccaggggagttctctgtgtctgtgaacctggagtactcgggtactttgagttcagtggctcaccccagcctcctggttatttgaccttcttcacc

SEQ ID NO: 867738 - DNA, 98 bp, Homo sapiens
tgtcgagcagcggacgccggtctctgttccgcaggatggttgcccgaagctcagcagagagtcggaggctgctttttaaacctgatgccacagatgaa

SEQ ID NO: 867739 - DNA, 99 bp, Homo sapiens
tgtgccacacaggtagccctggacggcattcagtgttttgttaagtgggcagaccaacatccacctcagcaaaaacttcttcctgacgaatcgcgccag

SEQ ID NO: 867740 - DNA, 99 bp, Homo sapiens
tctaataactcggtgtcaaagccaagacataaactcaaccccttctcttccaaaaggataccatggccaagcggaatacagtgataggaacaccatttt

SEQ ID NO: 867741 - DNA, 99 bp, Homo sapiens
caagaagcaagttttctcaggtatttgccacaggagcctggtggagctccaggagataacaacgaacttgatgcaagtgataggtttgccaaggtcaga

SEQ ID NO: 867742 - DNA, 99 bp, Homo sapiens
ggcaaaaacattcaagaatgagagcgagaacacctgtcaagatatcaacagtgatggtgtcctggatgagcaggagctggaggcactcttcaccaagga

SEQ ID NO: 867743 - DNA, 99 bp, Homo sapiens
aagctgccttgtacccacatctcccgccagattggcacttctctgtttgatgaagagggagccaagattgtcaaagacctaatgtccaaagctgagaag

SEQ ID NO: 867744 - DNA, 98 bp, Homo sapiens
ccaccccgccagctccagagccacgtacggtggtgccaccaccacaacagaatgatcttgagattcctgaaagtcctacctatgaaaatttcacctga

SEQ ID NO: 867745 - DNA, 99 bp, Homo sapiens
tggggacctcactgagaagtattttgctctgcgaaacatcatccagaagacactcttgcactcctgtaatgagcctggcactgtgatgaaacacttttc

SEQ ID NO: 867746 - DNA, 147 bp, Homo sapiens
tggcgctggggcaccgaccccgcaacgactgcccgggctgcgggaggggaggagagcagagaacgtccccagttcggcggtcaggcctacagcgacgtggaacacacttcagtccagtgccatgccttagatggaattgagtgtgcc

SEQ ID NO: 867747 - DNA, 99 bp, Homo sapiens
gacttcttggaaagatatgccaaatttgttaaagagaggatagaaattgaacagaactatgcgaaacaattgagcaaagtggaagatgctttctacaaa

SEQ ID NO: 867748 - DNA, 98 bp, Homo sapiens
gacaacgccaagcagtgcttctacgaggacatcgctcagggcaccaagtgcaccctggagttccagggacctcctggcactccaggtcctcagggtct

SEQ ID NO: 867749 - DNA, 98 bp, Homo sapiens
agccctttacaagaagtccactttctggtatatacaaatgacgatgaaggctgtcagtgtgacatttgtatgtgcagtatctctgtatttgaagaccc

SEQ ID NO: 867750 - DNA, 99 bp, Homo sapiens
gcgcaccaggcggatgccccagccggggcccagcgaacgccaggtggaggcctgaattttgatctatgttctacctacatccagctggctgaaagtact

SEQ ID NO: 867751 - DNA, 98 bp, Homo sapiens
tccaagtgatgctgctcaccatcagtgaatttaagcccacatatcaggaccgagtggccccgccagttactccacaggatccgctgaacataggatgt

SEQ ID NO: 867752 - DNA, 152 bp, Homo sapiens
ccttctcacattcctgcgacttcccttaattgttgatgaggtcttggagcctcccagacctcatcaacaattaagggaagtcgcaggaatgtgagaaggccaggaaggattgtgagccaataatacatcttgacaatccacaatagatggaa

SEQ ID NO: 867753 - DNA, 99 bp, Homo sapiens
ggaggaagctgggacacccgggagtcaggaaatgcactgagctagcctctccttgctagaagcttacggtcgaaggtctccagccatcagaagaagcac

SEQ ID NO: 867754 - DNA, 99 bp, Homo sapiens
cagagtgcacggctgaagaagcatatacacttacagagtataaatcaaagccattctgtgaaaaactgctttcctgggtgaaaagcagtggctgtgcca

SEQ ID NO: 867755 - DNA, 75 bp, Homo sapiens
gcaaggtcgccctcaaggccatgatcaaaacatccatcaactacgatgaaaaggatcccttcctctgcaatgcct

SEQ ID NO: 867756 - DNA, 99 bp, Homo sapiens
agatgtggcctccagagggctagtgaaactggaacgccaagctgaagaagaacgaatacggaagcacaaagcagctgctgagaaagctttccaggaagg

SEQ ID NO: 867757 - DNA, 99 bp, Homo sapiens
aaagaaagcgcctttctccaggctcaaaagagtatcaggcatgaagtcatcaatatcaacctgaaaaataagcctgagtggttctttaagaaaaatccc

SEQ ID NO: 867758 - DNA, 99 bp, Homo sapiens
atccacagaatagacctgaagacaaaaatccagaagtacaagcagtctgccaaaactggacaagccaaggcatctgtagccaaagtaaacaaatctaca

SEQ ID NO: 867759 - DNA, 98 bp, Homo sapiens
cctcagaaacccacagctaagtttcccaggactccagaaaattcagcaaagaagaagcttttaagatgaagaaactgaggttcagagaggttaagaga

SEQ ID NO: 867760 - DNA, 98 bp, Homo sapiens
ggagatccaagaagaatcaatgctttggcccctggtgacatgtacatggtgtaatgacagaaggcagacggtaacaagtactccttgctggattgaac

SEQ ID NO: 867761 - DNA, 99 bp, Homo sapiens
ataagaccgcgaccagacaggcggcgccatcttcgaacttagacttccggaaggactttggcgagggttcgatacaagaggctgttttcctagcgtggc

SEQ ID NO: 867762 - DNA, 98 bp, Homo sapiens
tccgacaagctgaccttctctgtgatctggacactgactccagagggcaaggctccgagctctgtccagtggtgggagtattacatcccctcctcttt

SEQ ID NO: 867763 - DNA, 99 bp, Homo sapiens
cgcaaggagatgatgaaggagacgttcaagtacttcctccggggtgctggagaatctggtaaaagcaccattgtgaagcagatgaggatcctgcatgtt

SEQ ID NO: 867764 - DNA, 99 bp, Homo sapiens
ttggtttggtcatcaatctgaactacaaagatttgaacaatccagcaactatcacaagaatactccttagccacttcaattgggataaagagaagctaa

SEQ ID NO: 867765 - DNA, 99 bp, Homo sapiens
gttctgtggtgatagtctttgacacagataaccggatatttggtttgccaagggagcttgtggtaactgtatcagttaccattggaatgacatactgca

SEQ ID NO: 867766 - DNA, 99 bp, Homo sapiens
gcagggagaggagctgtggataacgggaggtgaatttccatgtcaacatagtcctgatctgctaggatccagcttaagagatccagtactggagtcggc

SEQ ID NO: 867767 - DNA, 102 bp, Homo sapiens
gttcgagaccagcctggacaacatggcatcgttggcttcacagtatgactgatgatcctccaacaacaaaaccacttactgctcgtaaattcatttggacga

SEQ ID NO: 867768 - DNA, 99 bp, Homo sapiens
agatggggagcaaatagatctctcatagattgctggtggcaaggaactgtggctgcaccatctgtcttcatcttcccgccatctgatgagcagttgaaa

SEQ ID NO: 867769 - DNA, 99 bp, Homo sapiens
catcatcgttttgaagagttctgcgttttgccagtcacctctcaactgtgtgccaaaggaacgcagtcgcggggtatatccccctgaaaaccgtacgtt

SEQ ID NO: 867770 - DNA, 99 bp, Homo sapiens
gggaccgcccgcccccgcgcttcgaggataccggcggatggagagcaatacatcatcatctttggagaatttagcgacggcgcctgtgaaccagatcca

SEQ ID NO: 867771 - DNA, 99 bp, Homo sapiens
catttcgaatcacttaaaggagtggacattgctagcaatgagctcccaaagccatccagtttctgtgtttgaagaacatacgcaccttcctgaaagtct

SEQ ID NO: 867772 - DNA, 100 bp, Homo sapiens
aagcttgggttgaaaaactggagactcacagactcattcttctcacaagctaaaattctaatctctgtatctgtgagtctccagtttttcaacccaagct

SEQ ID NO: 867773 - DNA, 100 bp, Homo sapiens
tggcctataattacaaaatggaacagatttcaaaaggacgttgtcgcacagtggagtattacgtccttttgaaatctgttccattttgtaattataggcc

SEQ ID NO: 867774 - DNA, 99 bp, Homo sapiens
ggaaaactcctggacaatcagtaaagagtaccatattgatgaagaagtgggctttgctctgccaaatccacagaaatggtggagtcaatgaagaaagta

SEQ ID NO: 867775 - DNA, 98 bp, Homo sapiens
cagtatccaggtcgaggttctgcagaaggttgtgactttagtatacaaacgaggtcactcggacactatggtgttcttttacctgtggattgtctttt

SEQ ID NO: 867776 - DNA, 99 bp, Homo sapiens
ttaaaagaatatttagtaactttagctaaaggggacttaaaatttcccctgaagatatttcagcattccaaaccagattttggaaattttagcattcag

SEQ ID NO: 867777 - DNA, 99 bp, Homo sapiens
gtgattttcatgactacaaagaattactgtgatcctcagggccatcccagtacagattagtgatgatgaaccaggttatgaccttgatttattttgcat

SEQ ID NO: 867778 - DNA, 98 bp, Homo sapiens
caagacagtgcctggataccttcgaatagggatatgtttgccttcatgggcagcctggataccaagggtaccagctacaagtatgaggtggcactggc

SEQ ID NO: 867779 - DNA, 99 bp, Homo sapiens
ctcaccgcgactggacttcgctcagcttcagaccctgggctgcagctgcctaatgagacaatgtcactttattattcaagttatactgcttggcagtga

SEQ ID NO: 867780 - DNA, 99 bp, Homo sapiens
ctggatccaggataacggaggctggctgccactggtgacatgccaacttaccagatccgagctcctactgctgctttgccacagggagtggtgatggct

SEQ ID NO: 867781 - DNA, 103 bp, Homo sapiens
ctcaccaagaagctactggacctcgttcagcagtcatgtaactataagcagcttcggaaaggagccaatgagggtaaaacatggctaaaagcttacggagtaa

SEQ ID NO: 867782 - DNA, 99 bp, Homo sapiens
gaagagacacctgttttctacaaactcgttcctgatcctgtgaagaatatctacatttatctaacagctgggaaagagaaccacgaagctgccctgaga

SEQ ID NO: 867783 - DNA, 98 bp, Homo sapiens
ggagttcgatgaccaagccactgttgagatcaacagttcaggctgttactccacaggccaaccccttcaaggagcgaatctgcagggtcttctccaca

SEQ ID NO: 867784 - DNA, 99 bp, Homo sapiens
ggagacctgggtcccagtggagaggcctcaccatgtagtgctactttgaatgataaggatgatgactctcttcctgcagaaactggccaaaaccatcca

SEQ ID NO: 867785 - DNA, 122 bp, Homo sapiens
agggccttgtccagggctttggtcacctgggccagaaacctggtctccctaggtgaccaagaatatggcccaggtgaccaaagccctggacaaggccctgagcaccatggacctgcagaagg

SEQ ID NO: 867786 - DNA, 98 bp, Homo sapiens
tcggcgtccgccagcgatggcacaggatcgtagggcatcagaaaaacaaaaagaaatagagagagtaaaagagaagcaacagaaagaactcaataaac

SEQ ID NO: 867787 - DNA, 99 bp, Homo sapiens
ccaggacctctccactgcctcctccacccctgtatttcacttggctctccaaattgactcaactccagaattgcagaatttacctcaagaactctttgc

SEQ ID NO: 867788 - DNA, 99 bp, Homo sapiens
gatgtagctaatgaccgtggttcccactgagttttttggaccatatacaaacaacactctttttgaaactgatgaacgctaccgacatttaggattctc

SEQ ID NO: 867789 - DNA, 98 bp, Homo sapiens
cgaggccctgcctactatctatgttgttacccccacctatgccaggcttcttctcatatcggtaattccactcaggccactgtgagggatgcagttgt

SEQ ID NO: 867790 - DNA, 98 bp, Homo sapiens
tctccatcacccaccaacaacaccacaataatccacagccaagcttcttctcagcctgttgataaccatgttagcccatcttccttcttgggccagac

SEQ ID NO: 867791 - DNA, 99 bp, Homo sapiens
ttactacctgactaagaagaatgagaactataagagcctggtgagacggagctatcggcgccgcggcaagagccagagtgatccagagtttgtgcagtg

SEQ ID NO: 867792 - DNA, 99 bp, Homo sapiens
tctgaaaggaaatccggaattatcacagagaaacccttttccaaagagaaatgaagaagaaaactgtatgtaccctaaatatgggagataagaagtatg

SEQ ID NO: 867793 - DNA, 121 bp, Homo sapiens
ggcagagctgtggctcgaattcccagagttcgaggtggtgggactcaccgctctgcaaggaagaagttgtttccaaaagcaccctggccagagcggtgagtcccaccacctcgaactctgg

SEQ ID NO: 867794 - DNA, 99 bp, Homo sapiens
tggatgggctggagacaacagaaacagaaacgattgtggaaacagaagttcaccatgtctattctcaagatccatgccagggagatctttgactctcgc

SEQ ID NO: 867795 - DNA, 99 bp, Homo sapiens
aggaccaccggtcaaattcttaccagtggaagaagttgttccgaatgtaattgaaccttccttcggcctgggtaggatcatgtatacggtatttgaaca

SEQ ID NO: 867796 - DNA, 99 bp, Homo sapiens
cagaacagaagatcattaagagagtgattgctcttgaaggagatattgtcagattttgaaaagccatggtaaagatgaagaatgtgttttggaagcaga

SEQ ID NO: 867797 - DNA, 98 bp, Homo sapiens
ctttgcttgggtggaagcagatggggtaaattgctctaagcgaaagacatgaggcctcagcctgaaatgaggttgttttgaggtcatctgatttctga

SEQ ID NO: 867798 - DNA, 99 bp, Homo sapiens
attaagttggagcagggagaggagctgtggataacgggaggtgaatttccatgtcaacatagtcctgttaccagatgtatgctactcatggtgggtcct

SEQ ID NO: 867799 - DNA, 99 bp, Homo sapiens
gtctaacatcatttccatagtctggttggggcctttctccaattcctccagccagctgaaatactgccaagctcacttcatgtgcaaggtgatctgcac

SEQ ID NO: 867800 - DNA, 98 bp, Homo sapiens
ggtgaagctggcggagcaggaggatgggcgccaatgttttcagttgcaccaagcttagccaccaatgcatcagcagccgcctttaatccctatctggg

SEQ ID NO: 867801 - DNA, 99 bp, Homo sapiens
gcatcctgtcggctcacaagataatagccagctccccagaaatgaacctgcccacggtgtccgcgctcaggcgtcacactgctcagctccgcgaagagt

SEQ ID NO: 867802 - DNA, 99 bp, Homo sapiens
tcacccttagcggaggacagcgtgcccggattgcccttgctcgtgctgtctaccagatctcagtcctggctttctctgtctgcttcatcttcactatca

SEQ ID NO: 867803 - DNA, 99 bp, Homo sapiens
gaccatctacatctcccacaggaagtgtcacacagcagtcaagtatgtcccaaacgtctatattcccactctggccactgcccaaaggggctcttatct

SEQ ID NO: 867804 - DNA, 99 bp, Homo sapiens
gtgggcgtaggaccctccgagccaggtggctcccggctgcctctgctgcagttcagagcaacttcaggagcttcccagccgagagcttcaggacgcctt

SEQ ID NO: 867805 - DNA, 99 bp, Homo sapiens
tcattcacccatactgactagtttcacatctctttgacggtctggaaaatcccgaagcagaagcccgtattcatctaggcattcaagatctcgtagcag

SEQ ID NO: 867806 - DNA, 99 bp, Homo sapiens
ggcaacagagcgagactccgtctatggtggaaataaaggtagtattgaaggcatcatccgaaaaacgaaaaaggacgcaggtcttccccactccggaat

SEQ ID NO: 867807 - DNA, 98 bp, Homo sapiens
gtggccgtcgctgccaggcacaagtgtcccgccgcatctccttcagcgcgagccaccgattgtacagatgatgaggagtctgatgaggaagctgtgaa

SEQ ID NO: 867808 - DNA, 99 bp, Homo sapiens
ttttatcagatatcagctttgacaagactgatgaatcactgctcgacacttcatgcaccagatcatcacagggatgttgtatcttcattctcatggtat

SEQ ID NO: 867809 - DNA, 98 bp, Homo sapiens
tgactaccagtggctctgcagagagcaatggtggaacaaagcggcaaaagatatcccatcaaaattatatagcctatcaaaagcaagttattcgccga

SEQ ID NO: 867810 - DNA, 99 bp, Homo sapiens
acaggacagaaagagtgtgcagcggattaaagctaaagacatagttcctggtgatattgtagaaattgctgatattaataaggcagcggaaagaagaaa

SEQ ID NO: 867811 - DNA, 98 bp, Homo sapiens
cccatccccatcatcctcttcacagggttctgcatcttagcctgctgaatgacgccatcaatcctgaggacttcccagaacctgtctacaagagtttc

SEQ ID NO: 867812 - DNA, 99 bp, Homo sapiens
gagaaaagggatgcaagatcccagaggctggcggccattgccctgctggtcctagaggaggaggagagcgccttctggtgcctggtggccattgtggag

SEQ ID NO: 867813 - DNA, 99 bp, Homo sapiens
cattgatccaattcttcttcaggaatctctgccttgacagtagatttcttactggcaggcatagtcatccagtctgtaatcccagctacttgggaggct

SEQ ID NO: 867814 - DNA, 99 bp, Homo sapiens
cgaggggagacgccgtgacaactttcgtttccctctgagggaattgggaggtcggcggccccaaaaggatcgtgggactttaccagatcggtttgtaat

SEQ ID NO: 867815 - DNA, 99 bp, Homo sapiens
actagggtgcagcgccaggtccggtgttggggtgtccgagttgccgccggagaggagtggcctcgcccgcttggtgaagtgtcagactctgacagcaac

SEQ ID NO: 867816 - DNA, 99 bp, Homo sapiens
attggttccatcagacatgtggttcagtacaaaattggacagctgtacatgatcagcaaacacagccatgaacagagtgaccggggagaaggggtggag

SEQ ID NO: 867817 - DNA, 98 bp, Homo sapiens
gctatctgaagaaaagtagaaggaaaaacagaacgttgcaaactctggaaaaaaacttggacccaacatgagtgaagtttcctgcaagaaacgggacg

SEQ ID NO: 867818 - DNA, 99 bp, Homo sapiens
cctgatctggcctcatctgttccagggaggtgggattgattacaacttcaacgactaccaccgccactttcaccaccaacactactaccacaatcacca

SEQ ID NO: 867819 - DNA, 99 bp, Homo sapiens
ggagagttgcgttcgtctcacttaggccaagaagtcaccttgtgtggatggattcagtaccgaagggagaagaaatgggtgaccgttggtgacacatcc

SEQ ID NO: 867820 - DNA, 99 bp, Homo sapiens
gaacattgaagtactgaatctaaatgggtgtacaaagacaacagacgcagtcagaaaagctgagtaagatgagttctctcctggaacggctccatgcaa

SEQ ID NO: 867821 - DNA, 98 bp, Homo sapiens
aagaagggagccaacaaaaattgttttttctacctgttgacgtgtcaagcactaactgacaaagcagttccaattccagagaaaatgagtgaatgggc

SEQ ID NO: 867822 - DNA, 99 bp, Homo sapiens
gtattctttacctgcttcccaatcccactgatgaggatcagcccatgtggtccacatgtgccaggagatgtgggaatggctacccctgaagtcatatgg

SEQ ID NO: 867823 - DNA, 99 bp, Homo sapiens
aaaacaatcggcaaggggaattttgcaaaagtaaaattggcaagacatatccttacaggcagagagaaaaggtgtgagcggtactgggcccaggagcag

SEQ ID NO: 867824 - DNA, 99 bp, Homo sapiens
caatgcagccaacaccatcctgaggcaactggacatggagttgatctctctaaaacgtcagatgaacacagtatagagcatgaatttttttcatcttct

SEQ ID NO: 867825 - DNA, 98 bp, Homo sapiens
atacattcccagaaagaggggcaagaaccccatgaaagctgtgggactggcctgacaggagacaatttatccagcatgttgctagaaaatctaactga

SEQ ID NO: 867826 - DNA, 99 bp, Homo sapiens
gaatttgccaagaggaatgttaagttgattgccctttcaatagacagtgttgaggaccatcttgcctggagcaaggtcctaggcctacttacaagcctc

SEQ ID NO: 867827 - DNA, 99 bp, Homo sapiens
ttgggtcgatctgtgacagatgaaaccacccctactcctaatcccccgactacagaagaggagaaaacggaatctaatcaggaggttgctaacccagaa

SEQ ID NO: 867828 - DNA, 101 bp, Homo sapiens
ggcctcccaaagtgctgagattacagattttgtgggctctacagtaagctccgtgttgcggcccgggggtgatgtctctggatggggagtccttccctgcc

SEQ ID NO: 867829 - DNA, 99 bp, Homo sapiens
ttcttatttagccggagtgagaagcaagaaggccctggacacagcaatatctctgggctttcacagatcaaatttttggctctcatctgcacaaagtgt

SEQ ID NO: 867830 - DNA, 98 bp, Homo sapiens
gccggcaccaccgctgcaagagccgggtgtatgcaacagcgttattgcaacaggctaacgaaaacagacaaaattcaactggaaaagcatgttttggc

SEQ ID NO: 867831 - DNA, 99 bp, Homo sapiens
gagggcgatgcccatggtgaagattcctgagatggccaggactttggaccagatctgcagaggcacgaaggccaagccgaaataaaagcaagtcccttg

SEQ ID NO: 867832 - DNA, 99 bp, Homo sapiens
cggccgcgcggcgctggactggagcagaaccccaggactgcgcccccgggagcgggcgcccagaggactgaaatgcaactgcagaagcaacatgtgacc

SEQ ID NO: 867833 - DNA, 99 bp, Homo sapiens
cagatggagtaatcgtttcaggagtaaagattgataggcagcagtttgaagaaacagttcgaactctaaataacctttatgcagaagcagagaagctcg

SEQ ID NO: 867834 - DNA, 99 bp, Homo sapiens
agaagctgtgcattgttggtgggattctgctcgtgttccaaatcatcgcctttctggtgggaggcttgattggtgagaagccttataagtgctcatggg

SEQ ID NO: 867835 - DNA, 98 bp, Homo sapiens
ctagaagtcactttggaagaagtatatgcaggaaattttgtggaaatcacaaaatttgtccaggatagacatagagctagaagaaacagacttcgtaa

SEQ ID NO: 867836 - DNA, 98 bp, Homo sapiens
gtttatttgctactcttgagtgctagaatgatgaggatcttaaccaccattatcttaactgaggcacccaaaatggtttgccaagctgctgctacgtc

SEQ ID NO: 867837 - DNA, 99 bp, Homo sapiens
gtgaccgagagcgcgaatatcgtcatcgttagaagatggaacagatttggagttgaggctggtcaatggagacggtccctgctctgggacagtggaggt

SEQ ID NO: 867838 - DNA, 56 bp, Homo sapiens
acatggtgtctgggcccttggcactccggctgctgaccctggggctgtccctcctg

SEQ ID NO: 867839 - DNA, 99 bp, Homo sapiens
ccgggatcgtgaccgagaccgtgaccgagagcgtgaccgagagcgcgaatatcgtcatcgttagaagaaaaacacaccttgactttagtcagatacatc

SEQ ID NO: 867840 - DNA, 99 bp, Homo sapiens
gactaccatgacgaaaacatgtactacagccagtcttctatgtttccacatcggtcagaaaaagatattctgaaatgacttctttgggattaaagaagt

SEQ ID NO: 867841 - DNA, 99 bp, Homo sapiens
gaggcgcttctgcatctgtgggccgagatttaggcattggagatctaattcctgtggatgttaaccatttgaacatttgtaagccaaagaaaaaggatg

SEQ ID NO: 867842 - DNA, 99 bp, Homo sapiens
ctgaataattcataacaacattggtgctgtgcatgttcccattggtggtaaatgactggccacacacagtgcacttgtaaggcctctcgccagagtgca

SEQ ID NO: 867843 - DNA, 98 bp, Homo sapiens
gaccacctggagaatgtcatcaagcagcacattcaagggtcaaaaattgcatgttcaaacaaaaggaggcaaagtgatctgtctgggaacagtttatg

SEQ ID NO: 867844 - DNA, 99 bp, Homo sapiens
tgccaagagttcgagaccagctggggcaacaaaatcccagctctcctgttggcttcgtgcttggggtagatcttcttcacatattccccctggaaggag

SEQ ID NO: 867845 - DNA, 99 bp, Homo sapiens
ttgtttttcctgatcatctatatgggatccttcatgctgatgcttcttggtactatttttctgcctggaaataaagtttctgagcatccctgcaatgaa

SEQ ID NO: 867846 - DNA, 99 bp, Homo sapiens
ttaagtagtgatatttctcttttgtctgcccctattgtaagtgcagatggaacacaacagatgagtgaccgaggaggtggcgttcctttgaggaaaatt

SEQ ID NO: 867847 - DNA, 99 bp, Homo sapiens
ttctctcacccatccatgggaagccctgctactgctggattagcgccagcctcccttctgtctgccccaccatgccgggacatcgttatcgaaatggaa

SEQ ID NO: 867848 - DNA, 99 bp, Homo sapiens
ggcaacatggcgaaaccccatctctgtctcattgccaatgcaatcgattatcaggcagattcctaggggcttgctcttcatcttgtatctctcttcagg

SEQ ID NO: 867849 - DNA, 99 bp, Homo sapiens
ttcgctcgtactcgtgcgcctcgcttcgatggacactgacgtcgttgtcctcacaacaggcgtcttggtgttgataaccatgctaccaatgattccaca

SEQ ID NO: 867850 - DNA, 98 bp, Homo sapiens
gacaggaaagctgaggacttcaccagcgctggtggacatcttcaataaggagctactgctaatccccatccacctggaggtgcattggtccctcatct

SEQ ID NO: 867851 - DNA, 99 bp, Homo sapiens
ctccaagtgctcttcgtagggaaacagtttctggtcatgacgaggttccacttcccatctgatcccagcccggccagcaaatagctccggtggccctgg

SEQ ID NO: 867852 - DNA, 99 bp, Homo sapiens
gggaagaagtccaccaatagccggtttgaaaactacggagacaagtttgcagagaacgatgtgattggctgctttgcgattgagaggatccagaatcca

SEQ ID NO: 867853 - DNA, 99 bp, Homo sapiens
ggagccagagcagcatcagagcggagtctccttgctctgggctgctccaggccaggccatgcggctccatggctacatggaaaacaagcctctgggact

SEQ ID NO: 867854 - DNA, 98 bp, Homo sapiens
gggcgagcaccgagtcatcctgccggacgacgtgcgtgacttcatcgacaacctggacaggtgtgaaagcctggtggacatttattcccagctacagc

SEQ ID NO: 867855 - DNA, 98 bp, Homo sapiens
ccagcccgtcaagaactcaggccacagtggcttggccaatggcacagtccaaaccaggttgcagagaaggtggcctccagaatcgccgagggcttcag

SEQ ID NO: 867856 - DNA, 100 bp, Homo sapiens
gaaactttgccagatggcacagagaacgcagcacggggcagtactcggccaatgtcctcagcagagctgctcagtctctctgtgccatctggcaaagttt

SEQ ID NO: 867857 - DNA, 75 bp, Homo sapiens
tcccaggcccggcctttctgacaagaggacacaactcagatgggaagttcatcgcccgggcacagcggatagagt

SEQ ID NO: 867858 - DNA, 99 bp, Homo sapiens
tgaaatatttggaacttatgattgttaatgatcacaaaacgctggatgaaaaagaaagtcggcgtctgttccaacagatcctttctggtgtggattatt

SEQ ID NO: 867859 - DNA, 99 bp, Homo sapiens
ggatagaagagctagggcagagactccaggagcagaatgagctgattataactcagagacagcaggaagaggcagaaatccaggcagaacttgaacgtt

SEQ ID NO: 867860 - DNA, 99 bp, Homo sapiens
ctcagaacagaaaggtgggtagcctatggtggaaataaaggtagtattgaaggcatcatccgaaaaacgaaaaaggacgcaggtcttccccactccgga

SEQ ID NO: 867861 - DNA, 98 bp, Homo sapiens
ccatggctctcgccgtccgagtcgtttattggctgaagccgacgtagcttctctgaacagacgcatccagctggttgaggaagagttggatcgtgccc

SEQ ID NO: 867862 - DNA, 99 bp, Homo sapiens
ctgggcgacacagcgagactctgtctgctttccatgatttctgaatcctgttgcaatttaatagtctctgttgtaatttccactttccgtacacttcca

SEQ ID NO: 867863 - DNA, 99 bp, Homo sapiens
gtcggggaaccatggctgccccgagaggaatgggatgtttctggggagctgaaaggaaattctgggtcttgaaaggagtgtattcaactcaagttggtt

SEQ ID NO: 867864 - DNA, 99 bp, Homo sapiens
cggtgcccagcattctgcggggcaggcggcagcaattccatttccgtgagggcgtttctagatgaagatgacatgagcttggaagaaataaaaaatcgg

SEQ ID NO: 867865 - DNA, 99 bp, Homo sapiens
agacagtatgcaaggccacgacccacgagatcatggggcccaagaaaaagcacctggactttcaaaagaatgctgaaccgggagctgacacacctctca

SEQ ID NO: 867866 - DNA, 99 bp, Homo sapiens
gacagatcgctgtcaaaaccctaggaatgaagccaagagtgatgaaagaagctgtatctactccatcacgaatggcccacagggatcaggaatggtatg

SEQ ID NO: 867867 - DNA, 99 bp, Homo sapiens
cttctctatggagcttcagtagcaaataaggacatcatctgctataacctacaagcagttggacagctgtctgcttttctgtggagactgcgggttgca

SEQ ID NO: 867868 - DNA, 98 bp, Homo sapiens
ccagctctttctccaagtttgatggctgatcttgaaggtttacacttgtcaacttcctcttcagtcatcagtatgctctctgtgtgggtatgtgtgta

SEQ ID NO: 867869 - DNA, 99 bp, Homo sapiens
tgggcacaagtatatggaacctctgcaggagattccatttgttatcccacgacccatccttgaagaagaatttcttcaggttgaattacctagaagttt

SEQ ID NO: 867870 - DNA, 99 bp, Homo sapiens
cctttgagttggtactgtgaaaagtcatcagactccttgagaagttggatttctggggagagagtgttctactgcccacatccgcaggaagcgctggat

SEQ ID NO: 867871 - DNA, 98 bp, Homo sapiens
tcgtgagtgaccacagaaggctttctggaggcaggacttgaggagttgctcaatgaactacagaaatttctggaaactgaaaaagatgaattaatttt

SEQ ID NO: 867872 - DNA, 98 bp, Homo sapiens
aagcacacatgaactcagtgctcatggggatgaagaaccagctcggttacctacctgggcaaagtctccaccactggcatgcagtttttgtcaggctg

SEQ ID NO: 867873 - DNA, 99 bp, Homo sapiens
ggagaaggagaccacaaagaatgtacaacagacagtgagtgctaaaggcccccctgaaaaacggatgagacttcatgctggtcaagatgtccaaggaac

SEQ ID NO: 867874 - DNA, 100 bp, Homo sapiens
tggagccaccagcagcgggtggtacggctttttcgagttggcttaggcagaattctcctcagcttctggaagaggtcgcccacccgctgctggtggctcc

SEQ ID NO: 867875 - DNA, 98 bp, Homo sapiens
agaagaccattcagatgggatctttccggatcaatccagatggcagccagtcagtggtggagctcttagaacaagctctggtgattgaggaacagctg

SEQ ID NO: 867876 - DNA, 99 bp, Homo sapiens
ctagtttggatgtggaggggaatagactccatctatccatatgagcatcagaggctccttgaaatgctagatacagagaaggaactgttaaaagaaaaa

SEQ ID NO: 867877 - DNA, 99 bp, Homo sapiens
tgaccacaacaagcaagcatgcagcttactgcttgaaaggacctgagggcactcgctttgctcctgtcagtacacactcccaaacagttaaacccagct

SEQ ID NO: 867878 - DNA, 100 bp, Homo sapiens
tttcccacttgattacccgttaagtcccccaaagatgagatttacctgtctcacaggtaaatctcatctttgggggacttaacgggtaatcaagtgggaa

SEQ ID NO: 867879 - DNA, 99 bp, Homo sapiens
aattatccgaaaccgcctcactgggaatctggaaactgttcttcaggaagaaacccattagtttggaactggagaattcctttgcatcagatactaaaa

SEQ ID NO: 867880 - DNA, 98 bp, Homo sapiens
aggacccagatggaacccgaaagctactgaacttcatgcttgacaatctcgcaggagaccaagacacattccaccccagtggggggtcccataccact

SEQ ID NO: 867881 - DNA, 99 bp, Homo sapiens
ttggaaaacctgggtgaacgagcgcttccttataggatctctgcccacagtcagcagcacaacagaggcggattactgtggcatgatcctccaccattc

SEQ ID NO: 867882 - DNA, 104 bp, Homo sapiens
atatccagaaaatggacgtacgtttcatctcaccaggactctgactgtaaaggtagtaggagacaaggagaaggccttaggatctactgggggagtccggagga

SEQ ID NO: 867883 - DNA, 99 bp, Homo sapiens
aacacttcctataaatctcgcccaaacaggaaaggatgatcggctgaatgtaacagaggaactaacgtccaacgacaagacgaggattctcaacgtcca

SEQ ID NO: 867884 - DNA, 98 bp, Homo sapiens
agcgacggcggcagcggccggagccgggccgggcagctagcagggcgcttcgggatcagattttattaagacctctactggaaaagaaacagtaaatg

SEQ ID NO: 867885 - DNA, 99 bp, Homo sapiens
gtacactgaaattcatcctgagatgaggttaaacccatccagagtaatggctgcggccttacccaggaccctgggggagttgcagctgtatagaatatt

SEQ ID NO: 867886 - DNA, 99 bp, Homo sapiens
gtcaccttctgctgaacagctccaccttggccttgcttactcacagactaagccagatgacctgcctgcagagcctcagtctcactctgtcgcccaggc

SEQ ID NO: 867887 - DNA, 99 bp, Homo sapiens
ctgctgacgtaggactaagaagcactgtttccctggacgtgctgggcggcagcggtcagtcctggtggagactcctctcccgctgaggcggtggccgtg

SEQ ID NO: 867888 - DNA, 102 bp, Homo sapiens
gcctgcagcactttgggaggctgagttttaagacaattatctcctatattgatgagcaatttgagaggtacctgcatgacgagagcggcttgaacaggcggc

SEQ ID NO: 867889 - DNA, 99 bp, Homo sapiens
aaaagaagaaacgttctggattcagagacagaaaacacaagcagcaggagacccagaatatctagagcagccatcaagaagtgatttctcaaagcactt

SEQ ID NO: 867890 - DNA, 106 bp, Homo sapiens
tcgccatcttggatccgcgggacaagaaaattcatgcggttggccttcattccacgatgtgatcaattctgaggcaatcacattcacagatgacttttcctatggg

SEQ ID NO: 867891 - DNA, 98 bp, Homo sapiens
agagaactgaagtgcagccatcaggtggaaggaagaggatcacctagcccgggtagaagaggcaatcacccgtatgcttgtgtgtgccctgaaaactg

SEQ ID NO: 867892 - DNA, 98 bp, Homo sapiens
ccgcaagtacccgtccatcatagtcaactgcgtggaagagaagggcaccatgccggtggaaaggatgcgcatgcgcccgtggctggaggagcagataa

SEQ ID NO: 867893 - DNA, 99 bp, Homo sapiens
gttccccggcccacagtgggggtgtgcaaacccgagagaactgggaagacaaacttttgcttgagagccagctcatcctagctacagctgaaccactct

SEQ ID NO: 867894 - DNA, 99 bp, Homo sapiens
tgaagtctcacatcagaggtgtcaagaaattccgggatttctttaatcaaaatgaaaccagtgatccagcaagggatacatgtgtgatccttacagtgg

SEQ ID NO: 867895 - DNA, 99 bp, Homo sapiens
ctcttgttttgccctcaattgtaattctgggtgatgaatgcagtattggttcagccacagacttgactgaaagtagctccatggtggatggcgactgga

SEQ ID NO: 867896 - DNA, 99 bp, Homo sapiens
caggactgcgcccccgggagcgggcgcccagaggtccctgactatggctccccagagcctgccttcatctaggatggctcctctgggcatgctgcttgg

SEQ ID NO: 867897 - DNA, 99 bp, Homo sapiens
taattcagatggagaatatatggctggacagctagctgcttatggctataaaattacagaaacctgctaatattttagttatgggtgaaggtcctgagc

SEQ ID NO: 867898 - DNA, 99 bp, Homo sapiens
ccgaggcccataatcatccccaggaaagggtccgaattccggggagggccacggcgccttccatagtagccacgtctgtaacggcgccgatctgcagcg

SEQ ID NO: 867899 - DNA, 99 bp, Homo sapiens
ttgaaagaagaagatggagaagaaatagttacctatgatcatttatacacgttgctgctggaagacattcttgtattgttacaaaagcaggatgataga

SEQ ID NO: 867900 - DNA, 103 bp, Homo sapiens
ccacgctccacttgcccgcttccacccggaaagccccccaggctgagtgcggcatgatctccatcaccgaatggcagacctcaaggcacttctaggacctgcc

SEQ ID NO: 867901 - DNA, 99 bp, Homo sapiens
gaatgccacagcatcctccagcacctcagagcttagaaaccaagatagccaagtggaacctgcaatcaagaatgaataagaatgaggctatagtgatga

SEQ ID NO: 867902 - DNA, 98 bp, Homo sapiens
agagaccggcttcaatatcttcacccagcatggttcaaaccttgtactactcagctgatcacaagctgcttgatgggaacctactagatggacaggct

SEQ ID NO: 867903 - DNA, 99 bp, Homo sapiens
tttaggatttgttagaaaggagacccgactgcaactgctggattgctgcaaggctgagggacgagaacgagcaacttgagttggtggaaccaagtggct

SEQ ID NO: 867904 - DNA, 98 bp, Homo sapiens
ttaagtgtaaggatcttcatgatgaaatttctgtaaatgcattcctctgaatattgatttgctgaatagcccagacttattggaagcaacgattggtg

SEQ ID NO: 867905 - DNA, 98 bp, Homo sapiens
ccgtgacccaggtgtgggggatgatggtgacgcttctcactcacgtgtgaagacaaatttacatgtattggagaccagaccagaagcccttctgaatt

SEQ ID NO: 867906 - DNA, 99 bp, Homo sapiens
gaacatgctcatcgtgttccgcttcctgcgtatcatccccagcatgaagtgactgcagcgccaagcggcatccaccaagcatcaagttggagaaaaggg

SEQ ID NO: 867907 - DNA, 98 bp, Homo sapiens
aacagagtttggggagcattacgagcattagtcacaggagggagagaaggaagaggctgttcggatgtggatcccgggatccagggtgtggtaaccga

SEQ ID NO: 867908 - DNA, 99 bp, Homo sapiens
catactctgttatagataaacaaggctggccagctaaactatgtggatccagctactggctatgtggtgctcacacagattgcccacttgcaaagaggt

SEQ ID NO: 867909 - DNA, 98 bp, Homo sapiens
agaaatgttccagaatggactactgaatatacagttaaaatatactcgtccagggctccctaccttcagccaggaagtactacataaatggaagacag

SEQ ID NO: 867910 - DNA, 98 bp, Homo sapiens
gacaagaacctgcgggaggacggagagaaggcggcgcgggaggtgaagttgctgctgttggacacgatgaggcgagtggtacgacagagcaagtttcg

SEQ ID NO: 867911 - DNA, 99 bp, Homo sapiens
gatgaacactatgattaccaccaggagattgcaagctaaattctgtccaacgtttaataaatcaatggaggaacagggtaaatgaactgaaaagtctaa

SEQ ID NO: 867912 - DNA, 98 bp, Homo sapiens
agaatggaaaatatgagaccgggcagctccgctccatcccagtcaagggggctgaagatgatgaactagaagaagaagctgactggatctacaggaat

SEQ ID NO: 867913 - DNA, 99 bp, Homo sapiens
gaagaggaagcagggggcttcattgcaaacctggagcaagatggaaagttgccttttgttcctccggaggaagaatttattatgggagtttccaagtat

SEQ ID NO: 867914 - DNA, 99 bp, Homo sapiens
aaggcgcttttcaccgcggccatcctgcaggcacagttgccgattacagttatataagtttggagagacagtttctattgttttttggacagacacttg

SEQ ID NO: 867915 - DNA, 98 bp, Homo sapiens
cccaacaccttcaggaaaactcgtgtccatcaaaatccagatgctggatgacacccaggaggcatttgaagttccaataaaagcttcgatgatgaaga

SEQ ID NO: 867916 - DNA, 99 bp, Homo sapiens
gaagatggcgctgcgaattcgttttcagataactattatcgtgcagaaatgattgatgccctggccaactctgttacacctgcagtcagtgtgaataat

SEQ ID NO: 867917 - DNA, 98 bp, Homo sapiens
ggaggcagtgagtgttaaggaatgggtgtaaaagcatattaatgaggataagagaaaaacagaagctcaaaagcaaatttttgatgttgtttatgaag

SEQ ID NO: 867918 - DNA, 99 bp, Homo sapiens
gaagctgcccgtagatttcagcaatatccccacataccttctcaaggaaaatcatcagcgtgttagcattttctttgactatgcaagatgtagcaagaa

SEQ ID NO: 867919 - DNA, 98 bp, Homo sapiens
caggagatcgagaccatcttggctaagaaggtcaagtctggcaccatctttgacaacttcctcatcaccaacgatgaggcatacgctgaggagtttgg

SEQ ID NO: 867920 - DNA, 98 bp, Homo sapiens
gggcggcggtggcgccggcggcgggacagaatgtttctccatcccagagagatgaagtaattcaatggctggccaaactcaagtaccaattcaacctt

SEQ ID NO: 867921 - DNA, 99 bp, Homo sapiens
gaggcatcctgactttggccatgattgcatttttcttcatcatcatttacctgggaccaatggttttgatgataatcgaaggggccctggaccttctga

SEQ ID NO: 867922 - DNA, 102 bp, Homo sapiens
atgagctagcagtggcgatgacagctgtaaagcacgaacaggaatacatggaagtccggtattcctgttcgtgctttacagctgtcatcgccactgctagct

SEQ ID NO: 867923 - DNA, 75 bp, Homo sapiens
cccgcctcccccgtccggtccctctctccacggtaaggggtgagtgctccagttgtaacatctaccactcaggaa

SEQ ID NO: 867924 - DNA, 99 bp, Homo sapiens
cctctcatttttagttaatcacgatttctctcctcttgagataagggcctcgctctgttacccaggctggagtgctgtggtgtgtttgtgactcaccgt

SEQ ID NO: 867925 - DNA, 99 bp, Homo sapiens
atacagggccgtgatgttggagaactacaggaacctggagtctgtggctgtcggaaaaggtaacagaagatggaactcgaaatcccaatgaaaaaccta

SEQ ID NO: 867926 - DNA, 98 bp, Homo sapiens
tgcacgttccgatccctggcttccgtgcccgctggcattgctaaacacgtggaaagaatcaatttggggtcccatttggaagccagttctgaccagtg

SEQ ID NO: 867927 - DNA, 99 bp, Homo sapiens
gggttgtaccgcactgtgggcagcaatattcaggttcagaagctgctgaatgccttttttggctcagtagatgaaggcgtttctgagggcttgcctaca

SEQ ID NO: 867928 - DNA, 99 bp, Homo sapiens
cgctcatcaccatcatcaaacactcgagggcagtagatgtctggagcccatcggttgcactcataattgtctgctgccttttcacaggtgaaacattta

SEQ ID NO: 867929 - DNA, 99 bp, Homo sapiens
caagattacaagaaacggctttcagttgagctgaccagctctctcttcagaacagagccaatggcttggaatgaggagttccatctggaatatgacaaa

SEQ ID NO: 867930 - DNA, 99 bp, Homo sapiens
cgacccggatttccagccagagctgagcggcgcgggctccagactcgccgtggtcaagttcaccatgagagggaccccactggaaatcggactgtccaa

SEQ ID NO: 867931 - DNA, 99 bp, Homo sapiens
ggcgaagacctccccagagctggagaggtatttgtgtttccggcaatgttctaggagcccatgtgatcaaatccaatgctcatgatacaagagtcggtg

SEQ ID NO: 867932 - DNA, 99 bp, Homo sapiens
cagatcacggcagtgtctaattcctgggctcaagtgaaccttttgcatcagcctcctgaatagctgagaccacaggctggagtacaatggcacgatctc

SEQ ID NO: 867933 - DNA, 99 bp, Homo sapiens
ctaacacggtgaaaccccgtctctacggttaaaacatggtgaaccagggtcattgaaatgtttgtaagggtttgctctagagagagaacccatgcaaat

SEQ ID NO: 867934 - DNA, 98 bp, Homo sapiens
cggtgcgctgggggccggggcgcgtcgcagctggaagctctttgacatcctttggaacagaaacatcaaacagtggtaccttaccccaaagtagtgcg

SEQ ID NO: 867935 - DNA, 98 bp, Homo sapiens
ctggatcctcaaaccagaagaaaacctgaatctctgaggttgctggtcaaattccctgagttgaattatcagcttaaaattaaagtgtgcattgacaa

SEQ ID NO: 867936 - DNA, 99 bp, Homo sapiens
atctcaaagactttctggagagcatccgcaaacattcagacaaaattggagagactgccatgaagcaaagctgcagaaactggagggcagcagtggacc

SEQ ID NO: 867937 - DNA, 98 bp, Homo sapiens
ctcactgtagcctcgaaattctgggccgaaatgatccgcctgcctcagcctccaaagtagctgagactacagacacgaagatcgattgagaagttatt

SEQ ID NO: 867938 - DNA, 152 bp, Homo sapiens
acgagtccgacctctacaactgggaggtggccatcttcggaccccccaacaccctctacgaaggcggctacttcaaggcccacatatttgacttagccatcaacaagtatgaggccatctgcaaccagcctgtggcggccaaaaagaacagg

SEQ ID NO: 867939 - DNA, 99 bp, Homo sapiens
tttggagaagaatggaaagagaagactgatagagacttcgttaaggaatcccccatcccagaagacaaagaccgcagatttgtcttctcttactttcta

SEQ ID NO: 867940 - DNA, 99 bp, Homo sapiens
cgacgagcaagaagcagcccaaagtcgaatgattcagacttgcaagcatcaacaacagcaacttgtgattggcggtgaccggatattcagttgcacatc

SEQ ID NO: 867941 - DNA, 99 bp, Homo sapiens
gaatgtggtggaataagtgctagtatcggacatgatcctcatcttttatacactcttagtgctgtccagggaatctaagggaggaaattatcaactgtg

SEQ ID NO: 867942 - DNA, 99 bp, Homo sapiens
cggaaatatggcctcaatatgtgccgccagtgtttccgtcagtacgcgaaggatatcggtttcattaaggcggtggatgaattttattccaagatagaa

SEQ ID NO: 867943 - DNA, 98 bp, Homo sapiens
gatcgtctgtgtcccttcatacttggaattgaatggaagttggatacactttgtgacttgtacgagacactgaccattacacaggctgttatttttct

SEQ ID NO: 867944 - DNA, 99 bp, Homo sapiens
aacattttgatgttcctcccaggagacagctatatttgcccatgttattcaagattttgaagatgtaactgagtttctggaagaggtcattgaagcctt

SEQ ID NO: 867945 - DNA, 99 bp, Homo sapiens
agccctgcagacagaggtgtgctgacgacctgctacaacagaacggggccttttccgaagtggttttagctgaagagaaggcaactggcaagctctttg

SEQ ID NO: 867946 - DNA, 98 bp, Homo sapiens
ctcccaggacctccactaatcaccagaacaaaatgtgcaggaaatgaggcaacatgatgtgcaggaactgaatcgaatcctcttcagcgctttggaaa

SEQ ID NO: 867947 - DNA, 99 bp, Homo sapiens
ttccgtatctgcctaggcattttgctgtctcctcctaatacgggtctgcggaagagggagctgctgaaggagctgctaccagtcatcgggcagaacctc

SEQ ID NO: 867948 - DNA, 99 bp, Homo sapiens
tgtactggctattggaaggaggagattctgaagataaggaggtggtgatggcacttctcaaatactggccaaagactcacagtccaaaagaagtaatgt

SEQ ID NO: 867949 - DNA, 98 bp, Homo sapiens
ctcatctggaattttgccgatttcatgactaaccagtaagcctggctacagataagggaccaaaatgactgactcaaaatatttcaccacgaccaaga

SEQ ID NO: 867950 - DNA, 98 bp, Homo sapiens
acattttggagacatcagcagattccctggagcatgtccttcactttatcaccattttcactggaagcatagaaagggaggcttgtggatcagaatct

SEQ ID NO: 867951 - DNA, 99 bp, Homo sapiens
tccggagtaacttggccaggctggccccgagcggaactggagaaagctgagggaatgaagcaaagtcaggtggacgaagtgatttgataccaactatca

SEQ ID NO: 867952 - DNA, 99 bp, Homo sapiens
ctggagccactcaggtttttcctaagctcaactctagccagctaggttcctggtgctttggggagatatgaatcaggttcttgatgcctatgaaaataa

SEQ ID NO: 867953 - DNA, 99 bp, Homo sapiens
gcaggatcttctttattggtatgaactggagctgctggtgtaaatattttcaaactatgccctgagccccagagccaataggctttagattctggtagc

SEQ ID NO: 867954 - DNA, 98 bp, Homo sapiens
gctggtggaagtggttggaaatggcacctatggacaagtctataaggacatggatttgattgacatactttggaggcaagatatagatcttggagtaa

SEQ ID NO: 867955 - DNA, 99 bp, Homo sapiens
ggagtgcctggccaggccggcctgtctgccgcgatggatgacagtaaggttatgaatactgatggcactgggagacgagtactagtggaagacaaaatt

SEQ ID NO: 867956 - DNA, 99 bp, Homo sapiens
atgtcattgaagagcaggtagcagctcttgagcaggcagcttacaagttggatgcatattcaaaaaaactggggtggcatggagaaatcgttgtcaaaa

SEQ ID NO: 867957 - DNA, 98 bp, Homo sapiens
ctgaaggaagatggcggacggcgtggaccacatagacatttacgcggatgtcggcgaagagttcaaccaggtagaaacctgtgggttcttgttgtggg

SEQ ID NO: 867958 - DNA, 98 bp, Homo sapiens
gtaactatcgcctgacagggtatctgaagtaaaaggggaccattcctcaagaattttgtatccaaggcccaaaagtttgttacccaagatgatgaatg

SEQ ID NO: 867959 - DNA, 98 bp, Homo sapiens
gaatatatttttgaaagactccatcaccacgtgggagattctggctgtgagcatgtcggacaagaaaggccctcgggaccaaggatcacgtcatgact

SEQ ID NO: 867960 - DNA, 99 bp, Homo sapiens
tggaaaggttcttcagaacagtcccttaccctgtgttctggaagaggggctgcaaaatcactctccagggatttcatgctagagacagaggccagctga

SEQ ID NO: 867961 - DNA, 99 bp, Homo sapiens
ttcccgttgaaggtgctaccgctgacgacacccctggtggatggcgaggatgagagggatgggcgtgttttgggcgtgctagaggtgtcacgctccatt

SEQ ID NO: 867962 - DNA, 99 bp, Homo sapiens
cactctgtgcaggtgcagtactacaacaagggtctggtcgccagcaacctgaatctcaaacctggagagtgccttcgagtgcgaggcgaggtggctcct

SEQ ID NO: 867963 - DNA, 98 bp, Homo sapiens
gggtctgcagtgcagcattaatgggccgctgacatgaatatggagtagttttctctagcaaagcatcctgaggttagcattacacttctcccagtgga

SEQ ID NO: 867964 - DNA, 75 bp, Homo sapiens
gagacaatgactgcggggaccacagcgatgaggatggatgtatgagtgagatcattggccgagacctgagtggct

SEQ ID NO: 867965 - DNA, 99 bp, Homo sapiens
ttcagaagggagcagtgggaagtaatcagtttgtggatcttgaggcaactaactatgatgatccaaaaggtaattctggcacttggagactatatggga

SEQ ID NO: 867966 - DNA, 99 bp, Homo sapiens
aatctgtctgcagcccagacactgagagccgctttcatcaagatttgagttctgtgaacctgcatttgttgttggtaattgcctccagatagcttctga

SEQ ID NO: 867967 - DNA, 99 bp, Homo sapiens
ttatagagctggaattaggcaaatatggacagggtcatcgagcagctcggtgggaagcagctggtcatgaaccacatgcatcatgaagaccagcaggtc

SEQ ID NO: 867968 - DNA, 98 bp, Homo sapiens
tgggcccgtaatctcacgacctccgcctgcggcctcctcgcaaaacaagcactggtgaccccggcagccctgaggcctctggtcttgggtggtaatca

SEQ ID NO: 867969 - DNA, 99 bp, Homo sapiens
tattactggcacagatatattggatatgaaactggaagacatcctggtggaggtttttgatctgctttttgtcactaatgagagtaattcacgaaagac

SEQ ID NO: 867970 - DNA, 99 bp, Homo sapiens
ttggagtctttgtccaggacgttgccagagtctgccctccgagacctcatcgtagccaccattgctgtcaagtacactcagtctaactctgtgtgctac

SEQ ID NO: 867971 - DNA, 99 bp, Homo sapiens
caagttatttactttcccatcaggtttcctgatgtgagcagtccctcctcctatgtctccatcctccaaatctgtgagcactccaagtgaagctggaag

SEQ ID NO: 867972 - DNA, 99 bp, Homo sapiens
aaccagcctttattgatgaactggttatattctgggcactaaatgaaggcgtttctaggcaatttgattcgttcagagatggatttgaatcagtcttcc

SEQ ID NO: 867973 - DNA, 75 bp, Homo sapiens
ccgaacaggcgcttgccctctcttttatgtccacctgatcccggtgtcgactcctaagaatggaatgagtagcaa

SEQ ID NO: 867974 - DNA, 140 bp, Homo sapiens
gtagcacagatttatgtaatgtcaactttactgagaattttccacctcctgacacaacaccactcaaggcctcagtgttgtccctgatgaagaagtcattgaaatgtacgaggggtcccacgtgcccttggagcagatga

SEQ ID NO: 867975 - DNA, 98 bp, Homo sapiens
atacgttcagggtataaatgatctcgtcactcctttctttgtggtcttcatttgtgaatacataggcagcaattccatttccgtgagggcgtttctag

SEQ ID NO: 867976 - DNA, 99 bp, Homo sapiens
tcagacctgctcacacttcagaatagagaaggtagaggaccgaaaacactttggagctgtagaagctaaaccagaattgtccctagaagtacaattgca

SEQ ID NO: 867977 - DNA, 98 bp, Homo sapiens
aagaggaagcggaaaccagtggccacagcatctttgtctagccccagtgcagataagccaatggacacgtcagtgttatctgaagaaggaggagagcc

SEQ ID NO: 867978 - DNA, 99 bp, Homo sapiens
cctggagcgttacaaggccttctacattaccggttacgactatggctatgtctgcgtggagttttcactcttggaagatgccatcggatgcatggaggc

SEQ ID NO: 867979 - DNA, 99 bp, Homo sapiens
gagtccatctctgcatccatgctccttgatgccgaactcttcaaggtggttgatgttatagggttaatggcacagatgcagattatgaatatgaagaaa

SEQ ID NO: 867980 - DNA, 99 bp, Homo sapiens
gtttctccatgttggtcaggcagtattaaacatccccttgaaatcatctttttggaagtctggtaaaactggattaatccactcttgtacttgaatacc

SEQ ID NO: 867981 - DNA, 99 bp, Homo sapiens
gtctctggccggccttggtgcggcgagccgagcgaggcagctctgagccgcgcggatacttttgtggaactctatgggaacaatgcagcagccgagagc

SEQ ID NO: 867982 - DNA, 99 bp, Homo sapiens
cttcattgaacaggatgatgataataatagtgcaggaaccaaatggcgagacaccatcatctttatacagagttgcagcagtacttctacaatttaatc

SEQ ID NO: 867983 - DNA, 99 bp, Homo sapiens
tagataaagacgttgaactctcagtggtcctacctggggatattatcaaatctactactgttcatggcaggtgatgtttgcagacagaaaaagtaaact

SEQ ID NO: 867984 - DNA, 99 bp, Homo sapiens
ggagtttgaggctgcttcagcctgggcaacacagtgagactctgaggcgtattatcgctggcaaaacgcgatggggagttcccggctgggcaccagggt

SEQ ID NO: 867985 - DNA, 100 bp, Homo sapiens
tggctatgcttcagccttgcacagtaggtgctagttccgcagaatacactttgggaaacgctcgggggaagatggccgtcatcaaggctgaagcatagcc

SEQ ID NO: 867986 - DNA, 75 bp, Homo sapiens
cttctgcaggtcttctaaaagtttctgaggaaacatgttcaaccaaatggcaaagtgggtgaaacaggacaatga

SEQ ID NO: 867987 - DNA, 102 bp, Homo sapiens
tgggccacagagcaagactctgtcaagaacaggaaccgaagtcttctgttgctgatgctgataagatgccatgatactatttgcagtagaattgggacctag

SEQ ID NO: 867988 - DNA, 99 bp, Homo sapiens
tgtgaccctttttggatggagaatttcatcaaggtgcagctgagggatggagacagcaactgtggacacagcattgttggttttgccatgtactatttt

SEQ ID NO: 867989 - DNA, 99 bp, Homo sapiens
tgacaaggcactggatgatgcaatcaaagctcgacttctcaatcccaagtggccaaagatgccagaggaacaagcattctgtgttttggtgaaaatcat

SEQ ID NO: 867990 - DNA, 99 bp, Homo sapiens
tgaaaatacagccaagatcttggcaaagcttctccctcagtatttagaccagcttcccaagctcttccttcagtcccacgactacagtctgtattcctt

SEQ ID NO: 867991 - DNA, 99 bp, Homo sapiens
gccctggtgctgatcctccagctgctgaccctctgggaaagctctggcaatttaaatgacccaaataaggaggcactggctaagacggaagtgtctctc

SEQ ID NO: 867992 - DNA, 99 bp, Homo sapiens
gcctgaacaggcagggccagacccaggcctggagctgctgaagactgctattgggaaagctggctacactgataaggtggtcatcggcatggacgtagc

SEQ ID NO: 867993 - DNA, 99 bp, Homo sapiens
atcctcacctatgcaaagaaagggaagctattgctgggattttgaggaggaaagatcgtcctacttggagtaccaaaaagtaatgagagaaatagaaca

SEQ ID NO: 867994 - DNA, 99 bp, Homo sapiens
gaatgccaccaagtatggcaacatgacagaggaccatgtgatgcacctgctccaggtaccccaagaagctagtgcagacttattcagtgtttccctacc

SEQ ID NO: 867995 - DNA, 99 bp, Homo sapiens
ctcccaaggtgctgggattacaggagtgtttctcaggagctatcagaaactatcctcaccatggtagccaattgcagtaatgttatgaataaggccaga

SEQ ID NO: 867996 - DNA, 98 bp, Homo sapiens
ccagctcgcgcttcagcgtcccggcgccgtcgcgccactcctccgactctctatcaatatcagctcacatcattgaaaagataattttgaagacatgt

SEQ ID NO: 867997 - DNA, 98 bp, Homo sapiens
acagaacacaagattaatcaatgtcaactgacaggttgcactgctgtgatccatcctcatctcctaaagatgcatcctgacttatctccacacttgca

SEQ ID NO: 867998 - DNA, 99 bp, Homo sapiens
ccagtccctcaaccttgaactttccagacgcagaactgacacattcagctaacgtattttagcaggtggagtgaggttgaagattcctgtgacagcgat

SEQ ID NO: 867999 - DNA, 140 bp, Homo sapiens
aaaattccaatttctgcatttagtacttcgtctgctgcagaacagaacagcaataccaccccaagaattgctatatcgagaagtttactgactttcttcggctctttgtgagtgttcacctaagaagaatcgagtcttac

SEQ ID NO: 868000 - DNA, 99 bp, Homo sapiens
taaggttcagattccatatttaactacagaaaaaaattccttcaaaagaatggacgatgaggataaacaggcgcatattaaatttcctattgactaccc

SEQ ID NO: 868001 - DNA, 99 bp, Homo sapiens
tatgaatatccagtttgagccatcggatctaagatccaaaaggtttcaccaaaactcatgccaatgcagcagatcgcaaattgaaatatggatatttgt

SEQ ID NO: 868002 - DNA, 99 bp, Homo sapiens
agacaagaaagtgtacagtgcaaaggaagaagtgtcagaagggagaacgaggtcgtttatacgcaatgcagactggaatgaagatcgatagtaaaactc

SEQ ID NO: 868003 - DNA, 99 bp, Homo sapiens
gcagcagcccagacgcggcacagagagggcctgggagcttgctgcagcttcagcattccacgcctacgggaaggcaggcaagatgctggtggagaccag

SEQ ID NO: 868004 - DNA, 99 bp, Homo sapiens
gggaactggtgctggagagacagggagaggggcgaaccggccccccacagccactgcagggaccagttactctccacaagaaaattcacacaaccacag

SEQ ID NO: 868005 - DNA, 99 bp, Homo sapiens
acggcactgttagaatctgggactttcttcgttgccatgaggaaagaattctccgagctcctgaagtcctcgcccagaaaccttacagcaaagccgttg

SEQ ID NO: 868006 - DNA, 99 bp, Homo sapiens
tttttccttgagctgaacgtcttgcaacagtggccgcacgcataggtgacttcatggtcatgacgattttcttcaatgtgagcaggcggtttggctatg

SEQ ID NO: 868007 - DNA, 99 bp, Homo sapiens
gtgcgtcgctttgttctaaggaaggatccagctttcctgcattactatgacccttccaaaactataatgtaactgcaaactccaagctggtcattatca

SEQ ID NO: 868008 - DNA, 98 bp, Homo sapiens
tgtagccactgctttagcatttatcacttccttccttactttgtcttggtatactacatggcaaaatgggaaagcatgcagccagtaaagatcccaga

SEQ ID NO: 868009 - DNA, 98 bp, Homo sapiens
gggaagagttgccaatgttgaatattttcctgaagagagttcagctctgattgaattttttgacagaaaagcagaaaaatatggctcaggagactaac

SEQ ID NO: 868010 - DNA, 98 bp, Homo sapiens
gaaaatcaaaaactattgttggcctcctctatcgtctactgacagaggtcccaagctctttaaggagcccagtagtaaatcaaacaagccgattattc

SEQ ID NO: 868011 - DNA, 99 bp, Homo sapiens
cctggagtctgcgaaggccgggacccggttccccggcccacagtgggggtgtgcaaacccgagagaactggaccttagctggatctccaaaatacaagt

SEQ ID NO: 868012 - DNA, 99 bp, Homo sapiens
tccccatcgcgttttgccagcgataatacgcctcaggtttggtgcacctcgatttggaggaagtagggcagggcccttatctggaaagaagtttggaaa

SEQ ID NO: 868013 - DNA, 99 bp, Homo sapiens
ggagaatcgcaaggatatgatatcatggaaccagcagcaaagaagtgctatctggaaagagagattaaagagactggtgctaacctagcaatttgtcag

SEQ ID NO: 868014 - DNA, 99 bp, Homo sapiens
cgtgaagatctgtgtgtgtagttcttggaaagattccaggtgcttgaaaacgacgtctcagtgggtcaaggggctgaagaagatgcagagcagcctgaa

SEQ ID NO: 868015 - DNA, 99 bp, Homo sapiens
agactgtgacaacgaccacgtctccaaaatgagtcgcatcttcaacccccatctggtggatccatgctgtgctgacgcctgtggactgccttgcctttg

SEQ ID NO: 868016 - DNA, 98 bp, Homo sapiens
aaggattccaagtaactcttatttggaaactgttaaggcagcaataatagaagagcagaaacgaagtgaaaaggctgtggaagaggcagtgaaaagaa

SEQ ID NO: 868017 - DNA, 99 bp, Homo sapiens
ctccacttgcccgcttccacccggaaagccccccaggctgagtgcggcatgatctccatcaccgaatggcagactttccccagacatggccaacaaggg

SEQ ID NO: 868018 - DNA, 99 bp, Homo sapiens
acccaagcccgctgagcaggatgagggctgaagccgacgtagcttctctgaacagacgcatccagctggttgaggaagagttggatcgtgcccaggagc

SEQ ID NO: 868019 - DNA, 98 bp, Homo sapiens
actcggtcctgtttcgacagcgaacatgtcgcggcctgtcaggtatcattggaacatttcaagatcatcaaatcaaattccacagggattggtgacca

SEQ ID NO: 868020 - DNA, 99 bp, Homo sapiens
gcgaatatcgtcatcgttagaaggaacctggcttctgtatttaccatgtacctggagcattggtttggcagctgaaccaggttgttttccagattggta

SEQ ID NO: 868021 - DNA, 99 bp, Homo sapiens
gcaaagaagaagaggagaggagacgggcagaagaagaaaagaggagagttgaaagagaacaggttttgcacactagggaccaagaagccctcggggaca

SEQ ID NO: 868022 - DNA, 99 bp, Homo sapiens
gaaaacggaagcgcagggagaaggaagaggtgtttgaaaagatatgagatcctgactccaaactccattcccaagggtttcatggacgggaagcaggcg

SEQ ID NO: 868023 - DNA, 99 bp, Homo sapiens
gacaaattacgaccagtaacactaacggaaatgaactattccaaatatggtgccaaggttccagcagcactgatgtgaaggaaaaccgcaatctggaca

SEQ ID NO: 868024 - DNA, 99 bp, Homo sapiens
aattcatcagcgatggcagtttcatagtattggaagatgaagtcctcagtacattctgaagaagatgattttgttccagagctacatagaaatgtacac

SEQ ID NO: 868025 - DNA, 99 bp, Homo sapiens
cggaaattgttggattgccagaagaagaagaaatcccagcaaataggaaaattaagtttagtagtgctcctattaagactatgtcttcagcagtggtgc

SEQ ID NO: 868026 - DNA, 98 bp, Homo sapiens
agccgaaccgagccggggcgccgggagctattgggacctgcggtgcacctgtggcgattctcaggtggctacccagccctcatggactgcatgaacaa

SEQ ID NO: 868027 - DNA, 98 bp, Homo sapiens
catcacacaaaatgtgctggttgatggtgttaagaaactctcagtttgtgtttctgagaaaggtataattgaaatcctcaaaggaatgcaagaattgg

SEQ ID NO: 868028 - DNA, 99 bp, Homo sapiens
caggaggtggatggatgttgcagtgagctgagattgcaccactgcactccagcttggggcacagagcgagactctgggcgtggtggcaggcgcctgtaa

SEQ ID NO: 868029 - DNA, 99 bp, Homo sapiens
acccagtcctgccagctccagctccagctccagctccagcttcacaccatcccagaccaggcaacaagtacaagccagctgccatgttgtgagcacata

SEQ ID NO: 868030 - DNA, 99 bp, Homo sapiens
aagcccactttctgtgatgtctgcaaccacatgatagtggtgatgaatcaccaacaccagcagcagatggcccccagtaccctgagccagcagaaccac

SEQ ID NO: 868031 - DNA, 98 bp, Homo sapiens
tttctgtgtggctggagcctgtccgaacgctttgggctgttaggggtgaatcagtggctaacctggttagaaactgctgaagaagaagaatcagagga

SEQ ID NO: 868032 - DNA, 98 bp, Homo sapiens
cgcttgcctttgcctcttccacaatacagttatggccacccaggtaatggggcagtcttctggaggaggagggctgtttaccagcagtggcaacattg

SEQ ID NO: 868033 - DNA, 99 bp, Homo sapiens
tccacgagcgggcgctgctggatgccgagcgcctcaagcgcgaggtctggagaaaatgatgtggaatataacaacatggaattagaagagggagaactc

SEQ ID NO: 868034 - DNA, 99 bp, Homo sapiens
ggagaatcttgaggcaggggatttgcccaaagacccctgtgtggggcagctgagcagcctggagcctcagggagagcaggtcgaggtggacagctggtg

SEQ ID NO: 868035 - DNA, 99 bp, Homo sapiens
aaaatcaagtgctgggaaatccatcatggactgtgggctgctcagtggatgtcagaattactctcgtggctttggtggccggtacggggtggagaagga

SEQ ID NO: 868036 - DNA, 100 bp, Homo sapiens
agagtgaactaaatgggatcgcagccacacatgagccacccagttttttgcaaagctgtaatctgctcctagagaggctgcgatcccatttagttcactc

SEQ ID NO: 868037 - DNA, 98 bp, Homo sapiens
tgacaaatatgctgcaagatttggggaatctatagttaatcttggcgacattgacaatgatggctttgaaggttgcatcataaatacaaaggactgaa

SEQ ID NO: 868038 - DNA, 100 bp, Homo sapiens
ggacgatttattccacttgctctccggtgatcggcatgtgtgacaagtgacatattcctcgtccatttcacctccgggcgagcaagtggaataaatcgtc

SEQ ID NO: 868039 - DNA, 99 bp, Homo sapiens
tctggtggcggcggcgtgatgttctcggcaggagcggagagtttgctccaccaggccagatcacagctgggctggacccagtggggagaatccagatga

SEQ ID NO: 868040 - DNA, 99 bp, Homo sapiens
ctgccgcctcctctcatccatctcctctgcagagagcctttcatcgtccacaatagtataaagcgatgaagtccatagtacaatagtatatctgctaat

SEQ ID NO: 868041 - DNA, 99 bp, Homo sapiens
gacataccaccaacctcactctgtggtttgagaattgagtggtgattttatgcaatggcttcaagccacagttcttcaccagtgcctcaaggaagcagc

SEQ ID NO: 868042 - DNA, 99 bp, Homo sapiens
ggcttattgaagccacctcgctctccagcgctgctgcatttgtcacaacagatcatgtatccatcatcatgtgtaaaaccacatatgcacctggttaca

SEQ ID NO: 868043 - DNA, 98 bp, Homo sapiens
ggaactgtttgtggcattgatgaagatcatgacattgtagtacagtatccaagtggcaatagtgagaaagatcagtctaaagaaaaggagaagaaagt

SEQ ID NO: 868044 - DNA, 99 bp, Homo sapiens
ggaaacattgcacatagtatgaagttccaaggagacagcctctgatgtttccagcttcacagcccaactcctcaaactgtagaggagtgttgcagcgac

SEQ ID NO: 868045 - DNA, 99 bp, Homo sapiens
cttcatctctgttgcaggatttagcaggctggaatcgatggagaaagcatcggcaactgtcctttctctcagcgcctcttcatgatcctctggctgaaa

SEQ ID NO: 868046 - DNA, 99 bp, Homo sapiens
atgcagccagtagcttggatccttgtgggcatgatccataatcggtttcaagaatgcaagtgcggccccatcgacctcctgttcgtgctggacagctca

SEQ ID NO: 868047 - DNA, 99 bp, Homo sapiens
cacgcccgacgaggagagcatcgactggaccaagatcgagcccagcgtcaacttcctcaagtcgcccaaagcttcggaaccaaaaagaagcttcccaga

SEQ ID NO: 868048 - DNA, 99 bp, Homo sapiens
gcgcggcaggcgcggccatggcgcagctgggaaagctgctcaaggagcagaagtacgaccggcagctgagtttaaggaatttctggggacctacaataa

SEQ ID NO: 868049 - DNA, 99 bp, Homo sapiens
cctgagtagctgggactacaggaggaactctctggaatgaaaaataaaatacaagtagttgtgcttgaaaacgaagggctccagcaacagctaaaatct

SEQ ID NO: 868050 - DNA, 99 bp, Homo sapiens
atcgttagagtcttcctgcccaacaaacagaggacagtggaatctggaaaaccaggggctcatgtaactgtgaagaagctgtttgttggcggaattaaa

SEQ ID NO: 868051 - DNA, 100 bp, Homo sapiens
agatgctgatgctgttttctcagcaatggatttggcatttgcaattgacctgtgtaaagaagaaggtggaggacaggctggagtgtagtggcacaatctc

SEQ ID NO: 868052 - DNA, 99 bp, Homo sapiens
tgtctctagactttttggacgatgtgcggcggatgaacaagcggcagatcagtgaaaagcatgatgtggtgttcttgataaccaagtatggttatatcc

SEQ ID NO: 868053 - DNA, 99 bp, Homo sapiens
tgcgattgtggaagctgctcggccaagacaatgcaaactccagtgaacattcccgtgcctgtgctccggctgccccggggccctgatggcttcagccgt

SEQ ID NO: 868054 - DNA, 98 bp, Homo sapiens
caaatggccatgatggagcccatgataggctttgcccatggacagtactatactggcaattgctggagaagattttgcaattgttgcttctgatactc

SEQ ID NO: 868055 - DNA, 110 bp, Homo sapiens
ccagactttgtctctcttcagagatgcttacgtggcaacaggctcctacaggtacagaggggccaggtgtaagcatctctgaagagagacaaagtctggctgaaaactct

SEQ ID NO: 868056 - DNA, 99 bp, Homo sapiens
ctcgtctgcctggactgttgcgggccccgggacctgggctgggaacccgcggtggagcgggacacgaacgtgtttggaaattttagcattcaggtgcca

SEQ ID NO: 868057 - DNA, 99 bp, Homo sapiens
ctttacctggtggatgtttatgccatagaaaaatcaactgcttttcccagaacacagagagcagaggtagatttcgggcagacaacttgaacaagctga

SEQ ID NO: 868058 - DNA, 99 bp, Homo sapiens
gatggaaggatgactatgagtatgagctattatagaaaccatgtgagattacgtactataggtgaacttttagctcctgcagctccttttgacaagaaa

SEQ ID NO: 868059 - DNA, 99 bp, Homo sapiens
ccgtgagcacagcagctgggccttgaggaaggaggtccagcgctgctgtagcacccgctctccaccctcatcgccctgtagtctcagctactcgggagg

SEQ ID NO: 868060 - DNA, 99 bp, Homo sapiens
ggcgggctccgtggaagcgtggccggcagcgtcccggacgaggagggcagagcggcttgggtaaatccaccttaatcaacaccctcttcaaatccaaaa

SEQ ID NO: 868061 - DNA, 99 bp, Homo sapiens
aaagaggagtccatgatggaggcagaggtaaacttggagagttattttgaggccctgtcccgtggagagacgcctccggtgagagagcggtctgagcga

SEQ ID NO: 868062 - DNA, 99 bp, Homo sapiens
ttattctcaacaagttgctaagagaatatgataaaaagctgaggccagatattggaagtgtcagttgtacccgaggcgttctcagcagcagcaagtacc

SEQ ID NO: 868063 - DNA, 99 bp, Homo sapiens
ctcggggtgtgtgggaccatgtccagccctctccagtgtatccacagccccgacctttgatgagaactcagctgtccagtggctcacacctgtaatccc

SEQ ID NO: 868064 - DNA, 99 bp, Homo sapiens
aactagtgctccgcgctggcagtctggaaaaggcagatgtatcccgtgatgctgatgagcgagagaagtggatccatgccttagaagaaacaattcttc

SEQ ID NO: 868065 - DNA, 99 bp, Homo sapiens
aagaaacaagtttgctctcagcgggggacctcaccaagcagcttcctatcatggtggtgggggagcacaaggacaaagtgattcagtgcagatggcaca

SEQ ID NO: 868066 - DNA, 99 bp, Homo sapiens
gtcattactctggatggcctaaatgaaaatgctgttgtatgcagtgaaagagttgctgaactacaaagaaaggttatggaggttttgatgactatggtg

SEQ ID NO: 868067 - DNA, 99 bp, Homo sapiens
aaatatttgcggtttcagcctcaacccagaggaatcgttactctttcaggtagttcagaagtgtattcctttcctaattgggcatttgaaggattcaac

SEQ ID NO: 868068 - DNA, 99 bp, Homo sapiens
gcagagaggagcagctggaagccgtggctgcgctctcttccctctgctgggcgtcctgttcttccaggatgagctctgtgaaaatgttacagcctcgtc

SEQ ID NO: 868069 - DNA, 100 bp, Homo sapiens
tgacaccgacaagatggcagcagaatttattcagcaattcaacaaccagggcctggttgttgaattgctgaataaattctgctgccatcttgtcggtgtc

SEQ ID NO: 868070 - DNA, 99 bp, Homo sapiens
cagggagataactttcgtatcacaaaagcagatgctgctgaattctggagaaagttttttggagacaagaggataatggaactcaggaaacacttatct

SEQ ID NO: 868071 - DNA, 99 bp, Homo sapiens
tcactctcatcttgcaaaccagtggtgatcatgtgtgcgagcagtgacaccatccggagcatcatgctggtggcgcacaggcatggcatgaccagtgga

SEQ ID NO: 868072 - DNA, 98 bp, Homo sapiens
gcaagaaggccctggacacagcaatatctctgggctttcacaggacctaagaaaagctggattgctgatttttgctaataaacaagatgttaaagaat

SEQ ID NO: 868073 - DNA, 99 bp, Homo sapiens
aaggagcttgccttctgagctttgtaccaaagacctgggaaaaggactttgaatccaaagcaaaccatcttggtgattctggtgggactcctgtgaaga

SEQ ID NO: 868074 - DNA, 99 bp, Homo sapiens
ggcacctgcgccgtggcctccaacaccgcccgcgggttcatctgcaagtgccctgcggagtaccagacgtggctggacctccgagagctggaggggaag

SEQ ID NO: 868075 - DNA, 98 bp, Homo sapiens
agcggatcaatgtgagggatgtgtcacccttccctgtgaacgcgggcatgttctcagagtacattcacgcccaggtggcatctggcaaagggaaactc

SEQ ID NO: 868076 - DNA, 99 bp, Homo sapiens
tgcgttttgccagtcacctctcaactgtgtgccaaaggcagcctggcatcctcgctacaacctcattgttgtgggccgatacccagatcctaatttcaa

SEQ ID NO: 868077 - DNA, 99 bp, Homo sapiens
gaggccttacaagtgcactgtgtgtggccagtcatttaccaccaatgggaacatgcacaggtggacgacatccttggagaaggcagcgacgacagcgac

SEQ ID NO: 868078 - DNA, 99 bp, Homo sapiens
ctcagggtgtttgctggagtaccagtacatagaagtggctcatagttccctccagattgtcctcgcatcctgccattgactctaccagaggagattctt

SEQ ID NO: 868079 - DNA, 99 bp, Homo sapiens
gcattttgaaacttaaggatgggatacaggctatttttatgattcccacaaatccaccaccaacattcagaaagccagaactttggtccgatgatttca

SEQ ID NO: 868080 - DNA, 103 bp, Homo sapiens
taggaacttgagtagctgggattacagatacctggactacagacgagtgcccaacagcaaccccccggagtatgagttcctctggggcctccgttcctaccat

SEQ ID NO: 868081 - DNA, 141 bp, Homo sapiens
gtctatccccggaccaacaagcagaatcagaagaagaaacggaaagtggagccccccacaccacagggaaagcaggcaggatgggagagtcgccgatagaaccacctcttccctgcctcctgggcttgggggaagcttgaa

SEQ ID NO: 868082 - DNA, 99 bp, Homo sapiens
cagacattaggaaatgccaaggcattctgtggaatgaaatattcatatgccaactgtcaagtctgttcggcctcagagtatgttatagagccatgaatt

SEQ ID NO: 868083 - DNA, 99 bp, Homo sapiens
tgtggtgcggcaccggcgagccagcatgctattaactgagtacttggatatgaaaaatactcgtacggcctctgaaccatcagctcaactaagctatgc

SEQ ID NO: 868084 - DNA, 98 bp, Homo sapiens
aagaagttaccaacatttagaatttctacttattctgagttaataacgacatgatagtcactgacaacaacggtgcagtcaagtttccacaactgtgt

SEQ ID NO: 868085 - DNA, 99 bp, Homo sapiens
aaacactgctgatattgtttatcttgaaagctttcaaatcggactccttgagatcttcacgctactgttaaggttgcacgttttcaaaaaatacctaat

SEQ ID NO: 868086 - DNA, 99 bp, Homo sapiens
cggccgtggtcaccaggaaggggacgggacggacggtgatggtggtcgccgcggcggcgtgtgcgcccctcaggaatcctatccatcttcttcaccgat

SEQ ID NO: 868087 - DNA, 99 bp, Homo sapiens
atgctacactcaggcaccctggtgcccagccgggaactccccatcgcgttttgccagcgataatacgcctcagttctgtggaagcaaatcattgaacgc

SEQ ID NO: 868088 - DNA, 99 bp, Homo sapiens
ttctttgctggacagatcaatggcaccactggttatgaggaagctgcagctcaaaggtcatgacgccagtcagatcacactagccttgggcacagctgc

SEQ ID NO: 868089 - DNA, 75 bp, Homo sapiens
aacggccaggaggttgcagtattggagaaaggtgcaaaattccttagtgatgctgagatcatccagttagtcaat

SEQ ID NO: 868090 - DNA, 99 bp, Homo sapiens
accaggacagaaatcattatcttagccaccagctggtggagctgtctaaggctcaagatatagaagcaggagatggcaccacatcagtagtcatcattg

SEQ ID NO: 868091 - DNA, 99 bp, Homo sapiens
gagacgcagttactcatctcaagggcagggtctgggtctttatcgtaccctgtacacgtatcctgaaaactggagggccttcaaggctctcatcgctgc

SEQ ID NO: 868092 - DNA, 99 bp, Homo sapiens
cctgcatggatggatttcatcaggagcttgctgcatttccaggtccacggcagtctgtagacgatgatggctgtaatctcagctacttgggaggctgag

SEQ ID NO: 868093 - DNA, 100 bp, Homo sapiens
gtcctgaggaggagggtgacatgctggacccagggctggtgatgactggaatccagtcatcaccagccctgggtccagcatgtcaccctcctcctcagga

SEQ ID NO: 868094 - DNA, 99 bp, Homo sapiens
gaaatcgacgtggtaattaacagaagcttggtgctgacaggccagtgggaagtgagaaagatcagtctaaagaaaaggagaagaaagtgaaaaaaacaa

SEQ ID NO: 868095 - DNA, 99 bp, Homo sapiens
tgcaattctggatttcctgccagaccaagatcactccatggatgaaatgacagctgtggtgaaaattgaaaaaggagttggtggcaataatgggggcaa

SEQ ID NO: 868096 - DNA, 99 bp, Homo sapiens
acgcagtcagctgcgtgattcccgtgattgcgttacaagctttgtctccttcgacttggagtctttgtccaggacggtggagcagttctggaggtttta

SEQ ID NO: 868097 - DNA, 99 bp, Homo sapiens
tagctccgacgtggaggagatcaacatcagcttcgtcccggagtctcctgatggccaggaaaagaagattgagaggatccagaatccagatctctggaa

SEQ ID NO: 868098 - DNA, 98 bp, Homo sapiens
gccccgcgaccctcccgcagcctgcctttccttccccctcggaaaatggttcccactgccgggcgagtgctgcaatagtattttctacacttacactt

SEQ ID NO: 868099 - DNA, 99 bp, Homo sapiens
ccaaagctgagttggctggtgccactgatcctgagtaagtagcgctgtttgagattcttccagtggaaggtactctgtgggttcttctcaggcacaatc

SEQ ID NO: 868100 - DNA, 99 bp, Homo sapiens
cacctttcctcaggagtcatttctgttccgcacaggcctgctgaactgggtgctttatatagggagagacagcgtctggagaccatcctcagtctctgt

SEQ ID NO: 868101 - DNA, 99 bp, Homo sapiens
tcagatgggtcgtttcaccttaagagatgaggtcgagcaaaagatgtgataataccagcaaagccacctgtcagctttttctccttgaggtctccagtc

SEQ ID NO: 868102 - DNA, 98 bp, Homo sapiens
tggtggctctacccagaattcaattaaagtggctcagaaagtaactcatgacatggacatgtgctatgggatgatgggaagcctgtttcgcagtggct

SEQ ID NO: 868103 - DNA, 99 bp, Homo sapiens
cttcttgagagcactgaagtttcttcttactctgatagtaatcgcagagcagcgagtaaggcaaggtgcacagggtggaaaataaaatcccgtaggtta

SEQ ID NO: 868104 - DNA, 99 bp, Homo sapiens
gggagatacaggcaaggaacacctgaggaaagaatccaatgcaccattctccatgaactctgtgatgatcatgacaggccgactcttggtgaccacacc

SEQ ID NO: 868105 - DNA, 99 bp, Homo sapiens
gtccatctttcttgatgaccttggaacaaatctaaaagaagctgccagacttggtattcacaccattaagatcatcccgatggtcactgaactgattgg

SEQ ID NO: 868106 - DNA, 99 bp, Homo sapiens
ggggatgactgattctcctccgccagctgggagtgtccactcgccttccaccagcatggcaacgtcttcacagtaccgccagctgctcagtgactacgg

SEQ ID NO: 868107 - DNA, 99 bp, Homo sapiens
ttaaaacactggaagaagatgaagaggaactttttaaaatgctcatcttggcagccaacagggatgaattctacagccgaccctccaagttagctgact

SEQ ID NO: 868108 - DNA, 98 bp, Homo sapiens
agtcaccctgaatgtcctcttgcggtcccccccgggtctggccaagacacccctgtctgctctgggcctgaaacctcacaacccagcggacatcctgt

SEQ ID NO: 868109 - DNA, 99 bp, Homo sapiens
ctccggagtagctgggattacagatattaccaaatctctcttggtgactgagttgggctcttccagaacaccagagactgtgagaatggttctttctaa

SEQ ID NO: 868110 - DNA, 99 bp, Homo sapiens
ggtacatctagcacagctcactgcagcaactttgacaaaactggaagaatttcgcagtaagacagcaacaggacctctttgtttttagacatgaattgg

SEQ ID NO: 868111 - DNA, 98 bp, Homo sapiens
gaaggatatccagacagccctaagtacttaaagctttcaccaaaacacccagaatcaaatactgctggaatggacatctttgccaaattctctgcata

SEQ ID NO: 868112 - DNA, 99 bp, Homo sapiens
cgtgtatactaccaatatccaggagctcaatgtctacagctggtatgaatatgagcccagtctctcgactaaaaaaaacttgggccaaagtgaagactg

SEQ ID NO: 868113 - DNA, 99 bp, Homo sapiens
ccctgcgccactactacaaactaaacattatcaggaaggagccaggacaaaggcttttgttcagtctcttcaagaaaatgaggaggaggagattgggaa

SEQ ID NO: 868114 - DNA, 98 bp, Homo sapiens
ggaaaccccgcctcttacagtcacgaggccagtacacaacaggccggggctcctcaggagtggggcttacggcagctgtgctgagagactccgtgagt

SEQ ID NO: 868115 - DNA, 99 bp, Homo sapiens
ttgtgggagcaaaaccaacgcctggctcggagcagcagcctctgagatcatacatctgtcggtggcctgggagacagtttttatgaatacttactgaaa

SEQ ID NO: 868116 - DNA, 98 bp, Homo sapiens
agccacaagaagggggccaagttggcagatgagcgggatagaagtaggcacagcagcagatcagagcgagatggagggtcagagcgtagcagcagaag

SEQ ID NO: 868117 - DNA, 99 bp, Homo sapiens
aagaatgctgaactagagaaggatgctcagaacagattggcacccattgggatggaccaggagcaccatttccaagacaaatatttattctatcgattt

SEQ ID NO: 868118 - DNA, 99 bp, Homo sapiens
tctacggggtcctggagcaccctgaagactcaagaccaaaagactgtcaggaaggcagagtgcagagggaagtctgttagaactgctgtgctgatcaac

SEQ ID NO: 868119 - DNA, 98 bp, Homo sapiens
gtacttgtttagattcatcatccaatcccgagtgctctacttgagggcagctgcaatgactctccgcacggtattattgtcattgcaagcactattgg

SEQ ID NO: 868120 - DNA, 99 bp, Homo sapiens
aaggcttcattcagctcagcaccaccttgggatgtttggatctggccgagaacataactttacacgacccaatgagaaaggagagtatgaggtggcaga

SEQ ID NO: 868121 - DNA, 141 bp, Homo sapiens
gtgatggctgcgtttaagttggatttccttccagaaatgatggtggatcattgctctttgaattccagtcccgtgtgacccagggcctggtcatcgggcagctgagcagccacttctcggaggaggtgctgctccgggcca

SEQ ID NO: 868122 - DNA, 98 bp, Homo sapiens
gaccatctcgcactaccctgactacagctggagcgcccagaggcgagccctggtggaggaagaggtgtgtttccattgtagaaaacctggtcatggaa

SEQ ID NO: 868123 - DNA, 98 bp, Homo sapiens
gagcaagatgcagtcagtggagatgttcctcctgctgatcaagagaagctttttatccagaagttacgtcagtgttgcgtcctctttgactttgtttc

SEQ ID NO: 868124 - DNA, 99 bp, Homo sapiens
gcaaactccttctgtaggctttgtaaaggattgatgagaaaagcagatggttaagagctctacaacttctgtgaggtctctaattaacagaagatggca

SEQ ID NO: 868125 - DNA, 100 bp, Homo sapiens
gagcagtccagaaagcggcttatcgaacagagccgggagttctctggagtgttcttcttgaactcccggctctgttcgataagccgctttctggactgct

SEQ ID NO: 868126 - DNA, 105 bp, Homo sapiens
gttggatttgcaaacctccccaatcaagttcaccgaaaatcagtgaaaaaaggttttgacttttttcactgattttcggtgaacttgattggggaggtttgcaaa

SEQ ID NO: 868127 - DNA, 98 bp, Homo sapiens
atcggaagcttctgccataacccggacaacggcccgcagccttcaggccgtgcctaggctggtgaagctcttcaaccacgccaaccaggaagtgcagc

SEQ ID NO: 868128 - DNA, 99 bp, Homo sapiens
ctgacttttggggtcctctggctgttgttcttttcttttccatgatatcattatatggacagtttagggtaagaaccttgatgctgtccatgatatcac

SEQ ID NO: 868129 - DNA, 99 bp, Homo sapiens
gccagtggtactggtagacacctttgcttccctggaaaaggcagcgcccagcacaaacgcagcatactccttcacgaggggctctgtgctgttcagccc

SEQ ID NO: 868130 - DNA, 98 bp, Homo sapiens
aaaaaagaaaggatccaaagcccagagtcaaagttgtggacagaggaaatgggagtagaccatcttcaccagaaggttgtctaccttcataacaacaa

SEQ ID NO: 868131 - DNA, 99 bp, Homo sapiens
aagagcacctcacagctgctgagccgtccgctatctgcagtggtgctgaaacgaccggagatactgacagatgagtcccccccgaagggcgtgaccatc

SEQ ID NO: 868132 - DNA, 98 bp, Homo sapiens
gctcagatatggatctcctacattcatggctgccatttacctgaagaacatggtgacacaatactggccagatcgagaacctccaccaggagaagcaa

SEQ ID NO: 868133 - DNA, 99 bp, Homo sapiens
agagataattgcagtggaaaatattgttttgaagcacctacactggcaacattagatccacctcatacaggactcaacgatgactctgaataatgtcac

SEQ ID NO: 868134 - DNA, 99 bp, Homo sapiens
tgagatagaaggggaggggttacagactgtggtgcctacccccatcactgcttccctcagccataacagcaacatggccaacgccctggccagcgccac

SEQ ID NO: 868135 - DNA, 99 bp, Homo sapiens
tgacaagaagttctctgcgcactacgacgcggtggaggcagagctcaagtccagcaccgtggatgatatcaccatggtcatctgccctggaattgccaa

SEQ ID NO: 868136 - DNA, 98 bp, Homo sapiens
tagtcgtggccggaggagtctcagagctgtcagaaaggataagttctgaacgtcgaaaagaaaagtctcgagatgcagccagatctcggcgaagtaaa

SEQ ID NO: 868137 - DNA, 98 bp, Homo sapiens
aaaatctgtggactggtgggcctatggcgtcctgttgtatgaaatgcttgccgggcagcattccatggcaatagattctggtttcaggaactctggca

SEQ ID NO: 868138 - DNA, 99 bp, Homo sapiens
tgataatgtaaattgccgcgatacccaaggcagacattcaacacctttacatttagcagacaacactaagcagttgagatttgaagatgtagtaaacca

SEQ ID NO: 868139 - DNA, 99 bp, Homo sapiens
cgccgccgccgccgcctccagggtgggcgcctttcgccgtggacgccgaccgtccgggacgagatgaccattctagggtgattctgagccaactggatg

SEQ ID NO: 868140 - DNA, 98 bp, Homo sapiens
gagaaccagtaccggctgacctcgctgtacgccgagcacccaggcgactgcctcatcttcaagatcctggctctgcagagagaacagcccagaaaaga

SEQ ID NO: 868141 - DNA, 98 bp, Homo sapiens
ggagaccgaaagagctgcataaattccagctttattacctgatttcatgatgtgctgggcaatgaaagaccttctgcttacatgagggagcacaatca

SEQ ID NO: 868142 - DNA, 99 bp, Homo sapiens
cggggttcttcgtcagcttcgacaccatccccacgtacctacagtggatgtcctacatctcctatgtcaggacttgattattcttagaaatgcacttga

SEQ ID NO: 868143 - DNA, 99 bp, Homo sapiens
gcagctacacaaagagggtcatctcttctattgtacctgcaggagtcagtggatcggtggggaaaatgctgcttaccctgggccctgggctgtagaaag

SEQ ID NO: 868144 - DNA, 99 bp, Homo sapiens
gagctatcaggggaagatatgcatcagttccatcgagccattactacagtgaagctttgccctttttcctacttttgattgacctttccagagcaagca

SEQ ID NO: 868145 - DNA, 99 bp, Homo sapiens
ctatattgatacccttggaagaattatgaatttaacagtaatgctggttcaaaccttgtactactcagctgatcacaagctgcttgatgggaacctact

SEQ ID NO: 868146 - DNA, 99 bp, Homo sapiens
gcgggcgttttggaagataccggaagtagagtcacggagaggtggatcttcttgttccaaccaaagtgactggcatcattacacaaggagctaaagatt

SEQ ID NO: 868147 - DNA, 118 bp, Homo sapiens
caacaccagaaaactgggaagcattttgaatgaatttggacatcacaagtttggaccagaaaatccctttaggacacagcaaatggctgcccctagaaatatgctttctggatatgcc

SEQ ID NO: 868148 - DNA, 99 bp, Homo sapiens
agcgtagctgaatccagtaccaaaaacgtcaacaacagttttacgcctgccacagtgactcaggtcactcaaggaactatccgaccagctgccaacttc

SEQ ID NO: 868149 - DNA, 99 bp, Homo sapiens
tttctggctccgggctgagcttcctggagaagaggaagcctttctgaagggcctgagtgacaagcagcgggaggaacattacttctgcaaggactttgt

SEQ ID NO: 868150 - DNA, 99 bp, Homo sapiens
tacatttttgacttgtttggaggtgttgatctgcgttcctttgcctgcaacaggggtcaagatgagttttgcctgacttctttgatgtcctgaactttc

SEQ ID NO: 868151 - DNA, 99 bp, Homo sapiens
cttggagtgcagaactgaaagagcattagtgccagcagtagttcccaagggctgtctcagccatccacccagacgactcagtatctgagagcagacacg

SEQ ID NO: 868152 - DNA, 99 bp, Homo sapiens
ccatggccactctgccgagcgcagagcgccgcgcgttcgcgctcaagatcaacagtggtattggaaggaactggccctgggcctctggaggcagcagta

SEQ ID NO: 868153 - DNA, 99 bp, Homo sapiens
gaggctggacgcttgcatggcgcttgagtacgctggggaggaggaggaggaagggagcggcagcagtgaaggatttgacccccctgccactgataggca

SEQ ID NO: 868154 - DNA, 99 bp, Homo sapiens
ctcccaaagtgctaggattacaggggcttccgatggaagcagctccagagaagatctttcatcccagcttctgagaaggaatgaacagatacggaagtt

SEQ ID NO: 868155 - DNA, 99 bp, Homo sapiens
atgctgccagagactttgttaactatttggttcgaataaatgaaataaagagtgaagaagttccagcttttgggaaacctctgcgccatgagagccaag

SEQ ID NO: 868156 - DNA, 98 bp, Homo sapiens
ttgaacttaatacagcaagaaagaccatcaagtttaccaatggagtcccctgtttccacaccagcagtgctgccaatacaccttttggtgccagtggt

SEQ ID NO: 868157 - DNA, 99 bp, Homo sapiens
tcaatccaacagcccagtgcttctgtctcgactgcactttgagaaggtctgactgtgtccatccctggtctggagagggctctgcagcagtacactcta

SEQ ID NO: 868158 - DNA, 99 bp, Homo sapiens
ttggctcaaggcaggttgacgtgtaatgacaccagcgcagctctcttgatttcacacattgtgcaatcctttggaggtgagaagtggaaaacaaatgtt

SEQ ID NO: 868159 - DNA, 99 bp, Homo sapiens
ttcggccaagaaattagacaagaaacattggaaaagaaatcctgataagaactgcttttgatgtgaaatttgaaagtaaagaacgaacagcatgtaaag

SEQ ID NO: 868160 - DNA, 99 bp, Homo sapiens
gaggatttgcttttgtaacttttgatgatcatgatacagttgataaaattgttgctcagtcagagggcagaccctgtgaatataactccagaatctacc

SEQ ID NO: 868161 - DNA, 99 bp, Homo sapiens
atgaggaagtactgagcctgttggaggaactggcccggaaacaggaggactggactgtggccaggctcccctggaccctgtctacctgccggcagccct

SEQ ID NO: 868162 - DNA, 99 bp, Homo sapiens
aaggttgatttcatcagactaaaaagttacaggtacatagtggaatgtcatgggatcacccttcttccccagttcttgggcatgtaccggcttaatgtt

SEQ ID NO: 868163 - DNA, 99 bp, Homo sapiens
catcagacccaagtgccaagttatttactttcccatcaggtttcctgatgtgagcagaacactgatatttgcatttaatggggaacaaaagatgaagaa

SEQ ID NO: 868164 - DNA, 100 bp, Homo sapiens
accccaatgtcatcaccctgcacgaggtctatgagaacaagacggacggatgacgtccgtcttgttctcatagacctcgtgcagggtgatgacattgggg

SEQ ID NO: 868165 - DNA, 99 bp, Homo sapiens
cacagttcaaaagagctttaaagaagcatgcacacttatcacaaacaactctctcaggctgttgccaaaatggttcaacagtgctgtacttatgttgag

SEQ ID NO: 868166 - DNA, 98 bp, Homo sapiens
taggaagccccctcaagtatgaattccagatgaaaggttgtatcaaagttcttaaggaccaacctcctaatagtgtggaaggtcttctaaatgctctc

SEQ ID NO: 868167 - DNA, 99 bp, Homo sapiens
gggcgatggaagtgttctgcatgttgatggtgacagtggcttcatggcatatacatcttctctatatccaagactttatcctgcatctcttttaatgca

SEQ ID NO: 868168 - DNA, 99 bp, Homo sapiens
cttctacaaacccatttcagaccaatgccagaggagcaacaggttgcaatgaatgtgtatgagttatcatcagctgccggattaccttgtgagattgat

SEQ ID NO: 868169 - DNA, 99 bp, Homo sapiens
tcagaaaatacgtggttggagagctcatctggaattttgccgatttcatgactaaccagtttgcttctgcaggaagcctttttggtggcatggtcctca

SEQ ID NO: 868170 - DNA, 99 bp, Homo sapiens
aagatcctggtcccctgctttaaccatcgaaaatgagcccagacttggagctgaagaagctggaaacatggaaacaccaacagctacagaccaaaaaaa

SEQ ID NO: 868171 - DNA, 99 bp, Homo sapiens
agaaaatagatgcttctaaatctgttgatgaagacctaccccttgggcttatggatgacatttatcagttttctaagaacttctctcttcggcttgatg

SEQ ID NO: 868172 - DNA, 99 bp, Homo sapiens
cttgccactcactgaatcatgccattcattgtttatgaagatgacaactctggtatatacttcttctgcaaagtcgatgttctggaatctgtgttctgc

SEQ ID NO: 868173 - DNA, 99 bp, Homo sapiens
gaaaaaaagacgaaagaagaagaagagcaaagggccttctgcaggttatgatgtgattgctcaagcccaatctgggactgggaaaacggccacatttgc

SEQ ID NO: 868174 - DNA, 99 bp, Homo sapiens
tgatgcagaagaggagtcctttaggaaggttgttattgatgccttcagattgatcaatgctaatatgatggtcttaggacatgaaccaagacaaacaac

SEQ ID NO: 868175 - DNA, 98 bp, Homo sapiens
gtagatttcagcaatatccccacataccttctcaaggcctcaggagtgcaagtagctgatgaagtatgtcgcattttttatgacatgaaagttcgtaa

SEQ ID NO: 868176 - DNA, 98 bp, Homo sapiens
ctggacctcaaggaccaagtggtctgtccattcaaggaatgcccgagctgtttggatcagaagatgacatcctttcacccatccctttcaggttttga

SEQ ID NO: 868177 - DNA, 100 bp, Homo sapiens
tctgatcgccgggaacccttgccgctgcgtggagttgggggttgaagcagccactgcttggggtcgcaggacagcagcggcaagggttcccggcgatcag

SEQ ID NO: 868178 - DNA, 99 bp, Homo sapiens
tggttcagactgcagtaaccagcctatgttgtccttggccagtttctggtgctaaagaaagatgaagacctcttccgggaatggctgaaagacacttgt

SEQ ID NO: 868179 - DNA, 99 bp, Homo sapiens
ctaatattacagctggaaatagggcacagatccagttaattactacgaagctgggaatttcaggtcatgtgcacagattaatggctggatccatggcag

SEQ ID NO: 868180 - DNA, 99 bp, Homo sapiens
tcgtcattaattggacacagtgccagagtgtatgcactttactacaaagatggacttctctgtacaggtttgggactgacaatagctgactaacatgtc

SEQ ID NO: 868181 - DNA, 99 bp, Homo sapiens
ttaaatggggatctggtggtcgtgaaactgcttcccgaggagcattggaagcttttgcctaccaaaaagttttgggaacctgatgattcaacaaaagat

SEQ ID NO: 868182 - DNA, 99 bp, Homo sapiens
ccagttggggatggagattttcctcaccagaaactcctcttgcaaggtctgatggattctgtggagttccaaagcccaagaggagaaatggggtgaact

SEQ ID NO: 868183 - DNA, 99 bp, Homo sapiens
acagacccttcacccctcacctcgatgcagccagtagcttggatccttgtgggcatgatccataatcggtttcaagaggaaggtggagctccaccgccg

SEQ ID NO: 868184 - DNA, 99 bp, Homo sapiens
gaatgaatatccacaatttagcatcaggcaaaggaagcaccgcacatttttcagatttattaactccaaggcaagaagcagttcctgttgtctctttac

SEQ ID NO: 868185 - DNA, 99 bp, Homo sapiens
ctcctgatgaaaaggaaggaagtcacccaattgacaggtttctcagatcctgtatatgcagaagcttacgttcatgtcaaccaatatgatattgtcctg

SEQ ID NO: 868186 - DNA, 99 bp, Homo sapiens
aaaatgaatttcaggcctgagaggcgggtcctggtggatgatggatggatattagcatactgccatgttcggaagtcaaagtgaattgggcaacaaccc

SEQ ID NO: 868187 - DNA, 98 bp, Homo sapiens
tctgactcacctcacagaacctctgtattccagcgtcttcaggaaacagtttagactctcttcaagatgacaatcctccacactggctaaaatccctt

SEQ ID NO: 868188 - DNA, 99 bp, Homo sapiens
gaagaaaatgtttgaagcaacaagattgcttgcaacaattgttatgcttattccaactccacagagtgaccagagagaggacgtggctgaagacaccaa

SEQ ID NO: 868189 - DNA, 99 bp, Homo sapiens
atatgaagagaaaaatggcacctgtcaaggtgctggagaatctggtaaaagcaccattgtgaagcagatgaggatcctgcatgttaatgggtttaatgg

SEQ ID NO: 868190 - DNA, 99 bp, Homo sapiens
atttttattgaaagatgtattgagtacattgaagccacaggtagtatcttccccagcagatgttgctgaaaaagctgacagaattattacaatgctgcc

SEQ ID NO: 868191 - DNA, 99 bp, Homo sapiens
aattgtttggctccaaagattctgatttggcaacacagaatcgtcctctttggcaatgttttcttggacggtgcgtgctctggaggaggccaacgccga

SEQ ID NO: 868192 - DNA, 99 bp, Homo sapiens
ccatgatgaaagcggcttagagaatatctgtcttcatcaccatcaacaggaatagctatgctgaatacagaggtggccagactgttcataggtgttaac

SEQ ID NO: 868193 - DNA, 98 bp, Homo sapiens
attgattcttggctcattaaagggctaatgtatggtggtgtttgggctacagtacagtttctttcaaagttgggacagcgtcttcgctgctgctggat

SEQ ID NO: 868194 - DNA, 99 bp, Homo sapiens
gtgatgcaagcaacagccactagtgggtttgccagtggaagtcccgtgggagtagggctgaatgaactgaaacgaaagctgctgatcagtgacacccag

SEQ ID NO: 868195 - DNA, 99 bp, Homo sapiens
cctggtcatggcgtccagctccggcctggcgtgaggaccccccaatccgcgtgaggaaggaggctgcagtgtgccagtagccgtgcatacagctatgaa

SEQ ID NO: 868196 - DNA, 99 bp, Homo sapiens
tgactatggccgtctggcctcggaggccaagcctgcagcggtggctgctgaaaatgaagagtggagacctttggcgacttggcctttggcgacatcttc

SEQ ID NO: 868197 - DNA, 99 bp, Homo sapiens
tggtctcctgtggaatgatggaagccttattgaagcttgccgaactaaagcaagaatgtcttgctcgtggtttggagaccaagggaataaagcaagatc

SEQ ID NO: 868198 - DNA, 99 bp, Homo sapiens
gcgcagcgccgagcgcggcccgggcgccatcgagccttggcggcggacgtgcagtactatactggcaattgctggagaagattttgcaattgttgcttc

SEQ ID NO: 868199 - DNA, 98 bp, Homo sapiens
tcgtccgagagtcttaaaatcctgctctggccggattccagactcgtgggggaaaggctgatggataatcaaatagtggtttctgactatgcccagat

SEQ ID NO: 868200 - DNA, 98 bp, Homo sapiens
ctcatcccgcccgtgaaggccacgccattaaagcgcttcagtcaaaccctgcagcacttttccagccattaactccaggctctcgagaatttgaagat

SEQ ID NO: 868201 - DNA, 99 bp, Homo sapiens
ctcatttcctacatttctgaagatctcaagatctggactactgttgaagaaattcccagtaagtaccatcttcctcatgggaccagtgaaacagctgaa

SEQ ID NO: 868202 - DNA, 99 bp, Homo sapiens
gtcgtgccgccggcgggtcgggccgggcaatgcctcgcgggcgcaatgaatccgcggcagtctattatcctcccagtccacaacgctgaaccgtggctg

SEQ ID NO: 868203 - DNA, 98 bp, Homo sapiens
cattacttctatagaaatggctgaaggaaaacctccttatgctgatatacatccaatgagggagaggagttcattacttcggaagtggtacaatttaa

SEQ ID NO: 868204 - DNA, 100 bp, Homo sapiens
taccccttttgggatgagatggcaactcaggaagttcctactggacagtgttcaagaccagtaggaacttcctgagttgccatctcatcccaaaaggggt

SEQ ID NO: 868205 - DNA, 99 bp, Homo sapiens
tatagagatgtgatgttggagaactacagaaacctggtctccctagaaattattcctttgcaggtggtgcaaaggatcagcacgggagttttgacctgc

SEQ ID NO: 868206 - DNA, 98 bp, Homo sapiens
taggattatacattgtaagaggtgacaacgtcagcagccgctcttctaaaacattcaaaccaaagaagaatatccctgaaggatctcatcagtatgaa

SEQ ID NO: 868207 - DNA, 99 bp, Homo sapiens
ctgaccttcttcctcgaggacgacgacaagctcgagcagatcaggaagatggccgccctgctcccccaatgaaaggccagcttcgaagaaaagctgaaa

SEQ ID NO: 868208 - DNA, 99 bp, Homo sapiens
caataaaataaattcttttgaactagatcgagctgatagagaccctagtaacatgaacactcctatgccaccttcaccagctgtacaagtgcagggcca

SEQ ID NO: 868209 - DNA, 99 bp, Homo sapiens
catagtcattctgcctgccctgaaagtcccagatcaagcctgcctcaatcagtattcatatttatagccaggaatttttgaaccgaagaaaaatgacag

SEQ ID NO: 868210 - DNA, 98 bp, Homo sapiens
aatacacctctgattttaatcagttctgcgtttgaaaggaaacccgcaatggcaccagcatgatatcattgatcattcctcccaaagaccagatttca

SEQ ID NO: 868211 - DNA, 98 bp, Homo sapiens
tctatgtgaccggcgggcccggagcagccgccgccgcagcgcgaacatggacgccgtcaacgccttcaaccaggagagataattgacgaccttgccaa

SEQ ID NO: 868212 - DNA, 99 bp, Homo sapiens
aaatccaaatactgcatatcagaaacaacagaaatctcctgcaaagaagctgagccatgcaattagtaaatctttggggtgtgtacccacgagagaacc

SEQ ID NO: 868213 - DNA, 98 bp, Homo sapiens
ttctctatttctgctccgtcatccatgccacttataaggatgcatttatgaaagcaaatcctggctacaaatggtgtcctaccacaaacaagcctgtg

SEQ ID NO: 868214 - DNA, 99 bp, Homo sapiens
aaaaggtgtacttgcaagaaacctcaggacttgagtaacagcaacatggtaaggcacctatatatctgtgattttcacaaaaatttcatccagagtgtc

SEQ ID NO: 868215 - DNA, 99 bp, Homo sapiens
ctcgaagaaggcgagcagggtgcgggagagccccttgcagaagacgccgtacgaggtcctcgatgggcttcctggaatattggtgtgtttatttgcatc

SEQ ID NO: 868216 - DNA, 99 bp, Homo sapiens
gacgacgctgctgggtccgctgagcggggcgacccgagaatcttttagctgaaaaagtagagcagctgatggaatggagttccagacgctcaatcttcc

SEQ ID NO: 868217 - DNA, 99 bp, Homo sapiens
taatctgtcattgaacaaatgtttccttaaagtgcctcgatctaaggatgaccctggaaaggtgctgcgacaagagactttggacaaaaattgacttga

SEQ ID NO: 868218 - DNA, 99 bp, Homo sapiens
gtggtggagtgtagagatatagttggcaacctcactgagttagaatcagaggaaatctgaaatagagtactatgctatgttggctaaaactggtgtcca

SEQ ID NO: 868219 - DNA, 98 bp, Homo sapiens
ggtgttatttccaattttgtcagttacgtgggtaaagttgccacaggaagatatggaccatcacttggtgcactggatagaacttatactggcttgca

SEQ ID NO: 868220 - DNA, 99 bp, Homo sapiens
ctacattgtgaagctcctgggagcctactatcacgacgggaagctgtggcccctgaagaagatggccgaccggatcaggaagtatcagatcttgaacaa

SEQ ID NO: 868221 - DNA, 75 bp, Homo sapiens
cacttctctgtcgtcacagttaggtgatggaattttactgccagtcctgtgagactgccatgtgtcgggagtgca

SEQ ID NO: 868222 - DNA, 99 bp, Homo sapiens
acgaggctcctggtccaaggctctttgcgtgcagaagctgcaggtgggaagcccatcaccatgacactggggcaggcttcagcaggggccaaggagctc

SEQ ID NO: 868223 - DNA, 157 bp, Homo sapiens
atgttatcatcctgaataaacactggaagaagtcctggtcccctaggatctcgcggaccgaccaggacttcttccagtgtttattcaggatgataacatggagaagcttgaggaaattattgaaaaataccctcgtgccttccctttctggattggg

SEQ ID NO: 868224 - DNA, 99 bp, Homo sapiens
ggaccacgacattgaccaaggggtgagcagtaacagcagctacttgaagtggaacaagcctgtcccctggctctcagagagaaggggtctcactatgtt

SEQ ID NO: 868225 - DNA, 99 bp, Homo sapiens
tgatgcggctgtgaagccctagtcggggctgccttgcacctccatgacattggcatcgtgactatggactggctggtgaggaatgtcacctacaggcct

SEQ ID NO: 868226 - DNA, 98 bp, Homo sapiens
agacctgggatccagcccttctggtgtcacctcccagggtgactcaactccaggttctgggtctggtaatgaagtcatagaaggcccccaaaatgcaa

SEQ ID NO: 868227 - DNA, 99 bp, Homo sapiens
tcctcacggagaacctgctgatggcccctggccccaacatggcccgtcgctctcagagctcctcgcagggggacaacccactggcacccgggtacctgc

SEQ ID NO: 868228 - DNA, 99 bp, Homo sapiens
gtggatactgttcattggggcccttattgggtccagcatctgtggccaagaaaaattttttgggtgaagctgaggaccaggaagagaaagaagatgctg

SEQ ID NO: 868229 - DNA, 99 bp, Homo sapiens
agactggcaaaggcgaatcaatctttttctgaccgatgtggaaacatagaagactggctgtagtacatgttttcgtcatggtagtcactgtcgaccccc

SEQ ID NO: 868230 - DNA, 100 bp, Homo sapiens
agtaacatacagcactttgtggagaaagtcgtcttccacttgcacgaaaggctttcgtgcaagtggaagacgactttctccacaaagtgctgtatgttac

SEQ ID NO: 868231 - DNA, 99 bp, Homo sapiens
atagaatggcctaattggaaagaatttcaggatcaccggtttctcctgcttcatttaacccagtatccactccagttgcacttcccacaccagctcttt

SEQ ID NO: 868232 - DNA, 98 bp, Homo sapiens
ttaccaaaagagaggcaccgctggaacactaatgagctcagaattctgcaaatgcagattttgcaaactttgatgcatttggacagtctagtggttcg

SEQ ID NO: 868233 - DNA, 99 bp, Homo sapiens
agttcgttatattagaaaacctattgactatacaattctagatgatattggacatggagtaaagtgagttctctggtgatgttgatagcctggaactgg

SEQ ID NO: 868234 - DNA, 99 bp, Homo sapiens
tcatggatgaacttcaggatgttcagctcacagagatcaaaccacttctaaatgataagaaccactcacgaattcttgtttggtgcccttgctgaactg

SEQ ID NO: 868235 - DNA, 99 bp, Homo sapiens
ggggggcggcggccgaacgatgtgcgagaactgcgcagacctggtggaggtgttaaatgaaaaatccggggcaccagctaccagagccctcacggcatc

SEQ ID NO: 868236 - DNA, 99 bp, Homo sapiens
gatgtgcgtaccaatgaagtggtggccatcaagaaaatgtcttatagtggaaagcagtctactgagggcgatgctggatcttttcttgtctgaatgtta

SEQ ID NO: 868237 - DNA, 99 bp, Homo sapiens
ggtgatttctgcatttccatctgagcgcggtgtggaggaaactgcagctgagtgccgaaaactaggcgtcactgcgcatgcgtatgtggtagactgcag

SEQ ID NO: 868238 - DNA, 99 bp, Homo sapiens
aggaacacacctgtgttcagggatgacgtttgctttttcatcagccagtcaggttatcaatactctggctgaccatcatcatcgtgggactgactttgg

SEQ ID NO: 868239 - DNA, 99 bp, Homo sapiens
cgggaagcagctcttgccaaaaacctttggacagtccaatgtcaacattgcccagcaagtggttcacctccatttctcaatgtgaaagctttacatcat

SEQ ID NO: 868240 - DNA, 99 bp, Homo sapiens
cggagaggcacggaggagccgctggggctgccgccacggccgcccggaggtcgtcaaagtcctacattttagctttcagtgctgaacttccttctccct

SEQ ID NO: 868241 - DNA, 99 bp, Homo sapiens
ccaccaccatctccatcacccaccaacaacaccacaataatccacagccaagctggagagatttaccagcatgagaattaagaaggagaaggaaaagcc

SEQ ID NO: 868242 - DNA, 98 bp, Homo sapiens
aaaatcaccgcccatggccagcccttggaagaggctacaacacagactctcttgagcctgagggatccattacagtttcaatgggtattgacttttgt

SEQ ID NO: 868243 - DNA, 99 bp, Homo sapiens
cagacagctttgatgactacccacctagaagaggtgatgatagctttggagacagtaatagcagtgagtgcccgcctccaggaaatgctgaagatgaca

SEQ ID NO: 868244 - DNA, 99 bp, Homo sapiens
aaacctcaagatgtggatttaccttatcccctcaacaacttttcagtggcaatcctaccctggtccaagcctggaaagtgaagacttcaacattccacc

SEQ ID NO: 868245 - DNA, 99 bp, Homo sapiens
atcaagatctgttctcctgataaaatgattggcttttctgaaacagccaaatgtcaggccatgaagaagctgttacacatctgtattgaaggttggggc

SEQ ID NO: 868246 - DNA, 99 bp, Homo sapiens
ggccctgacttccgggcagcagaatatccatctcggactcagttccagatctttcctgccaccctggagaaatgtgccacgtgctcccagcccatcctg

SEQ ID NO: 868247 - DNA, 99 bp, Homo sapiens
ggtcccccgcagtgtcagcgagtgagaaagagctctccccacacctcccggccctcatccgagacagctatgtttccagtgtcctctgggtgtttccaa

SEQ ID NO: 868248 - DNA, 99 bp, Homo sapiens
tcgcttctatatgtttcattccttcaagcaattcccaagatattgagaaagatcagtctaaagaaaaggagaagaaagtgaaaaaaacaattccttcct

SEQ ID NO: 868249 - DNA, 98 bp, Homo sapiens
cgacatgaatgatgtgtttgtgatagcagggaataatgctgtggaagtgagagaagaactcagaatcccctactttgaaactagtgctgccaatggga

SEQ ID NO: 868250 - DNA, 75 bp, Homo sapiens
cagttttgtgtccatgtgaacaactgcagctgagtatgtcccagagaaggtgaagaaagcggaaaagaaattaga

SEQ ID NO: 868251 - DNA, 98 bp, Homo sapiens
agtgggcgatgagcctcccattctcccagacatggggaacagggtcacagctctcacccagcttcagtatcagacacagcacagcagccatctgaaga

SEQ ID NO: 868252 - DNA, 99 bp, Homo sapiens
agacgatctgcacttcgcattttggcattgacatttaattttagggtcctttatatagaagggagagtaggtctcttcagagctgctgtgcccagtggt

SEQ ID NO: 868253 - DNA, 99 bp, Homo sapiens
acatggagagcgagaccgtcgtgacaacagagagagaggcctagaatatcctgcagtggtagagtttgctccattccagaagatagccaaaaagaagct

SEQ ID NO: 868254 - DNA, 98 bp, Homo sapiens
aagctttcaaccacattgccaagttatgcagccttaaacgacttgttctctatcgaacaaaagtagagtgctggacccaaaggagacaacatttatga

SEQ ID NO: 868255 - DNA, 123 bp, Homo sapiens
ggacttctgaggtccctccaaggaggaagcctgatgacacagttgcctccgaggcaactgtgtcatcaggcttcctccttggagggacctcagaagtcccaggcttcatagtgtcaagttcaa

SEQ ID NO: 868256 - DNA, 99 bp, Homo sapiens
gggcagacgttagcgtgagtgatcactctcaatcccggtgaagggagcaacctgacccctgctcatcactacaatgactttcgtttcaagacctatgca

SEQ ID NO: 868257 - DNA, 99 bp, Homo sapiens
ctcactctcgctcgccgtttccaggagcacagctacctctacccagatggaaagacccacaacccagacctgactgagctcggccaggcagaaccccag

SEQ ID NO: 868258 - DNA, 99 bp, Homo sapiens
cagtgctggtgagatgtgtaagataatttgcaagtaccttttgagtgaagaagaggaccacttcagtgaggaacagtacttggctgcagtcagaaaatt

SEQ ID NO: 868259 - DNA, 99 bp, Homo sapiens
ctgacccagattaatgtccactatggaggtgtacagaatctctgcagtagactgaaaacctcccctgtggaaggtatttaaaccatgtcagagctgcct

SEQ ID NO: 868260 - DNA, 99 bp, Homo sapiens
ctgagatcaaatggcacttcattggccacctacagaaacaaaatgtcaacaaattgatgggaactctaatgaatcattgattgaccagcactattttac

SEQ ID NO: 868261 - DNA, 99 bp, Homo sapiens
attgcagatcttcagcggggagatcgacttatcgccattggagccttttttccggctgctgaacttgcgcaagctgggcctgagcgacaacgagatcca

SEQ ID NO: 868262 - DNA, 98 bp, Homo sapiens
acaccgttcacagagctagccggacgtcctccgactcaaggaatgctcatcaaatttaacaacgctgttcagacggtcctgcttcaccggcgtgtttg

SEQ ID NO: 868263 - DNA, 98 bp, Homo sapiens
tcccggccatggacatcccccagaccaagcaggacctggagctcccaaagttaagtgggcagaccaacatccacctcagcaaaaacttcttcctgacg

SEQ ID NO: 868264 - DNA, 99 bp, Homo sapiens
aggatgctgtcctgaaggtggctgtgaagatgctgaagtgacatgtcatccagtgacagtgactcggactgggatggaggcagccgtctttcaccattt

SEQ ID NO: 868265 - DNA, 99 bp, Homo sapiens
ctacaccaaagagtgcctggagagggctctagctaaaaatgagcaagttaaaggcaagatcgacaccatgaagaaatgcttcggttacccacagtcttt

SEQ ID NO: 868266 - DNA, 99 bp, Homo sapiens
tactttatagtcctgattcaagtgttggcggatggaagggaggagactcctgaccctcagaatgtatacgctcaacggcaagaaagtggaagttgccgt

SEQ ID NO: 868267 - DNA, 99 bp, Homo sapiens
tgacatttctcgaaaatgggagaagaagaataaaattgtttatcctccacaactgcctggagaacctcggagaccagcaagtcttgctctgtcacccag

SEQ ID NO: 868268 - DNA, 99 bp, Homo sapiens
gggactcaggagtctaccaatgtgttataaaacatagggcctgattacattccaacagaggaagaaaggagagtcttcgcagaatgcaatgatgaaagc

SEQ ID NO: 868269 - DNA, 99 bp, Homo sapiens
actcaaggcatcatctggaagcggcccacgtaacaattgctcgagcaattgaactaaaacatgctcctggactaattgctgcactggcgtatgaaacag

SEQ ID NO: 868270 - DNA, 98 bp, Homo sapiens
actgccgcagccaggagatggttcgggcctagcggagccgggactggagttgctctaggtcgtaaccagcctttgaaaaaggagaaaccaaaatggaa

SEQ ID NO: 868271 - DNA, 98 bp, Homo sapiens
ttaaaacgggtcagttggcagccatcaaagttatggatgtcactgagggccggtgcataaacttctcccgagttccatctcagtaaaagggaagcagg

SEQ ID NO: 868272 - DNA, 99 bp, Homo sapiens
ccaaagttgcatttcctcgtcgagcgcaacccaagctgtgagtacccaggaagctgcaccgtgtggcctggagctgtctatctgtccttccagccacct

SEQ ID NO: 868273 - DNA, 144 bp, Homo sapiens
caccatgtccgtggccttcgcgtctgcccggccaagaggcaaaggggaggttacgcagcaaaccatccagaaggcagtcgactacgagctcaacagagctttcatgctgacagtgatggtgtccaaccaggcgcccctggccag

SEQ ID NO: 868274 - DNA, 104 bp, Homo sapiens
tttaactgccgcctcacctgtggagctctgggtacaggatactgctggtcaagagaggtttagaacattaactcccagctattatagaggtgcacagggtgtta

SEQ ID NO: 868275 - DNA, 99 bp, Homo sapiens
cacaatcctgtacaaactgaagttgggggagattgtcaccaccatcccaaccatagattgtcttctcctccaaggtctacatgattacctgaagtttaa

SEQ ID NO: 868276 - DNA, 98 bp, Homo sapiens
taccattctacagtatgcacagaccactgatggacagcagatcttagtgcccagcaaccaagttgttgttcaagatgtcttcaatgaacgagacaatt

SEQ ID NO: 868277 - DNA, 98 bp, Homo sapiens
tgtctattgaagaatcttccaatgggagtctctcagtagaatttcgacatttggtttgttgataagccggggcccttcgtgggaccctgcggtcactg

SEQ ID NO: 868278 - DNA, 98 bp, Homo sapiens
atttcgggaatgctgagaaaacagacagatttgtcatgaagaaactcaatgatcgtgtcatgagaaggtcagctggcggctccagtcctgaaggcgga

SEQ ID NO: 868279 - DNA, 98 bp, Homo sapiens
caaaggatgccacggttatactctgcaaggtggtgttccagtggcaaacagctgtataaactcttgtaaacagttatcagggaataccaagagcagag

SEQ ID NO: 868280 - DNA, 99 bp, Homo sapiens
gattggactgctctatccagcatcattgagtaatagttatgcacgagtgcgagctgtggtgatgacccgagatgactcaagtggtggatggttaccact

SEQ ID NO: 868281 - DNA, 98 bp, Homo sapiens
agggggctaccgctgcagctgcccccagggtttcacccagcactcccagtgggcccagtgtgtggatgccacagggcccagtgggctccgggtcctgc

SEQ ID NO: 868282 - DNA, 99 bp, Homo sapiens
aggctgcagaagacctgctgctgctcaacagacctctgacagacctgattagcctgctcattccactgctgtggcattgcatgagagggaagcagccaa

SEQ ID NO: 868283 - DNA, 99 bp, Homo sapiens
aaggctgaattggagctcgtactgagaaaatacaaggagctggacatcgagcctgagggaggggaaaggcgcaggaggtcggatccgcagctgcttgcc

SEQ ID NO: 868284 - DNA, 98 bp, Homo sapiens
cctgagcggccaggacgacgaggagcagggcctgactgcgcagatcagcaaagacccgatttttgtaccaggcgtctgggggccttatttctcagcca

SEQ ID NO: 868285 - DNA, 98 bp, Homo sapiens
caccatgagcgtcccggccttcatcgacatcagtgaagaagatcagatggcttaagcaaaatcagactaaactatagcgatgaatcacctgaagctgg

SEQ ID NO: 868286 - DNA, 99 bp, Homo sapiens
atggttctgcttaacaagcagagagctcacctaccacaaacagccaggtaacatatctgaagagatggattaagaatgctttggattaaggattgtgga

SEQ ID NO: 868287 - DNA, 99 bp, Homo sapiens
tgggcgacagagtgagactccatctttgtaagataatccactttcaaattgtcgatcatcatagttttctgggatagctcaatttttagtaactgaata

SEQ ID NO: 868288 - DNA, 99 bp, Homo sapiens
gccggagcccttgggtgaaattgttaggcgtggagagggagtgatgtcttccagactcggtgctgtacccgccgcctatcatggtcaccatcaagcact

SEQ ID NO: 868289 - DNA, 99 bp, Homo sapiens
ctctttctgacgacctacaaaccgaattctcctgtagtctttatcatcataaacctcgccttcctccgctgcagcttctttcaagtccacatctgcgtc

SEQ ID NO: 868290 - DNA, 99 bp, Homo sapiens
gccaatgttggtgctggcaaaaagaggccagctccaccagggcaagggtttttccctgcctgccactgtatgccgagtgtccagaacaaagcctagcac

SEQ ID NO: 868291 - DNA, 99 bp, Homo sapiens
ctagtgatcctgagtacaacacggtggcaagcaagtttaatcagacctgctcacacttcagaatagagaagatgatcacggaagccttggcccaaggtg

SEQ ID NO: 868292 - DNA, 99 bp, Homo sapiens
cttgtcagttccctgcaataaactaattagtgctctgtctctggactttaggaccaatactctgtgtgtcctcttcctgactaggacgtttcccaccac

SEQ ID NO: 868293 - DNA, 99 bp, Homo sapiens
atgtatttgtggcttaaactcttggcatttggctttgcctttctggacacagaagtatttgtgacagtttatcgatggtcgactggcaaaactaaatgc

SEQ ID NO: 868294 - DNA, 99 bp, Homo sapiens
gagaagattctagacttgtgtgcagcacctggagggaaaacaacacacattgcagcactaatgcatgatcagcgatgtgcattttgtaagcactttgga

SEQ ID NO: 868295 - DNA, 99 bp, Homo sapiens
gcgacaagagcaaaactccactgagtggtgttgtgtcaggaggtggaaaattctcagtaaagttgacattacataaatctgtgctacaacagcagaaac

SEQ ID NO: 868296 - DNA, 99 bp, Homo sapiens
ctgtctctgtgcattgctgcggttggtcaaaatgttgacaatggtgacctcatccacacctgaaacggacgccattctttttctttccaaatttgtttc

SEQ ID NO: 868297 - DNA, 99 bp, Homo sapiens
gtggataaaatcttacccccaccatctccctggcccaagagctccatctttgatgctgatgaagaaaagtccaaggtgacggccacccacggactctgt

SEQ ID NO: 868298 - DNA, 99 bp, Homo sapiens
gcaacatgtagctcttatttcagatgaggcctgcctgtgttaatacacctagtgaggagtggagctgaatttgaatgcaagccttggcaccttaattga

SEQ ID NO: 868299 - DNA, 99 bp, Homo sapiens
agaaggctgttcttcagtggaccaagcatgatgattcttcagataacttctgtgaagctgatggtggtcgtcggttttctgagggtacttcagctgaca

SEQ ID NO: 868300 - DNA, 99 bp, Homo sapiens
gacttgtacaccgaagaacggccgcgtgaagttgattcaagtcagttgagacgccagttgtgtggaggaagtcaggccgccatagaaagaatgatccac

SEQ ID NO: 868301 - DNA, 99 bp, Homo sapiens
aagagctgaaaaattgactgaactttcagagcccccaaagacacacgtgactcaccaccccatctctgaccatgaggccaccctgaggtgctgggccct

SEQ ID NO: 868302 - DNA, 98 bp, Homo sapiens
tgcaccagccatggactgctacacggcgaactggaacccactcggggactctgccttttaccggcctcaggagtgcaagtagctgatgaagtatgtcg

SEQ ID NO: 868303 - DNA, 99 bp, Homo sapiens
cagaagatacaaagacagaccatcccagttgaatgctgtcttccaagaacagaagaaaatgatccaggcccagttggaagctgaaggtgttcctgaagt

SEQ ID NO: 868304 - DNA, 99 bp, Homo sapiens
ctcctgagtagctgggactacaggatgtgctaggtgtgggccggcccccacccgaccctgacaagtgaccatggatcctggagccgggtcagagacatc

SEQ ID NO: 868305 - DNA, 98 bp, Homo sapiens
gaaggtgaaacagattggaaattaattgctatcaatgcgaatgatcctgaagcctcaaagtttcatgctggacaggtagtgaatcaaatgaataagaa

SEQ ID NO: 868306 - DNA, 99 bp, Homo sapiens
gcaacagggctgaatgagtaaacaaaatgactgtccttgaagaaggcagcatcctggtcctcccggaagtcctgcttgcctgcatgtttccagggaatc

SEQ ID NO: 868307 - DNA, 99 bp, Homo sapiens
ctgaccgcctcccgcggaggggtggccgccgccgaccgtgaagagcgattatatgttagagatagctgatcaagtggaccaggaaattgctttgaagtt

SEQ ID NO: 868308 - DNA, 99 bp, Homo sapiens
tggccgggctcgccactgacgtccagacagtgaacagattatggcctttgcaagcaaatgagtactcctctcctaaagaaagattacgttgatgaaaaa

SEQ ID NO: 868309 - DNA, 99 bp, Homo sapiens
ggagaaccacagcagtgtggctggactaggtgtggtggctggaggtggccgaattgacaaacccatcttgaaggctggccgggcgtaccacaaatataa

SEQ ID NO: 868310 - DNA, 99 bp, Homo sapiens
tcctcatgtctgaccggtccctgcacctcgaggcttccctggacaaggaggtacactgaggaggggacggctccgtcttcacattgtgcacagatctga

SEQ ID NO: 868311 - DNA, 99 bp, Homo sapiens
agaaatcactaaatactactctgaggggcttagaaattaacaggtcaagttcatccgagaagtaacaccatatatcaagaagccatcattagtatcaga

SEQ ID NO: 868312 - DNA, 99 bp, Homo sapiens
ctagccccttcccacaggctctctccgctcgattttgtcaccgttatgtgggaagcgaatccaacatagggcctgattacattccaacagaggaagaaa

SEQ ID NO: 868313 - DNA, 98 bp, Homo sapiens
gaatccaccgtcaggcataaattgattattcctcgcccacatctgtgccagtaccactccagttgcggagagatttttcaccagttccacctctctga

SEQ ID NO: 868314 - DNA, 99 bp, Homo sapiens
ggccaaccatgggaaaggagagtggatgggactcaggaaacccagcgtttgctggcagaaccagttcctggcatcaaagccgaaccagatgagagcaac

SEQ ID NO: 868315 - DNA, 99 bp, Homo sapiens
ctttgacacagataaccggatatttggtttgccaagggagcttgtggtaactgtatcagatctcaggaaacaggctcgacagctggaaaatgaacttga

SEQ ID NO: 868316 - DNA, 99 bp, Homo sapiens
tttgggacgagtgctgtgactgtgttgggtatgttagagcccaccaaggaaccactgaaaccactttctgctgcagaaaaaatagcttccatcggtcag

SEQ ID NO: 868317 - DNA, 99 bp, Homo sapiens
gacagtggagacactggcattggaacttcctgttctgatagcgtggaaggctaatagctcgtcagcttgctaaaatccatgctattcatgcacacaatg

SEQ ID NO: 868318 - DNA, 99 bp, Homo sapiens
agtaacttgtggaatgctgagaaaggaaattgacaatggcccttcagctatgctaggtctataatgggaagtgtcacagttcggtatttctgttatggg

SEQ ID NO: 868319 - DNA, 99 bp, Homo sapiens
tggataccaaggaagagaagaaggaacggaaacaaagttattttgctcgaagagtccaggacaaacgcttgtgcgagtaaatgtagagtcattaacaag

SEQ ID NO: 868320 - DNA, 99 bp, Homo sapiens
actgtccacgtaggcattcaccccagcaaggttttgaacgaagaatgtgatcagaactggtacaaggcagagcttaatggaaaagacggcttcattccc

SEQ ID NO: 868321 - DNA, 99 bp, Homo sapiens
gtccgcgcggccgaccacgtgaagctggacagagctagtcatagtgctcagagcaaacaccgttgcacagtctttgatagttgactggctatcaaaggc

SEQ ID NO: 868322 - DNA, 99 bp, Homo sapiens
atcgttgctgccttcttcgtcaaggcaggccagaaagcagacccagggaggatagcacatgtcttcggctacactggtgaaggcatcgtgcctgctcca

SEQ ID NO: 868323 - DNA, 99 bp, Homo sapiens
ggttggtgcccgctatggctatggaggatgatggtcctgaaccgcctgctctcaggctccagtctgcagcagatggcggccagcgggaagaaggccggg

SEQ ID NO: 868324 - DNA, 99 bp, Homo sapiens
ggacagaaagagtttgtatgccgcaagacaatattttgttcagtggtgtgcagacagaaatttcaccaagccgcaggttcaaaccttgtactactcagc

SEQ ID NO: 868325 - DNA, 99 bp, Homo sapiens
gggaagatggtagctgtaaacctggccactggaaaacgaaggagccagcaccgctctttgaccttgccatgcttgccttagatagtccagagagtggct

SEQ ID NO: 868326 - DNA, 99 bp, Homo sapiens
cacccattcaaagtcatcatacagatcctggtggtaatcacaggcccctggaccatcatcaaaagtacagccacacctgtagtcccagctacttgggag

SEQ ID NO: 868327 - DNA, 99 bp, Homo sapiens
gcatccagggctcgtacttctgctcgcagctaaaagatggcggcaaggcagcccaggcaaatgtaagaataggcgatgtggttctcagcattgatggaa

SEQ ID NO: 868328 - DNA, 98 bp, Homo sapiens
acccgcccgcccaaggtctctcgcgggcgggagaacggaaaactcccaacttcctgaaaatgtcactgaaattcacaaatgcaaaacggattgaagga

SEQ ID NO: 868329 - DNA, 99 bp, Homo sapiens
ttttaagaaggttgggatttgctacttcttctgatgtaatagagatgaaaggacgagtggcttgtgagataagcagtatatgggagtccacatttatgt

SEQ ID NO: 868330 - DNA, 99 bp, Homo sapiens
gccgggcaattcccgaccgaaccaaacgaaatgcatcttctgcagacaccgggttaagagggtctctggagcctgcatccagtgttcctacggtcgctg

SEQ ID NO: 868331 - DNA, 98 bp, Homo sapiens
tgaccacgagcttttcctccaggcctttgagaatggccgccaagaacgagtcatgtttgacaaaattacatctcgaatccagaagctttgttatggac

SEQ ID NO: 868332 - DNA, 99 bp, Homo sapiens
ctcctgagtagctgagattacaggaggtgctcctgtaccctggccacagcccaatcctgccactgctgacatctggggagactttaccaaatctacagg

SEQ ID NO: 868333 - DNA, 99 bp, Homo sapiens
ctgatacccggatgtgaggcgatccgctggcgctagtctgaccctccgccaggcaaaaggaagacggaatcagtccccaatgcctggaaattcctcatt

SEQ ID NO: 868334 - DNA, 99 bp, Homo sapiens
tcctggccatggatgaggggcagtacgatggcaaagtggacgtctggtccttggggataacctgcatcgagctgggactacgacctctgcatcaactgc

SEQ ID NO: 868335 - DNA, 98 bp, Homo sapiens
gaagaggaaaatggaaagaagctcatatccggagatattccaggcccactccagggcagctgccactgcagagccccgccatggaagacacgccgttg

SEQ ID NO: 868336 - DNA, 99 bp, Homo sapiens
gtagaatcaaagctgatagagaagattcttctcaacatttctgcagactgcctcaacagagtgataggaaattccattcttcttctgacagccagacgg

SEQ ID NO: 868337 - DNA, 99 bp, Homo sapiens
gacgtacaatggtgggtgtgggggtagagatcagaacaggctttggggtaacctccttgtttatctataacagagtatgaggccaaaaatccgcgtcca

SEQ ID NO: 868338 - DNA, 98 bp, Homo sapiens
gcagccccccaatgcggccgcgagaagcagcgggggggcaggcgatcgaagatggtatacctcaagtttactatttcggcccttgtggtaaatacaat

SEQ ID NO: 868339 - DNA, 99 bp, Homo sapiens
ctggtccacatgcaataaaaacatcgtcatcaccaaaaaagtcttgcagacaagtaacattaggcctcagcctggctgccagatcataatacttctcag

SEQ ID NO: 868340 - DNA, 99 bp, Homo sapiens
cagaggtccaggcacagatggaggaggaatacctccgctcccctctctcaggggatgcagaaagcctcagtgttgctcttcctggcctgggtctgcttc

SEQ ID NO: 868341 - DNA, 99 bp, Homo sapiens
ctccaggcagccgacattctgttgtacaaatcatgcaacagatgagtgaccaccgctacgacaaactcactgtgcctgatgacatagcagcaaactgta

SEQ ID NO: 868342 - DNA, 99 bp, Homo sapiens
atcagtcaggtcattgagcagttacctcagccaaacaggacaagcaggcaacagctgaagctaataatcttgctgcagtagcaggagcaagagatacct

SEQ ID NO: 868343 - DNA, 99 bp, Homo sapiens
ccggggcatcgcgctgttggaaagcggctgcgtagacaacgtcctgcaagtcgatgtcatccatactgtagggccaatagccaggggccatattaatgg

SEQ ID NO: 868344 - DNA, 103 bp, Homo sapiens
gaggcccaaagtgctggaattacagcacccctgcagtggaccatgagtcggtaatgcccactgaggacctctgggagccatgtcagacgaatctgcctcaggg

SEQ ID NO: 868345 - DNA, 98 bp, Homo sapiens
cagggaccctgtgcaggcctgctcctccgtttgcaagtggtttccagtgacagtgacagtgactcggatcttagctcctccagcctagaggacagact

SEQ ID NO: 868346 - DNA, 99 bp, Homo sapiens
ccaccgcctctatatgaatctgcagcctgtcctgcgccatatccggaagctggaggaaaacgaagggaaggatcgaatcatatttgtaaccaaagaaga

SEQ ID NO: 868347 - DNA, 99 bp, Homo sapiens
ggccacacttgcagttacgacatatttttcttcaggtgaagagcctgtcttttgggaaaagacagcatttactttgctcttcttactgatatcgctgtt

SEQ ID NO: 868348 - DNA, 99 bp, Homo sapiens
tgaagggtctttctaaaatagaacgtgcaaatgcctgcaactcagaactccttaagtaacaaacgaaatgagccaggggcgtggaaaatatgacttcta

SEQ ID NO: 868349 - DNA, 98 bp, Homo sapiens
gtccgagcgacttctaggagcctggggttcggcgctatggaggagctcgatggcgagccaacagtcactggtgtacaactatgagcctttgacacagc

SEQ ID NO: 868350 - DNA, 99 bp, Homo sapiens
gcttattggaaggaactttccttgaagtataagcaaagttgccgaggtactgtctgaatgccgcctgctcgcctacatatcccaggtgcccacgcagat

SEQ ID NO: 868351 - DNA, 99 bp, Homo sapiens
gtcgccatcttggatccgcgggacaagaaaattcatgcggtagaaacctgtgggttcttgttgtggggcggtttccaaaggaacacagaattgggattc

SEQ ID NO: 868352 - DNA, 99 bp, Homo sapiens; identical to SEQ ID NO: 819573

SEQ ID NO: 868353 - DNA, 99 bp, Homo sapiens
cccaacaacagctcaatagcaaactacagcaacaacgagaacaaattttccggcgctttgagcaggaaatgatgtgccttccattttggccagaaagtt

SEQ ID NO: 868354 - DNA, 99 bp, Homo sapiens
ctagtcgcgggagccacgcagaggacgccggaacaccctggaagccgagaaatgaaacttgaggagaggctggagttctggatggagaaatacgataag

SEQ ID NO: 868355 - DNA, 98 bp, Homo sapiens
tggcagccccgctctctgcatagaaaagaaacgctttactgaagaggccaccaaatacttccgggagagagtcagcccagtgcatctgcaaatcctgc

SEQ ID NO: 868356 - DNA, 99 bp, Homo sapiens
ggacgatgtattggagaaggccaatttggagatgtacatcaaggcatttatatgagtccatttacaagtccttccactttctctctgaggcagaaagag

SEQ ID NO: 868357 - DNA, 99 bp, Homo sapiens
tgagatagtccagagcaacctctttaaaaagcaagtgaagctgtggtctaccaatctagacaactcagtggcaagcattgaggcaaaggctaatgtgtg

SEQ ID NO: 868358 - DNA, 99 bp, Homo sapiens
ggatggcggcggccgcggttgcggcggctccgggacgagtgagtggatcctgggaagcgctgtgaaatgggctgggacatctacgagagggcaagtgcc

SEQ ID NO: 868359 - DNA, 99 bp, Homo sapiens
gtcctcaactttgaagagatcgactacaaggagatcgaggtggaagagaatgtttccattggaattgttggtaaagacttggagtttacaatctatgat

SEQ ID NO: 868360 - DNA, 99 bp, Homo sapiens
atcgtggtaggctatgaccacgagaagccaggaaaacctattgtcaccggcgactgaactttctggaatccaagttcagccttcatgagatgttaaacg

SEQ ID NO: 868361 - DNA, 99 bp, Homo sapiens
ccggagcgccaccggcaaagaggtgttgcagaacctcggccccaaggacaagtcaagtccatcatctccagaaccagctagtcttcctgcagaagatat

SEQ ID NO: 868362 - DNA, 99 bp, Homo sapiens
accaacatcgatgggcggcggaaaatagcctttgccatcactgccattaaggagagcgaagaggaactttactcctcctgtcgccagctgaggaggcgg

SEQ ID NO: 868363 - DNA, 99 bp, Homo sapiens
catgtctgagactcctgctcagtgtagcattaaggaagctgtagagaaatatgaagaagtgctacataatttggaatttgccaaggagcttcaaaaaac

SEQ ID NO: 868364 - DNA, 99 bp, Homo sapiens
gacatatttttggacctgaaacagaaattctggaacacctatatggagggcaaagataaaatgttcctgatagaaaaattgatcaagctgcaggatatg

SEQ ID NO: 868365 - DNA, 98 bp, Homo sapiens
tgcccttgtggcgaatggggctcacgtcgagtggcagtagagaagagcatcacagaagttgctcaggagctgacagagctggtggaacatcttgtaga

SEQ ID NO: 868366 - DNA, 98 bp, Homo sapiens
ctaacttggctactggccgcaataattccatagtcaagagcatcacagtctctggtgtcacccccaaccacagtgccttttccatgcacgccctgctg

SEQ ID NO: 868367 - DNA, 99 bp, Homo sapiens
tctaagactctgggacactcctgaagtcgggaaatgatctattaatgagatgaagcggttggaagaaatgtcaaatatgtttcagagctctggagtcca

SEQ ID NO: 868368 - DNA, 99 bp, Homo sapiens
gtttccagggggatgttgacgaagatcttatctgccctatttgcagtggagtcttggaggagccagtacaggagaatggccaccagtccttactgagca

SEQ ID NO: 868369 - DNA, 125 bp, Homo sapiens
gctccctggaatttctcttattctgttaaacctcaagtcaccagattctgtgggactccagacttgaggtttaacagaataagagaaattccagggagcgccttcaagaaactcaagaatttgaa

SEQ ID NO: 868370 - DNA, 99 bp, Homo sapiens
atgcaaaggcaggggaggaagccacctcgagttttagaaagagcgttttcgctacgtaaagcacattcgataaaggatatggaaaatactttgcagctg

SEQ ID NO: 868371 - DNA, 99 bp, Homo sapiens
gaacctctgcaggagattccatttgttatcccacgacccatccttgaagaagcgagtaaccagctcataaatcacatcgaacagtttttggatactaat

SEQ ID NO: 868372 - DNA, 99 bp, Homo sapiens
ggaaagtgttctttatggctgtagatggtgtggctcctcgagcaaaaatgaaccagcagcgtgggaggcgttttaggaaagaccacagcaagattcttt

SEQ ID NO: 868373 - DNA, 101 bp, Homo sapiens
ccgcattggcagcgggagccgtccggaggacctgggacaccgcggaagtcgggaaatgcatgtcttggtcatggcttctctgctctgtgtctcccacctgc

SEQ ID NO: 868374 - DNA, 99 bp, Homo sapiens
cagttgttccagacaagcaggctaatactgatagagaattgtggccttgtttcctaaagatgtggaccgtctgagaaggatgtctctgatagaagagga

SEQ ID NO: 868375 - DNA, 99 bp, Homo sapiens
acggcttactgcagccttgacctcctgggctcaagtgatcctcccacctcagcttgtgaatctggattgggaaagtcgacattaatcaactcattattc

SEQ ID NO: 868376 - DNA, 99 bp, Homo sapiens
tcttgcaggtgtggtcattgctgacaatgaatacccatcccgggtggcctttaccttgctggagaaggctgcctgctgtttcccggggagatcatgaaa

SEQ ID NO: 868377 - DNA, 98 bp, Homo sapiens
ctgggccatggaaccggtagagacctggacccccggaaaggcttctgggaacttggcagacgcagcttagagagactcaccagcgagcgtcattgttg

SEQ ID NO: 868378 - DNA, 98 bp, Homo sapiens
agactgcaaatggaacaagtcgccacctaaggaagtcctcggcaattacgagattctgacttcctgatccatttgctaaggtggtggttgatggatct

SEQ ID NO: 868379 - DNA, 99 bp, Homo sapiens
gcagttctggaagcaagaatttatcaaaggaaagatggatccagacaaggaagccacagatgatggacataacaacaaccttcttcctcagattattca

SEQ ID NO: 868380 - DNA, 100 bp, Homo sapiens
tccccacggtcagaatttcattttctggacttcctgtagtcctggggccaatggaggttatgtgttcaagataatccctttggtcctgtctccaatcggg

SEQ ID NO: 868381 - DNA, 99 bp, Homo sapiens
gatgagcagagagctgtgaaatatctttggcttgcagccaacaatgggtttcactaggccagtacctgtgggctgcttctctagcagagaaatactgtg

SEQ ID NO: 868382 - DNA, 99 bp, Homo sapiens
cacgaatctgcccacccctcctgtaacccagcctgtttcacttcttgatatgagatcctgactccaaactccattcccaagggtttcatggacgggaag

SEQ ID NO: 868383 - DNA, 99 bp, Homo sapiens
tgctaaaatgctgggaggtgtctttaaaattgactggatttgcaggctaccaagcagtttctcgaagagattaacaagtggacagttcagtacaatgtt

SEQ ID NO: 868384 - DNA, 99 bp, Homo sapiens
gcgtctgcaccttcagaaacagtgctgaagcctttaaatgcagcatctgcgatgtgaggaaaggcacctccaccagagccatgtccattggagcccgtt

SEQ ID NO: 868385 - DNA, 100 bp, Homo sapiens
tgtctgtgtgatgatagtattggcatttataataatcttgaaagaaactcataggtccatagttcagtattataaatgccaatactatcatcacacagac

SEQ ID NO: 868386 - DNA, 98 bp, Homo sapiens
cgtgatatgttccagttgcacatttcctgcaaggactccaaagtggtgagctctattaccaggttttaaacttcgccatgatcgtgtcttctgcactc

SEQ ID NO: 868387 - DNA, 99 bp, Homo sapiens
cgccgagcggggcccgcgggcccatgaggaggcctggggaccatgggctccaggatcaatactatactggcaattgctggagaagattttgcaattgtt

SEQ ID NO: 868388 - DNA, 99 bp, Homo sapiens
ggtgatattaatactgacccatgggcaggttatcgatatactggtaaactcagaccacattatccactgaatgagtccctggaacgccagatgcgtgaa

SEQ ID NO: 868389 - DNA, 99 bp, Homo sapiens
gcagcaggagccaacaccggataaccttagcaatggtgtttgcttcctccttatacgcagcgagctcagtggaggaacttgactggccaacatgctggg

SEQ ID NO: 868390 - DNA, 99 bp, Homo sapiens
agagcaggtctcaggacagcaggggcagctgcctctctctctgaagcatggctcaggtatgcaaccactcatgtattcggttcaggaagcattaaatgc

SEQ ID NO: 868391 - DNA, 99 bp, Homo sapiens
atccagaagctgtcaagccagatgactggtcagagagcatgtgctgggatcactgtctgcagtcaccaccggcttggaggacgtgcagagggtgcagga

SEQ ID NO: 868392 - DNA, 99 bp, Homo sapiens
cccgcggtagatgatgatgatgaaggcatggagacctgtggttattggagatcatgatggggtagttatgtgctttggcatgaagaaaggagaagcagc

SEQ ID NO: 868393 - DNA, 99 bp, Homo sapiens
tgtagctggtgcgctgctcacggccattcactgcccatgctgagcgcctctcacacagggaagtctgttagaactgctgtgctgatcaacgggacgctc

SEQ ID NO: 868394 - DNA, 99 bp, Homo sapiens
actttccgaagagaccgagagagggagtcatggtctggagagacacgccaggatggagagagcaaaagagtgtggccatctggggccgtgtggtatttg

SEQ ID NO: 868395 - DNA, 99 bp, Homo sapiens
cagtggctctgggtccagccccttacttaaaggatcaactcactatcctgaaggtccattctcccaagaagaggggacagaaagacagatctatttgta

SEQ ID NO: 868396 - DNA, 99 bp, Homo sapiens
tgaagctcaccgagacggcgatccgggcgctcgagacttaccagagccacaagcatgtcagtgaaaaaaccagtgaatcgccttccaaaccaggagaaa

SEQ ID NO: 868397 - DNA, 99 bp, Homo sapiens
ggaagaaagctatctagggacgagatctagaatcaactgagagagatgcttaaaaatcaccagttactttaatgacactttcatttggacccgtggata

SEQ ID NO: 868398 - DNA, 98 bp, Homo sapiens
tcaaacgtctaccattacagtgggctacttctacaagtccgaacagccagtccagcaaaatgaacagcattgtctaccagaagcagttccagtcagcc

SEQ ID NO: 868399 - DNA, 99 bp, Homo sapiens
ccgagccacccgcccgcccaaggtctctcgcgggcgggagaacggaaaactcccaacttcctggaaaggcagcaacaggtggaagctgttgagttggag

SEQ ID NO: 868400 - DNA, 103 bp, Homo sapiens
ttccaaaggccaaaaatgtattcatgcgctgaaaaggctgaattacgaattctgaaggtggactctatgtatgcatgaatacatttttggcctttggaaggga

SEQ ID NO: 868401 - DNA, 99 bp, Homo sapiens
tgctggatgtgacttggcaaggagtggaagacaacaaaaacaactgcattgtgtacagcaaagtgtaaagctttctgatggaagagagctctgtctgga

SEQ ID NO: 868402 - DNA, 99 bp, Homo sapiens
accattttggcagctactaaccgtccagataggatagacaagataacaacgaacttgatgcaagtgataggtttgccaaggtcagacctctcatcatcc

SEQ ID NO: 868403 - DNA, 99 bp, Homo sapiens
agggaagtgagagttttattcaggctcagtacaactgtgcctggaaccagatgccctgtccgtcggcgctggtgtattgttgcagcatctggcagtgag

SEQ ID NO: 868404 - DNA, 98 bp, Homo sapiens
gaagctcatctctctccgggactggatgttagctgtgttggcctttcctgttggggttgtggctgtacttttgatgatggtccaggggcctgtgatta

SEQ ID NO: 868405 - DNA, 99 bp, Homo sapiens
cgagcagcccccactgccgcagcagacacagcctccagcaaaggttgtggcagcactgcctgaaggtatgagaccagattctaatctttatggttttcc

SEQ ID NO: 868406 - DNA, 99 bp, Homo sapiens
ccttggcttcccttgcaaccaatttggacatcaggataattctggcctcatagaacaagttgggaagtgttccctcctcccctattttctgaaagtttg

SEQ ID NO: 868407 - DNA, 99 bp, Homo sapiens
ctatactattgcagtgattaatgcgcttttcctgaaggctcctgatgagaggaggcagattaaaactttggaacagactaaagccattgaagatctaaa

SEQ ID NO: 868408 - DNA, 99 bp, Homo sapiens
tcccccgaggatctggaggcacagctgcagtctgacgagagggggactttgaacatgtcggggatcgccctcagcagactcgcccaggagaggaaagca

SEQ ID NO: 868409 - DNA, 99 bp, Homo sapiens
tcgacgtcggtgcttccagtgccaaaccaaactggagctggtgcagcaggaattgggatcgtgtcgctgcggtccatggctaatgaaacacagaaggtt

SEQ ID NO: 868410 - DNA, 101 bp, Homo sapiens
ctggggcctcgaggggagcgggggcagcatggccccaaaggagagaagggctacccggggattccaccagaacttcaggctggagtgcagtggtgtgatct

SEQ ID NO: 868411 - DNA, 98 bp, Homo sapiens
tccatgctgctttcatttttgtgatgactatgtacacacagctttatcatcggcaacacggaggtagtcacgtttcccggaaatccgaacacttgagt

SEQ ID NO: 868412 - DNA, 107 bp, Homo sapiens
ttgactactcgcatcgcgcactttttggatcggcatctagtctttccgcttcttgaatttctctctgtaaaggagatcctgtttgaccaaactcagagatcaattaa

SEQ ID NO: 868413 - DNA, 99 bp, Homo sapiens
cccctgcagcgactcggaagattcgaggcggcgggggacaagtcggcgccccagagcggacgaggagcttcaggatggttcgtactaagacatggaccc

SEQ ID NO: 868414 - DNA, 99 bp, Homo sapiens
aaggaaaactgggtgcagagggttgtggagaagtttttgaagagcatcatggcagaacaggatgtggaaaacgatcttttggattacgatgaagaggaa

SEQ ID NO: 868415 - DNA, 99 bp, Homo sapiens
gctgaaggggatcgtctaaaagaggaggaattcagaaaagcagctcagcaacaggaagaacaagaagaaaaggaggaagaggatgatgaacaaacactc

SEQ ID NO: 868416 - DNA, 75 bp, Homo sapiens
aaggagatcattgacctcgtgttggaccgaattcgcaagctgaagaagctcattcacacagaagacccatttaat

SEQ ID NO: 868417 - DNA, 99 bp, Homo sapiens
ggctctggtagaattgacatatctcaacacacgataaatctcatcaatcacctttttgttaaacgcccagattttgtcccactccatgttcacgactga

SEQ ID NO: 868418 - DNA, 99 bp, Homo sapiens
cggactctgggtgttttgctaccgtgaccgtttagagctgctgcaaccattgacagcttagcaagccgaattgaggatcctcagatacaggctcattgg

SEQ ID NO: 868419 - DNA, 98 bp, Homo sapiens
tacgcaagcccacggggagcagagcagcaactcacccagcacacaaaatggatctcttacggtactgcataagccgaccacagtataagacttcttgt

SEQ ID NO: 868420 - DNA, 99 bp, Homo sapiens
gagaaaaagaaatgatgcaattgtatatcagagtaatactgcattgcatgattgtgcagaatctggaagtttggacatcatgaagatgcttcttatgta

SEQ ID NO: 868421 - DNA, 99 bp, Homo sapiens
ggctgtttcctctacaccgaagatgtcagtacgccgctcagccaactgcttcaagctgctctcaatatccagacctttgagctcggcttcagtgccagg

SEQ ID NO: 868422 - DNA, 98 bp, Homo sapiens
ctcgctgtccctgcggcttctggggggtcctgtattaataggaagttcacatggtggtgtcaacattgaagatgttgctgctgagtctcctgaagcaa

SEQ ID NO: 868423 - DNA, 99 bp, Homo sapiens
aataattttccctttagaaggcattcctggatatgtgattcgcctttgccagtctcatctcgtgtctgctttgttaagttccatgatccagactcagca

SEQ ID NO: 868424 - DNA, 99 bp, Homo sapiens
ctggctggaaccgcacgaagacgtcggtgcgaaggctgtcgttcatgtaattcctgttcacagtaaaaggctgtcgagaaggctgctgctttggcatac

SEQ ID NO: 868425 - DNA, 99 bp, Homo sapiens
ctgcctcggaaggaggcaagacgtgaacgttttttggacggcgatcaggatggtgatgaggcgacatctcgaatcagcgatgcacacttggcagacaca

SEQ ID NO: 868426 - DNA, 99 bp, Homo sapiens
ctctgagttggcccccaatcgttattgccttttagtgttcatgtacttttgttgtgccatgttgtaccaggactgctcttccactgtgagagttacccg

SEQ ID NO: 868427 - DNA, 98 bp, Homo sapiens
aactttgtcagcagatggaagattttcttcaggacctcagcaatggagaatatccccatcatcacaactgtcatcactctgccgcacgtgattgtgga

SEQ ID NO: 868428 - DNA, 99 bp, Homo sapiens
gatgttgtcccgaaggtacgaaggcgaaatacccaaaaatatttgcaagaggaagaaaacagtccaccaagtgacagacagtacctgttggctccctac

SEQ ID NO: 868429 - DNA, 99 bp, Homo sapiens
ccaggaaaggaaatgctccacgcagttactagtgtctgaagatccaaaggaaggaggagctaccaccaaagagtcaggctggagtgcaatggcgtgatc

SEQ ID NO: 868430 - DNA, 99 bp, Homo sapiens
cctgagtcactgcctgcgcagctccggccgcctggctccccatactagtcgccgataatggattcatacccgattcacttctggaagatgtgatgaaag

SEQ ID NO: 868431 - DNA, 99 bp, Homo sapiens
gagaatggaacaaaccttacctttattggagacaaaaccgatggatcttctcctgaactcccaagtcttgagagaaaaaataaaagaaggaaaattaaa

SEQ ID NO: 868432 - DNA, 99 bp, Homo sapiens
atatgctggaatggttccttggtgtgggccgaagatatgctcatgtggtgttgaggaaagcagacattgacctcaccaagagggcgggagaactcactg

SEQ ID NO: 868433 - DNA, 99 bp, Homo sapiens
ctcgtggcctgcttcattgacatcgtggtggaaaacctggctggcctcaagtacagggtcatcaagggcaatcgtgttcgacgagtgtcacaaagccaa

SEQ ID NO: 868434 - DNA, 99 bp, Homo sapiens
tttcgaggaagccctggaaaaatatgggaaggatttcacggacattcagcaagattttctcctgctcgccggacggctcccagggagagcagacgcgcc

SEQ ID NO: 868435 - DNA, 99 bp, Homo sapiens
cgtgcctggcatcgagaagaactggagcaccgacctcaacatccaggagatcatgacgaccgtataatagacgctggccccaaaggaaactactctcga

SEQ ID NO: 868436 - DNA, 99 bp, Homo sapiens
caacgttttgctggcagcaggatcatgtgacttcaaatgcagtagtattattgattccacagaatacagccaacctccaggtttcagtggcagttctca

SEQ ID NO: 868437 - DNA, 98 bp, Homo sapiens
gattctcgacctgctaacagaactggaccttttcggggaaggaaagatacaacttccccaacccaaacccgtttgtggaggacgacatggataagaat

SEQ ID NO: 868438 - DNA, 98 bp, Homo sapiens
gaaaaagaagaagaaaataaaaaatggcagtaaccctgagacaaccacttctggtggttgccactcacctgaggatgattactacagcatcccatttc

SEQ ID NO: 868439 - DNA, 98 bp, Homo sapiens
ggagaaggaggaggagatgagttggaagccagaagatcagctgccatgttacttgactcacaccaaccctagagtggatgagattgtccttaagaacc

SEQ ID NO: 868440 - DNA, 99 bp, Homo sapiens
cagctgaaggaagagtggtaggagtgacccagcctcgaagagtggctgctgttacaaaagcatgtacctacatcagatctaaccttgatcccagcaatg

SEQ ID NO: 868441 - DNA, 99 bp, Homo sapiens
cttatctccacaggatacagcctggtacaatcctgagaacctggccaccctggagcgctatgtagagacgcaggccaaggaaaatgcctatgatctgga

SEQ ID NO: 868442 - DNA, 125 bp, Homo sapiens
caagaaaactgggtcagttttgcagatactccaccaaccagtactcttttaaccaacattctcctaaatccatgcgctggacagaagcaggatgcatggttaaaagagtactggttggtggagta

SEQ ID NO: 868443 - DNA, 99 bp, Homo sapiens
ttttaccactgcctggttgcagaagtgccgaaagagcactggactccggaagactgtgagaacattctctttgaagggaatgactaccaagctctttgg

SEQ ID NO: 868444 - DNA, 99 bp, Homo sapiens
tggaagaccacctgagtcaccagttaactatggtagcccacccagcattggatatgttcaaggaatgagtgatttactttcccctcttttatatgtgat

SEQ ID NO: 868445 - DNA, 99 bp, Homo sapiens
gtcccagcagaaacagcagcggcaacatgcggtaggcacaccatgacccagacatgaagggagatgctgagggcaaagtacacagctgtcaggatgatg

SEQ ID NO: 868446 - DNA, 99 bp, Homo sapiens
caccagcgcagctctcttgatttcacacattgtgcaatgtatgagaaagtgccagtcatcttggttgggaacaaagtggacctggaaagtgagagagaa

SEQ ID NO: 868447 - DNA, 99 bp, Homo sapiens
ccagaaatctttgaaaatatttacccaaaagcgatccaagcagcggaagttacagcagaaggccttccgcaagaggcagctgaaggagcagaggcaggc

SEQ ID NO: 868448 - DNA, 99 bp, Homo sapiens
gttgccagatggtgcaatgttcaaagtactcaagatgaatttgagatcataggtatattgaactgttcctgaattcatgtccaaaaggaaaataagact

SEQ ID NO: 868449 - DNA, 98 bp, Homo sapiens
gaagattcagaaaaggaagactattcagacagaacaatcagtgatgaagatgaatcgagaagactacagttttacagcttatgctaccatttcgtatt

SEQ ID NO: 868450 - DNA, 99 bp, Homo sapiens
ccactttggtggctgtggctgacagccggggctggaggggatgtatgatggccatgtaccttccagaaaagcaaattcatccacagcttctattgcatt

SEQ ID NO: 868451 - DNA, 99 bp, Homo sapiens
tgaagaggaaatgaagggtattgccgctgttactgatatacctttaggcactggtgaggtggattgatgatgaatcttctggcacacctggagcaactc

SEQ ID NO: 868452 - DNA, 99 bp, Homo sapiens
gctcacgggacacaatgccgacctctccttcctgcagggtgtccgcaatgttgccagtgtctgtctgcagattggctacccaactgttgcatcagtacc

SEQ ID NO: 868453 - DNA, 99 bp, Homo sapiens
agcagcgggtgacatggaaggggcagtacaagcttacgtctctgctcttcagtacaatcctggagcttactttgcctggaaagctacagcaatgggaaa

SEQ ID NO: 868454 - DNA, 98 bp, Homo sapiens
ctgagaaaagcgagaccgcgtgcgaggaccgggaaattcaactactgaggaggttacggcacaaaaatgtcatccagctggtggatgtgttatacaac

SEQ ID NO: 868455 - DNA, 99 bp, Homo sapiens
gaggacgtccatcccgtcgagaaccagtccgggatgtgggaagtgccaccatggcaactgcaccatacaactactcttacatctttaaatatattatta

SEQ ID NO: 868456 - DNA, 99 bp, Homo sapiens
gcccgcagaaggatcatgacgcccagggcgcacagcctagctccttcctttgcacaggatggctctgcggatggctgtaatcctagctactcaggaggc

SEQ ID NO: 868457 - DNA, 99 bp, Homo sapiens
aattatcaggatttgaaaacccagtatcagaatctaccactttgtacctgcaggctgggacaatgaaaagaaaatagctattttacatgaaaattttac

SEQ ID NO: 868458 - DNA, 99 bp, Homo sapiens
ccacgctgtgtcattagccttgttggagaccccgcaggaacctatgcaggtcacccggatggctcactggccactggctgctgaagaagctgaggatcg

SEQ ID NO: 868459 - DNA, 99 bp, Homo sapiens
tggatcctcattactgccaatcttttgtagatgtcagcataaaggatttccctcttgagaaactggcagacctttcacttcgtatccaacaaattgaaa

SEQ ID NO: 868460 - DNA, 99 bp, Homo sapiens
acggaggccaacacaacgacaactgcaactacgatggctacgccaactccatctacaccgtcaccatagcctggaggctgaagctcaaaagaagcagca

SEQ ID NO: 868461 - DNA, 99 bp, Homo sapiens
atagcctttctatacgaagaactaacagctcggagcaggagaggacgggactgccaagagacatgttagaaggacaaggcaagtgtccagagaatggct

SEQ ID NO: 868462 - DNA, 99 bp, Homo sapiens
cacgaaaatttcaagacacctcctgggggctgcaggggcggccaagtctccccagcgccaggtgcccccggccacacggcgtcgaccagaagattatga

SEQ ID NO: 868463 - DNA, 98 bp, Homo sapiens
ttcgcgaagctgccaaagccttagacaaggacttgaagttggacggaggaagacaatcaactggtgcagtgagtttgaaagagatcattggtctggaa

SEQ ID NO: 868464 - DNA, 99 bp, Homo sapiens
agtgcacggtcagcacccaggaacacgaagccccgggcaccttccgggtggagttcagtgaaagggcagatctgactgcagccatgagcagcaatgagt

SEQ ID NO: 868465 - DNA, 98 bp, Homo sapiens
taaccatgaacttcgaaacgtgataagaagcacctggatgagacatttgctacagcatcccacattaagtcaacggattgtggataatatgcctgtaa

SEQ ID NO: 868466 - DNA, 99 bp, Homo sapiens
gctcatccaccagcagctgagcaaggttggcttttaggacactagtaagaaaatatagttgtgatctgtgttacacaccaatgattgttgccgctgatt

SEQ ID NO: 868467 - DNA, 99 bp, Homo sapiens
ggtggcggcgtacaacggggccggtctgggcgtcttcagcagggcagtgaccgagtacaccttgcagggaggagcaccatactggaccaacacagaaaa

SEQ ID NO: 868468 - DNA, 99 bp, Homo sapiens
ctcctcctaggtactcatagcacaggctcaggaaattatagatgaccaagggctttgaggtacctgacagttccaaaacagctttattcagcttagaag

SEQ ID NO: 868469 - DNA, 99 bp, Homo sapiens
tgattctcctgcctcagcctcccaggagaataaaggcagccccgttgatgactgaaaatgacaaagcatccacctaacagacgaggaatcagctttgaa

SEQ ID NO: 868470 - DNA, 98 bp, Homo sapiens
aagatttttgctgtctctggcctcatttctgatcgggaagcctcatctagcccagaggatcggaatgacagatttttttacaggagtgggacaacgct

SEQ ID NO: 868471 - DNA, 98 bp, Homo sapiens
ctcgcttgggtgcccgcccttagcggcccggcgttgaattccgggaagtgggagcttcaggctcgctccgtgcgggctggacgtaaagaaagaagtga

SEQ ID NO: 868472 - DNA, 99 bp, Homo sapiens
gccggtgagggacctgcccagacctggagtttctccttggaccaagatgactgatggaaaactctccacctctacaaatggcgtagccttcatgggtat

SEQ ID NO: 868473 - DNA, 99 bp, Homo sapiens
gaagaagccaaagataaaaatttcaggatcaccattaacacttaaggctaatagctcgtcagcttgctaaaatccatgctattcatgcacacaatggct

SEQ ID NO: 868474 - DNA, 99 bp, Homo sapiens
cttcggtagctaccgaaacgctctgaaaatcgagccggaagatgagaatgtgcctactgctcctgatcctccaagtcaacatttacgtgggcatgggac

SEQ ID NO: 868475 - DNA, 98 bp, Homo sapiens
ctcaagatgctgcttactggtgggaaatcaagtcgtaaaaacaggtcaagtggaaagaggttggcctcagcagcaatgagggataattctttcaagaa

SEQ ID NO: 868476 - DNA, 99 bp, Homo sapiens
aggacgttctgccaaactcagatttcctggtgcatttttaccttgtgatgcacctgggattaaccagcgaggatcagacttaattcagtgcacaaatga

SEQ ID NO: 868477 - DNA, 99 bp, Homo sapiens
caggatttatcaaatcgagtcactgtcaatctccaaacgtccacaactatcccgatatggaagccgttcccctgttgctaaataatgtgaaaggggagc

SEQ ID NO: 868478 - DNA, 99 bp, Homo sapiens
gtgagagcattttggaagaggaaccacaagaaaatcaaaagaaacttttgcccttatcagtaacacctgaggactccttctcctcccccacgtcggcgc

SEQ ID NO: 868479 - DNA, 99 bp, Homo sapiens
ctcgtcgtggtgagcctcatgttacacggcgcaccccagactacttcctataaatttctcctgggaaacctgcctttagacggggtttcgccatgttgg

SEQ ID NO: 868480 - DNA, 99 bp, Homo sapiens
gactcgatccgcctgcctgcgcacctgcttgctgatagtccaactccaccgccaccacctccaccagatgacattcccatgtttgatgactctccacct

SEQ ID NO: 868481 - DNA, 99 bp, Homo sapiens
cagaaacaaaatgtcaacaaattgatgggtgctgtgaggagcaaaggccctgttgtccagtacacacaggatctgaccggtactggaacccagttcaag

SEQ ID NO: 868482 - DNA, 98 bp, Homo sapiens
gtgggatccacacagctcagaacagctggatcttgctcacactctttcaagagaagcttccttggatcacctgctgttaccagctaccacccataaca

SEQ ID NO: 868483 - DNA, 98 bp, Homo sapiens
ttcgccacttactttaatgagaagatctccattcctgaggaggagctgggacgatgccggagtgtgaaggagtttgagaagctgaaccgcattggaga

SEQ ID NO: 868484 - DNA, 98 bp, Homo sapiens
tcattgcaaaggaaggacaaaacctgaaagagctatatttggtgtcctgtaaaatcacagattatgggcagctgcaatgactctccgcacggtattat

SEQ ID NO: 868485 - DNA, 99 bp, Homo sapiens
aagcacacattctgcaaggccgtggaaacaaagggaggaactgtttgtagccctcgtccagacgccccaaacaaacagcatgaagacccccaacgcaca

SEQ ID NO: 868486 - DNA, 99 bp, Homo sapiens
ggcgatccgctggcgctagtctgaccctccgccaggcaaaaggaaggagcatctttccttgaagaagtacattattgacattgtggttgaaagtacagc

SEQ ID NO: 868487 - DNA, 99 bp, Homo sapiens
acaaacaaactacccattttcttttttggaactcatgagacgtcctctggtgatgttcttgagacgttcaatttcttagaaaatgccgatgacagtgat

SEQ ID NO: 868488 - DNA, 118 bp, Homo sapiens
tgggacctggcaaagtacttcagaacttttattccttccagaagcagacattccactgcccttctcccaaaaagatgtcttttcgaaaaatggatcccagctgtacaataggatttta

SEQ ID NO: 868489 - DNA, 99 bp, Homo sapiens
gggagaagaggaggatgcggctcgtggtggatggcatggggcgctttggcaggaaagtggagaatgaggacatgaataaagaccagatcttgctggaaa

SEQ ID NO: 868490 - DNA, 99 bp, Homo sapiens
agtaaatgaggccattacaggaactgaagatgtcaagaatcatgtcaaccctgccatggacttcacgcagactccacctgggatgttggctctggacaa

SEQ ID NO: 868491 - DNA, 99 bp, Homo sapiens
ccatggacatcatttgcaggtcatacctgcttgggtgacagattgactgggatcccctcgcacatcctcaacagctccccatcagaccggcagattaac

SEQ ID NO: 868492 - DNA, 99 bp, Homo sapiens
agcacagatttatgtaatgtcaactttactgagaattttccacctcctgacacaacaccactcagtagtgaaaagagaatactgaagaataggatctca

SEQ ID NO: 868493 - DNA, 99 bp, Homo sapiens
tgaagtaaaaaggctacaagaaaaattggtttgcaagatgaaaggagaaggggttgaaattgttgatagagatcttcaggatttattccgcaagactgg

SEQ ID NO: 868494 - DNA, 99 bp, Homo sapiens
tctggtcatactaaagaacacatctggaaggagtttcataatagaagagcagagtttcttactatgtgaagatcttctctatggaagaatgtcattcag

SEQ ID NO: 868495 - DNA, 98 bp, Homo sapiens
aagagatcaccgacaagatcaccacggacgagatgatcaaacgcctgaagagagaaaaggaacagttccgtaagctctttattggtggcttaagcttt

SEQ ID NO: 868496 - DNA, 99 bp, Homo sapiens
aaaaaggagagaaaggggaaaaagggggtgaagaatattgatgatgttaagaagttcaaaccgggttacctggaagctactcttaattggtttagatta

SEQ ID NO: 868497 - DNA, 99 bp, Homo sapiens
gtgtgaggagcagcgcttacggaaactgcatgctgttgtagaaactctagtcaaccataggaaaggtatatacctccggataagagggaagaaaatgac

SEQ ID NO: 868498 - DNA, 99 bp, Homo sapiens
gccaatgtttctcttttggccttgttaataaactgctcgaggccctgcctcctttcttcgatgaaagactcctcaaagatcccttcatctcctcggaaa

SEQ ID NO: 868499 - DNA, 99 bp, Homo sapiens
ccaggagaggacgcggccagagatgggctcctgcccttgaacccctgctggggtggaagcaggcaggatgacgcaaaacacggtgattgtgaatggagt

SEQ ID NO: 868500 - DNA, 99 bp, Homo sapiens
tccttggaagcagaacccatagaactcgtggaaactggtatctcgggggagctttgtgccttgatggatcaagttcatcatatgcagcactcaaaatgg

SEQ ID NO: 868501 - DNA, 99 bp, Homo sapiens
ggcgccacctggagagaggccgcgtcctgggcagagcgattattggagccggaattggtggcacttcagcagcctattacctgcggcagaaatttggga

SEQ ID NO: 868502 - DNA, 99 bp, Homo sapiens
ctatgttctcctgcttgccatcaatggagtgacagagtgtttcacatttgctgccatgagcaaagaggaggtcgacagacggagtcttgctctgtctcc

SEQ ID NO: 868503 - DNA, 99 bp, Homo sapiens
cagaggctggtttcagaatggaaagacctttgccgagtggtaaacgaggatgtgggctctcttgatgagaagatgaagagcttggatgtgaatcaggac

SEQ ID NO: 868504 - DNA, 99 bp, Homo sapiens
agtcgactccctagcagcagccgccgccagagaggcccgcccaccagttcgcccgtccccctgccccgttcacaatgtctcaagattctgccctccaag

SEQ ID NO: 868505 - DNA, 99 bp, Homo sapiens
ctcttcggacaaaggggcagaaatctctacactagggctaaggctgcttggcagtgtctctgaagtcacagtagagcttggaaggctggaaatctccca

SEQ ID NO: 868506 - DNA, 98 bp, Homo sapiens
gttgctgcctctgtgtacgctgaggggggagtgtgctggagaagagaaacgagttggcacacgcacagtgtttgttggcaatcatccagtttcggaaa

SEQ ID NO: 868507 - DNA, 103 bp, Homo sapiens
aattactgaaacaggatggggtgaattcgaaataatcatcaaaatatttttcattgaccctaatgaaagacctctcagggagccaatggtactctggagaacc

SEQ ID NO: 868508 - DNA, 99 bp, Homo sapiens
tggggtaggaaggagacacagttccatggatcagaaggcagacaagcagcttttcagatgcaaatgtggccttgttcccagtgtaccagatgacctgga

SEQ ID NO: 868509 - DNA, 99 bp, Homo sapiens
acgatgatgaacagtatgcttgggagtcttctgctggaggttccttcactgtgcgtgctgaccatggtgtgctgggcatcaaggtgaagatcatgctgc

SEQ ID NO: 868510 - DNA, 98 bp, Homo sapiens
tccggacaaagagtcaaggtggggagccaacatacaatgtggctgtcggcagagctggtagagtgcatctgggggaggtgttgtagccattgacaaca

SEQ ID NO: 868511 - DNA, 99 bp, Homo sapiens
tggaagctcgggcgggggagcggggcgcggcgggaaggagcgggcgacccggtgtgtgggccagcggagctccgggaagtgttcgccagttactacatg

SEQ ID NO: 868512 - DNA, 99 bp, Homo sapiens
aagtggctggggggtgcagtggaggattacttcatgcgcaatgggtggatccatgctgtgctgacgcctgtggactgccttgcctttggagggaacttc

SEQ ID NO: 868513 - DNA, 99 bp, Homo sapiens
tttcctagaagcttgcagaaaaattggtgtacctcaggctctttggtgtaacgggaaactgcgctgcctgtagtaagctcatccctgcctttgagatgg

SEQ ID NO: 868514 - DNA, 99 bp, Homo sapiens
cacctttccatcctccaggtttcaaaatagcagtgtcagtgtcataatatcacccttccactgagtactgccgacagctcaagaagtcagttaggcatg

SEQ ID NO: 868515 - DNA, 99 bp, Homo sapiens
aatggctgaaggaaaacctccttatgctgatatacatccaatgagggtgcaagaattgtttatccgtgattatggagagatttttaatgtccagttacc

SEQ ID NO: 868516 - DNA, 99 bp, Homo sapiens
acatcacagttgtctgcaccctgttgtggctctataagcagatctcgacatggcaggagctgaggcagctgcaggagcagatccggagcctggaggaag

SEQ ID NO: 868517 - DNA, 98 bp, Homo sapiens
tgtatcgttttgagaaccagacaggcttccctccccctgatagcagatttgatgcctactgctttaaacatgggagacctttaactctgaaggacata

SEQ ID NO: 868518 - DNA, 101 bp, Homo sapiens
gcgggactaagagagccgaggtcgctccccatccactctcacaagattggccagtgttcagtgacctcgataacatggcatccagagaccatgatcatcta

SEQ ID NO: 868519 - DNA, 99 bp, Homo sapiens
ttccttgggcaatggtgaatttgaaaagtcttgttactacagctataattcaaagaggaactttaagaaaaggctctgttctggttgctggaaaatgtt

SEQ ID NO: 868520 - DNA, 99 bp, Homo sapiens
taatcctgacgaaattgaaattacctccgagggaaacaagaaaacatcaaagaggtctagcaaaggttcttcacacacccccattcggcgtagtaccca

SEQ ID NO: 868521 - DNA, 99 bp, Homo sapiens
ctggatcatggctgccgcgccgccgctacgggaccgcctgagctttctacaccggatgcacccactgggcctatgtaataacaatgacgaagaggactt

SEQ ID NO: 868522 - DNA, 99 bp, Homo sapiens
acaataagctcttcagggaggaattcaacgcaaccccattccagctgccattgaagaaatgcgcggtggtgggaaatggtgggattctgaagaagagtg

SEQ ID NO: 868523 - DNA, 98 bp, Homo sapiens
aaactgccgccgctctgccacggtctgcccacccaacgcgaagacggtaacccgtgtgactttgactgggtcctggatgcctcatcccttagtttcaa

SEQ ID NO: 868524 - DNA, 99 bp, Homo sapiens
cctggttaaatccagagtgataggcacgaggaaatgtcacaacaaactcgccagcacactgattggtcctgtacacctgtaatcccaacactttgggag

SEQ ID NO: 868525 - DNA, 99 bp, Homo sapiens
tcactttcagtgagtcatcgctgacagctgaggaagtctgcatccacattgcacataaagttgaccattaaaaatctcaagtgacgactttgggaaact

SEQ ID NO: 868526 - DNA, 99 bp, Homo sapiens
agcatgaccagaagtagaaaattcctcttagccaccaggtggcgatccttcacttccgagcgctcaaaccagacgtgtgggcaggccttcaccatggct

SEQ ID NO: 868527 - DNA, 99 bp, Homo sapiens
cctgtcttgcgttcctgtgttttctaatgcacgcccgagatctggcatttccttgtgctcataatgagaatagttctccaattagccaagatgaacctc

SEQ ID NO: 868528 - DNA, 99 bp, Homo sapiens
cctgtaccctgagcaccagcatcgttgtagagaggaggtccgcgagatcctaggggaccaggacttcttccagtgggtctcattctgtcacccaggctg

SEQ ID NO: 868529 - DNA, 99 bp, Homo sapiens
tttctgagcatccctgcaatgaagagaacccagggaagttcctttttgaagtagttccaggttctcctgaaaagaaagctgaacattcatctataaatc

SEQ ID NO: 868530 - DNA, 102 bp, Homo sapiens
caaaaataacataattgaaggcagtaaaagtgaaattaaataggaagatcatcagtcaaggaagacccactggagaggtcttgctctgtcacccaggctgga

SEQ ID NO: 868531 - DNA, 99 bp, Homo sapiens
tcccaactccagaagacaaccttgaccattacagagatttgtactgtgttcgcagtgacctggggaacctgctcaaagccctgggtcgcttggaagaag

SEQ ID NO: 868532 - DNA, 99 bp, Homo sapiens
gatgtgatgttggagaactacagaaacctggtctccctaggtgtggatgaggtcaccattgtcaacattttgaccaaccgcagcaatgcacagagacag

SEQ ID NO: 868533 - DNA, 99 bp, Homo sapiens
tttgctaaagtcagtgatgtgaaaagacttgaaatgggtggttggaggcaaagtaaagaagcccggtaaacgtggtcggaagccagccaaaattgactt

SEQ ID NO: 868534 - DNA, 99 bp, Homo sapiens
taaaaacaaagaggattttgagaagcttagtgatgctgaccttgccggaccactgcagaaggagacccagaaattacaagagatgagggcccagaggcg

SEQ ID NO: 868535 - DNA, 98 bp, Homo sapiens
cacaactactgcgtgattctcgaccctgtcggaccggatggcaagaatcagctggggcagaagcgcgtggtcaaggaatcagagatcattgatttctt

SEQ ID NO: 868536 - DNA, 100 bp, Homo sapiens
agagaggcatcctccttgaagtatttggtatcaacattgtcatcaatgcaagctgggattgaaaactcctcagccaaatacttcaaggaggatgcctctc

SEQ ID NO: 868537 - DNA, 99 bp, Homo sapiens
aattttcagaagcacatgtattataacaggtgctgattggacatatctcaaagaagatgaacaaacagactttccctgagcactgtagtttgtgtaaag

SEQ ID NO: 868538 - DNA, 99 bp, Homo sapiens
ctgagtccacgggaagccatacacacctcaccacgtgctgaggcctgtcccggtgcgtgttcacagcagccacgttcaggaatatggactccactttac

SEQ ID NO: 868539 - DNA, 99 bp, Homo sapiens
tctacatagacgacaccctgacggccaatggccatgtgtctcaggatcaagaggaacccgtctacctggagagcgtggccagagtacctgctgaggatg

SEQ ID NO: 868540 - DNA, 99 bp, Homo sapiens
cagaaatgtatgtttaggaaaggtttcatgtaatacctgataagtagctgcatctagatttgatagtgccacatacagtaaattattctgaagagtata

SEQ ID NO: 868541 - DNA, 99 bp, Homo sapiens
caaacttgtaaaacctggaacagcagcatcattgtcaaagcacctccaaggtttacacgaacacccgttgatcagacaggggtctctggcggagttgcc

SEQ ID NO: 868542 - DNA, 99 bp, Homo sapiens
ctaattgtatatactgtggtggagatgaatacagctgcagatatcttcaaacagtatatgaagggcttgcccaatcaccattggagaataacttttatt

SEQ ID NO: 868543 - DNA, 99 bp, Homo sapiens
atggaagggcatggcaagactccacctcctggtgaagaaagcaaacagtttgcctgcaatgagatttcattctctacatttaaaggacatcctttctga

SEQ ID NO: 868544 - DNA, 99 bp, Homo sapiens
agtagctgaccttcagcctcagctaaagattgacaaagctgtggcctttcagaatccgcagactcgcatgcccaagagaatcgtaaatgcaaaaattgc

SEQ ID NO: 868545 - DNA, 99 bp, Homo sapiens
ggagattctgcggacattcagtgaatgtggtggaggcacttcaggaattctggcagatgaagcagtcccgtggtgctgacttaaagaatggggctctag

SEQ ID NO: 868546 - DNA, 99 bp, Homo sapiens
ccaagaatacgctcttcaagaatagaggacatctcagcagtccctgcacttctgtagctcagatctccgagaattttatctccaacttttcgaagtttc

SEQ ID NO: 868547 - DNA, 98 bp, Homo sapiens
cgtcggccgccgtcagcgagggcgccgagcaacttcggaagaaggtagataatgactataatgcccttcgagaaagactcagcaccttgcctgataaa

SEQ ID NO: 868548 - DNA, 99 bp, Homo sapiens
agtgatgcttccgtctcagccttctgagtagctgggacaacaggaaagaccacagcaagattctttcattcgtctcctcctagcctgggggaccaggct

SEQ ID NO: 868549 - DNA, 99 bp, Homo sapiens
gaaagatttaccactggagtttgacttcctcttttcacagtctcaagcagaagtgatctctgggaagcaggaagagattcagaatatacccccctggac

SEQ ID NO: 868550 - DNA, 99 bp, Homo sapiens
tggaaatcagcgcggagttaccccagacccctcagcgtctggcatctaccatagcccagtggcgtaaagctggctaccaggacatgcccgagtatgaaa

SEQ ID NO: 868551 - DNA, 99 bp, Homo sapiens
gcttctcagaagacagagggttttcttttgagctgcaggtctgttggagtttgctggaagtccactccagaccctgtttgcctgggtatcaccagtgga

SEQ ID NO: 868552 - DNA, 98 bp, Homo sapiens
tcgtcatcctgctgctgaagatctggaagacgcgctcctgcgccggttttgaggttttgctgaagatattcctgaagaatcatcccaggtgccacact

SEQ ID NO: 868553 - DNA, 99 bp, Homo sapiens
ctctcttctcagataaactacttcgaatctctagagcctgtttgcctttggtaaggtgacacttacccatatccaatcctgatgtcactcctgaatccc

SEQ ID NO: 868554 - DNA, 99 bp, Homo sapiens
tgagtggtcattgaagataagaaaggaaatgagagttgttgacaggcaaataagggcatcctccaggacaaatagcaaggaaatacagttcctgctcca

SEQ ID NO: 868555 - DNA, 99 bp, Homo sapiens
aaagagtcacctaaagttaggcggcactccagccccagctcggtctcccatttttctaagtatggccttcaggattctgatgaagaggaggaggagcat

SEQ ID NO: 868556 - DNA, 99 bp, Homo sapiens
ctgggcgacagagccagactccatctgcatgggaacctggacttctgctgagaggagaaatggagagggccccatggccctcggtgctggtgggaccca

SEQ ID NO: 868557 - DNA, 98 bp, Homo sapiens
ctcaagcacacccaatggacagcatgcctcaccaagtcacatgacaagcagtgtacacttaaagcgttctgggaatatgaatcccttctgcaccctgg

SEQ ID NO: 868558 - DNA, 99 bp, Homo sapiens
cctgggagacagagcgagactccatcttgaattctgataaccattcttccacaacacaacggtcagttcccagcattttcttttaccttctactcctct

SEQ ID NO: 868559 - DNA, 98 bp, Homo sapiens
tccaccaccgtcagctcggccaggtcatggctccgatcttcatcttgaagaagagtgacattgggtgactgctgcttggaaaactgtccacacttgct

SEQ ID NO: 868560 - DNA, 99 bp, Homo sapiens
gtcttcgaacttgtgcacccgttgcagtccttcagggccattcagcttctattacttccatacagtattaattttaaagacccacagtttgctgaagat

SEQ ID NO: 868561 - DNA, 98 bp, Homo sapiens
ggccgcgcggctgactgcgactcgggagctccgggagcggcccgcgcagaaggcaagctccagttgcagctgtgtttgcagggagtccacagttaatg

SEQ ID NO: 868562 - DNA, 99 bp, Homo sapiens
gattcgagacctggctcagtattctagtaatgatgctgtcgttgagtgggaatttcagattggaccttgtgaaggaatcagcatgggagatcatctctg

SEQ ID NO: 868563 - DNA, 99 bp, Homo sapiens
gattgtcaatgaggcagatcagattccgatttgacgggcaaccaatcaatgaaacagacacacctgcacaggaggtgctcccctcatctggaggccctg

SEQ ID NO: 868564 - DNA, 99 bp, Homo sapiens
tatctttgattctccatatcacctacagtatgactatgaatatgatgaaaatggtgacagagtcgttttaggaaaaggcacttatgggatagtctacgc

SEQ ID NO: 868565 - DNA, 99 bp, Homo sapiens
tcgcataagagcaaagaatactattgttgccacaggtggatgacaatcgagcagcagaagaatggtgtgcctaccctttaatgctgcagtttaagagaa

SEQ ID NO: 868566 - DNA, 99 bp, Homo sapiens
agagatctctaaaaaagtggctcagattcagaatgatgatggtgtgagcatccccggggagtacacttcctttctggctcccatctcttcctccaagct

SEQ ID NO: 868567 - DNA, 98 bp, Homo sapiens
tgagaacgggactgctgagagaggagctgggaggagcactgcaaatttcactttggacacgtgagtcagaggtttacccaaggtccagcctagcccct

SEQ ID NO: 868568 - DNA, 99 bp, Homo sapiens
gcgacctcgaaaatttccttttaaacatgcatcacagctgacacctccaccactgactggctgccatctggattgatccggaaagatcccatctgaatg

SEQ ID NO: 868569 - DNA, 99 bp, Homo sapiens
gttccattagttgctattaggtacaaggcatctgcattgtcactactgggccgagaagcatctccactgctacagtcagtcctgcccagtacatctcca

SEQ ID NO: 868570 - DNA, 99 bp, Homo sapiens
atgctaggacttgatggatcactagtttttctggtatatcgatacagcaaatgctttggagcaagaaactaaactggggttacgacggtttgaagtttg

SEQ ID NO: 868571 - DNA, 99 bp, Homo sapiens
ggtgaatgctgctaaaaacaagactggggctgctcccatcattgatgtggtgcgatcgggcagctgcaatgactctccgcacggtattattgtcattgc

SEQ ID NO: 868572 - DNA, 99 bp, Homo sapiens
aggaggaagaagaaggtgatgggaccgaatgctgatgtttgaagaactttcagatatcttctcagaccataataaccatttgaccagccgagaactact

SEQ ID NO: 868573 - DNA, 98 bp, Homo sapiens
gaacaagctgagaaacaaagtagaaactttgaggacattgtagccgaaagatatggggaaacaagagctacagtggatctattcaaagcttaacttct

SEQ ID NO: 868574 - DNA, 98 bp, Homo sapiens
aggcgccggccggctgcgaagacgcggtgggccgcccctccggctgaccggttccctgatgtgttacctgcttctgctactgatccaaactgcagaac

SEQ ID NO: 868575 - DNA, 99 bp, Homo sapiens
cttcgatatcaccaacggcgtgtcttccatggcggggctctgcagtggcagctgcatctctcctttctcatcaggtttagctggttttgcagcttctgt

SEQ ID NO: 868576 - DNA, 99 bp, Homo sapiens
atcgagaccatcctggctaacaaggttagctcccagcgatgccagatgggatcagcacagccctgcctctgctgctaattgttcctctaaagtaatcgc

SEQ ID NO: 868577 - DNA, 99 bp, Homo sapiens
ttaaactgggttttccttacttatactgtcatcagggagactgtgaacatgtcattgtcattactgacataagattctgaggttgggaccaagaaggaa

SEQ ID NO: 868578 - DNA, 116 bp, Homo sapiens
ttcctgcaatgattattggcattcctgtgtatgtgggccgcaagaatacatttgacatcgccaccaagaaagcttatctggacatatttctgcccaatgaacagagtattagaatc

SEQ ID NO: 868579 - DNA, 99 bp, Homo sapiens
atccagatggcagccagtcagtggtggagtcgttccccatcaggaagtcctcgcagaagtgcaagtcctgaaagaatggactgaagctctcaagttcac

SEQ ID NO: 868580 - DNA, 99 bp, Homo sapiens
tcctcatcaactggggatgattacagttcttcctaaaaaagggtattctggcaatgaaaccacatttcctgaaaataaatgtatctgaacttagtttat

SEQ ID NO: 868581 - DNA, 99 bp, Homo sapiens
ctcacatagaaaaagtagttatcattgggttggaggttaactttcagctggagtcctttgattccagagaaagatctggctcagagggtcctacgccca

SEQ ID NO: 868582 - DNA, 99 bp, Homo sapiens
gggccggcgcggcgatgatgaacaggttccgaaagtggctctacaaacccaagggtgcaacaccggaggatttcagcaacctcccacctgaacaaagaa

SEQ ID NO: 868583 - DNA, 99 bp, Homo sapiens
attttctgaatctgtcaaattaagttccaatgcataagaccgcacagctcctcctaccaacaagtagctgttgggaaacagtgtttttgcttgcataag

SEQ ID NO: 868584 - DNA, 99 bp, Homo sapiens
agctgaggcccgcggagaccaggggtcacgagaagagaatgccttctagatgcaaaatcacctccaaaccagaccacttttcttgacttgcctgttttg

SEQ ID NO: 868585 - DNA, 133 bp, Homo sapiens
cttttaggagtacccgccaacaagcgggaccgagcagacatcagcagcacctcctgagagcccctcatggcctgtgcctccaggcggggtggccttctcctctgggtggcctgttcccagatacggattcctg

SEQ ID NO: 868586 - DNA, 98 bp, Homo sapiens
tccccaggtctgcagggaccgagggcctacactgcctcctcccacgccgtgcttagggtgcgcacgaagaagcaggagctctcggaggcagagcaggc

SEQ ID NO: 868587 - DNA, 99 bp, Homo sapiens
ctgggcaacagagtaagaccctgggaggtggtgaggggctggtcccccctgggctggaggagagtggtgggggcacactgccttcggtgggcaggaacc

SEQ ID NO: 868588 - DNA, 99 bp, Homo sapiens
gacgacctgtgccgcaacatggacgcgctcagcgagtgggactggatggagttcgatgagaacgggattcccagtagtccccagaaagtagctctgacc

SEQ ID NO: 868589 - DNA, 99 bp, Homo sapiens
agcacagatttatgtaatgtcaactttactgagaattttccacctcctgacacaacaccactcaagcacaaagttatcattgttgggctggataatgca

SEQ ID NO: 868590 - DNA, 99 bp, Homo sapiens
attcccgggaggggggagcggcgttggaggccaccgtttccagaacattctagtatgccagtagaaaaaaatatcactttagaaaggccttctaatgta

SEQ ID NO: 868591 - DNA, 99 bp, Homo sapiens
gcagcggcgacccctcggcgccgatgtccctgatccctggagcgacgacggccgctgcctaagctggaaaacctgtcatttactccatcctttatagtg

SEQ ID NO: 868592 - DNA, 99 bp, Homo sapiens
gtcttctgcatttacactcgcagttaatatcatagcaaagaaagttgttgaaaatgataaatttccctctggagggtctcattctgtcacccaggctgg

SEQ ID NO: 868593 - DNA, 98 bp, Homo sapiens
cctaatccaaagactgtggaacttttaagtggagtggtggatcagaccaaagatggccttagattgtaagcaaaagaaatcaaggtcaagatctggaa

SEQ ID NO: 868594 - DNA, 99 bp, Homo sapiens
tggtcctgaaatatagaggcctgattaaatactggtttcacactccaccaagcatcccattacagatagaagagctgaacatccatgtgggaaacattt

SEQ ID NO: 868595 - DNA, 99 bp, Homo sapiens
agccagcagctcgctcagtacaagagagaggatctgacgaactactctcaggcagtgttctcagtagtccgaactctaatatgagcagcatggtagtta

SEQ ID NO: 868596 - DNA, 99 bp, Homo sapiens
tctatccctcctgaaactctaccctccaggggatgaggaagaagctgagctgtctctcttgctgcacaacgtggtcctgctctccaccaactaccttgg

SEQ ID NO: 868597 - DNA, 99 bp, Homo sapiens
aagtaggggtgcacctcagcactatcccaagactgctggcaacagtccccagaagaccatgtctgtgttgagctgtatctgtgaagccaggcaagagaa

SEQ ID NO: 868598 - DNA, 99 bp, Homo sapiens
catctactgtctttttcttcaatgggcagcatatgaaagtggattatggtcacttcagctttctccggggcaatacaacgtgcttcctgcaccagttcc

SEQ ID NO: 868599 - DNA, 99 bp, Homo sapiens
cagagggcgagccagggtggagaagagccagcccagagagctcagaaatatgctcagcaagtcttgcagaaggaatgtcgtcccaagtttgccaagaca

SEQ ID NO: 868600 - DNA, 98 bp, Homo sapiens
accgccagatcaacctggagctctacgcctcctacgtttacctgtccatgggccttgatacaaagcatgcttgaaaaatgcgatcggtttctctggtc

SEQ ID NO: 868601 - DNA, 133 bp, Homo sapiens
gccagaccatgctggccggggtgcagtaccccagctccatcaacctcacgctgcacctggaagatgcctctaatggaggagtttctgagcagcacccctggcccagtggctttgaaagggagctcaaaccaga

SEQ ID NO: 868602 - DNA, 99 bp, Homo sapiens
tacaagacgctggccgcgggctccatcagcatggctgaggcatacttctccgccttcccaccacccggattcatagtgtgaattcctgcccggccctga

SEQ ID NO: 868603 - DNA, 99 bp, Homo sapiens
gaaccaccaaaagtccattatgaaactgtgcctccaaagccattacacctgcagaattcaccttcgtccaatatacaccaaacccccaggcataaagct

SEQ ID NO: 868604 - DNA, 99 bp, Homo sapiens
ggagaagtgtccggggtagccccgttacagggcgagctgaggatcagtgtcctgcctgcctacctgtcctatgatgccccatggcctgtcaggaagatc

SEQ ID NO: 868605 - DNA, 99 bp, Homo sapiens
ggccagcaggaggctgatgaagggcttccgagtggacctgccaatcaagtcggcccgctaccgtggccagtacaacacctatcccatcaagctcttcta

SEQ ID NO: 868606 - DNA, 99 bp, Homo sapiens
cctcccaaagtgctggaattacagcaggattcctggttttcaagcctgagctgatctctcggctggagcagggagaagagccatgggtcctcgacctgc

SEQ ID NO: 868607 - DNA, 99 bp, Homo sapiens
tggtatctgtagatggctacatgaacatgcaggccatccactgcagagcaatccttccttgtcaggacactccttctgtgaaattaacctatactgcag

SEQ ID NO: 868608 - DNA, 101 bp, Homo sapiens
gcctctcaagtagctgggactacagaaaaagaaggggagcgttcaattccaaacagctgctttatttggagaaataccgacctaagatgcgattacgcttc

SEQ ID NO: 868609 - DNA, 99 bp, Homo sapiens
attgcataatggatggcttgtcctcaaatgggcccgggacttgaaaatactggaaatctgtccggatccaaattattttgcaagccagatgagtaacca

SEQ ID NO: 868610 - DNA, 100 bp, Homo sapiens
ggcctcggcctccccttggattctacaatgcttgccagactggaaccagggttgcaggacctgggcgaatcggcgtctgaatccaaggggaggccgaggc

SEQ ID NO: 868611 - DNA, 99 bp, Homo sapiens
gttgccaagcacttacattgaagggttgccccaaggccctacaacggcagaagagactgttcagaaagatttagcatgtagactgctggggcaatcaat

SEQ ID NO: 868612 - DNA, 100 bp, Homo sapiens
gataaagatggcatccccgtgagggtcacgcgtgggtcctctccgggctcgggagtagcatgccgctcagcctctgagctcacggggatgccatctttat

SEQ ID NO: 868613 - DNA, 99 bp, Homo sapiens
agcgcttcctgcggaccggggcggccgtcagccccatgcaatcattcgtcataccattagatctacaaacaggaatgccagagctgaacggacagcttc

SEQ ID NO: 868614 - DNA, 99 bp, Homo sapiens
tcatttgaggagtgggaacaggcttcggcgaacacaaagtggagtagggcgaaactggggctgggcatctgcaggtagcagcattctggctgaatttgg

SEQ ID NO: 868615 - DNA, 98 bp, Homo sapiens
ccagatggtgttacctggagcttaaaaagctgcacgcaagtgttaaacttctgagagaagaagaaggaggttcctgctgtgccagaaacccttaagaa

SEQ ID NO: 868616 - DNA, 99 bp, Homo sapiens
gctactactggagcgcgccggctccctatctgggaaacaaatatggaccaatatttacagtctttgctatgggaaaccgaatgacctttgttactgaag

SEQ ID NO: 868617 - DNA, 99 bp, Homo sapiens
tttgctgtgaggaaggctcggcgttactccgcctccttacctgcacctgtgaagctcatcttacctgccctggtcacttgcagatatttgatatgtttg

SEQ ID NO: 868618 - DNA, 99 bp, Homo sapiens
agaagtgggggtcctcctcctaagagatctgcaccttcaggaccagttcgcagtagcagtggaatgggaggaagagtatacctgaggtgcaccggaggt

SEQ ID NO: 868619 - DNA, 99 bp, Homo sapiens
tgctgcctatagcatccgcagcatcggggagaggcctgtcctcaaaggttctcttgccacatcaatatcccagatggtaaagactgaagggaaaggagc

SEQ ID NO: 868620 - DNA, 99 bp, Homo sapiens
ccagattgtcgtcatcactggcattgcacaggtacagcgggtgggactgtatgctgccgaactcaacattctcataatggaaatgcgcacattcagcca

SEQ ID NO: 868621 - DNA, 99 bp, Homo sapiens
caatttgtgatggaaacttcacaattcctgataattctcgatattctcaagacatgcactgcctaattaaatggccacatctgttgctcagtggatcca

SEQ ID NO: 868622 - DNA, 99 bp, Homo sapiens
gtcccagtgccttcagaacttgtgtttggagaagagggattgaccctgaatcttgaagacgttcagcctcatgacttaggaaaagttggagaggtcatt

SEQ ID NO: 868623 - DNA, 99 bp, Homo sapiens
ccgctggagaggggctcggcgcccggcggggactgcagacagtgggagtagctcaccgttacccaagtatgcttcatctcccaaaccaaacaacagcta

SEQ ID NO: 868624 - DNA, 99 bp, Homo sapiens
cagcaactgccgcacccttgaaaggaggcccctgccgtgtggacccgtaaaataaaatggggaaatgatcttcattggttagcatgtgccttatatgtg

SEQ ID NO: 868625 - DNA, 115 bp, Homo sapiens
ttctcgcggcgctcgagggaccatggccgatcctcgcgtgagacagatcaagatcaagaccggcgtggtgaagcggcaaaagaatggaccccagcaggaaaagcaaagcaagaga

SEQ ID NO: 868626 - DNA, 99 bp, Homo sapiens
cctgtccctgctgctaatggagcaatacgtttccattgtgatcccaccttctgggcaaagaatgtagtcaatttagaggaagaatacaagcgattgagt

SEQ ID NO: 868627 - DNA, 99 bp, Homo sapiens
tgccatcgtcacgatctcttctggctcctgctgcaaacccactcctcagctggctgcattttctgcttctaagattcgaactcgagccatctctgctaa

SEQ ID NO: 868628 - DNA, 99 bp, Homo sapiens
agcgggaagactcatcggagcgtgtggatttgagccgccgcattttttaaccctagatctcggaaatatgagctgtacagcatggactgggacctgaag

SEQ ID NO: 868629 - DNA, 99 bp, Homo sapiens
ccaaggactggcactcttctaataaagccaacaacgacaggaaagaagccccatcagcttcacagaagttatctgaagaatcatcatgcttggtccact

SEQ ID NO: 868630 - DNA, 99 bp, Homo sapiens
aacttttgatttgggaggagatattcatagtgggacagcattaccgacaagcaagaatcgggaccagtattcacatctgctaagtgatcattttctgcc

SEQ ID NO: 868631 - DNA, 99 bp, Homo sapiens
ctccaactgcgtttttaaatgtgggggtggatgaagatatttgcagttctccctggagcaacggcccagtttgattgctacatattcattggtgtagag

SEQ ID NO: 868632 - DNA, 99 bp, Homo sapiens
aaagtagccaagcatcatgtgcagaatcgcatgaatgttcacaatctcgccactgtatttgggccaaattgctttcactcctcagaagaaatatcacgt

SEQ ID NO: 868633 - DNA, 99 bp, Homo sapiens
cttcgatgatcgtgtgtcggatgaggagaagaattctgcttggtcagaatcgtgatggcattgtgttcagcactgatgactattttcaccatcaagatg

SEQ ID NO: 868634 - DNA, 99 bp, Homo sapiens
ttcactttcaggacgcttccattgcacacagattccatgtgatgagagagaaacatcctgaaaaattcaacagcagaatattttgattgatgcctgtgt

SEQ ID NO: 868635 - DNA, 99 bp, Homo sapiens
tggaaggggtcctcagagttactggggtgtaaagggtcaagtttttgatcagaatggaaatccattacccaatgtaattgtggaagtccaagacagaaa

SEQ ID NO: 868636 - DNA, 99 bp, Homo sapiens
ttcttttcatggtcaatagactctttacttaggccgaaatcaaatcccatgtcaaacattcgatctgcttcatcaaacacaaggtaagagactctttga

SEQ ID NO: 868637 - DNA, 99 bp, Homo sapiens
aagacttttactgaaaattccttatggatctctgagaaggcgcagcgttgaaaggacccaacatgagtgaagtttcctgcaagaaacgggacgactatt

SEQ ID NO: 868638 - DNA, 98 bp, Homo sapiens
ctcggtatcctagtgcacacgccttgcaagcgacggcgccatgagtctgacttccagttccagcgtacgagacatttgaagacagtgatttgttccat

SEQ ID NO: 868639 - DNA, 99 bp, Homo sapiens
agcagctgattgtaatgaatttgcccaatgttttgatgattggcagagacccactgtctgaatatgcttttaaggctattaaccagggtggccttacat

SEQ ID NO: 868640 - DNA, 99 bp, Homo sapiens
cccttggagaagctcaagttcatcaaaggcactgattaccagctcagcaagtttttcgttggaatatacgttgcacatttatggcgattctgagtgtga

SEQ ID NO: 868641 - DNA, 100 bp, Homo sapiens
tggtctgagatctcttacctttcaaagtggtgggatattatagatattcagtgaatatctataatatcccaccactttgaaaggtaagagatctcagacc

SEQ ID NO: 868642 - DNA, 99 bp, Homo sapiens
cagaaagtgaagctgtttcgggccagcgacccgctgctcagcgtcctcatgtggggggtaaaccactcgatggcccactgcgtgaccttggttcagctg

SEQ ID NO: 868643 - DNA, 99 bp, Homo sapiens
caaacgagagtcagcctttaacgttctggacatggcaagacatgtgccactctatcgggcactgctggaattgcttcgggccattgcttcttgtgctgc

SEQ ID NO: 868644 - DNA, 98 bp, Homo sapiens
tcatttgaaatgaaatgatggccacgcgtcggactggtctgtctgagggagatggtgacaagctcaaggcctgcgagcatcagaggctccttgaaatg

SEQ ID NO: 868645 - DNA, 98 bp, Homo sapiens
caatggcaactatgtttggatgttggatctacactttctcaagcactgtgatcttcaaatccgactccacgggaacccactccctctacacgatgtac

SEQ ID NO: 868646 - DNA, 99 bp, Homo sapiens
gttgcttatgggtatcctgcattaacagggcatgtccattgtgcactgggttgcgtagttgaaatgcaaagacagcatcgtcactgcatttatactggc

SEQ ID NO: 868647 - DNA, 98 bp, Homo sapiens
acggtttcgccggcagtctcgggagaccaaattttgaggaaggtggaccaacatcagtagggagaaagcatgaatttatacgctcagaaagtgaaaat

SEQ ID NO: 868648 - DNA, 99 bp, Homo sapiens
ggaagaaatggtgcagagattaaatgcggtttccaagcacacggtgtgcaggagaagagaattgggtggacagcaggaccatctacgtgggacacaggg

SEQ ID NO: 868649 - DNA, 99 bp, Homo sapiens
ggctctgaaggcgaacgcttcgctggccatttaggagctctgctcaaagccagacgctgagtcagtgctgattctctcaaatagagcttgaaggataaa

SEQ ID NO: 868650 - DNA, 99 bp, Homo sapiens
ctctcgcggcggccggcggggcccgcgctgcagccggagacccggagaaaggtgtttacaggcattggagtttttacatgctaatcaagtgatccacag

SEQ ID NO: 868651 - DNA, 99 bp, Homo sapiens
gcgaggcgggcagccggggcgtccaggtgaatacatcaagacctggaggccacggtacttcctgctgaagagcgacggctccttcattgggtacaagga

SEQ ID NO: 868652 - DNA, 98 bp, Homo sapiens
gaccccggagcccctttagccatgtggatacctacggagcacgagaaatacggcgtggaatgttatggaacagttcaatcctgggctgcgaaatttaa

SEQ ID NO: 868653 - DNA, 99 bp, Homo sapiens
gaaaagatgagcccaacaattggaaaacaattacttaaggaaggatatggagtaatagtactaaatcccaatgaaaactatattgaagtagaaaagccg

SEQ ID NO: 868654 - DNA, 99 bp, Homo sapiens
ggaagtccgtttcgtgagcagcgccaagattcactttataggaacagcttcagcttcagtgatgaaaaactgaattctccaacagactctaccccagct

SEQ ID NO: 868655 - DNA, 99 bp, Homo sapiens
gggtctttcatctggtttggaattgataacttcccagcttttggatcttagatccgatggctcaaactggatattcataggtccaggatctctttcatg

SEQ ID NO: 868656 - DNA, 99 bp, Homo sapiens
atccagtaacagaggcaggaggatcccttgatgccaagagttcgagaccagctggggcaacaaagtgttcctgatccaagcagaaccctgttatttgaa

SEQ ID NO: 868657 - DNA, 99 bp, Homo sapiens
cccagccctcccctcgggatccctcaccccagccttcttcaccgcacaggatttttcaagccacattcaattgataggatgaaaaaatttaagagaagg

SEQ ID NO: 868658 - DNA, 99 bp, Homo sapiens
atggactcatcttcatggaaacgtctgctaagactgcttccaatgtagaagagacctgaagattatcggctataagagaataagaattgcagaaaataa

SEQ ID NO: 868659 - DNA, 99 bp, Homo sapiens
ctttccctcatggctggtcgtctccagactccacactcctagcaaaaaatgcttggacagaagagatgagtactatttccactaaggcctagaattgcc

SEQ ID NO: 868660 - DNA, 99 bp, Homo sapiens
ggctctttggggaaaagtcttgtgatttcctctcaggaagctgtgattaagcactcattggtgcataaagtattcttggacttttttacctatgcaccc

SEQ ID NO: 868661 - DNA, 99 bp, Homo sapiens
gagattctggcaaaccagctcacggggctcatggacatgaagattttctacaaggggaagaacactgcaaatgcagccctgaggatttggctactgcat

SEQ ID NO: 868662 - DNA, 99 bp, Homo sapiens
gcaagaagaggcacgagatgccccctcacatctatgccatcacagacaccgcctacaggagtatgatgcaaggataaatgaggagctgattcttaatcc

SEQ ID NO: 868663 - DNA, 98 bp, Homo sapiens
gcaggaaaacaagttcagggctcccactgattctacattatggacctcaggctcatgctacagacccgggtatattttcttctcctgtttacacaaat

SEQ ID NO: 868664 - DNA, 99 bp, Homo sapiens
gacggggcagcggggacgcggggtctcgcggcgcctggcagcagagaccaccagaaggaaatcacctgctaagaagctgactaatgcattaagcaagtc

SEQ ID NO: 868665 - DNA, 99 bp, Homo sapiens
tcctgtgtgtgacaagaaggctccctatgaatctcttatcattgatggatttgggtctcgctgtgctagaatattccgtctagttttgcagaagaaaca

SEQ ID NO: 868666 - DNA, 100 bp, Homo sapiens
cagaaggcatcctgtaggataagtcaaaggaggaatttgcctctttctatctgtagaagaggcaaattcctcctttgacttatcctacaggatgccttct

SEQ ID NO: 868667 - DNA, 100 bp, Homo sapiens
agagctgctgaagtcaaaggagcaattgatggtaaggtttctcacaaagccgaaaactcaggctcaggaccagcaattgctcctttgacttcagcagctc

SEQ ID NO: 868668 - DNA, 98 bp, Homo sapiens
gcagatgctggacagtgggcaaagcgaggtgtttgtgtccaatgtggggcaggggtttcgggctggtggagcatgtgctgggacaggacagcatcctc

SEQ ID NO: 868669 - DNA, 99 bp, Homo sapiens
tgtgaaccagcagaatttttgaacaggtatgtcccgccagaacaagccaaagtcgtggcatcagttcatgcatctatttcagggtcctctgccagtagc

SEQ ID NO: 868670 - DNA, 99 bp, Homo sapiens
tgtcacaggaaggaccgcccaccacgtctccctcggattcgatggcgtccctgtagattcactgctactgcttctttcacaacatatctcccttattac

SEQ ID NO: 868671 - DNA, 99 bp, Homo sapiens
gaggacgatgcaccagtgatctacgggctggagttccaggaggagaaagtgcaggccatgccacttcctctcaggagcctagtggatgctcagatcaga

SEQ ID NO: 868672 - DNA, 99 bp, Homo sapiens
cacacggagtatcaaactctgctgccaagggaacaacagccgcttgcaggccgagctctgccagaagcattggcaggacctgcctcccagtaagtgcca

SEQ ID NO: 868673 - DNA, 99 bp, Homo sapiens
agagaccatacagacctaccggtctgtcagtgagatggcttctaacaaggacccagatgatgtggtaccagttggccaaagaagagcctggtgttggtg

SEQ ID NO: 868674 - DNA, 99 bp, Homo sapiens
ccaacgtgatcgataaccaacccttctgatgtgggcggaaatgtgtgttgtagttatgccaaactttcgagtgagcatctgtaatcccaacactttggg

SEQ ID NO: 868675 - DNA, 99 bp, Homo sapiens
ttggggccctcttgataaaaagagatgtggggggattctcgacctgctaacagaactggaccttttcgaccaaagagaaccctgtacagtaagaaatat

SEQ ID NO: 868676 - DNA, 98 bp, Homo sapiens
agaagccaaaaaaccaaacatcataaattttgacaccagtctgccgacatcacatacaactatgaaaatgatgttagacaaaaagcaaattcgagcaa

SEQ ID NO: 868677 - DNA, 99 bp, Homo sapiens
gcgaacagtctcgttgctgcctctgtgtacgctgaggggggaggatctggggactttgatgattttaacctggaggatgcagtgaaagaaacttcctca

SEQ ID NO: 868678 - DNA, 99 bp, Homo sapiens
catacagtcgcctctgacaagccaggtcatctacacgaacaatcagaggtacatggctgccatcatcttgagtgagaagcaatgcagagatcaattcaa

SEQ ID NO: 868679 - DNA, 116 bp, Homo sapiens
agcctccacccaccggcccaccctacatttagcgcatcatgtgatccgggctcagtagatgaaggcgtttctgagggcttgcctacacttcaaagcacgtctagcactaatgctcc

SEQ ID NO: 868680 - DNA, 99 bp, Homo sapiens
atcaagtaccttgagacactcctttactcacagcagcagtcatccgtccttggctcaggatttggagagcttgcaccaccaaaaatggcaaacatcacc

SEQ ID NO: 868681 - DNA, 99 bp, Homo sapiens
agccactgttcggttaaaggagcctcctgtggatatctgtctaagtaagacggaatcagtccccaatgcctggaaattcctcattggattactgtgttt

SEQ ID NO: 868682 - DNA, 98 bp, Homo sapiens
acctcttcttccctcacgttgcaacaggaattaaaggaaacattggcaaatttggagcgacagatctatgcttttgagggaagctacctggaagacac

SEQ ID NO: 868683 - DNA, 99 bp, Homo sapiens
aacatggaggccgtgaagaccttcaatagcgagatgtggacgagtgctcactagcagaaaaaacctgtgtgaggaaaaacgaaaactgctacaatactc

SEQ ID NO: 868684 - DNA, 99 bp, Homo sapiens
ccagcactttgggaggccaagcaagcttcatctccccagagaagagccggaagatgttgccgactcccattgggaccaacagtggcacttccttgcttg

SEQ ID NO: 868685 - DNA, 99 bp, Homo sapiens
tgagaaagccaccaagaagaccaaagaaaaggagacaaggatggctcttcctcaggacttaaccaccaccatgtcgagcaaaagaacaaagaccaagac

SEQ ID NO: 868686 - DNA, 99 bp, Homo sapiens
tcatcgagtatgagcagttcatcgcagaggagaaggcagagcccccccaggctatgaatgccctgatgcggttgaaccagctgaagccagggctgcagt

SEQ ID NO: 868687 - DNA, 99 bp, Homo sapiens
tgtcagtggaactgcagatgtctttttccggcagattttggctctgactggatggggttaccgggttatcgctgcttcgggagcaagttctgcttgaac

SEQ ID NO: 868688 - DNA, 99 bp, Homo sapiens
cacgcttccgccaacaaactggtcccttctcagatttcttcccagtctggcccatgattattcttatacagcgggcgccgcacatcgatggggcagttc

SEQ ID NO: 868689 - DNA, 99 bp, Homo sapiens
tgcgaggcgcgggagcacctgggggaccgcttgcagcggggacgcgaggacccgggctgggctttcctcacccgggtaagaatgattgatgttggctga

SEQ ID NO: 868690 - DNA, 99 bp, Homo sapiens
ggcaaccgccccgtctgagaagtgtgaccatgaagctcatggatgaggtcgccgggatcgtggctgcacgccactgcaagaccaacatcgtcacagctt

SEQ ID NO: 868691 - DNA, 107 bp, Homo sapiens
agaaaatggcggcggagccgaacaagaccgaaatccagactctttttaagaggcttcgcgcagttccaaccaacaaggctgaccaactgactgaagagcagattgca

SEQ ID NO: 868692 - DNA, 99 bp, Homo sapiens
ggggatggtggtctttgcctttgccactatcacgcctctcatgttcacagagaccgcgtggcgcgcattgggctgggcgtgatcctgaacctggcgaag

SEQ ID NO: 868693 - DNA, 99 bp, Homo sapiens
ccgagtggcggacgggctcccgctggccgcctcgatgcaggaggacgaacagataaacaatcagattctgtatggaagaagtcaccaaaatgcatctgc

SEQ ID NO: 868694 - DNA, 98 bp, Homo sapiens
cagtcggtgctccggggaggtcacctgacgaggagtgttttccaagcagtgaagcacttgccgtgttgaactgaatgcactactggagaatgttctgg

SEQ ID NO: 868695 - DNA, 98 bp, Homo sapiens
gaagacccggccgcccagatgatgcggtggtgggggacctgccggcacgcgactccccccgggcccaaatgcttagatgagtacgaagatgatgaagc

SEQ ID NO: 868696 - DNA, 98 bp, Homo sapiens
gccgaagaagcatcgttaaagtctctcttcaccctgccgtcatgtctaagtcagagatgccccttggtgtggccactgcaaggctctggcccctgagt

SEQ ID NO: 868697 - DNA, 99 bp, Homo sapiens
ctggactcacggctgcttggagcgtccgccatgaggagaaggagaactctcaccctgctcctcagcagccttcccagccagtgaaagatacagtgcaag

SEQ ID NO: 868698 - DNA, 99 bp, Homo sapiens
cacagattagaggaaggaagagatactctggatgaatattttgaatatgatgcagaggagttcttggtctctttggccttgctgataacagaaggacga

SEQ ID NO: 868699 - DNA, 99 bp, Homo sapiens
tgcaggctctccaccgaaggctggctctagactggtgggctgctggctcgtgtcacgttcaccaccagaccccacatcaggagtcccgccaggggtgtg

SEQ ID NO: 868700 - DNA, 98 bp, Homo sapiens
cccggcgctttccccgcaagatggacggtttcgccggcagtctcggtaaaggaagcacctgatgaggctgaagtggtgttcacggcacattgcaaagc

SEQ ID NO: 868701 - DNA, 98 bp, Homo sapiens
caagcctgtgtgcattcataagaattcggaatgtctgaaagagcagcagaaacgctactttccagttcgaagcattcagcaaacaatggcaaggcaga

SEQ ID NO: 868702 - DNA, 99 bp, Homo sapiens
gggactacaggcgtgtgccaccatgcccggcatgcatatgcgctagaacttctatttgatcagttgcatgaaggagctaaagctcttgatgtaggatct

SEQ ID NO: 868703 - DNA, 99 bp, Homo sapiens
cagaaacaaaagcaggcaaatggagtcgttgggaatgttcaaatggttgtcctgatcctgatttagtattgaagttcggtcctgtggacagcacattag

SEQ ID NO: 868704 - DNA, 99 bp, Homo sapiens
ttgaggcagaggcagctggaccgagctgcggctgctgtggggatccaggtccggcacgatcaagacccaggctacatgcatcacaagtttgccatcgtg

SEQ ID NO: 868705 - DNA, 99 bp, Homo sapiens
cttctcaatcatgtcccgcagcatctgatcctcctcttgttccctgtaacaacatatctcctggctcgatgcgtccatcagcagccacggccccaccct

SEQ ID NO: 868706 - DNA, 98 bp, Homo sapiens
tgtaatcaactgggagaatgtaactgaaagatacatggcttgcaaaaagtaaaccacgatcgttatgctgaggttgcaatattatctcatatctttgg

SEQ ID NO: 868707 - DNA, 99 bp, Homo sapiens
tggtcatggcgcagccgggcccggcttcccagcctgacgatggtgttatctgaaaaggttagtcagctgatggaatggactaacaaaagacctgtaata

SEQ ID NO: 868708 - DNA, 99 bp, Homo sapiens
gggtgacagagcaagactccgtcttgttgacgcatcttcatggttcgtatcctgattgcctctcctcgaactcgcccttcacagaaataagcaccattg

SEQ ID NO: 868709 - DNA, 99 bp, Homo sapiens
tcatatggacagatggacttcaaatgctgtttgtattccagagactagaggtgcccacgagtgtattcggggagaagcttcgagaacaagttgaagagc

SEQ ID NO: 868710 - DNA, 99 bp, Homo sapiens
cccttgttggaatgccacaacctgatttctcctttcttaggatgccacagggctgttgataatcaggtgtatgtggccacagcctctcctgcccgggat

SEQ ID NO: 868711 - DNA, 99 bp, Homo sapiens
ccagatgcttgtcttcctgagagtgattggaggtctccttgccttggctgattctggaacttttcaaagcctgactctcttcttgaaacagtggagcat

SEQ ID NO: 868712 - DNA, 99 bp, Homo sapiens
tcttagaagacttgactggtcttacattgctgcatcaagaaacccaagctgctgaggaactaattctgaagcatcaaatgcttctgaaacagaatctga

SEQ ID NO: 868713 - DNA, 98 bp, Homo sapiens
caggatttatcaaatcgagtcactgtcaagtggacagcagcaaggaatcagctgaagcagcttgtgatatactatcgcaacttgtgaattgctcttta

SEQ ID NO: 868714 - DNA, 99 bp, Homo sapiens
caaaataaaagatgaacctgacaatgctcaagaaagtacacaggaagatgctatgaaatttccatcttcccaatcttcccagccttccaggcttttaaa

SEQ ID NO: 868715 - DNA, 99 bp, Homo sapiens
gccgagtggccgcgggcgccatggagggggtgctgtacaagtggaccaactatctgagcggagacatggaaatttacactacagaaggcaagacaaatt

SEQ ID NO: 868716 - DNA, 99 bp, Homo sapiens
ttcccgcgtccgccgattcctcctccttggtcgccgcgtccttggctggcgtaaggccccgaggcaggacgtgtgggagcggccacactccgaattcgc

SEQ ID NO: 868717 - DNA, 99 bp, Homo sapiens
tctgataaacagaagtctattatcacagaaaaacttgccacatatctgaagagatggattaagaatgctttggattaaggattgtggagcacatttcaa

SEQ ID NO: 868718 - DNA, 98 bp, Homo sapiens
atgcgtggtccaccatcggtgacctcaccgcctcggttcgccctcagccgccccgacttgggaagacccagggcacaatgataaacatactggctgtt

SEQ ID NO: 868719 - DNA, 99 bp, Homo sapiens
gaagctacaaacagtttgtttttacctctgcctcctggtaaaaagaacgtattctcatggtacttacagagctggcccaatgagacaaataagcttggt

SEQ ID NO: 868720 - DNA, 99 bp, Homo sapiens
ggcggaatcgggataccatgatgagtcttctgaagactgtggtcattgtgcttggagtcagagtattcatcgaaaagaaagcacagctaacacttttag

SEQ ID NO: 868721 - DNA, 99 bp, Homo sapiens
ggggcaatcaccacgaactcacgtagcccatacagcacacataggcagtacacgcctggcacgctctcgctgtccctcagcaaatagctgccatccagc

SEQ ID NO: 868722 - DNA, 99 bp, Homo sapiens
aaaggcatggaagtatgaaaatggaagaagaaattgtcgagacgaataacatgaggtcatatagaatcccacttttggtgatttcaagtcaagaaagta

SEQ ID NO: 868723 - DNA, 98 bp, Homo sapiens
acagtgcctctgaccagcatcgtctgtaaagagtcaagggtccagagaaggaggagaagttgagacaggcggtcaagcaggtgctgaagtgtgatgtg

SEQ ID NO: 868724 - DNA, 99 bp, Homo sapiens
cgactggatcatatcagaaagatggcatatcagatatgcaagtctgtgaattttcgaacaactgccacagcagcaagcaacttgattgaagtatttgtt

SEQ ID NO: 868725 - DNA, 99 bp, Homo sapiens
gatctccaaacagggccagaagctggagatgatgctggagcagaagttagcgcttctctctcgtgccgcagaatggaattcggcattgttcctacacag

SEQ ID NO: 868726 - DNA, 99 bp, Homo sapiens
caaaatccattattagggtttggcgctatagctattgctgtattgtgctcaggatttgcaggtcctcttttcttcaatacaaaatgagataataggggt

SEQ ID NO: 868727 - DNA, 98 bp, Homo sapiens
ctcccagatatattcttagacaggtttgatgaacttgtgaaaaaattcaaagtcgaatatcatgctggtggctctacccagaattcaattaaagtggc

SEQ ID NO: 868728 - DNA, 99 bp, Homo sapiens
gcctcctgagtagctgggactacagaaaaattgtgccgacccctgccctggaagagcacagtacctccatgcattggtgtggcgaagacgactggggat

SEQ ID NO: 868729 - DNA, 98 bp, Homo sapiens
agaccttctccctttgaagatctgaatgccagaagagtctacatgcaaagccaagccaatcaggaagacaactgttagttttgtggcttactgctgct

SEQ ID NO: 868730 - DNA, 99 bp, Homo sapiens
cgctaccaggttcccccagactgccctccacttgtgcagaagggtgaatgccatgtcaactttgttcggaagaaaataaagcagttggagtgatgaagt

SEQ ID NO: 868731 - DNA, 99 bp, Homo sapiens
agtgatctggcttctgcaagaattattgaacaagatgctgtagtaccttcagccgtgctggtatagaggactctaagaagtggggcatgctgtttctgg

SEQ ID NO: 868732 - DNA, 99 bp, Homo sapiens
caccatgaaggagtctctcaccaccagggagatcagacggcaggagatatgtgtcacaaagatgtctacacggaactgccagggaatggactcagtgat

SEQ ID NO: 868733 - DNA, 99 bp, Homo sapiens
gtctcctgccaagcagcaggccccacctgtccggaacctgcaccagtctggattcagtttgtctgcattcctgggagatggtcgggaagaagaagggag

SEQ ID NO: 868734 - DNA, 99 bp, Homo sapiens
cagctggtggacaaaattttgtggcgctctgcgtcccctgaagaatttccagatgatgttaatccagtgaccaaagaaaaaggtggacccaggggccca

SEQ ID NO: 868735 - DNA, 98 bp, Homo sapiens
tggaaacgaaaacaaatttggatcacagaaagaatgtgaaaaggtttgcgctcctgatgtggaagatgtcaagtttgtgatcaactatgactatccaa

SEQ ID NO: 868736 - DNA, 100 bp, Homo sapiens
aagaagactttactccaaattccaaaaaggtcctggccatgtaatcctgaaagttttcccaaggtagctataaaatcaggaatacagtgcagctcaatct

SEQ ID NO: 868737 - DNA, 99 bp, Homo sapiens
catcataggaatcatattcatcaaggaaaagtggaaaccgaaagactttctgagtaatgaggagtacctgatcaatctgatagactctccaggacacgt

SEQ ID NO: 868738 - DNA, 99 bp, Homo sapiens
cagcctcccaagtagctgggattacagaaatcgagctatagcagattatcttcgttcaaatggctatgaagaggcatattcagtttttaaaaaggaagc

SEQ ID NO: 868739 - DNA, 98 bp, Homo sapiens
tgatgaagaaaattaaaaaactggagaatgacaccatttctaagcaacttacattagaacagatagtgtgtgtaccatatcagtggcgtgtaactatg

SEQ ID NO: 868740 - DNA, 99 bp, Homo sapiens
gcagctgatggcgtcatccggctgtttggatatgggccctcacattttccaaacctgtccatctgctaactattttgactgcagagccatgtccattgg

SEQ ID NO: 868741 - DNA, 98 bp, Homo sapiens
agaaaccatgtgaaaaggcaccttgggatgagggaatacaagtgtcatgtctgtggagctggactggccattatggaggaggagctgcagcattccca

SEQ ID NO: 868742 - DNA, 99 bp, Homo sapiens
ctgagttcaccgcaacctccacctcccggattcaaatggttctcctgcctcagcctcccgagaagctgggattacagatatctcttccaaatgcatgat

SEQ ID NO: 868743 - DNA, 99 bp, Homo sapiens
agaaactaaaaggacagtagaaaaggcttttccagtttgcataatgttatcttgacgaatcagattacaacccatctgagtggagccctggcttctcag

SEQ ID NO: 868744 - DNA, 99 bp, Homo sapiens
gctgcagaggtacgccgaggaggttgggatcttcttcactgcctctggcatggatgaggtcaatgtgacggtggactacattagaccagccagcccagc

SEQ ID NO: 868745 - DNA, 100 bp, Homo sapiens
gatttaccccgtgatatccagtttgatagtgaaaaaggagtggactttagaacaaagtccactcctttttcactatcaaactggatatcacggggtaaat

SEQ ID NO: 868746 - DNA, 99 bp, Homo sapiens
ctggagagagttccgatttgtccagattgataggttatatgattggaaaaagagtcctgactctgatgtggctgctactttaaagaagcagaaaaagaa

SEQ ID NO: 868747 - DNA, 101 bp, Homo sapiens
ggcgctcatcgcagagctaaagaggtatgtgtcagccatgaccaccccggctcgtatgtcacctgtagatttccacacgccaagctcccccaaatcgcccc

SEQ ID NO: 868748 - DNA, 100 bp, Homo sapiens
ccagaaagcagtggatgacttaaatctgcactcctattccaatttgcccatctgggaaattggaataggagtgcagatttaagtcatccactgctttctg

SEQ ID NO: 868749 - DNA, 99 bp, Homo sapiens
accctctcgtcagaggagagctgcgatagttttgactcactagagtcagggaaacaggcaatgataccgtctttatccaagttactctgccccatggcc

SEQ ID NO: 868750 - DNA, 98 bp, Homo sapiens
gttcttccattaaatgaggatagtccgttgatgtatcagccacaaaaaatggacttgactatgcactcagggaatgaaagctactggttgattttaaa

SEQ ID NO: 868751 - DNA, 99 bp, Homo sapiens
cttcattggccacctacagaaacaaaatgtcaacaaattgatgggatttgcatgggcaactgatttgtctacagacttagaaagtcaactctctgttag

SEQ ID NO: 868752 - DNA, 99 bp, Homo sapiens
gtggggaagacgtcgctggtgctgcgctactgcgagaacaagtttaacgacaagcacatcaccactctgcaggatatgttcaaggaatgagtgatttac

SEQ ID NO: 868753 - DNA, 99 bp, Homo sapiens
aagtatattctgattgcaaaaaattaattgacacttttgggatccgatggcctgaggagcttgaatgtgacagtttcactgttacatgccttgaagtga

SEQ ID NO: 868754 - DNA, 99 bp, Homo sapiens
actggacctaaatggcgcagcatgactttgctccagcctggcttaatttccctactccaccatcatcaacaaagaatgttggctcaattaagaaacatc

SEQ ID NO: 868755 - DNA, 99 bp, Homo sapiens
gtcctccacccctggaatccctgtctgggtgcggactcggagaagccctcgagcatccccacagaccatgggggatgtgaagctggttgcctcgtcaca

SEQ ID NO: 868756 - DNA, 99 bp, Homo sapiens
caaattcgttgtggtccttgatccagtatgcttatacagtaggagagaagtttgctgaggaatgccttcaagcacaaagtgatgaatgactgccttcaa

SEQ ID NO: 868757 - DNA, 99 bp, Homo sapiens
gggacataggccagctctttcttggccaggaccttggagccctggaatttgtccttcagcaccataatcacgatctcaaaagacttttctcttttgaaa

SEQ ID NO: 868758 - DNA, 98 bp, Homo sapiens
gatggcctggagaagaaagatgttttgcctactgttgatccggtggtgaaaacaggaatgagaacgaggagtcaacctcaaaggctgaaacctcggaa

SEQ ID NO: 868759 - DNA, 98 bp, Homo sapiens
aagaaccagctgaaacacatgtctgtatcctcaatcaaatggcctgatatgaaggagtcacgcctcccgcctcccggagctgcccagtggctgccttg

SEQ ID NO: 868760 - DNA, 99 bp, Homo sapiens
ttgcatcctgtgctgccaactccatcaatcagtgtcaaatcaacagtgccttgacatctttccacactgctttggaacttgcagtagaccagagagaaa

SEQ ID NO: 868761 - DNA, 98 bp, Homo sapiens
gagaaaacttgttgaagagattggctggtcctatacagattatctttctcaaggaatagatctttctggaatagaagtgatagaaaatgatctacttt

SEQ ID NO: 868762 - DNA, 99 bp, Homo sapiens
ggacagcggctccgtggagaacgtgctgcaagtcgtgaaaattgataccaaggccattccactgtttgggaactccctgaagcctgacagtctccggtt

SEQ ID NO: 868763 - DNA, 99 bp, Homo sapiens
agcctccaaccacgtcaacagaaggaggtgcagcctcccccacgtcaccaagaaaaagtgacccattttgtgtggtagaactgaacaacgatagactgc

SEQ ID NO: 868764 - DNA, 99 bp, Homo sapiens
gtgaccgagagcgtgaccgagagcgcgaatatcgtcatcgttagaaggacattcactgaacaatgccagggatacaagtgccatggatactctaccgct

SEQ ID NO: 868765 - DNA, 98 bp, Homo sapiens
ctcgctccgtggccttagctgtgctcgcgctactctctctttctggcctggaggctatccagcagttttactacccttggatgctgctgttgacatgg

SEQ ID NO: 868766 - DNA, 98 bp, Homo sapiens
cgggggacagctgagtttcaaaggcaagagcctcaaactcaacactgcagaagatgattgagaggatccagaatccagatctctggaatagctaccag

SEQ ID NO: 868767 - DNA, 99 bp, Homo sapiens
gctgatctgttacaagtcctgaccaaagcagtcaagggccagctcttccgaggctccagcctgcttttccgccgggtgtcatcaggatcatgctttgcc

SEQ ID NO: 868768 - DNA, 99 bp, Homo sapiens
ggattcatttagagctgcggaacaggacgccctctgatgaaaccacccctactcctaatcccccgactacagaagaggagaaaacggaatctaatcagg

SEQ ID NO: 868769 - DNA, 99 bp, Homo sapiens
gtgatttccttactggagcaagggaaagagtcctgcatggtttcaagggacgtaccaggaggatggtgcccagagattcagaatatacccccctggaca

SEQ ID NO: 868770 - DNA, 99 bp, Homo sapiens
ggcttttcattatatttttaatgtgcaactagcctgtgagattcagcttagcagtgtctgcaaaaacgaatcttttcctacaacctgttaactgactgg

SEQ ID NO: 868771 - DNA, 99 bp, Homo sapiens
ctggccaacttctgctacagacgactcagtgtgtacatcccgattctggtttaattatcgacatgttgcaaataccctttctgtttatagaagtgtcaa

SEQ ID NO: 868772 - DNA, 99 bp, Homo sapiens
agtcgttcttgctcttcgagggcgagaagaagcaatttctaaaccgggatgacattggcatcatcctcatcaaccagtacatcgcagagatggtgcggc

SEQ ID NO: 868773 - DNA, 98 bp, Homo sapiens
tcagttcgaggcgccgccgccgccgccgcagccgccggagccgcaatgcctaaaggagtgcacctgtggcgattctcaggtggctacccagccctcat

SEQ ID NO: 868774 - DNA, 99 bp, Homo sapiens
ggttcgcgccaaggagaccaggaagcgagcactcagcagggaacccgagcgtcatgttagggtgaagcagaggacctcagtgctgaacatgctaaggag

SEQ ID NO: 868775 - DNA, 99 bp, Homo sapiens
ccctatcaacgtgcattttgtcagcatcgtcttctgtgtcgccattcgtgagtggcacggcagaatccaagctttgagtgttggacaggactgagcccg

SEQ ID NO: 868776 - DNA, 100 bp, Homo sapiens
tgccatccacgctgcagcgccgcactgatggctttctggatcagctcgggtccctgtgcccttcacctggaagtcagtgcggcgctgcagcgtggatggc

SEQ ID NO: 868777 - DNA, 99 bp, Homo sapiens
atgacgtccgctttggagaactacatcaaccacatatataggatctgtattaatctcagtcaaccctttcaagcagatgccatattttggggaaaagga

SEQ ID NO: 868778 - DNA, 98 bp, Homo sapiens
cgagactacggtgtgctgttagaaggttctggtcttgcactaaggtctctaattaacagaagatggcaaagcccagccacagcagctatgtccttcag

SEQ ID NO: 868779 - DNA, 99 bp, Homo sapiens
atgctgatatacatccaatgagggtcgagcctcttaggcagagtttaacacatgggagctgcctgcctgctgctgctgctgcttcctgcagatcatgga

SEQ ID NO: 868780 - DNA, 99 bp, Homo sapiens
ggcagaagaacaagaagttgagaccgagaatgtggaaacaggtgaatctggattgggaaagtcgacattaatcaactcattattcctcacagatttgta

SEQ ID NO: 868781 - DNA, 99 bp, Homo sapiens
tcagttaactctgagaagtcgtcctcttcagaaaggccatcatgcacggacgaggcagaggagtggccggtcccatgggccgggggcgcctgatgccaa

SEQ ID NO: 868782 - DNA, 99 bp, Homo sapiens
tccttcatcaacatcaagacactcaatgagtgggattccaggggcagatgattctggaccagatgaagcctgaggagccttccagctctaagatagcag

SEQ ID NO: 868783 - DNA, 99 bp, Homo sapiens
gaagatccatggttattagagaaagagaaaggatttctaagcaggaactccccagaagattacagaggtgatgacctgatcaagcagaacaagaaaatc

SEQ ID NO: 868784 - DNA, 99 bp, Homo sapiens
ggctatgaacccagaggtcgtggaggtggccgtggaggcagaggtggcatgggaacaccttccaccatgaccacctcagcaagttcccacttaaataaa

SEQ ID NO: 868785 - DNA, 99 bp, Homo sapiens
catggactctggcactgaggcagaaggtaacaggctgctcagaggacttccgtggcctggagagctggcttccacactggctcggagggtcctacaccc

SEQ ID NO: 868786 - DNA, 99 bp, Homo sapiens
tcaggccgctgcagatgaccattccaggccaggagacaagcttctcaagtctttacagccgagaagattccttgaagaatcaagcatttaagcatttca

SEQ ID NO: 868787 - DNA, 99 bp, Homo sapiens
cttagaagtgtttacagaaaaattccccaatccctgggcctcactcagcccgagctcaatgttttccatagaacggcgaagctgccgggccttctcatg

SEQ ID NO: 868788 - DNA, 98 bp, Homo sapiens
atgtggacgagagtctcgggtgaaattagagaaggtgtgatccctcacatccacaaatctctgattggaaagaagggacagcagaaaactgcttagag

SEQ ID NO: 868789 - DNA, 98 bp, Homo sapiens
tgaagcttttgcagctgagcaagcgccaggaaaaagtcatctttgatcaatggtagtggtggtgcacgaagatccgcactacttgacagcgacgagcc

SEQ ID NO: 868790 - DNA, 99 bp, Homo sapiens
agatgcatttcacaactgtcatatgggtattacagctgtgttccagatcatctccctggtaatttaccccgtgaagtacacccagaccttcacccttca

SEQ ID NO: 868791 - DNA, 99 bp, Homo sapiens
ttttgttgagtcgaaagtgaaattttcctttggccaacgtgacagggcttccgagtggacctgccaatcaagtcggcccgctaccgtggccagtacaac

SEQ ID NO: 868792 - DNA, 99 bp, Homo sapiens
cttcaaccttcccacaaactgatgttctttcaagttcacttgaggcagaacacagggcaacacacaagtttgctgattgcaaagcaaaacgtgacaccc

SEQ ID NO: 868793 - DNA, 98 bp, Homo sapiens
tcacacatgtggagattacatgtttagtggccacacagtcgtcctaactatgctgaatttctttgtcaccgaatgttgaaggggaccagctgcctcca

SEQ ID NO: 868794 - DNA, 99 bp, Homo sapiens
ggagctattgccaacagcatgtttaatgtgtgcagcaaacaacttcctccttgtaacctgagtaaagaggacctgttacagaacccatacttcagcaag

SEQ ID NO: 868795 - DNA, 75 bp, Homo sapiens
ccagaagacttttctcaaaactggaaggcgctgcaagaggctgaatccattttgcaagggtacctggatgattca

SEQ ID NO: 868796 - DNA, 99 bp, Homo sapiens
ccgagatctggctgcatctcgagacttttcttttcgacgttcagaacttatcctattggtaagtgattgagctttctgttgtagaaaagtatccctgtg

SEQ ID NO: 868797 - DNA, 99 bp, Homo sapiens
gctttaaccatcgaaaatgagtacctgcaagatgagaatggcgtgggctacgtgctgagtggggctgggaatttcatggacccctcaaagcggcaccag

SEQ ID NO: 868798 - DNA, 99 bp, Homo sapiens
aaatgtagacaatggttagagaagaattttccaaatgaatttgcaaaacttactgtagctcgagatgctgctgtgcagaagattgagactattatcaaa

SEQ ID NO: 868799 - DNA, 98 bp, Homo sapiens
ttcagattccatggcaggtcaaaatcagaactggtaagatttctgcatatctggataaaagaatcagagtgtctcaacccttgacaagaggaccaagt

SEQ ID NO: 868800 - DNA, 99 bp, Homo sapiens
tggaagattttgatgcaaatatcgaagaacagaaagaagaaaagaaagatgcagaggaagaggaaagcgaactgcgggtcacagaaagtcgagagagcc

SEQ ID NO: 868801 - DNA, 99 bp, Homo sapiens
aagagttcattcttctgagtcaaggagaggtggaaaagctaatcaagtgcgacgaaattcagaacaaaagtgaagtggtggcaaagtgctggaccagat

SEQ ID NO: 868802 - DNA, 99 bp, Homo sapiens
gattatgagcaaccactggaggtgaagaacaacagtaatctgcagagaatgggctcctccgagtcaacagattcagcaatggctgccatccggaagaaa

SEQ ID NO: 868803 - DNA, 98 bp, Homo sapiens
ttatcctcaagagtcagctggcaggttgtttttgagcacgttcactctcgcagtgtcagctggggctgttttgcttttacccttctcaatcatcagca

SEQ ID NO: 868804 - DNA, 99 bp, Homo sapiens
gaccgagagcgtgaccgagagcgcgaatatcgtcatcgttagaagagcttaatgattaagagagagttggcaaaagattctgaattacgatcacaaagt

SEQ ID NO: 868805 - DNA, 99 bp, Homo sapiens
gtgtaaaggtcctcttctgcacattttccctctcaaatatgcaatggaggaatcggagatggatcgtaatggtaacggccctcatgatgtctggcatca

SEQ ID NO: 868806 - DNA, 98 bp, Homo sapiens
caggctccagcaatcctgctacctcagcctcctgagtagctgggaccatacgccaccatgcccaggaaaatgttctgctgctgccctggatgttcttg

SEQ ID NO: 868807 - DNA, 99 bp, Homo sapiens
agaaaattttccttgacctttaggtgcttttatattcatctcaaaaacaaaattctgaactcaggacttggcaagccaaatttgagtttcatcatggtg

SEQ ID NO: 868808 - DNA, 99 bp, Homo sapiens
agccttgctttattactcaattatcttcacgatttcctaaaatgcctgtgaggagccaccaacatttgaagctatggagctcattggtaaaccaaaacc

SEQ ID NO: 868809 - DNA, 99 bp, Homo sapiens
cggctgaggcccgcaagcgcaaggtggtggctaatgccgtagcggcattatctgaaatcagtgagtctcacccaaacagcaacttacttgatctgaacc

SEQ ID NO: 868810 - DNA, 99 bp, Homo sapiens
tgaaggtccggggcttgccctggtcttgctcggccgatgaagtgcagaggtttttttctggcggaagtgtttcgagacacagtccacatgctgttggag

SEQ ID NO: 868811 - DNA, 99 bp, Homo sapiens
gttgctaaatgtagacaatggttagagaagaattttccaaatgaatttgcaaaacttactgtagtaatctatgccagcaattatgacaatgttagcaga

SEQ ID NO: 868812 - DNA, 99 bp, Homo sapiens
ggctactgtttcaatcacagtatagagagcaaaaacaatccagtacatcatccatcgaaccttttccaaggtgagaagatttatttcagactgtagacg

SEQ ID NO: 868813 - DNA, 99 bp, Homo sapiens
tgctggctgtagctggatctagaggcataattaggataataaatcctataacaatgcagtgtataaaggctcagaacgcccagcagctccatgaacgaa

SEQ ID NO: 868814 - DNA, 99 bp, Homo sapiens
tcatgccaaccaccgtgtaaccactatgagcagtgcctacaaaaccttaaaggatattggattccgactcgactcattacataccatcctgcaacagga

SEQ ID NO: 868815 - DNA, 98 bp, Homo sapiens
tgctgcggagaattggagatggggaccgccctggacatcaagattaaaagagcgaataaagtttatcacgccgggatatggctcgtggacagcagaaa

SEQ ID NO: 868816 - DNA, 99 bp, Homo sapiens
atcgtgccattgtactccagcactgcctcgctttgccagagaatcaccgtagtctgctggcaaagtccgcttgctggactttttctgctcatgttcaac

SEQ ID NO: 868817 - DNA, 99 bp, Homo sapiens
cgaactccgccaggctgcattcaagctctatgcctctcttggagcaaatgatgaagacatccggaagaaggctgtattcatcaccaaagaaaaaactta

SEQ ID NO: 868818 - DNA, 98 bp, Homo sapiens
atgaaatcaacttttattttaagcttccacgtgtgagtgagaacatcacaggtgcaaatatatacagagcttcataatcagcccaagaccacatagag

SEQ ID NO: 868819 - DNA, 98 bp, Homo sapiens
tgaataagtgttttaagaaagtggacaaagagaggagtcaggtaaaataccatgaagattttgaaaaaacaaaggggagaggctttactcccgtcgtg

SEQ ID NO: 868820 - DNA, 98 bp, Homo sapiens
acagatctttgactgggtagagacattccactgcccttctcccaaaaagatgtcttttcgaaaaatggatcccagctgtacaataggattttactgtc

SEQ ID NO: 868821 - DNA, 99 bp, Homo sapiens
ctcaggacaacccagatgtgcaacaaagtgcgatgcacttttcaggattagaagaggctgtgtatagaaacatacaagcttgcaaggagcttgcccaaa

SEQ ID NO: 868822 - DNA, 98 bp, Homo sapiens
tgatgccgaagctgccaactccgtgcttgttgagtagtgattcttgatcagtcatacgggaagagagagtaagaggatggcactattaaaattaaaga

SEQ ID NO: 868823 - DNA, 99 bp, Homo sapiens
tctggatcaagtcctgaagaaagctggaagaattcctgaacaaattttaggaaaagttagcattgcttccatttgggaacaggagcgagtgcccctttg

SEQ ID NO: 868824 - DNA, 99 bp, Homo sapiens
gccgcgtccccagagagcgccctgagagaacagggtggccgcttggtccagccttagattgtaagcaaaagaaatcaaggtcaagatctggaagcaaga

SEQ ID NO: 868825 - DNA, 99 bp, Homo sapiens
ctatgtcaactgcttctcaggtagcaagtacatggggaggtaactgcgtcattgattggctggtatccaaccagtctgttaggaatcgccaggaaggcc

SEQ ID NO: 868826 - DNA, 122 bp, Homo sapiens
gctcagccaggcctgcgcgggcccgaggccggaggaacccggactccggcgtagcgggccgatgtccattggaatcactgtgatgctgatcatacacaactatttgttcctttacatccctt

SEQ ID NO: 868827 - DNA, 99 bp, Homo sapiens
cttgtatgtcatcagagaagccaaagcttttacttcatctacactcacatcagtgctgtaacggatacctgtctttctgaaaagtgtcttgtctgttaa

SEQ ID NO: 868828 - DNA, 99 bp, Homo sapiens
ctgcttttgaaaggcacaagagccgtggggtccatctcctttgttgtaatgttggcaaatcatggacaggtaaacgtaggaggcgtagagctccaggtt

SEQ ID NO: 868829 - DNA, 99 bp, Homo sapiens
agattattctggcccttcagcaaacgtagtactactgaaaatttctttttgaaactaaaacagatatggaatgtgcagatgtcccactattaactccaa

SEQ ID NO: 868830 - DNA, 99 bp, Homo sapiens
gaaacatggacaaatttgtggggctgggagtatttgtagacacctaccccaatgaggagaagcagcaagagttttctggatatgccgcagaaggatccg

SEQ ID NO: 868831 - DNA, 99 bp, Homo sapiens
acaatgagcagcgcatcagacagaacgtgcagtctcttcaagaaaatgaggaggaggagattgggaacctagagcttgcctgggatatgctggatttag

SEQ ID NO: 868832 - DNA, 99 bp, Homo sapiens
acagcttggaccatgggcgcccgcggtctggacaagcgaggaagtttctttaagaggctgctattccaaaaagctttcaactctcagcagttagttcat

SEQ ID NO: 868833 - DNA, 98 bp, Homo sapiens
taaaattggaagtgaatggccccatggtgacggtggccctgtcagtggctctcttggccctcctgaaatggacaccattgcagtggctagatttattg

SEQ ID NO: 868834 - DNA, 99 bp, Homo sapiens
ggagaactacaggaacctgctttctctcgatgaggataacatccctccagaagatggcatgccagatttcctggagaagctgcacatggccactctgaa

SEQ ID NO: 868835 - DNA, 99 bp, Homo sapiens
gagtcatggaactctggggctatgttgctgccagagagtattatgagggaggccgaggacttcatgctccggacagagaaacggcgctgggattaggga

SEQ ID NO: 868836 - DNA, 99 bp, Homo sapiens
ttttgaagtgcctttgatttctggataccatctatgatgaagatgaggtcctcctggccctggcagaacagctgggaaccttcactaccctggtgggag

SEQ ID NO: 868837 - DNA, 99 bp, Homo sapiens
ggaggttcccgcttctgaagcgtgggaggcggaagagactgcaggtttttcttcccccagtccctcagctgctgctgctgctcaggaggtcagatctgc

SEQ ID NO: 868838 - DNA, 99 bp, Homo sapiens
tgctgaacaccatccagaagacacagaaaattgcatctgatggtctcaagggtcgtgtgtttgaagtgagtcttgctgatttgcagaatgatgaagttg

SEQ ID NO: 868839 - DNA, 99 bp, Homo sapiens
agaacgacatgatgcaatcttcaggaaagtaagaggagagagtctacaaggagattgaacaggtggttggcccacatcgccctccagcgcttgatgacc

SEQ ID NO: 868840 - DNA, 99 bp, Homo sapiens
tcctcgctgggcatgatcgaggccacagcccaggtcacagtgaaaggttacttcttgctgcagattctgcgcaggatcggagctgtgggccaggctgtg

SEQ ID NO: 868841 - DNA, 99 bp, Homo sapiens
tagaacatggcatcatcaccaactgggacgacatggaaaaggtaaaaattcatgcaggccccaaatttgcctcctatctgaccttcagcccctccgaag

SEQ ID NO: 868842 - DNA, 99 bp, Homo sapiens
aaatccctgagtgcccgggaggagccttaacaagcgcacggagccctcaaggaatgtatcctgtcaggtataatgtcagtgaatggcaagaaagttctt

SEQ ID NO: 868843 - DNA, 99 bp, Homo sapiens
gttgacaaaggccccattcttaatgaggaaagtggcagcaaagagatctccgtggagggcctctgcaccatattctccagcctggtgtggctaaactcg

SEQ ID NO: 868844 - DNA, 99 bp, Homo sapiens
ttcacgacagaaaagctttatggaaactgcaatggatgttgaataacaagcctttgtattcatttgaagataatgcagactatgtttatgatgttatgt

SEQ ID NO: 868845 - DNA, 99 bp, Homo sapiens
agcaagtccttcgcttcgtcatggagggcggccttctggacaagccagacaactgtcctgacatgctacttgtgtatgcggatacctgcttcagtacca

SEQ ID NO: 868846 - DNA, 98 bp, Homo sapiens
ctcaaccaagagaaaaaggtctctgtttatttagaagacacagactaacaattttagatggacacattcagctaacgtattttagcaggtggagtgag

SEQ ID NO: 868847 - DNA, 98 bp, Homo sapiens
aagcagcaaccaatgatatatatctgtggagacatatctgaagagatggattaagaatgctttggattaaggattgtggagcacatttcaatcatttt

SEQ ID NO: 868848 - DNA, 99 bp, Homo sapiens
aattactgatgggagcaagttgactaccaccagtggagtccaggatgagactcagattgatggacaacttttcttaattaagcaccttttgatacttcg

SEQ ID NO: 868849 - DNA, 99 bp, Homo sapiens
caagagtgcttatcccagctaagctccaggtcaggatttgcatgaagatgtcgaagaagctggtgcactgcagaaaaatcatgctcttgtgacatctgc

SEQ ID NO: 868850 - DNA, 99 bp, Homo sapiens
cccgagtgactcactcggccaaggaaactcccagggcccgcccaggacccccaagccgccgcggacgcaggttcgagaaatggctgctactaccttaag

SEQ ID NO: 868851 - DNA, 99 bp, Homo sapiens
ctaagatgccaggaccacctggaagcctagaaatgaccaagatcactccatggatgaaatgacagctgtggtgaaaattgaaaaaggagttggtggcaa

SEQ ID NO: 868852 - DNA, 99 bp, Homo sapiens
caccactggacctccaaggaagccacgtgcagacatctacaaccttcgatctcctgacgagttatgagtgccagtgagccgccttagatagaagcatcg

SEQ ID NO: 868853 - DNA, 98 bp, Homo sapiens
gcagcccccggcccgcgctgcccgcactcctggtcctgctcggggctctgttcccaggcttcagggatgacttcttagggggcaggggaggtagtcgc

SEQ ID NO: 868854 - DNA, 99 bp, Homo sapiens
ggcaaagctgatcaaatgcttggatttgctgtggatccagaacaggttctgaggttccctgacatggtggtgtgggtcttggcaccaccgagctcctcc

SEQ ID NO: 868855 - DNA, 99 bp, Homo sapiens
ttaaccatgccaatggtctcacactggtttctcgtgcccaccagcttgtaatggagccttcttagattcttcaaccttgcagctgttttttgacctgta

SEQ ID NO: 868856 - DNA, 99 bp, Homo sapiens
tggaggccaaggaccccaagctccgagaagaccggcggccaatcacagtccactttggacagcttcagaggatgattccgaagaagacggagaccataa

SEQ ID NO: 868857 - DNA, 99 bp, Homo sapiens
agtaggttgcatgcctccgcctgtgtcttctgcagtgattttaaccaaggcagttggtggaaatgagctggagtcacatcagaagccgcgcagactatc

SEQ ID NO: 868858 - DNA, 98 bp, Homo sapiens
agttgatgaacaatcatcagctggaactggcaaagcagctacacaaagagggtcatctcttctattgtacctgcaggccaaatttgagtttcatcatg

SEQ ID NO: 868859 - DNA, 98 bp, Homo sapiens
gccgcgccgcgctccaaccgcctcctcctcctcagtaacgcggatacatatgaaccagatggttacaacccagaagctcctagtattactagttctgg

SEQ ID NO: 868860 - DNA, 98 bp, Homo sapiens
gtatgagagtggataatataatcaactcctctgcctggaaggtgtcttgctgcaggtaactaatgaagaagtggtcaaccacagagtcttcaagaaat

SEQ ID NO: 868861 - DNA, 99 bp, Homo sapiens
cccagcttctgcaggaaatgctcatttttctccatactggatctccattccatttctgaactgagaggcttagctgtagtcccagctactcaggaggct

SEQ ID NO: 868862 - DNA, 99 bp, Homo sapiens
ccgggatcgtgaccgagaccgtgaccgagagcgtgaccgagagcgcgaatatcgtcatcgttagaaggacctccaggacctccagcacctccccagaat

SEQ ID NO: 868863 - DNA, 99 bp, Homo sapiens
tgacttaaagggcaacaatcctaggagaccaccagcacttacatccctggtaggacatgacacctgcttatgactcctgcccctgccacgagaacacac

SEQ ID NO: 868864 - DNA, 99 bp, Homo sapiens
cttccaaagcacaggaatctcactctgttaaagctggtctgttctaactgagaattaccctttatgactaccaagccatgtgtagagccaacaaggaaa

SEQ ID NO: 868865 - DNA, 99 bp, Homo sapiens
cacaaatcttcgaagagtgacatatgttgttttagatgaagcagacagaatgtttgacatgggttttgaaccccagatggagtcttgctctgtcgccca

SEQ ID NO: 868866 - DNA, 101 bp, Homo sapiens
cttgaattcaattcttgaaaatccttggggttattcagttttagaagcgctacactggcctctgaatacaactgcaactcaacctccgcctcccgggttca

SEQ ID NO: 868867 - DNA, 99 bp, Homo sapiens
accctgactgttagcagcaatcagcacattggactcctgtatgggtggaatatctggcagcgatggaaggttttctggattggtaactgaggggattag

SEQ ID NO: 868868 - DNA, 99 bp, Homo sapiens
aagacttgtaacctggagaagagatattcaatgcaggaaatgtatgatgtagtatcgggagtggaggattacaagcattttgttccttggtgcaaaaaa

SEQ ID NO: 868869 - DNA, 99 bp, Homo sapiens
acaaaggcaaatacagccccactgtgcagacccggaggaaactactttgcttcgcactttttcatgggaggagagaaattcgacaccccccaccctgaa

SEQ ID NO: 868870 - DNA, 98 bp, Homo sapiens
ggggtgtgtgggaccatgtccagccctctccagtgtatccacagccccgacctttgatgagaactcagctgtccagctcacctccgcctccaggaaga

SEQ ID NO: 868871 - DNA, 98 bp, Homo sapiens
ggacctctccagcaatgattacttcagaattaccagtgttacattacagatgaatccattccctcttattctggaagtgatatgccaagaaatgacat

SEQ ID NO: 868872 - DNA, 98 bp, Homo sapiens
caagtttcacctatcctcactgatccgtggacttctgtatgatcagatttcagaagaaagtggtagcttcctttccaagaacagttctgagcacagga

SEQ ID NO: 868873 - DNA, 98 bp, Homo sapiens
gtgtttggggtgtgttttacaaagtactgaccaagtgccaggaagaggtcagccacatccctgctgtccacccgggttcattcaggcccaagtgcgac

SEQ ID NO: 868874 - DNA, 98 bp, Homo sapiens
ggataatataatcaactcctctgcctgagttctaaagttcctgttgcttcagacaatggatgagcaatcacaaggaatgcaagggccacctgttcctc

SEQ ID NO: 868875 - DNA, 99 bp, Homo sapiens
agataaaccagcagcaacagcagccagttttacagctgaagaatgggaaaaaattgatggtgatataaagactgtacaatttgttcaaggaatttttgt

SEQ ID NO: 868876 - DNA, 98 bp, Homo sapiens
cccaggaagcctttaccaacgccatcaccgacctcatcagtgagctgtccctgctggaggagcgcttccgggtcaccagtgaaaagttgtgcagagcc

SEQ ID NO: 868877 - DNA, 99 bp, Homo sapiens
cacatcctacgtggctgagagctccacagcagaggacgcgctctccatccgctcggagatgatccagcgcaaagccatcaagttctctggagaccttct

SEQ ID NO: 868878 - DNA, 99 bp, Homo sapiens
gggcagtggtggggttgctacgcctggccattcggcttctccggagagaagagatcagtgctcaggaacgccagcgcctggagaccatcctgaacctgt

SEQ ID NO: 868879 - DNA, 99 bp, Homo sapiens
cacctgaagaagattgtacatcagtcacagacctgcccaatgcctttgatggaccaattaccataagacagctaacccccgcatcggtgacgtgatcca

SEQ ID NO: 868880 - DNA, 99 bp, Homo sapiens
tcagttttcaaatatggggatggaagatgttcccctcgccaccagtaaaaagctaattactgtaaaatggggaaaggagaaatttgaaggtgtagaatt

SEQ ID NO: 868881 - DNA, 100 bp, Homo sapiens
agaggatggaagtgtggccattggcacaataaagctttctccagcggcgtgcacctctacggtagatggattcttgaatgcactgaagtgttccatcctc

SEQ ID NO: 868882 - DNA, 99 bp, Homo sapiens
cctcctacaccgggctttcttcttcttcagcgagattcctgagccgttctatccctgtccttttggaataaatcatgggattgagcttcattcagatgt

SEQ ID NO: 868883 - DNA, 98 bp, Homo sapiens
gtgcttgatggtcgaggccatctcctgggccgcctggcggccatcgtggctaaacaggtactgctggatgagaacgggattcccagtagtccccagaa

SEQ ID NO: 868884 - DNA, 99 bp, Homo sapiens
cacagctgaaacagcttcttctggctcataaagattgccctgtaaccgccatgcagaagaaatctggctatcataggacatggatgaagctggaaacca

SEQ ID NO: 868885 - DNA, 98 bp, Homo sapiens
gccctgctgctggccagctgcagcctcagccccacaagacatccccttgaatttttacggaatcagcctcagtttcaacagatgagacaaattattca

SEQ ID NO: 868886 - DNA, 99 bp, Homo sapiens
tggcactgttgtttcacaagatgatgtttgaaactattccaatgttcagtggcggaacttgcatgaaattcgtaaggacaccttgaaggccattctgtt

SEQ ID NO: 868887 - DNA, 99 bp, Homo sapiens
ggccctcagggaagagaccctgcaaagatcctgggagaccaaggaacaggagtacagctgtgtagtaaagatgccttctggtgaatttgcacgtatatg

SEQ ID NO: 868888 - DNA, 99 bp, Homo sapiens
ccagcaactaggcaggcccacttccggtattcttcccgaacactctgagccccaggagaaattccccacgtccaacctcagggcacggtatttcttgtt

SEQ ID NO: 868889 - DNA, 99 bp, Homo sapiens
cttgggttgtggcagacggatggcgaacgtgcaggtcgccgtgcgggtccggccgctcagcaagagtaccttctccaggcaaattccgttcccctgcag

SEQ ID NO: 868890 - DNA, 98 bp, Homo sapiens
tgggaagtcctctcttctccttgccatcctcggtgagatgcagacattggaaggaaaagttcactggagcaataccttctccaggcaaattccgttcc

SEQ ID NO: 868891 - DNA, 98 bp, Homo sapiens
tgtgacatggaggaagagagggttgttcccactgagaagggccagctccttgcagagcagcttgggcacttaatggggaaaaagagcacaggggagtc

SEQ ID NO: 868892 - DNA, 99 bp, Homo sapiens
gggaccccaggcgtgcaggttctctttgaggttaatggagaatcatcctcatttgcaccaactgataatgcgtctgtcacgggtactccagtagtgtct

SEQ ID NO: 868893 - DNA, 100 bp, Homo sapiens
atattaatgattataaccggagataggagatcagatcagggttagagacagcaaggcagatctgggttgccctgagaatctccggttataatcattaata

SEQ ID NO: 868894 - DNA, 100 bp, Homo sapiens
caagaaaatgatttgaggacagcttcaatcgcggtgtgaagaagaaagcagcaaaaccttcttcacaccgcgattgaagctgtcctcaaatcattttctt

SEQ ID NO: 868895 - DNA, 99 bp, Homo sapiens
aggaaacaggcgtacatcaggggctgttcttttgctgcaaatgaagttgatggaattacactgtgatacgactgactggctgctgctcagagcaaatta

SEQ ID NO: 868896 - DNA, 99 bp, Homo sapiens
aaaggaatctatcaaaaaggaagcatgttggacgatatctaatattacagctggaaatagggcacagatccaggcagcccagcaaatcatcgaactcca

SEQ ID NO: 868897 - DNA, 75 bp, Homo sapiens
tgagaggcccttcagggccgcggcggatacttggcatatcgaaattttatgattgacacgtatcgtctaaacccc

SEQ ID NO: 868898 - DNA, 98 bp, Homo sapiens
gccagagaagattccgtgaagtgtctgcgctgcctgctctacgccctcaatctgctcttttggttgacgaaggatcagagattggtgtattcgggcag

SEQ ID NO: 868899 - DNA, 99 bp, Homo sapiens
cgggcttgcttgctgactcctctcaaagaacgtgctggccaaagcgctctatgacaatgtggccgagtccccggatgagctctccttccgcaagggtga

SEQ ID NO: 868900 - DNA, 99 bp, Homo sapiens
ctttattagaagattctacaagtgacttaagaagcaaaaaattcaagaaactgactaaagctatatgtggactgagtccctgtcgcccaggctggagtg

SEQ ID NO: 868901 - DNA, 99 bp, Homo sapiens
ctgggcaacagagtgagactccatttgagctggatttcttgatctgctgtaatgttctcagaactttgcgcatgtccttcatgctggtgtctttctggc

SEQ ID NO: 868902 - DNA, 99 bp, Homo sapiens
ttaaatcaagatttaacattccaacacataaaaattatttatccaacagctcctcccaggtgacttctgggggaacagaaagcatactgatggcctgca

SEQ ID NO: 868903 - DNA, 99 bp, Homo sapiens
ggcacactttgaggacacagtgcggaagtgcttataaagatcccgttatctgactgtcaccaccagcaaatatagagacggggtttcaccatgttagcc

SEQ ID NO: 868904 - DNA, 99 bp, Homo sapiens
aaggacgccccggagcttggctacgccaaggagtctagcagtgagcagtacgtgcctgatgtgttttataaggttatgaagacagtatggagtttccag

SEQ ID NO: 868905 - DNA, 98 bp, Homo sapiens
agctaccgcagcatgagcgaaagctacacgctggaggtcatcatcagatttgaaatatttaaagtggatacaaaactatttcagcaatgcagacaatt

SEQ ID NO: 868906 - DNA, 99 bp, Homo sapiens
ggaaagtcccaggatgactactgtgtcaagattttctgccgtctcttggcaaaaatggcaaataatgatgctgttctgaagagactggagcagaagggt

SEQ ID NO: 868907 - DNA, 99 bp, Homo sapiens
gaagatccacatcaacattccacagctgctgaagaaaagactagcccgagtcaggaaccgaatattgtatctgacgcatcctgtaatactgaagagcaa

SEQ ID NO: 868908 - DNA, 99 bp, Homo sapiens
caagcttatccaggacctgctctccttcatcaatccacagctgctcagaatcaaaaagaccctctggctgtggacaaaataatgaaggacctggaccag

SEQ ID NO: 868909 - DNA, 99 bp, Homo sapiens
tgacttacttgccttggatacaaaattagtgaatttccatcagaatgttgtagtgtgatggcaggaggtactctgactggatggcatgctgatgttgct

SEQ ID NO: 868910 - DNA, 99 bp, Homo sapiens
gccaggtcaggatattttggacatctggtttgatagcggaacttcatggtcttatgttcttccagtatactgcattggaacaaaaactgaaaaaattga

SEQ ID NO: 868911 - DNA, 99 bp, Homo sapiens
tacttttactactgtgacaacattaacgatacggagttgccaccactgaaacttatgcattcattttgtgcattcaaggcggatgatggcccatgtaaa

SEQ ID NO: 868912 - DNA, 99 bp, Homo sapiens
tctgcagccctggatctattaaagggagcattccgatcatctgaggaacagcagggtgtcggttggtggaaatatgaattctgctatggcaaacatgta

SEQ ID NO: 868913 - DNA, 99 bp, Homo sapiens
ctatggaaaaaatggaagaatttgtttgtaagacgcaaaatcgaatgaagctaatggccgacaactacgaggatgaccacttcaaatcctcccattcca

SEQ ID NO: 868914 - DNA, 99 bp, Homo sapiens
cggttggggcgggaagagccggggccgtggctgacatggagcagtcccagaaatcctggatagaaagcactttgaccaagagggaatgtgtatatatta

SEQ ID NO: 868915 - DNA, 99 bp, Homo sapiens
taaaagtagagaaggatcaaggacggatgatgaagtagtacagagtgaaaagctactgaagtatgaccactacctagtgccgttcactctatttgaatt

SEQ ID NO: 868916 - DNA, 99 bp, Homo sapiens
ccagagtggtcgggctttttgaagactccacagcatcacagttagtgcttgacacgtcaacaggtagaaaaaacaatttttgttggctcccttcttcaa

SEQ ID NO: 868917 - DNA, 99 bp, Homo sapiens
tggagcagaaattggaggctcagcataggcctcattcacacttgctttcctggggttacagtcagctgatccttcatctaattaaacttcctgcagatt

SEQ ID NO: 868918 - DNA, 99 bp, Homo sapiens
acggccgccaccaagatgagcagggcccttgcggagttccgcgtccgaggtgtgaaggattttttatcaagcagaaatgcatcgaacaacgagaatcaa

SEQ ID NO: 868919 - DNA, 99 bp, Homo sapiens
agaagagcatgatcggcatgtccaccaaggcagctccgccactggctcaaggtgtagagggagcagagacgaagaccccaggaagtcatcctgcaatgg

SEQ ID NO: 868920 - DNA, 99 bp, Homo sapiens
taaaacaaggtgcagagaatatgatacagatgtattcaaatggatcttcaaaggccaaagaggtgctgaaaaaatatttggagtccaaggaggatgtgg

SEQ ID NO: 868921 - DNA, 99 bp, Homo sapiens
gcctcctgagtagctgggattacagatccggggtcaccatgtggcccagctggaccccctgggcattctggatgcagacctggactcctttgtgccctc

SEQ ID NO: 868922 - DNA, 99 bp, Homo sapiens
aacgctgcctacacatgttcctgcaagaggaggcaattgacaggaactacgtcccggggaagttgtcgccgtgatcctgaaggcgctgacctacgacga

SEQ ID NO: 868923 - DNA, 99 bp, Homo sapiens
agccaagttccccaacggctccccgtcgtcctggtgctgcagcgatttataatcgcttagatacaaattgctgtggattcagacctcgcaaggaagatg

SEQ ID NO: 868924 - DNA, 98 bp, Homo sapiens
tggactcatggaggctgagcatttattcagattgccagtagaaagccaacagacggtgcttcctcatcaaattgtgtgactgatatttcccaccttgt

SEQ ID NO: 868925 - DNA, 99 bp, Homo sapiens
tcatctgattccaggcctatctctggcacacgtcttagtccactagagctggcgcagttgtgtagcagttgagtaatgctggttagctgttaaggtggc

SEQ ID NO: 868926 - DNA, 99 bp, Homo sapiens
ctcttgcttctgctttcttcttcagtatctgatgaccgacgtcccatttcatgaaacacactgttgtccaccagaaaatgcctgcggtactgcacacag

SEQ ID NO: 868927 - DNA, 99 bp, Homo sapiens
tcggggcagctgacctcgcccacgcccagcagcagcagcaacagaggcaaatttctggagatgtgcaatgatctcttagctagagtggagccaccactt

SEQ ID NO: 868928 - DNA, 99 bp, Homo sapiens
acaacgagcagctcatcacccagtacgagcgggagaaggcgctgcgcaagcacgctgaggaggtgttacagcacatgaaggccgtgcaggcagatcagg

SEQ ID NO: 868929 - DNA, 99 bp, Homo sapiens
atccacgaagaaggtagaacttgacaactgcccttctgtgtctccttacctcagagctggaggagggaatgatattcagtggtgtttttctcaggtgaa

SEQ ID NO: 868930 - DNA, 100 bp, Homo sapiens
agagtttggagtgaatcttttctcagcagtgtccccgagggcttcttggtccctagtgtgcaaaacctccattggcaacattaaacttcactccaaactc

SEQ ID NO: 868931 - DNA, 98 bp, Homo sapiens
gaatacaaagtcacagtgactcccatctacacggatggcgaaggcgtcagcgtctccgctcctggaaaaacctctcctcagtgggtagtgcacttcca

SEQ ID NO: 868932 - DNA, 99 bp, Homo sapiens
ccgcgtgtacccggttgtcctcaggcgctgtcagtcattgaagtcaacaagagagacatagtcttcctggtggatggctcatctgcactgggactggcc

SEQ ID NO: 868933 - DNA, 99 bp, Homo sapiens
gaggcaggcgcggctgccggcggctgggactgaagagggacgggtcccgcggcgagcgagctcctgaggattcaagatgaccaacgaagaacctcttcc

SEQ ID NO: 868934 - DNA, 99 bp, Homo sapiens
aaacccatctaatcacagactcctatttgaagtatttgacgaaaatagactgggaatctcagtctttgaggagattttaatctcacatgcaaattcagt

SEQ ID NO: 868935 - DNA, 99 bp, Homo sapiens
ggccttgaggtggaggactcagaccctgagcctgaaggggaggcggaggacagaggaacagctgccccctgggttcccttccatcgacatggggcctca

SEQ ID NO: 868936 - DNA, 99 bp, Homo sapiens
cgacaccaagaagccctgcacccggtctttgacatgcaaggaacattaatcctgatgttctttttgaagtacacaactataatataaccacagtggaaa

SEQ ID NO: 868937 - DNA, 99 bp, Homo sapiens
atttacaagcaggaaccatctataacttcaggattatttctctggatgaagagagaacagtggtcttgcaaacaggctggtgagattggagagatgaag

SEQ ID NO: 868938 - DNA, 99 bp, Homo sapiens
cctggagtaaccctcactggagaatccagaggtaccacgaaaggcagtggtagaaaagccagctcgggcagcagagcgagaggcccgggccctgctgga

SEQ ID NO: 868939 - DNA, 99 bp, Homo sapiens
cagtggctacatcggaagagtcttcggcatcgggcgacagcaggtcacagtggacgaggtgttggcggaagctgttaaacgtttaatgaaagaagcggc

SEQ ID NO: 868940 - DNA, 99 bp, Homo sapiens
catgttcaccagcaccggctccagtgggctctggattttatattggaagacatggatcttgctgccaacgagatcagcatttatgacaaactttcagag

SEQ ID NO: 868941 - DNA, 99 bp, Homo sapiens
tggatatctgtgataaagttggtcagtctcgcactgggtgtaacctacccccaaccacaggagatgttagtaaagatgttggcagtaaaacaaatcttg

SEQ ID NO: 868942 - DNA, 99 bp, Homo sapiens
aacagcggatgattctggaactgggagaagatggctttaaagaatacacttcaaaatggagatctcctctcatcagtctcacctcctgcagcaactgaa

SEQ ID NO: 868943 - DNA, 99 bp, Homo sapiens
ccgggatctccactccgccaatcccctgtgcctggcgttgggcggtttcccgaggagcttgggccgccgcagtgcgacttcatgatagcatatcagaag

SEQ ID NO: 868944 - DNA, 99 bp, Homo sapiens
acctttcagcctcatagtggaaactaggcataaggaagaatgtctcatgttcgagtctggggctgtcgctgtgctcttgtcaaatcaacagtgccttga

SEQ ID NO: 868945 - DNA, 99 bp, Homo sapiens
aaacggttaggaaggagtatagatgacataggtcacctcattcatgaaggcctacagaagaccaatgatgcgagctcagagtcaatagcatccttctct

SEQ ID NO: 868946 - DNA, 100 bp, Homo sapiens
agctcggcgggagagctagaactttcttgccattcactgacattatacctgacaggatacattccttggttcttccgagcgctcagctctcccgccgagc

SEQ ID NO: 868947 - DNA, 98 bp, Homo sapiens
gatgagaacactgctctggatgatgcagaagaggagtcctttaggaaggttgactatagtcaatggggccaatggagccaagtgtatggaaacccaca

SEQ ID NO: 868948 - DNA, 99 bp, Homo sapiens
acgggacgtgcggcccagcgagttggtcggtcccggggtcacccgctacgggaagcaggcctcgccacaggtcatgttggcagcttcctattggtctct

SEQ ID NO: 868949 - DNA, 100 bp, Homo sapiens
ggcgacagagtgagactccatcttctggctttgaggcccttccccctcatccagggccccccatcctcttgctggtcataggcagggcctcccaggattc

SEQ ID NO: 868950 - DNA, 99 bp, Homo sapiens
gcagccgacagcagtgagctggccctgctggctgatgaggaaggcgacatgccaattcatgaacttctcagcctttatggttatggtagtactgttcga

SEQ ID NO: 868951 - DNA, 99 bp, Homo sapiens
tcccctctggctcccttcacctcatttgtctacaccatcaaggaggaaggcctggttcttcaaggattcactacaacattttctattgcctatatcttc

SEQ ID NO: 868952 - DNA, 99 bp, Homo sapiens
gaataaacatgcaatgaacccaaaaggagctggctttatgtgctggggcagaagagatccgatagctatgttctgctggagcattctgtgaagaaggca

SEQ ID NO: 868953 - DNA, 98 bp, Homo sapiens
gaagtcggaagaagcagacccagaaggctgacaagctccatgaggcactttgtgagtgtgccctccagactccttatgacagcttaaaactagggatg

SEQ ID NO: 868954 - DNA, 100 bp, Homo sapiens
ttttcagcctttgagaaacatcaatactataatcttaaggacttggtggtgtccaccaagtccttaagattatagtattgatgtttctcaaaggctgaaa

SEQ ID NO: 868955 - DNA, 99 bp, Homo sapiens
ccaactccactgcacagtacacacgagaagagatcaactttgggaaacttatcacaaagccttcagaaggaacaactttaagggtagaagatcttgtaa

SEQ ID NO: 868956 - DNA, 99 bp, Homo sapiens
ccacttcagaagtctctgtagctgtctctaagttgtcaccttcaagaactgtctggacaggcaggtaaccaagtcgagggtgtttggcaaagtacttct

SEQ ID NO: 868957 - DNA, 99 bp, Homo sapiens
caaggaactgatagcttatggttctccattgtgatgaaagcacatggtacagttgtattccctgaatgactataaaccacccatttcgaaagcgaaaat

SEQ ID NO: 868958 - DNA, 99 bp, Homo sapiens
tcgtgatcgtgactattcagatcatccaagtggaggttcctacagagattcatatgagagttatgttgctgatagtccaactccaccgccaccacctcc

SEQ ID NO: 868959 - DNA, 99 bp, Homo sapiens
ggcggcccctccttgggcctgcggctctctacgtccctgcggagcagccgacaagttggatggcttgaggactggtactaaaaggaaacgtgactggga

SEQ ID NO: 868960 - DNA, 98 bp, Homo sapiens
tcgccgttagcctgatcatcttcacctactacaccgcctgggtgattctcttgtgaattttgaagattgcaccggtcgacaaaggacagcctattttt

SEQ ID NO: 868961 - DNA, 99 bp, Homo sapiens
gtgaaatggagcaatttgttcacgaagtatcaaaaggtgcttaattaagaaaagttgtccatcaatctgagtagcttgattaggtagattgtcagtctt

SEQ ID NO: 868962 - DNA, 98 bp, Homo sapiens
gaaacaccaaaaggaatccgcaggtcagtatgggaatcctttaaataaatatatcagacattatgaaggattatcttacaatgtggattcattacacc

SEQ ID NO: 868963 - DNA, 98 bp, Homo sapiens
aagtagaaggaaaaacagaacgttgcaaactctggaaaaaaacttggaaaaagcttgtggtgaaggggggcaaaaaaaagaagcaagttctgaagttc

SEQ ID NO: 868964 - DNA, 99 bp, Homo sapiens
ttcttccttcatcctagctataaaccaaatgaccttgtggaagttaggtgtattgtacgagcattgaaagatccaaatgcatttctttttgaccacctt

SEQ ID NO: 868965 - DNA, 99 bp, Homo sapiens
gctgtgagagagatggcctggggggtggagcaaggcctgttggatcccagcctggagatgcccaaagatgagctgcccaaccataactgcattaagcac

SEQ ID NO: 868966 - DNA, 99 bp, Homo sapiens
catgagcactgctttaatagggacattggctccctggattatcaagagtttgtagttgacattgaatccaggctgaggatggaaggtgtggaacttaaa

SEQ ID NO: 868967 - DNA, 99 bp, Homo sapiens
cgagaggacaagagttgtagttaaaatccacccagagttactgggaggagctgttggataaataatttttatgtgttggaatgttaaatcttgatttaa

SEQ ID NO: 868968 - DNA, 99 bp, Homo sapiens
tcgggccccgcccggcagtcgcccgttgccatggaaactgcatccacagagtacccaagtggccttggaccatctggagtctgtgcctgagaaactgag

SEQ ID NO: 868969 - DNA, 99 bp, Homo sapiens
ccccgagcttccagtgaagatacctttacgacctgtttctttcattaaggagatgctttcttcctttcgttcgtcatacactctagtaccagctacttc

SEQ ID NO: 868970 - DNA, 99 bp, Homo sapiens
tcaggaagcagaatattccttatatggaaagggcactggtgtcctgcaggaagagatgaaactctgcagctggtttaaacacctgccagcatccatcgt

SEQ ID NO: 868971 - DNA, 99 bp, Homo sapiens
ggatttcgttatatcccctttagaatatatcaggtggtgcccaggcaacatgggtgactggagcgccttaggcaaactccttgacaaggttcaagccta

SEQ ID NO: 868972 - DNA, 99 bp, Homo sapiens
ccgaaaaacactgcccagtgacagtgaatccttggcatatgaagaaagctttcaaagtcatgaacgaattaagaaggctggaatgcagtggcgtgatct

SEQ ID NO: 868973 - DNA, 99 bp, Homo sapiens
ccagaaggcttatgaggatggctgcaagactgtcgacctaaagcctgactggggcaagcttctgcagaaagccgtcattacacctgattttgaaaaaaa

SEQ ID NO: 868974 - DNA, 98 bp, Homo sapiens
gaaacagaacctgtccaggagctggcatgacgtgcaggtctctagcgccaggggaaatgctgtctgtagctgagcacttcctggagcagcagatgcac

SEQ ID NO: 868975 - DNA, 98 bp, Homo sapiens
ccctaggcaacgattccgacagcgccatccaggccccctgggggcgcccgtctcccacagcaaaggatttagacaagagtcaagaggagatcaaaaaa

SEQ ID NO: 868976 - DNA, 99 bp, Homo sapiens
gtctctgcagacagatgaagatgaacacagtattgaaatgcatttgccttatacagctaaagccatggaaagggcaccggcagaagctggaggaccaga

SEQ ID NO: 868977 - DNA, 99 bp, Homo sapiens
gggtcaagctgatttccaactgggctgttccagggatctgaatatgctagtagactgaatgcatccatttctcggcttccagggtgttccggcgtcctc

SEQ ID NO: 868978 - DNA, 99 bp, Homo sapiens
ctcggcagtgtgtggggtctcgctggacgttggaggaaagaaggaatatctcattgcaggtatctcgggggagctttgtgccttgatggatcaagttca

SEQ ID NO: 868979 - DNA, 99 bp, Homo sapiens
gagatccaagagattcagtatcactcgctcccttgatgatcttgaggcctactcctccgtcccggtcagcaacatgaactcaggcctgggctccatgaa

SEQ ID NO: 868980 - DNA, 144 bp, Homo sapiens
ccgagccggcgtttctggcccgcttcaaggaacgggtcggctacagggagggacccaccgtagagactaagaaagagcgggatttagaattggccgctcgcatcggccagtcgttgttgaagaagaacaagaccctaaccgaga

SEQ ID NO: 868981 - DNA, 99 bp, Homo sapiens
gcccaccccggtgccttgctctggaagttccaggaccgtctgcagccctaacaacaatgcagctcttctccaagcaaaatccttcaagacaagaggtta

SEQ ID NO: 868982 - DNA, 99 bp, Homo sapiens
ttccaggtgtcccagaaacccaggaaatcgagactcatgactcccagagaggatggcatctagaagacgccagcccccagcaggacagcatctttttct

SEQ ID NO: 868983 - DNA, 99 bp, Homo sapiens
gctctttttgaagattctgcaaccggggcacagccacctttataacaaccgctatgctgggtatgttgggaaagactataaggagcagaaggggctctg

SEQ ID NO: 868984 - DNA, 98 bp, Homo sapiens
gtgtcgctgggctgtcggcctggaccttgcagccgcaatggcaagttggacaaatgcaagtaaaaagcaacgtgaaaagctccttgagttgatacgcc

SEQ ID NO: 868985 - DNA, 100 bp, Homo sapiens
aaatggcctttcctccgtacatctgtcttcaagttgcttcagttttgtcacagctttctggagcttttcctcagactctgggagttcaggaaaggccatt

SEQ ID NO: 868986 - DNA, 98 bp, Homo sapiens
gctcctctgtgcatcctatcccatccccatcatcctcttcacagggttctgcatcttagcctgctgatgccatactgctgttaacatatgtgacactg

SEQ ID NO: 868987 - DNA, 99 bp, Homo sapiens
ttctgttatcgctggttcctgctggattttaagagaggacgagtctcgaattaaggccactgtgatggacgtgaagcccgtggactacagagagtatgg

SEQ ID NO: 868988 - DNA, 98 bp, Homo sapiens
atctgtccaagtccctctcggcagcactgctcacagctgccctcctcacctttgcataaagccaaggtagaagcaatgaccctggacctcgctctgct

SEQ ID NO: 868989 - DNA, 99 bp, Homo sapiens
gttttcacagcctgaaagtgatgaggttcatgtgtgcccagctgcccaaccccgtcctggacagcatcagcatcatcgacacccccgggatcctgtctg

SEQ ID NO: 868990 - DNA, 98 bp, Homo sapiens
cgctgctggcgctctggctgtgctgcgcgacccccgcgcatgggcagctggtggaatttttgaagaaaatggaatctcgaggccccctttcgtgcgac

SEQ ID NO: 868991 - DNA, 99 bp, Homo sapiens
acttgctctggagggaagagcgatgggagagattctttcttgtggagaagttattcatgtgaagatccttggaattttggctcttattgatgaaggtga

SEQ ID NO: 868992 - DNA, 99 bp, Homo sapiens
atctttggtgccctggttattgtgactgtgggaggcttcatcttctggagaaagaagaggaccaggaagaaacaggctcctgccagcaccgacagcaac

SEQ ID NO: 868993 - DNA, 98 bp, Homo sapiens
cgggccgctctcgccgcccgggccccgcggctgccgcagcattcccgggaaggtatggaaacctgacaagcccaaactgtgaagaagatggaagccaa

SEQ ID NO: 868994 - DNA, 98 bp, Homo sapiens
ggagcgcttggaccccggcttctgggacgcgtcagagcatggatcattttgatgacattggtcccagtgttgtaatggcctccccaggcatgatgcaa

SEQ ID NO: 868995 - DNA, 99 bp, Homo sapiens
gtacctgctgagaacggccaacaggctctttggagagaaaacttgtcagttcctctcaagacggtgccgagacctcaaggccaagggaattttatttgt

SEQ ID NO: 868996 - DNA, 99 bp, Homo sapiens
cccttatggtggcatggagaatccttgccttacttttgtaactcctactctactggtattatacctgaagaaccttagccctcgggtgactgaaagaga

SEQ ID NO: 868997 - DNA, 98 bp, Homo sapiens
gcagttggggaaagtaattttgtttgccgaagtgacccccacaacgatgcgtctcctggatgggtggcccatggcgccctcagtgatggtgccattga

SEQ ID NO: 868998 - DNA, 99 bp, Homo sapiens
ttagcagtcacgacctccagcacagtaccccaaggagataactctggaggcatttgcagttattgtcacccagatgctggcactcagtctgggaatatc

SEQ ID NO: 868999 - DNA, 111 bp, Homo sapiens
tggggcctaggcgatgatccggcattaaggagctgggatcatcctccgtctcagacagtgtttaagaatgaaagcctcaacgcagaatcaaaatctggctgcaaacttcag

SEQ ID NO: 869000 - DNA, 99 bp, Homo sapiens
gcttgaagcaaatgttcatcctccaggcacctggcactgaatccagagagtggctgactacatcgacaaatggcagcctgtaatcttagcactttggga

SEQ ID NO: 869001 - DNA, 99 bp, Homo sapiens
cctgggagctggaggaaccgcgtttttcagaagaagtgaagtcaagatgaagaaccatttgcttttctggggagtcctggcggtttttattaaggctgt

SEQ ID NO: 869002 - DNA, 99 bp, Homo sapiens
gcttttagaccaaaatatgaaagacttacaggcctcgctacaagccattggatttaatgtagagacggtgacgtacaaaaaccttaaattccaagtctg

SEQ ID NO: 869003 - DNA, 99 bp, Homo sapiens
tgttgttgctgctgctgctgctgctgctgctgctgctgctgctgcttttggttactggtctcttcactcatgcatgctgtaatcccagttacttgggag

SEQ ID NO: 869004 - DNA, 99 bp, Homo sapiens
tctccaaaaggacctgccagagactgggagtgttgactgctgcaaggaccaaggttacaatggccaacattggaataaatggaaatcattctctggaaa

SEQ ID NO: 869005 - DNA, 98 bp, Homo sapiens
ccaggttctggtccgggtagattgggagcggaggtttgaccacatgcagcagcattcaggtttctgcataaagaccaactcctcggaagggaaggttt

SEQ ID NO: 869006 - DNA, 99 bp, Homo sapiens
agagaaatcgcaatggcaatgcacatgtctccaacaacaatgttcaccatttcttctacaatgttctgtacaatgtcttgtggcttttcctcacaatca

SEQ ID NO: 869007 - DNA, 99 bp, Homo sapiens
atgagatgattgccaaacccccaggcagctggctaagagtcttgggcaggctggtgaaattgagcctgaaacagaaggaatactaacagagtatggcgt

SEQ ID NO: 869008 - DNA, 98 bp, Homo sapiens
cagatcttcacagcacagttcctgggaaggtggagccaccagcctctccctggttctggctccttggcagcaatggctgtatttgaagataagtttag

SEQ ID NO: 869009 - DNA, 98 bp, Homo sapiens
tgacagggatgatgaagaagacctgctggatggtgcttctcagcttcacgggaaagggcctgctgtaccacggaaattgtgaccgcttcagaggcaag

SEQ ID NO: 869010 - DNA, 99 bp, Homo sapiens
tcaccctgacctgtttgaacagcatcacacacctacctttaaccacaggttcagaatttaacattacgcagccagaagttgggtgtattatctagctca

SEQ ID NO: 869011 - DNA, 99 bp, Homo sapiens
cctggagacggtgattttgggcctattgaagacacctgctcagtatgacgcttctgagctaaaagcttccatgaaggtggttgtgtcaaaccgattggt

SEQ ID NO: 869012 - DNA, 99 bp, Homo sapiens
aacccgtgggcctgtggactgcagcctcggcggtcagcaggttcaggaagatttgactgaagagaaaaaaagggaactggagcataatgctgaagagac

SEQ ID NO: 869013 - DNA, 99 bp, Homo sapiens
agctcagttaatgaaggatcaacgtatcataaaaggtccccaggtgcatccaatttttcaactttaccaaagatctctccttcatctctatcaaataat

SEQ ID NO: 869014 - DNA, 99 bp, Homo sapiens
tgagctgcctgaaaatgcactcggatgccgccgctgtcagctctgacgcccgctctgcggcttcggtgtttgaacaggccacagtccaggagcgcttac

SEQ ID NO: 869015 - DNA, 99 bp, Homo sapiens
tacgcctgacgggcccggcggcggctgagccgcgctgcgcagccgacgcgggaatgaagcgggcgctgggcagggaactactggagaccacgtgccgcc

SEQ ID NO: 869016 - DNA, 99 bp, Homo sapiens
tgatggagaagctctaagtacactcgtcttgaatagatattcaatgcaggaaatgtatgatgtagtatcgggagtggaggattacaagcattttgttcc

SEQ ID NO: 869017 - DNA, 99 bp, Homo sapiens
caggagtgtttggaaaggggccgagatctgttcttttggagaaaggcacctcggatgtcacggtgatcttgctcttgctcctttcgatggtcaccaccc

SEQ ID NO: 869018 - DNA, 99 bp, Homo sapiens
tccagactgtcttcaacaagtacatgaagatgtctggcgataaagggatttctgccttccctgaatcagacaaccttttcaaatgggtagggaccatcc

SEQ ID NO: 869019 - DNA, 99 bp, Homo sapiens
gctaccgggagctggtcaagaactgggtgaggtggctttgaccccgggttgcccggccagcacgaccgaggaggtggctggacagctggaggatgaacg

SEQ ID NO: 869020 - DNA, 99 bp, Homo sapiens
gcaatgccctggtctgccaggtagacaacgaccacaaggaggccgtgggcaagatgggctttgtcgtggaaagaccacagcaagattctttcattcgtc

SEQ ID NO: 869021 - DNA, 99 bp, Homo sapiens
cagcccgcctctgtgccactttgcatcccacgccggaggaggcattaacgagaccgggccattgcgtggtacacccctatccactggaagcaagcgtgg

SEQ ID NO: 869022 - DNA, 99 bp, Homo sapiens
ttgtaattaaaggcgattttgaaacaattaaaatctgtgatgtaggagtctctctaccactggatgaaaatatgactggatccacctctgatgttcagt

SEQ ID NO: 869023 - DNA, 99 bp, Homo sapiens
gggagagtccagccaatggaggtcagcagggcagtcacctggcccatggtcaccaagggctccacacggacaatctgtaatcccagtgctttgggaggc

SEQ ID NO: 869024 - DNA, 99 bp, Homo sapiens
ttttcctgaaggccaagacccggcaaaacacggcatgtgaacattctgcttttcatggggtacatgacaaaggacaacctggcaattgtgacccagtgg

SEQ ID NO: 869025 - DNA, 99 bp, Homo sapiens
ggcagatcgtgggacttctcagcctccataattgagtgagccaattccctgatatggatgtaatgaggcccttgataaatgagcagaattttgatggga

SEQ ID NO: 869026 - DNA, 98 bp, Homo sapiens
agctcagtctgctatcgtacattaggcctgacgttaaagttggttgaagccatggataacagaacccacagatgcagagggctgactgtacaagtctg

SEQ ID NO: 869027 - DNA, 99 bp, Homo sapiens
aatggtggtgatggcgcgactctcgcggcccgagcggccggaccttgtcttcacctccggattccactcatgtggaaggacacagaatatttcaagaac

SEQ ID NO: 869028 - DNA, 99 bp, Homo sapiens
tggttctcgaaggcccgcggcgccccgtgctgcaggtttgcaactgtgcgatatgatcaaggagccaagaacattcggaaccagttcatgcatctgaca

SEQ ID NO: 869029 - DNA, 112 bp, Homo sapiens
agagctattgaaattgtagagtcagatgtcaaaagccagactattctcaaaccactgtctgaataccgccaggacctggagcagccggaccgggtggacatgctgcaggagc

SEQ ID NO: 869030 - DNA, 99 bp, Homo sapiens
cacaggatgaccaccaccctcgtgtctgccaccatcttcgacttgagcgaagttttatgcaagctttccccagacatggccaacaagggtccttcctat

SEQ ID NO: 869031 - DNA, 98 bp, Homo sapiens
caaacgccaggtgcttattaggccgtgctccaaagtcatcgtccggtttctcactgtgatgatgaagcatgccctggtacctgacagtgtaaagaagg

SEQ ID NO: 869032 - DNA, 99 bp, Homo sapiens
ccagcactttgggaggccaaggaatttatctcactaatatcttgaaaacagaagaaggcaaccctgaggtcctaaaaagacatggaaaagagcttataa

SEQ ID NO: 869033 - DNA, 99 bp, Homo sapiens
ctcccaagtagctgggattacagcaatgccaagtgagtacacctatgtgaaactgagaagtgattgctcgaggccttccctgcaatggtacacccgagc

SEQ ID NO: 869034 - DNA, 98 bp, Homo sapiens
gagagtggagatggcaacacagcaaactgaaaccgtgtcagttcagtcttcggtattggggaagggtgtaaaacatcgacccccaccaatcaaacttc

SEQ ID NO: 869035 - DNA, 98 bp, Homo sapiens
atcaatcttaccagagggccctcaggaaacttggatttaactggccagaagcaggtattcaaagcagagaacaatccctgggtgacccccattgcaga

SEQ ID NO: 869036 - DNA, 99 bp, Homo sapiens
gtaaaaggctgagaagcttaaggctgattcgtcatttgcaaagatctgggaagcaatattagcaaagcaatccatgagcttggcaacatttctgaggat

SEQ ID NO: 869037 - DNA, 99 bp, Homo sapiens
gagggcacgtgtttgcggttcagccctttgatgaccgcagcagctcttcaccaccaggagtgttccttgagaaggactatgagatttaccgggattaca

SEQ ID NO: 869038 - DNA, 99 bp, Homo sapiens
cctcccaaagttctgggattacagatggtcctggtgctgcccaggaacccacgtggctcacagatgtcccagctgccatggaattcattgctgccactg

SEQ ID NO: 869039 - DNA, 99 bp, Homo sapiens
tctatacctactgggttcccctggccctggccaacgtcaacattgggagcctcatctgcaatgtaggggccggtggacctgctccagcagctggtgctg

SEQ ID NO: 869040 - DNA, 98 bp, Homo sapiens
ctcggagctgcacagcgtgcgcaagctcaactgctgggccaattcctgtccccccagcagcatggcatcgtgtgctgaaccctctgagccctctgccc

SEQ ID NO: 869041 - DNA, 99 bp, Homo sapiens
cgcataaacagcacggaagcgcggacggcgcacgacgagtactggcatgcgcacgtggacaagggaagaaggagaaagggccaacccctgaagaagcaa

SEQ ID NO: 869042 - DNA, 138 bp, Homo sapiens
cctgtcttcagatcttcacagcacagttcctgggaaggtggagccaccagcctctccttggtgtagtcgccgccgccagccgccatgggcaaacagaacagcaagctgcggcccgaggtgctgcaggacctgcgggag

SEQ ID NO: 869043 - DNA, 99 bp, Homo sapiens
tgaagcgtgctaaagtgtctcaagcactgtttgcaaaggttgcagcaaccaaaagccaggactgatcctttgaaatactccagccatgactaaaagaga

SEQ ID NO: 869044 - DNA, 99 bp, Homo sapiens
acccgatccacaaatttctggctaaagcgaagaacactgaaaggttcaaaacctccactatagtccacctgctgcggctggtacctctgctgggactgg

SEQ ID NO: 869045 - DNA, 99 bp, Homo sapiens
cagttggagaagatctatgggtcagacagaattgtacaaacccgtagtgctgatgaaccaatgacaacatttgttgtctgtaatgaatgtggaaatcga

SEQ ID NO: 869046 - DNA, 98 bp, Homo sapiens
gtggctgtcgccccccaccctgcagccaggactcgatggaggtgttacagaacatcctggacactgaaaaagaatatgctaaagaacttcagtctctt

SEQ ID NO: 869047 - DNA, 98 bp, Homo sapiens
ccgcattatgtgctcctagaagtccattatgataatcccacttatgaggaagcttcgatgtttttgaagcaggcatttgaaggagaataccctaaatt

SEQ ID NO: 869048 - DNA, 98 bp, Homo sapiens
gaagatctctgccctcaagagtgaaatccagaaggagctctattaccaggttttaaacttcgccatgatcgtgtcttctgcactcatgatatggaaag

SEQ ID NO: 869049 - DNA, 99 bp, Homo sapiens
tcatagtagatgctttcctacagcagttacccaactgtgtcaaccgagatctgatagacaagatatgagaccttggtggggacaattgggaaaaagttt

SEQ ID NO: 869050 - DNA, 75 bp, Homo sapiens
taggattatacattgtaagaggtgacaacgtgaagaagagtgacaggaccaccctagattcacaggaaggggact

SEQ ID NO: 869051 - DNA, 99 bp, Homo sapiens
gccagtcttctatgtttccacatcggtcagaaaaagattttctggaactaatgcaactgaagtatcatgagaaagctgcagacaaaggggtttatatca

SEQ ID NO: 869052 - DNA, 99 bp, Homo sapiens
ctgctgattatcctccttgctgaggtgaccttggccatcctgctctttgtatatgaacagaaggaaatagctcgtctgctggccctggaggaggctacc

SEQ ID NO: 869053 - DNA, 98 bp, Homo sapiens
gcctgcctctgccctctcagtgcaagacccggatgaggagcacctgaagaaatcaagatgcaccgtggcctggcggcgagcccccggtcaccttcctc

SEQ ID NO: 869054 - DNA, 99 bp, Homo sapiens
caccaaggtgcccaccatggccttgacggtgggggtgggcactgtcatggatgctagagagcacctccttttgtggctcgggagacgctaagggcctgg

SEQ ID NO: 869055 - DNA, 98 bp, Homo sapiens
ggtgtcaggactaagagaagtcacaaaacagcagatttcccaagagcagcggaaaatgatccagtcacaggtatagcactctccctgggcgcagggcc

SEQ ID NO: 869056 - DNA, 99 bp, Homo sapiens
cgctgaagcgcgcgggcaaggaggtgctgctggaggaggagaaggcagagcccccccaggctatgaatgccctgatgcggttgaaccagctgaagccag

SEQ ID NO: 869057 - DNA, 99 bp, Homo sapiens
gacattctccacctcctgggaggccagccattcccaaatgccccaaggatgaagaacggagacggtttaaatgtgatactggtgtagatctccttgttc

SEQ ID NO: 869058 - DNA, 99 bp, Homo sapiens
cttgtttactgagcccgcagcactcaatcccttacgggatggggaacatgcagtctttaaaccagaggagttacgccaggccctcatgccaaccctaga

SEQ ID NO: 869059 - DNA, 99 bp, Homo sapiens
ctgctgttgcagcacttgttccccaaacaagtgctcctacattctgttatctaaatgatctggatagaatatcccagtctaactacattccaactcagc

SEQ ID NO: 869060 - DNA, 99 bp, Homo sapiens
gctgctgctcttcccgctgctgctcttctccaggctctgtgatggctgtatgggcgaaaaagatgaccgaaattcaaactcctgaaaatactcctcgtt

SEQ ID NO: 869061 - DNA, 99 bp, Homo sapiens
cgacttccagcgcagagtgccctacaactacctgcagcgggcctacatcaagtattccactgaactgaagaaactctactgccaaattgcaaagacatg

SEQ ID NO: 869062 - DNA, 99 bp, Homo sapiens
gacagcgggaggcagagggaggaacctggacgccggaagccgggaaatggttgatccccatcttggtgaatgggatgaagtactcggaaattgacatca

SEQ ID NO: 869063 - DNA, 99 bp, Homo sapiens
ctcgaggtcattgacaagctgctcctctgatatcacgttgagaggggggcgtgaagtacagaacctgctaaggccatcaaacctattgatcggaagtca

SEQ ID NO: 869064 - DNA, 99 bp, Homo sapiens
gggatggcagttttacagtctccgcacaggtatgcaaccactcatgtattcggttcaggaagcattaaatgccagaccatggtggattcgtatggggac

SEQ ID NO: 869065 - DNA, 99 bp, Homo sapiens
cggactccatcgactcccccggctcttagactagataacaggagctttgtgtcataggaagaaattgctggttgaacctgagatcttataagggctagc

SEQ ID NO: 869066 - DNA, 99 bp, Homo sapiens
ttcaaacttcaacagaatgtggcaaccaggggtatcatcttatttcgtccttcacatctcactaacaagtttgaggacaagactgtggcatatacagag

SEQ ID NO: 869067 - DNA, 99 bp, Homo sapiens
tgcaggcatgttcctctatgtagccttggtggatatgggtggagagattcaaccagttagcgtgaaagttggagataaagttcttctcccagaatatgg

SEQ ID NO: 869068 - DNA, 99 bp, Homo sapiens
aactatcatggacagagagaaagaagcttgccggtggtggtgtgcacattgagccccggtatagacagttcccccagctgaccagatcccaggtgttcc

SEQ ID NO: 869069 - DNA, 99 bp, Homo sapiens
tcgaagtggagctgggcctgcctgactcacccattcatcagtaggataagttctgaacgtcgaaaagaaaagtctcgagatgcagccagatctcggcga

SEQ ID NO: 869070 - DNA, 99 bp, Homo sapiens
cggcttatcgaacagagccgggagttcaagaagaacactccagagctccggggaaccttgtacaacaccggccgacatgtctccttcctgcctgcaccc

SEQ ID NO: 869071 - DNA, 98 bp, Homo sapiens
agtatcagagattgcttcgtgactggaaagtgggaagatgataaagatgcagccaaggtcttagcagaagatgggattaatgaaaatcaagttccatc

SEQ ID NO: 869072 - DNA, 99 bp, Homo sapiens
gaaagatcttagaccagcaacagattatcatgtgagatcacaaaatttgtccaggatagacatagagctagaagaaacagacttcgtaaagatcaactt

SEQ ID NO: 869073 - DNA, 98 bp, Homo sapiens
gacacttttcttcagaagctggtcgccgccggcagatttcaacactacacttgcacaatgtctttgaaaccaagagtagtagattttgatgaaacatg

SEQ ID NO: 869074 - DNA, 99 bp, Homo sapiens
gcttatccaggacagggttgctgagcctgtaacccgagtgcctgccgggcggttggccggggcctccagcccaagggtgtgcgggtgaaggagacagct

SEQ ID NO: 869075 - DNA, 99 bp, Homo sapiens
ttaaagacaccccttcctaaaaagtgaagccttctccttccaaaaagtttcggtctggctcatctttctctcggcgagcaggctccagtggcaactcct

SEQ ID NO: 869076 - DNA, 98 bp, Homo sapiens
ggaatttgattaactcattcaaggttacccagttgatggccctctacctgacccaagtatgatccgtggcagtgtgccaaaccagatgatgcctcgaa

SEQ ID NO: 869077 - DNA, 99 bp, Homo sapiens
tattggaatggaaccattggagaaactggaggtcacctcgaaagttctcaccactaaagagaaccatggagtctggcagtaccgccgccagtgaggagg

SEQ ID NO: 869078 - DNA, 99 bp, Homo sapiens
ttatggcagagttagctaaagaactccctcaagtttcatttgtgaaggactgttaaagattcactccagtcagtccagtccgcagcaggccgtcctgac

SEQ ID NO: 869079 - DNA, 100 bp, Homo sapiens
tccaggtacctgttccgatgctgctactgctgtttctggtgtcttgacaaattgtcaagacaccagaaacagcagtagcagcatcggaacaggtacctgg

SEQ ID NO: 869080 - DNA, 98 bp, Homo sapiens
cactccaaggcatccctgcccacgggcgaaggcagcatcagccatgaggagcagaagtcagtccggctgggctattgagtggccagacttccccaaca

SEQ ID NO: 869081 - DNA, 75 bp, Homo sapiens
catcagagcatgtcacagatctatggactcattcatggtgacctagtcagagctgacaaatttggcaggattata

SEQ ID NO: 869082 - DNA, 99 bp, Homo sapiens
caaggaccagtccctcggggggaacgtggtcatcagtggtcagtggggaaaaggaaccagtgatttacttgcttgggaccccctatttggaccatctct

SEQ ID NO: 869083 - DNA, 99 bp, Homo sapiens
cggaaaaaggcaaggctgtctttggtcatcaggagtcccagcctgcttcagagtggggccaagaagaaagcacagactttccatttcaacacggttgaa

SEQ ID NO: 869084 - DNA, 99 bp, Homo sapiens
gctgtttctcttcgccgacgaaacctccacagctgttgagaaaaaggagaaacctcttccaagacttaatatccattctggattctggattttggcatc

SEQ ID NO: 869085 - DNA, 99 bp, Homo sapiens
attccagaagatttaactacgtggtccggatcaggatcctcatgaccagccaaagagaagaagaattaggaagcataaatcaaagaaaaaatttaaaaa

SEQ ID NO: 869086 - DNA, 98 bp, Homo sapiens
ttctgtctctatgaatgtgactaccctggttacctcatatttgctgatgattcctctgatcatgtcagtactttatgtctgggcccagctgaacagag

SEQ ID NO: 869087 - DNA, 99 bp, Homo sapiens
ccccagagcctcagtttgtgcaggacaccgacatggaacagggactcactggggtgccgcaaggtgtgtggcctgaatgtctctgaccgctgtgacttc

SEQ ID NO: 869088 - DNA, 100 bp, Homo sapiens
gtcaatgtgacatgcgtttcatacagaagtacctgcttcagagtgaatcttctcatgtctctgaagcaggtacttctgtatgaaacgcatgtcacattga

SEQ ID NO: 869089 - DNA, 98 bp, Homo sapiens
cccggctcgccggctgcgggagtggcctcaagatggatgaagacggcggcggcgagggtggtggcgggctcaagggttcttgttgatgcacgagataa

SEQ ID NO: 869090 - DNA, 99 bp, Homo sapiens
tgtggctctgcagagagaaggcatagactcccagatgtggaagatgtgaaatttgtcatcaattatgactaccctaactcctcagaggattatattcat

SEQ ID NO: 869091 - DNA, 99 bp, Homo sapiens
tggaggacagtcccatgttgaaatctccttttgcagatatggaatatatgaacgctgtcgagaattggtggaagcaggttatgatgtacggcaaccgga

SEQ ID NO: 869092 - DNA, 99 bp, Homo sapiens
ttcttccattgccctgtcaaaacaaccttctcctcccattcttgttatttttagacgaaaatccacagaattcagactgggaggcttccatttcaaaat

SEQ ID NO: 869093 - DNA, 99 bp, Homo sapiens
aggaggagcgcagcccggcctcgggcaacatgcaggttctggtgacttacggtggcgatcccatccctaaaagccctttcactgtgggtgttgctgcac

SEQ ID NO: 869094 - DNA, 99 bp, Homo sapiens
ttgactgcatggggattgataggcagcatattcctgatacatatctatgtgaacgttgtcagcctagagggaagtggaatcccgattgcttgatgattg

SEQ ID NO: 869095 - DNA, 98 bp, Homo sapiens
acgttcatcatggtgcctggctgccaggcaggcactgtggttggcgtggacgagagcactgctttctcatggcctgtgtgtgacatgtgtggcaacgg

SEQ ID NO: 869096 - DNA, 98 bp, Homo sapiens
tacttacagtcacgttactacaggtattctctactgccgctgatggtcaaacgcaagtggaaattaaagtgtgtcagggtgaaagagagatggctgga

SEQ ID NO: 869097 - DNA, 99 bp, Homo sapiens
aaactttcgaactttttttagacacaggaagtagcaagaagggagatgccaagtgacaatcaccaggaagatggagttcaaagaaggacgcagagccag

SEQ ID NO: 869098 - DNA, 99 bp, Homo sapiens
gatggggcgctcaagaatatgctggagtccttcaataatgttaaacagtggctgcaggaaatagatcgttatgccagtgaaaatgtcaacaaattgttg

SEQ ID NO: 869099 - DNA, 99 bp, Homo sapiens
ctggctcagccgcaagtacccgtccatcatagtcaactgcgtggaagagaagatctgtctcgtaactgtgtaatcaaggaactagcaccacaacaggaa

SEQ ID NO: 869100 - DNA, 99 bp, Homo sapiens
ccactggcatcaccgacacactatgctccctccaaagccaaaaagcttgtggtgaaggggggcaaaaaaaagaagcaagttctgaagttcactcttgat

SEQ ID NO: 869101 - DNA, 98 bp, Homo sapiens
ggcgcagaaaccccgttgacaaggcactgctttttcatgacgcctacaaggagaagatgaaggagctgtcggtgctgtcgctcatctgctcctgcttc

SEQ ID NO: 869102 - DNA, 99 bp, Homo sapiens
tccaacaactcccctcggacctcagtatgggctggaacctgacacttggcatgacagtgtgaatggtagtgtctagaaagggtatgtcccttcaagaga

SEQ ID NO: 869103 - DNA, 99 bp, Homo sapiens
gctggagcccacctgctttgagaagagcaatgacattgggggcctgtggaaattttcagctactccagagcaaataagcatggacctcaagaatgaatt

SEQ ID NO: 869104 - DNA, 98 bp, Homo sapiens
ttttgtcgcgctgggacctaccctgactacgggagttgggaggacccgggacaccgcacagccgggaaatgagggaccacagagcaccagcctgcatg

SEQ ID NO: 869105 - DNA, 99 bp, Homo sapiens
tatggtttctgcattttgttaagaagcacctcatgcaagcgagggacctgggactgctcacagccaggtttattcttcagtccaaggaagcaattcaca

SEQ ID NO: 869106 - DNA, 98 bp, Homo sapiens
agacatacaaaagcctcttctgaaggaaaagacagtgtagtcctgcaaaacattttgagttcaaatctgaacatcaatgatgtactagggaactactc

SEQ ID NO: 869107 - DNA, 98 bp, Homo sapiens
tgatctttggtctcttcggaaagactgttccaaaaacagtggataattttgtggccttagctacaggagagtgtcagtgctacaatggagttctcttg

SEQ ID NO: 869108 - DNA, 99 bp, Homo sapiens
gagcagaggaagccttgaggacctactcacagataggaattgaagatgatccctctgataagccaccttgccgaggctgctcctcctacctcatggagc

SEQ ID NO: 869109 - DNA, 99 bp, Homo sapiens
atgaaatgcagaaaaaagatcacaagcaactctggatgggattgcaaaatgaatcgggaccagtattcacatctgctaagtgatcattttctgccatac

SEQ ID NO: 869110 - DNA, 99 bp, Homo sapiens
tctccagccgtggtgagcccaatggtggggaacacagcgcccccatcttccctctcctcccagcttgcaggcttagaaaggaagaggttttatcagaat

SEQ ID NO: 869111 - DNA, 99 bp, Homo sapiens
aaaaagaacagatacaaggacatactgccatcatttcttgaagcccctgcaacggttcctgaaacctcaagacattgagatcatctttatcaacattga

SEQ ID NO: 869112 - DNA, 99 bp, Homo sapiens
ggctgtagtgccatctctaacggacagttcagaatctgtatctgggcaacgaccaaacacgagtgtggagcagggacggagtcttgctctgttgcccag

SEQ ID NO: 869113 - DNA, 99 bp, Homo sapiens
aagatgcagttttttgatgctgaggagctcctggtcgatgaagaggatgatgtttttggtgaaggatgttcaccatgacaagagccatggaagaggctc

SEQ ID NO: 869114 - DNA, 99 bp, Homo sapiens
gtcagttcgagcctggtcccccaggctaggaggagacgaatgaaagaatcttgctgtggtctttccataggcactggctttccctgatgacagttgata

SEQ ID NO: 869115 - DNA, 99 bp, Homo sapiens
aacagggcggcactggcccgccacagcgacgccggcgccgagggacaccgcagtatgaggcagagcacccaatcaatgtgagacgagaccccagcatcc

SEQ ID NO: 869116 - DNA, 98 bp, Homo sapiens
ccatggccgccgccgatgccgagatcggcgccaatggtgtgccatagccatcctctttgcagtcctgttggttgtgctcatcctcttcttagtgctgt

SEQ ID NO: 869117 - DNA, 141 bp, Homo sapiens
gcccgtcgctgtcagctgtcaacaaaggatgcgaatgctggccgcttcctgtgggcttcgtgtcacccagaggtttgattctcataaaggtttctggtgtcagttactggaagaaggtaaaacaaaatgccttggaaagag

SEQ ID NO: 869118 - DNA, 99 bp, Homo sapiens
ggcaagtttggtgtccagatggacagagttgatcagagtcaagggtccagagaaggaggagaagttgagacaggcggtcaagcaggtgctgaagtgtga

SEQ ID NO: 869119 - DNA, 99 bp, Homo sapiens
ggggacccaggagtttcctgtgtccagcgctgccggagccgcctgaggaattgaatgatctggcacgggaccctccagcacagtgttcagcaggtcctg

SEQ ID NO: 869120 - DNA, 104 bp, Homo sapiens
taaagctttacttttaggaaccatcatgaaggaaggtgaaggggaagtaagcatgtctcttcaccttccttcatgatggttcctaaaagtaaagctttagaggc

SEQ ID NO: 869121 - DNA, 112 bp, Homo sapiens
gtccgagctgagatccatctgcaccacggtgctggttttcatctctgtgaactgcttaagcacagatttctcttcccagaagggagtgaaggggttgcctcttaacattcaa

SEQ ID NO: 869122 - DNA, 117 bp, Homo sapiens
gaggccttatggtaatgtcggccattgagaaattgttgaggcagaagggatggaaaccctattttcttttctccaagaccatggttggtctgcttccctcactcgggctccttgaca

SEQ ID NO: 869123 - DNA, 99 bp, Homo sapiens
cctgcccagcgtgttggaacaagtctaagctggtgtttttcccccctgcggatcactgtcacattcaggggcttctgggaggcggaggttgcagtgagc

SEQ ID NO: 869124 - DNA, 99 bp, Homo sapiens
ttgaagacagagatttattcgtaatgcgactcaaagctgcacggcagtctgtttatgagaacattcctgatgtagatgaagaaggctacagtattaaac

SEQ ID NO: 869125 - DNA, 98 bp, Homo sapiens
tgaagaaagcgcaactacgctccgctccgcgggccaagaaactggagaaactcggagtgtactccgcctgcaaggttgctgcttttgctcagaggaca

SEQ ID NO: 869126 - DNA, 99 bp, Homo sapiens
tgaaggaaactgctgaaaacagcctcaagaaaccagtaacagattgtgttatttcagaattagcttaccgaaaggagatggtgagagctgacctaatta

SEQ ID NO: 869127 - DNA, 99 bp, Homo sapiens
gaaaagtgcccaccagaagcctctgccccagcctgtcttctggcccctcctgaaagctgtcacccacaagtatggtttaggaatgatttattacaagca

SEQ ID NO: 869128 - DNA, 99 bp, Homo sapiens
agctcacaatgtaattgattatattgatacaatatggaaaatactcaagccaggtggaatttggataaatctaggtcaaaatgcagatcttcgtgaaaa

SEQ ID NO: 869129 - DNA, 99 bp, Homo sapiens
tttggatagcaatgatcccaatttccagatgccttgttcaacagcactcctgtaggaggcctgctgatggcatttcagaagtactctggtgagactgtt

SEQ ID NO: 869130 - DNA, 98 bp, Homo sapiens
tcatactgcatcagaaccatgaagaaggactctgaggaggaagaaaatgagctggaagctattaacaggaagctaataagttcacagccttatgtacc

SEQ ID NO: 869131 - DNA, 99 bp, Homo sapiens
gcctcccaagtagctggtattacagatgaagttggtatgtggcttcattctggaacctcggctgttgattcaacagagaaagggacagattgttccaac

SEQ ID NO: 869132 - DNA, 99 bp, Homo sapiens
ttgccacctctgctgtgcttgccttattggtgatgtgcattgtcttacgcccttcaagagcgagaaaatgtcattgaatataaacactgtttgattaca

SEQ ID NO: 869133 - DNA, 99 bp, Homo sapiens
cactgtgttgagttaattaaccaaaaagttccccagtcagtgaccaactcagtgccaaaaccagtgggtgaatttgtaagtgatgtcctgctagttcca

SEQ ID NO: 869134 - DNA, 99 bp, Homo sapiens
gggaaaccccgtaaagtggttggttgcagttgtgtagtagttaaggtgtatagtgttgattggagccaaaccagaggtgaacagcttgtggtgtctggc

SEQ ID NO: 869135 - DNA, 99 bp, Homo sapiens
gggagaaacaaatgctgctccgatcatctgctctgcttcttctgttcctcaattcatgcttagaaacctatcagtgtgtgaaagacggcagcgatggcc

SEQ ID NO: 869136 - DNA, 98 bp, Homo sapiens
acagaagcaaaagccttgatagcatggatttctgtgagctcacttcatccgtccttggctcaggatttggagagcttgcaccaccaaaaatggcaaac

SEQ ID NO: 869137 - DNA, 98 bp, Homo sapiens
catcggcagctgagacctggctgtggttcacaagctcgtgaattagcaggttcttaaagcctgtggggcccggatagtcagccgaccagaggaactga

SEQ ID NO: 869138 - DNA, 99 bp, Homo sapiens
tacaggcggggacggcttctcggcgcattctacattctaaaggggagctcagtgaagatagacataaacagtatgaggaatttgctatgtcttaccaga

SEQ ID NO: 869139 - DNA, 99 bp, Homo sapiens
ggtgtcggcgcgggagcagcacttccacagccaagtgcgggagtccacgacgtttgatgcaaatgatttgtatcaggggcagaattttaacaaggtcct

SEQ ID NO: 869140 - DNA, 98 bp, Homo sapiens
gccgccactgccgcaggaggcgtgagagtggagactgctgcacggactctggaaccatgaacatatttgatcgaaagatcaactttgatgcgctttta

SEQ ID NO: 869141 - DNA, 101 bp, Homo sapiens
ggaaaatgaagaaagcatgatgtcctatgagggagacggtggggaggcttcccatggtttggaggatagcaacatcagatggagtctccctctgttgccca

SEQ ID NO: 869142 - DNA, 99 bp, Homo sapiens
tggaagtgtgagaggcacacctctgtgcagaccacatcgagcggaatcccagtcagaagttccagcctgccactgttctctgatgccatgccagcacca

SEQ ID NO: 869143 - DNA, 99 bp, Homo sapiens
acagccaacctccaggtttcagtggcagttctcagcctaccgtatgtgaacgggagctgtgtgtgtttgcttttcaaaccctgggagtaatgaatgaag

SEQ ID NO: 869144 - DNA, 146 bp, Homo sapiens
gaatgtgggaaaaagcaagtgtcttacagaactgatattgttggtggcgtacccatcattactcccactcagaaatggcagcattatagtcgtatttgaccttttctttgcccagtgggtgtcagatgaaaatgtaaaagaagaac

SEQ ID NO: 869145 - DNA, 99 bp, Homo sapiens
gaaatgtacaccctcgagagcggcctgattgggaagaaactcttagcgcaatggaacttgcatcagcactgaagtcagccttatctggccacctggaga

SEQ ID NO: 869146 - DNA, 99 bp, Homo sapiens
tcttggaagaatggctcaggtggttggagaagcaacttttattgctagaatggcccaatatagctttgacaagtttatcttgcagattatggactttcc

SEQ ID NO: 869147 - DNA, 99 bp, Homo sapiens
gcgtctgatcgccgagcgcgccgcgtagacctccgctcccccagggccaaatccttgtagctgtcttcttgccccggtcagtgccagccgtactattca

SEQ ID NO: 869148 - DNA, 98 bp, Homo sapiens
gctgagccggtgggtgagcggcggccacggcatcctgtgctgtgggggctacgaggaaagacatatgtagagtgtgtcggtcagaaggaacacctgag

SEQ ID NO: 869149 - DNA, 99 bp, Homo sapiens
caagagttggtgggagacgggtgaagtacaggctcagtctgcggccaagactccatcctgcaagatccttccgctgaggaattgagaaaactaatgatg

SEQ ID NO: 869150 - DNA, 99 bp, Homo sapiens
tgctgttttgtgagagctgtgatactctcacctgccgagactgccagctcaatgcccacaaggaccaccagtcaaaatgcagatcttcgtgaaaaccct

SEQ ID NO: 869151 - DNA, 99 bp, Homo sapiens
tccctggatcaccgacagcacagacagaatccctgctaccaatgaagaggaagatgatgatgtagtggctcctaaaccacctattgaacctgaagaaga

SEQ ID NO: 869152 - DNA, 99 bp, Homo sapiens
ccgcctccgaagatgggggatttctacgacccggagcacccgacccctgagagaactacgatgacccgcacaaaacccctgcctccccagttgtccaca

SEQ ID NO: 869153 - DNA, 99 bp, Homo sapiens
cacaaatcctccccaagtagctacctatcacagagcaattaaagttacagtagatggacctcgggaacccagaaatagtaaagctgttacttcgtcacg

SEQ ID NO: 869154 - DNA, 98 bp, Homo sapiens
caaggtcaacaaggacaacaatgagatcgtggacaagatcatgggcaaaggacagatccagctctattaccaggttttaaacttcgccatgatcgtgt

SEQ ID NO: 869155 - DNA, 98 bp, Homo sapiens
ttggattacaactgttcatcctcacctatgcaaagaaagggaagctattgctgggattttgaggaggcatccgtgtacaagatttgcagagaaatgta

SEQ ID NO: 869156 - DNA, 98 bp, Homo sapiens
tagggaccctgctgaatagctggggctacaggcgtgtgtcactgcgcccagctcttgaatgtcgtctctcaactagccaaacggaatctgcgactgct

SEQ ID NO: 869157 - DNA, 99 bp, Homo sapiens
ggcgaactcggcctatcgctaccctccgaagtccgacgccctgctggcggacttggagtctaccacctcccacatctccaaacggcctgtgttcttgtc

SEQ ID NO: 869158 - DNA, 99 bp, Homo sapiens
cagcgctcgtagcacgccctggcccacggctctgacctcctcgtttctgtcaccctccttcagtgaccgttttaaaccagtccaggagcttctccaaac

SEQ ID NO: 869159 - DNA, 99 bp, Homo sapiens
tggaagctgtgagcgcccccatcccggaggtctccgccggctcccgggatgtacagttacccagcacgtgtacctcctcctcctcctattgctcgggct

SEQ ID NO: 869160 - DNA, 99 bp, Homo sapiens
agaaccagcacttctgggacgcacagagaccgtgaagattccaagttcaggagaactcgaccggttagcactctacgtatatgaatatctgctccatgt

SEQ ID NO: 869161 - DNA, 99 bp, Homo sapiens
ccctggtgaagatgggggagctggccagcgagagccagggctccaaagaactcggtactccaaagattcaggtttactcacgtcatccagcagagaatg

SEQ ID NO: 869162 - DNA, 99 bp, Homo sapiens
gataagaaattaactacccttgcagatctattccggccacccattgatttgatgcataaaggcagctttgaaacaatagtgtgtgtaccatatcagtgg

SEQ ID NO: 869163 - DNA, 99 bp, Homo sapiens
gtggaaacacagagagcaagacggatggagatgacaccgagacagtgccctcagagcaggttcctggtagagttacacagttgtgccgccagtatagcg

SEQ ID NO: 869164 - DNA, 98 bp, Homo sapiens
gaagtcgcctctgtgctcgtgagtgcatggggtataagtgaattttgaagattgcaccggtcgacaaaggacagcctatttttccctcgacacccgat

SEQ ID NO: 869165 - DNA, 98 bp, Homo sapiens
ctctataagaactggatcaaccagactgaggcccagacagggcagcgcagtccacacaacctccctggaaatggcaaggagttataatttccatttta

SEQ ID NO: 869166 - DNA, 98 bp, Homo sapiens
agaaaacaaagatgatgataatgttttcagcagcaatttgccctcagaggacactgcccatctctaagataagaacctggaaaggggactctgttggc

SEQ ID NO: 869167 - DNA, 99 bp, Homo sapiens
aagacaccacacattgcgcagtcgggaccatcgccggagcctgaggacacttctctgtcgtcacagttaggtgcaccctttgctcccgggctcatccac

SEQ ID NO: 869168 - DNA, 99 bp, Homo sapiens
atttagaaggaggttcaggctacggtgagccgaagaaggccggggtcagaaagaaaaaagagggtcccggggccgaggcaggaggacatcagaggaaga

SEQ ID NO: 869169 - DNA, 99 bp, Homo sapiens
tcttagcactttgaaagaaaaaggctacaaagctgctttcattggaatagaggttggagcaatcactgaagaaactgaagcctgtgattggtggagttt

SEQ ID NO: 869170 - DNA, 99 bp, Homo sapiens
aagtctgaaagtggatgagcatctggccaaacaagatgcccaggtattaatgctccctggaaatgctttctacgtcgatagctcagctcctagccctta

SEQ ID NO: 869171 - DNA, 99 bp, Homo sapiens
ttcatcctctcactcagatgatgtatagccctcagaattctgattatcttttagctctcagcactgaatctatgactttgaaagaagccatcaagtctt

SEQ ID NO: 869172 - DNA, 99 bp, Homo sapiens
gagaaaatgcggccagcatcctggggagcacccatttcctgggaacaagctgacccttttgcggaatgtccagaaagagaagtgtatgacccgtctcca

SEQ ID NO: 869173 - DNA, 99 bp, Homo sapiens
aatcatattatagatggagtaaagatttcctcctctgatgctcctcttcagcctttggtatcctctccttctctgcaagctgctgttgacaaaaataaa

SEQ ID NO: 869174 - DNA, 99 bp, Homo sapiens
tagtcccagagttctgccttccggcgccgagctttgatttgtttattgagtgccagcccggttcccggacagtccggttccagttgttggcaaaggaga

SEQ ID NO: 869175 - DNA, 99 bp, Homo sapiens
ctctgctgtcgatggcttcgtacacctttattggtgaaatatgagaatgagaaacaaatccatggacattctcaatctctgataagttcttctctgaga

SEQ ID NO: 869176 - DNA, 99 bp, Homo sapiens
cccaacctagtgggtgtaatacatcatgaactgcaggaacaactctgctcatggtgattacatgcaaaataacgagagcagcttaatagagcaagctcc

SEQ ID NO: 869177 - DNA, 99 bp, Homo sapiens
ggaatttgatgaagtttttacaaagaaaatgattgagtctatagcacttaaagaacctaaggaactgaattttgtttttggtgtcaacattgaacaccg

SEQ ID NO: 869178 - DNA, 98 bp, Homo sapiens
tgaattttccccccaaactgcaataagccgccttccaaggtaatctgtaagtcagatgctccaacaggggatgttcttcttgatgaagctctgaagca

SEQ ID NO: 869179 - DNA, 99 bp, Homo sapiens
gccctctccagtgtatccacagccccgacctttgatgagaactcagctgtccaggatcaagcaccccaacattgtagccctggatgacatctatgagag

SEQ ID NO: 869180 - DNA, 99 bp, Homo sapiens
aagctttctgcccagagctcctggaccaatgcatcttcccaccaccttaaaccactggaatggaaactgaaagtggaaatcaggaaaaggtaatggaag

SEQ ID NO: 869181 - DNA, 99 bp, Homo sapiens
gcttccggcacttggtgaaacagcccaggtggtctgaggagaagtcaacctggagcttatagtagcagtaccctcgtgatccgcccgcctcggcctccc

SEQ ID NO: 869182 - DNA, 99 bp, Homo sapiens
tatgatgctgaatgtgcggaatctgtttgagcagcttgtgcgccgggtggagattctcagtgaaggaaatgaagtccaaaagcaccaaggattctcttt

SEQ ID NO: 869183 - DNA, 98 bp, Homo sapiens
aaatttgatttccggagtcagtcattttactgtcaagacatttcttcggcattctgcaacagatttacattggtgcagaagcatacagtggaatttaa

SEQ ID NO: 869184 - DNA, 99 bp, Homo sapiens
gaaaggaggagctggagacagattgtaggaccgagcgcgggcaggcgggaggcaacggagctaccagccggttatcaatactctggctgaccatcatca

SEQ ID NO: 869185 - DNA, 99 bp, Homo sapiens
ccaacttcggcaagatccagatcgggatttacgtggagatcaagcgcagcgatgaatccggacaatcagatagttcaaaccagcaaggagatgcggaca

SEQ ID NO: 869186 - DNA, 98 bp, Homo sapiens
gaccgcgggccgcggagctcgggcggccggcgcggagactattgcccagaagaaaagatgtttggttttcacaagccaaagatgtaccgaagtataga

SEQ ID NO: 869187 - DNA, 99 bp, Homo sapiens
ggcaggagaaccacttgaaccctggaggcagaggttgcagtgtgcggagatcacaccattgctctccggtcatgacccagacatgaagggagatgctga

SEQ ID NO: 869188 - DNA, 99 bp, Homo sapiens
ccagtactaccaaggacagcttttttcctgcaaggacttggtgaaatgtgaaaataagaagaatgctacacccagaactaatttgaaatttcctatttc

SEQ ID NO: 869189 - DNA, 99 bp, Homo sapiens
ggcgacagagtgagactccgtctgcagcggtctccataaatacagtaccctcgctgaaaatacttgcacactacactatacggactgtcagagaggtca

SEQ ID NO: 869190 - DNA, 99 bp, Homo sapiens
ctatgtcatttcatccaccacattacttaggagtcaggaatggagagaagggtaatggttttacctcttattgtggaaacctgttgagatcacagagaa

SEQ ID NO: 869191 - DNA, 99 bp, Homo sapiens
ccagtacaggaggtgcgggcggctgctgaagaacagattaaggtgctggaggtgacggagggtgattctcatctaaatgttcaagttagcaactttaaa

SEQ ID NO: 869192 - DNA, 99 bp, Homo sapiens
tcattgtaatcagcttcttaccaaatacagaagactgggaggcacgcattgacagccacggcaggatcttctacgtggatcacgtaaacagaaccacga

SEQ ID NO: 869193 - DNA, 99 bp, Homo sapiens
cgtgggcataggaccctccgagccaggcacgtgccttaacacctcaaactgcagaaacagatgccattcggtttttggttgggacgcagtctcttaaat

SEQ ID NO: 869194 - DNA, 99 bp, Homo sapiens
gtcccctcaaaaacaggtcataactcctggagaagggattgcccagtcagcaaaggttcagccctccaagatcagaatcaagctttgcgactctgtctg

SEQ ID NO: 869195 - DNA, 99 bp, Homo sapiens
attaaaagctgtaaaagatgctactaacactggaataaaggttatcaatactctggctgaccatcatcatcgtgggactgactttggtggaagtccttg

SEQ ID NO: 869196 - DNA, 98 bp, Homo sapiens
gaaaagattgaaaatatctacatgcgaagtgagcctgttgctcaggtgtttgtccacggagaaagcctgcagaaatacaaacctggtcgatgtgatga

SEQ ID NO: 869197 - DNA, 99 bp, Homo sapiens
ttaaatacttgctttactggaaagacccagaatatgccaagtatctaaaagttgctggagaatgtaaccctaatccataaaccagtgtcgttgcaaccc

SEQ ID NO: 869198 - DNA, 99 bp, Homo sapiens
agacttatttttctctctggactgtgcatagcagtagctgttgtttgggctgtgtttcgaaatgaagacaggtatgttgagtctaaaaaggacagagtc

SEQ ID NO: 869199 - DNA, 99 bp, Homo sapiens
aagttatttgcaaaacagagatccagggatgcagtggaaactaatgagaagaggctcctgggtagaactgcacttcagcaataatgggaacgggggcag

SEQ ID NO: 869200 - DNA, 99 bp, Homo sapiens
ttcacactgcagaactgggttctggactttgggcgtcccattgccatgatgaagaactggtggatgtttctgcatctgtcttaccagaattgaaaagag

SEQ ID NO: 869201 - DNA, 99 bp, Homo sapiens
cttgtgtagcgtcagatccttgagtgataaaggagtagagggcaattgaaggaacagactaaaaatcgtgtcctggaaggaaactacaggtactaccag

SEQ ID NO: 869202 - DNA, 99 bp, Homo sapiens; identical to SEQ ID NO: 860349

SEQ ID NO: 869203 - DNA, 99 bp, Homo sapiens
aaccagaacctcttgttcctcctgtcccaaaagaccatcctgctctcaactacaacatcgtttcaggggatgattaccacgaggatgggttctgccagc

SEQ ID NO: 869204 - DNA, 99 bp, Homo sapiens
gatgaagaaggaagggaagctgatcatgggcattggtcaccgagtgaagtcggatttaccgaggagcattatggatcctgggagaatactgtagtacca

SEQ ID NO: 869205 - DNA, 99 bp, Homo sapiens
gcctgggccacagagcaagacttgcagtccgctctgtactacacctggggtgtgtgtctcccctattacactgtgagctcttaggtggattaaaaaatt

SEQ ID NO: 869206 - DNA, 99 bp, Homo sapiens
ttgatgatttagttgattctctgaagtattattttggcgacttcaatttgccacgggacaagtttctaaaggaacagataaaactggatgaaggctggg

SEQ ID NO: 869207 - DNA, 98 bp, Homo sapiens
tatgattatgttacggacactgcacaaagatattgctagatataatcagatggactctacgtctattatcctcccagtccacaacgctgaaccgtggc

SEQ ID NO: 869208 - DNA, 99 bp, Homo sapiens
ctgtggccaacagcaacagagagagtccaggtttctaagcatgaattgaggaacagaagaagcagagcagatgatcggagcagcatttgtttctcccca

SEQ ID NO: 869209 - DNA, 99 bp, Homo sapiens
cttgagctccaggagttcgtctcttacgtctgcggaagtgcagctgcctcagttcttagcgcagacagagcgccaagtgtctcgctggtttgttcagtg

SEQ ID NO: 869210 - DNA, 99 bp, Homo sapiens
tgtagagctttccagacaatgccaaatggatgactgtggaatcctcatgaaagcttatgtacataaaagcgtgatggaggaactgaagagaataattga

SEQ ID NO: 869211 - DNA, 99 bp, Homo sapiens
ctgtctgttaccccttcagcatatgaatcttgctttggaaataattcctgggtctcatgtacagatcgctggccttctaatttttcagggacattttgc

SEQ ID NO: 869212 - DNA, 99 bp, Homo sapiens
gctggtcatgccattgtcccaatacttcttaagggtggctaagtctcggtcactgaactgagtgcggtcctgtagcgtattcgagtcagagtattccgg

SEQ ID NO: 869213 - DNA, 99 bp, Homo sapiens
gctgagggcagtgtgggtctccaaggagaagaaatcaagggaaccgttgagccgtgcagccacaatctcctccgacaccgtgtatctgtcaggcagtgg

SEQ ID NO: 869214 - DNA, 99 bp, Homo sapiens
ctcccgagtagctggaactacagatattcagactgacaatgatttgacaaaggaaatgtatgaaggaaaagagaatgtatcatttgaacttcaaagaga

SEQ ID NO: 869215 - DNA, 99 bp, Homo sapiens
ggaagacgcgaccaactccaggcacagcggagccggcgcggggtccacaaaggtagctcagtggcatttctgagcaggggccaccctgacttcaccttg

SEQ ID NO: 869216 - DNA, 98 bp, Homo sapiens
atgaggcgaggctagggaggacctcacttccccggggtgtaataatgttaactgaggctttatcctgtggataaacgcagagtgaacgagtttgggga

SEQ ID NO: 869217 - DNA, 99 bp, Homo sapiens
ctttaattgcctttgaatctgaagtcacaatttgaatctctcctttctcaatcctgtctcgtgtactcgtgaatgtagcagggctcgcagtatgctttc

SEQ ID NO: 869218 - DNA, 99 bp, Homo sapiens
tgcgctgccgccgctctgaggagttaaaggctctttggtgtaacgggaaactgcgctgcctgtagtaagctcatccctgcctttgagatggtgatgcgt

SEQ ID NO: 869219 - DNA, 98 bp, Homo sapiens
cctgcgctgccgccgctctgaggagttaaaggtcttcatcctccaggtccacctttagcaagacctattctcccccgagaacgaggtgctttggatag

SEQ ID NO: 869220 - DNA, 98 bp, Homo sapiens
aagcctccggaatctaaaaagccctcagtaccagagacagaagcagatggattcgtccttttaggatgaccagtgtcccagtgaaggaacgagtgaag

SEQ ID NO: 869221 - DNA, 99 bp, Homo sapiens
ttccgttgccggtgccggcctagcgtcctggaattacttcaatcaattacctggtaggagatgaattgtttgtggtcatggaataccttgctggggggt

SEQ ID NO: 869222 - DNA, 99 bp, Homo sapiens
gccgtggggagcggacgcagtgatttgctccccctcgtgcagcaacccccacacccagcaccaggtcataatgctgagctccgtaccagacttacacgg

SEQ ID NO: 869223 - DNA, 99 bp, Homo sapiens
gaggagctgtgcagccgcgaggaggcgcgggaggtgttcgagaacgaccccgagacgagtttcctccagactttgctgaggcctttgagtctcagttga

SEQ ID NO: 869224 - DNA, 98 bp, Homo sapiens
cgagcagggtgcgggagagccccttgcagaagacgccgtacgagtaccttctccaggcaaattccgttcccctgcagcaccatctcctttggctcttc

SEQ ID NO: 869225 - DNA, 98 bp, Homo sapiens
ttcaggcaatcttcagcggtgatccagaggagatccggatgctcatccataaaactgaagatgtgaatactctgatatgcacttatttggccattacc

SEQ ID NO: 869226 - DNA, 99 bp, Homo sapiens
caaagagtacggtgcaggcagctcccgagactgggcagctaagggccctttcctgctggtgaccaagaatatggcccaggtgaccaaagccctggacaa

SEQ ID NO: 869227 - DNA, 99 bp, Homo sapiens
ccaagtgattcattccaaggacaggcagcccagtctggtgtttggaatgacgacagtatgtcacattgcttccatgctgtcaagccaagacctgaagat

SEQ ID NO: 869228 - DNA, 139 bp, Homo sapiens
gggcagctcagggttgtaggggtcgtaacccagccctgtgtgcggcacctgcggacgcacacagggctgggttacgacccctacaaccctgagctgcccaagccccccgcgcagagggagaatggcaccctgggcctgg

SEQ ID NO: 869229 - DNA, 99 bp, Homo sapiens
gggcatcttccctgggcgagagatcatccagcccaccgtagtggatcccgtcagcttcatgttctggaaggtacccagtgatcctgtccatcgaaaacc

SEQ ID NO: 869230 - DNA, 99 bp, Homo sapiens
gtgaccgagagcgcgaatatcgtcatcgttagaagaaatatggctacacacacctttctgcaggagagctgcttcgtgatgaaaggaagaacccagatt

SEQ ID NO: 869231 - DNA, 99 bp, Homo sapiens
cggagctcgcccaagccgcgtccccagagagcgccctgagagaacagggtggccgcttggtccagccaccattggttcaggcaatcttcagcggtgatc

SEQ ID NO: 869232 - DNA, 98 bp, Homo sapiens
agctcagaacagctggatcttgctcacactctttcaagagaagcttccttgatgttgaaatgcttcaggccagtacatctaacccaatccctggagat

SEQ ID NO: 869233 - DNA, 99 bp, Homo sapiens
tccttccttcataatgagctacaaactaccaatggaggatcttaaagagaccagttagcagatgcttgatagttttgaggcagctgtgccatcaaatag

SEQ ID NO: 869234 - DNA, 99 bp, Homo sapiens
ttctctgcagaatttctgaaagttttccttccatctctgctgctctctcatttgctggccatcggattgggcattagtgaccagaaggatcccaaggat

SEQ ID NO: 869235 - DNA, 99 bp, Homo sapiens
cctagcgccgctgggcctgcaggtctctgtcgagcagcggacgccggtctctgttccgcaggatgcgtttaatagagcaagaagaatatttgaatgtcc

SEQ ID NO: 869236 - DNA, 99 bp, Homo sapiens
gggtccccaaagtcttggaacagcgacgacaaggcttggaaacatacttacaggtaagaaataagacttgcatttgtgatatcaaaaatcacctgagaa

SEQ ID NO: 869237 - DNA, 99 bp, Homo sapiens
ggaaaaagaagttcatcagattcaagttccgccatggagtcatagttgcagctgactccagggctacagcgggtgcttacattgcctcccagacggtga

SEQ ID NO: 869238 - DNA, 99 bp, Homo sapiens
gttgctttttgatggccatggcataaggaactctatcccaggaatacagctttgcattaggcagcaattctgcatttcttcgagtggtaagatgtcgat

SEQ ID NO: 869239 - DNA, 98 bp, Homo sapiens
tctgctaatccacccaaaatgtgcctggtgctccaaagagatgctgcctggaaacattggccagaaagtaacactgaggcccatgtagaaaacatcac

SEQ ID NO: 869240 - DNA, 99 bp, Homo sapiens
gtattttaagaagccatgaccttccaacatctgtcaccaggagactaaagtccatcaaaaacatccagaaaattaccaagtctatgaaaatggtagcgg

SEQ ID NO: 869241 - DNA, 99 bp, Homo sapiens
caatatctgtgtcgttcttggcagaaattatattttccagcccgtgtctgcaggtgcactattgacaaccgggtcacccgggtggcctggctaaaccgc

SEQ ID NO: 869242 - DNA, 99 bp, Homo sapiens
tggttattctaacagacatgagttcttatgctgaagcacttcgagagattccaggatggaggctgggatcatggagtctcctctgcagagaaagctctc

SEQ ID NO: 869243 - DNA, 99 bp, Homo sapiens
tgcagaatctacaaattttgctactgtcagatggattgactatggaaaagttgccaaattggaattttctgaaccaacaattattctctttgaaagaga

SEQ ID NO: 869244 - DNA, 99 bp, Homo sapiens
gcaactggatgaatgattatgattcaaccagtcatggtaccctgctggccgagctgcgggaatacaacctcgagcagcagcggcgagcccaatgtgaaa

SEQ ID NO: 869245 - DNA, 98 bp, Homo sapiens
gccaagctccagtgtcccacttgcatcaagctgggcatccagggctcgtacttctgctcgcagagtaaacatcagtctccaaagataactacatccct

SEQ ID NO: 869246 - DNA, 99 bp, Homo sapiens
tttatttcctgtagcttgactacaacacaaatgaatccactcaaatgttggcaagtggagcagagtcccagaacaggcaccaatttgatcttctactac

SEQ ID NO: 869247 - DNA, 99 bp, Homo sapiens
ccccctgcacctcctagtctggaaaaacgactaccggcagctcgagaaggagctgcagggccagagtgatcagcagctggactgtgccttggacctaat

SEQ ID NO: 869248 - DNA, 99 bp, Homo sapiens
tggtgaatggctggtacccattggcaactgcctatgcaacgctgggcatgaggagcggagcggagaatgccaagataacagcccgccgtcagtggaaac

SEQ ID NO: 869249 - DNA, 99 bp, Homo sapiens
tcctggcctccccgcagtgaatcccagagaccaagagatggcagctgggttctttactgctggatcgcagtcatctggggacctggagaatgatgagca

SEQ ID NO: 869250 - DNA, 98 bp, Homo sapiens
actgtgaaaaaggaaatgactccaagaaagttaaagtacaaaaagtacagtctgtcaggtatgtttctataaaacctgataaccgaaaattggccaac

SEQ ID NO: 869251 - DNA, 98 bp, Homo sapiens
tttgcgacagcaagggggttgtccacgaggaacaaattgtacatttgcccattctcaggaagagcttgaaaagtgaaaattagttctgctgtgcttaa

SEQ ID NO: 869252 - DNA, 99 bp, Homo sapiens
ctatcctcctggtggttctgtataaatacaggtgctataagtgggaagatgtaaatgctgctgcctgtgacctcgccagggaagtggctggcaaaggtg

SEQ ID NO: 869253 - DNA, 99 bp, Homo sapiens
catggagcccagctgaaatggactggcccccttgagcctgtcccaagccctggtgccaggtgtccatccccgtgctgagtagagatggagtttcaccgt

SEQ ID NO: 869254 - DNA, 99 bp, Homo sapiens
cttggaagcagatggacaacccctcacaccagatgagtacctggagtattccctgaagctaacgcaaggtacaacagaatagctcgggaatggactcag

SEQ ID NO: 869255 - DNA, 99 bp, Homo sapiens
gaaaagcgaggcaaggcaggcggataccaatggggaaaacattgcagaatcactggttgcagagggcttagccacccggagagaaggcatgagagctaa

SEQ ID NO: 869256 - DNA, 99 bp, Homo sapiens
ctgcatttcttcaatcatgaattctgagtcaggtctccacctgagaatgtacttggaaatgtgagatggctgtggtgcattccactggatggggtggga

SEQ ID NO: 869257 - DNA, 99 bp, Homo sapiens
gcggtgctgaggcacctggagaccttcgagcaccccaacgtggtcaggaagtttcagctgatcctactgccacactcacagcagcagaagaaagaaagg

SEQ ID NO: 869258 - DNA, 99 bp, Homo sapiens
ttctatgaagcacaatacaaagaagtaaaagtggtggctaatcaaaagtactttgactcaggagactacaacatggccaaagccaagatgaagaataag

SEQ ID NO: 869259 - DNA, 99 bp, Homo sapiens
ctcagcaccttggcgaagccttgggtttctttcttaaaggactgatttttagaactccacatttgagtctaagggaagcctggagataacagagagcca

SEQ ID NO: 869260 - DNA, 99 bp, Homo sapiens
actgcatctgtgacattacaaatggcaatcacagtgtggatgagatgccggtcaactcagcagaaaatgtttctgtgcagtggctcacgcctgtaatcc

SEQ ID NO: 869261 - DNA, 99 bp, Homo sapiens
tactggaaccgtgttggtggattttgttcctgaaaatcaccagttccgtgctccattatgtcgtgtgcttccccggtcaacggcagagacttatccaga

SEQ ID NO: 869262 - DNA, 98 bp, Homo sapiens
ggttaggcagaaatgggatcagaaatcacaggttaatcatgttatcagccctctgttggatatctactttcctgaaggatctggtgttaagataattt

SEQ ID NO: 869263 - DNA, 99 bp, Homo sapiens
ggtgcttttaccagattctccagcaccagcaatttctacaatatcaccaggaactatgtctttagctttaatccgctgcacactctttctgtcctgtcg

SEQ ID NO: 869264 - DNA, 98 bp, Homo sapiens
accgctcgctgcagtccgagaacgccgcgctgcgcatctccaacagcgacctgagcggtgcttctcagcttcacgggaaagggcctgctgtaccacgg

SEQ ID NO: 869265 - DNA, 99 bp, Homo sapiens
aaagtatgcctccgaaaaccacctcagccgcttcgtgtggttcttttctggcatcgtaggaggtggcctgctgatcacaaaatttgtccaggatagaca

SEQ ID NO: 869266 - DNA, 99 bp, Homo sapiens
ggaagaaagcctggtggtggaagaaatccaggaacaactgtgtcagcagctagcccttttcctcaagaaaatgtttcgatgaaagatcctccggactta

SEQ ID NO: 869267 - DNA, 99 bp, Homo sapiens
cccagcagcatgcgattcttattgaccttgcccagcgctcagctcaggagctgcctctggtggagaagcagagcacggacagctatccggtcgtgggcg

SEQ ID NO: 869268 - DNA, 99 bp, Homo sapiens
acgtcaactattacaatcgcttgtacaaaggagagtttaaacagccaaaacagttcattcatattcagcggaaacagtgcttcttagtcctacgtcagc

SEQ ID NO: 869269 - DNA, 99 bp, Homo sapiens
ctgctggatgacgtgagtaaacctgaatctttggagtacctagggtcccatcccctgtcgacttgagggcatttaactcttcttttgtcatcttggtag

SEQ ID NO: 869270 - DNA, 99 bp, Homo sapiens
gggaataggagctggggagcccttctgcgccacagtcaggtgacacacagtcttttgcacagaagctccagctccgggtgccctccgtggagtctttgt

SEQ ID NO: 869271 - DNA, 99 bp, Homo sapiens
gcagcgacacaattgtctgtgacagtaacagtacttgggatcccccagttccaaagtgtcttaaaggcctgtctcctccctcctacacatttccagctc

SEQ ID NO: 869272 - DNA, 99 bp, Homo sapiens
ctcgtaatagagccttaaatggggatctggtggtcgtgaaactgcttcccgaggagcattggaaggttcatatttggtgcttagacaaattcaaaatga

SEQ ID NO: 869273 - DNA, 99 bp, Homo sapiens
cttctcattatggaacttcttactaacctgctgtcaaaagaattcatagatttcagtgatacagggcgcaaccatgtcgccatttcttcggattggctt

SEQ ID NO: 869274 - DNA, 99 bp, Homo sapiens
atttggtgaagcaggaagaaattcaggaaacctttatcaaaaatatattcacaaagaaacggtgtctaaatgagggtcttgctctgttgcctgggctgg

SEQ ID NO: 869275 - DNA, 99 bp, Homo sapiens
ttccctgagagccatcttcggactcctcagatgccaccaacaactccatccagcagtttcttcaccaagcgccatggctacttattctgccacatgtgc

SEQ ID NO: 869276 - DNA, 98 bp, Homo sapiens
acctctagtcactgtcgcagggacaggagtactccacagaggataaatttcaacctccggggccacaatagcgagagatcttcgctttaacagaatca

SEQ ID NO: 869277 - DNA, 99 bp, Homo sapiens
aggcccggcggtcgcgcctcaaccggctgtacggaatccaaggggacaaggaccacatgtgcagtgtcaaaagtcgcctgtggaagctgctatccccag

SEQ ID NO: 869278 - DNA, 98 bp, Homo sapiens
acagatgctggtgcttcatttgtctttggtgagaaatacaaagaccacttctttgcatttaaggtgtcatagagacgtcagatcgactggaccgtgaa

SEQ ID NO: 869279 - DNA, 98 bp, Homo sapiens
tcgggtgggagtgacccgattttccagggacagcttaatgaagacaaactgaaggggaaactgagatccttagaaaaccagctatacacctgtaccca

SEQ ID NO: 869280 - DNA, 99 bp, Homo sapiens
acttaccactgggcaagcttcaagggcataaggaaatggtggcaggcacttcctcctaacaagaaggaagtagttaaagaaaatataaggaagaataaa

SEQ ID NO: 869281 - DNA, 99 bp, Homo sapiens
catgaagcatctgaaaaagctgtggaaggctctggataaggaccagtacctgcccaggaaactgaggcgggatgtggtaacagagaccaagactgtgga

SEQ ID NO: 869282 - DNA, 98 bp, Homo sapiens
tataaaagcacagttttaagagagactcacagatgaatgcttctcacccggaaacaaacttgccagttgggtatcctcctcagtatccaccgacagca

SEQ ID NO: 869283 - DNA, 99 bp, Homo sapiens
aatgatacgtttgtaacactcgatgaaattttaagacttgcccaggaaaatgaatttttcccctacatcctgctgctctttgcgatcctcctgtacctg

SEQ ID NO: 869284 - DNA, 98 bp, Homo sapiens
ggtggaaaaagcagggaggttatgaggcttaataaagaagataagaccatcatcatgtggaaactgaccagggatgagaccaactatggaattccaca

SEQ ID NO: 869285 - DNA, 99 bp, Homo sapiens
aggaaccaagcaaatacatcaatgcatcttttataatgacggctccacctgcaccatgtccgagtggatcacctggtcgccctgcagcatctcctgcgg

SEQ ID NO: 869286 - DNA, 99 bp, Homo sapiens
gcatgcgtcctccctctccagtcccgcgtcggtcgccgcagtcacggagcgcacgagccaccagaaatggaactattgaaatttttcaggccagaaaac

SEQ ID NO: 869287 - DNA, 98 bp, Homo sapiens
agaaaaggatcctgtctctggcccgcaatcaccccttcctcactcagttgttctgctgctttcagacccccattgaggaacttcagcaggctttaata

SEQ ID NO: 869288 - DNA, 99 bp, Homo sapiens
gttattctcgttcaagttaatccaggtgagactttcacaataagagcagaggatggaacacttcagtgcattcaaggttttatgaatgaagctatggct

SEQ ID NO: 869289 - DNA, 99 bp, Homo sapiens
caccctatgggatgccatatcttggttcacccatctcaggagcctggctggttggaggggactctgaacggaaagactggcctcatccctgagaattac

SEQ ID NO: 869290 - DNA, 98 bp, Homo sapiens
tacaagatccactacctggacaccaccaccctcatcgagcctgcgcccagtcaaaccggcacgatgtccaggcaccagaaccagaacaccatccagga

SEQ ID NO: 869291 - DNA, 98 bp, Homo sapiens
aggagaaggatgtggactgcagtgctgcagtgccagagtgcttcatgttggcggaaccattgtattgttgcttagtgaagatcaccacaggcgcctta

SEQ ID NO: 869292 - DNA, 100 bp, Homo sapiens
cagaaattaactgaatggcagttttccatttcaaaatccagttcaacagctctgcacttatagcatcaaacctcaagtctgtctgttcgcattaatttct

SEQ ID NO: 869293 - DNA, 98 bp, Homo sapiens
gacagcccatcgtgtgaactatagagtttgtggacagatttatattggggcagatgatgatctatgcgaagtttgacaaaaatgtgtatcttcctgaa

SEQ ID NO: 869294 - DNA, 99 bp, Homo sapiens
cccttcacaatagcagcggagaaggtgtacaacacccgccatcagcttctgcagctactctgatcaacatccgcaatgccaggaaacactttgaaaagc

SEQ ID NO: 869295 - DNA, 98 bp, Homo sapiens
ttgactgaaaatggggcggaagaaaatacaaatcacacgcataatggatgaaaggaaccgacagaatacttttcaggagctccaggtaatgaggcgga

SEQ ID NO: 869296 - DNA, 99 bp, Homo sapiens
tgaactgggtgttctctactatcttcaaaataacctggaattgccagtagaaagccaacagacggtgcttcctcatcaaattgtgtgactgatatttcc

SEQ ID NO: 869297 - DNA, 99 bp, Homo sapiens
tcaagttctttcctgccagtgccgacaggacggtatgtagaatttaatctgctgtatgatcggggcacaaagtttggcctcttcactccaggatccaga

SEQ ID NO: 869298 - DNA, 99 bp, Homo sapiens
aaagagatccgtccagtctgccgcaagttcatgcaagatgccccaaggcccagaagaaatttaagcgtcttatgctgcatcggataaagtgggatgaac

SEQ ID NO: 869299 - DNA, 147 bp, Homo sapiens
agaccaccatccggggaaaagccactccggccgaggaggagaagacaggaaaagtgaagtactcacggctggccaagatcctggtgcacctgagccgtggaggggctgaagtccagatctttgctcctgacgtccctcagatgcacg

SEQ ID NO: 869300 - DNA, 99 bp, Homo sapiens
aaaaattattagaaattccgcgggcggtgtagaggcggcggacgggccggagggaggatgttaaagccccgcggattttttatcaagcagaaatgcatc

SEQ ID NO: 869301 - DNA, 99 bp, Homo sapiens
ctcacccgaacatcagggccctccagactcaggcgccccaacagatgttcgtgatgctgaagacgctttacataatttggacagaaagtggatttgtgg

SEQ ID NO: 869302 - DNA, 99 bp, Homo sapiens
actttgactttgatctccttgatcctgttgggttgttcctccaaaagagtggaagccacgagcatcctatgatgacattgatgatttggtcattcctgc

SEQ ID NO: 869303 - DNA, 99 bp, Homo sapiens
gttacaattaaaatcacacttcattttgacagaaagggtagaactttcttctttacaacccaggtttatgtcttgggcccttaaccatcaggcctccat

SEQ ID NO: 869304 - DNA, 98 bp, Homo sapiens
gagagcatgtcggaggctgatcgcgcccagaagatctacgcagaccccaccaagaggctggagctgtacttccggcccaaggacccatactgccaccc

SEQ ID NO: 869305 - DNA, 99 bp, Homo sapiens
gaggctgaggctggcggatcacctgagttctttggggtgactttcaagatggactctactctaacagcaagtgaaatccggcagcgatttatagatttc

SEQ ID NO: 869306 - DNA, 99 bp, Homo sapiens
tcaaccaaacatcagaggaataatgtggggaggccagccagtcggtctaatttgaaagtgaactccggagacggcattgactacagccagcagaagagg

SEQ ID NO: 869307 - DNA, 75 bp, Homo sapiens
tctgcggcccgcaggtgacggagctcacggtaattcaaggaagccttctccctatttgataaagatggcgatggc

SEQ ID NO: 869308 - DNA, 99 bp, Homo sapiens
gccattttctccctgacggtcccacttctctccaatcttgtagttcacaccattgtcatggcaccatctgggatgtaatgttgggacatgttgtccaag

SEQ ID NO: 869309 - DNA, 99 bp, Homo sapiens
ggctggtcctgctggctctgtgggtgtggcccagcacgcaaggatcagttccatgacaagaccccttatacgattatgtttggtccagataaatgtgga

SEQ ID NO: 869310 - DNA, 98 bp, Homo sapiens
agatctggactactgttgaaaaaatttccagtgaggcactgaaaatgaagatgctggaagtgactatcaaagtgataatcaagcaagttggattcatc

SEQ ID NO: 869311 - DNA, 99 bp, Homo sapiens
gagacacaatttatcattgaataagtgttttaagaaagtggacaaagagaggagtcagatgttcctcctgctgatcaagagaagctttttatccagaag

SEQ ID NO: 869312 - DNA, 99 bp, Homo sapiens
gtatccctcaacctacaatcaagtggttctggcacccctgtaaccataatcattccgaagcaagaaacccctcagttcctgcacatgggtgagatcata

SEQ ID NO: 869313 - DNA, 98 bp, Homo sapiens
tcaggctggaacttgccctgtctcctcgcagatgagcaagaggtggaaacatacagaagaagcaaggaaattacagttagaggtcacaactgcccgaa

SEQ ID NO: 869314 - DNA, 99 bp, Homo sapiens
ttcaaaaggagctatataaggaagtgctactggaaaacctcaggaacctagaatttctggagcaattgtatgatggctatgatgaagagtatgactgtc

SEQ ID NO: 869315 - DNA, 99 bp, Homo sapiens
atcattgataggcacacttgcactaagccttacaatacctctgtccataatagctgacatgtgtatgcaaaagaattgtcgagaacggtcaagaaagag

SEQ ID NO: 869316 - DNA, 99 bp, Homo sapiens
gggccgtacagttccacaaaggcatcctggagagaccctgcagtcctgcggttccacatactccccaaagcagtctatctgggctggggtcacatgcct

SEQ ID NO: 869317 - DNA, 100 bp, Homo sapiens
gagcaaaagcatctctttcctgtaccacctgagtacactgattctttgattcctgaatcctattagatgccatttgatagtccatttctgtgcttttgct

SEQ ID NO: 869318 - DNA, 99 bp, Homo sapiens
aattgtgtggccttagcgatctatattccctttccagaagatgattccaacgccaccaattccaacctgttactctttcaacctgatcagaacgcacca

SEQ ID NO: 869319 - DNA, 99 bp, Homo sapiens
attgagaagaggttttgctttgatgtggaagcagtagacaggttcatctctaacaagtatttagtgaaacgacagagcagagactatgatgtggaatgg

SEQ ID NO: 869320 - DNA, 99 bp, Homo sapiens
ctatgataatttgagacactttgcaaaaaaacttgatcctcgaagagaaggtggtgatcaaaggaaaactttagaaactgttcctttggagaggaaaaa

SEQ ID NO: 869321 - DNA, 99 bp, Homo sapiens
ttctgagcaacagccaccgcctctatatgaatctgcagcctgtcctgcgccatatccggaagctggaggaaaacgaagtgcttccctcattcaccaaga

SEQ ID NO: 869322 - DNA, 99 bp, Homo sapiens
gcattcgttcagtcagagagcataatagaagtactgcgttttgatgatggagggctactacagattatgtggcgtctctggggagacctgtggcttctc

SEQ ID NO: 869323 - DNA, 99 bp, Homo sapiens
agaagtggagcgtgtcctgaaggagttccaccaggccgggaagcccatcggagagttaagaaagacgtggacaagggcacacggcactcagacatgttc

SEQ ID NO: 869324 - DNA, 99 bp, Homo sapiens
gttcactggggagctcaacaacacttacatcttctatacctcagacaatggctatcacacagctgcgttcctttgcctgcaacaggggtcaagatgagt

SEQ ID NO: 869325 - DNA, 99 bp, Homo sapiens
tccaccagcaaccatgagtggttccatgatgggaagtgacatgataaacaggggtcacatgacgacagaagccaagagggctgcaaagatggaaaagaa

SEQ ID NO: 869326 - DNA, 99 bp, Homo sapiens
cttagtgttcctggagaggaggatttcagatctagccagggtgaacgcccgactgcaagctgttccatgccattgcagtgtcaactaggcctcagttac

SEQ ID NO: 869327 - DNA, 99 bp, Homo sapiens
ctcggacgtggtgcttggcttcgccgagttggaagctatgtgatgatgatgccatttaaacgacaggctctagtggaatttgaaaacatagatagtgcc

SEQ ID NO: 869328 - DNA, 99 bp, Homo sapiens
gaaagtggaaaagaagccagtgttcatatccaactggaaggccggccatccattttagaaatgctcccagatggacgtatcatcaaagttgggggagag

SEQ ID NO: 869329 - DNA, 99 bp, Homo sapiens
agcaggagcagcagctgcagctctactccaaggagaggcagggcaagaatcctttcgttccatcacaaggtcgtattacagaggtgcagcaggagcttt

SEQ ID NO: 869330 - DNA, 98 bp, Homo sapiens
agcctgagttgcacatcaatgacctatggagagtctggcagtgggatgaaaaggacatcacgagtggttgcttggacctgaggtggacattctcccct

SEQ ID NO: 869331 - DNA, 99 bp, Homo sapiens
gagaagcatttacaataagaagagaagatggacagtttcagtgcattacaggctggcgcggagatctccaccgtgaacccagaacagtattcaaagcgc

SEQ ID NO: 869332 - DNA, 99 bp, Homo sapiens
agcacggaaatgccctgtgactggcagcggaaaaggcgaccaccgcttgtgtactataatgtaactgcaaactccaagctggtcattatcacggctggg

SEQ ID NO: 869333 - DNA, 98 bp, Homo sapiens
cacgagctacctcagcaagacggcactggtgaggtggattgatgatgaatcttctggcacacctggagcaactccagaacacagtcgtgaggataatg

SEQ ID NO: 869334 - DNA, 99 bp, Homo sapiens
atacagcctgacgcggaggatttcgagcactcaaggagttgcccctggtcctgtaattggacttcaggcaccatctactggtcttcttggcgcccggcc

SEQ ID NO: 869335 - DNA, 98 bp, Homo sapiens
cactgcaattcactcagcaaactgggactgttggtcaccctacctggcagccagtgataaggtcagtaacagatccaagagatggaaagagagtagcg

SEQ ID NO: 869336 - DNA, 99 bp, Homo sapiens
cgtccctcccttccccttccctgcccccttcccccacccccgactcgggcttggcgcggcggccagaggaaccccgaggctctccagcagaactatctc

SEQ ID NO: 869337 - DNA, 99 bp, Homo sapiens
gcagtttttgatgaaattgtagagaactgagagattaaacagattctagaaaatgaacttcagatacctgtgtccaaaatgctgttaaaaggctggaag

SEQ ID NO: 869338 - DNA, 99 bp, Homo sapiens
cagaatattttgttcatgttattgaaagggaattgtcttagaagaaagaaggcaagccaccattttacccacgtaaatatatgaatatatttctgacat

SEQ ID NO: 869339 - DNA, 99 bp, Homo sapiens
cctagaggagtccatagtacaggaagaaaagaagaagctgacccctgaaggaaacaaagaatgtgacagtgatgataacatgggtgccaaaaatacttc

SEQ ID NO: 869340 - DNA, 99 bp, Homo sapiens
agatctcagagcagtttgaagccctggggtcctctattggagtgcagagtgggtgaaacttcctacatccgagtttatcctgagagaagcaccagctat

SEQ ID NO: 869341 - DNA, 99 bp, Homo sapiens
gacagcaccgtgtcgctggtggtgcaggcgctgcgccgcaacgccgagcgcaccgacatctgcctgctcaaaggctggagtgcagtggtgcaatctcgg

SEQ ID NO: 869342 - DNA, 99 bp, Homo sapiens
tgcaaaggccttggagagcccagagcgacccttcctggccatcctgggcgggacagagggcttggtggactccttttctcagggactggaaaggtcata

SEQ ID NO: 869343 - DNA, 99 bp, Homo sapiens
gaatattcgccagtctgtgggtatacagaagtacgacaggacagaaaccgcgatcaacaacctcaaccccgccttctccaagaagttcgtgcttgacta

SEQ ID NO: 869344 - DNA, 99 bp, Homo sapiens
tggaaatgttcccagaacattgcacgatgcctcctggggctatctgatgggttagagtgcctttgagaagaaatcagtggatactggatttgctcctgt

SEQ ID NO: 869345 - DNA, 99 bp, Homo sapiens
cttccttccatacttgctcatcaccagttagcatatcagcatcctctacactagggctaaggctgcttggcagtgtctctgaagtcacagtagagcttg

SEQ ID NO: 869346 - DNA, 99 bp, Homo sapiens
gagattgttacacaaattgatgcacaaaataagctggaaaaatctgaggatagtgacaacctctggtgggacgcctttgccactgaattttttgaagat

SEQ ID NO: 869347 - DNA, 99 bp, Homo sapiens
ctcctgagtagctgggactacagacactgccctaaccatcatggaggtggccgaggtggaaagtcctctgaaccccagctgtaagataatgaccttcag

SEQ ID NO: 869348 - DNA, 99 bp, Homo sapiens
ttattgcatacaataaagataaagaaagcaagccagctcaaggccaattcagaaatgacagacaaccttctgtgccttcatcaagctggttgtgtaccc

SEQ ID NO: 869349 - DNA, 99 bp, Homo sapiens
gtcgaagttttcagcatttcgcccacaattcaatatcaaggtacatgctcttttgatgccctccaattctgcttgcagcttcacagtcatatctccctg

SEQ ID NO: 869350 - DNA, 98 bp, Homo sapiens
taagtcaataggacccttaacatttgtgttcacaggaactggtaatgtttctaagaaaccaggaatggatctggcagacacctatattatgtttgttc

SEQ ID NO: 869351 - DNA, 99 bp, Homo sapiens
acagcacctatcacttgttccctccaagacaactgaatgtgaagctgtggtctaccaatctagacaactcagtggcaagcattgaggcaaaggctaatg

SEQ ID NO: 869352 - DNA, 99 bp, Homo sapiens
ctgggtgacagagcgagactccatcttgcagtctccccaggtgcatgggtagcaatagagggagtaggtgtccggcgatggggagccactgccactgcg

SEQ ID NO: 869353 - DNA, 99 bp, Homo sapiens
tgaaagctagaagaaaaggtgtacttgcaagaaacctcaggacttgagtaacagcaacatggattctgatcttcgaagtgcacttcttttggaacaggc

SEQ ID NO: 869354 - DNA, 99 bp, Homo sapiens
gcggtcattttgagcccctgtctggatgacttcttgcggctgttctacccctccccctccccgcggaacagatggagtcggataactgttcaggaggag

SEQ ID NO: 869355 - DNA, 99 bp, Homo sapiens
tgtatgttatggtgaatgccaaatttgaaggtgctgttaagccaagtgcaccggctgagagcattggacttgcttggaagatttttggacctgggtccc

SEQ ID NO: 869356 - DNA, 99 bp, Homo sapiens
aagtctttggaaagcatagtaaagtctgaagtatttcctgtatcaaaaacgctggtgcccagggtggctccgtggcccgcacactcctggaagatggga

SEQ ID NO: 869357 - DNA, 99 bp, Homo sapiens
gaggcccgctgtaaagactgtggcaaggtctttaagtacaatcactttttagcaatccaccagaggagccacacagcttctcctcttaagaacaatgat

SEQ ID NO: 869358 - DNA, 99 bp, Homo sapiens
agcctcatccagcaggcggtgacccgctaccggaaggccatcgccaagaaagtatgctgaggccttggattaccaccgtcaggcactggtgttgattcc

SEQ ID NO: 869359 - DNA, 99 bp, Homo sapiens
gttcattccatctctcttcctttctcatgttttggctttggggctagggagaaaatgcagaagtctccatggacgtttccctggcttaccgtgatgacg

SEQ ID NO: 869360 - DNA, 99 bp, Homo sapiens
cgcccgggtcctcctagaaattccccccgaagaagactcccccacatctgggtgctgctggtgagtagcagccggtacccagaccagtggattgtccca

SEQ ID NO: 869361 - DNA, 99 bp, Homo sapiens
gcgagccgccgacccgccgagcaaaatggttgatgataattagaagcatgctttccactgaacttcccgacaacatttgttatgcagaatgtctctgag

SEQ ID NO: 869362 - DNA, 98 bp, Homo sapiens
gaaggaccagtgtctgatcagctgctgcgtgctcagccccagagcaggtggacccaagtggagagattgtggaactggcgaaaggtgcatgtccctgg

SEQ ID NO: 869363 - DNA, 99 bp, Homo sapiens
caaagctcccgttgggctaaagaatgttggcaatacttgttggtttagtgctgttattcagccagagactgctgctactttgaaacgtacgatagaggc

SEQ ID NO: 869364 - DNA, 99 bp, Homo sapiens
ggcggccggcgaaaggagctggtgcctgtgcaagttgttgagtaattcgccaaaatgacgaacacaaagggaaagaggagaggcacccgatatatgttc

SEQ ID NO: 869365 - DNA, 99 bp, Homo sapiens
ttggagagaaactgatatttaatgaaaatgacttcgtagaagttggtcctgagaaaagggtgccagcgatgcctggatcgcctgtggaagtgaagatac

SEQ ID NO: 869366 - DNA, 99 bp, Homo sapiens
tccaggacgccgctgaccaccctcaacacggatatcagcatcctgtccttgcaggaaccggagtttattgaaggaggaagaccctgctgtgcttatctc

SEQ ID NO: 869367 - DNA, 98 bp, Homo sapiens
gggaccactcgttgctgacagtcagaaaggcgaactttctgaccaagtatacaactacccagagggcctaggagaagtgctgtatagagagcagttcg

SEQ ID NO: 869368 - DNA, 99 bp, Homo sapiens
gattgcactttactgggggatttgcctcagatggagttacagattgttctctggggccggactgagaaatgcctgaaggagacgacggaggagatccgg

SEQ ID NO: 869369 - DNA, 99 bp, Homo sapiens
ccagtttcctgtggccactgcagaaagattctctgaagaaactccaggacggagaaatccacagtaagccttatattcatccacaataatgctgagggc

SEQ ID NO: 869370 - DNA, 98 bp, Homo sapiens
ctccacgcagcaagacccgcgccgccgggacccccaggacgacgtgtacctggacatcaccggattcaagccaaaactcgagaatttagggaacgaca

SEQ ID NO: 869371 - DNA, 99 bp, Homo sapiens
cacgttgatccaggagttggagagctcccagcggcagattgaggagcagcaccaccacaaggccaaacgtaccaagaaagtcgggatcgtcggtaaata

SEQ ID NO: 869372 - DNA, 99 bp, Homo sapiens
gagccaacctcccctgatgacattctggggcacgccaccatttccaagaggagctgatcacgcagtacctggctgagcttcggaaccccgaggagatga

SEQ ID NO: 869373 - DNA, 99 bp, Homo sapiens
ggagaggctgggcggctgccggtgacaggtgtcgtgaaaactacccctaaaagccaaaatgggaaaggaaaagactcatatcaacattgtcgtcattgg

SEQ ID NO: 869374 - DNA, 99 bp, Homo sapiens
ttatgctatgaggatgacaaactctggagtaattggagccaagaaatgagtatagggaaatgtttcaacgtgcgcaagcgttgcggcggcgggcagagg

SEQ ID NO: 869375 - DNA, 99 bp, Homo sapiens
acgtggaatgacccgtctgtgcagcaggacatcaagttcttgccgttcaagactggtcgaattgacaaatcttaccctacagtatgtggccacacagga

SEQ ID NO: 869376 - DNA, 98 bp, Homo sapiens
atagctttgcttgctgtggggttgacccagaacaaagcattgccagaaaacgttaaggaaagaccacagcaagattctttcattcgtctcctcctagc

SEQ ID NO: 869377 - DNA, 99 bp, Homo sapiens
gttaatgtttgcaaatgcagaggaagaatttttctatgaggtgtcattccacacatccacaaatctctgattgggaagaaaggacaacagaagactgtc

SEQ ID NO: 869378 - DNA, 99 bp, Homo sapiens
acatccgttcccctacaagaaactctccccggtcaccctgctgattgccttcatctgtgtgcggagctccctgtggaccaactacagcgcctacagcta

SEQ ID NO: 869379 - DNA, 100 bp, Homo sapiens
gtggaggggaatagggggcggctggtgaagcttttgccacagatttcacagataaagggtttctctcctcatatggatagatggagtctattcccctcca

SEQ ID NO: 869380 - DNA, 99 bp, Homo sapiens
ggcaggggagaatgacttccttcagactgttataaacaaagtcatcgctgccaaagaagtcaaccacaaggggcaggcgagtaaccagctcataaatca

SEQ ID NO: 869381 - DNA, 99 bp, Homo sapiens
caacaagcttaccagagtacctggtgggctggcagagcataagtacatccaggttcaaaccttgtactactcagctgatcacaagctgcttgatgggaa

SEQ ID NO: 869382 - DNA, 98 bp, Homo sapiens
tagccctgggtgagaacagcgaagtcttgaagagtggccgggctatggagttactagtagagaaagcaatcagcagtgcttctagccctcagagccct

SEQ ID NO: 869383 - DNA, 98 bp, Homo sapiens
tgctctgtgcgcgcctccatctgggccatggatggatatgttgatgatgtgatcagccgcattgacaggatgtttcctgaaatgtccatccacttatc

SEQ ID NO: 869384 - DNA, 98 bp, Homo sapiens
cgtagagtcgctggagcgggcggagctgtgcgagagcctcctcacttggcacctgttcttcccggagcctatcagcaaagccattcccaaggctatgg

SEQ ID NO: 869385 - DNA, 99 bp, Homo sapiens
agacaagagaaatcggtcattcaagattgagaggatccagaatccagatctctggaatagctaccaggcaaagaaaaaaactatggatgccaagaatgg

SEQ ID NO: 869386 - DNA, 99 bp, Homo sapiens
ggcggaagtggcccgcctgagcaagcaggtcaaggagctattgtgacaatcttggttaccatccattaagtgctgctgattttggaaagatcatgaaaa

SEQ ID NO: 869387 - DNA, 98 bp, Homo sapiens
tgctctggactgcagaagaacaaggtggagttggtgccttccagtattatcagttacacaagatccttgccagcacattacagaatatttttgttgaa

SEQ ID NO: 869388 - DNA, 99 bp, Homo sapiens
ggggttgttctcataataattcagatggagaatatatggctggacagctagctgcttatggctataaaattacaggcatcacgttgggtggtttccatt

SEQ ID NO: 869389 - DNA, 98 bp, Homo sapiens
ttttgaatctagatatgttcaaaatggcacatacactgtaaagattgtggccatatcagaagtccagaagcactggaaatccatggatcattcacatg

SEQ ID NO: 869390 - DNA, 113 bp, Homo sapiens
tgaaagagagaatctgccgagtggctgggattacagtgagttattctccccacctcagaagtaccagcttttggtgtatcatgcagattctctctttcatgataaggaatatc

SEQ ID NO: 869391 - DNA, 99 bp, Homo sapiens
acaaaacttcccctggggaccgaagaaagatcagccctttttggaaacatacaggatatctaccacttcaataggatcacacccacccctcttggagaa

SEQ ID NO: 869392 - DNA, 98 bp, Homo sapiens
ccggctagaggaagaggcgttgcggcgaaaggaacggctgaaggccctacgggagaaaaccgggcgcaagattcctcggacaccacaccctgctgctt

SEQ ID NO: 869393 - DNA, 99 bp, Homo sapiens
ctcacctgtgcgggatggaacaaaaggtagttgatgtcacttggcgatattcctgcaaacatgaagaggtgattgccagaagaactaaggttaaagaag

SEQ ID NO: 869394 - DNA, 99 bp, Homo sapiens
catcccagcagatctccagggttctaggaaagggtcacttagttctgtaacgccatctcccaccccagagaacgagggtgagatctcagaccccttccg

SEQ ID NO: 869395 - DNA, 99 bp, Homo sapiens
tggcggcgcccagtggcgtccacctgctcgtccgcagaggaaatctactttcttcaatgtgttaaccaatagtcaggcttcagcagaaaacttcccgtt

SEQ ID NO: 869396 - DNA, 98 bp, Homo sapiens
ccaaacaaacgcaaggactggactccatgccgaaggtatctggaagtcgtgacacgagtacagttgtgaatttggctccgcgaagtattatgcactgt

SEQ ID NO: 869397 - DNA, 99 bp, Homo sapiens
tcacacagacttttgatggacaggaggctcctatccagcagtttgcagacaaactcagtggctattttgttccttttattgtttttgtttccattgcca

SEQ ID NO: 869398 - DNA, 99 bp, Homo sapiens
ggggcagaagaagagcagaaaatagcagccaggaaccaagaaaacttggctttaatccagtgtgaccagttgaggaaggagctggagaggcaggcggag

SEQ ID NO: 869399 - DNA, 99 bp, Homo sapiens
atatgaaattgcatgtgaacacgaacactctaattgcctcctgatagcacacagaaaggtggagctgatcagaataatgttcagcatcaaccccctgga

SEQ ID NO: 869400 - DNA, 99 bp, Homo sapiens
agcgtcatcaaagcatgccaactagaagagacattccagctgcagctcttgtctcctagcagcagcattgtcccagcatttaacacggggaccatcaca

SEQ ID NO: 869401 - DNA, 99 bp, Homo sapiens
agaatgacaagtttgagacgattcagcctcgccatccctgccgtcccaaggctctctctcaacgatggtagggaaagccccgcctcctacaggtgccgt

SEQ ID NO: 869402 - DNA, 99 bp, Homo sapiens
actcttcgttcgattattagctttagtgaaatgggctaataatgctggcaaagtggaaaaatgtgcgctctttccaacaactgatcctgtgggtacttt

SEQ ID NO: 869403 - DNA, 99 bp, Homo sapiens
agcagccatggaaaaattaatcaacagagtgggacctaatggtgagagagctattctcaagctggaataactgagactgaatggacaagtggatcttca

SEQ ID NO: 869404 - DNA, 140 bp, Homo sapiens
ggacttccttccccgcggttcaggaatcgtcacccggcggcctctcattctgcagctcatcttctcaaaaacaggcatccggtcttgggatgtcgatcctggcgtctgcaaccttgatgaacagctcaaggtctttgtgt

SEQ ID NO: 869405 - DNA, 99 bp, Homo sapiens
atctgtgagtcttctggcaaacagtgtttgcctctggttcagctcatacaacagcttcttaggtctccatcatcaccagttccagtagtgaaaaacaga

SEQ ID NO: 869406 - DNA, 99 bp, Homo sapiens
gcattgcatccacaggaggggcaggaaattctttgaagatgtctttggtggacttgggaaagaggttgctagaagcagcaagaaaaggccaagatgatg

SEQ ID NO: 869407 - DNA, 75 bp, Homo sapiens
aagctttttaacgaaacagccaaaaagcagatggaggagttacaggaattttggaagcagctggggaacctgggc

SEQ ID NO: 869408 - DNA, 99 bp, Homo sapiens
agatgtgtacatatcccacgtgaggaaggagcacgggaaggttctgactcagaagatcttttggaagaattgctgtgctgtttgatgcagttgatcact

SEQ ID NO: 869409 - DNA, 98 bp, Homo sapiens
gggtcgctgactactgcgaggacaactatgtgcaggaatcagagatcattgatttcttcctgggggcctctctcaaggatgaggttttgaagattatg

SEQ ID NO: 869410 - DNA, 99 bp, Homo sapiens
ccaaagcctgcccagacggctcacctgtgcgggatggaacaaaagttgctgagacaaaggaaaacccactcccttggaggagcatgaccttttcctgta

SEQ ID NO: 869411 - DNA, 99 bp, Homo sapiens
tagcagatgctggcgacctatccagaatgatcaagcataaatgcagttccaactacaacgaagattttgtgctacagctagagaaggaattggtccaag

SEQ ID NO: 869412 - DNA, 99 bp, Homo sapiens
caccagagccagctggaccgtgagcgcatcctgagcttggagcagaggcatccacccaacccaccagtatcaccaggaaaaactgtaaatgatgtcaac

SEQ ID NO: 869413 - DNA, 98 bp, Homo sapiens
ctggtggcaccatgaatgtagagaatacagctctcgtggcattatccttcagtggggctattggactgacttttcttatgctgggatgtgccttagag

SEQ ID NO: 869414 - DNA, 99 bp, Homo sapiens
tttggatcagattattcacgaagctctagaaaggtttttgagttccagttgactgcagaggacatgaaagccatagatggcctagacagaaatctccac

SEQ ID NO: 869415 - DNA, 98 bp, Homo sapiens
ttgaatgagaaccctacttgcctaaatgaggaatgtctttcctaccatctaaaatacgaaggtttctggctgggagcaagagcagctctacctgaggt

SEQ ID NO: 869416 - DNA, 99 bp, Homo sapiens
gccacctctgcagtgtcttccacaacctgggtaatagcctgcagctggtgttttgagaagccctactgctgaaaacttaacaattttgtgtaataaaaa

SEQ ID NO: 869417 - DNA, 98 bp, Homo sapiens
cttctctcgtcaaaaatggtgcagaatttacgaaagtgactgagaccgaagatgatagtgatagtgacagcgatgatgatgaagatgatgttcatgtc

SEQ ID NO: 869418 - DNA, 99 bp, Homo sapiens
cggcactgtttttccagcatgtattctatattgcccaattgaatgtccatttagattacggattggtttcacttcattgggagatgttttcaatttggt

SEQ ID NO: 869419 - DNA, 99 bp, Homo sapiens
ctctaggacaagactgtatgatagtgttagttccacagatggggaggacagtctagagagaaagtgtccaggaggagcatttacacccaatatgcgaac

SEQ ID NO: 869420 - DNA, 99 bp, Homo sapiens
gtgggctcctggggagatggaggggccggggctgggctcgcagtatgagcccagaggacctggtcggcccttgtaccaaagaagaatctcatctagctc

SEQ ID NO: 869421 - DNA, 99 bp, Homo sapiens
gggggcccttccgagcagcagacaggagcaaggatactgctggtcaagagaggtttagaacattaactcccagctattatagaggtgcacagggtgtta

SEQ ID NO: 869422 - DNA, 99 bp, Homo sapiens
gtggacgatggaaggctatctgtatgtccaggagaaaccaccagaaagtttgatgcaggcattggaagacttagattatctggcagcactggataatga

SEQ ID NO: 869423 - DNA, 145 bp, Homo sapiens
cctcgggggacagcgcatgcccgctgcgcaccatcaagagagtccagttcggagtcctgagtccggatgaactggcgatcaccccccgatgggcagagtttcaggagcttctcctttgaaaagccccggcaaccctcacaggctg

SEQ ID NO: 869424 - DNA, 75 bp, Homo sapiens
aaacaacagagcccatgaaaactgacagtgctgaaagtgaagactgagattcagaggaggagacccacccggtgg

SEQ ID NO: 869425 - DNA, 98 bp, Homo sapiens
gagtacacagatgcctccttcacaaatcgaaaggagagaggccctgaagaagagcatcttggcatcctgggagcagcatggacctgtcagcaactaag

SEQ ID NO: 869426 - DNA, 98 bp, Homo sapiens
tggagcgaaccaacaagttcatcaaggagctcattaaggacggctctctgctcattggggcgttgaggatctgacggttccatcctggccatcgccct

SEQ ID NO: 869427 - DNA, 98 bp, Homo sapiens
cctcagttggaagcagccgatccagcctgcggagcctgtggggcagggcaactccaacaacattgccaccgtggacatctccgcaggcttcgtgggct

SEQ ID NO: 869428 - DNA, 99 bp, Homo sapiens
ccgagatttgcgacagcaagggggttgtccacgaggaacaaattgtacatttgcccattctcaggaagagcttgaaaattggaatgttaaagaaattca

SEQ ID NO: 869429 - DNA, 99 bp, Homo sapiens
gtccaccaaggccatcgacatccagaacgcttatttgaatgtcgtgagatggagaataaagaaactctcaaagggttgcacaagatggatgatcgtcca

SEQ ID NO: 869430 - DNA, 99 bp, Homo sapiens
ggagatgccagaaaccatgtgaaaaggcaccttgggatgagggaatacaagtgtcatgtctgtggggaatgaaggatggcagcatgccgtgcattaaaa

SEQ ID NO: 869431 - DNA, 99 bp, Homo sapiens
tcccttgatgccaagagttcgagaccagctggggcaacaaactcctggagctatttgatagtgaggatccccgggagcgtgagtacctcaagaccatcc

SEQ ID NO: 869432 - DNA, 99 bp, Homo sapiens
ttcagtactgtgggtgatatttgcctttagtgcactcttctccttcacagtaaagtggctggaaccatattacgttcgttgcatcaaacccaatgacaa

SEQ ID NO: 869433 - DNA, 99 bp, Homo sapiens
tacgctatgtggcgaatatcttcccttacaagggttatatatggaattatggtaccctccctcaggatgaatccttaaagcaattgcaggtagttcatc

SEQ ID NO: 869434 - DNA, 98 bp, Homo sapiens
ctcaatttaagcctgatctaacccctagaaacaggaaatgttgggtgaactcttcactcctgtagaaacacctgaagcaccaaacaggggattcttta

SEQ ID NO: 869435 - DNA, 99 bp, Homo sapiens
attaactgcctttcttctgtgggctgtgattttcagaggggaatgctaagagggaaagcattaacttttgagctacgtccagaatagcatcatcttcat

SEQ ID NO: 869436 - DNA, 133 bp, Homo sapiens
ccatccagagctgtgcctcccagcaccacagtccttctgcagtccctcgtccagccacccccaggaccctgaggctcagaggggcagcttcaggggaggacaccccactggccaggacgccccaggctctgct

SEQ ID NO: 869437 - DNA, 99 bp, Homo sapiens
atggtccagctgctgcggacagtgaaccggacagtcatcaccatgggccgggatcacattctgattgaggactcagagagagtaatgataattaccgga

SEQ ID NO: 869438 - DNA, 98 bp, Homo sapiens
cacactttggaaactaaatcaagtctgccaatggtgcatggagaagatgtatggtcttatgcaaagggacttcctcacatgtttcagcagggtggtgt

SEQ ID NO: 869439 - DNA, 99 bp, Homo sapiens
aagcgcccagcctgccgcctcgctgtccctgcggcttctggggagtctcaagtcaaagtcgtggccctgtgtgctggttctgggagcagcgttctgcag

SEQ ID NO: 869440 - DNA, 99 bp, Homo sapiens
tttgctccaccaaacacttcagatatggaagctgtgactgtttgtctgtgggatataaacgcaggaccaaaagaaggcaaaattgtggatgctaaagcc

SEQ ID NO: 869441 - DNA, 99 bp, Homo sapiens
agaacaacaacagacaagtgtgcattgacccgaagctaaagtggattcaggagtacctggagaaagctttaaacaatttggtaactctcattcgacatc

SEQ ID NO: 869442 - DNA, 99 bp, Homo sapiens
ccaggcggatctcagaaggccagttcaaaggacctgctgaagttcccatgatgtcacccaatggatccattcctcccattcatgtgcctccaggttata

SEQ ID NO: 869443 - DNA, 99 bp, Homo sapiens
cgcgagtctcttctcaggcgatccagataagaggaaatgagagccgggttttctgacttccaactcattagggaccaggatttggaatgccctgacaga

SEQ ID NO: 869444 - DNA, 99 bp, Homo sapiens
cggcggcggcgccgggcccgggggtggtgacagcaggtctgagtggtgaaaatgtagggttggaatccaaatacctgaagaaaagggaagatagcattc

SEQ ID NO: 869445 - DNA, 99 bp, Homo sapiens
ttacttccggtaccttgctgaagttgcgtgtggtgatgatcgaaaacctattcctgcaccaactgacctgaagttcactcaggtcacacccacaagcct

SEQ ID NO: 869446 - DNA, 99 bp, Homo sapiens
aataccaggatagctgttgtttcagagaaagctgccctatgatgactgtgtgtttggaggccagcgtctgacgttatgagcgcaaaggggctgaaagaa

SEQ ID NO: 869447 - DNA, 98 bp, Homo sapiens
tccagtggacctgattgggtaactgtgattcccaggagaataaaagggcatatcgatgcatttacttcaaaactttttctactggaagaaattacctc

SEQ ID NO: 869448 - DNA, 99 bp, Homo sapiens
tccaaggtcccccaaaggaccaagatgatgaggatgcacaggaacaaacgagggaatatgcctcctatggaacatgatggggatgttatagaacagtca

SEQ ID NO: 869449 - DNA, 99 bp, Homo sapiens
cacgtggcgaacataacctgttccatttcccggatagcaagccaccattgccccaatccgatggccagcaaatgagagagcagcagagatggaaggaaa

SEQ ID NO: 869450 - DNA, 98 bp, Homo sapiens
accagggcagaagaagccatggaactttaccacatagcactgttcttggaatttaacatgcttgcacaagagctccttaataagcatttatagtcagt

SEQ ID NO: 869451 - DNA, 99 bp, Homo sapiens
ttcttctgctctcaattcagaatccgctttatccaattacagtgtgaatggtagtgtctagaaagggtatgtcccttcaagagagaggtgccaatgtcc

SEQ ID NO: 869452 - DNA, 99 bp, Homo sapiens
caagatctcctcatgagctttggtatccttaaacctgacttaaggattgtctttgtacataacaagggaagcagctcgagagtgtcgtagaaagaagaa

SEQ ID NO: 869453 - DNA, 98 bp, Homo sapiens
atcagtaccaaccaatggctggaaatgcaaaaattgaagacgtaccacctcccactaaaaagctaactccagaattgaccccttttgtgcttttcact

SEQ ID NO: 869454 - DNA, 99 bp, Homo sapiens
gaaagaaaggacaaaatatatagctgtacatcaatctcgatgcattgctgtgtagcgaactgtcctcctcttggcttttgtccttatttctcatcatct

SEQ ID NO: 869455 - DNA, 99 bp, Homo sapiens
gatccgagaccctcgctcccccatcaacgtggagagcttgctggtctcagcatcagaggagcccaggaggaggaccctcccgatccccagctaatgaga

SEQ ID NO: 869456 - DNA, 99 bp, Homo sapiens
caggaggcgctggagcaacagctccccacactgcaccatgagctcagttggctgcaggagcagctagcacaggatgaagatgcatcagggggcgatcaa

SEQ ID NO: 869457 - DNA, 99 bp, Homo sapiens
tctgcaaggggtaaatgagggtgttgatttctccaaggatctgctgaaagtgaagctttgttctaagaatatttgtttcatctagtttatgagtccaaa

SEQ ID NO: 869458 - DNA, 99 bp, Homo sapiens
actatggaccaaatccaagaccagtttaatgaccttgttatcagtgatggctcttctctggaagatcttgtgagtgaacctctgtatgtgcctgtgaaa

SEQ ID NO: 869459 - DNA, 99 bp, Homo sapiens
tgaagagttgtcccagctcggcccgcgggggagccccgggagccgcacggtgaaaggtgtagcagtcactcggcctacacccacagcatcgaccttgtg

SEQ ID NO: 869460 - DNA, 99 bp, Homo sapiens
cgacggtggtggtgactgagcggagcccggtgacaggatgacaaatgctgtgcttcatgaagttaaaagagaggggctccccgtggaacaaaggaatga

SEQ ID NO: 869461 - DNA, 98 bp, Homo sapiens
cccgtgtcaccgccgcccatcgagtcgaagcaccgcagcctggtgcagatcatctacgacgagaaccggcccttcagatatttcaacactcctctcag

SEQ ID NO: 869462 - DNA, 99 bp, Homo sapiens
gtgtgaacactgctggggtcagaagaacagacaaggacactgaaataacctgctctgagcgagtgagaacctaatagaagagtgatggatgtcatttct

SEQ ID NO: 869463 - DNA, 99 bp, Homo sapiens
cttggtggaggctccgcactagatctagaatcccagtcagaagttccagcctgccactgttctctgatgccatgccagcaccaactcaactgttttttc

SEQ ID NO: 869464 - DNA, 99 bp, Homo sapiens
gcagctcgagaatgtgtccgtggcgctcgagttcctggaccgtgagagcatcaagctcgtgtccatcgagttatgcccagccaagtcttcagtatatcc

SEQ ID NO: 869465 - DNA, 99 bp, Homo sapiens
gactcgctgtaccccatcgcggtgctcatagacgaactccgcaatgaggacgttcaggctctgacgcccgctctgcggcttcggtgtttgaacaggcca

SEQ ID NO: 869466 - DNA, 99 bp, Homo sapiens
gaagatcctggtgtcgccatgggccgccgccccgcccgttgagtgatcagcagctggactgtgccttggacctaatgaggcgcctgcctccccagcaaa

SEQ ID NO: 869467 - DNA, 99 bp, Homo sapiens
tgcccacaaggcttcactggacccagctgtgaaacggggttcagaatctcccatgatgattggtgagttgagaagtgaccttgatgatgttgatcccta

SEQ ID NO: 869468 - DNA, 99 bp, Homo sapiens
ggaccttttttcatttccatttctaccttgtatgcctcaatttgctggatttaagcactgctgcactttatgagataacggaggagatgatggatcagg

SEQ ID NO: 869469 - DNA, 99 bp, Homo sapiens
gggttcattttgactgaaaaagcgaaggacttttttcaggcagaaaacaagtctcgtctggacggtagctacagcaagctgggtagcaggcagatccaa

SEQ ID NO: 869470 - DNA, 99 bp, Homo sapiens
ggagtgaagctgcataccttcgcgcatgaaggccctggtccaggtcattataatgtgaaaatgcctccaacaagctctgtcacttcttgttttcaatcc

SEQ ID NO: 869471 - DNA, 102 bp, Homo sapiens
gggcaacagagcaagactccgtcatcttcttcatcctcagcttcttctgcttccataagctgaggatgaagaagatgacggagtcttgctctgttgcccagg

SEQ ID NO: 869472 - DNA, 99 bp, Homo sapiens
gaagttgttaaatttttgctggaagcctgcaaagtaaaccctttccccaaggacaggagaacttgcgcctgtcaggggctggatccagaaacctgtggt

SEQ ID NO: 869473 - DNA, 99 bp, Homo sapiens
agaagtttcctggcatcaactacccagtcctgaccccaaatttgaaaggcttcgaggcagcgagaccatgaaacgtatggtgcaatagccctacttttg

SEQ ID NO: 869474 - DNA, 99 bp, Homo sapiens
agcaagttagtggattaaaatctcccaagaggaatgacaaacaaccagctcttcaggttgcagtattttacagagctagcccaaggcacaagatgaaaa

SEQ ID NO: 869475 - DNA, 99 bp, Homo sapiens
cgcggaaatctggaaccgggatggcgacgtctacactgagtcggaggcgaaggtggctattatcatggaaaactaatttttcccagagaatttcctttc

SEQ ID NO: 869476 - DNA, 98 bp, Homo sapiens
gggaatagactccatctatccatatgagagagaaatctcatcatctgtgcagccttcttaaagcaaactaagaccagagggaggattatccttgacct

SEQ ID NO: 869477 - DNA, 99 bp, Homo sapiens
gaacagaataacccgcccccagcgggatgtgaaggactccgggtgaggccggccacgccccgcacggcaatgcatgaaccattgcaaacttggcaagat

SEQ ID NO: 869478 - DNA, 110 bp, Homo sapiens
gggatgttgctatagatgtggttccacctaatgtcagggaccttctggatattttacgggaaagagcatgctgaatgactttgtaacaagaactcccaacctggaaaaca

SEQ ID NO: 869479 - DNA, 98 bp, Homo sapiens
agaacaaaagctataccaaaagggccatgtttcaagaaaatggatttaaacatatttccctgtggagttgaagtctgagcgggaattggacaagataa

SEQ ID NO: 869480 - DNA, 98 bp, Homo sapiens
atccacacagctcagaacagctggatcttgctcacactctttcaagagaagcttccttggtggcacaagaatggctcaactctccaaatagagagaat

SEQ ID NO: 869481 - DNA, 99 bp, Homo sapiens
agctctcctccttcttcctcaactatctcgctgacacgcaggttggtgaaagatgctccttgggatgaggtcccgcttgctcactccctggttggtttt

SEQ ID NO: 869482 - DNA, 99 bp, Homo sapiens
tttgcaactcatcatagtcctggacagcccatgtactctcgtgaacatggtgctgctgcatctgagcgacttcagttggggacaccgcctcctctgttg

SEQ ID NO: 869483 - DNA, 99 bp, Homo sapiens
aaaataattaaatattcttaccgagagtaaagccaatcccagctgaaggaatcaagtcaaatccttccaagcggcatagagaccgacttaatacagagt

SEQ ID NO: 869484 - DNA, 98 bp, Homo sapiens
gagggacttccgcaacaaaccctatcctgtccgagcaaagattacctattaccagaacacactgacaggaagacatgtaaggaatttgcataagacag

SEQ ID NO: 869485 - DNA, 98 bp, Homo sapiens
ttcaggctgcaacaaggagaagagccatggaaacaggaggaagaattcccaagccaaagctttccaggtcacagggattatggacccagaacagatgc

SEQ ID NO: 869486 - DNA, 99 bp, Homo sapiens
gccatggcggctgacagtcgggaggagaaaggccaagaagcttgagagaagaaaaatttcagaaaaattgtctcaatttgactagaatatcaatgaacc

SEQ ID NO: 869487 - DNA, 99 bp, Homo sapiens
tatctctgagcagtggaccccaagtgcttttaacacgtcagttgagctgcctgtggagatgggcttaggtcacgagcaaggatttggagccccttgttt

SEQ ID NO: 869488 - DNA, 98 bp, Homo sapiens
aggacttggctggacggcgcggccacggagaagggcgcgttcaattttgtggggaaattgcttggaccaagaggaaactccttgaagaggctacagga

SEQ ID NO: 869489 - DNA, 99 bp, Homo sapiens
caatgagatggtcacaggaaatggacagctgaaccaaggtcacgcagtgggccatcttccatgcagtagcccattcttcaacattgagagtcatgattc

SEQ ID NO: 869490 - DNA, 99 bp, Homo sapiens
cccaaccccggccgctggccctctgggcagcagaagaagcctttgtaaatgacattgacgagtcgtccccaggcactgagtgggaacgggtggcccggc

SEQ ID NO: 869491 - DNA, 99 bp, Homo sapiens
gagatgcgactcgaagcagaaaggtatctcagatgaagacatcatcaacattactcttcctactggagtccccattcttctggaattggatgaaaacct

SEQ ID NO: 869492 - DNA, 98 bp, Homo sapiens
tccctcattgatacctttcctgagtgtagtacggaaggtgttggagcgggccggagagaagtagagtgggctgcgaggagaaggaaacaggcctttcg

SEQ ID NO: 869493 - DNA, 99 bp, Homo sapiens
gtgtatcaagtaatggtgcaaagcctgaaatcatcactgttgaagaggcaaagcgcaggaagagcacatgcagctactatgaagacgaggacgaagagg

SEQ ID NO: 869494 - DNA, 99 bp, Homo sapiens
ccagttcataaaaatccttaaagcaatcatctgcttttgctcatgcaggggcgccgcagccagcatggacgcggtcaggggctcctgtcctgggatgtg

SEQ ID NO: 869495 - DNA, 99 bp, Homo sapiens
atcggaacgttcttctgcaggattcctctagctgcagccatctgatcacgatggccaacatctttcaattcctgcaccaggtccggcgtgaggcgcttg

SEQ ID NO: 869496 - DNA, 99 bp, Homo sapiens
taagagatatctgcaatgatgtactgagacgcattctcactatgttgcccaggctggtcttgaactccttccctcaagtgattcttctgcctaatcctc

SEQ ID NO: 869497 - DNA, 99 bp, Homo sapiens
aaagaatttactgacaatgtgagcagtgcttttgaacaagcacttctcagaacttctggatgagttttcccagaacgtcttgggtcagctcctgaatga

SEQ ID NO: 869498 - DNA, 99 bp, Homo sapiens
cagggtgacacacggcctgcaatgaagttcccgcttttgtcggggttggttaggagcagaaaccactactgtgttgcaaattgccaatgcaatgaaaaa

SEQ ID NO: 869499 - DNA, 99 bp, Homo sapiens
ttcatcaaggaaaaagtgagcattatggatcagagaccttgcgagaatttcttaagtttttgccagagtcagaagagtcttgctctgtcgcccaggctg

SEQ ID NO: 869500 - DNA, 99 bp, Homo sapiens
aaggcgtatacaggaacaatattgatgatgtagtaaggtattttgaaggtggcgtctcatctgtctacctctgggatctggatcatggctttgctggag

SEQ ID NO: 869501 - DNA, 99 bp, Homo sapiens
ctgcctcatctgcagtccggactcatctagcctcgggtgaacctgagcaaggtgggcgagtattggtggaacgccatcctggagggagaagagcccatc

SEQ ID NO: 869502 - DNA, 99 bp, Homo sapiens
agttgggtggactacggggagcgcgccgagctggatgactcggacggtagctgcaatcaacccaaatcaccctcttgctcagatgcctttgcctccgtc

SEQ ID NO: 869503 - DNA, 99 bp, Homo sapiens
ggagacctggtggaaaaggttgatctcatagacaagtttgtacatccaaagttgattcttcaccacactgaaaccattaggaaaaatccttgtggttaa

SEQ ID NO: 869504 - DNA, 99 bp, Homo sapiens
ggtaaaactggttctgggaaatctttctggggttatcaccaatctagtgaaaatgttgaagtccagagacacgaggagaaatttttgtcctccaaacca

SEQ ID NO: 869505 - DNA, 99 bp, Homo sapiens
ctgggccgtgtataggttgtcaaaattcacaaggcaaggtgactttgaaagcctatatatgcaaacagatttgcagtaccaacctatgcagccaagcaa

SEQ ID NO: 869506 - DNA, 99 bp, Homo sapiens
atcagataaatgatgccagtcgtggtactttaagcagctatagtcttgtattgatggttttgcactatttacaaagacctgatcgctgcaaaatgaacc

SEQ ID NO: 869507 - DNA, 99 bp, Homo sapiens
catagctcatcgcatccttgaactcctgggcttaagctatcctcccgccttagcctcctgaatagctaggaccacagaatttctagaaggaggagttgg

SEQ ID NO: 869508 - DNA, 99 bp, Homo sapiens
gctcataaggattgtcctctttctacaaaagctctactgagatgaagaaagaaaaagaatacctgctcagctccagagacacgtaaagggacagagatt

SEQ ID NO: 869509 - DNA, 99 bp, Homo sapiens
ctagaatccctcagggtttctttaaccagcaatccggtcagagttgtggaaagtaaaaatgtagccctaccaaaaggaactattgtactggcttctcca

SEQ ID NO: 869510 - DNA, 99 bp, Homo sapiens
aacggcagtgatcacacgtcggctgctgggaagatctggattctcgtttcaggcctcagctgttgaagaacgctctgcagagagcagtagagaggggcc

SEQ ID NO: 869511 - DNA, 99 bp, Homo sapiens
gcagaatgaaggtcaaggagtgggagaaatcaacatggcaacttctggtaatggtcagatctgacaggagctcaagatggaagtgtcagaatgtttgaa

SEQ ID NO: 869512 - DNA, 99 bp, Homo sapiens
ccatcagtacctcctgctcctcctttcaaccctgtgtccatactttgattcaactgttggtcacttgtttctccatcttcactgatatatccaggaggt

SEQ ID NO: 869513 - DNA, 99 bp, Homo sapiens
ctgggcaacagagcgagactctttcaagcccatcttgttcttatccatggactctttagcctctgaagggatcatccactttcctccaggtccttgaat

SEQ ID NO: 869514 - DNA, 99 bp, Homo sapiens
cgaggacaaccgcagccacagcgcccacttctttgagtttctcaccaaggagctagccctgggccaggaccggtccagcccagaatcaaatgcaggttc

SEQ ID NO: 869515 - DNA, 99 bp, Homo sapiens
gagaaaaaaccaacaccttcctgtgcagtcctgttggaatttataatgagcttcagtccccaagatctgcgaagacgtttgtgggtgatttttccagga

SEQ ID NO: 869516 - DNA, 98 bp, Homo sapiens
gaaaacggacgatgtattactaagctggaaaacatggggtttcgagtgggacaaggattgatagaaagatgtacctgtgtggtctaagctggaatctg

SEQ ID NO: 869517 - DNA, 99 bp, Homo sapiens
attcagggcctgctgtggaagaccagccccaaaggaaactggagcacccatcctaactgatgatgttagcctgcaggtgttcatggaccatttgaagaa

SEQ ID NO: 869518 - DNA, 99 bp, Homo sapiens
ccggtgtctggcggatgcggtcgtgaagatagaacatccagtcatggataaaaatgagctggttcagaaggccaaactggccgagcaggctgagcgata

SEQ ID NO: 869519 - DNA, 99 bp, Homo sapiens
ccgccgagccacgccgacttcagggactgccgaggatgggcaacactccagattcagcctcagacaacctcggtttccgctgtgctgcagacgcaggcc

SEQ ID NO: 869520 - DNA, 99 bp, Homo sapiens
ctgtctccttgagcaaaaaagaaaagttgtttcctccaacattgatgttcctccagcaaggcctgatcttttggccagaaggagattaaaaagatgccc

SEQ ID NO: 869521 - DNA, 99 bp, Homo sapiens
gtgcttccgcaccaccgtgcgctgcatgcatctgctgctggaggccgtgcccgccgtggcgccgcagacctccatccttttttgatgatgaagaagaaa

SEQ ID NO: 869522 - DNA, 99 bp, Homo sapiens
ctcgtcgaaaggattggattggcatctttagagttaagaatctaaccctgcaactggagcaggaatcaaataagcggctgttgttacaaaatgaattga

SEQ ID NO: 869523 - DNA, 99 bp, Homo sapiens
cggacatcactttagaccctccacctaattgcagattttgagaagagggggaaaaaggaagtttgtcctgtcctggatcagtttctttgtcatgtagcc

SEQ ID NO: 869524 - DNA, 99 bp, Homo sapiens
tgagaatcggaaacggcaatggcctactaaatctcaaacagacagaggagccagtgcgggaaagaggagatgcttctgatgatttcacaaaagttcatc

SEQ ID NO: 869525 - DNA, 99 bp, Homo sapiens
cagactcatccaggccatagaacccggcattgactatagcatctacctctagcaatgtgatgtcacctctatagagagaaactttttcagtcaaacttt

SEQ ID NO: 869526 - DNA, 99 bp, Homo sapiens
ccttcctcgggtcagactaccggcggcgacgaccacaggaggaagggaaaaggccgaggcatcagcgtgtgaagaccgcaaagacgatcccgagtacag

SEQ ID NO: 869527 - DNA, 99 bp, Homo sapiens
cttcatttcagcagcacgattgacccctcagtggatcagcagcgattcattccacacgtatttaatcaatgagctgagcaatgttcctgttcctgtcat

SEQ ID NO: 869528 - DNA, 99 bp, Homo sapiens
aaaactttttggccctcttccttaggatcagaaggcatttattgaaatggcaaccacagaggatgctcaggccgcagtggattattacacaaccacacc

SEQ ID NO: 869529 - DNA, 99 bp, Homo sapiens
gattacctggtagacctcattgcctttcttcgtagcacctttgctgtattcacacaccttccttttctccacagacactacccaaagcagtccttcact

SEQ ID NO: 869530 - DNA, 151 bp, Homo sapiens
agttctcttcaccaaggagactgcaggctacctcaggggccgtccccaggacactgtccggatcttccctccctgctgctcagatggaagataaaaagccctttatcctgtcttccatgaggcttcctctcctggacaccaacagcaaggt

SEQ ID NO: 869531 - DNA, 98 bp, Homo sapiens
tgaagttcctccgggagcacttcgagaagctggagaagcttctgggctggctggctgagaaactacctactcttcgttccacccctacagaccttatc

SEQ ID NO: 869532 - DNA, 140 bp, Homo sapiens
gatccccagcaggagcaggagcaggagcgggagcgggatccccagcaggagcaggagcgggagcgggagatgctgaacataagccatatatctgtggggatgcagattctgcctccactgttctggatgggaccgaagac

SEQ ID NO: 869533 - DNA, 99 bp, Homo sapiens
caggatattcctcatgacattgctgtctggccttggatggtatactgtaaattcagcatatggagataccattatcataccttgccgacttgacgtacc

SEQ ID NO: 869534 - DNA, 99 bp, Homo sapiens
ctcacagaacctcctatgaacccaaccaaaaacagagagaagattgtagagttatcaggaactgttgccgttattacatcagatgggagaatgattgtg

SEQ ID NO: 869535 - DNA, 98 bp, Homo sapiens
aagaataaatcttgtttgacctttaccgatgatggatgtgggatgacacctcataaactacaccgaatgctcagcataagcagtactataatggatgt

SEQ ID NO: 869536 - DNA, 99 bp, Homo sapiens
accctgcccagcagaatttgtatagagatgtgatgttggagaactacagaaacctggtctccctagtatttcaggggctgccaagctgctctcctgttt

SEQ ID NO: 869537 - DNA, 98 bp, Homo sapiens
atgacactaagaagtaaaattacgaactcactgagctggaagtcattcaacgggaattgaataggtcttagaaaaataccccaatacacccatgagtc

SEQ ID NO: 869538 - DNA, 99 bp, Homo sapiens
gtcagggagggcttcaagcccatcttggacttcagaacacctcacaactttgtggatgaagtcattgctgtttccgaaaaggtgattgtgaagcttgaa

SEQ ID NO: 869539 - DNA, 98 bp, Homo sapiens
ttcagaagatgactgtacaaaggataataaactagttgagaagcagaacccagctgaaggactgagtgttgcggagataggaacatgggagagaaaca

SEQ ID NO: 869540 - DNA, 100 bp, Homo sapiens
agatggattagctccagttcgctctagcaatgaagtctttgatatggcttactctgtggatctgatcttgtctgctagagcgaactggagctaatccatc

SEQ ID NO: 869541 - DNA, 132 bp, Homo sapiens
tggtttcagtggcgtcactcgctgggctgctcttcctgaggttttcctaagccatcccctggcggaaccgcccccagatacactgcctctaggactgggacagatagccactgagtacctgcttcaaatcac

SEQ ID NO: 869542 - DNA, 99 bp, Homo sapiens
aagacgaaagcgaaaccactgtgactggcagcgatcccttctatgatcggttccactggttcaaacttgtggggagtgtgctgttggaacaactggcca

SEQ ID NO: 869543 - DNA, 98 bp, Homo sapiens
ctgtgttcagattcacttccttctcatccttttccaccagctaaaggtgaattcatcattggccgagttatcaaagccatgaataacagctggcatcc

SEQ ID NO: 869544 - DNA, 98 bp, Homo sapiens
tgggccacatgcagtttctctcaggcccgacaacaagctcaaatacgtcaccaaatggcagaggacagcaaagcagattactcatccattctccagaa

SEQ ID NO: 869545 - DNA, 98 bp, Homo sapiens
ccggcccggccgcagcagccgccgccgccgcgcaacttaattcagtgcacaaatgagatgaatgtgaacatcccacagttggcagacagtttatttga

SEQ ID NO: 869546 - DNA, 98 bp, Homo sapiens
atgaagataaaagtcctgaaacagttttgcagtcggagaggagttcattacttcggaagtggtacaatttaatgatacaaaataaggatgaccttgcc

SEQ ID NO: 869547 - DNA, 99 bp, Homo sapiens
cgcgccttcggaagcccgttcggcctggaggagccgcagtgggtcccggacaaggagccacacccactcgcccgggtctatggccacggtcggagagtg

SEQ ID NO: 869548 - DNA, 99 bp, Homo sapiens
aaaagcgaaatgggcacaccacaggtgtctgctttttcaacgtgggagaaggagttgcacaagatagtttttgatccccggtacttacttctcaatcct

SEQ ID NO: 869549 - DNA, 99 bp, Homo sapiens
acaatcgtggctacaaaaatcaatctcagggctacaaccagtggcagcagggttcactgtgtgcccagtattctgcagacaaacgagaagatgagaaga

SEQ ID NO: 869550 - DNA, 99 bp, Homo sapiens
gtctactgcaacttcaagtagtggaaggagtacagggaagtctataagctttgcaacagaattacagagtatgatatggagtttcgctcttgttgtcca

SEQ ID NO: 869551 - DNA, 99 bp, Homo sapiens
tacagtctgttccgcatgatcgttataataaggtacggaaaaaggaccagatcaatattgaaacaaagaataaaactgttcgttttataggagaactaa

SEQ ID NO: 869552 - DNA, 99 bp, Homo sapiens
tttcgagtgccagaacccaaggaggtgcaaatggacagagccatactgcgttatagcggccgtgatgaagctgtggtctaccaatctagacaactcagt

SEQ ID NO: 869553 - DNA, 99 bp, Homo sapiens
aagacttgaacttaatacagcaagaaagaccatcaagtttaccagtcatcatcagatttgaaatatttaaagtggatacaaaactatttcagcaatgca

SEQ ID NO: 869554 - DNA, 75 bp, Homo sapiens
gccatggattgcactttcgaaggagaggacatgatgtgcgcccatcctcccttgcttccagattgttttagtggg

SEQ ID NO: 869555 - DNA, 98 bp, Homo sapiens
gctacagatcagctcttgcttttatgggatagaatcctaggatacaactctctggaaattcttgctgttcatcagagaagatatgaaatataaagatg

SEQ ID NO: 869556 - DNA, 99 bp, Homo sapiens
ggtcatctcgctcggagcttcgctcggaagggtctttgttccctgcagccctcccacgtggaatcaactatgaaattataatcatagatgatggaagcc

SEQ ID NO: 869557 - DNA, 99 bp, Homo sapiens
ggtgcacctcagcactatcccaagactgctggcaacaggaccgtagcatcctgagacattttgaattgacacttctcaagatttgactggatcagagtt

SEQ ID NO: 869558 - DNA, 99 bp, Homo sapiens
aggagcgatctgcaggtaggggtgcgcgcgaccgctccccggcgggagccagcgaaggtagcccacctgggaggaattttccagagatcactgtctgat

SEQ ID NO: 869559 - DNA, 99 bp, Homo sapiens
tcagattagccagcagacccagctacgtggactagaggcacgtgtggttctcaaatataggcattctgatgggaacttgtgtgttaaagtaacagatga

SEQ ID NO: 869560 - DNA, 99 bp, Homo sapiens
gaaaacacatctttacacactaagtgggtttggaggatttgggacaacatctacaactgcaggttctgcattcagcttttctgccccaactaacacagg

SEQ ID NO: 869561 - DNA, 99 bp, Homo sapiens
gatgggaagtccttattattggccctccagatacactttagaacacagacagacctatgggaacacacgggaacctcttttagaaaacctgacaagcga

SEQ ID NO: 869562 - DNA, 147 bp, Homo sapiens
gccgggccctcttcgacagctacacaaatctggaacgggtggccgattactgcgagaacaactacatacagaggtggtgggacacacgcaggggccactagatgggagcctgtatgctaaggtgaagaagaaagactccctgcacgg

SEQ ID NO: 869563 - DNA, 99 bp, Homo sapiens
gagctccccagctggtggctggagcgaccccttgttctttggtggcgctgggttttttgattaactcaaaaccagagaatgcctgtgaacccatagtgc

SEQ ID NO: 869564 - DNA, 99 bp, Homo sapiens
tacagcacccggtgctgcggctgttgccatgtccgcaccgggacgatcatcctggggacctggtacatgtgcctgaagacctctcattagaagagagag

SEQ ID NO: 869565 - DNA, 99 bp, Homo sapiens
agatctatacgaagcctgcaagagtgacatcaaaaacttctgttccgctgtgcaatatggcaacgctcaggaccttaaaggctttgatccaggagagaa

SEQ ID NO: 869566 - DNA, 98 bp, Homo sapiens
cagactgaggaagacccggaaacttaggggccacgtgagccacggccacggccgcatagagacactatggacagcgtgaagcagagcgcggccctgtg

SEQ ID NO: 869567 - DNA, 98 bp, Homo sapiens
agccgtctaccagatcaacgtcctccgggaccggagtcagaaccctccgcagagtaaagagccatcatcaaccactttaaccccaaaattgagtccta

SEQ ID NO: 869568 - DNA, 99 bp, Homo sapiens
ttacccagtcatgggcttcgagttccaagtccgggtttgtgattcttgttacgactccatcaaagatgaagacttgcttggctcaggaacaacagaaga

SEQ ID NO: 869569 - DNA, 99 bp, Homo sapiens
ttacaaccaccaccaccactaccacctccaccttattcctgtgatccaagcggcagtgatttgcctcaaggggttatggttttgtgaaattcacagatg

SEQ ID NO: 869570 - DNA, 99 bp, Homo sapiens
gctgttcagctgcgctccagtcggcccaggcgccgcggcgaggagcgagcgctgcgaggtggcggcctgaggagatacaactcgtcaacgaatcaaatt

SEQ ID NO: 869571 - DNA, 99 bp, Homo sapiens
ggaagagtcttgtgatttgggagacagaagtggcaggtgaggaggagctacagatgattcagcctgagaagctcctgttggtcacagttggaaagacag

SEQ ID NO: 869572 - DNA, 98 bp, Homo sapiens
gggccagggaaccctggtcaccgtctcctcaggatcagtgaatgcttgtgaaaagacctcatttatgtttctgcggcaagagttgcctgtcagactgg

SEQ ID NO: 869573 - DNA, 99 bp, Homo sapiens
caagacttacccgaagttgccgcggggccttccgatcccctgtgatgggcagaatctgtttacgaaagacgtgacagtgatcgagggagaggttgcgac

SEQ ID NO: 869574 - DNA, 99 bp, Homo sapiens
gtagaccttccacactgccacctgattaaaggaattgttgctgagacaaaggaaaacccactcccttggaggagcatgaccttttcctgtaattcttcc

SEQ ID NO: 869575 - DNA, 99 bp, Homo sapiens
agaggttagacttgtttcttatatgtgatgccattccagcactggactcatggaggctgagcatttattcagcacgtttcttggagcaggctaagtgtg

SEQ ID NO: 869576 - DNA, 98 bp, Homo sapiens
gcccgtgacctgaaggctgtcaagtatgtggagtgttctgcacttacacagaaaagcaaactcaagttcctgcctcctcaggcggagcaagaagactc

SEQ ID NO: 869577 - DNA, 99 bp, Homo sapiens
acttgagccacgtgcatgaaccaaacccacttcgttcaagacaggtgtttaagcatagggatgaggaagaaatgaccaaacgagatgacaaaagagata

SEQ ID NO: 869578 - DNA, 99 bp, Homo sapiens
gcaaagctcaagatggcggacaaaacgccaggcggatctcagaaggccagttcaaaggtaagaatgattgatgttggctgatattggagtgctcattca

SEQ ID NO: 869579 - DNA, 99 bp, Homo sapiens
ttgcctacgtcagtaacagccaccaagctcaagtcactatagaagaaatcactcctcttgtccccccacaatcaggagataaagggcaagaagatctca

SEQ ID NO: 869580 - DNA, 99 bp, Homo sapiens
ctgtctctctgcagctggacctggacaggagattccagcttcaagaagtcatgatggagttccaggtgaatacagcagtccagttaatcttggtggcag

SEQ ID NO: 869581 - DNA, 99 bp, Homo sapiens
gtccgtgtcagcgcacgtcagcatctggaaggtgcccgtgtcctatgcacacaccggattttactatggattgtggaatttgttatgcttatcaacttg

SEQ ID NO: 869582 - DNA, 99 bp, Homo sapiens
cgcccctggtaactgacaaggaggccaggaagaaggttctcaaacaaggctaaagaattacctccaaagccattgtcaagaccacagcagtcatctgca

SEQ ID NO: 869583 - DNA, 98 bp, Homo sapiens
taaaagatacaaccaggtaccaagtgctgctggatggactggttctccaggtctgggaggggctgaacgtggtgaagacaggccgagtgatgcttggg

SEQ ID NO: 869584 - DNA, 99 bp, Homo sapiens
cagcaggcatcatccgctatgcaattggggttgctccttgagggcaggacagttcttatggctttatccgttgcgtaagcacagagaggtctgcgaggt

SEQ ID NO: 869585 - DNA, 99 bp, Homo sapiens
ggcacacatggacttgagcatctggaagacggcgaggggggccacgttcagcttcagcaggtccaccaggatcctgtttcaagaaagcgtgcaattttc

SEQ ID NO: 869586 - DNA, 98 bp, Homo sapiens
tgccggccggcccggaccctggacaccatccagctggctttcaagtgcaccagagtggaatcacatagacccccggcggaaggaagaactggacaaga

SEQ ID NO: 869587 - DNA, 99 bp, Homo sapiens
cccgacgcagcccagcggcacggagaaagtttccagaaccacaagacagacccaagagggctgtgttggcaaaacaaatggcagagtggagctggccag

SEQ ID NO: 869588 - DNA, 99 bp, Homo sapiens
gttcttccatagtggatgttttggccactggacatcagaaccacattttgggtttgaagaatcttctacatgggctgttgataatcaggtgtatgtggc

SEQ ID NO: 869589 - DNA, 99 bp, Homo sapiens
ctacattcggcccggccatggcagcggcgcccctgaaagtgtgcatcgtgggctcggggaactggtcttgatgcagaactttattatgtgagaaatgac

SEQ ID NO: 869590 - DNA, 99 bp, Homo sapiens
acatcctaactcgatttgctgtatatttgcgtgctctcgtgagaaatctttttaatgaaggaaatgacgtttatcgggaacatgattggaacaactcga

SEQ ID NO: 869591 - DNA, 99 bp, Homo sapiens
agaaatctgaagaatgagacaaagcctttaaatggttgtcacacttgattgtagattagaaatgatatttgccaaatttgatgaagtgcaaagttcagg

SEQ ID NO: 869592 - DNA, 99 bp, Homo sapiens
ggttatctgcgaacacagtagtggaagatgtaaagcaatatttcgagcagtttggcaagctgaaactagaggaccgttctgtggtgccccgagatgtgg

SEQ ID NO: 869593 - DNA, 99 bp, Homo sapiens
gtgtgaaccactgcgcccggccagaagtttttcttgtgagttgaggtgaacatctgaatcccctcggggaactgagctgccccagagcacatcagctat

SEQ ID NO: 869594 - DNA, 109 bp, Homo sapiens
gcagattcccctctacatagacgacaccctgacgattttatcatgtgggcaacctgctgcaactggttctgcctggatggacagcctgaggaggtcccaccaccccagg

SEQ ID NO: 869595 - DNA, 99 bp, Homo sapiens
ctgtctggtcatcatctattgttggaaaaaatcttctgtggattaactcagtggctcaacaggctgaagggaggccttgctgtctctaaccctgatctg

SEQ ID NO: 869596 - DNA, 99 bp, Homo sapiens
tttcaagctcaaatctttcactggatgttttgaggggtaatgatgagactattggatttgaggatattcttaatggctggagtgcagtggcgcgatctc

SEQ ID NO: 869597 - DNA, 98 bp, Homo sapiens
agaaactggacatcaaactggacagcgaggacaaggacaaagaaggcaaacccctgctgaagatcccaatatcctgagcctgagtggtaaggtgctgc

SEQ ID NO: 869598 - DNA, 98 bp, Homo sapiens
tgaaaattgtcactggatttaatgggtatccgttacagcactgatgtgagtgtagatgaagtaaaagctttggcttctctgatgacatacaagtgtgc

SEQ ID NO: 869599 - DNA, 99 bp, Homo sapiens
aaatacaaagtaacaaaggatcatcatataaactcctggtagaacaagcaaaactaaagcaggccacttcaaaggtccctcgtctgagctggctcactc

SEQ ID NO: 869600 - DNA, 99 bp, Homo sapiens
tgtctgaaagagcagcagaaacgctactttccagaaattgcttcccaagaagaaggtgctactatacagtggatgtcatctgtagaagcaaagattgaa

SEQ ID NO: 869601 - DNA, 98 bp, Homo sapiens
tgtgggtgtcagtggcgcaccatctgaaaacaacatcatgcagtggaatgcagttatatttgggcagcagtgaggatgccagagttcatgggtttcta

SEQ ID NO: 869602 - DNA, 99 bp, Homo sapiens
tctccattaaacccattaacatgcaggatcctcatctgcttcacaatggtgcttttaccagattctccagcacctgggggtttggcaatcatctcatgt

SEQ ID NO: 869603 - DNA, 99 bp, Homo sapiens
gcatggcactctggcgggcataccagcgggccctggccgctcacccgtggaaagtacaggtcctgacagctggccctcgggaccaaggatcacgtcatg

SEQ ID NO: 869604 - DNA, 98 bp, Homo sapiens
agctttacctcgctgaccctatgaaggtgaccaagaatatggcccaggtgaccaaagccctggacaaggccctgagcaccatggacctgcagaaggtc

SEQ ID NO: 869605 - DNA, 99 bp, Homo sapiens
ggagctcaagatgcagctggccaagaaagaggaggagctccaggccgccctggccagacgctacgtgaccaaacccaactcagatgatgaggacgatgg

SEQ ID NO: 869606 - DNA, 99 bp, Homo sapiens
agaagaaagaagctcatcagatccccgcaataatgtctttaacaagtttctgagtggcagccattcgaggctttgggatttccagtttttcacactcat

SEQ ID NO: 869607 - DNA, 99 bp, Homo sapiens
aaacaaccaggtcagcttcggacaaggttagcagagacgaagaatgctgttcaagctttgattgataagcaccaaagaataccaggaaacattatgagt

SEQ ID NO: 869608 - DNA, 98 bp, Homo sapiens
agttatacctgaaggggaatgctgcccggtctgctccgctactgacgaagttatacggaagcgtctcctcattgatggagatggtgctggagatgatc

SEQ ID NO: 869609 - DNA, 75 bp, Homo sapiens
ggccgacaacagcctggcgtccgccacgacggttgatgatgaagcgccggccgtgtaaatgaagatcgggtgagg

SEQ ID NO: 869610 - DNA, 99 bp, Homo sapiens
tgggtcagaccctttgggttggcttcgtggctccacgacttactctctacccttggcaggtcctgggaactccaacaagggagcaaatcagagaaatga

SEQ ID NO: 869611 - DNA, 99 bp, Homo sapiens
agcccagcagccaaatcaaaattctcttcaagggaagattccaaattcattccaaaagcaactcccattagtccaaagagcgaaagagagaaggttccc

SEQ ID NO: 869612 - DNA, 98 bp, Homo sapiens
catggtcctcactactctcattctcatattagtgtgtgcttggcactggagaaacagaccctgtgccatggtggcccctgacattgagctaatctgtg

SEQ ID NO: 869613 - DNA, 99 bp, Homo sapiens
gcctcccaaagtgttgggattacagcggctatgtgactacgtttgtgacctcctcttagaagagtcaaatgttcagccagtatcaacaccagtaacagt

SEQ ID NO: 869614 - DNA, 98 bp, Homo sapiens
caacgccccggtggagaagctgagactgattcttgctattccaaatcctcttccacgttgacagcccttcagatatttcaacactcctctcagcatcc

SEQ ID NO: 869615 - DNA, 99 bp, Homo sapiens
gttgatcctgctgttctggaaagtcgtggatctggccaacaagaagggacgtgcaatttttgccagtggcagtccttttgatccagtcactcttccaaa

SEQ ID NO: 869616 - DNA, 102 bp, Homo sapiens
tgtctctccaaatggctgctctctggcgttcctcacactccccctgaagttcatctcttcagggggagtgtgaggaacgccagagagcagccatttggagag

SEQ ID NO: 869617 - DNA, 99 bp, Homo sapiens
cacagtgactcacttattcaagataactgaaaacattggttgtgtgatgaccggaatgacagctgcctgctgaagatgaagtcttactacagaaattaa

SEQ ID NO: 869618 - DNA, 99 bp, Homo sapiens
cctggcaggacgtgaaggggaagaggcccaccctggagtaaccctcactggagaatccagaggctcagctggaagctcagaaagccacgcaggacttcc

SEQ ID NO: 869619 - DNA, 99 bp, Homo sapiens
actacccatgctcactcgtgggcaactggaacacgtggtatggggagcaggaccaggcagcaccccgagcagaaggcagaccggtattttgtgttatac

SEQ ID NO: 869620 - DNA, 98 bp, Homo sapiens
acagggatatccaccccagcagcagcagtacccagggcagcaaggttacccaggacagcagcagggctacgaccccaactgtaaacttgaagacaaga

SEQ ID NO: 869621 - DNA, 99 bp, Homo sapiens
tgacttgataagaggcgcaaaagaaaagaatctcaaagtgaaaggaccagttcgaatgcctaccaagggtgcctgcggcagttgctggactttctccac

SEQ ID NO: 869622 - DNA, 98 bp, Homo sapiens
cgagagtggcagaggagctggcggagagcggcctgcgggcgatcgggccgaggactgatcctttgaaatactccagccatgactaaaagagaagcaga

SEQ ID NO: 869623 - DNA, 99 bp, Homo sapiens
aagaaggccctggacacagcaatatctctgggctttcacagattgggagagtcatattaataccaaatggtcagcacctcagcagaattttttgcaggg

SEQ ID NO: 869624 - DNA, 99 bp, Homo sapiens
cttcacctttgatcccctgacctgcattaccttgaacaagaggaaagtatggggaaggagccaagcaggagacgttcacctttgccttaactttggtct

SEQ ID NO: 869625 - DNA, 99 bp, Homo sapiens
gaaaacaaaagctgctacttatggaagatacaaaggaatggcttattcagaagagcataaaggtatgccctgtggtttcatccgccagaattccggcaa

SEQ ID NO: 869626 - DNA, 98 bp, Homo sapiens
gctgaccgaggggcggacgcgcggcggggcagaccgctggggactgcgggcggcgctgtgtccgtcgccatgacagccagtttcaagcgcccggtagt

SEQ ID NO: 869627 - DNA, 99 bp, Homo sapiens
ttctgtctctcgatctggatataattctcctaaattggtcggtttgtcgatgagcgaggccacaacgatgagtctactaattgactttccaagtctggc

SEQ ID NO: 869628 - DNA, 99 bp, Homo sapiens
gtcactttgtggggaaaagtggtagcaatcatacctcttcttgaagggctgcagagggggtagatcctgtttgaatctgtagtcccagctactcaggag

SEQ ID NO: 869629 - DNA, 99 bp, Homo sapiens
acagcttcgctaatcccatcctcagatctgtgcacaatgtgaagacggagccgtcccctcctcagtgtaccttaaccgctcgacctccgcatcgtccac

SEQ ID NO: 869630 - DNA, 99 bp, Homo sapiens
gaaacccaattattagacggaatcatattcatcatggacgtgatgttggtgtgttcacatttgatcatggcatggttcctggtacagttcagacaggac

SEQ ID NO: 869631 - DNA, 98 bp, Homo sapiens
ctcgaagaacagctgtggaaagaagttgcaaaacactgggtctcctctgagcctccggcctccataagacccaaaacagatgacacctcttcccagtc

SEQ ID NO: 869632 - DNA, 99 bp, Homo sapiens
atgtccttgatgttctcatcaagcccacgagtttagcaggactctggactgtcttcacactaggtggtgtgggcagcaaagcggctgcctctccagagc

SEQ ID NO: 869633 - DNA, 98 bp, Homo sapiens
cagtgccattatccacaccagcatgggagacattcacaccaaactttttcctgttgaccttatgtttgatcatcggccaaggtcctggcgagaactgc

SEQ ID NO: 869634 - DNA, 99 bp, Homo sapiens
ggttccccttcctcctgggagctggcctcctgctcatcccggctgttctgattggtgagaaagatcagtctaaagaaaaggagaagaaagtgaaaaaaa

SEQ ID NO: 869635 - DNA, 99 bp, Homo sapiens
agacagtgtgaaaagtgaaattgttccactgttcactagtctagcttcagatgaacaggtcggtgagctggtaaaggttacgaagattaatgtgagtgg

SEQ ID NO: 869636 - DNA, 98 bp, Homo sapiens
tagcccagaggatcggaatgacagatccaacttcaggactgattgatcatgacttctataaaggagcaggcagcaattagcaggctcttaagtttttt

SEQ ID NO: 869637 - DNA, 99 bp, Homo sapiens
tgagctgttgagttagagccaacatgagtgagaccacctcctccaccctgaagggtgccatccagctgggcatcggctacaccgtgggccacctgagct

SEQ ID NO: 869638 - DNA, 98 bp, Homo sapiens
aaaagacaaaggtagaaaggatggtggaggactacctggcaagtggttatcagggcaattgaaggaacagactaaaaatcgtgtcctggaaggaaact

SEQ ID NO: 869639 - DNA, 99 bp, Homo sapiens
aggttccatgatgtgctattctatacttggaccgtttttccccaaagagttatccttaaaaagaagaggaagcaaagatttgccaaaatctgaaaaaaa

SEQ ID NO: 869640 - DNA, 99 bp, Homo sapiens
tttggcgagaaggctggcgttagtgaagcgcgcccggcgtcacggttgtatcagagtaagatggacggtagctttgattgtgattgtggtgagctggag

SEQ ID NO: 869641 - DNA, 98 bp, Homo sapiens
aaaaggcatcttgtccctacatcttctcttctgactttggctacatctcataatgccaagtctcaaccaagtgttcagttttcaaaagccttaattaa

SEQ ID NO: 869642 - DNA, 99 bp, Homo sapiens
acacaaacagaaacacaagaagcagccagaaccatcacctgcattggttccatccttgactgttactacagaaaaaacactacccgaagcagtccttca

SEQ ID NO: 869643 - DNA, 99 bp, Homo sapiens
agccttgaaagggaccatggtgcggcctgtgagctttgcttgtgccatctgcccccatcgaccggtactggacaccctggccatgctgactgcccaccg

SEQ ID NO: 869644 - DNA, 99 bp, Homo sapiens
gtgaacacctcagccccccgccagctccgaacctttgaccattcccggagtaataaatccagttggagcagcagtgatgagaagaggggatcgacacgt

SEQ ID NO: 869645 - DNA, 99 bp, Homo sapiens
ctgctgtggtcagcacccctgcagatcatcctggcgatctacttcctctggcagtctattatcctcccagtccacaacgctgaaccgtggctggacgaa

SEQ ID NO: 869646 - DNA, 98 bp, Homo sapiens
ggggaagaaagtcatcgccatcgccactggctccctgcactgtgtgtgctgcacagaggatgattcaggaggaatcagatatgtggaaaataagagaa

SEQ ID NO: 869647 - DNA, 99 bp, Homo sapiens
tgacggccaatgaaacccccaagatgggcatctattacattccagcaggtaaagtgaggaaacatgcaactgaacaggaaaaaactgaagagggattag

SEQ ID NO: 869648 - DNA, 98 bp, Homo sapiens
ggcgggccagggccgcactccggagactcgcggttgctacgcgcaccatggctggagaatgaagaagcagtacgacgtctcatctgggaaaagaatct

SEQ ID NO: 869649 - DNA, 99 bp, Homo sapiens
agctttcagactacgtggggaagaatgaaaaaaccaaaattatcgccaagattcagcaacggatttcggcctggcccgggcctatggtgtcccagtaaa

SEQ ID NO: 869650 - DNA, 99 bp, Homo sapiens
ccggcccgggaccggcggcgcgcggcggccgaggccaggtcaaaatgcagatcttcgtgaaaacccttaccggcaagaccatcacccttgaggtggagc

SEQ ID NO: 869651 - DNA, 99 bp, Homo sapiens
caaagtcacagatgctatagtctggtatcaaaagaaggctgacgagatgcaggatgtgatgcattttaactacactgcatggcctgatcatggtgtgcc

SEQ ID NO: 869652 - DNA, 99 bp, Homo sapiens
gaagggacgtgagcccagccgaggtaccgctgaagaggaatcaattttgatgaggtttatataactttccaagacaaggaagttgtgcaaagcctcaca

SEQ ID NO: 869653 - DNA, 99 bp, Homo sapiens
atctggcagagctctgcatagaagtcttacagcagaatgaagagcatcatgcagaggttaattggaaggcctgccgatggtcttcatcaggggtgattc

SEQ ID NO: 869654 - DNA, 99 bp, Homo sapiens
agctctgcggctcgggccctgagtggatatgctgctgatgaaatcactcactgcatacggcctcaggacatcaaggagcgccgagcagtcatcatcctc

SEQ ID NO: 869655 - DNA, 99 bp, Homo sapiens
ctggaatgggagagagagcgcagaatatcaagtgctggtcccagtagggatggcacaatcagcgaggacaccatccgagcctctctcatctctgcggtc

SEQ ID NO: 869656 - DNA, 99 bp, Homo sapiens
gggcctgcaccatgagcgtcccggccttcatcgacatcagtgaagaagatcagaattatatccagatcgagagacagaagattctgaaagggttcaatg

SEQ ID NO: 869657 - DNA, 99 bp, Homo sapiens
cctggaccctgcccagcagaatttgtatagagatgtgatgttggagaactacagaaacctggtctccctagatctgacaggatggcatctgatgacttt

SEQ ID NO: 869658 - DNA, 99 bp, Homo sapiens
catcaccctgcacgaggtctatgagaacaagacggacgtcatcctgatcttggaactgtgtttctgggctacgtgaggcaaaaataaaaacagagaaac

SEQ ID NO: 869659 - DNA, 99 bp, Homo sapiens
ggtttccctcggcgtgctactgtgcgctcgatccagcaccatggggaagcgggacaatcgggtgatccagtttgctgaccagaagcaagaattcaacaa

SEQ ID NO: 869660 - DNA, 99 bp, Homo sapiens
atttgaagtaacatggaattcaagagaggagaattctcaccaaatgttcccaaatccttatcctcagctgtgaaggtaaaaattggaacatcactggaa

SEQ ID NO: 869661 - DNA, 98 bp, Homo sapiens
acccacggagcctccggggctggacatggatttgattgacatactttggaggcaagatatagatcttggagtaagtcgagaagtatttgacttcagtc

SEQ ID NO: 869662 - DNA, 99 bp, Homo sapiens
gctgtgtgatgccaccagatttgactgcatttgctaaacaatttgacatacagctgttgactcacaatgatccaaaaggctggagtgcagtagcatgat

SEQ ID NO: 869663 - DNA, 99 bp, Homo sapiens
tttcgaaaaatgtcacccttggacaagtttttgaatcagagccgacaggcacttgaattgaaaatggaaaaccctactgctggtggtgctgcggtgatg

SEQ ID NO: 869664 - DNA, 98 bp, Homo sapiens
ttcccagaaagtccaagctcgtgctgcatatctatgtgagactgaattttcctcttagacttcagctaaaactgtgtattgcatcaggctgagagcag

SEQ ID NO: 869665 - DNA, 99 bp, Homo sapiens
caaaagccaagaggaggacagttcgctacacagcaatgcatcgaggtactgaacgacacctgggtctccttcccttcctggtctgaggactccacgttc

SEQ ID NO: 869666 - DNA, 99 bp, Homo sapiens
gaaacaagcagaagaacgcttagaaagagatcacatctttcgacttgaaaaagtttttcgttggaatatacgttgcacatttatggcgattctgagtgt

SEQ ID NO: 869667 - DNA, 99 bp, Homo sapiens
ctctctgtgtggctgtaacttacgtgtactttaccaacgagctgaagcagaatatgagttggaagtaaagagggtgcaagacattctttcgggaataga

SEQ ID NO: 869668 - DNA, 99 bp, Homo sapiens
ttgactccaattcagaggttcagtaagcctgatactgtgattgcaaatggagaagatacgacatcttctgaagaggaaaaggaagatcgtaacacaaat

SEQ ID NO: 869669 - DNA, 99 bp, Homo sapiens
tgggttgcttcctctgaacttacttcgcactagctgtccaggggatttctggcctcccactgaagaaacaaatagataccaggaagaagctaagtaaag

SEQ ID NO: 869670 - DNA, 99 bp, Homo sapiens
cctttgtcgaccggtgcaatcttcaaaattcactttgaaggaatgaaaattagaagatggctagctgggcgtgatggctcccagctactcaggaggctg

SEQ ID NO: 869671 - DNA, 99 bp, Homo sapiens
cctgctgatgtcagtgttatatcctccaggaatactggccaggccctgtctcagcgggaccctcctcacaacaacttcttcttcttcgatggcatgaag

SEQ ID NO: 869672 - DNA, 99 bp, Homo sapiens
ctttgttccaacgttagtgtggacgatgctcttgcaggatgcctttccttttgggtcttagacaggttgggtggcccagaccccttggactatgttagc

SEQ ID NO: 869673 - DNA, 99 bp, Homo sapiens
aatgagttcctgacctcggtggtggagctcatcggcgccgccaaggccctgctggcgtggctggaccgtgacatatttaggtcaaagaagctgctgcca

SEQ ID NO: 869674 - DNA, 98 bp, Homo sapiens
ggctgaaccctccttctcaatcttggaacagcacccccttctttaagaaacaggtgagaatgaccactttaactcaccgggcccgtcgcactgaaata

SEQ ID NO: 869675 - DNA, 100 bp, Homo sapiens
atcgccatcagtttgttggtgggaatcctcatcttcctgctgcagagcagcacggccagcagcaggaagatgaggattcccaccaacaaactgatggcga

SEQ ID NO: 869676 - DNA, 99 bp, Homo sapiens
gccgaaagagcactggactccggaagccgtggggtggggctggtgaatgcctcggccttgttcctgttactgcttctcaaccttgtgctcatcgggcgg

SEQ ID NO: 869677 - DNA, 99 bp, Homo sapiens
gcgggagctgtatggccgccgtcgcaagaaacttaattcagtgcacaaatgagatgaatgtgaacatcccacagttggcagacagtttatttgaaagaa

SEQ ID NO: 869678 - DNA, 99 bp, Homo sapiens
gttgcagggtcacagaaacatcggtatatttgcttacttaaactaccatgttcctcgaacgagacgagaaatcctggagaccctaatcaaaggccttca

SEQ ID NO: 869679 - DNA, 99 bp, Homo sapiens
gtggatccaggtgaagggggcagaggaggctctgtcggtggtgagcgacgaccagtccctctttgactcagcgtacggagcggcagcccatctccccaa

SEQ ID NO: 869680 - DNA, 102 bp, Homo sapiens
gctctcatgttcactgagccatcctgcatcccaaagtagactctctcagccatgttgatgaataggcctgtgtccaccacacagccaactgatcttcaacaa

SEQ ID NO: 869681 - DNA, 99 bp, Homo sapiens
aagacctaaaaaaccccaacaacagctcccttaggttgaaaggattgttgacaaaaggaaaaataaaaaagggaagacagagtatttggttcggtggaa

SEQ ID NO: 869682 - DNA, 99 bp, Homo sapiens
acccagccctgtctgttaagagtgagtaaaatctctttgtggcttggaagcctctcaggttcctgcagaggaagctctttctggggctggtgagccctg

SEQ ID NO: 869683 - DNA, 98 bp, Homo sapiens
acacgaaaaccacccagattggatgcctgctgcgcttggagccgaacctgcaagcccaggtacatccagacactgaaggaccacaggccccggatggt

SEQ ID NO: 869684 - DNA, 99 bp, Homo sapiens
cagtgatgatgtgcctgtagatatcatggacctggctctcagtgcccacataaaaatactagattacagttgctcccagtcaaactcagcgaagtcccc

SEQ ID NO: 869685 - DNA, 99 bp, Homo sapiens
gggatcccaaatcggaagtgaattcggattgtttgctgtgtcaaatcaacagtgccttgacatctttccacactgctttggaacttgcagtagaccaga

SEQ ID NO: 869686 - DNA, 99 bp, Homo sapiens
atttctatggtcctcctcacctatggccgctggcagaattgcctgaggttctgtccattgaggaggaagtggaagaaacagagtcttgggcgaaacctc

SEQ ID NO: 869687 - DNA, 99 bp, Homo sapiens
gttcttcgtcactgaagaaatcattcccctcgggaatcaggagtgacctggagcactgtgtgaacagcagagaatttcaaaggaccttgctaatatctg

SEQ ID NO: 869688 - DNA, 99 bp, Homo sapiens
agttggagctagtgtttggcccaaaaaagctcttctggagctggagatgaactcggacctcaaggctcagctcagggagctgaatattacggcagctaa

SEQ ID NO: 869689 - DNA, 99 bp, Homo sapiens
gagcagcgagcacgcgtttcccgcaacccgataccatcggacaggatttctccgcctcagcccaacggggaggttaaacccatccagagtaatggctgc

SEQ ID NO: 869690 - DNA, 98 bp, Homo sapiens
taatcatctcaatgagattggtttcattccagattggaagcatcagttcacagcagtaatgcacactgtacagataagacaattgaagctgctgaagc

SEQ ID NO: 869691 - DNA, 99 bp, Homo sapiens
agaggactttttatcacccttgattcactccatgtaagcagggaccttctggtgtcatcagatggatgactttgggcctgccaagaacctcatgaccat

SEQ ID NO: 869692 - DNA, 99 bp, Homo sapiens
ttcagttctttggaattccattcttttccttattcttctgatgtggatccagacgacttcgcagaggaggaggaggtgcaatccttcggttacaagcgg

SEQ ID NO: 869693 - DNA, 99 bp, Homo sapiens
cctcgcgtccggagtccccgtggccagagaaaatattctctttggaatgggaaatcctctgcttgacatctctgctgtagtggacaaagatttccttga

SEQ ID NO: 869694 - DNA, 98 bp, Homo sapiens
ccgggcagcttggagaaggcgcaatactctccagctccaccgttaccgctaatataaaatcggttggtgcgtcttgtgtgtgtgtttctccaatcctt

SEQ ID NO: 869695 - DNA, 100 bp, Homo sapiens
catcaaatttattctcattatcaggaggcaaactcgactcttcttgcttaaaaatgggcaatgcaaggacatcattatcaaagctatcactatttttgat

SEQ ID NO: 869696 - DNA, 99 bp, Homo sapiens
aactccactacagctgttcccagcttggttgcacttgagaaaattaatgtggcagagtttgccagatccggcccggtgcctgggttccaggaggacacg

SEQ ID NO: 869697 - DNA, 99 bp, Homo sapiens
tctacggcctggacttctatgtgttgtcgagatgtccacagaaggaggatttggtggtactagcagcagtgatgcccagcaaagcctacagtcgttctg

SEQ ID NO: 869698 - DNA, 99 bp, Homo sapiens
gggatcgtgaccgagaccgtgaccgagagcgtgaccgagagcgcgaatatcgtcatcgttagaagggccgttgctccagggagaactgcaaatatcttc

SEQ ID NO: 869699 - DNA, 99 bp, Homo sapiens
caagaaatcaaataggttgactcatcctcgtcttcttcctgggcttttattgagacaaattgccctaataaaacaataagaatgaggagaggtcttgct

SEQ ID NO: 869700 - DNA, 99 bp, Homo sapiens
gggtgacagagggagactccatctgcagttctccttaaagcggcactttccctccaggaagaacgggcacggcttcagagacttgtgagtggggtacag

SEQ ID NO: 869701 - DNA, 99 bp, Homo sapiens
ggagatcgcccgccatggctttacttactgcggccgcccggctcttgggaaccaagggcttcgtgggacacatatgcaacatgcctatgatttttacaa

SEQ ID NO: 869702 - DNA, 99 bp, Homo sapiens
agttcccatgctgttcatgaaatgaaaagtttaaaacaagaaaaagcaccagtttcaaaaacttacaagaaccctggggttattagtaaaacgattgga

SEQ ID NO: 869703 - DNA, 99 bp, Homo sapiens
atgtttatcaaaaatgtagggctttgacttctaattgtgaaaattataacacagtatctcctgtatgggcttattttgccaaagaaaacacagcagttg

SEQ ID NO: 869704 - DNA, 99 bp, Homo sapiens
gtggtttttcggatcatgtctggtggctccgcggattataacaggatcccattgaagataccacgctgcatgtgtccttagtagtcatgtctccttagg

SEQ ID NO: 869705 - DNA, 99 bp, Homo sapiens
gggtggtagaggaggagccgcgggctcgactggcagggtacttccatagacaggaacattctggatgctctgatgctgaacactaccagaatcggccat

SEQ ID NO: 869706 - DNA, 99 bp, Homo sapiens
ccaacatggtgaaatcccgtctctactttaagatggaaagggaaagcgattttgtcttcaacaagtgggccaccagatgaaccaaattagagaaattcg

SEQ ID NO: 869707 - DNA, 99 bp, Homo sapiens
cagttccttgatgagctcatggagatgtggaaatggaggcccagaaagatgaaatcatctgccccagctgtaataggactgcccatccactgagacata

SEQ ID NO: 869708 - DNA, 98 bp, Homo sapiens
cccgccatgctgtctctagactttttggacgatgtgcggcggatgaacaagcggcagagcttaatgattaagagagagttggcaaaagattctgaatt

SEQ ID NO: 869709 - DNA, 99 bp, Homo sapiens
gggagccgggccctcccctcaggaacgtgtcccggggccgacccggcccgtagtgtggaagcagcttcaggtgtgcaactgaggaacatggctcaagaa

SEQ ID NO: 869710 - DNA, 99 bp, Homo sapiens
atagaagcatttgaaatgatggagaaggatgagctatgacttgctaaacaatctgttggtgacttaagagattaaaattaatttggttgctgttggttc

SEQ ID NO: 869711 - DNA, 99 bp, Homo sapiens
tgatgatgaatttgatgaagaaagtgaggaagggaaagcagcaatttcacaactcaggatacgtaggtaacctttccagagatgtgacagaagtcctta

SEQ ID NO: 869712 - DNA, 99 bp, Homo sapiens
ccaggaccctgttccatccaaactcttgccctttgagggaccagactcattctgatgaaggaaagagcgtccctgtgcagctgcgtgtccttcagttct

SEQ ID NO: 869713 - DNA, 99 bp, Homo sapiens
ggggtgtgaagctccggtgctggtgcggcgggggactgcggggccagcctcagatcaacaaactccatttatgtaaacccctaattagagcaattgaca

SEQ ID NO: 869714 - DNA, 99 bp, Homo sapiens
agaagctgagctggtgaagggaagactccaggccatcacatattgcctaagtgtaatcttgaacatgggcggtgctgtgagtgctggtgaagacaatga

SEQ ID NO: 869715 - DNA, 99 bp, Homo sapiens
cgacattcctcaggtgtacatgggtttgtttgctttcacttagtccactcataaacatggcccttggaagagataatcctctgtgttctggtcagggtt

SEQ ID NO: 869716 - DNA, 100 bp, Homo sapiens
tttaactctctgccccgggcatttccagctcttcactttttggcactggcatccagtgccaaaaagtgaagagctggaaatgcccggggcagagagttaa

SEQ ID NO: 869717 - DNA, 99 bp, Homo sapiens
ccgaggagaaaacagcaggcacccaagcgggcggcagaacaaattgcctccctgagtcggaccagctgcccgtggatcctacgctgcagtcacaccaga

SEQ ID NO: 869718 - DNA, 99 bp, Homo sapiens
tgaagattattataagcagcggttaagattgtaaaccatggctgtgtggatacaagctcagcagctccaaggagaagcccttcatcagatgcaagcgtt

SEQ ID NO: 869719 - DNA, 99 bp, Homo sapiens
ggcgaagcttgatttggctgggaggagtgcattttccacttgtaggcgtcttgaaaactttcatacttctgagaagatgatgttgtcattgcactcatc

SEQ ID NO: 869720 - DNA, 99 bp, Homo sapiens
cacatatgtccaggaggagtctccggaaggtttgggccccatggtatccctgtgacagtatttcccaaaagggaatataaggataaaccagaagccatg

SEQ ID NO: 869721 - DNA, 99 bp, Homo sapiens
cggcatctctcatcactgtgagaatgttttctgcattctccatatcactcaaagaattattctctgctttttgtctgccaagttcactttcggtatcca

SEQ ID NO: 869722 - DNA, 99 bp, Homo sapiens
gtttttctcagaagagaattccacaaggtatagagatgcagccttatattcctatggtgttgcaccagcttgtagaaatcattaacagacccaacacac

SEQ ID NO: 869723 - DNA, 98 bp, Homo sapiens
gctgcgagccgggaagacgcggggaagaggaggcggaaaaggacgcaaagttctccggcgaggcaatgaatcgctccctggctaatgtgattcttgga

SEQ ID NO: 869724 - DNA, 99 bp, Homo sapiens
cctcatcaatgttctcgatctgtgtgcctgccttccgcaggtgggagttgcaccatgccgtgaaggtactttcggacagagtcttcaaagccagttata

SEQ ID NO: 869725 - DNA, 99 bp, Homo sapiens
ttctcaggactcattattttaacatttgggagaaacacagccagaagatggggtttcactcttgttgcccaggctggagtgcaatggtgcaatctcggc

SEQ ID NO: 869726 - DNA, 103 bp, Homo sapiens
tgaggcctccccagccatgtggaactagtttcggttccaccaagttgcccaggctggtcttgaactcctgggcttaagtgatcttcctgtcttggcctcctga

SEQ ID NO: 869727 - DNA, 99 bp, Homo sapiens
attcctctcccctattgctggctctgcagggctctgatcaagcggatccaagccatgattcccaaggtcctaatcaaacaggaaattcaaaggaagagt

SEQ ID NO: 869728 - DNA, 99 bp, Homo sapiens
taacttcccatccagccaggagtctgcactcttcagtctttgcaggtgaagatggttctggtaaaacaaccctcatgactaaactacaaggagctgagc

SEQ ID NO: 869729 - DNA, 99 bp, Homo sapiens
gtgaaggtccggggcttgccctggtcttgctcggccgatgaagtgcagaggtttttttctggtcagaaatgtgaattccaggatgcctatgttctgttg

SEQ ID NO: 869730 - DNA, 99 bp, Homo sapiens
gccaaatttggtgcctggagtaggaggtcacagatgtgacattgatgtgtccactgaagccatgtatgctgcaaccagacgagaagggtttaatgatgt

SEQ ID NO: 869731 - DNA, 98 bp, Homo sapiens
tgcaattcataatggagctactgtactggctattggaaggaggagattctgaagataaggagaataactgaagtgaagtgatggactccgatttggag

SEQ ID NO: 869732 - DNA, 99 bp, Homo sapiens
gatccctgtcccagcccctggaaaggggcaggaacgacaaactcaaagtccaggtgctgattggacatatctcaaagaagatgaacaaacagactttcc

SEQ ID NO: 869733 - DNA, 99 bp, Homo sapiens
gttggaaattccatatatgactcttcaatgaaacttgtgagggaatttgagcccatgctacaagtgaaggatatgaacgagactgccaaacaagaagat

SEQ ID NO: 869734 - DNA, 99 bp, Homo sapiens
acaagatggtgcagaagaagaacgcggaccctatctgcagatgttctgaatacctctgagaatagagattgattattcaaccaggatacctaattcaag

SEQ ID NO: 869735 - DNA, 99 bp, Homo sapiens
tgtagccctgttccaggtctatcaagcagcccttctgggtcacccttgcatgctaggcaaacatcataaggagctacagaaattagtggatactttgcc

SEQ ID NO: 869736 - DNA, 99 bp, Homo sapiens
gcaaccactattttcttcctgcccctcgttgatgagagcattcgaagtgacctcagcagggcatccaggttgtatgtaaactggaggtttatgagagga

SEQ ID NO: 869737 - DNA, 98 bp, Homo sapiens
aattctggtgaaaaaggaagaattgacccttgaaggaatcaaacagttttatattaatgttgagagagaggtggcaggtgtcacagctttagcctgtg

SEQ ID NO: 869738 - DNA, 99 bp, Homo sapiens
ggcggacacggccaccgcctcagcgggagaggagtctccaccaggactgaccgctgccgcccagcacgtccaggccacggaaaggtatgatatatttga

SEQ ID NO: 869739 - DNA, 99 bp, Homo sapiens
cttaaggaacttacgcacttaaaataattgggcagaagagaagcagtgaaggagtgcagaggcatcacctgaaagatctttaaatggatgagatggcta

SEQ ID NO: 869740 - DNA, 98 bp, Homo sapiens
ctgactgtggagatggcggctcagaagataaacgaggggctggaacacctcgccaaagcagagaaatatgggtgaatttgtaagtgatgtcctgctag

SEQ ID NO: 869741 - DNA, 100 bp, Homo sapiens
ctcccgagcagctgggattacagggtctgggatccccaaggcctgggcaggcatagacttgaaggtacaaccccaggaacccctggtgctgaaggatgtg

SEQ ID NO: 869742 - DNA, 99 bp, Homo sapiens
ctcccaccaaggctgtacctctggaggagttctaggtttggatttggtcatctcaagaaggcatgtccatttgtcattgatatctatgcagaaaaatgc

SEQ ID NO: 869743 - DNA, 99 bp, Homo sapiens
ctgggcaacagagcaagacaccgactgcatgtccaaggtggcctgcaatttaggggggcagtagatggcatttgctgtggttcgagcagaagttaaggc

SEQ ID NO: 869744 - DNA, 150 bp, Homo sapiens
gtcggctttgggcggaactggctttgttgaccgggagaaacgagatgggggtgaagctggagatatttcggtccccattcccaggggatgatgaggaggaggtcttcgacagcatcgtcaacgacgaggttcgctacccccgcttcctgt

SEQ ID NO: 869745 - DNA, 98 bp, Homo sapiens
ggagatctggcctttattgctccaccaagggaacttcaaagtggcatccagcagctggagggtctgtcagccatggaggtggaagtcaggtgcagctg

SEQ ID NO: 869746 - DNA, 99 bp, Homo sapiens
actaatgtctataaagccagtatgatagcaatgatggcaggtggttggaggcaaagtaaagaagcccggtaaacgtggtcggaagccagccaaaattga

SEQ ID NO: 869747 - DNA, 99 bp, Homo sapiens
catgtaccaggaggagcttggagggcagcgggacttggtccaggccatgaagaggcgggtgttggaactgatccagctggagtgcagtggcgccatctc

SEQ ID NO: 869748 - DNA, 99 bp, Homo sapiens
ggcctcctccgcctcctcctctcccgcgggcaccgaggactccgctcctgcccagatcctggtgtatagcctggaagcaggacgccgcctcttgaagct

SEQ ID NO: 869749 - DNA, 99 bp, Homo sapiens
cgttgtgtttgtgaaacagagaaagataggcggccatggtccaaccttgaaggacctggtgttttctgcttcccccgatgccactatcaggatttggtc

SEQ ID NO: 869750 - DNA, 99 bp, Homo sapiens
ccgccaaccccttcgagcaagacgtgggctacaaactctggcacctgcaaaaaacaaggaaagtaaatgattgaagcagggcactgaaggtgggccttt

SEQ ID NO: 869751 - DNA, 98 bp, Homo sapiens
gaaaatagcaaacgatccagacggcagggagtgcatcaaaggtgtgaacacagctccatcaagtatgatggtgaaggatgaatatgtgcatgactttg

SEQ ID NO: 869752 - DNA, 99 bp, Homo sapiens
gttttcttcacatgatcctgactgatgtcttcatacatgtgctcaactgttaaaggctgccgttgttgtttctcctgggagcgctcttccgaggatatt

SEQ ID NO: 869753 - DNA, 99 bp, Homo sapiens
aggaagtactgcgttgaattgctcaacagcatcttggaagtccttagctaccaggatgcggctgctttgtaccgcctcagtggagactggaatccctta

SEQ ID NO: 869754 - DNA, 99 bp, Homo sapiens
tctatctgtggaacaacccgtgcagttcagatcttttgacagatgtccagaaggcttcttgggggaatattgtcaacatcgagacccctgtgagaagaa

SEQ ID NO: 869755 - DNA, 99 bp, Homo sapiens
gcgggagtcgtgtgaggttggctgtagcagcgcggaaggtgcatatgaagaggaagtactggctcccctttgaattggagatttactacattcagcatg

SEQ ID NO: 869756 - DNA, 99 bp, Homo sapiens
ggtagctggagccctgtcttccccacctcccttagcaggtgggagagtcggactctgaggagtgcgttcaaagtcttcacttggtacttggttatactg

SEQ ID NO: 869757 - DNA, 99 bp, Homo sapiens
gctggacctcagctacccccgcacccacgcggccctgctgaaagtggcgcaaatgggtatttgaagtataccatacaactgttttgaaaatccagcgtg

SEQ ID NO: 869758 - DNA, 99 bp, Homo sapiens
gctgagcaggtggccagagtgcaatgccctttcccggcgcctcttactaaaaaagtaccacaagagccaggccatctatctggagtcaaaggacaacca

SEQ ID NO: 869759 - DNA, 99 bp, Homo sapiens
atctgaagtacaaaatattttccaggagcttactccacgggaacagcctctagataatctgagttgttgaaaatacgaagcctgttactcgtgaacagt

SEQ ID NO: 869760 - DNA, 98 bp, Homo sapiens
gtgctgtctcccccagcgaatcggtggccatgatctctagggggctgttgtggttccgactataaacagtacgtgtttggcggctgggcctgggcctg

SEQ ID NO: 869761 - DNA, 99 bp, Homo sapiens
acggaaacagagcacccaagatgaagatgctgttagcctttgcagtctcgacataagtatcgaacggttggaagtaagcagccttgcccaaacatccag

SEQ ID NO: 869762 - DNA, 99 bp, Homo sapiens
tccagtgcctgcggttggccttcaacacacccaaggtcacagagcagctcatgaaactggatgaacaagggttgctgattgttggaggttcttttggtc

SEQ ID NO: 869763 - DNA, 98 bp, Homo sapiens
cagacgttagcgtgagtgatcactctcaatcccggatcctatagcaatggaactcagcgatgcaaatctgcaaacactaacagaatatttaaagaaaa

SEQ ID NO: 869764 - DNA, 75 bp, Homo sapiens
aaatacgaaggtttctggctgggcaagaagttatgaaatggaatggatggggatataatgattctaaattcatct

SEQ ID NO: 869765 - DNA, 99 bp, Homo sapiens
cgcaaactccttctgtaggctttgtaaaggattgatgagaaaagcagatggttaagagctctacaacttctgtgagatggagtctcaccctgtcgccca

SEQ ID NO: 869766 - DNA, 99 bp, Homo sapiens
ccatctttgctcctccctgcaactaactccattcttaattggcacagatgaggagagcatcctgactctgttgacatcccgaagtaatgctcagcgcca

SEQ ID NO: 869767 - DNA, 99 bp, Homo sapiens
tttgagccagacttattagatgaccctaattcagaaaagaagaagaagagggatactcccatgctgccaaagacaaacctacctatcttcaagctaaag

SEQ ID NO: 869768 - DNA, 99 bp, Homo sapiens
gtcctgaccacaatggggaggacaacttcgcccgggacttcatgcatgcagcagattggaataaatatgatgaccgattgatgaaagcagcagaaaggg

SEQ ID NO: 869769 - DNA, 99 bp, Homo sapiens
aagcagaagaacgcttagaaagagatcacatctttcgacttgaaaaagtggttcctaacttcctggcaacaaccacaattgtaattcgttcaaagagat

SEQ ID NO: 869770 - DNA, 99 bp, Homo sapiens
tgagagtcctttagtgcaacttctactccaccgctccttgcagagcatccaggttgcccatcgtctttactgaattctaagagtgcccagggtctggct

SEQ ID NO: 869771 - DNA, 99 bp, Homo sapiens
atacaataacttgccaatccacgggtcataggtaaaatagtacatggcaaaaccaacaatgctgtgtcctgtatcttcaataaattccacacatttctc

SEQ ID NO: 869772 - DNA, 98 bp, Homo sapiens
gcggatctcagaaggccagttcaaagtaatctatgccagcaattatgacaatgttagcagaccatgcagctcgtcagctgcttgatttcagccaaaaa

SEQ ID NO: 869773 - DNA, 99 bp, Homo sapiens
gcaggttcaaatggctggtataattataggcaccaggagtccaaaactacttacctggaagaccttccaccaccccctgagtatgaattggccccgtcc

SEQ ID NO: 869774 - DNA, 98 bp, Homo sapiens
accaatggcttccgtgctgtcctacgaaagcctggtccacgccgtggccggagccgtggtgacagagctgaatgaacctctctccaatgaagatcgaa

SEQ ID NO: 869775 - DNA, 100 bp, Homo sapiens
atcacagacaccgcagctgacgagctgcatggtctgctaacattgtcataattgctggcatagattacttgcatcatactcctgtaggcggtgtctgtga

SEQ ID NO: 869776 - DNA, 99 bp, Homo sapiens
atgagttctcggcacttcaaacctgagatcagggtgacctcactccgcttctctcccactggtaccgaggagaaggcattgtatatgggacactagagg

SEQ ID NO: 869777 - DNA, 99 bp, Homo sapiens
ccatagtaccacaaaaaccttggctagagttgttggtagtttgggtcataaatccattggcagagcacttaactacacaaagaactccttcattggttt

SEQ ID NO: 869778 - DNA, 99 bp, Homo sapiens
aggccgtcggggagacgctgtggtgtgactggggcaggaccatcaggtgtcatggagaaactccagctgggcccagagattctgcagcgggaaaatcca

SEQ ID NO: 869779 - DNA, 99 bp, Homo sapiens
ctgcgggttgcagcgcctacttgaacttactcagaccacctacttctctagcaggtaccccaagaagctagtgcagacttattcagtgtttccctacca

SEQ ID NO: 869780 - DNA, 99 bp, Homo sapiens
tctgcgaggcctgtgacagcaagttccacagcaccatgcattatgatgggcatgtccgcttcgaccttcccccacaagattcgtattttacatggagaa

SEQ ID NO: 869781 - DNA, 99 bp, Homo sapiens
agaaggcggcggctctctggtccgcagcggcaacagtaacgaaaaacagggctttgagacatttgggaaatgatgaagtgcacattgtttggtcagagc

SEQ ID NO: 869782 - DNA, 99 bp, Homo sapiens
tgaggaacccggcgaaaagccgcgggggcccgggcccggattactatctcaaaaactatgaggatgatattggtatcaacttgactgaccctatgttca

SEQ ID NO: 869783 - DNA, 99 bp, Homo sapiens
atgggacgtcatcacttgaggcagcaggttttgcacactagggaccaagaagccctcggggacactgctgagaaaagactgccgaagggaagaccagcg

SEQ ID NO: 869784 - DNA, 99 bp, Homo sapiens
cgagacccatgacgccactgcccttgcctcggtggttgccatggcaccagggacggtgactgtggttaagcaggaactgaaattaccattcactttttt

SEQ ID NO: 869785 - DNA, 99 bp, Homo sapiens
catgactctgggttgcttgaaggacagcaatgaatgctttagcactgatagcacctttaaactccatgttagtagcatcatccagaagttcctccttca

SEQ ID NO: 869786 - DNA, 98 bp, Homo sapiens
tggggccgtgtctcagtccacccaaggtctcctcggatcgcctggagaggcactcggacctggaactctaatgaatcattgattgaccagcactattt

SEQ ID NO: 869787 - DNA, 99 bp, Homo sapiens
cttcggcgtgcagtaccccacctcggtcaacatcaccctccgcctagcaatggctgccatccggaagaaactggtgattgttggtgatggagcctgtgg

SEQ ID NO: 869788 - DNA, 99 bp, Homo sapiens
gttgcaaagagcaaagaagaggcctgcaaagctgtacaagagatcatgcaggaacggaaaacagttcttccttcaaagcatgcagtacctgaagtaata

SEQ ID NO: 869789 - DNA, 99 bp, Homo sapiens
gatgtgcgatgtgcggaagggcacctccacccgggaagtcgagataacatgagtattgtactagtttgcttttcaaatgctcccaaggtctcagatgaa

SEQ ID NO: 869790 - DNA, 99 bp, Homo sapiens
ctggctgccttggtgacatacaaaggaagggaggtgaaagcccagcctccgtggttcttaatgcctcaggaggactattttcactaaagatggaaacac

SEQ ID NO: 869791 - DNA, 99 bp, Homo sapiens
gagctcggagctggacccccccatcgagtcgctgatccctgaagaccaaatagtcactgcttcaaccacctgtgagaaattagaaaaagccaggaatga

SEQ ID NO: 869792 - DNA, 99 bp, Homo sapiens
cggaggcggtggtggtggcggccgctggccagtattactttctatgaagacaaaaattttcaaggccgtcgctatgactgtgattgcgactgtgcagat

SEQ ID NO: 869793 - DNA, 104 bp, Homo sapiens
caatgaagctgcgacatttttcacccgatccatcttgaaattccgccccagcacaggaatttcaagatggatcgggtgaaaaatgtcgcagcttcattgacctg

SEQ ID NO: 869794 - DNA, 99 bp, Homo sapiens
gaattgtgggtaaattattatgtacgatggaatccacggatgagacctcaggtgccaggattgctgagtattcccagttgtatgaccagattgtattca

SEQ ID NO: 869795 - DNA, 98 bp, Homo sapiens
gatccaaattcaagtctaattcagcccttacgtcgtcctgactcatctgatgaccgttatgtaatgacaaaacatgccaccatttatccaactgaaga

SEQ ID NO: 869796 - DNA, 99 bp, Homo sapiens
aggacctcagggtagcactggtcctcagggaattcgaggccaaccggacacagcattgttggttttgccatgtactattttacctatgacccgtggatt

SEQ ID NO: 869797 - DNA, 99 bp, Homo sapiens
cagaaagaaggggttcctggtcatacaccagtactaccaaggacagcttttttcctgcaaggggtcctactgggcaatagacaccaatccgaaggaaga

SEQ ID NO: 869798 - DNA, 107 bp, Homo sapiens
agccgggggggttgtaggcagtctcaaacactattgactggattctattgagtctcttcattcctttaaaagccagctgtccgatcagagcccgggcgggcagtgcc

SEQ ID NO: 869799 - DNA, 98 bp, Homo sapiens
agcaaggagcgggtccgtcgcggagccggagggcgggaggaacatgacatcgcggaggtgcagctgacgagatcatgttgccttgtgaattttgtgag

SEQ ID NO: 869800 - DNA, 99 bp, Homo sapiens
cccggaaactccagcgtgtctccagccgtggattcaggtccgttcctctgaagaatgggtacagcgaggacatagagctggcttccctcctggttttct

SEQ ID NO: 869801 - DNA, 99 bp, Homo sapiens
ctctcttggcctttcccagtctcacctgtggctttcaggcttccccttctcttgacttcttccctataaacgtgcccagtgagcggggctgaaccgatt

SEQ ID NO: 869802 - DNA, 99 bp, Homo sapiens
tccactggacgctcatcagagggaagatctttttcctcaattggaaagatgaatgggagggctgattttcgagagccgaatgcagaggttccaagacca

SEQ ID NO: 869803 - DNA, 99 bp, Homo sapiens
caaaaggtcacaaattacattacccaatggtggaatattgtatacctaattatatccagatcgagagacagaagattctgaaagggttcaatgaaatga

SEQ ID NO: 869804 - DNA, 99 bp, Homo sapiens
cagaaagaagaaaacaagggaggagaagacaagctaaaaatgattcgggaatatcggcaaatggtgaagtgccagcattataagaaaaaacgaacggag

SEQ ID NO: 869805 - DNA, 99 bp, Homo sapiens
agaaagagaactctttgttaaagaagagaataagatttttggaagaaaaggaggtgttccctgtcttggctgcaaagcactgtatcatgcaggccaatg

SEQ ID NO: 869806 - DNA, 99 bp, Homo sapiens
aagagaagaattcagaagaaacaaaagtgccaccgaagagtgctgaagctgctgaaagatggcagaagaagtggtggtagtagccaaatttgattatgt

SEQ ID NO: 869807 - DNA, 99 bp, Homo sapiens
aaagattgcttccttgtatggtagcgataagtttgatttgccctatgggatgagaacatcagtggatgaggatcgcagtacggaacctgaccgattgca

SEQ ID NO: 869808 - DNA, 99 bp, Homo sapiens
tcctgagtagctgggactacagggaatggttgtatctcttgtcacatgaaatgttgaatccatactatggcctcttccagtattcaagagatgatattt

SEQ ID NO: 869809 - DNA, 99 bp, Homo sapiens
atgaagacaatctcaaattcatcctcatggactgcatgctccctggaattcccatgccaccaccacctttgggactcccccctctgcagcctcctccgc

SEQ ID NO: 869810 - DNA, 99 bp, Homo sapiens
tccgagtctccgccgctgcgggcccgctccgacgcggaagtctcagaccagtatccttcaggggttctcttactctgatttgcggaaatttggcatcgt

SEQ ID NO: 869811 - DNA, 99 bp, Homo sapiens
agtcgtgttctgatcactactgacttgttgagagagtggactccagagattgtcatttcaggacactttgatggtgtccaagacctagtctgggatcca

SEQ ID NO: 869812 - DNA, 99 bp, Homo sapiens
aagaagaaatccacagatttagttctaataagaagatctacttggacattattcacacatacatggaagtgcatgcaactgtttatggctccagcacaa

SEQ ID NO: 869813 - DNA, 99 bp, Homo sapiens
gaagaaagaagctctgtcacaatcaagatcaatggcattgcactggacaacaagtctctgaatgaatgtgaatctctgctgcgcagctgccaggactcc

SEQ ID NO: 869814 - DNA, 99 bp, Homo sapiens
agaaattagtaagcagcaccccaaagcaattacacccagaagattacctttgactcttgtcccaggtttctaagcatgaattgaggaacagaagaagca

SEQ ID NO: 869815 - DNA, 130 bp, Homo sapiens
tggtgttcctgacacaaacttcaggaaaggattttgcacttgtgcagaccgggcgagcagagtaagaagcagttctttggccaataaccacataaaagcactaccaagggatgtcttcagtgatttagac

SEQ ID NO: 869816 - DNA, 99 bp, Homo sapiens
agattaccaaagaatcggcgatgtcatgctgaagaacattcagggcatgaagtacaaggtgaatatcttaaccagacttgccgcagaattgaacaaatt

SEQ ID NO: 869817 - DNA, 98 bp, Homo sapiens
acttcacctcggcaacaattacttacctggcccaggaggatgggcccgttgtggatgcaagaagccagtgtctgcctcagggaaggagatggattggg

SEQ ID NO: 869818 - DNA, 99 bp, Homo sapiens
aaggctggatgggccccgaatgtaacagagctcctattcagacatatgtgcttggtgctaataaccaggaaacagtaaaatatttccaggatgctgatg

SEQ ID NO: 869819 - DNA, 98 bp, Homo sapiens
ttctatcagtgcattgctgaaaatgatgttggaaatgcacaagctggagcccaactgataatccttgaacatggtgtggatgaggtcaccattgtcaa

SEQ ID NO: 869820 - DNA, 98 bp, Homo sapiens
aggcagcagcggtaagaaatgccaaggagccgcagttgtcacggttcaggattcactccttctccagttgcacagccacacccttcagctggccttaa

SEQ ID NO: 869821 - DNA, 75 bp, Homo sapiens
cgccaccgctgcccccgccgccgccgcccccgccgccaggttggagcaaaacgtcccactcactggaggcacctg

SEQ ID NO: 869822 - DNA, 99 bp, Homo sapiens
ctgaaggagaaattttcaaggagccttatttggacattcacaaacttgttcaaagtggaataaaggatcctcctgactggcaggagattttgacttatt

SEQ ID NO: 869823 - DNA, 99 bp, Homo sapiens
gtagttgttgtaggcgagatgactgtatggattgtatcccacaaaccctggtgtgctgggcatttgtgtgagtgtggcgagtgacatgaagccgattag

SEQ ID NO: 869824 - DNA, 108 bp, Homo sapiens
gtcttgtggtagagatgatgatgtagcagaagatgtggaaactgatgtctagagaagctaagcaatttgcttacagtatgcacaaatctaccacaagactacacatca

SEQ ID NO: 869825 - DNA, 99 bp, Homo sapiens
gtgtgctccatttccaggaccttctgggcgtgctctgcatctagttcagctatacttttcctcaaagctgctgaaaaacaaggctggaaagtgttcagc

SEQ ID NO: 869826 - DNA, 105 bp, Homo sapiens
cagttggcagatcagcccctggaagcagatgaagggggacagccgcgccgctgctgcttttccgaagaggtgacttcgaccgagctctccagtggagaccagagt

SEQ ID NO: 869827 - DNA, 99 bp, Homo sapiens
caggacctggtatcggcccacagaccaagtcctccacagagggcgagccagggtggagaagagccagcccaggctctgaagattgctcaaaaaacttca

SEQ ID NO: 869828 - DNA, 99 bp, Homo sapiens
taatgatccaggacaaagaagttaccctggagtatgtatcaagcctggatttttggtactgcaaacgagtgtaaattttgataccaccattgccgcctt

SEQ ID NO: 869829 - DNA, 98 bp, Homo sapiens
tcagagccgggaagcccccattcactagaagcactgagagatgcggccccctcgcagggcaacgtgttggaccttccggagcttctcagaagacagag

SEQ ID NO: 869830 - DNA, 99 bp, Homo sapiens
aaacctccttatgctgatatacatccaatgaggcaggaaaaccgaaagcgccatggctctagtcgaagtgtagtagatatggatttagatgatacagat

SEQ ID NO: 869831 - DNA, 98 bp, Homo sapiens
gctgcagtgcctccacaagccatgaacagtgggtctccagcacctcagtctaatcaggctatcaagtactagctccaactgcctattatgatcagact

SEQ ID NO: 869832 - DNA, 116 bp, Homo sapiens
accatagaagcggatacttatttgcctgtggatgaaaccctgattcctacaggatctgttgacaatggagcaagtgaaagactttgctgctaatgtgtatgaagcttttagtaccc

SEQ ID NO: 869833 - DNA, 99 bp, Homo sapiens
gcgctacgccctggatgagatgtggccaatccgccatggtatagttgaagattgggacttaatggaaaggtttatggagcaagtgatctttaaatattt

SEQ ID NO: 869834 - DNA, 98 bp, Homo sapiens
gccttgtacccctatgatggcatccacccggacgacttgtctttcaagaaaggagagaagatgaaagtcctggaggattgtggacatcggatacccaa

SEQ ID NO: 869835 - DNA, 99 bp, Homo sapiens
ccgtccggagccagccaacgagcgggctgcagactcctgttccagaggtcattgttgatgtggaatccatggacatcttcccagtgggctggtgtgaag

SEQ ID NO: 869836 - DNA, 75 bp, Homo sapiens
cgagagcgcgaatatcgtcatcgttagaagactaccatgccggggatgaagcgagactgcgggggtgctgcggcc

SEQ ID NO: 869837 - DNA, 99 bp, Homo sapiens
cccgcgagtcgcatctgctcaacgacgaggacctgacgcaggattgtgagggtgaaactcccattcacaaggcagctcgctctgggagcctagaatgca

SEQ ID NO: 869838 - DNA, 99 bp, Homo sapiens
ccaagcctgcaactgcagagacgagagatctttctgctgtctatactcttggaaagcacatcctaaggctgcagagaaggctggtatgtctgcagaaca

SEQ ID NO: 869839 - DNA, 99 bp, Homo sapiens
gatgacacaaggaatgtgaaagaaaccacagagtacttaaaaacatcatggatcaatctcaaacaaaggtttcatcgtccataacgaagagtgagacta

SEQ ID NO: 869840 - DNA, 99 bp, Homo sapiens
tgagcatttgccttgtggtgtctcctcagctgtattcacacattccatcaccttgtcttaatggataatcatgcactctacttgggaggctgaggcagg

SEQ ID NO: 869841 - DNA, 99 bp, Homo sapiens
tcgagccgtctgtatttttcacccgagtcagcaccctcccagcaaccaggtctccacctctgggcaggagagttgccgaccacctcgggggtgctttct

SEQ ID NO: 869842 - DNA, 99 bp, Homo sapiens
ggaaatccatcagccaggaacaagagaaaagaaattcgaggttaagagattatagaagtcttatcgtgtatgctagcctcaattttggcagtaagacac

SEQ ID NO: 869843 - DNA, 153 bp, Homo sapiens
aaatgcctgaaccctgcacagagggctttatacagggccgtgatgttggagaactacaggaacctggagtctgtgggaccgagtctcctgccattccgagcaggcctggtatgggtaatggtgtgaaggaaggcccggtgcgattgcatgagg

SEQ ID NO: 869844 - DNA, 99 bp, Homo sapiens
ccagtggctcatcatagcggacaccaatccagtagccaggcttgaaatctgtgagaccgaaactggagacctccattagggcggaaagagtgggggatt

SEQ ID NO: 869845 - DNA, 99 bp, Homo sapiens
tcccgagtatctgggattacagtggatgagtgctcgtctgactacacaattgtgcttcctgtgattggggccatcgtggttggtctctgccttatgggt

SEQ ID NO: 869846 - DNA, 99 bp, Homo sapiens
gatgatatctttgcatatgtcaaggatcgatattttgtcgaagaaactgtggaagtcattaggaacaatggtgcaagggtttaggggctcaggagcaag

SEQ ID NO: 869847 - DNA, 99 bp, Homo sapiens
ctgcccagatcgacacagacaacaatggagagggtgacgcctgctccgtggacattgatggggacgaatttgccattttcagtggaaaacaagtggtcg

SEQ ID NO: 869848 - DNA, 99 bp, Homo sapiens
ggaacttcctgttctgatagcgtggaaggtaaagaggatgaatatccaaagaagcccttggggcagcttccacctgaacttcagtcttggggcgtccat

SEQ ID NO: 869849 - DNA, 99 bp, Homo sapiens
ctggagtctattcctggattcaatgtcatccagagcccagagcaggagctcactcctctacttgaaaaagaaagagatggattacggtgccgaggcaac

SEQ ID NO: 869850 - DNA, 98 bp, Homo sapiens
ccgggttacagcagtgagggggccacggctcaaggttatcaggacaccccatgggagagacttcgatgactctttagaaaaatgtgaagagtatttga

SEQ ID NO: 869851 - DNA, 99 bp, Homo sapiens
ggttatggagacagaacggatgatttatctggtgacagaatatgctagtggaggggaaatatttggttgtatcagagtaagatggacggtagctttgat

SEQ ID NO: 869852 - DNA, 99 bp, Homo sapiens
atgtcacaagattgaccacattgatcacattttttgaggaagagtctcgctaccactgtgccctaatactcaacctccaaaaatcaccgtttactggga

SEQ ID NO: 869853 - DNA, 99 bp, Homo sapiens
gctggcaaaaatgcagtcgagaggaggtcgaacagatagcctgccaggcagcatcactaaagcaggagacttccttgaagccaactacatgaacctaca

SEQ ID NO: 869854 - DNA, 99 bp, Homo sapiens
acttcttagagtcctctataccagcacggcttggcaatcagacggggcatcttgtagcgatagaactggtctgacacgctgcggttgacattgacagac

SEQ ID NO: 869855 - DNA, 98 bp, Homo sapiens
aattgcaccacagatatatgggttctgcagggaagtcaacatttgtgaatatccttaaacaattgtgtgaagattgggaagtggttcctgaacctgtt

SEQ ID NO: 869856 - DNA, 98 bp, Homo sapiens
tctaagtcgctttgtggtggcagcagcttagaatcagtatttgtggttgggaaagatggacttacgggagcttggaagagtgacccagtcccagccat

SEQ ID NO: 869857 - DNA, 99 bp, Homo sapiens
ccttcagagcaccagttagacaaggagagccaggaggagctgggccccaacctcatccaaaagcacagactgacgacaacagtggagacttggacccag

SEQ ID NO: 869858 - DNA, 98 bp, Homo sapiens
attgacgccatgtcgggttattcgagtgaccgagaccgcggccgggaccgaggggcacagtcttttgctgagcgcctgcgcctgggaattgcagtgat

SEQ ID NO: 869859 - DNA, 99 bp, Homo sapiens
tgacttcttttgagcagttggcactacccgtcttgaggaatggaaacttcgtggcttgcatgacagctattttacgacaaatggaagattaccattatg

SEQ ID NO: 869860 - DNA, 99 bp, Homo sapiens
gtgaggcttccccagccatgtggaacttttggcaccaactggcccgtgtacatgaccaagccggatggtacgtatattgtcatgacggtccaggagctg

SEQ ID NO: 869861 - DNA, 99 bp, Homo sapiens
gcgaaggtggagcaggtcctgagcctcgagccgcagcacgagctcaaattccgaggttgtctgcattcaaaagagcattctattaaagctaccttaatt

SEQ ID NO: 869862 - DNA, 99 bp, Homo sapiens
ctccattatttgcagatggagatatgacatcgtcatacaaatctatctgatcatgcccaccatattcagcttcctgcctcaacaatttctcaatggccg

SEQ ID NO: 869863 - DNA, 99 bp, Homo sapiens
ttggaagggatcgtgtggcatgaaacagaagaaggtgaaaggtgtagcagtcactcggcctacacccacagcatcgaccttgtgaacccagcgacctga

SEQ ID NO: 869864 - DNA, 98 bp, Homo sapiens
aaagagtcaacagcagtggcaacagggcgccctgcgtccggcagaggaggcgagcatcccgctcaggtgatgaggaacccctcgcgcacccagcgcag

SEQ ID NO: 869865 - DNA, 99 bp, Homo sapiens
gcctttcttcaggagtctcccctttggcttttccacagctatgaaacccacgtagtcggacaccctaatgcttctcctggttcatttattctgccaaat

SEQ ID NO: 869866 - DNA, 99 bp, Homo sapiens
gaaaagtttgggccttatgtgggagagcagaggtcaaacctgaaagaccccagttatggatgggaggaagttggtgaaccatctaaagaagagaaggct

SEQ ID NO: 869867 - DNA, 99 bp, Homo sapiens
ccgcaatcttctcctctggggatgacctgggtggcccgaggcagccgggatgacagctctccccaggaatcctgctgcctgctgagaaacatggtcagc

SEQ ID NO: 869868 - DNA, 99 bp, Homo sapiens
gggtgatttctgcatttccatctgagacctgacaagtttcttcagtgtgtgaaaaatcctgaggattcatcttgcacatctgagatctgagccagtcgc

SEQ ID NO: 869869 - DNA, 99 bp, Homo sapiens
atgatccttactaaccacgaccatcaaatccgtgtcggagtccttacagggacttaagtcacaacagattatctttcatcaaggcaagttccatgagcc

SEQ ID NO: 869870 - DNA, 99 bp, Homo sapiens
tttacaactgtgtaactgtcttcatctttacagaggaatagtctacaaaggaagacttgtaacctggagaagaggtagcacaggcggagtgcagcggag

SEQ ID NO: 869871 - DNA, 98 bp, Homo sapiens
cctccagaagctcgtgtccgactggaacacactcaagagcaggaatggaagttggatacactttgtgacttgtacgagacactgaccattacacaggc

SEQ ID NO: 869872 - DNA, 99 bp, Homo sapiens
caccattcaagaacaccacttcgctgagagaggggaaccacctcaatattcccaaggttcaagtgaccaactcaagggctcaggcggccaaggcccaac

SEQ ID NO: 869873 - DNA, 99 bp, Homo sapiens
gtctctgtgtgtgactgagctgaagaacaacgtggctgcttacctggacaatctgcaggtacctccctctgcaggatatcatgtgtatggaatgtcttt

SEQ ID NO: 869874 - DNA, 129 bp, Homo sapiens
tgttgccctagcattaattgaaggtggaatgaaatacgaagatgcagtacaattcataagacagtgagtggcatcaaggcgctgtacgagtcggagctggccgatgcccggagagtcctggatgagacg

SEQ ID NO: 869875 - DNA, 99 bp, Homo sapiens
tcttgctgtaagagaagaacaactgatttttctgatttcttaagcattgtaacttaattcagtgcacaaatgagatgaatgtgaacatcccacagttgg

SEQ ID NO: 869876 - DNA, 99 bp, Homo sapiens
tggaaaatgacagccttcatttctctgaacatactgccttatgggacagatcaattatataagtttggagagacagtttctattgttttttggacagac

SEQ ID NO: 869877 - DNA, 99 bp, Homo sapiens
caaatacttgtgccctttttgctagctggttttggaacagtttcagctggcatggtactggatatagtacagttactccacaggatccgctgaacatag

SEQ ID NO: 869878 - DNA, 99 bp, Homo sapiens
cttctctcagattgccagatggaatgtttgcaagtgctctttgagctgctccagctcctgtttgaggctgtcgtactcagcctccagttcatcatactg

SEQ ID NO: 869879 - DNA, 99 bp, Homo sapiens
gttccagttcatctgtgaatttcacaaaaccataacccctgaacatggcaatgagcaagttgaccagcaggatgttggccacgagcaggaagatgacga

SEQ ID NO: 869880 - DNA, 99 bp, Homo sapiens
ggccgcacagtatagtgaagataaagccaggcaaggggctacagatgcacatgttgaatggagctcttctggcattgctgtttcctgtggtaaacactc

SEQ ID NO: 869881 - DNA, 98 bp, Homo sapiens
tcaccacggacgagatgatcaaacgcctgaagtgtaaacaggaacatcgataagtagtgtaaaaacttgcacaatgaaatccgaagccaaggatggag

SEQ ID NO: 869882 - DNA, 98 bp, Homo sapiens
acaatgtagaggaaatggcatcgcctggcagctcccagatggacgtatcatcaaagttgggggagagagatttgaagcaccagaagctttatttcagc

SEQ ID NO: 869883 - DNA, 99 bp, Homo sapiens
tatcagtgatggctcttctctggaagatcttgtggtatgcagtggaactgatgaagaccctgatgataaaaacgcaccctttcggcaacggccattttg

SEQ ID NO: 869884 - DNA, 98 bp, Homo sapiens
aacgccaggcggatctcagaaggccagttcaaagcaaaatgatcaacttatctgaaccagatacaattgatgaaagagccatcaataagaaaaagctc

SEQ ID NO: 869885 - DNA, 99 bp, Homo sapiens
gatgtgaacatcgaatcatggaatcccttgcatggctctcaagtatgaagagtgtaaagacctcataaaatttatgctgaggaatgagcgacagttcaa

SEQ ID NO: 869886 - DNA, 99 bp, Homo sapiens
gcccggccgcgacgcccgggacccagattgcgggttcagactgggagtgtcccaacttggaagaacacatgcagtggaagaattctactcttctggata

SEQ ID NO: 869887 - DNA, 149 bp, Homo sapiens
gaaagacttccctgcccatcggattgtgctggctgcctgtagtgattacttctgcagatagtcgttgtcctttagccagtcagggagcacatcatatgggatgaccctccaacgtccctcccagacctcactagtgaacatggcacaga

SEQ ID NO: 869888 - DNA, 102 bp, Homo sapiens
cacaaggcctgtccaagatgactctcatttcattgaaccctttcagaatcttctgtctctcgatctggatataattctgtcaaatcacttgcccttggcctt

SEQ ID NO: 869889 - DNA, 99 bp, Homo sapiens
aatgaaggaagaaggggtgaaacttctaagagaagcaatgggaatttacatcagcaccctcaaaacagatgatgaaactagcagccaaggaaaagccga

SEQ ID NO: 869890 - DNA, 98 bp, Homo sapiens
tgcttaaagccatcttccaggaagtgcatgtacagtctcctacggtagtgtgcagcttatgcaaacgagagggtcatctaaagaaggactgtcctgaa

SEQ ID NO: 869891 - DNA, 99 bp, Homo sapiens
gtggatacctacggagcacgagaaatacggcgtggaaatcaatgtggactgaacataaatcacctgatggaaggacttactactacaacactgaaacca

SEQ ID NO: 869892 - DNA, 99 bp, Homo sapiens
aaagaagcagtagcagtgaatctacagggacgccatcgaatccggtttttgccaatccagaagactgtgtagcatttggcaaaggagaaaatgccaaga

SEQ ID NO: 869893 - DNA, 99 bp, Homo sapiens
cccaagtagctgggaccacaggtagcactggctgtatccttgaacttgagaacattcctccggcttcaaccccacagcaatgggaaagtggacctcagc

SEQ ID NO: 869894 - DNA, 133 bp, Homo sapiens
tggagcgcttctttaagggctacgggaagatcctggaggtggatctgaagaacggagaaagatgctggtttcgagttttggagatccttgttttttatggaacacagttctgtaaaattttcataagattcct

SEQ ID NO: 869895 - DNA, 99 bp, Homo sapiens
tgcagtttgatctcagactgctgtgctagcaatcagcgagactccgtgggcgtaggaccctccgagccaggctactacatgtacattgaggcctcccat

SEQ ID NO: 869896 - DNA, 99 bp, Homo sapiens
ataaactttaacccactctcgtttatcccattcaagatcatcaaattccacatacaccctgtgtgtcctcagcttctccaagcatcagggatggaagat

SEQ ID NO: 869897 - DNA, 98 bp, Homo sapiens
aactagccaaggaaaaaaagcagagaggagcggggagcaatgcaggttacacttccaggggctccccactcagtccccagtcatctatcgacagtgag

SEQ ID NO: 869898 - DNA, 99 bp, Homo sapiens
gcaaaccgggaaaggagaggatcccggagccggatataattgacactggcaaaacaatgcagactttgctttccttggtcaggcagtataatccaaaga

SEQ ID NO: 869899 - DNA, 99 bp, Homo sapiens
gagagtggagtggcccaccacctgaatgcagaggtattgctggccttttcacaattttctcaagttttgtattcagtacagttgtcattcacttcttag

SEQ ID NO: 869900 - DNA, 98 bp, Homo sapiens
ttttgttgaaaagaacatgattcacaactgctccttgattgcaaggtgcctatggttcatgcttgaagttttaatgacaaagaatgaaaacaatagcc

SEQ ID NO: 869901 - DNA, 102 bp, Homo sapiens
aggcgcccaagcagcagctgccggagcccgagtggatcggggacggagagaacacgagcccatcaggtttcatttccagggaccctgtggaacgactcttcc

SEQ ID NO: 869902 - DNA, 99 bp, Homo sapiens
tcggattaccccgacattctccacctcctgggaggccagccattcccaaatgccccaaggatgaagaacggagacgttgttgacctcctgtactggaga

SEQ ID NO: 869903 - DNA, 99 bp, Homo sapiens
acctatggagcattcatgatctagaagcaagataccaggaaagccaagctggaaattcaaggaaggtgggagtcaatcattttgacaagtctcctgaaa

SEQ ID NO: 869904 - DNA, 99 bp, Homo sapiens
ctagtaacagactttttttcttctagtaagaaatcccggaatgacttggatgaaactgaatgcagagaagatgccctgtaatcccagctactcaggagg

SEQ ID NO: 869905 - DNA, 99 bp, Homo sapiens
gccacctccatcactggcgtcaccatgggggctgtgctgggtgtcttctccctcgccagctggaaaaagcttgagtctccacccccatctaccaatccc

SEQ ID NO: 869906 - DNA, 99 bp, Homo sapiens
ccctgctgggtcctacctgtcagagccccaagtatcaccttttgccatgatagcatttctttcattggacagttccttacaagggctccactcagtgtc

SEQ ID NO: 869907 - DNA, 99 bp, Homo sapiens
cctcaaactgctccctctgctcactggtctctttgccgtctcccgttaagtgggcagaccaacatccacctcagcaaaaacttcttcctgacgaatcgc

SEQ ID NO: 869908 - DNA, 99 bp, Homo sapiens
atgacacttacaaggtggacaggcatgattattgggccaccaagggttgatggaaatcacaatcttctgacaaagctttctctggaagaggaaaactgt

SEQ ID NO: 869909 - DNA, 99 bp, Homo sapiens
ccgcctgctgaagctctattgccgggagcagccctattacctgaacctgatcgagctcttcctgcagactgcttctcggaggagtgccgctctgtgatc

SEQ ID NO: 869910 - DNA, 99 bp, Homo sapiens
aagcagtagagggtgccatgcacattcagggtctttttggagttcctgagctgagtgccccagaaggatttcatattgcacaagaaaaagccttgagaa

SEQ ID NO: 869911 - DNA, 99 bp, Homo sapiens
agacctttgggcgctggggaggccttgagacgagtaatggagtgtttggcatctggaatactacttcctggttgaagatgaaatccactgaggagggaa

SEQ ID NO: 869912 - DNA, 99 bp, Homo sapiens
cgcaggtcccggatgttgcggacagtatgaggcaagcgcagggggacggggaccagcagctgtcgccgccgctctcagccaaaccactgagcatattgt

SEQ ID NO: 869913 - DNA, 99 bp, Homo sapiens
gagcagcaagagctttacctatctataccacatcagcttcaaaaaggcgccaatgcttcggcattagagaaagagattggtccagaacagtttccggtc

SEQ ID NO: 869914 - DNA, 99 bp, Homo sapiens
tattagagcttagagaaaaccagttaaaaatgttgcctaagctcacttatctaaagaatatgaggaggctaatttcagagctatatgtgcgagataact

SEQ ID NO: 869915 - DNA, 99 bp, Homo sapiens
aacagtatccgaggatgacatatcctcctctacatggtcccatgagattcccaccttctttatctgaaacaaacaagatttttcgggattgtcacccta

SEQ ID NO: 869916 - DNA, 99 bp, Homo sapiens
aggaagaatttgatgttttgtctgagtcggctgttgatttcatcaggacacttttagttaagaaacctgaggaaagttccccaagggagacaaagctga

SEQ ID NO: 869917 - DNA, 99 bp, Homo sapiens
gtccgtgtgccagcaacagagctgggtccgggtgtacgctattgacctgaaaagtggttctggaaaagtgtaccaaggccctgcaaaaggtgctgctga

SEQ ID NO: 869918 - DNA, 98 bp, Homo sapiens
caagttccatcgaagtgtaatgactacttttttaactacttcactcttggagtgcattctcctggtgtgcagcctgcagatgtgaaggaagttgttga

SEQ ID NO: 869919 - DNA, 99 bp, Homo sapiens
gcaggcaatttgtccgtcacatggtgtacagtttctcccttcagctgatcacttacatctcagtaccggcagatacctcgttagtcggatgctttgcaa

SEQ ID NO: 869920 - DNA, 99 bp, Homo sapiens
cagtggttccttggtgggctctaacataccccattcaccattatccagaattttcagtgctaagcaaaaagctcctgctgcaatttgagaaggaggaaa

SEQ ID NO: 869921 - DNA, 99 bp, Homo sapiens
gagtctctgccactgcacaagaaatgtgtccccacagggatagaagatgaagatgctctcattgctgatgtaaagttggaatgccaagatgccttggaa

SEQ ID NO: 869922 - DNA, 99 bp, Homo sapiens
tcctattggctccttcacattgattgacagtgaagtgtcacaacttttgacctgtgaagatatacagcatgattccacctttccactgatagactcaag

SEQ ID NO: 869923 - DNA, 99 bp, Homo sapiens
ctggccataggtgaagatgcagacgctgtagcctcggaggcaggacagcaccgcaggttccagctctctgaagacctgtaatcccagctacttcggagg

SEQ ID NO: 869924 - DNA, 99 bp, Homo sapiens
aggacagcacctagtcgtggccggaggagtctcagagctgtcagaaaggatttccagatgtgacttgcactcagaagatcagtggtcaacttcagaagc

SEQ ID NO: 869925 - DNA, 99 bp, Homo sapiens
tactcttgagtgctagaatgatgaggatcttaaccaccattatcttaactgaggcacccaaaatggctcttctggagctggagatgaactcggacctca

SEQ ID NO: 869926 - DNA, 99 bp, Homo sapiens
atctacaggatttatcaaatcgagtcactgtcaacttgacagagccaattcgctattaaaccagactcaacagccttacaggtatctcattgaatcagt

SEQ ID NO: 869927 - DNA, 99 bp, Homo sapiens
tttccagagaaaatctgttgtgtgcatgcaagatatgggaaatactaaagcaagactactctatgaagccaatcttccagagaactttcgaagaccaca

SEQ ID NO: 869928 - DNA, 98 bp, Homo sapiens
ggggatccgacttgccggcagaacttacgctgcgggaccccgggcactgttgctgctgcgggagcctcccaactgatatccaggctgaatctatccca

SEQ ID NO: 869929 - DNA, 98 bp, Homo sapiens
cagtactggtcaacacagatagcttggaaacaccaacttacccagagagatgacacgggggaaattcctcaatattctagagaagcccaagaagtagc

SEQ ID NO: 869930 - DNA, 99 bp, Homo sapiens
gtggagacaacgccttaacccaaggaagtgactcaaactgtgagaacttcagggatcactgagattctgatgaacagaccttctgcccgcaatgccttg

SEQ ID NO: 869931 - DNA, 99 bp, Homo sapiens
tccgaatgcaagaaagattgattaagtcttttatccgagacctgtctctctacctccagcacatccggttctgcaggctggaaatccaagatgaagtca

SEQ ID NO: 869932 - DNA, 144 bp, Homo sapiens
ggggactcaaagcgccttccaaaccttctcggcgatgctgtacaggacctcgtcctgtacagcatcgccgagaaggtttggaaggcgctttgagtccccgctgctgtggcagagcgccatcatgatcctgaccatgctgctgat

SEQ ID NO: 869933 - DNA, 99 bp, Homo sapiens
aacattctgacagcaacaagaaaatgtttccgacacatagccctcgattatgtgcttcagggtcatcatcaaatccacagcaaatttccagttttgact

SEQ ID NO: 869934 - DNA, 99 bp, Homo sapiens
ttagacaccatcatctcccgctgcctgctggacagtgactccaggggagaaaactggttgtcctggatgtttgaaaagttggtcgttgtcatggtgtgt

SEQ ID NO: 869935 - DNA, 99 bp, Homo sapiens
cttctttgtattagagtttcattttctcgttgacaaccttgtttcttcttttcatctgatgggacaaatctgagaggaagcttctcgggcccccaggcc

SEQ ID NO: 869936 - DNA, 99 bp, Homo sapiens
tgacgcgcacgctgtaggaaaactggaaacggcatacactggagaagaatgtgttggttgtctctgtagtcacacctggatgtaaccagcttcctactt

SEQ ID NO: 869937 - DNA, 100 bp, Homo sapiens
gagggatttgtcatcagcgtgcgccttcctctggatcgagaatgtgatctagaccgtgaccagagtggttctccatgagacacgctgatgacaaatccct

SEQ ID NO: 869938 - DNA, 99 bp, Homo sapiens
gcctgctgctgcgcttccgaggcaggaagccgagggacccatgtctgggagcggagaactttctgtgagactctctcgttttggggcaaaacggctcag

SEQ ID NO: 869939 - DNA, 99 bp, Homo sapiens
tcaggaccagggttctggacaggcttgggaactggtggaatactaggatatttgtttggcagcaataggttggaagtacaagcagatgtacagaaagaa

SEQ ID NO: 869940 - DNA, 98 bp, Homo sapiens
ggaagaattaaagaaggaagatgaagaacctccacgaaggtcagcattccaggggtttgccaacttgttaataagatggaggagaatactggcaaggt

SEQ ID NO: 869941 - DNA, 98 bp, Homo sapiens
ctaccgcaaggcctggaacaaccaggtctgctgcaaggacctctggtacctagagacaggcggtctctgtggagagtctgctggcgttctcagggctc

SEQ ID NO: 869942 - DNA, 99 bp, Homo sapiens
cgcaggaggatgaagctgctgctgggcatcgccttgctggcctacgtcgccttggtgaactatgacaatgtagtggacacaggttctgaaacagatgag

SEQ ID NO: 869943 - DNA, 98 bp, Homo sapiens
atttttggagaaagccagcctaatccaaagactgtggaacttttaagtggagtggtggatcagaccaaagatggcctctgcctgtgagtttctggata

SEQ ID NO: 869944 - DNA, 98 bp, Homo sapiens
tccaaggccatgggcatcatgaattcgtttgtgaacgacattttcgagcgcatcgcagcaatggctgccatccggaagaaactggtgattgttggtga

SEQ ID NO: 869945 - DNA, 98 bp, Homo sapiens
ggtcctcggtcggtacagtctctgcacctcgcgccccagcaggttgacagatttgcaatggaattagaacaaagccgaaatttgagcaataccatagt

SEQ ID NO: 869946 - DNA, 99 bp, Homo sapiens
ggcggcggaagatggtgccgggggtcgctggctctgctgctgccgccggcgaaggaggaggcgttgccgggctctagaccaagatagaacagcccttca

SEQ ID NO: 869947 - DNA, 98 bp, Homo sapiens
aaaagagcactgggctgagactcaggagacctggtttctagccccagctgtacctctaattgtaaccttggctctaagcgaaagacatgaggcctcag

SEQ ID NO: 869948 - DNA, 98 bp, Homo sapiens
gcagcagcccagacgcggcacagagagggcctgggagcttgctgcagcttcagatggggacccagagcctgctcttgggaacagccagagtaagattg

SEQ ID NO: 869949 - DNA, 99 bp, Homo sapiens
ggtctctggagacatcttcagcagagctgtgccaggcctgaagctcaagattgctgggaaatctctacccacagagaagtttgccatccggaagtcccg

SEQ ID NO: 869950 - DNA, 99 bp, Homo sapiens
gtcagaagccactggagctgcgctgtgaggaggagcaggatggtaaagagtggatggaggccattcaccaagccagatggtatacctcaagtttactat

SEQ ID NO: 869951 - DNA, 99 bp, Homo sapiens
cgagttcccggggactgtccacctggggaatagaacgtgtccgggctgtggccaagcggattggtgaggtccaggtggcttgtggcctgaaccagacgg

SEQ ID NO: 869952 - DNA, 99 bp, Homo sapiens
gaagatggaatccacagtggagcctgttcagattgagaggatccagaatccagatctctggaatagctaccaggcaaagaaaaaaactatggatgccaa

SEQ ID NO: 869953 - DNA, 99 bp, Homo sapiens
ttctgacggataatttccaagccagattgacgagatgcctgaggctgccgtgaaatcaacagccaacaaataccaagtcttttttttcgggacccacga

SEQ ID NO: 869954 - DNA, 98 bp, Homo sapiens
ttcttgttgtggatgaagctcacaggttgaaaaaccaaagctccctgctgcataagaccttgtcagaggatccagccgcagaagccaggatgaaggta

SEQ ID NO: 869955 - DNA, 99 bp, Homo sapiens
cacctctacctacagacaaggaaaaggcttggagcacctccattcattgtgccaacaggacctgaatgaccgcttacgagaggccccagaaacattcaa

SEQ ID NO: 869956 - DNA, 98 bp, Homo sapiens
ctggactggtttaaaacggtcactgaaggaggtagagttggctttgtgggacacagctgggcaggaagattatgatcgcctgaggcccctctcctacc

SEQ ID NO: 869957 - DNA, 99 bp, Homo sapiens
ggctggccaggatcctgcgctgagcacgagtcacccgttctacgacgtggccagacatggcattctgcaggtggcaggttcaagtgattctcctgcctc

SEQ ID NO: 869958 - DNA, 100 bp, Homo sapiens
tatcttgccccggtgggccatcattggttcatccaccctgctggaaggaaaacgtgcacgttgtcaggagccaaccaatgatggcccaccggggcaagat

SEQ ID NO: 869959 - DNA, 99 bp, Homo sapiens
gaaaacagaaatcgaaacagatacagagatgtaagcccatattgagaggatccagaatccagatctctggaatagctaccaggcaaagaaaaaaactat

SEQ ID NO: 869960 - DNA, 98 bp, Homo sapiens
tcagattccaagaccccaggcaggggtggcgccaaagaaggccggggtcagaaagaaaaaagagggtcccggggccgaggcaggaggacatcagagga

SEQ ID NO: 869961 - DNA, 99 bp, Homo sapiens
ttcactggggaagagaaaaccagcgtggttctgagcacacggttaatttcaaagcttttcccatggaggattgctgtcacgtctaatgtggctgctgcc

SEQ ID NO: 869962 - DNA, 99 bp, Homo sapiens
ggaacttcatcatcaaagccgtgtggttacctggttcacagaccgagttagcaattgtcaccgcagactttgttaagggtgaaaatcctatttataaga

SEQ ID NO: 869963 - DNA, 99 bp, Homo sapiens
cacacgccccagacccaggctcagggctgtgggacagatgatgtctaccatgttctacccactggtcacctttgtcctcctcctcatctgcattgccta

SEQ ID NO: 869964 - DNA, 99 bp, Homo sapiens
gcagaattgaagtagcccgtgattgtggaatgcctcacaaagctggcaggaaaccatccctcctcatcgtcgatctggccccaccaccaatccttgttg

SEQ ID NO: 869965 - DNA, 99 bp, Homo sapiens
ctgggtggaaaaactcagtgagacacaatttatcattgaataagtgttttaagaaagtggacaaagagaggagtcagacaccattcgcttttcacccaa

SEQ ID NO: 869966 - DNA, 99 bp, Homo sapiens
tcaggcagatggcgtatcagatctgccagtcaataaattgatcagttccatgacaagaccccttatacgattatgtttggtccagataaatgtggagag

SEQ ID NO: 869967 - DNA, 98 bp, Homo sapiens
gcctccacagccatgtggaactgtgacattcccagaacctggaggccaggctatgacacagagtcaatcaataaccagggagatctgtgatatagccc

SEQ ID NO: 869968 - DNA, 98 bp, Homo sapiens
aaaaactggagagcttcatcaaaaatagtgatagctttgataaggaactctaatgatccaggacaaagaagttaccctggagtatgtatcaagcctgg

SEQ ID NO: 869969 - DNA, 99 bp, Homo sapiens
ctcacactgctgtctctgtatatgttctgtgagttacccagcatgccacaatctgattgctgacctggatggaacagagtgaaataaatgatttacaaa

SEQ ID NO: 869970 - DNA, 99 bp, Homo sapiens
tacgtgaaagacgaatttaggagacataagaccgttggttctgacgaggcacagcgtttcttgcaagaatgggagggctcattgtcatccccaagccag

SEQ ID NO: 869971 - DNA, 99 bp, Homo sapiens
aggaacaagcggagggctccctgactgtgtacgtgatatctgaacactcctcacttcttccccaggctcaaggatgtccaatcaatggatgagctgaaa

SEQ ID NO: 869972 - DNA, 99 bp, Homo sapiens
aaagattgaaaagtagttaatggcagtggtggtatgaagcaatggctgccatccggaagaaactggtgattgttggtgatggagcctgtggaaagacat

SEQ ID NO: 869973 - DNA, 99 bp, Homo sapiens
gatggtccagaattatgagaacctggtctctgtaggtctgtccagggttttggtggctggcgaagctgagggcgtgtcagcaggcctttcgatccctgg

SEQ ID NO: 869974 - DNA, 99 bp, Homo sapiens
gataatcttccaatggaaatccatggttcaagtgccacctcttcaggaaagccatctgacttcaatcagcaagagtgagccatggagctacgtgtgggg

SEQ ID NO: 869975 - DNA, 99 bp, Homo sapiens
gaaatttctaagtgtgcgtcgaatgtaaatacgagccaagtcctgtagattcctgacagcacagggagcttgggaagctccgacagcttctcatcactt

SEQ ID NO: 869976 - DNA, 99 bp, Homo sapiens
gcgcctgacagaggaagatggacagctgggaattgctgaattagaactgcagaggttcctctacagcaagtgacactacctgagaagcctgttaaacta

SEQ ID NO: 869977 - DNA, 99 bp, Homo sapiens
aagacgccaggacccactggaagcctagaaatgctccagaacctgggtatcaacccagcaaacattggcttcagtaccctgactatggagtctgacaaa

SEQ ID NO: 869978 - DNA, 99 bp, Homo sapiens
gtggcaatgttactatagaaaatattcatcaacctagagctgccaagaagcattcttcatctaaagataaggtgaatcagtggctaacctggttagaaa

SEQ ID NO: 869979 - DNA, 98 bp, Homo sapiens
ggagacaactggtaccggtgcgaatgtgccccgggttttgctgggcccgactgcagaataaacttttgccatgggcttcatgacgggcaccatttcca

SEQ ID NO: 869980 - DNA, 99 bp, Homo sapiens
ggcgagcggctgtgtggatgtcggcgaagccgcgggcgaggaaatttgcgagaatccccgatttatcattgatggagccaacagaactgacatctgtca

SEQ ID NO: 869981 - DNA, 98 bp, Homo sapiens
cgcatctacatccaggcccacatcgacagggacgtcctcattgtcctcgataacatccctgaggacctcagagaccctttctacgttgaccagtatga

SEQ ID NO: 869982 - DNA, 99 bp, Homo sapiens
cgagaattaaatgccgagaaggccagtacggctggtgagattggagagatgaaggatggagtcccagagggagcacaacttcagggaccggttcatcga

SEQ ID NO: 869983 - DNA, 99 bp, Homo sapiens
aagggagggcaagaagatatgaacctgagccttcagtcaagaccctccagcttgcctatggcagtcttgggcacgtccatctgtaaacctgctgagagc

SEQ ID NO: 869984 - DNA, 98 bp, Homo sapiens
gcccttctgctccacgaggagcacagccgggccgctgcgaagaacctaaaggcagacccagaagagctttttacaaaactagagaaaattgggaaggg

SEQ ID NO: 869985 - DNA, 99 bp, Homo sapiens
cacggattcttcgcctgagccaccagcaaagggtgacagaacctttctggaaggttcccacactcgtgggttagatcactcatcctcttggcaggatca

SEQ ID NO: 869986 - DNA, 99 bp, Homo sapiens
tgaaaattgaaactcctgctccccggaaaccaccccaagcactggcaaagcaggggtccttgtaccatgagatgggctgcccaggctttgctgaggttc

SEQ ID NO: 869987 - DNA, 99 bp, Homo sapiens
ttacagacagctttcgaagacgggatactgctcagcaaggtgttgtgaatttcccatatgatgatggtgttagaacaccaaccttacagctctctgcga

SEQ ID NO: 869988 - DNA, 101 bp, Homo sapiens
ctgggcaacaagagtgaaactgttgtttgaatatatacaggagtttctttctgccccgcctgtatatattcaaacaacagtttcactcttgttgcccaggc

SEQ ID NO: 869989 - DNA, 99 bp, Homo sapiens
tctatgaatgaaagcatgaaaaatcaaaaggagttcatgcttatgaatgctcgacttcaggaaattgaacttagctcattaagggaagctttgtctttc

SEQ ID NO: 869990 - DNA, 99 bp, Homo sapiens
ttttgtccagggcagcatctctggtgcatgctgatgacgaaaaacgaaacggaggtggagctgtacaacgaatttcctgaacctatcaaactggacaag

SEQ ID NO: 869991 - DNA, 99 bp, Homo sapiens
cctgagtagctgggattacagaatggagatgtatgcatttcgattcttcatccgcctgtagatgacccacagagtggagaactgccttctgaaaggtgg

SEQ ID NO: 869992 - DNA, 99 bp, Homo sapiens
gggatgaaggagttggaaaactcgccaagggttatgtctggaatggaggaagcaacccacagggtcctgatgaagaagctgttgtggatcttggcaaaa

SEQ ID NO: 869993 - DNA, 99 bp, Homo sapiens
ggcatcctgactttggccatgattgcatttttcttcatcatcatttacctgggaccaatggttttgatgataatctcagatgccctggatgcagctaga

SEQ ID NO: 869994 - DNA, 98 bp, Homo sapiens
gccacagcacaacaaatggctgcatggagccaagttagttttgtatttgtcagagttgatacataatcaccaaggtgaattgactgaagaagagctag

SEQ ID NO: 869995 - DNA, 98 bp, Homo sapiens
aggctttcaatcaacccaaggtgatgcttttgctacgacctcattttctgctggaactgatattgatgatgttaagaagttcaaaccgggttacctgg

SEQ ID NO: 869996 - DNA, 99 bp, Homo sapiens
aatataaaaggacttcatctcctcaacatggaaactaagaatgctgcctttttatatggtcttggtttggtctacttccattataatgcatttcagtgg

SEQ ID NO: 869997 - DNA, 98 bp, Homo sapiens
tcgaggagtgcgtcaaggactccccgcgcttcaggatttttcaagccacattcaattgataggatgaaaaaatttaagagaaggctatccctcacact

SEQ ID NO: 869998 - DNA, 100 bp, Homo sapiens
ctcagccccgtcccaccaggagctcctggaacttccctttggacaagctggtggcatcccgctctgtccgaggctgaggaggacaagaggacggggctga

SEQ ID NO: 869999 - DNA, 98 bp, Homo sapiens
tttaacgagtattccaaatttgatggcaagcctgacaattatttcaatgcaaactgctccttctggaactactcagagagaactatgatgggatattg

SEQ ID NO: 870000 - DNA, 99 bp, Homo sapiens
gcaaatttagtttttacacaaaggaagccattcttaagaaaatcgcgctgcaactcaaagccacgctggagaacatcaccaacctccggcccgtgggcg

SEQ ID NO: 870001 - DNA, 99 bp, Homo sapiens
ccttagctagccaaattgcagcagaacagaacctggataatgatgaaggattgaaaatcgctgctaaacattaccagatggagtctcgctctgttgccc

SEQ ID NO: 870002 - DNA, 99 bp, Homo sapiens
ctcgggttctgacaagatggccgggctgccccgcaggatcatcaagattcgttgggcttttgccagctctttttagattgtcctcttgagacctgttta

SEQ ID NO: 870003 - DNA, 99 bp, Homo sapiens
taagagcattatgggcagacagcggcatacagaatgcctatgaccggcgtcgagaatttcaactgcttgaagtacaatcttgttgtgtgtttattccaa

SEQ ID NO: 870004 - DNA, 99 bp, Homo sapiens
cagctacaactatatgaaattcatggagctcagaaaattgctgatggagtggcctgatcaaccccgtataaccaaagatgtaatttgttttcatgctga

SEQ ID NO: 870005 - DNA, 99 bp, Homo sapiens
gcattcaaatcctagcactctgggagagggcaagtgtccagagaatggctgggatgaaagtacacttgaactctttttacatgaacttgcaatcatgga

SEQ ID NO: 870006 - DNA, 99 bp, Homo sapiens
gggcccaaccagcgcccagccccctgctatgacccttgcgactttcctgctctgggaccctaccaaggtgcccccacgactgcaggctgtgactgatga

SEQ ID NO: 870007 - DNA, 99 bp, Homo sapiens
gcctcctgagcagctgggattacagatagaagctttggagaaaatgaatgaagatcacgttcagaagaatggaaggaaagctgcttcatttttgaaaga

SEQ ID NO: 870008 - DNA, 99 bp, Homo sapiens
gtggctgccctgaagcgggagaaggatcgtctggtacagcagcttaagcagcagacagagattgcgaagagactgaacacaattttagcacagatcatg

SEQ ID NO: 870009 - DNA, 98 bp, Homo sapiens
ctttgatctaagggttcagcctttcaatgtgacacaaggaaagtattctacagggtggattacaggaggtggcagaacagttagagctggaacggata

SEQ ID NO: 870010 - DNA, 117 bp, Homo sapiens
ctggcgtgcactccgcacctcggggacattattgcgcgtggaacggctgcttttggaaggctttacaggaagtatggtgctggcatctgcttggcttctagagagtcttacaatcgt

SEQ ID NO: 870011 - DNA, 99 bp, Homo sapiens
ggggccgcttcaccacttacgaaatcagggtcaagatcgagctgggagcattagtacccttgattctttagactttgcaagatattcagatgatggtaa

SEQ ID NO: 870012 - DNA, 99 bp, Homo sapiens
tgaaatgctgactaaggaacaaggttctcttattcaagtaccttccgttgagagggggaaacttagtaaagttcgcctgggttcgttgtctttgaaaaa

SEQ ID NO: 870013 - DNA, 99 bp, Homo sapiens
gcctgggcaacaagagtgaaactccgttagtgacatctttgatcaattctgcaattgaggtatggtttgcaagcgagccccttgctgcctgcatgtggg

SEQ ID NO: 870014 - DNA, 99 bp, Homo sapiens
attcttgtcactttaattacttgagaatttataatggaattggagtcagcagaactgaaatagaaatgggacgtcggtcatcagatactgaagaagaaa

SEQ ID NO: 870015 - DNA, 99 bp, Homo sapiens
cttggtcataatcttctagtttctgaattatataatcagctgaaatttccagtaaagccaacaagtcccaaatttggaaaagctgactcatatgaaaag

SEQ ID NO: 870016 - DNA, 99 bp, Homo sapiens
atatggaaaggttgacttcacaggaaaagccttgaagcatactgctcagaaattcttcacggtagatgctggagtaagaaaagggatccccaaagtggt

SEQ ID NO: 870017 - DNA, 98 bp, Homo sapiens
gacatcttcatttacagagcaacttgatgaaggtacacccaatagagaggtgttctttgcagaagatgtgggttcaaacaaaggtgcaatcattggac

SEQ ID NO: 870018 - DNA, 99 bp, Homo sapiens
gatgagccagagacctacgtggcagctgtgaaaaaagccatttccgaagtattctgaagtctcaggaaactggaccatttaaatgtgcatggcccatga

SEQ ID NO: 870019 - DNA, 99 bp, Homo sapiens
gctcgggtctccggggaccgagatatcagttttagagaatgtggcgtggagaaattctcaaggaaagagtaaaatgctggtgatgtgctgagggaacag

SEQ ID NO: 870020 - DNA, 100 bp, Homo sapiens
agcagagcgagtacttcgttccaacatggtttcccaagtccaccaaagacatcaggattggcttcaggatgtccatgttggaacgaagtactcgctctgc

SEQ ID NO: 870021 - DNA, 99 bp, Homo sapiens
ctattgtaatgaattcagtggaaccatcacacaaaagcacacaaagacctcctcctccacaggggagacagagtcctcctgcatatgcccaagaggatt

SEQ ID NO: 870022 - DNA, 98 bp, Homo sapiens
tggaacaaagttgcccactcatttaactgcacgccaatagaaggatgaatgtgggggtggcacacagcgaagtaaaccccaacacccgagtgatgaat

SEQ ID NO: 870023 - DNA, 99 bp, Homo sapiens
tggcgtcccggttcctgtcgcgctcacctgcgccggtagcgaagaaatcgccccgggacatggctgctctttggcgtaaattgcaatcgattagggatc

SEQ ID NO: 870024 - DNA, 98 bp, Homo sapiens
ctacaagctcatggatcatgtggggactgagccatccattaaggaggtgaagtcatgggcattgggcgttcatttgaggaggccttccagaaggccct

SEQ ID NO: 870025 - DNA, 99 bp, Homo sapiens
gagacctcgctgcgctcatggcgtcgcccggaatgtgaaggctgtgtctgagactcctgcagtgccaccagtttcagaagatgaggatgatgatgatga

SEQ ID NO: 870026 - DNA, 99 bp, Homo sapiens
acactcttctgaaacgactcgggtagaggctgaggaaggccgtgttgtttgtctacctgggactatgacaaatggcctacagctgtgagagcaaatgga

SEQ ID NO: 870027 - DNA, 100 bp, Homo sapiens
actactcattatcgccagcattggccagctgatcccaagtgatttccacctcacatttgttcagcgtcttcagctggccaatgctggcgataatgagtag

SEQ ID NO: 870028 - DNA, 99 bp, Homo sapiens
cttgtactcgtcgcgaggagacagccgagagtagggaggtggcggagattctggggatggtgatgcacttggtgttgacgttctgcgtggtgatggcct

SEQ ID NO: 870029 - DNA, 99 bp, Homo sapiens
agagatgtgatgttggagaactacagaaacctggtctccctagggaagctgccaaagaatgtcgacgtcgaaagaaagaatatgtaaaatgtctggaga

SEQ ID NO: 870030 - DNA, 98 bp, Homo sapiens
atcaacttgacaaaagtgttcagctgtcatggaccccaggcgatgacaacaatagccccattacaagaatacaaacagaagcttgcacgagtaaccca

SEQ ID NO: 870031 - DNA, 99 bp, Homo sapiens
ggaactcaagtgtctccagagctctccgggtctgcaacagctactggagccgtgaggttgtgcccacgtgcctcagggccttggtagaaatggcccggg

SEQ ID NO: 870032 - DNA, 99 bp, Homo sapiens
ttctaggagatttgtttggcgtgccaagcttctctgtgaaagagcacaggttcgagaacttgtcttggacaattgcaaatcaaatgatggaaaaattga

SEQ ID NO: 870033 - DNA, 99 bp, Homo sapiens
tcctactggacatgtcagtgtcctttcacacccatgtgaaagagtatcggttttatggagaacctgtaataaaagcatgtattgaaaatggagccagtt

SEQ ID NO: 870034 - DNA, 99 bp, Homo sapiens
gtcttcaccttcggcagccggctgtacgcacacaccatcgcaggtgatggaggaaatgatgtcagcatgattcaggcagcagactgtgggattgggatt

SEQ ID NO: 870035 - DNA, 98 bp, Homo sapiens
tctcggagaccccgcgccgacggctgctcaaacatcagggtaagtaaggaggtctctgtaccatggctcgtacaaagcagactgcccgcaaatcgacc

SEQ ID NO: 870036 - DNA, 99 bp, Homo sapiens
ttccctgagaaactcttacaggccaggaagccagtacagatctttgagaggtctgtgtacagtgacagcagcagccgctcttctaaaacattcaaacca

SEQ ID NO: 870037 - DNA, 99 bp, Homo sapiens
atggctttgacaataccaaagagggtgttattgaagcaggagcatttcaagatttttcggacgccgcccgatactacattccctgagcccacctgcctg

SEQ ID NO: 870038 - DNA, 99 bp, Homo sapiens
gccggtgccagcacctttcggcttctgagacggcggcagcagcggcattcaggtgaccattgtgaggtagatattttgttctaattttccagatgagga

SEQ ID NO: 870039 - DNA, 99 bp, Homo sapiens
tacagttttatctagccacatcttggagcatactggagcatagtgaaagagtctattttgaagcttcaaacttagtgctgctgcagaccaggaacaaga

SEQ ID NO: 870040 - DNA, 99 bp, Homo sapiens
tcagcgtctgctcgtggaaaccaagataaagatgcccattttccaccaccaagcaagcaggtaccgggaagccagtgttgaagtgatggagataatgtc

SEQ ID NO: 870041 - DNA, 99 bp, Homo sapiens
gctatgaagagctggctcggatgctgatggggctggacctgctggtgttcgcccacgaccatgagagatggaaccatgtaaccaccacgaccaagaggc

SEQ ID NO: 870042 - DNA, 99 bp, Homo sapiens
ctcaggaatctggtctcattggctgggagtgtccactcgccttccaccagcatggcaacgtcttcacagtaccgccagctgctcagtgactacgggcca

SEQ ID NO: 870043 - DNA, 99 bp, Homo sapiens
ttttttttaggtaccagcatcaagatgatttatggtaataaggttacccatgcagttgttactgtaccagcctattttaatgatgcccaacgccaagca

SEQ ID NO: 870044 - DNA, 112 bp, Homo sapiens
atgaggagcctcgggagcgacccgacctacagctccaggaccgcactgacctcatgcgcatgtgctggcaattcaaccccaagatgaggccaaccttcctggagattgtcaa

SEQ ID NO: 870045 - DNA, 99 bp, Homo sapiens
gtccagctggaaggcgatctcgcccaccacgcgcgcgtccttctcggcgcccgcgaagctctggatcttgaatccgttgacgtcctgagaactagaaga

SEQ ID NO: 870046 - DNA, 98 bp, Homo sapiens
tccaatgcaaagctgtaccacagaattcagagtccagcacatcacactgacgtataggactccttgggatacaggttggacgcacttttggatatttt

SEQ ID NO: 870047 - DNA, 98 bp, Homo sapiens
gatggccatgaatttattgtaaaaagagaacatgcattaacatcaggcacgataaaagccatgttgagtggcccaggctggagcattggatttgctaa

SEQ ID NO: 870048 - DNA, 99 bp, Homo sapiens
cgcagttccgacaaaggtcgcctttgctactaccgcgactggctgctgcggcgcgaggtcgtcatacctcagaagaaaggcaagaaggctgctgcaacc

SEQ ID NO: 870049 - DNA, 99 bp, Homo sapiens
gttcgagaccagcctggccaacctgacatgtagactgccaaagtgtatgggatgctttcaagggtgcatttatttcaaaacatccttgcaacattactg

SEQ ID NO: 870050 - DNA, 99 bp, Homo sapiens
cttttgagtgcaactgccttccaggactcagcccaggagagtgttattactcgagatattcatcgtacatttcccgcacatgattactttaaagatact

SEQ ID NO: 870051 - DNA, 99 bp, Homo sapiens
cccagcactttgggaggccaaggtcacacctgggtcctgagctggcgccatcaccggagacgccaggtgatgtccattcatcagaaataatgagcaaag

SEQ ID NO: 870052 - DNA, 99 bp, Homo sapiens
ctcccctattgctggctctgcagggctctgatcaagcggatccaagccatgattcccaagttccaagatgagatgggattctccaacatggaagatgat

SEQ ID NO: 870053 - DNA, 99 bp, Homo sapiens
gggacccggttccccggcccacagtgggggtgtgcaaacccgagagaactggtctccatctgctgctgcctcttcatcctcttcctcttcctctcggag

SEQ ID NO: 870054 - DNA, 99 bp, Homo sapiens
atcctcaccaaaagcatcataacggatagccaaaacggttttggctgccagcattcgagaaatctttaggaggagggcaaagttactcttcagagaatc

SEQ ID NO: 870055 - DNA, 99 bp, Homo sapiens
cgagctcgcttctatgctgcagaaatcatttcggctctcatgttcctccatgataaaggaatcatctataggttgtggcagcactgcctgaaggtatga

SEQ ID NO: 870056 - DNA, 99 bp, Homo sapiens
aggctccgaggtgccagaggcatatctattatcctcccagtccacaacgctgaaccgtggctggacgaatgtttgaggtctgttttgcaacaggacttt

SEQ ID NO: 870057 - DNA, 98 bp, Homo sapiens
gaggatgaagattcaccaaataagctatatactttggttacctatgtacctgttaccactttcaaaaggacccagcctccaacactgccccgctccag

SEQ ID NO: 870058 - DNA, 99 bp, Homo sapiens
gcttctcccgcttcaacgaagaccgagactttcaggtctcattcaggaacgtcgcctgataacactgcaccaccacctccccctccaaggccacagccc

SEQ ID NO: 870059 - DNA, 99 bp, Homo sapiens
gtcgccgccatcctcggcgcgactcgcttctttcggttctacctgggagaatccaccgccatccgccaccatgaggtggggctggtgtccgagcacttc

SEQ ID NO: 870060 - DNA, 99 bp, Homo sapiens
aaaggccggagaaggtgaaattctgtgtgctccctccggcgagagactttgtcagctcccgcacagtaacttggaacgtagttatcagcgattcacagc

SEQ ID NO: 870061 - DNA, 99 bp, Homo sapiens
aggaactgtcggaacagaaccaaaggctattggatcagctcagcaggaacctaaaggcagacccagaagagctttttacaaaactagagaaaattggga

SEQ ID NO: 870062 - DNA, 124 bp, Homo sapiens
ctttgatcagaagacgatcgctcttctgctacatcatcatctactgctcctttcaccagatgatgatgtagcagaagagcgatcgtcttctgatcaaaggaggtaaaattgttaatgatgacca

SEQ ID NO: 870063 - DNA, 99 bp, Homo sapiens
agcatgaaaaagaagctgcataccctgagccagattgaaacttctattgcaacagttcagaatacagatatggtccagaaatcagtcagcaaaaccttg

SEQ ID NO: 870064 - DNA, 99 bp, Homo sapiens
gttttcgcctgcagctgctcaccgattttagaaatcttgagctgtgtcttcagtatgctgtctgtgaaataaggctatcattgcgtggcagccaagatt

SEQ ID NO: 870065 - DNA, 99 bp, Homo sapiens
ttgaactactggctgaccatgtttcgaatcagcgcaccatcctgggaagtgcatgtctcagaccaactccaccttcaccttcaccacctgtcgcatcct

SEQ ID NO: 870066 - DNA, 99 bp, Homo sapiens
cgggctcgggggagcgtgagttgcaggttgaaatcacaaagattagacacctttttagataggtgttcttcagcaccactgacaacacggttctgacag

SEQ ID NO: 870067 - DNA, 99 bp, Homo sapiens
tgaagggcagtggaccttggaaatccaagatctgccatcccaggtccgcaacccggagaagcaagtgctcatcttcaaactctatcagcgggcaaagca

SEQ ID NO: 870068 - DNA, 99 bp, Homo sapiens
taccgggattccttgccccagttgttcagggcgacagctcagtgaagtcttcattcagttaccttcaaggaaagaattaccagaatactatgaattaat

SEQ ID NO: 870069 - DNA, 99 bp, Homo sapiens
gtttacttgtaaatatgcagattatatttctagggacaaacctatcacatttactcaggtattgctggccttttcacaattttctcaagttttgtattc

SEQ ID NO: 870070 - DNA, 99 bp, Homo sapiens
gtgtggacatctgctgccggaaggggtcccgaagccccctgcaggaactctacaacccaatccagatggggcgcctacccttcttcagcaagatgggaa

SEQ ID NO: 870071 - DNA, 99 bp, Homo sapiens
ctctggtctcatggaaatggcagcctgcccaccacccacgcttgcccagcctttcttcacgcatcaaaccggcacgatgtccaggcaccagaaccagaa

SEQ ID NO: 870072 - DNA, 99 bp, Homo sapiens
aaaactgaggatcctgacttgccagctttctactttgaccctttgatcaacccaatctcccataggcactcagtcaagaaacgtgaagagggctggtgg

SEQ ID NO: 870073 - DNA, 99 bp, Homo sapiens
ccagccccttgtcagccagggctgaacccccgcaggttgggtggcccagaccccttggactatgttagcatgtacaggaatgtggggagcccttctgct

SEQ ID NO: 870074 - DNA, 99 bp, Homo sapiens
catcagtggagtccatgctacctgattgcccccgggtctcagcaggttgaatttcaggcaggatctgaaggccaacttctgcctcagcattatctaaat

SEQ ID NO: 870075 - DNA, 99 bp, Homo sapiens
gatggcggctgggccgagtgggtgtctggtgccggcgtttgggctacggttgttgttggcgactgtgcttcaagcgaattaaacaaccaccatgtcgag

SEQ ID NO: 870076 - DNA, 99 bp, Homo sapiens
gtggatgcataggtactttttctgccatgaatttgcattcaggactcagggagtacacacttaccagggtaagcttgatgattaccaggaacgaatgaa

SEQ ID NO: 870077 - DNA, 99 bp, Homo sapiens
atcgcgatggggacaaaggcgcaagtcgagaggaaactgttgtgcctcttcatattggcgatcctgttgtcagcatctggaatcaagagacccatggca

SEQ ID NO: 870078 - DNA, 99 bp, Homo sapiens
cagcaatggctcagcgggctctgaacacagcatcaatggcaggaggtttcctgttgagaaaatatttacaccagcagctccagttcataccaataaaga

SEQ ID NO: 870079 - DNA, 132 bp, Homo sapiens
ttgaccacagaactctgcttggaggaggttgaccggtgttggaaaacatccatagggccagcttttgttgagcagtcgaactgtcccggcgccaccccatcgcgtcctggctgtgcgccatgctgcattgct

SEQ ID NO: 870080 - DNA, 99 bp, Homo sapiens
tattccatgacttggatatgctgacgactgtgcaggaagaaaacgagccagtgatttacaatagagcaagagtcaatgcatgtgttgatgtggtgctct

SEQ ID NO: 870081 - DNA, 98 bp, Homo sapiens
gacccctctgacaagggagaacagcaccttcagtataaacgatgctgcttcccacacaagctaagggagaacattgagcaattcttcaccaaatttgt

SEQ ID NO: 870082 - DNA, 99 bp, Homo sapiens
agacccatttcctgcccttgaaggtttgcagtctcaagggggaaagcagtacaacctttacaagcagttatcaagggggggccctcagcctcttggcct

SEQ ID NO: 870083 - DNA, 99 bp, Homo sapiens
cgcagaaacaagaggccgagccgtgtcgaagatgtacaagattctgctgtactcattggatggccggttgttgtccacgtacagcgcttacgagtggtc

SEQ ID NO: 870084 - DNA, 99 bp, Homo sapiens
cacgttctccaatgcaatgctgtttgccctgaacatcatgaattcccaagaaggaggaatgggacaacaaccagatccagcctttggtcgagtgtctag

SEQ ID NO: 870085 - DNA, 99 bp, Homo sapiens
acaaacaaaacctgtgaagagtgcctgaagaacgtctccctgcaccacctcgtgagcgatgacgtctgcctgaaggtggtggagctctacctgaacgag

SEQ ID NO: 870086 - DNA, 99 bp, Homo sapiens
tccagttgcttctaggattcattggaaggggtaatttgcagaggactactgagcccagccaggctgtatgccattgctgccaaagaaaaagatattcaa

SEQ ID NO: 870087 - DNA, 99 bp, Homo sapiens
gtggttgtacatttccgaaggtctcagtttctctcactttcagcccgcgagttcctccgcttctcctttagcagcaccctggaggggtattatgtggat

SEQ ID NO: 870088 - DNA, 99 bp, Homo sapiens
cgtgatccttggtcccgagggcctggccccagcttggagatggcatataagagatcatagtttatgactggggtcgcatcttccacttgtttccatccc

SEQ ID NO: 870089 - DNA, 98 bp, Homo sapiens
tcatccactgctcgctgcctctccaggaattacatgaatgacagtcttcgaaccaatgtgtttgttcgatttcaaccagagactatagcatgtgcttg

SEQ ID NO: 870090 - DNA, 99 bp, Homo sapiens
aagatgggaattaccttcatccctctctctttgcctccaagaagtgtaaccgccttgaagagctgatgaaggtgatactgtgcttgtccaccgagttca

SEQ ID NO: 870091 - DNA, 99 bp, Homo sapiens
gattctggcatcagggaggctttcagccggagaagcgagtttcagctggagttgaagaatgctgaaatagctttaagaacccagaagacaccacctgga

SEQ ID NO: 870092 - DNA, 99 bp, Homo sapiens
ggggcatgcctcttcctcacgctgggctccaggggacagaggctggcatccggctcattcacgcatttgcagaaacctacccagatgctgaggctgaca

SEQ ID NO: 870093 - DNA, 99 bp, Homo sapiens
caggtctggagctcgaccgggccagatcacaaaatttgtccaggatagacatagagctagaagaaacagacttcgtaaagatcaacttaagaaacttcc

SEQ ID NO: 870094 - DNA, 99 bp, Homo sapiens
ccctcacgaggccgtgggtacgaccggaagccgcagggtaaagttctttacaaagttcgctggaaaggctatacatcggatgatgatacctgggagccc

SEQ ID NO: 870095 - DNA, 99 bp, Homo sapiens
tgcaagaacacctggatacatacaatgtgaaaagagaagccgctgagcaggctttaaaggagatagatgaagttggggacctattgcagctgaagtatt

SEQ ID NO: 870096 - DNA, 98 bp, Homo sapiens
gtcagagcgagcttcggagaagcagtggtgggttccatgtgatggtggagtaggaggcaggtctccgcggcaagaaaattggatgtatattttgaata

SEQ ID NO: 870097 - DNA, 99 bp, Homo sapiens
atttttcttccttctgtcacatcacacccaatgctcatgggcctcctgagtgacccagaattaggtccagcagcagctgatggcttctctctgctcatg

SEQ ID NO: 870098 - DNA, 98 bp, Homo sapiens
tgagctgcagcactccagccactgctgtctccttagctgctcacatatggatactttcacagttcagtatgacatgatgggaagaaatcagactgctg

SEQ ID NO: 870099 - DNA, 99 bp, Homo sapiens
ggcgtgagccaccacgcctggcctcactcaaacagtaaacgagatgagtataggatcaaaccagtggaagaggtcaaatacatgaaaaatggggcagaa

SEQ ID NO: 870100 - DNA, 99 bp, Homo sapiens
gtggatgtaataggagagaagatctataaggatggagaacgcataatcactcagttggctgataccaagaagaaagtagatgacgacctgggaacaatt

SEQ ID NO: 870101 - DNA, 99 bp, Homo sapiens
gcaatcctcagacgcctcacttaggacaagaagaggatcacctagcccgggtagaagaggcaatcacccgtatgcttgtgtgtgccctgaaaactgcag

SEQ ID NO: 870102 - DNA, 98 bp, Homo sapiens
ttgcacatccccacatcaatgcactgccaatggaaaacggacgatgtattactaagctggaaaacatggggtttcgagtgggacaaggattgatagaa

SEQ ID NO: 870103 - DNA, 99 bp, Homo sapiens
ggcgacccgacccccagggcccggtgctcaggacagtactatactggcaattgctggagaagattttgcaattgttgcttctgatactcgattgagtga

SEQ ID NO: 870104 - DNA, 99 bp, Homo sapiens
gaaagggctccaaggagccctgctcctgaagggtccctcaggcactggtggagacctgtcgcttcgtagcaagtagactcttggtaacaaatttaagaa

SEQ ID NO: 870105 - DNA, 99 bp, Homo sapiens
gaggaaaagagtcgctttctctgcactggggaacaaatggttgctgctccagatctcttctccatactgaatccatgtgccagattcattcttccaata

SEQ ID NO: 870106 - DNA, 99 bp, Homo sapiens
tcaagttgtgtgattaagacaggtgctccatacttgcttgcagtgcctacgtggctctggctttgggtgataacctcatggctttgaatcatgcagata

SEQ ID NO: 870107 - DNA, 99 bp, Homo sapiens
tttaccactactacagtcgaatggccaactatcggaacacgagcgagattcctctggttctggtgggaacccagggagaagatggtataaactggtcca

SEQ ID NO: 870108 - DNA, 98 bp, Homo sapiens
gtggctgtggctgtgttaggagggttcttatatgctgtaggtggctctgacgggacatctcctctcaacacagggtctcgccctgtcacccaggctgg

SEQ ID NO: 870109 - DNA, 99 bp, Homo sapiens
ctggaattcctctgcaatttcttttctactttattaatagttccgcccacggccgccaatcccactctcgctcctgctgacagaagaggaagcagccct

SEQ ID NO: 870110 - DNA, 99 bp, Homo sapiens
tcggtgcctgcgttctgaagcccgagaggagccacaatggagacgccgccgctgcctcccgcagttactggaggtgaactgtttgaagacatagtggca

SEQ ID NO: 870111 - DNA, 99 bp, Homo sapiens
ccgccaagactccattgaagattcaccctctggtgcggctgcccctggcaactatcgtcaaagatctgggctgggtggagaaggaaacctactattagc

SEQ ID NO: 870112 - DNA, 99 bp, Homo sapiens
gggtgaaacaggtgctcctggattaaagccacaatggtgcgcatgaatgtcctggcagatgctctcaagagtatcaacaatgccgaaaagagaggcaaa

SEQ ID NO: 870113 - DNA, 99 bp, Homo sapiens
caacggccaacttcggcaagatccagatcgggatttacgtggagatcaagcgcagcgatgggagtaccctgacttctaccggaagctctacggcctctt

SEQ ID NO: 870114 - DNA, 99 bp, Homo sapiens
gtcaagtcccccaatctctgccatcaaggccgattttctttgaaccttcagcaaaggtagctacagcaagctgggtagcaggcagatccaaaggatatc

SEQ ID NO: 870115 - DNA, 98 bp, Homo sapiens
gagcactgtagcaccaaagtacctactatgtgtgtggactggagtaacatcagacaactcttttgctagacctgatgcacaccctgcacacgcgggca

SEQ ID NO: 870116 - DNA, 98 bp, Homo sapiens
gcaaaactcaggctcagatgcggagcagcttcaactcaatatcatgatattagcacagagctcgttttgacaggagccattcaagtagcagacaaagt

SEQ ID NO: 870117 - DNA, 99 bp, Homo sapiens
ccgaaaagcgtttccgcagacagaagtggggagaagcggaggtccggccgtagcacctccgcgccgtcgccatgtcgcggtttttcaccaccggttcgg

SEQ ID NO: 870118 - DNA, 98 bp, Homo sapiens
tcctctctgagtcaaatccagtgtttcaggtttagctgtgcctcccagtgactataatgacaaggaagctgtaaatgtatttgagttaagcttttgcg

SEQ ID NO: 870119 - DNA, 99 bp, Homo sapiens
gtgagcacttctggaagatcattaatgccttccgctactacggtcccagaaatcctggattaaaggagtatttgacaagagagaatgtagcacaatcat

SEQ ID NO: 870120 - DNA, 99 bp, Homo sapiens
cacacacagtgggacctagacaaagggagagggtgaccgacatcccaactaggtgagcacctgcggatctgtccccagggctacacctgctgcaccagc

SEQ ID NO: 870121 - DNA, 99 bp, Homo sapiens
cctgggtgacagagcaagacctttttgatttctcggagcagcattcggataaggatggcctgaagtggttcaaccatcaatttcctccacatatccaat

SEQ ID NO: 870122 - DNA, 99 bp, Homo sapiens
gatcatcgccatcagtttgttggtgggaatcctcatcttcctgctgctggccgtgctgctctggaagccaccagctaagtaccttcttccagaggtgac

SEQ ID NO: 870123 - DNA, 99 bp, Homo sapiens
cctcaaccagatgaggaagtacaactttgagaggcggggtttcaccatgttgcccagactggtcttgaactcctgagcttaagcaatccacctgcctcg

SEQ ID NO: 870124 - DNA, 99 bp, Homo sapiens
ccgagagcgcgaatatcgtcatcgttagaaggtaaaagtgcagttttaaagtgtctcctggatattcacaaaatttttcaggaaaatgacccagcgtac

SEQ ID NO: 870125 - DNA, 99 bp, Homo sapiens
cgaggaagaggaggtttctgagccatgaagactttgaatttatttcaggaacacgaatgcgcaaacttgctcgagaaggccagaaaccacctgaaggtt

SEQ ID NO: 870126 - DNA, 99 bp, Homo sapiens
ttatgatctacctaccaatcgtgaaaactatattcacaggatcggctgttttgactctcctgttggccggctatttggcacaacagtatttaccattgc

SEQ ID NO: 870127 - DNA, 99 bp, Homo sapiens
gggagccaagctggagtttacacaggcaaactgtcagaaaagagtagcctgggctgtctggaaatctgaggtttttcccactcggctttcacgtttggg

SEQ ID NO: 870128 - DNA, 99 bp, Homo sapiens
gtcttggtcagttttattcccgctgacacggtagagtccttcggtacataaccccttctacaaatactcgaagaagaacatccatgagaaaaaataagg

SEQ ID NO: 870129 - DNA, 99 bp, Homo sapiens
gtaaccagttctcatcccaaatatcatcacctatggtcactgactccaggcatggcattccagtggggatctcatcctgtaatcccagctactcaggag

SEQ ID NO: 870130 - DNA, 99 bp, Homo sapiens
cgttgaacaccttgatgacaccatcagagacagccacaccggaggcctgccaaaaagaaatgtggctgtcagtgtttgagtaggtggcaagatatcttc

SEQ ID NO: 870131 - DNA, 98 bp, Homo sapiens
aaagctcaaaatgaggaaattctgtatgttcttcgccattatattcagtttttggctttcacccccaaccagtgaccaaagacttgaccactcaaagt

SEQ ID NO: 870132 - DNA, 99 bp, Homo sapiens
gcagtaactggctctccggggtgaatgtcgtgctggtgatggcctacgggagcctggtccagtgcacgtgccaacattacactgtcagggaagaagcgc

SEQ ID NO: 870133 - DNA, 99 bp, Homo sapiens
gtagagatggaaacctcatagcagctgcctgccagaatggaagcatacagatctgggaccgaaatttgactgaatggtcctcgtccgaagtgagaatgg

SEQ ID NO: 870134 - DNA, 99 bp, Homo sapiens
caactgcagactgtcctattgcatctcaagccatcctgcagctccaccaaagaaaccgcctcgccctggagctcccggtcatctgggaagccttgccag

SEQ ID NO: 870135 - DNA, 99 bp, Homo sapiens
atgcatgcaccaaaacgaggacagggttacacatcattttggaatgactgtatatcatctggattacgtggctgtatgttaattgaattagcattgaga

SEQ ID NO: 870136 - DNA, 99 bp, Homo sapiens
ctatgctatgaatttatacaaggagaagcactggatccaaagcatgtctgcaacccagccattttcaggtatacaaaactaggatatgctggaaataca

SEQ ID NO: 870137 - DNA, 98 bp, Homo sapiens
tccctctcaaccacaataacaggcggagggtcggcgtagtgtttgccagctctgagcctgtgccaggattccagggggataccctgcagctagcattc

SEQ ID NO: 870138 - DNA, 99 bp, Homo sapiens
ttagctccagatttgatggccttcacaatccaagttccacaatatattgactactgccacaattccgataaacttctgcactggaggggcctctcctcc

SEQ ID NO: 870139 - DNA, 98 bp, Homo sapiens
gacactatagtcgagccaaacagacgctccctgtgatttatgtcaagcaatctgcacatcgtgctgccacacgaggcttcattcgttatggctggcgc

SEQ ID NO: 870140 - DNA, 99 bp, Homo sapiens
gtcagaggggtgaccagagagcccaacgcctggtgctcaagactttctccgagacaagttggatggcttgaggactggtactaaaaggaaacgtgactg

SEQ ID NO: 870141 - DNA, 99 bp, Homo sapiens
tccaagtctccgaacagagccacacgactcccgctggctcaatgacacctggatttcattagcatcatgacctacgattttcatggagcctggcgtggg

SEQ ID NO: 870142 - DNA, 99 bp, Homo sapiens
ttgaatgttgaagatgtccttaccagctttgacaatacaggaaatgtttgttcaaaccttgtactactcagctgatcacaagctgcttgatgggaacct

SEQ ID NO: 870143 - DNA, 102 bp, Homo sapiens
gcgtccgccgattcctcctccttggtcgccgcgtccttggctggcgtgtgtttgtggagctgaatgagttgctcctggacaaaaaccaggagccccagtggc

SEQ ID NO: 870144 - DNA, 99 bp, Homo sapiens
caacagcggcgcgggcaagaagcgctttgaagtgaaaaaggtcagttcaccgggacctggaggcccagattgcgatcgtgacggagaaccaggccctgc

SEQ ID NO: 870145 - DNA, 98 bp, Homo sapiens
tttttgggagactatctttggcaacagtgagctggaagaatctctacttgtgctgcctttctcttatgtcccagacattcttaaactctttaacgaat

SEQ ID NO: 870146 - DNA, 99 bp, Homo sapiens
tgatctcactggaccgcagcgtcaatgacttacgccaagaagagtggtaacgtccttatcttggctatttggggggacaaaggagccccacatatgcag

SEQ ID NO: 870147 - DNA, 98 bp, Homo sapiens
ctctactatggagttctggaacgggactttgcagaaatgtgtgcagactacatggcatctaccatagggatccacaaagcctcagccaccatcatcga

SEQ ID NO: 870148 - DNA, 99 bp, Homo sapiens
tggaaatggaagcccagtcctctcctgttcttatttgctttatatatcatgtgtgttcctcactcaggtgatcagactctgagaatatgggatgtgaag

SEQ ID NO: 870149 - DNA, 99 bp, Homo sapiens
acgccctgacggtcatcaaccagcaggaggactccagcgaggttccgtggggaccccactgcctggagtacaggtgcgcattgtctcagaaaacccaca

SEQ ID NO: 870150 - DNA, 98 bp, Homo sapiens
agccatagcactcgcagagaaatatggcaccagtggcagttcgcagcctccaggacttggctcgcatcgccatccggggcaccattaaaaagattatt

SEQ ID NO: 870151 - DNA, 99 bp, Homo sapiens
tgaacttcaatcccatcatttccagaaaggacatcacagccgccgccatgatcctgctggaggtgaacaaccgcatcatcgaggagacgctcgcgctca

SEQ ID NO: 870152 - DNA, 99 bp, Homo sapiens
attattttgccttaattgatcaactaattgaaggacatcagtggctggaaaataatataggacatggatttgattgacatactttggaggcaagatata

SEQ ID NO: 870153 - DNA, 99 bp, Homo sapiens
caaaacgctgatactaacctcttattcagaatgtcccaacaggctttggccaaagagttgcaaaatgatgtccatgtggtaaggcgacaaataagagag

SEQ ID NO: 870154 - DNA, 99 bp, Homo sapiens
gggatccacacagctcagaacagttggatcttgctcagtctctgtcagaggaagatcccttgcatcttggactcaagtgattctcctgcctcagcctcc

SEQ ID NO: 870155 - DNA, 98 bp, Homo sapiens
gtgctgctgtgcaagaaacgggccaagatccagaccaagaccgtggcccagtgcgtggagttctactacacctacaagaagcaggtgaaaatcggccg

SEQ ID NO: 870156 - DNA, 99 bp, Homo sapiens
ctgacggctgaatgtgccatcgtcaccctgaatgatatggaacctagcaaagctgttccactgaatgcatctaagcaagatggacctatgccaaaacca

SEQ ID NO: 870157 - DNA, 99 bp, Homo sapiens
aagaagaggcaaccacgttctccaatgcaatgctgtttgccctgaacatcatgaattcccaagaaggaggatcccattgaagataccacgctgcatgtg

SEQ ID NO: 870158 - DNA, 98 bp, Homo sapiens
acaagtttgagtgttgctggaacggttcggataggctacgtgcaggcctgccgcgccctgatgattgctgcctcggtcctgggtctgccggccatttt

SEQ ID NO: 870159 - DNA, 99 bp, Homo sapiens
gggattacaggtgtgagccaccactcctggccagaatgattttggtctcatctagttcggcctgcactttagtcatgggatcagcttctcgtgggttct

SEQ ID NO: 870160 - DNA, 99 bp, Homo sapiens
gaaggaagtccaccagcctgccaagatgaattgccttgaaggctggagcattggatttgctaaaggagcttaagaatattcctatgaccctggaattac

SEQ ID NO: 870161 - DNA, 99 bp, Homo sapiens
gtccagcactccacgccccgtagccctgcggttccggttgtgatccatggtcttcagatgcttctggatgatcccaaactgcatgggaatgaagaggtc

SEQ ID NO: 870162 - DNA, 99 bp, Homo sapiens
ggggacaagaaactagagcaaataaccgttttgaaattatcatgatacatggtgatggcttgcagagtcgtaaacaaaagaagacacatgggacttcaa

SEQ ID NO: 870163 - DNA, 119 bp, Homo sapiens
ccctccccgccgcagctctccacacgtggccgcagctgacccctccccgccgcagctctccagtctcctctgcgacgtgacagccctggcttctctgccacacacattttgacatcatt

SEQ ID NO: 870164 - DNA, 99 bp, Homo sapiens
gacttctatctcgtagtgtgcagtgcctgtaaccaggtcgtcaagccacaggttttccagtcgcactgcgattgtagaaggcatgaaacaaaaaatgtg

SEQ ID NO: 870165 - DNA, 99 bp, Homo sapiens
cctggggttaagtctctcatcaaaacaccagagcgactttcattagaaggagagcgacagcccaagtcaccagatcaccatccatcttcaagaagctac

SEQ ID NO: 870166 - DNA, 98 bp, Homo sapiens
gctggcgctcctgggcgagaggcttctggcactcaggtgaaaggtgtagcagtcactcggcctacacccacagcatcgaccttgtgaacccagcgacc

SEQ ID NO: 870167 - DNA, 99 bp, Homo sapiens
ggtaacgttatagtatttgtcagaagttggggtctccgtgggcattgtgatccgtcccaggcagtgggaagcagagactttcaaggaacaaggaaatgc

SEQ ID NO: 870168 - DNA, 99 bp, Homo sapiens
aggcagagtggaaaaaagagaggatttgcttttgtaacttttgatgatcatgatacagttgataaaattgttggatatgcctttcacctgtgaaggtat

SEQ ID NO: 870169 - DNA, 99 bp, Homo sapiens
gcccgggcggctgccgagaaggagggaggggaaacacaaagccggctacgcgctgcgagggggcagcactgaaatacttaccaacgatcgtcaacgatg

SEQ ID NO: 870170 - DNA, 98 bp, Homo sapiens
gacattggaaggagggcagaaatgaatgaacttatggagcagacctcggagatcatcacgtttgccgagtcagggagaaagagagagcgcgaaagaga

SEQ ID NO: 870171 - DNA, 99 bp, Homo sapiens
gaggctcccgccgccgattgacccgcgctccgcccgtagtcgggccgtctggatactcaaaaagcttgtcattcactttggagttgtggatttcctaga

SEQ ID NO: 870172 - DNA, 99 bp, Homo sapiens
gatctccaggaaaccgcgagtgcctaggagcccctccccaccttttccggggaagccctggtcggagcgagccgggcaggctttctattttaaaagtct

SEQ ID NO: 870173 - DNA, 109 bp, Homo sapiens
aaagaaccgttttttgtgaagtttttaaagtcttcagacaattccaaatgtttttttaaagctctcgagactgaatgtggatgtcagttcacgtcaaaactggaaggaa

SEQ ID NO: 870174 - DNA, 99 bp, Homo sapiens
gaggaagcttataaaaatgtgatgaacatgctgatgaggctgcaggaggcagccaactactccagcccccagagctatgacagcgactccaacagcaac

SEQ ID NO: 870175 - DNA, 99 bp, Homo sapiens
gctccaagttttaaagccttgctggggcctgaaggcctaagaggaaggtccgttcccaccaagtctcagacgcctgaactcgtgatttttagggacttt

SEQ ID NO: 870176 - DNA, 99 bp, Homo sapiens
tcatccttccttttctcggggctcccgtgggtctcctctgagcctccggcctccataagacccaaaacagatgacacctcttcccagtcccccgcgcct

SEQ ID NO: 870177 - DNA, 98 bp, Homo sapiens
cggaatgtcatccagcgagtgattagattctccctgactctgctcatctggaccttttctgtgtgtctgccacccctgtgctgctgagtggattccac

SEQ ID NO: 870178 - DNA, 98 bp, Homo sapiens
gggaggagacaggacctttttcaacttgacaaatagaatcgcctaccagaggaatgacgatgatgaagaggaggcagcccgggaacggcgccgccgag

SEQ ID NO: 870179 - DNA, 99 bp, Homo sapiens
tccgtaaccacaaggaggacgagtctatccagaagttaaaggagagattgctcgtaaagatgaaaagctgctgtcgtttctaaaagatgtgtatgttga

SEQ ID NO: 870180 - DNA, 99 bp, Homo sapiens
atgaaactaaatatatcagatatgagaggggtgcacatgaacttgaacagatgcagctgattttagaatctattcctgttgtacatgaggaagatcgtc

SEQ ID NO: 870181 - DNA, 99 bp, Homo sapiens
aaattaacttcaaaactcacaaggaggccttgtgaaaaagggtaaagaacaaaacacacagcgaagcttttttctcagaatgaagtgtaccctaactag

SEQ ID NO: 870182 - DNA, 99 bp, Homo sapiens
aagatctgtaacgctgacagtccccagacatacgatgggagagttgcagtcttgggcgtctttggtactggcttttttaggggtctgcctggggattac

SEQ ID NO: 870183 - DNA, 99 bp, Homo sapiens
cccaagagcggcgaggaggcgctcatcatcccccccgacgccgtcgcggtggactgcaagcttcttaatgaagaggataactcagaatcatcggctata

SEQ ID NO: 870184 - DNA, 99 bp, Homo sapiens
gagaatatggtgcagaggccctccacggtgtttcccattaaacactaccaggacaaaatcaggccttacatccagctgccatcgcacagcaacattact

SEQ ID NO: 870185 - DNA, 99 bp, Homo sapiens
gcaggcactgagctgtctgtgcgcgatggagtgtcgctctgttggccaggatggagtgcagtggcatgatctcggctcactgcagcctccaccacccga

SEQ ID NO: 870186 - DNA, 99 bp, Homo sapiens
tttggatatgttttatttaatgtggtggcaattcatccaaggggtgatgttctcccagcatttggacacacagggctgtaatcccagtactttgggagg

SEQ ID NO: 870187 - DNA, 99 bp, Homo sapiens
tgcccatcgacatcttcgtagacatactccttttcctgaagttgtaccagcttctgctggtaggcatctctctgtgcgcacacctcctggtactgctgc

SEQ ID NO: 870188 - DNA, 99 bp, Homo sapiens
tactcgttaaagttgatgcaaagacaaaggcacagctggatgaatggaaagcaaagaagaaagcttctaatgggacggtatccaactgttgaaaaacga

SEQ ID NO: 870189 - DNA, 99 bp, Homo sapiens
atcgacgactgtgacttgctccattgatatgttgactccactcctgtttaggtgtaaccccaggcatgcgaatatccaatgcaaaatctgatgaatcaa

SEQ ID NO: 870190 - DNA, 98 bp, Homo sapiens
gggacttgaacaggaagctggacgctgcagctggaactagcgtgccaagaatttcacggtccctcatggtgtctcactccagcagacagaggattgtg

SEQ ID NO: 870191 - DNA, 99 bp, Homo sapiens
ctcgccagcccggcgccccggtgctgagcatatagcactttctacattgtgggtttaatattatcaatgcagataccttttgtgggattccagccaatc

SEQ ID NO: 870192 - DNA, 98 bp, Homo sapiens
cacttgtgatgccctgactgagctgctggctaagatcaccaacacagacgtgggacatccaacgggctcatagagtggtagctgagcttcaggctggg

SEQ ID NO: 870193 - DNA, 99 bp, Homo sapiens
cctggataccaagaagtgactgctcatctaatccataaagctatgttaacagattggagccgccgccatgtctgcgcatctgcaatggatggtcgtgcg

SEQ ID NO: 870194 - DNA, 98 bp, Homo sapiens
tgctattggtcaaaagagatccactgttgcccagttggtgaagagacttacagatgcagacccgggaagaaggtaaggccttactccggcaaatccta

SEQ ID NO: 870195 - DNA, 98 bp, Homo sapiens
cctagcaaagactattaccagttactggtcacccggtctcaggagaataaaggcagccccgttgatgactgaaaatgacaaagcatccacctaacaga

SEQ ID NO: 870196 - DNA, 99 bp, Homo sapiens
gaattaacaagcaggagtttggctggttgattccaatgattctagcttggggcttaagaaatatgaaaaacttccagatggcttctatcacatccccca

SEQ ID NO: 870197 - DNA, 99 bp, Homo sapiens
cccccctactcttcatctcgtctgtacccagggcttcctgaggctgcggtggtcacgcttcgcccgtgtcctcctcacccgctcctgcgccatcctgcc

SEQ ID NO: 870198 - DNA, 99 bp, Homo sapiens
cttctcaactgttgtcctcatgatgtcctttctggaactgaagtgtttggattgtgagctatttcagaactgttctcaggactcattattttaacattt

SEQ ID NO: 870199 - DNA, 99 bp, Homo sapiens
cttgcctgcccgacggctctcctctgactgcagcgtcactcaggaggttgaaacggaacagtattacagtttttttctggtagagctgaaagaacgtgg

SEQ ID NO: 870200 - DNA, 99 bp, Homo sapiens
cttacactgaaacggaggctaccaactccctcatcactgctccgggtgaattctcaggactcgggcagccgcaagtagctcctccagcgccagcagcca

SEQ ID NO: 870201 - DNA, 99 bp, Homo sapiens
ctaaattgcacttttccaatgcttttggagacccaggccactcccatcttaagcagatagcacagtagtctcggaactttgagtagtcatcagacaaaa

SEQ ID NO: 870202 - DNA, 99 bp, Homo sapiens
agtgaggaattttgaagtacaccgtggtgacattgtatcattggtgaaatttacatgccacttatgtgatagaagtttcacagagaagtgggccctgaa

SEQ ID NO: 870203 - DNA, 99 bp, Homo sapiens
tccatttgtaccacagaaccaacgtccaatggggttgatcaatcaaccactgtgagccaatccttctacaaatactcgaagaagaacatccatgagaaa

SEQ ID NO: 870204 - DNA, 99 bp, Homo sapiens
tcgccacctaaggaagtcctcggcaattacgagattcttgccggtggtggtgtgcacattgagccccggtatagacagttcccccagctgaccagatcc

SEQ ID NO: 870205 - DNA, 99 bp, Homo sapiens
cagacccacaaggtaataataattggcaatggattgataagacaccttatgagaaaaatgtcagtggaaggaggcatgcatccccagctgataccttcg

SEQ ID NO: 870206 - DNA, 98 bp, Homo sapiens
aagtattcaccagttaatagcaccagtcttaggaaaagtcctcagtgctgtgggcagtgcccagctactgatgtcccagaaattccagcagttccggg

SEQ ID NO: 870207 - DNA, 98 bp, Homo sapiens
ggcattgacctctcagatcccaaacaactggcagaatttgctaggttatcaatactctggctgaccatcatcatcgtgggactgactttggtggaagt

SEQ ID NO: 870208 - DNA, 99 bp, Homo sapiens
gccgtggtcagccgcttcgacgagcagagtgaccgtctccttatcaagggaggcagaatcgtcaatgatgatcagtccttttatgctgatatttacatg

SEQ ID NO: 870209 - DNA, 98 bp, Homo sapiens
gctgctaagtacatgctggattgtagaacttctctctcttattattttggcgacttcaatttgccacgggacaagtttctaaaggaacagataaaact

SEQ ID NO: 870210 - DNA, 99 bp, Homo sapiens
cgggcggcccctggagatgattgagccgcgcacgctacagtacaaggccgccatggcatcagatgaaggcaaactttttgttggagggctgagttttga

SEQ ID NO: 870211 - DNA, 99 bp, Homo sapiens
cgagagcgcgaatatcgtcatcgttagaagttcatttgatgaatacagttcagaacttaaatctggaaggttggaatggagtcctgtgcacaaatctga

SEQ ID NO: 870212 - DNA, 98 bp, Homo sapiens
tgcaacagtatgcacagagagataagaaacatgaatattggtttgctgtgccacaagaaagctttcccatggtttggcatggacattgggggaactct

SEQ ID NO: 870213 - DNA, 99 bp, Homo sapiens
ggcatcctgtgctgtgggggctacgaggaaaggggcaacaccctccactaaagagtcaagccagccggacgcattctcatctggtgggggaagcaaacc

SEQ ID NO: 870214 - DNA, 99 bp, Homo sapiens
ctgggcaacaagagcaaaactcacactgtataattggctgcatttaactcaatagcatcccgggttagcttaaaagctcgttcacttctttcatcacgc

SEQ ID NO: 870215 - DNA, 99 bp, Homo sapiens
gactggggtgtggaaaaacccggtactgtgcactattctttcccaggaaccattggataaggataaaggtacaacttggccaagtagaaatcaaatgcc

SEQ ID NO: 870216 - DNA, 99 bp, Homo sapiens
ctccgctgtgaaaagctaactttcaacaaccccacagaggactttaggagaaagttgctgaaggcaggaggggattatcattggcaatggcgttcattc

SEQ ID NO: 870217 - DNA, 99 bp, Homo sapiens
gcggatcaggatcggaagcctgcgtaactttctcccttgatccgggagtctttccactgggttggatttggtctagggagtcccagaaagaagtagaaa

SEQ ID NO: 870218 - DNA, 99 bp, Homo sapiens
ttggttttccagaaagctgtaatcatgtcttctgtatgacttgtattcttaaatgggcagagctggtgagagagtgtaaggaggtcctgaagggcggcc

SEQ ID NO: 870219 - DNA, 99 bp, Homo sapiens
ctcgtcctgcgattggaatgtgtttaatacagctgccaatcacatacccttcagcctgccatggtctttcccaatccagtggaataggaagtgctccaa

SEQ ID NO: 870220 - DNA, 98 bp, Homo sapiens
tcaggtctggagctcgaccgggccagcatcagccactatgtgattgtcatgtccatgaccatctttttggtgttcctcaatggcctggcccagctgct

SEQ ID NO: 870221 - DNA, 99 bp, Homo sapiens
cttttcttatgctgggatgtgccttagaggattatggcatgattccacctttccactgatagactcaagttcccagaaccagattagaaaacgcatcgt

SEQ ID NO: 870222 - DNA, 98 bp, Homo sapiens
agggatgtggaggtgatggggggccggggaggatcatccaagcctagaaaacatggaacagatagagaaatttcaggaaaaggcttatgtggaattcc

SEQ ID NO: 870223 - DNA, 99 bp, Homo sapiens
tgcatgttcagtctgccacagaacatggcaatctggggttcagccagcaggccagcattaccatcagtgggtaccattttccgagatctttccaatagc

SEQ ID NO: 870224 - DNA, 99 bp, Homo sapiens
tcggctggtgaagaacctgcaaccccgaatttattgtccctttgctgggtattttgtggaatctcacccatcagacaaatatccatttggggatgaagt

SEQ ID NO: 870225 - DNA, 99 bp, Homo sapiens
ctgcaaggactccaaagtggtgaggagaacacaaagttatacctcaatttacttgaaatggaatatagtggtgacctcaaacaaaatgaagaaaatatc

SEQ ID NO: 870226 - DNA, 98 bp, Homo sapiens
cagttcagaagagccaaggaataaacatgcaatgaacccaaaaggggaacagagttcagaggcagcagaaactggagttagtgaaaatgaagagaacc

SEQ ID NO: 870227 - DNA, 99 bp, Homo sapiens
gagtcccaccatcttccatccctgatgcttggagaagctgaggacacacaggcaaaagctgatgaagcattgaaagccaaagaaagaaatgaggaagaa

SEQ ID NO: 870228 - DNA, 99 bp, Homo sapiens
gttggacgctatgctggaagaatttaagaaaggcacattgcaagcaacccgtgccttgatggtggttggcatcctcctgggagtgatagcaatctttgt

SEQ ID NO: 870229 - DNA, 99 bp, Homo sapiens
ccctaatgcatcgtacacagcttctgttatttcagcttctagtccaagggctacagctgaaattttctacaagatcattggttgtaacccacgatgtaa

SEQ ID NO: 870230 - DNA, 98 bp, Homo sapiens
ccctccgtgctaactgttccagatgctagtgatcaaagagaagatgtttatattggaaaccacatgccttgccctgaaaacctcaatggttactgcat

SEQ ID NO: 870231 - DNA, 100 bp, Homo sapiens
aaggggctcatactcatcttatgggagagaatcaaacaaaataggactggtggcaaccctgtaagtttgattctctcccataagatgagtatgagcccct

SEQ ID NO: 870232 - DNA, 99 bp, Homo sapiens
gtacacgataattaaagagtaaagttgtgctcaacggtgaagctttgttctaagaatatttgtttcatctagtttatgagtccaaatgatatagactgt

SEQ ID NO: 870233 - DNA, 99 bp, Homo sapiens
aggacaatctccagcatggcctggtctcctctcctcctcactctcctcgctcactgcacaggtttaagtttttgaaactgaagtaggcctacacagtag

SEQ ID NO: 870234 - DNA, 99 bp, Homo sapiens
ggttggtatggtgcatgtgaggatgccacattgttgacaggtggagggcctggaaatatgaaaaactgggaaccattggtatgtttccctcgatttgcc

SEQ ID NO: 870235 - DNA, 99 bp, Homo sapiens
tatctactggaacatggacaggaactgtggacagtgaagagaggcctctcccaaagcacctgcgcaggtgaccaagaatatggcccaggtgaccaaagc

SEQ ID NO: 870236 - DNA, 99 bp, Homo sapiens
gaacccatcgggcagctacacatcttgaaagagaagctcttcctgtgaggtaaaccaggtatttatgaagacagagaccccctgcgagtctcaataagc

SEQ ID NO: 870237 - DNA, 98 bp, Homo sapiens
tcagtaatgctggggaccctgagatcgtcaagtctcccagcgaccccaagcaataccggttcagcttgttggtttagatgaggagagttcagagttta

SEQ ID NO: 870238 - DNA, 99 bp, Homo sapiens
aattgggcagaagagaagcagtgaaggagtgcagaggcatcacctgaaagggacctgtccatgatcctgtgtgaccccttcgccatcaacacgctggca

SEQ ID NO: 870239 - DNA, 99 bp, Homo sapiens
aaaacatttttcagggacgtagccatccagagaggctgacccgcggctgattgagtccctctcccagatgctgtccatgggcttctctgatgaaggcgg

SEQ ID NO: 870240 - DNA, 99 bp, Homo sapiens
cgaatatcgtcatcgttagaagtccaacatgtttaccgtggctgatgtgttgagtcaagatgaactgcgcaaaaagctataccagacgtttaaggatcg

SEQ ID NO: 870241 - DNA, 99 bp, Homo sapiens
cgggaggatggggacgtggtccccgcaggttctggatagacgtgcgaattgagacgcaattgaccctgaaagtcacagtagagacagggtttcaccgtg

SEQ ID NO: 870242 - DNA, 99 bp, Homo sapiens
ttggctctttagctgaaatacttctgaaggatggaaacttctctgtcagtactatattggaaaaacctcaaaatatgatggtggttggacagtcagcat

SEQ ID NO: 870243 - DNA, 98 bp, Homo sapiens
ctagacaaagggagagggtgaccgacatcccaactagcgagatgatccgccacccgtatgagacccagtctgacagcttctacttcgtggatgaccgg

SEQ ID NO: 870244 - DNA, 99 bp, Homo sapiens
cttaaagtgccagagtgaaagccagaatggcatccagagagaggctctttgaactttggatgctttattgtacaaagatatcagttttagagaatgtgg

SEQ ID NO: 870245 - DNA, 99 bp, Homo sapiens
cggaagaggaaggaacaaaaggtcccggaccccccggatctgacggggcgggacctggcgccaccttgcagatttggagcaagaggtggtggtggcctt

SEQ ID NO: 870246 - DNA, 98 bp, Homo sapiens
tctcaatgaggagaccttcatcaacaacctcaagaagcgctttgaccacagtgaaatatacacagagagtgcatgggctgaagaatactctgaaaaga

SEQ ID NO: 870247 - DNA, 99 bp, Homo sapiens
gaagatgcctcgaactaaacaaattcatcccagaaatctaagaggtcatgaagaaggatatttcacagctataatgttgaagaaatcaagagtgaaatt

SEQ ID NO: 870248 - DNA, 99 bp, Homo sapiens
agcacaaaaacctgcctcaaagttgagattatagagaaggacaccaagtacagtgtcattgtgatccggagaaccctctctttgggtctggattgggac

SEQ ID NO: 870249 - DNA, 99 bp, Homo sapiens
taaaagacaatgctggcaactgggctctaatctcctaaagatagacagctcaaatgaattgaatgaagaagcagtacgacgtctcatctgggaaaagaa

SEQ ID NO: 870250 - DNA, 98 bp, Homo sapiens
ctacttctcgctctgcttcatcccactattattttggcacaacaggaagctgtaacccagacttacggtggcaactcaaatggagagccatgtgtctt

SEQ ID NO: 870251 - DNA, 99 bp, Homo sapiens
ttgaggtgaatgtcggaatccattatctttcgggaaagctctctggggcagggcaaagatgccttttgatgccaacaaactgtattgcagtgaagtgct

SEQ ID NO: 870252 - DNA, 99 bp, Homo sapiens
gaactggattaataagcaacagggaaagcgtggctgggggcagcttacctctaacctgctgctcattggcatggaaggaccagttacagaagtggatcc

SEQ ID NO: 870253 - DNA, 100 bp, Homo sapiens
ccggctggtgaagaatgattccagcgtggggaagtaggagagttccctcgcaagaaatgtcagcctctgtccccacgctggaatcattcttcaccagccg

SEQ ID NO: 870254 - DNA, 102 bp, Homo sapiens
gctgtggtttagtcaaaaagccatgtagaatgcctgccttttgaagaccacttttaaggtgtctagtaagacagcagatggagtcttgctctgtcaccaggc

SEQ ID NO: 870255 - DNA, 99 bp, Homo sapiens
ggatcggcatctagtctttccgcttcttgaatttctctctgtaaaggaggagcttttgatgggaggccagcagactatttattcatgctcctctttaac

SEQ ID NO: 870256 - DNA, 99 bp, Homo sapiens
gtttgagaccagcctgaccaacatgggcaccccggctctgccccagactggcataccaacagaggctttggtgaaggggtccatttcgagaatgcccat

SEQ ID NO: 870257 - DNA, 99 bp, Homo sapiens
gtcttctacgggatcatgtttgatgcaggaagcactggcacccgagtacacgtcttccagttcacccggccccccagagtagagatggggtttcaccat

SEQ ID NO: 870258 - DNA, 99 bp, Homo sapiens
cacagccctcttctgcagcacatggtcttactggagcagccgccggcacaagcacccctcgtcacaggagcaatttacagcaatgagggatttatacat

SEQ ID NO: 870259 - DNA, 98 bp, Homo sapiens
cgagggagaataagctgtaccatcgcaagccataaaattttgagtagaaaaatccagaaatttgaaaatcagtatcgtggtagagagctgccaggctt

SEQ ID NO: 870260 - DNA, 99 bp, Homo sapiens
ctggcatacagcgcggggttcctcttctcctcctcagaagggctgtacacaggaaggaactggcaaaaactctatcattgaaagtgctggcaggaccac

SEQ ID NO: 870261 - DNA, 99 bp, Homo sapiens
gcttggctatgtgacgctgctggaggaaacacctcaggacacggcctacaacaccaagagaaagtttcctacactactgaggtttaggggcactgtgaa

SEQ ID NO: 870262 - DNA, 99 bp, Homo sapiens
cgcctgcttcctctgctcgcggttagcccgtcagtccctgctctgtgcgcgcctccatctgggccatggatggatttgtagccaaaccgtgcgccatag

SEQ ID NO: 870263 - DNA, 98 bp, Homo sapiens
cttaatctgggccaaaaggaatgaccctagccagactcagggatcaaagagcaaacagattcagtggcctgcattgatggagtctcgctctgttgccc

SEQ ID NO: 870264 - DNA, 99 bp, Homo sapiens
gcatctagtcctgagcttcccaccgaagatgaacagggttcctggggcatcgacgatctccatatttcattgcaaggtgtaaagcaggccctctggctc

SEQ ID NO: 870265 - DNA, 99 bp, Homo sapiens
gctgtccttctttgtggagagcaagtagagacctggttttaccatgttggccaggctgtggtctcaaactcctgacctacggtgatctgcccacctcgg

SEQ ID NO: 870266 - DNA, 99 bp, Homo sapiens
aggtggtccagagtcatgctcatccagccccaccagttgcaccagtgcagggacagcagcaatttcagaggctgaagcttgccaattctgtaactcctt

SEQ ID NO: 870267 - DNA, 100 bp, Homo sapiens
gaagagccatggaaacaggaggaagaattgaagcatcttcaatttctatcacctggaaagctttggcttgggaattcttcctcctgtttccatggctctt

SEQ ID NO: 870268 - DNA, 99 bp, Homo sapiens
cctccaccaccggcagcatcctgaatcttaacctgggcctggagctgctgaagactgctattgggaaagctggctacactgataaggtggtcatcggca

SEQ ID NO: 870269 - DNA, 99 bp, Homo sapiens
ggggccatggacccctccgacggcattggagccctcatcgaggaggagcgcaccgctgtcaagctcaacactggggccataggaaaaggatacagagta

SEQ ID NO: 870270 - DNA, 99 bp, Homo sapiens
cagacattccagaaatgctgttagaaggaataaagggattcattcctcattttaactgatgttacagtgaagatgggttcttgaactcttggaagcctg

SEQ ID NO: 870271 - DNA, 99 bp, Homo sapiens
gtaatggcggagcgtggcggggacgggggcgagagtgaacgattcaacccgggggagctcaggaatgtatcctgtcaggtataatgtcagtgaatggca

SEQ ID NO: 870272 - DNA, 104 bp, Homo sapiens
gtgaaaaacaaccagagctgcagataagtgaacgagatgttctctgtgttcagattgctggactttgtcatgatctcgatggagtctcgctctgttgcccaggc

SEQ ID NO: 870273 - DNA, 99 bp, Homo sapiens
cactggtcgcactgagggtgaagtggcaggaggaggaggaggggctccggctggtctgtggtgaggcttcaccatcatcatcgagccctttgacgacag

SEQ ID NO: 870274 - DNA, 99 bp, Homo sapiens
cagctccttcccctctgatccattcacacctagataccggaggaggatcttctgcggattgttggaatctaccaatgtcatacccaggctatcccccaa

SEQ ID NO: 870275 - DNA, 99 bp, Homo sapiens
tgagcagcctaaaggaggagttggccctgtgtcagacaaggagccccaaactgtctcacagtcctcaaccacccagtctgggtgacccggtcgagcatt

SEQ ID NO: 870276 - DNA, 99 bp, Homo sapiens
tacccaaccagtggctctgggatattatcgatgagttcatctaccaggtttggaaagcagagtggagaacaaagagttgattccaatgcaacaaatttt

SEQ ID NO: 870277 - DNA, 99 bp, Homo sapiens
tggtcttcataatctgcattgtcattgctatcctgctctacaagaagctggatctccagaactgttctctggaggaccctggtccaaactttcatcagg

SEQ ID NO: 870278 - DNA, 99 bp, Homo sapiens
gactcgcaggagcaacacgtgatgtgtctacttatcaggcaagagtgagccatggagctacgtgtggggaacaagtaccgcctgggacggaagatcggg

SEQ ID NO: 870279 - DNA, 99 bp, Homo sapiens
gaaacggtttgtggctggagtaggagcaaacagcaatgcccaccagaagtatgtccgacaagcctggcagaaggcagacatcaatacaaaatgggcagc

SEQ ID NO: 870280 - DNA, 99 bp, Homo sapiens
gagagtttgtggaagatggcgcctgttgtgacagggtgtggatgaggtcaccattgtcaacattttgaccaaccgcagcaatgcacagagacaggatat

SEQ ID NO: 870281 - DNA, 99 bp, Homo sapiens
tacaatgcaggactgctctcctactacacggtgaagcaaaaaatttattgccatatcttggaccccacaaaatgagagattgtttctgtaccataaatt

SEQ ID NO: 870282 - DNA, 99 bp, Homo sapiens
aaaccactcaagagtcataggattagatgatccaagtcaccaagaaattactgtctcaagtgatacggaattgcagtgcaacaaagtacgtgaaaatca

SEQ ID NO: 870283 - DNA, 99 bp, Homo sapiens
gtctaccttagcgatttgatcccagtggatagagccattgaagacaccagacctgctggcactcccaccaaaggcatagagaacaaagcttttgatcgc

SEQ ID NO: 870284 - DNA, 99 bp, Homo sapiens
aagcaggttttaaatcaagatttaacattccaacacataaaaattatttatccaacagctcctcccagactgttcgccatggatttccctatcaaccct

SEQ ID NO: 870285 - DNA, 98 bp, Homo sapiens
ctgcatttcctcagtcacgggcctagaactccaaggagaaaggcggcggtgtgttccagagaacaagccttcagacatttgctatattgacgctgagc

SEQ ID NO: 870286 - DNA, 98 bp, Homo sapiens
gttttccggggccctctcagcaagaacgggaacaaaactctggtgctatacttggtagatcagaaactcaggagtgtcttttctttaatgctaattgg

SEQ ID NO: 870287 - DNA, 99 bp, Homo sapiens
gcattggatattcgcatgcctggggttacacctaaacagggtgccaaagcatgctttctgcgggacattcctttctcggccatctactttccgtgctat

SEQ ID NO: 870288 - DNA, 99 bp, Homo sapiens
cggtgccagctacagccgagagaagtgcggggtccccttctcctgctgcgtgccagatcctgcgcagcgagtgacaagcacatccaatggctcctaggg

SEQ ID NO: 870289 - DNA, 99 bp, Homo sapiens
gacatgtctgatcccttgctcccatccctgcagcatgaacaaggaatagagctgtgcccccctggaaaacggttcatgattacgatggtggcgagcttc

SEQ ID NO: 870290 - DNA, 99 bp, Homo sapiens
gcggggggaaagagccccagcaccgcccctcctggaagaaggaagagggttcaggataagtttgaggtgctgaattacacaagcattcctatctttctc

SEQ ID NO: 870291 - DNA, 98 bp, Homo sapiens
gcttactgtcttcctgttgggccagtccgctcgagatgctgagagagccaagcagtgtaatgacaatagtaaagtccaggccatttcgggaaaaacaa

SEQ ID NO: 870292 - DNA, 99 bp, Homo sapiens
gtacaggcagtcaaccctaaacagtggactcaacttcaaagacgttctcaaggagaaggcagacctggcttccttcaaaatgtctactgttcacgaaat

SEQ ID NO: 870293 - DNA, 120 bp, Homo sapiens
gcagcacccggcggacaagcggcgggacgtagttgttcttgaacatggcattggtgtagttcttggcatggcgaacaacaatttcaaaggcctcttgctcgccgcgtcctggcgtcccgc

SEQ ID NO: 870294 - DNA, 98 bp, Homo sapiens
cagccttcagcaaccaccacactgatcagtcagcagctgtcaacattgagctgggacgatgccggagtgtgaaggagtttgagaagctgaaccgcatt

SEQ ID NO: 870295 - DNA, 99 bp, Homo sapiens
ggacgacatgttcttaccaaaggcagcaagccacgctaggaaaacagcctcttgtatcgaaccttggcctctcaaagtgctgggatacaggcgtgagac

SEQ ID NO: 870296 - DNA, 98 bp, Homo sapiens
ccagaaccccatctcgctggagactctgatgccagtatggactggagatgatgggagccagttggatagccccatggaaatccccaaagagctctgga

SEQ ID NO: 870297 - DNA, 99 bp, Homo sapiens
gggccgcttctcagggaccgggggatctttttctgaccgatgtggaaacatagaagactggctgtagtacatgttttcgtcatggtagtcactgtcgac

SEQ ID NO: 870298 - DNA, 99 bp, Homo sapiens
acagaatttatatagagatgtgatgttggagaactacagaaacctcgtctccctgggtagcaatgaagtgatgaggatactgatctctagaagcctgct

SEQ ID NO: 870299 - DNA, 99 bp, Homo sapiens
gagaacatgttaggagatgccaagacgaataccttctgtgggacacctgactacatcgccccagaggtaattttttctgcaggatgaattaagagaaga

SEQ ID NO: 870300 - DNA, 99 bp, Homo sapiens
cgaggagtctctgtccgggggcctggctaaggaaaccctattacctccagattgctcgctgtaagcagctcatctgtgaccccagctacgtaaaagatc

SEQ ID NO: 870301 - DNA, 99 bp, Homo sapiens
ttggccaccctggtccagcgaggctgtctcctaagcatgccccagatattcctgatgacagcactgacaacatcactatcttcaccagaatcttggatc

SEQ ID NO: 870302 - DNA, 99 bp, Homo sapiens
tagccagtccctggagctggtgcacaggttccagggtccggtactgggacctcttgctgctcatccccaatgtgctcttcctcatcttcctgctctgga

SEQ ID NO: 870303 - DNA, 99 bp, Homo sapiens
gaaaagatccctggaatatgaagagacacagtatggtagccacacccccagggaccattgcaatttagagatgtggccatagaattctctctggaggag

SEQ ID NO: 870304 - DNA, 99 bp, Homo sapiens
atgtctaccaggagaggagggaactgcggagcggatgcaggacaagtactccaaaagtggcattgcttgtttcttaaaagaagatgacagttattggga

SEQ ID NO: 870305 - DNA, 99 bp, Homo sapiens
aacacaatactgtttctgcgtcataacaaagatctagttgcgcaaactgcacagccagaccaacccaattatgattattcagagctgggagagcttccc

SEQ ID NO: 870306 - DNA, 99 bp, Homo sapiens
ggacttcgggagccagtagccaaggtgccagcgagatttcagattcctgtaaacctctaaagaaaaggagtcgcgcctcaactgatgtagaaatgacta

SEQ ID NO: 870307 - DNA, 98 bp, Homo sapiens
tattgtccaaagcagtcgtaagaagaggtcccaatcccccactctttccgccctaatggaggtctccagtttcgctggagaagaagcaggcgctccct

SEQ ID NO: 870308 - DNA, 99 bp, Homo sapiens
cattgaagctatgcagtatttctttggcatcactgcagctagtaatttgccttctggatttccaagtggtaagaagttcagaagcaagcctcagttggc

SEQ ID NO: 870309 - DNA, 99 bp, Homo sapiens
agctgaggaacaagcgggaattccgccgcaacctccccatgcacctccgaagggcctacatgagtatctcagagaagctgtctcagctgcaggcacggc

SEQ ID NO: 870310 - DNA, 98 bp, Homo sapiens
gaagatcaaggaaggatctgtgtggtcattgacctcgatgaaacccttgtgcatagctcctttaagattggcggcagtaagcacacaatgaatgatca

SEQ ID NO: 870311 - DNA, 98 bp, Homo sapiens
tagaatcaactgagagagatgcttaaaaatcaccagttactttaatgaggactgttgacatttagggatgtggccatagaattctctctggaggagtg

SEQ ID NO: 870312 - DNA, 99 bp, Homo sapiens
gcggatggccccaggtgtaagcgcagaaagcaggcgaacccgcggcgcaataacgatgtacgagatcaaagcaggaggcagcattgcaaagaagttcag

SEQ ID NO: 870313 - DNA, 99 bp, Homo sapiens
gaagtgccatcttcggctaggtcgtcacaggctccggctcatggcatcaagtggcatccatcataagggtctacacaagcttccaccaggaaggaaata

SEQ ID NO: 870314 - DNA, 100 bp, Homo sapiens
cacaccatgaccaacaagttcactgttggcaaggaaagcaacatacagacaatctgtatgttgctttccttgccaacagtgaacttgttggtcatggtgt

SEQ ID NO: 870315 - DNA, 99 bp, Homo sapiens
caaagggacctgatgaagcgaagatcaaggatcggaaaatagaagatcttcgacagtgcctgaacaggtacaagaaaatgcaagacacggtggtactgg

SEQ ID NO: 870316 - DNA, 99 bp, Homo sapiens
agctcgtaggagcggatcatcagctgggtgccattcttctccaatgctccccaggcagccttggacagatttgcgctgtaatcccaactactcaggagg

SEQ ID NO: 870317 - DNA, 99 bp, Homo sapiens
ctggcaactgcaggtgccaaatatggcgtgggcttctggaagcctggatctggaatcattcaccagtgtatccaaagtgtgtacatcagtaagatcata

SEQ ID NO: 870318 - DNA, 98 bp, Homo sapiens
ctcaacccaaggccctgggcaatcagcagccttcgtgggattcagaggatagcagcaacttcaaagatgagccagcaccgctctttgaccttgccatg

SEQ ID NO: 870319 - DNA, 99 bp, Homo sapiens
gctgaggacacccatgaaccttcccaaagacttccaatagtagtcagacattatcatcctgtcatactatggagccatgtacatcagatgaatttttcc

SEQ ID NO: 870320 - DNA, 99 bp, Homo sapiens
gggtcagaaaggaacggggcgtgaagacacaggctccggagaggttagcattgaagaacgtctgggagcaatggatatagacacacacaaaaaaggaaa

SEQ ID NO: 870321 - DNA, 99 bp, Homo sapiens
atgaagaaagtcagggggactgcaaaggccaatgttggtgctggcaaaaaggtatggcccatctcctgtacgcttggagcgacctttggctacgtggct

SEQ ID NO: 870322 - DNA, 99 bp, Homo sapiens
gccgctcgtcagactccagcagccaagatggtgaagcagatcgagagcaaggtgatcatggagctcagcttggtctccatggggctggtggtgatggaa

SEQ ID NO: 870323 - DNA, 99 bp, Homo sapiens
cccaaaagtaatgttaacaataacccagccctggtacctgacagtgtaaagaaggagctcctacaaagaataagaacattccttgctcagcatgccagc

SEQ ID NO: 870324 - DNA, 99 bp, Homo sapiens
ctctcacattcaaagatggcattgtttccaaggagatgccgtgatgttgcagtggagcgtgagtggcggcggcagcgagtgcgggctgccctgctgcgg

SEQ ID NO: 870325 - DNA, 98 bp, Homo sapiens
ccgagtgggtgtctggtgccggcgtttgggctacggttgttgttggcgactgtgcttcaagcgctgtcacaagatgaaggtagaggcacattatacaa

SEQ ID NO: 870326 - DNA, 98 bp, Homo sapiens
tctgggagcctagaatgcatcagtgcccttgtggcgaatggggctcacgtcgagggaatgactctgactttgagacggtgtaccagcagtgtgtcagg

SEQ ID NO: 870327 - DNA, 99 bp, Homo sapiens
ctgggattcgcctacctcaagcctccattctccatccgctgcgtggaggtgtcggacgatcagaacatacggtccctaatgagcacagagaagaccaag

SEQ ID NO: 870328 - DNA, 99 bp, Homo sapiens
tcgtgatccagaagtccagagctgaggactgcctgtttgcagttcaggacctcaaggggctcggctatgagaaggggaagcctgtgggtctagtgggcg

SEQ ID NO: 870329 - DNA, 99 bp, Homo sapiens
atcaagccccctccacctgaggattccagaggagaaccagccacccagcaagcaggtgaagccactcttccgccacttccgccggatagactcctgtct

SEQ ID NO: 870330 - DNA, 99 bp, Homo sapiens
ctgggctgccagctcgcttaacattggagttcagtgcttttgacatagatgcccgagtggtaaaagacatggcaacaggaaagtctaagggatatggct

SEQ ID NO: 870331 - DNA, 98 bp, Homo sapiens
tcaggaggaagcgatggcttcagacagcatatttgagtcatttccttcgtacccacagtgcttcatgagagaatgatatggaacctagcaaagctgtt

SEQ ID NO: 870332 - DNA, 100 bp, Homo sapiens
tgtgtcagttactggtcatgggaaatgaggagacactgggagggtttcctgtcaaaaccctcccagtgtctcctcatttcccatgaccagtaactgacac

SEQ ID NO: 870333 - DNA, 99 bp, Homo sapiens
ttacagtctgttccacatgatcattgtaataaggtttggtgcacctcgatttggaggaagtagggcagggcccttatctggaaagaagtttggaaaccc

SEQ ID NO: 870334 - DNA, 99 bp, Homo sapiens
agccaaggagctgtcctttgttttggattacataaaccagtcacccaagtgcattgcctttggaaacgagcaccccagagccctggccccctcgccacc

SEQ ID NO: 870335 - DNA, 99 bp, Homo sapiens
gaaaacctaaccatgaagacttgaacttaatacagcaagaaagaccatcaagtttaccagtgattttcttccacccccacctccacctctagatgattc

SEQ ID NO: 870336 - DNA, 99 bp, Homo sapiens
ctgacctgtaaatcatcctttaggtaagagcttctgttcgtgtgcagggaaagcagctcacagacgccgttaaaaccagcttcatctttccttcaggat

SEQ ID NO: 870337 - DNA, 99 bp, Homo sapiens
aacaagaagtaggcattgaccccttgtccagttactctaacaagtctggagatgagctgcttcagaaagagcaaaactattcagatgacgtcttggcca

SEQ ID NO: 870338 - DNA, 99 bp, Homo sapiens
caggcataaaatcatctccatattctcaggcacagagaaagcagccagacccggtccgtttggaatgcctgggatggtgccgccgcatgttcctcctca

SEQ ID NO: 870339 - DNA, 99 bp, Homo sapiens
ccttctttcgatcagagatcggcggagaccctcgaagtgcgcaaacttgacactcaccctgaccggtgataagaagtacatcatggggcccaagctttc

SEQ ID NO: 870340 - DNA, 99 bp, Homo sapiens
ctgagagagaaatttataaaagattgggaatgaaaagaggtgaagaaattgcttcctcaggtaaaactctgctggcacaaaccctagctaaatgccttg

SEQ ID NO: 870341 - DNA, 98 bp, Homo sapiens
gaggctggaagaggatcttgggcgccgccaggttatcaatactctggctgaccatcatcatcgtgggactgactttggtggaagtccttggttacatg

SEQ ID NO: 870342 - DNA, 99 bp, Homo sapiens
ccggttcctcccaggcggcaagggatggtgtgccacagcagccctgggccttgctatctcttggatcccaaaataactcggtttggaatgtccagctgc

SEQ ID NO: 870343 - DNA, 99 bp, Homo sapiens
gaagcactgactgaatctgatgagcatttttcgacaaagcttatgtatgaagtgtcaaatcaacagtgccttgacatctttccacactgctttggaact

SEQ ID NO: 870344 - DNA, 100 bp, Homo sapiens
gtagctgcatccctcgtgtcatgaaggagcaattcctcttctgcccgcttggctgcttccacatccacacctgagaaaggaggaggggctgatgcagcta

SEQ ID NO: 870345 - DNA, 99 bp, Homo sapiens
cacaccattgtcccagactcgaagccgaggctccactaatctctttagtaaattaacttcaaaactcacaaggagacagctgatactgattctggaact

SEQ ID NO: 870346 - DNA, 99 bp, Homo sapiens
ataaagccacagacaccgagtatgccgtgaaggcggagtacgtccagcttgttactgaacttcgaatgacaagagccattcagcctcagatcaatgctt

SEQ ID NO: 870347 - DNA, 99 bp, Homo sapiens
catggttgtgggccagcttaaggccccagtgcagagagcccacggccatccagtgcctacaatggggacctcaatggacttctggtcccagacccgctc

SEQ ID NO: 870348 - DNA, 98 bp, Homo sapiens
aggacagcctgcaggatgcctgggactacgtgcaggctcaggtcagactatgatgactggagaccgtctctggccagtttgcttcaacccattccatt

SEQ ID NO: 870349 - DNA, 99 bp, Homo sapiens
tggtggcataggttatgaagctaatcctggcgttccaccagcaaccatgagtggttccatgatgggaagtgacatggtttctgctttgggacaaccata

SEQ ID NO: 870350 - DNA, 99 bp, Homo sapiens
cctagacaaagggagagggtgaccgacatcccaactagatatttacagaaagccttctgtgctctagtcgccttgaaaacatccacctggctggacaga

SEQ ID NO: 870351 - DNA, 99 bp, Homo sapiens
tgaaagagagaatctgcatgatacaccaaaagctggtacttctgaggtggggagaataactcacttcctctttttcccactcaacacagcggttggcaa

SEQ ID NO: 870352 - DNA, 99 bp, Homo sapiens
gtcccttccggatttggctttactttaagaggagattcagacatagacaagaatgattacccagacctgcctagagctggaacgttacctccagagcga

SEQ ID NO: 870353 - DNA, 99 bp, Homo sapiens
gtcccccaccttgtaaggtggcctcagccagggtggcgacagcatgggcggcagcttcgctggaaagttccaaaatgggatttttccttctgccgggca

SEQ ID NO: 870354 - DNA, 99 bp, Homo sapiens
cactgagctggaagtcattcaacgggaattgaataggtggaagcagggaaaggcctggagatgaggaagctggttctctcggggttcttggccagcgaa

SEQ ID NO: 870355 - DNA, 99 bp, Homo sapiens
atgggggagaccgtaatgagcgtcaaaattatccgaaaccgcctcactggcttcgccgacacgaggtgaccatctgcaattacgaagcatctgccaacc

SEQ ID NO: 870356 - DNA, 99 bp, Homo sapiens
gtactcggaaggcgcgggcaggagcctggcgaggatgcaccttcccctgccttggaaaggatgaagatttgataaagtggaaggcactgtttgaggaag

SEQ ID NO: 870357 - DNA, 99 bp, Homo sapiens
ctattctaagcaactggaaaatgaattggagggactgaagggtctgacatttcaggaggtggagaacttctttactttcctaaagaacattaatgatgt

SEQ ID NO: 870358 - DNA, 99 bp, Homo sapiens
acacctacagccccgacgaacatttctgggtgacactcaacaggattcccggagccatgtggctagaaatcctcctcacttcagtgctgggctttgcca

SEQ ID NO: 870359 - DNA, 99 bp, Homo sapiens
ggtgatttctgcatttccatctgagggcatgcattgaaattatacagaccctagtattgatgttcagagaaacagaaaccgagtcatcacgcctgaaca

SEQ ID NO: 870360 - DNA, 99 bp, Homo sapiens
ctatctcagagcccaaatccttcctgccccacagccttctcctggaacctgccttggggcaagtgtccagagaatggctgggatgaaagtacacttgaa

SEQ ID NO: 870361 - DNA, 99 bp, Homo sapiens
tctcgaaagttgagaataaatgctaaagaaaccatgaggattgctgagaagctctacactcaaggacccaacatgagtgaagtttcctgcaagaaacgg

SEQ ID NO: 870362 - DNA, 99 bp, Homo sapiens
agttgatctgtaatgttcaggccatggaagaaatgatgatggaaatgaagtataataccaagaaagccccacttgttgaggagctcaagcttgggaaaa

SEQ ID NO: 870363 - DNA, 102 bp, Homo sapiens
gaaaaatcgaaataattatgcctcagtagaatgtggtgccaaaattctagagctgctagaattttggcaccacattctactgaggcataattatttcgattt

SEQ ID NO: 870364 - DNA, 99 bp, Homo sapiens
cggccagaagcgggcggcgcgggggagatgtgccctgtgggacatcgagaccggccagcagacgaccacgtttaccggacacactggagatgtcatgag

SEQ ID NO: 870365 - DNA, 103 bp, Homo sapiens
gcgacagagcgagactccatgtgaaagaaggcagttttcacatgataagaagagaattttgaaaactgccttctttcacatggagtctcgctctgtcgcccag

SEQ ID NO: 870366 - DNA, 99 bp, Homo sapiens
atattgaactgggcacagcatgcggaaaatactacagagtgtgcacactggctatcattgatccaggtgatttgaagatattaaagctagaaattggaa

SEQ ID NO: 870367 - DNA, 99 bp, Homo sapiens
agtgaagcatctcgaagagattgtagagaagctaaaaggagaacttgaaagttcggaccagatgactgtccaagtgcctccaaagtgtacaaagcatca

SEQ ID NO: 870368 - DNA, 99 bp, Homo sapiens
cagatgtacttctggcagtacggccactggacagagtgcagtgtgacctgcgggacaggaagatctgcctgcactgcaagtgtccccaggaggagcaca

SEQ ID NO: 870369 - DNA, 99 bp, Homo sapiens
ggtagtcggacctttcccgctggcgcgcagcctcagctagctttcccagtgcctccagcagccctcctcaaggacccctgtgaggccaggcagaaatgg

SEQ ID NO: 870370 - DNA, 98 bp, Homo sapiens
tacgccaaggaggtcacccgcgtgctaatggtggaaacccacaacggagagaacattgaaagtattctctaagctatttgaagagagtgactaaatgc

SEQ ID NO: 870371 - DNA, 99 bp, Homo sapiens
gtcttttcatgtggtttttctacgcattgattccatgtttgctcacaggattttgacacttcatgacatgtcattatttagagcaataatgaatattga

SEQ ID NO: 870372 - DNA, 98 bp, Homo sapiens
acaagaccatcagtccctacaccatggagggatacctctacgtgcaggagaaacgttggatggcaagcatgtggtgtttggcaaagtgaaagaaggca

SEQ ID NO: 870373 - DNA, 99 bp, Homo sapiens
gctattcctgttgatggtgatgaagacaggccttataatgggactaattttacgatatgctacagcaccaactgatattgaaagtggaactgtctatga

SEQ ID NO: 870374 - DNA, 99 bp, Homo sapiens
cctgtgccgccctggggttgagggccctcgatgtgatacctgccgctctggtttctactcattccctatttgccaaggaggctattacttgacaagcgc

SEQ ID NO: 870375 - DNA, 99 bp, Homo sapiens
ggactgaaaatacaccccgtgggcgcagggctgctgacctagcccaggctgcaagcacaaaggaagtttgctcagtctcagccgaatagtcccagcaca

SEQ ID NO: 870376 - DNA, 99 bp, Homo sapiens
tgactgagcaggactattttggtttacagttggctgatgattccacagataacccatgacaaaaatgctgagtttcttccgtagaacactagggcgtcg

SEQ ID NO: 870377 - DNA, 99 bp, Homo sapiens
atttgttgtaagaaccgccggggacgaaacaataaagaccggaagctgagtttttatccgtatcattggaacatttcaagatcatcaaatcaaattcca

SEQ ID NO: 870378 - DNA, 99 bp, Homo sapiens
ttggtacagagggaactgtagaaaccagattggcatatttcctgccaactatgtcaaagtgattgacagtcattttgtttactcattcagccctgttgc

SEQ ID NO: 870379 - DNA, 100 bp, Homo sapiens
aaagggctgctttatggcgaatgtggctgataagtctagattcaccaatgtcattggtgaatctagacttatcagccacattcgccataaagcagccctt

SEQ ID NO: 870380 - DNA, 99 bp, Homo sapiens
ctttgtaagctgcccattctttaatgatcactggtgaaaaaggaatcgctagggaatgtaaacaatgcagcacatgaagcacaatttcctcttcatctt

SEQ ID NO: 870381 - DNA, 99 bp, Homo sapiens
tgacttcacagtacaggtccagttaagggcctactctaggtgcggtacttcactatagtttataaaagatggtccctgtcagcaaagaactgtaacctg

SEQ ID NO: 870382 - DNA, 99 bp, Homo sapiens
gggattcgtggtgaaggtccggggcttgccctggtcttgctcggccgatgaagtgcagaggtttttttctggagaagttttcaggttgctggaggaaga

SEQ ID NO: 870383 - DNA, 98 bp, Homo sapiens
ttttcagaaagtggaaagaagccatggcaagggctgtcacatggtgactgaagaacttcattccataacgtttgaaacacagatctgcctctatggcc

SEQ ID NO: 870384 - DNA, 99 bp, Homo sapiens
cgttcggccccgagtggagggcaaacctgtgaacccacccgagagcaacaaagcaggcgactacagccacgtgaagttcaactttgtggggaaactttt

SEQ ID NO: 870385 - DNA, 98 bp, Homo sapiens
aacaggcacacaagtgtgaggagttgctaaatgctcagtttccgttactatggcaatgacggcagggactacaacaacctttcctatgagcaaccata

SEQ ID NO: 870386 - DNA, 98 bp, Homo sapiens
gaaatagctcatgggaacccagaagaggtgacggacaaagtggccttggagagtatgcctctgctaggcttcaccattgctccagaaaaggaagaggg

SEQ ID NO: 870387 - DNA, 99 bp, Homo sapiens
atgtctccagcatttttacggacccaatcatgagcactgctttaatagggctcgtggtcccaagaagcatctgaagcgggtggcagctccaaagcattg

SEQ ID NO: 870388 - DNA, 100 bp, Homo sapiens
tgggtctgattcctctgctttttggaaagtggttggctacaaaaaacttggtacagaccacccgtacaaccactttccaaaaagcagaggaatcagaccc

SEQ ID NO: 870389 - DNA, 99 bp, Homo sapiens
tgaggacacctgaggttcagattaagaaatctgccccaaagtcttagaactgagtggaagtttccagagaaaacagccatcaaagaaggttgagagtga

SEQ ID NO: 870390 - DNA, 98 bp, Homo sapiens
agttgggagctatgagtcctctgaaatgaacagcataacacggcatcagcgaggagatacgcatcctctaaccttagatgaaattttggatgaaacac

SEQ ID NO: 870391 - DNA, 99 bp, Homo sapiens
cttcaattttactgtttgactcgacccaggaatcactaccaccatcccaagacataccagcaatttttagagaagaaatgcccggcgaagccacagaaa

SEQ ID NO: 870392 - DNA, 99 bp, Homo sapiens
ataggcatggccttcagctcccgcagcaaatccatggctccctcctgggtacagacgagatgaagagtaggggggaggcatttggggctggagtgcccc

SEQ ID NO: 870393 - DNA, 99 bp, Homo sapiens
atttataaaggctttgagaagcccacagaaaatagcagcgcagtgttactccagtggcacgaaaaggcaatttgaatcaacccatagaagtgacagcgc

SEQ ID NO: 870394 - DNA, 99 bp, Homo sapiens
gaccctcaaacagcagtatgatgaactggaggctgagtacgacagcctcaaacaggagctggagcagctcaaagagttggcccgccacaataaactgtt

SEQ ID NO: 870395 - DNA, 99 bp, Homo sapiens
atgtgaagataccagtttgcgtcaggagacacagtgcctatcagaataatgacatcactgaatttgaaaagattctaaaaacaaatcacagcaacatca

SEQ ID NO: 870396 - DNA, 99 bp, Homo sapiens
gacagagtggagccatggctagaggaatactcccccagttgcaagaggcgcaggaccgtggaagacttcaacaaattctgcacctttgtcttggcctat

SEQ ID NO: 870397 - DNA, 99 bp, Homo sapiens
ttctcaccgttccgggaacaaatgctagatacgtgggcagcaatgctggcatcgtggggatgaccaaagaacacctgggcttggcactggcactcaatg

SEQ ID NO: 870398 - DNA, 99 bp, Homo sapiens
tgagttgttgctcccgcctgagcccagcccccagaaaggattgtgacatatcgttggacccagaattgagaactcccccactggaaaggattctgaaag

SEQ ID NO: 870399 - DNA, 99 bp, Homo sapiens
agtgcaactgtatttcgcacagtgctgttctgcagacatatgtcctaagtgctggaccctcatgacaatggccatacgcatcattgacagagcattgaa

SEQ ID NO: 870400 - DNA, 99 bp, Homo sapiens
cgaggactctgtggacttccggctccgcgtctctgccagctacctgcccaaaccaggagctcagctctaccagttccgatatgtgaaccgccagggcca

SEQ ID NO: 870401 - DNA, 99 bp, Homo sapiens
tgttcgtggggagcacatcttcacactggacactctcgtgcagggttggatgactgcctgcaacaatatgtccacaagtttgaacgagagaagatcaac

SEQ ID NO: 870402 - DNA, 99 bp, Homo sapiens
ggaggaccaggcgcggcgcggctgcggctgaggactgggcgttcatcaacaccaacatctttgccaggaccaagatagaccccagcgccttggtgcaga

SEQ ID NO: 870403 - DNA, 99 bp, Homo sapiens
tgcacctcgcagtctccccaggtccgcccagcagccgcgcttcagccaggaacttagtgatttggcccgtgaccctccagcacaatgttctgcaggtcc

SEQ ID NO: 870404 - DNA, 99 bp, Homo sapiens
gcggagaagcagctcgccagccagcagcccgccagccgccgggagggaactaaaggagaagattcagccagaaatcttagagctgatcaaacagcaacg

SEQ ID NO: 870405 - DNA, 99 bp, Homo sapiens
aagaaaaaagaattttgatccaggctcagagggcccaattgctgttcctgttccagctgctccgtggcctggcctactgccaccggcagaaggtgctac

SEQ ID NO: 870406 - DNA, 98 bp, Homo sapiens
gattatggacccggccgaggcggtgctgcaagagaaggcactcaagtttatggtaagaatgattgatgttggctgatattggagtgctcattcacatg

SEQ ID NO: 870407 - DNA, 99 bp, Homo sapiens
ctgactcttctatgctgtgttcagtcggagccagtaaagcaatctgggctgcaggagctggggccacccacagcccccctaccgacctggtgtggaagg

SEQ ID NO: 870408 - DNA, 99 bp, Homo sapiens
tggaggatgatgtgctcagcacaggtgttgtgctctatcatctcaaggagacagctgttgcaatcccttaagcatgggtgctattaaaaaaatggtgga

SEQ ID NO: 870409 - DNA, 98 bp, Homo sapiens
cggcatctgtcttgagctcccagcaaggtaatatgcacgtgtcactagctgaggccctggaggttcggggtggaccacttcaggaggaagaaatatgg

SEQ ID NO: 870410 - DNA, 99 bp, Homo sapiens
acacctccattggatttaaaagacagtcctcgtcagcactgactttcagctatggaatcggaatccctaacactggaggatgtggctgtggacttcacc

SEQ ID NO: 870411 - DNA, 99 bp, Homo sapiens
tgaaagaactggaagaattgtctttggaagctcaaggcatcaaagctgacagagaaactgttgcagtgaagatactgcttttgcaaaaaataaagatga

SEQ ID NO: 870412 - DNA, 99 bp, Homo sapiens
aatgaacagcaacaaaaggtggcagagacaggatccagagaatcacccgctgatggtttttgcccaggcctgaaacaaccagagagctacgggaaagga

SEQ ID NO: 870413 - DNA, 99 bp, Homo sapiens
gttcactgatgaagaaaagcgcaaactgctgaagtttgtaacaagctgctctcgaccccctctcttggggtttaaggttatcaatactctggctgacca

SEQ ID NO: 870414 - DNA, 99 bp, Homo sapiens
aaaagaatatgctattcagcttgaattcgcgaaatggtgttcacactggccctgaatcaagggaacaccagttttcacatgctggcagaagcaatggcc

SEQ ID NO: 870415 - DNA, 99 bp, Homo sapiens
gaatggaggagacgtattacaacttttagctgcagtggagctgaaagaccacagcaagattctttcattcgtctcctcctagcctgggggaccaggctc

SEQ ID NO: 870416 - DNA, 99 bp, Homo sapiens
ggggaatgtcgtactgcctgtctgcctgggtgagagctgtgaccctgttccccatgtctgggagaatgggaggctcatcgcccacttgaaagtcaaagt

SEQ ID NO: 870417 - DNA, 99 bp, Homo sapiens
tcccaccattgtacaggacaaagtgcttgctctgatccagcttcctgaagccacctctcaaaccagccacctgcgtgcaagtccctgccttacctctgc

SEQ ID NO: 870418 - DNA, 98 bp, Homo sapiens
tcaaacagaagtccctgtacagggaagtgatgctggagaactacaggaacctggtctcagtggattttaacagcttctctgtggatgatgagtgctta

SEQ ID NO: 870419 - DNA, 99 bp, Homo sapiens
ttccctggaggaaattcagaagaaattagaagctgcagaagaaagacgcaagaagggagagaaggtacccaaagggaaaaagggaaaagctgatgctgg

SEQ ID NO: 870420 - DNA, 99 bp, Homo sapiens
gcccggcccggcagcgacatggaagaacccttaggagaaatcttgagagtggacagcaattgtgaagatcgccagagagttctgtgtttcatcaccgcc

SEQ ID NO: 870421 - DNA, 99 bp, Homo sapiens
aagattttaccaaaaaccttaggaccaataaatgtgaatgttggaccccaaatggccctgtttgctgaaatgttggggccaaacaacttgatagagcct

SEQ ID NO: 870422 - DNA, 99 bp, Homo sapiens
cgaggcccaagagcagtgatgttatcaatactctggctgaccatcatcatcgtgggactgactttggtggaagtccttggttacatgtcattattgcgt

SEQ ID NO: 870423 - DNA, 98 bp, Homo sapiens
gcaactctccgggcggccgcacctgccaggttgcagtgtaggattttggaagtcctccctccatcacatcaaaatggttttgctaatggacatgttaa

SEQ ID NO: 870424 - DNA, 98 bp, Homo sapiens
gtagccatacctaatagacctcctgatgctgtacttacagataccacctctcttaatcagagaaccatggagtctggcagtaccgccgccagtgagga

SEQ ID NO: 870425 - DNA, 100 bp, Homo sapiens
agtgccaagacttgattaaagtaaattacagattgtgaaagtttctcactgctgggcctttgctggaaaatcctcaattactttaatcaagtcttggcac

SEQ ID NO: 870426 - DNA, 99 bp, Homo sapiens
acaaccaagtgattcattccaaggacaggcagcccagtctggtgtttggaatgacgacagtatgtctcctacggtagtgtgcagcttatgcaaacgaga

SEQ ID NO: 870427 - DNA, 98 bp, Homo sapiens
atggacacagaggaggccaggccggcgaagaggcccgtcttcccacccctctgtggggacgggctcctggtgacctgaaacatatcacgaagctgaaa

SEQ ID NO: 870428 - DNA, 99 bp, Homo sapiens
atgatggcggtggagcctttatatcatgggaagcactctcacttattaaagatcttgctgtggcagaggtaaaacttcgagatgatcaatatacactgg

SEQ ID NO: 870429 - DNA, 99 bp, Homo sapiens
gggctttaggctggaagcgccttagaggagccatttttccaggaacattttagtggacaaaccaaatgaccaatcttcaagatggtcttcagagagcaa

SEQ ID NO: 870430 - DNA, 99 bp, Homo sapiens
gcatctattacctttgccttggaatacaggagtggcttttcatgatatatgaacatgattgatacattaaataagtaacagtgggattcttggctgtgg

SEQ ID NO: 870431 - DNA, 99 bp, Homo sapiens
tgtgtagaatttctcaccaaacatcttagggcagataatgcctttatgttacttactcagacacatcatctcagagttggagcacctgacgtttgtcaa

SEQ ID NO: 870432 - DNA, 98 bp, Homo sapiens
actggcaaaagcacaaggattctcgctgtgacagagacaacaccgagtatgagaaaccctggaagctgtcctgaatttcaaatactctggaggcccgg

SEQ ID NO: 870433 - DNA, 98 bp, Homo sapiens
agtatgcctccgaaaaccacctcagccgcttcgtgtggttcttttctggcatcgtaggaggtggcctgctggtgctggagacatgtgtgaagaactgt

SEQ ID NO: 870434 - DNA, 99 bp, Homo sapiens
cagaatctttcatcccccaaacactgatattttctgagaggcttggaaggatttcttctaccgttccaagcaaatctatacaatctccatttgcatcct

SEQ ID NO: 870435 - DNA, 99 bp, Homo sapiens
aacgtccagctctacattaaagtttctaatatctcgaaatgcggctgcttttcaaggtgctggctgccagctgctgcgccccccatgtagaaggtgcac

SEQ ID NO: 870436 - DNA, 98 bp, Homo sapiens
caggtgatgcctgaagctcaagggactgtgtccaccctcagacctgcgaccgcatcaagcagtccgccagcggaaccaagcggcgcgtgttcatcatc

SEQ ID NO: 870437 - DNA, 99 bp, Homo sapiens
ggagtgaaaacgacccggcagatattagtgatgatgaaccaggttatgaccttgatttattttgcatacctaatcattatgctgaggatttggaaaggg

SEQ ID NO: 870438 - DNA, 99 bp, Homo sapiens
ctcgtacgagaacctcagtgcagatggagaaggcctggtctccaagtcctctcctaagaagcctcgtggacgtaacatcttcaaggcccttttctgctg

SEQ ID NO: 870439 - DNA, 99 bp, Homo sapiens
catgcaaaagataacacaagacctggtgctaatagtccagatgatggatttggacatgcttctatgaagaaatgccacatggtccgagagcaaacatgt

SEQ ID NO: 870440 - DNA, 99 bp, Homo sapiens
ggcgggggacagtagttgtagacgcccgcccctgcctcagagaagttgatttatgaagactctatggatctaatcgcaaagctaccttgtgttgcagca

SEQ ID NO: 870441 - DNA, 99 bp, Homo sapiens
aagactgcctggcccagctgcgcctggcgcaggaggccgcccagttcacgcagagtgctctggactgcatgagtgtggaggtaggacggctgcgtgcct

SEQ ID NO: 870442 - DNA, 99 bp, Homo sapiens
gcatttttgcaatcctatattgatgtggcagttaaactgaaagagaaagcaaccagcgagatgaatactgctgaggactggggcctcattttggatatc

SEQ ID NO: 870443 - DNA, 99 bp, Homo sapiens
ggaacattccagaaactttgggagcccagcagccggggccgccctattacaccgacccaggaggaccggggatgaaccctgtcgggaattccatggcaa

SEQ ID NO: 870444 - DNA, 99 bp, Homo sapiens
cgagaccatcctggccaacatgtttgtctttgtcagcgccacgtgagacacctacaacgagatgccttaagccagctcatgaatggccccatcagaaag

SEQ ID NO: 870445 - DNA, 99 bp, Homo sapiens
ctgcagagctcggaggggcgctgtgtgtacatcacccccatggaggccctggcagagcaggccctagactggagctggttacagacggaagaagaagag

SEQ ID NO: 870446 - DNA, 99 bp, Homo sapiens
aatactcagaaatctgttctacaggaagatgctgagaaactgcggaaagaattgcatgaagggctcagaatggaatgcctccaacttagaggacttaca

SEQ ID NO: 870447 - DNA, 99 bp, Homo sapiens
tctttgctgagcacatcagtgatgaatgcaagaggcgtttctataagaattgggaaggtgctgagctactggtgcttcagtcccggccacagcatgcac

SEQ ID NO: 870448 - DNA, 99 bp, Homo sapiens
acaccttcaggaaaactcgtgtccatcaaaatccagatgctggatgacacccaggaggcatttgaagttccaggaatgcagagagcaaccaatgtcacc

SEQ ID NO: 870449 - DNA, 98 bp, Homo sapiens
atcgggtggcggctcgggacggaggacgcgctagtgttgcacttcccccagctggccctgaggcggaggctggggcagctgagctgcatgtccagacc

SEQ ID NO: 870450 - DNA, 99 bp, Homo sapiens
gttaatccaggtgagactttcacaataagagcagaggatggaacacttcagtgcattcaaggaaaaagtagaatatgccttcctgattatttttacagt

SEQ ID NO: 870451 - DNA, 99 bp, Homo sapiens
gaggctgctgaccagaagaggtttagtgccctcctgagtgactgcgtcaggcatctcaatcatgtgcaatcgcttccatactaagggcctggcttgacc

SEQ ID NO: 870452 - DNA, 99 bp, Homo sapiens
ccaggccgagccggagctgcagcccgagcgcggtggtgccctcagccccgtcctcttgtcctcctcagcctcggtcttgggcgtctttggtactggctt

SEQ ID NO: 870453 - DNA, 98 bp, Homo sapiens
gaaaacaagaggccccagagggaaaagaagcccaaagttttaaagattgtgaaaactgctgagagagacttgcaatccagtcacataagtataataaa

SEQ ID NO: 870454 - DNA, 99 bp, Homo sapiens
aaaaaacacaataccaggcatacatttggcagaataaatgaaccagtgggaagccgtgtccgccttttaagattgtgattctggatgaagcagattcta

SEQ ID NO: 870455 - DNA, 99 bp, Homo sapiens
cctcggggagaaattctctggagtcatctggaacttctccgaaaatctggcagccggtcaagttccccaggaaaattgttgggaagtggttatggtgga

SEQ ID NO: 870456 - DNA, 99 bp, Homo sapiens
tcttctgctgttactgacctcaacataataatggagcccacagaatgctcagaattaagtgaatttgtgtctaggtttgaatggggatgtgaatgttaa

SEQ ID NO: 870457 - DNA, 99 bp, Homo sapiens
ctgggtgacagagcgagactcttattacaatgatcatgtggaacagactgtaaaacaattggttccattgtggaaacactggcaaattgtacctccgga

SEQ ID NO: 870458 - DNA, 98 bp, Homo sapiens
aagctaactttcaacaaccccacagaggactttaggagaaagttgctgaaggcaggagggcgacatctcgaatcagcgatgcacacttggcagacaca

SEQ ID NO: 870459 - DNA, 98 bp, Homo sapiens
gccagggctccaaagaactcgaacaaaactattgtgagtcgaggtatcattttctgcactcagcggacggggagggctgtgccaacatgctggtggag

SEQ ID NO: 870460 - DNA, 99 bp, Homo sapiens
cggagcccccagcgcagcggccgcggcctccctattccctgagacacaacagtattgaaattgggccaattaataaccccacagtggcctctcactaaa

SEQ ID NO: 870461 - DNA, 99 bp, Homo sapiens
caccctcggacccagggcagccgtgcccatttccccagggcatggaggaaaatatctaaatgtggtcagagagtgtggccatgacgtcacctgcccggt

SEQ ID NO: 870462 - DNA, 98 bp, Homo sapiens
cggcggcggcggcggcggagcagcgaggacgtgggacttctcagacgtcaggagagtgatgtgagggagctgtgtgaccatagaaagtgacgtgttaa

SEQ ID NO: 870463 - DNA, 99 bp, Homo sapiens
attcttcttccagggactgcacatggctctatgtttagtgtcaagtcttccctcttccaatttcttccccttcaagttgccttccccacaggagccagc

SEQ ID NO: 870464 - DNA, 98 bp, Homo sapiens
aacaacgttaccagcatccattgcaaaccttattaatctcagggaactggatgtcagcaagaatgcttttggacttcttggatcagcatcctttttca

SEQ ID NO: 870465 - DNA, 99 bp, Homo sapiens
tgagaacttcgagttgattaaccacgacgtggtggagcccctctacatcgagggtcatttattggggaggcagtgttccctaaacaccttaccagcagc

SEQ ID NO: 870466 - DNA, 99 bp, Homo sapiens
cattttctacactcaggttttgtacactgaacatctttggctgaggaaccagacacttcaatccatgtcttagagaagaatgcacatgaccccaacatg

SEQ ID NO: 870467 - DNA, 99 bp, Homo sapiens
gtgcgaacatgtaacaagaatccaaagaaaacaaaatggtggtatcatgggagttcatctatgacactgactggaaacagctacgtgaaataccgtctg

SEQ ID NO: 870468 - DNA, 98 bp, Homo sapiens
gtgagggaagcgtctccgttgggtccggccgctctgcgggactctgaggaaaagctcgcaccagtttgcctatctggggcgcctggctcacgaggttg

SEQ ID NO: 870469 - DNA, 99 bp, Homo sapiens
gctatgagagccgagaccgggaatgggctacctacacctgtgtgctgggctttcacgtctacggtggcagtgctccttttggacttttctctaggtttg

SEQ ID NO: 870470 - DNA, 99 bp, Homo sapiens
actaggggcccgcaggcctgggaatttccgtcccccaccaagtccggatgctcactccaaagtctcagcagggaagcctaccccaactgcacagttctc

SEQ ID NO: 870471 - DNA, 99 bp, Homo sapiens
aaaggtcttatgagacttttgcactgtaaaactttacacattgtgctattcactctgctttacaagaatgtgacagtgatgataacatgggtgccaaaa

SEQ ID NO: 870472 - DNA, 99 bp, Homo sapiens
cccagcctgcacgtcgacgacagtgatgctgcttcaaaagtcatggtggaattgctcggaagttacacagaggacaatgcttcccaggctcgagttgat

SEQ ID NO: 870473 - DNA, 98 bp, Homo sapiens
gaaggcgcgagtgaggaaaggaggtactgtagctgagatctgtatctgtggacctgaatgttgatccctcgcttcagattgacatacctgatgcgctc

SEQ ID NO: 870474 - DNA, 98 bp, Homo sapiens
tcaacgtggcccatgggctggcatggtcatattacatcggatatctgcggctgatcctgccagttattgccttgtctgtcaagatccgcagttatgaa

SEQ ID NO: 870475 - DNA, 98 bp, Homo sapiens
tgggctccatcctgagctccatggagaagccacccagcctcggtgaccaggagactcggcgcaaggcccgagtgtatcgcattaagttcaaggagagc

SEQ ID NO: 870476 - DNA, 98 bp, Homo sapiens
gtgggggaagctggtaggcacgggcggctccgcagtgaccggactcgggggaggtgacttcatggtcatgacgattttcttcaatgtgagcaggcggt

SEQ ID NO: 870477 - DNA, 99 bp, Homo sapiens
aggacagaagcctacaggcagagccgaatgaatctgaagtctgctgcagtaaaacacagaaggctttaaaatgttttcttgcataaaattcaaaacttt

SEQ ID NO: 870478 - DNA, 99 bp, Homo sapiens
cctcagcagcccccaccacggccggaccgaaggtgcggcggcggaggggagccagggcgccccagcaggttttccaacctattggtggtatgtctgaca

SEQ ID NO: 870479 - DNA, 99 bp, Homo sapiens
gggaagtcgcctctgtgctcgtggctattatcatggaaaactaatttttcccagagaatttcctttcaaacctcccagtatctatatgatcactcccaa

SEQ ID NO: 870480 - DNA, 98 bp, Homo sapiens
agatggacagaaacaaggatggtgtggtgaccattgaggaattcattgagtcttgtcaaaagattgtggcccagaagaaggtgacccgcccgctgctg

SEQ ID NO: 870481 - DNA, 98 bp, Homo sapiens
ggaagatggcggagctgcgcgtgctcgtagctgtcaagagggtcatcgactacgccgtgaaggtgaatgaaaactttgccattgatttgatagcagag

SEQ ID NO: 870482 - DNA, 99 bp, Homo sapiens
gagattctacagaagtagaaatcagtactggagatatccttggaacagaagatcttattgtggaagtgacttccaatgatgctgtgagattttatccct

SEQ ID NO: 870483 - DNA, 99 bp, Homo sapiens
tgaagatgtcggccttctgagccgactgcggtggtcaagagacttcctagcatgggctgttgtgctggagagaacgagagctacgaagagactacagtg

SEQ ID NO: 870484 - DNA, 99 bp, Homo sapiens
aataaaaacagaacaggaggtggtagagggcatggatatctctactcgctccaaaggttggtgacatcgtgaaagtcacaaggatgaatataaatggcc

SEQ ID NO: 870485 - DNA, 98 bp, Homo sapiens
cagaatttatatagagatgtgatgttggagaactacagaaacctcgtctccctggatcagtcgcatcgaatacattcattcaaagaacttcatccacc

SEQ ID NO: 870486 - DNA, 98 bp, Homo sapiens
gaagagattcagccagcacactcctcgcgagcaagaaaacatccagtacagacctttctgatatccctgctctccctgcaaatcctattcctgttatc

SEQ ID NO: 870487 - DNA, 99 bp, Homo sapiens
ctggactccatcctcttcctttttgaagtgttgctctcttgccattcgtggatgagcgaaggctacgagctgccctagaagaggtatacccagacctca

SEQ ID NO: 870488 - DNA, 98 bp, Homo sapiens
cagcagttatttgcagctatcatgtgagtgaaactggaacgccaagctgaagaagaacgaatacggaagcacaaagcagctgctgagaaagctttcca

SEQ ID NO: 870489 - DNA, 98 bp, Homo sapiens
gccactccagtcggtgttgagcacggcgagcagtctcaggcctttagtgatgatgatgagagtccggagtgttgtcatgtgaagcctgccatccagga

SEQ ID NO: 870490 - DNA, 99 bp, Homo sapiens
gcagtcctaccatgtcagccttcccagtagctgggaccacagcaaatcgcagtcttctccaggctgacaaggcgaagggcatggcttcgaagtgcaaaa

SEQ ID NO: 870491 - DNA, 99 bp, Homo sapiens
ctggagagcttcatcaaaaatagtgatagctttgataatgcctgcaacttctcacccacactttcaacagagaattcagccaggtgcacggcagcgtca

SEQ ID NO: 870492 - DNA, 99 bp, Homo sapiens
gctctcccaccctggacacttctggaagtcagctgagtgtggatgaggtcaccattgtcaacattttgaccaaccgcagcaatgcacagagacaggata

SEQ ID NO: 870493 - DNA, 99 bp, Homo sapiens
aagcacaatataaagtttcatcaacttccataccgggagatggagcatttgagacagattatctccctccaaactctaaagaaggaatataaatcctat

SEQ ID NO: 870494 - DNA, 99 bp, Homo sapiens
aaaggcacaaaaacagagggtgagacagaagtgaagaaagatgaggccggagaaaactattccaagaagtttatctcgacaatgctagttgcagtctgt

SEQ ID NO: 870495 - DNA, 99 bp, Homo sapiens
tccagcgcttcacacctttcaccctgggcaaggagttcaaagaaggacacagctactactacatctggcagctgcaatgactctccgcacggtattatt

SEQ ID NO: 870496 - DNA, 99 bp, Homo sapiens
gcgaacgcttcgctggccatttaggagctctgctcaaagccagacggctcgaaaaattctgcgggaactgaagcatcaaaagcgctgtaaggaagcagt

SEQ ID NO: 870497 - DNA, 99 bp, Homo sapiens
cgggcgtgcatcatccacggggtgctgcagatcctgttccaggggacaccgtggtgtttaaggatggccagtactggatccgaggccggacctcagtgg

SEQ ID NO: 870498 - DNA, 103 bp, Homo sapiens
taaagaacgccttctacatcggcagctaccagcagtgcataaacgaggcgcagcgggtgaagaagaagacctatcaatgcatcaagtgtcagatggttttcta

SEQ ID NO: 870499 - DNA, 99 bp, Homo sapiens
atccagaagtccagagctgaggactgcctgtttgcagttgccaccttccagagaagaggtacgagatgacaagacaaccataaagtgtgaaacctcccc

SEQ ID NO: 870500 - DNA, 153 bp, Homo sapiens
gtaaaggtcttgctcccagcagcctccgcggtggatacgtcgccatcttggatccgcgggacaagaaaattcatgcgaaagaaagtcgtgctgtatccctactgacttctccagctgctggtataaaaacagttgatcctctgcctttgcggg

SEQ ID NO: 870501 - DNA, 99 bp, Homo sapiens
agaggagcttgtttgggagtgggggcagacggcgttttgcgcccaactgtcgtcctcttgagttctggcgccttgactactgggaagatgacttgcggc

SEQ ID NO: 870502 - DNA, 99 bp, Homo sapiens
tgcctctagcaataggattaactggccaacgagttttaggcgtgccaatcatagtacaggcatcacagaatattgtgggtaatgctaggcctaaagaaa

SEQ ID NO: 870503 - DNA, 98 bp, Homo sapiens
tgcgttgtagcagcagcgggagccaggactaaggacaagcaggagctgggagccccaggccagctttgctccaatggaggacaaactcaaccaggcac

SEQ ID NO: 870504 - DNA, 99 bp, Homo sapiens
agaaatcaaggagtatcttaaaatgtatccagttttatgctgatgagagctataacttaatgggccgcgcattgaagacggcaacctcattggctgagg

SEQ ID NO: 870505 - DNA, 98 bp, Homo sapiens
ccggacccgcaagcatgcccaccactgccacaaacgccgcaccaggtcttgtagcagcgcctcctcgaaatgagccgtcagactgctacagcattacc

SEQ ID NO: 870506 - DNA, 99 bp, Homo sapiens
gttaaagtagagcagaacagtgaaccatgtgccggctctagttctgaatctgatctccagccacctgtctttaccagtttccaagactatgttactggg

SEQ ID NO: 870507 - DNA, 99 bp, Homo sapiens
tttgtcaacgggatctgggagtgacactgggcatccgcttcgatcctgaaattccgcaaacactacgactagagtttgctaaggcaaacacgaagatgg

SEQ ID NO: 870508 - DNA, 99 bp, Homo sapiens
gcaaagcggggacccagaccctggagcctcagttggaagcagccgatccagcctgcggagcctgtggggcagcctttctgagaaaagtctacagcattc

SEQ ID NO: 870509 - DNA, 98 bp, Homo sapiens
ctggaccccaatagtagcttctctgttgttttttcatggagtattcagagtgagaaagatcagtctaaagaaaaggagaagaaagtgaaaaaaacaat

SEQ ID NO: 870510 - DNA, 98 bp, Homo sapiens
gccctggatggtggagagagtggtgtctggaggcctgtgtccagacttaattcagtgcacaaatgagatgaatgtgaacatcccacagttggcagaca

SEQ ID NO: 870511 - DNA, 99 bp, Homo sapiens
ataggggaagcgctccgggcctggaatccctacgcgtccctttgggtttagcacgatgagctcaatcggcactggggaaggatcagaatgttctctctc

SEQ ID NO: 870512 - DNA, 99 bp, Homo sapiens
ccatggcggaagcagaggagcagaaatgtagacaaccaatttcctgggcaagctgctccacctggattcccagtgtatcccgcgtttagcccactgcag

SEQ ID NO: 870513 - DNA, 99 bp, Homo sapiens
atctgcacttcgcattttggcattgacatttaattttagggtcctttatatagaagggagagtagtggaagccgtgaggtggtggatgaaggcttgatc

SEQ ID NO: 870514 - DNA, 99 bp, Homo sapiens
cggctcgctcacgggtcgttgaggccggtgacatgtctgtgagctgcggaggctgcggcccccaggatgtacagttacccagcacgtgtacctcctcct

SEQ ID NO: 870515 - DNA, 99 bp, Homo sapiens
tcttcttagttgatgatttagttgattctctgaaggtttttagaacttcagccataaaaatgggcagaattttccttgatcatatcggtggtacccgtc

SEQ ID NO: 870516 - DNA, 99 bp, Homo sapiens
caagaatcttgttggtgttggggtctgatctgcacattttgttctggtgattagtggaggtcctgggagccccgttccaccttcaccaggtcttgtaag

SEQ ID NO: 870517 - DNA, 98 bp, Homo sapiens
ttgaacatcacggaggagtcacacgtcatcgacaccggtgacagcctgtccatctcctgcagaccaagagtgcagatttccataagcgggaggtaagt

SEQ ID NO: 870518 - DNA, 99 bp, Homo sapiens
gtggtcctgactgtagctgccttgcccatgctgaagcagagcaatggaagcattgttgtcgtctcctctctggctgaatctggatcaaccttgaaaaaa

SEQ ID NO: 870519 - DNA, 99 bp, Homo sapiens
attgacaagctgctcctctgatatcacgttgagaggggggcgtgaagaacctgctaaggccatcaaacctattgatcggaagtcagtccatcagatttg

SEQ ID NO: 870520 - DNA, 98 bp, Homo sapiens
ggggcctcattttggatatctgtgataaagttggtcagtctcgcactgggtacaagaaaattccccaggacacagagctggtttggagcctttctttg

SEQ ID NO: 870521 - DNA, 99 bp, Homo sapiens
ccgggaggccgggccgagcggatcattttacttctccagatgaatatgatgaccctactgtgctctatgaagccatagtatctcatgagaagaacctcg

SEQ ID NO: 870522 - DNA, 99 bp, Homo sapiens
ctacggtcacgtctacaaggcgaggcggaaagatgggtagacgttacatccaagaggaaataatccaggcaaggaagcacaagctgatcaagatgtgta

SEQ ID NO: 870523 - DNA, 99 bp, Homo sapiens
ccctgacttatgaagcagttcaccaaacaacgcaagttggattggggcagtctttgtgcgttgtgattcgcctttgccagtctcatctcgtgtctgctt

SEQ ID NO: 870524 - DNA, 98 bp, Homo sapiens
tggcatcacaggcaacctcgccagtgccatctttctcccataccgggcagagacatgcgggagccggtgtttgagttcgtgcggccgcccccttacca

SEQ ID NO: 870525 - DNA, 98 bp, Homo sapiens
ttttttctaatggctattcaagggttacacatcattttggaatgactgtatatcatctggattacgtggctgtatgttaattgaattagcattgagag

SEQ ID NO: 870526 - DNA, 99 bp, Homo sapiens
ctgcccaacagccccgcgctcaacatgcacctagtcaagagccaccgcctgcagaatcttcagctacttggagcaacagccattgaggataaattacaa

SEQ ID NO: 870527 - DNA, 99 bp, Homo sapiens
tcatggttcagcgctttagcctcaggaggcagctatccaaggactgcagcattccagaaatagagcttttcccacaatctgacccagcctgttgtcctg

SEQ ID NO: 870528 - DNA, 117 bp, Homo sapiens
ttggtttctacagctttccccaatttctgcagcacattatttatacatctcctggataaataatgtgctgcagaaattggggaaagctgtagaaaccaaagatgaacgatttgaaca

SEQ ID NO: 870529 - DNA, 99 bp, Homo sapiens
gtgatcctttcctacaaattggattttctcattccactgtcaaaggtcatggaaaatggaagatttgcaaaatacaaatattttacccatgtcatgatc

SEQ ID NO: 870530 - DNA, 99 bp, Homo sapiens
ggccagctgactgcacttcttttttgagaaaggaaggaatatatcctgactgattgtgtgtagctgggacggtgctggtctgagctggaccttgtctga

SEQ ID NO: 870531 - DNA, 99 bp, Homo sapiens
tatggagcgccctgtaaggtatattcggaaacctatcgattacacagttctggatgatgtgggccatggtgtcaaggaattagcttaccgaaaggagat

SEQ ID NO: 870532 - DNA, 99 bp, Homo sapiens
aagcccttccattcaccagacattgtttccaacatatttgtcaggatacgaatcaggttctcttcaagtgctgccagggatctgaagaggtaccctgca

SEQ ID NO: 870533 - DNA, 101 bp, Homo sapiens
cagcctccctagtagctgggactacagaacttggcaagtggcttgaacctctgaaaaaccttagatttgaaattaactgcatcccaaacttaattgagtat

SEQ ID NO: 870534 - DNA, 98 bp, Homo sapiens
ctaaagataaaaggcagcaaatagtgaccaaacgaatgtttttggcaaatacattggtgaaggcctccttcagagctacacccccacggtgtttgagc

SEQ ID NO: 870535 - DNA, 99 bp, Homo sapiens
agcgcgaatatcgtcatcgttagaagcctgtggacatctctacagcaatgagtgaacgggcacttgctcagaaaagactcagtgagaatgcatttgatc

SEQ ID NO: 870536 - DNA, 99 bp, Homo sapiens
gcctgggcaacaagagtgaaaccctgtgtatacgccaaagccagcagagtcactgctgccatcttggtccttctaggaaggggaattctccgagagagg

SEQ ID NO: 870537 - DNA, 99 bp, Homo sapiens
gaagcactcgttccgggggtgaagcctcctgcgccggccttgcctcggcacatggattaattgatgtatgttgagtttatggagctgccttttggtggc

SEQ ID NO: 870538 - DNA, 99 bp, Homo sapiens
tatgatctacctaccaatcgtgaaaactatattcacaggtcagaatggcggcagtggagcatcgtcattcttcaggattgccctactggccctacctca

SEQ ID NO: 870539 - DNA, 98 bp, Homo sapiens
aagaggatggaatgatcatgtacatattttagatactgaaacatttacctggagccagcctataactactgctgctttgtaccgcctcagtggagact

SEQ ID NO: 870540 - DNA, 99 bp, Homo sapiens
acctgtagtcaatcacacgcagcaagaagttgagaagtttacagacctagagaaactctacctctaccttcagctgccttctggtctcagcaatggaga

SEQ ID NO: 870541 - DNA, 99 bp, Homo sapiens
actactccgtgacctggtacatcgccgagttctccgcctgtcttggttagatggctctggattaggattctcactggaataccccaccattagtttaca

SEQ ID NO: 870542 - DNA, 99 bp, Homo sapiens
aacaaagatgcctatacttgtgcaacccagaacgatctcttcagcacatcaggcaatgagtgggtcctgctgaacctcaatgtgacgggctattaccgg

SEQ ID NO: 870543 - DNA, 98 bp, Homo sapiens
tggacagcaacatttcccacaggacacgaagtttgtcggcccttgccttggcagagctgagctccagtggctgttggataattatgaaacagcggaag

SEQ ID NO: 870544 - DNA, 98 bp, Homo sapiens
gctcaactcccagaagaagtactttggcagaagcctggaactctacagggagctggacctcaacagcaccaaggatgacattgatcttgatgccttgg

SEQ ID NO: 870545 - DNA, 99 bp, Homo sapiens
tatgcctctttgaatagattgcagaatttttgtgcctttcagattgccgatcatgattgcaacaatgtctactgcacctcaaagttgtacttcctcatc

SEQ ID NO: 870546 - DNA, 99 bp, Homo sapiens
ggacaaggctagaagaatcttagagctttctggatccagttcagaggattcagagaaggttggaagatctgctctgagttcgtgggaagctattgtggg

SEQ ID NO: 870547 - DNA, 99 bp, Homo sapiens
aatttccatgtcaacatagtcctggagagagctctgttagcagaatgaaaaaattggaagccagattcagggagggactggaagcaaaagaatttctgt

SEQ ID NO: 870548 - DNA, 99 bp, Homo sapiens
tacgagctgtgcgaggtgatcggaaaggaactctaatgatccaggacaaagaagttaccctggagtatgtatcaagcctggatttttggtactgcaaac

SEQ ID NO: 870549 - DNA, 102 bp, Homo sapiens
cgctgatgcacctggttctcctggagcggctgctgctgggctggaaaagccgcagaagtcccagcagcagccgctccaggagaaccaggtgcatcagcgcat

SEQ ID NO: 870550 - DNA, 98 bp, Homo sapiens
cgaggatttcgcggtggattcagaggaggtcgtgggggccgggagtttgcggattttgaatatagggaaataatgcaaaaggtgtcccaaggctcctg

SEQ ID NO: 870551 - DNA, 99 bp, Homo sapiens
tcctgaggaagatgaagaccagagaaaccctgcaaaggagtccctagagacacctagtaatgatggtcatccagactcagagctctctctacagagagg

SEQ ID NO: 870552 - DNA, 152 bp, Homo sapiens
gcgtctgaggcgtcagggagctccctcgcctggctctcggcggcctgatggagtaagaggggttggctgtgaatagagcagagagcatcgatccggttcaagaccaccctcatgaacacactcatggacgtccttcgccacaggccaggatg

SEQ ID NO: 870553 - DNA, 149 bp, Homo sapiens
ggagtcccggcgttcttccgctggctcagccgcaagtacccgtccatcatagaccaaccacattcttgtaggccacagagaggagatttcgatcttcattggagagaggttcattcagctctgtcaccttctcttccacgcagttgact

SEQ ID NO: 870554 - DNA, 113 bp, Homo sapiens
ctccgttggcttcaattagaccggcctatggaggcgaagaaaacgatggccaggcgttttcttcgcctccataggccggtctaattgaagccaacggagaactcaaggtcttc

SEQ ID NO: 870555 - DNA, 99 bp, Homo sapiens
aatggatttaacatctacgtcagtgataaaatctccttgaatcgctctctcccagatatccggcacccaaagtaaggcacctatatatctgtgattttc

SEQ ID NO: 870556 - DNA, 100 bp, Homo sapiens
cctcatttctagcttttggacgatcaagaagaattttcagcgcaaaccgttcttgagtagatttctttacacagactctgtaatcccagccacttgggag

SEQ ID NO: 870557 - DNA, 99 bp, Homo sapiens
atcgaagcggatttccgattgaatgagcctggcccaactagagaatctgtgcaaacagctgtatgaaaccacagacacaaccactcgactccaggcaga

SEQ ID NO: 870558 - DNA, 98 bp, Homo sapiens
tttttgttcagggaccagcggaacgaggctttctgtcgttaatagggtttcaggcacagaactgtatatccaataatagtgaaatggatcccactaat

SEQ ID NO: 870559 - DNA, 99 bp, Homo sapiens
agcagtttaatgtccaggctcttgtggcggtgggagaccatgcaagcaagcagatggttaaatttgctgccaagctaagaaatggcatttcaaaaggca

SEQ ID NO: 870560 - DNA, 127 bp, Homo sapiens
ccttgctggatcctctgtggcccagtgtgcaacctgcatctgtcctggcccagaggacagatgcaggttgcacactgggccacagaggatccagcaaggatgaagaaatggagcagcacagacttgg

SEQ ID NO: 870561 - DNA, 99 bp, Homo sapiens
ccaccttgtggagtacatggaacgccgactagctgctttagagatggtccccacagagcttgttgagaaagaattttggagactagtaagcactattga

SEQ ID NO: 870562 - DNA, 98 bp, Homo sapiens
gagacttttctcagatgttggatatttgcttggaaaaacgtgtgggtacgaccttggtgtaaagcaggccctctggctcaccaagaccaagttaatag

SEQ ID NO: 870563 - DNA, 99 bp, Homo sapiens
aaaaggtgaaaggtattcttgtggatattgggcttgacagctgcaaggagttactgaagacttaattcagtgcacaaatgagatgaatgtgaacatccc

SEQ ID NO: 870564 - DNA, 99 bp, Homo sapiens
gggaagaagaagaaacgggccgcgaaccgcagtatcatgctggccaagaagatcatcattaaggacggaggcacgatttctacctggacaaggactggt

SEQ ID NO: 870565 - DNA, 99 bp, Homo sapiens
caggaaatgatagaaacaactttagatatggatcagcgtcatcacgtagacataaccaagaaacttcacccaaatcaagctggcctggattcaaaagta

SEQ ID NO: 870566 - DNA, 99 bp, Homo sapiens
ctggtggcaaagtcccagcattcagaatgggagagaatatcactgggtcacaatcactctggacttaagacaggatgagaacaagttgagcagtgccaa

SEQ ID NO: 870567 - DNA, 99 bp, Homo sapiens
cctggctccccatactagtcgccgctcaatcagtaaaaccaagtacaagaagaaagaaaggaatagaactgggagacattcagagttccatcgaatcta

SEQ ID NO: 870568 - DNA, 99 bp, Homo sapiens
ccttggaacttcatactatgtgcaatgtttccaagctttacttcgatgtgaagaaaatgttaaggagtcatcaaggctggtcttgaactcctgggctca

SEQ ID NO: 870569 - DNA, 99 bp, Homo sapiens
ctcccaagtagctgggactacagacctgtggatatctgggctttgggctgtatgatcattgagatggccactggaaatccctatcttcctagtagttct

SEQ ID NO: 870570 - DNA, 99 bp, Homo sapiens
catgaaagacttcctcaaggactacagtatgcacttaatgtccctgttgaaaaagatcatctagcaaagccttttttcccagctacatataaggaattt

SEQ ID NO: 870571 - DNA, 99 bp, Homo sapiens
cgaggtggtgggactcaccgctctggccagggtgcttttggaaacggaagagagttttcagaacaatttattcgacaagtttgcacagatgtaataaga

SEQ ID NO: 870572 - DNA, 99 bp, Homo sapiens
ggagagagagagaaagaggaggggaggaggaggaggattcagggaataggagctggggagcccttctgcgccacagctcttctcacagacagttttatc

SEQ ID NO: 870573 - DNA, 99 bp, Homo sapiens
ctctgcttctgaccaaacaattaatgtatcccaagaggaatgctccttcatctggtgctggttgctgtgagggccgccggcatggccacgccaaaagca

SEQ ID NO: 870574 - DNA, 99 bp, Homo sapiens
aagaagcatgtgcgactgcaggagagggggcagtacccaaaggaaacgctacgaaagaatacatggagagcttgcagctgaagcccggggaagtcatct

SEQ ID NO: 870575 - DNA, 99 bp, Homo sapiens
cccagggaagttcctttttgaagtagttccagctattgacctgaaaagtggttctggaaaagtgtaccaaggccctgcaaaaggtgctgctgatacaac

SEQ ID NO: 870576 - DNA, 98 bp, Homo sapiens
ctgagcgcaacacttctccgagccagcgagccagcgagccgccgacccgccgagcaaaatgctgcagaaccttggcctgaaaatgctacattatatca

SEQ ID NO: 870577 - DNA, 99 bp, Homo sapiens
gcgggtggccagcatggtagcaacgggtgttagaatggcccagttcctcccggtggttctcacaggaagagcttctctttcaagatgtgtagctgcccg

SEQ ID NO: 870578 - DNA, 99 bp, Homo sapiens
gacaaccatcttcattttgggagaaataactaaagagggagacgtggtgggcggtccttcctgtgacacgacccttgagtgacagttctatttgattgc

SEQ ID NO: 870579 - DNA, 99 bp, Homo sapiens
atccggaatgctgcccgatggccctgggtcctcgctgtggggcaatccgggcttgcagacgagccaccagctgaacaggccaaagccagactacagctg

SEQ ID NO: 870580 - DNA, 99 bp, Homo sapiens
tctacatttgtgaaagtcagtttctgaggaatttcatcagagttctaaagttcctgttgcttcagacaatggatgagcaatcacaaggaatgcaagggc

SEQ ID NO: 870581 - DNA, 100 bp, Homo sapiens
tactccagttgctggatatccaagcctctcagcttcggagaatggagtcttagactccattctccgaagctgagaggcttggatatccagcaactggagt

SEQ ID NO: 870582 - DNA, 99 bp, Homo sapiens
cactatcccagggagtgcaagcttagagcgtctggccaagaatcagaggaagtgggtgtacaagggagaagaagccacattccaaatctcaggcctcca

SEQ ID NO: 870583 - DNA, 98 bp, Homo sapiens
ggacaccgtctccatgcccgagttcatggccaacctcaggctcaggtcgttgaggacttccacatggagattggcacaggaccagactcaagacacac

SEQ ID NO: 870584 - DNA, 99 bp, Homo sapiens
ataaacttgccccaaactgagacagctgacctgatgtagatggtgatgccagcatcgatgtactggccgtagcaccctggaatgttgtaggtatatcat

SEQ ID NO: 870585 - DNA, 99 bp, Homo sapiens
aaccacatcgtgggatgcactttctcaaaccaaggctgctcttaacagagcgttccaaaaagaggactctccagctactttttattgcatcagtatgca

SEQ ID NO: 870586 - DNA, 98 bp, Homo sapiens
ttggatcttacacttgaaatacagactgttggggaacaagagactggtgtcgttcagtatttctacattgaagactggcaattcgttaatgattatcg

SEQ ID NO: 870587 - DNA, 98 bp, Homo sapiens
tcgctagaactcagttgtgcgttgcggccagtcgccactgctgtagtaaacctattgatggcaattttgctgactgtggaagtgactcatccaaactc

SEQ ID NO: 870588 - DNA, 99 bp, Homo sapiens
ccccacagtgcagcgctccgtgtttgcatcggtggacaaggtgccagatggagatggacacatggatcatttactgccaggctgtgaagataaaaattg

SEQ ID NO: 870589 - DNA, 100 bp, Homo sapiens
agaaactgcaccggaaatgtgcctaccagttccggaactttaagatcatttaccgccgctatgctggcctctacttctgcatctgtgtggatgtcaatga

SEQ ID NO: 870590 - DNA, 98 bp, Homo sapiens
cctaccaggtggacggcacggacgacagaagcgactttggtgagactctgggaaatgtttcaacgtgcgcaagcgttgcggcggcgggcagaggacta

SEQ ID NO: 870591 - DNA, 99 bp, Homo sapiens
actgaagacaaatttttttgccactagaaacatgtgcaacgagttactgccgataatgaaacctcatgatgaggtttatataactttccaagacaagga

SEQ ID NO: 870592 - DNA, 98 bp, Homo sapiens
agaggagtacttcgccacttactttaatgagaagatctccattcctgaggaggaggacctgaaggagaagaaggagaaggtggaggagaaggcaagcc

SEQ ID NO: 870593 - DNA, 99 bp, Homo sapiens
gccggagcccagatgagctgccctcggcgggcggcgacggcggcaaatctaagaaatttccatggcaatgacaggctcaacaccttgctcatccatgag

SEQ ID NO: 870594 - DNA, 98 bp, Homo sapiens
gaccctattgatggaacaactaactttgtacataggtctcttgcagctgaatggggtaaatatggaatgcgattcaatgtgattcaaccagggcctat

SEQ ID NO: 870595 - DNA, 98 bp, Homo sapiens
gaaacaagacagttctgtctgcagaagcccattatggctgtaactggagatgacacagagtttcataaatggacgctgacatggactacgaaagaccc

SEQ ID NO: 870596 - DNA, 98 bp, Homo sapiens
tagactcttcgggaaacctctccggagcgtagcctccaccccccactcgcagtccccaaggcagtggaccaatccagctatggcagtttcttctggaa

SEQ ID NO: 870597 - DNA, 99 bp, Homo sapiens
cttttggttggaaccgctgatggcaagttagcaatttttgaagataagactgttaagttgctctcaccagaagatttagtgaatgcgtgcaagatgctg

SEQ ID NO: 870598 - DNA, 98 bp, Homo sapiens
cagtggaagcttttaagcctatactttctaccagaagcttgaagggtttggttaaggaaagaccacagcaagattctttcattcgtctcctcctagcc

SEQ ID NO: 870599 - DNA, 99 bp, Homo sapiens
acctgaagatgcgcgccgtcttccccgaagatatcagttttagagaatgtggcgtggagaaattctcaaggaaagagtaaaatgctggtgatgtgctga

SEQ ID NO: 870600 - DNA, 99 bp, Homo sapiens
gtgctgccagatggacaaggagaccaaagagaacaacctctctgaagaaggcctggagctgctgaagactgctattgggaaagctggctacactgataa

SEQ ID NO: 870601 - DNA, 99 bp, Homo sapiens
aatttccagaaggtgcctgaccagaaaggaactcccaagcgactgcaggcagaagctgagacggctaagatatggtccggaaaaagaacccccctctga

SEQ ID NO: 870602 - DNA, 113 bp, Homo sapiens
gaacaatggcgctgtcttcagtggcacagtggagcagctctgaagatgcaaagtacaattacattggctatcttgactataaaaaggaaagaattcgtaagctttccatgaaa

SEQ ID NO: 870603 - DNA, 99 bp, Homo sapiens
gatctacctaccaatcgtgaaaactatattcacaggtattttgattccgttcaagctaaagaacagcgaaggcaacagagattacgcttacatacgagc

SEQ ID NO: 870604 - DNA, 99 bp, Homo sapiens
ttcaaggagtggtcatcccctatacttcagtgccaacatatcaggtgatgatgaacagtctacacagatggctgcaagttgggaagatgataaagttac

SEQ ID NO: 870605 - DNA, 99 bp, Homo sapiens
gctgcgtgagcgagagtatcgccttcctctggatcgagaatgtgatctagaccgtgacctgttgtttctgatatgcagtatttggatttatctttgatt

SEQ ID NO: 870606 - DNA, 98 bp, Homo sapiens
catgcgcctgccccacgggtgtgcagctgcaggacaacggcaggacgtgtaaggcaggccgctgcgcggccctgcgcatgctgctggcagatcagggc

SEQ ID NO: 870607 - DNA, 99 bp, Homo sapiens
gaattatgtgctaagtgaaaaatcatcaacctttctaatgaaggagtcagaaataccatcagaggaggggtactgtgactttaatagtaggccaaatga

SEQ ID NO: 870608 - DNA, 99 bp, Homo sapiens
aaaatctgttacttgatgaacttcagaagcatttgacattgtgcagcaaagaaatggttatggagaagcccagtccgctgcttgtagggcgggagtttg

SEQ ID NO: 870609 - DNA, 99 bp, Homo sapiens
ccgtttattaaaagagctgtggctggaaagagtgttataagtgggggtttggatgccttagaattcattggaaaaaagacaatggatgtgatagcagaa

SEQ ID NO: 870610 - DNA, 99 bp, Homo sapiens
ccctagccaccaggaacctggaaccctgcagggacagtatgatttggtgaaatgcctggctcctattcgagaccccaagaccgagcaggatggacatga

SEQ ID NO: 870611 - DNA, 98 bp, Homo sapiens
gctgtgtggccccgtgtcctgcaggtattgggagatccacagctaagacaccgggacctcctggaagccaaaaatgatctcgatttattaatgatgca

SEQ ID NO: 870612 - DNA, 98 bp, Homo sapiens
atcaggacaatgaaatccgagccactgacctgcctgagaggttccagtgggctcgggatgagtttgaaggcctcttcaagcagccagcagaaaatgtc

SEQ ID NO: 870613 - DNA, 98 bp, Homo sapiens
ggatttataacctctccaaaggagtcaaccgattctgcctgtccaagcctggcaaaatcctgacagatgactttgcagacaaggagggtctggaaatg

SEQ ID NO: 870614 - DNA, 98 bp, Homo sapiens
gacaatgatattgatgatcctgaccccgttgtgacaagtacaagactggagttattgatgggcctgcatgtaacagcctttgtgttacagaaactctt

SEQ ID NO: 870615 - DNA, 99 bp, Homo sapiens
gcctcagcctcccgggtagctgggactacagactggtcttctgaggacctctgccctctacacagcggcctcttcaggtgcagggaggaaatggaagca

SEQ ID NO: 870616 - DNA, 99 bp, Homo sapiens
acggctcaacccaccgctgccgaaatgaagtataagattctgaaggaagatttccattaggtaatttgtttaatcagtgcaagcgaaattaagggaaaa

SEQ ID NO: 870617 - DNA, 126 bp, Homo sapiens
tagaagctgcaatgattgaaggagaaattgagtctttacattcagagaattcaggaaaatcaggccaagaggaatctttgtctgaagtggaagaaaaatacaagaaagccatggtttccaatgcac

SEQ ID NO: 870618 - DNA, 99 bp, Homo sapiens
caagtgtcatgaaggaaatgggacatttgagtgtggcgcgtgcaggaattcgatgtcttctttccgtcctgggagaggacataatgatagtcggaggac

SEQ ID NO: 870619 - DNA, 99 bp, Homo sapiens
aaccaaacatcagaaatacatccagcatggctggagatgaggatgacgatgaaccagaagaggatgaccaggaaataaaagataagactctgcccaggt

SEQ ID NO: 870620 - DNA, 99 bp, Homo sapiens
ttgtgtcaatggaggcacctgtcggcagactggtgacttcacttttgagtgcaactgccttccagtggatgaggatcgcagtacggaacctgaccgatt

SEQ ID NO: 870621 - DNA, 99 bp, Homo sapiens
agaccatattctacggggctttcagcaaatcaaagccagtggtagcaactgcccttgctaatcaccgtaacctcggctgagaaagaagaggaagcgaaa

SEQ ID NO: 870622 - DNA, 99 bp, Homo sapiens
gttactcaaacagagggaactacaacagaggtggaatgcccaacagagggaactacaaccagatcgggaggagtgcacttgtgacctcctcttcatctc

SEQ ID NO: 870623 - DNA, 98 bp, Homo sapiens
ggacactcctgagctacagagactgaagaggactcaggagcaaatcagtaatgaacggaaaacagttcttccttcaaagcatgcagtacctgaagtaa

SEQ ID NO: 870624 - DNA, 99 bp, Homo sapiens
cttgaaacaaaaggagaccctaatcttcaggatctagtgaaaagccatttgatgtatgcggtcagagaagaagtggaggtcctcaaagagcaaatcaaa

SEQ ID NO: 870625 - DNA, 99 bp, Homo sapiens
atcaaccttctcaaatctaaaaaatgtcccttcattgttgcactcaataagacttgggaagatccccatgaaaaagataagagcacgaactgctttgga

SEQ ID NO: 870626 - DNA, 99 bp, Homo sapiens
gatcgtccattatatcttcatgttcagggccagacacgggaattagtggacaattggctctaccagtgcacctggacagggaggaatcctggctcagcg

SEQ ID NO: 870627 - DNA, 99 bp, Homo sapiens
tgaaaggagacgtcagaacgtggcttatgagtacctttgtcatttggaagaagcgaagagcaacatctgaatgaattgatgacgaagaagtggctatta

SEQ ID NO: 870628 - DNA, 99 bp, Homo sapiens
ctcgaaataattgcacaggctcagggccttctaacgatgacgatattcgcgctctcggtcacgctctcggtcacggtctcggtcacgatcccggtgcct

SEQ ID NO: 870629 - DNA, 98 bp, Homo sapiens
ggactgccacgtccaagcaaaccgggaaaggagaggatcccggagccgagaccccatccttggtggtccccttggaagaccgtgtggtatctgtggga

SEQ ID NO: 870630 - DNA, 99 bp, Homo sapiens
cttttaatgagattgacatgaggttatcaatactctggctgaccatcatcatcgtgggactgactttggtggaagtccttggttacatgtcattattgc

SEQ ID NO: 870631 - DNA, 99 bp, Homo sapiens
gcaaacgcctggatcagccacaaatgtacccccagtacacttactactatcctcattatctccaaaccaagtggatgattcaacagccacacaaagcag

SEQ ID NO: 870632 - DNA, 99 bp, Homo sapiens
cggacgggaaggcgggagacgagaagcctgaaaagtcgcagcgagctggagccgccggaggaccctaaagtaaattggttgaagaaattagatcccaaa

SEQ ID NO: 870633 - DNA, 99 bp, Homo sapiens
agagggacttgtacagggatgtgatgttggagaactacagcaacctgatctcattggcctggggactcctcgggatggaaaggccttccggatctttgc

SEQ ID NO: 870634 - DNA, 99 bp, Homo sapiens
ccggccggagctgggtctggagacgccgtggcagcctgaacggagtgtgcgacggattgggagttgggtggaaagctttggacatgaagggcttggatt

SEQ ID NO: 870635 - DNA, 102 bp, Homo sapiens
gagaataactacaaggttcatcttctttagattctgaatctattggatgaccaattacactcaaatcactcattcgacctgagttgctgagctgctaatatt

SEQ ID NO: 870636 - DNA, 98 bp, Homo sapiens
tgcagccacatactatccgtttgttcaggaaccaccagtgacagactgccactgcagagccccgccatggaagacacgccgttggtgatatcgaagca

SEQ ID NO: 870637 - DNA, 98 bp, Homo sapiens
cggtttcttttggctcacaattatcctagagtgaggacttagtaaaggagtttggaattagtccatcagacattcccttctcacagggtagtggcagt

SEQ ID NO: 870638 - DNA, 99 bp, Homo sapiens
agcagagttcacagtggatgccaagcacggtggcaaggccccacttcgggtccaagtccagctgtaatggtggctatcctgctgaagcttggaacttct

SEQ ID NO: 870639 - DNA, 99 bp, Homo sapiens
cagcggcggcggcggcaccccgggcgcgcacccttacccttctgaagaacagaaaaagcagttggcacaagacacgggactcaccatccttcaagtgaa

SEQ ID NO: 870640 - DNA, 99 bp, Homo sapiens
caagctgtgcgacctcttctgcggccggcctgggcaggtgtcttcctcgagaggcaggcaggggatcccggaccctcccctggtgaagacacaaactgt

SEQ ID NO: 870641 - DNA, 99 bp, Homo sapiens
tctgtttatttagaagacacagactaacaattttagatgcctatgctattggcatgatacttacatttgttgttctggtgctgatgaaaaaggggcaac

SEQ ID NO: 870642 - DNA, 99 bp, Homo sapiens
atcgacctgtaccagagattccagggtcaacaaaaggagtttctgggagatacttatcttcagcaaatcctaatgataacagaactagctccaatgcag

SEQ ID NO: 870643 - DNA, 99 bp, Homo sapiens
agaaaagccaaagcactagtggcttgccagattgttctaccagacccaggacgcagagggctctacgtgtttgcacctggctgccaagaaaggccacta

SEQ ID NO: 870644 - DNA, 98 bp, Homo sapiens
atcggtgggtttatctcaaggcctgagtagccggtaacaaacgagggttcccgggattggaccgacgcagccatgacatgaagaggagcatcggcggc

SEQ ID NO: 870645 - DNA, 99 bp, Homo sapiens
ggagtaaggtccagaatgacacggatgcctacagtaagttttgcaaattcatttggaaaattcttctctaaccattgtctacatttagcaacatcaggc

SEQ ID NO: 870646 - DNA, 99 bp, Homo sapiens
cctcaccaagaagctactggacctcgttcagcagtcatgtaactataagcagcttcggaaaggagccaatgaggaccaatgatgcgagctcagagtcaa

SEQ ID NO: 870647 - DNA, 99 bp, Homo sapiens
gcaccattgcctcattcaacatcaacaccaacgcctgggtggcccgaaagacctctagttttccagactcccggagccctggtctctacaccacatgga

SEQ ID NO: 870648 - DNA, 99 bp, Homo sapiens
tggattttgtcgctggacgtctagagatgtgggcatggcagacaaatctgtagggagagtcacaccgggacagctcatgtcctatattcagctcttcaa

SEQ ID NO: 870649 - DNA, 99 bp, Homo sapiens
gaagataacggcttctggaagatcccacatcccgtcatcacaaaaaccagcctcccagtagcattagtgccagcagtagttcccaagggctgtctcagc

SEQ ID NO: 870650 - DNA, 98 bp, Homo sapiens
cggccgtggaagcggccaccgactactgtcagcagctgtgccagatgtggaattagaagaagctattagaagaagtcttgaggaaatgtaattaaaga

SEQ ID NO: 870651 - DNA, 99 bp, Homo sapiens
cctcttcgtgctcaacagcaaagaagtggcacaggccaagccacaggtggaattaagaaatctggcaaaaagtaagctgttccttgtgcctgaggagat

SEQ ID NO: 870652 - DNA, 99 bp, Homo sapiens
ttaaatgcggttgaatttctgtgggacccagcaaaacgcacctctgctttcattcagatgctgggctcttgcactgtttggtggaaatggtgagacagg

SEQ ID NO: 870653 - DNA, 98 bp, Homo sapiens
tgaggaagagagcagctcgcttctaactggactgcacgtgctggagaatctggtaaaagcaccattgtgaagcagatgaggatcctgcatgttaatgg

SEQ ID NO: 870654 - DNA, 99 bp, Homo sapiens
ggcacatttctccagggtggccttgtccttaagggctttatctttcatccaattcagcagaggctcaaattctttctcaactgcttcacgactctcctt

SEQ ID NO: 870655 - DNA, 99 bp, Homo sapiens
acctgtaaattatgtgaaacctccaaatgtgggctcgtggtcccaagaagcatctgaagcgggtggcagctccaaagcattggatgctggataaattga

SEQ ID NO: 870656 - DNA, 98 bp, Homo sapiens
tcgcgggagcctttggggcaccacagagatgcgggtaacatttgtcgatcacccattgcagaagcagttttcaggaaacttgtaaccgatcaaaacat

SEQ ID NO: 870657 - DNA, 98 bp, Homo sapiens
tcgtcctgtggacgcgtatcgccagcacgatcccaccgcacgttcagaagtcggaccgtggctgagcatggagctgtccccccgcagtcctccggaga

SEQ ID NO: 870658 - DNA, 99 bp, Homo sapiens
gccatgtcgacgcaagctggattcagatccatatccagattcagtctctttccaagggctgacaaactgtgtccgagcatatcgagttagcatgtggat

SEQ ID NO: 870659 - DNA, 99 bp, Homo sapiens
tgcctctgtggttatctttacaatacttgggacttgatgggtttgtggagaggatcaagcatgcctgtcaactggtatgatctcgtgaaaccttgagag

SEQ ID NO: 870660 - DNA, 98 bp, Homo sapiens
gaaggagaagcagagcaccaaggcaaggagcaaactttcccagctgcatgaaagccgccaggaggcccacaggagcctggagcagtatgaccaggtgc

SEQ ID NO: 870661 - DNA, 99 bp, Homo sapiens
tcggcgtcgcgcggcgtgccctgcttgtcacaggataacaaagccattgacctttgccgattgtgttggggacgaacttcctttaggatgggaaaccgt

SEQ ID NO: 870662 - DNA, 98 bp, Homo sapiens
ttctcctactcccccttgttctccagtacaaccttcaaaacaactggaatatttagcaaggattcaaggctttcagactcgtcctcccactgacttga

SEQ ID NO: 870663 - DNA, 98 bp, Homo sapiens
aaggattcgttacagccagagattggttaaaaatgtgtctgcaggcacacaggacgtgccttcacccccatctgactatgtggaaagagttgacagtc

SEQ ID NO: 870664 - DNA, 99 bp, Homo sapiens
cgcaatcagaaaatcaagtaaaggaacccaacagagatctcttctgttctccactgctagagcccataggcagcatgtcatccatggaagtgaacgtgg

SEQ ID NO: 870665 - DNA, 100 bp, Homo sapiens
cagactgtgcttcttgtgcaagtaatcagtctttgacaagtgatgagacagcttctcatcacttgtcaaagactgattacttgcacaagaagcacagtct

SEQ ID NO: 870666 - DNA, 99 bp, Homo sapiens
agcgtcatttccatttgtacgatttcagattagattcctgtggcaacatctgtatattccttctaacgatgacgatattcgcgctctcggtcacgctct

SEQ ID NO: 870667 - DNA, 99 bp, Homo sapiens
cactaatacacctcctgtaattgatgtgccatccaccggagccccttcaaaaaaggttctaatagaagactgtatcccggtactgaagaggtacgccaa

SEQ ID NO: 870668 - DNA, 99 bp, Homo sapiens
tagtgaagtatttgaggccattaatatcaccaacaatgagagagtggttgtaaaaatcctgaagtttcagtcattcagtcagtaccgctgtaagactgc

SEQ ID NO: 870669 - DNA, 98 bp, Homo sapiens
tgtgataaaaaaaaaattcatctgggcggtatctggaacttggatggccaaccattggcgggactgatccaggatcacatggtttcaggggcaagcat

SEQ ID NO: 870670 - DNA, 99 bp, Homo sapiens
gggcgtaggaccctccgagccagatcgcagtggtcatgggctcctgcaccgcaggaggagcctatgtgcctgccatggctgatgaaaacatcattgtac

SEQ ID NO: 870671 - DNA, 99 bp, Homo sapiens
cacagaatcagcaaagaggaggccatgcgctggttccagcagaaggaggagagggcagtgagagataggaatctcctccaggttcatgaccataatcag

SEQ ID NO: 870672 - DNA, 100 bp, Homo sapiens
atcaggggaagatatgcatcagttagcatcagatttggaagcctttgaaagttctcgctgtagtaatggctcgatggaactgatgcatatcttcccctga

SEQ ID NO: 870673 - DNA, 100 bp, Homo sapiens
cagcctcccgagccgctgaggtctgctgaactggtactgctgggactgaagtcatcattgaaggtaaaattctgggctaatctcaggtactcgggaggct

SEQ ID NO: 870674 - DNA, 99 bp, Homo sapiens
tttcagcctgcgagccttcttcccggggcgccataaacgcccccaatttcccagctgctaaaggaagaggaagacaagttggatggcttgaggactggt

SEQ ID NO: 870675 - DNA, 99 bp, Homo sapiens
ttgaaacaaggaattgccccatagccttcacaggcttgcttccggcgtcatggctcaaagggccttcccgaatccttatgctgattataacaaatccct

SEQ ID NO: 870676 - DNA, 99 bp, Homo sapiens
cagcagccgtcggagcacttactggagtccaagatgctaatggatttcatgatgtgctgggcaatgaaagaccttctgcttacatgagggagcacaatc

SEQ ID NO: 870677 - DNA, 99 bp, Homo sapiens
atcccggaaggtgctcttctggcaggaccttgaccagccgagggccatcgccttggaccccgctcacggaaatgagccgtcagactgctacagcattac

SEQ ID NO: 870678 - DNA, 122 bp, Homo sapiens
gcagatattaaatctgggagcaaaattgtatttaaccaactccaaacaggactctcacagaaggaggaagaggaggacacttttattgaagaacaacaactagaagaagagaagctattgga

SEQ ID NO: 870679 - DNA, 99 bp, Homo sapiens
gggcacgatgttgaacatgtggaaggtgcgcgagctggtggacaaagccatgccaatgaagatgtggaaagaatgttactaggaaacaagtgtgatatg

SEQ ID NO: 870680 - DNA, 99 bp, Homo sapiens
ggaaattcagttatcagtcccgtgggcaatagagtcactgtatttgaccttaaaaagttgctccttgagggcaggacagttcttatggctttatccgtt

SEQ ID NO: 870681 - DNA, 99 bp, Homo sapiens
ggagacaccgattataagaagagaaactcagcgctggggaagaaggtaaactaacattatggatttttccaagctacccaaaatactcgatgaagataa

SEQ ID NO: 870682 - DNA, 99 bp, Homo sapiens
aatcaagcagtgaaaggaaaagttgctggagcactcctgagagccatcttcaaaggacagttttagaagacgacagaaagaaaaaagaaagagaatgaa

SEQ ID NO: 870683 - DNA, 99 bp, Homo sapiens
gtacctctccttttccctctccctttccctaaggctagtgatacagagcgagatggactagccccagaaaagacatcaccagatagagataagaaaaaa

SEQ ID NO: 870684 - DNA, 99 bp, Homo sapiens
caccgcaccgcgcgggcggccatggagcgagcctagggcccgacagatcgtcagtatttaaacagatcacatcatgcgtgagtacaagctagtggtcct

SEQ ID NO: 870685 - DNA, 98 bp, Homo sapiens
ctggacaacaaccggccgctggaggcgctcatggaggtgtctgtgtctgagtccggcagcgtcttctcttgagggagcaatttggagaagagctggaa

SEQ ID NO: 870686 - DNA, 99 bp, Homo sapiens
ccggcccacatactgtcactgagctatgatggcacgttacgctgtggggatttttccagggctatttttgaagaggttcaagcaattcttctgcctcag

SEQ ID NO: 870687 - DNA, 98 bp, Homo sapiens
ccacacaccagcggctgcaggactgggcacagcatgagatccaaaggcagggcaaggaaactggccacaagaagaggatcacctagcccgggtagaag

SEQ ID NO: 870688 - DNA, 99 bp, Homo sapiens
ttgcctggatttataccggttcagcaagtatgttctcagaagctatacactcattatctgatacttgtaatcagctgactcaggtgttgacaccttggc

SEQ ID NO: 870689 - DNA, 99 bp, Homo sapiens
tcaccaagaagctactggacctcgttcagcagtcatgtaactataagcagcttcggaaaggagccaatgaggattggagctggagtgagccttccagga

SEQ ID NO: 870690 - DNA, 98 bp, Homo sapiens
aagattttatgataaaatgcaaaatgcagaatcaggacgtggacagaacgcacagcaggtgcacttcaggacacacctggaggagaagccgcacgtgt

SEQ ID NO: 870691 - DNA, 99 bp, Homo sapiens
ggatacagctatgcaaatatagaacactaaagtgttacatgacagatgtatgaggtgatattatacccaacttctaatagctccaaatcagctgaatta

SEQ ID NO: 870692 - DNA, 99 bp, Homo sapiens
tggccaaagcctgcccagacggctcacctgtgcgggatggaacaaaaggtaacggcgactgtgactgtggtgaatgtgtgtgcaggagcggctggactg

SEQ ID NO: 870693 - DNA, 99 bp, Homo sapiens
aagaataaagacaccgtttttgaagaacaaattaaagttcttaaatcaagcaaggctcattggtgggcagtattacttatgggaattgctctgatcatg

SEQ ID NO: 870694 - DNA, 98 bp, Homo sapiens
gcagcatggagaggggccgtggcccctgcagcggaaccggacccagtccctgagccgcccctacacccacagggtggttctcttcccaaagtggaagc

SEQ ID NO: 870695 - DNA, 99 bp, Homo sapiens
gaagagacgagctgtggggatctggcactgtggttcctgcatgaagacagtggctggcggtgcctggacgtacaagctgtgggtgagcgtggaggatgc

SEQ ID NO: 870696 - DNA, 98 bp, Homo sapiens
gacaacccacatatccaaattgacagatgaccaactcataaaagagtttcttagtggttcttactgctttcgtggggatctcaaagatttcatgagac

SEQ ID NO: 870697 - DNA, 98 bp, Homo sapiens
gggacttctgcccttcctgggcccgggcctcgggggcgattccggggtgctgtgattacaccaaccatggaccatcccatgtcaatgcagccagccaa

SEQ ID NO: 870698 - DNA, 99 bp, Homo sapiens
caccaacatagccatcgacttcggggagcaggcttccagcatagagaacaagcaggactggataaagcatatccgcgaagtcatccaggagcggacgat

SEQ ID NO: 870699 - DNA, 98 bp, Homo sapiens
gacactttatcaatcactcattcaaaggatcagttcttaagagcagccccggtaactggaggaatgggagccgttttgatgagaaaaatgggctggag

SEQ ID NO: 870700 - DNA, 98 bp, Homo sapiens
gaggagatggtggaggaggctgaagtggaaatttaatggagccaccatttcagaaccaaaagaaatttggaacaaacttcacaaagctggaaaagaaa

SEQ ID NO: 870701 - DNA, 99 bp, Homo sapiens
gtcatctgctccatcatcacaagcttccacataaaatttttcaggtgtgatatgcctcgcagtggtaacactccacgtggtagtctctgtccatggaca

SEQ ID NO: 870702 - DNA, 99 bp, Homo sapiens
gcgccttcttcctggacatgaccaactgtactatactggcaattgctggagaagattttgcaattgttgcttctgatactcgattgagtgaagggtttt

SEQ ID NO: 870703 - DNA, 98 bp, Homo sapiens
gtgtgttgggctgtaacccgggtcccatgaccctccaaggcaccaacacctacctagtggggaccggccccagattttctctgtgggcagttcttttt

SEQ ID NO: 870704 - DNA, 99 bp, Homo sapiens
agctgttacaatttgtaaaagcaaatgatgatgtagctcaagagattgctgaaaggagttcatgatcaagtgttgcccacaccaaatgcttcatccaga

SEQ ID NO: 870705 - DNA, 99 bp, Homo sapiens
ggggaattttcttattaatcctttactccatctataatatgattttcctgttgtagtgcattccgaagtccttcttctgaagaaaactgaacccaaccc

SEQ ID NO: 870706 - DNA, 99 bp, Homo sapiens
cacgcaccagatctgcaaactgcgaaaatgtgaggtgctgaagaaaaaagtagggcttctcaaggaggtacccactgatggtaatgctggcctgctggc

SEQ ID NO: 870707 - DNA, 143 bp, Homo sapiens
ccaccaacatgggaggattagaaggagctgtggtgtacattgacacagagtctgcatttagtgctgaaagtgactgcaagaggacctgggtgtctccaagggcccgaaataacaaaacagctgagcgcctatggaatgtcagc

SEQ ID NO: 870708 - DNA, 100 bp, Homo sapiens
agctatttcacacttcagatgctgatcccctttgtaactaagcggtaaatatttaccgggagctcagggactcgcttcagcatctgaagtgtgaaatagc

SEQ ID NO: 870709 - DNA, 100 bp, Homo sapiens
ggagcagagttttctttcctatgactggagtgccaaaatgctcagggttggtgagtgggagctggtctaatgtccggtatttattctctccgatctgctc

SEQ ID NO: 870710 - DNA, 98 bp, Homo sapiens
agaccgccaacctggatggagagaccaacctgaagcggcggcaggtggtccgcggcttctcggagcttgaattgcattttgtgaaaaaagaacaagaa

SEQ ID NO: 870711 - DNA, 126 bp, Homo sapiens
gtcgagattatcgtagacggcacagccacagccattctcccatgtctactcgcaggcgtcatgttgggaatcggatgaagtggtgaagagagcctgcgattgaagattttttcatctcagcttttt

SEQ ID NO: 870712 - DNA, 99 bp, Homo sapiens
ctgcttcacaatggtgcttttaccagattctccagcacccaatgagagaagattcctgtaattctccagcatcacttctttgtatagattcctctgctc

SEQ ID NO: 870713 - DNA, 99 bp, Homo sapiens
atcaataatgaaatgctgactaaggaacaaggcacattgcaagcaacccgtgccttgatggtggttggcatcctcctgggagtgatagcaatctttgtg

SEQ ID NO: 870714 - DNA, 98 bp, Homo sapiens
ttcctcctctcgaatgcagcagccacagatctctgtctacagtggttcagaccgacatgctgtacagtgtaaactggagttgctggtgggcagccctg

SEQ ID NO: 870715 - DNA, 98 bp, Homo sapiens
ccggggtccgccgtcctagccgctgctgtcttcgtgggaggcgccgtgagttcgccgctggtggctccgggtgctctgtggatgtgtatagttttaaa

SEQ ID NO: 870716 - DNA, 99 bp, Homo sapiens
gaaactacaacatcttgagttgatggaagatattgtggatttggcaaagaaagttgctacactgtcacatgaacccaaagtccttcaagagggtctcct

SEQ ID NO: 870717 - DNA, 99 bp, Homo sapiens
catgaacccagtgaagatatatcaagtgtgtgacatccctcagccccagggctcgatcattaacccagtgatttgtcctataaccagctgacccgcctg

SEQ ID NO: 870718 - DNA, 99 bp, Homo sapiens
tctgagtcaggtttctccagggaaagaaacagatgtgtggcagctctcagaaaagaagcaaataaacgtgtgctcccagttggattggaaacgctccct

SEQ ID NO: 870719 - DNA, 99 bp, Homo sapiens
tgggcctcccggtccgcaagcaggtgaatgcatcccggcagggtattgaagatgctgaagaaacagcaaatcaaacttgtggtgggacagattccacgg

SEQ ID NO: 870720 - DNA, 99 bp, Homo sapiens
gcctctcaaagtgctaggattacagctgtcccccagcgagcagatcacagggtagtgggcaccatcgaccagcttgtgaaacgtgtcatcgaaggcagc

SEQ ID NO: 870721 - DNA, 99 bp, Homo sapiens
gcagcaactgccgcacccttgaaaggaggcccctgccgtgtggacccgtaaaataaaatgggaattggtccagatggtcatatcgctttcaatgagcct

SEQ ID NO: 870722 - DNA, 99 bp, Homo sapiens
gaacttcaagacacttacgggtttcttctgtttgatactgaaaagcaggctttgaagacaagattcccaaaaggagattctctgagatgcaaaatgaaa

SEQ ID NO: 870723 - DNA, 98 bp, Homo sapiens
caagtcaagaatccttttggcttagagatcactaatccatcttcagcttcaattacaactccataatgggagaagtaaagaacaaagacttaaggaac

SEQ ID NO: 870724 - DNA, 98 bp, Homo sapiens
ttcccggaatcagacggtgccccatagatggccagctttcccccgagggtcaacgagaaagagatcggagtggcaagaattacaacaaagcatacagc

SEQ ID NO: 870725 - DNA, 98 bp, Homo sapiens
agaagaaaaggtgtacttgcaagaaacctcaggacttgagtaacagcaacatgatctaccttctgagatatcatccttcttcagggagataaggaaaa

SEQ ID NO: 870726 - DNA, 98 bp, Homo sapiens
gtaaccattacaaatgatggtgctaccattctgaaacaaatgcaagtattacatccagcagccagaatggaagaggagttgtacgcatgtcagagagg

SEQ ID NO: 870727 - DNA, 98 bp, Homo sapiens
gtgtggcagctgctctgaaccaggacctggacccggacccaaagtgccatgtctttaattccgcaaccatccctctgttcatgcgaaacaaagatgtc

SEQ ID NO: 870728 - DNA, 98 bp, Homo sapiens
ctcattgaacatatgcaagaatatgcctgttcctgtgatgtggaggaaattttccgcaaggttgattcacaaaaggctgcaacaaagcaagtcaacaa

SEQ ID NO: 870729 - DNA, 99 bp, Homo sapiens
ctgggccatattcttggtcacctctgcttcaatgtacagtttccagaatctgccagaactggggaactgggcaacaaggcgttcataagtcttccgtgc

SEQ ID NO: 870730 - DNA, 99 bp, Homo sapiens
tttttattccacgaggaggagtacctggaaattagatgaggtggaaagtgagaaatggtacctgtctacagacttcccttcaacatccatcaagacaga

SEQ ID NO: 870731 - DNA, 98 bp, Homo sapiens
tataagacaacaggactgaacagggagccaactgtttctttgaacagtaaatcaggcagtgaaggtagaaaaggccagtgtcttagtccattgttctg

SEQ ID NO: 870732 - DNA, 99 bp, Homo sapiens
ggagagttctgcatgttgattcgctgcccggcagctctgacagactcagaggacgagtccccagaagacatgaggctcccaccctatggcctttgtgag

SEQ ID NO: 870733 - DNA, 99 bp, Homo sapiens
ggagagagagagggggactctgtgtgagggaaagaaaacaatttctcctgctctgcagcttctgttcagggaggaatgatcaattggaatcgtcttttt

SEQ ID NO: 870734 - DNA, 99 bp, Homo sapiens
tctggtccaaacaatcatgggaatttccaaggggattcaaacttcaacagaatgtggcaaccaggctgttcggctcttgaatcccagcgatgaaaccag

SEQ ID NO: 870735 - DNA, 99 bp, Homo sapiens
agcgcgggatcccagcctcaggcgtgcgcggacggtgtgcgggtctcctctgagcctccggcctccataagacccaaaacagatgacacctcttcccag

SEQ ID NO: 870736 - DNA, 99 bp, Homo sapiens
gtaattggctacgtgctcttgtttgggattaacatgatgagtacctctccactcgactccatccatacaatcacagatggagtctcgctctgtcaccca

SEQ ID NO: 870737 - DNA, 99 bp, Homo sapiens
ggaatgcctgagcgggacatggactcaacagatctgtctgcctgcaatctacaagggttgcaatattatctcatatctttggggctgcttagatttctt

SEQ ID NO: 870738 - DNA, 99 bp, Homo sapiens
ctcactcttcatggtcactggcatcaacttctaactcatctcgccaggagaggcctccagtgaaacccttcattctcactcggaacatggctcaagcca

SEQ ID NO: 870739 - DNA, 99 bp, Homo sapiens
cagatcaacgtcctccgggaccggagtcagaaccctccgcagagtaaagaatcctgtgaagcagctccagctatgtgtgaagaagaggacagcactgcc

SEQ ID NO: 870740 - DNA, 98 bp, Homo sapiens
gaaactcaagctttgatcttggctcccacaagagagttggctgtgcagatccagaagtgctcaggagctgtcccaggaaatcaaggcttttctgactg

SEQ ID NO: 870741 - DNA, 99 bp, Homo sapiens
ccaagcccggggcctgttgcctgggggcacacaggtgctggatggtacctcggggttctctcctgcccccaagctggggtctctgtcacccaggctgga

SEQ ID NO: 870742 - DNA, 99 bp, Homo sapiens
ctaacacggtgaaaccccgtctctacttgagcgtgaaaaggctgattcggccaggcagtttataaaacaacccctctcctcctcttgaattggaatgta

SEQ ID NO: 870743 - DNA, 99 bp, Homo sapiens
cttgagtagctgggactacaggccctttcttgctgccttgctaccaggtgggcagccagcccagcacagccatgtttcacagtgaagaaaatggctcga

SEQ ID NO: 870744 - DNA, 98 bp, Homo sapiens
agctcgcccccaacttccagggcagcttgaaatccactctccagatgctaagcacacggtgatcctaaggagcaaggactcagccacggcccaggcat

SEQ ID NO: 870745 - DNA, 99 bp, Homo sapiens
acaaaatgaactttcctaatggtgttacaaatggatactcttggtatccactccaagggatgtgtttggccaaatgggagagtggttacaacacacgag

SEQ ID NO: 870746 - DNA, 99 bp, Homo sapiens
aatgatcttggtacccgttgcagtttctatgccacggtgatttaccaaaaaccacaggttctgtcttttacacatcctacctcgttccactctgcagag

SEQ ID NO: 870747 - DNA, 98 bp, Homo sapiens
cttgaacaatgctgcatttgcatcaggttcaaatgagcgagaggaacatttggctaaaatatttgcctaaatgcgatggccaggtattactgacacaa

SEQ ID NO: 870748 - DNA, 99 bp, Homo sapiens
tgaacaaggccaacacctatgcagaattcagcttagagaactatcaacacaggacaatgcaagcccatgagctgttccggtattttcgaatgccagagc

SEQ ID NO: 870749 - DNA, 99 bp, Homo sapiens
caggtttttgaggttcttggtgaagtatatgccagctccgtattttggatcagaaaggcctcattcttctctgggttctcacattgtgtatggtctctc

SEQ ID NO: 870750 - DNA, 99 bp, Homo sapiens
agtgccccacaccaccgcactgtcgctgcccgcctgccctgaggagtccccgctgcttgaggcgtggagctatttcctatgacagttctgatcagactg

SEQ ID NO: 870751 - DNA, 99 bp, Homo sapiens
agagaggagagcgaggaggaagaggacgaggacgacgaggaggaggaggaggaggaaaaaggtttggaaggtttgcagttgctgctcttcagtccaaag

SEQ ID NO: 870752 - DNA, 99 bp, Homo sapiens
tactgtgggtctggactgatctccatgtcctgttgtggggcttttacagcctttgggttgccacatgaacatcttccagcatcttgcgttctcagatgt

SEQ ID NO: 870753 - DNA, 98 bp, Homo sapiens
aaagactgggctgtagtgaggaaggacctgctgatgaatattacatcatataccgaaatgtttttgataagcaaggagtaaataatgctgaaaaattt

SEQ ID NO: 870754 - DNA, 99 bp, Homo sapiens
accgccttcgacatccaggatctcagccatgtgaccctgcccttctaccccaagagcccacaaaggaagaatcctgctcaaaaatgaggtgaattaata

SEQ ID NO: 870755 - DNA, 99 bp, Homo sapiens
tgaagtataggctgaggctacctgtgaacagtacgcagtgaatgttggatgcttcctttggaaattgcacttacaatctcaccattctcgactgtttgc

SEQ ID NO: 870756 - DNA, 99 bp, Homo sapiens
tggcgagacgacagcgagatcctctccaggccctgcggcgccgcaatcaggagctgaagcaacagtctattgcgtctgcagacatggatttcaaccagc

SEQ ID NO: 870757 - DNA, 98 bp, Homo sapiens
ccaaccacaagacgactcaataggaggaaggtatggcatttcaaatatagatacaaccattgaaggaacgtcagatgacctgactgttgtagatgcag

SEQ ID NO: 870758 - DNA, 99 bp, Homo sapiens
taagtgatgatggccgctttgaggtgtggaatgcgatgactcggaaactacaagatccccggatcatgaccactctcagcgtcctccttggggtcgatc

SEQ ID NO: 870759 - DNA, 99 bp, Homo sapiens
gccttgatgggcacagccatcttgtcatgtacctgggaaccagttcgtttaccaagcaaaagttgggggtcgctggttcccagccgtctgcgcacacag

SEQ ID NO: 870760 - DNA, 99 bp, Homo sapiens
agggggaagtagagagataacaaaagctgctcagagtctcaatgaacttgtgtccgaagttcgcttgaatttagacaagatgatggagcagaagagtac

SEQ ID NO: 870761 - DNA, 99 bp, Homo sapiens
gcgatgatgaggaggactacgacctggtatcagaatggcaaagcaacttaaccttccagaaaatacagatgattggacaaaagaggatgtaaatcagtg

SEQ ID NO: 870762 - DNA, 99 bp, Homo sapiens
caaaagcacaaggattctcgctgtgacagagacaacaccgagtatgagaagtatctcagatgaagacatcatcaacattactcttcctactggagtccc

SEQ ID NO: 870763 - DNA, 99 bp, Homo sapiens
ctcaagggtcgtgtcacaggaaggaccgcccaccacgtctccctctaaaattaagcccaccattgtacttaaatatccggttccacttcccaggttaag

SEQ ID NO: 870764 - DNA, 98 bp, Homo sapiens
cttccacccacacataaaccacctcctctgtatgaagaacgatccccacctttgcctcagaaagacctatttcagctcaaagcattcagcaaaccagg

SEQ ID NO: 870765 - DNA, 98 bp, Homo sapiens
ggagattatagctctgtatgagaaggacaacacctacttaggtttgggtacccagaccccacctacctgacccgggtgcaagaggagctgagagcgaa

SEQ ID NO: 870766 - DNA, 101 bp, Homo sapiens
gaggagaactgtcagtgtcccttccgagggtcagtttcccgagtacccaccagagggcgccactaaactggatcaaacagatgatggaggcagcaacacga

SEQ ID NO: 870767 - DNA, 98 bp, Homo sapiens
cgcagatcagtccaagttgacggacaggaggcgaaatgtgcaaatgtttatgggttgccaaggaaagtgtactgcagttttacccgaaagctaatatc

SEQ ID NO: 870768 - DNA, 99 bp, Homo sapiens
cactgtagccacgcttgtgtcattgctgattgattgcctcgggatagttctagaactcaatgtccggtgtctaaaagactatggagaatttgaagttga

SEQ ID NO: 870769 - DNA, 99 bp, Homo sapiens
atgacaacacaggtgtcacactactacttggcacagctcactagtgtgaggcagtggatgatgaagaacgagagcttcaaatggatcctgcagactatg

SEQ ID NO: 870770 - DNA, 99 bp, Homo sapiens
gatggaagaagttagctgtagctattaaaaaaccatctggtgatgatagatacaatcagtttcacataagcctgcctagggtagttaaaagacgagtga

SEQ ID NO: 870771 - DNA, 99 bp, Homo sapiens
cccaaggggcggtggcttcaggatccactatcaggaacatgagcctttgactgctcctcagctcttggtcccagatgtctatctaaatctgaagctttc

SEQ ID NO: 870772 - DNA, 99 bp, Homo sapiens
tcatgcggtctggctccagaacaactcttcttcatagttacgttatactgcccctgcattgttggtattgaaaactctgaagaagaagctatggagact

SEQ ID NO: 870773 - DNA, 99 bp, Homo sapiens
cgccaagatgccagtcaagtggattgccattgagagtctagctgaccgtgtctacaccagcaagagcgatgtgatgccatggacaatattaccaggcag

SEQ ID NO: 870774 - DNA, 98 bp, Homo sapiens
gaaggcatggagttcatggtgttagcgcaaaagttctgaatggcatccgtcctaccggaaacctaggaaaagagctgtaggtaaaacttgcctactga

SEQ ID NO: 870775 - DNA, 100 bp, Homo sapiens
gaaaaacctactcttgatacacaatctaaaaaagtggcacatggggcttctgaaggaccttcctaattctttttagattgtgtatcaagagtaggttttt

SEQ ID NO: 870776 - DNA, 99 bp, Homo sapiens
tgccatgggaactgctggtactgcaatcattcattttgtgccttgcagaaaatttgaagccattacttccagctggtatacaggataaactacatacac

SEQ ID NO: 870777 - DNA, 99 bp, Homo sapiens
tctgtgagctgcggaggctgcggcccccagatcttatgccttcattcatccggcatggtccaacaattccaagacgaactgatatctgtcttccagatt

SEQ ID NO: 870778 - DNA, 99 bp, Homo sapiens
agctgcccgtctttctcagccagctctgaggggacccgcatcaagaaaatctccatcgaagggaacatcggtggcacaagaatggctcaactctccaaa

SEQ ID NO: 870779 - DNA, 99 bp, Homo sapiens
cttttcaccaaggaactggtgctgcagcgagagttactggggcttccggatgcagatgacgatgcgtttgaagagtacagtgctgacgtggaagaagag

SEQ ID NO: 870780 - DNA, 99 bp, Homo sapiens
gctagctgcttatggctataaaattacagattattcaggacagggagttgaccaactgcaaagagtgattgacaccatcaaaaccaaccctgacgacag

SEQ ID NO: 870781 - DNA, 99 bp, Homo sapiens
tgggcaagtcgtgtgtactcctcgccatggctcagctccaaacacgcttctacactgataacaagaagacagtactgcttttaaagagacagtgttagg

SEQ ID NO: 870782 - DNA, 98 bp, Homo sapiens
acccctcaagatgcggtggctctgcagtactgcgtggtcaacatcctctctgtcacttccgccatcgtgaatccagactccaaaatgatgcaaatcaa

SEQ ID NO: 870783 - DNA, 98 bp, Homo sapiens
tcttcctgctgtttgggggctccctggcccgaatcttcacttccattcagagtgcccacgaccctccggctgtccacctcagcaatggcccaggacaa

SEQ ID NO: 870784 - DNA, 99 bp, Homo sapiens
gagaggctgcagcggaggcggaagcaggactcggggcacttggtcttatgatgtaatcagcgcgatttcacttcctgaatttcgatgaattctaagaca

SEQ ID NO: 870785 - DNA, 99 bp, Homo sapiens
ctctgcggagttagcagtcacgacctccagcacagaggcggggtttcaccatgttgcccagactggtcttgaactcctgagcttaagcaatccacctgc

SEQ ID NO: 870786 - DNA, 99 bp, Homo sapiens
agctctgagggtggagatgcgggcaacgacacaagaaacacaacttcagacttgcagaaaaccagtgaagggaaatgagccgtcagactgctacagcat

SEQ ID NO: 870787 - DNA, 98 bp, Homo sapiens
tctgcacctccgctgcctggaacatcttcacccacagtggttttcaactcaggattagcaggtatagtggaggattacaagccaccgttctacgatgt

SEQ ID NO: 870788 - DNA, 98 bp, Homo sapiens
aaaaactccaaactcctctccaccagcgccaagagattttaccaaatgttgcaagaactctggagttcttatggtagtaaaatgccggaaagaaaatt

SEQ ID NO: 870789 - DNA, 99 bp, Homo sapiens
gctggaggctgttcccacagtcatgtctcagcgaagaagtcggagttcagcagccatcagaaccaagaccaagatcactccatggatgaaatgacagct

SEQ ID NO: 870790 - DNA, 99 bp, Homo sapiens
acatctttgaagatgaaggattaattacacaaggtggaagcggcaaatgttctgaaaaagactctgcatgggaatggcctgccttacgatgacagaaat

SEQ ID NO: 870791 - DNA, 98 bp, Homo sapiens
tcatattcattggaggacactggaagatgggaagaaagaagcagctgccagacgaggcatctaaccttgttggtgaagagaagctgatcccacctgag

SEQ ID NO: 870792 - DNA, 99 bp, Homo sapiens
tcctccagtgttctacctaaataaagatacaggagagatttatacaaccagtgttaccttggacagagagatcacctcagccagttctcagacacttag

SEQ ID NO: 870793 - DNA, 99 bp, Homo sapiens
ctcccaaagtactgggattacaggtttgcctgtctgtcctgagctggtgagggaacacatacctaaaaccaaggatgtgggacactttttatctgtcac

SEQ ID NO: 870794 - DNA, 98 bp, Homo sapiens
ggaggccaaccagatgctgggcgatctcatcaagccctgccctcggtgctcatcaacatccggacctctgtgcagaccgtggtggttggccacgccgt

SEQ ID NO: 870795 - DNA, 153 bp, Homo sapiens
ggcagcttatctgttcctaggtcttctactttcctggcgatttcctgagggctctccaatcgccaggaaagtagaagacctaggaacagataagctgccagtgcccgactcgcccctcagcgacccaccagccacttatgggaagttggcagg

SEQ ID NO: 870796 - DNA, 99 bp, Homo sapiens
tggattcatacctgctgatgtggggactgctcacgttcatcatggtgcctggctgccaggcagacatttctggacattcccttacatgagaaaaagatg

SEQ ID NO: 870797 - DNA, 99 bp, Homo sapiens
accagtgttgcatagacttgtcccagcaagaccacaaatttattcaagtcaattaccatcctttaccaggatgggcttaggtcacgagcaaggatttgg

SEQ ID NO: 870798 - DNA, 99 bp, Homo sapiens
cccaacagaaaccaacattccccaaagacccacgcctgaagcctctgctgcgagaagttctggagaagcagccagtgctaagccagaccgaggcccgcg

SEQ ID NO: 870799 - DNA, 99 bp, Homo sapiens
catcgacggcacctcgggggccacactgcaggcctccgcgctcagtggctcttgcagaccaatttgaagataaaactacatctgtattggaacgcctga

SEQ ID NO: 870800 - DNA, 99 bp, Homo sapiens
tgcaggtccaaccacgctggtataccctcaaacccctcagacaatgaattcacaacctcaaacccgttctccgatggagtcttgctctgtcgcccaggc

SEQ ID NO: 870801 - DNA, 99 bp, Homo sapiens
tcattgtccgtggggcaaaaaatactttctcttcaggatctgatctgaatgctgtgaaatcactaggaactccagaggtggcaattttggaggtagccc

SEQ ID NO: 870802 - DNA, 99 bp, Homo sapiens
caagcagaatgtgatttgcttgaagatatgagtgcctacaccaactaatgttacaattgaatcctataacatgaaccctatcgtatattgggagtacca

SEQ ID NO: 870803 - DNA, 99 bp, Homo sapiens
aggtgatgatgccctattcgacagaactgatattttatattgaaatggatcctccaggatctccccaataatatgatttaccaagtcgccattaagtct

SEQ ID NO: 870804 - DNA, 99 bp, Homo sapiens
cgagaccgtgaccgagagcgtgaccgagagcgcgaatatcgtcatcgttagaagctcagaattctgcaaatgcagattttgcaaactttgatgcatttg

SEQ ID NO: 870805 - DNA, 99 bp, Homo sapiens
catggatgggctgcctccaggtgacagcaatcagctggcctggtttgatactgacctgtaaatcatcctttaggaatgaatctgaagtctgctgcagta

SEQ ID NO: 870806 - DNA, 98 bp, Homo sapiens
cagtgatgtggaggtggagacccacaggagccccggacttcacctgagctacctcagtctgaagatgatgagaaactgaaaaagaggaaggagcgatt

SEQ ID NO: 870807 - DNA, 99 bp, Homo sapiens
ggacaacaagtactgcgccgactgcgaggccaaagatttgagagggaagatctgatctcctagaattagagttggtacagaaaccatttcagctccaaa

SEQ ID NO: 870808 - DNA, 99 bp, Homo sapiens
cattcaggcacttatggccatttcagccactatcatggtgaacttacttcagattgtgcgggaccactgggttcatgttcttgtccctatgggatttgt

SEQ ID NO: 870809 - DNA, 99 bp, Homo sapiens
atagaaatggggcttaagttccgtgaactcagtactgatgcccagtggggcattcgtcttggtaaacttggtggaacgtgctcagtcactttcaatggg

SEQ ID NO: 870810 - DNA, 99 bp, Homo sapiens
ctcccaagtagctgagattacagttttgggctatgatgcattaggcttctgcgagtatttatatacagattttgaacatgtttttattgccaagactac

SEQ ID NO: 870811 - DNA, 98 bp, Homo sapiens
ggaaatcgggctgaagcgactgagtccgcgatggagtttgggaatacctgctactgcaattcagttcttcaagcactttatttttgtcgtccatttcg

SEQ ID NO: 870812 - DNA, 99 bp, Homo sapiens
tggatccgcacgcagcagcactactacgagcgcgaccccaagtacgcctgcctcacaccttgcgatgcgccaacatcaccatcattgagcaccagaagt

SEQ ID NO: 870813 - DNA, 98 bp, Homo sapiens
gtcagtgaacagacacgggtgaatgctgctaaaaacaagactggggctgctcccatcattgatgtggtgcgatcgacttttggaaaagaatttgataa

SEQ ID NO: 870814 - DNA, 98 bp, Homo sapiens
catggcctgccggaagctggcggtggcgcacccgctgctgctgctcaggacccagtacacacagagaaaattccagaagagccgccagccccgcccca

SEQ ID NO: 870815 - DNA, 98 bp, Homo sapiens
ccagatccggccaaggacctcagcaggctgaccggttccctgatgtgttacctgcttctgctactgatccaaactgcagaacttctcattcatcccca

SEQ ID NO: 870816 - DNA, 99 bp, Homo sapiens
actatggataattgggatgagaaaaagctggaagaagtagtgaacaagaagcacggccagaaacgcgaaatgctgtcggccttccagaggctgttccga

SEQ ID NO: 870817 - DNA, 99 bp, Homo sapiens
ggatcttactgggcctgctactcctggggcacctaacagtggacacttatggtctgcccaagatggaggtgtttcaggaatactacgggcttcctccac

SEQ ID NO: 870818 - DNA, 99 bp, Homo sapiens
agaagaggtgctctgaaggcacagacttggaagcaccagctagaaagacttgagttagacaagcagcagcacacgcctccctacctcatggcgacagaa

SEQ ID NO: 870819 - DNA, 99 bp, Homo sapiens
ggaaaaactggagagcttcatcaaaaatagtgatagctttgataaccaagatgcagattcacctggaagttctggggcccctgaaaacttgacattcaa

SEQ ID NO: 870820 - DNA, 99 bp, Homo sapiens
actggggctgacaccttccgttctgagtggagtgacttgttgagtgacctccagaaagcagacaaacctctagatcagaatgccgagatttggttgtgc

SEQ ID NO: 870821 - DNA, 99 bp, Homo sapiens
ggatcacttaatgttacacctctgggcatgctctctaggctttttagaccccgagaagaagcttttttctcaccgaatattatcaagggatgaatgtat

SEQ ID NO: 870822 - DNA, 98 bp, Homo sapiens
ctgtcggacgagggcaagatgtatgatatctctgaaagtgtgaacttcgatgaggagactgatggaatatcccagtcagcatgtttagaaagacccaa

SEQ ID NO: 870823 - DNA, 99 bp, Homo sapiens
cggaaggactcctggaatgccacaaatgcaaatacttgtgcactgggagaggaaaggccttggaaagcagtcgttgcgccagacagcccagggaagagc

SEQ ID NO: 870824 - DNA, 98 bp, Homo sapiens
gaaaatgaagggcgccctggaataggttcgccgaagagagaggcaggggaaatggaaggtgatgcagtcgaagccattgtggaggagtccgaaacttt

SEQ ID NO: 870825 - DNA, 99 bp, Homo sapiens
gaggtaaaaaatatcgccaagccaaagctaaagcttcttttgtaaacatgttcttttctaaatttctcattctgccactgtaatcccagctactccgga

SEQ ID NO: 870826 - DNA, 98 bp, Homo sapiens
gagatccacagctaagacaccgggacctcctggaagccaaaaatgggcatccgcttcgatcctgaaattccgcaaacactacgactagagtttgctaa

SEQ ID NO: 870827 - DNA, 99 bp, Homo sapiens
caagagagtcaaatctagactgctgaagagtctgctgcttctggagcaaagggagatctggctgctagtgaccgatgtcactctgcaaacgaaggagga

SEQ ID NO: 870828 - DNA, 100 bp, Homo sapiens
cttaagtaaaacggtacaagctgaaccacttattcaagacaatcctgaggcattcaggattgtcttgaataagtggttcagcttgtaccgttttacttaa

SEQ ID NO: 870829 - DNA, 98 bp, Homo sapiens
gcacaggcggcggagccggtatgggcccgcctgaccctgggcgccgcgccgcacgagcaccagcctagagccagagccaggactgtctccagtttggt

SEQ ID NO: 870830 - DNA, 98 bp, Homo sapiens
tcacagtgaacatactcacaatgggctactggccaacatacacgcccatggaagtgcacttaaccccagaagcagaggtggaggagacactgaagcga

SEQ ID NO: 870831 - DNA, 99 bp, Homo sapiens
aaaagcccccaaatcgccctggaatcacttttgagattggtgctcgtttggaggcactggactacttacaaaaatgaaagaatcttcaagagggagaca

SEQ ID NO: 870832 - DNA, 99 bp, Homo sapiens
ccaaggagactgctatttcatgcttgattctgctctctttgctgaactcggttatttcacagacactgatgagctgcaattggaagcagcaaatgagac

SEQ ID NO: 870833 - DNA, 99 bp, Homo sapiens
ttgtggttctcattgtcatccttgtgctgttggtcatcggacacatgacggaagtgtgtatttttgggccactccacggcaggtccctagcctgcaaca

SEQ ID NO: 870834 - DNA, 99 bp, Homo sapiens
ctcctgagtagctgggactacaggaaagtggacacttaagttatgcctgtccgaaaaatatgctcggagaacgtgagcctccaaagaagaaagaaaaaa

SEQ ID NO: 870835 - DNA, 99 bp, Homo sapiens
ggcatgtctacaactaagtagtccagttgaccccaatctaccacctcttctactaggtcttcaacaataaggccttgttcatctgttcttaaatttgta

SEQ ID NO: 870836 - DNA, 99 bp, Homo sapiens
agaattttccacctcctgacacaacaccactcagcaatactgaacactgcgcagcttgcagaggtctcctggcagccctcattaggaattctgtctggc

SEQ ID NO: 870837 - DNA, 99 bp, Homo sapiens
cattctcccatgtctactcgcaggcgtcatgttgggaatcggcctagatattatcctactgaagatgtgcctcgaaagctgttgagccacggcaaaaaa

SEQ ID NO: 870838 - DNA, 99 bp, Homo sapiens
cttttttgtcagcttcttgactgaagttttaccttatttatatcccagagaaccagcttgcttttaagtttagcaaattcataggcagtcagtctccca

SEQ ID NO: 870839 - DNA, 103 bp, Homo sapiens
tggaaattttgcactcgattcagaaaggagtctatgtgacagtcatcattgaagtggaatgatgactgtcacatagactcctttctgaatcgagtgcaaaatt

SEQ ID NO: 870840 - DNA, 98 bp, Homo sapiens
tcggagaagccgctggcggcagtcacttgtacagcgccggtcaacatcgcggtcatcaagtactaggactaccccaatggcacctggctgggcgacga

SEQ ID NO: 870841 - DNA, 99 bp, Homo sapiens
tcaagatggcggccaatgtgggatcgatgtttcaatattggaagcgctttgatttacagcagctgcaggtgaaaggtgtagcagtcactcggcctacac

SEQ ID NO: 870842 - DNA, 99 bp, Homo sapiens
gccaaacggaggaatacctcgtatgcaacctcaggcttcagccatactatactggcaattgctggagaagattttgcaattgttgcttctgatactcga

SEQ ID NO: 870843 - DNA, 99 bp, Homo sapiens
cctgtacagcctgcagaactaaggcagacggtaacaagtactccttgctggattgaacttcatctgaatggacctctacagtggttggacaaagtatta

SEQ ID NO: 870844 - DNA, 99 bp, Homo sapiens
gaagtattaattcttccactgatatctcaaaaggtgatctggacaaaggaacaggtatctcagatcctttctctgctactgtagatgctgttgatgatg

SEQ ID NO: 870845 - DNA, 99 bp, Homo sapiens
gatgcttcaataaccgcaggtgggaaatgacggcggcacacagggcatgttcccgacataatctgtgattttacaggacaccaaatatagctctttcag

SEQ ID NO: 870846 - DNA, 99 bp, Homo sapiens
gaacaccaccactctcattagtgagaatggtcatgctgccgacaccctgacggccacgaacttccgagtggatatggtccggaaaaagaacccccctct

SEQ ID NO: 870847 - DNA, 99 bp, Homo sapiens
ggacaccagggtggaggacgccaaggggttaaggtcagcgtgggtgcctcgcagccagagacggcacttttccagccattaactccaggctctcgagaa

SEQ ID NO: 870848 - DNA, 99 bp, Homo sapiens
ggatgcagaattccgacatgactcaggatatgaagttcatcatcaaaaattgaggtgctgatactcaaagaaggtttaagttgtctgatctctctataa

SEQ ID NO: 870849 - DNA, 98 bp, Homo sapiens
tataggctgaggctacctgtgaacagtacgcagtgaatgttgtcaaaatgcagatcttcgtgaaaacccttaccggcaagaccatcacccttgaggtg

SEQ ID NO: 870850 - DNA, 98 bp, Homo sapiens
cggacggtcgcgcggcggcaggcacaggttaacatgtttgttgaaggattccacgatgccatcctcctctacgtcttggctctacatgaagtactcag

SEQ ID NO: 870851 - DNA, 99 bp, Homo sapiens
ggcagcccgcagtgacagctggagtctggctaacttgtcttccactaaagagttggacctgtcaggtcagcagcaaggacaagatggagtaaaagtcca

SEQ ID NO: 870852 - DNA, 99 bp, Homo sapiens
cttctcggcctctctgtctacggtctgaaccagaaaactccttgtcgggaacaaattcgagctgtgcttggccagatatttgtctttgtacttcttctt

SEQ ID NO: 870853 - DNA, 99 bp, Homo sapiens
gctatctgaagaaaagtagaaggaaaaacagaacgttgcaaactctggaaaaaaacttgggatagtgacaacctctggtgggacgcctttgccactgaa

SEQ ID NO: 870854 - DNA, 98 bp, Homo sapiens
actagacaccgcgaaatgctgaagcgctgtaaaactcagcttaaggagtggatctgattgccgtcaatcaataatacctttgaccaagggactccaat

SEQ ID NO: 870855 - DNA, 99 bp, Homo sapiens
tgactccacctttacttttacctacgttggcggccccagaagggccgttgctccagggagaactgcaaatatcttcatccacccccacatttaaaaacg

SEQ ID NO: 870856 - DNA, 99 bp, Homo sapiens
tcactagcccttcctcagcatccacaggtcacgcatgaagggagcaccgtggagaagacagtggcccctacagaatgttcataggttctcaaccctcac

SEQ ID NO: 870857 - DNA, 99 bp, Homo sapiens
cacctacatccccctgaaccatatggacccaaatcagaaggggtttctagaggttatcaatactctggctgaccatcatcatcgtgggactgactttgg

SEQ ID NO: 870858 - DNA, 99 bp, Homo sapiens
cagacacttcacatactgctggccgctttgtagttcagaatgtttctgcacagaaagatggagaaaaatctagagtaaaagtcaaagtgcgagtcaaca

SEQ ID NO: 870859 - DNA, 99 bp, Homo sapiens
ttccagccaggatacagatcttaaatttgtcaggaaaagaatacttgagatccatttgtaaggaaagaaaaggaagcaacaacataatgcccagagttg

SEQ ID NO: 870860 - DNA, 99 bp, Homo sapiens
ggaacatgacgcaggtgcaggtgtctcttctcgccctggcggggaaggtctcctctgagcctccggcctccataagacccaaaacagatgacacctctt

SEQ ID NO: 870861 - DNA, 99 bp, Homo sapiens
agagcagccggtaacgttgctggaccgggacgcacgctcagctgaggaggacccccaaaggacatggtccggcgaggagagatcatcgacaatgacacc

SEQ ID NO: 870862 - DNA, 98 bp, Homo sapiens
ttgagtgatattgaccatgatggaatgcttgacagagatgagtttgcagttaaactgatcccaaagattgagttcctggacctgagtcacaatggatt

SEQ ID NO: 870863 - DNA, 98 bp, Homo sapiens
gaaagttatgccttatgttgatatactttttggaaatgagacaacatttgaagacagtgatttgttccatttgattggtgttatctgtggcttagcaa

SEQ ID NO: 870864 - DNA, 99 bp, Homo sapiens
tgcaacttcaagtagtggaaggagtacagggaagtctataagctttgcaacagaattacagagtatgatctggctgcgtcctggtgttgagcaggaact

SEQ ID NO: 870865 - DNA, 99 bp, Homo sapiens
tgtcacaagtgggattcagtgcagattactcttctcaaaattgacagcgaagaacctcctgaaaccctttctgataatgtagtaaacatttctatcccg

SEQ ID NO: 870866 - DNA, 99 bp, Homo sapiens
ccagcttggagaaccaccgcatcaagagcttcaagaacaagggccgcgatgtggaataccttctccaggcaaattccgttcccctgcagcaccatctcc

SEQ ID NO: 870867 - DNA, 99 bp, Homo sapiens
ttaaattgatttcaagtttgaacaagctttaaaatctgaaggagatgattactatattaatggtgcctggactattgactggcctaggaaatttgatgt

SEQ ID NO: 870868 - DNA, 98 bp, Homo sapiens
gagcgagagctggagaagctgggattggagattccacccaaacttgctggtcactgggagttggttaccacagagaagcgcttcctcaaagacagttt

SEQ ID NO: 870869 - DNA, 99 bp, Homo sapiens
cactgtgctggagggtcccgtgccagatcattcaattcctgtaaaactttaccatggaccacagttccaaggactcccgaacacagtcttggagttaag

SEQ ID NO: 870870 - DNA, 99 bp, Homo sapiens
cctgcaaactcatctacgactccatggccctcggcaacccaggtctcctctgagcctccggcctccataagacccaaaacagatgacacctcttcccag

SEQ ID NO: 870871 - DNA, 99 bp, Homo sapiens
cttcctgcccctgtcgtcagcagacttatgaaaatatgcatcagtttaatactgtcttggaattcatgagatggaagcataggtcaaagctgtttggag

SEQ ID NO: 870872 - DNA, 99 bp, Homo sapiens
attgaggcctgcaccaatgctgctgatgcccttctgcagtgcatgaatgtagctcttcgaccagataaaagaatcctgttatgtcgtttaatccttctc

SEQ ID NO: 870873 - DNA, 99 bp, Homo sapiens
tgagctgcgaggaaaatggcggcgggaggaggagacatcacagctttcccagatcgggaggaaaaatatggaatgtgttttaccgctgactgaacacaa

SEQ ID NO: 870874 - DNA, 98 bp, Homo sapiens
tccacatggccccgtttggtgcttggatgtctggtaaactgcctgccaaggaggaacgcagaaaccgaaacttcattgccccttcaatgtgggaatcc

SEQ ID NO: 870875 - DNA, 98 bp, Homo sapiens
ccaaatcaagtatacagaaaatcggtgaagagaggttttgaattcacgcttatggtagtggtggaagcatcagttcacagcagtaatgcacactgtac

SEQ ID NO: 870876 - DNA, 155 bp, Homo sapiens
ctactgtctccacacagaaaccttattagcacgtatctgtttgtaaatgtctgtttgcaacagatacgtgctaataaggtttctgtgtggagacagtagaatataaaaataacaccttcgctgtctgggatgttggcagccacttcaaaatcaga

SEQ ID NO: 870877 - DNA, 99 bp, Homo sapiens
ctaccactcagatttccaaagatgagcttgatgaactcaaagaggcctttgcaaaagttggtggtctgtttttctggggggccaccaacacctcccgtg

SEQ ID NO: 870878 - DNA, 99 bp, Homo sapiens
aaaattacttggagcaaagggcagtcggcggagcttcgccaaggctggcgcagtcgcattggggctttccagctctcacagaaccttcagcatccccag

SEQ ID NO: 870879 - DNA, 99 bp, Homo sapiens
aatggaatgatatgatggaagaggtaccataacctcttgggtagtgatttttattctgcccattaacagtgctttgaacccaattctctatactctgac

SEQ ID NO: 870880 - DNA, 98 bp, Homo sapiens
acgacttcggctttactgtaaaggggctaggtgaagcacctggtccgacccatcatttcacgctgaatcgcctgttgacccatctcacttgactgact

SEQ ID NO: 870881 - DNA, 99 bp, Homo sapiens
acggagctggaggtggcttggactccaggcctgagcggcatctaccccctgacccactgcaccctgcagttgcagaatgaagaagagtctggagaacct

SEQ ID NO: 870882 - DNA, 99 bp, Homo sapiens
ctgggggcaacttggcacttagaaccgcagcagggacgtcggtttgctatcgggactcggcgaggacggtaaaataccatgaagattttgaaaaaacaa

SEQ ID NO: 870883 - DNA, 98 bp, Homo sapiens
agaagaaaaggaaccctggcctgagcctctgaagagccaatccattcaggatgggaaaccacgcaggcaaacgagaattaaatgccgagaaggccagt

SEQ ID NO: 870884 - DNA, 98 bp, Homo sapiens
accttgaagcataaaattgatgaacagatgttcccttgtcgattcattaaaataggtgtgtcaaggatgccacaatgccatcgacccagaagtgcagc

SEQ ID NO: 870885 - DNA, 98 bp, Homo sapiens
agccctatccagggagctcccacactttcaatggggaggcccacccagttcatggcctcccacgggaacgacgccgcgagagccaggtttgagtccaa

SEQ ID NO: 870886 - DNA, 99 bp, Homo sapiens
cctcttcaacttctgctccaggaaattcagcctcaaaaccgtcctgctgcttgctgaccaaatgaacattaaccaggtggtatttgttggaaatttctt

SEQ ID NO: 870887 - DNA, 99 bp, Homo sapiens
gacgcagtcagctgcgtgattcccgtgattgcgttacaagctttgtctccttcgacttggagtctttgtccaggacgaagatgcaagtggaccaggagg

SEQ ID NO: 870888 - DNA, 98 bp, Homo sapiens
ttcagccacatactttccttccactggccagcattctcctctattagactagaactgtggataaacctcaggaggactcagagagagtaatgataatt

SEQ ID NO: 870889 - DNA, 99 bp, Homo sapiens
ggcggaaggactcctggaatgccacaaatgcaaatacttgtgcactgggagagcatgttggcagataaattgaacatgactccagaagaagctgaaagg

SEQ ID NO: 870890 - DNA, 99 bp, Homo sapiens
cttccgtcagttccaattcaaggtcaaaagagagaacttttgtaacatccacgtcagtctagttccccagtggcagtgaccctggacccagacacagca

SEQ ID NO: 870891 - DNA, 98 bp, Homo sapiens
acatgtggggcctgggaaatgaaagagcgccttgggacagggggatttggaaatgtcatccgatggcacaatcagttcccaaaccagatctagattct

SEQ ID NO: 870892 - DNA, 99 bp, Homo sapiens
ccatagctgtctggcatgggcctctccaccgtgcctgacctgctgctgccactgcttgccgggattgctgtccttgccattggactatggctccgattc

SEQ ID NO: 870893 - DNA, 99 bp, Homo sapiens
ttcgaggaacagagaaaatgaaaccagcagacagaatttgtcagtccaatatcagatggaaatgatgcggagccttcgccatgtaaacattgatcatct

SEQ ID NO: 870894 - DNA, 99 bp, Homo sapiens
ggagtcatttctgttccgcacaggcctgctgaactgggtgctttatatagggctgtattcatcaccaaagaaaaaacttacaccaatgcagaaatcggt

SEQ ID NO: 870895 - DNA, 99 bp, Homo sapiens
gtgggtttccgctgaagtcagctacctgcagtgctttacagaatgaaatgctttctggaatttcaggaatctctgtaatcccagctactcaggaggctg

SEQ ID NO: 870896 - DNA, 99 bp, Homo sapiens
tcctgctgccgtgtgagatatggctgcttcccgttctgccatgatgtttcaggtctgtgcggctgctaaagaacgacccagtcaacttgcagaaattct

SEQ ID NO: 870897 - DNA, 99 bp, Homo sapiens
ggctttgccgcagttcatcttcctccctgtgtactttccatttgccttcctgggccccgcagggtggagcccgtctgctcagggttgcaggcccagatt

SEQ ID NO: 870898 - DNA, 100 bp, Homo sapiens
tgcggaggcctttgcatctgtagtagtcctctgcccgccgccgcaacgcttgcgcacgttgaaacatttcccctacggcgcggcttgtagaggcctccgc

SEQ ID NO: 870899 - DNA, 98 bp, Homo sapiens
ttttattgacttctcagtgtacaacgccaacattaacctgttctgtgtggtcagctggacagtgccacatcgcttatccaggcagctaaaaacctgat

SEQ ID NO: 870900 - DNA, 99 bp, Homo sapiens
caacaagtacgcggccagcagctacctgagcctgacgcccgagcagtggaagtcccacagaagctacagctgccaggctacagttcttagcaggagaga

SEQ ID NO: 870901 - DNA, 99 bp, Homo sapiens
atcttcttattacacaagccacacctcatgttgctcctgtgatgccattagatcgtttcattacaggcctacaatgggcaccatcaagccttggaagtc

SEQ ID NO: 870902 - DNA, 99 bp, Homo sapiens
cacatcatgagcatcactgttaggtcgctgtggcacagccaggggaggcagtggcttcctatagaaatcttgctgagctaaagttgatctaagcatccc

SEQ ID NO: 870903 - DNA, 99 bp, Homo sapiens
gccgctgcaccttcaccgcgtacccgggacccgcccgcccgcgggagacaagaggctacagtggatggaaactctgtgactgtaagaattgtggagagg

SEQ ID NO: 870904 - DNA, 98 bp, Homo sapiens
ttctttgattgggatatttaacagatcattccgaactggacatgcacatgatggtgtccaagccagaacagtgggtaaagccaatggctgtagcagga

SEQ ID NO: 870905 - DNA, 99 bp, Homo sapiens
ttcgattgaagcacatcgaccggcgacagcagccaggagtcatgagcgacagcggcgagcagaactacggcgagcgggatttggtgacatttggggatg

SEQ ID NO: 870906 - DNA, 99 bp, Homo sapiens
aaaagatctgcagagctcccagggcggacagcagcctcgggtgcaatcctggagccccccagtgagggtgccagttcaacagattctgacagtgaaagt

SEQ ID NO: 870907 - DNA, 99 bp, Homo sapiens
acattcattacagacaacaaatgttgtcattggttcatcagcactacgggtttgtacctgctgagctgcatctccattcaccaagtggggcatcatggc

SEQ ID NO: 870908 - DNA, 103 bp, Homo sapiens
cttgaatccattaaggggattgcggtcatggacaaggaaggcaatgtcctgggtcattccagaattgctgggacaaagacggagtcttgccctgtcacccagg

SEQ ID NO: 870909 - DNA, 99 bp, Homo sapiens
tgtgttctgcttttttcattgttccactggacgctcatcagagggaagatctttttcctcaattgggaaagtacggtggccagactttaaccaggaagc

SEQ ID NO: 870910 - DNA, 98 bp, Homo sapiens
tcagagaagtgaagcaacttgcccagctatgagagacagagccaggatttgaaaccagaataatccagaatggctactctgatctatgttgataagga

SEQ ID NO: 870911 - DNA, 112 bp, Homo sapiens
gtctccatgtggtagttggaaaaatccagtctttgatcagcagctcgtaatccagtctttgatcagcagctcgtagaactggggttctattgctccaacagccatgaattcc

SEQ ID NO: 870912 - DNA, 98 bp, Homo sapiens
ttcaaagcctattcaaaaataaaggtggacaatcacctttttaacaagtacggaaaaaggaccagatcaatattgaaacaaagaataaaactgttcgt

SEQ ID NO: 870913 - DNA, 99 bp, Homo sapiens
aaactggggagtctgccccaccaacatggcccgcagagttaatgcagggcttggcacgatacgtgttccagtcaggaggcaggtggaagtcatcataaa

SEQ ID NO: 870914 - DNA, 99 bp, Homo sapiens
gcttggtgaagagttactagctcaagctccactcgcgccggacacagggagcagcgagcacgcgtttcccgcaacccgataccatcggacaggatttct

SEQ ID NO: 870915 - DNA, 98 bp, Homo sapiens
tcaacgacattgtgattggcatcctggagctgctcaagaaatctgaaatagagtactatgctatgttggctaaaactggtgtccatcactacagtggc

SEQ ID NO: 870916 - DNA, 99 bp, Homo sapiens
cattacattatgctttccagacagaaaccaaacttcatctcattttagctatgaaacccacgtagtcgaacaccgtgatgcttctcctgcagggcgtgt

SEQ ID NO: 870917 - DNA, 99 bp, Homo sapiens
catccaggaagaggagccgagcatctgggccgagaccattccgtatggagagccggacaatgactgatgtggtgggtaacccagaggaggagcgccgag

SEQ ID NO: 870918 - DNA, 99 bp, Homo sapiens
acgagctcaacaaaacgctggccatgaccatgcagaggctggaaaggtattgcattcctgctgaggaggagaacaagctggaagatgtggtccacaccc

SEQ ID NO: 870919 - DNA, 99 bp, Homo sapiens
catggctgcgtcggagctctacacaaaggtttatggctacaaatgatttgatgacggaactgcagaaagattccatcaagttggatgatgatagtgaaa

SEQ ID NO: 870920 - DNA, 99 bp, Homo sapiens
cctggtattcgatgacgtggtgggcattgtggagataatcaacagtaaggatgtcaaagttcaggtcattgtttttcagacatacacaaataaaagtca

SEQ ID NO: 870921 - DNA, 99 bp, Homo sapiens
agctcgcgatgagtggtctcggcaggctcttcgggaagggagcatggggaagtgattgactgtgtgcaggagctgagccactccgtgaacaagctgttt

SEQ ID NO: 870922 - DNA, 99 bp, Homo sapiens
ggcgtaggaccctccgagccagatcccatgcgaggcccaagaaaactagaagtagtggaggtcaaatctcggcaaatcactatccgctgggagccattt

SEQ ID NO: 870923 - DNA, 99 bp, Homo sapiens
cggcgggcacagggcaagctcttccagatggtcactatcgaccagctcaagggcgagagaggctggctgaggatcgtgaccagcacctataaggatggg

SEQ ID NO: 870924 - DNA, 99 bp, Homo sapiens
tggggcaatcctcaaacatggcccacacctgggtcgggcctcaggggatagctgtgggtcaccaaaggaggggctccgggaggctgcctgctgcaggga

SEQ ID NO: 870925 - DNA, 99 bp, Homo sapiens
ggttgctggcggcaggtatcacacatggttccatcatgcttgatgccttctaacgatgacgatattcgcgctctcggtcacgctctcggtcacggtctc

SEQ ID NO: 870926 - DNA, 99 bp, Homo sapiens
gaggaatgttccctgacaatttcgttaagcttggtaaaatgcggctgacaattccgtgtcgggcccttacatgttctcatctacaatgttttgacgcaa

SEQ ID NO: 870927 - DNA, 99 bp, Homo sapiens
agcaagactatgaatctctgttccaaatgctttgctgtactatactggcaattgctggagaagattttgcaattgttgcttctgatactcgattgagtg

SEQ ID NO: 870928 - DNA, 98 bp, Homo sapiens
ttgaacatgaagaatactggaaagttgctatgttttgggaaatcctcattgacgattcaatttgttgaaggccaatttgtggactcctacgatccaac

SEQ ID NO: 870929 - DNA, 98 bp, Homo sapiens
cacattcttggagctcaaggtgacaggccagagcccaggtccccaggacagtgcaggtgtttggagaagagggattgaccctgaatcttgaagacgtt

SEQ ID NO: 870930 - DNA, 98 bp, Homo sapiens
ctgaccactctggtgccttccataacaagtggtttgtgatgaaaatggttccaagggctatggatttgtacactttgagacgcaggaagcagctgaaa

SEQ ID NO: 870931 - DNA, 99 bp, Homo sapiens
ctgggtgacagagtgagacccatcacaatctgggtgcccgggcgcaaggccatctggtccgccgccgagcccggggtgacccggtggatgaagatgccc

SEQ ID NO: 870932 - DNA, 99 bp, Homo sapiens
ctggctaacacggtgaaactccgtctcaaatgcttgaagttttccagagtggaaatcattcaaaagactgagcagccctctctccatctcctgaacatc

SEQ ID NO: 870933 - DNA, 99 bp, Homo sapiens
aggcctacatcccacagagatacccagacaacaggatcgtctcgtccaagggctgaagaagatgcagagcagcctgaagctggtggactgtatcatcga

SEQ ID NO: 870934 - DNA, 99 bp, Homo sapiens
cggacgggaaggcgggagacgagaagcctgaaaagtcgcagcgagctggagccgccggagcttgtcaaaattcccaaaaatgatcccctcaatgaagtt

SEQ ID NO: 870935 - DNA, 99 bp, Homo sapiens
aaccacagaattctggacaatcaaaacttaactcctggatacagttggaggacgagtaagtcgtgaattaaattatactcgccagaagattggagaaga

SEQ ID NO: 870936 - DNA, 98 bp, Homo sapiens
ctggaggtgatgctcagcgtgccgaagcgagccaatgatgccatgcacctcagcatgctggaaggaactgtggctgcaccatctgtcttcatcttccc

SEQ ID NO: 870937 - DNA, 99 bp, Homo sapiens
aataactgtcgcccgcttccctcagcgtgaggagtctactatgcaactgcatactggatgcctgctgaaaagacagtacaagtcaaaaatgtaatggac

SEQ ID NO: 870938 - DNA, 99 bp, Homo sapiens
caaacaccactccagtcttcttaatgtctctccagtacaggaggtcaacaactgtaccattgttaattgcggtctggatcgtggcttctggccccatag

SEQ ID NO: 870939 - DNA, 99 bp, Homo sapiens
caccgccggacttcaatgcccagtccccagctcgccagcatgccacttcaaatgaacaacaagagcttttctgtcagaagttgcagcagtgttgtatac

SEQ ID NO: 870940 - DNA, 99 bp, Homo sapiens
tatcacaaatgaatccaaccagccacagatactattaggaggctaggatgcatttctctcactgaaccccatccagcagaggacagaagagtcagaaga

SEQ ID NO: 870941 - DNA, 99 bp, Homo sapiens
gcttatatctattcatcatttctggaaagtttgtcttatttatccagtacatgacagcgtcctcaatatcatagggcagatctgtggcttgaaaaaaag

SEQ ID NO: 870942 - DNA, 99 bp, Homo sapiens
acatgttagctttgaagtggatcctaccagctttccagttctcagggaacaatagaaaccagtcttcaggatatcgacagcagattatctccaggtgga

SEQ ID NO: 870943 - DNA, 99 bp, Homo sapiens
gtcgatctggagcttttcccctccccgggtgttggagagcacaatggctgaacaagtccttcctcaggctttgtatttgagcaatatgcggaaagctgt

SEQ ID NO: 870944 - DNA, 99 bp, Homo sapiens
ccatctacctcatctagaaggagagcaattagtgagacaggggatgtatggcattgagaatgaagtcttcctgagccttccatgtatcctcaatgcccg

SEQ ID NO: 870945 - DNA, 99 bp, Homo sapiens
aggcagggagcctccagagtagacaagccctcaaggatgcccggtccccatcaccggcacacattgtcgaaatttggtgagcggcctccacctaaacga

SEQ ID NO: 870946 - DNA, 99 bp, Homo sapiens
tttggaatcttcccttgaagagattactcttgtctctgctgctcctgggaaagtgatttgtgaaatgaaagtagaagaagagcataccaatgcaatagg

SEQ ID NO: 870947 - DNA, 99 bp, Homo sapiens
cagatcttaagtagtgatatttctcttttgtctgcccctattgtaagtgcagatggaacacaacaggtctatgctccatcagcaagcactgccgactac

SEQ ID NO: 870948 - DNA, 99 bp, Homo sapiens
attttggcagttctaaatttgaatttgagctctttcaccatgcctggatcacttcctttgaatgcagaagcttgctggccaaaagatgtgggaattgtt

SEQ ID NO: 870949 - DNA, 99 bp, Homo sapiens
caagatcgcgccactgcactccaaccttcattcctgggacctagaggataagtaagattatgaggaccagatgaagccaggctgtttgcttctttttct

SEQ ID NO: 870950 - DNA, 99 bp, Homo sapiens
agaacggcaggcagagttaaaacggaaatttgaacagttgaaacaggagagaattagtcgatatcaggtgaaatggttacaaagcaaccattgattaga

SEQ ID NO: 870951 - DNA, 98 bp, Homo sapiens
aggaaccacgctctcgtctggtttgatcacaagacgggcaaggcctaaacggcagcggcaaaacaactttcccatgtttccctctcctaaagcctgga

SEQ ID NO: 870952 - DNA, 99 bp, Homo sapiens
ggcaccgggatcgtgaccgagaccgtgaccgagagcgtgaccgagagcgcgaatatcgtcatcgttagaagagattcagttgtggaaattctttttgaa

SEQ ID NO: 870953 - DNA, 99 bp, Homo sapiens
ccttctcccggaccccaggagccggcgcccccgccctgtagggtaccgtgagggttttctctggaagcgtggccgggacaacgggcagtttttgagccg

SEQ ID NO: 870954 - DNA, 98 bp, Homo sapiens
tgatttcttccaaagcacaggaatctcactctgttaaagctggtctgttctaactgaggtgatagtagaaaaggctcccaaagctcggataggagacc

SEQ ID NO: 870955 - DNA, 99 bp, Homo sapiens
cgggttgtatttggaaacgcggagtgagtttttccgtgctgtgtagaactatgttgtgcttctggactccacactccccagatcccagtatgactacat

SEQ ID NO: 870956 - DNA, 99 bp, Homo sapiens
gctagctgcttatggctataaaattacagcatcaacaacagcaacttgtgattggcggtgaccggatattcagttgcacatccccacatcaatgcactg

SEQ ID NO: 870957 - DNA, 99 bp, Homo sapiens
ctgcagtgtcttccacaacctggctcagagtcaagatctccactgaagttggcatcacaaatgttgatctttccaccgtggataaggatcagagcattg

SEQ ID NO: 870958 - DNA, 141 bp, Homo sapiens
ggatgcttcaagttcattggtgaatccaccataattaaagttgcccaaattttgggcaactttaattatggtggattcaccaatgaacttgaagcatcctcatgacctagtcatattaatgagacaagaagcaacagttaa

SEQ ID NO: 870959 - DNA, 99 bp, Homo sapiens
caggcagtgctggaggaagaccactacggcatggaggacgtcaagaaacgcatcctgacggagttagaagccaaaagtgaaaccaggcaggaaaattac

SEQ ID NO: 870960 - DNA, 99 bp, Homo sapiens
ttttctccactcatataaaataactcaagacatggctgcccagtgtgtcacaaaggtggcgctgaatgtttcctgtgccaatcttttggataaagatat

SEQ ID NO: 870961 - DNA, 99 bp, Homo sapiens
ctcagggaaggggcagcacactataaggaagaccagatggatgagaaactaatggaacctctgaaatatgctgaacaacttcctgtagctcagataata

SEQ ID NO: 870962 - DNA, 99 bp, Homo sapiens
ggtggtctataccctgttttcttggctatacctgtaaatggtggtctagcagccaggtgtggatgaggtcaccattgtcaacattttgaccaaccgcag

SEQ ID NO: 870963 - DNA, 99 bp, Homo sapiens
ctgaaaagctggcccgtgacctgaaggctgtcaagtatgtggagtgttctgcacttacacaggcacagaaagctgaaggtgctggagatgccaagtgaa

SEQ ID NO: 870964 - DNA, 106 bp, Homo sapiens
atttttgcatgaacatgaacacaaaagcaaacaggaagaagttggtacgggcactcttcatagttcctagacaaagccgtctttaaatcctgagtatgagagagaa

SEQ ID NO: 870965 - DNA, 98 bp, Homo sapiens
acaagacctgagagaacagattcttcgagttaaagacactgatgatgaccctgatgctcccataagacagaaaatgccccttgatgatctggatagag

SEQ ID NO: 870966 - DNA, 99 bp, Homo sapiens
aaggatctgcaaattgaagtgcagattgctcttaaacttggtgtgactgctaatgatgtaaagaatgtcattatctggggaaaccattcctcgactcag

SEQ ID NO: 870967 - DNA, 99 bp, Homo sapiens
cttcagctcttgggtttagcaaaagttcatctccttctgcatccttaactgagaatgagaatgttgtaccatctttgggtaggcagacttccctgacga

SEQ ID NO: 870968 - DNA, 99 bp, Homo sapiens
ggatgagtggctttatctatcaggctactctttggagcccatctatggtttgtggtatgaccactcctccaacttctcctggaaatgtcccacctgatc

SEQ ID NO: 870969 - DNA, 99 bp, Homo sapiens
tgatgcagcagagcttggaaggatgcttcagctcatcttaggctgtgctgtgaactgtgaacagaagcaaggtttttgccaatccagaagactgtgtag

SEQ ID NO: 870970 - DNA, 98 bp, Homo sapiens
gcactactggcccctgatccggttcttggtgcccctgggcatcaccaacatagccatcgacttcggggagcagtcaaggatgctatctaaatgggcct

SEQ ID NO: 870971 - DNA, 99 bp, Homo sapiens
caagaaggaccaaaaagacctgcagattcaagtccagcatccagcggccaagtccatgatcgaaattagccggacccaggatgaagaggttggagatgg

SEQ ID NO: 870972 - DNA, 99 bp, Homo sapiens
agctgcaggaggcaggatggtctggaggctggtcctgctggctctgtgggtgtggcccagcacgcaaggatggtgccatgacaatggtgtgaactacaa

SEQ ID NO: 870973 - DNA, 99 bp, Homo sapiens
ctgaggtccagatgaaagagaagtttctggtcactccccaggattatgcgcggtactaggttttgacaagcttgcatcatgcgtgagtataagctagtc

SEQ ID NO: 870974 - DNA, 99 bp, Homo sapiens
catatgaccaaaggactcgccctctgggaggcttaccgagagtttgaaagtgcgattgtggaagctgctcggatcactttgggaagcagtgacatccaa

SEQ ID NO: 870975 - DNA, 99 bp, Homo sapiens
tggtggggcccaaggtccgcaagtgcctggccaacggctcctggacagatatggacacacccagccgctgtgaatcctgtgaagcagctccagctatgt

SEQ ID NO: 870976 - DNA, 99 bp, Homo sapiens
cgccctgggcgcggccctgctcctgtcttccattgaggcagaagggtgaagacggctttcctgggtttaaaggagacatgggcatcaagggtgatcggg

SEQ ID NO: 870977 - DNA, 99 bp, Homo sapiens
cggctcagcctccagccagctggacgagggcaagtgcgcttacatccgaggtactaggttttgacaagcttgcatcatgcgtgagtataagctagtcgt

SEQ ID NO: 870978 - DNA, 99 bp, Homo sapiens
agctccatatagggagaactgctcagattggccatgtctatcctgcagtgtcctgtccatggctaatgctggtcctaacaccaacggctcccagttctt

SEQ ID NO: 870979 - DNA, 99 bp, Homo sapiens
ggcaacccgtgtgtgtctcatcccagaaagagaagactttaaccactgtgatgcctgagaatccagagtatgcgaccagtggttggaacctgaatgtga

SEQ ID NO: 870980 - DNA, 99 bp, Homo sapiens
ctaaaaagaggcgaaaggaagcaagcagttcagaagagccaaggaataaacatgcaatgaacccaaaagggaagaggatcacctagcccgggtagaaga

SEQ ID NO: 870981 - DNA, 99 bp, Homo sapiens
gcccaggcctggcttctgtcctgcgcgcgcaaaccaggtggcgtatcgcttggagtgaaggtcctaccgcggcatgattgatttctaaagactcatgtt

SEQ ID NO: 870982 - DNA, 99 bp, Homo sapiens
accatagccagagaacagccctccatcttgcagcccagaaggtaggtgagctcgtgaaacaatatgaagaggagaaaatagccttttaaggaaattggc

SEQ ID NO: 870983 - DNA, 99 bp, Homo sapiens
ctagaggcatggttgaaattgaattgatgtacagttacccagcacgtgtacctcctcctcctcctattgctcgggctgtagtgccctcgaaacgtcagc

SEQ ID NO: 870984 - DNA, 98 bp, Homo sapiens
gtggactgctccgggaaggggctgacggccgtgcccgaggggctcagcgccttcacccaagcgctgttctgtggacaatcacaatgggaatccaagga

SEQ ID NO: 870985 - DNA, 99 bp, Homo sapiens
agcaagtttaatcagacctgctcacacttcagaatagagaaggttttaggtagaggaatttcaggaagcattggagtagtggcttctatcaatgaacag

SEQ ID NO: 870986 - DNA, 123 bp, Homo sapiens
gctcaagcaagggctgtatgagctctcagcaagcaactttcagaggagggcgggaacagagtgaccgagggggcagccttgggctgaccttgtgcaacgtgcagctcaaagttgcttgctgag

SEQ ID NO: 870987 - DNA, 99 bp, Homo sapiens
ccagcctctcgggcatcgggcaggaactgggcgccggcgcttacagcatgaggtacagccatagtgctgaagttcaagttcgtcttcaattcttgactt

SEQ ID NO: 870988 - DNA, 99 bp, Homo sapiens
ggctaataatgctggcaaagtggaaaaatgtgcggttgcaaaggagtttggcttccaaaataatggcttctcggtttacatcaatagaaacaagaccgg

SEQ ID NO: 870989 - DNA, 98 bp, Homo sapiens
tttgtctcaataaaagcccaggaagaagacgaggatgtgaagaatgcaaattgcacatcagattttgaggaatactttgccaaaagaaaactggagga

SEQ ID NO: 870990 - DNA, 99 bp, Homo sapiens
attcatcacggtaacccgggactggattaccgtttattccatatctggataatttgccgaacttcaatagatcagttgatggaccaatcaggctgccaa

SEQ ID NO: 870991 - DNA, 100 bp, Homo sapiens
cgaaccccttgctctgccccagcagatgctgccgtgaaggacacacagtctgaggacagggtggagctggacagtcagcagagcccacacgatgaagacc

SEQ ID NO: 870992 - DNA, 99 bp, Homo sapiens
cggctcacctgtgcgggatggaacaaaagtagccggatcgagctgggagatgtgacaccacacaatattaaacagttgaaaagattgaatcaggtcatc

SEQ ID NO: 870993 - DNA, 98 bp, Homo sapiens
acacagacccagctggaactcgaattccctgaccaggagcgcacccctccccaacgactcccaggcccgcagtggagctcgttttcacacttcctacg

SEQ ID NO: 870994 - DNA, 99 bp, Homo sapiens
tccaatgacaccagggagcaggtgctgccagccggccagattgtgaagattgggtctctccacattgccccggctgctctccaacccctgagttcaagt

SEQ ID NO: 870995 - DNA, 99 bp, Homo sapiens
atggaggagcctgtattgccgctaatgtgtgtgcctgcccacaaggcttcactggacccagctgtgaaacgggatttaggtcctgaatatgaaggtata

SEQ ID NO: 870996 - DNA, 99 bp, Homo sapiens
ttctacgggtgcgaagtgagctctctggcctccccttctattggaatttccactgcatgctagctagtccttccctgacgaagcttcacaaaagatgtc

SEQ ID NO: 870997 - DNA, 99 bp, Homo sapiens
cgagggcggcctgctggcgggggactcagtaacacccagcgaggcggtggcagagtaaagccaatcccagctgaaggaatcaagtcaaatccttccaag

SEQ ID NO: 870998 - DNA, 99 bp, Homo sapiens
cagaaggggagacacattttatgttgtgtcatttcgaagggaacttagtgatttggcccgtgaccctccagcacaatgttctgcaggtccagttgggga

SEQ ID NO: 870999 - DNA, 99 bp, Homo sapiens
ctgggcaacaagagtgaaaccccgaacctcggcctcccggggcctcccattaaggtcgcacttggacccattgccataggtctggctgtggtagcgttt

SEQ ID NO: 871000 - DNA, 99 bp, Homo sapiens
ggcgttgtcaatcttgcttttgatcaaggaccttgtaacatctctctggtgaaccaactctgtaatcatgggacaaattggcatcataagctgcctgac

SEQ ID NO: 871001 - DNA, 99 bp, Homo sapiens
atttgaagcagaacgatcaaaagccaagtggcaaacggctatcatgatgagcatctgcttgcagtccatggttgatgaactgatggtgaagaaatctgg

SEQ ID NO: 871002 - DNA, 99 bp, Homo sapiens
gcagaagttctcgaatcattctttgtacagaaattgaaaggcttcaaagctagcaggaacaaccaggaagctatatgagaaaaagcttttgaaactgag

SEQ ID NO: 871003 - DNA, 75 bp, Homo sapiens
ttgctacatccgggcccccaccagaaggtggacttaggacttaattcagtgcacaaatgagatgaatgtgaacat

SEQ ID NO: 871004 - DNA, 99 bp, Homo sapiens
actccaggaatgccagtgcatcttttgcacagctcaattctgtggtgttcttggtcacacatttatggagtttctgaagggcagtggagattactgcca

SEQ ID NO: 871005 - DNA, 98 bp, Homo sapiens
gctcagattccattagctgctgtcatcaagccctttgccaccattccttcaaatgagctctattaccaggttttaaacttcgccatgatcgtgtcttc

SEQ ID NO: 871006 - DNA, 99 bp, Homo sapiens
ctccacctacatgacctaaaaattcaactgctgtcacatctgcaccaagtctttgccaaactgaacccttgtgaatgcccatttgaagatcttcctcat

SEQ ID NO: 871007 - DNA, 99 bp, Homo sapiens
cggcgtcgagaatttcaactgagaaatccaagaccagtgacttatcaattccatccaaatttagattattacaaagcacgaggagcagacctcatgaat

SEQ ID NO: 871008 - DNA, 98 bp, Homo sapiens
ggacctgtgaggccacagcaggatcacccctgggtttcatctgccactgccccaaggtggacccaagtggagagattgtggaactggcgaaaggtgca

SEQ ID NO: 871009 - DNA, 99 bp, Homo sapiens
gcggggcctggccgggctgtgagcggcgtatgcaaatcgagggtctcggggatgcggatccaagaccctgggaagcacggtgtcttggaaaatggaaag

SEQ ID NO: 871010 - DNA, 99 bp, Homo sapiens
aacgatcaaaagccaagtggcaaacgaaagggactaaggctcctcaggctgcaggaaagattcacacagattttgaaaagggattcattatggctgaag

SEQ ID NO: 871011 - DNA, 99 bp, Homo sapiens
cggagcccttgggtgaaattgttaggcgtggagagggagtgatgtcttccagactcggtgctgtacccgccgaggaagagttcatcgattggtggagca

SEQ ID NO: 871012 - DNA, 99 bp, Homo sapiens
caaacagttaagtccattggcttggagatgacaagcacgagtttctgatgccagtatggacagaatagcttatgatgcttatccccacccaccacttcc

SEQ ID NO: 871013 - DNA, 99 bp, Homo sapiens
cgttggccaggtgtggtggctcacgcctgtaatttcagcactttgggaggccgaagtgggcagatcacctgaggtctcctcatttaccacatcccccag

SEQ ID NO: 871014 - DNA, 99 bp, Homo sapiens
tggaagattcgatggacatggacatgagccccctgaggccccagaactatcttttcggaagccagttgagggaagttctccatgaatgtacgtcacaat

SEQ ID NO: 871015 - DNA, 99 bp, Homo sapiens
caaagtccaagctcgaattgcccagcttagtgacattcatgcagtaaaggagctgaaccttcaagaatacagagctgatgcagcagaatgggattggtt

SEQ ID NO: 871016 - DNA, 98 bp, Homo sapiens
gggacgccaggaggcggaggcggagtggagttaggttcagccctatgtagctacaacctaaagccttctgaatacactacatctccaaaatcttctgt

SEQ ID NO: 871017 - DNA, 98 bp, Homo sapiens
acagactatgtagaacacgctaaagaagaaacaaaaaaagctatcaaatatcagagcaaggcaagaaggaatgacgttctgcccctttcaaactcagt

SEQ ID NO: 871018 - DNA, 99 bp, Homo sapiens
acctgcctaattaccttcaaacctgctcaacgggacccaggtggagtctgtacagctcaaagtcaacatagcccgaaaacagcccatgctggatgccgc

SEQ ID NO: 871019 - DNA, 99 bp, Homo sapiens
tggaaggatgcacaagttccaaggttacgtttcacacctttggggagttgaagacggtccgcctgccaaagaagatgactgggacaggcacacacagag

SEQ ID NO: 871020 - DNA, 98 bp, Homo sapiens
atatcacgtgcgaccccccagaagagcggcggctggaccacttctctgtcgacggctatgacagttctgctgccccagagcacatcagctatgtgccc

SEQ ID NO: 871021 - DNA, 99 bp, Homo sapiens
aattgatgagagaaatcgcccactttctgatgaggaattagatgctatgttcccagaaggatataagctggttatattctgggcactaaatgaaggcgt

SEQ ID NO: 871022 - DNA, 99 bp, Homo sapiens
gcgatccgcaatgatgagacagggctgtggcagtgccccttctgtcagcaggacaatttccctgaactaagcgaggctaccacatactgttgattgtga

SEQ ID NO: 871023 - DNA, 98 bp, Homo sapiens
agtccaaaaactgaagaagatggtggataagcccacccaggtgggctccttcgggaatggcacggttctcaggagcaccagagaggtggagctggtgg

SEQ ID NO: 871024 - DNA, 99 bp, Homo sapiens
aagcattctcgtcaggggctagatgaaatgtacaatgaagccagaaggcagcttcgagatgaatctcagttacgacagaagaagacgtaaagcaggcta

SEQ ID NO: 871025 - DNA, 99 bp, Homo sapiens
gtcaagtcctggctgaagccacggctgggacaggaagccacagtttggacttctcccactgagcatgacaagcactcgaaaggctaaatcaaccagaaa

SEQ ID NO: 871026 - DNA, 99 bp, Homo sapiens
gtgtcattatcagcatggacatattaactcttacctgaagcccatgttgcagcgggactttattaccgctttaccagggatatgaagcctgacaatatt

SEQ ID NO: 871027 - DNA, 99 bp, Homo sapiens
atttgtgggaagttgtattcatcaataatgaaatgctgactaaggaacaaggtcagtatcattgacagtgttcaacaggaaacagatgatcttactaag

SEQ ID NO: 871028 - DNA, 98 bp, Homo sapiens
tcgctttaaacatatcaacaactgtgccagaaacatactagtggaaaagaactacacaaattcacctgtgtcttatagaactcaacatactggggtct

SEQ ID NO: 871029 - DNA, 99 bp, Homo sapiens
gtgtttccagatcgagaccactttggccgtacattctataatcaggcaattatgtcttctaaaaatattgcacagtttgacatcaacaacaagatcgag

SEQ ID NO: 871030 - DNA, 99 bp, Homo sapiens
aggttacttcttcctcaacaccagcaccgcagatgttgtcaaggtggcctaccaggaggccaggggtgtcgccatggcctgatgcctttaacctacttc

SEQ ID NO: 871031 - DNA, 98 bp, Homo sapiens
agctgtctggcatgggcctctccaccgtgcctgacctgctgctgccactgatcttgattccacccaaaggtttattttcaaagctcaagaaagaggct

SEQ ID NO: 871032 - DNA, 99 bp, Homo sapiens
ctcccaagtagctgggattacagctctcccagtgaagtgatatcactgcctctgtggacaagacacctccaggagcccagctcacagccaccggtacct

SEQ ID NO: 871033 - DNA, 99 bp, Homo sapiens
acagattggcaacggaagaacaggagggttcacacctccaggaatggatagatcctctccagataacagcccagtgcacgggatgttacgtcaaccatc

SEQ ID NO: 871034 - DNA, 98 bp, Homo sapiens
aaacactgctggtataaactgcgagacatgtactgatggcttcttcagacccaaagggaaacatgccaagggacaagtgttatttgacaaagtgtgtg

SEQ ID NO: 871035 - DNA, 98 bp, Homo sapiens
acctacctgcggcgtcggcagctgctgctccgagactgaacccggtgcctggctcctaccccacacagagctgccaccctcacctgtccccaagccac

SEQ ID NO: 871036 - DNA, 99 bp, Homo sapiens
ccaaagccccggccacctcggcctcttcctgttgcaccaggttcttcgaaaactgaagcagatgttgaacaacaagctgactcaggtgttgacaccttg

SEQ ID NO: 871037 - DNA, 99 bp, Homo sapiens
gatccgcggaggccgacaggattcgttggctgccgtccccgctgctgtgcattggcaatcccacagagtattgatgaggaaactgaagtttggagcgat

SEQ ID NO: 871038 - DNA, 99 bp, Homo sapiens
cggagaacgacctcaaccagggcggacgcccgtggtttactgtgtgaggttagccaaggcccttgtagatgactactgctgtttggtgccgggatccat

SEQ ID NO: 871039 - DNA, 98 bp, Homo sapiens
ggaagggaggagactcctgaccctcagaatgggtctcctatggacagaagtgcgggcaaggagctttgttcctccccgatgtcaccctcccacagccc

SEQ ID NO: 871040 - DNA, 99 bp, Homo sapiens
ttcaaagtggtgggatattatagatattcagaagaaggatgctgttaaaagacagagtctcgttctgtcacccagcctggtgtgcagtggttcaagcca

SEQ ID NO: 871041 - DNA, 99 bp, Homo sapiens
gaagacacgttgtgggcggcttccggaggtcaagtcttcatcatcagtgtggagactcatgctgtagagatctacaacttactgctttgtaaacttcgc

SEQ ID NO: 871042 - DNA, 99 bp, Homo sapiens
gattagcttcgcagtctggaaagctttaggagttcacagtataaaagaagccaatttctggggtgctaactttgtaatgagtggttctgactgtggcca

SEQ ID NO: 871043 - DNA, 100 bp, Homo sapiens
ctttatatcctgacactatgaatgaagtaagccgttgggttggaggaaaggggacagcttaagaggcatccaagtagcattcatagtgtcaggatataaa

SEQ ID NO: 871044 - DNA, 99 bp, Homo sapiens
cgccgtccacgccgctcttgacaggtgattttacaacgagatgctgctctccatagggatgctcatgctgtcagccacacaagtctacaccatcttgac

SEQ ID NO: 871045 - DNA, 98 bp, Homo sapiens
cctgaaccctgcacagagggctttatacagggccgtgatgttggagaactacaggaacctggagtctgtggatgcctgaaaacttcatgcctcctgtt

SEQ ID NO: 871046 - DNA, 99 bp, Homo sapiens
agggaattttttctgcctccaaaaggctgggaatgggaaggagagtggatagttgatcctgaaagaaggtatgaaattgaaggctgtgaagtgatttgg

SEQ ID NO: 871047 - DNA, 98 bp, Homo sapiens
gcttggaccccggcttctgggacgcgtcaggtccctagctgttggtagtaagtccggttataaatttttctccctttcttctgtggataagctggaac

SEQ ID NO: 871048 - DNA, 99 bp, Homo sapiens
aaatcggggagcttacccagcttaaagagctccacattcaggggaaccgcctcaccgttctgcccccagaactaggtacaccagaggatcgcttcctgg

SEQ ID NO: 871049 - DNA, 101 bp, Homo sapiens
cttcttcctggacatgaccaactggagctatgaagacatgattggtgaggaggtgccatcggatcaatactactgggctcctttggcccagcatgagcgag

SEQ ID NO: 871050 - DNA, 99 bp, Homo sapiens
cacgattaaggtccataggcttgaaaacatcctgctgataagccatgttgagaaacaaatatctctctgaccttctcatcggtaagcagaggctgtagg

SEQ ID NO: 871051 - DNA, 98 bp, Homo sapiens
ccaggtggcggaggagagcccggagctgctgaaccctgagcccaggagactgagcccagccaaagcctgctggagtactaggtgcagtaaataagcct

SEQ ID NO: 871052 - DNA, 98 bp, Homo sapiens
atgcagattatatcgcatcctatggctcaaagaaagatgattatgaacttagtgatttggcccgtgaccctccagcacaatgttctgcaggtccagtt

SEQ ID NO: 871053 - DNA, 98 bp, Homo sapiens
gcagctgaaagcgtgaactgtgtagcacaggcggagtgcagcggaggcccctgccgctgccgtcatgccgttcccgtttgggaagtctcacaaatctc

SEQ ID NO: 871054 - DNA, 99 bp, Homo sapiens
ctgctgggagtggggctgaacacgacaattctgacgcccaatgggaatgaagacaccacagctggagaattctcaccaaatgttcccaaatccttatcc

SEQ ID NO: 871055 - DNA, 99 bp, Homo sapiens
acccagtggtgggatgccccgagcattgtgggcctcatcatcttcctcctgtgcaccctcttcatcaggtcttcaaagcttcacctttctccaaaggca

SEQ ID NO: 871056 - DNA, 99 bp, Homo sapiens
ggactgcggttggggcgggaagagccggggccgtggctgacatggagcagtcttcaggagacatatgaagcaaaaaggaatgaattcctgggagaactg

SEQ ID NO: 871057 - DNA, 99 bp, Homo sapiens
gtccgcgagccccgcactctctcgatgagtcggagaagtccctagtggccacagaagaagtagttactgcagaatctgtggatggtgccattcagcaag

SEQ ID NO: 871058 - DNA, 99 bp, Homo sapiens
cgctgctggacgaagagctctcctccttcttcctcaactatctcgctgacacgcaggactcctcctattttgaggacttctccaacatctccatcttct

SEQ ID NO: 871059 - DNA, 99 bp, Homo sapiens
gacctgcatgtgtgtgcgcgcgaaggagcggaagaatggcagtgctcaaactcaccgaccagtctgaagatgatgagaaactgaaaaagaggaaggagc

SEQ ID NO: 871060 - DNA, 99 bp, Homo sapiens
gacatgttgacgtcgtccgagagtcttaaaatcctgctctggccggattccagactcgtgggggaaaggctgccacgatggcactgattctccccctga

SEQ ID NO: 871061 - DNA, 100 bp, Homo sapiens
gaaaggcactcctaggggacataagtgatgtatctgactaaagtcaaggtgtgtttttctcaaagtaatcactaattttatgtcccctaggagtgccttt

SEQ ID NO: 871062 - DNA, 99 bp, Homo sapiens
agccattgaaaagtgtggagaagctgctttaaattaaaactcattatctcctgggatgaagtctcaaaacttgaaaagacttcaaatgtcatactgaca

SEQ ID NO: 871063 - DNA, 99 bp, Homo sapiens
aggctttgctgggcatcactgctgctagtaccaccaaatcctccttctgtggacatctcgacaacatgttccacaaaaacattgcagtgtggaccccca

SEQ ID NO: 871064 - DNA, 99 bp, Homo sapiens
gggccccgctccgcttcgaatgggtggatccataaagaacccagccaacccgcagagggaggggaggggctgagctgtgaggagagcggggcccaagaa

SEQ ID NO: 871065 - DNA, 99 bp, Homo sapiens
ctggtgatgaacttagcagcagctccactgaacagataaggtctcagaccagtatccttcaggggttctcttactctgatttgcggaaatttggcatcg

SEQ ID NO: 871066 - DNA, 99 bp, Homo sapiens
tggttatagatggacaagagacgatcattctgcaagcaggcaacctgaatacaggtttatcaggtagaagatgtgtgtgaagaagaaatgccagaagag

SEQ ID NO: 871067 - DNA, 99 bp, Homo sapiens
tcggaagggtctttgttccctgcagccctcccacgatgtggaaactgaggcacagagagtttaaataacttgcccaagattcctcagctgataagaggc

SEQ ID NO: 871068 - DNA, 99 bp, Homo sapiens
tggtatactgtggtgaagaaagtgagcgaggagtcagaaactcagccactggttgccttggtaggcaataaaactctgaacagcaacatggggtgcaaa

SEQ ID NO: 871069 - DNA, 99 bp, Homo sapiens
ggaacttcacgtcatttcaactatccaagcacaccaccttctgaaagaaatggcacttcatcaacttgtcaaggttgtaaacatgttaaaggcatcctg

SEQ ID NO: 871070 - DNA, 99 bp, Homo sapiens
caggagatccagctgctgtctacactggccatgaagtctgactcccgctgcagctcccctcgacttggacttgagggaaccttcccaattttcatccac

SEQ ID NO: 871071 - DNA, 99 bp, Homo sapiens
gccgagccgagccgagccgagcggagccggcggagcctctggaatcacccgggtcgctgttcctgaggtgaacaaatagaagctgagggtgaaggacct

SEQ ID NO: 871072 - DNA, 99 bp, Homo sapiens
ctcccaagtagctggggctacaggttcaaaactggtcaaatcaatggtgatttgctgatataccatgtcttactgactttaaagccatattatgcaaag

SEQ ID NO: 871073 - DNA, 99 bp, Homo sapiens
ttcacaatccaagttccacaatatattgactactgccacaattccggtatttgtaccgcatctacaccttttgtattgttgggagatgttttggattgt

SEQ ID NO: 871074 - DNA, 99 bp, Homo sapiens
ggacaccaaacatttcctgccgctcggcttctgatctacggggagtactgcagccacatggagcacgcccagaacacactgaaccagctcctggccagc

SEQ ID NO: 871075 - DNA, 98 bp, Homo sapiens
ggacgtgtacttctgtttctcagtttatctggatgttatcagatcacagaccatggtctcagaggtcctgctgtactagccaccaaagcagctgctgg

SEQ ID NO: 871076 - DNA, 100 bp, Homo sapiens
acacagatggaaccagaaaacccacatggccagacaaagacaagtttcgaagctcttcattctctcctagagcctcgtatcttttctggttccatctgtg

SEQ ID NO: 871077 - DNA, 99 bp, Homo sapiens
cataatttctctaattcatagatttctctggtttctggaagcatcaaatgaatcaccatgctgcctgtaaaactgtagtccaacttcatattttaccgg

SEQ ID NO: 871078 - DNA, 99 bp, Homo sapiens
ccgttcctggctttgtagctcgctcaagatggcggcgcagccaccccgcgggatacgcctcagcgcggaatatgatgaaccaatcttgaaacacctgca

SEQ ID NO: 871079 - DNA, 99 bp, Homo sapiens
gatagtgcttcaggaattgaagacgtatcggacgatttaaggagtgttggtggtcttcaatggtgtggagagccaaaacgtttagaaactgaagcttct

SEQ ID NO: 871080 - DNA, 98 bp, Homo sapiens
agtgttccttccgctagtgatcctttgcaccctgcttggagacggacttgcttccgatccaaaatacggagctggcatatacttcaccaagaacctca

SEQ ID NO: 871081 - DNA, 99 bp, Homo sapiens
ggccggggacctgcatgtgtgtgcgcgcgaaggagcggaagaatggcagtgctcaaactcaccgaccaggtatgatgatattctgatcaatggacttcc

SEQ ID NO: 871082 - DNA, 99 bp, Homo sapiens
gtctggatccttttctcctttccggaacggccgggagtatctgaactgctgcacttcattggctctgtagtagctgtaatcccagctacttgggaggct

SEQ ID NO: 871083 - DNA, 99 bp, Homo sapiens
aaacggagccagcggctgaggaggggccccagcagcccccgaaggccctatcaggacatggagtatgaaagacgggtgtggggctggcctcgctcgtgg

SEQ ID NO: 871084 - DNA, 99 bp, Homo sapiens
ttggacgggactatgtgtgcacctggcaaggctattttggcattctgctggatatatgttcgtaaataccaaagtcggcgggaaagtgaagttgtctcc

SEQ ID NO: 871085 - DNA, 99 bp, Homo sapiens
atatttgtttctctctgcctgatttctcctgaatttggaaactatttgaaagaccacagcaagattctttcattcgtctcctcctagcctgggggacca

SEQ ID NO: 871086 - DNA, 99 bp, Homo sapiens
tccaatcctcacctcactgctgtgctccagaacaagggaagtgttcgccagttactacatgaaaagataagagatgcttatactcacccacaatttgtg

SEQ ID NO: 871087 - DNA, 99 bp, Homo sapiens
attacataacatcaaacgtgggtgtactggtccgttagcaaattctctttcagagaaaacaagagacccagtagaggaagatgatgatgaatacaagat

SEQ ID NO: 871088 - DNA, 98 bp, Homo sapiens
gtggaggacctggggtctctgatgcctattattgtaaggagtgcaccatccaggagaaggacgcttgtctgagacgacaggaatatagaagagaccca

SEQ ID NO: 871089 - DNA, 99 bp, Homo sapiens
caaaattcacaaggcaaggtgactttgaaagatttgataatgggctgcattaaaagtaaagaaaacaaaagtccagccattaaatacagacctgaaaat

SEQ ID NO: 871090 - DNA, 98 bp, Homo sapiens
tcaaaatctcttcttctaagagcacactgtcagacatctggatggtcacttactgagcaggaatctgtggagcttcctctcacccatcctgaatatta

SEQ ID NO: 871091 - DNA, 99 bp, Homo sapiens
caaggaagtcaaaccaggcatacctatagctccaagaaaatatgaaaggtgtccatccacaagttgtgggtctacctgtaatctcagcactttgggagg

SEQ ID NO: 871092 - DNA, 99 bp, Homo sapiens
ttcacttcctgaccgtgggctggaggaacagaagcggaacagccacagcagcctcccaaggagtctgcaagttgttgtgcggtctgaaagtagaagtgg

SEQ ID NO: 871093 - DNA, 98 bp, Homo sapiens
cgccatgttttatacaaaccgagtcctcaaagagtacaaagatgtcccagctcaagatcgacatttctccggctcctgaaaatccccacttctgcctc

SEQ ID NO: 871094 - DNA, 98 bp, Homo sapiens
ttcaacctcttattggaagattatccaaaaggagcagtctcacaggtgctggacagcctggaagagattcatgcgcttacagactgcagtgaaaagga

SEQ ID NO: 871095 - DNA, 99 bp, Homo sapiens
caaacctgtgagttcaacatgatagagcagagtggaccaccccatgaacctcggcgcattctacattctaaaggggagctcagtgaagatagacataaa

SEQ ID NO: 871096 - DNA, 99 bp, Homo sapiens
gaagtgccagcactgtggacactctttgtcatctcaatggctggggaaggtgctcaattcccatacatgcactagaggctgaacatatgcagaagaaaa

SEQ ID NO: 871097 - DNA, 99 bp, Homo sapiens
gggggtgctggagggggagggacaggcatcttgggcagttatgcgttcaacagtcttgctgataaatctccatggtgatgtgacaggctccctccatta

SEQ ID NO: 871098 - DNA, 99 bp, Homo sapiens
ccaccatgtcaccagatatgaacacatgtacatctgatcagttccagcctccacaaatgggaagtgttcctgtaatgacgcaaccaaccttaatataca

SEQ ID NO: 871099 - DNA, 98 bp, Homo sapiens
tcatccgcaaggtgtccacgtcgggtcagatccgacagaaggtgaaaggtgtagcagtcactcggcctacacccacagcatcgaccttgtgaacccag

SEQ ID NO: 871100 - DNA, 99 bp, Homo sapiens
aagaaaggcgctagaattgattttaaagagtgcctggaagagctgggatgtctggttgagtcctatggcatgaatgtttgccaaccaaccccaggaaaa

SEQ ID NO: 871101 - DNA, 99 bp, Homo sapiens
gcctctctcctgatacagcaggcgctcaccatgttccctggagaaccccatcatcacccagttcttccccaccctgctgctgtggtgcttctcggccct

SEQ ID NO: 871102 - DNA, 99 bp, Homo sapiens
cacatatcagggcaatgctgaaggctacgctcgaaattaaaattactttaacaagagcaggtctatgccgaattattgagttctggaggctgggaagtc

SEQ ID NO: 871103 - DNA, 99 bp, Homo sapiens
tggctttggaaattctctaattgcttttctcgtcctgagcagacgctgccacatagtccccaaacgggaagacaccctctctggacccccatcagacca

SEQ ID NO: 871104 - DNA, 99 bp, Homo sapiens
taccatacctcagatagggtccacagaatggtcagaaaccctccataacctgaagttccgccaagacgtcaccaagtgtcttttcctaggtattatttc

SEQ ID NO: 871105 - DNA, 75 bp, Homo sapiens
atgccatggaggaagtcaagaaatttctagtaccgacgctgaccggaaaggagattgagattgacattgaaccta

SEQ ID NO: 871106 - DNA, 98 bp, Homo sapiens
ctgctcttgaggttcacagatgatacctttgatccagaacttgcagcaacaatagatcaacccagaacgccatgaccgcaggctgaatcacttcaggg

SEQ ID NO: 871107 - DNA, 99 bp, Homo sapiens
ttcggcctggatgtcagcgaggagatcattcagttatcctacgcggagagccaggtaccaatgggtgcgctgcaatccagacagtaattctgcaaactg

SEQ ID NO: 871108 - DNA, 99 bp, Homo sapiens
gtggaaagatgacggatgaaaagaatgaacactgtccttcaaaacgaaagctttgcatcgtccctatggttgtgatgttgaaccccaggcactaaatga

SEQ ID NO: 871109 - DNA, 98 bp, Homo sapiens
gaccctcagggagagcgggcagccttccaggtggacaggcttcgggagcaggaaagaaaagaagcagaagaagctagtcaaaaggaaatagaagaatg

SEQ ID NO: 871110 - DNA, 99 bp, Homo sapiens
aggttgtccttatcagcagatcaaaggataaacttgaccaggtttccagtgaaataacgcctttccttcgaggagctcaaggcatttttcaaaatctga

SEQ ID NO: 871111 - DNA, 99 bp, Homo sapiens
gacaagtatgctgcaagtgagaacatatttaacaggatgctggtcgtttactatatattggccaaaatgagtggacacatgtaaattgtgctttgtggt

SEQ ID NO: 871112 - DNA, 99 bp, Homo sapiens
cccagacatcttgataatacctgttggaatctcctatgatcgcattatcgaaggtcactacaatggtgaacaactgatcctgataacttaagtgactct

SEQ ID NO: 871113 - DNA, 99 bp, Homo sapiens
ggagatggagaaattccaagttcagattctccaggaaaattgcctaagaattatgacccaaaagttaccccagatccagaaagatggctgccaatgcga

SEQ ID NO: 871114 - DNA, 99 bp, Homo sapiens
gcaactgacgcagtcactgcagcactggtggaacttgaggttgtaaatgtcttaaaatccttattgtcaaatcttgatgaagtaaagaaggaaagagag

SEQ ID NO: 871115 - DNA, 99 bp, Homo sapiens
tttcaccgcggccatcctgcaggcacagttgccgattacaggccctggagagtgaatttgtttcctgccagcttcaccaatggattgatctcatttttg

SEQ ID NO: 871116 - DNA, 99 bp, Homo sapiens
caaccacagggccacagagctggagtaggtgacctcacagtgactcaagctaccacttactgttgattgtgacgaaatgccagctgaggcacatgcctt

SEQ ID NO: 871117 - DNA, 98 bp, Homo sapiens
ggtccccgaggatatcagggcagccctggaggcttactgcaagaagtatgagcagctcaaggttgccaggcaggaggggaggatcattctgacgtcgg

SEQ ID NO: 871118 - DNA, 99 bp, Homo sapiens
acatcgagaagcataatgacattgtggacagtgacagcgatgctgaggatcgaggaacgttgtctgggcccacagcctgtcacccacagatcaccaagc

SEQ ID NO: 871119 - DNA, 99 bp, Homo sapiens
tgtggaagctgtgcacctccctcactttgtggctctccaaggccccagaggtgatccgaatgcaggataacaacccattcagtttccagtcggatgtct

SEQ ID NO: 871120 - DNA, 99 bp, Homo sapiens
gggagatgtcgaaccccgggacacgcaggaacggctccagcatcaagatccgtctgacaggaatcccagtcagaagttccagcctgccactgttctctg

SEQ ID NO: 871121 - DNA, 99 bp, Homo sapiens
caacagcctggattatctgcgagattcctgggagttatctggtcagatgaagactggcccatttgcagagcactccaaccagctgtggaacatcagcgc

SEQ ID NO: 871122 - DNA, 99 bp, Homo sapiens
tcctggcccagccccagcgggcccaacacctgccccggaaacaaatgcacccaagcaccgcatgcgtggggagaccaccctgtggaaccctggctgtga

SEQ ID NO: 871123 - DNA, 99 bp, Homo sapiens
gtgggggaggaagccctttctcctcggcactgtattctttacctgcttcccaatcccactgatgaggatcagcccatggaactggccagtcatggtggc

SEQ ID NO: 871124 - DNA, 98 bp, Homo sapiens
tgcactgtactggaatgcctattaagggtggagagattcaaccagttagcgtgaaagttggagataaagttcttctcccagaatatggaggcaccaaa

SEQ ID NO: 871125 - DNA, 98 bp, Homo sapiens
gaattgtcctctgtggaagggactttcttttggccctaggccccttcctgcccctgtcgtcagcaggagacattgacatttagggatgtggccataga

SEQ ID NO: 871126 - DNA, 99 bp, Homo sapiens
gggatcgtgaccgagaccgtgaccgagagcgtgaccgagagcgcgaatatcgtcatcgttagaagggatcgtgggactttaccagatcggtttgtaata

SEQ ID NO: 871127 - DNA, 99 bp, Homo sapiens
tcaaccaatatgaaatgcctgactccagaaaagggtgatagcacactcagataagaatcgcatgacaccccacaacctgggaattgtgtttggaccaac

SEQ ID NO: 871128 - DNA, 99 bp, Homo sapiens
gccttcaagaaggagctgcgacaattatgcattgcctcttcagctagtgaataaccaaaccatgacaacatggatggagatcttccgaactattatcga

SEQ ID NO: 871129 - DNA, 99 bp, Homo sapiens
accaggctcatcctgtccatcgtgtgcctgatgatcacgcagctggctggcttcagtggaccaaagtttgcctgcaatggtactgtaattgagcatccg

SEQ ID NO: 871130 - DNA, 99 bp, Homo sapiens
aaaaactgctgaccctgtaagagagaactggccatcttgcagacagacagaggcaagacatctgtatagattctgcttcatccgtgagagagaataagc

SEQ ID NO: 871131 - DNA, 99 bp, Homo sapiens
accagcagtaacaacagcgaggaagaagaggacgacgacgacgaggaagaggaggtttctgagatttggaatccagatatgacactaaaaagttatttc

SEQ ID NO: 871132 - DNA, 99 bp, Homo sapiens
cagaggaggcgggggcagccgctgagacggtttttcacaaggtatattcgaattgttgggactcacaacacagtgaacaagatttttcacattgtggct

SEQ ID NO: 871133 - DNA, 99 bp, Homo sapiens
caccactgcactccagcctgggtggttttagaaatttgcacactattgttctgggagcttgcaaaaatgctcttgaagtagatcttggttacctcatca

SEQ ID NO: 871134 - DNA, 98 bp, Homo sapiens
gaccactttagaaactcaattaaaactgataaatttcaaacggaagagagtggcagcatttagaaagaatctaattgaaatgtctgaactggaaataa

SEQ ID NO: 871135 - DNA, 99 bp, Homo sapiens
tagttcaggaggggagtctgatattgaagaggaagaactgaccagagctgatcccgagcagcgtcatgtaccccttggccaatccgccatggtatagtt

SEQ ID NO: 871136 - DNA, 99 bp, Homo sapiens
gagctcgcggctcacgctgagagggacacgcagtgacgagcggccgaagcagctttgcgggccgttgctccagggagaactgcaaatatcttcatccac

SEQ ID NO: 871137 - DNA, 99 bp, Homo sapiens
cttcatctgcgatggacagaataactgtcaagacaacagtgatgaggaaagctgtgaaagttctcaaggccaagctataacatcagaaatggtgaatga

SEQ ID NO: 871138 - DNA, 99 bp, Homo sapiens
agcagccaagaaaaaaagacgaaagaagaagaagagcaaagggccttctgcagcctcctccagctggtgatctcgggtcccgtgcagcagtcgcctcac

SEQ ID NO: 871139 - DNA, 98 bp, Homo sapiens
ggagctcttaacccagtttgaaacgtaactggttccctgaccaggctgttttggagtcagcggaagatcaccaaggccagggagtggttccaccgcac

SEQ ID NO: 871140 - DNA, 99 bp, Homo sapiens
gcggcttcctagtgagtcggcggctgatttagaaggaggttcaggctacggtgagccgaagaaaagtccaacctgatcgtggtccagagaggtcacagc

SEQ ID NO: 871141 - DNA, 98 bp, Homo sapiens
tactgagaagcccggcgacggaggaacgcaggtctgctgccaggatctgcatttactgctcaaccacatctaatttgatgtcctctgcagatttaaaa

SEQ ID NO: 871142 - DNA, 99 bp, Homo sapiens
gaagattctggtgtccacgtgatcattggggggcacgattctccctctcctagaggcgagctacttcctcagccgagcccagagcctgtgtggccccga

SEQ ID NO: 871143 - DNA, 99 bp, Homo sapiens
ggtgggaaaacactgtgaggatgggatctgcactgtaactgctggacccaaggacatggtggtcggagaacacctgttcccagcgctgaagcattccga

SEQ ID NO: 871144 - DNA, 99 bp, Homo sapiens
gtttggatgttggatctacactttctcaagcactgtgatcttcaaatacaaaaggatgccacggagaaagaaaaaagttaaagaagtctccgaatctcg

SEQ ID NO: 871145 - DNA, 99 bp, Homo sapiens
cgagagcccagaagctctgagaccagccgcatctacacgtgggcccgaggaagaggtactccaaagattcaggtttactcacgtcatccagcagagaat

SEQ ID NO: 871146 - DNA, 99 bp, Homo sapiens
aatgatttaacaacgttaccagcatccattgcaaaccttattaatctcagggaactggatgtcagcaagaatgaacattctagtatgccagtagaaaaa

SEQ ID NO: 871147 - DNA, 99 bp, Homo sapiens
aaacagctatggtgatgattagagacatactaatgtacatgatatgcctgaatattcagtcacaaatgaattttgtcgcaaacacttcttaatcggaat

SEQ ID NO: 871148 - DNA, 99 bp, Homo sapiens
ctcgtgtgttgtaaccactctcccatttggccaaacacatcccatcttgcacaagaaactcccgaagacccaatgccaggccacggagatgccccagaa

SEQ ID NO: 871149 - DNA, 99 bp, Homo sapiens
cgaagttaaagcactccacgagttccctcggattaaacgccggagagagcgtgaatttgcctcggggacgcctctccagaacagctttgctgagccatc

SEQ ID NO: 871150 - DNA, 99 bp, Homo sapiens
atggatgctgcccagagatcgcagcatatcaaagtgccactgattaatgaacttgaatcagcaatacatcagctgtacaaacagcgagcttcccgcctt

SEQ ID NO: 871151 - DNA, 99 bp, Homo sapiens
cggccaaggacctggccgacatcgcggccttcttccgatccggatgcctttgtggaactgtacggccccagcatgcggcctctgtttgatttctcctgg

SEQ ID NO: 871152 - DNA, 99 bp, Homo sapiens
cggctgtaaagatggcggcttcctagtgagtcggcggctgatttagaaggaggttcaggctacggctgttcggctcttgaatcccagcgatgaaaccag

SEQ ID NO: 871153 - DNA, 99 bp, Homo sapiens
caggattttcatctcttcgtgttcaaggtcactgaccacatcagagccatcggttaagcagtcaggtaatacacatttccacatggctggggaagcctc

SEQ ID NO: 871154 - DNA, 99 bp, Homo sapiens
aagaacagttggccaatactggtgcccaagcctggattaaaaaggtcctagcagaagatgtgactcagactgcctctgggtggggctggctggcccaca

SEQ ID NO: 871155 - DNA, 99 bp, Homo sapiens
gcaataccaccagcagcaccagcaacagtggcaatgagaccagtggaagcagcaccatcggggagacaagcaagtaaatattgcagattttcaagagaa

SEQ ID NO: 871156 - DNA, 99 bp, Homo sapiens
agtggctttgtttgcagcagcaatgaggaaaatgggtgtgaagaaaggagatcgggttgttgttcacctttcttggatcacatgcaaaggatgtttagg

SEQ ID NO: 871157 - DNA, 99 bp, Homo sapiens
agatttcatttctgtcctgctgatgaagtctacgttcattcagggcctgctgtggaagaccagccccaaagggactcagtagatcttgataatccacag

SEQ ID NO: 871158 - DNA, 99 bp, Homo sapiens
cttacactccaagttcctgcatttttgcttcagagtaatccatatgtaaaggtccaggagagcctcagattattttttgtagaagtgaagctgcacatc

SEQ ID NO: 871159 - DNA, 99 bp, Homo sapiens
caaaaaagaggagcttgtagcagagcaagccatcaagcacttgaaggctcatcatatgcccgaagctcagtggttacggctgtgaaatttacaatttct

SEQ ID NO: 871160 - DNA, 98 bp, Homo sapiens
tatccgcatgcaggactcggacctgagtgaccccatgtggaccggttggagggtgacagatcagaaggctctggtcaagagaatgaaaatgaggatga

SEQ ID NO: 871161 - DNA, 112 bp, Homo sapiens
gcccgctgccctctttgaggacctcttctaacgatgacgatattcgcgctctcggaatatcgtcatcgttagaagaggtcctcaaagagggcagcgggctgttcccagatct

SEQ ID NO: 871162 - DNA, 99 bp, Homo sapiens
tcggagatccgagagctctgcttctctgaaaagcgtgtggctttctggacttgatcacaaaatttgtccaggatagacatagagctagaagaaacagac

SEQ ID NO: 871163 - DNA, 99 bp, Homo sapiens
tcgcttggtgtcctcctggcctcagcaacctgacaattctgtcgtgtcccggccaacgcagacccgtcagtgataaactgtctgcataacctgtcccgt

SEQ ID NO: 871164 - DNA, 99 bp, Homo sapiens
gcggaacaggctaccaagtccgtgctgtttgtgtgtctgggtagcaaaccatgtgatttcttctgactctatttcctcttctgccagtagtttcctgag

SEQ ID NO: 871165 - DNA, 99 bp, Homo sapiens
ggaactcgatcctgctggctgctgtctctattctctcggcctgtcagcaaagacatacagtgggagaagttattaaattaggtcctaatggatctccaa

SEQ ID NO: 871166 - DNA, 99 bp, Homo sapiens
ccgttccaatagcagtggcttatccattggaactggacctgctggaactgggaaaacagagtctgtcaaagctcttggccatcagcttggacggtttgt

SEQ ID NO: 871167 - DNA, 99 bp, Homo sapiens
cgtgacagtcatgctgaaacctgcccacagcagaggagcacctgtcaggttaaaagagcagaaccttgtgaaagagctgaggccccgagacctcctgga

SEQ ID NO: 871168 - DNA, 99 bp, Homo sapiens
agccaggggggagcagggctcactccagagctctgagctcttcaccctgacctatggtgccctggtcacccagctatgtaaggactatgaaaatgatga

SEQ ID NO: 871169 - DNA, 99 bp, Homo sapiens
ggaaaaggaagcttaatatggattccaaagagcgtttggatcaggacggacgcttggtggctgcctctttgatgagccgtatagcacatgtggatatag

SEQ ID NO: 871170 - DNA, 99 bp, Homo sapiens
gaaacttgctcaacttcctgatagatgtacactgaaaactggacattataacattaaagtatactgtcctcgtaactgtatgcaagcaaatccacatta

SEQ ID NO: 871171 - DNA, 99 bp, Homo sapiens
gcttcacttagctctacaatcaacccatgtgattttgatggatcatcaaaatctgtcagaacatgtactctgcatggttttatatctgattgaattagg

SEQ ID NO: 871172 - DNA, 98 bp, Homo sapiens
gtaagaagtgccttttgcctcccaccgtgattctgaggcctccccaaccatgtgcaattattactacagcccggccatgctgggcctgaagaccgacc

SEQ ID NO: 871173 - DNA, 99 bp, Homo sapiens
gattttgagcgtcgcagagaacttagaaggcaaaagagggaggagatgcgactcgaagcagaaagttgccgaacaagcaaccggaaaagcttaataggc

SEQ ID NO: 871174 - DNA, 143 bp, Homo sapiens
aactcgtagggactccaaaccccagtactcctctgcccaacactgtacctcagttcattgccagagagccatattacaccaccaccttcactgtcagatccacttaaagagctttttcgacaacaggaagttgtaaggatgaa

SEQ ID NO: 871175 - DNA, 99 bp, Homo sapiens
atgcctttgatggaccaattaccataagacagtcattttgtttactcattcagccctgttgcaggtcccaataaactcttcataaggttgacagaagca

SEQ ID NO: 871176 - DNA, 98 bp, Homo sapiens
gcgagttgcagatctacacttggttttacacacgctggaaagattgggaatcatggtattctcagagctttggtttacatttttccttgagagaagaa

SEQ ID NO: 871177 - DNA, 98 bp, Homo sapiens
ttgtatttacatcaacaggagacatctccatttactatgatgagaaaggcccaaatattgagaaatcagtgaaggatttgcaacgctgcaccgtttct

SEQ ID NO: 871178 - DNA, 99 bp, Homo sapiens
caggattaacctgatggcctatcctgatttaaacgagatttacagaagcttccagaatggttgctacaagcctcaggaaaaatcagattacttgatgtt

SEQ ID NO: 871179 - DNA, 99 bp, Homo sapiens
gttctttgaaaattttgtgactattgaagctagtcttaaacagaaagagtattgggaaagggtcgttgtggtgcatagacccagagtatagacaaaatc

SEQ ID NO: 871180 - DNA, 99 bp, Homo sapiens
tacagtgaggtgaggagagaagatggcatacaggcggaagcatcagcaaatggaatgctgtctctgcaatttgagaggaggtgctcttaagcaaacgaa

SEQ ID NO: 871181 - DNA, 99 bp, Homo sapiens
ttccatcatggcgtcaatgcagtcccttaagctcctaggatttttagatgttgaaaatactccctgcgcccggcattcaatattgtatggttcattagg

SEQ ID NO: 871182 - DNA, 99 bp, Homo sapiens
tacagttctgtcactcacttacacagtattgggaaatctgtgaaaggcttgcagatgggtcaagggttgtggagagtggtcagaaaccagcagctgcaa

SEQ ID NO: 871183 - DNA, 99 bp, Homo sapiens
caaaaacagttcctccacatcaaagcagaagaagaccgaagggaagacttccagtagctccaaggaggttaagccacatgaaatgaagatcacctctgc

SEQ ID NO: 871184 - DNA, 99 bp, Homo sapiens
ccccagtttcccgcgggcctggaggtgacagatgaggtactggagaaggcagctgggaccgatgtcaacaacatagtgcgcgcgcaggatgaagaagtg

SEQ ID NO: 871185 - DNA, 99 bp, Homo sapiens
ggccaacatggcggaacgcaggagacacaagaagcggatccagatcaacagtacaaattctgaagtttgtaaacttgctgatggtggtggtaagccatg

SEQ ID NO: 871186 - DNA, 99 bp, Homo sapiens
cgagaccatcctggctaacatgcaatgcaggcggggaccttataactaagacggctcttgacttttggcgggccggaagaaagagggaagacattcagc

SEQ ID NO: 871187 - DNA, 99 bp, Homo sapiens
cgggttgagaagaccttgcgccacgcccttgaggaagaggagaaagtgcctgtggagcaagtcaccaactttgaagaggatctggctctgttgcccagg

SEQ ID NO: 871188 - DNA, 99 bp, Homo sapiens
cctatgatgttacagaagagtcaattaaggaattctttcgaggattaaatgacttaaagcccagtaatatagtagtaaaatctgattgcactttgaaga

SEQ ID NO: 871189 - DNA, 99 bp, Homo sapiens
gcggatcgggtggagtgtaggtcatatcgccgcggaatatattaaaggaatctgtgaacctgaactagaagaaagagaatgttaccccaaggacatgca

SEQ ID NO: 871190 - DNA, 99 bp, Homo sapiens
agggaagcagaggagaaccgggagccattcagaaaagaacctaaaggcagacccagaagagctttttacaaaactagagaaaattgggaagggctcctt

SEQ ID NO: 871191 - DNA, 99 bp, Homo sapiens
agggtggagatgatggtgtttctccaaaagatgttggacacaatatctatattctggcccatcaggaatttatgcgtatgattggcaatgacaaacaag

SEQ ID NO: 871192 - DNA, 99 bp, Homo sapiens
gttgcggtgcgctggagccgggcaagaagaggcagagctggaggagttcctgtgccctgtgaaaacaccccctgggctagtgggcgtggcagctgcctt

SEQ ID NO: 871193 - DNA, 99 bp, Homo sapiens
ctgggttggaagtcagagctgcacaaagggaaagggacaacataacgatgcacggatgaaccttgccattgctctgactgctgccaggtatggggctgc

SEQ ID NO: 871194 - DNA, 99 bp, Homo sapiens
gcattgagcagcataaactggggaccaatagaaccctgctgaagcagttgtggtcagaaatgagaagacatgaaatgttgagggaggagctgcgacaga

SEQ ID NO: 871195 - DNA, 99 bp, Homo sapiens
gtgtttgcggttcagccctttgatgaccgcagcagaatggagatttacagacagtcatctgggtggaggacacccttttgggatcagcactgaaagtga

SEQ ID NO: 871196 - DNA, 99 bp, Homo sapiens
atcatcttcacattgagtaggctcagtgcccccggaagtgaagattatatcttgaggtttcccccctatcatcttcgcgaggctttcccgagctgcatt

SEQ ID NO: 871197 - DNA, 98 bp, Homo sapiens
cggccgcgacgctatggcgcactggagtaccctgttcctggcagacgtcccagtgatcgggaggagtgggaagagcttcagctacaaccaggacgtgg

SEQ ID NO: 871198 - DNA, 99 bp, Homo sapiens
gcctgcaaagatcgcctgcaccttcaaggccaaactatgcagatccggaccatcgccatcatagctgaaggcatccctgaggccctcacgagaaagctg

SEQ ID NO: 871199 - DNA, 99 bp, Homo sapiens
aaggattctggatcagcagtataaataagattctcctgtactgggcaatggtcagcgtagcctcacgttcggccccaaagccagacaagtgctggttta

SEQ ID NO: 871200 - DNA, 98 bp, Homo sapiens
gaaaattggcaaatctgttactgcagacagatgggaaaaatatttgatcaagctgcctactgaatcactcttctatcgtgctgttcttcaggatatta

SEQ ID NO: 871201 - DNA, 99 bp, Homo sapiens
gacatctgcgggccggggacctgcatgtgtgtgcgcgcgaaggagcggaagaatggcagtgctcaaactcaccgaccagattctggatgaaattgaaga

SEQ ID NO: 871202 - DNA, 98 bp, Homo sapiens
acgccgccgcttgtgctgcagccatgacgcagtaaaacgcaggactcttcccgcttggattcgcgaaggtcttgaaaaaatggaacgtgaaaagcaga

SEQ ID NO: 871203 - DNA, 99 bp, Homo sapiens
cctgagcactgccttgtcagtggagaagaccagcaagcgtggcggcaagatcatcgtgggcgacgccacagagaaagccattgatgtgacctacttgct

SEQ ID NO: 871204 - DNA, 99 bp, Homo sapiens
cccgagggtcggctctaccaagtagatcttcataaacaatgaatggcatgattcagtgagtggcaagaaatttcctgtctttaatcctgcaactgagga

SEQ ID NO: 871205 - DNA, 99 bp, Homo sapiens
cctcggaggagtttgagcagatagagagcaggcatagacaagaaagcggcttcagtaaactgtttcacgttagacctgtaacccaaggagatgtgtata

SEQ ID NO: 871206 - DNA, 99 bp, Homo sapiens
tcaccttcgaggcggacgagaatgagaacatcaccgtggtgaagggcatccgggccaaacgtaccaagaaagtcgggatcgtcggtaaatacgggaccc

SEQ ID NO: 871207 - DNA, 99 bp, Homo sapiens
ctggccagaaaaggcaaggagaagagaccttctataactcaggtctacatgttcaagtgcgtgtggcggtgctacagattgatcaagtgcatgaactcg

SEQ ID NO: 871208 - DNA, 99 bp, Homo sapiens
cggcggcagcgctggactaggtggcaggatttctctctgatcaaacggacagttcaggactcagaatctaaggatgaatgttcaccgtggcagtgacag

SEQ ID NO: 871209 - DNA, 99 bp, Homo sapiens
gcaacgacgttccatctgtggaaggacctaccaaccagatctccagcaccctgccggtggcactactgagagacgaggtgccagggtggttcctgaaag

SEQ ID NO: 871210 - DNA, 99 bp, Homo sapiens
taacctgtactgtgaaaaatctcaaaagaagcacacagtataaattcaggtataaaggtgcacatgtaaagccaggatttgctgaacatttctacagta

SEQ ID NO: 871211 - DNA, 99 bp, Homo sapiens
tgggtatcaccactgctacttttcccattttgcagctcccctcccacccggtcactccgtccagcaagcacgcagacagcaagcccgcgccgctgacgc

SEQ ID NO: 871212 - DNA, 99 bp, Homo sapiens
aacaaaaaacaccacagtactatcgtctatcattggatgaagtggctccggagataaaagagtctcatcgtggaaggcaagagggaaaagaaaaaagta

SEQ ID NO: 871213 - DNA, 99 bp, Homo sapiens
ctcccccctcctaggcgggagggggggtggtgcgcacgcccccgaggacgcaggtgggttcagtagaagaattccaaggccaagaacgaagcgtcatcc

SEQ ID NO: 871214 - DNA, 109 bp, Homo sapiens
ctgtattgagtttctctttgagatgattggactgctctatccagcatcattgagttggcaacaccatcatgacatcacaacctgttcccaatgagaccatcatagtgct

SEQ ID NO: 871215 - DNA, 98 bp, Homo sapiens
agtgggacctagacaaagggagagggtgaccgacatcccaactagaaaataaacagagttgtctttgttggaaactttttacgtgtcaataccctctc

SEQ ID NO: 871216 - DNA, 99 bp, Homo sapiens
tgagaaattgcagcagtcacccaaacctggggagaagcttcgttccagagcccagcatgaatggatacgcggaatttccgcccagccccagtaacccca

SEQ ID NO: 871217 - DNA, 99 bp, Homo sapiens
gcggacaggcgacagcgacctgcggcaggagcatctttccttgaagaagtacattattgacattgtggttgaaagtacagctccagcagaagctttgaa

SEQ ID NO: 871218 - DNA, 98 bp, Homo sapiens
gggaagtttggatcctggttccgtccgctaggagtctgcgtgcgagcttccttcaaaatgtctactgttcacgaaatcctgtgcaagctcagcttgga

SEQ ID NO: 871219 - DNA, 98 bp, Homo sapiens
agcagcagcctggctcctggtggctccagcagcagaacactcctatgccaccttcaccagctgtacaagtgcagggccagcctaacagttctcagcct

SEQ ID NO: 871220 - DNA, 98 bp, Homo sapiens
taaccagcatggctacttcatattttggaaagcagtttttaagacaagaccaagaatcgccttcagccctgtctggtgcatccttggcagaaagtgag

SEQ ID NO: 871221 - DNA, 99 bp, Homo sapiens
gacatccttatcagcacagcacttattccagacgaaatctcacaaaactgtcccttatcttcagtcacatgctggcagaaatcaaagcaatctttccca

SEQ ID NO: 871222 - DNA, 99 bp, Homo sapiens
attttgcaaaagcacgggagaaagtgcccaaacttcacagcattagggacaggaatggaacacacttggatgcagacagagtctcgctctgttgcccag

SEQ ID NO: 871223 - DNA, 99 bp, Homo sapiens
tgttaacagactgcttttacacctacgaatgaagccaagagtgatgaaagaagctgtatctactccatcacgaatggcccacagggatcaggaatggta

SEQ ID NO: 871224 - DNA, 99 bp, Homo sapiens
agcaccctggggggctgcatccagataatgtgaagccttctttgaatcctggggggagccagtcatctgatgtggtgcttttgaaccactggaaagtga

SEQ ID NO: 871225 - DNA, 99 bp, Homo sapiens
ctctactaccagacagagaaagcacaagtaaatctgtacagatgatgacacagagccattcctttagcttcactttcctggaggacttgcaggccaaaa

SEQ ID NO: 871226 - DNA, 99 bp, Homo sapiens
taatggctagcaaaaaagatgatccgggtataataatgaagttaaaagagcagcactccaagcagatcgatggcaaagccttcctgcttctgacacaga

SEQ ID NO: 871227 - DNA, 98 bp, Homo sapiens
gactttgatattgatgtgaacgcctctgtgtttgaaacaaacattcgagtgtctgtcttcaccaagaaggacgactttgattggctgtaattggccac

SEQ ID NO: 871228 - DNA, 99 bp, Homo sapiens
gatcctctagtagccacggtgtggcagctgctctgaaccaggacctggacccggacccaaagtgccatgtctttaatgctggagtgcagtggtgcaatc

SEQ ID NO: 871229 - DNA, 98 bp, Homo sapiens
agacattgtacagaacattgtagaagaaatggtgaacattgttgttggagataacggcaaaagcttctatcatttttgttactcttcagtacaatgtc

SEQ ID NO: 871230 - DNA, 99 bp, Homo sapiens
gtgggcagaaagttgaggaagaaagaactcaagtacaacccaatgaggcacaagtgcatacaccttgatagcaccaaatataaaccggagaaatgagat

SEQ ID NO: 871231 - DNA, 99 bp, Homo sapiens
cccggtcgggagggaggaaggtggcaagatggtgttggaaagcactatggtgtggcctctactacgtggacagtgaagggaaccggatttcaggggcca

SEQ ID NO: 871232 - DNA, 100 bp, Homo sapiens
gcgataattgtggatgcggcaagtctggatccagaatctttagcatatgtccgttgatataaagattctggatccagacttgccgcatccacaattatcg

SEQ ID NO: 871233 - DNA, 98 bp, Homo sapiens
agacgccctggtgctcaccaagcaaggaaaccacccctactcctaatcccccgactacagaagaggagaaaacggaatctaatcaggaggttgctaac

SEQ ID NO: 871234 - DNA, 99 bp, Homo sapiens
agggatacagcagtttggtcaatattgtcttaacatgcttcaaataaatcagaccactaaggcttttcttcctacgatgctggagattaatcatggtca

SEQ ID NO: 871235 - DNA, 99 bp, Homo sapiens
actcactctgcctcagcaacactggtccctgttgccccaccaatatgccagctcgatagcatagcatctgaatgggttggacttccacctctgccttca

SEQ ID NO: 871236 - DNA, 99 bp, Homo sapiens
tctattccatctgtgagtgactctttgacatggagagaatttcactatattcagttgctgagacaaaggaaaacccactcccttggaggagcatgacct

SEQ ID NO: 871237 - DNA, 121 bp, Homo sapiens
tgctgtgcctgcagaatggaagatttgataatgcagatagaatgttcaacaggctctgaatggctttgtattagttgtcactacagatgctttggtcttttatgcttcttctactatacaa

SEQ ID NO: 871238 - DNA, 99 bp, Homo sapiens
tgtttgcggttcagccctttgatgaccgcagcaggtaaggctggcctctctgcagtcagaggtctgagctctgccatggggataggggtgtctttatta

SEQ ID NO: 871239 - DNA, 99 bp, Homo sapiens
ccagatcttcttcaccaaaaatgggaagcgggaaccttccctgtatactgtcaaagccatcctgattctggacaatgatggagatcgactttttgccaa

SEQ ID NO: 871240 - DNA, 98 bp, Homo sapiens
accgggtgagctcaccgcccagcccaaaccaggagattgcgagggagcgatgcggtgcagcgcgggacatcaaagacgtcagactggatggcgagtcc

SEQ ID NO: 871241 - DNA, 99 bp, Homo sapiens
ccggaaggttcctggatttgacaaatcttctaacgatgacgatattcgcgctctcggtcacgctctcggtcacggtctcggtcacgatcccggtgcctc

SEQ ID NO: 871242 - DNA, 98 bp, Homo sapiens
gcagacagaaatttcaccaagccgcagcccaataggggcacaaaacgtccccgggatgatgaagaggaggagcagaagatgcgtcggaaacaaactgg

SEQ ID NO: 871243 - DNA, 99 bp, Homo sapiens
cctatgactcagacctgggcacagcaaatgctgaggactcagaccagtctctgcaagagacagtcattttgtttactcattcagccctgttgcaggtcc

SEQ ID NO: 871244 - DNA, 99 bp, Homo sapiens
agctgaggacacacccaggaaaagactcaggacggacaagcacagtcttcggaagatttcagaagaaagtggtagcttcctttccaagaacagttctga

SEQ ID NO: 871245 - DNA, 99 bp, Homo sapiens
ccgagcctaagagggcagccgcctgaaggaacgcgacggcggcgcccgcagcctagggactccacgtaccccagctgggtctcattgttccagaactgc

SEQ ID NO: 871246 - DNA, 99 bp, Homo sapiens
gggaatgtcatctggtggaggtggtggcggtggagttggactatcagcaacgtttttcctcctgggattggcttgtttgcgcctcttgcaccgggggcc

SEQ ID NO: 871247 - DNA, 99 bp, Homo sapiens
ctccggggaggtcacctgacgaggaggtgcagaccatgaattacgtggggcagttagccggccaggtgtttgtcaccgtgaaggagctctacaaggggc

SEQ ID NO: 871248 - DNA, 99 bp, Homo sapiens
aactacctgcagagggcctattaccaggaacacatgacagctggaggcaattgccagaccttctcatcttccactgtcatctcctactccaatacgggt

SEQ ID NO: 871249 - DNA, 98 bp, Homo sapiens
agaattcagatgcgtagcttgcagcagcagttctccagggctgattgttgtgacattggccgtatgctggatgcccaaccagattcggaggatcatgg

SEQ ID NO: 871250 - DNA, 98 bp, Homo sapiens
caggaaccattggataaggataaagtccagagacaacaagttcagcaagaaagattgtctttcaatcaggaatgttgtagcttcaatccaaaccaaag

SEQ ID NO: 871251 - DNA, 99 bp, Homo sapiens
ccaggggctctgggagtggctgccagatgttcttggcagccctgtcattcagctatattgctaaagcactaggtggaatcattatgaaaatttccatca

SEQ ID NO: 871252 - DNA, 99 bp, Homo sapiens
tggcgcctaaagtctgagagagggaagtcgcctctgtgctcgtgagtgcatggggtataagtatatccggaactgtgtgatgaacagagccctgcccca

SEQ ID NO: 871253 - DNA, 99 bp, Homo sapiens
agtacaatactaactgtaacaaagcctttgtaaatcatatgatgaggatatgaggaacttgcggcttgcttataaacaggaagaacagagtaaactagg

SEQ ID NO: 871254 - DNA, 98 bp, Homo sapiens
ctgacttctagcactcctgagtttgagccctatgagcagtggaacctagggcgtccgacctccgatcatgaacgggcccctgcacccgcggcccctgg

SEQ ID NO: 871255 - DNA, 99 bp, Homo sapiens
tgaaaaagccagaggctgtgagatgggaaaagctagaggggcaaggagatgtgcctacgccaaaacaattcgtagcagaacactgatatttgcatttaa

SEQ ID NO: 871256 - DNA, 98 bp, Homo sapiens
aatcagcatcatgtttggcagctgagtattggagccaggagcctgccatgagtttcagaaagtgctttctctctgtggacatgaggattggattagag

SEQ ID NO: 871257 - DNA, 99 bp, Homo sapiens
ggaattccggtcagggtcaagtcgtgttctgatcactactgacttgttggttattaatgctgcactggctttagcagcaaaaccacagagtaaactggc

SEQ ID NO: 871258 - DNA, 99 bp, Homo sapiens
ccagcactttgggaggccgaggatgctggaggtcagcagattggcttcttgctaggaagctgtggtattgccttagctcttaccagtgaagtttgtcta

SEQ ID NO: 871259 - DNA, 98 bp, Homo sapiens
gaacgcacgcccccacatctgctcaaggagatcattctggtggatgacaacagcagtaacgattccattggccgtgacatccccaaaatgcttgaatt

SEQ ID NO: 871260 - DNA, 99 bp, Homo sapiens
gcagtaatcgtggccaagtctccagcctcggcgaagagagatatgcagcccctactcagtgccctgccaaatgtgggcatgtttgaccccagcttcaga

SEQ ID NO: 871261 - DNA, 99 bp, Homo sapiens
cgggagactggagtcgaaggccgtgagaagagcttaaagcagcgcctgggtaagagtaacatccaggcacggttaggccgacccataggggccctggcc

SEQ ID NO: 871262 - DNA, 99 bp, Homo sapiens
cgccgcggggcagccgccgctcctccgggtgtactaatggtcacttgatgtgcgctggctgttttatccacctactagcagatgcccggctgaaggagg

SEQ ID NO: 871263 - DNA, 99 bp, Homo sapiens
gcgtccatcctgccagagactgtactgcttagggagagaactcgatgccaccgcaacggtattggcgaaccggcaggatgaaagtgagcagtccagaaa

SEQ ID NO: 871264 - DNA, 99 bp, Homo sapiens
gacagactcacacttttggccctgtttgatagagtccgaaattgaagttcagaggaagaattgccttccaccgcatcttatcagaccctatgggtgcca

SEQ ID NO: 871265 - DNA, 135 bp, Homo sapiens
cctctcccaactccaggcagccggtgctgtgggctttgttccctccctggaaagggacgaacaaagcccacagcaccggctgcctggagttgggagaggagcaatacaacacccctgtagccaccaccactggga

SEQ ID NO: 871266 - DNA, 99 bp, Homo sapiens
ggtgatttctgcatttccatctgagatcagccatgcagaagctggggacagaagtatttgaagaggtctataattacctcaagagagcaaggcatcaga

SEQ ID NO: 871267 - DNA, 99 bp, Homo sapiens
caagatccgatctactgagagctgcgagacttaattcagtgcacaaatgagatgaatgtgaacatcccacagttggcagacagtttatttgaaagaact

SEQ ID NO: 871268 - DNA, 102 bp, Homo sapiens
attcatacctgctgatgtggggactgctcacgttcatcatggtgcctggctgccaggcagatgccatggacaatattaccaggcagaaccaattctacgata

SEQ ID NO: 871269 - DNA, 99 bp, Homo sapiens
aagctctgactgaaagtgaactttgtcgcttatggactgaaagtttattgcattccaacagctcattttatgttggtgtggatgaggtcaccattgtca

SEQ ID NO: 871270 - DNA, 99 bp, Homo sapiens
ggaaatgaattttgaaacttcacggtgtgccaccctacagtactgccctgacccttacatccagcggacatggatttgattgacatactttggaggcaa

SEQ ID NO: 871271 - DNA, 99 bp, Homo sapiens
ctcaagcaggacaatcgcactttataccacctgcgattactctctctctccagatcggattcaaccgcacatcatgacagatgttccggctacatttac

SEQ ID NO: 871272 - DNA, 99 bp, Homo sapiens
ctcttttccatgtctttttaggacctcagggttgccttcttctgttttcaagatattagtgagataaattcctgtaatcccagaactttgggaggccaa

SEQ ID NO: 871273 - DNA, 99 bp, Homo sapiens
ccctcacagcaaccagcaccagatgaaggagcattcctcttggagtcaactactggattttctgtctggcaaacagtatgcagtaggtgatgaaactga

SEQ ID NO: 871274 - DNA, 99 bp, Homo sapiens
atctgactcgtgatctgcccatcttgttactccctagcagtgtggtaaggcactactgcagtcttcagttaagcaacaagtagaagctattgaaaaaca

SEQ ID NO: 871275 - DNA, 99 bp, Homo sapiens
gccaaaattatcaacaccaaaaagctttctgctagggcctcctgacagtgggcctccaccattgccaacatcctccctcccagaaggttattatgagga

SEQ ID NO: 871276 - DNA, 99 bp, Homo sapiens
aaatacccgtctacatcagaagcagtggagcgatctctctttgagtcggcatggaagaaggagaaggacatcgtttccaaggagatagagaagctccgc

SEQ ID NO: 871277 - DNA, 99 bp, Homo sapiens
cgcggtgctgccggtggagcttcaggtgatgatgaacagtctacacagatggctgcaagttgggaagatgataaagttacagaagcatcttcaaacagt

SEQ ID NO: 871278 - DNA, 99 bp, Homo sapiens
ttccagacgattgcacggaatgcacttaagcaggcacaatgatgctatacaatgtgtctcctacaatcctattactcatcaactggcatcttgttcctc

SEQ ID NO: 871279 - DNA, 99 bp, Homo sapiens
gtgtcctacaccaggcagcccccaaatcccggcccaggagcagcagccaagctggacagatgacctgcctctctgccacctctctggggttggctcagc

SEQ ID NO: 871280 - DNA, 99 bp, Homo sapiens
ttagccctgctccaggaatgggacctcgagtcactgtggtcagcccaaggccaaccccactgtcactctgttcccgccctcctctgaggagctccaagc

SEQ ID NO: 871281 - DNA, 99 bp, Homo sapiens
tcctgcaatgattattggcattcctgtgtatgtgggccgcaaggttgctggtaaaattcctcctagtgtccaagtggaggcagcttgtcttctgtccca

SEQ ID NO: 871282 - DNA, 99 bp, Homo sapiens
gtatgaaataaacgccactcctaaaggctggtcctgccactgggacaggtttgaagtgttgacattccttttgttgtgttacaatgctgccttaactta

SEQ ID NO: 871283 - DNA, 98 bp, Homo sapiens
cagaggtgagctgatccccagccacagcacacaggaccaggctgcgagaacagacttaattcagtgcacaaatgagatgaatgtgaacatcccacagt

SEQ ID NO: 871284 - DNA, 99 bp, Homo sapiens
atgagcgatgagagaaactgccgagtgaaagctggacattgaagaagccaaaatctgtttccaagaaactaaagagtgtattccgagtaccagatctga

SEQ ID NO: 871285 - DNA, 99 bp, Homo sapiens
tctgtccaaagagcaacccacaagggggagagcctggggatgtacaggagatgcctgctccagaatctcctcctggaagggatccagctgcaaatttga

SEQ ID NO: 871286 - DNA, 99 bp, Homo sapiens
ggtatccgatcccatctacatattaccactggcagtcactgctacaatgtgggctgttcttgagggctgacaggacaactggatcagtttcattaaaaa

SEQ ID NO: 871287 - DNA, 99 bp, Homo sapiens
catctctaaaggtccttctaggagagaggtgaaaggatggagaacctgttcatcaaccgcttcatgcacatgttccagtcttcttggaatgacttcgcc

SEQ ID NO: 871288 - DNA, 99 bp, Homo sapiens
gaagcatttactgagaaatttcttaaaattaattgcaaatatattaccagtggcaaggttgatcgggatcgagatcttctcattcagcagactatgagg

SEQ ID NO: 871289 - DNA, 99 bp, Homo sapiens
aaagagaaaacgtgcagggtgatttgaagcaggtactcagtggctatctgtcccagtcctagaggcagtgtatctgtaatcccagctactcaggaggct

SEQ ID NO: 871290 - DNA, 98 bp, Homo sapiens
taactgtgaaaccagtaacaacggaacctgaaagtggacacttaagttatgcctgtccgaaaaatatgctcggagaacgtgagcctccaaagaagaaa

SEQ ID NO: 871291 - DNA, 99 bp, Homo sapiens
ctggatcctgaatttgaaccaagtggtccaaacggcccggtcacctgagcaacccctctgcaggaaccgcagaatgtttcatccatttgtggaccaaaa

SEQ ID NO: 871292 - DNA, 148 bp, Homo sapiens
gtgacatcatgcgcctacagccggcgttttcattcctccaccatccttccccaggcccgtggaggaatgaaaacgccggctgtaggcgcatgatgtcacaagttattggaagaaatccctccaacctaggttgggacagatgaaggcg

SEQ ID NO: 871293 - DNA, 104 bp, Homo sapiens
ccgccgaggagccatcagcttcagctccagctccgctctcttcggctgccccaatccccggcagctctctcaggctcaacaccacatggaagctgccaaggctt

SEQ ID NO: 871294 - DNA, 100 bp, Homo sapiens
ttcaccttgggtggtttgcagcttaattgttgatgaggtcttggagcctcccttctgcgctcccagaggcttttcttgctcatgtctccagccacaatat

SEQ ID NO: 871295 - DNA, 99 bp, Homo sapiens
cctcaccacagaggagaaagtccccttattcactgcgtgctgtcctcacttgttctacaatgagtgccaaatctgctatcagcaaggaaatttttgcac

SEQ ID NO: 871296 - DNA, 99 bp, Homo sapiens
gggggaagcggtggcgccggcgtcactctggatgaggccaggaacccttaggagaaatcttgagagtggacagcaattgtgaagatcgccagagagttc

SEQ ID NO: 871297 - DNA, 99 bp, Homo sapiens
tcgagaccatcctggctaacatggccatgtcaaaggacgccctgaatctggcgcagatgcaggagcagacgctgcagttggagcaacagtccaagctca

SEQ ID NO: 871298 - DNA, 98 bp, Homo sapiens
gctatgtggacattgccatcccatgcaacaacaagatggagcggcagcgcctcgctcgagagaagcagatgagggaggaggctgaacgcacgagggat

SEQ ID NO: 871299 - DNA, 99 bp, Homo sapiens
ccacaatatattgactactgccacaattccgggtacaggcatccttcacctgctattgttgcaagaacagtcagaattttacatacactactaactctg

SEQ ID NO: 871300 - DNA, 99 bp, Homo sapiens
ctggaactcttcttgaagtaccatttggcgaacgctcaacaacataaataacaacttctgtcctgtagttccataaactcttccccctgtcttgatgtt

SEQ ID NO: 871301 - DNA, 99 bp, Homo sapiens
gctaacaactccaaatcacacatctctgagcattctggggaaaagaaactacagtcatcacaatggtctggatgatggagtctcactctgtcacccagg

SEQ ID NO: 871302 - DNA, 99 bp, Homo sapiens
tacagaaccaaggaaggggaactgagtataccaacagatgttttaaagattgtgtattctgtgggtgctcagacaacagcaggatggaattacctttta

SEQ ID NO: 871303 - DNA, 99 bp, Homo sapiens
gaatgctggagtcagtggaagacggagctggtcggcccgaagaacccttaggagaaatcttgagagtggacagcaattgtgaagatcgccagagagttc

SEQ ID NO: 871304 - DNA, 99 bp, Homo sapiens
cgaacattttgaacccgttcttattgtggtcgtctccaaacaggtccagtagaagtgctcctccaccatcttggtcaccgctctggagatggctctttc

SEQ ID NO: 871305 - DNA, 98 bp, Homo sapiens
tgccagtgacatagcttcagacaggtgtgagtgatgtagactatagtctgtatccagatagagaactacagagtcagtggctgcgtgcttaccttgaa

SEQ ID NO: 871306 - DNA, 99 bp, Homo sapiens
ctggctcccttctgccccagctccgtctcggcggcggcggagttgtggaaagtaaaaatgtagccctaccaaaaggaactattgtactggcttctccag

SEQ ID NO: 871307 - DNA, 99 bp, Homo sapiens
ttgaagaaacgcttaacccagaaggggatgattatgaagtcattcctaacagtaatttctatgtatccagaacggcctgcagagataatacttctgtct

SEQ ID NO: 871308 - DNA, 98 bp, Homo sapiens
ccaaatcacgctgcagatcccattataaccaggaacttggcattagaattcctcgaccactaggacagggaccaagcagattcatcccagaaaaggag

SEQ ID NO: 871309 - DNA, 99 bp, Homo sapiens
tccaggctcctcactctgtccaggctcactcagtaacttgatggattttgtgaagaaaacaggcatttgcgcttcaaagtgggaatgggggaccactca

SEQ ID NO: 871310 - DNA, 99 bp, Homo sapiens
ccctgtcggaccggatggcaagaatcagctggggcagaagcgcgtggtcaaggcagcctggcatcctcgctacaacctcattgttgtgggccgataccc

SEQ ID NO: 871311 - DNA, 99 bp, Homo sapiens
gggatctgcagcgtgatttgggccccatcgccccaaaagcccccggcccaccagtccagtccgtcctgcaggatttcgtctccgttcttcatccttggg

SEQ ID NO: 871312 - DNA, 99 bp, Homo sapiens
ggaaagaggaggaaaacaaaagctgctacttatggaagatacaaaggaaacattgtcaattgttgctgtggaactagaactgaaggatttcatgaatgt

SEQ ID NO: 871313 - DNA, 99 bp, Homo sapiens
agcctcctgagtagctgggattacagttctaaatggagcccctggatttataaacttgtgcgatgctttgaacgcctggcagctggtgaaggaactcaa

SEQ ID NO: 871314 - DNA, 99 bp, Homo sapiens
gccgaaatgatccgcctgcctcagcctccaaagtagctgagactacagatgatgtgatgccagccacttactgtgaaattgatttagataaagaaaaga

SEQ ID NO: 871315 - DNA, 99 bp, Homo sapiens
ctgtattcctgaaaatcatggtgaggacatgaggaaaatgtccttccagcgctgcgcccggacagacaaggttcaagttctttcttcaaagagtcatca

SEQ ID NO: 871316 - DNA, 139 bp, Homo sapiens
gatgctcagaacagagcagaaatcaaattgaagagagcagttgaagaagtgaaaggtttaaggcaaaggtgccatttgcttctgcgagaacatccatgatggcagactgcaggtaccaataatttcttcacttcttcaa

SEQ ID NO: 871317 - DNA, 99 bp, Homo sapiens
ggctgcgagctcctcaagaatctcgtgctcaccggtttctcccacatcgacctggcttcaacggaccacaccaaaatgccatctcaaatggaacacgcc

SEQ ID NO: 871318 - DNA, 99 bp, Homo sapiens
agagttcaaatacgtggcaaatatgcatggagatgaggtctctacagcggaacaatgtcgttcttcccccaaaagcatgatttgctgcaataaaaaatc

SEQ ID NO: 871319 - DNA, 99 bp, Homo sapiens
atgagaagtgccaggaccttcgtgccctcctcaagcgaaaacaccgctttatcctgctgcgatccccagggaacaagaatgtgaatggcataaagtatc

SEQ ID NO: 871320 - DNA, 98 bp, Homo sapiens
ccctaagcatggctatgcagactctaaatacaagtatcaagtactcacacccgggagagacagatggcaccagactcctgctcatttgtgacgtagcc

SEQ ID NO: 871321 - DNA, 99 bp, Homo sapiens
ctgtttttcctgagcaaccagagaaaccacttgaccttgcacatatagtaatctcactctgttgcccaggctgaagttcatggcgcgatctcggctcgc

SEQ ID NO: 871322 - DNA, 99 bp, Homo sapiens
gaggctctgcggctggtccaggccttccagtacacagacgagcatggggaagattcagcattcccatatttgaaatgggaagaagtttcatgtccattc

SEQ ID NO: 871323 - DNA, 99 bp, Homo sapiens
acctgtctggagcaaggaaaagatccctggaatatgaagagacacagtatggtagccacacccccagctctggaggctgccatcgagaacctcaatgaa

SEQ ID NO: 871324 - DNA, 112 bp, Homo sapiens
cctgtattctccatgtagacttccatcttcatgagtactccaagaagatggctcctttgcaatagtcaactgaaccatcttcttggagtactcatgaagatggaagtctaca

SEQ ID NO: 871325 - DNA, 99 bp, Homo sapiens
ccgctggctcagccgcaagtacccgtccatcatagtcaactgcgtggaagagaagctctgtggctgtgggctgctgggagtgggcatctggctctccgt

SEQ ID NO: 871326 - DNA, 99 bp, Homo sapiens
tttgatcccggactcaaaagcaagaacaagctcaactacttgaggaattactggcttctgatagtgtacccgtgtaatgtggacaccacctctccgtga

SEQ ID NO: 871327 - DNA, 99 bp, Homo sapiens
gagaaatgaagaagaaaactgtatgtaccctaaatatgggagataagaagtatgaagacatggaagaacactcctatgccaccttcaccagctgtacaa

SEQ ID NO: 871328 - DNA, 99 bp, Homo sapiens
ctattcttacatttgcctgggctgccttgccgccatcttttagcttctcacttatggcaggcttgcttgtttaactttttgtttcctctcttgtcatag

SEQ ID NO: 871329 - DNA, 99 bp, Homo sapiens
gctggattcattggtggcacagaagtgagggactggtttacttgtggtggcaataacggtactgttggtacacctctcctttctctctgcatccttcct

SEQ ID NO: 871330 - DNA, 99 bp, Homo sapiens
acggatgagaaatctttcgagaatattcagaactggatgaaaagcatcaaggagctttggagcaattcccatcgaccagagttggtccgaccagccttg

SEQ ID NO: 871331 - DNA, 99 bp, Homo sapiens
atcacagccagagaaggggccagtcggaaagtgtggccgacgacgatgccctcgctgaggagcgcatgcggagaggccagaacgccctgccagcccagc

SEQ ID NO: 871332 - DNA, 98 bp, Homo sapiens
tgggggccgggagtttgcggattttgaatatagggtacatcaggaacgtctctatcaagaatacaatttcagcaaggctgagggccatctgaaacaga

SEQ ID NO: 871333 - DNA, 99 bp, Homo sapiens
gcatcccttttgtctgcagggattcgttgtaaaaggccactttggagttgtctaccacggagaatacatagaccaggcccagaatcgaatccaatgtgc

SEQ ID NO: 871334 - DNA, 98 bp, Homo sapiens
cgtagggaggacaccgtgacttcccggacgctgggaaatgaccttaaacagattcagagaccgtggggccaacaaactgaactggagtaacatgtgaa

SEQ ID NO: 871335 - DNA, 98 bp, Homo sapiens
atcctgagaagagctttgatagaagggctactcctgagtacttctgaaattcctcagttccggctgccgtatgatgtagtgaattttgagattgagct

SEQ ID NO: 871336 - DNA, 99 bp, Homo sapiens
tgctgaactgggtgctttatatagggatagtaatgatgacactgaagatgtttcactgtttgatgcggaagaggagacgactaatagaccaagaaaagc

SEQ ID NO: 871337 - DNA, 98 bp, Homo sapiens
ggctccaccccgtcgcctcgacagtttttgaaatcatgaatcctgtttatagtcctggatcttctggggttccctatgcaaatgccaaaggaattggt

SEQ ID NO: 871338 - DNA, 99 bp, Homo sapiens
ttacacaaggacttctttatccgagcgctggattgcatgagaaggcgtttgcaatggctgctactgtgaacttggaacttgatcccatttttttgaaag

SEQ ID NO: 871339 - DNA, 99 bp, Homo sapiens
tcgccgatgacaaccgctttgacttcctcctcctcgtctgctgcgccatgctcatgttctacccagatgaagagggtcccaagcactggaccaaagaaa

SEQ ID NO: 871340 - DNA, 98 bp, Homo sapiens
acctggagagaggccgcgtcctgggcagaggggttgccctgctgtcagacgtctatcctgagaaaatcttgccggacttgttggctcaatatgacagc

SEQ ID NO: 871341 - DNA, 99 bp, Homo sapiens
cgtgcccgaggggctcagcgccttcacccaagcgctgcaggtggacacgaacaccaaaaatgtctttgggcaaccgaggttgagggcatccctccgaga

SEQ ID NO: 871342 - DNA, 99 bp, Homo sapiens
cctcccaaagtgctgggattacaagctggcctgaggcttccaccactaaacgcaaagctgtagatacctattgcttggattataagccttccaagggaa

SEQ ID NO: 871343 - DNA, 99 bp, Homo sapiens
ccttccgggagcctagatcctgtgctttactctgaagactcctgatcatcctggccaatggtgggccccaggccctcgtgcagatcatgcgtaactaca

SEQ ID NO: 871344 - DNA, 99 bp, Homo sapiens
gtggtttgaatgggtactctgctggaaagttgatttcgattctgaaggctcccttatcatatggagggttgtcctgtagtcccagctacttgggaggct

SEQ ID NO: 871345 - DNA, 102 bp, Homo sapiens
cctttaaggaggcagaattacgattatgcagtgtatctactaacagtgttataccatgagtcttggatgctgcacttaaaaggatgcttgttttgatgtcct

SEQ ID NO: 871346 - DNA, 99 bp, Homo sapiens
taacacagggggaatgggagcctattgtccagcccctcagatacatcgagatatttccaagcagaaggaatgaagttcgaacacatgtcggttcttata

SEQ ID NO: 871347 - DNA, 98 bp, Homo sapiens
aggatctggaggacggagaggacctgttcaccagcactgtctccaccctagaggtttctaagcatgaattgaggaacagaagaagcagagcagatgat

SEQ ID NO: 871348 - DNA, 99 bp, Homo sapiens
aaatgtgtggaatttattgaagatacaggtttctgcccacttggctatagggaatgtcataatggaaaatgctataggctggaacaaagctgtaacttc

SEQ ID NO: 871349 - DNA, 99 bp, Homo sapiens
ctcatctacccctcgggccccagtgtgcctgtgcccgtcttctgtgacatgaccaccgagggcgggaagtggacgtagagatgaggtttcaccatgttg

SEQ ID NO: 871350 - DNA, 99 bp, Homo sapiens
aaagttctctcgatcagggcatacatctttcttcgacaaaggaggatctgaagaggcaaaatgcagtattacaagctgcacaagatgatttgggacacc

SEQ ID NO: 871351 - DNA, 98 bp, Homo sapiens
cgcgcccgctatcctggctccgtgctcccacgcgcttgtgcctggacggaccctcgccagtgctctgcgcaggcgtcctgcctctgcggctctgcccc

SEQ ID NO: 871352 - DNA, 99 bp, Homo sapiens
ccatcacttcaacactggcttcccggtacctgtagtctcagctactgaggaggctgagatgaaaggatcacttgagccccggaggtcgatgctgcagtc

SEQ ID NO: 871353 - DNA, 99 bp, Homo sapiens
gaacaaggattttggatgaagaagtttttgagactatgtcttcagcagtggtgcagttatatgcagcagatcggaactgtatgtggtcaaagaagtgca

SEQ ID NO: 871354 - DNA, 99 bp, Homo sapiens
tgttaattattttcgtccccagaggaaggcgctgtgttggggtggaagaggaggaggcgcccgacatcgacatataccactgcccaaactgtgagaaaa

SEQ ID NO: 871355 - DNA, 99 bp, Homo sapiens
gggtgacagagtgagactccatcagagtcatgtcttaataattcatcttttatcatctggaacccatctccaccattggccaggaagtttgggaggatc

SEQ ID NO: 871356 - DNA, 99 bp, Homo sapiens
tcacaaattacattacccaatggtggaatattgtatacctgacactgtcttcagccttttcttcaagtttttgaccgtggattgtgttgtgtcaaactg

SEQ ID NO: 871357 - DNA, 99 bp, Homo sapiens
gaggatcccccagatcaactggaatctgacagagtctgcactatggaaacaacctgtcaatccagctcaaggcacacatagcccagacacccatgagac

SEQ ID NO: 871358 - DNA, 98 bp, Homo sapiens
atccgctcccgccgagacatccgctccttgcccgagaacatccagtttgatgtttactacaaggataattctggcctcatagaacaagttgggaagtg

SEQ ID NO: 871359 - DNA, 99 bp, Homo sapiens
tgtacactggagaccacagttcatgccagcggctggaataaggtgttggctacgtttgtggttttaagaaagcctgagggcctgaaggcagcccctgga

SEQ ID NO: 871360 - DNA, 98 bp, Homo sapiens
agggcccagggttgttcacctgcccaaaaattgtgtcttgaggaggaggagaacggggctgaggaggaagaagaagaaactgccgaggatggagagga

SEQ ID NO: 871361 - DNA, 99 bp, Homo sapiens
ctcaggagatcagctttcattgccgcagtttctttacagctaagagttgtcttataagcatgtctgaagctttctcggaaatgttgccaacaaaaacag

SEQ ID NO: 871362 - DNA, 99 bp, Homo sapiens
tcactgcttgtcaggagggatttatttgcacatggggaaggcctggtaaagtggtgggctggatgacactttgcacacaattattgattatgcctgtga

SEQ ID NO: 871363 - DNA, 99 bp, Homo sapiens
caactccttcgtgggcacgcgctcctacatggctggccctcccaattctgaggactcagactgtgacagcactgaattggacaactccaacagcgttga

SEQ ID NO: 871364 - DNA, 98 bp, Homo sapiens
ttccatggaaaaatggaacagaaatttttgttagttgactgccagaaagtgatgtacggttcttacagaaaatatttacaccagcagctccagttcat

SEQ ID NO: 871365 - DNA, 99 bp, Homo sapiens
gttgctgcggccgtggtccgcgcccttcctcggcgggccggactgttgatttatgaagactctatggatctaatcgcaaagctaccttgtgttgcagca

SEQ ID NO: 871366 - DNA, 98 bp, Homo sapiens
ggagggcgctaagtccgtgagcggtggcagtcgcgaccgcgggtgcatccagtttctgcgcccaggcattttgttcccaacatcacctttggtcaccc

SEQ ID NO: 871367 - DNA, 99 bp, Homo sapiens
gcatttgagtgtgggacccatgccctgcatttcttcgctaccccacagcttctgctcatgtgggaatgtaagacggacttagatattgcatacaaattt

SEQ ID NO: 871368 - DNA, 99 bp, Homo sapiens
gataacattaatggatgttccagtatttaaagctattcaaccagatcctaaacccaccaagggacgaatgcgcatccactgcttagagaatgtggacaa

SEQ ID NO: 871369 - DNA, 98 bp, Homo sapiens
agagagaaagagtggatttcagcctgcacggatggtcttgaaacacaaatggtttttgatcgatctctttgggctgcctgacctccttgggtgcttgc

SEQ ID NO: 871370 - DNA, 99 bp, Homo sapiens
cagcaatggcagctggtccccagggccaggggagaggagcaacactcccaagatatgatgcttcctggtgtgtttagtggttggtgccattccaatttt

SEQ ID NO: 871371 - DNA, 98 bp, Homo sapiens
gaaggccgaggccaagatggcggtgctgtcagatggcccactgcgtgaccttggttcagctgtccatttcctgtgaccatctcattgacaaggacatc

SEQ ID NO: 871372 - DNA, 99 bp, Homo sapiens
aaaccagtctcttcaccatttcccactaaaccattggagggccaagcagaaggtgacagtggtgaatgcaaaggtttatcaggtagaagatgtgtgtga

SEQ ID NO: 871373 - DNA, 99 bp, Homo sapiens
tctcgcactcagtcagagagccctgcactggaacatgatgctggaaaatgaccgtagcatggcttctttgggttgtggcagcactgcctgaaggtatga

SEQ ID NO: 871374 - DNA, 99 bp, Homo sapiens
gataactggaactatacacctctgcatgaagctgctattaaagggaagatcgatgtgtgcattgcaataagagctaactgccatcaagagccatcagta

SEQ ID NO: 871375 - DNA, 99 bp, Homo sapiens
agaggcaccgggatcgtgaccgagaccgtgaccgagagcgtgaccgagagcgcgaatatcgtcatcgttagaaggcttccatctgtatcacaagttgcc

SEQ ID NO: 871376 - DNA, 99 bp, Homo sapiens
ggagctgatggccgctgacaggggacgcagctgccgggccgcaagtacagccctgggtacaacaccgaggtgggagacaagtggatctggctgaagtga

SEQ ID NO: 871377 - DNA, 99 bp, Homo sapiens; identical to SEQ ID NO: 862224

SEQ ID NO: 871378 - DNA, 98 bp, Homo sapiens
tggcaggacgtgaaggggaagaggcccaccctggagtaaccctcactggagaatccagaggtcagacacattctatgtgaaaaacatggcaaaatcat

SEQ ID NO: 871379 - DNA, 99 bp, Homo sapiens
aggacctgtacagggatgtcatgctggagaactacaggaacctggtctcactggttttaacttctagtcatggcgaatgatcgcaggagagcacagact

SEQ ID NO: 871380 - DNA, 99 bp, Homo sapiens
ttttcagtcgcagacctctcggttcagatattcacggttccttcacttgtgctggaggcctggcagaagggtccaaatcctcctggaaccctgggccac

SEQ ID NO: 871381 - DNA, 99 bp, Homo sapiens
gatcctggagtagttcctacctcaaatgtgctcacgatgttgaatgatgctttaacacattctgcagttttaattcagttctgcaggctggaaatccaa

SEQ ID NO: 871382 - DNA, 99 bp, Homo sapiens
tcgtttgggcaaagtacttgttcaagtcaaaaccgctttccgggatgccgctgcaaagcacagtgcaacaccaagcagtgcccgtgctacctggctgtc

SEQ ID NO: 871383 - DNA, 99 bp, Homo sapiens
ttgtggagaatgatctgtacatagattttggtggaaagtttcattgtgtatgtagaagaccagaagtggatggagagcactactgcagtcttcagttaa

SEQ ID NO: 871384 - DNA, 99 bp, Homo sapiens
caaatcttgacacctttttaaccattttctcccagtgaattttgcccaccaagggacttctgtcatttgctatgacctgtaatcccagctacttgggag

SEQ ID NO: 871385 - DNA, 99 bp, Homo sapiens
accgctcaagagattctacatcagtttggtttcactcagaccggttctggctccttggcagcaatggctgtatttgaagataagtttaggccagacatg

SEQ ID NO: 871386 - DNA, 99 bp, Homo sapiens
ggctggcattggtacataaacatggacttaatggcattttggcagatgaaatggtttttgactaaaggccagaatgcattggtagagctacagacacaa

SEQ ID NO: 871387 - DNA, 99 bp, Homo sapiens
gagaggccttacaagtgcactgtgtgtggccagtcatttaccaccaatgggaacatgcacagacaaaagctgaccgtatgtcctatcatcaatggggaa

SEQ ID NO: 871388 - DNA, 98 bp, Homo sapiens
ttacagatggacctgtacgcgctgctaggcattgaggagaaggcagcggacaaagaggtagctcagtggcatttctgagcaggggccaccctgacttc

SEQ ID NO: 871389 - DNA, 98 bp, Homo sapiens
aatgtctttcctaccatctaaaatacgaaggtttctggctggaaacctctgtagaggagcaggatgcaaccgacaggctgtggccggacagctgctgc

SEQ ID NO: 871390 - DNA, 99 bp, Homo sapiens
aatggaagggaaacattcccagatcctcaaactatcgaagtgagattacgtactataggtgaacttttagctcctgcagctccttttgacaagaaatgt

SEQ ID NO: 871391 - DNA, 99 bp, Homo sapiens
cggggactggggggaccagtactctgccgagtgcggcggtgctatacttggtagatcagaaactcaggagtgtcttttctttaatgctaattgggaaaa

SEQ ID NO: 871392 - DNA, 99 bp, Homo sapiens
acaaggacctgtggaatatgagtgatgacaaaccctttctatgtactgcgcctggatgtggccagagcttacaagaccctatgaaaaaattagttgaga

SEQ ID NO: 871393 - DNA, 99 bp, Homo sapiens
aagaaggcaacgacgttccatctgtggaaggacctaccaaccaggggatgtatggcattgagaatgaagtcttcctgagccttccatgtatcctcaatg

SEQ ID NO: 871394 - DNA, 99 bp, Homo sapiens
gcagggggacggggaccagcagctgtcgccgccgctctcaggacaaaagatccttcatcaccgaagtgacgttttagaaacagtggtcctgatcaaccc

SEQ ID NO: 871395 - DNA, 99 bp, Homo sapiens
gtttttctgttttgcctgaatacatgatttaaacaagagatttccacagaagacgccatcgtagtagaagcagggagcggaagaagtctcgatccagga

SEQ ID NO: 871396 - DNA, 98 bp, Homo sapiens
ggacatgtctaacctcggaggccgtaggaacgggcctgtcgaagtgcgcctgacagggcaattcatgatgttaaagccacagatctgggattaggtaa

SEQ ID NO: 871397 - DNA, 99 bp, Homo sapiens
agattatcaagactgtagcaaaaccacttcattgtgcgcaggaccctcagacatatctgaagagatggattaagaatgctttggattaaggattgtgga

SEQ ID NO: 871398 - DNA, 98 bp, Homo sapiens
tctgtacctactgatggtgctgtaaccacctcacagattccagcttcggaacaagagaccctggagctcttgtccctggcaaagcgaaagcgcagtga

SEQ ID NO: 871399 - DNA, 99 bp, Homo sapiens
gcccgagtggattcatttttctacatattaggatataaccctgagacaagaaacttgaagggtcaaagtgcaaagggcagcttttgatttttggggcaa

SEQ ID NO: 871400 - DNA, 99 bp, Homo sapiens
gattctcaagtcttgccaagtccaaagattgatttggtggagaaattgtactttgaaagctgcccagtactgtaagattgatgttaaaggcatggtgtt

SEQ ID NO: 871401 - DNA, 99 bp, Homo sapiens
gtaaaatcagcaggatccctgagctggttttcctgcaacttgatggtcccatctattagtgttctctagaacctctaccttcttccgaagctccaagtt

SEQ ID NO: 871402 - DNA, 99 bp, Homo sapiens
ttttcggaagttgctgggttcgttttattcagcggcagtggtgctttcccgaatctcagaatgccgttgaagaaatatggagatcaacacaaaactgct

SEQ ID NO: 871403 - DNA, 99 bp, Homo sapiens
ttacaccaagatctgtgctgaccacaggaattggatctactagtgcaggaagctgttttaggttatgtgaaagagatgtttcctcatctctaaggctta

SEQ ID NO: 871404 - DNA, 99 bp, Homo sapiens
ggctttcagccttaccgccgacctttaaattttccactcagggtcctagaccagaaggagcacaggctggatggccgtgtcattgaccctaaaaaggcc

SEQ ID NO: 871405 - DNA, 99 bp, Homo sapiens
gaagaatctcttatgatgcctgcagtttttcatactgttgcttcaaggacacagcttgcattgcagaaaaagtcctacctggagcgaagcgttaaggaa

SEQ ID NO: 871406 - DNA, 99 bp, Homo sapiens
gcccaacctgggattcaaatgaaagtgaaaatgttagaagaactcgtgagccggattgatggtcccagtagggatggcacaatcagcgaggacaccatc

SEQ ID NO: 871407 - DNA, 98 bp, Homo sapiens
cctccagagcctgtgggaagtctccatggtgaagtataggctgaggctacctgtgaacagtacgcagtgaatgttgctcgcttctcatatgtgcggat

SEQ ID NO: 871408 - DNA, 99 bp, Homo sapiens
actgctgcaggcatttgtagctgaagttgcagaacaaatagttggtattgcagtgatcagaaatgaaatgccttttccctggaaggctcaggaatcagt

SEQ ID NO: 871409 - DNA, 99 bp, Homo sapiens
gagagcgcgaatatcgtcatcgttagaaggtacgaatttggtcaggctctcttcactggctgggctgctgcttctctctgccttctgggaggtgcccta

SEQ ID NO: 871410 - DNA, 99 bp, Homo sapiens
aaagctcggctccagaaattcattcacaaacctggcagcttaagagttggacagtggaggaccttcagaagaggctcttggccctggaccccatgatgg

SEQ ID NO: 871411 - DNA, 99 bp, Homo sapiens
tcaagatggaacaaagactgttgagtatgctccatgtagatcacgtgctgtccttattcccagcccagtcaagagctaccggggctggctagtcatggg

SEQ ID NO: 871412 - DNA, 99 bp, Homo sapiens
ggaagaagaggatgggctcgtccatgtcggcggccaccgcgcggaggccggtgtttgacgacaaggaggacggtgctggagaatctggtaaaagcacca

SEQ ID NO: 871413 - DNA, 98 bp, Homo sapiens
gcggatggccccaggtgtaagcgcagaaagcaggcgaacccgcggcgcaataacgtggttggatttcatcccttactggtctcaaccaaaatattcct

SEQ ID NO: 871414 - DNA, 98 bp, Homo sapiens
gctcaaggaaacctttccaacacagatgtccaagctgccaaagtcgtccttgtctactccactaccaaatgttgaagttcttcaagaatcagtccttt

SEQ ID NO: 871415 - DNA, 99 bp, Homo sapiens
aaagagtttggggtgttccaattcctgtgtttcatcataagaccaaggatgaatacttgatcaacagaatacagattctgttcatcttgctctgaaatt

SEQ ID NO: 871416 - DNA, 99 bp, Homo sapiens
accaaataaaatagccatctcacctttgaaatcgccaaataaggaaaatgtttataggaggccttagctgggacactacaaagaaagatctgaaggact

SEQ ID NO: 871417 - DNA, 99 bp, Homo sapiens
cttcgtacagcttcatcaggtccaggaggggcagctcagctggatgactttatagaagtaggcgtactgtcgagctgtgtttttatactggctgaagac

SEQ ID NO: 871418 - DNA, 129 bp, Homo sapiens
gatgtgttaacacccagcatgttccggtaggagactttctggatggggaagatttccaggaccaggcctcctcttcccacctgtccagcagcatgaaagcagcatgattggccgaccgcaggagaagcc

SEQ ID NO: 871419 - DNA, 99 bp, Homo sapiens
aaggatttcaacatgcctctgacaatctctagtgaaaatgtttataggaggccttagctgggacactacaaagaaagatctgaaggactacttttccaa

SEQ ID NO: 871420 - DNA, 99 bp, Homo sapiens
gcgacagagcgagactccgtcttctctgcagcatgaatgagggcggtggtcccgttcttctgccgaccgttcactttcgcgccttttgtgatgaggagt

SEQ ID NO: 871421 - DNA, 99 bp, Homo sapiens
agaccatcctggccaacgtgattatactgacctggccatgagcacggtgaagcagacccaagccattccatatactggtccctttaatttgctctgtta

SEQ ID NO: 871422 - DNA, 99 bp, Homo sapiens
acagctggttcttgaagctgctggtgtacaagggagaagaagccacattccaaatctcaggcctccagaccaacacagactacaggttccgcgtatgtg

SEQ ID NO: 871423 - DNA, 98 bp, Homo sapiens
gagggacctgctgtgccatcaacaaggggccaaaccagtgctcctgccacctctctggctgccccctagagcctgcccatcccagcctgaccaatgtc

SEQ ID NO: 871424 - DNA, 99 bp, Homo sapiens
cccggcggcggcggcggccgaacaatgaagctcctgaagccgacctgggtcaaccacaatgggctctggctgagaacatggccaatgacattgatgagc

SEQ ID NO: 871425 - DNA, 100 bp, Homo sapiens
gacagccccaggatgccgtgggccgcacctgaggttgtggcagcagttcctgccctttgacagtcctgagtggctgcggcccacggcatcctggggctgt

SEQ ID NO: 871426 - DNA, 99 bp, Homo sapiens
ggatgaacatgtgcttggtgtcgtttttccttgagctgaacgtcttgcaacagtggccgcacgcataggtatatttgcttacttaaactaccatgttcc

SEQ ID NO: 871427 - DNA, 99 bp, Homo sapiens
agcagagccgctgcagccatggccccaatcaagggtcaaagaaggctcttccaagaaacatgtagaagagaagagtgaagaaatttctcttcagcagct

SEQ ID NO: 871428 - DNA, 99 bp, Homo sapiens
ctccagcaaactccagcagaccttccaatgctcctcgggaagcagtttcacgaccaccagatccccatttaaggctctattacgagcaacaaccccatc

SEQ ID NO: 871429 - DNA, 99 bp, Homo sapiens
ggccatgaagagtcctgaccacaatggggaggacaacttcgcccgggacttcatgtgcacttgcaggaaagacatggtgaagatttcaatggatatctt

SEQ ID NO: 871430 - DNA, 98 bp, Homo sapiens
gccactatacgatggtggcagtcgcccagcagtgtggtctggagcccggcactgtggtcataacagagcaggcagtggatacctgcttcaaggcagag

SEQ ID NO: 871431 - DNA, 98 bp, Homo sapiens
ttctgccactgctgctccgtggagatcgtcccgcgcctgccgttaccggtattgtaagaacaagccgtacccaaagtctcgcttctgccgaggtgtcc

SEQ ID NO: 871432 - DNA, 99 bp, Homo sapiens
gagtccagcccaggaaaatggagaggtttactcctggcttgggggcattaggaagcactggaggctcttcgggaactaatggatctaacgccacaccta

SEQ ID NO: 871433 - DNA, 99 bp, Homo sapiens
agttcacttgcttgacctacaaggaatctgagggtgccctcaatgagcacatgaccagcttagcttctgtcctaaagggaactctaatgatccaggaca

SEQ ID NO: 871434 - DNA, 99 bp, Homo sapiens
ctcgcagtccctacagccctgtgctcagggttggattgagattgttggatgtgctgatcgttcctgttatgacctctcctgtcatgcacgagccaccaa

SEQ ID NO: 871435 - DNA, 98 bp, Homo sapiens
cctggctgagttccactgcccgaagtgtcggcacaacttccgggtccccagccccaccccagccccaaaggaggctgttcgagagggacgtcctccgg

SEQ ID NO: 871436 - DNA, 99 bp, Homo sapiens
gccacaccgcgagggagaggcggccggcggcgaccacgaaaccgagagcaccagcgacaaagactcgctgattcttgagaagagtcaaaactggagctc

SEQ ID NO: 871437 - DNA, 99 bp, Homo sapiens
caggctgaagtcaaggcaagcaatttttgcatttacgattctcttgggcatgcctttgggttctccaccaccgttagggctgaggtttgtccagaaaat

SEQ ID NO: 871438 - DNA, 98 bp, Homo sapiens
gctgggcagctacaaaatcaatggccggacgaaaaatcctcactatggatgggctcattgaggacattaagcatcggcggtattatgagaagccatgc

SEQ ID NO: 871439 - DNA, 99 bp, Homo sapiens
cagggcatccaaattccattaatttttactctttgaaacagtggggcaatgagctcaagaatcctatccatcttcttcaccgatatggtttgtggattc

SEQ ID NO: 871440 - DNA, 99 bp, Homo sapiens
atggctgtaactggagatgacacaggtgttaagggagagaccagatggaggtaattgaatcatggggcaatttcacccattctgttctcatgataatga

SEQ ID NO: 871441 - DNA, 98 bp, Homo sapiens
tttcttatatgtgatgccattccagcactggactcatggaggctgagcatttattcaggctctccccggaggctcagccccctctgctccccatgggc

SEQ ID NO: 871442 - DNA, 99 bp, Homo sapiens
ttacaattttttttcaagaactgccgtcttctttgcctgcactaatgatatgcctcttcatgttcgacgcagtagtgacccagctctaattggcctctc

SEQ ID NO: 871443 - DNA, 99 bp, Homo sapiens
agtcccttctgctaggacaacgagaattctagatcagaaggaggacggttgtgttgtggatatgcatcacttcaactctggagcacagtctgttcttgc

SEQ ID NO: 871444 - DNA, 98 bp, Homo sapiens
tcttctacctgacgctcgtcctcatcctggtcactagcggactcttcttcgccttcgaactctcagcgttctcatctctcttccttcaccatgaagct

SEQ ID NO: 871445 - DNA, 114 bp, Homo sapiens
gctgaagcccaggagagcgatggagacgtatgcggaggttgggaaggagggcaagctctttcgacgtgtagcagcagctttgccgggaatggaaagcacacaggacagaagcag

SEQ ID NO: 871446 - DNA, 99 bp, Homo sapiens
ccgaagagctgccgcgacgcccggcccgcagggcaggttttaaaacatgaatcctacactcatccttgctgccttttgcctgggaattgcctcagctac

SEQ ID NO: 871447 - DNA, 99 bp, Homo sapiens
gcagccacggccgggggcgtctttcagagcattacggtaaagggagaagatgaggaagagaacaatttggaagtacgtgaaaccaaaattaagggtaaa

SEQ ID NO: 871448 - DNA, 99 bp, Homo sapiens
ggaatattaccagtcagaggcggaaggactcctggaatgccacaaatgcaaatacttgtgcactgggagaggtgaaatgacaatggatgctctgttggc

SEQ ID NO: 871449 - DNA, 99 bp, Homo sapiens
agaaaaagagaagatgaagaaacccagcttgatatgttgtctgtaggtatattgttagagccatgcagtgaccgtggtgatagtgaagatggctgtctt

SEQ ID NO: 871450 - DNA, 98 bp, Homo sapiens
cctggaccaatgcatcttcccaccaccttaaaccactggggatgaacaatcaatacacccgtcgggaggtcttctgccggaacacctgccatgatctc

SEQ ID NO: 871451 - DNA, 99 bp, Homo sapiens
acaacaatcagatggcaccagggactggcagctccactgccgtcaactcctgttctcctcagagcctgcgtggatgcaactagagagacaaatcgccta

SEQ ID NO: 871452 - DNA, 99 bp, Homo sapiens
gctggtgggggccggccccggcctggtcctggccccggagctgttgctggacccctggcaggatctcacattcttgaaggtggcattgaagagcactaa

SEQ ID NO: 871453 - DNA, 99 bp, Homo sapiens
accaaggcaccgggtccctcgcccaggtccccttggacaaatggggtaaaatggtgcagaaggggacttacactgagttcctaaaatctggtatagatt

SEQ ID NO: 871454 - DNA, 99 bp, Homo sapiens
tgaagccttgcggcagtacagcccaggcagcactgagaagtgaaggaatatttgggaggatcagaagcttggtcctgattttgccatcaacaggaactt

SEQ ID NO: 871455 - DNA, 99 bp, Homo sapiens
cactggtggagacctgtcgcttcgtagcaagtaagaagagttcctgggtcaagtggtcaccttcataaaaccgaagacggggactgggagtggagtgac

SEQ ID NO: 871456 - DNA, 99 bp, Homo sapiens
aaactgaagttaatttttttttttttccaaacacaagcttatgttcctgaggaagaattgaaggcagcagaaatagatgaagagcacgtggaggatgac

SEQ ID NO: 871457 - DNA, 99 bp, Homo sapiens
cactcacaagtctctgaagccgtgcccgttcttcctggagggaaagtgccgctttaaggagaactgcagaaccactcacgaattcttgtttggtgccct

SEQ ID NO: 871458 - DNA, 99 bp, Homo sapiens
gtggggatgtgcaactgaatatccggtcaccgccaatcacaagttgctgttgttgatgctgcaggcaagaatctgacgagttctgtctcggcacccttc

SEQ ID NO: 871459 - DNA, 99 bp, Homo sapiens
ttccatccagtaacagaggcaggaggatcccttgatgccaagagttcgagaccagctggggcaacaaagaggttctgggggaagagaagctgaaggaga

SEQ ID NO: 871460 - DNA, 99 bp, Homo sapiens
gtgggcgtaggaccctccgagccagacaggaagcactacttgcagccatcagtgaaaaagatgcaaacattgccttgctggaattgtctgcctccaaaa

SEQ ID NO: 871461 - DNA, 99 bp, Homo sapiens
tcaactccataccttcaatgatgtgtgcaataatgaatcattagtatcggacacagaaacaaactatccaactctggccaatattgaaaggaagaagaa

SEQ ID NO: 871462 - DNA, 99 bp, Homo sapiens
gtggacggcacggacgacagaagcgactttggtgagactctggagtatgacagtagttttccaaactgggaatttgcccgaatgattaaagaatttcgg

SEQ ID NO: 871463 - DNA, 99 bp, Homo sapiens
tcctgatgacttcaagaatgtttttgaccagaaaaccgacaaccttcccagaaagtccaagctcgtgtcccacagaacaacgagaagcttcaggagagc

SEQ ID NO: 871464 - DNA, 99 bp, Homo sapiens
gctcggtcacgaggtggaagaggtagaggacgatactctgaccgttttagtagtcgcagacctcgaaatgatagacggctcgactacctgtgaagtgga

SEQ ID NO: 871465 - DNA, 99 bp, Homo sapiens
caagagatactgtctgcgacatgtggaaaatgacggttataagaccatttatttctttggagacaaaactatgccagatctaagcctttcccacgttat

SEQ ID NO: 871466 - DNA, 99 bp, Homo sapiens
ttgaaccggttcttgggggactatgtggtggacttggacacgtcccagctctctctgggcatctggaaaggtatcttgagaattacaaatgctatagaa

SEQ ID NO: 871467 - DNA, 99 bp, Homo sapiens
actcgatccgcctgcctgcgcacctgcgtttgccagaacccaataaagatgccatcttccaaggcctgacgcaggaccaggggttttatacatccaaag

SEQ ID NO: 871468 - DNA, 99 bp, Homo sapiens
gcagttctggaccagaatacctcaaacgtctaccattacagtgccgtgttgaaatccttgtctcctgtagacccagtggaacccataagtaattcagaa

SEQ ID NO: 871469 - DNA, 99 bp, Homo sapiens
accctcaacagaatggggaaggggagcctgtcacattatttgaggtggtgaaactggggaaaagtgcaatgcagtgctgaagctgctgaaagatggcag

SEQ ID NO: 871470 - DNA, 99 bp, Homo sapiens
gctggagaggacgcgaggagccatgaggcgccagcctgcgaaggtggcggcgctgctgctcgggctgctcttggaggggctgttaccctttgctgtggt

SEQ ID NO: 871471 - DNA, 98 bp, Homo sapiens
accaacactggctactgccaagccgccatatgtttgtgatatcacagtccccgatgcctatctgatcacaactgacaatggcgatgaccactcagaag

SEQ ID NO: 871472 - DNA, 99 bp, Homo sapiens
caaccatttgctgtctttggcattaactctagctcctctacagcctggctctgaggattcttgagagagtgcatggtcttgagtacttcctaaggggtc

SEQ ID NO: 871473 - DNA, 99 bp, Homo sapiens
cagagattcaaatggagcgattttagtttatgacataacagatgaagattcttttcagaaggctggagtgcagcggcgcgatctcggctcactgcaagc

SEQ ID NO: 871474 - DNA, 75 bp, Homo sapiens
atatgggggttctggagagcggggtgtgggaacccttaggagaaatcttgagagtggacagcaattgtgaagatc

SEQ ID NO: 871475 - DNA, 99 bp, Homo sapiens
gagaaggttcagttggcaaaccagatatatgacttggtttctggcatttgaagtcaaagagtattcagcgttggatgaattacaaaaggaatttgaaac

SEQ ID NO: 871476 - DNA, 99 bp, Homo sapiens
ccctgtcatcttctaaacagagcagcagcagcagagatgataacatgtttcagattgctgctctctgaacactatagtcgtcgaatctcacaagcgtac

SEQ ID NO: 871477 - DNA, 99 bp, Homo sapiens
gcctcccaagtagctgggattacagaattcactgtctgtagcatctgctcctccacagagggaccctggaatggcgatggcactcccgatgcctggacc

SEQ ID NO: 871478 - DNA, 98 bp, Homo sapiens
cttgctgtcctcctggagtgcctcgagagccccggctccagccccacgatgatgaggagtctgatgaggaagctgtgaagaaaaccaacaaatgtgta

SEQ ID NO: 871479 - DNA, 99 bp, Homo sapiens
ggaagagtttggtccaattgaatcaattaatgaagagagaagggcacagttacctaagtatcaacgtaatcttcctcggccaggacaggcccccatcgg

SEQ ID NO: 871480 - DNA, 99 bp, Homo sapiens
tacttgatagcatataaagattcccaacttattgtttcatcagctaaaccaagtacgatgcaaaccagcaagccaggaagcacctcctccccgtcacca

SEQ ID NO: 871481 - DNA, 98 bp, Homo sapiens
ggagctgtcggtgcagcaggagacggaggaccagaactacggcatagagaagaagaaggaggttcctgctgtgccagaaacccttaagaaaaagcgaa

SEQ ID NO: 871482 - DNA, 99 bp, Homo sapiens
tagaaaatgtaaaggccaagatccaggataaggaaggtctagtgacggagcccgcgcgcggcgccaccatgcggcagaaggcggtatcgcttttcttgt

SEQ ID NO: 871483 - DNA, 99 bp, Homo sapiens
tgtctacagtggttcagaccgacatgctgtacagattgtggtggtctgggtgggcaccaacaaccacggacacacagcagagcaggtgactggtggcat

SEQ ID NO: 871484 - DNA, 99 bp, Homo sapiens
gggatcctctgctgcatagtttcggtcatctaaaggaggttttaaacagtataacagaataccgtgactgatctaaccgttcatcgggcaactcccgaa

SEQ ID NO: 871485 - DNA, 99 bp, Homo sapiens
gctccctgcagtaccctttaacggttttgattcccaccatggccatcacccagtttcggttatttaaattttgtacctgcctagcaacagtattctcat

SEQ ID NO: 871486 - DNA, 99 bp, Homo sapiens
ccgtctgcgcgagtccacgcagctccccagacccaacatgagtgaagtttcctgcaagaaacgggacgactatttggaatggccagagtattttatggc

SEQ ID NO: 871487 - DNA, 99 bp, Homo sapiens
acagacaagacacttttcagaaagacaggccagcgttaatgactgccattgatggaagacatgatgtttgtatccgtgtagaatcaaagctgatagaga

SEQ ID NO: 871488 - DNA, 99 bp, Homo sapiens
atggccgtgtgctccctgcctctcacggaaggtgctggggatacatcagaggtgatggatactcaggcgggctccgtggatgaagagaatggccgacag

SEQ ID NO: 871489 - DNA, 98 bp, Homo sapiens
tctaaccccggaggccggaggaacgggcccgtcaagctgcgcctgacaggtgctggctgccagctgctgcgccccccatgtagaaggtgcacctcctg

SEQ ID NO: 871490 - DNA, 98 bp, Homo sapiens
gctcaagtaccagcagcaccaggagtccctctccgcccagttacaaggtgctgtacttctttgcagtatacaaggactagcagttaatattgacccaa

SEQ ID NO: 871491 - DNA, 99 bp, Homo sapiens
ctctaacctgagagcctgtggaacctgcccgtctcccctcctccatcagacacacctgcctaggaaacaggtcagtaacagatccaagagatggaaaga

SEQ ID NO: 871492 - DNA, 99 bp, Homo sapiens
atccgtcacagcaccatcagtcagcagcaacagcatgaagtattgcttgctgtcaatgaaggtgatgccatcctggtgtccagccagtgcacccacagg

SEQ ID NO: 871493 - DNA, 99 bp, Homo sapiens
gtcatcccacctgagaaccatgctcaccgaccctgacaggaagatgtcacccaagcgcatagctaaaagaaggtcccccccagcagatgccatccccaa

SEQ ID NO: 871494 - DNA, 99 bp, Homo sapiens
cttgggtataaagttccaaaatgtgtactcggtagtccagggcaggagcctgtgggacctcctctgcatatacttcattgtagctttcatccggatagt

SEQ ID NO: 871495 - DNA, 99 bp, Homo sapiens
atgccagtggccttggattagaaattaccactcaggagtcattctcatttgacgatttatctgtggacttcacccaaaaggagtggcagctactggatc

SEQ ID NO: 871496 - DNA, 99 bp, Homo sapiens
gtctgaagcactctccaggggttgctcccgggaaggccggtagaagtcatcctctgagatccagctcttgtttttctgtagtctcagctactgaggagg

SEQ ID NO: 871497 - DNA, 99 bp, Homo sapiens
ctctcatcaaaacaccagagcgactttcattagaaggagagcgacagcccaagtcaccagcaataagagctaactgccatcaagagccatcagtatgtc

SEQ ID NO: 871498 - DNA, 99 bp, Homo sapiens
tacaatttgatcgctgggaattctccaccttaaagaaggtaaaaccagtaatccatagcaggatcaacgtgtcagctcgctttagaaaaccgcttcagg

SEQ ID NO: 871499 - DNA, 99 bp, Homo sapiens
tattcctggaagcagagtaaataaagctcatggcccaccagctagaaagtccctcctcctatgtctccatcctccaaatctgtgagcactccaagtgaa

SEQ ID NO: 871500 - DNA, 99 bp, Homo sapiens
ccaactccttcgtgggcacgcgctcctacatggctgatcccgccttctaagctttgtggtccattccgggggcagtcgtccatctgggcccagatccct

SEQ ID NO: 871501 - DNA, 99 bp, Homo sapiens
gcaggccagcctgcagtgacagtgagacatggctttgacttgcttacagagatgaaaacaaccagcctatctcagggaactccaaattcagctaatacc

SEQ ID NO: 871502 - DNA, 99 bp, Homo sapiens
ttcaggggaaatttcataccataattgagttcccacttgaaagaaacagcataccaattgtgacagagcagcccctcatctctgctggagaaaacagag

SEQ ID NO: 871503 - DNA, 99 bp, Homo sapiens
cggagtcatattatcgacgtagttaaagcccactagcctaaagccgggcggactgcggatccctctgtgacccagctgaccaacgccccgcagggcggc

SEQ ID NO: 871504 - DNA, 99 bp, Homo sapiens
ggagagctgagccgagacctgttgcggagactgctgtacctgcacctggactggagccaggcctggcaagcacagccacaaagatggtaaagcccaggg

SEQ ID NO: 871505 - DNA, 99 bp, Homo sapiens
gaaaggtgtgctgtgcctgaggccagtcttgctggtggatgccctccttactccccaatatatacgtcttggatagactgttggtgcatgctacaaaaa

SEQ ID NO: 871506 - DNA, 99 bp, Homo sapiens
gtacatgaagaatcttctcaaagtgggagggatccttgtcatgccactggaagagaaggtactgcagcccctggagggcgacctctgctatgcagacct

SEQ ID NO: 871507 - DNA, 98 bp, Homo sapiens
gataaactgaaccctaaaacaattaatccggaaactggccaagaagcggaaagagaccatgagcagcacccgacaggagatgactgtgatggtgaact

SEQ ID NO: 871508 - DNA, 99 bp, Homo sapiens
agacttcaaagttatggcaagagatgagttaattctaagtactatactggcaattgctggagaagattttgcaattgttgcttctgatactcgattgag

SEQ ID NO: 871509 - DNA, 99 bp, Homo sapiens
gcaaattcaggtttgtagtcatattcaacaattctcatttgggctattcttttcagctgttcattcgtgtcaacatgagcttttgaagtctttcttttt

SEQ ID NO: 871510 - DNA, 99 bp, Homo sapiens
ggctctttctgctgggcctgcccttcaccctctacatgcggatctgaaaagaacaattgctgtccttctggatgacattttgcaacgattggtgaagct

SEQ ID NO: 871511 - DNA, 98 bp, Homo sapiens
tctgccaactcctctggaccctcgcggccgtgggcagcggctgccgcgcctgtctgcccgagggagttcgttcccacatgcagggcagcacaaggaga

SEQ ID NO: 871512 - DNA, 99 bp, Homo sapiens
gcagtggcgcttgagttggtcgggggcagcggcagagttcacccagggcatgatcttacctacaatgaatggagagtcagtagacccagtggggcagcc

SEQ ID NO: 871513 - DNA, 99 bp, Homo sapiens
gcctcccaagtagctgggattacagaagaagctgtgaataaggtgaaaattcaggccatgtcagaagtacagaaggccgtcgctgaggcagagcagaaa

SEQ ID NO: 871514 - DNA, 98 bp, Homo sapiens
aatccctctgccagtacagtttcaattcacagcgttttgctgagctcctttctacgaagttcaagtatagatttgctgctgcttccaggagaagtgga

SEQ ID NO: 871515 - DNA, 98 bp, Homo sapiens
ttgaagttcaagagctcagaccctaaaagctacagagacttctgaagtggagagtctgcgacctcctcggttcttcaatgaagatggagttatcagac

SEQ ID NO: 871516 - DNA, 99 bp, Homo sapiens
acacatttattgggaatgaaccattgacaccagaagtgagagcaggctatttggtgcctaagtgtctagagagctgagtgggttgcctcggatcggcca

SEQ ID NO: 871517 - DNA, 98 bp, Homo sapiens
tcagacgctggcgggcgcagtttctcacgacgggccgagcctgccactaacagctttgctgagccatcaaggtctaatggaagcatggttcggcattc

SEQ ID NO: 871518 - DNA, 99 bp, Homo sapiens
agcctgggtgacaaagtgagaccctggtctaaatcatgttggctcactatagccagcccacttctaaaatctagattggtttctgaggcgaaggaatct

SEQ ID NO: 871519 - DNA, 98 bp, Homo sapiens
cgctcaccaggagccccttgccaggagtgttcaagatgctctctctggaccgatcccactgtgtggaatatcaaacaaatgattaagttgacacagga

SEQ ID NO: 871520 - DNA, 99 bp, Homo sapiens
gataatgtccaccccgagccgattcaagaaggacaaagagatcatagccgagtatgaaagtcaagtcaaagctggatcatgaatctaattgggcgattt

SEQ ID NO: 871521 - DNA, 99 bp, Homo sapiens
tttcccattttgctcagcgactgtttgatgacgtcccgcagatggatcctgagcttgaaaaaaaactgaaagagaataaaatatctttagagtcggaat

SEQ ID NO: 871522 - DNA, 99 bp, Homo sapiens
tgctggacccaaggacatggtggtcgggctgcttctgatgcttggaagatatcctctcagccacaaagatggtaataaatctttgcctcccacagttca

SEQ ID NO: 871523 - DNA, 99 bp, Homo sapiens
tcatagtctcgtactgcttcttcatactgttctgtgtccatgtaacttttgttccatcccgcacaggtgagccgtctgggcaggctttggccagcttcg

SEQ ID NO: 871524 - DNA, 99 bp, Homo sapiens
aactagcggcgggtcgtgggcacctccagcattgcagtgtcgagatggctatgaaccctgtgtaaatgaaggaatgtgtgttacctaccacaatggcac

SEQ ID NO: 871525 - DNA, 99 bp, Homo sapiens
tcagccctccgttaagatcctggttccatgccgcagtaggacagcaggcccaagtctgcacatcccaggagtacttgattcttcagaaaacctccaaag

SEQ ID NO: 871526 - DNA, 99 bp, Homo sapiens
aacttcagggtttccaccgttcgttcaagggccgttgctccagggagaactgcaaatatcttcatccacccccacatttaaaaacgcagttggagataa

SEQ ID NO: 871527 - DNA, 98 bp, Homo sapiens
gatggcctcccaccattccaagcggagaggccgggcgtcttctgagagtcaggggatcatggaagctgataaagatgacacacaacaaattcttaagg

SEQ ID NO: 871528 - DNA, 98 bp, Homo sapiens
gatccccaagtagggggagtcgggggagatgtccaggtgctgagcgccgtcctcaaggatctctaccacctgctgaagcacgtagtgtgtctggagcc

SEQ ID NO: 871529 - DNA, 99 bp, Homo sapiens
cgcttcggactgcgcaacgctgcgctctgggctgacaggtactccgtggaaggcttcatcgacaagaacagagatttcctcttccaggacttcaagcgg

SEQ ID NO: 871530 - DNA, 99 bp, Homo sapiens
cccgaggacgcggaggtggaggtagagccgtgcaagtttgccggccccagggcccaggagctgccactccgaaaccagtcccagaacccgagaaacaga

SEQ ID NO: 871531 - DNA, 99 bp, Homo sapiens
tggccacctccccaggtgatgcctgaagctcaagggactgtgtccaccctcagatgtggacgagtgctcactagcagaaaaaacctgtgtgaggaaaaa

SEQ ID NO: 871532 - DNA, 99 bp, Homo sapiens
ttgagggacagattcctctggaggtcctagtggcccaggcacccctgaaaccaaaaacacctcggggtaccaagacaccgatcaacagaaaccagctgt

SEQ ID NO: 871533 - DNA, 98 bp, Homo sapiens
gaacaaacagagactgcgaaacgatcctctcaatcaaaataaggttttgggtcctgctcctcggtggtgttccttcttagacaacttgaccgaagaat

SEQ ID NO: 871534 - DNA, 99 bp, Homo sapiens
ggcattttggctcggtcatcaagcgctggagggcgatgtgggccaaccacctgttcaatctccttgtagactctctcttaagctggcccacaaccatgc

SEQ ID NO: 871535 - DNA, 99 bp, Homo sapiens
aattttccttgacctttaggtgcttttatattcatctcaaaaacaaaattctgaactcaggacttggcaaaccctacagcttggggcctgggctcctct

SEQ ID NO: 871536 - DNA, 99 bp, Homo sapiens
cgtcaattggcagaaaacaaccttgaggaaccttgacgagtgtccggagtttagaaaacttagggatgggctgatcagctgaccgaagaacagattgct

SEQ ID NO: 871537 - DNA, 100 bp, Homo sapiens
atcagatgtcaaagacttagcttttaaattaaaaatctttcaaacactcaatggtgaatagcttcctttttaatttaaaagctaagtctttgacatctga

SEQ ID NO: 871538 - DNA, 99 bp, Homo sapiens
cgttcagtttgctctctcctttttaattgcgggtgatgacagcactatagtgcaggtgttggaagtgaaaggcagcctgcttctgcaaagtggtacgat

SEQ ID NO: 871539 - DNA, 99 bp, Homo sapiens
ttaatctcagggaactggatgtcagcaagaatgagtgggaataaggtgtcaatcactactaccccatttgaaaacacatcaatcaaaactggaccagcc

SEQ ID NO: 871540 - DNA, 99 bp, Homo sapiens
atccagcagggggtgctagtaacatcctggcggtggtattctgctccccagccctggagtccggtggccacagcttctacagtttgccattcccacgta

SEQ ID NO: 871541 - DNA, 99 bp, Homo sapiens
gctgtcatcacaaaagagttgattgaaattatctctggtgctgcagctctgtaatttcatctgtgccaaagcctccagaggacaagccagaagatgtac

SEQ ID NO: 871542 - DNA, 99 bp, Homo sapiens
tgaggacactgaaattcagagaggggaagtgatttgcctcagcttgtactctgtcccctttcctccaacccaacggcttactttcaaggaagtatttga

SEQ ID NO: 871543 - DNA, 98 bp, Homo sapiens
tcggagacggtccagacaggaacaagacccggacattccaggccacagtcctgggaagtcagatgggattgaaaggcccgacaacaagctcaaatacg

SEQ ID NO: 871544 - DNA, 99 bp, Homo sapiens
taaagcgtttcctcgcttgcattcagctcctctgtgtttgccgcctggactatatcatcatgtacatagaaaaatccaaaggattctgcaaaaaagcta

SEQ ID NO: 871545 - DNA, 99 bp, Homo sapiens
ctgaaaagctggcccgtgacctgaaggctgtcaagtatgtggagtgttctgcacttacacagctggttatattctgggcactaaatgaaggcgtttcta

SEQ ID NO: 871546 - DNA, 99 bp, Homo sapiens
ctcgaagcctggatgaaatagatctctcggctctgagggaaaaactggtctacttcctggattgttctttctagtcgaagaattgaattttacaaagaa

SEQ ID NO: 871547 - DNA, 99 bp, Homo sapiens
atggagaagaagggctatcttgaaatgagtgttgaatgcaaactagcactcttaaagcatctgacagatacgtctcatggtgtaagaaataagtgcctg

SEQ ID NO: 871548 - DNA, 99 bp, Homo sapiens
cgtgttcttcgacattgccgtcgacggcgagcccttgggccgcgtctcctttgaggttgcccccaagtttcctggcagtgtgtgatactgaggaggtga

SEQ ID NO: 871549 - DNA, 98 bp, Homo sapiens
ccagatcgacacagacaacaatggagagggtgacgcctgctccgtggacattgatggggacgggaccgtttggagggagccattcacctacaggagca

SEQ ID NO: 871550 - DNA, 99 bp, Homo sapiens
caaagttttgatcaggatgagagtgggaaccggacttcagtggatcttcggatacgaagaacccaggtgtttctagctgtgtacagggactgattggct

SEQ ID NO: 871551 - DNA, 99 bp, Homo sapiens
cagctactatttggacatgcacagcctcccccatgtcatcaacccagtggagtcccggctgggctcaaggatgtccaatcaatggatgagctgaaagat

SEQ ID NO: 871552 - DNA, 126 bp, Homo sapiens
gcggcggcggtggcatctgcggccatggcggcgactactgccaaccccgtccatttgggaacaggagcgagtgcccctttggatcaagccatacaagattcttgtgatttcggctgatagtggcat

SEQ ID NO: 871553 - DNA, 99 bp, Homo sapiens
atttgatcccagtggatagagccattgaagacaccagacctgctggctgccgggccgcaagtacagccctgggtacaacaccgaggtgggagacaagtg

SEQ ID NO: 871554 - DNA, 99 bp, Homo sapiens
caacagatgtatgctcatcagtattatatgcagtagattctcagcaagttacagaagtatctttgacaactcttgtgaactttgtggacattacccaga

SEQ ID NO: 871555 - DNA, 99 bp, Homo sapiens
cactgtggctcttcacatgatggaactgtttgacacaactgtagagcagctgtatagcatcttcactgtaaaggagactgtgcagcagcgtggcgctgc

SEQ ID NO: 871556 - DNA, 99 bp, Homo sapiens
ggagcaaggaaaggaaccatgggcactgcagggtgagaggccacgtcagagctgcccagatctgtgtcttgtaaagagcatattgctgggcttacatcc

SEQ ID NO: 871557 - DNA, 99 bp, Homo sapiens
ccaaaagagcaaagaacagcatcaagtgacagaggtggaagagaaagaactgctaaatctgaagccaccagtgtccaacagaaggtcaatttctctgaa

SEQ ID NO: 871558 - DNA, 99 bp, Homo sapiens
atcaatagattgcctacccccattgcaggactggatcttgacatgcactatgaacccacagacactgctgctatggctcgaacatctaatctgaatgag

SEQ ID NO: 871559 - DNA, 99 bp, Homo sapiens
tgcagaaccagatccgggagcacgtcatctccatcgaggaaaaatggctacaaacttcctagcacatgagaagatctggttcgacaagttcaaatatga

SEQ ID NO: 871560 - DNA, 99 bp, Homo sapiens
aaattcatctggaactcagagaagaaggagtttctgggcaggaccggtggcagttggtgacagaattctgcccaacctgtcctgtatgtttgccttact

SEQ ID NO: 871561 - DNA, 99 bp, Homo sapiens
caggatcacagccttctctaaagaagtattcctctccaaagagctgcaggccttcaacagccttattagacgttccatcctcagagcagcctgaactgt

SEQ ID NO: 871562 - DNA, 99 bp, Homo sapiens
aactgcccagcgtgaccagtggccacctctgcagtgtcttccacaacctgggcttcctggagattcacgaacaagaataggattcatgacctttgatag

SEQ ID NO: 871563 - DNA, 99 bp, Homo sapiens
agcagcccctggcgccctcgggcctcacgctgaagtccgaggcccttcgcaactggcaagatagcaaaattactcagtgggaagacccaagactgcaga

SEQ ID NO: 871564 - DNA, 99 bp, Homo sapiens
ggaggagcctgttcccctgagagggagacgtggtgggcggtccttcctgtgacacgacccttgagtgacagttctatttgattgcctccggtactgtga

SEQ ID NO: 871565 - DNA, 99 bp, Homo sapiens
aacacttcaccctctcgcctcgggtctcgggggccgctctgggatcccggccaccagcaattgtccgtttcattcattggctcccatgtactatcgagg

SEQ ID NO: 871566 - DNA, 100 bp, Homo sapiens
gtgggtctggagtaaacaacagaagaactgagctatttttgaaaggtggtcatgttctttcaaaaatagctcagttcttctgttgtttactccagaccca

SEQ ID NO: 871567 - DNA, 98 bp, Homo sapiens
aagagcagctgctacttcatcctgcagcggcgccgcgggcacggcgaggggggcggccgcctcaccgggtcgacatgttaaaacgggtcagttggcag

SEQ ID NO: 871568 - DNA, 99 bp, Homo sapiens
caagacaagctgaacattggctaccacggcatggctagggcttgtggacaggtgctttgccttagcgcgttcctcctcgctacatatcctctcccgaag

SEQ ID NO: 871569 - DNA, 98 bp, Homo sapiens
atccagcacctcaccgaaaagagcctgtacaaccagcgcctgcgcctacagaacgagcatcgagcttccttcaaaatgtctactgttcacgaaatcct

SEQ ID NO: 871570 - DNA, 99 bp, Homo sapiens
gtatgtcccagaaacctgtggctgcttcaaccattgacagttttgctgctgctggtaaaaggaccagccctatcaagaaagaggaagaaggaagtggat

SEQ ID NO: 871571 - DNA, 99 bp, Homo sapiens
ccaaagggctgctttatggcgaatgtggctgataagtctagattcaccaatgtcaaacagtttattgcaccaggaactttccgctgtactttttgccat

SEQ ID NO: 871572 - DNA, 99 bp, Homo sapiens
ttggaagttatgacaccatggatctcttcaggcacactacagaactaaatatgcatacacatcttccagagctagatacactttcatcagaaagagcca

SEQ ID NO: 871573 - DNA, 99 bp, Homo sapiens
gcaatattgtcttcttcgctttagacaactcgccaagaatattgggaatgcaggctttaatgagatcatggaatgttgcctaccagctgaggactcagt

SEQ ID NO: 871574 - DNA, 99 bp, Homo sapiens
gcgtccgccgattcctcctccttggtcgccgcgtccttggctggcgtgatggcccaatggaatcagctacagcagcttgacacacggtacctggagcag

SEQ ID NO: 871575 - DNA, 99 bp, Homo sapiens
ctggattggtgaaactgaatcacaggagatatttccaggggtcttgttcctcgccttctaggtgacatcctttctttgtggctgtgtaactcactggcc

SEQ ID NO: 871576 - DNA, 99 bp, Homo sapiens
gcaaatgcaactagccaatgccatgatgcctggtgccccattacaacccgtgatgccgctcctacgaggactgctgtggctccaggtgctgtgtgcggg

SEQ ID NO: 871577 - DNA, 99 bp, Homo sapiens
gctgccacctgcctttgacctttttgaagcctttgcaaaattgacttggagcaggtttgggagctggattccctggagtacctggaggcactggagtgt

SEQ ID NO: 871578 - DNA, 99 bp, Homo sapiens
taaagaaagtgcctacatgttgttttatcggaaatcccagttgcagagaccccctgaagaaaccgaaacttcattgccccttcaatgtgggaatccagc

SEQ ID NO: 871579 - DNA, 99 bp, Homo sapiens
catccggcaaaagagatgatctcaaaacaagcaggagactccagcagccatcgccagcagggcatcacaggtactccaaagattcaggtttactcacgt

SEQ ID NO: 871580 - DNA, 99 bp, Homo sapiens
gggagacaaagaagagcctgaaagagccaaatcttaccttctggaccatggtgaagcaaaaaatttattgccatatcttggaccccacaaaatgagaga

SEQ ID NO: 871581 - DNA, 99 bp, Homo sapiens
gaaactctgtttacgttattatcaacacaggaccagacacctagctgttgggcagaagagggtgcagaaaagaggtcacatcagcgttctgcgtcatgg

SEQ ID NO: 871582 - DNA, 98 bp, Homo sapiens
aagaagatgggcattaagacagttgccatccacagtgatgttgatgctagttcttcaacaggtgaaaagaatggaaaactgtggtctccagatgaaga

SEQ ID NO: 871583 - DNA, 98 bp, Homo sapiens
tccagtgtctccagtaccagttctaccagattggcggcagtaagcacacaatgaatgatcacctgcatgtcggcagccacgctcacggacagatccag

SEQ ID NO: 871584 - DNA, 98 bp, Homo sapiens
gatctactgagaccaaggatgaccaatgactcagaagggaaaatgggatttaaacacccaaagggacaggccttcagtatttggcatcacctttacat

SEQ ID NO: 871585 - DNA, 99 bp, Homo sapiens
gagaacctcaatattgcaattgatgtcatagatgcttaccaaaaacatcctgaatcagaatggccacattctcacccaatcttctcctgctatggctgt

SEQ ID NO: 871586 - DNA, 119 bp, Homo sapiens
cgagctggccaaacggaaggtgaagaagaaaaaaaggaagaagaagaccaaggggtctggcaagggggacgtcctgacacagctctccctgaggagcagccacattccagctcccagtg

SEQ ID NO: 871587 - DNA, 99 bp, Homo sapiens
gttattacagaggagcccatggcatcatagttgtgtatgatgtgacagatcagcagcagtgttgtactgctacttctataaacggacagccgtaagact

SEQ ID NO: 871588 - DNA, 98 bp, Homo sapiens
aaaagctggcccgtgacctgaaggctgtcaagtatgtggagtgttctgcacttacacagggaaatgatcttcattggttagcatgtgccttatatgtg

SEQ ID NO: 871589 - DNA, 98 bp, Homo sapiens
cctgttttgcaaaaaccatcagtgtttgggaatgattctgatgatgatgatgaggaaaattcccagatgtttcaaggtagaccttgcaagaatatgta

SEQ ID NO: 871590 - DNA, 99 bp, Homo sapiens
gcgaagtagaggatgccgaggagaaaacagcaggcacccaagcgggcggcaggaatactcccccagttgcaagaggcgcaggaccgtggaagacttcaa

SEQ ID NO: 871591 - DNA, 98 bp, Homo sapiens
agtagcttggatccttgtgggcatgatccataatcggtttcaagggtgccaagggcaacatgggtgagccgggagagcctggccagaagggaagacag

SEQ ID NO: 871592 - DNA, 98 bp, Homo sapiens
tttgacaagattttcaatcagaaaattgctaatcttccagtaccaacaattgcagcaatagatggactcgctttaggtggtggtcttgaactggcttt

SEQ ID NO: 871593 - DNA, 99 bp, Homo sapiens
ctgtctagatgcagaggacttggttcctattccagtgctcctccggtagcagggaggcgacagaagggacggaagaagtctatagtggctgtggagccc

SEQ ID NO: 871594 - DNA, 99 bp, Homo sapiens
ctgggtgacagaatgagaccctgaagctctgctgtgtatttgcactttgacagtttcctggttgtttaagtcgactgtttcagatatagagtctctatc

SEQ ID NO: 871595 - DNA, 99 bp, Homo sapiens
tgaagactgaagaaaacaagtcatttagcgctatggaagatgaccagaggactagacctgaagtttcaaaggttctccgtgctggagcaggtcagcgtc

SEQ ID NO: 871596 - DNA, 99 bp, Homo sapiens
atcagctattagtctagggaagccttgctccatggactggctattttcatcaaatgttgactcctcaataggagaaatggatccatcatcatccaaaaa

SEQ ID NO: 871597 - DNA, 99 bp, Homo sapiens
cataaacgaattcttggacacttgtcatctgtgtactgtgtaacttttgatcgaactggcagacggatatttactaaaatgcttggacagaagagatga

SEQ ID NO: 871598 - DNA, 98 bp, Homo sapiens
accagccagctcattgggaccattttcttctgtgtgggaatcactactttgctacagacaacgtttggatgcaggtgtttgacttcacctttagccca

SEQ ID NO: 871599 - DNA, 98 bp, Homo sapiens
aatcatcaatgaagcaagtaaggtactttgaactcaagtaaacaaaagggaagattttctcgttgatactggagactgcacaacaatggggccacgaa

SEQ ID NO: 871600 - DNA, 101 bp, Homo sapiens
cgggacagagcggtcggtgacagcctcaagggcttcagcaccgcgcccatggcagagccagaccgtatgtcggggagctgatctctgatgctgaggctgat

SEQ ID NO: 871601 - DNA, 99 bp, Homo sapiens
gactggaacacctgcggcttgctcagtacaccatagagcggtatttcaccttagtcaccagatcgcagcaggagacagatggagtctcactctgttgcc

SEQ ID NO: 871602 - DNA, 99 bp, Homo sapiens
gaacagatgcagaactttgacaaagttccaagaccaaagattaaattaagagaaggtaaagctggacaaaatctgctggaaatgatggcctgtgaccga

SEQ ID NO: 871603 - DNA, 99 bp, Homo sapiens
atcaagttttctggtggaagattcaacactctggaaagctttcttgaagtacagatgtcaaaaaacggcttatttctgacgctaaatggttcctgtgtt

SEQ ID NO: 871604 - DNA, 99 bp, Homo sapiens
agggacgcccatgtggcacctcgcatgttcaaagtagagttggctttgtgggacacagctgggcaggaagattatgatcgcctgaggcccctctcctac

SEQ ID NO: 871605 - DNA, 98 bp, Homo sapiens
gtggaatccagaactcagtgagtgcaaaccgcagtgacccagtcaccctggatgtcctctattggaccagaccctgaattcttctagctcctccaatc

SEQ ID NO: 871606 - DNA, 98 bp, Homo sapiens
agggacctgcccgcctgcggctgctccgggatctgcatttactgctcaaccacatctaatttgatgtcctctgcagatttaaaatgtgtgccttcttt

SEQ ID NO: 871607 - DNA, 99 bp, Homo sapiens
ttctggaagcgcagcaacagcaagctcccgggcagcggctatgtgactacgtttgtgacctcctcttagaagagtcaaatgttcagccagtatcaacac

SEQ ID NO: 871608 - DNA, 99 bp, Homo sapiens
ggtggcaggaggctgcgaggagccggcgcggtcgcagtctccacggcgcaggcccacggtagcgcagccgctctgaggatcagaacataatacctgaaa

SEQ ID NO: 871609 - DNA, 75 bp, Homo sapiens
ttggaccagacaggcgtgtctaactgaagaaatcaggggagaaacccctgcttggtggaagcctgatggaatatg

SEQ ID NO: 871610 - DNA, 99 bp, Homo sapiens
tctgcctggcaaccaccccgtctgagaagtgaggagcccctccgcccggcagctgccccgtctgagaatatcccagtcgacatcagtgacagtgatatg

SEQ ID NO: 871611 - DNA, 99 bp, Homo sapiens
tgaaactgctttctaaaacaccagaactcaacctgggcttccgagtggacctgccaatcaagtcggcccgctaccgtggccagtacaacacctatccca

SEQ ID NO: 871612 - DNA, 99 bp, Homo sapiens
gaaacttcaggaagatgcagttgagaatgatgattatgataaagctacatcaaatgggtctttggagggcctggataaccaggagggaggggtgtgcca

SEQ ID NO: 871613 - DNA, 98 bp, Homo sapiens
gaaagaggaggaaaacaaaagctgctacttatggaagatacaaaggatattctctaagccgctttcatcatgggagaaatagagcagaggccgacccc

SEQ ID NO: 871614 - DNA, 99 bp, Homo sapiens
gaacaggctttctgtgaatcaacagcatgaaatctctgggtgtctttttgcacaggccatcctcataaataatcctgttgtcccaggtactcaggaggc

SEQ ID NO: 871615 - DNA, 122 bp, Homo sapiens
cagaaccacctcctttgcggagagctgcaagccggtgcagcagccttcagcttttggcagcatgaaagttagcagtgttcctccaagaaaagctggttatattgaagacctggttttgatgc

SEQ ID NO: 871616 - DNA, 99 bp, Homo sapiens
tcaaccattccacggaacaccagtgcatgcaggaattcatggacaagaagctgccaggcataataggaagtcagcccaggaggttacagtgagctctcc

SEQ ID NO: 871617 - DNA, 99 bp, Homo sapiens
gggcaactttagcaggaccctttgcaccatcaaactttcctttcgacttatagtcagcaacatcctttttctcatcagtaaggtcaagggattcaagct

SEQ ID NO: 871618 - DNA, 99 bp, Homo sapiens
caatttttttatccaacaggaagccaatacaactgcctttggcctcatggcttccactcacatttacaaacataagtggggaggatttcatgatatgct

SEQ ID NO: 871619 - DNA, 98 bp, Homo sapiens
ggaaatcccagcagcccgtattcagcagactatcttgctaatcatggccggttaaatgagtctgaagccaggcgaaaattctggcaaatcctgtctgc

SEQ ID NO: 871620 - DNA, 99 bp, Homo sapiens
gtcacgtttccttttagtaccagtcctcaagccatccaacttgtctttggtagcgtaggcttctgcgatcacccgcagcctgtagggcgggacagctgt

SEQ ID NO: 871621 - DNA, 99 bp, Homo sapiens
acaaactccctgacagaatactgccaagtgaacagagtatctgtcaggcaagagctgctgtgatggtttatgatgatgccaataagaagtgggtgccag

SEQ ID NO: 871622 - DNA, 99 bp, Homo sapiens
gaagcattgcattgattgtcttatatttcaagttaaggtccaaaaaaactccagctgtgaaagcaacataaatggcagcaattccatttccgtgagggc

SEQ ID NO: 871623 - DNA, 99 bp, Homo sapiens
gcgggcctggtatgaaagtacttctcatggataaagagacggtcagacatggctgtgatgccacatgctggggtccgggacctggtgggtgccttcaga

SEQ ID NO: 871624 - DNA, 99 bp, Homo sapiens
tccagcggggcgatgagtgtgggcatggggcagccgccagcccaaacaggcgtgtcacaggaccgtcctccttctaatatttggaagaaaatagatcaa

SEQ ID NO: 871625 - DNA, 99 bp, Homo sapiens
ttccactggattgggaaagaccatggcagctgtcatagtctcagcccgcatggcccccgaggagatcatcatggacagacccttcctctttgtggtccg

SEQ ID NO: 871626 - DNA, 99 bp, Homo sapiens
gtttacccgcctggtttcattgcgaagtttttcatctgtgttctccactaggttggcaaggtcgtcaattatctctgaagtcatcgtcttccttttttt

SEQ ID NO: 871627 - DNA, 99 bp, Homo sapiens
actcagcttagaaggaagccaagacttaaagtttcctagatcccagcttgctgtttatatcactggaaaagaagttttcagcttcaaaatggtttctta

SEQ ID NO: 871628 - DNA, 99 bp, Homo sapiens
ctcaggtaaaggaagcaggggttttcatctttgttgttgtggtttctcttcaaaatcaccagatcctgactctttagtatcccacacttcagctccatc

SEQ ID NO: 871629 - DNA, 99 bp, Homo sapiens
gcttccggaggtcaagtcttcatcatcagtgtggagactcatgctgtagaggagcacgccaagatgtcccttgtgactgtccccttctaccagaagaga

SEQ ID NO: 871630 - DNA, 99 bp, Homo sapiens
ccatttaccgaagcctaggcattttacctcctctccgcacggcgcagtacaactccaaatggctcaatgcttcgcaaacctgggtatacttcatgtgac

SEQ ID NO: 871631 - DNA, 99 bp, Homo sapiens
atgtaatcagagcatacctcttaatacttaaaagcactgttgcaagaattcaattccgtcttcctgatggttcttcctttacaaatcagttcccttctg

SEQ ID NO: 871632 - DNA, 99 bp, Homo sapiens
ataaaatggattatcctgagatgggtttatgtataataattaataataagaattttcataaaagcactgaagctccaccatgaggcgaggtggatggag

SEQ ID NO: 871633 - DNA, 99 bp, Homo sapiens
ctggctgattttctccctgtgtagcattcacatcagactcaaaggctctagctccttgcggtctatgaggttcatctctgtgacaaagtaatagaagtg

SEQ ID NO: 871634 - DNA, 99 bp, Homo sapiens
ccttatctctgtgcttcgtgaagctaatcaagcaattaatcccaagttgcttcagttggtcgaagacagaggttcaggtgccttggaacactatgttaa

SEQ ID NO: 871635 - DNA, 99 bp, Homo sapiens
actactgtcaaaacccaatgtgaaggtgtttaagatagaagtgctaatgaatggaagaaaacattttgttgaaaagagatacagcgaatttcatgcttt

SEQ ID NO: 871636 - DNA, 98 bp, Homo sapiens
ctggttcacctccttccaggttctggctccttccagccatggctctcagagtccttctgttaacagactcagatgccactgcatcatcagataacagc

SEQ ID NO: 871637 - DNA, 99 bp, Homo sapiens
gagggctggccaacttctgctacagacgactcacatgctacaagtgaaaactgatgagaaactgaatgtgtctgatgagaatacagcaagttgcccttt

SEQ ID NO: 871638 - DNA, 99 bp, Homo sapiens
aagcgactctccatggtttctctcaggttctgagactctaggcaggctggcaggcaacaccttaggacggcaccgaaagcgaaggaagctcctgctcct

SEQ ID NO: 871639 - DNA, 99 bp, Homo sapiens
ataaggtcaagaagtgctatatctcggtcatgcttgtatgattctatccaatcatctaccaccgactggtaaaacttgaatttgaacccaagaatatga

SEQ ID NO: 871640 - DNA, 99 bp, Homo sapiens
ggcacgcatcaccatctcaaaggcagggatgagcttactacaggcagcgcagtttcccgttacaccaaagagccatttctaggcttccagtgggtcctg

SEQ ID NO: 871641 - DNA, 99 bp, Homo sapiens
caatgcccagactcaatttagtgagggggattttggcactcaaaaagaagctgcttgggccataagtaacttaacaattagtggaaggaaagatcaagt

SEQ ID NO: 871642 - DNA, 98 bp, Homo sapiens
gccaagctgtcatcacaaaagagttgattgaaattatctctggtgctgcagctctcctcaagtactacagccttccagcagccttcccagacccacag

SEQ ID NO: 871643 - DNA, 99 bp, Homo sapiens
ggtgacagagggagactccatctacggtaccttgggcggtaagttggatttcgatgaaccggtccctgaagttgtgctccctctgggactccatccttc

SEQ ID NO: 871644 - DNA, 99 bp, Homo sapiens
agctcctatggtcgcctgggtccctctgagccccggggcatctatgccagtgagaggcccaagtccctagacttaattcagtgcacaaatgagatgaat

SEQ ID NO: 871645 - DNA, 99 bp, Homo sapiens
ccaacaaggatgatatgaagacttccctgaagaaagttgtgaaggaggtgtgtccctggaatcctccaacctctgcatgccagacctgccccatctcct

SEQ ID NO: 871646 - DNA, 99 bp, Homo sapiens
tgatactgggcagaaaggcttgcctggccctcctggcccccctggctatggatcacagggaattaaaggttcacctttagatgttcttaaagatgaaag

SEQ ID NO: 871647 - DNA, 99 bp, Homo sapiens
ctccgtcgggctccgtgcggcgattacctaaaacctcgggcagaagaggagaggaggatagcagcagaagagaagaagaagcaggatgaactgaaacgg

SEQ ID NO: 871648 - DNA, 98 bp, Homo sapiens
gagcggaatttgacccggaggaagatgaaccaacgttagaagcagcctggcctcatctacagggtgagaaaattcatgaagacatctttgacatcata

SEQ ID NO: 871649 - DNA, 99 bp, Homo sapiens
aaaccccgcctcttacagtcacgagctttgctgtctgcatgccgacatgctgggctcactgggccccaaggaggccaagaaggccttcctggacttcta

SEQ ID NO: 871650 - DNA, 99 bp, Homo sapiens
aagacagagggttttcttttgaggagtacaaaccaccaggaacccgtaaacttcataacattcttggagtggaaacaggaggacctggtgggcgacgtg

SEQ ID NO: 871651 - DNA, 146 bp, Homo sapiens
cttctgcgatgatttcaacttgttctccatcttcatggcgatcataaccatgaggtgatcgccatgaagatggagaacaagttgaaatcatcgcagaaggataaagttcgtcagtttatgatcttcacacaatctagtgaaaaaac

SEQ ID NO: 871652 - DNA, 99 bp, Homo sapiens
gaacacagatgatgtcaacgccatcatcctggcccagaagaacatggagggacattgcttgggcctccagactctgtggttgatgtggggagtacagaa

SEQ ID NO: 871653 - DNA, 99 bp, Homo sapiens
gctggttggagattctccggggacccttccgtatctgcctaggcattttgctgtctcctcctaatacggtgccgctacctggctgttcagctgtctcct

SEQ ID NO: 871654 - DNA, 98 bp, Homo sapiens
gtgcagctcctaaacctgctggtgacacgactcagacagaaggtacggacattgctgcaggagaagaggttgccatcaagcttgaatgtgtcaaaacc

SEQ ID NO: 871655 - DNA, 99 bp, Homo sapiens
ctgttgcaatgcattttctcacaaaattgacttcatttacgacaatttctcctgttatagagaagaatgtctggtttccaaatctggccatctgggaaa

SEQ ID NO: 871656 - DNA, 99 bp, Homo sapiens
tgatgtacagcagagcttttttcttgctgaaacattaaagataattctggcctcatagaacaagttgggaagtgttccctcctcccctattttctgaaa

SEQ ID NO: 871657 - DNA, 100 bp, Homo sapiens
tgtttaagaacatgacgccgtcacccattctttggaaaggactggcactgctccaactaagtagaatcgcaggaagggtgacggcgtcatgttcttaaac

SEQ ID NO: 871658 - DNA, 99 bp, Homo sapiens
ggcatgagaaaccacggtgtcctgaaaagcttttcttagaagtgcaatttttattcatatggcatgacacaaacacacccaggggtttctcactgaaaa

SEQ ID NO: 871659 - DNA, 99 bp, Homo sapiens
gtgagtgaggtgctggctcacataggcacctgcctgaggaagatatttcctggcctctctccagtggtccgcaagcaggtggtgaacatcccgtccttc

SEQ ID NO: 871660 - DNA, 99 bp, Homo sapiens
cacaattatatcttcatccactccttctgttccgtcagcttctctgtcagcttgaagaccacctgtgtagtgccccccttgcatggtgccatggtgatt

SEQ ID NO: 871661 - DNA, 144 bp, Homo sapiens
cgacgccaactaccggaaggagaacctgtactgcgaggtgtgccccgaggaccggcccctcatcgtgcagtgggcatccccaccatcagatggtgcggggcagagggggactacaacgtcatggtgatggagctgctggggcca

SEQ ID NO: 871662 - DNA, 99 bp, Homo sapiens
gaaccagttggtggcctgggcagcctgctggaccctgccaagaagtcgcccatcgcagcagctcgtactatactggcaattgctggagaagattttgca

SEQ ID NO: 871663 - DNA, 99 bp, Homo sapiens
agcggagatgtgcatttcttataactgagatgctgcaggcgggccacacagaagaacgccgccgaggggtttcggaggtggatcctctctgtcagcagg

SEQ ID NO: 871664 - DNA, 98 bp, Homo sapiens
gggtcctcctagaaattccccccgaagaagactcccccacatctggctttaccgatttgttacaactcaagcaagggccagcagaaattctcttttga

SEQ ID NO: 871665 - DNA, 99 bp, Homo sapiens
tatcatgcccaaggacgaggacatcctccagctggaaagaccacagcaagattctttcattcgtctcctcctagcctgggggaccaggctcgaactgac

SEQ ID NO: 871666 - DNA, 99 bp, Homo sapiens
actgatgtttaaaatcattggaccatttagtaagaagaattccagtcttataaaatttgttcccgacaaggagttttctggttcagaccgtagacagag

SEQ ID NO: 871667 - DNA, 99 bp, Homo sapiens
agcttacatcttgcatcctcaagcgattgagaggatccagaatccagatctctggaatagctaccaggcaaagaaaaaaactatggatgccaagaatgg

SEQ ID NO: 871668 - DNA, 99 bp, Homo sapiens
gaaggggctggatccgtgggtcagagaacacaggaccagtttgccatcccaaggccgaagagtgatcagcagctggactgtgccttggacctaatgagg

SEQ ID NO: 871669 - DNA, 99 bp, Homo sapiens
gaagctgcagccgcacctggccaaggggcagcaggatgggtgtggaagcagtgatggcacttttggaggggaccccagataccccagcctgtgtagtga

SEQ ID NO: 871670 - DNA, 99 bp, Homo sapiens
catggcgaccggagcgaacgccacgccgttggatatggctcgtggacagcagaaaattcagtctcagcagaaaaatgccaaaaagcaagctggacaaaa

SEQ ID NO: 871671 - DNA, 99 bp, Homo sapiens
gagccagcggctgaggaggggccccagcagcccccgaaggccctatcaggacatggagtatgaaagacggagggatttgttcgtgttgaccgagattat

SEQ ID NO: 871672 - DNA, 130 bp, Homo sapiens
aagccgccatggcctaccacagcttcctggtggagcccatcagctgccacgcctggaacaaggaccgcacccgaagagctaaagatggctgaatttctagatgaccaggaaactcgactgtgtgacaact

SEQ ID NO: 871673 - DNA, 98 bp, Homo sapiens
aaaggataagcctcgacttagaagctaccgagttaccctaagaaaggaagaaatctttcctgttttctgctctgtatgctgcctttatattcggtggt

SEQ ID NO: 871674 - DNA, 98 bp, Homo sapiens
gtgacttcacttttgagtgcaactgccttccagttgtatcacggactgattcaccgagcccaaccgtactcaactcacatatttctaccccaaatgtg

SEQ ID NO: 871675 - DNA, 131 bp, Homo sapiens
gctgccgctatggatgatcgagaggatctggtgtaccaggcgaagctggccgagcaggctgagcgatacgacgcagtggccggtgtccagctgcctactttctgcccggatctctggctcctcatctctcc

SEQ ID NO: 871676 - DNA, 98 bp, Homo sapiens
tgcaaacttaatatattgaaggccctgggaattgtggtcatcctggcccggcagtatggctccgagggcaggttcactttcacttcccatacccctgg

SEQ ID NO: 871677 - DNA, 98 bp, Homo sapiens
gaggagctgaacaagaagttggccaacaagatcaataagatggagtggtggagccgcttggtgtccagtgaccctgagatcaacaccaagaagattaa

SEQ ID NO: 871678 - DNA, 99 bp, Homo sapiens
accaaccccatcggtacacgctcaggccaggtggaggtcaatatcacaggtaactacacctcccgggtctgggagtactcctccagcattcagaactct

SEQ ID NO: 871679 - DNA, 99 bp, Homo sapiens
tgcttggcggggccatccttcttcttcaactccagagtcatactcctcttcagaggattcttttgttggagcccccacttaactatcttgggctgtgac

SEQ ID NO: 871680 - DNA, 99 bp, Homo sapiens
gataccgtcaagctggccaagcacaaagagcttgctccctacgatgagaactggttctacacgcgagctggctggcggtaaggctggaaaggactccgg

SEQ ID NO: 871681 - DNA, 152 bp, Homo sapiens
acggagccaggggcccgagggcggggaccggcggcgctggaggagcgaggcagctgtactaggactgggaacgggtgttcctggctctatgccaaatgcatcctggactggaaacctcagagctataaagtggagtgacatggaagacagac

SEQ ID NO: 871682 - DNA, 99 bp, Homo sapiens
ctgcggccgggaggctatgagcgagtgcaccggctgccacaaggtcaactactgctccaccttctgccaacgcaaggttcaagtgattcttgtgcctca

SEQ ID NO: 871683 - DNA, 99 bp, Homo sapiens
gcccagatcagcagcacatttcttgccaacaatcattaagtgtccaagaagcaccttcgtgtcctactggctttccattcagctgtgcccatgactttg

SEQ ID NO: 871684 - DNA, 98 bp, Homo sapiens
gtcatcaggctggcccagaaggaggaggagatgaagctccagagtttcctattttggagaagcagaactggttgattcatcttcattatatccggaaa

SEQ ID NO: 871685 - DNA, 99 bp, Homo sapiens
tgggtgacagagcaagactccgtctgtgaaactagtcaatctttcccgtttataggatggttcttccaggtcttctgctattgattcacttgctgatac

SEQ ID NO: 871686 - DNA, 98 bp, Homo sapiens
cagagcccggcgtgagggggccgagatgtcatttgtcagagtgaaccgctgtggtccccgagttggtgtaagaaagacaccgaaagtaaagaagaaga

SEQ ID NO: 871687 - DNA, 98 bp, Homo sapiens
acgacctagtatttgaatttgctagtaacgtcatggaggatgaacgacagctcaaattgaaattattccatgcaagatctgtggagacaaatcatcag

SEQ ID NO: 871688 - DNA, 99 bp, Homo sapiens
gaacgaggggacatcgagcataagaagcggaaagctaaggaggcagccccagccccacccaccgagaggtacagaaacattctgtacacacccttgtgt

SEQ ID NO: 871689 - DNA, 99 bp, Homo sapiens
gaactttgttcacaccaacttgcgcaaaaacaacagacagccctatgctgtcagtgaattagcaggcaatgagaagcacgaccttcatgttacctccca

SEQ ID NO: 871690 - DNA, 99 bp, Homo sapiens
gcaactcctttacatcatacttggacatatcaagcattggtgcacgatgtactgattcttgtagacactgtttgggctctgtcatacttgacagatgga

SEQ ID NO: 871691 - DNA, 99 bp, Homo sapiens
cccgaagaagactcccccacatctggatgtgttcagagcaacattgttttgttgacacaagcatttagaagaaagtttgtgattcctgactttatgtct

SEQ ID NO: 871692 - DNA, 100 bp, Homo sapiens
tgcaaagggtacaccatcgtgtcctatgcagaactggatgaatcagggtcttcaagggattcatccagttctgcataggacacgatggtgtaccctttgc

SEQ ID NO: 871693 - DNA, 99 bp, Homo sapiens
catggcgtttttgcttgtgttttttggagcattttttgcagtgtggtgctacaggcatgaggatgacgttcaacacttcaaggtcatgcgagacaacaa

SEQ ID NO: 871694 - DNA, 99 bp, Homo sapiens
tcacatctatcgccacaattaccgcaaggatgaacaggaagcggtgcaggaggttcctagagttgttcagaatcctccaaaaccagtcatgaccactag

SEQ ID NO: 871695 - DNA, 99 bp, Homo sapiens
ggagcacatgcggagactccgaggtggaggaggagtccccaggaaagcgcctggacgcagtgggtaattccagaattgattggccataccattgtcact

SEQ ID NO: 871696 - DNA, 99 bp, Homo sapiens
ggtactgaccctgagagccttcgcagggcccctgagtccagccaaggcaacagatgccctttatgaggtgtttttgggaaacaggcttcgagcagctac

SEQ ID NO: 871697 - DNA, 99 bp, Homo sapiens
tggagtcttccatcaatcatatctcacaggcagacatctggtccctgggcataacagctattgaacttgcaagaggggaaccacctcattccgagctgc

SEQ ID NO: 871698 - DNA, 123 bp, Homo sapiens
aaaaatattaatgacagaagatctgcgaacatgatgcacgtgaataattttccctttagaaggcattcctggatatgggtatttgaagtataccatacaactgttttgaaaatccagcgtgga

SEQ ID NO: 871699 - DNA, 99 bp, Homo sapiens
ctgcccgaactcatggccgagaaggactcgctcgacccgtccttcactcacgccatgcagctgctgacggcaggtgactccccggacagctcaacacca

SEQ ID NO: 871700 - DNA, 99 bp, Homo sapiens
cctggactacctgcagaaccagcgcatcattcacaggtatcagaatggcaaagcaacttaaccttccagaaaatacagatgattggacaaaagaggatg

SEQ ID NO: 871701 - DNA, 98 bp, Homo sapiens
cgtttgttcaggaaccaccagtgacagaatttattgctaaacatgggtgcatttttggataaacccaaaactgaaaaacataatgctcatggtgctgg

SEQ ID NO: 871702 - DNA, 99 bp, Homo sapiens
ggcggcgttagccggcgtcttcgtttgggacgaggagaggatccaggaggaggagttgcagagggagaccaaattttgaggaaggtggaccaacatcag

SEQ ID NO: 871703 - DNA, 99 bp, Homo sapiens
tcatatcatgttgcctttcattactacgttcagatctgtgcagcattgctattggaaatacttaatagtagatgaaggacacaggattaagaatatgaa

SEQ ID NO: 871704 - DNA, 98 bp, Homo sapiens
gaaggggcacgggcacccccgcggtccccgggaggctagaggaattgaatgatctggcacgggaccctccagcacagtgttcagcaggtcctgttgga

SEQ ID NO: 871705 - DNA, 99 bp, Homo sapiens
agcacaacgatgatgaacagtatgcttgggagtcttctgctggaggttccttcactgtgcgtgctgaccatgatgaccctgatgatctgcaatgtaagc

SEQ ID NO: 871706 - DNA, 99 bp, Homo sapiens
tcaatgctgttaactggattgagtccagctcttgggatggatagccgtatatctggtggttatgaaaatgtcccaactgatgatatccacatgaagcaa

SEQ ID NO: 871707 - DNA, 98 bp, Homo sapiens
tgttgatgctgtaattgctgaacttaaaaagcagtctaaacctgtgaccacccctgaagaaattgcacagatcacaaaatttgtccaggatagacata

SEQ ID NO: 871708 - DNA, 99 bp, Homo sapiens
tgagtactgtcagcaaaagggaatttcctacaagcagtgtggcaaggctatggagttactagtagagaaagcaatcagcagtgcttctagccctcagag

SEQ ID NO: 871709 - DNA, 99 bp, Homo sapiens
acaatagggtatcatttttacgggccttctggagatgcttccgaactgtgggcaaaaatggcggaatgaatctgaagtctgctgcagtaaaacacagaa

SEQ ID NO: 871710 - DNA, 98 bp, Homo sapiens
tcaaagcactctgggtcaaaggtcaacattctaccactggaaaagatctggtagttgggtttgttgcagataaggagggttcctgcccccaggtgaac

SEQ ID NO: 871711 - DNA, 98 bp, Homo sapiens
gtgcgcgtgcgcctgggggcaccgctgccgttccgagaacgtgatgcctttgacaccttgttcgaccatgccccagacaagctgaatgtggtgaaaaa

SEQ ID NO: 871712 - DNA, 99 bp, Homo sapiens
ggacatggagtgttccttccgctagtgatcctttgcaccctgcttggagacggacttgcttccgatcctaaatgcccaggagatgttgattttcataat

SEQ ID NO: 871713 - DNA, 98 bp, Homo sapiens
attcctgctgctgccctagctggctacacagaaagatgtgtcatggcaatgctgagaaggaggatcagggatgagaagaccaacgttaggaagtctgc

SEQ ID NO: 871714 - DNA, 98 bp, Homo sapiens
gcagcagaacgcagggggcctctgtaaggcacatggaggcattaagaagaaatgcactcaccatgagcaccaacttctgcatctgcctgatcatattt

SEQ ID NO: 871715 - DNA, 99 bp, Homo sapiens
gcttcttctcctaatcctccaaaatcaggtccacttgatggaagaggctccaaactctgggatctggccgtgaggcgcagagcagccacttctccctct

SEQ ID NO: 871716 - DNA, 99 bp, Homo sapiens
cccggctggacgccccggtggactacttctaccgaccagagacccagcaccgtgccggtggtggtgtgcacattgagccccggtatagacagttccccc

SEQ ID NO: 871717 - DNA, 99 bp, Homo sapiens
ggaagctccattgaagccagccatgatcagctgccaaatggtgtcacttaccacactggaacatatcaagaccggttaacaaagctacaggataatctt

SEQ ID NO: 871718 - DNA, 99 bp, Homo sapiens
ggcaggagcttttcgtaaagggaagtcatttctactggacttcatgcttagatacatgtataacaagtggccataaaatgcagtaaaaacaaatccagt

SEQ ID NO: 871719 - DNA, 99 bp, Homo sapiens
cttttcagaaacctaaagggactattgagtatactatggagatgttattgggcctttgccaccggagccagaggctgtgccaaccccacgtcctgctgc

SEQ ID NO: 871720 - DNA, 98 bp, Homo sapiens
gatttccaaggaagaatttcctctgaagcaccgactcggtgaaatacctggagtgctcagctctcacccagagaggcctgaaaaccgtgttcgacgag

SEQ ID NO: 871721 - DNA, 100 bp, Homo sapiens
gcctcccaagtagctgggactacagaatgcgttgatatcaatgttactccagataaaaggcaaattttgctacaagaggaaaagcttttgttggcagttt

SEQ ID NO: 871722 - DNA, 98 bp, Homo sapiens
tgtggctgtaacttacgtgtactttaccaacgagctgaagcaggtgaagaacgaggtggagaagctcccccgacagcagcggaaggaaagcatgaagc

SEQ ID NO: 871723 - DNA, 99 bp, Homo sapiens
cgctaagaggagaccaagaggcgggggctgcacttgacaaccagcatgccgagatggtctgcggatcaatggagagctaatcactgcctacccacaagt

SEQ ID NO: 871724 - DNA, 99 bp, Homo sapiens
tgtggcgcagcagtctccttcctgcgcgcgcgcctgaagtcggcgtgggcgtttgaggaagctgggtacagcatcctgctgcaaaaatgattgtaatgg

SEQ ID NO: 871725 - DNA, 99 bp, Homo sapiens
gtagtgttttcaaaactggatatggccaggatgctatagcattgtcagtgtattctgagagaagcctcacaaagtgtattggaattactattgaaacca

SEQ ID NO: 871726 - DNA, 99 bp, Homo sapiens
tggaggaaaggctgatcagagaccaggacctcggagcctcactgctcccagcagcacctcagaaatcaatgtggactgaacataaatcacctgatggaa

SEQ ID NO: 871727 - DNA, 99 bp, Homo sapiens
ccatcatcacatgaccaaagcattcctcttctatgggaaaatatttatccccaaacagaaacctgtacagacttttacagaagaaaaagtgtctcttga

SEQ ID NO: 871728 - DNA, 98 bp, Homo sapiens
cttgaaaagctggagcttcaccagaatgcactcacgagctttccacaacagctatgtgaagctctgcaggagtcaggggcgatcgtggccatgactgg

SEQ ID NO: 871729 - DNA, 99 bp, Homo sapiens
cgtggggcccgcacctctgggcagcagcggcagccgagactcacggtcaagctaaggcgaagagtggaaggccaatgatgaggccaatcagagtgatac

SEQ ID NO: 871730 - DNA, 98 bp, Homo sapiens
ttaaacaaccagggaccctctgcccctagaataagaacatactagaagtcccttctgctaggacaacgagagtaaatattatcagtgtcactaacaag

SEQ ID NO: 871731 - DNA, 100 bp, Homo sapiens
gggcactgaaggaaccatttctttgtggagtatcatctcaaaagttatcaatcctaacttttgagatgatactccacaaagaaatggttccttcagtgcc

SEQ ID NO: 871732 - DNA, 98 bp, Homo sapiens
aaatctagaagataatgatgtctcagacattttaaaattactagcattacagcaacccgatagcagaagggtcaactcttctgttggattttctgttt

SEQ ID NO: 871733 - DNA, 99 bp, Homo sapiens
aggaatagcttgccaaaccaggttgcatttcctgaaggggaagagcaagatgcagtcagtggagagaaagcatgggattatggcaaccacagaatctca

SEQ ID NO: 871734 - DNA, 99 bp, Homo sapiens
tccaagatcacctcgagaaagtcaagggctggttgatatgtgaagagccaacctgtcgcaatcgaactcgtcaccttccccttcaattctcccgaactg

SEQ ID NO: 871735 - DNA, 99 bp, Homo sapiens
taatggtggatgaagttgttcattgtttgtcaccacaaaaaggacaggttgggggccgtcccgctcctaaggcaggaagatggtggccgcaaagaagac

SEQ ID NO: 871736 - DNA, 99 bp, Homo sapiens
atcccaaaattattgaaaacactcgaagggcttgtaatgagccagtgctgcgccgtgttgctgtggacaagtgtgcaaggagagtgcggcaggctctgg

SEQ ID NO: 871737 - DNA, 99 bp, Homo sapiens
ggcttcacttaatcatatccgagctgctgggaactgctggctccgtcaagcgaagaacggccgctgccaggtcctgtacaagaccgaactgagcaagga

SEQ ID NO: 871738 - DNA, 98 bp, Homo sapiens
gaaaactcgtgtccatcaaaatccagatgctggatgacacccaggaggcatttgaagttccagcatttcctgcagatcaccctgtgcgtgtgcgagct

SEQ ID NO: 871739 - DNA, 98 bp, Homo sapiens
tcgcgctgcctggtcgctggtgaagcccgcggcgcgcgcctctcccggaccctgcagggtcacagaacagaaagtgctggtggacatctcttcttgcc

SEQ ID NO: 871740 - DNA, 99 bp, Homo sapiens
acaaggcaaagcgaaattggtcattctcgctaacaactgcccagctttgagctcacggatgattgatatccagaccaggatggctgggcgagcattgga

SEQ ID NO: 871741 - DNA, 98 bp, Homo sapiens
taatatttatggagcatatattatggaacacagaggaatatcacaaacgggacttcacggaggtgctctctcccaatatgtacaacagtaaactctgg

SEQ ID NO: 871742 - DNA, 98 bp, Homo sapiens
tcatttcccccgcttctatgtcctgtacacaatcttcatgaaagggtgccttcaccagggatggaagaggcaggctgcagcagagagatgcagagttc

SEQ ID NO: 871743 - DNA, 138 bp, Homo sapiens
ctgcagtaagtctttcattatccaggacagcttctcaatgaagtcggtgacaccgacttcattgagaagctgtcctggataatgaaagacttactgcagaggagatggatgaaaggagacgtcagaacgtggcttatg

SEQ ID NO: 871744 - DNA, 99 bp, Homo sapiens
cctactcatccctttcactgaagaagtggggaaaacaaggctcagacaggccactatcgaaaacgatcggcatcccggggtcgctctggaagtcggtct

SEQ ID NO: 871745 - DNA, 99 bp, Homo sapiens
agagctgagggagcaagaggtgtcggaggtctcatctttgaactactgccggagcttctgccaggttcgagaacttgtcttggacaattgcaaatcaaa

SEQ ID NO: 871746 - DNA, 99 bp, Homo sapiens
ctgaagaactggaacacgtagaaagtgcaagcaaagcttgggcaatggtagatggtggttcaaatgtgaaagcccgctcttcctacaatgagaagaccc

SEQ ID NO: 871747 - DNA, 99 bp, Homo sapiens
cattgactatgcagcctaatggttatcaatactctggctgaccatcatcatcgtgggactgactttggtggaagtccttggttacatgtcattattgcg

SEQ ID NO: 871748 - DNA, 99 bp, Homo sapiens
tttttacaaagatcagactggtactagaagtgctccagaaacagcttctagattatgagcctcaaacaatttgtgagcatctccagtacttgtttgcct

SEQ ID NO: 871749 - DNA, 98 bp, Homo sapiens
agcatggcatttcagtcactggtttgcagagtccagatccaatggatttgaacagaagcgctttgccaggcttgccagcaagaaggcagtggaggaac

SEQ ID NO: 871750 - DNA, 99 bp, Homo sapiens
catgtatcaaagactgtttgttcaacatatctacaatctcggtactacagattctgatgctcacagtaccacctcaagtgcctccccagctcaatctcc

SEQ ID NO: 871751 - DNA, 99 bp, Homo sapiens
gtttcttcagtccctgatcagatcagaggagagacattttaaatcctaaggatgtgatcacaactcgctttgagaattcctatcctagcaaagatttct

SEQ ID NO: 871752 - DNA, 99 bp, Homo sapiens
gccggcttctcccctacgcgctacacaagtggagctccttttcctccacctaccttcccgagcatgtcaacatcgctctaattcagagataatctgttg

SEQ ID NO: 871753 - DNA, 98 bp, Homo sapiens
ttcatttagcctgctgagaagaagaaaccaagtgtccgggattcagacctctctgcggccccaagtgttcgtggaccagctttatccagggactctac

SEQ ID NO: 871754 - DNA, 98 bp, Homo sapiens
ttcagttatcagtcccgtgggcaatagagtcactgtatttgaccttaaaaactgttgaaggaggatgttcccatcttggtcagtcctatgcggataga

SEQ ID NO: 871755 - DNA, 99 bp, Homo sapiens
ttccggcagctagagcagctactgactctgtttcagccatcttcgataaaggcaaaaagacatatctgaagagatggattaagaatgctttggattaag

SEQ ID NO: 871756 - DNA, 99 bp, Homo sapiens
aattccatttggggaccagagatggacggtcactcagcctatggagggtaaaggcagcagtaatgctaacgctagcaagtaaactgaagcgtgacgatg

SEQ ID NO: 871757 - DNA, 99 bp, Homo sapiens
gtggaaagtacttgtgttatttccaagatggtgacttctacgaaaaagccctggtggagctgaaggttgcagctgtatttaaacttgaaacagatagaa

SEQ ID NO: 871758 - DNA, 99 bp, Homo sapiens
aaaccttttggattacaactgttcatcctcacctatgcaaagaaagggaagctattgctgggattttgaggaggcgggcaggaagacctatgccatggt

SEQ ID NO: 871759 - DNA, 98 bp, Homo sapiens
cgatgcgtcaagtacactgaaattcatcctgagatgagtggtttatcagatactatcattttggatataatatcaaactatctggtgcttcccaatcg

SEQ ID NO: 871760 - DNA, 99 bp, Homo sapiens
gaccgtggaagatttaacgaatggggttgtgatggcccaggttcttcaaaagataggacaagaattttgggcagatttgaatgccatgaacgtgtatga

SEQ ID NO: 871761 - DNA, 99 bp, Homo sapiens
ctgggtcattcgccatcaaggcaaggagctggttcagacagccaactcggaccccggcatcgctgtaggagtccttcaataatgttaaacagtggctgc

SEQ ID NO: 871762 - DNA, 99 bp, Homo sapiens
aagcatccccgaggaggaagacgaatcgttaaacatctgaaagggtcaggcagcctgcttctgcaaagtggtacgatcgaagggactatgtcttcattg

SEQ ID NO: 871763 - DNA, 99 bp, Homo sapiens
acagatgcagccaccatgaagacattctgtggcactccagaatatctggcaccagaggtttagatcctgataagcatcttgggaaaaccctggatcaaa

SEQ ID NO: 871764 - DNA, 98 bp, Homo sapiens
cacctgcagcgagtgccaggaactcttctggggagaccccgacgtggagtgccgagctttaaggaagcctcctatttcagtttctcaacatgaaagtc

SEQ ID NO: 871765 - DNA, 98 bp, Homo sapiens
acgtcccaacagctccagctccgggtgcagggaaaggagaaacaccagacactggaagtctcactgtctcgagtattcacttacaagcagagcacaat

SEQ ID NO: 871766 - DNA, 99 bp, Homo sapiens
gagaagttaaatcagtccacggatgatatcaacagacgggagactgaacttgagatggtccccatccctgctggagtatttacaatgggcacagatgat

SEQ ID NO: 871767 - DNA, 99 bp, Homo sapiens
gcagagctcccagggcggacagcagcctcgggtgcaatcctggagccccccagtgagggattttggagatggaggtgcttttccagagatccatgtggc

SEQ ID NO: 871768 - DNA, 99 bp, Homo sapiens
tggcaaatcaagcctagtgcttcgttttgtgaaaggccaatttcatgaatttcaagagagtaccattggggatgcatcatcccattcagatgaaacctg

SEQ ID NO: 871769 - DNA, 99 bp, Homo sapiens
ttcacagtgctcctgcagtctctctgtgtggctgtaacttacgtgtactttaccaacgagctgaagcagagtattgggaaagggtcgttgtggtgcata

SEQ ID NO: 871770 - DNA, 98 bp, Homo sapiens
tgctggcacatgagatcgagcggctgcagatggagatgaaggaggacgacgtttcttttctcatggtgctcctggagctgttggtgggaatatacccc

SEQ ID NO: 871771 - DNA, 99 bp, Homo sapiens
ctgatgggaatttttgaaatgggctgggaaaagccatctcctattcagcatggtgacatggaccagaaggagagagatgttatcatgagggaattccgg

SEQ ID NO: 871772 - DNA, 98 bp, Homo sapiens
ccgccagccagctgctgcaggagttgcatgctaaggcatgttatttgaaagcaattgagacgcaaccgaactttgcagtagcttggagtaatcttggc

SEQ ID NO: 871773 - DNA, 98 bp, Homo sapiens
tcactctctccgatactttctcccaagcacgtcgcgtttggaaaaattatctcccagcaattaatgggattgtctttctggtggactgtgcagatcat

SEQ ID NO: 871774 - DNA, 99 bp, Homo sapiens
acaatcatatctttagattttggcagcaacggttcagaaaatgcatgtgaaagaacttcttttgcatttttgcgacaagaattgcctgtgagactcgcc

SEQ ID NO: 871775 - DNA, 99 bp, Homo sapiens
ctggaattccaattatcaaagcaggaactgttattaaacttatagagaggcttacgtaccatatgtacgcaggagacgcaggtcagaatggaaatgggc

SEQ ID NO: 871776 - DNA, 99 bp, Homo sapiens
gtggaaatgacagagctgcacctgtagtgaaggacaaatcgacatgccacggcacccaggagcaggatgatggtcaggtagagcttgaacttctcatat

SEQ ID NO: 871777 - DNA, 99 bp, Homo sapiens
cgacagcacagacagaatccctgctaccagcagagatcctacaagaatccaggatgatgatcccagattgccagcgcaggttggaagccgcatatttgg

SEQ ID NO: 871778 - DNA, 99 bp, Homo sapiens
gaagtatatgccagctccgtattttggatcatcagcttcttctacttcaaagtatctgtagttgaaatggatagtaggagcatgaggattcttggggtg

SEQ ID NO: 871779 - DNA, 99 bp, Homo sapiens
ccagtggtgtgcacccaggccgcgacacatggtggaacccttaggagaaatcttgagagtggacagcaattgtgaagatcgccagagagttctgtgttt

SEQ ID NO: 871780 - DNA, 98 bp, Homo sapiens
ctggacacttcaggagtcctcagctagtgacatggtcgtctatccttcactggagtctgatgatgatgaccctgctttgaaatctcgacccaagaaaa

SEQ ID NO: 871781 - DNA, 98 bp, Homo sapiens
gggaaggcgcctgaagaggacgaaggtagtgggcagcagtcagtgacaggtgtaacctctgtggatgacagcaacagttactggaggatacgggggaa

SEQ ID NO: 871782 - DNA, 99 bp, Homo sapiens
tagcacctgggcccggcccctctactgctccccaattacagcccacctcttgcatcgtcacctacaggtggacaagatcgaggaacttgatcaagaaaa

SEQ ID NO: 871783 - DNA, 99 bp, Homo sapiens
acttaggtctgttagaggaagacgacgagtttgaagagttccctgccgaagtgaaactggaacgccaagctgaagaagaacgaatacggaagcacaaag

SEQ ID NO: 871784 - DNA, 99 bp, Homo sapiens
ccaaatttcctcttccaatggaagtgtttaagcatcagcgagagctttctaactgtcaaaggtgctgccctttttctaccacggggaaatggctcatcc

SEQ ID NO: 871785 - DNA, 98 bp, Homo sapiens
ccctattgtatttgccagagcacatctgggttcttgaagcttttgagattaacaatggcaggaaaatcatcactttttaaagtaattctccttggaga

SEQ ID NO: 871786 - DNA, 99 bp, Homo sapiens
atcactttagcacgagatgccatcgtcctcctcgttgcaccaacaatgtgacctcacttcccttaggacactcaaccagcatatccaccacttggttgt

SEQ ID NO: 871787 - DNA, 99 bp, Homo sapiens
ctcggttcgacgactccattttcctcggtgggggcttagcgcactggaggagcggcgggcttcagacagttggaggtgcagttcatcatcacaggcacc

SEQ ID NO: 871788 - DNA, 99 bp, Homo sapiens
ggcaaacagtgtttgcctctggttcagctcatacaacagcttcttaggcacaattcagattcagaagcgtcaacagttagtcagaaagatacatgaaga

SEQ ID NO: 871789 - DNA, 99 bp, Homo sapiens
ctacagttctgtcactcacttacacagtattgggaaatctgtgaaaggacttgtcagtcacatctgtaacctgctcactgaaactgccacactgtgctt

SEQ ID NO: 871790 - DNA, 99 bp, Homo sapiens
catttatctccaactgcgtttttaaatgtgggggtggatgaagatatttgcagttctccctggagcaacggccccctgtgttctgttgagcccagaggc

SEQ ID NO: 871791 - DNA, 100 bp, Homo sapiens
gtgactccactggctccagctctgtctacttcacggcctcctcgggagccacgttcacagatgctgagagtgaagggggatggggtctcactgtgttgcc

SEQ ID NO: 871792 - DNA, 98 bp, Homo sapiens
atcggcaactcaatggagaattctggtcactcagtgacacacacaactcgggcctccccagcgacagcacagtttgaacttcgggcatttcatatccg

SEQ ID NO: 871793 - DNA, 99 bp, Homo sapiens
gaaacttacaaaactggctgttcagattggcaaagcagactattgcccagaagaaaagatgtttggttttcacaagccaaagatgtaccgaagtataga

SEQ ID NO: 871794 - DNA, 99 bp, Homo sapiens
aggattgtaaatgcaccaatcagcatgctgtgtctagctcaaggtggaagccattatctactgatggaccgggtttctcagattcttcaagatcacggt

SEQ ID NO: 871795 - DNA, 99 bp, Homo sapiens
ccggcgtctccttctatgtgctgtgtccggacaacggctgcggcgacaattttagagaactcgatgccaccgcaacggtattggcgaaccggcaggatg

SEQ ID NO: 871796 - DNA, 99 bp, Homo sapiens
ctttaaacactgcagcttgcagactcctattagacatcatgccagggctggaaactgctgtcgtctttcaagaaaaggctttggtatcaggatgatgct

SEQ ID NO: 871797 - DNA, 99 bp, Homo sapiens
ccccatctcattgccacggctgaaccctccttctcaatcttggaacagcacccccttctttaagctttggagcgatggtgtattcaccacggacaggca

SEQ ID NO: 871798 - DNA, 98 bp, Homo sapiens
agaatatgactctctgcctgaaaatagcgagacaggtactccaaagattcaggtttactcacgtcatccagcagagaatggaaagtcaaatttcctga

SEQ ID NO: 871799 - DNA, 98 bp, Homo sapiens
cctcgcttcccggcgcggtcgcagccctcagcccacttaggataatggcgacagctgaggagccaagattctgggtcagataatcgtataaacacagt

SEQ ID NO: 871800 - DNA, 99 bp, Homo sapiens
attccaagcagttgccccagaagttttgctgaactgttacatcagtgttgggaagctgatgccaaggaaaattctcaaaatgctccacttgtacatgca

SEQ ID NO: 871801 - DNA, 99 bp, Homo sapiens
cctagatcctctgtgaagaatgaatttcatcctcccagctgtgcagcttctcttctaaatggtacagctctgccggggggggaaaaagtggtaccattt

SEQ ID NO: 871802 - DNA, 99 bp, Homo sapiens
agcctcgttgcggccatcgccctgccggaccgcgcctcaggctcccccagggggcagagcagggagcacttataccatacaaggcagagaagatacaga

SEQ ID NO: 871803 - DNA, 99 bp, Homo sapiens
atttctgttccgcacaggcctgctgaactgggtgctttatataggcatgtagagcgcatgaagtacaggacaataaagcttcctacacatatcaccagg

SEQ ID NO: 871804 - DNA, 99 bp, Homo sapiens
gtggaataggtgtatcaagtaatggtgcaaagcctgaagatcaagattataggaccggcccaagtgaggagaaacccagcaggcttattcgattaagtg

SEQ ID NO: 871805 - DNA, 98 bp, Homo sapiens
ggccaaagcctgcccagacggctcacctgtgcgggatggaacaaaagcaggggaaatgctgtctgtagctgagcacttcctggagcagcagatgcacc

SEQ ID NO: 871806 - DNA, 99 bp, Homo sapiens
cagaacacaaagcgtgaatccggaagaaaagttcaatctggaaacatcaatgctgccaagcatgttcagctcttgacacaaatccaccttcttgccacc

SEQ ID NO: 871807 - DNA, 99 bp, Homo sapiens
ccagcactttgggaggccgagatcaagaagctgaggccccaggttacacactaaagtaaatggcagaggcagaaataacacctatgtcctcctgacccc

SEQ ID NO: 871808 - DNA, 98 bp, Homo sapiens
ataaggaagccaagttggaccgttctgatgtgactgagagagaagattttgaacacagcacgaaaacattttggagctggtggaaatcagcggattcg

SEQ ID NO: 871809 - DNA, 98 bp, Homo sapiens
taacttctctgtgcagcatccttcatcaacatctccaacagagaagtgccagggcgaactttctgaccaagtatacaactacccagagggcctaggag

SEQ ID NO: 871810 - DNA, 99 bp, Homo sapiens
ccggcggcggctgcgggctgagcggcgagtttccgatttaaagctgagctgcgaggaaaatggcggcgggagaaaattgacgtcctttgtggaattgga

SEQ ID NO: 871811 - DNA, 99 bp, Homo sapiens
atctattccggccacccattgatttgatgcataaaggcagctttgaaacaatgccttcaattaagttgcagagttctgatggagagatatttgaagttg

SEQ ID NO: 871812 - DNA, 99 bp, Homo sapiens
ttgggaacagcttacgtttctgcaacaactggtgccgtagcaacagctctaggactcaatgcattgaccaagaatccagactccaaaatgatgcaaatc

SEQ ID NO: 871813 - DNA, 99 bp, Homo sapiens
ctggcagaagtgattccagtgcctatagaggtacctcttaccagaaaggagactggagaagctggctggtggaggggcgaacttaatggtaaagaagga

SEQ ID NO: 871814 - DNA, 99 bp, Homo sapiens
ggaagctattgctgggattttgaggagccggccggcgctcacttgtcttcaggaagctcggagcctttggtggagccggggagaggaagggtgggtgca

SEQ ID NO: 871815 - DNA, 98 bp, Homo sapiens
tgatgtggtgcttttgaaccactggaaagtgaggaattttgaagtacaccgtggtgacattgtatcattggtataccccatgtttccccatcactcga

SEQ ID NO: 871816 - DNA, 129 bp, Homo sapiens
acgggttcagttcgtcatggggctgtttggaaagacccaggagaagccgcccaaagaactgaaagttgaagttgatggtagtttaagtgatagccacgtatctcctccagccaaacgcactttgaaaca

SEQ ID NO: 871817 - DNA, 103 bp, Homo sapiens
gtgggcgtaggaccctcccagccagaacaccaatcagggtcttcaggcctggaagattgaagacattccagccaacaaaatgtccattgcgtggcagctacca

SEQ ID NO: 871818 - DNA, 99 bp, Homo sapiens
ggggaaggcagtcatggctagagcagatttggaacgcagggcctgtttgccagaggttggccagccatgtgactgccttcctcccctgcgggcagcagc

SEQ ID NO: 871819 - DNA, 99 bp, Homo sapiens
gcggtgtgagaatggagtgggcaggaaagcagcgggactttcagaggatcatgtgtccaaaaggggagtgtttggaactgattcttcagaaaacatttt

SEQ ID NO: 871820 - DNA, 98 bp, Homo sapiens
tgctgagtcacacacaacgcttgttatgttttcatcacttctctccagaaggtagcacagagtgaagctgaaaagaaattgaagaaggatgacaagaa

SEQ ID NO: 871821 - DNA, 98 bp, Homo sapiens
ctaattgcctcctgatagcacacagaaaggttttcttgtcttgacaagatgcttgaaaaaccaagaggatatgaaaatctgtctctggagaaacaaag

SEQ ID NO: 871822 - DNA, 99 bp, Homo sapiens
attagtgatagaacagaaaaatgaagatggaacatggccaaggggtccttctactcctaatcctggagtttgaactacggaaagccaaggagaccattc

SEQ ID NO: 871823 - DNA, 99 bp, Homo sapiens
caaaccatactaaattattccatttgcaacttatccccaacaggtggtgaaaactattggcttgagggaagtttggttctttggtctgcagtaccagga

SEQ ID NO: 871824 - DNA, 99 bp, Homo sapiens
tcccaaagtgatgggattacagatggaacaagaggctgagaggcgcaggcagccacaaataaagcaagagccagaatcagaagaggaggaagaagaaaa

SEQ ID NO: 871825 - DNA, 99 bp, Homo sapiens
gcgacagtgcccaggggtctgagtctcacagcttgtaaagaaaaagaggaatccagtcgggctcggtggctcacacctataatcccagctacttgggag

SEQ ID NO: 871826 - DNA, 99 bp, Homo sapiens
accccagacctcatcatcaactccatccaacacttcgtttactccgaagaaaaagtcagcactttttgaagtgtctgaggttataccagtcatgacaaa

SEQ ID NO: 871827 - DNA, 99 bp, Homo sapiens
ggatgaagatatttgcagttctccctggagcaacggccctttaattccttcctgtgcaagatccaagaatactcttttggggtcgggatcgggacctgt

SEQ ID NO: 871828 - DNA, 99 bp, Homo sapiens
tgaattggatatcaagccagagaagtgcccgaggagagttaacagctaatgggaatgacagcaagaaatttaaacgagatagacctccctgttcgcctt

SEQ ID NO: 871829 - DNA, 105 bp, Homo sapiens
cctgggtgatagagtgagaccaaattccaacaggactgcacaggaaggtgttggttttggtgttggttttttctctgtaatctttattttccagtttgtattttt

SEQ ID NO: 871830 - DNA, 99 bp, Homo sapiens
gaaaaggtccaaactcctatctccttacagcccgcagacacaaggattcactccttctccagttgcacagccacacccttcagctggccttaatgttga

SEQ ID NO: 871831 - DNA, 98 bp, Homo sapiens
tgagaaccctacttgcctaaatgaggaatgtctttcctaccatctaaaatacgaaggtttctggctgggaaatggtgttcacactggccctgaatcaa

SEQ ID NO: 871832 - DNA, 99 bp, Homo sapiens
agagtagacaattgtggcagagttaattctggtggaaaaattgaggcttcagaaattgtccagtctctccagacactgggtctgactatttctgaacaa

SEQ ID NO: 871833 - DNA, 99 bp, Homo sapiens
gagtatcaggaggacctggccctgcgggctcagaacgatgtggctgcccggcagacgacagagatgctgaagtacttcatcctgctcctcatcatcttt

SEQ ID NO: 871834 - DNA, 99 bp, Homo sapiens
accctggtgcccagccgggaactccccatcgcgttttgccagcgataatacgcctcagatcgaaagctgctttgcgtcgcagttggagcagcaccccca

SEQ ID NO: 871835 - DNA, 98 bp, Homo sapiens
ggaggagtcagctgtgtgtccagaacgtgccatggagacgcttaacgcatgacgtatcccagactttactcaaggcaacactggacagtgttgtagaa

SEQ ID NO: 871836 - DNA, 99 bp, Homo sapiens
agagagagcaagatcattttgtgaaagaaaagaataatttaataatgatgttgcaaagagaagaaacgctgcacaagtcgaccagcagcagcagcgtgt

SEQ ID NO: 871837 - DNA, 99 bp, Homo sapiens
gaattctgcatttcaactctagaggaaaaaattgaaagagaaaaggaattagcagaagacattatgtcagattctggacaatcaggaagtccaagccac

SEQ ID NO: 871838 - DNA, 99 bp, Homo sapiens
atacaaaggaagcaccttccacagatggccctcagccttgatgaaattgtgttcttgatagagatgttcctgatgtacctgatatgtccagaagcccac

SEQ ID NO: 871839 - DNA, 99 bp, Homo sapiens
tgtctggctacctcgtggacaagtttgcagatcgggagcgcaaggtcgccctcaaggccatgatcaaaacagctgcctggagttcagcctcagaatcca

SEQ ID NO: 871840 - DNA, 99 bp, Homo sapiens
acagacatgtacagataatactggtgattctgatgatagtgcttcaggaattgaagacgtatcggacgatttaagactaccgaccagactcccggaaat

SEQ ID NO: 871841 - DNA, 99 bp, Homo sapiens
catgatgcaaaattttggtctgatgatagcagatcctatctgttcaattcttatagccattcttatagttgtaagcagcgctggagagcgaggtggctt

SEQ ID NO: 871842 - DNA, 99 bp, Homo sapiens
caggagaagctgatgcaaattaccagtctgcattcactgaatgccttcttgctgccaattaaaactgtaggtgtgcagacaaaacttacctggggtccc

SEQ ID NO: 871843 - DNA, 99 bp, Homo sapiens
gatgggctgcctccaggtgacagcaatcagctggcctggtttgatactgacctgtaaatcatcctttagtgtggattctttaaacgctctaggtacgat

SEQ ID NO: 871844 - DNA, 98 bp, Homo sapiens
ttttccagacgaccacgacgaggccggggtcacgtggtgatctttgtgaagtctgtgcagcggtgcattgccttggcccagctactagtggagcagaa

SEQ ID NO: 871845 - DNA, 99 bp, Homo sapiens
gagatgctggctaacaccgtggagaaatcagaagggtagccggatcgagctgggagatgtgacaccacacaatattaaacagttgaaaagattgaatca

SEQ ID NO: 871846 - DNA, 99 bp, Homo sapiens
gaaaaccatcctttttattgatgagattcatcggttcaataaatctcagcaggttgaaaggattgttgacaaaaggaaaaataaaaaagggaagacaga

SEQ ID NO: 871847 - DNA, 100 bp, Homo sapiens
atcagacaactacactccatgagggccaaatgtgccatgggacacttagtgccatgcctgcgcagacctggaaccagagagcaggcctgtagttgtctga

SEQ ID NO: 871848 - DNA, 98 bp, Homo sapiens
tggtggcgcgcgccgtgtgcttgcctctggttgaacggtttgagacattctgcctggacccttcccttgtcaccaagcaagccaaccttgtgcacttc

SEQ ID NO: 871849 - DNA, 99 bp, Homo sapiens
ggggatataatgctttaaggcgcatgtacacagatattcaggaaccaatgctgagtgctgcacaagagcagcagcagtgttgtactgctacttctataa

SEQ ID NO: 871850 - DNA, 99 bp, Homo sapiens
aattcctgccattctggggattcttggaggaattcttgctttgctaactcgaagagtgtggaaaaactaccttcctgctatcaatggcattgtatttct

SEQ ID NO: 871851 - DNA, 99 bp, Homo sapiens
ccgcgcccttcctcggcgggccggactgataagctgttgccaggtgatgcaggagccctttggttgcacctgatgcattattgtgaagcatgtacagca

SEQ ID NO: 871852 - DNA, 99 bp, Homo sapiens
cattttgcagttgttgaaattgtccccgcagttttcaatcatgcgtgtccggagcggtgactggaaggggtacacaggcaagaccatcacggacgtcat

SEQ ID NO: 871853 - DNA, 99 bp, Homo sapiens
atgctgttactggagaattcactgaattttctacttctggtcatgcttacactgatacagggaaagcatcaggcaacctagaaaccaaatataaggtct

SEQ ID NO: 871854 - DNA, 99 bp, Homo sapiens
tcaatgtgggtgtagagtctaaactcatccttaaaggggtcatactgctgcaaattcaacacccaacagcttccttaatagcaaaggtagcaacagccc

SEQ ID NO: 871855 - DNA, 98 bp, Homo sapiens
tcgaggttctgcagaaggttgtgactttagtatacagaattacatgaacgacagccttcgcaccgacgtcttcgtgcggttccagccagagagcatcg

SEQ ID NO: 871856 - DNA, 99 bp, Homo sapiens
acccttagcggaggacagcgtgcccggattgcccttgctcgtgctgtctaccagaagtcggtgatccacagtcggcagtttccattcagatttcttaac

SEQ ID NO: 871857 - DNA, 99 bp, Homo sapiens
aaaagctccaaggaccgcagacttctgctgaagtgtaccgcatcctcaaacagaagggactactggacaaagagacaaccctggtagtctatatcatga

SEQ ID NO: 871858 - DNA, 100 bp, Homo sapiens
ctatcaggatgttggctgcacgaaggtcccggtggacgtagttcatccgctccacgtacgccatgcctgaggcgatctggctcttgccgcggcgccgata

SEQ ID NO: 871859 - DNA, 99 bp, Homo sapiens
ccgcccagaagacaacatcaggctgactacatttggtcaattttgtggaacctgtgggcctcaattactccatgtttattcctaccttgctgaatcagg

SEQ ID NO: 871860 - DNA, 99 bp, Homo sapiens
gaaaatatgcaagaaaggaagtttacatgcaaatgggagacagagtactattaatcccgtagatgcaatatatcaacctagtcctttggaacctgtgat

SEQ ID NO: 871861 - DNA, 99 bp, Homo sapiens
gctgtttgccctgaacatcatgaattcccaagaaggaggttgttcttgcagaacatgccagcagaagcattcaccaactgacatgtgccctgaaagaag

SEQ ID NO: 871862 - DNA, 99 bp, Homo sapiens
agaacgcagtggcacagagtagcagacgaacaggaggcattgaactcaatcatgaacgatctggtggccctccagatgaaccgacgtcaccggatgcct

SEQ ID NO: 871863 - DNA, 99 bp, Homo sapiens
agctgccacctgcctttgacctttttgaagcctttgcaaaatcttggtgatgccttggacagcagcaactccatgcaaaccatccaaaagaccaccacc

SEQ ID NO: 871864 - DNA, 126 bp, Homo sapiens
tggagcggatgtattggatttagcagaaacaatggttgcatctgcagactttagctctcgaaggatcgtcttcagttcattagcgttggttcataaactaaaccatctgcagatgcaaccattgtt

SEQ ID NO: 871865 - DNA, 100 bp, Homo sapiens
agtggagaacacagatgaaaaacttcgcaatgaaaccaggcgggtaaacatggtggacccgcctggtttcattgcgaagtttttcatctgtgttctccac

SEQ ID NO: 871866 - DNA, 99 bp, Homo sapiens
gatgaccaacgcccttcgcaaggcccctcagcacacagctgtcggcttcaaacagacgctcaaagcttggattctgccgtgccactcacgaatggcgac

SEQ ID NO: 871867 - DNA, 98 bp, Homo sapiens
aaaaacaccagcgtgccaaaagagcagtctcacatgaagaccaatttttacgtctagatttccatgcccatggaagcctgcccttggacaaggacccg

SEQ ID NO: 871868 - DNA, 99 bp, Homo sapiens
atgacatttcaacgagtttgtcatcatgtgagagagaataggcacatctactatgcttcttactagaataaactgtgcagattggtctgatgtatgtac

SEQ ID NO: 871869 - DNA, 98 bp, Homo sapiens
tcggccaggaactgggtgctggtgcctatagcatgaggagctcattttgcagctctcaagcttttatagcatgctgtaaacaattgtcaaagttgttt

SEQ ID NO: 871870 - DNA, 99 bp, Homo sapiens
tggaatgcctcagggtcatgattacacatggtgtggatgtgacagcccaagatactaccggtcctaggcctacttacaagcctccagtctcaaattatc

SEQ ID NO: 871871 - DNA, 99 bp, Homo sapiens
cagtgaggaagagctgccgagacggactgaccactgagcagatgctgagaaaagaccagaagactatctatagacaaggcgtcaaggtggccattagtg

SEQ ID NO: 871872 - DNA, 100 bp, Homo sapiens
tctaggttcacttgactctccaccaacatggtgaaaaagcttctttgaattccacagaatcaggaaggacacatgttggtggagagtcaagtgaacctag

SEQ ID NO: 871873 - DNA, 98 bp, Homo sapiens
tcggcttctctacgcagaacccgggagtaggagactcagaatcgaatctcttctccctccccttcttgagcaccagcctccctacatcattgcagtgt

SEQ ID NO: 871874 - DNA, 99 bp, Homo sapiens
gctcttagccaggaggagtaattcactggcataatggttatgaaagcttctgtagatgatgacgattcaggatgggagctcagtatgccagaaaaaatg

SEQ ID NO: 871875 - DNA, 99 bp, Homo sapiens
gtctcaagatggcggccaatgtgggatcgatgtttcaatattggaagcgctttgatttacagcagctgcaggttgcacactgggccacagaggatccag

SEQ ID NO: 871876 - DNA, 98 bp, Homo sapiens
ttgatgacaggctcaacaatatgggaatgtttaattcagccttggaagtggccaaatttgaaggtgctgtgattcgaactgtcagtgggataaggggg

SEQ ID NO: 871877 - DNA, 99 bp, Homo sapiens
ctgctcagcgtcctcatgtggggggtaaaccactcggaaagaccacagcaagattctttcattcgtctcctcctagcctgggggaccaggctcgaactg

SEQ ID NO: 871878 - DNA, 99 bp, Homo sapiens
cctgtctctgtgcattgctgcggttggtcaaaatgttgacaatggtgacctcatccacaccgtctggctttgagcagagctcctaaatggccagcgaag

SEQ ID NO: 871879 - DNA, 99 bp, Homo sapiens
ctggaaactgaagtaccagttgtcgctagaacaggtggtgcggttgtgtcagaacccaaagctggcgctaaagaatagcccaccttatatcttagacct

SEQ ID NO: 871880 - DNA, 99 bp, Homo sapiens
cagagcattgaggaggctgtggctctggtagaacacttgcagagggaatctggtcaaacatggaatggggttatgacaactcgagaagacaaagttgtc

SEQ ID NO: 871881 - DNA, 99 bp, Homo sapiens
aggaaacttcaatgtctaccttagcgatttgatcccagtggatagagccattgaagacaccagacctgctgggtaagaagagttcctgggtcaagtggt

SEQ ID NO: 871882 - DNA, 98 bp, Homo sapiens
gtgactgcagccatggccacaggcttagctgttaacgggaaaggttcttgctatgcactaacatacaatacacatattgatgaagataatactgttgc

SEQ ID NO: 871883 - DNA, 99 bp, Homo sapiens
ggagattttgatgtggatgatgccaaagttttattagaatttctctgcaaagaatgtccaaaaattcatattcacattgatcgtatcgacaaaaaagat

SEQ ID NO: 871884 - DNA, 99 bp, Homo sapiens
tggtaaatatgaaatccaaacctggtactcctcgccttacccacaggaatatgcaagggggtgctagtattattcagtgccacattcttaatgataaga

SEQ ID NO: 871885 - DNA, 98 bp, Homo sapiens
cagctccccattctctgagaacagcacttccctgcaggtgaaggagtacgaggaggagattcactcactgaaagagcggctgcacatgtccaaccgga

SEQ ID NO: 871886 - DNA, 99 bp, Homo sapiens
aaagaaacaagccgtggaataggtgtatcaagtaatggtgcaaagcctgaaaacaggctgtgtataataggccacaaacagttgacaaagtacgaatca

SEQ ID NO: 871887 - DNA, 99 bp, Homo sapiens
gggaagaggaacagcctatgtgggcttccacggagagatggacagagacgtatgtgcgttggtctcctaagggcacctacctggctacctttcatcaaa

SEQ ID NO: 871888 - DNA, 99 bp, Homo sapiens
cagcaagctcgagttaaagttggatgtgctggaacagttgctctaggtcgtaaccagcctttgaaaaaggagaaaccaaaatggaaaagcgattatcct

SEQ ID NO: 871889 - DNA, 99 bp, Homo sapiens
cagagtccgcggccggggcgcgggagtggttggcacttaccatggttccccagaccagtcccatcaagtgactggtaaccaccagcagcctcctcagca

SEQ ID NO: 871890 - DNA, 99 bp, Homo sapiens
gagaactcattaccctgacatttatactagggaggaactggcccagagggcgaagctcaccgaggcccgagtacaggatgaagatgagctggattccca

SEQ ID NO: 871891 - DNA, 99 bp, Homo sapiens
aggagtcatttctgttccgcacaggcctgctgaactgggtgctttatataggtgtttggcatgcagaacaatctggcccccagcttgaccaccctgtcc

SEQ ID NO: 871892 - DNA, 99 bp, Homo sapiens
aacctcactgagttagaatcagagaacaagttgaaatcatcgcagaaggataaagttcgtcagtttatgatcttcacacaatctagtgaaaaaacagca

SEQ ID NO: 871893 - DNA, 99 bp, Homo sapiens
tgcttctggagcaaaacttgattaccgtcgatatgcagaaacactctttgacattctggtggctggtggaatgctggatccccaagtaagcccttggca

SEQ ID NO: 871894 - DNA, 99 bp, Homo sapiens
agctacttggttcagtagaggatgctgtggtggctaatgccgtagcggcattatctgaaatcagtgagtctcacccaaacagcaacttacttgatctga

SEQ ID NO: 871895 - DNA, 99 bp, Homo sapiens
gcagaagaatgtgcctccatgctggcagtcaccttcagtggtggggacaagatgcttcggagcattgaatggaagttggatacactttgtgacttgtac

SEQ ID NO: 871896 - DNA, 99 bp, Homo sapiens
atatgggcgccctttcctcatcatcaaggatcaggaccgcaagtcccgtcttatgggacttgaggccctcaaggaatgggatggtctagtaaggataac

SEQ ID NO: 871897 - DNA, 99 bp, Homo sapiens
cggccgcccgcgccagcaagaggatcgtcctgccggagcccagagagtattatgagggaggccgaggacttcatgctccggacagagaaacggcgctgg

SEQ ID NO: 871898 - DNA, 100 bp, Homo sapiens
tgggcaacagagcgagactccatctgagtgaaccaccagatgttttcggaggctagagaatactcagcaaaggaacggccacatccttgggcttcacaaa

SEQ ID NO: 871899 - DNA, 99 bp, Homo sapiens
gtttatggtacagacaatttttgctccaccaaacacttcagatatggaagctgtggaaacagagcaaatgcagcgttacaatcaaagacttattgagga

SEQ ID NO: 871900 - DNA, 99 bp, Homo sapiens
accactataaataccacaccttcctgcgctgccgggaccaggagctgaagtgggaatcagtacatcgagaatccacgcccggggaccagtaggacttga

SEQ ID NO: 871901 - DNA, 119 bp, Homo sapiens
gcacatggttctgggggctccacctgtttgtttgcaaagacaaggagtacagcatcgctccacctgtttgtttgcaaagacaaggagtacagcatcccggagctcgtcctccgccagca

SEQ ID NO: 871902 - DNA, 99 bp, Homo sapiens
gccttttccgttgccggtgccggcctagcgtcctggaattacttcaatcaagcacagaccccacaggctcctcggacactgggtccatcacctcctgcc

SEQ ID NO: 871903 - DNA, 99 bp, Homo sapiens
attccagttaagagcacaacattttcaagaaaattcaaggctctacaagaagcatggcagcatctgcttctggggaagcctcaaggagcttttattcat

SEQ ID NO: 871904 - DNA, 99 bp, Homo sapiens
tcgctccggagccgctgcacatttcgaatgtatgacaacatgtccacaatggtgtacataaaggaagacaagttggagaagcttacacaggatgaaatt

SEQ ID NO: 871905 - DNA, 99 bp, Homo sapiens
caaaactaaatcaactagtggaaatgacgacagcacatccttagatctagagtgggaagatgaagaagagtggcagaatttagtgacatttggaagctt

SEQ ID NO: 871906 - DNA, 98 bp, Homo sapiens
gtgagagttcaaagattctttgtagcagacactgcaaatgaagctctcgaggctgctaagagactaagtttctgctttgggacaaccatacatctaat

SEQ ID NO: 871907 - DNA, 99 bp, Homo sapiens
cggcttctcccctacgcgctacacaagtggagctccttttcctccacctaccttcccgagtaaaagagaacctgctttcatgcaagatgctgctgcact

SEQ ID NO: 871908 - DNA, 99 bp, Homo sapiens
cccaaaacaattcctgccagcagactaatacatacgttccttatagaggctatggcgttattaagtataccaccttattaatccgtttcagcgccatag

SEQ ID NO: 871909 - DNA, 99 bp, Homo sapiens
gagaaactggacaaccaacggctcaagaatttcaagaacaaaggccgcgacttggaggaagagctaaggagcaaatccaagatctgtgccaatgtgttt

SEQ ID NO: 871910 - DNA, 99 bp, Homo sapiens
agggctttattcggccgggatcttcggcaagactcacgtctccaacaaccaagctccccaagacatccaccgcaagcgcatggagaaagacctgctgga

SEQ ID NO: 871911 - DNA, 99 bp, Homo sapiens
ccagaaatagcaaacttcatgcagctggtggaactagatgtgtctcgaaatgggccgcctttttgcctatcctgacactcaccgccatcgcctgggacc

SEQ ID NO: 871912 - DNA, 98 bp, Homo sapiens
aacccagcagtaggttattgaagacagcagccccaggagaagccgtacaagtgctcagagtgcagcaaggccttcagccagaagcgaggcctggatga

SEQ ID NO: 871913 - DNA, 99 bp, Homo sapiens
cagaaccagacgagctccagctcccaggctagagcctcattttacagatgaggaaactgaggctggctgcgtgctcagagggtttgctgaaggcctcac

SEQ ID NO: 871914 - DNA, 99 bp, Homo sapiens
ccgagagcgcgaatatcgtcatcgttagaagtgccatctgggattgacagctcagcctgaactctatcttctgaacaccatggacgctgactcacttgt

SEQ ID NO: 871915 - DNA, 99 bp, Homo sapiens
ttacagacccgagtggaatctttagaatctcaaacaagacaacttgagctgaaagcgaaaaactatgctgaccagaaacatcgggtcagaagttgagat

SEQ ID NO: 871916 - DNA, 99 bp, Homo sapiens
cttatatctgcgacctcgaaaatttccttttaaacatgcatcacagctgacaccttcagataggatccataatatttggttacatatggactgtcacac

SEQ ID NO: 871917 - DNA, 99 bp, Homo sapiens
agctgctcttgcctcagcggctaccaaagccaagggaaatccctaagtcagccaacccctcctcccatgccaatcctttcacagtctgaagcaaaaaac

SEQ ID NO: 871918 - DNA, 99 bp, Homo sapiens
gcaggagggaagtgagaagcccaactaaagccccacatttgcagctcattgaaggaaagaactaaagatgactcagagccatctggagaagaaacagta

SEQ ID NO: 871919 - DNA, 99 bp, Homo sapiens
ttggacttcgcgatcttcgccgttaccttcttgctggcgttggtgggagccgtgctctacctctatccggtctgaagctgcgttggaccaggaacagat

SEQ ID NO: 871920 - DNA, 99 bp, Homo sapiens
ggaagcataaagacttgttgggtaaaagatacattgaactcttcaggagcacagcagctgaagttcagcagggcatgtctttaacttcagaatggtttg

SEQ ID NO: 871921 - DNA, 99 bp, Homo sapiens
gggaaatgaggcaagttatcctttggaaatgtgctcacactgcaagaagttatgaaatggaatggatggggatataatgattctaaattcatcttcaat

SEQ ID NO: 871922 - DNA, 98 bp, Homo sapiens
acaagtctgagcaggatgcccaaggagcctctcaagattccagtagcaaccagcaggacccaggtcttgggcgtctttggtactggcttttttagggg

SEQ ID NO: 871923 - DNA, 118 bp, Homo sapiens
ccgacttctggttgccaccaccttcactcacagctaccctttttgctggagtatggactttctgtcagattttgagatgatgttgcagcgaaaaaagagcatgagtggcaagcgcaga

SEQ ID NO: 871924 - DNA, 99 bp, Homo sapiens
gagtggatgaacatgtgcttggtgtcgtttttccttgagctgaacgtcttgcaacagtggccgcacgcatagataaatttgcgcctcattttggtaagc

SEQ ID NO: 871925 - DNA, 98 bp, Homo sapiens
cctctaggaaatgatctaggaaaatgatgtcatgggaacagacatgtcttggagaggtgcaccctgggatctgtccaggatcagaaactcttggagcc

SEQ ID NO: 871926 - DNA, 99 bp, Homo sapiens
tgggaaatacgtgtttcatgaactcagctattcagggaagtgttcgccagttactacatgaaaagataagagatgcttatactcacccacaatttgtga

SEQ ID NO: 871927 - DNA, 99 bp, Homo sapiens
attttggtttcacgtacttccaaattgttctcttcctcatcttctccctttacactttcattttcaaatctgattccgaccatcgtctctgtatcagta

SEQ ID NO: 871928 - DNA, 99 bp, Homo sapiens
gtaaccactctcccatttggccaaacacatccctcatctccatgcatatttgccacgtatttgaactctggaatcccaattctgtgttcctttggaaac

SEQ ID NO: 871929 - DNA, 99 bp, Homo sapiens
gggaagttcattgggactgtgtcttggaaaagcaccaagttcgtctcagcaacattccaacgcatcccagtccctgtgtgacatcatccgcctgagccg

SEQ ID NO: 871930 - DNA, 99 bp, Homo sapiens
gaaattaacattgatctctgaagatatcaagtcatattatacagtgcgacagctagaattggaaaaccttacagagatctattgggaaactgattataa

SEQ ID NO: 871931 - DNA, 99 bp, Homo sapiens
gggatttggctgcagataagcagacactccagagtgaacagcctttacaggttgccagaatgtgaaagatgttgcagaagtgttccagaagtggctgaa

SEQ ID NO: 871932 - DNA, 99 bp, Homo sapiens
gacctccttcttcaggagagcgccccagggcaagccccgctccggccaacaaaatggtcttcagcagagaagccgtcaggagacttctcgccagtaaat

SEQ ID NO: 871933 - DNA, 99 bp, Homo sapiens
acgacaacttcagtgggcatcgagatgacggcatggaggcctggagcattggtaagcgtcacactgccaaagtgagagctgctggagaactcataatcc

SEQ ID NO: 871934 - DNA, 99 bp, Homo sapiens
gcctcccaagtagctgggactacagtgatccgggccaaggtggtggggaagaagctggtaaaggaggggcccttcggcacgctggtctacaccatcaag

SEQ ID NO: 871935 - DNA, 99 bp, Homo sapiens
aactgtccaaggctttggcaagatctcggctcaccaaattccacaacctgaaggcagtcgtctgcaaggcctgcatgaaggagaacagacgcatcactg

SEQ ID NO: 871936 - DNA, 99 bp, Homo sapiens
cggcggactagaatttctacgcagaagtctccctcaggatcagaccgtagcccttccggaaacctccatgagggagacgtggtgggcggtccttcctgt

SEQ ID NO: 871937 - DNA, 99 bp, Homo sapiens
gctgaagatggagagggaccacctcaggaaggaggtggaggggctgcggagacagagccctccggccagcggggaggcgcatattaaatttcctattga

SEQ ID NO: 871938 - DNA, 99 bp, Homo sapiens
taaccggaaaatcacacctcttatgtcagcatttcgcaagggaagaaggagaaagggccaacccctgaagaagcaatacagaaactgaaggagacagag

SEQ ID NO: 871939 - DNA, 99 bp, Homo sapiens
cggattatagtctctcgccacagcggcctcggcctccccttggattcagacgccgattcgcccagacttccttgtgaaacctcctagtagaaaaagttc

SEQ ID NO: 871940 - DNA, 100 bp, Homo sapiens
tggtcctaaaggcaacagcaggactacgcttactgccagaacacaaagcttggctttgtgttctggcagtaagcgtagtcctgctgttgcctttaggacc

SEQ ID NO: 871941 - DNA, 98 bp, Homo sapiens
gtgggccggctagaggaagaggcgttgcggcgaaaggaacggctgaaggccctacgggagaaaaccgggcgcaagggttggggtctgctaggtccccg

SEQ ID NO: 871942 - DNA, 99 bp, Homo sapiens
gaagaaggcatacaagcaagtgaagatcgaccagattgaggcctccaggatcatgtggtatgtcagcaccaggggcgtagccccacgggtcaactttga

SEQ ID NO: 871943 - DNA, 99 bp, Homo sapiens
aaaactgttcctgtgaaagcatttcctgcttttcttcagacggttatcaatactctggctgaccatcatcatcgtgggactgactttggtggaagtcct

SEQ ID NO: 871944 - DNA, 99 bp, Homo sapiens
ctaagaacgctgaaggctttggaatatgtgttcaagttcattgttcggtcgaggacattattttcacaggggaaatttgcagtggtgagaaaatgtata

SEQ ID NO: 871945 - DNA, 99 bp, Homo sapiens
gggaggtcatcgaaggctaccgggcccagcacagccagcaccgcacgccctgcaagggaggacgaggagcggaggcggcagcagcagttagaagagatg

SEQ ID NO: 871946 - DNA, 99 bp, Homo sapiens
cctggagagagacggagtggctgcttaatagagtttcactcttgttgcctaggctggagtgcaatggtgcgatcttggctcatcacgaccttcgcctcc

SEQ ID NO: 871947 - DNA, 98 bp, Homo sapiens
ccggctcaccgctgcccttcctgctgctgagctacccgagcggcggcggcggcagcagcggcagcggcaagcaccgctttcaacagacctcacatctt

SEQ ID NO: 871948 - DNA, 99 bp, Homo sapiens
ttaatctcctcagaaatcactaaatactactctgaggggcttagaaattaacaggagctaccatagaggaggcatactccaggtcaatgacaaaactag

SEQ ID NO: 871949 - DNA, 99 bp, Homo sapiens
gaggggggagcggcgttggaggccaccgtttccagagataatagtagcagaatttcacaaaaaaatcaaagaggcatttgaagtctttgaccatgagtc

SEQ ID NO: 871950 - DNA, 99 bp, Homo sapiens
ggattacaggcgtgagccaccgcgcctccacattgacattccggatttgcacattgatcagggagaattcctgctgcaaggtctgaggcagccccagtt

SEQ ID NO: 871951 - DNA, 99 bp, Homo sapiens
tcttcttcgggatcactggattgctgacggcagccctctcagttacagaatgtctgaaggggacagtgtgggagaatccgtccatgggaaaccttcggt

SEQ ID NO: 871952 - DNA, 98 bp, Homo sapiens
caaaagggaagctgaaaccaactcagaatgcttctgagaagaaaacaatggactgctcttcctggagacctcagccctggactctaccaatgttgagc

SEQ ID NO: 871953 - DNA, 99 bp, Homo sapiens
aaactgcgcaggagtaaggcaggaaaccgacgagaggacctcagctccaagcatacacaagctgagggagaatgtctttcaagagcatcagacccttaa

SEQ ID NO: 871954 - DNA, 99 bp, Homo sapiens
atggtatcgccattttcctgggcagctttgtactcagcctccttaccattatgctgataggaagatgtcttcaggaaatgctaaaattgggcaccctgc

SEQ ID NO: 871955 - DNA, 99 bp, Homo sapiens
tcacttattccaaggaaagatacaggagaggcagatgcgaaccagaacaatgggacctcctctcaggacacagcggtgactgactccaagcgcacagcg

SEQ ID NO: 871956 - DNA, 99 bp, Homo sapiens
tttagttgctcttttggttgaacagtctcgatcagaaaggaacttgtggagtactacaagcatcattctctcaaggaagggttcagaaccttagataca

SEQ ID NO: 871957 - DNA, 99 bp, Homo sapiens
gcgcaggagaaaacgaaaccttcgtgatgagattgactgtagccgaggataatacatatgtgtcaagttcagagaatgatgaagatgtgctagttacta

SEQ ID NO: 871958 - DNA, 98 bp, Homo sapiens
gcaggggcgacaacagcatcagaaaagagtctcatcgtggaaggcaagagggaaaagaaaaaagtagagaggttgacaatgcaagtctcttccttaca

SEQ ID NO: 871959 - DNA, 99 bp, Homo sapiens
gtcagactcggagacgtctgacagtgacgatgagtttgcagagcagtctctgatgaagaatgccataaaaacatcggaggagtcatggattgaacagca

SEQ ID NO: 871960 - DNA, 99 bp, Homo sapiens
aggcctctggtatttctttctcttctgcttgcgcattaaagttttaacaggtactccaaagattcaggtttactcacgtcatccagcagagaatggaaa

SEQ ID NO: 871961 - DNA, 99 bp, Homo sapiens
atgaatacaaccatgatctcttccaaagaatgccacagaatcaggggaggcatgcttcagatgttaattattcatactgcatgactgaggattttggag

SEQ ID NO: 871962 - DNA, 99 bp, Homo sapiens
ggcgaagtggagagtgacatgcagttggatggcggtgactgcgtgcgtaactggcggaaacccagaggcattgacaacagggttcgtagaagattcaag

SEQ ID NO: 871963 - DNA, 99 bp, Homo sapiens
tatacattcagtatcatggatgaatttcaggttggactagtactacaatagatggatatttttatttctagaactctgacatcatcatttgttaatatt

SEQ ID NO: 871964 - DNA, 99 bp, Homo sapiens
agcatttacagcaacagcagttccttcagaggcaacagcaccttctcgcggaacagaacaaagaactttgagtctggcaaggcttataagacaacatgg

SEQ ID NO: 871965 - DNA, 99 bp, Homo sapiens
accgctgcaaactcatcaccaggaaagacttcgaaactttgttcaccgattgcaccaatgccaggcacctgcggaactcgagtcatgcaggagcttttg

SEQ ID NO: 871966 - DNA, 98 bp, Homo sapiens
gagaatatggtgcagaggccctccacggcactgagtaaccgtggtcagcacagcatctcgtatacactgtcccggagccactcggtcatagtggagta

SEQ ID NO: 871967 - DNA, 99 bp, Homo sapiens
gccttccaagggatcattagccatagcaaaagcctcatcataagataaccatctggaaatgctagaacaggatgaacacaagagtccaactgggaaaga

SEQ ID NO: 871968 - DNA, 99 bp, Homo sapiens
caaaacttcccagtcagtctcaggagaagaaatagatgcaatggatgttcagcagctttcacaaatagtaccaaagacaaggacgagtgctccaaggat

SEQ ID NO: 871969 - DNA, 99 bp, Homo sapiens
aagcgggcggcgcgggggagatggacctgcaagcgcaggaccgagcccaccgcatcgggcagcagaacgaggtgcgtgtgctccgcctctgcaccgtca

SEQ ID NO: 871970 - DNA, 98 bp, Homo sapiens
cctgggcggactcctcggccaatcagcctcgaaaattgtacaagctggagataaggaccttgatgggcagctagactttgaagaatttgtccattatc

SEQ ID NO: 871971 - DNA, 99 bp, Homo sapiens
tcgcttggtgtcctcctggcctcagcaacctgacaattctgtcgtgtcccggacatccataaaaattcatcagagagcattttactactgagctgcaaa

SEQ ID NO: 871972 - DNA, 99 bp, Homo sapiens
tgctgccaaattatctgagactggataagatgaccttcagtgtgctgctcaaaaacaggtgctgttcacgttcaacctgaagtcctcacccagttcagg

SEQ ID NO: 871973 - DNA, 98 bp, Homo sapiens
ccgccactgccattactgcaaggagggctactaccgcgacatgggcaagcccatcacccaccggaaggcctgcaaagaggatctgaagaggcaaaatg

SEQ ID NO: 871974 - DNA, 99 bp, Homo sapiens
acgagctcgcttctatgctgcagaaatcatttcggctctcatgttcctccatgataaaggaatcatctatagaatggtagataacgcagatcatctctg

SEQ ID NO: 871975 - DNA, 99 bp, Homo sapiens
ctgtattcagctcaggaccaggcaccttctgtggaaggatacctgggatgaactcctaattggtagtgtagaagtgaaaaaggtaatggcatgccccag

SEQ ID NO: 871976 - DNA, 99 bp, Homo sapiens
gttgatctgtaatgttcaggccatggaagaaatgatgatggaaatgaagtataataccaagaaagccccacttggttggatgattgatgagaacattcg

SEQ ID NO: 871977 - DNA, 99 bp, Homo sapiens
aaagatcgcatagaggctgtgttatatgcaggaagaggatcacctagcccgggtagaagaggcaatcacccgtatgcttgtgtgtgccctgaaaactgc

SEQ ID NO: 871978 - DNA, 99 bp, Homo sapiens
cagaatcaccctgacactgtagatgacctgttccggctagccaccagggcagctgcaatgactctccgcacggtattattgtcattgcaagcactattg

SEQ ID NO: 871979 - DNA, 99 bp, Homo sapiens
ctttgatagagtttgttacagactgccttatgttttcctccatcaaattatcacccaggggcttcaataccttcactgcaacagtttctctgtcagctt

SEQ ID NO: 871980 - DNA, 100 bp, Homo sapiens
gatttgttaaggaaagtcttcatatcatccttgttggaaacctgctcaatctcatctggagggaaaaccaaataagagttacttggaatccttaacaaat

SEQ ID NO: 871981 - DNA, 99 bp, Homo sapiens
gccaactcagcctggttaagaacacctgttgaagaactagtgcaggcgtttggaggacataggacactctggccatgaacttgatgggaaacctgcttc

SEQ ID NO: 871982 - DNA, 101 bp, Homo sapiens
gggcaacaagagtgaaactccatctgcaggagctccctggtgggctgctgctgcttgcttctcttctagctgagcgatcaggctgctgaggtgggagatgt

SEQ ID NO: 871983 - DNA, 99 bp, Homo sapiens
ttctttttgaccatctagcgcagctcttctttacatcaaccatttatttcaaggtcctccagcagcctgacctgagtgggttagtgatccagagaaacc

SEQ ID NO: 871984 - DNA, 99 bp, Homo sapiens
cgtcagttggcacccctttgaagagaagattgtcagcagttcgggttcagtttggcaaagacttggtgcagatgtgacagcagttgaatttttaggtca

SEQ ID NO: 871985 - DNA, 99 bp, Homo sapiens
gcaccatgaggaagaagcagctgaagacggaggcagctccacactgtgaactaagtccatggctaatgaaacacagaaggttggtgccatccattttcc

SEQ ID NO: 871986 - DNA, 99 bp, Homo sapiens
cgccttcccggcgtctaggggagcgaaggctgaggtggcagcggcaggagagtccggccgcgacaggacgctttgcccgaagtttttacatacaaattc

SEQ ID NO: 871987 - DNA, 98 bp, Homo sapiens
tggcgtcccccgggggcccgtactgcacatcgtggtggtcggatttcaccacaagaagggctgccagagtaaagccaatcccagctgaaggaatcaag

SEQ ID NO: 871988 - DNA, 99 bp, Homo sapiens
taccttagaactctatggagttgaattccactatgcaaggattcgatacatttctcagactcaaggtttgccaggagaacagttgttaaatgtgggtac

SEQ ID NO: 871989 - DNA, 98 bp, Homo sapiens
accatggctcagccgggaactctgaacctcaataacgagcaattcaattaaaccccagctatatcagggcaatattgaggagagcagagttgtatgag

SEQ ID NO: 871990 - DNA, 99 bp, Homo sapiens
ggccctggtgctgatcctccagctgctgaccctctcatcgccctgagcaactggtggtttgtggcccacctgacagacctgctggaccactgcaagctc

SEQ ID NO: 871991 - DNA, 99 bp, Homo sapiens
cagcgtgaagacatcacatccagtgcacagatgttcagagaattccaacttcttacaagaacagatatttataagaaaacaaggcacattttggaatcc

SEQ ID NO: 871992 - DNA, 98 bp, Homo sapiens
agcagcattatgcagaaactgaagaaaatgagaagccgcatggatgaaaagacccagatgatgtggtaccagttggccaaagaagagcctggtgttgg

SEQ ID NO: 871993 - DNA, 98 bp, Homo sapiens
tcagccacatcagaacttgacaataaaacccacagtgagaatttgaaacagggtgcagcccggaatcccgaggatgtggaccgggagcggcgagaaca

SEQ ID NO: 871994 - DNA, 99 bp, Homo sapiens
aaatttttgggaaggtgcaaggggtgtttttccgtaagcatactcagtgtgtcccggcatggatatccggaacaacctcactaggttgcatgagctgga

SEQ ID NO: 871995 - DNA, 98 bp, Homo sapiens
ccagattggaggaggctggctctggtcttcgatgcacaggagtggccgttatggaacgcaggaaatggaagttccagtattaccgaaaatctctctac

SEQ ID NO: 871996 - DNA, 98 bp, Homo sapiens
agcgatgatgatgatgatgtcgctgtcaccgtggaccgagaccgcttcatggatgagttctttgagcagccaaaactggacaagccaaggcatctgta

SEQ ID NO: 871997 - DNA, 99 bp, Homo sapiens
aagctgaagatgctgccaaaagcataaccaatggcagtgatgatggagctcagccctccacctccacagaatgctatcttctttgagaagtcaaattgt

SEQ ID NO: 871998 - DNA, 99 bp, Homo sapiens
cacatggccacaccaaaagttcaaggcccatcattttgtcgtcctccacaggtgacttcatggtcatgacgattttcttcaatgtgagcaggcggtttg

SEQ ID NO: 871999 - DNA, 99 bp, Homo sapiens
ctacagagttggattccaactggtcatggtttcagttgcgatgcatgcaagtcggaggaaacgctagtgcagtctggaggcggctggtggaaatccaat

SEQ ID NO: 872000 - DNA, 98 bp, Homo sapiens
ggtgggcgacttcgcgggaccgtggcgcatgtgataacaatccatattcctcatttggagcaactctggtgagggatgatgagaagaatttatggagt

SEQ ID NO: 872001 - DNA, 100 bp, Homo sapiens
aagaaacattaagaacttggatcccattcacctgaggcacccgaagaagtctcttcttcgggtgcctcaggtgaatgggatccaagttcttaatgtttct

SEQ ID NO: 872002 - DNA, 99 bp, Homo sapiens
aattgacataaaacagttgatagcaaagaagataaagttgacagcagaggcagaggagggtgcatctgcccggaagactcagactcctgcagcccagcc

SEQ ID NO: 872003 - DNA, 99 bp, Homo sapiens
tcctggagcggcgcagccggagtggggccgtgagatatgtaactggttcatcaatgcccggcggcggcttctcccagacatgcttcggaaggatggcaa

SEQ ID NO: 872004 - DNA, 99 bp, Homo sapiens
agaaagtgagattaatgaaagaagtcatggaacactatgctgatcaagatgatctggttgtcatgtttactgaatgtgtttcctgaggttataggcggg

SEQ ID NO: 872005 - DNA, 98 bp, Homo sapiens
cttggaactgtggtccatggtaaagttttacagtgtgaagcctcagtttaggtcatctggtggttcagaacactcaacagagggctctgtatccttgg

SEQ ID NO: 872006 - DNA, 99 bp, Homo sapiens
gccatctgaaggttaagctgccatccaacggtctctagcatgctgagacccggagaagctgtttaaaggagggagagatgcaaactgaatccattttcc

SEQ ID NO: 872007 - DNA, 99 bp, Homo sapiens
aagaggcagctgcgtatttaaaaaaaaggtcacggatcgcctacagtgacgaagtacggaatgagctcctgggggatgatgggaattcctcagagaacc

SEQ ID NO: 872008 - DNA, 99 bp, Homo sapiens
aggaagaggacacacagagtattggtcctaaagtccagagacagagcactaattagagattttcctaggattcttaaaagcttatgttgagaagttttc

SEQ ID NO: 872009 - DNA, 99 bp, Homo sapiens
ttggattcataacctgctccatgcttgaaaacatggggattggaattcggtggtttgtcctgattgtagtgatgagattgctgtaaaaaaggacaatat

SEQ ID NO: 872010 - DNA, 99 bp, Homo sapiens
cacgctaactggttgaatctctccaccccttttccaggccccagtttaggggagcccactccctctttagtacgagaaaggatgtctctgactcggagg

SEQ ID NO: 872011 - DNA, 98 bp, Homo sapiens
tgctgccacgacagtgaataacagcactcctgattttggttttgggggccaaaagagacagttggaagatggagtactcgcttcccactcccaaaggg

SEQ ID NO: 872012 - DNA, 99 bp, Homo sapiens
gttgaggagcccccggactacagctgtccaggcagccatcttgtctggagacaagtctgagaatgttcaagatttgctgctcttggatgtcactcctct

SEQ ID NO: 872013 - DNA, 99 bp, Homo sapiens
acacttgcagaaaagagccgaggcctatttagtgctaatgactggcaatgtaaaaccagacagtgagcaagctgacattgcgaggatgctatataaaga

SEQ ID NO: 872014 - DNA, 99 bp, Homo sapiens
ccttggcctccctaaatgttggaattacagacatgggccactacacctggcgatctgtgtcttatacggttgatgtgatcgtgacactgggaggccttg

SEQ ID NO: 872015 - DNA, 99 bp, Homo sapiens
gagactgctcagtgagatgctgcttcattacagccaggaggactcttcggacggggacagagagctgatgaagatctctttgttgggcagctaaagagc

SEQ ID NO: 872016 - DNA, 99 bp, Homo sapiens
aattggtcattctcgctaacaactgcccagctttgagtttcattgtactgacaacctcagctggcatcatggaccatgaagaagcaagacgaaaacaca

SEQ ID NO: 872017 - DNA, 98 bp, Homo sapiens
accctgctcagaggactctatacagggacgtgatgctggagaattataggaacctggtctccctggactaagaaaaatggctttgtcagcccaacaga

SEQ ID NO: 872018 - DNA, 99 bp, Homo sapiens
gttaatggtctaatttatgatagtggtgaactatgacaatgtagtggacacaggttctgaaacagatgaggaagacaagcttcatattgctgaggatga

SEQ ID NO: 872019 - DNA, 99 bp, Homo sapiens
tcccggtcctggaagggcagcgcctggtggccctgaaaaagtttgtggcagtgctggccaagagcagccagacacagtctccaacgccaccaaagcctc

SEQ ID NO: 872020 - DNA, 99 bp, Homo sapiens
caaaatgggttagaattttattgcaaaacaaaagatttaaagaagaaatggctagaacagtttgaaatggctttcttcgatcctcagcaccaggggagt

SEQ ID NO: 872021 - DNA, 99 bp, Homo sapiens
tggggggcccttccgagcagcagacaggagcaaggtccctgctgctaagaattccaaactacaagggaaaaagttaaactcagctagatttccctgcct

SEQ ID NO: 872022 - DNA, 98 bp, Homo sapiens
aggcagtggcgcttgagttggtcgggggcagcggcagaggcggggtttcaccatgttgcccagactggtcttgaactcctgagcttaagcaatccacc

SEQ ID NO: 872023 - DNA, 98 bp, Homo sapiens
tccactcgccacccggctgctggcccacaagatccagtccccacaggagtgggaggcgatccaggccttgacgtgcacagccagagaacaacacatca

SEQ ID NO: 872024 - DNA, 100 bp, Homo sapiens
gcatggcacaccgaagacatggacctctatagcattaattatctccacccaaagtggagataattaatgctatagaggtccatgtcttcggtgtgccatg

SEQ ID NO: 872025 - DNA, 99 bp, Homo sapiens
cagtatgacaactatgggtccacagctgaggacattgtggagtggctgaagaagaatcatctgctgcagtttgctttagagtcaccagccaaatctcct

SEQ ID NO: 872026 - DNA, 99 bp, Homo sapiens
tcagatacatcctactcagatatggctgctggatcagagtggctgtgttactgcaacgtgccacagttctgcgacagtctacctcggtacgaaaccaca

SEQ ID NO: 872027 - DNA, 99 bp, Homo sapiens
gcacaagtatcagagtcgggagagctttctggatgatgtaaaccttattctggccaacagtgttaagtataatgatgagagtccggagtgttgtcatgt

SEQ ID NO: 872028 - DNA, 99 bp, Homo sapiens
gtgacaaagcaagactccatctcaagatcagaatctgggggaggtgaaggattattgtttcttcggccccgtccacgtgatttcccatctgaacctcga

SEQ ID NO: 872029 - DNA, 99 bp, Homo sapiens
taatttgacaggacatgctgagaaggtgggaatagaaaattttgagctcctgaaggtcctaggaactggagcttgatcatgatttaaaacatgctcacg

SEQ ID NO: 872030 - DNA, 99 bp, Homo sapiens
gatagtgaaaccagttctccagcgttggtttacaaagctacctccagtgttgacctttgaactctcaagatttgagtttaatcagtcccttgggcagcc

SEQ ID NO: 872031 - DNA, 99 bp, Homo sapiens
gggcgacagagcaagactccgtcttgtgtttatagctgagatggccctgagagatctggctccaaaatttatattgccggtcgcttttcagggtttcct

SEQ ID NO: 872032 - DNA, 99 bp, Homo sapiens
caggcatcatccgctatgcaattgggcgtgagtgcatctccatccacgttggccaggctggtgtccagattggcaatgcctgctgggagctctactgcc

SEQ ID NO: 872033 - DNA, 99 bp, Homo sapiens
agaaaatatggaaattgaggaaagagagagagcagaaaagaagaaacgggcaactaaaactccaatgttcaaaagaatgctgaaccgggagctgacaca

SEQ ID NO: 872034 - DNA, 99 bp, Homo sapiens
ctgagctcagacctgccaatttaccagagataattgataacaccctgtaacagctgaagcatgcttgagaagggaggataaaaactttcagaatgagca

SEQ ID NO: 872035 - DNA, 75 bp, Homo sapiens
aaagctgagtgtgatgaagatgcagaaaatgttggaacagctttgctgagccatcaaggtctaatggaagcatgg

SEQ ID NO: 872036 - DNA, 99 bp, Homo sapiens
ccaggacccagcactttcgggggcacacgggggcggatggacagtgggcagccgaaagaggaagctggcagccaaggcatacatgcccctgcgggcaaa

SEQ ID NO: 872037 - DNA, 98 bp, Homo sapiens
agcaccttccatggtgaggataagctcatcagcgtggaggacctgtggaaggcatggaagtcatcagaagctgcagaaccttggcctgaaaatgctac

SEQ ID NO: 872038 - DNA, 98 bp, Homo sapiens
gggaacaaacacttctggatgcatccgtgctgggactctggtgcccccaaccctgggcatcctcaggctttgaggagaatacacaggatttgaagtca

SEQ ID NO: 872039 - DNA, 99 bp, Homo sapiens
ggtccagctgctgcagcacacaccttgctaccgcaccgcagatgagcaaggcttttctctgtttccagtaatcggagcccctgcacaaaatgaaataaa

SEQ ID NO: 872040 - DNA, 113 bp, Homo sapiens
agaacttctctgatatcatccctcagcactgatgttctcatgggagcagtgccgtgtctgcatgctaatggcagcattagccgctgttgggcctcctaatcctcgggcagatc

SEQ ID NO: 872041 - DNA, 99 bp, Homo sapiens
atcaaactaagaccaaggtcaattgaagtagaaaatgactttctgccggtagaaaaggcaccatactggacataccttttatgtgcactgggacttttt

SEQ ID NO: 872042 - DNA, 98 bp, Homo sapiens
gttcaaaaactaagcatccagaggccctgagcagctttcagcactggagccgattacacctcaacaagaaggcaactgacaaacagccttatagcaag

SEQ ID NO: 872043 - DNA, 142 bp, Homo sapiens
taccaagcaagaacagctaaaatgaaagccatcattcatcttactcttcttgctgctggagctctggtggttactggcctcttggtcgtggtggttacatggttccatctctctgtgtttacagaaaggagagcaagaagag

SEQ ID NO: 872044 - DNA, 99 bp, Homo sapiens
tcagatccccgctctcctactcttggtattgcacggacacctatgaagaccagcagtggaggccctgccatttctgtgggctcaggtccctactggctc

SEQ ID NO: 872045 - DNA, 99 bp, Homo sapiens
gtccctggatctgcctgtggccattattaatctaaaagaatatgatccagatgatcatctgatagaagaggatgctgtcctcttccataatactattta

SEQ ID NO: 872046 - DNA, 100 bp, Homo sapiens
agctggtcagcctcattctcaaggaccctgtgcgctggccctcaagggactgatggttgagggccagcgcacagggtccttgagaatgaggctgaccagc

SEQ ID NO: 872047 - DNA, 98 bp, Homo sapiens
tgctggtccttctgtggcatcttctacaaacccatttcagaccaatgccagaggagcaacaggccaaaaggtgtgttttgctgacttcaagcatccct

SEQ ID NO: 872048 - DNA, 99 bp, Homo sapiens
gtgttcaccatcctggccccggaaggtgaccctggcaaagatgagagtgcacatttcgtcctgcctgaaggtccaggagcagatggccaactgccccaa

SEQ ID NO: 872049 - DNA, 98 bp, Homo sapiens
cccagggggctgtcgcccgaatgcaggaagaccgtgatgggagctgcagcacagtcgggggtgtaggttatgggggtttctcctgccccagtgaccgg

SEQ ID NO: 872050 - DNA, 99 bp, Homo sapiens
gccctagttccaccctggaaagcaaggacagtggaattatagtggtgaactatgacaatgtagtggacacaggttctgaaacagatgaggaagacaagc

SEQ ID NO: 872051 - DNA, 99 bp, Homo sapiens
ccagaatgctcttggtgctgttcctgctgctgcctatcttgagttctgcaaaagctcaggttaatccagatttagtacctcaagacaaactcttatgtg

SEQ ID NO: 872052 - DNA, 98 bp, Homo sapiens
gcggatctgatcaactaggcaacatcatgtccggatatgagttcatcaacaatgttgctaaagattatgtgcgactgatgaagtatggcgactctctc

SEQ ID NO: 872053 - DNA, 99 bp, Homo sapiens
gtggcagagcgagactccgtcaaaaaccatttgtgtttcaagaccatccgtgcaggctgaaatccactctttctctcttgttcctggtctgcagcagca

SEQ ID NO: 872054 - DNA, 99 bp, Homo sapiens
ctgagaatgcagccgtgtgacagtaactgaacattggtctaaagtctttccaaaaggtcaaggttcacaaggtcatttcttcagatagctccccagctg

SEQ ID NO: 872055 - DNA, 98 bp, Homo sapiens
aggggcatccaaatcttgcggcaacgcccccgggacatgcatcgtcccctggactctctcaaggaagcacttggagaatatttagatgggaagaagga

SEQ ID NO: 872056 - DNA, 99 bp, Homo sapiens
gatcacgacctccgcagggacaagaactgcgccaagagcctctctgtggtgctcatcggggactcaggcgtgggcaagagcaacctgctgtcgcgcttc

SEQ ID NO: 872057 - DNA, 99 bp, Homo sapiens
tttccagaagatgattccaacgccaccaattccaacctgaatttaagaagtgcaacatggccaggggctgcctctgctgcttgaagtacatgatgttcc

SEQ ID NO: 872058 - DNA, 99 bp, Homo sapiens
catttcaatcattttaggattgtcaaaaggaggattgaggaggatcagatcaataatggaggcaatggttcgagaacatcatcgaaaattaagaaagga

SEQ ID NO: 872059 - DNA, 98 bp, Homo sapiens
gattctagaggggtgacagcgaaactccatcctttctacgcttattggcagagtttctgcactcaaaagaattttgcatggaaggaagaatatgatac

SEQ ID NO: 872060 - DNA, 99 bp, Homo sapiens
atgacttccgttggactgatggcagcacactggatgaatcttgaagaagaattagatgaacttaaagtacatatatctattgataaggcagcaatacaa

SEQ ID NO: 872061 - DNA, 98 bp, Homo sapiens
ctgtttttgccaccacactccagcttgggtactgcttctccgagatggccccagtgtgtgcggtggttggagggattttggcacaggaaattgtgaag

SEQ ID NO: 872062 - DNA, 99 bp, Homo sapiens
gaagaaggcgcggtggcaggagctgacagagtgatgggaaacgcgtgagccaggccgagagatcccatgttagatctggatattcaagaattagccagt

SEQ ID NO: 872063 - DNA, 99 bp, Homo sapiens
agacgacttcgcagaggaggaggaggtgcaatccttcggttacaagcggtttggtcagaaatgtgaattccaggatgcctatgttctgttgagtgaaaa

SEQ ID NO: 872064 - DNA, 98 bp, Homo sapiens
atcaactgtcctgatgaattttgaggctaagacgtctgaagccaggccctttaatgattctactcatgctgagcccttgaatgattctactcacattt

SEQ ID NO: 872065 - DNA, 99 bp, Homo sapiens
cctttggagatgtttcaatcattatttacccaatgaagaatcacatgttcttcatcgcgataacgaagaaacctgagttcttcctcctcaaccagaaaa

SEQ ID NO: 872066 - DNA, 99 bp, Homo sapiens
ggtcgacgtgcagttcatggaaaatggccagcactgtcatcttcttggcgtaagtcattgacgctgcggtccagtgagatcatgtcacttgccaccatg

SEQ ID NO: 872067 - DNA, 99 bp, Homo sapiens
gtcttaatgtaccaacaaaggctactttagaacaacatagacgtttgtcctgaatgtggtcacctgaaacagaaacatgtcctttgtgcctactgctat

SEQ ID NO: 872068 - DNA, 99 bp, Homo sapiens
aagagaagaagatgaagaaacccagcttgatattgttgggatgtgtcttggtgagctagtcattaacccccaccagcagcacatggatgcattctattg

SEQ ID NO: 872069 - DNA, 99 bp, Homo sapiens
attctccaagaagtgttcggagagatggaagtttctagagttgtgaatacatacggaccacagactagacctgaaggaattccagggtcaggtcataaa

SEQ ID NO: 872070 - DNA, 99 bp, Homo sapiens
cacaaggctgactctttggactgctccagatttcttgtggaggccccccatgactgggatttagaggagaaatttgcctgtaatggtactgtgattgaa

SEQ ID NO: 872071 - DNA, 98 bp, Homo sapiens
tgtggagcacacattgaatgggccaaggaaaaatcgagcagaaagaatgtctttcaggtagacatagctgacattgagaatgaagagaaccgctactg

SEQ ID NO: 872072 - DNA, 98 bp, Homo sapiens
tgacctcggtttcctggacccattccgactcaggcggaagcccggctcgctgcaaaacgggcggcccgcgcggaggctcgcgagatccgcatgaagga

SEQ ID NO: 872073 - DNA, 99 bp, Homo sapiens
cacagtatcatactccagcaggccgaggttgaacagcagtgcctccttcaggcccagcagggcggtgcccacggaaaggaggaagatggtagcaccaaa

SEQ ID NO: 872074 - DNA, 99 bp, Homo sapiens
aaagccagcctggcatactttgaagatcgtcatggggctgaaacacttttccaggaaatctgccccaatgaagatttctgtccccctccaccaaatcct

SEQ ID NO: 872075 - DNA, 99 bp, Homo sapiens
ctcactgtggccaagtgctgggacccaacgccccgaagctacttcaccgtcccacggggaccgagacgtgcagctgtccaaggctctgtcctatgccct

SEQ ID NO: 872076 - DNA, 99 bp, Homo sapiens
ccagagcccaggtgcccagaggactttcttccagcttctgctgtccttctttgtggagagcaaggacaccagcagtgaaaacactgtggttcctccaga

SEQ ID NO: 872077 - DNA, 98 bp, Homo sapiens
gacaacagcccagacagcccggaactcaacaaagtgctgtcggaaaaggtaacagaagatggaactcgaaatcccaatgaaaaacctacccagcaaag

SEQ ID NO: 872078 - DNA, 98 bp, Homo sapiens
ggtcccgaagccccctgcaggaactctacaacccaatccagcctaactcagtatgaacagttgaaagcccatcagggaactggagcaggaatttcccc

SEQ ID NO: 872079 - DNA, 99 bp, Homo sapiens
agagaaccagtgcgtcattatcagagtcttctgaagaggagtctgatgatgaaatagcagataaggattctgaagtgagtgatttgttccctgtatata

SEQ ID NO: 872080 - DNA, 99 bp, Homo sapiens
atgcagtgacatgttgataaaaaatgatgttgccaccttccagagaagaggtacgagatgacaagacaaccataaagtgtgaaacctccccgccttcct

SEQ ID NO: 872081 - DNA, 99 bp, Homo sapiens
tggagccaccagcctctccttgcagggttggctgttccagctccaaagagaaggaggaaccttttccttctgcagcccctccccaccagcctcattcct

SEQ ID NO: 872082 - DNA, 99 bp, Homo sapiens
gctgttctccaagaggcccagagacatgctgaaacatcgaagaaggaagaatcctgctcaaaaatgaggtgaattaatacttgggcgctcaggaaccct

SEQ ID NO: 872083 - DNA, 99 bp, Homo sapiens
gctgtctccttctcttcctcagggctcccgtgtctgctcgccctccgacgctgctcagacttaattcagtgcacaaatgagatgaatgtgaacatccca

SEQ ID NO: 872084 - DNA, 98 bp, Homo sapiens
gccggctccctcccccgcgtccctgcgaccgccgcggcgaagatgatttgataatgggctgcattaaaagtaaagaaaacaaaagtccagccattaaa

SEQ ID NO: 872085 - DNA, 99 bp, Homo sapiens
ccacagttcctaccttatgagctcggttttcttatgcttataagagtggaacaggtaagaatgattgatgttggctgatattggagtgctcattcacat

SEQ ID NO: 872086 - DNA, 99 bp, Homo sapiens
ttccatctggggatggacaacctgcattggacccagctattgctgcagcatttgccaaggagacatccctcttagggcaagaatatcacggcatgggca

SEQ ID NO: 872087 - DNA, 99 bp, Homo sapiens
acacagtaatctcccttttgacgggtttgtcagactcccaggtcagagcttttaggcatacaagtaccctggctgtctggctcttgctgattgaattcc

SEQ ID NO: 872088 - DNA, 98 bp, Homo sapiens
tcgtcaacaaaaacaatgtgagatgtctccagcatttttacggacccaatcatgagcactgctttaatagggtgtgtcaaggatgccacaatgccatc

SEQ ID NO: 872089 - DNA, 99 bp, Homo sapiens
ctggtgagttccctggaagcagaaggcaagggcgtgtagtggcgctccggggagctggcaacgtcctcactagaagcagttccacatggctggggaggc

SEQ ID NO: 872090 - DNA, 101 bp, Homo sapiens
cacatacatagaaaaagtagttatcattgggttggaggttaactttcagctggagtcctttgattccagagaaagatctggaaaatcgggtcactcccacc

SEQ ID NO: 872091 - DNA, 99 bp, Homo sapiens
accattgacctcacctgcagcgggcacgtgtccatcttcgagttcgacgtcttcaccaggctctttcaggatgccccggaggcccagctagccccagac

SEQ ID NO: 872092 - DNA, 99 bp, Homo sapiens
ctgattatgcattgtttacccagtcagctgatggaatcctgaagtgggtaaaactgattgacaactttgaaggggaatatgactacgtgaccaatgagg

SEQ ID NO: 872093 - DNA, 99 bp, Homo sapiens
caaaaacttgtcaaaactcagcatgcttagcattcgagagaacaaaattaaacaactacctgctgaaattgcatgttggcagataaattgaacatgact

SEQ ID NO: 872094 - DNA, 99 bp, Homo sapiens
ggaaaacatcgtggccaacacggtcttgctgaaagccagggaagcttcctgcctgacacagctcacttcaagaagtgcacaatgtcagaacgtggaatt

SEQ ID NO: 872095 - DNA, 99 bp, Homo sapiens
ttcctttcctactgccctggaatgggtgttgctcttaggatgtatcccctcaaagtgttgcggagataggaacatgggagagaaacaatctgggtaaca

SEQ ID NO: 872096 - DNA, 99 bp, Homo sapiens
gggcccagtttatggcttccagtggaggcattttggggcagaatacagagatatggaatcaggaccgtataattgatgccggcccaaaaggaaattatt

SEQ ID NO: 872097 - DNA, 99 bp, Homo sapiens
aatcactcagcgcttctcgcacaagctaaagttgcagacaagatccagctcatcaataatatgctggacaaagtcaatgagatgattattggtggtgga

SEQ ID NO: 872098 - DNA, 99 bp, Homo sapiens
tttatcacatgacagctcatggtgatgatgttgatttcccaataggtgacttttttgaacgaaccattctgtgcaacagccttgtgtggagttgtgctg

SEQ ID NO: 872099 - DNA, 99 bp, Homo sapiens
gattgaagaagcatacatgacaaaatgtggccacagcttttggtgaaaaaccatacaagtgtcaaatttgcaatcagtcttttagaattaagaaaacat

SEQ ID NO: 872100 - DNA, 100 bp, Homo sapiens
tatggctgctctttaccaccgtcaaaccccggttatacttgcctccaatggcattgtactccaggacctgggactctgctgtccggcaaagagcagccat

SEQ ID NO: 872101 - DNA, 99 bp, Homo sapiens
tactataaagctttggaagatgcagatgagaaggttcagttggcaaaccagatatatgacttgggcccagcactagaagatttcagtcatctgccacca

SEQ ID NO: 872102 - DNA, 99 bp, Homo sapiens
ggaagtacatgtgtcgtatcatagttcattttatgtgggaggatgttcagcagcgcggcagagtcatgggggtgggatgtgtgtgggctgaaattccga

SEQ ID NO: 872103 - DNA, 98 bp, Homo sapiens
agggggaagggcctcaaagccagaaggcacacaagtctctgaattttgtctcaacactgctccagattactatgtcggaacagctggatttacctgtg

SEQ ID NO: 872104 - DNA, 99 bp, Homo sapiens
ggaaaacctccttatgctgatatacatccaatgagggagtcgtaagaaagcagtgggagttgaagtcattgtcaagtgcttgcgatcttttacaagaaa

SEQ ID NO: 872105 - DNA, 99 bp, Homo sapiens
tcaccacccctcctcaggcattctggacgaagcatgcacagacggagatcattgagtccctggatggctttgtatttgcactaaatcaggaaggaaaat

SEQ ID NO: 872106 - DNA, 98 bp, Homo sapiens
gaggagccggcattccaaccaggctcacggatgccaagaaatgagccgtcagactgctacagcattacctaccggtacctcgaagtgtccaccatccc

SEQ ID NO: 872107 - DNA, 99 bp, Homo sapiens
atctgaaaaagctgtggaaggctctggataaggaccagtacctgcccaggaaactggtgctggacgtcattgctcctccttatacctctgacttcgtgc

SEQ ID NO: 872108 - DNA, 98 bp, Homo sapiens
ttgccttccaccgtgattgtgagtttcctgaggccttccctagccatgcttcctgtatagtctgtggaacgatgagccctcgctgtgctaatctggcc

SEQ ID NO: 872109 - DNA, 99 bp, Homo sapiens
tatgcctgctaacatggataagcatgccctgaaaaagtatcgtcgagaagcctatcatcgctatcatggtgaacttacttcagattgtgcgggaccact

SEQ ID NO: 872110 - DNA, 99 bp, Homo sapiens
aagcctcccgggtggcttacagacgctgccagcatcgccgccgccaggatccacctctgatgttcagtgaagactaccagaaaagtctgctagagcagt

SEQ ID NO: 872111 - DNA, 99 bp, Homo sapiens
tttttgttccgtttgttcaagagaagacaaggtaggattttcccagaagggaatgtagtttcacaaagcagcttaaccccattgatggtgaacgggatt

SEQ ID NO: 872112 - DNA, 99 bp, Homo sapiens
ctctgggagcctagaatgcatcagtgcccttgtggcgaatggggctcacgtcgaatggtttcacccaaatatcactggtgtggaggcagaaaacctact

SEQ ID NO: 872113 - DNA, 99 bp, Homo sapiens
caattttgacacccgtaagcaacaacaattctggtttcctccggaatctcttgaattcttctacaggaaaggtggtggagacactgccacttgctgtgc

SEQ ID NO: 872114 - DNA, 98 bp, Homo sapiens
ccaggacctccaggggaacaatgaggcctacgcagagctcatcgtccttggaagtgctcctgtcctctcagctgtggccaccgtcggcatcacgattg

SEQ ID NO: 872115 - DNA, 99 bp, Homo sapiens
cacaacccggaggagcaggttgaaaagatccgatggcagcaccacttcgaccagcttcatcctcagacaggatttgaatttgttgaaatgagcagtcgt

SEQ ID NO: 872116 - DNA, 98 bp, Homo sapiens
cactaatcaccagaacaaaatgtgcagaccttccatggctattcacttttaatgtgaagttttatcctcctgatccttctcaattgactgaagatatc

SEQ ID NO: 872117 - DNA, 99 bp, Homo sapiens
agaatcttgtctttggcaaaggattccaagcaaagatcttccctgagagtcctgatggggagaatagctggtccaagaagtacccgtcgtgtgggggcc

SEQ ID NO: 872118 - DNA, 102 bp, Homo sapiens
aagtactgtaaattcctgtgcagaaggcatcgtcgtcttccggacagactatggtcagaatgattacggacctgaagccaaagaacaagatgcgctagtgga

SEQ ID NO: 872119 - DNA, 99 bp, Homo sapiens
actgctactggggccgtaactgccgcactcaggtgaaagctcaccacgccatgcgagaaccactgtctctgatcaacgtgcggaagaggaacgtggaat

SEQ ID NO: 872120 - DNA, 99 bp, Homo sapiens
ggagatcaagctggaacaggagttccgatcgacccggtaccaagaaggggagtgcccgcggcagttttcaatggttccagcaggtcaacacgggagaag

SEQ ID NO: 872121 - DNA, 99 bp, Homo sapiens
tggattgggaaagaccatggcagttcctgaagaattcttgtacaaccctttgaccagagtttatggagaacctcacagaagaccagaagttcaaaatgc

SEQ ID NO: 872122 - DNA, 99 bp, Homo sapiens
catcacgtttcttccattcactcactggaatattgacccttatttatccagaagattgatcatcatatgggttgtctagatgttgatggaatatatcga

SEQ ID NO: 872123 - DNA, 99 bp, Homo sapiens
gatacctacaatttggatacagataccatctcaaagggtaatcttccagacgaagttatacggaagcgtctcctcattgatggagatggtgctggagat

SEQ ID NO: 872124 - DNA, 99 bp, Homo sapiens
ctaaagacattgatcctgtccagcgctatgtcccactaaaggatcaacgtaacgtgagcatgaggttttccaatcagggtgctggtatagaaatctacc

SEQ ID NO: 872125 - DNA, 98 bp, Homo sapiens
gattttgtcagcttgtcgtcaaggtatgtgagactctgtgaagtagtcgaccacgttttcccgttgctgaaaagaagccattcttcagactttccctg

SEQ ID NO: 872126 - DNA, 99 bp, Homo sapiens
gcgcagaaggcttttttgtcctaaataaaagtaccacaattggaaggcatgaaaattcagaccttgttttacagacatgcacatgatggtgtccaagcc

SEQ ID NO: 872127 - DNA, 99 bp, Homo sapiens
gaagacgatctgcacttcgcattttggcattgacatttaattttagggtcctttatatagaagggagagtagaatgtttggaatggttttggaaaaaat

SEQ ID NO: 872128 - DNA, 99 bp, Homo sapiens
tgattgcctccagtggagatatcatcaaggctcaaactgtccaggttgctgaagttgaaccacagtcacagccacagccttccccagaacttctgcttc

SEQ ID NO: 872129 - DNA, 98 bp, Homo sapiens
gagacctggacaaaaagaaatacctggtgccttctgatctcacagccttggaatggatggctttggccaaccagttggcattcttggacgccctgcca

SEQ ID NO: 872130 - DNA, 99 bp, Homo sapiens
ccattcctggggctagtggtataccaggaaattctgttctactcgtcacaaatctcaatcctgatgattacaccagcggagccatgctcaccggtgagc

SEQ ID NO: 872131 - DNA, 99 bp, Homo sapiens
taattattacagcattagataatgtggaagccaggagatacgtagacagatgttttactgtgcctggctaactatagtcgagggggtgatggtcctatg

SEQ ID NO: 872132 - DNA, 99 bp, Homo sapiens
tcctggagctgtgaggagattcgggccgtcaccctgcctcccctgcgtcccgccaccggccgcttctgtcctcgcttgctaatctggacctgaactctg

SEQ ID NO: 872133 - DNA, 99 bp, Homo sapiens
ggagcacacattgaatgggccaaggaaaaatcgagcagaaagaatgtctttcagacttgtgtatgcggatacctgcttcagtaccatcaagttaaaagc

SEQ ID NO: 872134 - DNA, 99 bp, Homo sapiens
tgaagaaggcgttcgcaccggaaaatgtagcttcccggttaaggacactggggttgggaaatcaagcatcgtgtgtcgatttgtccaggatcactttga

SEQ ID NO: 872135 - DNA, 99 bp, Homo sapiens
tggctattggctctagcaggtgcaaggcaaatactctgggtcgcttataccaagttgaatatgccatggaagctattggacatgcaggcacctgtttgg

SEQ ID NO: 872136 - DNA, 98 bp, Homo sapiens
aggagccattatttatgtcatcaagaagaatgacgatgaggagaaggcagagcccccccaggctatgaatgccctgatgcggttgaaccagctgaagc

SEQ ID NO: 872137 - DNA, 98 bp, Homo sapiens
gtgagagatggaacccgaagaagaaaggattcgttacagccagagattggtatccagctcacatagaagacattgactacgaggaaggaaaagtactc

SEQ ID NO: 872138 - DNA, 99 bp, Homo sapiens
tattactgctcatgtcattgcactggttcatcttccttctcaacttacctgttgccacttggaatatatatcggtcacaagctacctaactaagaagtt

SEQ ID NO: 872139 - DNA, 99 bp, Homo sapiens
tgagaccatagccaaacccccaggctgttcacggaagaccaggatgtagatgagggacttgtctatgacactgtattcaagcacttcaaaagacataag

SEQ ID NO: 872140 - DNA, 100 bp, Homo sapiens
ggagagagagagggggactctgtgtgagggaaagaaaacaatttctcctgctctgcagcttctgttcagggcaccggcagaagctggaggaccagaccaa

SEQ ID NO: 872141 - DNA, 99 bp, Homo sapiens
gatggctcagtttcccacagctatgaatggtagtaaacctattgatggcaattttgctgactgtggaagtgactcatccaaactccatgccagctgtca

SEQ ID NO: 872142 - DNA, 99 bp, Homo sapiens
tatggagagcaacttgttcctgagctgtgcaaccaatcagagtccagtggagaaggaaaaagaagatgtccctgtggaaatgtccaatggtgaaccagg

SEQ ID NO: 872143 - DNA, 99 bp, Homo sapiens
aaaccatgtgctgaaatgtttgacgacactgatggtttgtattgctgacagacagaacgccttggaggctgagtggaggacggtgcaggcctctcgcag

SEQ ID NO: 872144 - DNA, 99 bp, Homo sapiens
aaagcactactggctattggaaatgttccagcaacagatagaaatgctttaagttcactctggggaaagctggcctctgaaatcttaatgcagaattgg

SEQ ID NO: 872145 - DNA, 99 bp, Homo sapiens
gtggctaaggacctcaacccaggagttaaaaagaaatgggacgtcggtcatcagatactgaagaagaaagcagaagcaagagaaaaaagaaacaccgta

SEQ ID NO: 872146 - DNA, 99 bp, Homo sapiens
atcctgtaggataagtcaaaggaggaatttgcctcttctacagatagagctgttaagggtatttgaagtataccatacaactgttttgaaaatccagcg

SEQ ID NO: 872147 - DNA, 99 bp, Homo sapiens
gctcggtgaatcagtccgtgatacaacgtaagacaaaaattcgacttgcttatcctccttttcccgtcagtacatacattttcttcaaaagccacacac

SEQ ID NO: 872148 - DNA, 99 bp, Homo sapiens
tagctcactacagcctgagctgtactgagctcgagggatcttcccgtctccgcctcctaagcagctgggactacaggttggtcctgcactttggtggtg

SEQ ID NO: 872149 - DNA, 99 bp, Homo sapiens
cctgagacagattgggaggtgtatctgagggagactgcaaatgctattgtcagtcagcaaactccacaaagggaggtggggaagacagggctccagcta

SEQ ID NO: 872150 - DNA, 99 bp, Homo sapiens
gacgctacagccacaggattggcccactttccccattcacacgtcatcacgtagacataaccaagaaacttcacccaaatcaagctggcctggattcaa

SEQ ID NO: 872151 - DNA, 99 bp, Homo sapiens
atataggaagttcacccactttttgtcatctccttcatgaaaaagtaccattttgctgcttaagattagacaaggtcacagagttgtcaagtgaaactc

SEQ ID NO: 872152 - DNA, 99 bp, Homo sapiens
ccagcactaccaggatgttttataccatgctaaatcacagaaactcggagcaagaagttatgaaatggaatggatggggatataatgattctaaattca

SEQ ID NO: 872153 - DNA, 99 bp, Homo sapiens
agtgatgtccaggaaggaggaggaataatatttatggagcatatattatggaacacaaaagctgatgtcctgaccactggagctggtaacccagtagga

SEQ ID NO: 872154 - DNA, 98 bp, Homo sapiens
cttagttcccaacttcaccttcaacttgggcttctcgggcaagttctatcatactggatggccaaccattggcgggactgatccaggatcacatggtt

SEQ ID NO: 872155 - DNA, 99 bp, Homo sapiens
caccagcggctgcaggactgggcacagcatgagatccaaaggcagggcaaggaaactggccacaagtggtggcagaagtgggatccaaagtagagcttc

SEQ ID NO: 872156 - DNA, 99 bp, Homo sapiens
ggaattcgcgctgctcgccgacaaggctgcacaacagggtgttccaatgaattcactcaggtttctctttgagggtcagagaattgctgataatcatac

SEQ ID NO: 872157 - DNA, 98 bp, Homo sapiens
tgcacctcgcccccagggcgtccctgctggccgcgctgctgtttgctgtccatcctgtgcacaccgagtgtgccgaaatagaactatttgtgaacaga

SEQ ID NO: 872158 - DNA, 98 bp, Homo sapiens
ggtaccagagccaagaccctcggcctcctcccccgccgccttcctgcagacgctctgctgttgcccgtattcaggagttcttcagacggagaaaagaa

SEQ ID NO: 872159 - DNA, 99 bp, Homo sapiens
gcgaagctggccgagcaggctgagcgatacgacgtaacggcacagccaacaagatgaacggagctttggatcactcagaccaaccagacccagatgcca

SEQ ID NO: 872160 - DNA, 99 bp, Homo sapiens
agtcctggtttgataatgggagcatctgcatgagaatggagatcctgggctgcccactgccaggcacggctgcctgtcctaatggcagcttccactgca

SEQ ID NO: 872161 - DNA, 99 bp, Homo sapiens
gattggacggttaattggtaggttggagttgagtctcacgttgaaacagaatgaagtgcttcctggagctaagaagttgattcaagtcagttgagacgc

SEQ ID NO: 872162 - DNA, 98 bp, Homo sapiens
tcttttatgaatggagcgtcaaactaaactggacagatacacaccatctcagcaaggagtggcattcaactctggagctaaacagagggttattcgga

SEQ ID NO: 872163 - DNA, 99 bp, Homo sapiens
cacttcctctcaggagcctagtggatgctcagatcagagacctgcagaggacctcaacatccgagtggaaagccatggattgcaaagatagaccagctt

SEQ ID NO: 872164 - DNA, 99 bp, Homo sapiens
cacagcgggactcttggcctgtccctcacatccgatgcaccctttttgtcagattatcaggatgagggttcagcttgttggtttagatgaggagagttc

SEQ ID NO: 872165 - DNA, 99 bp, Homo sapiens
tccagacttcactgtgaatgatgtcaaaatgtgtgtgggctcttgcagccaatgccggaacaggatttgctgttgctgagcctcaaatcgcaatgtttt

SEQ ID NO: 872166 - DNA, 98 bp, Homo sapiens
gattactacgacaccggcgaggaacttggcagatcagcttgaacgggtctttttacgacttggccatgctgaaacagatgaacaattacagaatatta

SEQ ID NO: 872167 - DNA, 99 bp, Homo sapiens
cggcgccacctggagagaggccgcgtcctgggcagaggttggtgcagcatgatagagctcaatttcaaggatgcatttgattcctttgagaggctaaaa

SEQ ID NO: 872168 - DNA, 99 bp, Homo sapiens
gggctgaataaagccagctggaagggactgcaagcaagaaggtgataaggcaagtttcctttggcaaatagagtttgagacgagaaccactgaagacgt

SEQ ID NO: 872169 - DNA, 99 bp, Homo sapiens
gtcctctttactgacagcctctcgcttctccttgctcatcatgtttccaaagcttcttaattcgttcatgactttgaaagctttcttcatatgccaagg

SEQ ID NO: 872170 - DNA, 99 bp, Homo sapiens
ccccatgaaccacgagacagatgtgaacttccagggcaagaacctggacaccgtgaaggagcctgtggtgctgaccgacacaaatcttgtgtatcctgc

SEQ ID NO: 872171 - DNA, 99 bp, Homo sapiens
cagaaacaaaatgtcaacaaattgatggacctcccagtgccaagtgtataagcgtgtccagaattggtgggtctcactgacttcaagaatgaagccgcg

SEQ ID NO: 872172 - DNA, 99 bp, Homo sapiens
tcaagaaagcctcagtgatcttggtgccatagagagtctccgggtccctggaaaggctaggcagctggaagagaaagaccgagtgctaaagaagcagga

SEQ ID NO: 872173 - DNA, 99 bp, Homo sapiens
gctgttctctgtgttaaaccaatcagttgcgaccttctcttaacaggtctgctcaccaggtggccagataccgcccacgtgcccccatcattgctgtga

SEQ ID NO: 872174 - DNA, 75 bp, Homo sapiens
gcccggccttccagcacccgccaacagaattcatacgaggaggagatgttaaagtaacccatcttgcaggacgac

SEQ ID NO: 872175 - DNA, 99 bp, Homo sapiens
gaaccagttccgatacagcacaatggtgaactgtcacccctacaactcagcttgcaaccagccctggccaccagtttccccacactgagctgaatatcg

SEQ ID NO: 872176 - DNA, 99 bp, Homo sapiens
cttctcttcaccagctcttcagatcaatatggtataacccggaaaaatcccagaacacctctttctgatctccagggcatgaatgctctaaatgaaaaa

SEQ ID NO: 872177 - DNA, 99 bp, Homo sapiens
gtggccagcgtgccaggtaaccgtcttccatctgggccgccatcccagggaaaaccttcctcaacatcacgccagctgaggttggtgtcctggttggca

SEQ ID NO: 872178 - DNA, 99 bp, Homo sapiens
caggtattgaacgggctgagcttttcatgatggttcctgctgacctggaaacatcttaaatggaaggatccatcaattaagggaacctttcactggtct

SEQ ID NO: 872179 - DNA, 99 bp, Homo sapiens
tagtactgagcttgatgaaagcagagataagagttgctcagtgttcaagaatactttgttcgcaaatccaatgcaaagaaaggcatgtttgccagtact

SEQ ID NO: 872180 - DNA, 99 bp, Homo sapiens
aagcctccgggatgtttttggcaaggacttaatttatacactttattattggaaatcttcaagttcaggaaagggtgatcagcccatgacctaaacctc

SEQ ID NO: 872181 - DNA, 99 bp, Homo sapiens
ctactgcagacacaactacggggttggtgagagcttcacagtgcagcggcgaggaaaactcaatgtgagtagtgacactgtccagcatggtgtggaagg

SEQ ID NO: 872182 - DNA, 98 bp, Homo sapiens
ataaatttggaagaacgtgccttcatgctgctgctgcaggagggcactcaaggagttgcccctggtcctgtaattggacttcaggcaccatctactgg

SEQ ID NO: 872183 - DNA, 99 bp, Homo sapiens
caaaagtgacaatgtacttttgggaatggaaggatctgttaagctcacaaaccgtggggaactgtgggtcagagactctccagcatccttggaagtggc

SEQ ID NO: 872184 - DNA, 99 bp, Homo sapiens
tttagttattgatgaagctcataaagctctcggaaactatgcttattgccagataatgtacaacggccagccaattaccaaaatggcctgtggggctga

SEQ ID NO: 872185 - DNA, 99 bp, Homo sapiens
agctggacaagaagattatgacagattacgccccctatcctatccgcaaacaaaaggtcccccttctgggaaagaccgagtgaagaaaggtggatccta

SEQ ID NO: 872186 - DNA, 99 bp, Homo sapiens
agaagaaataaatgaagtcaaaggaatacttgaaaacacttccaaaaaacctcggatcaattctcagctggtggcacaacaagtggcacaacagtatgc

SEQ ID NO: 872187 - DNA, 99 bp, Homo sapiens
ttcgaagttctatcagttctcgacggagatatttcacctgacttgattcaaggggtcttggctggccattaactgcagtcccagctactcaggaggctg

SEQ ID NO: 872188 - DNA, 99 bp, Homo sapiens
gaaaactgctttatggagtaaatgaaattgctgtaaaagtgccttctgtttttaagcttctaattaaagagttgatttatgaagactctatggatctaa

SEQ ID NO: 872189 - DNA, 99 bp, Homo sapiens
agctgaaataacccttgatcctcctcctaattgcagaacccctgaacagtgcccaagtgttgtctctttgttgtcagagagttacaaccctcatgtgcg

SEQ ID NO: 872190 - DNA, 100 bp, Homo sapiens
tttccgcccttctttgaccacatacagttccgatctgctgcatataactgcaccactgctgaagacatagtcgaaactggagacctccattagggcggaa

SEQ ID NO: 872191 - DNA, 98 bp, Homo sapiens
gtgatgtgatgctggagaactttgcacttgtggctacactaggacaaccctccatatgataagggagccttcagaatcgaaatcaactttccagcaga

SEQ ID NO: 872192 - DNA, 99 bp, Homo sapiens
gtagtgcccgccccacccgcatgctctttgtcactccccggcggcagcacgaaagtaccatggaacattattacagcagccagacgatcatgcagctac

SEQ ID NO: 872193 - DNA, 99 bp, Homo sapiens
aaaatccaagtccggctagtacgcgaattggagaaaaagttcagtgggaagcatgtcgtctttatcgctcaggtagagttggctttgtgggacacagct

SEQ ID NO: 872194 - DNA, 99 bp, Homo sapiens
gtttctttgtcatgtagccaagactggagaaacaataccacctgttcagaacattgcttacagaaatatttaaaaatgacacaaagaatatccatgaga

SEQ ID NO: 872195 - DNA, 98 bp, Homo sapiens
tgtgaacatcgaatcatggaatcccttgcatggctctcagcgatggatgactacagtgtgatcggccgctccctgttcaaaaaggaaaccaacatcca

SEQ ID NO: 872196 - DNA, 98 bp, Homo sapiens
gcacttcctggcaatgatagatacatcagtgtgggaagccaagcagatacaaaacttacccagattgaggatccaagagaacagtggaggcgagagca

SEQ ID NO: 872197 - DNA, 99 bp, Homo sapiens
ggagagggtgctggctgccgcgcggccgaggagaggcacatgatcatgcacaagcgcacccacaccggggagaagccttacgcctgcagccactgcgat

SEQ ID NO: 872198 - DNA, 99 bp, Homo sapiens
gtgaatgggaagtggttaaagcctgaacacagaaattcagtgccttgccaggatcccatcacagggtacagaatagtctattcgccatcagtagaaggt

SEQ ID NO: 872199 - DNA, 99 bp, Homo sapiens
agcctttgaaaaaatgtctgtcacatatgatgattccgttggagtagaagtgtccagcgacagcttctgggagaaatggaatctatttggaatttgcag

SEQ ID NO: 872200 - DNA, 99 bp, Homo sapiens
cctgcctggagcaacgaaaagagccctggaatgtgaagagacaggaggcagcagacggacatccaggaagatgacatttggaagagtcagtgacttggg

SEQ ID NO: 872201 - DNA, 99 bp, Homo sapiens
tcagcctcccgaggagctgggactacaggcatcagaacacaccatgatggctgtgacctaagaccctcaggaagccccggggtcatggcccagaagcac

SEQ ID NO: 872202 - DNA, 98 bp, Homo sapiens
cctccccagccacatggtacttgccgttggtggttgcctgacgaaaagctgcacttaatagaaatcactgtggatgcaggagatggacggtgatgagc

SEQ ID NO: 872203 - DNA, 99 bp, Homo sapiens
gtcgatttgtccttcactacagtgagttattctccccacctcagaagtaccagcttttggtgtatcatgcagattctctctttcatgataaggaatatc

SEQ ID NO: 872204 - DNA, 99 bp, Homo sapiens
gccgccggggacatgtctaaccccggaggccggaggaacgggcccgtcaagctgcgcctgacagaccggagagcaatggtgtgatctccgcacactgca

SEQ ID NO: 872205 - DNA, 99 bp, Homo sapiens
gtctgctcgggggtctacttcgagggtttggtgcacctcgatttggaggaagtagggcagggcccttatctggaaagaagtttggaaaccctggggaga

SEQ ID NO: 872206 - DNA, 100 bp, Homo sapiens
acagagccaaagtgttggaattacagactatctgttatagtccctgggtcaagacaacaatttttataccttcgtcgtggttcagaaaggagtctctgta

SEQ ID NO: 872207 - DNA, 99 bp, Homo sapiens
atttgctgttggatcgtttcatactttacgcttgtgtgataaaactgggatttgaggcttaagcaacttcttccggggaagagtgccagtgcagccact

SEQ ID NO: 872208 - DNA, 100 bp, Homo sapiens
tagaaaagctgcctctgcaaatgcccagccagctgtcccacataattcatggtttgagacccaggcagccagacagtcgatttgcagaggcagcttttct

SEQ ID NO: 872209 - DNA, 99 bp, Homo sapiens
ggaacatgtctgagtcggagctcggcaggaagtgggaccggtgtctggcggatgcggtcgtgaagataggttctgattggaactgattccatcccgaac

SEQ ID NO: 872210 - DNA, 99 bp, Homo sapiens
agtgtgcgaagatttccaatcatttctaaactgctgcattttttatcacctatgaatatgtgaagtggtttttgcatgctgattcatcttcatatttga

SEQ ID NO: 872211 - DNA, 99 bp, Homo sapiens
aacaatatcggcattctgtgctacgaagagagcaagcgagacattctgttcctctttgacggctcagccaatcttgtgggccagttccctgttgtccgt

SEQ ID NO: 872212 - DNA, 99 bp, Homo sapiens
cgaaatcttccagatccgcgtagtgaggaatcgtctccaccgtcatggggggcggagacctggtggttttacgcacgacgagctgctgaaggtgtggaa

SEQ ID NO: 872213 - DNA, 99 bp, Homo sapiens
gaggaggtgtcgcaggagcacatcgagaccgcttaccgcatctggctggagccctgcattcgcggcgtgtgcaggacggcccccaagttacatgaacta

SEQ ID NO: 872214 - DNA, 99 bp, Homo sapiens
ctccagcaaactccagcagacctccaaaaaattgttgacatcctctgttgccatctgccatggtggtcattcctctgtgtttgatggaactaaagaagc

SEQ ID NO: 872215 - DNA, 99 bp, Homo sapiens
cttatccctcgtgagaaaaagatctcgatacttgaggaaccttcaaaggcacttcgtggggtcacagagtgtgaacatggctacgcctcttcattcccg

SEQ ID NO: 872216 - DNA, 98 bp, Homo sapiens
aactctttgcggctggcacatgtctggttggatgaatacaaggtggtaaattcactccagcagcaacctcaggctgcatccccttcagtaccagagcc

SEQ ID NO: 872217 - DNA, 99 bp, Homo sapiens
cagagagggaagagattcagccagcacactcctcgcgagcaagggcctggggactcgggacaacaccctgatccgcatcatggtctcccgtagtgagtt

SEQ ID NO: 872218 - DNA, 99 bp, Homo sapiens
gcatggagaggggccgtggcccctgcagcggaaccggacccagtccctgagccgcccctacacccacaggtggcggctttgaaatacatcccatctgtc

SEQ ID NO: 872219 - DNA, 99 bp, Homo sapiens
aaaccaagaccacctcctgctctgggaccggaggagacatcggcctctgcaggcttgccgaagaagggaggttggagcaaaacgtcccactcactggag

SEQ ID NO: 872220 - DNA, 99 bp, Homo sapiens
tgaccattctttttcttctgcccagtatttgcagcagtaacagcacagggcctattccctggtggattccagtcaagtgtctacatttctgatttccat

SEQ ID NO: 872221 - DNA, 98 bp, Homo sapiens
gtaatgtttgaaacttaccagttttccggtgtatatgtagccatccaggcagttctgactttgtacgctcaaggtgtacccaggaaggatgtgggaaa

SEQ ID NO: 872222 - DNA, 99 bp, Homo sapiens
taccagtgtgtgaagctgaatgatggtcacttcatgcctgtcctgggatttggcacctatgcgcctgcagaggatttctctgcctcttccaaacttttc

SEQ ID NO: 872223 - DNA, 99 bp, Homo sapiens
cattcatttgagcatagcaaagccctatgagtttgtctctctggaatggctgcaaaagtggttggatgaatcaacacctaccaaacctattgataatca

SEQ ID NO: 872224 - DNA, 99 bp, Homo sapiens
gttccgatctgctgcatataactgcaccactgctgaagacatagtcttctgctgcctccgggccatgtcggtgggctgcttggcgttgaaggggtacgc

SEQ ID NO: 872225 - DNA, 99 bp, Homo sapiens
aagttgctgggttcgttttattcagcggcagtggtgctttcccgaatctcagaatgccgtgtacttctctgaagtaagatgatttgtcaaaaattctgt

SEQ ID NO: 872226 - DNA, 75 bp, Homo sapiens
gagtcgagagggctgagcggagagtgtggtcctcggcggctggaggtggaagttgatgggtcgaaactaaatgtg

SEQ ID NO: 872227 - DNA, 99 bp, Homo sapiens
ggctggctcagggctcttcccctctgtttttattctcaggagcagctaacaccctcagcccatcacaaaacaagactgcctcacacccccaggattaca

SEQ ID NO: 872228 - DNA, 99 bp, Homo sapiens
gtcatatggcatggacaatcacagtggtggtggtgggggtagcaggaattacatgaatgacagtcttcgaaccaatgtgtttgttcgatttcaaccaga

SEQ ID NO: 872229 - DNA, 99 bp, Homo sapiens
gaccctttgcaaatgttaatagaggaactaagcgtcttgtagaaggaactattaatccaggagaaacctgtttaatcattgaagatgttgtcaccagtg

SEQ ID NO: 872230 - DNA, 99 bp, Homo sapiens
atttcctgggccagcaggaccaggagggccacccccaccttttccagggaaatccctaagtcagccaacccctcctcccatgccaatcctttcacagtc

SEQ ID NO: 872231 - DNA, 100 bp, Homo sapiens
accatatgaaagcgtgatgaagggcagatgattctggaccagatgaagcctgaggagccttccagctctaagatagcaggataggagacttctaagattg

SEQ ID NO: 872232 - DNA, 99 bp, Homo sapiens
taaactcatccttaaaggggtcatactgctgatgtatcggcaagcagtgtaaacggaggacttggggaaaaaggaccacatagtccatcgaagaagagt

SEQ ID NO: 872233 - DNA, 99 bp, Homo sapiens
tgagcacgttcttccaagaaaccaacattcccaacagccaccaccaccaccagatggttttgtagtgcatccctgagcatgagcacagaatgaagcggc

SEQ ID NO: 872234 - DNA, 98 bp, Homo sapiens
tgcgctgtcccaaatccgctgttactatgagaaatgaagagctgcttttaaggaatgtatcctgtcaggtataatgtcagtgaatggcaagaaagttc

SEQ ID NO: 872235 - DNA, 99 bp, Homo sapiens
cggaaatatggcctcaatatgtgccgccagtgtttccgtcagtacgcgaaggatatcggtttcattaagggaagacatgtaaggaatttgcataagaca

SEQ ID NO: 872236 - DNA, 99 bp, Homo sapiens
cccaaaacgatgtgtcacagatccaaacgagccttttgtaatttgtcaaagcctctttaacagtgaacatttcaccttgcgcacctgctgcatgcaaaa

SEQ ID NO: 872237 - DNA, 99 bp, Homo sapiens
ctccggagtagctgggactacaggggttgtgtccactgtggtccccgactctgcccacaagctgttcatcgggggcttacccaactacctgaacgatga

SEQ ID NO: 872238 - DNA, 99 bp, Homo sapiens
caccattcgaacctgcagcaatccctttgagtttccaagtcaggatatgtgcctttcagctttaaagagaattgaagttgttgacctcctgtactggag

SEQ ID NO: 872239 - DNA, 99 bp, Homo sapiens
catgtgcaagaggatgatgccgcatttccagaaggctgcgactcagctgcgaggccacgccaaaattcttcttctgggtattctgaaaattattgaaag

SEQ ID NO: 872240 - DNA, 98 bp, Homo sapiens
gaggatccttaccaaatgtgagccagctgcggagcagtgcgtcagagtttcagaaaaagttggtgattcaaggaaagcacattgcaatgcattatagc

SEQ ID NO: 872241 - DNA, 99 bp, Homo sapiens
gaacactggaccatgccgcagccagcactcacacactgttgattacagacatagtgaaaccagtgcaacagctctgatggttgctgcaggacgtggctt

SEQ ID NO: 872242 - DNA, 99 bp, Homo sapiens
ggtggctcccaaattaccggaaaggactgttcttgaggtattcagggaagccctatggggcggatgacttcctgcctgtgctcatgtatgtgctggccc

SEQ ID NO: 872243 - DNA, 98 bp, Homo sapiens
gcaccaagtgcatcaaatacctgctgttcggatttaacttcatcttctggaagtcaatgaaaggattctattttgcaaagctgtattatgaagctaaa

SEQ ID NO: 872244 - DNA, 99 bp, Homo sapiens
ggggtgcggcccggcgtctcggcccttgcctgcgcgcctaccaggctcgaccccagcggatctgaaaagaacaattgctgtccttctggatgacatttt

SEQ ID NO: 872245 - DNA, 99 bp, Homo sapiens
ttccagcttgggaacaggctacttcgcttctagtgaggacgttgccagctccccggagcgccactacacgcccttgccttctgcttccagggaactcac

SEQ ID NO: 872246 - DNA, 98 bp, Homo sapiens
ggaaagtatgcaccagctgtcatcgtttgtcagaagaaagcagctggctcagaaaacaggcatttgtaaaggatgttcatgaagattcaataacagtt

SEQ ID NO: 872247 - DNA, 99 bp, Homo sapiens
ccaccaccacggagcctcttccagaaaagacacaggagagcctatatgagatcctgactccaaactccattcccaagggtttcatggacgggaagcagg

SEQ ID NO: 872248 - DNA, 99 bp, Homo sapiens
attgaccctattgatggaacaactaactttgtacatagtgcagtcattggagaaatcgatgaagaaacagattctgcgcttgatttggggaatattcga

SEQ ID NO: 872249 - DNA, 100 bp, Homo sapiens
gttcaactcaatagaagatgacgtttgccagctagtgtatgtggaaagagctgaagtgctcaaatctgaagattaatggaggggaaagttccagtcgcag

SEQ ID NO: 872250 - DNA, 99 bp, Homo sapiens
aatgacttcatgggatccctttcctttggagtttcggagctgatgaagatgccggccagtggatggctctgaagagtgttgtactctatgttatcctgg

SEQ ID NO: 872251 - DNA, 99 bp, Homo sapiens
cccaagccattcagggcctttgcctttgttacatttgcagatgatcagctgcaagctttcttcctggtggcagatgacatcatggattcatcccttacc

SEQ ID NO: 872252 - DNA, 98 bp, Homo sapiens
tgattatccatcttcgccaccaaaatgtgaaaggtgtagcagtcactcggcctacacccacagcatcgaccttgtgaacccagcgacctgactgcctt

SEQ ID NO: 872253 - DNA, 99 bp, Homo sapiens
acttcgaaacgtgataagaagcacctggatgagacatttgctacagcatcccacattaagtcaacgaaccctcggcctcaggaaagtcggacagtattc

SEQ ID NO: 872254 - DNA, 99 bp, Homo sapiens
ccagcctcaggcgtgcgcggacggtgtgcgggtccctgtgcgttttattgcgacctgccggtgggaactttgtctccgagtcggagcagcatggagcgg

SEQ ID NO: 872255 - DNA, 99 bp, Homo sapiens
catctccatcacccaccaacaacaccacaataatccacagccaagcttcttccagaccagctggtcttgcttctggagcatctcttggagcagaagact

SEQ ID NO: 872256 - DNA, 99 bp, Homo sapiens
ggaccggagtcagaaccctccgcagagtaaaggcacctgaatggacagaagaggacctcagccaactgacaagaagtatggttaagttcccaggaggga

SEQ ID NO: 872257 - DNA, 99 bp, Homo sapiens
gaggcatcattgtcgagcatgtggatataaaaaaggagttcatcgttgcccaaaatgcagactacaatttttgaccagcaaggagaaagctgaacataa

SEQ ID NO: 872258 - DNA, 99 bp, Homo sapiens
ggcgattccagagagcggcggaaaggataagcctcgacttagaagctaccgagttaccctaagaaaggttctcaacaggaggtgtgtagaagcggcggt

SEQ ID NO: 872259 - DNA, 98 bp, Homo sapiens
actgcttcctccacctgccgcggcgtctcgtggcccagctgcatctgctgcagtaccataacagcttgggggaaagaccatgaaaaagatgcttttga

SEQ ID NO: 872260 - DNA, 98 bp, Homo sapiens
gatgtgtcttccattctaacatccatacagggtttggagaacattgattaaggaagcattttcctgattgatgaaaaaaataactcagttatggccat

SEQ ID NO: 872261 - DNA, 99 bp, Homo sapiens
gcgccatcttcgaacttagacttccggaaggactttggcgagggatgcagcagtctcggccctggctgctctatgcagtgaatattacatgaaggagcc

SEQ ID NO: 872262 - DNA, 99 bp, Homo sapiens
cgaaaaattcaaagaatttgataaatgacaggcgaaaagtcaaaatgcctgcaattccagcacatggagtgaaaccagcagtgtgtgtagcagcagtga

SEQ ID NO: 872263 - DNA, 99 bp, Homo sapiens
gtactgtgatgttccaaggaagagctgaacttgatgcaagaagatcaaatagcaaaccaattggataatgcctgtcatttgtatacactctcgaaagtc

SEQ ID NO: 872264 - DNA, 99 bp, Homo sapiens
tcaaatccggaagtgctacttcagacaaccacaaggatgactgcttagcagtgtctgcaaaaacgaatcttttcctacaacctgttaactgactggact

SEQ ID NO: 872265 - DNA, 99 bp, Homo sapiens
caatgttggcttatacacctctggatgagaagagccttgctttattactcaattatcttcacgatttcctaaactgtcaacattaagactgcagagatt

SEQ ID NO: 872266 - DNA, 99 bp, Homo sapiens
cccagaccctctcctttccctttgagaccgtgaagagaaagatgcagctgatgtgggtaaagctggagctgaaagggaattccgaggcctcggtgactg

SEQ ID NO: 872267 - DNA, 99 bp, Homo sapiens
gcgtggacccgaaagccgctgggaaaaatgccatggacaatattaccaggcagaaccaattctacgatacccaagtcatcaaacaagaaaacgagtcag

SEQ ID NO: 872268 - DNA, 98 bp, Homo sapiens
tggagaatgaggacatgaataaagaccagatcttgctggaaaaagaagctgagctgctgatgaagaagcatttgaagataattctgaggagtacataa

SEQ ID NO: 872269 - DNA, 99 bp, Homo sapiens
cttcttcgagtatttgtagaagggcctgcttcggccttctgctcttctgttgtgtggtgaccctcaccagaggacagcttcatgctcttggacttccca

SEQ ID NO: 872270 - DNA, 99 bp, Homo sapiens
ggagactgacgatgtgttcgatgcattgatgttgaagtctcccacagtgaagggcctgatggaagcggatctcatagatcagaacatactggagcctgt

SEQ ID NO: 872271 - DNA, 99 bp, Homo sapiens
tggaaatgctttcttggacaaggacagcctcgggggtaacagcaagaccgccatggtggctactgtgagtcctgcagctgataactatgatgaaaccct

SEQ ID NO: 872272 - DNA, 99 bp, Homo sapiens
agaattcttcgaaacattggtacaatgaatacatttaagggctggagcattggatttgctaaaggagcttaagaatattcctatgaccctggaattact

SEQ ID NO: 872273 - DNA, 98 bp, Homo sapiens
aggacatgaacagaacatggccaagaaggatctgggggagcagccaggacgagcaaatggaacggttcaaagttgtggaacgagagaccaaaaccaaa

SEQ ID NO: 872274 - DNA, 99 bp, Homo sapiens
catcacacattgcgctgagccatatatgaaaagttcagactcttctaagatcatcctgaacttcacgtccctggacctgtaccgcagccgcctgtgctg

SEQ ID NO: 872275 - DNA, 99 bp, Homo sapiens
gcaagacctaaatgagcctcttgccaaagtgtcccttttaaaagacagttaaatctcacacagaaacagatgagaaacaaacagagagccgcaccatca

SEQ ID NO: 872276 - DNA, 99 bp, Homo sapiens
gactactgggcgcgggagtcctcaggacttgaagctgtcagcttccagtggtgtctgtagtgagagaaacagagtcccagttactgccagatgtgggag

SEQ ID NO: 872277 - DNA, 99 bp, Homo sapiens
tcctggaggcctgggaagccaacgaccacacgcagtcgcaatggaagaagagatcgccgcgctggtcattgacaatggctccggcatgtgcaaagctgg

SEQ ID NO: 872278 - DNA, 99 bp, Homo sapiens
cactttctccaccccagacttcaggactgagccccagcagtgtactaatggtcacttgatgtgcgctggctgttttatccacctactagcagatgcccg

SEQ ID NO: 872279 - DNA, 75 bp, Homo sapiens
gccaccgagagcgagctccgggccagccagacttccatggagtcactgattcatcactttaagttgtatactgag

SEQ ID NO: 872280 - DNA, 99 bp, Homo sapiens
gtggtgggaaacgtcctagtcaggaagaggacacacagagtattggtcctaaagtccagagacagagcactaattagtttcgagaggcccgtgccatga

SEQ ID NO: 872281 - DNA, 99 bp, Homo sapiens
agtaaagaacggaaggcaaatgattgtggcagtaaagaagtgtatgtggtcgttgaggacttccacatggagattggcacaggaccagactcaagacac

SEQ ID NO: 872282 - DNA, 99 bp, Homo sapiens
cagcaaacaggacctggctcttccctgaaattcctgagcagtgaagccagctgcttccattggtgggtcatttttgctgtcaccagcaacgttgccacg

SEQ ID NO: 872283 - DNA, 99 bp, Homo sapiens
acaagatggccgggctgccccgcaggatcatcaaggcgaacagctgcttggagaactacaagtgaagaaaagaaagcattagatcaggcaagtgaagag

SEQ ID NO: 872284 - DNA, 98 bp, Homo sapiens
ccattaccagttcctacagctccactcgaggcatctcacagtgctgtgctgtggctttcattgagaagctagacgcccagtctttgaatctaagtcag

SEQ ID NO: 872285 - DNA, 99 bp, Homo sapiens
ggtcatagtcatcataagtgatgaagacataggctcccacatagcataaaatgccagctgcccctttgctttataaggtgaatcagagccagaattttt

SEQ ID NO: 872286 - DNA, 99 bp, Homo sapiens
cttcatttgaggattccagaaatttcaaatattacaaccactcctcacacggacagtaataccccacttttattcgctataatttgcaagaaagagaaa

SEQ ID NO: 872287 - DNA, 98 bp, Homo sapiens
gggcatgtagctctccaggcttgcaagcgattaccaggtttaccattgcttgttcagagaacaattgcgagaactattgtgttacaagaaagcattgg

SEQ ID NO: 872288 - DNA, 99 bp, Homo sapiens
tggctccctactcttctaaggatcgctgtcctgacagaagagccaaactggcaagacgcagtcaagaacgggacaatcttggcatgttggtctggtcac

SEQ ID NO: 872289 - DNA, 100 bp, Homo sapiens
cctcgaagttagttcacataatccatggtatgtcagttgagtggctgtgttatttagaaactgctcagctacaaagcctgtaatcccagctactcaggag

SEQ ID NO: 872290 - DNA, 98 bp, Homo sapiens
gagaatggcagacgacaataagctcttcagggaggaattcaacatcgaccttcagaagatgcccttggggaagctgagcaaaaggcagatccaggccg

SEQ ID NO: 872291 - DNA, 99 bp, Homo sapiens
agcatggcctgggatctcagagatggccgccaagaacgagtcatgtttgacaaaattacatctcgaatccagaagctttgttatggactcaatatggat

SEQ ID NO: 872292 - DNA, 99 bp, Homo sapiens
tctcaaagcgcatattatgctacatgaaaaggaagaggcctgcgtggtatgaccttcctccaccgccctactcttctgacacggaatctctgaaccaag

SEQ ID NO: 872293 - DNA, 99 bp, Homo sapiens
catgtttctagtagcgcttagtgaatatgatcaagttctcgtggagtcagacaatgagtgcacttgcaggaaagacatggtgaagatttcaatggatat

SEQ ID NO: 872294 - DNA, 98 bp, Homo sapiens
tctgatcaagcggatccaagccatgattcccaagaggctgacccgcggctgattgagtccctctcccagatgctgtccatgggcttctctgatgaagg

SEQ ID NO: 872295 - DNA, 99 bp, Homo sapiens
aaaatggcgaagatcgccaagactcacgaaggcgaggattaaatccaccacacagggtgaaatctatctccatgacaacattcacacaacaggaaattg

SEQ ID NO: 872296 - DNA, 99 bp, Homo sapiens
tgggaggccggccggtgccagcacctttcggcttctgagacggcggcagcagcggcattcaggaaacaagtttcagccactaaggccgaagcagaaaag

SEQ ID NO: 872297 - DNA, 99 bp, Homo sapiens
tctcctttctgggcaaacgttccaaggtaaaactgccattcaatgcacaacggataatttcactgtctcgaaatgattttcagtccttgttgaaaatgc

SEQ ID NO: 872298 - DNA, 99 bp, Homo sapiens
ttcagttcgtcatggggctgtttggaaagacccaggagaagccgcccaaagaactgggattttatattggaagacatggatcttgctgccaacgagatc

SEQ ID NO: 872299 - DNA, 99 bp, Homo sapiens
atcatccgcttcactctgggtcagaaaaagatctctaggattcactccttctccagttgcacagccacacccttcagctggccttaatgttgactttga

SEQ ID NO: 872300 - DNA, 99 bp, Homo sapiens
agggctgcaaggtgggaagtgaagtcagtgcctcagttgctggttttgagactctgggatattcaacaccagctgtccatccagaggatagcttgttct

SEQ ID NO: 872301 - DNA, 99 bp, Homo sapiens
ccttgattttcatttagacacaccattctctgataataggcggggtttcaccatgttgcccagactggtcttgaactcctgagcttaagcaatccacct

SEQ ID NO: 872302 - DNA, 99 bp, Homo sapiens
caggtaatgaagctggccgaggtacttgcggaggacactacagccctcaaagtctcgtgggacacggacagcattctgtaattccagctactcaggagg

SEQ ID NO: 872303 - DNA, 99 bp, Homo sapiens
acgactatgaagctgcttctgatttttataggaagggagttgatttactcctagaaggtgttcaaggagcgtgaggatcatccccggagaggacgggag

SEQ ID NO: 872304 - DNA, 99 bp, Homo sapiens
tgccctccctgtgtctgctggaactgttggagccgcagtgcagcctaattttgacttcaggtgctttgtaacagagccagactggtttcctatctccca

SEQ ID NO: 872305 - DNA, 99 bp, Homo sapiens
ggttcttcgaaaactgaagcagatgttgaacaacaaggtggctgtacttttgatgatggtccaggggcctgtgattaccaccaggatctgtatgatgac

SEQ ID NO: 872306 - DNA, 100 bp, Homo sapiens
tgcgactcaaagctgcaaggcctgggacacaggaagctgccaggacttcattcatcatcatcttgcctcataaacagactgccgtgcagctttgagtcgc

SEQ ID NO: 872307 - DNA, 99 bp, Homo sapiens
ggacccactggccatagacttgaactcaacaccttcaaggtcaatatcttgaggtaagcaccattctaccatgtttcttccacgggggtagattcagat

SEQ ID NO: 872308 - DNA, 99 bp, Homo sapiens
gtccgagtaacggcgagagatctgggctggctggcaatctggcggtcctgggccgatcacggcgagggtgtagagctgtaatcccagtactttgggagg

SEQ ID NO: 872309 - DNA, 98 bp, Homo sapiens
gacacgctctgcttcgacaaggacgagttcatgaagtgaaacccttgtggaagatgaagaagatctctatgactgtgtttatggggaagatgaaggtg

SEQ ID NO: 872310 - DNA, 99 bp, Homo sapiens
aaaccacgactgtggttgagatcattcttcaagctgtgaaacaaggcttaaagactgtgccctgtccacggtgcctcctgcatgtcctgctgccctgag

SEQ ID NO: 872311 - DNA, 98 bp, Homo sapiens
tcccctccggaccatggccgacgacgacgtgctgttcgaggatgtgtacgagctgtgcgaggtgatcggaaaatagggccagatttgagtgtgtgaat

SEQ ID NO: 872312 - DNA, 99 bp, Homo sapiens
ggcagaagaactccaggcgcaagcgggatcttgtactctctgagccatgtgttcacatgtcatgtggaccagtatttaactgtggaaaccgcgggtggc

SEQ ID NO: 872313 - DNA, 99 bp, Homo sapiens
gcgggacaagaaaattcatgcgcttatggtgctgctatctggagtaatagctttcatggtgaacttatcaatttattggatcattgggaacacttcacc

SEQ ID NO: 872314 - DNA, 99 bp, Homo sapiens
tcaaagaaaaaccagtcggagccgagtctatcttcacactttggcagagagtatttgcaaactgattttcccagaggtccagcccagaatcaaatgcag

SEQ ID NO: 872315 - DNA, 98 bp, Homo sapiens
ggccaccttcgtgaacgcgctgcacctctacctgtggctctttctgctgggcctgcccttcaccctctacatggaggctctgtcggtggtgagcgacg

SEQ ID NO: 872316 - DNA, 98 bp, Homo sapiens
tcagttcttccagacgctttctgagagaatgggggcaggagctctagccatctgtgtgaaataaacagcgttgttgctcacacaaagcctgtttggta

SEQ ID NO: 872317 - DNA, 99 bp, Homo sapiens
gcaatgaatttgatccagaagaagatgaacctacccttgaggcatcgtggccacacttacagatgaaagaaatgacctgccgtgatatcgttaaagaag

SEQ ID NO: 872318 - DNA, 98 bp, Homo sapiens
tggagaggttaaagagacccgttcagagtcctacagtggcagtaatctatgccagcaattatgacaatgttagcagaccatgcagctcgtcagctgct

SEQ ID NO: 872319 - DNA, 99 bp, Homo sapiens
ccgactgttcgtttacatagaaataccgtctatgatcccatcgtcattcttcttgatgacataaataatggctccttcctgaaaggacagctcatcttc

SEQ ID NO: 872320 - DNA, 99 bp, Homo sapiens
ggcggctgaggaaagcaggaggaggtggcggcggcgggaagatggtgtgagatggcagacaggtttgcaggaaaccctcagaaagggggctggaggatt

SEQ ID NO: 872321 - DNA, 99 bp, Homo sapiens
tcaaccttgtgggatgtgaaaactctgttactgaaggataccagaaggccctattgatcaggggccagctataggaagagtacgcgttttagaagagca

SEQ ID NO: 872322 - DNA, 99 bp, Homo sapiens
ggagcatggcttggagcacttcctattccactggattgggaaagaccatggcaggatgatccgttggtgctgaatgagatcagagaagaccttcgagta

SEQ ID NO: 872323 - DNA, 99 bp, Homo sapiens
tagtaacacacgctacctctttctgggtgactatgtggacagaggctatttcagtatagagatccaggatgagaagactgataaaagaagaagctagct

SEQ ID NO: 872324 - DNA, 99 bp, Homo sapiens
cgagtctttataagccaaatggggttggttgctgtgattgcagtaaaactgcagtggataatctggatgccaatgtcatttccaagttccctttgagac

SEQ ID NO: 872325 - DNA, 99 bp, Homo sapiens
ccaataactcagtcactggctgcaacaggaccacagtcaagacgatcatagtcactggagccaggtgagaatttcaaggattatcgacttcatattgca

SEQ ID NO: 872326 - DNA, 127 bp, Homo sapiens
ggtgggatgccccgagcattgtgggcctcatcatcttcctcctgtgcaccctcttcatcaggtggtccattatggctgacatgcaaaatctggtagaaagattggagagggcagtgggccgcctgga

SEQ ID NO: 872327 - DNA, 98 bp, Homo sapiens
gaacatcttctggacctttgtccagaataactgtgtagaatacattgaggatgatgaggagcacgtggacattgagactgtagaagagctctcagagg

SEQ ID NO: 872328 - DNA, 98 bp, Homo sapiens
tgacgccgagagccagagagatgtcggatttcgacagtaacccgtttgccgacccggatctcaacaatcccttcaagaggctgaggggatctggcggt

SEQ ID NO: 872329 - DNA, 99 bp, Homo sapiens
ctaacatggtgaaaccccgtctctacaggcatgacagtctccccacaagcggagcactgcgaggaaaacgcactgcagtagcagtcattgcagagcagc

SEQ ID NO: 872330 - DNA, 98 bp, Homo sapiens
tgtattgtggcattcaaatcctagcactctgggagagggtttgaaagtattcttgaagggctgtttggacctgcattattaaaagatctcagtttatt

SEQ ID NO: 872331 - DNA, 123 bp, Homo sapiens
cattttacctttatgtatttacctacggagtcagattcctgaaaaaggatcaggagaaggtctggggaaaataatccagagatttccacagaaggactgggatgatacaccttttccacaggg

SEQ ID NO: 872332 - DNA, 99 bp, Homo sapiens
tgcagattatgtgcctggtgtgaagaaggtttatctacagctgatacagaaggcaataataaaacagtgctaaaatataaatgccatacaatgaagaag

SEQ ID NO: 872333 - DNA, 99 bp, Homo sapiens
ccgccgagtcgcgcggaggcggaggcttggggggccacctacagatgctcctgcagtggacacagcagaacaagtctatatctcttccctggcactgtt

SEQ ID NO: 872334 - DNA, 99 bp, Homo sapiens
ctcttggaactgtatgcagcagatcaggggaaacagcttgaatcccttgaccttactgatgagaaaaagacttaattcagtgcacaaatgagatgaatg

SEQ ID NO: 872335 - DNA, 98 bp, Homo sapiens
agatgttcctgctccttctacatctgcagataaagtggagaggtggcccacaaactctttaacaacttgaaataaatgtgtggacttaattcacccca

SEQ ID NO: 872336 - DNA, 99 bp, Homo sapiens
ctggggttccctcctccgtttctgtatccccacgaggttggggtgactcagtgggaacgccatctgagcggggcatgacctatgacgcactccacgttt

SEQ ID NO: 872337 - DNA, 99 bp, Homo sapiens
aagagaggcaccgctggaacactaatgaggttaaaaaagctccttgaacaagaaaaggcttatcaagcccgcaaagaaaaggaaaatgctaaacgactc

SEQ ID NO: 872338 - DNA, 99 bp, Homo sapiens
ttcacggagcacttcaacaacatgtcctactgattgagaggatccagaatccagatctctggaatagctaccaggcaaagaaaaaaactatggatgcca

SEQ ID NO: 872339 - DNA, 98 bp, Homo sapiens
gaagatccttcaggtgctggaaaggaatgaggagttacagagggccgagaaggacaggatcagggatgttctgttcttgaaggactgtgtaggcccag

SEQ ID NO: 872340 - DNA, 98 bp, Homo sapiens
acaatggcatttacagaaagagtcaacagcagtggcaacaggagaggagttcattacttcggaagtggtacaatttaatgatacaaaataaggatgac

SEQ ID NO: 872341 - DNA, 99 bp, Homo sapiens
cttaaggaacttacgcacttaaaataattgggcagaagagaagcagtgaaggagtgcagaggcatcacctgaaaggttggtgttcgaggaagagacatt

SEQ ID NO: 872342 - DNA, 99 bp, Homo sapiens
ggtcagggtacttctagactctccattaatatcgacttccattttaagcaccagtctgcacaatcctgtttaggtgtaaccccaggcatgcgaatatcc

SEQ ID NO: 872343 - DNA, 105 bp, Homo sapiens
cgcatctccccgacaaacaccacggcgcgccagctgcggcttgctgcggaacttcttcccgctcgggcgtgtgggctgcggaattctcgtggtgtttgtcgggga

SEQ ID NO: 872344 - DNA, 99 bp, Homo sapiens
tattattgcccagagcagatgaaactggatggcagcggaggaggagaaagagatggacctcccggactcggcctcgagggtcttctgcggccgcatcct

SEQ ID NO: 872345 - DNA, 99 bp, Homo sapiens
gttctgcacatgtatcccagaactccaaagacacatcccttccatgtgcgtccagtgaagagcaacatcgggtcataggtgagcatcttggctgatgga

SEQ ID NO: 872346 - DNA, 118 bp, Homo sapiens
atcctcagcctctgcactggagaagaagcaaggacagctcaggacacgtccaaatatggttgacaatgacacaccagttactctgggagtatatcttaccaagaaggaacagaaaaaa

SEQ ID NO: 872347 - DNA, 99 bp, Homo sapiens
tcttctcatttaaaagctcacctgaggactcacactgaatacagtcgttttgaagctaaaatacatgatttacgggagcagatgatgaatagtagtatt

SEQ ID NO: 872348 - DNA, 99 bp, Homo sapiens
gtgaaaatggccatactgcccaaggacagccagtagaggtgacttcatgttttctgcggatcgtttggtaggtgggggcttttcattttcatttcattg

SEQ ID NO: 872349 - DNA, 98 bp, Homo sapiens
tgtgttcgggagtccttggaactgtggtccatggtaaagttttacagaatttcagaatgcatggatagtgaagctgagaccgtcatgcagctccgaaa

SEQ ID NO: 872350 - DNA, 99 bp, Homo sapiens
atctcggccagttcggatccccccagggattcccccaggagtgcccagcgtctcgcccttttgcccaggctagagtgcagtggtgcggtcatggttcac

SEQ ID NO: 872351 - DNA, 99 bp, Homo sapiens
ttcatagagctggactattggaaggaggctgatccgatagagtaatacctaattatatcaccatgagatggcaaaacggaatgtcagatctgtagactt

SEQ ID NO: 872352 - DNA, 99 bp, Homo sapiens
aacccgcgctgcagggaacagcggggcaaacagcctatatgaacccaatagcaatggcgagatcaaggggtccaatccagtcttcagggccaacaatac

SEQ ID NO: 872353 - DNA, 99 bp, Homo sapiens
ttgaagaaaacatcggttggatggataagaattttgataaaatcagagtgtggctgcaaagtgaaaagcttgaacgtccagccgccgcagggaatgacg

SEQ ID NO: 872354 - DNA, 99 bp, Homo sapiens
aacagggaagcagccctcaaggccagcggagtcttcagcacccccacaagcatgcagcatgtcccaaattaccatacaacaaggagacaagcccttctt

SEQ ID NO: 872355 - DNA, 98 bp, Homo sapiens
tctcacccaattactctgctcagtggaggccatagtggagtttgactaccaggcccagcacgatgatgagctgacgatcagcgtgggtgaaatcatca

SEQ ID NO: 872356 - DNA, 99 bp, Homo sapiens
gagagggtgctggctgccgcgcggccgaggtgacttcatggtcatgacgattttcttcaatgtgagcaggcggtttggctatgttgcctttcaaaacta

SEQ ID NO: 872357 - DNA, 99 bp, Homo sapiens
ttcaaagtaaaatcagtttaatttcagaaaaggcaagatgatgatgaatgaagtcctggcagcttcctgtgtcccaggccttgtagaaataaatgagac

SEQ ID NO: 872358 - DNA, 98 bp, Homo sapiens
gaaaatcattctgccttattacgccgtctccaagatgtagctaatgaccgtggttcccactgagccagaagtcattggatctgtgtcactttctttgc

SEQ ID NO: 872359 - DNA, 99 bp, Homo sapiens
tgaccaactgcttgttctcaccgatcttcttgtgtcaccatgctattatgcatagaaagcaggagtggttgaagatccctgtgtgggggcggactgtcc

SEQ ID NO: 872360 - DNA, 99 bp, Homo sapiens
ttgctgatatgcatgcatgtaccgaccttctgaacaaggccaacacctatgcagtggccagaagaatcacctgggaacgtgtaaaagaagcagatttgg

SEQ ID NO: 872361 - DNA, 98 bp, Homo sapiens
ccccaagaagaccattcagatgggatctttccggatcaatccagatggcagccagtcagtggtggagggttatgtggtccgaatcagtggtgggaacg

SEQ ID NO: 872362 - DNA, 99 bp, Homo sapiens
tggataacactaagtttagatctcatgagggagatgtcctttgcttctcagatgtaaatgcactttaagtttgttattcaacagtgaaaatgagtcata

SEQ ID NO: 872363 - DNA, 99 bp, Homo sapiens
ctacctttgcatgttccaggagcacaagaatcatagcaccgtgacagtggaggaggccaaggccgagaaggagtgatgatgacagcctcttcatctatg

SEQ ID NO: 872364 - DNA, 99 bp, Homo sapiens
agggaaggactgcattaatggtttcaaacgcgatcacaatggttgtcggacctgtcagtgcataaacaatgactatgctcagctgtgtaacatccccgt

SEQ ID NO: 872365 - DNA, 99 bp, Homo sapiens
ttagttttgaggacactgaagccacccaggtgtaccccaagctgtacttgtcacctcgaattgagcagaccctctttgcaagttcagtgcttaacctga

SEQ ID NO: 872366 - DNA, 75 bp, Homo sapiens
gtcatgcaataaatgttctggttttaaaaaatacatatctggttttgacttgtgcaccatggacaattttgctga

SEQ ID NO: 872367 - DNA, 99 bp, Homo sapiens
accacgccggtgatcatagccatccagaccttctgctaccagaaaaccttctccaccagaatccagctcacgctggatcttgatgctggtgtaagtgaa

SEQ ID NO: 872368 - DNA, 99 bp, Homo sapiens
atgagaaccctacttgcctaaatgaggaatgtctttcctaccatctaaaatacgaaggtttctggctgggtagttttgcagaagtgcaaagtcaagtct

SEQ ID NO: 872369 - DNA, 99 bp, Homo sapiens
aggggtgctgacttttccatctccagtgacctctggtctttgggctgtctgctttatgaaatgttttcaggcaccagttagaagacaaatgaaagctaa

SEQ ID NO: 872370 - DNA, 99 bp, Homo sapiens
tcagccgcaagtacccgtccatcatagtcaactgcgtggaagagaaggtgaactgcgccaggccactgtggccatgatgaacaggaaggatgagctgga

SEQ ID NO: 872371 - DNA, 98 bp, Homo sapiens
tttaactaatcctgaggacttcatccggtcaccatctacctattcttcaaatgaaatgacctccaccttcaacccccgagaatgtaaactgtccaagc

SEQ ID NO: 872372 - DNA, 99 bp, Homo sapiens
cgacggtcacccgaatcgcagggagtcgccgctggagaggggctcggcgcccggcggggactgcagcaaagatttctgaagacgtctttctagaaatga

SEQ ID NO: 872373 - DNA, 99 bp, Homo sapiens
attagaagaacaagaaagactccacctactatggagcatgcaatgatgctacctgttctgacccatcatatccgctaccaccaatgcctaatgcatttg

SEQ ID NO: 872374 - DNA, 99 bp, Homo sapiens
agtatgcacttaatgtccctgttggaatgttgcatcagcaggtagaagaacatgaaaaaatcaagcaagagatgaccatggaatataagcaggagttga

SEQ ID NO: 872375 - DNA, 99 bp, Homo sapiens
aacccttgatcctcctcctaattgcaggtatgaaccctctcgtgagatgaaaagtcagtggacagctgtctgggtgaaaatctcttccagttggattgg

SEQ ID NO: 872376 - DNA, 100 bp, Homo sapiens
aacgtccgtatcatcaagaacagaacaggccctatggggcatacctatggctttaaggtatgccccatagggcctgttctgttcttgatgatacggacgt

SEQ ID NO: 872377 - DNA, 99 bp, Homo sapiens
ctgttgcagtgctttcattgaagtgttcttcgttccctcagcaatatgattccatatcagcagcgacagcttcctgtgtgactgccagctgaagtggct

SEQ ID NO: 872378 - DNA, 99 bp, Homo sapiens
gtcgtacgttgaaggactttgctgggttcttagatattattaccaggttagagaggggtggcctggggtgcttcatgagaaatgtcttcctggatctgc

SEQ ID NO: 872379 - DNA, 99 bp, Homo sapiens
cccctacctgcccctggagctggggttggagcagctgtttcaggagctggctggagaggctgaaactgccgccaaccggatctgtaaggtgctggctgt

SEQ ID NO: 872380 - DNA, 99 bp, Homo sapiens
gaagttcacctgcacatcttgttttccctaacatcaagaatggtacttaaagctttcaccaaaacacccagaatcaaatactgctggaatggacatctt

SEQ ID NO: 872381 - DNA, 98 bp, Homo sapiens
tcgagccgtatctcctcagaggatcaggcgtgtgtccagttctggaaggatgataaagactatgctttaaaacaaatagaaggaactgggatctctat

SEQ ID NO: 872382 - DNA, 99 bp, Homo sapiens
taaagcctggaatagaacttggcacaattacatgatgcttctcgtcagtgcctcgcaggatggtaaacttatcatctgggacagctacaccaccaacaa

SEQ ID NO: 872383 - DNA, 99 bp, Homo sapiens
acagaagaaaaggagaaaatagtctgggtcagatttgaaaatgcagatttaaatgcaccatatgaaggcggagtatggaaagttagagtggacctacct

SEQ ID NO: 872384 - DNA, 99 bp, Homo sapiens
ccgagaccgtgaccgagagcgtgaccgagagcgcgaatatcgtcatcgttagaagagcacagcaatggaggaaacagctatatgggaacaacatacagt

SEQ ID NO: 872385 - DNA, 99 bp, Homo sapiens
cttgggttggacagtatgtagcttggacaggatacggccagtgtctggggtgagtgtggtcagcacttcacagtcacttgtagttagcatttgcaaagt

SEQ ID NO: 872386 - DNA, 99 bp, Homo sapiens
ctccggtacactctgcggagcatccgttactgcaatcctggattgggttgtagagttcctgcagggggcttcgggaccccttccggcagcagatgtcca

SEQ ID NO: 872387 - DNA, 99 bp, Homo sapiens
gagcacatgaccatccagctcctttaccatttcactctgtgttacttcctctacaccagtcatctggtatttcctcattctttcaaatactgaatgatc

SEQ ID NO: 872388 - DNA, 99 bp, Homo sapiens
tgaagattgtgaagcaatagcctaagggtgtcttttatgaataatcaaaagcagcaaaagccaacgctatcaggccagcgttttaaaactagaaaaaga

SEQ ID NO: 872389 - DNA, 99 bp, Homo sapiens
caagaggttgtgtatttctcggctgctgatcacgaaccggagagcaaggttgaggacctagaagaatcccttaggatgaagctgagtcttaccaaggta

SEQ ID NO: 872390 - DNA, 99 bp, Homo sapiens
tacttttggagtgtttggaagtaaattcagagactttagaagacagctttccatcgacactaggccctttagaccagcctctgaagggaatcctagcga

SEQ ID NO: 872391 - DNA, 99 bp, Homo sapiens
gttgttcgaagctattgtgggcatggaatccacaagctttttcatacagctcccaatgtaccccactatgctagaaaccacccctactcctaatccccc

SEQ ID NO: 872392 - DNA, 99 bp, Homo sapiens
tgcggcgcgctgctggacgaagagctctcctccttcttcctcaactatctcgctgacacgcagttgctctaggtcgtaaccagcctttgaaaaaggaga

SEQ ID NO: 872393 - DNA, 99 bp, Homo sapiens
gatgaagacaaggccttccagtttggaagtatcgaaggatgatcgcagtgatgtggagagcagctcagaggaagaagatgtgaccacctgcacaaaaag

SEQ ID NO: 872394 - DNA, 99 bp, Homo sapiens
tttggctttgctctctcttctgccatctgataataggagcctcacagtctactcagagaaaaataaaagaaggcaaaatgagtcctccccatttccatg

SEQ ID NO: 872395 - DNA, 99 bp, Homo sapiens
agcagcagaaaatcattgccctgcagagtggtttacaagctggtgtgggtacgccacgctgcatcacgtcattgacaagtccacagaagaccggatgga

SEQ ID NO: 872396 - DNA, 99 bp, Homo sapiens
gctaaaggcagttccttcccaatggcaactatgtttggatgttggatctacactttctcaagcactgtgatcttcaaatagacggggtttcaccgtgtt

SEQ ID NO: 872397 - DNA, 99 bp, Homo sapiens
tgaaaatgaaagaaagtccacatttccaaaagtccaaggcttggtgctaacagtggtttgcacatcatcatctttgatgaaattgatgccatctgcaag

SEQ ID NO: 872398 - DNA, 99 bp, Homo sapiens
ctggtgatgaaggcctacagggacactataaagatattgcaactgggtgccagcgagatttcagattcctgtaaacctctaaagaaaaggagtcgcgcc

SEQ ID NO: 872399 - DNA, 98 bp, Homo sapiens
acctgcagttgctctacactttcaggttaatttggagtggcccctggagtcagtttcctacaccatccgaggccccacccagcacgagctacagcctc

SEQ ID NO: 872400 - DNA, 98 bp, Homo sapiens
ttaccgtatgcagtcccccaggatacagggtcaaaggagagcacaaccatcgcagttggaagcccatggggcagcaaaagatacagatattgtggatg

SEQ ID NO: 872401 - DNA, 100 bp, Homo sapiens
ggatgcagagagagtcggagagaacgacggttacatggaaccatatgagtgcatcatatggttccatgtaaccgtcgttctctccgactctctctgcatc

SEQ ID NO: 872402 - DNA, 123 bp, Homo sapiens
ggttctccatacccgtgacctggggatcgctacggaccttaaaatacccgcaacagccccttcgtcccaattattcattttggacctggagaaagttcttcagaagatgctgtcatgatgaat

SEQ ID NO: 872403 - DNA, 99 bp, Homo sapiens
ctcgcataatgggaagagtagaaactttttcttctaaagccatctctcatgtcctctgcaatatcaagatatccacaggaagctgctgcatgtagtggt

SEQ ID NO: 872404 - DNA, 99 bp, Homo sapiens
ttcagctcggatccttgcttttaaatgccctaataccccctttttttccaaggtgtcctttaaaacttgaagcatgctccggtaggccgtgtctgcgat

SEQ ID NO: 872405 - DNA, 99 bp, Homo sapiens
gtctgagcgctccctggcgcgattcgtcaggaagaagtttttgctgaggtggatgttggtctgcccacttaactgccgcctctcttgagtctctcagaa

SEQ ID NO: 872406 - DNA, 99 bp, Homo sapiens
tggccgagcaggcggagcgctacgacgacatggcctccgctatgaaggcggtatgaatcctaggacccagaataaggattctctagaggacagtgtttc

SEQ ID NO: 872407 - DNA, 100 bp, Homo sapiens
gagaaggttcgaggcctacagaacctagcctaccatatccatggccgatactcatccagccccagctgataggctaggttctgtaggcctcgaaccttct

SEQ ID NO: 872408 - DNA, 99 bp, Homo sapiens
ggcaacatggcaaaaccccgtctctggtgtatctctacccagtgactgggagaggggtccctgtgacctcctaactcccactgcagctcctctggcttg

SEQ ID NO: 872409 - DNA, 99 bp, Homo sapiens
aaccagggaccctctgcccctagaataagaacatactagaagtcccttctgctaggacaacgagaacaatccatttcacagatgaagaaacagactcag

SEQ ID NO: 872410 - DNA, 99 bp, Homo sapiens
ctcccaaagtgctggaattacagcctatccctcggccagatcctgtgcataataatgaagaaacacatgatcaagtgctgaaaaccagattggaagaaa

SEQ ID NO: 872411 - DNA, 99 bp, Homo sapiens
agagtggacgagcacgacttcagcatgagacccgccttcggagttatttgctggtataaaggatggagaaagcctgcagctctttgaacaaagttctcg

SEQ ID NO: 872412 - DNA, 99 bp, Homo sapiens
caccagtgaagatgaggaagtctgggggccgagaccacacaggtacaggtttgcagattccgccagcagcacagcaagctctacagatgagtggctctt

SEQ ID NO: 872413 - DNA, 99 bp, Homo sapiens
aaaaacattgaagacgtcattgcccagggtgccttcttcatcccctacctcgtcttcctctttacctgtggcattcctgtcttccttctggagacagca

SEQ ID NO: 872414 - DNA, 99 bp, Homo sapiens
tgtcttcccaccgtggagacctcatcacggagccctttctgccaaaatagcagaccccacgttagctgaaatgggaaaaaacttgaaggaggcagtgaa

SEQ ID NO: 872415 - DNA, 99 bp, Homo sapiens
ggagccgctgggctcggaggactcggagtcggagggcttggagttccaggtgttgggggccttggagagctccaggcccggattcgaacttacaatcag

SEQ ID NO: 872416 - DNA, 99 bp, Homo sapiens
aattcacaggcaggtcccctgaaactgggtcggcaggacggtggtggagcccgagagagtaagactttgaccccgacgcaggcttcagtgattgccgcg

SEQ ID NO: 872417 - DNA, 98 bp, Homo sapiens
gcaggttccctctccccggccccagctctggacgctcaccccagtgcaacgccctgagtgacggaaagagctccgcaaagctgtcatggaccacgttt

SEQ ID NO: 872418 - DNA, 99 bp, Homo sapiens
gccaaatggacgggactattaaggtgtaacacagagagtgagtggtaccaaatccatgagaacatcatcaaaaagctgaatgcacgttataacttgact

SEQ ID NO: 872419 - DNA, 99 bp, Homo sapiens
tctgctaccagaagaagtgtcgggtacgcctgcattacacctggcgggagctctggtcagattgaagccttcagctgactgtggcccttttcgaggtct

SEQ ID NO: 872420 - DNA, 99 bp, Homo sapiens
gttgttccgttgcgagctgcagctgcgatctctgtggtaggcccagaacaagttgaaatcatcgcagaaggataaagttcgtcagtttatgatcttcac

SEQ ID NO: 872421 - DNA, 113 bp, Homo sapiens
ccgcccggggactacagcacgacccccggcggcacgctcttcagcaccaccccgggaggttgaagtaggatctacaaatgtccgaataggaagcacgatttttggagagcggg

SEQ ID NO: 872422 - DNA, 98 bp, Homo sapiens
cttgtgaaacctcctagtagaaaaagttcttgggacaaacttcatttgttttctggatatgccgcagaaggatccgtgccagaagcaagcctgtgaga

SEQ ID NO: 872423 - DNA, 99 bp, Homo sapiens
atgacgtcctcctgcactgggctcctgtagaggaggctggagattccacccaaatcctcttctccaagaagtcacgtgaactggaaatttcagtttatt

SEQ ID NO: 872424 - DNA, 99 bp, Homo sapiens
cgatcatcctggggacctggtacatgaactcccccactggaaaggattctgaaagaaatgaagtcagccctcagaaatgaagttgactgcctgctggct

SEQ ID NO: 872425 - DNA, 99 bp, Homo sapiens
ttaccagatcctgctgaccagttttccgcacatggagaaccacagttgctttgagcacatgcaccacatacctgcggagccagcaccgctctttgacct

SEQ ID NO: 872426 - DNA, 99 bp, Homo sapiens
gggttttggaatcgtgataccagaggatgcctctttcacatgggtgtgaaaggacactgacatgtccagtaggatctttcgctgctcaacacgccgaac

SEQ ID NO: 872427 - DNA, 99 bp, Homo sapiens
gatgaagctgcagaaccaacgaggtggccgaatcttccttcaggatatcaaggtggttccacgagtgtttgggcgcatggtgggtaaaagccgggaggc

SEQ ID NO: 872428 - DNA, 98 bp, Homo sapiens
gagttttaccggccgggaacagacgggtacctgtgtgacaaggtcgtccctgggaacagggttaccatcatgggcatctactccatcaagaagtttgg

SEQ ID NO: 872429 - DNA, 99 bp, Homo sapiens
ggatgtcggcgaagagttcaaccaggtgtaaagggtcaagtttttgatcagaatggaaatccattacccaatgtaattgtggaagtccaagacagaaaa

SEQ ID NO: 872430 - DNA, 99 bp, Homo sapiens
gaggaagtaaagacgggtgtgagagatgggtgtcactctgttatccaacatggagcgcagtgacagatgtaatcatagctcactgaagccttgactcct

SEQ ID NO: 872431 - DNA, 99 bp, Homo sapiens
accaggccctcaagtccctgatggcctcagaggaggagggatcaagcatgaattgcaagcaaactgctacgaggaggtcaaggaccgctgcaccctggc

SEQ ID NO: 872432 - DNA, 99 bp, Homo sapiens
cagagcatctcccaacatgacggcctgcttcagcagagtgagcaggatctaagcctttcccacgttatggttataaaccctccccaccgaatggatgtg

SEQ ID NO: 872433 - DNA, 99 bp, Homo sapiens
gaaggtgatgcccaagatggaccagtcagattgttcgatatggtgagattccagctgaattaagggcggcggccactgaccaccggcaggagctaattg

SEQ ID NO: 872434 - DNA, 99 bp, Homo sapiens
ctggagagcctgttggagaaacacaaagagaaggcctttgagccctacttagagattttggaagtatactccacaaaagccaagaattatgtaaatgga

SEQ ID NO: 872435 - DNA, 99 bp, Homo sapiens
ctggagctggacgtgaggagtgtcacttccgtcaggagagggaagaagaggaccgagaagtagcagctgctgtccgggcctccgtggccgcacagcagc

SEQ ID NO: 872436 - DNA, 99 bp, Homo sapiens
cgtcatccgcatcaacaagatgttgtcctgtgctggggctgacagctgctgaatcgagtgttcaacatcatgagggaaaagaatccagatatggttgct

SEQ ID NO: 872437 - DNA, 98 bp, Homo sapiens
ttcttcatgctttttcttctcaccatttctggccaaaactacaaacaagacttcgcagggatttgtcttggctgttactatgacacgggaagcaattg

SEQ ID NO: 872438 - DNA, 98 bp, Homo sapiens
ttccttcttagaagacttgactggtcttacattgctgcatcaagaaacccaagctgctgaggagtgtgctgaaaaacaaggccaaattgaacgagtca

SEQ ID NO: 872439 - DNA, 99 bp, Homo sapiens
gcttggatccttgtgggcatgatccataatcggtttcaaggtttcgtctaaggaaaaaaacatggaagaatcctggcactgtctttttggattatcata

SEQ ID NO: 872440 - DNA, 99 bp, Homo sapiens
gaaaacctctcaccccgtcgttgcctccacttggcccgtccatagagccagccgtgctggtatagaggactctaagaagtggggcatgctgtttctggt

SEQ ID NO: 872441 - DNA, 99 bp, Homo sapiens
ttctgctggtatacagctacatccaggagagaatgctgacagtcctgcagtccctcctcctatgtctccatcctccaaatctgtgagcactccaagtga

SEQ ID NO: 872442 - DNA, 99 bp, Homo sapiens
ttcttttgtaaatctctttcgttttaacaaagacatgcacatgatggtgtccaagccagaacagtgggtaaagccaatggctgtagcaggagccaatca

SEQ ID NO: 872443 - DNA, 98 bp, Homo sapiens
gacgatctgcacttcgcattttggcattgacatttaattttagggtcctttatatagaagggagagtaggtccagtggcactgcaggtcccggatgat

SEQ ID NO: 872444 - DNA, 98 bp, Homo sapiens
ctactcagtctgttctccactcctcatgagtctaacgtgaagacattttgctccaagaatatcctagccatccttggcttctcctctatcatagctgt

SEQ ID NO: 872445 - DNA, 99 bp, Homo sapiens
ggaggacatctgggggccacaaatgctccttctcctggagacgcaactcaagggtctccgtctctccaccgggggcttcatccttccagggaggagaag

SEQ ID NO: 872446 - DNA, 99 bp, Homo sapiens
ctgggccacccctcctttcaggtcaaggtgtttccccccgggccggcctgccgtgacgatcacagccctgccgtctcaggtcacggttttggattctgc

SEQ ID NO: 872447 - DNA, 99 bp, Homo sapiens
aaccaccaaaagtccattatgaaactggtaagttctcttctacgctgtatgagactggtggctgtgatatgtcacttgtgaattttgaaccagcagcaa

SEQ ID NO: 872448 - DNA, 99 bp, Homo sapiens
ggatcttcttcactgcctctggcatggatgaggttgatgctatgaaactgggagtaaaggaaatgaagaaggcatacaagcaagtgaagatcgaccaga

SEQ ID NO: 872449 - DNA, 99 bp, Homo sapiens
ctgtatctaaaaaagcaggaggcaagaaaggggcccggaaatccaaggcactgaacttaccttcaactacaacctagaatgtcttgggaatggaaagac

SEQ ID NO: 872450 - DNA, 99 bp, Homo sapiens
caagtacgctgcccagctggacgtcaagagctgaactggagaatgtgtctggggcgctgaacgaggctgagtccaaaaccatccgtcttagcaaggagc

SEQ ID NO: 872451 - DNA, 99 bp, Homo sapiens
agaacaacagctgggtcttcatgagacagagaacagacaaaagttttcctaatgcctacaacactgccatggttcggcggtcaggcctacagcgacgtg

SEQ ID NO: 872452 - DNA, 99 bp, Homo sapiens
cacgactactagaaggggaggggagtggaaaggctctcagtgaaaaaggttcttgctggtgtgaaatgactgagtacaaactggtggtggttggagcag

SEQ ID NO: 872453 - DNA, 99 bp, Homo sapiens
cctgagtagctgggaccacagggtgatgaattagaagacaatggaaagaatttctacgaatctgatgatgatcagaaggaaaagactgacaaaaagaag

SEQ ID NO: 872454 - DNA, 99 bp, Homo sapiens
aatcagatttgaaaatgaaagtaatcctcagagccagaaagaaaacgccagaaatcagtttctgatccagtggaggacaagaaagagcaggagtctgat

SEQ ID NO: 872455 - DNA, 99 bp, Homo sapiens
ctggtcttaactcttctgaattacactgcaagctgaacttcgggtaacttcagccacattttcttttatcaccctctccacagggtccctgagcatgac

SEQ ID NO: 872456 - DNA, 99 bp, Homo sapiens
gaccatgtatttgtggcttaaactcttggcatttggctttgcctttctggacacagaagtatttgtgacaggcttcccagctggcgtgtatgttgtaaa

SEQ ID NO: 872457 - DNA, 99 bp, Homo sapiens
aaccacaaatatacaacaaggccattttctcaaacgagagtcagcctttaacggtttaagaattgtttaagctgcatcaatggagcacatacagggagc

SEQ ID NO: 872458 - DNA, 99 bp, Homo sapiens
cagtgactgaagcgcccgtccattccaaggttttgctgttactgctcagtgtagtcacaccttgaataagaaatggaaaaccttgggatgttgataaag

SEQ ID NO: 872459 - DNA, 103 bp, Homo sapiens
gtcaaaggatgctgagtccggagcgcctagcccttcactcgactcatcttcgtccagatactcgtagtccggtagggctaggcgctccggactcagcatcctt

SEQ ID NO: 872460 - DNA, 99 bp, Homo sapiens
accactggcaataaagtttttggtgccctgaagggagctgtggatggaggcttgtctatccctcacagcaatggattaaactgcttctttaaatttctt

SEQ ID NO: 872461 - DNA, 99 bp, Homo sapiens
ctccagcctggtggtgccctgtccttgcaaaagcagatggaacatgctaaccagcagactggcttctccgactcaacacctggatttcattagcatcat

SEQ ID NO: 872462 - DNA, 98 bp, Homo sapiens
ctgtctggagcaaataaaagagccctgcaatttgaagatacatgagacagcagccaaacccccaggatgacgtcatgatgccccagcgggtgaggctg

SEQ ID NO: 872463 - DNA, 98 bp, Homo sapiens
tagctctcagcggctgcgaagtctgtaaacctggtggccaagcccgatgagagaaagggaaagttaaggatgctggagcagaacaatggatttctctt

SEQ ID NO: 872464 - DNA, 98 bp, Homo sapiens
ttgagattcctcggcgggtaggcagcggtgctgggcatgctcagtgggcaggacccgttagagtggcgataatatatttggtctgcggcctgtcgatt

SEQ ID NO: 872465 - DNA, 99 bp, Homo sapiens
aagaagaaaacttcgaaggcttaattacatgctatgggaaaacttcctggaaccagaatggcagcgttaaaagccaagtataccttgctgcatgacgcc

SEQ ID NO: 872466 - DNA, 98 bp, Homo sapiens
caggcgtacgaggatgtgctggagcggtacaaaggtactccaaagattcaggtttactcacgtcatccagcagagaatggaaagtcaaatttcctgaa

SEQ ID NO: 872467 - DNA, 99 bp, Homo sapiens
cagaacgcagatcagaggtagtcggacctttcccgctggcgcgcagcctcagctagaacccttaggagaaatcttgagagtggacagcaattgtgaaga

SEQ ID NO: 872468 - DNA, 98 bp, Homo sapiens
ggccccagaccgtgctgatcttcgatgagctctcggattccttatgcagagtggccgacttggctccttcctcagagaagcttcctgttatgtacctt

SEQ ID NO: 872469 - DNA, 99 bp, Homo sapiens
ctctgcagggctctgatcaagcggatccaagccatgattcccaaggacacacacctcctctacgtactggcagctgccaacctgtatgcccagatgcat

SEQ ID NO: 872470 - DNA, 99 bp, Homo sapiens
ccgggtgtccctgtacctgcagctgctgcagctgctgcacagaaattaatgcgaacagacagacttgagcctgtggacatctctacagcaatgagtgaa

SEQ ID NO: 872471 - DNA, 99 bp, Homo sapiens
gccaagatgatgtgcggggcgccctccgccacgcagccggccaccgccgagacccagcacatcgccgaccaggtggagattctggacgcaaagacaagg

SEQ ID NO: 872472 - DNA, 99 bp, Homo sapiens
agtgacgagaggagacttccttgcttctttggagaatgatatcaaaccatgcacgatctgattttctggagagatgtgaagaagactgggtttgtcttt

SEQ ID NO: 872473 - DNA, 99 bp, Homo sapiens
aggtagcaacgctgtggactggtgatgacaggctcttcagctccctgcaagtgaccgggcctggggaacaggaacgaatgatcacacactttgaaaggt

SEQ ID NO: 872474 - DNA, 99 bp, Homo sapiens
acagcattggatttagcagatccatctgccaaagcagtgcttactgctctggacttattggacaaaatgttgacattcaacccacacaagaggattgaa

SEQ ID NO: 872475 - DNA, 99 bp, Homo sapiens
tgggaatccataaaatcaggcactgctcttgaaaaccctgtactcctcaacaagttcctcctcttgacatttgcagagccagcaccgctctttgacctt

SEQ ID NO: 872476 - DNA, 99 bp, Homo sapiens
agagaacaaacctctggtcctttagatctgttgccacctactgtgggaactttggtttctgagtcccttcaacatgatcctgggaggaatcgtggtggt

SEQ ID NO: 872477 - DNA, 99 bp, Homo sapiens
ggagctgtggataacgggaggtgaatttccatgtcaacatagtcctgcaatggcaccagcatgatatcattgatcattcctcccaaagaccagatttca

SEQ ID NO: 872478 - DNA, 98 bp, Homo sapiens
ttttttctaatggctattcaagatggatagctcccagttgatccattgtcgggagcttgtggcacatcacctttctactctgcagtcttccctgcctc

SEQ ID NO: 872479 - DNA, 99 bp, Homo sapiens
cttccggcggccgaagacactgcgactccggagacagcccaaatatcctcggaagagcgctcccaggagaaacaagtgtctactatgaaccatcctgta

SEQ ID NO: 872480 - DNA, 99 bp, Homo sapiens
ctcacctggggtatggagaggaaggaagagattttgatgcaattacagatcctataatgaaagccaaaatggtggcccttaaaggtataaataaagtga

SEQ ID NO: 872481 - DNA, 99 bp, Homo sapiens
tctgagaagtgaggagcccctccgcccggcagctgccccgtctgagaaatccgagtgatggtggacctgtgcaacagcaccaagggcatctgcctcaca

SEQ ID NO: 872482 - DNA, 98 bp, Homo sapiens
gccaacctggatggagagaccaacctgaagcggcggcaggtggtccgcggcttctcggagcttggaatgaaagctactggttgattttaaagtgcctg

SEQ ID NO: 872483 - DNA, 99 bp, Homo sapiens
agatggatgctacttcctattctacttgatgattccctgaatcagatccgtaagctccagaggtctctggatgaagagaaagaaagaaatgaaaactta

SEQ ID NO: 872484 - DNA, 99 bp, Homo sapiens
ggcacatacatcatactcatctccggtctggtaaatgggtagcagctggagggaatgtagcttgatgtcatcagacaagacataggacgaaatatcagg

SEQ ID NO: 872485 - DNA, 98 bp, Homo sapiens
ccgcagcaccgagtccgaggtctacgacgacggcaccaacaccttcttctgaatctccggcctgtgaaactgtgaggggattcggccaagacgtcctc

SEQ ID NO: 872486 - DNA, 98 bp, Homo sapiens
tcccatttcgcccctcgcgtccggagtccccgtggccagcacctgttcttcccggagcctatcagcaaagccattcccaaggctatggctacatgcac

SEQ ID NO: 872487 - DNA, 99 bp, Homo sapiens
tggacactgcacagcagaatttatataggaatgtgatgttagagaactacagaaacctggccttcctgggactcagtctcctttgaggatgtggccgtg

SEQ ID NO: 872488 - DNA, 99 bp, Homo sapiens
gcaccagtcgtgcatgttcttggtgaagtcggccagcctgagcaagcggaggacctacgccggcctggtgtactaatggtcacttgatgtgcgctggct

SEQ ID NO: 872489 - DNA, 98 bp, Homo sapiens
tgccatcatggagggttatccagcacctggaggatacctgctacctaggcacagagctttggcctgctggatcccaaactctgctacctgctggatgg

SEQ ID NO: 872490 - DNA, 99 bp, Homo sapiens
gatagtggaaagaaaccatgtgctgaaatgtttgacgacactgatggtttggcactactgcagtcttcagttaagcaacaagtagaagctattgaaaaa

SEQ ID NO: 872491 - DNA, 99 bp, Homo sapiens
aagcattggttctccagttaaggttggaaagatggatgctacttcctattctaaccgctgccatgaagggggtcagtcctacaagattggtgacacctg

SEQ ID NO: 872492 - DNA, 98 bp, Homo sapiens
ggaagctctggaggtcacgcgagtcttcttgaagaagctcaaccagaggagccgggggacagtcattttgtttactcattcagccctgttgcaggtcc

SEQ ID NO: 872493 - DNA, 99 bp, Homo sapiens
agatgctatagtctggtatcaaaagaaggccatttcataattctgaatcatgtctgataacggagaactggaagataagcctccagcacctcctgtgcg

SEQ ID NO: 872494 - DNA, 99 bp, Homo sapiens
gatattctggtggggagatgaacccaacctagtgggtgtaatacatcatgaactgcaggatggactcaccctgtcacccaggttggactgcactggcct

SEQ ID NO: 872495 - DNA, 99 bp, Homo sapiens
gaggaatgcaacttcaaggtcaagatggtggacgagcttaagagaggcttgacacagcccgtggaggaccagggggtctccacccagctactcgcgccc

SEQ ID NO: 872496 - DNA, 99 bp, Homo sapiens
ttggttccccctccctcagcttccgccccaaaaggctgtggaaaatctctgttctcacaaagtctccccaatgctctacaagcaactgcgtcaggcctg

SEQ ID NO: 872497 - DNA, 98 bp, Homo sapiens
caagatccgtcagacacacagccttgcgcacctcctcaccaaatacgctgagcagctgctccaggaatattactaaggctcgtacgtctgcatcgatt

SEQ ID NO: 872498 - DNA, 99 bp, Homo sapiens
ggcagcgagtaaagtcttggacagacttaaaccagttataggggtaaacactgatccagaacgggcacacgtgtttcacgttgacaggtttgcttggga

SEQ ID NO: 872499 - DNA, 98 bp, Homo sapiens
tctgggctctgcctcaccacttgtctcagaggcctcatgcattgtgcgtcagcagcaatgtttatggtgaaaaatggcaacgggaccgcgtgcataat

SEQ ID NO: 872500 - DNA, 75 bp, Homo sapiens
ccaaggacatgagcagtttacacatctcacccaattcagtggattggttttcaacatcgtgcctgccgatatgcc

SEQ ID NO: 872501 - DNA, 99 bp, Homo sapiens
ttgtttttcagcagctttgaggaaaagtataggttgtttttcaccattcagaacattgcctgaagcaggtccaccatgccgttagtaacgaggaacatc

SEQ ID NO: 872502 - DNA, 99 bp, Homo sapiens
tgaaacatattccgtggtgtatctgtacagcagtttcctcatccctgcagctgtgtttgaacaggggccagcagcctcccccgatgggtcgtcagcaac

SEQ ID NO: 872503 - DNA, 99 bp, Homo sapiens
cagaaaccgccccagcgatggaagaggatcaggagctggagaggaagctgttttaggttatgtgaaagagatgtttcctcatctctaaggcttaccaga

SEQ ID NO: 872504 - DNA, 99 bp, Homo sapiens
gaagaaaggacggtagacctgcccaagtctcccaaggtttaccgaactaatcagtgtgctggggagtttgtgattacatttccaagagcctaccacagt

SEQ ID NO: 872505 - DNA, 99 bp, Homo sapiens
tgaacgcgctgcacctctacctgtggctctttctgctgggcctgcccttcaccctctacatggtctctaattaacagaagatggcaaagcccagccaca

SEQ ID NO: 872506 - DNA, 99 bp, Homo sapiens
tgtgtgtgagaggcgtcctctgggagagcatggatcctgaggtcccagaaaccatcatagcctttgcctgggaaccaaatggaagtaagtttgctgtgc

SEQ ID NO: 872507 - DNA, 98 bp, Homo sapiens
ttgtagacgcccgcccctgcctcagagaaggtgccagatcggctagggatactcactcacctgtatagggactttgataaatgcaggtttgctgggtt

SEQ ID NO: 872508 - DNA, 99 bp, Homo sapiens
gaagaccacagctgagccccagcaccagtcacctccagagcctgccttctggtacaagatgcctgtggaatgttcggtgaagtgcacttggagttcacc

SEQ ID NO: 872509 - DNA, 99 bp, Homo sapiens
ggtttcagcagccaaagccccaagtgccgcagacttgtctgagattgttatgcaatggtctctgcaagatggtttattcttgaattggacctttttaag

SEQ ID NO: 872510 - DNA, 98 bp, Homo sapiens
cgcagagcgcatccatcaaagctttgcgcaacgccaacctcaggcgagatggtgccaaagatgtacaatgggaatttgtacatggtttacttgaaaat

SEQ ID NO: 872511 - DNA, 100 bp, Homo sapiens
tgttctcataataattcagatggagaatatatggctggacagctagctgcagcagctagctgtccagccatatattctccatctgaattattatgagaac

SEQ ID NO: 872512 - DNA, 99 bp, Homo sapiens
tcaccctccacagtagctgggactacaagcgcccgccaccacgcccggctaatttgcaatacggaaattttaatagggttttggccaaattgggcgagg

SEQ ID NO: 872513 - DNA, 99 bp, Homo sapiens
tctctcttgcccaaaccacgatgggaatgtgctggagaatctggtaaaagcaccattgtgaagcagatgaggatcctgcatgttaatgggtttaatgga

SEQ ID NO: 872514 - DNA, 99 bp, Homo sapiens
aacaacggcggcaaagccgagaaggagaacaccccgagcgaggccaaccttcaggaggaggagggcgatgccagtccctccactccagaggagaacgaa

SEQ ID NO: 872515 - DNA, 99 bp, Homo sapiens
ggctgaggcggcgcggcagcggagggacggcagtctcgcgcggtgtggatgaggtcaccattgtcaacattttgaccaaccgcagcaatgcacagagac

SEQ ID NO: 872516 - DNA, 99 bp, Homo sapiens
cctttcttcctcagttcctctaatacaatctggatcgactccacaggaagctttcatccaacagactgatcatttccctgcaagtgttgatgttgaatc

SEQ ID NO: 872517 - DNA, 98 bp, Homo sapiens
gcggctcgtggtggatggcatggggcgctttggcagatccctggtggtaactaatgagtatctgctgcagcagctgaataaggagccaaaaggttatt

SEQ ID NO: 872518 - DNA, 99 bp, Homo sapiens
atatattgggggaatttattacttcctattcatatggaagaggacagcagaggctgaagccgacgtagcttctctgaacagacgcatccagctggttga

SEQ ID NO: 872519 - DNA, 99 bp, Homo sapiens
cctgctgagaaaccggaggcagatggagagaatgcagaatctattgatcttaaacagtttttcgaccaacatttttcacatatatactatgtgttcttt

SEQ ID NO: 872520 - DNA, 99 bp, Homo sapiens
ctgtcagaaacttgatcctggtgtcttctgaggtgacatcatcaaagcgcactgtatagccaacttgccaagtcctgagttcagaattttgtttttgag

SEQ ID NO: 872521 - DNA, 99 bp, Homo sapiens
atctacgaagaaaactgttttaacttagcagtgtctgcaaaaacgaatcttttcctacaacctgttaactgactggactgttggtaacaaagtaattgt

SEQ ID NO: 872522 - DNA, 99 bp, Homo sapiens
gcgcaccgggcatagtggttggagtttctgtagatggaaaagaagtctggtcagaagggtatgttagagcccaccaaggaaccactgaaaccactttct

SEQ ID NO: 872523 - DNA, 99 bp, Homo sapiens
agctggagcggctcaacaagcagttccgcacggagatggaggaccttatgagctccaaggatgatgtgggcaagagtgctcccactccatgaggtattt

SEQ ID NO: 872524 - DNA, 99 bp, Homo sapiens
ttcgaacaactcagcttgcaaaagcccagggccatatatctcagctgggatctagcaattgggaggcagcagacttgggtaatgaagagagaaaacaaa

SEQ ID NO: 872525 - DNA, 99 bp, Homo sapiens
tcatggagggagcaggagctggatccggcttccggaagctcctcccgaggaaccagtggtgacagctgaggccatgtgagtaggatcctgaatgaggct

SEQ ID NO: 872526 - DNA, 99 bp, Homo sapiens
gaatagaatgtggtggtgcctatgtgaaactgctttctaaaacaccagaactcaacctggtggtggacataatgcgagttaacgtggacaaggttctgg

SEQ ID NO: 872527 - DNA, 99 bp, Homo sapiens
tggctggggtttgtctcacagtggagctactgccttcctcatcaacaaagtgccccttcctgttgacaagttggcacctttacctctggacaacattct

SEQ ID NO: 872528 - DNA, 99 bp, Homo sapiens
gggcccgggcccggattactatctcaaaaactatgaggatgaacctgatgatttggaaacagaaattctacaagagccaagtggaacaaacaaagatga

SEQ ID NO: 872529 - DNA, 99 bp, Homo sapiens
gatgatgactgggactgggatgaaggagttggaaaactcgccaagggttatgtctggaatggaggaagcaacccacagtcatccgtccttggctcagga

SEQ ID NO: 872530 - DNA, 99 bp, Homo sapiens
ccgttcggcctggaggagccgcagtgggtcccggacaaggaggttcgagaacttgtcttggacaattgcaaatcaaatgatggaaaaattgagggctta

SEQ ID NO: 872531 - DNA, 99 bp, Homo sapiens
gttccaggctattctgttccagcagcagaacacagatctttgatggaaaacagattccacagagaatggttgatggatggaatgctttcttctttgata

SEQ ID NO: 872532 - DNA, 99 bp, Homo sapiens
ttcgcccgcggaggccggggagcagccgaccatggagccccagaaaggcaattctcaagttcaactactcagtgcaggaggagagcgacacttgtctgg

SEQ ID NO: 872533 - DNA, 99 bp, Homo sapiens
gttgatgctgtaattgctgaacttaaaaagcagtctaaacctgtgaccacccctgaagaaattgcacagattgcattctcacaacacaatacaatcatg

SEQ ID NO: 872534 - DNA, 99 bp, Homo sapiens
caaagctcaccctcccgagttgaaaaaatctttaagcaagcgacaatgaaggcattgcggaaaaaatctgttttgctaactggctatctggaatacctg

SEQ ID NO: 872535 - DNA, 99 bp, Homo sapiens
tggagaaaatattattgatactttaggagctgaagtagatagacttgagaaggaactgaaaattggttcctactttggcagtattttaacaacaactga

SEQ ID NO: 872536 - DNA, 98 bp, Homo sapiens
catcaatttccagagcttggcgaaacagtcagcgtgatacctctgatattaagagtaatcaagtcagaggattatatgacttttatctgcctagagaa

SEQ ID NO: 872537 - DNA, 98 bp, Homo sapiens
tcagctccatccaggccaccactgcggcgggctctggaaagccttgagccgggccatgcttctcacatcttacctgcctcctcccttgttgagacatc

SEQ ID NO: 872538 - DNA, 101 bp, Homo sapiens
tcgagaaggtccttccagcctggcagtgatcctgccatgaagcagtttctgctgtacttggatgagtccaatgccctggggaagaagttcatcattcaaga

SEQ ID NO: 872539 - DNA, 99 bp, Homo sapiens
gcggctcctagcggatgggtgctattgtgaggcggttgtagaagactgtttctagggtctgacatgatcaccagtcccactcccaccaaagagcagccc

SEQ ID NO: 872540 - DNA, 99 bp, Homo sapiens
ctgggagtgcagattctctcagcaatggatgaaaactttcggaagagaaagttgcctgtggtaagttcagttgttaaagtaaaaaaattcaatcatgat

SEQ ID NO: 872541 - DNA, 98 bp, Homo sapiens
tcagtggttgaatcataggcaagtggtgtgtggcacaaaatgcaacacgacagctttattaaaccgcctggagcgaattttcgaagcatgttttcctt

SEQ ID NO: 872542 - DNA, 98 bp, Homo sapiens
actgcacagcggaatgtatataggcatgtgatgttagagaactacagaaacctggttttcttggaaattggaatgggattaacaggatttggagtgtt

SEQ ID NO: 872543 - DNA, 98 bp, Homo sapiens
aacctgcgggagaggtttggaattgatgatcaagatttccagcttattgcaggagtgaccaggacactacctcctagaagtaatgcccacagaaagcg

SEQ ID NO: 872544 - DNA, 99 bp, Homo sapiens
cctgagtagctgggactatagcaaaccctcctggggcttgcccatagatgctgttcagtgggatatctgcaatctgccattgagaactggctctgtgga

SEQ ID NO: 872545 - DNA, 99 bp, Homo sapiens
aaagatgctggtgtcaccgtcacactaacggtcattgctgaagaaggagctctccttgtgtacatcatcatggttccccaggagtggatttaccagtta

SEQ ID NO: 872546 - DNA, 99 bp, Homo sapiens
gagctcagacacagagcagcagtcccctacaagatggagagaccagagaagagaacaagctgttgattcctaagcagaaaatttcggaagaagtgcatt

SEQ ID NO: 872547 - DNA, 99 bp, Homo sapiens
ggccacagagcgagactccatcttgtagctggcggcccttgtacaggtcccgggctttggctgggtgggccctggccgtgttgtcacatttcggctgct

SEQ ID NO: 872548 - DNA, 99 bp, Homo sapiens
gcggctgccgcacaatcccgggttgtccgggtcctgtcaatgtcaccgtggggtagagcagcggctgccatgctcttctgtggcttcatcatcctggtg

SEQ ID NO: 872549 - DNA, 99 bp, Homo sapiens
atcgagaccatcctggccaacatgtattttaaccacatcagcatcgaggactcgcgggtctacgagctgaccagcaaggctgggctgttgtctccatat

SEQ ID NO: 872550 - DNA, 98 bp, Homo sapiens
actgatctttgctggcaagcagctggaagatggacgtactttgtctgactacaatattcaaaaggctaaagaattacctccaaagccattgtcaagac

SEQ ID NO: 872551 - DNA, 99 bp, Homo sapiens
caaaaagaatacaccgccttgatatgggctgtcattcattaacacagcatttgaattagcaatgacatctttgggctctgaatcaatggcatttataca

SEQ ID NO: 872552 - DNA, 99 bp, Homo sapiens
ggaaggagagtctgtgccgacaagatggcggacggggagctgaacgtggacagcctcatcacccggctgctggaggagtttcgctcttgttgcccaggc

SEQ ID NO: 872553 - DNA, 100 bp, Homo sapiens
aatacaactgggacattaaagcctgacgacagggtggtctcagaaagccgggtggcagcaaccacaaccctgtcgtcaggctttaatgtcccagttgtat

SEQ ID NO: 872554 - DNA, 99 bp, Homo sapiens
tggacccaagctctgccggacatggtggtgtcccacctttttgggaaggttggctttgatatgagtaaagaagctgcaagaaaatgctatgagaaatct

SEQ ID NO: 872555 - DNA, 98 bp, Homo sapiens
gaagagctacaagttccaacagataccccagttattaaagcttttggcatcttgaagcgagcggccgctgaagtaaaccaggattatggtcttgatcc

SEQ ID NO: 872556 - DNA, 98 bp, Homo sapiens
caaggtgatgagcaaaagctctgctgaggtcatcgcccaggcacggaagaaggcctgcccactaaggaggaggagtcattgctgccatcattatcatc

SEQ ID NO: 872557 - DNA, 99 bp, Homo sapiens
acatcagcttgtaggagacagagaaaattcatttgcaaattgcccgacaaaggtaaaaagatctttgactcttttgccaaactgaaagctgccattgca

SEQ ID NO: 872558 - DNA, 99 bp, Homo sapiens
agcagcgattggtgtgacaaaacggccacctcctaagtgggtggatggagtggatgaatttgatctaggagaagatggtggcctgaaagtggatgatca

SEQ ID NO: 872559 - DNA, 99 bp, Homo sapiens
ggacctgggtctacgataacgcgcttttgctcctcctgaagtgtctttggtccaacgttgttccagatggagttttaacattgaatgcggagaacacta

SEQ ID NO: 872560 - DNA, 99 bp, Homo sapiens
agttctcaagcgctaccagaatctaaagcctattggctctggggctcagggcatagtttgccatgaagactttgaatttatttcaggaacacgaatgcg

SEQ ID NO: 872561 - DNA, 99 bp, Homo sapiens
tggagaggctgagctgctccaggacttggggacttccaatagtagtcagacattatcatcctgtcatactatggagccatgtacatcagatgaattttt

SEQ ID NO: 872562 - DNA, 100 bp, Homo sapiens
ttacatgagagagccaatcttggacctaccacaaagcttctagttcagccagctcactaatggtttcaagtggtaggtccaagattggctctctcatgta

SEQ ID NO: 872563 - DNA, 99 bp, Homo sapiens
gtttgttcaggaaccaccagtgacagaagccacctgagctgaagattcccttgagaacaagtactgtcctgtggtttcatggcctttcttccatttgtg

SEQ ID NO: 872564 - DNA, 99 bp, Homo sapiens
attctctctcacggatgaagcagaatctatacagatgtcttgcagattttggtaggctttgaaaaacttgttttacttgaggctccatatgcttcatgg

SEQ ID NO: 872565 - DNA, 99 bp, Homo sapiens
gcctcctgagtagctgcgattacagaatggagatgtatgcatttcgattcttcatccgcctgtagatgacccacagagtggagaactgccttctgaaag

SEQ ID NO: 872566 - DNA, 99 bp, Homo sapiens
gacagcaaggctatgcaagtggagagctgctcctcagccgtgggggtagcttcctattgaagtttattcggaagatgacaagtaggcattggtgtgctg

SEQ ID NO: 872567 - DNA, 99 bp, Homo sapiens
gatgtgctgagctgaagaaagccttgtgtactgcccatgagaagttctgtttctggccagacagcccatccccagaaattgcttcccaagaagaaggtg

SEQ ID NO: 872568 - DNA, 98 bp, Homo sapiens
tgggatgcttagatcaactttagctcagcaaggtttctctggaaacccccctggtaagtgtggaggaggcgggacactctgacccaagacgaaaggcc

SEQ ID NO: 872569 - DNA, 99 bp, Homo sapiens
ccgggatcgtgaccgagaccgtgaccgagagcgtgaccgagagcgcgaatatcgtcatcgttagaagctgtgagaaaaagccctgagctgtctccctaa

SEQ ID NO: 872570 - DNA, 99 bp, Homo sapiens
gcggccaggcgattcggtgaagcgattcctgcaggcgttggttcccctctttgacctgaatggctctcttctgtgtataaacagcagtggtttgctatg

SEQ ID NO: 872571 - DNA, 75 bp, Homo sapiens
aagagtcttgtccacagctggcaaattcagtgcagatcagctgaatttcaatatgctgaaaccgtatttcgagat

SEQ ID NO: 872572 - DNA, 99 bp, Homo sapiens
gtcttgggcccaggctctggagttggaggctcagtttcagggccagccaagtctcgggatggtgaacgtactgtctattgcaacgtacacaagcatgaa

SEQ ID NO: 872573 - DNA, 99 bp, Homo sapiens
aatctctacatgtaaaaggccactgactcctacttcctctgtatagagcaactgttgaactcagctgcctgtagcttggcttgtggagatgttgaagga

SEQ ID NO: 872574 - DNA, 99 bp, Homo sapiens
tctattccggccacccattgatttgatgcataaaggcagctttgaaacagcgggctggtccgagtctctgttttggaagctcaaccagtggctgatgat

SEQ ID NO: 872575 - DNA, 99 bp, Homo sapiens
cctgtaccgctggatatatgatggggagcttgaggacacttaccacgaagttcctggtacagttcagacaggacaaagtatgtgtgaagtttattcagg

SEQ ID NO: 872576 - DNA, 99 bp, Homo sapiens
cggcatcactagacagtcctgtcctattggtcatcaaagatatggataatcaggacatggatttgattgacatactttggaggcaagatatagatcttg

SEQ ID NO: 872577 - DNA, 98 bp, Homo sapiens
gattccctgtgttctgcttttttcattgttccactggacgctcatcagagggaagatctttttcctcaattggaagcaagatttccagatgtagcaaa

SEQ ID NO: 872578 - DNA, 99 bp, Homo sapiens
ctcttagtccagcaagtcctcatagccaggcaagtttatttctgatcgtgaaagtagaagaagtctcacaaacagccatttggaaaaaaagaagtgtga

SEQ ID NO: 872579 - DNA, 99 bp, Homo sapiens
gccggaggaggatgctcctgcctcccagagaggggagccggcgaggatcaaaatcttcgaaggagggtagtgctcatagctctctttgtccagtgcttc

SEQ ID NO: 872580 - DNA, 99 bp, Homo sapiens
ccttgacctcctcgtagcagtttgcttgcaattcatgcttgatccctcagaataggtttctttgccatattttgggacggttctgtaggcagctgtggg

SEQ ID NO: 872581 - DNA, 99 bp, Homo sapiens
acaaggacaggcagagccctcctccagccaagcggcccaacacatccccagaccgaggtacaggtttgcagattccgccagcagcacagcaagctctac

SEQ ID NO: 872582 - DNA, 99 bp, Homo sapiens
ggctccctcctcccagggccaggcgccgctcagaacgatactccatcttctaaaccaacactcctagccaatggtggtcatggagtagaagggagcgat

SEQ ID NO: 872583 - DNA, 99 bp, Homo sapiens
ggcgtggcagccggacctttcccttgcggacgcgaaggcgtggatctttcgaagatggtttggctgccttggagatttggagatctgatgccacgatga

SEQ ID NO: 872584 - DNA, 99 bp, Homo sapiens
ctgtttctgagggagctgcctgacagtctgatcacctcagcgttgcagcctcgattcattcaactctttcaggaatctacctgttactcgtattttgga

SEQ ID NO: 872585 - DNA, 99 bp, Homo sapiens
agtctttgacaagtgatgagaagctgtcggagcttcccaagaaatacagcccctcggaccctgcatttgcatatgcgcagctgacccacgatgagctga

SEQ ID NO: 872586 - DNA, 99 bp, Homo sapiens
ataacaagggcatcgactcagacgcttcctatccctacaaagccatgacaattgtggcaattaataaagacccagaagctccaattttccaagtggcag

SEQ ID NO: 872587 - DNA, 99 bp, Homo sapiens
caccctgccgtcatgtctaagtcagagcacagacgcagtcttcagcaaggaagtgctgggaacgccctggagtgaacccaggaagatgcctgcagtggg

SEQ ID NO: 872588 - DNA, 99 bp, Homo sapiens
gactacctctccgatcctgcagctgctgctgcggctctcactgtgcgggctgctgctccagagggcggaggcaaggggatcaggcgagtgaagccgaag

SEQ ID NO: 872589 - DNA, 99 bp, Homo sapiens
tgcagatctgagtcaggctctttgtctggccatctccgtgtcagagatccttcaagcgaatcagctacaagggctgcaggtctgttggagtttgctgga

SEQ ID NO: 872590 - DNA, 99 bp, Homo sapiens
agcctcccgagtagctggggttacagaaatgcaatggcacatcgtgattctgagatgaaagaagaatgtctaagggaagacctgaagttttacttcatg

SEQ ID NO: 872591 - DNA, 98 bp, Homo sapiens
tgggactcagcagccttggtgctcaggtgccagatgcaaagtcgacttgggaataagtgtcaagacggataatgtggccacttcttcccccgagacaa

SEQ ID NO: 872592 - DNA, 99 bp, Homo sapiens
gaagagaaaatagcaaacgatccagacggcagggagtgcatcaaaggtgtgaacacagtgtgaagcctcagtttaggtcatctggtggttcagaacact

SEQ ID NO: 872593 - DNA, 99 bp, Homo sapiens
agacagggcaaagaaaatgggactggttgaccaactggtggaacccctggatggagaggagaaaacctatggtggctgtgaaggacctgatgccatgta

SEQ ID NO: 872594 - DNA, 99 bp, Homo sapiens
gagacatttctggctctgaaggcgaacgcttcgctggccatttaggagctctgctcaaagccagacgtgcttctactgaaggattattgaatcgccaat

SEQ ID NO: 872595 - DNA, 99 bp, Homo sapiens
gctcacctgaggactcacactggaattggcagcaatgaaacagattctcgttaagatgcatagtaaacattctgagaacagcttacttctcactaaaac

SEQ ID NO: 872596 - DNA, 98 bp, Homo sapiens
tattcttgaaccaggtcatgctccaaattaatctatgccagcaattatgacaatgttagcagaccatgcagctcgtcagctgcttgatttcagccaaa

SEQ ID NO: 872597 - DNA, 99 bp, Homo sapiens
ccttgtccacaaattcgtcattggccacttaaaggcagtagacagcagggactccctggccatggctctgtatgcgtgctgctttgagtgggtaatcaa

SEQ ID NO: 872598 - DNA, 98 bp, Homo sapiens
aggaaatttggtgagcggcctccacctaaacgacttactagtgaacacaaatgggctgctgtggtaggtttggaaattcatgcccagatttcctccaa

SEQ ID NO: 872599 - DNA, 99 bp, Homo sapiens
aggactcctcagccgccaagctttttaacttgagagaagaaagaactctgcaacatgatacttgattgctgtgcccaacagaggacatacgaaaaattt

SEQ ID NO: 872600 - DNA, 99 bp, Homo sapiens
tctgggcccccctggaatgttccagagtctccaaagcggcgtctgacctcatgagctactgtgagcaacatgcccggaacgaccccctgctggtcggag

SEQ ID NO: 872601 - DNA, 99 bp, Homo sapiens
gccttgtccagggctttggtcacctgggccatattcttggtcacctgcttaatcttccgtggctgttgcattggcaggctcagcagtttgtcagctgca

SEQ ID NO: 872602 - DNA, 99 bp, Homo sapiens
ccgagagcgcgaatatcgtcatcgttagaaggttacagtccctggacatgatccacacatcacaaaggtgattattccggagaaatcccagaacttcag

SEQ ID NO: 872603 - DNA, 98 bp, Homo sapiens
caaattgctgcttgtccaaatcaggatccactgcaaggaacaacaggcttgtccaaaaggaaacatcggaatgaccacttaacatctacaacttccag

SEQ ID NO: 872604 - DNA, 99 bp, Homo sapiens
ggctcgagcgatcctcccacctcagtctcctgagtagctatgactacgggccctagcacaaaacacagatcttaaagaacgcttacgcagaatccatgc

SEQ ID NO: 872605 - DNA, 98 bp, Homo sapiens
aaaaagaagaccagcgacaaatttagagaaacctcggcagcacacgacggttctgccctttatattaatcgagatgaggacatcgcaccatcagtatc

SEQ ID NO: 872606 - DNA, 98 bp, Homo sapiens
gtggggcccatttctgttgctattgatgcaggtcatgagtccttcctgttctataaagaaggaaattatgatgtgatgaccccaatggttgatatact

SEQ ID NO: 872607 - DNA, 100 bp, Homo sapiens
agcagctgtggaggtggaatcagtagcagcagcagcagccgcggtggcagtctgccaccgcggctgctgctgctgctactgattccacctccacagctgc

SEQ ID NO: 872608 - DNA, 99 bp, Homo sapiens
agaaaagcctctgggagcagaagggaggctccaagacctcatcaacaattaagcacccagaggcctccattcaggctgttttttcagatgcccaaatgc

SEQ ID NO: 872609 - DNA, 99 bp, Homo sapiens
tcaatttctgaagaagtggctgtagggagcatagctgctacactgaagatgaagcaaggcccaatgacccaggcgagctgatagacacacaccttagct

SEQ ID NO: 872610 - DNA, 99 bp, Homo sapiens
tttatctggcatggatgtgactattgttaagagacggtctcgccacattgcccagactggtctgaaagtcttgggctcaagagatcctcccgcttccgc

SEQ ID NO: 872611 - DNA, 99 bp, Homo sapiens
tgagggaaaggacaagatgaagtggaaggcgcttttcaccgcggccatcctgcaggcacagttgccgattacaggattctttgcccataaagtggagca

SEQ ID NO: 872612 - DNA, 99 bp, Homo sapiens
tggcaccgagagcaagaaaatggtttgctggttggctcccgagcagacagcaggaaagaagaagcccttcgtgtacacccagggccaggctgtcctaaa

SEQ ID NO: 872613 - DNA, 99 bp, Homo sapiens
gagaattcagctccagttcaaaagcctacaaaatctgagactgtcattgcttttataagttgaccactgaaaaacacacatactatctgactgcagatt

SEQ ID NO: 872614 - DNA, 98 bp, Homo sapiens
gagcattcaagccctgttcaagattgccagatatcccaggaaagtgtgtggcaaaggagcagagaactttgacaagttcttcacacgaggacagcccg

SEQ ID NO: 872615 - DNA, 98 bp, Homo sapiens
gtggatgggattcccgggatgacttcaattctgggacacagcaggtcaggagagattcaacagcattacctcagcttattacagaagtgccaagggga

SEQ ID NO: 872616 - DNA, 98 bp, Homo sapiens
aggagttcagtgactgctattgaaccaccaaaagtccattatgaaactgacacggcatcagcgaggagatacgcatcctctaaccttagatgaaattt

SEQ ID NO: 872617 - DNA, 99 bp, Homo sapiens
caatatttcgagcagtttggcaagggtccacatatagcctcagttacattagctgcttatgaatgcaattcagttaattttcccgaaccaccctatcct

SEQ ID NO: 872618 - DNA, 99 bp, Homo sapiens
cttccacaagggggtcttcacacctgcgggccgggaggaggtcagggcagtcctgcttgtgtgtggtggctgtagttttccctttgtgaatgataggac

SEQ ID NO: 872619 - DNA, 99 bp, Homo sapiens
atggcctggtggaaagcctgggacaaggagcatccaagatacctgatcccagaactttgcaaacagttttaccatttaggctgggtcactgggactgga

SEQ ID NO: 872620 - DNA, 99 bp, Homo sapiens
gacaatcagtttcatgaaggagctcatgcagtggtacaaggaccagaagaaactgcaccggaaatgtgcctaccaggaccgcgtcttgtacagaagccg

SEQ ID NO: 872621 - DNA, 98 bp, Homo sapiens
ctgaagacatggacctctacagcatcaactacctgcactttggagaaccaaagtcctgcctgctgttcatgtacaaggtcaggaacctttgactgctt

SEQ ID NO: 872622 - DNA, 99 bp, Homo sapiens
gtccaagaagcaaaaaagggactgctaagaagataccaccaggggttgagcattcatgatggtacctggaagtcagcaatttatggttttggagatcag

SEQ ID NO: 872623 - DNA, 99 bp, Homo sapiens
aaatgaattccccacttgaactctgccgaattcctgtgccacctcctcctttagaaaactgatcttaatacagaaatttaagatccgcattgaagaccc

SEQ ID NO: 872624 - DNA, 99 bp, Homo sapiens
cattcgtgctggaaatcttgctcgccgggcagccgccacacaacctgatgcaaaggatacccctgatgagagggtgctcgagaggaagacctcgatgct

SEQ ID NO: 872625 - DNA, 99 bp, Homo sapiens
acgattacagggatgagcatttggactttatccagtcacacctgcggaggttctgccttcagtatttccaagaggtcgttctgaccccaggtgacaatc

SEQ ID NO: 872626 - DNA, 99 bp, Homo sapiens
gggaccagcagctgtcgccgccgctctcagggggtgaatctctacattaagaacttggatgacactattgatgatgagaaattaaggaaagaattttct

SEQ ID NO: 872627 - DNA, 98 bp, Homo sapiens
atgaacctgagccttcagtcaagaccctccagcttgccttgattcgcctttgccagtctcatctcgtgtctgctttgttaagttccatgatccagact

SEQ ID NO: 872628 - DNA, 98 bp, Homo sapiens
tttaaacagccaaaacagttcattcatattcagctcctgacacagctctccctgaggagcagccacattccagctcccagtgcgcccctctccactgt

SEQ ID NO: 872629 - DNA, 99 bp, Homo sapiens
gcgcttcgtctcttgctttttcttcacagccaacaggtctaccaggggccgaatggtcatgccattgcagcccttgtccgttaggtaactgattccttc

SEQ ID NO: 872630 - DNA, 99 bp, Homo sapiens
gagcacactgagatatgcatccagtgccaaaaacattatcaacaagccacgagtaaatgaggtgactttaggcagatcttttgccaagcatgccttaga

SEQ ID NO: 872631 - DNA, 99 bp, Homo sapiens
ctctgaacagtttgggtttatcactcctaacaaaagcagagccatcaggaatggaccttacgaatgttggcaacatcttgactgtggctgttggattaa

SEQ ID NO: 872632 - DNA, 98 bp, Homo sapiens
atttctcctattgaggagtcaacctggcagcctgttatcgactacattgatagtaaatttgaggactacctaaatgcagaatcacgagtgaacagacg

SEQ ID NO: 872633 - DNA, 99 bp, Homo sapiens
gacctgcccccaactggcctccctgagatgaacctgctggagatgtacagcctgaaggatgagatgggcaacctcagtgtactatgaggggctgcagga

SEQ ID NO: 872634 - DNA, 99 bp, Homo sapiens
agtcacaaaacagcagatttcccaagagcagcggaaaatgatccagtcacaggagtatgctgctgctgttccgctttgcgtcctcgctacaaacgcctg

SEQ ID NO: 872635 - DNA, 99 bp, Homo sapiens
ctctcgcccacctctacccggcagcgggggcagtcagagcggagccaagatgcgaatgggccatatgcagttcagaagctcaaagcagttgcaggtgtg

SEQ ID NO: 872636 - DNA, 98 bp, Homo sapiens
ggacatggctgctgggcagcgggaagcgaggccccaggggtgttgggctcttcattggtgtggatctgatcaaagatgaggccacaaggacaccagca

SEQ ID NO: 872637 - DNA, 98 bp, Homo sapiens
gaagattcttccaaggaaccagtgcgaagagcttacgatgtgaagaacttcatcttcatgcagaaaatctgtctaggcgggtctgggagctactgatg

SEQ ID NO: 872638 - DNA, 103 bp, Homo sapiens
ctcaggcctccggggtccgcccttggtttcaaagcctgtgaggaatttgaggtccctgggtccctggacttctgcaggacacagtctctgtctccatcagctg

SEQ ID NO: 872639 - DNA, 99 bp, Homo sapiens
ggtgtttccaggaagttcagagagaacaggcagaggcaaggctggcagcaaaacgggctgcccgggcagaagcaagagatatacgcatgagagaactgg

SEQ ID NO: 872640 - DNA, 99 bp, Homo sapiens
tttgtccccttgctggctgcccctcaggacccctgctacgtggagaaaacctcggataagggctgggagagggttctgccctccttcatccagacagca

SEQ ID NO: 872641 - DNA, 99 bp, Homo sapiens
tgacagattacgccccctatcctatccgcaaacagttttgatgatgatggttcagaatttcatgaacatatatttctggagaaacacctggagagcttt

SEQ ID NO: 872642 - DNA, 98 bp, Homo sapiens
ttcgctctttgcatcttaactgcagctgagatctgtatctgtggacctgaatgttgatccctcgcttcagattgacatacctgatgcgctcagtgaga

SEQ ID NO: 872643 - DNA, 99 bp, Homo sapiens
caatgagactgacccctttcacaacatctggcctgggtctgacctggcgggacatgcagcatctgactgtgctcacctccaaacggaaccagcttcacg

SEQ ID NO: 872644 - DNA, 99 bp, Homo sapiens
caacatccagaaaaaagcgatgactgtgaaggagttcaggcagctggccaacagtggcaagtgtgatgaatgcagactctgctaccattttggctgttt

SEQ ID NO: 872645 - DNA, 99 bp, Homo sapiens
gttcaagaggatttgcctttgtatattttgaaaatgtagatgatgccaaggaagctaaagaattacctccaaagccattgtcaagaccacagcagtcat

SEQ ID NO: 872646 - DNA, 98 bp, Homo sapiens
atgcaaacttgggccaaaggacagttagaagacagtagaaatggtggagtcaatgaagaaagtagcagggatggatgtggagctgacagttgaagaaa

SEQ ID NO: 872647 - DNA, 99 bp, Homo sapiens
cacatcagcaggctagaaaagccatcccattcctgcggtaggcattcaaaaagagtccaggaccagatggattcacagccgaattctaccagaggtaca

SEQ ID NO: 872648 - DNA, 98 bp, Homo sapiens
tgaacttaaaggatcagtagcaatttggagcggtaagcccccaatatgtgaaagtaaagtcatgaagctgagccccaaagcagaggaagtagctacgt

SEQ ID NO: 872649 - DNA, 99 bp, Homo sapiens
cacatttgttcagtctcctgcagatgcctgcacacctcctgactttgacccctggtggacaaacgactgtgagcagaatgagtcagagcccattcctgc

SEQ ID NO: 872650 - DNA, 99 bp, Homo sapiens
tcgtgatccagaagtccagagctgaggactgcctgtttgcaggtggcagtagagaagagcatcacagaagttgctcaggagctgacagagctggtggaa

SEQ ID NO: 872651 - DNA, 99 bp, Homo sapiens
gtgctgcgggtgttcttttggggtagtgtctgggatccagtacgagttgaatcattgttcaaataaggcaagcagcccaaagggaccttcctcattaag

SEQ ID NO: 872652 - DNA, 98 bp, Homo sapiens
aggaaataggttaatcagaagattgctggatgttatgaaaagaatcttttatggggggctgtactttgatggaaacctggagaagctctttgctgagt

SEQ ID NO: 872653 - DNA, 99 bp, Homo sapiens
gctgggcccttgggcatctctttacagggaaaggtttttatctgaacgagtaaatggaagaacatgcctcaaaactactcttttgccactcgttaacca

SEQ ID NO: 872654 - DNA, 99 bp, Homo sapiens
gtgcaaaaggcggggtcgctagggccactcagggaaagagaacccagaaacatggcatgctgacaaaaggatctaaatgagtgtggcctgaagccccgg

SEQ ID NO: 872655 - DNA, 98 bp, Homo sapiens
tgattttgaagatgaccactttggaaatgtggatgacgtagtagatgaaagtgatgacaacgatgatattgatgtagaagctgaaaacgaaactgaga

SEQ ID NO: 872656 - DNA, 99 bp, Homo sapiens
aggagagcggatcccagacgtggctgcattgtccatgggcttctctgtgaaagaagcaggttggtctcctcttcatattgcggcttctgctggccggga

SEQ ID NO: 872657 - DNA, 144 bp, Homo sapiens
tcgaggttgcaggactctttctgttcaggccagaccctctgggagcttctcagccattttccacagatcaggagatgctgaacataagccatatatctgtggggatgcagattctgcctccactgttctggatgggaccgaaga

SEQ ID NO: 872658 - DNA, 98 bp, Homo sapiens
agaaaacgaaacacttacggatggaaagcagggatgacaggtgtcgtctctttgagtatggccagggtcaacacattccagactgtgctcatcacaga

SEQ ID NO: 872659 - DNA, 99 bp, Homo sapiens
cttccatcaataatgactactttgaagaccttaaaaagtactgtttccacagctttttttctcaaggtgcaatgaaagccttccacactttctgtgttg

SEQ ID NO: 872660 - DNA, 98 bp, Homo sapiens
aaaatgaaaatttctccaaaaaggatgtcatgttcctggcctggtattaatcaagaagagctatgaccggaccaaacgtcagcgtcgtagaaactgga

SEQ ID NO: 872661 - DNA, 99 bp, Homo sapiens
ttctgtctcgactgcactttgagaagtgggagattcttcacagtcaagctcccagttgctcttgatcctggggccaagatttcagtcattgtggaaaca

SEQ ID NO: 872662 - DNA, 99 bp, Homo sapiens
aattcccaaggggatggtgaacattttgcacacccaccctcagatcatccaagcctagaaaacatggaacagatagagaaatttcaggaaaaggcttat

SEQ ID NO: 872663 - DNA, 126 bp, Homo sapiens
ctcggccaggcgccggcgacctgaggggagagggaacgtttttcaaaggaggatccaaacagccaaaatggtagcagagtctgcattcatcacacacagttcacgctttcagctgcgttccctctc

SEQ ID NO: 872664 - DNA, 99 bp, Homo sapiens
cacctttcggcttctgagacggcggcagcagcggcattcaggtgctttgaagaagagtctcacagccaagcaggtccaggcggatttcataactctggg

SEQ ID NO: 872665 - DNA, 99 bp, Homo sapiens
gtttatatcaatgaagtccgagtcatacccccaggagtaagagcccatagcagtctgccagacaatagagcatatggtgtgtctatggcggagttctga

SEQ ID NO: 872666 - DNA, 99 bp, Homo sapiens
caaagttgcatttcctcgtcgagcgcaacccaaggattggagaatccatgttgaccaaatgcaccagcacagaagtggaattgaatctgctctaaagga

SEQ ID NO: 872667 - DNA, 99 bp, Homo sapiens
acctgaaagaccccagttatggatgggaggaacgtcaaggtcgtgggaaataaaaggcagttctacacagactgcagcaacggttgcatctgcatatcc

SEQ ID NO: 872668 - DNA, 99 bp, Homo sapiens
ggctttgtacggcttagaggacttccctttggatgtagcaaggaagaaattgttcagttcttctcaggcctgtctcctccctcctacacatttccagct

SEQ ID NO: 872669 - DNA, 98 bp, Homo sapiens
tcaaaggagagcacaaccatcgcagttggaagcccatggggcaggtgattgaagatagtactggagtccgccgggtggtggtcacaccccagtctcct

SEQ ID NO: 872670 - DNA, 98 bp, Homo sapiens
gcctcgtaccacatttccaatttgctggaaaaaatgacatccagcgacaaggactttagggtgcttttcaggaaacaatgatcattttttggcaatta

SEQ ID NO: 872671 - DNA, 99 bp, Homo sapiens
aggacccccaagccgccgcggacgcagactagacgcttgaagcaaagctgccatcccagaagacgacatgctctcagcaacccccctgtatgggaacgt

SEQ ID NO: 872672 - DNA, 99 bp, Homo sapiens
aggaagaccctcctgccaaaaggaaatgcatctttatgtcagaaacacaaagcagcccaaccaaaggatcttcttcagcagtatcgttctgctgtgtgc

SEQ ID NO: 872673 - DNA, 99 bp, Homo sapiens
tccttcacattctcctgaacatagaaatgtgtaattatcagaaagggttttttatcagcaattggacaccctttccccaaaatgatttttaatcatgga

SEQ ID NO: 872674 - DNA, 98 bp, Homo sapiens
ttacagcatgcatcacatcagaagggctcattgccttcaggagaggaagaagcggggagagaccaacaatgacctgtttctggcagatgtgttttcct

SEQ ID NO: 872675 - DNA, 99 bp, Homo sapiens
acaactgtcatatgggtattacaggcatgcccaagagaatcgtaaatgcaaaaattgcttgccttgacttcagcctgcaaaaaacaaaaatgaagcttg

SEQ ID NO: 872676 - DNA, 99 bp, Homo sapiens
ggtacaaaagagtctttggaggatgcggctttgatgggttttgaacgaagaatgtgatcagaactggtacaaggcagagcttaatggaaaagacggctt

SEQ ID NO: 872677 - DNA, 99 bp, Homo sapiens
ctgagatcacgccattgcactccagcccggtaattaacttcttattaaaacgtctttcataagctgcactgatggccagtgatgccacaaaggagcaat

SEQ ID NO: 872678 - DNA, 99 bp, Homo sapiens
acatggtgtggatgtgacagcccaagatactaccggaaagaccacagcaagattctttcattcgtctcctcctagcctgggggaccaggctcgaactga

SEQ ID NO: 872679 - DNA, 99 bp, Homo sapiens
aaccaacagaaaccgctgcctgtgagccgctgggctcagatccacctggtgaaggtttgtctgccattgtggatttcctgggcagagtggagtgaaggt

SEQ ID NO: 872680 - DNA, 99 bp, Homo sapiens
tggatccaaaagcactttagaagaaaatgcctatgaagatattgtgggatcgaatcatcaatttagttgttggcagcttaacatccttattgattctag

SEQ ID NO: 872681 - DNA, 98 bp, Homo sapiens
catcttctacaaacccatttcagaccaatgccagaggagcaacagctggatgctagtgattccagttctagcagcaatctttcacttgctaaggttag

SEQ ID NO: 872682 - DNA, 99 bp, Homo sapiens
ccagagcctccaagggaaaacgcacttctcagaacttctggatgagttttcccagaacgtcttgggtcagctcctgaatgatcctttcctctcagagaa

SEQ ID NO: 872683 - DNA, 99 bp, Homo sapiens
agagccatcactctgcgcagagaagccgatgtcaagaagaggatcaaggaggccaagcagcggccaaaaagcaaatggatttccacctgacaaatcttc

SEQ ID NO: 872684 - DNA, 99 bp, Homo sapiens
ttggccagaatgagtacctacgctatcaggaggccctgagtgagctggccactgcgtccaccatcttgcagcagcagttcaaccggaccgggaaggcag

SEQ ID NO: 872685 - DNA, 98 bp, Homo sapiens
agtggggccaaaaacaagagtactgaacagcagcaagccgcccctgagccagatccctctacgatgactccacagatatcaatgagtgtgagcagcca

SEQ ID NO: 872686 - DNA, 99 bp, Homo sapiens
aaatcctccccacttatgtttgtaaatgtgagtggaagccatgaggccaaaggcagttgtattgacacgatgaggcgagtggtacgacagagcaagttt

SEQ ID NO: 872687 - DNA, 99 bp, Homo sapiens
cccagagatacctgcaccctcgtcacagaggaacttgccaaaacttcctttccccaacattttgtgcaagataaaatcctcaatttttagtttaatctg

SEQ ID NO: 872688 - DNA, 100 bp, Homo sapiens
tgctgatgccgtacaagagctgctgctcttcctcctcagccccgttctcctcctcttccctctccttgtactgaggcagcagctcttgtacggcatcagc

SEQ ID NO: 872689 - DNA, 99 bp, Homo sapiens
aaggatcctgtctctggcccgcaatcaccccttcctcactcagttgttctgctgctttcagacccccaatttaacacgtgaactggagaatggggaaaa

SEQ ID NO: 872690 - DNA, 98 bp, Homo sapiens
tcaaaggaaagatggatccagacaagatcagtgtactgttacccggacatacctattccttcacaagttctggttcttcagtgctgcttactattttg

SEQ ID NO: 872691 - DNA, 99 bp, Homo sapiens
ggagccgcctgctgcgaggccgccgggctcccgtgctcatcttcaaactctatcagcgggcaaagcatgtgtacagcgaggctgcgcgagtgctccagt

SEQ ID NO: 872692 - DNA, 98 bp, Homo sapiens
ccagaccgtggaagatttaacgaatggggttgtgatggcccaggttcttcaaaagattttggatgactttaacaattggatttctaaagccataagtt

SEQ ID NO: 872693 - DNA, 98 bp, Homo sapiens
tccaaaggatctaaggaccaaagctgacagtttctttacttgcactcaggttgaatcagaaaataaccaagaagaacagaaacaggtgcgcttaccag

SEQ ID NO: 872694 - DNA, 99 bp, Homo sapiens
ataaactgttacgcatatatgacttgaacaaacctgaagcaggtgattcgcatctaggtggcggcagtcgagaaggctcgtttaaagaaacaataacat

SEQ ID NO: 872695 - DNA, 119 bp, Homo sapiens
ctcttgagtgagacccaacaagctgcttttcaccaaattgcaatttttcttctacaacagctccagtatttcatccattgatttcgaaaggctccattgcaatttggtgaaaagcagct

SEQ ID NO: 872696 - DNA, 99 bp, Homo sapiens
tcaatactacctttatttccaccataggtgacatcactcaaaaaggatatgaaaagaaaagggcaaagctgcttgcacgttatataccgcttattcaag

SEQ ID NO: 872697 - DNA, 99 bp, Homo sapiens
cgagctctgatgcaagcgaagaaccttttccctaatacgtacctcattgtgggaggattggtccaaaggaagattttttccattgtttgaaatgtaact

SEQ ID NO: 872698 - DNA, 99 bp, Homo sapiens
ctgtttatgaagcactgagaaatggtgtgcagatgcctaatttagatcttaaagaaaaagtggagcctgaggttctcagcactgatacccaaacttccc

SEQ ID NO: 872699 - DNA, 99 bp, Homo sapiens
aggacttgagtaacagcaacatgatttatgtgatcagtttggctgaaccccgtctgcccctgcagctggatgatgctgttcggcctgaggcagaaggag

SEQ ID NO: 872700 - DNA, 99 bp, Homo sapiens
gggttatccagcacctggaggatacctgctacctttgctctaggtcgtaaccagcctttgaaaaaggagaaaccaaaatggaaaagcgattatcctatg

SEQ ID NO: 872701 - DNA, 99 bp, Homo sapiens
gtagaaggaataagtcctgaattagaaaaggtattcattaaagaaaataatgggaaggaagaagtatccaaggaccgtatccttgatgagcttgacaaa

SEQ ID NO: 872702 - DNA, 99 bp, Homo sapiens
ccataatggaacctgtggtttaatctggacaaaggcctaaacttgagttatcaaaatagcgaactggatgaggtgatggtaaagactttgatcggctat

SEQ ID NO: 872703 - DNA, 99 bp, Homo sapiens
aagacgatctcatactggcagtgttggaaatacaagatcatcatctgtttctagagatgctttcaattcagctgaaagtggcagaatgagaaatttaga

SEQ ID NO: 872704 - DNA, 98 bp, Homo sapiens
aaattcagaacctcaagcttttcaggcatcctcatataattaaactagagagtctacaaggagattgaacaggtggttggcccacatcgccctccagc

SEQ ID NO: 872705 - DNA, 99 bp, Homo sapiens
aaaaattacagcacatctcagtgaatttgcaagtgatctgcttgacatttacctggaaggatgctttcgataaaggttcactttttggaggctctgtaa

SEQ ID NO: 872706 - DNA, 99 bp, Homo sapiens
cgtgtccatgctggaaaccttcggctccaaagacgatgacaagatggtctttaagacagtgcatctgggggaggtgttgtagccattgacaacaaaata

SEQ ID NO: 872707 - DNA, 99 bp, Homo sapiens
attgaaggttgtgagtctctacagccatttgaactgcctatgaattttccaggtttatcaggtagaagatgtgtgtgaagaagaaatgccagaagagtc

SEQ ID NO: 872708 - DNA, 98 bp, Homo sapiens
gctttgtcctgcatgtagaaaggttgggataattcttcactattccacccttgccacagtactatgggtaggagtgacagctcgaaatatctacaaac

SEQ ID NO: 872709 - DNA, 99 bp, Homo sapiens
attcctcgcccacatctgtgccagcaccatcctgctgtatcacatcatggcgtggggcctggccaccctgctctgtgtggagggagccgccatgctcta

SEQ ID NO: 872710 - DNA, 98 bp, Homo sapiens
gtctactaatggacagttagtcacccacctacatgttgaggtctgtcagtttgtcgtctctgtcaacgggctcaatgtcctgcatgtagactaccgga

SEQ ID NO: 872711 - DNA, 99 bp, Homo sapiens
ccccagaccaagcaggacctggagctcccaaaggacagtgtggcactgaaggggggccgtggcagtgcttccatggtccagaagtgcaagctgtgtgca

SEQ ID NO: 872712 - DNA, 99 bp, Homo sapiens
agaaaggatgtgaaggtgtttaatttgagacatttgggaaatgatgaagtgcacattgtttggtcagagcatactagagactacaggagaggaattatt

SEQ ID NO: 872713 - DNA, 99 bp, Homo sapiens
gtggtgactgagcggagcccggtgacaggatgtttaactcgttcagcaaagcctgtgcggagcgagccagagctacctgtggaagggacctcagcgaaa

SEQ ID NO: 872714 - DNA, 99 bp, Homo sapiens
cctccttgatcaccaggataatattctctcattgattaatgtcaatgtgaaacaaagagtcctcttcgtggaaaagaaaaaaatacgctccctttaaac

SEQ ID NO: 872715 - DNA, 99 bp, Homo sapiens
ggagccggactgcggttggggcgggaagagccggggccgtggctgacatggagcaggtgtgagcctcagcagcgatttcattgctggcttttgtggtga

SEQ ID NO: 872716 - DNA, 99 bp, Homo sapiens
tcagccctctgaaaccgtgtccagcacaggacacttagagatggtgcgatttcttttggaagcaggcgcggatcaagagcataaaacagatgaaatgca

SEQ ID NO: 872717 - DNA, 99 bp, Homo sapiens
ccacattttcagaatagcttgttaatgtagcagcgtgagcaaccccacatgcttttttgactggatctgcaaaaactatcggtatacagtctgcaccaa

SEQ ID NO: 872718 - DNA, 99 bp, Homo sapiens
gtttgatgaccttcggaccaaggagaaggatctcgaggacctggaagaagcagaggagccagacatggaggaagacgatgatcagaaagctgtgaaaga

SEQ ID NO: 872719 - DNA, 99 bp, Homo sapiens
gggatccagagtaggagggagcctttggtgggacccactatgaaaatggagaatatattatcaggcaaggtgcaagaggggacaccttctttatcatca

SEQ ID NO: 872720 - DNA, 99 bp, Homo sapiens
tgagctgtcctttcaggaaggagccattatttatgtcatcaagaagaatgacgatggatttccagatgtgacttgcactcagaagatcagtggtcaact

SEQ ID NO: 872721 - DNA, 98 bp, Homo sapiens
gaagcaggactgcgccgcgtcttcctcaagatccagacatttaatgtggatgcaccatgccagaccgtggaagatttaacgaatggggttgtgatggc

SEQ ID NO: 872722 - DNA, 98 bp, Homo sapiens
cggccctactatgaggctcggcggctggctaaggagaagggagaattccacaagttggctgatgccaagatatttttgagcgactgcctggcatgtga

SEQ ID NO: 872723 - DNA, 99 bp, Homo sapiens
ctcattgtctatcttctccacctctgtgttgactcctagggctttctccagtgagtatcggtactttcccatcctcagggagaaatctctgtagtgctt

SEQ ID NO: 872724 - DNA, 99 bp, Homo sapiens
tggaacaaggagaagatccatggttattagagaaagagaaaggatttctaagcaggaactccccaggttatatacaggcatgtagaggacttatgatcg

SEQ ID NO: 872725 - DNA, 99 bp, Homo sapiens
agaggattgcctgaggccaggagtttgagaccagcctgaacaacatagcaattttctggagtgtttgtgactggactttaacatttccaaaatgtggcg

SEQ ID NO: 872726 - DNA, 99 bp, Homo sapiens
ggcatccaaatcttgcggcaacgcccccgggacatgcatcgtcccctggactctctcaatgggcttaaaattgaattcagtggatccaacaatgagcat

SEQ ID NO: 872727 - DNA, 98 bp, Homo sapiens
gaaagagaaacccggagggcgccggggttcgggtctggcggtacttgaagggcaaagacctggtggcccgggagagcctgctggacggcggcaacaag

SEQ ID NO: 872728 - DNA, 99 bp, Homo sapiens
gttgtcctcaattgcgtaggaccattacttgctggacagaagaaaagctcccccttctggacatttgaatactaccaaacattctttgatgtggacacc

SEQ ID NO: 872729 - DNA, 99 bp, Homo sapiens
tacacgtgggcaacgtacgtcagacggcagtggtggaaaagatccatgccaagtggtcccaggctgcacccatggcagaaggaggagggcagaatcatc

SEQ ID NO: 872730 - DNA, 98 bp, Homo sapiens
ttgaattaaaactgaatgaactgataacggagaatggaactgtatgccagcagcttgttgtacagtaatgagaggccctaagatcccagaggatgcca

SEQ ID NO: 872731 - DNA, 99 bp, Homo sapiens
gcaaaggtttcagcgtagtggcagacacgcccgagctccagagaatcaagaagacccaggaccagatcagtaacacatcaatgagtgcagcagcagccc

SEQ ID NO: 872732 - DNA, 99 bp, Homo sapiens
accgaagagggggtcgaggagagccggagtcggggacccaggagtttcctgtgtccagcgctgccggagccgcctgagatggagtcttgctctgttgcc

SEQ ID NO: 872733 - DNA, 99 bp, Homo sapiens
ccaacagaggggcaaatcagagtgaagaggaagccagaagatgggagagacatttttgaactatatcgagaagtttactgactttcttcggctctttgt

SEQ ID NO: 872734 - DNA, 110 bp, Homo sapiens
gacgcgagcggcgagccggagcgcggagcccggctcccgcaccatcacggcgacaacgtagctgtcgtcctcctccatggtgcgggagccgggctccgcgctccggctcg

SEQ ID NO: 872735 - DNA, 99 bp, Homo sapiens
atcaccaccggatcaacttcgacaaatacttcttggacacttaatgattgttggcaagaaatgtgctgctgatctgggcctgaataagggttatcgaat

SEQ ID NO: 872736 - DNA, 98 bp, Homo sapiens
cccccaatgctgaccaaggaggagcctgttccagaactgctggaagctgagtgcctccggagccagcgtggtggccatagacaacaagatcgaacagg

SEQ ID NO: 872737 - DNA, 98 bp, Homo sapiens
gagatgcttcgagtcctggaggaggatccccaagtagggggagtcgggggagatgtccagtcaagttcatccgagaagtaacaccatatatcaagaag

SEQ ID NO: 872738 - DNA, 99 bp, Homo sapiens
atggacccaatgaacatctgggatgacatcatcacaaatcggttgactatagtcaatggggccaatggagccaagtgtatggaaacccacaacagtatg

SEQ ID NO: 872739 - DNA, 99 bp, Homo sapiens
cctggaggagcagctgctcaagtactcgccggacccggtggtcgtccgcggctccggtcacgtcaccgtattttcagctgaactctcatctctcaacac

SEQ ID NO: 872740 - DNA, 98 bp, Homo sapiens
aggagggagaaaaatcgtattgccgcccagaagagccgacagaggcagacacagaaggccgacaccctgcacctggagcctgcagacagggggatttg

SEQ ID NO: 872741 - DNA, 99 bp, Homo sapiens
gccgttaatggggtgtcagagctgagctccccaccaagacagtttgctgcggtcagcatcacaactaatcaggctggttctgactcagaagatcttttg

SEQ ID NO: 872742 - DNA, 98 bp, Homo sapiens
tgcgtccaggcgtgacggtcatcccgaaaggccggccccagagcatccacaatgggtaccccagcctcggtggtcagtgagccacccccttggcaggc

SEQ ID NO: 872743 - DNA, 99 bp, Homo sapiens
ccgccgtgcacacagcagaggtttctgccatgctaataggaggtgacatgcagcgttccatgtactcaaaaacttctaacggtacagtaatatcatgaa

SEQ ID NO: 872744 - DNA, 99 bp, Homo sapiens
aagaagtttgatgtgccgtgtggaggaagagattgcagtgggggctgccagtgctaccctgagaaaggtggacgtgctcatgcacaattagttcgagaa

SEQ ID NO: 872745 - DNA, 99 bp, Homo sapiens
gaactcagttgtgcgttgcggccagtcgccactgctgattctggactctacttataatatccctaactgctggattctcctgttgcagcttttcttgga

SEQ ID NO: 872746 - DNA, 99 bp, Homo sapiens
agaagcttctgttaaggattctcagaagaatgaagtccaaggcttgcgagaaggtcatttccgtgggtcaaacggtcatcacgaagcatcggaacaccc

SEQ ID NO: 872747 - DNA, 99 bp, Homo sapiens
gaacatgtgatggaaaattatactcagtggctgcaaaaagcacttggaggtgtcccaggaagtcagccattactccccagtggaatggatccaactcga

SEQ ID NO: 872748 - DNA, 99 bp, Homo sapiens
cctacacaaccatctgaacaaaaagctgctttccccccacctgaacagaaaactgcatttgacaagtgtgcaacttgctttggtgtttgctgttttatt

SEQ ID NO: 872749 - DNA, 99 bp, Homo sapiens
gaggaaggaagaagaggacgccgggcgcgcaggtacaggtttgcagattccgccagcagcacagcaagctctacagatgagtggctctttggcatttgg

SEQ ID NO: 872750 - DNA, 99 bp, Homo sapiens
ggccgaggcaggcctgacccggggccgggcagcccgcgcgactttcggtgtggatgaggtcaccattgtcaacattttgaccaaccgcagcaatgcaca

SEQ ID NO: 872751 - DNA, 99 bp, Homo sapiens
cggagcccggccccggggaactagggagcgtctccggctgcacagcgctcaggttaaacactttaagatgagaaaaattgatctctgtctgagctctga

SEQ ID NO: 872752 - DNA, 99 bp, Homo sapiens
tcgagaggtggagacgctgtatcagtgtcagggaaacaatctataccaaaactcacctttcctggtggtttactaattggttgtagtcctggttttatg

SEQ ID NO: 872753 - DNA, 99 bp, Homo sapiens
tctccagggttctttggggcccgagtactatactggcaattgctggagaagattttgcaattgttgcttctgatactcgattgagtgaagggttttcaa

SEQ ID NO: 872754 - DNA, 99 bp, Homo sapiens
ctttttgtcagattatcaggatgagggtgacactgctgagtgtggagatgactgccctaaaagaggagagagaccgactcagagtcacttctgaggaca

SEQ ID NO: 872755 - DNA, 104 bp, Homo sapiens
gctccggcagagcgtgtctgaggccgcgaaacttgctctgtcgtaccactcgcctcatcgtgtcagcaccacggagccccgcacggcctcagacacgctctgcc

SEQ ID NO: 872756 - DNA, 99 bp, Homo sapiens
tgaatttggccacctggaggtacttggggaccctgacaagaggtgctagtcctatgggagtaaatggaggtgtaggagttcaaacgccgagtcttcttt

SEQ ID NO: 872757 - DNA, 99 bp, Homo sapiens
cagaggaggtcgtgggggccgggagtttgcggattttgaatatagggatgattgtcttttgaaagtgtggtatcctatgactggttggaagtcttcaat

SEQ ID NO: 872758 - DNA, 98 bp, Homo sapiens
gctgagcagagccctgcgatactattatgacaagtggaagatagatgataagcctgtaaaaattgacaagtgggatggatcagctgtgaaaaactctt

SEQ ID NO: 872759 - DNA, 98 bp, Homo sapiens
ccatcagcgcggcgctggccgagagccgcggctccgtgtttctggaaagtgacagcaggcaatttgaatcaacccatagaagtgacagcgctgtattc

SEQ ID NO: 872760 - DNA, 99 bp, Homo sapiens
ccatgcatgttatgaaagatctccttccagaaaccacctaccgaacatatcctcccctgagagttcccctgcgcataggcccgagtccctgtcacccga

SEQ ID NO: 872761 - DNA, 98 bp, Homo sapiens
aggtcccggcccgcttcacagtcgaggagagaaagcccaagaagatgaaaggattgttcttgttgacaacaaatgtaagtgtgcccggattacttcca

SEQ ID NO: 872762 - DNA, 99 bp, Homo sapiens
ccgctctgaatcttgccgccctgcactgccgcttcggtcactaccttgtcttaaaagaagaagcatctgattaccttgaattggatacaattaaaaatc

SEQ ID NO: 872763 - DNA, 99 bp, Homo sapiens
gtgggctctgctgctggatgtggatcaggctctctggaatgtctgtttgcacacttgaccttcacagaacatttcctcggcctcccaaaatgctgggat

SEQ ID NO: 872764 - DNA, 98 bp, Homo sapiens
aaacaaatggggcaggaaattgggaatgaattggatgaacaaaatggacagaactgtaccgctctctttttggccagctccaccctcccgacgaaggc

SEQ ID NO: 872765 - DNA, 99 bp, Homo sapiens
tggaagtcatcctgcacccagtcctgttcagctcagaaaaatgctcagtatgtcctggtgtttgatgcatttgtcattgtgatttgcttggcatctctt

SEQ ID NO: 872766 - DNA, 99 bp, Homo sapiens
cgagtcccggcccgatgccggccgaactcagacaggtctacgtgttgaagcgtcctcacgtggatgagttcctgcagcgaatgggcgagctctttgaat

SEQ ID NO: 872767 - DNA, 98 bp, Homo sapiens
acctcccacctgtcctcaggcatatcaaagaacgtgtttgtgcaactgtccttggcctttagaaatgacagctacactctggaatctagaattaacca

SEQ ID NO: 872768 - DNA, 99 bp, Homo sapiens
ctcctgagtggctgggactacaggaactgcctcttttctaaagaggactccaaaggaaggactggtcatctctttcatatctcaaaaccatggctcagg

SEQ ID NO: 872769 - DNA, 99 bp, Homo sapiens
acagattccagcttcggaacaagagaccctgggtggcatggagaaatcgttgtcaaaacagagatgtccgtcagtatgttcaaggttgtggagtgtaac

SEQ ID NO: 872770 - DNA, 98 bp, Homo sapiens
gcaggacaggacgaagccggagtgtaggcggcagaggattcgctcccagagcagctgcggccagacttgtgtgcgagacagagccactctttctatcc

SEQ ID NO: 872771 - DNA, 99 bp, Homo sapiens
cttggaaaatattctgcagcagcagtgaatcagatacattgggatttttcaaatactggcacactacctgcttaatcttccgtggctgttgcattggca

SEQ ID NO: 872772 - DNA, 99 bp, Homo sapiens
atggactcatcttcatggaaacgtctgctaagactgcttccaatgtagaagaggtgtacctgaaggaaatcttaaaagaaattggtgttcagaatgtaa

SEQ ID NO: 872773 - DNA, 99 bp, Homo sapiens
ggggagcccgggggtgttgtggttgatgaccacctgtaccgtagggatgtccaggcccctgggggtggacctcctgcagggagttgaagaagggctcaa

SEQ ID NO: 872774 - DNA, 100 bp, Homo sapiens
cagcacccattcttcaaagagattgactgggtgctcctggagcagaagaagatcaagcgctccaggagcacccagtcaatctctttgaagaatgggtgct

SEQ ID NO: 872775 - DNA, 99 bp, Homo sapiens
tggctgttccaatcgctcctgtttgtcttctgctttggcccagcaactggaacagatccagaaggagctaagtgttttggaagaggatattaagagagt

SEQ ID NO: 872776 - DNA, 150 bp, Homo sapiens
ataaaggcttacttactccaatcataaaagatgctgctgctaaaggtatccaggaaattgctgactctgtaaaggtattacatttatgcactgtctgctgccaaagatctgaaaccaatgatctcatatatatggtacagttttctagtt

SEQ ID NO: 872777 - DNA, 99 bp, Homo sapiens
tctgtttctctgctgcaccgacctcgacgtcttgcctgtgtcccacttgttcgcggcctatagggagttgaccacatttggccatttcccagaagggcc

SEQ ID NO: 872778 - DNA, 99 bp, Homo sapiens
gtccaggggatcctgctcatctcagctgtgccagcaccctggggttgaggaactgcctctgctggagccagttctgcttctcggcaaggagcgatttgc

SEQ ID NO: 872779 - DNA, 99 bp, Homo sapiens
ccagtatttgcaataagaattttagcattttcaattcgttttggttgatttactccaatttttttatccaacaggaagctcaggaggctgaggcaggag

SEQ ID NO: 872780 - DNA, 99 bp, Homo sapiens
ctggagtccgtgtaagctcggcgacagccctagcagcgaggccaaaacaggtagaagatgacagattattgaggttgtcccaaaagaagttctgtgctg

SEQ ID NO: 872781 - DNA, 99 bp, Homo sapiens
tgcagactttgctgagggtgacccaggaaagaccacagcaagattctttcattcgtctcctcctagcctgggggaccaggctcgaactgaccctggaca

SEQ ID NO: 872782 - DNA, 99 bp, Homo sapiens
tatcaatcagccagctgaattcattgaggaccagtcaattctaaactgatcgaatcatcaatttagttgttggcagcttaacatccttattgattctag

SEQ ID NO: 872783 - DNA, 99 bp, Homo sapiens
cacgttcatgggcgagggaacagatgagaaacccggcaatgaaagtgctggagagtcatgcctgtgagccctgggcacctcctgatgtcctgcgaggtc

SEQ ID NO: 872784 - DNA, 99 bp, Homo sapiens
agcctggtgagggtgatgttcgggaggaggccttgtccacagagtttgtggtggattgtcgaaaatttttggattcaaatgctctgggcctaactgtca

SEQ ID NO: 872785 - DNA, 99 bp, Homo sapiens
ggcacccagtaccatattctctggaggttttagacacgactttgtgttttatgccccacgtctgagaatcaacaagcggatcctgcagctctgcatggg

SEQ ID NO: 872786 - DNA, 99 bp, Homo sapiens
ctcagccgccgcatcgcgggggtggaggacatcgacatccaggcgaactcggcctatcgctaccctccgaagtccgtagagacggggtttcaccgtgtt

SEQ ID NO: 872787 - DNA, 99 bp, Homo sapiens
gctgacttggctggcaactctgaagtcatcctgccagtcccgcccccattcactggggagaatagaaagaaaacaattgacaaaatcctcaaatgtaaa

SEQ ID NO: 872788 - DNA, 99 bp, Homo sapiens
cataatggagccatgggtggtctgggctcagggtatggaaccggccttctttcagccaacagacattcactcatgtgtcagagatggctttggattccc

SEQ ID NO: 872789 - DNA, 99 bp, Homo sapiens
ccttccaaagtgctgggattacaggggatgacgactcatttaatttacataacagcaatagtactcaccaagaaagggatataaaccgaaacttcgatg

SEQ ID NO: 872790 - DNA, 99 bp, Homo sapiens
tttgttgattatgattggctacagtgatggaatgcaggtctggagcatccctgatctagtgaaaagccatttgatgtatgcggtcagagaagaagtgga

SEQ ID NO: 872791 - DNA, 99 bp, Homo sapiens
aaattcttcttgaaggctgtgctgagaaaagtaaacagctgaaggatgaaggagccagtttggctgaaaataaaaggccctgggaggagcggggacact

SEQ ID NO: 872792 - DNA, 99 bp, Homo sapiens
ccggcgcttgcgcggcggcggctatggcggcggaggaggaggaggtggactctgccgacaccggagagagaaatgcactcggtgatggaaagagagcca

SEQ ID NO: 872793 - DNA, 99 bp, Homo sapiens
cccacgatccgcgtgcccaggtccggcgacagggtctacaagaacgagtgcgccttctcctacgactctcccatgcccagcctacagagtctgagaagg

SEQ ID NO: 872794 - DNA, 99 bp, Homo sapiens
acagacactgctttggtgctgtttgtgttcatggtaggataagactttgattcaaccagtacttctggagtgtatggtattggtcatcattgatgtgaa

SEQ ID NO: 872795 - DNA, 99 bp, Homo sapiens
ttttctactgtacaccccatcccagacgaagacagtccctggatcaccgacagcacagacagaatccctgctaccatggagcagcgtgacttcattgga

SEQ ID NO: 872796 - DNA, 99 bp, Homo sapiens
attgttgagcatgtcattcatctgttcaaggaggaagtaatgaccaaattaagtcattttcgagaatgtattcctggagtggagagccactctttttga

SEQ ID NO: 872797 - DNA, 99 bp, Homo sapiens
ttcagatcctcaatagacagcccatggagggtagatctcggattcaagaacttcaacaggaagtccaccagctacaagaaaagttagcaatgatggaaa

SEQ ID NO: 872798 - DNA, 99 bp, Homo sapiens
tgggacacacctccattggatttaaaagacagtcctcgtcagcactgactttcagctatggaatcgacctggaatggccaaatatcaaggtgaagttca

SEQ ID NO: 872799 - DNA, 99 bp, Homo sapiens
accgagagcgcgaatatcgtcatcgttagaaggtatttacctcctgagtgttttgtagttggaaaagagccaccaaagatttccaacaaggttgatgta

SEQ ID NO: 872800 - DNA, 99 bp, Homo sapiens
taaagatgaatgctgcttcgatgcaaatcaaccagagggaagaaaatgcaaactgaaacctgggaaacagtgcaggctggagtgcagtggtgcaatctc

SEQ ID NO: 872801 - DNA, 99 bp, Homo sapiens
acagaactatgcgaaacaattgaggcaggagctgggaggaggcggcagcggcggcggcagaaacagcagcggcggcggcggcggcagctgggaggaggt

SEQ ID NO: 872802 - DNA, 99 bp, Homo sapiens
gcagtagatgaaatctatgtaacttgcgaatcagatcagagtgtggtcgaatgtaaggcatttggttgccaagctccagctttgaagaaccaaattaag

SEQ ID NO: 872803 - DNA, 99 bp, Homo sapiens
ggtggagacgtggtactcagcaagctcgagttaaagttggatgtgctggaacaggttctgaagaaagtctccaaatacattcaagagcagaatgagaag

SEQ ID NO: 872804 - DNA, 98 bp, Homo sapiens
gggctgcctccaggtgacagcaatcagctggcctggtttgatactgacctgtaaatcatcctttaggttcctggtacagttcagacaggacaaagtat

SEQ ID NO: 872805 - DNA, 99 bp, Homo sapiens
ccagttggcccagaggatctcttctaacatccagaagatcacacagtgttgcattatccaattggtttgctatttgatcttcttgcatcaagttcagct

SEQ ID NO: 872806 - DNA, 99 bp, Homo sapiens
ggcatgtcatctttgccaggactgatgcagatgcccctcctccaccagaggactgggaggagcatgtcaacaggaggagatgttaaagtaacccatctt

SEQ ID NO: 872807 - DNA, 99 bp, Homo sapiens
ctgcagggaggaaaaggccgtgaggatccgcaccagtttggggaaagcctgggggcctgagacagggcccagcctgtaatcctagcactttgggaggct

SEQ ID NO: 872808 - DNA, 99 bp, Homo sapiens
agaaatcaagcagaagattgagctgctgatgtcagttaactctgagaagtcgtcctcttcagaaagtctatgcagatggtagtatatgtctggacatac

SEQ ID NO: 872809 - DNA, 99 bp, Homo sapiens
gaagcccatgttgcagcgggactttattaccgctttaccaggttgtgaactaaaggccgacaaagattatcactttaaggtggataatgatgaaaatga

SEQ ID NO: 872810 - DNA, 99 bp, Homo sapiens
ggatttgcacccctcgctgggcttgctttggcaacagagtgcctgacccaggtcagctgctccctggtggttacctgtgaaaggcgctaactggagaca

SEQ ID NO: 872811 - DNA, 99 bp, Homo sapiens
caaatccattaagttgttccaaagcctttttggcacattctgagtcagaaaacacatctctggcgatttgtccaccctggtgagctgcctgtctcttgg

SEQ ID NO: 872812 - DNA, 99 bp, Homo sapiens
tcctgatacagcaggcgctcaccatgttccctggagaatatatacagccctgctctgggacacacctccattggatttaaaagacagtcctcgtcagca

SEQ ID NO: 872813 - DNA, 99 bp, Homo sapiens
tttcagcctccagtactggggatttgccaaaaggagtagcccatcgaagccagagcagtgaaggagtcagttctctcagcagctcgccctctaatagcc

SEQ ID NO: 872814 - DNA, 99 bp, Homo sapiens
gcagcgtcctccccaccccacctgccaccgaggccccctcttcgcctcctccagtgacctcttccatcccagtatttgacctccaggatggtggacgga

SEQ ID NO: 872815 - DNA, 99 bp, Homo sapiens
acagacgtggatgaagaatagctctgcaggcactcaaggagttgcccctggtcctgtaattggacttcaggcaccatctactggtcttcttggcgcccg

SEQ ID NO: 872816 - DNA, 99 bp, Homo sapiens
ccgaagaagaaaggattcgttacagccagagattggttcgatggatgatgtactggattgtttttgctctctatactgtgattgaaacagtagccgatc

SEQ ID NO: 872817 - DNA, 98 bp, Homo sapiens
gaagaaaggattcgttacagccagagattgctgtgcggtcagagaagaaacgccttaggaagccaagcaagtggcttttggaatatacagaagaatat

SEQ ID NO: 872818 - DNA, 98 bp, Homo sapiens
gtaaatactcaggagtgggattgctggatcatatgttcccagaaatgaatgctatgatcatgcgacggttcagtttgcctggagatgtagacagagct

SEQ ID NO: 872819 - DNA, 99 bp, Homo sapiens
cgcagtctggaaagctttaggagttcacagtgtctatgaaaattatcctacttatgatttaactgaaagaaaagatttcataaaaacaactgtaaaaga

SEQ ID NO: 872820 - DNA, 99 bp, Homo sapiens
tattcagaagaatgcaggacttgcatttattgagctcatcaatgaaggaagtactgtaagattgatgttaaaggcatggtgttcaccccacttcatcag

SEQ ID NO: 872821 - DNA, 99 bp, Homo sapiens
atcagaatcaacattgtgaactatggctgccttgtatcctgctctctgtgcatttaaaacctcccccatgaagactctgcatatctccagcctgttgca

SEQ ID NO: 872822 - DNA, 99 bp, Homo sapiens
tttcctgagttgctgtttcttgggactgcgaagctatacaggctgtgcatgtgagggaaccctggcttgttcaacctgtcacctcatctttgaagatca

SEQ ID NO: 872823 - DNA, 99 bp, Homo sapiens
caaaagagggaggagatgcgactcgaagcagaaagataaatttgcgcctcattttggtaagcggaaaaacaaaagagttcctgttttctcctaacgatt

SEQ ID NO: 872824 - DNA, 99 bp, Homo sapiens
cctcctgagtagctgggattacagattccagaggggtgactaccatattgatgtctgtatcaatgactacctggatgttttctgccctcactatgagga

SEQ ID NO: 872825 - DNA, 99 bp, Homo sapiens
gctggatgctgggagcaggctggtgatgcatctccgcgagtggccagccctgctggtcagcagcacgggctggacagtttacatgagctggtgaaacat

SEQ ID NO: 872826 - DNA, 99 bp, Homo sapiens
ccttattgtactagaggtccgaacttgctgagattttgccttgtccgcttcctgaacttctccatttgcttgtagaggtctggatcaagctcctgagac

SEQ ID NO: 872827 - DNA, 99 bp, Homo sapiens
ttacgtgtactttaccaacgagctgaagcagatacaggctagttccaaaggtttattttcctgagcaaattcatgatgttgtacgggccacaaagtatt

SEQ ID NO: 872828 - DNA, 99 bp, Homo sapiens
ctcgcccggaagcaaggcctctggaaaaccgcggcccctgagttgcaaacaaatgtcagatcccaggtaattaagaatcgttttcatcgtgtgttccta

SEQ ID NO: 872829 - DNA, 98 bp, Homo sapiens
aactttcagtcccaagttactcaggtgatagaggactggcacagcctccaggttggcgggctcatctgcgctggggttctgtgcgccatgggcatcat

SEQ ID NO: 872830 - DNA, 98 bp, Homo sapiens
caagaaaaataagaagaagaaaggagacagagtcaacaattcaattgtgttctaagaacggaagcatctgggctggatggaatttagcatcaagcaga

SEQ ID NO: 872831 - DNA, 99 bp, Homo sapiens
agagaaaccttctcagaagccctcggcacactccctctcatgcggcgttggctagggctgggttgcagcactcttcccaattattctaatgtaaggaag

SEQ ID NO: 872832 - DNA, 99 bp, Homo sapiens
aatcttttatttgcaaagagaaactaggttatactactccaactgccccccaggcatacagccagcctgtccaggggtatggcactggtgcttatgata

SEQ ID NO: 872833 - DNA, 99 bp, Homo sapiens
atggggcttattctcttgtactggctggtggatttgcggatgaagtcaaatgttttagcaagtgcatcagctgacaacactgtaattctgtgggatatg

SEQ ID NO: 872834 - DNA, 99 bp, Homo sapiens
aaacatccaagaaaaatgtccttaaagcaattgagcaggctgatctactgcaggaggctcccagccaacctctgataaaccctcccagcggccatcaga

SEQ ID NO: 872835 - DNA, 99 bp, Homo sapiens
cttggccgccagttcttctgcagccgaaggcggatcctcagtcttccacaatgaaccctgtttacagccccgtgcagcctggggctccttatggcaacc

SEQ ID NO: 872836 - DNA, 98 bp, Homo sapiens
cgtctctcttcagctcactgaccatctgcctacctcccgttaatggaaccgcgactcacaggtctgccatcatggatgttctcgcagaagcaaatggc

SEQ ID NO: 872837 - DNA, 98 bp, Homo sapiens
acagacacatcattggatgtgttggaagatgctactctcagacataaggaagagctggctttatgtgctggggcagaagagatccgatagctatgttc

SEQ ID NO: 872838 - DNA, 99 bp, Homo sapiens
tttctaagagaaaacgagtgtgtctcctgtagtaagtgctgtgacatgtatatggatgaatgaacagtgtagcagtatcatcacaggaggggaagacag

SEQ ID NO: 872839 - DNA, 99 bp, Homo sapiens
ccgttaccattacgggaatcctctccaaagaaggaggagactgtagcaaataatcgttatgtaccttcaggtgttagagtgtgagcgtaaccaacacct

SEQ ID NO: 872840 - DNA, 99 bp, Homo sapiens
gtcgccatcttggatccgcgggacaagaaaattcatgcggtggtgaaattgcctctacctttgatcacccagaactggtgaagcttggaagttgcaaac

SEQ ID NO: 872841 - DNA, 99 bp, Homo sapiens
tctaattgaagccaacggagaactcaaggtcttcatagaccagaaccttagtcccgggaaagggcttccgagtggacctgccaatcaagtcggcccgct

SEQ ID NO: 872842 - DNA, 99 bp, Homo sapiens
ctgagttcggccggtccgagtcactgtgcgtcgcctgggcccgttcctggtcttctcccccaggtccactggtctccacataatgaaactattctggct

SEQ ID NO: 872843 - DNA, 99 bp, Homo sapiens
acctgcagtgggtttactgctgttccatctccccagactgcagcatgctgtgctctgcagctggagagaagtcgaccctggtgggcagcagtgggacca

SEQ ID NO: 872844 - DNA, 99 bp, Homo sapiens
ttctatagaaatggctgaaggaaaacctccttatgctgatatacatccaatgaggatgttctcagtgcagctgagtcttggtgagcagacatgggaatc

SEQ ID NO: 872845 - DNA, 99 bp, Homo sapiens
caccagcgtcctgaagcttttgatcaccattggctgggaaggaaaaacagaatcagctgttccctgcgaaaggaagaagatgaagtaccggacgatgag

SEQ ID NO: 872846 - DNA, 99 bp, Homo sapiens
gcagatgccatcgcctggtctctgggactaccctcatgagggggtgcaggaatgtgggcagcaggaagagcttggcggacggcaccaccgtaattttct

SEQ ID NO: 872847 - DNA, 99 bp, Homo sapiens
ctgtcatcccacctgagaaccatgctcaccgaccctaatatatacagccctgctctgggacacacctccattggatttaaaagacagtcctcgtcagca

SEQ ID NO: 872848 - DNA, 99 bp, Homo sapiens
cccatctcactgtggaagatgcaacagttgaaagaaatggagcctgtgaaagcactttgtgaaccccagagggaattcggcaccggttgagaggtagtg

SEQ ID NO: 872849 - DNA, 99 bp, Homo sapiens
cgatgccgcggggccgccccccgaagcccagggagagcaaggcgcgcggcgactccgatgaataatacggcagctagtccaatgtctactgcaacttca

SEQ ID NO: 872850 - DNA, 99 bp, Homo sapiens
cagagcctgtgggaagtctccatggtgaagtataggctgaggctacctgtgaacagtacgcagtgaatgttatttggaggccaatcactgccacctttt

SEQ ID NO: 872851 - DNA, 99 bp, Homo sapiens
caagaatctcgtgctcaccggtttctcccacatcgacctgatcctcctggccaacttcttggcccagacagaggccctgatgaggggaaaatcgacgga

SEQ ID NO: 872852 - DNA, 100 bp, Homo sapiens
cgtttgatgaaagatttgggcttgaagacaatgatggggcatgggcggccatttgcatatgtcatcttctgggtcttcaagcccaaatctttcatcaaac

SEQ ID NO: 872853 - DNA, 99 bp, Homo sapiens
taacaatgatcgcccgagtggcggacgggctcccgctggccgcctcgatgcaggaggacgaacagattccagaattctctgatggtttctggactgggt

SEQ ID NO: 872854 - DNA, 98 bp, Homo sapiens
aaattgttaggcgtggagagggagtgatgtcttccagactcggtgctgtacccgcccaggaacgaatttcatatacacctccagagagcccagtgccg

SEQ ID NO: 872855 - DNA, 99 bp, Homo sapiens
ttagggtgtataatgaagttcctactttccaactggagatccataatgagatggcatcaacatcagataaaggtgcccaaggaagaaatgacaagaaag

SEQ ID NO: 872856 - DNA, 99 bp, Homo sapiens
ggcctccccagccacgtgaaactgtctgtaacattgtggctgggcagcgctgtattaaaaagctgaccgacaaccagacctcgaccatgataaaggcca

SEQ ID NO: 872857 - DNA, 98 bp, Homo sapiens
gactcctcacctccaggatgagcactgcagtgtcgtgacccttggggttttgcttgcactttccagtgacaagattgctgcattacgaatgccacttt

SEQ ID NO: 872858 - DNA, 98 bp, Homo sapiens
aaccaaagcccatgtgttcgagtgtaatttagagagcagcgtggagagtatcatctcaccaaagattattcaggacagaatattcaagcacatatcac

SEQ ID NO: 872859 - DNA, 99 bp, Homo sapiens
gtaaagctagctgctgagaatacagaaatgatccttgccagcacattacagaatatttttgttgaaccttcttgagaattcagagaaactgctgagtga

SEQ ID NO: 872860 - DNA, 99 bp, Homo sapiens
ttcttgcctcaggccagtcgcctccaggccaagagggatccttcacccgtgtctggttaacacagaaatctgcctcctgggccatgccgcttctaaggc

SEQ ID NO: 872861 - DNA, 98 bp, Homo sapiens
gtatcattcggaaggcggtacagacagccattaccatcctggttccagacgcaaacatgcagatctttgtgaagaccctcactggcaaaaccatcacc

SEQ ID NO: 872862 - DNA, 99 bp, Homo sapiens
gagagctggttgccttggctccctgtagctatagcagccgcggcggttaagtatgcggcgccaggagctgatagaccatgaagctgaaggaacttgagc

SEQ ID NO: 872863 - DNA, 99 bp, Homo sapiens
ggatggttcagtacaaatagcaggttctaaggcccagcagctactacaaggattgcaagccagtgatgaaagtcaacagcttcaggcagttattgagat

SEQ ID NO: 872864 - DNA, 99 bp, Homo sapiens
ccacttttgacaccatcacctacgagtgggctccccctggagtcacccagaaactgtgaatttgggtggtttgaaggatcacataaaggagatccagag

SEQ ID NO: 872865 - DNA, 102 bp, Homo sapiens
ccaggagctgctgcaggaagcgggcctggcgttgatccccgataagcctgccactcagtgtatttcagacggcaaggaccacaaagttgaagaattcatcaa

SEQ ID NO: 872866 - DNA, 99 bp, Homo sapiens
gtaaatgagggtgttgatttctccaaggatctgctgaaaacacaaatgccagaccctaagaccttcaagcagcactttgagagcaagcatcctaagact

SEQ ID NO: 872867 - DNA, 99 bp, Homo sapiens
agagattccttgcagagacagctcaacacggcacttccacaggtactgacttgggcaacagcagtgactacaagtgccatactgaccaattggaagagt

SEQ ID NO: 872868 - DNA, 99 bp, Homo sapiens
gagcgagctgagtggttgtgtggtcgcgtctcggaaaccggtagcgcttgcagcatgtcgtggcattcctggtggctttccatcagaacaagcagctca

SEQ ID NO: 872869 - DNA, 99 bp, Homo sapiens
cgttcggtggtttcttgtgaggacgcggcagcccgtggagtcggctgagggaaaagcgaggcaaggcaggcgggattgtggtttgctgattcatccaga

SEQ ID NO: 872870 - DNA, 99 bp, Homo sapiens
cggcttcagggacctgcggcagttcatcgacgagtatgtgaatggcctgtccagaagacagccaaatacatccttcaaacagacttcactgcaggagac

SEQ ID NO: 872871 - DNA, 98 bp, Homo sapiens
gtaaatcctgcaagccaatcccagaaaaggaagatggcgccatttctaccatagtacttcgaggctctacagacaatctgatggatgacatagaaagg

SEQ ID NO: 872872 - DNA, 99 bp, Homo sapiens
gctcagacacctattaccagaggtacactcacgtggaagctgagtgtcctttcctgacttttgacgacctcctgaaccggttggaggacttggtttgtg

SEQ ID NO: 872873 - DNA, 99 bp, Homo sapiens
cgagatcaacataaagaagccaaactctgttccccaagagctcgcactgactcaggtgttgacaccttggcagtgtttatggccagcagcggaactaca

SEQ ID NO: 872874 - DNA, 99 bp, Homo sapiens
cgcgagtgaggaaaggaggtactgtagatatgcacccaatgtccagggagcgtgcaaaatttgtcaaaagtggccttttattgtaaaacgacacgagag

SEQ ID NO: 872875 - DNA, 99 bp, Homo sapiens
tccaaacaggccctccagaatgagctggagagactgaaagagaccttgtgccggagccgactactggagatgacagtgatgctgccacctttaagccaa

SEQ ID NO: 872876 - DNA, 99 bp, Homo sapiens
tctgcgggatcttcaaccacctcgagcggctgctggacgaaggaagatgatccctatgatcttgaagatgtttctgcacagaaatgagggaaatacaaa

SEQ ID NO: 872877 - DNA, 98 bp, Homo sapiens
aaagcctgaagaccccggagcccctttagccatgtggatacctacggagcacgagaaatacggcgtgggtacttcgtactggatttcgaggctggcat

SEQ ID NO: 872878 - DNA, 99 bp, Homo sapiens
ggacattattgcgcgtggaacggctgcttttggaaggaatgtatcctgtcaggtataatgtcagtgaatggcaagaaagttcttcatatggatcgaaac

SEQ ID NO: 872879 - DNA, 99 bp, Homo sapiens
acccttcacctttgatcccctgacctgcattaccttggatcaaaatggtttcaatcccagaatactatgaaggcaagaacgtcctcctcacaggagcta

SEQ ID NO: 872880 - DNA, 99 bp, Homo sapiens
caaccctgtctgtaggaggaaaaactgtatcacgttttcgtgttgcacgttttcaaaaaatacctaatggtgaaaatgagacaatgattcctgtattga

SEQ ID NO: 872881 - DNA, 98 bp, Homo sapiens
ccctcccccgatccaagttggaattagcatcctctcggggctccattttcagtccggcagcacacattactctgcgtacaaaacgattgaacaccaga

SEQ ID NO: 872882 - DNA, 99 bp, Homo sapiens
ggtgatgtggctgcggcatcgccggcctcgctatgtctggctcttgctgattgaattcctttggtgcagtttagcatgttcctctgtgttctgcatctc

SEQ ID NO: 872883 - DNA, 99 bp, Homo sapiens
ctatggcctaccatatgttccaaatactctccagggtttgagccacaatgtgatcttcaccttggattctttgttaaaaggagacctaaagggagtcaa

SEQ ID NO: 872884 - DNA, 100 bp, Homo sapiens
ctcagcactttgggaggccaagatcatggaggacacccaggctattgactgggatgttgaagaagaggaggagacagagcaatccagtgaatccttgagg

SEQ ID NO: 872885 - DNA, 99 bp, Homo sapiens
tccaacaagagcactggccaagtcaggttggaatcgggaggtagtaatcctacaaccagtgattcttacggtgaccgggcttcagcaagagcccgtcgg

SEQ ID NO: 872886 - DNA, 99 bp, Homo sapiens
acgctgtttttggactatctgacaagtaaaattaaaagtcgtcttggagacaaggaagcagttctcaacaggaaaatgtttataggaggccttagctgg

SEQ ID NO: 872887 - DNA, 98 bp, Homo sapiens
ccccgtcaggggagaagtcaaagtgaccaaacttctcgaccgagaaacggtgtggcctgaagtcactgatcctgagaagttcgtgtatgaagatgtgg

SEQ ID NO: 872888 - DNA, 98 bp, Homo sapiens
tccagctgttagccagaagcctcccttccagtcaggggatgaaaactttcggaagagaaagttgcctgtggtaagttcagttgttaaagtaaaaaaat

SEQ ID NO: 872889 - DNA, 99 bp, Homo sapiens
ctgaagtttgaaggtctttgctgccatcctttcttctctaaaattgactggaacaacattcgtaactgtatttaccttgctgtggattgctgactggat

SEQ ID NO: 872890 - DNA, 99 bp, Homo sapiens
cgggactaagagagccgaggtcgctccccatccactctcacaagaggctgaggggatctggcggtggagcgctaggatcagacgcccccgcgatgacca

SEQ ID NO: 872891 - DNA, 99 bp, Homo sapiens
ggctttggaatatgtgttcaagttcattgttcggtcgaggacattattttcacataaacaaatccgagctatgctgggccagttcagccaggcagaagc

SEQ ID NO: 872892 - DNA, 98 bp, Homo sapiens
gtgctccagctgaaggtgcgagaagaagtcagaaatctacagttactcacacaaggaagatattgcatggtctgctcttgtgaagttgtttgatcccg

SEQ ID NO: 872893 - DNA, 99 bp, Homo sapiens
gctggagaatatggtgcagaggccctccacgatagagccacgaaccccctgaacaaggagctcgactgggccagcatcaacggcttctgcgagcagctc

SEQ ID NO: 872894 - DNA, 99 bp, Homo sapiens
tgttgctgcatccaaaccaatgcacccaggaagggaagacatgcttttgtcctctacagatttgtctgccatgcccacatctctagacgtccagcgaca

SEQ ID NO: 872895 - DNA, 99 bp, Homo sapiens
cctcctgagtagctgggattacaggtttatttgcaagatgggtttgagggaattaaggataaagtctgctgaaagtagcaccagcctctggattaaaag

SEQ ID NO: 872896 - DNA, 99 bp, Homo sapiens
cattattttaacatttgggagaaacacagccagaaggtactaggttttgacaagcttgcatcatgcgtgagtataagctagtcgttcttggctcaggag

SEQ ID NO: 872897 - DNA, 99 bp, Homo sapiens
tgggagaaagaatatttgccctggaagattttattgtcaagatatccgagcttatgacattttatttggagatacaccgcggcctgctcaagccgaaga

SEQ ID NO: 872898 - DNA, 99 bp, Homo sapiens
gtcatacaggcaagacctggcataatacattttggaggctatcaagtagaaaaacaacaccaacagattctgctccagaaactaaaacgatcactttct

SEQ ID NO: 872899 - DNA, 99 bp, Homo sapiens
gaagcaggaagccctcacctttgccaggaactggggggccgactatatcctgtaggtgacctcacagtgactcaagctaccacttactgttgattgtga

SEQ ID NO: 872900 - DNA, 99 bp, Homo sapiens
gggattccactctccagtgtaatgattattgacaacagaatgccgaactggggaggaggcaagaaatgtggggtgtgtcagaagacggtttactttgcc

SEQ ID NO: 872901 - DNA, 99 bp, Homo sapiens
gtttgtccagtggaagaccatctacatctcccacaggaagtgtcacacagcagtcaagtatgtcccaaacgtctgtaattaataaaatgtctccaacat

SEQ ID NO: 872902 - DNA, 99 bp, Homo sapiens
tgatcaaggaagataccctgggtttggtagatctctttgaggacgagcaatactgtatcttcagactcccctgttcaaagctgctaggaccagtttgtg

SEQ ID NO: 872903 - DNA, 98 bp, Homo sapiens
cagaaacaaccatggccaggatacgaagaactgataaatttcaaacggaagagagtggcagcatttagaaagaatctaattgaaatgtctgaactgga

SEQ ID NO: 872904 - DNA, 146 bp, Homo sapiens
ccttgttggccatgtctggggaaagcaggaaggacccgaacatggcgatggaggattttggactgcacttcgcggctcatgccataggaaggacccttgttggccatgtctggggaaagcaggaaggacccgaacatggcgatgga

SEQ ID NO: 872905 - DNA, 99 bp, Homo sapiens
tttgccgcagttcatcttcctccctgtgtactttccatttgccttcctgggaagagagagaaaatccttcaaaacggagtagaattgaacgtgatatag

SEQ ID NO: 872906 - DNA, 98 bp, Homo sapiens
ccagcagtagcctctgcgaccaggtgcggcttcagtacctccctgcacttggctattcaaaacgggtccatctgatgaatcctatggttccaggatta

SEQ ID NO: 872907 - DNA, 99 bp, Homo sapiens
cctcttcctcctcctccgtgtctgcctggaagccgtccatgtcttcagcaccaatctgaattctcaattgctttatgccgcttatttggaagggccaca

SEQ ID NO: 872908 - DNA, 99 bp, Homo sapiens
gaggaaagaggaggaaaacaaaagctgctacttatggaagatacaaaggctcaaattgaaattattccatgcaagatctgtggagacaaatcatcagga

SEQ ID NO: 872909 - DNA, 99 bp, Homo sapiens
tgtacttctgggaccttcaggactaaatagtattaagggtcacatgcccactgtggagctcctgaaaaagtatcacctgatgcagtttgcggaagtaac

SEQ ID NO: 872910 - DNA, 98 bp, Homo sapiens
tggaagggtggacctgtcaagattgaccctctggctttggtacaagccatcgagagataccttgtagttagagcttccagatgctgtatgccgactgc

SEQ ID NO: 872911 - DNA, 99 bp, Homo sapiens
gaaatatgaagatatctgcccgtcaactcataatatggatgtccccaacatcaaaaggaatgacttccagttgtgtactgtcagctatggaaaagtcaa

SEQ ID NO: 872912 - DNA, 99 bp, Homo sapiens
tgggcataggaccctctgagccagcttgacaactggtcatttctacaaacatttaattatacgttataccccataacctttccaagtgagaatgcagca

SEQ ID NO: 872913 - DNA, 99 bp, Homo sapiens
gggcaggaggggcctttgcagctcaggtggcacaagaatggctcaactctccaaatagagagaatttctatcagttgcaagtacgaaaatttcctgccg

SEQ ID NO: 872914 - DNA, 99 bp, Homo sapiens
ccaatgttgacgttggccagggccatcgtcattcttcttgatgacataaataatggctccttcctgaaaggacagctcatcttccttgtcttttgtata

SEQ ID NO: 872915 - DNA, 99 bp, Homo sapiens
cttgacagcagatattgtcataaatctgttactttcctacagagatatccaggcctgtctccactaactctggaccctaaaacagctcacccaaatctg

SEQ ID NO: 872916 - DNA, 99 bp, Homo sapiens
aagaggaagatgaagaggaagaggaagaggaagatgaagaggaagactatgatgtttataaaagatgtatcggcaagcagtgtaaacggaggacttggg

SEQ ID NO: 872917 - DNA, 99 bp, Homo sapiens
cctagacctggaatcgcccaagtccctctactcgcgaggtgcagaccatgaattacgtggggcagttagccggccaggtgtttgtcaccgtgaaggagc

SEQ ID NO: 872918 - DNA, 99 bp, Homo sapiens
ccagtgaataaagatttggaatttcagctccatgaaccatttcttctgtatagaaatgcaagctggagtagagctgtggtaatggagtgtcagtatggg

SEQ ID NO: 872919 - DNA, 99 bp, Homo sapiens
cctgctgttctcgggagccgtggccctgatccagacctgggcaggttgcatcataaatacaaaggactgaagttataaaagagaaaagagaagtttgct

SEQ ID NO: 872920 - DNA, 99 bp, Homo sapiens
actctcagtttgtgtttctgagaaaggacttttttcaggagatattgcacctttaatgcaagaaaaagtactaagcgcagtcacatatgctgttgatga

SEQ ID NO: 872921 - DNA, 126 bp, Homo sapiens
aacacaaaaagggcaaattgtatggagaattgagccgtttttatccattcctcttcgtcctgtagcatcactataaaggatggagtaaatgacaggtgttccatgaaatagggcccaggctcaatt

SEQ ID NO: 872922 - DNA, 98 bp, Homo sapiens
catcctctttctcttccggatgtcccggagcaagctgctcagataaagaatttgatgagccagctaggaactaagcaggactcaagcaagctacagga

SEQ ID NO: 872923 - DNA, 99 bp, Homo sapiens
atctctccagtttccatatgttgagattctacttattcatcagtttgttgtgcttgtcaagatcagggcctgcagttgccatcacccactgcaaccagc

SEQ ID NO: 872924 - DNA, 99 bp, Homo sapiens
agaaaaaagcgatgactgtgaaggagttcaggcagctggccaacagtggcaagaagctgaagagggaactacccttttcattccgatcaattaatacga

SEQ ID NO: 872925 - DNA, 99 bp, Homo sapiens
aagaaactccttcacatctggaagaacttgaaggttcaaggaaaggacccttccgtggacatcactcaggaccttgtggatgaatctgaagaggagcgt

SEQ ID NO: 872926 - DNA, 99 bp, Homo sapiens
ggaggcgttccaggcggtgggggagatgggcatctaccagatgtacttgtgcttcctgctggccgtgctgctgcaggcccaacacagagatactttcat

SEQ ID NO: 872927 - DNA, 99 bp, Homo sapiens
cgaaaaagccctggtggagctgaaggttgcagctgtccaggcagccatcttgtctggagacaagtctgagaatgttcaagatttgctgctcttggatgt

SEQ ID NO: 872928 - DNA, 99 bp, Homo sapiens
gttttgatataatatttttgtcccataactgaaaaactcattatttcctctcgatctccatgactagcatgttctgcctgtatcttctgccttaatcga

SEQ ID NO: 872929 - DNA, 99 bp, Homo sapiens
ctccagtgagtgggacgttttgctccaacctcattcaaaaaggcgaccataaattcctgaggctggaaacgaacgaacggcaagccccgaagaaacacg

SEQ ID NO: 872930 - DNA, 99 bp, Homo sapiens
caaggtggaagattcttccaaggaaccagtgcgaagggcctgggttccaataaataattgctacctcatgtctaaagaaattcctttttctgtgaaaaa

SEQ ID NO: 872931 - DNA, 122 bp, Homo sapiens
gaaaggataagcctcgacttagaagctaccgagttaccctaagaaagaacatccatgatagcagtcttctgtaaatcgaacttttcaagaattctctgaaggaaccaagtaggatattctta

SEQ ID NO: 872932 - DNA, 99 bp, Homo sapiens
gaaataccatgctttcaaaatagctcctcaaaaatttcatctgagttcacctatgcatggtcggtgatagaagcagatttgggatatcctggaggtaaa

SEQ ID NO: 872933 - DNA, 99 bp, Homo sapiens
tcccttggaagtggggcccacagactgacgctgctctgcttcctggattcagccctcttcctaaggtgatatcagtatcaagataaaagtttggaatgg

SEQ ID NO: 872934 - DNA, 98 bp, Homo sapiens
tgagcatcagcccacaacctggtcctcatactattttgacctgcagctcctcgtcttcatgtttccaggcttcttgcagtggagatgaatacagatca

SEQ ID NO: 872935 - DNA, 99 bp, Homo sapiens
tagtaaccgactttcctccggactcctgcacgacctgctcctacagccggcgatccactcccggctgttcccccggaggctggagtgcagtggcgtgat

SEQ ID NO: 872936 - DNA, 98 bp, Homo sapiens
tcggcttctgcctggtgctctgcgtcctcatcgggcttatgttcgagctgcagaagatcataagtaaacaagatgacttgatgacagtgaaaactaat

SEQ ID NO: 872937 - DNA, 98 bp, Homo sapiens
tctcgctggctcaggagtgaagctacagaccttcgcgctttgttacctaacagcttggctcttttgggaaatatagacaagctggaacccaggagcag

SEQ ID NO: 872938 - DNA, 99 bp, Homo sapiens
gaacagttccatcagcctcggaatctcctcctggccttggttggggaagtgggggagctggcagaactcttgtgcccagggtggctccgtggcccgcac

SEQ ID NO: 872939 - DNA, 99 bp, Homo sapiens
cgttaatccttccacaccatgctggacagtgtcactactcacattgagttttcctttaagacactttggaactgggggatcccaagtactgttactgtc

SEQ ID NO: 872940 - DNA, 99 bp, Homo sapiens
tgccagaggtggaggggaggattttgaggacacttgtggagagctcgaattccagaatgatgaaattgtgggcgacctatctactgctcttgaggtcgc

SEQ ID NO: 872941 - DNA, 99 bp, Homo sapiens
agaggagagcgacaacgtgaaaatgccccgtgccggggcgtccaccggagtcctgccagctgtccggcgctgggggggagtcggtgaagtacttcctgg

SEQ ID NO: 872942 - DNA, 99 bp, Homo sapiens
catcacttcaacactggcttcccggtaccttctaacgatgacgatattcgcgctctcggtcacgctctcggtcacggtctcggtcacgatcccggtgcc

SEQ ID NO: 872943 - DNA, 99 bp, Homo sapiens
cctcatggcatgttttgaggatgaaatgagctaataaacacagtcttcagccctacattaggtatcactggacaggccatggctccacggtcccggcga

SEQ ID NO: 872944 - DNA, 107 bp, Homo sapiens
gaaatatctaaagtgaactttatctaaagtgaacttcatagcagcttccaaaattcatgtccaatttgcagggatcaagcttttatctgcattggagctagttctgt

SEQ ID NO: 872945 - DNA, 99 bp, Homo sapiens
acaggtcccgatcccgaccccaaaagagtattcttggatcttgcacaggaaggaattaaagctgcagcaaaaaattattcctgatcaggaccaactgat

SEQ ID NO: 872946 - DNA, 99 bp, Homo sapiens
atggcctagcacgtggaattcgcgaagctgccaaagccttagacaagtctatcagccacagtctctgcaagtttccaagagcagcagaaaatgaacaca

SEQ ID NO: 872947 - DNA, 99 bp, Homo sapiens
ggccatttcccacaacagaagaaaatgatcaatgcccagggagtaactattcccagtcagaggcgctatgtgtattattatagctacctgttaaagaat

SEQ ID NO: 872948 - DNA, 99 bp, Homo sapiens
cccctttctaaagtgctgggagagattttcggtgttctgttgaacaaaaacattgttgaggtgactggccagtctccgggcaaaaagctctcgcaaatc

SEQ ID NO: 872949 - DNA, 99 bp, Homo sapiens
gcagacataggtgtgcagctggatgagaagccggcgctgcagcatccacaccaccatctggatgagctgggtctgtaatcccagctacttgggaggctg

SEQ ID NO: 872950 - DNA, 99 bp, Homo sapiens
ctcatctgtagagactgatttgcaacccttccgggaagccatagctctgcatgcacaaatggacccccgaggcctatctcccagacaaagtaaaagtga

SEQ ID NO: 872951 - DNA, 99 bp, Homo sapiens
tcgccttttacctggtccacctcttccgcttctaccgcgtgctcacctgtatcagctggcccctgtcgtcaggtcaattcagtgaagatatgataccca

SEQ ID NO: 872952 - DNA, 99 bp, Homo sapiens
cagtgatcctgattatattaatcagtatgtcatatggatggtgaaaagagatttgaatgcccggaatgttctaaaaggtttatgcggagtgatcatctc

SEQ ID NO: 872953 - DNA, 99 bp, Homo sapiens
cctctctgcatagcacagctggacactgggatggatgcaaccttgaaagaactgacaagcttagtaaaagaagtctacccagaagctagaaagaagggc

SEQ ID NO: 872954 - DNA, 99 bp, Homo sapiens
agcttcatcaacgatatatgtcagatctaaagtttgaggtggtatcaacatcctacagaagaagaattaagaattcttgcagggaaacaacaaaaaggg

SEQ ID NO: 872955 - DNA, 99 bp, Homo sapiens
cttggatccgcgggacaagaaaattcatgcgactgttgggcgggagctgctgctccatctgattgactatctcgtaaccagtgatggcaaagaccctga

SEQ ID NO: 872956 - DNA, 99 bp, Homo sapiens
gattacctgccacccattgtgtcttctcaagaaggatccaaactactggatacaggtgcatcgcttggaacatggagatggaggaatactagaccttga

SEQ ID NO: 872957 - DNA, 99 bp, Homo sapiens
gctggggttcttttgacctgagggctgctattgtatatcacactaaagaggtgacagaaaacttagttgagccaactctgcctggcctattccttctcc

SEQ ID NO: 872958 - DNA, 99 bp, Homo sapiens
agcctggagtctgcgaaggccgggacccggttccccggcccacagtgggggtgtgcaaacccgagagaactggtggatgaggatcgcagtacggaacct

SEQ ID NO: 872959 - DNA, 99 bp, Homo sapiens
gtcgggaagaatcgtttggtctcctgccgtgcccggatactggtatcgggatgacacaggaagagctggtgtccaacctggggacgattgccagatcgg

SEQ ID NO: 872960 - DNA, 99 bp, Homo sapiens
ctcccaagtagctgggatcacagatttctgcatgaatccccagacagtgctgctcctgcgggtcatcgccgccttctgtttcctgggcatcctgtgtag

SEQ ID NO: 872961 - DNA, 99 bp, Homo sapiens
gcaaacatggcggtggactcggcgatggagctgttatttttagatacttttaaacacccgagcgctgagccccccaggttcgcctaatagtcttggcta

SEQ ID NO: 872962 - DNA, 99 bp, Homo sapiens
atcacatccccaccccacaggatctgccccagagaaagtcctcgctcgtcaccagcaagcttgcggggaagatcagcccatctacttggcagtgaaggg

SEQ ID NO: 872963 - DNA, 99 bp, Homo sapiens
caccggaatctgaaccactgcatttccagcgaccctcgctactggtacggagggagacgtggtgggcggtccttcctgtgacacgacccttgagtgaca

SEQ ID NO: 872964 - DNA, 99 bp, Homo sapiens
gggagccgggaggagagctctcctgggaaggagaacctccatttctaccagaatcctttgaccgaattcttctggatgcaccctgtagtggaatgggac

SEQ ID NO: 872965 - DNA, 99 bp, Homo sapiens
ccagggtgtctggtccacgacctatcctaggcgccatggtgctggagaatctggtaaaagcaccattgtgaagcagatgaggatcctgcatgttaatgg

SEQ ID NO: 872966 - DNA, 99 bp, Homo sapiens
ttagaccattttcttcgtgagaaagaaatcgacgtgctgttttcataggaaatctctctaaacctatagctgttcagtataaagaaaaagaagatcgtt

SEQ ID NO: 872967 - DNA, 99 bp, Homo sapiens
gaagcctcccttccagtcagggatctcacattcttgaaggtggcattgaagagcactaagatcggaagatgagtgagcttgaccagttacggcaggagg

SEQ ID NO: 872968 - DNA, 100 bp, Homo sapiens
tgttccgtaaccaggtcatcattcctctggtgttgtctccaggagatcttcatctcggtctggagacaacaccagaggaatgatgacctggttacggaac

SEQ ID NO: 872969 - DNA, 99 bp, Homo sapiens
tccgggcagctggagcgttgcgagcgcgaatggcacgagctggagggagaatttcaagaactgcagattcatgatgttgctatcaaaagttgagaaatt

SEQ ID NO: 872970 - DNA, 124 bp, Homo sapiens
gaaaactcatcaccttaaggtgttaagtgtaaggatcttcatgatgaaatttctgtaaatggtggatactttaatactgataagccacaccccaggggtgaaattcttattgggggccaaagtg

SEQ ID NO: 872971 - DNA, 99 bp, Homo sapiens
gggggtccgcgggtttgggaggagtatgccaaccagcatggccctggacaggttagcatggcctcattgaaagaactagatcaaagactctttgaaaat

SEQ ID NO: 872972 - DNA, 99 bp, Homo sapiens
tttcgagctaagggttacagtcctttaaatctggaaatttcaagatgtgtcagaagaattggatacaaaactccctcttgatggtggattagacaaaat

SEQ ID NO: 872973 - DNA, 99 bp, Homo sapiens
cagtcgtagatacaaatttttggatgatgatggatccatttctcctattgaggagtcaacatgtggaagatgtcaagtttgtgatcaactatgactatc

SEQ ID NO: 872974 - DNA, 98 bp, Homo sapiens
gacgaggctgccgaagacagtggtgaggagggcgcccctgaacctgcaccagaaatgcactcggtgatggaaagagagccactattctgaagaacact

SEQ ID NO: 872975 - DNA, 99 bp, Homo sapiens
cagttccatatcacgggagacagattgtggagttcatattaatgctggtcctgagattggtgtggccagtacaaaggctggagtgcagtggtgtgatct

SEQ ID NO: 872976 - DNA, 99 bp, Homo sapiens
ctgatagtgccttggaacagacaccccagcaactaccatcgcttcatctgagccaagggtaaccctgatggtggcagggacatggatgaagctggaaac

SEQ ID NO: 872977 - DNA, 99 bp, Homo sapiens
agcgaagacgcggagaaaaaagttctcggttcatgtactggacagactggggagaagtgccaaagatagaacgtgctggaatggatggttcaagtcgct

SEQ ID NO: 872978 - DNA, 99 bp, Homo sapiens
aaaatggaagagctcatcaaaaacgagccggaagaaccccagctcaaagggattgtgacaaggttattcagccagcagggatacttcctgcagatgcac

SEQ ID NO: 872979 - DNA, 99 bp, Homo sapiens
catgaagccgctggtcgtgttcgtcctcggcggccccggcgccggcaaggggacccagtgcgcccgcatcgtcgaggttacagattatgccattgccag

SEQ ID NO: 872980 - DNA, 99 bp, Homo sapiens
ggaagcggccaccgactactgtcagcagctgtgccaggtcaaaatgcagatcttcgtgaaaacccttaccggcaagaccatcacccttgaggtggagcc

SEQ ID NO: 872981 - DNA, 99 bp, Homo sapiens
caaatgctgtaaggaatgcaaatgccgaagaacagttgagaattgttgaagaacaaagaaagattcatgaggaaaggatgaaactagaacaagaacgac

SEQ ID NO: 872982 - DNA, 99 bp, Homo sapiens
agagaaatggctggtctcacaaagatctattaagattgtcacatcttaaaccttccagtgaagatcctgataacttaagtgactctctcttttccggtg

SEQ ID NO: 872983 - DNA, 99 bp, Homo sapiens
atagactctcccatcccaacatccttagggtcaatacacctaagaaacaaggaggactgggacccatgaacattcctttggtatcagacccgaagcgca

SEQ ID NO: 872984 - DNA, 98 bp, Homo sapiens
agcgagtctcggagaagatgtggtggcttccgtttgttggtggaggaggtggcaggcctcggcgaggaaatatcattctgcaaaagaagcttatgaac

SEQ ID NO: 872985 - DNA, 99 bp, Homo sapiens
atcagctggctcactctgacctgcttccctggggccacatccacaggaggagatgttaaagtaacccatcttgcaggacgacattgaagattggtcttc

SEQ ID NO: 872986 - DNA, 99 bp, Homo sapiens
tcgacaggggatgggaccctaggtgagaagccttataagtgctcatgggagggatgtgagtggcgttttgcacgaagcgatgagctcacgaggcactac

SEQ ID NO: 872987 - DNA, 99 bp, Homo sapiens
cattgccaagaagtacatgtcagaaaataagggagttcctctgcatgggggtgatgaagacagaccctttccagcctcgaagcggaggatccctgtgtc

SEQ ID NO: 872988 - DNA, 99 bp, Homo sapiens
gccaggagtctgcactcttcagtctttgcaggtactccaaagattcaggtttactcacgtcatccagcagagaatggaaagtcaaatttcctgaattgc

SEQ ID NO: 872989 - DNA, 99 bp, Homo sapiens
gtgtagccatcatggttcatcagagttttataagacatcaaatcatcttgggtgaaaagcgaatggtgtcttaactatgctgataggctttcgagataa

SEQ ID NO: 872990 - DNA, 100 bp, Homo sapiens
gggtgatttctgcatttccatctgaggctggaagtgatggagagagtattggaaactgtcccttttgccaacgccttttcatgatcctctggcttaaagg

SEQ ID NO: 872991 - DNA, 99 bp, Homo sapiens
tgagccccggcacccccggaccgaccatgggcagatcccagctggagaatgctggaggagaccttaaggatggccaccaccactatgaaggagctgttg

SEQ ID NO: 872992 - DNA, 98 bp, Homo sapiens
gggccggcagaggcgccgcagcgtcggagcaatgcaaggctaagccggtttcattcattggctcccatgtactatcgaggctcagctgcagctgttat

SEQ ID NO: 872993 - DNA, 99 bp, Homo sapiens
cctatgacagcagtgccgactggttctccctgggctgcatgcttttcaaacttctgagaggtagaaaacccctttggtgaaacatttggaaaaatacaa

SEQ ID NO: 872994 - DNA, 99 bp, Homo sapiens
gggagaatgagcacggggcttttggaggctgcagcctagggccaagggatggagatttataagcttgatgacccaagttgccctcggccagaatgttat

SEQ ID NO: 872995 - DNA, 99 bp, Homo sapiens
tggaaatcatgagaaaggacttgaatgacgcccgggacctgcatggccaggcagagtcagcagctgcagtgtggaagttctcctgtgcctcctgttggc

SEQ ID NO: 872996 - DNA, 99 bp, Homo sapiens
tcagaactactatattcagtggctaaatggctccctgattcatggggttccagcgttcctgaaaatgatcgattggcttccatagctgctgaattgcag

SEQ ID NO: 872997 - DNA, 123 bp, Homo sapiens
ggaagcccaccgactttgaggatctggaggacggagaggacctgttcaccagcactgtctccaccctagagaaaaggcgacggcggattgacagaagtatgattggagagcccacaaactttg

SEQ ID NO: 872998 - DNA, 99 bp, Homo sapiens
ttcggccctgggaccaaagtggatatcaaacgcatgttatttgaaagcaattgagacgcaaccgaactttgcagtagcttggagtaatcttggctgtgt

SEQ ID NO: 872999 - DNA, 99 bp, Homo sapiens
aggagatcgctcggacacagaagaacaaggtttatctggaagaatgtgaactggctaaacagctttatccaaaggaaaacgatttggtgtttttagctc

SEQ ID NO: 873000 - DNA, 100 bp, Homo sapiens
ctgcaactagatggtcccatctggatgaaatctaaaaacgtcagcggcagcaaatcatctccaagtgtccaatgtctttggagaaacgatttaaaattct

SEQ ID NO: 873001 - DNA, 98 bp, Homo sapiens
ccagaaccggtcgaaaaccgtgtatgagggattcatctcggctcaggttcatcctaagttccactataaacaggctcatgactcgggcacagacactt

SEQ ID NO: 873002 - DNA, 99 bp, Homo sapiens
ttacgtaccacttaaggacattgtggcaatcatcctgaatgaatttagagccaaactgtccaaggctttggcaagtcatcagctacgagtgctgtcctg

SEQ ID NO: 873003 - DNA, 99 bp, Homo sapiens
tgaataccgcagcaaaatagatgccaaatacaaaaagaagatcgagggaatggtcagatgatgataattccgaagaaggcttccacactattcattcag

SEQ ID NO: 873004 - DNA, 99 bp, Homo sapiens
cacctccacagacccgtccgggtgctgaaagtccacggatgctatccctggtcaaatcagagatatgaggccccaggattcctggcgaggtcctcctcc

SEQ ID NO: 873005 - DNA, 99 bp, Homo sapiens
aatctgaaaaaaagagaaacctgggtgaactttcacggacaacctcagaggacaacgaagtgttcgatgatacataccttttctcgatgtgtgttatgc

SEQ ID NO: 873006 - DNA, 98 bp, Homo sapiens
ccagaacaccccgcagaaagtgcctgtgcatcaggtactctggtggtgtaaaggattttaacatctgtagcttggatgactttaaatatatttcttct

SEQ ID NO: 873007 - DNA, 98 bp, Homo sapiens
gcaagagtaacagcagcgccgtcccgtccgacagccaggcccgggagaaatcaatattgaactgtacagattgtttggcataaagcaaattgtaattt

SEQ ID NO: 873008 - DNA, 99 bp, Homo sapiens
acttgactggctccttttaactggatatcttcacggtgatgatatggcatctgccagctctagccgggcaggagtggccctgccttttgagaagtctca

SEQ ID NO: 873009 - DNA, 98 bp, Homo sapiens
aaatgcaacttctggaggatcagctgaacagatcaagttctccaccaagtcctggctgtcgcaggtctgccacgtgtgccagaagagcatgatatttg

SEQ ID NO: 873010 - DNA, 99 bp, Homo sapiens
agtgattctcctgcctcagcctcccagatacttggtgttagatgaagctgatcggatgttggatatggggtttgagcctcagattcgtagaatagtcga

SEQ ID NO: 873011 - DNA, 99 bp, Homo sapiens
ggattgtcctcaggcttggcaacatcgctcggttggaacttaattactgcgtccccatgggagtacagacaggcgacagcaggaggctggagctgagac

SEQ ID NO: 873012 - DNA, 99 bp, Homo sapiens
aacgggaatgccgtctgcagggtgcccatctcacaagcatcctgtctcacgaagaacaaatgtttgttaatcttacggcagtcccagtcctactgcaca

SEQ ID NO: 873013 - DNA, 99 bp, Homo sapiens
ctcggggcgcgctgctgctggcactgctgctctgctgggacccgaggctgagccaagcagattctgcttctcagaagatgcactattatagatactcta

SEQ ID NO: 873014 - DNA, 99 bp, Homo sapiens
ggacaccccggaagctgggaaatggaggcaagtgaggcctatctggttggcctttttgaagacaccaacctgtgtgctatccatgccaaacgtgtaaca

SEQ ID NO: 873015 - DNA, 99 bp, Homo sapiens
tatatccaccttcattaaaggagacctcaccatagctaatcttgggacatcagagggtcgcttcatgcagccacagcgtcctgtgtttactcatgaaaa

SEQ ID NO: 873016 - DNA, 99 bp, Homo sapiens
atcggcacacggggtatgtcccaacatgtcctcatggcccggatgaaccaactctcacaactctgcaaaaacagcgcaaacacaaccgcactccctggt

SEQ ID NO: 873017 - DNA, 99 bp, Homo sapiens
gagcagaatcaccaagcatcgccagcaccagatgagaagcccaaggtcaaccccaaactctacatgtgtgtgtgtgaaggtctctcctgcggtaatgag

SEQ ID NO: 873018 - DNA, 99 bp, Homo sapiens
tcaagggcgtgctcagtatctacaaagacccaggaaacaaatggaagactgctgcgaccctgcccatctctttgctatgactaaaatgaattcccctat

SEQ ID NO: 873019 - DNA, 99 bp, Homo sapiens
ttcttcaaggtggggttggcatcccccacatacgaacatccatgatagcagtcttctgtaaatcgaacttttcaagaattctctgaaggaaccaagtag

SEQ ID NO: 873020 - DNA, 99 bp, Homo sapiens
ggagtaggtgcgggtgaagatggcggcagccgaggccgcgaactgcatcatggaggttgtgttaattctgccatcacattctcacatggcagaaacagc

SEQ ID NO: 873021 - DNA, 99 bp, Homo sapiens
ttcattccttggatggaacttcaaccagagcctttcatcctcaaactggattgcctcttctttcaagccctctagagatgatcgctatggaaaatcctg

SEQ ID NO: 873022 - DNA, 98 bp, Homo sapiens
catggcaaagactggcaaaagcacaaggattctcgctgtgacagagacaacaccgagtatgagaaatttgagttctgtgaacctgcatttgttgttgg

SEQ ID NO: 873023 - DNA, 99 bp, Homo sapiens
gtcctctccaagatgcagttttttgatgctgaggagctcctggtcgatgaagaggatgatgtttttggtgaagcgcgttcgttcacatagctcccagtt

SEQ ID NO: 873024 - DNA, 99 bp, Homo sapiens
ggaagatattctaagcaagaagggttgccagcaaggccagggaggtgctggagaatctggtaaaagcaccattgtgaagcagatgaggatcctgcatgt

SEQ ID NO: 873025 - DNA, 99 bp, Homo sapiens
tctatccgggacaaggaaggttacaatagcatacattatgctgccgcctatgggcacaggcagtgtctggaattggattgactcagtcagcattgacac

SEQ ID NO: 873026 - DNA, 99 bp, Homo sapiens
ggacacctacagccccgacgaacatttctgggtgacactcaacaggattcccgaaattcatgccgaagtccaacttaagaattatgggaaatttcttga

SEQ ID NO: 873027 - DNA, 99 bp, Homo sapiens
ggatatcgacgtcgtgatccagaagtccagagctgaggactgcctgtttgcaggcgttggagaccagggccagccctggccacaccccaggctgtgtca

SEQ ID NO: 873028 - DNA, 99 bp, Homo sapiens
tgccctcttcttgcagcatggcctggccacccagagggcccttgtgtccaaggacagagcgggatgccaccagcttgtccaaagggaagttccaggagc

SEQ ID NO: 873029 - DNA, 99 bp, Homo sapiens
agagaggatttgcttttgtaacttttgatgatcatgatacagttgataaaattgttgaacatgttgagtcagaattgcttcatacctactcttctatct

SEQ ID NO: 873030 - DNA, 99 bp, Homo sapiens
caagaaattctgcaagcacgcttcccgatgccacgttacatcaacacggagcatggaggcagtcagccacccgaaacaatgaaatgtaatacattcata

SEQ ID NO: 873031 - DNA, 99 bp, Homo sapiens
ggggactctcagcaggaagaggatccaatttagggtccagctggagctcaggatactcaagtgaggtcacaagctcaaggttttccagcatcacactgt

SEQ ID NO: 873032 - DNA, 98 bp, Homo sapiens
gtacctggagtccgtggatgaaggtggggtggcgtggcaagccggactaaggaccggggacttcttgattgagtgggcctttggagtgacgctgtggg

SEQ ID NO: 873033 - DNA, 98 bp, Homo sapiens
agtgaagattgctgtaaaaaatttcaggattggtactacaagctgtggatcggtccgtttcatcaagtctgtcagatgcaagagatgccttagtgaat

SEQ ID NO: 873034 - DNA, 99 bp, Homo sapiens
gtctctctgctgcggcgcggggaccgctgtgctctcgggaagtgtttgtttatgtcagggctcagtgaggtccagctgaaccatatggatgatcacact

SEQ ID NO: 873035 - DNA, 99 bp, Homo sapiens; identical to SEQ ID NO: 852078

SEQ ID NO: 873036 - DNA, 99 bp, Homo sapiens
ctctggaaaccatcggtgcaaatttacagaagcagtacgagaactggcagccaaggcggaatggccaaagactatgacgggtcttcctagcacatcagg

SEQ ID NO: 873037 - DNA, 99 bp, Homo sapiens
attttaaccaaggcagttggtggaaatgagtgttgtacatcagtacacagaagagacggatgtgaagacaccaagagagcaacgcttttcatagttgga

SEQ ID NO: 873038 - DNA, 99 bp, Homo sapiens
ttcgttgtatttgtgacatctgtgggtttaatccaacagaagaaggtgagcctgaatttaaatacattgggaatatgcatgggaatgaggctgttggac

SEQ ID NO: 873039 - DNA, 98 bp, Homo sapiens
cttttgttgaacaaatttgatttccggagtcagtcattttactgtcaagacatttcttcggcattctgcaacagtcgactcctttacatctagcagcg

SEQ ID NO: 873040 - DNA, 98 bp, Homo sapiens
tgtctttttcttcaatgggcagcatatgaaagtggattatgggaggaacagcacagcatgctgggctctggatttaaagctgagcgcttaagagtgaa

SEQ ID NO: 873041 - DNA, 99 bp, Homo sapiens
cccagcactttgggagcccgaggctcagttttctcacattggtgcatctcttcatgctagaactgcttatgtctacagagtccctgaagaagcaaaaat

SEQ ID NO: 873042 - DNA, 99 bp, Homo sapiens
tgtcgcggcgaggaggtgggcgcgctggagcaggagcggggccggaactggagccgaggcgcaggtggcgctggcaggtcaatggccagcaaggagggg

SEQ ID NO: 873043 - DNA, 99 bp, Homo sapiens; identical to SEQ ID NO: 846033

SEQ ID NO: 873044 - DNA, 99 bp, Homo sapiens
atgggaaggtggatcccgccgggaggtactttgctgatgccaattctcggaagcaagaagcagagtggaaagaaaaggcaataaaggagctagaagaat

SEQ ID NO: 873045 - DNA, 99 bp, Homo sapiens
atcatattactcctcttctgtctgctgtctatgagggtcatgtttcctgtgtgaaattgcttctgtcaaaggttcgatacaagaggctgttttcctagc

SEQ ID NO: 873046 - DNA, 99 bp, Homo sapiens
ttggggaaggaggcgtcttggcccgggcagcagtggcggcagcgcccgagagagagagcctcgcaagatcatcctgcacaaaggctccacaggcctggg

SEQ ID NO: 873047 - DNA, 99 bp, Homo sapiens
ccaagaatcactcgatcacccttaaaaatggaggcatccacttcctgattataatcttgcttgccagcgtgtttccaagggatccggaacatgctcttc

SEQ ID NO: 873048 - DNA, 98 bp, Homo sapiens
aataacatttgagaaacacgaagaatggctaaccacctcccctaagacaaggcattgtgtggctgctcaattaatgtaccaacactggatggaagaaa

SEQ ID NO: 873049 - DNA, 100 bp, Homo sapiens
cactcagcacatgtccctgtttgccattccattcagaaataggtgctgagagaacaaattcaacatccagtctggctgtggtaagcagagggtgctgagt

SEQ ID NO: 873050 - DNA, 100 bp, Homo sapiens
tggccccaaaaggaatcctggaaattggagttaggtagtgtctggctgccaaagattgcctgttgtcactgtcctcctctccaggattccttttggggcc

SEQ ID NO: 873051 - DNA, 99 bp, Homo sapiens
ttttgtcctggaaggaaaaagatctaaagtcacccggcggccaaaggccagtgactaccaacgtttggaccagaaggtgcattggatcgttgtgtgatg

SEQ ID NO: 873052 - DNA, 99 bp, Homo sapiens
ccagaaaggattgtgacatatcgttggacccagaattgagtttggggcggaattccgaaggttctctctggaccgtcataagcctgggaagtttgaaga

SEQ ID NO: 873053 - DNA, 99 bp, Homo sapiens
cgtatgcatgttcatgcaaaacaccttaacaagatttatgagaacaccttccaccatgaccacctcagcaagttcccacttaaataaaggcatcaagca

SEQ ID NO: 873054 - DNA, 99 bp, Homo sapiens
atacagtcagcaccccctgagccggctaccttgaaaattttcgtgctctgagcactggagagaaaggatttggttataagggttcctgctttcacagaa

SEQ ID NO: 873055 - DNA, 99 bp, Homo sapiens
tattactgctgccctgatgaagaagttcctgaatctgagtcttgagacaaatgaccagttggtggcgtttctctcccgataccgagatatgaatttctt

SEQ ID NO: 873056 - DNA, 99 bp, Homo sapiens
ttagaggaactgcaggcccgctatcccaatcgctttaagctctggttcactctggatcatcccccaaaagtgatgaggaatttaaatccaccttcatca

SEQ ID NO: 873057 - DNA, 99 bp, Homo sapiens
aggacaggcagcccagtctggtgtttggaatgacgacagtatgagtttggagcctcttccatcaagtggacctgattttggaggattaggagaagaagc

SEQ ID NO: 873058 - DNA, 99 bp, Homo sapiens
gtttgagaatccagatctctttgccaaattggcattgaattttgctactcagataaaaggagccatatattgaagaccatgtctgggagcttctacttt

SEQ ID NO: 873059 - DNA, 99 bp, Homo sapiens
aattattctgcaagacaaagggaagaaataaaattttcccatactgagtttgactttacacataaaaaacaatcaggtggtgcaggccagtatggaaaa

SEQ ID NO: 873060 - DNA, 99 bp, Homo sapiens
gagccaagtgtccggagctgcttccaatttgagacttcttggcatcatcacaaaaaaggatgttctgagacatatggcccagatggcaaaccaggaccc

SEQ ID NO: 873061 - DNA, 99 bp, Homo sapiens
ggacgatatcgtgggcgacgtcggcggtgcccagcggtgtggaatgagagcgctgcaggtgcgcaccgggaagttcagggtcttgctctgtcacctagg

SEQ ID NO: 873062 - DNA, 99 bp, Homo sapiens
ttgaacacgcgttgtctgtgtcggttttcaataacaagaacaccttgaaaagatcttttgaggtcgaggaggtcgagacacccaactccaccccacccc

SEQ ID NO: 873063 - DNA, 99 bp, Homo sapiens
ccaagcacacccgcaaggtcgtgcacgatgccaaggaggagataagcaaggacctcagagccacactgaacgccttcctgtaccacatgggccaacaca

SEQ ID NO: 873064 - DNA, 100 bp, Homo sapiens
aaaggcacccatccttattgctacagatagctgctggacttgatttagctgcacctagcccacgggaggctacatctgtagcaataaggatgggtgcctt

SEQ ID NO: 873065 - DNA, 135 bp, Homo sapiens
cctcaattcatgcttagaaaccttctaacgatgacgatattcgcgctctcggtcacgcaatatcgtcatcgttagaaggtttctaagcatgaattgaggaacagaagaagcagagcagatgatcggagcagcatt

SEQ ID NO: 873066 - DNA, 99 bp, Homo sapiens
ctgaactccctgtcacatgatacagccactgggcttatacagtatgcattggaccagggcgtgaacgtcacccagggaaatcctcattgacgattcaat

SEQ ID NO: 873067 - DNA, 99 bp, Homo sapiens
tggcactccacttaagtttcctgtttgtaaaaagcccctttcattcggtgattcctcagggctttaggggaactttctgtaatcccagctacttgggag

SEQ ID NO: 873068 - DNA, 100 bp, Homo sapiens
gtatcgctacttcaaagttttcttgtgtctggaggtttcaagatcaccatacatctttcaaacactttggttctaaaaagtaccctttgaagtagcgata

SEQ ID NO: 873069 - DNA, 133 bp, Homo sapiens
agctgcagtgatgacaccgcttcctggtggtcacgccgcgggcaggacgcgggaggccagctgtaattctgcccccattgagcccctacttcaagtactccgtcatgatcaacaaggccacgccctacaacta

SEQ ID NO: 873070 - DNA, 99 bp, Homo sapiens
gagaaaattttgctttccttaatggcagcacagctgttttctttagctggtccctttatgaagaattcagctgttacagggtgttatcaattatctctg

SEQ ID NO: 873071 - DNA, 99 bp, Homo sapiens
ccgggaagagcctcgaggtgtacgcgctgttcagcaccgtcaggaggttcaagatgtgagagggtcagacgcctgaggaacccttacagtaggagccca

SEQ ID NO: 873072 - DNA, 99 bp, Homo sapiens
gacctggtcacctgtctggagcaaataaaagagccctgcaatttgaagatacatgagacagcagccaaacccccagggattaatgaaaatcaagttcca

SEQ ID NO: 873073 - DNA, 99 bp, Homo sapiens
ttaatacaaataaagtacttaaacaaaaagccaaaaagaggagaaggggagaaaccaggcagtggcaaacaggacacattcagctaacgtattttagca

SEQ ID NO: 873074 - DNA, 99 bp, Homo sapiens
cttgatgaagctctgaagcatgttaaggaaactcagcctccagaaacggtccagaactggattgaattacttagtggttttcaaatggaacattttgat

SEQ ID NO: 873075 - DNA, 99 bp, Homo sapiens
gctgtttccgctgtgagttcacattgatcaattcttctctcaacttgtgaacctgggcctccatgtcggcaataaccagttgaaattctcgacgccggt

SEQ ID NO: 873076 - DNA, 99 bp, Homo sapiens
agcctggaaggtgcgtgtggggctgggtctcggagtgggagacgtggagtgcaggttggacacgagttgccgctggttgtccaaatcaacaaccaggtc

SEQ ID NO: 873077 - DNA, 99 bp, Homo sapiens
aacagtggacagctctgattcgtagcacgcttgcttgcatcctggaatattctcaaccagtgatgctacaggacgaagaggaatggataaaaacattgg

SEQ ID NO: 873078 - DNA, 99 bp, Homo sapiens
atgggcgtgagaatgtggggatttataacctctccaaaggagtcaaccgattctgcctgtccaagcctggatcttttgccagaaatgagggcatactgg

SEQ ID NO: 873079 - DNA, 99 bp, Homo sapiens
ggacgctaagcggggtaggggaaggttaatgttgaagaaggaaaatgcggaagtcgtcatttgacaagttttataaatgagtatttgaagctcaggaat

SEQ ID NO: 873080 - DNA, 98 bp, Homo sapiens
aattattagagacctgcgttgtaaatattgctttaccaaacaggtaatgctatgggctatgtacgaatgataagatctggtggtcttcattgtagcag

SEQ ID NO: 873081 - DNA, 99 bp, Homo sapiens
cggacggtgatggtggtcgccgcggcggcgtgtgcgcccctcaggtgaaaggaaagcaagccaggatggatatttacgacactcaaaccttgggggttg

SEQ ID NO: 873082 - DNA, 99 bp, Homo sapiens
aactttatttcctcccagaagacactccccagggcagaaatagcgaccatggcgagcagcagccgctcttctaaaacattcaaaccaaagaagaatatc

SEQ ID NO: 873083 - DNA, 98 bp, Homo sapiens
gcggaaaccagtggccacagcatctttgtctagccccagtgcaggagtctccccaggacagtgctatcacccgggatattaaccgaacattcccagcc

SEQ ID NO: 873084 - DNA, 99 bp, Homo sapiens
aaatttgcattgctggctcccctttgactcccagaagggtgactgaagttcgtgctgatactggaggacttggaaggatggctgacaagattttgaaaa

SEQ ID NO: 873085 - DNA, 99 bp, Homo sapiens
ccagcgttggcgaggagccccgggaggtgcttctgcggctgtacggagccatcttgcaggatggatgacatggctgtggatagtgatgaggaggtggat

SEQ ID NO: 873086 - DNA, 99 bp, Homo sapiens
caggactccaaaatggcgtcagttgtatgagaataatgttatcactattgatctggttcaaaattcttctcaaaaaactcagaatgatgtggacatagc

SEQ ID NO: 873087 - DNA, 99 bp, Homo sapiens
ggacaggatggattgccagggcttcctggcccgaaaggagagccttattttcctgacagcagcccttggatttcccgaggctttgattcctgttcagct

SEQ ID NO: 873088 - DNA, 99 bp, Homo sapiens
accagaagcccttctgaattaaggtggtgatctttgtgaagtctgtgcagcggtgcattgccttggcccagctactagtggagcagaacttcccagcca

SEQ ID NO: 873089 - DNA, 99 bp, Homo sapiens
caggctcctcggaagtccccctccgacactgagggtcttgtaaagagtctgccttctggatctcaccagcaactggaacagatccagaaggagctaagt

SEQ ID NO: 873090 - DNA, 99 bp, Homo sapiens
cagggatcaaaactcattcgaaaagctaaagaggcaccattcgtacccgttgccttttaggtgtccctattgcatatgataacatcaaagttgtgggag

SEQ ID NO: 873091 - DNA, 99 bp, Homo sapiens
gggttggttgctgtgattgcagtaaaaccatgatagattagacacagacattgcagcaacttgttgaggagtcttctctcgattccagaacaggaaatt

SEQ ID NO: 873092 - DNA, 99 bp, Homo sapiens
aacaagtttgctctcagcggatttacattggtgcagaagcatacagtggaatttaaccaagtggcgatggctaattcagatggatccgaagctatgctg

SEQ ID NO: 873093 - DNA, 98 bp, Homo sapiens
tccaaaagccatgaagagattaatggcagagtgcctcaaaaagaaaagagatgagagaccactctttccccaagggaagaagaggtgaaggtttcgac

SEQ ID NO: 873094 - DNA, 98 bp, Homo sapiens
gcgagctgagtggttgtgtggtcgcgtctcggaaaccggtagcgcttgcagcatgttggttgaatctggcgatgtggaacccatggatatggagggct

SEQ ID NO: 873095 - DNA, 99 bp, Homo sapiens
gcgacggccttgagcgaggaggagctggacaatgaagactattactcgttgctgaacgtgcgcagggagttttaacttctagtcatggcgaatgatcgc

SEQ ID NO: 873096 - DNA, 98 bp, Homo sapiens
gtgccatggagacgcttaacggtacttaaagctttcaccaaaacacccagaatcaaatactgctggaatggacatctttgccaaattctctgcatata

SEQ ID NO: 873097 - DNA, 99 bp, Homo sapiens
aaaatcaatctcagggctacaaccagtggcagcagggttgctgggcctaaaggagataacatttatgaatggagatcaactatacttggtccaccgggt

SEQ ID NO: 873098 - DNA, 98 bp, Homo sapiens
tgacccggcctcaccatgttggtgctgtttgaaacgtctgtgggttacgccatctttaagaaaaggcgacggcggattgacagaagtatgattggaga

SEQ ID NO: 873099 - DNA, 99 bp, Homo sapiens
acatgagaatagctgctggtgaatctttggcacttctctttgaattggccagaggaatagagagtgaacttggaaaatcgtgggaagaagttcagttgg

SEQ ID NO: 873100 - DNA, 98 bp, Homo sapiens
cgatggcggcgatggcatctctcggcgccctggcgctgctcctgctgtccagcctctcccgctgctcagcccccaaatacatcaagatgtttgtactg

SEQ ID NO: 873101 - DNA, 99 bp, Homo sapiens
atgtcatgtatcccatagctgtgagtggcgatcacgagaacaataagaacaagttgaaatcatcgcagaaggataaagttcgtcagtttatgatcttca

SEQ ID NO: 873102 - DNA, 99 bp, Homo sapiens
cctacgagtttttcagcgaagagaacgcgcccaagtggcggggactactggtgcctgcgctgaaaaagtttgctaatccagactttacacaacctatct

SEQ ID NO: 873103 - DNA, 133 bp, Homo sapiens
tttattacgaattgtgatcacatcctctgattggcaacatgttagctttgaagtggatcctaccaggtggaaaaacttgtgaaatatttggatcccaacgacctggggagaatcaacttcaaggacttttgcc

SEQ ID NO: 873104 - DNA, 99 bp, Homo sapiens
agacaagaacgagaggaggcgttggtcagaggagtcttcatgaaggtggtgaagcccaaggatgctcgacatgcagcagaaggagaaatatataccaaa

SEQ ID NO: 873105 - DNA, 98 bp, Homo sapiens
cagtggaagcagcaccatcggggagacaagcaatgagtgagatcattggccgagacctgagtggcttccctgcacctcctggagaagagcctcctgcc

SEQ ID NO: 873106 - DNA, 99 bp, Homo sapiens
atgagttcacggatcagcgaaccaaagctgaacaaggcaactgttcaaccaggagaaaagacagcaatggaccgagaactcccccactggaaaggattc

SEQ ID NO: 873107 - DNA, 99 bp, Homo sapiens
caacttctgctccaggaaattcagcctcaaaaccgtcctgctgcttgctgaccaaatgcatttgatgaatacagaaatatcagccaaaaggacattgtg

SEQ ID NO: 873108 - DNA, 99 bp, Homo sapiens
ggtgatttctgcatttccatctgaggaactgcagacactgcagataaaacagagccagaatgctttgctgccagctggacctttgacccaaaccccagt

SEQ ID NO: 873109 - DNA, 99 bp, Homo sapiens
ctcttccattcttgttgctgatactgccaaattcttgccgttccatctcgacttccactaacaaatcttaaactgtaatcccagctattcgggaggctg

SEQ ID NO: 873110 - DNA, 99 bp, Homo sapiens
accagcctcttctgaaacactgggagggaattacccaacttggccatataagagaggagccacctgcagtgcctgccccaataatgacaagtgtttgga

SEQ ID NO: 873111 - DNA, 99 bp, Homo sapiens
gttgtggcaaaggagaaatggccacagggaatgggcggcggctccacctggggattcctgaggccgtgtttgtggtccagtggtttacgtcttggatct

SEQ ID NO: 873112 - DNA, 99 bp, Homo sapiens
acccctgggcatacactatcttggggaaaaggcagagatcctacaagaatccaggatgatgatcccagattgccagcgcaggttggaagccgcatattt

SEQ ID NO: 873113 - DNA, 99 bp, Homo sapiens
ggaacgagactgcaatggggacacgccaaacctgagtttctacagaaatgagatccgcttcctgcccaacggccctcgggaccaaggatcacgtcatga

SEQ ID NO: 873114 - DNA, 99 bp, Homo sapiens
gcttcgctaatcccatcctcagatctgtgcacaatgtgaagacggagccgtcccctcctcagtgtacctcctgtattccaaggcaaaggtaatagatgc

SEQ ID NO: 873115 - DNA, 98 bp, Homo sapiens
aagcaccgagactctagaagaaatgccctccgggtcacaggataaggtagagttggctttgtgggacacagctgggcaggaagattatgatcgcctga

SEQ ID NO: 873116 - DNA, 102 bp, Homo sapiens
gacatcctggaagctgggaaatggatctgtgggacagacccagcaggtggtgccccatgtaagaagcaatgaaatgcatcatgatggaaccctcaaaaacga

SEQ ID NO: 873117 - DNA, 99 bp, Homo sapiens
atctcttcatattcatcaggacccatttccagacgcccgaggttgtagtaacagtctgggtatttccttctgtgtttaattgctgtccggtaactttgc

SEQ ID NO: 873118 - DNA, 99 bp, Homo sapiens
cacgctcaggccaggtggaggtcaatatcacaggttgatccaatgctcaccccagaagagcgtcacctgaacaagatgcagaaccatggctatgagaac

SEQ ID NO: 873119 - DNA, 99 bp, Homo sapiens
tctacgcctcctacgtttacctgtccatgctcatcatccatggtagctttgccctgatccagctgccccgtttccacatcttcttcctggtcccagcaa

SEQ ID NO: 873120 - DNA, 100 bp, Homo sapiens
atgaatattgttagcagtgctgggagtttggaaagagattctacagattctacttctgtagaatctctttccaaactcccagcactgctaacaatattca

SEQ ID NO: 873121 - DNA, 99 bp, Homo sapiens
ctagcacatgaatcttcataaatactacctccaacaacaatgttcaccatttcttctacaatgttctgtacaatgtcttgtggcttttcctcacaatca

SEQ ID NO: 873122 - DNA, 98 bp, Homo sapiens
tgagctacagagactgaagaggactcaggagcaaatcagtaatgctaacagagaccctgatgctggaattgatgaagctcaagttgaacaagatgctc

SEQ ID NO: 873123 - DNA, 99 bp, Homo sapiens
cgaatatcgtcatcgttagaagggcacacgtgtttcacgttgacaggtttgcttgggacgctagtaaccatgggcttgctgacttagccaaagaagagt

SEQ ID NO: 873124 - DNA, 98 bp, Homo sapiens
ggaagagttgttcctagacaatgagatgagtcttcctctggaaaacacaatacgtagagaaatcgacactcttaatgaacgtttagctgctgaaggac

SEQ ID NO: 873125 - DNA, 99 bp, Homo sapiens
tcggaagtgggaacccttcggccgctgagattctgtcgtgtcgtcgctgctggcacttcaggctctgtgcctacaccaactaatgttacaattgaatcc

SEQ ID NO: 873126 - DNA, 99 bp, Homo sapiens
gcatgttcttcgggcccctgtgtgagtgccatgagtgggtgtgcgagacctacgacgggagcacctgtgcaggatcttacacatttgttccatggcttc

SEQ ID NO: 873127 - DNA, 99 bp, Homo sapiens
gttctccaagctgcctgaacaggagcgcaattacaacttacaaatgtcgcttgagaccctgaaacgcgcatcgggaattccttcacaggcctgcgtctg

SEQ ID NO: 873128 - DNA, 98 bp, Homo sapiens
cgttacgtggtggacctgtacctcaacacccccgacaagatggtgtggaaaaagaagctctcggcggccgtggaggtgggcgacgcggctgaggtgaa

SEQ ID NO: 873129 - DNA, 99 bp, Homo sapiens
agctacagcaattgacagctatgtggctctcagataatcagtcttagagtttgaaagagtctatcttgataatctccccagtgcatccatgtatgagcg

SEQ ID NO: 873130 - DNA, 99 bp, Homo sapiens
acaaatatgttttgtggaatattactgctgccctgatgaagaagttcctgaatctgagtcttgaccataaccagcagaccacagcattcaggcatcctg

SEQ ID NO: 873131 - DNA, 99 bp, Homo sapiens
gagcagttctaccactacaaggatctctgggtcctgcatttggccaccaagacctgggaacaagtcaaccctgactataatgtggaatttttccgacag

SEQ ID NO: 873132 - DNA, 99 bp, Homo sapiens
aggtcaaagctgtttggagaaaatcagaagtacagttttatctagccacatcttggaggaccccaccccagctgctacaccagaaacaccaccagtgat

SEQ ID NO: 873133 - DNA, 99 bp, Homo sapiens
gaggacaacgcagatatagaacatttcttttatcacagtgctttgtaacagagccagactggtttcctatctcccaggattttgctctttagttaaaag

SEQ ID NO: 873134 - DNA, 98 bp, Homo sapiens
cctttgagcggactcccttttaaggatgatcacggacgtgcagctcgccatcttcgccaacatgctgggcgtgtcgctcttcttgcttgtcgttctct

SEQ ID NO: 873135 - DNA, 99 bp, Homo sapiens
gtgaatgttgtcatggagatagatttcaccctgtgtggtggatttaatcctcgcctgctttcgtccccgaggcagagtagccaccgtgtctgctagcat

SEQ ID NO: 873136 - DNA, 99 bp, Homo sapiens
ggagctttgcagctgacctacatctcgaagagaccaaatgagagggttgacactgtatcagaaaaaccaagggaagaaccagtactaaaagaggaagcc

SEQ ID NO: 873137 - DNA, 100 bp, Homo sapiens
gagagcagcaggatcagatgatatacaccacatgtcttctacaacagaggcaggactggtcctgatcaaaaagttcagtaccatctgatcctgctgctct

SEQ ID NO: 873138 - DNA, 99 bp, Homo sapiens
ttcatgcacttgctattatgggggaaagcaagaagcagaagtgtcagaacactccacaggtataacccatcttcctcctgaggtaatgctgtcaatttt

SEQ ID NO: 873139 - DNA, 99 bp, Homo sapiens
cgagaactgcgcagacctggtggaggtgttaaatgaaagtgatgatgaacagtctacacagatggctgcaagttgggaagatgataaagttacagaagc

SEQ ID NO: 873140 - DNA, 98 bp, Homo sapiens
gtacatcaggggctgttcttttgctgcaaatgaagttgatggaattacactgtgatacgactgactattcagaatggacagtttagaagaacctcaga

SEQ ID NO: 873141 - DNA, 99 bp, Homo sapiens
ccgtcctagccgctgctgtcttcgtgggaggcgccgtgagttcgccgctggtggctccggaaaatatttacaccagcagctccagttcataccaataaa

SEQ ID NO: 873142 - DNA, 99 bp, Homo sapiens
ggacctgagcctgacgcgggccgcgcggttacagaatgtctgaaggggacagtgtgggagaatccgtccatgggaaaccttcggtggtgtacagatttt

SEQ ID NO: 873143 - DNA, 99 bp, Homo sapiens
cgtgtgacagtaactgaacattggtctaaagtctttccaaaaggtcaaggttcacaagggtcagatgacttgtctgcaaagctgtgggatgtgagcaca

SEQ ID NO: 873144 - DNA, 99 bp, Homo sapiens
gggcaataagactctttaaagaaggcaaggagagaatgtatgaagaacagtcacaggacaggtcagtcatatgaaattcggatgctggataatcggaaa

SEQ ID NO: 873145 - DNA, 99 bp, Homo sapiens
aaaaacagtctgaaaccagtatccatcaatacttggaacaacaaggccatgacagatccctccagaaagtatttaaccagcagtagagaaaagcagctg

SEQ ID NO: 873146 - DNA, 99 bp, Homo sapiens
attaaaaagggagtagatttacttcagaatctgatcaaatactttcatgcccaatgcaataacagtgtatcatgtatgccactgattccaggggacact

SEQ ID NO: 873147 - DNA, 99 bp, Homo sapiens
gggaagtgtctgtagcgtccctccctctcaaccacaataacaggcggagggtcggcgtagggccagatattcgaagcttacaacatggcagctttgtgg

SEQ ID NO: 873148 - DNA, 98 bp, Homo sapiens
ctggggccttgacaatttgcacttagtgaaagactggagaactgtgaatgaaggttatatcaatcagtgaaaattctatattcctttggcatttttgt

SEQ ID NO: 873149 - DNA, 99 bp, Homo sapiens
gacttaaatgaagccactgattagcaatttaaagatcctctccaagtgccggtggtggtgtgcacattgagccccggtatagacagttcccccagctga

SEQ ID NO: 873150 - DNA, 99 bp, Homo sapiens
ccgggtgcggctccaccccttccacgtcatccgcatcaacaagatgttgtcctgtgctggggctgacagcccagacacatggccccaggccaagcaccc

SEQ ID NO: 873151 - DNA, 99 bp, Homo sapiens
ccgggagggagtgcctggccaggccggcctgtctgccgcgatggatgacagtaagggacttaagtcacaacagattatctttcatcaaggcaagttcca

SEQ ID NO: 873152 - DNA, 99 bp, Homo sapiens
tgctggtgaggaccatcctgcccaagaacaacccacccaccatcgtgcatgacaaagtgctcaacctcatccaggcccacgaaatctgctactccgtat

SEQ ID NO: 873153 - DNA, 100 bp, Homo sapiens
ggaggagaacaacatctttaagcggtcaaggaagaaggagcgacagatattgcctgtgtcgctccttcttccttgaccgcttaaagatgttgttctcctc

SEQ ID NO: 873154 - DNA, 99 bp, Homo sapiens
cacactttcaatggggaggcccacccagtctctagtgatccctgaaaagttccagcatattttgcgagtactcaacaccaacatcgatgggcggcggaa

SEQ ID NO: 873155 - DNA, 99 bp, Homo sapiens
tggtccctcagtcacacatgccagagattgctcaggaagcaatggaggaaagaccacagcaagattctttcattcgtctcctcctagcctgggggacca

SEQ ID NO: 873156 - DNA, 98 bp, Homo sapiens
gacttcatctggggcgtcgtgcgcaaaggcctgcagtgcgcgcaaatgcactcggtgatggaaagagagccactattctgaagaacacttggccaaag

SEQ ID NO: 873157 - DNA, 99 bp, Homo sapiens
aacgacagccgcttcactgacctaccccctggacctggtcagagcgcggatggccgtaaccccgaaggaaatgacagagcgggatgccaccagcttgtc

SEQ ID NO: 873158 - DNA, 99 bp, Homo sapiens
accgcatgttctcactcatagttcctgagggaagacctcaattaccatgacccaacagtgaaacacagcaccttccatggtgaggataagctcatcagc

SEQ ID NO: 873159 - DNA, 99 bp, Homo sapiens
tagcagttggagctcgccatggttcagtggccctgtacgacatccggactggaaaatgtcagatctttgaaccaccagctccaggagaaggcaactcca

SEQ ID NO: 873160 - DNA, 100 bp, Homo sapiens
ttttgatgttcctcccaggagacagctattcaacaaacttccaggtcttattcttgaataacatgggcaaatatagctgtctcctgggaggaacatcaaa

SEQ ID NO: 873161 - DNA, 99 bp, Homo sapiens
tggatcacacgcgccggctgctgctactactaccactttgggctgatggcaactggtcaaaacatccctgcatgtcaggtgtgctggtgcatgcctgta

SEQ ID NO: 873162 - DNA, 99 bp, Homo sapiens
tgttcccagagctttttctctagagaagattttgaaggcggcttttgtgcgttgtagaagacaagaactcaaaggtggcctggttgaaccgttctggca

SEQ ID NO: 873163 - DNA, 99 bp, Homo sapiens
aactccagcgtgtctccagccgtggactgagcagggggaggaacatttaagctgatggaagtggaagtggaagttgctgtacattggcagcaaggcctc

SEQ ID NO: 873164 - DNA, 99 bp, Homo sapiens
atcgcgatgttggtgagcgtggggaatctggaagaggctggggagtctgtgtccttccagctgcagatacggagatcaggaaacagagctcagtgcagc

SEQ ID NO: 873165 - DNA, 99 bp, Homo sapiens
gagggctctccagctccatccacagcataaccgggctcttttcaatctggggaatctcctcaaatgaggctgtggacccaggctagacagatgggatgg

SEQ ID NO: 873166 - DNA, 99 bp, Homo sapiens
ctcacaacgatggggccgggatgcagctgtgtcaccacaggctccccatctcggggctttcaagcagtaagctgcatgcttgcttgttgtggtcattaa

SEQ ID NO: 873167 - DNA, 99 bp, Homo sapiens
gacaagggtcctaaaacaggatcagtaaagaaggaaaaagcagtaaagccagaggaagatctagaaatggccattgcctactggaacttagtgcttaat

SEQ ID NO: 873168 - DNA, 99 bp, Homo sapiens
tataaaagatctggttaaacaatttcatcagattaaaggtgcacaaaaagctttaaacaagttaaaatctaggcaacagactccctgaagtgttgactg

SEQ ID NO: 873169 - DNA, 107 bp, Homo sapiens
gcagccaccatatacaggagctcagactcaagcagtgatggaatggggagaagatattaaagcagtttcaaaagatgaagcagtgatgttggtgaatcatcaggcaa

SEQ ID NO: 873170 - DNA, 99 bp, Homo sapiens
gtacaacttttgaaattaggatctgggtatcggcccacaacaatgaggttgtagcgaggatgccaggctgcctggctcatgagtaaggaaaaggtgaag

SEQ ID NO: 873171 - DNA, 99 bp, Homo sapiens
cttaaaaacatcatggatcaatctcaaacaaaggcagcacacttctgcttttgttccttcatcaggacgaatttactcttttgggcttggtggtaatgg

SEQ ID NO: 873172 - DNA, 99 bp, Homo sapiens
gataaccttttgctaacaaaaacagacatatctgaagagatggattaagaatgctttggattaaggattgtggagcacatttcaatcattttaggattg

SEQ ID NO: 873173 - DNA, 99 bp, Homo sapiens
ggctatgccagttttaaagtgggagagctgctgaagtcaaaggagcaattgctggtcctgagcctgagctgttcaacggttttgtgtatagcatttgag

SEQ ID NO: 873174 - DNA, 99 bp, Homo sapiens
cctgcttctgccccagaaccggtcgaaaaccgtgtatgagggattcatctcggctcagataacgaaggaggcccaacttcattcaataaggagcctgac

SEQ ID NO: 873175 - DNA, 99 bp, Homo sapiens
gctactagcattcctgtattctggatggatggagtggaaccctggcttccccttgagcatcgatgccaaatgccacaaggatttaccccgtgatatcca

SEQ ID NO: 873176 - DNA, 99 bp, Homo sapiens
ccttcttctctgcctcagtgagtaactcagggacttcctcaaacagtgccttccactttatcaaatcttcatcctcggcctcccaaagtgctgggatta

SEQ ID NO: 873177 - DNA, 99 bp, Homo sapiens
gtcaccagacctgcaatctatggagcagattcggagaattatgagacctactgatgtccctgatacaggaatgccatctccaaccacactgaagaagtc

SEQ ID NO: 873178 - DNA, 98 bp, Homo sapiens
ctggtgtcaaccctcgtgggcctcctcagcccacacaacccggccctggccgctgccgccctcggtgttacagttcgagtgcctcaaacaaccacata

SEQ ID NO: 873179 - DNA, 99 bp, Homo sapiens
aatctaagcaactgttcaatgggttaaggaaagaccacagcaagattctttcattcgtctcctcctagcctgggggaccaggctcgaactgaccctgga

SEQ ID NO: 873180 - DNA, 99 bp, Homo sapiens
tggaagcaggactgcgccgcgtcttcctcaaggtctcatcagaaaattgaagactccgaagaaagcagtgatgaaattcttgtgcgtctaacatctgcg

SEQ ID NO: 873181 - DNA, 99 bp, Homo sapiens
ttttggactccctattgtatttgccagagcacatctggttaatttggagtggcccctggagtcagtttcctacaccatccgaggccccacccagcacga

SEQ ID NO: 873182 - DNA, 99 bp, Homo sapiens
cttgggaaaaggccggagaaggtgaaattctgtgtgctccctccggcgagagactttgtcagctcccgcacagtaacgccaaagaagcccaggatgacc

SEQ ID NO: 873183 - DNA, 99 bp, Homo sapiens
cgaagcgcatttggtcacctcctctggtatctcagtaacgaagaagacacatacatgtaagtaatgcattttttttctgtccaaagttttctgaagagt

SEQ ID NO: 873184 - DNA, 99 bp, Homo sapiens
gagaaagatgagcagatccgagggttaatggaagaaggtcttggtcttgatgccaagtttgggaaaggagctaagaagacatcccactaggaagagaga

SEQ ID NO: 873185 - DNA, 99 bp, Homo sapiens
caacaccagatgacaataattgaatgtttagatcatcctgatcccattattaaaagagagattctcctgagaatgatattcctatggagatcaccacgg

SEQ ID NO: 873186 - DNA, 98 bp, Homo sapiens
agacattagaactggatgcctcaacctctgctgttcttgatcatagagtggtgagatcaagtcggtagatcccagactaatccatgtgatgctgatgg

SEQ ID NO: 873187 - DNA, 99 bp, Homo sapiens
attccgctccagaaattctgcttggtgatgagtatgatgcacctgcagtagcatcaacaacagcaacttgtgattggcggtgaccggatattcagttgc

SEQ ID NO: 873188 - DNA, 99 bp, Homo sapiens
actcagttgtggagagctgattcccaaatctaaaggtactgtccaagaagctggaacattattatccagcaagaatgttcgtgtcaactgtttggacga

SEQ ID NO: 873189 - DNA, 99 bp, Homo sapiens
gaagacatgacacttacaagatggacagggatgataattgggcctccaagaatcatcaatgctgtggtactgttgattttattgagtgccctggctgat

SEQ ID NO: 873190 - DNA, 99 bp, Homo sapiens
ctcactttgcataatgtagctgaagttatcatctgtgggtaccagaagtgttttcagaaagagtgtccatgggctattcctcaaaatacaatatcttgt

SEQ ID NO: 873191 - DNA, 99 bp, Homo sapiens
aggaggaggaccgcataattaattcctgactgtagtgttggctcagattcaaatgcctttttgaaccttgggagacttgggcaggtctaccgtcctttc

SEQ ID NO: 873192 - DNA, 99 bp, Homo sapiens
caggtggaccccaagaagaccattcagatgggatctttccggatcaatccagatggcagccagtcagtggtggagagccactggtggccgcagaagaca

SEQ ID NO: 873193 - DNA, 99 bp, Homo sapiens
tcccgcctgggtgacaaaggtagaatcttaaaagttaagtccactttcatcccacgcccccatcctttccgtcatccctcacccctttgtcttgagaaa

SEQ ID NO: 873194 - DNA, 98 bp, Homo sapiens
tgtgcaccggctggctgaggaaatcgcctcccgagaagaagttgaggcgctatgatgtggttctgagacagtccctgtccctgatggcccacggagcg

SEQ ID NO: 873195 - DNA, 98 bp, Homo sapiens
ggagaaagagtaattcacgcagagccggctttgcagaaacggtgggagcccagagtatatgagatgtcttcagaggctcatctaactctgtccttaca

SEQ ID NO: 873196 - DNA, 99 bp, Homo sapiens
ccagccttcaatgtgtcctacaccaggcagcccccaaatcccggcccagagaatggaggtgttgtccaagttggagaattgttaccttgcaagatttgt

SEQ ID NO: 873197 - DNA, 99 bp, Homo sapiens
tcccttatcatcctcatcatgctttggcagaagattatgcggatcaaacctcaccaaggccagcacataggagagatgagcttcctacagcacaacaaa

SEQ ID NO: 873198 - DNA, 99 bp, Homo sapiens
gcaagtttgagtgctacatcctggtctgaatcgacacttgggtaaccaggcgtagaagggtctcctcctggattcagtgacaccatgaaggtatcatgg

SEQ ID NO: 873199 - DNA, 99 bp, Homo sapiens
ctgctcacgacagaaggcgtctcatggcgttggaataccggctctcagcggctgctgaagaaatgtcaacaattgggagttttgaaggattccaggctg

SEQ ID NO: 873200 - DNA, 99 bp, Homo sapiens
gccagtatggcttagtggctgcgtgtgcagctggagggcaggtgaaatgacaatggatgctctgttggctcgattgaaacttctgaatccagatgacct

SEQ ID NO: 873201 - DNA, 99 bp, Homo sapiens
ccctcctgctgccttggggtgacaatctcagctccaggctacagggagaccgggaggatcacagagccagcatgaaaacccgcctagtgccaagcaacc

SEQ ID NO: 873202 - DNA, 99 bp, Homo sapiens
gaacgagtgtaagcagctgaacgagaaccaagtgcggacgctgtgcgagaagggcatccgcttcgatcctgaaattccgcaaacactacgactagagtt

SEQ ID NO: 873203 - DNA, 99 bp, Homo sapiens
tggactcacactgctgtctctgtatatgttctgtgagtctaacgggatcgcagccatcattgttattttggtgttactgctactcctggggatcggttt

SEQ ID NO: 873204 - DNA, 99 bp, Homo sapiens
gctcgatctgaagaggcagaaggagcaggctctgcgggaggtggagcacctgaagagatgccagcagagtgtgaacatggctacgcctcttcattcccg

SEQ ID NO: 873205 - DNA, 99 bp, Homo sapiens
atcctgcggcagaagccgagttcaacatcctcctggccaccgactcctacaagacaaatttacatgtattggagaccagaccagaagcccttctgaatt

SEQ ID NO: 873206 - DNA, 99 bp, Homo sapiens
cttagccatgtcgtccttgatcagaagggtgatcagcaccgcgaaagccccaggggccattggaccctacagccattggaaaagaagtttgttcgagtt

SEQ ID NO: 873207 - DNA, 99 bp, Homo sapiens
cgaaataccaccggaactggtcgaatgaggcacctaaaaattgtataccgcagattcagacaaatgaatggcctttggaaagcttttgtgaagaacttt

SEQ ID NO: 873208 - DNA, 99 bp, Homo sapiens
acggctccaacagggatgcgctgagcgatttcttcgaggtggagtcggagctgggacggtaatactgcattgcatgattgtgcagaatctggaagtttg

SEQ ID NO: 873209 - DNA, 99 bp, Homo sapiens
tccaaagcagtcgtaagaagaggtcccaatcccccactctttccgccctaatggaggtctccagtttcgggaacccatattgaaatgtctattggaatt

SEQ ID NO: 873210 - DNA, 99 bp, Homo sapiens
ggttgtcatcattcccccgcatgatgactgcaccccgcggagcctgccctcaagtatgtgttgtatacattggttggctttgtgggttttgtaacccat

SEQ ID NO: 873211 - DNA, 98 bp, Homo sapiens
gcagtaacaacagcgaggaagaagaggacgacgacgacgaggaagaggaggtttctgagcttagaccatgctcagcctccaagcagccttgtcatcga

SEQ ID NO: 873212 - DNA, 141 bp, Homo sapiens
gacttagtggggctgcagtatcaactcgagggaggttcatgacaactgaggaaaaagccaaagtgggaccaggagcctgtggggcccggatagtcagccgaccagaggaactgagagaagatgatgttggaacaggagcag

SEQ ID NO: 873213 - DNA, 99 bp, Homo sapiens
cccgtgtgatgttctcctcctgcatgcgctggcagtacaccttgatggtcttgatgcccaccttgggctcctctgtaatcctagcactttgggaggctg

SEQ ID NO: 873214 - DNA, 98 bp, Homo sapiens
gattagcaatggagcctatggtgcttttttaggaccaaaggatatatttccttactcagaaaataaggaaaagtatggcaaaccaaataaaagaaaag

SEQ ID NO: 873215 - DNA, 99 bp, Homo sapiens
gctggtaaatgctgcatactacgttaatagttgctttgattgggattcacccccaaggagtctcgctgcttttgtggaatcctatgaggatggttgtga

SEQ ID NO: 873216 - DNA, 99 bp, Homo sapiens
gcacgagctgtgaggggattcacttgtgtgcggaactcctcggaaccatggaggaagagcaagcaggccctgagggactataagaaggttcagatccag

SEQ ID NO: 873217 - DNA, 99 bp, Homo sapiens
gggaggcaaacttgtaaaacctggaacagcagcatcattgtcaaaggtaaatgagctggatggtatcccgttgatcctggacaactgcaacatcagtga

SEQ ID NO: 873218 - DNA, 99 bp, Homo sapiens
ctgcacggggtcgcgccgtggcggagcaggtatctgtggaccaaacagccactcctatgttggacggcaccagtttgggcatatgcacaggccaatcca

SEQ ID NO: 873219 - DNA, 99 bp, Homo sapiens
atagtcaactgcgtggaagagaagctccatcaagtatgatggtgaaggatgaatatgtgcatgactttgagggacagccatcgttgtccactgaaggac

SEQ ID NO: 873220 - DNA, 99 bp, Homo sapiens
gtccgatggccgaccacagcgagtagcgtcctcccacccactggaagttgtggacttttctagtgagagcctcaagactggggatgctctctggagcta

SEQ ID NO: 873221 - DNA, 99 bp, Homo sapiens
cttgttcagatttaagcatcttgcaactggaaactatttagctgcagagatcattgagactgaaaatatgatggaccgaattgtgactggcttgtctga

SEQ ID NO: 873222 - DNA, 99 bp, Homo sapiens
ccaggggctctgggagtggctgccaggagagcgacttgcagttgtggaggtacagtgtgaacggctgaggatgctctaccgggactgtgctcggccccc

SEQ ID NO: 873223 - DNA, 99 bp, Homo sapiens
cgccgcctcagccgccgccgccgccgttttcgcctgcagctgctcaccgataacaagacctctgccagaagaaccatggctttggaaggcggagttcag

SEQ ID NO: 873224 - DNA, 99 bp, Homo sapiens
tgaaaatgaagaagaaaataggcccctcatgagggttctcgtggcaaccttttactacctttgccttaacctttggccactgttcttggctaagatgag

SEQ ID NO: 873225 - DNA, 99 bp, Homo sapiens
ggcttttctagcctgctgatgtgacaactgtgatgtgcctgcaacaacaggaaaggcaatgttatattaaggtgaaaaggggaccgggaaatcaactca

SEQ ID NO: 873226 - DNA, 98 bp, Homo sapiens
gtcacctttgaacatgttaaagggatcctgattccggccctgatggtcacggcggagaaggacttcgtgctcgttcctcagatgtcccagcacatgga

SEQ ID NO: 873227 - DNA, 99 bp, Homo sapiens
aacaataacaagactgtccttcggacaagttttaggtctcctctgagcctccggcctccataagacccaaaacagatgacacctcttcccagtcccccg

SEQ ID NO: 873228 - DNA, 99 bp, Homo sapiens
gagtgtctgaaggatgggacgtggagtaacaagattcccacctgtaaaatgcttgcgctccaggcccgaaagaaaaggaccaaggccaagaaggacaaa

SEQ ID NO: 873229 - DNA, 99 bp, Homo sapiens
aaaagcaatggagattggatggatgcacaatcggagacaaaggttgtggactttagaaagaagaatattacctattacgactccatgggtgggataaac

SEQ ID NO: 873230 - DNA, 99 bp, Homo sapiens; identical to SEQ ID NO: 821635

SEQ ID NO: 873231 - DNA, 99 bp, Homo sapiens
ctctcgatctggatataattctccatgcagttcttgtgcttggcatccatgaccttcagcagcacctctgtctttcgggcctccccatccaccacctca

SEQ ID NO: 873232 - DNA, 99 bp, Homo sapiens
agcttcatcgacacatcccggatcacagctatgtccaaactgggtcttcggcaggttacaggagttactagagtcactatccggaaatctaagaatatc

SEQ ID NO: 873233 - DNA, 98 bp, Homo sapiens
gaggatgacaaactctggagtaattggagccaagaaatgagtataggtgttgacagctcttctaccacaagcagtgcttctccaatgcccaacagtta

SEQ ID NO: 873234 - DNA, 99 bp, Homo sapiens
aggaggtcatcaaagtctggggtcttcatatcccccatggtcattaatttgagcagatgttctttggctgcaatggtggcgcacagggggctgaaacag

SEQ ID NO: 873235 - DNA, 99 bp, Homo sapiens
gccctggccctcactgtgttggaagggccttgggaaaactttacaaacaattgctttgcttggttacctgaaacactaccgaaatattcctggacctca

SEQ ID NO: 873236 - DNA, 99 bp, Homo sapiens
ggaaccgccgggccgaacagcatgacgtccgctttggagaactacatcaacccacatttgaggatgttcgtgatgctgaagacgctttacataatttgg

SEQ ID NO: 873237 - DNA, 99 bp, Homo sapiens
gaaggagttcatgagtgctataagatgcgactgctacagggaccatgggacactattacgcaacagaagccacagaagaagtttctttggacagccctg

SEQ ID NO: 873238 - DNA, 99 bp, Homo sapiens
ctctcacgaagaggacgaggagggcccatactacagcgcactgtcaggctccttctcctgaaaaagccgaggaggagagtgagaggcttctgagggaac

SEQ ID NO: 873239 - DNA, 99 bp, Homo sapiens
tcagggtcatgattacacatggtgtggatgtgacagcccaagatactaccggtaccaaaaactgtggaagagttatgtgaaacttcgccacctcctagc

SEQ ID NO: 873240 - DNA, 99 bp, Homo sapiens
ggagaatggagtcttccatcaatcatatctcacagaacccagcccttgctgacatctacacagagcacgcccatcaggtggtggtggccaagtatgcgc

SEQ ID NO: 873241 - DNA, 98 bp, Homo sapiens
ctggactgggatttggaggatttaatacacagcagcagcagcaaactagtcctcagaatggttggaatgaccctccagctttgaacagagtacccaaa

SEQ ID NO: 873242 - DNA, 99 bp, Homo sapiens
taggatcaagatggccatgtggcagggtgaaaggtgtagcagtcactcggcctacacccacagcatcgaccttgtgaacccagcgacctgactgccttg

SEQ ID NO: 873243 - DNA, 99 bp, Homo sapiens
tggattgactatggaaaagttgccaaattgatgggaataactgggaacacaagtccatttggacagccctttagtcaagctggagggcagccaatggga

SEQ ID NO: 873244 - DNA, 99 bp, Homo sapiens
tgaaagcaatgcaggagacactggtactgccataaaatgggctcagcagttagttgtggacatcggatacccaaggagacgaagctgaagcaggagaag

SEQ ID NO: 873245 - DNA, 99 bp, Homo sapiens
cttggttctgccagatgttcctggggttactgtaaatgggaaggacaggcagagctaaacaagggcgccaatgcttcggcattagagaaagagattggt

SEQ ID NO: 873246 - DNA, 99 bp, Homo sapiens
ctttatgctgggaccggacactttcctgcctctgaaattcttcctccactgtgacagtctgttctgaggcaggtgatgggggtggagaaggaggcagat

SEQ ID NO: 873247 - DNA, 99 bp, Homo sapiens
ccttttctggcggcggtagatttgaagcgcttcaaaggaccggacccagagaagaggaaaactctaccggtgcaggctggtcttgaactcctgggctca

SEQ ID NO: 873248 - DNA, 99 bp, Homo sapiens
atttcacacttcagatgctgaagcgagtccctgagctcccggttcgcactgccccttggaacaccacaagggccttcattgctgccatgaagggcaagt

SEQ ID NO: 873249 - DNA, 99 bp, Homo sapiens
ggccaccccacctgtgactgttctaccactggctatggtggcaagctctgctcagaaggagatcatgaatcagacagataaaaatcaacaagaaatccc

SEQ ID NO: 873250 - DNA, 98 bp, Homo sapiens
gacgaaggccctactgggcaaggacaaagtgatggcatctccccttcagatcacaccacagacagctaccgtggcctttgataatgtgcattttgaat

SEQ ID NO: 873251 - DNA, 99 bp, Homo sapiens
gagagtcaggagccccagagccaagtgcgagcccagcgggagaaaatcaaggagatctgaagaaaacccttgctgtgttattagataacattttgcagc

SEQ ID NO: 873252 - DNA, 99 bp, Homo sapiens
gcttcacaacaggatcacagtctttctgtccacatggaacaaactgaggagatcgcttgagacgaacggtctcttcgagccaggggacatgcagtacga

SEQ ID NO: 873253 - DNA, 99 bp, Homo sapiens
gccacgttgcaaacagtttctggctccgattgtattgcaggttctgtcactgtgccgctcaagtggaaaccttctcatgggatcctgcagaacagctga

SEQ ID NO: 873254 - DNA, 99 bp, Homo sapiens
cagcctccgaagtagctgggattacagttatttgttccatagcggcaaccaagaacatcctggagatattctgctaaacacaactgtggaagttttgcc

SEQ ID NO: 873255 - DNA, 99 bp, Homo sapiens
gagctgtacttctatatctacaagggggtccgcaaggtccggaccctatttgtcagtggccttcctctggatatcaaacctcgggagctctatctgctt

SEQ ID NO: 873256 - DNA, 99 bp, Homo sapiens
cacattttacagaaagcacagtgtttccaagccctggcttgaaaaacagtccaattgatgaaagtgaggtgcaaacagcaactgatagtccctctgtta

SEQ ID NO: 873257 - DNA, 99 bp, Homo sapiens
ttctgccccagctccgtctcggcggcggcggggcaatttggttttgatgctgtgccagaaatcttctgacaatgagttactggaacttggaaaaaagga

SEQ ID NO: 873258 - DNA, 99 bp, Homo sapiens
gctatgtgagatcttgaaagtgggcgagttgctcggccgtatactaacaaggtaattactttatggtaccgtccacctgaactgctactgggagaagaa

SEQ ID NO: 873259 - DNA, 99 bp, Homo sapiens
gcaggaggaggacggcagcaaccgcagcagcagccttcagctaaacaagcattgaggaagcagcaaacaaaggcatggaagaaactacaacaacaaaaa

SEQ ID NO: 873260 - DNA, 99 bp, Homo sapiens
ggaatgtttcctcctactcctctttcacctgccaggttcaagcttatcaggagggcagacttcaaaagctactaaaaatgaacggccctgaagatcttc

SEQ ID NO: 873261 - DNA, 99 bp, Homo sapiens
gaaactgaagttaatttttttttttttccaaacacaaggccccttcacagatgtagtcactacaaatcttaaattgcgaaatccatcggatagaaaagt

SEQ ID NO: 873262 - DNA, 98 bp, Homo sapiens
gatcggactggggcttctatacttaatctttgcagctgttgaaggcgtgatgagagtcattgggagccatgtccattggagcccgttcccaatcagct

SEQ ID NO: 873263 - DNA, 99 bp, Homo sapiens
cccaactccctggactatacgcagacttcagatcccggacgccacggaaaagcgggtggttagcaggaactgggcaaggggtacctgtggacccagagt

SEQ ID NO: 873264 - DNA, 98 bp, Homo sapiens
cggccggtagctgcagctggagcagtggcgtttggaggagactcggtgcccaacaaccagcatgtgaaggtgcgcttcaaattcttctacctgctgga

SEQ ID NO: 873265 - DNA, 100 bp, Homo sapiens
cagtgctgatgaaacttgggactctgcaatagatacatggagcccatcagaatggcgggctccatgtatctattgcagagtcccaagtttcatcagcact

SEQ ID NO: 873266 - DNA, 99 bp, Homo sapiens
ggcgagatcaccatcttgtctgtgggcagaatctccagccaagtcctccgtgctcgtggtgggaatcgtcatcggtgtcttgctactcacggcagcggc

SEQ ID NO: 873267 - DNA, 99 bp, Homo sapiens
gcaggcggggaagatgaaagggatatgaacgagactgccaaacaagaagatattttggaatccacaacagatgctgcagaatggagcctagaagtggaa

SEQ ID NO: 873268 - DNA, 99 bp, Homo sapiens
acattggaccctcctcccaactgtaggaatggaagattgcgaaacaatggaagatgtatacatggcttcagtagaaacagaccgaggagtaaaagaaca

SEQ ID NO: 873269 - DNA, 99 bp, Homo sapiens
tatggtgcagatattaatgggagcatatatgatgagctacgactaatagactggggtttggctgagttttatcatcctggccaagaatataatgtccga

SEQ ID NO: 873270 - DNA, 99 bp, Homo sapiens
ggcgctcggcatggctctcctggtgctcgggtatgttagagcccaccaaggaaccactgaaaccactttctgctgcagaaaaaatagcttccatcggtc

SEQ ID NO: 873271 - DNA, 99 bp, Homo sapiens
gcgtggtagcgacgggtgatcttcgctgcggacttggttcggagggacgtccgcttctggtggacagattgagcaaagggctttgttcgcgggggtcac

SEQ ID NO: 873272 - DNA, 98 bp, Homo sapiens
cagaccgagagcagcctgccggggcggaggtgaaatgtgaccattactggccattcacggaagaacctatagcctatggagacatcactgtggagatg

SEQ ID NO: 873273 - DNA, 99 bp, Homo sapiens
tttccactgccggtcaccaggacttctcacagaacagctttgctgagccatcaaggtctaatggaagcatggttcggcattcttcatctccatatgtag

SEQ ID NO: 873274 - DNA, 99 bp, Homo sapiens
ggatgctccctcgagtttcaaattgttaccatcccatcaccaaacctggaagactttcaaaaaaggagatatgtcagtattgaattctcccagacatca

SEQ ID NO: 873275 - DNA, 99 bp, Homo sapiens
agcacttaaaagtggaaagatgacggatgaaaagaatgaacactgtccttcaaaacgaggaaacctcaaatgaattctgaaggggagataccttccctg

SEQ ID NO: 873276 - DNA, 98 bp, Homo sapiens
acacttattctgttgtatagaatgaagtgttgcttgattctagaatcaagaaacattcatggtgtctcaagagaaaaaatccaccgaatgaaagaacg

SEQ ID NO: 873277 - DNA, 99 bp, Homo sapiens
cagacatcaacttttggatccaagctggagtgcctgatattgatgatgttaagaagttcaaaccgggttacctggaagctactcttaattggtttagat

SEQ ID NO: 873278 - DNA, 99 bp, Homo sapiens
ttgctttccactgacaggacagaagaatacggggtgctttgcattcaggaatacagaaaaaacagcaaagtggagtcaagtacacgtaacaacttcatg

SEQ ID NO: 873279 - DNA, 99 bp, Homo sapiens
caccccgccagctccagagccacgctgaagccgacgtagcttctctgaacagacgcatccagctggttgaggaagagttggatcgtgcccaggagcgtc

SEQ ID NO: 873280 - DNA, 98 bp, Homo sapiens
agccactcggagctaatccacaatctccgcagttgatgaaaagcccagaaccttgatgacagattgtctggttataaagcattttttacgtaaaatca

SEQ ID NO: 873281 - DNA, 99 bp, Homo sapiens
tgaaggattactcgcccccacctgtggactctgaccgcaaacaaggagagcctactgagcagcctgagtggccctgccctggctcaacgtgtcagcaga

SEQ ID NO: 873282 - DNA, 99 bp, Homo sapiens
ccgacatgagggaaaagggacgtaggaagaagggcaggacctgggcggaggccgccaagacggtttttagaacttcagccataaaaatgggcagaattt

SEQ ID NO: 873283 - DNA, 99 bp, Homo sapiens
tattgcctgttcagtactgtgggtgatatttgcctttagtgcactcttctccttcacagtaaagtggctggctgctttgtaccgcctcagtggagactg

SEQ ID NO: 873284 - DNA, 99 bp, Homo sapiens
acaccggagacttttggggggaaactaggtcgatggtcggcggcgcccggatgggcagctgagtgacatgaagtccgagaggagacccccctcacctga

SEQ ID NO: 873285 - DNA, 99 bp, Homo sapiens
cgtgtaactggcaactgtcgacgtaaggctttgaaagtagtgtccgacattgtctgataattctcactgatggcagtctattcaattcccgttgaatga

SEQ ID NO: 873286 - DNA, 99 bp, Homo sapiens
ctgaagtgacggtgattgagccactggatgaagaagcgcggccttcacacatcccagccggtgactgcagtgaggttctgatctacaatggccaactgg

SEQ ID NO: 873287 - DNA, 99 bp, Homo sapiens
tcaaagccaggagctcgatgtgcaagccagatcctgtctgccactcaggagcagattgcagaatcttattaccccgagtacctgatcaacctggttcag

SEQ ID NO: 873288 - DNA, 99 bp, Homo sapiens
acatcttcaagccagtgcgcaaggtaatactgcattgcatgattgtgcagaatctggaagtttggacatcatgaagatgcttcttatgtattgtgccaa

SEQ ID NO: 873289 - DNA, 99 bp, Homo sapiens
tgtagcctcaaactcccaggctcaagcagtcctaccatgtcagccttcccagtagctgggaccacaggaaatacaactggagcacgcaaagcaagcctt

SEQ ID NO: 873290 - DNA, 99 bp, Homo sapiens
gcctccagtgcttcctaatgcccccaagccaggagtaaaccttttaaatgcttcggctgggtttctctcgcactccccaggctgtaagaggctttggac

SEQ ID NO: 873291 - DNA, 99 bp, Homo sapiens
aatatgttctttccagcaaatgctcgtacagtctttagaagaatgcaccaactcaaagcttggattctgccgtgccactcacgaatggcgacacagaag

SEQ ID NO: 873292 - DNA, 99 bp, Homo sapiens
ggagaggtagccatgatgccccacttggtgaatggagatgcagctcagcagaggtcctgctgtactagccaccaaagcagctgctggtactaagaaata

SEQ ID NO: 873293 - DNA, 99 bp, Homo sapiens
ctcgggatccttctgggactccacaaaccttctgatgctctcgaatggatcggaaactaggagacttcatgtggtgaccccagcagcccagccagtcat

SEQ ID NO: 873294 - DNA, 99 bp, Homo sapiens
acccgggtggccaaattccgtcctggctcattaactgggccgccaagagctccaaacgagaatggaagccgctggaggaccgtagctgcacagacatac

SEQ ID NO: 873295 - DNA, 99 bp, Homo sapiens
gcacctgttgatccaccagtggccttctctgactaccagatccagcagatgacagccaacttcgtggatcagtttggcttcaatgatgaggagtttgcc

SEQ ID NO: 873296 - DNA, 99 bp, Homo sapiens
gtcgctcagaatcgaaccaggaagcagctctccaagactagtctcttccaaggaagatcttgcagggactggtgattgcagctggaagtgcccatgacc

SEQ ID NO: 873297 - DNA, 99 bp, Homo sapiens
tggtgctcagggtgtcccagggcacgatgaagtcacagagggtgatgtgcatcttgccgtccccctcggcctttccttggaaatgtagcatttcaagct

SEQ ID NO: 873298 - DNA, 99 bp, Homo sapiens
tggagctgtggaagctgtgcacctccctcactttgtggctctccaagttacagaatgtctgaaggggacagtgtgggagaatccgtccatgggaaacct

SEQ ID NO: 873299 - DNA, 99 bp, Homo sapiens
cttggagatccccgcctatagcagctatgacatggtgcattacggccactccaaccagctgcgccaggcacgggccatgggtgactacctcatcgtagg

SEQ ID NO: 873300 - DNA, 99 bp, Homo sapiens
gcacagaaccgagctgcttgctcacgtggtaaacagatcagaaggccgccttttcactgtcaaggtggacaacatctttggctccaggatcttcctccc

SEQ ID NO: 873301 - DNA, 98 bp, Homo sapiens
ccaagctccactgttcagatgcaaagatttcagaagaaagtggtagcttcctttccaagaacagttctgagcacaggaatggataaccggtacctggt

SEQ ID NO: 873302 - DNA, 99 bp, Homo sapiens
gccagcctgagcgcaacacttctccgagccagcgagccagcgagccgccgacccgccgagcaaaatggacagagcgggatgccaccagcttgtccaaag

SEQ ID NO: 873303 - DNA, 99 bp, Homo sapiens
aaggaagaggaaaaggacaagggagatgaggaggaggaaggagaagagaaacttggttatgtcctcacagttggattcatgagttttgcagtatgttac

SEQ ID NO: 873304 - DNA, 116 bp, Homo sapiens
gctgccgtggccgcccggctgccgggagtttccatcagatgtctgcttgtggaattccaggtatgggtctgactttccaaatagatcccggcgcgaagctgtcggctcccggcagc

SEQ ID NO: 873305 - DNA, 99 bp, Homo sapiens
ctcctggaccgcctcgtctttgcaccggccttcctcatgttgttcttcctcatcatgaactttctggaggaattgaatgatctggcacgggaccctcca

SEQ ID NO: 873306 - DNA, 99 bp, Homo sapiens
gatgatcgaccgcaacttacgggaggacggggaaaaagcggccaaagaagtgaagctgctgctactcggtcccagaacagttttcttctgggctccaat

SEQ ID NO: 873307 - DNA, 98 bp, Homo sapiens
gacaatgaaaccgggaggaaagaagacaagagagaacgcaaacagtttgaagctgaggattttgttgatatccctgaaagtacttaatagcatcgtgc

SEQ ID NO: 873308 - DNA, 99 bp, Homo sapiens
gaaaatcaggaagccttgcaattacaggcatgtcggggaaaccagcacgatgtgccagtcattcctttggatgtagtagataatcagacagagaagttg

SEQ ID NO: 873309 - DNA, 133 bp, Homo sapiens
actgatgctctctgcatgatacatatggtatgttttcgtttttcggcctctttcagcttgctctctgcactgatgctctctgcatgatacatatggtatgttttcatcacctcctgtagatctactctttact

SEQ ID NO: 873310 - DNA, 99 bp, Homo sapiens
cagcctcctgagtagctgggactacagaatgcgtgacctatccaatccttcctctcatggaaacaccaactcatccatgccctctgtgctgaaacttcg

SEQ ID NO: 873311 - DNA, 119 bp, Homo sapiens
cgcccgccgacccgcgccctgctccctctcagcacctgggcggacgtgctcctatatccctccctgtaagagagaaaatcagaagaatttggaaagtgtcatgaattggcaacagtact

SEQ ID NO: 873312 - DNA, 99 bp, Homo sapiens
gcggctctgcgcggtccccgccagcgccccatcctgagccgggatgcttgaagatggaaagaaatttgattcctcccgggacagaaacaagccctttaa

SEQ ID NO: 873313 - DNA, 99 bp, Homo sapiens
caactcagaggtctattctgaatgcaaagcatcatggggttagagtcggagatgaggtctttaagggtgtccaggaagccctggtcctccaccagctgg

SEQ ID NO: 873314 - DNA, 99 bp, Homo sapiens
cactaagttcataggctttcttcattaatccaaactttctctttgtaaaagtgacctgtaattccagctactcgagaggctgaggcaggagaatcgctt

SEQ ID NO: 873315 - DNA, 99 bp, Homo sapiens
tcagggctccttggcctacctggagcaggcatctgccaacatccctgcacctctgaagccaacgagaccagccactaactggggcgtacacagtgaccc

SEQ ID NO: 873316 - DNA, 99 bp, Homo sapiens
cttgactcaagattgactctacagactcagaagatgatgctaacagtgaggcatacaccatacatggtacagccagagtaccgaatctatgagatgaac

SEQ ID NO: 873317 - DNA, 98 bp, Homo sapiens
tgtacctcatccacagggcctcctgccagccccagcccctggagaggatgcaggccaacactggacaaattgatgacccccaggagcagcacagagtc

SEQ ID NO: 873318 - DNA, 99 bp, Homo sapiens
gggatgagaagaagcggaaacagctcaaaaaggccaagatggccaaggaccgcaagagccgcaagaagcctgtggaggctggttttgaactcctggctt

SEQ ID NO: 873319 - DNA, 99 bp, Homo sapiens
ggaaggcgggagacgagaagcctgaaaagtcgcagcgagctggagccgccggaggtggtccagtgcttgctggggatggagaaggaacatgaagtagaa

SEQ ID NO: 873320 - DNA, 98 bp, Homo sapiens
gtgagccatgccagccaccctacctgtgaccccatctgtggccccagttatcatggagtagagagcagtcattatggcgaaccttggctgctggatgc

SEQ ID NO: 873321 - DNA, 99 bp, Homo sapiens
ttatagtctctcgccacagcggcctcggcctccccttggattcagacgccgattcgcccaggtctgatgagtctctatggcagaccttagacctcacag

SEQ ID NO: 873322 - DNA, 99 bp, Homo sapiens
agcctcccgagtagctgtgattacaggtgtgagtcatcctgttctaaagcaagttgctgaacagtttctcaacatgaggggtgggcttggtttatctgg

SEQ ID NO: 873323 - DNA, 99 bp, Homo sapiens
tcaaggcgaatatttaacttatatctgcctgtcagatctcaacagcaacggattcatttgtgactatgaacttcatgagctcttcaaggaagctaatat

SEQ ID NO: 873324 - DNA, 99 bp, Homo sapiens
tgttaaggattccaagtaactcttatttggctatggagttactagtagagaaagcaatcagcagtgcttctagccctcagagccctggggatgcactga

SEQ ID NO: 873325 - DNA, 99 bp, Homo sapiens
atggaggacgaggagagacagaagaagctggaggccggcaaagccaagcagctgctcagccaggaactgagatctttaatctgccagcagttactacgt

SEQ ID NO: 873326 - DNA, 99 bp, Homo sapiens
actcaaaggatcacacagtttcagttgatggacagtggcaagagtggagttcgtggagccagtgctcagtaacgtgctcgaatgggactcagcagagaa

SEQ ID NO: 873327 - DNA, 99 bp, Homo sapiens
agaaggactcgctcgacccgtccttcactcacgccatgcagctgctgacggcaggttcagcttgttggtttagatgaggagagttcagagtttatttgc

SEQ ID NO: 873328 - DNA, 99 bp, Homo sapiens
cgaagaagatcgaaaattaaacctcagtactatactggcaattgctggagaagattttgcaattgttgcttctgatactcgattgagtgaagggttttc

SEQ ID NO: 873329 - DNA, 98 bp, Homo sapiens
ggaccgccgccgccgccgccaccatggttcatcgttgggtcaattatgaatccatgctgaaagaatgcctggttggcagaatggccattaaacctgct

SEQ ID NO: 873330 - DNA, 99 bp, Homo sapiens
ggagatcaaaatgtgtatcctggacccattgataactctggacttctcaaaggtcattaaatttgacggtggagaggaagtacttatttcaggggaatt

SEQ ID NO: 873331 - DNA, 99 bp, Homo sapiens
tttagtgaaatgggctaataatgctggcaaagtggaaaaatgtgcgatctaaagcgggaagccagtatctgtcatatgctgaaacatccacacattgta

SEQ ID NO: 873332 - DNA, 99 bp, Homo sapiens
gtggtttccatgcagcgatggctctcaattccatagaatgtgtgtttgtaacaagctcctctccctcggagcatcgactgtaatcccagctactcagga

SEQ ID NO: 873333 - DNA, 99 bp, Homo sapiens
caaataatcctttatccccaaagtaggctgcaagagttgtttacatttattatacttttctgttttgtcagcaatttctttggtcatttcacagacttg

SEQ ID NO: 873334 - DNA, 99 bp, Homo sapiens
cgaaatggatgaagatgattgataaggtggaatatgtgatcaagtgtgacatgtcagctctgcagaagattctgtatcgccatatgcaagccaagggga

SEQ ID NO: 873335 - DNA, 98 bp, Homo sapiens
tgggatgatacaccttttccacagggaattgagttggatatgctgcaggctgctagtcattatcgccaaaatagaaactctttgtatagaagagaaga

SEQ ID NO: 873336 - DNA, 99 bp, Homo sapiens
ctcccgagtatctgggattacagtgaacacctacctcttcatgatgcaagcccaaggcattctgatccgggacaacgtgagaacaatcggtgctcaggt

SEQ ID NO: 873337 - DNA, 99 bp, Homo sapiens
ctccagagtagctgggactacagatgaagcagatgatgatgatgatccagaatataatttcctggaagacctcgatgaaccagacacagaggatttccg

SEQ ID NO: 873338 - DNA, 100 bp, Homo sapiens
ccaaaggagtatctccagcctttcaaggacaaactttagttgtctgctttttggaagaactcctctagtttgtccttgaaaggctggagatactcctttg

SEQ ID NO: 873339 - DNA, 99 bp, Homo sapiens
gacaagcgactctccatggtttctctcaggttctgagactctaggcaggctggcaggcaacaccttagggtcaaaatgcagatcttcgtgaaaaccctt

SEQ ID NO: 873340 - DNA, 99 bp, Homo sapiens
cttcctcctcttcactctctgtctcagttttaacattcatttcagctggttgggtaatcactgagggtgggtgtgcaaaatgttcaccatccccttggg

SEQ ID NO: 873341 - DNA, 98 bp, Homo sapiens
ttctggggcagtatcaacggagtctccggggccaagcagatagaacttcagttcactattggcgaagccattaccagtgctgcaataggaactagttc

SEQ ID NO: 873342 - DNA, 98 bp, Homo sapiens
tattcttcaactcagcatgttcctgcattctgaaggcaaatcctgtttagacccaggcaaaggttcctggtgacccaggctctcatgagcagattgtc

SEQ ID NO: 873343 - DNA, 99 bp, Homo sapiens
ctgtagccacgcttgtgtcattgctgattgattgcctcgggatagttctagaactcaatgtcacggtctagatcacattctcgatccagaggaaggcga

SEQ ID NO: 873344 - DNA, 99 bp, Homo sapiens
tgaatgccacggccatgcagctgagtgtaatgttcacggcgtttgcattacatttctcttgggaagttgtgcatctgacaggaatatagtactgtacga

SEQ ID NO: 873345 - DNA, 99 bp, Homo sapiens
atgactgccgtagatctaatggaagcaagccaactgtgtagcatggactcgaaagcaaatattgtacatgagcatggatcattttgatgacattggtcc

SEQ ID NO: 873346 - DNA, 98 bp, Homo sapiens
ccaactctgaggagtccactgcagcagacttaattcagtgcacaaatgagatgaatgtgaacatcccacagttggcagacagtttatttgaaagaact

SEQ ID NO: 873347 - DNA, 99 bp, Homo sapiens
ttacaactccctcaaggactgcctttcctggtgccagatgcaattaaaaagtgtcagagggctggaattactgtgcggatggtcactggtgataatatt

SEQ ID NO: 873348 - DNA, 99 bp, Homo sapiens
gacctgcacgacatgctggcctcgctggttctcctgtgcggctcccaccctgaacagctgcccggagccctcgcctgaggtatgggtctgcaacagcga

SEQ ID NO: 873349 - DNA, 98 bp, Homo sapiens
ggagtaccctgttcctggcatctattatcctcccagtccacaacgctgaaccgtggctggacgaatgtttgaggtctgttttgcaacaggactttgaa

SEQ ID NO: 873350 - DNA, 99 bp, Homo sapiens
aacttggttgctcttgaagctggtgagagccctgccaggatgtggagtggacttcctagcagaggtatttgggaataagatgatcattccttccctgga

SEQ ID NO: 873351 - DNA, 100 bp, Homo sapiens
agggttcagcttcctaagagataccgctcagaagaaaatgcaaaaaaactaatggtttttgcattttcttctgagcggtatctcttaggaagctgaaccc

SEQ ID NO: 873352 - DNA, 99 bp, Homo sapiens
tttaggagaaagttgctgaaggcaggagggatgattcagtccctcaaggcgttgattgaaaatgcagatgctgtatatgaaaagatcgtacattgtcag

SEQ ID NO: 873353 - DNA, 99 bp, Homo sapiens
taactaaagtgattcaattgaagatggacttcactgcagatatacgtggcatttcaagtgatcagttgcatagagtactaaaaagtgtggaatcagaaa

SEQ ID NO: 873354 - DNA, 99 bp, Homo sapiens
tacgtgcttggaaagacgtttcttctcttggcaagagagctctgcatcaatgcgccggccatagggcctgccttaagtgtgaaagtaatgactgatgaa

SEQ ID NO: 873355 - DNA, 98 bp, Homo sapiens
ggagacggagttctacgtgtcccccgaggatctggaggcacagctgcagtctgacgagagggggaaagcaggcaggatgggagagtcgccgatagaac

SEQ ID NO: 873356 - DNA, 99 bp, Homo sapiens
gcgtggagtgacggtcccacggcagcgcacatcacagcgattttcgtcagttgatgaacaagcaaaacttcataagactatgtctcaaggagagattac

SEQ ID NO: 873357 - DNA, 99 bp, Homo sapiens
gtgacttcagagacactgccaagcagccttagccctagtgtagaggtagctacagcaagctgggtagcaggcagatccaaaggatatcatgaagtttcc

SEQ ID NO: 873358 - DNA, 99 bp, Homo sapiens
aaggtggggaggataaaatttggagcaagattctcaaggaagcaacaagatcctaagggttcatagtggcgtcatgcacgcagactcctgcaagttccc

SEQ ID NO: 873359 - DNA, 98 bp, Homo sapiens
agatatacttgcagaatatttgaaatatcgtcaattcccctttcaatgaggatgaggatgatgaccttcagtatgccgatcatgattatgaagtacca

SEQ ID NO: 873360 - DNA, 98 bp, Homo sapiens
gaacttgttcaaactgctcaaagccccttttggatatgtgccacgttggtctttgccatagcaattagtgggaatctttccaacttcttgatccatct

SEQ ID NO: 873361 - DNA, 99 bp, Homo sapiens
ttgttggagtgctggtgaatcatttcaagagccttgataaatttgctgaagttccttatgtcaaatgagactgtacttttggccaaacacaacattttt

SEQ ID NO: 873362 - DNA, 99 bp, Homo sapiens
ctgttccaccttcagagcgtcacggcgtacgccctcatggggaaaatctccccggtgactttcaggttgctgctggagccaaggaagtagtcatctttg

SEQ ID NO: 873363 - DNA, 99 bp, Homo sapiens
ccaaaggctattggatcagctcagcagggttcgagaacttgtcttggacaattgcaaatcaaatgatggaaaaattgagggcttaacagctgaatttgt

SEQ ID NO: 873364 - DNA, 99 bp, Homo sapiens
atgaagaaattgaagactatgattacaacaaccctaacgacacctccaacttttgccctggattacaggccttggacaagattcgctatgagagcctga

SEQ ID NO: 873365 - DNA, 99 bp, Homo sapiens
atacagaagttaagatttattgtcaaccaagatggcccactgcgtgaccttggttcagctgtccatttcctgtgaccatctcattgacaaggacatcgg

SEQ ID NO: 873366 - DNA, 99 bp, Homo sapiens
caaagtccctttgcaagtcaaagtcgaggatattttttattcagggatcccaatgaagatacagaatggaatgacattttaagagatttcggcattctt

SEQ ID NO: 873367 - DNA, 99 bp, Homo sapiens
ctcaacatgaagatgacaaggatgaagacctttatgatgatccattcccacttactgaataggacagtggccttagagctattgagaatttgatgcaaa

SEQ ID NO: 873368 - DNA, 99 bp, Homo sapiens
ccgcttgtagtttggtttaaattctgcacgggaggaccttctgagtttacctgttgggctcctggctgcgcaggcagatgttagcagggatgaaataca

SEQ ID NO: 873369 - DNA, 99 bp, Homo sapiens
taatgaatctggtcagcttagtgcgttctacctttttgcctgtgtttggggcacattcattctcatctcttgagcaggtatacccagcagctgcgacac

SEQ ID NO: 873370 - DNA, 99 bp, Homo sapiens
gcaaaatgtccctaaaattgccaaggaactgggatttcaacctgaaagtggaggctgcgaaaatagtctgaaccaatcagagtccttgtgactggagca

SEQ ID NO: 873371 - DNA, 98 bp, Homo sapiens
ctgcgagcaggaagagcgcagtggctctgccgacgccgcgttcagaaagcaagagtgagccatggagctacgtgtggggaacaagtaccgcctgggac

SEQ ID NO: 873372 - DNA, 99 bp, Homo sapiens
tgcacggtgtgaccagccttggcttaaagcaggctctggagtttgcatacacaggacaggcggtatatattgcacccctaaaagccctagtacgtgaaa

SEQ ID NO: 873373 - DNA, 98 bp, Homo sapiens
acatttcctgcatggctgcaatagcaagaaagcctattttctgtatatgtattccagatatctgggtgtgtttgaccatcgaatgaagtgctggcaga

SEQ ID NO: 873374 - DNA, 98 bp, Homo sapiens
gcaagtaaacagtgcacttaaacagaaaatggaaggtggaattgaagaattcaaacctcctgaggtctattctggataagcaggttttgtgaagacat

SEQ ID NO: 873375 - DNA, 99 bp, Homo sapiens
ggaaaatgacagccttcatttctctgaacatactgccttatgggacagatcaactgtatgcaggagctattcttgaagtttgtggatgaaaattgggaa

SEQ ID NO: 873376 - DNA, 99 bp, Homo sapiens
ggtacttggatagcatcaaactcagaacttactcctagtgagagccttgctactactgatgataagaaagctgtggtgattcgtcacttgtataatgaa

SEQ ID NO: 873377 - DNA, 99 bp, Homo sapiens
tggccctgaccgagacctgggccgaccccccaaagacacacgtgacccaccaccccatctctgaccatgaggccaccctgaggtgctgggccctgggtt

SEQ ID NO: 873378 - DNA, 99 bp, Homo sapiens
ggcactgctggcaaacagccaaaaaggatttcaccgttttcctcaataccaacaaatcctctcgcttgtgctgcgcgtcaatacggcgttggccccctc

SEQ ID NO: 873379 - DNA, 99 bp, Homo sapiens
tgctagtgaaagaatgttattctgtcttcacaaaccggaggtgcacagataaacttgaacgagataggttgattctcttccttaacaagttgatcctta

SEQ ID NO: 873380 - DNA, 99 bp, Homo sapiens
tacatgcggttagatgacagtgggattgctcagttttcagttcagaaagtcactcctcagtctgatggctccagttcaaaagtgaaagtcaaagttcga

SEQ ID NO: 873381 - DNA, 99 bp, Homo sapiens
gtaccctcagtacgccacctactattacccccagtatctgcaagccaagccccagccgctcgaagctctgacagtcgaacaaattcaagatgatgtaga

SEQ ID NO: 873382 - DNA, 99 bp, Homo sapiens
cacttcgctggcaactgttgcactggatccacccagtgaccggacttctcacccccaggatgtcatcgagggtaccagcaactaaggtttcagagctga

SEQ ID NO: 873383 - DNA, 99 bp, Homo sapiens
accgagaccgtgaccgagagcgtgaccgagagcgcgaatatcgtcatcgttagaagtcggcttcctacagccagcagcacagtcacccatggaactgtt

SEQ ID NO: 873384 - DNA, 99 bp, Homo sapiens
gaagttaagggagacaaagttgaaaacaaagtgctgcacacagcaagaaggaggccatcagcaaactgggaagaggaccctcaccaggaaccacatctg

SEQ ID NO: 873385 - DNA, 99 bp, Homo sapiens
tcggaagttgctttgttttgcttcgagatggctgcggggatgtatttggaacattatctggacagttgcctgtggctggagaaaggaatgtgctcatca

SEQ ID NO: 873386 - DNA, 99 bp, Homo sapiens
gttccctgatcggctcatctctgagaggtgtgtcagctcccggttcagcattcttttgaatttaatattgcaagcctgctccatcagtcttcttgcatt

SEQ ID NO: 873387 - DNA, 99 bp, Homo sapiens
gctgtagggagcatagctgctacactgaagatgaagcaaggcccaatgacccaggcggtatgcttcagaagtgtccttctgttgatgacttcgtaagtg

SEQ ID NO: 873388 - DNA, 99 bp, Homo sapiens
agaaaagaaagaagacaaggtggaaaagttgcagtttgaagaggaggacttttttggaaattttagcattcaggtgccaggaatgcagatgggacagcc

SEQ ID NO: 873389 - DNA, 99 bp, Homo sapiens
ttcttcacctcctcagtcaacacccttgagcccacctccactcactcccaaagccaccaggaccctaagtctgtgcagacttttgcagacaaatcaaaa

SEQ ID NO: 873390 - DNA, 99 bp, Homo sapiens
caggatggttgtgagtacgtgtttatctggagaactgtggaagcctgtcccgttgtcagagtggaagccgattatgtttcgaggggaagtacgtttaaa

SEQ ID NO: 873391 - DNA, 99 bp, Homo sapiens
ttggtggaggctgtggcaatggaacaggcttgagaaacagctgttgcttttaaaaatgccaaacagtttgagcaagcaaaagatgcctgcctgagggaa

SEQ ID NO: 873392 - DNA, 99 bp, Homo sapiens
gctcctggacttcgcctttcccgagccctggaggtggggagaaaagaattatatccagatcgagagacagaagattctgaaagggttcaatgaaatgag

SEQ ID NO: 873393 - DNA, 98 bp, Homo sapiens
aatatatcacccataatcggaatgtgatcacagagcctatttacccagaagtagtccatatggtattttgaaggtggcgtctcatctgtctacctctg

SEQ ID NO: 873394 - DNA, 99 bp, Homo sapiens
ctgcggtgggatttcgttttgcctccggttggggctgctgtttctcttcgccgacggcaatctgaaagcaaatcctgtttagatgcaggcgaaggttcc

SEQ ID NO: 873395 - DNA, 99 bp, Homo sapiens
gggggaacaggacactttgtaaggtgtgccaggagtgtaactttagctccaacactgcaactgcccgtacttccagtgctcccacttgcaactccagta

SEQ ID NO: 873396 - DNA, 99 bp, Homo sapiens
gttctctcgcgcgggtgtcgctgggctgtcggcctggaccttgcagccgcaatgcggggccttttccgaagtggttttagctgaagagaaggcaactgg

SEQ ID NO: 873397 - DNA, 99 bp, Homo sapiens
aggaactgcaaaaggagacgtttaccacagaagagcgaaaacatctgtcgaaactaatgctggaatctcagtttcgccgtgaggaagatgcggaaaagg

SEQ ID NO: 873398 - DNA, 99 bp, Homo sapiens
agagcgcgaaggaaatctggccgccgccgccgcgagcgctcccgaacctttcagctcttggggcattggtgagtctcagtaatgcacgtctcagttcca

SEQ ID NO: 873399 - DNA, 99 bp, Homo sapiens
gtttatgttaccagcaatgacactacgtgccggtggtggtgtgcacattgagccccggtatagacagttcccccagctgaccagatcccaggtgttcca

SEQ ID NO: 873400 - DNA, 98 bp, Homo sapiens
cctgtcgggagcagagggcagtggcggtggccccaaaggaggggaattgccccccactgcctggatgagggcactgtgcggagtatggtcactgagga

SEQ ID NO: 873401 - DNA, 98 bp, Homo sapiens
cgtatctgcctaggcattttgctgtctcctcctaatacgattgtcactgctgttccaagggcacacgcagagggatttggaattcctggagagttgcc

SEQ ID NO: 873402 - DNA, 98 bp, Homo sapiens
gggcatctctttacagggaaaggtttttatctgaacgagtaaatggaaggagcaaatcttggagcttgcagcagccagaaccaatctccctggagttg

SEQ ID NO: 873403 - DNA, 99 bp, Homo sapiens
atccaatgctgcagaagtgtcagagactgaggacttaaatgaagccactgattagcaatttaaagatcctctccaaggcttttattgagatggagacaa

SEQ ID NO: 873404 - DNA, 99 bp, Homo sapiens
gaggaagagattgcagtgggggctgccagtgctaccctgagaaaggtggacgtgtcactcctggaagcaaggcggctctagctaatttatgtattggag

SEQ ID NO: 873405 - DNA, 99 bp, Homo sapiens
caactgccacgcagcgatttatacaactgcttttatgccataatgaataagtacattcccaggggctatttttggagcattacaagatatacttgggag

SEQ ID NO: 873406 - DNA, 99 bp, Homo sapiens
ggcctgatgaaaatgaaatggcaacaccgtgcagatggcaaagcgtaggcctcacaaacatcctggccgtgaagatggagtcttgctgtgtcacccagg

SEQ ID NO: 873407 - DNA, 99 bp, Homo sapiens
caaagtttgcagaaaagaatatgaggttcaaaccttgtactactcagctgatcacaagctgcttgatgggaacctactagatggacaggctgaggtgtt

SEQ ID NO: 873408 - DNA, 99 bp, Homo sapiens
atttaaagatgtaagagtagttgtatggtgcagttgccatggtggcactttcttttggggtgccaactccatgcttgcctagtagatgagtatttaagt

SEQ ID NO: 873409 - DNA, 98 bp, Homo sapiens
tggagaggcttgtatgtggggagaatatgtggacaacacaaacctggtccccaggctctggggaggagtggggccagttaaaagctccccatgccaac

SEQ ID NO: 873410 - DNA, 99 bp, Homo sapiens
tttgctaaggaaaatataatggatgatgatgagtgctactgtctaagagctggagctacagagcttgaaattaccactgaaaacactgaaatgttgggc

SEQ ID NO: 873411 - DNA, 99 bp, Homo sapiens
ttccgcgagcccatccgtctcaagactgtgaaaccagatgatgaaacatgcttgggataactataggacatatgggtggggacataatgaactcagacc

SEQ ID NO: 873412 - DNA, 99 bp, Homo sapiens
gggaagttcagtggaaagcatgcttctaattatcatcaacctgtcgttcatcctccatgacgttactagcaaattcaaatactaggtcgttctgttgga

SEQ ID NO: 873413 - DNA, 99 bp, Homo sapiens
ctgcctgggggctatgacctcgctggggagctacaacaagtacaagtataactcgtacagatccaggaggctgcaagccagggcctgaaattcgttggt

SEQ ID NO: 873414 - DNA, 99 bp, Homo sapiens
ttttttcattgttccactggacgctcatcagagggaagatctttttcctcaattgctctattatcaagtcctaaattttggaatgattgtctcatcggc

SEQ ID NO: 873415 - DNA, 98 bp, Homo sapiens
acagttttctccagaaaatagtgaattcattcttcaagaagagctcttgggatgctcttctggcataaacataatatcgaaaagtcattggctgattt

SEQ ID NO: 873416 - DNA, 99 bp, Homo sapiens
atggatttgcatcttgtaatgtgtttaacaaagccacgaataacctataatgaacattctagtatgccagtagaaaaaaatatcactttagaaaggcct

SEQ ID NO: 873417 - DNA, 99 bp, Homo sapiens
gttgctgtgttggcccatgtggtacaggaaggcgttcagtgtggctctgaggtccttgcttatctcctccttaactaaattcccaatgagcgctggata

SEQ ID NO: 873418 - DNA, 99 bp, Homo sapiens
gtggtgtctcccctcagtcctgctctgaagatcctgccctgccctggaggcggggtttcaccatgttgcccagactggtcttgaactcctgagcttaag

SEQ ID NO: 873419 - DNA, 99 bp, Homo sapiens
gttgagaagaccttgcgccacgcccttgaggaagaggagaaagtgcctgtggagcaagtcaccaactttgaagaggctggagtgcaatggcatgatctc

SEQ ID NO: 873420 - DNA, 99 bp, Homo sapiens
acatgttacgcaagggaccagctgaggacatgtcttccaaactcaaaaagcacagctgagtacaagctaactggagtaactttgctgttttgctgcttg

SEQ ID NO: 873421 - DNA, 99 bp, Homo sapiens
agcggagccggccgtacgcggtgctgcgagggcagaacctggctcctacagaagaagggaaaaaagagctgctgttcctaagtaacgcgaacccctcgc

SEQ ID NO: 873422 - DNA, 99 bp, Homo sapiens
ggaaaccagagccttccatttcttggcgacacatctccccatcaggaataagacgagttggaagaagacctgatcaacaacttcagggtgaagggaaaa

SEQ ID NO: 873423 - DNA, 99 bp, Homo sapiens
tattagagatttttaaagggatcaagtcgagtgagaaagatcagtctaaagaaaaggagaagaaagtgaaaaaaacaattccttcctgggctacccttt

SEQ ID NO: 873424 - DNA, 99 bp, Homo sapiens
gcaaacaaatcatagtggaactaaggggaacttaatttactgtgatatcagtatcaagataaaagtttggaatgggagaaaaattctcaaagcctgaaa

SEQ ID NO: 873425 - DNA, 99 bp, Homo sapiens
ctggatttttcttcaccttttccttactcatgagccagtgttccttgcctgtatctccccttggttcaatagctaccagatttttggaagaggaggaac

SEQ ID NO: 873426 - DNA, 100 bp, Homo sapiens
gcagccgttgccatggctgcaacacttacacaccatcgctctctcctccctgtagcaggctgttgctgctgtgtaagtgttgcagccatggcaacggctg

SEQ ID NO: 873427 - DNA, 99 bp, Homo sapiens
acaagacttaggaatccagtataaagccctaaaacctgaagtggataagctgaacattatggcagccaaaagacaacagatggagtttcgctcttgttg

SEQ ID NO: 873428 - DNA, 99 bp, Homo sapiens
gtattttcattgcatacacatgtcccgtatctttcttctgaacaagccgtacctgctttatggcagttactgttatcacaaagaataatggaagtccac

SEQ ID NO: 873429 - DNA, 99 bp, Homo sapiens
aaatgctcctttaatttttgaacgagtaatggcaacgttgcagctaccagccactaatttggccaacttggcaaatttgcctcctggcactaaactcta

SEQ ID NO: 873430 - DNA, 99 bp, Homo sapiens
cttgggataccaggctcttctggttttccaggaaatcctggaatgaagggccctcctggtattcctgggagaaatggtgaccctggtattccaggacaa

SEQ ID NO: 873431 - DNA, 99 bp, Homo sapiens
tcgtgctcaccggtttctcccacatcgacctgttttatcttcaagacactaaaagtagtaatggtacttttataaatagccagagattgagtcgaggct

SEQ ID NO: 873432 - DNA, 99 bp, Homo sapiens
gaaaccagcctcaagtttcacctatcctcactgatccgtggacttctgtatgatcaggccatctcggaaacgcaggtcccttggcgatgttgggaatgt

SEQ ID NO: 873433 - DNA, 99 bp, Homo sapiens
gtatttacaggattaagaataaccttgtttgcatccacatccaccacacatttggtatgcaagtcagtctttttctggcagcggtttgtggtccagcag

SEQ ID NO: 873434 - DNA, 99 bp, Homo sapiens
gcagctttggaggagtaagcggcgtggtagcgaaggtcgccgaacccgcctggctagccggcgagttgagtggcgatagagacggggtttcaccgtgtt

SEQ ID NO: 873435 - DNA, 100 bp, Homo sapiens
tctctacaaaacaatttttgagggatttgctaaaatagatggcagagtctgtagctctgccatctattttagcaaatccctcaaaaattgttttgtagag

SEQ ID NO: 873436 - DNA, 99 bp, Homo sapiens
ggctctccatgctgaactgctccagcaggattggcttcaggatgtccatgttggaacgaagtactcgctctgctgcagccagtttctcccttggtaggc

SEQ ID NO: 873437 - DNA, 98 bp, Homo sapiens
agaatgtctgcctgtcattctggatgtgggaaccgaaaatgaggtcctcgatgggcttcctggaatattggtgtgtttatttgcatcagatgtgctgg

SEQ ID NO: 873438 - DNA, 99 bp, Homo sapiens
gccggcctattttcagaggccggaaaatgccctcaaacgcgccaacgaggttgacggatatattcagacgttacgacacggatcaggacggctggattc

SEQ ID NO: 873439 - DNA, 99 bp, Homo sapiens
tgacatggaggatgatttcatgtgcgatgatgaggaggactacgacctgtattcaataggtgccggggacattgcttagaaagacaaaactacattgaa

SEQ ID NO: 873440 - DNA, 98 bp, Homo sapiens
gacaatgactgcggagactacagtgatgagacacacgccaactgcaccaaccagggaatgtggacccccctgtctggtacgacaccgacgtgaagctg

SEQ ID NO: 873441 - DNA, 99 bp, Homo sapiens
cccaagaccaccaatccctcaaagtacatccgcttcatctataaccgagtggtcttggagcatgaggaggtccgggcagatggaatctcgctctgtcac

SEQ ID NO: 873442 - DNA, 99 bp, Homo sapiens
tgttagtgtctggagccatgaaggccttgtgctgaccaagctgctcacctcggagtggattagaacaagatgacatgagaattttatacaaatacctta

SEQ ID NO: 873443 - DNA, 99 bp, Homo sapiens
atgtcaagaaatccgacggaccaaattatcagcactttttattaatttgatcagtgatccttcacgttggggcacagacagaagcttgatgactctaaa

SEQ ID NO: 873444 - DNA, 99 bp, Homo sapiens
ttgaagatttctatgcaggaccccaaaatgcagaaacatgcccctgattcagtgcctctgcttagctgtaacatgttaatcagaactacctggcatctt

SEQ ID NO: 873445 - DNA, 99 bp, Homo sapiens
taatcaagtgatccacagagacatcaaaagtgacaatgtacttttgggaatggaaggatctgttaagctcatgagctggaagaatctctacttgtgctg

SEQ ID NO: 873446 - DNA, 99 bp, Homo sapiens
gcagttcctggccgaccacctgctgcttatgggggcagtgggcatcggggtggcctgcctgcagcagtgagttcctcctcctaactcaggcttccagga

SEQ ID NO: 873447 - DNA, 98 bp, Homo sapiens
gcgaacgcttcgctggccatttaggagctctgctcaaagccagacgaaaccaactttgatccagcagaatgggggagtaaggtagaagaccgcttcta

SEQ ID NO: 873448 - DNA, 99 bp, Homo sapiens
tcgctgggctgctcttcctgaggttttcctaagccatcccctggcggaaccgcccccaggttgccaagctgttctgcctttctggaatggtgcatggag

SEQ ID NO: 873449 - DNA, 99 bp, Homo sapiens
gatttctgcatttccatctgaggtcagttgctccgattaaaaatgtttcgagaagatcatgggtcgtggatgacaatgttcttcagcacaattctcttt

SEQ ID NO: 873450 - DNA, 99 bp, Homo sapiens
gaccatccctttgagtatcggaaaaaggaaggagaaaagatccggaagaaatatccggacagggtccccgaaccacgtgaatgttgagggggcgacaca

SEQ ID NO: 873451 - DNA, 99 bp, Homo sapiens
gacgggcctgcgagggttgaagattgtgaagcaatagcctaaggcaaagcagagagcagaggttcttcagtccacgcaacggttcttctctgaacagca

SEQ ID NO: 873452 - DNA, 121 bp, Homo sapiens
cggggcctgggcattcctgggggtgctaagcactcacggtggctcggggcctgggcattcctgggggtgctgttcatggtgtgggggctctggccgttcttcacgttggcctccccgttgg

SEQ ID NO: 873453 - DNA, 99 bp, Homo sapiens
tggcagatagtttactggatgttttaacaaaaggagggcattccaggaccctacaagagatggagatggtgtggatgaggtcaccattgtcaacatttt

SEQ ID NO: 873454 - DNA, 99 bp, Homo sapiens
acatgacagaggaccatgtgatgcacctgctccaggacgtgagcctgcacttcgtgctctggggctgcctgcacgtgtaccagcgcatgatcgacaagg

SEQ ID NO: 873455 - DNA, 99 bp, Homo sapiens
cagaatctggctcggaggaatctcagtagggacaacaggcaggagaattatgggagcgcatttccccaggctgcagaaccttggcctgaaaatgctaca

SEQ ID NO: 873456 - DNA, 99 bp, Homo sapiens
tcccctgctgtgggcgagaagctgaaaaaatttggtcgtattgggcgcctggtcaccagggctgcttttaactctggtaaagtggatattgttgccatc

SEQ ID NO: 873457 - DNA, 100 bp, Homo sapiens
gatgatgataatactcagaatcaggagaaggaaatgctgcccaacaacgcatttaatctaagcagcatttccttctcctgattctgagtattatcatcat

SEQ ID NO: 873458 - DNA, 98 bp, Homo sapiens
ggggagctgggccgcctcgtcaacaggaacttagctgtgtctttcctgaagactatcttcccgtctcaaaatggacatgatggatccacggatgtaca

SEQ ID NO: 873459 - DNA, 99 bp, Homo sapiens
cgagaaggttctagaagaagtggactggctaatcaccaagcttaagggacaagtgagccaagaaaccttatcaggtactgaacgacacctgggtctcct

SEQ ID NO: 873460 - DNA, 98 bp, Homo sapiens
tctctgctgcggcgcggggaccgctgtgctctcggtattagaaaactactcggatgctccaatgacaccaaaacagattctgcaggtcatagaggcag

SEQ ID NO: 873461 - DNA, 98 bp, Homo sapiens
cctcagctgtgattggctaccttctcccatcaccccagtgtccatgggctattcctcaaaatacaatatcttgttctttggctgatgtaatgagtgaa

SEQ ID NO: 873462 - DNA, 99 bp, Homo sapiens
ggcgacgtctaatctgttaaagaagcatcagatggtgaaggagaaggagacacagaagtgatgcagcaggagacagttccagttcctgtaccttcagag

SEQ ID NO: 873463 - DNA, 98 bp, Homo sapiens
tccgagagtcttaaaatcctgctctggccggattccagactcgtgggggaaaggctggtgaggcatctatactagctaccttctctgtaacagaaggg

SEQ ID NO: 873464 - DNA, 98 bp, Homo sapiens
tgtggttgccttgcacgatgatatggagagccagcccctgattggaacccagtccacaggtctcaagtattcccatgtgttttaaaagcctgaagtca

SEQ ID NO: 873465 - DNA, 99 bp, Homo sapiens
aattcagcacctacttccagctcaagtctcacatgacccagcataagaatgagcagacctgttaccctccaaatcttctgtgaccaagatttgcagaga

SEQ ID NO: 873466 - DNA, 99 bp, Homo sapiens
ctcctgagtagctgggattacaggtatcattaatgggattggaaattttaagtgcctttgtggacagattatcaacacgctttaaatcctatgtagcaa

SEQ ID NO: 873467 - DNA, 98 bp, Homo sapiens
tcagtttggtcagaatggagctcatgccactggtcaccctccccaaagtcgtcctcttgagttctggcgccttgactactgggaagatgacttgcggc

SEQ ID NO: 873468 - DNA, 99 bp, Homo sapiens
cttgacggctggttgggtcttggccttgactgagtgcaggagggcgccaccacctttctgcacatagttgtcctcgcagtagtcagcgacccgcagcag

SEQ ID NO: 873469 - DNA, 99 bp, Homo sapiens
agcaaacagattcagtggcctgcattgaaaaggcgacggcggattgacagaagtatgattggagagcccacaaactttgtgcatacagctcatgttgga

SEQ ID NO: 873470 - DNA, 99 bp, Homo sapiens
agctctgctcaaagccagacggaatttcttcacatggctcctggagaagtgaccatcacagttcgcctcatccgttcctttgaacatcgcaatttcaaa

SEQ ID NO: 873471 - DNA, 99 bp, Homo sapiens
gttcgtgcgtgcgtgcgggcggctgcgtcgggctgcaggagaagatggcggtctccacaggtcagtttgctgagaacgaaaccaatgaggtcaatttta

SEQ ID NO: 873472 - DNA, 99 bp, Homo sapiens
actccactgaggtcacacagccgattaccccggaagctttcgagaagctgggattccctgcagcaaaggaaatagccaatatgtgtcgtttctatgaaa

SEQ ID NO: 873473 - DNA, 99 bp, Homo sapiens
ctgcgagacgagatctccattgacctctacgagctggaggaggagtattactcgtccagcttctccaggcagccaccaactaccacaacgggcacacag

SEQ ID NO: 873474 - DNA, 99 bp, Homo sapiens
cattagctcaggttcgtcaggtccagagggaagatgacatggacgggaaccacagctgacccataatggacattaaggttgatgtaagacatgaccata

SEQ ID NO: 873475 - DNA, 98 bp, Homo sapiens
acactcagtatacagtgatagtgggatttgaacacctgaagctccccatcaagggaatgaacttcacaagaaccatggagtctggcagtaccgccgcc

SEQ ID NO: 873476 - DNA, 98 bp, Homo sapiens
tcctactcccccttgttctccagtacaaccttcaaaacaactggaatatttagcaaggattcaaggctttcaggacagaataacgggctcccagattc

SEQ ID NO: 873477 - DNA, 99 bp, Homo sapiens
cctattgctggctctgcagggctctgatcaagcggatccaagccatgattcccaagatctgtgacttcctccgcggagccacagtccatagaatcctcg

SEQ ID NO: 873478 - DNA, 98 bp, Homo sapiens
gagctgtcaccaccgacactctccaggctccggacacgatgcaggccatcaagtgtgtggtggtgggagatgggcctggactctgggttctgcaccat

SEQ ID NO: 873479 - DNA, 98 bp, Homo sapiens
aggacaagaccatcgagctcatggttcacaatggtccgtagtggaaaaaatggtgaccttcatcttaaacagattgcatattacaaacgaactggtga

SEQ ID NO: 873480 - DNA, 99 bp, Homo sapiens
gccaactggaccaagagaactttttacaatattggcaatcgaagctgcagccataaaagactcatctgaagatatgttggggaaagcatcacactctga

SEQ ID NO: 873481 - DNA, 99 bp, Homo sapiens
atcgagaccatcctggctaacaaggtggttaccctaacagctaatgataagacaagtgtttccttctcctccctcccgggacaaggtgtcatatacaat

SEQ ID NO: 873482 - DNA, 99 bp, Homo sapiens
gggaaggaactttgggtcctgaatcttctgggagctgaggaaccagatatcttgaaaagctgccagaaagtgctacaaggtgagctgcctggaaatccc

SEQ ID NO: 873483 - DNA, 99 bp, Homo sapiens
ggatcggaatggtggagaacttcaaccaggcactcaaggccatctacgtgattgacttcttctggaacgaaacctggtacctgaagaccattgacatct

SEQ ID NO: 873484 - DNA, 99 bp, Homo sapiens
ggagaatcttcaagaacttcctcgcactgtgacatgtctgatcccttgctcccatccctgcagcatgaacaaggtggaatacatgttggtatcttttga

SEQ ID NO: 873485 - DNA, 99 bp, Homo sapiens
agtcggagaagcagaaggatgccgtggtgcgactcatccacctccggctgaagctccaggagctgaagtgaatgagttcacggtgatcaggaagaagtt

SEQ ID NO: 873486 - DNA, 99 bp, Homo sapiens
gcagatcatcctggcgatctacttcctctggcaggtgctgacctggaggggaagcggcagatgaaggtcagtaatcggcacctggatttcctgccgccg

SEQ ID NO: 873487 - DNA, 98 bp, Homo sapiens
cattactgcagagaaacacggaaactaggaagaggaaattaactatctgtacttataagctgtggatttctttaaccagatcaacatgttatatggaa

SEQ ID NO: 873488 - DNA, 98 bp, Homo sapiens
gtcaccccagacaacatgtgcatggggaggaccagtcgtgattttaccaaatgttgcaagaactctggagttcttatggtagtaaaatgccggaaaga

SEQ ID NO: 873489 - DNA, 99 bp, Homo sapiens
tcgcagcgagctggagccgccggaggagatctattgggaaactgattataaccactcgggcaccatcgatgcccacgagatgaggacagccctcaggaa

SEQ ID NO: 873490 - DNA, 99 bp, Homo sapiens
aagcaagcaagatacgagagcttttagcagagaaggaagttgccttaaagaatagacaagagctgtatgcactacctcctcctccccagttctactcaa

SEQ ID NO: 873491 - DNA, 99 bp, Homo sapiens
agttctccagcagctgattgtaatgaatttgcccaatgttttgatgattggcagagacccactgtctggtaccacatggaatgcttggacccccctctc

SEQ ID NO: 873492 - DNA, 99 bp, Homo sapiens
tttattccacttgctcgcccggaggtgaaatggacgccaatggagatcttcgtggatgatgagacgaagttgacgctgcatgggttgcagcagtactac

SEQ ID NO: 873493 - DNA, 99 bp, Homo sapiens
ctctcggacgcggagcccgacgcgggcgaggccacgcatcctggtggggaagaagttttaagggaacaagctggaggtgacgctactgagaactttgag

SEQ ID NO: 873494 - DNA, 98 bp, Homo sapiens
gcccggcagcctcagagaagcctgacctggccggctatgaggcccagggtctcctctgagcctccggcctccataagacccaaaacagatgacacctc

SEQ ID NO: 873495 - DNA, 99 bp, Homo sapiens
cagccaggacttggctacttctgtctggaagctgaaaaggcaacactctaccaccgagcaacccggctaaatggaactgcgaagggggaacggcggcga

SEQ ID NO: 873496 - DNA, 98 bp, Homo sapiens
acgaactggacgccctcttctctcagtatgtggtcaacttcggggccgggggatgctgaaaacgccattcaacagatgggtggccagtggcttggtgg

SEQ ID NO: 873497 - DNA, 99 bp, Homo sapiens
ccgccgccatggaggcgctgggacccgatgccatggacaatattaccaggcagaaccaattctacgatacccaagtcatcaaacaagaaaacgagtcag

SEQ ID NO: 873498 - DNA, 99 bp, Homo sapiens
cagaggagagttctccaaacatgatcgtttactgcaaaaggaagtgctcttcagaaaaggttgcgtgatagagaaaaggaaatggaagcagatgaacga

SEQ ID NO: 873499 - DNA, 99 bp, Homo sapiens
gcagcatcacctccatctgtgagaagccacaggaagtctgtgtggctgtatggtaacagttaacctcttccacatgcagcatctgcaggctgcttccct

SEQ ID NO: 873500 - DNA, 99 bp, Homo sapiens
cccagaaactgaatcctaaaggaggaactctccatgcagatgctcagctttattgttgtgtccactgtatcctggcttgcttgttctgcgaattcctga

SEQ ID NO: 873501 - DNA, 75 bp, Homo sapiens
agcatttggactttatccagtcacacctgcggaggttctgccttcagtatattgaccagtggaataaggtaattg

SEQ ID NO: 873502 - DNA, 99 bp, Homo sapiens
ggaagaagcagctgaagacggaggcagctccacactgtgaactaagaggcaggtggaagtcatcataaagtttctgtttcacccgtcgtccatgttcga

SEQ ID NO: 873503 - DNA, 99 bp, Homo sapiens
agcctctcgggctcatacaaggttgatgacattgacgacaggcgggagtttcaggaaactctgcttgaaggatgccaatgatgtaccaatccaatgtga

SEQ ID NO: 873504 - DNA, 99 bp, Homo sapiens
gcaggggctcaccgagaatggcattccagcagtagtgtggaatatagtggaatatttgacgcagcatggatatcctcagaccatctcaaaaaggaggaa

SEQ ID NO: 873505 - DNA, 99 bp, Homo sapiens
ttttggatggtgaaccctgaagtcggtgtctgctgcgttcacggcaggattcggttagagtttatgtggccgaggcagacaagtggaattaggccttgc

SEQ ID NO: 873506 - DNA, 99 bp, Homo sapiens
ttgctgtgtttccgacctcatctccaggacagtgggaagagtggctggaggaattcagtttcttggggtgtgcaggagaagagaattgggtggacagca

SEQ ID NO: 873507 - DNA, 99 bp, Homo sapiens
tgctggaggcgcaggccctcaagctggtggaggggccggacgtccgggttgagataagtcgaagagtgactctggaaaaactccctcctgtcctcgtgc

SEQ ID NO: 873508 - DNA, 99 bp, Homo sapiens
ttccccattcctctcccctattgctggctctgcagggctctgatcaagcggatccaagccatgattcccaaggtggagcttctggtgatgaaggccctt

SEQ ID NO: 873509 - DNA, 99 bp, Homo sapiens
cttccgccacaggtcatcacaggactggaccaaagcagtatccttacaataatctgtacctggaacgaggcggtgatccctccaaagaaccagagcggg

SEQ ID NO: 873510 - DNA, 99 bp, Homo sapiens
agcgccacctcatgcacctggaattggacatctcggactccaaaatcaggactgcattggctgaagcagaacttgaatataatcctgagcatgtcagtc

SEQ ID NO: 873511 - DNA, 99 bp, Homo sapiens
cagaggtgggagttagcgaggcgaccacgaaaacggtgaaggtcggaaccgacagcctcctccgagaaggtgagaagcgccaccttcaagtgaacgtca

SEQ ID NO: 873512 - DNA, 99 bp, Homo sapiens
gccggctcctctgcgggctcatcgtggacacaggtcacagtaatgaaaggcagtaatagaaataaggatcattcagcagaaggagaaggggttggaaaa

SEQ ID NO: 873513 - DNA, 99 bp, Homo sapiens
ttacagaactcagctttggaacatttcaggcctggcacggaatgcagtttttacataagtttgatggaatggggagaagatattaaagcagtttcaaaa

SEQ ID NO: 873514 - DNA, 99 bp, Homo sapiens
gaactcaaagatgcccttaaaagatatctgtgtgaggctggattttctttgcctactccaaccaaagcgacacatcacagcagactggatgcagaagcg

SEQ ID NO: 873515 - DNA, 99 bp, Homo sapiens
cctgactccggcgggagagtaaagttaccccaacaagccgaagcttactaaggcagccagatatttcctgcattcttggaacaggagggaagtcgcccc

SEQ ID NO: 873516 - DNA, 99 bp, Homo sapiens
cctccaactgatgcttattacaagctgcgccacattgtggatgaggtcaatggattaataaggttcgtgagccacacatctccccacaccaagctcctc

SEQ ID NO: 873517 - DNA, 99 bp, Homo sapiens
aaatatttccaacatgcgtggttggaggacgagtaagtcgtgaattaaattatactcgccagaagattggagaagaggctatgtttaatcctcaactca

SEQ ID NO: 873518 - DNA, 99 bp, Homo sapiens
ctgttcgtgattatatttcttggagttgtgttggtaatgaagaaaaggtgtgggccatgtttgaggattgccccagcattcagttctatgagtaataaa

SEQ ID NO: 873519 - DNA, 137 bp, Homo sapiens
cctgcttctgttggctcagatacactctctgatttggggatctctagcctacaggatggcttggccttgcacataaggatggacgtggtagaggtcgcgggtagttggtgggcacaagagcgagaggacatcattat

SEQ ID NO: 873520 - DNA, 99 bp, Homo sapiens
gcttcctccccagaggcgcccccagccgagcaggaccccgttcagggactcggagatcatgcagcagaagcagaaaaaggcaaacgagaagaaggagga

SEQ ID NO: 873521 - DNA, 99 bp, Homo sapiens
ctcaggcccacatacagcaacttagcgaagctgccggtgaagatgagccaaggagcaataactgaacgtttaagaagcttcagtatgcatgatttaaca

SEQ ID NO: 873522 - DNA, 98 bp, Homo sapiens
tgctgaggggtccagaaacccgagacaagctgcccagcacaggattgggggtgagaaggtcatcctgctgtcagcctctgcctggggctccatcacgg

SEQ ID NO: 873523 - DNA, 99 bp, Homo sapiens
agctgtggcagtggttgtggatcccattcagagtgtaaaaggaaagggaagaacagtgattattgagcagagttggggaagtcccaaagtaacaaaaga

SEQ ID NO: 873524 - DNA, 99 bp, Homo sapiens
gcagcagcagacagcagtacagacagctcaggctgcccagatggtggctcccggagtccagctctctgatgtaaaggatggagtaaatcaagcagcacc

SEQ ID NO: 873525 - DNA, 99 bp, Homo sapiens
cacgaaaatctgcattttggtggcggctccacctaatcagaacagagtccctggtatagccaccgtcatattctgtagtttcttctagtgcttggaaat

SEQ ID NO: 873526 - DNA, 99 bp, Homo sapiens
ggctggaggctgcagagcccacagccctgctcaccagggcagagcccccttcagaacccacagcctgaagcaggacattctaaatgaaaagactgaatt

SEQ ID NO: 873527 - DNA, 99 bp, Homo sapiens
gaaatcctaatgacagtctccaaattcgcctccatctgtaccatgattatgatgcatcattatcacagaagaaattcgtgtctatagcttttaaggact

SEQ ID NO: 873528 - DNA, 99 bp, Homo sapiens
gaatctctccctggggctgcatgtagaagtcgagccgtctgtatttttcacccgagtcagcaccctcccagcaaccagttcaactttgtggggaaactt

SEQ ID NO: 873529 - DNA, 99 bp, Homo sapiens
gtcaaactcaccaaaaacaacatctttccagaaagaggggagctctttgctcaggccccggtggatcagtttcctggcacagctgtggagagtgtgacg

SEQ ID NO: 873530 - DNA, 99 bp, Homo sapiens
cacaaactggcggataatgggtgacaaacagggttaaggatttcaccttgattatttctaccaactgatccacaccactatcccctggaaatattggtt

SEQ ID NO: 873531 - DNA, 103 bp, Homo sapiens
ataaattcctttcactatcatcatccaacttgatggaatctttctgcagttccgtcatcaaatcatttgtagccataaaccatttggatagaatgcttgcaat

SEQ ID NO: 873532 - DNA, 98 bp, Homo sapiens
ttctcgacctgctaacagaactggaccttttcgatgagaagcccttttctgtggaagatacttatttactgtgtccagcgcctatcttaaaagaagtt

SEQ ID NO: 873533 - DNA, 99 bp, Homo sapiens
ctgcatgttctggttggagtctgcgatcgtggccaggtataccaggttccggtgcaggatctgctggtacctgaacaatggcgggatcctgcgggagtg

SEQ ID NO: 873534 - DNA, 99 bp, Homo sapiens
gagtggtttgtgtatcctgggaacccactgaggcacccggacctcgtcaggccgctgcagatgaccattccagatattctctaagccgctttcatcatg

SEQ ID NO: 873535 - DNA, 98 bp, Homo sapiens
ccgcgggagcacggcgacgccagcggcgggaaagattctgaagcttggcggagaggggtgtgtgagtggacaccagtgaagtaacggtttttgtgtta

SEQ ID NO: 873536 - DNA, 99 bp, Homo sapiens
gccccccactccgcctccgggagaggatctaagcctttcccacgttatggttataaaccctccccaccgaatggatgtggctctccactgtttggtgtt

SEQ ID NO: 873537 - DNA, 99 bp, Homo sapiens
ggggaagtttacacatgtggtttgaacaccaaggggcaactgggccatgagagggaaggaaacaagccaggttacaggaggttccagtggcatcgggaa

SEQ ID NO: 873538 - DNA, 98 bp, Homo sapiens
attaagaggcatacaccacttagtaaactaatgaaagcctattgtgaacgacagggggaattggcattatctcctgctgtggaagcccagcagtttgc

SEQ ID NO: 873539 - DNA, 100 bp, Homo sapiens
cccgtcctcggcttctccacctgcataggtgttggccttgttcagaaggtcggtacatgtgcatgcatatcagcaaaagcccggattcctaagcagttga

SEQ ID NO: 873540 - DNA, 99 bp, Homo sapiens
gtgggaaggtgcattgaaatgccttttgcgattcttgcttcggtcggaagtcacaaagggattaaacttcattttggctccatgatgctgcttacatgt

SEQ ID NO: 873541 - DNA, 99 bp, Homo sapiens
cacatccataaatgtcaatggtccctcaggttgtcctcagggagaaaaatgacccaggagctgatattcactagacactctagcagaaaaagtcatgat

SEQ ID NO: 873542 - DNA, 104 bp, Homo sapiens
cctgctcatcagacaggtccgtcaaaatctttgatgtgcgcaatggagggcagatcctgccctccattgcgcacatcaaagattttgacggacctgtctgatga

SEQ ID NO: 873543 - DNA, 99 bp, Homo sapiens
gccgcccccgggctcgcggcctgcagtgaatggtagtgtctagaaagggtatgtcccttcaagagagaggtgccaatgtccaaccggcctaataacaat

SEQ ID NO: 873544 - DNA, 99 bp, Homo sapiens
ccttcattcatgaaaagcatgcccatacgattaaacctgcgtccttgaatgggcaagagggcacatgaagtacggcgtcctccacattcacggcctcta

SEQ ID NO: 873545 - DNA, 99 bp, Homo sapiens
cacctttctggaagctgcagggctctccatccaggatccagaagcattgaaggggccactgcagaacaaattagacttgcacagatgatttcggaccat

SEQ ID NO: 873546 - DNA, 99 bp, Homo sapiens
tttcgtgaactgcgagtggaacaggaatctctgttgacagaaatgggacgtcggtcatcagatactgaagaagaaagcagaagcaagagaaaaaagaaa

SEQ ID NO: 873547 - DNA, 99 bp, Homo sapiens
accagaaggtgtatgagatccaggacatctatgagaacaggacctccggctagcctgtttcagccacctcgtcgtcctggccttggaactgttggaaaa

SEQ ID NO: 873548 - DNA, 98 bp, Homo sapiens
tcagcctccagagtagctgggactacaggtatattttggaacttcacatccaagatactatatctctgccaatgtaactggtttcaaatgtgtgacag

SEQ ID NO: 873549 - DNA, 99 bp, Homo sapiens
ggtggacgcacggggttggtgtcagggctgaggtggcctcatggcacagaaggaggtgagtggttcccaggcatctgccatggtctttcccaatccagt

SEQ ID NO: 873550 - DNA, 99 bp, Homo sapiens
gcgacggactctccattccagaaccatggcccaatttgtccgtaaccttgtggagaagaccccggcgctggtgaacggagaccaggcacctggatgaga

SEQ ID NO: 873551 - DNA, 99 bp, Homo sapiens
gtgttcctaatcctcggacttccaatgaagttcagtatgaccaaaggctcttcaaccaatccaagcattgtgatgaccacctgctccaccttctgtgcc

SEQ ID NO: 873552 - DNA, 99 bp, Homo sapiens
tctaatccaagcaataacccaagcaaaacttcagatgcaggctctgtgcagtctttcaccccctctccagtggagtaccactcgccaggactcatctcc

SEQ ID NO: 873553 - DNA, 99 bp, Homo sapiens
caaggtgtctgccagcacagtccccactgacgggagcagcagaaatgagctggccctgaaggaccctgttcatacagtgtcactgcagcagttcatcta

SEQ ID NO: 873554 - DNA, 99 bp, Homo sapiens
caaaatttcaggtcttaaatctggtgggtttggaggatttgggacaacatctacaactgcaggttctgcattcagcttttctgccccaactaacacagg

SEQ ID NO: 873555 - DNA, 99 bp, Homo sapiens
gaacttttaatgccatggatccagacagccagataaggagttccatctggaatatgacaaattagaagaacggcctcacctgccatccaccttcaacta

SEQ ID NO: 873556 - DNA, 99 bp, Homo sapiens
ccgcgccgcgttcgagttctcggaggggagggggcgttagccccgcgcagccgccggcgtcgccgccatggacctagatgagcagcaccagcagtaaga

SEQ ID NO: 873557 - DNA, 98 bp, Homo sapiens
aaaagtgtccgcaactacacacaagaagcatccttaggagctctgcagaacctcacggccggaagtggaccaatgactgagatggagatatctcgagc

SEQ ID NO: 873558 - DNA, 99 bp, Homo sapiens
ggaagcagccgatccagcctgcggagcctgtggggcagatactttggtgttgaacatttgggatagaagagagaaatttaaaattaaaaattttccata

SEQ ID NO: 873559 - DNA, 99 bp, Homo sapiens
ttctaaatgaagcagcaacttcgaaaggcgatgttggaaaaagacggagtgctatacttggtagatcagaaactcaggagtgtcttttctttaatgcta

SEQ ID NO: 873560 - DNA, 99 bp, Homo sapiens
gaatataaagataagattcctttactacagcagccaaaacgagaagaagaagaagtgttagaccaggctggccctgaaggaccctgttcatacagtgtc

SEQ ID NO: 873561 - DNA, 101 bp, Homo sapiens
ctatccatccttggtctcaaatgtgcaggcagtggtggaaagacatggcagagtggagtaactaaatccacagttttcccataggctgaagagctgcctct

SEQ ID NO: 873562 - DNA, 98 bp, Homo sapiens
ttgcctgcacaccttctgtgagaggaacatctggattatgagattatccagtctctaaatcctgaatttaacaaagcagtgatcagagtgaatgtatt

SEQ ID NO: 873563 - DNA, 99 bp, Homo sapiens
ctcagatggctgataatggagaaagatcacagcagtgttccaagttctaaagagcatacagtttgaacatttattcgcctcctgagcttgtacaacagt

SEQ ID NO: 873564 - DNA, 99 bp, Homo sapiens
cttcagaaacagtgctgaagcctttaaatgcagcatctgcgatgtgaggaaaggcacctccaccaggtggtgaagaaggtgaagtccatgcagatgttc

SEQ ID NO: 873565 - DNA, 98 bp, Homo sapiens
gccagtatgcttcgcttcatccagaagttttctcaagcatcttcaaaggcttacggagttcctatgctagtcagcatagtcagcttgggcaagacctt

SEQ ID NO: 873566 - DNA, 99 bp, Homo sapiens
aaggaggggccgtgaggtgagagagtccgggagcccgagcttgagatgccttcaattaagttgcagagttctgatggagagatatttgaagttgatgtg

SEQ ID NO: 873567 - DNA, 99 bp, Homo sapiens
ggaggctgagtacgacagcctcaaacaggagctggagcagctcaaagagaggaaatatcattctgcaaaagaagcttatgaacaacttttgcagacaga

SEQ ID NO: 873568 - DNA, 99 bp, Homo sapiens
tcacagagcagctcatgaaactggatgaacaaggggagcctgcagacagggggatttgcctgggaaggagaagtagaaaacaacgtgtacagccaggct

SEQ ID NO: 873569 - DNA, 98 bp, Homo sapiens
gaagctgggattggagattccacccaaacttgctggtcactgggagaaactgaggcttcttgaagagcttgaagacacttggctcccttatctgaccc

SEQ ID NO: 873570 - DNA, 99 bp, Homo sapiens
agcacgttttagattttccatgattgttcaaaatttccttttcgatgtgagagaaggatagccgccatgtttcttcatgttggccaggatggtctcgat

SEQ ID NO: 873571 - DNA, 99 bp, Homo sapiens
catctctgcaaactcaacttgctgggccggtgcaactattcgcagtccgagcgacccaacatgagtgaagtttcctgcaagaaacgggacgactatttg

SEQ ID NO: 873572 - DNA, 99 bp, Homo sapiens
ctagagaatgatcttctgcaaagccatgaactcatgcaggtcaccatcagaaaagctaagtttgctgtatagtgaggatcaggagatctgatcctgatt

SEQ ID NO: 873573 - DNA, 99 bp, Homo sapiens
cttccagataatcttctcaggacaccatccgttcaattggtacaaagctggccatactggagatgttactattcaaacacagatgcagtcatttatgta

SEQ ID NO: 873574 - DNA, 98 bp, Homo sapiens
agaattgatgaattgcaagtttgtgccccatagctgcacaggagagggctgaacccccctcatcgtgtcaagtcaatctccatgacaactttcactga

SEQ ID NO: 873575 - DNA, 98 bp, Homo sapiens
ttcactcccgctgtctcagcagtctacagcacgccagagactgctgctactttgaaacgtacgatagaggccctgatggacagaggagcaatagtgag

SEQ ID NO: 873576 - DNA, 99 bp, Homo sapiens
gcatctgatgctctctctccagtccttgctgaagagactttccgttacatgagatggtgccatgacaatggtgtgaactacaagattggagagaagtgg

SEQ ID NO: 873577 - DNA, 99 bp, Homo sapiens
tttgcctctggttcagctcatacaacagcttcttaggaacatctggattatgagattatccagtctctaaatcctgaatttaacaaagcagtgatcaga

SEQ ID NO: 873578 - DNA, 99 bp, Homo sapiens
gctctagtgaagaagatgaggaagatgactcggaatcagaagctgaaacagcacccaaactgcacctggtcacctgtctacattcagatttagatgaaa

SEQ ID NO: 873579 - DNA, 99 bp, Homo sapiens
aaatctcgatggagtgggtcccatcagtttgaacagttgtctggatccattttgtggatgggccaagaccagcttcaagtctccatggtaccagaaaac

SEQ ID NO: 873580 - DNA, 99 bp, Homo sapiens
ggaagaaaatacaaatcacacgcataatggatgaaaggaaccgacagacattgatggtttaattactcaggctttgctgacgggcaattttgagagtgc

SEQ ID NO: 873581 - DNA, 98 bp, Homo sapiens
tcaggaatgtgtttcactgtgaggcacacagaattctctacatttgtgaaagtcagtttctgaggaatttcatcaggccgccatggcatcagatgaag

SEQ ID NO: 873582 - DNA, 99 bp, Homo sapiens
ggtactgctgcccacagcagcggctgcaagctcagctctttcttttgcattctgttgtaagtactgcagagtcttgccaatgaaatggatgtgctccca

SEQ ID NO: 873583 - DNA, 99 bp, Homo sapiens
aaacaactgacaaacacctttctcctgatggccagtatgtccccaggattatgtttgttggtatgaatttcagccctttatttccttctaattttggag

SEQ ID NO: 873584 - DNA, 99 bp, Homo sapiens
agcgtgctgctgacagtgaatgccacggaccccgactccctgcagcatcaaaccatcagtccaaaccaggttgcagagaaggtggcctccagaatcgcc

SEQ ID NO: 873585 - DNA, 99 bp, Homo sapiens
ccggcctcggcggctgaggaaagcaggaggaggtggcggcggcgggaagatggcatggatgatttgcaagtcagatcagctgctacagatatattttct

SEQ ID NO: 873586 - DNA, 99 bp, Homo sapiens
ctctatcatagctgtgatagctttgcttgctgtggggttgacccagaacaaagcattgccagaaaacgttaagaactttaccttttgaccagttggtcc

SEQ ID NO: 873587 - DNA, 99 bp, Homo sapiens
atatgcagcaaagattacaccaagatctgtgctgaccacaggaattggatctactagtgcaggtcacccttgcaattatggatatttaaaagggtcaga

SEQ ID NO: 873588 - DNA, 99 bp, Homo sapiens
ccctcaccagacagatcgctgtcaaaaccctagtcgcagatatggccagtacactatgaaccaggaaagcaccaccatcaaagttatggagaagcctcc

SEQ ID NO: 873589 - DNA, 99 bp, Homo sapiens
gagaacctcaccatgccgggcctcaggttcgacaacatccagtttggtgccctggttgtcagatgttggaaagcagtaggacggaacatactcttcgtg

SEQ ID NO: 873590 - DNA, 99 bp, Homo sapiens
ttatgtggctcaaatgattgtgactctgggacatctggagaaagctgtagtcttggaattaactttgaaacacttaaaagctttaaccgccttaaccga

SEQ ID NO: 873591 - DNA, 99 bp, Homo sapiens
atttgctagtaacgtcatggaggatgaacgacagatttggagcaagaggtggtggtggccttcccccgaagaaatttggtaatcctggggagcgtttgc

SEQ ID NO: 873592 - DNA, 99 bp, Homo sapiens
ttcacggagctcaaccatgaccaagtgcagaagcagtctctggtcccagcccaccccatggcccctcccagtcccagcaccaccagcagtaataacaac

SEQ ID NO: 873593 - DNA, 98 bp, Homo sapiens
gaaatcgaaacagatacagagatgtaagcccatgtcttaaagaaagtgcagaagagatggtcaaaaacaaattggaaggaaaggataaactgacccct

SEQ ID NO: 873594 - DNA, 99 bp, Homo sapiens
tgccaaacccccaacttctctgctggtggcaatcactgggcagcttggtgtgaagccccaaacaggcaacagcattccactcacagccactaacttccg

SEQ ID NO: 873595 - DNA, 98 bp, Homo sapiens
ggatgttgggagtattcagtatcagatactctggtgattcctccaagactgttttaatgaggttccctataaaagagaagaggaagccttagaggaga

SEQ ID NO: 873596 - DNA, 99 bp, Homo sapiens
gcgacgctggtggtcatctgcacagcagtcatcgtggtggtcgcgttgactagaaagggtcagtatagaccttctgatttgctgtgccctgagacatat

SEQ ID NO: 873597 - DNA, 99 bp, Homo sapiens
ggctcacatatcagagggcattatgaacgaattctcaacccctacaacttattcctgtccggagacagcctaaggggggaagcgagtagcattatctga

SEQ ID NO: 873598 - DNA, 99 bp, Homo sapiens
agaactctgtcaaatgaagaacactttcaagaaccaggacatggatttgattgacatactttggaggcaagatatagatcttggagtaagtcgagaagt

SEQ ID NO: 873599 - DNA, 100 bp, Homo sapiens
agatccccctaactccaccgaacgatacacacgttggatcaaccagctgacgcagctggttgatccaacgtgtgtatcgttcggtggagttagggggatc

SEQ ID NO: 873600 - DNA, 98 bp, Homo sapiens
aagaattcaaggttttgagtcggttcaggtcacccaatttcgcacattgagtcacgtactcttgcaattgcccgcaacctgactcagcagctccagac

SEQ ID NO: 873601 - DNA, 99 bp, Homo sapiens
agaacaagtcccaggacttcagactaggctcagaatctatgacacaaaaatgtgccagaggaacttcaagaaccattttacacagatcagtatgaccag

SEQ ID NO: 873602 - DNA, 98 bp, Homo sapiens
tttgtgcaaggtgagagctgggtgctttgttcttaatttggagacaaattgccaggaacttagtgatttggcccgtgaccctccagcacaatgttctg

SEQ ID NO: 873603 - DNA, 99 bp, Homo sapiens
gagaccatgaagtccaacccaggtggcccacaaactctttaacaacttgaaataaatgtgtggacttaattcaccccagtcttcatcatctgggcatca

SEQ ID NO: 873604 - DNA, 100 bp, Homo sapiens
ctgatcatgcagacatctccaactgtgggaaaagaactctccggaaatgccagacacaagctggaaagagttcccacagttggagatgtctgcatgatca

SEQ ID NO: 873605 - DNA, 99 bp, Homo sapiens
ggtaagggttttcacgaagatctgcattttgacctggatctgtcctttgcccatgatcttgtccacgatctcattgttgtccttgttgaccttggtctt

SEQ ID NO: 873606 - DNA, 99 bp, Homo sapiens
cttcctgctgctcttcctgctcgtgctcactgtcaccgagccgctgcggccagatgagctgcttcagaaagagcaaaactattcagatgacgtcttggc

SEQ ID NO: 873607 - DNA, 98 bp, Homo sapiens
gggaaaccacgcaggcaaacgagaattaaatgccgagaaggccagtacggtccaatgatgcatcagcagcctccttctcagcaatacaatatgccaca

SEQ ID NO: 873608 - DNA, 99 bp, Homo sapiens
cctgctccttagaactcttcgacaggcaagtcttcaacaggtgggaaatggcggcatccaccgtttcttcccagccctgtaatcccagctactctggag

SEQ ID NO: 873609 - DNA, 98 bp, Homo sapiens
tgcaccagaagaatggcttcacatgtatgctcatcggggagatctttgagctcatcatctgtgttttgtgtgagcctggaccccaagaccaatacctt

SEQ ID NO: 873610 - DNA, 99 bp, Homo sapiens
ggaaatccaggaagacagtaggagtacccaaaggcaagtggaacagctctaatggggttgaagaaaaggagacttgggtggaagaggatgaactgtttc

SEQ ID NO: 873611 - DNA, 99 bp, Homo sapiens
ctgcaggaaaatggtgctggaaaatagttgccagtgttttgcaacttctttccacagctgttcttcgagtttgttcaaacattgcttccaagtcaaatg

SEQ ID NO: 873612 - DNA, 99 bp, Homo sapiens
caagatgaccgcaatccccttgaatgtatcctgtcaggtataatgtcagtgaatggcaagaaagttcttcatatggatcgaaacccttactacggagga

SEQ ID NO: 873613 - DNA, 99 bp, Homo sapiens
caactattcaacatggaggcggaggtcgataagctggaactgatgctcttttgtgacagggacggcttgttgcgggcacttctcacccctgagaatctg

SEQ ID NO: 873614 - DNA, 99 bp, Homo sapiens
agctttcacaattgcagcagatgaagatccattggtaaattgatcaggatttttggcctaccctccaaagaaaagatttgatggtagagtggtggcaaa

SEQ ID NO: 873615 - DNA, 98 bp, Homo sapiens
aagtgggtgccactacagccatgttcctgcaagggctggtgtggaaacaagcagtgtgggtgcaggaagcaaaagtcagactgtggtgtggactgttg

SEQ ID NO: 873616 - DNA, 98 bp, Homo sapiens
cagaagaaactgcaccggaaatgtgcctaccagttgctctaggtcgtaaccagcctttgaaaaaggagaaaccaaaatggaaaagcgattatcctatg

SEQ ID NO: 873617 - DNA, 99 bp, Homo sapiens
gattgaaagcgactattttggtctgagatttatggattcagcacaagtagcaaaacatgatcaggggcaagtcttgttggatgtcgtcttcaagcatct

SEQ ID NO: 873618 - DNA, 98 bp, Homo sapiens
tggaatcgtatcctcctgtgttttttcagactccttggaaattaaggaatgcaattctgccaccatgatggaaggtggggtggaagacaacccgtgag

SEQ ID NO: 873619 - DNA, 99 bp, Homo sapiens
aggcagcaaaaacaagagtccctctaaagcagctcaaaagatattaataaggcagcggaaagaagaaatatgaatacggctccatcaagacccagcccc

SEQ ID NO: 873620 - DNA, 98 bp, Homo sapiens
ggagatcaaggacttcaaggatttctacctttccatagcaggtcccagtagggatggcacaatcagcgaggacaccatccgagcctctctcatctctg

SEQ ID NO: 873621 - DNA, 98 bp, Homo sapiens
tgcatgctgctgcccgccagggcccagatgggtgtgggccgaagatatgctcatgtggtgttgaggaaagcagacattgacctcaccaagagggcggg

SEQ ID NO: 873622 - DNA, 99 bp, Homo sapiens
agcaaagctgtcctaggccaaccagagattcatctttcatgcagtgacatgttgataaaaaatgatggaagccagcagacctgcagaacttggctcccg

SEQ ID NO: 873623 - DNA, 98 bp, Homo sapiens
tatgttcctgcccacaaggagttagcgacctactgggcagcctcgtcttacagcgtgactgcaaagaaaaagacttttgttttgcaaaagaaaagcag

SEQ ID NO: 873624 - DNA, 98 bp, Homo sapiens
aatcctctgcttccaggacaagtcctgcgcttggggatcctctgtacgcccgttcactgctttcggaaaatgtgattgatcgaatgaaggaatcctct

SEQ ID NO: 873625 - DNA, 99 bp, Homo sapiens
gttcactctggactgtatcatatagcaacagcttttcgctcgcaaaagacaccgctaaagccgtggccctgaggggccgggaattccttagcgaggccc

SEQ ID NO: 873626 - DNA, 99 bp, Homo sapiens
ggaaatggaacatacgggcaagtttataagggttatatcctgtgttgtgacctcatggtttaagtgggaataaagatgagtataagcagtgatgaggtc

SEQ ID NO: 873627 - DNA, 98 bp, Homo sapiens
ggtgaagtgccatcttcggctaggtcgtcacaggctccggctcatggcatcaagtggcatccatcataagggtcatcatcaaatccacagcaaatttc

SEQ ID NO: 873628 - DNA, 99 bp, Homo sapiens
tgtgggtccctgctctggggactcttgcggcagggtttgcagtgtaaagatcctgaggaggatgaaggggctggccctggaggccgagagtgagctgga

SEQ ID NO: 873629 - DNA, 99 bp, Homo sapiens
cagggccgggctggtgatggggagagggcacgagcggaggctgctgagaagctgcagcgagcccagggtatttctcaagctgccagatacgtttaccaa

SEQ ID NO: 873630 - DNA, 99 bp, Homo sapiens
ttgacagtttggatggcgccgtttgtcagtgtgattcgggttttaggggagaaaggcttcacaggctgctcaagaagccgagatcaatgccagaaaagc

SEQ ID NO: 873631 - DNA, 99 bp, Homo sapiens
aacaagttctgaaaatggaagttgctgttttgaaaaagctgcaagaactgagctgctccaagaacgagaaggagctcgaggagctgcttctggaagcca

SEQ ID NO: 873632 - DNA, 99 bp, Homo sapiens
tattttccacctctataatgaagaaaagcaggagtgtgatgacggtgatggctgatgattttctatgcagattttggaccgctgaacttggcaatggtg

SEQ ID NO: 873633 - DNA, 100 bp, Homo sapiens
gatcatcaagcgcaagcacacctccgagaaccgcagcgggggctgggacctccacggcactgatcttgtaattcggtagggtgtgcttgcgcttgatgat

SEQ ID NO: 873634 - DNA, 99 bp, Homo sapiens
ttggtgaagaaagaacctatgaaatctgtacaaaagattggggatgggtcatcagttaaggaagttgaaacctaccaccggacacgtgctttaagatct

SEQ ID NO: 873635 - DNA, 99 bp, Homo sapiens
ggtgacaagagcaaaactccatctcttttgagagccgggtgaagaggtccccaccacgcaggaagtccagaatgagatagagcttgccctcggtctgga

SEQ ID NO: 873636 - DNA, 99 bp, Homo sapiens
gtctctctcttcagcattgatgtcagtgaaggagatggctaagggcattacgtatgatgaccccatcaaaaccaggataagttctgaacgtcgaaaaga

SEQ ID NO: 873637 - DNA, 99 bp, Homo sapiens
atttcagcttggacattttacccttcagtcggcccaagaaatcaaaataaaggaaacacatttcatatactgcagttaagtgggcagaccaacatccac

SEQ ID NO: 873638 - DNA, 99 bp, Homo sapiens
tgaatctggtttacaccggctcctgccctgccttcactcttctcccctgattcaagactcctctgctttggactgaagaagcagatttgggatatcctg

SEQ ID NO: 873639 - DNA, 98 bp, Homo sapiens
ggaagatgacgattcagagactgaaaaacctgaggctgatgacccaaaggtggatagatacttctcaagacatcacacagcgtgagtcaatcaaggag

SEQ ID NO: 873640 - DNA, 99 bp, Homo sapiens
gctgctccactggcccctcatgtaacctcagagatctgggcaggaatagccaggccagaagaaggaaggcctgtggtgagtgggacaggaaatgacatc

SEQ ID NO: 873641 - DNA, 99 bp, Homo sapiens
gcatcctccttgaagtatttggctgaggagttttcaatcccagctgcatatctggttggtgtctctgaccccaatagccaagctggacagcaagggcta

SEQ ID NO: 873642 - DNA, 100 bp, Homo sapiens
cggaatgggcattgtcgccaattttcagggtcctgacttgtcctgggcaagccaagtccattgcttctgctcctgggaagtgccaagattctgcagcgct

SEQ ID NO: 873643 - DNA, 99 bp, Homo sapiens
ctacaattccagcgtggccttcagttctgcacacgtgcgtcaaaggtgggaacctaaattattctgcaagacaaagggaagaaataaaattttcccata

SEQ ID NO: 873644 - DNA, 99 bp, Homo sapiens
cgagactcgccgagcgccgttgctgagccctgcaaatagcagcctgctccttgccatccaccacaaaccctcaccgaaccagtggccaccaccatgaca

SEQ ID NO: 873645 - DNA, 99 bp, Homo sapiens
gatgtccagtaatgtcccggcggatatgacaatgcagatcttcgtgaagactctgactggtaagaccatcaccctcgaggttgagcccagtgacaccat

SEQ ID NO: 873646 - DNA, 99 bp, Homo sapiens
cggggacccgctgtcactgcgcctcccgctgccgacgccgcctggacggccgcactctccctgcccgagacccgaaagaactggttgtcttcttgggcg

SEQ ID NO: 873647 - DNA, 98 bp, Homo sapiens
ccaagcctaaaaaggcccctgcaaaggttcagtgtatctttgcctgcctacatcaatctgcaagggagttgcagaaagcctcatgttcatcgagccgt

SEQ ID NO: 873648 - DNA, 99 bp, Homo sapiens
cattctcaaagactggtgctatgaagctagcgagtcaccccctggctcccagacagccacacctggtgaaggagaatgcggtgacaatggagagaaccc

SEQ ID NO: 873649 - DNA, 99 bp, Homo sapiens
aaaatgtgctacgtcactcggagtatggccttggccgaccctgagaacaggccaagtttcttcctaacagtggtgattctactctggccatgtgtgccc

SEQ ID NO: 873650 - DNA, 99 bp, Homo sapiens
tgccggatcctccggggacctgatgggctgagtcgaggcctaagatctggcaaacttggtgaacagtgtgaagcagttgttcgctttcccagacttttt

SEQ ID NO: 873651 - DNA, 98 bp, Homo sapiens
ggggcctagcgctatgcctgcggcggagactgcatcaggctctcgaacccttaggagaaatcttgagagtggacagcaattgtgaagatcgccagaga

SEQ ID NO: 873652 - DNA, 99 bp, Homo sapiens
gatcttgctagatcggaacagcacgagcacgtagcaggtctccttgcaagacttcgaaagaacctgagctggctggaggagaaagagaaggaagttgtc

SEQ ID NO: 873653 - DNA, 99 bp, Homo sapiens
ggacaaagaccataccaacctctaccagaagcaaaaaagaaaagtaaaccagcccccagtgaatcagcaggtgacattccaagcctgcagtatatctga

SEQ ID NO: 873654 - DNA, 98 bp, Homo sapiens
tacctgagcattgtggtgctgctgtgcaagaaacgggccaaggccaactgtgatttgagacggcagattgatgaacagcaaaagatgctagagaaata

SEQ ID NO: 873655 - DNA, 100 bp, Homo sapiens
gggtgaaccaagtagctgggattatagatgatttcacaaaagttcatcttcattgcagatacctgcctttctttctaggttgtatctcccacttcaccct

SEQ ID NO: 873656 - DNA, 99 bp, Homo sapiens
tagcatttgactagacggtatgaatttctaagtaagacactattttgcactgcctaccaaccctggcgaacagttctacatgttttgtactcttgctgc

SEQ ID NO: 873657 - DNA, 99 bp, Homo sapiens
ttctgagaacattacagcagatcaagaaatccagctcaaagactgcttcccagggtcacctggacctcacgcagctcatcggtgtcccgctgccctcgt

SEQ ID NO: 873658 - DNA, 99 bp, Homo sapiens
tccagccccgcctcaacagcatcatgcagtccttcagtgaatctacagacctattttctcaggagctcagcctggccttacttcagtgataaaaggagg

SEQ ID NO: 873659 - DNA, 98 bp, Homo sapiens
ttccctgttgcccttggtctcggggtcgctgtaggcgctgaggctgcaggaagatgaaaaatttctgacagatttgtttgcacaactaacagatgaag

SEQ ID NO: 873660 - DNA, 99 bp, Homo sapiens
tcgccaaaagtgtccgcaactacacacaagaagcatccttaggagctctgcagaacctcacggccggaagtggaccatttccacggccactccagtgcc

SEQ ID NO: 873661 - DNA, 98 bp, Homo sapiens
ggtctgctgttgaaccagaacaaaaccgagtcaacagggaagcagaggagaaccgggagccattcagaaaaggtcatcatcagatttgaaatatttaa

SEQ ID NO: 873662 - DNA, 99 bp, Homo sapiens
ggacttcatgatccagggcggagacttcaccaggggagatggcacaggagctgggagtgtccactcgccttccaccagcatggcaacgtcttcacagta

SEQ ID NO: 873663 - DNA, 98 bp, Homo sapiens
tgacacactggacaggggctgtagctgtcaaatggcggttgagaaaggaggctgcatcatgaacgcttccaccggtactatactggcaattgctggag

SEQ ID NO: 873664 - DNA, 100 bp, Homo sapiens
cctccggagtcacataaaagtacatataagcccagatggaacggagatagtggtgctaaatcttctgcttccggcggcccaagacactgtgactccggag

SEQ ID NO: 873665 - DNA, 108 bp, Homo sapiens
gtaacaagaaattctccagagtggctagtctcaaagcgcatattatgctacatgaaaaggaagagaacccggcagtgggcaggtgtttgtgacttcagagaaccaact

SEQ ID NO: 873666 - DNA, 99 bp, Homo sapiens
ggtcatactgcatcagaaccatgaagaagatattgatgatgttaagaagttcaaaccgggttacctggaagctactcttaattggtttagattatataa

SEQ ID NO: 873667 - DNA, 98 bp, Homo sapiens
gttgagaagcctgtacctgttttatacttgcttttgcttcagcgttctgtggttgtcaacaggacacattcagctaacgtattttagcaggtggagtg

SEQ ID NO: 873668 - DNA, 98 bp, Homo sapiens
gaaccgacacgcctggggggttgcctggtttggatttgccattctctgctggactatgcctgaaaacttcatgcctcctgttcccatcacatcaccaa

SEQ ID NO: 873669 - DNA, 99 bp, Homo sapiens
cgacgtgaccgggaacacctttgagcactctcgagtggaccctgaggagctcttcaccaagctcgaccgcattggcaagggctcgtttggggaggtcta

SEQ ID NO: 873670 - DNA, 99 bp, Homo sapiens
caaaacgtcagcaaccaaaggcaccggccttgatgaggcaatggaatggctacagatgcacatgttgaatggagctcttctggcattgctgtttcctgt

SEQ ID NO: 873671 - DNA, 99 bp, Homo sapiens
ggcgcctctgcgcgcgggaagatggcggaacaggctaccaagtccgtgctgtttgtgtgtctggattaagatgttctacgaggagcatttgcacttgga

SEQ ID NO: 873672 - DNA, 99 bp, Homo sapiens
aggaagggaaccaacccactttctcggcgccgcggctcttttctaaaagtgctcctgctccagcccagcccccagagagcagaccccaggtgctggccc

SEQ ID NO: 873673 - DNA, 99 bp, Homo sapiens
gagagcagccggcagcgcctggaggccctgagagaggctgcaataaaggatggctacttttctcatcggccgaaagagaaagtgcgaacagacagcaac

SEQ ID NO: 873674 - DNA, 99 bp, Homo sapiens
acatgagatggtagccaacccctcagagattgagaatttatcacaagttgatggtcctcaagtggaagagcaacttctttcaaccacagttcagccaaa

SEQ ID NO: 873675 - DNA, 99 bp, Homo sapiens
tttgatttcttggaatctaaaatgggaactttgaatgtggaaggtgatcgaggaaacatctcaacatcttctaaaccagcctctacatcaggaaaatca

SEQ ID NO: 873676 - DNA, 99 bp, Homo sapiens
cgagactcatgactcccagagaggatggcatctagaagacctcctgccccccgaggtctgcagtctcctgaacccagcagccatctacgccaacaacga

SEQ ID NO: 873677 - DNA, 99 bp, Homo sapiens
gtgttggggcccttcttcctcatcaccctggtcggggtggtggtggctgtggtgacactgtcatcccactttacatcccacagtgtggagaatgcaaat

SEQ ID NO: 873678 - DNA, 98 bp, Homo sapiens
acctcgctccggaaaggggacacctggtgcctgtgtagatcatcctagaatacctgtgtggtgctgtccttcctcaagactacctcattctcactggc

SEQ ID NO: 873679 - DNA, 99 bp, Homo sapiens
ctgagtggtaatggatgatgcagttcaaataactaagataaagcatatgatggctttcattgaacaagaagccaatgagaaagcagaagaaatagatgc

SEQ ID NO: 873680 - DNA, 99 bp, Homo sapiens
gggccaacatggggcaggagtgcatcaagtgccacatcaacgtgtatccacacaagcaggctcatatgacattaacagacaagacacttttcagaaaga

SEQ ID NO: 873681 - DNA, 99 bp, Homo sapiens
ttaaatttggtcaacaaaatccacgtcaggcctgttacatgaacagaatatggcaaaaatgagactacttacttttatgggaatggcagtagaaaataa

SEQ ID NO: 873682 - DNA, 99 bp, Homo sapiens
agaagctaccgagttaccctaagaaaggattgactcagtcagcattgacacccttatcttcactttggagtttactaattggaagacacttgcaccagc

SEQ ID NO: 873683 - DNA, 99 bp, Homo sapiens
gtgtgctggtaccttatgagccaccccaggtcatgtaatgtttgcagaaataaaaatggagaatggaaagtcaaaaggctgtggaacagtcagatttga

SEQ ID NO: 873684 - DNA, 98 bp, Homo sapiens
tctggttctggtgggaacccagggacagagcgggatgccaccagcttgtccaaagggaagttccaggagctcctggtgggcatcgttgtggagaatga

SEQ ID NO: 873685 - DNA, 99 bp, Homo sapiens
tagactgatgcttattagtcatcaccgttattcctactaacgtcctgtgtcactgagtgtgtaatgctgtgtcatggagctaaaatcggatttttccaa

SEQ ID NO: 873686 - DNA, 98 bp, Homo sapiens
ggggatggttccatcatggcgtcaatgcaggtgcactacatcctccaggaggtggtgatgggtgggatggtgttggaaacaaacatgaatgaaatcgt

SEQ ID NO: 873687 - DNA, 121 bp, Homo sapiens
cacttctatgggttgattcaaattgccttctaacgatgacgatattcgcgctcgggttgattcaaattgccttctaacgatgacgatattcgcgctctcggtcacgctctcggtcacggtc

SEQ ID NO: 873688 - DNA, 98 bp, Homo sapiens
aaaatttgatgaagtccagaaatctggaaacatgatacaatctgcaaatgagtgttcgacctacaccacaaaatgatgctataacggtacactttaaa

SEQ ID NO: 873689 - DNA, 98 bp, Homo sapiens
gattgattgaaacatattcaatgggtagctacagcaagctgggtagcaggcagatccaaaggatatcatgaagtttccagggcctttggaaaaccaga

SEQ ID NO: 873690 - DNA, 99 bp, Homo sapiens
catgatcagagcgatggacacgctaaggatacagtatgtgtgtgaacagaataaggtgtgatgaatgcagactctgctaccattttggctgtttggatc

SEQ ID NO: 873691 - DNA, 99 bp, Homo sapiens
atcttactgtactggaaacgtcaccggaatcaggaccgaggatttccagatgtgacttgcactcagaagatcagtggtcaacttcagaagctcttccac

SEQ ID NO: 873692 - DNA, 98 bp, Homo sapiens
gccgtgacctgtacaggtcgcgggagtcgtagggaggacgccgggacacctggaagccgagaaatggtcatcatcagatttgaaatatttaaagtgga

SEQ ID NO: 873693 - DNA, 99 bp, Homo sapiens
ccgtggcctggcattgggtcttcgggagtttcttgtgcaagatggaaccaacgtccaagaggcccagaagatactcaacaacagcggactccccattac

SEQ ID NO: 873694 - DNA, 99 bp, Homo sapiens
aagtcacttcttattaaggtggtgccaaggcgcagaaggagatggtgccttgctgtgttgcccaggctggtctaaaactcctgggatcaagtgatcctc

SEQ ID NO: 873695 - DNA, 99 bp, Homo sapiens
cagacatcagccacgcatctgaccttgttgacctgcgaccgcatcaagcagtccgccagcggaaccaagcggcgcgtgttcatcatcgagaccatgggc

SEQ ID NO: 873696 - DNA, 98 bp, Homo sapiens
acggccagatctgccctccaattctgaagggagtggtaatggaagtgaagatgcttcaaaggacagtggagaaggttcctgtagtgattctgaagaaa

SEQ ID NO: 873697 - DNA, 99 bp, Homo sapiens
caggactaagagaagtcacaaaacagcagatttcccaagagcagcggaaaatgatccagtcacagttgttgacctcctgtactggagagacattaagaa

SEQ ID NO: 873698 - DNA, 99 bp, Homo sapiens
cagcgtccatttcctgtgacagcagtacaactcgtctcctagaagggggtccggcctgcgggccaggaggcgcgggagagtctgaccacagcgactcca

SEQ ID NO: 873699 - DNA, 99 bp, Homo sapiens
tccttctctgcccagcagcacaagggcagtttgcagtctcagaggagcagtgcctgtaccagatctacattgatgagttgtacggaggcctccagagac

SEQ ID NO: 873700 - DNA, 100 bp, Homo sapiens
ccaaaattcttcaagacattgcttcggagcgttgtggactgggaggataatagactggctaaatggatggcttcccgaagcaatgtcttgaagaattttg

SEQ ID NO: 873701 - DNA, 99 bp, Homo sapiens
gcctgaacctctctttcgcttttgtggaactactctacggcatctggagcaactgaagctgttgtgaaggcagagcagcatctgctgaagagacagaaa

SEQ ID NO: 873702 - DNA, 98 bp, Homo sapiens
gcatttacagaaagagtcaacagcagtggcaacagggagaggctagtggtaacaggccgagctggatggatgggtatggggagaggggcaggacgttc

SEQ ID NO: 873703 - DNA, 99 bp, Homo sapiens
cgcgggacaagaaaattcatgcggctcagttagctctagaggccattcttttgctgatcctgccagtaatcttgggctggaagacattatcaggaaggc

SEQ ID NO: 873704 - DNA, 99 bp, Homo sapiens
aacgtctaagaaacttggagaactccagaccgtagctttatgggatctgcgtaacttaaaattaaaactccataccttcgaatctcataaagatgaaat

SEQ ID NO: 873705 - DNA, 99 bp, Homo sapiens
aaggcgcggaggaagcggagcggcgcgcgcgggacaagcagatcttggaaggagaccaagccatcctgcagagaataaagaaggctgtgcgggcaatcc

SEQ ID NO: 873706 - DNA, 103 bp, Homo sapiens
gtgcactgagcagctgggattacaggggagaaagggacatgctgctgctgatatacaacaggcagaaacaaatgatgccagatgtcctgtatcttgcacggtt

SEQ ID NO: 873707 - DNA, 98 bp, Homo sapiens
tttgatcagtatgaggaaggacacttggaaattgaacaagcgtcacttgacaagcctatagaatcgtggtttgagtccagccaatgacactggagcca

SEQ ID NO: 873708 - DNA, 98 bp, Homo sapiens
tgttgtcacaaattttgaaattttccgaatgagggagaaacaggtacctgtggatgtggtcgagatgaaaggacacagcattgttggttttgccatgt

SEQ ID NO: 873709 - DNA, 75 bp, Homo sapiens
cgtcatcgagcagctcttcttcgtccgtttgtgagctttctcttaagtgtgccaagctgccatccaactttcttg

SEQ ID NO: 873710 - DNA, 99 bp, Homo sapiens
cagctccggccgcctggctccccatactagtcgccggtttgatcccatataatttcatctgtgtgcagacagggtccatcctgtcaaccctaacctctc

SEQ ID NO: 873711 - DNA, 99 bp, Homo sapiens
cttcagatcagcgtggagctcggccagcctcacgggaggaagatgcagccgctccacaaggccatgcttgtgcttcagcttgtacaccttcagcctggg

SEQ ID NO: 873712 - DNA, 99 bp, Homo sapiens
aggctgcagccgcgaatgccgtaggtgtggtcactcacctgtctaccactcccgtgaaatggcagctcgtgccttggtcccatttgttatgatagatca

SEQ ID NO: 873713 - DNA, 99 bp, Homo sapiens
ctcaagtggtgcagtgaccaatcagaaataatatccaatcagtacaacaatgagccttcaaacatatttgagagtgacaaagacctcgatgatgccttg

SEQ ID NO: 873714 - DNA, 99 bp, Homo sapiens
aggtaggctgcgttgaggatctttgctcttccatccgcctttgatcgtcttcctcttcagccatccagataacccaacagcttgagggaatctgcttac

SEQ ID NO: 873715 - DNA, 99 bp, Homo sapiens
gccatgcaaaggcaggggaggaagccacctcgaggctggcagtgatggtgaaagcataggaaactgccccttttcccagaggctcttcatgattctttg

SEQ ID NO: 873716 - DNA, 99 bp, Homo sapiens
gcaacaagagtgaaactccatttcaaggaggaatccccaacaccaatgcagcctcgcaagctgagcttcctcaggaatccaccgcatcgcttcgagata

SEQ ID NO: 873717 - DNA, 99 bp, Homo sapiens
attgacattcaaccgtacccgccaagctgtcatcacaaaagagttgattgaaattatctctggtgctgcagctctatgacaaatcctctgagggaaatc

SEQ ID NO: 873718 - DNA, 99 bp, Homo sapiens
ccgtagccgcagccgtagccaccagagaagtcggcacagttctagagataggagcagagaacgatccaagaggagtaccataacagcttgggggaaaga

SEQ ID NO: 873719 - DNA, 99 bp, Homo sapiens
aggtaggctgcgttgaggatctttgctcttccatccgcctttgatcgtcttcctcttcagccatccaggtgccgacttcacaaacaccttctacttgct

SEQ ID NO: 873720 - DNA, 98 bp, Homo sapiens
ttcctcttcttgacagccttatggttaagccaacttcaggactgattgatcatgacttctataaaggagcaggcagcaattagcaggctcttaagttt

SEQ ID NO: 873721 - DNA, 100 bp, Homo sapiens
ctatcctcgaatcggggaggattttctcccctaacttccgcacaagatctcccaatgttctcgctgcaatcgaaaagtccacagtgcaggttcgaggata

SEQ ID NO: 873722 - DNA, 98 bp, Homo sapiens
tttgttaaggattccaagtaactcttatttggtccctgtcccaccaattttgggtttttatcaaatgaaggaggaagaagtacaactaagaataacca

SEQ ID NO: 873723 - DNA, 99 bp, Homo sapiens
gtggaacatggctagcaggaatgcttactgttgcgtggttcgttattaacagctggccaaatttcgcagtctcctgtgcacagcggagggtgaagcagc

SEQ ID NO: 873724 - DNA, 99 bp, Homo sapiens
gaacgcacaggatgaccaccaccctcgtgtctgccaccatcttcgacttgagcgaagttttatgcaagaacatgaaaggctcccggagcagcgctgact

SEQ ID NO: 873725 - DNA, 98 bp, Homo sapiens
ctggactggatatttctacctcggccccaggttctctgcagatgcagtaccagcagagcatgcagctcctgaattcagaccacagatccacagccaca

SEQ ID NO: 873726 - DNA, 98 bp, Homo sapiens
gaatggacaagcttaataaaataaccgtccccgccagtcagaagttgaggaaaaatgaggaagctgtgagtaccagtggaaggaacgagccaggaaga

SEQ ID NO: 873727 - DNA, 99 bp, Homo sapiens
gtgcattaaaattcttcagacattacgagaaatgttagagaagaaagacagctttgtggaagagtttgtgccattcagggattatattgacagaagtgg

SEQ ID NO: 873728 - DNA, 98 bp, Homo sapiens
gccaactgttggatgcagatgggttagagcagccagcgggtacagaatggattttggaagagggagtcaccactggacctccaaggaagccacgtgca

SEQ ID NO: 873729 - DNA, 104 bp, Homo sapiens
acaaagctcgagtagctgggattacagctttttgcccctcaagacaggactgcttatagctgactatttgggcatccttcatgcaatggatggctttgttgacc

SEQ ID NO: 873730 - DNA, 99 bp, Homo sapiens
ctggcatcagggaggctttcagccggagaagcgagtttcagctggcctccccatggccacccatggaccagtcggcattcacttcctcccttctgcggc

SEQ ID NO: 873731 - DNA, 100 bp, Homo sapiens
gtgacatgtacattctcaatgagagcctcaaattccaaagtttctgaaaaacttaacgatggctgggtctgtgaggctctcattgagaatgtacatgtca

SEQ ID NO: 873732 - DNA, 98 bp, Homo sapiens
ctggagaggaggagccaagagatgggagcccctcttggagtctgtgccttatgaagaagcactggcaaaccgccgcatccttctcagctctactgaaa

SEQ ID NO: 873733 - DNA, 99 bp, Homo sapiens
tcttcttgatctgtttcttgatatggaagcagctacagggcaggaggaaccatattacgttcgttgcatcaaacccaatgacaagaaatctccacagat

SEQ ID NO: 873734 - DNA, 99 bp, Homo sapiens
ttacctgcttcccaatcccactgatgaggatcagcccatgtgtttctgaaagatctatccagcactccgatggccagcaacaacaccgccagcatagca

SEQ ID NO: 873735 - DNA, 99 bp, Homo sapiens
tgacatatcgttggacccagaattgagaactaaaggtggtccacaaattgcttatgaacgcggctttaggtggaagcttgctcacttccgttatttgtg

SEQ ID NO: 873736 - DNA, 98 bp, Homo sapiens
gcccagacctgccttccggggacagccagccctcgctggaccagaccatggccgcggccttcgtacggcatcaagaagaaggaggagcgcgaggccga

SEQ ID NO: 873737 - DNA, 111 bp, Homo sapiens
tcactggtcactgacgttgagtatacgttcactgccatgtgggctctttgctgggcagaagatggcagtgaacgtatactcaacgtcagtgaccagtgataacctaagtcg

SEQ ID NO: 873738 - DNA, 99 bp, Homo sapiens
tcttggctcctgtgcatcacaagtctttgctattaatgccaatactggggctcagagctccagctacccactttggattttgaagatgttttaagatat

SEQ ID NO: 873739 - DNA, 99 bp, Homo sapiens
gggggatttgcctcagatggagttacagcttctttatgaaaaaggcatcagcctcagggcctccttcatcttcatctctgtctgcagtacctggcatgt

SEQ ID NO: 873740 - DNA, 99 bp, Homo sapiens
gggcgacagagcgagactccatcatttcatctggtactccatggcgatcaaacttgtaaaatgatgctacatgagtaataatccaccaactaaaaccta

SEQ ID NO: 873741 - DNA, 99 bp, Homo sapiens
acactcaaaagggagttctacatcacatttgccaaatttctacagcagtataatcactacaaatccaatgtggagattttcaaattgcaaccaaataaa

SEQ ID NO: 873742 - DNA, 99 bp, Homo sapiens
taactatccaggcctactcctccatcattggactgcagtcccaccagtgacctcatgtcaagaaggcagacctgcagaaatgaatgtgcctggatacct

SEQ ID NO: 873743 - DNA, 99 bp, Homo sapiens
tgtggtcaagaaatctgatgtggaggcaatcttttcgaagtttcatggggaagggtatcgggaaggctatgaagaaggcagtagtttgggtgtgatgga

SEQ ID NO: 873744 - DNA, 99 bp, Homo sapiens
caagatacggtcatgagcttttgattaacaccttaataaccagcggagctgacacagccaactcctcagaagaaatatcacgttaccaagaaatgattc

SEQ ID NO: 873745 - DNA, 98 bp, Homo sapiens
tttgcctttctggacacagaagtatttgtgacagatggaacttgctaaggaagaaaagtgtgaatttctgccattcctgtccccacggaaggttatag

SEQ ID NO: 873746 - DNA, 98 bp, Homo sapiens
acaaggactcacagtggctgcaaggttgttattgatgccttcagattgatcaatgctaatatgatggtcttaggacatgaaccaagacaaacaacttc

SEQ ID NO: 873747 - DNA, 99 bp, Homo sapiens
gcagagcggctggcagatgtgcagctggaagggcttccgagtggacctgccaatcaagtcggcccgctaccgtggccagtacaacacctatcccatcaa

SEQ ID NO: 873748 - DNA, 99 bp, Homo sapiens
ctccaaaagtgccatcactgcttccacacccatcctgctgccagccataattaattcaaaggggtatttgtacaccctcactggggactggtatttctg

SEQ ID NO: 873749 - DNA, 99 bp, Homo sapiens
catttgtttcagaatggtagcaccatcatttgtaatggttacatcaccttttccatcttgaatctctaaaacttggctgaagctctccgagtagggaac

SEQ ID NO: 873750 - DNA, 99 bp, Homo sapiens
gaggaacaaattgtacatttgcccattctcaggaagagcttgaaaagctaaatttattgtgaagaaatcagaagatgaagaagacgccgctaaagatac

SEQ ID NO: 873751 - DNA, 98 bp, Homo sapiens
ctgaaaataaatagggaagatggagacaccctctgggggtcctctctgagtcaaatccagtggaaacccaagcagaggaggctaatgtgattgaactg

SEQ ID NO: 873752 - DNA, 99 bp, Homo sapiens
gatgctttgggagtacttggccctgacctgcatctacaccaagaagagaggacacgtggatctgtcctgcaatgacctgacacgggtgcccgagtgtct

SEQ ID NO: 873753 - DNA, 99 bp, Homo sapiens
gaacggccatgagcactgcagcgattgcgagaatgaggaggacaacagctacaaccggggagcatatcatgtcccgagtgggaaaatattagctgtaaa

SEQ ID NO: 873754 - DNA, 99 bp, Homo sapiens
gcatagtcatggtgatgggtattacagatgtagatgataaaatcatcaaaagagccaatgagaaactggcaagatgtttacctggggccgagcagacta

SEQ ID NO: 873755 - DNA, 99 bp, Homo sapiens
ccggtcaggtccatcgcgccgccagtcgccgccctgatttatttgaagcatgttaagacaatattgaccaaactgctgtatccctcacggctccaaaaa

SEQ ID NO: 873756 - DNA, 98 bp, Homo sapiens
gagaatgaagccatccaatggatgcaggaaaactggtactccaaagattcaggtttactcacgtcatccagcagagaatggaaagtcaaatttcctga

SEQ ID NO: 873757 - DNA, 99 bp, Homo sapiens
ataatagcaagtcatttgcggatattaacctctacaggtggcgacatgtctaagaatgtgagccagtcacagatggcaaaattgaaccaacaaatggcc

SEQ ID NO: 873758 - DNA, 99 bp, Homo sapiens
ctcctgagtagctgggactacaggttcggtcagcagcccaacagtctacctggcgagattttggcaggaagctccgcctcctgagtggctacctgtggc

SEQ ID NO: 873759 - DNA, 99 bp, Homo sapiens
tggactgggatttggaggatttaatacacagcagcagcagcaaactacatttgacattgtgcagcaaagaaatggttatggagaagcccagtccgctgc

SEQ ID NO: 873760 - DNA, 99 bp, Homo sapiens
tgaaatttgtaataggaataagggttgcatccacctggtcgcgcataatcctggggagtgaccagaaacttctctttcatctggacctcagctttgttc

SEQ ID NO: 873761 - DNA, 98 bp, Homo sapiens
aaggagaacaacaacccattagttccccttgggatgtagtttttggaacatcagattgctagtgcaactactgctccatcgatcccttcacatttgtc

SEQ ID NO: 873762 - DNA, 98 bp, Homo sapiens
gctcccggagtgtatgtctttggagaacttctggagctggccaacgtgcaggaggtggctaagaaaattcgtgaattaatggcagacagcgaaaacat

SEQ ID NO: 873763 - DNA, 99 bp, Homo sapiens
tcaacgactccacctatgacggacataccgtgggcggatacttcgttgaaagttgccaccctgatgtaatccagcatcttctccaggaccccgtgatcc

SEQ ID NO: 873764 - DNA, 99 bp, Homo sapiens
atttagaacaacttctaaatcatcgtgagatactgggtcgtcaggatggagttttgcaagactgggtcattgacgattgcattggtaactggtggagac

SEQ ID NO: 873765 - DNA, 99 bp, Homo sapiens
aagcctttcatcacttatcacaacgagctggacatgaacttatatatgagaattgctccagaactctatcataagtttaattggttggggtcagataag

SEQ ID NO: 873766 - DNA, 99 bp, Homo sapiens
attgcagcgacgcccacaagtctaatggaggcgcaggcagaaggaccccttacagcggaaagcgtctctagcagctgatatccccagacttggatatag

SEQ ID NO: 873767 - DNA, 99 bp, Homo sapiens
gaacggctgaaggccctacgggagaaaaccgggcgcaaggtgctggagaatctggtaaaagcaccattgtgaagcagatgaggatcctgcatgttaatg

SEQ ID NO: 873768 - DNA, 99 bp, Homo sapiens
agcaatgagcttgtgttccaggtgaaggtactcagacaggaagtagcagctcctttgagcatgagatgtctcaggaaggcttcagcgctgccatcacct

SEQ ID NO: 873769 - DNA, 99 bp, Homo sapiens
ttcactacttttaagcaaaagaaattaaacaaccaccatgtcgagcaaaaaggcaaagaccaagaccaccaagaagcgccctcagcgtgcaacatccaa

SEQ ID NO: 873770 - DNA, 99 bp, Homo sapiens
ggatccgcgggacaagaaaattcatgcgaaggtagaagatagcaccatgccgattcgtcgaactgtgaattctacccgggaaactcctcccaaaagcaa

SEQ ID NO: 873771 - DNA, 99 bp, Homo sapiens
ccccctcaggtacagacccaggctcttcgagactttgagaagatcctgatgaatttgagcgaatatatgagcctctggatgtcaaaagtaaaaagattc

SEQ ID NO: 873772 - DNA, 99 bp, Homo sapiens
tattggatcagctcagcagggccatggttgcttgttatccgggcaatggaacgggttatgtacgtcatgttgataatccaaatggagatggaagatgtg

SEQ ID NO: 873773 - DNA, 98 bp, Homo sapiens
gcggacctgtgaggggatccgacttgccggcagaacttacgctgcgggaccccgggcactgttgctgctgcgggagattccacctgctcctacgaagc

SEQ ID NO: 873774 - DNA, 98 bp, Homo sapiens
gagcaggacactgctacttaacaaggtggtttgagccaagcatgttacatggaattggaaaatttatagttgaaataatttgctgtcgtttcagactt

SEQ ID NO: 873775 - DNA, 99 bp, Homo sapiens
ctgagctcctgctttgcacagctttgccacaaagcccagtctgtgtctcaaatcaaccacaagctggagacaacgactgaaagacctttcattcagaag

SEQ ID NO: 873776 - DNA, 98 bp, Homo sapiens
cgggatcattaagaagcagatcctgaaacacctgtcccgcacaaacatttcactgaagatattcaaacaaggcaatatcgttccttggaagttctaat

SEQ ID NO: 873777 - DNA, 99 bp, Homo sapiens
tgaagtcctccagattccatttatcacagacaacccttgcataatgtgtgtctgcttggtcgagatttaatttgcatccagtctatggatgggatgctg

SEQ ID NO: 873778 - DNA, 99 bp, Homo sapiens
gaacgagagagacctgcagtcgaggactgaggccgtgctgaaggagagcgagagcatcagatccatgctgctgctgactcggagccccacagcttggca

SEQ ID NO: 873779 - DNA, 99 bp, Homo sapiens
cagccctgctctgcgtcaacgccatcgcagtgctgcacgaggagcgattcctcaagaacagtattcacaacattgtctgtgaccaagcgctctggggca

SEQ ID NO: 873780 - DNA, 99 bp, Homo sapiens
agggactgggggctcccaggctgagctggcccagagcaccatgtcaatgagaaagaaggaggaatctgaagccttggtagagacggtgtttcaccatgt

SEQ ID NO: 873781 - DNA, 99 bp, Homo sapiens
tcctccgggaccggagtcagaaccctccgcagagtaaagaaatctcctgcaaagaagctgagccatgcaattagtaaatctttggggtgtgtacccacg

SEQ ID NO: 873782 - DNA, 99 bp, Homo sapiens
cggcgacgcggacctgcggactagcgaacccggaggggcctttggctactttgaggtcacacatgacattaccaaatactccaaggcaaaggtatttga

SEQ ID NO: 873783 - DNA, 99 bp, Homo sapiens
ccaaaccaaaagattgaagttcaacgcacttataacaacatatgagatcctcttgaaagataagattgtagaaggcatgaaacaaaaaatgtggagtat

SEQ ID NO: 873784 - DNA, 99 bp, Homo sapiens
atagtttattgagaatagaagacaatagtctactttaccagtacttagaaatcaagagttttcttactgtacctcagctcaggtgcctaaaaggccaga

SEQ ID NO: 873785 - DNA, 99 bp, Homo sapiens
aaaaaaagatggagccctgcatatgattggctctttagctgaaatacttctgaaggtgaatacagcagtccagttaatcttggtggcagcttctttggc

SEQ ID NO: 873786 - DNA, 99 bp, Homo sapiens
atcttctggggacaattctgagtcggaaggcaaagctccaatttgcatgtccaactgggatattagccacctcagagtccaaatccatgccagtgttgg

SEQ ID NO: 873787 - DNA, 99 bp, Homo sapiens
caactggacatggagttgatctctctaaaacgtcagaaggagctcaaaaagtgggatgagtttgaagatattttagaagagaggaggcatgtcagtgac

SEQ ID NO: 873788 - DNA, 98 bp, Homo sapiens
gatgtgatgttggagaactacagaaacctggtctccctagtgtggcaaaggagcagagaactttgacaagttcttcacacgaggacagcccgtcttaa

SEQ ID NO: 873789 - DNA, 75 bp, Homo sapiens
tttaggtggaagactagtctattggttaccggtgtatacgccagagtatctgaaaactgaagagtggagaatatg

SEQ ID NO: 873790 - DNA, 99 bp, Homo sapiens
caagaacaacctgtattgagtttctctttgagatgattggactgctctatccagcatcattgagcagcgatggattttgggtggggaagtcctccttgc

SEQ ID NO: 873791 - DNA, 99 bp, Homo sapiens
cctcctgagtagctgggattacaggggacttgtatacccaggcagcagaggcagcgatggaagccatgaagggccgactggccaaccagtactaccaaa

SEQ ID NO: 873792 - DNA, 98 bp, Homo sapiens
tctcctgatatgactaaaaacttccaacaggttcaaaccttgtactactcagctgatcacaagctgcttgatgggaacctactagatggacaggctga

SEQ ID NO: 873793 - DNA, 99 bp, Homo sapiens
gaactacagaaacctcgtctccctggaaaatatttacaccagcagctccagttcataccaataaagaagatcctgctacccaaactaatttgggattta

SEQ ID NO: 873794 - DNA, 99 bp, Homo sapiens
ccaggcccagcgggaggatggccacagctccgggaagcagtttgttcgctatataaacatgttgataaacgacacgacgtttttgctcgatgaaagtct

SEQ ID NO: 873795 - DNA, 99 bp, Homo sapiens
ctccacaggcaggggccgggccagctgggtgatctcgttgccaaacttgtctacgtccgagttctttggagccctggctctcgctggccagctccccca

SEQ ID NO: 873796 - DNA, 99 bp, Homo sapiens
gccggcctagcgtcctggaattacttcaatcaagtttttcgttggaatatacgttgcacatttatggcgattctgagtgtgagggcagacttctgccag

SEQ ID NO: 873797 - DNA, 98 bp, Homo sapiens
tgggtgtacacactgctgtttaccttggcgaggcctttcaccaagtccatggtgccagtcacgaattgcccgaacattacctgctgatcagaagccag

SEQ ID NO: 873798 - DNA, 99 bp, Homo sapiens
gactaccctccgggcccagtctgtctgtccgtggtggatctaagttgatgcggatgaaattaaaaggctaggaaagagatttaagaagcttgatttgga

SEQ ID NO: 873799 - DNA, 98 bp, Homo sapiens
tcgagcaccgccaagtcggccacctggacgttgtctgggttcatgtctaagcttgttccagctatccagaatgcccacaagaattcaactggatctgg

SEQ ID NO: 873800 - DNA, 99 bp, Homo sapiens
agacatctttgctgcaagatcgaggctgtcctctggtgagaaggtggtgaggcttcccgtcatattccaggatttagaagaattctgctttaagttttg

SEQ ID NO: 873801 - DNA, 98 bp, Homo sapiens
ataattaaatgcgatatggtacccaaactggattatgttcaaaccttgtactactcagctgatcacaagctgcttgatgggaacctactagatggaca

SEQ ID NO: 873802 - DNA, 99 bp, Homo sapiens
ccgaactctgcaaagcctccagaggacataccacctccaggatcaggatgcagagagttgtggaaagtaaaaatgtagccctaccaaaaggaactattg

SEQ ID NO: 873803 - DNA, 99 bp, Homo sapiens
cgcttcgaaagcatcatccacgagttcgacccgtgggtcctgatgaagaagctgttgtggatcttggcaaaactagctcaactgtgaacaccaagtttg

SEQ ID NO: 873804 - DNA, 99 bp, Homo sapiens
tggatcttcacacagctgcttccattggccagtatgaagtggtgaaggagtgtgtgcagcgggaaatgtttcaacgtgcgcaagcgttgcggcggcggg

SEQ ID NO: 873805 - DNA, 99 bp, Homo sapiens
ctatccgtcattgagacttattcatgctgtcagaggtgccggtggtggtgtgcacattgagccccggtatagacagttcccccagctgaccagatccca

SEQ ID NO: 873806 - DNA, 99 bp, Homo sapiens
ttctggcacccagtggtgacccctgccctcgtgtgcctcagtcagctgctcaccaagtgagggccccaaggctgttgcagctcctcgacctgatcggtt

SEQ ID NO: 873807 - DNA, 99 bp, Homo sapiens
gctatcatcctgccaaactccaggctcagatgtcacagtctgaagatgatgagaaactgaaaaagaggaaggagcgatttgggattgtcacaagttcag

SEQ ID NO: 873808 - DNA, 99 bp, Homo sapiens
tggtatgacactgaaatctgtaacgtcttggtcctttagtgagtaaagtgaaagaataccaagtagagacaattgtagataccctctgcactaacatgc

SEQ ID NO: 873809 - DNA, 99 bp, Homo sapiens
ttcaaggaggtgctgaagagcgaggaggtggtatcacggcaacctcacacgccatgctgctgaagctcttctcctctcaaatggatgtgacggcagcta

SEQ ID NO: 873810 - DNA, 98 bp, Homo sapiens
gaaatctggactctttgcctgtttggatagatcgttaactgaagacaatatgcaaaattctcacatggatgaatacagaaattctagtaatggcagca

SEQ ID NO: 873811 - DNA, 98 bp, Homo sapiens
cgcgtcttcagggcccagtccctcggacccatcgccgcttctagaccctactgcggtctcggatattgccggacctctgtgagtgaaagccttcagag

SEQ ID NO: 873812 - DNA, 100 bp, Homo sapiens
gaaagaggccacgttgaagacttgtacagcgaactcatgttgatgttttcaaacgaccatttgttcagttcgctgtacaagtcttcaacgtggcctcttt

SEQ ID NO: 873813 - DNA, 99 bp, Homo sapiens
ggacgaaccgccaatcgcaaggcacctctgagaacttcaggtggattgctcaggtaatgacctggagcagttacacatcaaagtgacttcactgtgcag

SEQ ID NO: 873814 - DNA, 99 bp, Homo sapiens
gggagacgagaagcctgaaaagtcgcagcgagctggagccgccggagatatctacccaaggccaaagccacgccctcaaccccagcctggcaattccgg

SEQ ID NO: 873815 - DNA, 99 bp, Homo sapiens
ttccctttggatgtagcaaggaagaaattgttcagttcttctcaggtttaacaatgcatgcatcaattcttgcatatatgtttaatttggttgaagaag

SEQ ID NO: 873816 - DNA, 99 bp, Homo sapiens
taagagtttactggattctgtcaaggtgatgcattccggggtctcaaaaaagaagataatcaaaatgcaatgccttttagcacatcagatgttgataat

SEQ ID NO: 873817 - DNA, 99 bp, Homo sapiens
gcaacttcaagtagtggaaggagtacagggaagtctataagctttgcaacagaattacagagtatgatcttagcagtgtctgcaaaaacgaatcttttc

SEQ ID NO: 873818 - DNA, 99 bp, Homo sapiens
gaaatttgcctgatgcaccccctagatgtggtgaaaaccaggtaaatggccaagacctaaagaacctgctgcaccaggatgctgtagacctctttcgta

SEQ ID NO: 873819 - DNA, 99 bp, Homo sapiens
gcagcaccagggtggctacgcctcccggctgtgctgcattagacgtggaactatctgatgattccttccctccagaagactttggcattgtgtctggaa

SEQ ID NO: 873820 - DNA, 99 bp, Homo sapiens
ggggcgcgcagctgcccgccggggcgggggaactctaatgatccaggacaaagaagttaccctggagtatgtatcaagcctggatttttggtactgcaa

SEQ ID NO: 873821 - DNA, 98 bp, Homo sapiens
gggagtcatcatgagcgatgttaccattgtgaaagaaggttgggttcagaagaggggattcagtgtcatttgaagatgtggctgtggcctttactcag

SEQ ID NO: 873822 - DNA, 98 bp, Homo sapiens
caaatttgctcatccccccaaaagttgtcaggttgaaaatggaagagtaattgcctgctttgattccctaaagttagctaaattacaagatcgagaat

SEQ ID NO: 873823 - DNA, 99 bp, Homo sapiens
ctctcaaggcctccaggttaccaatttgggaaggtatagtttgaatttcattgcagctcacatcctgtgaaatgttcagtaaactcctgttccagtttc

SEQ ID NO: 873824 - DNA, 99 bp, Homo sapiens
gtgtttcgaaaatgtgtgtgaattggatttgatcttccatatggataaggttgcctgcctgattcgagttccatctgaagtggttaagcagagggcaca

SEQ ID NO: 873825 - DNA, 99 bp, Homo sapiens
tgtatacttagcaggatgcagtgagaatggatcttggagaatgtctgaaagtccatgacctggctttaagagcggattatgaaattgcatccaaagaac

SEQ ID NO: 873826 - DNA, 99 bp, Homo sapiens
tgtcgatgacattctgaaaaaggagctctgccagtgccggccgggagaaggcaattgctcctgctgtaaggagtgcatgctgtgtcttggggccctttg

SEQ ID NO: 873827 - DNA, 99 bp, Homo sapiens
gcttcacaatggtgcttttaccagattctccagcacctttctctgtgcctgagaatatggagatgattttatgcctgggctttttctcttctggaacag

SEQ ID NO: 873828 - DNA, 99 bp, Homo sapiens
ggtatggttggcatggaattgaatttcatctgtctgtgggaattgtaagcaagggagagataatgcatgtgagaaaacttcatatatgtttctacgaaa

SEQ ID NO: 873829 - DNA, 99 bp, Homo sapiens
ttctatgccccttggtgtggacagtccatcgctgccagggcagaaattgagcaagcagcaagtcggctttcagatcagctccgggttgacaaatggtgg

SEQ ID NO: 873830 - DNA, 99 bp, Homo sapiens
gcagacctggtggaggtgttaaatgaaagagatctataaggacaggcagaaattctcagaacaggttttcaaagtggcctcctcagacctggtcaacat

SEQ ID NO: 873831 - DNA, 98 bp, Homo sapiens
tggctataggctttccttaataaagaagcggtttgctactgaattgcttcagattgctggaattagcccacatggtaatgctttaggagcatcaatgc

SEQ ID NO: 873832 - DNA, 99 bp, Homo sapiens
tgtatgttgtcaactatccaaaagcctgtgacattctggccattgataagtccctgacaccagtcaccctggtcctggcagaggatggcaccatagtgg

SEQ ID NO: 873833 - DNA, 99 bp, Homo sapiens
cgaaacatggagtcctgtaggcaaggtcttacctgaatcagcactgggtattgtacccctccaatatgtgtttgttatgacctttacacttgatgatgg

SEQ ID NO: 873834 - DNA, 131 bp, Homo sapiens
ttggagattttagccctgatgaattcaatcaattctttgtgactcctcgatcttcagttgagtgcctcaacctggtgttcctgctggcagacgtgtggttcggctttctgccaagcatctacctcgtcttc

SEQ ID NO: 873835 - DNA, 98 bp, Homo sapiens
gagggtgtacgggagtttcttggtaaatccagaatcaggttatggaggttttgatgactatggtggctataataattacggctatgggaatgatggct

SEQ ID NO: 873836 - DNA, 99 bp, Homo sapiens
ctgccagctgccgaggcgttcggtcctgctgttgcggccgctgccccagggctgcggggacgcgggagatacagatgacccaccaagaattactcagaa

SEQ ID NO: 873837 - DNA, 98 bp, Homo sapiens
aatgagaacaagaaggagggtatctgcttcacggagggcaagagccggagggtctcagaggacagacagtgccagttgcttctgcaggaagccttttt

SEQ ID NO: 873838 - DNA, 99 bp, Homo sapiens
acacaaaccatcacaaagttacctacgtgttagaaataaatctgatattgcaccttcacagcaacaagaaacctctgtagaggagcaggatgcaaccga

SEQ ID NO: 873839 - DNA, 99 bp, Homo sapiens
cacactctgggacagtgggagatttggaacagctttgagaagagcaagcccagtgtttcccgggctctttgagttctgctcgcgttacacaggcgcatc

SEQ ID NO: 873840 - DNA, 99 bp, Homo sapiens
tgatgtcacaacattatacgaaggtttccagaggggaatacaggtgtcaaatccatttggtggtgatcctttcaaaggttcagatccatttgcatcaga

SEQ ID NO: 873841 - DNA, 99 bp, Homo sapiens
ataagtcacaaagggaggagctggactccatcctcttcctttttgaagttatgggtgctacatgtgtgctttcagagcagtagtgtgaggaagcttgga

SEQ ID NO: 873842 - DNA, 99 bp, Homo sapiens
ttcattcagatgtggtggaatatgccaaggaaaaactggagagcttcatcaaaaatagtgatagctttgataaacaaagatgataagtcagttgtagca

SEQ ID NO: 873843 - DNA, 99 bp, Homo sapiens
ctctactcagagtagaatctgttcagtacagtagtgcagagtgttcttatcagctgtacaacctgccatagtgaatttccatctcggaataaacttttt

SEQ ID NO: 873844 - DNA, 100 bp, Homo sapiens
tttattataaacaaagccacttcttgcctcagctcttcaaaagtcaccttcacaatttcctctttgccttcccctggcctgttagtggctgccataataa

SEQ ID NO: 873845 - DNA, 98 bp, Homo sapiens
ctggctggcggagcatgagcgccccagggttctccaaaaaatgtggaatcctttgcatctatgctgagacattctcctcttacacagatgggacctgc

SEQ ID NO: 873846 - DNA, 99 bp, Homo sapiens
tcataatgcagaagtaagaaaggctttgtctagacaagaaatgcaggaagttcagagttctaggagtggaagaggagatttgtgctacggatgctgtag

SEQ ID NO: 873847 - DNA, 99 bp, Homo sapiens
gttcgacgccttttgcgccttagaggcatcagcgtatcagtttcctcgtagagcagagccggagccaggtgcaggccattggagagaaggtctccttgg

SEQ ID NO: 873848 - DNA, 98 bp, Homo sapiens
tcaaaaaccatctggtgctgtggattgcaaccttgaattataacactgcctttaaattcagatgtccccaaggtatttgcagcgttgcctgagtttta

SEQ ID NO: 873849 - DNA, 105 bp, Homo sapiens
ggcgacagagtgagactccatttttctgtgtatcccagatatagttgttcagaacttctatctgggatacacagaaaaatggagtctcactctgtcgcccaggct

SEQ ID NO: 873850 - DNA, 99 bp, Homo sapiens
ataattctttttatgtgcgaacatgtaacaagaatccaaagaaaacaaaatggtggtatcatgattgaaaaggctgtggtgtctcagcgcctgacagaa

SEQ ID NO: 873851 - DNA, 99 bp, Homo sapiens
taaaactgccctggacgacaggaaagagagattccccagtgcgctggctgcaaccagcacatcctggacaagttcatcctgaaggtcctggacagacac

SEQ ID NO: 873852 - DNA, 99 bp, Homo sapiens
tccagaagctagagccgcaaagaatttgctgattcccttggaattccgtttttggaaaccagtgctaagaatgcaacgaatgtagaacagtctttcatg

SEQ ID NO: 873853 - DNA, 99 bp, Homo sapiens
ctccagagtagctgggattacagccagcaatagaacatcagatagccaatatgatgctttaattactagcaatttggtacctatgtatgaagaattcag

SEQ ID NO: 873854 - DNA, 99 bp, Homo sapiens
gatcagcacaaccttgttgcatgccagataaatgatcagtctccggagtagagatgaagagagaatttctaaacctggggctgtctcaactcctgtaaa

SEQ ID NO: 873855 - DNA, 99 bp, Homo sapiens
gccggaggaggacaacgactaccaccgcagcgacgagcaggtgaaaggtgtagcagtcactcggcctacacccacagcatcgaccttgtgaacccagcg

SEQ ID NO: 873856 - DNA, 99 bp, Homo sapiens
agcctgatctaaacggatttattccaggtaatcatagcctcctggtgtcgcacatccatgggaataatgaatttatttggactagaaactaagacctgc

SEQ ID NO: 873857 - DNA, 99 bp, Homo sapiens
tccgctctggccacccagtatatgcactgtgtcaatcatgccaaacagttgaagactgggatagtttccaagctattttggatcatacctacaaaatgc

SEQ ID NO: 873858 - DNA, 99 bp, Homo sapiens
atttccttgggtattagctgaatttggagttcctcttgcttcattctgctgaagtttttcctccatacttaaagctgtgggggagtctaagagggcaat

SEQ ID NO: 873859 - DNA, 75 bp, Homo sapiens
gcgaagctgccaaagccttagacaagagctcgaggccatgagcagatataccagcccagtgaacccagctgtctt

SEQ ID NO: 873860 - DNA, 99 bp, Homo sapiens
cccagcactttggaaggccgagaggccttcgaggaagaggcccacctccttcatgggcctctgagcctgaacgcccatccattcttagtgcatcagaac

SEQ ID NO: 873861 - DNA, 99 bp, Homo sapiens
acatgatcctcatcttttatacactcttagtgctgtccagatctgggacttggctagtggcaaattaaaactgtcattgactgggcatattagtactgt

SEQ ID NO: 873862 - DNA, 98 bp, Homo sapiens
atggatttgccatgaccagctttgtcacttttgaagcgctggaggtgaagttcatccacgaccagacctccccaaaccccaagtacagaggattcttc

SEQ ID NO: 873863 - DNA, 98 bp, Homo sapiens
tcaggcaccctggtgcccagccgggaactccccatcgcgttttgccagcgataatacgcctcagggttggccaacggtccagatgtgctggagacaga

SEQ ID NO: 873864 - DNA, 99 bp, Homo sapiens
gttgtccaacagaacgacctagtatttgaatttgctagtaacgtcatggaggatgaacgacagatccaggatgagaagactgataaaagaagaagctag

SEQ ID NO: 873865 - DNA, 98 bp, Homo sapiens
ttgatgaagcacttgtgaaaagttcatgcttacacccctggtccaaaagaaacggtcaacaactacaatatcagcaatgtgtcccataactatgcccg

SEQ ID NO: 873866 - DNA, 99 bp, Homo sapiens
gtgggaaggtgtgtccggaggtttgcaggggtgcagtgtgtctggtcttatgaggtgtcagttgtacccgaggcgttctcagcagcagcaagtacctgt

SEQ ID NO: 873867 - DNA, 99 bp, Homo sapiens
cacagtatgggatgttggtggtcaagatagaattaggcctctctggaagcattacttccagaatacccaggttatcaatactctggctgaccatcatca

SEQ ID NO: 873868 - DNA, 98 bp, Homo sapiens
gccgccaccgcaggtcgaggacggtcggactcccgcggcgggaggagcctgttcccctgaggaatgcgatgttaattctggggcattgatgttttaca

SEQ ID NO: 873869 - DNA, 99 bp, Homo sapiens
aaattgctcacagctgatcctaagatgattcagtccctcaaggcgttgattgaaaatgcagatgctgtatatgaaaagatcgtacattgtcagaaggca

SEQ ID NO: 873870 - DNA, 99 bp, Homo sapiens
ctaaagaagctcagaatgaattatttgaagcacaagtaagagttccctatttcattgatttgaaaaaaccacaggatcaaggtttgaatcacacgtgta

SEQ ID NO: 873871 - DNA, 99 bp, Homo sapiens
tcttgtgaagcagcaggcgccaagtgatgaagcctcagttttatgaccctgtggagccagtggactttgaaggacttctgatgacacacctgaacagcc

SEQ ID NO: 873872 - DNA, 99 bp, Homo sapiens
cctggagtctgcgaaggccgggacccggttccccggcccacagtgggggtgtgcaaacccgagagaactgggtggaacctaacttcttgtggaacaagt

SEQ ID NO: 873873 - DNA, 101 bp, Homo sapiens
gcctcctgagtagctgggattacaggatggatagaatgacagaagatgctcttcgcttgaatctgttgaagcggagcttggacccagcagatgagcgagat

SEQ ID NO: 873874 - DNA, 99 bp, Homo sapiens
gagaaacccggagggcgccgggataagaccatcatcatgtggaaactgaccagggatgagaccaactatggaattccacagcgtgctctgcggggtcac

SEQ ID NO: 873875 - DNA, 99 bp, Homo sapiens
aacaaaccttctcatctttgtggtcgtgtttttaaagtaggagagcctacatattcttgcaggtagcgatgttgatttgtgctggattcctgattgcct

SEQ ID NO: 873876 - DNA, 99 bp, Homo sapiens
ccagtgtgcagaagttctcgaatcattctttgtacagaaattgaaaggcttcaaagctagcaggttctaaggcccagcagctactacaaggattgcaag

SEQ ID NO: 873877 - DNA, 99 bp, Homo sapiens
aaacagtcggtgtgtgctgagcaaatggaagaacaaatatgtctgtcagcacctgttcttcccggagcctatcagcaaagccattcccaaggctatggc

SEQ ID NO: 873878 - DNA, 99 bp, Homo sapiens
gtacagaactgggccgctcatgaactgagacaagtctttcctcttcttacagttgatacctccaatgaagaccatgttgggcatgaccggcctaggata

SEQ ID NO: 873879 - DNA, 99 bp, Homo sapiens
gggaggtcctgactttgcccactgtctgctggaaacccagaagttctgtgaacaagtccatgctgccatcaaggcatttattgcagtgtactatttgct

SEQ ID NO: 873880 - DNA, 99 bp, Homo sapiens
ggggaaatggctgcgagaccctagaggcctgcgccaagagtcgaagctaaaccagaagttcaatctcagccacctcgtgtgcgtgaacaacgacctaga

SEQ ID NO: 873881 - DNA, 99 bp, Homo sapiens
tgcgctttgagctactgggctgtgagctgaacgagaatggtgacttcttggccctggatcttggaggaaccaatttccgtgtgctgctggtgaaaatcc

SEQ ID NO: 873882 - DNA, 99 bp, Homo sapiens
gactgcgccgagctgcacgtcctcgaacgcgaggccaacagccccggtattgggagagttgctgctacatctttaggaaatttgactaaccatggttct

SEQ ID NO: 873883 - DNA, 99 bp, Homo sapiens
tgtactacagccagtcttctatgtttccacatcggtcagaaaaagatgaatctggtgaacagtaacaaactttggtgaaatttcaggaaccatagccat

SEQ ID NO: 873884 - DNA, 98 bp, Homo sapiens
attatggcatagatcttgggaaaattgcggttttgcacactagggaccaagaagccctcggggacactgctgagaaaagactgccgaagggaagacca

SEQ ID NO: 873885 - DNA, 98 bp, Homo sapiens
gcctacccgggatacggaggagggtggtgccggggaggacagtgtgtgaaatatggtgatgaaggccccaagcccacccatggccactggtcggactg

SEQ ID NO: 873886 - DNA, 98 bp, Homo sapiens
aaaaacccggtactgtgcactattctttcccaggaaccattggataaggataaagatcaatgtccgagttaccaccatggatgcagagctggagtttg

SEQ ID NO: 873887 - DNA, 99 bp, Homo sapiens
caacatgtctgtacctactgatggtgctgtaaccacctcacagattccagcttcggaacaagagaccctgtctcgaagatatgactccaggaccactat

SEQ ID NO: 873888 - DNA, 98 bp, Homo sapiens
tgacagcgaagcggagcaagagggaccccagaaactgatccgcaaagtgtctacctcggggcagatccggaccaagataacaacgaacttgatgcaag

SEQ ID NO: 873889 - DNA, 98 bp, Homo sapiens
ttggagaactgctaacctagggctactgttgattttgactatcttcttagtggccgaattgccaagaagatgcttttagaagaaattaaagccaatct

SEQ ID NO: 873890 - DNA, 99 bp, Homo sapiens
agcagtacagcagtgataagcgggtaggcaggactatgtctcaccatgcagcagctctcaagattcagaatggacagtttagaagaacctcagaaaaaa

SEQ ID NO: 873891 - DNA, 99 bp, Homo sapiens
accgtcgcctggtgcctcccgcctccgtgtgccctggttgtgagaagacgtctgtgtcgtgcgtatggatggagcagatctgtgttttgaaatcgtaaa

SEQ ID NO: 873892 - DNA, 98 bp, Homo sapiens
tcgaagcgagggtctgaagttcacgactactagaaggggaggggagtggaaaggctctcagtgaaaaaggaggagacatcacagctttcccagatcgg

SEQ ID NO: 873893 - DNA, 99 bp, Homo sapiens
ctgcgcttgctgctgggaagtggcactattcctgatcagagaactccagttgcttcaacacacagtatcagtagtgcagccaccccagatcgaatccgc

SEQ ID NO: 873894 - DNA, 98 bp, Homo sapiens
tgggctcgcggcgtctccggggaaagccgtggccccgagggcggatccgaggaactgaaattaccattcacttttttaagtggacatattcatgaatt

SEQ ID NO: 873895 - DNA, 99 bp, Homo sapiens
ctccggagccgcacaaaccagggctcgccatgaagccaggtaatgctggaggatggaagaagcaaagggtttggcttcgtctgcttctcatctcctgaa

SEQ ID NO: 873896 - DNA, 99 bp, Homo sapiens
gccccggcctcccacactcctgagccaggaacagatcaagacgcatcttctctccagactgccgatcccagaaagccaggtgatcaccattaaccccga

SEQ ID NO: 873897 - DNA, 98 bp, Homo sapiens
gtaaggccaaaaatgtgcatactcacagagttagagagagggatggtgggtttggattcaggatttgttcctagtgtccaagattttgataagaaact

SEQ ID NO: 873898 - DNA, 99 bp, Homo sapiens
ctgtgacctgcatgtactgggggattcgcagggaggatgtcgggacaccccggaagctgggaaatgactggacccttgtcgaaactcctcctggggagg

SEQ ID NO: 873899 - DNA, 99 bp, Homo sapiens
gtgagggcctgggctcagtgctataacaccacctggagtgagtggagccccagcaccaagtggcacaactacactgaagagcagcagccggggaaggag

SEQ ID NO: 873900 - DNA, 99 bp, Homo sapiens
gttactttaacacacaagttcccatcagaatgcctatatttgagaaccacacgtgccctggcacaggatccactggtatagcagcacactcagaagaac

SEQ ID NO: 873901 - DNA, 98 bp, Homo sapiens
ctaaaagtgcggaggtcaaactggcaatatttgggagagcaggcgtgggcaagtcagtgtctgtagtgggaagtcttcatgagctcagttggccatat

SEQ ID NO: 873902 - DNA, 99 bp, Homo sapiens
cttcataaaatacggtgtttcattagtatccaaaaactgttcgatgtgatttatgagctggttactcgctctgagtctttggcctgctgattacgaatg

SEQ ID NO: 873903 - DNA, 98 bp, Homo sapiens
ctgtcagccttctaccccatgagaaagaccagaaatggactcagaactcaaggaagaaattcctgtgcatgaggaattcattttgtgtggtggagccg

SEQ ID NO: 873904 - DNA, 99 bp, Homo sapiens
tctatcttcttccagagccccgagaccctggcttcctaccctgccccccaggaggaaaagtccaacctgatcgtggtccagagaggtcacagcccaccc

SEQ ID NO: 873905 - DNA, 98 bp, Homo sapiens
acggagttgcgtcccggggacttggggccgcagggagtaaaggcatgacttcctggcaccacagggaaaatcgggtgcaagcccagaaactatttccc

SEQ ID NO: 873906 - DNA, 99 bp, Homo sapiens
tttccttcgtacccacagtgcttcatgagagatagcaaagccattgtggatgggaacctgaagctcatcttgggtctggtgtggacgctgatcctccac

SEQ ID NO: 873907 - DNA, 99 bp, Homo sapiens
ctctggagcttcttcatttaccttctgcggaggcagatccgcacggttttttgccctgacatctcttcgtcttgtgtttttacttgcatttggcttgat

SEQ ID NO: 873908 - DNA, 98 bp, Homo sapiens
cacccctttgaagagaagattgtcagcagttcgtgcacactggtttttggctgttgtttgtttccccggtttggaaaaaccaaagtatgaacctaatc

SEQ ID NO: 873909 - DNA, 98 bp, Homo sapiens
gagattcccttgcaaatttacatacgagaatggcttgtgaaatcatgcctctgcaaaggactccaagccccctgatccttgatcagaactacattaac

SEQ ID NO: 873910 - DNA, 99 bp, Homo sapiens
gaagaggacattcgcaatgccatcatggccatccgccggaaccgcgtggccctgaaggggtctgttcctggtttcccagatgcataaaggaagacatat

SEQ ID NO: 873911 - DNA, 99 bp, Homo sapiens
aggactttcttccagcttctgctgtccttctttgtggagagcaagaggagaaggcagagcccccccaggctatgaatgccctgatgcggttgaaccagc

SEQ ID NO: 873912 - DNA, 99 bp, Homo sapiens
agctgtttcctgagttgctgtttcttgggactgcgaagctatacaggctattaaagaagctaattgatcaagaaatcaagtctcaggaggagaaggagc

SEQ ID NO: 873913 - DNA, 99 bp, Homo sapiens
ggcattgctaaacacgtggaaagaatcaatttgggattagaaatgatatttgccaaatttgatgaagtgcaaagttcaggcggtatgattttgagtgtc

SEQ ID NO: 873914 - DNA, 99 bp, Homo sapiens
agccaaaccacaaaacagattggcagaaaatgatgaaatttggaagaaagaaaagagaccgagtggatcatatcctgccttttgtctgtgggaaaagca

SEQ ID NO: 873915 - DNA, 99 bp, Homo sapiens
ctggagggtcccgtgccagatcattcaattccgagtactccaagtcgatagttgactgtgatgacgatcacattgccataacttgccaagacacttcca

SEQ ID NO: 873916 - DNA, 99 bp, Homo sapiens
ggagaacctgcggcggccggagcgttggttaccacagagaagcgcttcctcaaagacagtttgtacaatgaaggaatcctaattgtatgggacccatct

SEQ ID NO: 873917 - DNA, 99 bp, Homo sapiens
cacctgtgtccaccaggccctgaagggcttcacgaccaaaggtgtcacctcagtctctcagatcttccacagcccagaatctcgctctgtcgcccaggc

SEQ ID NO: 873918 - DNA, 99 bp, Homo sapiens
aaacactaaaaatggagttgatgtattgcctaaaatcatccagcattagtgccagcagtagttcccaagggctgtctcagccatccacccagacgactc

SEQ ID NO: 873919 - DNA, 99 bp, Homo sapiens
gggatgacttgtgcacaaatcgtattcaatctcttggcgatttcagtctcgtgatccgcccgcctcggcctcccaaagtgctgggattacaggcgtgag

SEQ ID NO: 873920 - DNA, 99 bp, Homo sapiens
ctgctcgataaatcagacagaacagttaatcctcaatttaagcctgatctaacccctagaaacaggcactactgcagtcttcagttaagcaacaagtag

SEQ ID NO: 873921 - DNA, 99 bp, Homo sapiens
aaacctccttatgctgatatacatccaatgagggttgaaaggattgttgacaaaaggaaaaataaaaaagggaagacagagtatttggttcggtggaaa

SEQ ID NO: 873922 - DNA, 99 bp, Homo sapiens
tggctgcaaccttagcgacatcaggaagaacagggtcgaggatcgagatagggccagatttgagtgtgtgaatttttgagtgaaacctggaacccaaat

SEQ ID NO: 873923 - DNA, 99 bp, Homo sapiens
tgggagctgaggaaccagatatcttgaaaagctgccagaaaggttacaggaggttccagtggcatcgggaagtgcattgctatcgagtgctataaacaa

SEQ ID NO: 873924 - DNA, 98 bp, Homo sapiens
gaacaatcttttgttggattgaaacagctaatcatgatgatgtgcctgcagatatggttgcagaagaatcaggtcctggtgcacaaaatagtccatac

SEQ ID NO: 873925 - DNA, 99 bp, Homo sapiens
cccaatgcggccgcgagaagcagcgggggggcaggcgatcgaaggtacctactgtcaacaacgggaagtggaggccattactgaaggtgtagaggaaga

SEQ ID NO: 873926 - DNA, 99 bp, Homo sapiens
gacgattgcggagctgaagttcaggcagcgggagcgaggaggctctaagcgaaagacatgaggcctcagcctgaaatgaggttgttttgaggtcatctg

SEQ ID NO: 873927 - DNA, 99 bp, Homo sapiens
ggacctgagccgcgaggacacgggctgcaacctgcagcacatcagcgaccgggagaacatagacggtgcagaagtctacttcagacatcgtgtgacaca

SEQ ID NO: 873928 - DNA, 99 bp, Homo sapiens
cctcccttccccacgacggggcgcctctgcaactcacaactgggagacaagacttgaaaatagtgtgtcagccccagagcctgacatttctgaagaaga

SEQ ID NO: 873929 - DNA, 98 bp, Homo sapiens
agaaagtaacaagaatcattcttgcagcatttcgtttgacgaaggatcagagattggtgtattcgggcagactgcttcccgatcatctgcagctgaaa

SEQ ID NO: 873930 - DNA, 99 bp, Homo sapiens
acctgcgtaagggggcagagacagatccggaagatgaagcttcctggccgggaaaacaagacggccgtggttgtggggaccataactgatgatgtgcgg

SEQ ID NO: 873931 - DNA, 99 bp, Homo sapiens
atgagaacatcatcaaaaagctgaatgcacgttataacttgactggctccaatgcaggtggccagcatcgaaatgttcagccttttagtgatgaagatg

SEQ ID NO: 873932 - DNA, 99 bp, Homo sapiens
gagtgtgggaggagagagcaagcagggaaagagagcgccaggtgcttagcaggggctttgttatgcacctaaagccatattggaagctccagaagaaag

SEQ ID NO: 873933 - DNA, 99 bp, Homo sapiens
tacctgataaataccctttcaaatctccatctataggcctccggaatgccccccgctgctgggcagtgatccagcccctgctgtgtgccgtatacatgc

SEQ ID NO: 873934 - DNA, 99 bp, Homo sapiens
ggaaacttgcagcaaagccattcgggttggagtaattgtaatgctacagccctttgactatgatccgaatgaaaagagtaaacacaagtttatggtaca

SEQ ID NO: 873935 - DNA, 99 bp, Homo sapiens
ttggctcctccctgccagatagctcttattttgaggctgtggatctttccattgatgagtccagcttgacaggtgagacaacgccttgttctaaggtga

SEQ ID NO: 873936 - DNA, 98 bp, Homo sapiens
tgcaatccttcggttacaagcggtttggagtgcatcatcgacgaggactgtgggcccagcatgtactgccagtttgccagcttccagtacacctgcca

SEQ ID NO: 873937 - DNA, 99 bp, Homo sapiens
tcctccggcccgagatgaatcctgcggcagaagccgagttcaacatcctcctggccaccgactcctacaagctttgaagaaagatgacaccacctttga

SEQ ID NO: 873938 - DNA, 99 bp, Homo sapiens
tccagactgaggaagacccggaaacttaggggccacgtgagccacggccacggccgcatagggaaaaaatgcatttttcaaagacctaacttcaattca

SEQ ID NO: 873939 - DNA, 99 bp, Homo sapiens
acaatttcacctttgaattcagccagtggtcacagctggatgtttgcgacatcccagagagcttccagactcattgacacaattgcctcggagatcgga

SEQ ID NO: 873940 - DNA, 99 bp, Homo sapiens
tcaatgccattgaattctccaacaatggaggccagtggctggtctcagggcgtctctggccgagcctctttttgtggaaaacgacagcagcagcagtgg

SEQ ID NO: 873941 - DNA, 98 bp, Homo sapiens
tttattcctcaactgaaatgttagattttggtacactaagaacacaagatggcctgatatgaaggagtcacgcctcccgcctcccggagctgcccagt

SEQ ID NO: 873942 - DNA, 99 bp, Homo sapiens
gttttctgttgctgctgttgctgttcagtgcagaagcgtttcaacgaaccaaacttttaaatggaccgggagatgttgaaacgggtacaagcataacag

SEQ ID NO: 873943 - DNA, 99 bp, Homo sapiens
ttggaacctttgtacaatgactatcgaaaaatcaagagccagaaccgaaatggggtgaagcagccgacacgagtcgttgttcataaaacagcttttgaa

SEQ ID NO: 873944 - DNA, 99 bp, Homo sapiens
tcgtgatccagaagtccagagctgaggactgcctgtttgcaggtggaaatggatattgttgaaaaactggtgaaaatgataccttgtgagcatgaagac

SEQ ID NO: 873945 - DNA, 99 bp, Homo sapiens
ccgaaatcccaaactccgatagtccatagcaagggcgtgcgcgtcaaagtaacctgtagcccagctctctgtgagcgagatactgccttagccttggcc

SEQ ID NO: 873946 - DNA, 98 bp, Homo sapiens
ggagccatggactgcagcctcgtgcggacgctcgtgcacagataccctgcaggacgctggcatcggattcatcctggtgatagaccggcgacgggaca

SEQ ID NO: 873947 - DNA, 99 bp, Homo sapiens
cacctgtgcgggatggaacaaaagggtttgccttcccggattgggcctacaagccagagtcgtcccctggctcaaggcagatccagctgtggcacttta

SEQ ID NO: 873948 - DNA, 98 bp, Homo sapiens
gttgtcagtggagagagtggtgctggaaagccagatgaaaactcgctggatttttcctcctgtatgttacggcctgggattaaaaatgctcaggagct

SEQ ID NO: 873949 - DNA, 98 bp, Homo sapiens
gggaactctgcgggagtcgcggcagctccgctcccagagacccaggagttgggcccagcgtccctcccggaacgggtgaagtaccatgcaagcatttc

SEQ ID NO: 873950 - DNA, 99 bp, Homo sapiens
cgacagcctggattataaggatgtcatccccatggctgatgcagcaggcatcatccgctatgcaattgggaaagtgactgagaccgaagatgatagtga

SEQ ID NO: 873951 - DNA, 148 bp, Homo sapiens
gcagaaagtgaagctgtttcgggccagcgacccgctgctcagcgtcctcaacatctttgcttttgccatcgtgttgaaaaatcactcttcttcagatccaagttataattatgaaattcactcatctcgagtggtttaccccccacat

SEQ ID NO: 873952 - DNA, 98 bp, Homo sapiens
cccagctgagggactcctgcagacatggctgttggagatgaaccttgttcatgcaccccagtacctccctgcacttggctattcaaaacgggtccatc

SEQ ID NO: 873953 - DNA, 99 bp, Homo sapiens
ggtgaagtggcaggaggaggaggaggggctccggctggtctgtggtgagtgaagcagccgacacgagtcgttgttcataaaacagcttttgaaagttga

SEQ ID NO: 873954 - DNA, 99 bp, Homo sapiens
gcaggaacggctccagcatcaagatccgtctgacagacaccattcgcttttcacccaagatgatttgatgtcttataaaactctgatgaaccatgatgg

SEQ ID NO: 873955 - DNA, 99 bp, Homo sapiens
cccttaaggaaaagacagttgaaaatcttgagaagtatgtagtcaaagatgctggttggaaggaaaatcatgcaacattcatgagcgaactaaaaaatc

SEQ ID NO: 873956 - DNA, 99 bp, Homo sapiens
ttcctccaactgcaaaaccaacttgcattttgttcccaacatcacctttggtcaccctgtggtagaaagccttcgaaagcagctaggccaggacccttt

SEQ ID NO: 873957 - DNA, 99 bp, Homo sapiens
tgggattgatactcttctgccacttgcagaagctagacagtgtcttttctgcatggtgaactattttcagtccttgctataatcccagctacttgggag

SEQ ID NO: 873958 - DNA, 99 bp, Homo sapiens
ggagatcctgatgaagttcgagcactaatatttaagaaagaagatgttaactttcagttttcaggactctacatcctgtccttcactgtcatcatggtg

SEQ ID NO: 873959 - DNA, 99 bp, Homo sapiens
ctggcctctacctccatggttactacacgattgtcctttaattcctgagctgagacctgtacaggaaaggtgcaaccgtggcagtgttgggatggttgt

SEQ ID NO: 873960 - DNA, 99 bp, Homo sapiens
cccctgtacacatcaagtcagaatgggctagcccatcagggaagcagcggtagaagaaatctgggcgtggccgtgaccatctggccggcgcgcaggatg

SEQ ID NO: 873961 - DNA, 99 bp, Homo sapiens
tgactcatgggccctggcggtggacgagcaggaagctgcggctgagtcggccctcaggaaagcagagagcttgaagaaatgtctctctgtcatggaagc

SEQ ID NO: 873962 - DNA, 98 bp, Homo sapiens
actgacgtgcagaccctggagcataccaggaaaaccagtagattcccagacatcgcgaagtgaatctgaaattgtgccaaaagttgctaaaatgactg

SEQ ID NO: 873963 - DNA, 99 bp, Homo sapiens
tgacccacttcaacaagggcccttcctatgggctctcggccgaagtcaagaacaaggtgtgaccatgaagctcatggatgaggtcgccgggatcgtggc

SEQ ID NO: 873964 - DNA, 99 bp, Homo sapiens
ctgagtttcccacttgattacccgttaagtcccccaaagatgagatttacctgtgagatgtttcatcccaacactggtcacctgacttttgaatgccgc

SEQ ID NO: 873965 - DNA, 98 bp, Homo sapiens
agactgtcaactgtgatcctggactcgctgtagagagagatcatcattgcctgaatttagctttgtgactgcaagagcaagaccagttcctgtctgga

SEQ ID NO: 873966 - DNA, 99 bp, Homo sapiens
catcattgtgaactgggtgaacagaacgttgagtgaagctggaaaatcaacttccattcagagttttaagatggataatcaaatagtggtttctgacta

SEQ ID NO: 873967 - DNA, 99 bp, Homo sapiens
gtggatcacttctctattgccttgccctgttgacaagacctccttcatcatgtgtttggaagagatatcttggcaatgcttcagtggtgtttcaccata

SEQ ID NO: 873968 - DNA, 99 bp, Homo sapiens
caggatttcctggaagcagagaaatggatgagttagatgaactccgtgctgagatggaagagatgagagacagttatttagaggaagatgtttaccagc

SEQ ID NO: 873969 - DNA, 99 bp, Homo sapiens
ccagtgtatccacagccccgacctttgatgagaactcagctgtccagtctattatcctcccagtccacaacgctgaaccgtggctggacgaatgtttga

SEQ ID NO: 873970 - DNA, 99 bp, Homo sapiens
tgtgggaagttgtattcatcaataatgaaatgctgactaaggaacaaggtgcagagtccagtggtgacatggatgttctcctgacccatcccagcttca

SEQ ID NO: 873971 - DNA, 99 bp, Homo sapiens
agaccgcaatgagccccaccgaatccaacaaatcctcaactacatcaaaggtgaggaaaatagcagctgaatactatgacaacctccctcactacaatt

SEQ ID NO: 873972 - DNA, 100 bp, Homo sapiens
ggtccccaacgcatcatgccagggacacaatgaccccgtgggtcccccgataatacggccgggcaggacgcttggctccctggcatgatgcgttggggac

SEQ ID NO: 873973 - DNA, 98 bp, Homo sapiens
ccaagtcaggatatgtgcctttcagctttaaagagaattgaagttctggacatggcaagacatgtgccactctatcgggcactgctggaattgcttcg

SEQ ID NO: 873974 - DNA, 99 bp, Homo sapiens
agatgtctcgctccgtggccttagctgtgctcgcgctactctctctttctggcctggaggctatccagcgaaaatatgttgtgttcttcttttaccctc

SEQ ID NO: 873975 - DNA, 99 bp, Homo sapiens
gccaagtaggcactggctggtccatctggagcttccccaactgttttcttcactttaaaaaacatttcccgccaccttactgtaagtcactactgataa

SEQ ID NO: 873976 - DNA, 99 bp, Homo sapiens
agcagaccacagcattcaggcatcctgtgacgggacagttttctccagaaaatagtgaattcattcttcaagaagaagaagggataaaccgccaggttg

SEQ ID NO: 873977 - DNA, 99 bp, Homo sapiens
ctggcactcctggacaggatggattgccagggcttcctggcccgaaaggagagcctgaatgttacgttcataacttactaaggattagtgtatattttc

SEQ ID NO: 873978 - DNA, 99 bp, Homo sapiens
agctaagttcacttctgaactaaggggttcctccaaatgttggctgaaattcatcccaaggctggtctgcaagtacccgaggattaataaagaatcttt

SEQ ID NO: 873979 - DNA, 99 bp, Homo sapiens
ggaaagccaaagagctgaatgttatgtttattgaaactagtgcaaaagctggatacaatgtaaagcaggtccagtggcattgcagagcacggatggttg

SEQ ID NO: 873980 - DNA, 98 bp, Homo sapiens
ttgaggaacatggcgttgctggtgcgagtccttaactccatccggcacaacctgtcactgcatagtcgattcatgcgggtccagaatgagggaactgg

SEQ ID NO: 873981 - DNA, 98 bp, Homo sapiens
agaagatgcagcacaatgttctagtagcggagctcccagatggacgtatcatcaaagttgggggagagagatttgaagcaccagaagctttatttcag

SEQ ID NO: 873982 - DNA, 98 bp, Homo sapiens
gcaaaaagaggttgattacagcggcctcagggttcaggcaatgcaaataagtcaagttcatccgagaagtaacaccatatatcaagaagccatcatta

SEQ ID NO: 873983 - DNA, 98 bp, Homo sapiens
tgggaagtctccatggtgaagtataggctgaggctacctgtgaacagtacgcagtgaatgtttgcctgaaacagtatgttgagctcttgatcaaagaa

SEQ ID NO: 873984 - DNA, 99 bp, Homo sapiens
atggcggagctgacggtggaggttcgcggctctaacggggctttctacaagttcaaatctgaacatcaatgatgtactagggaactactcattgactct

SEQ ID NO: 873985 - DNA, 99 bp, Homo sapiens
gtgggggccggccccggcctggtcctggccccggagctgttgctggacccctggcaggcaaaatgcattgatcactacaccaaacaatgtgtggaaaat

SEQ ID NO: 873986 - DNA, 98 bp, Homo sapiens
cctcatctagcccagaggatcggaatgacagatgtgtacgatccatagcagaatttttggcaaagtctaagtcagaagagacccaggaggaagtgcag

SEQ ID NO: 873987 - DNA, 99 bp, Homo sapiens
acgcggctggcaagactgtttgtgttgcgggggccggacttcaagaagctaaaccagccccagaaatatttgaaaatgaagtcatggccctgctgagag

SEQ ID NO: 873988 - DNA, 99 bp, Homo sapiens
ggcagatcgtgggacttctcagcctccataattgagtgagccaattccctgtgctgtgatcttggctaccatgcaagtctgaacagagccctaagaaca

SEQ ID NO: 873989 - DNA, 99 bp, Homo sapiens
gagctcatcagactgaccgtgtcttacatcagttcagagagaccatcatcaaagaggggatgctgaccaaacagaacaattcattccagcgatcaaaaa

SEQ ID NO: 873990 - DNA, 98 bp, Homo sapiens
ggggcagccgccgctcctccgggttttcggctttgtgagaaaccttaccatcaaacacgatggccagcaacgttaccaacaagacagatcctcgctcc

SEQ ID NO: 873991 - DNA, 99 bp, Homo sapiens
ctcccaaattgctgggattacagtacctccctgcacttggctattcaaaacgggtccatctgatgaatcctatggttccaggattaacaggcagcaaaa

SEQ ID NO: 873992 - DNA, 99 bp, Homo sapiens
ctcagtacgccacctactattacccccagtatctgcaagccaagggtctcctatggacagaagtgcgggcaaggagctttgttcctccccgatgtcacc

SEQ ID NO: 873993 - DNA, 99 bp, Homo sapiens
catcagattccatttcaacttctgccgacaacttttctcctgatttgaggggtttggacagaggagccaaaggccaaatttccactttcagcagtttta

SEQ ID NO: 873994 - DNA, 99 bp, Homo sapiens
gatcaataagcaatgcagtctccatgtttatgttgtggtgacagacatgtaaaaacttggctagaagatatgaaattagggaaggttctccaagctgga

SEQ ID NO: 873995 - DNA, 98 bp, Homo sapiens
cctgttccaccttcagagcgtcacggcgtacgccctcatggggaaaatctccccggtgactttcagtttaagtgctgtggggctgctaactacacaga

SEQ ID NO: 873996 - DNA, 99 bp, Homo sapiens
ctacagaaacctggtctccctagaatcggtcgaggtggacggtttggccgtaaaggtgtggctattaacatggtgacagaagaagacaagaggactctt

SEQ ID NO: 873997 - DNA, 99 bp, Homo sapiens
gaacttcgagatggattccaacatcctgctagacttgttaagattttgggaaccagtaggacattgacatacatccgagaacattctgtggtggatcca

SEQ ID NO: 873998 - DNA, 99 bp, Homo sapiens
tgcggacgtccaagctgctgcttccggatgactttaagggtccttctcccacacctgaggatgtctccatgaaggaagagaatctctgccaagcttttt

SEQ ID NO: 873999 - DNA, 99 bp, Homo sapiens
gcagtggcgcctaaagtctgagagagggaagtcgcctctgtgctctgccggtggtggtgtgcacattgagccccggtatagacagttcccccagctgac

SEQ ID NO: 874000 - DNA, 99 bp, Homo sapiens
tcagtgaagcatttcgcctgaccattacacgcaaagatattcaaactctaaaccatctgaattggctcaatgatgagattgtgcttcaagaagaccata

SEQ ID NO: 874001 - DNA, 99 bp, Homo sapiens
ctacgggaaggatcgtccagtggctgaggctggacagagcacaggaaattgacaatggcccttcagctatgctaggtctataatgggaagtgtcacagt

SEQ ID NO: 874002 - DNA, 99 bp, Homo sapiens
ggtgtcggaggtctcatctttgaactactgccggagcttctgccaggtgggcaccatgtccttgaagcttcaggcaagcaatgtaaccaacaagaatga

SEQ ID NO: 874003 - DNA, 99 bp, Homo sapiens
atttaacatctacgtcagtgataaaatctccttgaatcgctctctcccagatatccggcacccaaagattatgatcttttgggtgaaaaaataatgtcc

SEQ ID NO: 874004 - DNA, 99 bp, Homo sapiens
ccggccttcagcgagattccggacaaggagttccagaatgtcatgacctacctcaccagcatccccaggcctcatgcattgtgcgtcagcagcaatgtt

SEQ ID NO: 874005 - DNA, 99 bp, Homo sapiens
gtttggaataaatttagaaaatagagttggagccatctgaacccactttgcgtggctgctggatgtgctgggttcttggggaaggatgcttgtccatgg

SEQ ID NO: 874006 - DNA, 99 bp, Homo sapiens
ctcctatctccttacagcccgcagacacaagacttttgatcagtggaaagatatgataccggaccttagtgaatataaatggattgtgcctgacattgt

SEQ ID NO: 874007 - DNA, 99 bp, Homo sapiens
ttgccactcagctgacatatgaaggactcattgatgaaatttatggcattcagaacacctgaacccccgccaacaaacaaatggcaacttgataattgg

SEQ ID NO: 874008 - DNA, 98 bp, Homo sapiens
ttcgtccgccgagctggaccggagccgccccgcggtttcaggtatatgactgatgggatgttacttcgtgaagctatgaatgatcccctcctggagcg

SEQ ID NO: 874009 - DNA, 99 bp, Homo sapiens
gaaagagaagcataaacctatcttctttcattatggagggaggtttggcagatggagaacctgatcgaacttcgatatggaatatatgaacgctgtcga

SEQ ID NO: 874010 - DNA, 99 bp, Homo sapiens
cttgttttgaagctggtttgaagaaatctataattgactgcttccttgtcgtctgcctttatggagcgcagccgcatggtaagctggaagcgcaggaag

SEQ ID NO: 874011 - DNA, 99 bp, Homo sapiens
ggatctccaacatggcagccttttccttagaacaccaaagattgtctctggcaaagagaaattaatggacttacgaaatgaatacctgcaagcggatga

SEQ ID NO: 874012 - DNA, 99 bp, Homo sapiens
tggagttgctactaaaaagagaggtgcctttatctgatgatgatgaaagttacacagttccttgagggagcggctgcagaaagccattgaggaggagga

SEQ ID NO: 874013 - DNA, 99 bp, Homo sapiens
gcggccaactccaatgggcctttccagcccgtggtccttctccatattcgagatcagcttgaacgggtctttttacgacttggccatgctgaaacagat

SEQ ID NO: 874014 - DNA, 99 bp, Homo sapiens
caggaggaccggctgccgccgccgccgccgccagtggctgctgggaaaaaccttcgacaccttctgccctctgggccctgccttggtgaccaaggacag

SEQ ID NO: 874015 - DNA, 99 bp, Homo sapiens
cacgaagttccggtagctgccgtaaatgctggagtaggccaagttcaaagcctcgccgcttggcacgcacgatgcccttcttctgtagcacgaacgtgg

SEQ ID NO: 874016 - DNA, 98 bp, Homo sapiens
ctccgggtcgctggcggcgtggacacctgagtcccggggtaggggtctcccgcgaggtgacatctgttcccgagctgttcctgactgcagtgaagctc

SEQ ID NO: 874017 - DNA, 99 bp, Homo sapiens
acctacaggtggagttggagcagtagctctgctaattgggccaaatgctcctttaatttttgaacgaggctgctttgctggctctgcaagaaaatggac

SEQ ID NO: 874018 - DNA, 98 bp, Homo sapiens
tgtaagaagtgcgaagggccttgccgcaaagacccttcgcaggtgttacagtcgggtgaaagaacatggtgttgggaaaagaaagagcagttacacat

SEQ ID NO: 874019 - DNA, 99 bp, Homo sapiens
aagagcagcgtaaagaaagtggaaagaataaacacagctctgggcaacagaacttgaacactatcacctatgaaagtctcgctctgtcgcccaggctgg

SEQ ID NO: 874020 - DNA, 99 bp, Homo sapiens
actccttgaccagcatcttggctgaccttgagtgcagctccccctataagcctcggcctccacagggttttttgattaactcaaaaccagagaatgcct

SEQ ID NO: 874021 - DNA, 99 bp, Homo sapiens
cttcagaggcccaaattgaggcgcaatgatgagaggatgtggtggtctactctgatgtcaatcttgagggctaggttgcacaccgatgctccagaattg

SEQ ID NO: 874022 - DNA, 99 bp, Homo sapiens
gtgcctgcaatttgccatttatttgtaataagtgctttctcctgctcaagacagccacacgaacacggatctccccccagtgtcagagcagatcatgca

SEQ ID NO: 874023 - DNA, 99 bp, Homo sapiens
ctatacatcagatttgtttgctacacaagatcctcagattgaaaagacttttgaagttaatgtacttgcacatttctggtctcactctgtcacccaggc

SEQ ID NO: 874024 - DNA, 99 bp, Homo sapiens
atcacttcatctgcaaatatttcaataagtacccaaaagttttcggctttgtgagaaaccttaccatcaaacacgatggccagcaacgttaccaacaag

SEQ ID NO: 874025 - DNA, 99 bp, Homo sapiens
catccattagagcatcctttggtgaaccatttaaagttacattaaagaccttccatgtttgactccagatcataaaatgagtaaagcttctctgattct

SEQ ID NO: 874026 - DNA, 99 bp, Homo sapiens
tcaacctggtgcagtgcgagacgctagaggagatggggttcttcctctttgcctaggcacacgactgtctatcccagatggctgcactggcctaggaca

SEQ ID NO: 874027 - DNA, 99 bp, Homo sapiens
gtataacatgcagatcgacttggtggaagcacacattgaaaacgaggcccactgcgactttgtgaagctgcgggagatgctgattcgggtcaacatgga

SEQ ID NO: 874028 - DNA, 99 bp, Homo sapiens
gagcggcggcgctccgagagctccaggagaagcaggctctgatggagcagcagagacgggtataactccaccagggaatgctccgactgtcacttcaat

SEQ ID NO: 874029 - DNA, 99 bp, Homo sapiens
cggattatagtctctcgccacagcggcctcggcctccccttggattcagacgccgattcgcccagaccacctggtggcccatggtagaatggcagaaaa

SEQ ID NO: 874030 - DNA, 99 bp, Homo sapiens
tacattttcaaggaattcttgagaggttcttggagagattctgggagccaaacactccattgggatcctagctgatccttgaggaatcaccacactgtc

SEQ ID NO: 874031 - DNA, 99 bp, Homo sapiens
ctctggggaacgagcaatgggaattcacgctggggctccatggagaacgagcctgtagcccttgaggaaactcagaagacagatcctgctatggaacca

SEQ ID NO: 874032 - DNA, 99 bp, Homo sapiens
tcgcctgctttgattcattgaaagtgcttcagaactgggccctttttcagaccccaggcagttcccaagcatttcatccctcactgagagccgcttctc

SEQ ID NO: 874033 - DNA, 99 bp, Homo sapiens
cagagcaacgaatgatgaaaggctcaccatgccttctcctatgcctgagtacctgaatgtgcactacattggggagtctgcctccagactgctgttctt

SEQ ID NO: 874034 - DNA, 99 bp, Homo sapiens
gaaaatctccccggtgactttcagcagcagggaatacagcagacagcccctcctcaacagacagtgcagtattcactttcacagacatcaacctccagt

SEQ ID NO: 874035 - DNA, 152 bp, Homo sapiens
aaggcttcaataatcagccagccttcactggagatgaacatggctcagccagaaatattgtaattaacccatcaaaggaagatgtctcaggagccatatcacatctgtcccttggggagatcccagctatggcacagccgtttgtatcctcg

SEQ ID NO: 874036 - DNA, 99 bp, Homo sapiens
agcaggcatcatccgctatgcaattgggaaaactacccctgagtgtggtcccacaggatatgtagagaaaatcacatgcagctcatctaagagaaatga

SEQ ID NO: 874037 - DNA, 99 bp, Homo sapiens
ctccaccccacgaaggatccctcacagcccagctcgggaagtggacagactgggcgtcatgacccttacggaatcagtccccaatgcctggaaattcct

SEQ ID NO: 874038 - DNA, 98 bp, Homo sapiens
ccgccttcccgcgccccgcagcgccccgcagagcagtcgaggcatgaatgctttacagttgcagaacctggcgacgctggctgctgctgcagctgcgg

SEQ ID NO: 874039 - DNA, 98 bp, Homo sapiens
taggaaagcggaagcggcctggcaggggaaggatcgagccaagcccaagaaccaagctgaggcccagaaggtcacgttcagccaggaccctacgacag

SEQ ID NO: 874040 - DNA, 98 bp, Homo sapiens
ccgagggaagatgaacgggacgcggaactggtgtaccctggtggacgtgcacccagaggaccaggcggcggtggcgacatgtctaagaatgtgagcca

SEQ ID NO: 874041 - DNA, 98 bp, Homo sapiens
tgagtctgatctggattacattcaatacaggctggaatatgaaatcaagactaatcatcctgattcagcaagtgagtgcggttaaaatcggaactgat

SEQ ID NO: 874042 - DNA, 99 bp, Homo sapiens
cgctgaagatgttgatggagaagctctaagtacactcgtcttgaataggctgatgaggaagagatgcttgataatctaccagaggctggtgactccaga

SEQ ID NO: 874043 - DNA, 99 bp, Homo sapiens
acaatttctcctgctctgcagcttctgttcagtgttctcaggcgctgtggtctcaccttccactggggcaacaatgggccatttccagcagggacggcg

SEQ ID NO: 874044 - DNA, 99 bp, Homo sapiens
gcagggccccttagcctctgggtttgcgctagcagcgtaagtatgagcccagaggacctggtcggcccttgtaccaaagaagaatctcatctagctcag

SEQ ID NO: 874045 - DNA, 99 bp, Homo sapiens
ccagggctgctgccagcacctgccactcagagcgcctctgtcgctgggacccttcaggaaaaaggctcagctcaagaaaaaaagaggtgtgcctcagat

SEQ ID NO: 874046 - DNA, 98 bp, Homo sapiens
acaccttctaagagtttggcgagtcagtgactgaagcgcccgtccattccaagtgccgtggaggtcccagcccccgctgcggttctcggaggtccgga

SEQ ID NO: 874047 - DNA, 99 bp, Homo sapiens
gtcaagttcctcatggcaaggaagtttgatgtgctccgtgccatagaattgttccactcctacagacactctacacccccaagtgcatatgggtctgtc

SEQ ID NO: 874048 - DNA, 99 bp, Homo sapiens
ggttctcactaaaatgaaagaaaccgctgaggcttatttgggaaagaaggtccagatggctgtggaggccaagtttgtccaggacaccctgaaaggaga

SEQ ID NO: 874049 - DNA, 99 bp, Homo sapiens
gtcagtacggcccctgggtccacgtggcgcgaaagtaggaggtgtatcctgagtttgaagaccagagagcttgtttgccatcaggatcctttctgactt

SEQ ID NO: 874050 - DNA, 98 bp, Homo sapiens
ttatgcccaatcgaaaggccacaagaccccttggggaaaatggaatctgaaccctcagcagttttataccatgttccacaggtgatttggcttctgca

SEQ ID NO: 874051 - DNA, 99 bp, Homo sapiens
ctccatcctgctcttcttccacaggagctgactgctgggcaggaacgtctctcaggagaaagagtggaagagaaaattgtgaactaaggccccctgccc

SEQ ID NO: 874052 - DNA, 101 bp, Homo sapiens
cttgtttgtagtagtaggccaggagctggggcatccggtcaatttcagtaaacaccttcacaaacactttggactgatctgtagtcccagctacttgggag

SEQ ID NO: 874053 - DNA, 98 bp, Homo sapiens
ttgctttcctatgaggaatatggtcatcttcagcctacaacacagcagtcccctcaggatgagcaggaaaagctcttggatgaagccatacaggctgt

SEQ ID NO: 874054 - DNA, 98 bp, Homo sapiens
aagctctgccggacatggtggtgtcccacctttttgggaagattggggaccacaaattcagtgcccaccggattgtcttagcagcctcgatcccgtat

SEQ ID NO: 874055 - DNA, 98 bp, Homo sapiens
acattctgaaggattgtccaaggagacaggtttcttgtgacaactgtgctgcatcaatggcatttgaagataaagagagtctcactcttgttgcccag

SEQ ID NO: 874056 - DNA, 99 bp, Homo sapiens
cttcagtggcctgtcgttggaagagtacaagctgatcctgtccacaggacttaaccaccaccatgtcgagcaaaagaacaaagaccaagaccaagaagc

SEQ ID NO: 874057 - DNA, 99 bp, Homo sapiens
ttcccgcgtccgccgattcctcctccttggtcgccgcgtccttggctggcgtgagccatgtggctagaaatcctcctcacttcagtgctgggctttgcc

SEQ ID NO: 874058 - DNA, 99 bp, Homo sapiens
atatcattggattttatggagcattttttgtagaaaacaggatttcaatatgtacagaattcatggatgggatttgtcttggctgttactatgacacgg

SEQ ID NO: 874059 - DNA, 99 bp, Homo sapiens
gaaaagaagccctattgtaatgcgaacaacatcaagcctttttgtatcagttaatgcaacatcaccaccagcagcaccaccaacctgaacttcagcagc

SEQ ID NO: 874060 - DNA, 99 bp, Homo sapiens
cagtctggaactcctgggctcaaaccatcctcccacctcagccttgccatgatcatagctttcacgtcggacatgatcccccgcctagtgtactactgg

SEQ ID NO: 874061 - DNA, 99 bp, Homo sapiens
ctgaactgggtgctttatatagggttgaaaggattgttgacaaaaggaaaaataaaaaagggaagacagagtatttggttcggtggaaaggctatgaca

SEQ ID NO: 874062 - DNA, 99 bp, Homo sapiens
caaaagaaactggcagattatctgaaagtgcttatagacaataaacatctcttaagagtgttcaaccagattcttcttctcccagacatgtaagtcact

SEQ ID NO: 874063 - DNA, 107 bp, Homo sapiens
gagaggttcagggagctgttgctgtatggccgtaagaaggaccgcctggcccggtgcaccatgcattgcaacgacaaagccaaagattcaatagatgctgggagtaa

SEQ ID NO: 874064 - DNA, 99 bp, Homo sapiens
aacatggacatcctgaagccaatcctggtgtggatgaggtcaccattgtcaacattttgaccaaccgcagcaatgcacagagacaggatattgccttcg

SEQ ID NO: 874065 - DNA, 98 bp, Homo sapiens
agaaacttgtgtagctttgactgattgccttaatctcttcaccaaacaagaagggagaccatcatgcagacatcagagactgggtcggacacaggctc

SEQ ID NO: 874066 - DNA, 99 bp, Homo sapiens
tcaatattggaagcgctttgatttacagcagctgcagcagttggaattgatcacaccttttcagttgtacttcaatcctgaattaatctttaaacactt

SEQ ID NO: 874067 - DNA, 100 bp, Homo sapiens
tggggccagggaacagtaggccgtcttgaaggcgtcaccactggtccacatgagcaccatcttgatgctgaggagacggtgaccagggttccctggcccc

SEQ ID NO: 874068 - DNA, 98 bp, Homo sapiens
cagaggggagagcggccgccgccgctgccgcttccaccacaggttatcaatactctggctgaccatcatcatcgtgggactgactttggtggaagtcc

SEQ ID NO: 874069 - DNA, 99 bp, Homo sapiens
ttgaaaatgtcacctctatcatgtttctagtagcgcttagtgaatatgatcaagttctcgtggagtcagacaatgagaccaggtgataggtttgatcga

SEQ ID NO: 874070 - DNA, 99 bp, Homo sapiens
ggagaactgccccaaggatttgcaagatgggcactctggttttttaaaaatgataaaagcaaaacttggcaagcaaacctgcggctgatctccaagttt

SEQ ID NO: 874071 - DNA, 99 bp, Homo sapiens
ggaagcgcagccgcggctctgtgttttgagagtgcaaaactctactacgatcgcgggaaccaccatgagtttgtgtccctggtgaaggacctggcccgg

SEQ ID NO: 874072 - DNA, 98 bp, Homo sapiens
tgaaggcccactttattatggatgatccagcaggaaacagttacttgcaggggcttcaagaagcgtgcacctcgggcactcaaagagattcggaaatt

SEQ ID NO: 874073 - DNA, 99 bp, Homo sapiens
tttaaagatggaaacttatttaaggatggctgacttaccgtatcaggtgcccctgggcgctgggattgctctagcctgtaagtataatggaaaagatga

SEQ ID NO: 874074 - DNA, 100 bp, Homo sapiens
gatgagcaagcagtaataaagtctcccttaaaatgcaccctcctctggccaggtggaaggagggtgcattttaagggagactttattactgcttgctcat

SEQ ID NO: 874075 - DNA, 98 bp, Homo sapiens
gaagttttaaacctcatttgaccttcatgaagttgtcaaaatcaccgtggctccgtaagaataaacatgccaagggacaagtgttatttgacaaagtg

SEQ ID NO: 874076 - DNA, 99 bp, Homo sapiens
ctcctcactcttggtttcaatgactttggccgcagccaaagcacccgtctccttattcttggcagttgaagatgcccggaggcgggtgctcggtcacca

SEQ ID NO: 874077 - DNA, 99 bp, Homo sapiens
gacccaagctctgccggacatggtggtgtcccacctttttgggaaggagacagaggagctggaggaggagaagtcaggcctgcagaaggagattgctga

SEQ ID NO: 874078 - DNA, 99 bp, Homo sapiens
gagggaaatatgtcatgtatcccatagctgtgagtggcgatcacgagaacaataaggaaagtaatggaccagtgaaggtgtggggaagcattaaaggac

SEQ ID NO: 874079 - DNA, 98 bp, Homo sapiens
ttcggtgcgggggacgaggacgacaccgatttcctctcgccgagcggcggagattgcgtcgagtgcctgctgctccactctgggaaacctgacaacca

SEQ ID NO: 874080 - DNA, 98 bp, Homo sapiens
ctggagcgctcggccggcgtgggagcgccaaggccgcagagacccactgctaaggagttattgaagcacaagtttatactacgcaatgcaaagaaaac

SEQ ID NO: 874081 - DNA, 99 bp, Homo sapiens
aagtccctagggaaccaccaattcttcccagtgagttattctccccacctcagaagtaccagcttttggtgtatcatgcagattctctctttcatgata

SEQ ID NO: 874082 - DNA, 99 bp, Homo sapiens
tggcatgatccttgtaggactctggttaattcagtggctgctcttaaaatacaaatcctgataacttaagtgactctctcttttccggtgatgaagaaa

SEQ ID NO: 874083 - DNA, 123 bp, Homo sapiens
agggcttcggctacaaaggctccaccttccacagggtgaccttgtcctgttgatgagaacatcttcatcatgcatttggaagaggtatctggcacatgaaggaagggatcaccctgtggaagg

SEQ ID NO: 874084 - DNA, 99 bp, Homo sapiens
gtccaggcacgcgaggcccctcagggactgctgagatgtcctctattcttgaagagcgtattcttggagctgatacctctgttgatcttgaagaaactg

SEQ ID NO: 874085 - DNA, 99 bp, Homo sapiens
cttcaaagaatgatatttccaaagtttgcagaaaagaatatgagaccaagaggatgctggtggaaaagatgggccgagaagctgtggagctagggcatg

SEQ ID NO: 874086 - DNA, 99 bp, Homo sapiens
ccaggaactactgttctcaactgctcccatgacttcctgtcaggctcgtgaagaagaaatgactgcaaaagtaagggacctgcagactcaacttgagga

SEQ ID NO: 874087 - DNA, 99 bp, Homo sapiens
actggggaaacgatccgctcccaaaacgtgagaaagatcagtctaaagaaaaggagaagaaagtgaaaaaaacaattccttcctgggctaccctttctg

SEQ ID NO: 874088 - DNA, 99 bp, Homo sapiens
tgaagctgtattcccaagataagaccgggatggtggactttgctctggaatctggtgtatgggtatggcccttatcagccagttccagaacaaccacta

SEQ ID NO: 874089 - DNA, 99 bp, Homo sapiens
gtgtgattagcttcgcagtctggaaagctttaggagttcacagtaaggtcagtgcaccagatattctgaaacctctcaatcaagaggatcccaaatgct

SEQ ID NO: 874090 - DNA, 99 bp, Homo sapiens
tgtggaggtgaagacattgtgggcccttgatgagcctccctatttgacagtgggcactgatgtgagtgctaaatacagaggagccttttgtgaagccaa

SEQ ID NO: 874091 - DNA, 99 bp, Homo sapiens
ccgatgtggttccaaatgcaaccatccgcaatgtgcttcgcgagaagatctactccactgcctttgactacttcagctgacatcggcgacctcctggag

SEQ ID NO: 874092 - DNA, 99 bp, Homo sapiens
agctcaaaagatctgcagagctcccagggcggacagcagcctcgggtgcaatcctggagccccccagtgaggagacttcagatggattttaaaattgaa

SEQ ID NO: 874093 - DNA, 98 bp, Homo sapiens
tcagccggaccccacctggacggctggggccacttgtggtcgccgggagtttaatggatcgagaagtggcgttgcttgctgaaatggacaaagtgaaa

SEQ ID NO: 874094 - DNA, 99 bp, Homo sapiens
tccttgatgggatcaataccaatctcccgggcaaattcaagaatttcattccacaggacctccagggaacggggggactgcggaatcgccttgttttct

SEQ ID NO: 874095 - DNA, 99 bp, Homo sapiens
agaagttaaaacatttcagggcaagccaattatgttttaagacaattatctcctatattgatgagcaatttgagaggtacctgcatgacgagagcggct

SEQ ID NO: 874096 - DNA, 112 bp, Homo sapiens
cgaagttctaaccctcctgctcgatctcagagctcagacacatcagcttcgtctcatgcttgtcttgtaggggactgctgctctgtgtctgagctctgagatcgagcaggag

SEQ ID NO: 874097 - DNA, 99 bp, Homo sapiens
gcgactcggcggcggcgtcttttggctatgacacaccgttgcattttgcttgtaagtttggaaatgcagatgtagtcaacgtgctttcgtcacaccatt

SEQ ID NO: 874098 - DNA, 99 bp, Homo sapiens
caccactgcactccagcctggggcattaacctgtctgggggccagcggcagcgggtcagtctggctcgagctgtttacagtgatgccgatattttcttg

SEQ ID NO: 874099 - DNA, 99 bp, Homo sapiens
gctccatggcctctcctggactggctgcgtgaccccgacggctgcttctggtatgcattgcctcaggaacaaaggtggctctgtttaatcgactacgat

SEQ ID NO: 874100 - DNA, 99 bp, Homo sapiens
gtttgagaccagcctgggcaacaagataagtttataccatggatagcacaaaggagaagtgtgacagttacaaagatgatcttctgcttaggatgggac

SEQ ID NO: 874101 - DNA, 99 bp, Homo sapiens
ctggccacagtggctgccgccacctggtggtttgtgtatgacgccgagggacctcacatcaacttctaccagctggacgagcctgtggagtgggagaca

SEQ ID NO: 874102 - DNA, 99 bp, Homo sapiens
ggcgcggcctcagcagcagggcacttagtgctgggtcttccacttggtcctcagagcctccatctctctcggactcatccagagggggtgggcgctccc

SEQ ID NO: 874103 - DNA, 98 bp, Homo sapiens
tgaagattgcttctcttctctcctccaagatataattggtgattacaactttcctctataaattaactcttgacactccttgggatttgaagaaaaaa

SEQ ID NO: 874104 - DNA, 99 bp, Homo sapiens
agcactgcgagacctgcatatctggcttctacggtgatcccaccaatggagggaaatgtcagcatactagagtaaaaggatggtttcttctggacaatt

SEQ ID NO: 874105 - DNA, 99 bp, Homo sapiens
attaagagagtgattgctcttgaaggagatattgtcagtcagagcaccataacatggtgtgggaagtgaagacaaatcagatgcctaatgcagtacaga

SEQ ID NO: 874106 - DNA, 98 bp, Homo sapiens
catttgaagtggtgtctacacttataaaaaaatacctcagggactttttcagcgtgatgctccagtccgcaacatctcccctccacatcaacaaagtg

SEQ ID NO: 874107 - DNA, 99 bp, Homo sapiens
cgctgaagattgcctgaaccaatggtggcttctgactcgtattcacttgctttctgcttcaagtcctctattaccaggtagacatccctgtcccggacc

SEQ ID NO: 874108 - DNA, 98 bp, Homo sapiens
aggagttcgagcagatcgacaagtccgggagctgggcggccatttaccagttagtaacaggagtatgggaaggcaaatacaacttcttctgtcagggc

SEQ ID NO: 874109 - DNA, 99 bp, Homo sapiens
agacatatggaccacatgttcctgagcttgagatgctaggaagacttggtccggcttcccatctacacttttcaataaagcatccacatacactgtcct

SEQ ID NO: 874110 - DNA, 99 bp, Homo sapiens
gggaagctgggcagctacaaaatcaatggccggacgaaaattctgattcccagcatagccacgaagtgatgcctctcctctatcctctctttgtctacc

SEQ ID NO: 874111 - DNA, 99 bp, Homo sapiens
aggcagagatggcagtgggggctcccgtggcaaaagagaaggaagtgctagcggtgatccacattgtttgaagttattgtgagtgcctcgaggaccaag

SEQ ID NO: 874112 - DNA, 99 bp, Homo sapiens
atggaaacaccatggctgcggcggcccagctctctctgacacagcttccttcaaaatgtctactgttcacgaaatcctgtgcaagctcagcttggaggg

SEQ ID NO: 874113 - DNA, 98 bp, Homo sapiens
ttgatcacatatttgccagtaaagcagtggtgaatgccgcaattccagcctatcacctaagagaccttatcaaaagaatcaaagaatcttcaggatgg

SEQ ID NO: 874114 - DNA, 99 bp, Homo sapiens
atggaagatcagatccgtttgaggcctggctctgaattacatctgacccccaaagctcagcaggctctccagcagaactatctcctactactctttccc

SEQ ID NO: 874115 - DNA, 99 bp, Homo sapiens
ctttcactttggagagccaagtacaaatagcaggaaacccagatggatgggaatggatcaaagctgtgatcacagggacatggatgaagctggaaacca

SEQ ID NO: 874116 - DNA, 99 bp, Homo sapiens
gtttcttaacccaagtggctctcatcaggcagacaaacgttctctaaaggatgatttacaggtcagtatcaaaccaggccagctgattgctgtcacctg

SEQ ID NO: 874117 - DNA, 99 bp, Homo sapiens
gcccaaccacaagacgactcaataggaggaaggtcgcctggtcggcgctctggatgcagtgttggattccaatgcacgggtcgctccatttcgaattct

SEQ ID NO: 874118 - DNA, 99 bp, Homo sapiens
gtcctggatcattagagttcctgggattgaaaactcctcagccaaatacttcaaggaggatgcctctcttgccaagaacttgtttctttctttgagatt

SEQ ID NO: 874119 - DNA, 99 bp, Homo sapiens
gagttttcatggattctaatggaatcaggcagttttgtgtccatgtgaacaactgtagatttcgggcagacaacttgaacaagctgaagaacctatgca

SEQ ID NO: 874120 - DNA, 99 bp, Homo sapiens
atttctaagcaggttcatgccagcccagaacagagaatcagatcttggcatatacagaagggctgcatggaaaatggctgttcacagagatacgatcaa

SEQ ID NO: 874121 - DNA, 99 bp, Homo sapiens
gaaagcagcgtggtcaggaggggttaaacttcggctgaagcacaggaccccagagagatgcccaggcagcccgagaattcattctgaagatgttcgtgg

SEQ ID NO: 874122 - DNA, 99 bp, Homo sapiens
tgctcaggttgcaattgatgcaaaagtgggaagcagtgggacttgcagttccctgaagaagcagaagctgagggcagagagcgactttgtgaagtttga

SEQ ID NO: 874123 - DNA, 99 bp, Homo sapiens
gacgagcatttgcttcccgagtatttcctccagagattgtggagcagatggacttaattcagtgcacaaatgagatgaatgtgaacatcccacagttgg

SEQ ID NO: 874124 - DNA, 99 bp, Homo sapiens
ctggagctgccattagaatcaagtttggaccagaaaatccctttaggacacagcaaatggctgcccctagaaatatgctttctggatatgccgaaccag

SEQ ID NO: 874125 - DNA, 99 bp, Homo sapiens
aaggcagaattaaatcctgagctagatgctttactaggccatgctttacaaggtatccagtgaattttttgaagaaggatttatggctgacgttgactt

SEQ ID NO: 874126 - DNA, 99 bp, Homo sapiens
ggcgatggctacagaaggagggaaaacctctgagccagagaataacaataaaaaacccaaaacctcaggctcccagattgtagaaggcatgaaacaaaa

SEQ ID NO: 874127 - DNA, 98 bp, Homo sapiens
ctcgcctggtcaagtttgtagatattctgaccaattggtatgttagaatgaaccgcagaagattaaaggcaaaagcaaaagctcgaccagaattggct

SEQ ID NO: 874128 - DNA, 99 bp, Homo sapiens
cgcgccacccgccgacgcctcagccgcttggggcccgcacggaccctctacttcacctgtgggccaaagctgaccaactcccccaccgtcatcgtcatg

SEQ ID NO: 874129 - DNA, 98 bp, Homo sapiens
cccaatgagcctggagtccttggcgcccccagagagtaccgacgagggggccgaaaccgagagctgcagaacaaggagcatgtgattgaggccctgcg

SEQ ID NO: 874130 - DNA, 99 bp, Homo sapiens
catttgacaaatgtacagcttgttcttccaaatctttcttgacacgaaaatattatttcaacaacccagaggatggatttttcaaaaaaactaaacgga

SEQ ID NO: 874131 - DNA, 99 bp, Homo sapiens
cgggggctcagagatccaagtgcgcgccctggcgggtccggaccaagacctgcctagagctggaacgttacctccagagcgagccctgctatgtttcag

SEQ ID NO: 874132 - DNA, 99 bp, Homo sapiens
cttgcttttctgaagaattcatagtaagaggaagtgcatctatacaagttttctccataatctccgccagcctgggaaatgactttgggtcctcagccc

SEQ ID NO: 874133 - DNA, 99 bp, Homo sapiens
gcgtgctctgtgtagatgtcagcaagggctgggttcagacaacgttcctcgatcctcagcatcgctgtcactgtccacaatgtcattatgcttctcgat

SEQ ID NO: 874134 - DNA, 99 bp, Homo sapiens
tgatgatggacgtcccaccgggcaggatgaaggcagagcgtgtggcatctccacctcaaggtccagaacatacatgtgcagctggcaaggagagatgct

SEQ ID NO: 874135 - DNA, 99 bp, Homo sapiens
tctgacggtgtcctttataccttatttcaaagaacccttaggagaaatcttgagagtggacagcaattgtgaagatcgccagagagttctgtgtttcat

SEQ ID NO: 874136 - DNA, 99 bp, Homo sapiens
gtgctgcttgcctcctgggaaagaggatcaccgtcatccacagcaaggactgtttcctcaaaggagcagtgaggagaatgaataccttccaagaccaga

SEQ ID NO: 874137 - DNA, 75 bp, Homo sapiens
caaaacttaaattcaagaaggagccctgtcccagctgggctcaaaatgcagagaactcaaagatattcatttcgg

SEQ ID NO: 874138 - DNA, 99 bp, Homo sapiens
gggtcattgaagcagctgaggggcgccggctgcacctgcactttgaaagggtctcgctggatgaggacaatgaccgatggagtctcaccctgtcgccca

SEQ ID NO: 874139 - DNA, 99 bp, Homo sapiens
ccagaatatctcagatgagcagaaacagttgcctagaagtgatatttgggtcctgaaggcctggggtgagcaacatgcggagagtgatagtgacttcat

SEQ ID NO: 874140 - DNA, 99 bp, Homo sapiens
gctgataaatatacccaaacaccctggagacgaattcctgtacctactgtcaacaacgggaagtggaggccattactgaaggtgtagaggaagatgaag

SEQ ID NO: 874141 - DNA, 98 bp, Homo sapiens
aggcgccccctggtggtcgtctactacagtgtggacttcagctttgattacagagctgctcttccgccctctctggatgagggaacagaagtggagga

SEQ ID NO: 874142 - DNA, 99 bp, Homo sapiens
cggcgcccacagaaaggccggctggcagccctgcgagatgagccttccaagggtagtcagcagagtgcacacagcagctgtcatccctccttcgctcct

SEQ ID NO: 874143 - DNA, 99 bp, Homo sapiens
cgaagagctctcctccttcttcctcaactatctcgctgacacgcagcaccaatgttgttatgaattattcagagatcgagtctaaggttcgagaggcaa

SEQ ID NO: 874144 - DNA, 99 bp, Homo sapiens
gcctgcagagctgtggcttaccaggtggatcagtacaagggaaagcgggatttggagtcactgagggagtacgtggagtcgcagctgcagcgcacagag

SEQ ID NO: 874145 - DNA, 99 bp, Homo sapiens
aactgccttctgaaaggtggaatcctactcagaatgtgagtgccctgcaggagtcattaaatcaaaacttcatgctgatcatcacccaccgagaagtcc

SEQ ID NO: 874146 - DNA, 99 bp, Homo sapiens
acaggacagaggaagtatggtggtcctccaccagacagtgtgtactctggcgtgcaacctggaattggaacggagatggagtctccctctgttgcccag

SEQ ID NO: 874147 - DNA, 98 bp, Homo sapiens
tggaatgaatttggaatcttcccttgaagaggaaaaggcattaatagctgctcagctggacaatgccattgagaaggaattactggagagactgaaac

SEQ ID NO: 874148 - DNA, 99 bp, Homo sapiens
ggtgaaggccctaaggagtaggcatatcttggcttacagttcagttatgcagccttttccaggtctccctccccgcgtttggggctgctgaagctggag

SEQ ID NO: 874149 - DNA, 98 bp, Homo sapiens
ccgacgccatgggagtgacttggtccttccatagtgacgccccccaaggacatctggaatgtcactggtgcccaggtgtacttgagctgtgaggtcat

SEQ ID NO: 874150 - DNA, 99 bp, Homo sapiens
cggtgcaagaggcgcaaacaagccaatcccaggaggaaaaacggtctccctttgcaaggagctaattcatcttgcattgaaaggattgtcctattatca

SEQ ID NO: 874151 - DNA, 98 bp, Homo sapiens
tcttcacagcacagttcctgggaaggtggagccaccagcctctccctggctggagcattggatttgctaaaggagcttaagaatattcctatgaccct

SEQ ID NO: 874152 - DNA, 99 bp, Homo sapiens
caaatcgtggccccttcgacctgcgctccgcgctctggcgctacggtctggccgtcggctgcggcgccatcggcttctggtggttcatttaatggattc

SEQ ID NO: 874153 - DNA, 98 bp, Homo sapiens
tttgctcctccctgcaactaactccattcttaattggctcttgcagccaatgccggaacaggatttgctgttgctgagcctcaaatcgcaatgttttg

SEQ ID NO: 874154 - DNA, 99 bp, Homo sapiens
tctgtcacttgctgggattcacacacggcacggaggcagagtggcagcagatggagtctagctctgtctcctaagctacagtgaagtggcatgatctcg

SEQ ID NO: 874155 - DNA, 99 bp, Homo sapiens
gccttcttctgttcctgctctcgctcctgctccaagcgaagccgctcctgctcctcttcacagccaccaggaagggggaccctgagccggggctggtcg

SEQ ID NO: 874156 - DNA, 99 bp, Homo sapiens
aaacttgcaaggaaaggaacatgtttgaatttcagatgtgttcctcaatgaatcacagccatcatcaaccactttaaccccaaaattgagtcctacgct

SEQ ID NO: 874157 - DNA, 99 bp, Homo sapiens
ttacgcgaagatgctaagataccagcttgtgaagaaagcctaagccagaccccccccaccagctactggaagtcccttgcccctgatcggtcagatgat

SEQ ID NO: 874158 - DNA, 99 bp, Homo sapiens
tcagagagtagcatcatcttgtggagtgttcaggatgggggaagtggaagtgaaattggagaagctaaaacttacttatgaggaaaagtgtgaaattga

SEQ ID NO: 874159 - DNA, 99 bp, Homo sapiens
gcctcccaaagtgctggtattacagatggaacaagaggctgagaggcgcaggcagccacaaataaagcaagagccagaatcagaagaggaggaagaaga

SEQ ID NO: 874160 - DNA, 99 bp, Homo sapiens
tgctgggaattgcgcgtggctgctgggttctctcttatgattggacacgaatgcagagtttgagtccagatcccaaagcccagtacacaagtatctacg

SEQ ID NO: 874161 - DNA, 99 bp, Homo sapiens
ctcctgagtagctgagattacaggtgacggggtttgacagcgtggatgatgagtccaagcacagcgaccacatgttttccgacaagagcccaaacccgg

SEQ ID NO: 874162 - DNA, 99 bp, Homo sapiens
ctgaagacctccactgccatcctgtccactggcattggcagaatctatgtactttcatcagcgcggccagtaagtttgcacagctccagtgtctgtgga

SEQ ID NO: 874163 - DNA, 99 bp, Homo sapiens
gcagagacgcgaaggagaggccctagaacccttcgcaaacctgggtatacttcatgtgacaaagaaaaaagtatttgaaacactggaagcacgaatgac

SEQ ID NO: 874164 - DNA, 98 bp, Homo sapiens
catgatcgtaaagaagttgccaaatttgaagcagaacgatcaaaagccaagtggcaaacggtgaccaagaatatggcccaggtgaccaaagccctgga

SEQ ID NO: 874165 - DNA, 99 bp, Homo sapiens
gggaggggagacccccacattcaagaggagctttcaggcgatctggagaaagaacggcagaacacacagcaaggtggaggacttgaagtctcagctggt

SEQ ID NO: 874166 - DNA, 99 bp, Homo sapiens
cgtcccaggccgccccgcccaacccctcctcccagtgctgaagtcccaaggagccgccctgcaggctgaggctgaggtggcctccttgaaccgtaggat

SEQ ID NO: 874167 - DNA, 100 bp, Homo sapiens
ttcgcaaaatttaattctgctttgcaatgtgttctttgttcgataaagatcttcttctatatagtggaactcctcatcaaaaaattgctgagttttgcga

SEQ ID NO: 874168 - DNA, 98 bp, Homo sapiens
gggcatctcccggcccggccgcagcagccgccgccgccgcgcagtgatcagactctgagaatatgggatgtgaaggcagcaggagtaagaatcgtgat

SEQ ID NO: 874169 - DNA, 99 bp, Homo sapiens
tgaagagaagatggaggagctggtggtggaagtgcggggctccaatggcgctttctacaagagttatggtgaatggttgcatggatttgaaaaaaaggc

SEQ ID NO: 874170 - DNA, 99 bp, Homo sapiens
agccaacagacactgccaccctcaaggagttcacgttcatgggcgagggaacagatgagaaacccggcaatgaaagttcaagcaattctgcctcagcct

SEQ ID NO: 874171 - DNA, 137 bp, Homo sapiens
cttgagggagagctggggcctgctcccggagagatacggctatgtcgtggacaactggttcactgctgccctgctgggaggtaacatgaaggtcgtgcttctcattgctccgaagattcgatttcgatcgacatagc

SEQ ID NO: 874172 - DNA, 98 bp, Homo sapiens
ggacgacaaagatggcggcagggaccagcagttactgggaagggacccaaccagagcctggcctgggagccaggatggccatccacaaagccttggtg

SEQ ID NO: 874173 - DNA, 99 bp, Homo sapiens
tgtcattataccttcacccagcatttcatccctcgtcgaaaggattggattggcatctttagacgggagaggacctgctggccccaccgcacgacacca

SEQ ID NO: 874174 - DNA, 98 bp, Homo sapiens
ccagggctcgtacttctgctcgcaggactctcacagaaggaggaagaggaggacacttttattgaagaacaacaactagaagaagagaagctattgga

SEQ ID NO: 874175 - DNA, 99 bp, Homo sapiens
gagaggccagctcagacctcccggctcgacaggcggcgcgggcggcgctctgcttatgataatgtcaacaaagttcgagtagctatcaagaaaatcagc

SEQ ID NO: 874176 - DNA, 98 bp, Homo sapiens
ccggagctgctggtttcattcgaggtttcgggccggaatttagataatgggctgtgtgcaatgtaaggataaagaagcaacaaaactgacggaggaga

SEQ ID NO: 874177 - DNA, 99 bp, Homo sapiens
tcggacccagagggtgacggcgccgctaggatgaagctcgtgagctccacggagaagaactgctgcgtgcggcagctgtacattgacttccgcaaggac

SEQ ID NO: 874178 - DNA, 99 bp, Homo sapiens
aggtttaaaattttacataagaagttacctttttcaggtgtgagttcttgatacgaatgaaaggccaagagtttgttgatgagattcaaggtagatatc

SEQ ID NO: 874179 - DNA, 99 bp, Homo sapiens
cggaactggtcgaatgaggcacctaaaaattgtataccgcagattcagttggcaaacatgaattgactgggcataaagtagctgtgaagatactcaatc

SEQ ID NO: 874180 - DNA, 99 bp, Homo sapiens
cgagaaggactcgctcgacccgtccttcactcacgccatgcagctgctgacggcagcaagtgctgtgaaacttaataagcagcagacggacatcgctgt

SEQ ID NO: 874181 - DNA, 99 bp, Homo sapiens
gcagggcctggcactggccaaggagattgggtggctgttgcaccacgccctccctcctgcccctgaggcccggaagccaggcgaggagcccaggaggcc

SEQ ID NO: 874182 - DNA, 99 bp, Homo sapiens
ctccactcacggagtctctcagcacagctgccgtaagccccactcctgaggagccccggcctgttgtgtactggccagagcccagggagaggcagggct

SEQ ID NO: 874183 - DNA, 99 bp, Homo sapiens
cggtgcgttccaaccgccgccgaaaccggtcatcgtggacaagcaccgccccgtggaaccggaacgcagaaaatcctgagcgagcagctctgtactttg

SEQ ID NO: 874184 - DNA, 100 bp, Homo sapiens
tcaatctctcgtaattaatgaaaaccattctcagttgccaatttgcaaataatttgcaaattggcaactgagaatggttttcattaattacgagagattg

SEQ ID NO: 874185 - DNA, 98 bp, Homo sapiens
ttctgggagctgaggaaccagatatcttgaaaagctgccagaaaggaattacatgaacgacagccttcgcaccgacgtcttcgtgcggttccagccag

SEQ ID NO: 874186 - DNA, 98 bp, Homo sapiens
ttggacgtgacccagagggccttgtacgtggaggtgatgctggagacctgtgggcttctggtcgcactggagagagtctacaaggagattgaacaggt

SEQ ID NO: 874187 - DNA, 99 bp, Homo sapiens
cgattactttagtatcaatatctgctacaacatcacattttcatgcatcattttttcaaaataggcatggaaataaccagcctgcaagaactggcacac

SEQ ID NO: 874188 - DNA, 99 bp, Homo sapiens
gtgatgccacttattacagttaccagaacagggcagctgcaatgactctccgcacggtattattgtcattgcaagcactattggcagctgcagagccag

SEQ ID NO: 874189 - DNA, 98 bp, Homo sapiens
aaagacccagtgaacaaatccgggggcaaggccaaaaagaagtctgcgctcctcagaccaccggcaggtgaacagcctgatgcagaccgaggagtgcc

SEQ ID NO: 874190 - DNA, 99 bp, Homo sapiens
ttcgccgccgcgcacaaccgcacgtgcagacccaacatgagtgaagtttcctgcaagaaacgggacgactatttggaatggccagagtattttatggct

SEQ ID NO: 874191 - DNA, 99 bp, Homo sapiens
ggtctggaagctcttcagcccctgcagcccgagccgccccccgagcccgccttctccgaggcgcagaagtggattgagctcaggtaacggaggccttgg

SEQ ID NO: 874192 - DNA, 99 bp, Homo sapiens
catccaggctggtcagtgtggcaaccagatcggtgccaaggaggacgaagaggtcccaacaggacatcttactgtcgaaatccgctctgtgagccggga

SEQ ID NO: 874193 - DNA, 99 bp, Homo sapiens
atgattacagttcttcctaaaaaagggagagtcccgtattctcagagtaaaagttgtttctggaattgatctcgccaaaaaggacatctttggagccag

SEQ ID NO: 874194 - DNA, 98 bp, Homo sapiens
accagctctgaagtaagcacagtagaactgctgcatctgcaacaacagcaggtccggggatcccgagctgtcctgcagctgtaccctgagaactcaga

SEQ ID NO: 874195 - DNA, 99 bp, Homo sapiens
cggaggctgaggagaaggaggagcgggccgtggaggcttcgccgcctaggttcggctttccagtttggcagcagcactacaaatttcaacttcacaaac

SEQ ID NO: 874196 - DNA, 99 bp, Homo sapiens
cgcagaccagcgcccgaaggccgacacgctggccctgaggcaacggctcatcaggacttcactgaggatgtcaactgtgcttttgagttcctgctgaag

SEQ ID NO: 874197 - DNA, 99 bp, Homo sapiens
cttggcttccggctccccccatctggctggaacacacatcagtcacatgacagtcatgtccctttccagggacctcaaggacgactttcacagtgacac

SEQ ID NO: 874198 - DNA, 99 bp, Homo sapiens
tccaggctcaccagtacctggatggcacctggtccctgtcgagaaccaacggggtcaccctgtacccataccaggatttttttcccaggaagccatccc

SEQ ID NO: 874199 - DNA, 98 bp, Homo sapiens
ttccttgaattctttgcgtggggccttttgacaactccaatgttgactgtgaaagaaaatggcccgaaccaagcagactgctcgtaagtccaccggtg

SEQ ID NO: 874200 - DNA, 100 bp, Homo sapiens
ctcggaaccttggcatatggaaaaaacgaggaggagaaccaatttctgtagccatggtgatgttttccttctaggatactgtaatcctagcactttggga

SEQ ID NO: 874201 - DNA, 99 bp, Homo sapiens
gcagctgaacgagtgcaagcagctgtccgagtcccaggtcaagagcctctgcgagaagtgtgctcactgatccgcctccagggccaccgccatgtcgag

SEQ ID NO: 874202 - DNA, 99 bp, Homo sapiens
caccgaggggcctggagcaacagccagcctatagactttggcagcaggtttttgacaaattccgtgtggtccccaacatgcaagatgctatatacactt

SEQ ID NO: 874203 - DNA, 99 bp, Homo sapiens
ctactgactcaccctcccgggcgtcacagtctccgtcagagatggaggcggcggctgggtcctggttgataacatagatgccatagtccagctgctggc

SEQ ID NO: 874204 - DNA, 99 bp, Homo sapiens
tgctgaggacctgtgcagcagcaaggatgatggccaggccttgatgatcctcagcagggtcccctcctaaccgcaagcgtcctgctaacgagaaggcaa

SEQ ID NO: 874205 - DNA, 98 bp, Homo sapiens
ccacatataggtggattaactgtctggcaaaggcagaacggtggcagccgaagttaggaagcagatctccggacaatatagtggttctccccaactgc

SEQ ID NO: 874206 - DNA, 99 bp, Homo sapiens
tgttggcgtggcccagcatctaactaacacggtttttattgacagagctctgatagttgttccttgtgcagaaggaggagatgttaaagtaacccatct

SEQ ID NO: 874207 - DNA, 99 bp, Homo sapiens
gctgagaataatggcccggttggcccgggacgagtggaatgctgtcaataccagcaaatatgcagaaagctatcggatccaaacctatgctgaatatat

SEQ ID NO: 874208 - DNA, 99 bp, Homo sapiens
gcctgacatatctgagggagaagcacaagatcatgcacagagcatgttggaacaggattccaggagaatgaaccctagtgtgagccctgcaaatcaaag

SEQ ID NO: 874209 - DNA, 99 bp, Homo sapiens
ccctccagctgctacccatttaccagaccggtgacagagctgaatgaacctctctccaatgaagatcgaaatctcctctctgtggcctacaagaatgtg

SEQ ID NO: 874210 - DNA, 99 bp, Homo sapiens
cacggtgaaaccccgtctctatagctcagctcaacatggattcaccttccttttcttcccaattaaagaatgcaaaattcaatctttctcgtcctcttc

SEQ ID NO: 874211 - DNA, 99 bp, Homo sapiens
ggaccccgacagccttgctgactatttcaagaagctgtggaacaactattttcatctggcagtggcttttatcacccaggattctctgcagctggagca

SEQ ID NO: 874212 - DNA, 99 bp, Homo sapiens
cagcctcccaagtagctaggaccacagatgaagatgtgtgtgtctttaagtgctcagtgtcccgagagacagagtgcagccgtgtgggcaagcagtcct

SEQ ID NO: 874213 - DNA, 99 bp, Homo sapiens
cgctgcctcggaccccgccaccaaggtaatgaatttgggcatcctgaatggttagacttcccaagaaaaggaaataatgagagttaccattatgccagg

SEQ ID NO: 874214 - DNA, 99 bp, Homo sapiens
agcaagccctactgagcgtgctcccctctgagactggagtgagagggtcttctgtattctaccttgtaaatactgttatttgtatatactgtaaatgat

SEQ ID NO: 874215 - DNA, 99 bp, Homo sapiens
gggcggcggaaaatagcctttgccatcactgccattaagggagtggacatccgccataacaaggaccgaaaggttcggcgcaaggagcccaagagccag

SEQ ID NO: 874216 - DNA, 98 bp, Homo sapiens
tcaggcccctcccctggacccgccgcagagccaggcatggtctacatggctggacttgtttttgctgttggtggctttaatggctcattaagagttcg

SEQ ID NO: 874217 - DNA, 99 bp, Homo sapiens
cggggaaccctgcggcggctgtggtcactgcccaggaggcgccggggaactgcagggcgctcgaggccaggacagctggcctgaagctcagagccgggg

SEQ ID NO: 874218 - DNA, 99 bp, Homo sapiens
caaggatttaccccgtgatatccagtttgatagtgaaaaaggagtggactttgttctgaattactccaaagcgagaaccagcagaaatccaccaatgta

SEQ ID NO: 874219 - DNA, 100 bp, Homo sapiens
tcactgggactcgccggccgccccttttaaaaggtgtccaaccaatgcaaagttaaaaagttagagttgaaattgagtccaacaaaatgatccatttgct

SEQ ID NO: 874220 - DNA, 99 bp, Homo sapiens
gccagtgtgataagcagacaaggctgagagagatagttctgcgtctggaaagttcaaggttgagggactggcatctactgatggccttcttactgcgtc

SEQ ID NO: 874221 - DNA, 99 bp, Homo sapiens
cagagcctggcgtccgtccgccacatggctgagactacagaagcctgcatcactgcctacttcaaagaaagttcaacttttagatacaaagagacaact

SEQ ID NO: 874222 - DNA, 99 bp, Homo sapiens
tcaagctctatgcctctcttggagcaaatgatgaagacatccggaagaagcaacatctgaatgaattgatgacgaagaagtggctattagggtcaaacg

SEQ ID NO: 874223 - DNA, 99 bp, Homo sapiens
cctcccccaggcctctgggctctgagtgctctttgttaggaaaattacgactggaatgtgctgaccttctagaaacaagaggagtggtgctccgtgacc

SEQ ID NO: 874224 - DNA, 99 bp, Homo sapiens
gtgtatctgcgcgtgtgaggtgctctgccgcaaccctatgcagagagcaggcgtcttggctgcccacaagataatggctagctccccagacatggacct

SEQ ID NO: 874225 - DNA, 99 bp, Homo sapiens
ttggtgctttcacaaagataatagaagccatgggattcacgggacctttgaaatacagtaaatggatcatatctgaagatattagtgagctacaaaaga

SEQ ID NO: 874226 - DNA, 99 bp, Homo sapiens
aaggttaccccagagtatagacaggtaagtaaggaggtctctgtaccatggctcgtacaaagcagactgcccgcaaatcgaccggtggtaaagcaccca

SEQ ID NO: 874227 - DNA, 99 bp, Homo sapiens
cctgggcgacagagtgagactctatatggtcaatagttgatcatttttcgaagggcatcataacacttccatttgtctgggatgtagaatggttcaaaa

SEQ ID NO: 874228 - DNA, 99 bp, Homo sapiens
gtttctttctctgagtttccagttcttccctgctgtacctgaagaaggagcctttcaaaagccagaaagttgtcccacttggcagtctgtgggtgtttc

SEQ ID NO: 874229 - DNA, 99 bp, Homo sapiens
tatattggatatgaaactggaagacatcctgacaaatcttcctattttcaagctgaaagaatctactgttagaagaagatacagtgactttgaatggct

SEQ ID NO: 874230 - DNA, 99 bp, Homo sapiens
accagagcagagaccatatagctgccctcagctgcactgtggcaaggcttttgcttccaaatacaagctgtatagctgcagaagatcataagtaaacaa

SEQ ID NO: 874231 - DNA, 99 bp, Homo sapiens
catggcatttcagtcactggtttgcagagtccagggtctccgtctctccaccgggggcttcatccttccagggaggagaagagggactccagaatggct

SEQ ID NO: 874232 - DNA, 99 bp, Homo sapiens
ggaggagcgggccgtggaggcttcgccgcctagatacttggcatatcgaaattttatgattgacacgtatcgtctaaacccccaagagtatttaactag

SEQ ID NO: 874233 - DNA, 99 bp, Homo sapiens
gcctgactttggtgtctgggaaagaggaagcaaatataataatggcagcacagagctacattcgaggtcacttacttcagcctctggtactacaacaag

SEQ ID NO: 874234 - DNA, 99 bp, Homo sapiens
taaggtagagatgatgaccccccactacagggattatcttgaacacataacctccattggccccaggactacaggaagtccagaaaatgaaattctgac

SEQ ID NO: 874235 - DNA, 112 bp, Homo sapiens
gctgatctccctgctaaatgaaaaagggcaagatactgggcatggccgaaacagaagccctgtcgaagcttcgggaagacttcaggatgcagaataaatccgtctttatttt

SEQ ID NO: 874236 - DNA, 99 bp, Homo sapiens
gcaggagaattatgggagcgcatttccccaggaccaactcttgcgtaaaaagagaagaatttttatccattcagtgggtgcaggcacaataaatgcctt

SEQ ID NO: 874237 - DNA, 99 bp, Homo sapiens
actgcccagctgttttccaaagttactgcatcattttgtatcccaccagcaatgaatgagcgttccagcttctccgcctcccaaagtgctgggattaca

SEQ ID NO: 874238 - DNA, 99 bp, Homo sapiens
ctgcatctcactgcttcgggaacgggccaagcatggggatcagcacgagggtcagcactacaacatctccccccaggatttggagactgtatttcccca

SEQ ID NO: 874239 - DNA, 99 bp, Homo sapiens
tttctctgatggccagtgatgcaaaatgtattgcattagaatgtgggagaattcaactgagttgctgattggattttcaaactcatcgcagaaatcaca

SEQ ID NO: 874240 - DNA, 99 bp, Homo sapiens
accgcgaaggatgcagagagagcgatcaacacgctgaacggcttgaggctccagtcaaaaaccattaaggtcgctgctggctggacgccctggagctgg

SEQ ID NO: 874241 - DNA, 99 bp, Homo sapiens
tccacagctggcaaattcagtgcagatcaggaccctgaaccatcaatatgactacacatttgattggacaatgttaaagcagaaagcagcacagcaggc

SEQ ID NO: 874242 - DNA, 99 bp, Homo sapiens
tcaagcagtcctaccatgtcagccttcccagtagctgggaccacaggacgtagacaagtttggcaacgagatcacccagctggcccggcccctgcctgt

SEQ ID NO: 874243 - DNA, 99 bp, Homo sapiens
agcatgtcttccaaggacagatttggatagtaagccaggtagaaggccagagctcccacaaagctgtcaccagcaccagttctggaggctgggaagtcc

SEQ ID NO: 874244 - DNA, 99 bp, Homo sapiens
cagcaacttgtgattggcggtgaccggatattcagttgcacatccccacatcaatgcactgccaatggttatggtggagaattcagactttaccccctc

SEQ ID NO: 874245 - DNA, 99 bp, Homo sapiens
gctccagaacagcatcagtgttttttaagggaccaggaaaagtggtgatggttgcaatttgcattcttagagtttgaaagagtctatcttgataatctc

SEQ ID NO: 874246 - DNA, 99 bp, Homo sapiens
cttcgcccagaagatcagcagatggagtcttgctctcttgcccaggctggaagtgcaatggtgtgatttccactcgctgcaacctctccctcccgggtt

SEQ ID NO: 874247 - DNA, 98 bp, Homo sapiens
gaagaaacagaggaggaggaagtttctacagtaaatggtgaagaaggtgaatacagtgaagaggaaaactccaaagtggagctgaaatcagaagctaa

SEQ ID NO: 874248 - DNA, 98 bp, Homo sapiens
acggtggtggtgactgagcggagcccggtgacaggatgctgagcagcgccagttggcactagctgagaagttcaaggagctgaaacgcagcaagaaat

SEQ ID NO: 874249 - DNA, 102 bp, Homo sapiens
gacagaccatcctggctaacacgtatgccaccacgggctgttccctgaccctgcaccatacggagaaaccagaacatgaagacatatgtgaataccgtccct

SEQ ID NO: 874250 - DNA, 99 bp, Homo sapiens
gctccaagccagatatggtacaggactgtcaacgaaacctggcacggctcttgcttccgactctcagcgttctcatctctcttccttcaccatgaagct

SEQ ID NO: 874251 - DNA, 99 bp, Homo sapiens
ggactctatacagggacgtgatgctggagaattataggaacctggtctccctggggacagaagatgagcctgtcggtcctggagggtatggggttccgt

SEQ ID NO: 874252 - DNA, 99 bp, Homo sapiens
ggatacttgcaaggaccaaatgtcaatttagaaggtgaaaggtgtagcagtcactcggcctacacccacagcatcgaccttgtgaacccagcgacctga

SEQ ID NO: 874253 - DNA, 99 bp, Homo sapiens
gtcggaagaggggcagtactgcaaaatgttcatgttccggtctgggcaatgccagtgactgagatggggaccccatggcgagtgtaaaccttttcactc

SEQ ID NO: 874254 - DNA, 99 bp, Homo sapiens
atgtggcttgctcttctctactctggagaccatcacaggccagcatcctgccgaggagatggcaacctaccttcgatatgtcaggcgactggacttctt

SEQ ID NO: 874255 - DNA, 99 bp, Homo sapiens
tatgacagcacccggatctcactgtttggcaccttcctgttcaactcccctcaccagcgagtgaagcaaagcacgctccataatgggagaagtaaagaa

SEQ ID NO: 874256 - DNA, 100 bp, Homo sapiens
ccacgggaagcgatgataactgcgcggcattctttgagggacccccattcagaatgggggtccctcaaagaatgccgcgcagttatcatcgcttcccgtg

SEQ ID NO: 874257 - DNA, 99 bp, Homo sapiens
gaggtgtttcacaagtagcaaatgagatgaaccatcttcctgcacacagccaaagtctgcaaaggacttccttcgctgggcatctggctgggattcttg

SEQ ID NO: 874258 - DNA, 99 bp, Homo sapiens
agctgcacatcggattctggaaggcctggggccccaggtggagctgggagcatttccagctcgtttgaagaaggtgctgattgtgggggcacccatatg

SEQ ID NO: 874259 - DNA, 75 bp, Homo sapiens
gccaacccaaattaccttaattgtactactgagcgagtgtgcttgatccagggaacggttgaagcactgaatgca

SEQ ID NO: 874260 - DNA, 133 bp, Homo sapiens
tatcaacttgactgaccctatgttcagaggaatttataggggggttcaaaagcatcaaggagaagcatttgagatgattcctgaacttgaagagctaaatttgtcttggaacagtaaagtgggaggaaatttg

SEQ ID NO: 874261 - DNA, 75 bp, Homo sapiens
aggagacatcgaaagcctggtggaccgagagaaagagctggctaccaagtttttgttccagcagctgggaatgtt

SEQ ID NO: 874262 - DNA, 99 bp, Homo sapiens
aaaaaatgcagaactagaacaggagcttatggaactgcaagcacatgttgaccagataactgaaatggcagcagtaatgaggaaagccattgaaattga

SEQ ID NO: 874263 - DNA, 99 bp, Homo sapiens
tggacagatggacttcaaatgctgtttgtattccagagactagccctgtgtactgtgttgcatctgacagagagacttttccttgaccacccgcataga

SEQ ID NO: 874264 - DNA, 99 bp, Homo sapiens
ggaatggcagctgctgggaactatgcctgggtcaaccgctcttccatgaccttcttaacccgtcagataaacaagctggaggcacgcctgaggcaggca

SEQ ID NO: 874265 - DNA, 98 bp, Homo sapiens
aaaacattcatcattggggagctccatccaggtccaccaaaatatactaaatctgttctgaaaaagggagataaaaccaactttcccaaaaagggaga

SEQ ID NO: 874266 - DNA, 99 bp, Homo sapiens
cctccaatggatgacaaaaacctgcagtatatgaaatgtgtttcctttattttgatttcttgggccgactgaagggtaaaatgtccaagctgaaatatc

SEQ ID NO: 874267 - DNA, 99 bp, Homo sapiens
cagattcgcagtggtcgcttcttctccttggtggaagatggtatcttgaagttgaggaatgctggcaatgaacaagacttaggaatccagtataaagcc

SEQ ID NO: 874268 - DNA, 99 bp, Homo sapiens
cttgaagtccaggtcgatggtgaagtccaggtcccgcatcccgaactggaagagcaggacggtggtgccctcgctgtgcagctccagagtcaccaggtg

SEQ ID NO: 874269 - DNA, 99 bp, Homo sapiens
cgatggtagccgaggagctgggcgtagacagtcaaagaggcagctccggaatgagaaagataagccactgcctccactgctggcccgagtcgggggcaa

SEQ ID NO: 874270 - DNA, 99 bp, Homo sapiens
gtgaacggcaagacatacccgcttggccgcatcctcatcgggagcagctttcctctaatgtcaaaactggaccaatggggccaggctgaagtattgaac

SEQ ID NO: 874271 - DNA, 99 bp, Homo sapiens
gcagatgtgtgacctggcgttcccctgagtgctcggaaaatggccttgtctccggtcgttcccgttcaggagcaggtgttggtggaatgagcgttgcat

SEQ ID NO: 874272 - DNA, 99 bp, Homo sapiens
aagaaaagcagggtgctggtttctaggacactaaacctcatggccagacggttttgctgtctcagcctactgtggtacaacttcaagcacctggagttc

SEQ ID NO: 874273 - DNA, 99 bp, Homo sapiens
cgagaatttgggaagggaatctttatcttctcgtctagttctccgaggttgaaggctcggcctgctcaggttgtccttctattcaggccactcttcgtt

SEQ ID NO: 874274 - DNA, 99 bp, Homo sapiens
aaatgccgagaaggccagtacgctaagaaacctttccagcttggacctacgtcatatcactgaactggataatgaaaccgtgatggaaattgtcaagag

SEQ ID NO: 874275 - DNA, 99 bp, Homo sapiens
aaggaactactagataaccagtggttaacagccattgaaaagtattgccgagttaatggtgggttttctggagtcaaagatgtatattcctctactcct

SEQ ID NO: 874276 - DNA, 99 bp, Homo sapiens
ggagcagatcgattttaccttggataccctgctttgggtcagaagagatcaattctacagaaatttccagtggttctgttgaggctttatggaattcag

SEQ ID NO: 874277 - DNA, 98 bp, Homo sapiens
tttgacttggaagcaatgtttgaacaaactcgaagaacagctgtggaaagaagttgcaaaacactggacttgtgtatgcggatacctgcttcagtacc

SEQ ID NO: 874278 - DNA, 99 bp, Homo sapiens
tcagcagaagaaacacttcctataaatctcgcccaaacaggaaaggagccctctggcacaaatggaagaagaaagaagggagcaagtagctaaaattaa

SEQ ID NO: 874279 - DNA, 99 bp, Homo sapiens
tgatatcagacaccgagcttcagcaagctctctccaacgtgtttgtggagaaggtgctgcagagactttttcctcctgttccaagtggccaaggaaaga

SEQ ID NO: 874280 - DNA, 99 bp, Homo sapiens
caagtggagagccagaaaaggatccagaactggagtggaagactgtggatattcataaggagaaagtggcacgaagagagattggtattttgacaacaa

SEQ ID NO: 874281 - DNA, 99 bp, Homo sapiens
ccctgctgctgtggactgctgtggctggagggcagggcttcttgggtggggggcaaggttgccctcagcccagccttaaaggaaaggtctccattctcc

SEQ ID NO: 874282 - DNA, 98 bp, Homo sapiens
gtacccacagaagctctgcagaatttgcgaagccttcaatccctggacttcagtactagtgctaataacatccagattgataaaaccaagcctttgtg

SEQ ID NO: 874283 - DNA, 100 bp, Homo sapiens
ttttgtgcctgatgattcaccaacatcactgcttcatcttttgaaactgctttaatatcttctccccattccatcactcgcagctcagagacatagcaaa

SEQ ID NO: 874284 - DNA, 99 bp, Homo sapiens
acacccatcatggctaaaagtgcggaggtcaaactggcaatatttgggagagcaggcgtgggcaagtcagtcctggaaagacaagcatcatgcctctga

SEQ ID NO: 874285 - DNA, 99 bp, Homo sapiens
ttctatttctctagctattgccttattttttctcatggatgttcttcttcgagtatttgtagaaggaatgctgcttctaaattacttgggcaaaattgg

SEQ ID NO: 874286 - DNA, 99 bp, Homo sapiens
ggggaacagatttcagtgtcctccttagctctgcaggcatctctcgggacaactggcacaagcgccgcaaaaccgggggcaagagaaagccctaccaca

SEQ ID NO: 874287 - DNA, 99 bp, Homo sapiens
ttttcccaagaagagcaggaaatggccaaaccccagatcactggggtgatcctgctggctgttggagtctggggcaaacttactctgggcacctatatc

SEQ ID NO: 874288 - DNA, 99 bp, Homo sapiens
cggtcgggagttctctccaggcggcacgatgccgaggaaacagtgaccctgagcgaagccaagccgggcggcagatgtatggtggcatgagaggcatga

SEQ ID NO: 874289 - DNA, 99 bp, Homo sapiens
ggctattggctggactgttaggattcggttcatccagcagagacttgtcctttttcaagaaaaatgattttggattctggaagaaaattagatccagtc

SEQ ID NO: 874290 - DNA, 98 bp, Homo sapiens
ggcctcccaaagagctgggattacagcatttgctcttgcggaattaattgacaattcattgtctgctacttctcgtaacattggggttagaagaatac

SEQ ID NO: 874291 - DNA, 75 bp, Homo sapiens
ctcaaggcacacctgcgaacccacacaggatgcagagattgtgcggacccgggatcccgaaaaactcgcttcctg

SEQ ID NO: 874292 - DNA, 98 bp, Homo sapiens
cgggatcgtgaccgagaccgtgaccgagagcgtgaccgagagcgcgaatatcgtcatcgttagaagatttcaggtatgctgctgaaagtgggaatcct

SEQ ID NO: 874293 - DNA, 99 bp, Homo sapiens
atattccacactacctacagtgaaatagcatggatttcatccattatgctggctgttatgtacgcaggagccaaaccactgagcatattgttaaactag

SEQ ID NO: 874294 - DNA, 98 bp, Homo sapiens
tcaaaagactttggaagtggatttccggtgaaggatgggcggagaaagattctgccagaagaagagattgttggaccttcagatggaagtagttacat

SEQ ID NO: 874295 - DNA, 99 bp, Homo sapiens
ggccaagatgtctgacatggaggatgatttcatgtgcgatgatgaggaggactacgacctgatagccttggataccagttactggactttcattaatca

SEQ ID NO: 874296 - DNA, 99 bp, Homo sapiens
catgtctactcgcaggcgtcatgttgggaatcggggtgaagtaccatgcaagcatttcttaaaggtacatccatcagtactaaacccccgctgaccaag

SEQ ID NO: 874297 - DNA, 99 bp, Homo sapiens
caggcatctacagtgtcatgatccagaagaaaattggagcctgcccctcggcccataagcccttgttgggaactgagaagtgtatatggggcccaagct

SEQ ID NO: 874298 - DNA, 99 bp, Homo sapiens
tcccagaactggagattgacgtggatgagctcctggacatggagagtgacgatgcccgggctgccagggtcaagtgcattgctaaggaactgattccag

SEQ ID NO: 874299 - DNA, 99 bp, Homo sapiens
gccttttggctgagcgttcacgggccccgagcagccgcagcaatggcgctgagttcctctgctggagttcatcctgctagctgggttcccgagctgccg

SEQ ID NO: 874300 - DNA, 99 bp, Homo sapiens
ccagagatctcatagatggagcctggttcagccctggcacctccccagttagccaggaaaatcagccaggcgagcagcctcatcctcggggctcacttc

SEQ ID NO: 874301 - DNA, 99 bp, Homo sapiens
gtatatgcagaagcagactcacaaacagttgaatttctgaatgaaaagctggaaaaaagggaggctcagttattatctcttagtaaggaaaaagcactt

SEQ ID NO: 874302 - DNA, 99 bp, Homo sapiens
aaggagcacagggtgtccctgaagtgccgcaggcagctccgtgtggaggagctggagatgtctattatcctcccagtccacaacgctgaaccgtggctg

SEQ ID NO: 874303 - DNA, 98 bp, Homo sapiens
tctggagtaattggagccaagaaatgagtatagcatctgacgacaccaaaaagaagatgtacagctccatcctagtggtgggaggtggtttgatgttt

SEQ ID NO: 874304 - DNA, 99 bp, Homo sapiens
ttgaaggaagatttattttggataacttgaaacctcaccttgtggctgctttaaaggaagctgcccaaacccgaggacccagatgatgtggtaccagtt

SEQ ID NO: 874305 - DNA, 99 bp, Homo sapiens
cggatggcagggactgaaggtcacaccacagcgcgcagcacgctggctcttctcctgaacttcctcgcctgcctggccagcttctgtgtggaaaccaac

SEQ ID NO: 874306 - DNA, 99 bp, Homo sapiens
atcccagttggagagggaagaaaagctttggatgaaggagcttcaaacccaaagaggtaagcattcagggaactctaatgatccaggacaaagaagtta

SEQ ID NO: 874307 - DNA, 75 bp, Homo sapiens
gcggcgatcctgggctgcgggcaaggcggcacccgacaggaggatcctttattcgtccgaacaaggtaaattttg

SEQ ID NO: 874308 - DNA, 99 bp, Homo sapiens
tgaaatggatttgcatcttgtaatgtgtttaacaaagccacgaataacctataatggtcgagatttaatttgcatccagtctatggatgggatgctgat

SEQ ID NO: 874309 - DNA, 99 bp, Homo sapiens
cattcacagggtgcatgctgcagagtgctttactttcaacaaggtcaagtctggcaccatctttgacaacttcctcatcaccaacgatgaggcatacgc

SEQ ID NO: 874310 - DNA, 99 bp, Homo sapiens
caaggacaacaatgagatcgtggacaagatcatgggcaaaggacagatccagggagtggggaaggccagggccagattctgcagcgcttcccagagaag

SEQ ID NO: 874311 - DNA, 99 bp, Homo sapiens
ctcaagtaccacccggacaagaacccggatgagggcgagaaggtatgtttctataaaacctgataaccgaaaattggccaacggaacaaatgtcctcgg

SEQ ID NO: 874312 - DNA, 99 bp, Homo sapiens
cctcccaattgctagatcccagccaatccagggaagcgtgtcaccgtcgtggaaagcacgctcccagcccgaacgcaaagtgtccccggagcccagcag

SEQ ID NO: 874313 - DNA, 98 bp, Homo sapiens
atctttgctgcaagatcgaggctgtcctctggtgagaaggtggtgaggcttcccgtcatattccaggcaatgatagtaagaaatgctaaagatacagc

SEQ ID NO: 874314 - DNA, 99 bp, Homo sapiens
ggctgaggaggggccccagcagcccccgaaggccctatcaggacatggagtatgaaagacggcgaggctgtgagtgtggtgggctttggcgtctttggc

SEQ ID NO: 874315 - DNA, 98 bp, Homo sapiens
ccgccatgagcaaacggaaggcgccgcaggagactctcaacgggggaatcaccgacatgctcacagcctttggaggtgagaagtggaaaacaaatgtt

SEQ ID NO: 874316 - DNA, 99 bp, Homo sapiens
acaggttccaggtctttaacgtgagcccgctgcaggtgtgcggcccagtccgagacagcagctgttgtagcaaacagtgacgaatctcagcttctgaca

SEQ ID NO: 874317 - DNA, 100 bp, Homo sapiens
gcccgcaatcaccccttcctcactcagttgttggcttgctttcctttcacgggggtctgaaagcagcagaacaactgagtgaggaaggggtgattgcggg

SEQ ID NO: 874318 - DNA, 99 bp, Homo sapiens
gtctaatacaaatattaccccttgagatccttggtagtagcggctccagtatttccggatgttatcagccccatttgaagaataggtagatggtgaccg

SEQ ID NO: 874319 - DNA, 99 bp, Homo sapiens
gagaccacaatagaacactggatcgatcgggggatctaggcgacatggagccattgaagggaacaacacccttgatggcttggcagtatctgggtacca

SEQ ID NO: 874320 - DNA, 99 bp, Homo sapiens
tgcagcgggaaaaggctaatggcacaactgtccacgtaggcattcaccccagcaaggaatgttacgttcataacttactaaggattagtgtatattttc

SEQ ID NO: 874321 - DNA, 99 bp, Homo sapiens
ctctggaaagatgtggtgatggggcattcttgctaacaacgtgtatgaaaacattatagactggtattttcaattttcatttgcaagaaaatgatcagt

SEQ ID NO: 874322 - DNA, 99 bp, Homo sapiens
aggacctacagctgtcaccttcatctcttctcaacactgccagctgtccccttggatctcccagacagacaacagggttgtagatgagcatgagagtgt

SEQ ID NO: 874323 - DNA, 99 bp, Homo sapiens
aaacgctaccacagccagacctatggcaatgggtccaagtgcgaccttaatgggaggccccgggaggccgaggttcgggctggagtgcaatggcgtgat

SEQ ID NO: 874324 - DNA, 98 bp, Homo sapiens
ctgctcgccgtccccgccatgctgtctctagactttttggacgatgtgcggcggatgaacaagcggcagtttccagccagagacgacactcttccatg

SEQ ID NO: 874325 - DNA, 154 bp, Homo sapiens
cgaagggctccagcaacagctaaaatctcaaagacaagaggagacactgagggaacaaacacttctggatgcatccgatcacctgctgttaccagctaccacccataacaagaccacaagaccaaaaatgtcaattgtgttaccagcaataaac

SEQ ID NO: 874326 - DNA, 98 bp, Homo sapiens
ctggtgagctgtcctcatccactgctcgctgcctctccaggtataaaacaccctgttacacatgtctctggtgataattgttgttatactggaagttt

SEQ ID NO: 874327 - DNA, 98 bp, Homo sapiens
gataggtcctcagcccaggtggtggccgaaatgttattttaacgagtccacctggaaggccgctgtggtggaaggatgtttgactgcagagatgtggc

SEQ ID NO: 874328 - DNA, 99 bp, Homo sapiens
gtgcttgttgacccacttggtgaaggttttcttctgcacacgatcccgctcatctgtcaatggcttgaagatcattggctggattccaagtaggatcaa

SEQ ID NO: 874329 - DNA, 98 bp, Homo sapiens
gcctcacaagtagctgggactacagtttcagagtcaagtggtgagatcaaagacttttcaccaaaaaatgtcatttatgatgactcatcccagtattt

SEQ ID NO: 874330 - DNA, 99 bp, Homo sapiens
gatgatcacgcagctggctggcttcagtggaccaattggttcgagtgagtaaaaactaccgatcagtcatcagagcatgtatggaggaaatgcaccagg

SEQ ID NO: 874331 - DNA, 99 bp, Homo sapiens
ccccagcaccaaaggcaaggatttggacggtttctcattgatttcatgctgcaggtggagaaattttcagcctgtgtttacctgagttggctgaaatgg

SEQ ID NO: 874332 - DNA, 99 bp, Homo sapiens
aaacttgccagttgggtatcctcctcagtatccaccgacagcattccaagggatttatcaaagatgttcatgaagactcccttacagttgtttttgaaa

SEQ ID NO: 874333 - DNA, 98 bp, Homo sapiens
gcagatgtgggtgtgggaatctccggccaggagggtatgcagggagttctgggaaatcgttcattcatttacagatgaacagaaaagactcttcttgc

SEQ ID NO: 874334 - DNA, 98 bp, Homo sapiens
gacctcactgaccccagagtggcagaaaggctgatgcagcagatcattgataagagcaagagagacccctcggaagagattgagatcctcctgcggta

SEQ ID NO: 874335 - DNA, 100 bp, Homo sapiens
ggagagattccggtggatccctgagcattcgatgcacatgagggctcccaagttcaaactggcccagttgggatctgtagccattatagtgtcatctctc

SEQ ID NO: 874336 - DNA, 99 bp, Homo sapiens
gtaagacaagaggaaacgtttagcatcagtgactcacaaatcagcaacacagaatttctgcaagtaattggtatttacttatgggatgtagaaggcaga

SEQ ID NO: 874337 - DNA, 99 bp, Homo sapiens
cctctggcccaggacacagggactgggactgcctacattgaggactgcagtgtgctagcttttgttctggaccacctgctcccacatacccagaatgca

SEQ ID NO: 874338 - DNA, 99 bp, Homo sapiens
gaggatgatgcaaaggcagcaagagatgcacaggagggctctctaaatacgtacagattctgcgataatgtgtggacttttgtactgaatgatgttgaa

SEQ ID NO: 874339 - DNA, 98 bp, Homo sapiens
agatggcggctcagaagataaacgaggggctggaacacctcgccaaagcagagaaatagtgggcaccatgtccttgaagcttcaggcaagcaatgtaa

SEQ ID NO: 874340 - DNA, 98 bp, Homo sapiens
aactgtcaggtacctcaaagcatcatccagcccctcttagaacttgaccaaaatagaagtaaattaaagttgtacattggacacctgacaaccctctg

SEQ ID NO: 874341 - DNA, 99 bp, Homo sapiens
atgaggaggaaagtgacaaccagaccatgccagagtaatctcagctttctttagttactggatcacacatatccttcctgagaagagcagtgactaaaa

SEQ ID NO: 874342 - DNA, 99 bp, Homo sapiens
catggcattctgcaggtggcaggtgcagagcattgtagaccaaggagccatggataggagaagtatgggtgaaacagaaagtggagatgctttccttga

SEQ ID NO: 874343 - DNA, 99 bp, Homo sapiens
ccacacgtgttcaatacacctcccacctgtcctcaggcatatcaaagcatttctttgaaggtgttgaagctcgcgtggcacagggcataagggaggagg

SEQ ID NO: 874344 - DNA, 99 bp, Homo sapiens
ctactcttacaaaggaactgtccacactgctgaaaaatctggtaattcatttgcacacctgttagcaagaaacagaagttgaaggactggaacaagtga

SEQ ID NO: 874345 - DNA, 99 bp, Homo sapiens
ggagctgggaggagcactgcaaatttcactttggacacgtgagtcagaggtcactcctggaagcaaggcggctctagctaatttatgtattggagatgt

SEQ ID NO: 874346 - DNA, 143 bp, Homo sapiens
tacatgtacctcgccaaagaggaatcctttgggcctattatggtcatttctaaattccaaaatgggtcatcatcagatttgaaatatttaaagtggatacaaaactatttcagcaatgcagacaattaagtgtgttgttgtgg

SEQ ID NO: 874347 - DNA, 99 bp, Homo sapiens
caggactctagtaacccgcgaaatgatgggatagcgttgcaaatccttaaaagagtcttaacgcttcctgcctgacacagctcacttcaagaagtgcac

SEQ ID NO: 874348 - DNA, 98 bp, Homo sapiens
taccaagcaagaacagctaaaatgaaagccatcattcatcttactcttcttgctctcctttctgtaaacacaggaggtatctttaaaatagcttcctg

SEQ ID NO: 874349 - DNA, 99 bp, Homo sapiens
gcgagggttgaagattgtgaagcaatagcctaaggtcctactgctctgttggctcatgaaataggttttggaagtaaagttacaacacaccctcttgct

SEQ ID NO: 874350 - DNA, 99 bp, Homo sapiens
tcacatccatcaagggggaaaggcaagactcggaaagctagcctcctatctgccaagtcatccaccgagcccagcttgaagtcttttagcagaaaccag

SEQ ID NO: 874351 - DNA, 99 bp, Homo sapiens
ctggagcagcaagtgcaattttacgaaacggatcgaagtagaatgtatgacagtttgaatatgcactctttggaaaattcccttatcgatattatgaga

SEQ ID NO: 874352 - DNA, 99 bp, Homo sapiens
agcacaaagagcttgctccctacgatgagaactggttctacacgcgagctgtgctcttaaagttccgtacagataaaggaagagatcccagttctgata

SEQ ID NO: 874353 - DNA, 99 bp, Homo sapiens
tggattcggggctggacgcagcaagcggggcgctgtgtccccaagctccccgtcctcgggacccattccaacaatctcgtaaaacatggtggattacta

SEQ ID NO: 874354 - DNA, 98 bp, Homo sapiens
gatatgggaatcacagagtatgaaccaagggttataaatcaaatgttggaatttgctttccatggaagacgtcatagcacggatgcaagatgaaaaaa

SEQ ID NO: 874355 - DNA, 99 bp, Homo sapiens
gcagcctcaacctcctgggctcaggcattgaacctggccacatcccaggtaccgtgaacatccccttcacagacttcctgagccaggaggggctggaga

SEQ ID NO: 874356 - DNA, 99 bp, Homo sapiens
gatgggtctttcaccttctgccatgattgtgaggcctccccagccacatggaaccgttggacacgagttgccgctggttgtccaaatcaacaaccaggt

SEQ ID NO: 874357 - DNA, 123 bp, Homo sapiens
cagtttccgtgggtctgtgaagaggtcggcgggaccctcatggtgggccaaggtgaagtcagggtggcccctgctcagaaatgccactgagctacctgactggcgcccgcaggggccgccgac

SEQ ID NO: 874358 - DNA, 98 bp, Homo sapiens
taaaactggaagagaccagagaggtacagaacttgaggaagaggcccaacgggggcatcaagttatcagcagatgtcaaaccatttgtccccagattt

SEQ ID NO: 874359 - DNA, 99 bp, Homo sapiens
ttaggaagttcttcttctttttagatcctttaagaacaggtggcgacatgtctaagaatgtgagccagtcacagatggcaaaattgaaccaacaaatgg

SEQ ID NO: 874360 - DNA, 98 bp, Homo sapiens
tgaaggagtgcagaggcatcacctgaaagagcggcagcggcgaggtggacctgcgagagtgtgtggttgccctgtctgtcgtctgccggccggcccgg

SEQ ID NO: 874361 - DNA, 99 bp, Homo sapiens
aaaaattttgttggacaaattttggtgtttgttctattgtacagctccctctatagcacctacctgtggacagtagagacggggtttcacgatgttggc

SEQ ID NO: 874362 - DNA, 99 bp, Homo sapiens
agcagctgaacgagaaccaagtgcggacgctgtgcgagaaggtctcagatgatgataaagaaaagggagagggagctcttccaactgggaaatccaaaa

SEQ ID NO: 874363 - DNA, 99 bp, Homo sapiens
gccctgcagggaccatggaatccagagctgaattgctggactcgctgaagagagactacgcaggaaagccccagccacccatcaaatcagagagaagga

SEQ ID NO: 874364 - DNA, 99 bp, Homo sapiens
ctggacgacagagcgagactcttacacatgccgtagtcagtgagtttaatgtggccttcagagtccagtaatacattgtccagtttcaaatctctataa

SEQ ID NO: 874365 - DNA, 98 bp, Homo sapiens
ctggagagaccacagaggagactcaggaactgctgaaagaatatggggaattcagggtgcctgccaagcgttcctagaatcccatgggcctttgccat

SEQ ID NO: 874366 - DNA, 99 bp, Homo sapiens
tgaaagtgataaaataatatgggaaaaacatcaaattcttgaccaatctagggcgatctttgagctttcccaaggagaagaagacttgatagaagactt

SEQ ID NO: 874367 - DNA, 99 bp, Homo sapiens
tgggcccttgggcatctctttacagggaaaggtttttatctgaacgagtaaatggaagctcgtttgtggtggaaagacagccctgcatgccaacgcacc

SEQ ID NO: 874368 - DNA, 98 bp, Homo sapiens
tttcctgaagaacgttggggagagtgtggcagctgcccttagccctctgggatccaaggagctggttctgctggttggaccaaacctcgtgagccagc

SEQ ID NO: 874369 - DNA, 99 bp, Homo sapiens
ttttgtctttctaagcaatgtccccggcacctattgaatagtgatatacttgttatagaggatgaaggcatgttcaatgttgccttcctcagagtaaat

SEQ ID NO: 874370 - DNA, 98 bp, Homo sapiens
tcccttcatctgtggatgggcagaaacacagtgctctgtgcctatacagtgtacggataaaacagataaacaagaagcgctgtttaagcctcaggcta

SEQ ID NO: 874371 - DNA, 99 bp, Homo sapiens
actcccgccgctgctaaatatatccgtaggaatggagagggaccggatctcaggaaagctgaactagaagcagctgtgagaaagaagattgaatttgag

SEQ ID NO: 874372 - DNA, 122 bp, Homo sapiens
gcggggccacgctgcgggcccgggccatggccgccgccgatgccgaggttggaatgatggctcactgaaaactgaagatgacatggaagatgaaaagggagatgagaaagtcctgcccatta

SEQ ID NO: 874373 - DNA, 99 bp, Homo sapiens
ctgattctctccgccctgcacttttgccagctgaaggtccagaatctcctgctgtgtgtcctaactgtggtagtgaccacgtggttctcctcgctgtgt

SEQ ID NO: 874374 - DNA, 99 bp, Homo sapiens
tgactatcaacactgctatagtatacatgcatcgattctacatgattcagtccttcacacagttccctggaaatcttaattggcttagtgtcgacttca

SEQ ID NO: 874375 - DNA, 98 bp, Homo sapiens
aacaacacggtgttcatcttttctacagacataaatgaatgcgaagttgagccttgcaaaaatggtggaatatgtacagatcttgttgctaactattc

SEQ ID NO: 874376 - DNA, 99 bp, Homo sapiens
agaaactggaggagtcccgctcgaagctagagtggccaaatcaatgaaggtccctgtatatgagaccccagctggatggagattcttctcaaatctgat

SEQ ID NO: 874377 - DNA, 99 bp, Homo sapiens
ccagctccgaaatcaccaccaaggaaattcgaaatgagtcccatgactatcctcatagagtggccaagtttccagaaaacagaaatcgaaacagataca

SEQ ID NO: 874378 - DNA, 99 bp, Homo sapiens
cagatctgtaatctaattttctttcctcttagctctacagttttgattttgaagtcaacacctgttgtttctgatatgcagtatttggatttatctttg

SEQ ID NO: 874379 - DNA, 98 bp, Homo sapiens
cttgaagatgatttacttggagaagatttgctatctggcaaaaagacgtgaagccctccaatatgctagtaaacacaagaggacaggttaagctgtgt

SEQ ID NO: 874380 - DNA, 98 bp, Homo sapiens
gaggccaagcctgcagcggtggctgctgaaaatgaagagtgagtgagatcattggccgagacctgagtggcttccctgcacctcctggagaagagcct

SEQ ID NO: 874381 - DNA, 99 bp, Homo sapiens
tttacccaagaatgtggtattcgtgcttgacagcagtgcttctatggtgggaaccaaactccggcaggaatgtatcctgtcaggtataatgtcagtgaa

SEQ ID NO: 874382 - DNA, 99 bp, Homo sapiens
gtaatcctcttggaaagctggaaacatagtccgtaagactttgaccccgacgcaggcttcagtgattgccgcggatcagaagcctgagcactttggctc

SEQ ID NO: 874383 - DNA, 99 bp, Homo sapiens
gtctctgatgagctgagaaacaaagccacccagccaatgaaggtcctacaacgtgactttaaaaagacagcagaaagcaaaaatgtcccattggaacga

SEQ ID NO: 874384 - DNA, 98 bp, Homo sapiens
cgaaataaagatgccttaagccattttgtaattgcaggaggtctcaacatatgcactagtggaagtgccacctcatgtgaagaatgtctgctaatcca

SEQ ID NO: 874385 - DNA, 99 bp, Homo sapiens
cgcaagtacccgtccatcatagtcaactgcgtggaagagaagatggaccagcttttgggaaatatgattgaaatgtgggttgatcgaatggacaacatt

SEQ ID NO: 874386 - DNA, 98 bp, Homo sapiens
gctacttaacaaaggaggacctgagagtactcatggaaaaggagttccctggatttttggaatgccccaccttagaacagtatgccatgagagcgttt

SEQ ID NO: 874387 - DNA, 99 bp, Homo sapiens
cccgacattctccacctcctgggaggccagccattcccaaatgccccaaggatgaagaacggagacggtgtctcactttgtcgcccaggctggagtaca

SEQ ID NO: 874388 - DNA, 99 bp, Homo sapiens
ggcgtgaggaggtgaaggaagcttatggtacctgcacaccgacaggctggagcgcgagaggcaagtgtccagagaatggctgggatgaaagtacacttg

SEQ ID NO: 874389 - DNA, 99 bp, Homo sapiens
tcccaagtagctggggctacaggggtaaatcttttcaagacactaaaacaggtgactcagccctgtgagctttgtgcctgacatgactcaaatggccag

SEQ ID NO: 874390 - DNA, 100 bp, Homo sapiens
gcctcttccccagagaaggctgaagaggacattgggtttcagctgcacctctggctgcccggcagcctcctgtcctcttcagccttctctggggaagagg

SEQ ID NO: 874391 - DNA, 99 bp, Homo sapiens
gaagatgtgccgccgctgccaacgtcgagcggcgacggctggtatattgaagcaagtcaaagattacattaaacagtgtagcaaatgccaggagaaact

SEQ ID NO: 874392 - DNA, 99 bp, Homo sapiens
ttaatttgaacagtgttggaagtgtgcatagttatacaccgattggcacttctctgtttgatgaagagggagccaagattgtcaaagacctaatgtcca

SEQ ID NO: 874393 - DNA, 98 bp, Homo sapiens
tctggggaaaataatccagagatttccacagaaggactgggatgatacaccttttccacagggaattgagttgaccatttaatttggcagagcggaaa

SEQ ID NO: 874394 - DNA, 99 bp, Homo sapiens
gcacttagtgcccacaaccgcaccaagaagcacgacctgctgaggatggtgaagaagacgaagtaagtgctggagaaaaggagcaagatagtgatgaga

SEQ ID NO: 874395 - DNA, 98 bp, Homo sapiens
gaacgtccactgcgggccggcgaaagctgataacaacgaacttgatgcaagtgataggtttgccaaggtcagacctctcatcatccggatgaactgca

SEQ ID NO: 874396 - DNA, 99 bp, Homo sapiens
tatgacatcatacgagacaataaacgacatgaaaaggacgtaaggtagaagatgtgttacaacgttgtcgagaatatttaattaaaaaaataaatgcag

SEQ ID NO: 874397 - DNA, 99 bp, Homo sapiens
cagactcgagtgcgaagcgcgcagtcgccgggttatcaatactctggctgaccatcatcatcgtgggactgactttggtggaagtccttggttacatgt

SEQ ID NO: 874398 - DNA, 99 bp, Homo sapiens
cttggccagaggagagcggagtcaccagtatatctgtggtccatgttgctagctcgaacgctgcagctccccaagccaaaaagaggcgcgctcctttcc

SEQ ID NO: 874399 - DNA, 99 bp, Homo sapiens
cagaggatggaacacttcagtgcattcaagtgcactgacaggcagaactcaccagtcacatcaccaggatcctctccccttgcccagagaagaaagcca

SEQ ID NO: 874400 - DNA, 98 bp, Homo sapiens
gagcctcccagcatgactcagctacttcgagagaactgtcagaatgaggagatcctgaacagtctcaagtatgtccgtcctgggggtggataccagcc

SEQ ID NO: 874401 - DNA, 99 bp, Homo sapiens
ggagttgcaagtgggagcactggaagtacgggcagttgcagtgttggagctaaaagagtaatgccttctagctttttcctgctgttgcggtttttcttg

SEQ ID NO: 874402 - DNA, 98 bp, Homo sapiens
tgctgggagccacattcctcatttctcacagaaagttctccgctcccagacatgggtccctcggcttcctgcctcggaagcgcagcagcaggcatcgt

SEQ ID NO: 874403 - DNA, 99 bp, Homo sapiens
caatttcatccaaaaacatcctcatagaaacacccagaagaatactcgatcacatatccaggtacccagtcacctgtaatcccaggtactcaggaggct

SEQ ID NO: 874404 - DNA, 118 bp, Homo sapiens
agggttctaggaaagggtcacttagttctgtaacgccatctcccaccccagagaacgagggcttccgttacaagatgaggtctgtgtatgctcacttccccatcaacgttgttatcca

SEQ ID NO: 874405 - DNA, 98 bp, Homo sapiens
ccggatgtcctctgcgctggaatcagtcactgtcagcgacagacccctcggggtgtccatcacaaaagccgagatttacctatgcctaatgaaaaaaa

SEQ ID NO: 874406 - DNA, 99 bp, Homo sapiens
cgcgagtgcttctgaaacgtcagctgcgctcccctaggagtgctgagcccgcggaaccgcagccatgaacttgatggagagtttggattcattgctttg

SEQ ID NO: 874407 - DNA, 99 bp, Homo sapiens
cctcctgagtagctgggattacagtggcactgctgagctatttgcaacctgtgccaagaaggatatcagggtgtggcacacatcatccaacagggagct

SEQ ID NO: 874408 - DNA, 99 bp, Homo sapiens
gaagatcggagccaaatccaagaaagaaagggctattgcaagacacgaagtccgagaaattgagcagcgacatacaatggatggccctcggcaagatgc

SEQ ID NO: 874409 - DNA, 98 bp, Homo sapiens
acttacccctttaaaaatcttcccactgcatcaaaatgggccctcagattttgttggatttggtctagggagtcccagaaagaagtagaaaaagagag

SEQ ID NO: 874410 - DNA, 99 bp, Homo sapiens
attgaacggctgggccagagcgtggttgctgaccagttgaaagttaaagagaagttgactgcggatccagacagtgaaatagctacaaccagcctaagg

SEQ ID NO: 874411 - DNA, 99 bp, Homo sapiens
gtctcattggaggaacaccagtccagacctctcttccacctcactgtcacttccaacaccttctgatctgcactgaatttgccagctgtggacaagact

SEQ ID NO: 874412 - DNA, 99 bp, Homo sapiens
gaaaatatgcaagaaaggaagtttacatgcaaatgggagacaggagattatttggtagcaattgaagagaaaaacaaagctacatttctacgtgcttat

SEQ ID NO: 874413 - DNA, 99 bp, Homo sapiens
ggtgtatgtgcccacagtgtttgagaactatgtggcagatatcgaggtggatggaaagcagtatctttttgaaaatggaagggtagatgacattttctc

SEQ ID NO: 874414 - DNA, 99 bp, Homo sapiens
gtcccgtcgccggtctatcaccaggatgaatccgatgccagcgtcctgcaggcttcagtctgctgggaaagtcttgtttgcaaatctataacaaaagag

SEQ ID NO: 874415 - DNA, 99 bp, Homo sapiens
taacctggtgcggagccagcctgggtctcagccccgcgtacggcctttcacgagtcttcaagccttcaggcgagaaccactgtctctgatcaacgtgcg

SEQ ID NO: 874416 - DNA, 99 bp, Homo sapiens
cagactttgcggtggaaaaggaggacctgatcccaaccttgaagaaagtcctaaaagaaaaaatattacatatgaggaattaaggaataagaacagaga

SEQ ID NO: 874417 - DNA, 99 bp, Homo sapiens
ggtggagatgtggaggggtcgggagtagtctccagcagtcacgctgttgacagacagcctcgacttgtaattgctagagttcacccaagaggtagcaag

SEQ ID NO: 874418 - DNA, 99 bp, Homo sapiens
ttggacattctcatgcgagccttcattgatgtgactgctgctgccgaaaatatcaggctgccaaatgcaggcactcagaataacaagcctttgtattca

SEQ ID NO: 874419 - DNA, 99 bp, Homo sapiens
ctctgatcaaggccccattttcatcctttagcctctggttgtctgcttttaggtctggtaacatctgaggaatctgtgtgctcttcccacatcctgttt

SEQ ID NO: 874420 - DNA, 98 bp, Homo sapiens
atgtattcatctgcagcagaacaacttctggcagagtacttagagaggttgcggaaagagtagctgcagaaagggcagaatcttgtggcagtggtaat

SEQ ID NO: 874421 - DNA, 99 bp, Homo sapiens
ccctttctcctcggcactgtattctttacctgcttcccaatcccactgatgaggatcagcccatgcttccttcaaaatgtctactgttcacgaaatcct

SEQ ID NO: 874422 - DNA, 99 bp, Homo sapiens
gtgaagagaagtaccctgatatactgaattttgtggatgatttggaacctttagacaaagctagtaaagtccttcagtgaatctacagacctattttct

SEQ ID NO: 874423 - DNA, 98 bp, Homo sapiens
tcgaactcctagctcatttcgacagccttgtgaatactgatggtctggtgctaagaggctggtataactgtctgacactggcaatatatggatcagtg

SEQ ID NO: 874424 - DNA, 98 bp, Homo sapiens
cagaggtcaaacctgaaagaccccagttatggatgggagccaaatttgtatcctactgtggggcttcaaacaccaggagaagtggtcgatgccaattt

SEQ ID NO: 874425 - DNA, 99 bp, Homo sapiens
atttctagatggcatgacagaacttggactactggtgcctggatgatctgtaccgggagatggtgagatgctatgtggaaatcgttgagaagcttccag

SEQ ID NO: 874426 - DNA, 99 bp, Homo sapiens
caaggggaaggatcgggagtacacagacatcatccggcctatgagagctacaagaagaaggactacacccaggtggactacttaatcaacgggatgtat

SEQ ID NO: 874427 - DNA, 98 bp, Homo sapiens
aggaacactcctctgtcctcgtcatgttccacgccccatgtgtggatgaggtcaccattgtcaacattttgaccaaccgcagcaatgcacagagacag

SEQ ID NO: 874428 - DNA, 99 bp, Homo sapiens
gagatgtgatgctggagaacttcaggaacctgctcttagtagataactgcgacctccacttcaaggtggcccgagatcggagtagtggctatccgctca

SEQ ID NO: 874429 - DNA, 98 bp, Homo sapiens
tgggcacatcttcaactgcattcagcgagcccaccagaacacgtggtgtaactgtcacactccctcaggcaggaccatggaacacagcatctttggtc

SEQ ID NO: 874430 - DNA, 99 bp, Homo sapiens
gagatgaaccagtagatggcaaagcccagcactgaagtgaggaggatttctagccacatggctcaacactgggcggcagcagtgggcaatggcttcctc

SEQ ID NO: 874431 - DNA, 99 bp, Homo sapiens
aaagaaaaagtgcctgggttagccaagagagacagagaacactggatagacttcgaacatttaaacagggcaagtgtccagagaatggctgggatgaaa

SEQ ID NO: 874432 - DNA, 99 bp, Homo sapiens
ctaaatgaaaatgctgttgtatgcagtgaaagagttgctgaactacaaagaaagccaaatttgtatcctactgtggggcttcaaacaccaggagaagtg

SEQ ID NO: 874433 - DNA, 98 bp, Homo sapiens
aaggattaaggatccccaaagtctcagacttcatcattgaagtcaacaagagagacatagtcttcctggtggatggctcatctgcactgggactggcc

SEQ ID NO: 874434 - DNA, 99 bp, Homo sapiens
atggacttcaaatgctgtttgtattccagagactaggaagaaaaaatgctgggcatcttggtgcagcacaaagtccggagtggcgtctcgggcatcgtg

SEQ ID NO: 874435 - DNA, 99 bp, Homo sapiens
agaacgacaacaccgtgctcctcgaccccccactgatcgcgctggataaagatgcgcctctgcgatttgcaggcagcaaagatggttacaagcttccct

SEQ ID NO: 874436 - DNA, 99 bp, Homo sapiens
gacaacggagaccagacctactgcagccacgcgggcgagcggctgtgtggatgtcggcgaagccgcgggcgagagttgcatgctgagaatttgaaaaat

SEQ ID NO: 874437 - DNA, 99 bp, Homo sapiens
gcaactcagcctccggagtcttcaaaggtgactgcgtcctcacttgggagctgactgaggcagaactcactgatgacctttggtaatcctgctccttct

SEQ ID NO: 874438 - DNA, 99 bp, Homo sapiens
tgctgctgaaccaatgccaacaggtcacccgtgtgatgtggacacaacctctccgtgaaagtttttcctatccattccttgtacttcagatgtatattt

SEQ ID NO: 874439 - DNA, 98 bp, Homo sapiens
aagaaaaggagtcagggatggctcttacacagctgtattcttcaggacttgtggaatgtgaggatcaggatccacttaatcctgatagaagttttgat

SEQ ID NO: 874440 - DNA, 99 bp, Homo sapiens
tcagtatcgtcttactcctactgagctaaagcagaaatttaaagatatgaatgctgctatgaagacggccaagtgggagatgcaaatattaatacacaa

SEQ ID NO: 874441 - DNA, 99 bp, Homo sapiens
ggatggggctgaatcgctggaaacggttcacaaggaagccgagtcccaaggaaaatatatgcagatgatgaacattcttaagccaattgcctttgatgt

SEQ ID NO: 874442 - DNA, 99 bp, Homo sapiens
cattggaaatggaagcccagtcctctcctgttcttatttgctttatatatcatgtgtgttcctcactcagcacacgacggttctgccctttatattaat

SEQ ID NO: 874443 - DNA, 98 bp, Homo sapiens
accccgagcgccaccatgaactcgctcttcaggaagagaaacaaaggcaaatacagccccactgtgcagacccggagaaccatggccaactgtgagcg

SEQ ID NO: 874444 - DNA, 99 bp, Homo sapiens
gctgggctttgccatcttctgttaattagagacccacgcatgttggaaatatttcctcgttgttgatctgaacctcaatccaatccataagaaggttca

SEQ ID NO: 874445 - DNA, 99 bp, Homo sapiens
agaggacaccccagggctctaattgaaaagagaatccaattacaccttccaaaggtgaccaagaatatggcccaggtgaccaaagccctggacaaggcc

SEQ ID NO: 874446 - DNA, 99 bp, Homo sapiens
actttgttattggagaaacatgcagattatatcgcatcctatggctcaaagaaagatgattatgtcacctcatcatctcaaggaggagcattcccctgg

SEQ ID NO: 874447 - DNA, 99 bp, Homo sapiens
cctggatcagccacaaatgtacccccagtacacttactactatcctcattatctccaaaccaagtatgccaccacgggctgttccctgaccctgcacca

SEQ ID NO: 874448 - DNA, 99 bp, Homo sapiens
tgaaaactggacagagttcaccgcgtcaatctcaaatcccaaaacctttcttcccagccttgcatcttcagaaccttcaaggactcgttcaggaccatc

SEQ ID NO: 874449 - DNA, 99 bp, Homo sapiens
ctacgacaacttcagtgggcatcgagatgacggcatggagggtgctggagaatctggtaaaagcaccattgtgaagcagatgaggatcctgcatgttaa

SEQ ID NO: 874450 - DNA, 99 bp, Homo sapiens
gctgcggctcggggacccacagacacagccggggtcgggagccgcccggggcagggctcgggagagcggatgaaggtcaccgtgtccaaagggggcgac

SEQ ID NO: 874451 - DNA, 99 bp, Homo sapiens
gtatgaccttcacctcattaacagccaagaaccccatgtggggctgtgacaggcagaaggatggctccttgaagatactcatgtcctaattcccagaac

SEQ ID NO: 874452 - DNA, 99 bp, Homo sapiens
tgattctcctgcctcagcctcccaggtgccagtcacgaattgcccgaacattacctgctgatcagaagccagaatgtcggccatactgggaaaaggatg

SEQ ID NO: 874453 - DNA, 99 bp, Homo sapiens
cacacatgccctggaccttggggccatgacccctttcttctggctgtttgaagaaagggagaaggctgtgatggaatctgaaatgaagtttgacaagga

SEQ ID NO: 874454 - DNA, 99 bp, Homo sapiens
tggaaaacgctttaaaagctgcttcaggtgctgggactctggtgcccccaaccctgggcatcctcaggctttgaggagaatacacaggatttgaagtca

SEQ ID NO: 874455 - DNA, 99 bp, Homo sapiens
gtccttgattctgttgatataagcctgaacaacatctatacatttcaccttaaaaagcacaacttccaggttcaggacaccagaaaaagcagggtagca

SEQ ID NO: 874456 - DNA, 99 bp, Homo sapiens
cttgcatttgtttcagaatggtagcaccatcatttgtaatggttacatcaccttttccatcttgaatcttttgaatattgtagtcagacaaagtacgtc

SEQ ID NO: 874457 - DNA, 99 bp, Homo sapiens
agagagctttgacatctttgaagatgaaggattaattacacaaggtggaagcgccattgatgcaccatccaacctgcgtttcctggccaccacacccaa

SEQ ID NO: 874458 - DNA, 99 bp, Homo sapiens
agttggggcttgatgaaggcgtggatagcctgaaggcagccattcagggatgtcagagacgcccatgctcccatcctccctcatgctgctgaacacagc

SEQ ID NO: 874459 - DNA, 99 bp, Homo sapiens
agtctcattcagccattcttgaccagaaattaaatggtctcaatgaggaaattgctagagtagcatttcttctgaggccctgaagaagtatcaagtggg

SEQ ID NO: 874460 - DNA, 98 bp, Homo sapiens
ggaccccggcggcagacgcaggttcgggaccatgagctgcttgagaattacattgtggaaaacatgaagtcggagatggcccagatacagcagaatgc

SEQ ID NO: 874461 - DNA, 99 bp, Homo sapiens
tggaagatgaggaggtcgctgagagctgggaagaggcggcagacagcgggacccttttatcacatcgcctcctctgggagcctgccctgattgccttca

SEQ ID NO: 874462 - DNA, 98 bp, Homo sapiens
tgaagcttcttacttctcttttaaaacaactagggcctcaggtgcaacaaattattttagtcagtcctatggctgcccgaaaccatgttaatagaatg

SEQ ID NO: 874463 - DNA, 99 bp, Homo sapiens
ctttcaccagagtttcatgaacatttcaataaattgatggccagacctgcagttgctctacactttcagatggaggtgacacgagcagtgatgaggata

SEQ ID NO: 874464 - DNA, 99 bp, Homo sapiens
ttgttgtgaatccacagattttcactgctcatccggataccatgctgggaaggaaggatttgatgccctggatccctttattcccatcctggtttccaa

SEQ ID NO: 874465 - DNA, 99 bp, Homo sapiens
ctactgtgaccaagagtattgtggaggagaaagaattgtgccatgaaaaatggaaaactcctgagaagctgttccagcgtcaggagagcagcagacaag

SEQ ID NO: 874466 - DNA, 147 bp, Homo sapiens
gcatcccatttcccacacccactactccgctgactgggagggatggtagcctggccagcaacccttattctgaaaactacccctgagtgtggtcccacaggatatgtagagaaaatcacatgcagctcatctaagagaaatgagttc

SEQ ID NO: 874467 - DNA, 99 bp, Homo sapiens
ttcagaatgttgaaatagtcacagcccatggaatcaatgttttggagtattgggaaagggtcgttgtggtgcatagacccagagtatagacaaaatcta

SEQ ID NO: 874468 - DNA, 99 bp, Homo sapiens
aaacagaagaaggccagctttgaggaaggttgttggaagaggagcctttggagttgtttgcaaagctaagtggagagcaaaagatgttgctattaaaca

SEQ ID NO: 874469 - DNA, 99 bp, Homo sapiens
tgtctactgttttgaagcgttcgatcttttaacatcacatcacatgctgacagcacaagaagcctggcaggagatcgcagatgctgcggatgcttctga

SEQ ID NO: 874470 - DNA, 99 bp, Homo sapiens
atgaagttcatatactgcaacgcactgtcttctgcagccttaatcaccattttgcgaagtttaaccacccgggtaccgccgttcttgtcaccaccaact

SEQ ID NO: 874471 - DNA, 98 bp, Homo sapiens
gggaacggggcatcgcggttccaacgattatctttctcaaggaatagatctttctggaatagaagtgatagaaaatgatctactttttattgcaagag

SEQ ID NO: 874472 - DNA, 99 bp, Homo sapiens
ttatctggagcaggagaacacctaaagttcagaagtaatgacagtggaattcagcagagctctgatgatggaagagaatctttaccctccacggtgtca

SEQ ID NO: 874473 - DNA, 99 bp, Homo sapiens
cctgcctcagcctcccgagtagaaatggaggcaaacgaccattttaactttactggccttccccctgcacctgctgcctcaggactgaaaccctctcct

SEQ ID NO: 874474 - DNA, 99 bp, Homo sapiens
tgcgatctccgcctcctgggttcaagtgattctccttcctcagcctcctgacttgctgagactacagaatttcgctaaggagtttgtgatcagtgatcg

SEQ ID NO: 874475 - DNA, 99 bp, Homo sapiens
ttcatggagaacatgccgtggtacatggcaagatgacaacggcaacacgacaagaagtccttggcctctaccgcagcattttcaggcttgcgaggaaat

SEQ ID NO: 874476 - DNA, 98 bp, Homo sapiens
ctcacctggtcaatgcagacggacagtacctcttctgcaggtactggaaacccacaggcacacccaagtatggagagtcggcttgactacactgtgtg

SEQ ID NO: 874477 - DNA, 99 bp, Homo sapiens
aaactgaatgaactgataacggagaatggaactgtatgccagcagcttgttgtacaatatgaggccccaggattcctggcgaggtcctcctcccctttt

SEQ ID NO: 874478 - DNA, 99 bp, Homo sapiens
gcagctcacaatgaaaattgcatgtttccttgtattcaagactagtgtcaaagcagcaattttccagggcatccaacgacttcatcagaagaaggttca

SEQ ID NO: 874479 - DNA, 146 bp, Homo sapiens
cagcaagcggtatttactagaacctgctcaacagctgagggagactagaaatgatgctccctcagctgttgagcaggttctagtaaataccgcttgctgtgttttgatgttggtggctaagctcatccagtgtattgtgtttggcc

SEQ ID NO: 874480 - DNA, 98 bp, Homo sapiens
gcatttgttcagagatcaactgtattatcaaaaaacagaagtaaatttattcaagatccagaaatgccagatctggagtaaggaatattgtcatcacc

SEQ ID NO: 874481 - DNA, 98 bp, Homo sapiens
tcctaaagagcaagcctaactcaagccattggcacacagctggtggagctgtctaaggctcaagatatagaagcaggagatggcaccacatcagtagt

SEQ ID NO: 874482 - DNA, 99 bp, Homo sapiens
gcacccatcggtgacgctcttccgccagtacctgcgtatccgcactgtccagcccaagcctgactatgggctgtgggacagatgatgtctaccatgttc

SEQ ID NO: 874483 - DNA, 99 bp, Homo sapiens
acagtttaaaagccttggcagtcaaggtagatcgacacttgagaaagctggatcaggaactggctaagtttaaaatggagctggaagctgataatgctg

SEQ ID NO: 874484 - DNA, 99 bp, Homo sapiens
tctgagggaaaggacaagatgaagtggaaggcgcttttcaccgcggccatcctgcaggcacagttgccgattacagattttgagatacagagtgaaaat

SEQ ID NO: 874485 - DNA, 98 bp, Homo sapiens
ggagatccacagctaagacgccaggacccactggaagcctagaaatgggccgcgatgggcctcttggaacattggtgtgttcatctgcattcgatgtg

SEQ ID NO: 874486 - DNA, 99 bp, Homo sapiens
ggtgaaggaatgggacaagacccatctttatgcaaagccagcgttacagtaatgttccagaaatgtatgtcccagaaccaaccaatatacccattgaga

SEQ ID NO: 874487 - DNA, 99 bp, Homo sapiens
cgcagatgttgtcaaggtggcctaccaggaggccaggggtgtcgccatgatatgctgtgatagcatttggatgtgccagctgtccaaaattaacttgtg

SEQ ID NO: 874488 - DNA, 99 bp, Homo sapiens
ggactctccggccctgtgcagtagagcagagctgacatctgataaagacatgtaccttgacaacagctccattgaagaagcttcaggagtgtatcctat

SEQ ID NO: 874489 - DNA, 99 bp, Homo sapiens
gagggacataccactatatcagataagcttgacattacagccaagatggtgctgtcccagagacaacgagatgaactgctggagtacagtggcgcaatc

SEQ ID NO: 874490 - DNA, 99 bp, Homo sapiens
agaccattcagatgggatctttccggatcaatccagatggcagccagtcagtggtggagagtggaaagaaatacattggtccttgtggaggaagagatt

SEQ ID NO: 874491 - DNA, 99 bp, Homo sapiens
aaaagatgaaaatagagctgaaaaagactcatgctgctgagacagagatgacactggaaaaggtcagctcaagtaatgtcgtcttgaagacgggatttg

SEQ ID NO: 874492 - DNA, 99 bp, Homo sapiens
caacttcagatctgtgacaccggccaggcagcctgaatcaattaatttgaaagcctcgaagagcatggaccttgagatggggttttgccatgttgccca

SEQ ID NO: 874493 - DNA, 99 bp, Homo sapiens
ccatgatgtgatgctggagaccttgacacttatatcctccctggttatctgactggatcaagattggagatctgacttccaaaaattgtcatctttttg

SEQ ID NO: 874494 - DNA, 99 bp, Homo sapiens
tgaggcaatttgttaggccttttgttgtatttaatttttggaacaatttgatgagctaggaggtatgatctcgtgaaatcttgagagaaactgaatgac

SEQ ID NO: 874495 - DNA, 99 bp, Homo sapiens
ttatcctttggaaatgtgctcacactatgtcaagccctccaacatcctagtcaactcccgtggggagatcaagctctgtgactttggggtcagcgggca

SEQ ID NO: 874496 - DNA, 99 bp, Homo sapiens
agaaggctgctattgaaagagagtatgcacaggtgacttaagagattaaaattaatttggttgctgttggttctgaacaaataatgagttcttttattt

SEQ ID NO: 874497 - DNA, 99 bp, Homo sapiens
aaagaggctaaaactcaggctatacttttggagatgggatgaattgtaaaagcaacatcagcttgaccagtataaaattacagtggattgctcatctca

SEQ ID NO: 874498 - DNA, 99 bp, Homo sapiens
tgtgtcgttcttggcagaaattatattttccagcccgtgtctgcagggattttatattggaagacatggatcttgctgccaacgagatcagcatttatg

SEQ ID NO: 874499 - DNA, 99 bp, Homo sapiens
ttggtctcttcggaaagactgttccaaaaacagtggataattttgtggccttagctacaggagagaatacagattctgttcatcttgctctgaaattaa

SEQ ID NO: 874500 - DNA, 99 bp, Homo sapiens
aggagagtttaaacagccaaaacagttcattcatattcagcccaccattggttcaggcaatcttcagcggtgatccagaggagatccggatgctcatcc

SEQ ID NO: 874501 - DNA, 99 bp, Homo sapiens
cccagtgaaatgctgctgctgccatttcaactgttagctgttctctttcctggtggtaacagtgaacatggaaccctaaggactctgcaatatgaataa

SEQ ID NO: 874502 - DNA, 98 bp, Homo sapiens
tagtggccaacaatagtgatacactcaagctgttgaaaatgagcagctgtcctcatgtctctccagcaggcaacatcagatgctgacctgaaagaaca

SEQ ID NO: 874503 - DNA, 99 bp, Homo sapiens
ccgtcaaacacagccatccacctgaggtcagatcaagaagctgtcacagatggcagaagaaaacctgaggacaccatcacatggacgtggcaaggacct

SEQ ID NO: 874504 - DNA, 99 bp, Homo sapiens
caaaagccaagtggcaaacgataacaacgaacttgatgcaagtgataggtttgccaaggtcagacctctcatcatccggatgaactgcaatttccagaa

SEQ ID NO: 874505 - DNA, 99 bp, Homo sapiens
cagtacaagtccagcggagaaacaatcagccatgactgcctttgcactgtccatgctctcagcccaccacctcctccccctgccattgcagtggctaac

SEQ ID NO: 874506 - DNA, 99 bp, Homo sapiens
gtggactttgttggacagttgaatcgaagatacttggccacagccttctcttctttagatggttcaccaacttcctgagtagctgcagactgacaggaa

SEQ ID NO: 874507 - DNA, 98 bp, Homo sapiens
atagatcttctgcactgtttacaggcacaggattcactccttctccagttgcacagccacacccttcagctggccttaatgttgactttgaatctgtg

SEQ ID NO: 874508 - DNA, 98 bp, Homo sapiens
aggaaccagatatcttgaaaagctgccagaaaggccaaagaggtgctgaaaaaatatttggagtccaaggaggatgtggctgatgcacttctacagac

SEQ ID NO: 874509 - DNA, 99 bp, Homo sapiens
ctgacgacctgctacaacagaaggtatatgttggaaccagaccctgacaaaaggccggatatttaccaggtgtcctacttctcatttaagctactcaag

SEQ ID NO: 874510 - DNA, 99 bp, Homo sapiens
cagagatggaccatctcccaacaactacagctactccaaaccaaacagttgctgcagccaagtccagctaatgaggaaaagtttcgctcttgttgccca

SEQ ID NO: 874511 - DNA, 99 bp, Homo sapiens
aagaagcgaccgcggcggctgagacaacattttgctctgtcacccaagctgaactgaactgggctccagaaatcctcccacctcagcctcctgagcagc

SEQ ID NO: 874512 - DNA, 99 bp, Homo sapiens
aattgctgaaggaaacaactgaagcaaggaatgccttaattgaacaaatgcattgttctgggttggcatggcatcctgatgttgctactcagatggtcc

SEQ ID NO: 874513 - DNA, 99 bp, Homo sapiens
accacctctatccacccttcattcgcagcgacaccactttccctggagatcgtctggggaatatttttcatcttagttgcattgctgtttgtaatttct

SEQ ID NO: 874514 - DNA, 99 bp, Homo sapiens
ttgaattgaagaaaattgcacgtaatcacccaaatgccaaatcatttgaaacacagttgtcaagagtggaagcagaattgttaagaagagaagctcctc

SEQ ID NO: 874515 - DNA, 99 bp, Homo sapiens
gtcttcagcaccggggacaccaaaaagcagcccaagctccagccgccatctcctgggcacagacagaagcttgatgactctaaacctagtttgttctct

SEQ ID NO: 874516 - DNA, 99 bp, Homo sapiens
ccagtaaaatatggtgaactcattgtcttaggaaatcagagcctcattcccttagtagtgaagcattgatgaggagagcagtgtctttggtaacagata

SEQ ID NO: 874517 - DNA, 98 bp, Homo sapiens
ctggtgccccattacaacccgtggccctgtttgctgaaatgttggggccaaacaacttgatagagcctatgatgttcctttcaagctttctaaagttt

SEQ ID NO: 874518 - DNA, 99 bp, Homo sapiens
tgtgactcagctttactgtgatggggtgaacccagtgacttgattgtaaaaatttacagagcggaatcatatgctggtctccaagagtttaaagcagcc

SEQ ID NO: 874519 - DNA, 98 bp, Homo sapiens
ccgacactggttcccatgaagcggctaccaaagctgttctccaggagtttggtagagtcagtttaggggctggtgcaaaggatgagttgcacattgtt

SEQ ID NO: 874520 - DNA, 99 bp, Homo sapiens
tgaagttgcaaagcaacagtaatagctcatcaacagagcagacgagcagaccgtttattagctgcaggcaaatacgaagaggctatttcttgtcacaaa

SEQ ID NO: 874521 - DNA, 99 bp, Homo sapiens
gcgcctaaagtctgagagagggaagtcgcctctgtgctcgaagaggatcacctagcccgggtagaagaggcaatcacccgtatgcttgtgtgtgccctg

SEQ ID NO: 874522 - DNA, 99 bp, Homo sapiens
ccctacacagatatttgagcatgtgttcctgttccagaaagctgagtctgatctggattacattcaatacaggctggaatatgaaatcaagactaatca

SEQ ID NO: 874523 - DNA, 99 bp, Homo sapiens
aaccgctgctggcagttttgccaggtgtttgttaccttgtgacaaccatgagtggaaaaaactaattatggttcagcactggcctgagacagtatgcga

SEQ ID NO: 874524 - DNA, 99 bp, Homo sapiens
tggcttgttgtcagaggccccaaatgaaaaactcttcttcgtggacactggctccaaggaaaaagtacttacagatcatcagtatttggagaggacacc

SEQ ID NO: 874525 - DNA, 98 bp, Homo sapiens
ctgggagctggaggaaccgcgcatctccatcctctcctgagcacttgcctgcaacacccgcggaatctccagcccagaggttcgaagctcggatagaa

SEQ ID NO: 874526 - DNA, 99 bp, Homo sapiens
aggctttcctgggacgggaagtggccaaggaattcgaccaactcaccccagaggaaagccaggcccgtctggggctggagtgcagtgacgtgatctcgg

SEQ ID NO: 874527 - DNA, 99 bp, Homo sapiens
catctcccaaatgctctcagctcgcttcagtggcaacttgctggtcagcctgctgggcacctggtcgatgcaaacgacgctcatcaaacagagacctcc

SEQ ID NO: 874528 - DNA, 99 bp, Homo sapiens
ccccgtgcagaaggcatcctttcctccccctttagggtccacactgagagatgggcagagagctggtaaggcagggctgggaggctgaggtgggaggat

SEQ ID NO: 874529 - DNA, 99 bp, Homo sapiens
aacagatttagattagatcccattcctgcatttgtaaaaggagaatccatttcttgtgaaacgtaatctgggctttttgtatcagcagaataaaaagaa

SEQ ID NO: 874530 - DNA, 99 bp, Homo sapiens
ctgctgcacctcccggctcaggccatatgcaggtcccctgttggccattccaatgggtggcggtggctgcggggagctggttccagttctttcctccgg

SEQ ID NO: 874531 - DNA, 99 bp, Homo sapiens
ttacagcttagcttccaggatgatgaggttcatgcttgaaccagatccggaacatagacctgatatatttcaagtgtcatattttgcatttaaatttgc

SEQ ID NO: 874532 - DNA, 99 bp, Homo sapiens
gccatctttccaactgtcatctttcatgctaccataggttttaggagctggcaaggatttttaggtgaatcttggatctatagtgggaacattctgtgg

SEQ ID NO: 874533 - DNA, 99 bp, Homo sapiens
ctgacagtcccaaaggggctggagatgccaccccggcaaagttcgccctagtcatttgcttcactgtctttggtgcaacactaacaaggcttgtctgga

SEQ ID NO: 874534 - DNA, 99 bp, Homo sapiens
ttaggttctgctggtcacacaaccctcgggatcacacttatgattggtgaattatgtaacctcattacgctggatgtagctcacaatcaacttgaacac

SEQ ID NO: 874535 - DNA, 99 bp, Homo sapiens
ctctggaacttctgcccagctctccttgaatgccgggacattctgcttcctgtcatcaccaaagagctgaaggagctgctggagcagaaggatgacatg

SEQ ID NO: 874536 - DNA, 98 bp, Homo sapiens
tggagtgcgtgggggaccggctgttggcgggattcactccttctccagttgcacagccacacccttcagctggccttaatgttgactttgaatctgtg

SEQ ID NO: 874537 - DNA, 99 bp, Homo sapiens
caacgagaatgaagccatccaatggatgcaggaaaactggaaagtatgtgatggtgatgggagtggttcaggcctgcagccctgagccctgcctgcagg

SEQ ID NO: 874538 - DNA, 99 bp, Homo sapiens
gtactccagacacaacccggccatcgaggccctgctgcacgacctcagctcccagaggatcaccagcgtgggtcctgagttggaaaaagatgaatcaga

SEQ ID NO: 874539 - DNA, 99 bp, Homo sapiens
aaccctgaggaagacctcacagctgacaaggcaaatgcccaggccgcagctctgtataagaaacttgggtccctgaacaatgagcctgcgctgccctcc

SEQ ID NO: 874540 - DNA, 150 bp, Homo sapiens
tccagatgaggtgatggcaacggccaacttcggcaagatccagatcgggatttacgtggagatcaagcgcagcgatggaaggccgctgcttgtttgtcatcctgctcatggcggtgtactggtgcacggaggccctgccgctctcagtga

SEQ ID NO: 874541 - DNA, 99 bp, Homo sapiens
atgggcaagctgcaccttgcatgagggacaaagctacacagagagcccgagcccagcacattgtgccctgtactatatctcagctgctttctgccactt

SEQ ID NO: 874542 - DNA, 99 bp, Homo sapiens
aggcacacaagtgtgaggagttgctaaatgctcagattgcttccaagtatgatcatcaggcagaagaagatcttcgcaattggatagaagaggtgacag

SEQ ID NO: 874543 - DNA, 98 bp, Homo sapiens
gacaaccaggcaatgctggatagataccgaattcttatcacaaagcctggaggccggccctgtatctcgccgccctggactgtgctgaggagaccaac

SEQ ID NO: 874544 - DNA, 98 bp, Homo sapiens
ggctctggatctccgattgtcaagttctcgagcagcttctattgagagtagcatgtttgtctccaagagacgtttcattttgaagacatgtggtacca

SEQ ID NO: 874545 - DNA, 99 bp, Homo sapiens
gcctggctctgaattacatctgacccccaaagctcagcagttccaatttgagccgctgtgaaaaaggcctccaccagcctctcaccagaagagattgct

SEQ ID NO: 874546 - DNA, 98 bp, Homo sapiens
acagttgaagctccaggaggtcaaaaggtgaaaaaccatacaagtgtcaaatttgcaatcagtcttttagaattaagaaaacattaacaaaacacctg

SEQ ID NO: 874547 - DNA, 99 bp, Homo sapiens
gaagatattggccgacaaggaagtgaagaaggcgcatcactcccagctgcgcaaagcttgcgaggtggcgttagatccagacatttaatgtggatgcac

SEQ ID NO: 874548 - DNA, 99 bp, Homo sapiens
aagctgtttcctaccaggtcacacactgttgcagcgcaggtcatcctggcgtgcaactcaggccccgccctgaacgacgtgacccacagcgagtccctc

SEQ ID NO: 874549 - DNA, 99 bp, Homo sapiens
aggagggcgagcgaggaggatggcggagtcggggctcctgacgggtctgacatttcaggaggtggagaacttctttactttcctaaagaacattaatga

SEQ ID NO: 874550 - DNA, 99 bp, Homo sapiens
aataggaacagctccggtctacagctcccagcgtgagcgacgcagaagacgggtgatttctgcatttccatctgagagctatttcaggatctcagtcaa

SEQ ID NO: 874551 - DNA, 98 bp, Homo sapiens
gcggaccctacactgtctgatgaaagtagttcgaggggagaaggggaaccttggaatgaactgccagcaggcgaattatatccagatcgagagacaga

SEQ ID NO: 874552 - DNA, 98 bp, Homo sapiens
aaaacaaaggcattcaggagccacacagaaagatgaaggtcttagaatcattgattggaatgatccagaaattcccttatgatgaccctacttacgat

SEQ ID NO: 874553 - DNA, 99 bp, Homo sapiens
gtgtgtggaggtcattgcaaaggaaggacaaaacctgaaagagctatatttggtgtcctgtaaaatcacagattatgctatatcgagaagtttactgac

SEQ ID NO: 874554 - DNA, 100 bp, Homo sapiens
cactggtggcatccagtggtggccagtagagggtgccgaggttcttgatctcctccttgttcacctcctcctctactggccaccactggatgccaccagt

SEQ ID NO: 874555 - DNA, 99 bp, Homo sapiens
agggatttcgccgcccgctttcaggcccgtgccactgcagaacaaattagacttgcacagatgatttcggaccataatgatgctgactttgaggagaag

SEQ ID NO: 874556 - DNA, 98 bp, Homo sapiens
ccatctccatcacccaccaacaacaccacaataatccacagccaagaaaatgcttggacagaagagatgagtactatttccactaaggcctagaattg

SEQ ID NO: 874557 - DNA, 99 bp, Homo sapiens
gactaatgtgcggacgccgggagcttctgcgcttgctacagtccgggcgtcggcatcggcgtgtcataagatccatcacagctgcaaaatacagagaga

SEQ ID NO: 874558 - DNA, 99 bp, Homo sapiens
cgccattcacttttgaagggaatttctgcccagatagtgtctgcagctgattaaactgcaaatatctcatgaagctgctgcctgtatcactggtctccg

SEQ ID NO: 874559 - DNA, 99 bp, Homo sapiens
acttgctgttgctgttggtctttcaattggttctgccgacttggtgaaggagttgagctcgataggctggaagggaagttgtaagaaaggtatggagtc

SEQ ID NO: 874560 - DNA, 98 bp, Homo sapiens
atatatcgagttagtggcaatctggcaacaatacagaagttaagatttattgtcaaccaaggcaacctaatgaggcctctcttgaattatggtattgc

SEQ ID NO: 874561 - DNA, 98 bp, Homo sapiens
agaacctgacagaatggatagaaattttaaagactgttgtgaacagggatgtacctaatcaatcccacagagtattgatgaggaaactgaagtttgga

SEQ ID NO: 874562 - DNA, 99 bp, Homo sapiens
aggcactgctggcaaacagccaaaaaggatttcaccgttttcctcaataccaacaaatcctcctcttctaaatagactgatgatgagtatattcctctc

SEQ ID NO: 874563 - DNA, 99 bp, Homo sapiens
tccgctcgttctgtgcgttctcctgtcccagatggactcaccctgtcacccaggttggactgcactggcctcaacctcctgagttcaagtgatcgtccc

SEQ ID NO: 874564 - DNA, 99 bp, Homo sapiens
gcaaattaccattgaaattgccaaaggccaggggttatcaccatgcaagctttgtcggaagaggaccggaggctctggatggaagccatggatggccgg

SEQ ID NO: 874565 - DNA, 140 bp, Homo sapiens
gatacatatggtatgttttcatcaccagggaattggctcactcaattatggaggttgctctctgcactgatgctctctgcatgatacatatggtatgttttcatcaccagggaattggctcactcaattatggaggctga

SEQ ID NO: 874566 - DNA, 99 bp, Homo sapiens
ctggaatcatgggagaaaaccagacctccacttccaaggatatagagcagggccgttgctccagggagaactgcaaatatcttcatccacccccacatt

SEQ ID NO: 874567 - DNA, 99 bp, Homo sapiens
aagggtcactttggacctatcaacagtgttgccttccatcctgatggcaagagtccacagcaggagcatcattattggctaatgcctcacctctgactc

SEQ ID NO: 874568 - DNA, 98 bp, Homo sapiens
gccaagcaggtgcagaagaagtttagcagggcccaggagaaggtactgcacaaaaccgaggactatttgaggcaagtgctatgtaaagccgccgagtc

SEQ ID NO: 874569 - DNA, 99 bp, Homo sapiens
aaaatcggtgaagagaggttttgaattcacgcttatggtagtggaacagtgcaaccctgaaactcgtcctgttgagaaaaaaataagatcagctcttcc

SEQ ID NO: 874570 - DNA, 99 bp, Homo sapiens
ctgacctcaataaggacaagcctgtcattcctgctgctgccctagctggctacacaggttaatggtgcaatgtaagaaacctttaaaagtttctgatga

SEQ ID NO: 874571 - DNA, 99 bp, Homo sapiens
ggccacttcccatgaacataattcctgtaatcagccaaaaaattctatggtcatctaaaaagcctgtgtatacccgcacgggtaaatgaaatttagaag

SEQ ID NO: 874572 - DNA, 98 bp, Homo sapiens
gggactaccagaatatttcaagaaatgccccagcatgagaccagatgtaagctctcctccatccagctcctcaacagcaacaacaggaccacctccca

SEQ ID NO: 874573 - DNA, 99 bp, Homo sapiens
caatgttggggaggaggtggacgcagagcagctgatccaggaagcctgtcggagctgcctggagcagcattcaattcgagcactggcgttaagagtttt

SEQ ID NO: 874574 - DNA, 99 bp, Homo sapiens
aggaagtgctgcttcaaacgggcagggctctaggaaacatatgttacgatagccaaaagaggcacagttagatgaagaaggacagtttcttgtcagaat

SEQ ID NO: 874575 - DNA, 99 bp, Homo sapiens
agttctctcgatcagggcatacatctttcttcgacaaagggggtatagaacaggctatgcttacaggcatcctctcattcgagagaagcctaggcacaa

SEQ ID NO: 874576 - DNA, 99 bp, Homo sapiens
ggaaaggctctcagtgaaaaagaccccttatccctctggacagaatgcaggtccaaccacgctggtataccctcaaacccctcagacaatgaattcaca

SEQ ID NO: 874577 - DNA, 99 bp, Homo sapiens
gaactcaaccattaagcaaaacatgggaactcagtttatatgagttacaacgaacacctcagcacagctaactttggagacctaccaagaatggtgcaa

SEQ ID NO: 874578 - DNA, 99 bp, Homo sapiens
tgcgggatagacggggacaatgaggaggagacggagcacgccaaaggcgacttttgctcaaaggtgaagaacaccatctactgcaacgtggagccatcg

SEQ ID NO: 874579 - DNA, 99 bp, Homo sapiens
cagcgtcttcccacatttctcgcacttcaggcagggccgatgccagtccttgcccagagaggtcaccctctcggccttgggtccgaagaggattccata

SEQ ID NO: 874580 - DNA, 98 bp, Homo sapiens
ccgtggtgaagcatgaagtcacagggctactgttttccaatcctcaggaattttggagagtaaaaggctgaaccttgttaaagagaaaaccattaatc

SEQ ID NO: 874581 - DNA, 98 bp, Homo sapiens
aaaaacagtgtaacatttgtggctgagcaggtttcccatcatccacccagcatttataagacgctgtttggcatatcgaaaagaagatcgatttgatg

SEQ ID NO: 874582 - DNA, 99 bp, Homo sapiens
gtattttttgcgttcatagaagaggtctgtcttagagctccccagattgacaatctttgggcagccatctctccactcggatgtccagaggccatcctt

SEQ ID NO: 874583 - DNA, 99 bp, Homo sapiens
ctagccagactcagggatcaaagagcaaacagattcagtggcctgcattgattaatcctaccatatgaaagatttattaaaggagaagaagataagccc

SEQ ID NO: 874584 - DNA, 99 bp, Homo sapiens
aattgtccagtctctccagacactgggtctgactatttctgaacaacaagcagagttgattcttcaaaggaaaggacttagaagccttacaaatacatc

SEQ ID NO: 874585 - DNA, 99 bp, Homo sapiens
atccatccagatgaggatatatccctggtctctaattaacagaagatggcaaagcccagccacagcagctatgtccttcagcagctaaacaaccaaaga

SEQ ID NO: 874586 - DNA, 99 bp, Homo sapiens; identical to SEQ ID NO: 866200

SEQ ID NO: 874587 - DNA, 99 bp, Homo sapiens
ttcaaccacagcactgcaggcctctgttgccagaccagcaccatcaaacaggatgactttaccgctcgtctctttgacatccacaagcaagtcctaaaa

SEQ ID NO: 874588 - DNA, 99 bp, Homo sapiens
ttcatgccgctgttctttgtttccccggtgtctgttgcagcttgcgtttggggctttcgacatgacaggtcactagagctcccctttgaattggagatt

SEQ ID NO: 874589 - DNA, 99 bp, Homo sapiens
aggtgacgggcacaggtgggcctagaggagttcgactgtggagaaacatgcgtgtcctccagggcctggatcatgtctgggtcaagtgctgtgctcacc

SEQ ID NO: 874590 - DNA, 99 bp, Homo sapiens
caacatttcacccaaaggatcaaccaattttacaccattgtcttctcgatggcacagattcactttcactattatgtctagagctggttgactccgagt

SEQ ID NO: 874591 - DNA, 100 bp, Homo sapiens
atggttctgaggacaatgtccaggtgcgagcttgtgtgcaggtcaaacttccaaaacatggcgccttttcttgtggctgtagaacttgtcctcagaacca

SEQ ID NO: 874592 - DNA, 99 bp, Homo sapiens
agaattatacctagaagtctactaatggacagttagtcacccacctacatgttgaggtccagctgggagctccccgacctccaggagggcaagatccaa

SEQ ID NO: 874593 - DNA, 98 bp, Homo sapiens
acaaaacctgtcttggaagagctcatctcagcccggataaggactgtaatgatcacagaattggcagagggggtcgatttgggaggaaaggtgtggct

SEQ ID NO: 874594 - DNA, 99 bp, Homo sapiens
acaaaatatgctcgatggatagcattcactggaacaattcaattaaaccccagctatatcagggcaatattgaggagagcagagttgtatgagaagacg

SEQ ID NO: 874595 - DNA, 98 bp, Homo sapiens
agcgcccggccgaacccgcgatggaataatgcccagcggcccgccaggtcccggggatggagaagtttatgtttgggatgtgaactcaaggaagtgcc

SEQ ID NO: 874596 - DNA, 98 bp, Homo sapiens
cggacttcaatgcccagtccccagctcgccagcggccatgaagcccccaggaggagaatcgagcaatctttttggaagtccagaagaagctactcctt

SEQ ID NO: 874597 - DNA, 100 bp, Homo sapiens
ccagaaaggattgtgacatacaggagaagcatcacggtgttcgactacgtgggtttcatagctcaattctgggtccaacgatatgtcacaatcctttctg

SEQ ID NO: 874598 - DNA, 99 bp, Homo sapiens
ctgcaggctgactcacaggcggctccttctcctcagagtcactgcgctttcgctttgccagggacaagagctccttggttcttccgagcgctcagctct

SEQ ID NO: 874599 - DNA, 99 bp, Homo sapiens
gtggcggctcagatggtagtccctgatgaaggccttgccacacccttcatagtcacaaacaaatggtctctggtctaaatactgagggagaagctttgc

SEQ ID NO: 874600 - DNA, 99 bp, Homo sapiens
gcactgagggtgaagtggcaggaggaggaggaggggctccggctggtctgtggtgagcaagagtgagccatggagctacgtgtggggaacaagtaccgc

SEQ ID NO: 874601 - DNA, 99 bp, Homo sapiens
ggagcgccccttcgcgtcccctgcaccatgagctggggcaccgagctctggaatatatacagccctgctctgggacacacctccattggatttaaaaga

SEQ ID NO: 874602 - DNA, 99 bp, Homo sapiens
ttagagatggtgaagaagcaggtgcttatgatggacctaggactgctgctgggcttcgctgacttgaacctggccgagtttgcgggctcgggctccacg

SEQ ID NO: 874603 - DNA, 99 bp, Homo sapiens
gagagaggcaccgggatcgtgaccgagaccgtgaccgagagcgtgaccgagagcgcgaatatcgtcatcgttagaaggaccgtctcattgcacttgatg

SEQ ID NO: 874604 - DNA, 100 bp, Homo sapiens
catctttgtctttgtcagcatttgctgtagtgtcaggagtatcagtaagtgggggcggagatgctacctggaaatagatgaccactgcaaagacaaagat

SEQ ID NO: 874605 - DNA, 99 bp, Homo sapiens
ttgacacatgtcactgtgcactgctcttctcgctgggggatctaccgaacagaaagggacaaagggacattgtatgagctcaccttcaaaggggaccac

SEQ ID NO: 874606 - DNA, 99 bp, Homo sapiens
ttgaaaagttgcagataaacagtccaccatttgaccaaccaatgagtcgaaggtctcgtagagcttccttaaacctatgagaaccccaaagacattaaa

SEQ ID NO: 874607 - DNA, 98 bp, Homo sapiens
gaccacaataaaagagacctctacttagctcagcaattcttaccttatggaaaagagtatgatatttatgtatcctatgcaaggaatgcggaagaaga

SEQ ID NO: 874608 - DNA, 98 bp, Homo sapiens
ctgttggaggaactggcccggaaacaggaggacgagatgccccttgtccaggagttgccactgctgaagcttggggtgaattaccttccgtccatctt

SEQ ID NO: 874609 - DNA, 98 bp, Homo sapiens
gcaggtggacttcttgcaacaggttaacgtgtatggcgtgtgcgtgccaggaattactctcacttccaccacccgatgtatggaaactgctatacttt

SEQ ID NO: 874610 - DNA, 99 bp, Homo sapiens
cagcaacgcatttttgagcctccacctcccaaaaaacagaatggagcaattggaagaaagtcttgtttctggcgctggagacatcaagcttactaaaga

SEQ ID NO: 874611 - DNA, 98 bp, Homo sapiens
gcagtaaagacaaagatgtcaggcctgcggcccggcactcaagtggaccctgagattgagctttttgtaaagttctttattggtgaaaacatgaatcc

SEQ ID NO: 874612 - DNA, 99 bp, Homo sapiens
cccagatcacctcgctcgacgtgttgcagcacatcctcatccgagcctttgatttgagtggctggtggatagcgaggtggtcatgctttctgcgcactg

SEQ ID NO: 874613 - DNA, 99 bp, Homo sapiens
cgcaggtgaccccttagcccagctccagtgggcgggtggcagggtgataaaagaaaatgtggctgaagttacccgaagttcagcttgcagtgtaattca

SEQ ID NO: 874614 - DNA, 99 bp, Homo sapiens
cgggactcacggcagaagtgagctggaaggtcttggagcgaagagctcggaccaagcgctcagggccgttgctccagggagaactgcaaatatcttcat

SEQ ID NO: 874615 - DNA, 99 bp, Homo sapiens
gactcctctagttgctcagatataccaaaattggaaggagatagggccgttgctccagggagaactgcaaatatcttcatccacccccacatttaaaaa

SEQ ID NO: 874616 - DNA, 99 bp, Homo sapiens
agggatgaccccaacccggtgttcaacgaagccatgatcttctcggtgccagccattgtgctccaggcagctgacacacaagagttcaggaccaaactg

SEQ ID NO: 874617 - DNA, 99 bp, Homo sapiens
tttgaagtgacatcctgttatttccctatcgattttacccctgcatgtaatgaatttactacacatgtgatgaaccttctccgagaacagagtagaaca

SEQ ID NO: 874618 - DNA, 98 bp, Homo sapiens
cgttgcctgctcccggagggagacgcgctgccgaggagaacccagcggaattttccagttcatatgaagaggtgatctctcaaataaatacgtcatta

SEQ ID NO: 874619 - DNA, 99 bp, Homo sapiens
ctcaatgtcaagaacatgggtcttggcctttgtaaggatggttttaccataattctttgtgctcgtcaaaccactattcaaatagatatttttcttccc

SEQ ID NO: 874620 - DNA, 99 bp, Homo sapiens
gatcgacgcggacagcgggctggagcctgacgagctggcggatgacttcaaacctgcttctattgacacttcttctgaaggataccttgaggttggtga

SEQ ID NO: 874621 - DNA, 99 bp, Homo sapiens
tgaaaacgtcacttttaaaaaataagtaatgccatctgttttcctaaaagactgaaatgggggcgaccattcttagtctggagtgcaatggcacgatct

SEQ ID NO: 874622 - DNA, 99 bp, Homo sapiens
ctcccaaagtgctgggattacaggcagacagaatggaggaagcggaaggcgtctcggaggggagcagaggaagaggaggaggaggaagatgacgactct

SEQ ID NO: 874623 - DNA, 99 bp, Homo sapiens
agcctcctgagtagctgggattacaggatgctccagaccttgtatgattacttctggtgggaacgtctgtggctgcctgtgaacttgacctgggccgat

SEQ ID NO: 874624 - DNA, 99 bp, Homo sapiens
gacatggaacgcatttggcaatatgtctattctaaggaccagctgcagactttctcagaggagacgctgaccggaaaggagattgagattgacattgaa

SEQ ID NO: 874625 - DNA, 98 bp, Homo sapiens
aagctgttccgtaatctcacaccaagatggtctccatcatcaccagttccagtagtgaaaaacagaacccaacaaactcaaaatacattacatttacc

SEQ ID NO: 874626 - DNA, 99 bp, Homo sapiens
agaatgaccagcgaaatcggaaaagaaaagctgaaccatatgaaactagccaaggctgaccagtgcaccggtcttcagggcttcttggttttccacagc

SEQ ID NO: 874627 - DNA, 99 bp, Homo sapiens
aaacgccggaaggaggctacttctatattagaagaaaatcaggctctttgcacaataacttcatttcccaggtactcatgagaagcaagagatgaaaaa

SEQ ID NO: 874628 - DNA, 99 bp, Homo sapiens
gccatggccttcctctcctgcgtgagaccagaaagctgggagccctgcgtggaggtctagcacataccgctccaagggctttgacgtcacagtgaagta

SEQ ID NO: 874629 - DNA, 99 bp, Homo sapiens
tgccatgttgtgggtatcacttaccagcacattgaccgctggctgctggccgagatgctcggggatctgtcggcctgtagcagccatgatggaggagga

SEQ ID NO: 874630 - DNA, 99 bp, Homo sapiens
caggcctccaacatggagtacatgaaccagacgtcctgggtcctctccagcatggcagccctctactggagggtgaaaggccaaggaaagaaggcaatc

SEQ ID NO: 874631 - DNA, 99 bp, Homo sapiens
gcttgctgttactggctgtcttcttaaactgcccatccgacttggttgtatcaaagccgggcgtgcttctccttcacgggggcctcctgggtgttgatg

SEQ ID NO: 874632 - DNA, 99 bp, Homo sapiens
ccaggctgcagcgggacagtgccagggtccggctctggaacgtcctcatctcctcagggtctccagggatcaccatctgtaatcccggctactcaggag

SEQ ID NO: 874633 - DNA, 98 bp, Homo sapiens
cacaaccatgcggacatcggcttctgcctggtgctctgcgtcctcatcgggcttatgttcgaggagttgcctccttataacggttttggactagtgga

SEQ ID NO: 874634 - DNA, 98 bp, Homo sapiens
tgctgctgttgatgctggctttgttcccaatgacatgcaagttggacagacgggaaaaatagtagcaccaggccagctctcaatgttgcaagaaaaaa

SEQ ID NO: 874635 - DNA, 98 bp, Homo sapiens
atggaggtgagagtttcacagctgctggcagtaactgttctgggattaccgccagcctcggaaatacctcaatattcttccttgccaggtgcctgtct

SEQ ID NO: 874636 - DNA, 99 bp, Homo sapiens
ttggttgcatctgctaaagaggatcctgccaacattttacagaggtgacattgtgattgcaaaaagcccaagtgatccaaaatcaaatatttgtaaaag

SEQ ID NO: 874637 - DNA, 99 bp, Homo sapiens
ttttgcctctttctctcaggctttcctacaactcatgcccagcagcagcaagcagatgatgaagaacgagagcttcaaatggatcctgcagactatgga

SEQ ID NO: 874638 - DNA, 99 bp, Homo sapiens
tggttgcgtgaggacgagcgtttccgcctgctgctgaggatgctggagaagcggagtcactttgtggcatgtatgacagccatcttaaaccagatgggt

SEQ ID NO: 874639 - DNA, 99 bp, Homo sapiens
cacgaagccagtatgtttgcagaattctagcctaaaagaccaaacaaaccagcaagttgatggttctcagctacctataaatatgatgcaaccgcaaat

SEQ ID NO: 874640 - DNA, 98 bp, Homo sapiens
cctcctcgcagcagcgccatgatggcatccgccacagactcgcgctatgggcagaaggagtcctcggatcagaacttcgactacatgttcaagattct

SEQ ID NO: 874641 - DNA, 98 bp, Homo sapiens
aaaaaagagaggatttgcttttgtaacttttgatgatcatgatacagttgataaaattgttggtgcttttctgctttgggccaagtagcaaaagctcg

SEQ ID NO: 874642 - DNA, 99 bp, Homo sapiens
ggaacaccaatggaccaaaatgaacacagtcactggggcaggatgacgcaaaacacggtgattgtgaatggagttgctatggcctctaggccatcccag

SEQ ID NO: 874643 - DNA, 99 bp, Homo sapiens
catcaaaagttggatttttttttctcagtgcaataagaaagatgacttacttcacaagttggaagtggcagtttttgtctttgataaaaaactgattga

SEQ ID NO: 874644 - DNA, 99 bp, Homo sapiens
catgcttttctatacaatattccgcttttttgaacagcgaaaccagcgtttgcgagggagccccaatttcacaccagagtctcgctccgttgcccaggc

SEQ ID NO: 874645 - DNA, 99 bp, Homo sapiens
ctctacttcttgttttatttcatcttgacttagatttaagcggtacaggcacttttcaaattccggcagaacagttcctaattgcattcgccgacgagt

SEQ ID NO: 874646 - DNA, 99 bp, Homo sapiens
atcttcttgttaactgcctgcattgtctctaaaggcacctgcaatattccagccagttgtttggccagctgcatgtggtactgtgtgcctgagccgtag

SEQ ID NO: 874647 - DNA, 98 bp, Homo sapiens
acgcctcccggctctcgtcagcctcccgccggccgtctccttaacaccgaacaccaaggacagaataacgggctcccagattcacaagccccaccaag

SEQ ID NO: 874648 - DNA, 98 bp, Homo sapiens
tcatagctctgcggaggtggaagttggggagctttgaggctaactcaggtgagatggagccgctatagtcctgaattcaaggatcccttgattgacaa

SEQ ID NO: 874649 - DNA, 99 bp, Homo sapiens
ccaggatcttgcagaagctctttatgtcaaactctatgacaatcatctggttcagtccattgaaagtaacttttcgcactttggtgatctcattctcat

SEQ ID NO: 874650 - DNA, 99 bp, Homo sapiens
caaatggaacagactccacccaaacatctggttggcaatatgatactcagtgttcactggcaggagtgactgtcgggcctccagaaaacattgaggtga

SEQ ID NO: 874651 - DNA, 100 bp, Homo sapiens
ccgcacctacttctacgccaatgaggccaagtgcgacagccacatggagacattctttgtggctgtcgcacttggcctcattggcgtagaagtaggtgcg

SEQ ID NO: 874652 - DNA, 75 bp, Homo sapiens
gctccccggacagcaaggatgcccaaagtttctacgataaagacagttcagggtggagttctagcaaagataagg

SEQ ID NO: 874653 - DNA, 99 bp, Homo sapiens
taattttggacgacaaatatcttatcagcacgcagcagtccatattcctactgacatctatgagggcttgaaaccatttgcaaatcaagaagaatataa

SEQ ID NO: 874654 - DNA, 99 bp, Homo sapiens
ttatgtgggagagcagaggtcaaacctgaaagaccccagttatggatgggaggggctcacaacgaagtaagacagtagatgacaattctgcaaagcaga

SEQ ID NO: 874655 - DNA, 99 bp, Homo sapiens
aatttcagtggatggaaataaggctaaacttgcaatatggtttggcagtaatcagtccaaaccagagttcacagtggacctcaagggggcaacaattga

SEQ ID NO: 874656 - DNA, 99 bp, Homo sapiens
ccctggacatcaagattaaaagagcgaataaagtttatcacgccgggagcttctttgaagggcagtctgcaccatgggactcggctaagaaagatgaga

SEQ ID NO: 874657 - DNA, 99 bp, Homo sapiens
gagatgtgatgttggagaactacagaaacctggtctccctaggctggtgggccaccaaaaaaggggaaaccagctgcaccaggaggcgcagggaatact

SEQ ID NO: 874658 - DNA, 98 bp, Homo sapiens
gcttttcaggcactacaccgtgggctcctatgacagcttcgacacttccagctggacaaatttgccagcataagaattccagggagcaagaaagagag

SEQ ID NO: 874659 - DNA, 99 bp, Homo sapiens
gtcttgtcctgtgggtttgatgctggcgactgtgggcaagctccccgcagccaccgccacccattggaatggccaacaggggacctgcatatggcctga

SEQ ID NO: 874660 - DNA, 99 bp, Homo sapiens
ccctgatggagcatttgatggtaatccactcttaagaactatgtcatgcaagacaagataatctgccttccgaaaagagtgcagcctgctcagaaccac

SEQ ID NO: 874661 - DNA, 99 bp, Homo sapiens
ctgtctgccgccagacagggaacacatgcaaggagctgagagaccctgtgacctcgggactcaacacctcggtggactccctggaggaaaagcggaagc

SEQ ID NO: 874662 - DNA, 99 bp, Homo sapiens
atcatcattaaggacggaggcacgaaaatttttactactggagatgtcaacaaagatgggaagctggattttgaagaatttatgaagtaccttaaagac

SEQ ID NO: 874663 - DNA, 98 bp, Homo sapiens
tggttaaaaaacagtgtttcaagaatgatattcacaaactggtcctagcagctttgaacagggtatttacctcctgagtgttttgtagttggaaaaga

SEQ ID NO: 874664 - DNA, 99 bp, Homo sapiens
caagttccacaatatattgactactgccacaattccgatgccttcaattaagttgcagagttctgatggagagatatttgaagttgatgtggaaattgc

SEQ ID NO: 874665 - DNA, 99 bp, Homo sapiens
tttatgaaccagtgtatcccaagaatatacagatgttgccacaggaatctaatctgaaatcgtacaaatggaaatgacgctacaggaggatgtttggga

SEQ ID NO: 874666 - DNA, 99 bp, Homo sapiens
ccaccttgcactccatgtggctctcctttcccctaattcacagggtgaagccagatttgcaattgacatgtggtctgcaggtgtcatatttctttcttt

SEQ ID NO: 874667 - DNA, 99 bp, Homo sapiens
tggaaactgtacattgaagcagaggacaaggagcatccaagatacctgatcccagaactttgcaaacagttttaccatttaggctgggtcactgggact

SEQ ID NO: 874668 - DNA, 99 bp, Homo sapiens
attaacaccttaaagttccagaaagattttgagtacagcagggaagaactggaaactcagagaaagaaactgcccttccatctacaaaagctgagttta

SEQ ID NO: 874669 - DNA, 99 bp, Homo sapiens
gtgggagtgacccgattttccagaattatagaccaatccagcaatgtggagatagcatcttttccaatctataaggtgttattctgtgcacgtggacat

SEQ ID NO: 874670 - DNA, 99 bp, Homo sapiens
aatgaaaaagatctggacgatttgttgtggatctttggttgtgagtcatctgcagctccgtatgtggatgtgatctgtttgaacagctactactcttgg

SEQ ID NO: 874671 - DNA, 98 bp, Homo sapiens
gcaaggctcttccctgaccattttctactgtccctgcgcgaggccccttcacagatgtagtcactacaaatcttaaattgcgaaatccatcggataga

SEQ ID NO: 874672 - DNA, 99 bp, Homo sapiens
tggccatgggccgccttggaatcttttcggtatcatcgtttcatgccctggttggtgttcgaggaagagacattgttgttcttggtgtggagaagaagt

SEQ ID NO: 874673 - DNA, 98 bp, Homo sapiens
tcaaaccagaagaaaacctgaatctctgagatgctggcatatatgttctattctgttccttactttgtgactgcactgtatggcttagtggttcctgg

SEQ ID NO: 874674 - DNA, 99 bp, Homo sapiens
gtccactcccacacaaaccagcttcaggcctttttcaagacttaattcagtgcacaaatgagatgaatgtgaacatcccacagttggcagacagtttat

SEQ ID NO: 874675 - DNA, 99 bp, Homo sapiens
ctcccaaagtgctaggattacaggtagaaacctgtgggttcttgttgtggggcggtttccaaaggaacacagaattgggattccagagttcaaatacgt

SEQ ID NO: 874676 - DNA, 99 bp, Homo sapiens
tgaagttccctgatgatcagactcagaaaattttggaaagagaagatgctcggctgatgatttattctagtcgagaactcgaagaaacattaaataaaa

SEQ ID NO: 874677 - DNA, 99 bp, Homo sapiens
cacccacactttcaacagagaattcagccaggtgcacggcagcgtcagtgactgtaagacatcccccatttgagaccaaagcctgtgtacattactacc

SEQ ID NO: 874678 - DNA, 101 bp, Homo sapiens
gggcaacacagtgagaccccatcttatcaacaatctttctcagggccttgagggtgggtggcattactttccagggtgagtctgactaagttcttctggga

SEQ ID NO: 874679 - DNA, 99 bp, Homo sapiens
tgatggcacaccttggccagcagtggggattgcaaagcgaactacatatggaggagtgtctgatggatggagtggaaccctggcttccccttgagcatc

SEQ ID NO: 874680 - DNA, 98 bp, Homo sapiens
atgaatattgtgtggtttgtgatgagccacatgtgtttcaaaatggccctatgcttaggatgtgtcttgctgaatcagggctctcttatccctgccat

SEQ ID NO: 874681 - DNA, 99 bp, Homo sapiens
ttttgtatagctgataatggaaatgagacaattgaagctcaagcagagcttacagtgcaagtttcgccgtgaggaagatgcggaaaaggctgtgattga

SEQ ID NO: 874682 - DNA, 99 bp, Homo sapiens
gagcaacccgcaaacggtgggggtcggccggggccgcttcaccacttacgaaatcagggtcaaggtgacagagctgaatgaacctctctccaatgaaga

SEQ ID NO: 874683 - DNA, 99 bp, Homo sapiens
gacgagtgggatattccagagaaacagcctttcaaagacctgatatttacggagcatccccagctgctggatgctgggacccaccagtgggcaagaggg

SEQ ID NO: 874684 - DNA, 99 bp, Homo sapiens
aagctgatacctgggggagataatgtaactgtgtgcaaggataacaggaaactaaatatattttgccaactttggaaaaagaattattcttggcagagc

SEQ ID NO: 874685 - DNA, 99 bp, Homo sapiens
tgcagagggtggactcgccagtcacagggcatatgggggcctctcagaccgcccctcggcatccatctcccccagctctgcctccattgccgcctccca

SEQ ID NO: 874686 - DNA, 99 bp, Homo sapiens
ttcaacatacagcacaattctggacacattgtattggtttgatgctcctacctggaacagactctttttgatcagaacaatgctgcaaaaaaagaagag

SEQ ID NO: 874687 - DNA, 99 bp, Homo sapiens
tggctaacacggtgaaaccccgcctcatgctgatatgaagagcaaggttctctgtgtctgtctgttcatcctgctccgaggaatctgtctcttccattt

SEQ ID NO: 874688 - DNA, 99 bp, Homo sapiens
agcttctgtaaagagtttaactactcaggttgccgatttaaaattgcaactgaagcaaactcagacaggtactccaaagattcaggtttactcacgtca

SEQ ID NO: 874689 - DNA, 100 bp, Homo sapiens
ttgggtcaggacaattccatttggggaccagagatggacgtgactccataggctgagtgaccgtccatctctggtccccaaatggaattgtcctgaccca

SEQ ID NO: 874690 - DNA, 99 bp, Homo sapiens
gggtgatgacagcactatagtgcaggtgttggaagtgaaagaggaagaatacaagcgattgagtgaagcactagcagaggatgggagctacaatgccgt

SEQ ID NO: 874691 - DNA, 99 bp, Homo sapiens
agaattctctacatttgtgaaagtcagtttctgaggaatttcatcagatcttgagccagatgattgtgcatccatttacatctttaatgtagatccacc

SEQ ID NO: 874692 - DNA, 99 bp, Homo sapiens
cccggccccggggaactagggagcgtctccggctgcacagcgctcagtttctgtcacccaggctggagtacagtggcacgatcacagctcactgcaccc

SEQ ID NO: 874693 - DNA, 99 bp, Homo sapiens
agcagggcagcccgcactcgctgccgccgccactcacgctccactgcaacatcacggagcatctttccttgaagaagtacattattgacattgtggttg

SEQ ID NO: 874694 - DNA, 99 bp, Homo sapiens
tccggtgacaacgtggatgtcctcccactggctgtcgtccaaattcagcttctcttctgcagctccttggggagcttcatctgtccgagcagctgaaga

SEQ ID NO: 874695 - DNA, 99 bp, Homo sapiens
tccaaacatgatcgtttactgcaaagctgtctcctggttcggacatctatgtgacggtctcatccatggctttagcaagatcccagtgtcggaactctc

SEQ ID NO: 874696 - DNA, 98 bp, Homo sapiens
cgggttttagaaaaacaagaattacagcagccaacctatgttgccctgagttacataaatagattcccaaatgctggaaaatcctctttgctaagttg

SEQ ID NO: 874697 - DNA, 99 bp, Homo sapiens
cagtctatatttctgctcttcagtctgtccttaggatgaagctctaactgaactgaagcggaggccgcgcagcagctcgggcgcccctcggaggcaggg

SEQ ID NO: 874698 - DNA, 99 bp, Homo sapiens; identical to SEQ ID NO: 839345

SEQ ID NO: 874699 - DNA, 98 bp, Homo sapiens
cccatttccagagagctgcggcgggagctgtatggccgccgtcgcaagaaggatttatcaaagatgttcatgaagactcccttacagttgtttttgaa

SEQ ID NO: 874700 - DNA, 99 bp, Homo sapiens
aaaacggaagcgcagggagaaggaagaggtgtttgaaaaggttctctacttaaaagacaatgactactgatgaaggtgccaagaacaatgaagaaagcc

SEQ ID NO: 874701 - DNA, 98 bp, Homo sapiens
tcgctcctcgatcgaggacgacttcaactatggcagcagcgtggcctccgccaccgtgcacatccgaatgggaccacagccgctttgtcaactgtgtg

SEQ ID NO: 874702 - DNA, 99 bp, Homo sapiens
cagtaggcaactgctaagtggccaatgcccttccccaacctccttctcagagcggctctgcctgcaaaataaaaacccgcctagtgccaagcaaccctc

SEQ ID NO: 874703 - DNA, 98 bp, Homo sapiens
tgtctcgccgagcgcacgccttgccgccgccccgcaggtttcattgcttcagacatgacatcaagacactccagtacccagctgtggttaattacaca

SEQ ID NO: 874704 - DNA, 99 bp, Homo sapiens
cccataatcggaatgtgatcacagagcctatttacccagaagtagtccatatgggcgtctctggccgagcctctttttgtggaaaacgacagcagcagc

SEQ ID NO: 874705 - DNA, 98 bp, Homo sapiens
agaaaccgagggagggagagagacagcgatcgagagagaccggagaggtggagagtggactgcccctgatggtgattattcataaatcctggtgtgga

SEQ ID NO: 874706 - DNA, 99 bp, Homo sapiens
tgactgaagaccatgttgcaggcccacagctgcctacagaaccgtcccaaaatatggcaaagaaacctattctgagggagaaacaaaggcagcgctgcc

SEQ ID NO: 874707 - DNA, 99 bp, Homo sapiens
tgaaggaagatggcggacggcgtggaccacatagacatttacgcggatgtcggcgaagagttcaaccagtgctcctatatccctccctgtaagagagaa

SEQ ID NO: 874708 - DNA, 99 bp, Homo sapiens
cacagccttgttcatcggctcccagagaaaaatcggcagatgttacagctgctcatgaaccacttggcaaaggtagaatccgccaagctttgagagaag

SEQ ID NO: 874709 - DNA, 99 bp, Homo sapiens
cggggaagtgtccttcatcaacatcaagacactcaatgagtgggattccaggttctcagagtacattcacgcccaggtggcatctggcaaagggaaact

SEQ ID NO: 874710 - DNA, 99 bp, Homo sapiens
cacagactcctatttgaagtatttgacgaaaatagactgtactatactggcaattgctggagaagattttgcaattgttgcttctgatactcgattgag

SEQ ID NO: 874711 - DNA, 99 bp, Homo sapiens
aaagttgaagaagtcttgaatgactggaaactgattggaaactctttgggaaagccactcgaaaaggaggagaaagtgcaggccatgccacttcctctc

SEQ ID NO: 874712 - DNA, 99 bp, Homo sapiens
gatgaaaaatatgaagaggttatggctgtccttgggagttttccatatgtgaccatggatataaaatcacagggacctgacatgaaacgcagatctagt

SEQ ID NO: 874713 - DNA, 99 bp, Homo sapiens
gacaccttcagaatcgactcaagagttacatgcatcagacttaattcagtgcacaaatgagatgaatgtgaacatcccacagttggcagacagtttatt

SEQ ID NO: 874714 - DNA, 99 bp, Homo sapiens
caatgaaagaaatgctatcatggcaaaaggtgatacagttgtgtaattcagcaaaggcagctttgatcttcttcacggaactatccacttcttccttaa

SEQ ID NO: 874715 - DNA, 99 bp, Homo sapiens
cccgtctcccagcaagcaatagactcggtagcagagcccagggagaggcagggctggggacggcggagagccgcagacgccccttcggccagtagtctc

SEQ ID NO: 874716 - DNA, 99 bp, Homo sapiens
aaggattatgaggggttgaagagggtgctccgttccttacaggccatgaccttgcctcctttcctggagttcggtgtcccgtccccagcccacctcaga

SEQ ID NO: 874717 - DNA, 99 bp, Homo sapiens
agcactcaatcagaaagagagctccaaggagaaaatccagaagagcaaaggcgatgatgccacattacctgcggtatatattgcacccctaaaagccct

SEQ ID NO: 874718 - DNA, 99 bp, Homo sapiens
tatcctgactggggaaaatcagcaagagctttctggaagaaaggaaatgttaggatcactttattctggttatcaatactctggctgaccatcatcatc

SEQ ID NO: 874719 - DNA, 99 bp, Homo sapiens
cttatcaagccctcaaagccacccaggcaaagcaggcacttttggcaaagaaggagatctggtgctctcatgaaaatctacatcaggaggacctagaaa

SEQ ID NO: 874720 - DNA, 99 bp, Homo sapiens
tgaaaacaggtttgaagagggaatttgatgaagtttttacaaagaaaatgattgagtctatgtctattattagcagaagatttttctgcatagttggca

SEQ ID NO: 874721 - DNA, 99 bp, Homo sapiens
caggtccggtgttggggtgtccgagttgccgccggagaggagtggcctcgcccgcttgaggaatggcttcttgtgggaaccaaacaaggacatcttctt

SEQ ID NO: 874722 - DNA, 99 bp, Homo sapiens
gggaaatcagggctccttcttaactaaaggtacggttgacatttagggatgtggccatagaattctctcaggaggagtggaaatgcctggaccctgctc

SEQ ID NO: 874723 - DNA, 99 bp, Homo sapiens
gccttcttggacgcctttcagaaagtggctgacatggccaccaacacacgtggtccttttggtgtgaaccatggggtggaacttcactcagatgtgata

SEQ ID NO: 874724 - DNA, 99 bp, Homo sapiens
atgtcctgaaggagccctcaattgcattggaaaagctgcgggaactcagctttagtggatgaaaactttcggaagagaaagttgcctgtggtaagttca

SEQ ID NO: 874725 - DNA, 99 bp, Homo sapiens
gttcttgccaggctgtgtgagcaggagcccgctgctcttccccactcaggttctcatcccaggccttgtggagggatctaccaaaaggaagcgggttct

SEQ ID NO: 874726 - DNA, 99 bp, Homo sapiens
accagttgtattaaattgttcacaaaaaggagagggtggagagattcaaccagttagcgtgaaagttggagataaagttcttctcccagaatatggagg

SEQ ID NO: 874727 - DNA, 98 bp, Homo sapiens
tccatctcgctcaggtacgagggacgtgtgtatcactacaggatcaataccactgcagatggcaagggctgtaatccccttgcacaaaccggccggag

SEQ ID NO: 874728 - DNA, 99 bp, Homo sapiens
tccgaatgctgaccccactgggtcctggccctttctcccctgatcatgagtttcggaccagcccaccagtgtccagagcaggtggtcggtggcatctac

SEQ ID NO: 874729 - DNA, 99 bp, Homo sapiens
gccatctatgttaatggatacacaggttaccaccaaagaatatgattttggtctaggggctccagtttctgaagctgaaaactaccagaatactctcca

SEQ ID NO: 874730 - DNA, 99 bp, Homo sapiens
gaagactcctacctgaaacatacggagattgacaatcaatgggccatcttggacggaaggaccattacgacctgttcttgaatacattgatctggtcag

SEQ ID NO: 874731 - DNA, 99 bp, Homo sapiens
cgggggcctcttctggaccaggaaactctccacccatgaaccagagaatcagtcagagtgctccagtgaaacagccaccacccctggctccccagagcc

SEQ ID NO: 874732 - DNA, 99 bp, Homo sapiens
caggcatcaagcagaaatggcattaaatgaaagaggacatgaaggggatttcctcattcgtgatagtgaatcttcggctggagtgcagtggtgcaatct

SEQ ID NO: 874733 - DNA, 99 bp, Homo sapiens
acttatgagggtatcttcaagacgctaagctcaaagttaagtgggcagaccaacatccacctcagcaaaaacttcttcctgacgaatcgcgccagggag

SEQ ID NO: 874734 - DNA, 98 bp, Homo sapiens
ttcagataacttctgtgaagctgatgggtgaaaatcctatttataagagtgccgtaacaactgtggtcaatccgaagtatgagggaaaatgagtactg

SEQ ID NO: 874735 - DNA, 98 bp, Homo sapiens
ggacaagaacaaagtgtgctgaagacttgcactatctgccagatgctgcttcctaaccagtgcagttatgcatcacaccagagaatccatcagcacaa

SEQ ID NO: 874736 - DNA, 99 bp, Homo sapiens
taataatccaagaggaatcgctgatctacctgctccaaccatgccggtggtggtgtgcacattgagccccggtatagacagttcccccagctgaccaga

SEQ ID NO: 874737 - DNA, 98 bp, Homo sapiens
tctgggcttctctgaggcggcgagagatggtcaggtctggagctcgaccgggccagatttctagaagctctcaatcactttgagaaagcaagaacctt

SEQ ID NO: 874738 - DNA, 99 bp, Homo sapiens
gccatgcgtactttctaaaaactgatggtcctccagtcgcagctggatactctgctccaggggcaggagagcattaagagctgcagcaacttcacagcg

SEQ ID NO: 874739 - DNA, 98 bp, Homo sapiens
acctttcggcttctgagacggcggcagcagcggcattcaggccgacggtcgcaaggtcctacggtcaagcatccgggagtttctatgcagcgaagcca

SEQ ID NO: 874740 - DNA, 98 bp, Homo sapiens
cacatcgtggactggtgcggctgctcccccaatgacttcaagccgcaggacttccaccgcttccaggaacatcatttacagcgagcaatttcagcaca

SEQ ID NO: 874741 - DNA, 99 bp, Homo sapiens
ggcatattcaaagtctctaaagctgacgtgaccatctgaatctcgatctacttcccttggagaagggctccatttctcttgaagaaggtactgcccggc

SEQ ID NO: 874742 - DNA, 98 bp, Homo sapiens
caacctctgccacaccctggggcctgtgcatcctcctgacccacaggagtcatactccatgggtttatgtgataaatgatcttggcatagaagagaat

SEQ ID NO: 874743 - DNA, 99 bp, Homo sapiens
agtatctagtgtgagagacttccatcttatgtaagatctggattccttctaacgatgacgatattcgcgctctcggtcacgctctcggtcacggtctcg

SEQ ID NO: 874744 - DNA, 99 bp, Homo sapiens
tggtttaaggttccatacccatgtgtcacgtcttgaaattttaaatgtcctcagtgactctctacctctggcagatgatgttgaccttcagcatgtagc

SEQ ID NO: 874745 - DNA, 99 bp, Homo sapiens
caacaccctggaaacccccttcgatgacctccagagcctcccaaacgacgtgggaggaatgatcaattggaatcgtctttttcctcctttacgtcagcg

SEQ ID NO: 874746 - DNA, 99 bp, Homo sapiens
attacacaaaagccgaggaaattttgagtagatccatagtgaaacggtgggcaaattttgcaaaatatggcttaagagttggacagtggaggaccttca

SEQ ID NO: 874747 - DNA, 99 bp, Homo sapiens
atctttcaactcgtcgacttatacgtgtaatttacaacttttgtaattcggtcagagtcatgatgacagcacagctagccgcttgatggcattgaaacg

SEQ ID NO: 874748 - DNA, 99 bp, Homo sapiens
ggggctccgggtcttccagagcgtgaagatcaagatcggccaggggttatcaccatgcaagctttgtcggaagaggaccggaggctctggatggaagcc

SEQ ID NO: 874749 - DNA, 98 bp, Homo sapiens
tcgctgcaatccagggttcagctctttttctgagatcatcaccacccccatggagacttgtgacgtgctgatcctggtcggcgtgggactggaggcga

SEQ ID NO: 874750 - DNA, 99 bp, Homo sapiens
tttggaattccattcttttccttattcttctgatgtggatccagaaaatggtgtgaatggaacattaacttcaaatgtagcagactctccccggaataa

SEQ ID NO: 874751 - DNA, 99 bp, Homo sapiens
cggcaggaccaggactccccgcacagtctgaccgacttgcgaatcaccagggattaatcactcctgaagatcggaaatatggaacaacaaatcttcact

SEQ ID NO: 874752 - DNA, 99 bp, Homo sapiens
gcctaacgatatctcacctctactcccatgaattcacctttgattccagtgtgaactgtcaatcataaggtagcaatgaatcgagcccaagtttgtttg

SEQ ID NO: 874753 - DNA, 100 bp, Homo sapiens
taaacacattggtttttcaaaggaggatccaaacagccaaaatggtagcagagtctgcattcatcacacctttggaagaatcatcatatccaatgtgttt

SEQ ID NO: 874754 - DNA, 139 bp, Homo sapiens
gggtcccatcagctgtagccagtgtatgaagcccttcaccaacaaagatgcctatacttgtgcaagctgtgaacaaccggtccatccaactccccaccaccgtgcgggacatcatgaaccgctggaccctgcagatggg

SEQ ID NO: 874755 - DNA, 99 bp, Homo sapiens
gatgtagaattcagcagagaaatattacaactgtagtagaaaaattgcagttatgccttcctggtttacttagaaaggcttttaacttatgctgaaatc

SEQ ID NO: 874756 - DNA, 99 bp, Homo sapiens
gaatcaccagcactggctgaagctgatgttctaatcatgtcagataaagatgatattgagactccactgctaactgaagcagcccccatccttgaagat

SEQ ID NO: 874757 - DNA, 99 bp, Homo sapiens
ctgcattgttctagctgctccccatgccacccgtctccgaggaaagcccatcttgtgtgggtgggtattcgcattcttgtcctttgggaaatacaccat

SEQ ID NO: 874758 - DNA, 99 bp, Homo sapiens
caggttatattcaaagacaggtcacaaggttctccatcaacttcataacaatctaagcgacaaggtgcgagccgtatggcctcccgaaagtggattatt

SEQ ID NO: 874759 - DNA, 99 bp, Homo sapiens
cttgaatccattaaggggattgcggtcatggacaaggaaggcaatgtcctgggtcattccagaattgctgggacaaagagtctcactctgtcgcccagg

SEQ ID NO: 874760 - DNA, 99 bp, Homo sapiens
tggtggaatatgccaaggaaaaactggagagcttcatcaaaaatagtgatagctttgataaagctgagaagctccagctgctgaaccaccggcctgtga

SEQ ID NO: 874761 - DNA, 99 bp, Homo sapiens
gggggcacggatgtccagatctacatctgcaaacaatggacggagattcttcactttacaggcatagaatgtcaagctaaccaggcgtccgctacttca

SEQ ID NO: 874762 - DNA, 99 bp, Homo sapiens
gtctggtccacgacctatcctaggcgccatgtccacaagaatcggaatgtcagttaatgctattcgcaagcagagtacagatgaggaagttacatcttt

SEQ ID NO: 874763 - DNA, 99 bp, Homo sapiens
ctccggaggtgcgcggaggcttggtgtgccagagtgatggctgttttagtacttcaggtggaattcgtccttttcatcttcagaactggaagcagaaag

SEQ ID NO: 874764 - DNA, 99 bp, Homo sapiens
atgaaacgggcagccatggccctccacagcccgcaggtttctattacaactggttggtattcttttagaagacattgttacaaaacagctgaaggtgga

SEQ ID NO: 874765 - DNA, 99 bp, Homo sapiens
ccccgggacctgggctgggaacccgcggtggagcgggacacgaacgtgattgtagaaggcatgaaacaaaaaatgtggagtattgaaaatattgccttc

SEQ ID NO: 874766 - DNA, 75 bp, Homo sapiens
gagcgtcccggccttcatcgacatcagtgaagaagatcagcaatgaacaggacttcagagaagagtttgggagtg

SEQ ID NO: 874767 - DNA, 98 bp, Homo sapiens
taacagagaaggattatgaggggttgaagagggtgctccgttccttacaggaacaggagtacagctgtgtagtaaagatgccttctggtgaatttgca

SEQ ID NO: 874768 - DNA, 98 bp, Homo sapiens
ggagacacaaaatcagaaattaagattctaagcataggcggaggtgcagtcactcaagactgcttgcaactgattgcagacagtgaaacaccaactat

SEQ ID NO: 874769 - DNA, 99 bp, Homo sapiens
gatcagggagctggaggagaaggctatggaagagctcaaggagatcatacagattggcccccgccgcatccacacagtccgtgtgcggggaggtaacaa

SEQ ID NO: 874770 - DNA, 98 bp, Homo sapiens
caaccgctccggcaacgccaaccgctccgctgcgcgcaggctgggctgcaggctctcggctgcagcgctgggtattgttgcagcatctggcagtgaga

SEQ ID NO: 874771 - DNA, 102 bp, Homo sapiens
tgtgccactttgcatcccacgccggaggaggcattaacgagaccgggtaaggccattgcgtggtacacccctatccactggaagcaagcgtgggaaaaatta

SEQ ID NO: 874772 - DNA, 75 bp, Homo sapiens
caaacctgtatctgtgcaggcaatgtggccttcagtggtggctattatagaggtgggtttgaacccaaaatgaca

SEQ ID NO: 874773 - DNA, 98 bp, Homo sapiens
agagtactcctataagaaatcaataagaaacctgtttaaaaacattccttttgtccttctgttgatcacttatgatggagtttcgctcttattgccca

SEQ ID NO: 874774 - DNA, 98 bp, Homo sapiens
agctggatccttccttaggactgatggagaagatcaaagagttgctgcctgactggcagcctggcatcctcgctacaacctcattgttgtgggccgat

SEQ ID NO: 874775 - DNA, 99 bp, Homo sapiens
ctacatcaaggcatgtttccccaagcaatgaagaatctgagactgatgtcagtattgaatatggtggtgaggcgtgaccctggcaacactgaacctgtg

SEQ ID NO: 874776 - DNA, 99 bp, Homo sapiens
gaacagaaaccagatgatgcacagtattattgtcaaagagcttattgtcacattcttcttgggaattactgtgaccatcaggtttaaatcctacttgct

SEQ ID NO: 874777 - DNA, 99 bp, Homo sapiens
aactatctactttcatttttcaggttaagaaatctccaaaacagttggctgcttacataaatagctcatcgagggcgcctctgcagagcagaaacacag

SEQ ID NO: 874778 - DNA, 99 bp, Homo sapiens
atcattttggagtctggattcctgttaaagcgcttggcttggaagaggtggccgttggcacggtacagcttcctccatcttctggctccccggcggtag

SEQ ID NO: 874779 - DNA, 99 bp, Homo sapiens
ggctgaaattgcatcttgtagttatgaggccaggctttcttcgagagtcacccagctccttcagctgagcgtaccatccagcagtgttgtgaaaatatt

SEQ ID NO: 874780 - DNA, 98 bp, Homo sapiens
tttaccacttgcatctttcgacgcatctgaccttgaatgcgctctatgtatgaggaaccaaatggcgagacaccatcatctttatacagagttgcagc

SEQ ID NO: 874781 - DNA, 99 bp, Homo sapiens
gaggtctgcatcaatccctaccactataagagagtagaaagccctgctaatcttccagtaccaacaattgcagcaatagatggactcgctttaggtggt

SEQ ID NO: 874782 - DNA, 99 bp, Homo sapiens
gttccaccttcagagcgtcacggcgtacgccctcatggggaaaatctccccggtgactttcagacggagtcttgctccatcgccaggctggagtgcagt

SEQ ID NO: 874783 - DNA, 99 bp, Homo sapiens
gtttgttttcctgataaagctgtgctgcctggctattggctggactgttaggattcggttcatccagcagagactgtgataccttttttcacctatcag

SEQ ID NO: 874784 - DNA, 98 bp, Homo sapiens
aagtacctatgaccaagaccacacagtgaatgtcgaggtcttggcgagcaggagcaacacttcagagcaagaccaggcggggactgaaatgcgcgtga

SEQ ID NO: 874785 - DNA, 99 bp, Homo sapiens
agtggaagccttactccccccgtgaccccacccatcaccccctcctcttcattccgcagcagcactccgacagatcgtaaagctgaaaattgaaatcat

SEQ ID NO: 874786 - DNA, 99 bp, Homo sapiens
tggaagaccacacgaagctgcccctgatcttccacctgggacgggacccaggggagaggttccccctcagtagacccaaatgatttgtacattgtagaa

SEQ ID NO: 874787 - DNA, 99 bp, Homo sapiens
cgagaacgtccactgcgggccggcgaaagctgcctcggaatccgtgtatgtggtctccctgcagtccatgaactctcagggccggagccaaccagtcta

SEQ ID NO: 874788 - DNA, 99 bp, Homo sapiens
caaatcggctttcctctgatcacaggcagccaaagactgccacactgacacaggcaccatctcctcaaacagatcgtgttagccaggatggtctcgatc

SEQ ID NO: 874789 - DNA, 98 bp, Homo sapiens
acaaaaagcataggcggaccatgataatttccccagagcgtcttgatccttttgcagatggtgaggctccaggttgggctctatgctgtgtaccttct

SEQ ID NO: 874790 - DNA, 98 bp, Homo sapiens
agctgcttcgccccttatgctgccagccgcctgctggctgctgcctgcatttacttaattcagtgcacaaatgagatgaatgtgaacatcccacagtt

SEQ ID NO: 874791 - DNA, 99 bp, Homo sapiens
actaatggcatttggctgtgtgaggaatctatggggttggcaaagccgccctgcatcccccagccctggccgtcctcagccacaccccagatggagcca

SEQ ID NO: 874792 - DNA, 100 bp, Homo sapiens
ttttaatgataattcatgacagaagggagtttgctaaatttgaaaaggagaaaacttttcaaatttagcaaactcccttctgtcatgaattatcattaaa

SEQ ID NO: 874793 - DNA, 98 bp, Homo sapiens
tacggagcacgagaaatacggcgtggatttattcaggagattgagcatgctctgggtcttggcccagccaaacagtgtcctcttcgagagtttctcac

SEQ ID NO: 874794 - DNA, 98 bp, Homo sapiens
ggaagggcagcttggcagagcctcagagggtgatgagactggtgtgatggataatcttctagaagccctacaatcaggtgcagcattcagagaccgtc

SEQ ID NO: 874795 - DNA, 99 bp, Homo sapiens
gagatctaaagctaaaattgcctttggacagtctatggatctacattataccaataacgagtgaactttgaggcgctgatcatcaccatgtcggtagtc

SEQ ID NO: 874796 - DNA, 99 bp, Homo sapiens
aggctcacctcggtccccaccctcaggaggtttgccgtgcccctccacgtggacaagatggagtcccctgtttccacaccagcagtgctgccaatacac

SEQ ID NO: 874797 - DNA, 99 bp, Homo sapiens
gctgcggggcttccctgcggctggaggaaaggccgagggggacggcaagatgcacatcaccctctgtgacttcatcgtgccctgggacaccctgagcac

SEQ ID NO: 874798 - DNA, 99 bp, Homo sapiens
gattgcccagtcagcaaaggttcagccctccaagaaaatgtgccagaggaacttcaagaaccattttacacagatcagtatgaccaggaacacatcaaa

SEQ ID NO: 874799 - DNA, 99 bp, Homo sapiens
agggatccgtggagaggaggccaggacacctggaagccgggaaatgagatggacagagacgtatgtgcgttggtctcctaagggcacctacctggctac

SEQ ID NO: 874800 - DNA, 117 bp, Homo sapiens
attaatctaaatggacagtgcatcaaacggcatacaaatggaatcccaataaccctgtttaaagaggaatggagattgccactgtccatttagattaatgaggtgtcctgaagtgat

SEQ ID NO: 874801 - DNA, 99 bp, Homo sapiens
gatttttggcctcatactctgttatagataaacaaggtttggcagttctctaccagtggaccaatcttttcatccccgtgtacctcaccatcagagcaa

SEQ ID NO: 874802 - DNA, 99 bp, Homo sapiens
ccaagaaagacctcattaaagctcttgtggagaatatagatatggacacaagcctcattttggaatattgcaggagttcaaagaaggacgcagagccag

SEQ ID NO: 874803 - DNA, 98 bp, Homo sapiens
gatggcatagtaaatgaaaacttggccaatgagtgccaggagcgccctgttgagtgtaagttctgcaaactggacatgcagctcagcaagctggagct

SEQ ID NO: 874804 - DNA, 99 bp, Homo sapiens
cgtcagtgagatggcctccaacaagtacgacgagcatgtaatcagcccaaaggaatttgtgcacctggccgggaagtccaccctgaaggactggaagag

SEQ ID NO: 874805 - DNA, 99 bp, Homo sapiens
aggcagacccctaaaaaagccagtaccaaagacgcccaagaccgatgataggcttctcgacgatactttttcagggcatgcttatccatgttagcaggc

SEQ ID NO: 874806 - DNA, 99 bp, Homo sapiens
ccttcgaatgctcacagccactggaccaagattctcatcagccccaaaatagttccagtgttctttgatatgcctgaggacaggtgggaggtgtattga

SEQ ID NO: 874807 - DNA, 99 bp, Homo sapiens
gccttcttgttgcagctgctggtttctgaccactctccacaacccttgacccatctgcaagctagcttgttccattactgcttttaaaggtggttcaac

SEQ ID NO: 874808 - DNA, 99 bp, Homo sapiens
aatcttgtgtgggcactgaagggggactacaggttcgagagcatcccgggcccaaatcctagacaaagccacagaatatatccagtatatgcgaaggaa

SEQ ID NO: 874809 - DNA, 99 bp, Homo sapiens
agctacttgaaggaaattttgccaaagaagtgagccatgaaatggatggacttatttttcagcctactggaaatgtgacagtgatgataacatgggtgc

SEQ ID NO: 874810 - DNA, 99 bp, Homo sapiens
agaaaaggatagcttcagaaatcagaaaaacatttgggaggtgtctagcccagtggaccttctgaagatcctgtttgaccaaactcagagatcaattaa

SEQ ID NO: 874811 - DNA, 98 bp, Homo sapiens
aaaaatcaagaaatataaaccagatgtagcagtttcttgacatggagaaccaagcccataatacgatgggttcacacaaaagatgttggacaatttct

SEQ ID NO: 874812 - DNA, 99 bp, Homo sapiens
tggtagttgaggagttgctggccaaaggggcctgtgtacttgctgtagatgaaaatggttttgctgttactgctcagtgtagtcacaccttgaataaga

SEQ ID NO: 874813 - DNA, 99 bp, Homo sapiens
ctgtgttttactgcagcagacttcagattcattcctgaggcgtattatcgctggcaaaacgcgatggggagttcccggctgggcaccagggtgcctgag

SEQ ID NO: 874814 - DNA, 99 bp, Homo sapiens
aagattgacttctcggaatggaaggatgacgagtgtcttgggacaaggtgcgcattcctggtgtgctgcagcgattgggagtgacatactttgtggttg

SEQ ID NO: 874815 - DNA, 99 bp, Homo sapiens
tacagtggaaaccagcccaagctacaaaagtggtgacactcctagaatatgcagagaaatggaaaacttcagaagatcctttacctttattggaggtat

SEQ ID NO: 874816 - DNA, 99 bp, Homo sapiens
cacaaatgttacactgtttttggaaacccagggaactggtccttctgaaactagttcctggaattccacggctctcttgctggccaggtctgccttgtt

SEQ ID NO: 874817 - DNA, 99 bp, Homo sapiens
ctgaatccagcagcagcaacacagttctcaatcacctgagtctggatacggttcaggccccggaaccagaggatctggcctcggcgcagctccatctca

SEQ ID NO: 874818 - DNA, 127 bp, Homo sapiens
gacccccgcagccggaccacatcctccagcagcaactgtagcgccaaaaaggaagggttttgcacactagggaccaagaagccctcggggacactgctgagaaaagactgccgaagggaagaccagc

SEQ ID NO: 874819 - DNA, 98 bp, Homo sapiens
gttaatgaagtaggagtcttgaatcctaatgagcagccaactcataaattttccctgtattgaacactgatatacaaggaatgaatagaagtcaagaa

SEQ ID NO: 874820 - DNA, 99 bp, Homo sapiens
gttgctaaatgtagacaatggttagagaagaattttccaaatgaatttgcaaaacttactgtagccaccttctgggtgaaccctcagttcaagatccgg

SEQ ID NO: 874821 - DNA, 99 bp, Homo sapiens
ctacaaaagacctctcccaaagctcctatccaggtttttggtgtgaagcagaacatgaggcaccttctgagcagagcgtttctgtagaaggagtgtcac

SEQ ID NO: 874822 - DNA, 98 bp, Homo sapiens
gccagggaccctgtgcaggcctgctcctccgtttgcaaggtactccaaagattcaggtttactcacgtcatccagcagagaatggaaagtcaaatttc

SEQ ID NO: 874823 - DNA, 99 bp, Homo sapiens
taacagtggagatagatttaccctttctaaactattagctgtaattttaagtatgggaagactctctatgataactaccagcgggctgtggcaaaggct

SEQ ID NO: 874824 - DNA, 99 bp, Homo sapiens
ctgctggccgtctgtctgtgctccaccttctgtatgaacaattccaggcagggctgccacattgccaatctgtttcatggctggcaggaagccaccaac

SEQ ID NO: 874825 - DNA, 99 bp, Homo sapiens
cagaaattggtcgtctgagagctttacgtcatcttcgattagctaataaccaactgcaattcctacctccagtgaatctgaatggtgcctaccctaagc

SEQ ID NO: 874826 - DNA, 99 bp, Homo sapiens
caccaacctgctgctcgtgggctttggggtgacctgcctcattcccaacctgcctctccaggctctgcgaacatcaatagatgcttatgacaactttga

SEQ ID NO: 874827 - DNA, 99 bp, Homo sapiens
ggatccttaccaaatgtgagccagctgcggagcagtgcgtcagagtttcagactcttttgctatctggaaacccatgtccacctctgacttccactcaa

SEQ ID NO: 874828 - DNA, 99 bp, Homo sapiens
ccaaagtgctgggattacaggctttattcatggaggacacactgctaagatttcagattttagctggaaccccaatgagccttgggtcatttgctcagt

SEQ ID NO: 874829 - DNA, 99 bp, Homo sapiens
ccaatgacatgcaagttggacagacgggaaaaatagtagcaccaggccgttgctccagggagaactgcaaatatcttcatccacccccacatttaaaaa

SEQ ID NO: 874830 - DNA, 99 bp, Homo sapiens
tgtgccaggcctcccgaaggtggcgatggaaagaccacagcaagattctttcattcgtctcctcctagcctgggggaccaggctcgaactgaccctgga

SEQ ID NO: 874831 - DNA, 99 bp, Homo sapiens
atgaaactgaaggtagccgaggggcagtaaaagcatctactgggggacatcctgttgtgaagggagtgattgattcggaaagaatggattttgagctgt

SEQ ID NO: 874832 - DNA, 98 bp, Homo sapiens
tgatggaggaagcagaaagaatagctagagaagaacatgggtctgggaaaatcgctgtgatatcagattttcagctgaactctcatctctcaacactg

SEQ ID NO: 874833 - DNA, 99 bp, Homo sapiens
cccgctccgcctgacccctatgatgaagagggcgtccactggagatttctttcaccagaagaaaatgtgtgcaatgagatgttggtaaaatcccagttt

SEQ ID NO: 874834 - DNA, 99 bp, Homo sapiens
cattccctatgagtgaaagaattcaagaagtgagttgctgtttgctccataggcttacattagtattggtaaaggttttcaaggtgtcatgaaaagatg

SEQ ID NO: 874835 - DNA, 99 bp, Homo sapiens
ctttatggcttaatgaaagagagtgctcaattcagagaagaaatcagaaggtggtggaggaagcaccaagtcctgacacagctctccctgaggagcagc

SEQ ID NO: 874836 - DNA, 99 bp, Homo sapiens
ccgccaccgcaggtcgaggacggtcggactcccgcggcgggaggagcctgttcccctgagttttatgtgctgaaagagttggccagatgactaagacat

SEQ ID NO: 874837 - DNA, 99 bp, Homo sapiens
ccaggggccagaggaagcaatgcaggaggacaatctcatcatgagtgcgatgcagaagcacatcatctggtcaaaatgtgacccagagacatgaagtaa

SEQ ID NO: 874838 - DNA, 99 bp, Homo sapiens
cagaaaccaaaaactccattttgctttggccagagatcctcagcaggagcctatggaagagatagaaaatttgaagaaacaacatgatttattaaaaag

SEQ ID NO: 874839 - DNA, 99 bp, Homo sapiens
atgcctagaccctgcccaacagaatttatatagagatgtgatgttggagaactacagaaacctcgtctccctggattccagaattctctgatggtttct

SEQ ID NO: 874840 - DNA, 99 bp, Homo sapiens
catgagtcttctcaacttgaaggtcatttaaccaacctcagctttacaaaccctgaatttataactgaggagaggaatcaaatgagtctgcagaatcta

SEQ ID NO: 874841 - DNA, 99 bp, Homo sapiens
gctgagttgagacatcagcaagtgctgggcctggaatgtcagaagcagcaggtgacagagttagtccttgataattgcctgtgtgtcaatggggaaatt

SEQ ID NO: 874842 - DNA, 98 bp, Homo sapiens
cctcctgagtagctgggatcacaggaccggcagagaacaaatgccaagaactgttgtgcaagtgtgaccaggagattgctaactgcttagcccaaact

SEQ ID NO: 874843 - DNA, 99 bp, Homo sapiens
acctgaatgacatcgagaaggtccttccagcctggcagttggctggggaacagaccagggaattggtggatttggagaagagccgggaattaaatcaca

SEQ ID NO: 874844 - DNA, 99 bp, Homo sapiens
gccgctggcagccggggagctgcaggaaccagactgggggcgagctgagcacctgtagtcaatcacacgcaggaagagagagaaaatccttcaaaacgg

SEQ ID NO: 874845 - DNA, 99 bp, Homo sapiens
ctcctgcctcagcctcccaagagtggttctgattaaagcccagatttcagagctggcatttcctattacagcatctcagaagatagcgctaaatgctca

SEQ ID NO: 874846 - DNA, 99 bp, Homo sapiens
aaaagggacattatgcttatgattgtcatcgttacagccggcgaagaagaagcagaatcattgcccagaagagagcctgtgacactgccacctgtgtga

SEQ ID NO: 874847 - DNA, 99 bp, Homo sapiens
catggacatgagccccctgaggccccagaactatcttttcgatgaactgactggaatccttaagaaattatcacttgagaaatatcagcccatttttga

SEQ ID NO: 874848 - DNA, 99 bp, Homo sapiens
caggggcaggatgatggggttgagatgacactcagcaatcaggcgcccgattcctctatcagatagagaaatccgagtcccagtgccttatggtggagc

SEQ ID NO: 874849 - DNA, 99 bp, Homo sapiens
ctttttgacaattcattttcctacagactaccccttcaaaccacctaaggtgtcattccacacatccacaaatctctgattgggaagaaaggacaacag

SEQ ID NO: 874850 - DNA, 99 bp, Homo sapiens
ctctgataacgactatattcttgttttatgttctgaaaaatttgctctgacgacatggaaggcccaaagcaggcgatctgtgcgaggcccgcgcgcggc

SEQ ID NO: 874851 - DNA, 98 bp, Homo sapiens
cgagggaagtcgtgcacgaacaccaagaattccttgatctatgaacttttctctgttatggttcattctgggagcgctgctggtggtcattattatgc

SEQ ID NO: 874852 - DNA, 99 bp, Homo sapiens
ccccaccatccctaaccggctggctgcagacccggaagccaaattggcagagaatgcttgtaccctggctgacctgacagagggtcaggttggcaagct

SEQ ID NO: 874853 - DNA, 99 bp, Homo sapiens
aagggtctacgcgcttttctatggcgaatgcaacccgacgagggagtgggggtgcaactggaaactgacttgaagattgagaaggaatggaggcagact

SEQ ID NO: 874854 - DNA, 99 bp, Homo sapiens
ttcttgaaggagagcttgaagcaagggaccttgttatagaagccttaaaggttaccaacttggcaagcctgtccgagctctaaatatcaacaggatgaa

SEQ ID NO: 874855 - DNA, 99 bp, Homo sapiens
gaatgatcatggttataatcaaaagtggtcttcagaatcttctttgttaatgaaggagttcccccttctgagtatgttcaatatccatgaaaacctttt

SEQ ID NO: 874856 - DNA, 99 bp, Homo sapiens
ccagttctactcaagccttattgaagagataggaactcttggttgggataatccctctccaagatcctggatgtggccagtttggaggtgctgaacgag

SEQ ID NO: 874857 - DNA, 99 bp, Homo sapiens
tcctggtctatttttggagaaaattggagatttgataacactggagatcagcaccaaatcccacagaggcatctgagtagagacggggtttcactgtgt

SEQ ID NO: 874858 - DNA, 98 bp, Homo sapiens
tttcatcattactaacaggatattcctcatgacattgctgtctggttatcttatgatgaggcttttgctatggctaatgatcccttggaaggcttcca

SEQ ID NO: 874859 - DNA, 99 bp, Homo sapiens
acctggacctcagggacacgctggtgctcaaggtcctccttccaatggatgggaccccaatgaaatgttcaagttcaatgaggagaactacggtgtgaa

SEQ ID NO: 874860 - DNA, 147 bp, Homo sapiens
ccaattgctcctttcaggtgtttgataaacatccagggatctatttgtttttagtccatcccaatgaaatgcaaagcgagctgaattccttcttgtggaccattaagcgagacccaccatcttacttctttggcacaatccatgtcc

SEQ ID NO: 874861 - DNA, 99 bp, Homo sapiens
gccatgttgactaggctggtgggctcccctggagatctgcagactttaacagagggtctttctagctcagagtcaaggtgaattggcggagaaatgtat

SEQ ID NO: 874862 - DNA, 99 bp, Homo sapiens
aaaaaagaaacatgctcagaccacggtttttgcctccagatgaccgaactgtacgtgaaggtttttctttggactcagggaaaggtattgtttctaaag

SEQ ID NO: 874863 - DNA, 99 bp, Homo sapiens
aggcagccgcgcttcgaaggacgccgccgggagctgcggagattctcttcaggggaagagtccacatcccacctcatcatgtcccgaagaagccagcgc

SEQ ID NO: 874864 - DNA, 98 bp, Homo sapiens
ttcgctggccatttaggagctctgctcaaagccagacgaggactactgagcccagccaggctgtatgccattgctgccaaagaaaaagatattcaaga

SEQ ID NO: 874865 - DNA, 98 bp, Homo sapiens
gagagtggcagaggagctggcggagagcggcctgcgggcgatcgggccgagctgccactgcagagccccgccatggaagacacgccgttggtgatatc

SEQ ID NO: 874866 - DNA, 99 bp, Homo sapiens
gagcggagcccggagcgtcgtggaaagtacatagtggaatgtcatgggatcacccttcttccccagttcttgggcatgtaccggcttaatgttgatgga

SEQ ID NO: 874867 - DNA, 99 bp, Homo sapiens
gtgaccctgagcgaagccaagccgggcggcaggataaaagaatcagagtgtctcaacccttgacaagaggaccaagtgcctttattccagagaaggaag

SEQ ID NO: 874868 - DNA, 99 bp, Homo sapiens
gagaagaataggaacagccttcaaactggatgaacagaaaatcctgcccaaaggagagaaagttcaggagccctggaaaggagaaggaataagacggca

SEQ ID NO: 874869 - DNA, 99 bp, Homo sapiens
cgccgctcccaagatgtcgcagacggccatgtccgaaacctacgaacccgatcatcagccagttcttccccaccctcctgctctggtccttctcggccc

SEQ ID NO: 874870 - DNA, 99 bp, Homo sapiens
gtgaaaacagggttgtatatagccatgaatggagaaggttacctctacccatcagttatggacctcaaaggccaaatgatctacattgttgaatccagt

SEQ ID NO: 874871 - DNA, 99 bp, Homo sapiens
aacgagaattaaatgccgagaaggccagtacggagaaaaacctttcaagtgcgatgagtgtaactttgcctccacaactcagtcccatttgactcggca

SEQ ID NO: 874872 - DNA, 98 bp, Homo sapiens
tcatcttcatggaaacgtctgctaagactgcttccaatgtagaagaggaggaggtgcgccagtctgtaactcctgccgagccagtccagtactatttc

SEQ ID NO: 874873 - DNA, 98 bp, Homo sapiens
atcacctatgtttacagcgacaggagcctgtgtgaaatgcagcaaaggggtgtttggggctggccaggcctgtcaggccatggggaacctctaccatg

SEQ ID NO: 874874 - DNA, 99 bp, Homo sapiens
atacttctcaaatcttaatttcctaaagaaccagacgtcctgggtcctctccagcatggcagccctctactggagggtgaaaggccaaggaaagaaggc

SEQ ID NO: 874875 - DNA, 99 bp, Homo sapiens
cagtgggctccgcagcttttttagggctggtactttttttaggctccagttgctgatctttcttctgcagctcttctccagacagatagtaggctgaga

SEQ ID NO: 874876 - DNA, 99 bp, Homo sapiens
aggaggtcgcagcgccatgaagtccctgtctctgctcctcgctgtggctttgggattttataacctgacagcgtgctggaacttctctgctggactcct

SEQ ID NO: 874877 - DNA, 99 bp, Homo sapiens
ctatgaggaattgcctgtccatttcataatctgtcctttcaggaatctctattccatggagctttagctctggattctccagtgagggttactccaggg

SEQ ID NO: 874878 - DNA, 99 bp, Homo sapiens
cagctgtttcctgagttgctgtttcttgggactgcgaagctatacaggctagcaagtgataatcaagttactatgagtctgctaaactgtgaaaacagc

SEQ ID NO: 874879 - DNA, 99 bp, Homo sapiens
cattctctgttctaagtgccttaagagaggatcgcccaatccacatgcttttccagataaggagtcaggccagggcgggatgacactcattgattctaa

SEQ ID NO: 874880 - DNA, 99 bp, Homo sapiens
ttcttggtgcccctgggcatcaccaacatagccatcgacttcggggagcaggttaatgttcgtgaagaaattgaagagttttttccaagaatgtggaag

SEQ ID NO: 874881 - DNA, 99 bp, Homo sapiens
gcgaagtcgggaccatcgtcgtgaggatcgtgtgcattacaggagtcctccacttgccactggctgactggaaataccggcatgcaggattgatggcct

SEQ ID NO: 874882 - DNA, 98 bp, Homo sapiens
cgctcaccatccagttcatccaggatcaaaatggtttcaatcccagaatactatgaaggcaagaacgtcctcctcacaggagctaccggttttctagg

SEQ ID NO: 874883 - DNA, 99 bp, Homo sapiens
atgaaaagaaatagagatcggtgtgtagggggagtggtgtgatccctcacatccacaaatctctgattggaaagaagggacagcagaaaactgcttaga

SEQ ID NO: 874884 - DNA, 99 bp, Homo sapiens
aatcagccattttaccaagaaagttgggtttcttttactggcaaatagtacttcaagagcacagtcttatgtaaggaaatctggcattttttaaagttt

SEQ ID NO: 874885 - DNA, 99 bp, Homo sapiens
cctcccaaagtgttgggattacagcatgtttcgccaagggatgcatgacttgaaagtctggcctaatgtagaagcagatggatcagaacccacaaaaac

SEQ ID NO: 874886 - DNA, 99 bp, Homo sapiens
aaggggatcgcctgcgcgtcccgctcgtttcgtgtggaaaagccactggcagtgattcaagtggtgtcattgatctcacaatggatgatgaagagagtg

SEQ ID NO: 874887 - DNA, 99 bp, Homo sapiens
ggctacctcgctgcttcccagagctttcacgaaggcaccgacgtcatcatgctgaccaccaatcagatccgtaaggaccatggccaacctggagcgcac

SEQ ID NO: 874888 - DNA, 99 bp, Homo sapiens
cctgcgcgccgctgcccgcgccacagaaatctccaaattggacatccagagcagcattcttgttctgtctacgtcttgaattagaaactatcaagctct

SEQ ID NO: 874889 - DNA, 98 bp, Homo sapiens
agactctgcgtcaggtcacccagcagagatcagcaatccttggctcactgaggaggtttggggactcattctcacagttccggtttgctgaggagaaa

SEQ ID NO: 874890 - DNA, 99 bp, Homo sapiens
agaaatctacagttactcacacaagaatcctgttacacctgggatttaggcactttcaatctgaaaaaatacatatcctttcagcactctggacggact

SEQ ID NO: 874891 - DNA, 99 bp, Homo sapiens
ggcctttgcccactttgaatccaaaagacagtccactgcttttgaagccgcacaccgtccgcgcacgcctgaggctgggatcccgcgctgcctccccgg

SEQ ID NO: 874892 - DNA, 99 bp, Homo sapiens
gcaccagcatcgttgtagagaggaggtccgcgagatcctaggggaccaggacttcttccagtgaattaacactgaatcctccggaaggaattgtagcag

SEQ ID NO: 874893 - DNA, 99 bp, Homo sapiens
ttttaccttggataccctgctttggacggtatccaactgttgaaaaacgagccagagtcttcaatggagcaagttatgtgcctgttcctgaagatggtc

SEQ ID NO: 874894 - DNA, 99 bp, Homo sapiens
gtggacagcctggcttggctactcactcttctgttaacagggtcctggcagaagctgtacattggaatgcgtttacagtcattgtaatggaagcaaaat

SEQ ID NO: 874895 - DNA, 99 bp, Homo sapiens
cagctggagcaagaagaggacctgtgcagggcagagcaggaggccccccgagggttcacagtgtccaccgtggaggaggagaggactctgaaccctcgg

SEQ ID NO: 874896 - DNA, 99 bp, Homo sapiens
gtggctgccgcggtgaagtcgctgtgcacctgcaccagcagctggggcaccagaggttggttgatgacaacgatgccctgattgtagctggccacccgt

SEQ ID NO: 874897 - DNA, 99 bp, Homo sapiens
gccacctgcctttgacctttttgaagcctttgcaaaagtttctaagcatgaattgaggaacagaagaagcagagcagatgatcggagcagcatttgttt

SEQ ID NO: 874898 - DNA, 99 bp, Homo sapiens
ttctccttcacagtaaagtggctggctaccaagcagtttctcgaagagattaacaagtggacagttcagtacaatgtttccccgctgtcttggaatgtg

SEQ ID NO: 874899 - DNA, 152 bp, Homo sapiens
ctgggtgacaaaggtagaatcttaatgcctgcatccacggcctcacgtcatgctgtttaccgtggatgcaggcattaagattctacctttgtcacccaggcgggagtgcagtggcatgatctcggctcactacaacctccgcatcctgggtt

SEQ ID NO: 874900 - DNA, 99 bp, Homo sapiens
tcaacttcacgctggcgcgagccccgtcctccttcgccgccgcgcacaaccgcacgtgcagctgggagtgtccactcgccttccaccagcatggcaacg

SEQ ID NO: 874901 - DNA, 98 bp, Homo sapiens
gaagatgcactgttaaaaaaccaaagacgggcgcaaagattgcttgaagaaatccatgccatgaaggtgctgctggtgagtagcagccggtacccaga

SEQ ID NO: 874902 - DNA, 99 bp, Homo sapiens
gaccagaatctagaagagccatccagatatgatttaagcgagagcctcactggttcccaggacatcaacctgaactggatcctccccgatacaaatgca

SEQ ID NO: 874903 - DNA, 98 bp, Homo sapiens
tggaatctgttcttcttttgcatcctacgtaaccagaccaagctgtggggttaaaaatgtgtctgcaggcacacaggacgtgccttcacccccatctg

SEQ ID NO: 874904 - DNA, 99 bp, Homo sapiens
gacacagtgccagagtgtatgcactttactacaaagatggacttctctgtacaggtgaccaagaatatggcccaggtgaccaaagccctggacaaggcc

SEQ ID NO: 874905 - DNA, 99 bp, Homo sapiens
gtcatgccggtgtggtggcggcggcggagactgcgggcccgtagctgggctctgcgaggagttaaagttcctcgtaattttcgcttgttggaagaactt

SEQ ID NO: 874906 - DNA, 99 bp, Homo sapiens
accctctatgaaaaacagaatggaaaagagtcttctggcaagtttatcactgttggatggggtaggaaggagacacagttccatggatcagaaggcaga

SEQ ID NO: 874907 - DNA, 99 bp, Homo sapiens
ctgctgttatgaatatcataatcttctggtcgacgcctgttgatcaagtattcatccttggtcttatgatgaaacacaggaattggaacaccccaaact

SEQ ID NO: 874908 - DNA, 99 bp, Homo sapiens
gaaaccacttacaccgttctacaaaatgaaggtgaatatccaggtccaggaggcccaggaggtcctgggggacccatgggtcgcatgggaggccgtgga

SEQ ID NO: 874909 - DNA, 99 bp, Homo sapiens
ctcagcacctcacctacctggagttccggtccttccaggctatcacgaattatatccagatcgagagacagaagattctgaaagggttcaatgaaatga

SEQ ID NO: 874910 - DNA, 141 bp, Homo sapiens
ggggtggaactacatcgagggcctctactactccttcatcaccatctccaccatcggcttcggtgactttgtggccgtttattaggagtgctctctgaccacttaaatgcagagattgctggtggtacaattacatctaag

SEQ ID NO: 874911 - DNA, 99 bp, Homo sapiens
caacaaaaggggcagcagcggcagctccgcggcggcgtctgcccagggcagggctcctaaggaaggacccgcctttagacgggatctcactctgtcacc

SEQ ID NO: 874912 - DNA, 99 bp, Homo sapiens
aaatttgtatcctcagatgaaatggatttgcatcttgtaatgtgtttaacaaagccacgaataacctataatggaggtgaagtgaaatctgcaagagtc

SEQ ID NO: 874913 - DNA, 99 bp, Homo sapiens
cacggcagggtcagggttctggatatcagaagagataaggtgttgccccataggaatagttacatctcaactccagtgaggctccttcagagacagtga

SEQ ID NO: 874914 - DNA, 98 bp, Homo sapiens
agatttctatgttcctgtctctgaaatgcctgaacacaagatccagtcatctgggggcccactgcagcacgaggtagaactaacattgaacttagaga

SEQ ID NO: 874915 - DNA, 99 bp, Homo sapiens
cgagaggaggtggaccagaacttttggaactagtgccggcggctctccaccccccagtgggtaattccagaattgattggccataccattgtcactgta

SEQ ID NO: 874916 - DNA, 98 bp, Homo sapiens
ggaaatcgacttcggtttcagttggagttggaatttgtgcaatgtttagccaacccaaattaccttaattgaaaatatgagagccacacccgtgttca

SEQ ID NO: 874917 - DNA, 99 bp, Homo sapiens
acagtcccagggcatataccttctactgtccaagcacagtctcagccccatggggtatatccaccctcaagtgtgatcatccagcccctcttagaactt

SEQ ID NO: 874918 - DNA, 99 bp, Homo sapiens
aacagtgccaggatacagggcacctcctcctccagcccatgaagcttatgaagaatatagattttgcctttctatacatctttagaaagaacttctcgg

SEQ ID NO: 874919 - DNA, 99 bp, Homo sapiens
gaaatgtttggagaccagaatgatgatactctggttatgaatactgatggcactgggagacgagtactagtggaagacaaaattcctcacatatttgga

SEQ ID NO: 874920 - DNA, 98 bp, Homo sapiens
ccgaaccaagctttagccgccgaggccgcgtgtcccaaaggccaggagaaggaagccaacatccttttggagccatgaatattgtccgaactccatct

SEQ ID NO: 874921 - DNA, 99 bp, Homo sapiens
gcgcatgcgcaaccggttctccgaaacatggagtcctgtaggcaaggtcttacctgaatcaggcaggggaaatggaaggtgatgcagtcgaagccattg

SEQ ID NO: 874922 - DNA, 98 bp, Homo sapiens
tttggtgccctgacgcagcgcctcctgcaggccctggtggaggacctccacaaaaagtactcgtacatccgcaagaccaggcctgacggcaactgttt

SEQ ID NO: 874923 - DNA, 99 bp, Homo sapiens
ggtggccgtgcgcttcgggtgtttaaagaggaactccatcatactctgtaattctgttgcaaagcttatagacttccctgtactccttccactacttga

SEQ ID NO: 874924 - DNA, 99 bp, Homo sapiens
taccatccttgctagggtagaaaatcttctcaccactggagtagaagaaataacgcaatcggactatgttacagtgatctagctttctcatgatctgga

SEQ ID NO: 874925 - DNA, 99 bp, Homo sapiens
caagcttttgtccccaaaccagagatctctgtggtaagaagtgctactttagagacaaaacctgaatcaaaatatgtatcactcatcacgtcataccag

SEQ ID NO: 874926 - DNA, 99 bp, Homo sapiens
cctcatcgagctcttcgtcaagggctgcttccccaagcccacagtctgtaagaagggtctcatcctcccgatctgtctccgggtctcctgagccagcag

SEQ ID NO: 874927 - DNA, 98 bp, Homo sapiens
ggcatctttgatcttcagaaaacttcccttggaggggatgcaccagaagagccagaggacccagccgccgcctccatctctgacggagactgtgacgc

SEQ ID NO: 874928 - DNA, 98 bp, Homo sapiens
cactggcccatgcgtctcctcccccggaagcgctcatcgaggagtgcaccgacctgcagaaagagggcgagttctccacctgcttcacagaactacag

SEQ ID NO: 874929 - DNA, 99 bp, Homo sapiens
gaatggaaaaagaaactggaatctcccaacagagaaattattattttacacaatccaaaggagcagacgcctccgcctagacctgaagcctaccccatc

SEQ ID NO: 874930 - DNA, 99 bp, Homo sapiens
tgtcaccgaacgtacagctgtatccactgcagagcacacctggccaatcatgacgagctcatctccaaggtggctgccccctgcgttcctccatccaac

SEQ ID NO: 874931 - DNA, 99 bp, Homo sapiens
catacaggcaaattaagattgcattcttcaggctgtttcaatagcactggatttggccattcccatgaagtggtgcagcagaggggtctcctgggcggc

SEQ ID NO: 874932 - DNA, 99 bp, Homo sapiens
tcatcttcaaattggagcaaggagaagagccgtgggtaggagatggagaaattccaagttcagattctccagattcagagactgcatttgaaatcaaat

SEQ ID NO: 874933 - DNA, 99 bp, Homo sapiens
gaggcctgggttacaagcagcaagtgcgcggttggggccactgcgaggccgttttagaacacaccacagccatcagcactggaatgcaaagaccagaac

SEQ ID NO: 874934 - DNA, 99 bp, Homo sapiens
cctgagcgctacactggttacaagggaccagatgcttggaaaatatggaatgtcatctacgaagaaaactgttttaagaacagcatatgccatatatga

SEQ ID NO: 874935 - DNA, 99 bp, Homo sapiens
gataccgaagcgggctgtgtgccccttctccacccagaggcttctaaccctcctttatgtgactcagagaaaggagacctcattccaagttccaggatt

SEQ ID NO: 874936 - DNA, 99 bp, Homo sapiens
gggaaaatggctgcgtcttcgagtggtcttaacttgcagagtcagtttaatctggaaaatgtcactgttttcaatacaaatgagcaggaaagcaccctg

SEQ ID NO: 874937 - DNA, 99 bp, Homo sapiens
gggatgcataatggccgagctgttgactggaagaacattgtttcctggtacagaccagcagattttgaagcagtgggaagaatattctgtcttggcatg

SEQ ID NO: 874938 - DNA, 100 bp, Homo sapiens
ttgtacaatggtagatggagtgatgattcttcctgtgcttatcatgattgctcttcatgataagcacaggaagaatcatcactccatctaccattgtaca

SEQ ID NO: 874939 - DNA, 98 bp, Homo sapiens
acgtggagtttaagtctggagcaggcactgagctgtctgtgcgcggcatgaaaacagccctggaagtctgccctggcgcctgcactgagactaatcca

SEQ ID NO: 874940 - DNA, 99 bp, Homo sapiens
gggccgggaaaagtggcactgaggctctggaacttctgcccagctctccttggtactccaaagattcaggtttactcacgtcatccagcagagaatgga

SEQ ID NO: 874941 - DNA, 99 bp, Homo sapiens
gaggatcttctgcggattgttggaatctaccgctatgactttgcagccgtcctggagtggttcgcggagcgtgtggaccgcatcatcctgctcttcgac

SEQ ID NO: 874942 - DNA, 99 bp, Homo sapiens
ttcaaaggctgtcgcaaggaggaagagaccccaagtttgtggagcgaacactgcggctggcaggcactcagcccttggaggtgctggaggctgtgcagc

SEQ ID NO: 874943 - DNA, 99 bp, Homo sapiens
ggtaatacagaaagaatctgaggtggctcacgttgaccaactctttgatgatgcatccagagactttagaagacagctttccatcgacactaggccctt

SEQ ID NO: 874944 - DNA, 98 bp, Homo sapiens
ttgcaaggagcgtgcgtgcgtctggttgaggaacaggttagcaccactgagagagtgtttcaggatagacaatatcagattgatgctgctatcgtcag

SEQ ID NO: 874945 - DNA, 99 bp, Homo sapiens
ttccacagccaagtgcgggagtccacgaaaaatatgtcgtaactgcaagtgtggccaagaagagcatgatgtcctcttgagcaatgaagaggatcgaaa

SEQ ID NO: 874946 - DNA, 99 bp, Homo sapiens
gtggctgttcctcctgctgctgcccctggccctgcacctgttcatgaccaagaaccccaccatgcgcttgggcagcctgactcagggaggcgagcacgc

SEQ ID NO: 874947 - DNA, 98 bp, Homo sapiens
tggtcaagttgctgaccttgaaaattcttccatctctatgacaacaagcccattttagctttctggagaatagcatctgagaaaagccaaagtgcctc

SEQ ID NO: 874948 - DNA, 99 bp, Homo sapiens
tgttcttaacccagaagtagctgaatgtgttactccattgctgaggagtgaatactacaacacatctttgcaggattctttgcaaattctgccattcct

SEQ ID NO: 874949 - DNA, 99 bp, Homo sapiens
cttttgttgaatttgagttggcagagaatgaatctgagctttttggacgtacaattcgtgtcaatttggccaaaccaatgagaattaaggaaggctctt

SEQ ID NO: 874950 - DNA, 99 bp, Homo sapiens
aaagaaagatgcagaggaagaggaaagcgaactggctgttcgctgctatgaatctctaatcttaaaagctgaaggaaaagtggagtctgatttcttttg

SEQ ID NO: 874951 - DNA, 99 bp, Homo sapiens
gtggaacccggcttctattgccaatttgacggcctctagagctttacttttaggaacctggcctaaaatggctgaaatgagagaggtttttccacttcc

SEQ ID NO: 874952 - DNA, 99 bp, Homo sapiens
taccaccagagcgggactctgactccgaacctactgatgatagcagtggaagacaggaagctgtttattggtatgatttccaagaagtgcactgaaaat

SEQ ID NO: 874953 - DNA, 99 bp, Homo sapiens
acaaattgtcatccgtggttccaagtgtctataagaacctggttcctaagcctgtaccacctccttccaagaaacatgcccctgattcagtgcctctgc

SEQ ID NO: 874954 - DNA, 99 bp, Homo sapiens
gagaagcatgggaaggaggccgagccgggatctcaggtcctcgggggcggcggccacgccaaggacggcatgcagcagattggaataaatatgatgacc

SEQ ID NO: 874955 - DNA, 98 bp, Homo sapiens
tggaggtgggatccacacagctcagaacagctggatcttgctcagtctctgccaggggaagattccttggataaaattgtccatggaccacgtgtgcc

SEQ ID NO: 874956 - DNA, 99 bp, Homo sapiens
agcatcgaaagcgttggagaggtgttaccggaacggcggcgacaagggtgttcccgaactagagtgggcaatgctggacgtggctgcaaaccagggctg

SEQ ID NO: 874957 - DNA, 99 bp, Homo sapiens
ggagagactccttgggggtcgagcacataacggggttcgggtgtctcgtgtgtgaacatcacagtgcctccggagccagcgtggtggccatagacaaca

SEQ ID NO: 874958 - DNA, 99 bp, Homo sapiens
gttcctcggtgagggctctcttcctgtcttgcggtcagtcatcttcccaccgtatcttcacatagtcagaggtcataatgtagaatcagtgggagccct

SEQ ID NO: 874959 - DNA, 99 bp, Homo sapiens
cgcgcattcggccccggacgaaggtactcgcagcacttggagcgcagaaccggccgcgcccgatgtctttggtggacttgggaaagaggttgctagaag

SEQ ID NO: 874960 - DNA, 98 bp, Homo sapiens
ctgagtcaaagaagatgcctcgaactaaacaaattcatcccagaaatctaagaggataaggaagcctgtgtgggtaccaacaatcaaagctacatctg

SEQ ID NO: 874961 - DNA, 99 bp, Homo sapiens
gatcttggtcatggagccaaccccagcgccaccccggaggtacaggtgccgcgctgtggaagcgtgatcctggcacagtttctggaaaagcagagttgt

SEQ ID NO: 874962 - DNA, 99 bp, Homo sapiens
taccccaatatgagaagaattttagagacaacaatgtcaaaggaacgacacttcccagaaaagaggcacagttagatgaagaaggacagtttcttgtca

SEQ ID NO: 874963 - DNA, 98 bp, Homo sapiens
ctgctttcatattttcatacattactgcagtaacactccaccatatagacccggctttaccttatatcagatggagtctagctctgtcgcccaggctg

SEQ ID NO: 874964 - DNA, 99 bp, Homo sapiens
tccgccgcccaccatggcttccgaggagctgtacgaggtagacatagctgacattgagaatgaagagaaccgctactgtctattcatggaactcctgga

SEQ ID NO: 874965 - DNA, 102 bp, Homo sapiens
ctatggcaacattgtatctattaatatacagcttctgtatttatcagagcttttgaggagaaacgaaaagaacaggaagaaaaagaacaccaaattagagaa

SEQ ID NO: 874966 - DNA, 99 bp, Homo sapiens
cagctgttattgctttgaaagcaaggaagtctgcctactttggggataaaggattatttggtcttctggatttggaggcaatcagcggacagcatggaa

SEQ ID NO: 874967 - DNA, 99 bp, Homo sapiens
cggcggctggggccatatgatgggtgatgagggttcagataagtgggcggaaaaaccagcctttgggactcccctagaagaacacctgaagaggagcgg

SEQ ID NO: 874968 - DNA, 99 bp, Homo sapiens
tgctctgcgtcaacgccatcgcagtgctgcacgaggagcgattcctcaagaacacctttgtttagtaccagtcactcttttactttccaattgttctaa

SEQ ID NO: 874969 - DNA, 99 bp, Homo sapiens
gtccagctgagatttcaaatgctccaatttatctgcagtcaaagtttttcttgccttgtcttctactcggttcaggcgggcgccgatcgtgttgctgcc

SEQ ID NO: 874970 - DNA, 98 bp, Homo sapiens
cttctctgctaccatgggtggatgtttgagatgcatggcaagaccagcaacttgaccaggatctgggctggtcctgcagttctgagcttgggttccct

SEQ ID NO: 874971 - DNA, 99 bp, Homo sapiens
ccggccaaggatgaagcctcacttcagattttgtacagcagcaatttcttactctctctgcaagttttcttcccagtcacgagatactttgtgcagctg

SEQ ID NO: 874972 - DNA, 99 bp, Homo sapiens
gaaattctgaaagtccctttggccttgcagacctctatagaggagcgtgtggctcatctacgaagagtccaggttcgttaccgtgaacgcatcaccatt

SEQ ID NO: 874973 - DNA, 99 bp, Homo sapiens
tattagttatcatatgatggatactcattctgctcagctggaattttctgtaaacttatcactattagatttcattagagacgaggtctcactatgttg

SEQ ID NO: 874974 - DNA, 99 bp, Homo sapiens
tgccttgtgggtcctactgaggaaaggatatgatcgtgtgtctgtgatgcgtccacagccaggagacacgatcccaaatcagcaaagtggaactcttca

SEQ ID NO: 874975 - DNA, 99 bp, Homo sapiens
cgcccgtctgttcgcgctgctgctgttcttcgtaggcggagtcgccgagtcgtcgtggcattcctggtggctttccatcagaacaagcagctcatcggt

SEQ ID NO: 874976 - DNA, 99 bp, Homo sapiens
gaacctcatagaccgcaaggagctagagcctttgatcttcataaacaatgaatggcatgattcagtgagtggcaagaaatttcctgtctttaatcctgc

SEQ ID NO: 874977 - DNA, 98 bp, Homo sapiens
tcccacctggtccctgaagatgggaccctcacctgcagtgatcctggcatctgggctggctgtgggcaatggactctcctcctatgagcagaatgaca

SEQ ID NO: 874978 - DNA, 99 bp, Homo sapiens
ggccgtgattgtagccttcactggagcctgtatcactcaggagttgcctccttataacggttttggactagtggaagattctgctcagaattgttttgc

SEQ ID NO: 874979 - DNA, 98 bp, Homo sapiens
agctgtggcccgggggcctcttctggaccaggaaactctccactctgttctctggggaggcagtaaggggccgtggagctggcctcggcctcggcatc

SEQ ID NO: 874980 - DNA, 99 bp, Homo sapiens
atgtcttcatttgcttccacaagaaccgcgaggacagagccagaggccaagaagagtaagacggccgcaaagaaaaatgacaaagaggcagcaggagag

SEQ ID NO: 874981 - DNA, 99 bp, Homo sapiens
ttctatcttcacaggcgtgaactgatccatgttatactgggcaaatgcatgaggtggtaggacaagagttgtgggctgagcctttggtctacgtttggc

SEQ ID NO: 874982 - DNA, 99 bp, Homo sapiens
cttttggaggaggaggatgaatttgatagagaggaaaaagaagatgtccctgtggaaatgtccaatggtgaaccaggttgccactactttgagcagctc

SEQ ID NO: 874983 - DNA, 99 bp, Homo sapiens
cacagtgttggtgtggagtcacagcttgacttttgaccattaaaaatctcaagtgacgactttgggaaactctggttatccttcgcaaatgatgtgaaa

SEQ ID NO: 874984 - DNA, 99 bp, Homo sapiens
gagccctgtcatcttctaaacagagcagcagcagcagagatgataacatgtttcaggtctgtagcatctctgtctgttggagaaggcacaggtgtcaga

SEQ ID NO: 874985 - DNA, 99 bp, Homo sapiens
ctggcttccgtgcccgctggcattgctaaacacgtggaaagaatcaatttgggaggcggggtttcaccatgttgcccagactggtcttgaactcctgag

SEQ ID NO: 874986 - DNA, 99 bp, Homo sapiens
ttttgaagaatcaaatattcagtgggatacaaatgggttgtggataccccctggctgggcttcatggagaaatcttctctgatcaccaacctgaatccc

SEQ ID NO: 874987 - DNA, 99 bp, Homo sapiens
gtcttctagcaaagcccaactgcagctctctagaacaggaggatttcatccctctacttcagcttggatttacactgggcaacgtggttggaatgtatc

SEQ ID NO: 874988 - DNA, 99 bp, Homo sapiens
attggaaagcttgttcttggtgattcgcagagcagccaagatccctgccacagcaacggaggctgtgcctggagtggccctgccctggaccacagatgt

SEQ ID NO: 874989 - DNA, 98 bp, Homo sapiens
tggaggctcaacggcagaagcttcaccacaaaagcgaaatgggcacaccacagacttcattagaggggtggtagactcggaggatctccctctaaaca

SEQ ID NO: 874990 - DNA, 99 bp, Homo sapiens
ggagcttctcagaagacagagggttttcttttgagtgatgagttggaacaattcatggaaaatcaaggtgcatcgagcccaggtatcctcattttaaca

SEQ ID NO: 874991 - DNA, 99 bp, Homo sapiens
aggcagtctcaaacactattgactggattctattgagtctcttcattcctttaaaagccagctgtccgatcatgttgctgttactcaagtcctgaggtt

SEQ ID NO: 874992 - DNA, 99 bp, Homo sapiens
gtttgatggactctttgagttttgtcagctctcaactggcggttcagttgcaatggctgccatccggaagaaactggtgattgttggtgatggagcctg

SEQ ID NO: 874993 - DNA, 99 bp, Homo sapiens
atcgcaccattgcactccagccttgatgaagcaaagatggatgcattgaggcccccaaagcaggacagggcaacagcaatggggatggtccagctgaac

SEQ ID NO: 874994 - DNA, 100 bp, Homo sapiens
gtgattctcctgcctcagcctcccagtgatgtggagccaactgcaccgatggaggaacccacagtggtggaggagtcccagggcaccccggaagaggagt

SEQ ID NO: 874995 - DNA, 99 bp, Homo sapiens
gaccttctgctaccagaaaaccttctccaccagaatccagctcacgctggattacatcccagtagaccaagaagagttaagagattatgtcaaagctag

SEQ ID NO: 874996 - DNA, 98 bp, Homo sapiens
cgcggggactgcaaccctaatcagaaactgaggcttcttgaagagcttgaagacacttggctcccttatctgacccccaaagatgatgaattctatca

SEQ ID NO: 874997 - DNA, 98 bp, Homo sapiens
gagagaataaaactccagcgagatccgggccgtgaacgaaagcagtgacggaggagcttgtaccaccgggtctccgtctctccaccgggggcttcatc

SEQ ID NO: 874998 - DNA, 99 bp, Homo sapiens
gctaaacttcgccaactccgctgcctttgccgccaccatgcccaaaacgtaattcgccaaaatgacgaacacaaagggaaagaggagaggcacccgata

SEQ ID NO: 874999 - DNA, 98 bp, Homo sapiens
gagaccaaaagtatgttgtaccttgtgacagaatatgccaaaaatggagaaatttttgataaccatgatgactacacagacttctactatgacatttg

SEQ ID NO: 875000 - DNA, 99 bp, Homo sapiens
gagcctagaatgcatcagtgcccttgtggcgaatggggctcacgtcgagttgctttcagctatgtaacgtttttcgatcccatgagatggaaatcgacc

SEQ ID NO: 875001 - DNA, 99 bp, Homo sapiens
ctgctgccgccgccgccgcccagagactgctgagcccgtccgtccgccgccaccacccactccggacacaggtatgtgaggagcagcgctgtgaggagg

SEQ ID NO: 875002 - DNA, 99 bp, Homo sapiens
gaaggacgtatgaatggatttattgaccagattgatggaatagttcattttgaaagtcacagtgtgagaaacgtccaggcctttgcagttcttcagaat

SEQ ID NO: 875003 - DNA, 99 bp, Homo sapiens
gaagatggcgactgaggcacagagtgaaggggaggtgccagcccgcgaatccggccggagtaatgcacacgaatccggaagtgacgccagaagaagagg

SEQ ID NO: 875004 - DNA, 99 bp, Homo sapiens
cctcctgagtagctgggattacagcaaagtgaaaaggagagcttgttgaaggaaagagatcacattttgtcaactctgggtgagacaaagcagaaccta

SEQ ID NO: 875005 - DNA, 99 bp, Homo sapiens
agacgcgctgccgaggagaacccagcggctattatcgctgaccctggatggactgactggtgtttcccaggaccacatgcgggctcattaccaaacagg

SEQ ID NO: 875006 - DNA, 100 bp, Homo sapiens
aaaatccagcagtatgacaaggcactggatgatgcaatcaaagctcgacttcgtcgagctttgattgcatcatccagtgccttgtcatactgctggattt

SEQ ID NO: 875007 - DNA, 136 bp, Homo sapiens
ccctcctgtggtaataagttggtggacgctggggaagagtgtgactgtggtactccaaaggccgatgctgctaccagctttctgagagcagcaagatcaggtaacttggacaaagctttggatcacctgcggaatg

SEQ ID NO: 875008 - DNA, 99 bp, Homo sapiens
tgcaagttcccatcgtcccaggaactagaggatgcctcctgctgttctcttaagaaagattccaacccaatggtcaaaatgcagatcttcgtgaaaacc

SEQ ID NO: 875009 - DNA, 99 bp, Homo sapiens
cagccttttccccatggcagcccctgttctgtaagactttgaccccgacgcaggcttcagtgattgccgcggatcagaagcctgagcactttggctcga

SEQ ID NO: 875010 - DNA, 99 bp, Homo sapiens
ggcacatttatcttagaatcaggaataatcttggaagatgaagaatcacattcctgacatatccatccgtagcctgtctgtttaggagactttttcaaa

SEQ ID NO: 875011 - DNA, 99 bp, Homo sapiens
agaacttaagaagcaatttaatgatgaagaaactttgctacagcctcctttgaccagatccatgactgttggtgggtctcgctctgttgcccaggctgg

SEQ ID NO: 875012 - DNA, 99 bp, Homo sapiens
cgcatgtcgtagcagatgcccagacccactctgcagtaagcttttgcgcccaggtatcctttcagccccataggcccttcatctcctttctctccttta

SEQ ID NO: 875013 - DNA, 98 bp, Homo sapiens
aagatgccagatgtgggagacacgccaaagctcccaagatagtgtgtgtaccatatcagtggcgtgtaactatgctcatcattgttcttgtcaatgcc

SEQ ID NO: 875014 - DNA, 99 bp, Homo sapiens
gcgcgactcggggtgattcacgccggggaccccaaggagaatggtagctgagtggaggttgtctcgaggtgttgaagaacagacacaagctttctttga

SEQ ID NO: 875015 - DNA, 98 bp, Homo sapiens
atggggttcacaattatcagaaaatgcatcagtgccgttgaaacacgaggatacaagaccctcctgaaaggaatttccgggaagttcaatagtggtga

SEQ ID NO: 875016 - DNA, 99 bp, Homo sapiens
ttcgagaagctgcaaatgccagtgaagctttgttctaagaatatttgtttcatctagtttatgagtccaaatgatatagactgtaaatgtcacagcagt

SEQ ID NO: 875017 - DNA, 99 bp, Homo sapiens
tcagaaacatcagttactctgaagggcatcatgcatcttactgaagtgtacctggatggaacaaaatctgaagaggacctctttttgcaagtatatgaa

SEQ ID NO: 875018 - DNA, 99 bp, Homo sapiens
tcgaatatctcatggcctacagggactttctgcagtgcctctgagaacttacgcagatcagccgacctggttcacctggatctgtaattcctgctcaag

SEQ ID NO: 875019 - DNA, 99 bp, Homo sapiens
ggcaccttcctcagtcgcgccgtgcaggtgcaaatatatacagagcttcataatcagcccaagaccacatagagcaaacatgaatgatatttcccaaaa

SEQ ID NO: 875020 - DNA, 99 bp, Homo sapiens
tcaagcacttggttgaccccattgacgatctttttcttgctgcgaagaagattcctggaatctcatcaactggtactccaaagattcaggtttactcac

SEQ ID NO: 875021 - DNA, 98 bp, Homo sapiens
acaaccgcagcagtggtggctatgaacccagaggtcgtggaggtggccgtggaggcagaggtggcatgggtttcagaaaattacaggtgatgctagaa

SEQ ID NO: 875022 - DNA, 99 bp, Homo sapiens
ttcgcaagaagcaccagttcaagtggccctcagggcatccccgttttcggaggacaaccacagctattatgtgtcccgtctctatggccccagcgagcc

SEQ ID NO: 875023 - DNA, 99 bp, Homo sapiens
actgatcctgagtaagtagcgctgtttgagattcttccagtggaaggtacatagacctgggcttgctgatggccaccagactagtgaggaagtcttcat

SEQ ID NO: 875024 - DNA, 99 bp, Homo sapiens
gcccttggaaaaactggcctcatattttgtgtacacagtccctgtacagggtttctgacctgtgagagtgactcagacatctcctctacaagtacctaa

SEQ ID NO: 875025 - DNA, 99 bp, Homo sapiens
ctttgacagccctgcagcagctcaaaaagctgtgtctgccctgaaggccagtggggttcaagctcaaatggcaaaggttcaagcgattctcctgcctca

SEQ ID NO: 875026 - DNA, 99 bp, Homo sapiens
cttgcaagaaacctcaggacttgagtaacagcaacatgtacctgcagatgaaatggcccctcctcgatgtcccctccagcgccacagtcaaggacacga

SEQ ID NO: 875027 - DNA, 99 bp, Homo sapiens
gtgatcacctatatacttggagttggagacaggcacctggataaccttttgctaacaaaaacagctgggaacttctccacttcatctagcagcacagta

SEQ ID NO: 875028 - DNA, 99 bp, Homo sapiens
cggccacgaccccgtctgggagaatcccaaggactgcagcaaagccaaaaagctggtgtgtaatatcaacaaaggctgtggctatggctgtcagctcca

SEQ ID NO: 875029 - DNA, 98 bp, Homo sapiens
atgtctccagcatttttacggacccaatcatgagcactgctttaatagggaggaaaaggcttctcttttacatcgtactcaggaagaaagaagaaaga

SEQ ID NO: 875030 - DNA, 99 bp, Homo sapiens
cagctgtcgtgaagaagcaggaggctaagaaagtggtgaatcccctgtttgagaaaaggcctaagaattttggcattgaaaaattgtatggcgacttct

SEQ ID NO: 875031 - DNA, 99 bp, Homo sapiens
ctgcttttgatgtctgacaacgtggatcgttgttttgaaacgctgcctctaagaatcaaacttcactcttgggagaaccaccaaaagaaattcggctca

SEQ ID NO: 875032 - DNA, 99 bp, Homo sapiens
gatccgaagcgatggagccccagctgaaggaaagcggaatcgatctgacaccgagcagagatgcccgagtggtaaaagacatggcaacaggaaagtcta

SEQ ID NO: 875033 - DNA, 148 bp, Homo sapiens
ttcttcactggcacatagttgatgaccagtctttcccatatcagagcatcacttttcctgagttaagcaataaagtccaagtgggttccccggggcgactacatcgcctccaacacggacgaatgcacagccacactgatgtacgccg

SEQ ID NO: 875034 - DNA, 99 bp, Homo sapiens
cacccgtcagcctttcctgagcttccttcatcccctgaacaaccactcctcgtcctctgccccatccccctgctctcggatctccgctgcagccccctt

SEQ ID NO: 875035 - DNA, 99 bp, Homo sapiens
gaagagtgagagagagctattagagattgtgaagaagaatttcgatctccgccctggggtcattgtcaggctaaagaattacctccaaagccattgtca

SEQ ID NO: 875036 - DNA, 99 bp, Homo sapiens
gtctcatgttcgtctttgtctttgacaatgtagtattaatgcagacgttaatcaatccatgcgacccatttgggtagatcaggtaacacgaagggactg

SEQ ID NO: 875037 - DNA, 99 bp, Homo sapiens
atgcacttgtccaatcctcaatcctggtgcgagcccgaccaaggatgacagtaaggactcagatttctggaagatgcttaatgagccagaggaccaggc

SEQ ID NO: 875038 - DNA, 99 bp, Homo sapiens
actggaggtctcctacctattaaaaggaccatacgagtcctagatgtcaataaccagtccttcagagaacaagaggttcaaaccttgtactactcagct

SEQ ID NO: 875039 - DNA, 98 bp, Homo sapiens
acaggctgtgtgcatgcaccaaagatctcagtggttcaatagcatccccagatgtcaaattaaatcttggtggagattttatcaaagaatctacagct

SEQ ID NO: 875040 - DNA, 99 bp, Homo sapiens
cagaaaccactacctggacctcgccgggattgagaactacacgtccagattcggccctgtttttggtgttgagccagacttgaccagggaaggcggcag

SEQ ID NO: 875041 - DNA, 99 bp, Homo sapiens
ggaccgccaccgccgggaggctgctgtacgacattgctctggtgctactgattgctcaagagaaggaaagaaacatatttgaccagcgtgccatagaga

SEQ ID NO: 875042 - DNA, 99 bp, Homo sapiens
gtcattaatttacatgaagtttatgagactgcatcagaaatgatcttagttctggaatagaatcaaggccagaggtgtgaacaaggtgtcagctctgaa

SEQ ID NO: 875043 - DNA, 99 bp, Homo sapiens
ctttatatttctctcagaccattcccatcagtgagcattacaggaacatcgtgatcaattagccactgccaaagatccctgctggccaaaacattctga

SEQ ID NO: 875044 - DNA, 99 bp, Homo sapiens
gtgctccacaatccttaatccaaagcattcttaatccatctcttcagatatgtctgtacttcaaaagcagtttcagtatcactgagcggatgacaggag

SEQ ID NO: 875045 - DNA, 99 bp, Homo sapiens
actgccctggcacccagcacaatgaagatcaagctgacctgatctccagcttcctgctcatcaccatgctcttcatcatcagcctgagcctactgatcg

SEQ ID NO: 875046 - DNA, 99 bp, Homo sapiens
agacacccagaagaaagccttcacgtgctggataaactcacagttggccaggatgagtaacgaaagaggctttgaaaatgtagaactgggagtcatagg

SEQ ID NO: 875047 - DNA, 99 bp, Homo sapiens
gaaaagctgagaaagtttcgttttcgcaaagaaacgaacaacgctgctattataagataaaagaatcagagtgtctcaacccttgacaagaggaccaag

SEQ ID NO: 875048 - DNA, 99 bp, Homo sapiens
gatttgtaaaactgctggaccagctacacaactcactgaggatcgacctctctacatacaggacaggtgatttggcttctgcacagttaggaggagcac

SEQ ID NO: 875049 - DNA, 99 bp, Homo sapiens
ctggcgctggggttggagaactgcagtgtttgtgactatattcaatatcagactactgtcccctgtgctcagcctgatactgttactcattgcgctgga

SEQ ID NO: 875050 - DNA, 99 bp, Homo sapiens
ccccggggagtcagttcctccccgggcccctgagccatgcccatcgcagccgccccgaaggagccagagagaagaagaaggaggttcctgctgtgccag

SEQ ID NO: 875051 - DNA, 99 bp, Homo sapiens
gcggatctctacatttctgaaggagaagagaagtttacctttattgagaaatgtaacaaccctcgttctgtcacattattgatcaaaggaccaaataag

SEQ ID NO: 875052 - DNA, 99 bp, Homo sapiens
gaagacagccttacagaagctttggagcaaattaagataattagctcatcttcaatgtcatttgtcagagtgaaccgctgtggtccccgagttggtgta

SEQ ID NO: 875053 - DNA, 99 bp, Homo sapiens
gaggaaaacttcactttcttcattcacaatcccaagcgccaggaccttgaagttgagggtgaaaaggaacagcctgtatttgcaatgaccggccttcga

SEQ ID NO: 875054 - DNA, 99 bp, Homo sapiens
gaaaaaacaaaacaaatatgaactatgataagctgagcagagccctgcgatactattatgacaaggtaactataactacccaatattgcagccatggag

SEQ ID NO: 875055 - DNA, 99 bp, Homo sapiens
gttttccttccatctctgctgctctctcatttgctggccatcggattgggaaccactcacgaattcttgtttggtgcccttgctgaactggttgataat

SEQ ID NO: 875056 - DNA, 99 bp, Homo sapiens
atcccatcgggagatgctcatcagggtttcatcaccttaaatggttttgaaccaatgaaggtgtattcccttaaaaagacggacagcccatcgtgtgaa

SEQ ID NO: 875057 - DNA, 99 bp, Homo sapiens
aggagatcacaacgcgttatcaactggatccaaaatttatcacgagtattttgtctatccagaagttaaaggagagattgctcgtaaagatgaaaagct

SEQ ID NO: 875058 - DNA, 99 bp, Homo sapiens
gctctgcatttcaattcaatagaatcatcagtagacagaaatttattactggtcttacagggattctcaggtaaatttttggcaatggcactgtgtggc

SEQ ID NO: 875059 - DNA, 99 bp, Homo sapiens
gagagctatggctgcagaagcagaagcgtcccgcgaggcccgcgccaaggatctaggggtgtttattcctgctcctatggctcaagggatgagaagtga

SEQ ID NO: 875060 - DNA, 99 bp, Homo sapiens
ctactgccttaaactttttgcacttataccatactattatactttgtcatacttcagaaaggtggtcataatgtcacaatctccttgcagtccaggact

SEQ ID NO: 875061 - DNA, 99 bp, Homo sapiens
gatgaagattcttgacgttggctgtggtggtgggctgttaactgaagaaacagcaagagattgactctaaagatgctattattttgcatcagtttgcaa

SEQ ID NO: 875062 - DNA, 99 bp, Homo sapiens
ggtcgcaccactgcactccagccctgcccactacccctcggcctcgcactgtctccaaggtgccagagagactgaatatcctccagtgccgctcccgga

SEQ ID NO: 875063 - DNA, 99 bp, Homo sapiens
ctcagcaagggtccaccctcctccgtgcccaaaagccgccacctgaccatcaactgctggagccagttctgcttctcggcaaggagcgatttgctggtg

SEQ ID NO: 875064 - DNA, 99 bp, Homo sapiens
aaaggtcacctggaaattgccttattggaaaaacatttcttacatatggctcgtggacagcagaaaattcagtctcagcagaaaaatgccaaaaagcaa

SEQ ID NO: 875065 - DNA, 98 bp, Homo sapiens
tgcagtaaagccagaaaagactgctgctccctcgccgtcactgttgtataaatgagcagctgatgagccagatccgggagacgcagcagctctgccac

SEQ ID NO: 875066 - DNA, 99 bp, Homo sapiens
gagacattcttgcgctgcatcgaagcctcagcttcccctaaagtacgactgagcttggcaaacgaagctctgctgcccaccctcatctgcgacattgct

SEQ ID NO: 875067 - DNA, 99 bp, Homo sapiens
ggactatctgacaagtaaaattaaaagtcgtcttggagacaaggaagcagttctcaacagggatttagtgcaagaagaagaacagttgatggaagaaaa

SEQ ID NO: 875068 - DNA, 99 bp, Homo sapiens
gggggatgccttgggagctatcagtcccctctttcaataggataactggtgtgggctggcagcagtgttggcaaccgcagtactgagtcctggggctga

SEQ ID NO: 875069 - DNA, 99 bp, Homo sapiens
cagaaatcgaaacagatacagagatgtaagcccatgtcatcatcaagaatatgggctggaatctcgttggtcctgttgttcgatgccttttgtgtaaag

SEQ ID NO: 875070 - DNA, 99 bp, Homo sapiens
caaccctcgtgggcctcctcagcccacacaacccggccctggccgctgccgccctcgttgagtgatgtctcttccccaagatcaataacttcgactcca

SEQ ID NO: 875071 - DNA, 99 bp, Homo sapiens
gggtgacagaacgagactctgtttttgcaaaggcttcaaaaaggtcaaaggcaggtggcagctgagaggcatcctgtatttcttctctcatgaaatgtt

SEQ ID NO: 875072 - DNA, 98 bp, Homo sapiens
gagtcctgttccaccttcagagcgtcacggcgtacgccctcatggggaaaatctccccggtgactttcagagagcgtactgcggtcagtgcagcgaga

SEQ ID NO: 875073 - DNA, 99 bp, Homo sapiens
ggacaagattggaggaaatactataaagtggaacctcttgattttggcggaggaaatagccctgtccaggagttcactgtgcctgggagcaagtctaca

SEQ ID NO: 875074 - DNA, 98 bp, Homo sapiens
gatgaaaccccaggcagagacgggggaagcagcacgggatcccagcctcaggcctgcacggacggtgttggttggggctctttggtgtaacgggaaac

SEQ ID NO: 875075 - DNA, 98 bp, Homo sapiens
ttaaagcttcagaggcagaaaggcagaagtggaagcaacttctatttagtgatcatgaattcagaaggagctggcggacatcactttagaccctccac

SEQ ID NO: 875076 - DNA, 99 bp, Homo sapiens
tgcaagaggttgtgtatttctcggctgctgatcacgaaccggagagcaaggttgaggtgggtgaggcagtcttggaaaatgcccggctcatgctgcaga

SEQ ID NO: 875077 - DNA, 99 bp, Homo sapiens
aagccccttgccatccctgtgtgacagcaatgaggtgaacccaggggccgaagcccacccagggagttgatggtactaggttttgacaagcttgcatca

SEQ ID NO: 875078 - DNA, 98 bp, Homo sapiens
aattgggcagaagagaagcagtgaaggagtgcagaggcatcacctgaaagggtcctgcagttctgagcttgggttccctttgcctggacaccaaccaa

SEQ ID NO: 875079 - DNA, 99 bp, Homo sapiens
tcaatcagagcgtcctgtgcggcctccgaccagggagaccttccatcctcctccacctgttccacccagaggacgctgattccacctcctaaaacctgc

SEQ ID NO: 875080 - DNA, 99 bp, Homo sapiens
tgacgaaaacatgtactacagccagtcttctatgtttccacatcggtcagaaaaagattcctccactttagtgtcttctctggaggcggagctctctga

SEQ ID NO: 875081 - DNA, 99 bp, Homo sapiens; identical to SEQ ID NO: 838694

SEQ ID NO: 875082 - DNA, 99 bp, Homo sapiens
gagagaggcaccgggatcgtgaccgagaccgtgaccgagagcgtgaccgagagcgcgaatatcgtcatcgttagaagatgcaactgtgaaagttccttt

SEQ ID NO: 875083 - DNA, 99 bp, Homo sapiens
gaaagcatgagactatatgctagagagctggaatacggctggcatcggagaaaccctcacagatgaactgcccgcctttagtctcacccctctcgagta

SEQ ID NO: 875084 - DNA, 98 bp, Homo sapiens
tgaggagttgctggccaaaggggcctgtgtacttgctgtagatgaaaatggaaagaccacagcaagattctttcattcgtctcctcctagcctggggg

SEQ ID NO: 875085 - DNA, 101 bp, Homo sapiens
ctcagccagccatgtgtctcttatttttcttgactgtgacgatagagttgcatcgagagaagagcagggacattgcgctgtaatcccagctacttgggagg

SEQ ID NO: 875086 - DNA, 99 bp, Homo sapiens
cggagctctgatcgccgggaacccttgccgctgctgtcctgcgaccccaagcagatatgtgtcacaaagatgtctacacggaactgccagggaatggac

SEQ ID NO: 875087 - DNA, 99 bp, Homo sapiens
ccggctgtgccccgggagcgcctccggggctggtgcgtggccggcagctcgcgaacagcagctgatccggactggttttcctttggaatatggataaat

SEQ ID NO: 875088 - DNA, 98 bp, Homo sapiens
gggacgttggggagggggctgtgccgggcggagagaactcagcgaggattctgaggcaccggcttttccgtgaacattgtgtttgtgtacaaggaaac

SEQ ID NO: 875089 - DNA, 99 bp, Homo sapiens
aatgaggcctacgcagagctcatcgtccttggtatggacctgtctgccaatcaggacgaggagaccgaccaggagaccttccagctggagatcgaccgc

SEQ ID NO: 875090 - DNA, 99 bp, Homo sapiens
cttcagacagcatatttgagtcatttccttcgtacccacagtgcttcatgagagtaacagtaacgagtagccagagtactcctgccaaagcccccaggg

SEQ ID NO: 875091 - DNA, 99 bp, Homo sapiens
ctaaacagaaaaggagaactataattctaggaagtggtcacaaaggaaaagctactattagaattggtggagtacatcctgctgcttcaagggtagaag

SEQ ID NO: 875092 - DNA, 99 bp, Homo sapiens
ctataaacgggaaagattgactagtttcacagttgatcatggccttgccaggttggtgacagtatattgtgagcatggtcataaagctgccaaaatcaa

SEQ ID NO: 875093 - DNA, 99 bp, Homo sapiens
tccagagactggcaggcctcggcctaaagctgcgttcctttgcctgcaacaggggtcaagatgagttttgcctgacttctttgatgtcctgaactttcc

SEQ ID NO: 875094 - DNA, 98 bp, Homo sapiens
gcagcaagaagatcgatgctgagcggcaggctgcagctgcagcctgccagctgttcaagatgcaagtgctgctggaccaggcgggctgctgtatcgtg

SEQ ID NO: 875095 - DNA, 99 bp, Homo sapiens
gaggggcaactgaagacggaggtgcccaaggtcagaaggaagcaccacacagaggtaatggaactgctggtccatctgaataaacgtataaaaagccgc

SEQ ID NO: 875096 - DNA, 99 bp, Homo sapiens
atctggccgggcagtaccttcttcaagagaaatggagcccttctccaagctaagatatcaacatggactagggactccagacttgcggcaaacccttcc

SEQ ID NO: 875097 - DNA, 98 bp, Homo sapiens
gggatctccacagtcatccttgaaatgtgtcttttatggggacaagttctatctacagatatccaagaattttatgaggtgacattgctaaattctca

SEQ ID NO: 875098 - DNA, 99 bp, Homo sapiens
cacccagaggccggggaccttgccaaccctcccaagaagttcagaggttttgatgatgatggttcagaatttcatgaacatatatttctggagaaacac

SEQ ID NO: 875099 - DNA, 99 bp, Homo sapiens
ttggaccagccacaaatgaaagtcctggaatagattatgtacaacgcgttccttcacctcgggcagaataactttgcagaagcccacaggttcttcaca

SEQ ID NO: 875100 - DNA, 99 bp, Homo sapiens
cctgcctcagcctcctgagtagtggagcagcgtgacttcattggagtggacagcacaggaaagaggctgctcttcatggctaatgaagcagacttggat

SEQ ID NO: 875101 - DNA, 98 bp, Homo sapiens
gaggacccacctgtgggtgtcagtggcgcaccatctgaaaacaacatcatgcagtggaatgcagttatatttggaaaatgatgcatcctgttgccagc

SEQ ID NO: 875102 - DNA, 99 bp, Homo sapiens
tcactgattcttaaggctctgttccttagagatccaaagggtacatccccagttacttagacaaggacgagctctgtgtagtgtgtggtgacaaagcca

SEQ ID NO: 875103 - DNA, 98 bp, Homo sapiens
gcacacacagtgggacctagacaaagggagagggtgaccgacatcccaactagagaggagcaagcaagggagctgtacaggagactaagggaaaaacc

SEQ ID NO: 875104 - DNA, 99 bp, Homo sapiens
tggtggtggcggcttgcacctgagtggaagctgtggtggtggcaagaaatgatgcctgctctgtgcctgtatctgagatcatcgccgttgaggaaacag

SEQ ID NO: 875105 - DNA, 98 bp, Homo sapiens
cagcctgcgaaggtggcggcgctgctgctcgggctgctcttggaggtcatgtccatcctgttgcatggggatgctgcatttgctggccagggcattgt

SEQ ID NO: 875106 - DNA, 99 bp, Homo sapiens
gaatcttcaatggatgaggaacagtcaaagtgagaagcgccaccttcaagtgaacgtcaccaacccagtacagtgcagcctgcacgggaagaagtgcac

SEQ ID NO: 875107 - DNA, 99 bp, Homo sapiens
gggaagctctagaggcgttttttggccaaggggctttatgaaggcaaagaacagatggagtttgaagaatccatgagacggctctttgaatccatcaac

SEQ ID NO: 875108 - DNA, 98 bp, Homo sapiens
ttcgagctctgactgcagacctaccaaaacagcactctcgagtggaccctgaggagctcttcaccaagctcgaccgcattggcaagggctcgtttggg

SEQ ID NO: 875109 - DNA, 98 bp, Homo sapiens
ctaaaccagaagaggaggttgcccagaagaaaaagaaggagcttcaagagcagggggagatcagaatcgtccagctgggcttcgacttggatgcccat

SEQ ID NO: 875110 - DNA, 99 bp, Homo sapiens
gacaacgatcaggaaccctaagaagaggcgccagaggagccgccttctgcctcagaacggcgtgactcggaggttttgacctgtagcagagaaccaatt

SEQ ID NO: 875111 - DNA, 99 bp, Homo sapiens
cgtgttggaatggacttcggaccctggcctcttgggatgcaaaggtcatcatcagatttgaaatatttaaagtggatacaaaactatttcagcaatgca

SEQ ID NO: 875112 - DNA, 99 bp, Homo sapiens
cagcttcttaccaaatacagaagtaaaagatgatgaatgcgagtcagatgcagaaaatgagcaaaaccatgatcctaatgttgaagagtttctacaaca

SEQ ID NO: 875113 - DNA, 99 bp, Homo sapiens
ctcccgaagtgctgggattacaggtttggttgggatgttccagtaattctgagaaattcagaagagacccagttcagcacaagagttttcaaaaagcaa

SEQ ID NO: 875114 - DNA, 99 bp, Homo sapiens
gaggttttcaggaccaaaattgtggaaaagtcactctggaatgtcgttgtctgctgggtcttcccctcttcattcccccaagattactccacatacttc

SEQ ID NO: 875115 - DNA, 99 bp, Homo sapiens
aagatggaggtggactacagcgccacggtggatcagcgcctacccgagtgtgcgaagctagccaaggaatacaaacagaagcttgcacgagtaacccag

SEQ ID NO: 875116 - DNA, 99 bp, Homo sapiens
tgtggtcccgcctcacctggggtatggagaggaaggaagagaatctgaatctgaagctgaagaaggtgactgaattttgaaactacaccctcagtaaag

SEQ ID NO: 875117 - DNA, 99 bp, Homo sapiens
cgatttggccggccccgcctcacttctaatgagaagcttatgctggcctccatgttccactcgattttggcattagagaagctcggtgctgtcttcaat

SEQ ID NO: 875118 - DNA, 99 bp, Homo sapiens
ttcagctttgtgaagattgcaaagctttcgaggaatgaagccaagagtgatgaaagaagctgtatctactccatcacgaatggcccacagggatcagga

SEQ ID NO: 875119 - DNA, 99 bp, Homo sapiens
ctcccttcagctttggtccctcggggcgtctgggcagcctacgctttccgggtcagtatagaccttctgatttgctgtgccctgagacatatgtttggg

SEQ ID NO: 875120 - DNA, 99 bp, Homo sapiens
ttctaaatcaggaatggattgaaatctaatgaaccgaaactttggaattaaacatgtggacatgaaccaaaagagcatattatggagtgcactgaaaca

SEQ ID NO: 875121 - DNA, 99 bp, Homo sapiens
gcttgagtttctgcttgtcctcgtaggcacataaaggccatagatgttatgcacatcccggtgctcccagcccccataatgctgggcatccttgagcat

SEQ ID NO: 875122 - DNA, 99 bp, Homo sapiens
cttctttctccaaaacaactttctctgcttgggtttctgtcagttcagatttcagatccaccaactgtgcatatcccagtttggagctatccgcaaata

SEQ ID NO: 875123 - DNA, 99 bp, Homo sapiens
gagaagtgatcatggagaccaaggagaacaggaatgtggcttcggctatggggaggatgcacagtgtgtgacgtgccggctgcacaggttcaaggagga

SEQ ID NO: 875124 - DNA, 98 bp, Homo sapiens
tcgtcatggagacaggtgctctcggttgcacaataaaccgacgtttagccagcatcactgcaggaaatgcgggcaggctgtctgcgggaagtgcagca

SEQ ID NO: 875125 - DNA, 98 bp, Homo sapiens
ccagatatctcaaaatggttcaagtggtcacagtcaaagtgcctcagaagaactcataagaatcatgcaagcttcctccctcagccattgatggaaag

SEQ ID NO: 875126 - DNA, 99 bp, Homo sapiens
tgatgagggaggtgcccctgcgttgtaccatccgcctgtgggacacctaccaggtaatctgtaagtcagatgctccaacaggggatgttcttcttgatg

SEQ ID NO: 875127 - DNA, 99 bp, Homo sapiens
actacctcctggctgccgtgaataggcagcctaaaggaacaggaaatatagtggtcattatgattagctatccaaaaggaagagaaattttggagctgg

SEQ ID NO: 875128 - DNA, 99 bp, Homo sapiens
ctcaagaaccttttcagcaagtatgggaagattgctctggaagcagccaaagcactggatgacaagaactgctgggaaaagctgggagaagtggccctg

SEQ ID NO: 875129 - DNA, 99 bp, Homo sapiens
gaaaatgtgctgaacagcagtaggaccgtttttggaaggaagtactgacaaatcagaaaatgatgcacctccaaaaggtgtatgggtcactgcttctca

SEQ ID NO: 875130 - DNA, 99 bp, Homo sapiens
tcggatctgctggacgaggtcttcttcaacagcgaggtggacgagaaagtgagagttaagaaagacgtggacaagggcacacggcactcagacatgttc

SEQ ID NO: 875131 - DNA, 99 bp, Homo sapiens
ctttgttcccaatgacatgcaagttggacagacgggaaaaatagtagcaccagtcatacagcatatttgacaataatcgccaggatcccacagggctga

SEQ ID NO: 875132 - DNA, 148 bp, Homo sapiens
gagtggccaagaagctccatggtgagcactcacagtctaaggctggaagtttaatgaactgttttctacatttcacagatgtggtgctggaaaaagccatgcacaagtgcatcttgaagcccctcaaggggcacgtggaggccatgct

SEQ ID NO: 875133 - DNA, 99 bp, Homo sapiens
ggtgtgactggaacacaaaaagggcaaattgtatggagaattgagcctgggccctatttcatggaacggaagaaggagaaagggccaacccctgaagaa

SEQ ID NO: 875134 - DNA, 98 bp, Homo sapiens
gggcttcgctgctcagccagctcctgcgaccgccctgcgcttcgtgcaccggggcggtccgttgccaaagccagatgttacatcctgtccactgcaga

SEQ ID NO: 875135 - DNA, 98 bp, Homo sapiens
ccagctcgtactttgtggaacgtatttctgggaaaagccagcttctgtttgcactggtcttcacaactcgttacctggatctttttacttcatttatt

SEQ ID NO: 875136 - DNA, 98 bp, Homo sapiens
ctgaccattttctactgtccctgcgcgagatcagacactcctctaatttacaaagcagtgcccagctggtttgtgcgagtggagaacatggtggacca

SEQ ID NO: 875137 - DNA, 100 bp, Homo sapiens
tcccagttggagagggaagaaaagctttggatgaaggagcttcaaactctttgggtttgaagctccttcatccaaagcttttcttccctctccaactggg

SEQ ID NO: 875138 - DNA, 98 bp, Homo sapiens
acagtacatttctgcaattgagaaacaggcacacaagtgtgaggagttgctaaatgctcagcttgacaactggtcatttctacaaacatttaattata

SEQ ID NO: 875139 - DNA, 98 bp, Homo sapiens
ggcattgtgggtgtcctggttctccatcattgtcaccctggccctcgcggtggctgcctttatttttgaaatcatgaatcctgtttatagtcctggat

SEQ ID NO: 875140 - DNA, 99 bp, Homo sapiens
gacaacatgctgtactttgccaagcaccaccaagatgcctacatccggtcttcccaagggattgttgaagaaacttctgaagagggaaactctgtacct

SEQ ID NO: 875141 - DNA, 99 bp, Homo sapiens
ggcggggaagatgttcagcgtagagtcgctggagcgggcggagctgtgcgagagcctcctcacttggggctctggaggccacgggcatgatgcttcggg

SEQ ID NO: 875142 - DNA, 99 bp, Homo sapiens
agaaggaagatggcggatctggaggagcagttgtctgatgaagagaagatccctaaagaagtggctgacatctttaacgcccccagtgatgatgaagag

SEQ ID NO: 875143 - DNA, 100 bp, Homo sapiens
cgcgtgtcctcggagcgcggtccctgtattggtctcctgctcctagaggccttcatgccccgaggactagcagacaaacaaggacctgaggaatgtgatg

SEQ ID NO: 875144 - DNA, 99 bp, Homo sapiens
gcaactcggcagcctccacccaccggcccaccctacatttagcgcatcatgtgatccgggaagtctgtttactgttaaaagaaaccattgattcaagag

SEQ ID NO: 875145 - DNA, 99 bp, Homo sapiens
gtaattaatcaaacttggacagctctctatggccaaccaagccctcgagcagttattcccatgtcctgtataaccaatggaagtggtgcaaacagaaaa

SEQ ID NO: 875146 - DNA, 99 bp, Homo sapiens
gcatcaaggagtccaggagaaaatgcttccccttgagggcttgtaagtcatcaaggcgccatagttcagagtcccggccgctagagcggcgcctccact

SEQ ID NO: 875147 - DNA, 99 bp, Homo sapiens
ctaatgaggagtacggagaattctataagagcttgaccaatgactgggaagatcacttggcagtgaaggctgaaggctatgctgagggtgacctcactc

SEQ ID NO: 875148 - DNA, 99 bp, Homo sapiens
gccgattcaagaaggacaaagagatcatagccgagtatgaaagtcaagtcaaaggatttgcgcaagcaggtagcgccgctgctgaagagtttccaagga

SEQ ID NO: 875149 - DNA, 98 bp, Homo sapiens
tcatggtcccagaaacgtcactatcaagaaggtgacagtatgttgactgctgtctctgtggccagagattgtggaatgattctacctcaggataaagt

SEQ ID NO: 875150 - DNA, 99 bp, Homo sapiens
gcatctgcctcccgggttccagtgattctcctgcctcagcctctcaggtagctgggattacaggtctgtttctgtcgactgtggaccacttatgtgcga

SEQ ID NO: 875151 - DNA, 99 bp, Homo sapiens
tggtgggacccaaaatctgcctggaagataatgtatctgaagaagacacttgaatcatgggtgacgttaaaaattttctgtatgcctggtgtggcaaaa

SEQ ID NO: 875152 - DNA, 99 bp, Homo sapiens
gggctgcccagatcatcctgaactcaaatgcagccctgaggatttggctactgcatataacaacagggggcaaatcaagtacttcagggttgattttta

SEQ ID NO: 875153 - DNA, 99 bp, Homo sapiens
gaagatcattcgagaccatggagacatgaccaacaggaagttccgccatgacaaaagggtttacttgggattccaactccacagagtgaccagagagag

SEQ ID NO: 875154 - DNA, 99 bp, Homo sapiens
tgctgccatgtgggaaagtccttggacgagttgtctgcttgcggagaggtgtctgcggctcaggttatctaccttgcctgctcctatgccacagtgtac

SEQ ID NO: 875155 - DNA, 99 bp, Homo sapiens
gaataaacatgcaatgaacccaaaaggggctgtgaacaattcaaattatggttggagagccctgagactattagcacggagaagccctcacttcttcca

SEQ ID NO: 875156 - DNA, 98 bp, Homo sapiens
ttcctttcgtagcctgcattttccagtttgttgaagttgaaggacagatcacatccttggttgatctttacccatccttcctaaggaagggttatcgt

SEQ ID NO: 875157 - DNA, 99 bp, Homo sapiens
caggaggctttggagcggctaaaaacctggctccttcacctaccaaacgcaaagaccgctcagatgagaagtccaaggatcgctcaaaagataaagggg

SEQ ID NO: 875158 - DNA, 99 bp, Homo sapiens
tgcccagaccagtgcacagctcattgtccctaagcctggatttcggctgaatgcgtcttcttggcccatgttccttttgaagacgctaaatggagcaga

SEQ ID NO: 875159 - DNA, 98 bp, Homo sapiens
gcaaccgcagcctccgcggccgagagtgcagcgaggggcggaggaaagcgcaaagggaaaagcaagaagtggaaagaaatcctgaagttccctcacat

SEQ ID NO: 875160 - DNA, 99 bp, Homo sapiens
cacagagaaaaggaggcagtgatgtgaccacagaggcagagattgacatgatgcagccgcaagatggagtcatcagaacccactgtgaggaagtgactt

SEQ ID NO: 875161 - DNA, 99 bp, Homo sapiens
ttgagtcttctctgcatcccagccatcacctggatttacctgttttctgggagcttcgaagtgatccgggccaaggtggtggggaagaagctggtaaag

SEQ ID NO: 875162 - DNA, 99 bp, Homo sapiens
ctcagacctgccaatttaccagagataattgataacaccctgtaacagctgaaccattcctcaagaattttgtatccaaggcccaaaagtttgttaccc

SEQ ID NO: 875163 - DNA, 99 bp, Homo sapiens
ctccagcaaactccagcagacctggtgcttggcagttaaagacatctggagcaaaaaagcattttcctgtttcttcagcaatcaaggcatagtccacgt

SEQ ID NO: 875164 - DNA, 98 bp, Homo sapiens
tttctgacgctagcatcagcacatgtaggggtctaagtggttacccaggctgtccttacccacctggtggtccatatcctgccacaacaagttctcag

SEQ ID NO: 875165 - DNA, 99 bp, Homo sapiens
ccaccgtacttgcaagaaagcagccccagaggcatttattaatacagcaaaagaaatttatgaaaaaattcaagaaggagtctttgacattaataatga

SEQ ID NO: 875166 - DNA, 99 bp, Homo sapiens
aaatccaggtcgcgatcgaagagtccccccaagtctcctgaagaggaaggagcggtgtcctcttaagaaaatggaggctggtggcatgttgtcctcaat

SEQ ID NO: 875167 - DNA, 99 bp, Homo sapiens
ctctcagctatgattttctcacacaggtatacacgtaaattttctaaggcctgttgtttctgatatgcagtatttggatttatctttgattccaagagt

SEQ ID NO: 875168 - DNA, 98 bp, Homo sapiens
ggaagcgtttttgaagactgttgcccaaaactacagttctgtcactcacttacacagtattgggaaatctgtgaaagtggagatggggtttcaccatg

SEQ ID NO: 875169 - DNA, 99 bp, Homo sapiens
ctttatcagatcaatcatcggaggaaaggtcccggagagagcgagtgcgtcagtctcgaatggacacagatctggaaaccatggatctcgaccagggtg

SEQ ID NO: 875170 - DNA, 99 bp, Homo sapiens
atcccagcactttgggaggccgagagtctccgggaccattatggcagtcaagtggacgggtgggcattcttctcctgtcctctgcctgaatgcaagtaa

SEQ ID NO: 875171 - DNA, 99 bp, Homo sapiens
ctattgtgcgcactggcaaacgtatgtttctggaacattgcgatttggaatgcatggaagaggagatggttcgtgttacgcagtggccgtttaactgga

SEQ ID NO: 875172 - DNA, 99 bp, Homo sapiens
ggaaagcatcatcagacccaagtgccaagttatttactttcccatcaggtttcctgatgtgagcaggttttggatacaaaggaccttacaatagaaaaa

SEQ ID NO: 875173 - DNA, 100 bp, Homo sapiens
cctgggtgacagagtgagactccgcacaacggcctccacctctttggacagtcgcggggggatgtgcagcccaggatctctccaggggacaggggcttgc

SEQ ID NO: 875174 - DNA, 98 bp, Homo sapiens
ttaaggattccaagtaactcttatttggtttctaagcatgaattgaggaacagaagaagcagagcagatgatcggagcagcatttgtttctccccaaa

SEQ ID NO: 875175 - DNA, 99 bp, Homo sapiens
gtcctttatatagaagggagagtagaagcagagaccccgacggaaagcgtttcagagcctgaggtggccacgaagcaggaactgcaggaggaggaagag

SEQ ID NO: 875176 - DNA, 99 bp, Homo sapiens
cagttttcatctttgaatggttgcgatttcttgataaagtcttggttgctgccaacaaggttcaacagagtttggaaaagatttctaaactggagcagg

SEQ ID NO: 875177 - DNA, 99 bp, Homo sapiens
gtgcctgatcctgcaacacgagcatggcatggccccgcaggtcttcacccaggccctggagtgcatgcgcagggatgcccgggtagttaaagacatggc

SEQ ID NO: 875178 - DNA, 99 bp, Homo sapiens
agaaaaatgagaattataaagccctcgtcagaaggaattatgggaaacgcagaggcagaaaccaggtcacctcatcatctcaaggaggagcattcccct

SEQ ID NO: 875179 - DNA, 99 bp, Homo sapiens
gtccttcaactacgctgtgcacgagggtctcggcctcgcggtgcagattggtggaacgagaatgcctacacgcagccacaggaatccagtttccatgga

SEQ ID NO: 875180 - DNA, 75 bp, Homo sapiens
gggaattagtgaagccaaagctgataaaattctggtctgccctacttgagagaatgcctgtcatggaaaaagtga

SEQ ID NO: 875181 - DNA, 99 bp, Homo sapiens
ggagactttggggcctaactagcggagcgggcactggacacaatgaactttgagatgctcaaaggccagcctattcgcatcatgtggtcccagcgagac

SEQ ID NO: 875182 - DNA, 75 bp, Homo sapiens
tgaggaagtactgagcctgttggaggaactggcccggaaacaggaggacgcccccccaggatgcaatggcgcagc

SEQ ID NO: 875183 - DNA, 99 bp, Homo sapiens
ccgagttgggcagtatgtggtcgacctgacttcttttgagcagttggcactacccgtcttgaggaatgttcttgccaggctgtgtgagcaggagcccgc

SEQ ID NO: 875184 - DNA, 99 bp, Homo sapiens
ctttctttctcttcatccagagacctctggagcttacggatctgattcagggaatcatcaagcctcggctacagtcaatctcatcacgaaggtttcgtt

SEQ ID NO: 875185 - DNA, 98 bp, Homo sapiens
acattgctggagatagtaccatgtgcagggactatgtcttagactgcaatatccttccccctcttttgcagatcatcaggctgcccggctggggctgg

SEQ ID NO: 875186 - DNA, 99 bp, Homo sapiens
cttgagttccttcaagttacaattcatctgtttctctaattcattacgaatccgagcagcttccacaatcgcactttcaaactctcggtaagcctccca

SEQ ID NO: 875187 - DNA, 99 bp, Homo sapiens
ctcacattttccaacaggaaggaatatgtggagagggccattgaatatcgacttcatgagatggacagacagctcaagcctagaacgccacgttgtgcc

SEQ ID NO: 875188 - DNA, 98 bp, Homo sapiens
aatactactgtagaggatgagactgaaacaaatgaagttcaaggatttctctttgggaaactaaagttttgcacactagggaccaagaagccctcggg

SEQ ID NO: 875189 - DNA, 99 bp, Homo sapiens
agccgggaactccccatcgcgttttgccagcgataatacgcctcaggtaaaccggagcactgctcttctgaagagcttgtctgctgaacgtgaacgatg

SEQ ID NO: 875190 - DNA, 99 bp, Homo sapiens
attaagtgcctaattcaaatgggagcagcggtggaagcgaagcaacttgtagagacagtttcatgtggaggaaatcttttgatgaatattgggcccaca

SEQ ID NO: 875191 - DNA, 99 bp, Homo sapiens
acaggctagcctcaatgaagcagctgagaagtattatgatctggcagccaggctgaggcctaatcaaagtgtgggatgctgtctcaggagatgaattga

SEQ ID NO: 875192 - DNA, 99 bp, Homo sapiens
tttcccagaaaaaatgcccagcgcggcgcggggctgcggagtcgtccggagccgctgcgcgttgacatcacttgttagaagagcaactctgaaagaaaa

SEQ ID NO: 875193 - DNA, 99 bp, Homo sapiens
aagggactttggaaaaaggctgtctctagacagcagtcttgtgggtatatttacttctggcacatgggaagagaaatcagatgaaatttcctttgctga

SEQ ID NO: 875194 - DNA, 99 bp, Homo sapiens
gtacctctccttttccctctccctttccctaagcgatggcaagccggcaggtggatattgcaactcagggctggttcattggtctgatgtgtgctgttg

SEQ ID NO: 875195 - DNA, 99 bp, Homo sapiens
gcgtgccccgacgtacagcgggccgggaaaagtggcactgaggctctggaacttctgcccagctctccttggtatcgagaaccttccctgcgaacttca

SEQ ID NO: 875196 - DNA, 99 bp, Homo sapiens
ttcactcctcagcgcgacgtcgtgtcgagttcccaaaaagctccgcaggggctgtagggagatttcagagacaactgtctgaaccctgccaccccttcc

SEQ ID NO: 875197 - DNA, 99 bp, Homo sapiens
gtgaagccactttcactttttgacagtaaggtgacttgcacctacggagagcttggagaaaacacggacaagtggaattttcccgcggatcaggagtct

SEQ ID NO: 875198 - DNA, 99 bp, Homo sapiens
gatggatgagtccagcattctaagacgaagagggctccagaatggccacatctgttgctcagtggatccacagtgccttcaggaactgtgaagttaact

SEQ ID NO: 875199 - DNA, 99 bp, Homo sapiens
ggaagatggcggcgggggcgagagacggtaaagaacaggtccaagaaaagctcaaagaaagcaaataccagcagcagcagtagcaacagcagcaagttg

SEQ ID NO: 875200 - DNA, 99 bp, Homo sapiens
gccggcgggaccataagggcttaactcatatatttaacccccctccaaaaagtgatgatgaacagtctacacagatggctgcaagttgggaagatgata

SEQ ID NO: 875201 - DNA, 98 bp, Homo sapiens
gaaaattgaaatcatgaaagtagacaggactaaactgaagaagacacctactgaggctacagtctccttcccctttccaggcacttgaggctgaaccc

SEQ ID NO: 875202 - DNA, 99 bp, Homo sapiens
gctggttttaacggcgtctgtgagctgctttccctgcacacgaacagaagctcttacctgttgtttctgatatgcagtatttggatttatctttgattc

SEQ ID NO: 875203 - DNA, 99 bp, Homo sapiens
cacctttcctcaggagtcatttctgttccgcacaggcctgctgaactgggtgctttatataggtcatccgtccttggctcaggatttggagagcttgca

SEQ ID NO: 875204 - DNA, 99 bp, Homo sapiens
tgaagagggaagacacgcggaaacagatgctgagatgaatcgtcacctgtgtgtttggctttttagacatccatctcttaatggttacctccagtgtca

SEQ ID NO: 875205 - DNA, 99 bp, Homo sapiens
catttttaccttgtgatgcacctgggattaaccagcgaggatcaggagttttttgagaaccctgcttttcgtcccgatgggctgaaactctatcctacc

SEQ ID NO: 875206 - DNA, 99 bp, Homo sapiens
cggaaactgccccttctcgggggtcatgatgggcagcaagatggcgtctgctagtagggtcgttcagacttcccaagtaagaagcggaagaggagccgc

SEQ ID NO: 875207 - DNA, 99 bp, Homo sapiens
gcctcctgagtagctgtgactacagaggcttaaaggatggcctcgtcagatctggaacaattatgctctcatgttaatgaaaagattggcaatattaag

SEQ ID NO: 875208 - DNA, 99 bp, Homo sapiens
caccgccccctgggatccgcaggttccctacacggtctcctgggtcaagatacaaactggactctcaggacaaaacgacaccagccaaaccagcagccc

SEQ ID NO: 875209 - DNA, 99 bp, Homo sapiens
gggacagggatgtctacctggtaatagaggacttgaagcagaaagcaagtgaatacgagtcagaagaacaccgaaaatctctcccagcactttagaaag

SEQ ID NO: 875210 - DNA, 99 bp, Homo sapiens
ttttcctaaaagactgaaatgggggcgaccattcttaggcatgggttggaattggagcctatcccccaacccgaaggctaacagcatcatgtggttact

SEQ ID NO: 875211 - DNA, 98 bp, Homo sapiens
cgactgggatcctacgtgcatgaagatggacgaggtcctgtacagcatcgccgagaaggtcctgggaactccaacaagggagcaaatcagagaaatga

SEQ ID NO: 875212 - DNA, 99 bp, Homo sapiens
ccaccgccgccggcagcgaagacgcggagaaaaaagttctcggcaaaagtcaacaactctagcttaattggagtaggctatactcagactctgaggcct

SEQ ID NO: 875213 - DNA, 98 bp, Homo sapiens
aaatacccctttgaattaattatggctgaatgtatcctgtcaggtataatgtcagtgaatggcaagaaagttcttcatatggatcgaaacccttacta

SEQ ID NO: 875214 - DNA, 99 bp, Homo sapiens
ggtcatcttctcactctttgacagtaaagagaaccggccaatcagatactccatccgcaggaccagtgacaagggccagttcttccgagtcacaaaaaa

SEQ ID NO: 875215 - DNA, 99 bp, Homo sapiens
gagagaagctaagaagtctttcaatgatgatgctatgctgatcgagaagtttgtagacacaccgaggtggaaccgtcccaaaatgtcccttgctcagaa

SEQ ID NO: 875216 - DNA, 102 bp, Homo sapiens
tggagcgccctgtaaggtatattcggaaacctatcgattacacagttctggatgatgtgggccatggtgtcaaggaactttatattgctgttggaatatctg

SEQ ID NO: 875217 - DNA, 99 bp, Homo sapiens
agcacgtggtgggctatggccaccttgaccagagtctcactgtcgcccaggctgcagtgcagtggtgccatcacgcgtcactgcaacctctgcctcccg

SEQ ID NO: 875218 - DNA, 99 bp, Homo sapiens
cggcgatatggaagaggagggcaagaagggcaagaaggacacattcagctaacgtattttagcaggtggagtgaggttgaagattcctgtgacagcgat

SEQ ID NO: 875219 - DNA, 99 bp, Homo sapiens
gtgactggtgatcacatccccaccccacaggatctgccccagagaaagtcctcgctcgtcaccagcaagcttgcggggcataatcaccagcaacacccg

SEQ ID NO: 875220 - DNA, 99 bp, Homo sapiens
gcaaactttaagactgctgtgaaaggtgtactttcaggaacactgagtttctctttcagaaaatccactactcttttgaagtcagccacacagtattct

SEQ ID NO: 875221 - DNA, 99 bp, Homo sapiens
tgcttcttggggccccgggcctttgaaaacttggcgggtctccctagcatccgtcaagagagcgtccacagtgctctccaagcgaatctgaggctgctt

SEQ ID NO: 875222 - DNA, 99 bp, Homo sapiens
catgacccacttcaacaagggcccttcctatgggctctcggccgaagtcaagaacaagacacgatgaggcgagtggtacgacagagcaagtttcggcat

SEQ ID NO: 875223 - DNA, 99 bp, Homo sapiens
cgtacagaatacattcagccgtcagggcttcgtgggacacatatgcaacatgcctatgatttttacaagcctgatatgctatctgaatatcctatagta

SEQ ID NO: 875224 - DNA, 75 bp, Homo sapiens
tcgctgtacgccgagcacccaggcgactgcctcatcttcaaggtctcctctgagcctccggcctccataagaccc

SEQ ID NO: 875225 - DNA, 98 bp, Homo sapiens
ctaaacttcaccaaataatagctgtttgtattttggctgctgcaggagccattttaggctttcatagattctattcacaaagaataaccaccattttg

SEQ ID NO: 875226 - DNA, 99 bp, Homo sapiens
aaatgcagtacatgtatttcaaagctgaaccttatgctgcagatgaaggttctggggaaggacataaatgttctgtggacaatcacaatgggaatccaa

SEQ ID NO: 875227 - DNA, 99 bp, Homo sapiens
gccatgactgcgcagatacttcacagtgacagatgttcctcccaaagtcacggtataccgagcaggtgttgcaatcagcactacattcctgggctacta

SEQ ID NO: 875228 - DNA, 99 bp, Homo sapiens
gaggacaacagctacaaccgggggtgaggcaggcgactaatcagattgtgatgaattgtgctgatattgatattattacagcttcatatgcaccagaag

SEQ ID NO: 875229 - DNA, 99 bp, Homo sapiens
aaagacctcctcctccacaggggagacagaggtcccaaaggcaagcagttagaaggaactgaatgtccactccatgttgttcatccacccactggggaa

SEQ ID NO: 875230 - DNA, 99 bp, Homo sapiens
accttcaaccaagtgaaaggcattttcggcttcactgacagcgactgcattggaatgggtaccacagaccatgtcatcgtcctggcgtccacgaaccga

SEQ ID NO: 875231 - DNA, 99 bp, Homo sapiens
gggacagatcgtcttgtctggggaaaccgcagcagccgtcggagcacttactggagtccaagatgctaatgggtgtcaaattgagaaccaggtagatcc

SEQ ID NO: 875232 - DNA, 100 bp, Homo sapiens
ttgtctgtagttcagcacttggtctctaccagtgggacttttgagaatatcataactggcaaagtcccactggtagagaccaagtgctgaactacagaca

SEQ ID NO: 875233 - DNA, 99 bp, Homo sapiens
tcagaatctggctcggaggaatctcagtagggacaacaggcaggagaattatgggagcgcatttccccagggacatggtctgctatacagctcagactc

SEQ ID NO: 875234 - DNA, 99 bp, Homo sapiens
agaattaagacgcatggaagaacttcacaatcaagaaatgcagaaacgtaaagaaatgcaattgaggccttggacaagattcgctatgagagcctgaca

SEQ ID NO: 875235 - DNA, 99 bp, Homo sapiens
ttgaagacaccgtatgaggtgaatggacagccagccaccacaatgaaagatcatgaatcggttcagtggtgttatgacaacttcattaactacaggtcc

SEQ ID NO: 875236 - DNA, 99 bp, Homo sapiens
atagtccagctcaaattgtgacatatgatcttctgtcagtcatttgccatcatggaactgcaagtagcgggctggtccgagtctctgttttggaagctc

SEQ ID NO: 875237 - DNA, 99 bp, Homo sapiens
caacatccagaacttcgaccttccgtacctcatctctcgggcccagaccctcaaggtggtgaagcagtattttccaatttgaagattcatttgaaggtg

SEQ ID NO: 875238 - DNA, 99 bp, Homo sapiens
ttgaagaagtcttgaatgactggaaactgattggaaactctttgggaaagccactcgaaaaggtatatatgagagatcgagaaattgctgccacagcca

SEQ ID NO: 875239 - DNA, 99 bp, Homo sapiens
agcatcgaaagcgttggagaggtgttaccggaacggcggcgacaagggtgttcccgaactagagtggcgtcatcacgtagacataaccaagaaacttca

SEQ ID NO: 875240 - DNA, 99 bp, Homo sapiens
tggacacaaatatatctgttattttacctactgttcatgaggtggatattttcaggagtttggatcataatacaagagaagcacagggcaaagacactg

SEQ ID NO: 875241 - DNA, 99 bp, Homo sapiens
gagcagtctctggacaagatgaccacactccaggaatgccagtgcatcttttgcacagctgtgctggatagtttactagtccagtatggagtggtggag

SEQ ID NO: 875242 - DNA, 99 bp, Homo sapiens
cttttgatggtggaagtggtgaaacccaaacaacatctcctgctattccttgggctgcctttcctgcagatccacattgtttgaagttattgtgagtgc

SEQ ID NO: 875243 - DNA, 136 bp, Homo sapiens
ctcagactgctgtgctagcaatcagcgagactccgtgggcgtaggaccctccgagccagatgcaataacagaacccagtgtgcagtggtggcaggtcctgatgtttttccagacccgtgtccaggaacctataaat

SEQ ID NO: 875244 - DNA, 98 bp, Homo sapiens
tttgaagaggaatttattatatcctacaactgggttatatgattctgttcattggagattcaaccaacagagggatcatgtactatcttattgaaagg

SEQ ID NO: 875245 - DNA, 99 bp, Homo sapiens
ttaactgcttggccgtgcttgccctgtcatcccacctgagaaccatgctcaccgaccctggtatttgaagtataccatacaactgttttgaaaatccag

SEQ ID NO: 875246 - DNA, 99 bp, Homo sapiens
agggacttggagcttgctattggtggagttctccgggctgaacagcaaattaaagataacttgcgagaggtggtatgcagatcttcgtgaagaccctga

SEQ ID NO: 875247 - DNA, 99 bp, Homo sapiens
catgagatgcacatcaaatacatgggcagccacatccctgggaggtggggaagacagggctccagctaccacaggacgggctctgggtatagccgttcc

SEQ ID NO: 875248 - DNA, 99 bp, Homo sapiens
gccagggtcatcccgtccagtctctgatcgaaggggagtttccacagtgattgatgctgcctcagactgttgggcgggagctgctgctccatctgattg

SEQ ID NO: 875249 - DNA, 99 bp, Homo sapiens
gcggccccctgttgtgttgctgcggagagacccaatgtctgtggatcacgttataatgcttactgttgccctggatggaaaaccttacctggcggaaat

SEQ ID NO: 875250 - DNA, 99 bp, Homo sapiens
cacggcagagactctccatcacactgcatctgtcctctgggccatgcaggaatagacagaggcctgtaaatcacccaaggccactcccacctgcgtccc

SEQ ID NO: 875251 - DNA, 99 bp, Homo sapiens
tacggaaaaggaacagattgttcctaaaccagaagaggaggttgcccagaagaaaaagatgccatgaagtacaccattgtggtgtcggctacggcctcg

SEQ ID NO: 875252 - DNA, 99 bp, Homo sapiens
agagagctctgcatcaatgcgccggccataggaagaaaaaatgctgggcatcttggtgcagcacaaagtccggagtggcgtctcgggcatcgtgggcat

SEQ ID NO: 875253 - DNA, 99 bp, Homo sapiens
tctgcttaggattcactgcacatcgaattaagagagcagaaggatgggaggaaggtcctcctacagctgaagtgagtagtgaatatagtatggacaagg

SEQ ID NO: 875254 - DNA, 99 bp, Homo sapiens
ccgatatcaccgatgccatcaagctggactcgggagtggtgaaacgcctgtacacgttggatgggaaacaggacatggatttgattgacatactttgga

SEQ ID NO: 875255 - DNA, 99 bp, Homo sapiens
ctgggcgacagagcaagactctctcctccagtgcatggaaaaggactggagtatttagaagtacaaatagcgcccttcttgacaacatcatcttccagg

SEQ ID NO: 875256 - DNA, 98 bp, Homo sapiens
gaagcggttggcaccactgaagtgaccgaatgagctcaaattgaaattattccatgcaagatctgtggagacaaatcatcaggaatccattatggtgt

SEQ ID NO: 875257 - DNA, 99 bp, Homo sapiens
ggagtgtggactttttgaatttcaagaacagtaaagttggaacacagcagagggtgtgtaataaaatacaggtacttgaagaagcagaagctcaacatt

SEQ ID NO: 875258 - DNA, 99 bp, Homo sapiens
gtccagtctcattagctggggatcgggagggtcctcctcctgggctcctctgatgctgagacctgagaacgtctcgcccgccgcagttagcaaaagtcc

SEQ ID NO: 875259 - DNA, 99 bp, Homo sapiens
cgccgaagaagcatcgttaaagtctctcttcaccctgccgtcatgtctaagtcagagttcacacaaaagatgttggacaatttctacaattttgcttca

SEQ ID NO: 875260 - DNA, 99 bp, Homo sapiens
tcggattccttatgcagagtggccgacttggtgctcctgacctctgataaagctgcagccaatttctcagatcgttctttgctgaagaacttgggacat

SEQ ID NO: 875261 - DNA, 99 bp, Homo sapiens
gtcgccaaggaggtggacccccaggagacgagttgtactgctgtcacaggaaatggacgctggattacaagcatggcagctcaggcagcagaagttgca

SEQ ID NO: 875262 - DNA, 99 bp, Homo sapiens
gtaaaagctccctgaggcctcctgaagccgagcaaatgctgacactgttttctgtacagcctgcagagctatgagtcttgccctgtcgcccaggctgga

SEQ ID NO: 875263 - DNA, 99 bp, Homo sapiens
ggatccttctggagtccgtgtgccagcaacagagctgggtccgggtgtacgctaagatatcaacatggactagggactccagacttgcggcaaaccctt

SEQ ID NO: 875264 - DNA, 99 bp, Homo sapiens
aaaaagcagaagaaatcattgctgaagcagaacctccttcagaagtctctccagggcacaccgtattcagctctgagcggtctttgctagtgaggccaa

SEQ ID NO: 875265 - DNA, 99 bp, Homo sapiens; identical to SEQ ID NO: 842834

SEQ ID NO: 875266 - DNA, 99 bp, Homo sapiens
ctggacataagaaaaagctgaatacctacattggcttctcagaaattttggatatggagccttatgtggaacataaagggtcccaggccataaaacaac

SEQ ID NO: 875267 - DNA, 99 bp, Homo sapiens
gctcaaggaaacctttccaacacagatgtccaagctgccaagagactggagaagctggctggtggaggggcgaacttaatggtaaagaaggagtatttc

SEQ ID NO: 875268 - DNA, 99 bp, Homo sapiens
cgacgcactggcccaggacctgcacaagatcctgactgctgtcatggcgtgccctctggagaaggccctggatgtgatggtgtccaccttccacaagta

SEQ ID NO: 875269 - DNA, 99 bp, Homo sapiens
attgtaatggccatcgctggaaacaagtgcgacctctcagatattagattccgaagaggctcaatctgtaaatccttctagtgttgatgaaaatattga

SEQ ID NO: 875270 - DNA, 99 bp, Homo sapiens
caaagtgctgggattacaggcgaggaacaaggtgctgaaccacttcagcatcatgcagcagcggcggctcaaggatcaggaccaggacgaggatgagga

SEQ ID NO: 875271 - DNA, 98 bp, Homo sapiens
ccaaaccctggtttcacatgggtcagtcccacagctcttcagccaaatgcccattcgcaaaatgctctggctacagttgtaccaggctgacacccgcc

SEQ ID NO: 875272 - DNA, 99 bp, Homo sapiens
gaggaggcggcggccgacggtggcggcgggatgcagtctgaagatgatgagaaactgaaaaagaggaaggagcgatttgggattgtcacaagttcagct

SEQ ID NO: 875273 - DNA, 99 bp, Homo sapiens
tcacggcaagtggtgaaccagttcccatttctgaagaatctgaagagctggatcagaagacattcagcattaattccttgtgtggatatcagatccgga

SEQ ID NO: 875274 - DNA, 99 bp, Homo sapiens
tgtaatgaagaagcacttaaatactcatctactaggcaagcatggagttggcaccccaaaagaaaggggagagaccattctaacacaggtaccgtccag

SEQ ID NO: 875275 - DNA, 99 bp, Homo sapiens
ggcaggctgaggagaaagcggcgcgcggaggttggacaagccctctgaaagttactcccttacaacctcatcatgaaggacgctcattaagtcacatat

SEQ ID NO: 875276 - DNA, 99 bp, Homo sapiens
atccaggaagagcagtaagggactgagctgctggagattacctggggcaattgatgttatcggtcagactataactatcagccgagtagaaggcaggcg

SEQ ID NO: 875277 - DNA, 99 bp, Homo sapiens
gctccatggcctccacaatattcatgccttctttcactttgccaaacaccacatgcttgccatccaacctttaagccttgtttcacagcttgaagaatg

SEQ ID NO: 875278 - DNA, 98 bp, Homo sapiens
aattgtattctccgagtcagattggagcatttgtgttgatgaagatgaaagagactgcaggacgtactcatagatcaaaccaagttactgctcctgag

SEQ ID NO: 875279 - DNA, 98 bp, Homo sapiens
tcggaagcctgcgtaactttctcccttgatccgggagtctttccactggaaaacgttgtgtgacgtgatcctcatggtccaggaaagaaagatacctg

SEQ ID NO: 875280 - DNA, 98 bp, Homo sapiens
tagaaaggagacccgactgcaactgctggattgctgcaaggctgagggacgagaacgagctgttcaacggttttgtgtatagcatttgaggttcttca

SEQ ID NO: 875281 - DNA, 99 bp, Homo sapiens
gggacatcctgagtggggagcagctgcgggtgttccgggagcaccggggctccgtcatctgtctggagataacgaaggaggcccaacttcattcaataa

SEQ ID NO: 875282 - DNA, 99 bp, Homo sapiens
tgttcttcttcgagtatttgtagaaggggcatgccagaacagtgggctcgattactacagacctccaatatcaccaaactagagcaaaagaagaatcct

SEQ ID NO: 875283 - DNA, 98 bp, Homo sapiens
gccagctgagaagtcttcgtgcttcagggtgcatgtagtctttggactggttatttctggttttgaagtaatcgaacaaattgaaaatctgaagaccg

SEQ ID NO: 875284 - DNA, 99 bp, Homo sapiens
caggatctgctttcagagtacatgaacaacgcttctagtgaggacgttgccagctccccggagcgccactacacgcccttgccttctgcttccagggaa

SEQ ID NO: 875285 - DNA, 98 bp, Homo sapiens
caagatcttcacattctggatctcagctgctcttgaaggcaagcgctttgcttctggatcagctgacaaaagcgttattatctggacatcaaaactgg

SEQ ID NO: 875286 - DNA, 99 bp, Homo sapiens
aaccaggaagtcctcacaccgggtcagctcttccttatgttcctgaaggaagctctatgcagaactgtgccaaggcatcgtggacatagccatttccag

SEQ ID NO: 875287 - DNA, 99 bp, Homo sapiens
tgctccagaacttcaaagggaaggtcattgtcatcgtggggcatgtggcaaaacacacagctgaggtgcatcttcccgaaacctgaagaaatttataga

SEQ ID NO: 875288 - DNA, 98 bp, Homo sapiens
gagactttgtctttgatgactcagaagctattgttaacaataagcggagtttaagagagctgtgaaagtagcaacaggacaagaactctcaaacaata

SEQ ID NO: 875289 - DNA, 99 bp, Homo sapiens
cccagccctgcgtgaggccgcggagcgccagctcaatgaatgggttacccagaccaaactttggccatttaacggatccatttgacacaccagcattta

SEQ ID NO: 875290 - DNA, 99 bp, Homo sapiens
cggggctgaagaagcagttctacaaggcgagccaggctgaaggtgatgtggccgccctcaaccgacgcatccagctcgttgaggaggagttggacaggg

SEQ ID NO: 875291 - DNA, 99 bp, Homo sapiens
ttacagtgaaactgaccattcagaacagacaggcccagctctcttttccagctcagccaaggctgatggcggaaaagagcagctgacgtacgagtctgg

SEQ ID NO: 875292 - DNA, 99 bp, Homo sapiens
cctactctccgtacatccatgtaccagaagtgtaccactgtggatgaagcaggccgctttgaagaggaatttatcaaaatgcgcatggagagacttcag

SEQ ID NO: 875293 - DNA, 99 bp, Homo sapiens
atggcagagttagctaaagaactccctcaagtttcatttgtgaaggattcactccttctccagttgcacagccacacccttcagctggccttaatgttg

SEQ ID NO: 875294 - DNA, 99 bp, Homo sapiens
acaagtcggcgccccagagcggacgagcacttctcagaacttctggatgagttttcccagaacgtcttgggtcagctcctgaatgatcctttcctctca

SEQ ID NO: 875295 - DNA, 99 bp, Homo sapiens
tccaacaggtggtactttatgctagaacccagcgcaggagtaaattgaaagaatcacttggaatgaatctgaagtctgctgcagtaaaacacagaaggc

SEQ ID NO: 875296 - DNA, 99 bp, Homo sapiens
gggggcctcaagctgtcccaggacatggacacctgtgagattaaagagtctattgttggggaaatcagacgggaaattgtaagtggacttttggcagca

SEQ ID NO: 875297 - DNA, 99 bp, Homo sapiens
gagacagaagaggggccttccctacagctggagcacaagaggaataggaactgcacctcttccttcagtttcagcttgaataatatcaggaagattcgt

SEQ ID NO: 875298 - DNA, 99 bp, Homo sapiens
gggcatcacaaatacatttgccactattccaggaatggttgggcccgtcattgctaaaagtctgacccctgatagatgtgtgcacagacccaggccatg

SEQ ID NO: 875299 - DNA, 99 bp, Homo sapiens
ccacagcgcccacttctttgagtttctcaccaaggagctagccctgggccaggaccgaatgtggccccgtcccagagcaccacccgagacatcaggagc

SEQ ID NO: 875300 - DNA, 99 bp, Homo sapiens
ccctgggtcagcaggccttcagatacttatagctcacgctaccaataggaacttgagtctctcaaaaacctgctgctaaaattctcttcacctctttcc

SEQ ID NO: 875301 - DNA, 99 bp, Homo sapiens
aaacaacaactactagtcggccgaactccaagcgtgaccagctttctgttgggaacactcaaagtgaataaccctataccttccaatttgaaatcagaa

SEQ ID NO: 875302 - DNA, 98 bp, Homo sapiens
tcaagggcagcaatcggagccagtgtctagaggaccacacctgggcacctccctttcccatctgcaaaagtaggctgagagtcctggaagacaattca

SEQ ID NO: 875303 - DNA, 98 bp, Homo sapiens
acaagtctctggggtcacgaattgacgactatgacattgtggtgaggtgagctccccaaaatggcacctcggggttggggagcagaatatcaccggca

SEQ ID NO: 875304 - DNA, 99 bp, Homo sapiens
gagcagctattcttcttatggccagagccagaacaataaacattgacgatcttgaggatgaccctgtggtgaacggggagaggtctggctgtgcgctca

SEQ ID NO: 875305 - DNA, 99 bp, Homo sapiens
tcctcccagcagctcatgcaacatctcctctggggaaatgcagaagaaatgagccgtcagactgctacagcattacctaccggtacctcgaagtgtcca

SEQ ID NO: 875306 - DNA, 99 bp, Homo sapiens
acttcaggagtcctcagctagtgacatggtcgctctaatggtaccaagtgacaggttggctttactgtgactcggggacgccagagctcctgagaagat

SEQ ID NO: 875307 - DNA, 99 bp, Homo sapiens
aagaaatgttccaccaggacttgatgaatataatccattctcggattctagaacagaatacaggagtttccagaaaatataaaaaattgtaaagttttg

SEQ ID NO: 875308 - DNA, 99 bp, Homo sapiens
ttcattcccgaatggatctggtaggagtggcatcgcctgagcccgggacggcagcggcctggggacccagcaaggagcattgtccgtgatgccagccgt

SEQ ID NO: 875309 - DNA, 99 bp, Homo sapiens
gctgatcccatgactaaagtgcaggccgaactagatgagaccaaaatcattctgaacaccaatcagggtcttcaggcctggaagattgaagacattcca

SEQ ID NO: 875310 - DNA, 143 bp, Homo sapiens
ggcattagtatcttaatgggatcactggtagcagggattctgtctgtgctgtcgagacagaatccctgctaccagtgatcccattaagatactaatgccatcactgtctcctacaatggaagaaggaaacattgtgaaatggc

SEQ ID NO: 875311 - DNA, 99 bp, Homo sapiens
ccggttggctccggttgcagagttgagtgtcctgagaggtcagattgctgtcagggcctgtgctttaacggcagtgccttcgtcttgtacctctctgcc

SEQ ID NO: 875312 - DNA, 99 bp, Homo sapiens
gtaatgttctacaaggaggtgaaggacaagctcctacaaggcaggcagtattgggtgcaggtcccacgacagtgatgtccgagggcgcccggaacattg

SEQ ID NO: 875313 - DNA, 99 bp, Homo sapiens
ccttgatctcgccattgctattgggttcatataggccggagacatttgcgcaagtgtaggacgaagcgagagcggttccttccagccgaacctgcctcc

SEQ ID NO: 875314 - DNA, 99 bp, Homo sapiens
cagctcactctcggcctccagggccagccccttcatcctcctcaggatctgggctttctctctcttcgctctaatcagcgtgtcttggtaatgctgggc

SEQ ID NO: 875315 - DNA, 99 bp, Homo sapiens
ccacaatatcccaggcccagagggctactgcattccacaccagtgcaagaacaagagtccgcaccttctccccaatctcaggggagatgtcattgccaa

SEQ ID NO: 875316 - DNA, 99 bp, Homo sapiens
cagtgcccttgtggcgaatggggctcacgtcgagccaccccagcagacatgtttgccaaggcctttcgggtcaagtccaacacggccatcaaggggtcg

SEQ ID NO: 875317 - DNA, 102 bp, Homo sapiens
catgggtgagctggagaacctgaagtagcaaaggcaagaaggcaacgacgttccatctgtggaaggacctaccaaccagtagagatggagtttcaccgtgtt

SEQ ID NO: 875318 - DNA, 99 bp, Homo sapiens
agtggcaagttacttatcaagctgaaagacggcaggaaggttcaacagagtttggaaaagatttctaaactggagcaggaaaaagaacattggatgttg

SEQ ID NO: 875319 - DNA, 99 bp, Homo sapiens
ggagtgcgtggaggagctgtgcagccgcgaggaggcgcgggaggtgttcgagaacgaccccgagacgggaagtccctgtgggagctggtgctggaacag

SEQ ID NO: 875320 - DNA, 98 bp, Homo sapiens
gagcactcctgtctggctcaaaccccccctatcttccattcagcctcaaggaataggttctcctagtgtctatcatgcagttatcgtcatctttttgg

SEQ ID NO: 875321 - DNA, 98 bp, Homo sapiens
ggccatggaacgcacgcccccacatctgctcaaggagatcattctggtggatgacaacagcagtaacggtcaaagcatgaagaaattgatctggtcag

SEQ ID NO: 875322 - DNA, 99 bp, Homo sapiens
aggaggtgatgctggaaaactgtgggctcctggtgtctctggggtttgaataccgacttcgagaaatatgcaaggacttactgggtccggttcactact

SEQ ID NO: 875323 - DNA, 100 bp, Homo sapiens
aagccagcctggcatttctccaccgacttggcaatggttgggtgctctgcagcacattccatcaggcccatgacgatcttcaaagtatgccaggctggct

SEQ ID NO: 875324 - DNA, 99 bp, Homo sapiens
gaaaatgggacattagttcaagtagcaactatatcagatcatacatctgtcggtggcctgggagacagtttttatgaatacttactgaaagcatggttg

SEQ ID NO: 875325 - DNA, 99 bp, Homo sapiens
cccattttctccaccacgtactcttcattcacctcccctgcaactccagcagcgctctgagaagcccccttggtagtcttgctttgttgcccaggctgg

SEQ ID NO: 875326 - DNA, 99 bp, Homo sapiens
ctgactctctgaggctcattttgcagttgttgaaattgtccccgcagttttcaatcatgtatcagatgtagaaggtggtgatggactgcagctcagaaa

SEQ ID NO: 875327 - DNA, 98 bp, Homo sapiens
tttccccagagcgtcttgatccttttgcagatgataactggagtgccaaggctaaaagacgaaataccaccggaactggtcgaatgaggcacctaaaa

SEQ ID NO: 875328 - DNA, 99 bp, Homo sapiens
ctcttcctgttgcaccaggttcttcgaaaactgaagcagatgttgaacaacaagaatgttggctcaattaagaaacatcagggagataaattcaaccca

SEQ ID NO: 875329 - DNA, 99 bp, Homo sapiens
gcttgttgtagatatccatcccatattgcctgagtgacttcagtggaacagtaacatgcaaaaagacttccaagcatattagaatagcaggcaatacga

SEQ ID NO: 875330 - DNA, 98 bp, Homo sapiens
acaaccacgtctccggccacggaatacaaacagaagcttgcacgagtaacccaggtccgcaaggaactgaaatcccatattcagagcttgccagacct

SEQ ID NO: 875331 - DNA, 98 bp, Homo sapiens
tctacttcctgcagagccccccggaggaggagcccgaataccaccccgacgcctcagcccaaggacgcaaatcaatttcacagtggctattgatttta

SEQ ID NO: 875332 - DNA, 99 bp, Homo sapiens
gagatgtacagcctgaaggatgagatgggcaacctcaggttatgagccaagaaatccaggaacagctgcataagcagcaggaggtaattgcagacaaac

SEQ ID NO: 875333 - DNA, 99 bp, Homo sapiens
ggaggaaattcaaaaggaaccccatacatcaattcattctctagcaccaccaccagagaccccacttcagagccaatggattctaccacgaagtccgct

SEQ ID NO: 875334 - DNA, 99 bp, Homo sapiens
gtcaacagggaagcagaggagaaccgggagccattcagaaaaggttccagttacagccatcccttgtcataacttttgaactgtatttggaaaaatact

SEQ ID NO: 875335 - DNA, 99 bp, Homo sapiens
ccccaggcaagtgcaaatacaagccagtgcccgtgagaaccaagagtaagcggatcccgttcagaccactcgccaatgatgattattccccaccttcta

SEQ ID NO: 875336 - DNA, 99 bp, Homo sapiens
tctggtagaacacttgcagagggaatctggtcaaacatggaatgggctgctacaggagctgagagaccctaccctcactttccgtctgcttggctcccc

SEQ ID NO: 875337 - DNA, 99 bp, Homo sapiens
cctaactagctccaggttaggccgagctttgcgggaaagcagcggattctaacattttcagagaaccttttggaaagaacaagcctacttcaataaatg

SEQ ID NO: 875338 - DNA, 98 bp, Homo sapiens
ggtcataaatggtcacagcctggtggggaccaatgccatggacagccccctcctcaagtacagcgccaaagactacttcttcaaggcggccctctgcc

SEQ ID NO: 875339 - DNA, 99 bp, Homo sapiens
tttgtagcagtcactgaatcacctcatgactagcggggcaggcctctaattcaccgcaggatttccgacaacactaagcagttgagatttgaagatgta

SEQ ID NO: 875340 - DNA, 99 bp, Homo sapiens
aacggcagctctacaagctcctcagtgaggacttcctgcctgagatctgcaacatgatcgcccagaagggaacccatattgaaatgtctattggaatta

SEQ ID NO: 875341 - DNA, 98 bp, Homo sapiens
gcggaagtgcagctgcctcagttcttagcgcaggtggggacccatcgtgaagatggcgtggccctgagaggcagccattctcttctgccaaaccaggt

SEQ ID NO: 875342 - DNA, 99 bp, Homo sapiens
tgaagcgttgatcctgcagcccaaggtgacggagtgggggcttatttggcctccccaggatggactggagcatcagtagtgcccgggtttatcacagga

SEQ ID NO: 875343 - DNA, 98 bp, Homo sapiens
cgcgaggaggcgcgggaggtgttcgagaacgaccccgagacgatcgtaaagctgaaaattgaaatcatgaaagtagacaggactaaactgaagaagac

SEQ ID NO: 875344 - DNA, 99 bp, Homo sapiens
catccatgttggctttgatgctgttactggagaattcactatacgtgcttttcaacatgccttcagcactaatgactgctccaggaatgtctacattaa

SEQ ID NO: 875345 - DNA, 98 bp, Homo sapiens
ttggtttggctaacactacagtggaatcggtgaatgatggaaagcaagcttcttggtacattcacaaatacgtacagaggagctctacggtgactttg

SEQ ID NO: 875346 - DNA, 98 bp, Homo sapiens
atatactaactatggtggatgatatgctgcaggattcactggcaaaatttgctggcagaaaactgaaagactgtggagaagatcttcttgtagagata

SEQ ID NO: 875347 - DNA, 100 bp, Homo sapiens
ttgttatcatagctcactgcaacctggaacccctagtctcaagagatctggaggatctcttgagactaggggttccaggttgcagtgagctatgataaca

SEQ ID NO: 875348 - DNA, 99 bp, Homo sapiens
caaaaccgagtcaacagggaagcagaggagaaccgggagccattcagaaaaggtcactctgtgagactgctgggtcagaaaaaggataatggaaggcgg

SEQ ID NO: 875349 - DNA, 100 bp, Homo sapiens
cctctcatctcagcctccctctggggccttgcctcgaggaagatggcctcagaccacaggatacctgtaatgccagcacttttggaggctgagatgagag

SEQ ID NO: 875350 - DNA, 99 bp, Homo sapiens
gccacaggatgttgttgaagaaaaaatactatctgcgattaaactgaaacagcttcttggacacttaatgattgttggcaagaaatgtgctgctgatct

SEQ ID NO: 875351 - DNA, 99 bp, Homo sapiens
cggtctttttatttgtcattacacgtgctgtggcattatttaccaggaccatgatggtgtgtgtggctctggcttcctgggaaggtctgcaggagagtc

SEQ ID NO: 875352 - DNA, 99 bp, Homo sapiens
gaattcagaaggatatcgacgtcgtgatccagaagtccagagctgaggactgcctgtttgcagatcttatgccttcattcatccggcatggtccaacaa

SEQ ID NO: 875353 - DNA, 99 bp, Homo sapiens
ttgacctaatgggattgctgccacagtgccagcagctccagatgttcttcctcttgcttgccagaggtctatatgagaaaccttcgcttacagcccggc

SEQ ID NO: 875354 - DNA, 98 bp, Homo sapiens
ggaagtggaggtgtcactggccccggcctttgccccaatcttgtgtgggcactgaagggggactacagtacaacaaacacctcttcgtgcacattggg

SEQ ID NO: 875355 - DNA, 99 bp, Homo sapiens
gagggagagactggagaaggacctggaggaagcccatcgagagaagagcaaaggagactgcaccatccgtgagtctccccaggacagtgctatcacccg

SEQ ID NO: 875356 - DNA, 99 bp, Homo sapiens
attaaaaaaccatctggtgatgatagatacaatcagtttcacataagtcctgaggctttctaccaatgcaggccagtggaaggaagcagctagcaaggt

SEQ ID NO: 875357 - DNA, 99 bp, Homo sapiens
agactctatcagcagatcaaggctggagcttatgatgagggtgaggacaaaatcttcttaatcaacaagcttcactccatctacgagaggaaggagagg

SEQ ID NO: 875358 - DNA, 99 bp, Homo sapiens
ccttatgcagggaaagaggacatcgtcccacagctcaaagacacatcgttcatgtacatgatcgccggactctgcatgctgaagctctaccagaagcgg

SEQ ID NO: 875359 - DNA, 98 bp, Homo sapiens
tccatatgcaacgacgagacgcacatcaaccccgtggccgcctccctcatccagaagatgcttcagacagatcccactgcccgcccaaccattaacga

SEQ ID NO: 875360 - DNA, 99 bp, Homo sapiens
ggaggcacagagcagttggagcttgctgcctggaagaatgacgcaaaggagtgtggtggcgtctttacagatccaaagcaaatttttaaatctccaggc

SEQ ID NO: 875361 - DNA, 98 bp, Homo sapiens
tggaatgccacaaatgcaaatacttgtgcactgggagaggttcatcatgcctagtggcgtataagaagaccccgccaccggtccctccacgcaccact

SEQ ID NO: 875362 - DNA, 99 bp, Homo sapiens
agcaccagttactgcacgcatcagctgagcacggaggggataggcacggacgcaacacttttggaacttagacgctaaactaaaattccagatggcaaa

SEQ ID NO: 875363 - DNA, 99 bp, Homo sapiens
tttcacactccaccaagcatcccattacagatagaagagcctttagaagaagccacactctctgaattaaaaactgtcctcaagagcttcctaagtcaa

SEQ ID NO: 875364 - DNA, 99 bp, Homo sapiens
ccggaatgtgatacagcctttcccacgacttggctgaggaactgctgttgtgaaccttttgccctggtgggattattcatgtagagcgcatgaagtaca

SEQ ID NO: 875365 - DNA, 99 bp, Homo sapiens
atcgagcagatttttaggtctttcgtggtcagtaaattccgggaaattcaacaggagctttccaggaatctgagaaaaaggggttgattgaaagaatct

SEQ ID NO: 875366 - DNA, 99 bp, Homo sapiens
gtaggaggaagctatctagagctggccaacacacctgcacagacaaggagttgcggaaccttgcctcccggctgaaggattggtttggagctctccacg

SEQ ID NO: 875367 - DNA, 125 bp, Homo sapiens
ctgtttggtttgctgtagccactggacaggtgtcttgggagaggtcttccttcctggtctcccaagacacctgtccagtggctacagcaaaccaaacagcccagcagcccagcagcccagccatg

SEQ ID NO: 875368 - DNA, 99 bp, Homo sapiens
gagaccggagcgggagacagcggtgacaggagcagcggccgggagcccttagggaggcaggtaattgagggttttctgagcaaagaagtaagttacatc

SEQ ID NO: 875369 - DNA, 99 bp, Homo sapiens
caaaccatactaaattattccatttgcaacttatccccaacagaattggcagagggggtcgatttgggaggaaaggtgtggctataaactttgttactg

SEQ ID NO: 875370 - DNA, 99 bp, Homo sapiens
ttgaaaagtaccctctggttttctcaccgcagatggtgggcctgcctagggtagttaaaagacgagtgaatgctctcaaaaacctgcaagttaaatgtg

SEQ ID NO: 875371 - DNA, 99 bp, Homo sapiens
ccgacatggaacagggactcactgggggtggctccctagcacggcccgcaactgtgcagggcgtccagctgctccgcgcacaagtggccgcgatcctgg

SEQ ID NO: 875372 - DNA, 99 bp, Homo sapiens
gccaggcgacaggtgtcgcttgaaaagactgggcttgtccttgctggtgcatgcgtcgtcggcctctgggcagcagagtcttgctgtgtcacccaggct

SEQ ID NO: 875373 - DNA, 98 bp, Homo sapiens
tgctgatagactccttccagaataactcaaaggtggtaaagccaaaatctccagaacccgaagcaacgctgacatttccatttctggacaaaatgcct

SEQ ID NO: 875374 - DNA, 98 bp, Homo sapiens
gcggatcgggtggagtgtaggtcatatcgccgcgaatttatccagttggcgaaggactttgaggatttccgtaaaaagtggcagaggactgaccatga

SEQ ID NO: 875375 - DNA, 99 bp, Homo sapiens
tagtcaaaaatgaaaagatgggaacagcagaaaatcaaaacaagctctttatgagaatggcatctaaggttatcaatactctggctgaccatcatcatc

SEQ ID NO: 875376 - DNA, 98 bp, Homo sapiens
ggagctgctcttgtgctgtttggcccctgcctactcggaatggaacaaagattactcttgtctctgctgctcctgggaaagtgatttgtgaaatgaaa

SEQ ID NO: 875377 - DNA, 99 bp, Homo sapiens
ttttgttggatgtttggccggctatggagcttaccgtgtctccaatgacaaacgagatgtaaaagtgtcactgtgagtctcgctctcagtcaaaatctc

SEQ ID NO: 875378 - DNA, 99 bp, Homo sapiens
gctccatatacttcccatgataaacttaagggactgttgacatttagggatgtggccatagaattctctctggaggagtggcaacacctggacattgca

SEQ ID NO: 875379 - DNA, 99 bp, Homo sapiens
tgatctttttcatgaggatgggtccaagggcctgtaatcccgtccaacagatacatttgctgcaattccatggaaccaaatacgcggccattgacccat

SEQ ID NO: 875380 - DNA, 100 bp, Homo sapiens
gggctatgaggctcatgagtgattaccagaagctggaagttacgctgctgtgagcgactttttattatcctcaccccgttccaagtatcgcctcatagcc

SEQ ID NO: 875381 - DNA, 99 bp, Homo sapiens
ttccttctgtggtgaagttttctctttctctcggagaccagattctgcctttctgctggagggaagtgttttcacagatcactggggtgatcctgctgg

SEQ ID NO: 875382 - DNA, 98 bp, Homo sapiens
actgaaaatggggcggaagaaaatacaaatcacacgcataatggatgaaaggaaccgacagtttttcagttatgggacaaaaatattatatcaaaaca

SEQ ID NO: 875383 - DNA, 99 bp, Homo sapiens
tggaaacggccacacggatgccatggttacttttgccacggaccaaaagatctcagattgctataactgaaggtatatttgaacttccaaatctcacaa

SEQ ID NO: 875384 - DNA, 99 bp, Homo sapiens
ctgagcggccaggccgtgcgccggcctttggtcgcctccgtgggcctcaatggtgaccctggcagcaaccccaacaaacgccagaggcagccccctctc

SEQ ID NO: 875385 - DNA, 99 bp, Homo sapiens
tcaggcacatggtgctgatgagtttctgccagtccctgagttgatgccttttcggctaactcgccagtttatcaatctgatgttaccaatgaaagaaac

SEQ ID NO: 875386 - DNA, 98 bp, Homo sapiens
cactggtcgcactgagggtgaagtggcaggaggaggaggaggggctccggctggtctgtggtgaggtgctacagctcgagagggcagagccacagtcc

SEQ ID NO: 875387 - DNA, 99 bp, Homo sapiens
ttatctatattttttgactgctctgctcctctatgctggacatcaaatttccagaattctgcttggtcagaatcgtgatggcattgtgttcagcactga

SEQ ID NO: 875388 - DNA, 99 bp, Homo sapiens
gtcaggacacagcatggacatgagggtccccgctcagctcctggggctcctgctactctggctccgagacaactacctttctacggacgtgggatcctg

SEQ ID NO: 875389 - DNA, 99 bp, Homo sapiens
gtgtactcaaagtagtagaggcagttgtctgtgaggataaaccagcgccgcttccacgtcttcacccggccccccatgtcatactgtaggctgagctca

SEQ ID NO: 875390 - DNA, 99 bp, Homo sapiens
aacttctggcagaaacagaggactaattttggcagttctaaatttgaatttgagaatgagctgaaagccagtggtggcgaaatcaaaattcataaaatg

SEQ ID NO: 875391 - DNA, 98 bp, Homo sapiens
gctgatcttgaaggtttacacttgtcaacttcctcttcagtcatcagtcggggatctgatgagcttctttcttctggcatcattaacggaccttttac

SEQ ID NO: 875392 - DNA, 99 bp, Homo sapiens
aaactccagctgtgaaagcaacataaatgagtggagagatctacagaccaagtaatcaagccagtcaatgtaggagctctatcaaaatgggttgggaag

SEQ ID NO: 875393 - DNA, 116 bp, Homo sapiens
tttgagaacagagtgctgttttagagctggcagcagcatctcagcccaagagaagataacagctggttggccggtgtggccctgcaagggcgtggtggcttcggcctgcttcccgg

SEQ ID NO: 875394 - DNA, 98 bp, Homo sapiens
atctgggaaattaaagttctacgtaaagagagtatggagctcgtaaaattaattgacgacactggcacatttcaagtaatagtggttccctccggggc

SEQ ID NO: 875395 - DNA, 98 bp, Homo sapiens
atcccttcccagaaagaagaggaaatgactgagtcccagcttggtgttctcaagagtctgccctttccgaggaagaagaggatacaaccaggcctctt

SEQ ID NO: 875396 - DNA, 99 bp, Homo sapiens
ggaaggcggaagcgggaggatctcttgagcccaagactttcagaccagtctgggcaatgtggcgagaccgtctcgcgagggtccgcggcttcattcttg

SEQ ID NO: 875397 - DNA, 99 bp, Homo sapiens
caggtccaggatgggcttcgagaaggcctggccgtgggccaccaggtttcggatcagcatgcaagcctgtttcgttctccaccttggtgcggagctttc

SEQ ID NO: 875398 - DNA, 98 bp, Homo sapiens
acacagtattgggaaatctgtgaaagggcttttttccagacttcaagctcccattccaacagtaagagcttcttccacatcacagcccttggatcaag

SEQ ID NO: 875399 - DNA, 98 bp, Homo sapiens
ttgggcctattgaagacacctgctcagtatgacgcttctgagctaaaagcttccatgaagttgcagcaatatcagtactacagtgcaggcctgctctc

SEQ ID NO: 875400 - DNA, 98 bp, Homo sapiens
tccttgccaggtgcctgtctggaaggccagatacacactctattaccaggttttaaacttcgccatgatcgtgtcttctgcactcatgatatggaaag

SEQ ID NO: 875401 - DNA, 99 bp, Homo sapiens
ttctataacatcttaactaaaagcactcccacgtctacaatggagtcgagtctagaattcacacagagccacctagaggagctgatcacgcagtacctg

SEQ ID NO: 875402 - DNA, 99 bp, Homo sapiens
aaactcttgctaccactaatgctgcagggccgttgctccagggagaactgcaaatatcttcatccacccccacatttaaaaacgcagttggagataaat

SEQ ID NO: 875403 - DNA, 98 bp, Homo sapiens
gagagatcaccatggtagagcagcagatctctaagctgaagaagaagcagcaggaggattctttgtttgcatctatgccacctctttgcccaattggg

SEQ ID NO: 875404 - DNA, 99 bp, Homo sapiens
gtttgttttcctgataaagctgtgctgcctggctattggctggactgttaggattcggttcatccagcagagactgccgagtgccacagccttgacaga

SEQ ID NO: 875405 - DNA, 144 bp, Homo sapiens
ggcttgagttcggccagcagcagcggttcctctttcacactcagccagaatctggctgagtgtgaaagaggaaccgctgctgctggccgaactcaagcccgggcgcccccaccagtttgattggaagtccagctgtgaaacctg

SEQ ID NO: 875406 - DNA, 99 bp, Homo sapiens
gaaagctgctgttatcatcatggctgtagagagaatggatcttggagaatgtctgaaagtccatgacctggctttaagagcggattatgaaattgcatc

SEQ ID NO: 875407 - DNA, 99 bp, Homo sapiens
ctggaccccaactcagccttcctgcataccctggaccagcagaaacctagagtggcttatcaggagggcagacttcaaaagctactaaaaatgaacggc

SEQ ID NO: 875408 - DNA, 99 bp, Homo sapiens
gagctgtttgacccctttgacctcttcgatgtgcgagactttggaaaggcagaggtggaggagacactgaagcgactgcagagccagaagggagtgcag

SEQ ID NO: 875409 - DNA, 99 bp, Homo sapiens
agaaaatgtccactggacctctgtccagtgtggactctctgatgggcttcaagacgtgcactctgactgaagcctttaccacactcttcacatttaaag

SEQ ID NO: 875410 - DNA, 98 bp, Homo sapiens
aggaagtagccaaagagcaactaactgatgctgacaccaaagatgacgaagatgatcctgcagaagctgaaaaggagggaaatgaaatggagggtgag

SEQ ID NO: 875411 - DNA, 99 bp, Homo sapiens
gagagaggcaccgggatcgtgaccgagaccgtgaccgagagcgtgaccgagagcgcgaatatcgtcatcgttagaagttttcggctttgtgagaaacct

SEQ ID NO: 875412 - DNA, 98 bp, Homo sapiens
tgcaggggagcaggacaagccaagcagaaaaagcgagtgatgatccctgtgcctgcaggaaaaccaattctgtgtcctcggaggaccacagcccagtt

SEQ ID NO: 875413 - DNA, 99 bp, Homo sapiens
tgtgaaaaatgataactcatctcgttttgtaatagagcatatcactgcatacaaatccattcttacttcaatcaaaaaagaatatgatgcctttattga

SEQ ID NO: 875414 - DNA, 99 bp, Homo sapiens
gtggttgtgcaggatggcgacggcggcctacgagcagctgaagctctctgttagaacaaggcaataaactgcgtaatgccatggtgatttctgcaatga

SEQ ID NO: 875415 - DNA, 99 bp, Homo sapiens
gtttttctgcctaccgtacagcaatcaaaatccgaagactacaaaaagcactatgttatacagtttatgtaacttgatggaagaaaatggaattactcc

SEQ ID NO: 875416 - DNA, 99 bp, Homo sapiens
cacatgatcagaaaacagctctggaaaatgacagccttcatttctctgaacatactgccttatgggacagatcaatcacgtgaactggaaatttcagtt

SEQ ID NO: 875417 - DNA, 98 bp, Homo sapiens
tctccatcacccaccaacaacaccacaataatccacagccaaggttcgagaacttgtcttggacaattgcaaatcaaatgatggaaaaattgagggct

SEQ ID NO: 875418 - DNA, 98 bp, Homo sapiens
gaccgctcgcgtcgcatttggccgcctccctaccgcaacatcccaggagacagccagactagcgtctgcatcaccatcgagccaggactgctcttgaa

SEQ ID NO: 875419 - DNA, 99 bp, Homo sapiens
ccagcacacagaagccgagacgtgctgaagctgctgaaagatggcagaagaagtggtggtagtagccaaatttgattatgtggcccaacaagaacaaga

SEQ ID NO: 875420 - DNA, 99 bp, Homo sapiens
cacatcctcgggattccgggctgcaccctggaccgtctggtggaggtggacagccaccaccttcttcatgcagtctttgatcatctgggaggtgaagaa

SEQ ID NO: 875421 - DNA, 99 bp, Homo sapiens
ggaatcggagctgttgtattacctgggacccttcgcaggtgttacagtcgggtgaaagaacatggtgttgggaaaagaaagagcagttacacatttgaa

SEQ ID NO: 875422 - DNA, 99 bp, Homo sapiens
atgacggttataagaccatttatttctttggagacaaaactatgccaaaaatttttactactggagatgtcaacaaagatgggaagctggattttgaag

SEQ ID NO: 875423 - DNA, 99 bp, Homo sapiens
ggcctccatctgctttacctcttctggccgctcatccacaaactctgccacctgattctggtggtggaggctgctttttcttgggctcactaggagtgg

SEQ ID NO: 875424 - DNA, 99 bp, Homo sapiens
aagaagaaaagcaagatactgaaatgtgatgaacatgggatggagaagtttatgtttgggatgtgaactcaaggaagtgccttaacagatttgttgatg

SEQ ID NO: 875425 - DNA, 99 bp, Homo sapiens
cccaggcccttgcagatcgagatttgcgtcctagagtgggaaaaaagcagaggccagggcgccgagggagaccaagacatcattgttttgaagtttctg

SEQ ID NO: 875426 - DNA, 99 bp, Homo sapiens
caatatagtagtacatcagacacaacctctttataacataaggaaggtgaaattgttgaagtggatgaagaaacagcagctatcttgaagaattcaaga

SEQ ID NO: 875427 - DNA, 100 bp, Homo sapiens
cttgggagaagcctttaatcggttagacttctcaagtgcaattcaagatatccgaatgaattgcacttgagaagtctaaccgattaaaggcttctcccaa

SEQ ID NO: 875428 - DNA, 99 bp, Homo sapiens
ccttactaaccacgaccatcaaatccgtgtcggagtccttacaggtcttcccataggcctgcagtagggctgtttaccattggaagcaagggaaagagg

SEQ ID NO: 875429 - DNA, 99 bp, Homo sapiens
ctctgcgggcgttctccctccaggatgctttggagtctgcaatgaagaatggcctgtggggtcacgctctgctacttgcaagtaagatggacagccgga

SEQ ID NO: 875430 - DNA, 99 bp, Homo sapiens
cttcatttcaaactcccccaaagcacagatccattacgcacatttaaagataccatctaccttactcaggatattgtacctgtggatgcatcttatgaa

SEQ ID NO: 875431 - DNA, 98 bp, Homo sapiens
tgcagttcaattctgtgcccgcaaagtctctgctgtttcaggagatgttcgcaaagcactggatgtttgcagaccgccaggacctggagcagccggac

SEQ ID NO: 875432 - DNA, 99 bp, Homo sapiens
cgaatatgaaattgcatgtgaacacgaacactctaattgcctcctgatagcacacagaaagctgactcttttggtgatcccttcttcccccggactaca

SEQ ID NO: 875433 - DNA, 98 bp, Homo sapiens
agccatcatcttctgtgtggagctcagcggctacgacctgaaactctacgaggataaccagacagaatggaagttggatacactttgtgacttgtacg

SEQ ID NO: 875434 - DNA, 98 bp, Homo sapiens
tcatcttcaccatctaccactggtggcaggctgtggccatcttcaccgtgtacctgggctcgagcctgcacatgaagagctgctttgctgtggtgctg

SEQ ID NO: 875435 - DNA, 99 bp, Homo sapiens
tcatgataacattgttcagctgatcaaagatgctggtgtcaccgtcacactaacggtcattgctgaagaaggtacgcatagctgctaaattcatcactc

SEQ ID NO: 875436 - DNA, 99 bp, Homo sapiens
attgagatagtgaaagtgaaagcaattggaagacaaaggttcaaagtccttgagctaagaacacagtcagatggggaagctgccaaagaatgtcgacgt

SEQ ID NO: 875437 - DNA, 99 bp, Homo sapiens
ggtggacttgtaaaaggcgaatctgatccatttttcagatacccatttgcatctacagttgtatacatgatataaggtccaggttgattcactccaaag

SEQ ID NO: 875438 - DNA, 98 bp, Homo sapiens
actcacggcagtggagggaaaggatatggattggcatctacaggagtaacttctgggtgctatcagtggaaggtaccttcagaggattgtaaatcatc

SEQ ID NO: 875439 - DNA, 99 bp, Homo sapiens
tcttgctatctcctacttcatagttaatgaagccaaatgtgcttgtgacattcccttgtaccaggccctccacaaagagctgggatttgaattctttga

SEQ ID NO: 875440 - DNA, 99 bp, Homo sapiens
gtactcttgtgggaatcttccataatcaattgtcttaaaaactgctttccaaaatatgaagtagccatgctggttaaatgctttctgctgcgcacctta

SEQ ID NO: 875441 - DNA, 99 bp, Homo sapiens
atgaagctgcggaccctcgcgcaattctgtggtgttcttggtcacacatttatggagtttctgaagggcagtggagattactgccaggcacagcacgac

SEQ ID NO: 875442 - DNA, 99 bp, Homo sapiens
ggatgtcaacaattttttggagcaggatcaggcaaaaatgatcatgccgaaaaagtggcggaaaagctagaagctctctcggtgaaggaggagaccaag

SEQ ID NO: 875443 - DNA, 99 bp, Homo sapiens
ccaagtatgagccccagccatggaatgaatatccacaatttagcatcaggcaaaggaagcaccgcacatttttcagatcttgagccagatgattgtgca

SEQ ID NO: 875444 - DNA, 98 bp, Homo sapiens
ccgggagaaccgttcgcggaggaaaggcgaactagaccctgagtggcctcagccagacccacccttcccagcagcacgtggggttgtcccgcactgtc

SEQ ID NO: 875445 - DNA, 99 bp, Homo sapiens
ttctctttggttgtttagctgctgaaggacatagctgctgtggctgggctttgccatcttctgttaattagagaccttcaaatcaagatgaactacatc

SEQ ID NO: 875446 - DNA, 99 bp, Homo sapiens
ggaaacattcagtgggagagccgtacctatccttatcctggaaccccaatcactcagcgcttctcgcacagcctgctgaaaatgactgaatataaactt

SEQ ID NO: 875447 - DNA, 98 bp, Homo sapiens
atgggatgtggtatgataccagcaactggtctattatatcatttaaaccacatggctatctaaagagattgatgattacccggaatttttgagttcgc

SEQ ID NO: 875448 - DNA, 99 bp, Homo sapiens
tgcactgtggcaaggcttttgcttccaaatacaagctgtataggatgataagggaaatgtcgtctttggattatatgattgtcaaaccagacaaaatga

SEQ ID NO: 875449 - DNA, 98 bp, Homo sapiens
agaaccacagcccttctgaggagctcccaaacatgcctttgaagatgagaaacccccaaagaagagccttctctccaaagtttcacaaggaaagagga

SEQ ID NO: 875450 - DNA, 99 bp, Homo sapiens
cttttgtcaattccagaatacaaagtataatacttctccacgtctgcttcaggaagaaagtgcctgccattcttatcatttctaagcaggttcatgcca

SEQ ID NO: 875451 - DNA, 99 bp, Homo sapiens
ggcagaagcttcaccacaaaagcgaaatgggcacaccacagagcaatgttgatcccagggatgatgtatttggatatcctcaacaatttgaagataaac

SEQ ID NO: 875452 - DNA, 99 bp, Homo sapiens
caaacaccagttgtggttcatgtctgcgggctggagatgccacctgatgcagtagaagctggtggaggccaccagcttgggctccccacggagggcagc

SEQ ID NO: 875453 - DNA, 99 bp, Homo sapiens
aagaacaactctaaacagaatacaagaaagccttattgatctaggtgcatttgagaagatcttttctctttggccattgtccaagtgttttgaactgaa

SEQ ID NO: 875454 - DNA, 99 bp, Homo sapiens
caaagtccttaacacaagccacagatggcactctgattcggcttgcaaaaaaggtaaaatgtccagtgatcgagctttgaggaagcagcaacagttgaa

SEQ ID NO: 875455 - DNA, 101 bp, Homo sapiens
gagggtaaaaggctgagaagcttaagatgtgaatttcttcggagtaagaaatcctcagaggaaattacccagtatattcaaagctacaagggatttgttga

SEQ ID NO: 875456 - DNA, 98 bp, Homo sapiens
agaaaagcagggtgctggtttctaggacactaaacctcatgccatggaattccatgaacacttgcacagcataggcaccaaggaaggtttgaaggaaa

SEQ ID NO: 875457 - DNA, 99 bp, Homo sapiens
atgttcctttttggtggattcttaatgaccgtaggtgcacgtctcatcgcacatgctggcagcctcaccaacctggccaagtatccagcatccacagtg

SEQ ID NO: 875458 - DNA, 99 bp, Homo sapiens
attgaagcagttggtggcaaattaagtgcctcctttggtgaaggtgacacatcatgtgacctcttcagtgaccactctacggtgtcgggccttgaacta

SEQ ID NO: 875459 - DNA, 99 bp, Homo sapiens
tggaagaagagtggaatgctttgcagtcagtggagaattgtccagaagacttggctcagaggagaattctgcctaagccaactcgaaaaagccgtacaa

SEQ ID NO: 875460 - DNA, 99 bp, Homo sapiens
gtgctgaaggtgctatctgtctgctctagtaataagccggctattgtagaagctgctcctaatttccgaatggaaccagtgacagccctgggtatcctc

SEQ ID NO: 875461 - DNA, 107 bp, Homo sapiens
tcgcccacacccagcgtggagcgttgttgctcacgtggccacacctctcgggatggccgtgggtctccgtgatggggaagcagtgggacttgcagttccctgaagaa

SEQ ID NO: 875462 - DNA, 99 bp, Homo sapiens
gagctggaatcgccagctcccggcactgctacctctgacccaaagcagagcttgacctcatggacctcgtaggggaagacagaaagtggatgatggcga

SEQ ID NO: 875463 - DNA, 99 bp, Homo sapiens
gatttctgcatttccaactaagttctcaaaagtctatggtcctgtgttcaccgtgtattttggcatgaatcccatagtggtgtttcatggatatgaggc

SEQ ID NO: 875464 - DNA, 99 bp, Homo sapiens
gtggagcagagtcccaggacagatcacattcttaacctctagagagcctggcaggaccagagccttacctttcccagtctgcaatctctacaggtacag

SEQ ID NO: 875465 - DNA, 98 bp, Homo sapiens
caagttctacatttcactgtaaggagatacaactcgtcaacgaatcaaattcagtgatgacagagtatgcaagagtcaccttctcaactgttgtcctc

SEQ ID NO: 875466 - DNA, 99 bp, Homo sapiens
ggccactccagtcggtgttgagcacggcgagcagtctcaggcctttagtgatgatgtatgagaataatgttatcactattgatctggttcaaaattctt

SEQ ID NO: 875467 - DNA, 99 bp, Homo sapiens
caggggaagagttactgactcccccagaatcccgttcaccatcaatggggttaagctgctttgtgaaactacattcccttgtcttctcttgaacaaacg

SEQ ID NO: 875468 - DNA, 75 bp, Homo sapiens
acggagactgcagctcgacaggagtgatgatccaatttctccctacacgggctggttgctgactattacagagac

SEQ ID NO: 875469 - DNA, 98 bp, Homo sapiens
cggagtctctccaccgcagacatgacgaaggcccctgaggtgttcatgcactgatcctggaccttggattaaacccttgcagtgctggaagaagagga

SEQ ID NO: 875470 - DNA, 99 bp, Homo sapiens
ggaccatcatcctgacagctgtgtactttgccctcagcatctcccttcatgtctgggtcatgctattcctgcaccaactgacctgaagttcactcaggt

SEQ ID NO: 875471 - DNA, 99 bp, Homo sapiens
ttttgtgcagtgggcaggaagaacccatcgggcagctacacatcttgaaagagaagctcttcctgtgagctattcctgcaccaactgacctgaagttca

SEQ ID NO: 875472 - DNA, 99 bp, Homo sapiens
tttacttggtgcaggaaggcagtctttgctacgtacagcaaaaggtcagaatggcggcagtggagcatcgtcattcttcaggattgccctactggccct

SEQ ID NO: 875473 - DNA, 99 bp, Homo sapiens
ggatattctcttctgtgctgtcaaggaattaaggaagttcactggagtaaaatggaggcctcagtaatattacccattctgaagaaaaaactagccttc

SEQ ID NO: 875474 - DNA, 98 bp, Homo sapiens
gcaccaagctctgctccacactgccaaccggccagaggacgagtgtggtggccagcgtgaggaagaccacggtcctggatgtcatgaggcggctgctg

SEQ ID NO: 875475 - DNA, 100 bp, Homo sapiens
gccagcaccatcctgataccaaagcttgacgtttttcttaagggctttttccagagcttcttcacctgctgtttataaagtcttaattcatgctgcgtag

SEQ ID NO: 875476 - DNA, 151 bp, Homo sapiens
ggaattcccactttggatcctctttctctgcaagggcctcctccaaagttgtcaaggaaattcgccttctcctagagtttttccaagaaccaagttcttccgagggaattcccactttggatcctctttctctgcaagggcctcctccaaa

SEQ ID NO: 875477 - DNA, 99 bp, Homo sapiens
ctcagttggaagagtccagcaagtgtccgcagcggctacctctatgtgaccctcatctacaacgcctccgtcagcctcgccctctacgccctgttcctc

SEQ ID NO: 875478 - DNA, 99 bp, Homo sapiens
ttttgatcactcccaccttcaaggtgacacctgttctcactcacagatgtacctgagtccgatgattcgatggatctgccagtgtcagtcccagagcgg

SEQ ID NO: 875479 - DNA, 99 bp, Homo sapiens
aagctgcttatccaaattcttccctctttatgtttttcaagggacggatacaacgactagaggtattaccagagaaacggagtctgaaactcttgaaga

SEQ ID NO: 875480 - DNA, 99 bp, Homo sapiens
gagttgtttgaggaatttgacagtttcctgccaggcgccatcatcggcatagcccgggagatgcagccagtttacaggagattacctggggcaattgat

SEQ ID NO: 875481 - DNA, 99 bp, Homo sapiens
cgcccatcagcgcggcgctggccgagagccgcggctccgtgtttctggaaagtgacagcagattctacaagggggttgctcctctctggatgagacaga

SEQ ID NO: 875482 - DNA, 99 bp, Homo sapiens
gggatgtggtatgataccagcaactggtctattatatcatttaaaccacatggctatctaaagagatgatgttgaatttgaagtatcatcggaccgacg

SEQ ID NO: 875483 - DNA, 98 bp, Homo sapiens
tctgatcaagcggatccaagccatgattcccaagaaaatggagctggcgctggtgcctgtgagcgcccacggcaacttctatgagggggactgctacg

SEQ ID NO: 875484 - DNA, 99 bp, Homo sapiens
ggaggtacaatttgccagtgtttccacaatggaaccaattgttttacagtctgttccacatgatcattgtaataagtgaagtgaagacttacgatcctt

SEQ ID NO: 875485 - DNA, 112 bp, Homo sapiens
aacaccaacaagacggtgaagaagatcaagatctcagatcgggctggtggtcatcctggcttccacggtggtggccatgtcggccgtggcccagctgtgggaggacgagtgg

SEQ ID NO: 875486 - DNA, 99 bp, Homo sapiens
aactaaagctgcgggatacaaagtcagcccaggcagacctccaggtgcaatggatgagcttcatagtctggatccaagaaggcaagagttattggaagc

SEQ ID NO: 875487 - DNA, 99 bp, Homo sapiens
ctaatcttacccccatgggccttcctcgacccaaaaggtttcacaccaggaccacagcagctactcggagatccattccaaggcatgcgcaaacccatg

SEQ ID NO: 875488 - DNA, 98 bp, Homo sapiens
ataaactgcctggccgaatcagccttttcacgctcaagccaaaagaatgcaatggtgtaaagattccagttgatgccagtaaacctaatccaaatgat

SEQ ID NO: 875489 - DNA, 98 bp, Homo sapiens
tgtactccttgtctttgcaaacaaacaggttcagcagactgtacaggatctttttggcagagccccaagtaaagctgtcaatcctgatgaggctgtgg

SEQ ID NO: 875490 - DNA, 99 bp, Homo sapiens
agaaagtgaaaactctatctgggaacaggataaaaagcaaccagatcagtaaactgcagaaggaatttaaacgtcatagcaatgtctacttcgatctga

SEQ ID NO: 875491 - DNA, 99 bp, Homo sapiens
ctgggtgacagagcaagactctgtctgccagaggtccaggcccagcacgccaaagttatcataggcatagatactgggatcgggagaatactcggggtt

SEQ ID NO: 875492 - DNA, 99 bp, Homo sapiens
aggaaaagactcaggacggacaagcacagtcttcggaagatataccttagatgaatttggaacagccagaagaagtacagttgttcgtggatttattga

SEQ ID NO: 875493 - DNA, 100 bp, Homo sapiens
ttagatgatccaagtcaccaagaaaatttcatcatcatcctcatcatattgcatatcgtatcacttgagacagtaatttcttggtgacttggatcatcta

SEQ ID NO: 875494 - DNA, 98 bp, Homo sapiens
tcgctggggcggggaccttgccttgcccgggtctcaaaccatgaattatgtgggacagctggctgggcaggtgattgtcactgtgaaggaactctaca

SEQ ID NO: 875495 - DNA, 99 bp, Homo sapiens
cacgtgaagctcatccacacaggtgcctctcttgaccagctaccctcccaggggaccatgaggaagctcagaggaaagacccccgcctgctcctgtctc

SEQ ID NO: 875496 - DNA, 99 bp, Homo sapiens
caaactctacgagcctgatcagctccaggagctcaaggatctgtggttgtggttccggagaatctggttgtgctgtgtgtggatgttgcaaggcctgtg

SEQ ID NO: 875497 - DNA, 99 bp, Homo sapiens
tcagaagagtaaaacgccggaattgtcctttccaacatccagagctgcatcattccttggggcaaaatgtggacaaggcatactggagcatagtgaaag

SEQ ID NO: 875498 - DNA, 99 bp, Homo sapiens
gaagattgtgcagaatgctatcatccaaacaataggtctgctgagaacagacccagtccctgaggaaggagaagatgttgctgccacgatcagtgccac

SEQ ID NO: 875499 - DNA, 99 bp, Homo sapiens
ggtgaacctcagcaccgagaacatctactctttcaactacaccagccagcccgaccagcagttctcagccctgacagaggtgcttttccacttcctaac

SEQ ID NO: 875500 - DNA, 98 bp, Homo sapiens
atcatcctggcgatctacttcctctggcaggacctgctgagcatcgtggccagcgtccttcatttgggcaacatccactttgctgccaacgaggagag

SEQ ID NO: 875501 - DNA, 99 bp, Homo sapiens
agtcccaccgatgcttcaaatttaacagaaatacagtccatactgcccggaatctctgcaaagctgacttggacttcagaggaaggcagctattctcag

SEQ ID NO: 875502 - DNA, 99 bp, Homo sapiens
cccaaccacaagacgactcaataggaggaaggtgagaattatgaagatgatgacctagtaaattctgatgaggttatgaagaaaccatgtccagtacag

SEQ ID NO: 875503 - DNA, 99 bp, Homo sapiens
tggtgatggaagcaggtggaattatgccctgttggttccaatgctgggattggctgcttttcgtctcaccaacggctttgggggtgcgaggagcgagca

SEQ ID NO: 875504 - DNA, 99 bp, Homo sapiens
tcggacgtagcccggcttgtattgggtggttcccctctctcagcgaagtggtgttcttgaatggtgcacaggaactgtccccattggtgaatttcttgt

SEQ ID NO: 875505 - DNA, 99 bp, Homo sapiens
ggatgggctgcctccaggtgacagcaatcagctggcctggtttgatactgacctgtaaatcatcctttaggtggttagccagcgtttccctcagaacag

SEQ ID NO: 875506 - DNA, 98 bp, Homo sapiens
ccaatgcccaagacattataaacaattctgcttggtcagaatcgtgatggcattgtgttcagcactgatgactattttcaccatcaagatgggtacag

SEQ ID NO: 875507 - DNA, 99 bp, Homo sapiens
atatgcaccagcacgcctggctaagcagaagattttcgcaagctctggaaaactccacctcgagagaaagcaggcttccttcaccacgtcaagaagtcg

SEQ ID NO: 875508 - DNA, 99 bp, Homo sapiens
agcgcctggagatggaacaggcccagaaggccaagaacccccaggagcagaagtccttcttcgccaaatacgaccacagccgctttgtcaactgtgtgc

SEQ ID NO: 875509 - DNA, 98 bp, Homo sapiens
tctgtgtgagcagaggggagagcggccgccgccgctgccgcttccaccacaggtggtactttggaaagattgggagaaaggatgcagagaggcagctg

SEQ ID NO: 875510 - DNA, 142 bp, Homo sapiens
ggaaggtaaagcggcgacggcgtcctcaggagctgtggggtcccctgctagaagtgggggactcggcgggttactgttttggcagaaaacaatcacattaaggacttattgaggaaacacggggtgaacgtccagagtatcg

SEQ ID NO: 875511 - DNA, 98 bp, Homo sapiens
ggtggtgctggtcatcaatgttactcaggtagaggtgaaaaattagacgatttcaagaattggagctgaatctgatgttaagtaatggcaacaggtga

SEQ ID NO: 875512 - DNA, 99 bp, Homo sapiens
aaacattaaatgacagttcacataagaagttcttcgatgtatctaaacttggcaccaagtatggaaccctctggatattgatgcctcgggtgtggttgg

SEQ ID NO: 875513 - DNA, 99 bp, Homo sapiens
ctgtggcccagtacaccttcaagggggacctggaggtggagctgtccttccgcaagatgtgcaacatgctgggcctgggggacatgaacgcagaccagc

SEQ ID NO: 875514 - DNA, 99 bp, Homo sapiens
accgaagaacgctgcggacccagctcgctcctggtagcaagacccgaactctttaatgaagcaccagttgagattcccagtccttctgaaaccccagct

SEQ ID NO: 875515 - DNA, 99 bp, Homo sapiens
tgaagaagggctccctcgtgaagaacctgaaggacacactaggtgtatggttgaagcctggaattttttgcggcaacattgcaataggttgaatataga

SEQ ID NO: 875516 - DNA, 99 bp, Homo sapiens
tataattcagtacgacctttagccacattgtcatatgctagtgatctctataatggttccagtatagtctctagaggtcctgctgtactagccaccaaa

SEQ ID NO: 875517 - DNA, 99 bp, Homo sapiens
gtaaacagaaagagactgcccggttgcaggatccggattgagaagccactgcaactaccgaaatgggcagcaaaaccttgccggcgccggtgcctatcc

SEQ ID NO: 875518 - DNA, 99 bp, Homo sapiens
tagccaaatctgtttacagacctcatagattcttgcaattccacagagcagggttacttctcctggaaacttatctaagccttgtttgaaaagatttaa

SEQ ID NO: 875519 - DNA, 98 bp, Homo sapiens
tgaaaccaccgtggaagtcgcctggtgtgaactgcagaacaaaatccagtctcatagcagaggagaatataatgtttacagcaccttccagagccatg

SEQ ID NO: 875520 - DNA, 99 bp, Homo sapiens
ctcctcacagcgctgctcctcacatactgctatataacaaactcttgctttttctaccaacatccagtttttctccagatcaagatgtttttccttttt

SEQ ID NO: 875521 - DNA, 99 bp, Homo sapiens
ggcgctcatccacagagccacatctgttagtctgaacaacccagtcctgccagctccagctccagctccagctccagcttcacaccatcccagaccagg

SEQ ID NO: 875522 - DNA, 99 bp, Homo sapiens
agggaaccctggtcaccgtctcctcagttcgagtatggcggccagggctccgaccctgccgatgtggccatccagctgaccttcctgcgcctgatgtcc

SEQ ID NO: 875523 - DNA, 99 bp, Homo sapiens
ctggggacgacttttacatcatcacggaggtaacaacattgactcaggaagtttctcagttgggtaaagacatgagaaatgtgatccagcttctggaaa

SEQ ID NO: 875524 - DNA, 98 bp, Homo sapiens
aacgagcagtgatggctgaaaaggatgctttagaaaaacacgatcagctcttagacagatgttgagcataccggagccaccagtgagttttatgacaa

SEQ ID NO: 875525 - DNA, 99 bp, Homo sapiens
gagccacctgagcaagctgagccagagcccacagaagcatggaaggcacccagattggctgaaaacttctgtgtctgccatttagctactggggacatg

SEQ ID NO: 875526 - DNA, 99 bp, Homo sapiens
cttattcctgtccggagacagcctaaggagtcacttatttcagcaattcaaggtgatattgaagaagctaagaaacgactagagttaccagaacatttg

SEQ ID NO: 875527 - DNA, 98 bp, Homo sapiens
gagcagccctggtgtcacctatcagtaaaagtaacagatcaactcctagcaatcatgatcggatacagcgtctgaggcaagaatttcagcaagcaaag

SEQ ID NO: 875528 - DNA, 99 bp, Homo sapiens
ttatcccaaaatgtccaggaggatgatcttcagcacctccagacagagagtgcatgggctgaagaatactctgaaaagaagaaagggtctcacaagcgc

SEQ ID NO: 875529 - DNA, 99 bp, Homo sapiens
cttacaacaaaccagatgtcagtctgcagggccatggagaagtgtaaagatgcaggattggccaagtccatcggggtgtccaacttcaaccacaggctg

SEQ ID NO: 875530 - DNA, 99 bp, Homo sapiens
ggtgtccccgcggcgcaggaggcggtggagcgcagagcgggcgagcgcgggagttctgggaaatcgttcattcatttacagatgaacagaaaagactct

SEQ ID NO: 875531 - DNA, 99 bp, Homo sapiens
gatatgtgttgctaatacccatctttactggcatcctaaagactctgtttgctggctacacggacaacctggtgcgagtgtggcaggtgaccattggca

SEQ ID NO: 875532 - DNA, 99 bp, Homo sapiens
ccttgcatcatgctgtcatatttctctttaatggtgctgaggaaaatgtcttgcaagtgaaaggtgtagcagtcactcggcctacacccacagcatcga

SEQ ID NO: 875533 - DNA, 99 bp, Homo sapiens
cttcagtctcagcctgatctggctggaggtcagtagctgaactgaggcgtattatcgctggcaaaacgcgatggggagttcccggctgggcaccagggt

SEQ ID NO: 875534 - DNA, 99 bp, Homo sapiens
tattatttgcacccagtcctgcagcgccagcagctggactatggcatctatgttatcaaccagagcaggcagatggcttgtgcagaagattggagaagg

SEQ ID NO: 875535 - DNA, 99 bp, Homo sapiens
cgacagtgactaccatgacgaaaacatgtactacagccagtcttctatgtttccacatcggtcagaaaaagatcaataagagctaactgccatcaagag

SEQ ID NO: 875536 - DNA, 98 bp, Homo sapiens
cacgttccgatccctggcttccgtgcccgctggcattgctaaacacgtggaaagaatcaatttggggctcttcgtcagattgggcagaggacgataag

SEQ ID NO: 875537 - DNA, 99 bp, Homo sapiens
ctataataagcagcatgtgaaagaactagtgaatatgatactaatgaagatgggtttttcagttattgccttgtctgtcaagatccgcagttatgaaga

SEQ ID NO: 875538 - DNA, 102 bp, Homo sapiens
cagcctcccgagtagctggaattacagaccatggctccctggcctgaattgggagatgcccagcccaaccccgataagtacctcgaaggggccgcaggtcag

SEQ ID NO: 875539 - DNA, 98 bp, Homo sapiens
gatgaccagcggcgacgtgctgtccaaccgcaagatgttctacctgctcaagaccgccttccccagcgtccaggatggtcgtctgcgaatgaatgacc

SEQ ID NO: 875540 - DNA, 99 bp, Homo sapiens
ctggagctctacgcctcctacgtttacctgtccatgtgcacgatctgattttctggagagatgtgaagaagactgggtttgtctttggcaccacgctga

SEQ ID NO: 875541 - DNA, 99 bp, Homo sapiens
tgagcaagaaaagcctctgggagcagaagggaggctccaagacctcatcaacaattaagataatgtacaacggccagccaattaccaaaatggcctgtg

SEQ ID NO: 875542 - DNA, 99 bp, Homo sapiens
atgcttggtaatactggtgatagctgtggtcctgggtaccatgggctccagacccagttcctggacctgccctggaaaagaagtatcccgtagagatga

SEQ ID NO: 875543 - DNA, 99 bp, Homo sapiens
tcagcaatccttggctcactgaggaggtttgactccagcgggaggaagaagaggcctttgccagcagtcagagcagccaaggggcccaatccctcacat

SEQ ID NO: 875544 - DNA, 99 bp, Homo sapiens
gtttaaacaggactggctacctcatttgcagataccccatgtttccccatcactcgaggagtctgggcagagactggactacaccgtgggagaatctgc

SEQ ID NO: 875545 - DNA, 99 bp, Homo sapiens
acctgtacagcatcaactacctgcactttggggagcctaagtcctgactcggtgaaatacctggagtgctcagctctcacccagagaggcctgaaaacc

SEQ ID NO: 875546 - DNA, 99 bp, Homo sapiens
gaaaggagaatactttgttaatgtgactaccagaatttggaacgggactttcgcatcaattcgccatgaagtcagcgtaaataatgtaacacataaact

SEQ ID NO: 875547 - DNA, 98 bp, Homo sapiens
ggccagcatctacaatcaaagttgaagaatgcaaaatggctggcaaagatcccacagattgtggtttgctgattcatccagaggaaacctgtgggtta

SEQ ID NO: 875548 - DNA, 99 bp, Homo sapiens
ttggctcagccacccgctgggaatcgtgcagggattcttcgtggatgaggatcgcagtacggaacctgaccgattgcaggtgtttcacaagagagccat

SEQ ID NO: 875549 - DNA, 99 bp, Homo sapiens
gcgggagtcgcggaacagcaggcccgagcccaccgcgccgggccccggacgccgcgcggaaaaggaaagttcacatccttggctccttccaaaatatca

SEQ ID NO: 875550 - DNA, 98 bp, Homo sapiens
ccggccctgagcgcactctggagggattctggcatcagggaggctttcagccggagaagcgagtttcagctggtgccctacgagacgctgaacaaacg

SEQ ID NO: 875551 - DNA, 99 bp, Homo sapiens
ttgctcctctctccttggcctctcctgggatcggcccaaggccagttctccgcaggctcgggttatgtatgattttgctgctgaacctggaaataatga

SEQ ID NO: 875552 - DNA, 99 bp, Homo sapiens
gccgccagggacatgtctaacctcggaggccgtaggaacgggcctgtcgaagtgcgcctgacaggtttgcccaaaggaccagccaaaacctcacctcaa

SEQ ID NO: 875553 - DNA, 137 bp, Homo sapiens
cctacttttgcaagaccaagaaggggccccccttggacgggactatgtgtgcacctggcaagggaattcagtttctaatagaaaatgacctgctacagagttccccagaagacgtcgcccagttcctttataaagga

SEQ ID NO: 875554 - DNA, 99 bp, Homo sapiens
cttagagtagtaaccgccagaaaggagtcggaagaggtctcacgaggctgtcatcaccgccatgcccaagaataaaggtctccaattgagaaacatggc

SEQ ID NO: 875555 - DNA, 99 bp, Homo sapiens
ctagaagcaagtctctcagcaggacctcatgctcatgaccaatggcatgcttccaattagagatacaagacgagacacaggcagtggtctatcgaatac

SEQ ID NO: 875556 - DNA, 99 bp, Homo sapiens
ctgtttttctttctgtgtttcttctggtccttagtctccatagtggctatttaccgcagatggaagaatatctcggtatctgtttttttctctgttgct

SEQ ID NO: 875557 - DNA, 99 bp, Homo sapiens
atactggtcgcaacagcagtccatgcatatcgatatataaccccgttttcacacgaatggccccttcacatatttgaagactaccgtcgtgtccgtgct

SEQ ID NO: 875558 - DNA, 99 bp, Homo sapiens
gtggaataagtgctagtatcggacatgatcctcatcttttatacactcttagtgctgtccaggtaccgttttgcagagattcgctaccatcgccctgag

SEQ ID NO: 875559 - DNA, 152 bp, Homo sapiens
tgcactacatccagcacgagtgggctcggttcgagatggagcgggcgcactgggaggtggaacgggccgaactgcagatgactttttggtactgcatcttgctgacttaattcgcatggcttttatggctgccacagatcacagtgaccagc

SEQ ID NO: 875560 - DNA, 99 bp, Homo sapiens
tggcttgtggtgcggcctcaccatacaggaacagggcagacgttagcgtgagtgatcactctcaatcccggattctggacaatcaggaagtccaagcca

SEQ ID NO: 875561 - DNA, 99 bp, Homo sapiens
cttcatctgaaattacctctcagactttctgtaaaggaaaacaagactccagcgggaggaagaagaggcctttgccagcagtcagagcagccaaggggc

SEQ ID NO: 875562 - DNA, 98 bp, Homo sapiens
cttggataccggcatataaaggagaggacaggaagacaaacatttctggaaatggcttttatccagaaaagacttgatggaatctacatggatgcagc

SEQ ID NO: 875563 - DNA, 99 bp, Homo sapiens
tcctcttcattccgcagcagcactccgacaggttctgactcagaagatcttttggaagaattgctgtgctgtttgatgcagttgatcactgatattcca

SEQ ID NO: 875564 - DNA, 99 bp, Homo sapiens
tcggatggggcaggatggctgcgttgacacgtcttatttaatccacatcatagtttccaaggcaggaaaggtaaagagacaaagaaagtgccttgtaca

SEQ ID NO: 875565 - DNA, 99 bp, Homo sapiens
tgatagaaccccagtttcaacgagacttcatttcattgctccctaaagaggtgtccttgaatggccattttggacaaaactggttgtggtagccattgg

SEQ ID NO: 875566 - DNA, 99 bp, Homo sapiens
ggatggctgcaagactgtcgacctaaagcctgactggggcaaggtggcttcttctcaacctgtatcttctgagatgtatagggatccatttggaaatcc

SEQ ID NO: 875567 - DNA, 99 bp, Homo sapiens
ctcagcctcttgagtagctgggattacagacatctccagttacagcccgaacactggaaactctgattcgactggccacagcccatgcgaaggcccgca

SEQ ID NO: 875568 - DNA, 99 bp, Homo sapiens
ggctgtgtaccattcatgaactgagatttggaagacataattcacataagcatccacaaattcctgcctttgcagaggcatgatttcacaagccattct

SEQ ID NO: 875569 - DNA, 99 bp, Homo sapiens
cttactctaaacttcacaaatggttctgaagagtatggagcctacgtagattcataaggtatgcttgagaaataatcctctttatcatgctggagcagt

SEQ ID NO: 875570 - DNA, 98 bp, Homo sapiens
gcagttatggcaccccagaactggatgaagatgatttagaagcagatggttccaatccctatacattgaagctttgcttttctacatcatcccattta

SEQ ID NO: 875571 - DNA, 99 bp, Homo sapiens
cctggtttcattgcgaagtttttcatctgtgttctccactaggttggcaaggtcgtcaattatctcctgaaataagtgaagttactagctgctaaataa

SEQ ID NO: 875572 - DNA, 100 bp, Homo sapiens
gaaccatccactgcttgagcccaggaagcagaggttgcaatgagctgagattgtgccacggtactctagcctggtaaagctttatgatgtgtggatggtt

SEQ ID NO: 875573 - DNA, 99 bp, Homo sapiens
aagcttctagatggatcctttccaaacttggtgtcttttctacaaactctgtgcctcaacaaccatttctaagtgctgttccatttcctccaagtcacc

SEQ ID NO: 875574 - DNA, 99 bp, Homo sapiens
gctcgtcctggagcacctgcagctggcgcctctgcagtggggaaagctccaaccatggccatggggctcttccgcgtgtgtctggtggtggtgacggcc

SEQ ID NO: 875575 - DNA, 99 bp, Homo sapiens
gcgagtgaggaaaggaggtactgtaggagtatgctgctgctgttccgctttgcgtcctcgctacaaacgcctggtggacaacatattccctgaagatcc

SEQ ID NO: 875576 - DNA, 99 bp, Homo sapiens
gggccgtgactacaggacctgtctgacgatagtccaaaaactgaagaagatggtggataagcccacccaggtcagtcaggagatcctagagctattaaa

SEQ ID NO: 875577 - DNA, 99 bp, Homo sapiens
agggcggtccctcatcaagaagattgatgtacagctatatattttgtcctttctttcacctcatgatctgtgtcagttgggaagtacaaatcattattg

SEQ ID NO: 875578 - DNA, 98 bp, Homo sapiens
gaaaagatcgagaagctcaaggacctgattgcttggcagatgatgtgatgccagccacttactgtgaaattgatttagataaagaaaagagagatgca

SEQ ID NO: 875579 - DNA, 99 bp, Homo sapiens
ggacttggaaaacctgggtgaacgagcgcttccttataggatctctgcccacagtcagcagcacaacagaggcggactcagcccgcctgcacccaggtg

SEQ ID NO: 875580 - DNA, 99 bp, Homo sapiens
gcaacagccacgctggctgctctaccacgaacttgtcttgaccaccaaagagttcatgagacagcctcaagctcgaatgtgacaagttggccagtgaga

SEQ ID NO: 875581 - DNA, 99 bp, Homo sapiens
gaggaggaagtggaggaaccaggggacctccctcacggggaggacacatggggtgttggacctcaggaatatactttactcaaattgaaggtgcttgag

SEQ ID NO: 875582 - DNA, 98 bp, Homo sapiens
gggcatggatgataaccacccaaggcccaaaagcgtcaaactcaccaaaaacaacatctttccagaaagaggaatcccttggcaccatgtcctgtgtg

SEQ ID NO: 875583 - DNA, 99 bp, Homo sapiens
ggagatattcatagtgggacagcattaccgacaagcaaggacctctggaagcaactactcctgattaacctcggtgaagttaaggaaaacttcgtggct

SEQ ID NO: 875584 - DNA, 99 bp, Homo sapiens
gggtgatttctgcatttccatctgagagaagagcaagttagtaccttgtaccaaaacatcaaccttgtggagccaagattaattcagccatatgaacat

SEQ ID NO: 875585 - DNA, 99 bp, Homo sapiens
aacccacttcgttcaagacaggtgtttaagcgttggttcattctggctccggatgtcgatccccctcccttggatctgaccttacatttgctaccagga

SEQ ID NO: 875586 - DNA, 99 bp, Homo sapiens
agacggctcacctgtgcgggatggaacaaaagatcgacgacatcgcggatggcgccgtgaagcccccacccaacaagtaccccatctttttctttggca

SEQ ID NO: 875587 - DNA, 99 bp, Homo sapiens
attacatcggtcacaaattgtgggtgagtataagcatctcttatcttttcatgtagtaactggcgaacacttccctacaggcaggatacagtttggggg

SEQ ID NO: 875588 - DNA, 98 bp, Homo sapiens
agtcaaacacatttttgctggaacatatgccaactttgtgacaactcatcaggttggccgccttgaaaatgcaatcgggtggtatcatagccaccctg

SEQ ID NO: 875589 - DNA, 99 bp, Homo sapiens
ggcaaggtgctgctggacgacacggtgccgctgacagcagccatcgaggcgagccagagcctgcagtcccacacggttagtaactttggaaaacagtcc

SEQ ID NO: 875590 - DNA, 99 bp, Homo sapiens
tgggctgcagtggaaagattcaacaatgaacaacgactaaggttgttacaggagcttactccacgggaacagcctctagataatctgagttgttgaaaa

SEQ ID NO: 875591 - DNA, 98 bp, Homo sapiens
attgtccccgatttgggatcactggaaagtcagcatgattttcgaaccccggagttttatgtctggatttggaatgaacaggaatcaggcatttggaa

SEQ ID NO: 875592 - DNA, 106 bp, Homo sapiens
gtcggtgatgagtgccagcctctggtccagctgcgtcactccctgacctctatatccccagtgacgcagctggaccagaggctggcactcatcaccgacatgcttc

SEQ ID NO: 875593 - DNA, 99 bp, Homo sapiens
ttgagcaaagagatccgtccagtctgccgcaagttcatgcaagatgtcaaatttgagctgattgtgtcagaggcctcctacctgcgcagtctaaacata

SEQ ID NO: 875594 - DNA, 99 bp, Homo sapiens
cagtgactcacaaatcagcaacacagaatttctgcaagtaattggtatgaaatctaaggatgccccctctctggagctgcctgcctgtgtttgaatcct

SEQ ID NO: 875595 - DNA, 99 bp, Homo sapiens
cagcagctgtccacgtacgccctgaccctgtacaagcacacagccacggtagatggcaagaccatccttgtgggccctgcttcaatgccaccacctccg

SEQ ID NO: 875596 - DNA, 99 bp, Homo sapiens
gcagcaaatctacttttgggttacaaaaatccagaccagggattaaagcctgtggtttccacagaagcaccacctatcatatttgccacaccaactaaa

SEQ ID NO: 875597 - DNA, 98 bp, Homo sapiens
gaatccgaggtatttgagatcacggacttcaccactgcctcggaatgggaaagctttggtccacttttcatcgaccagagttggtccgaccagccttg

SEQ ID NO: 875598 - DNA, 99 bp, Homo sapiens
aaatgaaccatttgtctttagtcttggcaaagacgctctatgggatttactacaagtgtccctgtgagcgtggcctgacctgtgagggagacaagacca

SEQ ID NO: 875599 - DNA, 99 bp, Homo sapiens
cgcggggcagttcgggccggctgtcctggcgcgattggaagaattgttgaaaattctgatgctgttactgagattctaaataatgctgaattactaaaa

SEQ ID NO: 875600 - DNA, 98 bp, Homo sapiens
tgaaataaaaagcaaggccatcagtgaagagaaagagtgggagaaaaaggtttgaggagagaagcatccagttttggatgaaccaatagcagaagctg

SEQ ID NO: 875601 - DNA, 99 bp, Homo sapiens
tttttctccattgattatgatagcagtgggcttttcacagtgggctttactgtgttgagggaaggtggagttgcagcaagggctacgggctgtgtacca

SEQ ID NO: 875602 - DNA, 99 bp, Homo sapiens
cttggtactacagtattctcccaggatccataatgctcctcggtaaatcgcctgtaatcccagcactttgggaggccgaggcgggtggatcacgaggtc

SEQ ID NO: 875603 - DNA, 99 bp, Homo sapiens
ctctcccctattgctggctctgcagggctctgatcaagcggatccaagccatgattcccaagtcttactactttgaccgcgatgatgtggctttgaaga

SEQ ID NO: 875604 - DNA, 99 bp, Homo sapiens
cagaaagatatgaaggactgggttgaagccctgaaccaagccagcaagatcaccgtattacatgaaacctttcctaaacatacatttctgatgaacggc

SEQ ID NO: 875605 - DNA, 98 bp, Homo sapiens
gaataacatgaacattgcttcatctttgttccacaagtttctgagacagcaccgcctctacaaccccacgtcagagtgtgggattctgttactctatc

SEQ ID NO: 875606 - DNA, 122 bp, Homo sapiens
gtcttcatccccaagccattcagggcctttgcctttggtggatgtcaatagtcggcacgttctcgtagccaccctggatgcggttgtcctgatcatctgcaaatgtaacaaaggcaaaggcc

SEQ ID NO: 875607 - DNA, 99 bp, Homo sapiens
aatgaagaagaatatctggttattatcaggttcacgccaacagtacctcattgctctttggcgactcttattgtggccccagatgagccagtcccgagc

SEQ ID NO: 875608 - DNA, 99 bp, Homo sapiens
ttcaccctgcccccttcggtaccggggggagactccggaatagccaggccagaagaaggaaggcctgtggtgagtgggacaggaaatgacatcaccacc

SEQ ID NO: 875609 - DNA, 99 bp, Homo sapiens
ttagaaaggagacccgactgcaactgctggattgctgcaaggctgagggacgagaacgagggtagtggtggtgcacgaagatccgcactacttgacagc

SEQ ID NO: 875610 - DNA, 99 bp, Homo sapiens
cggcagtcagagtcaaaacagagcttttggaatctgaacaaggggaagtgttgatggcgtctctgaatccaagttgcaaatctgtgttgaaccaacttc

SEQ ID NO: 875611 - DNA, 98 bp, Homo sapiens
atgtttcttacaaagtggaggtttgtggcagccctgcatggagcaagtctgtcagcaccatctttctaacagaagaggagcaggacttggatggtgag

SEQ ID NO: 875612 - DNA, 98 bp, Homo sapiens
gggaaggttccctcaagtccaaggtgaatcacaagcctttgagaacagcctgagccttcagccctcacagatgcccagcctcatagctgaagttgcct

SEQ ID NO: 875613 - DNA, 99 bp, Homo sapiens
gaccagcctcctgactactccttctccaagaggaaaccacccctactcctaatcccccgactacagaagaggagaaaacggaatctaatcaggaggttg

SEQ ID NO: 875614 - DNA, 98 bp, Homo sapiens
gaacggcagtgatcacacgtcggctgctgggaagatctggattctcgtttcagaaagaagcttagcccttagctccctgaagacagctggcaagtctg

SEQ ID NO: 875615 - DNA, 99 bp, Homo sapiens
attttctggaaggttaagttgctttgccattctgatacctgaagtcttgctagttgtgcagtccgggcaactatcttattgtatggttcaacaattttt

SEQ ID NO: 875616 - DNA, 99 bp, Homo sapiens
cgcacagaaagcggtagcatctctcaaggcaaatggcgtgcaggcacagatggctaaggttctggggctgctggtatggacgcttattgctggaactga

SEQ ID NO: 875617 - DNA, 99 bp, Homo sapiens
agcaagaaaagcctctgggagcagaagggaggctccaagacctcatcaacaattaagatgaggtttatataactttccaagacaaggaagttgtgcaaa

SEQ ID NO: 875618 - DNA, 99 bp, Homo sapiens
ggctagtccgcggccctgctgagagggaaaaggacgccgcggtcttcccaggcgtcgcggagagcagcaagaagatccttataggaagaaaaagcttca

SEQ ID NO: 875619 - DNA, 99 bp, Homo sapiens
ggagccgtagcgtcggtgctggaagacgaggccacagacacttctgatagtgaaggctaaaataaatgaagctgtagaatgcttactgtccctgaaggc

SEQ ID NO: 875620 - DNA, 98 bp, Homo sapiens
tttcccaagtttcctgacttcttccatcctctggaaatcagctgtggttgttcatcgagacctgaagccgagtaacatcctgtacagggatgagtcgg

SEQ ID NO: 875621 - DNA, 99 bp, Homo sapiens
tactcgcccccacctgtggactctgaccgcaaacaaggagagcctactgagcagcctgagtggcaatggctgccatccggaagaaactggtgattgttg

SEQ ID NO: 875622 - DNA, 99 bp, Homo sapiens
ccagttttcagtacctcatagtggcaattgccttttcaaaaggaaaacccttcaggcaaccttgctacaaaaattgttctttcatgctggtgaatgcct

SEQ ID NO: 875623 - DNA, 99 bp, Homo sapiens
ctgaagatggtttgaaacagcttcacaagagtgcgctagatgttggaccgagtatggaatccgccatttcccctgcccgtcgccagagagcaagctgca

SEQ ID NO: 875624 - DNA, 99 bp, Homo sapiens
tacaactcatgcccagcagcagcaagcaggtttccaatacttatctacaggaatcgccatgaccccagctctgagggaggcaacagcaaagggtatcag

SEQ ID NO: 875625 - DNA, 98 bp, Homo sapiens
gacagaggagtgcaacaaccactggttctccaggaaccgaaaaggcgaggagtatagtacggcaaaaaactgtcggacaccagcagtgaaaacactgt

SEQ ID NO: 875626 - DNA, 99 bp, Homo sapiens
atcacttcaagaaaggcacagagatctgtaattacagctactccagcaacatcttgtccataaggctgaaccggcaaccgtcattgtgtggcactggac

SEQ ID NO: 875627 - DNA, 98 bp, Homo sapiens
ccgagttcaccaaaattcagacattatgatgattattctccaccgtctaagagaccaaaggccaatgagctaccgcagccaccagtcccggaacccgc

SEQ ID NO: 875628 - DNA, 99 bp, Homo sapiens
tccttgcttctttggagaatgatatcaaaccaaaactgccagaggcatgcagcattggtgatggaaagccctttgtcatgaatctgcaggatctgtata

SEQ ID NO: 875629 - DNA, 99 bp, Homo sapiens
tcgcaggcgtcatgttgggaatcggacacaactcaaggctcagaacagcaggatccagcaactcttccacaaggtggcccagcagcagcggcacctgga

SEQ ID NO: 875630 - DNA, 99 bp, Homo sapiens
ctgggcaacagagggagactccatcttcacacctgtgcttggtagctgccttgcctgggatgccccccttctcgttgtaacactcactcaggtgtccac

SEQ ID NO: 875631 - DNA, 99 bp, Homo sapiens
aatccaggtcgcgatcgaagagtccccccaagtctcctgaagaggaaggagcggtgtcctcttaagaaaatggtctcgaagtgctgcagctaaaactca

SEQ ID NO: 875632 - DNA, 99 bp, Homo sapiens
ctccacctcctcccgctggcctcggaaggcagccgacatggcctcctgcagccactgacgcctccagcttctgggaaaagatcttctcaaaggtcacct

SEQ ID NO: 875633 - DNA, 99 bp, Homo sapiens
tatgattacatgcagggaacctttgctcatgagcatatctaccaacttaaaaaacagttttgcctcagcccttcgtatgggatgtaatgaccgaatttc

SEQ ID NO: 875634 - DNA, 99 bp, Homo sapiens
gcacagctctcctattgaaacttgcccagatgttctcagatatggtcttaaaagaatacagattctgttcatcttgctctgaaattaaataattctgaa

SEQ ID NO: 875635 - DNA, 99 bp, Homo sapiens
ttacaatccaagacacactcaacacattagacggcctcctgcatctgatgggctaaagaacgtgccaatggaatggagcttgatgggcgtaggatcaga

SEQ ID NO: 875636 - DNA, 98 bp, Homo sapiens
gagaaaactagtagcacccttccggtttgaagatttgggtgactctcctattccatctgtttcttcgggatcatcttcacctctttcagccacttctg

SEQ ID NO: 875637 - DNA, 99 bp, Homo sapiens
caatcaaaacgcacaagccagaccctggcacgccccagcacacgaggtgtttgtaaaatgtatgaagaacatctgaaaagaatgaatcccaacagtccc

SEQ ID NO: 875638 - DNA, 99 bp, Homo sapiens
agaggaaaggcttcaatgaagggctgtgggagatccagaacaacccccacgccagctacagcgcccctccgggggatgtttttccaggacaagtgaaga

SEQ ID NO: 875639 - DNA, 99 bp, Homo sapiens
ctactcagaagaacttgtacagagatgtgatgttggagaactatagcaatctggttttcttggaatatatcactgatgtccattcgaatgacctgtcta

SEQ ID NO: 875640 - DNA, 99 bp, Homo sapiens
cagcctcctgacctgtaggacgagggattccttgttcttctgcctgaagatggatgtggagaaaggcaagattgaagacacaggaggcagtggcggctc

SEQ ID NO: 875641 - DNA, 99 bp, Homo sapiens
ccaccgcacgttcagaagtcggatgcttttactgactctgctatcagtgctaaagtgaatggcgaacacaaagagaaggacctggagccctgggatgca

SEQ ID NO: 875642 - DNA, 98 bp, Homo sapiens
tcaagatcagctccaggcctgggaaagtgaagttccatggaaaatgggagaccacctgatcctgcagactgggccgtgatggatgtcgtcaattattt

SEQ ID NO: 875643 - DNA, 99 bp, Homo sapiens
cgaaaacatgtactacagccagtcttctatgtttccacatcggtcagaaaaagatgaaagaccacagcaagattctttcattcgtctcctcctagcctg

SEQ ID NO: 875644 - DNA, 99 bp, Homo sapiens
tggcaaccagatcggtgccaagaaggtggtcttctgccctgttaaagaagccctggaggtggactggagcagtgagaaagcaaaggctgctctgaagcg

SEQ ID NO: 875645 - DNA, 99 bp, Homo sapiens
cagtggacatgttttctgaataaaccaagtgtgctggagatggtgacctcgtgtccttgactgtggcgctggaggggacatcgaggaggggccatttca

SEQ ID NO: 875646 - DNA, 99 bp, Homo sapiens
gtgaagttctttaagcccccatatctaagcaaaggaactgactatgtcttcagcagtggtgcagttatatgcagcagatcggaactgtatgtggtcaaa

SEQ ID NO: 875647 - DNA, 99 bp, Homo sapiens
ccgagcgcccgaggcgtctgggatggtgtgggaccgggtttcgacacagccccaactgctggtacctgagaaactggactatccacacctggattaggc

SEQ ID NO: 875648 - DNA, 98 bp, Homo sapiens
taaccgaggcacggacaacatcaccgtgaggcagggggacacagccatcctcagacacgttggtcgtcattgcctccgagcccactttagccctcagc

SEQ ID NO: 875649 - DNA, 98 bp, Homo sapiens
tggaggattgaagagtatttgaagtctgtgtcaaacatccatatcataagtggaattttggagatattcaaaggtggctttttctcaagtatattttc

SEQ ID NO: 875650 - DNA, 99 bp, Homo sapiens
gttggtctcacaaagactttgagctttagacaggaccttcttccattatctgggattgcagaggttagggctgtctggatatccttctccccatttttc

SEQ ID NO: 875651 - DNA, 99 bp, Homo sapiens
gtggctgtgggatatatcttttctgttctatatttggtagacaatcttcttaaccgctcagttaacattattacaccccggggaagtgaggtcctccct

SEQ ID NO: 875652 - DNA, 99 bp, Homo sapiens
ccatgaggtaggcccccgtcttctggtaaaatgataggataccatcctgtgatcccccattcgcatcttggctccgctctgactgcccccgctgccggg

SEQ ID NO: 875653 - DNA, 99 bp, Homo sapiens
atcccgagaccctccctagatcaccatcagcagagttctctcctgctgctcctcctggtgcagcggaactgctgcctgacgctctgcaacttcagcatc

SEQ ID NO: 875654 - DNA, 101 bp, Homo sapiens
agaccaaaagtatgttgtaccttgtgacagaatatgccaaaaatggagaaatttttgtgatcgaactgtgagaatttggaaggctcgcaatttgcaagatg

SEQ ID NO: 875655 - DNA, 99 bp, Homo sapiens
acggatcaaggacgagtgttcgtgaaagtgaaccccaaggcggagatcctgactgctgtcatggcgtgccctctggagaaggccctggatgtgatggtg

SEQ ID NO: 875656 - DNA, 99 bp, Homo sapiens
agtcaggcgtggcggcgcgcgcctgcaatcgcaggcactcggcaggctgggtggcaggcatatccttaaaggggacatggccgttggccagttcacagg

SEQ ID NO: 875657 - DNA, 99 bp, Homo sapiens
gcgagctgagtggttgtgtggtcgcgtctcggaaaccggtagcgcttgcagcatggaggactgacaaatggtagtggtcgatatatctctgcagcacct

SEQ ID NO: 875658 - DNA, 98 bp, Homo sapiens
tttaatgttgagtctaccaaaaagaatgaaccgcttgcttcttatttagggcaattgaaggaacagactaaaaatcgtgtcctggaaggaaactacag

SEQ ID NO: 875659 - DNA, 100 bp, Homo sapiens
cctcctgagtagctgggattacagggaatctttaaccagtttcagtgtagtagtgaaaaagtgcttccatctgacactctccgcagtgctctggcaaaga

SEQ ID NO: 875660 - DNA, 99 bp, Homo sapiens
tggacaactattttcgtcatctttggaacaaaggtggtatcacggaaaacttgacagaacgatagcagaagaacgcctcaggcaggcagggaagtctgg

SEQ ID NO: 875661 - DNA, 99 bp, Homo sapiens
ctgcgttgtaccatccgcctgtgggacacctaccagggcaatgtattccaagatgcagtcttcaatcaaacagttacagttattgaaagagaggatggg

SEQ ID NO: 875662 - DNA, 99 bp, Homo sapiens
agttgactgaaaatggggcggaagaaaatacaaatcacacgcataatggatgaaaggaaccgacagaccaaccctggaatggtccccagccatggattc

SEQ ID NO: 875663 - DNA, 98 bp, Homo sapiens
gaaaatctccccggtgactttcaggttgtctgcattcaaaagagcattctattaaagctaccttaatttggcgcttatttttcttaatcatgtttctg

SEQ ID NO: 875664 - DNA, 99 bp, Homo sapiens
cgcggggcgacgctggctgcagggacccggtgacagcgtgagagatgttgcaagagcaattgaattactggaaaaactacaggaatctggagaagtacc

SEQ ID NO: 875665 - DNA, 99 bp, Homo sapiens
gactcctggaatgccacaaatgcaaatacttgtgcactgggagagggcacttggaacgggccctgggtgtccactgaggtgctggctgcggcgatcggc

SEQ ID NO: 875666 - DNA, 98 bp, Homo sapiens
cagccaccagcctcagtggaacctccaagcctaattctggaggagactttaactcgactcgagccttacgcagacccttattatgactatgaaattga

SEQ ID NO: 875667 - DNA, 99 bp, Homo sapiens
ggtgcctgaggccgttggagatcagaaagcccttcaagaaggggaagggtggaggtggtggaagaggacgggccttctgagaagagccaggacccacct

SEQ ID NO: 875668 - DNA, 99 bp, Homo sapiens
gaggatcgtcaggctctaaacaaaattctggcccaggcctgggagtgcttgcaagatatagttggggtaaaatgttgacttttggtggacaccacggag

SEQ ID NO: 875669 - DNA, 99 bp, Homo sapiens
gttatctcgagcagagggacccacagtttcatttcaatggaaccaaagtttaaggaagaaatctctaaacgttttaaatcacatactgaccaacttgtg

SEQ ID NO: 875670 - DNA, 99 bp, Homo sapiens
gacaagctgcccatcgaggagacgctggaggacagcccgcaggtggtggctaatgccgtagcggcattatctgaaatcagtgagtctcacccaaacagc

SEQ ID NO: 875671 - DNA, 99 bp, Homo sapiens
ggagggcggcctcggccatgcagttcttcaccaagggctaccaggagaccatctcaggaatcattaaccaatggcaacaggaatccaaggataaagtga

SEQ ID NO: 875672 - DNA, 99 bp, Homo sapiens
ctggcgacggcgcttgacgtgggcttgtccaactggagcttcctgtatgtcaccgtctcgctctatgagatcatgcagaagtgctgggaagagaagttt

SEQ ID NO: 875673 - DNA, 99 bp, Homo sapiens
ctggtggacaaaattttgtggcgctctgcgtcccctgaagaacctatgagaaccccaaagacattaaagattgctgaaatacaggcaagacggattgct

SEQ ID NO: 875674 - DNA, 99 bp, Homo sapiens
gcggggcacgatgttgaacatgtggaaggtgcgcgagctggtggacaaagctgtatgggtttcgacagaccatgatgaaattgagaatgtggccaaaca

SEQ ID NO: 875675 - DNA, 99 bp, Homo sapiens
ctgtgaaggatggcatcttggtccgcatcgacagtgctccaggacttggtgacttcctccagcttcacatatcacccacaaaagctgtatataatgcca

SEQ ID NO: 875676 - DNA, 99 bp, Homo sapiens
cagcagcagtcggcttctctacgcagaacccgggagtaggagactcagaatcgaatctcttctccctccccttcttgatataaagatgaagcgcagctg

SEQ ID NO: 875677 - DNA, 100 bp, Homo sapiens
aagtgcagcgaggtaatcaatcatggatatacaggttccaccaaagaaggtggtgttctgatactcaagaatctgtccagtgctagctggaggctgcact

SEQ ID NO: 875678 - DNA, 99 bp, Homo sapiens
atctccacacgggcaccttctggctgacccggatcgtgctcctgaaggccctagccttcgtgtactgtgctggagaatctggtaaaagcaccattgtga

SEQ ID NO: 875679 - DNA, 102 bp, Homo sapiens
ggaggtcctccatgcgcagtcatgagtcgcttcaagtttatcggagaagcatttgagatgattcctgaacttgaagagctaaatttgtcttggaacagtaaa

SEQ ID NO: 875680 - DNA, 99 bp, Homo sapiens
caggactcagaggccgccatcaaccgccagatcaacctggagctctacgcctcctacgtttacctgtccatggcaacgccctgctgcggcggctggtcc

SEQ ID NO: 875681 - DNA, 99 bp, Homo sapiens
caaaccagacgaaaacaaatgtgaaagagttacaatactacgtcggacagagttttgccaatgatgcaccttggtgtggagtcaaaagtacacatgctg

SEQ ID NO: 875682 - DNA, 99 bp, Homo sapiens
attgggcctttctttttatcagcctccagaaggggataatgcacggggtgaatctctacattaagaacttggatgacactattgatgatgagaaattaa

SEQ ID NO: 875683 - DNA, 98 bp, Homo sapiens
cggcccagacccccagcaccacagtaccctggagcagcatcccacggccacacctaccgaggccctgtctctgcccctggtggtcatcgtccatggca

SEQ ID NO: 875684 - DNA, 99 bp, Homo sapiens
ctttaaataccctcaagaggagcaacctcgtcagcagcgaggaaggaaacagcgggaacccagcacctaccagtaatcatggcccagatgccacagaag

SEQ ID NO: 875685 - DNA, 98 bp, Homo sapiens
cctttgctgagcaggagcaactatgtctctggttcttaaggattgaaaagcaatacgagaattggagacccaaccagccagacagcttcttttctgct

SEQ ID NO: 875686 - DNA, 98 bp, Homo sapiens
gggcttttccgcaggccaagtccagcttatagacccaatcaaaaaagaaactagcaaactttttaatgaggaacaggcaggctccggagagttccgca

SEQ ID NO: 875687 - DNA, 99 bp, Homo sapiens
aggaaggaaaagagtcctggaatatgaagagacatgagatggtggaagaatccccaggaagccttgggagcaggtccccaaaaagccaaagcggaagaa

SEQ ID NO: 875688 - DNA, 99 bp, Homo sapiens
gcaaaatcctaatggctttgttagaagtcctgtctgggcggaatctggtggctttaaccaagagagcagatccagctgagcttagaacaatatttttga

SEQ ID NO: 875689 - DNA, 99 bp, Homo sapiens
ccgagggaaacaagaaaacatcaaagaggtctagcaaagaattttgattcagctaaagttccatcagatgagtattgccctgcttgtagagagaaggga

SEQ ID NO: 875690 - DNA, 99 bp, Homo sapiens
ctcgtgcaattgttgccattgaaaaccctgctgatgtcagtgttatatcctccaggaatactggccaggtgttcttccagagagcaaagccctgaggac

SEQ ID NO: 875691 - DNA, 99 bp, Homo sapiens
gatgagtgaagcagaggtgggggtgtttgtccagcgactccggggcctgatgaatgacatcggacgactgggtttggattcagaagaggattattatac

SEQ ID NO: 875692 - DNA, 99 bp, Homo sapiens
gaacatctcaccaattttaaatcagcctgcctgctccaggctgagctggtaaactatgaacgagtcaaggaatattgcctcaaagtcttgaagaaggaa

SEQ ID NO: 875693 - DNA, 98 bp, Homo sapiens
aacaccttcctgtgcagtcctgttggaatttattggtttatcttggaagctaaagggcattgctcatcctgaagatcagctgaccattgacaatcagc

SEQ ID NO: 875694 - DNA, 106 bp, Homo sapiens
ggaggaggagcccctggctggggggaagccgggtgcggacggtggcaggccaccagcccctcgggttccaagatgcagctactggagacagagttctcacacaccg

SEQ ID NO: 875695 - DNA, 99 bp, Homo sapiens
tttgcacgccaaaggcaaagaagaaaaaatgtccaaatcattaaagaactacattactattaaggtgtggaagatttccttacaagggccgtgttacat

SEQ ID NO: 875696 - DNA, 99 bp, Homo sapiens
gaatatatcacccataatcggaatgtgatcacagagcctatttacccagaagtagtccatatgctgggagtgtccactcgccttccaccagcatggcaa

SEQ ID NO: 875697 - DNA, 99 bp, Homo sapiens
cagcctcctgagtagttgggactacagagctccagagattatattggggttgccattttgtgaagccatagacatgtggtcattgggatgtgtgattgc

SEQ ID NO: 875698 - DNA, 99 bp, Homo sapiens
gcaggcaggcgctgagaaggacgcgcagtccatctctctcagcactactgggttggggtctccacgaccgagctggtctcatcaagtggcgtccaacaa

SEQ ID NO: 875699 - DNA, 99 bp, Homo sapiens
gcttggattggtgggatgtttcggaatgggcattgtcgccaattttcagggctgttcgtggtcagttatatttgtggatctcgatgctcacaatcgcaa

SEQ ID NO: 875700 - DNA, 99 bp, Homo sapiens
gttgttttggaggtcgaggagcctttattggtgaaatatgagaatgagaaacaaatccatggacattctcaatctctgataagttcttctctgagacat

SEQ ID NO: 875701 - DNA, 99 bp, Homo sapiens
cgcaatttaagatttgtagtgactacatctgtgaaggggccactagttcctgggggttgtaatacatctcctgtcaggcgacaccacccagctgggaaa

SEQ ID NO: 875702 - DNA, 99 bp, Homo sapiens
tgattttaaaggaacaaatacagaaatccactggagcaccttgataggaagcccttagtgtatacaaggaagcaattcagaaaatgccaaggcagtttg

SEQ ID NO: 875703 - DNA, 99 bp, Homo sapiens
ctgaaaagtaactggaaagtcacagaccgttctggcaagtggagttgatgagaaacaggtgaccattgtgaggtagatattttgttctaattttccaga

SEQ ID NO: 875704 - DNA, 99 bp, Homo sapiens
tgatacctacctccagctgaagaaagacctggagtacctggatctaaagtccggttccagttgttggcaaaggagaggaagaggaagaggaagatggca

SEQ ID NO: 875705 - DNA, 99 bp, Homo sapiens
gcctagtgatcctgagtacaacacggtggcaagcaagtttaatcagacctgctcacacttcagaatagagaaggccaatggaagcactgttgtgaagaa

SEQ ID NO: 875706 - DNA, 99 bp, Homo sapiens
gggaaatacaaatgaaccaagcacacgtgtccgagtacccattcctggcccagtgggtaacaagagaatggttcatttttccccggattctcatcacca

SEQ ID NO: 875707 - DNA, 99 bp, Homo sapiens
accaggggcaccgcgtgcagccggtgaaggacactgcccacgactttcgggtcctgccaaggaatcttgcccttccatttgtcgaagtctccaggaact

SEQ ID NO: 875708 - DNA, 99 bp, Homo sapiens
ggtttgtgcagctctattaccacgggaagattcttcccctggtggccatgggacccaggtcaatgtcacctgcatcgtgaacgtctgtagcagctctga

SEQ ID NO: 875709 - DNA, 99 bp, Homo sapiens
agaaccaaccagaacatcggatggcttgtgctccctttacgaggcagcattatgtctctttgaagagggcacaggcaggatggccgatgctgacaggaa

SEQ ID NO: 875710 - DNA, 99 bp, Homo sapiens
tgcaagcttaggtttgttcagaagaaatgcaattatggtgagaacaagaccaagattggaaagccagcttcagaggagggaattacagcaaaaattgaa

SEQ ID NO: 875711 - DNA, 99 bp, Homo sapiens
ctggaaagccagggcccaaaggggagcctggtgatcctgtaccagccaggtttctccacagacactacccaaagcagtccttcactacagtggcagaca

SEQ ID NO: 875712 - DNA, 100 bp, Homo sapiens
ctgaatatgctgctcaagatcagaaatttcaaagagaacttttgtaaaaccattctgtataagttctctttgaaatttctgatcttgagcagcatattca

SEQ ID NO: 875713 - DNA, 99 bp, Homo sapiens
tcgggcgcatgtctttccagcttcctggcggcatgatcatcacgggcttcatgctccagttctacaggtcaagtggccgcagggtcacccaggtggtgc

SEQ ID NO: 875714 - DNA, 98 bp, Homo sapiens
acatgaagaaggtggtgtgtgtggatcagcagacccccaccatccctaaccggctggctgcagacccggagacagaggagctggaggaggagaagtca

SEQ ID NO: 875715 - DNA, 99 bp, Homo sapiens
ggcctttacatctaaggggccaggaccatatgctgacgttgtaaagtctacaacatcaggagttcatgatcaagtgttgcccacaccaaatgcttcatc

SEQ ID NO: 875716 - DNA, 99 bp, Homo sapiens
ctccagccgaaagccctgcaagcgtctcgtgtccaacgggtcaggccccggcttgcttttctgggtaaaaattgcctctctcatgacttgcctgcaggc

SEQ ID NO: 875717 - DNA, 99 bp, Homo sapiens
cataataaagtgccctattacatcaatgagaaagatcagtctaaagaaaaggagaagaaagtgaaaaaaacaattccttcctgggctaccctttctgcc

SEQ ID NO: 875718 - DNA, 99 bp, Homo sapiens
agccgacgcgggaatgaagcgggcgctgggcagcggatggtttctcgctctttgggcgcaaatccagatgacctgaaggacccaattaaaattagtatc

SEQ ID NO: 875719 - DNA, 99 bp, Homo sapiens
ccagagtttgtagcctattggaggaaaacacaccaagcaagagctgatctacttcacgttcagcagacagggaagtggggaacacactgcaaatctcag

SEQ ID NO: 875720 - DNA, 99 bp, Homo sapiens
catcttaaagcaggctgcagatcttacacaggccgctttgtagttcagaatgtttctgcacagaaagatggagaaaaatctagagtaaaagtcaaagtg

SEQ ID NO: 875721 - DNA, 99 bp, Homo sapiens
gaccttctccctgcctggacccctactattgcaacaagatatgtacgaccaagtgctgaagtttggtgcttacattgtggatggcttgagggagtgctg

SEQ ID NO: 875722 - DNA, 145 bp, Homo sapiens
gtgagagagccatgtaatcatgccaacatcctgaccaagcccgatccaagaaccttcagctgccggctgaagaaggatgtggtgcgcttcggcttcactcgcctgatccccttgcctggatcatcattagtccagaaggttcttg

SEQ ID NO: 875723 - DNA, 99 bp, Homo sapiens
ttgcatgagacgcttctggacagaaattcatgtttcacggactccctggactaaacatagagatgcccacggtgttatacccaactccgcttcctcagt

SEQ ID NO: 875724 - DNA, 99 bp, Homo sapiens
aaagatttcttcactgagaccaggtcaccccggactccaacatcgacaaactctggagtcccaaatatgtttttaaattcatttccaaagtcaatttta

SEQ ID NO: 875725 - DNA, 99 bp, Homo sapiens
agtccggagcgcctagccctaccggactacgagtatctggatccagacaaagacggtagctcagtgcgttgagtattattacatctggaaaaaaatgat

SEQ ID NO: 875726 - DNA, 98 bp, Homo sapiens
aagtgaaaaagctcatcgaagagaaggactttcaaatgctgtatgcatatgatcagcccggaggcttcaccattgagattagtaacaacaatagcact

SEQ ID NO: 875727 - DNA, 99 bp, Homo sapiens
actactttcacttgagaaccacccagccaagcagacagtggagttctgaaagtgtgaagcaaaggaatgatgtgttttaccttcaacctgagcgctcct

SEQ ID NO: 875728 - DNA, 99 bp, Homo sapiens
caaactgctctgctaccagaagaagtgtcgggtacgcctgcattacacctggcgggagctctggtcagtgatcaacaaatacaagcgcagacgatttca

SEQ ID NO: 875729 - DNA, 98 bp, Homo sapiens
ggggtgagaactcgtggttctccactcaggttgacactgtggccaccaaggtgaagggcccagcactagaagatttcagtcatctgccaccagaacag

SEQ ID NO: 875730 - DNA, 99 bp, Homo sapiens
gacacagtgccagagtgtatgcactttactacaaagatggacttctctgtacaggttcgatacaagaggctgttttcctagcgtggcttgctgcctttg

SEQ ID NO: 875731 - DNA, 98 bp, Homo sapiens
taggacatgcgtttgagatctactgtgagtcaaactgtgctgaaaatatccgcaaacacattctgcatactggcaaacatgaaggagtcaagatgtac

SEQ ID NO: 875732 - DNA, 99 bp, Homo sapiens
atcgtgaaaagcctccttctggttccaaatgctattcctgcaccaactgacctgaagttcactcaggtcacacccacaagcctgagcgcccagtggaca

SEQ ID NO: 875733 - DNA, 99 bp, Homo sapiens
aacatttcagggcaagccaattatgtatgacttctctttggaaaagaaaaccattgagtgggctgaagagattaagaaaatcgaagaagccgagcggga

SEQ ID NO: 875734 - DNA, 98 bp, Homo sapiens
cgccagcgcctgagcatccccgtcatggtggtcaccctgggaggacggcagcagctcaaaggagggcacctctgtctgagtttcctctttggaaaaag

SEQ ID NO: 875735 - DNA, 98 bp, Homo sapiens
caaggagaagagtaccaaggctgctagtgaacagcgacgtgctgggaatggtgaggaagaaattctgccccactgtaacttgcaggtttttacctaca

SEQ ID NO: 875736 - DNA, 99 bp, Homo sapiens
tgtacatcagtcacagacctgcccaatgcctttgatggaccaattaccataagtggtcttcgagggatagcacgaggtggtctgacaggactaacactt

SEQ ID NO: 875737 - DNA, 98 bp, Homo sapiens
acccacagtagcgaccggaaccaagccaaggcgaaagagacgctcagcttacagggatcttcagaccagggaagacatacggaatgcagcatggcaca

SEQ ID NO: 875738 - DNA, 98 bp, Homo sapiens
tccgccatgaacctgaggggcctcttccaggacttcaacccgagtttaaggaagaaatctctaaacgttttaaatcacatactgaccaacttgtgttg

SEQ ID NO: 875739 - DNA, 99 bp, Homo sapiens
ccactcagccggctggatcgctgtctgtggtcactactgtgtggggagttggcaacgcgacacagagccagatcaagtcccagcagagcgaggtgaccc

SEQ ID NO: 875740 - DNA, 99 bp, Homo sapiens
agcactggccaggaaagcctcgaggccgtggcccagaggctggagctgcgggaggatgaaaactttcggaagagaaagttgcctgtggtaagttcagtt

SEQ ID NO: 875741 - DNA, 99 bp, Homo sapiens
ggagatccatagggaagaaggcggaacatccggaggctgggaaatgattgctgtgctaaggagacagcaacgtatgataaaaaatcgagaatccgcttg

SEQ ID NO: 875742 - DNA, 99 bp, Homo sapiens
agcagcccccggagacagcggcacagaggtgcttctgccaggtcgtggttcaattccagaattctttcatattatgaaaagaaagtttaccaacaaaga

SEQ ID NO: 875743 - DNA, 98 bp, Homo sapiens
cctgtttgcagcacgatgtctgaagaagaggcggctcagatccccagatccagtgtgtgggagcaggaccagcaggtttgttgataagccggggccct

SEQ ID NO: 875744 - DNA, 99 bp, Homo sapiens
gtttggctgctaaacttatggagttactagaggagatttcagaaagagaaaaggccaaccttgctgttaccctctgcaatgacaaggaggagatcatgg

SEQ ID NO: 875745 - DNA, 98 bp, Homo sapiens
agcaactgaggcagcggcaggctcaggtgcagccgctgcgcctttccttcgaggagctcaaggcatttttcaaaatctgacagtttttctcacaacaa

SEQ ID NO: 875746 - DNA, 99 bp, Homo sapiens
aactggcaaagcagctacacaaagagggtcatctcttctattgtacctgcagtgaaattggagcgatttgaaattccaatcaaggttcgattaagccca

SEQ ID NO: 875747 - DNA, 99 bp, Homo sapiens
ctactcaaaggagacccagactcctcttgccacgcatcagtctgaagaatgcccaggaaaaccatgggctggctgtgcccaccccctcggttccagatg

SEQ ID NO: 875748 - DNA, 99 bp, Homo sapiens
acatgatcaagcaggtgttggttgagaacttcagtaactttaccaacagaatggtcctctcagggtgcgccatcattgtccgaggtcagcctcgtggtg

SEQ ID NO: 875749 - DNA, 99 bp, Homo sapiens
acacaagcaccccaataacctcaaggtgaggtcccagcttgaagagaaagaaaacaagaagttccctgtgtttaaggccgtgtcattcaagagccaggt

SEQ ID NO: 875750 - DNA, 99 bp, Homo sapiens
ctggtgtactatggattccgcatgcggcccaacgacatcgtctatgactgcctccccctctaccactcagcaggtataaagaaatatgaggccccaatt

SEQ ID NO: 875751 - DNA, 99 bp, Homo sapiens
ctataagaacctggttcctaagcctgtaccacctccttccaagagctcagagtggaccctggcccgctgtgaccacgccttttgctggggcctgctgga

SEQ ID NO: 875752 - DNA, 99 bp, Homo sapiens
tcctctgaagatgaaggcaatctccgatttgtgtatgaactactgtcttgggtagaagagatgcagctccagagcaccgattccttggaatgccttgaa

SEQ ID NO: 875753 - DNA, 99 bp, Homo sapiens
ggtggaaggtaacagggaggcaggcacgtcttcacatggctgaccatagtctgtccggaagacgacgatgccttctgcacaggaatttacagtacttgg

SEQ ID NO: 875754 - DNA, 99 bp, Homo sapiens
ggaagatggtgctgatcaaggaattcgtcagcctcgagtttgaccagcagcaggggtcggtgtgtccctctgaatctgagatctatgaggcaggagctg

SEQ ID NO: 875755 - DNA, 99 bp, Homo sapiens
gaacttcagaggacgaggaaacaatcgtggctacaaaaatcaatctcagggctacaaccagtggcagcagggtcaaacggatgtttcagaagacagcaa

SEQ ID NO: 875756 - DNA, 99 bp, Homo sapiens
tttaactgatgagcaatcactttggattgaagatactacaaaatcagtttatcaaggaaaaaatgcatttttcaaagacctaacttcaattcagttatt

SEQ ID NO: 875757 - DNA, 98 bp, Homo sapiens
gcaaagctacttccattccagaaagatggcatcatttttgccctcaaaagaaatggcagatggcgttcaggaagtggcttatattcactcaaaccaga

SEQ ID NO: 875758 - DNA, 99 bp, Homo sapiens
ctggggctccgagcccggcgggaccatgttcaccagcaccggctccagtgggctctgtggaagttgatgggtcgaaactaaatgtgaccagcacgtgga

SEQ ID NO: 875759 - DNA, 98 bp, Homo sapiens
gacagaaatcacctatgtttacagcgacagcgagcccacagcctcggtgccccccgagtcggacgtgtaccggatgctccacgacaatcggaatgagc

SEQ ID NO: 875760 - DNA, 99 bp, Homo sapiens
ccaacatggcggcgcccagtggcgtccacctgctcgtccgcagagttaattggccttggtcctcacagctccaaaaagaaacaggatctcgataagctc

SEQ ID NO: 875761 - DNA, 99 bp, Homo sapiens
aggaagtctgcatccacattgcacataaagttgattctgctcctaagtgtaggagagaacttggtgcctcttccactctggagtgaagttaatgaaagt

SEQ ID NO: 875762 - DNA, 99 bp, Homo sapiens
cagctgcagtgcctccacaagccatgaacagtgggtctccagcacctcagtctaatcagggcccatttggaggccagcgctgagaagtggaacaggttg

SEQ ID NO: 875763 - DNA, 99 bp, Homo sapiens
tcctgggcatcacaaatacatttgccactattccaggaatggttgggcccgtcattgctaaaagtctgacccctgatgctggagtacaatggcgcaatc

SEQ ID NO: 875764 - DNA, 99 bp, Homo sapiens
ccaatatcagccaacatcaatcattcttaccttctaacgatgacgatattcgcgctctcggtcacgctctcggtcacggtctcggtcacgatcccggtg

SEQ ID NO: 875765 - DNA, 98 bp, Homo sapiens
accaggcaatgctggatagataccgaattcttatcacaaagctctgcttatgataatgtcaacaaagttcgagtagctatcaagaaaatcagcccctt

SEQ ID NO: 875766 - DNA, 98 bp, Homo sapiens
aagaattttactgcgaagttttgctcctggatgaatccaagttaacccttaccacccagcagcagggcatcaaggtgacagatcagtcagtgaaagca

SEQ ID NO: 875767 - DNA, 99 bp, Homo sapiens
atctattcagatggttctgatgaagtgaaacgtgccatgaacaaatcctttaccatcaggtttaaatcctacttgctgagcatgggaatagctaaccca

SEQ ID NO: 875768 - DNA, 98 bp, Homo sapiens
tcagtgtggcaaccagatcggtgccaagggtgagcagggcagcatttccttctcccactgctgctgagatggcagaaattagtcgaattcagtacgaa

SEQ ID NO: 875769 - DNA, 98 bp, Homo sapiens
gatgtaatgcctggaaagtatacaatgatgagggccccaaggctgttgcagctcctcgacctgatcggttggtcaatcgcttgaagaatatcactctg

SEQ ID NO: 875770 - DNA, 99 bp, Homo sapiens
attcaggaagattctcaagcataaaatcaatttccccaaggacagtaatgacttcctgactgtacacattgaattcactgtctataatcccagcacttt

SEQ ID NO: 875771 - DNA, 99 bp, Homo sapiens
tcagatgccaccaacaaccccatccagcagttccttcaccaaggcttcaggtgagaccacaggagttgacatcactaaaattcaagtcaagagatgtga

SEQ ID NO: 875772 - DNA, 99 bp, Homo sapiens
tttggacatgctttagagagaggaggagatgaccgccgggttctgctatggcacatggaacaagccatccactccagggtcaagcccatacagctgaaa

SEQ ID NO: 875773 - DNA, 99 bp, Homo sapiens
taccaacatccgaagggagcacctaatgcagatctaatctttaagactggtgggaggtctgccatcatggatgttctcgcagaagcaaatggcaccttt

SEQ ID NO: 875774 - DNA, 99 bp, Homo sapiens
tggagctagttagctgtctgttgtctgtagcccaggaaatgggtcctgatgaatatgaagagatggaagaagaggaggaggaggaagaggaggaagacg

SEQ ID NO: 875775 - DNA, 99 bp, Homo sapiens
cttgtttcttatatgtgatgccattccagcactggactcatggaggctgagcatttattcaggccaaggcaggtgaagcaccaactgagaaccctgctc

SEQ ID NO: 875776 - DNA, 99 bp, Homo sapiens
cctgattgaaattggaaatggtcttgtcacctttcaacttcgaggactggaattccgaggtgtggagggcgcagctttccagagccgacttcctcatga

SEQ ID NO: 875777 - DNA, 100 bp, Homo sapiens
tggagcaaataaaagagccctgcaatttgaagatacatgatctgggggtttggctgctgtctcatgtatcttcaaattgcagggctcttttatttgctcc

SEQ ID NO: 875778 - DNA, 99 bp, Homo sapiens
gttacgctgcagatcggcgccgttacagacgtggctactatggaaggcgccgtggccctccccggaatgccctcgggaccaaggatcacgtcatgactc

SEQ ID NO: 875779 - DNA, 99 bp, Homo sapiens
aaactcatcggaaacatggcactgttgcctatcagaagtcaattcaaaggacctgcccccagagagatgtgtgatccagtcttgggtgacaagtgggac

SEQ ID NO: 875780 - DNA, 98 bp, Homo sapiens
tagaggagcagcattcggccagagcccccttgctggattatatctacaggaaccccccaggtctgcctagcattgctgtctgctggttcgtgggctgc

SEQ ID NO: 875781 - DNA, 99 bp, Homo sapiens
acagaggaacctatggagacagagcccaaagtggcatggcagagagaaatgctaattttgaagcccttcctgaggattggagagcaaggctgaagagaa

SEQ ID NO: 875782 - DNA, 99 bp, Homo sapiens
cctgggtgacagagcgagactccatccataatgcctggaaatgctagacgaggtagtttcttttgcactggaagcacccgtgaaatccacatctgaggt

SEQ ID NO: 875783 - DNA, 98 bp, Homo sapiens
caggtgtaagcgcagaaagcaggcgaacccgcggcgcaataacggacactgccttaggaaaaccacgagaggtgtttcgacttcctacagatttgaca

SEQ ID NO: 875784 - DNA, 99 bp, Homo sapiens
tcgccggggaggcagcgcgggatcccagcctcaggcgtgcgcggacggtgtgcgggaagaggtactgcaacatttgatgggacggcaatagcaaatgca

SEQ ID NO: 875785 - DNA, 99 bp, Homo sapiens
tggctgtggatgctcgcaacaaagaattaattggtagcggaattggtactggtccaggagttatccaggatagattttcacccaccatgggacgtcatc

SEQ ID NO: 875786 - DNA, 99 bp, Homo sapiens
gtcccacttgttcgcggcctataggaggaggaagccaagaatctggtgagcgaagccatcgcagctggcatcttcaacgacctgggctccggaagcaac

SEQ ID NO: 875787 - DNA, 99 bp, Homo sapiens
ggagctcgcctgctgccctcttgcgcgcgggaagcagcaccaagttcacggccaacgccttggcactagggttatgtgaaattacctccagagaaattt

SEQ ID NO: 875788 - DNA, 99 bp, Homo sapiens
actgttccttcagccaaagaaacaagccgtggaataggtgtatcaagtaatggtgcaaagcctgaagtatgtgaggaagctcgatgtcccaatattgga

SEQ ID NO: 875789 - DNA, 99 bp, Homo sapiens
gagaacagaatgttaatgcttgatgggatgccggcagtcagagtcaaaacagagcttttggaatctgaacaagggtgctgatgagctccttctaactga

SEQ ID NO: 875790 - DNA, 99 bp, Homo sapiens
accggagcgcggaatctgggcgtccccaccagtgcggggagccggaaggaggagccatagcttggagtagggtgatttgatgaaggctgctgcaggaga

SEQ ID NO: 875791 - DNA, 99 bp, Homo sapiens
tgaggcgattccagagagcggcggaaaggataagcctcgacttagaagctaccgagttaccctaagaaagcagcgtgcagggtcaaagacagccggccc

SEQ ID NO: 875792 - DNA, 99 bp, Homo sapiens
ggggagcggggccttccacaccccctccgtgggtgtgtggggtcgggccccggctcagtggtcccaggcagctcgggtgtcggaacccccagacagttc

SEQ ID NO: 875793 - DNA, 98 bp, Homo sapiens
gctgcaggagaagatggcggtctccacaggcggctatgagaggttttcctccgagtacccagaattctgttctaaaaccaaggccctggcagccatcc

SEQ ID NO: 875794 - DNA, 99 bp, Homo sapiens
gagcagaaggatgggaggaaggtcctcctacagcacctggaaatggagatggtggcagtaccagtgagacccctcagcctcctcggaagaaaagggccc

SEQ ID NO: 875795 - DNA, 99 bp, Homo sapiens
tatcaagtaatggtgcaaagcctgaagtaatggaacttaatcgatctgagagtttatgtcatgaaaactcattcttcatcaatgaagctttagtacaaa

SEQ ID NO: 875796 - DNA, 101 bp, Homo sapiens
gagtacaagttcttctgagtaggattaagtagctgccattcctccagcgtgaaatccacagccacatcctcaaatgatatcgcgaaggtctgcagcttcac

SEQ ID NO: 875797 - DNA, 99 bp, Homo sapiens
tgttatttcagcagttggtaagcaggctgactgctgaagagttacacctggtggagccgccaccaaaatgcagattttcgtgaaaacccttacggggaa

SEQ ID NO: 875798 - DNA, 99 bp, Homo sapiens
ctggatgcaccattggctcctgtttgaaatgagcaggcactccttggagcaaaagcccactgacgctccaccgaaagctggcgcctactatccagccca

SEQ ID NO: 875799 - DNA, 99 bp, Homo sapiens
aaggaacttacgcacttaaaataattgggcagaagagaagcagtgaaggagtgcagaggcatcacctgaaaggtggccaggagccccctgaaggagttc

SEQ ID NO: 875800 - DNA, 98 bp, Homo sapiens
tgggctcaagtgatcctcccatcttggcctcccgagtagctgggaccacagggcaagtgtccagagaatggctgggatgaaagtacacttgaactctt

SEQ ID NO: 875801 - DNA, 99 bp, Homo sapiens
agatgttcagtttgcaaaatgggaaaagagtgcaaattcggaaagcacctcaagctgtttcagatacagttcctgagaggaaaaggtcaacccccatga

SEQ ID NO: 875802 - DNA, 99 bp, Homo sapiens
taaagatgatgatatccttctcaaccttgtgggatgtgaaaactctgttactgaaggtggcagtagagaagagcatcacagaagttgctcaggagctga

SEQ ID NO: 875803 - DNA, 99 bp, Homo sapiens
tgctggccgggcagaccctggattgatatcagtaaatgccattatttagtggatttggacaccatgagagaaacaccccgggagccaaaatattcatcc

SEQ ID NO: 875804 - DNA, 99 bp, Homo sapiens
cagcagactcggacgtggacgcctttttccggacaggatagagggaggaatcagcagcttggaaattcaagcacgtgatctggcgggatgggcgtttgc

SEQ ID NO: 875805 - DNA, 99 bp, Homo sapiens
gaaacagatgtttgtgcagcgagtaaaggagaaagaagccatattgaaagaagctgagagagaggtaattctgaattgctcagctctgcagagtttatt

SEQ ID NO: 875806 - DNA, 99 bp, Homo sapiens
aaggcaatgatttataccatgaaatgattgaatctggtgttatcaacttaaaagatgccacctctaagaaatgccagatctggagtaaggaatattgtc

SEQ ID NO: 875807 - DNA, 99 bp, Homo sapiens
ctgcaacctccacctcccggggagatggtactggagtcgccagtatttaccgggggccatttgcagatgaaaattttaaacttagacactcagctccag

SEQ ID NO: 875808 - DNA, 99 bp, Homo sapiens
gtgactccgcaccatcaccagcactctcacattcactcccacctccacctccaccagcaggaccccctccaccaagcatcccgacatgtatgagcgggc

SEQ ID NO: 875809 - DNA, 99 bp, Homo sapiens
ggacaggggccgcggggctccaggacggcgcccttagcgacaccatgtcaggtagcattggtgctgcagatagtcctgagaactgggagaaagtctggg

SEQ ID NO: 875810 - DNA, 99 bp, Homo sapiens
cgtaacaaccctcgcattgaccttcctcttccaagctagagaggtcagaggagatggaacttgctaaggaagaaaagtgtgaatttctgccattcctgt

SEQ ID NO: 875811 - DNA, 99 bp, Homo sapiens
cctcagcctcccgagtggctgggactacaggaatggacaatcagaccgttctggctgtccagtcattattggatggccaaggagcagtccctgatccga

SEQ ID NO: 875812 - DNA, 99 bp, Homo sapiens
caacattcatcgcagctggtgggtgtacacactgctgtttaccttggcgaggcctttcaccaagtccatgctatttgtggagaccactgatgtcaatgg

SEQ ID NO: 875813 - DNA, 75 bp, Homo sapiens
actatacaaactttgggaagctgggggagtctgtccaaaagcaagttgcagagttttcaaggcaaagatgtggca

SEQ ID NO: 875814 - DNA, 99 bp, Homo sapiens
tatgatgcccctgaagatgtgcacctagggggcggctaccccgtgggtctgaaccggacggcttttctcatttccacttgtacgtgtgcgctgcttttc

SEQ ID NO: 875815 - DNA, 99 bp, Homo sapiens
ccagagtgaacagaaagagaagtcgcttgaggactgtccaacccattccggggtctcatgaagctgggcaccgtggagcggcggggggcaatgggcatc

SEQ ID NO: 875816 - DNA, 99 bp, Homo sapiens
cgagaatgcgagagaaagagcctccgtcaccacatactgcccgaaaccatgttaatagaatgtgcctggcagctgatgttcctcttattgaaagtggaa

SEQ ID NO: 875817 - DNA, 99 bp, Homo sapiens
gatgttggagaactacagaaacctcgtctccctgggcatgatggctcatacctgtaataccagcactttgggaggacgaggaaggtggatcacctaagg

SEQ ID NO: 875818 - DNA, 99 bp, Homo sapiens
tttcttggatgaattgcttgctttggagctgctctgttaaaagcgaaaatgaaacaattgcctgcggcaacagttcgactcctttcaagttctcagatc

SEQ ID NO: 875819 - DNA, 99 bp, Homo sapiens
ggatggacttggggctagctgcggcggggctgggtctatgctccatcagcaagcactgccgactacaatagggactcgccaggctatccttcctccaaa

SEQ ID NO: 875820 - DNA, 98 bp, Homo sapiens
ccagacaacaggatcgtctcgtccaaggaacacctcatcaaaatgcagaagcagaaactgcagatgcccccgcagcccccaccgccacaggcccagtc

SEQ ID NO: 875821 - DNA, 99 bp, Homo sapiens
ccaaagtatgtcaatcaaatccatgtcctgactggcttgttttctgggcccacatctgtaaagcccatttcctccagtttgcagcgcctgtaaagctca

SEQ ID NO: 875822 - DNA, 99 bp, Homo sapiens
cagttgttgccgaagagattggactgggagggcaacgagcacaacaggagctacgaggagttggtgtacagagccagtgggccggatggagccactggc

SEQ ID NO: 875823 - DNA, 98 bp, Homo sapiens
gacggctcacctgtgcgggatggaacaaaaggtggtcagctgtagctggatgtgtgccttgaaaggctgacaagtttgccctgagtgactcacctact

SEQ ID NO: 875824 - DNA, 98 bp, Homo sapiens
accgcctcaccgttctgcccccagaactaggtctatatcgtcccccgagctgccatctttcacagtgatgacgcactcaaggaatcagcagccatgct

SEQ ID NO: 875825 - DNA, 99 bp, Homo sapiens
attcaagaagttctttcttcatcagaatcagattcatgcaatagtgattcgcctttgccagtctcatctcgtgtctgctttgttaagttccatgatcca

SEQ ID NO: 875826 - DNA, 98 bp, Homo sapiens
caacagaagtttatcaaggctgtcacacatcaagttaaatttggtcaacaaaatccacgtcaggaaataatgaagatgtttcattttcaagaccagca

SEQ ID NO: 875827 - DNA, 99 bp, Homo sapiens
gaggaggtgcgcgagaagtacaaagggcacagactccatcaagatggagaacgggcagagcacagccgccaagctggggctgcctcccctgacgcccga

SEQ ID NO: 875828 - DNA, 100 bp, Homo sapiens
agacataaactcaacagcgcggtcctgtattttcatttcagccaaaagcatcaccaagttaataaccaccttttggaagagaaggggttgagtttatgtc

SEQ ID NO: 875829 - DNA, 99 bp, Homo sapiens
acaatgaaaaaatccaacagcgcactcggattgaagatgaatatagaacccatcacacagtacaactaggaaatgaggcaagttatcctttggaaatgt

SEQ ID NO: 875830 - DNA, 99 bp, Homo sapiens
aacaggccagcaaaacactcagctgcaagtccaaagccacaagggcatggtgctgatgtgaaatgtgtagactggcatccaaccaaagggttagttgtt

SEQ ID NO: 875831 - DNA, 99 bp, Homo sapiens
ctcgctcgtcaccagcaagcttgcgggaaatgacatcagatgtaccatcactgggtccagccattgcctctggaaactctggacctggaattcaaggtg

SEQ ID NO: 875832 - DNA, 98 bp, Homo sapiens
aaagattgcttgaagaaatccatgccatgaagtataagccacccgcacttaaaaagtcaaattctcctggaactgcatcatcaggatcttcacgatta

SEQ ID NO: 875833 - DNA, 98 bp, Homo sapiens
gaaagaaaaaccacaggctaatgttccttcagctctgccatcactccctgccgggtcagggaaaattactcaaacagctttgaaatttctgggtcgtg

SEQ ID NO: 875834 - DNA, 99 bp, Homo sapiens
gctgagagcagggccccttagcctctgggtttgcgctagcagcgtaagattcttattgccaagtcccctctggctcccttcacctcatttgtctacacc

SEQ ID NO: 875835 - DNA, 98 bp, Homo sapiens
gacactccaccgcatgtagcagctgggctgaagattgctcgctgtaagcagctcatctgtgaccccagctacgtaaaagatcgggtagaaaaagtggg

SEQ ID NO: 875836 - DNA, 99 bp, Homo sapiens
cctggcctgctgggagtggctgctggctggcaaggatggagtggaagtgccggagtacgaccccagcaaagcgacctttgtgaaggtggtgccaacccc

SEQ ID NO: 875837 - DNA, 99 bp, Homo sapiens
ccccatacatacattcaaaagctcaaaggctatctggatccagctgtaaccaggaagatatttctccctcgagtggctgggaaacttggcaagagacca

SEQ ID NO: 875838 - DNA, 98 bp, Homo sapiens
tctgcgaaggccgggacccggttccccggcccacagtgggggtgtgcaaacccgagagaactgggattttctgccgtctcttggcaaaaatggcaaat

SEQ ID NO: 875839 - DNA, 99 bp, Homo sapiens
aggcaggaaaacgtggatgattactacgacaccggcgaggaacttggcaggttctacatgaaacattttctcaacacacattcctcatgaatggtctca

SEQ ID NO: 875840 - DNA, 99 bp, Homo sapiens
ctcgatgcacagggcctcaaaggtgtcatctcaacaagagcctcagaaaggatatcacaatgatgacagcaagaccaataaggaatgcaatgctcacag

SEQ ID NO: 875841 - DNA, 98 bp, Homo sapiens
tcggcgtctcgtttcatcctcacaacagccagtcatccgtccttggctcaggatttggagagcttgcaccaccaaaaatggcaaacatcaccagctcc

SEQ ID NO: 875842 - DNA, 99 bp, Homo sapiens
ccgactctcaccatcatcaagacggaaaaagtcgatctggagcttttcccctccccggtactatactggcaattgctggagaagattttgcaattgttg

SEQ ID NO: 875843 - DNA, 99 bp, Homo sapiens
tcagtcgccttcatggaatgtcttcaaagaatattaaaaaatctggagggactccaacttcaatgatgttgcccatttaatgtggttcgaaagactcta

SEQ ID NO: 875844 - DNA, 99 bp, Homo sapiens
gcctcccgagaagctgggattacagctctagcctctcggaatttgtcttcttcagtggaaaccccgagaagactgatcagttcttcagttctaaaacaa

SEQ ID NO: 875845 - DNA, 98 bp, Homo sapiens
tgaccacattcatctgggcatgcctgcagtactcttggcccatggacctgaaggagaagcacctggaaagaccacagcaagattctttcattcgtctc

SEQ ID NO: 875846 - DNA, 98 bp, Homo sapiens
atatctttggcttgcagccaacaatgggagtaaccagagagcacagagaaatgctggtgaaactggccaaacagaacaccaacaaggccaaagactct

SEQ ID NO: 875847 - DNA, 99 bp, Homo sapiens
cccggaaggcgtcgtcttctcttaaaatctttttagttggagaaggagcctacagatgggcagtagatcatggaataccctcttgccctcctaacatca

SEQ ID NO: 875848 - DNA, 99 bp, Homo sapiens
cttcctgatccatggacccgatgaacatagacacagctctttgccgagggcgtgtggtgagagtccccacagcgaccctggttcgagtggtgggcactg

SEQ ID NO: 875849 - DNA, 98 bp, Homo sapiens
tcagcgccgaggctgggctgaggcgccgcggtaccatgaggcgccggataaaagaatcagagtgtctcaacccttgacaagaggaccaagtgccttta

SEQ ID NO: 875850 - DNA, 99 bp, Homo sapiens
tatttgctaaatatggagaaccaggagaagtttttatcaacaaaggcaaaggattcggatttattaagcttactcagaaccgtgctgcatactatcctc

SEQ ID NO: 875851 - DNA, 98 bp, Homo sapiens
tcctgggaggccagccattcccaaatgccccaaggatgaagaacggagacggtactccaaagattcaggtttactcacgtcatccagcagagaatgga

SEQ ID NO: 875852 - DNA, 99 bp, Homo sapiens
ccagccaggcgtggaggaagaggcattgaggactttccttacctgtttttccagctcacccactgccagcagaggcaaaaatctccagccctacagaga

SEQ ID NO: 875853 - DNA, 99 bp, Homo sapiens
caacatcacattttcatgcatcattttttcaaaataggatgcagaggaagatgaagatgatggcgagttcagtgatgattctggggctgaccaagaaaa

SEQ ID NO: 875854 - DNA, 99 bp, Homo sapiens
ctcccaagtagctgggattacagggatgctatactggacttccctactctcatctgctccagccccctgaccttatagttgcccagctttcctggcaat

SEQ ID NO: 875855 - DNA, 99 bp, Homo sapiens
ctgtaacgcatctgccagctgggcagtccccttagctgtgatctgattctggataagcctgcccactgctgctttcagattcccaactggatattcact

SEQ ID NO: 875856 - DNA, 99 bp, Homo sapiens
atttcaacgagaaggcgatccataaggaggttggtagtcatatcactggcggagacatttatggaattgtcagtgagaactcgcttatcaaacacaaaa

SEQ ID NO: 875857 - DNA, 99 bp, Homo sapiens
ggcaggatggctgcgttgacacgtcttatttaatccacatcataggttatcaatactctggctgaccatcatcatcgtgggactgactttggtggaagt

SEQ ID NO: 875858 - DNA, 99 bp, Homo sapiens
cagggcttcctggtttacctggcactcctggacaggatggattgccagggcttcctggcccgaaaggagagcctctcaagactgcagtgcagatgacga

SEQ ID NO: 875859 - DNA, 99 bp, Homo sapiens
ctacgacgtggccagacatggcattctgcaggtggcagttcatagccctgatgaagcaagttactctgctctcctaataaatgcaagaaaatgaccttg

SEQ ID NO: 875860 - DNA, 99 bp, Homo sapiens
accctcccagccacctctgaagttgccaggcttcccaacattcttgtctgtgctgtcctgcagggtgagtacctggggcaaaaggtggccgtgaagaat

SEQ ID NO: 875861 - DNA, 98 bp, Homo sapiens
gatgaccttcagtgtgctgctcaaaaacagaccgcaaaccaagggccaaaatttaaagaccgtcggctacagatatcatggcacaagcccaaggtacc

SEQ ID NO: 875862 - DNA, 99 bp, Homo sapiens
aaacatcaaagaggtctagcaaagggaactctaatgatccaggacaaagaagttaccctggagtatgtatcaagcctggatttttggtactgcaaacga

SEQ ID NO: 875863 - DNA, 99 bp, Homo sapiens
aggagcctcacatgctgttcgatcgcatccgcttggtggtgaccaagggcccctctgctgacagtgtatacacaaaagtgaggctccttgaaggggaga

SEQ ID NO: 875864 - DNA, 99 bp, Homo sapiens
gtttacccgcctggtttcattgcgaagtttttcatctgtgttctccactaggttggcaaggtcgtcaattatctctttgcaggccttccggtgggtgat

SEQ ID NO: 875865 - DNA, 99 bp, Homo sapiens
aagctgccagaggaggagccagaaacagatctcagccccgggctcccagctgcccacctcatagatttcgatggggtcctctatcatatttcaaatcct

SEQ ID NO: 875866 - DNA, 99 bp, Homo sapiens
caaagtgctgggattacagacgctgttataatggattagtttatgttctgaaaagtaatagtggagaaaaatactggatgtttactactgaagatgctg

SEQ ID NO: 875867 - DNA, 98 bp, Homo sapiens
cagtgacggaggagcttgtaccaccgaccactaaggcttttcttcctacgatgctggagattaatcatggtcatattgtgacagttgcaagttccttg

SEQ ID NO: 875868 - DNA, 99 bp, Homo sapiens
gtggattaatttatgatgggttatacttttgggatcttctaagctcccatgagcacatcctcaacgccccaatgagcagagagccgtccttaatgagct

SEQ ID NO: 875869 - DNA, 99 bp, Homo sapiens
cggggcggccgggggctcagagatccaagtgcgcgccctggcgggtccggaccaagcccttgaagataaggatggtcaaacaaaataatatcatacctg

SEQ ID NO: 875870 - DNA, 99 bp, Homo sapiens
cctggacaggatggattgccagggcttcctggcccgaaaggagagccttatgcaaccgaggatggacttatacacacaaatgaccaggccaggactcta

SEQ ID NO: 875871 - DNA, 98 bp, Homo sapiens
gaaagtacaattctattgcacatcaatgatatcatcccaggcagctggctaagagtcttgggcaggctggtgaaattgagcctgaaacagaaggaata

SEQ ID NO: 875872 - DNA, 99 bp, Homo sapiens
acaactccgcagcaaacaactccgcaaacgaaaaagaacgacatgatgcaatcttcaggaaagtaagagggactcagaattcatgattgaagaaatgca

SEQ ID NO: 875873 - DNA, 98 bp, Homo sapiens
tgccgagcctcggtcccggcccccatcctccccgccccatcggttgttgtctgggcggtattctaccttgtaaatactgttatttgtatatactgtaa

SEQ ID NO: 875874 - DNA, 99 bp, Homo sapiens
gcctcccaaagtgctggaattacagccaccacaagggcccgggccaccaggaagagcctgctgcatgtcccctatggagacggcgaaggggagaaagtg

SEQ ID NO: 875875 - DNA, 99 bp, Homo sapiens
ccggttcttggtgggatctgagcagaccttgccaccatggaagaaagagtacaaagacgatattatgaaaagctgacggaatttgtggcagatatgacc

SEQ ID NO: 875876 - DNA, 99 bp, Homo sapiens
ttaagtacaaacaaaaaccaactgaagcagctgacagagaggttctacgtggcttcctcccggcagctgaagcgcctcgagtcggtcagccgctccccg

SEQ ID NO: 875877 - DNA, 99 bp, Homo sapiens
caccagccagctgcatttgttgtcctggaagtcattgccaactctgccagtcacactggggtccccagagaagtcaagagcctctgggatattgggcac

SEQ ID NO: 875878 - DNA, 99 bp, Homo sapiens
tggcagtggctttcctcgcatccagcaactcttcaccagcttgggcctggaacaggacaggcaggggcccgaagaaagtgatgaatttcagagctgatg

SEQ ID NO: 875879 - DNA, 99 bp, Homo sapiens
ctcctgagtagctgggattacaggtgaaacagtcgcaaatggaattccaagaaacattctatgtaagtcctggctttgaaatactttgtcatcctaaga

SEQ ID NO: 875880 - DNA, 146 bp, Homo sapiens
gaggagtccacctggggctcccctgacagccacctgcccactttgtgatcagagccgtgttcggggagtctttcagactgtgccctgtccacggtgcctcctgcatgtcctgctgccctgagctgtcccgagctaggtgacagcgt

SEQ ID NO: 875881 - DNA, 99 bp, Homo sapiens
aaggcccagacatatcacttggtgaccaagaatatggcccaggtgaccaaagccctggacaaggccctgagcaccatggacctgcagaaggtctcctca

SEQ ID NO: 875882 - DNA, 99 bp, Homo sapiens
ctgacccggcgagcggagccggggctggagagcggcgaccactgcggatctcggagctaagcttgtctgctggatccctgcagctggagcgcaaaagga

SEQ ID NO: 875883 - DNA, 99 bp, Homo sapiens
gggcaagctccatcatgccgatactgcatggaaatttagtttgcctagcctgcatactagctgacccatcacaaatgattttctttaggattggtccaa

SEQ ID NO: 875884 - DNA, 98 bp, Homo sapiens
cagtggatataagtgatttggccaccaaactcctggacagttggaaagacctaaagagccaggctgaggcgcactacaaaggtaatcgccacgcccga

SEQ ID NO: 875885 - DNA, 98 bp, Homo sapiens
tggacacggcatgatgttcgtccgcaacgattgcaaggtacatgtactgggcagattggggtgagacgccctggatcgagcaggtggggatggacgac

SEQ ID NO: 875886 - DNA, 99 bp, Homo sapiens
tcagagctacatcaggaagagaacagcggaacatgaggcagcacagcaagagacagggcagggcattgttcatgcactgaccgacctcagcagccccgg

SEQ ID NO: 875887 - DNA, 99 bp, Homo sapiens
ggactatcgggagaaagtggagtccgagctgagatccatctgcaccacggtgctgatcttcccagacccgtcagattttgaccgctgctgcaaactgaa

SEQ ID NO: 875888 - DNA, 99 bp, Homo sapiens
ctcggtcccggcccccatcctccccgccccatcggttgttgtctgggcgggtcctcagaatggttggaatgaccctccagctttgaacagagtacccaa

SEQ ID NO: 875889 - DNA, 99 bp, Homo sapiens
agtgagcttcagcaggaccaattaattcagaactatcattaattattccaccagtgtcatgggtgaggtctgcaggatccaaggacatcttggctaccc

SEQ ID NO: 875890 - DNA, 99 bp, Homo sapiens
ccccgcagctggtgccgacgtggagccgcaaaagaaacgccgccgctgattggccatacgttcccattaggccccgcttgaacctgggaggcggaggtt

SEQ ID NO: 875891 - DNA, 75 bp, Homo sapiens
tccaggagaagctttgaaggctgtgaagcattagtgccagcagtagttcccaagggctgtctcagccatccaccc

SEQ ID NO: 875892 - DNA, 98 bp, Homo sapiens
cttggataagctggagtctattcctggattcaatgtcatccagagcccagagcaggtatcgtgatttccgatacccacctggacacccccaggagtat

SEQ ID NO: 875893 - DNA, 99 bp, Homo sapiens
ttcccccacccccgactcgggcttggcgcggcggccagaggaaccccgaggtttggtgcacctcgatttggaggaagtagggcagggcccttatctgga

SEQ ID NO: 875894 - DNA, 99 bp, Homo sapiens
acaactggaagcagaacctgcgggccatctaccagtgcttcgtgtggagcggcacggctgaggcccgcaagcgcaagtgagaagcgccaccttcaagtg

SEQ ID NO: 875895 - DNA, 99 bp, Homo sapiens
cttccagtctccatgttgtagatccatagttcttctctaggcagataaaagtcatataatcctctgacttgattactctcagcctcccaaagtgctggg

SEQ ID NO: 875896 - DNA, 98 bp, Homo sapiens
gatggtgaaacttaagtggggaatggagtacaagggctatctggtatctgtagatggctacatgaacatgcagttcgtcccactgattcaaatgtcag

SEQ ID NO: 875897 - DNA, 98 bp, Homo sapiens
ttcagaagactttaacatgggctcttcctctagcagccagtatactttctgtcagccagaaactggtagatgacattaatgctgataagaatatctct

SEQ ID NO: 875898 - DNA, 99 bp, Homo sapiens
tgctgttgtgacatctcggagtgaggatgatgtgagtcatcatccccctgctgctgcgcaccatgctgagtccaaaaatggctggacattgcgtcagga

SEQ ID NO: 875899 - DNA, 99 bp, Homo sapiens
tgtctgctgatgaagacctcaaactttctgatcttttaaaatattacttaagagaatctcaagctgctaagattaagcctgatcaagatgacaacctcc

SEQ ID NO: 875900 - DNA, 99 bp, Homo sapiens
gttaaacttcagcgacaactgagtcaggatgattgtaagttatggagaggaaacctggccagctctctatcggcctttggaggtgagaagtggaaaaca

SEQ ID NO: 875901 - DNA, 100 bp, Homo sapiens
agtccagacagtctaccagaattagaacaaaatctgtcttgcctttgtggaggaagggctgaatcaggatatgattgtccagcacactttgttcttgtcc

SEQ ID NO: 875902 - DNA, 99 bp, Homo sapiens
gtcaatggcctctttcactgcctcggtcactttccctggagaagcctaaaggatgatttacaggtcagtatcaaaccaggccagctgattgctgtcacc

SEQ ID NO: 875903 - DNA, 99 bp, Homo sapiens
aagcgatcctcacccccagagtgaagaccattgcccggggcttggttgggggcctcaagaacacgctggttcatagacagagtctcactctgtcaccca

SEQ ID NO: 875904 - DNA, 99 bp, Homo sapiens
gggataactgttggatttctcaactaccacagggctagcttctacggattctggtcgcagtgcgactggaaaacctgtggcttgacgacctggttacag

SEQ ID NO: 875905 - DNA, 99 bp, Homo sapiens
ggctgcacgtctggcgtcacacgtctctcccgcacagtgctcaggtactggcagatgtaatccaccatctctctccctgggagacggaggttgcagtga

SEQ ID NO: 875906 - DNA, 99 bp, Homo sapiens
aaactttatggtgaaaagtttggtacggagaatgtcaaaataattcaggattcagacaaggaagttattgccagcgccattttaaacaacaaaatacca

SEQ ID NO: 875907 - DNA, 99 bp, Homo sapiens
ttccagctgcccgcacgccccgaccttccatcgtaggtggtggacataatgcgagttaacgtggacaaggttctggaaagagaccagaagctctctgag

SEQ ID NO: 875908 - DNA, 99 bp, Homo sapiens
gttagaattttcagatttgtaactggaaaactcatgagagtctttgatgaatcactaagcgataatcgagttcacattggaccaaaaatggaaattcgg

SEQ ID NO: 875909 - DNA, 99 bp, Homo sapiens
agcaacgagacaaccacgacctcagaaatgacgctcctctcctcccagtcttcatcactggtggccccttctgggtctgtgtctgccgaaaatccagag

SEQ ID NO: 875910 - DNA, 98 bp, Homo sapiens
cgaatctacaaagatatgtttttggactctaatttcacggacactgaaagcagagaccatggagcttcttgtaaataacagatgcgggtgaaagatcc

SEQ ID NO: 875911 - DNA, 99 bp, Homo sapiens
catgaactcctgctggagccacccaagtttccaacatggctagatccatcagaaactgaagccgtggagaacgctctcggggcctttgccacttcttgg

SEQ ID NO: 875912 - DNA, 98 bp, Homo sapiens
aaataaatcttctcaccttggaaaagtatctacatgaaaatgggattgtccatcgtgatctcaaaccagagaatcttctttatgcaactccagcccca

SEQ ID NO: 875913 - DNA, 100 bp, Homo sapiens
atatagcactagattccaagctgacgcagcatgatgattttccagaacagatctgtcattgtataaaactgctgagatctctacatttaatagtgctata

SEQ ID NO: 875914 - DNA, 99 bp, Homo sapiens
aggacataaggaactagtcacagtgttgctgcaacatagagctgacattaactgtcagagactaaggtgtcagtatgttcttcaagctgctctgctcct

SEQ ID NO: 875915 - DNA, 99 bp, Homo sapiens
gaaaatggatttaacatctacgtcagtgataaaatctccttgaatcgctctctcccagatatccggcacccaaacaccaatgttgttatgaattattca

SEQ ID NO: 875916 - DNA, 99 bp, Homo sapiens
agaggtatcactactttttagtgctggactttgaggccacgtgcgacaagccacagattcatcctcagatcgtcagtatttaaacagatcacatcatgc

SEQ ID NO: 875917 - DNA, 99 bp, Homo sapiens
tgtgaaaatgaagccagaccgaggctacccacctttctgttctgagacccctcaagagacatataagaaggtgatgaactggaaagaaactttgacttt

SEQ ID NO: 875918 - DNA, 99 bp, Homo sapiens
catcagagagcattttactactgagctgcaaagggagttctcgctcttctgaaccagctaaccaaagttttgagagctgtgttaagataaattcacaca

SEQ ID NO: 875919 - DNA, 99 bp, Homo sapiens
gggagattccggcctggagctcccagggccgagggtctctcctcagggatgacatcatccgtccacctccttgtcttcaaggaccacctcctctccatg

SEQ ID NO: 875920 - DNA, 99 bp, Homo sapiens
atttgtagcaaggtatgacagaagagagccagtaatgcccatatctccagctgccagggagtggggcaaatttgccgtagagacggggtttcaccgtgt

SEQ ID NO: 875921 - DNA, 98 bp, Homo sapiens
cccagcacctgcggagggagcgctggtttctgctttgggacaaccatacatctaattccttaaagtagttttatatgtaaaacttgcaaagaatcaga

SEQ ID NO: 875922 - DNA, 99 bp, Homo sapiens
taaaaatacaaactggaaaataaagattacagagaaaaaaccaacaccttcctgtgcagtcctgttggaatttgtggactgggtggttatggatcagga

SEQ ID NO: 875923 - DNA, 99 bp, Homo sapiens
aagatttctcgattggatgctgagctagtgaagtataaggatcagatcaagaagatgagagagggtcctgcaaagagatgaaatctcaccatgttgccc

SEQ ID NO: 875924 - DNA, 134 bp, Homo sapiens
tgaagatcattaatgaagtaaagcccacagagatctacaaccttggagcccagagccacgtcaaagttacatcatatgaagaaatcattgaatgtgctgaccaaaggcttgcaatatcccactcccagattgca

SEQ ID NO: 875925 - DNA, 98 bp, Homo sapiens
tgtccttctttgtggagagcaagatcttgcaggagagagagttactgcctgtgaagaaatttgaaagtgagattctggaagcaatcagccaaaattca

SEQ ID NO: 875926 - DNA, 111 bp, Homo sapiens
ccaagcagcaccagcgttgacgtgggtgggctgggatggcctagaggccatagcaactccattcacaatcaccgtgttttgcgtcatccccttatcacccaaaggcacgct

SEQ ID NO: 875927 - DNA, 99 bp, Homo sapiens
ccgttcagtatatactaactatggtggatgatatgctgcaggtacaaacccgtagtgctgatgaaccaatgacaacatttgttgtctgtaatgaatgtg

SEQ ID NO: 875928 - DNA, 99 bp, Homo sapiens
gcaaggagagaattcagctccagttcaaaagcctacaaaatctgagactgtcattgcttttataaggcaaagtgtttcatggatttcaaagctggaggc

SEQ ID NO: 875929 - DNA, 99 bp, Homo sapiens
gaccgcacgcctcttctaccgggcgccccacgggccgaagccggtgccagcgagatttcagattcctgtaaacctctaaagaaaaggagtcgcgcctca

SEQ ID NO: 875930 - DNA, 99 bp, Homo sapiens
gccagaggagattgcagaccaagaattagcagaagcccttcaaaaatcagcagaggatgcagatgccatggacaatattaccaggcagaaccaattcta

SEQ ID NO: 875931 - DNA, 99 bp, Homo sapiens
cagagattgtctcggctcttgagtacttgcactcgcgggacgtggtataccgcgacatcaagcctggtgacagagtaagactccatctcgaacaacaaa

SEQ ID NO: 875932 - DNA, 99 bp, Homo sapiens
ttggtgcactgcaacctcatctcatcagctcaagccatcctccctaccttagcctcccgattatctgggaccacaggtcagaagacatgtcttcatcta

SEQ ID NO: 875933 - DNA, 99 bp, Homo sapiens
catagttcaggcgatcatgtcaaaaaagtttcttttaaaggaattgaaaattctcaggcaccaaaaattgtcaggagctatcgaaaaaccttgaactga

SEQ ID NO: 875934 - DNA, 98 bp, Homo sapiens
acagaatctcttttcttttgattcagaagttcagggaagtttaattagcattgacagcacctgtacagagatgggcaattttgacaatgctaatgtca

SEQ ID NO: 875935 - DNA, 99 bp, Homo sapiens
ccggcagggggagagcgccaccctcagataacagacgagtacctttggaaaggtcacgctctcgccacaatggagctatctcatctaagtgattcctga

SEQ ID NO: 875936 - DNA, 99 bp, Homo sapiens
cacgcagtgacgagcggccgaagcagctttgcgccaagggaagagatggtgttgagtggaaaatacaaatctggggaacaaattcttcgtttggccaat

SEQ ID NO: 875937 - DNA, 99 bp, Homo sapiens
gggcgtctgatcctagcgctccaccgccagatcccctcagcctcttgcaaacggaggagcaggcctgcacagggtccctggcgttcgctctctcgtctc

SEQ ID NO: 875938 - DNA, 99 bp, Homo sapiens
ggacatgatccaggaagagcagtaagggactgagctgctggtatcacagatgtcgtaagaatctgaatcctccaaaagacagatgatgcggaggttcct

SEQ ID NO: 875939 - DNA, 99 bp, Homo sapiens
ctcttctgaagtagcggacgcctggttagcttgacattctatgcttcacacccagattgagtttcccatgaacatgactcgttctcctgagggagaacc

SEQ ID NO: 875940 - DNA, 99 bp, Homo sapiens
atggtctggaggctggtcctgctggctctgtgggtgtggcccagcacgcaaggatcttctgcaggacaactggtccttatcacagccagggtgaccaca

SEQ ID NO: 875941 - DNA, 99 bp, Homo sapiens
ccctttgcacctcgcagctaaaaacggccacatcgacatcatcaggtcattgattacaacggggaacgcacgctggatggttttaagaaattcctggag

SEQ ID NO: 875942 - DNA, 99 bp, Homo sapiens
ggttgatccaggctttcagcctggcctgcacagtcaaaggctatcaaatgcgtacaggtttgcagattccgccagcagcacagcaagctctacagatga

SEQ ID NO: 875943 - DNA, 99 bp, Homo sapiens
catcttttatacactcttagtgctgtccagaacttcagaggacgaggaaacaatcgtggctacaaaaatcaatctcagggctacaaccagtggcagcag

SEQ ID NO: 875944 - DNA, 98 bp, Homo sapiens
ctccagcagccgggaacagctgggaaatgaataagcgtctaacagaagaacaagccagaaaaacatttgagagagccatgaaactggaacaggagttt

SEQ ID NO: 875945 - DNA, 99 bp, Homo sapiens
ccttgtgaagatcattaatgaagtaaagcccacagagatctacaaccttggagcccagagccacgtcaaagccaagaagcttgagagaagaaaaatttc

SEQ ID NO: 875946 - DNA, 99 bp, Homo sapiens
ggccttctggacaagcatgggaagcccacagacagcacacctgccacctggaagcaggagtatgttgactacagatctaaatgagtgtggcctgaagcc

SEQ ID NO: 875947 - DNA, 98 bp, Homo sapiens
atgagcgatgttaccattgtgaaagaaggttgggttcagaagagggctaaaccatttacttctaaagtgaaacaaatgcgattacatagagaagactt

SEQ ID NO: 875948 - DNA, 116 bp, Homo sapiens
gatgttccctgcaattaccatctcacctagggcggcggggcaatctgcaattccatgaccaggttttctacaatggaaacacacctgttcctttcttgcacgtataggtgagatgg

SEQ ID NO: 875949 - DNA, 99 bp, Homo sapiens
acagatgatacgtttgatccagaacttgcagcaacaataggtagatgatgagctggagatcaaggcctactatgcaggccacgtgctgggggcagccat

SEQ ID NO: 875950 - DNA, 99 bp, Homo sapiens
agattgaagcatgctctggaaatgttcccagaacattgcacgatgcctcctggttactataacaacagtaccaaggtggctgtgaaaaccctgaagcca

SEQ ID NO: 875951 - DNA, 99 bp, Homo sapiens
agccatgtgactgtagtccacatggagctctcagcataccgtgcaacaggactgtagaagcggccaggaagaaaaccaccccctcttaaggttgttttt

SEQ ID NO: 875952 - DNA, 99 bp, Homo sapiens
tgtgatccaggattatccactgatttatgaaattattttttgggaaaacacttcaaatgctgaggaaactatggtccaggaggcagtggaggaagtggg

SEQ ID NO: 875953 - DNA, 99 bp, Homo sapiens
tcctccgcctccaaagtcgcgccttatgtttgatcatcggccaaggtcctggcgagaactgcctctgcggctagctgattttggggtacttcataggaa

SEQ ID NO: 875954 - DNA, 99 bp, Homo sapiens
tgctggcaaaggggacgtcccaacgaagagaccacctgtccttcgagcaggttggaagtacaagcagatgtacagaaagaacggtacagtctaagtgga

SEQ ID NO: 875955 - DNA, 99 bp, Homo sapiens
ggggttgttctcataataattcagatggagaatatatggctggacagctagctgcttatggctataaaattacagaaagatgaggtctatcttaatctg

SEQ ID NO: 875956 - DNA, 99 bp, Homo sapiens
taatggcaaataacttttccttggagagtcataacatatcactgactgactctcaaagatgaagacttttgtaaacgtgtatctttggctactgtggat

SEQ ID NO: 875957 - DNA, 99 bp, Homo sapiens
aagcacatgtttcagtgccactcacataagaagtgcccggcagggaaaggaattcttcgaacaatacgtgcctccaacaatgcccttgcagatcttgtt

SEQ ID NO: 875958 - DNA, 99 bp, Homo sapiens
cctgggcaacagagtgagactcttctaacgatgacgatattcgcgctctcggtcacgctctcggtcacggtctcggtcacgatcccggtgcctctctcg

SEQ ID NO: 875959 - DNA, 98 bp, Homo sapiens
ccgagtcttctttctgactcaatgttgcattcagccataaattctcaaaagcatagaatgtcaagctaaccaggcgtccgctacttcagaagagtgta

SEQ ID NO: 875960 - DNA, 99 bp, Homo sapiens
cagaaactagcaccagccccaaatttcggttctccaaaaaatgtggaatcctttgcatctatgctgagacattctcctcttacacagatgggacctgca

SEQ ID NO: 875961 - DNA, 98 bp, Homo sapiens
cccactccaccccacgtccctcctgcagcccagctccgcccgcagccgccgcggaccaggcaggaacttgctactaccagcaccatgccctaccaata

SEQ ID NO: 875962 - DNA, 99 bp, Homo sapiens
ccaggctgtcctggccaacctgctgctggaggaggataacaagttttgtgcagattgccagtctaaagtgcctgatttgagatggggtcccaggtctcg

SEQ ID NO: 875963 - DNA, 99 bp, Homo sapiens
tctcctggtccagctctcaggacaagaacaaagtgtgctgttggaaaatggatataccttatttgattatgatgttggactgaatgatataattcagct

SEQ ID NO: 875964 - DNA, 99 bp, Homo sapiens
gatacagaacaaacaccagaaggacatgaacgagaagtgtgccatcggagttacccacttccagctgctggcataaccttgacaacagattgccttgaa

SEQ ID NO: 875965 - DNA, 99 bp, Homo sapiens
caggtccctctctctgtccccggccgccatggagcagccgccggcgcctaagagagctaatgtcaaaccccgaaattccacaccacctagtttggcaag

SEQ ID NO: 875966 - DNA, 98 bp, Homo sapiens
ttggggtaaaattgctacctgcatttcatactccctctggaataccttgggcattgctgaatatgaaaaggaaatctactttcttcaatgtgttaacc

SEQ ID NO: 875967 - DNA, 98 bp, Homo sapiens
atcatttcagcaacaaggaaataaattagtggcagagtaagggtgacttgacttaattcagtgcacaaatgagatgaatgtgaacatcccacagttgg

SEQ ID NO: 875968 - DNA, 98 bp, Homo sapiens
agtactggaagaacttaacttttgtggcacctatctatggtgcagatattaatgggagcatatatgatgaggtttaccgacaagactgtgaaactttc

SEQ ID NO: 875969 - DNA, 102 bp, Homo sapiens
attagctgctgccgcgccttggagtccggagtaacttggccaggctggccccgagcggaactggagaaagctgagggggttgggcatgttccaggatctgtc

SEQ ID NO: 875970 - DNA, 99 bp, Homo sapiens
ttttaccttctaccattgatgaaacttggcctcctagcccttatcaatgaagaaagccattttcctcaagccacagacagcaccttattggagaagcta

SEQ ID NO: 875971 - DNA, 99 bp, Homo sapiens
aacttcatgcatcagggaaatgcccgattccagcccaacaaacctttctatactcaagagtgcagcagctgccccgagccccgtgcttggcaacattcc

SEQ ID NO: 875972 - DNA, 99 bp, Homo sapiens
ccccagaatggaacagaactccacgtacccagttatcatgacccaccttgttcagctcgcgtctcattttctcaggcacaaactgatcgaggtagcgtc

SEQ ID NO: 875973 - DNA, 98 bp, Homo sapiens
ggcatttataccccagtaccagtgaggatacattgggaattacttggcaaaggaaactaaatatattttgccaactttggaaaaagaattattcttgg

SEQ ID NO: 875974 - DNA, 98 bp, Homo sapiens
ttatgaccaagagctgaacaagaaacctgtgaaggtcgaaacagctgcgtttcctgttttaatgttagcgttgttaatactacctgcttttggataga

SEQ ID NO: 875975 - DNA, 100 bp, Homo sapiens
tattaccatatggcccatggaaaagatttccgaccactatcaaggacaggcctttcaattcctctagatgcaaaatcttttccatgggccatatggtaat

SEQ ID NO: 875976 - DNA, 98 bp, Homo sapiens
gaaactttagagaagacgttcatatcattgtcttccacagatgtgtcaccaaaccaggtttttcgttggaatatacgttgcacatttatggcgattct

SEQ ID NO: 875977 - DNA, 99 bp, Homo sapiens
ggtgttgataaaccggtccctggtggagcgaggccttgcccagtctggcatcctgcacttgctgccctctgacacctgggaagatggccggcccgtgga

SEQ ID NO: 875978 - DNA, 99 bp, Homo sapiens
tggaacccgaagaagaaaggattcgttacagccagagattggtaatggtaactcgggatttgaaggacagagtcgctatgtaccatcctctggaatgtc

SEQ ID NO: 875979 - DNA, 99 bp, Homo sapiens
gaagacatgctctacagtgctcagtctttgaggtgctggtctcagtgtcagtgataatgaatctggtcaaggcagccaggaggggggcaccttgactga

SEQ ID NO: 875980 - DNA, 99 bp, Homo sapiens
gagagggggagcgtggagcctccgaggccgaggatgctgggcagttttatgctaaatataaagaaacaagattgaaggaaaaggaagatgcactgacta

SEQ ID NO: 875981 - DNA, 98 bp, Homo sapiens
gagcttctcagaagacagagggttttcttttgagctgattggggccctggtcctgtctgtgggcatctatgcagaggttgagcggcagaaatataaaa

SEQ ID NO: 875982 - DNA, 99 bp, Homo sapiens
tgctctgcgtcatcaaagacaccaaactgctggtgttcatgcgcgccctcttccactacaaccctcgggaggaccgggccatcccttgccaggaggcgg

SEQ ID NO: 875983 - DNA, 99 bp, Homo sapiens
ccaaactagctggaaacccatttccaatcagtcatgggaccagaagtttacactggaactggacaggggcacaggagctgcaagttttgacgaatttgg

SEQ ID NO: 875984 - DNA, 99 bp, Homo sapiens
ggccttctttcagccaacagacattcactcatgacccggatgcagagtctacagcctgacccagctgcccgctatcgcaatgtgttggaggccctctgg

SEQ ID NO: 875985 - DNA, 99 bp, Homo sapiens
acggacgctggcatagcacagcctgcgagtcatttctgcaaggtgccatttgtcatgtgccacctggaatgctccaaaatgggaagaagtttgattcat

SEQ ID NO: 875986 - DNA, 99 bp, Homo sapiens
tgccaagttgaaaatggacgagtaatcgcctgctttgattcattgaaagtactccttccaggatgaggaggacatgttcatggtggtggacctgctcct

SEQ ID NO: 875987 - DNA, 98 bp, Homo sapiens
ggaagtcgtgcacgaacaccaagattattcttggagaaaccctgtctgtttactgtaaccttttgcactcaaattcctttatcaggaataactacata

SEQ ID NO: 875988 - DNA, 98 bp, Homo sapiens
atggagagaaaattgtggtccagggagagcctggggacgacttttacatcatcacggaggtggggtggaagacaacccgtgagtattacaccttcatg

SEQ ID NO: 875989 - DNA, 98 bp, Homo sapiens
acaagattcctttgcagttcacccttggaggttcttacgtctgttgctagattatcgtccaaaagtgttaatgcccaagtgactgacatcaactccaa

SEQ ID NO: 875990 - DNA, 99 bp, Homo sapiens
ggagaggagagcgagtcgggtgccactgggcttgagagcgcaaaagatgcaggaatctcccatgcacttgtgagttgtaagctgcctaaagctacgtcg

SEQ ID NO: 875991 - DNA, 98 bp, Homo sapiens
gacaaggtgtgcagacacaagtacgagctgatggagccactcatccggcagcgccgagagcaaagccgtcgagatgacctggagagcctgggctacgt

SEQ ID NO: 875992 - DNA, 99 bp, Homo sapiens
ctcccgagtagctgggactagaggctgaggctgaggtggcctccttgaaccgtaggatccagctggttgaagaagagctggaccgtgctcaggagcgcc

SEQ ID NO: 875993 - DNA, 98 bp, Homo sapiens
acggatcagcgaaccaaagctgaacaaggcaactgttcaaccaggagaaaagacagcaatggaccgaggaaaggcagcaacaggtggaagctgttgag

SEQ ID NO: 875994 - DNA, 99 bp, Homo sapiens
cggcatctagtctttccgcttcttgaatttctctctgtaaaggaggtattgttgcagcatctggcagtgagactgaggatgaggacagcatggacattc

SEQ ID NO: 875995 - DNA, 99 bp, Homo sapiens
ggagtgaagctgcagaccttcgcgacagctcagcagctcctcctcctatagtggggacatcagcaggcaccacaacagcaccgcagaactgcagaaagc

SEQ ID NO: 875996 - DNA, 98 bp, Homo sapiens
tagaaaaacactatctcttctatgacggagaatccgtttcaggaaaggcatttattaatacagcaaaagaaatttatgaaaaaattcaagaaggagtc

SEQ ID NO: 875997 - DNA, 99 bp, Homo sapiens
gtcatttctgttccgcacaggcctgctgaactgggtgctttatataggctgttcgggggtcttgtctggattttggttgcctcctccaatgttcctcta

SEQ ID NO: 875998 - DNA, 99 bp, Homo sapiens
gtaggcactgccatggcccctgtgctcagtaaggactcggcggacatcgaggccccttcacagatgtagtcactacaaatcttaaattgcgaaatccat

SEQ ID NO: 875999 - DNA, 99 bp, Homo sapiens
gcaaggatgctgttggcctgggtacaagcattcctcgtcagcaacatgctcctagcagaagcctatggatctggaggtccagggagtcggtagtaaggg

SEQ ID NO: 876000 - DNA, 99 bp, Homo sapiens
tctggaaagatgttagaattgaagcctataatatttgtcacctgaactacttcacattttccccaatatatggtggattctccacagttttcctcgtgc

SEQ ID NO: 876001 - DNA, 99 bp, Homo sapiens
gggagaaggcactgtcacaggagaactacacaatgatgaatgagaacagccacatcatcctgtgtggtcaaatttctcagtacaacaaagatgtgcctt

SEQ ID NO: 876002 - DNA, 99 bp, Homo sapiens
gtccagttactctaacaagtctggaggtagttgatgtcacttggcgatattcctgcaaacatgaagaggtgattgccagaagaactaaggttaaagaag

SEQ ID NO: 876003 - DNA, 99 bp, Homo sapiens
ctcttgaatatctttttctttggcagcaatggcatacagcctggctgggctcagtagtcctcggaagagtgaagaaagctgggtgctttgcctcgtctt

SEQ ID NO: 876004 - DNA, 112 bp, Homo sapiens
taacgagcggcggcggcggcagcgggtcttgggtcctccgagagcagcagcgctggattttcctctacgtgcttcagtcttctctacacaaagagctgcaaaccaggtcttt

SEQ ID NO: 876005 - DNA, 99 bp, Homo sapiens
tggggcttcatcacatcgggcagctctggcgggctggaaaacggctcgatgcacagggcctcaaaggtgtcatctcctaactgtggagccctggtttta

SEQ ID NO: 876006 - DNA, 98 bp, Homo sapiens
gcgtggagacccgtctgttatttctccgctccgggaattctgaagttctgggcctttctcagaagactgtaatgtacctgaagtttctgaaatattgc

SEQ ID NO: 876007 - DNA, 99 bp, Homo sapiens
tgtcttttatggggacaagttctatctacaggggctttgttatgcacctaaagccatattggaagctccagaagaaagagcaccccccggaagtcagca

SEQ ID NO: 876008 - DNA, 99 bp, Homo sapiens
tgcaagtggttgaagaaacattgtccgaatcagtatcagatctacagtgagtcattcaaacagcatgacataactgattattcaggacagaatattcaa

SEQ ID NO: 876009 - DNA, 99 bp, Homo sapiens
gcacaaaaacggtttcaacaagtagcacgcaaggggcctcaaatctgaccctatcggaaactcaaaatggagatgtatctgaagaaacaatgggaagta

SEQ ID NO: 876010 - DNA, 99 bp, Homo sapiens
aaataatttacttagccgggatgatgaagatggagatgatggggatgatacagccagcgaatcttatttgcctggagattactgacagccctgtcctag

SEQ ID NO: 876011 - DNA, 99 bp, Homo sapiens
ccgaaataaattcagggaccccatggatgggatccgaaacgcccaggcgaaaatatctcagagagtgcgtccctcactgcagaatttccccaggctcca

SEQ ID NO: 876012 - DNA, 98 bp, Homo sapiens
aaatttatcacgagtattttggttcctccccgggcagaagaaatcaccattccagctgatgtcaccccagagagagttccaacacacattgtagatta

SEQ ID NO: 876013 - DNA, 99 bp, Homo sapiens
tggagaacctgaagtagcaaaggcaagaaggcaacgacgttccatctgtggaaggacctaccaaccaggccaccaccacctatcatgacagatggtgaa

SEQ ID NO: 876014 - DNA, 99 bp, Homo sapiens
tgcgcggcggccgcagctgccacaaaccagagagaacgacatcacgcctgtactggaccacaccttctgcgtggaacacaacgccttcgggcggatcct

SEQ ID NO: 876015 - DNA, 99 bp, Homo sapiens
tgggccttgacaaagtgtaaaccgcatggtgtgaacgtggcatcactgacacaatcagaaattcgagacatcatcctgggtatggagatctcggcaccg

SEQ ID NO: 876016 - DNA, 99 bp, Homo sapiens
tttggattaaggaacagcgagctgtttgacccctttgacctcttcgatgtgcgagactttggaaagatccaaatcacaggacagtacccaaacacaaag

SEQ ID NO: 876017 - DNA, 99 bp, Homo sapiens
caaagggccacagtttatctgttcagcgcctcacgaaatccaaaggtgtttaatgaacgctgccgaattcacttcaagcctccaaagaatgaataaaga

SEQ ID NO: 876018 - DNA, 131 bp, Homo sapiens
ttctaatcatctgtggcttttatctgatattttaggccaaggagctactgcaaatgtctttcgtggaagacataaggtgccagatgcaattaaaaagtgtcagagggctggaattactgtgcggatggtca

SEQ ID NO: 876019 - DNA, 98 bp, Homo sapiens
tcccagtggtgaaggctaaagctacccatgtcatcatgaattctctgatcacaaacatagggcctgattacattccaacagaggaagaaaggagagtc

SEQ ID NO: 876020 - DNA, 98 bp, Homo sapiens
aagaagattttaatattgcactaggagtttttgctttagctggactaacagatttgtatgatgctgtccgaataaaccaactctatgagcaagccagg

SEQ ID NO: 876021 - DNA, 99 bp, Homo sapiens
gggagttgcttttggaatgaatttggaatcttcccttgaagagatttttcaagaggtaaaaagtagtgatattgccaagaccttccgcaaagcaatcaa

SEQ ID NO: 876022 - DNA, 99 bp, Homo sapiens
atggctcttgaaagtctggttaataacgagttctctagcgctagtgatgtgggggagtttgttgcttgtctcctgtccctattacgacaaatgacagat

SEQ ID NO: 876023 - DNA, 99 bp, Homo sapiens
tcgcaaggcttttcttgacaatggaccaaagacgatcaatcaaattcgtcaagatgcagtaaaagccttggacaagattcgctatgagagcctgacaga

SEQ ID NO: 876024 - DNA, 98 bp, Homo sapiens
gccttttgtccctttgcctcatcccaggttgccttggaaaatgccaacgccgtgtctgaagcggtgaccacccgtcaggtgcgtaccattgtggaaga

SEQ ID NO: 876025 - DNA, 99 bp, Homo sapiens
tctgcccaaccgcacggtcaccctatatctccggagcatttggataatgtgacagttggaatgcagtgatgtcgactctttgcccaccgccatctccag

SEQ ID NO: 876026 - DNA, 99 bp, Homo sapiens
gaaaaaaattatccttgaattcaaagaaaaatgtaaagacaagaagaatcctttagatcttaccaatatatttgagtccttcctgcctcagttattggc

SEQ ID NO: 876027 - DNA, 99 bp, Homo sapiens
tatagtgacacagcattctaaagtgaatgactccaacgaattaggtggtctgactaccagtggctctgcagagtttgtacctgttcaagctaggcctgg

SEQ ID NO: 876028 - DNA, 99 bp, Homo sapiens
cagcggaagaccaaagaggatgagaaggacgacaagcccatccgagagctctgagtcagcatccaaccttaaatgatgacctgccaaatcgtatcattt

SEQ ID NO: 876029 - DNA, 99 bp, Homo sapiens
acaggaagatctcgagggccctggctgaacttcaccttttggctttcttggcctgatgctgaactctcgaggggcgccaatgcttcggcattagagaaa

SEQ ID NO: 876030 - DNA, 98 bp, Homo sapiens
tcgtgatgagattgactgtagccgaggcttgcctgggaccagtggcagggaccccggaacctgaaggtgctgacaaagatgacctgctgctgttgagt

SEQ ID NO: 876031 - DNA, 99 bp, Homo sapiens
ccgaaatgtctctgaaaaccaatcccttccaagacgatcgacagaaccaccaccaggaccgggagcgacaggaagagcctcatggcgaggccggagggg

SEQ ID NO: 876032 - DNA, 99 bp, Homo sapiens
cattcatgaaaagcatgcccatacgattaaacctgcagtggagatgactcctcagaagaggaagaaggggaagtagatagtgaagttgaatttccacga

SEQ ID NO: 876033 - DNA, 99 bp, Homo sapiens
ccagaagattaataatgtgttggtttctcaatagaagaggaggaaaacatgtttttaagattcttaccaataaggaatataaatagtttctggaaagga

SEQ ID NO: 876034 - DNA, 99 bp, Homo sapiens
cctggttccagcatttattgctgaatgatcttgatcagtcccttcaccccctgagcctccatttcatggtctatatggtcaatagttgatcatttttcg

SEQ ID NO: 876035 - DNA, 99 bp, Homo sapiens
gtcagtaatgcctggaatgatgatgtctcatatgtctcaggcttccatgcagcctgccttaccggaggagatgttaaagtaacccatcttgcaggacga

SEQ ID NO: 876036 - DNA, 99 bp, Homo sapiens
aatccatcgaacaattgaattaatgtactctgacaaatctatgatacaatctggccttaccaaggcagtgaaggagagtacaattacattgcagcaggc

SEQ ID NO: 876037 - DNA, 99 bp, Homo sapiens
gggagacgagaagcctgaaaagtcgcagcgagctggagccgccggaggttgcacgttttcaaaaaatacctaatggtgaaaatgagacaatgattcctg

SEQ ID NO: 876038 - DNA, 98 bp, Homo sapiens
atgatgatggatccatttctcctattgaggagtcaacgggttccagaaactttagcagttgcagtgcagaggactttgagaagttaactttaaataaa

SEQ ID NO: 876039 - DNA, 99 bp, Homo sapiens
gatgggctggagacaacagaaacagaaacgattgtggaaacaggaagaggatcacctagcccgggtagaagaggcaatcacccgtatgcttgtgtgtgc

SEQ ID NO: 876040 - DNA, 98 bp, Homo sapiens
ccacagtccgcagggatgaacctcgagttgctggctgcaagctttcttcctggtggcagatgacatcatggattcatcccttacccgccggggacaga

SEQ ID NO: 876041 - DNA, 98 bp, Homo sapiens
ggaaccgaaccgccgcgcctcgcccaggacagttacacttagaggccttttgacctgatcatgaagacctgctttagccccaacagagtgattggact

SEQ ID NO: 876042 - DNA, 99 bp, Homo sapiens
ctccacttgcaaattcacaatgtccctatggcatgcttctcttaaagccaaagtgtaggtccctggctgccgctggctctcccggatgaggtagctccc

SEQ ID NO: 876043 - DNA, 98 bp, Homo sapiens
gagcctatcgtctccaagaggagtttgaagctacccttggggcatctgatcctaattcccttgctgatgatattgatgacgtccggttgtttgccttc

SEQ ID NO: 876044 - DNA, 98 bp, Homo sapiens
tcaaggaccaaaaaagaacttcgtgtgaaaattttcctgggaaaaggcaacagatggctccctgcaaagtgaggattggacgttgaatatggagatct

SEQ ID NO: 876045 - DNA, 98 bp, Homo sapiens
tctgagagagggaagtcgcctctgtgctcgtatgtgccagtcaaagatctactgggaatttatgagaaactgtatggtcgaaaagtcatcaccgaaaa

SEQ ID NO: 876046 - DNA, 98 bp, Homo sapiens
ggccctatcaggacatggagtatgaaagacggaggtgttccctgtcttggctgcaaagcactgtatcatgcaggccaatgctgagtaccatcagtcta

SEQ ID NO: 876047 - DNA, 99 bp, Homo sapiens
tgggccgccgagctggacccggaccggttttgggatctgaacgtctatgacactctttcgagctgacacagtgaagaacatagaaggagaactcaccca

SEQ ID NO: 876048 - DNA, 99 bp, Homo sapiens
gagagcttgaggagagcaggaaaggtgggacattgctgctgctgctcactcagttccacagtttccaacatggctagatccatcagaaactgaagccgt

SEQ ID NO: 876049 - DNA, 99 bp, Homo sapiens
agcactggttccaggtatctgaatgctttggttgacagtgcggtggcccttgaaacaaaggatacctcgctagctagagtctcattctgtcacccaggc

SEQ ID NO: 876050 - DNA, 99 bp, Homo sapiens
ccccccagtctcggagatctcagaggcaccgactgggagcttcaggctcctggcaaaggcctaactagcaataaaagcaaggatgacctggtggtagct

SEQ ID NO: 876051 - DNA, 98 bp, Homo sapiens
aaggaggacgcagcaagcgctgaatattaaccagcaaaggtgatggcatcagctgagaagggaaggaagcccatgtgaggacactgaagaaggagtga

SEQ ID NO: 876052 - DNA, 99 bp, Homo sapiens
aaatcatctgtggatctcaatcaagttagcatgctttctccagctgccctatcacctgccagctcatcacaaaccttttttagcaaaacttcagtctcc

SEQ ID NO: 876053 - DNA, 99 bp, Homo sapiens
ctggctgcgctgctggcctttgtgagcctcagcctgcagttctgttgggtatctacagccattggttgctgttcaggtcagctttgctcctaacaacac

SEQ ID NO: 876054 - DNA, 75 bp, Homo sapiens
atgcatctttatgtcagaaacacaaagcagcccaaccaaaggtgtaaggagaggatgaggcccgtgaaaaaggca

SEQ ID NO: 876055 - DNA, 98 bp, Homo sapiens
aggatttatacactcctgtgaatggatctatagtgattgtcagagcagggaaaatcacctttgcagaaaaggatctcctgtatcgaaggtctaggtca

SEQ ID NO: 876056 - DNA, 99 bp, Homo sapiens
ggacggctctagctaggtgagcggctccggccaggtgtcagttgtacccgaggcgttctcagcagcagcaagtacctgtggtggatttccaggctgaac

SEQ ID NO: 876057 - DNA, 99 bp, Homo sapiens
ccagaggtagccagaagaagcagaataactaaaaatgtgcctaaacaaagctctcagcttgatgaggtccttctcccagatttagaattttatgttaat

SEQ ID NO: 876058 - DNA, 99 bp, Homo sapiens
gctaaaacatcaatgaatgtaaatgaaatattcatggcaatagcccagcgatctgctcacgagctgcccatggttgaaagacaagacacagacagctgc

SEQ ID NO: 876059 - DNA, 98 bp, Homo sapiens
aagactatgcccaattcttcaactcctaccagccagatcaacacaattgatagatatccgtagaggtttggagagcaacgtgaatgttgaattactga

SEQ ID NO: 876060 - DNA, 98 bp, Homo sapiens
tgtcctcaggtggcagtggttcttatagccctggagtgacctactcgcccgtcagtggttataataagacatatctgaagagatggattaagaatgct

SEQ ID NO: 876061 - DNA, 98 bp, Homo sapiens
tgaagcggctcccagtccctgaaagcattaccgggttcgctaggctcacagctgagagcagcaccaacaccacccaggatgagcagcgcaggtggcca

SEQ ID NO: 876062 - DNA, 99 bp, Homo sapiens
atgctctccatcctgctcttcttccacagggcagtaaacggctttgaccccgctcctcctcctcctggtctgggctcctcgcgtccatcgtcagcgccg

SEQ ID NO: 876063 - DNA, 98 bp, Homo sapiens
ctcaagcaatcctaccatgtcagccttcccagtagctggaactacaggctgacccaccccaatgtggtggctgcccgagatgtccctgaggggatgca

SEQ ID NO: 876064 - DNA, 98 bp, Homo sapiens
aggaagaacccatcgggcagctacacatcttgaaagagaagctcttcctgtgaggtgaaagaactcttttcttctttgggagtcgaatgtaatgtctt

SEQ ID NO: 876065 - DNA, 99 bp, Homo sapiens
gcgtttggcaagagtcaccgggatccctacgcgacctccgtgggccacctcatagaagactggactttatgagtataaagtctttggtgttctggagga

SEQ ID NO: 876066 - DNA, 99 bp, Homo sapiens
cagcaaaagaaggagggtcctctcagtgattaaggcacaaagcagacattcgtagagaaacatggatgaaacaggaaatctgacagtatcttctgccac

SEQ ID NO: 876067 - DNA, 99 bp, Homo sapiens
gccagagtttgtagcctattggaggaaaacacaccaagagtgcttcatgttggcggaaccattgtattgttgcttagtgaagatcaccacaggcgcctt

SEQ ID NO: 876068 - DNA, 99 bp, Homo sapiens
gatggctactatgctgaacggtgcagcagtgatggatgcagctcttctgttgataggacacagcattgttggttttgccatgtactattttacctatga

SEQ ID NO: 876069 - DNA, 99 bp, Homo sapiens
ccaaagtgataagctgtgagtttgcacacaatagcaactggtatatcactttccagtcagacacagatgcacaacagcatggaggagcaggacttggag

SEQ ID NO: 876070 - DNA, 127 bp, Homo sapiens
gtcaatgtgtggaatattggggggctcggctgcagacttggccaaatggacgggactattaagctgattggggccctggtcctgtctgtgggcatctatgcagaggttgagcggcagaaatataaaa

SEQ ID NO: 876071 - DNA, 98 bp, Homo sapiens
gcagaggagctggcggagagcggcctgcgggcgatcgggccgagagtacagcacaatccacagcccatcaacacccattaaagattcagattctgatc

SEQ ID NO: 876072 - DNA, 99 bp, Homo sapiens
ggcgcgcggggcccgccatggctgcgtcggagctctacacaaagggctgctcttcacctatcgtggtgaagtttgctgacactcagaaggacaaagagc

SEQ ID NO: 876073 - DNA, 99 bp, Homo sapiens
ggagagaccctccctgagaaaccagccaattccactgatcctgtgaaggctgcccaatttgagatgagtaatcccagccatctccttttcttcctgcct

SEQ ID NO: 876074 - DNA, 99 bp, Homo sapiens
acttagttcaggtgccagctgtcattacttcccatttcccaaacattaggcaacatttttaactggttttctctaagctctaatatttggagtttagtt

SEQ ID NO: 876075 - DNA, 99 bp, Homo sapiens
tctagcaagtgttattatttctgccctttgtacccttacaaggtgatttggatattgaagatgacatgaaagcacagatgaattgcttttatttgaaag

SEQ ID NO: 876076 - DNA, 99 bp, Homo sapiens
tccagaaagcggcttatcgaacagagccgggagttcaagaagaacactccagaggtttgcctgcaatgagatttcattctctacatttaaaggacatcc

SEQ ID NO: 876077 - DNA, 99 bp, Homo sapiens
accaccatcaacaatgagtacaactaccgctgctggaccacaaaccgctgccagaaaagacaggctgcgggaggagctgcaggactgaggtacagaggc

SEQ ID NO: 876078 - DNA, 99 bp, Homo sapiens
cttccatcttcatgagtactccaagaagatggttcagttgactattgcaaaggtcttctgaatattgtgatggagccattttttaaaagagaagttttt

SEQ ID NO: 876079 - DNA, 99 bp, Homo sapiens
tcagctaacgttctgcaccgtgacctcaagccttccaacctgctgctcaacaccacctgtgatctcaagcttagcagtgtctgcaaaaacgaatctttt

SEQ ID NO: 876080 - DNA, 99 bp, Homo sapiens
gtttgggttgcacgtgagtcgaatgatgctagccttcttggttctcagcactggcatgttttgctcatcatcaggcatctgtgggaaaactagaattgc

SEQ ID NO: 876081 - DNA, 99 bp, Homo sapiens
tggaaaatgcagaggtgcacgttcagcaagcaaatcagcagctgtcaagggcagcagattatcagggtgtcgtagtcattcttcagcacaattcttaat

SEQ ID NO: 876082 - DNA, 98 bp, Homo sapiens
ggatctcaggtcctcgggggcggcggccacgccaaggacggatgattctgggcctcccccatctactgtcattaaccaaaatgaaacatttgccaaca

SEQ ID NO: 876083 - DNA, 98 bp, Homo sapiens
gtgtcttcttagtgaggctcagaggtgcttgtaccgtgatgtgatgctagagaacctggctctcatatcctcgctggcccttagagatttgtttgatt

SEQ ID NO: 876084 - DNA, 99 bp, Homo sapiens
caaaagatagttcctctggagattttgctttggaagctggtgccctggtacttggtgatcaagacatatctgaagagatggattaagaatgctttggat

SEQ ID NO: 876085 - DNA, 99 bp, Homo sapiens
cttgctgctggtaacagggccttgcctagtgggccttccttcccagagcggttccgccaccccagccgcagatgtttggtgaagagctgcctgacgctc

SEQ ID NO: 876086 - DNA, 99 bp, Homo sapiens
atcacagacagagaagaaaagtacaatcaagctaaggagaaactgcagcgagctgcaattgcccagaaaaagtgaagttattgccagtggactgtgaga

SEQ ID NO: 876087 - DNA, 99 bp, Homo sapiens
cagttacaggactcatcctcatggagggtgagcagggcagcatttccttctcccactgctgctgagatggcagaaattagtcgaattcagtacgaaatg

SEQ ID NO: 876088 - DNA, 99 bp, Homo sapiens
ctgcggggaggtgctgggcttcctgggcagctcgtcggtgttctgcaaagactgcaggaaggaccctgctgggatctttgagcttgtggaggtggtcgg

SEQ ID NO: 876089 - DNA, 99 bp, Homo sapiens
gccgagatcatgccattgcactccagccatatcagccagagaaatatacaagaacattcctccagctagcgcaaaaatccagttggcagagaagtggct

SEQ ID NO: 876090 - DNA, 99 bp, Homo sapiens
tgagctacaaagtgatagcagtggccctgaagaagaaaaccaagaattatctcttcaggaaggaacctctaaaatgcagacctccagctctagatctgt

SEQ ID NO: 876091 - DNA, 99 bp, Homo sapiens
gccctccagaatgagctggagagactgaaagagaaggcagacggtaacaagtactccttgctggattgaacttcatctgaatggacctctacagtggtt

SEQ ID NO: 876092 - DNA, 99 bp, Homo sapiens
agaggttcttggagagattctgggagccaaacactccattgggatcctagctggtgaaattgatcttcaaattctctccaaagttcaggctcaataccc

SEQ ID NO: 876093 - DNA, 98 bp, Homo sapiens
ggtcaccggcttcgtcttcatccagggcatcggtgcaatggatgagcttcatagtctggatccaagaaggcaagagttattggaagctagatttactg

SEQ ID NO: 876094 - DNA, 99 bp, Homo sapiens
cctctcttcagtgttcacagagatgcaaccagttagaccaaagccattgcttttgaagttattaaagtctgttggtgcacaaaaagacacttatactat

SEQ ID NO: 876095 - DNA, 99 bp, Homo sapiens
cgggactccaaatgggtcgcagtcgcagccgctctccacggagggatacgtcggtaacctttccagagatgtgacagaagctctaattctgcaactctt

SEQ ID NO: 876096 - DNA, 99 bp, Homo sapiens
gtggtaacagagactgaaaggaattctcaaaatccagcccttgagtggaatatggccagcagttggaaaatggatataccttatttgattatgatgttg

SEQ ID NO: 876097 - DNA, 99 bp, Homo sapiens
aagctctgaagactccttaagcaggttgggcatggagggactagagactgcagaagggtccaactctgagagttcagatgatgacagtgaagaagcacc

SEQ ID NO: 876098 - DNA, 99 bp, Homo sapiens
ccgcttgcaggagatccgggagcggcagaagttacggcgacagctcctcgcgcagcaggacatttttattccttccccaagtctggaagaacaatcaaa

SEQ ID NO: 876099 - DNA, 99 bp, Homo sapiens
agaagaatcagcaaatactactgaaagtgcaatatttgagtatcactgcgaggaaaatgtttataggaggccttagctgggacactacaaagaaagatc

SEQ ID NO: 876100 - DNA, 99 bp, Homo sapiens
ggatctcactgtttggcaccttcctgttcaactcccctcaccagcgagtgaagcaaagcacgaacatccagtcatggataaaaatgagctggttcagaa

SEQ ID NO: 876101 - DNA, 99 bp, Homo sapiens
tcttctgtgttcacagaatggccactgataggcatgcctcttttcccacccactggaaggctcacaggcaaggtgccttagctggaccaattattgtgg

SEQ ID NO: 876102 - DNA, 99 bp, Homo sapiens
ttactctaggcagatcaagcaagttgaagatgacattcagcaacttctcaagaaaattaatgagctcactggtggaagttgatgggtcgaaactaaatg

SEQ ID NO: 876103 - DNA, 98 bp, Homo sapiens
attctgtgactgcagtcgtgttcgtcgcacttggaacatcagtgccagaatgaaactagtgatcgagaagatggcctccccaaaggacatcatgtgac

SEQ ID NO: 876104 - DNA, 99 bp, Homo sapiens
cctttataccaatgaatctgtttgagcagtttaagagagcagccaatttatatttcctggctcttcttatcttacagatgctattaacattctgaagga

SEQ ID NO: 876105 - DNA, 99 bp, Homo sapiens
cgacgtaaatggctcgactccccgctggcattcgcttcatcatctcattctccagggatcagtgatgtttctttctcagcaaaatagaggagaagctta

SEQ ID NO: 876106 - DNA, 98 bp, Homo sapiens
tattgttgtgggaggaaccaattattacattgaatctctgctctggaaagttcttgtcaataccaaggatgaagattctgaattcacattagcctctg

SEQ ID NO: 876107 - DNA, 100 bp, Homo sapiens
cgggttttctgacttttttatcaccttgttctgaaacagctgcaggctcatacttatcacgtccaacctggtccctaatgagttggaagtcagaaaaccc

SEQ ID NO: 876108 - DNA, 99 bp, Homo sapiens
cagaggccccgatggcaaagggtaaaagcaccaccttaacgcagggaatccagacgctctgcagtgtcccatcgtcttatgcggatggcggggaaaggc

SEQ ID NO: 876109 - DNA, 99 bp, Homo sapiens
cttccatttcctgagtttgtgccaaggactgggattttgtcctctagagcagatggtactgattgctcttgagttgtcaccagtgtgcacaaaagcata

SEQ ID NO: 876110 - DNA, 99 bp, Homo sapiens
ccctggcgggtgccctggctaccatggaccatcctgctggtcagcactgcggctgggttttggccaaattgggcgagggcacaaaataaccacttaccc

SEQ ID NO: 876111 - DNA, 99 bp, Homo sapiens
ccgggggcgcgggcggcggcgccggcaggaaggatgacgtagctttgccaaagacttagaagctaagcagaaaatgagcttaacatcctggtttttggt

SEQ ID NO: 876112 - DNA, 99 bp, Homo sapiens
ggcgacctgggcaccagcaggacccgaggccaggagccaggggcccagaaggagtaagtccatgagtgatgtcagcgcagaagatgttcaaaacttgcg

SEQ ID NO: 876113 - DNA, 99 bp, Homo sapiens
caacatactcaaaggaacggagagaaccgggacccccctgcggggacccggaactggttctgcggcatgaggaatttgaagaaggctgcaaagctgcct

SEQ ID NO: 876114 - DNA, 99 bp, Homo sapiens
ctcctgagtagctgggactacagtgtacactgccatgggggacgctatctagtctaaaattacagagtcgaaaagatagtgatgatggtcccatcatgt

SEQ ID NO: 876115 - DNA, 99 bp, Homo sapiens
tgggtgctggtgcctatagcatgaggttgaaaacatcctcttgcatgaccgaggccactatgtcctgtgtgactttggaagcgccaccaacaaattcca

SEQ ID NO: 876116 - DNA, 99 bp, Homo sapiens
agcagttaatagatctccggcataagctcaatcttcgggtacttgagctggatacactggtggataatttatctattgatccttcctcgggggacatct

SEQ ID NO: 876117 - DNA, 140 bp, Homo sapiens
tgggatctttgaaatgctaagattcttggataccacagtatcataaaattcctctaaatgcagtctgtgtatgatgaccaaccaaatgcgcacaagaagtttatggaaaagttagatgcttgtatccgtaatcatgacaa

SEQ ID NO: 876118 - DNA, 99 bp, Homo sapiens
gcatgtgggcagatgagggcagtcgaaacagccgatttcagatgctcttcacatcctttcaagaacgcaatactgaacactgcgcagcttgcagaggtc

SEQ ID NO: 876119 - DNA, 98 bp, Homo sapiens
gtctgggaggataattgggatgatgacaatgtagaggatgacttctctaatcagttacggattttctgccgtctcttggcaaaaatggcaaataatga

SEQ ID NO: 876120 - DNA, 98 bp, Homo sapiens
gggagacaaagttgaaaacaaagtgctgtagagaaatggtcagaaggaacgacaccacagaagaaattagaatgtttaaaagaaccaggaaaaacatc

SEQ ID NO: 876121 - DNA, 98 bp, Homo sapiens
tttgaatttccaaattctcttatccaatcacaggactcgctgattcttgagaagagtcaaaactggagctctcaaaaaatggaccatattctgatttg

SEQ ID NO: 876122 - DNA, 100 bp, Homo sapiens
gcaggtcctagaagtgccttgagggtttccaaaggccaggagcacggaatcaaagagtacaggagtgttccaaagaggatgaagaagatgccgaaaccgg

SEQ ID NO: 876123 - DNA, 99 bp, Homo sapiens
gttccgcatcccattttttatgtccacagctttgcaaactcctgtaccagcagtggagccacatcttctggcggccccttggcttcctaccagaaggcc

SEQ ID NO: 876124 - DNA, 99 bp, Homo sapiens
ctccaatcttgtagttcacaccattgtcatggcaccatcttgggatacactggttcataaaggtacttgtcccctcttgtagatgtaatatgaaaaaac

SEQ ID NO: 876125 - DNA, 100 bp, Homo sapiens
cgggtgatttctgcatttccatctgagaaatcatgccaccctcaaagcctcatccacctgtcgtgggcaaagtgactcatcacagcattgaattatactg

SEQ ID NO: 876126 - DNA, 99 bp, Homo sapiens
tgtaagtgcagatggaacacaacaggtcacccaacctgcctgcagtttaccctgaacatgaccgaggctgtcaagacctacaagtggcagtgcatagag

SEQ ID NO: 876127 - DNA, 98 bp, Homo sapiens
ttggattctaatgcagttcatcacatcattcatgattttcagggcatgagccagaaggagagctctaagtctgccatgatgtatattcaggagttgag

SEQ ID NO: 876128 - DNA, 99 bp, Homo sapiens
ccgacccccaggcagctcgccgctccctagcaccttctccagtcgacactctcgcgcccggagggaactctaatgatccaggacaaagaagttaccctg

SEQ ID NO: 876129 - DNA, 99 bp, Homo sapiens
cgatgccgcagtaccagacctgggaggagttcagccgcgctgccgagaagctttacctcgctgaccctatgaagcgagtccagatttcagagattgtca

SEQ ID NO: 876130 - DNA, 99 bp, Homo sapiens
ggaacttggaaaaaaggaactgtgtgcagtaccgcaggcattttctggtggacaacagtgtgtttcatgtttaaggaagaaatctctaaacgttttaaa

SEQ ID NO: 876131 - DNA, 124 bp, Homo sapiens
gaccgtgagggtccccatgatgtcggaccctaaggctgttttacgctatggcttggattcagatctcagctgcaaggccttcccttcttcttggtggtgttcttgagtaagataatctggactg

SEQ ID NO: 876132 - DNA, 99 bp, Homo sapiens
ggaaacttaggggccacgtgagccacggccacggccgcataggaccgtgtttcttcgcctcgcctccctggtggtcctgctcttctctctctggaatca

SEQ ID NO: 876133 - DNA, 99 bp, Homo sapiens
tcttcagctggccaacagcaccatcattgcatttacctcggatcatgagttttgcggcctccaggtggtggatccaatttttcattaggttttgatgaa

SEQ ID NO: 876134 - DNA, 98 bp, Homo sapiens
attccacagaatacagccaacctccaggtttcagtggcagttctcagatgtgtcttgctgaatcagggctctcttatccctgccatcgacttacagtg

SEQ ID NO: 876135 - DNA, 99 bp, Homo sapiens
gggtcttgctctatcgcccaagctggagagcagaggcatgatcacatctcactgcagccttgtcctcctaggctcaggctggagtgcagtggcgagatc

SEQ ID NO: 876136 - DNA, 99 bp, Homo sapiens
aaactggtgaaggatggataccaaatggcccagcctgcatttgccccaaagaatatgtaggagcagcgcttagaccagccttcacttcagagacaccac

SEQ ID NO: 876137 - DNA, 99 bp, Homo sapiens
ttccaacacagatgtccaagctgccaatattcacaggcctccactgggctctcagtaggtgggatttgtcagcagttctcattgcctgagaacatccag

SEQ ID NO: 876138 - DNA, 99 bp, Homo sapiens
tagggctccggcgcgtcacgggcctcagctgggattcccgcgcccctcggacggccacgagactcggactgtggatattcataaggagaaagtggcacg

SEQ ID NO: 876139 - DNA, 99 bp, Homo sapiens
gcatcctgagtagctaagactataggtgtttactacaatctggaggcaagatctttcctcagtatgtgctgatgtttgggttgcttgtggaatcacaga

SEQ ID NO: 876140 - DNA, 99 bp, Homo sapiens
catttcagtaccaagcctttctgctccaggtcaagtgggtgcctgatagacatcctaggactatacagaaggaaaaggcccactttgggggataatgct

SEQ ID NO: 876141 - DNA, 99 bp, Homo sapiens
ggcagttattggcaggctgccatgacaaccaggcaatgctggatagataccgaattcttatcacaaagacaatacaatggtgggtgaagagaagatgtc

SEQ ID NO: 876142 - DNA, 99 bp, Homo sapiens
ccacaacatggcctcctccgcctcctcctctcccgcgggcaccgaggactccgctcctgcccagcacgtcagctaactgttcagatgatgcaaaatcct

SEQ ID NO: 876143 - DNA, 99 bp, Homo sapiens
ctgggtgacagagtgagacccttaagggttccaataggtgtacagttccaggagtgtggagggacctttctcagctgtgagattatgaacccaatgttc

SEQ ID NO: 876144 - DNA, 99 bp, Homo sapiens
gcccacagtgggggtgtgcaaacccgagagaactggcgaggaagaaaggacccggtttcaggagctgctggccagtccggcctacagagccagccccct

SEQ ID NO: 876145 - DNA, 99 bp, Homo sapiens
ctcagttccttttatttcacaacgacagaaagggcagccctgaccatccgactccaaggtcaataagaatcgcatgctgctgggaagtcagctgcttta

SEQ ID NO: 876146 - DNA, 99 bp, Homo sapiens
ctgggcaacaagagcaaaactccccacctcttctcaagctgcagtccaccgggtatggttctggatggttcccccaagggagcaggtatgtaggaggtg

SEQ ID NO: 876147 - DNA, 99 bp, Homo sapiens
ctgtcttcccattggattcagccagtccgcggtcctgggagaaacacatctcatctttcctaaaaaagcttcagtggagcagctgcaaaaaattcgtga

SEQ ID NO: 876148 - DNA, 98 bp, Homo sapiens
gactattggatttgaggatattcttaatggcaatggacctcatcatgaccgttgctgtacttacaatgaaaacaacttggtggatggtgtgtattgtc

SEQ ID NO: 876149 - DNA, 99 bp, Homo sapiens
cagcaggacaggatgcgagagcaggtttggtgcacctcgatttggaggaagtagggcagggcccttatctggaaagaagtttggaaaccctggggagaa

SEQ ID NO: 876150 - DNA, 98 bp, Homo sapiens
gagatcaagaaggcctatcggaagctggcgctcaagtaccacccggacaagaacccggatgagggcgagaaggatgatcggctgaatgtaacagagga

SEQ ID NO: 876151 - DNA, 99 bp, Homo sapiens
ctccaggcaaactctcaacgcttggagatgaactgatgtttttagaacttagcccacttctccagcagaggcagccaacatatgtttcataggtgtcaa

SEQ ID NO: 876152 - DNA, 99 bp, Homo sapiens
gaggagttctctgctcagcacagccaaggaacagaattagaagaaaaggaaccctggcctgagtctaacaaagtgccagtggtgcagcaccctcaccat

SEQ ID NO: 876153 - DNA, 99 bp, Homo sapiens
tctcctgataatgtaaattgccgcgatacccaaggcagacattcaacacctttacatttagcagctggtttattgcagcctcctgttcgtatagtttca

SEQ ID NO: 876154 - DNA, 99 bp, Homo sapiens
gcaaagtgtctacctcggggcagatccggaccaaggtatgaaaatgaaagtcttcagaatggaaggaagtcaactgaatttccaagaaaaatacgtgaa

SEQ ID NO: 876155 - DNA, 99 bp, Homo sapiens
ggtgaagaataccagcaaaggcaccgtgacaggccaagtgcaggggccagaagacaaagtcaattccatgctgaccaactgactgaagagcagattgca

SEQ ID NO: 876156 - DNA, 99 bp, Homo sapiens
acaaattcacagggaagaaagtgactgaagagcttctgaccgataatagtgggaacatcattgtggccactccaggccgcttggaggacatgttccgga

SEQ ID NO: 876157 - DNA, 99 bp, Homo sapiens
agccccgctcccccggacccatcggcgcgctgcccacacctccaggcgaccgggaacagatggagtcggataactgttcaggaggagatgatgactgga

SEQ ID NO: 876158 - DNA, 99 bp, Homo sapiens
cacttctaactgctgatgccaccctcaaagggtctccagaagcttccactgactgctgttggctgcaccaggcaggtctggctctgtcacccaggctgg

SEQ ID NO: 876159 - DNA, 98 bp, Homo sapiens
cagactgaggaagacccggaaacttaggggccacgtgagccacggccacggccgcataggaagaatcctgtaagtacaatcccaagtattctgttgct

SEQ ID NO: 876160 - DNA, 99 bp, Homo sapiens
ggggaggtaccaggtatttgagagcaatcgccaccgctttcctggaacttgagactgcagagtgggatgaacttgcagatatgctttgtcaacgacagt

SEQ ID NO: 876161 - DNA, 99 bp, Homo sapiens
tgcagaacaaagtagaggggatcctgaaactgttcaggttccattatcaaaacgagcaaaatttgttggacctggtggctataacttaaaaaaacttca

SEQ ID NO: 876162 - DNA, 99 bp, Homo sapiens
agaaattgatgtctgataagaagtgttctgtcgaaaagaaatcagaaatggaaagtgttttggcccaggtgttctttgcagaagatgtgggttcaaaca

SEQ ID NO: 876163 - DNA, 99 bp, Homo sapiens
acaagcgagaggaggaggaggatgatgaatgtcctcaaggaacttgtacttttgagtccccatgattttcttcatactctggttccctttctacaacac

SEQ ID NO: 876164 - DNA, 98 bp, Homo sapiens
ggattttttaccattgtttcatcaacgtctaagaaacttggagaactccagatacagtttatgtaacttgatggaagaaaatggaattactccaaaaa

SEQ ID NO: 876165 - DNA, 99 bp, Homo sapiens
ccgggtggaggaactctgtcagcgagtgtacagccgaggggccaacaaatatgatgaggcagccagctacatccagagtaagtttgaggacctgaataa

SEQ ID NO: 876166 - DNA, 99 bp, Homo sapiens
gttctcttcccaaagtggaagccaaattcatcaattatgtgaagaattgcttccggatgactgaccaagagcattgctatggcaacaaaagaaaatatg

SEQ ID NO: 876167 - DNA, 99 bp, Homo sapiens
gcaccacgacggcgccatcaccgagcgcttgatgtgcgcggagagcaatcgccgggacagctgcaagtctctcctggagctgcacaagaggaggaaagc

SEQ ID NO: 876168 - DNA, 99 bp, Homo sapiens
cagccacaaaaaatggacttgactatgcactcagctcctgcccctcctaaagctgaagccaaagcgaaggctttaaaggccaagaaggcagtgttgaaa

SEQ ID NO: 876169 - DNA, 98 bp, Homo sapiens
gggaaagcaggaagggtgtcactgaccccaaagaactgaaattctgcgttcaagatcaacctctagaatcccgtagactctgcaacaagccaattcag

SEQ ID NO: 876170 - DNA, 99 bp, Homo sapiens
cacgacgtgcgctatgggtcaggtaatctgtaagtcagatgctccaacaggggatgttcttcttgatgaagctctgaagcatgttaaggaaactcagcc

SEQ ID NO: 876171 - DNA, 99 bp, Homo sapiens
gacttggaacgcacagaggaacgagctgagctggcagagtcgcccagtgctaaacgacggtataaaaaccagaagtttggttttggtggaaagaagaaa

SEQ ID NO: 876172 - DNA, 99 bp, Homo sapiens
attcccgggaggggggagcggcgttggaggccaccgtttccaggaggctctgtcggtggtgagcgacgaccagtccctctttgactcagcgtacggagc

SEQ ID NO: 876173 - DNA, 98 bp, Homo sapiens
tctttttaatgaggactgggactcggagttgaaagcagatcaagggaatccatatgaccaagatcactccatggatgaaatgacagctgtggtgaaaa

SEQ ID NO: 876174 - DNA, 99 bp, Homo sapiens
gtaacactggcaactttgaaaatgtctgtacagccaacggaactgtggctgcaccatctgtcttcatcttcccgccatctgatgagcagttgaaatctg

SEQ ID NO: 876175 - DNA, 99 bp, Homo sapiens
acctgaatgcctacttgcaacagggttgcaaactgtcttccagcttctgaacatgtcaaattacaaggagaagttttcgactttgctgtggcttgagga

SEQ ID NO: 876176 - DNA, 99 bp, Homo sapiens
gggcaacagagcgagattccatctcagtgtcagagcagttgccattcagagcctcgatgtttggatccctccagtcttctgagagtgaagggatgtaat

SEQ ID NO: 876177 - DNA, 99 bp, Homo sapiens
cgagtatgtctcacacatcaactggaacgaggacaaagcggcagccatcctggaggcctggcagaggacatatgtggagctacaaggctttggccgacc

SEQ ID NO: 876178 - DNA, 99 bp, Homo sapiens
ctgaatcagagaccaccagaaaacccagacactgatgccataggcaccccatcggtgggagttctgttaaagcagttggtgcctttgatgagactagag

SEQ ID NO: 876179 - DNA, 98 bp, Homo sapiens
gggctgttctctgtgttaaaccaatcagttgcgaccttctcttaacagctagcatattgtgttgtacagttcctggagaaagatacaacactaacaga

SEQ ID NO: 876180 - DNA, 99 bp, Homo sapiens
caagcgcatccagctgtatggagcctacctccgcatccacgcgcacttcactgggctcaggagcactttagtgaataaagaacctgacagtatgctggc

SEQ ID NO: 876181 - DNA, 99 bp, Homo sapiens
caagttggacagacgggaaaaatagtagcaccagaacaggaaatatagtggtcattatgattagctatccaaaaggaagagaaattttggagctggtgc

SEQ ID NO: 876182 - DNA, 99 bp, Homo sapiens
gattttgcacttgtgcagaccgggcgagcagagtaagaagcaggtattgggagagttgctgctacatctttaggaaatttgactaaccatggttctgaa

SEQ ID NO: 876183 - DNA, 136 bp, Homo sapiens
ccgtctggatttctttagatgttttattttcaacagcgtccatcatgcacctctgcgctatatcgctggatcggcgagagctgttttggcaaaagttggctatccagagtttataatgaatgatactcatgttaat

SEQ ID NO: 876184 - DNA, 99 bp, Homo sapiens
attccttgcagagacagctcaacacggcacttccacagtgagaaagatcagtctaaagaaaaggagaagaaagtgaaaaaaacaattccttcctgggct

SEQ ID NO: 876185 - DNA, 99 bp, Homo sapiens
cctctatctcgcttttcccctggccttctgtatcttcatggtgcggctcatcttcgagagacaatgcagatcttcgtgaagactctgactggtaagacc

SEQ ID NO: 876186 - DNA, 99 bp, Homo sapiens
ctggctctttggcggctcggaggagcggctgctgctgctgctgctgctgctggtggcccctttgcaggtatcattggaacatttcaagatcatcaaatc

SEQ ID NO: 876187 - DNA, 98 bp, Homo sapiens
agaaaggaggcagtttccctggtgaaaggatcctacaagaccctcaggctggtagtgcgcaggttctcagaggcactgtgactgacttccctggattt

SEQ ID NO: 876188 - DNA, 98 bp, Homo sapiens
agacatgtggcccatctctgtagccatcactgagaaatctggattttcaaggtgaggaattttaaattggaacaagagcaagaaaaaaacaaaatctt

SEQ ID NO: 876189 - DNA, 99 bp, Homo sapiens
agacgagagcttcagccatcacgaggatgatttcggaacctggagaaaatgttgtaagggaagccattttagaagacttgcagaaaattgggaaagaaa

SEQ ID NO: 876190 - DNA, 99 bp, Homo sapiens
tgtcattctggactgcacccctacgggaacccacgaccattatatgctggaatggttccttacttccatggagtcactgattcatcactttaagttgta

SEQ ID NO: 876191 - DNA, 99 bp, Homo sapiens
cctcctgattagctgggactacagagggactgaaactgggctgacccttttgatttccaagctcagcgttttggtgtaaggcggccaaagaaggatgcg

SEQ ID NO: 876192 - DNA, 99 bp, Homo sapiens
tcctttgaaatggtgctggatgaaattagaaaggaatgtgttccagaagatctagaactgaagaagaagatttttgctcagttagattccatcattgat

SEQ ID NO: 876193 - DNA, 99 bp, Homo sapiens
aacaacatctcctgctattccttgggctgcctttcctgcagtaaacaaatccgagctatgctgggccagttcagccaggcagaagccttattaatgaaa

SEQ ID NO: 876194 - DNA, 99 bp, Homo sapiens
catggctagggaaaatggcacagttgggtcctatttcagaacgaggtcactcggacactatggtgttcttttacctgtggattgtcttttatatcatca

SEQ ID NO: 876195 - DNA, 99 bp, Homo sapiens
aaatatcttctggaaagctggccagatttgcagatggctctgctgtagtacagggtaggagtcaatgaagacatcttagtcttaacaagttacagataa

SEQ ID NO: 876196 - DNA, 99 bp, Homo sapiens
gcccttcatcccagtcacccaggcctccgcttctccggcctccctgctcttaccgggaggatatcggccgggtagcaggaccaccaatactcaatccaa

SEQ ID NO: 876197 - DNA, 99 bp, Homo sapiens
aggcctctccagccatcctgaactgaaggagctcattgccaagttagatcaggcagaaaaggagaaggtggatgctgctgagctggttcgggaattcga

SEQ ID NO: 876198 - DNA, 98 bp, Homo sapiens
cgggagcggcgctggccccaaggcgctgccctgcgcagggtgcaggttttgcagcatttggacaaacaaagccagtagtaaccccttttggtcaagtt

SEQ ID NO: 876199 - DNA, 99 bp, Homo sapiens
tctcgctgtgagacatgtctgagactcctgctcagtgtagcattaagattcccaacttcttctggagcctggggatcggtcacactggtgcgtggtggc

SEQ ID NO: 876200 - DNA, 99 bp, Homo sapiens
caggcacatcacagttgtcacatcagcaggctagaaaagccatcccattcctgcggtaggcattctaaaggatgatttacaggtcagtatcaaaccagg

SEQ ID NO: 876201 - DNA, 99 bp, Homo sapiens
gccagctgtttactggaagcaaatgcggtgtcatcacagcctacacaaacagatttacaagcagcacgggagaagaaaatggctttccagatagcactg

SEQ ID NO: 876202 - DNA, 100 bp, Homo sapiens
ttctggaaactcccattcctgtcttgtcctccgtttacactgcttgccgatacatctgggagctatgtgtgagcccaagacaggaatgggagtttccaga

SEQ ID NO: 876203 - DNA, 99 bp, Homo sapiens
cgaatatcgtcatcgttagaaggactcagtggcatttgaggatgtggctataaacttcacctgtgaggagtgggctttgctgggtccatcacagaagag

SEQ ID NO: 876204 - DNA, 99 bp, Homo sapiens
taatcatagaggcaagtgggggaggagcgttccttgtcctccctctgcacaaggatcaagaattggttaaaatagttggaatacgatatgaagttgggc

SEQ ID NO: 876205 - DNA, 98 bp, Homo sapiens
ggagacggcggccttcgaggaggtcatgaaggacctgagcctgacgcgggccgcgcgggctcttgtcaggatggtgaagctgttcatcggaaacctgc

SEQ ID NO: 876206 - DNA, 99 bp, Homo sapiens
tcaccatgcaagctttgtcggaagaggaccggaggctctggatggaagccatggatggccgggaaccttgtatgtggtagaagaccaaagaagagatga

SEQ ID NO: 876207 - DNA, 99 bp, Homo sapiens
gagtgcaatagtgcaatcacgacccactgcatccttgaccttttgagccaaagcaatcctactgcctcagcctcccaatagagacggggtttcaccatg

SEQ ID NO: 876208 - DNA, 99 bp, Homo sapiens
tgcctgaagctggtgggctgcaaatccaagaaggggctgtcctcgtcctccagctgttatctggaaggtgcccaccagctgacctctcctccttctcag

SEQ ID NO: 876209 - DNA, 99 bp, Homo sapiens
cgggctcaccaaccgggacaccctggctgtcatccgccacttccgcgagcccatccgtctcaagactgtgaaaccagttaataacgacatgatagtcac

SEQ ID NO: 876210 - DNA, 99 bp, Homo sapiens
gcaggcaatgaatgatatcagacccagtgccatgagggaaatagcaattgatgtcccaaatgctcacgaggcccagggaatcctctggaccatcagatt

SEQ ID NO: 876211 - DNA, 99 bp, Homo sapiens
ttgacgtcgtccgagagtcttaaaatcctgctctggccggattccagactcgtgggggaaaggctgtggatttggcatgataacatgcagtttcttcaa

SEQ ID NO: 876212 - DNA, 99 bp, Homo sapiens
gccagaagcgggcggcgcgggggagatgggatatgggattagaactgtttagaacccatattattagtgataaaatggttcagagtaaaaccattgatg

SEQ ID NO: 876213 - DNA, 99 bp, Homo sapiens
tcggtgtctgctgcgttcacggcaggattcggttagctggcagcctgataggcagattccatttcatgatgtcagattcccacctcctgtaggttataa

SEQ ID NO: 876214 - DNA, 99 bp, Homo sapiens
tacagacagccagggccacttttgtggccagaagggcactcccaatgacattagtgaccagaaggatcccaaggatcgaatggttcaggttgtgaaatg

SEQ ID NO: 876215 - DNA, 99 bp, Homo sapiens
aagagaagcaaaaggaaggaggcaaaaagaagaacaaagaaggatctggagatggaggtcgagctgaggtaatctgtaagtcagatgctccaacagggg

SEQ ID NO: 876216 - DNA, 99 bp, Homo sapiens
aaaagaggtggtgatgcagggatgcctggaatagaagagaatgacctagcaaaagttgatgatcttccccctgtagtggccacagaagaagtagttact

SEQ ID NO: 876217 - DNA, 99 bp, Homo sapiens
gccgccttcttggcgcgaccccaacccagccccagactcgctcagcagcagcctgaaaacttgctacaagtatctcaatcagaccagtcgcagtttcgc

SEQ ID NO: 876218 - DNA, 98 bp, Homo sapiens
tccggggccgctggattctgaggaccagcagatggccagtcacgagaacccaggcctcaggagtgcaagtagctgatgaagtatgtcgcattttttat

SEQ ID NO: 876219 - DNA, 99 bp, Homo sapiens
aacaaagtgcttaaagaagatgtgctgattgcagccttactatttgaaacatccctcacattgaaatatggtgatgatgaacagtctacacagatggct

SEQ ID NO: 876220 - DNA, 99 bp, Homo sapiens
gaaggaattgtttttttcactttcttctccttttctttagactgatctttctcacttcccatccaaagactagcctgacaagatgttacagaggatgag

SEQ ID NO: 876221 - DNA, 98 bp, Homo sapiens
ggagaggtttgttccctgacaactttgtaagagaaaaccagtagattcccagacatcgcgaagtgaatctgaaattgtgccaaaagttgctaaaatga

SEQ ID NO: 876222 - DNA, 98 bp, Homo sapiens
ttcgggcaaggcgagtggagcgagtggagcccggaggccatgggcacgccttggacaggcttttggaaatgccaagacagcccacaacaacaactcca

SEQ ID NO: 876223 - DNA, 99 bp, Homo sapiens
ggggacccagaccctggagcctcagttggaagcagccgatccagcctgcggagcctgtggggcagactgcctcttcaaggtgtgccccatgaaccgcta

SEQ ID NO: 876224 - DNA, 99 bp, Homo sapiens
cgggtggtaacagcacacgagagcggctgctgtctgcgcttgaggacttggaggtcctgtctagattgcaaatagaagagtcttccaaaccagtgaggc

SEQ ID NO: 876225 - DNA, 98 bp, Homo sapiens
gatggcggatcaggatcggaagcctgcgtaactttctcccttgatccgggagtctttccactggaagaagaagaggacagtgctccagtgaaagtgga

SEQ ID NO: 876226 - DNA, 98 bp, Homo sapiens
gagtctaccaaaaagaatgaaccgcttgcttcttatttaggacagtcattttgtttactcattcagccctgttgcaggtcccaataaactcttcataa

SEQ ID NO: 876227 - DNA, 99 bp, Homo sapiens
cttgaaagtagggcatccttcacccatctgaagggaggaaatagtggcaggtgacagtctgcatgtgcagttttcagtgtgaagcctcagtttaggtca

SEQ ID NO: 876228 - DNA, 100 bp, Homo sapiens
gaggtccatctcgctgagatacgaagggagggtgtaccattacaggatcattgatcctgtaatggtacaccctcccttcgtatctcagcgagatggacct

SEQ ID NO: 876229 - DNA, 99 bp, Homo sapiens
tacagctgttgtcctggtatctgcagctatgctaagaaggaatctgatcttaatggcgcccagatcaagcttcgagaatatgaagcagcactgaattcg

SEQ ID NO: 876230 - DNA, 99 bp, Homo sapiens
aggacaatggggacccgggacgacgagtacgactacctattcaaagggtaacaagatgctcaactatagtgctcccagtgcagggggttgcctgctgga

SEQ ID NO: 876231 - DNA, 99 bp, Homo sapiens
agactttgccccatggcagaactctgctggaatcctattgagaagggccgttgctccagggagaactgcaaatatcttcatccacccccacatttaaaa

SEQ ID NO: 876232 - DNA, 99 bp, Homo sapiens
tgaacttctgagttacataaagaagacctaaaactgatggctactaaaaagcagagcatttctggatacagttgatatattagttggatggcatataga

SEQ ID NO: 876233 - DNA, 99 bp, Homo sapiens
ctttggtacaacgatccaggccagaaatgttcccactgccaggaggcaggcgccaccttgggctgctacaacaaaggctgctccttccgataccattac

SEQ ID NO: 876234 - DNA, 99 bp, Homo sapiens
gggcctctccagggagtgctctgttcacggctccatcgctgttattcagggcgacagctcagtgaagtcttcattcagttaccttcaaggaaagaatta

SEQ ID NO: 876235 - DNA, 99 bp, Homo sapiens
ctgtctataccggggctcaatgtgcacaccaccaccggcactctgtctcccctgtggaggaggaggtctttgtgtgcttttgtgtgatggttccactga

SEQ ID NO: 876236 - DNA, 98 bp, Homo sapiens
cgaattcttcccaatctttatcttggctgccagcgagatgtcctcaacaaggtggttggaggcaaagtaaagaagcccggtaaacgtggtcggaagcc

SEQ ID NO: 876237 - DNA, 98 bp, Homo sapiens
ggggtgtgtgggaccatgtccagccctctccagtgtatccacagccccgacctttgatgagaactcagctgtccagagatgaggtttcaccatgttgg

SEQ ID NO: 876238 - DNA, 99 bp, Homo sapiens
tttcagagcccggcaccacccatcttgagtatctgctctgaaagtctaggatattttgccactggaagaccagcagacaatgtcatgacaactcaagag

SEQ ID NO: 876239 - DNA, 99 bp, Homo sapiens
atgaagctgtagataaaaacattttcagagactgtaacaagatcgcattttacaggctgggccagtaataaaggtgaaaattccaaaagataaggatgg

SEQ ID NO: 876240 - DNA, 99 bp, Homo sapiens
gagggcgagcgaggaggatggcggagtcggggctcctgacggtgctggagaatctggtaaaagcaccattgtgaagcagatgaggatcctgcatgttaa

SEQ ID NO: 876241 - DNA, 99 bp, Homo sapiens
ctttgagtggaaccgtgtgaaagagccggggttactataacaacagtaccaaggtggctgtgaaaaccctgaagccaggaactatgtctgtgcaagcct

SEQ ID NO: 876242 - DNA, 99 bp, Homo sapiens
gcagtttgataaaacatggtggagacagcggctgaaatggaagcatatgttctagaagacattcttgaggtttttctatatgagtggagaagacagctg

SEQ ID NO: 876243 - DNA, 99 bp, Homo sapiens
tcatgcgttttctcttgttcttaaccacctggatttccatctggatgttgctgtgatcagtctgaaatacatttaattggttggggtcagataagaaga

SEQ ID NO: 876244 - DNA, 99 bp, Homo sapiens
ggcggcagcgtccaccatcttcctcttgctgccagtggtagcgctcgtctggcggagctggagctcccagctcctccagcagccgacaggaggcccgtc

SEQ ID NO: 876245 - DNA, 98 bp, Homo sapiens
atttattcactcaagactaaaaactaaaggcctgggcctgagaactgaatcagggtcgacatgttaaaacgggtcagttggcagccatcaaagttatg

SEQ ID NO: 876246 - DNA, 99 bp, Homo sapiens
gaagaaagtgattgctgctatgaccgtggggaaggatgttaggtgaagaacgaggtggagaagctcccccgacagcagcggaaggaaagcatgaagcag

SEQ ID NO: 876247 - DNA, 99 bp, Homo sapiens
cttcttcccacgctgctactgcctgggggctgaggatgacaaaaaagccttcatagctattcctgcaccaactgacctgaagttcactcaggtcacacc

SEQ ID NO: 876248 - DNA, 99 bp, Homo sapiens
gagaggcaggcggaagacagtgagctgttcgagctggattattgcctcaaagtctgcagatctccaggggagcccaccagcctagtcaacatggcctcg

SEQ ID NO: 876249 - DNA, 99 bp, Homo sapiens
ctcccaagtagctgggatcacagtgagcatttgtcctgtgctttcacattctttctgcatggagaaagtaatgtatgcacaagtgtggagattgcccag

SEQ ID NO: 876250 - DNA, 144 bp, Homo sapiens
agctgatttcagactcagaagccgacgttcgagaggaagattcttacctctttgatctcgacaataaggtcatcatcagatttgaaatatttaaagtggatacaaaactatttcagcaatgcagacaattaagtgtgttgttgt

SEQ ID NO: 876251 - DNA, 99 bp, Homo sapiens
gtgcttccatcaacgcaacgggatcagtgttgtgataaggcagctgcaaaaagcggcaggacacacaggagctgatattcaaagacaaaagcagggtgg

SEQ ID NO: 876252 - DNA, 99 bp, Homo sapiens
cgtaaatggctcgactccccgctggcattcgcttcatcatctcattctccagggatcagtgctttgcccgaagtttttacatacaaattctactagtca

SEQ ID NO: 876253 - DNA, 98 bp, Homo sapiens
gcagtacattcctcatgggtacatggagttgactattccacctaagaacggagatatggtggagatggctcagaagttgggagctgctctccaggttg

SEQ ID NO: 876254 - DNA, 98 bp, Homo sapiens
ggatgataattgggcctccaagacacttctcagaacttctggatgagttttcccagaacgtcttgggtcagctcctgaatgatcctttcctctcagag

SEQ ID NO: 876255 - DNA, 100 bp, Homo sapiens
gcggccggggtggtagcagagctcggaatcttcctcttcctccataggtggtggtggtggaggaagaggaagattccgagctctgctaccaccccggccg

SEQ ID NO: 876256 - DNA, 98 bp, Homo sapiens
gccatgtggtctttgcatgagcacccaggatggtgaggaacctccgcctgctgaggcagcccacccactgcagaagctgtgccagcaggagaagctga

SEQ ID NO: 876257 - DNA, 154 bp, Homo sapiens
caatcattaagtgtccaagaaggttgactcctcaataggagaaatggatccatcatctctcctattgaggagtcaaccttcttggacacttaatgattgttggcaagaaatgtgctgctgatctgggcctgaataagggttatcgaatggtggt

SEQ ID NO: 876258 - DNA, 99 bp, Homo sapiens
tttgacaatgcaggtgccatgatgagtgtggatgaaacactaatgtgttcttttcagagtattgggaaagggtcgttgtggtgcatagacccagagtat

SEQ ID NO: 876259 - DNA, 99 bp, Homo sapiens
ggacgctgagcaagtcagttaaccagcccgagcttcattttcctcatctcccttccgttattcttgaggagctctggggaaactgcagaaggcactgaa

SEQ ID NO: 876260 - DNA, 99 bp, Homo sapiens
gtgcagatcgcctggcagatctaccgtcaccagcagaagataaagtgatgagctactcctgggtcatgagaaggcccctgccttcagagactatgtggc

SEQ ID NO: 876261 - DNA, 99 bp, Homo sapiens
tcttccctggcaagattcttctgaattgtgctgccttggccaaaagaggtttgtccagaggggttgcgtttatccggtttgacaaacggtcggaggcag

SEQ ID NO: 876262 - DNA, 99 bp, Homo sapiens
tcatgttgatgtttgggtcacttattgcttccatgtggattctttttggtgcatatgttacccaaaatccagttgttaaacctaaaacagaaaaagaaa

SEQ ID NO: 876263 - DNA, 99 bp, Homo sapiens
ggacgcaacactgacgtaacttctggataaaaagcttctcttgatcagcaggaggaacatttcatcagccacaaactccttactcagaccaaaatctgt

SEQ ID NO: 876264 - DNA, 98 bp, Homo sapiens
ttctcaggaaacattcattcaaatagctcagaaatctatcctttgaagatggcctctgaatggaaatgtactctggaaaaatcccttattgatgctgc

SEQ ID NO: 876265 - DNA, 99 bp, Homo sapiens
ggctgtgagcaagctgtatgcatccaaagcacacatgaactcagtgctcatggggatgaagaaccagctcgatttgtccaatatgtgcagcgttacctg

SEQ ID NO: 876266 - DNA, 99 bp, Homo sapiens
gaaataaaacagctgttttgcagattggactacaaggtgatgcaggttctgaatgctgatgccattgttgtgaagctgaactcaggcgattacaagacg

SEQ ID NO: 876267 - DNA, 98 bp, Homo sapiens
aagaaaggagagaagatgaaagtcctggaggacattatgccagtacatacaggcttctaaagccagggatggtgccagccctttcatttcaagtacga

SEQ ID NO: 876268 - DNA, 99 bp, Homo sapiens
gaatttccaaatgaaaatcaagtagtgtttgccagagttgattgtgatcagcactttcggcagaaggttctggagagaaaaaatcatgagttggtatgg

SEQ ID NO: 876269 - DNA, 100 bp, Homo sapiens
ctggataaaagcactttcagcttctggtcaggactctcctggacagtgccttcagtctctgaatagagtcctgaccagaagctgaaagtgcttttatcca

SEQ ID NO: 876270 - DNA, 99 bp, Homo sapiens
accaaaatgtgtaccattcggatgagttttgtcaaggtaccagcaactaaggtttcagagctgaaccctaatgcagaagtgtggggggctcctgtgtta

SEQ ID NO: 876271 - DNA, 99 bp, Homo sapiens
atcacactacgatgaactgcttgctgcagaggccagaaataatttcctgaggctatgtgttcttaaagttacccaacaaagtgagaaacatttggagaa

SEQ ID NO: 876272 - DNA, 99 bp, Homo sapiens
tcatgtctcattaatcacaccaacaaaaagatcctgtggtacagtctatccttcactggagtctgatgatgatgaccctgctttgaaatctcgacccaa

SEQ ID NO: 876273 - DNA, 99 bp, Homo sapiens
gtccaaggacacctacagccccgacgaacatttctgggtgacactcaacaggattcccgtgtcaggggaagctgatggagaatcgagctctggatccag

SEQ ID NO: 876274 - DNA, 100 bp, Homo sapiens
ctggagccaccagcccaaccgtgttgtatgaagactttgggcagtgcaggcctgcgtatttcctccactcacatacaacacggttgggctggtggctcca

SEQ ID NO: 876275 - DNA, 99 bp, Homo sapiens
tgtacggcaagtcgctgtaccacgacatctcggccactgagaatgcaaaggaggaagtgaggcgaattctggggctgctggatgcttacttgaagacga

SEQ ID NO: 876276 - DNA, 99 bp, Homo sapiens
gctctgaagaggtcaaagaaacgtggatggaattgtcagccacttgaagaagcaggcaggaccagcttcagtgcctctcaggactgaggaagaatttaa

SEQ ID NO: 876277 - DNA, 99 bp, Homo sapiens
acactgactccctcaaaatcaaggtttgctgtaatggcacaagagtatttgtgcagaaagaaattcttgataaatttacagaggaagtggtgaaacaga

SEQ ID NO: 876278 - DNA, 99 bp, Homo sapiens
catggactgaagtatccagcgctcattgggaatttagttaagctaaacctattcgtcccgggcaacatccagcagcttctccaactcacccaagtgcaa

SEQ ID NO: 876279 - DNA, 98 bp, Homo sapiens
actatttccccacccttgcggaaaaacgaggacatgaaccttaacgaagagaaaaaagctcctttacgaaacaaagactttaccaccaaacgtgagat

SEQ ID NO: 876280 - DNA, 99 bp, Homo sapiens
cctgggaggagttcagccgcgctgccgagaagctttacctcgctgaccctatgaaggtgctccagtgaaccacccagggaatgacgaggtggcgagtga

SEQ ID NO: 876281 - DNA, 98 bp, Homo sapiens
ttcacttcaagaacattgtccactgtgacttgaaaccagaaaacgtgttgctggcatcagcagacccatttcctcagagaagcgtctgcaccgtttga

SEQ ID NO: 876282 - DNA, 98 bp, Homo sapiens
aaagacaaaggaaagaccagtagaagagaaagaaaccaaaaacagcaagcgcagagccaaacagccaggcagactcaatgatgaggcacggcggctca

SEQ ID NO: 876283 - DNA, 98 bp, Homo sapiens
tctggcacacgtcttagtccactagagctggtaatggaacttaatcgatctgagagtttatgtcatgaaaactcattcttcatcaatgaagctttagt

SEQ ID NO: 876284 - DNA, 99 bp, Homo sapiens
caaaattaaagagctggaggcctcaaaggaagatgaaaaatttctgacagatttgtttgcacaactaacagatgaagcaacagatgaggaaaaaagaca

SEQ ID NO: 876285 - DNA, 99 bp, Homo sapiens
gaagagacatgagacagtagtcaaatactcagcttcaccagcctccaccaagacgggacaagcagggagtttatccggcagcccaaagcccttctctcc

SEQ ID NO: 876286 - DNA, 100 bp, Homo sapiens
caaagattcgataacccttattcaggcccagatcagcagcacatttcttgccaacaatcattaagtgtccaagaagctgcatctccaccactttcccttt

SEQ ID NO: 876287 - DNA, 100 bp, Homo sapiens
aacttttctctggacttccccagaagtgggacttttgataatgaaaggccaggtcctgaattcaaccacaatcttcttctggggaagtccagagaaaagt

SEQ ID NO: 876288 - DNA, 99 bp, Homo sapiens
caccgggctgggagcatcgcgggcctggcggaggagaatcagtcatcccccggacaggggcaggagctgctcctccgggtggtgggggccacctgtgcc

SEQ ID NO: 876289 - DNA, 100 bp, Homo sapiens
ggcctttgagctgctgacattcgtatagcttcttgtaccataggattttggaagatggtatcatcttcaagttccagctgaaagtcagcagctcaaaggc

SEQ ID NO: 876290 - DNA, 99 bp, Homo sapiens
tgacagtacacgtgggcaacgtacgtcagacggcagtggtggaaaagatccatgccaaggtgtgggacacggcggtggggctgaaccacacggcggagc

SEQ ID NO: 876291 - DNA, 99 bp, Homo sapiens
cgaaatttgcatttcagaaaggccacctgatactgtatggaggatggcctagagggctgaactgatgcttgaaggattctaattctcaggtggatttaa

SEQ ID NO: 876292 - DNA, 98 bp, Homo sapiens
ccaacttcgtggcgacctatggccgtggctaccccggatttgctccaagctatggctatcagttcccaggagggttggagcccaggcgtttggtacgg

SEQ ID NO: 876293 - DNA, 99 bp, Homo sapiens
ctggacaagatgaagtctttctgccagttttaacttctagtcatggcgaatgatcgcaggagagcacagactggaccctgctacgatctctcttggagt

SEQ ID NO: 876294 - DNA, 98 bp, Homo sapiens
ttaaggacaaaagtgctgaggatgctaaagctatttatgagagtatgttgcaagtgagggtgaagaagatccagaagttgaatttttaaagtcactaa

SEQ ID NO: 876295 - DNA, 99 bp, Homo sapiens
ttctccaaaacgtggattgaggtctcaggttcctctgccaaagattccttcagctcctacttaatggaagcctcgcagatgcaagatggctccagcagg

SEQ ID NO: 876296 - DNA, 99 bp, Homo sapiens
agattttccgaggaaagcgaacattatatccagaatcatggacggacagaggatgcacttgtccaatcctcaatcctgtggtctggaacctaacctgca

SEQ ID NO: 876297 - DNA, 98 bp, Homo sapiens
ggttgaaacaaaattggcgattattcctggtggagccaccaaaaccctcaacaggggcatctctgagttcatcgtgatggctgcagacgccgagccac

SEQ ID NO: 876298 - DNA, 99 bp, Homo sapiens
caggaccgatgtaaccttaatgacttctgtagaggccccatctccaaatacagacatgctgcagttaggtcttcagctgggaggctgaggcaggagaat

SEQ ID NO: 876299 - DNA, 99 bp, Homo sapiens
agcccacatcggtctgccttcggcctttgctttgggtgagaagcatcctgagtttaaggatgacatctacatgccgtatgctcagtggctagcagagaa

SEQ ID NO: 876300 - DNA, 99 bp, Homo sapiens
gttattgcagtggcaggtgcacgcttatctttatctgtggcatgcaactgcatgttggcagataaattgaacatgactccagaagaagctgaaaggtgg

SEQ ID NO: 876301 - DNA, 99 bp, Homo sapiens
ttcctctggttttacattggttcttcattgaatggtactcggggaaaaagagaatagcctaacatggcagaccagagacagcgctcactgtctacctct

SEQ ID NO: 876302 - DNA, 99 bp, Homo sapiens
ggctgattggattcgttactgctttgcaacgcgcacctaactccagggttccgagtctgaggaagacataaccttgtgcctgcctgcccacctctctct

SEQ ID NO: 876303 - DNA, 99 bp, Homo sapiens
acaaggagtaagggaactttgcgatacatgagcccagaacaggttcagcagactgtacaggatctttttggcagagccccaagtaaagctgtcaatcct

SEQ ID NO: 876304 - DNA, 98 bp, Homo sapiens
gtgaataacttcagagctctgcgcagtgagacggagctgctgctgtctgggaagatggccctgatgaaaggttgtatcaaagttcttaaggaccaacc

SEQ ID NO: 876305 - DNA, 99 bp, Homo sapiens
aaaacaccagaactcaacctgggtttggagaacattgattaaggaagcattttcctgattgatgaaaaaaataactcagttatggccatctacccctgc

SEQ ID NO: 876306 - DNA, 98 bp, Homo sapiens
tggaaatcgacttcggtttcagttggagttggaatttgtgcaatgtttagccaacccaaattaccttaattaacccagtgacttgattgtaaaaattt

SEQ ID NO: 876307 - DNA, 99 bp, Homo sapiens
tccacccgggtcaccttcctggcttggcagtatcggtttgtcattgagttggaccttagcccatctactggcattgtgagacagggtttcaccatgctg

SEQ ID NO: 876308 - DNA, 99 bp, Homo sapiens
catcgacggaattccagtctctgtggacaaaatgacccagcctctttgaaatgtgctgctagtgggagctgcagcttcctcctgctgactctgagcccc

SEQ ID NO: 876309 - DNA, 100 bp, Homo sapiens
gagtatgtcgtagaggatcatggctagcctttctaatcctaggccaaaagcccagccgattcggtcttgagcaccagctgccggggtcgctccgaagact

SEQ ID NO: 876310 - DNA, 99 bp, Homo sapiens
cattggccacctacagaaacaaaatgtcaacaaattgatggatgttcaagcaaatgctttcagaaaagcaaaccaaatgggagcattacaagaaagagg

SEQ ID NO: 876311 - DNA, 99 bp, Homo sapiens
ttattaatacggggatctgtgagtcttctggcaaacagtgtttgcctctggttcagctcatacaacagcttcttagatcatccaggcttctgttacagt

SEQ ID NO: 876312 - DNA, 121 bp, Homo sapiens
agaccttcatcacagcaatggagaagagaaagcacaaagcatggagaccctccctccaggtgttacttgattgggcaagacaatcattggttgcattttataagaaaaagcttgaactgaa

SEQ ID NO: 876313 - DNA, 99 bp, Homo sapiens
tttcagcatcgcacaggatgccctgcacatccccaggctcctggagccagaagatttctaccactccaaacgccggctgatcttctccaagaggaagcc

SEQ ID NO: 876314 - DNA, 99 bp, Homo sapiens
tcaactcaaatgcaagtccaagaggaggaggaggcggaggtccaagcggaaagaccaagccaccctggtagaacaagtaaaaagagtaaaagaaattga

SEQ ID NO: 876315 - DNA, 98 bp, Homo sapiens
gcaaataacttttccttggagagtcataacatatcactgactggtgcactttacaggtccccgatgaaccaagagaaccctccaccatatccaggccc

SEQ ID NO: 876316 - DNA, 102 bp, Homo sapiens
ccgcgtccctgagccgccatcgctgtgaaggcttcgagccctcctaggcccctgctactcaacttctgacctccaggtcggcgctggcctggctcagggacg

SEQ ID NO: 876317 - DNA, 98 bp, Homo sapiens
agtggacctgcaggtacttggatctccagtgggagctgccctctcgaaggcaggacagcggtggcggcaggtgttgactttaaggtgaaaacaatttc

SEQ ID NO: 876318 - DNA, 99 bp, Homo sapiens
gtgcctagaagacttcaagcctcgagatgagttggggatttgcccatgtaagcacgccttccacagaaagtgaacgagaacgccaagaaggacctgaag

SEQ ID NO: 876319 - DNA, 98 bp, Homo sapiens
tgactcaagaatacagcgattgcagtcaggcaaaattacataccggttacggcacctccttcgtgcaaggtgtgatgcatccccagtgaccaacaaca

SEQ ID NO: 876320 - DNA, 99 bp, Homo sapiens
ctctgatatgggaaagactggtcatcaactatgtgccagtgaagaacattaaacttattaaaagccatggcatcctgtaatcccagctacttaggaggc

SEQ ID NO: 876321 - DNA, 99 bp, Homo sapiens
atgaaacaagatgcccaagtgatttcttcttgcattattcccatcaatgttactgattttgaaggtatggcctttcttgaaactgaacaaggaaaacca

SEQ ID NO: 876322 - DNA, 99 bp, Homo sapiens
agggatctcatcagcttcaccgtttactacaaggaagcctcatagtcggaagccggcaccctcaaatgagcccgaatatctatgtaaatggatgggact

SEQ ID NO: 876323 - DNA, 99 bp, Homo sapiens
ccaacaccttcctgtgcagtcctgttggaatttgttgaaaggattgttgacaaaaggaaaaataaaaaagggaagacagagtatttggttcggtggaaa

SEQ ID NO: 876324 - DNA, 100 bp, Homo sapiens
gctagaactcaaggtgccttgctgcttggagaacattcctgtaacttgtccctgctccttgaacttcaagccggaccaccaggggcaccttgagttctag

SEQ ID NO: 876325 - DNA, 99 bp, Homo sapiens
tctgcttttttcattgttccactggacgctcatcagagggaagatctttttcctcaattgccacagtacacgaacctggggctcctgaacagcatggac

SEQ ID NO: 876326 - DNA, 99 bp, Homo sapiens
tttgttctttaaatattacggaacacgagaagctgtgattgcccagacacggcatcagcgaggagatacgcatcctctaaccttagatgaaattttgga

SEQ ID NO: 876327 - DNA, 99 bp, Homo sapiens
gccgaggcgggcagatcacctgaggttctcccatgggcaggtggtctctctggatgagctgcgccccttccaggacccagacctgagctccctgcaggc

SEQ ID NO: 876328 - DNA, 99 bp, Homo sapiens
gcttaatgatataccacagtcaacagaacaggccatgaccttgcctcctttcctggagttcggtgtcccgtccccagcccacctcagagcctggacggt

SEQ ID NO: 876329 - DNA, 98 bp, Homo sapiens
catgccgctcaccgtagacgagggggctgttgtggttccgactataaacagtacgtgtttggcggctgggcctgggcctggtggtgtatctccgacac

SEQ ID NO: 876330 - DNA, 99 bp, Homo sapiens
aagtggcagcaggagctgagctgggaggaggctgcccggcgcctggaggtggccatgtaccccttcaagaaggactcagtggcctctgaggatgtggct

SEQ ID NO: 876331 - DNA, 99 bp, Homo sapiens
gacttggatcgaattctcactctcacaaccaatgagtttgctaatccagactttacacaacctatctcagaagttgtagatgaagtaattcagaattgt

SEQ ID NO: 876332 - DNA, 99 bp, Homo sapiens
agatctaaagtcacccggcggccaaaggccagtgactaccaacgtttggaccagaaggagtgtggccatctggggccgtgtggtatttgccactcagga

SEQ ID NO: 876333 - DNA, 99 bp, Homo sapiens
ggtgcttcaactggtatctatgaggccctagagctccgggacaatgataagactcgctatatggggaaggcaaagaaatgatgactttattgaattaga

SEQ ID NO: 876334 - DNA, 100 bp, Homo sapiens
caagcatgaaaagccttaggatattgctgtgtttatcactcctaacaaaagatggtttctgtcctgggacaacagcaatatcctaaggcttttcatgctt

SEQ ID NO: 876335 - DNA, 98 bp, Homo sapiens
tttgatccagaacttgcagcaacaataggaccttatggattttctgaacccaaacggtagtgactgtactctagtcctgttttacaccccgtggtgcc

SEQ ID NO: 876336 - DNA, 75 bp, Homo sapiens
tttgggtctcctctcccaaccatcgagtgtttcttcagatgattctgaatcacacatgagtgaagaaaaaaagga

SEQ ID NO: 876337 - DNA, 99 bp, Homo sapiens
cccacctcagcccagcaattcggacacaactcagatgggaagttcatcgcccgggcacagcggatagagtacgactgtgaactagttccccggcgagtg

SEQ ID NO: 876338 - DNA, 99 bp, Homo sapiens
ctcttggatgaagccatacaggctgtgaaggtccagtcattccaaatgaagagatgcctgtgtaatggagagagggctaaagaagaagcaattacacat

SEQ ID NO: 876339 - DNA, 99 bp, Homo sapiens
ttcatcagagagcattttactactgagctgcaaaggtgatttgatgaaggctgctgcaggagagttcgcagatgatccctgctcttctgtgaagcgagg

SEQ ID NO: 876340 - DNA, 99 bp, Homo sapiens
agatagccatgtcacctgtgaattatcatgaatcccacatcaaatgaacaaatactgcctctggactctgaattagagacggggtttcgccatgttggc

SEQ ID NO: 876341 - DNA, 99 bp, Homo sapiens
aaagagtccggatctggggctccatcatgaatctctaagagtggcccagagattctcacgttccctagggactttgaacatgtcggggatcgccctcag

SEQ ID NO: 876342 - DNA, 98 bp, Homo sapiens
acacggtccacagctcatcatgatggacttggagctgccgccgccgggactcccgtcccagcagagatgtgctccggcatctattcgcctcatggaca

SEQ ID NO: 876343 - DNA, 99 bp, Homo sapiens
tagccagttacattccagaggatgaggcgctgatgcttcgggatggacgagttactgaaagctctcgaaattacggttacaatccttctcctgtgaagc

SEQ ID NO: 876344 - DNA, 99 bp, Homo sapiens
aacaaactgatgaagaaaattaaaaaactggagaatgacaccatttctaagcaacttacattagaacagtcatggctccgatcttcatcttgaagaaga

SEQ ID NO: 876345 - DNA, 98 bp, Homo sapiens
gcagccccatcctccgagacctgctcttcagcccggaccaccggcacatctatctcctgagtgagaagcagatttgttcccgacaaggagttttctgg

SEQ ID NO: 876346 - DNA, 99 bp, Homo sapiens
gagaactccccagagttcacaccttacctggagaccataaaatctcgacctgtttcaagagttaccaatggaacttccaataaaaaaagtattcatgaa

SEQ ID NO: 876347 - DNA, 99 bp, Homo sapiens
catcacagtacacatgaacaaggccagtcctccatttcctcttatctccaacgcacaagatcttgctcaagaggagcttgagaactgaatcaaacactt

SEQ ID NO: 876348 - DNA, 99 bp, Homo sapiens
ttggtgggacttttcagtttggctataacctctctatcatcaatgccccgaccttgataatcttgtgccgtggaaatcagaagggcaaaacgaagcagt

SEQ ID NO: 876349 - DNA, 99 bp, Homo sapiens
acagttatgcactttaccctttttaatattggccaatcatcaagacaagccagcagctcgctcagtacaagaggtcttcaaagcttcacctttctccaa

SEQ ID NO: 876350 - DNA, 99 bp, Homo sapiens
tcaaaatgaagatggcacatggcccaggcagaccttgcagtcaaatcttggtctttgtaatgggaaaagaaggggtccatggaggcggattgaataaga

SEQ ID NO: 876351 - DNA, 99 bp, Homo sapiens
ttgaggcccagaatgcactgcacaatattaaaactttacctgggtgacaaaggagagcatgcttccagctggagctgagtccaagcacacagccactcc

SEQ ID NO: 876352 - DNA, 99 bp, Homo sapiens
gaacgaattctcaacccctacaacttattcctgtccggagacagcctaagggcagctgagtatgtcccagagaaggtgaagaaagcggaaaagaaatta

SEQ ID NO: 876353 - DNA, 99 bp, Homo sapiens
cggctttgaagtggtgcgtggagggaccggtggcggggtcttcttatacgccactaggcatgatgaacctgtcagcttagtataggcttccatgtcgtc

SEQ ID NO: 876354 - DNA, 99 bp, Homo sapiens
aaaaaaagatggagccctgcatatgattggctctttagctgaaatacttctgaaggaagctcagcccggagccagaaacgggaggcccgcctggacaag

SEQ ID NO: 876355 - DNA, 99 bp, Homo sapiens
acggtggtgttagcacctcagcccatcccagcgtcgtctcggagatgcagccaagaaagccatcagtaaattgacaaccaggacagtaaagaagggtga

SEQ ID NO: 876356 - DNA, 99 bp, Homo sapiens
aactattcgaactctgttgtagcccgctgctagatgtaaaggagtcgactcaaagagtacttggaatgtttgacatagaatggctctctgggactcaaa

SEQ ID NO: 876357 - DNA, 99 bp, Homo sapiens
cgtgcctgtcttcagatcttcacagcacagttcctgggaaggtggagccaccagcctctccctgggatgcttcctttggaaattgcacttacaatctca

SEQ ID NO: 876358 - DNA, 99 bp, Homo sapiens
gctcttcataaaatacggtgtttcattagtatccaaaaactgttcgatgtgatttatgagctggttactcgctctcatgaagcactgtgggtacgaagg

SEQ ID NO: 876359 - DNA, 98 bp, Homo sapiens
gagctgcaagccggtgcagcagccttcagcttttggcagcatgaaagttagcaagcctacattcatcagtacacaaaatttggaatcgaagaagagga

SEQ ID NO: 876360 - DNA, 99 bp, Homo sapiens
gggaagctcaggactagatgccattctttgactcaatggagattatatcatgtccatctcagttgaagaagtgaactgctcaagtcactttttccatgg

SEQ ID NO: 876361 - DNA, 98 bp, Homo sapiens
gcatgggggcgcaggagccctcccggcccctattttcccttataaagaacctgctcttcagcgtctgtgggctcaccatttgtgccgctataatctgt

SEQ ID NO: 876362 - DNA, 99 bp, Homo sapiens
gatctacgctgccagtgacgacatagggtgccgtcttgtggaaatctggactctgcaaaccagtgactgaaatgccatgctgctcctcttttaattttg

SEQ ID NO: 876363 - DNA, 98 bp, Homo sapiens
gatttaaagaattcacctcacagcaggaagaggacctgccagatcagtgttgtggctcacacggaaatgaagctatacctgcaggcccgcttcacttg

SEQ ID NO: 876364 - DNA, 98 bp, Homo sapiens
ggggctcttgggtggtctgtaagccgcggagctaattggagatggtttcacagcacgcagtggcttcgggggtgcaaatagctatgggcaacttggcc

SEQ ID NO: 876365 - DNA, 99 bp, Homo sapiens
ttctcttcactcgagagatgaggacactgaaattcagagaggggaagtgatttgcctcagcttgtactgataccatacttgcagagctccttcagatac

SEQ ID NO: 876366 - DNA, 99 bp, Homo sapiens
gcatcaccctgagagtggtgaggaggctgtggctgtggtggaggatttccagagacacctcagtggatcagaggagctcaatgtacttctccagttcct

SEQ ID NO: 876367 - DNA, 99 bp, Homo sapiens
gatccagagctgagtaatcatctcaatgagattggtttcattccagatgaaaatgtttataggaggccttagctgggacactacaaagaaagatctgaa

SEQ ID NO: 876368 - DNA, 99 bp, Homo sapiens
ttacagagaaaaaaccaacaccttcctgtgcagtcctgttggaatttatattgatgatgttaagaagttcaaaccgggttacctggaagctactcttaa

SEQ ID NO: 876369 - DNA, 98 bp, Homo sapiens
ttgcaagaaacctcaggacttgagtaacagcaacatggtacaggatttgatggggatcagtgccttggagttcaactgctagagctggggaaaaagaa

SEQ ID NO: 876370 - DNA, 99 bp, Homo sapiens
gaggccttccagctgtttgaccgaacagggcagagcggcttgggtaaatccaccttaatcaacaccctcttcaaatccaaaatcagccggaagtcggtg

SEQ ID NO: 876371 - DNA, 98 bp, Homo sapiens
gagggacgagccagtggcaatgacccagacccggacgacccccattgctgagccagcggagctgcttggcatctaataggattcaggaatcaaagaat

SEQ ID NO: 876372 - DNA, 99 bp, Homo sapiens
gtccatgtagggcctcatatagaaaataaactccatctctcaccattggtttaatcttttccatataacccacgaagatggccagagcccctgtagttc

SEQ ID NO: 876373 - DNA, 100 bp, Homo sapiens
gagtcagtgtgacagtccatatgtaaccaaatatggcattcatttttatcttcagataggatccataatatttggttacatatggactgtcacactgact

SEQ ID NO: 876374 - DNA, 99 bp, Homo sapiens
gagcccccatcattgggagaaatccccactcctccaagaaccaacccccaaattggctgggacagctccagtgatccacaagctcagaaatacatcgcg

SEQ ID NO: 876375 - DNA, 100 bp, Homo sapiens
tgtatttgatcctgattctacccaagtacatatagtcttcactggtggctgccattgcagctgaaatcatatgtacttgggtagaatcaggatcaaatac

SEQ ID NO: 876376 - DNA, 99 bp, Homo sapiens
aacctatgatgtgtcttccattctaacatccatacaggaaggtgtcttgctgcaggtaactaatgaagaagtggtcaaccacagagtcttcaagaaata

SEQ ID NO: 876377 - DNA, 99 bp, Homo sapiens
ttcaagaggtgcagtctttgaagggctgggtaatgttgcatctgtggagctaaagtcacagatgtgacattgatgtgtccactgaagccatgtatgctg

SEQ ID NO: 876378 - DNA, 99 bp, Homo sapiens
ctcgatcatcatgtggtggtatgttttttgtctgaaaatagggaatatcctttacattttgttcacaaagaagttttagatcatctctctgaggggaac

SEQ ID NO: 876379 - DNA, 99 bp, Homo sapiens
ggacagcatggatgggctggagacaacagaaacagaaacgattgtggaaacaggaaggtgggagtcaatcattttgacaagtctcctgaaaggaacagc

SEQ ID NO: 876380 - DNA, 99 bp, Homo sapiens
caagataccattttgctgctttggaaaagacctattatgagaggcttccatatcgggatagtatccaaagccaccaagaaagcctttctgttctcaggt

SEQ ID NO: 876381 - DNA, 99 bp, Homo sapiens
tggacgtggtgccggaggggaagaaaataaagaaaacgaacgcccttcggccggatcgaaggccaaatttgagtttcatcatggtgactatgaaaaaca

SEQ ID NO: 876382 - DNA, 99 bp, Homo sapiens
gaagcgactgcagagccagaagggagtgcagggaatcatcgtcgtgaacacagaagatccattacaagattttggcttttctgttgaaaagtgttccaa

SEQ ID NO: 876383 - DNA, 99 bp, Homo sapiens
ccgggctcggttagtgcccaccgatgtcatcatttacagtatatacaaataacagtatttacaaggtagaatactgccatttcttttgagggcaaaaat

SEQ ID NO: 876384 - DNA, 98 bp, Homo sapiens
tttagactagagccctatctcttcttgagaagctgggatttgaaggagctatcctgagatctgtactgctaaatttggtgttcacttggcagaactga

SEQ ID NO: 876385 - DNA, 98 bp, Homo sapiens
gcaatgtgtctaaattacatgtctaacttcaaacttgtggctgttaattcaaaactctatgccatcggagggcaggccgtttctaacgttgagtgtta

SEQ ID NO: 876386 - DNA, 99 bp, Homo sapiens
ctcgtctcatctccgttaaaaccaaatccactggatctgccacagcttcagcatcgagctgctgttatcccaccaatgaaatgcactcggtgatggaaa

SEQ ID NO: 876387 - DNA, 99 bp, Homo sapiens
ctggcctctggctgctgctgctggcccggccggcctcgtgcgccccagggttctatggcctggatgagtctgacctcgacaaggtcttccacttgccca

SEQ ID NO: 876388 - DNA, 99 bp, Homo sapiens
cggccggaagcggctgtgcggcggccgcgctgccacctcagcaaccgcctccacgtttgataaactttcagaatcacagccccaaacccaatggaccag

SEQ ID NO: 876389 - DNA, 99 bp, Homo sapiens
taaagtgaagattcatggaatattgtccaatactcatcggcaagctgcagaatgtatcctgtcaggtataatgtcagtgaatggcaagaaagttcttca

SEQ ID NO: 876390 - DNA, 98 bp, Homo sapiens
gacactgtgcagattttcatccaagtggcacagtggtggccataggaacgcactcaggcaggtctcttttattcaaaaccttgtattttgtgtggaaa

SEQ ID NO: 876391 - DNA, 99 bp, Homo sapiens
ccttccagcctatcgagctcaactccttcaccaagcagaaaaagtcctacctggagcgaagcgttaaggaagctgaggacaacatccgggagatgctga

SEQ ID NO: 876392 - DNA, 99 bp, Homo sapiens
gttctcgtcagctcaggagagggcaaggtggagctgatcagaataatgttcagcatcaaccccctggagaacctgaaggtgtacatcagcagtcggcct

SEQ ID NO: 876393 - DNA, 99 bp, Homo sapiens
tgcgatgtctgtggactgtcttgggcagcatgcagtgctttctgggaaaattgcctaagaattatgacccaaaagttaccccagatccagaaagatggc

SEQ ID NO: 876394 - DNA, 99 bp, Homo sapiens
catcaccccttgcactccccgctcctgccccttccgtatggggacataaatctcaactcaaaagatacagatattgtggatgaagccatctattacttc

SEQ ID NO: 876395 - DNA, 99 bp, Homo sapiens
agcacatgtgaaggtatctctctaaaattgacctcattggtttcgttctcagcaaactgactctctctgggggcaggtcctttgaattgacttctgata

SEQ ID NO: 876396 - DNA, 100 bp, Homo sapiens
gttgatctgtaatgttcaggccatggaagaaatgatgatggaaatgaagtataatcatttccatcatcatttcttccatggcctgaacattacagatcaa

SEQ ID NO: 876397 - DNA, 99 bp, Homo sapiens
gtgcgggtgatcaagaccacatctgctgtgaagaacctgcagcagctagcccaagatgcggacctggccttgctgcagaggtggggctggtgtccgagc

SEQ ID NO: 876398 - DNA, 131 bp, Homo sapiens
cgcaatttactctggcaaacaggactcaaggtcgaagattcataactctcatcgataacttttatgatctcaagggaccattgcaatttagagatgtggccatagaattctctctggaggagtggcattgc

SEQ ID NO: 876399 - DNA, 99 bp, Homo sapiens
ccgagggcaactttggaggccccctggaaggctttaggatccaggccacagagatgctggttcacaatgcccagaacctcatgcagtctgtgaaggaga

SEQ ID NO: 876400 - DNA, 99 bp, Homo sapiens
caattgtgtaaaagcctcggttcttacgccttattaccacaaagtaggaattacatgaatgacagtcttcgaaccaatgtgtttgttcgatttcaacca

SEQ ID NO: 876401 - DNA, 99 bp, Homo sapiens
caatgagcacatgaccagcttagcttctgtcctaaaggccatcagcatcagcaaagccatcaacacccaggaggcccccgtgaaggagaagcacgcccg

SEQ ID NO: 876402 - DNA, 99 bp, Homo sapiens
ccagcttcctgagattttagtccttaagctccctgacttgctgctcgtcctttctctggcaaaatctcatccttggatgagcccgactttgtgtttgct

SEQ ID NO: 876403 - DNA, 99 bp, Homo sapiens
tcacctctactcccatgaattcacctttgattccagtgtgaactgtcaatcataaggaaatggtgttcacactggccctgaatcaagggaacaccagtt

SEQ ID NO: 876404 - DNA, 99 bp, Homo sapiens
gaaaaggagagctcggctgttccagccaggtgatggtggcctgcgttttggagaaatggaacgagattgtcagattgcccatggagcagcccagttttt

SEQ ID NO: 876405 - DNA, 99 bp, Homo sapiens
gacagtggacatagaggacaacgcagatatagaacatttcttttatcacaaatttagagatgcatgaccggatggaacacctgatagaaaaacaaatca

SEQ ID NO: 876406 - DNA, 99 bp, Homo sapiens
ctagcaacatctgaagaacaagaaatggatatgagaagctttcacggagaggtggtgtccacattacacgggtacactgtaatcccaacactttgggag

SEQ ID NO: 876407 - DNA, 99 bp, Homo sapiens
caaccttgaactttccagacgcagaacttgagaaatgtctatccaccgaggggttttcctccttaccttcccccaagacctggatttttccccccaccc

SEQ ID NO: 876408 - DNA, 99 bp, Homo sapiens
ctccagtgggagctgccctctcgaaggcaggacagcggtggcggcagggatatcatgataacacattttgaaccttccatctcctttgagggcctttgc

SEQ ID NO: 876409 - DNA, 99 bp, Homo sapiens
ggtgaagatggtgactccactgatcaagaacttcttctgaggacagacagccgcggcgagtcctttgcacatgttggcaacacacgcatccgcatcggc

SEQ ID NO: 876410 - DNA, 99 bp, Homo sapiens
cttctccaagattttctgcaatttgtcctgtaagatccaacagactgatcatttccctgcaagtgttgatgttgaatccatcgaattttatgtctgttc

SEQ ID NO: 876411 - DNA, 99 bp, Homo sapiens
agcaaggaattgggtgtggtggccaggaaacgcaggttggatggtgcatcaatggcatcttcttcatcctcagcttcttctgcttccatagggtcatat

SEQ ID NO: 876412 - DNA, 98 bp, Homo sapiens
agtcctggtcaccatcgaagcctctgtcatccctgattctgaaaaagagttccacgtcctcccttatcgagtctttgttccccttcctggatccactg

SEQ ID NO: 876413 - DNA, 99 bp, Homo sapiens
gatcaccgtcatccacagcaaggactgtttcctcaaagttggtgagtttgtaagtgatgcccttctcgttcctgacaagtgcaaattcttacaccagga

SEQ ID NO: 876414 - DNA, 141 bp, Homo sapiens
aagcaggcctcatctcagagctgggtgccaggctgaaggatcactgaggaaggggaagtgggcaaagcagggttgggggatccagctatctgtaattgtgaagtgaagaggatgtgactgccaggtaatgctaaccccgaa

SEQ ID NO: 876415 - DNA, 99 bp, Homo sapiens
cttccaaatgcggtgttgaaagtcaccaactccggcttttcagggacattaaactgaggctcagagtacaggtggtactgtaatcccagctactcagga

SEQ ID NO: 876416 - DNA, 99 bp, Homo sapiens
actgtaagcaatctacgaagaccgaggaaaagctgcgggtgagccctattcccagaggcaggtggtgctgaccctgtaacccaaaggaggaaacagctg

SEQ ID NO: 876417 - DNA, 99 bp, Homo sapiens
tgtagaaactgtctttaacctgaactcccccactggaaaggattctgaaagaaatgaagtcagccctcagaaatgaagttgactgcctgctggctttct

SEQ ID NO: 876418 - DNA, 99 bp, Homo sapiens
ataaaatttgaaccttttggagctgtgtgctaaatcttcagtgggacaatgggttcagacaaaaggtttcccaaatgtggggaaaagcagcattatcaa

SEQ ID NO: 876419 - DNA, 99 bp, Homo sapiens
gggaaaacttgctgcggttgctcaagtttgtacaatgacgacagaaacctgcttcgaattagagagaaggaaagacgcaaccaggaagcccaccaagag

SEQ ID NO: 876420 - DNA, 99 bp, Homo sapiens
gcccgcctgcggctgctccgggagagcacagaatggggattcaacacctcggcaatgcccttttagtgtgcgagcaaccacgggaacttctgaaagttt

SEQ ID NO: 876421 - DNA, 98 bp, Homo sapiens
taaacacaagctattacatatttctagcagatggtgcagctaatgatggatccagagctggtgcggaacatctgccgctgggttaggcaagctgttca

SEQ ID NO: 876422 - DNA, 99 bp, Homo sapiens
atcaacgcgggagacttccacggcctgcaggaggaggagggactaagggctcaggtgcgggacctggaggagaaactagagaccctgagactgaaacgg

SEQ ID NO: 876423 - DNA, 102 bp, Homo sapiens
gaagatcagtacaaaaattcttcaagaaatctaagatcacagattctgctggccatattctctactccaaagaggatgcaaccaaggggaaatttgccttta

SEQ ID NO: 876424 - DNA, 99 bp, Homo sapiens
tgtggggatgttaggatattgtggaacggtgaaaagaaatctgttgcttcttgcatgggctaagtgctatttatggaggtacctatatgctgaataaac

SEQ ID NO: 876425 - DNA, 98 bp, Homo sapiens
agcctcccgagaagctgggattacagtaggtgacctcacagtgactcaagctaccacttactgttgattgtgacgaaatgccagctgaggcacatgcc

SEQ ID NO: 876426 - DNA, 98 bp, Homo sapiens
cagcggcggcgccagcagttccagtccgttgctttactttttgcttcaccgacatagtcattatgccgaagagaaagacttaattcagtgcacaaatg

SEQ ID NO: 876427 - DNA, 99 bp, Homo sapiens
gactactgggcgcgggagtcctcaggacttgaagctgtcaggcagcctgcttctgcaaagtggtacgatcgaagggactatgtcttcattgaattttgt

SEQ ID NO: 876428 - DNA, 99 bp, Homo sapiens
tcacaaacactcagagtggaaaaagtaccatcatttgaaacaggaacatcatcttcagcgggctatttcagcacagcaggtgtatggcgagaagaggga

SEQ ID NO: 876429 - DNA, 99 bp, Homo sapiens
agtagtgcccgccccacccgcatgctctttgtcactccccggcggcagcacgaaagtaccatagagaagctagtgaagatgctggtggagctgctgacc

SEQ ID NO: 876430 - DNA, 99 bp, Homo sapiens
catgttcctgagcttgagatgctaggaagacttggtaggataagttctgaacgtcgaaaagaaaagtctcgagatgcagccagatctcggcgaagtaaa

SEQ ID NO: 876431 - DNA, 99 bp, Homo sapiens
ttgactatttttcatgacctttctcatctgactcgtgatctgcccatcttgttactccctagcagtgtggtaaggaatgggtaccacagaccatgtcat

SEQ ID NO: 876432 - DNA, 98 bp, Homo sapiens
ctggacgccactttccggggtgcacagcaagtggtggttccaggaaagaaatcactgaacactgggaatggcttgagcaaaatctcttgcagacactc

SEQ ID NO: 876433 - DNA, 99 bp, Homo sapiens
agtgactcaaattttcaagtgccaaacggaggaatacctcgtatgcaacctcaggcttcagccattggggactcgcttcattatagaagccatggaggc

SEQ ID NO: 876434 - DNA, 99 bp, Homo sapiens
aaaaggtgatctggacaaaggaacaggtatctcaggttagcatggcctcattgaaagaactagatcaaagactctttgaaaattacatcgagttgaaag

SEQ ID NO: 876435 - DNA, 99 bp, Homo sapiens
aatgtctctctatccatctctcgaagacttgaaggtagacaaagtaattcagcataccctgtaaaaagtgtgtggtggttggtaatggaggagttttga

SEQ ID NO: 876436 - DNA, 99 bp, Homo sapiens
actcggtcttgggtgatacggcgtcttgccaccgggcctgtcagttgacctaccccttgcacacctaccctaagggcatcctagaacgtttaaatgctg

SEQ ID NO: 876437 - DNA, 99 bp, Homo sapiens
acaagaattgcagcaggaaaaacccttgagagaagaagaaggaggttcctgctgtgccagaaacccttaagaaaaagcgaaggaatttcgcagagctga

SEQ ID NO: 876438 - DNA, 98 bp, Homo sapiens
ttcatgaagcatctgaaaaagctgtggaaggctctggataaggaccagtacctgcccaggaaactggaatctatggatttcctgaaatatgttgttga

SEQ ID NO: 876439 - DNA, 99 bp, Homo sapiens
aatgctggcagacaaaataggaatatttccaatttcatatgttgaggatttgtacacacagatatgacgaaagacttgaaagaagaacatttaaagaaa

SEQ ID NO: 876440 - DNA, 98 bp, Homo sapiens
aagatggaagatgaggaggtcgctgagagctgggaagaggcggcagacagcggggtgtcggcctcctcgccagccctggacaagatgggtcatcagga

SEQ ID NO: 876441 - DNA, 99 bp, Homo sapiens
cccctggatagcaagaccttcctgagccgccacagcatggacatgaagttcacctactgtgatgacaggcctgaggagcgatgcgacaggcatgatgga

SEQ ID NO: 876442 - DNA, 99 bp, Homo sapiens
gagctgccctgcatcaacacctgagtgagatcattggccgagacctgagtggcttccctgcacctcctggagaagagcctcctgcctgaaccacgtgaa

SEQ ID NO: 876443 - DNA, 98 bp, Homo sapiens
gaacggcggcgacaagggtgttcccgaactagagtgggtattgttgcagcatctggcagtgagactgaggatgaggacagcatggacattcccttgga

SEQ ID NO: 876444 - DNA, 99 bp, Homo sapiens
atgatcataggtttcaggctcttcaaggtacaacttggccaagtagaaatcaaatgccccatcacagagtgttttgaattcttggaagaaacaactgtt

SEQ ID NO: 876445 - DNA, 99 bp, Homo sapiens
tgcagctcaaggggaagaaaggcatttccggagagttcttttgaagtcacttcagaaggatctacatgaggaaatgaactacatcactgcaataattga

SEQ ID NO: 876446 - DNA, 99 bp, Homo sapiens
ggaagttcagggcagcaactcagtgtgaatttagcagaaaggaatttctagatggcatgacagaacttgggtttctggcatttgaagtcaaagagtatt

SEQ ID NO: 876447 - DNA, 99 bp, Homo sapiens
gacccttaataaagtgtttgcatctcagtggttgaatcataggcaagtggtgtgtggcacaaaatgcaacacggtgactattatatggttaaaaagatt

SEQ ID NO: 876448 - DNA, 98 bp, Homo sapiens
agcactatagtgcaggtgttggaagtgaaagatttctataggaagccactgcctcccctggctgtgccacagcgacctaacagtgatgctcatgatgt

SEQ ID NO: 876449 - DNA, 99 bp, Homo sapiens
caacaatgagagagtggttgtaaaaatcctgaaggtggcagaaagagcactctattattggaataatgaatacatcatgagtttgatagaagaaaactc

SEQ ID NO: 876450 - DNA, 98 bp, Homo sapiens
tgggatatacactgactgccagggccgaagatctagacaacaggaattgatgtggccagcaaatccttcctcttgttatggagtcttgctctgtcgcc

SEQ ID NO: 876451 - DNA, 99 bp, Homo sapiens
ctctatatgaacaatccgtctggatcacggatgtaggaagtgactggtgtcgttcagtatttctacattgaagactggcaattcgttaatgattatcga

SEQ ID NO: 876452 - DNA, 99 bp, Homo sapiens
agcgacacgagttatttccaaggcctcagcatacacaggaatgttgtcttctagatatgccactgatacatgggctgatgtggagaatctcaacagtca

SEQ ID NO: 876453 - DNA, 99 bp, Homo sapiens
accacgtactggctagacttatacttctcaaatcttaatttcctaaaggtctcctctgagcctccggcctccataagacccaaaacagatgacacctct

SEQ ID NO: 876454 - DNA, 151 bp, Homo sapiens
aaacacactggaggacaaggctcgggaactcatcagccgcatcaaacagagtgaactttctgccaagatgcgggtgcccctccggcctcgccatgaggctcttcctgtcgctcccggtcctggtggtggttctgtcgatcgtcttggaagg

SEQ ID NO: 876455 - DNA, 98 bp, Homo sapiens
gaaagcctggtccacgccgtggccggagccgtgaacaagttgaaatcatcgcagaaggataaagttcgtcagtttatgatcttcacacaatctagtga

SEQ ID NO: 876456 - DNA, 98 bp, Homo sapiens
ctcaacctacttacagtcacgttactacagtggccataaaatgcagtaaaaacaaatccagttcccaagaagctgtacaaatgctttcttctgttcga

SEQ ID NO: 876457 - DNA, 99 bp, Homo sapiens
ggccgcctcagcagccggctgcaggccagagagggcctcgggaagagatgcgaggatgacaagggaggttatattcaaaagaaaaaggaactgtgggga

SEQ ID NO: 876458 - DNA, 99 bp, Homo sapiens
ccgtcttgacccactgcagcagcaagggcggagcaggtacctctacctcttccacactgggcagatctccacccttgttagccaggatggtctcgatct

SEQ ID NO: 876459 - DNA, 99 bp, Homo sapiens
agtaaggtcatgcactggctgaaacctcttgtctgtaaactgtagcaataagcatgatttaccaacactctccatccacttctggtcttctacatacac

SEQ ID NO: 876460 - DNA, 99 bp, Homo sapiens
gaaaaatcttgagttgcttctttataaaatttccatttaacatatgcaatccctcggtatgtccttttgatgagcttgatggatttgaaggcttcgtcc

SEQ ID NO: 876461 - DNA, 99 bp, Homo sapiens
agcactccaatatcagccaacatcaatcattcttacttcttcacgttggcctccccgttggggatccttcgcaacttcttcttcttgaggatcttgacg

SEQ ID NO: 876462 - DNA, 99 bp, Homo sapiens
ctggagttatgccaaaaggacgtcctcctagtgctagcagcttagatgccatttctcctgttcagtgtggcaaaggagcagagaactttgacaagttct

SEQ ID NO: 876463 - DNA, 99 bp, Homo sapiens
ggcttctctcgggctttgtccccttgctggctgcccctcaggacccctgctacgtggagaaaacctcggataaggagaacatttcaggataggaatagg

SEQ ID NO: 876464 - DNA, 99 bp, Homo sapiens
aaaaattcttctatcaccccgttgtactcctccttggcagcatcaatcaggcagggctcagcccacacccggctcctgtagtcccagctacttgggagg

SEQ ID NO: 876465 - DNA, 99 bp, Homo sapiens
gtggtcaaagtgatcctggacaaatcgacacacgatgcttgatttcccaaccccagtgtctctcaggtgccgattttcttctgatagcttcatcatttc

SEQ ID NO: 876466 - DNA, 99 bp, Homo sapiens
gccccatttctgctctttcggctagcagccgtgtggctagaactacctctgatcatctttggagacctgtcttctggttacctggatgatactaagcag

SEQ ID NO: 876467 - DNA, 99 bp, Homo sapiens
aatgggccttcagcatgtacgacctggacggaaatggctatatcagcaaggcagagatgctagagatcgtgcaggttttatggcaggcacacaaagaaa

SEQ ID NO: 876468 - DNA, 99 bp, Homo sapiens
tggaccatgaggaggaggccctgtcatcgggcagtgtgcaagggggaacacacctgaaactagaggaacagcttatgtggtctatgaggacatctttga

SEQ ID NO: 876469 - DNA, 99 bp, Homo sapiens
aaaaaaaatacatagactgatgtttcagacttgtgcaggttgctatcaagatcatagataagacccagctggatgaagaaaacttgaagaagattttcc

SEQ ID NO: 876470 - DNA, 99 bp, Homo sapiens
ctgccagccaagtgaagacatgcttacttccccttcaccttccttcatgatgtgaagtacatgcgagaagccacgccctatgtgaagaaaggatcccca

SEQ ID NO: 876471 - DNA, 98 bp, Homo sapiens
aaaattgaaaaaatggttgacctcacccaggctgccctgaggatctgtgtttggtgaaaaggagccaaattcacctgcagggcaggcggctctagcag

SEQ ID NO: 876472 - DNA, 99 bp, Homo sapiens
gggtttttaatgaccacaacaagcaagcatgcagcttactgcttgaaagcgcctgaagggaaacgatcctcaggcctgacagccgtttgggtcgctcga

SEQ ID NO: 876473 - DNA, 99 bp, Homo sapiens
cttcctgtgcagtcctgttggaatttacatatgtagagtgtgtcggtcagaaggaacacctgagaaaccgctttatcatccttgtgtatgtactggcag

SEQ ID NO: 876474 - DNA, 157 bp, Homo sapiens
gtgagagccatttcttcggcatgaggagtggctcatggctgtggacagcaacagtactcagccatgagccactcctcatgccgaagaaatggctctcacgcccacaaacctaaataacaaaatgtctctgcagatgaagatggactgccaggaacaa

SEQ ID NO: 876475 - DNA, 98 bp, Homo sapiens
cagcggattaaagctaaagacatagttcctggtgatattgtagaaattgctgcagagagagatcatcattgcctgaatttagctttgtgactgcaaga

SEQ ID NO: 876476 - DNA, 99 bp, Homo sapiens
cgacactctgccaccttctccagcattgtgaaaggaaaaaggcctgtgtcatatcaacacttatctaacagcatggcacaaaagagaaactatgagaat

SEQ ID NO: 876477 - DNA, 98 bp, Homo sapiens
gtgtttgcggttcagccctttgatgaccgcagcaggcattttccctgaagatgagatcccagagaaggcctgcaggcgcctgcttgaagggaggcggc

SEQ ID NO: 876478 - DNA, 99 bp, Homo sapiens
cttcgggagctgggaagagcaccctgctgaagaggctgctccaggagcacagcggcatctttggcttcagcgtgtcccagacgaggtctcacctatgtt

SEQ ID NO: 876479 - DNA, 99 bp, Homo sapiens
ggcggagcgcaggcctcgtgccgttacggccatcacggcggccgcagtggcgtcctggagccctcctcaggtgattttacaacgagatgctgctctcca

SEQ ID NO: 876480 - DNA, 98 bp, Homo sapiens
accgagaagctgatccgcgagaaagacgaagaggcaacaggacctgtaccgaatcctgaaggcctacaccatctaccggcctgacgagggttactgcc

SEQ ID NO: 876481 - DNA, 99 bp, Homo sapiens
gactaggggccgccatctccatggccacggccgtgagccggccctgcgccggcaggtcgcgggacatactgtggcgcgaaatcatcgagttccccatcc

SEQ ID NO: 876482 - DNA, 99 bp, Homo sapiens
ctggcctggaatctcagcaggggacatcaaatggctttcaaggtttcgccagggagaccaggttcctataattctccagcatcacgtccctgtatagag

SEQ ID NO: 876483 - DNA, 99 bp, Homo sapiens
gtacctgcgtatccgcactgtccagcccaagcctgactatggttacctgggcttgtatgtgttctatgtggtcactgtgattctctgcacctggatcta

SEQ ID NO: 876484 - DNA, 99 bp, Homo sapiens
aaaagaagaggaaaggctcaaccaagagaaaaaggtctctgtttatttagaagacacagactaacaattttagatgatggagtttcactcttgttgccc

SEQ ID NO: 876485 - DNA, 112 bp, Homo sapiens
ggctgactgtcgctctgcctttgacaggagaggctgcttcttgtagagagcgatcgtcttctgatcaaaggaggtaaaattgttaatgatgaccagtcgttctatgcagaca

SEQ ID NO: 876486 - DNA, 99 bp, Homo sapiens
gtcacttctatcccttcagtgagcaatgctttaaactggagagaattcagttttattcagtacctacttcttaaacaaacactgagatccccagaggcg

SEQ ID NO: 876487 - DNA, 98 bp, Homo sapiens
cccccgaaggccctatcaggacatggagtatgaaagacgaaaatgatgcatcctgttgccagcagtaatccagctttctgtgggcctggcaagccttc

SEQ ID NO: 876488 - DNA, 99 bp, Homo sapiens
gggcaaggcagtggtcagcgacccgcagtccatctgactcctgcttcccgggtgttgctcgtgaactgaccaacactggatgaatttgaccatttctta

SEQ ID NO: 876489 - DNA, 99 bp, Homo sapiens
tcctgaggaattcttgaatattctgtttcatcatattttaagggtagaacctttgctaaaaataagacttaattcagtgcacaaatgagatgaatgtga

SEQ ID NO: 876490 - DNA, 99 bp, Homo sapiens
ctggtactagagtgtatgacgaacgaaaggaagaaagcatctccttaatgaaagaaacagttgaggagctcaagcttgggaaaatggtgtgcattcctt

SEQ ID NO: 876491 - DNA, 99 bp, Homo sapiens
gaagacagcatgtacacagccattccccagagtcccagccaccaccctgagattatgcggctcttccctcgggcccagatgcagacggtgccgaacgct

SEQ ID NO: 876492 - DNA, 98 bp, Homo sapiens
cagagcggagggagccccagacacggagaagctcggcacagtgacagaggcacccagggctcagcaagctcatggcccagcttgttggactcagaggg

SEQ ID NO: 876493 - DNA, 99 bp, Homo sapiens
tctcgctccgtggccttagctgtgctcgcgctactctctctttctggcctggaggctatccagctacgaggatgtcgtccaggaaagattgtgcagatg

SEQ ID NO: 876494 - DNA, 99 bp, Homo sapiens
atatgttttacatccaagaactacaggctttacttttgtggtagaccgtctaagagaagggcttatttcaaaacctttgtccctcagttccaggaggca

SEQ ID NO: 876495 - DNA, 99 bp, Homo sapiens
ccgggggagccaagatcttgggggtcctccgagtcttgcggctcctgcgcaccctacgccccctgcggaggcagccatgcataaagacgagtttcatct

SEQ ID NO: 876496 - DNA, 98 bp, Homo sapiens
gaattttcctaggactccgtttcaaggttaattcgaaagtcttgtggaagatctggaagaaacagtgtatgcagagaatatttccaaaatggtgggaa

SEQ ID NO: 876497 - DNA, 98 bp, Homo sapiens
ggcattcccatgagccacgttgcccggcagatacaaggcagatccaaccatccccaccgtggtcctacgatcagtcctaccaatacctgggatccatt

SEQ ID NO: 876498 - DNA, 99 bp, Homo sapiens
gccgagatcgcaccattgcactccagccatttgccacacttgcatgatattgtcttctgatacagaacaaatcacccaaggttcattgggattccagga

SEQ ID NO: 876499 - DNA, 98 bp, Homo sapiens
gaaggggcaagacgggttcagttcgtcatggggctgtttggaaagacccaggagaagccgcccaaagaactgtgttccttgcctgtatctccccttgg

SEQ ID NO: 876500 - DNA, 99 bp, Homo sapiens
atggctggtcctacgggggcttcctctcgctcatggggctaatccacaagccccaggtgttcaagatgcctgaggaagtgcaccatggagaggaggagg

SEQ ID NO: 876501 - DNA, 99 bp, Homo sapiens
ctaacggagccagagcagcatcagagcggagtctccttgctctgggctgctccaggccaggccatgcgggttattttccctgcaggccccagtgccacc

SEQ ID NO: 876502 - DNA, 99 bp, Homo sapiens
ccgacctgaaaccatctctgagcccaagacctagttgtttttgagcacgttcactctcgcagtgtcagctggggctgttttgcttttacccttctcaat

SEQ ID NO: 876503 - DNA, 98 bp, Homo sapiens
gaagcgcaggacaggctgcattggggccaaacacagaatcagcaaagaggaggccatgcgctggttccagcagaagttcccagtgacctgacagcaga

SEQ ID NO: 876504 - DNA, 99 bp, Homo sapiens
aatgatgatggaaatgaagtataataccaagaaagccccacttggtgtttcccatgatgaattgcttgacttagcaaagtttcatttcggtgactcttt

SEQ ID NO: 876505 - DNA, 99 bp, Homo sapiens
aataggagtctggtcaggcgtcaggctagtccgacgaagagtggcttccttcaaaatgtctactgttcacgaaatcctgtgcaagctcagcttggaggg

SEQ ID NO: 876506 - DNA, 99 bp, Homo sapiens
ggagaggccggacggcgcgggcgccggcgaggagagcccgcggctgcagagtttatgtggccgaggcagacaagtggaattaggccttgctgcagggga

SEQ ID NO: 876507 - DNA, 99 bp, Homo sapiens
tgaagatcttggtctcagaaagattactgatttgctcctgagtcctcttcagtctctgtagctcaggagtgtccgtgacgatgctgaagcccctccctt

SEQ ID NO: 876508 - DNA, 99 bp, Homo sapiens
aacaccatttgttcctcaaaaactggaaatctttaccagtccagaaatgcagcctacgacacctgatccaaaatacggagctggcatatacttcaccaa

SEQ ID NO: 876509 - DNA, 99 bp, Homo sapiens
caaaagtccattcagaaaagacaagagccctgtgagaaagctgtatgtgatggcttctgtgtttgtctgtctactcctttctggattggctgtgttttt

SEQ ID NO: 876510 - DNA, 99 bp, Homo sapiens
ttacagacataacatggagctccagtggaagtgatttgtcggatgaagataagacactttctcagttacagagagtggacagaggactgcagaaaatca

SEQ ID NO: 876511 - DNA, 99 bp, Homo sapiens
tcagaagcatcgtgaaaagcctccttctggttccaaatgagtgtgaacatggctacgcctcttcattcccgtccatgccgagcccccgactgcagcatt

SEQ ID NO: 876512 - DNA, 99 bp, Homo sapiens
taaacagcaaagagtggatccgacctttggcttcagaaagcataacccctactgtagaactaaatgcactgtgcatgaaacttggaaaaaaaccaatgt

SEQ ID NO: 876513 - DNA, 99 bp, Homo sapiens
gtcttctctctgctgcacaatgtactataacatggggcttctctattctgaagtgtgagcaggtctgattaaacttgcttgccaccgtgttgtactcag

SEQ ID NO: 876514 - DNA, 99 bp, Homo sapiens
gtcaggaatcacaaactttcttctaaatgcttgtgtcaacaaaacaatgttgctctgaacacatctgtgctctaggcgctgccctaggagccaggagcg

SEQ ID NO: 876515 - DNA, 99 bp, Homo sapiens
atccagcagcacaaagaccagtataatcttcttaaaatacagctagacctcggaatatacagaactggatgacagtaacttcgattggacttgtccaaa

SEQ ID NO: 876516 - DNA, 99 bp, Homo sapiens
aagactctgagcccccgaactctgcaaagcctccagaggacataccacctccaggatcaggatgcagaggttagtactccagtagttaagcaaggacca

SEQ ID NO: 876517 - DNA, 99 bp, Homo sapiens
ctcctgagtagctgggattacagttttccagttctcaagatgaggaggagattgatatggatactgttcatgatagccaggccttcatttcccatcatt

SEQ ID NO: 876518 - DNA, 99 bp, Homo sapiens
cgtgggcgtaggaccctccgagccagttttagagaacaacttgtaatggagccttcatctcttgagctgccggctgacacagtgcagcgcattgcggct

SEQ ID NO: 876519 - DNA, 99 bp, Homo sapiens
cgcaaggatatgatatcatggaaccagcagcaaagaagtgctatctggaaagagaggacctgaaggagaagaaggagaaggtggaggagaaggcaagcc

SEQ ID NO: 876520 - DNA, 99 bp, Homo sapiens
ccgggagtctgagctcaggttcatgcagccggtgaaggttgtgtactcctccaaggatcctgcccagccgaaagagagttccaaggtggatgcgaatga

SEQ ID NO: 876521 - DNA, 98 bp, Homo sapiens
ccgtgctggcaacaaaatgattgtgatggaaacgtgtgcaggcttggtgctgggtgcaatgatggaacgaatgggagtataaggttcagattcctgaa

SEQ ID NO: 876522 - DNA, 99 bp, Homo sapiens
tgtgaaagaagcagtagcagtgaatctacagggacgccatcgaatccgaagaagcctgtgaggaggagatatgagccgtatgggatgtattctgacgat

SEQ ID NO: 876523 - DNA, 99 bp, Homo sapiens
taccatggaccatcctgctggtcagcactgcggctggattttgcaggttaattcctcacacacgttcaccaggtacttggacaatatattttgaaggtg

SEQ ID NO: 876524 - DNA, 99 bp, Homo sapiens
gtccttctcgcaggccttcctccaccttgggtgcctcctgacgcctgccccggaagtcttcatctcatgatctgggatctcagaggatagtgttttccc

SEQ ID NO: 876525 - DNA, 99 bp, Homo sapiens
tcccctggaagcccggagacatcagcggctgcaattttgctactcgctgctcggcgtggaactgtcagatttggtgcttccagatgtgagttatcaggt

SEQ ID NO: 876526 - DNA, 98 bp, Homo sapiens
catttctgaagcgagcgtcttcgatgagagaagaagaaggaggttcctgctgtgccagaaacccttaagaaaaagcgaaggaatttcgcagagctgaa

SEQ ID NO: 876527 - DNA, 50 bp, Homo sapiens
aaaagtaatgttaacaataacccaggctggagcattggatttgctaaagg

SEQ ID NO: 876528 - DNA, 98 bp, Homo sapiens
cagcaccacagtccttctgcagtccctcgtccagccacccccaggccaacgagacttttgcttttgtgggcaacgtgactcactatgcccaggtctgg

SEQ ID NO: 876529 - DNA, 99 bp, Homo sapiens
tgtggaagatctggaagaaacaggacactgccttaggaaaaccacgagaggtgtttcgacttcctacagatttgacagcatgtgacaaccgtctttgtg

SEQ ID NO: 876530 - DNA, 99 bp, Homo sapiens
cttagtcaaaaagctcatcttgccttatcaagtaaactttggagtcggagtttaaaactagcttatactctacttaataaactgacaagtaagaatgaa

SEQ ID NO: 876531 - DNA, 99 bp, Homo sapiens
gcgggcgctgctggatgccgagcgcctcaagcgcgaggcataaacttggaggaggcagtggagagagcatcctggtatcacagcttcagcatggactga

SEQ ID NO: 876532 - DNA, 99 bp, Homo sapiens
tggttgttgctgaacttttgaagataatggcctgcattttattggtctacaaagacagcagtagggatgggcgtgttttgggcgtgctagaggtgtcac

SEQ ID NO: 876533 - DNA, 99 bp, Homo sapiens
cctgtgtagcattcacatcagactctgtgtagctgctggaaggaagtgcatgctgtggtcccccattgagctctggggctccttctgcctctgccactt

SEQ ID NO: 876534 - DNA, 99 bp, Homo sapiens
gtcatctctcagttcttccagctggacccgcttcctacagtcagacacaaaatgatcgacatcgaaatcttcttcctgatcaccattttggactctgat

SEQ ID NO: 876535 - DNA, 112 bp, Homo sapiens
gcgcgcgctcgattccccccacgctcattgactttgtccagcatattattgatgagctggatcttgtctgcaactttagctcgtaaacaggcggcgccgccgcgtgggggga

SEQ ID NO: 876536 - DNA, 99 bp, Homo sapiens
ggtttgctgcagttgctggccgagcctggcctgggccgcgtccatcacctggcactcaaggattttgcaggatcgtggtctttccaaatatcctaatct

SEQ ID NO: 876537 - DNA, 99 bp, Homo sapiens
tagcctattggaggaaaacacaccaagctattgcagcatctgaagaggatcatctccgacctgtgtaaactctataacctccctcagcatccagatgtg

SEQ ID NO: 876538 - DNA, 99 bp, Homo sapiens
caatgccttcaaaacttggaacaggagtcagtggatcggtggggaaaatgctgcttaccctgggccctgggctgtagaaagaagacaccaaaggcaaag

SEQ ID NO: 876539 - DNA, 99 bp, Homo sapiens
tgtatgatgaaaccacagtagaccctaatgatgaagagatgctgaaattttcttctaaggagaaatatcccttatttacttttgtaaatggtcattcca

SEQ ID NO: 876540 - DNA, 99 bp, Homo sapiens
gcggaggagcaggcggtggaggcgaggcaggttctcctgaaaagaaagctgaacattcatctataaatcaagaaaatggcactgcaaaccctatcaaga

SEQ ID NO: 876541 - DNA, 99 bp, Homo sapiens
accagagcattgatgtctccctgcctctcaataccttgggcccagtcatgaagatggaacctctgaataacctccagggaagtttaattagcattgaca

SEQ ID NO: 876542 - DNA, 98 bp, Homo sapiens
agcccatccgtctcaagactgtgaaaccagtaaggaagagcccaacactgctggaagtgagcatgccccatttcatgagaaccaacagcttcgccgag

SEQ ID NO: 876543 - DNA, 99 bp, Homo sapiens
agaaaacactcgctccatctgtctccttgagcaaaaaagaaaagttgtttcctccaacattgatgttcctccagcaagagtcttgctctattgcccagg

SEQ ID NO: 876544 - DNA, 118 bp, Homo sapiens
cacgcgcatctcctctggcatgtccgagtgctgctcctggcccaagatattatcttgggccaggagcagcactcggacatgccagaggagatgcgcgtggagaccatggagctatgtg

SEQ ID NO: 876545 - DNA, 98 bp, Homo sapiens
agaataagtgaaacacggaaactgagtatgggatctgatgatgctgcctacacacaagggtaaaccagacttgaatacaacattgccaattagacaaa

SEQ ID NO: 876546 - DNA, 99 bp, Homo sapiens
atcgagaccatcctggctaacacggctggacgagtcattcacagtcaaggtggctgactttggtttggcccgcgacatcctggacagggagtactatag

SEQ ID NO: 876547 - DNA, 99 bp, Homo sapiens
atggagacaccctctgggggtcctctctgagtcaaatccagtgcggaaggagagttttacatggaagtggcttacagaaacttggcgctgaggtgcagg

SEQ ID NO: 876548 - DNA, 99 bp, Homo sapiens
cttgggaggctccgttgcctgctcccggagggagacgcgctgccgaggagaacccagcgggactgtgaagatcctaatcctttgattcgagccttggca

SEQ ID NO: 876549 - DNA, 99 bp, Homo sapiens
gctcactgcaacctccacctcccagaatcacggtcactttcaacattaacaacagcatcccaccaacatttgatggtgaggaggaaccctcgcaagggc

SEQ ID NO: 876550 - DNA, 98 bp, Homo sapiens
tggcgaaacgaggaggagataacgcggccttgggctctgggggcaatggcggcttcctgtgttctactgcacactgggcagaagatgcctctgattgg

SEQ ID NO: 876551 - DNA, 98 bp, Homo sapiens
aagaggccgcggaggagaagccggaggaggacaacgactaccaccgcagcgacgagcaggtcaagctgggctccgcgctagggggcccctacctggga

SEQ ID NO: 876552 - DNA, 99 bp, Homo sapiens
cacctgtttaagcgtggatgccacttgatagctaaaaacagattcgcagaggaatctctcagagccatcttcgaacagacgccgtgggtccttctcatc

SEQ ID NO: 876553 - DNA, 99 bp, Homo sapiens
gaaaacaacagtgacaagaacagtgggccacaggggccccgaagaactcccacaatgccacaggaggaggcagcagtgattccaaatgatatttcaagt

SEQ ID NO: 876554 - DNA, 99 bp, Homo sapiens
caaaggagaaagagcactaccaggtgttaggagatacaactcgtcaacgaatcaaattcagtgatgacagagtatgcaagagtcaccttctcaactgtt

SEQ ID NO: 876555 - DNA, 99 bp, Homo sapiens
agggaggcggcagaagaagacgaagaagcagaagcgtctgctcaggttgcagcaggagagaggtgtgaatgacagaggtggtgccatccagcgcgctca

SEQ ID NO: 876556 - DNA, 99 bp, Homo sapiens
gtgtccagcctgggacagacgtggggtgaagttcctggtgatgaatgacaaaggacccgtggctgaaacaaagtggtccagcaacactcgcctgcagca

SEQ ID NO: 876557 - DNA, 99 bp, Homo sapiens
agcagtatacagcaaacagcaatagttcgacagagcagattgttgtccaggcaggacagattcagcagcagatcttaaatctgacccaggccttgaaag

SEQ ID NO: 876558 - DNA, 99 bp, Homo sapiens
cttacatgtttgaggcccgggaatttcttcgaaaaaagcttattgggaagaagatacctcaaatcagctatgcatccacagccccagagctaagtgata

SEQ ID NO: 876559 - DNA, 99 bp, Homo sapiens
ttgggggttgatacagcagagacgtcatacttggaaatggctgcaggttcagagaaggattacggccaggagatacaaccagcactttctgtggtactc

SEQ ID NO: 876560 - DNA, 101 bp, Homo sapiens
ctgggaccctggattttcggacactgagcgccatggccctgcctctgctgccgggcaacagcttcaaccgcaacacggagtcttgctctgtcacccaggct

SEQ ID NO: 876561 - DNA, 99 bp, Homo sapiens
agcaaatcaaacagaaataaggtagactcaatggggtctgcggaagagggagctgctgaaggagctgctaccagtcatcgggcagaacctccgattcca

SEQ ID NO: 876562 - DNA, 98 bp, Homo sapiens
agaactcaaaaggctgcaacaagagatccaaaagaactcaggcagagaccatgaaactaaagcggatccagaaggagttgcaggctttagatgacatg

SEQ ID NO: 876563 - DNA, 98 bp, Homo sapiens
tccaggccttccagtacacagacgagcatggggaaggaaagaacatggcctgtgtgcagcggacgctgatgaatctgggtgggctggcagtagcccga

SEQ ID NO: 876564 - DNA, 99 bp, Homo sapiens
gagcatgaagaaactcttgggtccaaagaatagtgaaggattgcattctgcacgtgataaactaattctgaagcaagcccttatagttgtgctgcagtg

SEQ ID NO: 876565 - DNA, 99 bp, Homo sapiens
cctgggtgacagagtgagacacaatcaccagcgactcctctgggtacacgaacagggagggcctcaggtaatggtgtttcttcagcagtaccaacggct

SEQ ID NO: 876566 - DNA, 99 bp, Homo sapiens
gtaggacactgtttaaacttcatctctccaaagctccggtctttggctgtacccttaactgccatgaaaagctcttcaagctgtgccgtttgctcaggt

SEQ ID NO: 876567 - DNA, 99 bp, Homo sapiens
cggccgctgcctggacgacgtgaaggagaaattcgactatggcaacaagtacaagcggcgggtgccccggatgccttcaattaagttgcagagttctga

SEQ ID NO: 876568 - DNA, 99 bp, Homo sapiens
taataattcagatggagaatatatggctggacagctagctgcttatggctataaaattacagcctactcatgaaggttacttctcttgtttggatatct

SEQ ID NO: 876569 - DNA, 99 bp, Homo sapiens
aggaagccatcgcctggccccggctctctggaccttgtctcgctcgggagcggaaacagcggcagccagaggtactccaaagattcaggtttactcacg

SEQ ID NO: 876570 - DNA, 99 bp, Homo sapiens
gtactttccgactgcgacgagggagtcgatttacctggagaaaggagtgcctggctgttatggaaagctccagtcagtctcagtcatcctacatcatca

SEQ ID NO: 876571 - DNA, 99 bp, Homo sapiens
gctggagtccagtggtgcgatctcggctcactgcaagctctgcctcccagcgagtaaccagctcataaatcacatcgaacagtttttggatactaatga

SEQ ID NO: 876572 - DNA, 99 bp, Homo sapiens
aaaacaatgtgaaatcaattatgtgccgaagctggactgtactgctgccatctcggctcactgcaacctccctgcctgattctcctgcctcagcctgcc

SEQ ID NO: 876573 - DNA, 99 bp, Homo sapiens
ggccaaactgacagaaatgcgtggcatctatgccaaagtggaccggctagaggaggagaaggagaagcggcgcctcgaccagctggaacgtaagaagga

SEQ ID NO: 876574 - DNA, 99 bp, Homo sapiens
cggcccggactcggcgggcatcgccctctacagccaggagaaggcagagcccccccaggctatgaatgccctgatgcggttgaaccagctgaagccagg

SEQ ID NO: 876575 - DNA, 98 bp, Homo sapiens
ttgcatccagatcctgaggatgaggattcagatgactacgatggagaagaatatgatgtggaagcacatggaactttcgaaagaaggtaccacctatc

SEQ ID NO: 876576 - DNA, 99 bp, Homo sapiens
aataacatccgcctcataaaagacaaacagacccagcagaacagaggcttcgcatttgtgcagctgtcctctgcaatgatccacatctcaaagaagtgg

SEQ ID NO: 876577 - DNA, 99 bp, Homo sapiens
tccgtgtctggcacctgccccaggacagagtagtggggcctgaggaagctcttggtggggccagcagaggtgatgttggggtccaaggtatacttgaac

SEQ ID NO: 876578 - DNA, 98 bp, Homo sapiens
tctcctggtgttaaaatctgtcgtgataccgaggaaggccccgagatcccaggcactgagtgactgcatactatatgctgtgatagcatttggatgtg

SEQ ID NO: 876579 - DNA, 99 bp, Homo sapiens
ttcctgccaccggcctgcctgagccactgcgtgaggctagcactcatccgcttccgggtcaagttgatgtagaacattctcatgttcgatttctgggaa

SEQ ID NO: 876580 - DNA, 99 bp, Homo sapiens
gccgcctgtccgtcgatgcaccgaaaaggcatgtcgggccccaggcctgtggtgctgagcgggccttcgggagctgggaagagcaccctgctgaagagg

SEQ ID NO: 876581 - DNA, 98 bp, Homo sapiens
catatttgagtcatttccttcgtacccacagtgcttcatgagaggtattgaaattgttggcggagatgagttcattttgtggtgacatggaaaaacta

SEQ ID NO: 876582 - DNA, 99 bp, Homo sapiens
ttgacctacaaggaatctgagggtgccctcaatgagcacatgaccagcttagcttctgtcctaaaggagcttgaagaaatccgcaaatgtgggatgaaa

SEQ ID NO: 876583 - DNA, 99 bp, Homo sapiens
cgggatcgtgaccgagaccgtgaccgagagcgtgaccgagagcgcgaatatcgtcatcgttagaagcaattctgtggtgttcttggtcacacatttatg

SEQ ID NO: 876584 - DNA, 98 bp, Homo sapiens
acagcaacccgaagacagggaaatttagacaaagccacagacccaagcatgtcggaacaggattggtcagctatccagaatttctgtgagcaggtgaa

SEQ ID NO: 876585 - DNA, 99 bp, Homo sapiens
tgaaaactataggtgttcatgatcgtgttttcgatgttaacgacaaagtagaaaattcattagaaccagcagctaagaaacctttccagcttggaccta

SEQ ID NO: 876586 - DNA, 99 bp, Homo sapiens
gggaagccgtgatgagggccgtgttgacgtggagagataaagccgagcactgacttatgaaaatatgcatcagtttaatactgtcttggaattcatgag

SEQ ID NO: 876587 - DNA, 99 bp, Homo sapiens
gtgaaagtgtctacccagaccaagagcaattaatggatgcctcgaagttgacgtacatatatattcagaaatgttttgccacctgagacctatgaggag

SEQ ID NO: 876588 - DNA, 98 bp, Homo sapiens
gctccgatgtgcagcccaagctctgggcccgctacgatgacttgtggggggaccacagtctggaggtggaggctggcctgcctcctggctggaggaag

SEQ ID NO: 876589 - DNA, 99 bp, Homo sapiens
tgaaaattgcatgcttgattattcactgcgcgcctgcgtctacaacaacaccctcaacaacgccatgcctggaccagttactctccacaagaaaattca

SEQ ID NO: 876590 - DNA, 99 bp, Homo sapiens
gcgatcgtggggcccgcgaggcgggcagccggggcgtccagcctcctgacaaggtgatccgggcgggccccgcaggaattttatcccctcaccggcctc

SEQ ID NO: 876591 - DNA, 99 bp, Homo sapiens
cagcactggaagaaaatggtttggctgtgataggagtatttttaaaggggactccagtatcaggaagcagtctaggcatcgggtcatcattcagctgcc

SEQ ID NO: 876592 - DNA, 99 bp, Homo sapiens
ccacacccacacgtgttcaatacacctcccacctgtcctcaggcatatcaaagaaatcttacaggctggtgttaaaggaacttcggaatcccttaaagg

SEQ ID NO: 876593 - DNA, 98 bp, Homo sapiens
tgctgagtccggagcgcctagccctaccggactacgagtatctgggtgatcccattaagatactaatgccatcactgtctcctacaatggaagaagga

SEQ ID NO: 876594 - DNA, 99 bp, Homo sapiens
cagctggagctggccatggtgccccactatggtggcatcaaccgagttcgggtcttctttgtgatccgcctcattgctggccctgctgccaactccctg

SEQ ID NO: 876595 - DNA, 99 bp, Homo sapiens
tactttggttacctatgtacctgttaccactttcaaaattggataacagggcaagattcagaggaagaaaaggatattgatgcattatgttgaagccaa

SEQ ID NO: 876596 - DNA, 99 bp, Homo sapiens
attgtctgaagcaacaggaactttagaactctttccaaagtcacgaacatcaaacaagtcaaatgcctcgaaaagttcacttttcctcattccaaacgt

SEQ ID NO: 876597 - DNA, 98 bp, Homo sapiens
gtgatgctcctccaccttacagcagcatttctgcagagagcgcaggaatcctgttcacgatgctggtatttggaccagcctgcgggtttatcctgggc

SEQ ID NO: 876598 - DNA, 99 bp, Homo sapiens
caaagccattggagaggaaggtgtagttgttgaagccctccaaaagcaagtcaccttcaacaaaatgtgatccttcagtaacaaactccagtaactggt

SEQ ID NO: 876599 - DNA, 99 bp, Homo sapiens
ctcactgcaacctccacctcccagatggaggatacctctttcccaagtggagggaatgctattggtgtgaactccgcctcatctaaaacagatacaggc

SEQ ID NO: 876600 - DNA, 99 bp, Homo sapiens
ggaccgggaaggagcatcccaggacctaccagaatctgtgttctaagaacggaagcatctgggctggatggaatttagcatcaagcagagtcccctttc

SEQ ID NO: 876601 - DNA, 99 bp, Homo sapiens
accccttcaagttctagtcatggatcccttggttccagtaccccattatctatgacattcgggccagacctcgaaaaatctcctcccctacaggctcca

SEQ ID NO: 876602 - DNA, 98 bp, Homo sapiens
tggaacctccaagcctaattctggaggagactttaactcggttaaacccatccagagtaatggctgcggccttacccaggaccctgggggagttgcag

SEQ ID NO: 876603 - DNA, 99 bp, Homo sapiens
agggcggtcggcagtctgagccagcagcgccccctctagaagtttctgaggaacaggttagcatggcctcattgaaagaactagatcaaagactctttg

SEQ ID NO: 876604 - DNA, 99 bp, Homo sapiens
ggctgtagcccccccagtcagtggagacttaaccaaagaggatttcagatgcatgccaggtttccactgattgccagaactcgagatcactacacatgg

SEQ ID NO: 876605 - DNA, 99 bp, Homo sapiens
ggaactttagaccaaaaattattggaagatttacaaaagaaaaaaaatgaccttcggtatattgaaatgcagggtctgccaatttccatgtatggaggc

SEQ ID NO: 876606 - DNA, 99 bp, Homo sapiens
taggaaaattaagtttagtagtgctcctattaaggtgtatactcttgatgtaccagatgcattctattactgttatagtccagaccctggtaatgcaaa

SEQ ID NO: 876607 - DNA, 98 bp, Homo sapiens
ttgacccacagagtgacttaggaattatccctagagtggctgaggagctcttcagggaaatgaagaatattgatccaaaagcagcagatacaaaaaag

SEQ ID NO: 876608 - DNA, 99 bp, Homo sapiens
ccacccagaatctttaggtaaatgagccaagaaatatttttcttcatggccctgatcagcaagtaaaaataggagactttggtctggcctgcacagaca

SEQ ID NO: 876609 - DNA, 98 bp, Homo sapiens
cgacccggattggcgctgaggtggcccgtggggcagataaggagtcaggccagggcgggatgacactcattgattctaaagcatctttaatctgccag

SEQ ID NO: 876610 - DNA, 98 bp, Homo sapiens
atgggtcctcgacctgcagggagcagaggggacagaggcaccaaggacctccaagacaggaaactaaatatattttgccaactttggaaaaagaatta

SEQ ID NO: 876611 - DNA, 99 bp, Homo sapiens
aacaatgtctcagcctttcagtctgatcaagcagcaagtgaaattgaggtcacatcttcagtacttcatgcaagatggaagagtgtagaaagtgtccca

SEQ ID NO: 876612 - DNA, 99 bp, Homo sapiens
gattccctacagcgaaccaatgccactcagctttgaggaaaagccagtttatatccaagacttagatgagcttattcagctgattctgaatcatcttac

SEQ ID NO: 876613 - DNA, 98 bp, Homo sapiens
tgagtatgtcggaggagagcgacatggacaaagccatcaaggtcacactgtgaacaagatgcgtaaacactcagattcagaagtggcttctcttgcca

SEQ ID NO: 876614 - DNA, 98 bp, Homo sapiens
gactccaacgaattaggtggtctgactaccagtggctctgcagaggtgaccattgtgaggtagatattttgttctaattttccagatgaggaagctga

SEQ ID NO: 876615 - DNA, 98 bp, Homo sapiens
cctgaagtcggtgtctgctgcgttcacggcaggattcggttaggtgctccagctgctgctcctgcccctgcctcagtcccacagatatcccagccccc

SEQ ID NO: 876616 - DNA, 99 bp, Homo sapiens
cagggaaaaccgtgaaaaagtatcatgagcagtccagagcgtgagtccattcacatcctgagtgttgatgagaagaacaagttgggagccaagattatc

SEQ ID NO: 876617 - DNA, 99 bp, Homo sapiens
ctccaaagtatgtcaatcaaatccatgtcctaaaggatgatttacaggtcagtatcaaaccaggccagctgattgctgtcacctggaggcagcccatcc

SEQ ID NO: 876618 - DNA, 99 bp, Homo sapiens
ctgggtgacagagcgagactctgtttagggtcctgtatgcgctttccacgttcccttcctgtaccatcacagtcctggcgatgaacttcagatgttttg

SEQ ID NO: 876619 - DNA, 99 bp, Homo sapiens
gacttcttgctcatttctgagtattgtctttatatcctgacactatgaatgctacttggatgcctcttaaggctaaagaattacctccaaagccattgt

SEQ ID NO: 876620 - DNA, 98 bp, Homo sapiens
cggatcggctcacgcagcttcaggacgctgtgaattcgatatggtgtaagatacttcttcaagattggacagctggggaccttcttctgattaacctt

SEQ ID NO: 876621 - DNA, 99 bp, Homo sapiens
tgaagattgtgaagcaatagcctaaggacaggaagatgtcacccaagcgcatagctaaaagaaggtcccccccagcagatgccatccccaaaagcaaga

SEQ ID NO: 876622 - DNA, 99 bp, Homo sapiens
actgacttttcttatgctgggatgtgccttagaggattatggggaccagtgactttcgaggatgtggctgtgcttttcactgaggcagagtggaagaga

SEQ ID NO: 876623 - DNA, 99 bp, Homo sapiens
agcgggacaatactcaatcctataccaagtcgattgagattagtttcctactgggaaaacattgctgaggctcttgtcagcaaaggtctagccacagtg

SEQ ID NO: 876624 - DNA, 98 bp, Homo sapiens
gttgattggactcatacaggtcggagaggtcagcaacagggacatcgtggagacggtgctcaacctggtgtatgagcaccaagatggcagcaaatcac

SEQ ID NO: 876625 - DNA, 99 bp, Homo sapiens
ctgggctctaatctcctaaagatagacagctcaaatgaattggagcagctgatgagccagatccgggagacgcagcagctctgccaccagaccctgttc

SEQ ID NO: 876626 - DNA, 99 bp, Homo sapiens
aggatctgttcccccccaaggaactagtgaaggaggaagagaatcttcagtttatctgcagggctgttgtttccagcaagacccaaagctagaaaagga

SEQ ID NO: 876627 - DNA, 99 bp, Homo sapiens
tatattgctgttggaatatctggagccatccaacatttagctgggatgaaagacagcaaggccccatcacaggtatatggaggagtgacctactataac

SEQ ID NO: 876628 - DNA, 99 bp, Homo sapiens
gaaaagccacttgaagaaaagggtgaaggaggcgaattttcagttgataggagattatggtgggctccatgtttcaagcagaaattccagttggcattt

SEQ ID NO: 876629 - DNA, 99 bp, Homo sapiens
ctcaagggatcagcagcttttttgtccgggaaccagcaaatgggagaactcttcggtgtggctatcggtggtgttctggctggtgatctgtgactgctc

SEQ ID NO: 876630 - DNA, 99 bp, Homo sapiens
tatattttacacccttggagaatgtgggctcatatccttttcagactacattttcctcacaactgttctttccagctttaccctctgaacttctgatcg

SEQ ID NO: 876631 - DNA, 99 bp, Homo sapiens
ctcagacttgcagttcatcgaaatgcagagtaccacaagttgatttgggggccttataaaatggattccaaaggagatgtctctggagttctgattgca

SEQ ID NO: 876632 - DNA, 99 bp, Homo sapiens
gtgatacagtgtctcaggagcttttggatacggttttagtaaatctggtacctgctcataagcaggatcctaaggcctttgtagtccttcagccactgt

SEQ ID NO: 876633 - DNA, 99 bp, Homo sapiens
ctttccctcccccttctttcgatcagagatcggcggagaccctcgaagtgcgcaaacttgacactcaccctgaccggcttttgtggccacaggaaccaa

SEQ ID NO: 876634 - DNA, 98 bp, Homo sapiens
actgctcacagctgcccagctgaaagccaagcctgggttggtggttttatagccatttccatcatcagtttcctgtctctgctgggggttatcttagt

SEQ ID NO: 876635 - DNA, 99 bp, Homo sapiens
ccagacgagagcttcagccatcacgaggatgatttcggaacctggagaaaatgacactcatgaggaccatgatacttccactgagaatacagacgagtc

SEQ ID NO: 876636 - DNA, 99 bp, Homo sapiens
cttggacaggaattggaagaactcacagctagtctatttgagtgggtaggagccaaacagcatgaattacaagtgaactcaatgcagctgctgtactac

SEQ ID NO: 876637 - DNA, 99 bp, Homo sapiens
cctggacggcattcagtgttttggccataggaaaaggatacagagtagagtttcatgaacctgaaacttggtggaaatttgatcctgaagaattagaaa

SEQ ID NO: 876638 - DNA, 98 bp, Homo sapiens
cacgggccgcgcgtggagggtcccgattttaggacagcaaattaatgactttacccttcctgatgtgaaccttattggggagcattctgatgcagcag

SEQ ID NO: 876639 - DNA, 99 bp, Homo sapiens
gtggacatctgctgccggaaggggtcccgaagccccctgcaggaactctacaacccaatccagtttggaaattttagcattcaggtgccaggaatgcag

SEQ ID NO: 876640 - DNA, 99 bp, Homo sapiens
aatgaagatgcagtcagagagactttcgaaagaatatgatcaactcctgaaagaacactctgaacttcagattgaagataaaactttccaagtccttgg

SEQ ID NO: 876641 - DNA, 99 bp, Homo sapiens
aaagttctcctcagaggatgcctctgaagtgagaggcatgaaaaaagaggctaaccttcaggagggtggggtcgtagcactcttcaaggtttgccggca

SEQ ID NO: 876642 - DNA, 99 bp, Homo sapiens
tgaagagacaggaggcagtagccaaacacccaggaagtgagtgcttttggtgaggaaggtgaaggtgattatctggatgactggacagtgctctgtaat

SEQ ID NO: 876643 - DNA, 98 bp, Homo sapiens
ttgaaattaccaactgctttcctttccctcagcacacagaggatgatgctgactttgatgaaggatgactcactggttgtgtggaaggaagtcgattt

SEQ ID NO: 876644 - DNA, 99 bp, Homo sapiens
agctccagcagatcattgattgtctggataccagcattcctgagacaatcccttcaaactcgtttccttacgtgaagaagaggattcctattaactgtg

SEQ ID NO: 876645 - DNA, 99 bp, Homo sapiens
cgggagctccagggcgaggcggtttctttggtggagctgcaggatctggactctgcaaaccagtgactgaaatgccatgctgctcctcttttaattttg

SEQ ID NO: 876646 - DNA, 99 bp, Homo sapiens
ggcatcctgatatgaagaaaagggtggaggatgcatacatcctcacttgtaacgtgtcattagagtatgagaaaaccaaaccagtccagctacgggggc

SEQ ID NO: 876647 - DNA, 99 bp, Homo sapiens
gaagttcttcaactgccaaaagcacagggttggatgtaagaaaagcatgaatcatgggaaggaaggagtgcctcatgaagccaagagccgctgcagata

SEQ ID NO: 876648 - DNA, 99 bp, Homo sapiens
gtaatggtgcaaagcctgaagatggcaatggctatattagtgctgcagaacttcgccatgtgatgacaaaccttggagagaagttaacagatgaagaag

SEQ ID NO: 876649 - DNA, 100 bp, Homo sapiens
cattctgagtagctgggactacaggtgtctactatgaaccatcctgtactcagaatgtgaatcatggtgtacttgtggttggctatggtgatcttaatgg

SEQ ID NO: 876650 - DNA, 98 bp, Homo sapiens
cttggtggagcaggagcggctgggcatcctcctgagactccggggtcagacgcccactccaggttaaacccatccagagtaatggctgcggccttacc

SEQ ID NO: 876651 - DNA, 99 bp, Homo sapiens
ccggtgccctccggaggaggctttcggctcagggacgacccccgtggccatgctgaagcggaggcggccgctgctcgagtagagacggagtttcaccgt

SEQ ID NO: 876652 - DNA, 99 bp, Homo sapiens
gtggcactgaggctctggaacttctgcccagctctccttgactattgcccagaagaaaagatgtttggttttcacaagccaaagatgtaccgaagtata

SEQ ID NO: 876653 - DNA, 98 bp, Homo sapiens
tgtgaaaagctaactttcaacaaccccacagaggactttaggagaaagttgctgaaggcaggaggggctcgtgaagaagaaatgactgcaaaagtaag

SEQ ID NO: 876654 - DNA, 99 bp, Homo sapiens
cttaactcttctgaattacactgcaagctgaacttcgggtaacttcagccacattttcttttatcaccccctcttctgaacccaaccttctttcacaat

SEQ ID NO: 876655 - DNA, 99 bp, Homo sapiens
tgggctccagaaggtggagatggagaatcagatctatgccatccctgaggacatcatgcgaggcagtggcacccagctggccactggctggaggtttaa

SEQ ID NO: 876656 - DNA, 99 bp, Homo sapiens
tccggaacctgggtaacagctgctacctcaactctgtggtccaggtgctcttcagcatccctgacttccagaggaaatgggggctgtgacgactatgca

SEQ ID NO: 876657 - DNA, 98 bp, Homo sapiens
ggctgtaaggagccgcggcggggggaaaatggagcccttcaccaatggatcaatgtgactctaagaacaaatggatgaatgaatatccatatgaagag

SEQ ID NO: 876658 - DNA, 98 bp, Homo sapiens
taatgtcaactttactgagaattttccacctcctgacacaacaccactcattgcccagaagattgttgccacaaggaagaagcagcagctgtccatag

SEQ ID NO: 876659 - DNA, 99 bp, Homo sapiens
ctcaaaacagttggcccacacataattgtaatcttgcataccactctgccctcgaagttgttttcctccacatcactcatgtcgacgaggcgctcccca

SEQ ID NO: 876660 - DNA, 99 bp, Homo sapiens
aggccgtgaggcttaatctgatgcagaattaccgctgttggcacacagagaccggtgaggaggtgttacggatgtgtgtggcagtaaaaaagaagctgc

SEQ ID NO: 876661 - DNA, 102 bp, Homo sapiens
gcgctgcctgtggagatccgcggaggccgacaggattcgttggctgccggcggggacggcagccaacgaatcctgtcggcctccgcggatctccacaggcag

SEQ ID NO: 876662 - DNA, 99 bp, Homo sapiens
caacgattagtcatgcaataaatgttctggttttaaaaaatacatatctggttttggcctctggctgtacctggcagggagcagcctgccctgtctcac

SEQ ID NO: 876663 - DNA, 99 bp, Homo sapiens
ctccaatggcccaaaacccacagaagttgtattagatgatgacagagaagatctttttgcagctctctatcaatatcagctcacatcattgaaaagata

SEQ ID NO: 876664 - DNA, 99 bp, Homo sapiens
ggagaacctgagggcccgcgcctacttcctgtcccactgccacaaaggggaaggtgtggctcattgactttaatccatttggtgaagtcacagattcac

SEQ ID NO: 876665 - DNA, 99 bp, Homo sapiens
ggaaaggttcggaatttgcctctgcgccgtctttttttgcctgttacctgtgacgtccttggagagcgacttgcagttgtggaggtacagtgtgaacgg

SEQ ID NO: 876666 - DNA, 99 bp, Homo sapiens
ctgaagtcaactgggttttgcagtatgaccctcccagcaatgcaaggcttcatgaacagttgactgagtcagaacaggctgcccagtgttacatcaaat

SEQ ID NO: 876667 - DNA, 98 bp, Homo sapiens
tgtactgaagcccacacttatggctgctgttccgctatgaagacggccaagtgggagatgcaaatattaatacacaagaaggaggcattcacaaagag

SEQ ID NO: 876668 - DNA, 99 bp, Homo sapiens
tcttcttcgagtatttgtagaaggtaataaaagactagtggccttagtgcccatgcccagtgaccctccattcaatacccgaagagcctacaccagtga

SEQ ID NO: 876669 - DNA, 98 bp, Homo sapiens
gtatttaaagctattcaaccagatggctcacacagtcgacaaaagaaaacgtttttcttgggagatgggcagaagctgaaggactggcatgacaagga

SEQ ID NO: 876670 - DNA, 99 bp, Homo sapiens
gtgaagatacctacacagaggcttttgtagattcgggaggtgataagacttacagtttcctaacagcagtgcagcatactgttctcttcagacaagaga

SEQ ID NO: 876671 - DNA, 99 bp, Homo sapiens
ggtggacagcagcaaggctggcctggctccgctggaagtgagggttctgggcccacgagaaccttctgataacttaagagagattctccaaaatgtggc

SEQ ID NO: 876672 - DNA, 99 bp, Homo sapiens
attgaagacacctgctcagtatgacgcttctgagctaaaagcttccatgaaggagcaggacatcgagactttacatggctctgttcacgtcacgctgtg

SEQ ID NO: 876673 - DNA, 99 bp, Homo sapiens
ttgcaccaagtcgggttttagtgattccttcctcaaatgttagcattacaacgatttacttcatttgggtcactaggtcacgggggcctcacttcattc

SEQ ID NO: 876674 - DNA, 99 bp, Homo sapiens
gaacaaagcataggcacttggctgtgattagtttcttgagccatgttcctcagttgcacacctgtggacaaggcctcctcccgaacatcaccctcacca

SEQ ID NO: 876675 - DNA, 98 bp, Homo sapiens
atgtcagcatatgtgaagaaaatccagtttaaattacatgaaagctatggcaatcctttaagagctcagggagccaatggtactctggagaacccagc

SEQ ID NO: 876676 - DNA, 99 bp, Homo sapiens
cgagaaggagcgcatgcggaggctcatgaggttggaaagaaccatgactgtattcaggaaggcacatgaactgaagcttctgtcagaatgccaatacaa

SEQ ID NO: 876677 - DNA, 99 bp, Homo sapiens
ctttgttgtggggaagcagtctctgtgtacagctgactccaggcacattaacaagtaggagagcctggcttcacgcgatcgcggaaggttttccacatt

SEQ ID NO: 876678 - DNA, 99 bp, Homo sapiens
tttacactcgccatggggtccccatctcagtcactggcattgcccaggtggagatgacccctgagaagttcagtgtcttaatggagaagctctgtaaaa

SEQ ID NO: 876679 - DNA, 99 bp, Homo sapiens
gtgggagtgacccgattttccagacattaccagaaacatctttaccaaattatgccacaaatttgaaagacaagagttctttagtttcatctctctata

SEQ ID NO: 876680 - DNA, 99 bp, Homo sapiens
tgagtttgttcgtaaaggacttcgtaatgatgtcaagagtcatgtctagctgttgatctatggacgaccagtgtatgtcactctaatagctagaagatc

SEQ ID NO: 876681 - DNA, 99 bp, Homo sapiens
actatcctctggaggctgtgcgcatgcagcacctgtgccccaggtgctaaagagctgtgcagaatttgtggaggagtatggagtggtggatgggatcta

SEQ ID NO: 876682 - DNA, 99 bp, Homo sapiens
tggctgtggggttagaaacctttaatagagcacgctataggcagtttgtgaagcgaattggttatatgatcaggtatcggctatgcctccgttgtaatt

SEQ ID NO: 876683 - DNA, 99 bp, Homo sapiens
gcaatgtttgtccttctctgcctgttgcacatcttgtaaaattggacaatggctctttagagagttatctgagtgcagaggtggaggagacactgaagc

SEQ ID NO: 876684 - DNA, 98 bp, Homo sapiens
gaagagccagctcacctggaggctgcagaggagaaccagaccattgtgcacagccccgccccttcctcagcgagacggtcatctgttccagccgggcc

SEQ ID NO: 876685 - DNA, 99 bp, Homo sapiens
ctccaatggtgccttccctcatatcaataagccggggctctgaagtaaagtctcttgggggtactggaattttctttactatgtactcacaaacaactt

SEQ ID NO: 876686 - DNA, 99 bp, Homo sapiens
ggaaggatacagctatgcaaatatagaacactaaagtgttacatgacagatgtatgaggacctgaaggagaagaaggagaaggtggaggagaaggcaag

SEQ ID NO: 876687 - DNA, 99 bp, Homo sapiens
aaccacattagcttcagggtgtatgaaatatgaaggatctgattttcagtgcaaagtgttgcggtatacactggaatggaaactaagatggcattaaat

SEQ ID NO: 876688 - DNA, 98 bp, Homo sapiens
atcaaacctcctgttgggccatttccgagaactcccatcagtttctgtatagtgtaaaagaggcagaggaggtggacacggtggacgtctccggcgtg

SEQ ID NO: 876689 - DNA, 99 bp, Homo sapiens
gaagacttcatcgctagtggcagtgaagggaaatcctcattgacgattcaatttgttgaaggccaatttgtggactcctacgatccaaccatagaaaac

SEQ ID NO: 876690 - DNA, 99 bp, Homo sapiens
cgaagatggtgtgttctttctggaaactgtatatcttattggacttatccagatgatgagaaacgcaaggcagcctggcatcctcgctacaacctcatt

SEQ ID NO: 876691 - DNA, 99 bp, Homo sapiens
aaatttccagaaggtgcctgaccagaaaggaactcccaagcgactgcaggcagaagctgagacggctaagatgacaaatcctctgagggaaatcgacaa

SEQ ID NO: 876692 - DNA, 98 bp, Homo sapiens
gaagaacagcctgaagaagggctccctcgtgaagaacctgaaggacacactaggacttgtcttacaaggaccggcactggcatgaagcctgtttccac

SEQ ID NO: 876693 - DNA, 99 bp, Homo sapiens
gagttcaacatcctcctggccaccgactcctacaaggctgctgcatctgaagcctcccaggatgtgacctacgcccagctgcacagcttgacccttaga

SEQ ID NO: 876694 - DNA, 98 bp, Homo sapiens
atgaagtattaattcttccactgatatctcaaaaggtgatctggacaaaggaacaggtatctcaggatggaacaaaattcatctgtattggggctctg

SEQ ID NO: 876695 - DNA, 99 bp, Homo sapiens
tttgtcttcattcactttcccccctcagtttctgaaatgattctccagaatttctcctcataaaaaagtggttagcaggaagaagatgagccttaagtc

SEQ ID NO: 876696 - DNA, 99 bp, Homo sapiens
ctcctgagtagctgggattacaggttatgcaatggtctctgcaagatggtttattcttgaattggacctttttaagactgacaaatgctggtacttcat

SEQ ID NO: 876697 - DNA, 99 bp, Homo sapiens
caccaaaccaatttctcctgcaaaccagggtatcagaggtctattctggataagcaggttttgtgaagacatttattctttcttggacctcagatttac

SEQ ID NO: 876698 - DNA, 99 bp, Homo sapiens
aacgatctgtggtggaagcagcagtccaggaatgcagtcagtctgttgatgaaactatgcaccttttgatgtcccagcagaccctgaggaatgtgccac

SEQ ID NO: 876699 - DNA, 99 bp, Homo sapiens
tttcccctgtcattgcacccaaaaaagcaaggccttctgagactggatctgatgatgatggccccagaagttgcagcagtagagaagaatggtggctac

SEQ ID NO: 876700 - DNA, 99 bp, Homo sapiens
ctaagttgcaagtggcagactcagatttccttttacttgtagaattatttgagattgatgcatctcggtagtccagggcaggagcctgtgggacctcct

SEQ ID NO: 876701 - DNA, 98 bp, Homo sapiens
tctcacgcagccaacatggctccagtggagcacgttgtggcggatgctggggctttcctgcggcatgcggctctgcagcccctagcctgcagagcagt

SEQ ID NO: 876702 - DNA, 98 bp, Homo sapiens
aagaagtagttataaaagcaaacacaggattcaccacagtacttcacatcgtcgttcacatgggcatgtgattgagaaggaagaactaaaacttcacc

SEQ ID NO: 876703 - DNA, 99 bp, Homo sapiens
gtggaaatagccatgacccagggaaagccaaatcatttcggaatagagttttgccagttaaacaaggctctgggcatcaccagcggccccagggaaaaa

SEQ ID NO: 876704 - DNA, 99 bp, Homo sapiens
gtaatcagagaggttgactttcagagcctggatcagtaatccttcttccaccagttccttatacagagactcgatggtcaacacatatgcctgagccat

SEQ ID NO: 876705 - DNA, 100 bp, Homo sapiens
tggaggagctaaagattttgtccgacacttacactgttgagaaagtggaacttccactttctcaacagtgtaagtgtcggacaaaatctttagctcctcc

SEQ ID NO: 876706 - DNA, 99 bp, Homo sapiens
gccacatgaactaccaagtcattttccagtgggccctgatccatttttcagatacccatttgcatctacagttgtatacatgatataaggtccaggttg

SEQ ID NO: 876707 - DNA, 99 bp, Homo sapiens
gcccccaggaagcctttaccaacgccatcaccgacctcatcagtgagctgtccctgctggaggagcgcttccgggattgtgcctctactcctgcttgta

SEQ ID NO: 876708 - DNA, 98 bp, Homo sapiens
gtcatcacaaaagagttgattgaaattatctctggtgctgcagctctgatgacgatgactattcatcatctacgagtttgcttggtcagaagaagcca

SEQ ID NO: 876709 - DNA, 102 bp, Homo sapiens
tttggcacctatgcgcctgcagagctttggtgcaattcccatcgaccagagttggtccgaccagccttggaaaggtcactgaaaaatcttcaattggattat

SEQ ID NO: 876710 - DNA, 99 bp, Homo sapiens
catccacagcagcgactggcccaagttctttgaaaaggcactggcttactcgggtgctcttaccttctagtcacttgccccatgggaatggaatgagct

SEQ ID NO: 876711 - DNA, 98 bp, Homo sapiens
tcctgttccaccttcagagcgtcacggcgtacgccctcatggggaaaatctccccggtgactttcagacacagcaggatgccaatgcctcttccctct

SEQ ID NO: 876712 - DNA, 99 bp, Homo sapiens
aagaagagaagcagaattatacctagaagtctactaatggacagttagtcacccacctacatgttgagatcgctactgaagcaatagaaaacttccgaa

SEQ ID NO: 876713 - DNA, 99 bp, Homo sapiens
tcggtgagattgccactgggtcccccgtgtcaactgaactgggcccataaaagccctggattcagccagacgaggatacaatgggacggctagctgcgg

SEQ ID NO: 876714 - DNA, 99 bp, Homo sapiens
tcattgttaaagacgccctcttctgttcttgtttatcagacatccttcgcttcatttattcagtgctctacagcatcgagctgatgtgtcctgcctctg

SEQ ID NO: 876715 - DNA, 98 bp, Homo sapiens
cttcacccgggctccgctcttgccttctccacacttgtttggatcagcgaacaagaggagcacgttaagggggaagatgaagacatccttgggcctgg

SEQ ID NO: 876716 - DNA, 99 bp, Homo sapiens
ctgagatccaaagagaaagtggaaccaaagaggttgttgtaaatgtggatgatgatggagtcatttcattgaacttcgagtgtgataagatgactccaa

SEQ ID NO: 876717 - DNA, 98 bp, Homo sapiens
ggaccttaacaatccacctaagaaattcagaggctccaaccaggaatggagacgccattggatgttttgtccagggcagcatctctggtgcatgctga

SEQ ID NO: 876718 - DNA, 99 bp, Homo sapiens
gccaacaccagctttaaatagtggaggcggaaagactggttgccataaaggaagcccacgacatagagaccaggcttaatgaggtggagaagctgctga

SEQ ID NO: 876719 - DNA, 99 bp, Homo sapiens
gggcccgcacggaccctctacttcaaacgatatcgcattcagagtgaacaatttgaagatctttggctcataaccaatgagcttattcttcgccttcaa

SEQ ID NO: 876720 - DNA, 99 bp, Homo sapiens
aaagcagcaaatctacttttgggttacaaaaatccagaccaggaaagaccacagcaagattctttcattcgtctcctcctagcctgggggaccaggctc

SEQ ID NO: 876721 - DNA, 98 bp, Homo sapiens
actggcaaagcagctacacaaagagggtcatctcttctattgtacctgcagtgcccttaaagatagccgttttcccccaatgacaagggatgagctgc

SEQ ID NO: 876722 - DNA, 99 bp, Homo sapiens
cacctgtgcgggggctctgtcatcacgcccctgtggatcatcactgctgcacactgtgtttatgagtctgtcttgcagccgatgagcaccatggggatc

SEQ ID NO: 876723 - DNA, 98 bp, Homo sapiens
tgatgaagttaatgggatttgcctcctttgactccacaaaagacttgatagacgacctgaagtcagaactgagtggcaacttcgagcaggtgattgtg

SEQ ID NO: 876724 - DNA, 99 bp, Homo sapiens
cccagcgtgagcgacgcagaagacagctcaatatcagtagtttgcagatagcaaccaggaacggccatgcatcccttgtcaactttcttctcagtgaga

SEQ ID NO: 876725 - DNA, 98 bp, Homo sapiens
ttcaccttcacgatgtttcccttggtcaaaagcgcactaaatcgtctccaaggtcttcaataaactcatcaggagatataagtatttggagaaggcat

SEQ ID NO: 876726 - DNA, 98 bp, Homo sapiens
tgaaccaaagatggaatgacttaaaagcaaaatctgctagcatcaggtgaagtattacagacacttagcacctgatcacttgctgcaaatatgtcatc

SEQ ID NO: 876727 - DNA, 105 bp, Homo sapiens
aagaagctaagaagaggaatcccaatattacactcattggccgcattgacaggaagattgagttccccctgcctgatgaaaagacgaagaagcgcatctttcaga

SEQ ID NO: 876728 - DNA, 99 bp, Homo sapiens
aagtgcctgtgccccagggataccctggaggggtccccaccttcttccgggaggagaaggcagagcccccccaggctatgaatgccctgatgcggttga

SEQ ID NO: 876729 - DNA, 99 bp, Homo sapiens
gatccgccgacgactgcaagcagtttcgggaggagttcaaccgcgtgcctgcagacgaggcctacttcatagtcaaagagattctcgctacagaacgaa

SEQ ID NO: 876730 - DNA, 98 bp, Homo sapiens
cttctctcattttctttccctgcaccaactagcagtgccggtggtggtgtgcacattgagccccggtatagacagttcccccagctgaccagatccca

SEQ ID NO: 876731 - DNA, 99 bp, Homo sapiens
ctctatttcaacacctttttcggtgacagtggcgatttgaaactgtgcatctgcagatgtacgaggctgaaccgtatcatggcttacggatcccttttt

SEQ ID NO: 876732 - DNA, 99 bp, Homo sapiens
gtccttcaaaaatgccagaaatcaacgccaaggatgtcatccaagtctccaagaagttcctgccaggcatggccattggctactctagctcgaagctga

SEQ ID NO: 876733 - DNA, 99 bp, Homo sapiens
tgcggcctgacctgggagaactgtcaaagatcagccaaatggccgatgacacagtggcagaactggacaggcatctggcagtgaagaccaaagaactcc

SEQ ID NO: 876734 - DNA, 99 bp, Homo sapiens
tagacccgtctgcagccctggatctattaaagggagcattccgatcatctgaggaacagcagaatcctgaggttggcttgaagcctgtgtggtatagtc

SEQ ID NO: 876735 - DNA, 98 bp, Homo sapiens
ccggaaggagctagacggcggtcgggcaagaaataccgcccacgaatggatcaggaagtctctgaccaagccattagcagagaatgaagaaggagaaa

SEQ ID NO: 876736 - DNA, 99 bp, Homo sapiens
tgtggaggagaaagagggaatccccccacaacagcagaggctcatctacagtggcaagcagatgatcccgttgaagataccacattacacttaggctcc

SEQ ID NO: 876737 - DNA, 99 bp, Homo sapiens
tgccaaggttcatacctttgtggtagactgcagcaaccgagaagatatttacagctctgcaaagaagcaagttggaattgacagaggtgatataccaga

SEQ ID NO: 876738 - DNA, 99 bp, Homo sapiens
gtatccattcccccaaagaagaaacaagttatttcttgtaatgtctgtcagcttcgctttaactcagataattaaggaagttcactggagtaaaatgga

SEQ ID NO: 876739 - DNA, 99 bp, Homo sapiens
ccttgggcaaggtgcttagccctgagtctcagatgttttcatcttgcagatataagcacggttctcctatgtcttcctatttgggatcccttgctttgg

SEQ ID NO: 876740 - DNA, 99 bp, Homo sapiens
ccagacaagtccccagggaatgccacagcatcctccagcacctcagcttagcagtgtctgcaaaaacgaatcttttcctacaacctgttaactgactgg

SEQ ID NO: 876741 - DNA, 99 bp, Homo sapiens
tcagtataaccaagtaccaagtgaagactttgaacgcactcctcagagtccgactctcccacctgctaagacatatgtagagtgtgtcggtcagaagga

SEQ ID NO: 876742 - DNA, 99 bp, Homo sapiens
tcgtcccctggactctctcaacaagaggtggaaacatacagaagaagcaaggaaattacagttagaggtcacaactgcccgaagccagttctaaatttt

SEQ ID NO: 876743 - DNA, 98 bp, Homo sapiens
cctggatgcctacgtgggaagggacctcgaatgtgggaccccagcccctctccagctcgaaatcgtcaccagtgaaaagttgtgcagagcccaacatg

SEQ ID NO: 876744 - DNA, 99 bp, Homo sapiens
aatgcttgaagacagagatttattcgtaatgcgactcaaagctgcacggcagtctgtttatgagtggtttgaagaaaagcagcagcaatttgagaatct

SEQ ID NO: 876745 - DNA, 99 bp, Homo sapiens
tccgagtcagattggagcatttgtgttgatgaagatgaaagagactgcagaaaggccttttccacctcatatccagctccctccagaaattcaagagtc

SEQ ID NO: 876746 - DNA, 99 bp, Homo sapiens
tctcaggctttcctacaactcatgcccagcagcagcaagcagccctcttggaacagagatcatgatgacacggcatctactcgttcaggaggaacccca

SEQ ID NO: 876747 - DNA, 146 bp, Homo sapiens
gaaggattactcgcccccacctgtggactctgaccgcaaacaaggagagcgagaaggcgctgcaggtaagcacggaaaagccagggctgctgggtcgggccttcaggcgcatggaggggggctccactcaggctgctcagtaggct

SEQ ID NO: 876748 - DNA, 99 bp, Homo sapiens
tggaaattcctgacgttcattgatctgatggagaacatcattgcaacagtaagagattccaacctcaagctgacccttgctttcgggataggaatgcat

SEQ ID NO: 876749 - DNA, 98 bp, Homo sapiens
agaccttgacacttatatcctccctgggcgtgcagtatggtgaatatgttaataaccaagctagctccgcaccaactcccttgtcatcaacttccgat

SEQ ID NO: 876750 - DNA, 99 bp, Homo sapiens
accagtaccaggagcaccaggaatgcctccagcctgcccttcctcagtgtctgttgaagtaagtgcagatggggtaaatatgctacctttgtccactcc

SEQ ID NO: 876751 - DNA, 98 bp, Homo sapiens
tcatcagagacagtcagcagcactgcagccagtaagagcgggaaaacccctgagaggactgaagagctcttcagaaaccaggctgctttcaggaacat

SEQ ID NO: 876752 - DNA, 99 bp, Homo sapiens
gatagaaggacaaggacagaatcaccagcactggctgaaggattctcagagccggcaaggaggatacagcatgcatcagctccagggcaataaggaata

SEQ ID NO: 876753 - DNA, 100 bp, Homo sapiens
ccaagactctcctgagcccagaagcttcacagacctgctgctggatgatgggcaggtccagcagcaggtctgtgaagcttctgggctcaggagagtcttg

SEQ ID NO: 876754 - DNA, 99 bp, Homo sapiens
ttaaacaagagatttccacagaaggagagcattgcttggatccagatgcttatatattggatgtatatcgtataaatcctcaagcagaatgggtgatta

SEQ ID NO: 876755 - DNA, 99 bp, Homo sapiens
gaagagaccctgcaaagatcctgggagaccaaggcctgtggaggctcaatccagaccagtgtgaatgctctgtcagcagatgtgctgggtcgatgccag

SEQ ID NO: 876756 - DNA, 99 bp, Homo sapiens
gcagcggttggaggcttcgcccggctttgcagcggggacttcggcggcggcgcctcaggcacctcggcccggtatggtttgaagtggtgaacatggatt

SEQ ID NO: 876757 - DNA, 99 bp, Homo sapiens
actcccttagaacagggagtctcctttaacaaggggtatagaacaggctatgcttacaggcatcctctcattcgagagaagcctaggcacaagagtgat

SEQ ID NO: 876758 - DNA, 98 bp, Homo sapiens
ggtgaaaggagcagtagatgatgatgtagcagaagagcctggcccaactagagaatctgtgcaaacagctgtatgaaaccacagacacaaccactcga

SEQ ID NO: 876759 - DNA, 98 bp, Homo sapiens
aagaacgacatgatgcaatcttcaggaaagtaagaggctctattaccaggttttaaacttcgccatgatcgtgtcttctgcactcatgatatggaaag

SEQ ID NO: 876760 - DNA, 99 bp, Homo sapiens
tgcccttcctggaaggtgtgaacggagactctgactacaatggctcagattattcactgaccagcgctgacctgtcagcccttcaaggcttcaactcgc

SEQ ID NO: 876761 - DNA, 99 bp, Homo sapiens
tcaatttccacatttcttccaagttctcttgccctgagacgagtatgtattcccgtgtgccagagtgccaggtcaccacatactattatgttgggtttg

SEQ ID NO: 876762 - DNA, 98 bp, Homo sapiens
tttcataatgtttgcttcagtcctgcaaataaacccaagatcctggctaatggttaaatggaagctgatcggcgttcacatggaatcctcctcacgta

SEQ ID NO: 876763 - DNA, 99 bp, Homo sapiens
tcagcttctcctgtgctctccttctggactcactctgcctcagcaacactggtccctgttgccccaccaatatgccagatgatgttgaatttgaagtat

SEQ ID NO: 876764 - DNA, 99 bp, Homo sapiens
agcacccgcctccgggcatcttcaactatgtttctttctcagcaaaatagaggagaagcttacccctcttccagaagataatagtatgaatgtggatca

SEQ ID NO: 876765 - DNA, 99 bp, Homo sapiens
ccgcggacgaagatggcgaccgccatgtacttggagcactatctggacagggacggcaaaacagaacagaaaggcggagataaaaagaggggtgttaaa

SEQ ID NO: 876766 - DNA, 99 bp, Homo sapiens
gtgttccaccttttcgagaaattgcatttttagaacctagagaaatcacactgcctgaggccaaagataagggccagctctcaatgttgcaagaaaaaa

SEQ ID NO: 876767 - DNA, 98 bp, Homo sapiens
cacctgctcaacagaccccgagaatatattcagctacacagagggctctgaactcctacttcgagcctccggtggaggagagcgccttggaacgccga

SEQ ID NO: 876768 - DNA, 99 bp, Homo sapiens
tttaaatggttgtcacacttgattgtaggaactgcaagcacatgttgaccagataactgaaatggcagcagtaatgaggaaagccattgaaattgacga

SEQ ID NO: 876769 - DNA, 99 bp, Homo sapiens
cccgagaagtacttaaaaaaacattggaattctgcttatctaggagtctagtaaaagccctaaaacgatgaagaaatttcttcataaaaggaagactga

SEQ ID NO: 876770 - DNA, 98 bp, Homo sapiens
acgtcatgatgccccagcgggtgaggctgcaacacgaggctgccgttcagcacccgtcgagctgagtgatagttgcttcaggaatcttgcagaagacc

SEQ ID NO: 876771 - DNA, 99 bp, Homo sapiens
ctgaaagcacagccttggtggaccccaaaagaaacgggctacacagagttagtaaaggcagggcaagaatcctttcgttccatcacaaggtcgtattac

SEQ ID NO: 876772 - DNA, 99 bp, Homo sapiens; identical to SEQ ID NO: 850948

SEQ ID NO: 876773 - DNA, 99 bp, Homo sapiens
aagtctactaatggacagttagtcacccacctacatgttgagcatgtggagagggccaaatgtgaactgtgttgacagcactggctacacacccctgca

SEQ ID NO: 876774 - DNA, 100 bp, Homo sapiens
ttgtctcattgacatccacacagatgcagaagtagaggccagcatagcggcggtaaatgatcttaaagttccggaactgtggtcccagctactcgggagg

SEQ ID NO: 876775 - DNA, 99 bp, Homo sapiens
aattccctcaaagagctctggtccttgctgcactttattatgccggagaaaaatgcactcggtgatggaaagagagccactattctgaagaacacttgg

SEQ ID NO: 876776 - DNA, 98 bp, Homo sapiens
atgagacttttaaagatgcagaggatgctttgcagaaacttcataaatatatgcaggttcaaaccttgtactactcagctgatcacaagctgcttgat

SEQ ID NO: 876777 - DNA, 99 bp, Homo sapiens
ggaagtaaaaaaatttaacatgagaagtgtaaaaggtggtgggggaaatgaaaagaaaatgatgcatcctgttgccagcagtaatccagctttctgtgg

SEQ ID NO: 876778 - DNA, 98 bp, Homo sapiens
catggggaacgcggcgaccgccaagaaaggcagcgaggtggagagcgttgctgaagtaaaggaaccctgcagccttcccatgctatctgttgacatgg

SEQ ID NO: 876779 - DNA, 98 bp, Homo sapiens
gagattttgatgtggatgatgccaaagttttattaggtatctcagatgaagacatcatcaacattactcttcctactggagtccccattcttctggaa

SEQ ID NO: 876780 - DNA, 98 bp, Homo sapiens
tgcgggctcaggcccgggagctgcggaccgaggttggctcgatgctgttcccagatccagtccttctgtggaacttctgaacatcttttattagtgga

SEQ ID NO: 876781 - DNA, 99 bp, Homo sapiens
ggcatctaacctcctgtggataagggctcagaatagcaccattgctggtgttggagagcacaatggctgaacaagtccttcctcaggctttgtatttga

SEQ ID NO: 876782 - DNA, 98 bp, Homo sapiens
tcggcgatgagctaagacgctgtttcagagcgtttgggtcctctgaggccccttgaccagttgaagcagttggaggaaaggccttgccatgtattgtt

SEQ ID NO: 876783 - DNA, 99 bp, Homo sapiens
tctcaccacggctaatttgatggagaaggttcgaggcctacagaacctagcctatcagctggggctggatgagtgagacagcagtatttttctgactta

SEQ ID NO: 876784 - DNA, 99 bp, Homo sapiens
gccacccccagaaacagagcacaacggggtgttgcgtggatacatcctcagatgttcattgagcaaaacaagctaaagagacaaagccaccttctgctg

SEQ ID NO: 876785 - DNA, 99 bp, Homo sapiens
catggacaggtcaaagtattttgacaggctatgaaaatgattctgtagaagacctgaaggaggtgacttcaatatcttcacggaagagaggtaaaagaa

SEQ ID NO: 876786 - DNA, 99 bp, Homo sapiens
acctacgtgttagaaataaatctgatattgcaccttcacagcaacaagtggatgcctggactttggccttttctcctgattcccagtatctggccacag

SEQ ID NO: 876787 - DNA, 99 bp, Homo sapiens
gtgagagcctcaacgtggacgtggtcaagtacgagagtggccctgacggaggggaggaacattgcagtgtcgagatggctatgaaccctgtgtaaatga

SEQ ID NO: 876788 - DNA, 99 bp, Homo sapiens
aaattacatttatgaagatgcttatgacaaactttctccagaaaatggagtgaaaaggctctcagtgtctgagttaaatgaaatcctggaagaaattga

SEQ ID NO: 876789 - DNA, 99 bp, Homo sapiens
atagaagaagttaatagtttaagaaagcaaagagcaggttcttcatcttcaaaaatgaacagtttggttcaaaccttgtactactcagctgatcacaag

SEQ ID NO: 876790 - DNA, 99 bp, Homo sapiens
gccattcccctgcatatctgtactgaatgctggaagccaagcttgcacattctaggcagccatttggaagattcttctctgcgcatgaccagctgaaaa

SEQ ID NO: 876791 - DNA, 99 bp, Homo sapiens
ctgaacgaagagacagaggtcatgattctgagatgattggagaccttcaagttaataacgacatgatagtcactgacaacaacggtgcagtcaagtttc

SEQ ID NO: 876792 - DNA, 98 bp, Homo sapiens
aagcaatgaccatcggagatgtttcattggtccaggagctcctagattctgttatggagaaaacttgtatagatgcacttcctcttactatgaattct

SEQ ID NO: 876793 - DNA, 99 bp, Homo sapiens
gtaggatttccgggagaggctgctgtggaggctgaggaggcggcggcggagatctggcaatcatcctcttccagtggtagcgtgtttgggtctggaaac

SEQ ID NO: 876794 - DNA, 99 bp, Homo sapiens
gcagcggcaaaacaactttcccatgtttccctctcctaaagcctggaatttcagagggccaacaaatggaattttcttgagcatgtttctaatcgtttt

SEQ ID NO: 876795 - DNA, 99 bp, Homo sapiens
cttgtgtcaccatgctattatgcatagaaagcggttccgggagaaatttccacccgtgtttttttcctcgttcagaaacactgtccaaagctcaaataa

SEQ ID NO: 876796 - DNA, 99 bp, Homo sapiens
ccgaatggacgagttctcccggggaaatgtaccgtccagcgagttgcagatctacacttgggaaatttgaacacagagacatacacaaagggaagaaga

SEQ ID NO: 876797 - DNA, 99 bp, Homo sapiens
tgggacacagggatcctccgcttcgaggctggcgttccctctgcctccactggggaggcaaaggcatcaatgaagtcattggagttccacttggtcatc

SEQ ID NO: 876798 - DNA, 99 bp, Homo sapiens
atgaccctgtgcgggagaggctcaagcgggacctgttccagtttaacaagacacagcaggatgccaatgcctcttccctcttagacatctatagcttct

SEQ ID NO: 876799 - DNA, 99 bp, Homo sapiens
aagtgcgattgtggaagctgctcggctaaccaggagatgcttcagaaggtcgaagttgagtatgaaacgctgcctgggtggaaagcagacaccacaggc

SEQ ID NO: 876800 - DNA, 99 bp, Homo sapiens
cgtctcggaaaccccgcctcttacagtcacgagggagagtcccgtattctcagagtaaaagttgtttctggaattgatctcgccaaaaaggacatcttt

SEQ ID NO: 876801 - DNA, 99 bp, Homo sapiens
atggaatgaatatccacaatttagcatcaggcaaaggaagcaccgcacatttttcagtcaccaggagactaaagtccatcaaaaacatccagaaaatta

SEQ ID NO: 876802 - DNA, 99 bp, Homo sapiens
ctttttctcaacagctgtggaggtttcagatctgtctttggaggatctggacactcagcagagaaataaggtgccgaacttctgcctccactgctgtca

SEQ ID NO: 876803 - DNA, 99 bp, Homo sapiens
atctacctccatcaggaccccagatgtctgacagccctgtgtgacaccaagataagtaacggaaatcctcattgacgattcaatttgttgaaggccaat

SEQ ID NO: 876804 - DNA, 99 bp, Homo sapiens
gcccagcagctgtgggagccccgagaacgcctccagcggggatgacacagaaggtgaccaagaatatggcccaggtgaccaaagccctggacaaggccc

SEQ ID NO: 876805 - DNA, 99 bp, Homo sapiens
gggaagaatgaaaaaaccaaaattatcgccaagattcagcaagcaccagtctgctgagtggcggtcgtgaatctgtacttgtagagtggcgcgatgcaa

SEQ ID NO: 876806 - DNA, 98 bp, Homo sapiens
tatgatgttacagaagagtcaattaaggaattctttcgaggattaaattttgcaggcctttcagatatatccatctcacaagacatccccgtagaagg

SEQ ID NO: 876807 - DNA, 99 bp, Homo sapiens
tggcgcggagcccgggacgcgcgtacgccctgctgcttctcctggagttacggtttatcggttgttcctgaacctgctggatgcacaccagaattacct

SEQ ID NO: 876808 - DNA, 99 bp, Homo sapiens
caatttttattccacgaggaggagtacctggaaattagatatggaatgtgcagatgtcccactattaactccaagcagcaaagaaatgatgtctcaagc

SEQ ID NO: 876809 - DNA, 98 bp, Homo sapiens
gaagctggggaaggcagatgagaccaaggatgagcagtttgagcagtgcgtccagaatttcaacaagcagctggaatgtgccataccgaatccgtgtg

SEQ ID NO: 876810 - DNA, 99 bp, Homo sapiens
aatttctcctgctctgcagcttctgttcagcataatgcaaggcaaggtccagccgttccacccggcatgcaagcttatggagcagccccctttgaagat

SEQ ID NO: 876811 - DNA, 99 bp, Homo sapiens
gctgcttgcattccgccggctggctgggttccttcttctaacgatgacgatattcgcgctctcggtcacgctctcggtcacggtctcggtcacgatccc

SEQ ID NO: 876812 - DNA, 99 bp, Homo sapiens
agatactcccacaggggctcagcagtggaacatgacaaggaattcttccacccacgctaccaccatcgagagttccggtttgatctttccaagatccca

SEQ ID NO: 876813 - DNA, 99 bp, Homo sapiens
acggaggccattaccatgtatatattaaagatgttgatcatttgggaaactggcagtttcaaaataacaagcctttgtattcatttgaagataatgcag

SEQ ID NO: 876814 - DNA, 99 bp, Homo sapiens
ctgcttagtaaaccgagctcgaggaatggaacttatatagaattggtgataggatcacaacttctgaggtcccagcaagagtcctaacatctagcagct

SEQ ID NO: 876815 - DNA, 99 bp, Homo sapiens
ctgcatttctttcaccagctgtgtaaatggtttagctgactcctctctttgtccactttcttaaaacacttattcaatgataaattgtgtctcactgag

SEQ ID NO: 876816 - DNA, 99 bp, Homo sapiens
gggcattatgaacgaattctcaacccctacaacttattcctgtccggagacagcctaaggaaatcttttgtccaaatcctccagctatccttaatggga

SEQ ID NO: 876817 - DNA, 99 bp, Homo sapiens
ctccagcctgggtgacagaatgagactccatctgttgtcacagaagtctctgactctctcaatttctgagacgctaaaagcttttcctgcaaagctttc

SEQ ID NO: 876818 - DNA, 99 bp, Homo sapiens
cctgaatcttggtgtttggacataggagtgcacaaaacaacttgcagcagcttttcatgaggaatttgttgtgagagaagatttaatgggcctggcaat

SEQ ID NO: 876819 - DNA, 99 bp, Homo sapiens
atcaaatcagaaaactatgggaagattttggtagagaagaatgaacattgtattgagaacaatatagatttgcagatcctgataacttaagtgactctc

SEQ ID NO: 876820 - DNA, 99 bp, Homo sapiens
cctgggcgacagagtgagaccctccaggcgctgttgacttggagaaaccgagacacacctgtctgggcggctgccacgtcaatgtgcagaaggacgtct

SEQ ID NO: 876821 - DNA, 99 bp, Homo sapiens
ccacagcttaccccattctgtacagaggaacaagttccagttccagtctaccacccaacacctagccagactcggctagcaactcagctgactgaagag

SEQ ID NO: 876822 - DNA, 99 bp, Homo sapiens
ctttcccgagaattgcagctgagtatgctcgaaatagttcatccagtggaaagaggcaaaacctgatgaattaatggattccaaattgagatgcgtatt

SEQ ID NO: 876823 - DNA, 99 bp, Homo sapiens
ctgaggccatgtcaggagacggagccacggagcaggagtgtgaggaagaggctgtctgtgtcattatgtgtgcgtcggtcaagtataatatccggggtc

SEQ ID NO: 876824 - DNA, 99 bp, Homo sapiens
gtgggttccatgtgatggtggagtaggaggcaggtctccgcgataacagcaaagccgatggccagctggtctcgagtgaaaagaaggcgaacatgaatc

SEQ ID NO: 876825 - DNA, 99 bp, Homo sapiens
tctccaggcttgcaagcgattaccaggtcgtttatacgcaatgcagactggaatgaagatcgatagtaaaactcctgaatgtcgcaaatttttatcaaa

SEQ ID NO: 876826 - DNA, 99 bp, Homo sapiens
aaggagctggaaaatttggattatttagccttcaaacgtcagcagggtggtgattccactgaagcaactgccaaaccaaagagaagtttttatgctgcc

SEQ ID NO: 876827 - DNA, 99 bp, Homo sapiens
cccgaggaggcagccaagctcgtagcctgccactccgtgcctaagaaacgggacatctatgacaaatatggcaaagaaggattaaatggtggaggagga

SEQ ID NO: 876828 - DNA, 99 bp, Homo sapiens
tctgccactaattcgacatcagtttcatcgaggaaaggagcaggaactcaaagcagccgctgatggcgtactatctgaagtgaggaaaaaacaagcaga

SEQ ID NO: 876829 - DNA, 99 bp, Homo sapiens
ctgtgacaacctgggagaccacctggtggggaacgtgtacgtcaaggtgaggtcccagcttgaagagaaagaaaacaagaagttccctgtgtttaaggc

SEQ ID NO: 876830 - DNA, 99 bp, Homo sapiens
tattttgtggaatattcattgtactgaatattacccttgtgcttgccggagatgttacagcccagatagctcttcagcctgcactgaagttcaatggtg

SEQ ID NO: 876831 - DNA, 98 bp, Homo sapiens
ttggtttgtggaacagacagctccttctttattggtgccagcgagatttcagattcctgtaaacctctaaagaaaaggagtcgcgcctcaactgatgt

SEQ ID NO: 876832 - DNA, 99 bp, Homo sapiens
catggtgttgctgctgtactccttctccgacattgggtttgcctatcacagatgaacaaatccaggagatgaaatcaaacctggagaacatcgacttca

SEQ ID NO: 876833 - DNA, 99 bp, Homo sapiens
aagtacacggccagcgtgaccgttggcagcaaggaggtgaccctgaacctctacgacacggccgaaaaagttctatggtccacaaaggcggaagatgat

SEQ ID NO: 876834 - DNA, 99 bp, Homo sapiens
gctcgcccacccacagcctctcccccagccccaccactccctgccgaagcccagcccctgatgtcccagcagactgtgcaggtgcctgtgtactcggag

SEQ ID NO: 876835 - DNA, 98 bp, Homo sapiens
gtcttcactcatcatcctcaaacaagtaatggaggagaagctgaatgcaacaaacattgaggttggatggagtactgctcgtgattattacacgtttt

SEQ ID NO: 876836 - DNA, 99 bp, Homo sapiens
tcacaccggccgctgccgccgccgcgctccggaacagggcagccgatgaagtgcaaccttcacatgaatgggaatgttatcacctcagaccagcccatc

SEQ ID NO: 876837 - DNA, 99 bp, Homo sapiens
ttgacaaaacacaggaaccatttagcgtcagaaataagccgttttttgacatctgtacttcaagaaaggtggtgactctcaaaaggaaataggatcatg

SEQ ID NO: 876838 - DNA, 98 bp, Homo sapiens
cctgagcccgtgcctgtcttcagatcttcacagcacagttcctgggaaggtggagccaccagcctctccctgcaacccaaggagatctgtgcgctggt

SEQ ID NO: 876839 - DNA, 99 bp, Homo sapiens
aggactttaggagaaagttgctgaaggcaggagggatattaataaggcagcggaaagaagaaatatgaatacggctccatcaagacccagccccacacg

SEQ ID NO: 876840 - DNA, 99 bp, Homo sapiens
cactgagcagctacagaagcagactctggatgagctgaaatgcacacgcttcagcatcagtctgatctttgtagaatttgatggctgtaactggaagca

SEQ ID NO: 876841 - DNA, 99 bp, Homo sapiens
agcctcctgagcagctgggactacaggtgtctactatgaaccatcctgtactcagaatgtgaatcatggtgtacttgtggttggctatggtgatcttaa

SEQ ID NO: 876842 - DNA, 99 bp, Homo sapiens
ataccggaggaggatcttctgcggattgttggaatctaccggcttgtcaatgaggcagatcagattcaggttcgacgggcagccaatcaatgaaactga

SEQ ID NO: 876843 - DNA, 99 bp, Homo sapiens
ccagacacgacaccatgcatctcctcggcccctggctcctgctcctggtcaatgctgaggatcctcctatggttgtggtccgaaaatttgtccacctgc

SEQ ID NO: 876844 - DNA, 99 bp, Homo sapiens
cggagtggggaagacctgcgtcctttttcgtttttcggatgatgccttcaatactacctttatttccaccataggtcatgcttcaccccttcctccatc

SEQ ID NO: 876845 - DNA, 99 bp, Homo sapiens
aattctgcagcaaaaattggaaagaggtcattagaacatgaggaaaccaatatgcctactatgcacgaccttgttcatactattaatgaccagtctcaa

SEQ ID NO: 876846 - DNA, 99 bp, Homo sapiens
gtaagatggctgcccacgggggctccgcggcgtcctcggcgctgaaggggttaattcaacagttcaccaccattaccgagtctcgctctgttgcccagg

SEQ ID NO: 876847 - DNA, 98 bp, Homo sapiens
atccaaatcccaggcataatgaatgatgaaaaatttaacctgaagttggtcatcaaaccaggtgtttacacttcctgctgctgtgcttccaggtacag

SEQ ID NO: 876848 - DNA, 99 bp, Homo sapiens
ctggatcatggctgccgcgccgccgctacgggaccgcctgagctttctacaccgggtgagcacctgcggatctgtccccagggctacacctgctgcacc

SEQ ID NO: 876849 - DNA, 98 bp, Homo sapiens
gaagttacgcgaagtccacccagcgtttctgagctgttgagtggaatgtcatggccagctcctcggacagtgaagatgacagtttcatggctgtggac

SEQ ID NO: 876850 - DNA, 99 bp, Homo sapiens
aagttaagaaagccacctttgcctacagatggtgttcacagtgttggtgtggagtcacagcttgacttttgaaatcatagcccactaatgagttttgga

SEQ ID NO: 876851 - DNA, 99 bp, Homo sapiens
cctggccttctgtatcttcatggtgcggctcatcttcgagagatcagcattgttgatattgccaacaagaggagctcttctgctgaggaaagtggacaa

SEQ ID NO: 876852 - DNA, 99 bp, Homo sapiens
ccgagaccgtgaccgagagcgtgaccgagagcgcgaatatcgtcatcgttagaagcctgatgaagacttgttcaatccagactatgtagaagttgatcg

SEQ ID NO: 876853 - DNA, 99 bp, Homo sapiens
aaagaatcagattcacctcatgctgttactgtatatatgctagagcctcactcctgtcaatatattcttgggttccctgtattgaacactgatatacaa

SEQ ID NO: 876854 - DNA, 99 bp, Homo sapiens
gactgcgttccagccccagttccccggcagcgggacccggcgaagacgcgaccgcggcgcgagtcaccatggtgtgagttcttgatacgaatgaaaggc

SEQ ID NO: 876855 - DNA, 98 bp, Homo sapiens
aaactcaaacaacaaatagctgaggatccagaactaacgcattcaagtagtaacaagattgatgtggaattagaagaagctattagaagaagtcttga

SEQ ID NO: 876856 - DNA, 98 bp, Homo sapiens
ccttaaacatggtggctgtaataaagttttaagagaattagtgaaacataaactcatagcttgggagcgtaccaaaattgcacgtgcattatttaatc

SEQ ID NO: 876857 - DNA, 99 bp, Homo sapiens
aagacaaggtggaaaagttgcagtttgaagaggaggactttgccagccctccagatctctatattgaaagatttaatatagctcttggacaatatatgg

SEQ ID NO: 876858 - DNA, 99 bp, Homo sapiens
ctcccaaagtgctggaattacagctctagaggacaaaatcccagtccttggcacaaactcaggaaatggaagccggagtctgttttttgtggggctgct

SEQ ID NO: 876859 - DNA, 102 bp, Homo sapiens
aagggcagggctgttttatggatttgggtcctttcccataacctgtgcacggtgctgaaggttcctcatgacccagttgcccttgaagagcacttcagggat

SEQ ID NO: 876860 - DNA, 99 bp, Homo sapiens
cacctgtccccactgtccccgggttttcccttgggccagctccctacagaggcacatgctcacacacactggtgataagaagtacatcatggggcccaa

SEQ ID NO: 876861 - DNA, 99 bp, Homo sapiens
gtcggcggagtagcaagtggccatggggagcctcagcggtctgcgcctggcagcagattgaccgactcatcagtcacggggccgacatcctgaagcctg

SEQ ID NO: 876862 - DNA, 99 bp, Homo sapiens
gcgagagaaggaaaatgcgcgtcccgggcgcggaaccacgaagctgccctgagacgctcactcacgctgtggggatgtcagagagccccatcggaccca

SEQ ID NO: 876863 - DNA, 98 bp, Homo sapiens
gtatatttgcagccagtactctatatgaacaatccgtctggatcacggatgtaggaagtggacagtcattttgtttactcattcagccctgttgcagg

SEQ ID NO: 876864 - DNA, 98 bp, Homo sapiens
ggctcaagcagtcctaccatgtcagccttcccagtagctgggaccacaggttacaagacaagtggctcagtgcaaatgtgcaaaaaggtttcaggtgg

SEQ ID NO: 876865 - DNA, 99 bp, Homo sapiens
cttctagcagtgcagggaacttgggagtactcattcctgtaatagctgtgatccagacatttaatgtggatgcaccatgccagaccgtggaagatttaa

SEQ ID NO: 876866 - DNA, 99 bp, Homo sapiens
atttaagcctgatctaacccctagaaacagcattgcagtgtcgagatggctatgaaccctgtgtaaatgaaggaatgtgtgttacctaccacaatggca

SEQ ID NO: 876867 - DNA, 99 bp, Homo sapiens
caaattggaatagataaaattctttgtccccgtgaagactgttcctggccagatacctgattgtgctcaactcttctttgcttgagtgttactggagtc

SEQ ID NO: 876868 - DNA, 99 bp, Homo sapiens
catacaatgtggctgtcggcagagctggtagaggcacttctggatccagctgtgtgatagccgcactaggaaatacctggagtcacagtgtgaataccc

SEQ ID NO: 876869 - DNA, 99 bp, Homo sapiens
gtggacctggatgacaagggctgccccgccgagcagagagccaggaacacctgctgaaggaagggttggcgtggctggacttacaggccccaggggagg

SEQ ID NO: 876870 - DNA, 99 bp, Homo sapiens
gaagcacgagcagatcctggtcctcgatccgcccacagacctcaaattcaaagggcatcttttatgaccaaaactgtgccttgtggaaatgaacttcac

SEQ ID NO: 876871 - DNA, 99 bp, Homo sapiens
tacacagaatctacacagcaaagttaacctgacacagaaaatccttgtgcaaataaatgcttagaaagatatggagagagatttgaaggctgactcaaa

SEQ ID NO: 876872 - DNA, 99 bp, Homo sapiens
tgaatacgggcttctgcttcgggattttccagaccgtcgagctggttcttcatccccatgagcactgagttcatgtgtgctttggatgcatacagcttg

SEQ ID NO: 876873 - DNA, 99 bp, Homo sapiens
gagcagcaagacaatcactgcagagataccagatgcacacttgactgaaggaggacagggaatctgaagactccggatgacatcagagctacttttcaa

SEQ ID NO: 876874 - DNA, 98 bp, Homo sapiens
cctcccaaagtgctggattacaggaaactggagaggcgtggctggaccaagacctccccccatgtgagcaggcttcctcctcccccaacaaccgttgc

SEQ ID NO: 876875 - DNA, 99 bp, Homo sapiens
atatggacccaagagtcagcggtatattagttcagttaccactaccaggtggagccgccaccaaaatgcagattttcgtgaaaacccttacggggaaga

SEQ ID NO: 876876 - DNA, 98 bp, Homo sapiens
cgtagtctgtcctgttctttcaaagtgatgcagaagatggggaagaatatgatgacccttttgctgggcctccagacactatttcattagcctcagaa

SEQ ID NO: 876877 - DNA, 99 bp, Homo sapiens
cggggcgggagcttggtggagcaggagcggctgggcatcctcctgagactccggggtcagacgcccactccagtgcatcatcgaggagtcgggagagca

SEQ ID NO: 876878 - DNA, 98 bp, Homo sapiens
actcgtctgggatctgacaagaggaccccgctgctaactcggctacaacatttggcagaggctaataataagccagagatcgaagcggccctcttcct

SEQ ID NO: 876879 - DNA, 99 bp, Homo sapiens
aattactccgttaatatatacgatgatggaaacctgctctccattgtgaccagtggaggtgcctgcattattgcttactggcgatatggttcatggctt

SEQ ID NO: 876880 - DNA, 99 bp, Homo sapiens
ggggtaggaatcttcaaatgcacgatctggagtcatgtgcttgatgacatctgccaaaacggtattcacctctcgtttagttctggaggctgggaagtc

SEQ ID NO: 876881 - DNA, 98 bp, Homo sapiens
attctttcaggagtttacccaagaaccattggtggagatagaaggttcgatctggggctaatgttctaatttgtggtccaaatggctgcggaaagagt

SEQ ID NO: 876882 - DNA, 99 bp, Homo sapiens
agcaggacagccgaactggaatctggatgagcagctcaagcagggtttactagcattgggcatcagtaagtctgttcaaacaccagatccttctcatcc

SEQ ID NO: 876883 - DNA, 99 bp, Homo sapiens
gaccaactcagtgccaaaaccaggctaaagaacgtgccaatggaatggagcttgatgggcgtaggatcagagttgatttctctataacaaaaagaccac

SEQ ID NO: 876884 - DNA, 99 bp, Homo sapiens
tgggacgatcacttgaactcaggaggttgaggccagtgcagtccaacctgggtgacagggtgagtccatactgttcagtcatgaaatcggcaaaattcc

SEQ ID NO: 876885 - DNA, 99 bp, Homo sapiens
ggaatgttaactacgtggaaacatctgctaaaacacgagctaatgttgacaagttgacgaaggatcagagattggtgtattcgggcagactgcttcccg

SEQ ID NO: 876886 - DNA, 98 bp, Homo sapiens
gacggacagaggatgcacttgtccaatcctcaatcctggtttccacttgagcggcacagtgacagaacctgcaatacaatcggagccagaaactgttt

SEQ ID NO: 876887 - DNA, 99 bp, Homo sapiens
actctggagctgacagcgcgcacttcacccgcagttgtctctgctttctatccgtcaagatgataaagtcgtgtgcccgagaaccaaagaagtcttcca

SEQ ID NO: 876888 - DNA, 99 bp, Homo sapiens
cagagagacaattgatgatcagacctttaaaaggtgccagactctcagctaatgtcttcaggatagggagggccaaaccatcagtgtcgtcaaacattt

SEQ ID NO: 876889 - DNA, 99 bp, Homo sapiens
cagctgtccgcgcccacggtcctatggcggagctaacggactccgcgcggagatggctggagccgtgtggatgggcataaatggctaatgtccagcaac

SEQ ID NO: 876890 - DNA, 99 bp, Homo sapiens
ttgacatcaaccagttactatttgggcatgagccagaaggagagctctaagtctgccatgatgtatattcaggagttgaggtcaggcttgcgggatatg

SEQ ID NO: 876891 - DNA, 99 bp, Homo sapiens
tgtgatgttggagaactatagcaatctggttttcttggaaccatatttatttagagtcagaatggagcgatttgtagtaacagcaccacctgctcgaaa

SEQ ID NO: 876892 - DNA, 99 bp, Homo sapiens
agaaaataaaatactatttttggagaaagaggagaaatatgctgtatttaaaaacccccaggaaaatggctttgtaaagaagtttgaacctaaatctgg

SEQ ID NO: 876893 - DNA, 98 bp, Homo sapiens
cctgtcgcacggcgtcacctccttctgccccaccctggtcacttccccaccggaggtttatcacaagaggcggggtttcaccatgttgcccagactgg

SEQ ID NO: 876894 - DNA, 99 bp, Homo sapiens
ctgtcactcacttacacagtattgggaaatctgtgaaagcatccatgagtatgttttctgatttcctgcagtcttttctgaagcactcttcgagtacag

SEQ ID NO: 876895 - DNA, 99 bp, Homo sapiens
atggaggtgaaaagttcagttgagaaacaagggctcaatatggaggattactctccacaaaccggaggactacccccagactgcagtaagtgttgtcat

SEQ ID NO: 876896 - DNA, 108 bp, Homo sapiens
ggaatattgagacatctgtccgagtggctgggattacaggccaaaggtgtccaaactatacagacccacagaatctaacaacagatgtctcaatattcctcgtcctag

SEQ ID NO: 876897 - DNA, 107 bp, Homo sapiens
tttgaagagatgctggaacatgcagagtctgcacaaatgattgccttgctcagtgtggcaaagattgcaaatcttactgctgtgatggaaccacgccctactgttgc

SEQ ID NO: 876898 - DNA, 99 bp, Homo sapiens
aagatatgaacctgagccttcagtcaagaccctccagcttgcctggtgaccctaagaatgactcctggatctttgccctggctgtgctcctgtgcagca

SEQ ID NO: 876899 - DNA, 98 bp, Homo sapiens
acacgccctcaggtaaaggtggaagtaaatggccacgctgtattgacagagctggagtcccaaataaaccaggcattcccaaattactagaagggagt

SEQ ID NO: 876900 - DNA, 99 bp, Homo sapiens
gtagctgccacgcaatggacattttgttggctggaatgtcttcaatcttccaggcctgaagaccctgattggtgttctggaaaatcgggtcactcccac

SEQ ID NO: 876901 - DNA, 99 bp, Homo sapiens
gaactttggctttagccttcaagacgcactgagcagggctcgggagcgaaggctgctagaggtagtaagcattaataatgtctttcatctttgagtgga

SEQ ID NO: 876902 - DNA, 98 bp, Homo sapiens
gggacgacttttacatcatcacggaggtaatgggtaaagtgccaaccatatccatcaacaaaacagatggctgccatgcttacctgagcaagaattcc

SEQ ID NO: 876903 - DNA, 98 bp, Homo sapiens
ctttgccaaacaccctcgacttggttacctgcctgtccagacagttcttgaaggtgacaacttagagacgtttggacagaagggtaaagctattagga

SEQ ID NO: 876904 - DNA, 99 bp, Homo sapiens
gcaaggaaagaaagaagcctgcggtgaaagtgacactgatctgcagatctccaggggagcccaccagcctagtcaacatggcctcggaagacattgcca

SEQ ID NO: 876905 - DNA, 99 bp, Homo sapiens
cctgattaaatactggtttcacactccaccaagcatcccattacagatagaagaggctcttgcagccaatgccggaacaggatttgctgttgctgagcc

SEQ ID NO: 876906 - DNA, 99 bp, Homo sapiens
acattgaactcttcaggagcacagcagctgaagttcagcaggttatcaatactctggctgaccatcatcatcgtgggactgactttggtggaagtcctt

SEQ ID NO: 876907 - DNA, 99 bp, Homo sapiens
gaggaatagaaactttggaatctgtacccattattggtggtttttgggagactatctttggcaacaggctgatcccaaagttgtcagatggagagtaaa

SEQ ID NO: 876908 - DNA, 99 bp, Homo sapiens
cactataaacactcatcacactgccactcacctgtgctcctgatacagggccaaaggggtttggaggtctcatgacaggctggctgtatattaaggttg

SEQ ID NO: 876909 - DNA, 99 bp, Homo sapiens
ctggaggagcgatttgccatcgtgctggtaaggtactcaactgtgtggggtactacataaatcctgaaagactacaataaagtggtgatgtctcgggaa

SEQ ID NO: 876910 - DNA, 99 bp, Homo sapiens
gtcctcttctgcaaggtccggctgctggatggaggggattttgtcagcttgtcgtcaagacccaacatgagtgaagtttcctgcaagaaacgggacgac

SEQ ID NO: 876911 - DNA, 99 bp, Homo sapiens
agaggacctgtgcagggcagagcaggaggccccccgaggtgtgggcagaagaaaaagctagtgatcaacagtggcaatggagctgtggaggacagaaag

SEQ ID NO: 876912 - DNA, 152 bp, Homo sapiens
tgagacccctcctgtctcagcttggggggaactctgtcccccagcctggctgcacttgaggttcccgcccaggaagattggaccagaccctgaattcttctagctcctccaatcccattttatcccatggaaccactaaaaacaaggtctgc

SEQ ID NO: 876913 - DNA, 98 bp, Homo sapiens
cgtggtgaaggtccggggcttgccctggtcttgctcggccgatgaagtgcagaggtttttttctggacgccaggaaagcatgtgcagatgcaactctc

SEQ ID NO: 876914 - DNA, 99 bp, Homo sapiens
ggggcttgtcaattcggcaaaactcttgagaactttcacagctttcctcatcactgttgtcttgacagttattctgtccatcgcagatgaagctcttgt

SEQ ID NO: 876915 - DNA, 99 bp, Homo sapiens
cagacggagtcctgttccaccttcagagcgtcacggcgtacgccctcatggggaaaatctccccggtgactttcagtgttttaactcaaatgggtgatg

SEQ ID NO: 876916 - DNA, 98 bp, Homo sapiens
tggacgctgcacagcggaatctatatagggatgtgatgttagagaactacagaaacctgatcttccttgtcacctactgccaccttcgaaaaacacgg

SEQ ID NO: 876917 - DNA, 99 bp, Homo sapiens
tgaaatgtgcttgctcctcagctctgctgttttgtgaccaagaatatggcccaggtgaccaaagccctggacaaggccctgagcaccatggacctgcag

SEQ ID NO: 876918 - DNA, 99 bp, Homo sapiens
gccaagaacagcccaatctcctttctgggcaaacgttccaagagatgagtgaatttcataattataacttggatctgaagaagagtgatttttcaacac

SEQ ID NO: 876919 - DNA, 99 bp, Homo sapiens
ttttaaccatgagggaaatcgtgcacatccaggctggtcagtgtggcaaccagatcggtgccaaggaattggcagcaatgaaacagattctcgttaaga

SEQ ID NO: 876920 - DNA, 99 bp, Homo sapiens
gaaaaacagtacatttctgcaattgagaaacaggcacacaagtgtgaggagttgctaaatgctcagatatgaccacattctgaagtgggaactcttcca

SEQ ID NO: 876921 - DNA, 99 bp, Homo sapiens
ctgaaatctgaaatgctccagaatctgaaccttcttgagcaccaacctgacacttaaaggaagtgctcattggaggtagagacggggtttcaccgtgtt

SEQ ID NO: 876922 - DNA, 99 bp, Homo sapiens
acaagctcctgcgggccggcggggagatctattgggaaactgattataaccactcgggcaccatcgatgcccacgagatgaggacagccctcaggaagg

SEQ ID NO: 876923 - DNA, 99 bp, Homo sapiens
aaggcggtggtactgcatgtgcttccagaggagcccaaaggtgaagctttgttctaagaatatttgtttcatctagtttatgagtccaaatgatataga

SEQ ID NO: 876924 - DNA, 99 bp, Homo sapiens
gactcggagacggacgaggatgaggaggagggggacgagcagcagcggctcctcaacacccctcgaaggtcagaatgaaggaacgatttccgtagttga

SEQ ID NO: 876925 - DNA, 99 bp, Homo sapiens
ggattctcgacctgctaacagaactggaccttttcgcgggacgaccctgggacagtctccactggggcagatccagctgaccatccggcacagctcgca

SEQ ID NO: 876926 - DNA, 99 bp, Homo sapiens
cctccatagtgcggcgcgggatgctcctggcgcggcaagtggttcttcctcagctctctcctgcaggtcacagggattatggacccagaacagatgctg

SEQ ID NO: 876927 - DNA, 99 bp, Homo sapiens
gtcctgcgcttggggatcctctgtacgcccgttcactgccaatgttttcagttgcaccaagcttagccaccaatgcatcagcagccgcctttaatccct

SEQ ID NO: 876928 - DNA, 98 bp, Homo sapiens
tatttattcaagttacttctgattggcgactcaggggttggaaagtcttgccttcttcttaggtttgcaatacgtcggtaacctttccagagatgtga

SEQ ID NO: 876929 - DNA, 99 bp, Homo sapiens
caccttcgcctggcacaccgaggacatggacctgtacagcatcaactacctgcactttggggagcctaagtcctgcagggagagcaacaagccccggcc

SEQ ID NO: 876930 - DNA, 99 bp, Homo sapiens
acaaaagcccagccgctgtctgattttaagctggcaaagtgggaaaaataaagtgttgagtaaacagaccaagttggcggcccagcccaatccagcttt

SEQ ID NO: 876931 - DNA, 98 bp, Homo sapiens
gtgtatgatcttttggaggaggaggatgaatttgatagagaggtagcaaaccatgtgatttcttctgactctatttcctcttctgccagtagtttcct

SEQ ID NO: 876932 - DNA, 99 bp, Homo sapiens
gtgaagcttttgcacgagaacatggactcatcttcatggaaacgtctgctaagactgcttccaatgtagaagaggctgacagactccttcaactacaac

SEQ ID NO: 876933 - DNA, 99 bp, Homo sapiens
agagcttgctgtgctgctggcggaatctgcaaacctgtactgagcttaacagatccttccattcccaaaagtacattgtcacttttgatgtctctgtgg

SEQ ID NO: 876934 - DNA, 99 bp, Homo sapiens
gtcagcgggatcatccagcacatagtgatgtcttggcattgcccattttcaagcaggaagattccagccttccattggatggtgaaacagagcacccac

SEQ ID NO: 876935 - DNA, 99 bp, Homo sapiens
gttggtggttgccctggatgttgatgcaaccctggagcatgtgcaggatcctcagaacactgttaaggtccaggctaacctctgctttgtggacattga

SEQ ID NO: 876936 - DNA, 99 bp, Homo sapiens
tgctggtattggaacagtctttggcagccttatcattggttatgccaggcatgtggagaccccaaggcaaaaccatcctatcttatcgacaaaaacctg

SEQ ID NO: 876937 - DNA, 99 bp, Homo sapiens
tgctgcatctgcaacaacagcagcccctgaaaatgcactgcagggactgtgccctggtgaccagctcagggcatctgctgcacagtcggcaaggctccc

SEQ ID NO: 876938 - DNA, 99 bp, Homo sapiens
caccaaggttgctaactgcagcttgggaactgccaccatcatcagtgagaacttgaacaatgaggtcatgatgaagagatggggtcttgctatgttgcc

SEQ ID NO: 876939 - DNA, 99 bp, Homo sapiens
cgcgaatatcgtcatcgttagaagagatcttgatgacaagctacttatgaggcctgggtccagtaccatcctttcaactcgaaattggccaaatcgagc

SEQ ID NO: 876940 - DNA, 102 bp, Homo sapiens
ggtttcaaacatctcctttttcgccatgtttgttatgtacttcttgactgccatttttggctacttgacattctatgttgctgccttcactgaagtcttgaa

SEQ ID NO: 876941 - DNA, 99 bp, Homo sapiens
aagatggttctgcagcaccacaaccaactcctgataccacagccagctgaccagccgacagaggaaagttgactcatactggtgtccagtgaagaaacc

SEQ ID NO: 876942 - DNA, 99 bp, Homo sapiens
gcagatcgagtcctaccccacggacagcatcctggaggaccagtcagaccagcgcgtcatcatcaagccattcgatgaggactatctaaaccatctcga

SEQ ID NO: 876943 - DNA, 98 bp, Homo sapiens
gcagcagcggcgccgtgctcgctccagattctgcttctcagaagatgcactattatagatactctaacgccaaggtcagctgctggtacaagtacctc

SEQ ID NO: 876944 - DNA, 99 bp, Homo sapiens
cctcatcagtcgggccacactggtcttctcatccttaataactgtgacaccagtattcacaatttcctccacggctttgaggtttaatgaagagctctg

SEQ ID NO: 876945 - DNA, 99 bp, Homo sapiens
tgctaaggccattggacacagaatccgagtggtgacaatctccaatagacttgtgtcttcaccttgctgcattgtgaccagcacctacggctggacagc

SEQ ID NO: 876946 - DNA, 99 bp, Homo sapiens
cagacactgagtggagcccttgtaaggaactgtccaatgaaagaaatgctatcatggcaaaaggtgatacaatttcagcaggtagttgtttaattttgt

SEQ ID NO: 876947 - DNA, 99 bp, Homo sapiens
ttcaagaccagcctgggcaacacaggccagccagtgaccttcagtgaggaagtcttcttggcccagaagcctggggcacctctgcaggccttccaccgg

SEQ ID NO: 876948 - DNA, 99 bp, Homo sapiens
ggcacctctggtgaggcctgtcagagtggcactggtagaagttccaggaaccctgaactttggttctaaaaagtaccctttgaagtagcgatactgaac

SEQ ID NO: 876949 - DNA, 113 bp, Homo sapiens
cggtgagcgcgtttcccgcctgagcgcaactagcggcgggtcgtgggcacctccagggagtcgtcgcatggtggatgtcatggacgtgaacacacagaaaggcattgaaatga

SEQ ID NO: 876950 - DNA, 99 bp, Homo sapiens
ctggagtgatctatcaggcaccagacttgggatcagttataaactctagagtgggcaaggggacgcgagataaggtcctgatcagaatcatggtctccc

SEQ ID NO: 876951 - DNA, 99 bp, Homo sapiens
cgaggaggacgccgatgaggatgaagatgcggcggcggcgcgccgggccgcagcggccctggaggagcagctggcccgtgaaggtggagcggacccgga

SEQ ID NO: 876952 - DNA, 99 bp, Homo sapiens
gatgaaacgtcaggaatttactacacaggtatctgttactaaggctgaacaagaactgggatttgccatccaaacgtgctttatctctccatattcgaa

SEQ ID NO: 876953 - DNA, 99 bp, Homo sapiens
tgaaggaaaaattgggaaactgcaaggtgttcagcgaattaaagtggaaggagaacatgaatctctcagaggcccaagtacaggcgttagcattaagta

SEQ ID NO: 876954 - DNA, 98 bp, Homo sapiens
atggaggctgagcatttattcaggctcttaaagactctgaccaagtagcacagagtgatggggaggagagccctgctgctgaagagcagctcttggga

SEQ ID NO: 876955 - DNA, 99 bp, Homo sapiens
cacgataaaggaactcaggcgcctcttcttagttgatgatttagttgattctctgaagaacattcagaagattctcggccttgccccttcacgagccgc

SEQ ID NO: 876956 - DNA, 98 bp, Homo sapiens
attcctaggctgggagcaaaacgctgctggagccagttctgcttctcggcaaggagcgatttgctggtgtagacatccgtgtccgtgtaaagggtggt

SEQ ID NO: 876957 - DNA, 99 bp, Homo sapiens
aaaatgttctttactactaagcaccgttggtatcctcatggacgcttttgccttatgaacagtcctctcttttggaactcataaagactgaaaacaagg

SEQ ID NO: 876958 - DNA, 99 bp, Homo sapiens
tctaccaccctctcctgcgcccctgagagaggctgttcagggcgacagctcagtgaagtcttcattcagttaccttcaaggaaagaattaccagaatac

SEQ ID NO: 876959 - DNA, 99 bp, Homo sapiens
gtgggaggcgacaggtcgcgacggcagccacaggtggcagtcgggggtggctgtaattggagatgctgcaggataagggcctgtccgagagcgaggagg

SEQ ID NO: 876960 - DNA, 98 bp, Homo sapiens
tcaggtctggagctcgaccgggccagaccgtgagtcccctagaagttactcatccactttgactgacatggggagaagtgcaccaagggaaagaagag

SEQ ID NO: 876961 - DNA, 99 bp, Homo sapiens
aaccggctggctgcagacccggccctgtctctgcccctggtggtcatcgtccatggcaaccaagacaacaatgccaaagccactatcctgtgggacaat

SEQ ID NO: 876962 - DNA, 99 bp, Homo sapiens
tttcttcagcctatgtagacagccacaaatgggaagcaagagaaaaagaacattactgtcttgctgactgcctgcatccacgggtctgcggcgatgctc

SEQ ID NO: 876963 - DNA, 98 bp, Homo sapiens
tccggtctacagctcccagcgtgagcgacgcagaagacgggtgatttctgcatttccatctgagtgaagatgatacctgcaaaagacatggctaaagt

SEQ ID NO: 876964 - DNA, 99 bp, Homo sapiens
tatatggcaagcactaaaccactatgcttaccgagatgcggttttcctcgcagaacgcctttatgcagaagagaagaggaggtatcttgcagtgggcct

SEQ ID NO: 876965 - DNA, 98 bp, Homo sapiens
ttgtacttctaaatactccagtccttttccatgcactggaggagagttttcagatgcttcaagtgttgtgaacagagacttgtttggattatgcattt

SEQ ID NO: 876966 - DNA, 99 bp, Homo sapiens
ggaatctgaagaagcccacgcagattttaattcccactctagattctgatctggaaagcatgaagactgggctttttttcctatgtctcttgggaactg

SEQ ID NO: 876967 - DNA, 98 bp, Homo sapiens
tgggacccagagcgggaccccggctgccgagtccaggtgtcccgcgggcctcgatttggggagcagtgccggtggtggtgtgcacattgagccccggt

SEQ ID NO: 876968 - DNA, 99 bp, Homo sapiens
ctctttatttcatcactccgacatcaaagctcttgaagtcctattggctggataattttgcaaaagattctgtaaaccctggagtcatggtgttgctgg

SEQ ID NO: 876969 - DNA, 99 bp, Homo sapiens
gttgaaattcttaaggatgctttcaaatcaaatgactcacagcagagagcagcacttgaggcatgtcacaagggctggggcgtcagcgtcgtggttgga

SEQ ID NO: 876970 - DNA, 99 bp, Homo sapiens
gtcaaagtgtcactgaactaaaggctgactttccagacaacgcgtctactagaaaaatctcagagggtagaagccatcattgcatctatgcaggctact

SEQ ID NO: 876971 - DNA, 133 bp, Homo sapiens
gttgatgaccagtctttcccatatcagagcatcacttttcctgagttaagcaataaagttcagaatgaccagtgccagcccaatgcagatgactccaggtggatgaagaccacagagaaaggatgggaattcc

SEQ ID NO: 876972 - DNA, 98 bp, Homo sapiens
tcttcttggtgctgtggctgatgcatttcatggctatcatctacacatagggccagatttgagtgtgtgaatttttgagtgaaacctggaacccaaat

SEQ ID NO: 876973 - DNA, 99 bp, Homo sapiens
cactgcactgcttctaccctgccaaagagcttgctaaagcccttttgtgctgcactacttaaggtgatttggggaactggtcagctctttcaagctcag

SEQ ID NO: 876974 - DNA, 99 bp, Homo sapiens
tacagaaggctggaggaaacgtcaggccggatcttggacctgaagactgggacggtcaagaaagaagggcagcagtcatccatgaggatgtgcatgggc

SEQ ID NO: 876975 - DNA, 100 bp, Homo sapiens
gataaagggctctgaaagctagaagaaaaggtgtacttgcaagaaacctcaggggtttcttgcaagtacaccttttcttctagctttcagagccctttat

SEQ ID NO: 876976 - DNA, 99 bp, Homo sapiens
cagtgacagcacagcctgctcaaacttcatatttaaggtgcaggttttgcagcatttggacaaacaaagccagtagtaaccccttttggtcaagttgca

SEQ ID NO: 876977 - DNA, 99 bp, Homo sapiens
gctgtatgcactacctcctcctccccagttctactcaagccttattgaagagataggaactcttggttgggataatatcaaaggtgcagaatctgggac

SEQ ID NO: 876978 - DNA, 99 bp, Homo sapiens
ggtcacacctccaggctcccggtctttcagaatggggatcttggtgatctggcttgtctggacatctacgacaaatagcccagccttctccatggtggt

SEQ ID NO: 876979 - DNA, 99 bp, Homo sapiens
cgaactggcagacggatatttactgaactgcaagcacatgttgaccagataactgaaatggcagcagtaatgaggaaagccattgaaattgacgagcaa

SEQ ID NO: 876980 - DNA, 99 bp, Homo sapiens
tatggacacagcttctagtgttgctttggatcttgtggaaagtcagaatgccacagggcccagtgggctccgggtcctgccccagggctacggctggaa

SEQ ID NO: 876981 - DNA, 99 bp, Homo sapiens
gctgcagctgcgatctctgtggtaggcccaggacctccggctagcctgtttcagccacctcgtcgtcctggccttggaactgttggaaaaccaattcga

SEQ ID NO: 876982 - DNA, 99 bp, Homo sapiens
atttccagcaggctgcagatacgagtggacaaatgcaacaaggagacgcgcctttgccctggtctctcaagcgtatacttcaatcatcgccgatgattt

SEQ ID NO: 876983 - DNA, 99 bp, Homo sapiens
gagacgtccagcagctccgtgaccgtcaaatttcttatgcctggacacaaaagtggtgcgcacaaaatggcttgtctcttccacaaggttttcaaattc

SEQ ID NO: 876984 - DNA, 99 bp, Homo sapiens
gtcgggcgcggcggctgagaaggcggactccagacagcgaccccagatgaagcctctactcaatagtccccccagctttgtgtgctggtctcggggctt

SEQ ID NO: 876985 - DNA, 98 bp, Homo sapiens
tttgaagtgggagcccagttggaagcccgggaccgtttaaaaaactggtcaggatggctaactggttggctccccacatggtgccctacgtctatatc

SEQ ID NO: 876986 - DNA, 99 bp, Homo sapiens
ctaagagtgacatcctcgttcactgagataattttcactggtccactgaagccagccagctgcgtgatcatcaggcacacgatggacaggatgagcctg

SEQ ID NO: 876987 - DNA, 98 bp, Homo sapiens
gccacacaacatgtacctgcattctgccttagtcaaggatggtgcgtccaaggttaaccatttatgtttgtcaggaatcactgcagttgagggagcag

SEQ ID NO: 876988 - DNA, 100 bp, Homo sapiens
tcgaggctatagttaccttcctcatgttgaagcccactgtgggtatcatatcttcactgaattgacctgactctcttaaaactgtgcttttatagcctcg

SEQ ID NO: 876989 - DNA, 99 bp, Homo sapiens
cagccatccagaatccagagtttcaacaccatctcagcaacctttggaggcactccatccccaagcacttcccggatgaagcagtgctggcccatgtaa

SEQ ID NO: 876990 - DNA, 99 bp, Homo sapiens
gcggagcggagacgggagtattatgaaaagatcgtagctacagcaagctgggtagcaggcagatccaaaggatatcatgaagtttccagggcctttgga

SEQ ID NO: 876991 - DNA, 99 bp, Homo sapiens
gcgtgagccaccgcacccggccaacatgcaaggaggcactaaactccatggtcagctgggccatggagacaaagcctcctatcgacagccaaagcatgt

SEQ ID NO: 876992 - DNA, 115 bp, Homo sapiens
gaggggttgttttataaactgcctggccgaaatctggggggaatgtatcataagcggggagggggcttcgcggaggtgaccttgagcgtgaaaaggctgattcggccaggcagtt

SEQ ID NO: 876993 - DNA, 99 bp, Homo sapiens
aggttgtccgtgtagccagcaaacagagtctgatcatctgcaaatgtaacaaaggcaaaggccctgaatggcttggggatgaagacatccatcacatcc

SEQ ID NO: 876994 - DNA, 98 bp, Homo sapiens
tccaatgatgaggacatccacacagccaatgagcgccgcctgaagaccccaccaacaactgaacgctttggtcaggctgctacaatggaaggaattgg

SEQ ID NO: 876995 - DNA, 98 bp, Homo sapiens
gttgagcttgatgtcttcagaggaactttgcccaacagctggtttgcctcagaggcagattgatgctcctgaaactctgatgagagccctggaacttt

SEQ ID NO: 876996 - DNA, 98 bp, Homo sapiens
ctgcgctttcctgtccccaagccgttctagacgcggatctttaaatggatgagatggctaccactcagatttccaaagatgagcttgatgaactcaaa

SEQ ID NO: 876997 - DNA, 99 bp, Homo sapiens
ctcctcctcctcttcttccatctcttcatattcatcaggacccatttcctctaatgaaatttttccaaaccaagcaaaaaatgaactgtaaactgaacg

SEQ ID NO: 876998 - DNA, 99 bp, Homo sapiens
atgaactgatctctggtccaatgaaccgacacgcctggggggttgcctggtttggatttgccattctctgctggactgatctagtgaaaagccatttga

SEQ ID NO: 876999 - DNA, 98 bp, Homo sapiens
cggtcggctggcgtccctcttcagttctctggagccccagattcaacccgtgtacgtgcctgtgcctaaaccgattccacgactcttctttgcgggag

SEQ ID NO: 877000 - DNA, 99 bp, Homo sapiens
agctaaagcagcgtgcgttcagccctggggtgtgcaactgaggaacatggctcaagaaactaatcacagccaagtgcctatgctttgttccactggctg

SEQ ID NO: 877001 - DNA, 98 bp, Homo sapiens
taaaaccagatcgctgccatcactgctccgtctgtgataaggaggacatgtatgcccaggactctatagagctactaacaacatctggtatccagttt

SEQ ID NO: 877002 - DNA, 99 bp, Homo sapiens
ttttgaggacacttgtggagagctcgaattccagaatgatgaaattgtgtgagctgtcagggagaaatgtcgaaacaggtcaagagatgttctgctcag

SEQ ID NO: 877003 - DNA, 99 bp, Homo sapiens
ggcgatgctgtgggtctcgttgggcgccggtgtcctggcctcttcctcagatctgttacctaaagcaataaaaaatggccagaggatcagtgtccgatg

SEQ ID NO: 877004 - DNA, 99 bp, Homo sapiens
ctggacgtgctacagtcctgcgagtgcagtggtgagatcctgaacaactgctgcgtgatggagtaccaccaagccacgggcaccctcagtgcccacttc

SEQ ID NO: 877005 - DNA, 99 bp, Homo sapiens
gtgtaatagatgtaatcacaaagacatggagaggatttccaccttccgcatcattgtgtttattggatctggtcaagtggcttttagctcattgtggga

SEQ ID NO: 877006 - DNA, 99 bp, Homo sapiens
ggagcgaagagctgcttctgtatcttaagatctagaaatggccattgcctactggaacttagtgcttaatggaagatttaaattcttagacttatggaa

SEQ ID NO: 877007 - DNA, 98 bp, Homo sapiens
tgtggcggatggtgggactctccggccctgtgcagtagtcttcctgcgagcaattaatcagtatgcagatatgctgaacaaaaaatttctggatcaag

SEQ ID NO: 877008 - DNA, 101 bp, Homo sapiens
gcgacagagtgagactccatgtgaaagaaggcagttttcacatgataagaagagaattttgaaaactgccttctttcacatggagtctcactctgtcgccc

SEQ ID NO: 877009 - DNA, 99 bp, Homo sapiens
agaaatctcgtctcgaccaagagctgaagctgatcgttacagaatgtctgaaggggacagtgtgggagaatccgtccatgggaaaccttcggtggtgta

SEQ ID NO: 877010 - DNA, 99 bp, Homo sapiens
atgagctctaagtacatgcccagtggatactccatgtgacatggtttctccctatgttacgtggatgtttgtaacgtgatgaatgcagtattggttcag

SEQ ID NO: 877011 - DNA, 98 bp, Homo sapiens
gcccccagaagacctcttcagacagcatctgcgttcctttgcctgcaacaggggtcaagatgagttttgcctgacttctttgatgtcctgaactttcc

SEQ ID NO: 877012 - DNA, 99 bp, Homo sapiens
gcaggagtgtcatcttttctcaatggggatgtggcttcagtctctgtccaggttcgtgctggccgtgggcagcgccgtctttgatgccatgttcaacgg

SEQ ID NO: 877013 - DNA, 100 bp, Homo sapiens
atgattccctggattatgcaaagaaaaatgaacccctgaagtatctcctcttgcaagtctatgtttgggttcatttttctttgcataatccagggaatca

SEQ ID NO: 877014 - DNA, 75 bp, Homo sapiens
gccgcgaagtcgcagcgccagacccaaggcccccgagtgagcgcgggcgccgagtgcggcaccttcccgtctgat

SEQ ID NO: 877015 - DNA, 133 bp, Homo sapiens
tcaacagcaggtggctgtcgagacgtctaatgaccattctccatatacctttcaacctaataagtaactgtgaggttattttgtccacaaatattgctgaaacaagcattaccataaacgatgttgtttatgt

SEQ ID NO: 877016 - DNA, 99 bp, Homo sapiens
ctccttttccctctccctttccctaagattcgagtgagggttgaaaaggatccagaacttggatttagcatatcaggtggtgtcgggggtagaggaaac

SEQ ID NO: 877017 - DNA, 98 bp, Homo sapiens
gcaccgccagttccctttccacgagatgtttgctgctcgaggggggcatggacctgcaggctgggacaatgaaaagaaaatagctattttacatgaaa

SEQ ID NO: 877018 - DNA, 98 bp, Homo sapiens
tcgaaggacatgaagactaccacatgatgcttaaaggagctgctcctttgaagatactaaatataggaaatgtcagtactccattgatgtgtttgagt

SEQ ID NO: 877019 - DNA, 99 bp, Homo sapiens
ctcctgagtagctgggactacagcattttgaaagcgaagcagaagccgtagaatcagcggcgagcctgttgaaagaacccacaggtgcatttcacagca

SEQ ID NO: 877020 - DNA, 99 bp, Homo sapiens
atgagtagggaggagaaacagaagcttggacaactgtccttagtgtgagaaaatgtccagatttctcatcctctggccaatggaaggttgtcactcaga

SEQ ID NO: 877021 - DNA, 101 bp, Homo sapiens
gggtgacagagcaagactccgtcagcttctcaatttctgattcaagattctgtatacatacagtcaagttttctcttgcgacagcgctgtgcagcaattct

SEQ ID NO: 877022 - DNA, 98 bp, Homo sapiens
ttgtctttctgggaactcattcccatgagatgtgtgcattgcaatgttgtgtactctgatgtggctgctctgaagtctcacattcaaggttctcactg

SEQ ID NO: 877023 - DNA, 99 bp, Homo sapiens
caggagtcttgcctcagaatgaacaaccatattctaccttggtgaataacagcgagtgtgttgcaaacatgaaaggctggagtgcagtggcaccatctc

SEQ ID NO: 877024 - DNA, 99 bp, Homo sapiens
agatgccgtcattggaaatgttcaagagaaagctatgaaacttcataatgcttctaattctgaaatgataatctatctttgccggaatgcaaaggatgt

SEQ ID NO: 877025 - DNA, 99 bp, Homo sapiens
gactacaaggagatcgaggtggaagagaaatgatgaccgggaaattttattggagtgtcagaaaagagggccatcatttaaaacatttgcatatttagc

SEQ ID NO: 877026 - DNA, 99 bp, Homo sapiens
gaggaggggtgccggccgggattcgcggcccggagctcgggaccggagtgtacctcacagccttctaggatctccagagtggacaggaatctcacttgg

SEQ ID NO: 877027 - DNA, 99 bp, Homo sapiens
ctcttttctcatcaccggtctcaaccattcttcttgacaggtgccatttttctcttcatatcctgccttgcacatgcatttcccgatgggcaccagcca

SEQ ID NO: 877028 - DNA, 98 bp, Homo sapiens
aatcgggctgaagcgactgagtccgcgatggaggcaccgcacgtggtattgttgtctacactggggatcgcactgtgatgggaagaattgccacactt

SEQ ID NO: 877029 - DNA, 98 bp, Homo sapiens
tccagagagttctggccagtgcttgaggctccaggtgtctgtctgctgcaaggagaggaggttaaagcacgaattgggagctctcagcgacatcacca

SEQ ID NO: 877030 - DNA, 98 bp, Homo sapiens
tgcccttctgggcccacgcggggaagcaccatgctgcaggctattgagcgctacatgaaacaagccattgtggacaaggtgcccagtgtctccagctc

SEQ ID NO: 877031 - DNA, 99 bp, Homo sapiens
tcttcttcgagtatttgtagaaggctgtggtgctcccattcaagtttccgaggtgaagctgctttccttttcatcagggcagcgaaccgttttcctccc

SEQ ID NO: 877032 - DNA, 99 bp, Homo sapiens
gttacattgcagccatcagcgctcgttttgtgcagcttcagcacaatgacattgacaaacggatgcctgaaatgtgcagatgccccgtgtcagaagagc

SEQ ID NO: 877033 - DNA, 99 bp, Homo sapiens
taagcctcgacttagaagctaccgagttaccctaagaaagcagggcatatacttctcttgtcttggttggatgcacaaatctgtgtgcagtgctttttg

SEQ ID NO: 877034 - DNA, 99 bp, Homo sapiens
ggacatggagtatgaaagacgacgtaaaattcatcctgatcagaaaaatattaatgcctatgttgtgtttaaggaggagagtgctgccacgcaagcatt

SEQ ID NO: 877035 - DNA, 99 bp, Homo sapiens
ttggagatgagacccttccggtcttcttttcaggttgatgaagctgtagctgtactacaagcccaccaagctaaagaggctgcccagaaagcagttaac

SEQ ID NO: 877036 - DNA, 99 bp, Homo sapiens
gtctttttcttcaatgggcagcatatgaaagtggattatgggttgctccttgagggcaggacagttcttatggctttatccgttgcgtaagcacagaga

SEQ ID NO: 877037 - DNA, 99 bp, Homo sapiens
actattatagaaaatttttctaccagaagggactactgttcgaagatttttggaagaatactgagaacggcataaagtgaagatcgacatttaaaaaat

SEQ ID NO: 877038 - DNA, 99 bp, Homo sapiens
tgttgacgttgcagacttggctagtgcaagccttgtttattttcctcaccactgaatctacaggttaaaaatgtgtctgcaggcacacaggacgtgcct

SEQ ID NO: 877039 - DNA, 99 bp, Homo sapiens
cagcttcgggaacaatatattttgcatcaggacagtcattttgtttactcattcagccctgttgcaggtcccaataaactcttcataaggttgacagaa

SEQ ID NO: 877040 - DNA, 98 bp, Homo sapiens
tctttggtaagctggattgtggcaggcaacatcactccttcctttgtggagggcttggccacgcccactcagctctagaggacaaaatcccagtcctt

SEQ ID NO: 877041 - DNA, 99 bp, Homo sapiens
aaatacgaagatgcagtacaattcataagacagacttgtttacactgggcatgtaaacgaaaccatggtcaggtggtctcttacctgttaaaatcagga

SEQ ID NO: 877042 - DNA, 98 bp, Homo sapiens
tggagactgccgtgattcacaaagacaagaggtaattttcctgtaatcacaggatgactcagggttcaactccaccagtaactgttttcaaaggttca

SEQ ID NO: 877043 - DNA, 99 bp, Homo sapiens
ctgggcgacagagtgagactccgtctggatgccagcgtgactacacaggtagaagtcgaactcggtggggtgggtgattttcgtgtccacagtcgtgcc

SEQ ID NO: 877044 - DNA, 99 bp, Homo sapiens
agggaataataagtcacaaagggaggagctggactccatcctcttcctttttgaatattaattttaaagacccacagtttgctgaagattacattttta

SEQ ID NO: 877045 - DNA, 99 bp, Homo sapiens
tcttccacccttggccacctccccaggtgatgcctgaagctcaagggactgtgtccaccctcaggtgtctggaaatgaagtatggaaatgaaatcatga

SEQ ID NO: 877046 - DNA, 100 bp, Homo sapiens
aggctgctctgaagcgcacgacctccagccgtgtgacttacagatggtcgggcaaacttgaaggagaaagtagtcggaggtcgtgcgcttcagagcagcc

SEQ ID NO: 877047 - DNA, 99 bp, Homo sapiens
ccagagtatgtggcacctcttgtcctttggctttgtcacgagagttgtgaggagaatggtggcttgtttgaggtgcccagggtggctccgtggcccgca

SEQ ID NO: 877048 - DNA, 99 bp, Homo sapiens
gagggaaaactcagggaagcccagattggagctggagtgagccttccaggaattttggctgccaaatgtggtgcagaagtaatactgtcagacagctca

SEQ ID NO: 877049 - DNA, 99 bp, Homo sapiens
ccggatttcattccgcggcgggggctccgcgagcggaattccggcggctgccgtgactccagtgcaatcacccacaaaagctgtatataatgccagaca

SEQ ID NO: 877050 - DNA, 98 bp, Homo sapiens
agtacactgcctcaacacacttttctccagggtgctgttggcagcagcggtctgcacaaaagcaggaaaggctattgtttctcgacagtttgtggaaa

SEQ ID NO: 877051 - DNA, 99 bp, Homo sapiens
ctcggctcctcccaggtggcctcccgcgtgctggccatgaagtctattatcctcccagtccacaacgctgaaccgtggctggacgaatgtttgaggtct

SEQ ID NO: 877052 - DNA, 99 bp, Homo sapiens
cttggacttccagactccagaactgaaatgacctcattcttgatggctgctgctaacttatggtgagatgctgggtccctgcccaataccacatggaca

SEQ ID NO: 877053 - DNA, 99 bp, Homo sapiens
gcagtcagctgcgtgattcccgtgattgcgttacaagctttgtctccttcgacttggagtctttgtccaggacggtctctacagcggaacaatgtcgtt

SEQ ID NO: 877054 - DNA, 98 bp, Homo sapiens
atttggtttcagcatgtccttctctgaatgatgaatacttttactactgtgacaacattaacgcagcctcgtcttacagcgtgactgcaaagaaaaag

SEQ ID NO: 877055 - DNA, 98 bp, Homo sapiens
ggtgagtgtgtcggggggcttggcggcttttctcctcagttttctggagtgctttggaggagaggacataagcagctctatgaccaatagcacagctg

SEQ ID NO: 877056 - DNA, 99 bp, Homo sapiens
atgcaacagccacgatgtgaagcggggcagagccgggggagcccagcccagccagcctccaggtggagattctggacgcaaagacaagggagaagctgt

SEQ ID NO: 877057 - DNA, 98 bp, Homo sapiens
actgagcagctggcgcacctggtgcgggccctctggaccctggagtacaccccgcagcacagccgcgacttcaagtacaaaactttttaccaacaaaa

SEQ ID NO: 877058 - DNA, 100 bp, Homo sapiens
cgaagtagcagcacttctgacatcttggaaccatttacactgcaacctttggctcgttcaacagtgaatggttccaagatgtcagaagtgctgctacttc

SEQ ID NO: 877059 - DNA, 99 bp, Homo sapiens
ctttagtggcagcatgaagcgcaccccgactgccgaggaacgagagcgcgaagctaagtttttgaaatcatgaatcctgtttatagtcctggatcttct

SEQ ID NO: 877060 - DNA, 99 bp, Homo sapiens
aggagtcatttctgttccgcacaggcctgctgaactgggtgctttatatagggagtgttcagcctgggtgttcctgtagatgctctcttctttattggt

SEQ ID NO: 877061 - DNA, 99 bp, Homo sapiens
tggagttggagcagtagctctgctaattgggccaaatgctcctttaatttttgaacgagaccctcaatatagtaacctggtctccctgtgggcaatatt

SEQ ID NO: 877062 - DNA, 98 bp, Homo sapiens
gtgaatctgggcttatgggatacagctggacaagaagattatgacagattacgccccctatcctatccgcaaacagttctaaatggcttctaagaagt

SEQ ID NO: 877063 - DNA, 99 bp, Homo sapiens
gagaaagcccgctgggaggccgagcgcgccgagttacagaacaagttgaaatcatcgcagaaggataaagttcgtcagtttatgatcttcacacaatct

SEQ ID NO: 877064 - DNA, 99 bp, Homo sapiens
gttgccctgagttacataaataggctcatcagattcaagagatgtttccccaggttccataccatctggtactgcaggacctccagctgacacgctcag

SEQ ID NO: 877065 - DNA, 99 bp, Homo sapiens
gtgggattcatactggaagacttgctggttgcaccagaggaagctgacacctgggcatgcagtgaagcgggataggtgaaagcaggaggaggtagagca

SEQ ID NO: 877066 - DNA, 99 bp, Homo sapiens
ggatgaagtaacacaccatgacaacgaccaacttttcaaacatccaggacaaccagttttctcccaaagtcagagttgtctctcttgtcaaagaagagt

SEQ ID NO: 877067 - DNA, 99 bp, Homo sapiens
atgtggacgtgctgaagacaaggatggaggagagaaggctgagagcgaagctggaaaaggctaaatttattgtgaagaaatcagaagatgaagaagacg

SEQ ID NO: 877068 - DNA, 99 bp, Homo sapiens
gagctgctcacggagaagtccgcctgtaagagcaactactcctacccaccgtgcaccctgacggatgaggagacccggacggagatgctgaaccgtgag

SEQ ID NO: 877069 - DNA, 98 bp, Homo sapiens
gggagaaggcagcgcgttgtacccgaggagatcatgaatcagacagataaaaatcaacaagaaatcccatcataccttaatgatgaaccaccagaagg

SEQ ID NO: 877070 - DNA, 99 bp, Homo sapiens
gcttgaggaaattgctctcacactcagagcttttgagggaagtgttcgccagttactacatgaaaagataagagatgcttatactcacccacaatttgt

SEQ ID NO: 877071 - DNA, 99 bp, Homo sapiens
tcaaggtggaattcaaaacgactagatctgggtggtggacataatgcgagttaacgtggacaaggttctggaaagagaccagaagctctctgagttaga

SEQ ID NO: 877072 - DNA, 99 bp, Homo sapiens
aactggatgctgcagacactgaacgaggagccagtgcgggaatgcatatcagtccacgtgggccaagcgggagttcagattggcaatgcctgctgggag

SEQ ID NO: 877073 - DNA, 99 bp, Homo sapiens
ctacatttagcgcatcatgtgatccgggatgcctttgtggaactgtacggccccagcatgcggcctctgtttgatttctcctggctgtctctgaagact

SEQ ID NO: 877074 - DNA, 100 bp, Homo sapiens
tggatgataaccacccaaggcccaaaagcgtcaaactcaccaaaaaaagatgttgtttttggtgagtttgacgcttttgggccttgggtggttatcatcc

SEQ ID NO: 877075 - DNA, 99 bp, Homo sapiens
gtataggctgaggctacctgtgaacagtacgcagtgaatgttcacttttcaggattagaagaggctgtgtatagaaacatacaagcttgcaaggagctt

SEQ ID NO: 877076 - DNA, 98 bp, Homo sapiens
cttggcctgtgcaaagtgtcagtcatcccacccacggctctcaacagcatcgactccgatgactactccaaaggattcggcgggaagtatggggtgca

SEQ ID NO: 877077 - DNA, 98 bp, Homo sapiens
cagcaagcatcattcagtgcctattgcaatctacaggtcaccggcatccttgcgaggcggacacgggacatgagagatggctttagaagaaaaagttt

SEQ ID NO: 877078 - DNA, 98 bp, Homo sapiens
tggtggtgtgcgacaacggcaccgggtaatctatgccagcaattatgacaatgttagcagaccatgcagctcgtcagctgcttgatttcagccaaaaa

SEQ ID NO: 877079 - DNA, 99 bp, Homo sapiens
ggatgtgcactgctacaggactctactatggaggtgccctcccggttgcagagagcttcagcttctgcttggtaactctgctgtctgatgtggcctata

SEQ ID NO: 877080 - DNA, 98 bp, Homo sapiens
tgaagcctgagtatgatgcggtggtgataggagcaggtcacgagaagagaatgccttctagatgcaaaatcacctccaaaccagaccacttttcttga

SEQ ID NO: 877081 - DNA, 99 bp, Homo sapiens
agttttccttccatctctgctgctctctcatttgctggccatcggattgggctggctgatggtgtgaactcgggccagggcctgggcatcgagatcatc

SEQ ID NO: 877082 - DNA, 99 bp, Homo sapiens
catcctgatactttgaataatctggaaaattgcttccacttccccaccagaggcagcaattttagagaggtgtagatatgttgttccaactacatcatt

SEQ ID NO: 877083 - DNA, 99 bp, Homo sapiens
ctctgagcctcagtttcctcacccaggtggttaggggcaaggggcagggctgacacaggtgcccgggagaactgctctctccggctcctctgctgcttc

SEQ ID NO: 877084 - DNA, 98 bp, Homo sapiens
ttgttgtggatgaagctcacaggttgaaaaaccaaagctccctgctgcataagaccttgtcagaggtgctgcctgtgagtaaaaacagccaaatgatt

SEQ ID NO: 877085 - DNA, 99 bp, Homo sapiens
gcctttcttatactctagaatatacaaagacaaaaggagattctgatgaagaagttattcaagatggtataagtgtgctagcggagtgtctagattgtc

SEQ ID NO: 877086 - DNA, 98 bp, Homo sapiens
caagcgcttcgccatcgacataggttccagcaacagatagaaatgctttaagttcactctggggaaagctggcctctgaaatcttaatgcagaattgg

SEQ ID NO: 877087 - DNA, 98 bp, Homo sapiens
tctcttagacctttcctcatgtgacaagaccaccttccagctacaggttcgccaggtggaggactatcctgtggacctgtactacctgatggacctct

SEQ ID NO: 877088 - DNA, 99 bp, Homo sapiens
gcgggccgccaagcctctgcaagctgctacaggccagagcggatggtcatttccagcagagagccctgcctgctgccttccacacatggaacagactct

SEQ ID NO: 877089 - DNA, 98 bp, Homo sapiens
tttctcagaaggttttgataggtgggccttagaggagacgccgccggcttacctatttctactccatgtaccaccataaacaaagtttgtgcttcagg

SEQ ID NO: 877090 - DNA, 99 bp, Homo sapiens
ccttctctgccgtccctgggagggcattcttcttgagcaccgagaaaaagaatttggagacaaagtaaacctactttctgttctggaagctgctaagat

SEQ ID NO: 877091 - DNA, 99 bp, Homo sapiens
cagcctccggagtagctgggattacagctctcgtgggcgcctgcggtgggaactactcagccatgtcttctgtggtctattcccctgacttccccgaca

SEQ ID NO: 877092 - DNA, 99 bp, Homo sapiens
ctgccgtttatttataacctaagcagcatctctatatactcctacctcccggcatttaaagtcctctgaagagccaatccattcaggatgggaaaccac

SEQ ID NO: 877093 - DNA, 99 bp, Homo sapiens
cgtcagtacaaggaaatgatggaggaggcaaatggacaaattgccccagaaaacgggacacagacccccagcccgcccaacggagtctcgctctgtcac

SEQ ID NO: 877094 - DNA, 98 bp, Homo sapiens
atcaggtgactgtcccagaagtgaatcgcagatatgaattgagaattcgttatttgccaaaaggatttctaaaccagtttactgaagataagccaact

SEQ ID NO: 877095 - DNA, 99 bp, Homo sapiens
catgagacctccaaacccctttggccctgtatcaggagcacaggtgaaaaatgttctaaaactgattgtggtcatcgtcgcacaactctgtgaatgcgc

SEQ ID NO: 877096 - DNA, 98 bp, Homo sapiens
gagccgagatcctgaagaagagagcactcctggacaaggatctgcaaattgaagtgcagctcttgccgcacgtgcagagagagaggaacttccagtgc

SEQ ID NO: 877097 - DNA, 99 bp, Homo sapiens
ctttaatgtcttgataggattatacatgtagtttggaggggaggctggagatgccagatggtatatctggtcaactggaaaatcgggtcactcccaccc

SEQ ID NO: 877098 - DNA, 99 bp, Homo sapiens
cccaatatgatcttcattggtggtatcaactgtcatcagggaaagccagtgcctatgcttccttcttcttcaacgtggggccagcagtccaatacaaca

SEQ ID NO: 877099 - DNA, 99 bp, Homo sapiens
agctcagcaagcctgtcacctttgtggatggccggtctctacctgcaggctgagaagaaagccaaggtcattgcaggaatgaatgctgtggaagaaaac

SEQ ID NO: 877100 - DNA, 98 bp, Homo sapiens
ggggtcatatgcttctgtggacagctgtgctattcctggatcactgtgtccactactatgatcttcgtaacactaaacagccaatcatggtattcaaa

SEQ ID NO: 877101 - DNA, 99 bp, Homo sapiens
tgattcagcggttgcgaagaatggaacgaagcttaagtagctacaggggaaaatattctgagaggatgccagcccccatcagattgcgggagctgatcc

SEQ ID NO: 877102 - DNA, 99 bp, Homo sapiens
tattattagcacaagagcaccatactttgaggatgtgccaggtgcagagattaaggagttatctgcaaagagggctattaatgaagtattatcgcagtt

SEQ ID NO: 877103 - DNA, 99 bp, Homo sapiens
acgggggaatcaccgacatgctcacagagcctgccttctggtacaagatgcctgtggaatgttcggtgaagtgcacttggagttcaccatgtcgaaggc

SEQ ID NO: 877104 - DNA, 99 bp, Homo sapiens
ggaagggtgatgtggctgcggcatcgccggcctcgctatggccaagatgttcataaatataaagagcatcttatggatgtgttcaaccttaatagtaac

SEQ ID NO: 877105 - DNA, 99 bp, Homo sapiens
ggcagccggccacggagcgcctgcaggtcgtttatacgcaatgcagactggaatgaagatcgatagtaaaactcctgaatgtcgcaaatttttatcaaa

SEQ ID NO: 877106 - DNA, 99 bp, Homo sapiens
tctattcagacccccatgctgtagcaggtcacgcatgaagggagcaccgtggagaagacagtggcccctacagaatgttcataggttctcaaccctcac

SEQ ID NO: 877107 - DNA, 99 bp, Homo sapiens
ctgggacaactgtaaccgttggtttgggatgtacattccgttcctgcagctgaattgcgacctccgcaagacaagcctcttcaaccacatggcctccat

SEQ ID NO: 877108 - DNA, 99 bp, Homo sapiens
gtggcacctgcgcgaagctggccaaagcctgcccagacggctcacctgtgcgggatggaacaaaagatgacaggatctatgcaactaacccagagatga

SEQ ID NO: 877109 - DNA, 99 bp, Homo sapiens
aaaagtatgttgtaccttgtgacagaatatgccaaaaatggagaaatttttgaaggacagaataacgggctcccagattcacaagccccaccaagagga

SEQ ID NO: 877110 - DNA, 99 bp, Homo sapiens
gccaggatttcctggaagcagagaaatgcttggtgtaaaaattgccaaagcagttgcctgccacaactttgtaaaagccaaaaaggaggttgaaaattc

SEQ ID NO: 877111 - DNA, 99 bp, Homo sapiens
acatcgaagccatgatttaaatatcggcgttaagacacgatgaggcgagtggtacgacagagcaagtttcggcatgtatttgggcaagcggtgaaaaat

SEQ ID NO: 877112 - DNA, 99 bp, Homo sapiens
tattctcttcttagtcagtgtatctaccgtcatcgtaaagattatgacaaatcacaacttgtagaggcaatccagcatccagcagatgagaagttgcaa

SEQ ID NO: 877113 - DNA, 98 bp, Homo sapiens
gcagggctcctgcttggtgtaccagaattcggccatgagccgctacatactcatcatggggctcctgtacaagccatcggaagactgtgtgaaaaatg

SEQ ID NO: 877114 - DNA, 75 bp, Homo sapiens
gaagaagctgcgtgaggcctttgaaaatgatatgctggctgttaacgtaagaatgattgatgttggctgatattg

SEQ ID NO: 877115 - DNA, 99 bp, Homo sapiens
atcggtctcatcttcattcccatcggcattggcatttttgtcacctccaacaacatccgcgagatcgaggatttgaagcctagcaacattgttgtgaaa

SEQ ID NO: 877116 - DNA, 98 bp, Homo sapiens
cccaggaccgccggccgggggacgagctcggagcagcagccagaaaccaatagagccatggcgactccctctgctgccttcgaggcccttatgaatgg

SEQ ID NO: 877117 - DNA, 99 bp, Homo sapiens
aggcgagggtgcagagcctggagagcatgccccggccccctgagcaggtcaaaatgcagatcttcgtgaaaacccttaccggcaagaccatcacccttg

SEQ ID NO: 877118 - DNA, 99 bp, Homo sapiens
cggtctctgctggacaatcagtattacctgggagctgactgaggtgtgggttgctgaccgaggaaataaaagaatccaagtatttgataaagacactgg

SEQ ID NO: 877119 - DNA, 99 bp, Homo sapiens
ttcctctccagctcagccgcgtaggtatgtcgagagtaccaacgtggcaattgcaaccgaggagaaaatgattgtcggtttgctcatcctgctgacagc

SEQ ID NO: 877120 - DNA, 98 bp, Homo sapiens
aaaacatccggaaatcctgccaacagtgcaaggaagcctggttcagcaggtggccctaaggttggagatatttggagtctgggagtgatccttttcat

SEQ ID NO: 877121 - DNA, 99 bp, Homo sapiens
gaagagggctccttccgcggccgcacggccgacttcgtcttcatgtttctcttcgggggcgtccttatgaccagctgttgatctatggacgaccagtgt

SEQ ID NO: 877122 - DNA, 99 bp, Homo sapiens
taccaactgctttcctttccctcagcacacagaggatgatgctgactttgatgaagttgttgacctcctgtactggagagacattaagaagactggagt

SEQ ID NO: 877123 - DNA, 99 bp, Homo sapiens
aactgtgggatgaagcttcaacttgtgcacaaaagtgttgtgcatttaatgatgtggtgttcccactgatgaagagcaggcgactgggttggagaggga

SEQ ID NO: 877124 - DNA, 98 bp, Homo sapiens
tccgttccccaattacgactacaggtaccttcagcagaagtacggcgagagctgcgcagaggccagggagaagagctacacccccacggtgtttgagc

SEQ ID NO: 877125 - DNA, 98 bp, Homo sapiens
ttgtatcagcatagactgttttcctcagaccgtgtctcagcatgattgcttcccattttgtgcctcgacctgctgtcctttgagctgttggatataaa

SEQ ID NO: 877126 - DNA, 100 bp, Homo sapiens
actgtggggacaacagtgacgaagagaactgtctcctggtgaccgagcaccctgctcggtcaccaggagacagttctcttcgtcactgttgtccccacag

SEQ ID NO: 877127 - DNA, 99 bp, Homo sapiens
tgaggcacccggacctcgtcaggccgctgcagatgaccattccagacagatttgaccagttttgggccatcaatcggaaactcatggaatatcctgcag

SEQ ID NO: 877128 - DNA, 99 bp, Homo sapiens
ttgaggactttccttacctgtttttccagctcacccactgccagcagagttgaaatggatgcagtcagaactgaatgttgaagaagtggtaaatgacag

SEQ ID NO: 877129 - DNA, 99 bp, Homo sapiens
atatgaagagacatgcgatggtagatcaacccccaggaaaaccagtagattcccagacatcgcgaagtgaatctgaaattgtgccaaaagttgctaaaa

SEQ ID NO: 877130 - DNA, 99 bp, Homo sapiens
atagacgatgatgatgatgacatcacccttacagatgttactcctccacaaacatctggttatatagaagtcactgatcttcaatcaaagaaactccga

SEQ ID NO: 877131 - DNA, 99 bp, Homo sapiens
ttatgaacgaattctcaacccctacaacttattcctgtccggagacagcctaagggtcatctccgcggtgtcgaggctctccctgcacagcatcgcgca

SEQ ID NO: 877132 - DNA, 99 bp, Homo sapiens
ccttctccaggatggcagaggcggaattgcacaaggaaaggctgcaagccatagcaatcctgaggtgcagaggcaattcccggaggactacagtgacca

SEQ ID NO: 877133 - DNA, 99 bp, Homo sapiens
ccgccttttcacaaaatgcaatgattttcgaggataataaggaaacagcaaaggactttctgccatggtctttcccaatccagtggaataggaagtgct

SEQ ID NO: 877134 - DNA, 98 bp, Homo sapiens
ctggcagtaccgttggttcgtgctggactacaatgcaggactgctctcctactacacggtcatttaggaaatcgtaaatcatgtgaagatgggactct

SEQ ID NO: 877135 - DNA, 98 bp, Homo sapiens
taggagtatgccagatggaagaaccattgttagtgaacgtggacaaagctgttgtctcagggagcacagaagtagaacaatctccatctagcagcaaa

SEQ ID NO: 877136 - DNA, 99 bp, Homo sapiens
tgaagactggattggaccccttgatctcgccattgctattgggttcatataggccttcggcagggaactcttcaaactcgtcgtcttcctctaacagac

SEQ ID NO: 877137 - DNA, 99 bp, Homo sapiens
caaaagctgagtttacttctcctccttctttgttcaagactgggcttccaccgagcaggtgagaagccatttaaatgtgatcagtgcagttatgtggcc

SEQ ID NO: 877138 - DNA, 99 bp, Homo sapiens
gagcgggaacgcgagaaagagcgcgagcgcgagaaggagcgcgagcttgaacgcagcgtgacatgctgctgctgaagaaacacacggaggacatcagca

SEQ ID NO: 877139 - DNA, 99 bp, Homo sapiens
attgctgtgcacccacatttcgtgagatccagttgcaagcagtttgtgaccggagggaagaagcttacgaggaaatatttcagtaaaagcagttaaaaa

SEQ ID NO: 877140 - DNA, 99 bp, Homo sapiens
tcttcatcggtttcaccgcgctcgttatcatgtggcagaagcactatgagattgagaatttatcacaagttgatggtcctcaagtggaagagcaacttc

SEQ ID NO: 877141 - DNA, 98 bp, Homo sapiens
gagatcataatttggggttcaagattccagtcctattttgtaacggattatgatccaaccattgaagattcttacacaaagcagtgtgtgatagatga

SEQ ID NO: 877142 - DNA, 99 bp, Homo sapiens
aagttcatgaaacctgggaaggtggtgcttgtcctggctggacgctactccggacgcaaagctgtcatcgtgaaggccccatcacaggtatatggagga

SEQ ID NO: 877143 - DNA, 99 bp, Homo sapiens
agccaccaaggagatttggagcccattttagaggcatctgttctatcttcccatcataaaaaaattgctgctaaaattgattcaattcctcacttgaat

SEQ ID NO: 877144 - DNA, 99 bp, Homo sapiens
ggattttttgactttgagacatttgatgtggatgaatatgaacattatgaggatgtacagttacccagcacgtgtacctcctcctcctcctattgctcg

SEQ ID NO: 877145 - DNA, 98 bp, Homo sapiens
ttccctcacatgcgggacatcgtgattgctctggatgccctggagttcctccatgagaatgagtatgttcatggaaatgtgacagctgaaaatatctt

SEQ ID NO: 877146 - DNA, 99 bp, Homo sapiens
ggtgacagagcgagactccatcattgtccccttccatcaggctcatatcattcagatacacaatattggtgaaggcctctcttcttctctccagctcca

SEQ ID NO: 877147 - DNA, 99 bp, Homo sapiens
ttttgtcttggaggtggcattgttgggagcgctgttttcgtgatcttcagaccccaggttctttggatcgaatcatcaatttagttgttggcagcttaa

SEQ ID NO: 877148 - DNA, 99 bp, Homo sapiens
agaaagatgcagaggaagaggaaagcgaactggttacttcctcagaatgttggcctcctgtatgttggaggttatgaaagaccctttgcacaaatcaag

SEQ ID NO: 877149 - DNA, 99 bp, Homo sapiens
cttacagagtgaaaaatcacgggcaactacactttccaatgcagtgtcttccctggcaagcactggtctatctctgaccaaagtggatgaaagggaaaa

SEQ ID NO: 877150 - DNA, 99 bp, Homo sapiens
cggcagaggcaggaagtggaaaaggagttggacgtcctgcagggtcgtgtggctgagctggagcacgatcataggtatattgaactgttcctgaattca

SEQ ID NO: 877151 - DNA, 99 bp, Homo sapiens
gcctcctgagtagctgggactacaggggatgatggaactaacaaagaagccacaagcacaggaaagttgaaccaggagaatgagcacatctataacctg

SEQ ID NO: 877152 - DNA, 98 bp, Homo sapiens
aagagttgattgaaattatctctggtgctgcagctctgctgcaggagaaagctgcagacaccatcgaggccctgcagaaggccgggatcaaagtctgg

SEQ ID NO: 877153 - DNA, 99 bp, Homo sapiens
tggacatccccctggatagcaagaccttcctgagccgccacagcatggacatgaagttcacctactgtgatgacagtatcgtcagtgaagcaggagcat

SEQ ID NO: 877154 - DNA, 99 bp, Homo sapiens
gagggaagtcgcctctgtgctcgtgagtgcatggggtataagccacagcctggcagctctgatcaggaaagtgaggaacagcaacaattccggaacatt

SEQ ID NO: 877155 - DNA, 98 bp, Homo sapiens
gaggaaaagtagaaattgatcagcaacaactaactcagcagcaacttaatggaaactaggttaatttggagtggcccctggagtcagtttcctacacc

SEQ ID NO: 877156 - DNA, 99 bp, Homo sapiens
caaagcccctaacaacagactcgctgggaccccctagacttggcatggaggctgggctgttttggagtcagcggaagatcaccaaggccagggagtggt

SEQ ID NO: 877157 - DNA, 99 bp, Homo sapiens
aaacatcgccccttctgcttcagtgtgaaaggccacgtgaagatgctgcggctggaatcagagatcattgatttcttcctgggggcctctctcaaggat

SEQ ID NO: 877158 - DNA, 98 bp, Homo sapiens
taaaggccaaatacccaagcctaggacaaaagcctggaggctccgacttcctcatgaagagactccagaaagggctgcatatccccaccgtttgaatc

SEQ ID NO: 877159 - DNA, 99 bp, Homo sapiens
ctggtgatgatatcttgcgactcgtctttctccaggaaaacagggaccgctctccgcctacaggccctccacgcccttcaggaggagcaggccagactc

SEQ ID NO: 877160 - DNA, 99 bp, Homo sapiens
ctggagaggatggctactatttcaccaatctgttcaaatctgaacatcaatgatgtactagggaactactcattgactcttgttgatgcattggataca

SEQ ID NO: 877161 - DNA, 99 bp, Homo sapiens
atcataagtggaattttggagatattcaaagtgtgtcccggcatggatatccggaacaacctcactaggttgcatgagctggagaattgctctgtcatc

SEQ ID NO: 877162 - DNA, 99 bp, Homo sapiens
aaagacagtggtttcagagttctatgatgaaatgacggaagtgaaaatgtgacaggattggacctttcagatttcccagcattagcagaccgaaacagg

SEQ ID NO: 877163 - DNA, 99 bp, Homo sapiens
tgatagtgtgggatctggcaagaggagtcaaaatacgatcttatttcaatatggaccgccgggagagcctgcccacctccccaccctggacgccgggcg

SEQ ID NO: 877164 - DNA, 99 bp, Homo sapiens
tggaacaggagttccgatcgacccggtaccaagaaggggagtgcccgcggcagctccatcaagtatgatggtgaaggatgaatatgtgcatgactttga

SEQ ID NO: 877165 - DNA, 99 bp, Homo sapiens
cctggtacgggttcttctccagggacgctcggcggatgacagcaaagtgggccccgaagtaggggtgttgggctcttcattggtgtggatctgatcaaa

SEQ ID NO: 877166 - DNA, 99 bp, Homo sapiens
gaataaccacagcatgacagccataaggataagccctgaaacactggagcaagatggtactgtgatgttaccagatcgagacatgtaagcagcatcatg

SEQ ID NO: 877167 - DNA, 99 bp, Homo sapiens
cctgagtagctgggactataggccattttgcaacctgtgttggcagcagaagattttactatctttaaagcaatgatggtccagaaaaacattgaaatg

SEQ ID NO: 877168 - DNA, 99 bp, Homo sapiens
gctgaagccatcagggccccggggcagccggagcacaggcacgggaatgttcactggagtttgcattgtcttggctgtaatcccagctactcaggaggc

SEQ ID NO: 877169 - DNA, 98 bp, Homo sapiens
taggagaagatttgcagtggtggcctgataaggtggtgaggtttctgaagaattatccctgaaactgccaccaaatgtggtagaagaatctgcccgag

SEQ ID NO: 877170 - DNA, 99 bp, Homo sapiens
gtttctaaacttgactcttgtggtgagaggttcaccatcattaatagcaaacaaatgggaagttattcttgtttctttcgagaggaaaaggaacaaagg

SEQ ID NO: 877171 - DNA, 99 bp, Homo sapiens
tgggcgtaggaccctccgagccagcttcttgacagttactttgaagcctaccagcacacgttggaccctgaggagaggtttaccttagcacaagtgatg

SEQ ID NO: 877172 - DNA, 98 bp, Homo sapiens
tcctcccgctgccgctgccgctccaggagacagggtccaccaaaatatactaaatctgttctgaaaaagggagataaaaccaactttcccaaaaaggg

SEQ ID NO: 877173 - DNA, 99 bp, Homo sapiens
atgaggagtataggagcaagggcgtctttgtgcaggaccagcagagagaagagattccatcttccagaggttgccactgtctgcctccccacttgtccc

SEQ ID NO: 877174 - DNA, 99 bp, Homo sapiens
accacaaatgtttttctgttttgcctgaatacatgatttaaacaagagatttccacagaaggcgctgtaccatggaaagttcatcgacacgggcttcac

SEQ ID NO: 877175 - DNA, 98 bp, Homo sapiens
cagcgaagaccaccagcacttcacctgcaccatctggaggcccctgtcccagctggccctgccccaggtactggggctgatcctgaacctgccctcgc

SEQ ID NO: 877176 - DNA, 99 bp, Homo sapiens
tgaatgtctttagcttccgaatgatggcttgttggatgctgaggatctgctgagcgaccacagacagcacttctacctgcgcccactgtctggcactcc

SEQ ID NO: 877177 - DNA, 99 bp, Homo sapiens
catgagagagacagagaagactttaacagaactcaacaaatgctgtggcctttgtgtctgcccatgtaataggaggatttgacagctaaggatattgaa

SEQ ID NO: 877178 - DNA, 98 bp, Homo sapiens
ccagatgaagaagatgagatttcgggtcagtgctgcttgcccatttaataaagctggacagcatccaagtcagcatctcatcggtcttcggaaagctg

SEQ ID NO: 877179 - DNA, 99 bp, Homo sapiens
actcgctcttctccacctctcttcctctggtagatggcaatccagtcagttgtggcaaaccacttgtggttcttgatatcgttgaccccattcttgagg

SEQ ID NO: 877180 - DNA, 99 bp, Homo sapiens
ttgcaggtgacggctctggacaaggacaaagggaaaaatgctgaagtgctgtactcgatcgagtcaggctctccagcagaactatctcctactactctt

SEQ ID NO: 877181 - DNA, 99 bp, Homo sapiens
gctgtagaccggagctgttcctgttcggccatcttggctcctccctgccagatagctcttattttgaggttatcaatactctggctgaccatcatcatc

SEQ ID NO: 877182 - DNA, 113 bp, Homo sapiens
cataaagtgacacagtacaagaagggcaaatccacaggtttgttcagcatatatgtccccccatagatggcactcaatcctgggcgtacagagaatccttgcccttcttgtac

SEQ ID NO: 877183 - DNA, 98 bp, Homo sapiens
agaggaaacactctaggacggggaacgacaattacgtgtcctgtttgccggtactgtcaaacgcccgagccagtagaagaaaataagtgttttgagtg

SEQ ID NO: 877184 - DNA, 132 bp, Homo sapiens
cataagcgaccactttcctctgcaactggaggtctgcctgggctgactttgtatcagcccaggcagacctccagttgcagaggaaagtggtcgcttatggtcagaggagcagcctgctcaccctctccaggt

SEQ ID NO: 877185 - DNA, 99 bp, Homo sapiens
gcgctcaggatggaggaagactcgatccgcctgcctgcgcacctgccttctacagatgacagtgcagctgagaagaaagggggaaccctccacgctggc

SEQ ID NO: 877186 - DNA, 99 bp, Homo sapiens
tctgaatggtgatctgtctgagatgtacgctaagactgaacaggatattcagagaagttcttgttcaaagcttctttcagacaccagtgttattcagtt

SEQ ID NO: 877187 - DNA, 99 bp, Homo sapiens
agcagccttagccctagtgtagagcaataccaagtttccaggcccgaagagcatcccagactattgggactcctctgccctgccagacccaggctttca

SEQ ID NO: 877188 - DNA, 75 bp, Homo sapiens
cgacaccggataaaccaaagacagcatctgagcacagaaaggtctcctctgagcctccggcctccataagaccca

SEQ ID NO: 877189 - DNA, 99 bp, Homo sapiens
agaagtgagttgctgtttgctccataggcttacattaggccccttcacagatgtagtcactacaaatcttaaattgcgaaatccatcggatagaaaagt

SEQ ID NO: 877190 - DNA, 99 bp, Homo sapiens
ggatggtcttgaaacacaaatggtttttggttctgaaaagtgccttttctgaaaactctgctgcttggattctactctagagctgtctctttataaacc

SEQ ID NO: 877191 - DNA, 98 bp, Homo sapiens
ctgggtctacgataacgcgcttttgctcctcctgaagtgtctttggtccaacgttgttccagggtcacgatcgtggagtaaactgggctgccttccac

SEQ ID NO: 877192 - DNA, 99 bp, Homo sapiens
ctcagcactgatgttctcatgggagcagtgccgtgtctgcatggtcctcagccagcagagccacgttccttatgagcaccgtgggtttatttcattttc

SEQ ID NO: 877193 - DNA, 98 bp, Homo sapiens
ttccttggagtttggcatgatgatcatttttgcttatctgccttatgggcttgcagaaggaatctcactctcaggtggttggttctagctattgccat

SEQ ID NO: 877194 - DNA, 100 bp, Homo sapiens
ttctctgccagcttcacacttggccccggcaaaaccaacaatgctgtgtcctggagctggatggggagtttgccggggccaagtgtgaagctggcagaga

SEQ ID NO: 877195 - DNA, 99 bp, Homo sapiens
ggagccaggtccctgtctgagccatggaatcaactatgaaattataatcatagatgatggaagcccagatggaacaagggatgttgctgaacagttgga

SEQ ID NO: 877196 - DNA, 99 bp, Homo sapiens
ccactcctccaagaaccaacccccaaattggctgggacagaccctgactaaagcttgaaatgctacatttccaaggtgaagatgtgtgggcacatgtta

SEQ ID NO: 877197 - DNA, 99 bp, Homo sapiens
tggaaatccaatcttccgtaacccctgcacagagcagattctgaaacttcttgacaatttgcttgcgcttataaggaaagaccacagcaagattctttc

SEQ ID NO: 877198 - DNA, 99 bp, Homo sapiens
ctaggggtttgcttccgaagactcattttaacaatcaggataccactgggcttctgacagacgttggctcccatcttgccttatctccactgttgacgg

SEQ ID NO: 877199 - DNA, 98 bp, Homo sapiens
cttggtgtcgtttttccttgagctgaacgtcttgcaacagtggccgcacgcataggatacattaattgtttggtcagaagcagagaactatgatttgg

SEQ ID NO: 877200 - DNA, 99 bp, Homo sapiens
gatgagttagaaaccatcacaatgcataaaatcctggagaccaccaccttcttccaaagagcggtgtacttgaaccaaccatcatcacagttgatccac

SEQ ID NO: 877201 - DNA, 99 bp, Homo sapiens
gcccgggcctgcggccgcttcttccagaagggccaagggacttgcttttatttcgaacccagcaagcgtagtcgaggagccctggggtccatcgccctc

SEQ ID NO: 877202 - DNA, 99 bp, Homo sapiens
gccagttctgctgcatatttaggttgactaattccaacaagcttcagatccctgcacaagcttgcagacaggccaacattgtcgccaaagtttctggag

SEQ ID NO: 877203 - DNA, 98 bp, Homo sapiens
agaaaagctgccttcgtatggaatgcaaaagggtgaaaatcctatttataagagtgccgtaacaactgtggtcaatccgaagtatgagggaaaatgag

SEQ ID NO: 877204 - DNA, 75 bp, Homo sapiens
aggatctgcaccagtacatcacggaggtccaggcatcaggtttctgagtcccttcaacatgatcctgggaggaat

SEQ ID NO: 877205 - DNA, 99 bp, Homo sapiens
gtatatggggcccaagctactggtgccagaacacagagacagcagcccagtgcaatatgctaaagaaaacccttatggcgaggatgacaataagagtcc

SEQ ID NO: 877206 - DNA, 98 bp, Homo sapiens
tgttggatcgtttcatactttacgcttgtgtgataaaactggggatgtgagctgcaatgaaattcaaactataccttcccaaattggtaacctggagg

SEQ ID NO: 877207 - DNA, 98 bp, Homo sapiens
aaaaatgactttactgaagaggaggaagcccaggtatgaaaatgaaagtcttcagaatggaaggaagtcaactgaatttccaagaaaaatacgtgaac

SEQ ID NO: 877208 - DNA, 98 bp, Homo sapiens
tggcttccgtttgttggtggaggaggtggcaggcctcggcgacccaacatgagtgaagtttcctgcaagaaacgggacgactatttggaatggccaga

SEQ ID NO: 877209 - DNA, 99 bp, Homo sapiens
gaaaattggtactaatttgtctctgattcagtgtccaagagttcagtttcaggtatgaaaatgaaagtcttcagaatggaaggaagtcaactgaatttc

SEQ ID NO: 877210 - DNA, 99 bp, Homo sapiens
ctgagggagcttcacttggacaacaacaagcttaccagagtacctggtgggctggcagagcataagtacatccaggctcatttgcaggggggagccaaa

SEQ ID NO: 877211 - DNA, 99 bp, Homo sapiens
tcagtaccagagacagaagcagatggattcgtccttttagtgaatggacctgagtggaccctttgatcacatcagtaaacatgagcggtaccaaacctg

SEQ ID NO: 877212 - DNA, 98 bp, Homo sapiens
gaccacttacttggataaagttccagagcctggagtgcccactgaaaccataaagataagcaacgatgtgctgagctgaagaaagccttgtgtactgc

SEQ ID NO: 877213 - DNA, 98 bp, Homo sapiens
aagtactaccggccaactgaagtgattacttctctaacaggatcaccagtttgctccacaaagcacaatgtctcgatcacgacaacccccccttgtga

SEQ ID NO: 877214 - DNA, 98 bp, Homo sapiens
ggagaccttgcctattttgatggacttagtgagactattcttgctgtggggcttgtgaagccaaaagcaggcttacctatttctactccatgtaccac

SEQ ID NO: 877215 - DNA, 98 bp, Homo sapiens
ttgtccgccgggtgatgaaaccacttctctacatcccatctcaatcagaattactagattttctctcaaactacgagaagggcagctggttcccccaa

SEQ ID NO: 877216 - DNA, 99 bp, Homo sapiens
actatcttcttcaaatacaaagttttgacctgtagcagagaaccaattctggagaacagcctcacttctttgattgaatacttacataatgcattggaa

SEQ ID NO: 877217 - DNA, 98 bp, Homo sapiens
gaaaagcctccagactactagtacgaggacgtagacacttcgtgtatgatcatgtgttcgctgagaagatcacttccttgcaaggtcagccaagccct

SEQ ID NO: 877218 - DNA, 99 bp, Homo sapiens
ccactctagagtccacctgacaccggttgaaggggttccagattctgattacatcaatgcttcattcatcaacgatgctgatatgctaactggtgatga

SEQ ID NO: 877219 - DNA, 99 bp, Homo sapiens
aaattctccagaatttcaagcacaaccccaaaattaacaccatcttcatatccaaggtggtgccaccaccacaacagaatgatcttgagattcctgaaa

SEQ ID NO: 877220 - DNA, 98 bp, Homo sapiens
tcgggctcggaacgagactgcacggcccagcagcaaagaaacctggataacatcgtcttgcaacaacccagaataggtagcaagaggaaatctaagaa

SEQ ID NO: 877221 - DNA, 99 bp, Homo sapiens
gccaaattgggcgagggcacaaaataaccacttaccccttctcaccgaggaagagcgggagaaagggaaatacaactggagcacgcaaagcaagccttt

SEQ ID NO: 877222 - DNA, 99 bp, Homo sapiens
ctttgctattgtgaatagtgctgagaactgggaatcagcgccttccaccagtgcccgcccttgaccaggtcaacttcacacaaaggcacagaaactttc

SEQ ID NO: 877223 - DNA, 99 bp, Homo sapiens
tttaacatttatcgccttgttagtctccacatccacctccgtgaaagattaactgctgaagtactgatcgagttctgcatttcttcaatgaggaactac

SEQ ID NO: 877224 - DNA, 99 bp, Homo sapiens
tattcagtggcatgctgaaaatacgaatcggatgcctttgagtaatggacagatgggccagcctctcaggcctcaggcaaattatagtcaaatacatca

SEQ ID NO: 877225 - DNA, 99 bp, Homo sapiens
tttgtgttaaccaaagccagcctggcatactttgaagatcgtcatggggttgcagagaacacatcttagaagatgaaaaacctgaatctatcagtgaca

SEQ ID NO: 877226 - DNA, 99 bp, Homo sapiens
gggaaatggccgctgtgtggttgcaacggagataaattcccggaaccgcgattcggcgtgtcaggccgaggagtcttgtaaatgtaatggctggaaaaa

SEQ ID NO: 877227 - DNA, 99 bp, Homo sapiens
tcctgctgtcacgtcacctggcccctcaccatcaccatcctcatctctcttgggaacttaaaaggagtctagaaaatccagcagaaaggaaaatggaag

SEQ ID NO: 877228 - DNA, 99 bp, Homo sapiens
tccaagaaaaaaaccacaaatgtttttctgttttgcctgaatacatgatttaaacaagagatttccacagaaggttaaggtgagctcatcgattcagca

SEQ ID NO: 877229 - DNA, 99 bp, Homo sapiens
tgaattgatttggttggaatgctcttttaccgatgctttaacatacagccactaggcacaccctctggaagcgggtccaaggtgctgtcacccctctgc

SEQ ID NO: 877230 - DNA, 98 bp, Homo sapiens
ctcatctcagatctggagcatcggctgcaggggtcagtgatggagctgcttcagccattgccgaaatctaaaaaaacttgtagcaaaggcagtaaaaa

SEQ ID NO: 877231 - DNA, 99 bp, Homo sapiens
tatcccagttggagagggaagaaaagctttggatgaaggagcttcaaacccaaagagcaatggctgccatccggaagaaactggtgattgttggtgatg

SEQ ID NO: 877232 - DNA, 99 bp, Homo sapiens
ccgggtctcccaagagctcaagggtaatactgaacaacctgtccaaactagcaagattggacttggaagaagagagtatcagagtttacaacatcgcca

SEQ ID NO: 877233 - DNA, 98 bp, Homo sapiens
gtcgcgcctcaaccggctgtacggaatccaaggagctctttgttcaatgcctagccacctattcctacagacacggcagtggaaaggaaaagaaagta

SEQ ID NO: 877234 - DNA, 99 bp, Homo sapiens
ggagtacttttctacaatgcctgcttcatgattatcccaactcttattattagtgtctccactggagacctgcaacagatggagtctccctctgttgcc

SEQ ID NO: 877235 - DNA, 99 bp, Homo sapiens
tgtggcctatgcagtcaactcctggaccactagtctcttggagcagtcggagtggcagccaacaaacgtggatgggaaggggtacctactcaatgaacc

SEQ ID NO: 877236 - DNA, 99 bp, Homo sapiens
gagaattcatctgtgatctctccttagctgctccagcttgtattttcagctgcctgctgaagatgaagtcttactacagaaattaagagaggaatcaag

SEQ ID NO: 877237 - DNA, 99 bp, Homo sapiens
gttgcccaaaactacagttctgtcactcacttacacagtattgggaaatctgtgaaagggatgtgtttggccaaatgggagagtggttacaacacacga

SEQ ID NO: 877238 - DNA, 99 bp, Homo sapiens
tttctttgagcagtttgtggaagcgatcatgccctataaggactgccaggcaataatgaaggttcttttactgaaggatgcgaaggaagatgactgtgg

SEQ ID NO: 877239 - DNA, 98 bp, Homo sapiens
tatgacgtgctgctgctgagaccaaggaatgagagcaaaaggtttatgaaggggctcacagagcggttgaaattgaagctctaacaccacactccagc

SEQ ID NO: 877240 - DNA, 98 bp, Homo sapiens
atggcttcagacagcatatttgagtcatttccttcgtacccacagtgcttcatgagagggtgcaaatagctatgggcaacttggcctcggccataagg

SEQ ID NO: 877241 - DNA, 98 bp, Homo sapiens
gaaacgggactaaactggcgggctccgtggaagcgtggccggcagcgtcccggacgaggaggggctggcaaggtttaattgcttatggatgtcattca

SEQ ID NO: 877242 - DNA, 99 bp, Homo sapiens
gcttcctgttgctttggagcccttcttatggagacattccctggcactctcttccatggcagcacctaaatggagtctctctctgtcgcccaggctgga

SEQ ID NO: 877243 - DNA, 99 bp, Homo sapiens
ctcagaggcactgtctggacggtacctgtgttagaatggtctctcccctgaggcgtattatcgctggcaaaacgcgatggggagttcccggctgggcac

SEQ ID NO: 877244 - DNA, 99 bp, Homo sapiens
ctgtttttgcttagcttatcaagcaaccggttgtctcaccccagctctggaagcacagaagagatccccttgaagattttagctcataataactttgtt

SEQ ID NO: 877245 - DNA, 98 bp, Homo sapiens
agtgagatacccagctgtgcggagctaggacgcggaacatcccagaggccagcatcaacataaagttcaggagccctggaaaggagaaggaataagac

SEQ ID NO: 877246 - DNA, 99 bp, Homo sapiens
cggctgaggaggggccccagcagcccccgaaggccctatcaggacatggagtatgaaagacgctgccactgcagagccccgccatggaagacacgccgt

SEQ ID NO: 877247 - DNA, 99 bp, Homo sapiens
gaaaaacttcaaactggtcaaatgcactgtccagacggagatccggatagttcatttaaagcccccatccctgcaaggtggtgctttctaccaatatga

SEQ ID NO: 877248 - DNA, 99 bp, Homo sapiens
agccgtccggaggacctgggacaccgcggaagtcgggaaatgggtatttgaagtataccatacaactgttttgaaaatccagcgtggacaatggctact

SEQ ID NO: 877249 - DNA, 133 bp, Homo sapiens
cgtggatgttcaagtcaaacacatttttgctggaacatatgccaatggctttcctcattactgctgccatttcagttatctggtcaacatgtgcttgcagttcctgatgagttgtcacaaagttggcatatgt

SEQ ID NO: 877250 - DNA, 98 bp, Homo sapiens
ggaggatgacggagctgcagtcggcactgctactgcgaagacagctggcagatgttagtaggcaggaagaggcggagggagagctcagtgaaggagaa

SEQ ID NO: 877251 - DNA, 99 bp, Homo sapiens
tgtgaggaaaaatatcgagatatcctaaaatttcctgaagaactggaacacgtagaaagtgcaagcaaaggtgagatcggactggaactgttcggctgc

SEQ ID NO: 877252 - DNA, 99 bp, Homo sapiens
tgtcattcttctctacagaagagcttctcctcatcaactggggatgattacagttcttcctaaaaaagttcttccctgtggaacagtagagacctagtc

SEQ ID NO: 877253 - DNA, 98 bp, Homo sapiens
ggacctctgcctaggaaagccaggatcttctggtaggaggagctggttttctttcatgtcatacgtttctcatgccccacccaggaagctggagcctc

SEQ ID NO: 877254 - DNA, 99 bp, Homo sapiens
cgggtcagggagcatccagagatggggccctatgtacaaggtggaatgaatcttacttgttgaatatcttctggttactagttggattcatttgtgaaa

SEQ ID NO: 877255 - DNA, 99 bp, Homo sapiens
gccttcatatctgtttttttcttatgaagcttcttctggttggaaacttgtcaaatttcatcagatcttatgccttcattcatccggcatggtccaaca

SEQ ID NO: 877256 - DNA, 98 bp, Homo sapiens
gctcgccagtcttggggacagtgtcagcgcacaagtgatccttatgtgaaatttaagctgaatgggaagacgctgtacaaaagtaaagtcatatataa

SEQ ID NO: 877257 - DNA, 99 bp, Homo sapiens
gatgaggcacagcggcggcgtaagggcaaagaggatgagggggaggaggccgcttcccccatgctgcaggctccttctcctgaaaaagccgaggaggag

SEQ ID NO: 877258 - DNA, 99 bp, Homo sapiens
attagttggtgtttgcaatatcgttcagcaagaatggggtggtgcaattccttgccagttgattgcttatgcgtcaactgcagatggatattcagcaga

SEQ ID NO: 877259 - DNA, 99 bp, Homo sapiens
gcctatggaaaggattttcatttgattcaggctaataaagcttgaagtagaaaatgccatgatgagaaaaactattaaaaaacaggatgaccaaattga

SEQ ID NO: 877260 - DNA, 99 bp, Homo sapiens
atgagggttcctacacttgctcagttcagacacagcatgagcccaagacctcccaagtttacttgatcgtacaaggatgccctggcccagccccagccc

SEQ ID NO: 877261 - DNA, 98 bp, Homo sapiens
ttctcccgactatttggcaagaagcagatgcgcattttgatggggccgttgctccagggagaactgcaaatatcttcatccacccccacatttaaaaa

SEQ ID NO: 877262 - DNA, 99 bp, Homo sapiens
gtctgggcagccacggccgggggcgtctttcagagcattacgtgtaaacaggaacatcgataagtagtgtaaaaacttgcacaatgaaatccgaagcca

SEQ ID NO: 877263 - DNA, 99 bp, Homo sapiens
agggcagatctccaaggggcggaggcagagccgcggattgttctctggggccggactgagaaatgcctgaaggagacgacggaggagatccggcagatg

SEQ ID NO: 877264 - DNA, 99 bp, Homo sapiens
ggggctcgggggcgcgtccacgtggccagagggcggccacccggagccagcggagggacaggaatctggaaaaccaggggctcatgtaactgtgaagaa

SEQ ID NO: 877265 - DNA, 99 bp, Homo sapiens
ctgctttttcaatgagaagaatgaacagacctagtgggcgttgcctttagacccaggggagtttatcaaagctttgtatgagtccgatgagaactgtga

SEQ ID NO: 877266 - DNA, 99 bp, Homo sapiens
ctcctgagtagctgggactacaggacgaaaatgatgatgacgatgactggaacccctgcaaagcagcaggggtgtgcctcatgcttctggccacctgct

SEQ ID NO: 877267 - DNA, 98 bp, Homo sapiens
aggacacgctgcagttggccttcatcgacttgagacaagtttccctaggacttctgcatgcccatgccacacatatcctgtggcccccagagcgctgg

SEQ ID NO: 877268 - DNA, 99 bp, Homo sapiens
aagcccccaaaagcagctattcagacatcgctattgcggttccgaggcagtgggaagagatgcggcccctggacatcgtcgagctggcggaaccggagg

SEQ ID NO: 877269 - DNA, 99 bp, Homo sapiens
atggacatggcatcacacaaaatgtgctggttgatggtgttaagaaactctcagtttgtgtttctgagaaagtacttcctcgcgtattgctaaaggagg

SEQ ID NO: 877270 - DNA, 99 bp, Homo sapiens
tttgagaaaggtgaaccaactcaaactaagtgatgtccttgcattgcccatttttaagcaagaagagtcgagtttgcctcctgataatgagaataaaat

SEQ ID NO: 877271 - DNA, 99 bp, Homo sapiens
caaggcaagcctattgagttaacacctctgccgctgctaaaagttcctccaggagtgatccaaaatggagcgcgggtcctgagccgagggctgtttcct

SEQ ID NO: 877272 - DNA, 99 bp, Homo sapiens
gggctcggggactggctagatctgccatggtggcgtgttacccaggcaacgggctcgggtacgtaaggcacgttgacaatccccacggcgatgggcgct

SEQ ID NO: 877273 - DNA, 99 bp, Homo sapiens
cagagggttggaattgcagatgtgaggtgtcttcagtgccctgggtttgcctgtgacccaatgcccactgggactgaatgccaaaggactccctttagg

SEQ ID NO: 877274 - DNA, 98 bp, Homo sapiens
ccgagttcaccaaaattcagacatttaagactttgaccccgacgcaggcttcagtgattgccgcggatcagaagcctgagcactttggctcgagacaa

SEQ ID NO: 877275 - DNA, 99 bp, Homo sapiens
ttagttctgtaacgccatctcccaccccagagaacgaggacagtcattttgtttactcattcagccctgttgcaggtcccaataaactcttcataaggt

SEQ ID NO: 877276 - DNA, 99 bp, Homo sapiens
gaaagacgaatttaggagacataagaccgttggttctgacgaggcacagcgtttcttgcaagaatgggagtgccgtggaggtcccagcccccgctgcgg

SEQ ID NO: 877277 - DNA, 99 bp, Homo sapiens
tggacttcttgcaacaggttaacgtgtatggcgtgtgcgtgccagacttcccaagtaagaagcggaagaggagccgctggaaccaagacacaatggaac

SEQ ID NO: 877278 - DNA, 99 bp, Homo sapiens
aaagtgcctgccattcttatcatttctaagcaggttcatgccagcccagaacagagaatcagacttaattcagtgcacaaatgagatgaatgtgaacat

SEQ ID NO: 877279 - DNA, 99 bp, Homo sapiens
cacggcaaagaccaccccacggccgccaccaagatgagcagggcccttgcggagttccgcgtccgaggtgtgaaggggactgtcaaacaactcctcctt

SEQ ID NO: 877280 - DNA, 99 bp, Homo sapiens
acacaaatctggaacgggtggccgattactgcgagaacaactacatacagggcaccagaactagcacctctgaaaagtaaaatgatctatgcaagctcc

SEQ ID NO: 877281 - DNA, 99 bp, Homo sapiens
tcgaacagatgtgagcgagaaagccgttgcctccagcaccacttctaatgtcaggtcaattcagtgaagatatgatacccacagtgggcttcaacatga

SEQ ID NO: 877282 - DNA, 99 bp, Homo sapiens
tgtatttaaccaagttccaacaaaagaatgctgccgcagagacggggttttgctatgttgccccggctggtcttgaactcctgagctcaagagatccac

SEQ ID NO: 877283 - DNA, 99 bp, Homo sapiens
aggaaatcatgactgagaaagatatggaattatttcgtgatatccaagaacaagcactgcaggtttgaacttgttctggaagctgtgcgtcaccgtaat

SEQ ID NO: 877284 - DNA, 99 bp, Homo sapiens
gatcagtacaaaaattcttcaagaaatctaagaatgtacctgaaacatgggagcccagttaaaatgatggagagttatattgcagttctcacaaagggg

SEQ ID NO: 877285 - DNA, 99 bp, Homo sapiens
caagaagaccattcagatgggatctttccggatcaatccagatggcagccagtcagtggtggaggttatcaatactctggctgaccatcatcatcgtgg

SEQ ID NO: 877286 - DNA, 127 bp, Homo sapiens
gcttgagcccaggaatgagaggctgcagttaagccatgactgcactactgcactcctgcctggtgcatgctgggaccgcgacggacaggctgccgcaccccaggcccccagaggccagtctgtttgc

SEQ ID NO: 877287 - DNA, 139 bp, Homo sapiens
gacgcagtcagctgcgtgattcccgtgattgcgttacaagctttgtctccttcgacttggagtctttgtccaggacgggacgatgatgacattaatgatgttgcatcgatggctggagtaaacttgtcagaagaaagtg

SEQ ID NO: 877288 - DNA, 98 bp, Homo sapiens
tggaaacagcagatgtaccctcagtacgccacctactattacccccagtatctgcaagccaagccactgccaaaaaatatggtgtctcgtctttgtga

SEQ ID NO: 877289 - DNA, 100 bp, Homo sapiens
tcaaaagcaagatatactaccacatttgtcccaccaatgcagcagactggtcccctaaacacttattccatttcaaagttagtagtatatcttgcttttg

SEQ ID NO: 877290 - DNA, 99 bp, Homo sapiens
cgctgacaagttctgcatttctgctgtttcagttgtactactacaagcactatttatcaacaaagatctggacgttggtggttggctatgtgttgactg

SEQ ID NO: 877291 - DNA, 99 bp, Homo sapiens
cgggtgccctggctaccatggaccatcctgctggtcagcactgcggctggtgatgcacatgttcaagggttgtcggcgggaggacatggcaccccacat

SEQ ID NO: 877292 - DNA, 98 bp, Homo sapiens
aaaaaaaagacctgctttgccctgggaaatagtaaccctgccaaatacatcagcttgtaggagacagagctcttcaacctttcagagaaaaggcatga

SEQ ID NO: 877293 - DNA, 99 bp, Homo sapiens
cacctgagcagaggctggggttgaaacaagcagaagaacgcttagaaagagatcacatctttcgacttgaaaaaggtcaccgggagcaagaagtccacc

SEQ ID NO: 877294 - DNA, 99 bp, Homo sapiens
atgatggccgcaggaaaccgggtataggaggaagagctcaagactgcagtgcagatgacgacaacttccttgtgcccatagcggtgggagctgccttgg

SEQ ID NO: 877295 - DNA, 98 bp, Homo sapiens
gggaccccagggcagcgaagcagcattagcagcaatccttggagcagtgccattcctggggacatactgggcagcagtacctgcagttcttgacctgt

SEQ ID NO: 877296 - DNA, 99 bp, Homo sapiens
gccaaacggtgtcagtgagcgtgctcaggccgccttttgttccatcccgcacaggtgagccgtctgggcaggctttggccagcttcgcgcaggtgccac

SEQ ID NO: 877297 - DNA, 108 bp, Homo sapiens
cgctcgcgtcgcatttggccgcctccctaccggtcagccctgacaaaggtcagctagccccttgaggacatcagctttggcctcagggtcctaatggcagcagaacca

SEQ ID NO: 877298 - DNA, 98 bp, Homo sapiens
gcgagggcgcctacggcatggtgtggaaaatgtttataggaggccttagctgggacactacaaagaaagatctgaaggactacttttccaaatttggt

SEQ ID NO: 877299 - DNA, 99 bp, Homo sapiens
gcctattcttacatttgcctgggctgccttgccgccatcttttagctgatgatccagatatactgatgtccctttacatatgtccaatctggctaatgc

SEQ ID NO: 877300 - DNA, 99 bp, Homo sapiens
ttcgctttcatccacaagatccggcccatagccgagcagactggcatctgtaaggtgcggccgccgccggtggattctgaagagccagtctttgaggct

SEQ ID NO: 877301 - DNA, 98 bp, Homo sapiens
ggacatggacatgagccccctgaggccccagaactatcttttcgatcaggatcctcatgaccagccaaagagaagaagaattaggaagcataaatcaa

SEQ ID NO: 877302 - DNA, 98 bp, Homo sapiens
ttaagcattcagcagaacttgtatacatgctagaaagcaaacatctctctgtagtcctacaaggcagtgctcggaatgtgaccaggcagggagcagtg

SEQ ID NO: 877303 - DNA, 99 bp, Homo sapiens
tgaacccaggggccgaagcccacccagggagttgatggacactttcttcatgagcaacaaaccccaaagatacaaagacaagctaccagatagtggtga

SEQ ID NO: 877304 - DNA, 98 bp, Homo sapiens
aaggacatgtggttaaatgctattggggtaaagaatctcctgatatgactaaaaacttccaacagggcttcccacctcgactgccaccacagtaccca

SEQ ID NO: 877305 - DNA, 99 bp, Homo sapiens
ggagaaggcggcggctctctggtccgcagcggcaacagtaacgaaaaacagggctaatgtatgacaacatgtccacaatggtgtacataaaggaagaca

SEQ ID NO: 877306 - DNA, 99 bp, Homo sapiens
aataccaggcatacatttggcagaataaatgaaccaggtgaaatgacaatggatgctctgttggctcgattgaaacttctgaatccagatgaccttaga

SEQ ID NO: 877307 - DNA, 99 bp, Homo sapiens
gtcagaggagagctgcgatagttttgactcactagagtcagggaaacaggagtctaccatggctcaagaatctcccaaaaattcagcagcagaaattcc

SEQ ID NO: 877308 - DNA, 99 bp, Homo sapiens
ggaagaacagcctgaagaagggctccctcgtgaagaacctgaaggacacactaggctccactttgaggctctgatgaacattccagtgctggtgttgga

SEQ ID NO: 877309 - DNA, 99 bp, Homo sapiens
ggagaggagcatgaatggagcaaaatggcggatcatgtgcagggtgaggcgctcaggcaagttctggtcaaccgttactatggaaacgtcagaccttcg

SEQ ID NO: 877310 - DNA, 99 bp, Homo sapiens
gtgcaaccccttcatcatcctctgagttggaagcagaatattcgctttcactgtcagaatgagaccttggaagtgaggatttggttccatagtgattct

SEQ ID NO: 877311 - DNA, 99 bp, Homo sapiens
tgacaagaggaccccgctgctaactcggctacaacatttggcagaggttgatccaaaagactacatgttcagtggactgaaggatgaaacagtaggtcg

SEQ ID NO: 877312 - DNA, 98 bp, Homo sapiens
agagaatgcagttgtcttgacttcaggcaattttatcaagaaagctgttggtcccagaaatcgatgaggtcatgcggaaagtatccaagttggcagtc

SEQ ID NO: 877313 - DNA, 99 bp, Homo sapiens
catagatggccagctttcccccgagggtcaacgagaaagagatcggtccccttcccctgagcccatctacaatagcgaggggaagcggcttaacacccg

SEQ ID NO: 877314 - DNA, 99 bp, Homo sapiens
cccaacaagctgcttttcaccaaattgcaatggagcctttcgaaatcaatgcactgttgcaagaattcaattccgtcttcctgatggttcttcctttac

SEQ ID NO: 877315 - DNA, 142 bp, Homo sapiens
ctgtcggaatcgctttaatagctggcattgctattcctgcaatgattattggcattcctgtgtatgtgggccgcaagtaaccatggacccaaacgtgttgagaagtgatgtcttcgttgagtttttaaaactggcgcagctg

SEQ ID NO: 877316 - DNA, 98 bp, Homo sapiens
agctcttcagcaagaggaccgggctgggcgcgcccggccgcgacgcccgggacccagattgcgggttcagtactatactggcaattgctggagaagat

SEQ ID NO: 877317 - DNA, 99 bp, Homo sapiens
cttcttctggggaataaatggctccacctcagctgacagcttgacattcttagctatattaccagtatatcctggaaccaaagtaagatggttttcctg

SEQ ID NO: 877318 - DNA, 99 bp, Homo sapiens
gaaaagctatatggagataaatggaattcttttaccatcttattaattcactctggagtccaacctataccttctcagggaggcaaactagaaatagct

SEQ ID NO: 877319 - DNA, 99 bp, Homo sapiens
caaggctgagggacgagaacgaggtccagcctgatgagtgaagaggctaagcgaggagcacccaacccttggctctttgaggagccagaggagaccaga

SEQ ID NO: 877320 - DNA, 98 bp, Homo sapiens
cgctgccctcagctccgagtccagggcgagcttttcctccgcaaccatgtctgacaaacccgatatggctgagatcgagaaattcgataagtcgaaac

SEQ ID NO: 877321 - DNA, 98 bp, Homo sapiens
gacgagcaccatgtcgaatctgagcaaaggcacgggcagccggaaggacaccaagatgcggatccgggcctttccgggttcaggataagtttgaggtg

SEQ ID NO: 877322 - DNA, 99 bp, Homo sapiens
ttagaaattgcagccatagtatcattgggcctttctttttatcagcctccagaaggggataatgcactgatggaatggggagaagatattaaagcagtt

SEQ ID NO: 877323 - DNA, 99 bp, Homo sapiens
gttatcgtcatgttcactgctctccaactgcatagacagtgtgtcgtttgcaaatggaggagatgtataagaaagctcatgctgctatacgagagaatc

SEQ ID NO: 877324 - DNA, 98 bp, Homo sapiens
gcaaagctcaccctcccgagttgaaaaagatcagttccatgacaagaccccttatacgattatgtttggtccagataaatgtggagaggactataaac

SEQ ID NO: 877325 - DNA, 98 bp, Homo sapiens
cttctggaggattgaagagtatttgaagtctgtgtcaaacatccatatcataagtggaattttggagatattcaaagatttctagactactgaaaaga

SEQ ID NO: 877326 - DNA, 100 bp, Homo sapiens
attatccttagcaaagtaacgcaggaacagaaaaccaaacaccacatgttgtctcttagaagtgggagctgaacgcaccagtatgcatgagcgggtgaac

SEQ ID NO: 877327 - DNA, 99 bp, Homo sapiens
cttcagacatgcagggtgacgactcgagccttacgcagacccttattatgactatgaaattgagcggttttggcgtggcggacagtatgagaatttcag

SEQ ID NO: 877328 - DNA, 99 bp, Homo sapiens
tgtggatggatcagggagaaagacaatgacttgcactgggaaccaatcagggacccagcaggtaaaatgtccagtgatcgagctttgaggaagcagcaa

SEQ ID NO: 877329 - DNA, 100 bp, Homo sapiens
cacataaaccacctcctctgtatgaagaacgatccccacctttgcgtctttctgaggcaaaggtggggatcgttcttcatacagaggaggtggtttatgt

SEQ ID NO: 877330 - DNA, 99 bp, Homo sapiens
aatcaataaaaaacttcccaaagaactcctgttacgggctgaaagaatcaggattcctgaaccttggatcacacctccagatttgcaagagaaaatcca

SEQ ID NO: 877331 - DNA, 98 bp, Homo sapiens
agccaatgtaggtgcagtcccttctggccaggataatatacacaggatcttggaaacaaagacctcaacagggataaaatttacttgatttgtcaaat

SEQ ID NO: 877332 - DNA, 98 bp, Homo sapiens
ggaaggatacagctatgcaaatatagaacactaaagtgttacatgacagatgtatgaggtatcattggaacatttcaagatcatcaaatcaaattcca

SEQ ID NO: 877333 - DNA, 123 bp, Homo sapiens
tcaatcttgagagatgagcaccagttacacaaggacttctttatccgagcgctggattgcatgagaagggaagagcaagaagagacgtctgcaattcgagtgggttttatcacatataacaaa

SEQ ID NO: 877334 - DNA, 99 bp, Homo sapiens
cttgtaaaaaaaagggctttcatccacacaccaaggagcccaggctgttcagtgtagttgtcctgggaacccctgcagaagaagatggtggtggcaaaa

SEQ ID NO: 877335 - DNA, 99 bp, Homo sapiens
aggctgatggagagctgaacattactcttccagaagaggagaactgcgacacatcaccaagctgaagccctggagcctctttgatgtacttgtggaaaa

SEQ ID NO: 877336 - DNA, 99 bp, Homo sapiens
cgggatccagttaggaaccttcacccccccaaggatgaaggacccaaggaacgatatcgcattcagagtgaacaatttgaagatctttggctcataacc

SEQ ID NO: 877337 - DNA, 99 bp, Homo sapiens
cggttcagccctttgatgaccgcagcaggccaaagtttggagggaaatattgcactggagaaagaaaacgctatcgcttgtgcaacgtccacccctgtc

SEQ ID NO: 877338 - DNA, 99 bp, Homo sapiens
ctcactctgttaaagctggtctgttctaactgaggtgcgagaagatgtactaaattcattgaataacaactttcttcaaacgctaaatcaagcttggaa

SEQ ID NO: 877339 - DNA, 99 bp, Homo sapiens
ctcaatatattcatcatttagaggcagaagttaagttctgcaagacatcccagttaccagtgtccttgaattgatagtggcttctgtttgtcagtctca

SEQ ID NO: 877340 - DNA, 100 bp, Homo sapiens
agaaaaagaaactaaaaaatggcagctctcagaatgggaagaatgagaacttctctcattcttcccattctgagagctgccattttttagtttctttttc

SEQ ID NO: 877341 - DNA, 99 bp, Homo sapiens
atcgcctaacttctactgacgaagcttggaagttgcagaaggagtcttttagtcctgctatacagctgcaccttgtacatcaagctccatgtaatgttc

SEQ ID NO: 877342 - DNA, 98 bp, Homo sapiens
attgaaaaaatgaatggaatgctcctaaatgatcgcaaagtgtcaattggcatgattttgctttttttgatcctgtaatgtatgagagtttgcggcaa

SEQ ID NO: 877343 - DNA, 99 bp, Homo sapiens
accgtcagtggttgccattgtaggacctcaactctctatgtttgccagtggtttattttacaggacagtcattttgtttactcattcagccctgttgca

SEQ ID NO: 877344 - DNA, 99 bp, Homo sapiens
aggaattgtaggtattgaaaggaaactggaagaaaaaagaaaagaaactgacaaaaacatttctgagcttccttcttcttcaacgtggggccagcagtc

SEQ ID NO: 877345 - DNA, 99 bp, Homo sapiens
ggctttagtggcagcatgaagcgcaccccgactgccgaggaacgagagcgcgaagctaagaactgccattggatgtccagaatcccctgtagttgataa

SEQ ID NO: 877346 - DNA, 99 bp, Homo sapiens
attttgacagtcgtagatacaaatttttggatgatgatggatccatttctcctattgaggagtcaactatggactccaattgccttgacagtgttttta

SEQ ID NO: 877347 - DNA, 99 bp, Homo sapiens
gaaactattccaatgttcagtggcggaacttgcagccctagcaacagaccacctatcagagccgaaggcagaaacttccccttgccacttccaaacaaa

SEQ ID NO: 877348 - DNA, 98 bp, Homo sapiens
aactttcaaaggttggacaaccctcatgatgtattggctacacttctgaacaacctcaaagttcaagaaaggcagaacagagtttgtaccactgtagc

SEQ ID NO: 877349 - DNA, 99 bp, Homo sapiens
ctgttagaatctgggactttcttcgttgccatgaggaaagaattctccgagcctactttggggataaaggattatttggtcttctggatttggaggcaa

SEQ ID NO: 877350 - DNA, 99 bp, Homo sapiens
acatggaaaagctcctattctgattgctacagatgtggcctccagagggctagtatcaacaggcagatgcctccaaacagctgtggaatccccctcagg

SEQ ID NO: 877351 - DNA, 98 bp, Homo sapiens
acagttcctgggaaggtggagccaccagcctctccttgagaatgtgttcagtgcagagccttcaataaaggagaaaagaaagacacatgcacacagga

SEQ ID NO: 877352 - DNA, 99 bp, Homo sapiens
ggacctgtgaagcaactgaagaaaatgtttgaagcaacaagattgcttgcaacaattgttatgcttgcactgaaaatgaagtatttcagtaatcggcca

SEQ ID NO: 877353 - DNA, 99 bp, Homo sapiens
tcttaccagccagccccaccaagtgctggccagtgagcccatcccgttctctgatttgcagcagaccctggccggctcctgtgggaagtttgccccctt

SEQ ID NO: 877354 - DNA, 99 bp, Homo sapiens
tttcattgcctggcaaagaagacagacttcagtcttgaaataactgtgaatgtcccagatgtaggatgcatagctgttgttgaacatgagctaccaaac

SEQ ID NO: 877355 - DNA, 99 bp, Homo sapiens
gaagccccctgcaggaactctacaacccaatccaggtttcgtttataatgtcagcccttatatggagtatcatcctggtggagaagatgaactaatgag

SEQ ID NO: 877356 - DNA, 98 bp, Homo sapiens
tgggagacacgccaaagctcccaaggttaatgttgaagaaggaaaatgcggaagtcgtcatttgacaagttttataaatgagtatttgaagctcagga

SEQ ID NO: 877357 - DNA, 99 bp, Homo sapiens
agtttaggccaaatgccccagttcctctggattctcaaagttggattggtggaaacaatgaaccattgacaggctttacatggcgaggtggctgtgaaa

SEQ ID NO: 877358 - DNA, 98 bp, Homo sapiens
gaagtaggggtgcacctcagcactatcccaagactgctggcaacagggaatcacagacacggctcagaccatttatgaaactgcggctcgagaacacg

SEQ ID NO: 877359 - DNA, 98 bp, Homo sapiens
attgtttctctccctctgcccccccttccccacgcaaccccagatccatttacactttacagttagcatggcctcattgaaagaactagatcaaagac

SEQ ID NO: 877360 - DNA, 98 bp, Homo sapiens
cacccacacacagatgtggtgaaatgtacccagttagtaagagcccgaatccgaggtatttgagatcacggacttcaccactgcctcggaatgggaaa

SEQ ID NO: 877361 - DNA, 99 bp, Homo sapiens
attttggaatttccaacacgagaagtatatgtccctcacactgtgtacagattgtaaaccatggctgtgtggatacaagctcagcagctccaaggagaa

SEQ ID NO: 877362 - DNA, 99 bp, Homo sapiens
aagtgtccaaaccacaagttctcaaaactctctgaaaaatggctccctccgagttaagtgagacggtttaagcggaagcatcttactgccattgactgc

SEQ ID NO: 877363 - DNA, 99 bp, Homo sapiens
gcgggcttcagggcaacttcacccggccggctgcggcgtggaaggacagaataacgggctcccagattcacaagccccaccaagaggatcaccccagga

SEQ ID NO: 877364 - DNA, 99 bp, Homo sapiens
gcatcgcgcactttttggatcggcatctagtctttccgcttcttgaatttctctctgtaaaggagaggagaattctgcctaagccaactcgaaaaagcc

SEQ ID NO: 877365 - DNA, 98 bp, Homo sapiens
gaaagcagtgacggaggagcttgtaccaccgatgacatgaagaatgcttacaagctgcatactttggatacttgtctaaaacttgatgatactgtcta

SEQ ID NO: 877366 - DNA, 114 bp, Homo sapiens
tttctctagctattgccttattttttctcatggatgttcttcttcgagtatttgtagaagggtcgtgataaactgtgccattcctaaagggttgaagtacaatcaagctacaca

SEQ ID NO: 877367 - DNA, 127 bp, Homo sapiens
tcagtgaccccacacccccttcaggcccaagcctggatggtaccggatggaacagcttccagacttctaggccactgggaagaagcagcccatgatcttgcccttgcctgtaaattggattatgatg

SEQ ID NO: 877368 - DNA, 98 bp, Homo sapiens
ccatggcggtggccgagctgtacacgcaggaatggacaaatgaggttttcagtttggcaacaaacctgctggcccaaaacatgtccagggatgcattt

SEQ ID NO: 877369 - DNA, 99 bp, Homo sapiens
gagaggcaccgggatcgtgaccgagaccgtgaccgagagcgtgaccgagagcgcgaatatcgtcatcgttagaagggacattgctgctcggaatgttct

SEQ ID NO: 877370 - DNA, 99 bp, Homo sapiens
ctcagtctcactgccagatgctgcaacaatacctctgcgtgggcaatcctatagtgacagcccagggccagctctagtccccctccgaaagccatgcct

SEQ ID NO: 877371 - DNA, 99 bp, Homo sapiens
aactatttatgccaacaccatcaatacttttcggattaaatctggaaatgaaaatggagagttctacctacgaaggcggggtttcaccatgttgcccag

SEQ ID NO: 877372 - DNA, 99 bp, Homo sapiens
gagacagccatggagttctacttagaggcagagttgggcctaaatgagcaccatcaaaatgaagttattaattatatgcgttttgctcgttcaaagaga

SEQ ID NO: 877373 - DNA, 99 bp, Homo sapiens
acctcgagggaaattgcatcaagaaagaggatgtactgagtaaagatgctggggaatgtgcaatatgccttgaagaattgcagcagggagatactatag

SEQ ID NO: 877374 - DNA, 99 bp, Homo sapiens
caaagactaaatatgtcaaaattgtggagaagtgggcttcagatttaaggctgacaggaagactgatgttcatgggtttctggcatttgaagtcaaaga

SEQ ID NO: 877375 - DNA, 99 bp, Homo sapiens
caggactgtcaacgaaacctggcacggctcttgcttccgctgtcaccactgactaaagaagagaaaactgcggcagagcaattcaaatttcacatgcca

SEQ ID NO: 877376 - DNA, 99 bp, Homo sapiens
gcaacttgtgattggcggtgaccggatattcagttgcacatccccacatcaatgcactgccaatggaggactcacgaatggcagtggaagatacatctc

SEQ ID NO: 877377 - DNA, 99 bp, Homo sapiens
ctaaactggcgggctccgtggaagcgtggccggcagcgtcccggacgaggagaagtgacacagccctagaggaggcagtagcagaggtgctagaccatc

SEQ ID NO: 877378 - DNA, 99 bp, Homo sapiens
gctcagcatcactggattatgttataatgtggaacctggatgaatgtagagagaaagtacttcaaggcatccgtgtcattctggaccttactcccaact

SEQ ID NO: 877379 - DNA, 98 bp, Homo sapiens
tacaaaagacaaggaagatgagctgtcctttcaggaaggagccattatttatgtcatcaagaagaatgacgatgggaaaagcttcactctgaccatca

SEQ ID NO: 877380 - DNA, 99 bp, Homo sapiens
acaaacttgcagcccaagagaacagtcgtgagatggagaataaagaaactctcaaagggttgcacaagatggatgatcgtccagaggaacgaatgatca

SEQ ID NO: 877381 - DNA, 98 bp, Homo sapiens
tgggaccactcgttgctgacagtcagaaaatcagtgtactgttacccggacatacctattccttcacaagttctggttcttcagtgctgcttactatt

SEQ ID NO: 877382 - DNA, 99 bp, Homo sapiens
ctgaagcggaggcggccgctgctcgagagcttttgaggagaaacgaaaagaacaggaagaaaaagaacaccaaattagagaacaaatacttcaacaaag

SEQ ID NO: 877383 - DNA, 99 bp, Homo sapiens
ttaaagaaacagcttcatgaactccaagccaaaatcacagctttgagtgagaaacagagtcctccctgctgctgtgtggacgacacgtgggcacaggca

SEQ ID NO: 877384 - DNA, 99 bp, Homo sapiens
gaagttttggaactgtctatctggtttcagacaagaaagccaaacgaggagaggaattcgatgaaatctacattgctccttcaggagtgcaaaaggaac

SEQ ID NO: 877385 - DNA, 99 bp, Homo sapiens
atggcttccgaggagctgtacgaggcattatccaattggtttgctatttgatcttcttgcatcaagttcagctcttccttggaacatcacagtacattt

SEQ ID NO: 877386 - DNA, 98 bp, Homo sapiens
gacaacttacggttttcgtggagaagccttggggtcaatttgttgtatagctgagatcaacagtacaaattctgaagtttgtaaacttgctgatggtg

SEQ ID NO: 877387 - DNA, 99 bp, Homo sapiens
gagcccaaaacctattacgaactcaaaagtcaaccgctgaagagcagaaaacctcggatcaattctcagctggtggcacaacaagtggcacaacagtat

SEQ ID NO: 877388 - DNA, 99 bp, Homo sapiens
atctcagttcctcaaatatgcagcaaagattacaccaagatctgtgctgaccacaggaattggatctactagtgcagcttaaaactagagatcgataca

SEQ ID NO: 877389 - DNA, 99 bp, Homo sapiens
tacagaatcttgaatcagaaattgagaagctggcacattgcaagcaacccgtgccttgatggtggttggcatcctcctgggagtgatagcaatctttgt

SEQ ID NO: 877390 - DNA, 99 bp, Homo sapiens
ctccgttatctgcaggtattgggagatgcacagctaagatgccaggaccacctggaagcctagaaatgatataaagatgaagcgcagctgtataaagaa

SEQ ID NO: 877391 - DNA, 99 bp, Homo sapiens
ggagtgagagttcaaagattctttgtagcagacactgcaaatgaagctctcgaggctgctaagagactaaagcaaattggtcaggagatgttggaaaac

SEQ ID NO: 877392 - DNA, 98 bp, Homo sapiens
tctctccagacactgggtctgactatttctgaacaacaagcagagttgattcttcaaaggaatacaggagtttccagaaaatataaaaaattgtaaag

SEQ ID NO: 877393 - DNA, 98 bp, Homo sapiens
gatgctggaccagttgatgggcacctcccgggacggaatcaaagatcaactcccactgaggacaaatggacctgtaattccgggtgtgacgagagaac

SEQ ID NO: 877394 - DNA, 99 bp, Homo sapiens
tggagatctcctatgagaacatgcgttttctgataactcacaaccctaccaatgctactctcaacaagttcacagaggctggtctcgaactccttacct

SEQ ID NO: 877395 - DNA, 99 bp, Homo sapiens
ggcgggcctcccgtttctggctccgggctgagcttcctggagaagaggaagagtgctggttctcatgagccaataaaaatacaaaccaggtcagaccat

SEQ ID NO: 877396 - DNA, 99 bp, Homo sapiens
ccatttgcagcgcaacatggcaggttcagggagcaagtttccgaggttggaaagaagtgacttcactgtttaacaaagatgatgagcagcatctcctgg

SEQ ID NO: 877397 - DNA, 99 bp, Homo sapiens
tctgccttgctgatctgagctcagacctgccaatttaccagagataattgataacaccctgtaacagctgaattttcacccgatggaagactaattgtg

SEQ ID NO: 877398 - DNA, 98 bp, Homo sapiens
aattttgttgcatggaagatcgataattctgaaataatcagcagaaacggaatggaatgccaagaatctgcattgagaataactaaacattgttactg

SEQ ID NO: 877399 - DNA, 98 bp, Homo sapiens
agaaccagtggctgtccttaaggccaacagagtttggggagcattacgagctgagagcctacaagttgcagtgaaggcctcacagatgggcgccgtga

SEQ ID NO: 877400 - DNA, 99 bp, Homo sapiens
ccatcctgactgtgccttaaagtcggcagtcagggcgacagcaagaatgccaagaagaagaacaacaagaaaaccaacaagaacaaaagcagcatcagc

SEQ ID NO: 877401 - DNA, 98 bp, Homo sapiens
aagaacttcttcagaattagaaaggagctgcttcccaataaggaaacaataagaaggctgactgcacaatcacaatggctgactcagacttcctggct

SEQ ID NO: 877402 - DNA, 99 bp, Homo sapiens
gtccgggtgttcgcggtcggccgccaccaggtcaccctggaagagtcgctggccgaagaatcctgatgtccatccaacagaagcaactccctcatctac

SEQ ID NO: 877403 - DNA, 99 bp, Homo sapiens
tttcatcattactaacaggatattcctcatgacattgctgtctgctcttttgtgacagggacggcttgttgcgggcacttctcacccctgagaatctgg

SEQ ID NO: 877404 - DNA, 99 bp, Homo sapiens
aggagacctgggcacggagcagccagtgccaggtgatgatgaacagtctacacagatggctgcaagttgggaagatgataaagttacagaagcatcttc

SEQ ID NO: 877405 - DNA, 99 bp, Homo sapiens
tgcatttcaggattcattctatttcatcaggttataaagttttagcacttttggatgtgcctgataagagtcaagaaaaagctgatttatacatccatg

SEQ ID NO: 877406 - DNA, 98 bp, Homo sapiens
gccaagaaaatcaatctaaacatttgtgggaagttgtattcatcaataatgaaatgctgactaaggaacaagcgaagctgccgcccatgctgtcgcca

SEQ ID NO: 877407 - DNA, 99 bp, Homo sapiens
ccggcaggcctggacttccagtgctcagagggcggggagaatctcagtccccaacggctccaatgaggaccgcggcgaggtcttggagcaggagaaggg

SEQ ID NO: 877408 - DNA, 99 bp, Homo sapiens
cagcaacacagaatttctgcaagtaattggcaaaatttggtttctctaatattactggaattgattactctccttctgcaattcagctttctggaagta

SEQ ID NO: 877409 - DNA, 99 bp, Homo sapiens
ggctcttgcaataaaaagtagatcattttctatcacttctattccagaaagatctattccttgagaaagataatctgagtgaatgagtcaactgaggat

SEQ ID NO: 877410 - DNA, 99 bp, Homo sapiens
ctcctttaagccagaggatcatgaaaaggcgttggcaaaagggacagtttccaatactctctccatcacttccagccttcccagggtcttggatccgca

SEQ ID NO: 877411 - DNA, 99 bp, Homo sapiens
gagtttgagaccagcctgggcaacaagaacaatttctgtgagggaagtatctcggcttctcccttgaattccagaaaatctgatccagttacacccaag

SEQ ID NO: 877412 - DNA, 98 bp, Homo sapiens
gggacgtatgcctatgatgccgacttcagctgctgcagctccttgcatcagcaggactcagacctctcagcagcgtgctctgacgctgacctccacag

SEQ ID NO: 877413 - DNA, 98 bp, Homo sapiens
gagacttccagttctgtttagaagatgacactcagagccaactgttggatgcagatggttgtgtaaaattgaatacccttgaacccttggaggatcaa

SEQ ID NO: 877414 - DNA, 99 bp, Homo sapiens
aagattcaataacagttgcatttgaaaacaactaatggcagcattagccgctgttgggcctcctaatcctcgggcagatccagagtgctgcagtattct

SEQ ID NO: 877415 - DNA, 99 bp, Homo sapiens
caagacaggataattccattcttaaaatgcacacttgactgaaggaggacagggaatctgaagactccggatgacatcagagctacttttcaacagcct

SEQ ID NO: 877416 - DNA, 98 bp, Homo sapiens
gaacttcgaaccatggaccaggccctcaagtccctgatggcctcagaggaggagactttggcttcatgtttgaaagctcgccgggcggcaatctcggc

SEQ ID NO: 877417 - DNA, 99 bp, Homo sapiens
tttgatatgcttaaccggagatacctgttgtgatcagtttgtggcagagtacgagcccgtgctgatcgagatcctggtggaggtgatggatccttcctt

SEQ ID NO: 877418 - DNA, 98 bp, Homo sapiens
aggagcgaggcagctgtactaggactgggaacggaatagcctaacatggcagaccagagacagcgctcactgtctacctctggggagtcattgtacca

SEQ ID NO: 877419 - DNA, 99 bp, Homo sapiens
ccccagccacgctttctgtacagcctgcagaactgtccctgtgcgttttattgcgacctgccggtgggaactttgtctccgagtcggagcagcatggag

SEQ ID NO: 877420 - DNA, 98 bp, Homo sapiens
catgactctcacagatgaaggcctagacgcaggaatgttacgttcataacttactaaggattagtgtatattttccaaccttgaggcatgaaattctg

SEQ ID NO: 877421 - DNA, 99 bp, Homo sapiens
ggggttgacccagaacaaagcattgccagaaaacgttaaggaaacctgtccagtttaagtcgtcttggtctgagatataacagactgtcagcaataccc

SEQ ID NO: 877422 - DNA, 99 bp, Homo sapiens
ggctgggtagacagattttggagtctattgaaagcattcattctgtgggattcttgcatcgagacatcaaaccggaacttagtgatttggcccgtgacc

SEQ ID NO: 877423 - DNA, 98 bp, Homo sapiens
ttttaaagatgcagaggatgctttgcagaaacttcataaatatatgcaggtgaccaagaatatggcccaggtgaccaaagccctggacaaggccctga

SEQ ID NO: 877424 - DNA, 99 bp, Homo sapiens
gccgaagaagcatcgttaaagtctctcttcaccctgccgtcatgtctaagtcagaggctgatatccccaataggtttgaaatgaaacttcacagaaata

SEQ ID NO: 877425 - DNA, 99 bp, Homo sapiens
tttgaagttggagatgaaaattctggctggtctgcacagaaagtgaccaatctacatctaatgctacagatatccatgttcaagaggaaatgtttgttc

SEQ ID NO: 877426 - DNA, 98 bp, Homo sapiens
tggtgattcagcttgctttactctttcattgttgggacatgtatattgtacctgcaatccaacagcaacaactggcgctggtttgatgatcgctctgg

SEQ ID NO: 877427 - DNA, 100 bp, Homo sapiens
tggtcattgcagtgggcatcttcttgttcctgattgctttagtgggtctgattgacccactaaagcaatcaggaacaagaagatgcccactgcaatgacc

SEQ ID NO: 877428 - DNA, 99 bp, Homo sapiens
ggaaaacccttggatgcttcatagtcctacttctaggcagttctgcatgaatttctggtaatccagcacaacacagctggagtaaactgtgaacagtgt

SEQ ID NO: 877429 - DNA, 99 bp, Homo sapiens
gtgcagagtcttttctttgccaagcaaaacagtttccaccactgcttagagcatgaaagttttctgccgtctttggaatcttgtttgcaaacagctcaa

SEQ ID NO: 877430 - DNA, 99 bp, Homo sapiens
gatctgccaaggctgcccacataggttgataccgtaaagcgcttgctgattaaaaaattacctcctgttcttgctatacaactaaagcgatttgactat

SEQ ID NO: 877431 - DNA, 99 bp, Homo sapiens
tgtacaccttagaagtgcttaaggaagagtgatgaagcttttcttagtgacactaaagatcgaggccctccagtgcagtcacagatctggagaagtggt

SEQ ID NO: 877432 - DNA, 99 bp, Homo sapiens
cggatatgcaaaaaagtctgtggccactacactcaggaggagacagaggaggacagtgacctgtcagattatggtgatgatgtggatgggaggaaagac

SEQ ID NO: 877433 - DNA, 99 bp, Homo sapiens
cattggaaattgtgtgtccatcttggttttgagctctgctctgcctgtgatgtcgagaacactgggtgctggagaatctggtaaaagcaccattgtgaa

SEQ ID NO: 877434 - DNA, 98 bp, Homo sapiens
ctctggaccttgtctcgctcgggagcggaaacagcggcagccagaggtattaatgaagaaagctgtttctctttccttcgctttattgatatatctcc

SEQ ID NO: 877435 - DNA, 99 bp, Homo sapiens
tggaaggacaccccagttcgggcagctggtctaccctgctggaggcgcccaggacaggctgcaaactcatcactgctatatatgcagattatgcccgga

SEQ ID NO: 877436 - DNA, 99 bp, Homo sapiens
aacgcgctggctgactggggtcggcgtttagttcagcgcagcgactcggggacctggagctgacgcctaggcaagaggattatgacagattacgaccgc

SEQ ID NO: 877437 - DNA, 99 bp, Homo sapiens
cagaagcttaaaggaagcagaaaatgtgtggcggattactgggacagatgtaaatggggagcaggagaaccgagtgcagaagggaaatggatattttca

SEQ ID NO: 877438 - DNA, 99 bp, Homo sapiens
tttctggctccgggctgagcttcctggagaagaggaaggtgcaagcggtcttctctgtcttctttatggccagtaaaattctccagaagagatttatgg

SEQ ID NO: 877439 - DNA, 99 bp, Homo sapiens
acgaggcggcgggctggagacatggaccgcggcgagcaaggctaccggctctctgaccagttccacgacatcctcattcgaaagtttgacaggcaggga

SEQ ID NO: 877440 - DNA, 99 bp, Homo sapiens
ctgacatcatctgcacttagcatatcatcaaccatatgcttatcaaagctatcactatttttgatgaagctctccagtttttccttggcatattccacc

SEQ ID NO: 877441 - DNA, 99 bp, Homo sapiens
agagcatgaccgatggattccagccatgtccactgttggtgggaactcagaaggtgccccctgtgtcttccccttcactttcctgggcaacaaatatga

SEQ ID NO: 877442 - DNA, 99 bp, Homo sapiens
gcctcttctccatggccctccagacaggcagaaccagtacactctcggccttccggggctggcggcggcccccggtctggaggacctgcaggtgagacc

SEQ ID NO: 877443 - DNA, 100 bp, Homo sapiens
cctcggacggtttctgagcgttggtgtttggcacgcgccaccctctcttgctttggttccgccatgccgatgtaccagtctttggtagatgagtggctgg

SEQ ID NO: 877444 - DNA, 99 bp, Homo sapiens
aagatctgacagaactggttcagcggagaataacatatcttcaggtaagaaccttgatgctgtccatgatatcactgtggcgtatcctcacaacattcc

SEQ ID NO: 877445 - DNA, 100 bp, Homo sapiens
cagtgtactccaagaaaggcctggaacataaaaaggaactgctgaaaataaaagttgctggagttcctttttatgttccaggcctttcttggagtacact

SEQ ID NO: 877446 - DNA, 99 bp, Homo sapiens
gctgctgatgtcagttaactctgagaagtcgtcctcttcagaaaggagggtgcatctgcccggaagactcagactcctgcagcccagccagtaccaaga

SEQ ID NO: 877447 - DNA, 98 bp, Homo sapiens
agggaccgggggaaccgccgccccggccggacctcgaccctgagctctatctcagtgtacacggtttcaaaacctttactttggggaagaatgaataa

SEQ ID NO: 877448 - DNA, 100 bp, Homo sapiens
ccaacaccgttcgaccatcatcactctgtacaatggagcatttgactcttcctcggcagtcttccttattattaagagtctcgctctgttgcccaggctg

SEQ ID NO: 877449 - DNA, 98 bp, Homo sapiens
ctgcaggtattgggagatgcacagctaagatgccaggaccacctggaagcctagaaatgaggtcctgtaataaagagggatccgaacaagctcagaaa

SEQ ID NO: 877450 - DNA, 98 bp, Homo sapiens
agacaatttgattggggaagaaacaaagctgcagcaaaaaattattcctgatcaggaccaactgatggcaatagcactagagtgcatctatacctgtg

SEQ ID NO: 877451 - DNA, 99 bp, Homo sapiens
caagggaccagacccagacagccttagttcacagtttatggcgtatattgaacagcggcgaatctctcatgaggatctagtttgaagcactaagaagaa

SEQ ID NO: 877452 - DNA, 99 bp, Homo sapiens
agttctctctggagtctcgagcccgggaagtgcgttttggacaggaagatgtcacccaagcgcatagctaaaagaaggtcccccccagcagatgccatc

SEQ ID NO: 877453 - DNA, 99 bp, Homo sapiens
tctgaagagagttttcctgatagatctcaacagtagtaaggagagctgctttgagagaattgtgtcaaggtttggaaagaaagtcacatatgtagtgat

SEQ ID NO: 877454 - DNA, 98 bp, Homo sapiens
gctttgatgactacccacctagaagaggtgatgatagctttggagacactgtcggaaaaggtaacagaagatggaactcgaaatcccaatgaaaaacc

SEQ ID NO: 877455 - DNA, 99 bp, Homo sapiens
tactggtgtgtggggccggaggagtcagctgtgtgtccagaacgtgccatggagacgcttaacgaccagaatccgtagaagctagccctgtggtagttg

SEQ ID NO: 877456 - DNA, 99 bp, Homo sapiens
catctgcattgacccggcctacagcaaggcctacggcaggatggggaaagaccacagcaagattctttcattcgtctcctcctagcctgggggaccagg

SEQ ID NO: 877457 - DNA, 99 bp, Homo sapiens
tatcatgctggccaagaagatcatcattaaggacggaggcacggtcagtcttcactgtttccaatggaagatggattcttggatgatggccgtggggat

SEQ ID NO: 877458 - DNA, 99 bp, Homo sapiens
ctcgattaaagaggaaggggcagtgctcacatttctgggcaggtcgtcctctcagcatgggggtcccgcggcctcagccctgggcgctggggctcctgc

SEQ ID NO: 877459 - DNA, 99 bp, Homo sapiens
tcatgtcagggactgtgttcagacctacatccgtgagtggctaatcgtgaaccggaatgatcccagggcaccgccgtgtgaatataaagattggctgac

SEQ ID NO: 877460 - DNA, 99 bp, Homo sapiens
ggatgaccacttcaaatcctcccattccaatcaaacaaatcacaagccctccccagaccagcacacaggtgcagcccttgtacagaacaatggaaatgg

SEQ ID NO: 877461 - DNA, 99 bp, Homo sapiens
tgtcaatttctccttcagacaatgcagtggtcttaacaactgtcggaaaaggtaacagaagatggaactcgaaatcccaatgaaaaacctacccagcaa

SEQ ID NO: 877462 - DNA, 98 bp, Homo sapiens
gaaatttctgctcatagagtggtgctggccgcctgtagtccttattttcatgccatgtttacagcatgcagtgacctggagttcagggaagtggcaaa

SEQ ID NO: 877463 - DNA, 98 bp, Homo sapiens
gtgcagaagttctcgaatcattctttgtacagaaattgaaaggcttcaaagctagcaggaaagtctctgtacgtgaagaggttgcacgacaaaatgaa

SEQ ID NO: 877464 - DNA, 99 bp, Homo sapiens
gtgcccccaaacagttatacctgaaggggaatgctgcccggtctgctccgctactggttcaagggcagacggggtttttgaggaggattcgcaaattga

SEQ ID NO: 877465 - DNA, 99 bp, Homo sapiens
ggtgatttctgcatttccaactaagtggatgattcaacagccacacaaagcagcaacattttttggatgcattgggatagataaatttggggagatcct

SEQ ID NO: 877466 - DNA, 99 bp, Homo sapiens
tggcacaaagcctctggatggcttcgacgtgtggaaaaccatcagacctaaggattgtcttcggtctattatgagaagagtgaaccacaaagatcctca

SEQ ID NO: 877467 - DNA, 98 bp, Homo sapiens
ataccccgagcggcaccaacagcggcgcgggcaagaagcgctttgaagtgaaaaaggtcgtgtacaacgtgggactctgcatttgtctgtttgatatc

SEQ ID NO: 877468 - DNA, 99 bp, Homo sapiens
ttcaaattcagccgctattttcctaccaaggctctttattgagaaactaccaaaacatcgagattacaaatctgctgtcattcctgaaaagaaagacac

SEQ ID NO: 877469 - DNA, 98 bp, Homo sapiens
gtgcggctctgcgacggaaacaatcgccagagatgccggggctagccttccccaccagaatcccacgtggcgaagtctcgattttggaattatgccag

SEQ ID NO: 877470 - DNA, 99 bp, Homo sapiens
cactgcagcagagggttttccagatcctagacagtaaggtattgaaattgttggcggagatgagttcattttgtggtgacatggaaaaactagaaacaa

SEQ ID NO: 877471 - DNA, 98 bp, Homo sapiens
caatgtagtcaatgtgacatgcgtttcatacagaagtacctgcttcagagacatgagaagattcatactggcatcttttgaagtatcattggaggccc

SEQ ID NO: 877472 - DNA, 99 bp, Homo sapiens
caggctgaaggtttagcgggtgccgattgataggttatatgattggaaaaagagtcctgactctgatgtggctgctactttaaagaagcagaaaaagaa

SEQ ID NO: 877473 - DNA, 98 bp, Homo sapiens
ccttggctgctctcagcccccaagctggttcccgctgtagcaaacgtccgcggcctctcagttccatgccattgcagtgtcaactaggcctcagttac

SEQ ID NO: 877474 - DNA, 99 bp, Homo sapiens
gggaaggtggagccaccagcctctccttgacaagttggatggcttgaggactggtactaaaaggaaacgtgactgggaggccattgccagcagaatgga

SEQ ID NO: 877475 - DNA, 100 bp, Homo sapiens
actgaggcagacgttgtggcggagaagggcagtggctgtagctgccctttccaagggcagctacagccactgcccttctccgccacaacgtctgcctcag

SEQ ID NO: 877476 - DNA, 98 bp, Homo sapiens
tctttgacaagtgatgagaagctgtcggagcttcccaagatgtttctttctcagcaaaatagaggagaagcttacccctcttccagaagataatagta

SEQ ID NO: 877477 - DNA, 99 bp, Homo sapiens
gcttatttgaagaggcactggaaaaatatggcaaagacttcaatgacatacggcaagattttttgttgacctcctgtactggagagacattaagaagac

SEQ ID NO: 877478 - DNA, 99 bp, Homo sapiens
ctccaatatcagccaacatcaatcattcttacctgtcaattatcactggatctgagggagtctcatttcggttgccacagcttttcttgtcacaacagc

SEQ ID NO: 877479 - DNA, 99 bp, Homo sapiens
ggatgacaccactctgaatgcactgaacacaatcatccctcagaggtgccagagaagctcatccaggaccggttccggaagctgggccgtttccctgaa

SEQ ID NO: 877480 - DNA, 99 bp, Homo sapiens
cgtcctccgggaccggagtcagaaccctccgcagagtaaagggtgggctttgacagcgagaatcccggggacgacgggcagatgcacaaggggctgtca

SEQ ID NO: 877481 - DNA, 99 bp, Homo sapiens
ctccattcccgggaggggggagcggcgttggaggccaccgtttccagttcaggagcatcccaggaggaacagaatgatcttggtcttggtgaccttccc

SEQ ID NO: 877482 - DNA, 98 bp, Homo sapiens
atcagttaaggagcttgatttgtttttggcatactacgtgcaggagcaagcacagtttaatggcaacgagaagcggcagtcatccccctcaccttcgc

SEQ ID NO: 877483 - DNA, 99 bp, Homo sapiens
caacttccagtgagagtgacacaggtcaggaagcagaatattccttatatgttatcaggaactgttgccgttattacatcagatgggagaatgattgtg

SEQ ID NO: 877484 - DNA, 99 bp, Homo sapiens
cttgtgcgttccgctccggccgccctttgcgcttggatccacttccccatctgtaacgaggtgttgagacgaggtggaatgcaagctttaggacttcac

SEQ ID NO: 877485 - DNA, 99 bp, Homo sapiens
ttagaaagaacagacttccaccagaatgtctctaattaacagaagatggcaaagcccagccacagcagctatgtccttcagcagctaaacaaccaaaga

SEQ ID NO: 877486 - DNA, 104 bp, Homo sapiens
caacaagagtgaaactccatccagtgagaccacgttcccataattctctaacatcacttaacatcacttctctgtagaggtccctctgaacagggtccaggtat

SEQ ID NO: 877487 - DNA, 99 bp, Homo sapiens
gaaatgggagtgtccacttagaagcatcacatgacaatgcatctgctgtaggcggtagcagtttgcacgatgaacttgcttggaattgcgattgggttc

SEQ ID NO: 877488 - DNA, 99 bp, Homo sapiens
ccaggtaagccacaaggaagatgaggttcaggcccaggcagacggcggccaccagccccaggaacagcagcgaatttggcatcctttcgtcgggctgtg

SEQ ID NO: 877489 - DNA, 99 bp, Homo sapiens
gttagagagatatgcatatccagatcgcgctagcgagcttttatgaggacggaggggatgaagacattgtgaccatttcgcaggcaacccccagttcag

SEQ ID NO: 877490 - DNA, 99 bp, Homo sapiens
cagaactgcccctggtcatgtggcttcaggtcgagtttgagtggctgaggcagttttggtttcaaggcaatcgatacagaaagtgcactgactggtggt

SEQ ID NO: 877491 - DNA, 99 bp, Homo sapiens
gctaagagatatctgcaatgatgtactggccaggagtggtggctcacacctgtaatcccagctctgggaggccaaggccagtggattgcttgagcccag

SEQ ID NO: 877492 - DNA, 98 bp, Homo sapiens
tttgttccaacacagtcctataagcaacccctacccatcaattgaaggttctggctccttggcagcaatggctgtatttgaagataagtttaggccag

SEQ ID NO: 877493 - DNA, 99 bp, Homo sapiens
cagcacccagggatggagagtcatggggaccctattaggtctcggtgcagtgttggcctatcaggaccatcggtgtaggatggagtttcactcttgttg

SEQ ID NO: 877494 - DNA, 99 bp, Homo sapiens
gcctccccacaccaccgaccaggacctggtgaagctctgtcaaccgacatggatttgattgacatactttggaggcaagatatagatcttggagtaagt

SEQ ID NO: 877495 - DNA, 99 bp, Homo sapiens
gaatgaaagcatgaaaaatcaaaaggagttcatgcttatgaatgctcgacttcagagttgctacgatggaagttaaagggaaaaagcaattcacaggaa

SEQ ID NO: 877496 - DNA, 98 bp, Homo sapiens
caacaaccttctgactgagaagcagaagctgcgggttggatggcaagcatgtggtgtttggcaaagtgaaagaaggcatgaatattgtggaggccatg

SEQ ID NO: 877497 - DNA, 99 bp, Homo sapiens
gtgggagtgacccgattttccagatttttatacgactgtaaacaactattggattctaaatgctcgacacataaatttaaccacactttctgtagctgg

SEQ ID NO: 877498 - DNA, 99 bp, Homo sapiens
aagtctccatggtgaagtataggctgaggctacctgtgaacagtacgcagtgaatgttaatgagaagactttgggacatttcatgagtcattcaagcaa

SEQ ID NO: 877499 - DNA, 99 bp, Homo sapiens
tgatggcggatcaggatcggaagcctgcgtaactttctcccttgatccgggagtctttccactggatatctgtatgcccttggacagaaggtttggaaa

SEQ ID NO: 877500 - DNA, 98 bp, Homo sapiens
gcggtgcgctgggggccggggcgcgtcgcagagttcttcgtaagtacatcttaaagctgtcaagatggttctagcagaccttggaagaaaaataacat

SEQ ID NO: 877501 - DNA, 99 bp, Homo sapiens
ttgcctgccgctgtcaagccgcataacagaccaatttttattccacgaggaggagtacctggaaattagatccaaaatacggagctggcatatacttca

SEQ ID NO: 877502 - DNA, 99 bp, Homo sapiens
catcagaggctgcagctgtgtgttttccagcaggacgttcagcagcatgtttgggaaaataacaaccctttccaaattgtcttggttaagggaaataaa

SEQ ID NO: 877503 - DNA, 99 bp, Homo sapiens
gatttttttgtgcagtgggcaggaagaacccatcgggcagctacacatcttgaaagagaagctcttcctgtgagatgtggaagactgaggcctgttgaa

SEQ ID NO: 877504 - DNA, 148 bp, Homo sapiens
ctgggaagctgctgacttctggtcacatgccactcccagccaggccctggtgtggcctggctgggagtggcatgtgaccagaagtcagcagcttcccagaagccccgaagccggggcatcctccactcactcttctgctgtgtctgcc

SEQ ID NO: 877505 - DNA, 99 bp, Homo sapiens
caaatacctgaaagattgggcaagagaagaattcagaagaaacaaaagtgccaccgaagagaccgagacaacacttggactcagttcatatcagcagaa

SEQ ID NO: 877506 - DNA, 99 bp, Homo sapiens
aacacctaggaagggagaactgaaaaggcgacggcggattgacagaagtatgattggagagcccacaaactttgtgcatacagctcatgttggatcagg

SEQ ID NO: 877507 - DNA, 98 bp, Homo sapiens
agaattacatcatggaaggtgtgaaggccaccattaaggatgcatctcttcagccaaggctggctcaactaccctctggagaagataggcttctggcg

SEQ ID NO: 877508 - DNA, 99 bp, Homo sapiens
gtagtctctgaaaatggaagaaaatatagcagatatggaaggtgcactagtgcaagagcagaacttgaaaggctgcggctcagtgaaaagtgtgataaa

SEQ ID NO: 877509 - DNA, 98 bp, Homo sapiens
gaagtgcgggcgcagctggcggagctggagctggagctctcggaggggcatgaactacttggaggaccgtcgcttggtgcaccgcgacctggcagcca

SEQ ID NO: 877510 - DNA, 99 bp, Homo sapiens
cgacacacagtgcaagcgcgtaggaacacaatgctgggtgtttggctctcctttgggtggaacacagtgaagatcgacatgagtgcagcccggagagat

SEQ ID NO: 877511 - DNA, 99 bp, Homo sapiens
ctttgtacttgtggtgaggttgcatttccttctaacgatgacgatattcgcgctctcggtcacgctctcggtcacggtctcggtcacgatcccggtgcc

SEQ ID NO: 877512 - DNA, 98 bp, Homo sapiens
ccgggactccctggaaacctagaaatggttaaacccatccagagtaatggctgcggccttacccaggaccctgggggagttgcagctgtatagaatat

SEQ ID NO: 877513 - DNA, 99 bp, Homo sapiens
agaaaatatggatctttacatgttgaatccttgcagcactaaaatttggatgaggaagatggagagaatgcccacccatatagaaacagtgaccctgtg

SEQ ID NO: 877514 - DNA, 99 bp, Homo sapiens
gaagaaagtgcctgagtaactgaattccaaaatgtgtagaaaatttccggttgtccatccttgaaagtcattatgagatgagtaaaatggaattctgct

SEQ ID NO: 877515 - DNA, 98 bp, Homo sapiens
gcggcggcaccgggaggccgggccgagcgggggttggcactgatgaagcctgcctgattgagatcctcgcttcccgcagcaatgagcacatccgagaa

SEQ ID NO: 877516 - DNA, 99 bp, Homo sapiens
gctatcttgtggatcttctgagtaacggaggacaattcaccatagttttctttaagctggtatgaatatgagcccagtctctcgactaaaaaaaacttg

SEQ ID NO: 877517 - DNA, 99 bp, Homo sapiens
cagatttttgcagttgacaatagagaagatcttcagaagtggatggaagccttctggcagcatttctttgatcttaatggagtttcgctcttcttgccc

SEQ ID NO: 877518 - DNA, 99 bp, Homo sapiens
tttcacttactgcaggattttcagcttcagcaagcaggtacctgtctattgcactaagactggtgtaaaacatttgcaccacaaggctcaagagtttga

SEQ ID NO: 877519 - DNA, 99 bp, Homo sapiens
aggaatgtctcagaaaaacatcggaaaccgtcaagtacctgacgcggggcaagattctgctgtgcacagacagttaaatctcacacagaaacagatgag

SEQ ID NO: 877520 - DNA, 98 bp, Homo sapiens
aagaatctgccaaatctcctgtgattgtagacaggtctggtgagctgtaccttctttctggcagtgaatggtctgtattcctctagtgatgatgtgat

SEQ ID NO: 877521 - DNA, 99 bp, Homo sapiens
cggcgcttggcagccaggagctctgcattgaaggcactggggcaagaaaattggatgtatattttgaatatgaagaaaaaataatgagcaaaactactc

SEQ ID NO: 877522 - DNA, 99 bp, Homo sapiens
gcgcaggctgggctgcaggctctcggctgcagcgctgggtgcaggttttgcagcatttggacaaacaaagccagtagtaaccccttttggtcaagttgc

SEQ ID NO: 877523 - DNA, 99 bp, Homo sapiens
ttctgtttcactttttggatgaatggctttataagttcagtgctgatgaattcttcataccccggggacggaagaagtctatagtggctgtggagccca

SEQ ID NO: 877524 - DNA, 99 bp, Homo sapiens
agctgccagcgcagccgccagcgccgggaagtggttacctggaaggaaaggagctgcagaacttgatccaggagctccagcaggcgcgaaagaaggctg

SEQ ID NO: 877525 - DNA, 98 bp, Homo sapiens
tctaggaagcgctagacacatgatgaatttcatcctttcatcgaagcacttctgccccacgtccgagcctttgcctacacatggttcaacctgcaggc

SEQ ID NO: 877526 - DNA, 98 bp, Homo sapiens
gtggaacttctacccgacacttacatgccatggccttctacgttgtgaaaatgtgtcaaatcaacagtgccttgacatctttccacactgctttggaa

SEQ ID NO: 877527 - DNA, 99 bp, Homo sapiens
ggcccttgttaactacaacagaccatctgacaatgcagatcttcgtgaagactctgactggtaagaccatcaccctcgaggttgagcccagtgacacca

SEQ ID NO: 877528 - DNA, 99 bp, Homo sapiens
ggtcttaccacttatcatctccagtcttgtcacagcagaaaaagtcctacctggagcgaagcgttaaggaagctgaggacaacatccgggagatgctga

SEQ ID NO: 877529 - DNA, 99 bp, Homo sapiens
cctacagatgaattatctttaaccaattgtgcagttgtgaatgaaaaggatttccagtctggccaatattgatgatgttaagaagttcaaaccgggtta

SEQ ID NO: 877530 - DNA, 98 bp, Homo sapiens
atgtctcgctccgtggccttagctgtgctcgcgctactctctctttctggcctggaggctatccagcgaattgcattttgtgaaaaaagaacaagaat

SEQ ID NO: 877531 - DNA, 98 bp, Homo sapiens
atacactgtggaactatttgagcagttcctgagactggcccagacgctgcggcactatggctacttgcgctttgatgcctgtgtggctgacttcccag

SEQ ID NO: 877532 - DNA, 99 bp, Homo sapiens
ttgctgaagttgcgtgtggtgatgatcgaaaacgaataagacgagttggaagaagacctgatcaacaacttcagggtgaagggaaaataattgatagaa

SEQ ID NO: 877533 - DNA, 99 bp, Homo sapiens
tggcctccgtctgccacacgctgatggtgcagcaccgcatgatggtacccaaagtcaggttgtttttgagcacgttcactctcgcagtgtcagctgggg

SEQ ID NO: 877534 - DNA, 99 bp, Homo sapiens
gggaggcatattttttacttgcaaagtatcttttgcttctcaacaggatagtcaccacctgcaattaggtggagggtctaaagtgatgtccgccagctc

SEQ ID NO: 877535 - DNA, 98 bp, Homo sapiens
cctttatgggcattactatgttagttggaataactggactcttttacactcaactaattggcatcatcacatgcacttgcaggaaagacatggtgaag

SEQ ID NO: 877536 - DNA, 99 bp, Homo sapiens
accagcaccggctccagtgggctctgtgacagagctgaatgaacctctctccaatgaagatcgaaatctcctctctgtggcctacaagaatgtggttgg

SEQ ID NO: 877537 - DNA, 99 bp, Homo sapiens
atgaattgacaatcaaagaaggagatatagtcactctcatcaataagcccccaggctccgctcttgccagagggacaggagccatggctcagaaaatgg

SEQ ID NO: 877538 - DNA, 99 bp, Homo sapiens
ttacaaccacaggcctcaagtggaacctcattattgccagtttccgaggaaccgttccatatggcctgtcattggaaattggagatacagttcagatcc

SEQ ID NO: 877539 - DNA, 99 bp, Homo sapiens
gtctgggatgttggcagccacttcaaaatcagacctctgtggcagcattttttccagaacacaaaagctgaaactagaggaccgttctgtggtgccccg

SEQ ID NO: 877540 - DNA, 99 bp, Homo sapiens
ttgactgtgtatactctacaatctaagaaggatttcagcaaatttggagcaggccgggccagcacatggctcccagcccccatctgaccgtgtacaccg

SEQ ID NO: 877541 - DNA, 99 bp, Homo sapiens
accaacctcctccagggctggcagaacagctcttgcaagcttaggatatgaaaagagctgtgtgttgttcaattgtgcagccttagctagccaaattgc

SEQ ID NO: 877542 - DNA, 98 bp, Homo sapiens
gggcacgtgaggttgggccttggccgcctgagcccttgagttggtcacttgaaccttgggaatattgaggagttgtaagacgttcatcgccgtgttat

SEQ ID NO: 877543 - DNA, 98 bp, Homo sapiens
tgtctagacaagaaatgcaggaagttcagagttctaggagtggaagaggagcatttttcagttgaaggacagttggaattcagagcccttctatttgt

SEQ ID NO: 877544 - DNA, 98 bp, Homo sapiens
gggaaacccggagaccaaatccttgactttgtgtggacagtaatgacctcacgtttccgattgcctgctggcagaacctacaatgtacgagcatcaga

SEQ ID NO: 877545 - DNA, 99 bp, Homo sapiens
ggagaacgagtccctcttcactttcctcggcaagaaatgtgtggtgatctgcaactctttcaccatctgtaatgcggagatgcaggaagttggtgttgg

SEQ ID NO: 877546 - DNA, 99 bp, Homo sapiens
gaattggtacttgagtttggccagccattgaattacttcatctctctgggatggagaaacattctttgcaaacaagccaggccaaaaaggctcaacatt

SEQ ID NO: 877547 - DNA, 98 bp, Homo sapiens
agctcagccctgaagaaaagggaaaacttgctgcggttgctcaaggagttaaagaggattgcactgcctccatggaaccttcagcaattgaactccca

SEQ ID NO: 877548 - DNA, 99 bp, Homo sapiens
gatagaataagtgaaacacggaaactgagtatgggatctgatgatgctgcctacacacaagtggacgtgactctggacccagacacggcctaccccagc

SEQ ID NO: 877549 - DNA, 99 bp, Homo sapiens
ctgctgtgggatgtggatggtggcctcacccagattgacaagtacctgtactcctctgaggactacattaaggtctcctcctcggcttcctcttcctcc

SEQ ID NO: 877550 - DNA, 99 bp, Homo sapiens
caaggggcaactgggccatgagagggaaggaaacaagccaggtcagtactcctgcatttgtaccaacgaaaactcacgtgctgcttcatcgaatgagtg

SEQ ID NO: 877551 - DNA, 99 bp, Homo sapiens
acaccatacatggtacagccagagtaccgaatctatgagatgaacaagagactgcagtctcgcacagagggggcagctggcattttatgctatgtggga

SEQ ID NO: 877552 - DNA, 99 bp, Homo sapiens
gcgggtctgtggttgcccctcctccaccaatgaggcctgctcaggagctggcattcctccagggcaagggatctgcagcagagtccaaataggagaacc

SEQ ID NO: 877553 - DNA, 99 bp, Homo sapiens
ccctaggcatgcttccatccacctcggtctggcttcattttcacatccaattttcgcccagagtgctgtgaaatgcacctgtgggttctttcaacaggc

SEQ ID NO: 877554 - DNA, 99 bp, Homo sapiens
taagacttcccagcattcctacagatataaatagtggacaaactacattcatgggtggcaggatcgttgggtagttttgaaaaataatgctctgagtta

SEQ ID NO: 877555 - DNA, 99 bp, Homo sapiens
cgacgcagtcagctgcgtgattcccgtgattgcgttacaagctttgtctccttcgacttggagtctttgtccaggacgcactggtgaccccggcagccc

SEQ ID NO: 877556 - DNA, 99 bp, Homo sapiens
cctgaatcacttctggagccatccaaaatggtgttcctatcactgtattccgcttggccatggtatccatatggactacttctgggtaaataggctctg

SEQ ID NO: 877557 - DNA, 99 bp, Homo sapiens
gcagcgcggccgcagcagccctgctaaacacagcagagataccatgtccagaaccaataatgctaagaagtcatgttcttgtcatgagtttcatcggta

SEQ ID NO: 877558 - DNA, 99 bp, Homo sapiens
gcttctctgaggcggcgagagatggtcaggtctggagctcgaccgggccaggttattcagcttctcaaggctggaaaagcgaaggaagtttcctacaat

SEQ ID NO: 877559 - DNA, 99 bp, Homo sapiens
ccgacacttacatgccatggccttctacgttgtgaaaatggacacagccagtgtgaagtcctctagtagtcttgaacccaatcttttttgtgatgaaga

SEQ ID NO: 877560 - DNA, 99 bp, Homo sapiens
tggctaacatggtgaaaccccatctctactcataaagttctttcattgctgcaagtttagattcaaacttttccagactccagaatgttgagattccta

SEQ ID NO: 877561 - DNA, 99 bp, Homo sapiens
gacaaatttagagaaacctcggcagggggaacgcctagtttgaaaatattatggctgaaccaagagccagaaatacaggttcggcgcttggacacactc

SEQ ID NO: 877562 - DNA, 101 bp, Homo sapiens
ctctgtctgtcattcattcattcccttgttcaaatatttactttctcttcagtgccaggcaacaagctaggcattaactcaaactgtgttacagcagcata

SEQ ID NO: 877563 - DNA, 99 bp, Homo sapiens
ctcggcgtgctactgtgcgctcgatccagcaccatggggaagcgggacaatcgggtgtcttaggaaaagtcctcagtgctgtgggcagtgcccagctac

SEQ ID NO: 877564 - DNA, 99 bp, Homo sapiens
gatgaacccccagcactgccaccaaagatcggaactccaacaagaccctgccctctaccacctgattcgacagaagctgcagactaaacaggctgccat

SEQ ID NO: 877565 - DNA, 99 bp, Homo sapiens
gcagattttaatttcagtgactgaattaaaaggtgtcaagaagctcagaatggtggatttcgccttcacagtgtggcagagcttccctgagaggattgt

SEQ ID NO: 877566 - DNA, 99 bp, Homo sapiens
gcacctccagtcaccatacacaggttacctatactcatttcttggctccaattactccagagtttgtcatcctcatagcataacttatttgttttgact

SEQ ID NO: 877567 - DNA, 99 bp, Homo sapiens
gtgacagagtgagatcccgtctgttgtcgagttccgtgtggtcagtgctcctgtctactccggtgtgttttttaatctttgtgcataaaagcgccctgt

SEQ ID NO: 877568 - DNA, 99 bp, Homo sapiens
ccggagatcttcctggcgtaacgggaggaggtttcagtcaactcatctccctttaaaacttcagtaccatcaaattcacgggtctgatttctctttact

SEQ ID NO: 877569 - DNA, 98 bp, Homo sapiens
tgatatttgcctttagtgcactcttctccttcacagtaaagtggctgaatgtgaaagatgttgcagaagtgttccagaagtggctgaagatagaagga

SEQ ID NO: 877570 - DNA, 100 bp, Homo sapiens
aagtggaacctaataattgggtatggcatttttaccatgatttcattgacctcctttgaaatctgctttaaagccaagttgccaattattaggttccact

SEQ ID NO: 877571 - DNA, 99 bp, Homo sapiens
gtcccggcaccccgcacccgggcacacaaaaaacgggtcgcccgcgattctcagggattgatcgcctcttcaggatcccattgaagataccacgctgca

SEQ ID NO: 877572 - DNA, 99 bp, Homo sapiens
gcggattgcagccgagaacgagctcaaccaggttctgactcagaagatcttttggaagaattgctgtgctgtttgatgcagttgatcactgatattcca

SEQ ID NO: 877573 - DNA, 99 bp, Homo sapiens
tgaagactttcgacaaggaagtgaaacaccaatgcagccttaatacagatattggcagctgctgcagctgagcgagatgtggtttatttcacctttggg

SEQ ID NO: 877574 - DNA, 99 bp, Homo sapiens
caccacctcttgctccaaatcttctaacgatgacgatattcgcgctctcggtcacgctctcggtcacggtctcggtcacgatcccggtgcctctctcgt

SEQ ID NO: 877575 - DNA, 99 bp, Homo sapiens
atctgtcttttgatgaaatcaacaaagcctttgaactgatgcattctggaaagagatctgacaggatggcatctgatgactttgacatagtgattgagg

SEQ ID NO: 877576 - DNA, 99 bp, Homo sapiens
agccaacaaaatattcatggttcttgagaatggcaaacatcagcagatctcaggcagacttcaggatgtccgactcaaaaagcaaactcaaaagactga

SEQ ID NO: 877577 - DNA, 99 bp, Homo sapiens
caaatcctggcagaatttaaagtcagagctctggaatgtcacccagacaagcatcctgaaaaccccaaagctggtaatggaaaaggtggagaatcaatt

SEQ ID NO: 877578 - DNA, 103 bp, Homo sapiens
ctgctggactggatgtgacgagcccagaaccactgcctacaaaccaccctctaggagagggtggtttgtaggcagtggttctgggctcgtcacatccagtcca

SEQ ID NO: 877579 - DNA, 99 bp, Homo sapiens
ctggacccagcacggagggacttctgcagagagagtgcgcagaaggattccgggagcacagttccgccgaaagctgcatataccctcctcttatatgac

SEQ ID NO: 877580 - DNA, 115 bp, Homo sapiens
gctcattgtagcctcaaactcccaggctcaagcagtcctaccatgtcagccttcccagtagctgggaccacagggaactctaatgatccaggacaaagaagttaccctggagtat

SEQ ID NO: 877581 - DNA, 99 bp, Homo sapiens
tacgggccttctggagatgcttccgaactgtgggcaaaaatggcgggcccccagatgccgacggccctctctacctcccctacaagacgctggtctcca

SEQ ID NO: 877582 - DNA, 99 bp, Homo sapiens
aagaatccccccgaaaggaccccccagacatcccagttaccagtgtccttgaattgatagtggcttctgtttgtcagtctcatataagaactacagctc

SEQ ID NO: 877583 - DNA, 99 bp, Homo sapiens
acaattgagcaagaacaaggtgacacatattctgtctgtccacgatagtgccaggcctatgttggagtatgagcccagaggacctggtcggcccttgta

SEQ ID NO: 877584 - DNA, 99 bp, Homo sapiens
ctccactgccactacagggaagtgcatcacatgtcagatggcccactgcgtgaccttggttcagctgtccatttcctgtgaccatctcattgacaagga

SEQ ID NO: 877585 - DNA, 98 bp, Homo sapiens
gaggatccacgagtacaagcggcagctgctcaactgcctgcacgtcgtcaccctgtacaatcggcctgcttccgcgaggccaacatcccaacccactt

SEQ ID NO: 877586 - DNA, 98 bp, Homo sapiens
tcttctaagctgaataaagctgttttggaactgtcaggtacctcaaagcgtccttttggaataaatcatgggattgagcttcattcagatgtggtgga

SEQ ID NO: 877587 - DNA, 99 bp, Homo sapiens
gattctctctttgtcctcgccggcttcaagtggcaggactttaagtggttgaaatacatcgtctacaaggagagagtgatctatgccctcaacagagtc

SEQ ID NO: 877588 - DNA, 99 bp, Homo sapiens
cttagccattggcaacgagttaaatatcacccacggtcacagtgtccatgtaactaactcctggttaagaggatatggatagaaggcacatgttcaact

SEQ ID NO: 877589 - DNA, 99 bp, Homo sapiens
aaagcctggcccacacacgtggtctgtagcgacagcggcttggaagtgctctaccagagttgcgatgccatggacaatattaccaggcagaaccaattc

SEQ ID NO: 877590 - DNA, 99 bp, Homo sapiens
ggtcagctcaaacagttaatggagctgggaccttggggccagcttgcggtaagaacttgcctttagaagatcctttggttcccatcagtgtctccctct

SEQ ID NO: 877591 - DNA, 99 bp, Homo sapiens
ggaagggccaggatcgcgatcaatggtatattgaaaagtctgattcagttacaatcagtgtatggaatcacaagaagatccataagaaacaaggtgctg

SEQ ID NO: 877592 - DNA, 131 bp, Homo sapiens
accaagcatgagatctctgagatgaaccggatgatccagaggctgagagccgagattgacaatgtcaagaaacagctggagttgatcaaggatgatgaaaaagaggctgaggaaggagaggatgacagaga

SEQ ID NO: 877593 - DNA, 99 bp, Homo sapiens
ttgaccatgtgacatctgatgctgtggaacttgcaaatcgaaggcttgaaaaagataatgccaagttaaaagttacagtcaaaaagcaaatggacaaaa

SEQ ID NO: 877594 - DNA, 99 bp, Homo sapiens
tcgggccacggagaggagcagcccccggagacagcggcacagaggtgcttctgccaggcaatggtggcttgctatccgggaaatggaacaggttatgtt

SEQ ID NO: 877595 - DNA, 100 bp, Homo sapiens
ggagaaggaactccaaagacattgtcaaccgattctattcagtaccaccttcagtggtactgaatagaatcggttgacaatgtctttggagttccttctc

SEQ ID NO: 877596 - DNA, 99 bp, Homo sapiens
gctttagcatttatcacttccttccttactttgtcttggtatactacatggcaaaatgggaaaggtgaatgaaaactttgccattgatttgatagcaga

SEQ ID NO: 877597 - DNA, 99 bp, Homo sapiens
gagctcattcaaagtggcccagtatgtggtacgggaagaagaaatgggggtctgtgacagccttgggcggcgacacatgtctacctgtgccctctgtga

SEQ ID NO: 877598 - DNA, 99 bp, Homo sapiens
ggaccggagtcagaaccctccgcagagtaaaggtctgcaattaaggccttacgtcctggagggatacttgtatactctacatgcacgctttccaaggca

SEQ ID NO: 877599 - DNA, 99 bp, Homo sapiens
gagagccaaagctacatgaaagattatgttcaaacccttgttgaagtcttcagaagttgccctcatttccttccatgtcttgttcaggagctggataca

SEQ ID NO: 877600 - DNA, 99 bp, Homo sapiens
aaaacgtaatgaggatgaagattcaccaaataagctatatactttggttacctatgtacctgttaccactttcaaaatgaaactggaacgccaagctga

SEQ ID NO: 877601 - DNA, 99 bp, Homo sapiens
tgcactagcgtttcctccgacttgcatgcatcgcaactgaaaccatgaccagttggaatccaactctgtagatttgtaatcccagctacttgggaggct

SEQ ID NO: 877602 - DNA, 99 bp, Homo sapiens
atcgagaccatcccggctaaaacgcatgtagagcgcatgaagtacaggacaataaagcttcctacacatatcaccaggaggatctctttgaaagattca

SEQ ID NO: 877603 - DNA, 98 bp, Homo sapiens
aaaagtctagatcacagtggggctctaggagtccccctggctgtcctccagcttcgtgtcaaacatgccaatgaaacctcactgagtatcatgtggca

SEQ ID NO: 877604 - DNA, 98 bp, Homo sapiens
gccatttgatctcaggagaatcgttggtatttcatctgaaggaaactggggtgaagaatggggcatgggtggctacgtaaagatggccaaagaccgga

SEQ ID NO: 877605 - DNA, 99 bp, Homo sapiens
acaattctctttctcttcatattttctcacatatacaacacgattcttctaatggatgggaacatggggtatgtcgagagtaccaacgtggcaattgca

SEQ ID NO: 877606 - DNA, 151 bp, Homo sapiens
agcgccaggggcttcagcagacccagcagcagcaacagacagcagctttggtccggcaacttcaacaacagctctctagcctgtctggccctgagggagtcccctttctgaagctgtggtgcttggacgacctgctctctacattgctggg

SEQ ID NO: 877607 - DNA, 98 bp, Homo sapiens
gcaggacaccatgctgaaggccatgttcagcgggcgcatggaagtgctcaccgacagtgaaggttacaatggccaacattggaataaatggaaatcat

SEQ ID NO: 877608 - DNA, 99 bp, Homo sapiens
atccgcccgcctcggcctcccaaagcgttgggattacaggagtgagccaccgcgcccggccgatccctaaagaagtggctgacatctttaacgccccca

SEQ ID NO: 877609 - DNA, 99 bp, Homo sapiens
ctttttcttctgcccagtatttgcagcagtaacagcacagtctttccaaggttgtaccacctgattccagatggtgaaattaccagcatcaagatcaat

SEQ ID NO: 877610 - DNA, 99 bp, Homo sapiens
tactactgccgctgccaccgtggctacactctggaccccaatggcaaaacctgcagccttggaactgataatgggagagaagcaattgaaagtggggct

SEQ ID NO: 877611 - DNA, 99 bp, Homo sapiens
gggcccttctcggtggaggccgacccatccaggtactggatctccgccttcccagcggagtttgacttgaacccggagttggctgagcagatcaaggag

SEQ ID NO: 877612 - DNA, 99 bp, Homo sapiens
tttttctctccagaatatggtcaagcagaaagccttgcgagttttaaagcaaaagaggataagtgtctgatacaaacttgtacagcccatttaaaccaa

SEQ ID NO: 877613 - DNA, 122 bp, Homo sapiens
aggctttgctactcatccataatgaacttctctggaccaacttgaccgtctactggaaatctgaatgctgttatcacgattcgctaaatattgtaatggatcaaggagatacacctacacta

SEQ ID NO: 877614 - DNA, 99 bp, Homo sapiens
ctccattaaacccattaacatgcaggatcctcatctgcttcacaatggtgcttttaccagattctccagcacctctgtcctcgcggttcttgtggaagc

SEQ ID NO: 877615 - DNA, 98 bp, Homo sapiens
tgggcctgacctcgtgaacatctcccatttgaatctcgtggctttccaagaagaagtggccaagggctcattgtcatccccaagccaggccagttctc

SEQ ID NO: 877616 - DNA, 99 bp, Homo sapiens
ggggaaaagggaagtgaaaagagatctgttttcaggacgaaaaggaggttgtgctaaagggaaaggaggatcgatgcacatgtatgccaagaacttcta

SEQ ID NO: 877617 - DNA, 99 bp, Homo sapiens
tggcatctataagacttcagggattacataaacctgtgtaccatgcactgactgcgataatcgtgactcagcttacaacaccttacattcgcatcgccc

SEQ ID NO: 877618 - DNA, 98 bp, Homo sapiens
gccttcgtgggattcagaggatagcagcaacttcaaagatcgatgtgcattttgtaagcactttggagccactatcaaatgctgtgaagagaaatgta

SEQ ID NO: 877619 - DNA, 99 bp, Homo sapiens
gaaaagttgaagcaaatccaaaaagaaatacaagaacaagagacacttcttcaaggatatcaacagaaacgtgttcagttgatcatcaaatacttaaag

SEQ ID NO: 877620 - DNA, 99 bp, Homo sapiens
atggggcttaagatgtcctgcctgaaagctcacggatgattgatatccagaccaggatggctgggcgagcattggagcttctttatctgccagagaata

SEQ ID NO: 877621 - DNA, 98 bp, Homo sapiens
attcccggaccctggaagagaagagggtggctaatgattaagtacaaaattggacagctgtacatgatcagcaaacacagccatgaacagagtgaccg

SEQ ID NO: 877622 - DNA, 99 bp, Homo sapiens
gctgagaaactccttcctgcctttaacacacctactgggattccttgggcaatggtgaatttgaaaaggatgttgtacctcaggcgttgttagatcagt

SEQ ID NO: 877623 - DNA, 99 bp, Homo sapiens
ttgtggttcctaagccccgcagtgaatgttcaaagccagagcagctggttgtaacatttgtagcaggttacataggttgcagttgttctgatggatacc

SEQ ID NO: 877624 - DNA, 100 bp, Homo sapiens
gactctgctggctttggcgtatacacagtaaacggagttccctctcgaagtccaagattagttgcttctggggatgactctgtggatagtctgctgcagc

SEQ ID NO: 877625 - DNA, 99 bp, Homo sapiens
gacattgccgtcgacggcgagcccttgggccgcgtctcctttgagccacaatggtgcgcatgaatgtcctggcagatgctctcaagagtatcaacaatg

SEQ ID NO: 877626 - DNA, 99 bp, Homo sapiens
gcaggtgcttaatgcagttatggttgggcagctcatctttgggcatctccaggctccggtggttcatttctgcatcgctggctgcatttttcccaggcc

SEQ ID NO: 877627 - DNA, 99 bp, Homo sapiens
cgatgaggataacatccctccagaagatggaagacaactgttagttttgtggcttactgctgctccacccagtgtctgcagacttttgacctgctgagt

SEQ ID NO: 877628 - DNA, 99 bp, Homo sapiens
ggactccctgcacatggcggctcgggagcagcagtttcctatcctgggagcaggagagtgtgcctatttgaatgacaaaggtgccagtagtgccaggca

SEQ ID NO: 877629 - DNA, 100 bp, Homo sapiens
tcatgacagtggtcatggccgtgtgctccctgcctctcacgaggcggggtttcaccatgttgcccagactggtcttgaactcctgagcttaagcaatcca

SEQ ID NO: 877630 - DNA, 99 bp, Homo sapiens
tccttccttactttgtcttggtatactacatggcaaaatgggaaagtgatatcagtatcaagataaaagtttggaatgggagaaaaattctcaaagcct

SEQ ID NO: 877631 - DNA, 98 bp, Homo sapiens
gcaaacctgtgaacccacccgagagcaacaaagcaggcgactacagccacgtgaaggtcgaggccgaagccgtgaatcgtgccatcaccatcgccaac

SEQ ID NO: 877632 - DNA, 99 bp, Homo sapiens
tcaccacagcctcaccatcattacagcacaccacctcccgggctaaggagagtatgtaccatgccttgggctacagtaccattgtggtgttgcaggctg

SEQ ID NO: 877633 - DNA, 99 bp, Homo sapiens
cttcagttcctggaagctaaagagctcttcaggtttggtgcacctcgatttggaggaagtagggcagggcccttatctggaaagaagtttggaaaccct

SEQ ID NO: 877634 - DNA, 99 bp, Homo sapiens
tttatttgtcaacttcaccactcaggctgaacgcaagattcgtatcattatggcagagcccctgtgcccactgttgatgtctttcagatttccacaaaa

SEQ ID NO: 877635 - DNA, 99 bp, Homo sapiens
gcctgggcaacagagcgagactctgtgtggcccacagctgcagcaccagggcccgtgcctgcatctcctctgacacacccatctcctccaggtgcagca

SEQ ID NO: 877636 - DNA, 99 bp, Homo sapiens
gcgctggcagatttgcaaaagatgatcaggagccacatgcttattggacaagaccagcagtcctaggtccatcataagcacctgcttcttcaccatctc

SEQ ID NO: 877637 - DNA, 99 bp, Homo sapiens
accagggccaccaactctccaccctagacgaagcctttgaagaattaagaaacatttccccagaggagctcaaaatggagttgccggagagacagccca

SEQ ID NO: 877638 - DNA, 98 bp, Homo sapiens
caagcctctgcagaggcgctggagctgggtcagtccgccgctcaccccgcggccgcaccttcccgccttctcagcagaaaaagtcctacctggagcga

SEQ ID NO: 877639 - DNA, 99 bp, Homo sapiens
ctgtggtgtgtctagaatcagataatggcaaaactggttgaacagcggatgaagatatggaattcaaagctctaatggacctttttgaagagaagttgt

SEQ ID NO: 877640 - DNA, 99 bp, Homo sapiens
ctaccttcacacaaagaaaattgctcactttgatctcaaggaaaagcccgatggctccccagtatttattgccttcagatcctctacaaagaaaagtgt

SEQ ID NO: 877641 - DNA, 99 bp, Homo sapiens
gctcattctgcagcttgtgggcgatgccgtccacccccagttcaaggaggggtcattgccggagcctttgtgggcatcctcctgtttctcatcctcgtg

SEQ ID NO: 877642 - DNA, 98 bp, Homo sapiens
tccatttggggaaatccttcggatggtgaactcattagaatgtatgcagagaatatttccaaaatggtgggaagagaaaagcacttgagaaagatgaa

SEQ ID NO: 877643 - DNA, 99 bp, Homo sapiens
tgtcaacaacctggaattcaattggctcttgccttatttcacagacaatggccagatcatcttcccagagtcagactaccagattttctcctaccccaa

SEQ ID NO: 877644 - DNA, 99 bp, Homo sapiens
gggaggggggagcggcgttggaggccaccgtttccagatgcctgtgaggagccaccaacatttgaagctatggagctcattggtaaaccaaaaccctac

SEQ ID NO: 877645 - DNA, 98 bp, Homo sapiens
tgaagatggaggcaagcactgggtggtgatcgtggcaggttcaaatggctggtataattataggcaccagaaaaagcttgtggtgaaggggggcaaaa

SEQ ID NO: 877646 - DNA, 99 bp, Homo sapiens
tatgtccctccggaggcacattgggaaccctgaggaagatgagaatgtgcctactgctcctgatcctccaagtcaacatttacgtgggcatgggacagg

SEQ ID NO: 877647 - DNA, 99 bp, Homo sapiens
gtctctgtatatgttctgtgagatggaaaaagtggaggcagatctaactagatccaaatctcttcgtgagaaacaatcaaaggagtttttatggcaact

SEQ ID NO: 877648 - DNA, 99 bp, Homo sapiens
gagaaacccaactccatggacactgcaaatacctcacccttcaaagtaccagaaatggagttgttttttccttcaagtggaggttgtgggccggcaaac

SEQ ID NO: 877649 - DNA, 99 bp, Homo sapiens
tgtagaagaagaactacaacaagaagcagctcttattagaagtcgagaaaaaccgttggctctgattcagggcggcgactggcggcgcgatggacctga

SEQ ID NO: 877650 - DNA, 99 bp, Homo sapiens
gcgagatccgcatgaaggagctggagcggcagcagaaggagcggaagatggacagcatatgttcctgcaccctgtgaatgtgcgctgcctcgtgcggga

SEQ ID NO: 877651 - DNA, 99 bp, Homo sapiens
atgacaatagtttattattcatggagacatccgctaaaacatcaatgaatgtaaatgaaatattcatggcaatagtagagacggggtttcaccatgtta

SEQ ID NO: 877652 - DNA, 99 bp, Homo sapiens
agagattgttcctgtggagcaaagagctgcatcatgaattcaggagcatcggcttaccacccaaaagatgggaggcagaagatacccacctgagttgcc

SEQ ID NO: 877653 - DNA, 99 bp, Homo sapiens
tttctccatttggtacaatcactagtgcaaaggtggtgaagcagtattttccaatttgaagattcatttgaaggtggctcctgccacctgctaatagca

SEQ ID NO: 877654 - DNA, 99 bp, Homo sapiens
caggcattcttcatgagcatagacagtctgtgtaagaagtactccagggaaacctcccaggtattgttgcagcatctggcagtgagactgaggatgagg

SEQ ID NO: 877655 - DNA, 100 bp, Homo sapiens
tatggaggccacctgtgctacggtccgcccattgaaaatggattttattattaataaaatccattttcaatgggcggaccgtagcacaggtggcctccat

SEQ ID NO: 877656 - DNA, 99 bp, Homo sapiens
cagggtccgcgcggcttgggcacagtgccctggctcagggaccttcctgggagtgaggcaccgatgaagacgccattattagcgtccttgcctaccgca

SEQ ID NO: 877657 - DNA, 99 bp, Homo sapiens
aagaacccgccgcacccggtcctcagcgactcttctgacctccgcgcgacgtacccgccgccgccgttggctggagaatgaagagcttcgaaacttgtc

SEQ ID NO: 877658 - DNA, 99 bp, Homo sapiens
tgtgtcctccctgtgacaacgagttgaaatctgaggccatcattgaacatctctgtgccagcgagtttgaactggtcatgctgctggagtggtggtcct

SEQ ID NO: 877659 - DNA, 99 bp, Homo sapiens
aggaatcctcctcaattacaagggtgaacagtggtatagcagccactccagcctctgctgcagcagccaccctggatgtggctgttcggagaggcctgt

SEQ ID NO: 877660 - DNA, 99 bp, Homo sapiens
ccgctctgagggccccggcccctggatgcacagccccggcgctgagtcccctttacttggtaaatcacggcgagagtggaccagtcagatgcaacaggt

SEQ ID NO: 877661 - DNA, 100 bp, Homo sapiens
tcatattctacttcattcagaagatcaggtacacaatacggtaggctggttcctgtcgcgtgcatttgtgtacctgatcttctgaatgaagtagaatatg

SEQ ID NO: 877662 - DNA, 99 bp, Homo sapiens
gtgggccctgcacgagctcaaaggacactatgcaatcacccgaaaggagcgggacggtatgcgggccatcctggggtcctacgacagcgagctgacccc

SEQ ID NO: 877663 - DNA, 99 bp, Homo sapiens
atgaggatacagaaggctggaggaaacgtcagaagaagcctgagaagatgatgcacagatagagaggcaccaggacttgagaggcaccaggacttggga

SEQ ID NO: 877664 - DNA, 99 bp, Homo sapiens
gttggagcgcggaaatctggaaccgggatggcgacgtctacactgagtcggaggcgaaggcaatccctattcaacagaggaaaatgggtcaacttgctt

SEQ ID NO: 877665 - DNA, 99 bp, Homo sapiens
gaattgatctcgccaaaaaggacatctttggagccagcatcctggtggggaagaagttttaagggaacaagctggaggtgacgctactgagaactttga

SEQ ID NO: 877666 - DNA, 99 bp, Homo sapiens
cggaaggcgcgggcaggagcctggcgaggatgcaccttcccctgccttggaaagccactgaggcggctcccagctgcgttggcgacatggccgacaccc

SEQ ID NO: 877667 - DNA, 99 bp, Homo sapiens
gcacctccacatttgatgttctgtatatgttaattcctatagctaccactgacagctcaactgactgagaaggcatcttcagtttggtgagcttggctt

SEQ ID NO: 877668 - DNA, 99 bp, Homo sapiens
aagaattgactggtgacatgcagttgtccaaaagtgaaattttacgaactcaggtgtccctggccagtgtccttccacctgtccacaagcatggggaac

SEQ ID NO: 877669 - DNA, 99 bp, Homo sapiens
gggagataatagtgaggacgctgatgaaataattcagtgtgacaattgtggcattacagtccatgaagtatggtttgaagtggtgaacatggatttttc

SEQ ID NO: 877670 - DNA, 99 bp, Homo sapiens
agctttggagcagtgtattttgttgcagtgagagcagatgctggcaagaagcacttaccagacaagcaggatcacaaggcctccctggactcaatgctt

SEQ ID NO: 877671 - DNA, 98 bp, Homo sapiens
ttcatcattagcatcacaagtccatgctgctgccgttaatggagataagggtgctctacagaggctcatcgtagattcaaccaactctggtgataaca

SEQ ID NO: 877672 - DNA, 99 bp, Homo sapiens
atgaagctcctgaagccgacctgggtcaaccacaatggacccattccaacaatctcgtaaaacatggtggattactatgaagttctaggcgtgcagaga

SEQ ID NO: 877673 - DNA, 99 bp, Homo sapiens
aggtacctgcaggacccatttgtgtccattgatctcttggagcagctggggatcatggcagaatccagagaccacatttgaagtatatgttgaagtggc

SEQ ID NO: 877674 - DNA, 99 bp, Homo sapiens
gccggtgatatgatctgtcctgaatgtggcttggttgtagggctgatggagttatgagaacaatgaacacagaaaaactcctaaaaactgtaccaatta

SEQ ID NO: 877675 - DNA, 98 bp, Homo sapiens
tcacaaaagcggatgttgaaaaggtgtaattgaaaagtgatcctctcttcagagatgtcaaaaacaaacaaatccaagtctggatctcgctcttctcg

SEQ ID NO: 877676 - DNA, 98 bp, Homo sapiens
gatccagaggagtggaaggctcccccttgactaaagctgtctgctacaatgctgctgctgcacagagctgtggtcctcaggctccaacaggcctgcag

SEQ ID NO: 877677 - DNA, 99 bp, Homo sapiens
cttcctggacatgaccaactgatctgaaactcagcaccgaggctctgctccccactctgagagtgatctaccagagcaggaagaggagattctgggatc

SEQ ID NO: 877678 - DNA, 99 bp, Homo sapiens
aactttctatttgcctaaattcttcattgttggactattgtggttggcttctgttacgctaggaatatggcaaacgcagctgcattcagcctcagcgga

SEQ ID NO: 877679 - DNA, 99 bp, Homo sapiens
ctggatttccaacatttgccagagctataaaccgggtggcatgctgtgcattttcctgtagaatgatatggtttctacagtcccagctactcaggaggc

SEQ ID NO: 877680 - DNA, 99 bp, Homo sapiens
cgtggtggaggatgaggagatggaggcgtcgggcgtgagcggaaatgaggaggagatggtggaggaggctgaagacggagtcttgctctgtcgcccagg

SEQ ID NO: 877681 - DNA, 98 bp, Homo sapiens
cctctacgaaggcggctacttcaagatgtttggctgtggctccgtggcccaggttgtgctcagccggggcacccacggtggtttcctcaccatcaacc

SEQ ID NO: 877682 - DNA, 99 bp, Homo sapiens
ttcaacgccaagcagcccaccgacatggcccggaggcagcagaagagttcagatcattcaggatcaacaactccatcatctggtcaagaaaccttgtct

SEQ ID NO: 877683 - DNA, 99 bp, Homo sapiens
gatgaacatgtatggagacctggtcatggacacagtccctgaaaagagctgctggtgacagaggcggcccacgtgcgcatgctgcgggtgctgcacgac

SEQ ID NO: 877684 - DNA, 99 bp, Homo sapiens
ccacattctccaagggtgtaaaatatactgccttcatcagcaaatttttctcgttcctgggaaattttctcacttcccatagactggttacacgatcca

SEQ ID NO: 877685 - DNA, 99 bp, Homo sapiens
cataaccagctatccgggttcatcctacatttttgtgcaagagtgtactccttggatgggattctggtgtttggtttgctctttgtttgcacctgtgcc

SEQ ID NO: 877686 - DNA, 99 bp, Homo sapiens
gctggccctctgtctgcctgtgtccctgaccatggctccctgcagtaccctttaacgacggttgatgatgaagcgccggccgtgtaaatgaagatcggg

SEQ ID NO: 877687 - DNA, 98 bp, Homo sapiens
ggagcccctcctttggtgacccacagctatcccctgaggcccgacccaggactcaactaaagaagtttcttggaaaatcagtaaagagagcaaagcac

SEQ ID NO: 877688 - DNA, 99 bp, Homo sapiens
cgtgcaggagctggccccgccgcccgccctaccccccaagcagcggcagctggtaaagatgagccttccagctacatttgcacaacatgcaagcagccc

SEQ ID NO: 877689 - DNA, 99 bp, Homo sapiens
tctgggaggtggagtcagaccaggtcacattgattatgtatacgatttggtttctggcagtcctgctgaatgatccggtggatctttctgtgcaggtct

SEQ ID NO: 877690 - DNA, 99 bp, Homo sapiens
agttttgcttctactcaacctactcattcatggaaagtaggagacaagtgtatggcagtctggagtgaagatggacagctgactcttgcttgtggtggg

SEQ ID NO: 877691 - DNA, 99 bp, Homo sapiens
tggaccagttgtacctggatgacggacgagcctgtggagtgggagacacctgacctttctcaagctgagattgagcagaagatcaaggagtacaatgcc

SEQ ID NO: 877692 - DNA, 99 bp, Homo sapiens
gaattcttttagaagaagggaaaaacctcttgagatgtgactgtttccatctattttctgcttgccagggacaggagagagtggcaagagtacgtttat

SEQ ID NO: 877693 - DNA, 99 bp, Homo sapiens
aagatgaagcttccaaaatcaccatttggaaggaacagtacagagttgtacaggaggaaaaccaggaaataagatatgtggaacggagttatgtatcaa

SEQ ID NO: 877694 - DNA, 99 bp, Homo sapiens
agagggacggagggggtctctcagtaatgctggggaccctgagatcgtcaagtctcccagcgaccccaagcaataccgtgaatatggaggtgagaccat

SEQ ID NO: 877695 - DNA, 99 bp, Homo sapiens
ccagcttcctgcaggcccagagccggcatgaactctcccaacgagtcggtaatctatgccagcaattatgacaatgttagcagaccatgcagctcgtca

SEQ ID NO: 877696 - DNA, 75 bp, Homo sapiens
atgaaggccgagggcttcgtggatgccctgcaccgggtccggcagttcaaatctgaacatcaatgatgtactagg

SEQ ID NO: 877697 - DNA, 99 bp, Homo sapiens
agccgggtgaggggcgggcagcaggcgctgctgcagcactggagcgagtacatcaagtttaattggttggggtcagataagaagaggagtgacaatcaa

SEQ ID NO: 877698 - DNA, 99 bp, Homo sapiens
tagactttcagctacttgaagatagccatcagccgctacgtgactcttttctccagttaatgaaattatcaggaaggagttttcaggacctcctgccag

SEQ ID NO: 877699 - DNA, 98 bp, Homo sapiens
cgcccgtgaggatctgagagccatgtcggccagcagcctcttggagcagagtgcctggtgaagaatgtgatgggatcactagcatgtctgcggagagc

SEQ ID NO: 877700 - DNA, 99 bp, Homo sapiens
cgagcaggaggcgccatcatggcacgacctggatgatcgagatcatctgcttaatcctgaaggaaggggatccatcctggatccgctccgtgcccatct

SEQ ID NO: 877701 - DNA, 99 bp, Homo sapiens
gcagccttagccctagtgtagagtgtaaacaggaacatcgataagtagtgtaaaaacttgcacaatgaaatccgaagccaaggatggagaggaggagag

SEQ ID NO: 877702 - DNA, 99 bp, Homo sapiens
tgccggagcccgagtggatcggggacggagagaacacgagcccatcaggtatggcagcagccaaacttctgcatgactctggactgaatgtggttgttc

SEQ ID NO: 877703 - DNA, 99 bp, Homo sapiens
ttgaatgccaccactagtaccttccagtttgaaatatgggaaaatttggattttgacacttcatgacatgtcattatttagagcaataatgaatattga

SEQ ID NO: 877704 - DNA, 98 bp, Homo sapiens
acttgttcacccttcatgtcctcaactctggggaagttaaggtgctgcgacaagagactttggacaaaaattgacttgagtaggtgtaaggccattgt

SEQ ID NO: 877705 - DNA, 99 bp, Homo sapiens
ctccttacctgtctgatgagagctgatcttcatgccactgtgtacaagacagacattgggtgtaggacagtgaactgagaaggaagctattaagattct

SEQ ID NO: 877706 - DNA, 99 bp, Homo sapiens
ctgaggcgggcggatcacgagcccagtcccaaccggcgggaagaccggcccatcagcttctaccagctgggctccaaccagcttcagtctaacgctgta

SEQ ID NO: 877707 - DNA, 99 bp, Homo sapiens
gctgagtgaggagggagatgagccacagtacctgggtgtggatgtggaagcagccaagcgggcagaagaggaattgctccttcatgacacgaggtgctg

SEQ ID NO: 877708 - DNA, 99 bp, Homo sapiens
cactgggtacgctgtgccaaggacatgagagatggctttagaagaaaaagtttctactcttcccattatgcgagagagcggtctccttataaaagggac

SEQ ID NO: 877709 - DNA, 99 bp, Homo sapiens
agagagccttgggccagagttccaggggctctgggagtggctgccaggcatctatcgagctgtgcctattcgagtcaatccaagagtgagtaatgtgaa

SEQ ID NO: 877710 - DNA, 99 bp, Homo sapiens
aatggttgctgttgcctcagagagtagcatcatcttgtggagtgttcaggatgggggaagtggaagtgaaattgaggttggagcaatcactgaagaaac

SEQ ID NO: 877711 - DNA, 99 bp, Homo sapiens
gaaaactcacatcaggaagcctcagtacctcagccttttcaggagccaaaaaaacaaatacaaacaaacaaaaaaatacccagagaaaaaactttcctt

SEQ ID NO: 877712 - DNA, 99 bp, Homo sapiens
ggaacgccctctttttaaaaaagacagagggagttacaaagcgtttggcagaaaagaatgactttgtgatcttcctgtttacattgatgacaagtaaga

SEQ ID NO: 877713 - DNA, 99 bp, Homo sapiens
ctccgccaccgtgcacatccgaatggatcaaacgcctactccaactagattcctgaagaactgtgaggaggtgggactcttcaatgaactagctagctc

SEQ ID NO: 877714 - DNA, 110 bp, Homo sapiens
ctgaacagatttcctgcccggggccctcatggacggttggatcagggccgaaggtgatgtgtccaatctagatcccaacttctcatttgaaggcaccaaactggatgtgg

SEQ ID NO: 877715 - DNA, 99 bp, Homo sapiens
acaggtctcctggagatgaaatgctgtcccaaccttactggttttcggctttgtgagaaaccttaccatcaaacacgatggccagcaacgttaccaaca

SEQ ID NO: 877716 - DNA, 100 bp, Homo sapiens
gaagccatgcccctcaggctggaacttgctgttgcaacattctccatgggaactcatctgcgaggagacagggcaagttccagcctgaggggcatggctt

SEQ ID NO: 877717 - DNA, 99 bp, Homo sapiens
gtgggcatgggctgagggagcagctagaactcttccagaacatcagacctctcttcatcaacaagtttcttgcctgtatccataatttgaaggaaatgg

SEQ ID NO: 877718 - DNA, 99 bp, Homo sapiens
tcagatccatgagtggtatgggaccccccactggggtggaatgtgtcttggtctccgttgtaggagaggcgaggtttgctcaaacacattataaagtgc

SEQ ID NO: 877719 - DNA, 99 bp, Homo sapiens
tcatctcctcaacatggaaactaaggaccgtataatagacgctggccccaaaggaaactactctcgatttatgaatcacagctgccagcccaactgtga

SEQ ID NO: 877720 - DNA, 99 bp, Homo sapiens
attccttatagagttattcacaatgcctccataatgaatgctgtaggctgctgtggtttacaggtacagcagttgcaaggagtttacagtttacaggaa

SEQ ID NO: 877721 - DNA, 99 bp, Homo sapiens
gggatcgtgaccgagaccgtgaccgagagcgtgaccgagagcgcgaatatcgtcatcgttagaaggtctgttgcggttctcccacttttccataagcag

SEQ ID NO: 877722 - DNA, 98 bp, Homo sapiens
caaaagctgctacttatggaagatacaaaggaagcatcagatggtgaaggagaaggagacacagaagtgatgcagcaggagacagttccagttcctgt

SEQ ID NO: 877723 - DNA, 99 bp, Homo sapiens
ggttgaatgagaaccctacttgcctaaatgaggaatgtctttcctaccatctaaaatacgaaggtttctggctggaaatcaggtattatgatgagctgt

SEQ ID NO: 877724 - DNA, 99 bp, Homo sapiens
agttctggaccccggcggaatcgggataccatgatgagtcttctgaagactgtggtcattgtgcttgataccccacagacaaatgttactcatgtaacc

SEQ ID NO: 877725 - DNA, 98 bp, Homo sapiens
ctgttgctagtctgagtcatttggaattgtgggtaaattattatgtacgatggaatccacggatgagacctcagtaatctatgccagcaattatgaca

SEQ ID NO: 877726 - DNA, 98 bp, Homo sapiens
tccagtattctccagaaggtgctaaaattgaaagtggactatttaatagctagatacttggcatatcgaaattttatgattgacacgtatcgtctaaa

SEQ ID NO: 877727 - DNA, 99 bp, Homo sapiens
gatccccaagtagggggagtcgggggagatgtccagcatacacaagctgagggagaatgtctttcaagagcatcagacccttaaggagaaggaacttga

SEQ ID NO: 877728 - DNA, 99 bp, Homo sapiens
cgaggagaggatccaggaggaggagttgcagagctcgagatgtctttttaatgctaaagaagccaaactataagaagctagaacttcaagtatatgcaa

SEQ ID NO: 877729 - DNA, 98 bp, Homo sapiens
ctctcccctattgctggctctgcagggctctgatcaagcggatccaagccatgattcccaagcaactattggatgattatccgaaatgtttcattgtg

SEQ ID NO: 877730 - DNA, 99 bp, Homo sapiens
cctccagagtagctgggattacaggtttcaggcacccgtggatgagcagtcagagagtctacagaacacgcacgacgacagcaggaacaacgcggcctc

SEQ ID NO: 877731 - DNA, 98 bp, Homo sapiens
tcttcaggctggaacaaggagaagaaccatggagactggaggaagaattcccaagccagagctttccaggaacaccagatgcattttcacaattactc

SEQ ID NO: 877732 - DNA, 99 bp, Homo sapiens
gtgctgatcactaattttatgaactccatgataaaaatagcaggattttccctgtgagatatgattgatggaagactccattctccgaagctgagaggc

SEQ ID NO: 877733 - DNA, 99 bp, Homo sapiens
gccttcaaagatcagaaacatgatttgttcatttctgagtcacaaacagcaggatacctcacagagctctgaggaacatgaatacagtgatgaagctcc

SEQ ID NO: 877734 - DNA, 99 bp, Homo sapiens
ccattctagccgaggagaacctgcccttcgccaaggagatcgtctctctcatcgaggcccaaaccgccaagctcctacagaagaagggaaaaaagagct

SEQ ID NO: 877735 - DNA, 99 bp, Homo sapiens
gtactgccctgacccttacatccagcgggaaattggattccaagatccatcaaggagcaaagaaggggttaatgaagcagaataaagctgtctgaccca

SEQ ID NO: 877736 - DNA, 99 bp, Homo sapiens
agacccaaatactattttgcatggacgctagaattggcagagggggtcgatttgggaggaaaggtgtggctataaactttgttactgaagaagacaaga

SEQ ID NO: 877737 - DNA, 103 bp, Homo sapiens
cagcctcctgagtagctgggactacagaactttttaacaacagtggctattcttttggaagcaggagcttttgtaaatgtccagcaaagcaatggtgagactg

SEQ ID NO: 877738 - DNA, 75 bp, Homo sapiens
agtattctaccaggcctggtgctggcctcctgtgatgggccttcgcactcccagtcggtcctcggtaacaccagc

SEQ ID NO: 877739 - DNA, 99 bp, Homo sapiens
aacggcacctacacttgcgaggcgtccaataagcacggccatgcgagggcgctctacgtacttgtggtctacggcacagagttcgagtacaccgactca

SEQ ID NO: 877740 - DNA, 99 bp, Homo sapiens
tcccaaagtgttgggattacagggttcggcaaaagcagaacaaatatccgatactatttttaactcaaggaaaatctgagatttatcctgaactcatgg

SEQ ID NO: 877741 - DNA, 99 bp, Homo sapiens
tttcattagatattccaagtcagttcagaagtaagcgctctaagaatcaagaaaatggaccagtttgttcgttacgagttggtcgcattatgtttcagc

SEQ ID NO: 877742 - DNA, 100 bp, Homo sapiens
actggtgaaggatggataccaaatggcccagcctacatccccaacacatattctttggggcaaatgcaggctgggccatttggtatccatccttcaccag

SEQ ID NO: 877743 - DNA, 99 bp, Homo sapiens
aacgattgggctgagcagaggacgacatgttgcttttcgtggagtctgaagatgatgagaaactgaaaaagaggaaggagcgatttgggattgtcacaa

SEQ ID NO: 877744 - DNA, 99 bp, Homo sapiens
agagagcagctgctcatcaaagcctcttacagaatgtctgaaggggacagtgtgggagaatccgtccatgggaaaccttcggtggtgtacagatttttc

SEQ ID NO: 877745 - DNA, 98 bp, Homo sapiens
aagattcttctgaattgtgctgccttggccaaaagagggcagcaggatgggtgtggaagcagtgatggcacttttggaggggaccccagataccccag

SEQ ID NO: 877746 - DNA, 99 bp, Homo sapiens
tggtttgatcacaagacgggcaaggtgtttctgcccagttttccttcatagtcagatgctctgggagctggtgctgttgggggagccccttgtggttat

SEQ ID NO: 877747 - DNA, 99 bp, Homo sapiens
ctcggactacagctggtcctaccagaccccaccctcatcacccagcagctccagctcccggaagtccagcatgtgcagagatgggggtctcactatgtt

SEQ ID NO: 877748 - DNA, 99 bp, Homo sapiens
gtggaggaaattaagcgccatcccttctttgtgaccatagactggaactttggaaattttagcattcaggtgccaggaatgcagatgggacagccagtg

SEQ ID NO: 877749 - DNA, 99 bp, Homo sapiens
ctcttcactttcctcggcaagaaatgtgtggaattgcattttgtgaaaaaagaacaagaattttctgcaaggatcatatctaagtgcactttttgctga

SEQ ID NO: 877750 - DNA, 98 bp, Homo sapiens
ggactgcaaaggccaatgttggtgctggcaaaaaggttatcaatactctggctgaccatcatcatcgtgggactgactttggtggaagtccttggtta

SEQ ID NO: 877751 - DNA, 99 bp, Homo sapiens
ggcgaagacaggcaccaaggcgaaagtggaagaccaagaaggggagggagaagagattcgattctgagtctcctactcccgggttctgcgtagagaagc

SEQ ID NO: 877752 - DNA, 98 bp, Homo sapiens
tttaataatgatagaatgaagaccacaataaaagagacctctacttagctcagcaattcttaccttggaatgggtactgttcaaaaaggaatgcccca

SEQ ID NO: 877753 - DNA, 99 bp, Homo sapiens
gccagaagaggatcgacgcctatgtcgacgagcagtattcaagtcaaacaacgttgaaatggattgggtgttgaagcatactggtccaaatagtcctga

SEQ ID NO: 877754 - DNA, 99 bp, Homo sapiens
tcactaatgtcccagaaaggacacaaatagatgtaggcagaatacctttacagaggttaaaattgggtcaacatatttcactggcacctattcacaagc

SEQ ID NO: 877755 - DNA, 98 bp, Homo sapiens
ggaggatgatttcatgtgcgatgatgaggaggactacgacctgatgttttactgtgcctggctaactatagtcgagggggtgatggtcctatgtgtcg

SEQ ID NO: 877756 - DNA, 99 bp, Homo sapiens
catccaggaccaaccttccagttctgtctgtgaacgagagaatgactaatagtagcagctccccaagccttctaaatgacagtgccaagccatattcag

SEQ ID NO: 877757 - DNA, 99 bp, Homo sapiens
aacttaggatctattttaacgtatgccttcttgggaactgccatctcctgcatcgtcataggaccatggcaaaagttataaccaccgtactgaagttcc

SEQ ID NO: 877758 - DNA, 98 bp, Homo sapiens
gcgccgctgccgaagtccgcgcgcaggtaaaataccatgaagattttgaaaaaacaaaggggagaggctttactcccgtcgtggacgatcctgtgaca

SEQ ID NO: 877759 - DNA, 99 bp, Homo sapiens
acgtactggctagacttatacttctcaaatcttaatttcctaaaggtcatcatcagatttgaaatatttaaagtggatacaaaactatttcagcaatgc

SEQ ID NO: 877760 - DNA, 99 bp, Homo sapiens
gaagagaactgtctcctggtgaccgagcacccgcctccgggcatcttcaactcggacaaggcaaaatctcagcaagttcggacctctagtacaataagg

SEQ ID NO: 877761 - DNA, 99 bp, Homo sapiens
taccagggaaacttatacaggccgcttttgagaggacaagcccagattccaaaacttatgtcaaatgtggtgctggaaaaagccatgcacaagtgcatc

SEQ ID NO: 877762 - DNA, 99 bp, Homo sapiens
ctgggatgcatcaccatggcatatgtgtggggcaaaggtcatggagatgtccgtaaggactagcctgcgcccccgtcacctccacctcacctgtgctgc

SEQ ID NO: 877763 - DNA, 99 bp, Homo sapiens
atccctctgtgcttctggaggcaaggctgcagaagatgtcaatgttactttcgaagatcaacaaaagataaacaaatttgcacggaatacaagtagaat

SEQ ID NO: 877764 - DNA, 99 bp, Homo sapiens
cctaaccaacctggctgaacagctccaaaacaaccgatttggcagtgatgaggatgatcattacaggtatagagcaccaagactcacagcattctttct

SEQ ID NO: 877765 - DNA, 125 bp, Homo sapiens
gctggaggagctccccagctggtggctggagcgaccccttgttctttggtggcgctgatgtggtgctggaaaaagccatgcacaagtgcatcttgaagcccctcaaggggcacgtggaggccatg

SEQ ID NO: 877766 - DNA, 99 bp, Homo sapiens
ccagttctgtgatgatgccaccagtgatgaggtcgtggggggtgacatcgaaggcaggattccaaactccaatcccttgtgatctgcccgcctcggcct

SEQ ID NO: 877767 - DNA, 99 bp, Homo sapiens
gagcgtgagaaccagcgcctggaggctgtcctggcgtggcggcgctctgagctggtcttctggcggtggatgtgtcggagatgtatgcagtgtgacgcc

SEQ ID NO: 877768 - DNA, 98 bp, Homo sapiens
tcgagtaccttccctgtcccatcgcaaacccaaagatccccgttcctggagattctgattgagggaaacttcgtggcttgcatgacagctattttacg

SEQ ID NO: 877769 - DNA, 99 bp, Homo sapiens
agacggccgtggttgtggggaccataactgatgatgtgcgggttcaggaggtacccaaactgaagcttctccaggcagccaccaactaccacaacgggc

SEQ ID NO: 877770 - DNA, 99 bp, Homo sapiens
tgtcaacctgctgactttatcccattattctgaaggtaaccgttggagcaattcaaccaaaggctgatttggagcaatataaaaaagctttaactgatg

SEQ ID NO: 877771 - DNA, 99 bp, Homo sapiens
ctggcaatggcctcccagtcacgtttccttttagtaccagtcctcaagccatccaacttgtccatcagatgcaggaggccgtctaatgtgttgagtgtg

SEQ ID NO: 877772 - DNA, 99 bp, Homo sapiens
ctgttaggtcacccacaccttataaaaagcagcttaatgaggaactccagcggcgctcttcagcattagctggatgaaaaagaaagtcggcgtctgttc

SEQ ID NO: 877773 - DNA, 98 bp, Homo sapiens
cagattctagtgctgagaagaaacacgtttggtttggagagtccatggatggtggttttcaggtggtgatctttgtgaagtctgtgcagcggtgcatt

SEQ ID NO: 877774 - DNA, 99 bp, Homo sapiens
tccatctacaaaagctgagtttacttctcctccttctttgttcaagactgggcttccaccgagcaggggtagaaatatttctgtcatggctcattcaaa

SEQ ID NO: 877775 - DNA, 98 bp, Homo sapiens
agagagactgccttagtggcaaggaggcaagatccaaactgagatggagactgttccagaagcaggaacacatgaagaattttcctgcaagcaaattt

SEQ ID NO: 877776 - DNA, 99 bp, Homo sapiens
aagttcccacctgctgatggtaatcaccgtgtgtttgcagtaagttgtgagatggaagtccaatgtaattttactgaaaaaaattataccttgattcca

SEQ ID NO: 877777 - DNA, 99 bp, Homo sapiens
agcggcggcgagaggatgaacaacaagttcgacgcatcaatgagctgagcaatgttcctgttcctgtcatgctaatgccagatgacttcaaagcctaca

SEQ ID NO: 877778 - DNA, 98 bp, Homo sapiens
gtctctctgctgcggcgcggggaccgctgtgctctcggcccacggtggcagtgggaacttcagctggtcttcgtcaagccacctggttgccacagtta

SEQ ID NO: 877779 - DNA, 99 bp, Homo sapiens
ccgggccgggggacccgcccgccatggccaccaagggttctccaaaaaatgtggaatcctttgcatctatgctgagacattctcctcttacacagatgg

SEQ ID NO: 877780 - DNA, 99 bp, Homo sapiens
ctttaccatctttgtggctgtgcttgccaggcctggctccagccagaagcggactcctagaagaggggagcagcaaggatggaatgacagccgtgggcc

SEQ ID NO: 877781 - DNA, 99 bp, Homo sapiens
ttcctacgtacgtccactgtagtttttgcagatacaacactagctgtagcaaagcctatgtaaatcatatgatgagatggagtctcgctctgttgccca

SEQ ID NO: 877782 - DNA, 99 bp, Homo sapiens
ttctaccctcgctcatggattctgcctgacgagttccagctctttgttgctcaggcctgatcacttgaacggacatatcaagcaggtgcacacttctga

SEQ ID NO: 877783 - DNA, 99 bp, Homo sapiens
cagcgaaatcggaaaagaaaagctgaaccatatgaaactagccaagggccaacattgcctagacaaaactcacaactacctgctcaagttcaaaatggc

SEQ ID NO: 877784 - DNA, 99 bp, Homo sapiens
ctcctgagtagctgggactacagggtgtgagatggcagacaggtttgcaggaaaccctcagaaagggggctggaggatttagccactctgtcctcccct

SEQ ID NO: 877785 - DNA, 99 bp, Homo sapiens
caagctggccaagcacaaagagcttgctccctacgatgagaactggttctacacgcgagctgttacatagcaaacttctggagacagagcgccaactag

SEQ ID NO: 877786 - DNA, 99 bp, Homo sapiens
ccagcactttgggaggccgagggtagatatagcacacctatgcctttacaacctaagtgttattcataagaagaaatactttgattctgaacttgagct

SEQ ID NO: 877787 - DNA, 99 bp, Homo sapiens
gccaactgtgggatgttcacattcatctcatttgtgcactgaattaagtctgggatgtgatcatcttccactggtgttggaagagcagagcaaactgtg

SEQ ID NO: 877788 - DNA, 99 bp, Homo sapiens
tagctctctcaatctctgtctgaactggatcataaatgacagatcaatgaactgagccatgttcaaatccctgttatgttgatgccagatgacttcaaa

SEQ ID NO: 877789 - DNA, 99 bp, Homo sapiens
ccgagggtctcctccagtagacggtacagcgaaggcagagagttcaggtcaaaatgcagatcttcgtgaaaacccttaccggcaagaccatcacccttg

SEQ ID NO: 877790 - DNA, 99 bp, Homo sapiens
ggggagggacaggcatcttgggcagttatgcgttcaacagtcttgctgataaattctccatccacttctggtcttctacatacacaatgaaactttcca

SEQ ID NO: 877791 - DNA, 99 bp, Homo sapiens
tgagagctacaacttggagaatggaaaagaaccattgaagcttgagagaaaagcccccaaaagcagctattcagtgttatgtgccaagaaccttgcaaa

SEQ ID NO: 877792 - DNA, 98 bp, Homo sapiens
acaccagcagctgtcagacctgcacaagtgatgtcttggttcgtgtccccactgctttctggaattatgtctggaattttattcttcctggttcgtgc

SEQ ID NO: 877793 - DNA, 98 bp, Homo sapiens
gcgcccgccgacccgcgccctgctccctctcagcacctgggcggacggttggaaaagagactgttcaaaccactgaggatcagattttgaagagagat

SEQ ID NO: 877794 - DNA, 99 bp, Homo sapiens
attttttccactgaggtccaggcatggtaagaggataatcaccactgtccagaaagatgtctgcatagccagccaaagactccactccttcttggatcc

SEQ ID NO: 877795 - DNA, 99 bp, Homo sapiens
ccctgagctgactgatggccagattcaagccatgttaaggcgctggtttgtggaagtggaaggaacagtgaaggtgggagatctaaaagccagacttgc

SEQ ID NO: 877796 - DNA, 99 bp, Homo sapiens
gtcgacgctgggctttcgggtcccgcgcccaggttttaaaatcaaagatgggaaaatcggagaaaattgcccttccccatggccagcttgttcatggta

SEQ ID NO: 877797 - DNA, 99 bp, Homo sapiens
cttggcatttggctttgcctttctggacacagaagtatttgtgacagacatgtagactgccaaagtgtatgggatgctttcaagggtgcatttatttca

SEQ ID NO: 877798 - DNA, 99 bp, Homo sapiens
ctaccaagatgacaaaagaagagttaaatgccctcaagtcgacaggggatgggaccctagatgctaatactggagaccgtggacagaccaataatgctg

SEQ ID NO: 877799 - DNA, 99 bp, Homo sapiens
aaggaggttcagtggacccttggagccatcctctacaggacccgctttctaccattaagtgtatgcagagaatatttccaaaatggtgggaagagaaaa

SEQ ID NO: 877800 - DNA, 99 bp, Homo sapiens
aagaaatgaagaattggaggaacagtgtgtccagcatgggagagtacatgagacgatgaagcaaagattgccaacactcctgatagctgaatgtgtgct

SEQ ID NO: 877801 - DNA, 99 bp, Homo sapiens
tctgcactctttgggtacctcactttttatgacctagaggatcaagacataatgggagcatttttagacaagccaaagatggaaaagcataatgcccag

SEQ ID NO: 877802 - DNA, 98 bp, Homo sapiens
gacaacgtctctctgccgtgaatcattcctgcagatgaaaaagtgtgacttggcagctggattggcagccaccatttgcatgtgatgttgataaactt

SEQ ID NO: 877803 - DNA, 98 bp, Homo sapiens
agaattataaagccctcgtcagaaggaattatgggaaacgcagaggcagaaaccagagataattgacgaccttgccaacctagtggagaacacagatg

SEQ ID NO: 877804 - DNA, 99 bp, Homo sapiens
aacagcccggcttattgaacacatcagaatccacacagggatcgactacaagaccaccaccatcctgctggacggccggcgcgtgaagctggagctctg

SEQ ID NO: 877805 - DNA, 99 bp, Homo sapiens
ctggactgggatttggaggatttaatacacagcagcagcagcaaactaaaaaactgattgcttatcaacgagaattccttgctttgaaagaacgtcttc

SEQ ID NO: 877806 - DNA, 98 bp, Homo sapiens
tggctcgacttctagtttttgtcttatttcaggcagctctgtccagtggagtgacccgttgccagagtgcagaggctctacacagagaacagagggag

SEQ ID NO: 877807 - DNA, 98 bp, Homo sapiens
tttggaaagacccaggagaagccgcccaaagaactgaactctaagaaggagctgatgtggaggagcagctgagacagttcaagatgacgaccacagta

SEQ ID NO: 877808 - DNA, 99 bp, Homo sapiens
atttaggagggatccaaggactggcactcttctaataaagccaacaacgacaggaaagaagcccctggattgggttgtagagttcctgcagggggcttc

SEQ ID NO: 877809 - DNA, 150 bp, Homo sapiens
tgattctcttgtcaaaggaagcctgaccagataactcccaggaatctcgcagataatcttcacactgttgctttcattgaaacaaatgtcaccagtcggttctgattctcttgtcaaaggaagcctgaccagataactcccaggaatctc

SEQ ID NO: 877810 - DNA, 99 bp, Homo sapiens
ctgtttcttaggtgcaaatttctctggaggtaatttcacataacctccatagtagagtcctgtagcagtgcacatccgccactgtccctgatacattcc

SEQ ID NO: 877811 - DNA, 99 bp, Homo sapiens
attcttcaaggtggggttggcatcccccacatacggtcttccccagggaggtcctgaactacacagctgagaacatctgtaagtgggccttagaaaacc

SEQ ID NO: 877812 - DNA, 99 bp, Homo sapiens
gccgcctgaggaggcgagctagccgggagttacaccgccaccgccaggttgtcaatagggtgactggaaatttcaagcatgcatctcctattctgccaa

SEQ ID NO: 877813 - DNA, 99 bp, Homo sapiens
ccaaatgcacagccaagcctagcagctcgggcaaggatggtggaggcgagaacactgaggagatcttgctgggtcagaaatacaaccactctgtggact

SEQ ID NO: 877814 - DNA, 98 bp, Homo sapiens
aaaggtggctaaggacctcaacccaggagttaaaaagatcctgataacttaagtgactctctcttttccggtgatgaagaaaatgctgggactgagga

SEQ ID NO: 877815 - DNA, 99 bp, Homo sapiens
agacagctgggccggagcagccgcgggcgcccgaggggccgagcgagcgcgagcttcggcctcggctctgtaccatgaagaagggccccagtggctatg

SEQ ID NO: 877816 - DNA, 99 bp, Homo sapiens
accaatggaatcacggtttttggaacaaggattttggatgaagaagtttttgaggtcatagtgaaagtcaataatggcatcagagatttttccacctca

SEQ ID NO: 877817 - DNA, 99 bp, Homo sapiens
gaatccacccattacacccagagcagctcctctgcatagttttgatgaagcacgtaagattccaactgtagatatccttggaacagaagatcttattgt

SEQ ID NO: 877818 - DNA, 99 bp, Homo sapiens
tgactgcaattatgctatcaagaggatccgtctccccaatagtcaaggcctggccgacaacaccgttattgctaaagtaaataatgttgtgtgggacct

SEQ ID NO: 877819 - DNA, 98 bp, Homo sapiens
ctggcacttatgtcctccctggggctgtgtggtctttgaggatgtgtttgtatacttctctcgggaagaatgggagcttcttgatgatgctcagagac

SEQ ID NO: 877820 - DNA, 99 bp, Homo sapiens
gggaaaataaggatctggcatgtttctacacaacaaaacattcatggagggggaatgaacagagtatctgtcaggcaagagctgctgtgatggtttatg

SEQ ID NO: 877821 - DNA, 99 bp, Homo sapiens
ggtaacggaagtgtggcggcgttgggttgagcgggctttttggaagtttgtggcggagaggaacagctgccccctgggttcccttccatcgacatgggg

SEQ ID NO: 877822 - DNA, 99 bp, Homo sapiens
ggacatcctgaagccaatcctgcctcacgattttgatgaatgtcgatttgatattagtgtaaatgatagtgtttggtatcttcgtgctcaggatccaga

SEQ ID NO: 877823 - DNA, 99 bp, Homo sapiens
ggtgacaatgctcaaaggcaaatgacaggtactcctcagcttcagacacggcgttggcattttccaaggcaacctgggatgaggcaaagggacaaaagg

SEQ ID NO: 877824 - DNA, 99 bp, Homo sapiens
gccttgatgatttcttcagcagcatccagtgtgctgtctttccagatcagagatcctttagcactggaaagaaggttgttccaatgtgaaagtcgagtc

SEQ ID NO: 877825 - DNA, 99 bp, Homo sapiens
ccattcgccatctatcacgcacacagaaccctggccaggatcatgaagggcgattgaaaagatttataatcgcttagatacaaattgctgtggattcag

SEQ ID NO: 877826 - DNA, 99 bp, Homo sapiens
ggataatggcgacagctgagggagtttcataatagaagagcagagtttcttactatgtgaagatcttctctatggaagaatgtcattcagaggatttaa

SEQ ID NO: 877827 - DNA, 99 bp, Homo sapiens
agatctgtgagaagcttaagaagaaggacagccagatatgtgagcttaagtatggagctgacacaatgagtgacacgagttctgtaagcttggaagtga

SEQ ID NO: 877828 - DNA, 147 bp, Homo sapiens
gccacgtgcttccgcatgtcccaagagttagcaagtgcctcgcttgcagtccgtgaagtaggcacttgctaactcttgggacatgcggaagcacgtggccatgaccctgctggacacagagcagtcgtatgtggagtcgctgcgcac

SEQ ID NO: 877829 - DNA, 99 bp, Homo sapiens
ctgagcaggtctaaaaatgaaccaagaaaaacaaacgtcacacatgaagaacacacagcggtggaaaagggtcctgtagcatccacagtatcagcgttt

SEQ ID NO: 877830 - DNA, 99 bp, Homo sapiens
gagggtgttcttgacgattaatcaacagggaaactgaacagccaagactcctataacaattttaccaacaacaaccctggcaaccctcggctctctcct

SEQ ID NO: 877831 - DNA, 99 bp, Homo sapiens
gcctctggaatttagcgctcgcccagctagccgcaggtagttcctgaaatgactgagatattgaagaaaaaatgaatcaggatcatgccttaaaaagaa

SEQ ID NO: 877832 - DNA, 99 bp, Homo sapiens
tgacgaggtccgctacgtaaatccctttgcggcggaaccacgaagctgccctgagacgctcactcacgctgtggggatgtcagagagccccatcggacc

SEQ ID NO: 877833 - DNA, 99 bp, Homo sapiens
ctcagtaatgctggggaccctgagatcgtcaagtctcccagcgaccccaagcaataccggacacagctgggcaggagcggtaccggaccatcacaacag

SEQ ID NO: 877834 - DNA, 99 bp, Homo sapiens
gacactgcaaatacctcacccttcaaagtaccactgtcggaaaaggtaacagaagatggaactcgaaatcccaatgaaaaacctacccagcaaagaagc

SEQ ID NO: 877835 - DNA, 99 bp, Homo sapiens
gcctggtgctcaagactttctccgaggctgtctcctggttcggacatctatgtgacggtctcatccatggctttagcaagatcccagtgtcggaactct

SEQ ID NO: 877836 - DNA, 98 bp, Homo sapiens
gagaccgcggggacctcggagggagcccggcggcttcggtgcctggatcaaagtggaacagctgaagccatatcatgctcataaagaggaaatgataa

SEQ ID NO: 877837 - DNA, 134 bp, Homo sapiens
gacgcggcggcgcggctgccggctggatgggaagttaatgtttacggcgaagatatcaccaacggcgtgtcttccatggcggggctctgcagtggcagcttggaaacgttgagtagacttcgccgtaaacatta

SEQ ID NO: 877838 - DNA, 99 bp, Homo sapiens
tggaactgaagttaaattcacattgatttcagagtggatggtataactataggatgcagtatgtcattccaatggtaaattattctaatgtaaggaagt

SEQ ID NO: 877839 - DNA, 98 bp, Homo sapiens
tcatctgcctggggggagacgggacgctgctgtacgcttcctcgcttttccagggctgtgtggagaagattgggggctggctgaggaaaaatgtgctg

SEQ ID NO: 877840 - DNA, 99 bp, Homo sapiens
tacgggaaacgcaaaaggcaaggcatgtattgcaagaaattgctacccttctcccctgaattattataatttcccaaagtcttgttgtacctcagtgaa

SEQ ID NO: 877841 - DNA, 99 bp, Homo sapiens
atccgcagaaggggagacacattttatgttgtgtcatttcgaagggcaggatggggaagcagaatagcaaactggcccctgaagtgatggaggacctgg

SEQ ID NO: 877842 - DNA, 100 bp, Homo sapiens
acaaagacatgaatggattcccagtcaagaaatgctcagcctcttcttaaaaaattggaaggctgagcatttcttgactgggaatccattcatgtctttg

SEQ ID NO: 877843 - DNA, 99 bp, Homo sapiens
cttggatccgcgggacaagaaaattcatgcgtgtcagtatgtctacctacatcagtgtgtaagagatgtcctcagagcaagaaagctacggagtgaaca

SEQ ID NO: 877844 - DNA, 99 bp, Homo sapiens
ctgtcccatgtactgctggtatctgagtcaggcaaattctctgaagaccacgggtcctgttgtggagtaaactgttattattttaccatgcagaagaaa

SEQ ID NO: 877845 - DNA, 99 bp, Homo sapiens
ggggtggtcggcagcatggagggccccgacgatagcgaggtcacctttgcattgcactcaggtgatgtgtccaatctagatcccaacttctcatttgaa

SEQ ID NO: 877846 - DNA, 99 bp, Homo sapiens
gggggtgtttgtccagcgactccggggcctgatgaatgacatcgatttgcttgctgaaaatggtcgattaagcaatacccaaggagtcgtttctgcctt

SEQ ID NO: 877847 - DNA, 99 bp, Homo sapiens
aggagacagcgcctggaggtggagggcgcccagggccgagctgccagggccggacacctaggctgagccctcagtagagacagggtttcaccgtgttag

SEQ ID NO: 877848 - DNA, 98 bp, Homo sapiens
gattgtgtggccagtatcttacaccagaagagatgaatgcaagtgggctggaaaagacatcctggactcaacaagagatgaaggcaatgagactgaag

SEQ ID NO: 877849 - DNA, 99 bp, Homo sapiens
gcagtttagaggacttccaggccatgctatcaggaagacaatttagcatagacccagatctcctggttgatgtgaagcaaaaaatttattgccatatct

SEQ ID NO: 877850 - DNA, 99 bp, Homo sapiens
ctcgagagcctggagttaatggctggaaaagtgcttctaacgatgacgatattcgcgctctcggtcacgctctcggtcacggtctcggtcacgatcccg

SEQ ID NO: 877851 - DNA, 99 bp, Homo sapiens
gacattcctgtgttgcagttttgctatgcttttctccaaagtccattgaagacttgaacaagtgggccctatttcttgtgtctccttttatacttgaag

SEQ ID NO: 877852 - DNA, 99 bp, Homo sapiens
gaggtctccaggttgtagcagtgaagaagctgacgaggactcaggtattctttaggtgatgctagaaggcctcttcatgaaacagcagttttggtagaa

SEQ ID NO: 877853 - DNA, 99 bp, Homo sapiens
tcgcgatcttccttccggagccatgtcagaaggagtggacttgattgatatatatgctgacgaggagttcaaccaggactgtagaagcggccaggaaga

SEQ ID NO: 877854 - DNA, 99 bp, Homo sapiens
gtgcccgccaccatgcccggatggagatacacgtgaattagagcgaacaaaacaatatgtaaatgaagcttttcaagcaggggctatgacatgcctaat

SEQ ID NO: 877855 - DNA, 99 bp, Homo sapiens
acccacgaaaggcatctgtcccaagcaggagaacattgcaggtttggtgcacctcgatttggaggaagtagggcagggcccttatctggaaagaagttt

SEQ ID NO: 877856 - DNA, 99 bp, Homo sapiens
caaaggagcagccatgagggccgggcccagtcaccgaccggcaagtgtccagagaatggctgggatgaaagtacacttgaactctttttacatgaactt

SEQ ID NO: 877857 - DNA, 99 bp, Homo sapiens
acacatgtcaacactggccgaaacctccatagtcaccacttcacttcacctctttctggaaaccaggattctaccatcagaaaagaggccaaacttcta

SEQ ID NO: 877858 - DNA, 99 bp, Homo sapiens
ctaaagtctgagagagggaagtcgcctctgtgctcgtgagtgcatggggtataaggtgaccttgggaaaggtgttgaaagtgatcgtcgtcatgcggag

SEQ ID NO: 877859 - DNA, 98 bp, Homo sapiens
ctgggccgcggccgaggaggcagcgcgacctccgcacgcgtggagattggtgaaagcgtgagaggggaagatgtctacatcatccagagcggctgcgg

SEQ ID NO: 877860 - DNA, 99 bp, Homo sapiens
ttgttaagacgaactacaaccatcaccattgaatctgaaggaaaaggttccacctttgctaagctctctgatgtaaaggatggagtaaatcaagcagca

SEQ ID NO: 877861 - DNA, 99 bp, Homo sapiens
cctcccgagtagctgggactagaggtctcagcatcagaggagcccaggaggaggaccctcccgatccccagctaatgagactggacaatatgcttttgg

SEQ ID NO: 877862 - DNA, 99 bp, Homo sapiens
tgcttcagccttgatgacggccatcttcccccggctttaccctctgaacttctgatcgaaggtcatccctctccagcttgagtggatcaaagatgacaa

SEQ ID NO: 877863 - DNA, 99 bp, Homo sapiens
gagccgccaccgcaggtcgaggacggtcggactcccgcggcgggaggagcctgttcccctgaggtactaggttttgacaagcttgcatcatgcgtgagt

SEQ ID NO: 877864 - DNA, 99 bp, Homo sapiens
atcggctgcggcaacttcggggagctccgcctagttgactatattgtggagtatgactatgatgctgtacatgatgatgaattaactattcgagttgga

SEQ ID NO: 877865 - DNA, 99 bp, Homo sapiens
gggaaatccccattcccagcacagcaagacactaagggcgactaccagaaagcgctgctgtacctgtgtggtggagatgactgaagcccgacacggcct

SEQ ID NO: 877866 - DNA, 99 bp, Homo sapiens
gcagttattggcaggctgccatgacaaccaggcaatgctggatagataccgaattcttatcacaaaggcgaagctggtccgttacatttgtaagcagag

SEQ ID NO: 877867 - DNA, 98 bp, Homo sapiens
tgagctgtgggtgacagcatctaccatcgctggacagggccctcctggtcccatcctccggcttcatctaccaggggtggcctggaggccaagcagat

SEQ ID NO: 877868 - DNA, 99 bp, Homo sapiens
aggagccaaacattcccaacctatccctaaagatgctgtgtctgattggtctcctatgcatgaagctgcaatccacggacatcagctgtctctgaggaa

SEQ ID NO: 877869 - DNA, 98 bp, Homo sapiens
tgcccagcagaatttgtatagagatgtgatgttggagaactacagaaacctggtctccctaggccccctcttctctcctggaggtcagccggcccctt

SEQ ID NO: 877870 - DNA, 99 bp, Homo sapiens
tgaaactctactctgtatccttttcctatggcttagtgtgtaaagatgtgttttcttatcagtaaaataggtcttcagatctgcatctggcctcttagc

SEQ ID NO: 877871 - DNA, 99 bp, Homo sapiens
cagtccgaagccaggttgctgaaggatgtgtctcacaaagataatgttaattcaagactctcgaagagaagcttcagtgcagatggatttgagatgcta

SEQ ID NO: 877872 - DNA, 99 bp, Homo sapiens
cgaggatgtgctggagcggtacaaaggttatcaggacaccccatgggagagacttcgatgactctttagaaaaatgtgaagagtatttgagcccaaggt

SEQ ID NO: 877873 - DNA, 99 bp, Homo sapiens
ccttcacctccagcttccccccggtgggcttccttccatccaggacctggagacatggaggagtcataagaacttctctccttgcggttcatcttgaag

SEQ ID NO: 877874 - DNA, 98 bp, Homo sapiens
ggccatgaccatctggattctcaaagtcatgaacttcacaattgtatgcagtggaactgatgaagaccctgatgataaaaacgcaccctttcggcaac

SEQ ID NO: 877875 - DNA, 99 bp, Homo sapiens
gaacatgacgcaggtgcaggtgtctcttctcgccctggcggggaagctcaaactttggaacaaataccgaatttccaacattccatcactaatattcct

SEQ ID NO: 877876 - DNA, 99 bp, Homo sapiens
ggtggagcactctccgggtgatggggaacgtggtgtggccgtcgaggtccgtgtgcagaggagagatgaatggagagtatagaggcagaggatttggac

SEQ ID NO: 877877 - DNA, 99 bp, Homo sapiens
cggcaggctcaggtgcagccgctggctctgcgaacatcaatagatgcttatgacaactttgacaatatctcgcttgctcagcgtttggaaaaacatgaa

SEQ ID NO: 877878 - DNA, 98 bp, Homo sapiens
actgatcccctggccgttggaggagcagttccactcccatggttcaagctttgactacaaccagaattcagaggcaggcagaaggattccagtgctgg

SEQ ID NO: 877879 - DNA, 99 bp, Homo sapiens
aacagttgttgcagcaagcgattcaggcaggaaactgcatatcttctggtttacatgaagatggagtgctaatggaaatgcccaaaaccttcagagatt

SEQ ID NO: 877880 - DNA, 99 bp, Homo sapiens
ctggaaaatggagcagacctggacgaggttaagtagcctgtcttctctgggagattctgcaccagagcgcaagtccccttcccaccatcgccagccttc

SEQ ID NO: 877881 - DNA, 98 bp, Homo sapiens
tgtcctcggagcgcggtccctgtattggtctcctgctcctagaggctcctcctcagccatcctggccgtgctcagtcatctgaccagctgacctccgt

SEQ ID NO: 877882 - DNA, 99 bp, Homo sapiens
cgctgctcatcgtttgcgacgttccctcagcctctgcccaaagaaagaaggaggtgaatacatcaagacctggaggccacggtacttcctgctgaagag

SEQ ID NO: 877883 - DNA, 99 bp, Homo sapiens
gaagggggcagcgccgagtcggagggggcgaagattgacgccagtaagaacgaggaggatgaaggtggttcctctggagattaaatgtacttcacagaa

SEQ ID NO: 877884 - DNA, 99 bp, Homo sapiens
aaactctactctgtatccttttcctatggctgtgttatagactccttcaattgtttctgttccttcagtggatttagccaacactttcagctttccagg

SEQ ID NO: 877885 - DNA, 99 bp, Homo sapiens
ctgagctcaagccgcggcctcccgaagtgctgggattacagatgtgagccactgcgcctggccagattcccagccatatgaagacaccctagctggacg

SEQ ID NO: 877886 - DNA, 99 bp, Homo sapiens
ctacaacttattcctgtccggagacagcctaagggatccagctggggaaaaccgtgcattacctgcccatcctgttcatcgaccagctcagcaaccgcg

SEQ ID NO: 877887 - DNA, 99 bp, Homo sapiens
tggcagaaatctgaaaatgcccctggggagacacatgcacaagacaggccgcaagcttcttatcattgggaccactagccgcaaagatgtccttcagga

SEQ ID NO: 877888 - DNA, 98 bp, Homo sapiens
cgggcttttaggaagaaggaatggaggctttgaaatgagctgcttcagaaagagcaaaactattcagatgacgtcttggccaacatgattagtgaacc

SEQ ID NO: 877889 - DNA, 98 bp, Homo sapiens
gggattcaacttcaatttttctgcagtggctctgggtccagccccttacttaaagctagagttgggaagacatcactgattatgtctctggtcagtga

SEQ ID NO: 877890 - DNA, 99 bp, Homo sapiens
gtcaagaaggtgccggtggtgcgagtcttcggagcgaccccggcaggcagtgctggcactcctgtcacttttaatgaaaacggagatgctcctggacgt

SEQ ID NO: 877891 - DNA, 99 bp, Homo sapiens
ggtagcttgggggataacactcaggagactggggtgtgaccaccacccggcggactccagtactatcttcaatcacctgcttcagctcgttggtaaagt

SEQ ID NO: 877892 - DNA, 98 bp, Homo sapiens
gtgcaggatccctacgtcatcgcgctctggatcctcgtggccagcttggccaagatcgctgagcttcagtcattgtctattcctggaacttaccaaga

SEQ ID NO: 877893 - DNA, 98 bp, Homo sapiens
acaaagaaacggtgtctaaatgagagtgaattactggaactgaaacggcagcagcaagagcaagaaagagccaaaatccaccagactgaacacaggag

SEQ ID NO: 877894 - DNA, 99 bp, Homo sapiens
aaatcgaaaatatgatgaactctatttttaagggtatatttgttcatagataccgagcatgtaacttctaatgccagcgatagtgaaagtagttaccgt

SEQ ID NO: 877895 - DNA, 99 bp, Homo sapiens
cccgtcctgtggtagctggagccctgtcttccccacctccctttcttgaagtacagatgtcaaaaaacggcttatttctgacgctaaatggttcctgtg

SEQ ID NO: 877896 - DNA, 99 bp, Homo sapiens
gccaagtcagccacctggacggttattcagcttctcaaggctggaaaagcgaaggaagtttcctacaatgcactagcctcacacataatctcagaggat

SEQ ID NO: 877897 - DNA, 98 bp, Homo sapiens
tcaacttcaagaagggatggatgtcgatcttggacgagcctggagagtgggcatccccaccatcagatggtgcggggcagagggggactacaacgtca

SEQ ID NO: 877898 - DNA, 99 bp, Homo sapiens
gtccagaaatcttgatgcatgtatctgaaaagaaaatttctgtttcatgtgaagaattccgatttggtactttcaatggagtctcgctctgtcacccag

SEQ ID NO: 877899 - DNA, 99 bp, Homo sapiens
cgcgagcacagccaaaaattcttcctgggacacaacgacgacattatcagggcggctgctggcatatcacagagatgaggttctcaaaatgcaaagcag

SEQ ID NO: 877900 - DNA, 99 bp, Homo sapiens
tacagttcattttttgcttggtttggaaaaatttcattagagatcctgtttgaccaaactcagagatcaattaaggcacagcttcagaactttgttaaa

SEQ ID NO: 877901 - DNA, 99 bp, Homo sapiens
cagacacgggtgaatgctgctaaaaacaagactggggctgctcccatcattgatgtggtgcgatcgggccagctcttccgaggctccagcctgcttttc

SEQ ID NO: 877902 - DNA, 99 bp, Homo sapiens
cccgggagttagcagagtgtggtcaccagcaaactgggcaaagaattcattgtggtcccacgagcgagcagatacctgtaattccagcattttgggagg

SEQ ID NO: 877903 - DNA, 99 bp, Homo sapiens
ctatgttaacagcatccttataccaggagtaggaggaaagacacgactggaaaagcaattcaaggtgggctaccctaatgttggtaagagttcaacaat

SEQ ID NO: 877904 - DNA, 99 bp, Homo sapiens
ataaaggagagcgccaaaccattactgatgatgtggaggttaacagctatctttctggaccagttactctccacaagaaaattcacacaaccacagtgc

SEQ ID NO: 877905 - DNA, 98 bp, Homo sapiens
tttgcccaccttccctacagatatcaagaatacttcagtcaccaacgtgccaaatatggtgcttggatgaagctgaaaagacactaagaccttctgtg

SEQ ID NO: 877906 - DNA, 99 bp, Homo sapiens
gcaaacttgggccaaaggacagttagaagacagtagatctcaggaaacaggctcgacagctggaaaatgaacttgacctgaaactagtttccttcagca

SEQ ID NO: 877907 - DNA, 99 bp, Homo sapiens
tatcactgagctagtgaactatttggcaaatgacttaagtgagtttatggtcgaggagcacgagctgcggaaggagaggatccaggaggattacaacga

SEQ ID NO: 877908 - DNA, 99 bp, Homo sapiens
ttgcctttgttacatttgcagatgatcagttggctggggaacagaccagggaattggtggatttggagaagagccgggaattaaatcacagctaatgaa

SEQ ID NO: 877909 - DNA, 99 bp, Homo sapiens
tttcctccgctcgattggttctactgtgggtctggactgatctccatgtcctgttgtggggcttttacagcctttggctaagggagaacattgagcaat

SEQ ID NO: 877910 - DNA, 98 bp, Homo sapiens
attccagcttcggaacaagagaccctggtgacaatccttacccttccaaggaggacacccctaccagcagtctggactcactttcctccccgtctccc

SEQ ID NO: 877911 - DNA, 98 bp, Homo sapiens
ggcaaggcagccagactgcatttagcccagagtccttattttatgttgtttggaagattatgccaaactttaggaggaggacttcatccaacccagca

SEQ ID NO: 877912 - DNA, 98 bp, Homo sapiens
agggagccacctccgggcgcagaggcctacatcccacagagatacccagacaacaggatcgtctcgtccaaggatgaagtgatcaaagtccgaacaga

SEQ ID NO: 877913 - DNA, 99 bp, Homo sapiens
ctcctgataattcatttgtgggtggacagaaaagctttgaaatactgattgcagattcatttcaaagtagatttaacacatttcaggatctggtgttta

SEQ ID NO: 877914 - DNA, 99 bp, Homo sapiens
gggcagtaaaagcatctactgggggacatcctgttgtgaagcgggctacattgagagacctcagctgattcgagcaaaagtgccaattgtgaagttcag

SEQ ID NO: 877915 - DNA, 99 bp, Homo sapiens
atgtcatacattcatatctgtgtaaaggattgcaagagaagttcttcaagaggaaacccaaagtccttggggaggaacagacaaggagctgaggctagt

SEQ ID NO: 877916 - DNA, 99 bp, Homo sapiens
aagaaggcttggaacccattggaaatgtccatccagttgggagctatgagtcctctgaaatgaacagcatagctgggagtcctccgtcagcatcagctc

SEQ ID NO: 877917 - DNA, 99 bp, Homo sapiens
tcctcctggcctctgtggggcggctctcacattacctccagaaaggctgcaggctctcacccagggatctgaaacttgcccacccttcgggatattgca

SEQ ID NO: 877918 - DNA, 98 bp, Homo sapiens
aagacttcatcctcccagacactacagaggtccagcctgatgagtgaagaggctaagcgaggagcacccaacccttggctctttgaggagccagagga

SEQ ID NO: 877919 - DNA, 99 bp, Homo sapiens
atccacttccacttaatgaataagcaacgacatgccctttgatgagctgcttgcgctctatggctacgaggcgtcagaccccatttcagaccgggagag

SEQ ID NO: 877920 - DNA, 99 bp, Homo sapiens
gaccgagagcgtgaccgagagcgcgaatatcgtcatcgttagaagatggagtctggctctgtcgcccaggctgcaatgcagtggtatgatctaggctca

SEQ ID NO: 877921 - DNA, 116 bp, Homo sapiens
ggcacggttggagacgcccttcactaccagctggcacagattggcttcaggctgcggacacaccctcatccaggatctgagcactgaagccaatctgtgccagctggtagtgaagg

SEQ ID NO: 877922 - DNA, 99 bp, Homo sapiens
cgccgccgaaggaggggcaaagctcaagatggcggacaaaacgccaggcggatctcagaaggccagttcaaagatggggtcgaggatttggtcttttgg

SEQ ID NO: 877923 - DNA, 99 bp, Homo sapiens
agtccacaagaaaacttgagggaacccaaaagaaaacgaggcagacccccttccatagctcctactggtggctattatcatggaaaactaatttttccc

SEQ ID NO: 877924 - DNA, 98 bp, Homo sapiens
tgccatgccgggattcacggagagagacattttaaatccaaaggatgtgattagtgtccagctggaagacactacctcttgcaaaactttttgcagcc

SEQ ID NO: 877925 - DNA, 98 bp, Homo sapiens
tggccagcagtgatccactggcccagatcgcagaggacaagccttatgcagaggatgctgaaaacgccattcaacagatgggtggccagtggcttggt

SEQ ID NO: 877926 - DNA, 99 bp, Homo sapiens
gaaccaaagaatatgaaattcatcatgaaacttgtggtggagaatgttgatgtgttaacacaaatgaggaccagctttgacaaaccagaccagatggct

SEQ ID NO: 877927 - DNA, 99 bp, Homo sapiens
cggcgcgcggccgggctggcgatggaagatggaaggaaggagcgcagcgattccctataaggagcccctgctggtgcaccagaactaccgggggccatc

SEQ ID NO: 877928 - DNA, 99 bp, Homo sapiens
ttgttttttctacctgttgacgtgtcaagcactaactgctaaagaattacctccaaagccattgtcaagaccacagcagtcatctgcaccagtccagct

SEQ ID NO: 877929 - DNA, 99 bp, Homo sapiens
ctgtgagagtgtcctacgaccatacaaactaaatttacagaaaaagaaaaagaagaaaaaagaaaccagcatcatcatgagtctcactgtcgcccaggc

SEQ ID NO: 877930 - DNA, 99 bp, Homo sapiens
agccccttcccaggtcctcaactttgaagagatcgactacaaggagatcgaggtggaagagcccagcgacttctccgtgtcccttaaagcgtcagggaa

SEQ ID NO: 877931 - DNA, 99 bp, Homo sapiens
ccgcagaggaggagcgcagcccggcctcggagtccttcaataatgttaaacagtggctgcaggaaatagatcgttatgccagtgaaaatgtcaacaaat

SEQ ID NO: 877932 - DNA, 98 bp, Homo sapiens
cagatatggctaagcaagctcagattccattagctgctgtcatcaagccctttgccaccattccttcaaatgaggtggagtctttcattttggatcag

SEQ ID NO: 877933 - DNA, 98 bp, Homo sapiens
aagaacaagaagtaggcattgaccccttgtccagttactctaacaagtctggagctactctgacctacgacactctccggtttgctgagtttgaagat

SEQ ID NO: 877934 - DNA, 99 bp, Homo sapiens
ggtaatcaccgtgtgtttgcagtaagttgtgagatggccaatggaagcactgttgtgaagaacttatgaaaattgagattatgtcaccacggaaaccac

SEQ ID NO: 877935 - DNA, 98 bp, Homo sapiens
ctccagcagtcttcccgcttcagcctcctgcctgagcctcccaagtagctaggactagaggtaagaatgattgatgttggctgatattggagtgctca

SEQ ID NO: 877936 - DNA, 99 bp, Homo sapiens
ctgtttaggaagtggtatcatgagagatatagcccacttagaaatcacagaattacatgaacgacagccttcgcaccgacgtcttcgtgcggttccagc

SEQ ID NO: 877937 - DNA, 99 bp, Homo sapiens
ttcggcctctggcgtgcctgccatgacgtcatagctctgcggaggtggaagttggggagctttgagaacactcgtgaaactgctcaggccatcaagggt

SEQ ID NO: 877938 - DNA, 99 bp, Homo sapiens
acaaacagtaccaaacagaattctgtgttgctgttggagcagatttcttctctgtgtagcaagaaacctctgtagaggagcaggatgcaaccgacaggc

SEQ ID NO: 877939 - DNA, 99 bp, Homo sapiens
gttcaagaccagcctgggcaacataaacagagaatgtcagtatccaataggatgccagtggaattccctgacgattccatccatgcggctctgctggag

SEQ ID NO: 877940 - DNA, 99 bp, Homo sapiens
cagttcttccacaccaccagtgaggcgcttggttccttacttctagagtctggaatatttaaaaaggggtcccttcagtgttgtacgacgatgtatcaa

SEQ ID NO: 877941 - DNA, 135 bp, Homo sapiens
caacatctctctgatgaccctgggagttccttgcactgcactggctggatctgcatgcatttggatctgtgtgccttgtttctccttagctcagctataaggttatgtctctttagctctgcgatgagcagtgca

SEQ ID NO: 877942 - DNA, 98 bp, Homo sapiens
atgaaagacattcaggatcaacttgaacgaatatttctggagcagcagccaagctggacagatgacctgcctctctgccacctctctggggttggctc

SEQ ID NO: 877943 - DNA, 99 bp, Homo sapiens
tgcgggactgcggcggcgccggcctccggggagaaacgtatgggattgtgctggatgcgggttcttctcacacaagtttatacatctataagtggccag

SEQ ID NO: 877944 - DNA, 99 bp, Homo sapiens
cctaaagtgctgggattacaggttcagcgaactattgccaaacagattcagatggtccggcaagttggtaaaggccgatatggagaagtatggatgggc

SEQ ID NO: 877945 - DNA, 99 bp, Homo sapiens
gggccagggccgcactccggagactcgcggttgctacgcgcaccatggctggaggtttgatttcctctgcatgcctgtcttccatccgcgtttcaagag

SEQ ID NO: 877946 - DNA, 99 bp, Homo sapiens
cacatacgtccagagtgggtacttgtctgtacgcttcacccgaacagttggaaggatctgagtatgatgccaagatttggatcatacagcagatgtcca

SEQ ID NO: 877947 - DNA, 98 bp, Homo sapiens
tcacatccgatgcaccctttttgtcagattatcaggatgagggatgatgatgatgatccttttatgaacactagttctttaagaagaaatagaagata

SEQ ID NO: 877948 - DNA, 151 bp, Homo sapiens
cctcaacgctgtcacaactggggccaagctctttaaatttggcactggcatccactcttccaaaactgtggcagaagcaccttgggcagaagcattcatatcttcctcaacgctgtcacaactggggccaagctctttaaatttggcactg

SEQ ID NO: 877949 - DNA, 99 bp, Homo sapiens
gaaacacgcctgtgatccaggattatccactgatttatgaaattattttttgggaaaacacttcaaatgctgaggcacggagtgtgaatgtgaagacac

SEQ ID NO: 877950 - DNA, 99 bp, Homo sapiens
gatggtacaaaagagtctttggaggatgcggctttgatgggtccggcactgttggcaccaggtcaccaggacccgcttcagcacaaggaatgtcatcaa

SEQ ID NO: 877951 - DNA, 99 bp, Homo sapiens
tgaaaccacttctctacatcccatctcaatcagaattactagattttctctcaaactacgagtggaagatagatgataagcctgtaaaaattgacaagt

SEQ ID NO: 877952 - DNA, 99 bp, Homo sapiens
agcctctttcccatcctactgcagacgttatcggatgaatcggatgaggttggtgttcgaggaagagacattgttgttcttggtgtggagaagaagtca

SEQ ID NO: 877953 - DNA, 98 bp, Homo sapiens
ccatggccgccgccgatgccgagtcctcctgcatatgcccaagaggattgggagtggaatggacaccagcagaagcaccacagttattcctgtagaga

SEQ ID NO: 877954 - DNA, 99 bp, Homo sapiens
ttctttttaatgcattaaagcacatgagtattgggaaagggtcgttgtggtgcatagacccagagtatagacaaaatctaattcaggctttgaaaaaga

SEQ ID NO: 877955 - DNA, 99 bp, Homo sapiens
gaagaagaaacgggccgcgaaccgcagtatcatgctggccaagaagatcatcattaaggacggaggcacgggagagtcccgtattctcagagtaaaagt

SEQ ID NO: 877956 - DNA, 99 bp, Homo sapiens
cgacggtcagtgcgcacgttgtaatcagctgaggccatgtcaggagacggagccacggagcagggatttagtgcaagaagaagaacagttgatggaaga

SEQ ID NO: 877957 - DNA, 99 bp, Homo sapiens
tctccttcgcagccgcgcaaaaaaaagcaacttatgactctcatctctgctgcacgagaatatgagatagagttcatctatgcgatctcacctggattg

SEQ ID NO: 877958 - DNA, 99 bp, Homo sapiens
tccgaacccaaatcctgagtccaaacactcaagatggaatactctgaagatagtaactccgagccaaatgtggatttggaaaatcagtactataattcc

SEQ ID NO: 877959 - DNA, 99 bp, Homo sapiens
gaagaagtagagatgctggtggcagggcatgaggacagcaatggttgtatcaactatgaagcctttggctatgggctgctttgtctaggaatggcctat

SEQ ID NO: 877960 - DNA, 98 bp, Homo sapiens
tttttatacatcagctattacttttgtttctcaacgtggaaaggtttactcgacaaaggcaggcacattgcaagcaacccgtgccttgatggtggttg

SEQ ID NO: 877961 - DNA, 99 bp, Homo sapiens
tgaagtatgtgtggagcgcctcgggcctgctcatggtggctgtccccatcatcactgccactggctactcagagtcagtctattatcctcccagtccac

SEQ ID NO: 877962 - DNA, 99 bp, Homo sapiens
acagccctttctcaatagaggggacagaatccaggtgcgaaaagtaccacctctcaagacccctgtaaaagagcccaacagtgaaaatgtagatatcag

SEQ ID NO: 877963 - DNA, 99 bp, Homo sapiens
tgaaatgaaatgatggccacgcgtcggactggtctgtctgagggagatggtgacaagctcaaggcctgcgagtgccttaatacgtcctggtcgttttga

SEQ ID NO: 877964 - DNA, 98 bp, Homo sapiens
agcggtggtttggacgccggcggagacgcgggcgagccaggctatgatgaccttaatcctgattggaggctctctactgagaagagaaaaaaaatcaa

SEQ ID NO: 877965 - DNA, 99 bp, Homo sapiens
cacagatcaccctgggaatcctcatctccactcagcgggcccagataccccagaatcttccatgctccgtcacactgcagccaggcccagaggatacag

SEQ ID NO: 877966 - DNA, 99 bp, Homo sapiens
aagctgatcttcaactcctggcctcaagggatcctcccgcttcagcctcccaaagcattgggcttacagatttggactgagcaacaaatttgaatctga

SEQ ID NO: 877967 - DNA, 98 bp, Homo sapiens
tgacttcagagacactgccaagcagccttagccctagtgtagagtgagaagtgtaaggctagaggatttaccgtgattgtggatggcagaaaatcaca

SEQ ID NO: 877968 - DNA, 99 bp, Homo sapiens
gacactccccagggcagaaatagcgaccatggcgaggactgagcagggggaggaacatttaagctgatggaagtggaagtggaagttgctgtacattgg

SEQ ID NO: 877969 - DNA, 98 bp, Homo sapiens
gagaacaaggagctcctggtgcttgaccccgaggccttcaccattttagccaaggctcccagccccattgccaataccttcctccactatcgaaccag

SEQ ID NO: 877970 - DNA, 98 bp, Homo sapiens
ttctccgggctgaacagcaaattaaagataacttgcgagagtcacccttctagacttcagaccacagacaacctgctccccatgtctcctgaggagtt

SEQ ID NO: 877971 - DNA, 99 bp, Homo sapiens
attggccaacataccctcagctgtatgtgaaaggggagctggtgggaggattggatattgtgaagtctccaaaaaaagttggtgatgacattgccaagg

SEQ ID NO: 877972 - DNA, 99 bp, Homo sapiens
ccccctgtgaggaacactgaaatggatcacgacggaacccccgaaaacgaaggcgaagagactgcgcagtcagaaaactacatctcagacccaactatc

SEQ ID NO: 877973 - DNA, 99 bp, Homo sapiens
taatccttctgatgtaccagaaaagcccagggctgtgtggtctttgaggatgtgtttgtatacttctctcgggaagaatgggagcttcttgatgatgct

SEQ ID NO: 877974 - DNA, 99 bp, Homo sapiens
agaaattccacccagtatttcaagagtcacttctttacttggtgcaggaaggcagtctttgctacgtacagcaaaaggtcagacatatttccaacattt

SEQ ID NO: 877975 - DNA, 99 bp, Homo sapiens
aaattagaatcagattatatggccgcatcttcacaactccgtcttacagaggcagtttggtggttatgccaaggaagcagactacgtagcacaagccac

SEQ ID NO: 877976 - DNA, 99 bp, Homo sapiens
ttctccaagggaaggaggaggaaactgtggtgttcctttcttccagatgggaatgatgaacaaccccaatccttatggttcaccatatactcagaatcc

SEQ ID NO: 877977 - DNA, 99 bp, Homo sapiens
tggaagcttcctttttagaaagctgatggaccataactgcagccttattaaccaccaccagggtctcttgttccgaagctggaatctgtgaggtggtta

SEQ ID NO: 877978 - DNA, 99 bp, Homo sapiens
ccctctcggcagcgccccagtctccagttctgagacaccttcactcgttccttcactgggacactggtcatcccatggttttcttcataatactgtaga

SEQ ID NO: 877979 - DNA, 99 bp, Homo sapiens
ttcagatggaggacagccagaaattaaaaaagccaacagcatggtcaagtccttcttcattcggagagagcaggagattcggatgggtcagatggctat

SEQ ID NO: 877980 - DNA, 99 bp, Homo sapiens
tgaaaatgagtctgtatataaggcttcattaagcttaactgagaagtatttctctgtagagggaggcataccccgtggagtgcgctgtgcccaccaagc

SEQ ID NO: 877981 - DNA, 99 bp, Homo sapiens
acagcatctttctgaagccgggagagggcctgtagggacaatgcctgtggaagacaagtcagaccccccagaggggtctgaggaagccgcagagccccg

SEQ ID NO: 877982 - DNA, 99 bp, Homo sapiens
ctggaaaggaattgttttggcctaggatcatccagagggtctcgctgttggagttggatttggggctatagaaaagacggcatctgctacctttgagag

SEQ ID NO: 877983 - DNA, 99 bp, Homo sapiens
atggcgtcccgcgtagacgcagtggcctccaaggtgcagacagctgtgactatgaaggggacatagggcctgattacattccaacagaggaagaaagga

SEQ ID NO: 877984 - DNA, 99 bp, Homo sapiens
ttcatttagaagaaccaaatattgctttttggactgaagctcagaaaatctgggaagatggttgcctatccctcgtccaggtgaagttttgggattagt

SEQ ID NO: 877985 - DNA, 98 bp, Homo sapiens
ggacgtggcccagcgctcaggcaacccggtgctcatgggcttctctaggtagaacacctgaaggagaagctcattagccaggcccaggaagtgagccg

SEQ ID NO: 877986 - DNA, 99 bp, Homo sapiens
acttaaagagcagctgggcgaggagattgattccaaagtgaagggaatggtttttctcaaaggaaagctgggggcagacactaccgaagatggggatga

SEQ ID NO: 877987 - DNA, 99 bp, Homo sapiens
acaactctcattattaccatatggcccatggaaaagattttgcatctagaggaattgaaagtccaagcatctcattttgaaggcctaatcacaaccata

SEQ ID NO: 877988 - DNA, 99 bp, Homo sapiens
gtcgcttgaaaagactgggcttgtccttgctggtgcatgcgtcgtcggcctctgggcagcagggtgagccactgcgcctgatcaaggcatcaccgttga

SEQ ID NO: 877989 - DNA, 99 bp, Homo sapiens
ctcgcaagctcctacgaaagaaagctcatcgaggtcttcttaattatacatcatgcaccgctggtgaactcgttagctgaagtcattctgaatggtgat

SEQ ID NO: 877990 - DNA, 99 bp, Homo sapiens
accagggctcctgtggctcctgctggatgtctttggtggacttgggaaagaggttgctagaagcagcaagaaaaggccaagatgatgaagtgagaacgt

SEQ ID NO: 877991 - DNA, 99 bp, Homo sapiens
tacttgtacctcagcatcgtccgcgccgcgcgcgggcctcgcacagatcgcctgctttgggccttccatgtcgtcagacaaatttacatgtattggaga

SEQ ID NO: 877992 - DNA, 99 bp, Homo sapiens
gcagtggaggtcggccggaaggaggagaggtgctgtgctgtgtatgaagaggcagtgaagactctgccaacaggtcctaggcctacttacaagcctcca

SEQ ID NO: 877993 - DNA, 99 bp, Homo sapiens
attcttcgacaaagtccaggacctgggcagagactccaagacaagctcagccgaggtcaccatccaggcatcatgacggtgatgtcagctctgtcggtg

SEQ ID NO: 877994 - DNA, 99 bp, Homo sapiens
tggtcaaagactgggatgcttagatcaactttagctcagcaagttgtcatttacgtgctgaagcatattgacttgaggaaaacgccttccttggagttt

SEQ ID NO: 877995 - DNA, 99 bp, Homo sapiens
gggagccctgccccctgacatcggcaccctgggaagcctgcgacagcttttcttccccaacggctacgccttcaccaccggctctgacgacgccacgtg

SEQ ID NO: 877996 - DNA, 98 bp, Homo sapiens
gaaaactttgaggatgcagcactggaagaaaatggtttggctgtgataggagtatttttaaaggataaaagaatcagagtgtctcaacccttgacaag

SEQ ID NO: 877997 - DNA, 99 bp, Homo sapiens
gaatttcaagtaattgggtatcaaaccataaccagcagaccacagcattcaggcatcctgtgacgggacagttttctccagaaaatagtgaattcattc

SEQ ID NO: 877998 - DNA, 99 bp, Homo sapiens
ctcaacatctctcagagacgaaagatcagtgtgcgtgtgaccaccatggatgcagagctggagtttgccatccagcccaacaccaccgggaagcagcta

SEQ ID NO: 877999 - DNA, 99 bp, Homo sapiens
tctcaagaatgagatggattctagggtgtcttcacctgagaagcaagataaagagaatttcgtggatctggaatatgaagaccacagaatgttcaaata

SEQ ID NO: 878000 - DNA, 99 bp, Homo sapiens
agaaaatgtactcaaatctcatcagcagcgtctacatcgtaaaaaacaattagagaatgaaatgatgcggattcctggattttgtgaagggggatttaa

SEQ ID NO: 878001 - DNA, 99 bp, Homo sapiens
ttttactccgcccagaagacaacatcaggctggtggattatgtatttacagataagactggaacactcactgaaaacagcatggaattcattgaatgct

SEQ ID NO: 878002 - DNA, 99 bp, Homo sapiens
gcctgttctcgggctgtttggcgggttaaaaaatggccatactttagtaactaatcagcctaatgctttgcttatgaaaacttttaccatcattatttt

SEQ ID NO: 878003 - DNA, 99 bp, Homo sapiens
agatctcccccttcttcaagacccacgaggttacgaagtgacagtgctggtgcgggactcctccaggctgccatcagaggggccccggccggcccacgt

SEQ ID NO: 878004 - DNA, 99 bp, Homo sapiens
ggcggcccagccggggccccgaagaggacagagcccgcggccgcgccgagcgggtttctctgtttgaagaacataaggacatttctcacggcctgttgt

SEQ ID NO: 878005 - DNA, 75 bp, Homo sapiens
cggacacataacaagcagcagtgaggacaccaaaggcaagaagctcttctggctgccattagtgaaaaagacgcc

SEQ ID NO: 878006 - DNA, 99 bp, Homo sapiens
tgaccctgcgccaaggtcaggaaaccatcatgaagaaagtgaccagtgtgaaagatgcctcatcacctccctccccacgggatgagatcttcctgaccc

SEQ ID NO: 878007 - DNA, 99 bp, Homo sapiens
cgcctctgcaatcatgggtcaccaagagaggctgagagaccagggaccagttactctccacaagaaaattcacacaaccacagtgctcttcatagttca

SEQ ID NO: 878008 - DNA, 99 bp, Homo sapiens
gtgtcccttctggatggtactgatgttagtgtggacttgccagcagcagtgaggatgccagagttcatgggtttctagaagacaagttttcaactgcag

SEQ ID NO: 878009 - DNA, 99 bp, Homo sapiens
ccgctttgtaagaggcacattggcaggtaacgagcggcggcggcggcagcgggtcttgggtcctccgagagcagcagcgacagggtcttgctctgttgc

SEQ ID NO: 878010 - DNA, 99 bp, Homo sapiens
cagagcacggaccatggaagcatcttttggcagcaccagagaactgagcatctcaaaggagctgccgttatactgttctggggggttgcggtttttctg

SEQ ID NO: 878011 - DNA, 99 bp, Homo sapiens
tccactacagctgttcccagcttggttgcacttgagaaaattaatgtggcaggtaaggtactcaactgtgtggggtactacataaatcctgaaagacta

SEQ ID NO: 878012 - DNA, 98 bp, Homo sapiens
tcggcgccctttcttggcccttgttcccccaaatgtctgactctgactctcggactgagaaacgcaaggtactccaaagattcaggtttactcacgtc

SEQ ID NO: 878013 - DNA, 123 bp, Homo sapiens
ggagtcacaatcaaagaactggatctttatctggcttactttgtccacactccgggtgaaggtgctaaaggagaagatagaagctgagaagggtcgtgatgccttccccgtggctggacagaa

SEQ ID NO: 878014 - DNA, 99 bp, Homo sapiens
tgctggccccgggtggcgcctccctgcgactcctggaccaccgggcgctggtctgctcccagccggaccaggaatcaccttcaagcctatgtcgtgagg

SEQ ID NO: 878015 - DNA, 98 bp, Homo sapiens
ccttaatgggaggccccgggaggccgaggttcgggataatggggacgtttgccaggactgcattcagatggtgactgacatccagactgctgtacgga

SEQ ID NO: 878016 - DNA, 99 bp, Homo sapiens
gtggttcagagggtccagtcctgctccttctgcatggaggaggtcattctgccctttcttgggctgtgttcacgggtctcactctgtcacccaggctgg

SEQ ID NO: 878017 - DNA, 99 bp, Homo sapiens
cctcattaatggctcggcttatactggagaggtttctacaggaacacgaggaaactccacgggatggtttagacaacagtgtagcttcacctggtacag

SEQ ID NO: 878018 - DNA, 99 bp, Homo sapiens
acctactgcagccacgcgggcgagcggctgtgtggatgtcggcgaagccgcgggcgagtaatctatgccagcaattatgacaatgttagcagaccatgc

SEQ ID NO: 878019 - DNA, 99 bp, Homo sapiens
tctactcaagagtggaagttttcacagcctttctgagaaaagtctacagcattctttctctgcaggttctcttaactacagtgacttcaacagtttttt

SEQ ID NO: 878020 - DNA, 99 bp, Homo sapiens
tcgccacagctgattttggtgaatatggccagcttcccagagatgatgaggagtctgatgaggaagctgtgaagaaaaccaacaaatgtgtactagtct

SEQ ID NO: 878021 - DNA, 100 bp, Homo sapiens
agaagggacagcaaggctggtggcccacaaggtccaggtcaggagaagggagttgatccggccatagatctcccctcgccaccagccttgctgtcccttc

SEQ ID NO: 878022 - DNA, 99 bp, Homo sapiens
ggacaagtatgctgcaagtgagaacatatttaacagttctttaaggaaaaacagtagtgctctgcatagtttactgaaacgagtggtcagcacatttag

SEQ ID NO: 878023 - DNA, 99 bp, Homo sapiens
actggtgtctgcaatgctcctgtttggatctttggtcagatctgacaggatggcatctgatgactttgacatagtgattgaggccatgctggaagctcc

SEQ ID NO: 878024 - DNA, 99 bp, Homo sapiens
gcaaagagactgtctggacgtgatcttcctccgtctcaccacaaaagccagcaatgaaatcgctgctgaggctcacacccctgtaatcccagcactttg

SEQ ID NO: 878025 - DNA, 99 bp, Homo sapiens
ttctatctgtcgcgccaggaccagcaggaactggagctctgctatcgaagccctggagaagaccagctgttctcggagttctacgttggccacttggga

SEQ ID NO: 878026 - DNA, 99 bp, Homo sapiens
ggagataaaatccattgctgctaagtactccggttcccagcttctgcaaaaggtcttcaataaactcatcaggagatataagtatttggagaaggcatt

SEQ ID NO: 878027 - DNA, 99 bp, Homo sapiens
ggagttcttacaacatggcagacattgacaaaaatgaatactgcattgagggacggacttctggtcttcttcttcctaattgttccccttattgtctgt

SEQ ID NO: 878028 - DNA, 99 bp, Homo sapiens
agagacaggaggcagtagccaaacacccaggtctgaatgccattcatctagccatgatgagcaatagcctgccatgtttgctgctgctggtggccgctg

SEQ ID NO: 878029 - DNA, 99 bp, Homo sapiens
caccggcccggggagaggcaccatgagcgtgcctggatcaaagtggaacagctgaagccatatcatgctcataaagaggaaatgataaaaattaacaag

SEQ ID NO: 878030 - DNA, 99 bp, Homo sapiens
aagatcccaggtgggcgagggaatagtcagagggatcacaatctttcagctaacttattctactccgctgaaacaagccagggagctctgggcacactg

SEQ ID NO: 878031 - DNA, 99 bp, Homo sapiens
ctgcaatttccaatggccaacagagtcccctttccaggttcttatcttagagatgggcagtgtcctcgatgcattgctgtgtagcgaactgtcctcctc

SEQ ID NO: 878032 - DNA, 99 bp, Homo sapiens
ggaagatcacttgagcccaggagtttgagaacagcccgggaaatgtagcgagaccctgtcgcatcagcagacaggcgggcatgactcgaaaaggcttta

SEQ ID NO: 878033 - DNA, 99 bp, Homo sapiens
ttgaaccattctacatcccagacaaatggaagtgttatgatgcccttcgaaaaatgatcaactattgaccatatagttttttgaagaggcgcagtctac

SEQ ID NO: 878034 - DNA, 99 bp, Homo sapiens
cacctggtggaagaggcgtacctggttacacatcattttggaatgactgtatatcatctggattacgtggctgtatgttaattgaattagcattgagag

SEQ ID NO: 878035 - DNA, 99 bp, Homo sapiens
tctatatggagaacttttagaaacttgtatcattaacatcgatgttccaaataggcataaacttggaggaggcagtggagagagcatcctggtatcaca

SEQ ID NO: 878036 - DNA, 100 bp, Homo sapiens
actgcccagaagggcttaaaggtcttcgggtccaacccggcaatgactggctcagtgtagtaagggccaaaccttgatgtctacaaaattctctgggcag

SEQ ID NO: 878037 - DNA, 99 bp, Homo sapiens
gggagaagaggaatgttccctgacaatttcgttaagacaacgactgaaagacctttcattcagaagctgtttcgtcctgtggctgcagatggacagttg

SEQ ID NO: 878038 - DNA, 99 bp, Homo sapiens
ttatgatctacctaccaatcgtgaaaactatattcacaggtacccgaggattaataaagaatctttacttcctgtagcaaaggacgtgtcttactcagg

SEQ ID NO: 878039 - DNA, 98 bp, Homo sapiens
gccccgtggtttaaggttccatacccatatccttgccagcacattacagaatatttttgttgaaccttcttgagaattcagagaaactgctgagtgac

SEQ ID NO: 878040 - DNA, 99 bp, Homo sapiens
gggaagccgaccggcagaaggagcagacctttcgtctcacagaaagttctccgctcccagacatgggtccctcggcttcctgcctcggaagcgcagcag

SEQ ID NO: 878041 - DNA, 98 bp, Homo sapiens
ggcctcccaaagtgctggaattacaggttataatcaccaacagatgagtgaaggacacaggcagaaatctgaattttataaccgcacagcatctgaat

SEQ ID NO: 878042 - DNA, 99 bp, Homo sapiens
ctccaactgcgtttttaaatgtgggggtggatgaagatatttgcagttctccctggagcaacggcccttcatcttgaagcagctgaacgcctccgaggc

SEQ ID NO: 878043 - DNA, 99 bp, Homo sapiens
gttcacccgctgccgggcaccgaggaccagctcaatgacagatggactcaccctgtcacccaggttggactgcactggcctcaacctcctgagttcaag

SEQ ID NO: 878044 - DNA, 99 bp, Homo sapiens
gactacgcccgcctcccgcagaccatgttccatggcaggccagaaagcagacccagggaggatagcacatgtcttcggctacactggtgaaggcatcgt

SEQ ID NO: 878045 - DNA, 99 bp, Homo sapiens
acaatcaaaacttaactcctggatacaggaggaggaagccaagaatctggtgagcgaagccatcgcagctggcatcttcaacgacctgggctccggaag

SEQ ID NO: 878046 - DNA, 98 bp, Homo sapiens
ttgactcctgggcccaactgtgaccgatttaaactgcacataccatatgctggagagacattaaagttatctcggaaaaggaaagccaagaactggga

SEQ ID NO: 878047 - DNA, 98 bp, Homo sapiens
cagagactggcaggcctcggcctaaaggacctgagggcactcgctttgctcctgtcagtacacactcccaaacagttaaacccagctctaattccaac

SEQ ID NO: 878048 - DNA, 98 bp, Homo sapiens
atgtcctgtgactcagacctgggcacagcaaatgctgaggactcagaccggtctctgcaagagagtcttttagtcctgctatacagctgcaccttgta

SEQ ID NO: 878049 - DNA, 99 bp, Homo sapiens
gggatacagctggacaagaagattatgacagattacgccccctatcctatccgcaaacagtttatggctacaaatgatttgatgacggaactgcagaaa

SEQ ID NO: 878050 - DNA, 99 bp, Homo sapiens
tcaccatcaccatcgtcacagcagtagccatcacaagaatggtggttccttctaagaccaaaattgtgtgccacttttctactcttgtattgacctgtg

SEQ ID NO: 878051 - DNA, 99 bp, Homo sapiens
tgaccgagagcgtgaccgagagcgcgaatatcgtcatcgttagaaggtggagccgccaccaaaatgcagattttcgtgaaaacccttacggggaagacc

SEQ ID NO: 878052 - DNA, 99 bp, Homo sapiens
caggcccagccgggccctggacagtgggttgccagcgttgatgtggtggagaatgaagaggccagcgctagcatcattgttaaaatgacagactcgttc

SEQ ID NO: 878053 - DNA, 99 bp, Homo sapiens
cgcctccgaagatgggggatttctacgacccggagcacccgacccctgagttgggccatgcaggctgctgcctatatcttcattcataggaaatggaag

SEQ ID NO: 878054 - DNA, 99 bp, Homo sapiens
ttttcctaaaagactgaaatgggggcgaccattcttaggtcttgatgcagaactttattatgtgagaaatgaccttattagtcactacgctctatcctt

SEQ ID NO: 878055 - DNA, 99 bp, Homo sapiens
agttgatccagactcctttacatgatagtcttcctatcacgggcactagtgtggctctcctgttccagcaattgggcacggtggctcacgcctgtaatc

SEQ ID NO: 878056 - DNA, 109 bp, Homo sapiens
tttgtgaagcccaaggatgtggccgttcctttgctgagtattctagcctccgaaaacatctggtggttcactcagatacgtttgaaatggtttctgaagatgaagatgg

SEQ ID NO: 878057 - DNA, 99 bp, Homo sapiens
agaggagtggcctcgcccgcttggtgatgactgaaaaagggaaactgtgccactatttgtaccatcattttcaccaaaatctaaaaatgctttttatga

SEQ ID NO: 878058 - DNA, 98 bp, Homo sapiens
gtcactgaggttgcagttggcgtgaagaactctaagaaggagctgatgtggaggagcagctgagacagttcaagatgacgaccacagtagccacagac

SEQ ID NO: 878059 - DNA, 99 bp, Homo sapiens
cttcctgtcgctgacggcgactgcgggaggccaggacccagatgatgtggtaccagttggccaaagaagagcctggtgttggtgcatgtgctttggact

SEQ ID NO: 878060 - DNA, 98 bp, Homo sapiens
gggcggctgccgagaaggagggaggggaaacacaaagccggctacgcgctgcgaggactattcttgataagaaagagctcttggagtttgctcaactt

SEQ ID NO: 878061 - DNA, 99 bp, Homo sapiens
aagagattatatggcatgggcggacaaaagaagaaccagctcattactgtagcatttgtgaagtggagagtatagtgaagatgatgtaaatgaattagt

SEQ ID NO: 878062 - DNA, 99 bp, Homo sapiens
tcacgttcgcggccttctgctacatgctggcgctgctgctcactgccgcgctcatcttcttcgccatttggcactgaacagagtatctgtcaggcaaga

SEQ ID NO: 878063 - DNA, 99 bp, Homo sapiens
catggagttggctaatggatgctgcaggtgcttctaaggaaggaggtgctggagcagttgatgaagatgattttataaaagcttttacagatgtccctt

SEQ ID NO: 878064 - DNA, 99 bp, Homo sapiens
gcggcggtggcatctgcggccatggcggcgactactgccaaccccggtatataatgtttacatggcagggaggcagctgtgttctaagcggtaccggga

SEQ ID NO: 878065 - DNA, 99 bp, Homo sapiens
ggcaaatccagacagaacctttgacttggtgttgaaagtgaaatgtcatgcctctgaaaatgaaggctgtaccagtgcaggtcctcactttaatcctct

SEQ ID NO: 878066 - DNA, 98 bp, Homo sapiens
tcggccactccggtcccgacacctagcctgctggaaagaggcaaaacctgatgaattaatggattccaaattgagatgcgtatttgaaatgcccaatg

SEQ ID NO: 878067 - DNA, 99 bp, Homo sapiens
gatgttcctcccaggagacagctatatttgcccatgttattcaaggagtccttcaataatgttaaacagtggctgcaggaaatagatcgttatgccagt

SEQ ID NO: 878068 - DNA, 99 bp, Homo sapiens
ttgacatctatcattatgaattggatatcaagccagagaagtgcccgaggagagttaacaggtttggtgcacctcgatttggaggaagtagggcagggc

SEQ ID NO: 878069 - DNA, 99 bp, Homo sapiens
gtcagtggctctcttggccctcctgaaatgggaaggtattcatgtaaatcaagaattactgcaaatatctccttgtatcacagagcagttcattgagct

SEQ ID NO: 878070 - DNA, 99 bp, Homo sapiens
aagcatttaataacgtgggtgaaggcatccccctgtatgagagtgctgtgaccaggcctcacacaggtacaggtttgcagattccgccagcagcacagc

SEQ ID NO: 878071 - DNA, 100 bp, Homo sapiens
taccaaggaatctgcttttcaagtattctgccgcttctttcattaaacgtttaacagctcttcactgttggtggcatacttgaaaagcagattccttggt

SEQ ID NO: 878072 - DNA, 99 bp, Homo sapiens
acttggtgctgctagaatgcaggaacagcagtttaattagacacttcagaattttgatcacctaatgttgatttcagatgtaaaagtcaagagaagact

SEQ ID NO: 878073 - DNA, 99 bp, Homo sapiens
acaaggacagaatcaccagcactggctgaaggacactcatgaggaccatgatacttccactgagaatacagacgagtccaaccatgaccctcagtttga

SEQ ID NO: 878074 - DNA, 99 bp, Homo sapiens
tgatttctcctgaatttggaaactatttatttgtgacattatttccaaatgggaacaggcttccaaagaacagcagcctggaaaatgtgaaggtacaag

SEQ ID NO: 878075 - DNA, 99 bp, Homo sapiens
tctgaactcaacttctgaaatttacagaaacaaactacatctcagggtgaggaaaatagcagctgaatactatgacaacctccctcactacaattcctg

SEQ ID NO: 878076 - DNA, 99 bp, Homo sapiens
ccgtgagcggtggcagtcgcgaccgcgggtgcatccagtttctgcgcccagttctgggaaatgccagtgcaaagtgggtgtcattggctctatatgtga

SEQ ID NO: 878077 - DNA, 99 bp, Homo sapiens
cttcagtttccctacttgtgaaataggaagaggctgaggcaggagaatcgctgggacccaggagatggaggttattcttgagctagtaactcttcacca

SEQ ID NO: 878078 - DNA, 99 bp, Homo sapiens
caacatggcaagaccccatctctggtgaaggttgctgccacaggcgtactccaggttactgagatggaactgaagcacctgtccctccagctcactgaa

SEQ ID NO: 878079 - DNA, 99 bp, Homo sapiens
cctgctagagaagaacattaacattgttcgcaaacgtgtttcatcattacgattagcctataaggatcttgaaattcaaatgaagaaagacgaaaagat

SEQ ID NO: 878080 - DNA, 99 bp, Homo sapiens
gaggagaagcgcagcgacggcgtcgggagagcgcgcctagccggctcgcgatgtgaacgagctctatgtcgatgacccagacaaggacagcggtggcaa

SEQ ID NO: 878081 - DNA, 99 bp, Homo sapiens
gcctcggggaatggaagcggagaacgcgggcaggtgtgggttgctgaccgaggaaataaaagaatccaagtatttgataaagacactggggagtggtta

SEQ ID NO: 878082 - DNA, 98 bp, Homo sapiens
ttcagtcaatgaagcctgtgagtggacacccttttctcaaaaaggagtggaagctggacacactatgtgacttgtatgaaaccctgaccatcacccag

SEQ ID NO: 878083 - DNA, 99 bp, Homo sapiens
ctcgcccaccacgtccagcttcaccacgcggctgcacaactgcaggaacaccgtcacgctgctggaggagttcctctttagagagcaaagaccacctac

SEQ ID NO: 878084 - DNA, 99 bp, Homo sapiens
tgaactcaggcgattacaagacgattcacctgtccagcatccgaccaccgaggctggagggggagaacacccaggttatcaatactctggctgaccatc

SEQ ID NO: 878085 - DNA, 100 bp, Homo sapiens
tcgagaagaactataacatgtacatcttccctgtacactggcagttcggccagctgactgccagtgtacagggaagatgtacatgttatagttcttctcg

SEQ ID NO: 878086 - DNA, 100 bp, Homo sapiens
tttgcttagcactgaaaagtcccttctttccaatcagagatttgtggatgtgagggatcacacccattcaccattatccagaattttcagtgctaagcaa

SEQ ID NO: 878087 - DNA, 99 bp, Homo sapiens
caccaggtttttaattcatccaccaaggatatttggcagagactgggtctgtagttaaaacccatcctttatactcattcttctcactggctgtcactc

SEQ ID NO: 878088 - DNA, 98 bp, Homo sapiens
gatgatgaagaggtttcagggagcagcaagacaatcactgcagagataccaggttatgatgtgattgctcaagcccaatctgggactgggaaaacggc

SEQ ID NO: 878089 - DNA, 99 bp, Homo sapiens
tgaagcaacatgagatggtggatgaacccacaggagaagtctggcctaggaggtggaggatgcagcgcaccaagatcgcaccactgtactccaggatgg

SEQ ID NO: 878090 - DNA, 98 bp, Homo sapiens
taactatgatgcaaataaaaccggactgaaggagctgcccatgagaaatttacagggtagatgacattaatgctgataagaatatctcttctgcacag

SEQ ID NO: 878091 - DNA, 99 bp, Homo sapiens
ttgagaagctggagaataaattaattgacatgagagacctttaccaagaatggaaggaaaaagttcctgagccaatggagatcttcgtggatgatgaga

SEQ ID NO: 878092 - DNA, 98 bp, Homo sapiens
acatgtatgaatctgcaaacaatcgagatgaaaactttcggaagagaaagttgcctgtggtaagttcagttgttaaagtaaaaaaattcaatcatgat

SEQ ID NO: 878093 - DNA, 100 bp, Homo sapiens
gcttttgctgatatgcatgcatgtaccgaccttctgaagagttctgcataggtgttggccttgttcagaaggtcggtacatgcatgcatatcagcaaaag

SEQ ID NO: 878094 - DNA, 99 bp, Homo sapiens
acagtccagaaagtatttcagaaaatgttggaatgtattgcacggagcttcaggaagcagccggaagaaggcctgcggagaatggatcttggagaatgt

SEQ ID NO: 878095 - DNA, 99 bp, Homo sapiens
gagtggaatttgtccatcagcttcatggtgaaggaagagagatgagaacgctgagagtctggaaggcagttgcactcaaaagtgaagtcaccagtctgc

SEQ ID NO: 878096 - DNA, 99 bp, Homo sapiens
accagctgtatcccatatttcaaactttactgtagtgtcatcaagacatacagtttgggttagaaaagcagattttctgtgagggtcatgttttctttg

SEQ ID NO: 878097 - DNA, 100 bp, Homo sapiens
ctgatttttttgtgcagtgggcaggaagaacccatcgggcagctacacatcttgaatagctgcccgatgggttcttcctgcccactgcacaaaaaaatca

SEQ ID NO: 878098 - DNA, 98 bp, Homo sapiens
cccggcccacagtgggggtgtgcaaacccgagagaactgggacacattcagctaacgtattttagcaggtggagtgaggttgaagattcctgtgacag

SEQ ID NO: 878099 - DNA, 99 bp, Homo sapiens
cagcggcggcggcgggtgggaaatggcggagtatctggcctccatcttcggcaccgagaaagacaagaagaattcctttggctaccggaagaaaaggga

SEQ ID NO: 878100 - DNA, 99 bp, Homo sapiens
tcaaatctcctgctgtgaaccagcagaatttttgaacaggcatattggcgttcctgtgctatgatgatgggctgtgtgatagagagggcattcaaagat

SEQ ID NO: 878101 - DNA, 99 bp, Homo sapiens
taacacttgttacatgaatgccacagttcagtgtattcgttctgtgcctgaactcaaagatgcccttaaaagaaatgcactcggtgatggaaagagagc

SEQ ID NO: 878102 - DNA, 99 bp, Homo sapiens
gctacatcatttgaggaatcagaacgcaagcaaaatgcgttaggaaaatgtgatgcatgtctcagtggtgaagaacaaattggttttgagctagtggag

SEQ ID NO: 878103 - DNA, 99 bp, Homo sapiens
gacatcgcacagtaaagcttgttccgtggtcccagtgccttcagaacttgtgatctttgcagagctgtttcaacttccagcaccccctcacattgatgt

SEQ ID NO: 878104 - DNA, 99 bp, Homo sapiens
gcgatcggccgcggccgctctctgaagaacctccgagtacgagggttacacatcattttggaatgactgtatatcatctggattacgtggctgtatgtt

SEQ ID NO: 878105 - DNA, 98 bp, Homo sapiens
tcgtcttcagaaaaggctttgttaatataagagctgtccctgaggagggtattttaagcctggaatattgtgtgggtattattggtggcaaacctaaa

SEQ ID NO: 878106 - DNA, 99 bp, Homo sapiens
aagctattgctgggattttgaggaggtcttttccaatggtcaccttggaagtgaagaatatgatgttcctccccggctttctcctcctcctccagttac

SEQ ID NO: 878107 - DNA, 99 bp, Homo sapiens
gagaaggtcaaggcagtggaagatttcgccagaagtttgagtatcactactcctgaagagatgattgaaaaagccaaaggggaaactgcctatctgcca

SEQ ID NO: 878108 - DNA, 98 bp, Homo sapiens
agaaaagatacgaggctctaggagagagctattaagaatggcaaaggattgcatagcaagaaggaagtgcctatccaccgtgttgcagatatatctgg

SEQ ID NO: 878109 - DNA, 99 bp, Homo sapiens
accttgaggttcatcaggggaaggaagagcttgaggggacagtggagaagcaggagctgtgagtaccagagtgcccactggttccaacagttcttctca

SEQ ID NO: 878110 - DNA, 98 bp, Homo sapiens
tccaggcccagcctctcgaatgggcacacctgtgtaggttcgatacaagaggctgttttcctagcgtggcttgctgcctttggtaagaacatgtcgtc

SEQ ID NO: 878111 - DNA, 98 bp, Homo sapiens
agcccctaggaatctgcctgataatcgattgcattggcaatgagacaggatgctgaaatttctggaaaagacaatggaaatcaggggcaggaagagaa

SEQ ID NO: 878112 - DNA, 101 bp, Homo sapiens
gcagccagatgggccgctgggaccgctttacgcttcttcaaaccctgagtatctcagtgccagtgatggggtcctgtggctgtctgtggtctccgaggtgc

SEQ ID NO: 878113 - DNA, 101 bp, Homo sapiens
gggcgacagagcgagactccgtccttcgagtgttttcaataattttgggatcaggttttattgaaaacactcgaaggacggagtctcgctctgtcgcccag

SEQ ID NO: 878114 - DNA, 99 bp, Homo sapiens
cctgaagaagtgcaagagcagaggccttctctagaccttgccaagatggcacaggaggaacgtctgcgggggacagtgctgcccaggatggacaacagc

SEQ ID NO: 878115 - DNA, 98 bp, Homo sapiens
ttcactcccgctgtctcagcagtctacagcacggttgaagcactggacaatgccacatactttgtggatggtgtgggtcttgggggtcatcatcagcc

SEQ ID NO: 878116 - DNA, 99 bp, Homo sapiens
gccgaagaagcatcgttaaagtctctcttcaccctgccgtcatgtctaagtcagaggggttgtggaaaccagaacttcgcctggagaacagagtgcaac

SEQ ID NO: 878117 - DNA, 100 bp, Homo sapiens
ctcctctgtctctttaccccccgccgctcaccatctgagcctgctggttttgacttttcactatcctggtcatctctgtagtgatggaaggagagaagga

SEQ ID NO: 878118 - DNA, 99 bp, Homo sapiens
agcagaagtgctatgatcctacagcgctattatgattcgaaaaaccatcaaaagagatccattggcacaggaggacggtatccaactgttgaaaaacga

SEQ ID NO: 878119 - DNA, 99 bp, Homo sapiens
atagctcactacagcctgagctgtactgagctcgagggatcttcccgtctccgcctcctaagcagctgggactacagaaagttcgtcgctgcttcctgt

SEQ ID NO: 878120 - DNA, 99 bp, Homo sapiens
ggactgactggggttctgagactccctgtcccggaccgcaggtgaaataaacagcgttgttgctcacacaaagcctgtttggtagtctcttcacatgga

SEQ ID NO: 878121 - DNA, 99 bp, Homo sapiens
actgaaaatatgttttcagaggcatagaatcttcaggaaaatactggagttcctgagatctcaagggataaaacgctcctgaaggagaagaggaagcga

SEQ ID NO: 878122 - DNA, 98 bp, Homo sapiens
ggggacgaagggtgttgatcttctgaggtcactcttctccatgaggttggtcctgatgaacatgccagtagctgaggacatgacggtccacttcacct

SEQ ID NO: 878123 - DNA, 99 bp, Homo sapiens
ctgggtctcagccccgcgtacggcctttcacgagtcttcaagccttcagattggaaaggaattcctaagaagcctgaaaatgaagttgctcaaaatgga

SEQ ID NO: 878124 - DNA, 99 bp, Homo sapiens; identical to SEQ ID NO: 862884

SEQ ID NO: 878125 - DNA, 99 bp, Homo sapiens
ccctgctactttcttcattgactccaccatttcgggcggaggctgggcgggcgacggtggcaccggcgggcgcgggccgctgctgttgatgatgtagtg

SEQ ID NO: 878126 - DNA, 99 bp, Homo sapiens
caccgcatccgcgacggcgacttcgtggtgctgaaacgtgaagatgtgtttaaagcagtacaagtccagcggagaaaggtgtacaactatgagcctttg

SEQ ID NO: 878127 - DNA, 99 bp, Homo sapiens
tttggaaaccgccccacaacaagaacccacaggtttctaccttggtctgtagtcccagagtacggaaaaacaaaataaggtgagtcataaagcgaagca

SEQ ID NO: 878128 - DNA, 98 bp, Homo sapiens
tgccttgatgttcctgacccttttgtgcctgaccctactggatatcaacgagtgcttgaccctgggcctgtgcaaggacgcggagtgtgtgaatacca

SEQ ID NO: 878129 - DNA, 99 bp, Homo sapiens
ccaaggagttcaatcacttggcgtgacttcactacttttaagcaaaagatttcttaaacaattaggtctacatcctaactggcaattcgttgatgtata

SEQ ID NO: 878130 - DNA, 99 bp, Homo sapiens
cattgagatcggggtgcgagccctgctcttcggagtcttcgtgcagtatttggcagtcgtattcagagataaacccctggagctatgggatgttaggac

SEQ ID NO: 878131 - DNA, 110 bp, Homo sapiens
agatccaaaggcagggcaaggaaactggccacaagtttcccggtcctctggcgaggatcctccaaggcgtctcacatgaaccggctcagaaacgccaaaatctacgtgga

SEQ ID NO: 878132 - DNA, 98 bp, Homo sapiens
gtccctgaactctccagtgtcttcctcccaccctgtgcccaactgcttcatgagcgtcaccatgggaatcttggaatcagaccagaccagacgagtga

SEQ ID NO: 878133 - DNA, 99 bp, Homo sapiens
ggcgcaaacaagccaatcccaggaggaaaaacgtctcttcaggacagaaagtcatgttctatgtctcctcaggacacagttacctcatacaactacccc

SEQ ID NO: 878134 - DNA, 99 bp, Homo sapiens
acttctcccgcagcgacgcggctggcaagactgtttgtgttgcgggggccggacttcaaggtctcatcacaactacgtcaaggaagctagaccgagaac

SEQ ID NO: 878135 - DNA, 99 bp, Homo sapiens
taaggactggaaaagaagcattcgctacgcgggccgacccttgcagtgcctcatccagactacagtggtagtggaggccgaagcggcgggaacagctac

SEQ ID NO: 878136 - DNA, 99 bp, Homo sapiens
cccttgcagttgtccttggagtctcttactgagattcaagatacgaataatcctccgaagcaaatcacaggcaacaccaatgatacaatgtcaccacgg

SEQ ID NO: 878137 - DNA, 99 bp, Homo sapiens
gtcttttcctgctggtaaataacactgaaatgttgaaaggattgttgacaaaaggaaaaataaaaaagggaagacagagtatttggttcggtggaaagg

SEQ ID NO: 878138 - DNA, 99 bp, Homo sapiens
cagttccgggctgtcttgggcgaagtgaaactgtgtgagaagatggcccagtttgatggatcgacgagaacgtgctaggagcccagctggacgttgagg

SEQ ID NO: 878139 - DNA, 99 bp, Homo sapiens
acgtaatccagatgatatacagtcattccaaaatgatgtgtaaccccagcttggaaaatcagaccaagttggaactcgctgacagaggtctcgaagaat

SEQ ID NO: 878140 - DNA, 98 bp, Homo sapiens
gcagaggatccagtgttcaccatcctggccccggaaggtttactcctggcttgggggcattaggaagcactggaggctcttcgggaactaatggatct

SEQ ID NO: 878141 - DNA, 99 bp, Homo sapiens
gctaatgaagcagtgtgatgtagtggacagagtattggatttggaatcactgtcacttatagcactgtggtgttgggcataatcaccagcaacacccgg

SEQ ID NO: 878142 - DNA, 98 bp, Homo sapiens
tccgcttcttgaatttctctctgtaaaggagaccctggaagctgtcctgaatttcaaatactctggaggcccgggccacactgaaggatattacagga

SEQ ID NO: 878143 - DNA, 99 bp, Homo sapiens
ttttatggtgtgctttaagagccctgcagaaaaatgagaaagatcagtctaaagaaaaggagaagaaagtgaaaaaaacaattccttcctgggctaccc

SEQ ID NO: 878144 - DNA, 99 bp, Homo sapiens
catttcttcaatcatgaattctgagtcctggacagctgagttctcatcaaaggtcggggctgtggatacactggagagggctggacatggtcccacaca

SEQ ID NO: 878145 - DNA, 99 bp, Homo sapiens
ggaatctatgatgctgatggtgatggagattttgatgtggatgatgccaaagttttattagggtgaagcaagaagcatttcatttgcacatctttcttg

SEQ ID NO: 878146 - DNA, 98 bp, Homo sapiens
gtggattcaattaatgaaaaatgggaactgcttggggaattactctcacttccaccacccgatgtatggaaactgctatactttcaatgacaagaaca

SEQ ID NO: 878147 - DNA, 99 bp, Homo sapiens
aatccgtctggatcacggatgtaggaagtggtgctgaagaaaaaatcctaacagaattccgtgaagcttgccatattatacctcatgactttcacctgc

SEQ ID NO: 878148 - DNA, 98 bp, Homo sapiens
cgaaaacatgaccgctgagcccatgaggcctcaggagtgcaagtagctgatgaagtatgtcgcattttttatgacatgaaagttcgtaaatgctccac

SEQ ID NO: 878149 - DNA, 130 bp, Homo sapiens
tggtttgggagcacaagcaagcccaggcagccaaagagaagaagaagaggaggaggaggaagaagggtgtgaaggagctgtgtctgctgctgcttaaccagtccctcctgcttccatctctgaaacttct

SEQ ID NO: 878150 - DNA, 98 bp, Homo sapiens
attgctagaatcgtggatggaagcagattcactgagttcaaagccttttatggagacacattagttacaggaattcctcctgatcagcagagactgat

SEQ ID NO: 878151 - DNA, 115 bp, Homo sapiens
gtagttggaacaacatatctacacctctctaaaattgctgcctctggtggggaagtggaaggtgggtttgcaagcacatcaagaagcccatccgctccaccgtcctcagcctgga

SEQ ID NO: 878152 - DNA, 98 bp, Homo sapiens
gagctgggaagattcgaacaccgacctcgtcccggcccctgcagtccggatactcacgccagaagattgaaatcatggcaggtccagaaagtgatgcg

SEQ ID NO: 878153 - DNA, 98 bp, Homo sapiens
attcttcaagcatctgaatatgaagaccttgaacacaaacctgggagactgcaagacttctatgattccacagcagaaagtccatgagatgctgaaga

SEQ ID NO: 878154 - DNA, 98 bp, Homo sapiens
tgtgatttacctcaactggatagagtactgctcttcccgaagagcaaaggtttattcttcagtccaaggaagcaattcacagtcagctgttagagaag

SEQ ID NO: 878155 - DNA, 99 bp, Homo sapiens
aaaccagtgacatcaaggagttgaatattgttttgcctgaatttgagaaaacccacctagagcatcacataagcttaaatcgtctcagaaggacaaggt

SEQ ID NO: 878156 - DNA, 99 bp, Homo sapiens
cctcaacccagaggaatcgttactctttcagggatgttggtggtaaatgtaacgtggaggaacaagacatatgtaggtacactccttgactgcacacga

SEQ ID NO: 878157 - DNA, 98 bp, Homo sapiens
atcaaaccaagttataccttctcaacaccaccaagcttagagtcaagggtccagagaaggaggagaagttgagacaggcggtcaagcaggtgctgaag

SEQ ID NO: 878158 - DNA, 99 bp, Homo sapiens
tccaaaattttaccccctcccccctgagcccgaggtgctgacgtcgcaaaaaaattggatagcttgggcactgtttaaaggaaagttccgagaaggcat

SEQ ID NO: 878159 - DNA, 99 bp, Homo sapiens
gatccagattgaagctattcctttggccttacaaggtattcaaagcaatgagtatcccacagatcagaaatccttcgctgcctcccccagaaaaaatgt

SEQ ID NO: 878160 - DNA, 99 bp, Homo sapiens
tcctgcttctgggacagctctactgacgaagtgtgtatctcatgtccaagtggatagcagagaacttgatcgaagaaaaacattgcaagttacaatgcc

SEQ ID NO: 878161 - DNA, 99 bp, Homo sapiens; identical to SEQ ID NO: 822511

SEQ ID NO: 878162 - DNA, 98 bp, Homo sapiens
tactttggttacctatgtacctgttaccactttcaaaagaaaatatatgcagatgatgaacattcttaagccaattgcctttgatgttattcatttca

SEQ ID NO: 878163 - DNA, 99 bp, Homo sapiens
aaccctcgtgcctccctgaaccactccactgcctttaaccctcagcctcagagtcagatgcaggatagcaaaattactcagtgggaagacccaagactg

SEQ ID NO: 878164 - DNA, 99 bp, Homo sapiens
atctatgcttacggttttgagaagccttccgctattcagcagagagctattattccctgtattaaaggtacaaactgcttcatattctggaatttgatt

SEQ ID NO: 878165 - DNA, 99 bp, Homo sapiens
ctggagtccggctttaactatttctaaagttctcctctccatctgctcacttcttacagattgcaaccctggtgacttaagagattaaaattaatttgg

SEQ ID NO: 878166 - DNA, 98 bp, Homo sapiens
ttctccaggtgaaagtcatcagagcggaagggttaatggctgccgacgtcactgctccgacagttagttaatatgtgcatcaacccagatccagagaa

SEQ ID NO: 878167 - DNA, 99 bp, Homo sapiens
gggagcctactatcacgacgggaagctgtgggattgtctcaaagcttgccaggagcagattgaggcggtgctcctcaatagcctgcagcagtaccgtca

SEQ ID NO: 878168 - DNA, 99 bp, Homo sapiens
gggagagcgggcagccttccaggtggacagattcatctgaaaactacattaagatgaagacctttgaaggtttctgtgctttgcatctcgctgcaagtc

SEQ ID NO: 878169 - DNA, 99 bp, Homo sapiens
ggaggagggcagctccttagctcaagagcaagtggcccaaggcctcagaagactagaaggaagttcctggccattcagagcaagtgcaccggcacctgg

SEQ ID NO: 878170 - DNA, 99 bp, Homo sapiens
gcgtatcctctggggccgccgctcataggcacgtgaatgaaatcaacgccaccatctacctcctcaaaacttgggaagatccccatgaaaaagataaga

SEQ ID NO: 878171 - DNA, 99 bp, Homo sapiens
tgcagggctctgatcaagcggatccaagccatgattcccaaggccaagcccgcagtgcctacgtctaagctgggccaggcagaggggcgagatgcaggc

SEQ ID NO: 878172 - DNA, 99 bp, Homo sapiens
aaaaacgtcaacaacagttttacgaagtgtatgctgacttgtaaagtgaagaagccagtggtgctgcgggtgttcttttggggtagtgtctgggatcca

SEQ ID NO: 878173 - DNA, 99 bp, Homo sapiens
actgtttgtggtatattactgatcctggaataagagcctgtcccgttaattttggatttttggcaatgatgacacccaaaagagcaagaagcaccaaga

SEQ ID NO: 878174 - DNA, 99 bp, Homo sapiens
cgggtgtccctaaactagcagtttagggtgtcagccccatggctgggggttatggagtgatgggtgacgatggttctattgattatactgttcacgaag

SEQ ID NO: 878175 - DNA, 99 bp, Homo sapiens
ttccaacctgcgctggcaatctgggatcatcatcctggattcttgtaggatctctgccttgttgcaatagtaggggtccaggcagggagaaggtcccag

SEQ ID NO: 878176 - DNA, 98 bp, Homo sapiens
aggaagaagcagctgaagacggaggcagctccacactgtgaactaagtgctggagaatctggtaaaagcaccattgtgaagcagatgaggatcctgca

SEQ ID NO: 878177 - DNA, 98 bp, Homo sapiens
gaacacattatgcaaatgcttcaaaatcgtattttgaccaacgtgatttagctgatgagccatcttgatgtagctgatctctcagggatagaagatat

SEQ ID NO: 878178 - DNA, 99 bp, Homo sapiens
gtgacatcatcattgacggaggaaattctgaatatagggacaccacattttaacttctagtcatggcgaatgatcgcaggagagcacagactggaccct

SEQ ID NO: 878179 - DNA, 98 bp, Homo sapiens
gaggatgaagattcaccaaataagctatatactttggttacctatgtacctgttaccactttcaaaaacctggagtggaagatcatttatgttggctc

SEQ ID NO: 878180 - DNA, 99 bp, Homo sapiens
gaaaaagttcccatttcaactgtaccgattccaaaatctgtacaatattctgcatgatgtctctcttccttaagctccctgacttgctgctcgtccttt

SEQ ID NO: 878181 - DNA, 99 bp, Homo sapiens
caagccgctcttccccacctgcccggtgcccgaggaggcagccaagctcgtagcctgccactccgtgcggatgaccaacccggaggtgattcagaacct

SEQ ID NO: 878182 - DNA, 99 bp, Homo sapiens
ggggaccagcagctgtcgccgccgctctcagaacatccagtcatggataaaaatgagctggttcagaaggccaaactggccgagcaggctgagcgatat

SEQ ID NO: 878183 - DNA, 99 bp, Homo sapiens
aagggaagacttccagtagctccaaggaggttaagtttgtgaaagagacagacaatgaagtaagaatgcgactattgcagttcgtcactggaacctgcc

SEQ ID NO: 878184 - DNA, 99 bp, Homo sapiens
gcgtttctggcccgcttcaaggaacgggtcggctacagggagggacccaccgtagagactaaggtataaaaatggaataccccttgagtccaatcacac

SEQ ID NO: 878185 - DNA, 99 bp, Homo sapiens
cccagcttaggtccctaggtggaggaacaggggcaatgcctgccgatggtgaaggtgcctgaggagcctggtgttactcagcactgctctgctgggtgg

SEQ ID NO: 878186 - DNA, 99 bp, Homo sapiens
catgaaagtcttctaaccattccaaaatctctttcaggctcttactctctgtcagtccgcctcagccgccctgcatcctgggaccggatcagacactac

SEQ ID NO: 878187 - DNA, 99 bp, Homo sapiens
gggccccgtccgcgtgacgctcctgcctgcgcgcggccaagccatgctcggccccagacaatgggagcagccgcacattgcactccagaacagagacga

SEQ ID NO: 878188 - DNA, 99 bp, Homo sapiens
gaagacagtccctggatcaccgacagcacagacagaatccctgctaccacttcctgcctgacacagctcacttcaagaagtgcacaatgtcagaacgtg

SEQ ID NO: 878189 - DNA, 99 bp, Homo sapiens
ttacctccaaaaaagacaggggagtattaaagcttttacaaagttgatcacagtaaatggacaagaatatcatcttcaacttgtagacacagccgggca

SEQ ID NO: 878190 - DNA, 99 bp, Homo sapiens
gatacagcagagacgtcatacttggaaatggctgcaggttcagagacacagcattgttggttttgccatgtactattttacctatgacccgtggattgg

SEQ ID NO: 878191 - DNA, 116 bp, Homo sapiens
cagcaactgaggcagcggcaggctcaggtgcagccgctggtgacccagggcctggtcatcgggcagctgagcagccacttctcggaggaggtgctgctccgggccagcgtgctggt

SEQ ID NO: 878192 - DNA, 99 bp, Homo sapiens
aagcgagtcgtcaaggagttgcaggttgcgtaggaggctctgtctggtatcttgaaagaagaactatacaggactcccctcacaagttcttacatcttc

SEQ ID NO: 878193 - DNA, 99 bp, Homo sapiens
ctaggaaacatatgttacgatagccgtgctgtgattctcttgggaagaaccaatatgtttcgctttaaccatccaaaggaagccgccaagctcagggag

SEQ ID NO: 878194 - DNA, 99 bp, Homo sapiens
cgaatgcaacagcgtctgcttcggggatcacacccaaccctgtggtggcgatggcaggatcatcctctttgatagctggagtgcaatggtgtgatctca

SEQ ID NO: 878195 - DNA, 99 bp, Homo sapiens
gcagccattttgatttgaataaaaagaccctgtacaccctggtgaccaagagggattcaaaggattttaagcttgactttggcaattcccaaggcaaaa

SEQ ID NO: 878196 - DNA, 98 bp, Homo sapiens
aaggggctcctctccttgaccttcgtgctgtttctctccctggcttttggggcaagctacggaacagctttgaaaagtccagccgcatttcatgagca

SEQ ID NO: 878197 - DNA, 99 bp, Homo sapiens
tgagccattctgcggaacggcctgagaggcagcagctcaaagaagcactggaagccatgcaggtctcctctgagcctccggcctccataagacccaaaa

SEQ ID NO: 878198 - DNA, 99 bp, Homo sapiens
ggactatcattactcctccaacaccaatcatcccagacgttcaactttagttggcttaccaagagtgaagcgtgacaagtactcagtcttcaactttct

SEQ ID NO: 878199 - DNA, 99 bp, Homo sapiens
ttgctgaccaggggcttgagagctgggttctattttccctcctcaaactgactttgcagccacggagagttggagtgcctcaagcttattgcctctcaa

SEQ ID NO: 878200 - DNA, 99 bp, Homo sapiens
cccaggtattggtaggactgatcgtaggaccacggtggggatggttggatctgccttgtatttctttgtatccaaagatgattcgtccatccatgagca

SEQ ID NO: 878201 - DNA, 75 bp, Homo sapiens
tcgggtgcaatcctggagccccccagtgaggatgcacaaagcagggtcatcagaagcctctcgattcaaaagatg

SEQ ID NO: 878202 - DNA, 99 bp, Homo sapiens
gagattaccaagcccgaaagatgcattacctcctcagcacaaagcaggagggtgcatctgcccggaagactcagactcctgcagcccagccagtaccaa

SEQ ID NO: 878203 - DNA, 99 bp, Homo sapiens
aagcaaaaccagttaccactaatcttaagaaggattatatgcgtcaggcaggagaagtgacttatgcagatgctcacaagggacgcaaaaatgaagggg

SEQ ID NO: 878204 - DNA, 99 bp, Homo sapiens
cggacgccggtctctgttccgcaggatgcttattcagctgattctgaatcatcttacactaccagacctgtgtagattagcacagacttgcaaactact

SEQ ID NO: 878205 - DNA, 99 bp, Homo sapiens
acccaaggaaggcgagcggaagatttacttggcaattgaaatttgtgatggacgcctctgaccccacccagctctctgcatcctgtgtgcagctcttag

SEQ ID NO: 878206 - DNA, 115 bp, Homo sapiens
cagacggacattttggatccaagtttgttactgcagtggctacaggtgtcatggagaaactccagctgggcccagagattctgcagcgggaaaatccaaggcttatttatgccag

SEQ ID NO: 878207 - DNA, 99 bp, Homo sapiens
aataagcttcccattctcaatccttgtctcctcacctcataggagctgccatgatcctctggagccagggctgaggatttctggggtgaggtccaacta

SEQ ID NO: 878208 - DNA, 99 bp, Homo sapiens
ctaccacccagtttttcagccatattgattcctcagctctgatatgatgagccgaaggctgatatattctttctcatcaatctctgtcacggtgcggcg

SEQ ID NO: 878209 - DNA, 99 bp, Homo sapiens
acgaggggagccaagctggagtttacacaggcaaactgtcagaaaagagtagcctgggctgtctggaaatctgagtaccctcttatatatggactgatt

SEQ ID NO: 878210 - DNA, 98 bp, Homo sapiens
gtggagaaagcaatggatgaaatcaaatcccaaggtaaaagcagctgttaagtatgcccttagcgtaggctaccgccacattgattgtgctgctatct

SEQ ID NO: 878211 - DNA, 99 bp, Homo sapiens
ctcccatcctctgctagtgcttcactcaatcgcttgtattcttcctcttgagaagttcaacaagcctgcacaatgccttaactgaggttttggtcattg

SEQ ID NO: 878212 - DNA, 99 bp, Homo sapiens
gcccggctggctgactacttcatcgtggtaggctatgaccacgagaagccagagttttgccgaattgacaagcccctgtgtcacagtgaggatgagaaa

SEQ ID NO: 878213 - DNA, 98 bp, Homo sapiens
tttcccgagtacccaccagagggcgccactaaactggccaagatgcagattcacctggaagttctggggcccctgaaaacttgacattcaaggaacgc

SEQ ID NO: 878214 - DNA, 99 bp, Homo sapiens
tgaattgtgctgccttggccaaaagagggacaccatgtggcggatctttactggatcgctgctggtagaggagaagtcaagtgcccttctgcatgacct

SEQ ID NO: 878215 - DNA, 99 bp, Homo sapiens
ctgaatgctaaaatttccaaacgtctgctgcaggtcatggatgaccacgcggatcaccagcgtgttgccctggctctcctccgtcctggcaccgcccgg

SEQ ID NO: 878216 - DNA, 99 bp, Homo sapiens
aacaacagatgatgtatgcagggagtaaaaacaggctggtgcagacagcagagctcacaaaggcccccgatttctacgttgagatgaagtgggagttca

SEQ ID NO: 878217 - DNA, 99 bp, Homo sapiens
gcttctcagcgggtcaagtgcagtacctggatctcatcaaaaaggacaccagcaagctgttcaatgaggaggagcttctggaagaggtgaagaaggaat

SEQ ID NO: 878218 - DNA, 99 bp, Homo sapiens
ctccttgaagtatttggctgaggagttttcaatcccagcagacatctggtccctgggcataacagctattgaacttgcaagaggggaaccacctcattc

SEQ ID NO: 878219 - DNA, 99 bp, Homo sapiens
ttgatgaatcaagcgagactcaaagtcctcagagcaagagatgaccttatcacatacatagtggaatgtcatgggatcacccttcttccccagttcttg

SEQ ID NO: 878220 - DNA, 98 bp, Homo sapiens
aaggccctcaccagaacccaacccttggacttcagcctccagaactgagatacaactcgtcaacgaatcaaattcagtgatgacagagtatgcaagag

SEQ ID NO: 878221 - DNA, 99 bp, Homo sapiens
gtattgggtctgcaactcatccgatgcaagtatttcatacacctactgtgaaagaacacccaggttaatgcctgataaagaaagcatgtattacccacg

SEQ ID NO: 878222 - DNA, 99 bp, Homo sapiens
atttattttataccactgaaccgtgcacttcaaaatggttaagatgtgctgccttaacaatttcaggaaaagactaaaatgcttccgatgtggagcaga

SEQ ID NO: 878223 - DNA, 99 bp, Homo sapiens
ctggtgcccagccgggaactccccatcgcgttttgccagcgataatacgcctcagggaagtcgagacaacatgagtgtgattttgatctgttttccaaa

SEQ ID NO: 878224 - DNA, 98 bp, Homo sapiens
gaatgtctcagaaaaacatcggaaaccgtcaagtacctgacgcggggcaagattctgctgtgcacagatctatgccctcaacagagtcatgacagaac

SEQ ID NO: 878225 - DNA, 99 bp, Homo sapiens
gaagagtcagaggggtgaccagagagcccaacgcctggtgctcaagactttctccgagcagcagccgctcttctaaaacattcaaaccaaagaagaata

SEQ ID NO: 878226 - DNA, 99 bp, Homo sapiens
acagcagctgggaaagaagttatgcttgttggaattggtgacaaaatcagaggcatactttataggcctggcaaaaagcacgaagtgatgggtgggagc

SEQ ID NO: 878227 - DNA, 98 bp, Homo sapiens
cgcggagcccggctcccgcaccatggaggaggacgacagctacgtacaaaattggacagctgtacatgatcagcaaacacagccatgaacagagtgac

SEQ ID NO: 878228 - DNA, 99 bp, Homo sapiens
gattgtaccccacgagctgccacacggcctgcactctgcgctttgagctactgggctgtgagctgaacggtgctggagaatctggtaaaagcaccattg

SEQ ID NO: 878229 - DNA, 99 bp, Homo sapiens
gatggacaagagacgatcattctgcaagcaggcaacctgaatacagggttttggccaaattgggcgagggcacaaaataaccacttaccccttctcacc

SEQ ID NO: 878230 - DNA, 99 bp, Homo sapiens
ctggctgtggggttagaaacctttaatagagcacgctataggcagtttgtgaagcgaattggttatatgatcaggagttggtccaggtagcaatgatga

SEQ ID NO: 878231 - DNA, 98 bp, Homo sapiens
ttgtgtgttaaagtaacagatgatttagttgacatgtacttgtagacaggattcaaagcagttaagaatgtctctgccaagtcgacaaacagctatta

SEQ ID NO: 878232 - DNA, 99 bp, Homo sapiens
tggaattacaggtctttatttcttatctggagcagtacatgaccggttacttaatgtctggtggctttctagaagatgaccatagaggaccttccagat

SEQ ID NO: 878233 - DNA, 99 bp, Homo sapiens
gtaaagaaggaaaaagcagtaaagccagaggaaggtttctaagcatgaattgaggaacagaagaagcagagcagatgatcggagcagcatttgtttctc

SEQ ID NO: 878234 - DNA, 98 bp, Homo sapiens
taagctcagcactctctaaaggagcaacagtttacagcccttccagatacagctaccaggctccaaacaggcatgcgaggtgcctttggaaagcccca

SEQ ID NO: 878235 - DNA, 99 bp, Homo sapiens
aaaaaactgacagcttactccttgtattgattctactcttctctacaaatatagactccgttccctaccacagccttgctggaatgcaatggtgtgatc

SEQ ID NO: 878236 - DNA, 99 bp, Homo sapiens
tgctcagcaggagcttcatcaacgatatatgtcagatctaaaggttttgctgttactgctcagtgtagtcacaccttgaataagaaatggaaaaccttg

SEQ ID NO: 878237 - DNA, 99 bp, Homo sapiens
gggcgatgcttgtgaccctgcagctcctcaaagtgagcacctgcggatctgtccccagggctacacctgctgcaccagcgagatggaggagaacctggc

SEQ ID NO: 878238 - DNA, 99 bp, Homo sapiens
acagatcccatcagaggcaccccagacacaaacccttaggagaaatcttgagagtggacagcaattgtgaagatcgccagagagttctgtgtttcatca

SEQ ID NO: 878239 - DNA, 99 bp, Homo sapiens
cccgtcgtacctgatggtaggaggcagtagttccccgcttcccttccgcgggagggagagttaggtttggcagttctctaccagtggaccaatcttttc

SEQ ID NO: 878240 - DNA, 99 bp, Homo sapiens
agagatatcagatcaagaaaaagaaaaagagaaggaaaagattcctttcattttagaaggctctctcaaggttttccgtgtgtatcagggccaacagcc

SEQ ID NO: 878241 - DNA, 99 bp, Homo sapiens
gactgatccaggctggacccacgtctgtctggtgataccaggggcagagggaccactctgacaggaaaagaagatttttcagatcccctggatgcatgc

SEQ ID NO: 878242 - DNA, 99 bp, Homo sapiens
tgtacctgtgcttatattcgatccttggcacccagcctcctggacagaaataaaactgggcaaagccatgactacagtagtggtacatgtggactccaa

SEQ ID NO: 878243 - DNA, 99 bp, Homo sapiens
ggcgcttacccccgagcggctcctggagtggcagggcattgatgacggggagccttcctggctttgtcgacgtcatcaggaacctcaattctcctgcac

SEQ ID NO: 878244 - DNA, 99 bp, Homo sapiens
ccgcctcggagcggctgtacgagttgtggctgctctactacgcgcaggatattatggggatggattaaatgccattgttgtgtttgctgtctgtttcat

SEQ ID NO: 878245 - DNA, 99 bp, Homo sapiens
gtcttatccaaccttgcgctgcatccgctcgacctcgtgaagatccgcttcgccggtttttctatatgagtggagaagacagctgttaccagggaggtc

SEQ ID NO: 878246 - DNA, 99 bp, Homo sapiens
agaaaatcagccacaacacccggaggttccgctttggactgccttcgccggaccatgtcttagggcttcctgtaggctaccaagcagtttctcgaagag

SEQ ID NO: 878247 - DNA, 99 bp, Homo sapiens
ctcattgctctttggcgactcttattggactttgcctcccgggccaaactggcagttcaaaaactagtacagaaagttggattttttggaattttggcc

SEQ ID NO: 878248 - DNA, 98 bp, Homo sapiens
agctgctgactcttttcagagctggccacgaccagggccactcgctctggtgggaccctcgtgcttgtggggctgggctctgagatgaccaccgtacc

SEQ ID NO: 878249 - DNA, 99 bp, Homo sapiens
tggacctcagaccagagtggcaggctccaccgaggacaccgcgtccagcttgtgtggcgaggaggacacagaggacgaggagctggaagccgcggccag

SEQ ID NO: 878250 - DNA, 99 bp, Homo sapiens
ctaaaagccaaaatgggaaaggaaaagactcatatcaacattgtcgtcattggacacgtagattcgggcttctttaaaatactcagaggacaggatcac

SEQ ID NO: 878251 - DNA, 99 bp, Homo sapiens
gacagcaaacagagattcgggttctgccgcttatcttcaggagcgaagagctgcttctgtatcttaagccgtgctggtatagaggactctaagaagtgg

SEQ ID NO: 878252 - DNA, 99 bp, Homo sapiens
accaggaagcacctgactcagatgccgaggtggatggtgtggatgaagaggaggaggacgaaggaggtatctttaaaatagcttcctgggcagatctag

SEQ ID NO: 878253 - DNA, 99 bp, Homo sapiens
tacgcctctgcctttcaaggtcatgatgttggattctgttgcctgggtaccaccagagggaaagctggggcggtattgaagcccctgggtgataatttg

SEQ ID NO: 878254 - DNA, 99 bp, Homo sapiens
acatgtttgaggcccgggaatttcttcgaaaaaagcttattgggaagaaggtgtacattccaagcagagtggccctcatccttcagaatgtggatctgc

SEQ ID NO: 878255 - DNA, 99 bp, Homo sapiens
cttggcacctcttcaataggtgacattcaatgaggactctgtaagctcggttcggctggagggactgacttcagcatgaagcagtttgctgaaggctcc

SEQ ID NO: 878256 - DNA, 99 bp, Homo sapiens
ataggttatgaagctaatcctggcgttccaccagcaaccatgagtggttccatgatgggaagtgacatggcaaccacacctccaaatcaaggaaggcca

SEQ ID NO: 878257 - DNA, 99 bp, Homo sapiens
acttaaagtaaaacaaggtgcagagaatatgatacagatgtattcaaatggatcttcaaagcccccttacccaggaatggaacaacctccacaccatcc

SEQ ID NO: 878258 - DNA, 99 bp, Homo sapiens
cacctttcctcaggagtcatttctgttccgcacaggcctgctgaactgggtgctttatataggactcatcatattcagagcccccagatgttcagcagc

SEQ ID NO: 878259 - DNA, 98 bp, Homo sapiens
aagctggaggtggaagccaacaatgcctttgaccagtatcgagacctgggggacacagcgattgccacgcgccattggaatgtccctggccaaggagc

SEQ ID NO: 878260 - DNA, 99 bp, Homo sapiens
tacaagaccctcaggctggtagtgcgcaggatgaccagtgtcccagtgaaggaacgagtgaaggtgtctcagaactggagactggggcgctgccgagag

SEQ ID NO: 878261 - DNA, 99 bp, Homo sapiens
gactttggtctggctcacgaaatagaagatggagttgaatttaagaatatttttgggacgccggaatttgttgggtacagctcgcagaaagaagaaggt

SEQ ID NO: 878262 - DNA, 99 bp, Homo sapiens
ctccccacaccaccgaccaggacctggtgaagctctgtcaaccgatctgggattggcacaagactctgctaccagcacaaagagcccaatccttcttgg

SEQ ID NO: 878263 - DNA, 99 bp, Homo sapiens
gctttacttactgcggccgcccggctcttgggaaccaaggccaaagaggtgctgaaaaaatatttggagtccaaggaggatgtggctgatgcacttcta

SEQ ID NO: 878264 - DNA, 99 bp, Homo sapiens
atgaatccagcctctaaggtgatagctctgaaagtcggatatgttgcggtcactatctaacacaaaacctacagtcaatgaacatgacttgttgaaatt

SEQ ID NO: 878265 - DNA, 98 bp, Homo sapiens
gaagaagttagaagatgagttccccggccgcctggacatccctcaggcccctggacatcgagtttatgaaacgcctgagcaaggtggtcaacatcgtc

SEQ ID NO: 878266 - DNA, 117 bp, Homo sapiens
gatagtttggtgaaccaggaagtcctcacaccgggtcagctcttccttatgttcctgaaggaactgcctcctgagcgtggagcctgccattagcaccaagcacctcccttaccagag

SEQ ID NO: 878267 - DNA, 99 bp, Homo sapiens
ggataatagtctactgtccaattctgtttactctgaattaccatcagctgaagggaaaatgaagatatgattctataacagactcttccagaaatgata

SEQ ID NO: 878268 - DNA, 99 bp, Homo sapiens
gcatgacatctaccaggtccccccgtccatggacacacgcagctgggagggcacgaagcccccggcaaaggaacttgctactaccagcaccatgcccta

SEQ ID NO: 878269 - DNA, 136 bp, Homo sapiens
gtgaggagagagaatctgtatgcctctcctggggctgtatcagttgggtcaggtccctgatacagccccaggagaggcatacagattctctctcctcaccacgcggctgctgctggaggatggaggaggggtggtg

SEQ ID NO: 878270 - DNA, 99 bp, Homo sapiens
cgggacttcgcttcccgaccactatcaaggacaggccctggcgctaatccagcagtagcagggcttcccatggatgggtgagagaaaacttgagagaag

SEQ ID NO: 878271 - DNA, 99 bp, Homo sapiens
ctggggtacacctggacaggtgtatgatgtggaggaggtggatgtgaaagatcctaactatgatgatgaccagatgggaaagggctccttcaagtatgc

SEQ ID NO: 878272 - DNA, 98 bp, Homo sapiens
tggcccagcagatggagaatagaccctctgtccaggcagcattaaaacttaagcagttgctgccaaacaaggtgaatccgacccagagaggaaagaaa

SEQ ID NO: 878273 - DNA, 98 bp, Homo sapiens
cctggagcatgtgacacgggaccgggtgcgagggggccagcgacgccggccaccaacgagagtccacctgaaggagggactctgtaagctcggttcgg

SEQ ID NO: 878274 - DNA, 99 bp, Homo sapiens
agcctgtgaccccagcgtgggtgaagataggatcaagatggccatgtggcagggtgaaattgatcttcaaattctctccaaagttcaggctcaataccc

SEQ ID NO: 878275 - DNA, 116 bp, Homo sapiens
cagctcctgaacaagacatggaaggaaatgagggcaacttctgaagacttcaacaagaactctttcatcaatctaccaacagcccttaccaacgagcttgactggccccaactctc

SEQ ID NO: 878276 - DNA, 98 bp, Homo sapiens
gggaccttaacaatccacctaagaaattcagaggttaatgttgaagaaggaaaatgcggaagtcgtcatttgacaagttttataaatgagtatttgaa

SEQ ID NO: 878277 - DNA, 99 bp, Homo sapiens
caactccattgccacagcctcccccaccaacacagctgttgccaatacacaatcaggctgtgattgggttattatacccctgcattgacagacatctag

SEQ ID NO: 878278 - DNA, 99 bp, Homo sapiens
taccaggcgaagctggccgagcaggctgagcgatacgacggagcagtgaggagaatgaataccttccaagaccagagtggcagctccagtaatagagaa

SEQ ID NO: 878279 - DNA, 99 bp, Homo sapiens
ggacctcaaagtgggacaatatcctctgtggagaacacccccccatggaggcgaggggtctagagatgatctaagcaccaatggaggatttcaaagcca

SEQ ID NO: 878280 - DNA, 99 bp, Homo sapiens
gttaacaaatgtgagattgccaggtacaagaatattccacagatgtcctttgatgatacagaaagggagccagatcagacctttagtctgaaccgggat

SEQ ID NO: 878281 - DNA, 99 bp, Homo sapiens
caacctgaggctgccccggccgcctgcgcacccggcagcaccatgacaggtgctggagaatctggtaaaagcaccattgtgaagcagatgaggatcctg

SEQ ID NO: 878282 - DNA, 98 bp, Homo sapiens
gcaaaggctgctctgaagcgcacgacctccgactactttctccttcaagctattgacctgaaaagtggttctggaaaagtgtaccaaggccctgcaaa

SEQ ID NO: 878283 - DNA, 98 bp, Homo sapiens
ggaggaactgttcagtcaggtggggccggtgaagcagtgcttcgtggtgactgaaaaaggacttgagaccaggagacgtatccagcaagcggaacctc

SEQ ID NO: 878284 - DNA, 99 bp, Homo sapiens
ctctgtgcctcagtttctccatcccaaataggtcacaattttgtatttggtcagctcttcgcttagcacctttaccccaccgtcagtgatctggtttac

SEQ ID NO: 878285 - DNA, 99 bp, Homo sapiens
gtaacatacagcactttgtggagaaagtcgtcttccacttgcacgaaagctttcctaggccaaaaagaggtacggaatggccacatcaaaagaatcact

SEQ ID NO: 878286 - DNA, 99 bp, Homo sapiens
ctgcatctttacacttctccatggccccaaccaacaccgtccgtgcaggcctgaggctgggatcccgtgctgcttcccccgtctctgcctggggtttca

SEQ ID NO: 878287 - DNA, 99 bp, Homo sapiens
tcggcaacagactcttccatggaggagatctttcagcacctgatggcctatcaccaggttctgtcagtgtgtgtggaagaagaaaacataattccttac

SEQ ID NO: 878288 - DNA, 98 bp, Homo sapiens
gcagttattggcaggctgccatgacaaccaggcaatgctggatagataccgaattcttatcacaaagaaatcctgccagaaacctgtagacaaatata

SEQ ID NO: 878289 - DNA, 99 bp, Homo sapiens
ggctgatccaggacctgtaaacttcatggttcggctttttgtggtgattgtgatgtttgcctggtctatagttgggtcttgctctgtcacccaggctgg

SEQ ID NO: 878290 - DNA, 99 bp, Homo sapiens
gaggtcagagcgccccatggtgtggtgctgcctctttgtccgttcgcaggacttggaccctctgtggaacacccgagtacctagcccccgaagtcattc

SEQ ID NO: 878291 - DNA, 98 bp, Homo sapiens
ccaaatcagtctgaaagtacctgctatgaagtggcgctcctgaggattagtccaaagagtgatattactgacactggcctggcacagagcaacaattt

SEQ ID NO: 878292 - DNA, 99 bp, Homo sapiens
ttgcagatcatcccgatgcacccatgtcccaggtgtatggagcgccacatctcctgagattatttggtacaggtttgcagattccgccagcagcacagc

SEQ ID NO: 878293 - DNA, 98 bp, Homo sapiens
agcctcccaagtagctggggttacagccagaatacaagattgctgaccccatctgtacatacgtattttcattacttgtggcttttacaacatttcga

SEQ ID NO: 878294 - DNA, 98 bp, Homo sapiens
gacgccaagccaagcaaattgtttcatcagcaaagtttgtcagaggaatggctgtgaatggatgcctggaaggaccatcctctaattttctcagttgc

SEQ ID NO: 878295 - DNA, 99 bp, Homo sapiens
tcgcccaacagcagcaaccctatcatcgtctcctgtggctgggacaagctggtcaagcaaaccagtccagctacgggggcccagccagccagcagctga

SEQ ID NO: 878296 - DNA, 98 bp, Homo sapiens
atggctagcaggaatgcttactgttgcgtggttcgttattaacagggatcatagacggtatttctatgtaaacgaacagtcgggcgagtctcagtggg

SEQ ID NO: 878297 - DNA, 99 bp, Homo sapiens
cagaattgactataacgttgaacagtcctgtatcaaaactgaagatggtttgaaacagcttcacaaggcggctgttgaagagtgaacttggatcattca

SEQ ID NO: 878298 - DNA, 99 bp, Homo sapiens
gaaatcctactccacccataggaagacccacgtccacacctactcctcctcagatgcgtctgttactagagtggagagtctaccttcgtctcacatgtg

SEQ ID NO: 878299 - DNA, 99 bp, Homo sapiens
cgacgaaattagccagctccgcctggaagagagaagggcacagttacctaagtatcaacgtaatcttcctcggccaggacaggcccccatcggtaatcc

SEQ ID NO: 878300 - DNA, 99 bp, Homo sapiens
taggaccttccaatcagccatctacatcagctcgtgcccgtcttattgatcctggctttggaatatataagagaggaaaatatgatgttcccaagtggc

SEQ ID NO: 878301 - DNA, 98 bp, Homo sapiens
aaatgaggaagtgccacctcctctcccacctgaggaaccccaggtggatgttcccaaggccttgattattgttgcagttcaatgtggctgtgatggga

SEQ ID NO: 878302 - DNA, 99 bp, Homo sapiens
tcagcatgagcaaaaactccaaactcctctccaccagcgccaagagggttggggtctgctaggtccccggaatgagttgtttgacgcagccaaataccg

SEQ ID NO: 878303 - DNA, 99 bp, Homo sapiens
atggccgcagtcggcaaggagagacgtcgctgaggggcttgcctgaagcgaggggttgttgatcattatgaaaatcctagaaacgtggggtcccttgac

SEQ ID NO: 878304 - DNA, 102 bp, Homo sapiens
tccgctcccccgatcctattcccagtcgtggctgggtataagtaagcaagaagagggcctgggagaagagtctgacgagcaaggggaaggtagccaaggatg

SEQ ID NO: 878305 - DNA, 99 bp, Homo sapiens
cgcgagcctccttcgccgcgccccacttgctcgtgcactttacacacatgaggactgatcctttgaaatactccagccatgactaaaagagaagcagag

SEQ ID NO: 878306 - DNA, 99 bp, Homo sapiens
ggaaaacatgacgtctccagccaaattcaaaaaggataaggagatcatagcagagtacgatactcaggtcaaaggaaggatcagaatgttctctctcca

SEQ ID NO: 878307 - DNA, 99 bp, Homo sapiens
ggacgagggcaccgacgccagggacgtcttggagaacaagttgctcccgttgagaagaggaatatttcactgctacatggagtactcccgactgcgtgg

SEQ ID NO: 878308 - DNA, 99 bp, Homo sapiens
ctactacagtcgaatggccaactatcggaacacgagcgagattcctctggttctggtgggaacccagggtaagaatgattgatgttggctgatattgga

SEQ ID NO: 878309 - DNA, 75 bp, Homo sapiens
tcacctacgggcctgatcaaacttgccttcctgttctccaagaccagcccacagcccccatcccgtagcccttcc

SEQ ID NO: 878310 - DNA, 99 bp, Homo sapiens
gcgcccaccgccggcggtgatgcggctgtgaagccctagtcgcacccaatcaatgtgagacgagaccccagcatccctatctatggactccgacagtcc

SEQ ID NO: 878311 - DNA, 99 bp, Homo sapiens
tctaacatcacctgcttcatccttgtttaatgactttggtgccctcaacatctctcagagacgaaaggaagacagtgagcgctactctcgtagatccag

SEQ ID NO: 878312 - DNA, 99 bp, Homo sapiens
acctggtgacctttttggagggaaagaaagagccctggactgtgaagagtgaggagaccatagctgcacagccagcccggcaccttttttgctccctga

SEQ ID NO: 878313 - DNA, 99 bp, Homo sapiens
caatacaaaaagacacaatgtgtcccagccacttttcccctggtcttcaatgccagaatggtgtttgaaaagtttggatttaggtggcgagtagaaaaa

SEQ ID NO: 878314 - DNA, 98 bp, Homo sapiens
gcgcatgagttcctgcggtacaccatcgacgccatgcagaaagcctgcctgaatggctgtgccaaggggaacctcttcacccggacactgagtgatat

SEQ ID NO: 878315 - DNA, 124 bp, Homo sapiens
agtagatgccagtccctcaaccttgcaacgatgggatctgctttcaactcgatgtaattttcaaagagtctttgatctagttctttcaatgaggccatgctaacagttctgcgtctggaaagtt

SEQ ID NO: 878316 - DNA, 99 bp, Homo sapiens
caataagtcgcccacgtgtccggcctcggtggctcctgccagccgggtgagctctgcagccgctctctgtagagcctgggaggctgaggcaggagaatc

SEQ ID NO: 878317 - DNA, 99 bp, Homo sapiens
gaaggaggaaactatggcctccaggcttccgacggcctggtcctgtgatgctttcattggatttggaggaaatgtgatcaggcaacaagtcaaggataa

SEQ ID NO: 878318 - DNA, 99 bp, Homo sapiens
tccgacgtctggccgtgagacgtttcgggagccggagtctctccaccgcagacatgacgaaggaacatttacctggtaaatcatttaccttttggacat

SEQ ID NO: 878319 - DNA, 99 bp, Homo sapiens
cgccctcgccttcgcctccgcctccgtagactatgccagttactaccagggcctatgggattgccatggtgaccagccagatgaactgtccttccaacg

SEQ ID NO: 878320 - DNA, 99 bp, Homo sapiens
agagctgttcctattcggacatcttggctcctcccgtggtaacgggacactgattggcgcgtcggcaaacgtcgtgtgtgcagggattgcagaacagca

SEQ ID NO: 878321 - DNA, 99 bp, Homo sapiens
taatggatgttccagtatttaaagctattcaaccagatccacagctccggagcaagccccagccccggcccggccataccagggcgtccgtgtgaagga

SEQ ID NO: 878322 - DNA, 99 bp, Homo sapiens
acggagctgggcgacgagctgaccctgggagacatcgacgtctgcgctcctcagaccaccggcaggtgaacagcctgatgcagaccgaggagtgcccac

SEQ ID NO: 878323 - DNA, 99 bp, Homo sapiens
tttaccatctcatctcaagaatggagggtaaaataccatgaagattttgaaaaaacaaaggggagaggctttactcccgtcgtggacgatcctgtgaca

SEQ ID NO: 878324 - DNA, 98 bp, Homo sapiens
acctcttcaaccaggagccgagatttctgttgctctgaagaattatatccagatcgagagacagaagattctgaaagggttcaatgaaatgagagtca

SEQ ID NO: 878325 - DNA, 99 bp, Homo sapiens
tcccggatgttgcggacagtatgaggcaagcgcagggggacggggaccagcagctgtcgccgccgctctcaggagaccaagacacattccaccccagtg

SEQ ID NO: 878326 - DNA, 99 bp, Homo sapiens
ttcacgatgtttcccttggtcaaaagcgcactaaatcgtctccaagttacttgctggacagaagaaaagctcccccttctggacatttgaatactacca

SEQ ID NO: 878327 - DNA, 99 bp, Homo sapiens
tagaccatcatttcttcaggataatgagctcagacatttaatccttaagggtatgttggagctagaggctgagcatgaccaggacctgagtaaacagga

SEQ ID NO: 878328 - DNA, 99 bp, Homo sapiens
tgaaaatggacgagtaatcgcctgctttgattcattgaaaccagcagccagcttcgggtgtagcctattctcatccaactacagttgctagctacactg

SEQ ID NO: 878329 - DNA, 99 bp, Homo sapiens
aaaggatgtgtgtgggtctaagatgtgaatggtctggaacacggacctggtggagaccctggagctgcagaacctgatgctgtgtgcgctgcagaccat

SEQ ID NO: 878330 - DNA, 99 bp, Homo sapiens
tctttaactgcttggccgtgcttgccctgtcatcccacctgagaaccatgctcaccgaccctgtagatgacattaatgctgataagaatatctcttctg

SEQ ID NO: 878331 - DNA, 99 bp, Homo sapiens
ggcttcgatcccttctctgatttgctgtcagccatgaacggatggatgtgatgcctgctagccaaaagggcagaggttgaaaagataattgcagttgcc

SEQ ID NO: 878332 - DNA, 99 bp, Homo sapiens
attctcctgcctcagcctcccaggtggggtggaagacaacccgtgagtattacaccttcatgtgggttactttgcccattgacctaaacaacaaatcag

SEQ ID NO: 878333 - DNA, 98 bp, Homo sapiens
agccagtggtgctgcgggtgttcttttggggtagtgtctgggatccagtacgagttgaatcattgttcaaataagctgaagaaatcaggggagaaacc

SEQ ID NO: 878334 - DNA, 99 bp, Homo sapiens
gtgctgtggaacaaccagctcacgcacacaggcatggccttcctgggcatgacactgactgactttatggcctttcaccaagaacatgaagtgcgtatg

SEQ ID NO: 878335 - DNA, 98 bp, Homo sapiens
tcagagacctgactgtggagatggcggctcagaagataaacgaggggctggaacacctcgccaaagcagagaaatagcaagaaaattggatgtatatt

SEQ ID NO: 878336 - DNA, 99 bp, Homo sapiens
agaacaggaccacagggttgatatgaaggcaattgaaccctataaaaaagttatcagccatggggaacggaaagatgctgaaggatgggagaccgttca

SEQ ID NO: 878337 - DNA, 98 bp, Homo sapiens
aggttcttcaaggcagaataattgcagaaaatcttcaaaggcagttatacttaagcatgaacattgacgacaaactggaaggattgtttcttaaatgt

SEQ ID NO: 878338 - DNA, 98 bp, Homo sapiens
aagagcttctgtctcgaaccttcaccactaacgatgctgacagacagcaccaagaagtaattgcaatttatcggacacaccttcttagtgctgcacag

SEQ ID NO: 878339 - DNA, 99 bp, Homo sapiens
tcaatgaggaagggatctgcacacagaaatgtgccctgaactggacggacataccagtggccatggcctcacaggccaaagcatcagcaccagaacgca

SEQ ID NO: 878340 - DNA, 99 bp, Homo sapiens
caatgacgactgtgccatctgttgggactccatgcaggctgcgcggaaactgccctgtggacatcttttccacaatctttacctggtgaaaggacacag

SEQ ID NO: 878341 - DNA, 99 bp, Homo sapiens
tccagtctgagccacctgaggtcctaggattcaacgtgggcagaagtgctggtgggagatcgacggtcagggagattaaccgagatgcttgtcattttc

SEQ ID NO: 878342 - DNA, 98 bp, Homo sapiens
tatcgaagatgaagcaaaagaacaaattcagtcccttctccatgaaatggtacacgcagaacatgatgccgaatataccaactctcctttggtaccta

SEQ ID NO: 878343 - DNA, 99 bp, Homo sapiens
tattcagcatagctattcctgttgatggtgatgaagacaggttttaaatgcacagagagcaggatacaaggcagccatagttcacaatgttgattctga

SEQ ID NO: 878344 - DNA, 99 bp, Homo sapiens
cccaaagtgccgggattacagagacattttaaatccaaaggatgtgattagtgtccagctggaagacactacctcttgcaaaactttttgcagcctatc

SEQ ID NO: 878345 - DNA, 98 bp, Homo sapiens
agagatggtcaggtctggagctcgaccgggccagggtatcactgggatacatcagattggatgccaagcgttcctctgccggacatacaagagttccc

SEQ ID NO: 878346 - DNA, 99 bp, Homo sapiens
ctgcatcttgagctcaaaagcaaaacgcctgactttgttgttctggccatttgcttgtaagcttcttcagctactgcaaagatatgtggatccatatca

SEQ ID NO: 878347 - DNA, 99 bp, Homo sapiens
gtttaaggaatactgcccgatggtcttccgtaacctgcgggagaggtttggaattgatgatcaagatttccagatgttccagtggatttgatcgtcatc

SEQ ID NO: 878348 - DNA, 75 bp, Homo sapiens
ccaccttcatctccaccatcggtcctgagggagtctaacaagttagcagaaatggaagaaccacccttgcttcca

SEQ ID NO: 878349 - DNA, 99 bp, Homo sapiens
ggactcattattttaacatttgggagaaacacagccagaaggtattcaaagcaatgagtatcccacagatcagaaatccttcgctgcctcccccagaaa

SEQ ID NO: 878350 - DNA, 99 bp, Homo sapiens
gctgatctcgttgttggcgtagatggctgctgggttcaggagactgcagacctcggggggcaggaggtcatggcgacacccctggcctcctggtaggcc

SEQ ID NO: 878351 - DNA, 99 bp, Homo sapiens
tactccttgtacctcctgcaacccagaaccctggctgaccactttgaaggaggatgctccagcaggctcaggcaaagcaacgagctggcagagctggga

SEQ ID NO: 878352 - DNA, 99 bp, Homo sapiens
cccaaaactacagttctgtcactcacttacacagtattgggaaatctgtgaaagctctggatggacaaggaaaaagaggaaagcatgaaagaaaccctg

SEQ ID NO: 878353 - DNA, 99 bp, Homo sapiens
caggatcctgcaccgggtggtggctgggctgaaccttagccggccgatcgaggagcagggccccctggacgtcatcatccacaagctgactgacgtcat

SEQ ID NO: 878354 - DNA, 99 bp, Homo sapiens
gtcagagacagattcctccctatagacctcctcaacagggttaaacccatccagagtaatggctgcggccttacccaggaccctgggggagttgcagct

SEQ ID NO: 878355 - DNA, 99 bp, Homo sapiens
tgcaaagcctgcacaagctctgtgagaggatagaggatagggtctctctctctgccacccaggccagagtgcagttgacgcagggcaggggagccccga

SEQ ID NO: 878356 - DNA, 99 bp, Homo sapiens
taagcaagaaacacaggatgccctggatatgaacaagagaactgggcaacccatgatccacatctacctggacaaggaaacaggaaagcccaaaggcga

SEQ ID NO: 878357 - DNA, 100 bp, Homo sapiens
tttcttcagatatgtcgaaatgtcaacatttgacatagcttcaggtggcaaatgcatctgaagctatgtcaaatgttgacatttcgacatatctgaagaa

SEQ ID NO: 878358 - DNA, 99 bp, Homo sapiens
aaggaggccttccagctgtttgaccgaacaggagatctgcccaaggagaatccatatgaggatgtggacttaaagagccgaagagcaggacgaaaatcc

SEQ ID NO: 878359 - DNA, 99 bp, Homo sapiens
cttcctcgctgcagcggccctggcgggtgccctggctaccatggaccatcctgctggtcagcactgcggctggcatacaagaattaaattctgaataag

SEQ ID NO: 878360 - DNA, 99 bp, Homo sapiens
ctcaagagtcataggattagatgatccaagtcaccaagaaattactgtctcaagtgatacggtttgctggttggctcccgagcagacagcaggaaagaa

SEQ ID NO: 878361 - DNA, 99 bp, Homo sapiens
cgcacagctatcttgacccacccttggaagagagaagggcacagttacctaagtatcaacgtaatcttcctcggccaggacaggcccccatcggtaatc

SEQ ID NO: 878362 - DNA, 99 bp, Homo sapiens
gtcatggttctttccaacctctccactgctgtcttataagtctgcagcttcacagccaatggctcccatatgcccagttccttcatgtccaccaaagta

SEQ ID NO: 878363 - DNA, 99 bp, Homo sapiens
aactatagcaatctggttttcttgggtgaccaagaatatggcccaggtgaccaaagccctggacaaggccctgagcaccatggacctgcagaaggtctc

SEQ ID NO: 878364 - DNA, 99 bp, Homo sapiens
ttgactgtgtatactctacaatctaagaaggatttcagcaaatttggagcaggaaccagacgtcctgggtcctctccagcatggcagccctctactgga

SEQ ID NO: 878365 - DNA, 99 bp, Homo sapiens
ggctggtgccgcgttcctgctgctctgcctgctccacaagcggcgccgcgccctcggcctgcacgggagtccccgggccccaggctgcagactggtacc

SEQ ID NO: 878366 - DNA, 100 bp, Homo sapiens
ggaagcgtgcaaatgccagaaagaggtgctgcatgtggaagaggttaactgttacacaaaacgctctggccaaatcctctttctggcatttgcacgcttc

SEQ ID NO: 878367 - DNA, 99 bp, Homo sapiens
ctggttggaacgatgtcataacacttgtgtgacctcatgaatcgcatgtaaacaccactttctgagtcttctactgctgtggctgggttgatgctggct

SEQ ID NO: 878368 - DNA, 99 bp, Homo sapiens
ctcccttcagctttggtccctcggggcgtctgggcagcctacgctttccgatggcccactgcgtgaccttggttcagctgtccatttcctgtgaccatc

SEQ ID NO: 878369 - DNA, 99 bp, Homo sapiens
tggggcctgtgcatcctcctgacccacaggtgaaaggtgtagcagtcactcggcctacacccacagcatcgaccttgtgaacccagcgacctgactgcc

SEQ ID NO: 878370 - DNA, 99 bp, Homo sapiens
tggagttcaaacgcggccgcttccgactcagcctcttcagcgacctgcccgagtcctcctccgcctcctcctctctgcatgcgcgtcagagcccgtgcc

SEQ ID NO: 878371 - DNA, 98 bp, Homo sapiens
ccgactggagcaggcagcagcccaggggcccagatcattgatctgatgatgctggtcatcgatgtgaccaaggggatgcagacccagtcagcggaatg

SEQ ID NO: 878372 - DNA, 99 bp, Homo sapiens
agcctcgacctcctggactcaagtgatcctcccacctcagtctcccgagtagtcaggactacagccgattatgtttcgaggggaagtacgtttaaatgt

SEQ ID NO: 878373 - DNA, 99 bp, Homo sapiens
gctccgagaagtttttacaaagaacatgctcacatcttcaggtgcctcattcacatacgtcaaggaaattgaggaagaggagcaggacttggatggtga

SEQ ID NO: 878374 - DNA, 99 bp, Homo sapiens
ccaaagtgggaaacattgaaatcaaggggcggcctgtggtaatttgtgataaggaggatactgagaccattaagaacacaaaaagaacgatcaaggtgc

SEQ ID NO: 878375 - DNA, 99 bp, Homo sapiens
tactattacccccagtatctgcaagccaagactatctggcttcctggtgatgctcacgctttgctaagtgttggcggccatcgtggttttcgcatcctg

SEQ ID NO: 878376 - DNA, 99 bp, Homo sapiens
tcaactatgatatccataccctgcggcaggttcgaagggaagtaagaaacagatggaagtgcatcttagaagatttagctctatcgtccgagctttgtg

SEQ ID NO: 878377 - DNA, 99 bp, Homo sapiens
tgctcaggctgctcttggctctcaacttattcccttcaattcaagtaacagccatcgactacagtgacagcgccatgctccaagctcagcagctgctcc

SEQ ID NO: 878378 - DNA, 99 bp, Homo sapiens
aggggacttgggcccagtttatggcttccagtggaggcattttggggcagaatacagagatatggaatcagatgttccatttaagcagacctcttccat

SEQ ID NO: 878379 - DNA, 99 bp, Homo sapiens
agttgcggccctcggaccccaccgtgcccctgatggccgcgaaggtctgcatcgggtcccttcgctggaaaaaggtgcactgcctcaacatggacagcc

SEQ ID NO: 878380 - DNA, 98 bp, Homo sapiens
agaagtccagaaaaaagtggatcatgaattggatgacgtgtttggtcctcagaatggttggaatgaccctccagctttgaacagagtacccaaaaaga

SEQ ID NO: 878381 - DNA, 99 bp, Homo sapiens
caccgcccccgcccgaccatggccgagggctcctcctaggttgaatcagctgaggcagcacctgatgaagaaactcaggaagacagccccacatctcta

SEQ ID NO: 878382 - DNA, 99 bp, Homo sapiens
aaagcacaagaggtacattcaactggaataaacaggccaaagagaactgggtccttagcactattttacagaaagctgtttggggctcagctaagtgac

SEQ ID NO: 878383 - DNA, 98 bp, Homo sapiens
cctgagctaaacatctaactagaagggatacccttccatttcaaagaacagaatgctaaggaagctgtggcaaggaatgggtactgttcaaaaaggaa

SEQ ID NO: 878384 - DNA, 98 bp, Homo sapiens
ctgaacctcagccgggagctgctgcaggagagcgcactcatcagggcaaacttgaagataaatcttttgactccagctctttagaggatctaaagtga

SEQ ID NO: 878385 - DNA, 99 bp, Homo sapiens
gaaggcggctttagtggcagcatgaagcgcaccccgactgccgaggaacgagagcgcgaagctaaggtggagtctttcattttggatcaggatgatttg

SEQ ID NO: 878386 - DNA, 99 bp, Homo sapiens
ccttcacgctgctgtctgccgtgagcctgccccgccgggagcccaccgtctccagcttctatgtgaagcgggcgggaagtagaagcactatttaaagga

SEQ ID NO: 878387 - DNA, 125 bp, Homo sapiens
ctcagcctctccagcctcttgcgaccacagccagagcctcagcaggagcctgttctcatcaccatggcaacaggattttataacctgacagcgtgctggaacttctctgctggactcctggactc

SEQ ID NO: 878388 - DNA, 99 bp, Homo sapiens
tctcattatttattgatgataagctgaaaaagggagtcaaaggggttggactccatgaaagaattgcacaaaacaaatcgacagcagcatgagaaacat

SEQ ID NO: 878389 - DNA, 99 bp, Homo sapiens
agtcatcgatggcaccccctgtgaccagaacggcacggccatctgtgtgtctgggcagtgcaagacgccctgctggcggacttggagtctaccacctcc

SEQ ID NO: 878390 - DNA, 99 bp, Homo sapiens
tggattataaggatgtcatccccatggctgatgcagcaggcatcatccgctatgcaattggggagcgagcccagggcgtggtgctgaaagtgctcacaa

SEQ ID NO: 878391 - DNA, 99 bp, Homo sapiens
aaagaagttatgcttgttggaattggtgacaaaatcagaggcatactttataggtgaggaattttaaattggaacaagagcaagaaaaaaacaaaatct

SEQ ID NO: 878392 - DNA, 99 bp, Homo sapiens
gtcaggctttgtgtattcagcacagagactgaggatggtctccagacgctgtctctcctcttctggggtaattacacctgtttccttaaactttgattc

SEQ ID NO: 878393 - DNA, 99 bp, Homo sapiens
ctcctagccaaattgctcaactaagaccaagtcctcgctggactgctcagggtgccagacctcatcgtcatctaatacatgggagaaacatggattttg

SEQ ID NO: 878394 - DNA, 99 bp, Homo sapiens
gtggacgaatacgaccccactatagagagccagccctcctccctggccatgctggaccttctgcacgtggctcgggacattgcctgtggctgtcagtat

SEQ ID NO: 878395 - DNA, 99 bp, Homo sapiens
gccagcggagccctgggctggggcaggagccgggaatgcagagagcaaccaatgtcacctaccaagcccatcatgtcagcaggaacaagagaggtcagg

SEQ ID NO: 878396 - DNA, 99 bp, Homo sapiens
cctgggggtctctttccaaagtaggtgaccaagtccatcttctccctgggctcatccccagggacgaggcatccagtggggctgacatgggtctcgggt

SEQ ID NO: 878397 - DNA, 98 bp, Homo sapiens
cctgatgtcaccgaatggccacagcttgtaaaagaatgcttcagacatgcctgaaacaatcaccagccgggatgccgcccgcttccccatcatcgcca

SEQ ID NO: 878398 - DNA, 98 bp, Homo sapiens
ccaccgggtgctgggccccgtcagagatgccccttggtgtggccactgcaaggctctggcccctgagtatgccaaagccgctgggaagctgaaggcag

SEQ ID NO: 878399 - DNA, 100 bp, Homo sapiens
gatcgccgctgtgaagacctttgtccagggctttggtcacctgggccatattcttggtcacctccacagaccacaccatcgaggtcttcacagcggcgat

SEQ ID NO: 878400 - DNA, 99 bp, Homo sapiens
tgtcatcaaagccatcattcccatagccgtaattattatagccaccatagtcatcaaaacctccataacccccagtgagtccctgttccatgtcggtgt

SEQ ID NO: 878401 - DNA, 98 bp, Homo sapiens
cctccccgactcctaagtccttcggccgccaccatgtccgcctcggctgtcttcattctggacgttaagggcaagagatgaccaagcgagacgtgcct

SEQ ID NO: 878402 - DNA, 98 bp, Homo sapiens
gatgatgttgtgattgagtttatattcaaccagctggaagtgaaggatatgggccctcacattttccaaacctgtccatctgctaactattttgactg

SEQ ID NO: 878403 - DNA, 100 bp, Homo sapiens
aggcggtgacccgctcttgcaagcttgtatgtttctatacacagcctcttctaatcctgaaaagtgcttggcgatggccttccggtagcgggtcaccgcc

SEQ ID NO: 878404 - DNA, 99 bp, Homo sapiens
gagctggacagcctggatgggcggaaggacccccagcggtgcacgctgctggtcagccagttccgctcctgtcagtggctgcttcaacccccaactcca

SEQ ID NO: 878405 - DNA, 99 bp, Homo sapiens
aaacatctcctttttcgccatgtttgttatgtacttcttgactgccatttttggctacttgacattctatggtcgtcgtcccgcagacacacaatccag

SEQ ID NO: 878406 - DNA, 99 bp, Homo sapiens
cgcggacgagggtcgcagtcaaacccagcttacagtgggcctgcacgatggtgagcacccttcggaacatcttggctgtagtcccagctacttgggagg

SEQ ID NO: 878407 - DNA, 99 bp, Homo sapiens
tcctttcaggaaggagccattatttatgtcatcaagaagaatgacgatgacatatctgaagagatggattaagaatgctttggattaaggattgtggag

SEQ ID NO: 878408 - DNA, 99 bp, Homo sapiens
ttactttgagtatcgaaggttactgcggaatctcacagccctccgcatccgagctacatatggagaatacagcttcacaggctgctcaagaagccgaga

SEQ ID NO: 878409 - DNA, 99 bp, Homo sapiens
aaaaactagcacaatccaaagagacaaatggaaaccagtcaactgatattgatagtacattggccaacttcctagcgggaggttatattcaaaagaaaa

SEQ ID NO: 878410 - DNA, 98 bp, Homo sapiens
tgtgccaaaggctcctaaacatttaaaagcaggtctacttccccagcaggacagcatcattctcctatatcttctagacatcactcatcttcctcaca

SEQ ID NO: 878411 - DNA, 99 bp, Homo sapiens
aataaaaataaactgcttgaacatcctttgactggttagccagtggtctgcaagaagaatctggacagtaccactgtggccgtgcatggtgaggagatt

SEQ ID NO: 878412 - DNA, 99 bp, Homo sapiens
gtataatggcaacctgcaagacttaaaagtaggaggagaaagctttgcagaattcagatctgcaggaactgatgatggtttcaccgattttaaaacagc

SEQ ID NO: 878413 - DNA, 98 bp, Homo sapiens
gagaaccctccggcctcggtgctcgccgtcctgcggaaccgctggctgtcagacagcttcaaggagacgagccccagtcccctacccggatcccctgg

SEQ ID NO: 878414 - DNA, 99 bp, Homo sapiens
tgggcttcctgccatcaccgatgtgcctaggcgcatttcagactgcacagcaggcatcttcatcctcacccagcctgagtggaacgtcgtattctttct

SEQ ID NO: 878415 - DNA, 98 bp, Homo sapiens
agctccggccgcctggctccccatactagtcgccgttgattcgatgtcatcagtcccgtggtggagcctgtggagacaacattcagtcttatactgcc

SEQ ID NO: 878416 - DNA, 99 bp, Homo sapiens
gggcctcaacttcggcagcaaggaggatgcggcccagtttgccgccggcatggccagtgccctagaggcgttggaagaacgctgcgatgactggggact

SEQ ID NO: 878417 - DNA, 99 bp, Homo sapiens
gcaccttggcgaagccttgggtttctttcttaaaggactgatttttagaactccacatttgaggcagctgagtatgtcccagagaaggtgaagaaagcg

SEQ ID NO: 878418 - DNA, 99 bp, Homo sapiens
gagatatggcgcaactgcggcgctactatactggcaattgctggagaagattttgcaattgttgcttctgatactcgattgagtgaagggttttcaatt

SEQ ID NO: 878419 - DNA, 98 bp, Homo sapiens
tgagacggtgtcccgccgaaaggcaagaagttccacatgagggcgatttggatataatttttcaggatggtgcaactaaaaccccagatgtcaagcta

SEQ ID NO: 878420 - DNA, 100 bp, Homo sapiens
gactcatttgttgtaaaatagtagcaactattttggtaccattgccacatcttaggacatggattacatctgtggtcttaatgctacactgagcaggagt

SEQ ID NO: 878421 - DNA, 133 bp, Homo sapiens
ggcggccgcagtggcgtcctggagccctcctcaggtgagctggagctgcccggctcggcagcgggaaggtggtgaagaaggtgaagtccatgcagatgttccacatgcccatcacttcagccatgcaaggaga

SEQ ID NO: 878422 - DNA, 99 bp, Homo sapiens
cgtggccaatgactcgcaaccactcaccgtctacttctccctgagcctcctgcagatcatggacgtggaagaaggtagataatgactataatgcccttc

SEQ ID NO: 878423 - DNA, 99 bp, Homo sapiens
tgacacttacctccgagacgctcataggcaggtcttcaaacatgaactagcttacttattggctggaattcttggagcagcaatagattattggatttt

SEQ ID NO: 878424 - DNA, 99 bp, Homo sapiens
accgcgaccagacaggcggcgccatcttcgaacttagacttccggaaggactttggcgaggcgcctggccacttatggcatcactgttgctgaactgac

SEQ ID NO: 878425 - DNA, 99 bp, Homo sapiens
ggcctctccagccatgatgaactgtggattctccacagttttcctcgtgcgtactcacggtggaatccgatgtgcattgaagcgaatgtatgtcaataa

SEQ ID NO: 878426 - DNA, 98 bp, Homo sapiens
gcaccggcccggggagaggcaccatgagcggatttctctctgatcaaacggacagttcaggactcagaatctaaggatgaatgttcaccgtggcagtg

SEQ ID NO: 878427 - DNA, 99 bp, Homo sapiens
tccatttctcctattgaggagtcaacaaaaatatgtcgtaactgcaagtgtggccaagaagagcatgatgtcctcttgagcaatgaagaggatcgaaaa

SEQ ID NO: 878428 - DNA, 99 bp, Homo sapiens
cattggtaaattgatcaggatttttggcctaccctccaaagaaaaggtgattttacaacgagatgctgctctccatagggatgctcatgctgtcagcca

SEQ ID NO: 878429 - DNA, 98 bp, Homo sapiens
tcagacgccggcgctgccgcggcgcccaacccaggtccccgaagcaagcctcctgatttaaaggtgggaatgatggttagatgctgccgaacatacga

SEQ ID NO: 878430 - DNA, 99 bp, Homo sapiens
ttgaaaatggaagagtaattgcctgctttgattccctaaagaaataccttgtaactgtaatttcctgaggctgcatatccacagggccaactcagggga

SEQ ID NO: 878431 - DNA, 99 bp, Homo sapiens
agtctgcacaggtggagttaaacaggccatagccaactcgcccctcacccagggtctgcacagacctcaccttttgccgttgaataagcgttcccacga

SEQ ID NO: 878432 - DNA, 75 bp, Homo sapiens
aggccccagggctctccaattagcaggttatcctttacggttctccacactctttcaggagcagcagaaaatgaa

SEQ ID NO: 878433 - DNA, 99 bp, Homo sapiens
aagtttggtataggagatggcaatttgcagtattacctgtacaattggaggtgtccaggtacagattctgaaaaggactccctggaggaaaagcggaag

SEQ ID NO: 878434 - DNA, 98 bp, Homo sapiens
gcagctccccacgctgcatcatgagtgcagccggctgcaggagcagctagcgcaggacagagcgggatgccaccagcttgtccaaagggaagttccag

SEQ ID NO: 878435 - DNA, 99 bp, Homo sapiens
tccaagcagcaaaatggatttgtctgtagcatgcttttcacttccactgcatctctcgctggctcaaaacacgacaggtgtgtccattggacaacagag

SEQ ID NO: 878436 - DNA, 99 bp, Homo sapiens
ggcgcttgagctcgagcgacggcgctggcggagacgccggctgctcctcccctccccgccgagttgctttaatgtgaagtattttcctggagtcacttc

SEQ ID NO: 878437 - DNA, 98 bp, Homo sapiens
catccgctcggagatgatccagcgcaaagctcaaccaactcttccgaaacagcagcatcaagagttatttttctgactgtcaagtttcaacattcagg

SEQ ID NO: 878438 - DNA, 99 bp, Homo sapiens
cccgcctctgcgtctttgctcccggagcgcttgaaggagctgcggacgttccatcctcagagcagcctgaactgttcctaaagaaacttcagcagtgct

SEQ ID NO: 878439 - DNA, 99 bp, Homo sapiens
cttgtataaaataggctgagatatagtgactgtaagctgtgatctcagtatacaaagggctggtggactaggcctcaattttgtcggtgccaatgttgt

SEQ ID NO: 878440 - DNA, 99 bp, Homo sapiens
ccatctccatcacccaccaacaacaccacaataatccacagccaagtgtgcaaagatccaccttacaaagtagaagaatctgggtatgctggtttcatt

SEQ ID NO: 878441 - DNA, 99 bp, Homo sapiens
aaataccatgcagatttgtatgttaggtgggcgactcaaggatttgattttctacaagcaattgaacctgcctttatttcagctttaccagaagatgac

SEQ ID NO: 878442 - DNA, 99 bp, Homo sapiens
tatcttccatgttttacatttctttccagaattatacaatatttgattcatgatgttgctatcaaaagttgagaaattgtcagaagaaatcatggagat

SEQ ID NO: 878443 - DNA, 98 bp, Homo sapiens
ggtggtgggccaaatcactgtggacatgtctacgtaggagctggtatgaggatcacacaatgcaagcaaataaaatgagaaaagatgattcaacaaga

SEQ ID NO: 878444 - DNA, 99 bp, Homo sapiens
ccaccactgaggacccatcaatgttatagctgcaatgattttggcatgcaggactccaagtgcccagtccttctcaaaatcctctttgtttttaggtgg

SEQ ID NO: 878445 - DNA, 99 bp, Homo sapiens
catcttgcctcaagtttctttcaccgcagtgggctaccataaacacatcaccttgatttttaatcccacgtagagacaagttttcaccgtgttagccag

SEQ ID NO: 878446 - DNA, 99 bp, Homo sapiens
atacatttggcagaataaatgaaccaggaaacccttttccaaagagaaatgaagaagaaaactgtatgtaccctaaatatgggagataagaagtatgaa

SEQ ID NO: 878447 - DNA, 99 bp, Homo sapiens
tcagatttctatgttcctgtctctgaaatgcctgaacacaagatccagtcatctgggggcccactgcagtggttcaatgcacagagaaagacgcaagtt

SEQ ID NO: 878448 - DNA, 99 bp, Homo sapiens
atccccggccagaccccgccggttgcctctgctcagcgtcctgctgctgccgctgctgggcggaatatatatgtcccagatgtgaatcaggctttattg

SEQ ID NO: 878449 - DNA, 98 bp, Homo sapiens
tccggactctggtgacaatgggatactccacagaacacagcatatctggagtcagcgaccccttcctgcagcaaggatggaacattactgtggacctg

SEQ ID NO: 878450 - DNA, 99 bp, Homo sapiens
gtgggaccatgtccagccctctccagtgtatccacagccccgacctttgatgagaactcagctgtccagtgcacagccagagaacaacacatcacacac

SEQ ID NO: 878451 - DNA, 99 bp, Homo sapiens
actcagcctccagaaacggtccagaactggattgaattacttagtgataattttccccagatggcccatcagaagcggttcatcgaacggaagtacaga

SEQ ID NO: 878452 - DNA, 98 bp, Homo sapiens
ctgggagcagctcaatttggacacccagcggctccagcaggagaaccatgagctccggcgaggcctggcagcccgaggagccgagtgggaggcccggg

SEQ ID NO: 878453 - DNA, 99 bp, Homo sapiens
ggactgcccgtgtggagggaggtcaccatggagctgaccaagctatccgaccagactggctacgtggagtactacagagtcttgctctgttgcccaggc

SEQ ID NO: 878454 - DNA, 99 bp, Homo sapiens
tctatcaagctgtagtggatgcaaggaaattattagatgaattgtcagacccagaatcttcatttcagtctgatggaagcaaacaagaagataaagaaa

SEQ ID NO: 878455 - DNA, 99 bp, Homo sapiens
gcgacagagtgagactccgtccccacgtcggctgggcaggatgctgggaggtgtggggcctgggtaggtatcctggggactggggttcatcacacttgt

SEQ ID NO: 878456 - DNA, 99 bp, Homo sapiens
ggagctgctccgtggccacgaggacgtcaccatggtgggccccctcctgctcccccgaaccgctcgagtattggaacagttgtgctgctgccagcgatc

SEQ ID NO: 878457 - DNA, 99 bp, Homo sapiens
cccaaatcacctgtacttggtcatgcagctgacatgtattcctctgagaaaccttggacagcagattttggtttaatatctgattgggacaacattcag

SEQ ID NO: 878458 - DNA, 99 bp, Homo sapiens
gttgcaactgtggggcccatttctgttgctattgatgcaggtcatgagtccttcctgttctataaagaagtcattgaagactctccggaattcagattt

SEQ ID NO: 878459 - DNA, 99 bp, Homo sapiens
gttgaagtcgattgccaacagtgtatgctcgaaatcctggatactgcagggacagtgcgtcagcaatttcctgctcctcttggttggtcaggcactgaa

SEQ ID NO: 878460 - DNA, 99 bp, Homo sapiens
gccacagcaccaaatgccaaagagccactcatctgtagagcttgctgtgctgctggcggaatctgcaaacctgtacctttttgaagagacgctgtaggg

SEQ ID NO: 878461 - DNA, 99 bp, Homo sapiens
gaaagcggtgcagacgggaggaaggagtctccccaggacagtgctatcacccgggatattaaccgaacattcccagcccatgactactttaaggacaca

SEQ ID NO: 878462 - DNA, 99 bp, Homo sapiens
ctaagagtcacccaaacaatcggctgagaatgagaagagagatggaatttcaccgtgttgcctaggctggtctggagctcttgatctcaagcgatcctc

SEQ ID NO: 878463 - DNA, 99 bp, Homo sapiens
cattgggcaaaaacttgtgagggcgaaggtcgtattgaatggtgttgtagtcgtgatgagaggagatggattgaaaagcagaacagagcaacaagagca

SEQ ID NO: 878464 - DNA, 98 bp, Homo sapiens
ccaaccccttcgagcaagacgtggccctaccacttatgtcttggatgaagatgaacctcgattccttgaagaagttgattacagtgcagaaagtaatg

SEQ ID NO: 878465 - DNA, 99 bp, Homo sapiens
gaggctgctgaccagaagaggtttagtgccctcctgagtgactgcgtcaggcatctcaatcatgtgaagctgtggtctaccaatctagacaactcagtg

SEQ ID NO: 878466 - DNA, 98 bp, Homo sapiens
cctgccgcctcgctgtccctgcggcttctgggggtttcatcgtccataacgaagagtgagactatttggaaacagagactgatcatctttgggggaag

SEQ ID NO: 878467 - DNA, 99 bp, Homo sapiens
gtaggattctcctgtgtgagaactaccgctcccatgaagctatcatcaaacctggcgcactgtcatgcctacctggtagaaatgagccagctcctgcaa

SEQ ID NO: 878468 - DNA, 99 bp, Homo sapiens
gctgcctgccagaatggaagcatacagatctgggaccgaaatttgactagtactattaatcccgtagatgcaatatatcaacctagtcctttggaacct

SEQ ID NO: 878469 - DNA, 98 bp, Homo sapiens
aagcagatccagaagatggaaaacctgtgatggataaagtcaagggtgtgctggaccggttttctcaaattcagccaaagctcatcttctctgtggag

SEQ ID NO: 878470 - DNA, 98 bp, Homo sapiens
gggctttaccatctttgtggctgtgcttgccaggcctggctccacttgaaatggcgattgaaaacctccaaaaaagcgaaggaatcacatcacacaaa

SEQ ID NO: 878471 - DNA, 98 bp, Homo sapiens
aaggacttcatgatccagggcggagacttcaccaggggagatggcacaggagcttcttggacacttaatgattgttggcaagaaatgtgctgctgatc

SEQ ID NO: 878472 - DNA, 99 bp, Homo sapiens
tcactttagaccctccacctaattgcaggtgctggagaatctggtaaaagcaccattgtgaagcagatgaggatcctgcatgttaatgggtttaatgga

SEQ ID NO: 878473 - DNA, 99 bp, Homo sapiens
ttgagtcgggaaatggccgctgtgtggttgcaacggagataaattcccggaaccgcgattcggcgtgtcaggttatcccatcatcaggtagcaagttga

SEQ ID NO: 878474 - DNA, 98 bp, Homo sapiens
tgtagtctacgctgacatcaaaactgttcggacttccccgttagaactcgcgtttccacttcagagatctggggccagtgtcattcaaagatgtggct

SEQ ID NO: 878475 - DNA, 99 bp, Homo sapiens
ggttgcgatgctgctgttgctcagaaccacaaaatcattgtttccattgctcatagccatgctccaatttcttgactctgtaatcccaacactctggga
